United States Patent Application Publication US 2024/0301379 A1 - sequence listing, part 12

SEQ ID NO: 22217 - protein, 996 aa, unidentified
  REGION 1..996: note = Cas Enzyme sequence
FKKHKDFDWRAYLTQANEAKLWHLFYSISDKKELERALDNENSKLGLPIEIRQELKKIKPYKNDYGALSEKAIKKLLPLMRLNKNTEEIKLEYKNRIDNIFYRLDEINQDKTKISEVGDDDITKGMLKSFCGFGKKYSGLKLHQASYIIYGKHAEANDTNVWKTPAHLEKFIKDFKQHSIRNPIVEQVVTETLRVVHDIWQYYGKGKENFFDEIHVELGREMKNPADKRKRMTDKINKNQNTNQRIRVLLQEFKNQNIEGVIPESPNQQEKLRIFEDDVLSQFSEKELEKQEGVNISKILKSKEPSTKEIEKYKLWLEQKYISPYTGQVIPLSKLFTTEYEIEHILPQARYFDNSLNNKIICESEVNRFKESQTAFEMITKNSGRIIDLSQNKSVKLFSIEEYQKHITQHFAKGSTKQKILLSEDIPENFISRQLNDTRYISKLVKALLSNIVREENEQEVTSKNVVAVTGNITSFLKKDWGLNDKWNEIVEPRFIRMNEITNSNDFGYFDDKKGFFRTDVPTELKKDFNKKRIDHRHHAMDALVVAVATKNHVNYLSNLHAKSDNSRFDLRDKLRRMEEKIYKGEKRKYAKEFLMPWNGFPVEAKKCLEDIVVSFKQNLRVINKASNKYQIKKKGKAEIKTQEGTNWAIRKPMHKETVYAKVDLRHKKSIAINAAIDGFMKNKFVFVDKELKQKIKNLVQLSYDNKMIIRYFKENKFKNKKLKKVEVYYQDNYFSAVRKTIDESFKSKKWIEESITDSGIQKILSNHLEKYNETDENDKIKERPDLAFSEEGLIEMNKNIVGLNGGKNHKPIYKARVYETFGNKFAVGQTGNKKDKYVEAAKGTNLFFAIYQGKNIKGAEVRQYETIPLNIVIERQKQGEDSVPEKFFDKDKCEYSLLFHLSPNDLVYVPTKEEQEDINNIYFGNLSLEQKMRIYKIVSFTGNRLYSISYNVAKSIFDKNEYTLLNKVEFTDERYSVKETCIKLKVDRMGNISKP

SEQ ID NO: 22218 - protein, 1427 aa, unidentified
  REGION 1..1427: note = Cas Enzyme sequence
MKYRIGLDIGIGSVGHTLLKIDGGKKEILSMGSRIIPMGSDKSDYEKGVAISKNATRTTQKGIRKSNKRYKQRRNKLIYVLYKLGMLPEQVQFKNGIPEANKIQKLDLLPIKKGTMQLNSQSNLELRVNAITKPLEDIKDFGKILYRFNQLRGYSGGGLNDVENKKNEKENDEEDHNKRYVVEILKSEIIEIEKMDTTFKYKNQDLPWYKIVALIDDEEVIGKTKLQDLATGEKELEVRIKTDKKGNKTYEFGLPRKTNWRKQMEATEELLKTKKVFISELLLDDLKNMGKWSKIRNRVILRNRYKEEFDKIWETQAGNFEILNNCPTSLLEEIVNYIFPGSSQSQIKLRNGALQKGLKHLIKEQIIYYQRPLKSQSDLIRNCQFEEAEKVTATSHPLFQEFRCWDQINRLFITSKKMVFNDRKKKNVYQYENKFLSDEQKLEIYNKLQNQKQVGFSDVARIVGLKSDKSEFLNGLNVKAKVKGCDTIISIKKILKSFEINLDEIPFCFYDEVWDSLYNVSGNEYDVNSDKIKSLQTILEQHKVKNSETISLKLAQNIKFPRKYSNLSLKAIQEILPLMQFNPKNVSEKVTLKFQNILHLLETGEVFNEETYEDYILEFVKNNKNALQKGGLMYAFASSLVYGKHTAKQIPKEIIDYHQIKYAQRNLRNPVVEQILNEVMQVVKSLWKKFKINPEELEFRIELARGLKNSAGEREKIYKAQIKNRQINDRIKERLIELRQEVTPGNIDLYKLWSNQSIIEFPKISKEPTQEEIQKLRLWEEQGCISPYSGNPIPLSKLFSPERLYDIDHIIPKSRYFDDSLSNKVVCETNINEEKGNRTAWEYISAQNSKYQIMALENFIGNVNDNYFGKKKKNLLLEKIPNNLIDRNLKDTQYISVAIKNELAKIVGSENVKTSTGEITAFLRGKWGLRKLLMELTEDRFKRMELWDWDSEAHQTRQEWVTKYFDKEKNKNIYEIKNWSKRYDHRHHTIDALVIALTEQSFIQRLNNLNKELQKWLSINKDKIHLDVKEGETELEAFFNLKEKERDEIQKQIEGFRYVEKPIDDLIEQARKHLETMIISHKKKDKLSVKSIEKDGKTEKQLKIRAALHEATYYGKTLGVDTKTIDISVLSAKDIPKIIDEVLRKEIDAHRKKYDSMKEAFSGEGLIAFNENRFQTKNPEKIKPPVYKIKVRYNSKENAESNLQRLYDDNDKKSVVTGDNYLFLVMEKQDKKGVSRTFDIASLYDSVIIAKEALKNKKENFKEIIAEDFRIKHTEKPQRVLFTLQQNDLVYMPTDAEDPILKFNQSEFDDWYKDLSNKKLFSKQVYKVVKFTGKDCFFIPHNFASPINVPKNLSENDKLKLKEVYKDKKIPKTELNFQEFSSFGNCSKVEVGESFIKNIKGIDKIPERKIQDYCIKINIDWLGKVKL

SEQ ID NO: 22219 - protein, 1006 aa, unidentified
  REGION 1..1006: note = Cas Enzyme sequence
SLVLSNEAKGRLYQLFDSRAKVSTSSILRELKLSEKEYRLNYASEKEFLGNETKSIFRKIFKEHGIKEAGEILLADSKKRAKLWHIIYSLDDTKNIQSTLRNPKHGFNLPESVIAHLSKIPDLPKQYAAFSSKAINKMLPLMRCGQYFDPENIGEPIKDRINKIITGEFDVNINDETRKKLAALTDIQFLQGLPTWLASYVIYGRHSEKETEGKYTVSTEMDILKLIPNNSLRNPIVEQIIKECLSLVKDIWERYGHPDEIHIELSRDLKKTAEERKKTDDQNKINEAERRRIRTILRELPYGNPDSLADIDRLKLWEETGNEIARVGAVKFSKEPTKSEIEKYKLWGEQNHISPYTGKVIPLSKLFTPEYEIEHIIPRSRYFDNSFVNKTICETYVNDFKGHRTARNLIETDGGRTVTHKGHTFTLLTPEAYYDHCKQTFRGPKHRNLMREDIPTDFIQRQLNDTRYITRKLAELLYPIAKEKEGIVFTIGQITNELKDKWGLNRVWKEILRPRFERLQEITGEQLIDLDEKTNNIHFKKDYKRVDHRHHSLDALVIACTTREHIRYLNSLNATEESSKYRYLVKTRYSDFVLPWETFTKDARRQLNEIIVSHKNRNRLVNKAINKYTKWVQKPDGRCVKELVRQEKGKLLSVRKSMFKEPFGKIHLREYSDVSIKQAIALQREFLISKTRNIAPQVADKHLRHTINEIIKNSEFDLNEADKFLKKHSIKDIEGNTITKIKILEFKEYAAKRVALDSSFTEDKIKNKIPNVEHSWLAKLLLEHLQEFNNDPTEAFRGEAMDLLTRKAGRPINKVTTYEKIGKKSNFAGKLVEADKGTNIFFAIYEHLQTKERIINEDSSVPMLDAIERLSNKWPVADDKLGYRTIILSPNDLVYVPEEAENVSIIDWTKEKDRLQRRIYKMVSCSKNTCYFIPHFISGLLLPYDSKTQKGEFGSPNKSEKSLDEIMIKNVCIKIKVDRLGNIIEANGKKIVQPALTEQRSYESVI

SEQ ID NO: 22220 - protein, 1098 aa, unidentified
  REGION 1..1098: note = Cas Enzyme sequence
VISSRHESSYYLVQLQIPYEMSHTLGLDIGTNSIGWCLVEDGKGIVAMGSRIFPVGVKEDSYAKSGTEESRNAARRTARGIRRGYARYKLRRTELEQLLTANGMMFDKTVSLPTKQLYSLRRDALDRKLELEELGRIFFLMNQRRGFKSNRKEQAKGDEEKKLTATKQAMRDFEARMHAAGCRTAGEYLATLFDDLPENWHNENEPKERIRERQRVRRELYQQEFDLIWEKQQQYHPQVLTPELKHQLRDRVIFFQRKLKSAKHLVSKCRFEPAKHVVPRSHPLFQEFRILQALSNIRITDRDRVNDLLTMEERDALAVQLGQAEKVNVSLIKEWLDYPRSARINDLGDLRGHTTWSRIRKAVGDDWFEEQSKEARLKLWHTLYFAADEGWIEEYAQRALGMNDEQAKRFAEVNLELDYGSISHKAAQKILPFMREGYDFAGACEQAGYHHSQNELDNPARELKDKLTGADIDELRNPLVQMTVNETARLVSAVIKQHGRPDMVRVELLRDLKKPKAKRETMRRDMLAKEKQRDAYRDFLKEKGIISNPYPSDIKKFELWLELEYSESDVTRLSPDMDLKAFKKFAEAVKPADKEKYRLWLECERISPYTGKAIPLSALFTEAYHVEHILPYSRSLDDSFANKTLCEDAVNTEKGNLTPLEYYEQKRTADELKAFKQRVKNFSEGKLAKFLATEVKDDFLNSQFTNSAYIGTEVRKLLRKAFKDVRVTNGQLTGLLRNKVWNLNTLLNTADGQKNRDDHRHHALDALVIACTTQSLVNRISRESQFDFRGVQRVPDVGLPWNTFRVDAAEKLNAMLVSYKGGKRLLTTKTNKYRHSMAHEGKPEKWQRTKAVRGPLHEETLYGRITLQHKGSKEETYVVRKALTSLTKPEQLENIVDPVVRKTVQDHVAKHGSLKEALKMPVYMPVKKENESKLVPIKKVRLRTNAEELVELRPGTYVEPGNNYCIAIYEDRRGKRDFRTINFLEASKRALHKQPIYPSELDGKQLLMTLQQKDLVILYDEHQDEIQWHDPNWLANHLYMVKSFDRIGAIRMVLHKRSNANPNFPKLYPAGTTYTKKVSSFRGVPVAVDALGQITKVQ

SEQ ID NO: 22221 - protein, 1432 aa, unidentified
  REGION 1..1432: note = Cas Enzyme sequence
MKTILGLDIGSNSIGWALIEQDINNNTGKILGMGSRIIPFDSDLIKNFEAGRSASLAAERRKFRQMRRLKSRYKLRRERLIKVFKVLGWFPENFPEKFDKLNHFNINEYVPFSQESIEEAKKVFNVDNLPIDWTIYYLRDKALKQKITLSELARIIYHFNQRRGFLSTRKTEEIDTLKQGDEEQNDKSKEILYEYLKVEEIIDTKEKVGNKNKFKLIATSPDNIKYEGSITRKDLPKDWIGKTILFEIKKTTLKSGEVKIEFNRVLESDWKKQITALEKEIVSSGLYVGQYHFKNLLADPNYRVKEKVVSRKFYQEELEAIWKKQAEYHPELNDTSKIPLIAETLYPHNIQKQRELSKLNLLEIIKDDIIYYQRPLKSQKKLISECRFEKKNYIDDLGRQPGYKVAPRSSPLFQEFRIWQDIHNLRVYLKEKKLDDGSRIFDVEETNFLLDTKGKEKLFDLFDSKTNIKIDDILSALSKPDYPVSKKTHRINFPEDREFKGNETKAKFRNAFKKFNYNEGEELLQDRNKLFELWHIFYSIDEEKVISSVLQKKFGFSQELADYISQLEPFKKEYAAYSSKAIKKLLPLMRCGKYWNQEDISDDAIERINKIISGELISEFLERVREEISKRNFKTIQDFQGLPVYLATYIVYGLHSERENYEKYDNPDEIKVDKLIPNNSLRSPIVEQVIRETLKVVQDVWKQFKQPDEIHIELARELKNNAKIREQLTKAMLENQKERKRIVEILKHIKNANPNSEKDIEKLRLWEETATPEHKKAMPKISTNPTSKEIEKYLLWGEQNHISPYTGKVIPLSKLFTNEYEVEHIIPRSRYFDNSFANKTIAEASVNKFKGDLTAYEFISSYGGTIVPGTKIKLFTLEKFKQHIDGIFKGKKKGYFLKQEIPKDFINRQLQETRYITRKLGELLYPIAKDDIVFTTGQITAELKENWGLIRVWKEILKPRFERLEKILGEKIITINKETNEIIFNIEYDKRIDHRHHALDALVIAATTREHIRYLNSLNSANQEDLIKIKYQLVKKGIREFRLPWPSFTKEAKEHLNSVIISFKKKNRLVQRGYNKYQKWVFENGKWVKKFVLQDRSKLIAIRKSLFKEPLGIIHLASYKDVPLNEAIRLQFEYLTNFKNHLQPRIADKNLRHKVNQLIKNCSFDLNETLNYLKQNPLKDNKGNELKKITILYFEEYAAKRVNIDESFDLTKIDKIPYANHPNNRIVKILKEHFSEYGNKTSEAFKGEGLEKLYKKFGIVIRKVTRTENIGNKINLNGKLLEIDKGGNVFFIIYQNIHDPYDRIITEESSISILDVIDAYVQGKKISDLGENKAGYKKIILSPNDLVYVPDDGEVIESIDWNNRKVLSNKIYKVVSFTGQSIFFVPHFISKPIIETKELGSNNKSERDWKGKMIKDRLIKLNVDRLGNVYPE

SEQ ID NO: 22222 - protein, 1500 aa, unidentified
  REGION 1..1500: note = Cas Enzyme sequence
VLTFNPGVGEEKNVEYSFAAQRTSKRSIRRLYQARKYKLWETLEVLRRNGYCPISEEGLNQWRWYKKSEGYFRKYPVNDVAFAQWIKLDFNGDGKPDYTSPYQLRQELINEKLDFSQGINKHKLGRALYHIAQHRAFKSSKKVNLAEDLDSDKEKIGAERKREGELTKKLNDIGITQWKTVGDAFAQAEIIHRERKEGRIRNNLHTSVVRKDLQKEVQEIFSYQDLRFGSIFKNGKGEELEISQSPIFWQRPLRSQKGTIGKCTLEPSKYRCPVSHPAFEEFRAWSFLNNIKYRIKGQKESDWKQLDLETRRELYNEKFIGRQKPNFDFLEIYQWLMKRNKHDNWDLNYNFKTNVAACPVSAQLRAIFGNDWKNVRIPHLPHKNPERQKDYYDIEDIWHVPFSCDDEDFVQDFAENKLGLDEAQTKKYLALWNSMPVDYGQLSLKAINNILRFLRKGRIYTEAALLAKLPEVLGEELWAKKEDLLLSSITDVIEINRHTKKKLSIVNNLIAKYKVDPYFADNDFKYTLQDSDHSDVVNSCEEAYGKITWGEMPEAIKANTLHFITAEYQNFFNDSKRQFKKLPHLLDSMKLFLTDNFELTPQQVKKLYHPSQIEIYPPAKPQLIDDRELLLLGSPKTGAFKNPMAMRALHELRKLVNYLIKTDQIDEHTRIVVELARELNDANKRWAYEKYQQKRKEENAEFAAAIRELIKDSDAAGSKVNPDSVDDIDKFRLWYDMLQGEDAKIGEEKSGVFTENTIVSKTKKNKGNDEEYEEFKQNDFERLNKALYFKLKKAGEDVVKKYKLWKEQNCLCFYTGKSISITQLFKENSIDFEHTIPRSQSFDNSLENLTVCYADYNRKIKKNQIPFHLPNYREEAYGYSAILPRLEKWQQRVADLERHIEYCKAKSKRASTKEEKDKAIRQKHLWQFELDYWRGKLHRFTLQEVKSGFRTSQLVDTQIISKYASHYLKTVFNKVEVQKGSITADFRKIFGIQPLDERKDRSKHSHHAKDAMVLSAIPTTALREQILGVWNELEEQRALLKGCETFERNKVTDRINVLERELNELLKKCHVPNVNTAIEKLDDEIIINNRTTDQTLSPAKRKLRSRGKITPVKDKMGNTIYQTDENGQPKQLYKNGKVIFKNDHFGKPLLDKEGNPIPVLLPKEKWAKGDIIRGQLHLDTFYGKIRPAKWDENGRPLRDEKRDFIYGETNNGFRFVLKREVNKDFDIDTIVDPFLKNMIIKQLNGRSIDKAIKEDGGLWMLDKKGNRVNKIRHIRCFADDVTNPLAIKKQTNVSSKDYKNDYWAKSGENYICALYQNVKTDKKGNPIKKEGREVFEREIEILNLMNVAISKKASESGELIIYKKDKNGMEIINEVGSKIAPYAILKKGTKVLFYKESIDELKELQAQELNKRIYKIKKFYGSQITFDYHLEAREDTELSKAFLGHGKKGKNGFTEDFFDFEKLNGGKPWHRLLYTKGDFNFAIEGKHFEMMPDGKINWNI

SEQ ID NO: 22223 - protein, 1440 aa, unidentified
  REGION 1..1440: note = Cas Enzyme sequence
FENKKGQFINNAEIKFNYIETVSKKSEFLFKDSFSEMIEEFKQVQPNLFYKRKSSDETKIPYDWTIYYLRKKALKEKIRLEELAWILLNSNQKRGYYQLRGDEVDEQEGKTKTFEVLEVERIVDSGDKIKGTDDVLYDVYFSNGWKYDKQIVKTENWQAKTKEFIVTTSTNKDGSIKHSFKAVDSEKDWIAIKKKTEQDIWQAKKHVCEYIYDTLLSDPKQKINGKLVKTIERHFYKKELTAILGKQKEFHKELQDDKLLNECINELYPNNYAQQNILKQKDLANLFVDDIIFYQRPLKSKKSLIDGCKYEVRPMKDSNGDLSKDDNGIQITKPIKVIHKSHPLYQEFRLWQFIENIRILQREKNIDGKVNIDYDVTSEFLLDIESKVKLFELFNDREKIKQSVFLGQFKDNSGKKISESDYRWNYVEDKEYPLNETRALFIKEFKKHKDFDWRAYLTQANEAKLWHLFYSISDKKELERALDNENSKLGLPIEIRQELKKIKPYKNDYGALSEKAIKKLLPLMRLNKNTEEIKLEYKNRIDNIFYRLDEINQDKTKISEVGDDDITKGMLKSFCGFGKKYSGLKLHQASYIIYGKHAEANDTNVWKTPAHLEKFIKDFKQHSIRNPIVEQVVTETLRVVHDIWQYYGKGKENFFDEIHVELGREMKNPADKRKRMTDKINKNQNTNQRIRVLLQEFKNQNIEGVIPESPNQQEKLRIFEDDVLSQFSEKELEKQEGVNISKILKSKEPSTKEIEKYKLWLEQKYISPYTGQVIPLSKLFTTEYEIEHILPQARYFDNSLNNKIICESEVNRFKESQTAFEMITKNSGRIIDLSQNKSVKLFSIEEYQKHITQHFAKGSTKQKILLSEDIPENFISRQLNDTRYISKLVKALLSNIVREENEQEVTSKNVVAVTGNITSFLKKDWGLNDKWNEIVEPRFIRMNEITNSNDFGYFDDKKGFFRTDVPTELKKDFNKKRIDHRHHAMDALVVAVATKNHVNYLSNLHAKSDNSRFDLRDKLRRMEEKIYKGEKRKYAKEFLMPWNGFPVEAKKCLEDIVVSFKQNLRVINKASNKYQIKKKGKAEIKTQEGTNWAIRKPMHKETVYAKVDLRHKKSIAINAAIDGFMKNKFVFVDKELKQKIKNLVQLSYDNKMIIRYFKENKFKNKKLKKVEVYYQDNYFSAVRKTIDESFKSKKWIEESITDSGIQKILSNHLEKYNETDENDKIKERPDLAFSEEGLIEMNKNIVGLNGGKNHKPIYKARVYETFGNKFAVGQTGNKKDKYVEAAKGTNLFFAIYQGKNIKGAEVRQYETIPLNIVIERQKQGEDSVPEKFFDKDKCEYSLLFHLSPNDLVYVPTKEEQEDINNIYFGNLSLEQKMRIYKIVSFTGNRLYSISYNVAKSIFDKNEYTLLNKVEFTDERYSVKETCIKLKVDRMGNISKP

SEQ ID NO: 22224 - protein, 1183 aa, unidentified
  REGION 1..1183: note = Cas Enzyme sequence
GKTVGQYIFESLLENPKQKVRGKLIATIERKFYKEEIIKILKEQIKQHYELQDTNLYKKCVEELYPNNEGHKNNISSKDFEYLFIDDIIFYQRPLKSKKSTIGNCTYEIREYCKNGETILKPLKGIPKSHPLFQEFRLLQWLHNLRIYQNEKVVDGKTKINVDITNDILSSIPEKNEFLNFLKTKGEIEQKHILKYFNLDASNYRWNYQEDKKFPCYETRAEFIRRLKKVDGIDNPLNFLMSKTKIGNSENPMELSIEAQLWHIIYSVKDRELYKKALTTFAEKFNIQIDTFVSAFEKHPPFKNDYGSYSEKALKKLLPIMRFGKDWRENDITSEIKELVTKIQQKLENINYNKELFKEDKNNILSKQIDNETPKQLLKSFVDFKDKNHLENLNTYQACYAVYKRHSEVGEIKYWKTSKDIDKYLIEFKQHSLRNPIVEQVVTETLRVVRDIWNYYGNGEEGFFDEIHIELGREMKNPSDKRKKISEFNLENERTNSRIRTLLTELINDGAKPYSPSHQEILKIYEEGVYQNPEANFNHVSEEDILKIRKQKSPTKSDIQKYKLWLEQGYRSPYSGKIISLSKLFSLGYEVEHIIPQSRYFDDSLNNKVICETCINKNKDRKTAYEYIKEMGGSIVDGITLFNLEQYVAHCKKYFNKNTPKLNNLLSEDIPEGFINRQLNDTRYISKFVKGLLSNIVRTENEQEVTSKNLISVTGAITSKLKQDWGLNEKWNEIIQPRFERMNELTNSNDFGNWDYQKDEKGNNIGKRFFRLQTPDEDLGKLNKKRIDHRHHSLDALIIACINRKHIQYLNSLNNENIKRELQLGLLKRNSNGYFTKQFIEPWGGFISEAKNNLENIIVSFKQNTRVINKTNNKTWQWVEENGQLKKKLVKQEIGDNWAIRKPLHKQTIYGKLNWSAPNGKVITANRVPLSEIKSAKHLEKITDSGIKKILINHLKNYLDDKGNENYELAFNYDGIEELNKNIIQLNFNKFHQPIFKVRLYEEGKKFSVGETGNNESKFVEAEKGTNLFFAIYWNKEKQKREFETIPLNEVIDHQKWRATLPKEERNNTSIIPIRNNRDFLFSLSPNDLVYIPSEEEIENPHNVDFDDLNKEQITRIYKMISSSGNQCFFVKNVVAKSIKDKFEFSSLNKMEKSIDGKMIKEFCWKIEVDRLGKIIRHWNHHD

SEQ ID NO: 22225 - protein, 1439 aa, unidentified
  REGION 1..1439: note = Cas Enzyme sequence
MKILGLDLGTNSVGWALVDKQEGRIIGMGSRIIPMGKDKQDYEKGLGISKSGDRRTKRTIRKMNKRYKLRRNKLLFVLNELGMLPDQFQFKYGIPEPNKLQQLELLPIPNKREYDSNGRRLDRKYEGNKKIKCEPNSIINYELRVKALRHPVELKEFGKILYQFNQLRGYSGGSNNDDTRSVENEDNEDSEIRKYEVFTRKVEILKVEQTDKTFKSRRGTTQGQEFKKFDVTILLDGDELVCETELQHLKEKEGQEEELEIRIKRNKKGETTSVTIAAPQKTNWRKQMEATEEELTRSNLHVSELILKDLRENKWKKIRNRVFLRQRYQAEFDAVWETQSKAHPILNSCPPEVLEKIANYIFPGKRKSQEELRQAAINNGLKYIIKDQIIYYQRPLKPQTDLISNCQFEKDQKVLATSHPLFQEFRCWDQINRMYITSKRESFNEQKNKKIYQYTDRFLSTKEKLEIYDKLQIQKQLSFSEVAKIVKLANDNSEFLNGLHVKAKLKGCDTRISIQKCLGEHFQTLLSNAPHIVENIWQAVFENSNNGSEYDPNSPKVASIKSLLSSLQNDKLETELALKLAQKIRFPRKYSSLSEKAIRNILPLMQPNPTKIPEKIIRNFQEIQHLVDTGEILNGKLWEDYVISFVKGNPNALTSGGLMYAFASSLVYGQHTAEKISPQYGHYNDIKFQKRNLRNPVVEQLVNESMQIVKALWKQYDLNPKELEIRIELSRELKNSAAERNKIYKAQIRNNRANEAIKKRLEDENIPTTDENILKYKLYEQQKYISPYSGKPMEVSMFSSYEIDHIIPKSRYFDDSISNKVLVEGYLNKEKANRTAWEYITQQISSYKILSIEDYIKHINDNFYGKKKKYLLLEKIPTNLIDRQMKDTQYISVAVKNELAKVVGSEKVKTTTGEVTSFLRSRWGLRKLFMELTESRFKLMELWDWDIENNKPKLPWVLRYFDNEKQKHVYEIKNWSKRYDHRHHAIDALVVALTEQSHIHRLNNLNKFPQDELAKRKEELNLEIENGESILEAFFRLEEKRRSEILEKMESSRYFDQPFEDLINQARTLLEAMVISIKTKDKLGITTDQFDENTPHKQLNKQLRIKGALHQETNYGKSKDPNTGLSRSTKTVELSKLSAKDIPNIIDKVLKEEILTHRKKYGTNKEAFTGEGLKAFNENRFQRKDPSKLKPPVYKAKVWYSNKDEENSSLQRLYENNEKLSVVPGDNYLFIIMEKAGKRVFDIASLYNSAQLAREALNDGGENFKRKICEDFRQMHKQKPDKILFTLQQNDLVYLPENNEDPVSKMNDQEFSEWISNIENKKKFSSRIYKVAKFTGGDCFFIPHNYATTISVPKDLSQEQRAALERRFADKKIPKSELNFVEFGSYRDCSPFESGEIFLRSLIDKKNSKKKQRAPLKIQDHCIKLRVDWIGNISLHRGI

SEQ ID NO: 22226 - protein, 1435 aa, unidentified
  REGION 1..1435: note = Cas Enzyme sequence
MDKKIIVGLDVGTNSIGWAVIERDIENEYGKILGMGSRIIPTDSDLLSKYETGQAASKNANRRQARGARRLRQRYKLRRQRLIECLKILGWLPEDFQPGHQLPISDETLKELAVAFGSQEVSADWVIYFLRHKALTEQVSPQELARILYHMNQRRGFKSNRKSGNQIPSGDGEESEEGKRKRVKTVEIVTIKSITDTGEKVKGNSLFAITLADGRTGEIQRKTKPDWEGKEMELEITWVPPTKKDPARYEFRPLNNSDADKWAKQKLAREEAIRRSGYQYPGNYYFHELKANPRYVIKDVSIDRQFYIAELEAILHKQIELNPALNNRHKINEIAKRLYPKNTEKQKEISSNDLVHLFVKDLIYFQRPLKSKKSSIADCRLAFKNYRDPSTGKKIAYKAAPISSPVFQEFRIWQTVNNIRILQRESRDANGRLQFEKDVTEMYLNVEVREKLFELFDAREKVTQKQILKTIGLNDDAYLVNLYRMNEEKELPGNETKTLIRRQFKRAGIEETGEALLQDAEKFYKLWHILYSLDEEAAIQSALQRQFALSPEQAAIIAKAPPYKQQYGSLSHQAMSRLLPLMRCGKYWKWEAIDSTTRQRLENVFTGEFDEGIPDRVRELFIKHQITSQEACQGLMVPMASYAVYGVHSERNAAYYEKPEQLIPKEPLNLRNPIVEQVVNETLHLMHDIWVKYGRPYEIHIELSRELKKNAEERKELSATRAANENENKRIAAILRELKWGNPNSLADIERLKLWERQAGEKAREEFKNIRFKKPSEPTKDEIQKYKLWAQQKFLSPYTGNPIPISKLFTREYDIDHIIPRSRLFDDSIENKVVVEANLNQKKDNQTAFEFIRKCGGAGEIFSVAEYETHVNKFFYGKKKRLLLSEDIPDSFANRQLVDSRYISRKLHELLAPVAENQRDPVIATTGKITSELRSSWGLGELMKKLVRWRFDRLSEKTNELFAWEEDELDHEEKPTGRKILRLKGYEKRIDHRHHAQDALVIACTTRSHIKYLNDLNALQYRKEAKDEELERQLPKLLEPGKNNYLQSRKFRKPWPRFVADAAEAIEGIIVSFKNNIRLYGKKVNKNWRYIQQPDGTYKKELKPVIDENGQKKLSPYVRQSLHKATFAGKIQLREYKDVSLSEALKSPATVANENERKHLQQLVQNAGCDLKKVQKLYKENPLKDSNGNELKKIRVMYMAPYYVNRVELSSGFDEKRLGKIPDKVLRNDLRQHIKDIEQLNASRSKDEQIDPFSAEGIEIFNRNRAVPVHKIRIKEESEAKFEIRPGAFTEADKGTNLFYVIYENVNDPSDRKFESIPLRTVIEAKAAGSDFVEERPGYRWFTLSPNDLVYLPDEGEPIATIDWSNTKSLSRKIYKMVSCTESQAFFVPHTISKIIVDKVEFEKKNKMERALDGRMIKQHCIKINVDRLGNISRQ

SEQ ID NO: 22227 - protein, 1536 aa, unidentified
  REGION 1..1536: note = Cas Enzyme sequence
VHFFAQNVHLSDFLCIFAAQIALKNIINENINSMAKILGLDMGTNSIGWAILDTDEKKFLKTGSRIIPMDAATMGDYEKGNLESAAKARTGFRGMRRLYERSKLRRQRLLRVLNILGFLPEHFRNHIDFDNRLGQFKDDSEPLIAHYRDNNGKMQFLYRDAFQEMLSDFRKHQPELIKDGKLIPEDWTIYYLRNKALTQPISGKELAWILLNFNAKRGYYQLKGEEEEDDVKPNKIEEYMTLKVDKVNQIEPNKKRQGYYWYEIIYENGCTQKATGPVPPRKAGDLVEVIVTTEIDENGNVKITKDGDKKIKLRAPKEDDWTLLKKRTEFEIGKSGCTVGSYIYQNILKTPETKIRGKLVRTIERKFYKDELYQILEKQKEYIPELQDTNIYKKCVRELYRNNEAHVESISSKDFTSLFVDDIIFYQRPLKSKKSLISDCPYEWRTYKNQETGEIEKEPIKCTPKSNPLYEEFRLWQLLSNLRIFKREIEVDGKLRTDYDITSTLLKSKEDVANLYDWLCDKKEITQNILLKYPGFALKKTSDYRWNYVEDKAYPCCNTTFEINKRLAKVEKSPILEKESIKQLWHIIYSINDPTETQKALGSFARKHNIDEESFISNFKKIAFEKEYGAYSEKAIRKLLTLMRMGHHWNEEAIDPQVMQRINNIIDGVADDSISTRAREKSLSLQSVNDFQGLPLWLACYAIYNRHSEANDITRWQTPEDIDYYLQNHFKQHSLRNPIVEQVLGETLRVVRDIWKKYGKIDEIHVEMGRDLKKDAKGRQKAHDKVMENERTNLRIRLLLQELASPDMNVEGVRPHSPSQQEILKIFEDGILSDPSRNSEIPDDIRTIINDLGSAGKAEHISHSDVLRYRLWLEQKYLSPYTGQPIPLSKLFTTDYQIEHVIPQSRYYDDSLSNKVICESEVNKEKDRMLGYEFITQKGGMIIKGNGGKDIKVFDKEQYEDFVKQHYSGNRTKMRNLLMDDIPEGFVQRQINDTRYMSRKIISVLSNLVRDEDEQEATSKHIIPTIGSITDRLKKEWGLNDVWNDIIAPRFQRLNELTNSNDYGEWVNKEGKRYFQINIPLEISAGFSKKRIDHRHHAMDAMVIACCTRDIVNYLNNSLATDNKKDLRYDLRNKLCTKYKTDNLGNYVWVFNKPWETFTQDVKYQLQNIIVSFKQNLRIINKMSNYYQHYVDGKKVIDKQTKGDGWAIRKSLHKATVSGAVSLQRKKTVKLSEALKDWKSIADKELRNEIKRLITLYNGFDAKTITKYFKDREYKLGKRDISKVETYYYTSGKEALSATRVSIDVSFDEKKIMSITDSGIQKIMLKHLHNYDDAAGKSHPEIAFSPEGIATMNDNLKTLNDGKEHKPIYKVRKTETLGAKFPVGESAAKKKKLVEADKGTNLFFAIYADKDNSRSYESIPLNVAVERLKNHLPVADYTKGESKLMFVLSPNDLVYIPDMSGEVPDVLDISRIYKMVSFTGNELYFVGANVANVIKQGFEFGSLNKIQTLNSINLKSVCVKIIVDRLGFITKIYKDI

SEQ ID NO: 22228 - protein, 1518 aa, unidentified
  REGION 1..1518: note = Cas Enzyme sequence
MSRILGLDLGTNSIGWAIVQKDDEGSYNNIINAGSRIIPMDAETMKNFNNGITQTQTSERTRLRGVRRLLERSLLRRERIHRLLNTMNFLPVHYEEKIDFVNRLGKFIGEEEPKYAYKKDELGKAQFIFMNSFTEMLKDFQMHQPELVQNNKKVPYDWTIYYLRKKALDKAITKEELGWIILQFNNKRGYYQLRGEEDETIKEGKKEEYFALKVIRVEADNSSSGKNGEIWYNVFLENGWIYRRTSKIPLDWVGKIKEFIVTTDIDENGNALKDKEGKEKRKFRAPAENDWTLLKKKTESDLGKSGKTVGSYIYDTLLSNPDQKIKGGLIRTIERKFYKCELIAILNKQKEFHPELNDKMLYSKCVEELYRSNESRRLSVANYDFTRFIAEDVIFYQRPLKSKKSLIENCSFERRCFVDPETKELAYSPIKCIAKSHPLFQEFRLWQFIKNLRIIEREKMVGDTMKFDQDVTPEFFPTQEEYVLLFDWLNEHKEIDQKGFLKYPVLGLKKNIDKYRWNYVEDKAYPCNETRSVLKTRLNKAGNIPAEFFDKETEESLWHILYSVEDKYDIEKALTSFAIKKELNEEQKVAFVEQFRSFPPFKKEYGSYSAKAIKKLLQLMRMGSRWSENEIADLTKERIQKMIDGECDETIKIRTREKALKLNEIKDFQGLPLWLASYIVYDRHSESGDVLKWETPEDIDYYLKHVFKQHGLRNPIVEVVVVETLKVVKDLWKTYGYFNEIHIELGREMKNPADKRLKMTIQNVENENTNLRIKALLAELANQKDIEGVRPYSPSQQEILRIYEEGVLNMLTKEDPDYDAISKISKMAQPSASDLIKYKCWLEQKYRSPYTGQMIPLARLFTSDYEIEHVIPQSRYFDDSFSNKVICESAVNKDKDNLLAYEYIKQNEGKIIEIGLGKKVKLLTADSYTEFIQSHYAGSVAKKKKLLMDTIPDSFIERQLNDSRYISREIKKLLSSVVREKDEEEAISKNVIVCTGSITDKLKRDWGLNDIWNTIIYPRFERLNRLTNSDKFGQWENKQGKRVFQIEMPLELQKGFNKKRIDHRHHAMDAIVIACATRSHVNYLNNESAHSKSKDKRYDLRRKLRRIEILEKQELKDGVTVTKKIEVAKEFYKPWPTFTQDAHEVLQSIIVSFKQNLRVVNKATNRYECFVNGKKEIVKQSKGESWAIRKPMHKDTVSAAVSLRKTKTVRLSQAIEDWRNIVDKSLRKELGSLYSKYGEKGSKYIVKFFKDRENKHNGVDVTKVDIYYFDNDCAASRVTLDDSFTSSRIESITDTGIQKILLKHLASYNEIKGDKIIEHPELAFSADGLDTLNVNMTTLNDGKFHKPIKKVRTYETIGNKFTVGQTGNKKTKYVEAAKGTNLFFAIYVSEEGSRSFLTVPLNEVAERQKQGLIPVPEKNPKDDKLLFWLSPGDLVYVPSLDEEGRVIEIDNIIQDRIYKFVSCTGNVCDCIPHFVASPILQTIELGSNNKAQRTWSGEMIKDICIKIKTNRLGQIVKL

SEQ ID NO: 22229 - protein, 1248 aa, unidentified; identical to SEQ ID NO: 17472
  REGION 1..1248: note = Cas Enzyme sequence

SEQ ID NO: 22230 - protein, 1508 aa, unidentified
  REGION 1..1508: note = Cas Enzyme sequence
MRTILGLDLGTNSIGWAVINSVIKEQTEKIWIEMAGSRIIPMDAAILGDFDKGNSISQTAERTRFRGVRRLRERQLLRRERLHKVLKILGFLPEHYLKGIDFEKHTGKFLSGSEPKLPWVKDRWGKHSFLFQTAFNEMLADFAKHQPSLVFDGKKIPYDWTVYYLRKKALTEMISKEELAWILLNFNQKRGYYQLRGEEEEDNAGKSVEFYALKVLSVEATDEKKGRDIWYNVHLENGWVYRRSSNVPLDWEGRVKEFIVTTDLNPDGTPKLDKYGEVKRSFRAPKEDDWMLIKKRTEADIAGTHKTIGSYIYDALLQEPQQKIMGKLVKTVERKFYKEELNLILQKQCAFHAELQDRDLYMRCIEALYPGNEVQRRNIANRDFIYLLIDDVLFYQRPLKTKKSLIANCPYEENEYVNRKTGEIKTASLKCIAKSHPLFQEFRLWYFLSNIRVYQKEREVNGTLHLDVDVTTEFLKTEDDYVALFDWLNSRKEIDQKAFLRYPAFGLKKEINNYRWNYVEDKFYPCNETRHAILSRLEKAGIGIDFLSDEKETALWHILYSVSDKQEIEKALATFAVKNGLNESFVEVFKKFPPFKSEYGAYSAKAIKKLLPLMRCGKYWDMSLIDGTTKERIERIIAGECDESIGAKVREKAMNLSDISCFKRLPLWLACYVVYNRHSEDKKITKWETPADIDAYLAAFKQHSLRNPIVEQVITETLRVVRDIWKQVGKIDEIHIELGREMKNPADKRKRMTTQILENENANLRIKALLAEFVNPEYGVENVRPYSPSQQEILRIYEDAVLKGEEQIPEDIDVILKKFNTSKLPTKSEFLRYKLWLEQKYRSPYTGELIPLAKLFTAAYEIEHVIPQSRYFDDSFSNKVICESAVNKLKDNQLGYEFIKNHHGQKVEVGFGKTVEIFSVDSYERFVKEQYAKSGIKMKKLLMDDIPEQFIERQLNDSRYISKVVKGLLSNIVREKNDSGEYEPEAVSKNILVCTGSVTDRLKKDWGMNDVWNSIVSPRFERLNALTETQCFGHWENKDGKKVFQTAVPLEYQKGFSKKRIDHRHHAMDAIVIACATRNHVNYLNNESASRNAKISRYDLQRLLCDKSRGDGNGNYRWIIKKPWTTFTQDAREALSGIIVSLKQNLRIINKTTNIYQHFDANGTRVYEKQKIGDSWAIRKPMHKDTVFGAVNLRKVKVVRLSVALDTPSMIVDKRVKNKVLELLSYKYDKKKIEKYFKENAFLWKELDIAKVAVYYFTENTTEPLVAVRKSLDSTFNEKKIASVTDTGIQKILLNHLKSKEGKAELAFSAEGIEEMNRNLLQLNDGKGHQPIYKVRVYEPRGNKFKVGVLGNKGAKWVEAAKGTNLFFAIYITEDGNRTYETIPLNWVIEREKQGLVPVPDRNEKGDKLLFWLSPNDLVYLPTEEERDFGRINEPIDRGRIYKMVSSSGNQCFFIPQSISNAIIPTKELGSNNKAEKSWDGEMIKNICIPVKVDRLGRIIEVKYRVNE

SEQ ID NO: 22231 - protein, 1390 aa, unidentified
  REGION 1..1390: note = Cas Enzyme sequence
MKNIFGLDLGTTSIGWAVVNEAENDNEQSALIALGERVNPLSTDERTNFEKGKSITTNSDRNLKHGARLNLFRYKMRRNNLISLLRDNGIIDDSSILAENGEHTTFETHKLRAKAATERIELTEFARVLLSINKKRGYKSSRKADSAEDGKAIDGMSIAKELYENDLTPGQYVYARLLQNKKYVPDFYRSDLNAEFNRIYARQSTYYPDVLTPELAERLNGKNEKATWAIIADAFNIKGAKRATKGFDKKVEDYKWRVDALVDKLDPEQIASVLSKINRDISGSSGYLGAIGDRSKSLYFSGLTVGQYQYECLAKNPHHSLKNEVFYRQDYLDEFERIWTVQASHHDKLNEKLKSEVRDIIIFYQRRLKSQKGNVAICELVQYSVDVTVDGKTKRKIVGPKVCPKSSPVFQEAKILQILNNVKVTNRNDDTERPLSGDEKSALLRELNWCDKMSATEALKLISLNPRIYSINYKQLEGNTTNASLLKSFMSVVDVTGHDSEAIEDLPASKKAEIVEGIFKSQGFNTDIFHFDSSVERQAIENQPAYMLWHLIYSYEGDDSISGNEALIKKLCEKFNFDSESAAIIAGVVFKADYGNLSTRALRKILPYLKQGMVYSDACDKVDYRHSKRSLTREEIDNRDYKSRLDLLPRNSLRNPVVEKILNQMINVVNSLIETYGRPDEIRIELARELKKSAKERADLISSINKATADNEKIRQLLINEFGIQRPSRNDIIRYRLYDELSAVGYQTLYSDTYIPREELFSKRFDIEHIIPQSRLFDDSFANKTIEARDINIEKGNATALDFVEAKYGSEYVKEYRNRVDILLKEGKIGRGKYNKLLTKENDIPEDFINRDLRNTQYISRKALEILSEVAPEVTATSGSITERLREDWQLIDVLQELNWDKYDRQGLTEIFVNRDGNTVRRIKDWTKRNDHRHHAVDAVAIAFTRAEYVHYLNNLNAQSDKGKEFYTIRERYLERDKHNNLRFRSPIPVKEFRAVVKDMLEKSFVSHKSKNKVVTKNVNATKCSGGVNRKVQLTPRGELHEATICGRIMQPVVDKEKIGVSFDYDKIATVASAVERKALTRRLDMFNGDPKKAFTGKNSPTKNPIYIDDDRKVELGTKVKTVTMKCVYTKRKEISEDLKLDKVIDKGVKRILQQRLDEYGGDPKKAFTNLDANPIYLNKEKGITIKRVTITGPTEVEPLHSKRDHLGNEMRDADGRTIPTDFINTGNNHHIAIYRDASGNLQERVMSFFEATARACALPPLPVIDKDYRKCDGWEFLFTMKRNEYFVFPRYESVVDSSTGQEKLIKTFDPKAVDLLDRDNYAKISPNLFRVQKLASKYYVFRHHLETNVEEVKELRDITWKRIQTIKLMDDAVKVRIDNLGRIVAVGES

SEQ ID NO: 22232 - protein, 1202 aa, unidentified
  REGION 1..1202: note = Cas Enzyme sequence
MKKILGLDLGTNSIGWALIQQDFDTKKGEILGMGSRIIPMTQDVLDTFSGGKPLETQTAARTSYRGIRRIRERHLLRRERLHRVLNILGFLPDHYANQIDFEKRLGQFLDEKEPKLVYKNKEFIFKESFEEMLNDFKQSQPSLFYKKSNGKETRIPYDWTIYYLRKKALNQKIAKEELAWIILNFNQKRGYYQLRGEEEEENLNKLVEFHSLKIVDVIADEKPNNKGDLWYSLYLENGWIYRRSSKIPLYDWKDKVRDFIVTTDLNDDGTIKKDKEGNERRSFRAPSEDDWTLLKKKTEQEIDKSNKTVGTYIYENILQNPSQKIRGKLVRTIERKFYKEELIAILKKQIELQPELFTDDLYNDCVRELYRNNEAQQLVLSKRDFVHLFVDDIIFYQRPLRSQKSSIGNCSLEYRVYKDKDGNQVKEYLKAIPKSHPLYQEFRVWQWLSNLKIYRKEDDSDVTNHFIKNDEDKVALFEFLMEQKEVGHKDILKHLLTPVLKEQYPGAKTAAFNKEVDKEIAKYRWNYVFDDSKEKEEDKSKKYPCNTTGYEIRRRLVKVSNVPINFLTPQIEQHLWHIIYSVTDKKEYEAALKSFANKYHLEENSFVEEFRHFPPFKSEYGAYSEKAIKKLLPLMRLGKYWCWDAIDSKTQGRIDKIISGEYDETIKNRVREKAINLTDNTHFQGLPIWLASYIVYDRHSEADIAGKWNSVTDLEQYLEDFKQHSLRNPIVEQIVTETLRVVRDIWKHYGQGAKDFFNEIHVELGRDMKNTSEERQRLTNIVSSNEATNLRIKALLNELKENSDGKLAVENVRPYSLMQQDALRIYEDGVLNSKIELPEDIIRISKSAQPSKTELQRYKLWLEQKYRSPYTGQMIPLGRLFTEDYQIEHIIPKSRYFDDSFSNKVICESAVNQLKDKQLGLEFIKNHQGEKVECGMGKVVEILTEEAYQTFVKEHYSKNKTKRQNLLLDEIPEGMISRQMNDTRYISKFISGLLSNLVRAEKDDDGINSKNLIPGNGNITTVLKKDWGMDAVWNDLILPRFERMNQLTNTNTFTYWNEQFQKYLPVDYSPIDSKRIEKKRIDHRHHAMDALVIACMTRDHVNLLNNQSAKSETTRYDLQNKLRNKSKETWIDKKTNKQVERDVFKEFKKPWDNFTMDAKIALENIIVSFKQNLRVINKATNYYEKWVEKEGKKVKVVKLETP

SEQ ID NO: 22233 - protein, 1722 aa, unidentified
  REGION 1..1722: note = Cas Enzyme sequence
LLRIKYQEIFLKKQIEGKMKKILGLDLGTNSIGAAILSFPEKFEDYGKEGKIEWLTSRIVPFDEDYSKAFLEGKNGSPKVKTPAANRRQLRGSRRLKYRYKLRRTKLIKLFKLLGWLPEDFPLDNPKRIKDIIAEYGKFNFRISDYVPVSDESYREFYKYFGYSEEQLNEIIEEIKFRRIHNGNKRNEEIKLLPEDWIVYYLRKKGLTQKLTTEELIRILYLFNQRRGFQSNRLDLKENETTIVNYEEFKEKFKELRRNENGKMIAKVKEKYKNQNFETKFVSITRVINIEELTEEGEKAEKKFRIYLEDNRIEAYEIERKEKPDWLNKEYTFVVTQKIEKNKFKQNIPKTPEENEWIYCTTALDEKMGNKYPGEYFFDELVNAHIEKREYKIRQYPVYRHRYQKELETIWKKQCELNPELAQLNINQDILKKLAEVFYPSQSKFNGPKIKEFLNNDLLHVISNDIIYYQRDLKSQKNSIGECRYEKRKGIDGETYGLKCIPKSSPLFQEFRIWQDIHNIRLIRKEHINPDGKKILDIEETSLYINDELKEKLFDLFNSKEEIKEKDILLVINQYHKDIKPIQIGKKDEEHSHYINLFRTRKTLKGNETKHRYRKIFKELDFNGDYILNNNDLLMKLWHADYSNSNTDEKKSFKGILSALGWKSENEKNKNWNVFQLSFEDAESIAELIVKLPAFKKEYGSYSALAIRKMLIFMRTGEYWKHPQDIINQIQNEIKNGTVNKDTKEKEKFLQSLENALDKADKTYERLKSINFDERKIQDVDDDEIPKQLLKSFIKKRSYEEFIKGLNTYQAGYLLYGKHSEQEIIQVNSPEEYSAYIQKTLKPGSLRNPIVELVVRETCALVKDVWKKFGQIDEIHIELARELKHNKEERARISEIQNENLEEKQRIKEILYELLNYESFEHYDENGSRIISGFTIKPNPENLEDIKRFRLWKEQASLSDKEWDKKIKEEKIPTQEQIKKYILWLGQNCRSPYTGKIIPISKLFDGNEYEVDHIIPRSKMKNDAMNNLVIVESRVNKAKGNELAANFIANRNGYCEYEGKKIDLLKYEDYKKLVDDIFRNNRAKRKNLLATEVPDDFIERQINDTRYISKKLGEVLRPVLKDPYAVIFTIGSITSELRNNWSLNEIWKDLLKPRFERLEKILDKQLIIKETNSNKFYFDLSFNEKLEKDGIKRLDHRHHALDAIVIAATTREHIRYLNTLNAADSDEEIKKYHLTLCKGKIRDFKLPWENFVKDVKDALQSCIISYKESKPIVTKPYNKYEKWVIENGKAVKKIFKQEIDGGGKWMAVRRSMFKQPLGIIWLKQIKAVEIKDALKIQAQWNEIKNDPQLKKNKPYVYDDYAQKYLDAVVEQLNLSPKNFTKKKNEIDKWIESISEKVNTGITDKNGKTKTKTLYNLDGKIYEKIEIAEFVQYKTKRMKISPENLKSYSIEKMIKNIPYFEFISEEQFNEFNEEQQEIIKNAGINIGNKKMSPINFVLLLHIVKYRNNPKEAFNNEGIENLNELAIQKIGKSIKCITRLDGEVNNQEIFRNAIYETDKGANIYFIMYENIKSKQREYLSPSPSISVLKAIEKKNKMKDIAPEKEGFKRIVLSPGDLVYVPTIDEIEEIKKNNTSIEDLLKNKAMKDINERIYQVRKFTGDACYFIKYNIAELILSYSEVDNKKIGELGSQNLSEYTMDDDEIPIKKHCIKIKINRLGEIQIIY

SEQ ID NO: 22234 - protein, 1127 aa, unidentified
  REGION 1..1127: note = Cas Enzyme sequence
MFSRANSVSDNDCSSVNAPAAPRDTASEAQPQPSQPSAGTNVPYVLGLDIGATSVGWAVLDLDAQGEPCCVRAMGARCFEAGVDGDIEHGKDSSRAVARRQARMARRILRRRARRLKKVFHLLQRHGLLPAGPSRTPEERHRLLADLDRQLFPKYAPGGDRVAAHVVCYRLRAAALDRALEDHELGRALYHLAQRRGFLSNRRDDRRASEKGEKSQDTKVIEKEIASLKEQITASGARTLGEYLSRIDPEQQRIRKRWTSRQMYIDEFEAIWSAQSQHRPGRLTEALKRELRQAIFHQRPLKPQTQLIGRCELEPPRHPGALPPRRAPLALPVAQRFRLLQKVNDLQVIEPDGRIRPLTAEERNKLLQALSEQARMEFDDVRKLLGLSAPRKRKDKATGQQICTPGHRFNLEEGGETSIPGDTTTARLLPVLGDKWRTMPEPLRESLVRDLLDFNYPAALAEHLQRVHRFDRHEAEALSEISLEDGYAPYCRMALRKLVARMENGTPFATARKLEYPQSFAAKPPCELLPPVRRAVPDLRNPAVMRALTEVRRVVNALIRRWGKPEIIRVELARDLKKPRKEREKAWKGNREREKERKAAADRLLKEAGITNPSPADIEKVLLMEECGGICPYTGRPITIPALFGDSPQFDVEHIIPFSVSLDDSFVNKTLCWHEENRHHKRNKTPYEAYSGNRERYEEILRRVSRFSGRFRKEKLRRFQMTLADVKAEYGDDFTARHLTDTRYASRLAADYLGLLYGGTVDAAGRRRVQTSSGTATWYLRSEWDMNAVIPGLSGSPTGSASGTFIEKVRTDHRHHAIDAVAIALTSARVVKMLADAARNPEQHRRRRFAPVPPPWPNFKDEVSAAAEKIIVSHRVDRRVAGPLHAETNYSPPIVHENREYRHRRVPLSSITRSQIAQIVDDVIRQLVEQKVGSAGDPAKVFSDPRNLPVLRSRDGTRCIPIKKVRVREHVAATTVGAGPRQRHVVSGKDTLHHTVIVARQTPSGEVWEDNPVDRLEVHRRLRNGQPVIQTDWGSDARYVFHLCKNDCIEMDVESGNPSAGRQIYVVRSISKRDIAVRLHYDARTLEQIVRAKERGKFRISSADLLRRRNARKVMVSPLGEVLPCRE

SEQ ID NO: 22235 - protein, 1354 aa, unidentified
  REGION 1..1354: note = Cas Enzyme sequence
MSTKKIVGFDLGTNSVGWAVVENSDENAAKIAGAGSRILPLDPKILDAFENGQKLTKNAERRQKRSQRKTLDRYQLRRKYLIESLIIMGCLPEDFTPQNAGRKFKELIEKPDELKNLPDDWYVYMLRSKALKEPVTQIEFGRILYHLNQRRGYKDIGELMEEIEEKDDTKQGKKYDKWIEQVTIYSVEKKSDLKNKKQEYWVILDDGREGTSIIANIESLTGKEIELEIRRRVKKNSEETFEFALPNRNDWQNKLDALDKQISQSGMHVGEFFWNKIKEDRYFRIRQNFVHREKYIEEFDAIWEKQQEFIPALIDETVKQDVIQRIVRNEKERQKWAKKPLKEFIKNYIIYYQRPLKSQKSKKANCRFEPMIKVINQSTGESLSIENKCMPLSSPLYEEFRIWQKLNNLRYKDINNKNYELTNEQKEALFEKLNNGQTLKESSIFKILGLDKNLYSDFNFDQIEGHTVKSKIASVLKDYDSGKIIGNEEFLYKVWHLLYSVNETEYRKNTLIKWFNLTEEDAKRLAKVRFEKKTGSLSSRAVKKLLPLMRAGKYFDEQSLHDSILFRINNIINGEFDPDVTDDIREFFKEYKSIRDFSGMPYWKAATLVYGSHSTGFSDTRYEKPEEIQLIPAGELRNPVVEQVINETLQIARDIWIKYGKPDEIHLEMAREMKMNSNERQKLTKAMRDQQKKNEEYEEILKKEFNILKPSRTDIIRYRLYIDQKQRCLYTGKPIQKTQLFNGETDIDHIIPRQRYFDDSYNNKVLCFRNVNEEKSNMTSYEFMQQKGIDKWEDFTRRVNELYKEGLISKKKKNYLLSDEIPKDFINRQLNETRYITRRVKEELEKISPVVTTVGSITDYLKEDWKLNKVFKEVQLGRFRSIEKKIDKKLIQEIRINGYHDYQIEGWDKRIDHRHHALDAITIACTNRSIIQTLNNLAQLYESSEPIKNKISRHFPVPAPDFRDQVKNTLETMIVSHKSRRRLITKKRAYYKVLDPSTGAYILKKQEKPSPVVRGPLHDEQPLGEIKEYQKIKIKDAIKKLEENKNNLDKFINGTFPIEWQRKKINEKLSIYNNDPKLFLKNLNKDAILNLKGEKLEYITILVRKYVKSRDLNTSITLSQIENIIDRKLKNEIKNHLKQYNNDPKKAFTDEGLMLFNQNRKFPVYKVRCKVDESEVGTLTTREPLERDSENNPKLHIEKGENYGFVIYENKETGKREYETISFYDAISLARMGLSIVEARPGYRHCVLKHNELIYVLRPGEEKKLINWNDYKNLNNRIYRIVKFTNKRLYAVPHQVAENIVLNEEYENFNEFGSNKNCLEIISDDEPKTKISERCIKINADRLGNIKPAPWEND

SEQ ID NO: 22236 - protein, 1556 aa, unidentified; identical to SEQ ID NO: 17497
  REGION 1..1556: note = Cas Enzyme sequence

SEQ ID NO: 22237 - protein, 934 aa, unidentified
  REGION 1..934: note = Cas Enzyme sequence
LSNEDKSKIFDHLNTTESLTSKQIGEILFAEDTKDYTMNIATIDGNKTNSRLLDAFCKMIELDGYNKNIRKTKGKSKLDIIRSFFEENGIDQTILDFDHTLEGHLLVRQSAYKLWHLLYSYEGDNTRTGIEKLYKALKEQYGFERENATFLINVSFIQDYGSLSSKAIRKIFPYIMKEGYSDACDKAGYNHSNSLTAEENNLRKLADSLDILPKNSLRNPVVEKILNQMIHVVNAIIKSPEMGRPDEIRVELARDLKKSAKERAKTTADISKATKLHEEYRKIITVEHGIKNPTRNDIIRYKLYQELAHNGYCTFYTNTYVKPQELYSKNIDIEHIIPKALSFDDSFSNKTLAIRSVNQSKDKMTAIDFINSLKNEDGVGDYRNRVESAYKDRHISKAKYQKLLRPESDLAEGFIEREIRETQYISRKALQLLTEVSRSVTATTGRVTDRLREDWNLINVMKELNMPKYKALGMTYKEERKNNQHVVKIQDWTKRNDHRHHAMDALAVAFTQKRHIQYLNNLSAKSDRGGAIYGIEQNVTFIDGNRRRKFVSPFDNFREVAKKHLESILISRKASNKVATRNINKTKINGKINKQVTLTPRGQLHKETIYGKISQYDTKAELVNASFTQDKIATVANQKLKDALLKRLNANDNNPKKAFTGKNSLSKNPLLLNNGKEWSEKVMTVKMNNVYTIRKHVTPDLKIDKVIDKGVQRALQARLEEFGGNAKKAFVDLDENPIWLNKDKGISIKRVKITGISKAESLHEKCDLSGNIIINADGIPIPSSFVSTGNNHHVAFYKDTKGKMQENVVSLFEAIARVNEGLEIIDKHLNEDEGWVYQFNMKQNEYFLFPSEEFDPLTIDLLDPSNYNKISPNLFRVQKFTTRDYFFRHHLETTVEANQGTLGVSWLRCGLSGIQDVIKIRLNHLGIIVDVGDY

SEQ ID NO: 22238 - protein, 1361 aa, unidentified
  REGION 1..1361: note = Cas Enzyme sequence
MKKILGLDLGTTSIGWAFVKEDEKRAKSHIVATGVRVIPLSTDEKNDFKKGNAISVNADRTLKRCARRNNQRFKQRRSNLLNLLQEYGLLKSTDSLTEEGKNSTHKLIKLRAKACKEKISLQDFSRVLLSINKKRGYKSSRKANNQEEGQLIDGMAIAKELDNINMTTGQYSYSILESGKNKLPEYYRSDLIHEFKKIWVTQKESHPIILTDEFFKEIIGKTSKATYYKFNTEMGITPVELKGKRKEKKLESYNLRAKAANKQVSIEELAFVLQQINEDINKSSGYLGAISDRSKELFFNDKTVGQFLLEKINENAHQSLKNQIFYRQDYVNEFEKIWSVQSKFHSKLSLNLKKKIQYEIIFYQRRLKSQKHLVSNCELEPQRKAIPKSSPLFQQFKIWQNINNLVFTNKKTKDSINASELDQEIRNLLFENLNLVDNLSSSQVLSFVFEKPKEYELNFKKVEGNRTFHSIVNILNSIIESEGYEINYKKNTPVELKHFISDFCDKLNIDLKILTLDSSINENQFDKQQSMQFWHLIYSYEDDSSNTGIEKLNQKLNSKFGIPKEYCTRFSNLSLQDNYGSLSSKAIRRIIPHLQDGLTYDKACALAGYNHSSSETLEEKEKRILKSKLELIPKNSLRNPVVEKIINQLVNVINAIIEDPKLGVPDEIRIEIARELKANAKQRKDTLAHIEAATKKHIKIREILKSEFGFKYINRNDVIKYKLYQELGPIAYKCPYCSNPISKQDLVKANVDIEHIIPKSRLFDDSFTNKTLSHRTCNLEKGNLTALNYMETKGEVQLDAYKSRVEELYTKGTIKKTKRDKLLMSADKIPEDFISRDLGNTQFIAKKALMMLREICKEVHPTTGKITDRLRSEWELIDVLKELNWDKYYKIGFTKIIVGKNGQQIRRIKDWTKRNDHRHHAMDAITIAFTKKSIVQYLNNLNAKSDKSSSIYAIEKKELHKTKSNKLVFKPPYNGIREDAKKHLASLLVSHKTKNKVTTRNKNKSKLKGKDNFNTKIELTPRGQLHKETIYGIKKYYETKEVKVNASFDIEMIMQVAKKSHREALLERLSTHANDPKKAFTGKNSLTKNPIYLNNGNKDTIPEKVKLVWLETRFTIRKEINHELKIDKVIDVGIRNILRKRLVDYDNNSKLAFSNLDQNPIWLNQDKGIKIKRVTISGVSNAEPLHHKRDYKGVEILDAQGNPIPTDYVQTGSNHHIAIYKNQNGDFQEEVVSFYEAVARKNAGLPVIKKDHELGWEFLYTMKQNECFVFPSDDLDPSEIDLKDPKYYDLISTHLFRVQKISAGDYTFNHHIETMAVSSDTLKKKELNKGTFYRIRSPKNLNDIIKVRLNHLGRIVHIGEY

SEQ ID NO: 22239 - protein, 1383 aa, unidentified
  REGION 1..1383: note = Cas Enzyme sequence
PKEDDWTLIKKKTEDDLSKYIGEYKTKNGIDGTVGTYIYDNLLRKPNQKIKGKLVRTIERKFYKYELREILKKQIVLQPELFSDDLYNDCVRELYKNNEAHQLQLNKRDFIHLFLDDIIFYQRPLRSQKSSIGNCSLEFRLHKINKKDDKGNSIKNEFEKDENGKDIEVKEYLKVIPKSNPYYQEFRLWQWLYNLKIYKKEDDTNITADFITSNDDKITLFDFLNSRKEIEQKPLIEFLVKQRELKNPANNNLNKKVQTALSKKIKEETEKYRWNYVEDKKYPCNGTGTQIRTRLERVTNVSVSFLTREIEQHLWHIIYSVTDKNEFEKALKSFSKRHQIDETSFVENFKNFPPFISEYGSLSEKAIKKLLPLLRIGKYWNENAINDKIKKRANSISERLKSISKKEDIENISDDDIQKQILKSFYGLTDLTQGLQLYQASYLIYGRHSEASDLQSWNSVADLEKYLKEFKQHSLRNPIVEQVVTETLRVVKDIWTHYGKGVENFFDEIHVELGREMKNTAEDRAVLTKQVTSNENTNMRIKLLLAELKNDTTIEGVREYSPSQQEILKIYEDGVLNSNVEIPNDISEILKKFKESDIKKQPTKTEVNRYKLWLEQKYRSPYTGQMIPLSKLFTEAYQIEHIIPQSRYFDDSFNNKVICEAAVNQLKDKQLGLEFIKNHSGQIIDLGQNQSVTLFTEQQYTDFVKEHYDKNRSKRTKLLLDEIPDKMIERQLNDTRYISKFISSVLSNIVRANKDDDGVNSKNLLPGNGKITSELRQDWGLNDVWNDLILPRFERMNELSQSNHFTATNKEGHTIPAIPLELSKGFQKKRIDHRHHAMDALVIACATRDHVNLLNNQSAKSDNSRYDLQRKLRKVEKWTDKEGKERDKFTDFYKPWSTFTQDTKNELEKIVVSFKQNLRVINKASNHYEKIINGKKVLVKQEGSNWAIRKPMHKDTVSGLVQLRKTKTVSLSVALENYNDIVDKTLRKHILSLINQNYDKKKLTKYFKDNENKWNNRDISKLDIYYLENDNVASRVNLDISFNKERIEDTITDTGIQKILLKHLINYEGQTDEKGKAIAPETLAFTPEGIDEMNKNIITLNNGKSHQPILKVRTYEPKGNKFTIGETGNKKDKFVEAAKGTNLFFAIYEDENGNRSYETIPLNIVIERQKQGLCSVPEQNEKGHALHFHLSPNDLVYVPQVDENLDAINFGELTIEQSNRIYKFTDGSGIMANFIPSKIAEVIFNINKLKQESLKINYPIQNEIGVGSQGSKNERAISGEQIKSICIKLNIDRLGNITPSKKTNQKSTSSFVNEEHSIYYNKVTFNNLQQSDEKMFMHTANMNPEERMAYLQKLRETTQENISEAEKRAILNQIKINPPDENT

SEQ ID NO: 22240 - protein, 1446 aa, unidentified
  REGION 1..1446: note = Cas Enzyme sequence
MASKTILGLDLGTNSIGWALIKQDFEEKEGEILGLGSRIIPMTQDIKDEFGKGNSISQTADRTNFRGIRRLRERALLRRERLHRVLNELGFLPDHFSKQIDFDRRFGKFINDSETKLAYNGKNFLFQASFQEMLNDFREKQPNLLEKNKLIPYDWTLYFLRKKALSEKITKEELAWIILNFNQKRGYYQLRGEDEEENPNKLIEFYSLTVIDVVPDQETNKKGEVWYSLHLENGWTYRRSSKNSLADWKGKTRDFIVTTDINDDGSIKIDKEGIERRSFRAPNDTDWTLIKKKTEQIIDSSDKTVGVYIYDELIRNPDQKIKGKLVRTIERKFYKEELNLILSKQIELQPELFTSEHYNRCVRELYRSNKAHQIQLSNKGFLHLFLNDIIFYQRPLKSKKSEITECPLEFRYYKSKDENGNDHYKKEFLKAIPKSHPLFQEFRIWQWLSNLKLYSIEDNIDVTLNFLTNSNDIAELFDFLNELKEIKQERLIKFLLEKSGLKGKPLNNEVSKYRWNYVEDKTYPMNETRQLITSKLKKVENVTVDFLTKEKEIMLWHIIYSVTDKFEFEKALRSFANKNNLDAPSFVDVFKKIKPFDSDYGAFSEKAIKKLLPLMRHGKKWKYENIDATVRERIEKLLTGEYDEEIKNRVREKTIHLSSHQDFQGLPLWLSQYIVYNRHSEAEISGKWKSIHDLEVYISEFKQHSLRNPIVEQITLETLRVVKDIWVQFGKSEENYFDEIHIELGREMKHTSDERKRLSNIVSENENTNLRIKSFLQELLLDNSVDNVRPNSPMQQEALKIYEDGVLKSGINIPEDILKISRSAQPTKTEFQKYKLWLEQKYKSPYTGQIIPLHKLFTAEYQIEHIIPQSRFFDDSLSNKVICESAVNQLKDRQLGMEFIKNNSGRIVDLGFGKSVKVLSEDAYHNFIKEHYKANRAKLAKLMLEEIPERMIERQLNDTRYISKFISQLLSNIVRSETKDEGVISKNILPGNGKITSQLKQEWGLNDVWNELILPRFERLNSITNSTVFTALNTNQKIIPTVPIELSKGFQKKRIDHRHHAMDALVIACATRNHINLLNNQEAKSETSRYDLQKKLRNVQKWLDKEGKERIRFTNFFKPWSTFTQDAKSKLETTVISFKQNIRVINKASNYYEKLVDGKKIKIKQEGTNWAIRKSLHKDTVSGKIDLKRIKVPKDKILTATRKPLDTSFNLKTIQSITDTGIQKILTNYLKFMNEDSESAFSPEGIEEMNKNITQYNDGRPHKPIHKVRVFELGSKFALGQTGNKKDKYVEAAKGTNLFFAIYVDEKGKRSYSTIPLNEVIERQKQGLSSVAEINDKGEKLLFSLSPNDLVYVPNENEESFINLNILTKDNIKRLYKMVSSTGSECHFVQVNISYLIKSYDAKSKIGELGSLNKMETTMDSKFRIKEVCLKVNIDRLGNINQIINY

SEQ ID NO: 22241 - protein, 1393 aa, unidentified
  REGION 1..1393: note = Cas Enzyme sequence
ILGLDLGTTSIGWALVNEAETDNEQSSIIKLGVRISQLDNFDKVDKSGKVSESKNPIEDFAGGKGLSPNAGRTQKRGARRNLQRYKLRRKNLISVLTENGIINNRSILTEDGENSTFQTLALRARAAKERIEKDQFARVLLSINKKRGYKSSRKAQNEEEGKAIDGMAIAIKLYEENLTPGSYCYQLLKQGRKIIPDFYRSDLKIEFDKVWSFQKQFYPDVLDDELYKAIEGQGLQNTRKRFLAIKGIYTAENKGKNDEKKLTAYLWRSLAISEQLEIDQVAFVLTEINNNLNSSSGYLGAVSDRSKTLYFNKQTVGENIFGQITENRHTRLKGQVFYRQDYLDEFEQIWETQKLFHPELTNRLKSEIRDIIIFYQRRLKTQKGLISHCEFESKQMVEDVDGKKKVRIIGPRVCPKSSPLFQEFKIWQNLSNLEFENKKTKQVEKFVEYDIETKQMLFNELNIKGNLKKKDVLKLFELSPTEWSIKYKELQGNLTNKILYEAFQKMIFHEGHEIDFSKKSADEIKGTIASIFEMLGICTDILNFEGEKDGVAFEQQKSFQLWHLLYSYEEDNSPSGTDSIFKLLLEKFGIKKEIAQYLINIKFQDDYGNLSTKAIRKIFPFIKYNNYSNACQQAGYNHSNFITKEENEKRVLKNRMDLLPKNSLRNPVVEKILNQVVNVVNAIVDDPTLGRPDEIRIELARELKKNAKERADMAQSINSAKDLHDKYRKILKEDFHILNPTRNDIIRYKLYLELKANGFKSLYSNQYIPHEKLFSKEIDIEHIIPKARLFDDSFSNKTLEFRQVNIDKSDETAYDYVKDTLGPERLDLYKNRVEKLYKDGGISKAKCKKLLMEGVDIGEGFIERDLRESQYIAKKARQMLLELCRNVVSTTGSITDTLRDDWGLINTMKELNIEKYRALGLTKIEERKEGQEIEKIIDWTKRNDHRHHAMDALTVAFTKHTHIQYLNNLNARRNEDHKKHGNIIAIERKEIFRDENNKRKFKSPMPNFRIEAKKELEKILISVKAKNKVVTRNKNSVKGNIKSRISLTPRGQLHKETVYGKSQHYETKLVKVGTGFDLLMINQVANQKFREALMKRLLENETNPKKAFSGKNSPAKNPIFTRDNEQLPEKVKIVSLADIYTIKKDINPENFKAEKNIDKVVDKGIRKILINRLDEYGGKPKEAFANLDKNPIWLNKEKGIAIKRVTISGVNNAEALHTKKNHFGNDILNSRGQKIPADFVSTGNNHHVAIYKDEKGNLQEEVVSFYEAVARVNADLPIITKQHEKGWEFQFTMKQNEMFVFPSDGFDLLEIDLLNPANNSLISLHLFRVQSISSKYYIFNHHYETRNADGNLFMTKKQLSGVTYNFIRTPQNLKDIVKVRINHLGQIVNVGEY

SEQ ID NO: 22242 - protein, 1344 aa, unidentified
  REGION 1..1344: note = Cas Enzyme sequence
MNKILGLDLGTNSIGWAIRDATEPGNQIIDKGILTFEKGVGEEKGVEFPLVKKRTESRSKRRHYQAEKYRKWTLLQTLIEHNMCPLTIEELDQWRKYTKGQSRKYPQSPDFINWLRFDFDGDGKPDFERLGFSKHENHYLFRMLAVSDNSAHKNIFTDNPHLLGRIFYHLVQRRGFRGRDDEEARTILQGSKDGKVAGAEAISPLIHQYQTLGAALYHLQKDKGERVRKRYNLRADYAHELQLICQVQNIPDTIYKRLEKAIVWQRPLRSQKGLVGICTFEQNKPRCPVSHPFYEEYRIWININNLKIRLPDGIDKQTYIREKIYPIFYRKDRDFKLTVILKELRKVGGSLGSKFKDDTKIPSATLLNAFKEILGEDWKNLYGWDAALQNQPKSIPYSFDDIWHVLFTFDNREKLQLFSKEKLKLDEENAEKFSKIKLQQGYATLSISAIRKILPYLKEGYLYSHAIYLANLHRVLGKNTLLPSDAQAFSVALRGIIDQHRSEQSWIAAVNGLISDQLNGDARFGMDPVYQLDRDDMNDIERKLEEELGEYSWKKKSKEEKNAAINFVAEKYLSFLRRPVQYSKEPVYSKLPRLHDRILNYLRETYDVQPKNEKYLWHPSEQESYPAAKYMNGVPVLGDPMPISRGFKNPMALKTLHQLKKLLNHLLKIGKIDEDTRIVVEIARELNDANRRKAIERWQRDRERENDEYRKKIEENPELKGLFLDVKNKDIIDKYRLWVEQNKRCLYTGNIINVYDLFTGKFDFEHTIPASVSFDNELKNLTIADGKYNKQIKKKLFPTQLPNYDREATIDGVIYSAIKPRLESIEKKVEELEALHEEWTNKTRFASTKEIKDACIQRRHIISFDLDYWRKKLNSFTVTEYKAGWKNSQLRDTQIITKYALPYLKTVFRKVEVEKGSIVSDFRKIYNIQPKAEKKERTRHSHHAIDAAVLTLIPSAAIRDRILGKFNELKDQNVNLIDHEPVTNWKDFTAAHILSIEEDVLNNFQPKQRTLMQTYKNVRKRGTKQFVKEKTPEGKWQYKLDAKGQRIRLVAKGDNIRGQLHKESFFGAIMLDGEKWLVERYPVSSFTNIKDCRHIVDNTVRQIVQEALEKRLGEGMPFDKAKLDPIPFPGGKEVIRKVRCKVAAGAGYLTPKKALEVNQHDFLSKNDYKRSVYAQNEENTLCLFYEGVVNNKEERAFRVVGLFDLSQLKLKKIEDIRSEKYYQAVEAGRGKNKAEIPLSHIITVGIKIIPFKNSKEELKELSKRDLLRRVYRVYKFNEPAPSTVYVYMQNHLEARPNDELGNGEKDLNLEIYQPRIFLNATKFTCVIEGRDFSIDLDGTIRWLF

SEQ ID NO: 22243 - protein, 1614 aa, unidentified
  REGION 1..1614: note = Cas Enzyme sequence
MKILGLDVGVTSVGGGLITIPDTFEDWGKHGGINWLGSRIIPTDGDYLQKFESGVPAETKAAFRTAKRGSRRLKQRYILRRTRLIKVFKILGWASSEFPENFKEKIKKEEDFKFNISSYLPFEQTSIDEATKLLGVKNKKEKLACSEDWVIYYLRKKALSEKISLSELARIIYMFNQRRGFKSGRKDLKDVPEDSVEKKRVEILKIKEVIQLGDEKDKNGKYKFQIIPDNSVAKERVEPWEETRHKKPDWEEKEFTFLITVKNGKQLKPKTPDKDSDHDLLVTALDNKITDSGKTAGAYFFDELVNDKNYKIRQQIVKRIRYQEELKAIWNKQTEFYAELNDKTKLREISAALYPTQTKTEKSKLKEILSNDLYHVIANDIIYYQRELKSQKGLIQGCQYEKIEICKNNEKIKVGVKAAPRSSPDFQEFRIWQTIHNIKIYEKEQIIDGRTRIDVDVTKEYLGNNENGFKTKEKLFDFFDGHGGVEAKQVFKTINDSCSSKLSDKTHKINLFYKDGVTVKGNEIKEVFRKAFRKANYAEEGEQILNDAKRLNSLWHIFYSISSTDAEKSQKGIKTALGNPKLGFNFPEKIIESIVSIPESAKQYASLSSKSIRKFLPIMRCGKYWKWENIAPEYQAKIENLIKKGWNNVDKNTGEIIGVEYPFANAEQVQGLATWMAAYVIYDRHSERSASEKYTSYEQIDVMKLVPNNSLRNPLVEQIVRETLFVVKDVWKKFGQPDEIHIELGRDLKKNAEERKRISDSNTTNQQEKERIKRLLKELLNDQFEEYLEDGSTKNSRFETKPNPESPLDVEKFKIWKNLAGNLPEDIDKFFKGKDAKEKDKLPSSAEIKRHALWLTQKCKSPYTGKIIPLSKLFTESYEVEHIIPRSKMKYDAKENLVISETEVNKAKGHRLAAPFISECKGKCKHGNTEYALLEYADFETHCKAIFRGKKLKNLLATEVPEDFISRQINDTRHITRKISELLQPIAKSENGLVFTIGSITSDLKREWGLTKEWKRLMLPRFQRLESITGESYISVNAKNANDFDIHVPENPDLDLKRIDHRHHALDALIIAATTREHIRYLNSLNAVDNNEELKKVKQTLVKSKVREFSLPWERFTEDAKNALSTVIISIKAKNKVVSKPKNKYQKWVEKDGKWKKEFVAQKPPKEEGKKWLSVRKSMFKEPQGIIHLKEVYDEKSIVKAIEIQINRMKVQDTPAMKTASYIYDQEAKEIVKRLILEYDFDIEAIKKHLKKHPLKDASRQEYKTIKVAKFEEYASKRVSLDASFDSKKINKIPYANHIKEVYAEKSIVKAIEIQINRMKVQDTPAMKTASYIYDQEAKEIVERLIREYDFDIEAIKRELEKRPLKDVSGQEYKAIKVAKYTKDSKSPSPLAEILKKHLEQYNEGDKEHPELAFHREGIEVLNKRLKQPIGKVTIYEKKSSEDKFKNNYVEVDKGANVYFIMYEDLKTKERNEMYSIAAHKVVERVVSGEPIAENKEGYKTIILSPDQLVYVPTPEEIRNPELINLETNDPNKRKLIFERVYKMVSCTGSKCEFIPHNISKAIIDTVELGSSNKNQRAWDGKVELKPKREDSGTMIKEICQKISIDRLGNIKLA

SEQ ID NO: 22244 - protein, 1281 aa, unidentified
  REGION 1..1281: note = Cas Enzyme sequence
ELNPELATLNQNKQLMAELGQILYPAQSKIKAGKYLEFLNNDLFHVIFNDIIYYHRKLKSQKHLISECPFERRQAIKIDKNGKKILYDIRGLKCIPKSSPLFQEFVAWKNINNLKLYLIEGKYDVDVTEKYLTEDVKEKLFEVFKRKSEVKINDILKTINEVIPDSVNYIRNNKKKGEEYNVRINLVNKDGEIKGNQTVSHYFNLLSKITDKANDIISDDEFIYKLWHLEYSQNASTLDDLKENLSKGLRKIAINYPEIVEKADELADLMSKSSLIGDKDYGGFSALAIKKMLIVMRCGKYWKDPDILIQEFRQKLNNETNKKRAKEITNFITFLEKVKEQAQNIKQRIDLIRNRTLKIEEVADDIVKKQVIKSFMEKENLEDFYKGLKEHQATYLIYDQHSEKRFQKYQSYEDISKSINELEKSAIKNPIVKSVIRETLLLIRDIWEKFGYIDEIHIELARELRASSEQRKQIAENMRNKEKERERARQMLIELVNKGYFKNSVIPNPNRNDDIRKFLIYEQQVKGFYNKPKDKEFLTYAAWLEQNCISPYTGKTIPLSKLFDGTLYQLEHIIPRTRYFDNSLSNLVVCESYINKAKGNQLAAVFIKNSNGRCKDGDKFYDLLTYDDYVAQCKNLFYYKNKAKYKNLLAEEVPENFISRQLNDTRYINRKLAEMLRPIPRDEQGVIVTTGSITDMLKRDWGLESLWKDMMVPRFKRMERILENELDKDDISDEKRKYLEEKLALIKKNLYFITKHNDTIIEEPELAPNEKIDIKRLDHRHHALDAIVIALTNRRHIQLINTIHAMDESKKPSYNNNDDFGKIYKYLEKEDKIKYTLPWINLPFDTKNALDECMVTFKAKNKFITKPVNKILKWVEQNGRLEKAFVSQEKNPRWMAVRCQIFKEQPFGPIWIKYVEQKSLSDAIKIELKRKIEKVSHLEVGYVYDKHAREVIKRYIDEITNEVGFQKIEDYSNLILKQIPKKGKNYILDGIEYEKIPVAKFELNKAKRKALSKEMNIKYLRDKVPYFFLDREIFEKYRDSYPKVYQKYLNSLEDKKNTIAYELILEHLIQYNDDASKAFSTEGQEELNKRALANPKFQKTINAVTILDGELDKKMLRYNSYFETDTNVYFTIAEDPKTKERTNNKSIRIIEVLDSKLNGKPLFEIEDGKKLLVFKPYDIVYVPTKEEIEQIKSGAEINEVIDWNNKKKIIERCYYLASTAENTFKAKILTFANFLIKPEKGFSGEVGWENKTKVALDEDTDIAKNCIKLKVNRLGNFEPIL

SEQ ID NO: 22245 - protein, 1033 aa, unidentified
  REGION 1..1033: note = Cas Enzyme sequence
FQSAQNFIRISATWVKIWQNLSNVIIRKKGSPALKKKKPSSGDSSLHEPEEYIFDLDARVSLFEELNIKGNLTAKKALELLGHDANQWEVNFVKLEGNHTNQLLYKAYLDILEYEGYDIKELLHVKSNKDEVDLDDLNVPALQIKNMIKDVFGALKIDTSILDFNAELDGVDFEQQPAYQLWHLLYSYEGDDSNSGNERLYRLLNKKFGFTTEHAKILAGISFQNDYGSLSTKAIRRIYPYLKENKYSDACVLAEYRHSKNSLTKEELESRELKDRLEPIKKNSLRQPVVEKILNQMVNVVNALIDKENDQLEASGHQRNFHFDEIRIELARELKKNAAERAEMTSNINAAKLNHDKIVKILQKEFGILNPSRNDIIRYKLYEELKNNSYKDLYSNRYIAKEDLFTNKIDIEHIIPKSRMFDDSFSNKTLAFRDVNLRKGEKTAFDFMQIDTDDEGFELYLSRVENLYKLGMRSPEEGISKAKYKKLLKKESELDDGFIERDLRETQYIAKKARQMLFEVTRSVISTTGSITDRLREDWGLINVMKELNFQKYKALGLTETLERRSGQKIEVITDWTKRNDHRHHAMDALTIAFTRHSHIQYLNYLNARKDEHHKLHSVILAIENKETLSRPDADGSKKRVFKEPITNFRKIAKEHLEDIIISHKAKNKVVTKNKNKIAKNNHVQTTLTPRGQLHKETVYGQYRYSVKKEESVGAKMTYDTIMKVTKPAYRNALLERLKESGGDPKRAFTGKNAISRNPIFLNEAKTECLPEKVQLVWLEKDYSIRKDVNPDNFKDEKLIDKILDEGIKRIMKERLRQYGGDPKKAFTDLANNPIWLNKEKGISIKRVTISGVSNAEPLHYKKDHHGQFLVDENGNNIPADYVSTGNNHHVAVYRDENGNIQENVVSFYEAVSRKNQGLPIIDRSYNQHLGWQFLFTMKQNELFVFPNAQTGFDPLNIDLFDAENKKIISPNIFRVQKIAQKDYFFRHHLETNVENNPATKNFTWKREGTLGLKGIIKVRVNHLGDIVSVGEN

SEQ ID NO: 22246 - protein, 1391 aa, unidentified
  REGION 1..1391: note = Cas Enzyme sequence
MKKILGLDLGTSSIGWALVNEAEDDIQKSSIIKLGVRVNPLTVDELSNFERGKSITTTADRTLKRSMRRNLQRYKLRRTSLIKILKDNNLISEEAILSESGNFSTFETYRLRAKGVEEEITLEQFARVLLMINKKRGYKSSRKARSQEEGQLIDGMSIAKQLYDENLTPGQLCLQILQSGKKYLPDFYRSDLQNEFNRIWDSQKYYYPEILTDELREKLVNRNDKATWAICEKPMKLIGIKRESKGRDIRLENFKWRVEALSSKVDLEHVAIALQKINGQISSSSGYLGSISDRSKELYFRNQTVGQYLMDQLKSNPNISLKNQVFYRQDYLDEFNILWEKQAQFHKELTEGLKSKIRDVVIFYQRRLKSQKGLISFCEFESSRVEIETEGKKRVITIGSRVIPRSSPLFQEFKIWQGLNNLEVFSKGQSSRKSASSRTVSAHREGDVRRSLDQEEKLLLFRELSVRDKLNKATILKMLFDNHNELDLNCSELDGNKTSAAFFRAFNEITEVSGHVKIDFDKLNADEIVSSIDLVLDTLGCNPGILHFDSDVEPDKQMFYRLWHLLYSYEGDDSNTGIDGLIDKISTLSGLKREYARILTGITFTDDYGNLSAKAIRKILPYLKTGNRYDLACEYAGYRHSKSSLTSEEIASKVLKDKLMILPKNSLRNPVVEKILNQMINVINAIIEEYGKPDEIRIELARELKKNASEREKMTKMINETTLAHEKIKKIIQDEFKLSHVSRNDIIRYKLYQELETNGFKTLYSDTYIPREKIFSKEFDIEHIIPQARLFDDSFSNKTLERRDINLEKGDKTASDFIRDKWGESGLQAFQDKIERIQNQNGQGISKAKYSKLKMSEGDIPDGFIERDLRNTQYISRKALGLLGEIVRTVVPTTGSITDQLREDWQLVDVMKELNWEKYKALGLAEYLVDKDGRQIRRIKDWTKRNDHRHHAMDALTIAFTKPVYIQYFNNVNARYDKGSEAYRIEQKYFSERKVIPPIPVDEFRAEAKKHLDEVLVSIKAKNKVVTKNTNVIKIKKRECPQSQLTPRGQLHLETVFGSNRVPVVKEIRVGGTLNEEIIRLVTKPKFRDALLRRLAEYNHDPKKAFTGRNSLEKQPLYIDELHTKRVPEKVKIITFEPVYTIRKQIAPDLNIDKVIDSKIRSLLQERVSVYGDAKKAFSNLDEDPIWLNKQKGISIKRVSITGINNAQALHEKKDKEGRLITDSEGRTMPVDFVNTGNNHHVAIYRDANGDLQENVVSFFEAVTRANLGQPVIDREYRSSEGWKFLFTMKQNEYFVFPNFKTGFNPNDIDLLDTRNYSRVSPNLFRVQKLSTKNYVFNHHLETTAVTGDTLKFNKQMSGITYRFIQSLPPLEGVVKVRINHIGQIVTVGEY

SEQ ID NO: 22247 - protein, 1358 aa, unidentified
  REGION 1..1358: note = Cas Enzyme sequence
ERYKQRRNNIIRLLKTLNIVPSRLDPLFDKVRIEGNKVIAPQAAYKKGDNQYKPHELYKLRNDALTQPVSIEELFRLVYHFNQRRGFKSNKKANNPDEQTAIAEEDSDKIKPELTIEKVKIVSVESTGERKGKLKKEELKVVLEDGRTAFTDKFLFKKFKGESTFLEIKKEITKSSSEPKYTFSFPTKWQRNRKELNDGIIKSGGYPGKYFYEEYLKAVAENKPYDFKVRENVVNRELFVKEFEAIWEKQTEFLKERITNHPKFGEALDIILPAHSKDEKAKWLEKGLGAFIAEYIIFYQRDLKSQVETISDCRFEKRFFKKVDTETGEVETLRDGPKCCAKSNPKFQEFRIWQQINNLIAYNDREEEISISDEVKTDLFAHLNEKENIEPDELKKWIRKKVKGVEEINAVKMWSGNRTMHFLKGIFKRGNYDAKHILENEETYLRLWHLLYSVGDEKGIKGGLKKIDANLPQEIINVFCAVDFKEKQYASLSLKAICNLVPLMRCGSLFKEADVTAKAKKRIELFLKGELDNEFDPKTLTRLKQRKTVNDFKGLSYFETASLVYGKHTAEAKKQFDVPGEIHPVPRHSLRNPVVEQIVNETLMLVKDIWTEYPELRNGEIRIELARELKSNKEQRERTSKAQDASKDYNKEITEEIRRHKGASYNPPLNEIEKVKLWKEANCQSPYTGKTLNITEVLSSYTNIEHIIPKARFYNDGLINKTICESHINDDKDKMTAYEYMNTGTKCQSEKLSYDEFLATIKRFPPAKRRMFTMQEIPNDFIERQKKDTQFIATRIREELGQVVGLNNVKTTTGQVTDYLKEQWGLAELIKRLIKPRFEALQDRYKIELIKEVPVIGKDDKPTGKNRTVIKGYSKRFDHRHHAIDALIVACTKQGIIQQLNLLNQITSGKIKSMAETKGGSLRKFIPPTGSSDPDATKFYSIAEEAVNNIVISYKNKKRLATKRINSVQKFSEEQNAIIKFKHPEQKSSWNIKGKLHDDQPFGKVYFKKREIPVEDSFERLKDIVDDKIKFAIAGRIEEFKNAATSTKDKSKAVSLAKKSVDVRPIIIKEKIEWVEVKEEKFLFVKNRKIYDAEALQKTLSISQLKRIVNKEAREDIFKHLAKAEYEGKTEKAFGPDGFVEFNHNREAAKKAPIYTVRVIEEGDEESVGKTPLYTPERKLDVEKGGNFCVAVYEHLETKDRKFDVVSFFDAVHLKTSGQNPFQTEAGVELEKAGYQMIFTLTHFDLVYVPYPDEKKEDIPLNKNDKRYSAFWFDKGKQRLKRIYRVVKFSGTDFYFQPHTYSTEITIHDGKAKSAKEYQGEFGKGTNGTAYIIGTDSNPIKKACFKISVNKLGAITLL

SEQ ID NO: 22248 - protein, 1431 aa, unidentified
  REGION 1..1431: note = Cas Enzyme sequence
MAKNILGLDLGTNSIGWALIKQDFQNKQGEILGMGSRIIPMSQDILGDFGKGNKVSQTAARTGYRGVRRLRERFLLRRERLHRVLNVLNFLPDHYASQIDFEKRFGKFKEETEPKLVYDGKEFIFKKSFEEMLTDFRKHHPQLLENDKKIPYDWTIYYLRNKALSHKIKKEELAWILLNFNQKRGYYQLRGEEEEENPNKLVEFYSLKIVDVLADEPQKGEPDIWYSLVLENGWIYRRSSKMPLFDWKDKTRDFIVTTDLNDDGSIKTDRDGNEKRSFRAPSENDWTLVKKKTEQQIDQSHKTVGTYIYETLLQNPKQKIKGKLVSAIERKFYKEELKQILEKQKEYHQELQNDDLYSDCVRELYRNNEAHQLTLSKKDFVHLFMEDIIFYQRPLRSQKSSISNCTLEFRKYKDENEVEHTQYLKAIPKSNPYYQEFRIWQWIYNLNIYKKDNDNNVTNEFLNTTKDFENLFEFLNNRKEVEQKPLLKFLLEQKDFKGKLLNIEAEKYRWNFVEDKKYPCNETKTMISSRLEKVKNISDDFLTREIEQKIWHIIYSVNDKIEYEKALKSFARKNNLDENSFFEAFKKFPPFKSEYGSFSEKAIKKLLPLMRLGRYWNYADIDKYSKDRIQKIITGEYDENIKDKVREKAIHLTTENDFQGLQLWLAQYIIYGRHAEASITGKWNSAEDLEVFLKEFKQHSLRNPIVEQVITETLRVVKDIWMKYGNGAKDFFSEIHIELGREMKLPADDRKKLTNQISENENTNLRIKALLAEMMNDQSVENVRPFSPMQQEILKIYEDGILKSDIEIEDDILKISKTAQPSSSDLKRYKLWLEQKYKSPYTGQIIPLNKLFTAEYEIEHIIPQSRYFDDSFSNKIICESAVNKLKDNYIGLGFIKQFGGTIIELGFGKSVTVLKEKEYEDFVKKHYANNRGKRNKLLLEEIPEKMIERQLNDTRHISKYISGVLSNIVRVEDGTDEGVNSKNIVPGNGKITTTLKQDWGLNDVWNELILPRFERMNQLTNSTDFTAWNENHQKFLPTVPIEFSKGFSKKRIDHRHHALDALVIACATKDHVNLLNNQSAKSDTKRYDLQHKLRHTEKWIDKEGKERDKFTAFKKPWEHFTVEAKNSLDKIVVSFKQNLRVINKATNYYEKYVEKEGLKTKERVEQHGTNWAIRKPMHKDTVSGKVDLPWVKVPKGKILTATRKALDTSFDLKTINAITDTGIQKILKNYLEFKGSSELAFSPEGIEDLNKNIEKYNDGNPHQPINKVRVFELGSKFQVGQTGNKKNKYVEAAKGTNLFFAVYEDKNGKRSYETIPLNEVVERQKQGLSVVDLKGANDFYLCPNDLVYIPSGDELDNINNIDFKNPTKENNERIYKVVSFTGNRLSCIPYTVATTIVNKLEYTQLNKIEFTKEKEIIIKLNMDRLGNISKA

SEQ ID NO: 22249 - protein, 1392 aa, unidentified
  REGION 1..1392: note = Cas Enzyme sequence
MKRILGLDLGTSSIGWALVNESEDEREQSSIIKLGVRVNPLTVDEQRNFEAGKPITTNAERTLKRSMRRNLQRYKLRRDNLIEILTEHGFITPETILAEQGNKSTFETYRLRAKAVTEEISLEELARVLLMINKKRGYKSSRKLDTNEDGKIIDGMEVAKQLYDEGLTPGQYMLRLMDSGKRYTPDFYRSDLKDEFGRIWDFQKTFYPELLTDELRQELAGKNEKQTWAICAKTFSLVGLKRTAKGEELKRENYKWRVDSLSEKMDLESLTVVLQKINGQINGSSGYLGEMSDRSKELYFKKQTVGQYLMSRLDKNSHYSLKNKVFYRQDYLDEFEMIWENQARYHSELTDSLKHEIRDVVIFYQRSLKSQKGLISFCEFENRQMETVKYGKKRLKTVGLRVCPKSSPLFQEFKIWQILNNIQVSGKVVRKQSVDLFGETVEMANGKRFLYQEEKEKLFRELNIKAKMSKAEVLKLLFKNHKELDLNYKEIEGNRTQAALFAAYQTIIDMSGHGTHDFSKMCADDVMDIVSNVFGGLEFGTDILCFDSSLEGKAFERQPAYRLWHLLYSFAGDNSKTGNEKLISKISELYGFDREYAAIIAGISFQLDYGSLSAKAIRKILPYMKEGNEYSVACGYAGYRHSKNSLTKEELANKLLCNRLKPLPRNSLRNPVVEKILNQMINVVNSVANVYGKPDEIRIEMARELKNSAKEREEMTKAISKATADHEYYRQILKNEFGIENVSRNDIIRYKLYMELKDKGFKTLYSNTYIPREKLFSKEFDIEHIIPQARLFDDSFSNKTIEVRSVNIEKGNMTAYDYVCGKYDADKVSAYKVRVEELFKNGTISKTKRDKLLMSEADIPSGFIERDLRDSQYIARKAREILESLVRTVVPTTGSITSRLREDWQLVDVMKELNWDKYNRLGLTDFVVDKDGRRIRRIKDWTKRNDHRHHAMDALTIAFTKPSYIQYLNNMNARSDKGSSIYAIEKKELYRDNGKLKFQPPMPLDVFRAEAKRHLDGILVSIKAKNKVVTRNTNVSKIKGGTKKKVQLTPRGQLHNETVYGRIKRYVVKEEKVNASFDMQKIDTVANMRYRMALSDRLQQYGGNAKKAFTGSNSLQKNPLYVDDMHIIAVPERVKTVGFEYVYTIRKEVTPDLKIDKVVDSKVRNILKARLEQFGNDAKKAFVNLDENPIWLNKEKGIAIKRVTITGVSNALALHDKRDNSGKPMLDVNGHKMPVDFVSPSNNHHVAIYMDADGKMQDDIVSFYEATMRANQGYPVIDRDKNRSEGWQFLFTMKQNEYFVFPNEETGFDPNEIDLLDPNNYPIISPNLFRVQKLSKTEGRIYMFRHHLETTVDDKKELQEVTWKRINSLDKLKNVVKVRVDHVGRIVSVGEY

SEQ ID NO: 22250 - protein, 1280 aa, unidentified
  REGION 1..1280: note = Cas Enzyme sequence
AIHLYLIIRYINLSFNYFCNFYRIIAITHIMKKILGLDLGIGSIGWALIGIDEEKTEESKIEGLGSRVILLKENETTGITQGNGETINRQRTLKRSMRRNMDRYQQRRKMLAQLLEEYGMNFSESLLKLSPLELWKLRSDAARGEHLSLPEIGRVLYHLNQRRGYRSSKDENQENKNSTYLSAIGEREKEALSHDETPGQYFYRKLNESRYQTERGHTACSYRVKEQVFPRRMYEAELKQILTSQAVYYPEILSEENQARIFNIIMYQRPLRSCKHLVSICEFESKEIINNKGKKIQIGPRVAPKSSPLAQLCRIWETVNNIELKNYKNKSKKKQSTIPLFGDGRLSEFIYTLNNSERTAIAEFLSKNEKMSSKELLKILGLKKDDGFTVDKNVSKGIKGNSTYCALKTALEDEPDAEKYLRFDIHSEESSLVDTETGEILKKVSSSYLKEPLYMLWHTVYSINEKEELSKALNSKFGIVNPSTIDKLFHLDFRGEGYSNKSSKFICKILPYLTDGLKYSEACEMAGVNHSSSLTKEENEKRELTTCLEPLPKNSLRQPVVEKILNQMIHQVNAIVKENGPIDEIRIEMARQLKQSKEERNREFSRNNARERENKKISEIISGYGFKPSKNRIQKYRMWKESEECCMYCGKPIGVHEFLSGMDVEKEHVIPRSIFFDDSFSNKVCACRDCNHRKGQMTGFDFMQNEGEKKFKEYTDRVERLYAQYKTSKGTAGISRTKHDRLMTSKSEIPQDFIERDLRQSQYIAKKAIEILKGICRNVYASSGSVTDFFRHAWGYDKILHELNLPYYTKAGQTETITVNHKGSSWEEERIKEWSKRLDHRHHAIDALTIALTRQGYIQRLNTLSSISPDNESKIEGEYMRQGQNLDKWASEQFHFPYHAVKKAVSEIAVSFKSEGKVTVPGKRYIYKRGKAIHVQSGLMIPRGPLTEDSVYGIIKRVNSKTGIGELFKQPQNICSPKIREAIENRLSEFKGNITKAKNSLKKRPLAVSGKDTNPATAAVFESIVVIRYKIEAIKYSKVDQIVDIPVREAIKRRFEELNHSDEAFAKSLSERPIFRDNDCRFPIKRVRCATNNKLESMTVIKKDADGNPIGYSLNGNNHHVALYETPEGTVEISVIPFTHAVRRKQLGIPVIIKDPQQVWEIVSDRDDIEEDILSRIPMPDCKFLLSMQINDMFVIGLTDEELSDCKMNRDFATLTSHLYRVQSISWRDYVLIKHTSALTRSRKEQSANGNYIRITSLETLKKLNNKKVRINRLGKIEFL

SEQ ID NO: 22251 - protein, 1124 aa, unidentified
  REGION 1..1124: note = Cas Enzyme sequence
MDKLYRIGLDIGIGSVGWAVLENDPITEEPNRILKVGVRTFSPNEVDKTGESTAKARRESRGSHRRNRRKNFRKHRIENLIDRTFGTKFQEELKEISNVDVYMLRSDALDRKLSEIELVKVIFNLLKRRGFKSNRKNQSQSKDEGKLKSSISENIKFLEDKGYRTWGEALYKDEKFKYVQDGKVFYNIRNHEGDYRNCVSRDMLKDEILLILNKQKEFNNKITTEFIDKVIEIFESQRNFDIGPGQPSPYSAKFEVGNCTFLKEEKRAPKASYTFELYTALSKVNSLKIDDEELSFEQKQVIIEYFKEKKEVSFAQIRKLLDIPENKLFNLCRYQTKSKKNNTDEADDLIKVSEKSILLSMARSYEIRQKLKLENSENNSDLIDEVALMLSLCKSDSTIEEYISKNDLLKNLSQEQIESISSLNFDKFGSLSIKAMKKVIPYLLQGKRYDEACKCAGFNHSSFEYEKYKYLKGEFIQERLQDVTSNVVKRAVNQTLRIVNEIIKKYGSPQFVTIELARELSKSKQDRNKLTAKQNDNFKNNEEVKKKLKELYNLDNPKGQDILKYRLYEEQSAKCMYSGKAFEVGRLFEPNYVQIDHIIPFSRSMNDSYNNKVLVLSCENQNKGNKTPFEYFGSDEKKWKDFVARVNLLRNKEKRQFLLKENFDEKVEKDFIDRNLVDTQYMARFLYNLFNDFLLTTPSRKYKRVIRCVKGAITNYLRKCWNIKKIREDGDTHHAVDAAIIATVTDGQIQKITKFNKFKEKFKYDEKADKYINILTGEVLSESEKKEFEQININNIARILEYPYPEFIKELKLRTRTNYNTLSYTDEEKLELARIGYSNEEIEATKPLFVSRMKTVKNTGAIHEETIMSIREYDESKMLIKSVNLSKLKLCNKPEEIILKDDKYPECSIENYYRPKDDRLLYLKLKNYLKENEKIPDNMDFHKPKKDGTDGPLVKKVKVYEKASNCVITPRGGAANDKMYRVDVFEKNNKYYLCPVYKADVYMKKLPNRVIEIGKEWTEIDDSFMFLFSLYQNDVILLENKKVINLKKNFKNENSCKKDEISNNKFLLYYTSTGITGASISVVTHDNCYKIDSSGVKNLKSIEKYYVDIMGNVYKAPKEERKGF

SEQ ID NO: 22252 - protein, 1276 aa, unidentified
  REGION 1..1276: note = Cas Enzyme sequence
YLIIRYINLSFNYFCNFYRIIAITHIMKKILGLDLGIGSIGWALIGIDEEKTEESKIEGLGSRVILLKENETTGITQGNGETINRQRTLKRSMRRNMDRYQQRRKMLAQLLEEYGMNFSESLLKLSPLELWKLRSDAARGEHLSLPEIGRVLYHLNQRRGYRSSKDENQENKNSTYLSAIGEREKEALSHDETPGQYFYRKLNESRYQTERGHTACSYRVKEQVFPRRMYEAELKQILTSQAVYYPEILSEENQARIFNIIMYQRPLRSCKHLVSICEFESKEIINNKGKKIQIGPRVAPKSSPLAQLCRIWETVNNIELKNYKNKSKKKQSTIPLFGDGRLSEFIYTLNNSERTAIAEFLSKNEKMSSKELLKILGLKKDDGFTVDKNVSKGIKGNSTYCALKTALEDEPDAEKYLRFDIHSEESSLVDTETGEILKKVSSSYLKEPLYMLWHTVYSINEKEELSKALNSKFGIVNPSTIDKLFHLDFRGEGYSNKSSKFICKILPYLTDGLKYSEACEMAGVNHSSSLTKEENEKRELTTCLEPLPKNSLRQPVVEKILNQMIHQVNAIVKENGPIDEIRIEMARQLKQSKEERNREFSRNNARERENKKISEIISGYGFKPSKNRIQKYRMWKESEECCMYCGKPIGVHEFLSGMDVEKEHVIPRSIFFDDSFSNKVCACRDCNHRKGQMTGFDFMQNEGEKKFKEYTDRVERLYAQYKTSKGTAGISRTKHDRLMTSKSEIPQDFIERDLRQSQYIAKKAIEILKGICRNVYASSGSVTDFFRHAWGYDKILHELNLPYYTKAGQTETITVNHKGSSWEEERIKEWSKRLDHRHHAIDALTIALTRQGYIQRLNTLSSISPDNESKIEGEYMRQGQNLDKWASEQFHFPYHAVKKAVSEIAVSFKSEGKVTVPGKRYIYKRGKAIHVQSGLMIPRGPLTEDSVYGIIKRVNSKTGIGELFKQPQNICSPKIREAIENRLSEFKGNITKAKNSLKKRPLAVSGKDTNPATAAVFESIVVIRYKIEAIKYSKVDQIVDIPVREAIKRRFEELNHSDEAFAKSLSERPIFRDNDCRFPIKRVRCATNNKLESMTVIKKDADGNPIGYSLNGNNHHVALYETPEGTVEISVIPFTHAVRRKQLGIPVIIKDPQQVWEIVSDRDDIEEDILSRIPMPDCKFLLSMQINDMFVIGLTDEELSDCKMNRDFATLTSHLYRVQSISWRDYVLIKHTSALTRSRKEQSANGNYIRITSLETLKKLNNKKVRINRLGKIEFL

SEQ ID NO: 22253 - protein, 987 aa, unidentified
  REGION 1..987: note = Cas Enzyme sequence
LVAETNDKAPGKIASDVYALRARALDDKLPLHHIGRALFHINQRRGFKSNRKTDKRDNDQGKIASGISRLRDKLASEGMRTLGEYLNHRHQAGNWVRVRPSRVPGKDDKEEDGYGFYPERALLQDEFNAIWTAQAAHYPDVLTEERRTHLETIIFFQRPLKPVQVGKCSFNPGEERLPRAHPLFQEFRLYKEVNELELVDRNQDHHKLSLDQRDALIAQLKTQREAAYSALRKTARAPLGTRFNKETESRTKMKGDEVAAELSAKTRFGQAWISMPLEERWIIVDTLRRVEDPLELTAWLEQHYGLDGEHIDAILAARLPEGYGRLGETALTEILVELKAAVISEAEAARRAGYDHALLQRGAGLEALPKYQEVIARRIPPGTGNPDDPYDVEKGRITNPTVHIGLNQLQKVLNALIRRYGKPEQIAIELARELKLNDEQKREKNIEIARNTRAAEQRSAKLVELGVPDTGYNRVLLKLWEELNLRAPENRVCIYCGEPINIETLFSSAVDIDHILPWSKTLDDSQANRLVCHVACNRQKANYAPAEVPQWQGRYDDILARANTLPLNKRWRFGRDAMKKFADEETFLARQLTDTQYLSRLAHAYMAALYPDEEPDAQGVLARKNHVRVITGRMTEMLRRQWGLNSLLADHNQKNRNDHRHHAIDAAVVGVTTRALLQRIATVAGGREAQALEETIGKIEPPWPGFRDELQAVIKRIVVSHKPDHGTLPKPGQGGQTAGQLHNDTAYGLTGETDSRGTPIVVRRKPFTSLTEKDLPSIRDRQLAQALGSAIAGRSGKELQAALEQFRDRDDYKSIRHVRVVEPLNVIPIRDGTGRAYKAYKGDANYRYDVWELPNGKWMHEVVSMFDAHDRSWTSAVHIHHPAARRVLSLKQNDMVAYDHPQDGPTIGRVVKFSQSGQMTFAPHKEAGALKARDADPEDRFRYFYKSGSAMKDIGLRQVRVDEIGRVFDPGPRDKEARNARKKKSTD

SEQ ID NO: 22254 - protein, 1480 aa, unidentified
  REGION 1..1480: note = Cas Enzyme sequence
VICFKIVLQNYELFFSKQVISVEKYIFLEKMYFESNIMKKILGLDLGTNSIGWALVNESENNDEKSSIVKLGVRVNPLTVDEQQNFEKGKSITTNADRTLKRSMRRSLQRYKLRREALIESLKEHGFISDDTILSENGNRTTFETYRLRAKAAVEEITLEQFARVLLQINKKRGYKSSRKAKGTEDGQLIDGMEVAKRLYEEHLTPGQLCLQLLNAGKKYFPDFYRSDLQAEFDNIWSKQALFYPEIFTETLKEALQGKNEKATWVICRDNFSWTETERVWNELEAKHENIVKEKRLVGIKREGNIQEQKIENFIWREKALSEKMHPEQIAVILSKINSQINNSSGYLGTISDRSKELYFNKQTVGQYQMVVLNNNPNASLRNMVFYRQDYLDEFNTIWEEQAKYHPELTDELKTEIRDIVIFYQRRLKSQKGLISFCEFESKQIEVTVEGKTKTKTVGSRVAPRSSPLFQEFKIWQSLNNLEVSGKGKKTKKKKGALPNENVDQEDLLLVYGKRELYQEEKAILLHELSIKEKLTKTEILKLLFDNPQELELNLPSIQGNLTVATLFKAYQTIIEHSGHALDLKKPANEILADMKTIFTALGWNTAILQFNSDAESLDAEPMYKLWHLLYSFEGDNSNTGNENLIQKLMRDYGFDRDSAVILANITFQDDYGSLSTKAIRKILPYLKEGNKYDIACEYAGYRHSKSSLTKEEKENKVLVDKLKILPKNSLRNPVVEKIINQMVNVINTIIETYGKPDEIRVELARELKKNAKEREELTKSLADTTKVYDEYKKILTKPLSEGGQFGLTYVSRTDIIRYRLWKELEQNGYNTLYSNTYISPAAVFSGNFDIEHIIPQSRLFDDSFSNKTLELRSINSEKGNLTAYDFVKEKYGETSHENSLDKYLARVEDLYKKGIISRGKYNKLKMQTKDIPDGFINRDLGNTQYIASFARTMLETLCKNVIATTGSVTDALREDWQLIDVMKELNWDKYDKLGLTYYEENREGKKLGRIKGWTKRNDHRHHAMDALTVAFTKNAFVQYFNNKNASLTPTSNEYAIRAKYFENGKAIPPMPLNEFRAEAKRHLENTLVSIKSKNKVVTQNNNVTKKRGGVNKKVQLTPRGQLHLETVYGARRQYVVKEQIVNAKFDLEKVNTVCNKKYRDALLQRLQNNGNDPAKAFAGKNALSKTPIYYNVGFEKFEKLPEKVKTVTTETLFAIRKDVSSLTDLKQVEKVLDKKVKQILLSRIEEFNGEIKKAFSNLDENPIWLNKEKGISIKRVTITGISNAEALHEKRDKEGKLILDSEGNKIPVDFVNTGNNHHVAVYRMPVLDKMGNPVINEDGVPKYELQEKVVSFYEAVARSNNGFPIIDKTYKVSEGWEFLFSMKQNEYFVFPNEQTGFNPQHIDLFNPDNYSEISRNLFRVQKIAPKNYVFRHHLETTVADSPSHLKRITWTDFRSSKGLDKIVKVRVNHIGEIVGVGEY

SEQ ID NO: 22255 - protein, 1431 aa, unidentified
  REGION 1..1431: note = Cas Enzyme sequence
MNNTENYILGLDLGTNSIGWAVINDAQNLGETPEIIDLGVRINPLTTNEKEGFTQGKAISTNAGRTISRGMRRNNQRYKLRRLNLINILKNNNIINNETILGENGQNTTFELLKLRAKAAKEQVSLKDFGRILLKINKKRGYKSNRKAQDNDEGQLIDGMAIAKILHNENLTPGQLSLRLVNEGKKVLPTYYRSDLQAEFDKIWEFQKQFHPDILTDELYTELIGKTKKTTIDYFQKYNINPAEYKYSNQSEKIKVPLQLRVDAISKEISLENLALVIIEINGNISNSSGLLGSISDRSKELYFSEQTIGEYLYAQLENNPHTSLKNQVFYRQDYIREFETIWETQANFHPELTIELKKEIGDEIFYQRKLKSQKGLVSFCEFESKEIETDNDGKKSTKIIGARVAPKSSPLFQEFKIWQILNNILIRRKGVKKRTAEKVSQQNLFNKEVSIFELNLEQKELLFEELNLKDCLTSDNCLKILGYSNKEWEMNYSKDAKIEGNATNKAFYDAYLQILEIEGYESDFIKNNDALKIKERIFTIFNELGIDTKILDFDAELSGKDFEKQPAYQLWHLLYSYESDNSPSGNERLYSRLEQKFGFKREHSEILANVKLLADYGSLSTKAIRKIYPYIRENKFSEACELAGYRHSKHSITKEEIDNKALKETLTILKKNSLRQPVIEKILNQMINVVNELIYKYSEKDDEGNIVKYHKFREIHIELARELKKSAKERSEMQTQINKSTKENKKITKILQEDFSIMYPTKKDIIKYRLWLELSPIGYRDLYTNKEIKKELLFSKNNTIEIEHIIPKARLFDDSFSNKTLAFSNINKLKGDNTAIDFISNTYNSDLDNYIERVETLYKAKTISKAKYLKLLKKTSEIGDGFIERDLRETQYIAKKAKDILSQITKNIVSTSGSITDKLREDWGLIDIMKELNLPKYRALGLTEMQERKHGHKVETIIDWTKRNDHRHHAMDALTVAFTKLSYIQYLNHLNARKDESDKKHASVIKTQNNEMTKVIDHNGQEKRVFKEPMPKFRKIAKEYLENILISHKAKNKVITININKAKNKVTSEIIDKNGNKKTIKGQITKTPRGQLHKETIYGTYQYYETKEVKISSILNKETINKVANPLYKSLLLKRLEENNNDPKKAFSGKNSINKNPIFLDKNKTKTMPDSVKLAWLETGYSIRKDVNPSNFDSEKSIEKVLDKNIRNILIQRLDEYNGDPTKAFSNLDKNPIWLNKEKGISIKRVTITGVSNTEPIHYKKDHLGNFILNDKGDKIPVDYIQTGNNHHIAVYKDDKGVLQEQVISFYEAVERANQGEPIINKTYKQEEGWKFLFTMKQNEMFVFPSDDFNPNDIDLLDRKNKKEISKHLFRVQKISSKNYMFRHHLESTLQDNKELENIVFKLIRNLKPLTNIVKVRINHLGDIVSVGEY

SEQ ID NO: 22256 - protein, 1380 aa, unidentified
  REGION 1..1380: note = Cas Enzyme sequence
MKRILGLDLGTTSIGWALVNEAENNNEASSIVRLGVRVNPLTVDEKSNFEKGKAITTNADRQLRHGARINLQRYKLRRQNLHDYLQKQGWLGTEAMYEEGKASTFETYKLRAKAAEEEISLHEFARVLFMLNKKRGYKSNRKANNKEDGQLFDGMTIAKKLYEEHLIPAEYSLQLLNKGKKFTQGYYRSDLNAELERIWDEQKKYYPEILTDEFKQQLEGKTKTNTRKIFLAKYGIYSADLKGLDRKLQPLKWRVEALQQQVDKEVLAFVISDLKGQISNTSGLLGAISDRSKELYFNKQTVGQYLWASLEENPHISIKNKPFYRQDYLDEFEKIWETQAAFHKPLTPELKQEIRDIIIFYQRPLKSKKTLISVCELEQRKVKATIDGKEKEITIGPKVAPKSSPVFQEFRIWQNLNNVLLIDNDTNEKRPLDEDERNLLYEELSIKAKLSKTETLKILNKKGKQWDLNYKELEGNRTQAILFDCYNRIITLTGHEECDFKKIKASEIRHYVSTIFKNLGFSTEILDFDPSLEKHELEKQPMYQLWHLLYSYESDNSRTGNESLLRKLETTFGFPEEYATVLCDVVFEEDYGNLSAKAMRKILPYLQAGNDYSQACAYAGYNHSRHSLTKEELDQKVYKERLELLPKNSLRNPVVEKILNQMINVINAIIDEYGKPDEIRIEMARELKSSAAERENAIRAISQGNAENQRIREILEKEFALSYISRNDIIKYKLYEELKPNGFKTLYSDTYIPKDKLFSKDFDIEHIIPKARLFDDSFSNKTLEARDINLAKSSKTAFDFIKEKYGEEGAKIYKERLNILLKDSVINEAKYNKLLMTEADIPSDFINRDLNNTQYIAKKAYEILGELVRTVTPTTGKITNRLREDWQLVDVMKELNFEKYEKLGLTEIVEDRDGRKIKRIKDWTKRNDHRHHAMDALAIAFTKPSFIQYLNNLNARSNKGDSIYAIENKELHYEEGKLRFNAPIPVNEFRAEAKRHLSAILVSIKAKNKVMTQNVNKIKTKHGIIKKIQLTPRGPLHNSTIYGTKMRPIIKMVKVGAALDEATINKVSSPAIREALLKRLNEYSGNAKKAFTGKNILEKNPIYLNAGRTKTVPSLVKTVEWENYHPIRKPITPDLKVDKVIDKGIRNILKARLEEFNGDAKKAFSNLEESPIYLDEAKKIALKRVSIEGVLSAIPLHTLKNQAGKPITGKDGKPVLGNYVQTSNNHHIAFYYDEDGNLQDNAVSFFEAAERKSQGVPVIDKDYNRDKGWRFLFTMKQNEYFVFPNEATGFIPSEVDLTDEANYSIISPNLYRVQKVSRIDKGTSASRDYWFRHHLETILNDDAKLKNLAFKRIRGLLELKDIIKVRINSTGKIVTVGEYD

SEQ ID NO: 22257 - protein, 901 aa, unidentified
  REGION 1..901: note = Cas Enzyme sequence
  REGION 893..896: note = misc_feature - Xaa can be any naturally occurring amino acid
AEAEGKSKKEKEGYVAQVKGRYQALKEKGQTIGQHFAEELRANQQTAPRGVYYTYRIKEQVYPREAYLEEYDHIMAVQREFYPEILTDELIRRIRDRIIFYQRPLKSCKQLVSTCEFEKKERVVQVKCINKDGVEELVERTITIGPKVAPKSSPIFQVCKVWESIQNIRLYYPDGTELKLEQEEKQKLFDYLQKNDKLSLTALRKVLKIKPKDKLWCDKLLDKGIAGNTTTAILRKALKGYEQYEGLLRFDLTIRDGHKADEDGVIRPIVDESYQNEPLYKLWHILYSIEDRADMRRALVGQLGIKEEDLDDGLMDALYKIDFVKQGYGNKSAKFICKLLPHLQEGKMYSEAAEAAGVRHSDSMTAQERDERSLLDEIPLLQKNALRQPVVEKILNQMINLVNALKREHGEIDEVRVELARELKMSREEREETTKSNNAREKENKDIAERIAEYGLTPTKSRIQKYRLWQESAESCIYCGEHVDLVQFLRGEGIEVEHIIPRSILFDDSMSNKVCACRSCNGKKGNRFAMEYIKSLGMEREQQYISRVEGLFEGKKISHSKRQRLLILPKDLPEDFIERHLRLSQYISREAQGILRKGIRLVSASEGSVTAKLRKLWGYDNILRDLNLERYRSMGETEVVTVEHRDGARTDERIKDWSKRKDHRHHAIDALVVACTRQSYIQRLNRVNAEADREEKDAFIKVQQQKPSHSKREKLSSLENWLIRQPHFTTGEVMKHAEGILVSLRPGKRTISRGRNIYKRSGKTDVQRGVLIPRGALSEETIYGVIRVDGEDKVVCKYPFQSLKLKDVEYIVDKALRKEVKKRIKQRGEKEAFAEPLYLDEAQTQEVRSVRCFTGKDQAKLIPLRYNDESEAVGFVAPGSNHHLALYRDVDGXXXXGVITI

SEQ ID NO: 22258 - protein, 1089 aa, unidentified
  REGION 1..1089: note = Cas Enzyme sequence
LNSANVNYRVGIDVGSYSLGMAAIAIDDDGKPTEILSAISLIHDSGVDPDSAKSAATRLATSGIARRTRRLYRRKRKRLAKLDKFISSQGWPLKEFEKYEDPFYPWRVRAELATTAITDQQELGEKLSIALRHIARHRGWRNPYSKVTALYTVTEPSDAFLAMQEECAKQLGRTIPETITVGQLVTGMNLGKTRLRGENSLLAARPRQSDNANEIHTIAKVQGLSNELVRQIIDHVFAAESPKGSAAEQVGKDPLQPTKKRALKASDAFQQYRIAALIGNLRIRGGKGNRRLTTEETRLVFDYLRSLPAKQEPTWQLVAEQLKIDRGNLVGTAIMTDDGERAGAKPPVHDTNRIMENTKIKPLATWWKSADADARAAMVKALSNAEVDDFDSQAGAQVQEFFFGISDEDQEKLDGLHLPIGRAAYSEDTLDRLTKRMIGEGMDLYEARQAEFKISNDWAPPAPEIGERVGNPAVDRVLKATARWLNAAERQWGAPKSVNIEHVRAAFMSESSARELDRDNQQRAKRNVKVVAEMQEKLGIEGRPSRADVWRFQSIQRQNGKCAYCGAEISFKNSEMDHIIPQAGEGSTNTRDNLVAVCRECNSSKSNIAFAVWAENTSRPGVSVQKAIERTHHWVTDSGLRKPEFDKFRKQVCDRLRRKATDEPIDARSLESVAWMANELRSRIAQKFKDGDTKVRVYKGALTAEARRASGISGKLEFVDGKGKSRLDRRHHAVDAAVVAFTSNYVAETLALRSNMKFDQELRRKAPQWREFTGSDHVHQVEWTKWKYRMQALAELLNNALVQDRIVVMHNLRLRLGNGAAHEDTIGKLTRLKVGDAISTTDIDRASSEALWCALTRDPDYDPKTGLPENPNRTIRIHGTHLTASDEITVFPVAAASIPIRDGFAKLGSNYHHVRLFRVPSGKKYKYCLMQVYTVDLLKFRKEDLFTVELKPQTISVRTCEALLRKALANGTAEYLGWLVSDDELLIDTSSFDTPGIVKLREEYGPVNRWRLAGLTSVTRLNLRPLYLSKEGLKPNVNPEIKKIIDNRSWIITVNKLFSSGHVKIIRRDALGRPRLHSAAHLPICWEVK

SEQ ID NO: 22259 - protein, 1506 aa, unidentified
  REGION 1..1506: note = Cas Enzyme sequence
MKTILGLDLGPNSIGWAKVEVDDEGNYLRNIKLGSRIIPMTQDMLGDFDKGVKVSQTATRTDFRGNRRLIERHLLRRERLHRVLHALKFLPKHYEDAIGWDRNEPATYGKFVNNSEPKLAWERQEDGSMRFLFMESFNEMVADFAQNQPSLVSDGKKIPLDWTIYYLRKKALTQPIKKEELAWILLNFNQKRGYYQLRGEEEEDNLTKRKEYYKLKVVGVEADGAPKGGKTWYNIHLENGWTARCQSKIPLDDWVGKVKEYIVTTEYEDDGKTPKCDKEGKVKRSFKSPEKDDWQLIKTRTEKFIDDSNKTVGAFIYDHLLEKPFDKIRRKYIRTIERKYYKNELREILREQTKYHEGLHSLEALKICAEELYKNNQQHQEYLLKKDMTFLLLNDLIFYQRPLKSKKSLIADCPYEVYKYDDKLTGKKGQKKIKCIAKSNPYYQEFRLWQFIANLRLFSVTDGKEVTAEYLKTEEDYVRLFSFLNDRKDIKQETFLRSFLKLKKVPIGSEKIYPIRWNYIEDANKSYPCNATRHELLLAFDRADIPRELLDVEGREYRLWHLLYSIEAKEETESALRKLKANKAFGDLNIDDDFVNSFLKIKPFEKEYGAYSEKAIKKLLAVMRRGSLWKEADICEATKQNIAKILQNDIDEKLKKKIEAAVSSFNKLSDFQGLPTWLACYVVYGRHSEAAQIQCWQSPEDLKTYINKFKQHSLRNPIVEQCLLETLRTVYDIWKDAGQIDEIHIELGRNMKSTAEQRARKTNEFLRNENTNLRIKNLLVELKNDDKIENVRPYSPSQQEILRIYEEGALQELSKDDEMFEDISKISKMAQPSPTELSRYKLWLEQKYRSPYTGRVIPLSKLFTTAYQIEHIIPQSRYFDDSFNNKVICESEVNSLKDNMLGYEFIKECGGRIVHCTLLGDVKIFTKEEYKDFVTKHYIDNTYKRDKLLLEDIPQEFSARQLNDSRYISKMVQTVLSNIVRAENEQEATSKFVVSCNGTITDRLKKDWGLNDVWNSIVCPRFKRLNEKTKTNAFGHWEDKAGKHVFQTTVPLELQRGFSKKRIDHRHHAMDALVIACASRNIVNYLNNESANSPEKREDLRKKLCDEKRKIRKPWKTFTQDAREALSDVVVSFKNYVRVINKATNYYEHYSSSGNKVMISQKGNDMWAIRKPLHKESVFGRVNLRIKVTVSLKKALENIPAICDKTLRDYINALVEKHFNTRQLLAHFKSINYHLNRQHVDKVEVWQFSDEKIEMVARRKSLDTSFDDKQISSITDTGIQKILLNYLQTKDGNAEIAFTPEGIEEMNKNISLYNDGKAHQPILKVRVATPKGMKYPVGQTGNKATKFVVAEKGTNLYFAIYENELGVRSYDTIPLNIVVERLKEGLSPVPQANEADIPLKFYLSPNDLVYVPTKENEDELCRDRIYKFVDSSGTTANFVPHTSANTIYNVDKEYAEKCCNGAVILNEYGLGSSQSKNQRALTGEMIKEICWKLKVDRLGNIIKVIK

SEQ ID NO: 22260 - protein, 1193 aa, unidentified
  REGION 1..1193: note = Cas Enzyme sequence
MGKKVLGLDLGVGSIGWCLITLDKDEKPQSILGMGSRIVPLSADDATEFTQGKAITKNKMRTVARTIRKGMDRYQLRREALKKVLREHGMLPDEALIKLPLLELWELRARAATPGEQLSLTELGRVLLHINQKRGYKHAKADEAAEAETKTGKETGYVAQVKGRYQTLKEKGQTIGQHFAGELRANQQTAPRGVYYTYRIKEQVYPREAYIEEYDRIMAAQRVFYPELLTDTLIHRIRDRIIFYQRPLKSCKQLVSFCEFERKEKIIRVKHTNRDGIEELVEKTITIGPKVAPKSSPIFQVCKVWESIHNIRLYHPDGTERKLEQEEKQKLFDYLQKNDKLSLTALRKELKIKPKDKLWCDKLLEKGIAGNTTAAILRKAFKGYEHYERLFRFDLVRRDSHEADEDGVIRPIIDESYQNEPLYKLWHILYSIEDRAEMRSALIGQLGIKAEDLDNGLMDALYKIDFVKQGYGNKSAKFICKLLPHLQEGKMYSEAAEAAGMRHSDSMTAQERDERNLLEEIPLLQKNALRQPVVEKVLNQMINLVNALKREHGEIDEVRVELARELKMSREEREKATKNNSSREKENKAIAERITEYGLTPTKSRIQKYRLWQESAESCIYCGKRVDVVQFLRGEETEVEHIIPKSILFDDSLSNKACACRSCNQEKGNRFAMEYIQAKGWEQDYIERVDSLFQDKKISYSKRQRLLMLPKDLPEDFIERHLRLSQYISREAQGILRKGIRLVSASEGGVTAKLRQLWGYDNILRDLNLERYRSMGETEDVTVEHRDGESTVERIKDWSKRKDHRHHAIDALVVACTRQSYIQRLNRVNAEADRQEMDAFIKEQQQEHKLSKKEKLSLLEHWLVEQYPFKTQEVKKHVEGILISFRPGKRTVTRGRNVYKRSGKTDVQRDVLIPRGALSEETVYGVIQAGGKDEIVCKYALQGLKAKDVDYIVDKALQEKVRERLSQYGEKQAFAEPLYLDEAKTQEVRSVRCFTGKDQSKLVPLRYNIEGEAVGFVAPGNNHHLALYKDDDGNVVESIVTFWQAVERARYGLPIVVVNPREVMEKALTIPELPESVLKALPASNLRLMEVLRMNDMFLIGMKDEEIKAAIKGEDYSTLSRYLYRVQKLSSMYYVFRYHLETEVKDEKKAEVKDEEEEEVKIPKFYRVQSMKAYVKLNPRKVKIDILGRISLA

SEQ ID NO: 22261 - protein, 1492 aa, unidentified
  REGION 1..1492: note = Cas Enzyme sequence
MKHILGLDLGSNSIGWALIEQDFDNKQGKILGLGSRIIPIEQKILSDFKEGTTVSQTAKRTEFRGIRRLRERHLLRRERLHRVLHLLGFLPAHYDTQIDFTKRFGKFIGDSEPKLAYNNEGFIFLESFNEMVEDFKKHKPQLFYIKSNGEESKIPYDWTIYYLRKKALQEKISKEELAWIILNFNQKRGYYQLRGEEEEKSTKNVEFYSLEITDVIADTPNNKGEIWYSIHLENGWVYRRASKISLEDWKGKVRDFIVTTELNEDGSVKLDKEGKEKRSFRAPSEDDWNLLKKKTEQNITFSGKTVGEYIYDHLLQNPNQKIKGKLVRTIERKFYKEELKAILEKQVAFQPELFTEELFVDCVRELYKNNEIHQNSLSSKDFVHLFLNDIIFYQRPLRSQKSNISSCSLEYRFCIDEETKQRRKTYLKVISKSNPYYQEFRVLQWLSNLKIYRKEDDKDVTSEFISSIENKEILYEFLMSEKEVSNKSILEFLLMKSLREIYPFAKETELKKELKKEITKYRWNYVYEEENDSKKYPMNETGYEIKKRLKEVKNIPDNFLTKDIEYQIWHIIYSVTDKYEYEKALMKFAQKHNLDAESFVENFKRIKPYPSDYGAFSEKAIKKLLPLMRFGKYWNYSDISEPVQVRISDIINGVDNENIKTIVREKAEKYQLNQEADFQGLPLWLAQYIVYGVHSEAADIQRWTSPSDLEEYLKDFKQHSLRNPIVEQVVTETLRVVKDIWEYYGKGEQNFFDEIHIELGRELKKTAEERNRMTKEINKNEETNLNVKKKLQELFEDKSAENVRPYSPIQQEKYRLWLEQEKKSPYTGQTIPLSRLFTDDYQIEHVIPQSRFFDDSLSNKVICESAVNAEKGALLGLEFIKKHGGEIIEIGLNKKATVLNEKEYKELVNELFANNRGKKAKLLMEEIPEKMVERQLNDTRYISKFISQILSNIVRSPQEDEGVNSKNIIPCTGKITAALKQDWGLNDVWNDLILPRFERMNNLTQTELFTTYSEKYQKKIPTVPLEHAKGFQKKRIDHRHHALDALVVACATRSHINYMNNQHALDKHKAKEEKQNARIDLRTVLCDKKYNDNAEDNYNWAFKKPWNTFTQDVRSALEMVVVSFKQNLRVINKATNYYEKWREEKGKMVKKKVKQEGINWAIRKPLHDDLPYGEIKYQTNYLKISENISKRKFIIDEFIRNQVERIYVENHSKNNLTKKYLKEYPVIDEKGKEVVSTDFRIEVIKYRKRKPISILSDRNSRTGITTIEKMLQTINKIADNVLKKELLLYLEQNNNDIDKAFAVEGIERFNSERKTPVYRLPFIEDGEKKIKLGSKGKYVEAAKGTNLFFGIYQGKEKRSYATIPLAEVIERQKQGLTSVPELNEKGEKLLFSLSPNDLVYVPVEGEDTEDIDFTNLSKEQRERIYKTVSFTGSECFFIKSSISSLIKNYDAKTKIGELGSLNKLEITIPDHIRIKEFCIKLKIDRLGNISKA

SEQ ID NO: 22262 - protein, 1526 aa, unidentified
  REGION 1..1526: note = Cas Enzyme sequence
MKNILGLDLGTNSVGWALISVDENGNLVKNIRLGSRIIPMSQDVLGKFDSGVTVSQTAERTEYRSHRRLLERALLRRERLHRVLHLLGFLPEHYAACIGWDRNDNATYGKFLPETEPKLAWRKADDGRYRFVFMQSFEEMLDDFKASQPSLVANGKRIPLDWTLYYLRTKALTKPIAKEELAWILLNFNQKRGYYQLRGEEEEETPSKCVEYHELKVVKVEATDEGKGGNVWYNVLLENGWVYRRQSKYSLDKWLGQTLPFIVTTDLEADGVTPKRDKEGNVKRSFRSPKEDDWTLVKKRTEDHLEKSGLTVGAFIYQHLLANPSDKVRGQLVRTIDRKYYKRELQAIIAKQMEFHPELRDAELLKACAEELYRKNEAHRAQLLAKDFKHLLVEDVLFYQRPLKSKKSLIANCPYEPRQYINKETGEIKDVNVKCIAKSNPYFQEFRLWQWISNLRLLRQADGQDVTAAYIKGNEDKERLFDLLNNQGEIKQEHILRDFLKLKKPKGGEFPLRWNYVGDKIYPANETRHAMNKAIKGMTVDKEEKETLGQLLDQPAVAYMLWNLLYSITDRNELASALRRFALTHGVSSVDAFVESFLKVKPFKKEYGAYSEKATKKLLQVMRLGKYWCGDELPEPAKRTKGNKQAVYDEMANRGICKQTLQNISNIIEEDIDERLMGALLNPDRPLTELSHFQGLSVSDACYVVYGRHSEVAEIVKWKDAGELNTFINNFKQHSMRNPIVEQCVLETLRTVRDVWEQEGQIDEIHVELGRNMKRTAEQRARDTQAIQRNENTNMRISLLLTELKNDPSISDVRPYSPSQRELLKIYEEGALENLTNQDEDIAKISRLAQPSTSELRRYKLWLDQKYVSPYTGRPIPLAKLFTPAYEIEHIIPQSRYFDNSFSNKVICEAEVNKLKDNNLGMEFIKKFGGKTKGILDEEAYKLHVTTNYAHNPAKRSKLLMEDLPTDFNSRQLNDTRYISKTVMALLSNVVREEGERETRSKHVVVCTGGVTDTLKKDWGLHDVWHNLVYPRFIRLNNLTGSQDFGYWRFLHEENKKKEEESKKVFQITLLPEYQRGFVKKRIDHRHHAMDALVIACASANIVNYLNNQSAANPHIHENLQRLLCDRKRLIRKPWPTFTQDAQKALEDLVVSFKNTVRVVNKASNTYLRYDKDGKKKRFKQEGEGLKAIRKPMHKETYYGEVNLIRKEMLPLKRALDDVNAIVDKELRASIKGLLRDGFNLQQVLANFKAKDFKFNKRDIKKVEVYVSSAKSTPMVATRKSLDTSFNAKRIADITDTGIQKILLNYLKANDNSPEQAFTPEGIAYLNEHIAEYNSGKPHQPILKVRVAEVKGAKFAVGQTGSKKDKFVEAQSGTNLYFAIYEDKEGKRHFETIALNVAAERLKMGQTPVPETNDAGLLLKFYLSPNDLVYVPTDEDRAAAHPSIDKRRIYKMVSATDKNSFFLPFEVASIIADQVEFEAKNKVGRVIEALEYTEQYESSAINKIMIKDVCWKLEVDRLGNITKIVR

SEQ ID NO: 22263 - protein, 1422 aa, unidentified
  REGION 1..1422: note = Cas Enzyme sequence
MTQKVLGLDLGTNSIGSSVRNLDLSDDLKGQLEFFSSDIFRSSVNKESNGREYSLAAQRSAHSRSRGLNEARRRKLWATLDLLIKYGFCPMSPDSLMRWRTYDKQRGFFREYPIDDKDFNAWILLDFDGDGKPDYSSPYQLRRELVTRQFDFDQPIERYKLGRALYHIAQHRGFKSSKGETLLQQETNSKQSLTDETTDVAGEMKASEEKLSKGLSTYMKENKLLTVGAAFAQLEDEGVRVRNNNDYRAIRSQFQREIETIFKFQQGLSVENEFYGCLVSEKKNIGTIFYKRPLRSQRGNVGKCTLERTKPRCALGHPLFEKFRAWTLINNIKVRMPEEEQAEQLPMKLRFELYNDCFLAFVRAEFKFEDIRKYLEKRLGIHFSYNDKTINYKDSTSVAGCPITARFRKLLGEDWESFHVDGQKQRQAHGKNNTSFHTVSYSTNDIWHFCYDAEEPEAVLSFAQDNLKWEKNKAEELVRIWSAIPQGYAMLSQKAIRNINKMLILGMKYSDAVLLAKVPEIVEITDGEILSVTEDYHRVEAQVRYEKQINNIVNALIAKYKSASEEYRFADHNYEYQLDKSDEEEIVRQIESCLGARKWGLMDADEQTDILQKVRDKYQNFFRSHERKFVESPKLGDCFEEYLVKRFPMVKGEQWKKSYHPSQIAIYRPVSAGKDRSALRLGNPDIGAIKNPTVLRVLNTLRKRVNQLLDDGVISPDETRVVVETARELNDANRKWALDTYNRIRHDENEKIKKILEEFYPKRDGISTDDIDKARYVIDQREVDYFTESKTYNRDIKKYKFWLEQGGQCMYTGRTINLSNLFDPNAFDIEHTIPESLSFDSSDMNQTLCDAHYNRFIKKNHIPADMPNYDKAVIIDGKEYPAITSQLQRWIDRVERLNRNVEYWKGQARRAQNKDRKDQCMREMHLWGMELEYWEKKLERFTVTEVTDGFKNSQLVDTRVITRHAVLYLKSIFPHVDVQRGDVTAKFRKILGIQSVDEKKDRSLHSHHAIDATTLTVIPCSAKRERMLELFAKIEEVNKMLSFSGNEDRTGLKQELDGLKNQLNKEVKSCRIGHNVSEIGTFINDNIIVNHHIKNQALTPVRRRLRKKGHIVGGVDSPRWQTGDALRGEIHKASYYGAITQYAKDKEGKVLMKEGRPQINPTIKFVIRRELKYKKSSTDSGFASWDDLGKAIVDKELFALMKGQFPAETSFKDACEQGIYMIKKGKNGMPDKKLYRIRHIRCNTVQKNALKIKEQTYKSGKEYKRYFYAAVGDLYAMCCYTNGKIREFRIYSLYDVSCHRKSDIEDIPEFITDKKGNRLMLDYKLHTGDMILLYKDNPEELYDLDNVNLSKLLYKINGFENDGLRIRMVNHLVVKEAMGESVKDYAKLPDIIRCGVKTIKFLIMGENRDFVIKNGKIIFNHR

SEQ ID NO: 22264 - protein, 1145 aa, unidentified
  REGION 1..1145: note = Cas Enzyme sequence
MTQKVLGLDLGTNSIGSAVRNLDLSDDLQWQLEFFSSDIFRSSVNKESNGREYSLAAQRSAHRRSRGLNEVRRRRLWATLNLLIKHGFCPMSSESLMRWCTYDKRKGLFREYPIDDKDFNAWILLDFNGDGRPDYSSPYQLRRELVTRQFDFEQPIERYKLGRALYHIAQHRGFKSSKGETLSQQETNSKPSSTDEIPDVAGAMKASEEKLSKGLSTYMKEHNLLTVGAAFAQLEDEGVRVRNNNDYRAIRSQFQHEIETIFKFQQGLSVESELYERLISEKKNVGTIFYKRPLRSQRGNVGKCTLERSKPRCAIGHPLFEKFRAWTLINNIKVRMSVDTLDEQLPMKLRLDLYNECFLAFVRTEFKFEDIRKYLEKRLGIHFSYNDKTINYKDSTSVAGCPITARFRKMLGEEWESFRVEGQKERQAHSKNNISFHRVSYSIEDIWHFCYDAEEPEAVLAFAQETLRLERKKAEELVRIWSAMPQGYAMLSQKAIRNINKILMLGLKYSDAVILAKVPELVDVSDEELLSIAKDYYLVEAQVNYDKRINSIVNGLIAKYKSVSEEYRFADHNYEYLLDESDEKDIIRQIENSLGARRWSLMDADEQTDILQKVRDRYQDFFRSHERKFVESPKLGESFENYLTKKFPMVEREQWKKLYHPSQIAIYRPVSVGKDRSVLRLGNPDIGAIKNPTVLRVLNTLRRRVNQLLDDGVISPDETRVVVETARELNDANRKWALDTYNRIRHDENEKIKKILEEFYPKRDGISTDDIDKARYVIDQREVDYFTESKTYNKDIKKYKFWLEQGGQCMYTGRTINLSNLFDPNAFDIEHTIPESLSFDSSDMNLTLCDAHYNRFIKKNHIPTDMPNYDKAITIDGKEYPAITSQLQRWVERVERLNRNVEYWKGQARRAQNKDRKDQCMREMHLWKMELEYWKKKLERFTVTEVTDGFKNSQLVDTRVITRHAVLYLKSIFPHVDVQRGDVTAKFRKILGIQSVDEKKDRSLHSHHAIDATTLTIIPVSAKRDRMLELFAKIEEINKMLSFSGSEDRTGLQQELDGLKNKLQMEVKVCRIGHNVSEIGTFINDNIIVNHHIKNQALTPVRRRLRKKGYIVGGVDNPWWQTGDALRGEIHKASYYGAITQYAKD

SEQ ID NO: 22265 - protein, 1380 aa, unidentified
  REGION 1..1380: note = Cas Enzyme sequence
MRKILGLDLGTTSIGWALVNEADNDNESSSIIRLGVRVNPLTVDEKSNFEKGKAITTNSDRQQRHGARINLQRYKLRRQNLRNLLQDQGWLCNDTLYEEGKGTTFETYKLRAKAAEEMISLHEFARVLFMLNKKRGYKSNRKANNKEEGQLFDGMTIAKKLYEEHLTPAEYSFQLLSKGKKFAQDYYRSDLIAELERIWNEQKKYYPEILTDEFKQQLEGKTKVNTNKIFLAKYGIYSADLKGLDRKLQPLKWRIEALKQQVSKEILAFVISDLKGQIANTSGLLGAISDRSKELYFNKQTVGQYLWASLEENPHISIKNKPFYRQDYLDEFEKLWETQAAFHKQLTPELKHEIRDIIIFYQRPLKSKKGLISVCELEQRKVKVTIDGKEKEITIGPKVAPKSSPVFQEFRIWQNINNILLINNDTNEKHSLDEKERNLLYQELSVKVKLSKTDVLKILNKKGKQWDLNYKEVEGNRTQAILFDCYNRIISLTGHEECDFKKLRASEIRHYVTTIFKNLGFNTDILDFNPSLVKHELEKQPMYMLWHLLYSYESDNSRTGNEALLRKLETDFGFPKEYATELCDVVFEDDYSNLSVKAMRKILPYLEVGNDYSQACAYAGYKHSRRSLTKEELDQKVYKERLELLPKNSLRNPVVEKILNQMINVINTIIDEYGKPDEIRIEMARELKSSAAEREKATRAISQANAENQRIREILERDFALSYISRNDIIKYKLYQELEANGFKTLYSDTYISKEKLFSKDFDVEHIIPKARLFDDSFSNKTLEARDINLAKSNKTAFDFVQEKYGTEGAEAYKKKLDILLLKEVISRAKYNKLLMKEADIPSEFIERDLRNTQYIAKKACEILGELVKTVTPTTGEVTSRLREDWQLVDVMKELNFEKYQKLGLAEIVEDRDGRKIKRIKDWTKRNDHRHHAMDALTIAFTKPAFIQYLNNLNARSNKSNSIYAIENKELHREDNKLKFNAPIPIHEFRAETKRHLSAILISIKAKNKVMTQNVNKIKTKQGVIKKIQLTPRGALHNETIYGTKKRPIITMVKVGAALDEATINKISNLTIREALLKRLAEYNGDAKKAFAGKNSLEKNPIYLNEEKTKVLPALVKTVEWETYHPIRKPITPDLKIEKVIDKGIRKILKARLAKFNGDAKKAFSNLDENPIYIDEAKKIALKRVSIEGVLSAIPLHTLKDQAGKPIIGKDGKPVLGNYVQTSNNHHIAFYYDEDGNLQDNAVSFFEAAERKSQGIPIVDKNYNHDKGWSFLFTMKQNEYFVFPNEATGFIPTEVNLMDEANYDMISPNLYRVQTISKIIYDKSIIRDYLFRHHLETTVERIPNLKGITYKQLKSLPHLKGIVKVRINAIGKIVAIGEYD

SEQ ID NO: 22266 - protein, 1382 aa, unidentified
  REGION 1..1382: note = Cas Enzyme sequence
MKRILGLDLGTASVGWAVVNEAENSEEQSSITALGSRVVLLSADEKNNFLTGKSVSATATRTAKRGARRNLQRYKLRREWLKDALVSVGIINENTCLNDSNSKELFATYISRAKAVTEQIALEDFAKVLFMINKKRGYKSNRKTDNTESEDGQIIDGLDLAKKLKARNITPGQYLLELFKENKKNKAVFYRSDLQEEVNRIWAFQSQFYPEILDNTLLSAITNKSKKAVIGLFKGIKNVEIADVKTKERTEKALTWRSEALHKQLEIGEVAYAIAEVMGAISQSSARLALLSDNSKHLEFEGLTIGQYLLKLLRNNPNSSLKNINFYRKDYEDEFNSIWNKQASFYPQLTESLRSTIFNSIFMQRNLKSCKTLLANCELEFVEKKITLPDGSCQTRTIYSKVCPKSSPYFQEFQIWQSLSNIRIIDKENTHLTKGQELSYDQKVMLLPELMIHSELKANKIIEILFGKKSNYTINMPSIKGNRTNETIFNALLEIVELTGHSIDNIVKTDANQQIEAVKSIFESLGYKTDFITFDSTIEGKDGLNQPYYKLWHLLYSYCGDNSKTGNEALIRKIEELTRLEKEEAKVLANCTFENDYASLSTKAIRKLLPHLQSNLDYSEACEAAGYNHSKRSRTKEDIKNKVYKDKLDLLPRNSLRNPIVEKILNQMIHVINQTSEAYGKPDEIRIEMAREIKKNKMQREKLANQLRQNTAELERIKDILRKDFKLSHISHNDILRYRLYEELSLNGYKTLYSNTYIERQQILDPTVTIEHIVPKALAFDDSFSNKTLEIQSVNGEKSNQTAFDFISKKYGSEALEQYINRVNNLFENGKISKTKRDNLLRKQEDIPSDFLNRDLRNTEYIAKKALEILEDYVPRVTPTIGEITKTLREDWQLVNIMRELNWEKYNSLGLTSFYYDRNGTKIGLIHNWTKRNDHRHHAMDALTIAFTKPSIIQYLNNLKSQNDKGSSIYAIQAKETYIDETRKRLIKPPYDIKQFRNDAKQMLDNIFVSHKAKNKIVTPNTIVTKKKRKAGKETKAEEKRTFLTPRGALSNETVYRKICNYETKEITINSKLTYEIALTIAKKKEREAVLERLAQHNNNPTTAFKNYNKNPIMLQTSVGEKPLMSVKIVNYKELFVKRSEINEKLDIKRVLDAKVRARLTDRLKEYNNDPKAAFANLEENPIWLNEEKCIALKHVTTIERVMGLPIRPKRNINGEIMKDELGQPLKSHYVATGGNHHVAIYEDEEGKWHEKVISFNEAASRAIQKLPIIDKDFDKELGWVFQFTMKQNEMFVFPDKESGFDPLAIDLKDPANKTLISKYLYRVQKISGGDYTFRHHLETNVEDNKELKGITWKRISSLSSLQGLIKVRINHIGQIIDVGEY

SEQ ID NO: 22267 - protein, 1510 aa, unidentified
  REGION 1..1510: note = Cas Enzyme sequence
MKRILGLDLGTNSIGWALVDSEEQRILGMGSRIIPMDQGVLDTFSGGNPVETQTAARTVYRGTRRLRERALLRRERLIRVLNMMKFLPEHYASQIDFEKRLGQFFDEKEPKLAWKQNDEGRFEFIFQQSFNEMIEEFKNKGVVREDKKIPYDWTIYYLRKKALSQEIEKEELAWILLNFNQKRGYYQLRGEEEEENPNKLVEYYSLKIVDVIADEKPNSKGDIWYSLHLENGWIYRRSSKIPLFGWKDKTRDFIVTTDLNDDGTVKKDKEGIEKRSFRAPSENDWVLLKKKTESDIEKSHKTVGAYVYETLLQNPMQKVRGKLVRTIERKFYKDELKQILEKQREFHPELRDEDLYNDCVRELYRSNETYQFILSKRDFVHLFLDDILFYQRPLRSQKSAIGDCILEFKTYKDKDGNNIKEYLKVISKSNPLYQEFRIWQWLYNLKIYRKEDDEDVTLQFIANIEDKEQLFDFLSNRKSIEQKPLLEYLIKAKGLKKQVKTEAYRWNYVEDKIYPCSETKTMISTRLAKVENIPDNFFTKEIEQKLWHIIYSVTDKNEFEKALRTFAKKYDLDIASFVDNFKKIPPFKNEYGSFSEKAIKKLLPLMRLGKYWKWNDIDNNTQNRISKIITGEYDEEIKDIVREKSIALTNENDFQGLQLWLAQYLVYGRHSEADIAGKWHSVADLEKYLNEFKQHSLRNPIVEQIITETLRVVRDIWRKYGQGAENFFSEIHVELGRDMKNTADERKKIVNVVTENENTNLRIKALLMELKNNSDGKLEVENVRPYSPTQQDILKIYEEYAISTGLDNEKDEKVKEDIKKISRVAQPTTTELQRYKLWLEQKYCSPYTGKVIPLGKLFTEEYQIEHIIPKSRYYDDSFSNKVICEAAVNKLKDKCLGLEFIKNYHGQIVETGFGQKVTIFDEEAYQNFVKQHYAYNHSKRTKLLLEEIPEKMIERQMNDTRYISKFVLPLLSNLVRAKENDNGVNSKNVLPVNGKITTMLKQDWGLNDVWNDLILPRFVRMNELAKTIAFTSWNEQHQKYLPTVPLELSKGFQKKRIDHRHHAMDALVIACATRDHVNLLNNKHANTDTIRYDLQRKLRLFERVTYIDPQTKNNVTKDIPKEFKKPWDNFTVDARNELEKIIVSFKQNLRIINKATNIYTKYENGKKIKVGQKGLNWAIRKPLHKETVFAKVSLRKRKTVRLSEALKDWKKIVDKKLKQEIKRLTCQYGKFDVDTILRYFKDRKYQFGEVDVSKVKMYYFDEENAAVRKNVDTSFTEKFIQGSVTDTGIQKILLNHLEAKGNKVEIAFSPEGIEEMNKNIIQLNEGKLHLPIFKVRVYETIGNKFSVGVKGNKKDKYVEAAKGTNLFFAIYVDENGIRSYETIPLNIVIERLKQGLSVVPEKNRKEHSLLFYLSPNDLVYVPIEDERENIHAVNLDQLNNEQRKRIYKMVSCTGSECHFVPYYVASPIVNKVEYSSLNKIGRSLTGEMIKDVCIKLKVDRLGNIKGISGL

SEQ ID NO: 22268 - protein, 1097 aa, unidentified
  REGION 1..1097: note = Cas Enzyme sequence
LFTKNLLADCIRELYRKNETQQQNLLSKDFLHLFVEDIIFYQRPLRSKKSTIANCTLEKRLYIDKESNERKDTPIKVCAKSNPYYQEFRALQWLQNLRIYEIETDREVTAEFIETPQDYEALFNFLMSQKEIDNESLLKYFLHAKNPQIKDKAAKSELKKWLTTYRWNYVYDVADNSSKKYPMNETGYDLQRYLQKVEGLPANFLTFDTTYRLWHLLYSVKDKVEFEKALKRFAKKKQLNETSFIESFKNFKPYPNEYGSFSEKAIKKLLPLMRFGNHWDFNRIDVSTQKRIDDLINGVANENIRTIIREKAEKYQLNSESCFQGLPLWLAQYVVYNRHAEATDIEKWTSVSDLEAYLEDFKQHSLRNPIVEQVVTETLRVVRDIWQQYGGGQANFFDEIHIELGRELKKTAEERKQLSNRNQENENTNLRIKKLLAELKEDASIQNVRPYSPVQQELLKIYEEGVFSSTDEIEEDIQKIRKKTEPSKADLQRYKLWLEQKYKSPYTGEVISLTKLFTEEYEIEHIIPQSRYYDDSFSNKVICESAVNKLKTNLLGLEFIQKHHGEKVRITANKEVTIFTEEQYKEFVKKHYANNLAKQQKLLLNEIPEKMVARQLNDTRYISKYISEILSKIVRSDEKDEGVNSKNVIPCTGKITTALKQDWGLNDVWNELILPRFERMNQLTQTQLFTSYNDRLQKNLPTVPMEYSQGFQKKRIDHRHHAMDALVIACATRDHINYMNNQHALDKSKDKKEKQQSRIDLRTILCEKKNNNWQFKKPWSTFTQEAKEALEHIVVSFKQNLRVINKATNYYEKWEEKNGTLVKKKVKQEGANWAIRKPLHKETVSGKIVLDRKIGKDKILTATRKAVDITFTEKIISSITDTGIQKILLNYLKYKGSPEVAFSAEGLEELNKNIAQYNDGKKHQPIYKVRIFEEGSKFPLGETGAKATKYVEAAKGTNLFFGVYQGKEKRSYATIPLNEVIERQKQGLPSVPERNEKGEPLLFSLSPNDLVYVPMEGEIAETIDFNNLSKEQKERIYKTVSFTGNQCFFVQEAVASPIVNKMEYSPLNKMERSIVGIMIKEVCIKLKVDRLGNITKA

SEQ ID NO: 22269 - protein, 1450 aa, unidentified
  REGION 1..1450: note = Cas Enzyme sequence
MKHILGLDLGSNSIGWAFVQQDFENKQGKIIATGSRIIPMDQGILGDFERGNTVSQTAERTTYRSMRRLRERHLLRRERLHRVLHILGFLPPHYDAQIDFTKRYGKFIDDAEPKIAYNNGNFIFMNSFNEMIEDFKKHQPQLFYKKSNGKESKIPYDWTIYYLRKKALSQKITQQELAWLILHFNQKRGYYQLRGEEETENPNKEVAFHSLKVVDVEAEAPNKKGEIWYTIRLENGWIYRRTSKIPLDDWKGKTRDFIVTTDLNDDGTIKVDKEGKEKRSFRAPDENDWNLLKKKTEHDIDFSGKPVGTYIYDHLLQNPNQKIKGKLVRTIERKYYKDELKAILAKQIALQPELFTETLLADCIRELYRKNETQQQNLLSKDFLHLFVEDIIFYQRPLRSKKSTIANCTLEKRSYIDKETNERKDTPIKVCAKSNPYYQEFRVLQWLQNLRIYEIETDREVTAEFIETAQDNEALFNFLMSQKEIDNESLLKYFLLAKNPQIKDKAAKSELKKWLTTYRWNYVYDVADNSSKKYPMNETGYDLQRYLQKVEGLPANFLTFDTTYRLWHLLYSVKDKVEFEKALKKFAQEYQLDEASFVDSFKNFKPYPNEYGSFSEKAIKKLLPLMRFGNHWDFNRIDVSTQKRIDDLINGVANEDIRTIIREKAEKYQLNSESCFQGLPLWLAQYVVYNRHAEATDVEKWTSVSDLETYLEDFKQHSLRNPIVEQVVTETLRVVRDIWQQYGGGQANFFDEIHIELGRELKKTAEERKQLSNKNQENENTNLRIKKLLAELKEDASIQNVRPYSPVQQELLKIYEEGAFTSTDEIDEEIQKIRKKAEPTTPEIQRYKLWLEQKYKSPYTGEVISLTKLFTEEYEIEHIIPQSRYYDDSFSNKVICESAVNKLKTNLLGLEFIQKHHGEKVRVAGNKEVTIFTEEQYKDFVKKHYANNSSKQQKLLLNEIPEKMVARQLNDTRYISKYISEILSKIVRSDEKDEGVNSKNVIPCTGKITTALKQDWGLNDVWNELILPRFERMNQLTQTQLFTSYNDRYQKNLPTVPIEYSQGFQKKRIDHRHHAMDALVIACATREHINYMNNQHALDKSKDKKEKQQSRIDLRTILCEKKNNNWQFKKPWATFTQEAKESLEHIVVSFKQNLRVINKATNYYEKWEEKNGVLVKKKVKQEGTNWAIRKPLHKETVSGKIVLDRKIGKDKILTATRKAVDITFTEKIISSITDTGIQKILLNYLKYKGSPEVAFSAEGLEELNKNIAQYNDGKKHQPIYKVRIFEEGSKFPLGETGAKATKYVEAAKGTNLFFGVYQGKGKRTYATIPLNEVIERQKQGLPSVPERNEKGEPLLFSLSPNDLVYVPMEGEIAETIDFNNLSKEQKERIYKTVSFTGNQCFFVQEAVATPIVNKMEYSPLNKMERDILGTMIKEVCIKLKVDRLGNITKA

SEQ ID NO: 22270 - protein, 999 aa, unidentified
  REGION 1..999: note = Cas Enzyme sequence
GRSKGVEKTGPPFTHGGGGAELAPTAITDQQELGEKLSIALRHIARHRGWRNPYSKVTALYTVTEPSDAFLAMQEECAKQLGRTIPETITVGQLVTGMNLGKTRLRGENSLLAARPRQSDNANEIHTIAKVQGLSNELVRQIIDHVFAAESPKGSAAEQVGKDPLQPTKKRALKASDAFQQYRIAALIGNLRIRGGKGNRRLTTEETRLVFDYLRSLPAKQEPTWQLVAEQLKIDRGNLVGTAIMTDDGERAGAKPPVHDTNRIMENTKIKPLATWWKSADADARAAMVKALSNAEVDDFDSQAGAQVQEFFFGISDEDQEKLDGLHLPIGRAAYSEDTLDRLTKRMIGEGMDLYEARQAEFKISNDWAPPAPEIGERVGNPAVDRVLKATARWLNAAERQWGAPKSVNIEHVRAAFMSESSARELDRDNQQRAKRNVKVVAEMQEKLGIEGRPSRADVWRFQSIQRQNGKCAYCGAEISFKNSEMDHIIPQAGEGSTNTRDNLVAVCRECNSSKSNIAFAVWAENTSRPGVSVQKAIERTHHWVTDSGLRKPEFDKFRKQVCDRLRRKATDEPIDARSLESVAWMANELRSRIAQKFKDGDTKVRVYKGALTAEARRASGISGKLEFVDGKGKSRLDRRHHAVDAAVVAFTSNYVAETLALRSNMKFDQELRRKAPQWREFTGSDHVHQVEWTKWKYRMQALAELLNNALVQDRIVVMHNLRLRLGNGAAHEDTIGKLTRLKVGDAISTTDIDRASSEALWCALTRDPDYDPKTGLPENPNRTIRIHGTHLTASDEITVFPVAAASIPIRDGFAKLGSNYHHVRLFRVPSGKKYKYCLMQVYTVDLLKFRKEDLFTVELKPQTISVRTCEALLRKALANGTAEYLGWLVSDDELLIDTSSFDTPGIVKLREEYGPVNRWRLAGLTSVTRLNLRPLYLSKEGLKPNVNPEIKKIIDNRSWIITVNKLFSSGHVKIIRRDALGRPRLHSAAHLPICWEVK

SEQ ID NO: 22271 - protein, 1382 aa, unidentified
  REGION 1..1382: note = Cas Enzyme sequence
MKRILGLDLGTASVGWAVVNEAENSEEQSSITALGSRVVLLSADEKNNFLTGKSVSATATRTAKRGARRNLQRYKLRREWLKDALVSAGIINENTCLNDSNSKELFATYVSRAKAVTEQIALEDFAKVLFMINKKRGYKSNRKTDNTESEDGQIIDGLDLAKKLKARNITPGQYLLELFKENKKNKAVFYRSDLQEELNRIWAFQSQFYPEILDNTLLSAITNKSKKAVIGLFKGIKNIEIADVKTKERTEKALTWRSEALHKQLETGEVAYAIAEVMGAISQSSARLALLSDNSKHLEFEGLTIGQYLLKLLRNNPNSSLKNINFYRKDYEDEFNSIWNKQASFYPQLTESLRSTIFNSIFMQRNLKSCKALLANCELEFAEKKITLPDGSCQTRTIYSKVCPKSSPYFQEFQIWQSLSNIRIIDKENAHLTKGQELSYDQKVMLLSELMIHSELKANKVIEILFGKKSNYTINMPSIKGNRTNETIFNALLEIVELTGHSIDNIVKTDANQQIEAVKNIFESLGYKTNFITFDSTIEGKDGLNQPYYKLWHLLYSYCGDNSKTGNEALIRKIEELTGLEKEEAKVLANCTFENDYASLSTKAIRKLLPHLQSNLDYSEACEAAGYNHSKRSRTKEDIKNKVYKDKLDLLPRNSLRNPIVEKILNQMIHVINQTSEAYGKPDEIRIEMAREIKKNKIQREKLANQLRQNTAELERIKDILRKDFKLSHISHNDILRYRLYEELSLNGYKTLYSNTYIERQQILDPTVTIEHIVPKALAFDDSFSNKTLEIQSVNGEKSNQTAFDFISKKYGAEALEQYINRVNNLFENGKISKTKRDNLLRKQEDIPSDFLNRDLRNTEYIAKKALEILEDYVPRITPTIGEITKTLREDWQLVNIMRELNWEKYNSLGLTSFYYDRNGTKIGLIHNWTKRNDHRHHAMDALTIAFTKPSIIQYLNNLKSQNDKGSSIYAIQVKETYIDETRKRLIKPPYDIKQFRNDAKQMLDNIFVSHKAKNKVVTPNTIVTKKKRKAGKETKAEKKRTFLTPRGALSNETVYRKICNYETKEITINSKLTYEIALTIAKKKEREAVLERLAQHNNNPTTAFKNYNKNPIMLQTSVGEKPLMSVKIVNYKELFVKRSEINEKLDIKRVLDAKVRARLTDRLKEYNNDPKAAFANLEENPIWLNEEKGIALKHVTTIERVVGLPIRPKRNINGEIMKDEQGQPLKSHYVATGGNHHVAIYEDEEGKWHEKVVSFNEAASRAIQKFPIIDKDFNKELGWVFQFTMKQNEMFVFPDKESGFDPLAIDLKDPANKSLISKHLYRIQKISSGDYYFRHHLETNVEENKEVKGITWKRIRSVSSLQGIIKVRVNHIGQIIDVGEY

SEQ ID NO: 22272 - protein, 1074 aa, unidentified
  REGION 1..1074: note = Cas Enzyme sequence
MSSPPRVKADFLFSEIRKWLEKELEVQLHWDNNKSLRTINYADKQNVAGCPVTARLVKLLGTDWERFQQEGRKEHKTHSKQHPTKHTVCYSALDIWHVCFQADELEDVQSFAKDSLQWDDEKCKLLLRVWTSIPQGYAMLSLKAIRNINRMLCRGLKYSDAVMLAKVPEIAGMNENEIDTLIETFSKDLKTEVDRTKDIYIITNSLIADYKSLSFEDRFAEHDTSYCLQESDKEDIVQHIIKHFGEVTWGLMDAEEQETLMNEVEQLYQNFFSKTKRNFYDIPTYASTLRTFLCEKFPHVDEQAWARLYHPSQIASYHPERDKNCPDSWRLGTPNIEAIRNPVALRTLNILRRKINALLDANMIDPLETRVVVETTRTLNDANMRWAINRFQKEREEQNKTIRSILEKEYTTRAISETDINTARYILEQREEHIYRTEKTGELQHGFSFNIDAKRYKLWLEQGGICFYTGKVINLTNLFDDNAFDIEHTLPRSKSFDNSDANLTICDAHYNRYIKKNILPAHLPNFEHDQTINGTLYTAIKPRLEMWRKRVERLKVNVDFWKNRTRRAQDKDTRDYCIRQRHLWQMELNYWHEKLSHFEMEEIKEGFRNSQLVDTGIITRHAALFLKSLFKNVEVQKGSVTADFRKILGIQSVDEAKNRDKHSHHAIDATILTTIPIAAKRDRMLEIFLRIKELKKILCFSKDTNKQQEIISLNQKLQYEINSCHLGNDITSLPSYIENNIIIRHLRKEQTQQNSRRTIRIRGKKIYVTDHHGNKHKKWSSGDSIRGELSGQSFYGAITQWKEKTNRNETTNHKEQNIIDPTIYYVIRKPLVFKNNTSAPGFSSWEDLEKQIVNKALIPMMKSQFYEGTSFKEACGQPIYMLNRKGEKINVLRHIRCYVRIKNPIAVKQHTFLSNKPYKQTVYASVGSLYAAAEYTNGNKRQFVIYSLKDIAQNKKKNNEIIPSKILNGTKTLTLQRLLHAKDSILIYEESPEELKKLSMKELSKRLYVIKGFEAAITRIKAVNHLYNIDEIGETITDYQNLPITIRLSLNKLKFLLHGYDFKFTTSGLEFLDK

SEQ ID NO: 22273 - protein, 1190 aa, unidentified
  REGION 1..1190: note = Cas Enzyme sequence
MSKHVLGLDLGVGSIGWCLIALDAQGDPAEILGMGSRVVPLNNATDAADFSIGKAFTANQERTARRTMRRGFARYQLRRYRLRRELEKVGMLPDAALIQLPLLELWELRERAATAGERLTLPELGRVLCHINQKRGYRHVKSDAAAIVGDEGEKKKDSNSAYLAGIRANDEKLQDEHKTVGQYFAEQLRQSQSESPTGGISYRIKDQIFSRQRYIDEYNQIMAAQRVHYPDVLTDEFIRMLRDEVIFMQRPLKSCKHLVSLCEFEKQEKVMRVQQDDGKGGRQLVERKVKFGPKVAPKSSPLFQLCRIYEAVNNIRLTRPDGSPRDITPEERAKIVAHLQSSASLSFAALKKLLKEKALIADQLTSKSGLKGNTTRVALATALQPYPQYHHLLDMELETRMMTVQLTDEETGEVTEREVAVVTDSYVRQPLYRLWHILYSIEERDAMRRALITQLSMKEEDLDGGLLDQLYRLDFVKPGYGNKSAKFICKLLPQLQQGLGYSEACAAVGYRHSNSPTSEEITERTLLEKIPLLQRNELRQPLVEKILNQMINLVNALKAEYGVDEVRVELARELKMSREERERMAEGNRRREKENKAIAEKIRECGLFPTKSRIRKYMLWEEAGEKCLYCGQILTLSQCLNGDDMEVEHIIPKSVLYDDSYGNKTCACRRCNKEKGNRTALEYIRAKGWEDEYMERINGLLDKKAISYSKHQRLRWLKEDIPSDFLERQLRLTQYISRQAMAILQQGIRRVSASEGGVTARLRSLWGYDDILHTLNLDRYDSMGETERVSREGETTEKLRITNWSKRMDHRHHAIDALVVASTRQGYIQRLNRVSSESEREAMSGEIEVQKAANTDKLSLLERWLTQRPHLSVRAVSDKVAEILISYRPGKRVVTRGRNIYRKKTADGREVTCVQRGVLVPRGELMEASLYGKILSQGRERIVKRYPLHDLKGEVVDPCLRELIAEYNQEITSKVKAKGAPLYLDAAEKQEVRSVRCYVTQPSVAKAIPIRFDERGRAITFVKSGNNHHLALYRTPQGKLEESIVSFWDAVDRARYGIPLVITRPREVMEQVLQRGDVPESVLSLLPPSDWVFVDSLQPDEMVIIGLSDEELQRALEVQDYRKLSEHLYRVQKVSSLYYVFRYHLETSVADDKNTSGRIPKFHRVRSLADYEKRNIRKVRVDLLGRISLL

SEQ ID NO: 22274 - protein, 1479 aa, unidentified
  REGION 1..1479: note = Cas Enzyme sequence
MKTILGLDLGTNSIGWAKVCVDDNGNYTRDIKLGSRIIPMSQDTLSNFDKGVTESPTAVRTGFRGIRRIRERALQRRERLHRVLHVMGFLPLHYENAIGRNREEATTYGKFLDNGEPKLAWEKQEDGSMRFLFMDSFYEMMADFAKYQPGMVADGRKIPLDWTLYYLRKKALTQAIRKEELAWILLNFNQKRGYYQLRGEEEEDPTKREEYYELKVVSVEAAEEGKGGNTWYNVTLENGWIYRRQSKIELNDWVGKVRPFIVTTEYEIDGITIKKDKNGEVKRSFRAPSEDDWGLRKKRTESLLEESGKTVGAFIYNHILSEPADKIRGNFIRTIERKFYKKELEAILREQSKHHKELKDIDTLIACIKELYPNNKPHQDSLIKKDMTYLLITDLIFYQRPLKSKKSLIADCPYEYYEYVIKETGEIKRQGIKCIAKSNPYYQEFRLWQFIINLRLFDRNNDKEVTSEYLSSMEDYTRLFTYLNDRKDINQEILLKDFFKQKKVKMGMEKEFPIRWNYIEDKEKKYPCNETRHELLAALDKAGIDHSWLDDKERFYRLWHLLYSVESKEEAEGALRKLNDNEDFVNAFLKIKPFKKEYGAYSEKAIKKLLAVMRMGTQWNEDDICEQTRNRIQSIINGVIDEKIKERMGRTFSQLSDFQGLPEWLACYVVYGRHSETTDIQRWTKPENLMSYIKGFKQHSLRNPIVEQCILETLRTVHDIWKEAGHIDEIHIELGRSMKSTAYQRACMSKSILQNENTNLRIKSLLMELKNAKEFENVRPYSPMQQEILRIYEEGALQELTKEDDQYPEISKISQMAQPSAKELLKYRLWLDQKYCSPYTGKPISLSKLFTSAYQIEHIIPQSRYFDDSFSNKVICEAEVNQLKSNMLGYEFIKKHSGEIVHCTMVGDVKILDAKEYYNFVTEHYANNRRKKENLLLEDIPQEFLNRQMNDSRYISKKVMALLSNIVREEGEQEAKSKFVIACSGGITDRLKHDWGLNDVWNSIVYPRFERLNKLTNTENFGRWENKEGKQVFQTSLPLELQRSFSKKRIDHRHHAMDALVIACASNNIINYLNNESAKSQEKREDLRKKLCDKNRIIRKPWETFTQDVRTALEDVVVSFKNYVRVINKATNYYEKYDKNGKKGIAEQKGQDMWAIRKPMHKETVFGQVNLRRRVTVKLKDALEKIPAICDKELRDYINNLVAKQFNKKQILAQFKSINYRLNMKSVDKVDVWQFSDEKEPMVATRKSVDTSFDTKRIATITDTGIQKILRNYLNAKDNDPNIAFTPEGIAEMNKHITEYNNGKQHQPILKVRVSEPKGAKYQVGETGNKTSKFVEAQKGTNLYFAIYEDKEGNRSYSTIPLNEVIERLKQGLSPAEDLNKRGEKLKFYLSPNDLVYVPTEEEKLSSECKLNKDRIYKMVSATSNQCFFTPHRTANSIVNKVEYSPLNKMEKTIWGEMIKAVCWKLEVDRLGNILKIIK

SEQ ID NO: 22275 - protein, 1407 aa, unidentified
  REGION 1..1407: note = Cas Enzyme sequence
RERLHRVLHTLHYLPPHYDSAIGWDRKTPTTYGKFLNHGEPKLAWERREDGTMQFLFMDAFHEMIADFAKYQPALVADGKKVPLDWTIYYLRKKALTQPIKKEELAWILLNFNQKRGYYQLRGEEDEENAAKHEEYHELKVVGVEVDEAGKGDNTWYNVKLENGWIYHRQSKIPLDDWVGKVRAFIVTTEYEKDGTTPKKDKEGNVKRSFRSPNENDWGLRKKQTEHSLEASGIPVGAFIYDHLLKEPSDKIRGKFIHTIERKYYKQELAAILREQSKHHEELCSKDMLKACIEELYPNNPLHRESLLKKDMPYLLIEDLIFYQRPLKSKKSLIAECPYEAYSYVDKETGEMKRQGIKCIAKSNPYYQEFRLWQFIANLRLRNQADERDVTAEYLPHQEDYVRLFTYLNDRKEINQETLLKDFFKLKKVTIGGEKVFPIRWNYIEEKEKKYPCNTTRHELLLALDRAGMEHDWLDDRDLAYRLWHLLYSVDSKDETERALRKLKDDDAFVESFLKIKPFEKEYGAYSEKAIKKLLPVMRRGSLWNEADLCPSTKERIANILQGTIDEKLKKKIGAFISSCQQVSDFQGLPEWLACYVVYGRHSEATAIQHWETPQQLLDYIHGFKQYSLRNPIVEQCILETLRTVYDIWKEAGQIDEIHVELGREMKKTSEQRARLTEKVLRNENTNLRIKSLLMELKNNADIKDVRPHSPMQQEILRIYEEGALQTLSKDDTAFTEIMKISKMAQPSASELQRYRLWLEQKYRSPYTGKPISLSKLFTSAYQIEHIIPKKRYFDDSFSNKVICEAEVNREKGSMLAYEFIKDCGGDVIHCTTLGDVTILSEAEYKALVTELYANNNSKKKKLLMEDIPQEFINRQLNDSRYISKVVMTLLSNIVRIEGEEEATSKFVIPCSGGITDKLKKDWGLNDVWNNIVYPRFERLNALTNTSDFGQWENKEGKRVFQTSVPLELQRGYQKKRIDHRHHAMDALVIACASRNIINYLNNKEANDPTKQENARKQLCIKSRIIRKPWETFTQDAYKALDNIVVSFKNYVRVINKATNYYERYHADGKKVVDEQKGEAMWAIRKPMHKDTVFGHVNLRRKAVVKLKDALENIPAICDKTLRHYIQDLQKKHFNTKQLLAHFKSINYRLNKQAVDKVEVWQYSDDKEQLAATRKPLDTSFDAKRITTITDTGVQKILLNYLQAKGGDPAIAFTPEGIAEMNQNIAVYNGGKQHQPILKVRIAEPMGAKYPVGETGNKSAKYVEAQKGTNLYFAIYEDEEGNRTYDTVALNVVAERLTQGLTPVPEKNEKGVALKFYLSPNDLVYVPTADELLSKVCSLDKNRIYKMVSATKSQCFFLSHRVAKTIYDKVEFEALNKMERALTGEMIKPICWKMEVDRLGRIVNIIK

SEQ ID NO: 22276 - protein, 1498 aa, unidentified
  REGION 1..1498: note = Cas Enzyme sequence
MKHILGLDLGTNSIGWAVINAIKEENTQKEQLIGINTAGSRIIPMDAAQLGDFNKGNTVSQTANRTQFRGVRRLYERKKLRRERLHRILQLLGFLPKHYASQLDRYGKFIANSEPKLAWTTNTHEPSYFIFQSSFQEMLNDFLQNNNQVKKVPYDWTLFYLRKKALTQKIEKEELAWILLNFNQKRGYYQLREEETEKVSSKTRQYFDSQIVTDITDTGQIYKGLKIFTITLENGEKGKFFSKNMPDWKGQKKDIIAIIDLDKNGNDKYDENGELSRRFKIPTEQEWEEQWELIKTKTQKDLDTSHKTVGAYIYDTLLQTPSQKIRGKLIRTIERKYYKDELNQILKKQEEFHPELRDSNLLEACIEELYPNNEAHRNAIAKYSISQLLIEDILFYQRPLKSKKSLISNCPYEEYTYTNKETGEICTSSLKCIAKSHPLFQEFRLWQFISNLRIYQKEGTINGKFTTDIDVTNQFLKTEDDYANLFDWLNQKKEIRQDTFLKNPAFGLKKNIANYRWNYVEDKTYPCNETHYKILSYWEKAGIEQSALTSEIEEKLWHILYSISDKNELKKALQHFADKNYLSDKFADTFQQIPPFEKDYGSYSAKAIKKLLPLMRIGKFWKIENIDSTTLNRIEKILTGEFEENIKNQTREKTIHLDNLYSFQGLPTWLACYIVYNRHSEIKDVTKWQQPSDIDAFLNAFKQHSLHNPIVEQIIMETLRTVRDIWKQTGHIDEIHVELGREMKNPAEKRRKLTQQIQENENTNLRIKALLAEFANPELGIENVRPHSPSQQDLLRIYEEEVLNETKDIPEDIAVILKKFNEVDTKKRPSTSDVLRYKCWLEQKYRSPYTGAMIPLGKLFTPAYEIEHVIPQSRYFDDSFTNKVICEAEVNKLKGNMLGYEFIKNNQERIVELGFGQNVKIQTVEAYELFVKEHYSYNRTKMQKLLMEDIPDQFIERQLNDSRYISKLIKSLLSNIVRDEGEEEATSKNVIVCTGSITDRLKKDWGINDVWNKLILPRFIRLNEITESNRFTTTNACNKTIPAMPLDLQKGFNKKRIDHRHHAMDAIVIACANRNIVNYLNNESASKNAKISRQDLRQILCKKTKTDNLGNYQWLIDKPWDTFTQDMYSILSNIIVSFKQNLRIINKTTNHYIHYENGKKVNCSQKQSDSWAIRKPMHKETVYGEINLRRTTTATLKAALENPQRIIEKDLKKKIKELLTQGLNEKQIKKYFEDNKDIWQEINLKKIPVYYFNKETANRFFACRESINTTFNKKKIEEKVADTGIQQILLRHLEQNSNNPEQAFSPEGIEQMNKNIMSLNNGKFHQPTYKVRTYEQADKFAVGQTGNKSTKFVEAAKGTNLFFAIYETAHKRSFASIPLNVVIERLKKGLSPAPENEKGNLPKFILSPNDLVYVPTKEEIENGHINQPIQKDRIYKMVSCTEGECHFIPYFVAKPIIQTIELGSNNKAQKTWQDEMIKEICIPIKTDRLGNIITSISL

SEQ ID NO: 22277 - protein, 1510 aa, unidentified
  REGION 1..1510: note = Cas Enzyme sequence
MKKILGLDLGTNSIGWAVVCHSDTDGQTERKWIEMAGSRIIPMDAAILGDFDKGNSKSQTSERTGFRGIRRLRERVLLRRERLHKVLKLIGFLPQHYIDSLDFSNHSGKFQLGTEVKLPWRKNEIGKYEFLFQNSFNEMLADFAKKQPELVAMGRKVPYDWTIYYLRKKALSEKITKEELAWILLNFNQKRGYYQLRGEEEEEKKNRLEDFYALKVVEVEQTDDKKGKDIWYNVHLENGWIYRRSSNVPLDWKDKIKEFIVTTELNEDGTPKVDKDGCVKRSFRMPKEDDWKLLKKKTEADIERSHKTIGCYIYDTLLQSPQQKIKGKLVRTIERKFYKDELKLILDKQQAFHPELQDRELYKACLDVLYPMNVAHKNNVANRGFVYLFMEDILFYQRPLKSKKSLIDNCPYEENQYIDVTTGEIKKAPIKCIAKSHPLYQEFRLWQFIANIRIYQKEKKVDGKLLTDIDVTTEYLSSKDDYVALYEWLCVRKEIEQKTFLKYPAFGLKKEIENYRWNYVEGKSYPCNETRSLILHYLEKAGISSTFLSTKIEESLWHILYSVEDRIELETALRTFASKYQLSCNFVEVFKKFPPFKKEYGAYSAKAIKRLLPLMRMGKYWKVDAIDGNTAERIEKILSGECDEKILNKVREKTIHLSETSDFQGLPLWLACYVVYNRHSEGKEVAKWKSPEDIDIYLKSFKQHSLRNPIVEQVITETLRVVRDIWKRVEQIDEIHVELGREMKNPSEKRRQMTERMLENENANIRIKALLTEFMNPEYEMENVRPYSPSQQEILRIYEDTVLNGAGDIPEDIEIILKKFKENDIKKRPGKSDFLRYKLWLEQQYRSPYTGEIIPLGKLFTTAYEIEHVIPQSRYFDDSFSNKVICESEVNKLKDNMLGYEFIKKHAGEIVELGFGKSVKIFSVEAYERFVGENYYKAGSKKSKLLMDDIPEKFIERQLNDSRYISRVVKGLLSNVVREEDANGEYESEAISKNVIVCSGSVTDRLKKDWGVNDVWNNIVYSRFERLNRLTESQQFGHWENREGKRFFQTELPLEYQKGFSKKRIDHRHHAMDAIIIACATRNHVNYLSNESASKHARIARYDLQRMLCDKSKADGGGNYKWIIQKPWATFTQDVYRTLLDIIVSFKQNLRVINKMTNYYQAYDDAGKKVFKKQKKGDSWAIRKSMHKDTVFGQVNLRKIKEVRLSVALESPEKIVDKKIKEKVLQLFAYQYDKKKIEKYFKENASLWKEVNLAKIPVYYFTDESSELLVAVRKNLDTGFTEKKIRESVTDTGIQKILLNHLSNKGDKPELAFSPDGIDEMNRNLVILNGGKPHQPIYKVRVCEPLGNKFKVGTNGNKSAKYVEAAKGTNLFFAIYETDAGKRTYETIPLNVVIEREKMGWLPVPEKNNKGEKLLFWLSPNDLVYLPTEEELMSRILSDKLDRGRIYKIVSFTGNRLYAIPYNVSNMIWDKNEYTQLNKVESTDMKESIKEICMPINVDRLGHITEIIIK

SEQ ID NO: 22278 - protein, 1508 aa, unidentified
  REGION 1..1508: note = Cas Enzyme sequence
MRTILGLDLGTNSIGWAVINSVIKEQTERIWIEMAGSRIIPMDAAILGDFDKGNSISQTAERTRFRGVRRLRERQLLRRERLHKVLKILGFLPEHYLKGIDFEKHTGKFLSGSEPKLPWVKDRWGKYSFLFQTAFNEMLADFAKHQPSLVFDGKKIPYDWTVYYLRKKALTEMISKEELAWILLNFNQKRGYYQLRGEEEEDNAGKSVEFYALKVLSVEATDEKKGRDIWYNVHLENGWVYRRSSNVPLDWEGRVKEFIVTTDLNPDGTPKLDKYGEVKRSFRAPKEDDWMLIKKRTEADITGTHKTIGSYIYDALLQEPQQKIIGKLVKTVERKFYKEELNFILQKQCAFHAELQDRDLYMRCIEALYPGNEVQRRNIANRDFIYLLIDDVLFYQRPLKTKKSLIANCPYEENEYVNRKTGEIKTAPLKCIAKSHPLFQEFRLWYFLSNIRVYQKEREVNGTLHLDVDVTTEFLKTEDDYVALFDWLNSRKEIDQKAFLRYPAFGLKKEINNYRWNYVEDKFYPCNETRHAILSRLEKAGIGIDFLSDEKETALWHILYSVSDKQEIEKALATFAVKNGLNESFVEVFKKFPPFKSEYGAYSAKAIKKLLPLMRCGKYWDMSLIDGTTKERIERIIAGECDESIGAKVREKAMNLSDISCFKRLPLWLACYVVYNRHSEDKEITKWETPADIDAYLAAFKQHSLRNPIVEQVITETLRVVRDIWKQVGKIDEIHIELGREMKNPADKRKRMTTQILENENANLRIKALLAEFVNPEYGVENVRPYSPSQQEILRIYEDAVLKGEEQIPEDIDVILKKFNTSKLPTKSEFLRYKLWLEQKYRSPYTGELIPLAKLFTAAYEIEHVIPQSRYFDDSFSNKVICESAVNKLKDNQLGYEFIKNHHGQKVEVGFGKTVEIFSVDSYERFVKEQYAKSGIKMKKLLMDDIPEQFIERQLNDSRYISKVVKGLLSNIVREKNDSGEYEPEAVSKNILVCTGSVTDRLKKDWGMNDVWNSIVSPRFERLNALTETQCFGHWENKDGKKVFQTAVPLEYQKGFSKKRIDHRHHAMDAIVIACATRNHVNYLNNESASRNAKISRYDLQRLLCDKSRGDGNGNYRWIIKKPWTTFTQDAREALSGIIVSLKQNLRIINKTTNIYQHFDANGTRVYEKQKIGDSWAIRKPMHKDTVFGAVNLRKVKVVRLSVALDTPSMIVDKRVKNKVLELLSYKYDKKKIEKYFKENAFLWKELDIAKVAVYYFTENTTEPLVAVRKSLDSTFNEKKIASVTDTGIQKILLNHLKSKEGKAELAFSAEGIEEMNRNLLQLNDGKGHQPIYKVRVYEPRGNKFKVGVLGNKGAKWVEAAKGTNLFFAIYITEDGNRTYETIPLNWVIEREKQGLVPVPDRNEKGDKLLFWLSPNDLVYLPTEEERDFGRINEPIDRGRIYKMVSSSGNQCFFIPQSISNAIISTKELGSNNKAEKSWDGEMIKNICIPVKVDRLGRIIEVKYRVNE

SEQ ID NO: 22279 - protein, 1509 aa, unidentified
  REGION 1..1509: note = Cas Enzyme sequence
MKNIVGLDLGTNSIGWAVVNGSVNDDGSEQLVKIQASGSRIIPMDAAMIGDFNKGNSISQTAERTRLRGVRRLSERYLLRRERLHRILDILGFLPFHFAQDLDRHGKIVKGKEPKLAWRKNEAGQFEFIFQDSFKEMLEDFKLNHPNLITDDKKVPYDWTIYYLRKKGLTSKISKEELAWILLNFNQKRGYYQLRGEEEKKNDNVMIINSKVIDVVKAEKDKKYEKYWYNVLLENGLLYRAAFYNDISFWKGHTKEFVLKTIKLKSGGTKQELSFLPSFDEIEKMEKKQKDKMYFKIKLKTEADIDQAHKTVGTYIYDTLLGNPSQKIRGRLVRTIERKYYKEELKLILDKQKEFHPELQDRALYAACVEELYTINEAHRNNIGNRDFTYLFLEDILFYQRPLKSKKSLIDNCPYEENQGLDKETGEIKSFPVKCIAKSHPLFQEFRLWQFIINLRIYRKDLAQDVDVTNELLKTEEDYVALFDWLNGKKEIDQKAFLKYPVFGLKKEIENYRWNYVQDKPYPCNETRSLMLARLEKCDISIEFLTKENEEALWHILYSVEDKNEIVKALQKFADKHDLNASFVDVFQKFPPFKNEYGSYSAKAIKKLLPLMRMGKYWSENSIDKGTRERIDKIITGEYDEKIENRVREKAIHLADVSDFKGLPLWLVCYIVYGRHSEAKEITQWKSPADIDSYLKSFKQHSLRNPIVEQIIIETLRVVRDIWKQVGNIDEIHVELGREMKNPADKRKKMTQQMSENENTNLRIKYLLTEFLNPEYEVENVRPYSPSQQDILRIYEEGVLNSVSDLPEEISDILKKFTETDLKKGPSRSEILRYKLWLEQKYRSPYTGEVIPLGKLFTPAYEIEHVIPQSCYFDDSFSNKVICEAEVNKLKSNLLGHEFIVKHHGEIVELPFGKKVRIFTVDEYEQFVKDNYSRTRSKMKKLLMDDIPEEFVTRQLNDSRYISKVVKSLLSNIVREKGEEEAISKNVIPCTGGVTDRLKKDWGINEVWNKIILPRFQRLNELTGTNKFTTKNVGIQEIPTMPLELQKGFNKKRIDHRHHAMDAIIIACANRNIINYLNNESATAKAELSRYDLQKMLCDKAKTDNNGNYKWVIRKPWASFTQDTYLALENIIVSFKQNLRVINKATNRFLHYNEEGKKIFVKQGKGDNWAIRKSMHKDTVFGEVNLRRIKTVALNEAMKNPQSIVVKDFKRKLLELWNLGFDAKRIKKYFEDNRETWSDINLSKIEVYYFSKDTKDRFFATRKPLDTSFDRKKIENNITDTGIQKILLRHLELKDNNPDIAFSPDGIDEMNRNIIQLNNGKYHQPIIKIRWYEQADKFAVGQTGNKFSKFVEAAKGTNLFFAVYESNILDKKTNTIIKKRNYATIPLNVAIERQKQGLPVAPEDENGNDPIFVLSPNDLVYLPTDDELANGIIAQPLDRGRIYKMVSCTGNEGHFIPARIANPILQTIELGSNNKAQKAWTDEMIKEICMPIKVDRLGNVLESSSSYKK

SEQ ID NO: 22280 - protein, 1483 aa, unidentified
  REGION 1..1483: note = Cas Enzyme sequence
MKTILGLDLGTNSIGWAKVIVDDNENYLRDIQLGSRIIPMSQDVLGKFDKGVTESQTAIRTNFRGIRRLRERTLQRRERLHRVLHTLHYLPPHYDSAIGWDRKAPTTYGKFLNHGEPKLAWERREDGTMQFLFMDAFHEMIADFAKHQPALVANGKKVPLDWTIYYLRKKALTQAIKKEELAWILLNFNQKRGYYQLRGEEDEEHAAKHEEYHELKVVGVEADEAGKGDNTWYNVKLENGWIYRRQSKIPLDDWVGKVRAFIVTTEYEKDGTTPKKDKEGNVKRSFRSPNENDWGLRKKQTEHSLEASGIPVGAFIYDHLLKEPSDKIRGKFIHTIERKYYKQELAAILREQSKHHEELCSKDMLKACVEELYPNNPLHRESLLKKDMTYLLIEDLIFYQRPLKSKKSLIAECPYEAYSYVDKETGEVKRQGIKCIARSNPYYQEFRLWQLIANLRLRNRADERDVTAEYLPHQEDYVRLFTYLNDRKEINQETLLKDFFKLKKVAIGGEKVFPIRWNYIEDKEKKYPCNATRHELLLALDRAGMEHDWLDNRDLAYRLWHLLYSVDSKDETERALRKLKDDDAFVESFLKIKPFEKEYGAYSEKAIKKLLPVMRRGSLWNEADLCPSTKERIANILQGTIDEKLKKKIGAFISSCQQVSDFQGLPEWLACYVVYGRHSEATAIQHWETPEQLLAYIHGFKQYSLRNPIVEQCILETLRTVYDIWKEAGQIDEIHVELGREMKKTAEQRAHLTENVLRNENTNLRIKSLLMELKNDIDIKDVRPHSPMQQEILRIYEEGALQTLSKDDAAFAEIMKISKMAQPSTSELKRYRLWLEQKYRSPYTGKPIALSKLFTSAYQIEHIIPKKRYFDDSFSNKVICEAEVNREKGSMLAYEFIKKRGGDVIHCTALGDVTILSKAEYKALVTELYANNTSKKEKLLMEDIPQEFVNRQLNDSRYISRVVMTLLSNIVRIEGEEEATSKFVIPCSGGITDKLKKDWGLNDVWNNIVYPRFERLNALTNTTDFGQWENKEGKRVFQTSVPLELQRGYQKKRIDHRHHAMDALVIACASRNIINYLNNQEANDPTKQENARKQLCIKSRIIRKPWETFTQDAHKALDNIVVSFKNYVRVINKATNYYERYHADGKKVVDEQKGETMWAIRKPMHKDTVFGHVNLRRKAVVKLKDALENIPAICDKTLRHYIQDLQKKHFNTKQLLAHFKNINYRLNKQAVDKVEVWQYSDNKEQLAATRKPLDTSFDAKHIATITDTGIQKILLNYLQAKGGDPAIAFTPEGIAEMNRNIAVYNGGKQHQPILKVRIAEPMGAKYPIGETGNKGAKYVEAQKGTNLYFAIYEDEEGNRTYDTVALNVVAERLKQGLTPVPEKNEKGVALKFYLSPNDLVYVPTADELLSKECSLDKNRIYKMVSATKYQCFFLSHRVAKTIYDKVEFEALNKMERALTGEMIKSVCWKIEVARLGHIINIIK

SEQ ID NO: 22281 - protein, 1380 aa, unidentified
  REGION 1..1380: note = Cas Enzyme sequence
MKRILGLDLGTTSIGWALVNEAENDNETSSIVRLGVRVNPLTADEKSNFEKGKAITTNAERQKGHTARINLQRYKLRRQNLYNCLKEYGWFGNNALFEEGKASTFETYKLRAKAAEEEISLHELARVLFMLNKKRGYKSNRKANNKEDGQLFDGMTIAKKLSEENLTPAEYSLQLLNKGKRFTQGYYRSDLNAELERIWNEQKKYYPEILTNEFKQQLEGKTKVNTNKIFLAKHHIYSADLKGSDKKMQSLKWRVEALRQQVDKEILVYVISDLNGQIANTSGLLGAISDRSKELYFKKQTVGQYLWASLKENPHISIKNKPFYRQDYLDEFEKIWETQAAFHKQLTPELKQKIRDIIIFYQRPLKSKKGLISVCELEQRKVKTVIDGKEKEITIGPKVAPKSSPVFQEFRIWQNINNLLLINNDTNEKRSLNEEERNLLYQELSIKAKLSKTDALKVLNKNGKQWELNYKEIEGNRTQAILFDCYNRIITLTGHEECNFKKLKASEIRHYVTTIFKNLGFNTDILDFNPLLEKHELEKQPMYMLWHLLYSYESDNSRTGNNSLLRKLETTFGFPEEYATVLCDVTFEDDYSNLSVKAMRNILPSLQAGDDYSQACAHAGYNHSRRSLTKDELEEKVYKDKLELLPKNSLRNPVVEKILNQMINVINTIVTEYGKPDEIRIEMARELKSSAAEREKTTRAISQANTENQRIRDILEKDFALSYISRNDIIKYKLYEELEANGFKTLYSGTYIPKEKLFSKDFDVEHIIPKARLFDDSFSNKTLEARNINIAKSNKTAFDFIKGEYGDEGAEVYKKKLDMLLSKDVISKAKYNKLLMSEADIPSEFIARDLRNTQYIAKKAYEILSELVRTVTPTTGEITNRLREDWQLVDVMKELNFEKYQKLGLAEVVEDRDGRKIKRIKDWTKRNDHRHHAMDALTIAFTKPVFIQYLNNLNARSNKSSSIYAIENKELHRDDNKLKFNAPIPINEFRVAAKQHLSSILISIKAKNKVMTQNVNKIKTKQGVIKKIQLTPRGALHNETIYGTKKRPIITMVKVGAALDEATINKISNLTIREALLKRLAEYNGDAKKAFTGKNSLEKNPIYLNIEKTKVVPTSVKTVEWGTYHPIRKAITPDLKIEKVIDKGIREILKARLAEFNGDAKKAFSNLDENPIYIDEAKKIALKRVSIEGVLSAIPLHTLKDQAGKLIIGKDGKPVLGNYVQTSNNHHIAFYTDEKGNLQDKAVSFFEAAERKSQGLPIVDKNYNHDKGWRFLFTMKQNEYFVFPNEATGFIPTEVNLMDEANYDMISPNLYRVQKVSRIEKGASTSRDYWFRHHLETILNDDSRLKNSAFKRINSLKPLEGIIKVRINSIGKIVAVGEYD

SEQ ID NO: 22282 - protein, 1480 aa, unidentified
  REGION 1..1480: note = Cas Enzyme sequence
MKTILGLDLGTNSIGWAKVCVDDNGNYTREIKLGSRIIPMSQDTLSNFDKGVTESPTAARTGFRGIRRIRERALQRRERLHRVLHVMGFLPLHYENAIGWNREEATTYGKFLDNGEPKLAWERQEDGSMRFLFMDSFYEMMADFAKNQPGMVADGRKIPLDWTLYYLRKKALTQAIRKEELAWILLNFNQKRGYYQLRGEEEEENPTKREEYYELKVVSVEAAEEGKGGNTWYNVTLENDWIYRRQSKIELNDWGGKVRPFIVTTEYEIDGVTIKKDKNGEVKRSFRAPNENDWGLRKKRTESLLEESGKTVGAFIYNHILSEPADKIRGNFIRTIERKFYKKELEAILREQSKHHKELKDIDTLIACIKELYPNNKPHQDSLIKKDMTYLLITDLIFYQRPLKSKKSLIADCPYEYYEYVIKETGEIKRQSIKCIAKSNPYYQEFRLWQFIINLRLFDRNNDKEVTSEYLSSMEDYTRLFTYLNDRKDINQETLLKDFFKQKKVKRGMEKEFPIRWNYIEDKEKKYPCNETRHELLAALGKAGIDHSWLDDKELFYRLWHLLYSVESKEEAEGALRKLNDNDDFVNAFLKVKPFKKEYGAYSEKAIKKLLAVMRMGDLWNETDICEQTRDRIQNIIKGVIDEKIKERMGRTFSQLSDFQGLPEWLACYVVYGRHSEATDIQRWTKPEDLMAYINGFKQHSLRNPIVEQCILETLRTVYDIWKEAGHIDEIHIELGRSMKSTADQRARMSKSIMQNENTNLRIKSLLMELKNTKEFENVRPYSPMQQEILRIYEEGALQELTKEDAQYNEISKISQMAQPSANELLKYRLWLEQKYCSPYTGKPISLSKLFTSAYQIEHIIPQSRYFDDSFTNKVICEAEVNQLKSNMLGYEFIKKHGGEIVHCTMVGDVKLLDAKEYYNFVTEHYANNRRKKEKLLMEDIPQEFLNRQMNDSRYISKKVMAILSNIVREEDEQEAKSKFVIACSGGITDRLKQDWGLNDVWNSIVYPRFERLNKLTNTENFGRWENKEGKQVFQTSVPLELQKGFSKKRIDHRHHAMDALVIACASNNIINYLNNESAKSQEKREDLRKKLCDKNRIIRKPWDTFTQDAHTALENVVVSFKNYIRVINKATNYYEKYDKNGKKEIAEQKGQDMWAIRKPMHKETVFGQVNLRRKVTIKLKDALEKIPAICDKELRDYINILVAKQFNKKQILAHFKSINYRLNMKSVDKVDVWQFSNEKEPMVATRKSVDTSFGTKRIATITDTGIQKILLNYLKAKNNDPNIAFTPEGIAEMNKHITEYNNGKQHQPILKVRVSEPKGAKYQVGETGNKTSKFVEAQKGTNLYFAIYEDKEGNRSYNTIPLNEVIERLKQGLSPAEDLNKQGEKLKFYLSPNDLVYVPTEEEKLSSECKLNKEQIYKMVSSTGSECYFIPYTVSNVIFNKVEFESLNKMGRALTGEMIKSVCWKLELDRLGNILKVIK

SEQ ID NO: 22283 - protein, 1375 aa, unidentified
  REGION 1..1375: note = Cas Enzyme sequence
MKKILGLDLGTTSIGWALVYESENTDEKSSIVRLGVRVNPLSVDEKGNFEKGKAITTNADRQQTHGARINLQRYKLRRENLKDCLQKQGWIGTEALCEEGKASTFETYMLRAKAAEEEISLHELCRVLFMMNKKRGYKSNRKANNKEDGKLFDGMTVAQKLYEEHLTPAEYSFQLLSSGKKFKQEYYRSDLKEEFDRIWNEQQKYYPEILTDDFKQHLQGKSKGNTSKIFLGKYGIYSADLKGLDRKLQPLKWRIEALKQQVDKEVLAFVISDLNGQIASTSGLLGAISDRSKELYFNKQTVGQYLWTSLKETPHVSIKNKPFYRQDYLDEFEKIWETQATYHKELTPELKQEIRDIIIFYQRPLKSKKGLISVCELEQRKVKVTIDGKEKEISIGPKVAPKSSPMFQEFRIWQNLNNILLIDKGNNSIHPLYEEERNLLYEELSVKEKLSKAEALKVLNKNSKQWDLNYKEIEGNRTQAVLYDCYNRIIVMTGHEECNFKKLKASEIRSYFKTIFTGLGFNTDILEFDSSLTGHELERQPSYQLWHLLYSYESDNSRTGNDALLRKLETAFGFPKEYAAVLSDVVFEDSYGNLSVKAMRKILPHLQAGLDYSQACEEAGYKHSRRSLTKNELDQKEYKEKLDLLPKNSLHNPVVEKILNQMINVINAVIDEYGKPDEIRIELARELKIGAAERENMTRSISQGNAENKRIREILQKEFALSYISRNDIIKYKLYEELKSNGFKTLYSDTYISKDKLFSKDFDIEHIIPKARLFDDSLSNKTIEARDVNIAKSNKTAFDFIFGKYGQQGIEAYKKKLDILLQDGSISKAKYNRLLMKEADIPSGFIDRDLRDTQYIAKKAYEILSDLVRNVTPTTGAVTSRLREDWQLVDVMKELNFEKYQKLGLAEVIEDRDGRKIKRIKDWTKRNDHRHHAMDALTIAFTKPSYIQYLNNLNARSDKSSSIYGIENKELHREDNKLRFNAPLPINEFRAEARRHLKSVLVSVKAKNKVMTQNVNVIKTKHGVIKKVQLTPRGELHNATFYGTKKRSIIKMIKVGAALDEATIKKVSSSLIREALLDRLHEYNGDAKKAFTGRNSIDKNPIYIDEEHKKTVPSLVKTIEWEMYHPTRKLISPDLKIDKVIDKGIREILKTRLAKFNGDAQKAFSNLDENPIYKDEAKKITLKRVSLEGVSSVIPLHTIKDREGKPVVGKDGKPVLGDYVQTSNNHHIAFYMDENGNLQDNVVSFFEAAERKSQGVPVIDKSYNHDKGWHFLFTMKQNEYFVFPNEVTGFNPSEVDLTDEANYSLISPNLYRVQKMSKTSGRDYWFRHHLEAMLNDDPKLRNSMFKRINSLKALEGIVKVRINCVGKIVAVGEYD

SEQ ID NO: 22284 - protein, 1380 aa, unidentified
  REGION 1..1380: note = Cas Enzyme sequence
MKRILGLDLGTTSIGWALVNEAENDNETSSIVRLGVRVNPLTADEKSNFEKGKAITTNADRQKKHTARINLQRYKLRRQNLYNCLKEYGWFGNNALFEEGKASTFETYKLRAKAAEEEISLHELARVLFMLNKKRGYKSNRKANNKEDGQLFDGMTIAKKLSEEHLTPAEYSLQLLNKGKRFTQGYYRSDLNAELERIWNEQKKYYPEILTDEFKEQLKGKTKVNTNKIFLAKHHIYSADLKGSDKKMQSLKWRVEALRQQVDKEILVYVISDLNGQIANTSGLLGAISDRSKELYFNKQTVGQYLWASLEENPHISIKNKPFYRQDYLDEFEKIWETQAAFHKQLTPELKQKIRDVIIFYQRPLKSKKGLISVCELEQRKVKTVIDGKEKEITIGPKVAPKSSPVFQEFRIWQNINNLLLINNDTNEKRSLNEEERNLLYQELSIKAKLSKTDALKVLNKNGKQWELNYKEIEGNRTQAILFDCYNRIITLTGHEECNFKKLKASEIRHYVTTIFKRLGFNTDILDFNPLLEKHELEKQPMYMLWHLLYSYESDNSRTGNNSLLRKLETTFGFPEEYATVLCDVVFEDDYSNLSVKAMRNILPSLQAGDDYSQACAHAGYNHSRRSLTKDELEEKVYKDKLELLPKNSLRNPVVEKILNQMINVINTIVTEYGKPDEIRIEMARELKSSAAEREKTTRAISQANTENQRIRDILEKDFALSYISRNDIIKYKLYEELEANGFKTLYSGTYIPKEKLFSKDFDVEHIIPKARLFDDSFSNKTLEARNINIAKSNKTAFDFIKGEYGDEGAEVYKKKLDMLLSKDVISKAKYNKLLMSEADIPSEFIERDLRNTQYIAKKAYEILSELVRTVTPTTGEITNRLREDWQLVDVMKELNFEKYQKLGLAEVVEDRDGRKIKRIKDWTKRNDHRHHAMDALTIAFTKPAFIQYLNNLNARSNKSSSIYAIENKELHREDNKLKFNAPIPIHEFRAEAKRHLSAILISIKAKNKVMTQNVNKIKTKQGVIKKIQLTPRGALHNETIYGTKKRPIITMVKVGAALDEATINKISNLTIREALLKRLNEYSGNAKKAFTGKNTLDKNPIYLNAERTKTVPTLVKTIEWESFHPTRKLIDKDLNVDKVVDKCIRNILKTRLEEFNGDAKKAFSNLEENPIYLDQTKKIALKRVSIEGVLSAIPLQTLKDQAGKLIIGKDGKPVLGNYVQTSNNHHIAFYTDEKGNLQDKAVSFFEAAERKSQGLPIVDKNYNHDKGWRFLFTMKQNEYFVFPNEATGFIPTEVNLMDEANYDMISPNLYRVQKVSRIEKGPSTSRDYWFRHHLETILNDDSRLKNSAFKRINSLKPLEGIIKVRINSIGKIVAVGEYD

SEQ ID NO: 22285 - protein, 1190 aa, unidentified
  REGION 1..1190: note = Cas Enzyme sequence
MSKHVLGLDLGVGSIGWCLITLDAQGDPAEILGMGSRVVPLNNATDAADFSIGKAFTANQERTARRTMRRGFARYQLRRYRLRRELEKVGMLPDAALIQLPLLELWELRERAATAGERLTLPELGRVLCHINQKRGYRHVKSDAAAIVGDEGEKKKDSNSAYLAGIRANDEKLQDEHKTVGQYFAEQLRQSQSESPTGGISYRIKDQIFSRQRYIDEYNQIMAAQRVHYPDVLTDEFIRMLRDEVIFMQRPLKSCKHLVSLCEFEKQEKVMRVQQDDGKGGRQLVERKVKFGPKVAPKSSPLFQLCRIYEAVNNIRLTRPDGSPRDITPEERAKIVAHLQSSASLSFAALKKLLKEKALIADQLTSKSGLKGNTTRVALATALQPYPQYHHLLDMELETRMMTVQLTDEETGEVTEREVAVVTDSYVRQPLYRLWHILYSIEERDAMRRALITQLSMKEEDLDGGLLDQLYRLDFVKPGYGNKSAKFICKLLPQLQQGLGYSEACAAVGYRHSNSPTSEEITERTLLEKIPLLQRNELRQPLVEKILNQMINLVNALKAEYGVDEVRVELARELKMSREERERMAEGNRRREKENKAIAEKIRECGLFPTKSRIRKYMLWEEAGEKCLYCGQILTLSQCLNGDDMEVEHIIPKSVLYDDSYGNKTCACRRCNKEKGNRTALEYIRAKGWEDEYMERINGLLDKKAISYSKHQRLRWLKEDIPSDFLERQLRLTQYISRQAMAILQQGIRRVSASEGGVTARLRSLWGYDDILHTLNLDRYDSMGETERVSREGETTEKLRITNWSKRMDHRHHAIDALVVASTRQGYIQRLNRVSSESEREAMSGEIEVQKAANTDKLSLLERWLTQRPHLSVRAVSDKVAEILISYRPGKRVVTRGRNIYRKKTADGREVTCVQRGVLVPRGELMEASLYGKILSQGRERIVKRYPLHDLKGEVVDPCLRELIAEYNQEITSKVKAKGAPLYLDAAEKQEVRSVRCYVTQPSVAKAIPIRFDERGRAITFVKSGNNHHLALYRTPQGKLEESIVSFWDAVDRARYGIPLVITRPREVMEQVLQRGDVPESVLSLLPPSDWVFVDSLQPDEMVIIGLSDEELQRALEVQDYRKLSEHLYRVQKVSSLYYVFRYHLETSVADDKNTSGRIPKFHRVRSLADYEKRNIRKVRVDLLGRISLL

SEQ ID NO: 22286 - protein, 1435 aa, unidentified
  REGION 1..1435: note = Cas Enzyme sequence
MKNILGLDLGTTSIGFAHIVEDENKEKSEIKELGVRIVSLTTDEQSDFEKGKSISTNANRTLKHGARLNLDRYQQRRKYLIDLLQKANLITPSSILAENGKNTTHSTWQLRAKAVTERIEKEEFARVLLAINKKRGYKSSRKAKTEDEGQAIDGMAIAKCLYDENLTPGQLSLQLLQQNKKLLPDFYCSDLQKEFDLVWNLQKQFYPDILTDSFYKELQGKGKDATSKAFSKRYHFDTAENKGSKESVRLQAYQWRAEAISKQLSKEEVAYVLTEINNNLNNASGYLGAISDRSKELYFNRQTVGQYLYAQLQENRHNSLKNKVFYRQDYLDEFERIWETQASFHKELTDELKKQIRDVVIFYQRKLKSQKGLVSFCEFESKEIEIEKDGKAITKSIGARVVPKSSPLFQEFKIWQILNNVICKRKGIRKKKVSTNTTQSDLLNESSQTISDLDMKCKQLLFEELNIKGDLKSDKVLKLLGYSPQEWEINYNQLEGNRTQKSLYEAYLKIIEIEGYEVKDILQIKSTKDDWSLDESPLSASEIRERVKAIFQTLGICTKILYFDPLLPVKEFEQQYSYQLWHLLYSYESDDSTSGNETLYRILEKKYAFKREHATILANVVLQDDYGSLSTKAIRKIYPYIKENQYSTACELAGYKHSKLSLTTEELEARELKNIIPLLRKNVLRNPVVEKILNQMINVVNALIEKNSERDAEGKITKYFHFDEIRIELARELKKNAQERYEMTQNINKAKLEHQKISEKLQKQFGIKNPTKSDIIRYRLYKELEHNAYKELYTNAYIAPDVLFSKNIDIEHIVPKARVFDDSFSNKTLAFKEFNIKKGESTAFDYITSLNCEGELNQYLTRVENAYKTKSISLTKYKNLLKKASEIGDGFINRDLRDTQYIAKKAKEILFQVTKNVLSTSGSITDRLREDWGLVDVMKELNMPKYQSLGLTEVEERKDGNKVTVIKDWTKRNDHRHHAMDALTVAFTKPSYIQYLNHLNARKDENNKNYSVILAIEKKETIKVPTNNSKNKRVFIEPIPNFRQVAKKHLEEIFISHKAKNKVVTKNINKPASTDKQQITLTPRGQLHKETIYGKYQYYVNKEEKVGVKFDERTIIKVSNPLYREALLKRLQANDNDPKKAFTGKNALSKNPIYLDESKTKTLPEKVNLTYLEEDFSIRKDISPDNFKDLKSIEKVIDQGVKRILIKRLQAYGNDPKKAFVDLEKNPIWLNKEKGIAIKRVTISGVNNAQPLHIGKDHLGKTTLNKEGKEIPVDYVSTGNNHHVAIYQDKDGNLQEQIVSFFEAVVRAQQGLPIIDKNYKQAEGWQFMFTMKQNEMFVFPNEATGFNPAEIDLLDPKNKKLISPNLFRVQTISIVKYGNSVVRDFKFRHHLEATLQDDKILQGITFQQIKSLEPLRNIVKVRINHLGDIISVGEY

SEQ ID NO: 22287 - protein, 1375 aa, unidentified
  REGION 1..1375: note = Cas Enzyme sequence
MKKILGLDLGTTSIGWALVYESENTDEKSSIVRLGVRVNPLSVDEKGNFEKGKSITTNADRQQTHGARINLQRYKLRRENLKDCLQKQGWIGEEALCEEGKASTFETYMLRAKAAEEEISLHELCRVLFMLNKKRGYKSNRKANNKEDGKLFDGMTVAKKLYEEHLTPAEYSLKLLSSGKKFKQEYYRSDLKEEFDRIWNEQQKYYPEILTDDFKQQLQGKSKGNTSKIFLGKYGIYSADLKGLDRKLQPLKWRVEALKQQVKKEVLSFVISDLNGQIASISGLLGAISDRSKELYFNKQTVGQYLWTSLKESPHVSIKNKPFYRQDYLDEFEKIWETQAIYHKELTPELKQEIRDIIIFYQRPLKSKKGLISVCELEQRKVKVTIDGKEKEISIGPKVAPKSSPMFQEFRIWQNLNNILLIDKGNNSNRPLYEEERNLLYEELSVKEKLSKAEALKVLNKNSKQWDLNYKEIEGNRTQAVLYNCYNRIIEMTGHEECNFKKLKASDIRYYVKTRFKNLGFSTDILDFDSSLQGHELERQPSYQLWHLLYSYESDNSRTGNDALLRKLETAFSIPKEYAAVLSDVVFEDSYGNLSVKAMRNILPHLQAGLDYSQACEKAGYKHSRRSLTKNELDKKEYKEKLELLPKSSLHNPVVEKILNQMINVINAVIDEYGKPDEIRIELARELKIGAAERENMTRSINQGNAENKRIREILEKEFALSYISRNDIIKYKLYEELKSNGFKTLYSDTYISKDKLFSKDFDIEHIIPKARLFDDSLSNKTIEARDVNIAKSNKTAFDFISEKYDQQGIEAYKKKLDILLQDGSISKAKYNRLLMKEADIPSGFIDRDLRDTQYIAKKAYEILSDLVRNVTPTTGAVTSRLREDWQLVDVMKELNFEKYQKLGLVEVIEDRDGRKIKRIKDWTKRNDHRHHAMDALTIAFTKPSYIQYLNNLNARSDKNSSIYGIENKELHREDNKLRFNAPLPINEFRAEARRHLKSILVSVKAKNKVMTQNVNVIKTKHGVIKKVQLTPRGELHNATFYGTKKRPIIKMVKVGAALDEVTIKKVSSSFIREALLDRLHEYNGDAKKAFTGRNSIDKNPIYIDEEHKKTVPALVKTIEWEMYHPTRKLISPDLKIDKVIDKGIREILKTRLAKFNGDAQKAFSNLDENPIYKDEAKKITLKRVSLEGVSSVIPLHTLKDRGGKPVVGKDGKPVLGDYVQTSNNHHIAFYMDENGNLQDNVVSFFEAAERKSQGVPVIDKNYNHDKGWNFLFTMKQNEYFVFPNEVTGFNPSEVDLMDEANYGIISPNLYRVQKMSKTSGRDYWFRHHLEAMLNDDPKLRNSMFKRITSLKALEGIVKVRINCIGKIVAVGEYD

SEQ ID NO: 22288 - protein, 1483 aa, unidentified
  REGION 1..1483: note = Cas Enzyme sequence
MKTILGLDLGTNSIGWAKVIVDDNENYLRDIQLGSRIIPMSQDVLGKFDKGVTESQTAIRTNFRGIRRLRERTLQRRERLHRVLHTLHYLPPHYDSAIGWDRKAPTTYGKFLNHGEPKLAWERREDGTMQFLFMDAFHEMIADFAKHQPALVANGKKVPLDWTIYYLRKKALTQPIKKEELAWILLNFNQKRGYYQLRGEEDEEHAAKHEEYHELKVVGVEADEAGKGDNTWYNVKLENGWIYRRQSKIPLDDWVGKVRAFIVTTEYEKDGTTPKKDKEGNVKRSFRSPNENDWGLRKKQTEHSLEASGIPVGAFIYDHLLKEPSDKIRGKFIHTIERKYYKQELAAILREQSKHHEELCSKDMLKACVEELYPNNPLHRESLLKKNMTYLLIEDLIFYQRPLKSKKSLIAECPYEAYSYVDKETGEVKRQGIKCIARSNPYYQEFRLWQLIANLRLRNRADERDVTAEYLPHQEDYVRLFTYLNDRKEINQETLLKDFFKLKKVTIGGEKVFPIRWNYIEDKEKKYPCNATRHELLLALDRAGMEHDWLDDRDLAYRLWHLLYSVDSKDETERALRKLKDDDAFVGSFLKIKPFEKEYGAYSEKAIKKLLPVMRRGSLWNEAELCPSTKERIANTLQGTIDEKLKKKIGAFISSCQQVSDFQGLPEWLACYVVYGRHSEATAIQHWETPEQLLAYIHGFKQYSLRNPIVEQCILETLRTVYDIWKEAGQIDEIHVELGREMKKTSEQRAHLTENVLRNENTNLRIKSLLMELKNDADMKDVRPHSPMQQEILRIYEEGALQTLSKDDAAFTEIMKISKMAQPSTSELKRYRLWLEQKYRSPYTGKPIALSKLFTSAYQIEHIIPKKRYFDDSFSNKVICEAEVNGAKGSMLAYEFIKDCGGNVIHCTTLGDVTILSEAEYKALVTELYANNTSKKEKLLMEDIPQEFVNRQLNDSRYISRVVMTLLSNIVRIEGEEEATSKFVIPCSGGITDKLKKDWGLNDVWNNIVYPRFERLNALTNTTDFGQWENKEGKRVFQTSVPLELQRGYQKKRIDHRHHAMDALVIACASRNIINYLNNQEANDPTKQENARKQLCIKSRIIRKPWETFTQDTHKALDNIVVSFKNYVRVINKATNYYERYHADGKKVVDEQKGETMWAIRKPMHKDTVFGHVNLRRKAVVKLKDALENIPAICDKTLRHYIQDLQKKHFNTKQLLAHFKSINYRLNKQAVDKVEVWQYSDDKEQLAATRKPLDTSFDVKHIAAITDTGIQKILLNYLQAKGGDPAIAFTPEGIAEMNRNIAVYNGGKQHQPILKVRIAEPMGAKYPVGETGNKGTKYVEAQKGTNLYFAIYEDEEGNRTYETITLRIVAEQLKLECSPVPEKNEKGVALKFYLSPNDLVYVPTADELLSKECSLDKNRIYKMVSATKSECLFIPHSVAKTIYDKVEFEALNKMGRALTGEMIKSVCWKIEVDRLGHIVNIIK

SEQ ID NO: 22289 - protein, 1479 aa, unidentified
  REGION 1..1479: note = Cas Enzyme sequence
MKTILGLDLGTNSIGWAKVCVDDNGNYTREIKLGSRIIPMSQDTLSNFDKGVTESPTAARTGFRGIRKIRERALQRRERLHRVLHVMGFLPPHYENAIGWNREATTYGKFLDNAEPKLAWEKQEDGSMRFLFMDSFYEMMADFAKYQPGIVADGRKIPLDWTLYYLRKKALTQAIRKEELAWILLNFNQKRGYYQLRGEEDEENPTKREEYYELKVVSVEAAEEGKGGNTWYNVTLENGWIYRRQSKIELNDWVGKVRPFIVTTEYEIDGVTIKKDKNGEVKRSFRAPSENDWGLRKKRTESLLEESGKTVGAFIYDHILSEPADKIRGNFIRTIERKFYKKELEAILREQSKHHKELKDIDTLIACIKELYPNNKPHQDSLMKKDMAYLLITDLIFYQRPLKSKKSLIADCPYEYYKYVIKETGEIKRQGIKCIAKSNPYYQEFRLWQFIINLRLFNRNNDKEVTSEYLSSMKDYTRLFTYLNDRKDINQEILLKDFFKQKKVKRGMEKEFPIRWNYIEDKEKKYPCSETRHELLAALSKAGIDHSWLDDKERFYRLWHLLYSVESKEEAEGALRKLNDNDDFVNAFLKVKPFKKEYGAYSEKAIKKLLAVMRMGDLWNESDICEQTRDRIQNIIKGDIDEKIKDRMGRTFSQLSDFQGLPEWLACYVVYGQHSEATDIQRWTKPENLMAYINGFKQHSLRNPIVEQCILETLRTVHDIWKEAGHIDEIHIELGRSMKSTADQRARMSKSIMQNENTNLRIKSLLMELKNAKEFENVRPYSPIQQEILRIYEEGALQELTKEDAQYTEISKISQMAQPSANELLKYRLWLEQKYCSPYTGKPISLSKLFTSAYQIEHIIPQSRYFDDSFTNKVICEAEVNQLKSNMLGYEFIKKHGGEIVHCTMVGDVKILDAKEYYNFVTEHYTNNRRKKEKLLLEDIPQEFLNRQMNDSRYISKKVMAILSNIVRKEDEQEAKSKFVIACSGGITDRLKQDWGLNDVWNSIVYPRFERLNKLTNTENFGHWENKEGKQVFQTSVPLELQRGFSKKRIDHRHHAMDALVIACASNNIINYLNNESAKSQEKREDLRKKLCDKNRIIRKPWETFTQDAHTALENVVVSFKNYVRVINKATNYYEKYDKNGKKGIAEQKGQDMWAIRKPMHKETVFGQVNLRRRVTVKLKDALEKIPAICDKELRDYINNLVAKQFNKKQILAHFKSINYRLNMKYVDKVDVWQFSDEKDPMVATRKSVDTSFDTKRIATITDTGIQKILRNYLETKDNDPNIAFTPEGIAEMNKHITEYNNGKRHQPILKVRVSEPKGAKYQVGETGNKTSKFVEAQKGTNLYFAIYEDKEGNRSYNTIPLNEVIERLKQGLSPAEDLNKQGEKLKFYLSPNDLVYVPTEEEKLSSECKLNKEQIYKMVSATSNQCFFTPHRTANSIVNKVEYSPLNKMEKTILDEMIKSVCWKLEVDRLGNILKVIK

SEQ ID NO: 22290 - protein, 1382 aa, unidentified
  REGION 1..1382: note = Cas Enzyme sequence
MKRILGLDLGTASVGWAVVNEAENSEEQSSITALGSRVVLLSADEKNNFLTGKSVSATATRTAKRGARRNLQRYKLRREWLKDALVSAGIINENTCLNDSNSKELFATYISRAKAVTEQIALEDFAKVLFMINKKRGYKSNRKTDNTESEDGQIIDGLDLAKKLKARNITPGQYLLELFKENKKNKAVFYRSDLQEEVNRIWAFQSQFYPEILDNTLLSAITNKSKKAVIGLFKGIKDVEIADVKTKERTEKALTWRSEALHKQLEIGEVAYAIAEVMGAISQSSARLALLSDNSKHLEFEGLTIGQYLLKLLRNNPNSSLKNINFYRKDYEDEFNTIWKKQASFYPQLTESLRSTVFNSIFMQRNLKSCKALLANCELEFAEKKITLPDGSCQTRTIYSKVCPKSSPYFQEFQIWQSLSNIRIIDKENTHLTKGQELSYDQKVMLLPELMIHSELKANKIIEILFGKKSNYTINMPSIKGNRTNETIFNALLEIVELTGHSIDNIVKTDANQQIEAVKNIFESLGYKTNFITFDSTIEGKDGLNQPYYKLWHLLYSYCGDNSKTGNEALIRKIEDLTGLKKEEAKVLANCTFENDYASLSTKAIRKLLPHLQSNLDYSEACEAAGYNHSKRSRTKEDIKNKVYKDKLDLLPRNSLRNPIVEKILNQMIHVINQTSEAYGKPDEIRIEMAREIKKNKIQREKLANHLRQNTAELERIKDILRKDFKLSHISHNDILRYRLYEELSLNGYKTLYSNTYIERQQILDPTVTIEHIVPKALAFDDSFSNKTLEIQSVNGEKSNQTAFDFISKKYGSEALEQYINRVNNLFENGKISKTKRDNLLRKQKDIPSDFLNRDLRNTEYIAKKALEILEDYVPRVTPTIGEITKTLREDWQLVNIMRELNWEKYNSLGLTSFYYDRNGTKIGLIHNWTKRNDHRHHAMDALTIAFTKPSIIQYLNNLKSQNDKGSSIYAIQAKETYIDETRKRLIKPPYDIKQFRNDAKQMLDNIFVSHKAKNKVVTPNTIVTKKKRKAGKETRAEEKRTFLTPRGALSNETVYRKICNYETKEITINSKLTYEIALTIAKKKEREAVLDRLAQHNNNPTTAFKNYNKNPIILKTSVGEKPLMSVKIVNYKELFVKRSEINEKLDIKRVLDAKVRTRLTDRLKEYNNDPKAAFANLEENPIWLNEEKGIALKHVTTIERVVGLPIRPKRNINGEIMKDEQGQPLKSHYVATGGNHHVAIYEDEEGKWHEKVVSFNEAASRAIQKLPIIDKDLNKELGWIFQFTMKQNEMFVFPDKESSFDPLAIDLKDPANKSLISKHLYRVQKLSSGDYYFRHHLETNVEENKEVMGSTWKRIRSLSSLQGIIKVRVNHIGQIIDVGEY

SEQ ID NO: 22291 - protein, 1433 aa, unidentified
  REGION 1..1433: note = Cas Enzyme sequence
MTQKILGIDLGTNSIGTSVRNTDLGNNLVDQLEFFSSDIFNASVNGEGVNGGKGGREYSLASSRSAKRRKRRLYEHRRYKLWATLDLLIKNNLCPMTPESLEQWRTYDKKKKLFRQYPIDDKAFHSWIILDFNGDGKPDYSSPYQLRRELVSVQLDFNQAIDRYKLGRALYHIAQHRGFKSSKGETIAEQEKQEDDSKKDKKKALAEEHVDAIKASEEKHSKGLSTYMQEHNLKTVGVAFAQLEDEGIRIRKNSEYKAIRSQHQDEIKEIFKFQKGLSEQTQLLDTLISEKQGIGTIFYKRPLRSQRGNVGKCTLEPHKPRCPIGHPLFEKFRAWTFINNIKAKSPDSDSAEPLPMDLKINIYNKLFLSRVKEDFKFEEIRYFIEKQWGVALSKDDKTINYRDDTSVAGCPITARMIKVLGENWENFQVLGTKERQTQGKSNNALHQVCYTAEDIWHLCYDAEDSGKVRTFAEEILGWDEKKASELVRLWSAIPQGYAMLSQKAIRNINRMLLFGLKYSDAVLLAKLPDILELSDEDIQTIIKKAQQLEEVVNEEKRIGNIVNSLIANYKAESLEHRFADHNYEYQLDASDEREIIKHIESNIGKQRWELMDADEQTSILEGVRSGYQAFFARHKRTFVELPQLGKRLVELLSKEYPSVTEKQWERLYHPSQIAIYRPILLDNSDENKRLGNPDIGAIKNPTVMRTLNNLRRRVNQLLDDGVLVPDETRVVVETARDLNNANAKWALEQYQEIRRKENKKIKDILEEFYPQFSNITSTDVDRARYVIEQYEEDNYKLEKEIGTYSKNINKYKCWLEQGGQCLYTGRIISLSNLFDSNAFDLEHTIPASVSFDNSDQNMTLCEAHYNRFIKKNNIPTAMPNYEKDVTIDGKLYTAIKPRLEKWKKRIKRLSRNVEYWKVQARRAQMKDDKDKYTKEKLLWQMELQYWKDKLQRFTILEVTDGFKNSQLVDTRIITRHATLYLKSVFKNVEVQRGSTTAEFRKILGLQSVEEKKDRTLHSHHAIDATVLTTIPAAAKRDRILELFYKVQEKERILKNYSGDAPIGLKQDLEGLQEKLKKEVEACKLGNKLGQLGSFINENIIISHNVKDQTLTPSRKRLRRRGRVVYNKKRENDNDKNPIWQTGDTLRGEIHKESYYAAITQYAKDKDGNVLLNNGKPKIDPTIWYVIHRELTYFDDWKPLEKVIVDKNLYKLMKEQFPDGTSFKKACEQGFYMIKKGKDKEHNIKTHRIRHVRCYSDVKGALKIKEQTNKSTKEYKQYFYAAVGDLYTMCCYTNGKNKEYRVYRLYDIAQHRKSGIEDIPEFITDEKGNRLEWAYRLRSGDMILLYENTPEELYDMDPVNLKQRLYKVDRFESKGPTICMTHHLIANGERGKSIKDYNKMPPTARCSVNTLKFLIMGEHNDFVIKGNNIIFNHR

SEQ ID NO: 22292 - protein, 1510 aa, unidentified
  REGION 1..1510: note = Cas Enzyme sequence
MKRILGLDLGTNSIGWALVDSEEQRILGMGSRIIPMDQGVLDTFSGGNPVETQTAARTVYRGTRRLRERALLRRERLIRVLNMMKFLPEHYASQIDFEKRLGQFFDEKEPKLAWKQNDEGRFEFIFQQSFNEMIEEFKNKGVVREDKKIPYDWTIYYLRKKALSQEIEKEELAWILLNFNQKRGYYQLRGEEEEENPNKLVEYYSLKIVDVIADEKPNSKSDIWYSLHLENGWIYRRSSKIPLFGWKDKTRDFIVTTDLNDDGTVKKDKEGIEKRSFRAPSENDWVLLKKKTESDIEKSHKTVGAYVYETLLQNPMQKVRGKLVRTIERKFYKDELKQILEKQREFHPELRDEDLYNDCVRELYRSNETYQFILSKRDFVHLFLDDILFYQRPLRSQKSAIGDCILEFKTYKDKDGNNIKEYLKVISKSNPLYQEFRIWQWLYNLKIYRKEDDEDVTLQFIANIEDKEQLFDFLSNRKSIEQKPLLEYLIKAKGLKKQVKTEAYRWNYVEDKIYPCSETKTMISTRLAKVENIPDNFFTKEIEQKLWHIIYSVTDKNEFEKALRTFAKKYDLDIASFVDNFKKIPPFKNEYGSFSEKAIKKLLPLMRLGKYWKWNDIDNNTQNRISKIITGEYDEEIKDIVREKSIALTNENDFQGLQLWLAQYLVYGRHSEADIAGKWHSVADLEKYLNEFKQHSLRNPIVEQIITETLRVVRDIWRKYGQGAENFFSEIHVELGRDMKNTADERKKIVNVVTENENTNLRIKALLMELKNNSDGKLEVENVRPYSPTQQDILKIYEEYAISTGLDNEKDEKVKEDIKKISRVAQPTTTELQRYKLWLEQKYCSPYTGKVIPLGKLFTEEYQIEHIIPKSRYYDDSFSNKVICEAAVNKLKDKCLGLEFIKNYHGQIVETGFGQKVTIFDEEAYQNFVKQHYAYNHSKRTKLLLEEIPEKMIERQMNDTRYISKFVLPLLSNLVRAKENDNGVNSKNVLPVNGKITTMLKQDWGLNDVWNDLILPRFVRMNELAKTIAFTSWNEQHQKYLPTVPLELSKGFQKKRIDHRHHAMDALVIACATRDHVNLLNNKHANTDTIRYDLQRKLRLFERVTYIDPQTKNNVTKDIPKEFKKPWDNFTVDARNELEKIIVSFKQNLRIINKATNIYTKYENGKKIKVGQKGLNWAIRKPLHKETVFAKVSLRKRKTVRLSEALKDWKKIVDKKLKQEIKRLTCQYGKFDVDTILRYFKDRKYQFGEVDVSKVKMYYFDEENAAVRKNVDTSFTEKFIQGSVTDTGIQKILLNHLEAKGNKVEIAFSPEGIEEMNKNIIQLNEGKLHLPIFKVRVYETIGNKFSVGVKGNKKDKYVEAAKGTNLFFAIYVDENGIRSYETIPLNIVIERLKQGLSVVPEKNRKEHSLLFYLSPNDLVYVPIEDERENIHAVNLDQLNNEQRKRIYKMVSCTGSECHFVPYYVASPIVNKVEYSSLNKIGRSLTGEMIKDVCIKLKVDRLGNIKGISGL

SEQ ID NO: 22293 - protein, 1504 aa, unidentified
  REGION 1..1504: note = Cas Enzyme sequence
MKNIVGLDLGTNSIGWAVVNGSVNDDGSEQLVKIQASGSRIIPMDAAMIGDFNKGNSISQTAERTRLRGVRRLSERYLLRRERLHRILDILGFLPFHFAQDLDRHGKIVKGKEPKLAWRKNEAGQFEFIFQDSFKEMLEDFKLNHPNLITDDKKVPYDWTIYYLRKKGLTSKISKEELAWILLNFNQKRGYYQLRGEEEEENKNKLVEFYALKVVAVEDSGEKKGKDIWYNVHLENGWVYRRTSNMPLDWVGKTKEFIVTTDLEKDGTPKKDKEGNVKRSFRAPKEDDWSLVKKKTEADIDQTHKTVGAYIYDTLLGNPSQKIRGRLVRTIERKYYKEELKQILEKQKEFHLELQDRVLYAACIEELYPINEAHRNNVGNRDFTYLFLEDILFYQRPLKSKKSLIDNCPYEENQGLDKETGEIKSFPVKCIAKSHPLFQEFRLWQFIVNLRIYRKDLAQDVDVTNELLKTEEDYVALFDWLNGKKEIDQKAFLKYPLFGLKKEVENYRWNYVQDKPYPCNETRSSMLARLEKCDISIEFLTKENEEALWHILYSVEDKNEIVKALQKFADKHDLNASFVDVFQKFPPFKKEYGSYSAKAIKKLLPLMRMGKYWSENSIDKGTRERMDKIITGEYDEKIENRVREKAIHLADVSDFKGLPLWLVCYIVYGRHSEAKEITQWKSPADIDLYLRSFKQHSLRNPIVEQIIIETLRVVRDIWKQVGNIDEIHVELGREMKNPADKRKKMTQQMSENENTNLRIKYLLTEFLNPEYEVENVRPYSPSQQDILRIYEEGVLNSVSDLPEEISDILKKFTETDLKKRPSRSEVLRYKLWLEQKYRSPYTGEVIPLGKLFTPAYEIEHVIPQSCYFDDSFSNKVICEAEVNKLKSNLLGHEFIVKHHGEIVELPFGKKVRIFTVDEYEQFVKDNYSRTRSKMKKLLMDDIPEEFVARQLNDSRYISKVVKSLLSNIVREKGEEEAISKNVIPCTGGVTDRLKKDWGINEVWNKIILPRFQRLNELTGTNKFTTKNVGIQEIPTMPLELQKGFNKKRIDHRHHAMDAIIIACANRNIINYLNNESATAKAELSRYDLQKMLCDKAKTDNNGNYKWVIRKPWASFTQDTYLALENIIVSFKQNLRVINKATNHFLHYNEEGKKIFVKQGKGDNWAIRKSMHKDTVFGEVNLRRIKTVALNEAMKNPQSIVVKDFKRKLLELWNLGFDAKRIKKYFEDNRETWSDINLSKIEVYYFSKDTKDRFFATRKPLDTSFDRKKIENNITDTGIQKILLRHLELKDNNPDIAFSPDGIDEMNRNIIQLNNGKYHQPIIKVRWYEQADKFAVGQTGNKSSKFVEAAKGTNLFFAVYESNILDKKTNTIIKKRNYATIPLNVAIERQKQGLPVAPEDENGNDPIFVLSPNDLVYLPTAADLANGIIAQPLDRGRIYKMVSCTGNEGYFIPARIANPILQTIELGSNNKAQKAWTDEMIKEICMPIKVDRLGNVLESSSSYKK

SEQ ID NO: 22294 - protein, 1526 aa, unidentified
  REGION 1..1526: note = Cas Enzyme sequence
MKNILGLDLGTNSVGWALVSVDENGMLVKKIRLGSRIIPMSQDVLGKFDSGVTVSQTAERTEYRSHRRLLERALLRRERLHRVLHLLGFLPEHYAACIGWDRNDNATYGKFLPETEPKLAWRKADDGEYRFIFMQSFDEMLEDFKESQPSLLANGKRIPLDWTLYYLRNKALTKPIAKEELAWILLNFNQKRGYYQLRGEEDEEIPSKRVEYHELKVVKVEATDEGKGGNIWYNVLLENGWVYRRQSKYSLDKWLGLTLPFIVTTNLEADGVTPKRDKDGNEKRSISLPKEDDWTLLKKRTEDHLEKSGLTVGAFIYRHLLANPSDKVRGQLVRTIDRKYYKRELQAIIAKQMEFHPELRDAKLLKACAEELYRNNGEHRAQLMAKDFKHLLVEDVLFYQRPLKSKKSLIANCPYETRQYINKETGEIKDVNVKCIAKSNPYFQEFRLWQWISNLRLLRQMDGQDVTADYIKGNDDKERLFDLLNNQGEIKQEHILRDFLKLKKPKGGEFPLRWNYVDDKVYPANETRHAMNKAIKAMNADKEEKEAIGQLLVQPAVEYMLWNLLYSITDRNELTSALRRFALAHGISSVDAFVEAFLKVKPFKKEYGAYSEKATKKLLQVMRVGKYWCGDELADPAKRTKGNKQAVYDEMANRGICKQTLQNISNIIEENIDERLIGALINPQRPLTALSHFQGLSVSDACYVVYGRHSEVAEIVKWKDAGELNTFINNFKQHSMRNPIVEQCVLETLRTVRDVWKQEGQIDEIHVELGRNMKRTAEQRARDTQAIQRNENTNMRISLLLTELKNDPSISDVRPYSPSQRELLKIYEEGALETLTDKDEDIAKISRLAQPSSSELRRYKLWLDQKYVSPYTGRPIPLAKLFTPAYEIEHIIPQSRYFDNSFSNKVICEAEVNKLKDNLLGMEFIKQFGGKQKGILDEDAYKLHVMTNYAHNPAKRSKLLMEDLPTDFNSRQLKDTRYISKTVMALLSNVVREEGERETRSKHVVVCTGGVTDTLKKDWGLHDVWHNLVYPRFIRLNNLTGTQNFGYWRALDEEKRKQGEDSKKVFQITLPPECQRGFVKKRIDHRHHAMDALVIACASADIVNYLNNQSAANPNSREDLRRLVCDVKRRIRKPWPTFTQDAQAALEDLVVSFKNTVRVVNKASNTYLRYDKDGKKKRFKQEGEGLKAIRKPMHKETYYGEVNLIRKEMLPLKRALEDVNAIVDKELRANIKVLLRDGFNLQQVLANFKAKDFKFNKRDIKKVEVYVSSAKSTPMVATRKPLDTSFNAKRIVDITDTGIQKILLNYLKANDNSPEQAFTPEGIAYLNEHIAEYNNGKPHQPILKVRVSEVMGAKFAVGQTGSKKTKFVEAQSGTNLYFAIYEGEDGKRNFETIALNVAAERLKTGQTPVPETNGAGIPLKFYLSPNDLVYVPTDEDRAAAHPSIDKRRIYKMVSATDRECYFLPISAASTIYNKVEYESMNKMGRAIDIMEYSDNYDVSTINKQMIKDVCWKLEVDRLGNITKIVR

SEQ ID NO: 22295 - protein, 1536 aa, unidentified
  REGION 1..1536: note = Cas Enzyme sequence
LIIYFIFEKIVNTILVMKKIVGLDLGTNSIGWALINAYIDEYNKEHLYGIEACGSRIIPMDAAILGNFDKGNSISQTADRTSYRGIRRLRERHLLRRERLHRILDLLGFLPKHYSDSLNRYGKFLNDIECKLPWVKDDTGSYKFIFQESFKEMLANFTEHHPILIANNKKVPYDWTIYYLRKKALTQKISKEELAWILLNFNQKRGYYQLRGEEEETPNKLVEYYSLKVEKVEDSGERKGKDTWYNVHLENGMIYRRTSNIPLDWEGKTKEFIVTTDLEADGSPKKDKKGNIKRSFRAPKDDDWTLIKKKTEADIDKIKMTVGAYIYDTLLQKPDQKIRGKLVRTIERKYYKNELYQILKTQSEFHEELRDKQLYIACLNELYPNNEPRRNSISTRDFCHLFIEDIIFYQRPLKSKKSLIDNCPYEENRYIDKESGEIKHASIKCIAKSHPLYQEFRLWQFIVNLRIYRKETDVDVTQELLPTEADYVTLFEWLNEKKEIDQKAFFKYPPFGFKKTTSNYRWNYVEDKPYPCNETHAQIIARLGKAHIPKAFLSKEKEETLWHILYSIEDKQEIEKALHSFANKNNLSEEFIEQFKNFPPFKKEYGSYSAKAIKKLLPLMRMGKYWSIENIDNGTRIRINKIIDGEYDENIRERVRQKAINLTDITHFRALPLWLACYLVYDRHSEVKDIVKWKTPKDIDLYLKSFKQHSLRNPIVEQVITETLRTVRDIWQQVGHIDEIHIELGREMKNPADKRARMSQQMIKNENTNLRIKALLTEFLNPEFGIENVRPYSPSQQDLLRIYEEGVLNSILELPEDIGIILGKFNQTDTLKRPTRSEILRYKLWLEQKYRSPYTGEMIPLSKLFTPAYEIEHIIPQSRYFDDSLSNKVICESEINKLKDRSLGYEFIKNHHGEKVELAFDKPVEVLSVEAYEKLVHESYSHNRSKMKKLLMEDIPDQFIERQLNDSRYISKVVKSLLSNIVREENEQEAISKNVIPCTGGITDRLKKDWGINDVWNKIVLPRFIRLNELTESTRFTSINTNNTMIPSMPLELQKGFNKKRIDHRHHAMDAIIIACANRNIVNYLNNVSASKNTKITRRDLQTLLCHKDKTDNNGNYKWVIDKPWETFTQDTLTALQKITVSFKQNLRVINKTTNHYQHYENGKKIVSNQSKGDSWAIRKSMHKETVHGEVNLRMIKTVSFNEALKKPQAIVEMDLKKKILAMLELGYDTKRIKNYFEENKDTWQDINPSKIKVYYFTKETKDRYFAVRKPIDTSFDKKKIKESITDTGIQQIMLRHLETKDNDPTLAFSPDGIDEMNRNILILNKGKKHQPIYKVRVYEKAEKFTVGQKGNKRTKFVEAAKGTNLFFAIYETEEIDKDTKKVIRKRSYSTIPLNVVIERQKQGLSSAPEDENGNLPKYILSPNDLVYVPTQEEINKGEVVMPIDRDRIYKMVDSSGITANFIPASTANLIFALPKATAEIYCNGENCIQNEYGIGSPQSKNQKAITGEMVKEICFPIKVDRLGNIIQVGSCILTN

SEQ ID NO: 22296 - protein, 1210 aa, unidentified
  REGION 1..1210: note = Cas Enzyme sequence
MKLVLGLDLGVGSVGWALIFITDSGEPIKILALGERIVSMDPDNSKEFSAGATCTLNQKKTKAKSVRKGYSRYVQRRDALTAELRHIGMMPDETLIKLPVLDLWQLRANAATEGKKLSLAEIGRVLYHINQRRGYKHGKSDVSSDNKQKGYVKAVNERYCMIQERQQTIGQYFALKLKETAVTTEKGTFYTFRIKDQVFPREAYEEEFDRIIECQKKFYPELLTEKVIDKLRNYIIFYQRHGKSCKHLVSVCDFERKPYKDENGKVFYNGPKVAAKSNPLYQIEKIWEEVNNISLRNKKGEELEITLVQKRELFNYLNTHEILRLTVLYKILGISKRDGWSANDAVKRGLKGNTTFVQLQKALQGVEDCEELLRFQLNNMPTVVCDEVTGELLQIVNPDCIRQPLYRLWHAIYSLKDKRQLKDTLRKNFKIEDDETIDLLYNIDFTKDGYGNKSVKVIRRLLPYLQAGLKYNEACEYIGINHSNSLTKEENAQRVLLEKLTQIGKNELRQPIVEKILNQMINVVNAIIAKYGRPDTIRVELARELKQSKEERKLMSDGIAAREREKKRDGKILKEEGIHPTKNRLERYRLWKETGERCLYCGNGINLNEFLRGGEVETEHIIPKALLFDNSYSNKTCSCRECNRKKGRRTAYEYVSSLGEERFEVYLNVVKMLYDEGKISKKKMDWLLMKSEDIPQDFINRDLRQTQYISRKAMELLQKVCYDVTVTSGHVTSFIRHIWGYDTILHKLNFNRYKQGGLTEVVQFEHRGGKHEREVISGWSKRLDHRHHAIDALVIAMTKQSVIQRLNTLNTCRDEMYQEVESEKKEWRDDYSLLEQWLRELKHFSVEEVQRVIAKTLVSYKVNKKITSPGTRAVYSKRKKKVVQRGILIPRGVLHEDSVYGKIKIQGDLDPVYVIKYKLGVGAMGFVFTGKETYEETIKSNKKTGLEEVKVKDDIGNTLMSIVDGNIRNRIKQRLNIGFPEGEDYRNNPQKALENLKDLDNYPLYADDACKIPIKSVRCRTGLSAVVPLRYNGEGQAVGFVKTGNNHHVAIYRDRDGGYHESIVTFWQAVSRKRFGIPAIIEQPPALWESISSGLQREIPKSILETFPEPEWTFIVSMQKNESFILGMEEDDYQRAMEEKDYAALGNNLYVVQNISSMVYRFCLSTTTIFDSQKMNKPDKRFLNIQSFQAFFDKNPHKIKIDLLGEIVNN

SEQ ID NO: 22297 - protein, 1506 aa, unidentified
  REGION 1..1506: note = Cas Enzyme sequence
MKTILGLDLGPNSIGWAKVEVDDEGNYLRNIKLGSRIIPMTQDMLGDFDKGVKVSQTATRTDFRGIRRLIERHLLRRERLHRVLHALKFLPKHYEDAIGWDRNEPATYGKFVNNSEPKLAWERQEDGSMRFLFMESFNEMVADFAQNQPSLVSDGKKIPLDWTIYYLRKKALTQPIKKEELAWILLNFNQKRGYYQLRGEEEEDNLTKRKEYYKLKVVGVEADGAPKGGKTWYNIHLENGWTARCQSKIPLDDWVGKVKEYIVTTEYEDDGKTPKCDKEGKVKRSFKSPEKDDWQLIKTRTEKFIDDSNKTVGAFIYDHLLEKPFDKIRGKYIRTIERKYYKNELREILREQAKYHEGLHSLEALKICAEELYKNNQQHQEYLLKKDMTFLLLNDLIFYQRPLKSKKSLIADCPYEVYKYDDKLTGKKGQKKIKCIAKSNPYYQEFRLWQFIANLRLFSVTDGKEVTAEYLKTEEDYVRLFSFLNDRKDIKQETFLRSFLKLKKVPIGSEKIYPIRWNYIEDANKSYPCNATRHELLLAFDRADIPRELLDVEGREYRLWHLLYSIEAKEETESALRKLKANKAFGDLNIDDDFVNSFLKIKPFEKEYGAYSEKAIKKLLAVMRRGSLWKEADICEATKQNIAKILQNDIDEKLKKKIEAAVSSFNKLSDFQGLPTWLACYVVYGRHSEAAQIQCWQSPEDLKTYINKFKQHSLRNPIVEQCLLETLRTVYDIWKDAGQIDEIHIELGRNMKSTAEQRARKTNEFLRNENTNLRIKNLLVELKNDDKIENVRPYSPSQQEILRIYEEGALQELSKDDEMFEDISKISKMAQPSPTELSRYKLWLEQKYRSPYTGRVIPLSKLFTTAYQIEHIIPQSRYFDDSFNNKVICESEVNSLKDNMLGYEFIKECGGRTVPCTLLGDVKIFTKEEYKDFVTKHYTDNTYKRDKLLLEDIPQEFSARQLNDSRYISKMVQTVLSNIVRAENEQEATSKFVVSCNGAITDRLKKDWGLNDVWNSIVCPRFKRLNEKTKTNAFGHWEDKAGKHVFQTTVPLELQRGFSKKRIDHRHHAMDALVIACASRNIVNYLNNESANSPEKREDLRKKLCDEKRKIRKPWKTFTQDAREALSDVVVSFKNYVRVINKATNYYEHYSSSGSKVMISQKGNDMWAIRKPLHKESVFGRVNLRRKVTVSLKKALENIPAICDKTLRDYINALVEKHFNTRQLLAHFKSINYRLNRQRVDKVEVWQFSDEKIEMVARRISLDTSFDDKQISSITDTGIQKILLNYLQTKDGNAEIAFTPEGIEEMNKNISLYNDGKAHQPILKVRVATPKGMKYPVGQTGNKATKFVVAEKGTNLYFAIYENELGVRSYDTIPLNIVVERLKEGLSPVPQANEADIPLKFYLSPNDLVYVPTKENEDELCRDRIYKFVDSSGTTANFVPHTSANTIYNVDKEYAEKCCNGAVILNEYGLGSSQSKNQRALTGEMIKEICWKLKVDRLGNIIKVIK

SEQ ID NO: 22298 - protein, 1226 aa, unidentified
  REGION 1..1226: note = Cas Enzyme sequence
MLMSKHVLGLDLGVGSIGWCLIALDAQGDPAEILGMGSRVVPLTNLGDDKAFSKGEAFTANQKRTARRTMRRGFARYQLRRYRLRRELAKVGMLPDAALIQLPLLELWELRERAAAAGRGPARPPPGGGVRRAAQKRGYRHVKSDAAAIVGDEGEKKKDSNSAYLAGIRANDEKLQDEHKTVGQYFAEQLRQSQSESPTGGISYRIKDQIFSRQRYIDEYDQIMAAQRVHYPDILTDEFIRMLRDEVIFMQRPLKSCKHLVSLCEFEKQEKVMRVQQDDGKGGRQLVERKIKFGPKVAPKSSPLFQLCRIYEAVNNIRLTRPDGSPRDITPEERDKLVAYLQTYEAPKPPKRKPAKAKPVKLAHPKLDLDKLKELLCIEEELFADKLLEEGLKGDATRIALSIILQPYPQYHHLLDMELETRMMTVQLTDEETGEVTEREVAVVTDSYVRQPLYRLWHILYSIEERDAMRRALIKQLGMKKEDLDGGLLDQLYRLDFVKPGYGNKSAKFICKLLPQLQRGLGYSEAWAALRAPPPQNPPPREKTHTPPLEKIPLLQRNELRQPLVEKILNQMINLVNALKAEYGIDEVRVELARELKMSREERERMTRQNGERKKSNDKVAEKIQKCGLFPTKSRIRKYRLWEEAGRQCLYCGRSIDEKQCLNGDDMEVEHIIPKSVLYDDSYGNKTCACRRCNKEKGNRTALEYIRAKGWEAEYMERINGLLDKKAISYSKHQRLRWLKEDIPSDFLERQLRLTQYISRQAMAILQQGIRRVSASEGGVTARLRSLWGYGKILHTLNLDRYDSMGETERISREGETTEELRIKDWSKRMDHRHHAIDALVVACTRQSYIQRLNRLSSEFGREDKKKEDQEAQEQQATETGRLSNLERWLTQRPHFSVRTVSDKVAEILISYRPGQRVVTRGRNIYRKKMADGREVTCVQRGVLVPRGELMEASLYGKILSQGRERIVKRYPLHDIKGEVVDPRLRELIAEYNQEITSKVKAKGTPLYLDAAEKQEVRSVRCYVDKPSVAKAIPIRFDECGRAITFVKSGSNHHLAIYRTPKGELVESIVSFWDAVNRARYGLPLIIKYPRKAMEQVIQRDDIPESVLRLLPPADYEFVEVFQQNEMVVVGLPEEELRRAVDMQDYRTLSEHLYRLKGISSKDYEFHYHLDTDDPDETDSSKKKKKRVRNTSGRIPRIYRTRGIGPLQKKNVRKVRVDLLGRISLL

SEQ ID NO: 22299 - protein, 1443 aa, unidentified
  REGION 1..1443: note = Cas Enzyme sequence
MSFLSLFKKILTKFGIDCKNISMKHILGLDLGSNSIGWALIEQDFDNKQGKILGLGSRIIPMDQGILGEFERGNKVSQTAERTGFRGVRRLRERHLLRRERLHRVLHLLGFLPPHYDAQIDFTKRFGKFIGDSEPKLAYNNEGFIFLESFNEMVEDFKKHQPQLFYIKSNGEESKIPYDWTIYYLRKKALQEKISKEELAWIILNFNQKRGYYQLRGEEEEKSTKNVEFYSLEITDVIADTPNNKGEIWYSIHLENGWVYRRASKISLEDWKGKVRDFIVTTELNEDGSVKLDKEGKEKRSFRAPRDEEWGFIKKKTEQNIVFSGKTVGEYIYDHLLQNPNQKIKGKLVRTIERKFYKEELKAILEKQVALQPELFTEELFVDCVRELYKNNEIHQNSLSSKDFVHLFLNDIIFYQRPLRSQKSNISSCSLEYRFCIDKETKQRRKTYLKVISKSNPYYQEFRVLQWLSNLKIYRKEDDKDVTSEFISSIEDKETLYEFLMSEKEVSNKSILEFLLMKSLRETYPFAKETELKKELKKEITKYRWNYVYEEENDSKKYPMNETGYEIKKRLKEVKNIPDNFLTRDIEYQLWHIIYSVTDKYEYEKALMKFAQKHNLDAESFVENFKRIKPYPSDYGAFSEKAIKKLLPLMRFGKYWNYSDISEPVQVRISDIINGVDNENIKTIVREKAEKYQLSQEVDFQGLPLWLAQYIVYGIHSEAADIQHWTSPSDLEEYLKGFKQHSLRNPIVEQVVTETLRVVKDIWEYYGKGEQNFFDEIHIELGRELKKTAEERNRMTREINENEETNLKVKKELQQIFENKSAENVRPYSPIQQEKYRLWLEQEKESPYTGQPIPLSKLFTDEYQIEHVIPQSRFFDDSLSNKVICEAAVNAEKGAQLGLEFIKKHGGEIIEIGLNKKVTILNEKEYKELVNKHFANNRAKKAKMLMEEIPEKMVERQLNDTRYISKFISQILSNIVRSPQEDDGVNSKNIIPYTGKITAALKQDWGLNDVWNDLILPRFERMNNLTQTELFTTYSEKYQKKIPTVPLEHAKGFQKKRIDHRHHALDALVVACATRSHINYMNNKHALDKHKAKEEKQNARIDLRTVLCEKKYNDNAEDKYNWTFKKPWNTFTQDVRSALEMIVVSFKQNLRVINKATNYYEKWVEEKGKMVKKKVKQEGINWAIRKPLHKETISGKITLERVKVGKGKILTATRKSIDSSFTEKTIASITDTGIQKILLNYLAHKGSPELAFSPEGLEEMNKNIAKYNDGKDHQPIYKVRIFEEGSKFPLGEIGTKSQKYVEAAKGTNLFFGIYQGEEKRSYATILLDEVIERQKQGLTSVPELNEKGEKLLFSLSPNDLVYVPVEGEDTQSIDYANLSKEQRERIYKIVSFTKNRLYGIPNIVAVSIVNKMEYTQLNKIEFLKEKETCIKLKIDRLGNISKA

SEQ ID NO: 22300 - protein, 1526 aa, unidentified
  REGION 1..1526: note = Cas Enzyme sequence
MKNILGLDLGTNSVGWALISVDENGNLVKDIRLGSRIIPMSQDVLGKFDSGVTVSQTAERTEYRSHRRLLERALLRRERLHRVLHLLDFLPEHYAACIGWDRNDNATYGKFLPETEPKLAWRKAEDGGYRFVFMQSFDEMLEDFKESQPSLLANGKRIPLDWTLYYLRNKALTKPIAKEELAWILLNFNQKRGYYQLRGEEEEETPSKRVEYHELKVVKVEATDEGKGGNVWYNVLLENGWVYRRQSKYSLDKWLGQTLPFIVTTDLEADGVTPKRDKEGNVKRSFRSPKEDDWTLVKKRTEDHLEKSGLTVGAFIYQHLLADPSEKVRGQLVRTIDRKYYKRELQAIIAKQMEFHPELRDAELLKACAEELYRNNEAHRAQLLAKDFKHLLVEDVLFYQRPLKSKKSLIANCPYETRQYINKETGEIRDVNVKCIAKSNPYFQEFRLWQWISNLRLLRQADGQDVTAAYIKGNEDKERLFDLLNNQGEIKQEHILRDFLKLKKPKGGEFPLRWNYVDDKIYPANETRHAMNKAIKGMTVDKEEKETLGQLLDQPAVAYMLWNLLYSITDRNELASALRRFALTHGVSSVDAFVESFLKVKPFKKEYGAYSEKATKKLLQVMRLGKYWCGDELPEPAKRTKGNKQAVYDEMANRGICKQTLQNISNIIEEDIDERLMGALLNPDRPLTELSHFQGLSVSDACYVVYGRHSEVAEIVKWKDAGELNTFINNFKQHSMRNPIVEQCVLETLRTVRDVWEQEGQIDEIHVELGRNMKRTAEQRARDTQAIQRNENTNMRISLLLTELKNDPSISDVRPYSPSQRELLKIYEEGALENLTNQDEDIAKISRLAQPSTSELRRYKLWLDQKYVSPYTGRPIPLAKLFTPAYEIEHIIPQSRYFDNSFSNKVICEAEVNKLKDNNLGMEFIKKFGGKTQGILDEEAYKLHVTTNYAHNPAKRSKLLMEDLPTDFNSRQLNDTRYISKTVMALLSNVVREEGERETRSKHVVVCTGGVTDTLKKDWGLHDVWHNLVYPRFIRLNNLTGSQDFGYWRFLHEENKKKEEESKKVFQITLLPEYQRGFVKKRIDHRHHAMDALVIACASANIVNYLNNQSAANPHIHENLQRLLCDRKRLIRKPWPTFTQDAQKALEDLVVSFKNTVRVVNKASNTYLRYDKDGKKKRFKQEGEGLKAIRKPMHKETYYGEVNLIRKEMLPLKRALDDVNAIVDKELRASIKGLLRDGFNLQQVLANFKAKDFKFNKRDIKKVEVYVSSAKSTPMVATRKSLDTSFNAKRIADITDTGIQKILLNYLKANDNSPEQAFTPEGIAYLNEHIAEYNSGKPHQPILKVRVAEVKGAKFAVGQTGSKKTKFVEAQSGTNLYFAIYEDKEGKRHFETIALNVAAERLKMGQTPVPETNDAGLLLKFYLSPNDLVYVPTDEDRAAAHPSIDKRRIYKMVSATDKNSFFLPFEVASIIADQVEFEAKNKVGRVIEALEYTEQYESSAINKIMIKDVCWKLEVDRLGNITKIVR

SEQ ID NO: 22301 - protein, 1210 aa, unidentified
  REGION 1..1210: note = Cas Enzyme sequence
MKIILGLDLGVASIGWALIFTTDDGEPIKILALGERIVSIDPDNSKEFATGATCTLNQKKTKAKTIRKGYFRYVQRREALTAELRHLGMMPNEALIKLPVLDLWQLRANAATEGVKLSLGEIGRVLYHINQRRGYKHAKSDVSSDSKQKEYVKTVNARYLMIQEQQQTIGQYFALKLKETAVTSEKGVFYTFRIKDQVFPREAYEEEFDRVIECQRKFYPELLTDKVIDKLRNYIIFYQRHGKSCKHLVSVCDFERKPYKDQNGKVFYNGPKVAAKSNPLYQIEKIWEEVNNISLRNKKGEELEITLAQKRELFNYLNTHEILRLTVLYKILGISKRDGWSANDAIKRGLKGNKTFVQLQKALEGIEDGEKLLRFELNNLSTVVCDEVTGELLQVVNPDCIEQPLYRLWHAIYSIKDKKQLRDTLRKNFKIEDDTTINMLYNIDFTKDGYGNKSVKVIRRLLPYLQAGLKYNEACEYIGINHSNSLTKEENMQRTLLDKLPPIRKNELRQPIVEKILNQMINVVNAIILKYGRPDTIRVELARELKQSKEERKLMSDGIAAREKEKKRDSKILEEKEIHPTKNRLERYRLWKETGERCMYCGNGINLNEFLRGGEVETEHIIPKALLFDNSYSNKTCSCRECNRKKGRRTAYEYVSSLGEERFEVYLNVVKMLYDEGKISKTKMDRLLMKSEDIPQDFINRDLRQTQYISRKAMELLKKICYDVTATSGHVTSFIRHTWEYDTILHQLNFNRYKQGGLTEIVQFEHRGSKHEREVISGWSKRLDHRHHAIDALVIAMTKQSVIQRLNTLNTCRDEMYQEVESEKKEWRDDYSLLEQWLRELKHFSVEEVQRAIAKTLVSYKVNRKITSPGTRAVYSKRKREVVQRGILIPRGVLHEDSVYGKIKIQGDLNPSYVLKYKLGVGAVGFVFTGKETYEETIKPNKKTGLDEVKVKDDIGNTLMSIVDGNIRNRIKQRLNIGFPEGKDYRNDPKKALNNLRNLDDHPLYADDACKIPIKSVRCRTGLSAVVPLRYNEKGQAIGFVKTGNNHHVAIYRDRQGNYHEIIVTFWQAVNRKRYGIPVIIEQPSTLWEAISNGSQQQIPPSVLETFPEPEWTFVVSMQKNESFILGMEEDDYQRAMAEKDYIALGKNLYIVQNISSMVYRFCLATTTIFDSKRMNKPDKRFFNIQSFQAFFDKNPHKIKIDLLGEIVNN

SEQ ID NO: 22302 - protein, 1382 aa, unidentified
  REGION 1..1382: note = Cas Enzyme sequence
MKRILGLDLGTASVGWAVVNEAENSEEQSSITALGSRVVLLSADEKNNFLTGKSVSATATRTAKRGARRNLQRYKLRREWLKDALVSSGIINENTCLNDSNSKELFATYVSRAKAVTEQIALEDFAKVLFMINKKRGYKSNRKTDNTESEDGQIIDGLDLAKKLKARNITPGQYLLELFKENKKNKAVFYRSDLQEELNRIWAFQSQFYPEILDNTLLSAITNKSKKAVIGLFKGIKNVEIADVKTKERTEKALTWRSEALHKQLEIGEVAYAIAEVMGAISQSSARLALLSDNSKHLEFEGLTIGQYLLNLLRNNPNSSLKNINFYRKDYEDEFNSIWNKQASFYPQLTESLRSTIFNSIFMQRNLKSCKALLANCELEFAEKKITLPEGSCQTRTIYSKVCPKSSPYFQEFQIWQSLSNIRIIDKENTHLTKGQELSYDQKVMLLPELMIHSELKANKVIEILFGKKSNYTINMPSIKGNRTNETIFNALLEIVELTGHSIDNIVKTDANQQIETVKNIFDNLGYKTNFITFDSTIEGKDGLNQPYYKLWHLLYSYCGDNSKTGNEALIRKIEELTGLEKEEAKVLSNCTFENDYASLSTKAIRKLLPHLQSNLDYSEACEAAGYNHSKRSRTKEDIKNKTYKDELDLLPRNSLRNPIVEKILNQMIHVINQTSEAYGKPDEIRIEMAREIKKNKIQREKLANQLRQNTAELERIKDILRKDFKLSHISHNDILRYRLYEELSLNGYKTLYSNTYIERQQILDPTVTIEHIVPKALAFDDSFSNKTLEIQSVNGEKSNQTAFDFISKKYGSEALEQYINRVNNLFENGKISKTKRDNLLRKQEDIPSDFLNRDLRNTEYIAKKALEILEDYVPRVTPTIGEITKTLREDWQLVNIMRELNWEKYNSLGLTSFYYDRNGTKIGLIHNWTKRNDHRHHAMDALTIAFTKPSIIQYLNNLKSQNDKGSSIYAIQAKETYIDETRKRLIKPPYDIKQFRNDAKQMLDNIFVSHKAKNKVVTPNTIVTKKKRKAGKETKAEKKRTFLTPRGALSNETVYRKICNYETKEITINSKLTYEIALTIAKKKEREAVLERLAQHNNNPTTAFKNYNKNPIMLQTSVGEKPLMSVKIVNYKELFVKRSEINEKLDIKRVLDAKVRARLTDRLKEYNNDPKAAFANLEENPIWLNEEKGIALKHVTTIERVVGLPIRPKRNINGEIMKDEQGQPLKSHYVATGGNHHVAIYEDEEGKWHEKVVSFNEAASRAIQKFPIIDKDFNKELGWVFQFTMKQNEMFVFPDKESGFDPLAIDLKDPANKSLISKHLYRIQKISSGDYYFRHHLETNVEENKEVKGITWKRIRSVSSLQGIIKVRVNHIGQIIDVGEY

SEQ ID NO: 22303 - protein, 1375 aa, unidentified
  REGION 1..1375: note = Cas Enzyme sequence
MKKILGLDLGTTSIGWALVNESENKDEQSSIVRLGVRVIPLTVDEKGNFEKGKAITTNADRQQVHAARINLQRYKLRRENLRDCLQKQGWIGSEPMYEDGKSSTFETYKLRAKAAVEEVSLHEFARVLFMLNKKRGYKSNRKANDKEDGKLFDGMTIAKKLYEEHLTPAEYSLQLLNTGRKFTPEYYRSDLIEEFEKIWNEQQKYYPEILTDEFKQQLEGKAKSNTSKLFLGKYGIYSADTKGLDRRLQPLKWRVEAMKQQVDKDVLAFVISDLKGQIANTSGLLGAISDRSKELYFSKQTIGQYLWASLQENPHISIKNQPFYRQDYLDEFEKIWETQATFHKELTSELKQEIRDIIIFYQRPLKSKKNLIAVCELEQRKVKVTVDGKEKEITIGPKVAPKSSPMFQEFRIWQNLNNILLLDHETNSKRPLYEEERNLLYEELSVKEKLSKTEALKILGKKGRQWDLNYKELEGNRTQAVLYDCYNRIIVMSGHEECNFKKLKASDIRHYVKMIFKNLAFNTDILCFDSSLKGHELERQPIYQLWHLLYSYEGDNSRTGNDALLRKLETSFGFPKEYAAVLADVIFEDSYGNLSVKAMRNILPHLQAGKDYSQACEEAGYKHSRRSLTKEELNQKVYKEKLELLPKNSLHNPVVEKILNQMVNVINAVIEEYGKPDEIRIELARELKIGAAERENMTRGINQGNAENKRIREILEKEFALSYISRNDIIKYKLYEELKPNGFKTLYSDTYIPKDKLFSKDFDIEHIIPKARLFDDSLSNKTLEARDVNIAKSNKTAFDFILERYGEQGVKAYKTKLLLLLEDGAISNKKYNNLLKTEADIPSGFIDRDLRNTQYIAKKAYEILSELVKIVTPTTGSVTNRLREDWQLVDVMKELNFEKYQKLGLADVVEDRDGRKVKRIKDWTKRNDHRHHAMDALTIAFTKPSYIQYLNNLNARSDKSSSIYGIEVKELHREEGKLRFNAPLPINEFRAEAKRHLKSILVSIKAKKKVMTQNVNKIKTKHGIIKKEQLTPRGELHNATYYGTKKRPLVRMVKVGAALDEATINRVCSPAIRAALLKRLNAYNGDAKKAFTGRNSIDKNPIYLDIEQTKLVPVLVKTIEWGMYHPIRKRITPDLKIDKVIDKGIREKLKARLVEFNGDAQKAFSNLDENPIYMDEAKQITLKRVSIEGVLSAIPLHTLKDKAGKPIIGSDGKPVFGDYVQTSNNHHIAFYRDDKGNLQDNPVSFFEAAERKSQGVPVIDKRYNCDKGWHFVFTMKQNEYFVFPNEATDFIPSEVDLLDEANYCIISPNLYRVQKLSKASGRDYWFRHHLETMLNDDLKLKNSTFKRINSLKGLEGIVKVRINSIGKIVAVGEYD

SEQ ID NO: 22304 - protein, 1480 aa, unidentified
  REGION 1..1480: note = Cas Enzyme sequence
MRTILGLDLGTNSIGWAKVCINDDGNYVREIKLGSRIIPMSQDTLSNFDKGVTDSPTAARTGFRGIRRIRERVLQRRERLHRVLHVMGFLPSHYEKAIGWNREEATTYGKFLDNGEPKLAWERQEDGSMRFLFMDSFHEMMADFAKCQPGLVADGRKIPLDWTLYYLRKKALTQAIKKEELAWILLNFNQKRGYYQLRGEEEEEDPTKREEYYELKVVSVEAAEEGKGGNTWYNVTLENGWIYRRQSKIELNDWTGKIRQFIVTTEYEKDGITIKKDKNGEVKRSFRAPSEDDWGLRKKRTESRLEDSGKTVGEFIYDHILSEPADKIRGNFIRTIERKFYKKELEAILREQSKHHKELKDLNTLVNCIKELYPNNKAHQDSLMKKDMIYLLITDLIFYQRPLKSKKSLIADCPYEYYEYVIKETGEIKRQGVKCIAKSNPYYQEFRLWQFIINLRLFDRANDKEVTSEYLSSMEDYTKLFTYLNDRKEINQEILLKDFFKQKKVKMGMEKEFPIRWNYIEDKEKKYPCNETRHELLAALDKAGIDHSWLDDKERFYRLWHLLYSVESKEEAEGALRKLNDNEDFVNAFLKIKPFKKEYGAYSEKAIKKLLAVMRIGTQWNEDDICEQTRNRIQSIINGDIDEKIKERMGRTFSQLSDFQGLPEWLACYVVYGRHSETTDIQRWTKPENLMSYIKGFKQHSLRNPIVEQCILETLRTVHDIWKEAGHIDEIHIELGRSMKSTADQRARMSKSILQNENTNLRIKSLLMELKDAKEFENVRPYSPMQQEILRIYEEGALQELTKEDDQYPEISKISQMAQPSAKELLKYRLWLDQKYCSPYTGKPISLSKLFTSAYQIEHIIPQSRYFDDSFSNKVICEAEVNQLKSNMLGYEFIKKHSGEIVHCTMVGDVKILDAKEYYNFVTEHYANNRRKKEKLLLEDIPQEFLNRQMNDSRYISKKVMALLSNIVREEGEQEAKSKFVIACSGGITDRLKHDWGLNDVWNSIVYPRFERLNKLTNTENFGRWENKEGKQVFQTSLPLELQRGFSKKRIDHRHHAMDALVIACASNNIINYLNNESAKSQEKREDLRKKLCDKNRIIRKPWETFTQDVRTALEDVVVSFKNYVRVINKATNYYEKYDKNGKKGIAEQKGQDMWAIRKPMHKETVFGQVNLRRKVTVKLKDALEKVPAICDKELRDYINNLVAKQFNKKQILAHFKSINYRLNMKSVDKVDVWQFSDEKEPMVATRKSVDTSFDTKRIATITDTGIQNILRNYLNAKDNDPNIAFTPEGIAEMNKHITEYNNGKQHQPILKVRVSEPKGAKYQVGETGNKTSKFVVAQKGTNLYFAIYEDKEGNRSYSTIPLNEVIERLKQGLSPVEDLNKQGEKLKFYLSPNDLVYVPTEEEKLSSECKLNKEQIYKMVSATSNQCFFTPHRTANSIVNKVEYSPLNKMEKTILGEMIKSVCWKLEVDRLGNILKVIK

SEQ ID NO: 22305 - protein, 1494 aa, unidentified
  REGION 1..1494: note = Cas Enzyme sequence
MRTILGLDLGTNSIGWAKVCINDDGNYVREIKLGSRIIPMSQDTLSNFDKGVTDSPTAARTGFRGIRRIRERVLQRRERLHRVLHVMGFLPSHYEKAIGWNREEATTYGKFLDNGEPKLAWERQEDGSMRFLFMDSFHEMMADFAKCQPGLVADGRKIPLDWTLYYLRKKALTQAIKKEELAWILLNFNQKRGYYQLRGEEDEEDPTKREEYYELKVVSVEAAEEGKGGNTWYNVTLENGWIYRRQSKIELNDWTGKIRQFIVTTEYEKDGITIKKDKNGEVKRSFRAPSEDDWGLRKKRTESRLEDSGKTVGEFIYDHILSEPADKIRGNFIRTIERKFYKKELEAILREQSKYHKELKDLNTLVNCIKELYPNNKAHQDSLMKKDMIYLLITDLIFYQRPLKSKKSLIADCPYEYYEYVIKETGEIKRQGIKCIAKSNPYYQEFRLWQFIINLRLFDRTNDKEITSEYLSSMEDYTKLFTYLNDRKEINQEILLKDFFIQKKVKMGMEKEFPIRWNYIEDKEKKYPCNETRHELLAALDKAGIDHSWLDDKERFYRLWHLLYSVESKEEAEGALRKLNDNEDFVNAFLKIKPFKKEYGAYSEKAIKKLLAVMRIGTQWNEDDICEQTRNRIQSIINGDIDEKIKERMGRTFSQLSDFQGLPEWLACYVVYGRHSETTDIQRWTKPENLMAYINGFKQHSLRNPIVEQCILETLRTVHDIWKEAGHINEIHIELGRSMKSTADQRARMSKSILQNENTNLRIKSLLMELKNAKEFENVRPYSPMQQEILRIYEEGALQELTKEDDQYPEISKISQMAQPSAKELLKYRLWLDQKYCSPYTGKPISLSKLFTSAYQIEHIIPQSRYFDDSFSNKVICEAEVNQLKSNMLGYEFIKKHSGEIVHCTMVGDVKILDAKEYYNFVTEHYANNRRKKEKLLLEDIPQEFLNRQMNDSRYISKKVMALLSNIVREEGEQEAKSKFVIACSGGITDRLKHDWGLIDVWNSIVYPRFERLNKLTNTENFGRWENKEGKQVFQTSLPLELQRGFSKKRIDHRHHAMDALVIACASNNIINYLNNESAKSQEKREDLRKKLCDKNRIIRKPWETFTQDVRTALEDVVVSFKNYVRVINKATNYYEKYDKNGKKGIAEQKGQDMWAIRKPMHKETVFGQVNLRRKVTVKLKDALEKVPAICNKELRDYINNLVAKQFNKKQILAHFKSINNRLNMKSVDKVDVWKFSDEKEPMVATRKSVDTSFDAKRIATITDTGIQKILLNYLNAKDNDPNIAFTPEGIAEMNKHITEYNNGKQHQPILKVRVSEPKGAKYQVGETGNKTSKFVEAQKGTNLYFAIYEDKEGNRSYSTIPLNEVIERLKQGLSPVPDTNEKGIPLKFHLSPNDLVYVPKTDEENEIKTGQIYKFVDSSGTTANFVPHRVSNLIYNVDKKIAENFCNHEIIQNEYGIGSQQSKNQKSITGEMIKAVCWKLEVDRLGNIHKIIK

SEQ ID NO: 22306 - protein, 1193 aa, unidentified
  REGION 1..1193: note = Cas Enzyme sequence
MLMSKHVLGLDLGVGSIGWCLIALDAQGDPAEILGMGSRVVPLNNATDAADFSIGKAFTASQERTARRTMRRGFARYQLRRYRLRRELEKVGMLPDAALIQLPLLELWELRERAATAGECLTLPELGRVLCHINQKRGYRHVKSDAAAIVGDEGEKKKDSNSAYLAGIRANDEKLQDEHKTVGQYFAEQLRQNQSESPTGGISYRIKDQIFSRQRYIDEYDQIMAAQRVYYPDILTDEFIQMLRDEVIFMQRPLKSCKHLVSLCEFEKQEKVMRVQQDDGKGGRQLVERKVKFGPKVAPKSSPLFQLCRIYEAVNNIRLTRPDGSPRDITPEERAKIVAHLQSSASLSFAALKKLLKEKVLIADQLTSKSGLKGNSTRVALAAALQPYPQYLHLLDMELETRMMTVQLTDEETGEVTEREVAVVTDSYVRQPLYRLWHILYSIEERDAMRRALITQLGMKAEDLDGGLLDQLYRLDFVKSGYGNKSAKFICKLLPQLQQGLGYSEACAAVGYRHSNSSTSEEITERTLLEKIPLLQRNELRQPLVEKILNQMINLVNALKAEYGVDEVRVELARELKMSREERERMTRQNGERKKANDKVAEKIQKCGLFPTKSRIRKYRLWEEAGRQCLYCGRSIGEKQCLNGDDMEVEHIIPKSVLYDDSYGNKTCACRRCNKEKGNRTALEYIRAKGWEAEYMERINGLLDKKTISYSKHQRLRWLKEDIPSDFLERQLRLTQYISRQAMAILQQGIRRVSASEGGVTARLRSLWGYDDILHTLNLDRYDSMGETERVSREGETTEKLRIKDWSKRKDHRHHAIDALVVASTRQGYIQRLNRVSSESEREAMSGEIEVQKATKTDKLSLLERWLTQRPHLSVRAVSDKVAEILISYRPGKRVVTRGRNIYRKKTADGREVTCVQRGVLVPRGELMEASLYGKILSQGRERIVKRYSLHALKGEVVDPRLRELITTYNQELKSREKGAPIPPLCLDKDKRQEVRSVRCYVDKPSVSSAIPIRFDERGTAITFVQSGNNHHLAVYRTPQGVLEESIVSFWDAVDRARYGIPLVITHPREVMEQVLQRGDIPESVLKSLPPSDWMFVESLQQDEMVAIGLSDEELQSAIEAQDYRKLSEHLYRVQSLSSKYYVFRYHLETSVKDRKNTSGRIPKFHRVRNLPDYEKRNVRKVRVDLLGRISLL

SEQ ID NO: 22307 - protein, 1426 aa, unidentified
  REGION 1..1426: note = Cas Enzyme sequence
MKNILGLDLGTTSIGFAHIVEDENKEKSEIKELGVRIVSLTTDEQSDFEKGKSISTNANRTLKHGARLNLDRYQQRRKYLIDLLQKANLITPSSILAENGKNTTHSTWQLRAKAVTERIEKEEFARVLLAINKKRGYKSSRKAKTEDEGQAIDGMAIAKCLYDENLTPGQLSLQLLQQNKKLLPDFYRSDLQKEFDLVWNLQKQFYPNILTDAFYKELQGKGKDATSKAFSKRYHFDTAENKGSKESIRLQAYQWRSEAVSKQLSKEEVAYVLTEINNNLNNSSGYLGAISDRSKELYFNRQTVGQYLYAQLQENRHNSLKNKVFYRQDYLDEFERIWETQASFHKELTDELKKQIRDVVIFYQRKLKSQKGLISFCEFESKEIEIEKDGKTITKSIGARVVPKSSPLFQEFKIWQILNNVTCKRKGIRKKKSSAKSTELDLFNESSQAIFSLDMECKQLLFDELNLKGDLKSDKVLKLLGYSPQEWEINYNQLEGNRTQKALYEAYLKIVEMEAHDVKDILQIKSAKDDWSLDESPLSASEIKEKVKDIFQALGICTKILYFDPLLPVKEFEKQDSYQLWHLLYSYESDDSTSGNETLYRILEKKYAFKREHARILANVALQDEYGSLSTKAIRKIYPNMKENQYSTACEMAGYKHSKLSLTTEELEARELKNIIPLLKKNALRNPVVEKILNQMINVVNALIEKNSERDAEGKITKYFHFDEIRIELARELKKNAQKRYEMTQNINKAKLEHQKISEILQKKFGIKNPTKSDIIRYRLYQELEHNGYKELYTNAPIARDMLFSKNIEIEHIVPKARVFDDSFSNKTLAFREFNIKKGESTAFDYITSLNSEEELNQYLTRVENAYKTKSISLTKYKNLLKKASEIGDGFINRDLRDTQYIAKKAKEILFQVTKNVLSTSGSITDRLREDWGLVDVMKELNMPKYQSLGLTEVEERKEGNKVTVIKNWTKRNDHRHHAMDALTVAFTKPSYIQYLNHLNARKDENNKNYSVILAIEEKETIKVPTNNGKNKRVFIEPIPNFRQVAKKHLEEIFISHKAKNKVVTKNVNKPAGTDKQQITLTPRGQLHKETIYGKYQYYVNKEEKIGVKFDKETIAKVSNPVYREALLKRLQANDNDPKKAFTGKNALSKKPIYLDEAKTKTLPEKVNLTYLEEDFSIRKDISPDNFKDLKSIEKVIDQGVKRILIKRLQAYGNDPKKAFVDLEKNPIWLNKEKGIAIKRVTISGVNNAQPLHIGKDHLGKTTLNKEGKEIPVDYVSTGNNHHVAIYRDKEGNLQEQIVSFFEAVVRTQQGLPIIDKTYKQEEGWQFLFTMKQNEMFVFPNATTGFNPAEIDLLDPKNKKLISPNLFRVQKIATKDYFFRHHLETNVETDNVLKNTTWKREGLSGLKDIVKVRINHLGDIVSIGEY

SEQ ID NO: 22308 - protein, 1207 aa, unidentified
  REGION 1..1207: note = Cas Enzyme sequence
MLMSKHVLGLDLGVGSIGWCLIALDAQGDPAEILGMGSRVVPLTNLGDDKAFSKGEAFTANQKRTARRTMRRGFARYQLRRYRLRQELEKVGMLPDAALIQLPLLELWELRERAATVGRRLMLPELGRVLCHINQKRGYRHVKSDAAAIVGDEGEKKKKDSNSAYLAGIRANDEKLQDEHKTVGQYFAEQLRRSQSESPTGGISYRIKDQIFSRQHYIDEYDQIMAAQRVYYPDILTDAFIRMLRDEVIFMQRPLKSCKHLVSLCEFEKQEKVMCVQQDDGKGGRQLVERRVKFGPKVAPKSSPLFQLCRIYEAVNNIRLTRPDGSPRDITPEERAKIVAHLQSSASLSFAALKKLLKEKALIADQLTTKSGLKGNSTRVALAAALQSYPQYHHLLDMELETRMMTVQLTDEETGEVTEREGAVVTDSYVRQPLYRLWHILYSIEERDAMRRALITQLGMKEEDLDGGLLDQLYRLDFVKPGYGNKSAKFICKLLPQLQQGLGYSEACAAVGYRHSNSPTSEEITERTLLEKIPLLQRNELRQPLVEKILNQMINLVNALKAEYGVDEVRVELARELKMSREERERMTRQNGQRKEANDKVAERIRQCGLYPTKPRIQKYMLWEEAGKVCLYCGRSIEEEQCLNGDDMEVEHIIPKSVLYDDSYGNKTCACHECNQTKGNRTALEYIRAKGREAEYMKRINDLLKEKKISYSKHQRLRWLKEDIPSDFLERQLRLTQYISRQAMAILQQGIRRVSASEGGVTARLRSLWGYGKILHTLNLDRYDSMGETERVSREGETTEKLHITNWSKRMDHRHHAIDALVVACTRQSYIQRLNRLSSEFGREDKKKEDQEAQEQQATETGRLSSLERWLTQRPHFSVRTVSDKVAEILISYRLGQRVVTRGRNIYRKKMADGREVTCVQRGVLVPRGELMEASLYGKILSQGRERIVKRYPLHDLKGEVVDPRLRELIAEYNQEITSKVKAKGAPLYLDAAEKQEVRSVRCYVDKPSVAKAIPIRFDECGRAITFVKSGSNHHLAIYRTPKGELVESIVSFWDAVNRARYGLPLIIKYPRKAMEQVIQREDIPESVLSLLPPADYEFVEVFQQNEMAVVGLPEEEFRRAVDTQDYRTLSEHLYRLKGISSKDYEFHYHLDTDDPDETDSSKKKKKRVRNTSGRIPRIYRIRGIGSLQKKNVHKVCVDLLGRISLL

SEQ ID NO: 22309 - protein, 1190 aa, unidentified
  REGION 1..1190: note = Cas Enzyme sequence
MSKHVLGLDLGVGSIGWCLIALDAQGDPAEILGMGSRVVPLNNATDAADFSIGKAFTANQERTARRTMRRGFARYQLRRYRLRRELAKVGMLPDAALIQLPLLELWELRERAATAGERLTLSELGRVLCHINQKRGYRHVKSDAAAIVGDEGEKKKDSNSAYLAGIRANDEKLQDEHKTVGQYFAEQLRQSQSESPTGGISYRIKDQIFSRQRYIDEYDQIMAAQRVHYPDILTDEFIRMLRDEVIFMQRPLKSCKHLVSLCEFEKQERVMRVQQDDGKGGRQLVERKVKFGPKVAPKSSPLFQLCRIYEAVNNIRLTRPDGSPRDLTPEERAKIVAHLQSSASLSFAALKKLLKEKAIIADQLTSKSGLKGNSTRVALATALQPYPQYHDLLNMELETRMMTVQLTDEETGEVTEREVAVVTDSYVRQPLYRLWHILYSIEERDAMRRALITQLGMKEEDLDGGLLDQLYRLDFVKPGYGNKSAKFICKLLPQLQQGLGYSEACAAVGYRHSNTPTSEEITERTLLEKIPLLQRNELRQPLVEKILNQMINLVNALKAEYGVDEVRVELARELKMSREERERMAEGNRRREKENTAIAEKIRECGLFPTKARIRKYMLWEEAGEKCLYCGQILTLSQCLNGDDMEVEHIIPKSVLYDDSYGNKTCACRRCNKEKGNRTALEYIRAKGWEAEYMERINGLLDKKAISYSKHQRLRWLKEDIPSDFLERQLRLTQYISRQAMAILQQGIRRVSASEGGVTARLRSLWGYDDILHTLNLDRYDSMGETERVSREGETTEKLRIKDWSKRKDHRHHAIDALVVASTRQGYIQRLNRVSSESEREAMSGEIEVQKATKTDKLSLLERWLTQRPHLSVRAVSDKVAEILISYRPGKRVVTRGRNIYLRHGKKCVQSGLLVPRGPLSKETVYGQITINGEPQIVCKYDLHSLKAKDVDYVVDLALRKRLKELLAQHGGKEKEAFAGDVYMDEVGTQGPIRSVRCFTGLDRDKMKAVKYDEQGEAVGFVSPRNNHHLAIYRTPKGKLVESIVTFWDAVDRARYGIPLVITHPREVMEQVLQRGDIPESVLSLLPPSDWVFVDSLQQDEMVIIGLSYEELQRAFEAQDYRKLSEHLYRVQKMSSSYYVFRYHLETSVADDKNTAGRIPKFHRVQSLKAYEEKNIRRVRVDLLGRISLL

SEQ ID NO: 22310 - protein, 1438 aa, unidentified
  REGION 1..1438: note = Cas Enzyme sequence
MKYIKYILGLDIGSNSIGWALILLDLLQKTKRIIATGSRIIPMDQKVLSDFGKGITISPTAQRTSYRNARHCRERHLLRRERLHRVLHILGFLPTHYDKQIDFSKRYGKFVDNTEPKIAYNEGKFLFMDSFQEMLADFKSHQPDLFYTKKNGEESKIPYDWTIYYLRKKALSQKISKEELAWIILNFNQKRGYYQLREEEEENKENDFEIISSKIISVIKKDKDKKYNKYWYDIILENGLVYQAAFYNDFVYNWINQDREFIIERTSLKNGTEKVKLSYLPTFDEIDKMDKKEQDKYYKKIKIKTENSIGNKTVGCYIYDHILQNPNEKIKGKLVRTIERKYYKEELKAILEKQVALQPELFTDQLFADCIRELYSKNEAQQRNLAARDFVHLFVEDIIFYQRSLRRQKSTLANCSLESRSYIDKDSHTRKEVPLKVCPKSNPYYQEFRVLQWLQNLKIYEIDTDQEVTHEFIKTLEDKQQLFDFLMNQKEIDCEELLKYFLNQTYPNAKEKALKSELKKWKDTYRWNYVYDIGEKSSKKYPMNETRYELKRHLEKVANLPDDFLSSEVEYLLWHLIYSVTDKVAYEKGLKKFAQKHHLDKDSFVESFKKFKPYPSEYGSFSEKAIRKLLPLMRFGAYWDFNHIDKNTQKRIEDLITGVENEEIRTILREKAEKYQLEKETDFQDLPLWLAQYIVYNRHAEASSLEKWTSVNDLETYLNEFKQHSLRNPIVEQVVMETLRVVRDIWQQYGQGQASFFDEIHIELGRELKKTAKEREKLSKQNQKNEDINLSIKEKLKELEKYNTRAYSITHQEKYKLWLEQKHISPYTGQIISPENLFTDNYEIEHIIPQSRFFDDSLSNKVVCESIVNKAPYKDRQLGLEFIKNQGGRIVKELSKENKTIKIFTEEQYRTFIKEHYSNNPEKTKKLLLEEIPEKMVARQMNDTCYISKFISEILSKIVRSDEQDEGVHSKNVILCTGKITSILRQDWGLNDIWDNLILPRFERMNNLLQKEKFTIYSIEKQKKIPVVPINDQFKSFQKKRIDHRHHALDAIIIACVTGEHINYINNQHALEKGKDKKEKQKEHDKLREKLCIKKYNKGSEENYSWIFKKPWAHFTQEVQAALEGIVVSFKQNLRVINKATNYYERWVEENGRYIKKIVKQEGTNWAIRKPLHEETISGKIYLDREKIAKNDILTATRKTVDSSFDEKRIKKITDTGIQKILLNYLKYKGSPEIAFSPEGLEEFNKNLSIYNDGKPHKPIYKVRIYEKGSGRFALGEKGRKYKKYVQGAPNLYFGIYQGANKRSFVTIPLNEVIERQKQGRPSIPEYNEKGDPLLFSLSPNDLVYVPIKGEIIEDIDFQNLSNEQKERIYNVNDFSSTCYFTPNRIAKAIFPKEVDLQRKGDKLSGSYDTKTASLEGIQIKEVCIKLKVDRLGNISKA

SEQ ID NO: 22311 - protein, 1507 aa, unidentified
  REGION 1..1507: note = Cas Enzyme sequence
MKTILGLDLGPNSIGWAKVEVDDEGNYLRNIKLGSRIIPMTQDMLGDFDKGVKVSQTATRTDFRGNRRLIERHLLRRERLHRVLHALKFLPKHYEDAIGWDRNEPATYGKFVNNSEPKLAWERQEDGSMRFLFMESFNEMVADFAQNQPSLVSDGKKIPLDWTIYYLRKKALTQPIKKEELAWILLNFNQKRGYYQLRGEEEEDNLTKRKEYYKLKVVGVEADGAPKGGKTWYNIHLENGWTARCQSKIPLDDWVGKVKEYIVTTEYEDDGKTPKCDKEGKVKRSFKSPEKDDWQLIKTRTEKFIDDSNKTVGAFIYDHLLEKPFDKIRGKYIRTIERKYYKNELREILREQAKYHEGLDSLEALKICAEELYKNNQQHREYLLKKDMIFLLLNDLIFYQRPLKSKKSLIADCPYEVYKYDDKLTGKKGQKKIKCIAKSNPYYQEFRLWQFIANLRLFSVTDGKEVTAEYLKTEEDYVRLFSFLNDRKDIKQETFLRSFLKLKKVPIGSEKIYPIRWNYIEDANKSYPCNATRHELLLAFDRADIPRELLDVEGREYRLWHLLYSIEAKEETESALRKLKANKAFGDLNIDDDFVNSFLKIKPFEKEYGAYSEKAIKKLLAVMRRGSLWKEADICEATKQNIVKILQNDIDEKLKKKIEAAVSSFNKLSDFQGLPTWLACYVVYGRHSEAAQIQCWQSPEDLKTYINKFKQHSLRNPIVEQCLLETLRTVYDIWKDAGQIDEIHIELGRNMKSTAEQRARRTKDILRNENTNLRIKNLLVELKNDDKIENVRPYSPSQQEILRIYEEGALQELSKEDEMFEDISKISKMALPSPTELSRYKLWLEQKYRSPYTGRVIPLSKLFTTAYQIEHIIPQSRYFDDSFNNKVICESEVNSLKDNMLGYEFIKECGGKKVYCTLLNKSVEIFTEEEYKTFVTKHYVGNPRKQDNLLLEDIPQEFSARQLNDSRYISKMVQTVLSNIVRAENEQEATSKFVVSCNGAITDRLKKDWGLNDVWNSIVCPRFKRLNEKTKTNAFGHWEDKAGKHVFQTTVPLELQRGFSKKRIDHRHHAMDALVIACASRNIVNYLNNESANSPEKREDLRKKLCDEKRKIRKPWKTFTQDAREALSDVVVSFKNYVRVINKATNYYEHYSSSGSKVMISQKGNDMWAIRKPLHKESVFGRVNLRRKVIVSLKKALENIPAICDKTLRDYINALVEKHFNTRQLLAHFKSINYRLNRQHVDKVEVWQFSDEKIEMVARRKSLDTSFDDKQISSITDTGIQKILLNYLQTKDGNAEIAFTPEGIEEMNKNISLYNDGKAHQPILKVRVATPKGMKYPVGQTGNKATKFVVAEKGTNLYFAIYENELGIRSYDTIPLNIVVERLKEGLSPVPQANEADIPLKFYLSPNDLVYVPTKENEDELCRDRIYKFVDSSGTTANFVPHTSANTIYNVDKEYAEKCCNGAVILNEYGLGSSQSKNQKALDGEMIKEICRKLKVDRLGNIIKVIK

SEQ ID NO: 22312 - protein, 1435 aa, unidentified
  REGION 1..1435: note = Cas Enzyme sequence
MKNILGLDLGITSISFAHIVEDENKEKSEIKELGVRIVSLTTDEQSDFEKGKSITTNANKTLKHGARLNLDRYQQRRKYLIDLLQKANLITLSSILAENGKNTTHSTWQLRAKAVTERIEKEEFARVLLAINKKRGYKSSRKAKTEDEGQAIDGMAIAKCLYDENLTPGQLSLQLLQQNKKLLPDFYRSDLQKEFDLVWNLQKQFYPDILTDSFYKELQGKGKEATSKAFSKRYHFDTAENKGSKESVRLQAYQWRAEAISKQLSKEEVAYVLTEINNNLNNASGYLGAISDRSKELYFNRQTVGQYLYAQLQENRHNSLKNKVFYRQDYLDEFERIWETQASFHKELTDELKKQIRDVVIFYQRKLKSQKGLVSFCEFESKEIEIEKDGKAITKSIGARVVPKSSFLFQEFKIWQILNNVTCKRKGIRKKKSSTNPTQLDLFNEPSQTIFSLDMECKQLLFEELNIKGDLKSDKVLKLLGYSPQEWEINYNQLEGNRTQKSLYEAYLKIIEIEGYEVKDILQIKSTKDDWSLDESPLSASEIRERVKAIFQTLGICTKILYFDPLLPVKEFEQQYSYQLWHLLYSYESDDSTSGNETLYRILEKKYAFKREHATILANVVLQDDYGSLSTKTIRKIYPYIKENQYSTACELAGYKHSKLSLTTEELEARELKNIIPLLKKNALRNPVVEKILNQMINVVNALIEKNSERDAEGKITKYFHFDEIRIELARELKKNAQERYEMTQNINKAKLEHQKISEKLQKQFGIKNPTKSDIIRYRLYQELEHNGYKELYTNTYIAPDVLFSKNIDIEHIVPKARVFDDSFSNKTLAFKDFNIKKGEYTAFDYITSLNNEEKLNQYLARVENAYKTKSISLTKYKNLLKKASEIGDGFINRDLRDTQYIAKKAKEILFQVTKNVLSTSGNITDRLREDWGLVNVMKELNMPKYQSLGLTEVEERKDGNKVTVIKDWTKRNDHRHHAMDALTVAFTKPSYIQYLNHLNARKDENNKNYLVILAIEKKETIKVPTNNGKNKRVFIEPIPNFRQVAKKHLEEIFISHKAKNKVVTKNINKPAGTDKQQITLTPRGQLHKETIYGKYQYYVNKEEKVGVKFDERTITKVSNPLYREALLKRLQANDNDPKKAFTGKNALSKKPIYLDEAKTKTLPEKVNLTYLEEDFSIRKDISPDNFKDLKSIEKVIDQGVKRILIKRLQAYGNDPKKAFVDLEKNPIWLNKEKGIAIKRVTISGVNNAQPLHIGKDHLGKTTLNKEGKEIPIDYVSTGNNHHVAIYRDKEGNLQEQIVSFFEAVVRAQQGLPIVDKTYKQAEGWQFLFTMKQNEMFVFPNEATGFNPAEIDLLDPKNKKLISPNLFRVQTISIVKYGNSVVRDFKFRHHLEATLQDDKILQGITFQQIKSLEPLRNIVKVRINHLGDIVNIGEY

SEQ ID NO: 22313 - protein, 1432 aa, unidentified
  REGION 1..1432: note = Cas Enzyme sequence
MKNILGLDLGTTSIGFAHIVEDENKEKSEIKELGVRIVSLTTDEQSDFEKGKSITTNANRTLKHGARLNLDRYQQRRKYLIDLLQKANLITSSSILAENGKNTTHSTWQLRAKAVTERVEKEEFARILLAINKKRGYKSSRKVKTEDEGQAIDGMAIAKRLYDENLTPGQLSLQLLQQNKKLLPDFYRSDLQKEFDLVWNFQKQFYPNILTNTFYKELQGKGKDATSKAFSKKYHFDIAENKGSKESVRLQAYQWRAEALSKELSKEEVAYVLTEINNNLNNASGYLGAISDRSKELYFNRQTVGQYLYAQLQENRHNSLKNKVFYRQDYLDEFERIWETQASFHKELTEELKKQIRDVVIFYQRKLKSQKGLISFCEFESKEIEIEKDGKTITKSIGARVVPKSSPLFQEFKIWQILNNVICKRKGIRKKKISAKTTQLDLLNESSQTIFSLDMECKQLLFDELNLKGDLKSDKVLKLLGYSPQEWEINYNQLEGNCTQKALYEAYLKIVEMEAHDVKDILQIKSAKDDWSLDESPLSASEIKEKVKDIFQALGICTKILYFDPLLPVKEFEEQDSYQLWHLLYSYESDDSTSGNETLYRILEKKYAFKREHARILANVALQDDYGNLSTKAIRKIYPYIKENQYSTACEKAGYKHSKLSLTKEELEARELKNIIPLLKKNALRNPVVEKILNQMINVVNALIEKNSERDAEGKITKYFHFDEIRIELARELKKNAQERYEMTQNINKAKSEHQKISEILQKEFGIKNPTKSDIIRYRLYQELEHNGYKELYTNARIDRDMLFSKNIEIEHIVPKARVFDDSFSNKTLTFQRINSDKGEYTAFDYITSLNSEEELNQYLTRVKNAYKTKSISPTKYKNLLKKASEIGDGFINRDLRDTQYIAKKAKEILFQVTKNVMSTSGSITDRLREDWGLVDVMKELNMPKYQSLGLTEVEERKDGNKVTVIKNWTKRNDHRHQAMDALTVAFTKPSYIQYLNHLNARKDENNKNYSVILAIEEKETIKVPTNNGKNKRVFIEPIPNFRQVAKKHLEEIFISHKAKNKVVTKNVNKPAGTDKQQITLTPRGQLHKETIYGKYQYYVNKEEKVGVKFNKETIAKVSNPLYREALLKRLQANGNDPKKAFTGKNALSKKPIYLDESKTKTLPEKVNLTYLEEDFSVRKKIVPKNPTSKEFVPNLKSIEKVVDEGVRNILIERLRVYNNDPEKAFVDLEKNPIWLNKEKGIAIKRVTISGVSNAQPLHIGKDHLGKTTLNKEGNEIPVDYVSTGNNHHVAIYRDKEGNLQEQIVSFFDAVVRAQQGLPIIDKTYKQAEGWQFLFTMKQNEMFVFPNATTGFNPAEIDLLDPKNKKLISPNLFRVQKIATKDYFFRHHLETNVETDNVLKNTTWKREGLSGLKDIVKVCINHLGDIVSIGEY

SEQ ID NO: 22314 - protein, 1471 aa, unidentified
  REGION 1..1471: note = Cas Enzyme sequence
LLFLSHQNIKRMKRILGLDLGSNSIGWAFVQKDFENKQGKIIAAGSRIIPIDQKMLSNFEEGTTVSQTAERTTYRSMRRLRERHLLRRERLHRVLHILGFLPPHYDSQIDFSKRYGKFIDDAEPKIAYNKGNFIFMDSFNEMIEDFKKHQPQLFYKKSNGEESKIPYDWTIYYLRKKALSQKITQQELAWLILHFNQKRGYYQLRGEEETEGNDMEIISSKVLSVIKKDKDKKYDKYWYDITLENGLVYKPAFYNDLVYSWIGQEREFVVKRTLLKNGDEKIELSYLPTFDEIAKMDKKQQDKFYQKIKVKTESSIGNKTVGTYIYDHLLQNPNQKIKGKLVRTIERKYYKDELKAILAKQIALQPEFFTENLLADCIRELYRKNQTQQQNLLSKDFLHLFVEDIIFYQRPLRSKKSTIANCSLEKRSYIDKETNERKDVPIKVCAKSNPYYQEFRVLQWLQNLRIYEIETDREVTAEFIETAEDYETLFNFLMSQKEIDNEGLLKYFLLAKNPQIKDKAAKSELKKWLTIYRWNYVYDRADNSSKRYPMNETGYDLQRYLQKVEGLPANFLTFDITYQLWHLLYSVKDKVEFEKALKKFAQKYQLNEVSFVDSFKNFKPYPNEYGSFSEKAIKKMLPLIRFGNHWDFNHIDVSTQKRIDDLINGVANEDIRTIIREKAEKYQLNNETCFQGLPLWLAQYIVYNRHAEATNIEKWTSVSDLEAYLEDFKQYSLRNPIVEQVVTETLRVVRDIWQQYGGGQANFFDEIHIELGRELKNTSKEREKLSKQNQENENTNLRIKKLLAELKEDANIQNVRPYSPIQQELLKIYEEGVFSSTDEIEEDIQKIHKKAEPTTPEIQRYKLWLEQKYKSPYTGEVISLTKLFTEEYEIEHIIPQSRYYDDSLSNKVICESAVNKLKTNQLGLEFIQNHHGEKVRIAGNKEVTIFTEEQYKEFVKKYYANNLPKQQKLLLNDIPEKMVARQMNDTRYISKYISEILSKIVRSDEKDEGVNSKNIIPCTGKITTALKQDWGLNDVWNELILPRFERMNQLTQTQLFTSYNDRLQKNLPTVPIKYSQGFQKKRIDHRHHAMDALVIACVTREHINYMNNQHALDKSKDKKEKQQSRIDLRTILCEKKNNNWQFKKPWRTFTQEAKEALEHIVVSFKQNLRVINKATNYYEKWEEKNGVLVKKKVKQEGTNWAIRKPLHEETFSGKISLNREKVGKGNILTATRKAVDSSFDVKKISKITDTGIQKILLNYLKYKGSSEVAFSAEGLEELNKNIAQYNDGKKHQPIYKVRIYEKGSGRFVLGEKGTKSKKYVQGAPNLYFGVYQGKEKRTYATIPLNEVIERQKQGLPSVPEHNEKGEPLLFSLSPNDLVYVPMEGEATEAIDFSNLSKEQKERIYKTVSFTGNECHFVKSTIASLIKSYDAKSKIGELGSLNKLEVTISGDSRIKEVCIKLKVDRLGNITKA

SEQ ID NO: 22315 - protein, 1219 aa, unidentified
  REGION 1..1219: note = Cas Enzyme sequence
MLIKKRTEADIANTHKTVGAYIYDTLLQKPQQKIIGKLVKTVERKLYRDELSLILQKQCAFHAELQDRALYARCVEALYPSNEVRRKNIANRDFVYLLMDDILFYQRPLKTKKSLIANCPYEENEYVDRETGEIKKAPLKCIAKSHPLFQEFRLWNFLSNIRIYQKEKEINGTLHLDVDVTAEFLKTEDDYVALFDWLNSRKEIEQKTFLKYPKFGLKKEISNYRWNYVEDKQYPCNETRHAILSSLEKANVCIDFLSNEKEVALWHILYSVSDKQEIEKALRTFAAKNGLDESFVEAFKKFPPFKSEYGAYSAKAIKKMLPLMRCGKYWDVSSIDDTTKERIKKIVTGEYDERISVKVRDKVMNLSDISCFRRLPLWLACYIVYNRHSEDKEAVKWESPADIDAYLASFKQHSLRNPIVEQVITETLRVVRDIWKQVGRIDEIHIELGREMKNPADKRKRMTAQILENENANLRIKALLAEFMNPEYEIENVRPYSPSQQEILRIYEDTVLHAEDQLPEEIDAILKKFNSSKVPTKSEFLRYKLWLEQKYRSPYTGELIPLGKLFTAAYEIEHVIPQSRYFDDSFSNKVICESAVNKLKDNQLGYEFIKNHHGQKVEVGFGKSVEIFSVDSYERFVKEQYAKSAVKMKKLLMDDIPEQFIERQLNDSRYISKVIKGLLSNIVREKNDSGEYEPEAVSKNIVVCTGSVTDRLKRDWGMNDVWNSIVYPRFERLNSLTDTQSFGHWENKSGKKVFQTELPLEYQKGFSKKRIDHRHHAMDAIVIACATRNHVNYLSNESASRNAKISRYDLQRLLCDKSRTDDNGNYKWVIKKPWDTFTQDAREVLSKIVVSLKQNLRIINKTTNVYRHFDATVNRVYQKQKTGDSWAIRKPMHKDTVFGAVNLRKVKVVRLSVALDTPAMIVDKRVKNKVFELLSYKYDKKRIEKYFKENAFLWKELDLAKVAVYYFTEATTEPLVAVRKPLDSTFNEKKIKESVTDTGIQKILLNHLCTKEGKPDLAFSAEGIEEMNRNLLQLNNGKSHQPIYKVRVYEPRGNKFSVGVLGNKGTKWVEAAKGTNLFFAIYITEDGKRTYETIPLNVVIEREKQGLVPVPDRNEKGDKLLFWLSPNDLVYLPTEEEREFGRINEPIDRGRIYKMVSCTGNEGHFIPANVANPIVPVIELGSNNKAQRAWTNEMIKDICIPIKVDRLGHIIEVKYRIDE

SEQ ID NO: 22316 - protein, 1380 aa, unidentified
  REGION 1..1380: note = Cas Enzyme sequence
MKRILGLDLGTTSIGWALVNEAENDNETSSIVRLGVRVNPLTADEKSNFEKGKAITTNADRQKKHTARINLQRYKLRRQNLYNCLKEYGWFGNNALFEEGKASTFETYKLRAKAAEEEISLHELARVLFMLNKKRGYKSNRKANNKEDGQLFDGMTIAKKLSEEHLTPAEYSLQLLNKGKRFTQGYYRSDLNAELERIWNEQKKYYPEILTDEFKEQLKGKTKVNTNKIFLAKHHIYSADLKGSDKKMQSLKWRVEALRQQVDKEILVYVISDLNGQIANTSGLLGAISDRSKELYFNKQTVGQYLWASLEENPHISIKNKPFYRQDYLDEFEKIWETQAAFHKQLTPELKQKIRDVIIFYQRPLKSKKGLISVCELEQRKVKTVIDGKEKEITIGPKVAPKSSPVFQEFRIWQNINNLLLINNDTNEKRSLNEEERNLLYQELSIKAKLSKTDALKVLNKNGKQWELNYKEIEGNRTQAILFDCYNRIITLTGHEECNFKKLKASEIRHYVTTIFKRLGFNTDILDFNPLLEKHELEKQPMYMLWHLLYSYESDNSRTGNNSLLRKLETTFGFPEEYATVLCDVVFEDDYSNLSVKAMRNILPSLQAGDDYSQACAHAGYNHSRRSLTKDELEEKVYKDKLELLPKNSLRNPVVEKILNQMINVINTIVTEYGKPDEIRIEMARELKSSAAEREKTTRAISQANTENQRIRDILEKDFALSYISRNDIIKYKLYEELEANGFKTLYSGTYIPKEKLFSKDFDVEHIIPKARLFDDSFSNKTLEARNINIAKSNKTAFDFIKGEYGDEGAEVYKKKLDMLLSKDVISKAKYNKLLMSEADIPSEFIERDLRNTQYIAKKAYEILSELVRTVTPTTGEITNRLREDWQLVDVMKELNFEKYQKLGLAEVVEDRDGRKIKRIKDWTKRNDHRHHAMDALTIAFTKPAFIQYLNNLNARSNKSSSIYAIENKELHREDNKLKFNAPIPIHEFRAEAKRHLSAILISIKAKNKVMTQNVNKIKTKQGVIKKIQLTPRGALHNETIYGTKKRPIITMVKVGAALDEATINKISNLTIREALLKRLNEYSGNAKKAFTGKNTLDKNPIYLNAERTKTVPTLVKTIEWESFHPTRKLIDKDLNVDKVVDKCIRNILKTRLEEFNGDAKKAFSNLEENPIYLDQTKKIALKRVSIEGVLSAIPLQTLKDQAGKLIIGKDGKPVLGNYVQTSNNHHIAFYTDEKGNLQDKAVSFFEAAERKSQGLPIVDKNYNHDKGWRFLFIMKQNEYFVFPNEATGFIPTEVNLMDEANYDMISPNLYRVQKVSRIEKGPSTSRDYWFRHHLETILNDDSRLKNSAFKRINSLKPLEGIIKVRINSIGKIVAVGEYD

SEQ ID NO: 22317 - protein, 1193 aa, unidentified
  REGION 1..1193: note = Cas Enzyme sequence
MLMSKHVLGLDLGVGSIGWCLIALDAQGDPAEILGMGSRVVPLNNATDAADFSVGKAFTANQERTARRTMRRGFARYQLRRYRLRRELAKVGMLPDAALIQLPLLELWELRERAATAGRRLTLPELGRVLCHINQKRGYRHVKSDAAAIVGDEGEKKKDSNSAYLAGIRANDEKLQAEHKTVGQYFAEQLRQNQSESPTGGISYRIKDQIFSRQRYIDEYDQIMAAQRVHYPDILTDEFIRMLRDEVIFMQRPLKSCKHLVSLCEFEKQERVMRVHQDDGKGGRQLVERRVKFGPKVAPKSSPLFQLCRIYEAVNNIRLTRPDGSPRDITPEERAKIVAHLQSNASLSFAALKKLLKEKALIADQLTSKSGLKGNSTRVALASALQPYPQYHHLLDMELETRMMTVQLTDEETGEVTEREVAVVTDSYVHQPLYRLWHILYSIEERDAMRRALITQLSMKEEDLDGGLLDQLYRLDFVKPGYGNKSAKFICKLLPQLQQGLGYSEACAAVGYRHSNSPTSEEITERTLLEKIPLLQRNELRQPLVEKILNQMINLVNALKAEYGVDEVRVELARELKMSREERERMVRNNKDREDHNKEVAEKIQKCGLFPTKSRIRKYRLWEEAGRPCLYWGRSIDEKQCLKRGDMEVEHIIPKSVLYDDSYGNKTCACRRCNKEKGNRTALEYIRAKGWEAEYMERINGLLDKKAISYSKHQRLRWLKEDIPSDFLERQLRLTQYISRQAMAILQQGIRRVSASEGGVTARLRSLWGYDDILHTLNLDRYDSMGETERVSREGETTEKLRIKDWSKRKDHRHHAIDALVVASTRQGYIQRLNRVSSESEREAMSGEIEMQKVTKTDKLSLLERWLTQRPHLSVRAVSDKVAEILISYRPGRRVVTRGRNIYRKKTADGREVSCVQRGVLVPRGELMEASLYGRIISQGRERIVKRYPLHDLKGEVVDPRLRELITTYNQELKSREKGAPIPPLCLDKDKRQEVRSVRCYVDKPSVSSAIPIRFDERGTAITFVQSGNNHHLAVYRTPQGVLEESIVSFWDAVDRARYGIPLVITHPREVMEQVLQRGDIPESVLKSLPPSDWMFVESLQQDEMVAIGLSDEELQSAIEAQDYRKLSEHLYRVQSLSSKYYVFRYHLETSVKDRKNTSGRIPKFHRVRNLPDYEKRNVRKVRVDLLGRISLL

SEQ ID NO: 22318 - protein, 941 aa, unidentified
  REGION 1..941: note = Cas Enzyme sequence
RPLKSCKHLVSLCEFEKQEKVMRVQQDDGKGGRKLVERRVKFGPKVAPKSSPLFQLCRIYEAVNNIRLTRPDGSPCDIAPEECAKIVAHLQSSASLSFAALKKLLKEKALIADQLTSKSGLKGNSTRVALAAALQPYPQYHDLLNMELETRMMTVQLTDEETGEVTEREVAVVTDSYVRQPLYRLWHILYSIEERDAMRRALITQLGMKEEDLDGGLLDQLYRLDFVKPGYGNKSAKFICKLLPQLQQGLGYSEACAAVGYRHSNTPTSEEITERTLLEKIPLLRRNELRQPLVEKILNQMINLVNALKAEYGVDEVRVELARELKMSREERERMAEGNRRREKENKAIAEKIRECGLFPTKSRIRKYMLWEEAGEQCLYCGQILTLSQCLNGDDMEVEHIIPKSVLYDDSYGNKTCACRRCNKEKGNRTALEYIRAKGWEAEYMERINGLLDKKAISYSKHQRLRWLKEDIPSDFLERQLRLTQYISRQAMAILQQGIRRVSASEGGVTARLRSLWGYDDILHTLNLDRYDSMGETERVSREGETTEKLRIKDWSKRKDHRHHAIDALVVASTRQGYIQRLNRVSSESEREAMSEEIELQKVTKTDKLSLLERWLTQRPHLSVRTVSDKVAEILISYRPGKRVVTRGRNIYRKKTADGREVTCVQRGVLVPRGELMEASLYGKILSQGRERIVKRYPLHDLKGEVVDPRLRELVAVYNQEITSKVKAKGAPLYLDAAEKQEVRSVRCYVTQPSVAKAIPIRFDERGRATTFVKSGNNHHLALYRTPQGKLEESIVTFWDAVDRARYGIPLVITHPREVMEQVLQRGDVPESVLRSLPPSDWVFVDSLQPDEMVIIGLSDEELQQALEVQDYRKFSEHLYRVQKVSSLYYVFRYHLETSVADDKNTAGRIPKFHRVQSLKAYEEKNIRKVRVDLLGRISLL

SEQ ID NO: 22319 - protein, 1375 aa, unidentified
  REGION 1..1375: note = Cas Enzyme sequence
MKKILGLDLGTTSIGWALVYESENTDEKSSIVRLGVRVNPLSVDEKGNFEKGKAITTNADRQQTHGARINLQRYKLRRENLKDCLQKQGWIGTEALCEEGKASTFETYMLRAKAAEEEISLHELCRVLFMMNKKRGYKSNRKANNKEDGKLFDGMTVAKKLYEEHLTPAEYSFQLLSSGKKFKQEYYRSDLKEEFDRIWNEQQKYYPEILTDDFKQQLQGKSKGNTSKIFLGKYGIYSADLKGLDRKLQPLKWRVEALKQQVDKEVLAFVISDLNGQIASTSGLLGAISDRSKELYFNKQTVGQYLWTSLKETPHVSIKNKPFYRQDYLDEFEKIWETQATYHKELTPELKQEIRDIIIFYQRPLKSKKGLISVCELEQRKVKVTIDGKEKEISIGPKVAPKSSPMFQEFRIWQNLNNILLIDKGNNSNCPLYEEERNLLYEELSVKEKLSKAEALKVLNKNSKQWDLNYKEIEGNRTQAVLYDCYNRIIVMTGHEECNFKKLKASEIRSYFKTIFTGLGFNTDILEFDSSLTGHELERQPSYQLWHLLYSYESDNSRTGNDALLRKLETAFGFPKEYAAVLSDVVFEDSYGNLSVKAMRKILPHLQAGLDYSQACEEAGYKHSRRSLTKNELDQKEYKEKLELLPKNSLHNPVVEKILNQMINVINAVVDEYGKPDEIRIELARELKIGAAERENMTRSINQGNAENKRIREILEKEFALSYISRNDIIKYKLYEELKSNGFKTLYSDTYISKDKLFSKDFDIEHIIPKARLFDDSLSNKTIEARDVNIAKSNKTAFDFISEKYDQQGIEAYKKKLDILLQDGSISKAKYNRLLMKEADIPSGFIDRDLRDTQYIAKKAYEILSDLVRTITPTTGAVTSRLREDWQLVDVMKELNFEKYQKLGLAEVIEDRDGRKIKRIKDWTKRNDHRHHAMDALTIAFTKPSYIQYLNNLNARSDKSSSIYGIENKELHREDNKLRFNAPLPINEFRAEARRHLKSILVSVKAKNKVMTQNVNVIKTKHGVIKKVQLTPRGELHNATFYGTKKRPIIKMVKVGAALDEVTIKKVSSSFIREALLDRLHEYNGDAKKAFTGRNSIDKNPIYIDEEHKKTVPALVKTIEWEMYHPTRKLISPDLKIDKVIDKGIREILKTRLAKFNGDAQKAFSNLDENPIYKDEAKKMTLKRVSLEGVSSVIPLHTLKDREGKPVVGKDGKPVLGDYVQTSNNHHIAFYMDENGNLQDNVVSFFEAAERKSQGVPVIDKNYNHDKGWHFLFTMKQNEYFVFPNEVTGFNPSEVDLMDEANYGIISPNLYRVQKMSKTSGRDYWFRHHLEAMLNDDPKLRNSMFKRITSLKALEGIVKVRINCIGKIVAVGEYD

SEQ ID NO: 22320 - protein, 1380 aa, unidentified
  REGION 1..1380: note = Cas Enzyme sequence
MKKILGLDLGTTSIGWALVNECENEDEKSSIIRLGVRVNPLTTDEKGNFERGKAITTNSDRQQTHGARINLQRYKLRRKYLCNCLNKHGWIGFEPMYEDGKSSTFETYKLRAKAAEEEVSLHEFARILFMMNKKRGYKSNRKANDKEEGKLFDGMSVAKKLYEAHLTPAEYSLLLLNKGKRFTPEYYRSDLIEEFEKIWNEQKKYYPEILTDEFKRQLEAKTKTSTSKIFLGKYGIYSADLKGLDRKLQPIKWRVEALRQQVDKDVLAFVISDLKGQIANTSGLLGAISDRSKELYFNKQTIGQYLWASLKENPHVSVKNQPFYRQDYIDEFEKIWETQASFHKELTPELKQEIRDIIIFYQRPLKSKKGLISVCELEQRKVKVTIDGKEKEITIGPKVAPKSSPMFQEFRIWHNLNNIQLIDNERNSKRSLYEEERNLLYEELSIRDRLSKAEALRVLGKKNRQWDLNYKELEGNRTQATLFSYYNKIIMMTGHEECNIKQLKAPEIRHYIKTIFKNLGFNTGILEFDSSLNGHELEQQPMYQLWHLLYSYESDKSRTGNEALLKKLETIFGFPREYASVLAEVAFEDSYGNLSVKAIRKILPHLQAGLDYSQACEEAGYKHSRRSLTKEELDQKEYKEKLELLPKNSLHNPVVEKILNQMINVINAVIDEYGKPDEIRIELARELKIGAAERENMTRSISQGNAENKRIREILEKEFALSYISRNDIIKYKLYEELKPNGYKTLYSDTYIPKDKLFSKDFDIEHIIPKARLFDDSLSNKTIEARDVNIAKSNKTAFDFISGKYGQQGIEAYKKKLYILLQGGSINKAKYNRLLMKEADIPSDFINRDLQNTQYITRKAYEILSDLVRVVTPTSGAVTSRLREDWQLVDIMKELNFEKYQKLGLTEVIEDRDGRKIKRIKDWTKRNDHRHHAMDALTIAFTKPSFIQYLNNLNARSNKGDSIYAIENKELHREDGKPCFNAPLPINEFRAEAKKHLKAVLVSIKAKNKVMTQNVNKIKTKHGVIKKVQLTPRGELHNATFYGTKKRPIIKMVKVGAALDEVTIKKVSSSFIRKALQDRLYEYNGDAKKAFTGRNSIDKNPIYIDEERKRTVPALVKTIEWEMYHPTRKLISPDLKIDKVIDKGIRDILKTRLAKFNGDVQKAFSNLDENPIYKDEAKKIILKRVSLEGVSSVIPLHTIKDRAGMSITGKDSEPVLGDYVQTSNNHHVAFYIDENGNLQDNIVSFFEAAERKSQGVPIIDKNFNHDIGWRFLFTMKQNEYFVFPNEVTGFNPSEVDLMDEANYDIISPNLYRVQKMSRVVYGKSIIRDYVFRHHLETTVEANANLKGLAYKQLKSLSYLEGIVKVRINCIGKIVEVGEYD

SEQ ID NO: 22321 - protein, 905 aa, unidentified
  REGION 1..905: note = Cas Enzyme sequence
VHLHVESADFVNAFLKIKPFKKEYGAYSEKAIKKLLAVIRMGTQWNEDDICEQTRNRIQSIINGDIDEKIKERMGRTFSQLSDFQGLPEWLACYVVYGRHSETTDIQRWTKPENLMAYINGFKQHSLRNPIVEQCILETLRTVHDIWKEAGHIDEIHIELGRSMKSTADQRARMSKSILQNENTNLRIKSLLMELKNTKEFENVRPYSPMQQEILRIYEEGALQELTKEDDQYPEISKISQMAQPSAKELLKYRLWLDQKYCSPYTGKPISLSKLFTSAYQIEHIIPQSRYFDDSFSNKVICEAEVNQLKSNMLGYEFIKKHSGEIVHCTMVGDVKILDAKEYYNFVTEHYANNRRKKEKLLLEDIPQEFLNRQMNDSRYISKKVMALLSNIVREEGEQEAKSKFVIACSGGITDRLKHDWGLIDVWNSIVYPRFERLNKLTNTENFGRWENKEGKQVFQTSLPLELQRGFSKKRIDHRHHAMDALVIACASNNIINYLNNESAKSQEKREDLRKKLCDKNRIIRKPWETFTQDVRTALEDVVVSFKNYVRVINKATNYYEKYDKNGKKGIAEQKGQDMWAIRKPMHKETVFGQVNLRRKVTVKLKDALEKIPAIYDKELRDYINILVAKQFNKKQILAHFKSINYRLNMKSVDKVDVWQFSNEKEPMVATRKPIDTSFDDKRIATITDTGIQKILRNYLETKDNDPNIAFTPEGIAEMNKHITEYNNGKQHQPILKVRVSEPKGAKYQVGETGNKTSKFVEAQKGTNLYFAIYEDKEGNRSYSTIPLNEVIERLKQGLSPAEDLNKRGENLKFYLSPNDLVYVPTEEEKLSGECKLNKDRIYKMVSSTGNECYFIPYTVSNVIFNKVEFESLNKMGRALTGEMIKAVCRKLEIDRLGNILKIIK

SEQ ID NO: 22322 - protein, 1507 aa, unidentified
  REGION 1..1507: note = Cas Enzyme sequence
MKTILGLDLGPNSIGWAKVEVDDEGNYLRNIKLGSRIIPMTQDMLGDFDKGVKVSQTATRTDFRGNRRLIERHLLRRERLHRVLHALKFLPKHYEDAIGWDRNEPATYGKFVNNSEPKLAWERQEDGSMRFLFMESFNEMVADFAQNQPSLVSDGKKIPLDWTIYYLRKKALTQPIKKEELAWILLNFNQKRGYYQLRGEEEEDNLTKRKEYYKLKVVGVEADGAPKGGKTWYNIHLENGWTARCQSKIPLDDWVGKVKEYIVTTEYEDDGKTPKCDKEGKVKRSFKSPEKDDWQLIKTRTEKFIDDSNKTVGAFIYDHLLEKPFDKIRGKYIRTIERKYYKNELREILREQAKYHEGLDSLEALKICAEELYKNNQQHREYLLKKDMIFLLLNDLIFYQRPLKSKKSLIADCPYEVYKYDDKLTGKKGQKKIKCIAKSNPYYQEFRLWQFIANLRLFSVTDGKEVTAEYLKTEEDYVRLFSFLNDRKDIKQETFLRSFLKLKKVPIGSEKIYPIRWNYIEDANKSYPCNATRHELLLAFDRADIPRKLLDVEGREYRLWHLLYSIEAKEETESALRKLKANKAFGDLNIDDDFVNSFLKIKPFEKEYGAYSEKAIKKLLAVMRRGSLWKEADICEATKQNIVKILQNDIDEKLKKKIEAAVSSFNKLSDFQGLPTWLACYVVYGRHSEAAQIQCWQSPEDLKTYINKFKQHSLRNPIVEQCLLETLRTVYDIWKDAGQIDEIHIELGRNMKSTAEQRARRTKDILRNENTNLRIKNLLVELKNDDKIENVRPYSPSQQEILRIYEEGALQELSKEDEMFEDISKISKMAQPSPTELSRYKLWLEQKYRSPYTGRVIPLSKLFTTAYQIEHIIPQSRYFDDSFNNKVICESEVNSLKDNMLGYEFIKECGGKKVYCTLLNKSVEIFTEEEYKTFVTKHYVGNPRKQDNLLLEDIPQEFSARQLNDSRYISKMVQTVLSNIVRSENEQEATSKFVVSCNGAITNRLKKDWGLNDVWSSIVCPRFKRLNEITKTNAFGHWEDKAGKHVFQTTVPLELQRGFSKKRIDHRHHAMDALVIACASRNIVNYLNNESANSPEKREDLRKKLCDEKRKIRKPWKTFTQDAREALSDVVVSFKNYVRVINKATNYYEYYSSSGNKVMISQKGNDMWAIRKPLHKESVFGRVNLRRKVIVSLKKALENIPTICDKTLRDYINALVEKHFNTRQLLAHFKSINYRLNRQCVDKVEVWQFSDEKIEMVARRKSLDTSFDDKQISSITDIGIQKILLNYLQTKDGNAEIAFTPEGIEEMNKNISLYNDGKAHQPILKVRVATPKGMKYPVGQTGNKATKFVVAEKGTNLYFAIYENELGVRSYDTIPLNIVVERLKEGLSPVPQANEADIPLKFYLSPNDLVYVPTKENEDELCRDRIYKFVDSSGTTANFVPHTSANTIYNVDKEYAEKCCNGAVILNEYGLGSSQSKNQKALDGEMIKEICWKLKVDRLGNIIKVIK

SEQ ID NO: 22323 - protein, 1518 aa, unidentified
  REGION 1..1518: note = Cas Enzyme sequence
MKHILGLDLGSNSIGWAFVQQDFENKQGKIIATGSRIIPMDQGILGDFERGNTVSQTAERTAYRSTRRLRERHLLRRERLHRVLHILGFLPPHYDAQIDFTKRYGKFIDNAEPKIAYNNGNFIFMNSFNEMVEDFKKHQPQLFYKKSNGEESKIPYDWTIYYLRKKALSQKITQQELAWLILHFNQKRGYYQLRGEEETENPNKEVAFHSLKVVDVEAEAPNKKGEIWYTIRLENGWIYRRTSKIPLDDWKGKTRDFIVTTDLNDDGTIKLDKEGKEKRSFRAPDENDWNLLKKKTEHDIDFSGKTVGAYIYDHLLQNPNQKIKGKLVRTIERKYYKDELKAILAKQIALQPELFTETLLADCIRELYRKNETQQQNLLSKDFLHLFVEDIIFYQRPLRSKKSTIANCTLEKRSYIDKETNERKDTPIKVCAKSNPYYQEFRVLQWLQNLRIYEIETDREVTAEFIETAEDYEALFNFLMSQKEIDNESLLKYFLLAKNPQIKDKAAKSKLKKWITTYRWNYVYDVADNSSKKYPMNETGYDLQRYLQKVEGLPANFLTFDTTYRLWHLLYSVKDKVEFEKALKKFAQEYQLDEASFVDSFKNFKPYPNEYGSFSEKAIKKLLPLMRFGNHWDFNRIDVSTQKRIDDLINGVTNEEIRTIIREKAEKYQLNSETCFQGLPLWLAQYVVYNRHAEATDIEKWNSVNDLEAYLEDFKQHSLRNPIVEQVVTETLRVVRDVWQQYGGGQANFFDEIHIELGRELKKTAEERKQLSDKNQENENTNLRIKKLLAELKEDASIQNVRPYSLVQQELLKIYEEGVFSATDEVEEDIQKIRKKAEPSKADLQRYKLWLEQKYKSPYTGEVISLTKLFTEEYEIEHIIPQSRYYDDSLSNKVICESAVNKLKTNQLGLEFIQNHHGEKVRITGNKEVTIFTEEQYKEFVKKHYANNSAKQQKLLLNEIPEKMVARQLNDTRYISKYISEILSKIVRSDEKDEGVNSKNVIPCTGKITTALKQDWGLNDVWNELILPRFERMNQLTQTQLFTSYNDRLQKNLPTVPIEYSQGFQKKRIDHRHHAMDALVIACATREHINYMNNQHALDKSKDKKEKQQSRIDLRTILCEKKNNNWQFKKPWSTFTQEAKEALEHIVVSFKQNLRVINKATNYYEKWEEKNGVLVKKKVKQEGTNWAIRKKLHEDFPYGKVKYQVNFLKISENISKIDLIVDEFIKRQLEKIYVENHRKVNLTKKYLKENPIRDQKGEEVISTDFREENIKYRKRRPISVLSDRNRKTGITSIEKMLKTIAKVADNVLKRELFLYLEECNNDIDVAFSPEGIEQFNSKRKIPVYRLPFFEEGEKKNELGNKGKYVEAAKGTNLFFGVYQGKGKRTYATISLNEVIERQKQGLPSVPERNEKGEPLLFSLSPNDLVYVPMEGEIAETIDFNNLSKEQKERIYKTVSFTGNECHFVKSTIASLIKSYDAKSKIGELGSLNKLEVTISGDSRIKEVCIKLKVDRLGNITKA

SEQ ID NO: 22324 - protein, 1457 aa, unidentified
  REGION 1..1457: note = Cas Enzyme sequence
MKRILGLDLGSNSIGWGLIEQDFGQREGKIIATGSRIIPMDQGLLGDFEKGNTVSQTAERTFYRSARKLRARHLLRRERLHRVLHILGFLPTHYDKQIDFSKRYGKFVDNTEPKLAYEEGRFLFMDSFQEMLSDFKSHQPTLFYSKKKGEESKIPYDWTIYYLRKKALSQKISKEELAWIILNFNQKRGYYQLRGEEEVENPNKEVTYYSLMVTEVTAEAPNKKGEIWYSIQLEKGWVYRRTSKIPLDDWKGKVRDFIVTTELEEDGSVKRDKDGKEKRSFRAPSEDDWNLLKKKTEQDINTSKKTVGTYIYDHLLQNPNEKIKGKLVRTIERKYYKEELKAILEKQIALQPELFTDQLFADCIRELYSKNEAQQRNLAARDFVHLFVEDIIFYQRPLRSQKSTLANCSLESRSYIDKDNHTRKEAPLKVCSKSNPYYQEFRVLQWLQNLKIYEIDSDQEVTHQFIKTLKDKQQLFEFLMAQKEIDCEELLKYFLSLTYPNAKEKALKSKLKKWKDTYRWNYVYDIGEKSSKKYPMNETRYELKRYLEKVTNLPDDFLSPEVEYLLWHLIYSVTDKVAYEKGLKKFAQKHHLDEDSFVESFKKFKPYPSEYGSFSEKAIRKLLPLMRFGSYWDFNHIDKNTQKRIEDLITGVENEEIRTILREKAEKYQLEKETDFQDLPLWLAQYIVYNRHAEASSLEKWTSVNDLETYLNEFKQHSLRNPIVEQVVTETLRVVRDIWQQYGQGEADFFDEIHIELGRELKKTAKEREELSKQNQKNEDTNLRIRALLAELGEDSTIENVRPYSPLQQELLKLYEEGVFSSSMEIEDDIEKIHKKATPNKTELQRYKSWLEQKYKSPYTGQIISLKRLFTEDYEIEHIIPQSRYYDDSLSNKVICESAVNKLKGNQLGLEFIKNHYGEKVHAAGKEVSILTEEQYKEFVKNHYANNSGKMKKLLLEDILEKMVARQMNDTRYISKYISEILSKIVRSGERDEGVNSKNVILCTGKITSALKQDWGVNDVWNDLILPRFERMNDLTQSTLFTTYNEKYQKYLPTVPMEYSNGFQKKRIDHRHHAMDAIIIACATREHINYINNQHALEKGKNKEEKQKSRIDLRTILCEKKYSDNAEENYSWIFKKPWDTFTQEVRSALEGIVVSFKQNLRVINKATNYYEHWVEENGKFIKKMVKQEGTNWAIRKPLHKETVSGKITLEREKVSKGKILTGTRKAIDSTFTEKVIEGITDTGIQKILLNYLKFKKSPEIAFSPEGIEELNKNIALYNDGKPHKPIRKVRIFEQGSKFPLGEVGNKATKYVEAAKGTNLYFGVYQGKDKRSFATIPLNEVIERQKQGLSSVPEYNEKGDPLLFSLSPNDLVYVSIEGEIIEDIDFRNLSNEQKERIYKTVSFSGYQCFFVKQTVSTPIVNKMEYSPLNKMEKSIIGIMIKEVCAKLKVDRLGNISKA

SEQ ID NO: 22325 - protein, 1422 aa, unidentified
  REGION 1..1422: note = Cas Enzyme sequence
MTQKVLGLDLGTNSIGSSVRNLDLSDDLKGQLEFFSSDIFRSSVNKESNGREYSLAAQRSAHSRSRGLNEARRRKLWATLDLLIKYGFCPMSPESLMRWRTYDKQRGLFREYPIDDKDFNAWIMLDFDRDGIPDYSSPYQLRRELVTRQFDFDQPIERYKLGRALYHIAQHRGFKSSKGETLSQQETNSKQSLTDEATDVAGEMKASEEKLSKGLSTYMKENNLLTVGVAFAQLEDEGVRVRNNNDYRAIRSQFQREIETIFKFQQGLSVENELYERLVSEKKNIGTIFYKRPLRSQRGNVGKCTLERTKPRCAIGHPLFEKFRAWTLINNIKVRMSEEEQAEQLPMKLRFELYNDCFLAFVRAEFKFADIRKYLEKRLGVHFSYNDKTINYKDSTSVAGCPITARFRKLLGEDWESFHVDGQKQRQAHGKKNASFHTVSYTVEDIWHFCYDAEEPEVVLSFAQDNLKWEKKKAEELVRIWSAMPQGYAMLSQKAIRNINKMLILGLKYSDAVLLAKVPEIVEITDGEILSVTEDYHRVEAQVGYEKQINNIVNALIAKYKSASEEYRFADHNYEYQLDKSDEKDIIKQIESNIGTRKWSLLDADEQTDILQKVRDKYQNFFRSHERKFVESPKLGECFEEYLMKKFPMVEGERWKKLYHPSQIAIYRPVPANKDRSALRLGNPDIGAIKNPTVLRVLNTLRKRVNQLLDDGIISPDETRVVVETARELNDANRKWALDTYNRIRHDENEKIKKILAEFYPKRDNISTVDIDKARYVIDQREMDYFTEAKTYHKDIKKYKLWLEQGGQCMYTGRTINLSNLFDPNSFDVEHTIPESISFDSSDMNLTLCDAHYNRFIKKNHIPADLPNYDKSVVIDGKEYSPIKPRLQRWADRVERLNRNVEYWRGQARRAQNKDRKDQCMREMHLWKMELEYWTKKLERFTITEVTDEFKNSQLVDTRVITRHAVLYLKSIFPHVDVQRGDVTAKFRKILGIQSVDEKKDRSLHSHHAIDATTLTIIPGAAKRERMLELFAKIEEVNKMLSFSGNEDRTGLKQELDGLKNQLNKEVKACRIGHNVSEIGTFINDNIIINHHVKNQALTPVRRRLRKRGHIVGGMDNPRWQTGDALRGEIHKASYYGAITQYAKDKEGKVLMKEGRPQINPTIKFVIRRELKYKKSSTDSGFASWDDLGKAIVDKELFALMKGQFPEGTSFKDACEQGIYMIKKGKNGEVDTKLYRIRHIRCKTKQKNALKIKEQAYKSEKEYKRYFYAAVGDLYAMCCYTNGKTREFKIYSLYDISCHRKVGVEDIPEFITDKKGNRLMLDYKLHTGDMILLYKENPEELYDLDNVSLSKLLYKINGFENDGLRIRMVNHLVAKEAMGESVKDYAKLPDIIRCGVKTIKFLVMGENRDFVIKNGKISFNHR

SEQ ID NO: 22326 - protein, 1061 aa, unidentified
  REGION 1..1061: note = Cas Enzyme sequence
AEADYSIYDLWHFLFNFNKEFLETFAQNNLGIANELSKKGGESNPMVKIQEKMIQGYADLSVKAIRKILPFLKEGYLYDKAVLLAKIPDILGDRWIEHKSLILEILEQSYNTYIYRKQIINITNKLIDKHKGLPCEDKFAYKDYSYTIKRDDETDIECCCENHLGEKSWPKVENRDEIKRDVKEQYQSYFADNKRAYKTIPSLTEVFKKLLNDNQIALNGELYHHSNRENIYNKKLDINYKTGEKRLPIRKNNKGIEIEILPIPLIDSIKNPMFNKAMSILRKLVNELILNGDIDQDTEIIIELARELNDNNRRIAIERYQKARRDERDKIRTFLEQYKTEENQHFNIEEKIPVFELWTEQIFDKPKENKHFNKAQEILSKEKEERYKLWLEQKGQCMYTGKMISITELFSNETDIEHTIPRSKLPDNTMANKTIAFKWYNEQIKKDKIPSECPNYLKDEEVGTAIIPRLDKWKELRDRYQKLYEDRKKAKGREDENAKNKRIQDKHYYKFYFDYWNDKVSRFEATEIKSGWVRRQLTDTQLTSKYAREFLKLYFKKVFVQKGSITSEFRKILGIQGQEEIKERGRHTHHTIDAFVLTLIPTNSSYKEDILKKYYLWLKSKDNVILEELEKSKKVLLQGISIQKMIQTIENTTLVYNFHKDTILVQSNKIVRHRGKIQYVKNKSGQYILDKNGNRIIKRTKGDTVRSELFAQTYIGKIRDVERDEKGKPIRENGDWKYKTGKEEFVFVKREPINSVKSSEKNINSIVDPQIRKLVKEQKNNSVIRDSQNNIIRHVRIQTKAGREVKQRINYESKYDYKNKFYSEAGSIPYAILLQKIHKGKNIKNIIPIPSFEIAKIHKQKGKFDIESCIQTFHPSYKDNNWNKQLLKVGQKVLVLKDDSEYNKRNDIDFQQKRLYFITQFEEKRILLIYHLETRSKTEISDEIKTIKDSILASIETSLDIPIIEEDTTIKDNKDRKQDYEKRKYDFNKRIDIISQYLKKEDIEAIKKKLEQYKTESSTIKIEGKTPLLKMSRNNWNFLYEGIDFDTTITGNLNFKKANNL

SEQ ID NO: 22327 - protein, 1051 aa, unidentified
  REGION 1..1051: note = Cas Enzyme sequence
FCEFESKEIEIEKDGKTITKSIGARVVPKSSPLFQEFKIWQILNNVTCKRKGIRKKKSSAKSTELDLFNEPSQTIFSLDMECKQFLFEELNLKGDLKSDKVLKLLGYSPQEWEINYNQLEGNRTQKALYEAYLKIVEMEAHDVKDILQIKSAKDDWSLDESPLSASEIKEKVKDIFQALGICTKILYFDPLLPVKEFEEQDSYQLWHLLYSYESDDSTSGNETLYRILEKKYAFKREHATILANVALQDDYGSLSTKAIRKLYPYIKENQYSTACEKAGYKHSKLSLTTEELEARELKNIIPLLKKNALRNPVVEKILNQMINVVNALIEKNSERDAEGKITKYFHFDEIRIELARELKKNAQERYEMTQNINKAKLEHQKISEKLQKEFGIKNPTKSDIIRYRLYKELEHNGYKELYTNTYIAPDVLFSKNIEIEHIVPKARVFDDSFSNKTLTFHRINSNKGEYTAFDYITSLNNEEELNQYLTRVENAYKTKSISLTKYKNLLKKASEIGDGFINRDLRDTQYIAKKAKEILFQVTKNVLSTSGSITDRLREDWGLVDVMKELNMPKYQSLGLTEVEERKDGNKVTVIKNWTKRNDHRHHAMDALTVAFTKPSYIQYLNHLNARKDENNKNYSVILAIEEKETIKVPTNNGKNKRVFIEPIPNFRQVAKKHLEEIFISHKAKNKVVTKNVNKPAGTDKQQITLTPRGQLHKETIYGKYQYYVNKEEKVGVKFDERTITKVSNPLYREALLKRLQANGNDPKKAFTGKNALSKKPIYLDETKTKTLTEKVNLTYLEEDFSIRKDISPDNFKDLKSIEKVIDQGVKRILIKRLQDYDNDPKKAFVDLEKNPIWLNKEKGIAIKRVTISGVSNAQPLHIGKDHLGKTTLNKEGNEIPVDYVSTGNNHHVAIYRDKEGNLQEQIVSFFEAVVRAQQGLPIVDKTYKQAEGWQFLFTMKQNEMFVFPNEATGFNPAEIDLLDPKNKKQISPNLFRVQKIATKDYFFRHHLETNVETDNILKNVTWKREGLSGLKDIVKVRMNHLGDIVSIGEY

SEQ ID NO: 22328 - protein, 1382 aa, unidentified
  REGION 1..1382: note = Cas Enzyme sequence
MKRILGLDLGTASVGWAVVNEAENSEEQSSITALGSRVVLLSADEKNNFLTGKSVSATATRTAKRGARRNLQRYKLRREWLKDALVSAGIINENTCLNDSNSKELFATYVSRAKAVTEQIALEDFAKVLFMINKKRGYKSNRKTDNTESEDGQIIDGLDLAKKLKARNITPGQYLLELFKENKKNKAVFYRSDLQEEVNRIWAFQSQFYPEILDNTLLSAITNKSKKAVIGLFKGIKNVEIADVKTKERTEKALTWRSEALHKQLEIGEVAYAIAEVMGAISQSSARLALLSDNSKHLEFEGLTIGQYLLKLLRNNPNSSLKNINFYRKDYEDEFNTIWKKQASFYPQLTESLRSTVFNSIFMQRNLKSCKALLANCELEFAEKKITLPDGSCQTRTIYSKVCPKSSPYFQEFQIWQSLSNIRIIDKENTHLTKGQELSYDQKVMLLPELMIHSELKANKIIEILFGKKSNYTINMPSIKGNRTNETIFNALLEIVELTGHSIDNIVKTDANQQIEAVKSIFESLGYKTDFITFDSIIEGKDGLNQPYYKLWHLLYSYCGDNSKTGNEALIRKIEELTGLEKEEAKVLANCTFENDYASLSTKAIRKLLPHLQSNLDYSEACEAAGYNHSKRSRTKEDIKNKVYKDKLDLLPRNSLRNPIVEKILNQMIHVINQTSEAYGKPDEIRIEMAREFKKNKIQRKKLDNQLKENTAKLEHIKDILRKDFKLSHISHNDILRYRLYEELSLNGYKTLYSNTYIDRQQILDPTVTIEHIVPKALAFDDSFSNKTLEIQSVNGEKSNQTAFDFISKKYGSEALEQYINRVNNLFENGKISKTKRDNLLRKQEDIPSDFLNRDLRNTEYIAKKALEILEDYVPRVTPTIGKITKRLREEWQLVNIMKELNWKKYNSLGLTFFDYTRNGEKIGIIPNWTKRNDHRHHAIDALTIAFTKPSIIQYLNNLKAQNDKGSSIYAIQAKETYIDETRKRLIKPPYDIKQFRNDAKQMLDNIFVSHKAKNKVVTPNTIVTKKKRKTGKETKAEEKRTFLTPRGPLSNETVYRKICNYETKEITINSKLTYEIALTIAKKKEREAVLERLAQHNNNPTKAFKNYNKNPIMLQTSVGEKSLMSVKIVNYKELFVKRSEINEELDIKRVLDAKVRARLTDRLKEYNNDPKTAFANLEENPIWLNEEKGIALKHVTTIERVVGLPIRPKRNINGEIMKDEQGQPLKSHYIETDGNHHAAIYEDEEGKWHEKVVSFNEAASRAIQKLPIIDKDFNKELGWVFQFTMKQNEMFVFPDKESGFDPLAIDLKDPANKSLISKHLYRVRSISSNDYRFCHHLETTVATPKELKDITWKRIRSLSSLQGIIKVRVNHIGQIIDIGEY

SEQ ID NO: 22329 - protein, 1432 aa, unidentified
  REGION 1..1432: note = Cas Enzyme sequence
MTQKIFGIDLGTNSIGTSVRNTDLGNNLVDQLEFFSSDIFNASVSKNTNGREYSLASDRSAHRRGRRLNDSRRRKLWATLDLLIKNNLCPMAPESLEQWRTYDKKKKLFRQYPIDDKAFHSWIILDFNGDGKPDYSSPYQLRRELVSVQLDFNQAINRYKLGRALYHIAQHRGFKSSKGETIAEQEKQEDDSKKNKNNALTEENVDVVNAMKASEEKLSKGLLAYMQEHNLKTVGAAFAQLEDEGIRIRNNSEYKAIRSQHQDEIKEIFKFQKGLSEETQLLETLISEKQGVGTIFYKRPLRSQRGNVGKCTLEPNKPRCPIGHPLFEKFRAWTFINNIKAKSPDSDSAEPLPMDMRINIYNKLFLSRVKADFKFEEIRHFIEKQWGVALSKDDKTINYRDDTSVAGCPITARMIKVLGEDWENFHVLGTKERQTQGKSNNALHQVCYTAEDIWHLCYDAEDPEQVRTFAEETLGWDEKKAAELVRLWSAIPQGYAMLSQKAIRNINRMLLFGLKYSDAVLLAKLPDILELSDEDIQTIIKKAQQLEEVVNEEKRIGNIVNSLIANYKAESLEHRFADHNYEYQLDESDEREIIKHIESNIGKQRWELMDADEQISILEGVRSGYQAFFARHKRTFVELPQLGERLVELLSKEYPSVEKREWERLYHPSQIAIYRPILLDKSEQNLRLGDPNIGAIKNPTVMRTLNNLRRRVNQLLDDGVLVPSETRVVVETARELNDANAKWALEKYQKTRRDENAQIKKILEEFYSKPNGITDTDVDKARYVIEQCEEDNYKSKKEIGTYSKDIQKYKYWLEQGGQCLYTGRIISLSNLFDSNAFDLEHTIPASVSFDNSDQNMTLCEAHYNRFIKKNNIPTAMPNYEKDVTIDGKLYTAIKPRLEKWKKRIERLSRNVEYWKVQARRAQMKDRKDECTKEKLLWQMELQYWRDKLQRFTILEVTDGFKNSQLVDTRIITRHATLYLKSVFENVEVQRGSTTAEFRKILGVQSVEEKKDRTLHSHHAIDATILTTIPTAAKRERILELFYKVQEKERILKNCSGDARIGLKQDLEGLQAKLKKEVADCKLGGEISQLGNFINDKIIINHCVKDQTLTPSHKRLRRRGRVVGGKEHPIWQTGDTLRGEIHKESYYGAITQYAKDKEGNILFNDGKPKIDPTIWFVIRRELKHKKSAQDTGFVSWDDLEKVIVDKNLFKLMKEQFPDGTSFKDACEQGIYMIKKGKDQEHNIKTHRIRHVRCHTSVRSALKIKEQLNKSTKDYKQYFYAESGDLYTMCCYTNGKKKEYRPYRLYDIAQHRKAGIEDIPEFITDKKGNRLELSYKLCSGDMILLYENTPEELYDMDPVNLKQRLYRVDRFESKGSTIYLTNHLIANGEVGHSIKDYNQMPQTVRCGVNTLKFLIMGEHNDFIIKGNNIIFNHR

SEQ ID NO: 22330 - protein, 1236 aa, unidentified
  REGION 1..1236: note = Cas Enzyme sequence
NSKQSLTDETTDVAGEMKASEEKLSKGLSTYMKENNLLTVGAAFAQLEDEGVRVRNNNDYRAIRSQFQREIETIFKFQQGLSVENELYERLVSEKKNIGTIFYKRPLRSQRGNVGKCTLERTKPRCAIGHPLFEKFRAWTLINNIKVRMSEEEQAEQLPMKLRFELYNDCFLAFVRAEFKFEDIRKYLEKRLGVHFSYNDKTINYKDSTSVAGCPITARFRKLLGEDWESFHVDGQKQRQVHGKNNDSFHTVSYTVEDIWHFCYDAEEPEAVLSFAQDSLKWEKKKADELVRIWSATPQGYAMLSQKAIRNINKMLILGLKYSDAVLLAKVPEIVEIADEEILSVTEDYHRVDAQVGHEKQINNIVNALIAKYKSTSEEYRFADHNYDYQLDESDEKDIIKQIESNIGTRKWSLLDADEQTDILQKVRDKYQNFFRSHERKFVESPKLGECFEEYLMKKFPMIEGEQWKKLYHPAQIAIYRPVSAGKDRSALRLGNPDIGAIKNPTVLRVLNTLRKRVNQLLDDGVISPDETRVVVETARELNDANRKWALDTYNRIRHDENEKIKKILEEFYPKRRDTISTDDIDKARYVIDQREIDYFTESKTYNKDIKKYKFWLEQGGQCMYTGRTINLSNLFDPNAFDIEHTIPESLSFDSSDMNLTLCDAHYNRFIKKNHIPADMPNYDKAVTIDGKEYPAITSQLQRWVDRVERLNRNVEYWKGQARRAQNKDRKDQCMREMHLWSMELEYWKKKLERFTVTEVTDGFKNSQLVDTRVITRHAVLFLKSIFPHVDVQRGDVTAKFRKILGIQNVDEKKDRSLHSHHAIDATTLTIIPSSAKRERMLELFAKIEEINKMLSFSGSEDRTGLKQELEGLKNKLQMEVKACRIGHNVSEIGMFINDNIIVNHHIKNQALTPVRRRLRKKGHIVGGVDSPRWQTGDALRGEIHKASYYGAITQYAKDKEGKVLMKEGRPQINPTIKFVIRRELKYKKSSTDSGFASWDDLGKAIVDKELFALMKGQFPAETSFKDACEQGIYMIKKGKNGMPDKKLYRIRHIRCNTVQKNALKIKEQTYKSGKEYKRYFYAAVGDLYAMCCYTNGKIREFRIYSLYDVSCHRKSDIEDIPEFITDKKGNRLMLDYKLHTGDMILLYKDNPEELYDLDNVNLSKLLYKINGFENDGLRIRMVNHLVVKEAMGESVKDYAKLPDIIRCGVKTIKFLIMGENRDFVIKNGKIIFNHR

SEQ ID NO: 22331 - protein, 1436 aa, unidentified
  REGION 1..1436: note = Cas Enzyme sequence
MKRILGLDLGTNSIGWALVNEAENKDERSSIVKLGVRVNPLTVDELTNFEKGKSITTNADRTLKRGMRRNLQRYKLRRETLTEVLKEHKLITEDTILSENGNRTTFETYRLRAKAVTEEISLEEFARVLLMINKKRGYKSSRKAKGVEEGTLIDGMDIARELYNNNLTPGELCLQLLDAGKKFLPDFYRSDLQNELDRIWEKQKEYYPEILTDVLKEELRGKKRDAVWAICAKYFVWKETYTEWNKEKGKTEQQEREHKLEGIYSKRKRDEAKRENLQWRVNGLKEKLSLEQLVIVFQEMNTQINNSSGYLGAISDRSKELYFNKQTVGQYQMEMLDKNPNASLRNMVFYRQDYLDEFNMLWEKQAVYHKELTEELKKEIRDIIIFYQRRLKSQKGLIGFCEFESRQIEVDIDGKKKIKTVGNRVISRSSPLFQEFKIWQILNNIEVTVVGKKRKRRKLKENYSAFFEELNDAEQLELNGSRRLCQEEKELLAQELFVRDKMTKSEVLKLLFDNPQELDLNFKTIDGNKTGYALFQAYSKMIEMSGHEPVDFKKPVEKVVEYIKAVFDLLNWNTDILGFNSNEELDNQSYYKLWHLLYSFEGDNTPTGNGRLIQKMTELYGFEKEYATILANVSFQDDYGSLSAKAIHKILPHLKEGNRYDVACVYAGYRHSESSLTREEIANKVLKDRLMLLPKNSLHNPVVEKILNQMVNVINVIIDIYGKPDEIRVELARELKKNAKEREELTKSIAQTTKAHEEYKTLLQTEFGLTNVSRTDILRYKLYKELESCGYKTLYSNTYISREKLFSKEFDIEHIIPQARLFDDSFSNKTLEARSVNIEKGNKTAYDFVKEKFGESGADNSLEHYLNNIEDLFKSGKISKTKYNKLKMAEQDIPDGFIERDLRNTQYIAKKALSMLNEISHRVVATSGSVTDKLREDWQLIDVMKELNWEKYKALGLVEYFEDRDGRQIGRIKDWTKRNDHRHHAMDALTVAFTKDVFIQYFNNKNASLDPNTNEHAIKNKYFQNGRAIAPMPLREFRAEAKKHLENTLISIKAKNKVITGNINKTRKKGGVNKNMQQTPRGQLHLETIYGSGKQYLTKEEKVNASFDMRKIGTVSKSAYRDALLKRLYENDNDPKKAFAGKNSLDKQPIWLDKEQMRKVPEKVKIVTLEAIYTIRKEISPDLKVDKVIDVGVRKILIDRLNEYGNDAKKAFSNLDENPIWLNKEKGISIKRVTISGISNAQSLHVKKDKDGKPILDENGRNIPVDFVNTGNNHHVAVYYRPVIDKRGQLVVDEAGNPKYELEEVVVSFFEAVTRANLGQPIIDKDYKTTEGWQFLFSMKQNEYFVFPNEKTGFNPKEIDLLDVENYGLISPNLFRVQKFSLKNYVFRHHLETTIKDTSSILRGITWIDFRSSKGLDTIVKVRVNHIGQIVSVGEY

SEQ ID NO: 22332 - protein, 1509 aa, unidentified
  REGION 1..1509: note = Cas Enzyme sequence
MKTILGLDLGTNSVGWAVINSVIKEQAERIWIEMAGSRIIPMDAAVLGDFDKGNSISQTSERTRLRGARRLRERQLLRRERLHKVLNILGFLPNHYLEYIDFEKHPGKFLADAEPKLAWVKDEQGKYTFLFQAAFDEMLADFAIHQPSLVSGDKKIPYDWTIYYLRKKALTEMISKEELAWILLNFNQKRGYYQLRGEEEEDNAGKSVEFYALKVLTVEATDEKKGRDVWYNVHLENGWIYRRSSSVPLDWEGQVKEFIVTTDLNPDGTPKLDKYGEVKRSFRAPKEDDWMLIKKRTEADIANTHKTVGAYIYDTLLQKPQQKIIGKLVKTVERKLYRDELSLILQKQCAFHAELQDRALYARCVEALYPSNEVRRKNIANRDFVYLLMDDILFYQRPLKTKKSLIANCPYEENEYVDRETGEIKKAPLKCIAKSHPLFQEFRLWNFLSNIRIYQKEKEINGTLHLDVDVTAEFLKTEDDYVALFDWLNSRKEIEQKTFLKYPKFGLKKEISNYRWNYVEDKQYPCNETRHAILSSLEKANVCIDFLSNEKEVALWHILYSVSDKQEIEKALRTFAAKNGLDESFVEAFKKFPPFKSEYGAYSAKAIKKMLPLMRCGKYWDVSSIDDTTKERIKKIVTGEYDERISVKVRDKVMNLSDISCFRRLPLWLACYIVYNRHSEDKEAVKWESPADIDAYLASFKQHSLRNPIVEQVITETLRVVRDIWKQVGRIDEIHIELGREMKNPADKRKRMTAQILENENANLRIKALLAEFMNPEYEIENVRPYSPSQQEILRIYEDTVLHAEDQLPEEIDAILKKFNSSKVPTKSEFLRYKLWLEQKYRSPYTGELIPLGKLFTAAYEIEHVIPQSRYFDDSFSNKVICESAVNKLKDNQLGYEFIKNHHGQKVEVGFGKSVEIFSVDSYERFVKEQYAKSAVKMKKLLMDDIPEQFIERQLNDSRYISKVIKGLLSNIVREKNDSGEYEPEAVSKNIVVCTGSVTDRLKRDWGMNDVWNSIVYPRFERLNSLTDTQSFGHWENKSGKKVFQTELPLEYQKGFSKKRIDHRHHAMDAIVIACATRNHVNYLSNESASRNAKISRYDLQRLLCDKNRTDDNGNYKWVIKKPWDTFTQDAREVLSKIVVSLKQNLRIINKTTNVYRHFDATVNRVYQKQKTGDSWAIRKPMHKDTVFGAVNLRKVKVVRLSVALDTPAMIVDKRVKNKVFELLSYKYDKKRIEKYFKENAFLWKELDLAKVAVYYFTEATTEPLVAVRKPLDSTFNEKKIKESVTDTGIQKILLNHLCTKEGKPDLAFSAEGIEEMNRNLLQLNNGKSHQPIYKVRVYEPRGNKFSVGVLGNKGTKWVEAAKGTNLFFAIYITEDGKRTYETIPLNVVIEREKQGLVPVPDRNEKGDKLLFWLSPNDLVYLPTEEEREFGRINEPMDRGRIYKMVSCTGNEGHFIPANVANPIVPVIELGSNNKAQRAWTNEMIKDICIPIKVDRLGHIIEVKYRIDE

SEQ ID NO: 22333 - protein, 1390 aa, unidentified
  REGION 1..1390: note = Cas Enzyme sequence
MKNIFGLDLGTTSIGWAVVNEAENDNEQSALIALGERVNPLSTDERTNFEKGKSITTNSDRNLKHGARLNLFRYKMRRNNLISLLRDNGIIDDSSILAENGEHTTFETHKLRAKAATERIELTEFARVLLSINKKRGYKSSRKADSAEEGKAIDGMSIAKELYENDLTPGQYVYARLLQNKKYVPDFYRSDLNAEFNRIYARQSTYYPDVLTPELAEQLNGRNEKATWAIIAGAFNIKGAKRATKGFDKKVEDYKWRVDALVDKLDPEQIASVLSKINRDISGSSGYLGAIGDRSKSLYFSGLTVGQYQYECLVKNPHHSLKNEVFYRQDYLDEFERIWTVQASHHDKLNDKLKSEVRDIIIFYQRRLKSQKGSVAICELVQYSVDVTVDGKTKRKIVGPKVCPKSSPVFQEAKILQILNNVKVTNRNDDTERPLSGDEKSALLRELNWCDKMSATEALKLISLNPRIYSINYKQLEGNTTNALLLKSFMSVVDVTGHDSEAIEDLPASKKAEIVEGIFKSQGFNTDIFHFDSSVESQAIEHQPAYMLWHLIYSYEGDDSISGNEALIKKLCEKFNFDSESAAIIAGVVFKADYGNLSTRALRKILPYLKQGMVYSDACDKVDYRHSKRSLTREEIDNRDYKSRLDLLPRNSLRNPVVEKILNQMINVVNSLIETYGRPDEIRIELARELKKSAKERADLISSINKATADNEKIRQLLINEFGIQRPSRNDIIRYRLYDELSAVGYQTLYSDTYIPREELFSKRFDIEHIIPQSRLFDDSFANKTIEARDINIEKGNATALDFVEAKYGSEYVKEYRNRVDILLKEGKIGRGKYNKLLTKENDIPEDFINRDLRNTQYISRKALEILSEVAPKVTATSGSITERLREDWQLIDVLQELNWDKYDRQGLTEIFVNRDGNTVRRIKDWTKRNDHRHHAVDAVAIAFTRAEYVHYLNNLNAQSDKGKEFYAIRERYLERDKHNNLRFRSPIPVKEFRAVVKDQLEKSFVSHKSKNKVVTKNVNATKCSGGVNRKVQLTPRGELHEATICGRIMQPVVDKEKIGVSFDYDKIATVASAVERKALTRRLDMFNGDPKKAFTGKNSPTKNPVYIDDDRKVELGTKVKTVTMKCVYTKRKEISEDLKLDKVIDKGVQRILQQRLDENGGDPKEAFTNLDANPIYLNKEKGITIKRVTITGPTEVEPLHSKRDHLGNEMRDADGRTIPTDFINTGNNHHIAIYRDASGNLQERVMSFFEATARACAQPPLPVIDKDYRKCDGWEFLFTMKRNEYFVFPRYESVVDSATGQEKLIKTFDPKAVDLLDRDNYAKISPNLFRVQKLATKNYHFRHHLETNVNDVKELRDITWKRIQTIKLMDEAVKVRIDNLGRIVAVGES

SEQ ID NO: 22334 - protein, 1550 aa, unidentified
  REGION 1..1550: note = Cas Enzyme sequence
MKNILGLDLGSNSIGWAIVKALKNEDGKEILQSIDLAGSRIIPMDQATLGNFENGNSVSQTRERTGYRSARRLRERYLLRRERLLRVLNCMGFLPEHYSQNIDKYGKFFLDNEVKLSWKKDKMGKNEFIFLDSFNEMLEDFRHSQPQLLLDGRKVPYDWTIYYLRKKALTEKISKEELAWILLNFNQKRGYFQLRGEDEEVQGKKIEFYALKVVRVEDTGEKKGKDTWYNVYLESGLGDTDDYWVYRRASSVPIDEWEGQVKEFIVTTTLDNNGSPQVDKEGKVKRSFSIPKPEDWMLVKKKTEVDIKSSGKTVGTYIYDTLLQKPDQKIKGKLIRTIERENYTNELSLILENQKKFHLELQDRELYHQCIELLYCKNEAHKRVIGTWDFTSLFIKDILFYQRPLKSKKALIDNCPYEESFYIENGEKKSKPRKCIAKSHPLFQEFRIWQFISNLRIYQKVKEVDGKLQFNVDVTSDFLRDESAYVELFKWLNERAEVSQEDLLKHLGLKKTKTEDTVSLYRWNYVEDKKYPGNKTRSSILKKLLNDEKEALSEDIELKIWHLLYSVSAQSEIDKALSSKNVSTKGIYSGLSVYFSDETIQKIKNVKLESGYGSYSAKAIGKLLPLMRRGKYWNLESIDNHTKERIEKILNGECDETIRARTREKSISLTDISQFKGLPLWLACYIVYDRHSELKTIKKWNGPEDIDKFLKEFKQHTLRNPIVEQVIMETLRVVRDIWRRVGSIDEIHIEMGRDMKQTAQERARRSAIISRNENDNLRIKALLHEFMNPELGIENVRPYSPAQQEILRIYEDGVLSSVSEIEDEIKNILKKFNESEEGKRPTKNEIIRYKCWLEQKYRSPYTGEIIPLGKLFTPAYQIEHIIPQARFFDDSFTNKVICEAEVNAKKGDLLGYEFVKEKGGEIVELSGGRNVRIFSVEEYEDFVKEHYKSNKQKMQRLLAEDIPTEFSHRQLNDSRYISKYIRNLLSNIVREDDEQESVSKNVISCNGAITDRLKKDWGVNDVWNHIILPRFVRLEEIRADNGEKFTAFNQEGHRIPSMPLIHQKGFNKKRIDHRHHAMDAIVIACTTRDHVNLLNNECSNPQNNVNRHQLSRKLRRYENVSYKQDGKLKEREVPKEFLKPWEGFTRDVEFALKNVIVSFRQNLRVLNKTVNYFQHWKDNSSEKEWKEQKSADHWSIRKPLHQETVLGEVFLWRTRFVSLREALTKPKRIVEKDLRSKILELQRKGYDIERIKKYFEDNKDVWQDVNLSKIEVRYYSREIVDPRTGLPKNRYFATRFGNDLISLFSGVSNFENAKKIIKSITDTGIQKILFRHLENKGNDPVLAFSPEGIDEMNRTIKTLNNGKDHKPIYKVRIYECSTMKFPLGSVGNKSKKFVEAAKGTNLYFAVYEKEVENDRGECHKERAFKTIPLNDVIRNLKQGLSIAPNDENGNPPAFILSPNDLVYLPTKEELETGSISQPLDRNRIYKMVSCTGNVAHFIPAFIAIPILQTIELGSKNKAQKAWTGEMIKESCIPIKVDRLGILISINGRAV

SEQ ID NO: 22335 - protein, 1084 aa, unidentified
  REGION 1..1084: note = Cas Enzyme sequence
FYRQDYLDEFNAIWEKQAEFHKELTPELKKGIRDVIIFYQRRLKSQKGLIGFCEFENREIIVEKNGKTQTKIIGCKVIPRSHPLFQEFKIWQTLNNIEVFVGERKRKRKQTNVSSDLFDDTEDVLVTKGRRFLYQEEKEILAKELSIKENLKKAEVLKLLFENPQELDMNFKQIDGNRTGFALFSAYGRMIEKYGYEPLDFKKPADEIINQLKAVFSDLGWNTDLLSIGLDKEGKELEMQPYFRLWHLLYSFEGDNTPAGNGKLIEKIMQLCRVEKEYAIELANISFQDDYGSLSAKAIKKILPYLKEGNQYDVACEYAGYRHSKSSLTKEEIENKALKDKLDILPKNSLRNPVVEKILNQMVNVVNAVIDAYGRPDEIRVELARELKKSAKEREELTKAIAKNTREHDEIRKLLQSEFGMIHVSRNDIIRYKLYEELKENGYKTLYSNQYIPKEKLFSKEIDIEHIIPQARLFDDSLSNKTLEYKAINIEKGNKTAYDFVKDKYGEEGLQEYLNRCETVCNDKKAKLRKLKMQQNDIPDGFIDRDLRNTQYIAKKALSMLKDICRRVVATTGSITDKLREDWQLVDVMKELNLPKYEALGLVERFEDKDGRIIKRIKDWTKRNDHRHHAMDALTVAFTKDVFIQYFNNKNAAWESDCKEHANIIGIKTRYFESGRAVPPMPLGQFRVEAKSHLENLLVSIKAKNKVVTTNVNCIRKKGGISEKHQQTPRGQLHLETIYGSHKQYVTKMEKVNASFDAAKIATVSRQNYRNALLRRLEAFGNDPKKAFTGKNTLEKNPVYLDRAQTMRMPDRVQTVEFEAVYTIRKPIDSNLNVEKVVDAKVRAILEQRLEEYGGDAKKAFVNLDENPIWLNQEKGISIKRVSIRGINNAQSLHVKKDKNGNPILDENGKQIPVDFVNTGNNHHVAIYRKPVLDKKGQVMFDEDGNLMYELDEVVVSFFEAVTRANLGLPIINKDYRRSEGWQFLFSMKQNEYFVFPNEKTGFNPKEIDLLDPDNYAVISPNLFRVQKFSTKNYCFRHHLETDVQERKALLGITYKWQLGLKAIKDIVKVRINHIGQIVSVGEY

SEQ ID NO: 22336 - protein, 931 aa, unidentified
  REGION 1..931: note = Cas Enzyme sequence
SGTLGQVIKKLLPLMRMGKYWSIENIDNGTRIRINKIIDGEYDENIRERVRQKAINLTDITHFRALPLWLACYLVYDRHSEVKDIVKWKTPKDIDLYLKSFKQHSLRNPIVEQVITETLRTVRDIWQQVGHIDEIHIELGREMKNPADKRARMSQQMIKNENTNLRIKALLTEFLNPEFGIENVRPYSPSQQDLLRIYEEGVLNSILELPEDIGIILGKFNQTDTLKRPTRSEILRYKLWLEQKYRSPYTGEMIPLSKLFTPAYEIEHIIPQSRYFDDSLSNKVICESEINKLKDRSLGYEFIKNHHGEKVELAFDKPVEVLSVEAYEKLVHESYSHNRSKMKKLLMEDIPDQFIERQLNDSRYISKVVKSLLSNIVREENEQEAISKNVIPCTGGITDRLKKDWGINDVWNKIVLPRFIRLNELTESTRFTSINTNNTMIPSMPLELQKGFNKKRIDHRHHAMDAIIIACANRNIVNYLNNVSASKNTKITRRDLQTLLCHKDKTDNNGNYKWVIDKPWETFTQDTLTALQKITVSFKQNLRVINKTTNHYQHYENGKKIVSNQSKGDSWAIRKSMHKETVHGEVNLRMIKTVSFNEALKKPQAIVEMDLKKKILAMLELGYDTKRIKNYFEENKDTWQDINPSKIKVYYFTKETKDRYFAVRKPIDTSFDKKKIKESITDTGIQQIMLRHLETKDNDPTLAFSPDGIDEMNRNILILNKGKKHQPIYKVRVYEKAEKFTVGQKGNKRTKFVEAAKGTNLFFAIYETEEIDKDTKKVIRKRSYSTIPLNVVIERQKQGLSSAPEDENGNLPKYILSPNDLVYVPTQEEINKGEVVMPIDRDRIYKMVDSSGITANFIPASTANLIFALPKATAEIYCNGENCIQNEYGIGSPQSKNQKAITGEMVKEICFPIKVDRLGNIIQVGLCILTN

SEQ ID NO: 22337 - protein, 1388 aa, unidentified
  REGION 1..1388: note = Cas Enzyme sequence
MKRILGLDLGTNSIGWALVEEAENKKEVSSIIKLGVRVNPLTTDEKTNFEKGRPISTNAYRSLKRGARKNLQRYKQRRENLIKILKEHNIIDDDTPLTEVGKGTTHQTLQIRATAASNRIELKDFAKVLLTINKKRGYKSSRKAVNEKDGLAIDGMAVAKTLYDHNLTPGQYVLELLNANRTYIPDFYRSDLKEEFKKIWNTQQEYYSELTNELFAKVDGKNKSQTYAILQEPLGLEGIKIKGSKAEQRILKYQFRVDGLNEKLAPEHLAIALQEINNEINQSSGYLGAIADRSKILYLKKQTVGQNLYSQLVNDPHTSLKNQVFYRQDYLDEFETIWTTQAKFHKELTYELKEIIRDVVIFYQRKLKSQKSLISLCQFESWEQEYVIRESEKTKTRTVGRRVIPKSSLLFQQFKIWQNLNRLIYVNKEKEERIELKKADEKVRQTVFEELNLRGDLSSNEVLKILKDFYSIRKLSDWKCNFEKVEGNRTNHKLYNVFQEIAEFEGYGMDWSRKSALQITEELKNIFPEIGIKAAILDFDPLAVNFSTQKSYELWHLLYSAEDDEKISEEDKLVYGNNSVAIRKKLHQKYGFKPEYAKLLSNIRFKNDYGNLSAKAIRNILPYLQEGNEYSEACRLAGYNHSNSLDKDELSKRELLPKLELLKKNSLRNPVVEKILNQMVNLVNQVIETYGKPDEIRIELARELKKTASERKDMTQAISDATKRNQDIKKTITKEFGIPNPTKSDVERYRLWQELESRGHKSLFDDKYIPKQKLFSKEIDIEHIIPKALIFDDSFSNKTLCYREANLKKANRTAFDFIMQDSHSEVEKYKERVEALYGDGRITRSKRNKLLMPQSEIPNDFIERDLRNSQYITREAKKMLFKVFRTVTVTSGSITDRLRGDWDLINIMKELNLPKYRALGLTEYEERIDIGAAKLIKYEVIRDWSKRNDQRHHAMDALTVAFTTHNHIQYINNLNARRDTSQDNHSIITNIENLITEINEKGKRVFKKPVENFRENAKTHIQQILVSYKAKNKVVTRNVNKTKKKGKDNYNKKVQLTPRGQLHKETVYGKSLRPMDKKTKLNSNFTIEDAKMIVNKKKRHAVLNHLAKYENNCKKAFASKTLKQSPITYRGEVLIEVTLFEKLFTVRKEINPENFKNQKHIEKILDGGVNSALKKRLAEHNGNFKTAFSDLEKKPIWLNEEKRISIKRATITGVSNTEPLHLAKNHLGEEICNQQGDEIPVDYVSTGNNHHVAIYEDDKGNLQEEVVSFYEAVIRKNQGEPIIRKNHPKGWKFLFTLKQNEMFVFPNKNFDPCEIDLMNVKNAASISPNLFRVQKIATKNYMFRHHLESSVTNDFDFTYKHLRSLGHLTEIVKVRINHTGEIVQLGEY

SEQ ID NO: 22338 - protein, 1424 aa, unidentified
  REGION 1..1424: note = Cas Enzyme sequence
MKRILGLDLGTNSIGWALVNEAETDEEVSSIIRLGVRVNPLTVDETQNFEKGKSITTNAERTLKRSMRRNLQRYKLRRDALVEFLKELGFITDETILSEQGNRTTFETCRLRAKAAEEEISLEELSRVLLMINKKRGYKSSRKVKKEEDGVLIDGMEIAKKLYEEDLTPGQLCSQLLESGKKVLPDFYRSDLQEELDRIWSVQKQFHPDVFCDAAKEEIKGKNRSQTWAILANYFVWKEEVVGWNDREAKNETIEKECKLVGLKRTTKGYELKKENYRWRAQALTEQLGLEEIAVVLQEINGQINASSGYLGAISDRSKVLYFNHQTVGQYQMAELDKNPHASLRNMVFYRQDYLDEFDRIWEKQAEFHKELTAELKKEIRDMIIFYQRRLKSQKGLISFCEFERLEIVVEKDGKKQTKVIGCKVIPRSHPLFQEFKVWQTLNDIKVLGREKKRNALSASESRALYPEEKEILARELAIKENMKKADVLKLLFENPQELDLNFKQIDGNRTGFSLFSAYSKMIEKYGYEPLDFKKPADEIIGQLRTIFTDLGWNTNLFTIDLTKEGKELEMQPYFRLWHLLYSFEGDNTSTGNGKLIEKIMQLCGVEKEYAVELASLSFQDDYGSLSAKAIKRILPYLKEGNLYDVACEYAGYRHSKSSLTKEEIENKVLKGKLEVLPKNSLRNPVVEKILSQMVNVINTIIDTYGKPDEIRVELARELKKSAKEREELTKAIAKSTREHEEIRKLLQDEFGMMNVSRNDIIRYKLYEELKDNGYKTLYSNQYIPKEKIFSKEIDIEHIIPQSRLFDDSLSNKTLEYKAINIEKGNKTAYDFVKGKYGEEGLQQYINRCESLFNDKKAKLRKLKMEQKDIPDGFIDRDLRNTQYIAKKALAMLNEICRRVVATTGSITDQLREDWQLVDVMKELNLPKYEALGFVETYEDKDGRKIKRIKDWTKRNDHRHHAMDALTVAFTKDAFIQYFNNKNAAQDSGNRNHTNIIGIKTRYFDKGRALPPIPLEQFRIEAKQHLEKLLVSIKAKNKVVTVNVNRTKKRKGENTKIQQTPRGQLHLETVYGSHKQYVTKIEKVNASFDAAKIATVSKRAYRNALLKRLETFGNDPKKAFTGKNALEKNPLYADKYQTIRVPEKVQTVEFETIYTIRKPVDPALNVDKVVDVKVRAILERRLKEYGGDPKKAFVNFWENPIWLNKEKGISIKRVSIRGINNAQSIHVKKDKNGNPIWDENGKQIPVDFVNTGNNHHVAIYRKPVLDKKGQVTFDEDGNLMYELDEVVVPFFEAVTRANLGLPIIDKDYRKSEGWQFLFSMKQNEYFVFPNEKTGFNPKEVDLLNPDNYAMISPNLFRVQTMSKVMYGNNVVRDYKFRHHLETTVKDMKELKDIAYKQYKTLSFGNSVVKIRINHIGQIVSVGEY

SEQ ID NO: 22339 - protein, 1382 aa, unidentified
  REGION 1..1382: note = Cas Enzyme sequence
MKRILGLDLGTASVGWAVVNEAENSEEQSSITALGSRVVLLSADEKNNFLTGKSVSATATRTAKRGARRNLQRYKLRREWLKDALVSAGIINENTCLNDSNSKELFATYVSRAKAVTEQIALEDFAKVLFMINKKRGYKSNRKTDNTESEDGQIIDGLDLAKKLKARNITPGQYLLELFKENKKNKAVFYRSDLQEELNRIWAFQSQFYPEILDNTLLSAITNKSKKVVIGLFKGIKNIEIADVKTKERTEKALTWRSEALHKQLETGEVAYAIAEVMGAISQSSARLALLSDNSKHLEFEGLTIGQYLLKLLRNNPNSSLKNINFYRKDYEDEFNSIWNKQASFYPQLTESLRSTIFNSIFMQRNLKSCKALLANCELEFAEKKITLPDGSCQTRTIYSKVCPKSSPYFQEFQIWQSLSNIRIIDKENAHLTKGQELSYDQKVMLLSELMIHSELKANKVIEILFGKKSNYTINMPSIKGNRTNETIFNALLEIVELTGHSIDNIVKTDANQQIEAVKNIFESLGYKTNFITFDSTIEGKDGLNQPYYKLWHLLYSYCGDNSKTGNEALIRKIEELTGLEKEEAKVLANCTFENDYASLSTKAIRKLLPHLQSNLDYSEACEAAGYNHSKRSRTKEDIKNKVYKDKLDLLPRNSLRNPIVEKILNQMIHVINQTSEAYGKPDEIRIEMAREIKKNKIQREKLANQLRQNTAELERIKDILRKDFKLSHISHNDILRYRLYEELSLNGYKTLYSNTYIERQQILDPTVTIEHIVPKALAFDDSFSNKTLEIQSVNGEKSNQTAFDFISKKYGSEALEQYINRVNNLFENGKISKTKRDNLLRKQEDIPSDFLNRDLRNTEYIAKKALEILEDYVPRVTPTIGEITKTLREDWQLVNIMRELNWEKYNSLGLTSFYYDRNGTKIGLIHNWTKRNDHRHHAMDALTIAFTKPSIIQYLNNLKSQNDKGSSIYAIQAKETYIDATRKRLIKPPYDIKQFRNDAKQMLDNIFVSHKAKNKVVTPNTIVTKKKRKAGKETKAEEKRTFLTPRGALSNETVYRKICNYETKEITINSKLTYEIALTIAKKKERKAVLERLAQHNNNPTTAFKNYNKNPIMLQTSVGEKPLMSVKIVNYKELFVKRSEINEKLDIKRVLDAKVRARLTDRLKEYNNDPKAAFANLEENPIWLNEGKGIALKHVTTIERVMGLPIRPKRNINGEIMKDELGQPLKSHYVATGGNHHVAIYEDEEGKWHEKVVSFNEAASRAIQKLPIIDKDFNKELGWIFQFTMKQNEMFVFPDKESGFDPLAIDLKDPANKTLISKHLYRVQKLSSCYYHFRHHLETNVEDSKELQGITWKSIRTTNNLRGIIKVRINHIGQIIDIGEY

SEQ ID NO: 22340 - protein, 1441 aa, unidentified
  REGION 1..1441: note = Cas Enzyme sequence
MTQKILGIDLGTNSIGTSVRNTDLGNNLVDQLEFFSSDIFNASVNGEGVNGGKGGREYSLASSRSAKRRKRRLYEHRRYKLWATLDLLIKNNLCPMTPESLEQWRTYDKKKKLFRQYPIDDKAFHSWIILDFNGDGKPDYSSPYQLRRELVSVQLDFNQAIDRYKLGRALYHIAQHRGFKSSKGETIAEQEKQEDDSKKDKKKALAEEHVDAIKASEEKHSKGLSTYMQEHNLKTVGVAFAQLEDEGIRIRKNSEYKAIRSQHQDEIKEIFKFQKGLSEQTQLLDTLISEKQGIGTIFYKRPLRSQRGNVGKCTLEPHKPRCPIGHPLFEKFRAWTFINNIKAKSPDSDSAEPLPMDLKINIYNKLFLSRVKEDFKFEEIRYFIEKQWGVALSKDDKTINYRDDTSVAGCPITARMIKVLGENWENFQVLGTKERQTQGKSNNALHQVCYTAEDIWHLCYDAEDSGKVRTFAEEILGWDEKKASELVRLWSAIPQGYAMLSQKAIRNINRMLLFGLKYSDAVLLAKLPDILELSDEDIQTIIKKVQQLEEVVNEEKRIGNIVNSLIANYKAESLEHRFADHNYEYQLDESDEREIIKHIESNIGKQRWELMDADEQISILEGVRSGYQAFFARHKRTFVELPQLGKRLVELLSKVYPSVEKKQWERLYHPSQIAIYRPILLDNSDENKRLGNPNIGAIKNPTVMRTLNNLRRRVNQLLDDGVLVPNETRVVVETARELNDANAKWALEQYQEIRRKENKKIKDILEEFYPQFSNITSTDVDRARYVIEQYEEDNYKLEKEIGTYSKNINKYKCWLEQGGQCLYTGRIISLSNLFDSNAFDLEHTIPASVSFDNSDQNMTLCEAHYNRFIKKNNIPTAMPNYEKDVTIDGKLYTAIKPRLEKWKKRIERLSRNVEYWKVQARRAQMKDRKDECTKEKLLWQMELQYWRDKLQRFTILEVTDGFKNSQLVDTRIITRHATLYLKSVFKNVEVQRGSTTAEFRKILGLQSVEEKKDRTLHSHHAIDATVLTTIPAAAKRDRILELFYKVQEKERILKNYSGDAPIGLKQDLEGLQEKLKKEVEACKLGNKLGQLGSFINENIIISHNVKDQTLTPSRKRLRRRGRVVYNKKRENDNDKNPIWQTGDTLRGKIHKESYYGAITQYAKDEDGNVLFNDGKPKIDPTIWYVIRRELKHKKSAQDTGFASWDDLEKVIVDKNLFKLMKEQFPEETSFKDACEQGIYMIKKGKDQEHNIKTHRIRHIRCHTSVRSALKIKEQLNKSTKDYKQYFYAESGDLYTICCYTNGKKKEYRPYRLYDIAQHRKAGIEDIPEFITDKKGNRLELSYKLRSGDMILLYENTPEELYDMDPVNLKQRLFKVDRFESDGPRFYLRNHLVAEGELEYSIKDYNQIPRNVRCGMKSTKFLIMGEHNDFVIKGNNIIFNHR

SEQ ID NO: 22341 - protein, 1378 aa, unidentified
  REGION 1..1378: note = Cas Enzyme sequence
MKKILGLDLGTTSIGWALVNECENEKSSIIRLGVRVNPLTTDEKGNFERGKAITTNSDRQQTHGARINLQRYKLRRKYLCDCLNKHGWIGSEPMYEDGKSSTFETYMLRAKAAVEEVSLHEFARVLFMMNKKRGYKSNRKANDKEEGKLFDGMSVAKKLYEAHLTPAEYSLLLLNKGKRFTPEYYRSDLIEEFEKIWNEQKKYYPEILTDEFKRQLEAKTKTSTSKIFLGKYGIYSADLKGLDRKLQPIKWRVEALRQQVDKDVLAFVISDLKGQIANTSGVLGAISDRSKELYFNKQTIGQYLWASLKKNPHVSVKNQPFYRQDYIDEFEKIWETQASFHKELTPELKQEIRDIIIFYQRPLKSKKGLISVCELEQCKVKVTIDGKEKEITIGPKVAPKSSPMFQEFRIWHNLNNIQLIDNERNSKRSLYEEERNLLYEELSIRDRLSKAEALRVLGKKNRQWDINYKELEGNRTQATLFSYYNKIIMMTGHEECNFKQLKAPEIRHYIKTIFKNLGFNTGILEFDSSLNGHELEQQPMYQLWHLLYSYESDKSRTGNEALLKKLETIFGFPREYASVLAEVAFEDSYGNLSVKAIRKILPHLQAGLDYSQACEEAGYKHSSRSLTKEELDQKEYKEKLELLPKNSLHNPVVEKILNQMINVINAVIDEYGKPDEIRIELARELKIGAAERENMTRSISQGNAENKRIREILEKEFALSYISRNDIIKYKLYEELKPNGYKTLYSDTYIPKDKLFSKDFDIEHIIPKARLFDDSLSNKTIEARDVNIAKSNKTAFDFISGKYGLQGIEAYKKKLYILLQGGSINKAKYNRLLMKEADIPSDFINRDLQNTRYITRKAYEILSDLVRVVTPTSGAVTSRLREDWQLVDIMKELNFEKYQKLGLTEVIEDKDGRKIKRIKDWTKRNDHRHHAMDALTIAFTKPSFIQYLNNLNARSNKGDSIYAIENKELHREDGKLCFNAPLPINEFRAEAKKHLKAVLVSIKAKNKVMTQNVNKIKTKHGVIKKVQLTPRGELHNATFYGTKKRPIIKMVKVGAALDEVTIKKVSSSFIRKALQDRLYEYNGDAKKAFTGRNSIDKNPIYIDEERKRIVPALVKTIEWEMYHPTRKLISPDLKIDKVIDKGIRDILKTRLAKFNGDAQKAFSNLDEDPIYKDETKKIILKRVSLEGVSSVIPLHTLKDRSGMPITGKDSEPVLGDYVQTSNNHHVAFYIDENGNLQDNIVPFFEAAERKSQGIPVIDKNYNRDKGWHFLFTMKQNEYFVFPNEVTGFNPSEVDLMDETNYDIISPNLYRVQKMSRVVYGKSIIRDYVFRHHLETTVEANANLKGLAYKQLKSLSYLEGIVKVRINCIGKIVAVGEYD

SEQ ID NO: 22342 - protein, 1162 aa, unidentified
  REGION 1..1162: note = Cas Enzyme sequence
MGSRIVPLSADDATEFTQGKAITKNKMRTVARTIRKGMDRYQLRREALKKVLSEHGMLPDESLIKLPLLELWELRARAATPGEQLSLAELGRVLLHINQKRGYKHAKADEAAEAEAESKSKKEKEGYVAQVKGRYQALKEKGQTIGQHFSGELRANQQTAPRGVYYTYRIKEQVYPREAYIEEYNQIMAIQRTFYPELLTDALIGRIRDRIIFYQRPLKSCKQLVSFCEFEKKERVVQVKRINKKGVEELVERTITIGPKVAPKSSPIFQVCKVWESIQNIRLYYPDGTERKLEQEEKQKLFDYLQKNDKLSLTALRKVLKIKPKEKLWCDKLLEKGIAGNTTVAILRKALKGYEQYEGLLRFDLTIRDGHKADEDGVIHSIVDESYQNEPLYKLWHILYSIEDRDDMYRALVGQLEIKEEDLDDGLMDALYKIDFVKQGYGNKSAKFICKLLPHLQEGKMYSEAAEAAGVRHSDSMTAQERDERSLLDEIPLLQKNALRQPVVEKILNQMINLVNALKREHGEIDEVRVELARELKMSREEREETTRSNNAREKENKAIADRIKGEYGLTPTKARIQKYSLWKESAESCIYCGKHVDLVQFLRGEEIEVEHIIPRSILFEDSMSNKVCACRTCNQEKGNRFAMEYIQSKGREQDYIKRVDSLFHAKEISYSKRQRLLMLPKDLPEDFIERHLRLSQYISREAQGILRKGIRLVSASEGGVTAKLRQLWGYDNILRDLNIERYRSMGETEVVTVEHRDGERTDERIKDWSKRKDHRHHAIDALVVACTRQSYIQRLNRVNAEADREEMDAFIKEQQQEHKLSKREKLSLLEYWLIRQPHFTTGEVMKHVEGILVSLRPGKRTISRGRNIYKRSGKTDVQRGVLIPRGALSEETIYGTIQLHRKDRSGTELVRSYVKRIPLSKVNPSNVKNIVDSQIREVVQAALLSLSGRKGVLPTELYLDDSRRRVVRSVRCLVRLNTLIPIRFNADGEAIGFTKPGLNHHVALYRDGVGNIRESVVPFFRAVERARYGIPMIISDPSKAREQARANPNLPESVLLSLPEEDWQLEEFLQGDEMFLLGMTDEAIDRAMETKDYTTLGRHLYRVQSLAAGDYMFRYHLETTLDGKDNVGSIPKSYRIQGLKTYRKLNPRKVKIDLLGRISLA

SEQ ID NO: 22343 - protein, 1517 aa, unidentified
  REGION 1..1517: note = Cas Enzyme sequence
MKNILGLDLGTNSVGWALISVDENGNLVKDIRLGSRIIPMSQDVLGKFDSGVTVSQTAERTEYRSHRRLLERALLRRERLHRVLHLLGFLPEHYAACIGWDRNDNATYGKFLPETEPKLAWRKADDGSYRFVFMQSFEEMLDDFKASQPSLVANGKRIPLDWTLYYLRTKALTKPIAKEELAWILLNFNQKRGYYQLRGEEEEETPSKCVEYHELKVVKVEATDEGKGGNVWYNVLLENGWVYRRQSKYSLDKWLGQTLPFIVTTDLEADGVTPKCDKEGNVKRSFRSPKEDDWTLVKKRTEDHLEKSGLTVGAFIYQHLLANPSDKVRGQLVRTIDRKYYKRELQAIIAKQMEFHPELRDAELLKACAEELYRNNEAHRAQLLAKDFKHLLVEDVLFYQRPLKSKKSLIANCPYETRQYINKETGEIKDVNVKCIAKSNPYFQEFRLWQWISNLRLLRQADGQDVTAAYIKGNQDKERLFDMLNKQGEIKQEHILRDFLKLKKPKGGEFPLRWNYVDDKIYPANETRHAMNKAIKGMAVDKEEKETLGQLLVQPAVAYMLWNLLYSITDRNELASALRRFALTHGVSSVDAFVESFLKVKPFKKEYGAYSEKATKKLLQVMRLGKYWCGDELPEPAKRTKDNKQAVYDEMAYRGICKQTLQNISNIIEENIDERLMGALLNPERPLTELSHFQGLSVSDACYVVYGRHSEVAEIVKWKDAGELNTFINNFKQHSMRNPIVEQCVLETLRTVRDVWEQEGQIDEIHVELGRNMKRTAEQRARDTQAIQRNENTNMRISLLLTELKNDPSISDVRPYSPSQRELLKIYEEGALENLTNQDEDIAKISRLAQPSASELRRYKLWLDQKYVSPYTGRPIPLAKLFTPAYEIEHIIPQSRYFDNSFSNKVICEADVNKLKDNLLGMEFIKQFGGKTKGILDEEAYKLHVTTNYAHNPAKRSKLLMEDLPTDFNSRQLNDTRYISKTVMALLSNVVREEGERETRSKHVVVCTGGVTDTLKKDWGLQEVWHNLVYPRFIRLNNLTGTKDFGHWESKDGKAVFQTGLPLDLQRGFVKKRIDHRHHAMDALVIACASPDIVNYLNNQSAANPHARQDLQRLLCDRKREIRKPWPTFTQDAQKALEDLVVSFKNTVRVVNKASNTYLRYDKDGKKKRFKQEGEGLKAIRKPMHKETYYGEVNLIRKEMLPLKRALEDVNAIVDKELRASIKGLLRDGFNPQQVWANFKAKDFKFDKRDIKKVEVYVSSEKSTPMVATRKSLDASFNAKRIADITDTGIQKILLNYLKANDNSPEQAFTPEGIVYLNEHIAEYNSGKPHQPILKVRVSEIRGAKFAVGQTGSKKTKFVEAQSGTNLYFAIYENKEGKRNFETIALNVAAERLKMGQTPVPETNNAGLPLKFYLSPNDLVYVPTDEDRAAAHPSIDKRRIYKMVSATDKNSFFLPFEVASIIADQVEFEAKNKVGRVIEALEYTEQYESSAINKIMIKDVCWKLEVDRLGNITKIVR

SEQ ID NO: 22344 - protein, 1212 aa, unidentified
  REGION 1..1212: note = Cas Enzyme sequence
YNKYWYDIILENGLVYQAAFYNDFVYNWINQDREFIIERTSLKNGTEKVKLSYLPTFDEIDKMDKKEQDKYYKKIKIKTENSIGNKTVGCYIYDHILQNPNEKIKGKLVRTIERKYYKEELKAILEKQVALQPELFTDQLFADCIRELYSKNEAQQRNLAARDFVHLFVEDIIFYQRSLRRQKSTLANCSLESRSYIDKDSHTRKEVPLKVCPKSNPYYQEFRVLQWLQNLKIYEIDTDQEVTHEFIKTLEDKQQLFDFLMNQKEIDCEELLKYFLNQTYPNAKEKALKSELKKWKDTYRWNYVYDIGEKSSKKYPMNETRYELKRHLEKVANLPDDFLSSEVEYLLWHLIYSVTDKVAYEKGLKKFAQKHHLDKDSFVESFKKFKPYPSEYGSFSEKAIRKLLPLMRFGAYWDFNHIDKNTQKRIEDLITGVENEEIRTILREKAEKYQLEKETDFQDLPLWLAQYIVYNRHAEASSLEKWTSVNDLETYLNEFKQHSLRNPIVEQVVMETLRVVRDIWQQYGQGQASFFDEIHIELGRELKKTAKEREKLSKQNQKNEDINLSIKEKLKELEKYNTRAYSITHQEKYKLWLEQKHISPYTGQIISPENLFTDNYEIEHIIPQSRFFDDSLSNKVVCESIVNKAPYKDRQLGLEFIKNQGGRIVKELSKENKTIKIFTEEQYRTFIKEHYSNNPEKTKKLLLEEIPEKMVARQMNDTCYISKFISEILSKIVRSDEQDEGVHSKNVILCTGKITSILRQDWGLNDIWDNLILPRFERMNNLLQKEKFTIYSIEKQKKIPVVPINDQFKSFQKKRIDHRHHALDAIIIACVTGEHINYINNQHALEKGKDKKEKQKEHDKLREKLCIKKYNKGSEENYSWIFKKPWAHFTQEVQAALEGIVVSFKQNLRVINKATNYYERWVEENGRYIKKIVKQEGTNWAIRKPLHEETISGKIYLDREKIAKNDILTATRKTVDSSFDEKRIKKITDTGIQKILLNYLKYKGSPEIAFSPEGLEEFNKNLSIYNDGKPHKPIYKVRIYEKGSGRFALGEKGRKYKKYVQGAPNLYFGIYQGANKRSFVTIPLNEVIERQKQGRPSIPEYNEKGDPLLFSLSPNDLVYVPIKGEIIEDIDFQNLSNEQKERIYNVNDFSSTCYFTPNRIAKAIFPKEVDLQRKGDKLSGSYDTKTASLEGIQIKEVCIKLKVDRLGNISKA

SEQ ID NO: 22345 - protein, 1436 aa, unidentified; identical to SEQ ID NO: 17549
  REGION 1..1436: note = Cas Enzyme sequence

SEQ ID NO: 22346 - protein, 1338 aa, unidentified
  REGION 1..1338: note = Cas Enzyme sequence
VDEKSNFEKGKAITTNADRQLRHGARINLQRYKLRRQNLHDCLQKQGWLGTEAMYEEGKASTFETYKLRAKAAEEEISLHEFARVLFMLNKKRGYKSNRKANNKEDGQLFDGMTIAKKLYEEYLTPAEYSLQLLNKGKKFTQGYYRSDLNAELERIWDEQKKYYPEILTDEFKQQLEGKTKTNTSKIFLAKYGIYSADLKGLDRKLQPLKWRVEALKQQVDKEVLAFVISDLKGQIANTSGLLGAISDRSKELYFNKQTVGQYLWASLEENPHISIKNKPFYRQDYLDEFEKIWETQATFHKQLTPELKQEIRDIIIFYQRPLKSKKSLISVCELEQRKVKATIDGKEKEITIGPKVAPKSSPVFQEFRIWQNLNNVLLIDNDTNEKRPLDESERNLLYEELSIKAKLSKTEALKILNKKGKQWDLNYKELEGNRTQAILFDCYNRIITLTGHEECDFKKIKASEIRHYVSTIFKNLGFSTEFLDFDPSLEKHELEKQPMYQLWHLLYSYESDNSRTGNESLLRKLETTFGFPEEYATVLCDVVFEEDYGNLSVKAMRKILPYLQAGNDYSQACAYAGYNHSRHSLTKEELDKKVYKERLELLPKNSLRNPVVEKILNQMINVINAIIDEYGKPDEIRIEMARELKSSAIERENATRAISQGNAENQRIREILEKEFSLSYISRNDIIKYKLYEELEPNYYKTLYSDTYITKDKLFSKDFDIEHIIPKARLFDDSFSNKTLEARDINLAKSSKTAFDFIKEKYGEEGAEAYKKKLDMLLGNNVISRAKYNKLLMAEADIPSGFIERDLRNTQYIARKACEILGELVRTVTPTTGEITNRLREDWQLVDVMKELNFEKYEKLGLTEIVEDRDGRKIKRIKDWTKRNDHRHHAMDALAIAFTKPSFIQYLNNLNARSNKGDSIYAIENKELHYEEGKLRFNAPIPVNEFRAEAKRHLSAILVSIKAKNKVMTQNVNKIKTKHGIIKKIQLTPRGALHNETIYGTKMRPIIKMVKVGASLDEATINKVSSPAIREALLKRLNEYSRNAKKAFTGKNTLEKNPIYLNVERTKVVPALVKTVEWENYHPIRKPITPDLKVDKVIDKGIRDILKARLEEFNGDAKKAFSNLEENPIYLDEAKKIALKRASIEGVLSAIPLHTLKNQAGKPITGKDGKLVLGNYVQTSNNHHIAFYYDEDGNLQDNAVSFFEAAERKSQGVPIIDKDYNRDKGWRFLFTMKQNEYFVFPNEATGFIPSEVDLTDEANYGIISPNLYRVQKVSRIDKGTSASRDYWFRHHLETILNDDAKLKNLAFKRIRGLLELKDIIKVRINSTGKIVAVGEYD

SEQ ID NO: 22347 - protein, 1089 aa, unidentified
  REGION 1..1089: note = Cas Enzyme sequence
LNSANVNYRVGIDVGSYSLGMAAIAIDDDGKPTEILSAISLIHDSGVDPDSAKSAATRLATSGIARRTRRLYRRKRKRLAKLDKFISSQGWPLKEFEKYEDPFYPWRVRAELATTAITDQQELGEKLSIALRHIARHRGWRNPYSKVTALYTVTEPSDAFLAMQEECAKQLGRTIPETITVGQLVTGMNLGKTRLRGENSLLAARPRQSDNANEIHTIAKVQGLSNELVRQIIDHVFAAESPKGSAAEQVGKDPLQPTKKRALKASDAFQQYRIAALIGNLRIRGGKGNRRLTTEETRLVFDYLRSLPAKQEPTWQLVAEQLKIDRGNLVGTAIMTDDGERAGAKPPVHDTNRIMENTKIKPLATWWKSADADARAAMVKALSNAEVDDFDSQAGAQVQEFFFGISDEDQEKLDGLHLPIGRAAYSEDTLDRLTKRMIGEGMDLYEARQAEFKISNDWAPPAPEIGERVGNPAVDRVLKATARWLNAAERQWGAPKSVNIEHVRAAFMSESSARELDRDNQQRAKRNVKVVAEMQEKLGIEGRPSRADVWRFQSIQRQNGKCAYCGAEISFKNSEMDHIIPQVGEGSTNTRDNLVAVCRECNSSKSNIAFAVWAENTSRPGVSVQKAIERTHHWVTDSGLRKPEFDKFRKQVCDRLRRKATDEPIDARSLESVAWMANELRSRIAQKFKDGDTKVRVYKGALTAEARRASGISGKLEFVDGKGKSRLDRRHHAVDAAVVAFTSNYVAETLALRSNMKFDQELRRKAPQWREFTGSDHVHQVEWTKWKYRMQALAELLNNALVQDRIVVMHNLRLRLGNGAAHEDTIGKLTRLKVGDAISTTDIDRASSEALWCALTRDPDYDPKTGLPENPNRTIRIHGTHLTASDEITVFPVAAASIPIRDGFAKLGSNYHHVRLFRVPSGKKYKYCLMQVYTVDLLKFRKEDLFTVELKPQTISVRTCEALLRKALANGTAEYLGWLVSDDELLIDTSSFDTPGIVKLREEYGPVNRWRLAGLTSVTRLNLRPLYLSKEGLKPNVNPEIKKIIDNRSWIITVNKLFSSGHVKIIRRDALGRPRLHSAAHLPICWEVK

SEQ ID NO: 22348 - protein, 1210 aa, unidentified
  REGION 1..1210: note = Cas Enzyme sequence
MKLVLGLDLGVGSVGWALIFITDSGEPIKILALGERIVSMDPDNSKEFSAGATCTLNQKKTKAKSVRKGYSRYVQRRDALTAELRHIGMMPDETLIKLPVLDLWQLRANAATEGKKLSLAEIGRVLYHINQRRGYKHGKSDVSSDNKQKGYVKAVNERYCMIQERQQTIGQYFALKLKETAVTTEKGTFYTFRIKDQVFPREAYEEEFDRIIECQKKFYPELLTEKVIDKLRNYIIFYQRHGKSCKHLVSVCDFERKPYKDENGKVFYNGPKVAAKSNPLYQIEKIWEEVNNISLRNKKGEELEITLVQKRELFNYLNTHEILRLTVLYKILGISKRDGWSANDAVKRGLKGNTTFVQLQKALQGVEDCEELLRFQLNNMPTVVCDEVTGESLQMVNPDCIGQPLYRLWHAIYSLKDKRQLKDTLRKNFKIEDDETIDLLYNIDFTKDGYGNKSVKVIRRLLPYLQTGLKYNEACEYIGINHSNSLTKEENAQRVLLEKLPQIGKNELRQPIVEKILNQMINVVNAIIAKYGRPDTIRVELARELKQSKEERKLMSDGIVAREREKKRDGKILEEEGIHPTKNRLERYRLWKETGERCLYCGNGINLNEFLRGGEVETEHIIPKALLFDNSYSNKTCSCRECNRKKGRRTAYEYVSSLGEERFEVYLNVVKMLYDEGKISKKKMDWLLMKSEDIPQDFINRDLRQTQYISRKAMELLQKVCYDVTATSGHVTSFIRHIWGYDTILHKLNFNRYKQGGLTEVVQFEHRGGKYEREVISGWNKRLDHRHHAIDALVIAMTKQSVIQRLNTLNTCRDEMYQEVESEKKEWRDDYSLLEQWLRELKHFSVEEVQMAIAKTLVSYKVNKKITSPGTRAVYSKRKKKVVQRGILIPRGVLHEDSVYGKIKIQGDLDPVYVIKYKLGVGAMGFVFTGKETYQETIKFNKKTGLDEVKVKDDIGNTLMSIVDGNIRNRIKQHLNIGFPEGEDYRNNPKKALENLKDLDNHPLYADDACKIPIRSVRCRTGLSAVVPLRYNREGQAIGFVKTGNNHHVAIYRDRQGAYHEIILTFWQAVNRKRYGIPVIIEQPSALWESISNGFQQQIPPSILETFPEPEWTFIVSMQKNESFILGMEEDDYQRAMDEKDHVTLGNNLYVVQNISSMVYRFCLSTITIFDSQKMNKPDKRFLNIQSFQAFFDKNPHKIKIDLLGEIVNN

SEQ ID NO: 22349 - protein, 1426 aa, unidentified
  REGION 1..1426: note = Cas Enzyme sequence
MKNILGLDLGTTSISFAHIVEDENKQKSEIKELGVRIVSLTTDEQSDFEKGKSITTNANRTLKHGARLNLDRYKQRRKYLIDLLQKANLITPSSILAENGKDTTHSTWQLRAKAVTERVEKEEFARILLAINKKRGYKSSRKAKTEDEGQAIDGMAIAKRLYDENLTPGQLSLQLLQQNKKLLPDFYRSDLQKEFDLVWNFQKQFYPDILTDSFYKELQAKGKDATSKAFSKRYHFDTAENKGSKESVRLQAYQWRAEAVSKQLSKEEVAYVLTEINNNLNNASGYLGAISDRSKELYFNRQTVGQYLYAQLQENRHNSLKNKVFYRQDYLDEFERIWETQASFHKELTEELKKQIRDVVIFYQRKPKSQKGLISFCEFESKEIEIEKNGKTITKTIGARVVPKSSPLFQEFKIWQILNNVICKRKGIRKKKVSAKTTQLDLLNESSQTIFSLDMECKQLLFDELNLKGDLKSDKVLKLLGYSPQEWEINYNQLEGNRTQKALYEAYLKIVEMEAHDVKDILQIKSTKDDWSLDESPLSASEIRESVKAIFQALGICTKILYFDPLLPVKEFEKQDSYQLWHLLYSYESDDSTSGNETLYRILEKKYAFKREHARILANVALQDDYGSLSTKAIRKIYPYIKENQYSTACELAGYKHSKLSLTKEELEARELKNIIPLLKKNALRNPIVEKILNQMINVVNALIEKNSERDAEGKITKYFHFDEIRIELARELKKNTQERYEMTQNINKAKLEHQKISEILQKEFGIKNPTKSDIIRYRLYKELEHNGYKELYTNAYIAPDVLFSKNIDIEHIVPKARVFDDSFSNKTLAFREFNIKKGESTAFDYITSLNSEEELNQYLTRVENAYKTKSISPAKYKNLLKKASEIGDDFINRDLRDTQYIAKKAKEILFQVTKNVLSTSGSITDRLPEDWGLVDVMKELNMPKYQSLGLTEIIERRDGRKEEVIKDWTKRNDHRHHAMDALTVAFTKPSYIQYLNHLNARKDENNKLYTDILGIERKETIKIHDENGNEKRVFIEPIPNFRQVAKKHLEEIFISHKAKNKVVTKNVNKPAGTDKQQITLTPRGQLHKETIYGKYQYYVNKEEKIGVKFDKETIAKVSNPVYREALLKRLQANDNDPKKAFTGKNALSKKPIYLDEAKTKTLPEKVNLTYLEEDFSIRKDISPDNFKDLKSIEKVIDQGVKRILIKRLQDYDNDPKKAFVDLEKNPIWLNKEKGIAIKRVTISGVNNAQPLHIGKDHLGKTTLNKEGKEIPVDYVSTGNNHHVAIYRDKEGNLQEQIVSFFDAVVRAQQGLPIVDKTYKQAEGWQFLFTMKQNEMFVFPNEATGFNPAEIDLLDPKNKKLISPNLFRVQKIATKDYFFRHHLETNVETDNVLKNTTWKREGLSGLKDIVKVRINHLGDIVSIGEY

SEQ ID NO: 22350 - protein, 1509 aa, unidentified; identical to SEQ ID NO: 17477
  REGION 1..1509: note = Cas Enzyme sequence

SEQ ID NO: 22351 - protein, 1521 aa, unidentified
  REGION 1..1521: note = Cas Enzyme sequence
MTKNTRNIIGLDLGTNSIGWSWIQQLISPTPTQPSEYLFNGTPIIRMSGSRIIPMPGDVTGSFERGETISKTKDRTAKRMARRMNERFQLRRERLNRVLNIMGFLPEHYARALDRYGKLNEESNTTIAWRSKEDGKNEFIFYPSFLEMASIFKEHHPDIQRIPLDWTLYYLRSKALHQAITKEELSWVLHSFNQKRGYYQSREDITEEDKTKKVEYIKGVVNSVEDTGEKAKGKKIYKVTFADGTEFTSTKSEAPLWIGRTREIIVTTSLDTSGKPKLDKEGKIIQSAKTPDEKDWTLIKIRTEATIDDSKLTVGEYIFHALLKNPETKIKGAHVSTIDRRFYINEINAILKEQEKYHEELRDKSLYEQCIKALYAQNEVRRNIIAPWSMSDMLIKDILFYHRPLKSKKSQISECSLEFHTYTDKDGATHRQGIKCIPTSHPLFQEYRIWQFIANLRIYERERFDNGKHFINEDKTSDFLTTKKKEELYEWLAEKDSVSQKTLLGHLGLKVERYHWNFPEEKTYPCGETKHLIQSRLKKANLQKAFHSLISDEQKDCFERGLWHILYSVSDYNELCKALKTFARKTEFTLEEQLLFVEAFSSCPPFKKDYGAYSKRAITKLLPLMRIGKFWHEESIDSTTKNRIEHLISGEECSGIDVRVREKVAKAGLCESIEQYQGLQQWLANYVVYNRHSEASEITKWESPDELDNYIRSFKQYSLRNPIVEQVSLETLRVVRDLWAELQKEGQTIDEIHLEMGRDLKNTAEERSRIFRRNSENEDTNFRIKLLLEEFYANEKDIKDVRPYSPSQQELLRIYEEGVWQQEKDIPQDIKDIRKRISNDKDIKDITPNDIQRYRIWMDQKYCSPYTGKTIPLSRLFTTDYEIEHVIPRSRYFDDSYNNKVICEAAVNKDKNNRLGMEYIIAAGGKTIELGNGKNVQILKEEEYVELVDKIFGNNTRKRNIMLADEITEEFSHRQLNDTRYIARFMKGILSNIVREKNTDGTLEPEETSKNLIVCSGRITDRVKQDWGLNDIWNHIITPRFERLNTKTSSNDFGEYVCKEGKRYFQTRVPLNLQKGFNKKRIDHRHHAMDAIAIACVNRSIVNYLNNAAANQTEREDLRRAVCIPERNGQTKRQLRSPWHCFARDTENALRQIVVSFKQNLRITTKATNSYECFDTASGKKIRKHQSNREHYAIRKPLHKDSVYGEVILTSIASVNLKKALLKAERILDKRLKEKIFELRKLYNYSNKQIEEHLTKVCINCPEWKNYDFKKIAVRILSNDADATHIVAIRKPLDESFDEVKINTITDTGIQKILLNHLSRYADDPKKAFSPEGIEDMNANIASLNGGKQHLPIYKVRVSEKDNGGYFPIGQKGNRPKKYVTTAQDTNLFFAVYVDSKGKRSYKTIDLRTAIECKKQGLSVAPSVNEKGDKLLFTLSPNDLVYMPSEEEEANGFSIKGNLIKEHIYKMVSANNRQCFFIPHSVADFISKGEEYNAHNKIELAEDGRSIKVHCVPLKVNRLGK

SEQ ID NO: 22352 - protein, 1511 aa, unidentified
  REGION 1..1511: note = Cas Enzyme sequence
MKKILGLDLGTNSIGWAVINSVADESVEKRNIELAGSRIIPMDAAVLGNFDSGVTKSQTAERTSYRSIRRLRERQLLRRERLHKVLQILGFLPEHYVNDIDFENHPGKIKKNTEPKLPWRKNSMGQFEFIFQDSFEAMLVDFATHQPVFVSEGKKVPYDWALYYLRKKALTEMISKEELAWIILNFNQKRGYYQLRGEEEEEQSNKLVEFYALRVVKVEATDDKKGKDTWYNVHLENGWIYRRTSNILLDWEGKVKEFIVTTDLNEDGTPKLDKYGEVKRSFRAPKEDDWTLIKKKTESDIANSHKTVGCYIYDALLQNPHQKIKGRLVRTVERKFYKEELRLILEKQLSFHPELQDRDLYRACIDALYVSNEAHKKNISGRDFVYLFIDDIIFYQRPLKTKKSLIDNCPYEENQYMDRETGEVKQAPIKCIAKSHPLFQEFRLWQFISNIRIYQRERVMDDGKLEMDVDVTPDFLKTEDDYTTLFEWLNDRKEVDQKAFLKNPQFGLKKTFTEYRWNYVEDKSYPCNETRNAILNGLQKAGVSTDFLSREVEEALWHILYSVEDKIEIESALRKFASKHNLDDSFVDVFKKLPPFKKEYGAYSAKAIKKLLPLMRMGKYWDVSNIDDKTKERIDKIVTGEWDENIHNRVREKAIKLSDIADFKGLPLWLSCYVVYNRHSEARAIAKWESPGDIDSYLRLFRQHSLRNPIVEQVITETLRTVCDIWKRIGQIDEIHVELGREIKNPADKRAKMTAQMVENENTNLRIKALLAEFINSEYEIENVRPYSPGQQEIFRIYEDTVLNSVEEIPEDISAVLKKFRESDLKKRPTKSEFLRYKLWLEQKYRSPYTGDVIPLGKLFTSAYEIEHIIPQSRYFDDSFSNKVICEAEVNKLKSNELGYEFIKNHHGQKVELGFGKIVQIFSIEAYEKFVKANYSGMNGKMKKLLMDDIPEKFIERQLNDSRYISKVVKSLLSNIVREKDLNGEYEPEAISKNVIVCTGSVTDRLKKDWGVNDVWNSIIYPRFERLNTLTGSQQFGRWENKEGKRVFQTAVPLEMQKGFSKKRIDHRHHAMDAIVIACATRNHINYLSNESASKKAKISRTDLQHLLCTKCRTDDNGNYQWIVKKPWQAFTRDIREALENITISFKQNLRVINKTTNYYVHFDESGKKVLEKQINGDSWAIRKPMHKDTVFGKVNLQKVKEVRLSLALDTPKMIVDKKLKEKVLQLYSYKYDKKRIGKYFKENVSLWKDLNLSKVAVYYFTNDSAEPLVAVRKPLDTSFNAKKIKESVTDTGIQKILLNHLSNNQDNPNLAFSLDGIDEMNRNIIVLNGGKYHQPIYKVRVCEPQGNKFNVGTTGNKISKYVEAAKGTNLFFAVYQTEGGKRNYETIPLNVIIEREKLGWTPVPENNNNGDKLLFWLSPNDLVYVPTADELNNGIRLDDIDKSRIYKMISCSGPQCFFIPQNVSNAIIPTTELGANNKAEKSWNDEMIKAVCVPIRVDRLGCITEINSPK

SEQ ID NO: 22353 - protein, 1433 aa, unidentified; identical to SEQ ID NO: 15343
  REGION 1..1433: note = Cas Enzyme sequence

SEQ ID NO: 22354 - protein, 1555 aa, unidentified
  REGION 1..1555: note = Cas Enzyme sequence
MFSQRNNPYCDLLYFSTANIENKYGKTIRVSIKKNYLWEKYFKYDTMKTIIGLDLGTNSIGWAVINSIIKEQSKRIWIEMAGSRIIPMDAAVLGDFDKGNSISQTSERTRLRGIRRLRERQLLRRERLHKVLKILGFLPKHYSKEIDFERHPGKFLVDAEPKLPWVQNEQGKYIFLFQEAFNEMLTDFAKHQPSLVSDGKRVPYDWTIYYLRKKALTKKISKEELAWILLNFNQKRGYYQLRGEEEEDNAGKSVEFYALKVVKVEATDEKKGRDVWYNVHLENGWIYRRSSNVPLDWEGQIKEFIVTTDLNPDGTPKLDKYGEVKRSFKAPKEDDWMLMKKKTEADIVNAHKTVGCYIYDTLLQQPQQKIKGRLVKTVERKFYKDELRLILQKQCAFHTELQDRALYAMCVEALYPGNEIQRKNIARRDFVYLLMNDVLFYQRPLKTKKSLIANCPYEENEYIDRETGEIKKAPIKCIAKSHPLFQEFRLWNFISNIRIYQKEKETDGALHLDVDVTAEYLKSEVDYADLFDWLNSRKEIDQKAFLKYPKFGLKKEIGNYRWNYVEDKTYPCNETRYAILSRLEKAGIDVEFLSNEREQALWHILYSVSDKQEIEKALGTFAAKNGLNESFVEAFKKIPPFKSEYGAYSAKAIKKLLPLMRCGKYWDVSLIDEATKERIENIVTGEYDEKVSLKVREKAINLSDISYFKGLPLWLACYVVYNRHSENREVVKWETPTDIDTYLASFKQHSLRNPIVEQVITETLRVVRDIWKQVGKIDEIHIELGREMKNPADKRKKMTAQMLENESANLRIKALLTEFMNPEYEIENVRPYSPSQQEILRIYEDTVLHAESQLPEEIEAILKKFNGSKVPTKSEFLRYKLWLEQKYRSPYTGELIPLGKLFTAAYEIEHIIPQSRYFDDSFSNKVICESAVNKLKDNLLGYEFIKNHHGQKVEVGFGKTVEILSVDGYERFVKDQYAKSGIKMKKLLMDDIPEQFIERQLNDSRYISKVVKGLLSNIVREKNSNGEYEPEAISKNVLVCTGSVTDRLKRDWGMNDVWNSIVYPRFERLNTLTNTQSFGHWENKNGKNVFQTELPLEYQKGFSKKRIDHRHHAMDAIVIACATRNHVNYLNNESASRNARISRYDLQRLLCDKSRIDGNGNYRWIIKKPWETFTQDVWEVLSKIVVSLKQNLRVINKTTNVYLCFDSEGNRIYKKQEVGGSWAIRKPMHKDTFFGSVNLRKVKFVRLSVALNTPDMIVDKKVKSKVAELLSYKYDKKRIEKYFKENTFFWKDLNLTKVAVYYFTEDTMEPMVAVRKPLDSTFNEKKIEESVTDTGIRKILLNHLRSKGGKAELAFSAEGIEEMNRNLLQLNDGKGHQPIYKVRVYEPRGNKFSVGVLGNKSTKWVEAAKGTNLFFAVYITEDGKRTYETIPLNLVIEREKQGLTPVPDKNDKGNELLFWLSPNDLVYLPTEEEREIGRINKPIDRGRIYKIVSFTGNRLYGVPCNVANIIVDRLEYFSLNKVELTDTKESIKEICIPIKVDRLGNITEVKYRVNE

SEQ ID NO: 22355 - protein, 1436 aa, unidentified; identical to SEQ ID NO: 17551
  REGION 1..1436: note = Cas Enzyme sequence

SEQ ID NO: 22356 - protein, 1396 aa, unidentified
  REGION 1..1396: note = Cas Enzyme sequence
MSKTILGLDLGTNSIGWALVEEAETNHESSKIIKLGVRVIPLTVDEQTNFEKGKPISTNTERTLKRGARRNLQRYKLRRENLIEILISNKIINQDTPLTEIGKNTTHQTLMLRAKSAQDKVDLVDFAKILLAINKKRGYKSSRKSKSSDEGIAIDGMTVAKILYEKNITPGQYVYESLINGNKIIPDFYRSDLRNELKKIWDKQSMFYPTLLTNDLYHAIEDKNKSQTYKILESPWKLEGLKQSGKKDEQRLERYKWRQQALSEKIELEKLSVVLQEINNEINKSSGYLGAISDRSKILYLNKITVGEYLYNQILKNPHTSLKNKVFYRQDYLDEFEQIWETQAKHYPHILTKELKEEIRDVVIFYQRKLKSQKGNVSFCQFESKQEQYVDNSTGKTKYRTIGQRVAPKSSPIFQEFKIWQNINNLNYINEKENQIIEVRNLDDYIREEIFEELNLKGPLTPTDILKIISKHIFINKISDWRCNFEKIEGNTTNKALLSIYQKIAEAEGYGFDWDKKSAKEIYEELEYIFTVIGVNKEILKFDSNSNDFDKQPYFLLWHLLYSAEDSDKASEEDRLIYGNNDTKLRKILHKKYGFKPEYAKMLSSITLEQDYGSLSTKAMRKITPFLQAGHPFAGKATNISEVGACELAGYNHSKSETADDLNRKTLKDKLELLPKNTLRNPVVEKILNQMINLVNQIIDEYGKPDEVRIELARELKKTASERDKMNREIADATRRNENIKNLLIKDFGIPNPTKNDIVRYRLWDELSVRGYKTIFTDKYIPKEKLFSKDIEIEHIIPQALLFDDSFSNKTLAYHEENQLKSNRTAYDFICQDYFLNKTDYENKVSDWYKSKSISRAKKNKLLMTYSEIPDGFIDRDLRNTQYISKKAREILLEVFKTVIPTTGSITDRLREDWGLINIMKELNLDKYRALGLTELEERFDVGSEKIKKVEVINNWTKRNDHRHHAVDALTVAFTTHNHIQYINNLNARRDTSHKKHDIIFAIEKTITERINGNIIFKEPIPNFRTVAKKEIESILVSYKAKNKVTTNNINKTKLQGKERYKKTLQTTPRGQLHKETIYGRSLRPMEKAIKINKKFSIEKLNLIIDKKERDAVLSHLSKYSNNVNIAFDTKVLKSNPILLNGEPLKEVKCFEEIFTIRKPISTDLKIDKVVDAGVRRALEERLKEFNGSSKDAFSNLEDNPIWLNKDKGVSIKNVTIIGVNSAIPLHYKKDHTGKEIISDIGEKISSDYVQTGNNHHVAIYLDKNGELQESVISFYEAVERKNQELPIVDKSYNNHLGWKFLFTMKQNEMFVFPSKDFDPTEVDLLNPENYELISRNLFRVQKIGTKDYTFRHHLETTVTNNLDFTFKRIRTPNGLKGIEKVRINHIGRIVQVGEY

SEQ ID NO: 22357 - protein, 1510 aa, unidentified
  REGION 1..1510: note = Cas Enzyme sequence
MKRILGLDLGTNSIGWALVDSEEQRILGMGSRIIPMDQGVLDTFSGGNPVETQTAARTAYRGTRRLRERALLRRERLIRVLNMMKFLPEHYASQIDFEKRLGQFFDEKEPKLAWKQNDEGRFEFIFQQSFNEMIEEFKNKGVVREDKKIPYDWTIYYLRKKALSQEIEKEELAWILLNFNQKRGYYQLRGEEEEENPNKLVEYYSLKIVDVIADEKPNSKGDIWYSLHLENGWIYRRSSKIPLFGWKDKTRDFIVTTDLNDDGTVKKDKEGIEKRSFRAPSENDWVLLKKKTESDIEKSHKTVGAYVYETLLQNPMQKVRGKLVRTIERKFYKDELKQILEKQREFHPELRDEDLYNDCVRELYRSNETYQFILSKRDFVHLFLDDILFYQRPLRSQKSAIGDCILEFKTYKDKDGNNIKEYLKVISKSNPLYQEFRIWQWLYNLKIYRKEDDEDVTLQFIANIEDKEQLFDFLSNRKSIEQKPLLEYLIKAKGLKKQVKTEAYRWNYVEDKIYPCSETKTMISTRLAKVENIPDNFFTKEIEQKLWHIIYSVTDKNEFEKALRTFAKKYDLDIASFVDNFKKIPPFKNEYGSFSEKAIKKLLPLMRLGKYWKWNDIDNNTQNRISKIITGEYDEEIKDIVREKSIALTNENDFQGLQLWLAQYLVYGRHSEADIAGKWHSVADLEKYLNEFKQHSLRNPIVEQIITETLRVVRDIWRKYGQGAENFFSEIHVELGRDMKNTADERKKIVNVVTENENTNLRIKALLMELKNNSDGKLEVENVRPYSPTQQDILKIYEEYAISTGLDNEKDEKVKEDIKKISRVAQPTTTELQRYKLWLEQKYCSPYTGKVIPLGKLFTEEYQIEHIIPKSRYYDDSFSNKVICEAAVNKLKDKCLGLEFIKNYHGQIVETGFGQKVTIFDEEAYQNFVKQHYAYNHSKRTKLLLEEIPEKMIERQMNDTRYISKFVLPLLSNLVRAKENDNGVNSKNVLPVNGKITTMLKQDWGLNDVWNDLILPRFVRMNELAKTIAFTSWNEQHQKYLPTVPLELSKGFQKKRIDHRHHAMDALVIACATRDHVNLLNNKHANTDTIRYDLQRKLRLFERVTYIDPQTKNNVTKDIPKEFKKPWDNFTVDARNELEKIIVSFKQNLRIINKATNIYTKYENGKKIKVGQKGLNWAIRKPLHKETVFAKVSLRKRKTVRLSEALKDWKKIVDKKLKQEIKRLTCQYGKFDVDTILRYFKDRKYQFGEVDVSKVKMYYFDEENAAVRKNVDTSFTEKFIQGSVTDTGIQKILLNHLEAKGNKVEIAFSPEGIEEMNKNIIQLNEGKLHLPIFKVRVYETIGNKFSVGVKGNKKDKYVEAAKGTNLFFAIYVDENGIRSYETIPLNIVIERLKQGLSVVPEKNRKEHSLLFYLSPNDLVYVPIEDERENIHAVNLDQLNNEQRKRIYKMVSCTGSECHFVPYYVASPIVNKVEYSSLNKIGRSLTGEMIKDVCIKLKVDRLGNIKGISGL

SEQ ID NO: 22358 - protein, 1153 aa, unidentified
  REGION 1..1153: note = Cas Enzyme sequence
MKNILGLDLGSSSIGWSVIRENSEEQELVAMGSRVVSLTAAELSSFTQGNGVSINSQRTQKRTQRKGYDRYQLRRTLLRNKLDTLGMLPDDSLSHLPKLQLWGLRAKAVTQRIELNELGRVLLHLNQKRGYKSIKSDFSGDKKITDYVKTVKTRYDELKEMRLTIGELFFRRLTENAFFRCKEQVYPRQAYVEEFDCIMNCQRKFYPDILTDETIRCIRDEIIYYQRPLKSCKYLVSRCEFEKRFYLNAAGKKTEAGPKVAPRTSPLFQVCRLWESINNIVVKDRRNEIVFISAEQRAALFDFLNTHEKLKGSDLLKLLGLSKTYGYRLGEQFKTGIQGNKTRVEIERALGNYPDKARLLQFNLQKESSSMVNTETGEIIPMISLSFEQEPLYRLWHVLYSIDDREQLQSVLRQKFGIDDDEVLERLSAIDLVKAGFGNKSSKAIRRILPFLQLGMNYAEACEAAGYNHSNNYTKAENEARALLDRLPAIKKNELRQPVVEKILNQMVNVVNALMEKYGRFDEIRVELARELKQSKEERSNTYKSINKNQRENEQIAKRIVEYGVPTRSRIQKYKMWEESKHCCIYCGQPVDVGDFLRGFDVEVEHIIPKSLYFDDSFANKVCSCRSCNKEKNNRTAYDYMKSKGEKALSDYVERVNTMYTNNQISKTKWQNLLTPVDKISTDFIDRQLRESQYIARKAKEILTSICYNVTATSGSVTSFLRHVWGWDTVLHDLNFDRYKKAGLTEVIEVNHRGSVIRREQIKDWSKRFDHRHHAIDALTIACTKQAYIQRLNNLRAEEGPDFNKMSLERYIQSQPHFSVAQVREAVDRILVSFRAGKRAVTPGKRYIRKNRKRISVQSVLIPRGALSEESVYGVIHVWEKDEQGHVIQKQRAVMKYPITSINREMLDKEKVVDKRIHRILSGRLAQYNDNPKEAFAKPVYIDKECRIPIRTVRCFAKPAINTLVPLKKDDKGNPVAWVNPGNNHHVAIYRDEDGKYKERTVTFWEAVDRCRVGIPAIVTQPDTIWDNILQRNDISENVLESLPDVKWQFVLSLQQNEMFILGMNEEDYRYAMDQQDYALLNKYLYRVQKLSKGDYNFRYHTETSVEDKYDGKLNLELSRQMGKLKRVSIKSLLELNPHKVHISVLGEIKEIS

SEQ ID NO: 22359 - protein, 1483 aa, unidentified
  REGION 1..1483: note = Cas Enzyme sequence
MKTILGLDLGTNSIGWAKVIVDDNENYLRDIQLGSRIIPMSQDVLGKFDKGVTESQTAIRTSIRGVRRLRERTLQRRERLHRVLHTLHCLPPHYDSAIGWDRKTPTTYGKFLNHGEPKLAWERQEDGTMQFLFMDAFHEMIADFAKYQPALVADGKKVPLDWTIYYLRKKALTQPIKKEELAWILLNFNQKRGYYQLRGEEDEEHAAKHEEYHELKVVGVEVDEAGKGDNTWYNVKLENGWIYHRQSKIPLDDWVGKVRAFIVTTEYEKDGTTPKKNKEGNVKRSFRSPNENDWGLRKKQTEHSLEASGTPVGAFIYDHLLKEPSDKIRGKFIHTIERKYYKQELAAILREQSKHHEELCSKDMLKACIEELYPNNPLHRESLLKKDMPYLLIEDLIFYQRPLKSKKSLIAECPYEAYSYVDKETGEMKRQGIKCIAKSNPYYQEFRLWEFIANLRLRNRADERDVTAEYLPHQEDYVRLFTYLNDRKEINQETLLKDFFKLKKVTIGGEKVFPIRWNYIEDKEKKYPCNATRHELLLALDRAGIEYNWLDDRDLAYRLWHLLYSVDSKDETERALRKLKDDDAFVESFLKIKPFEKEYGAYSEKAIKKLLPVMRRGSLWNEADLCPSTKERIANILQGTIDEKLKKKIGAFISSCQQVSDFQGLPEWLACYVVYGRHSEATDIQRWETPEQLLDHIHRFKQYSLRNPIVEQCILETLRTVYDIWKEAGQIDEIHVELGREMKQTAEQRAHLTEKVLRNENTNLRIKSLLMELKNNADMKDVRPHSPMQQEILRIYEEGALQTLSKDDAAFAEIMKISKMAQPSASELQRYRLWLEQKYRSPYTGKPILLSKLFTSAYQIEHIIPKKRYFDDSFSNKVICEAEVNREKGSMLAHEFIKDCGGDVIHCTTLGDVTILSEAEYKALVTELYANNNSKREKLLMEDIPQDFINRQLNDSRYISRVVMTLLSNIVRIEGEEEATSKFVIPCSGGITDKLKKDWGLNDVWNNIVYPRFERLNALTNTTDFGQWENKEGKRVFQTSVPLELQRGYQKKRIDHRHHAMDALVIACASRKIISYLNNQEANDPTKQENARTQLCIKSRIIRKPWETFTQDAYKALDNIVVSFKNYVRVINKATNYYERYHADGKKVVDEQKGEAMWAIRKPMHKDTVFGHVNLRRKAVVKLKDALENIPAICDKTLRHYIQDLQKKHFNTKQLLAHFKSINYRLNKQAVDKVEVWQYSDDKERLAATRKPLDTSFDAKRIATITDTGIQKILLNYLQAKGGDPAIAFTPEGIAEINRNIAVYNGGKQHQPILKVRIAEPMGAKYPVGETGNKGAKYVEAQKGTNLYFAIYEDEEGNRTYDTVALNVVAERLKQGLTPVPEKNEKGVALKFYLSPNDLVYVPTADELLSKVCSLDKNRIYKMVSATKSQCFFLSHRVAKTIYDKVEFEALNKMERALTGEMIKPICWKMEVDRLGRIVNIIK

SEQ ID NO: 22360 - protein, 1432 aa, unidentified
  REGION 1..1432: note = Cas Enzyme sequence
MTQKIFGIDLGTNSIGTSVRNTDLGNNLVDQLEFFSSDIFNASVSKNTNGREYSLASDRSAHRRGRRLNDSRRRKLWATLDLLIKNNLCPMAPESLEQWRTYDKKKKLFRQYPIDDKAFHSWIILDFNGDGKPDYSSPYQLRRELVSVQLDFNQAINRYKLGRALYHIAQHRGFKSSKGETIAEQEKQEDDSKKNKNNALTEENVDVVNAMKASEEKLSKGLLAYMQEHNLKTVGAAFAQLEDEGIRIRNNSEYKAIRSQHQDEIKEIFKFQKGLSEETQLLETLISEKQGVGTIFYKRPLRSQRGNVGKCTLEPNKPRCPIGHPLFEKFRAWTFINNIKAKSPDSDSAEPLPMDMRINIYNKLFLSRVKADFKFEEIRHFIEKQWGVALSKDDKTINYRDDTSVAGCPITARMIKVLGEDWENFHVLGTKERQTQGKSNNALHQVCYTAEDIWHLCYDAEDPEQVRTFAEETLGWDEKKAAELVRLWSAIPQGYAMLSQKAIRNINRMLLFGLKYSDAVLLAKLPDILELSDEDIQTIIKKAQQLEEVVNEEKRIGNIVNSLIANYKAESLEHRFADHNYEYQLDESDEREIIKHIESNIGKQRWELMDADEQISILEGVRSGYQAFFARHKRTFVELPQLGERLVELLSKEYPSVEKREWERLYHPSQIAIYRPILLDKSEQNLRLGDPNIGAIKNPTVMRTLNNLRRRVNQLLDDGVLVPSETRVVVETARELNDANAKWALEKYQKTRRDENAQIKKILEEFYSKPNGITDTDVDKARYVIEQCEEDNYKSKKEIGTYSKDIQKYKYWLEQGGQCLYTGRIISLSNLFDSNAFDLEHTIPASVSFDNSDQNMTLCEAHYNRFIKKNNIPTAMPNYEKDVTIDGKLYTAIKPRLEKWKKRIERLSRNVEYWKVQARRAQMKDRKDECTKEKLLWQMELQYWRDKLQRFTILEVTDGFKNSQLVDTRIITRHATLYLKSVFENVEVQRGSTTAEFRKILGVQSVEEKKDRTLHSHHAIDATILTTIPTAAKRERILELFYKVQEKERILKNCSGDARIGLKQDLEGLQAKLKKEVADCKLGGEISQLGNFINDKIIINHCVKDQTLTPSHKRLRRRGRVVGGKEHPIWQTGDTLRGKIHKESYYGAITQYAKDKEGNILFNDGKPKIDPTIWFVIRRELKHKKSAQDTGFVSWDDLEKVIVDKNLFKLMKEQFPDGTSFKDACEQGIYMIKKGKDQEHNIKTHRIRHVRCHTSVRSALKIKEQLNKSTKDYKQYFYAESGDLYTMCCYTNGKKKEYRPYRLYDIAQHRKAGIEDIPEFITDKKGNRLELSYKLCSGDMILLYENTPEELYDMDPVNLKQRLYRVDRFESKGSTIYLTNHLIANGEVGHSIKDYNQMPQTVRCGVNTLKFLIMGEHNDFIIKGNNIIFNHR

SEQ ID NO: 22361 - protein, 1432 aa, unidentified
  REGION 1..1432: note = Cas Enzyme sequence
MKYILGLDLGSNSIGWALIEQDFDNKQGKILGLGSRIIPIEQKILSDFKEGTTVSQTAKRTEFRGIRRLRERHLLRRERLHRVLHLLGFLPPHYDAQIDFTKRFGKFIGDSEPKLAYNNEGFIFLESFNEMVDDFKKHQPQLFYIKSNGEESKIPYDWTIYYLRKKALQEKISKEELAWIILNFNQKRGYYQLRGEEEEKSTKNVEFYSLEITDVIADTPNNKGEIWYSIHLENGWVYRRASKISLEDWKGKVRDFIVTTELNEDGSIKLDKEGKEKRSFRAPNEDDWNLLKKKTEQNITLSGKTVGEYIYDHLLQNPNQKIKGKLVRTIERKFYKEELKAILEKQVALQPELFTEELFVDCVRELYKNNEIHQNSLSSKDFVHLFLNDIIFYQRPLRSQKSNISSCSLEYRFCIDKETKQRRKTYLKVISKSNPYYQEFRVLQWLSNLKIYRKEDDKDVTSEFISSIEDKETLYEFLMSEKEVSNKSVLEFLLMKLLRETYPFAKETELKKELKKEITKYRWNYVYEEENHSKKYPMNETGYEIKKRLKEVKNIPDNFLTKDIEYQLWHIIYSVTDKYEFEKALMKFAQKHNLDAESFVENFKRIKPYPGDYGAFSEKAIKKLLPLMRFGKYWNYSDISEPVQARISDIINGVDNESIKTIVREKAEKFQLSQEADFQGLPLWMAQYIVYGIHSEVADIQRWTSPSDLEEYLKGFKQHSLRNPIVEQVVTETLRVVKDIWEYYGKGEENFFGEIHIELGRELKKTAEERNRMTREINENEETNLKVKKELQQIFENKSAENVRPYSPIQQEKYKLWLEQKERSPYTGQPIPLSKLFTDDYQIEHVIPQSRFFDDSLSNKVICEASVNAQKGAQLGLEFIKKHGGEILDIGLNKKVTVLNEKEYKELVNELFANNRGKKAKLLMEEIPEKMVERQLNDTRYISKFISQILSNIVRSPQDDDGVNSKNIIPCTGKITAALKQDWGLNDVWNDLILPRFERMNNLTQTELFTTYSEKYQKKIPTVPLEHAKGFQKKRIDHRHHALDALVVACATRSHINYMNNKHALDKHKAKEEKQNARIDLRNTLCEKKYNDNAEDKYNWTFKKPWNTFTQDVRSALEMVVVSFKQNLRVINKATNYYEKWVEEKGKKVKKKVKQEGINWAIRKPLHEQTVSGKITLERVKVGKGKILTATRKSIDSSFTEKTIASITDTGIQKILLNYLAYKGSSELAFSPEGLEELNKNIYLYNDGKPHKPIYKVRSYEKGSGRFVLGERGVKSKKYVQGAPNLYFGVYQSKGKRSYATIPLDEVIERQKQGLTSVPEHNEKGEKLLFSLSPNDLVYVPMEGEDTESIDFTNLSKEQRERIYNVNDFSSTCYFTPNRIAKAICPKEVDTQRKDNGLSGSFDTKTASINGVQIKETCIKLKIDRLGNISKA

SEQ ID NO: 22362 - protein, 1433 aa, unidentified
  REGION 1..1433: note = Cas Enzyme sequence
MKKILGLDLGCNSIGWALVNEAENTEEISSIIKLGVRVNPLTVDEMQNFEKGKSITTNADRTLKRSMRRNLQRYKLRRDTLIEVLKEHGFITDSTLLSEHGNKTTFETYRLRAKAAVEEISLEKFARVLLMINKKRGYKSSRKAKGSEDGVLIDGMDVARKLYEEGLTPGELCLQILEAGKKNLPDFYRSDLQNEFDRIWNFQKQFNPELFCDAVKEEVRGKNRSQTWAILAKFFVWSEKESVWNEKEARTEERVKEYKLVGLKRDTKGNELKLENYRWRVQALSEQLNPEIVAIVLQEINGQISASSGYLGAISDRSKQLYFNRQTVGQYLMSELEKDPNVSLRNRVFYRQDYLDEFDRIWERQAEFHEELTVELKKEIRDIIIFYQRRLKSQKGLISFCEFEKREVVVEEDGRKKNKTVGCRVIPRSHPLFQEFKIWQTLNDIEVFAWDKQSKRKKADKSSILFDNSEDALLVEGKRFLYQEEKELLAKELFVKESMKKAEVLKLLFENYQELDLNFKQIDGNHTGFALFSAYSKMIEKYGYEPVDFKKSADEIIEKLETIFTNLGWNTELLSIDLSKEDKELERQSYFRLWHLLYSFEGDNTPTGNGKLLEKIMQLCDVEKEYAVELANVSFQEDYGSLSAKAIKKILPYLKEGNQYDVACDYAGYRHSKSSLTKDEIENKILKDKLEILPKNSLRNPVVEKILNQMVNLINTLIDTYGKPDEIRVELARELKKNAKEREELTKSIARNTREHDEIRQLLRTEFGMMNVSRNDIIRYKLYEELKDNGYKTLYSNEYIPREKIFSKEIDIEHVIPQARLFDDSLSNKTLEYRAINIEKGNKTAYDFVKEKYGNDGLEKFLNRCETLFKDKRTKLRKLKMEEKDIPEGFIDRDLRNTQYISKKAFAMLNEISRRVVATTGSITDKLREDWQLVDLMKELNLPKYEKLGMVEMFEDKDGRKIKKITDWTKRNDHRHHAVDALTVAFTKDVFIQFYNNKNAAWMPASKEHANITGIKARYFENGKALAPMPLAQFRAEAKRHLENLLVSIKAKNKVITSNVNRTKNKNGENRKLQQTPRGQLHLETVYGSHRQYATKIEKVNAAFDVTKIATVSKLAYRNALLKRLEAFGNDPKKAFTGKNTLEKNPLYLDENQTEMVPEKVQTVEFETVYTIRKPIDPNLSIDKVVDVKIRSVLEKRLKEYGGDAKKAFVNLDENPIWLNEAKGISIKRVSIRGISNAQSLHEKKDKDGNLILGKEGRKIPVDFVNTGNNHHVAIYKKPVLDKVGQIVLDEEGNPKYELDEVVVSFFDAVTRANLGQPIIDKDYRRSEGWQFLFSMKQNEYFVFPNEKTGFNPKEVDLLNPENYALISPNLFRVQKFAYKNYVFRHHLETTIKDTSSTLKGITWTDFRSSKGLDKIVKVRVDHIGQIVSIGEY

SEQ ID NO: 22363 - protein, 1483 aa, unidentified
  REGION 1..1483: note = Cas Enzyme sequence
MKTILGLDLGTNSIGWAKVTVDDNENYLRDIQLGSRIIPMSQDVLGKFDKGVTESQTAIRTNFRGIRRLRERTLQRRERLHRVLHTLHCLPPHYDSAIGWDRQAPTTYGKFLNHGEPKLAWERREDGTMQFLFMDAFHEMIADFAKYQPALVANGKKVPLDWTIYYLRKKALTQAIKKEELAWILLNFNQKRGYYQLRGEEDEEHAAKHEEYHELKVVGVEADEAGKGDNTWYNVKLENGWIYRRQSKIPLDDWVGKVRAFIVTTEYEKDGTTPKKDKEGNVKRSFRSPNENDWGLRKKQTEHSLEASGIPVGAFIYDHLLKEPSDKIRGKFIHTIERKYYKQELAAILREQSKHHEELCSKDMLKACVEELYPNNPLHRESLLKKDMTYLLIEDLIFYQRPLKSKKSLIAECPYEAYSYVGKETGEVKRQGIKCIAKSNPYYQEFRLWQLIANLRLRNRSDERDVTAEHLPHQEDYVRLFTYLNDRKEINQETLLKDFFKLKKVTIGGEKVFPIRWNYIEDKEKKYPCNATRHELLLALDRAGMEHDWLDDRDLAYRLWHLLYSVDSKDETERALRKLKDDDAFVESFLKIKPFKKEYGAYSEKAIKKLLPVMRRGSLWNEADLCPSTKERIANILQGTIDEKLKKKIGAFISSCQQVSDFQGLPEWLACYVVYGRHSEATAIQRWETPEQLLAYIHKFKQYSLRNPIVEQCILETLRTVYDIWKEAGQIDEIHVELGREMKKTAEQRAHLTEKVLRNENTNLRIKSLLMELKNDADMKDVRPHSPMQQEILRIYEEGALQTLSKDDAAFAEIMKISKMAQPSASELQRYRLWLEQKYRSPYTGKPISLSKLFTSAYQIEHIIPKKRYFDDSFSNKVICEAEVNGAKGSMLAYEFIKDCGGDVIHCTALGDVTILREAEYKALVTELYANNTSKKKKLLMEDIPQEFVNRQLNDSRYISRVVMTLLSNIVRIEGEEEATSKFVIPCSGGITDKLKKDWGLNDVWNNIVYPRFERLNALTNTTDFGQWENKEGKRVFQTSVPLELQRGYQKKRIDHRHHAMDALVIACASHKIINYLNNQEANDPTKQENARKQLCIKNRIIRKPWETFTQDAYKALDNIVVSFKNYVRVINKATNYYERYHADGKKVVDEQKGEAMWAIRKPMHQGTAYGHVNLRRKAVVKLKDALENIPAICDKTLRHYIQDLQKKHFNTKQLLAHFKSINYRLNKQAVDKVEVWQYSDDKKQLAATRKPLNTSFDAKHIAAITDTGIQKILLNYLQAKGGDPAIAFTPEGIAEMNQNIAVYNGGKQHQPILKVRIAKPMGKKFPIGQTGNKAFQYVIAEEGTNLYFAIYEDEEGNRTYDTIALREVVERLKQGLTPVPEKNEKGVALKFHLSPNDLVYVPTADELLSKECSLDKNRIYKMVSSTGTDCFFVPHSVANIIYDKVEFEAKNKMGRALTGEMIKPICWKIEVDRLGHITNIIK

SEQ ID NO: 22364 - protein, 1494 aa, unidentified
  REGION 1..1494: note = Cas Enzyme sequence
MRTILGLDLGTNSIGWAKVCINDDGNYVREIKLGSRIIPMSQDTLSNFDKGVTDSPTAARTGFRGIRRIRERVLQRRERLHRVLHVMGFLPSHYEKAIGWNREEATTYGKFLDNGEPKLAWERQEDGSMRFLFMDSFHEMMADFAKCQPGLVADGRKIPLDWTLYYLRKKALTQAIKKEELAWILLNFNQKRGYYQLRGEEDEEDPTKREEYYELKVVSVEAAEEGKGGNTWYNVTLENGWIYRRQSKIELNDWTGKIRQFIVTTEYEKDGITIKKDKNGEVKRSFRAPSEDDWGLRKKRTESRLEDSGKTVGEFIYDHILSEPADKIRGNFIRTIERKFYKKELEAILREQSKYHKELKDLNTLVNCIKELYPNNKAHQDSLMKKDMIYLLITDLIFYQRPLKSKKSLIADCPYEYYEYVIKETGEIKRQGIKCIAKSNPYYQEFRLWQFIINLRLFDRTEDKEITSKYLSSMEDYTKLFTYLNDRKEINQEILLKDFFKQKKVKMGMEKEFPIRWNYIEDKEKKYPCNETRHELLAALDKAGIDHSWLDDKERFYRLWHLLYSVESKEEAEGALRKLNDNEDFVNAFLKIKPFKKEYGAYSEKAIKKLLAVMRIGTQWNEDDICEQTRNRIQSIINGDIDEKIKERMGRTFSQLSDFQGLPEWLACYVVYGRHSETTDIQRWTKPENLMAYINGFKQHSLRNPIVEQCILETLRTVHDIWKEAGHINEIHIELGRSMKSTADQRARMSKSILQNENTNLRIKSLLMELKNAKEFENVRPYSPMQQEILRIYEEGALQELTKEDDQYPEISKISQMAQPSAKELLKYRLWLDQKYCSPYTGKPISLSKLFTSAYQIEHIIPQSRYFDDSFSNKVICEAEVNQLKSNMLGYEFIKKHSGEIVHCTMVGDVKILDAKEYYNFVTEHYANNRRKKEKLLLEDIPQEFLNRQMNDSRYISKKVMALLSNIVREEGEQEAKSKFVIACSGGITDRLKHDWGLIDVWNSIVYPRFERLNKLTNTENFGRWENKEGKQVFQTSLPLELQRGFSKKRIDHRHHAMDALVIACASNNIINYLNNESAKSQEKREDLRKKLCDKNRIIRKPWETFTQDVRTALEDVVVSFKNYVRVINKATNYYEKYDKNGKKGIAEQKGQDMWAIRKPMHKETVFGQVNLRRKVTVKLKDALEKVPAICNKELRDYINNLVAKQFNKKQILAHFKSINNRLNMKSVDKVDVWKFSDEKEPMVATRKSVDTSFDAKRIATITDTGIQKILLNYLNAKDNDPNIAFTPEGIAEMNKHITEYNNGKQHQPILKVRVSEPKGAKYQVGETGNKTSKFVEAQKGTNLYFAIYEDKEGNRSYSTIPLNEVIERLKQGLSPVPDTNEKGIPLKFHLSPNDLVYVPKTDEENEIKTGQIYKFVDSSGTTANFVPHRVSNLIYNVDKKIAENFCNHEIIQNEYGIGSQQSKNQKSITGEMIKAVCWKLEVDRLGNIHKIIK

SEQ ID NO: 22365 - protein, 1375 aa, unidentified
  REGION 1..1375: note = Cas Enzyme sequence
MKKILGLDLGTTSIGWALVNEYEKEDEKSSIIRLGVRVNPLTTDEKGNFERGKAIATNSDRQQTHGARINLQRYKLRRKYLCDCLNKHGWIGSEPMYEDGKSSTFETYRLRAKAAVEEVSLHEFARILFMMNKKRGYKSNRKANDKEDGKLFDGMTVAKKLYEEHLTPAEYSLQLLNKGKRFTPEYYRSDLIEEFEKIWNEQKKYYPEILTDEFKRQLEAKTKTSTSKIFLGKYGIYSADLKGLDRKLQPIKWRVEALRQQVDKDVLAFVISDLKGQIANASGVLGAISDRSKELYFNKQTIGQYLWASLKKNPHVSVKNQPFYRQDYIDEFEKIWETQASFHKELTPELKQEIRDIIIFYQRPLKSKKGLISVCELEQCKVKVTIDGKEKEITIGPKVAPKSSPMFQEFRIWHNLNNIQLIDNERNSKRSLYEEERNLLYEELSIRDRLSKTEALRVLGKKNRQWDLNYKELEGNRTQAILFSCYNKIIMMTGHEECNFKQLKAPEIRHYIKTIFKNLGFNTGILEFDSSLNGHELEQQPMYQLWHLLYSYESDKSRTGNEALLKKLETIFGFPREYASVLAEVAFEDSYGNLSVKAIREILPHLQAGLDYSQACEEAGYKHSRRSLTKEELDEKEYKEKLELLSKNSLHNPVVEKILNQMINVINAVIDEYGKPDEIRIELARELKIGAAERENMTRSISQGNAENKRIREILEKEFALSYISRNDIIKYKLYEELKPNGYKTLYSDTYIPKDKLFSKDFDIEHIIPKARLFDDSLSNKTIEARDVNIAKSNKTAFDFISGKYGQQGIEAYKKKLYILLQGGSINKAKYNRLLMKEADIPSDFINRDLQNTRYITRKAYEILSDLVRVVTPTSGAVTSRLREDWQLVDIMKELNFEKYQKLGLTEVIEDKDGRKIKRIKDWTKRNDHRHHAMDALTIAFTKPSFIQYLNNLNARSNKGDSIYAIENKELHREDGKLCFNAPLPINEFRAEAKKHLKAVLVSIKAKNKVMTQNVNKIKTKHGVIKKVQLTPRGELHNATFYGTKKRPIIKMVKVGAALDEVTIKKVSSSFIRKALQDRLYEYNGDAKKAFTGRNSIDKNPIYIDEERKRTVPALVKTIEWEMYHPTRKLISPDLKIDKVIDKGIRDILKTRLAKFNGDVQKAFSNLDENPIYKDEAKKIILKRVSLEGVSSVIPLHTLKDRSGMPITGKDSEPVLGDSVQTSNNHHVAFYIDENGNLQDNIVSFFEAAERKSQGVPIIDKNFNHDIGWRFLFTMKQDEYFVFPNEVTGFNPSEVDLTDEANYSIISPNLYRVQKMSKASGRDYWFRHHLEAMLNDDPKLRNSMFKRIKSLKALEGIVKVRINCVGKIVAVGEYD

SEQ ID NO: 22366 - protein, 1189 aa, unidentified
  REGION 1..1189: note = Cas Enzyme sequence
  REGION 990..992: note = misc_feature - Xaa can be any naturally occurring amino acid
MLMSKHVLGLDLGVGSIGWCLIALDAQGDPAEILGMGSRVVPLNNATDAADFSIGKAFTANQERTARRTMRRGFARYQLRRYRLRRELEKVGMLPDAALIQLPLLELWELRERAATAGRRLTLPELGRVLCHINQKRGYRHVKSDAAAIVGDEGEKKKDSNSAYLAGIRANDEKLQDEHKTVGQYFAEQLRQNQSESPTGGISYRIKDQIFSRQRYIDEYDQIMAAQRVHYPDILTDAFIRMLRDEVIFMQRPLKSCKHLVSLCEFEKQERVMRIQQDDGKGGRQLVERRVKFGPKVAPKSSPLFQLCRIYEAVNNIRLIRPDGSPRDITPEERAKIVAHLQSSASLSFAALKKLLKEKALIADQLTSKSGLKGNSTRVALTAALQPYPQYHHLLDMELETRMMTVQLTDEETGEVTEREVAVVTDSYVRQPLYRLWHILYSIEERDAMRRALITQLGMKEEDLDGGLLDQLYRLDFVKPGYGNKSAKFICKLLPQLQQGLGYSEACAAVGYRHSNSPTSEEITERTLLVKIPLLQRNELRQPLVEKILNQMINLVNALKVEYGVDEVRVELARELKMSREERERMAEGNRRREKENKAIAEKIRECGLFPTKSRIRKYMLWEEAGEQCLYCGQILTLSQCLNGDDMEVEHIIPKSVLYDDSYGNKTCACRRCNKEKGNRTALEYIRAKGWEAEYVERINGLLDKKAISYSKHQRLRWLKEDIPSDFLERQLRLTQYISRQAMAILQQGIRRVSASEGGVTARLRSLWGYDDILHTLNLDRYDSMGETERVSREGETTEKLRIKDWSKRKDHRHHAIDALVVASTRQGYIQRLNRVSSESEREAMSGEIEMQKVTKIDKLSLLERWLTQRPHLSVRAVSDKVAEILISYRPGKRVVTRGRNIYLRHGKKCVQSGLLVPRGPLSKETVYGQITVNGEPQIVCKYDLHSLKAKDVDYVVDLALRKRLKELLAQHGGKEKEAFAGDVYMDEAXXXRSVRCFTGLDRGKMKAVKYDEQGDAVGFVSPRNNHHLAIYRTPKGKLEESIVTFWDAVDRARYGIPLVITYPREVMEQVLQRGDIPEAIQNLLPSSDWVFVDSLQQDEMVIIGLSDEELQRALEAQDYRKLSEHLYRVQAISSRDYYFRYHLETSVSDMRNSSGYIPKFYRIRSLKDYEKRNLRKVRVDLLGRISLL

SEQ ID NO: 22367 - protein, 1458 aa, unidentified
  REGION 1..1458: note = Cas Enzyme sequence
PMKHILGLDLGSNSIGWALVQQDFENKQGKIMAAGSRIIPMDQGILGDFEKGNTVSQTAERTFYRSARKLRSRHLLRRERLHRVLHILGFLPSHYDKQIDFSKRYGKFVDNTEPKIAYNEGKFLFMDSFQEMLADFKSHQPDLFYTKKNGEESKIPYDWTIYYLRKKALSQKISKEELAWIILNFNQKRGYYQLRGEEEAENPNKEVAYYSLMVTDVTAEAPNKKGEIWYSIQLENGWVYRRTSKIPLDDWKGKVRDFIVTTELEEDGSVKRDKDGKEKRSFRAPSEDDWNLLKKKTEQDINTSRKTVGCYIYDHILQNPNEKIKGKLVRTIERKYYKEELKAILEKQIALQPELFTDQLFADCIRELYSKNEAQQRNLAARDFVHLFVEDIIFYQRPLRSQKSTIANCSLESRSYIDKDSHTRKEAPLKVCPKSNPYYQEFRVLQWLQNLKIYEIDTDQEVTHEFIKTLEDKEQLFDFLMNQKEIDCEELLKYFLNQTYPNAKEKALKSELKKWKDTYRWNYVYDIGEKSSKKYPMNETRYELKRHLEKVANLPDDFLSSEVEYLLWHLIYSVTDKVAYEKGLKKFAQKHHLDKDSFVESFKKFKPYPSEYGSFSEKAIRKLLPLMRFGSYWDFNHIDKNTQKRIEDLITGVENEEIRTILREKAEKYQLEKETDFQDLPLWLAQYIVYNRHAEASSLEKWTSVNDLETYLNEFKQHSLRNPIVEQVVTETLRVVRDIWQQYGQGQADFFDEIHIELGRELKETAKEREELSKQNQKNEDTNLRIKALLAELGEDNTIENVRPYSLMQQELLKIYEEGVFSSSMEIEEEIEKIHKKASPSKTELQRYKLWLEQKYKSPYTGQIISLKRLFTEDYEIEHIIPQSRYYDDSLSNKVICESAVNKLKGNQLGLEFIKNHYGEKVHAAGKEVSILTEEQYKEFVKNHYANNSGKMKKLLLEDIPEKMVARQMNDTRYISKYISEILSRIVRSDERDEGVNSKNIILCTGKITSALKQDWGVNDVWNDLILPRFERMNALTQSTLFTTYNEKYQKYLPTVPMEYSNGFQKKRIDHRHHAMDAIIIACATREHINYINNQHALEKGKSKQEKQKSRIDLRTILCEKKYNDNAEENYSWIFEKPWAHFTQEVRTALEGIVVSFKQNLRVINKATNYYERWVEENGKYIKKMVKQEGTNWAIRKPLHKETVSGKITLEIEKVSKGKILTATRKAIDSTFTEKVIEGITDTGIQKILLNYLKFKKSPEIAFSPEGLEELNKNIALYNDGKPHKPIRKVRIFEQGSKFPLGEAGNKATKYVEAAKGTNLYFGIYQGKDKRSFATIPLNEVIERQKQGLPSVPEYNEKGDPLLFSLSPNDLVYVPVEGEIIEDIDFQNLSNEQKERIYKTVSFTGNQCFFVKQTVSASIVNKMEYSPLNKMERSITGIMVKEVCIKLKVDRLGNISKA

SEQ ID NO: 22368 - protein, 1433 aa, unidentified; identical to SEQ ID NO: 15353
  REGION 1..1433: note = Cas Enzyme sequence

SEQ ID NO: 22369 - protein, 1380 aa, unidentified
  REGION 1..1380: note = Cas Enzyme sequence
MKKILGLDLGTTSIGWALVNECENEDEKSSIIRLGVRVNPLTTDEKGNFERGKAITTNSDRQQTHGARINLQRYKLRRKYLCDCLNKHGWIGSEPMYEDGKSSTFETYMLRAKAAVEEVSLHEFARVLFMMNKKRGYKSNRKANDKEEGKLFDGMSVAKKLYEAHLTPAEYSLQLLNKGKRFTPEYYRSDLVEEFEKIWNEQKKYYPEILTDEFKRQLEAKTKTSTSKIFLGKYGIYSADLKGLDRKLQPVKWRVEALRQQVDKDVLAFVISDLKGQIANTSGLLGAISDRSKELYFNKQTIGQYLWASLKENPHVSVKNQPFYRQDYIDEFEKIWETQASFHKELTPELKQEIRDIIIFYQRPLKSKKGLISVCELEQRKVKVTIDGKEKEITIGPKVAPKSSPMFQEFRIWHNLNNIQLIDNERNSKRSLYEEERNLLYEELSIRDRLNKAEALRVLGKKNRQWDLNYKELEGNRTQATLFSYYNKIIMMTGHEECNIKQLKAPEIRHYIKTIFKNLGFNTGILEFDSSLNGHELEQQPMYQLWHLLYSYESDKSRTGNEALLKKLKTIFGFPREYASVLAEVAFEDSYGNLSVKAIREILPHLQAGLDYSQACEEAGYKHSRRSLTKEELDEKEYKEKLELLSKNSLHNPVVEKILNQMINVINAVIDEYGKPDEIRIELARELKIGAAERENMTRSISQGNAENKRIREILEKEFALSYISRNDIIKYKLYEELKPNGYKTLYSDTYIPKDKLFSKDFDIEHIIPKARLFDDSLSNKTIEARDVNIAKSNKTAFDFISGKYGQQGIEAYKKKLYILLQGGSINKAKYNRLLMKEADIPSDFINRDLQNTRYITRKAYEILSDLVRVVTPTSGAVTSRLREDWQLVDIMKELNFEKYQKLGLTEVIEDKDGRKIKRIKDWTKRNDHRHHAMDALTIAFTKPSFIQYLNNLNARSNKGDSIYAIENKELHREDGKLCFNAPLPINEFRAEAKKHLKAVLVSIKAKNKVMTQNVNKIKTKHGVIKKVQLTPRGELHNATFYGTKKRPIIKMVKVGAALDEVTIKKVSSSFIRKALQDRLYEYNGDAKKAFTGRNSIDKNPIYIDEERKRTVPALVKTIEWEMYHPTRKLILPDLKIDKVIDKGIRDILKTRLAKFNGDVQKAFSNLDENPIYKDEAKKIILKRVSLEGVSSVIPLHTLKDRSGMPITGKDSEPVLGDYVQTSNNHHVAFYIDENGNLQDNIVSFFEAAERKSQGVPIIDKNFNHDIGWRFLFTMKQNEYFVFPNEVTGFNPSEVDLMDEANYDIISPNLYRVQKMSRVVYGKSIIRDYVFRHHLETTVEVNANLKGLAYKQLKSLSYLEGIVKVRINCIGKIVAVGEYD

SEQ ID NO: 22370 - protein, 1405 aa, unidentified
  REGION 1..1405: note = Cas Enzyme sequence
MNTTLGLDLGTNSIGWAIRDTSEKDNQIIKKGVLTFDKGVGEEKGIEFPKVKKRTESRGKRRNYQAEKYRKWELLEFLIGKNMCPLTLVELDQWRKYTKGQPRQYPKTKEFIEWLRFDFNGDGKPDFHLFSKDRHESYYIFRTMAISDDEASKKVFADNPHILGRVFYQLVQRRGFKGRDEEEAKTMLEGSKKTGTPGRNEIEDFIKEYKSLGAALYHFQKETGNRIRERYNLRKDYENELKLICEVQDLDQNFYNKLQKAIIWQRPLRTQKGLIGICTYERNKKRAPVSHPLYEEYRTWVFINNLKIKQPEGWELEDYLQQKIYTLFYKASNDFKLTSIINQVKKDGAKMESRFKERPKTKVLSAKLLNSFQEFLGDNWKDEYKWNSINKRPSRPTKKNNNHYSFEDIWHILFTFDSQEKLEEFGRTKLNLSNEEALKFSKIKLQQGYATLSLSAIKKIIPYLRKGIIYSKAVYLANIHKVLGKEEITDESIRYFLSEIDKVIDETDTEKRLNNVVNSLIQDEFIKFDSYTIEDDRELDASEKRLVNQKLLDELGIKTWEEYKQEEKDFATQYVSERFREYLKNRKSGFLEQPRLHDRIFHWVQEMYDIPLENQKHLWHPSEQEKYPNAEEYHEIELKGNTIYIKDSELTTFLHRNPRAEQEAVSLKLLGSPEPISKGFKNPMALKTLYNLRHLLNFLLQTNQIDEDTRIVVEIARELNDANKRKAIEKWQAERERENIAYKETIDEINKECNTNFDTQNMTLIHKIRLWEEQNRICLYTGNPISMCDLLDGNKYDFEHTIPASLSFDNELKNLTISETTFNRTIKKKQIPTQLPNYKETVTLNGREYPAIQPRIQFLKDKVEHYEDLFDDWLKKTKYASTKEYKDYCIQMRHYIKFDLDYWKQKLDTFTIEEYKAGWKNSQLRDTQTMTKYALPYLKTVFRKVEVQKGNVVNAFKEIYSIKLSSEKKDRTKHSHHAIDAAILTLIPKFSLRDSILEKYNEEKDNYTGKTYHEEPKDWDNFKPSYILNFEKETFINNQPEFKTLTPTFKKVRKRGKIQYVTFTDQNGKKHFKLDANGNKIPLIAKGDSIRGQLHGESFYGAIKQPKRDDDNKILFDEEGKMILDETIFLVIRKDLIYKKDANSSGFTSIKEITEKIVDKAVGEIIEKQVNTEIANGGNLKSALEKGIWMLNKKDEKVNKIRHIRCFESLKYETAAKVHEHDFESEKEYKRTTLAQNGENVFCLFYKGKVAGKEERTINIIGIFDLAKMGIRDEEDLYGIPLFSATEVGRGKKKTTIPLYHILKAGQKVIFYKEDLTELKELSESELSERLYKAYQFESDGRIKLKHHLIAGSNTEIKKEFKEANKFPFDNSYKPLLRLSSSNWNFAIEDKDFEMNLDGSIKFNF

SEQ ID NO: 22371 - protein, 1532 aa, unidentified
  REGION 1..1532: note = Cas Enzyme sequence
MKQILGLDLGTNSIGWALINQNFDNKEGNITGLGTRVIPMGQDVLGKFDAGVSISQTAERTHYRGVRRLYQRDNLRRDRLHRALNVLGFLPEHYANQIDFEKHLGQFKKDEEPKLNYYKNSLGKHEFLFKESFDKMILDFKKKGQDIKIPYDWTIYYLRKRALSMPVTKQELAWILLNFNQKRGYYQLRGEEEEISKNKLEEFYALKVAEVQETEDSNTRGIWYNVILENGWIYRRQSEEPLFDWKDKIKEFIVTTTLEKDGTVKKDKYGNEKRSFRAVDSEKDWIAIKKKTENDIIDSHKTVGEYIYETLLSNPTQKIRGKLVRTIERKFYREELDAILKQQISFHPELQLKNGFYEKCVQELYPRNEAHQQNIAKQDFRYLFVDDIIFYQRPLKSKKSNISDCPYESRVYRDENGELVKNPLKAIPKSNPLFQEFRLWQFLQNLKIYELEESGDNDVTASFLSNIENQVALFNFLNDRQEIDQKSFLKYFNLSEKTHRWNYVTDKKYPCNETKGQIKSRLSKVKDIDIEKCLTSGFIKSLWHIIYSVTDKNEFEKALGTFAEKNGLDVGSFVENFKKFPPFESSYGSYSEKAIKKLLTVMRVGKYWSGEEVDSKVKNRVASILKRLEAIGFDKEKLDSIQDDDIPKRLLKSFINSKSSSLSGLNTYQACYAIYNRHSEVSDIKQWKQPSDITDYLNQFKQHSLRNPIVEQITLETLRVVRDIWEHYGTFKTVDEEKIYDRLFDEIHVELGREMKNDKKTRERISKSITEKENTNERIKALLQEIKDDPEVRDDVRPFSPSHQEILKLYEEGVYDNPDADYNKVTSDEIEKIRNNTSPSRSELTRYKLWLEQGYISPYTGKPIPLSKLFSTDYQIEHIIPQSRYFDNSLSNKIICESAVNDEKGNETAYSFLKNRGGEIIDLGQGNSVPLFSLGNYENHCKHYFKKNKSKLTKLLSEDIPEGFINRQLNDSRYISKLIKGLLSNIVREDGEQEATSKHLVPVNGAITSKLKQDWGLNDKWNELIAPRFMRLNEMTNSQDFGFWDKDINAFRVQVPDELAKGFSKKRIDHRHHALDALVIACTTKDHINYITSLNTSRKNYSLVSKLRATKEKQIKDGKTGELKTITVAKAYHQPWPKFPVEAKEALETTVVSFKQNLRVINKTNNKTQQWVRKNGGLKKELVKQTEGQNWAIRKPLHKETVSGKVLLKREKGLVSMNSAIDSWKMIVDKSIKNVISDKIKEFNGDLKKVKKHFKTAPLETEGKIINKIAIYENIEAFATRVELTEKFTRKQLESITDSGIQKILENHLKNYLDENGKERFDLAFNAEGLDEMNKNIQSLNNGKRHQPIRKVRIYEVGNKFSVGEEGTKSTKYVEAAKGTNLFFAIYWDEEKKKRNYETIPLEQVIAWQKEEAVLPKEQRTGVPIDHKKGKFLFSLSPNDLVYVPSDEEINNNSLVDISNLSKIQKSNIYKAVSSSTSQCFFIKSEVASTIWNKKEYSALNKMERDIDGNMIKDKCWKLKMDKLGNIIKVIK

SEQ ID NO: 22372 - protein, 1461 aa, unidentified
  REGION 1..1461: note = Cas Enzyme sequence
MKRILGLDLGSNSIGWAFVQQDFENKQGKIIAAGSRIIPMDQKMLSNFEEGTTVSQTAERTTYRSMRRLRERHLLRRERLHRVLHILGFLPPHYDSQIDFTKRFGKFIDNAEPKIAYNNGNFIFMNSFNEMIEDFKKHQPQLFYKKSNGEESKIPYDWTIYYLRKKALSQKITQQELAWLILHFNQKRGYYQLRGEEETEGNDMEIISSKVLSVIKKNKDKKYDKYWYDITLENGLVYKAAFYNDLVYSWIGQEREFVVKRTLLKNGDEKIELSYLPTFDEIAKMDKKQQDKFYQKIKVKTESNIGNKTVGAYIYDHLLQNPNQKIKGKLVRTIERKYYKDELKAILAKQIALQPEFFTENLLADCIRELYRKNQTQQQNLLSKDFLHLFVEDIIFYQRPLRSKKSTIANCPLEKRSYIDKETNERKDVPIKVCAKSNPYYQEFRVLQWLQNLRIYEIETDREVTAEFIGTAQDYEALFNFLMSQKEIDNEGLLKYFLLTKNPQIKDKAAKSELKKWLTTYRWNYVYDVADNSSKKYPMNETGYELQRYLQKVEGLPANFLTFDITYQLWHLLYSVKDKVEFEKALKKFAQKYQLNEASFVDSFKNFKPYPNEYGSFSEKAIKKMLPLMRFGNHWDFNHIDVHTQKRIDDLINGVANEDIRTIIREKAEKYQLNSETCFQGLPLWLAQYIVYNRHAEATDIEKWTSVSDLEAYLEDFKQHSLRNPIVEQVVTETLRVVRDIWQQYGGGQANFFDEIHIELGRELKNTSKERERLSKQNQENENTNLRIKKLLAELKEDASIQNVRPYSLVQHDLLKIYEEGVFSSTDEIDEDIQKIRKKAEPNKTELQRYKLWLEQKYRSPYTGEVISLTKLFTEEYEIEHIIPQSRYYDDSLSNKVICESAVNKLKTNQLGLEFIQNHHGEKVRIAGNKEVTIFTEEQYKEFVKKYYANNLPKQQKLLLNDIPEKMVARQMNDTRYISKYVSEILSKIVRSDEKDEGVNSKNVIPCTGKITTALKQDWGLNDVWNELILPRFERMNQLTQTQLFTSYNDRLQKNLPTVPIKYSQGFQKKRIDHRHHAMDALVIACATREHINYMNNQHALDKSKDKKEKQQSRIDLRTILCEKKNNNWQFKKPWGTFTQEAKEALEHIVVSFKQNLRVINKATNYYEKWEEKNGVLVKKKVKQEGTNWAIRKPLHEETFSGKISLNREKVGKGNILTATRKAVDSSFDVKKISKITDTGIQKILLNYLKYKGSPEVAFSAEGLEELNKNIAKYNDGKKHQPIYKVRIFEEGSKFPLGETGAKATKYVEAAKGTNLFFGVYQGKGKRTYATIPLNEVIERQKQGLPSVPGRNEKGEPLLFSLSPNDLVYVPIEGEIIETIDFNNLSKEQKERIYKTVSFTGNECHFVKSTIASLIKSYDAKSKIGELGSLNKLEVTISGDSRIKEVCIKLKVDRLGNITKA

SEQ ID NO: 22373 - protein, 1190 aa, unidentified
  REGION 1..1190: note = Cas Enzyme sequence
MSKHVLGLDLGVGSIGWCLIALDAQGDPAEILGMGSRVVPLNNATDAADFSIGKAFTANQERTARRTMRRGFARYQLRRYRLRRELEKVGMLPDAALIQLPLLELWELRERAATAGECLTLPELGRVLCHINQKRGYRHVKSDAAAIVGDEGEKKKDSNSAYLAGIRANDEKLQAEHKTVGQYFAEQLRQNQSESPTGGISYRIKDQIFSRQRYIDEYDQIMAAQRVHYPDILTDEFIQMLRDEVIFMQRPLKSCKHLVSLCEFEKQEKVMRVQQDDGEGGRQLVERKVKFGPKVAPKSSPLFQLCRIYEAVNNIRLTRPDGSPRDLTPEERAKIVAHLQSSASLSFAALKKLLKEKALIADQLTTKSGLKGNSTRVALATPLQPYSQYHHLLDMELETRMMTVQLTDEETGEVTEREVAVVTDSYVRQPLYRLWHILYSIEERDAMRRALITQLGMKEEDLDGGLLDQLYRLDFVKPGYGNKSAKFICKLLPQLQQGLGYSEACAAVGYRHSNSPTSEEITERTLLEKIPLLQRNELRQPLVEKILNQMINLVNVLKAEYGVDEVRVELARELKMSREERERMAEGNRRREKENKAIAEKIRECGLFPTKSRIRKYMLWEEAGEKCLYCGQILTLSQCLNGDDMEVEHIIPKSVLYDDSYGNKTCACRRCNKEKGNRTALEYIRAKGWEDEYMERINGLLDKKAISYSKHQRLRWLKEDIPSDFLERQLRLTQYISRQAMAILQQGIRRVSASEGGVTARLRSLWGYDDILHTLNLDRYDSMGETERVSREGETTEKLRIKDWSKRKDHRHHAIDALVVASTRQGYIQRLNRVSSESEREAMSGEIEVQKATKTDKLSLLERWLTQRPHLSVRAVSDKVAEILISYRPGKRVVTRGRNIYLRHGKKCVQSGLLVPRGPLSKETVYGQITINGEPQIVCKYDLHSLKAKDVDYVVDLALRKRLKELLAQHGGKEKEAFAGDVYMDEVGTQGPIRSVRCFTGLDRAKMKAVKYDEQGDAVGFVSPRNNHHLAIYRTPKGKLVESIVTFWDAVDRARYGIPLVITHPREVMEQVLQRGDVPESVLSLLPPSDWVFVDSLQQDEMVIIGLSDEELQLALEAQDYRKLSEHLYRVQKLSSLYYVFRYHLETSVSDEKNTSGRIPKFYRIKSFKAYEENNVHKVRVDLLGRISLL

SEQ ID NO: 22374 - protein, 1426 aa, unidentified
  REGION 1..1426: note = Cas Enzyme sequence
MKNILGLDLGTTSISFAHIVEDENKQKSEIKELGVRIVSLTTDEQSDFEKGKSITTNANRTLKHGARLNLDRYQQRRKYLIDLLQKANLITSSSILAENGKNTTHSTWQLRAKAVTERVEKEEFARVLLAINKKRGYKSSRKAKTEDEGQAIDGMAIAKRLYDENLTPGQLSLQLLQQNKKLLPDFYRSDLQREFDLVWNFQKQFYPDILTDSFYKELQGKGKDATSKAFSKRYHFDTAENKGSKESVRLQAYQWRAEAIFKQLSKEEVAYVLTEINNNLSNASGYLGAISDRSKELYFNRQTVGQYLYAQLQENRHNSLKNKVFYRQDYLDEFERIWETQASFHKELTDELKKQIRDVVIFYQRKLKSQKGLISFCEFESKEIEIEKDGKTITKSIGARVVPKSSPLFQEFKIWQILNNVTCKRKGIRKKKSSAKSTELDLFNESSQAIFSLDMECKQLLFDELNLKGDLKSDKVLKLLGYSPQEWEINYNQLEGNRTQKALYEAYLKIVEMEAHDVKDILQIKSAKDDWSLDESPLSASEIKEKVKDIFQALGICTKILYFDPLLPVKEFEKQDSYQLWHLLYSYESDDSTSGNETLYRILEKKYAFKREHARILANVALQDDYGSLSTKAIRKIYPYIKENQYSKACELAGYKHSKLSLTTEELEARELKNIIPLLKKNALRNPVVEKILNQMINVVNALIEKNSERDAEGKITKYFHFDEIRIELARELKKNAQERYEMTQNINKAKLEHQKISEILQKQFGIKNPTKSDIIRYRLYQELEHNGYKELYTNAPIARDMLFSKNIEIEHIVPKARVFDDSFSNKTLTFHRINSDKGESTAFDYITSLNSEEELNQYLTRVENAYKTKSISPAKYKNLLKKASEIGDGFINRDLRDTQYIAKKAKEILFQVTKNVLSTSGSITDRLREDWGLVDVMKELNMPKYQSLGLTEVEERKDGNKVTVIKNWTKRNDHRHHAMDALTVAFTKPSYIQYLNHLNARKDENNKNYSVILAIEEKETIKVPTNNGKNKRVFIEPIPNFRQVAKKHLEEIFISHKTKNKVVTKNVNKPAGTDKQQITLTPRGQLHKETIYGKYQYYVNKEEKVGVKFDERTIAKVSNPLYREALLKRLQANDNDPKKAFTGKNALSKKPIYLDEAKTKTLPEKVNLTYLEEDFSIRKDISPDNFKDLKSIEKVIDQGVKRILIKRLQAYGNDPKKAFVDLEKNPIWLNKEKGIAIKRVTISGVSNAQPLHIGKDHLGKTTLNKEGNEIPVDYVSTGNNHHVAIYRDKEGNLQEQIVSFFDAVVRAQQGLPIIDKTYKQAEGWQFLFTMKQNEMFVFPNATTGFNPAEIDLLDPKNKKLISPNLFRVQKIATKDYFFRHHLETNVETDNVLKNTTWKREGLSGLKDIVKVRINHLGDIVSIGEY

SEQ ID NO: 22375 - protein, 1375 aa, unidentified
  REGION 1..1375: note = Cas Enzyme sequence
MKKILGLDLGTTSIGWALVYESENADEKSSIVRLGVRVNPLSVDEKGNFEKGKSITTNADRQQTHGARINLQRYKLRRENLKDCLQKQGWIGTEALYEEGKTSTFETYMLRAKAAEEEISLHELCRVLFMLNKKRGYKSNRKANNKEDGKLFDGMTVAKKLYEEHLTPAEYSFQLLSSGKKFKQEYYRSDLKEEFDRIWNEQQKYYPEILTDDFKQQLQGKSKGNTSKIFLGKYGIYSADLKGLDRKLQPLKWRVEALKQKVDKEVLAFVISDLNGQIASTSGLLGAISDRSKELYFNKQTVGQYLWTSLKESPHVSIKNKPFYRQDYLDEFEKIWETQATYHKELTPELKQEIRDIIIFYQRPLKSKKGLISVCELEQRKVKVTIDGKEKEISIGPKVAPKSSPMFQEFRIWQNLNNILLIDKGNNSNRPLYEEERNLLYEELSVKEKLSKAEALKVLNKNSKQWDLNYKEIEGNRTQAVLYDCYNRIIGMTGHEECNFKKLKASEIRSDVQTIFTSLGFNTDILEFDSSLTGHELERQPSYQLWHLLYSYESDNSRTGNDALLRKLETAFSIPKEYAAVLSDVVFEDSYGNLSVKAMRNILPHLQAGLDYSQACEEAGYKHSRRSLTKNELDQKEYKEKLELLPKSSLHNPVVEKILNQMINVINAVIDEYGKPDEIRIELARELKIGAAERENMTRSINQGNAENKRIREILEKEFALSYISRNDIIKYKLYEELKSNGFKTLYSDTYISKDKLFLKDFDIEHIIPKARLFDDSLSNKTIEARDVNIAKSNKTAFDFISEKYDQQGIEAYKKKLDILLQDGSISKAKYNRLLMKEADIPSGFIDRDLRDTQYIAKKAYEILSDLVRNVTPTTGAVTSRLREDWQLVDVMKELNFEKYQKLGLVEVIEDRDGRKIKRIKDWTKRNDHRHHAMDALTIAFTKPSYIQYLNNLNARSDKNSSIYGIENKELHREDNKLRFNAPLPINEFRAEARRHLKSILVSVKAKNKVMTQNVNVIKTKHGVIKKVQLTPRGELHNATFYGTKKRPIIKMVKVGAALDEVTIKKVSSSFIREALLDRLHEYNGDAKKAFTGRNSIDKNPIYIDEEHKKTVPALVKTIEWEMYHPTRKLISPDLKIDKVIDKGIREILKTRLAKFNGDAQKAFSNLDENPIYKDEAKKITLKRVSLEGVSSVIPLHTFKDREGKPVVGKDGKPVLGDYVQTSNNHHIAFYMDENGNLQDNVVSFFEAAERKSQGVPVIDKNYNHDKGWHFLFTMKQNEYFVFPNEVTGFNPSEVDLTDEANYSIISPNLYRVQKMSKASGRDYWFRHHLEAMLNDDPKLRNSMFKRIKSLKALEGIVKVRINCVGKIVAVGEYD

SEQ ID NO: 22376 - protein, 1190 aa, unidentified
  REGION 1..1190: note = Cas Enzyme sequence
MSKHVLGLDLGVGSIGWCLIALDVQGDPAEILGMGSRVVPLNNATDAADFSIGKAFTANQERTARRTMRRGFARYHLRRYRLRRELEKVGMLPDAALIQLPLMELWELRERAATAGECLTLPELGRVLCHINQKRGYRHVKSDAAAIVGDEGEKKKDSNSAYLAGIRANDEKLQDEHKTVGQYFAEQLRQDQSESPTGGISYRIKDQIFSRQRYIDEYDQIMAAQRVHYPDILTDEFIRMLRDEVIFMQRPLKSCKHLVSLCEFEKQEKVMRVQQDDGKGGRQLVERKVKFGPKVAPKPSPLFQLCRIYEAVNNIRLTRPDGSPRDITPEERVKIVAHLQSSASLSFAALKKLLKEKALIADQLTSKSGLKGNTTRVALAAALQPYPQYHRLLDMELETRMMTVQLTDEETGEVTEREVAVVTDSYVHQPLYRLWHILYSIEERDAMRRALITQLGMKEEDLDGGLLDQLYRLDFVKPGYGNKSAKFICKLLPQLQQGLGYSEACAAVGYRHSNSPTSEEITERTLLEKIPLLQRNELRQPLVEKILNQMINLVNALKAEYGIDEVRVELARELKMSREERERMAEGNRRREKENKAIAEKIRECGLFPTKSRIRKYMLWEEAGEQCLYCGQILTLSQCLNGDDMEVEHIIPKSVLYDDSYGNKTCACRRCNKEKGNRTALGYIRAKGWEDEYMERINGLLDKKAISYSKHQRLRWLKEDIPSDFLERQLRLTQYISRQAMAILQQGIRRVSASEGGVTARLRSLWGYDDILHTLNLDRYDSMGETERVSREGETTEKLRIKDWSKRKDHRHHAIDALVVASTRQGYIQRLNRVSSESEREAMSGEIEMQKVTKTDKLSLLERWLTQRPHLSVRAVSDKVAEILISYRPGKRVVTRGRNIYLRHGKKCVQSGLLVPRGPLSKETVYGQITVNGEPQIVCKYDLHSLKAKDVDYVVDLALRKRLKELLAQHGGKEKEAFAGDVYMDEAGTQGPIRSVRCFTGLDRGKMKAVKYDEQGDAVGFVSTQNNHHLAIYRTPKGKLVESIVTFWDAVDRARYGIPLVITHPREVMEQVLQRGDIPESVLSLLPPSDWVFVDSLQQDEMVIIGLSDEELQRALEVQDYRKLSEHLYRVQKVSSLYYVFRYHLETSVTDDKNTLGRIPKFHRVRSLADYEKRNIRKVRVDLLGRISLL

SEQ ID NO: 22377 - protein, 1045 aa, unidentified
  REGION 1..1045: note = Cas Enzyme sequence
MSSGYVMGIDIGVASIGWSVVEPGSEERPGRIVRLGTHLFEPGVDGTQTAIEQGKDEPKGAARRGARQVRRQLWRRAHRKRKLLFALMKHGIMPHATVPDGAAIDAYIKALDSRLRAAWCRAGDHQAHQIMPYLIRSAGVQRKITLEEFGRALYHLAQRRGFLSNRKAKKKKDEDTSQVKAEINELQSLIDRHVPATLGAYLASLNPDEQRLRDRWTARSMYLHEFEALWTEQSRHHRELTDEAKAAIHRAIFHQRPLKSQAHLIGRCSLEPGRKRAPLAHREFQYYRVLQGVNHLTIAPPGEAARKLDAAQRKVLTDALLAQGDLTIAKVRTLLKLPKGTDIAGERGEEEKKIVGHRTDAKLRDAIGPRFDAMSDRERDQLVLDLRSFRETEPLIGRLKSHWGLSDEQARKVADADLEEGYASYSLAAIRRLIPHLERGLSVSEARKAEYPESFRATQVHDLLPPVTDVMGDLRNPSVMRALTEARKVVNAIIRRYGKPEKIHVELARDLKHGRDRRAAITKQIRQREKQHADAKHRILAEIKGYEPTRIDREKVLLADECDWRCPYTGKKFGMKELIGEHPQVDVEHIWPFSRSFDNSFMNKTLCWHDENRRVKRGRTPYEAYSASPERYQEILGRVLAFKSDRRTVSEKFRRFTAEAIDEDFTNRHLSDTRYIARAVSEYLGVLYGGRTDADGKQRIVACSGGLTSWLRREWGLDALLSPTGDDAEAEKNRIDHRHHAVDALVVALTTPRTQAMLQAAAARQEQEGRFRLFGRIEPLWSAFPREAKAAVEAIVVSHRQQRAVSGKLHAESNYSKPIHGGHRIRKELHKLTRNEVSRIVDPRCRALVEAQLEKLGVDDPAKAFSLRENCPVIKGRDGVERRLRRVRLFSTASPTIVGQNARIRYVEPDSNHHCIVWAKRTKEGEEGPWEFEPVRLLDAYDRVCRGLPVVNRDGGSDRIFKFSVSINEFIEMDDPDSGGRQLYRIKKTSLREIGVQLHHDARTVDEVRKAGDLNKYRISPSALKSRNARKVFVNHLGEVSGAGG

SEQ ID NO: 22378 - protein, 1426 aa, unidentified
  REGION 1..1426: note = Cas Enzyme sequence
MKNILGLDLGTTSISFAHIVEDENKEKSEIKELGVRIVSLTTDEQSDFEKGKSITTNANRTLKHGARLNLDRYQQRRKFLIDLLQKANLITSSSILAENGKNTTHSTWQLRAKAVTERIEKEEFARVLLAINKKRGYKSSRKAKTEDEGQAIDGMAIAKRLYDENLTPGQLSLQLLQQNKKLLPDFYRSDLQREFDLVWNFQKQFYPDILTDSFYKELQGKGKDATSKAFSKRYHFDTAENKGSKESVRLQAYQWRAEAMSKQLSKEEVAYVLTEINNNLNNASGYLGAISDRSKELYFNRQTVGQYLYAQLQENKHNSLKNKVFYRQDYLDEFERIWETQASFHKELTEELKKQIRDVVIFYQRKLKSQKGLISFCEFESKEIEIEKDGKTITKSIGARVVPKSSPLFQEFKIWQILNNVTCKRKGIRKKKSSAKSTELDLFNEPSQTIFSLDMECKQLLFDELNLKGDLKSDKVLKLLGYSPQEWEINYNQLEGNRTQKALYEAYLKIVEMEVHDVKDILQIKSAKDDWSLDESPLSASEIKEKVKDIFQALGICTKILYFDPLLPVKEFEKQDSYQLWHLLYSYESDDSTSGNETLYRILEKKYAFKREHATILANVALQDDYGNLSTKAIRKLYPYIKENQYSTACEKAGYKHSKLSLTTEELEARELKNIIPLLKKNALRNPVVEKILNQMINVVNALIEKNSERDAEGKITKYFHFDEIRIELARELKKNAQERYEMTQNINKAKLEHQKISEILQKQFGIKNPTKSDIIRYRLYQELEHNGYKELYTNAPIARDMLFSKNIEIEHIVPKARVFDDSFSNKTLTFHRINSDKGESTAFDYITSLNSEEELNQYLTRVENAYKTKSISPTKYKNLLKKASEIGDGFINRDLRDTQYIAKKAKEILFQVTKNVLSTSGSITDRLREDWGLVDVMKELNMPKYQSLGLTEVEERKDGNKVTVIKNWTKRNDHRHHAMDALTVAFTKPSYIQYLNHLNARKDENNKNYSVILAIEEKETIKVPTNNGKNKRVFIEPIPNFRQVAKKHLEEIFISHKAKNKVVTKNINKPAGTDKQQITLTPRGQLHKETVYGKYQYYVNKEEKIGVKFDKETIAKVSNPLYREALLKRLQANDNDPKKAFAGKNALSKNPIYLDESKTKTLPEKVNLTYLEEDFSIRKDISPDNFKDLKSIEKVIDQGVKRILIKRLQAYGNDPKKAFVDLEKNPIWLNKEKGIAIKRVTISGVNNAQPLHIGKDHLGKTTLNKEGKEIPVDYVSTGNNHHVAIYRDKEGNLQEQIVSFFEAVVRAQQGLPIVDKTYKQAEGWQFLFTMKQNEMFVFPNEATGFNPTEIDLLDPKNKKQISPNLFRVQKIATKDYFFRHHLETNVETDNILKNVTWKREGLSGLKDIVKVRMNHLGDIVSIGEY

SEQ ID NO: 22379 - protein, 1253 aa, unidentified
  REGION 1..1253: note = Cas Enzyme sequence
LYNDNLTPGQFVYNLLKEGKRKVPDFYRSDLYNELEIIWDFQKVFYEEIMTDTLYESISNKGKVQTWASLKTPFELVGIKRDKKRDELRLENYRWRTQALTEKLSLEQLAIVLQEVNGQLYNSSGYLGAISDRSKELYFNQETVGQYLYKKLQDNTHFRLKNQVFYRQDYLDEFEKLWEVQSQFHKELTPLLKTKIRDVIIFYQRKLKSQKGLISFCEFEQREVTIDGKTTTIGSRVAHRSSLLFQEFKIWQQLHNVRLRNKNTKEIVELSEEAKEVLFDELNVKGKLSAAKVLKLLDNGRSYELNYTELDGNTTNAALYEKFLEIIDIEGYDVRDELRIKLNKDDISIVDLDISALDIKEMIIRIFKILNIDTTILIFDGELENKAFENQQSYQLWHLLHSYEEDDSTTGMDTLYRLLHEKFNFSIEQSKILGSVVLSRDYGSLSSKAIRNIFPFIKSNEYSKACALAGYRHSKESLTTEEISSRVIKDRLTVLPKNSLRNPVVEKIINQMVNVINTLIDTENDKLEKVGLPRSFKFDEIRVELARDLKKNAKERAELTKQINTGKSVHEAIVKILQREDGVENPTRNDIIRYKLYQELKNNGYKNLYTQEYVERKDLFSNKYDIDHIIPQSRLFDDSFSNKTLCPREINIKKGSKTAYDFILDAYGQDKANLFETRIKNLGELKEEGISKAKCQKLLMRGKDIGEGFIQRDLRDSQYIAKKAKAMLLEITPVVVTTSGAITDRLRNDWGLVNVMKELNLPKYRAMDRTQIMEIKGAKKEIILDWTKRNDHRHHAMDALTIAFTKRSFIQYLNNLNARKEENQTISNTNRRNSLEINDLKISTKEVLGIQQKETIKIKDEQGHSKRVFKEPIPHFRHVAKELLDQVLVSHKAKNKVVTKNKNRVNGSGKMQETLTPRGQLHKETVYGKIKQYISKAEKISSKFDEKTIEKVSNPHYRALLLERLNAFGNNPKLAFSGKNTLIKNPIYIDSSEQETIPEKVKLIWLEDNYTIRKDVGPDLKIDKVIDQGVKRILQSRLDEYGGDVKKAFSNLDQDPIWLNKEKGIAIKRVKISGVNNVEVLHTKKDHLGKIILDTDNNPIPVDFVSTGNNHHVAIYANEKGNLEERVVSFFEAVTRVNEGLPIIDKVFNQHLGWKFMFTMKQNEMFLFPAEDFNPREVDLFNRANYKVISKHLFRVQKFTIRDYFFRHHLETNVEDLTTTKGITWRREGLAGIKDILKVRTNHLGEIIQINEY

SEQ ID NO: 22380 - protein, 1089 aa, unidentified
  REGION 1..1089: note = Cas Enzyme sequence
LNSANVNYRVGIDVGSYSLGMAAIAIDDDGKPTEILSAISLIHDSGVDPDSAKSAATRLATSGIARRTRRLYRRKRKRLAKLDKFISSQGWPLKEFEKYEDPFYPWRVRAELATTAITDQQELGEKLSIALRHIARHRGWRNPYSKVTALYTVTEPSDAFLAMQEECAKQLGRTIPETITVGQLVTGMNLGKTRLRGENSLLAARPRQSDNANEIHTIAKVQGLSNELVRQIIDHVFAAESPKGSAAEQVGKDPLQPTKKRALKASDAFQQYRIAALIGNLRIRGGKGNRRLTTEETRLVFDYLRSLPAKQEPTWQLVAEQLKIDRGNLVGTAIMTDDGERAGAKPPVHDTNRIMENTKIKPLATWWKSADADARAAMVKALSNAEVDDFDSQAGAQVQEFFFGISDEDQEKLDGLHLPIGRAAYSEDTLDRLTKRMIGEGMDLYEARQAEFKISNDWAPPAPEIGERVGNPAVDRVLKATARWLNAAERQWGAPKSVNIEHVRAAFMSESSARELDRDNQQRAKRNVKVVAEMQEKLGIEGRPSRADVWRFQSIQRQNGKCAYCGAEISFKNSEMDHIIPQAGEGSTNTRDNLVAVCRECNSSKSNIAFAVWAENTSRPGVSVQKAIERTHHWVTDSGLRKPEFDKFRKQVCDRLRRKATDEPIDARSLESVAWMANELRSRIAQKFKDGDTKVRVYKGALTAEARRASGISGKLEFVDGKGKSRLDRRHHAVDAAVVAFTSNYVAETLALRSNMKFDQELRRKAPQWWEFTGSDHVHQVEWTKWKYRMQALAELLNNALVQDRIVVMHNLRLRLGNGAAHEDTIGKLTRLKVGDAISTTDIDRASSEALWCALTRDPDYDPKTGLPENPNRTIRIHGTHLTASDEITVFPVAAASIPIRDGFAKLGSNYHHVRLFRVPSGKKYKYCLMQVYTVDLLKFRKEDLFTVELKPQTISVRTCEALLRKALANGTAEYLGWLVSDDELLIDTSSFDTPGIVKLREEYGPVNRWRLAGLTSVTRLNLRPLYLSKEGLKPNVNPEIKKIIDNRSWIITVNKLFSSGHVKIIRRDALGRPRLHSAAHLPICWEVK

SEQ ID NO: 22381 - protein, 1435 aa, unidentified
  REGION 1..1435: note = Cas Enzyme sequence
MKNILGLDLGTTSIGFAHIVEDENKEKSEIKELGVRIVSLTTDEQSDFEKGKSISTNANRTLKHGARLNLDRYQQRRKFLIDLLQKANLITSASILAENGKNTTHSTWQLRAKAVTERIEKEEFARVLLAINKKRGYKSSRKAKTEDEGEAIDGMAIAKRLYDENLTPGQLSLQLLQQNKKLLPDFYRSDLQREFDLVWNFQEQFYPNILTDAFYKELQGKGKDATSKAFSKRYHFDTAENKGSKESIRLQAYQWRSEAVSKQLSKEEVAYVLTEINNNLNNSSGYLGAISDRSKELYFNRQTVGQYLYAQLQENRHNSLKNKVFYRQDYLDEFERIWETQASFHKELTEELKKQIRDVVIFYQRKLKSQKGLISFCEFESKEIEIEKDGKTITKSIGARVVPKSSPLFQEFKIWQILNNVTCKRKGIRKKKSSTNPTQLDLFNEPSQTIFSLDMECKQLLFDELNLKGDLKSDKVLKLLGYSPQEWEINYNQLEGNRTQKSLYEAYLKIIEIEGYEVKDILQIKSTKDDWSLDESPLSASEIIERVKAIFQTLGICTKILYFDPLLPVKEFEQQYSYQLWHLLYSYESDDSTSGNETLYQILEKKYAFKREHARILANVALQDDYGSLSTKAIRKIYPYIKENQYSKACELAGYKHSKLSLTTEELEARELKNIIPLLKKNALRNPVVEKILNQMINVVNALIEKNSERDAEGKITKYFHFDEIRIELARELKKNAQERYEMTQNINKAKLEHQKISEKLQKQFGIKNPTKSDIIRYRLYQELEHNGYKELYTNTYIAPDVLFSKNIDIEHIVPKARVFDDSFSNKTLAFKEFNIKKGESTAFDYITSLNCEGELNQYLTRVENAYKTKSISLTKYKNLLKKASEIGDGFINRDLRDTQYIAKKAKEILFQVTKNVLSTSGSITDRLREDWGLVDVMKELNMPKYQSLGLTEVEERKDGNKVTVFKDWTKRNDHRHHAMDALTVAFTKPSYIQYLNHLNARKDENNKNYSVILAIEKKETIKVPTNNGKNKRVFIEPIPNFRQVAKKHLEEIFISHKAKNKVVTKNINKPAGTDKQQITLTPRGQLHKETIYGKYQYYVNKEEKVGVKFDERTITKVSNPLYREALLKRLQANDNDPKKAFAGKNALSKNPIYLDEAKTKTLPKKVNLTYLEEDFSIRKDISPDNFKDLKSIEKVIDQGVKRILIKRLQAYDNDPKKAFVDLEKNPIWLNKEKGIAIKRVTISGVSNAQPLHIGKDHLGKTTLNKEGKEVPVDYVSRGNNHHVAIYQDKDGNLQEQIVSFFEAVVRAQQGLPIVDKTYKQAEGWQFMFTMKQNEMFVFPNEATGFNPAEIDLLDPKNKKLISPNLFRVQTISIVKYGNSVVRDFKFRHHLEATLQDDKILQGITFQQIKSLEPLRNIVKVRINHLGDIVNIGEY

SEQ ID NO: 22382 - protein, 1393 aa, unidentified
  REGION 1..1393: note = Cas Enzyme sequence
VENVKHTSMKKILGLDLGTNSTGWALVNEAENTAEKSSITKLGVRIIKYDNFVNTETGSESKEPEKDFCGGKGISPNAGRTKGRSARRNLQRYKLRRANLIEYLKKCGLITDSAVLCENGNRTTFQTYRLRAMAVTEEISLEELSRVFLMINKKRGYKSSRKAKLPDEGQLIDGMAVAEQLYENDLTPGQFVFSILQQGKKSIPEFYRSDLQNELNRIWDHQKQFYPEILTDEFRKQIEGEGRPNTAKMFLGKYKIYTADIKGKDKRLQAYQWRSNALTSQLSIDEVAFVVSELNGAINNASSYLGAIGDRSKELRFNKLTVGQYLMKQLDKDPNYSLKNQVFYRQDYLDEFEAIWEKQAQYHPELTPELKKDIRDIIIFYQRPLKSQKGLVSFCEFESRQIEVNVDGKQKLRTIGCKVCPKSSPLFQEFKIWHTLHSLIVKEKKTNAERFLYQEEKETLFAELNIKETLSKLDALKLLYKNYKDLDLNYDKIEGNRTQAALFKAYQTIISMTGHGEYDFSKMMSDEVMEIVEGVFSGLGYNTDILHFDAENELFDKQPMYMLWHLLYSYEGDKSSTGNKSLIDKIFKLCGFEKEYASIIANIIFQSDYGSLSTKAIRKILPRMKEGNEYSLACEYAGYRHSQRSLTKDELDNKVYKDHLDLLPRNSLRNPVVEKILNQMINVVNFVVDAYGKPDEIRIELARELKKSSKERKEMTMAINKTTADHEKYRQILQKEFGLTNVTRNDIIRYKLYLELKSNGYKTLYSNTYIPQEKLFSKEFDIEHIIPKTKLFDDSFSNKTLESRRVNIEKSNLTAYDYVLGVYDEKGINDYEIRIENLYKSGIISKAKRDKLMMKEVDIPSGFIERDLRDSQYIAKKAREILEELVRFVVPTTGTITDRLREDWQLIDVMQELNWEKYDKLGLTEIVKDKDGRQIRRIKDWTKRNDHRHHAMDALTVAFTKRSYIQYLNNLNAKSDKSGSIYAIEQKELYRDKHGKLRFNPPMPLDVFRAEAKRQLENTLISIKARNKVVTQNVNITKTKKTESGYRKKIQLTPRGQLHNETFYGAIKRYVTKLESVGSGFNVEQIALVANKRYREALLTRLAACGNDPKKAFTGKNSLEKNPLYLDELHTQQVPTKVKTVTLETVYTTRKDISSDLKIEKVIDRKVRSILKERLKKFGGDPKKAFSNLDANPIWLNKEKGISIKRVTITAVSKAEPLHAKRDHFGKYILDANGAKQPVDYVNTGNNHHVAIYRDEKGVLQERVVSFYEATASASVGLPVVDKEYRKSEGWTFLFSMKQNEYFVFPNEKNGFNPNEIDLMDPDNYALISPNLFRVQKIASKDYVFRHHLETTVEDRKELQNITWKRFQSLTNLDKLVKVRVNHIGQIVSVGEY

SEQ ID NO: 22383 - protein, 1504 aa, unidentified
  REGION 1..1504: note = Cas Enzyme sequence
MKNILGLDLGTNSIGWAVVNGSVNDNGSEQLVKIQASGSRIIPMDAAMIGDFNKGNSISQTAERTRLRGIRRLSERYLLRRERLHRILDILGFLPSHFAQDLDRHGKIVKGKEPKLAWRKNEAGQFEFIFQDSFKEMLEDFKLNHPNLITDDKKVPYDWTIYYLRKKGLTSKISKEELAWILLNFNQKRGYYQLRGEEEEENNNKLVEFYALKVVAVEDSGEKKGKDIWYNVHLENGWVYRRTSNMPLDWVGKTKEFIVTTDLEKDGTPKKDKEGNVKRSFRAPKEDDWSLVKKKTEADIDQTHKTVGTYIYDTLLGNPSQKIRGRLVRTIERKYYKEELKLILDKQKEFHPELQDRALYAACVEELYTINEAHRNNIGNRDFTYLFLEDILFYQRPLKSKKSLIDNCPYEENHCLDKETGEIKSFPVKCIAKSHPLFQEFRLWQFIVNLRIYRKGLAQDVDVTNELLKTEEDYVALFDWLNGKKEIDQKAFLKYPLFGLKKEVENYRWNYVQDKPYPCNETRSSMLARLEKCDISIEFLTKENEEALWHILYSVEDKNEIVKALQKFADKHDLNASFVDVFRKFPPFKKEYGSYSAKAIKKLLPLMRMGKYWSENSIDKGTRERIDKIITGEYDEKIENRVREKAIHLADVSDFRGLPLWLVCYIVYGRHSEAKEITQWKSPADIDSYLKSFKQHSLRNPIVEQIIIETLRVVRDIWKQVGNIDEIHVELGREMKNPADKRKKMTQQISENENTNLRIKYLLTEFLNPEYEVENVRPYSPSQQDILRIYEEGVLNSVSDLPEEISDILKKFTETDLKKRPSRSEVLRYKLWLEQKYRSPYTGEVIPLGKLFTSAYEIEHVIPQSCYFDDSFSNKVICEAEVNKLKSNLLGHEFIVKHHGEIVELPFGKKVRIFTVDEYEQFVKDNYSRTRGKMKKLLMDDIPEEFVTRQLNDSRYISKVVKSLLSNIVREKGEEEAISKNVIPCTGGVTDRLKKDWGINEVWNKIILPRFQRLNELTGTNKFTTKNVGIQEIPTMPLELQKGFNKKRIDHRHHAMDAIIIACANRNIINYLNNESATAKAELSRYDLQKLLCDKAKTDNNGNYKWVIRKPWASFTQDTYLALENIIVSFKQNLRVINKATNHFLHYNEEGKKIFVKQGKGDNWAIRKSMHKDTVFGEVNLRRIKTVALNEAMKNPQSIVVKDFKRKLLELWNLGFDAKRIKKYFEDNRETWSDINLSKIEVYYFSKDTKDRFFATRKPLDTSFDRKKIENNITDTGIQKILLRHLELKDNNPDIAFSPDGIDEMNRNIIQLNNGKYHQPIIKVRWYEQADKFAVGQTGNKSSKFVEAAKGTNLFFAVYESNILDKKTNTIIKKRNYATIPLNVAIERQKQGLPVAPEDENGNDPIFVLSPNDLVYLPTDDELANGIIAQPLDRGRIYKMVSSSGEQCFFIKHIVANVLVDKFEFSPLNKMERALTGEMIKMICMPIKVDRLGNVLESSSSHKK

SEQ ID NO: 22384 - protein, 1436 aa, unidentified
  REGION 1..1436: note = Cas Enzyme sequence
MKKRKHILGLDLGTTSIGFSHIIEDEDREKSTIEEIGVRIIPLSVDELSNFERGKTISTNADRTLKHGARINLDRYQLRRKQLIELSLQAGLITPSTILAEDGKNTTFSTWQLRAKAAVERIEKDELVRVFLAINKKRGYKSSRKVKNKEDGQIIDGMDIAKRLYDENLTPGQLVLLLLKEKKKQLPDFYHSDLQREFDLIWNFQKEFYPDILTNDLYKALQGKNKTDSSGIFYNYYHFNTAENRGTKEQMRLQAYRWRVDALSKKLSKEEVAYVLVEINSNLNNSSNYLGNISDRSKELYFNKQTIGQFLYTKLKEDRHYSLKNKVFYRQDYLDEFERIWETQAIFHKELTEDLKKQIRDTIIFYQRRLKSQKGLISLCEFENKEITIEKEGKTVTKQIGVRVIPKSSPLFQEFKIWQILNNVVCKKKGTRKKKAVTPAPLLFELFGTPSETFFCLDMECKQLLFEELNLKGNLKADKVIRLLGYIPQEWEINYNQLEGNRTQKSLYEAYLKIIEIEGYDIKTFLRIKSDKEDWDLEESPLSAKEIRENIQHIFETLGISTAILYFDATLPIKDFEKQASYQLWHLLYSYESDNSPSGNETLYKLLQDKFGFKREHAVFLSNISFQDDYGSLSAKAIRKIYPYIKENQYSTACELAGYRHSKLSLTKEELNNRPLKDLISPLKKNSLRNPVVEKGLNQMINVVNALIEKNSKKDAEGNIIKYFHFDEIRIELARELKKNAQERAEMTLNIKNATIEQEKIKRLLISDFGIKNPTKNDITRYRLYQELAHNGYKDLYTNTYIPKELLFSKNIDIEHIVPKARVFDDSFSNKTLAYRDFNLKKGENTAFDFIDSSLGEEELNQYITRVENAFKAKKISATKYKNLLKKATEINDGFINRDLRETQYIAKKAKELLFQITRSVVSTSGSITDRLREDWGLIDIMKELNMPKYRDLGLTEIIERRDGRKVEVIKDWTKRNDHRHHAMDALTVAFTKPSYIQYLNHLNARKDENNKLYADILGIERKETTKIHDENGNEKRVFIEPIPGFRQIAKKYLEEILISHKTKNKVVTKSINKIAGTNKKQETLTPRGQLHKETIYGKYHYYSNKEEKIGTKFDKETISKVSNPIYRYALQKRLEANENNPKKAFTGKNALSKNPIYLDDAKTKILPEKVNLIYLEEDFSIRKKIVPENPTSKEFVPNSISIEKIVDEGIKRILKERLETYNNDPKKAFADLDKNPIWLNKEKGISIKRVTISGVKNTQALHSKKDHLGKPILDKEGQEIPVDFVSTGNNHHVAIYRDQKGNLQEQIVSFFEAVVRAQQGLPIIDKTYKQEEGWQFLFTMKQNEMFVFPNATIGFNPAEIDLLDPKNKKLISPNLFRVQKIATKDYFFRHHLETNVETDNVLKNTTWKREGLSGLKDIVKVRINHLGDIVSIGEY

SEQ ID NO: 22385 - protein, 1480 aa, unidentified
  REGION 1..1480: note = Cas Enzyme sequence
MRTILGLDLGTNSIGWAKVCVDDNGNYAREIKLGSRIIPMSQDTLSNFDKGVTESPTAERTTFRGIRRIRERALQRRERLHRVLHTIEFLPKHYDEAIGWNREEATTYGKFLNHEETKLAWEKQEDGSMRFLFMDSFKEMMADFAKHQPGMVADGKKIPLDWTLYYLRKKALTQAIKKEELAWILLNFNQKRGYYQLRGEEDEENPTKREEFYELKVISVEAAEEGKGGNTWYNVKLENGWIYRRQSKTELNDWVGKIRQFIVTTEYEKDGVTVKKDKNGEVKRSFRAPSEDDWGLRKKRTEKSLENSGKTVGAFIYDHILSKPTDKIRGNFIRTIERKFYKKELEAILREQSKHHKELSGHNSLVDCIKELYPNNKPHQDSLMKKDMSYLLITDLIFYQRPLKSKKSLIADCPYEYYEYVVKETGEIKRQGIKCIAKSNPYYQEFRLWQFLINLRLFDRTDDKEVTSEYLSSKDDYSKLFEYLNDKKDINQETLLKDFFKQKKIKMGMEKEYPIRWNYIEDKEKKYPCNETRHELLAALDKAGIDHSWLDDKEQYYRLWHLLYSVESKEEAQGALRKLNNNDDFVNAFLKVKPFKKEYGAYSEKAIKKLLAVMRIGDFWDEANICEQTKNRIHNIINGEIDEKIKERMGRSFTQISDFQGLPEWLSCYVVYGRHSEASDNQRWRTPEDLMAYINGFKQHSLRNPIVEQCILETLRTVHDIWKEAGHIDEIHVELGRNMKSTSEQRAQNSKRILQNENTNLRIKSLLMELKNVKEVENVRPYSPMQQEILRIYEEGALQELTTEDAQYPEIYKISQMAQPSAKELLKYRLWLEQKYCSPYTGKPISLSKLFTSAYQIEHIIPQSRYFDDSFTNKVICEAEVNQLKSNMLGYEFIKKHGGEIVYCTKIGDVKILDEKEYHNFVTEHYANNRNKKEKLLLEDIPQEFLNRQLNDSRYISKKVTSILSNIVRGEDEQEVNSKFVVPCTGGITDRLKQDWGLHDVWNRLVYPRFERLNQLTQSEAFGRWENKEGKQVFQTSVPLELQRGFSKKRIDHRHHAMDALVIACASRNIINYLNNESAKNQTKREDLRKKLCDKNRVIRKPWGTFTQDAQAALEDVVVSFKNYVRVINKATNYYERYEANGKKGMAKQEGHNMWAIRKPLHKETVFGHVNLRRKISVKLKDAIKNVPAICDKELRDYINDLIAKKYNSKQILAHFKDKNYRLNMKYVDKVDMWQFSDEKEPMVATRKSLDTSFDAKRIATITDTGIQKILLNYLSTKNNDPNIAFTPESIAEMNKHIVEYNNGKQHQPILKVRVSEPMGAKYEVGETGNKTKKFVEAQKGTNLYFAIYEDKDGNRSYNTIPLNVVAERLKQGLSPVPDMNEKEAHLRFYLSPNDLVYVPTEEEKQSGDCKLNKKRIYKMVSATGYECLFLPYTISNIIYNKVEFESLNKMGRALTAEMIKAVCWKLEVDRLGNILKIIK

SEQ ID NO: 22386 - protein, 1336 aa, unidentified
  REGION 1..1336: note = Cas Enzyme sequence
SKEELAWILLNFNQKRGYYQLRGEEEKKNDNVMIINSKVIDVVKAEKDKKYEKYWYNVLLENGLLYRAAFYNDISFWKGHTKEFVLKTIKLKSGGTKQELSFLPSFDEIEKMEKKQKDKMYFKIKLKTEADIDQAHKTVGTYIYDTLLGNPSQKIRGRLVRTIERKYYKEELKLILDKQKEFHPELQDRALYAACIEELYPINEAHRNNVGNRDFTYLFLEDILFYQRPLKSKKSLIDNCPYEENQGLDKETGEIKSFPVKCIAKSHPLFQEFRLWQFIINLRIYRKDLAQDVDVTNELLKTEEDYVALFDWLNGKKEIDQKAFLKYPLFGLKKEIENYRWNYVQDKPYPCNETRSLMLARLEKCDISIEFLTKENEEALWHILYSVEDKNEIVKALQKFADKHDLNASFVDVFQKFPPFKKEYGSYSAKAIKKLLPLMRMGKYWSENSIDKGTRERIDKIITGEYDEKIENRVREKAIHLADVSDFKGLPLWLVCYIVYGRHSEAKEITQWKSPADIDSYLRSFKQHSLRNPIVEQIIIETLRVVRDIWKQVGNIDEIHVELGREMKNPADKRKKMTQQMSENENTNLRIKYLLTEFLNPEYEVENVRPYSPSQQDILRIYEEGVLNSVSDLPEEISDILKKFTETDLKKRPSRSEILRYKLWLEQKYRSPYTGEVIPLGKLFTPAYEIEHVIPQSCYFDDSFSNKVICEAEVNKLKSNLLGHEFIVKHHGEIVELPFGKKVRIFTVDEYEQFVKDNYSRTRSKMKKLLMDDIPEEFVTRQLNDSRYISKVVKSLLSNIVREKGEEEAISKNVIPCTGGVTDRLKKDWGINEVWNKIILPRFQRLNELTGTNKFTTKNVGIQEIPTMPLELQKGFNKKRIDHRHHAMDAIIIACANRNIINYLNNESATAKAELSRYDLQKMLCDKAKTDNNGNYKWVIRKPWASFTQDTYLALENIIVSFKQNLRVINKATNRFLHYNEEGKKIFVKQGKGDNWAIRKSMHKDTVFGEVNLRRIKTVALNEAMKNPQSIVVKDFKRKLLELWNLGFDAKRIKKYFEDNRETWSDINLSKIEVYYFSKDTKDRFFATRKPLDTSFDRKKIENNITDTGIQKILLRHLELKDNNPDIAFSPDGIDEMNRNIIQLNNGKYHQPIIKIRWYEQADKFAVGQTGNKFSKFVEAAKGTNLFFAVYESNILDKKTNTIIKKRNYATIPLNVAIERQKQGLPVAPEDENGNDPIFVLSPNDLVYLPTDDELANGIIAQPLDRGRIYKMVSCTGNEGHFIPARIANPILQTIELGSNNKAQKAWTDEMIKEICMPIKVDRLGNVLESSSSYKK

SEQ ID NO: 22387 - protein, 1123 aa, unidentified
  REGION 1..1123: note = Cas Enzyme sequence
MGSRVVSLTAAELSSFTQGNGVSINSQRTQKRTQRKGYDRYQLRRTLLRNKLDTLGMLPDDSLSHLPKLQLWGLRAKAVTQRIELNELGRVLLHLNQKRGYKSIKSDFSGDKKITDYVKTVKTRYDELKEMRLTIGELFFRRLTENAFFRCKEQVYPRQAYVEEFDCIMNCQRKFYPDILTDETIRCIRDEIIYYQRPLKSCKYLVSRCEFEKRFYLNAAGKKTEAGPKVAPRTSPLFQVCRLWESINNIVVKDRRNEIVFISAEQRAALFDFLNTHEKLKGSDLLKLLGLSKTYGYRLGEQFKTGIQGNKTRVEIERALGNYPDKARLLQFNLQKESSSMVNTETGEIIPMISLSFEQEPLYRLWHVLYSIDDREQLQSVLRQKFGIDDDEVLERLSAIDLVKAGFGNKSSKAIRRILPFLQLGMNYAEACEAAGYNHSNNYTKAENEARALLDRLPAIKKNELRQPVVEKILNQMVNVVNALMEKYGRFDEIRVELARELKQSKEERSNTYKSINKNQRENEQIAKRIVEYGVPTRSRIQKYKMWEESKHCCIYCGQPVDVGDFLRGFDVEVEHIIPKSLYFDDSFANKVCSCRSCNKEKNNRTAYDYMKSKGEKALSDYVERVNTMYTNNQISKTKWQNLLTPVDKISTDFIDRQLRESQYIARKAKEILTSICYNVTATSGSVTSFLRHVWGWDTVLHDLNFDRYKKAGLTEVIEVNHRGSVIRREQIKDWSKRFDHRHHAIDALTIACTKQAYIQRLNNLRAEEGPDFNKMSLERYIQSQPHFSVAQVREAVDRILVSFRAGKRAVTPGKRYIRKNRKRISVQSVLIPRGALSEESVYGVIHVWEKDEQGHVIQKQRAVMKYPITSINREMLDKEKVVDKRIHRILSGRLAQYNDNPKEAFAKPVYIDKECRIPIRTVRCFAKPAINTLVPLKKDDKGNPVAWVNPGNNHHVAIYRDEDGKYKERTVTFWEAVDRCRVGIPAIVTQPDTIWDNILQRNDISENVLESLPDVKWQFVLSLQQNEMFILGMNEEDYRYAMDQQDYALLNKYLYRVQKLSKGDYNFRYHTETSVEDKYDGKLNLELSRQMGKLKRVSIKSLLELNPHKVHISVLGEIKEIS

SEQ ID NO: 22388 - protein, 1438 aa, unidentified
  REGION 1..1438: note = Cas Enzyme sequence
MKYIKYILGLDIGSNSIGWALIQLDLLQKTKRIIATGSRIIPMDQKVLSDFGKGITISPTAQRTSYRNARHCRERHLLRRERLHRVLHILGFLPTHYDKQIDFSKRYGKFVDNTEPKIAYNERKFLFMDSFQEMLADFKIHQPDLFYTKKNGEESKIPYDWTIYYLRKKALSRKISKEELAWIILNFNQKRGYYQLREEEEENKENDFEIISSKIISVIKKDKDKKYNKYWYDIILENGLVYQAAFYNDFVYNWINQDREFIIERISLKNGTEKVKLSYLPTFDEIDKMDKKEQDKYYKKIKIKTENSIGNKTVGCYIYDHILQNPNEKIKGKLVRTIERKYYKEELKAILEKQVALQPELFTDQLFADCIRELYNKNEAQQRNLAARDFVHLFVEDIIFYQRPLRSQKSTLANCSLESRSYIDKDSHTRKEVPLKVCPKSNPYYQEFRVLQWLQNLKIYEIDTDQEVTHEFIKTLEDKQQLFDFLMDQKEIDCEELLKYFLNQTYPNAKEKALKSELKKWKDTYRWNYVYDIGEKSSKKYPMNETRYELKRHLEKVANLPDDFLSSEVEYLLWHLIYSVKDKVAYEKGLKTFAQKHHLDKDSFVESFKKFKPYPSEYGNFSEKAIRKLLPLMRFGAYWDFNHIDKNTQKRIEDLITGAENEEIRTILREKAEKYQLEKETDFQDLPLWLAQYIVYNRHAEASSLEKWTSVNDLETYLNEFKQHSLRNPIVEQVVMETLRVVRDIWQQYGQGQASFFDEIHIELGRELKKTAKEREKLSKQNQKNEDINLSIKEKLKELEKYNTRAYSITHQEKYKLWLEQKHISPYTGQIISPENLFTDNYEIEHIIPQSRFFDDSLSNKVVCESIVNKAPYKDRQLGLEFIKNQGGRIVKELSKENKTIKIFTEEQYRTFIKEHYSNNPEKTKKLLLEEIPEKMVARQMNDTRYISKFISEILSKIVRSDEQDEGVHSKNVILCTGKITSILRQDWGLNDVWDNLILPRFERMNNLLQKEKFTIYSIEKQKKIPVVPINDQFKSFQKKRIDHRHHALDAIIIACVTGEHINYINNQHALEKGKDKKEKQKEHDKLREKLCIKKHNKGSEENYSWIFKKPWAHFTQEVQAALEGIVVSFKQNLRVINKATNYYERWVEENGRYIKKIVKQEGTNWAIRKPLHEETISGKIYLDREEITKNDILTATRKTVDSSFDEKRIKKITDTGIQKILLNYLKYKGSPEIAFSPEGLEELNKNLSIYNDGKPHKPIYKVRIYEKGSGRFALGEKGRKYKKYVQGAPNLYFGIYQGANKRSFATIPLNEVIERQKQGRPYVPEYNEKGDPLLFSLSPNDLVYVPVEGENIEDIDFQNLSKEQKERIYNVNDFSSTCYFTPNRIAKAIFPKEVDLQRKGDKLSGSYDTKTASLEGIQIKEVCIKLKVDRLGNISKA

SEQ ID NO: 22389 - protein, 1460 aa, unidentified
  REGION 1..1460: note = Cas Enzyme sequence
MKRILGLDLGSNSIGWALVQQNFENKQGQIMAAGSRIIPMDQGVLGDFEKGNTVSQTAERTAYRSIRRLRERHLLRRERLHRVLHILGFLPPHYDSQIDISKRYGKFIDDAEPKIAYNKGNFIFMDSFNEMIEDFRKHQPQLFYKKSNGEESKIPYDWTIYYLRKKALSQKITQQELAWLILHFNQKRGYYQLRGEEETEGNDMEIISSKVLTVIKKDKDKKYDKYWYDITLENGLVYKAAFYNDLVYSWIDQKREFVVKRALLKDGDKKIELSYLPTFDEIAKMDKKQQDKFYQKIKVKTESNIGNKTVGAYIYDHLLQNPNQKIKGKLVRTIERKYYKDELKAILTQQIALQPEFFTENLLADSIRELYRKNQTQQQNLLSKDFLHLFVEDIIFYQRPLRSKKSTIANCPLEKRSYIDKETNERKDAPIKVCAKSNPYYQEFRVLQWLQNLRIYEIETDLEVTSEFIETAQDYEALFNFLMSQKEIDNEGLLKYFLLAKNPQIKDKAAKSELKKWLTIYRWNYVYDRADNSSKKYPMNETGYDLQRYLQKVEGLPANFLTFDITYQLWHLLYSVKDKVEFEKALKKFANKNQLDETSFVDSFKNFKPYPNEYGSFSEKAIKKMLPLMRFGKYWNFKNIDVHTQKRIDDLINGVANEDIRTIIREKAEKFQLNNEISFQGLPLWLAQYVVYNRHAEATNIEKWTSVSDLEVYLEDFKQYSLRNPIVEQVVTETLRVVRDVWQQYGGGQANFFDEIHIELGRELKNTSKERERLSKQNQENENTNLRIKKLLAELKEDANIQNVRPYSLVQQELLKIYEEGVFSSTDEIEEDIQKIRKKAEPSKADLQRYKLWLEQKYKSPYTGEVISLTKLFTEEYEIEHIIPQSRYYDDSLSNKVICESAVNKLKTNQLGLEFIQNHHGEKVRIAGNKEVNIFTEEQYKEFVKKYYANNLAKQQKLLLNDIPEKMVARQMNDTRYISKYVSEILSKIVRSDEKDEGVNSKNVIPCTGKITTALKQDWGLNDVWNELILPRFERMNQLTQTQLFTSYNDRLQKNLPTVPIEYSQGFQKKRIDHRHHAMDALVIACATREHINYMNNQHALDKSKDKKEKQQSRIDLRTILCEKKNNNWQFKKPWGTFTQEAKEALEHIVVSFKQNLRVINKATNYYEKWEEKNGVLVKKKVKQEGTNWAIRKPLHKETVSGKIVLDRKIGKDKILTAIRKAVDITFTEKIISSITDTGIQKILLNYLKYKGSPEVAFSAEGLEELNKNIAQYNNGKKHQPIYKVRIFEEGSKFPLGETGAKVTKYVEAAKGTNLFFGVYQGKGKRTYATIPLNEVIERQKQGLPSVPERNEKGEPLLFSLSPNDLVYVPMVGEATETIDFNNLSKEQKERIYKTVSFTGNECHFVKSTIASLIKSYDAKSKIGELGSLNKLEVTISGDSRIKEVCIKLKVDRLGNITKA

SEQ ID NO: 22390 - protein, 1089 aa, unidentified
  REGION 1..1089: note = Cas Enzyme sequence
LNSANVNYRVGIDVGSYSLGMAAIAIDDDGKPTEILSAISLIHDSGVDPDSAKSAATRLATSGIARRTRRLYRRKRKRLAKLDKFISSQGWPLKEFEKYEDPFYPWRVRAELATTAITDQQELGEKLPIALRHIARHRGWRNPYSKVTALYTVTEPSDAFLAMQEECAKQLGRTIPETITVGQLVTGMNLGKTRLRGENSLLAARPRQSDNANEIHTIAKVQGLSNELVRQIIDHVFAAESPKGSAAEQVGKDPLQPTKKRALKASDAFQQYRIAALIGNLRIRGGKGNRRLTTEETRLVFDYLRSLPAKQEPTWQLVAEQLKIDRGNLVGTAIMTDDGERAGAKPPVHDTNRIMENTKIKPLATWWKSADADARAAMVKALSNAEVDDFDSQAGAQVQEFFFGISDEDQEKLDGLHLPIGRAAYSEDTLDRLTKRMIGEGMDLYEARQAEFKISNDWAPPAPEIGERVGNPAVDRVLKATARWLNAAERQWGAPKSVNIEHVRAAFMSESSARELDRDNQQRAKRNVKVVAEMQEKLGIEGRPSRADVWRFQSIQRQNGKCAYCGAEISFKNSEMDHIIPQAGEGSTNTRDNLVAVCRECNSSKSNIAFAVWAENTSRPGVSVQKAIERTHHWVTDSGLRKPEFDKFRKQVCDRLRRKATDEPIDARSLESVAWMANELRSRIAQKFKDGDTKVRVYKGALTAEARRASGISGKLEFVDGKGKSRLDRRHHAVDAAVVAFTSNYVAETLALRSNMKFDQELRRKAPQWREFTGSDHVHQVEWTKWKYRMQALAELLNNALVQDRIVVMHNLRLRLGNGAAHEDTIGKLTRLKVGDAISTTDIDRASSEALWCALTRDPDYDPKTGLPENPNRTIRIHGTHLTASDEITVFPVAAASIPIRDGFAKLGSNYHHVRLFRVPSGKKYKYCLMQVYTVDLLKFRKEDLFTVELKPQTISVRTCEALLRKALANGTAEYLGWLVSDDELLIDTSSFDTPGIVKLREEYGPVNRWRLAGLTSVTRLNLRPLYLSKEGLKPNVNPEIKKIIDNRSWIITVNKLFSSGHVKIIRRDALGRPRLHSAAHLPICWEVK

SEQ ID NO: 22391 - protein, 1422 aa, unidentified
  REGION 1..1422: note = Cas Enzyme sequence
MTQKVLGLDLGTNSIGSSVRNLDLSDDLKGQLEFFSSDIFRSSVNKESNGREYSLAAQRSAHSRSRGLNEARRRKLWATLDLLIKYGFCPMSPDSLMRWRTYDKQRGFFREYPIDDKDFNAWILLDFDGDGKPDYSSPYQLRRELVTRQFDFDQPIERYKLGRALYHIAQHRGFKSSKGETLLQQETNSKQSLTDETTDVAGEMKASEEKLSKGLSTYMKENKLLTVGAAFAQLEDEGVRVRNNNDYRAIRSQFQREIETIFKFQQGLSVENEFYECLVSEKKNIGTIFYKRPLRSQRGNVGKCTLERTKPRCALGHPLFEKFRAWTLINNIKVRMPEEEQAEQLPMKLRFELYNDCFLAFVRAEFKFEDIRKYLEKRLGIHFSYNDKTINYKDSTSVAGCPITARFRKLLGEDWESFHVDGQKQRQAHGKNNTSFHTVSYSTNDIWHFCYDAEEPEAVLSFAQDNLKWEKKKAEELVRIWSAIPQGYAMLSQKAIRNINKMLILGMKYSDAVLLAKVPEIVEITDGEILSVTEDYHRVEAQVRYEKQINNIVNALIAKYKSASEEYRFADHNYEYQLDKSDEEEIVRQIESCLGARKWGLMDADEQTDILQKVRDKYQNFFRSHERKFVESPKLGDCFEEYLVKRFPMVKGEQWKKSYHPSQIAIYRPVSAGKDRSALRLGNPDIGAIKNPTVLRVLNTLRKRVNQLLDDGVISPDETRVVVETARELNDANRKWALDTYNRIRHDENEKIKKILEEFYPKRDGISTDDIDKARYVIDQREVDYFTESKTYNKDIKKYKFWLEQGGQCMYTGRTINLSNLFDPNAFDIEHTIPESLSFDSSDMNQTLCDAHYNRFIKKNHIPADMPNYDKAVIIDGKEYPAITSQLQRWIDRVERLNRNVEYWKGQARRAQNKDRKDQCIREMHLWGMELEYWEKKLESFTVTEVTDGFKNSQLVDTRVITRHAVLYLKSIFPHVDVQRGDVTAKFRKILGIQSVDEKKDRSLHSHHAIDATTLTVIPSSAKRERMLELFAKIEEVNKMLSFSGNEDRTGLKQELDGLRNQLNKEVKSCRIGHNVSEIGTFINDNIIVNHHIKNQALTPVRRRLRKKGHIVGGVDSPRWQTGDALRGEIHKASYYGAITQYAKDKEGKVLMKEGRPQINPTIKFVIRRELKYKKSSTDSGFASWDDLGKAIVDKELFALMKGQFSAETSFKDACEQGIYMIKKGKNGMPDKKLYRIRHIRCNTVQKNALKIKEQTYKSGKEYKRYFYAAVGDLYAMCCYTNGKIREFRIYSLYDVSCHRKSDIEEIPEFITDKKGNRLMLDYKLHTGDMILLYKDNPEELYDLDNVNLSKLLYKINGFENDGLRIRMVNHLVVKEAMGESVKDYAKLPDIIRCGVKTIKFLIMGENRDFVIKNGKIIFNHR

SEQ ID NO: 22392 - protein, 1480 aa, unidentified
  REGION 1..1480: note = Cas Enzyme sequence
MKTILGLDLGTNSIGWAKVCVDDNGNYTRDIKLGSRIIPMSQDTLSNFDKGVTESPTAARTGFRGIRRIRERALQRRERLHRVLHVMGFLPLHYENAIGWNRGEATTYGKFLDNGEPKLAWQRQEDGSMRFLFMDSFYEMMADFAKYQPGLVADGRKIPLDWTLYYLRKKALTQAIRKEELAWILLNFNQKRGYYQLRGEEDEEDPTKREEYYELKVVSVEAAEEGKGGNTWYNVTLENGWIYRRQSKIELNDWTGKIRQFIVTTEYEKDGITIKKDKNGEVKRSFRAPSEDDWGLRKKRTESRLEDSGKTVGEFIYDHILFEPADKIRGNFIRTIERKFYKKELEAILREQSKYHKKLKDLNTLVNCIKELYPNNKAHQDSLMKKDMIYLLITDLIFYQRPLKSKKSLIADCPYEYYEYVIKETGEIKRQGIKCVAKSNPYYQEFRLWQFIINLRLFDRTNDKEITSEYLSSMEDYTRLFTYLNDRKEINQEILLKDFFKQKKVKMGMEKEFPIRWNYIEDKEKKYPCNETRHELLAALDKAGIDHSWLDDKERFYRLWHLLYSVESKEEAEGALRKLNDNEDFVNAFLKIKPFKKEYGAYSEKAIKKLLAVMRMGTQWNEDDICEQTRNRIQSIINGIIDEKIKERMGRTFSQLSDFQGLPEWLACYVVYGRHSETTDIQRWTKPENLMSYIKGFKQHSLRNPIVEQCILETLRTVHDIWKEAGHIDEIHIELGRSMKSTADQRARMSKSILQNENTNLRIKSLLMELKNAKEFENVRPYSPMQQEILRIYEEGALQELTKEDDQYPEISKISQMAQPSAKELLKYRLWLDQKYCSPYTGKPISLSKLFTSAYQIEHIIPQSRYFDDSFSNKVICEAEVNQLKSNMLGYEFIKKYSGEIVHCTMVGDVKILDAKEYYNFVTEHYANNRRKKENLLLEDIPQEFLNRQMNDSRYISKKVMALLSNIVREEGEQEAKSKFVIACSGGITDRLKHDWGLNDVWNSIVYPRFERLNKLTNTENFGRWENKEGKQVFQTSLPLELQRGFSKKRIDHRHHAMDALVIACVSNNIINYLNNESAKSQEKREDLRKKLCDKNRIIRKPWETFTQDAHTALENVVVSFKNYVRVINKATNYYEKYDKNGKKGIAEQKGQDMWAIRKPMHKETVFGQVNLRRRVTVKLKDALEKIPAICDKELRDYINNLVAKQFNKKQILAQFKNINYRLNMKYVDKVDVWQFSDEKDPMVATRKSVDTSFDTKRIATITDTGIQKILLNYLETKDNDPNIAFTPEGIAEMNKHITEYNNGKQHQPILKVRVSEPKGAKYQVGETGNKTSKFVEAQKGTNLYFAIYEDKEGNRSYSTIPLNEVIERLKQGLSPAEDLNKRGEKLKFYLSPNDLVYVPTEEEKLSGECKLNKDRIYKMVSATSNQCFFTPHRTANSIVNKVEYSPLNKMEKTIWGEMIKAVCWKLEVDRLGNILKIIK

SEQ ID NO: 22393 - protein, 1483 aa, unidentified
  REGION 1..1483: note = Cas Enzyme sequence
MKTILGLDLGTNSIGWAKVIVDDNENYLRDIQLGSRIIPMSQDVLGKFDKGVTESQTAIRTNFRGIRRLRERTLQRRERLHRVLHTLHCLPPHYDSAIGWDRKTSTTYGNFLNHGEPKLAWECREDGTMQFLFMDAFHEMIADFAKYQPALVADGKKVPLDWTIYYLRKKALTQPIKKEELAWILLNFNQKRGYYQLRGEEDEENAAKHEEYHELKVVGVEVDEAGKGDNTWYNVKLENGWIYRRQSKIPLDDWVGKVRAFIVTTEYEKDGTTPKKDKEGNVKRSFRSPNENDWGLRKKQTEHSLEASGIPVGAFIYDHLLKEPSDKIRGKFIHTIERKYYKQELAAILREQSKHYEELCSKDMLKACVEELYPNNPLHRESLLKKDMTYLLIEDLIFYQRPLKSKKSLIAECPYEAYSYKEKETDKMKRQGIKCIARSNPYYQEFRLWQLIANLRLRNRADERDVTAEYLPHQEDYVRLFTYLNDRKEINQETLLKDFFKLKKVAIGGEKVFPIRWNYIEDKEKKYPCNATRHELLLALDRAGMEHDWLDDRDLAYRLWHLLYSVDSKDETERALRKLKDDDAFVESFLKIKPFEKEYGAYSEKAIKKLLPVMRRGSLWNEADLCPSTKERIANILQGTIDEKLKKKIGAFISSCQQVSDFQGLPEWLACYVVYGRHSEATAIQHWETPQQLLDYIHGFKQYSLRNPIVEQCILETLRTVYDIWKEAGQIDEIHVELGREMKKTAEQRAHLTENVLRNENTNLRIKSLLMELKNDADIKDVRPHSPMQKEILRIYEEGALQTLSKEDVAFTEIMKISKMAQPSTSELKRYRLWLEQKYRSPYTGKPIALSKLFTSAYQIEHIIPKKRYFDDSFSNKVICEAEVNREKGSMLAYEFIKRRGGDVIHCTALGDVTILREAEYKALVTELYANNTSKKEKLLMEDIPQEFVNRQLNDSRYISRVVMTLLSNIVRIEGEEEATSKFVIPCSGGITDKLKKDWGLNDVWNNIVYPRFERLNALTNTTDFGQWENKEGKRVFQTSVPLELQRGYQKKRIDHRHHAMDALVIACASRNIINYLNNQEANDPTKQENARKQLCIKSRIIRKPWETFTQDAYKALDNIVVSFKNYVRVINKATNYYERYNADGKKVVDEQKGEAMWAIRKPMHKDTVFGHVNLRRKAVVKLKDALENIPAICDKTLRHYIQDLQKKHFNTKQLLAHFKSINYRLNKQAVDKVEVWQYSDNKEQLAATRKPLDTSFDAKHIATITDTGIQKILLNYLQAKGGDPAIAFTPEGIAEMNRNIAVYNGGKQHQPILKVRIAEPMGAKYPIGETGNKGAKYVEAQKGTNLYFAIYEDEEGNRTYDTVALNVVAERLKQGLTPVPEKNEKGVALKFYLSPNNLVYVPTADELLSKVCSLDKNRIYKMVSATKYQCFFLSHRVAKTIYDKVEFEALNKMERALTGEMIKSVCWKIEVDRLGHIINIIK

SEQ ID NO: 22394 - protein, 1483 aa, unidentified
  REGION 1..1483: note = Cas Enzyme sequence
MKTILGLDLGTNSIGWAKVCVDDNGNYLRDIKLGSRIIPMSQDVLGNFDKGVTESQTSVRTGYRGIRRLRERSLLRRERLHRVLHVLGYLPPHYDCSIGWNRNEPSTYGKYLNHSEPKLAWERQEDGSMRFIFMDSFHEMMADFAKRQPSLVSDGKRIPLDWTIYYLRKKALSQAIRKDELAWILLNFNQKRGYYQLRGEEDDTNSAKCEEYYELKVISVEADEEGKGGNTWYNVKLENGWIYRRQSKISLSDWVGKTREFIVTTEYEKDGVTLKRNKDGEIKRSFRSPSEDDWGLRKKRTEERLESSKMTVGAFVYEHLLSEPSDKIRGKFIRTIERKYYKEELYAILREQSKYHEELHSEGALKKCAEELYKNNQPHRDSLLKKDLIYLLLDDLIFYQRPLKTKKSLISECPYEAYSYVDKETGEIKRQGIKCIAKSNPYYQEFRLWQFISNLRFFDKVDDKDVTADYLSTRDDYVRLFAYLNDRKDINQETLLKDFLKLKKVIINSEKEFSVRWNYIEDKEKRYPCNETRHELLLALDRAGIDRSWLDEEGREYRLWHLLYSVESKEETEGALRKLKDDDEFIKSFLKIKPFKKEYGAYSEKAIKKLLAVMRIGSLWSEADICRTTRENITKILKGDIDEKFKEKISSCLSSYNQVSDLQGLPVWLACYVVYGRHSEAAEIQHWKTPKDLLVYINGFKQHSLRNPIVEQCILETLRTVHDIWKEAGHIDEIHVELGRNMKSTADQRARMSGNILRNENTNLRIKSLLLELKNDPDIKDIRPYSPMQQEKLRIYEEGALQELTKDDKDFAEIIKISTMAQPSAKELLRYKLWLDQKYCSPYTGRSISLAKLFTSAYQIEHVIPQSRYFDDSFNNKVICESEVNGLKDNMLGYEFIKECGGEIVHCTMLGDVKILSESEYKDFVNDHYAHNRRKKENLLLEDIPQEFLNRQMNDSRYISKVVKALLSNIVRAEGEEEATSKFVVSCSGGITDRLKKDWGLNDVWNKIVYPRFERLNKLTGTDSFGQWENKEGKKVFQTSLPLELQRGFNKKRIDHRHHAMDALVIACTSRSIVNYLNNESADNPKKREDLRQKLCDKNRIIRKPWDTFTQDATAALEDVVVSFKNYVRVINKATNYYEKYDKNGKKGIAEQKGQEMWAIRKPMHKETVFGRVNLRRKVTVKLKDALEDIPSICDKTLRDYVNGLVKKDFKTKHLIAHFKSLNYRLNRQHIEKVEVWQFSDKKEQLVATRKPLDTSFDNKHIDSITDTGIQKILKNYLHAKGGDPNIAFTPEGIVELNQNISLYNDGKLHQPILKVRVFEPKGAKYCVGQNGNKSAKYVEAQKGTNLYFAIYEDEEGKRSYETIPLNEVVERLKQGLSPVPEKNKAQVPLKFYLSPNDLVYVPTDEEVNDNMCYMNKDRIYKMVSSTGRECHFIPYTVASTIYNKVEFGSMNKVGRALSGEMIISVCWKLKIDRLGNIIEIIK

SEQ ID NO: 22395 - protein, 1422 aa, unidentified
  REGION 1..1422: note = Cas Enzyme sequence
MTQKVLGLDLGTNSIGSAVRNLDLSDDLQWQLEFFSSDIFRSSVNKESNGREYSLAAQRSAHRRSRGLNEVRRRRLWATLNLLIKHGFCPMSSESLMRWCTYDKRKGLFREYPIDDKDFNAWILLDFNGDGRPDYSSPYQLRRELVTRQFDFEQPIERYKLGRALYHIAQHRGFKSSKGETLSQQETNSKPSSTDEIPDVAGAMKASEEKLSKGLSTYMKEHNLLTVGAAFAQLEDEGVRVRNNNDYRAIRSQFQHEIETIFKFQQGLSVESELYERLISEKKNVGTIFYKRPLRSQRGNVGKCTLERSKPRCAIGHPLFEKFRAWTLINNIKVRMSVDTLDEQLPMKLRLDLYNECFLAFVRTEFKFEDIRKYLEKRLGIHFSYNDKTINYKDSTSVAGCPITARFRKMLGEEWESFRVEGQKERQAHSKNNISFHRVSYSIEDIWHFCYDAEEPEAVLAFAQETLRLERKKAEELVRIWSAMPQGYAMLSQKAIRNINKILMLGLKYSDAVILAKVPELVDVSDEELLSIAKDYYLVEAQVNYDKRINSIVNGLIAKYKSVSEEYRFADHNYEYLLDESDEKDIIRQIESSLGAKRWSLMNADEQTDILQKVRDRYQDFFRSHERKFVESPKLGESFENYLTKKFPMVEREQWKKLYHPSQITIYRPVSVGKDRSVLRLGNPDIGAIKNPTVLRVLNTLRRRVNQLLDDGVISPDETRVVVETARELNDANRKWALDTYNRIRHDENEKIKKILEEFYPKRDGISTDDIDKARYVIDQREVDYFTESKTYNKDIKKYKFWLEQGGQCMYTGRTINLSNLFDPNAFDIEHTIPESLSFDSSDMNLTLCDAHYNRFIKKNHIPTDMPNYDKAITIDGKEYPAITSQLQRWVERVERLNRNVEYWKGQARRAQNKDRKDQCMREMHLWKMELEYWKKKLERFTVTEVTDGFKNSQLVDTRVITRHAVLYLKSIFPHVDVQRGDVTAKFRKILGIQSVDEKKDRSLHSHHAIDATTLTIIPVSAKRDRMLELFAKIEEINKMLSFSGSEDRTGLQQELDGLKNKLQMEVKVCRIGHNVSEIGTFINDNIIVNHHIKNQALTPVRRRLRKKGYIVGGVDNPWWQTGDALRGEIHKASYYGAITQYAKDKEGKVLMKEGHPQVNPTIKFVIRRELKYKKSAADSGFASWDDLGKAIVDKELFALMKGQFPEETSFKDACEQGIYMIKKGKNGEADKKLYRIRRIRCNTVQKNALKIKEQTYKSEKEYKRYFYAAVGDLYAMCCYTNGKIREFRIYSLYDVSCHRKSDIEDIPEFITDKKGNRLMLDYKLHTGDMILLYKDNPEELYDLDNVNLSKLLYKINGFENDGLRIRMVNHLVVKEAMGESVKDYAKLPDIIRCGVKTIKFLIMGENRDFVIKNGKIIFNHR

SEQ ID NO: 22396 - protein, 1437 aa, unidentified
  REGION 1..1437: note = Cas Enzyme sequence
MKHILGLDLGSNSIGWALVQQDFENKQGKIMAAGSRIIPMDQGILGDFEKGNTVSQTAERTTYRSMRRLRERHLLRRERLHRVLHILGFLPPHYDAQIDFTKRYGKFIDNAEPKIAYNNGNFIFTNSFNEMIEDFKKHQPQLFYKKSNGEESKIPYDWTIYYLRKKALSQKITQQELAWLILHFNQKRGYYQLRGEEETESPNKEVAFHSLKVVEVEAEAPNKKGEIWYTIRLENGWIYRRTSKIPLDDWKGKTRDFIVTTDLNDDGTIKVDKEGKEKRSFRAPEENDWNLLKKKTEHDIDFSGKTVGAYIYDHLLQDPNQKIKGKLVRTIERKYYKNELKAILTKQIALQPELFTETLLADCIRELYRKNETQQQNLLSKDFLHLFVEDIIFYQRPLRSKKSTIANCTLEKRSYIDKETNERKDAPIKVCAKSNPYYQEFRALQWLQNLRIYEIETDREVTAEFIETPQDYEALFNFLMSQKEIDNESLLKYFLHAKNPQIKDKAAKSELKKWLTTYRWNYVYDVADNSSKKYPMNETGYDLQRYLQKVEGLPANFLTFDTTYRLWHLLYSVKDKVEFEKALKRFAKKKQLNETSFVESFKNFKPYPNEYGSFSEKAIKKLLPLMRFGNHWDFNRIDVSTQKRIDDLINGVANEDIRTIIREKAEKYQLNSESCFQGLPLWLAQYIVYNRHAEATDIEKWTSVSDLETYLEDFKQHSLRNPIVEQVVTETLRVVRDIWQQYGGGQANFFDEIHIELGRELKKTAEERKQLSNRNQENENTNLRIKKLLAELKEDASIQNVRPYSPVQQELLKIYEEGVFSSTDEIEEDIRKIRKKADPTTPEIQRYKLWLEQKYKSPYTGEVISLTKLFTEEYEIEHIIPQSRYYDDSLSNKVICESAVNKLKTNLLGLEFIQKHHGEKVRVAGNKEITIFTEEQYKDFVKKHYANNLAKQQKLLLDEIPEKMVARQLNDTRYISKYISEILSKIVRSDEKDEGVNSKNVIPCTGKITTALKQDWGLNDVWNELILPRFERMNQLTQTQLFTSYNDRYQKNLPTVPIQYSQGFQKKRIDHRHHAMDALVIACATREHINYMNNQHALDKSKDKKEKQQSRIDLRTILCEKKNNNWQFKKPWSTFTQEAKEALEHIVVSFKQNLRVINKATNYYEKWEEKNGTLVKKKVKQEGTNWAIRKPLHKETVSGKIVLDRKIGKDKILTATRKAVDITFTEKIISSITDTGIQKILLNYLKYKGSPEVAFSAEGLEELNKNIAQYNDGKKHQPIYKVRIFEEGSKFPLGETGAKTTKYVEAAKGTNLFFGVYQGKEKRSYATIPFNKVIERQKQGLPSVPERNEKGEPLLFSLSPNDLVYVPMEGEIAETIDFNNLSKEQKERIYKTVSFTGNECHFVKSTIASLIKSYDAKSKIGELGSLNKLEVTISGDI

SEQ ID NO: 22397 - protein, 1187 aa, unidentified
  REGION 1..1187: note = Cas Enzyme sequence
MGKKVLGLDLGVGSIGWCLITLDKDEKPQSILGMGSRIVPLSADDATEFTQGKAITKNKMRTVARTIRKGMDRYQLRREALKKVLREHGMLPDEALIKLPLLELWELRARAATPGEQLSLTELGRVLLHINQKRGYKHAKADEAAEAETKKGKETGYVAQVKGRYQILKEKGQTIGQHFAGELRANQQTAPRGVYYTYRIKEQVYPREAYIEEYDRIMAAQRVFYPELLTDALIGRIRDYIIFYQRPLKSCKQLVSFCEFEKKEKVIRVKHTNKEGVEEFVEKTITIGPKVAPKSSPIFQVCKVWESIHNIRLYHPDGTERKLEQEEKQKLFDYLQKNDKLTLKNLYKTLGIKDKDEEEELWCDKLLEKGIAGNTTAAILRKALKGYEQYEGLLSFNLTTRDSHEVDKDGVIRPIIDESYQNEPLYKLWHILYSIEDRAEMRSALIGQLGIKAEDLDNGLMDALYKIDFVKQGYGNKSAKFICKLLPHLQEGKMYSEAAEAAGIRHSDSMTAQERDERSLLDEIPLLQKNALRQPVVEKILNQMINLVNALKREHGEIDEVRVELARELKMSREEREKTTKNNSSREKENKAIAEKIKEYSITPTKSRIQKYRLWQESAESCIYCGRRVDVVQFLRGEETEVEHIIPRSILFDDSMSNKVCACRSCNQEKGNRFAMEYIQSKGWEQDYIERVDSLFQGKTISYSKRQRLLMLPKDLPEDFIERHLRLSQYISREAQGILRKGIRLVSASEGGVTAKLRQLWGYDNILRDLNLDRYRSMGETEVVTVEHRDGQRTDERIKDWSKRKDHRHHAIDALVVACTRQSYIQRLNRVNAEADRQEMDAFIKEQQQVHKLSKKEKLSLLEHWLIRQPHFTTKEVMKHVEEILISFRPGKRTVTRGRNVYKRSGKTDVQRDVLIPRGALSEETIYGVISVDGENKVVCKYPLQGLKAKDVDYIVDKALQEVVRERISQYGEKQAFAEPLYLDEAKTQEVRSVRCFTGKDQSKLVPLRYNVEGEAVGFVAPGNNHHLALYKDDDGNVVESIVTFWQAVERARYGLPIVVVNPREVMEKALAIPELPESVLKALPASNLRLMEVLRMNDMFLIGMKNGEIQAAIEGEDYPTLSRHLYRVQKLATHDYVFRYHLETTLDGKDNVGEIPKSYRAQSLKAYVKLNPRKVKIDLLGRVSLV

SEQ ID NO: 22398 - protein, 1435 aa, unidentified
  REGION 1..1435: note = Cas Enzyme sequence
MKNILGLDLGTTSIGFAHIVEDENKEKSEIKELGVRIVSLTTDEQSDFEKGKSISTNANRPLKHGARLNLDRYQQRRKYLIDLLQKANLITPSSVLAENGKNTTHSTWQLRAKAVTERIEKEEFARVLLAINKKRGYKSSRKVKTEDEGQAIDGMAIAKRLYDENLTPGQLSLQLLQQNKKLLPDFYRSDLQKEFDLVWNLQKQFYPDILTDSFYKELQGKGKDATSKAFSKRYHFDTAENKGSKESVRLQAYQWRAEAISKQLSKEEVAYVLTEINNNLNNTSGYLGAISDRSKELYFNRQTVGQYLYAQLQENRHNSLKNKVFYRQDYLDEFERIWETQASFHKELTDELKKQIRDVVIFYQRKLKSQKGLVSFCEFESKEIEIEKDGKAITKSIGARVVPKSSPLFQEFKIWQILNNVICKRKGIRKKKVSTNTTQSDLLNESSQTISGLDMKCKQLLFEELNIKGDLKSDKILKLLGYSPQEWEINYNQLEGNRTQKSLYEAYLKIIEIEGYEVKDILQIKSTKDDWSLDESPLSASEIRERVKAIFQTLGICTKILYFDPLLPVKEFEQQYSYQLWHLLYSYESDDSTSGNETLYQILEKKYAFKREHARILANVALQDDYGSLSTKAIRKIYPYIKENQYSKACELAGYKHSKLSLTTEELEARELKNIIPLLKKNALRNPVVEKILNQMINVVNALIEKNSERDAEGKITKYFHFDEIRIELARELKKNAQERYEMTQNINKAKLEHQKISEKLQKQFGIKNPTKSDIIRYRLYQELEHNGYKELYTNAYIAPDVLFSKNIDIEHIVPKARVFDDSFSNKTLAFKEFNIKKGESTAFDYITSLNCEGELNQYLTRVENAYKTKSISLTKYKNLLKKASEIGDGFINRDLRDTQYIAKKAKEILFQVTKNVLSTSGNITDRLREDWGLVDVMKELNMPKYQSLGLTEVEERKDGNKVTVIKDWTKRNDHRHHAMDALTVAFTKPSYIQYLNHLNARKDENNKNYSVILAIEKKETIKVPTNNGKNKRVFIEPIPNFRQVAKKHLEEIFISHKAKNKVVTKNINKPAGTDKQQITLTPRGQLHKETIYGKYQYYVNKEEKVGVKFDERTITKVSNPLYREALLKRLQANDNDPKKAFTGKNALSKKPIYLDEAKTKTLPEKVNLTYLEEDFSIRKDISPDNFKDLKSIEKVIDQGVKRILIKRLQAYDNDPKKAFVDLEKNPIWLNKEKGIAIKRVTISGVSNAQPLHIGKNHLGKTTLNKEGKEIPVDYVSTGNNHHVAIYQDKDGNLQEQIVSFFEAVVRAQQGLPIIDKNYKQAEGWQFMFTMKQNEMFVFPNATTGFNPTEIDLLDPKNKKLISPNLFRVQTISIVKYGNSVVRDFKFRHHLEATLQDDKILQGITFQQIKSLEPLRNIVKVRINHLGDIVNIGEY

SEQ ID NO: 22399 - protein, 1370 aa, unidentified
  REGION 1..1370: note = Cas Enzyme sequence
EQTNFEKGKPITTNANRTLGRSARRNLQRYKLRRSELIEILKENRWIDDESILCEISNHSTFETYRLRAQSCVSKISLVEFARVLLMINKKRGYRSSRKVNNTEEGQLIDGMAIAKQLYNDNLTPGQFVYNLLKEGKRKVPDFYRSDLYNELEIIWDFQKVFYEEIMTDTLYESISNKGKVQTWASLKTPFELVGIKRDKKRDELRLENYRWRTQALTEKLSLEQLAIVLQEVNGQLYNSSGYLGAISDRSKELYFNQETVGQYLYKKLQDNTHFRLKNQVFYRQDYLDEFEKLWEVQSQFHKELTPLLKTKIRDVIIFYQRKLKSQKGLISFCEFEQREVTIDGKTTTIGSRVAHRSSLLFQEFKIWQQLHNVRLRNKNTKEIVELSEEAKEVLFDELNVKGKLSAAKVLKLLDNGRSYELNYTELDGNTTNAALYEKFLEIIDIEGYDVRDELRIKLNKDDISIVDLDISALDIKEMIIRIFKILNIDTTILIFDGELENKAFENQQSYQLWHLLHSYEEDDSTTGMDTLYRLLHEKFNFSIEQSKILGSVVLSRDYGSLSSKAIRNIFPFIKSNEYSKACALAGYRHSKESLTTEEISSRVIKDRLTVLPKNSLRNPVVEKIINQMVNVINTLIDTENDKLEKVGLPRSFKFDEIRVELARDLKKNAKERAELTKQINTGKSVHEAIVKILQREDGVENPTRNDIIRYKLYQELKNNGYKNLYTQEYVERKDLFSNKYDIDHIIPQSRLFDDSFSNKTLCPREINIKKGSKTAYDFILDAYGQDKANLFETRIKNLGELKEEGISKAKCQKLLMRGKDIGEGFIQRDLRDSQYIAKKAKAMLLEITPVVVTTSGAITDRLRNDWGLVNVMKELNLPKYRAMDRTQIMEIKGAKKEIILDWTKRNDHRHHAMDALTIAFTKRSFIQYLNNLNARKEENQTISNTNRRNSLEINDLKISTKEVLGIQQKETIKIKDEQGHSKRVFKEPIPHFRHVAKELLDQVLVSHKAKNKVVTKNKNRVNGSGKMQETLTPRGQLHKETVYGKIKQYISKAEKISSKFDEKTIEKVSNPHYRALLLERLNAFGNNPKLAFSGKNTLIKNPIYIDSSEQETIPEKVKLIWLEDNYTIRKDVGPDLKIDKVIDQGVKRILQSRLDEYGGDVKKAFSNLDQDPIWLNKEKGIAIKRVKISGVNNVEVLHTKKDHLGKIILDTDNNPIPVDFVSTGNNHHVAIYANEKGNLEERVVSFFEAVTRVNEGLPIIDKVFNQHLGWKFMFTMKQNEMFLFPAEDFNPREVDLFNRANYKVISKHLFRVQKFTIRDYFFRHHLETNVEDLTTTKGITWRREGLAGIKDILKVRTNHLGEIIQINEY

SEQ ID NO: 22400 - protein, 1483 aa, unidentified
  REGION 1..1483: note = Cas Enzyme sequence
MKTILGLDLGTNSIGWAKVCIDDNGNYLRDIKLGSRIIPMSQDVLGNFDKGVTESQTSVRTGYRGIRRLRERSLLRRERLHRVLHVLDYLPPHYDCSIGWDRNAPSTYGKYLNHSEPKLAWERQEDGSMRFIFMDSFHEMMADFAKRQPSLVSDGKRIPLDWTIYYLRKKALSQAIRKDELAWILLNFNQKRGYYQLRGEEDDTNSAKCEEYYELKVISVEADEEGKGGNTWYNVKLENGWIYRRQSKISLSDWVGKTREFIVTTEYEKDGVTLKRNKDGEIKRSFRSPSEDDWGLRKKRTEERLESSKMTVGAFVYEHLLSEPSDKIRGKFIRTIERKYYKEELYAILREQSKYHEELHSEGALKKCAEELYKNNQPHRDSLLKKDLIYLLLDDLIFYQRPLKTKKSLISECPYEAYSYVDKETGEIKRQGIKCIAKSNPYYQEFRLWQFISNLRFFDKVDDKDVTADYLSTRDDYVRLFAYLNDRKDINQETLLKEFLKLKKVIINSEKEFSVRWNYIEDKEKRYPCNETRHELLLALDRAGIDRSWLDEEGREYRLWHLLYSVESKEETEGALRKLKDDDEFIKSFLKIKPFKKEYGAYSEKAIKKLLAVMRIGSLWSEADICKTTKENITKMLKGDIDDKLKEKISSCLSSYNQVSDFQGLPVWLACYVVYGRHSEAAEIQHWRTPNDLLVYINGFKQHSLRNPIVEQCILETLRTVHDIWKEAGHIDEIHVELGRNMKSTADQRARMSGNILRNENTNLRIKSLLLELKNDPDIKDVRPYSPMQQEKLRIYEEGALQELTKDDKDFAEIIKISTMAQPSAKELLRYKLWLDQKYCSPYTGRSISLAKLFTSAYQIEHVIPQSRYFDDSFNNKVICESEVNGLKDNMLGYEFIKECGGEIVHCTMLGDVKILSESEYKDFVNDHYAHNRRKKENLLLEDIPQEFLNRQMNDSRYISKVVKALLSNIVRAEGEEEATSKFVVSCSGGITDRLKKDWGLNDVWNKIVYPRFERLNKLTGTDSFGQWENKEGKKVFQTSLPLELQRGFNKKRIDHRHHAMDALVIACTSRSIVNYLNNESADNPKKREDLRQKLCDKNRIIRKPWDTFTQDATAALEDVVVSFKNYVRVINKATNYYEKYDKNGKKGIAEQKGQEMWAIRKPMHKETVFGRVNLRRKVTVKLKDALEDIPSICDKTLRDYVNGLVKKNFKTKHLIAHFKSLNYRLNRQHIEKVEVWQFSDKKEQLVATRKPLDTSFDNKHIDSITDTGIQKILKNYLHAKGGDPNIAFTPEGIVELNQNISLYNDGKLHQPILKVRVFEPKGAKYCVGQNGNKSAKYVEAQKGTNLYFAIYEDEEGKRSYETIPLNEVVERLKQGLSPVPEKNKAQIPLKFYLSPNDLVYVPTDEEVNDNRCYMNKDRIYKMVSSTGNQCMFVPFRVATCIVNKMEYSPLNKMEKAITGEMVKAICWKLVVDRLGNIIKIIK

SEQ ID NO: 22401 - protein, 1419 aa, unidentified
  REGION 1..1419: note = Cas Enzyme sequence
MSIWKLQYPPLDLKIYDKFLVYSRVNPLTVDEMQNFEKGKSITTNADRTLKRSMRRNLQRYKLRRDVLIKLLKKVGFITDKTILSEQGNRTTFETYRLRAKAAEEEISLEELARVLLMINKKRGYKSSRKAKGEEDGSLIDGMEIAKKLYDEDLTPGQLCLQLLESGKKTFPDFYRSDLQDEFDRIWNFQKQFNPQSFCDTAKEEVKGKNKSQTWAILAKYFTWTKEVSVWNENEAKTENQEKEYRLVGLKRTVKGEELKKENYCWRVQALTERLDLEEIAVVLQEINGQISASSGYLGAISDRSKVLYFNHQTVGQYQMAELNKNPNMSLRNMVFYRQDYLDEFNAIWEKQAEFHKELTPELKKGIRDVIIFYQRRLKSQKGLIGFCEFENREIIVEKNGKTQTKIIGCKVIPRSHPLFQEFKIWQTLNNIEVFVGERKRKRKQTNVSSDLFDDTEDVLVTKGRRFLYQEEKEILAKELSIKENLKKAEVLKLLFENPQELDMNFKQIDGNRTGFALFSAYGRMIEKYGYEPLDFKKPADEIINQLKAVFSDLGWNTDLLSIGLDKEGKELEMQPYFRLWHLLYSFEGDNTPAGNGKLIEKIMQLCRVEKEYAIELANISFQDDYGSLSAKAIKKILPYLKEGNQYDVACEYAGYRHSKSSLTKEEIENKALKDKLDILPKNSLRNPVVEKILNQMVNVVNAVIDAYGRPDEIRVELARELKKSAKEREELTKAIAKNTREHDEIRKLLQSEFGMIHVSRNDIIRYKLYEELKENGYKTLYSNQYIPKEKLFSKEIDIEHIIPQARLFDDSLSNKTLEYKAINIEKGNKTAYDFVKDKYGEEGLQEYLNRCETVCNDKKAKLRKLKMQQNDIPDGFIDRDLRNTQYIAKKALSMLKDICRRVVATTGSITDKLREDWQLVDVMKELNLPKYEALGLVERFEDKDGRIIKRIKDWTKRNDHRHHAMDALTVAFTKDVFIQYFNNKNAAWESDCKEHANIIGIKTRYFESGRAVPPMPLGQFRVEAKSHLENLLVSIKAKNKVVTTNVNCIRKKGGISEKHQQTPRGQLHLETIYGSHKQYVTKMEKVNASFDAAKIATVSRQNYRNALLRRLEAFGNDPKKAFTGKNTLEKNPVYLDRAQTMRMPDRVQTVEFEAVYTIRKPIDSNLNVEKVVDAKVRAILEQRLEEYGGDAKKAFVNLDENPIWLNQEKGISIKRVSIRGINNAQSLHVKKDKNGNPILDENGKQIPVDFVNTGNNHHVAIYRKPVLDKKGQVMFDEDGNLMYELDEVVVSFFEAVTRANLGLPIINKDYRRSEGWQFLFSMKQNEYFVFPNEKTGFNPKEIDLLDPDNYAVISPNLFRVQKFSTKNYCFRHHLETDVQERKALLGITYKWQLGLKAIKDIVKVRINHIGQIVSVGEY

SEQ ID NO: 22402 - protein, 1422 aa, unidentified
  REGION 1..1422: note = Cas Enzyme sequence
MTQKVLGLDLGTNSIGSSVRNLDLSDDLKGQLEFFSSDIFRSSVNKESNGREYSLAAQRSAHSRSRGLNEARRRKLWATLDLLIKYGFCPMSPDSLMRWRTYDKQRGFFREYPIDDKDFNAWILLDFDGDGKPDYSSPYQLRRELVTRQFDFDQPIERYKLGRALYHIAQHRGFKSSKGETLLQQETNSKQSLTDETTDVAGEMKASEEKLSKGLSTYMKENKLLTVGAAFAQLEDEGVRVRNNNDYRAIRSQFQREIETIFKFQQGLSVENEFYECLVSEKKNIGTIFYKRPLRSQRGNVGKCTLERTKPRCALGHPLFEKFRAWTLINNIKVRMPEEEQAEQLPMKLRFELYNDCFLAFVRAEFKFEDIRKYLEKRLGIHFSYNDKTINYKDSTSVAGCPITARFRKLLGEDWESFHVDGQKQRQAHGKNNTSFHTVSYSTNDIWHFCYDAEEPEAVLSFAQDNLKWEKKKAEELVRIWSAIPQGYAMLSQKAIRNINKMLILGMKYSDAVLLAKVPEIVEITDGEILSVTEDYHRVEAQVRYEKQINNIVNALIAKYKSASEEYRFADHNYEYQLDKSDEEEIVRQIESCLGARKWGLMDADEQTDILQKVRDKYQNFFRSHERKFVESPKLGDCFEEYLVKRFPMVKGEQWKKLYHPSQIAIYRPVSAGKDRSALRLGNPDIGAIKNSTVLRVLNTLKKRVNQLLDDGVISPDETRVVVETARELNDANRKWALDTYNRIRHDENEKIKKILEEFYPKRDGISTDDIDKARYVIDQREVDYFTESKTYNKDIKKYKFWLEQGGQCMYTGRTINLSNLFDPNAFDIEHTIPESLSFDSSDMNQTLCDAHYNRFIKKNHIPADMPNYDKAVIIDGKEYPAMTSQLQRWIDRVERLNRNVEYWKGQARRAQNKDRKDQCIREMHLWGMELEYWEKKLERFTVTEVTDGFKNSQLVDTRVITRHAVLYLKSIFPHVDVQRGDVTAKFRKILGIQSVDEKKDRSLHSHHAIDATTLTVIPSSAKRERMLELFAKIEEVNKMLSFSGNEDRTGLKQELDGLKNQLNKEVKACRIGHNVSEIGTFINDNIIVNHHIKNQALTPVRRRLRKKGHIVGGVDSPRWQTGDALRGEIHKASYYGAITQYAKDKEGKVLMKEGRPQINPTIKFVICRELKYKKSSTDSGFASWDDLGKAIVDKELFALMKGQFPAETSFKDACEQGIYMIKKGKNGMPDKKLYRIRHIRCNTVQKNALKIKEQTYKSGKEYKRYFYAAVGDLYAMCCYTNGKIREFRIYSLYDVSCHRKSDIEDIPEFITDKKGNRLMLDYKLHTGDMILLYKDNPEELYDLDNVNLSKLLYKINGFENDGLRIRMVNHLVVKEAMGESVKDYAKLPDIIRCGVKTIKFLIMGENRDFVIKNGKIIFNHR

SEQ ID NO: 22403 - protein, 1347 aa, unidentified
  REGION 1..1347: note = Cas Enzyme sequence
FHEMIADFAKHHPALVANGKKVPLDWTIYYLRKKALTQPIKKEELAWILLNFNQKRGYYQLRGEEDEEHAAKHEEYHELKVVGVEADEAGKGDNTWYNVKLENGWIYRRQSKIPLDDWVGKVRAFIVTTEYEKDGTTPKKDKEGNVKRSFRSPNENDWGLRKKQTEHSLEASGIPVGAFIYDHLLKEPSDKIRGKFIHTIERKYYKQELAAILREQSKHHEELCSKDMLKACVEELYPNNPLHRESLLKKNMTYLLIEDLIFYQRPLKSKKSLIAECPYEAYSYVDKETGEVKRQGIKCIARSNPYYQEFRLWQLIANLRLRNRADERDVTAEYLPHQEDYVRLFTYLNDRKEINQETLLKDFFKLKKVTIGGEKVFPIRWNYIEDKEKKYPCNATRHELLLALDRAGMEHDWLDNRDLAYRLWHLLYSVDSKDETERALRKLKDDDAFVGSFLKIKPFEKEYGAYSEKAIKKLLPVMRRGSLWNEADLCPSTKERIANILQGTIDEKLKKKIGAFISSCQQVSDFQGLPEWLACYVVYGRHSEATAIQHWETPEQLLAYIHGFKQYSLRNPIVEQCILETLRTVYDIWKEAGQIDEIHVELGREMKKTSEQRAHLTENVLRNENTNLRIKSLLMELKNDADMKDVRPHSPMQQEILRIYEEGALQTLSKDDAAFTEIMKISKMAQPSTSELKRYRLWLEQKYRSPYTGKPIALSKLFTSAYQIEHIIPKKRYFDDSFSNKVICEAEVNGAKGSMLAYEFIKDCGGNVIHCTTLGDVTILSEAEYKALVTELYANNTSKKEKLLMEDIPQEFVNRQLNDSRYISRVVMTLLSNIVRIEGEEEATSKFVIPCSGGITDKLKKDWGLNDVWNNIVYPRFERLNALTNTTDFGQWENKEGKRVFQTSVPLELQRGYQKKRIDHRHHAMDALVIACASRNIINYLNNQEANDPTKQENARKQLCIKSRIIRKPWETFTQDAHKALDNIVVSFKNYVRVINKATNYYERYHADGKKVVDEQKGETMWAIRKPLHKDTVFGHVNLRRKAVVKLKDALENIPAICDKTLRHYIQDLQKKHFNTKQLLAHFKSINYRLNKQAVDKVEVWQYSDDKEQLAATRKPLDTSFDVKHIAAITDTGIQKILLNYLQAKGGDPAIAFTPEGIAEINRNIAVYNGGKQHQPILKVRIAEPMGAKYPVGETGNKGTKYVEAQKGTNLYFAIYEDEEGNRTYETITLRIVAEQLKLECSPVPEKNEKGVALKFYLSPNDLVYVPTADELLSKECSLDKNRIYKMVSATKSECLFIPHSVAKTIYDKVEFEALNKMGRALTGEMIKSVCWKIEVDRLGHIVNIIK

SEQ ID NO: 22404 - protein, 1382 aa, unidentified
  REGION 1..1382: note = Cas Enzyme sequence
MKRILGLDLGTASVGWAVVNEAENSEEQSSITALGSRVVLLSADEKNNFLTGKSVSATATRTAKRGARRNLQRYKLRREWLKDALVSAGIINENTCLNDSNSKELFATYVSRAKAVTEQIALEDFAKVLFMINKKRGYKSNRKTDNTESEDGQIIDGLDLAKKLKARNITPGQYLLELFKENKKNKAVFYRSDLQEELNRIWAFQSQFYPEILDNTLLSAITNKSKKAVIGLFKGIKNIEIADVKTKERTEKALTWRSEALHKQLEIGEVAYAIAEVMGAISQSSARLALLSDNSKHLEFEGLTIGQYLLNLLRNNPNSSLKNINFYRKDYEDEFNSIWNKQASFYPQLTESLRSTIFNSIFMQRNLKSCKALLANCELEFAEKRITLPDGSCQTKTIYSKVCPKSSPYFQEFQIWQSLSNIRIIDKENTHLTKSQELSYDQKVMLLPELMILSELKANKIIEILFGKKSNYTINMPSIKGNKTNETIFNALLEIVELTGHSIDNIVKTDANQQIEAVKSIFESLGYKTDFITFDSTIEGKDGLNQPYYKLWHLLYSYCGDNSKTGNEALIRKIEELTGLEKEEAKVLANCTFENDYASLSTKAIRKLLPHLQSNLDYSEACEAAGYNHSKRSRTKEDIKNKVYKDKLDLLPRNSLRNPIVEKILNQMIHVINQTSEAYGKPDEIRIEMAREIKKNKIQREKLANQLRQNTAELERIKDILRKDFKLSHISHNDILRYRLYEELSLNGYKTLYSNTYIERQQILDPTVTIEHIVPKALAFDDSFSNKTLEIQPVNGEKSNQTAFDFISKKYGSEALEQYINRVNNLFENGKISKTKRDNLLRKQEDIPSDFLNRDLRNTEYIAKKALEILEDYVPRVTPTIGEITKTLREDWQLVNIMRELNWEKYNSLGLTSFYYDRNGTKIGLIHNWTKRNDHRHHAMDALTIAFTKPSIIQYLNNLKSQNDKGSSIYAIQAKETYIDETRKRLIKPPYNIKQFRNDAKQMLDNIFVSHKAKNKVVTPNTIVTKKKRKAGKETKAEEKRTFLTPRGALSNETVYRKICNYETKEITINSKLTYEIALTIAKKKEREAVLERLAQHNNNPTTAFKNYNKNPIMLQTSVGEKPLISVKIVNYKELFVKRSEINEKLDIKRVLDAKVRARLTDRLKEYNNDPKAAFANLEENPIWLNEEKGIALKHVTTIERVVGLPIRPKRNINGEIMKDEQGQPLKSHYVATGGNHHVAIYEDEEGKWHEKVVSFNEAASRSIQKLPIIDKDFNKELGWVFQFTMKQNEMFVFPDKEAGFDPLAIDLKDPANKSLISKHLYRIQKISSGDYYFRHHLETNVEENKEVKGITWKRITSLSPLQGIIKVRINHIGQIIDIGEY

SEQ ID NO: 22405 - protein, 1380 aa, unidentified
  REGION 1..1380: note = Cas Enzyme sequence
MKKILGLDLGTTSIGWALVYESENTDEKSSIVRLGVRVNPLSVDEKGNFEKGKAITTNADRQQTHGARINLQRYKLRRENLKDCLQKQGWIGTEALCEEGKASTFETYMLRAKAAEEEISLHELCRVLFMLNKKRGYKSNRKANNKEDGKLFDGMTVAKKLYEEHLTPAEYSLKLLSSGKKFKQEYYRSDLKEEFDRIWNEQQKYYPEILTDDFKQQLQGKSKGNTSKIFLGKYGIYSADLKGLDRKLQPLKWRVEALKQQVDKEVLAFVISDLNGQIASTSGLLGAISDRSKELYFNKQTVGQYLWTSLKETPYVSIKNKPFYRQDYLDEFEKIWETQATYHKELTPELKQEIRDIIIFYQRPLKSKKGLISVCELEQRKVKVTIDGKEKEISIGPKVAPKSSPMFQEFRIWQNLNNILLIDKGNNSIHPLYEEEKNLLYEELSVKEKLSKAEALKVLNKNSKQWDLNYKEIEGNRTQAVLYDCYNRIIAMTGHEECNFKKLKASEIRSYVKTIFTGLGFNTDILEFDSSLTGHELEKQPMYQLWHLLYSYESDNSRTGNDALLRKLEIAFGFLKEYAAVLSDVVFEDSYGNLSVKAMRKILPHLQAGLDYSQACEEAGYKHSRRSLTKNELDQKEYKEKLELLPKNSLHNPVVEKILNQMINVINAVIDEYGKPDEIRIELARELKIGAAERENMTRSISQGNAENKRIREILQKEFALSYISRNDIIKYKLYEELKSNGFKTLYSDTYISKDKLFSKDFDIEHIIPKARLFDDSLSNKTIEARDVNIAKSNKTAFDFIFGKYGQQGIEAYKKKLDILLQDGSISKAKYNRLLMKEADIPSGFIDRDLRDTQYIAKKAYEILSDLVRNVTPTTGAVTSRLREDWQLVDVMKELNFEKYQKLGLAEVIEDRDGRKIKRIKDWTKRNDHRHHAMDALTIAFTKPSYIQYLNNLNARSDKSSSIYGIENKELHREDNKLRFNAPLSINEFRAEARRHLKSILVSVKAKNKVMTQNVNVIKTKHGVIKKVQLTPRGELHNATFYGTKKRSIIKMIKVGAALDEATIKKVSSSFIREALLDRLHEYNGDAKKAFTGRNSIDKNPIYIDEEHKKTVPSLVKTIEWEMYHPTRKMISPDLKIDKVIDKGIREILRTRLAKFNGDAQKAFSNLDENPIYKDEAKKITLKRVSLEGVSSVIPLHKLKDMGGKPVVGKDGKPVWGDYVQTSNNHHIAFYMDENGNLQDDVVTFFKAARRKSQGVPVIDKNYNHDKGWHFLFTMKQNEYFVFPNEATGFIPTEVDLMDEANYDMISPNLYRVQKMSKTKQGITDKRDYWFRHHLETVLNNDLKVRNSIFKQINSLKPLEGIVKVRINAIGKIVAIGEYD

SEQ ID NO: 22406 - protein, 1480 aa, unidentified
  REGION 1..1480: note = Cas Enzyme sequence
MKTILGLDLGTNSIGWAKVCVDDNGNYTREIKLGSRIIPMSQDTLSNFDKGVTESPTAARTGFRGIRRIRERALQRRERLHRVLHVMGFLPPHYENAIGWNREEATTYGKFLDNAEPKLAWEKQEDGSMRFLFMDSFYEMMADFAKYQPGIVADGRKIPLDWTLYYLRKKALTQAIRKEELAWILLNFNQKRGYYQLRGEEDEENPTKREEYYELKVVGVEAAEEGKGGNRWYNITLENGWIYRRQSKIELNDWIGKVRPFIVTTEYEIDGVTIKKDKNGEVKRSFRAPSENDWGLRKKRTESLLEKSGKTVGTFIYDHILSEPADKIRGNFVRTIERKFYKKELEAILREQSKHHKELKKQDTLIACIKELYPNNKPHQDSLMKKDMAYLLITDLIFYQRPLKSKKSLIADCPYEYYEYVIKETGEIKRQAIKCIAKSNPYYQEFRLWQFIINLRLFNRTNDKEVTSEYLSSMEDYTRLFTYLNDRKDINQETLLKDFCKQKKVKMGMEKEFPIRWNYIEDKEKKYPCNETRHELLAALGKAGIDHSWLDDKELFYRLWHLLYSVESKEEAEGALRKLNDNDDFVNAFLKVKPFKKEYGAYSEKAIKKLLAVMRMGDLWDETDICEQTRYRIQNIIKGDIDEKIKDRMGRTFCLLSDFQGLPEWLACYVVYGRHSEATDIKRWTKPENLMAYINGFKQHSLRNPIVEQCILETLRTVHDIWKEAGHIDEIHIELGRSMKSTADQRARMSKSIMQNENTNLRIKSLLMELKNTKEFENVRPYSPMQQEILRIYEEGALQELTKEDAQYNEISKISQMAQPSANELLKYRLWLEQKYCSPYTGKPISLSKLFTSAYQIEHIIPQSRYFDDSFTNKVICEAEVNQLKSNMLGYEFIKKHGGEIVHCTMVGDVKLLDAKEYYNFVTEHYANNRRKKEKLLMEDIPQEFLNRQMNDSRYISKKVMAILSNIVREEDEQEAKSKFVIACSGGITDRLKQDWGLNDVWNSIVYPRFERLNKLTNTENFGRWENKEGKQVFQTSVPLELQKGFSKKRIDHRHHAMDALVIACASNNIINYLNNESAKSQEKREDLRKKLCDKNRIIRKPWDTFTQDAHTALENVVVSFKNYIRVINKATNYYEKYDKNGKKEIAEQKGQDMWAIRKPMHKETVFGQVNLRRKVTIKLKDALEKIPAIYDKELRDYINILVAKQFNKKQILAHFKSINYRLNMKSVDKVDVWQFSNEKEPMVATRKPIDTSFDTKRIATITDTGIQNILRNYLKAKDNNPNIAFTPEGIAEMNKHITEYNNGKQHQPILKVRVSEPKGAKYQVGETGNKTSKFVEAQKGTNLYFAIYEDKEGNRSYNTIPLNEVIERLKQGLSPVEDLNKQGEKLKFYLSPNDLVYVPTEEEKLSSECKLNKEQIYKMVSSTGNECHFIPYSVAKPIYDKFEFEAKNKMGRALTGEMIKAVCWKLEVDRLGNIHKIIK

SEQ ID NO: 22407 - protein, 1422 aa, unidentified
  REGION 1..1422: note = Cas Enzyme sequence
MTQKVLGLDLGTNSIGSAVRNLDLSDDLQWQLEFFSSDIFRSSVNKESNGREYSLAAQRSAHRRSRGLNEVRRRRLWATLNLLIKHGFCPMSSESLMRWCTYDKRKGLFREYPIDDKNFNAWILLDFNGDGRPDYSSPYQLRRELVTRQFDFEQPIERYKLGRALYHIAQHRGFKSSKGETLSQQETNSKPSSTDEIPDVAGAMKASEEKLSKGLSTYMKEHNLLTVGAAFAQLEDEGVRVRNNNDYRAIRSQFQHEIETIFKFQQGLSVESELYERLISEKKNVGTIFYKRPLRSQRGNVGKCTLERSKPRCAIGHPLFEKFRAWTLINNIKVRMSVDTLDEQLPMKLRLDLYNECFLAFVRTEFKFEDIRKYLEKRLGIHFSYNDKTINYKDSTSVASCPITARFRKMLGEEWESFRVEGQKERQAHSKNNISFHRVSYSIEDIWHFCYDAEEPEAVLAFAQETLRLERKKAEELVRIWSAIPQGYAMLSQKAIRNINKILMLGLKYSDAVILAKVPELVDVSDEELLSIAKDYYLVEAQVNYDKRINSIVNGLIAKYKSVSEEYRFADHNYEYLLDESDEKDIIRQIENSLGARRWSLMDADEQTDILQKVRDRFQDFFRSHERKFVESPKLGESFENYLTKKFPMVEREQWKKLYHPSQITIYRPVSVGKDRSVLRLGNPDIGAIKNPTVLRVLNTLRRRVNQLLDDGVISPDETRVVVETARELNDANRKWALDTYNRIRHDENEKIKKILEEFYPKRDGISTDDIDKARYVIDQREVDYFTESKTYNKDIKKYKFWLEQGGQCMYTGRTINLSNLFDPNAFDIEHTIPESLSFDSSDMNQTLCDAHYNRFIKKNHIPADMPNYDKAITIDGKEYPAITSQLQRWIDRVERLNRNVEYWKGQARRAQNKDRKDQCMREMHLWGMELEYWKKKLERFTVTEVTDGFKNSQLVDTRVITRHAVLYLKSIFPHVDVQRGDVTAKFRKILGIQSVDEKKDRSLHSHHAIDATTLTIIPVSAKRDRMLELFAKIEEINKMLSFSGSGDRTGLQQELDGLKNKLQMEVKVCRIGHNVSEIGTFINDNIIVNHHIMNQALTPVRRRLRKKGYIVGGVDNSRWQTGDALRGEIHKASYYGAITQYAKDKEGKVLMKEGRPQVNPTIKFVIRRELKYKKSAADSGFASWDDLGKAIVDKELFALMKGQFPEETSFKDACEQGVYMIKKGKNGMPDKKLYRIRHIRCNTVQKNALKIKEQTYKSEKEYKRYFYAAVGDLYAMCCYTNGKIREFRIYSLYDVSCHRKSDIEDIPEFITDKKGNRLMLDYKLHTGDMILLYKDNPEELYDLDNVNLSKLLYKINGFENDGLRIRMVNHLVVKEAMGESVKDYAKLPDIIRCGVKTIKFLIMGENRDFVIKNGKIIFNHR

SEQ ID NO: 22408 - protein, 1451 aa, unidentified
  REGION 1..1451: note = Cas Enzyme sequence
MSYRSNFRGVRRLRERHLQRRERLHRVLHALKFLPKHYEDAIGWDRNEPAIYGKFINNSEPKLAWERQEDGSMHFLFMESFYEMMADFAKMQPSLVSGEKKIPLDWTIYYLRKKALTQQIKKEELAWILLNFNQKRGYYQLRGEEEEDNPTKRKEYYKLKVIGVEADGAPKAGKIWYNIHLENGWTARCQSKVPLDNWVGNIKEYVVTTEYEADGETPKYDKEGKIKRSFKSPEKGDWQLIKTRTEKFIESSNKTVGTFIYDHLLKEPFDKIRGKYIRTIERKYYKNELYKILCEQAKYHKELDSLDTLNACAKELYKNNQQHQEYLLKKDMKYLLLDDLIFYQRPLKSKKSLIADCPYEVYKYNYKQTGKKEQKKIKCIAKSNPYYQEFRLWQFISNIHLFNVTDGKDVTSEYLKTKEDYVRLFTYLNDRKEIKQETLLKGFLKLKKETIGSEKIYPIRWNYIEDANKSYPCNTTRHELLLAFDRAGIQRELLNVEGREYRLWHLLYSIESKDKTESALRKLKSNKAFSDLNIDDAFVNSFLKIKPFKKEYGAYSEKAIKKLLAVMRRGSLWKEADICEATKQNIAKILQNDIDEKLKKKIEAAVSSFNKLSDFQGLPTWLACYVVYGRHSEAAQIQCWQSPEDLKTYINKFKQHSLRNPIVEQCLLETLRTVYDIWKDAGQIDEIHIELGRNMKSTAEQRARKTNEFLRNENTNLRIKNLLMELKNDDKIENVRPYSPSQQEILRIYEEGALQELSKEDEMYEDISKISKMAQPSPTELSRYKLWLEQKYRSPYTGRVIPLSKLFTTAYQIEHIIPQSRYFDDSFNNKVICESEVNSLKDNMLGYEFIKECGGQKVHCTLLEGNVEIFTEEEYKTFVTKHYVGNPRKKDNLLLEDIPQEFSARQLNDSRYISKMVQTVLSNIVRTKDEQEAISKFVVSCNGMITDRLKKDWGLNDVWNTIVCPRFKRLNEITKTNAFGHWEDKAGKHVFQTIVPLELQRGFSKKRIDHRHHAMDALVIACASRNIVNYLNNESANSPEKREDLRKKLCDEKRKIRKPWKTFTQDTREALSDVVVSFKNYVRVINKATNYYEHYSSSGNKVMISQKGNDMWAIRKPLHKESFFGHVNLRRKATVSLKKALENIPAICDKTLRDYINALVEKHFNTRQLLAHFKSINYRLNRKRVDKVEVWQFSDEKIEMVARRKPLDTSFDAKQISFITDTGIQKILLNYLQSKEGNAEIAFTPEGIEEMNKNISIYNDGKAHQPILNVRVATPKGMKYPVGQTGNKATKFVVAEKGTNLYFAIYENELGERSYDTIPLDIVIKRLKEGQSPVPQINKVGIPLKFYLSPNDLVYVPTKENEDELCRDRIYKFVDSSGTTANFVPHTSANTIYNVDKEYAKKYCNGAVILNEYGLGSPQSKNQKDLDGEMIKEICWKLKVDRLGNIIKVIK

SEQ ID NO: 22409 - protein, 1380 aa, unidentified
  REGION 1..1380: note = Cas Enzyme sequence
MKRILGLDLGTTSIGWALVNEAENNNETSSIVRLGVRVNPLTADEKSNFEKGKAITTNAERQKGHTARINLQRYKLRRQNLYNCLKEYGWFGNNALFEEGKASTFETYKLRAKAAEEEISLHELARILFMLNKKRGYKSNRKANNKEDGQLFDGMTIAKKLSEENLTPAEYSLQLLNKGKRFTQGYYRSDLNAELERIWNEQKKYYPEILTDEFKQQLKGKTKVNTNKIFLAKHHIYSADLKGSDKKMQSLKWRVEALRQQVDKEILVYVISDLNGQIANTSGLLGVISDRSKELYFKKQTVGQYLWASLEENPHISIKNKPFYRQDYLDEFEKIWETQAAFHKQLTPELKQKIRDIIIFYQRPLKSKKGLISVCELEQRKVKTVIDGKEKEITIGSKVAPKSSPVFQEFRIWQNINNLLLINNDTNEKRSLYEEERNLLYQELSIKAKLSKTDALKVLNKNGKQWELNYKEIEGNRTQAILFDCYNRIITLTGHEECNFKKLKASEIRHYVTTIFKNLGFNTDILDFNPLLEKHDLEKQPMYMLWHLLYSYESDNSRTGNEALLRKLETTFGFPEEYATVFCDVVFEDDYSNLSVKAMRNILPYLQAGNDYSQACADAGYNHSRRSLTKDELEKKVYKDKLELLPKNSLRNPVVEKILNQMINVINTIVAEYGKLDEIRIEMARELKSSAAEREKTTRAISQANIENQRIRDILEKEFALSYISRNDIIKYKLYEELEANGFKTLYSGTYIPKEKLFSKDFDVEHIIPKARLFDDSFSNKTLEARNINIAKSNKTAFDFVKGEYGDEGAEVYKKKLDMLLSKDVISKAKYNKLLMSEADIPSEFIARDLRNTQYIAKKAYEILSELVRTVTPTTGEITNRLREDWQLVDVMKELNFEKYQKLGLAEVVEDRDGRKIKRIKDWTKRNDHRHHAMDALTIAFTKPAFIQYLNNLNARSNKSSSIYAIENKELHRDDNKLKFNAPIPINEFRVAAKQHLSSILISIKAKNKVMTQNVNKIKTKQGVVRKIQLTPRGQLHNDTIYGTKKCPIIKKVKVGAALDELTINKISSQAIREVLLKRLSEYNGDAKKAFTGKNSLEKNPIYLNIEKTKVVPPSVKTVEWETYHPIRKAITPDLKIEKVIDKGAKDILKARLDTFNGNAKKAFSNLDENPIYLDEAKKITLKTVSIEGVLSAIPLHTLKNQAGEPIIGKDGKPVLGDYVQTSNNHHIAFYTDEKGNLQDKAVSFFEAAERKSQGIPIVDKNYNHDRGWRFLFTMKQNEYFVFPNETTGFNPSEVDLMDEANYSIISPNLYRVQKVSRIEKGTSVSRDYWFRHHLETMLNDDVRLKNSAFKRINSLKPLEGIVKVRINAIGRIVAIGEYD

SEQ ID NO: 22410 - protein, 1494 aa, unidentified
  REGION 1..1494: note = Cas Enzyme sequence
MKNILGLDLGTNSIGWALIDNESHRIIKSGSRIIPMDAATMGDYEKGNLKSAASERTSFRGMRRLYERAKLRRERLLRVLNILGFLPEEFRRQIDFEHHPGQFIDGKEPLIAYHHDENGQRVFSYMSAFEEMLTDFRATQPELVRDGRRVPYDWTIYYLRHKALTQPVTKEELAWIILNFNTKRGYYQLRSESEEVTTNKNEEYAELKVVSVEKTGEDKKRAGYYWYTITYDNEAEQKITSTIPPRQIGDKVELIVTTARDKAGETKKSVRSPKEDDWTLMKKRTEHNIEEEECTVGSYIYQHILADPTVKVRGKLVHTIERKFYKKELKQILNKQKEFIPELQDASLYEACIKELYRNNEAHIQSIANKDFTDLFVNDIIFYQRPLKSKKSTISNCPYESYYYKNKETGELIRKPIKCIAKSNPLYQEFRLWQFIHNLRIYKKSEEVSGRLQTDVDVTDRFLTTPDDYAKLFSWLNDRKEIKQKELLRYEAFGLSKSYGDYRWNFVEDKQYPCNETLHEINRRMKSILSDKKLSSEAYQQLWHILYSIDDPIEIRKALTSFAQNQKINSDDFVNAFYQYVPEKTKSYGAYSEKAIKKLLPLMRRGSYWAIGNIDEKTRRRLDNIINGVADDSISTCTREKLNNLTDITMCQGMPLWQACYAVYDRHSEAADTTKWEQPDDIDTYLSTELKQHSLRNPIVETVISETLRVVRDIWKAYGRPEEIHVELGRNLKQDAKSRKQDAIRMAENEQTNLRIRALLQELSNPECGVENVRPHSPSQMELLKIYENEVLQSTDDIPEEISNIIKDLGKTDPKKRPSLSDITKYRLWLEQKYQSPYTGHIIPLSKLFTPAYQIEHVIPQSRYFDDSISNKVICEAEVNKEKDRMLGYEFIINKGGSIVKGSFGQEFKIFDKVQYEDFVKQRYAHNKTKMKKLLMDDIPDGFIQRQLNDSRYMSKKIISILSNIVREDGEKEATSKHIIVTSGAVTDRLKKEWGIKDVWNDIIAPRFKRLNKLTDSNNYGMETEKEGRQYFQINVPIELSVGFSKKRIDHRHHAMDAIIIACTTRNHVNFLNNSAAASDRKDIRRDLQHTLCTKTKTDSNGNYVWRFNKPWDTFTQDTRQELEGIIVSFKQNLRIINKMSNYYQHYVDGRKTISRQNKGDGWAIRKSLHKATISGKVNLKRSKTVGFKEALNDWSAIKDKTSKAILQKIIAQYKNYDPKTIFKYFKDRNFKVEGKDFSKLEVYYNTSDKEPMSAHRVNIDTTFDEKEIRSITDTGIQKIMLKHLHTYDDAQGKTHPEAAFSPEGIEKMNQNIRTLNGGKDHKPIFKVRKAETLGMKFAVGERGHKDKKWVEADKGTNLFFAIYESEENKRSYSSIPLNEAIDRLKRGENVTDERDQNGNKLLFVLSPMDLVYVPDPDDAHIDEVKGNNNIFKMVSCTGTECYFVPETYANVICKGKELGSLNKVESYDGINIKKSCYKITVDRLGKVRKIFKG

SEQ ID NO: 22411 - protein, 1141 aa, unidentified
  REGION 1..1141: note = Cas Enzyme sequence
LLSKDFLHLFVEDIIFYQRPLRSKKSTIANCTLEKRSYIDKETNERKDTPLKVCAKSNPYYQEFRVLQWLQNLRIYEIETDREVTAEFIETAEDYEALFNFLMSQKEIDNESLLKYFLFAKNPQIKDKAAKSELKKWLTTYRWNYVYDAADNSSKKYPMNETGYDLQRYLQKVEGLPANFLTFDITYRLWHLLYSVKDKVEFEKALKKFAQKYQLDEASFVDSFKNFKPYPNEYGSFSEKAIKKMLPLMRFGKHWNFKNIDIHTQKRIDDLINGVANEDIRTIIREKAEKYQLNSETCFQGLPLWLAHYIVYNRHAEATNIEKWTSVSDLEAYLEDFKQYSLRNPIVEQVVTETLRVVRDIWQQYGGGQANFFDEIHIELGRELKNTSKERERLSKQNQENENTNLRIKKLLAELKEDANIQNVRPYSLVQQELLKIYEEGVFSSTDEIEEDIQKICKKAEPTTPEIQRYKLWLEQKYKSPYTGEVISLTKLFTEEYEIEHIIPQSRYYDDSLSNKVICESAVNKLKTNQLGLEFIQNHHGEKVRIAGNKEVTIFTEEQYKEFVKKYYANNLPKQQKLLLNDIPEKMVARQLNDTRYISKYVSEILSKIVRSDEKDEGVNSKNIIPCTGKITTALKQDWGLNDVWNELILPRFERMNQLTQTQLFTSYNDRLQKNLPTVPIKYSQGFQKKRIDHRHHAMDALVIACVTREHINYMNNQHALDKSKDKKEKQQSRIDLRTILCEKKNNNWQFKKPWSTFTQEAKEALEHIVVSFKQNLRVINKATNYYEKWEEKNGVLVKKKVKQEGTNWAIRKKLHEDFPYGKVKYQVNFLKISENISKIDLIVDEFIKRQLEKIYVENHRKVNLTKKYLKENPIRDQKGEEVISTDFREENIKYRKRKPISVLSDRNRKTGITSIEKMLKTIAKVADNVLKRELFLYLEECNNDIDVAFSPEGIEQFNSKRKIPVYRLPFFEEGEKKNELGNKGKYVEAAKGTNLFFGVYQGKEKRTYATIPLNEVIERQKRGFPSVPEHNEKGEPLLFSLSPNDLVYVPMVGEATETIDFSNLSKEQKERIYKTVSFTGNECHFVKSTIASLIKSYDAKSKIGELGSLNKLEVTISGDSRIKEVCIKLKVDRLGNITKA

SEQ ID NO: 22412 - protein, 923 aa, unidentified
  REGION 1..923: note = Cas Enzyme sequence
MTQKIFGIDLGTNSIGTSVRNTDLGNNLVDQLEFFSSDIFKASVNREGVNGGKGREYSLASSRSAKRRKRRLYEHRRYKLWATLDLLIKNNLCPMTPESLEQWRTYDKKKKLFRQYPIEDKAFHSWIILDFNSDGKPDYSSPYQLRRELVSVQLDFNQAIDRYKLGRALYHIAQHRGFKSSKGETIAEQEKQEDDSKKNKNNALIEEHVDATKASEEKHSKGLSTYMQEHNLKTVGAAFAQLEDEGIRIRNNSEYKAIRSQHQDEIKEIFKFQKGLSSQTQLLDTLISEKQGIGTIFYKRPLCSQRGNVGKCTLEPNKPRCPIGHPLFEKFRAWTFINNIKAKSPDADSAEPLPMDMRINIYNKLFLSRVKADFKFEEIRNFIEKQWRVALSKDDKTINYRDDTSVAGCPITARMIKVLGEDWEKFQVLGTKERQTQGKSNNALHQVCYTAEDIWHFCYDAEDSGKVRTFAEETLGWDEKKAAELVRLWSAIPQGYAMLSQKAIRNINRMLLFGLKYSDAVLLAKLPDILELSDEDIQTIIKKAQQLEEVVNEEKRIGNIVNSLIANYKAESLEDRFADHNYEYQLDESDEREIIKHIENNIGKQRWELMDADEQISILEGVRSGYQAFFARHKRTFVELPQLGKRLVELLSKEYPSVTEKQWERLYHPSQIAIYRPILLDKSDEKRRLGNPDIGAIKNPTVMRTLNNLRRRVNQLLDDGVLMPDETRVVVETARDLNNANEKWALEKYQEIRRKENDKIKKILEEFYPQFSNITSTDVDKARYVIEQCEEDNYTSKKESGTYSKNIQKYKYWLEQGGQCLYTGRIISLSNLFDSNAFDLEHTIPASVSFDNSDQNMTLCEAHYNRFIKKNNIPTAMPNYEEDVTIDGKLYTAIKPRLEKWKKRIKDSLKMLNIGELKHDVRK

SEQ ID NO: 22413 - protein, 1380 aa, unidentified
  REGION 1..1380: note = Cas Enzyme sequence
MKRILGLDLGTTSIGWALVNEAENNNETSSIVRLGVRVNPLTADEKSNFEKGKAITTNAERQKGHTARINLQRYKLRRQNLYNCLKEYGWFGNNALFEEGKASTFETYKLRAKAAEEEISLHELARVLFMLNKKRGYKSNRKANNKEDGQLFDGMTIAKKLYEEHLTPAEYSLQLLNKGKRFTQGYYRSDLNAELERIWNEQKKYYPEILTDEFKQQLKGKTKVNTNKIFLAKHHIYSADLKGSDKKMQSLKWRVEALRQQVDKEILVYVISDLNGQIANTSGLLGAISDRSKELYFNKQTVGQYLWASLEENPHISIKNKPFYRQDYLDEFEKIWETQAAFHKQLTPELKQKIRDIIIFYQRPLKSKKGLISVCELEQRKVKTVIDGKEKEITIGPKVAPKSSPVFQEFRIWQNINNLLLINNDTNEKRSLNEEERNLLYQELSIKAKLSKTDALKVLNKNGKQWELNYKEIEGNRTQAILFDCYNRIITLTGHEECNFKKLKASEIRHYVTTIFKNLGFNTDILDFNPLLEKHELEKQPMYMLWHLLYSYESDNSRTGNNSLLRKLETTFGFPEEYATVLCDVTFEGDYSNLSVKAMRNILPYLQAGDDYSQACAHAGYNHSRRSLTKDELEEKVYKDKLELLPKNSLRNPVVEKILNQMINVINTIVAEYGKPDEIRIEMARELKSSAAEREKITRAISQANTENQRIRDILEKDFALSYISRNDIIKYKLYEELEANGFKTLYSGTYIPKEKLFSKDFDVEHIIPKARLFDDSFSNKTLEARNINIAKSNKTAFDFIKGEYGDEGAEVYKKKLDMLLSKDVISKAKYNKLLMSEADIPSEFIERDLRNTQYIAKKAYEILSELVRTVTPTTGEITNRLREDWQLVDVMKELNFEKYQKLGLAEVVEDRDGRKIKRIKDWTKRNDHRHHAMDALTIAFTKPAFIQYLNNLNARSNKSSSIYAIENKELHRDDNKLKFNAPIPINEFRVAAKQHLSSILISIKAKNKVMTQNVNKIKTKHGIIKKIQLTPRGALHNDTIYGTKKRPIIKKVKVGAALDELTINKISSQAIREALLKRLSEYSGDAKKAFTGKNTLEKNPIYLNAGRTKTVPSLVKTVEWESFHPTRKLIDKDLNVDKVVDKCIRNILKTRLEEFNGDAKKAFSNLEENPIYIDEAKKIALKRVSIEGVLSAIPLHTLKDQAGKLIIGKDGKPVLGNYVQTSNNHHIAFYTDEKGNLQDKAVSFFEAAERKSQGLPIVDKNYNHDKGWRFLFTMKQNEYFVFPNEATGFIPTEVNLMDEANYDMISPNLYRVQKVSRIEKGASTSRDYWFRHHLETILNDDSRLKNSAFKRINLLKPLEGIIKVRINSIGKIVAVGEYD

SEQ ID NO: 22414 - protein, 1380 aa, unidentified
  REGION 1..1380: note = Cas Enzyme sequence
MKKILGLDLGTTSIGWALVNECENEDEKSSIIRLGVRVNPLTTDEKGNFERGKAITTNSDRQQTHGARINLQRYKLRRKYLCDCLNKHGWIGSEPMYEDGKSSTFETYMLRAKAAVEEVSLHEFARVLFMMNKKRGYKSNRKANDKEEGKLFDGMSVAKKLYEAHLTPAEYSLQLLNKGKRFTPEYYRSDLVEEFEKIWNEQKKYYPEILTDEFKRQLEAKTKTSTSKIFLGKYGIYSADLKGLDRKLQPVKWRVEALRQQVDKDVLAFVISDLKGQIANTSGLLGAISDRSKELYFNKQTIGQYLWASLKENPHVSVKNQPFYRQDYIDEFEKIWETQASFHKELTPELKQEIRDIIIFYQRPLKSKKGLISVCELEQRKVKVTIDGKEKEITIGPKVAPKSSPMFQEFRIWHNLNNIQLIDNERNSKRSLYEEERNLLYEELSIRDRLNKAEALRVLGKKNRQWDLNYKELEGNRTQATLFSYYNKIIMMTGHEECNIKQLKAPEIRHYIKTIFKNLGFNTGILEFDSSLNGHELEQQPMYQLWHLLYSYESDKSRTGNEALLKKLETIFGFPREYASVLAEVAFEDSYGNLSVKAIREILPHLQAGLDYSQACEEAGYKHSRRSLTKEELDEKEYKEKLELLSKNSLHNPVVEKILNQMINVINAVIDEYGKPDEIRIELARELKIGAAERENMTRSISQGNAENKRIREILEKEFALSYISRNDIIKYKLYEELKPNGYKTLYSDTYIPKDKLFSKDFDIEHIIPKARLFDDSLSNKTIEARDVNIAKSNKTAFDFISGKYGQQGIEAYKKKLYILLQGGSINKAKYNRLLMKEADIPSDFINRDLQNTRYITRKAYEILSDLVRVVTPTSGAVTSRLREDWQLVDIMKELNFEKYQKLGLTEVIEDKDGRKIKRIKDWTKRNDHRHHAMDALTIAFTKPSFIQYLNNLNARSNKGDSIYAIENKELHREDGKLCFNAPLPINEFRAEAKKHLKAVLVSIKAKNKVMTQNVNKIKTKHGVIKKVQLTPRGELHNATFYGTKKRPIIKMVKVGAALDEVTIKKVSSSFIRKALQDRLYEYNGDAKKAFTGRNSIDKNPIYIDEERKRTVPALVKTIEWEMYHPTRKLILPDLKIDKVIDKGIRDILKTRLAKFNGDVQKAFSNLDENPIYKDEAKKIILKRVSLEGVSSVIPLHTLKDRSGMPITGKDSEPVLGDYVQTSNNHHVAFYIDENGNLQDNIVSFFEAAERKSQGVPIIDKNFNHDIGWRFLFTMKQNEYFVFPNEVTGFNPSEVDLMDEANYDIISPNLYRVQKMSRVVYGKSIIRDYVFRHHLETTVEVNANLKGLAYKQLKSLSYLEGIVKVRINCIGKIVAVGEYD

SEQ ID NO: 22415 - protein, 913 aa, unidentified
  REGION 1..913: note = Cas Enzyme sequence
LGLQFYVELAKLNDNEDFVNAFLKIKPFKKEYGAYSEKAIKKLLAVMRIGTQWNEDDICEQTRNRIQSIINGDIDEKIKERMGRTFSQLSDFQGLPEWLACYVVYGRHSETTDIQRWTKPENLMAYINGFKQHSLRNPIVEQCILETLRTVHDIWKEAGHIDEIHIELGRSMKSTADQRARMSKSILQNENTNLRIKSLLMELKNAKEFENVRPYSPMQQEILRIYEEGALQELTKEDDQYPEISKISQMAQPSAKELLKYRLWLDQKYCSPYTGKPISLSKLFTSAYQIEHIIPQSRYFDDSFSNKVICEAEVNQLKSNMLGYEFIKKHSGEIVHCTMVGDVKILDAKEYYNFVTEHYANNRRKKEKLLLEDIPQEFLNRQMNDSRYISKKVMALLSNIVREEGEQEAKSKFVIACSGGITDRLKHDWGLIDVWNSIVYPRFERLNKLTNTENFGRWENKERKQVFQTSLPLELQRGFSKKRIDHRHHAMDALVIACASNNIINYLNNESAKSQEKREDLRKKLCDKNRIIRKPWETFTQDVRTALEDVVVSFKNYVRVINKATNYYEKYDKNGKKGIAEQKGQDMWAIRKPMHKETVFGQVNLRRKVTVKLKDALEKIPAIYDKELRDYINILVAKQFNKKQILAHFKSINYRLNMKSVDKVDVWQFSNEKEPMVATRKSVDTSFDAKRIATITDTGIQKILRNYLETKDNDPNIAFTPEGIAEMNKHITEYNNGKQHQPILKVRVSEPKGAKYQVGETGNKTSKFVEAQKGTNLYFAIYEDKEGNRSYSTIPLNEVIERLKQGLSPAKDLNKRGEKLKFYLSPNDLVYVPTEEEKLSGECKLNKDRIYKMVSSTGNECYFIPYTVSNVIFNKVEFESLNKMGRALTGEMIKAVCWKLEIDRLGNILKIIK

SEQ ID NO: 22416 - protein, 1380 aa, unidentified
  REGION 1..1380: note = Cas Enzyme sequence
MKKILGLDLGTTSIGWALVYESENTDEKSSIVRLGVRVNPLSVDEKGNFEKGKSITTNADRQQTHGARINLQRYKLRRENLKHCLQKQGWIGAEALYEEGKTSTFETYMLRAKAAEEEISLHELCRVLFMLNKKRGYKSNRKANNKEDGKLFDGMTVAKKLYEEHLTPAEYSLKLLSSGKKFKQEYYRSDLKEEFDRIWNEQQKYYPEILTDDFKQQLQGKSKGNTSKIFLGKYGIYSADLKGLDRKLQPLKWRVEALKQKVDKEALAFVISDLNGQIASTSGLLGAISDRSKELYFNKQTVGQYLWTSLKESPHVSIKNKPFYRQDYLDEFEKIWETQATYHKELTPELKQEIRDIIIFYQRPLKSKKGLISVCELEQRKVKVTIDGKEKEISIGPKVAPKSSPMFQEFRIWQNLNNILLIDKGNNSNRPLYEEERNLLYEELSVKEKLSKAEALKVLNKNGKQWDLNYKEIEGNRTQAVLYDCYNRIIVMTGHEECNFKKLKASDIRYYVKTIFKKLGFSTDILDFDSSLQGHELERQPSYQLWHLLYSYESDNSRTGNDALLRKLETAFSFPKEYAAVLSDVVFEDSYGNLSVKAMRNILPHLQAGLNYSQACEEAGYKHSRRSLTKNELDQKEYKEKLELLPKNSLHNPVVEKILNQMINVINAVIDEYGKPDEIRIELARELKIGAAERENMTRSINQGNAENKRIREILEKEFALSYISRNDIIKYKLYEELKSNGFKTLYSDTYISKDKLFSKDFDIEHIIPKARLFDDSLSNKTIEARDVNIAKSNKTAFDFISEKYDQQGIEAYKKKLDILLQDGSISKAKYNRLLMKEADIPSGFIDRDLRDTQYIAKKAYEILSDLVRNVTPTTGAVTSRLREDWQLVDVMKELNFEKYQKLGLVEVIEDRDGRKIKRIKDWTKRNDHRHHAMDALTIAFTKPSYIQYLNNLNARSDKNSSIYGIENKELHREDNKLRFNAPLPINEFRAEARRHLKSILVSVKAKNKVMTQNVNVIKTKHGVIKKVQLTPRGELHNATFYGTKKRPIIKMVKVGAALDEVTIKKVSSSFIREALLDRLHEYNGDAKKAFTGRNSIDKDPIYIDEEHKKTVPALVKTIEWEMYHPTRKLISPDLKIDKVIDKGIREILKTRLAKFNGDAQKAFSNLDENPIYKDEAKKITLKRVSLEGVSSVIPLHTLKDREGKPVVGKDGKPVLGDYVQTSNNHHIAFYMDENGNLQDNVVSFFEAAERKSQGVPVIDKNYNHDKGWHFLFTMKQNEYFVFPNEATGFIPTEVDLMDEANYDMISPNLYRVQKMSKTKQGITDKRDYWFRHHLETVLNNDLKVRNSIFKQINSLKPLEGIVKVRINAIGKIVAIGEYD

SEQ ID NO: 22417 - protein, 1483 aa, unidentified
  REGION 1..1483: note = Cas Enzyme sequence
MKTILGLDLGTNSIGWAKVIVDDNENYLRDIQLGSRIIPMSQDVLGKFDKGVTESQTAIRTNFRGIRRLRERTLQRRERLHRVLHTLHCLPPHYDSAIGWDRKTPTTYGKFLNHGEPKLAWERRGDGTMQFLFMDAFHEMIADFAKYQPALVANGKKMPLDWTIYYLRKKALTQPIKKEELAWILLNFNQKRGYYQLRGEEDQENAAKHEEYHELKVVGVEADEAGKGDNTWYNVKLENGWIYRRQSKIPLNDWVGKVRPFIVTTEYEKDGTTPKKDKEGNVKRSFRSPNENDWGLRKKQTEHSLEASGTPVGAFIYDHLLKEPSDKIRGKFIHTIERKYYKQELTAILREQSKHHEELSNKDMLKACVEELYPNNPLHRESLLKKDMPYLLIEDLIFYQRPLKSKKSLIAECPYEAYSYVDKETGEMKRQGIKCIAKSNPYYQEFRLWQFIANLRLRNRADERDVTAEYLPHQEDYVRLFTYLNDRKEINQETLLKDFFKLKKVTIGGEKVFPIRWNYIEDKEKKYPCNATRHELLLALDRAGIEHDWLDDRDLAYRLWHLLYSVDSKDETERALRKLKDDDAFVESFLKIKPFEKEYGAYSEKAIKKLLPVMRRGSLWNEADLCPSTKERIANILQGTIDEKLKKKIGAFISSCQQVSDFQGLPEWLACYVVYGRHSEATDIQRWETPEQLLAYIHKFKQYSLCNPIVEQCILETLRTVYDIWKEAGQIDEIHVELGREMKKTAEQRARLTENVLRNENTNLRIKSLLMELKNNADIKDVRPHSPMQQEILRIYEEGALQTLSKDDTAFAEITKISKMAQPSASELQRYRLWLEQKYRSPYTGKPISLSKLFTSAYQIEHIIPKKRYFDDSFSNKVICEAEVNGAKGSMLAYEFIKDCGGDVIHCTALGDVTILSEAEYKALVTELYANNKSKKDKLLMEDIPQEFINRQLNDSRYISKVVMTLLSNIVRIEGEEEATSKFVIPCSGGITDKLKKDWGLNDVWNNIVYPRFERLNALTNTSDFGQWENKEGKRVFQTSVPLELQRGYQKKRIDHRHHAMDALVIACASRNIINYLNNKEANDPTKQENARKQLCIKSRIIRKPWETFTQDAYKALDNIVVSFKNYVRVINKATNYYERYHADGKKVVDEQKGEAMWAIRKPMHKDTVFGHVNLRRKAVVKLKDALENIPAICDKTLRHYIQDLQKKHFNTKQLLAHFKSINYRLNKQAVDKVEVWQYSDDKEQLAATRKPLDTSFDAKRITTITDTGVQKILLNYLQAKGGDPAIAFTPEGIAEMNQNIAVYNGGKQHQPILKVRIAEPMGAKYPVGETGNKSAKYVEAQKGTNLYFAIYEDEEGNRTYDTVALNVVAERLTQGLTPVPEKNEKGVALKFYLSPNDLVYVPTADELLSKVCSLDKNRIYKMVSATKSQCFFLSHRVAKTIYDKVEFEALNKMERALTGEMIKPICWKMEVDRLGRIVNIIK

SEQ ID NO: 22418 - protein, 1480 aa, unidentified
  REGION 1..1480: note = Cas Enzyme sequence
MRTILGLDLGTNSIGWAKVCVDDNGNYVREIKLGSRIIPMSQDTLSNFDKGVTDSPTAARTGFRGIRRIRERVLQRRERLHRVLHVMKFLPSHYEKAIGWNREEATTYGKFLDNGEPKLAWEKKEDGSMRFLFMDSFHEMMADFAKCQPGLVADGRKIPLDWTLYYLRKKALTQAIRKEELAWILLNFNQKRGYYQLRGEEDEEDPTKREEYYELKVVSVEAAEEGKGGNTWYNVTLENGWIYRRQSKIELNDWTGKIRLFIVTTEYEKDGITIKKDKNGEVKRSFRAPSEDDWGLRKKRTESRLEDSGKTVGEFIYDHILSEPADKIRGNFIRTIERKFYKKELEAILREQSKHHKELKDQNTLVNCIKELYPNNKAHQDSLMKKDMIYLLITDLIFYQRPLKSKKSLIADCPYEYYEYVIKETGEIKRQGIKCIAKSNPYYQEFRLWQFIINLRLFDRTNDKEITSEYLSSMEDYTRLFTYLNDRKEINQEFLLKDFFKQKKVKMGMEKEFPIRWNYIEDKEKKYPCNETRHELLAALDKAGIDHSWLDDKERFYRLWHLLYSVESKEEAEGALRKLNDNEDFVNAFLKIKPFKKEYGAYSEKAIKKLLAVMRIGTQWNEDDICEQTRNRIQSIINGDIDEKIKERMGRTFSQLSDFQGLPEWLACYVVYGRHSETTDIQWWTKLENLMSYIKGFKQHSLRNPIVEQCILETLRTVHDIWKEAGHIDEIHIELGRSMKSTADQRARMSKSILQNENTNLRIKSLLMELKNAKEFENVRPYSPMQQEILRIYEEGALQELTKEDDQYPEISKISQMAQPSAKELLKYRLWLDQKYCSPYTGKPISFSKLFTSAYQIEHIIPQSRYFDDSFSNKVICEAEVNQLKSNMLGYEFIKKHSGEIVHCTMVGDVKILDAKEYYNFVTEHYANNRRKKENLLLEDIPQEFLNRQMNDSRYISKKVMALLSNIVREEGEQEAKSKFVIACSGGITDRLKHDWGLIDVWNSIVYPRFERLNKLTNTENFGRWENKERKQVFQTSLPLELQRGFSKKRIDHRHHAMDALVIACASNNIINYLNNESAKSQEKREDLRKKLCDKNRIIRKPWETFTQDVRTALEDVVVSFKNYVRVINKATNYYEKYDKNGKKGIAEQKGQDMWAIRKPMHKETVFGQVNLRRKVTVKLKDALEKIPAIYDKELRDYINILVAKQFNKKQILAHFKSINYRLNMKSVDKVDVWQFSNEKEPMVATRKSVDTSFDAKRIATITDTGIQKILRNYLETKDNDPNIAFTPEGIAEMNKHITEYNNGKQHQPILKVRVSEPKGAKYQVGETGNKTSKFVEAQKGTNLYFAIYEDKEGNRSYSTIPLNEVIERLKQGLSPAKDLNKRGEKLKFYLSPNDLVYVPTEEEKLSGECKLNKDRIYKMVSSTGNECYFIPYTVSNVIFNKVEFESLNKMGRALTGEMIKAVCWKLEIDRLGNILKIIK

SEQ ID NO: 22419 - protein, 1422 aa, unidentified
  REGION 1..1422: note = Cas Enzyme sequence
MTQKVLGLDLGTNSIGSSVRNLDLSDDLKGQLEFFSSDIFRSSVNKESNGREYSLAAQRSAHSRSRGLNEARRRKLWATLDLLIKYGFCPMSPDSLMRWRTYDKQRGFFREYPIDDKDFNAWILLDFDGDGKPDYSSPYQLRRELVTRQFDFDQPIERYKLGRALYHIAQHRGFKSSKGETLLQQETNSKQSLTDETTDVAGEMKASEEKLSKGLSTYMKENKLLTVGAAFAQLEDEGVRVRNNNDYRAIRSQFQREIETIFKFQQGLSVENEFYECLVSEKKNIGTIFYKRPLRSQRGNVGKCTLERTKPRCALGHPLFEKFRAWTLINNIKVRMPEEEQAEQLPMKLRFELYNDCFLAFVRAEFKFEDIRKYLEKRLGIHFSYNDKTINYKDSTSVAGCPITARFRKLLGEDWESFHVDGQKQRQAHGKNNTSFHTVSYSTNDIWHFCYDAEEPEAVLSFAQDNLKWEKKKAEELVRIWSAIPQGYAMLSQKAIRNINKMLILGMKYSDAVLLAKVPEIVEITDGEILSVTEDYHRVEAQVRYEKQINNIVNALIAKYKSASEEYRFADHNYEYQLDKSDEEEIVRQIESCLGARKWGLMDADEQTDILQKVRDKYQNFFRSHERKFVESPKLGDCFEEYLVKRFPMVKGEQWKKLYHPSQIAIYRPVSAGKDRSALRLGNPDIGAIKNSTVLRVLNTLRKRVNQLLDDGVISPDETRVVVETARELNDANRKWALDTYNRIRHDENEKIKKILEEFYPKRDGISTDDIDKARYVIDQREVDYFTESKTYNKDIKKYKFWLEQGGQCMYTGRTINLSNLFDPNAFDIEHTIPESLSFDSSDMNQTLCDAHYNRFIKKNHIPADMPNYDKAVIIDGKEYPAMTSQLQRWIDRVERLNRNVEYWKGQARRAQNKDRKDQCIREMHLWGMELEYWEKKLERFTVTEVTDGFKNSQLVDTRVITRHAVLYLKSIFPHVDVQRGDVTAKFRKILGIQSVDEKKDRSLHSHHAIDATTLTVIPSSAKRERMLELFAKIEEVNKMLSFSGNEDRTGLKQELDGLKNQLNKEVKACRIGHNVSEIGTFINDNIIVNHHIKNQALTPVRRRLRKKGHIVGGVDSPRWQTGDALRGEIHKASYYGAITQYAKDKEGKVLMKEGRPQINPTIKFVICRELKYKKSSTDSGFASWDDLGKAIVDKELFALMKGQFPAETSFKDACEQGIYMIKKGKNGMPDKKLYRIRHIRCNTVQKNALKIKEQTYKSGKEYKRYFYAAVGDLYAMCCYTNGKIREFRIYSLYDVSCHRKSDIEDIPEFITDKKGNRLMLDYKLHTGDMILLYKDNPEELYDLDNVNLSKLLYKINGFENDGLRIRMVNHLVVKEAMGESVKDYAKLPDIIRCGVKTIKFLIMGENRDFVIKNGKIIFNHR

SEQ ID NO: 22420 - protein, 1509 aa, unidentified
  REGION 1..1509: note = Cas Enzyme sequence
MKTILGLDLGTNSVGWAVINSVIKEQAERIWIEMAGSRIIPMDAAVLGDFDKGNSISQTSERTRLRGARRLRERQLLRRERLHKVLNILGFLPNHYLEYIDFEKHPGKFLADAEPKLAWVKDEQGKYTFLFQAAFDEMLADFAIHQPSLVSGDKKIPYDWTIYYLRKKALTEMISKEELAWILLNFNQKRGYYQLRGEEEEDNAGKSVEFYALKVLTVEATDEKKGRDVWYNVHLENGWIYRRSSSVPLDWEGQVKEFIVTTDLNPDGTPKLDKYGEVKRSFRAPKEDDWMLIKKRTEADIANTHKTVGAYIYDTLLQKPQQKIIGKLVKTVERKLYRDELSLILQKQCAFHAELQDRALYARCVEALYPSNEVRRKNIANRDFVYLLMDDILFYQRPLKTKKSLIANCPYEENEYVDRETGEIKKAPLKCIAKSHPLFQEFRLWNFLSNIRIYQKEKEINGTLHLDVDVTAEFLKTEDDYVALFDWLNSRKEIEQKTFLKYPKFGLKKEISNYRWNYVEDKQYPCNETRHAILSSLEKANVCIDFLSNEKEVALWHILYSVSDKQEIEKALRTFAAKNGLDESFVEAFKKFPPFKSEYGAYSAKAIKKMLPLMRCGKYWDVSSIDDTTKERIKKIVTGEYDERISVKVRDKVMNLSDISCFRRLPLWLACYIVYNRHSEDKEAVKWESPADIDAYLASFKQHSLRNPIVEQVITETLRVVRDIWKQVGRIDEIHIELGREMKNPADKRKRMTAQILENENANLRIKALLAEFMNPEYEIENVRPYSPSQQEILRIYEDTVLHAEDQLPEEIDAILKKFNSSKVPTKSEFLRYKLWLEQKYRSPYTGELIPLGKLFTAAYEIEHVIPQSRYFDDSFSNKVICESAVNKLKDNQLGYEFIKNHHGQKVEVGFGKSVEIFSVDSYERFVKEQYAKSAVKMKKLLMDDIPEQFIERQLNDSRYISKVIKGLLSNIVREKNDSGEYELEAVSKNIVVCTGSVTDRLKRDWGMNDVWNSIVYPRFERLNSLTDTQSFGHWENKSGKKVFQTELPLEYQKGFSKKRIDHRHHAMDAIVIACATRNHVNYLSNESASRNAKISRYDLQRLLCDKNRTDDNGNYKWVIKKPWDTFTQDAREVLSKIVVSLKQNLRIINKTTNVYRHFDATVNRVYEKQKTGDSWAIRKPMHKDTVFGAVNLRKVKVVRLSVALDTPAMIVDKRVKNKVFELLSYKYDKKRIEKYFKENAFLWKELDLAKVAVYYFTEATTEPLVAVRKPLDSTFNEKKIKESVTDTGIQKILLNHLCTKEGKPDLAFSAEGIEEMNRNLLQLNNGKSHQPIYKVRVYEPRGNKFSVGVLGNKGTKWVEAAKGTNLFFAIYITEDGKRTYETIPLNMVIEREKQGLVPVPDRNEKGDKLLFWLSPNDLVYLPTEEEREFGRINEPIDRGRIYKMVSCTGNEGHFIPANVANPIVPVIELGSNNKAQRAWTNEMIKDICIPIKVDRLGHIIEVKYRIDE

SEQ ID NO: 22421 - protein, 1432 aa, unidentified
  REGION 1..1432: note = Cas Enzyme sequence
MKKILGLDLGSNSIGWALVNEAENRDEASSIIKLGVRVNPLTVDEMQNFEKGKSITTNADRTLKRSMRRNLQRYKLRRDALIKLLKKVGFIADGTILSEQGNRSTFETYRLRAKAPDEEISLQELARVLLMINKKRGYKSSRKIKEKEAGTLIDGMKVAKKLYDEDLTPGQLCLQLLESGKKSLPDFYSSDLQEEFDRIWNFQKQFNPKAFCDTAKEEIKGKNKSQTWAILAKYFIWTDEMVVWNEKESKTERVEKECKLVGLKRTVKKEEQRKENYRWRVQALTEQLDLEKVAVVLQEINGQISTSSGYLGAISDRSKVLYFNRQTVGQYQMAELEKNPNTSLRNMVFYRQDYLDEFDKIWEKQAEFHKELTVELKKEIRDIIIFYQRRLKSQKGLIGFCEFENREIMVEKNGKMQAKVVGCKVIPRSHPLFQEFKIWQTLNNVEVFAGEKKCKRKRTDAFPGLFDGTEDTLMVEGWRYLYQEEKEILAKELSVKKSLKKEYILKLLFDNPQDLDMNFEQIEGNDTGNVLFSAYSKMIEKYGYEPLDFGKPTDKIIEQLQVIFTDLGWNTDLLFVDLNKEGKDLEKQPYFKLWHLLYSFEGDNTPTGNGKLVEKLMELCHVGKECALELVNISFQNDYGSLSAKAIKKILPYLKEGNRYDVACGYAGYRHSKSSLTKEEIENKVLKDKLDILPKNSLRNPVVEKILNQMVNVINAIIDTYGKPDEIRVELARELKKSAKEREELTKAIAKSTREHEEIRKVLQEEFGMINVSRNDIIRYKLYKELKDNGYKTLYSNQDIPKEKVFSKEIDIEHIIPQARLFDDSLSNKTLEYKAINIEKGNKTAYDFVKEKYGEKGLQQYLNRCESLFKGHRTKLRKLKMEQENIPEGFIDRDLRNTQYIAKKALAMLNEICRRVVATTGSITDRLREDWQLVDVLKELNLPKYETLGLVEVYEDKDGRKIKRIKDWTKRNDHRHHAMDALTVAFTKDVFIQYFNNKNAAWQADCKEHSDIIGIKTRYFENGRALPPMPLVRFRAEAKSHLETLLVSIKAKNKVVTNNVNCTKRKGGENKKLQQTPRGQLHLETIYGSHRQYVTKEEKVNASFDSSKIATVCKQAYRNALLERLAAFGNDPKKAFTGKNSLEKNPVYLDREQTARVPERVRTVELETVYTIRKPVDPNLSVDKVVDAKVRSILEQRLREYDGEAKRAFVNLDENPIWLNEEKGIAIKRVTIRGINKVQSLHGKKDKNGNLILDETGKKIPVDFVNTGNNHHVAIYRKPVLDKTGQEMLDNEGNPVYELDEVVVSFFEAVTRMNLGLPVIDKNYNKSEGWQFMFTMKQNEYFVFPNEKTGFDPKEVDLLNPENYAVISPNLFRVQKISTKYYTFRHHLETKVVDDKFLKEITWKRILTPNKLEGIVKVRVNHIGQIVSVGEY

SEQ ID NO: 22422 - protein, 1509 aa, unidentified
  REGION 1..1509: note = Cas Enzyme sequence
MKNILGLDLGTNSIGWAVVNGSINDNGSEQLVKIQASGSRIIPMDAAMIGDFNKGNSISQTAERTRLRGIRRLSERYLLRRERLHRILDILGFLPSHFAQDLDRHGKIVKGKEPKLAWRKNEAGQFEFIFQDSFKEMLEDFKLNHPNLITDDKKVPYDWTIYYLRKKGLTSKISKEELAWILLNFNQKRGYYQLRGEEEKKNDNVMIINSKVIDVVKAEKDKKYEKYWYNVLLENGLLYRAAFYNDISFWKGHTKEFVLKTIKLKSGGTKQELSFLPSFDEIEKMEKKQKDKMYFKIKLKTGADIDQTHKTVGTYIYDTLLGNPSQKIRGRLVRTIERKYYKEELKQILDKQKEFHPELQDRALYAACVEELYTINEAHRNNIGNRDFTYLFLEDILFYQRPLKSKKSLIDNCPYEENHCLDKETGEIKSFPVKCIAKSHPLFQEFRLWQFIVNLRIYRKGLAQDVDVTNELLKTEEDYVALFDWLNGKKEIDQKAFLKYPLFGLKKEVENYRWNYVQDKPYPCNETRSSMLARLEKCDISIEFLTKENEEALWHILYSVEDKNEIVKALQKFADKHDLNASFVDVFRKFPPFKKEYGSYSAKAIKKLLPLMRMGKYWSENSIDKGTRERIDKIITGEYDEKIENRVREKAIHLADVSDFRGLPLWLVCYIVYGRHSEAKEITQWKSPADIDSYLKSFKQHSLRNPIVEQIIIETLRVVRDIWKQVGNIDEIHVELGREMKNPADKRKKMTQQMSENENTNLRIKYLLTEFLNPEYEVENVRPYSPSQQDILRIYEEGVLNSVSDLPEEISDILKKFTETDLKKRPSRSEVLRYKLWLEQKYRSPYTGEVIPLGKLFTSAYEIEHVIPQSCYFDDSFSNKVICEAEVNKLKSNLLGHEFIVKHHGEIVELPFGKKVRIFTVDEYEQFVKDNYSRTRGKMKKLLMDDIPEEFVTRQLNDSRYISKVVKSLLSNIVREKGEEEAISKNIIPCTGGVTDRLKKDWGINEVWNKIILPRFQRLNELTGTNKFTTKNVGIQEIPTMPLELQKGFNKKRIDHRHHAMDAIIIACANRNIINYLNNESATAKAELSRYDLQKLLCDKAKTDNNGNYKWVIRKPWASFTQDTYLALENIIVSFKQNLRVINKATNHFLHYNEEGKKIFVKQGKGDNWAIRKSMHKDTVFGEVNLRRIKTVALNEAMKNPQSIVVKDFKRKLLELWNLGFDAKRIKKYFEDNRETWSDINLSKIEVYYFSKDTKDRFFATRKPLDTSFDRKKIENNITDTGIQKILLRHLELKDNNPDIAFSPDGIDEMNRNIIQLNNGKYHQPIIKVRWYEQADKFAVGQTGNKSSKFVEAAKGTNLFFAVYESNILDKKTNTIIKKRNYATIPLNVAIERQKQGLSVAPEDENGNDPIFVLSPNDLVYLPTAADLANGIIAQPLDRGRIYKMVSCTGNEGHFIPARIANPILQTIELGSNNKAQKAWTDEMIKEICMPIKVDRLGNILESSSSHKK

SEQ ID NO: 22423 - protein, 1520 aa, unidentified
  REGION 1..1520: note = Cas Enzyme sequence
MKKIVGLDLGTNSIGWALINAYIDEYNKEHLYGIEACGSRIIPMDAAILGNFDKGNSISQTADRTSYRGIRRLRERHLLRRERLHRILDLLGFLPKHYSDSLNRYGKFLNDIECKLPWVKDETGSYKFIFQESFKEMLANFTEHHPILIANNKKVPYDWTIYYLRKKALTQKISKEELAWILLNFNQKRGYYQLRGEEEETPNKLVEYYSLKVEKVEDSGERKGKDTWYNVHLENGMIYRRTSNIPLDWEGKTKEFIVTTDLEADGSPKKDKEGNIKRSFRAPKDDDWTLIKKKTEADIDKIKMTVGAYIYDTLLQKPDQKIRGKLVRTIERKYYKNELYQILKTQSEFHEELRDKQLYIACLNELYPNNEPRRNSISTRDFCHLFIEDIIFYQRPLKSKKSLIDNCPYEENRYIDKESGEIKHASIKCIAKSHPLYQEFRLWQFIVNLRIYRKETDVDVTQELLPTEADYVTLFEWLNEKKEIDQKAFFKYPPFGFKKTTSNYRWNYVEDKPYPCNETHAQIIARLGKAHIPKAFLSKEKEETLWHILYSIEDKQEIEKALHSFANKNNLSEEFIEQFKNFPPFKKEYGSYSAKAIKKLLPLMRMGKYWSIENIDNGTRIRINKIIDGEYDENIRERVRQKAINLTDITHFRALPLWLACYLVYDRHSEVKDIVKWKTPKDIDLYLKSFKQHSLRNPIVEQVITETLRTVRDIWQQVGHIDEIHIELGREMKNPADKRARMSQQMIKNENTNLRIKALLTEFLNPEFGIENVRPYSPSQQDLLRIYEEGVLNSILELPEDIGIILGKFNQTDTLKRPTRSEILRYKLWLEQKYRSPYTGEMIPLSKLFTPAYEIEHIIPQSRYFDDSLSNKVICESEINKLKDRSLGYEFIKNHHGEKVELAFDKPVEVLSVEAYEKLVHESYSHNRSKMKKLLMEDIPDQFIERQLNDSRYISKVVKSLLSNIVREENEQEAISKNVIPCTGGITDRLKKDWGINDVWNKIVLPRFIRLNELTESTRFTSINTNNTMIPSMPLELQKGFNKKRIDHRHHAMDAIIIACANRNIVNYLNNVSASKNTKITRRDLQTLLCHKDKTDNNGNYKWVIDKPWETFTQDTLTALQKITVSFKQNLRVINKTTNHYQHYENGKKIVSNQSKGDSWAIRKSMHKETVHGEVNLRMIKTVSFNEALKKPQAIVEMDLKKKILAMLELGYDTKRIKNYFEENKDTWQDINPSKIKVYYFTKETKDRYFAVRKPIDTSFDKKKIKESITDTGIQQIMLRHLETKDNDPTLAFSPDGIDEMNRNILILNKGKKHQPIYKVRVYEKAEKFTVGQKGNKRTKFVEAAKGTNLFFAIYETEEIDKDTKKVIRKRSYSTIPLNVVIERQKQGLSSAPEDENGNLPKYILSPNDLVYVPTQEEINKGEVVMPIDRDRIYKMVDSSGITANFIPASTANLIFALPKATAEIYCNGENCIQNEYGIGSPQSKNQKAITGEMVKEICFPIKVDRLGNIIQVGSCILTN

SEQ ID NO: 22424 - protein, 1431 aa, unidentified
  REGION 1..1431: note = Cas Enzyme sequence
MNNTENYILGLDLGTNSIGWAVINDAQNPGETPEIIDLGVRINPLTTDEKNEFTQGKAISTNAGRTISRGMRRNNQRYKLRRLNLINILKNNNIINNETILGENGQNTTFELLKLRAKAAKGQVSLKDFGRILLKINKKRGYKSNRKAQDNDEGQLIDGMAIAKILHNENLTPGQLSLRLANEGRKVLPTYYRSDLQAEFDKIWEFQKQFHPDILTDELYTELIGKTKKTTIDYFQKYNINPAEYKYSNQSEKIKVPLQLRVDAISKEISLENLALVIIEINGNISSSSGLLGSISDRSKELYFSEQTIGEYLYAQLENNPHASLKNQVFYRQDYIREFETIWETQANFYPELTIELKKEIGDEIFYQRKLKSQKGLVSFCEFESKEIETDNDGKKSTKIIGARVAPKSSPLFQGFKIWQILNNILIRRKGVKKRTAEKVSQQNLFNEKVSIFELNLEQKELLFEELNLKDSLTSDNCLKILGYSNKEWEMNYSKDAKIEGNATNKAFYDAYLQILEIEGYESDFIKNNDALKIKERISTIFNELGIDTRILDFDAELSGKDFEKQPAYQLWHLLYSYESDNSPSGNERLYSLLEQKFGFKREHSEILANVKLLADYGSLSTKAIRKIYPYIRENKFSEACELAGYRHSKHSITKEEIDNKALKETLTILKKNSLRQPVVEKILNQMINVVNELIYKYSEKDDEGNIVKYHKFREIHIELARELKKSAKERSEMQTQINKSTKENEKITKILQDDFSIMYPTKKDIIKYRLWLELSPIGYRDLYTNQEIKKESLFSKNNTIEIEHIIPKARLFDDSFSNKTLAFSNINKLKGDNTAIDFISNTYNGDLDNYIERVETLYKAKTISKAKYLKLLKKTSEIGDGFIERDLRETQYIAKKAKDILSQITKNIVSTSGSITDKLREDWGLIDIMKELNLPKYRALGLTEMQERKHGHKVETIIDWTKRNDHRHHAMDALTVAFTKLSYIQYLNHLNARKDESDKKHASVMKTQNNEMTKVIDHNGQEKRVFKEPIPKFRKIAKEYLENILISHKAKNKVITININKAKNKVTSEIIDKNGNKKTIKGQITKTPRGQLHKETIYGTYQYYETKEVKITSRLNKETINKVANPLYKSLLLKRLEENNNDPKKAFSGKNSINKNPIFLDKNKTKTMPDSVKLAWLETGYSIRKDVNPSNFDSEKSINKVLDKNIRNILKQRLHEYNGDPKKAFSNLDKNPIWLNKEKGISIKRVTITGVSNAEPIHYKKDHLGNFILNDKGDKIPVDYIQTGNNHHIAIYKDDKGVLQEQVISFYEAVERANQGEPIINKTYKQKEGWKFLFTMKQNEMFVFPGDDFNPNDIDLLDRKNKKEISKHLFRVQKISSKNYMFRHHLESTLQDNKEVENIVFKLIQNLNPLTNIVKVRINHLGDIVSVGEY

SEQ ID NO: 22425 - protein, 1234 aa, unidentified
  REGION 1..1234: note = Cas Enzyme sequence
VISFQIGIAKVALFCSTNKNQLMNKHVLGLDLGVGSIGWCLITLDEQDNPAEIVAMGSRVVPLNDPNDANDFSIGKAFTANQDRTARRAMRRGFARYQLRRHRLHQELSKVGMLPDAQLIQLPLLELWELRERAAQPGERLTLPELGRVLCHINQKRGYRHVKGDSLSTVTEEGEKKKDSNSDYVTAINQRYAHLQEAHLTVGQYFAEQLRSSQTESGAIVYRIKDQVYPRQAYIDEYDQIMQVQSAYYPEVLTPHFIKMLRDEVIFMQRPLKSCKHLVSLCEFEKQEKVMRVQQDDGKGGKEVVERKIKFGPKVAPKSSPLFQLCRLYEAVNNIRLTYPDNSPRPLTNEERTKLVAYLQGNEATTASKKKKESTTEKPKKLTAPKLTYKVLTKLLKIKEELRADKLLESGITGDTTRVALASILQPYEQYHHLLTMELETRPMKVQTTDEATGEITEYEVAVLTDSYTRQPLYRLWHILYSIEERDAMRKALITQLGMSEEDLDGGLLDQLYRLDFVKPGYGNKSAKFMCKLLPQLQQGLGYSEACTAVGYRHSGSLTREEITERILLPQIPLLQRNELRQPLVEKILNQMINLVNTLQAKYGIDEVRIELARELKMSREEREKISIANRSREKENKKIAEHIQECGFYPTKTRIRKYMMWEEAEHRCMYCGKEISLSQCMNGDEMEVEHIIPKSILYDDSFGNKTCACRRCNKEKGNLTAREYIQSKGWEADYRKRLTDLLQKKLIPYSKYQRLLWLKKDIPTDFLERQLRLTQYISRQAMSILQQGIRRVAASEGGVTARLRSLWGYDDILHSLNLDRYESMGEIELVPKHPNSEEDESMKCRITDWSKRKDHRHHAIDALVVACTRQGYIQRLNRLSSESDRDEMRRETDLHKEPTADKLSLLERWLSQRPHFSVQDVSDKVAEILISYPKPKRTHTWGRNRYKKKTADGKEKTCIQTRVLVPRGELMEASLYGKIISDGEERIVKRYPLHGLKGTVVDPRLRELITQRKQGSTTEAKGAPLYLDAEKKQEVRSVRCYVTQPAVDKAIPLCFNEQGKAVTFAKSGSNHHVAIYRTAQGELTESLVTFWDAIDRARYGLPLIIKHPREVAEQVLQRDDIPEKVLRLLPPADYEFVDSFQLNEMVVVGLSDEELQRAIDQQDYRTLSEHLYRVQQISSMYYVFRYHLETSVSDNKNTTGRIPKFHRVASFKAYEEKKIRKVRIDLLGRITLL

SEQ ID NO: 22426 - protein, 1069 aa, unidentified
  REGION 1..1069: note = Cas Enzyme sequence
MAAIAIDDDGKPTEILSAISLIHDSGVDPDSAKSAATRLATSGIARRTRRLYRRKRKRLAKLDKFISSQGWPLKEFEKYEDPFYPWRVRAELATTAITDQQELGEKLSIALRHIARHRGWRNPYSKVTALYTVTEPSDAFLAMQEECAKQLGRTIPETITVGQLVTGMNLGKTRLRGENSLLAARPRQSDNANEIHTIAKVQGLSNELVRQIIDHVFAAESPKGSAAEQVGKDPLQPTKKRALKASDAFQQYRIAALIGNLRIRGGKGNRRLTTEETRLVFDYLRSLPAKQEPTWQLVAEQLKIDRGNLVGTAIMTDDGERAGAKPPVHDTNRIMENTKIKPLATWWKSADADARAAMVKALSNAEVDDFDSQAGAQVQEFFFGISDEDQEKLDGLHLPIGRAAYSEDTLDRLTKRMIGEGMDLYEARQAEFKISNDWAPPAPEIGERVGNPAVDRVLKATARWLNAAERQWGAPKSVNIEHVRAAFMSESSARELDRDNQQRAKRNVKVVAEMQEKLGIEGRPSRADVWRFQSIQRQNGKCAYCGAEISFKNSEMDHIIPQAGEGSTNTRDNLVAVCRECNSSKSNIAFAVWAENTSRPGVSVQKAIERTHHWVTDSGLRKPEFDKFRKQVCDRLRRKATDEPIDARSLESVAWMANELRSRIAQKFKDGDTKVRVYKGALTAEARRASGISGKLEFVDGKGKSRLDRRHHAVDAAVVAFTSNYVAETLALRSNMKFDQELRRKAPQWREFTGSDHVHQVEWTKWKYRMQALAELLNNALVQDRIVVMHNLRLRLGNGAAHEDTIGKLTRLKVGDAISTTDIDRASSEALWCALTRDPDYDPKTGLPENPNRTIRIHGTHLTASDEITVFPVAAASIPIRDGFAKLGSNYHHVRLFRVPSGKKYKYCLMQVYTVDLLKFRKEDLFTVELKPQTISVRTCEALLRKALANGTAEYLGWLVSDDELLIDTSSFDTPGIVKLREEYGPVNRWRLAGLTSVTRLNLRPLYLSKEGLKPNVNPEIKKIIDNRSWIITVNKLFSSGHVKIIRRDALGRPRLHSAAHLPICWEVK

SEQ ID NO: 22427 - protein, 1492 aa, unidentified
  REGION 1..1492: note = Cas Enzyme sequence
MKYILGLDLGSNSIGWALIEQDFDNKQGKILGLGSRIIPMDQGILGEFERGNKVSQTAERTGFRGIRRLRERYLLRRERLHRVLHLLGFLPPHYDAQIDFTKRFGKFMGDSEPKLAYNNEGFIFLESFNEMVEDFKKHQPQLFYIKSNGEESKIPYDWTIYYLRKKALYDKISKEELAWIILNFNQKRGYYQLRGEEEEKSTKNVEFYSLEITDVIADAPNNKGEIWYSIHLENGWVYRRASKISLEDWKGKVRDFIVTTELNEDGSIKLDKEGKEKRSFRAPNEDDWNLLKKKTEQNITLSGKTVGEYIYYHLLQNPNQKIKGKLVRTIERKFYKEELKAILEKQVALQPELFTEELFVDCVRELYKNNEIHQNSLSSKDFVHLFLNDIIFYQRPLRSQKSNISSCSLEYRFCIDEETKQRRKTYLKVISKSNPYYQEFRVLQWLSNLKIYRKEDDKDVTSEFISSIEDKETLYEFLMSEKEVSNKSVLEFLLMKLLRETYPFAKETELKKELKKEITKYRWNYVYEEGNDSKKYPMNETGYEIKKRLKEVKNIPDNFLTKDIEYQLWHIIYSVTDKYEYEKALMKFAQKHNLDAESFVENFKRIKPYPSDYGAFSEKAIKKLLPLMRFGKYWNYSNISEPVQARISDIINGVDNESIKTIVREKAEKYQLSQEVDFQGLPLWLAQYIVYGIHSEAVDIQRWTSPSDLEEYLKGFKQHSLRNPIVEQVVTETLRVVKDIWEYYGKGEENFFKEIHIELGRELKKTAEERKRMTREINENEETNLKVKKELQQLFENKSAENVRPYSPIQQEKYKLWQEQKERSPYTGQIIPLSKLFTDDYQIEHVIPQSRFFDDSLSNKVICEAAVNAQKGAQLGLEFIKKHGGEIIEIGLNKKVRILNEKEYKELVNELFANNRGKKAKLLMEEIPEKMVERQLNDTRYISKFISQILSNIVRSPQEDNGVNSKNIIPCTGKITAALKQDWGLNDVWNDLILPRFERMNNLTQTELFTTYSEKYQKKIPTVPLEHAKGFQKKRIDHRHHALDALVVACATRSHINYMNNQHALDKHKAKEEKQNARIDLRTALCEKKYNDNAEDKYNWTFKKPWNTFTQDVRSALEMVVVSFKQNLRVINKATNYYEKWVEEKGKKVKKKVKQEGINWAIRKPLHDDLPYGEIKYQTNYLKISENISKRKFIIDEFIRNQVERIYVENHSKNNLTKKYLKEYPVIDEKGKEVVSTDFRIEVIKYRKRKPISILSDRNSRTGITTIEKMLQAINKIADNVLKKELLLHLEQNNNDIDKAFAVEGIERFNSERKTPVYRLPFIEDGEKKIKLGSKGKYVEAAKGTNLFFGIYQGKEKRSYATIPLDEVIERQKQGLTSVPELNEKGEKLLFSLSPNDLVYVPMEGEDTENIDFTNLSKEQRERVYKTVSFTGNQCFFVKQTIASLIKSYDPQTKIGELESKNKLEVTICSRIKIKESCIKLKIDRLGNISKA

SEQ ID NO: 22428 - protein, 1432 aa, unidentified
  REGION 1..1432: note = Cas Enzyme sequence
MTQKILGIDLGTNSIGTSVRNTDLGNNLVDQLEFFSSDIFNASVSKNTNGREYSLASDRSAHRRGRRLNDSRRRKLWATLDLLIKNNLCPMAPESLEQWRTYDKKKKLFRQYPIDDKAFHSWIILDFNGDGKPDYSSPYQLRRELVSVQLDFNQAVDRYKLGRALYHIAQHRGFKSSKGETIAEQEKQEDDSKKNKNNALTEEHVDVVNAMKASEEKLSKGLLAYMQEHNLKTVGAAFAQLEDEGIRIRNNSEYKAIRSQHQDEIKEIFKFQKGLSNQTQLLDTLISEKQGIGTIFYKRPLRSQRGNVGKCTLEPNKPRCPIGHPLFEKFRAWTFINNIKAKSPDSDSAEPLPMDLKINIYNKLFLSRVKADFKFEEIRHFIEKQWGVALSKADKTINYRDDTSVAGCPITARMIKVLGEDWENFQVIGTKERQTQGKSNNALHQVCYTAEDIWHLCYDAEDPEQVRVFAEQALGWDEKKAAELVRLWSAIPQGYAMLSQKAIRNINRMLLFGLKYSDAVLLAKLPDILELSDEDIQTIIKKAQQLEEVVNEEKRIGNIVNSLIANYKAESLEHRFADHNYEYQLDESDEREIIKHIESNIGKQCWELMDADEQISILEGVRSGYQAFFASYKRNYIELPQLGERLVELLSKEYPSVEKREWERLYHPSQIAIYRPILLDKSDEKRRLGNPDIGAIKNPTVMRTLNNLRRRVNQLLDDGVLVPSETRVVVETARELNDANAKWALEKYQKTRRDENAQIKKILEEFYSKPNGITDTDVDKARYVIEQCEEDNYKSKKEIGTYSKDIQKYKYWLEQGGQCLYTGRIISLSNLFDSNAFDLEHTIPASVSFDNSDQNMTLCEAHYNRFIKKNNIPTAMPNYEKDVTIDGKLYTAIKPRLEKWKKRIERFSRNVEYWKVQARRAQMKDRKDECTKEKLLWQMELQYWRDKLQRFTILEVTDGFKNSQLVDTRIITRHATLYLKSVFENVEVQRGNTTAEFRKILGVQSVEEKKDRTLHSHHAIDATILTTIPTAAKRERILELFYKVQEKERILKNCSGDARIGLKQDLEGLQAKLKKEVADCRLGGEISQLGNFINDKIIINHCVKDQTLTPSHKRLRRRGRVVGGKEHPIWQTGDTLRGKIHKESYYGAITQYAKDEDGNVLFNDGKPKIDPTIWYVIRRELKHKKSAQDTGFASWDDLEKVIVDKNLFKLMKEQFPEETSFKDACEQGIYMIKKGEDQEHNIKTHRIRHIRCHTSVRSALKIKEQLNKSTKDYKQYFYAESGDLYTMCCYTNGKKKEYRPYRLYDIAQHRKAGIEDIPEFITDKKGNRLELSYKLCSGDMILLYENTPEELYDMDPVNLKQRLYRVDRFESKGSTIYLTNHLIANGEVGHSIKDYNQMPPTVRCGVNTLKFLIMGEHNDFVIKGNNIIFNHR

SEQ ID NO: 22429 - protein, 1455 aa, unidentified
  REGION 1..1455: note = Cas Enzyme sequence
MARVLGLDLGTASIGYSLRDTDKGTNITEQLVRFGSIIFQKGVGNSKTGEFSYAAERTKHRASRRLYQARRYRIWETLATLIEFGFCPLSIEDLDRWRVYDKARNLKRRYPVDAANFEQWVRLDFDGDGKSDYSSPYQLREELAIVQLDFSQEINRFKLGRALYHIAQRRGFKSSKGETLKEQEDAVKDDIANEMSLESVSLKKSEEKKSKDLASYMEENALHTVGCAFAQLEREGVRVRASKYQAVRSQYKEEIKYIFEFQNGLDIDGDFFKRIYSDRKDGCIFYKRPLRSQKGLVGKCTLEPAKSRCPISHPEFEKFRAFAFINNIQYRRATEDEWLNLTAEQKLKLYNDKFLQAKPSFKFEVVRKWIEKEIGLLQDYHLSKEKRTINYSDRTNVTGCPISGRMKALLGEKWEEYKQQSDKIRKNRNGKEHVVSYMMEDIWHVCFSYDDEEAVSEFAKSLKFDDKQVKQFLNLWIAIPQGYAMLSLKAIRNINRFLVPKRNNPLYEGYIYTEAALLGKMPEILGEKQWADNEKSILGAINGWINQNREEKRILNIVNNLISAYKSLEYAEQFAYKNVEYQLDDSDKKDIEKYTIEAFGQKSWEKETQEMKDKVLKDVGRMYQQFFFTSKRDYFRLPKLGDTIKLYLSNNFPEFYCTNSFVESQTGLQCRCAACKKLNKLYHPSMVEFYKPANEQEFEYGGVMLSKKLLANPVIGAFKNPMAMRTLHQLRNLINYFIKEGLVEEDTRIVVETARDLNDANMRWAIEEYQREREKENKAILEAIKELKGEEKNSDDIDKARLLIEQNPEYLFNKDRYEVESGDDTNNKKKKAMGKATDFLYKKDVAKYRLWLEQGMQCIYTGKTISVSELFDENKTDFEHTIPRSKSFDSSLANLTVCDAYYNRHIKKNCIPTELPNYEEIEHRLQPWKKKVEQLKNNVEFWRQKSKQAQTKDAKDKAIRQKHLWQMELDYWQDKLSRFTMTEVTSGFKHSQLNDTRLITKYAYHYLKSVFSKVEVQKGLVTADFRKMLGVQSADEKKDRDKHSHHAIDATILSLIPVAAKRDKILELFYKIQEEKKLYFNTEYWEKELQKEIRSCQIGNVSSLPDYIEENILINHISKDQTLVPAKRKMRTRGKVIWQRDEDGQFCMDKDGSKMPKHWIKGDCIRGKLHGDSFYGAIKQSKKKGEKDYLTSYEDISYVIRRELKYKKTPTDKGFKDLDDLHLSIVDEGLFNIIKQQCDGKSFKEACDDGFYMLNRDGDKVHKIRHIRCYTSVKKPLAIKRQSYLSDKEYKQSYYAEVGDLYAMCKYCNADKTKVRYEVINLFDITENRRYGYSIAEVLEDDKKKEKYYLVAVLQAGKQVILYKNDDELESIIEMSNDKLSDRLYVISGFESPYRIILKKHICAKSDSELGKGESIKSFNELPDKIRQSVNATNYLLEDIDFYISPDGLITFKND

SEQ ID NO: 22430 - protein, 1421 aa, unidentified
  REGION 1..1421: note = Cas Enzyme sequence
MKYILGLDLGSNSIGWALIEQDFDNRQGKILGLGSRIIPMDQGILGEFERGNKVSQTAERTGFRGVRRLRERHLLRRERLHRVLHLLGFLPPHYDAQIDFMKRFGKFMGDSEPKLAYNNEGFIFLESFNEMVEDFKKHQPQLFYIKSNGEESKIPYDWTIYYLRKKALYEKISKEELAWIILNFNQKRGYYQLRGEEEEKSTKNVEFYSLEITDVIADTPNNKGEIWYSIHLENGWVYRRASKISLEDWKGKVRDFIVTTELNEDGSIKLDKEGKEKRSFRAPSEDDWNLIKKKTEQNIVFSGKTVGEYIYDHLLQNPNQKIKGKLVRTIERKFYKEELKAILEKQVTLQPELFTEELFVDCVRELYKNNEIHQNSLSSKDFVHLFLNDIIFYQRPLRSQKSNISSCSLEYRFCIDKETKQRRKTYLKVISKSNPYYQEFRVLQWLSNLKIYRKEDDKDVTSEFISSIEDKETLYEFLMSEKEVSNKSVLEFLLMKLLRETYPFAKETELKKELKKEITKYRWNYVYEEENDSKKYPMNETGYEIKKRLKEVKNIPDNFLTKDIEYQLWHIIYSVTDKYEFEKALMKFAQKHNLDAESFVENFKRIKPYPSDYGAFSEKAIKKLLPLMRFGKYWNYSDISEPVQARISDIINGVDNESIKTIVREKAEKFQLSQEADFQGLPLWMAQYIVYGIHSEAADIQRWTSPSDLEEYLKGFKQHSLRNPIVEQVVTETLRVVKDIWEYYGKGEENFFKEIHIELGRELKKTAEERKRMTREINENEETNLKVKKELQQLFENKSAENVRPYSPIQQEKYKLWQEQKERSPYTGQIIPLSKLFTDDYQIEHVIPQSRFFDDSLSNKVICEAAVNAQKGAQLGLEFIKKHGGEIIEIGLNKKVRILNEKEYKELVNELFANNRGKKAKLLMEEIPEKMVERQLNDTRYISKFISQILSNIVRSPQEDDGVNSKNIIPCTGKITAALKQDWGLNDVWNDLILPRFERMNNLTQTELFTTYSEKYQKKIPTVPLEHAKGFQKKRIDHRHHALDALVVACATRSHINYMNNKHALDKHKAKEEKQNARIDLRTVLCEKKYNDNAEDKYNWTFKKPWNTFTQDVRSALEMVVVSFKQNLRVINKATNYYEKWVEERGKMVKKKVKQEGINWAIRKPLHKETISGKITLERVKVGKGKILTATRKSIDPSFTEKTIASITDTGIQKILLNYLAYKGSPELAFSPEGIEEMNKNIAKYNDGKTHQPIYKVRIFEEGSKFPLGEIGTKSQKYVETAKGTNLFFGVYQGKEKRSYATIPLDEVIERQKQGLTSVPEHNEKGEKLLFSLSPNDLVYVPVEGEDTENIDFTNLSKEQREMIYKIVNFSKKRLYGVPNIVAVPIIDKMEYTQYNKIEFLKEKETCIKLKIDRLGNISKV

SEQ ID NO: 22431 - protein, 1382 aa, unidentified
  REGION 1..1382: note = Cas Enzyme sequence
MKRILGLDLGTASVGWAVVNEAENSEEQSSITALGSRVVLLSADEKNNFLTGKSVSATATRTAKRGARRNLQRYKLRREWLKDALVSAGIINENTCLNDSNSKELFATYISRAKAVTEQIALEDFAKVLFMINKKRGYKSNRKTDNTESEDGQIIDGLDLAKKLKARNITPGQYLLELFKENKKDKAVFYKSDLQEEVNRIWAFQSQFYPEILDNTLLSAITNKSKKAVIGLFKGIKNVEIADVKTKERTEKALTWRSEALHKQLEIGEVAYAIAEVMGAISQSSARLALLSDNSKHLEFEGLTIGQYLLKLLRNNPNSSRKNINFYRKDYEDEFNTIWKKQASFYPQLTGSLRSTVFNSIFMQRNLKSCKALLANCELEFAEKKITLPDGSCQTRTIYSKVCPKSSPYFQEFQIWQSLSNIRIIDKENTHLTKGQELSYDQKVMLLPELMIHSELKANKIIEILFGKKSNYTINMPSIKGNRTNETIFNALLEIVELTGHSIDNIVKTDANQQIEAVKNIFESLGYKTDFITFDSTIEGKDGLNQPYYKLWHLLYSYCGDNSKTGNEALIRKIEELTGLEKEEAKVLANCTFENDYASLSTKAIRKLLPHLQSNLDYSEACEAAGYNHSKRSRTKEDIKNKVYKDKLDLLPRNSLRNPIVEKILNQMIHVINQTSEAYGKPDEIRIEMAREIKKNKIQREKLANQLRQNTAELERIKDILRKDFKLSHISHNDILRYRLYEELSLNGYKTLYSNTYIERQQILDPTVTIEHIVPKALAFDDSFSNKTLEIQSVNGEKSNQTAFDFISKKYGSEALEQYINRVNNLFENGKISKTKRDNLLRKQEDIPSDFLNRDLRNTEYIAKKALEILEDYVPRVTPTIGEITKTLREDWQLVNIMRELNWEKYNSLGLTSFYYDRNGTKIGLIHNWTKRNDHRHHAMDALTIAFTKPSIIQYLNNLKSQNDKGSSIYAIQAKETYIDETRKRLIKPPYNIKQFRNDAKQMLDNIFVSHKAKNKVVTPNTIVTKKKRKAGKETKAEEKRTFLTPRGALSNETVYRKICNYETKEITINSKLTYEIALTIAKKKEREAVLERLAQHNNNPTTAFKNYNKNPIMLQTSVGEKPLISVKIVNYKELFVKRSEINEKLDIKRVLDAKVRARLTDRLKEYNNDPKAAFANLEENPIWLNEEKGIALKHVTTIERVVGLPIRPKRNINGEIMKDEQGQPLKSHYVATGGNHHVAIYEDEEGKWHEKVVSFNEAASRSIQKLPIIDKDFNKELGWVFQFTMKQNEMFVFPDKEAGFDPLAIDLKDPANKSLISKHLYRIQKISSGDYYFRHHLETNVEENKEVKGITWKRITSLSPLQGIIKVRINHIGQIIDIGEY

SEQ ID NO: 22432 - protein, 1192 aa, unidentified
  REGION 1..1192: note = Cas Enzyme sequence
MLMSKHVLGLDLGVGSIGWCLIALDAQGDPAEILGMGSRVVPLTNLGDDKAFSKGEAFTANQERTARRTMRRGFARYQLRRYRLRRELAKVGMLPDAALIQLPLLELWELRERAATAGRRLTLPELGRVLCHINQKRGYRHVKSDAAAIVGDEGEKKKDSNSAYLAGIRANDEKLQDEHKTVGQYFAEQLRQNQSESPTGGISYRIKDQIFSRQRYIDEYDQIMAAQRVHYPDILTDEFIRMLRDEVIFMQRPLKSCKHLVSLCEFEKQERVMRVQQDDGKGGRQLVERKVKFGPKVAPKSSPLFQLCRIYEAVNNIRLTRPDGSPRDITPEERAKIVVHLQSSASLSFAALKKLLKEKALIADQLTSKTGLKGNSTRVALAAALQPYPQYHHLLDMELETRIMTVQLTDEETGEVTEREVAVVTDSYVRQPLYRLWHILYSIEERDAMRRALIIQLGMKEEDLDGGLLDQLYRLDFVKPGYGNKSAKFICKLLPQLQQGLGYSEACAAVGYRHSNSPTSEEITERTLLDKIPLLQRNELRQPLVEKILNQMINLVNALKAEYGVDEVRVELARELKMSREERERMAEGNRRREKENKAIAEKIRECGLFPTKSRIRKYMLWEEAGEKCLYCGQILTLSQCLNGDDMEVEHIIPKSVLYDDSYGNKTCACRRCNKEKGNRTALEYIRAKGWEAEYMERINGLLDKKAISYSKHQRLRWLKEDIPSDFLERQLRLTQYISRQAMAILQQGIRRVSASEGGVTARLRSLWGYDDILHTLNLDRYDSMGETERVYREGETTEKLRITNWSKRMDHRHHAIDALVVASTRQGYIQRLNRVSSESEREAMSGEIEMQKVTKTDKLSLLERWLTQRPHLSVRAVSDKVAEILISYRPGKRVVTRGRNIYLRHGKKCVQSGLLVPRGPLSKETVYGQITVNGEPQIVCKYDLHSLKAKDVDYVVDLALRKRLKELLAQHGGKEKEAFAGDVYMDEAGTQGPIRSVRCFTGLDRGKMKAVKYDEQGDAVGFVSPRNNHHLAIYRTPKGKLVESIVTFWDAVDRARYGIPLVITHPREVMEQVLQRGDVPESVLSLLPSSDWVFVDSLQQDEMVIIGLSDEELQRALEAQDYRKLSEHLYRVQKMSSSYYVFRYHLETSVADDKNTMGRIPKFHRVQSLKAYEEKNIRKVRVDLLGRISLL

SEQ ID NO: 22433 - protein, 1550 aa, unidentified
  REGION 1..1550: note = Cas Enzyme sequence
MKNILGLDLGSNSIGWAIVKALKNEDGKEILQSIDLAGSRIIPMDQATLGNFENGNSVSQTRERTGYRSARRLRERYLLRRERLLRVLNCMGFLPEHYSQNIDKYGKFFLDNEVKLSWKKDKMGKNEFIFLDSFNEMLEDFRHSQPQLLLDGRKVPYDWTIYYLRKKALTEKISKEELAWILLNFNQKRGYFQLRGEDEEVQGKKIEFYALKVVRVEDTGEKKGKDTWYNVYLESGLGDTDDYWVYRRASSVPIDEWEGQVKEFIVTTTLDNNGSPQIDKEGKVKRSFSIPKPEDWMLVKKKTEVDIKSSGKTVGTYIYDTLLQKPDQKIKGKLIRTIERENYTNELSLILENQKKFHLELQDRELYHQCIELLYCKNEAHKRVIGTWDFTSLFIKDILFYQRPLKSKKALIDNCPYEESFYIENGEKKSKPRKCIAKSHPLFQEFRIWQFISNLRIYQKVKEVDGKLQFNVDVTSDFLRDESAYVELFKWLNERAEVSQEDLLKHLGLKKTKTEDTVSLYRWNYVEDKKYPGNKTRSSILKKLLNDEKEALSEDIELKIWHLLYSVSAQSEIDKALSSKNVSTKGIYSGLSVYFSDETIQKIKNVKLESGYGSYSAKAIGKLLPLMRRGKYWNLESIDNHTKERIEKILNGECDETIRARTREKSISLTDISQFKGLPLWLACYIVYDRHSELKTIKKWNGPEDIDKFLKEFKQHTLRNPIVEQVIMETLRVVRDIWRRVGSIDEIHIEMGRDMKQTAQERARRSAIISRNENDNLRIKALLHEFMNPELGIENVRPYSPAQQEILRIYEDGVLSSVSEIEDEIKNILKKFNESEEGKRPTKNEIIRYKCWLEQKYRSPYTGEIIPLGKLFTPAYQIEHIIPQARFFDDSFTNKVICEAEVNAKKGDLLGYEFVKEKGGEIVELSGGRNVRIFSVEEYEDFVKEHYKSNKQKMQRLLAEDIPTEFSHRQLNDSRYISKYIRNLLSNIVREDDEQESVSKNVISCNGAITDRLKKDWGVNDVWNHIILPRFVRLEEIRADNGEKFTAFNQEGHLIPSMPLMYQKGFNKKRIDHRHHAMDAIVIACTTRDHVNLLNNECSNTQNNANKHQLSRKLRRYENVSYKQDGKLKEREVPKEFLKPWEEFTRDVEFALKNVIVSFRQNLRVLNKTVNYFQHWKDNSSEKEWKEQKSADHWSIRKPLHKETVSGEVFLWRTRFVSLREALTNPKRIVEKDLRSKILELQSKGYDTKRIKKYFEDNKDVWQDVNLSKIEVRYYSREIVDPQTELPKNRYFATRFGNDLISLFSGVSNFEKAKKIIESITDTGIQKILFRHLENKGNDPVLAFSPEGIDEMNRTIKTLNNGKDHKPIYKVRIYECSTMKFPLGSVGNKSKKFVEAAKGTNLYFAVYEKEVENDRGECHKERTFKTIPLNDVIRNLKQGLSIAPNDENGNPPAFILSPNDLVYLPTKEESETDSISQPLDRNRIYKMVSCTGYQVFFVPAFVAAPVLQKIELGSNNKSERARTDEMIKESCIPIKVDRLGMLISINGKAV

SEQ ID NO: 22434 - protein, 1392 aa, unidentified
  REGION 1..1392: note = Cas Enzyme sequence
MKKVLGLDLGSSSIGWAYVHEAEDGDKLGSSKIIKLGVRVNPLTVDEQRNFEQGKSITTNALRTLKRCMRRNLQRYKLRRENLIEVLKKHGFISDASMLSEQGNYTTFETYRLRAKAAVAEISLEELARVLLMINKKRGYKSSRKNRGEDEGKFIDGMSVAKQLYDRGITPGQFSLELLKEGKRHLPDYYRSDLQNELDRIWDFQQSFYPEILTQNFREQIRDKGQKNTSQIFLREYQIYTADNKGTDKLLRALEWRVEGLSRKLSVEELAFVMSDLNGSISGSSGYLGAIGDRSKELYLGRQTVGQYLMEKLNTNPNGSLKSKVFYRQDYLDEFERIWETQAGFHKELTPELKKEIRDIIIFYQRSLKSQKGLISFCELESKLVEIEVNGKMRKKVVGSRVCPKSSPLFQEFKIWSILNNICVWSVDKSKSSEARKMDGRNKEPNLTQEEKEILFKELSLKEKLSKRDVLELLFEDARKLDMNYEKVEGNRTQATLFKAYQKIIARSGHGEYDFERMSSSEILEIVSGVFDGLGYNTDILYFNSEGELDQQSLYRLWHLLYSFEGDKSNSGNENLINKIASLYGFDREYAVILANVVFPPDYGNLSAKAIHKILPYLKDGNKYSLACEYAGFRHSKNSLTKEEREKRVLKERLDILPKNTLRNPVVEKILNQMVHVVNGVINKYGKPDEIRIELARELKKNAKEREEWTRAINKSTIENEKLRSFLKKEFGFTQVSRNDIVRYKLYLELESRGFKTLYSNTYIPLKRLYFKEFDIEHIIPQSRLFDDSFSNKTIELKSVNQEKDNQTAYDYVLGKGGEAGLQEYLERVEELFKGGYIGKAKYNKLKMMGKDIPDDFIDRDLRDTQYIARRARAMLEEVVGNVVSTSGAVTDRLREDWQLVDVMKELNWNKYERLGLTEIVEDRDGRKVRRIKEWTKRNDHRHHAMDALTIAFTKPNFIQYLNNLNASSDKSDSIYGIKEKELSRDNKGKLRFNPPMPLKEFRMEAKRHLENVLVSTKAKNKVVTPNVNKSKKRGGMNQKVQLTPRGQLHQETIYGSIKQYVTKEVKVGSAFNMEMILNVANKAYREALLKRLNAFDQDAKKAFTGKNSLEKNPIFINDSHTCKVPGKVKIVSFETVYTIRKEIGPDLKIDKVIDKRVRDILETRLVEFGGDSKLAFTNLDEKPIWLNKEKGIDIKRVTISGLSNVIALHDKLDKDGEPVLDEHGQPQPVDFVCSGNNHHVVIYRDPEGKIQDDVVSFFEATVRAKEGQPVIDREYKKQEGWEFLFSMKQNEYFVFPNEETGFDPKEVDLMNFDNYALISPNLFRVQTMSRVMYGNQVVRDYKFRHHLETTVKDYKELKDITYKQYKSLDFANQIVKVRIDHIGQIVHVGEY

SEQ ID NO: 22435 - protein, 1504 aa, unidentified
  REGION 1..1504: note = Cas Enzyme sequence
MKNIVGLDLGTNSIGWAVVNGSVNDDGSEQLVKIQASGSRIIPMDAAMIGDFNKGNSISQTAERTRLRGVRRLSERYLLRRERLHRILDILGFLPFHFAQDLDRHGKIVKGKEPKLAWRKNEAGQFEFIFQDSFKEMLEDFKLNHPNLITDDKKVPYDWTIYYLRKKGLTSKISKEELAWILLNFNQKRGYYQLRGEEEEENKNKLVEFYALKVVAVEDSGEKKGKDIWYNVHLENGWVYRRTSNMSLDWVGKTKEFIVTTDLEKDGTPKKDKEGNVKRSFRAPKEDDWSLLKKKTEADIDQTHKTVGVYIYDTLLGNPSQKICGRLVRTIERKYYKEELKQILEKQKEFHLELQDRALYAACIEELYPINEAHRNNVGNRDFTYLFLEDILFYQRPLKSKKSLIDNCPYEENQGLDKETGEIKSFPVKCIAKSHPLFQEFRLWQFIVNLRIYRKDLAQDVDVTNELLKTEEDYVALFDWLNGKKEIDQKAFLKYPVFGLKKEIENYRWNYVQDKPYPCNETRSLMLARLEKCDISIEFLTKENEEALWHILYSVEDKNEIVKALQKFADKHDLNASFVDVFQKFPPFKKEYGSYSAKAIKKLLPLMRMGKYWSENSIDKGTRERIDKIITGEYDEKIENRVREKAIHLADVSDFKGLPLWLVCYIVYGRHSEAKEITQWKSPADIDSYLRSFKQHSLRNPIVEQIIIETLRVVRDIWKQVGNIDEIHVELGREMKNPADKRKKMTQQMSENENTNLRIKYLLTEFLNPEYEVENVRPYSPSQQDILRIYEEGVLNSVSDLPEEISDILKKFTETDLKKRPSRSEVLRYKLWLEQKYRSPYTGEVIPLGKLFTPAYEIEHVIPQSCYFDDSFSNKVICEAEVNKLKSNLLGHEFIVKHHGEIVELPFGKKVRIFTVDEYEQFVKDNYSRTRSKMKKLLMDDIPEEFVTRQLNDSRYISKVVKSLLSNIVREKGEEEAISKNVIPCTGGVTDRLKKDWGINEVWNKIILPRFQRLNELTGTNKFTTKNVGIQEIPTMPLELQKGFNKKRIDHRHHAMDAIIIACANRNIINYLNNESATAKAELSRYDLQKMLCDKAKTDNNGNYKWVIRKPWASFTQDTYLALENIIVSFKQNLRVINKATNRFLHYNEEGKKIFVKQGKGDNWAIRKSMHKDTVFGEVNLRRIKTVALNEAMKNPQSIVVKDFKRKLLELWNLGFDAKRIKKYFEDNRETWSDINLSKIEVYYFSKDTKDRFFATRKPLDTSFDRKKIENNITDTGIQKILLRHLELKDNNPDIAFSPDGIDEMNRNIIQLNNGKYHQPIIKIRWYEQADKFAVGQTGNKSSKFVEAAKGTNLFFAVYESNILDKKTNTIIKKRNYATIPLNVAIERQKQGLPVAPEDENGNDPIFVLSPNDLVYLPTDDELANGIIAQPLDRGRIYKMVSCTGNEGHFIPARIANPILQTIELGSNNKAQKAWTDEMIKEICMPIKVDRLGNVLESSSSYKK

SEQ ID NO: 22436 - protein, 1433 aa, unidentified
  REGION 1..1433: note = Cas Enzyme sequence
MTQKILGIDLGTNSIGTSVRNTDLGNNLVDQLEFFSSDIFNASVNGEGVNGGKGGREYSLASSRSAKRRKRRLYEHRRYKLWATLDLLIKNNLCPMTPESLEQWRTYDKKKKLFRQYPIDDKAFHSWIILDFNGDGKPDYSSPYQLRRELVSVQLDFNQAIDRYKLGRALYHIAQHRGFKSSKGETIAEQEKQEDDSKKDKKKALAEEHVDAIKASEEKHSKGLSTYMQEHNLKTVGVAFAQLEDEGIRIRKNSEYKAIRSQHQDEIKEIFKFQKGLSEQTQLLDTLISEKQGIGTIFYKRPLRSQRGNVGKCTLEPRKPRCPIGHPLFEKFRAWTFINNIKAKSPDSDSAEPLPMDLKINIYNKLFLSRVKEDFKFEEIRYFIEKQWGVALSKDDKTINYRDDTSVAGCPITARMIKVLGENWENFQVLGTKERQTQGKSNNALHQVCYTAEDIWHLCYDAEDSGKVRTFAEEILGWDEKKASELVRLWSAIPQGYAMLSQKAIRNINRMLLFGLKYSDAVLLAKLPDILELSDEDIQTIIKKVQQLEEVVNEEKRIGNIVNSLIANYKAESLEHRFADHNYEYQLDESDEREIIKHIESNIGKQRWELMDADEQISILEGVRSGYQAFFARHKRTFVELPQLGKRLVELLSKVYPSVEKKQWERLYHPSQIAIYRPILLDNSDENKRLGNPNIGAIKNPTVMRTLNNLRRRVNQLLDDGVLVPDETRVVVETARDLNNANAKWALEQYQEIRRKENKKIKDILEEFYPQFSNITSTDVDRARYVIEQYEEDNYKLEKEIGTYSKNINKYKCWLEQGGQCLYTGRIISLSNLFDSNAFDLEHTIPASVSFDNSDQNMTLCEAHYNRFIKKNNIPTAMPNYEKDVTIDGKLYTAIKPRLEKWKKRIKRLSRNVEYWKVQARRAQMKDDKDKYTKEKLLWQMELQYWKDKLQRFTILEVTDGFKNSQLVDTRIITRHATLYLKSVFKNVEVQRGSTTAEFRKILGLQSVEEKKDRTLHSHHAIDATVLTTIPAAAKRDRILELFYKVQEKERILKNYSGDAPIGLKQDLEGLQEKLKKEVEACKLGNKLGQLGSFINENIIISHNVKDQTLTPSRKRLRRRGRVVYNKKRENDNDKNPIWQTGDTLRGEIHKESYYAAITQYAKDKDGNVLLNNGKPKIDPTIWYVIHRELTYFDDWKPLEKVIVDKNLYKLMKEQFPDGTSFKKACEQGFYMIKKGKDKEHNIKTHRIRHVRCYSDVKGALKIKEQTNKSTKEYKQYFYAAVGDLYTMCCYTNGKNKEYRVYRLYDIAQHRKSGIEDIPEFITDEKGNRLEWAYRLRSGDMILLYENTPEELYDMDPVNLKQRLYKVDRFESKGPTICMTHHLIANGERGKSIKDYNKMPPTARCSVNTLKFLIMGEHNDFVIKGNNIIFNHR

SEQ ID NO: 22437 - protein, 1352 aa, unidentified
  REGION 1..1352: note = Cas Enzyme sequence
MRFLFMDSFHEMMADFAKCQPGLVADGRKIPLDWTLYYLRKKALTQAIKKEELAWILLNFNQKRGYYQLRGEEDEEDPTKREEYYELKVVSVEAAEEGKGGNTWYNVTLENGWIYRRQSKIELNDWTGKIRQFIVTTEYEKDGITIKKDKNGEVKRSFRAPSEDDWGLRKKRTESRLEDSGKTVGEFIYDHILSEPADKIRGNFIRTIERKFYKKELEAILREQSKYHKELKDLNTLVNCIKELYPNNKAHQDSLMKKDMTYLLITDLIFYQRPLKSKKSLIADCPYEYYEYVIKETGEIKRQGIKCIAKSNPYYQEFRLWQFIINLRLFDRTNDKEITSEYLSSMEDYTKLFTYLNDRKEINQEILLKDFFKQKKVKMGMEKEFPIRWNYIEDKEKKYPCNETRHELLAALDKAGIDHSWLDDKERFYRLWHLLYSVESKEEAEGALRKLNDNEDFVNAFLKIKPFKKEYGAYSEKAIKKLLAVIRMGTQWNEDDICEQTRNRIQSIINGDIDEKIKERMGRTFSQLSDFQGLPEWLACYVVYGRHSETTDIQRWTKPENLMAYINGFKQHSLRNPIVEQCILETLRTVHDIWKEAGHIDEIHIELGRSMKSTADQRARMSKSILQNENTNLRIKSLLMELKNTKEFENVRPYSPMQQEILRIYEEGALQELTKEDDQYPEISKISQMAQPSAKELLKYRLWLDQKYCSPYTGKPISLSKLFTSAYQIEHIIPQSRYFDDSFSNKVICEAEVNQLKSNMLGYEFIKKHSGEIVHCTMVGDVKILDAKEYYNFVTEHYANNRRKKEKLLLEDIPQEFLNRQMNDSRYISKKVMALLSNIVREEGEQEAKSKFVIACSGGITDRLKHDWGLIDVWNSIVYPRFERLNKLTNTENFGRWENKEGKQVFQTSLPLELQRGFSKKRIDHRHHAMDALVIACASNNIINYLNNESAKSQEKREDLRKKLCDKNRIIRKPWETFTQDVRTALEDVVVSFKNYVRVINKATNYYEKYDKNGKKGIAEQKGQDMWAIRKPMHKETVFGQVNLRRKVTVKLKDALEKVPAICNKELRDYINNLVAKQFNKKQILAHFKSINNRLNMKSVDKVDVWQFSDEKEPMVATRKSVDTSFDAKRIATITDTGIQKILRNYLETKDNDPNIAFTPEGIAEMNKHITEYNNGKQHQPILKVRVSEPKGAKYQVGETGNKTSKFVEAQKGTNLYFAIYEDKEGNRSYNTIPLNEVIERLKQGLSPVEDLNKQGEKLKFYLSPNDLVYVPTEEEKLSSECKLNKEQIYKMVSATSNQCFFTPHRTANSIVNKVEYSPLNKMEKTILGEMIKSVCWKLEVDRLGNILKVIK

SEQ ID NO: 22438 - protein, 1421 aa, unidentified
  REGION 1..1421: note = Cas Enzyme sequence
MTQKIFGIDLGTNSIGTSVRNTDLGNNLVDQLEFFSSDIFKASVNREGVNGGKGREYSLASSRSAKRRKRRLYEHRRYKLWATLDLLIKNNLCPMTPESLEQWRTYDKKKKLFRQYPIEDKAFHSWIILDFNSDGKPDYSSPYQLRRELVSVQLDFNQAIDRYKLGRALYHIAQHRGFKSSKGETIAEQEDDSKKNKNNALIEEHVDATKASEEKHSKGLSTYMQEHNLKTVGAAFAQLEDEGIRIRNNSEYKAIRSQHQDEIKEIFKFQKGLSSQTQLLDTLISEKQGIGTIFYKRPLCSQRGNVGKCTLEPNKPRCPIGHPLFEKFRAWTFINNIKAKSPDADSAEPLPMDMRINIYNKLFLSRVKADFKFEEIRNFIEKQWRVALSKDDKTINYRDDTSVAGCPITARMIKVLGEDWEKFQVLGTKERQTQGKSNNALHQVCYTAEDIWHFCYDAEDSGKVRTFAEETLGWDEKKAAELVRLWSAIPQGYAMLSQKAIRNINRMLLFGLKYSDAVLLAKLPDILELSDEDIQTIIKKAQQLEEVVNEEKRIGNIVNSLIANYKAESLEDRFADHNYEYQLDESDEREIIKHIENNIGKQRWELMDADEQISILEGVRSGYQAFFARHKRTFVELPQLGKRLVELLSKEYPSVTEKQWERLYHPSQIAIYRPILLDKSDEKRRLGNPDIGAIKNPTVMRTLNNLRRRVNQLLDDGVLMPDETRVVVETARDLNNANEKWALEKYQEIRRKENDKIKKILEEFYPQFSNITSTDVDKARYVIEQCEEDNYTSKKESGTYSKNIQKYKYWLEQGGQCLYTGRIISLSNLFDSNAFDLEHTIPASVSFDNSDQNMTLCEAHYNRFIKKNNIPTAMPNYEEDVTIDGKLYTAIKPRLEKWKKRIKRLSKNVEYWRTQARRTQMKDHKDECTKEKLLWQMELQYWRDKLQRFTILEVTDGFKNSQLVDTRIITRHAILYLKSVFKKVEVQRGSTTAEFRKILGVQSVEEKKDRTLHSHHAIDATILTTIPTAGKRERILELFYKVQEKERRLKNCSGDAYEGLKQDLEGLQAKLKKEVVDCKLGGEISQLGNFINDKIIINHCVKDQTLTPSHKRLRRRGRIVGGKEHPIWQTGDTLRGEIHAESYYGAITQYAKDKDGNVLFNNGKPKIDPTLWYVIRRKPTYFNDWKPLEKDIVDKNLFKLMKEQFPDGTSFEDACKQGFYMIKKGKDKKHNIKTHRIRHVRCYAVKTALKIKEQIYKSTKDYKQYFYAAVGDLYTMCCYTNGKNKEYRIYSLYDIAQHRKSGIEDIPEFITDEKGNRLELSYKLRKGDMVLLYEKTPEELYDMDPVNLKRRLYKVNSFENDGLRIIMTNHMVTNKEKGESIKAYSQIPQTVRCAVNTLKFLIMGDHNDFIIKSNNIIFNHR

SEQ ID NO: 22439 - protein, 1426 aa, unidentified
  REGION 1..1426: note = Cas Enzyme sequence
MKNILGLDLGTTSISFAHIVEDENKQKSEIKELGVRIVSLTTDEQSDFEKGKSITTNANRTLKHGARLNLDRYQQRRKYLIDLLQKANLITSSSILAENGKNTTHSTWQLRAKAVTERVEKEEFARVLLAINKKRGYKSSRKAKTEDEGQAIDGMAIAKRLYDENLTPGQLSLQLLQQNKKLLPDFYRSDLQREFDLVWNFQKQFYPDILTDSFYKELQGKGKDATSKAFSKRYHFDTAENKGSKESVRLQAYQWRAEAIFKQLSKEEVAYVLTEINNNLSNASGYLGAISDRSKELYFNRQTVGQYLYAQLQENRHNSLKNKVFYRQDYLDEFERIWETQASFHKELTDELKKQIRDVVIFYQRKLKSQKGLISFCEFESKEIEIEKDGKTITKSIGARVVPKSSPLFQEFKIWQILNNVTCKRKGIRKKKSSAKSTELDLFNESSQAIFSLDMECKQLLFDELNLKGDLKSDKVLKLLGYSPQEWEINYNQLEENRTQKALYEAYLKIVEMEAHDVKDILQIKSAKDDWSLDESPLSASEIKEKVKDIFQALGICTKILYFDPLLPVKEFEKQDSYQLWHLLYSYESDDSTSGNETLYRILEKKYAFKREHARILANVALQDDYGSLSTKAIRKIYPYIKENQYSKACELAGYKHSKLSLTTEELEARELKNIIPLLKKNALRNPVVEKILNQMINVVNALIEKNSERDAEGKITKYFHFDEIRIELARELKKNAQERYEMTQNINKAKLEHQKISEILQKQFGIKNPTKSDIIRYRLYQELEHNGYKELYTNAPIARDMLFSKNIEIEHIVPKARVFDDSFSNKTLTFHRINSDKGESTAFDYITSLNSEEELNQYLTRVENAYKTKSISPAKYKNLLKKASEIGDGFINRDLRDTQYIAKKAKEILFQVTKNVLSTSGSITDRLREDWGLVDVMKELNMPKYQSLGLTEVEERKDGNKVTVIKNWTKRNDHRHHAMDALTVAFTKPSYIQYLNHLNARKDENNKNYSVILAIEEKETIKVPTNNGKNKRVFIEPIPNFRQVAKKHLEEIFISHKTKNKVVTKNVNKPAGTDKQQITLTPRGQLHKETIYGKYQYYVNKEEKVGVKFDERTIAKVSNPLYREALLKRLQANDNDPKKAFTGKNALSKKPIYLDEAKTKTLPEKVNLTYLEEDFSIRKDISPDNFKDLKSIEKVIDQGVKRILIKRLQAYGNDPKKAFVDLEKNPIWLNKEKGIAIKRVTISGVSNAQPLHIGKDHLGKTTLNKEGNEIPVDYVSTGNNHHVAIYRDKEGNLQEQIVSFFDAVVRAQQGLPIIDKTYKQAEGWQFLFTMKQNEMFVFPNATTGFNPAEIDLLDPKNKKLISPNLFRVQKIATKDYFFRHHLETNVETDNVLKNTTWKREGLSGLKDIVKVRINHLGDIVSIGEY

SEQ ID NO: 22440 - protein, 1001 aa, unidentified
  REGION 1..1001: note = Cas Enzyme sequence
LFTYLNNRKDINQEILLKDFFKQKKVKRGMEKEFPIRWNYIEDKEKKYPCGETRHELLAALGKAGIDHSWLDDKERFYRLWHLLYSVESKEEAEGALRKLVDNDDFVNAFLKIKPFKKEYGAYSEKAIKKLLAVMRMGNLWNEVDICEQTRDRIQNIIKGDIDEKIKDRMGRTFSQLSDFQGLPEWLACYVVYGRHSETTDIQWWTKPENLMAYINGFKQHSLRNPIVEQCILETLRTVHDIWKEAGHIDEIHIELGRSMKSTADQRARMSKSIMQNENTNLRIKSLLMELKNAKEFENVRPYSPMQQEILRIYEEGALQELTKEDAQYNEISKISQMAQPSANELLKYRLWLEQKYCSPYTGKPISLSKLFTSAYQIEHIIPQSRYFDDSFTNKVICEAEVNQLKSNMLGYEFIKKHGGEIVHCTMVGDVKILDAKEYYNFVTEHYTNNRRKKEKLLLDDIPQEFLNRQMNDSRYISKKVMAILSNIVREEDEQEAKSKFVIACSGGITDRLKQDWGLNDVWNSIVYPRFERLNKLTNTENFGRWENKEGKQVFQTSVPLELQKGFSKKRIDHRHHAMDALVIACASNNIINYLNNESAKSQEKREDLRKKLCDKNRIIRKPWETFTQDAHTALENVVVSFKNYVRVINKATNYYEKYDKNGKKGIAEQKGQDMWAIRKPMHKETVFGQVNLQRRVTVKLKDALEKIPAICDKELRDYINNLVAKQFNKKQILAHFKSINYRLNMKYVDKVDVWQFSDEKDPMVATRKSVDTSFDTKRIATITDTGIQKILRNYLETKDNDPNIAFTPEGIAEMNKHITEYNNGKQHQPILKVRVSEPKGAKYQVGETGNKTSKFVEAQKGTNLYFAIYEDKEGNRSYSTIPLNEVIERLKQGLSPAEDLNKRGEKLKFYLSPNDLVYVPTEEEKLSSECKLNKEQIYKMVSATSNQCFFTPHRTANSIVNKVEYSPLNKMEKTILDEMIKSVCWKLEVDRLGNILKVIK

SEQ ID NO: 22441 - protein, 1424 aa, unidentified
  REGION 1..1424: note = Cas Enzyme sequence
MTQKIFGIDLGTNSIGTSVRNTDLGNNLVDQLEFFSSDIFKASVNREGVNGGKGREYSLASSRSAKRRKRRLYEHRRYKLWATLDLLIKNNLCPMTPESLEQWRTYDKKKKLFRQYPIEDKAFHSWIILDFNSDGKPDYSSPYQLRRELVSVQLDFNQAIDRYKLGRALYHIAQHRGFKSSKGETIAEQEKQEDDSKKNKNNALIEEHVDATKASEEKHSKGLSTYMQEHNLKTVGAAFAQLEDEGIRIRNNSEYKAIRSQHQDEIKEIFKFQKGLSSQTQLLDTLISEKQGIGTIFYKRPLCSQRGNVGKCTLEPNKPRCPIGHPLFEKFRAWTFINNIKAKSPDADSAEPLPMDMRINIYNKLFLSRVKADFKFEEIRNFIEKQWRVALSKDDKTINYRDDTSVAGCPITARMIKVLGEDWEKFQVLGTKERQTQGKSNNALHQVCYTAEDIWHFCYDAEDSGKVRTFAEETLGWDEKKAAELVRLWSAIPQGYAMLSQKAIRNINRMLLFGLKYSDAVLLAKLPDILELSDEDIQTIIKKAQQLEEVVNEEKRIGNIVNSLIANYKAESLEDRFADHNYEYQLDESDEREIIKHIENNIGKQRWELMDADEQISILEGVRSGYQAFFARHKRTFVELPQLGKRLVELLSKEYPSVTEKQWERLYHPSQIAIYRPILLDKSDEKRRLGNPDIGAIKNPTVMRTLNNLRRRVNQLLDDGVLMPDETRVVVETARDLNNANEKWALEKYQEIRRKENDKIKKILEEFYPQFSNITSTDVDKARYVIEQCEEDNYTSKKESGTYSKNIQKYKYWLEQGGQCLYTGRIISLSNLFDSNAFDLEHTIPASVSFDNSDQNMTLCEAHYNRFIKKNNIPTAMPNYEEDVTIDGKLYTAIKPRLEKWKKRIKRLSKNVEYWRTQARRTQMKDHKDECTKEKLLWQMELQYWRDKLQRFTILEVTDGFKNSQLVDTRIITRHAILYLKSVFKKVEVQRGSTTAEFRKILGVQSVEEKKDRTLHSHHAIDATILTTIPTAGKRERILELFYKVQEKERRLKNCSGDAYEGLKQDLEGLQAKLKKEVVDCKLGGEISQLGNFINDKIIINHCVKDQTLTPSHKRLRRRGRIVGGKEHPIWQTGDTLRGEIHAESYYGAITQYAKDKEGNVLFNNGKPKIDPTLWYVIRRKPTYFNDWKPLEKDIVDKNLFKLMKEQFPDGTSFEDACKQGFYMIKKGKDKKHNIKTHRIRHVRCYAVKTALKIKEQIYKSTKDYKQYFYAAVGDLYTMCCYTNGKNKEYRIYSLYDIAQHRKSGIEDIPEFITDEKGNRLELSYKLRKGDMVLLYEKTPEELYDMDPVNLKRRLYKVNSFENDGLRIIMTNHMVTNKEKGESIKAYSQIPQTVRCAVNTLKFLIMGDHNDFIIKSNNIIFNHR

SEQ ID NO: 22442 - protein, 1184 aa, unidentified
  REGION 1..1184: note = Cas Enzyme sequence
MGKKVLGLDLGVGSIGWCLITLDKDEKPQSILGMGSRIVPLSADDATEFTQGKAITKNKMRTVARTIRKGMDRYQLRREALKKVLREHGMLPDEALIKLPLLELWELRARAATPGEQLSLTELGRVLLHINQKRGYKHAKADEAAEAETESKAKKEKESYVAQVKGRYQALKEKGQTIGQHFAGELRANQQTTPRGTYYTYRIKEQVYPREAYIEEYDRIMAVQRTFYPELLTDALIGRIRDRIIFYQRPLKSCKQLVSFCEFEKKEKVIRVKHTNKEGVEELIEKTITIGPKVAPKSSPIFQVCKVWESIHNIRLYYPDGTERELVQEEKQKLFDYLQKNDKLSLTMLRKELKIKPKDKLWCDKLLVNGIAGNTTATILRKALKGYDQYEGLLRFNLTTRDSHEVDVIRPIIDESYQDEPLYKFWHILYSIEDRAEMRSALIGQLGIKAEDLDGGLMDALYKIDFVKQGYGNKSAKFICKLLPHLQEGKMYSEAAKAAGIRHSDSMTAQERDERSLLDEIPLLQKNALRQPVVEKILNQMINLVNALKREHGEIDEVRVELARELKMSREEREEATKSNNAREKKNKDIAEDIKVYNVTPTKSRIQKYRLWEESDNSCIYCGKHVDVVQFLRGEEIEVEHIIPKSILFDDSLSNKVCACRSCNQEKGNRFAMEYIQAKGWEEKYTGRLNALFESKKISYSKRQRLLMLPKDLPEDFIERHLRLSQYISREAQGILRKGIRLVSASEGGVTAKLRQLWGYDNILRDLNLERYRSMGETEVVIVEHRDGQRTDERIKDWSKRKDHRHHAVDALIVACTRQSYIQRLNRVNAEEDRQEMDAFIKEQQQEQKPSKKEKLSLLEHWLIRQPHFTTKEVMKHVEEILISFRPGKRTVTRGRNVYKRSGKTDVQRDVLIPRGALSEETIYGVIQAGGKDEVVCKYALRGLKVKDVDYIVDKALQEKVRERISQYGEKQAFAEPLYLDEAKTQEVRSVRCFTGKDQSKLVPLRYNVEGEAVGFVAPGNNHHLALYKDDDGNVVESIVTFWQAVERARYGLPIVVASPREVMEKALAIPGLPESVLKALPASNLRLMEVLRMNDMFLIGMTDEEIQVAIEAKDHSTLSRHLYRVQKLTMRDYFFRYHLETTLDGKDNVGDIPSSYRVTSLKRYRQLNPRKVKIDLLGRISLV

SEQ ID NO: 22443 - protein, 1205 aa, unidentified
  REGION 1..1205: note = Cas Enzyme sequence
MSKHVLGLDLGVGSIGWCLIALDAQGDPAEILGMGSRVVPLTNLGDDKAFSKGEAFTANQKRTARRTMRRGFARYQLRRYRLRQELEKVGMLPDAALIQLPLLELWELRERAATVGRRLTLPELGRVLCHINQKRGYRHVKSDAAAIVGDEGEKKKKDSNSAYLAGIRANDEKLQDEHKTVGQYFAEQLRRSQSESPTGGISYRIKDQIFSRQHYIDEYDQIMAAQRVYYPDILTDAFIRMLRDEVIFMQRPLKSCKHLVSLCEFEKQEKVMCVQQDDGKGGRQLVERRVKFGPKVAPKSSPLFQLCRIYEAVNNIRLTRPDGSPRDITPEERAKIVAHLQSSASLSFAALKKLLKEKALIADQLTTKSGLKGNSTRVALAAALQSYPQYHHLLDMELETRMMTVQLTDEETGEVTEREGAVVTDSYVRQPLYRLWHILYSIEERDAMRRALITQLGMKEEDLDGGLLDQLYRLDFVKPGYGNKSAKFICKLLPQLQQGLGYSEACAAVGYRHSNSPTSEEITERTLLEKIPLLQRNELRQPLVEKILNQMINLVNALKAEYGVDEVRVELARELKMSREERERMTRQNGQRKEANDKVAERIRQCGLYPTKPRIQKYMLWEEAGKVCLYCGRSIEEEQCLNGDDMEVEHIIPKSVLYDDSYGNKTCACHECNQTKGNRTALEYIRAKGREAEYMKRINDLLKEKKISYSKHQRLRWLKEDIPSDFLERQLRLTQYISRQAMAILQQGIRRVSASEGGVTARLRSLWGYGKILHTLNLDRYDSMGETERVSREGETTEKLHITNWSKRMDHRHHAIDALVVACTRQSYIQRLNRLSSEFGREDKKKEDQEAQEQQATETGRLSSLERWLTQRPHFSVRTVSDKVAEILISYRLGQRVVTRGRNIYRKKMADGREVTCVQRGVLVPRGELMEASLYGKILSQGRERIVKRYPLHDLKGEVVDPRLRELIAEYNQEITSKVKAKGAPLYLDAAEKQEVRSVRCYVDKPSVAKAIPIRFDECGRAITFVKSGSNHHLAIYRTPKGELVESIVSFWDAVNRARYGLPLIIKYPRKAMEQVIQREDIPESVLSLLPPADYEFVEVFQQNEMAVVGLPEEEFRRAVDTQDYRTLSEHLYRLKGISSKDYEFHYHLDTDDPDETDSSKKKKKRVRNTSGRIPRIYRIRGIGSLQKKNVHKVCVDLLGRISLL

SEQ ID NO: 22444 - protein, 1436 aa, unidentified
  REGION 1..1436: note = Cas Enzyme sequence
MKHILGLDLGSNSIGWALIEQDFDNKQGKILGLGSRIIPMEQKILSKFEEGTTVSQTAERTKFRGIRRLRERHLLRRERLHRVLHLLGFLPPHYDAQIDFTKRFGKFIGDSEPKLAYNNEGFIFLESFNEMVEDFKKHQPQLFYIKSNGEESKIPYDWTIYYLRKKALYEKISKEELAWIILNFNQKRGYYQLREEEEEKENDFEIISSKVLSVVKKEKDKKYNKYWYDIILENGLVYTAAFYNDFVYSWVDQEREFVAKRTLLKNGSEKVELSYLPTFDEIAKMNKQQQDKFYQKIKIKTENSIGNKPVGAYIYDHLLQNPNQKIKGKLVRTIERKFYKEELKAILEKQVALQPELFTEGLFVDCVRELYKNNEIHQNSLSSKDFVHLFLNDIIFYQRPLRSQKSNISSCSLEYRFCIDKETKQRRKTYLKVISKSNPYYQEFRVLQWLSNLKIYRKEDDKDVTSEFISSIEDKETLYEFLMSEKEVSNKSILEFLLMKSLRETYPFAKETELKKELKKEITKYRWNYVYEEENDNKKYPMNETGYEIKKRLKEVKNIPDNFLTKNIEYQLWHIIYSVTDKYEYEKALMKFAQKHNLDAESFVENFKRIKPYPSDYGAFSEKAIKKLLPLMRFGKYWNYSNISEPVQARISDIINGVDNESIKTIVREKAEKFQLSQEADFQGLPLWLAQYIVYGIHSEAADIQRWTSPSDLEEYLKGFKQHSLRNPIVEQVVTETLRVVKDIWEYYGKGEENFFDEIHIELGRELKKTAEERKRMTREINENEETNLKVKKELQEFFEDKSAENVRPYSPIQQEKYRLWLEQEKESPYTGQPIPLSKLFTDEYQIEHIIPQSRFFDDSFSNKVICEAAVNAQKGAQLGLEFIKKHGGEIIEIGLNKKVTILNEKEYKELVNKHFANNRAKKAKMLMEEIPEKMVERQLNDTRYISKFISQILSNIVRSPQEDNGVNSKNIIPCTGKITAALKQDWGLNDVWNDLILPRFERMNNLTQTELFTTYSEKYQKKIPTVPLEHAKGFQKKRIDHRHHALDALVVACATRSHINYMNNKHALDKHKAKEEKQNARIDLRNTLCEKKYNDNAEDKYNWTFKKPWNTFTQDVRSALEMVVVSFKQNLRVINKATNYYEKWVEERGKIVKKKVKQEGINWAIRKPLHEQTVAGKITLERVKIGKGEILTADRKFIDSSFDTKKISKITDTGIQKILLNYLAYKGSSELAFSPESLEELNKNIYLYNDGKPHKPIYKVRSYEKGSGRFVLGERGAKSKKYVQGAPNLYFGIYQGKEKRSYATIPLDEVIERQKQGLTSVPELNEKGEKLLFSLSPNDLVYVPMESENIENIDFTNLSKEQRERLYNVNDFSSTCYFVPNRIAKAIYPKEVDMQRKGDELSGSYDTKTASIEGVQIKEFCIKLKIDRLGNISKA

SEQ ID NO: 22445 - protein, 1078 aa, unidentified
  REGION 1..1078: note = Cas Enzyme sequence
MKLRFELYNDCFLAFVRAEFKFEDIRKYLEKRLGIHFSYNDKTINYKDSTSVAGCPITARFRKLLGEDWESFHVDGQKQRQAHGKNNTSFHTVSYSTNDIWHFCYDAEEPEAVLSFAQDNLKWEKKKAEELIRIWSAIPQGYAMLSQKAIRNINKMLILGMKYSDAVLLAKVPEIVEITDSEILSVTEDYHRVEAQVRYEKQINNIVNALIAKYKSASEEYRFADHNYEYQLDKSDEEEIVRQIESCLGTRKWGLMDADEQTDILQKVRDKYQNFFRSHERKFVESPKLGDCFEEYLVKRFPMVKGEQWKKLYHPSQIAIYRPVSAGMDRSALRLGNPDIGAIKNPTVLRVLNTLRKRVNQLLDDGVISPDETRVVVETARELNDANRKWALDTYNRIRHDENEKIKKILEEFYPKRDGISTDDIDKARYVIDQREVDYFTESKTYNRDIKKYKFWLEQGGQCMYTGRTINLSNLFDPNAFDIEHTIPESLSFDSSDMNQTLCDAHYNRFIKKNHIPADMPNYDKAVIIDGKEYPAITSQLQRWIDRVERLNRNVEYWKGQARRAQNKDRKDQCIREMHLWGMELEYWEKKLERFTVTEVTDGFKNSQLVDTRVITRHAVLYLKSIFPHVDVQRGDVTAKFRKILGIQSVDEKKDRSLHSHHAIDATTLTVIPSSAKRERMLELFAKIEEVNKMLFFSGNEDRTGLKQELDGLKNQLNKEVKACRIGHNVSEIGTFINDNIIVNHHIKNQALTPVRRRLRKKGHIVGGVDSPRWQTGDALRGEIHKASYYGAITQYAKDKEGKVLMKEGRPQINPTIKFVIRRELKYKKSSTDSGFASWDDLGKAIVDKELFALMKGQFPAETSFKDACEQGIYMIKKGKNGMPDIKLHHIRHVRCEAPQSGLKIKEQTYKSEKECKRYFYAAVGDLYAMCCYTNGKIREFRIYSLYDVSCHRKSDIEDIPEFITDKKGNRLMLDYKLRTGDMILLYKDNPAELYDLDNVKLSRRLYKINRFESQSNLVLMTHHLSTSKERGRSLGKTVDYQNLPESIRSSVKSLNFLIMGENRDFVIKNGKIIFNHR

SEQ ID NO: 22446 - protein, 1375 aa, unidentified
  REGION 1..1375: note = Cas Enzyme sequence
MKKILGLDLGTTSIGWALVYESENTDEKSSIVRLGVRVNPLSVDEKGNFEKGKAITTNADRQQTHGARINLQRYKLRRENLKDCLQKQGWIGTEALCEEGKASTFETYMLRAKAAEEEISLHELCRVLFMMNKKRGYKSNRKANNKEDGKLFDGMTVAKKLYEEHLTPAEYSFQLLSSGKKFKQEYYRSDLKEEFDRIWNEQQKYYPEILTDDFKQHLQGKSKGNTSKIFLGKYGIYSADLKGLDRKLQPLKWRIEALKQQVDKEVLAFVISDLNGQIASTSGLLGAISDRSKELYFNKQTVGQYLWTSLKETPHVSIKNKPFYRQDYLDEFEKIWETQATYHKELTPELKQEIRDIIIFYQRPLKSKKGLISVCELEQRKVKVTIDGKEKEISIGPKVAPKSSPMFQEFRIWQNLNNILLIDKGNNSIHPLYEEERNLLYEELSVKEKLSKAEALKVLNKNSKQWDLNYKEIEGNRTQAVLYDCYNRIIVMTGHEECNFKKLKASEIRSYFKTIFTGLGFNTDILEFDSSLTGHELERQPSYQLWHLLYSYESDNSRTGNDALLRKLETAFGFPKEYAAVLSDVVFEDSYGNLSVKAMRKILPHLQAGLDYSQACEEAGYKHSRRSLTKNELDQKEYKEKLELLPKNSLHNPVVEKILNQMINVINAVIDEYGKPDEIRIELARELKIGAAERENMTRSISQGNAENKRIREILQKEFALSYISRNDIIKYKLYEELKSNGFKTLYSDTYISKDKLFSKDFDIEHIIPKARLFDDSLSNKTIEARDVNIAKSNKTAFDFISEKYDQQGIEAYKKKLDILLQDGSISKAKYNRLLMKEADIPSGFIDRDLRDTQYIAKKAYEILSDLVRNVTPTTGAVTSRLREDWQLVDVMKELNFEKYQKLGLVEVIEDRDGRKIKRIKDWTKRNDHRHHAMDALTIAFTKPSYIQYLNNLNARSDKNSSIYGIENKELHREDNKLRFNAPLPINEFRAEARRHLKSILVSVKAKNKVMTQNVNVIKTKHGVIKKVQLTPRGELHNATFYGTKKRPIIKMVKVGAALDEVTIKKVSSSFIREALLNKLHEYNGDAKKAFTGRNSIDKNPIYIDEEHKKTVPALVKTIEWEMYHPTRKLISPDLKIDKVIDKGIREILKTRLAKFNGDAQKAFSNLDENPIYKDEAKKITLKRVSLEGVSSIIPLHTLKDMGGKPVVGKDGKLVLGDYVQTSNNHHIAFYMDENGNLQDNVVSFFEAAERKSQGVPVIDKNYNHDKGWNFLFTMKQNEYFVFPNEVTGFNPSEVDLMDEANYGIISPNLYRVQKMSKTSGRDYWFRHHLEAMLNDDPKLRNSMFKRITSLKALEGIVKVRINCVGKIVAVGEYD

SEQ ID NO: 22447 - protein, 1478 aa, unidentified
  REGION 1..1478: note = Cas Enzyme sequence
MFSQRNNPYCELLSNLKQRYIKSFVFPNLYFKKILTKFGIDCKDLAMKYILGLDLGSNSIGWALIEQDFDNKQGKILGLGSRIIPMDQGILGEFERGNKVSQTAKRTEFRGIRRLRERHLLRRERLHRVLHLLGFLPAHYDAQIDFTKRFGKFIGDSEPKLAYNNEGFIFLESFNEMVEDFKKYQSQLFYIKSNGEESKIPYDWTIYYLRKKALQEKISKEELAWIILNFNQKRGYYQLRGEEEEKSTKNVEFYSLEITDVIADTPNNKGEIWYSIHLENGWVYRRASKISLEDWKGKVRDFIVTTELNEDGSIKLDKEGKEKRSFRAPNEDDWNLLKKKTEQNITLSGKTVGEYIYDHLLQNPNQKIKGKLVRTIERKFYKEELKAILEKQVALQPELFTEELFVDCVRELYKNNEIRQNSLSSKDFVHLFLNDIIFYQRPLRSQKSNISSCSLEYRFCIDKETKQRRKTYLKVISKSNPYYQEFRVLQWLSNLKIYRKEDDKDVTSEFISSIEDKETLYEFLMSEKEVSNKSILEFLLMKSLREMYPFAKETELKKELKKEIIKYRWNYVYEEENDSKKYPMNETGYEIRKRLKEVKNIPDNFLTRDIEYQIWHIIYSVTDKYEFEKALMKFAQKHNLDAESFVENFKKIKPYPSDYGAFSEKAIKKLLPLMRFGKYWNYSNISEPVQVRISDIINGVDNENIKTIVREKAEKFQLNQEIDFQGLPLWLAQYVVYGIHSEAADIQRWTSPSDLEEYLKGFKQHSLRNPIVEQVVTETLRVVKNIWEYYGKGEENFFDEIHIELGRELKKTAEERNTMTKEINKNEETNLKVKKELQRLFENKSVENVRPYSPIQQEKYRLWLEQEERSPYTGQPIPLSKLFTDEYQIEHVIPQSRFFDDSLSNKVICEAAVNAEKGAQLGLEFIKKHGGEIIEIGLNKKVTILNEKEYKELVNKHFANNRGKKAKLLMEEIPEKMVERQLNDTRYISKFISQILSNIVRSPQEDEGVNSKNIIPCTGKITAALKQDWGLNDVWNDLILPRFERMNNLTQTELFTTYSEKYQKKIPTVPLEHAKGFQKKRIDHRHHAMDALVVTCATRSHINYMNNQHALDKHKTKEEKQNARIDLRTVLCEKKYNDNAEDNYNWTFKKPWNTFTQDVRSALEMVVVSFKQNLRVINKATNYYEKWREEKGKMVKKKVKQEGINWAIRKPLHEQTVSGKITLERVKIGKGEILTADRKFIDSSFDTKKISKITDTGIQKILLNYLAYKGSSELAFSPEGLEELNKNIYLYNDGKPHKPIYKVRSYEKGSGRFVLGERGAKSKKYVQGAPNLYFGIYQGKEKRSYATIPLNEVIERQKQGLTSVPELNEKGEKLLFSLSPNDLVYVPMEGEDTENIDFTNLSKEQRERLYNVNDFSSTCYFVPNRIAKAIYPKEVDMQRKGDELSGSYDTKTASIEGVQIKESCIKLKIDRLGNISKA

SEQ ID NO: 22448 - protein, 1433 aa, unidentified
  REGION 1..1433: note = Cas Enzyme sequence
MKKVLGLDLGCNSIGWALVNEAENAEEVSSIIKLGVRVNPLTVDEMQNFEKGKSITTNADRTLKRSMRRNLQRYKLRRDTLIEVLKEHGFITDSTLLSEHGNKTTFETYRLRAKAAVEEVSLEEFARVLLMINKKRGYKSSRKAKGSEDGVLIDGMDVARKLYEEGLTPGELCLQMLEAGKKNLPDFYRSDLQNEFDRIWNFQKQFNPELFCDAVKEEVRGKNRSQTWVILAKFFVWSEIESVWNEKEARTEERIKEYKLVGLKRDTKGNELKLENYRWRVQALSEQLNPEIVAIVLQEINGQISASSGYLGAISDRSKQLYFNRQTVGQYLMSELEKDPNISLRNRVFYRQDYLDEFDRIWEKQAEFHEELTVELKKEIRDIIIFYQRRLKSQKGLISFCEFEKREVIVEKDGRKQNKTVGCRVIPRSHPLFQEFKMWQTLNDIEVFAWDKQNQRKKADKPSTLFDNSEEPLLVEGKRSLYQEEKELLAKELFVKESMKKAEVLKLLFGNFQELDLNFKQIDGNHTGFALFSAYSKMIEKYGYEPVDFKKPADEIIEKLETIFTNLGWNTELLSIDLSKEDKELERQSYFRLWHLLYSFEGDNTPTGNGKLLEKIMQLCDVEKEYAVELANASFQEDYGSLSAKAIKKILPYLKEGNQYDVACDYAGYRHSKSSLTKDEIENKMLKDKLEILPKNSLRNPVVEKILNQMVNLINTIIDTYGKPDEIRVELARELKKNAKEREELTKSIARNTREHDEIRQLLRTEFGMMNISRNDIIRYKLYEELKDNGYKTLYSNEYIPREKIFSKEIDIEHIIPQARLFDDSLSNKTLEYRAINIEKGNKTAYDFVKEKYGDDGLEKFLNRCEALFKDKKTKLRKLKMEEKDIPEGFIDRDLRNTQYISKKALAMLNEISRRVVATTGAITDKLREDWQLVDLMKELNLPKYEKLGMIEMFEDKDGRKIKKITDWTKRNDHRHHAMDALTVAFTKDVFIQYYNNKNAAWMPASKEHAIIIGIKARYFENGRALAPMPLAQFRAEAKLHLENLLVSIKAKNKVITSNVNCTKKKNGENWKLQQTPRGQLHLETVYGSHRQYATKIEKVNATFDVAKIATVSKLAYRNALLKRLEAFGNDPKKAFTGKNTLEKNPLYLDEKQTEMVPEKVQTVEFETVYTIRKPIDPNLSIDKVIDVKIRSVLEKRLKEYGGDAKKAFVNLDENPIWLNEAKGISIKRVSIRGISNAQSLHEKKDKDGNLILDKEGRKIPVDFVNTGNNHHVAVYKKPVLDKVGQIVLDEEGNPKYELDEVVVSFFDAVTRANLGQPIIDKDYRRSEGWQFLFSMKQNEYFVFPNEKTGFNPKEVDLLNPENYAMISPNLFRVQKFTYKNYVFRHHLETTIKDTSSSLKGIIWTDFRSSKGLDKIVKVRVDHIGQIVSLGEY

SEQ ID NO: 22449 - protein, 1504 aa, unidentified
  REGION 1..1504: note = Cas Enzyme sequence
MKNIVGLDLGTNSIGWAVVNGNINDDGSEQLVKIQASGSRIIPMDAAMIGDFNKGNSISQTAERTRLRGIRRLSERYLLRRERLHRILDILGFLPSHFARDLDRYGKIVKDKEPKLAWRKNEAGQFEFIFQNSFKEMLEDFKLNHPNLITDDKKVPYDWTIYYLRKKGLTSKISKEELAWILLNFNQKRGYYQLRGEEEEENKNKQVEFYALKVIAVEDSGEKKGKDTWYNVHLENGWIYRRTSNMPLDWVGKTKEFIVTTDLEKDGTPKKDKEGNIKRSFRAPKEDDWSLVKKKTEADIDQTHKTVGTYIYDTLLGNPSQKIRGRLVRTIERKYYKEELKLILDKQKEFHPELQDRALYAACVEELYTINEAHRNNIGNRDFTYLFLEDILFYQRPLKSKKSLIDNCPYEENHCLDKETGEIKFFPVKCIAKSHPLFQEFRLWQFIVNLRIYRKGLAQDVDVTNELLKTEEDYVALFDWLNGKKEIDQKAFLKYPPFGLKKEVENYRWNYVQDKSYPCNETRSLMLARLEKCDISIEFLTKENEEALWHILYSVEDKNEIVKALQKFADKHNLNASFVDVFQKFPSFKKEYGSYSAKAIKKLLPLMRMGKYWSEDSIDKGTRERMDKIITGEYDEKIENRVREKAIHLADISEFKGLPLWLVCYIVYGRHSESKEIAKWESPADIDSYLKSFKQHSLRNPIVEQIIIETLRVVRDIWKQVGNIDEIHVELGREMKNPADKRRKMTQQISENENTNLRIKYLLTEFLNPEYEVENVRPYSPSQQDILRIYEEGVLNSVSNLPEEISDILKKFTETDLKKRPSRSEVLRYKLWLEQKYRSPYTGEVIPLGKLFTPAYEIEHVIPQSRYFDDSFSNKVICEAEVNKLKSNLLGHEFIVKHHGEIVELPFGKKVKIFTVDEYEQFVKDNYSRTRGKMKKLLVDDIPEEFVARQLNDSRYISKVVKSLLSNIVREKGEEEAISKNVIPCTGGVTDRLKKDWGVNDVWNKIILPRFQRLNELTGTNKFTTMSLNNHEIPAMPLELQKGFNKKRIDHRHHAMDAIIIACANRNIINYLNNESATAKAELSRYDLQRLLCDKAKTDDNGNYKWVIRKPWASFTQDVHGVLEDIIVSFKQNLRVINKATNHFLHYNEEGKKIFVKQEKGDSWAIRKSMHKDTVFGEVNLRRIKTVALNEAMKNPQSIVVKDFKRKLLELLNLGFDAKRIKKYFEDNRETWSDINLSKITVYYFSKDTKDRFFATRKPLDTSFDRKKIENNITDTGIQKILLRHLELKDNNPDIAFSPDGIDEMNRNIIQLNNGKYHQPIIKVRWYEQADKFAVGQTGNKSSKFVEAAKGTNLFFAVYESNILDEKTNTIIKKRNYATIPLNVAIERQKQGLSVAPKDENGNDPIFVLSPNDLVYLPTADDLANGVVAQPLDRKRIYKMVSCTGNEGHFIPVRIANPILQTIELGSNNKAQKAWTGEMIKEICMPIKIDRLGNILESSSLHKK

SEQ ID NO: 22450 - protein, 1259 aa, unidentified
  REGION 1..1259: note = Cas Enzyme sequence
MPLDWVGKTKEFIVTTDLEKDGTPKKDKEGNVKRSFRAPKEDDWSLVKKKTEADIDQTHKTVGTYIYDTLLGNPSQKIRGRLVRTIERKYYKEELKLILDKQKEFHPELQDRALYAACVEELYTINEAHRNNIGNRDFTYLFLEDILFYQRPLKSKKSLIDNCPYEENHCLDKETGEIKSFPVKCIAKSHPLFQEFRLWQFIVNLRIYRKGLAQDVDVTNELLKTEEDYVALFDWLNGKKEIDQKAFLKYPLFGLKKEVENYRWNYVQDKPYPCNETRSSMLARLEKCDISIEFLTKENEEALWHILYSVEDKNEIVKALQKFADKHDLNASFVDVFRKFPPFKKEYGSYSAKAIKKLLPLMRMGKYWSENSIDKGTRERIDKIITGEYDEKIENRVREKAIHLADVSDFRGLPLWLVCYIVYGRHSEAKEITQWKSPADIDSYLKSFKQHSLRNPIVEQIIIETLRVVRDIWKQVGNIDEIHVELGREMKNPADKRKKMTQQMSENENTNLRIKYLLTEFLNPEYEVENVRPYSPSQQDILRIYEEGVLNSVSDLPEEISDILKKFTETDLKKRPSRSEVLRYKLWLEQKYRSPYTGEVIPLGKLFTPAYEIEHVIPQSCYFDDSFSNKVICEAEVNKLKSNLLGHEFIVKHHGEIVELPFGKKVRIFTVDEYEQFVKDNYSRTRGKMKKLLMDDIPEEFVTRQLNDSRYISKVVKSLLSNIVREKGEEEAISKNVIPCTGGVTDRLKKDWGINEVWNKIILPRFQRLNELTGTNKFTTKNVGIQEIPTMPLELQKGFNKKRIDHRHHAMDAIIIACANRNIINYLNNESATAKAELSRYDLQKMLCDKAKTDNNGNYKWVIRKPWASFTQDTYLALENIIVSFKQNLRVINKATNHFLHYNEEGKKIFVKQGKGDNWAIRKSMHKDTVFGEVNLRRIKTVALNEAMKNPQSIVVKDFKRKLLELWNLGFDAKRIKKYFEDNRETWSDINLSKIEVYYFSKDTKDRFFATRKPLDTSFDRKKIENNITDTGIQKILLRHLELKDNNPDIAFSPDGIDEMNRNIIQLNNGKYHQPIIKVRWYEQADKFAVGQTGNKSSKFVEAAKGTNLFFAVYESNILDKKTNTIIKKRNYATIPLNVAIERQKQGLSVAPEDENGNDPIFVLSPNDLVYLPTDDELANGIIAQPLDRGRIYKMVSCTGNEGHFIPARIANPILQTIELGSNNKAQKAWTDEMIKEICMPIKVDRLGNVLESSSSYKK

SEQ ID NO: 22451 - protein, 1480 aa, unidentified
  REGION 1..1480: note = Cas Enzyme sequence
MRTILGLDLGTNSIGWAKVCINDDGNYVREIKLGSRIIPMSQDTLSNFDKGVTDSPTAARTGFRGIRRIRERVLQRRERLHRVLHVIGFLPSHYEKAIGWNREEATTYGKFLDNGEPKLAWERQEDGSMRFLFMDSFHEMMADFAKCQPGLVADGRKIPLDWTLYYLRKKALTQAIKKEELAWILLNFNQKRGYYQLRGEEDEEDPTKREEYYELKVVSVEAAEEGKGGNTWYNVTLENGWIYRRQSKIKLNDWIGKIRQFIVTTEYEKDGITIKKDKNGEVKRSFRAPSEDDWGLRKKRTESRLEDSGKTVGEFIYEHILSEPADKIRGNFIRTIERKFYKKELEAILREQSKHHKELKDLNTLVNCIKELYPNNKAHQDSLMKKDMIYLLITDLIFYQRPLKSKKSLIADCPYEYYEYVIKETGEIKRQGIKCIAKSNPYYQEFRLWQFIINLRLFDRTNDKEITSEYLSSMEDYTKLFTYLNDRKEINQEILLKDFFKQKKVKMGMEKEFPIRWNYIEDKEKKYPCNETRHELLAALDKAGIEHSWLDDKERFYRLWHLLYSVESKEEAEGALRKLNDNEDFVNAFLKIKPFKKEYGAYSEKAIKKLLAVMRMGTQWNEDDICEQTRNRIQSIINGDIDEKIKERMGRTFSQLSDFQGLPEWLACYVVYGRHSETTDIQRWTKPENLMSYIKGFKQHSLRNPIVEQCILETLRTVHDIWKEAGHIDEIHIELGRSMKSTADQRARMSKSILQNENTNLRIKSLLMELKNAKEFENVRPYSPMQQEILRIYEEGALQELTKEDDQYPEISKISQMAQPSAKELLKYRLWLDQKYCSPYTGKPISLSKLFTSAYQIEHIIPQSRYFDDSFSNKVICEAEVNQLKSNMLGYEFIKKHSGEIVHCTMVGDVKILDAKEYYNFVTEHYANNRRKKENLLLEDIPQEFLNRQMNDSRYISKKVMALLSNIVREEGEQEAKSKFVIACSGGITDRLKHDWGLNDVWNSIVYPRFERLNKLTNTENFGRWENKEGKQVFQTSVPLELQRGFSKKRIDHRHHAMDALVIACASNNIINYLNNESAKSQEKREDLRKKLCDKNRIIRKPWETFTQDVRTALENVVVSFKNYVRVINKATNYYEKYDKNGKKGIAEQKGQDMWAIRKPMHKETVFGQVNLRRKVTVNLKDALEKVPAICDKELRDYINNLVAKQFNKKQILAHFKSINNRLNMKHVDKVDVWQFSDEKEPMVATRKSVDTSFDTKRIATITDTGIQKILRNYLNAKDNDPNIAFTPEGIAEMNKHITEYNNGKQHQPILKVRVSEPKGAKYQVGETGNKTSKFVEAQKGTNLYFAIYEDKEGNRSYSTIPLNEVIERLKQGLSPAEDLNKRGEKLKFYLSPNDLVYVPTEEEKLSGECKLNKEQIYKMVSSTGNECHFIPYSVAKPIYDKFEFEAKNKMGRALTGEMIKAVCWKLEVDRLGNILKVIK

SEQ ID NO: 22452 - protein, 1375 aa, unidentified
  REGION 1..1375: note = Cas Enzyme sequence
MKKILGLDLGTTSIGWALVYESENTDEKSSIVRLGVRVNPLSVDEKGNFEKGKAITTNADRQQTHGARINLQRYKLRRENLKDCLQKQGWIGTEALCEEGKASTFETYMLRAKAAEEEISLHELCRVLFMMNKKRGYKSNRKANNKEDGKLFDGMTVAQKLYEEHLTPAEYSFQLLSSGKKFKQEYYRSDLKEEFDRIWNEQQKYYPEILTDDFKQHLQGKSKGNTSKIFLGKYGIYSADLKGLDRKLQPLKWRIEALKQQVDKEVLAFVISDLNGQIASTSGLLGAISDRSKELYFNKQTVGQYLWTSLKETPHVSIKNKPFYRQDYLDEFEKIWETQATYHKELTPELKQEIRDIIIFYQRPLKSKKGLISVCELEQRKVKVTIDGKEKEISIGPKVAPKSSPMFQEFRIWQNLNNILLIDKGNNSIHPLYEEERNLLYEELSVKEKLSKAEALKVLNKNSKQWDLNYKEIEGNRTQAVLYDCYNRIIVMTGHEECNFKKLKASEIRSYFKTIFTGLGFNTDILEFDSSLTGHELERQPSYQLWHLLYSYESDNSRTGNDALLRKLETAFGFPKEYAAVLSDVVFEDSYGNLSVKAMRKILPHLQAGLDYSQACEEAGYKHSRRSLTKNELDQKEYKEKLDLLPKNSLHNPVVEKILNQMINVINAVIDEYGKPDEIRIELARELKIGAAERENMTRSISQGNAENKRIREILQKEFALSYISRNDIIKYKLYEELKSNGFKTLYSDTYISKDKLFSKDFDIEHIIPKARLFDDSLSNKTIEARDVNIAKSNKTAFDFIFGKYGQQGIEAYKKKLDILLQDGSISKAKYNRLLMKEADIPSGFIDRDLRDTQYIAKKAYEILSDLVRNVTPTTGAVTSRLREDWQLVDVMKELNFEKYQKLGLAEVIEDRDGRKIKRIKDWTKRNDHRHHAMDALTIAFTKPSYIQYLNNLNARSDKSSSIYGIENKELHREDNKLRFNAPLPINEFRAEARRHLKSVLVSVKAKNKVMTQNVNVIKTKHGVIKKVQLTPRGELHNATFYGTKKRSIIKMIKVGAALDEATIKKVSSSLIREALLDRLHEYNGDAKKAFTGRNSIDKNPIYIDEEHKKTVPSLVKTIEWEMYHPTRKLISPDLKIDKVIDKGIREILKTRLAKFNGDAQKAFSNLDENPIYKDEAKKITLKRVSLEGVSSVIPLHTIKDREGKPVVGKDGKPVLGDYVQTSNNHHIAFYMDENGNLQDNVVSFFEAAERKSQGVPVIDKSYNHDKGWHFLFTMKQNEYFVFPNEVTGFNPSEMDLTDEANYSLISPNLYRVQKMSKTSGRDYWFRHHLEAMLNDDPKLRNSMFKRINSLKALEGIVKVRINCVGKIVAVGEYD

SEQ ID NO: 22453 - protein, 1375 aa, unidentified
  REGION 1..1375: note = Cas Enzyme sequence
MKKILGLDLGTTSIGWALVNEYEKEDEKSSIIRLGVRVNPLTTDEKGNFERGKAIATNSDRQQTHGARINLQRYKLRRKYLCDCLNKHGWIGSEPMYEDGRSSTFETYMLRAKAAVEEVSLHEFARILFMMNKKRGYKSNRKANDKEDGKLFDGMTVAKKLYEEHLTPAEYSLQLLNKGKRFTPEYYRSDLIEEFEKIWNEQKKYYPEILTDEFKRQLEAKTKTSTSKIFLGKYGIYSADLKGLDRKLQPIKWRVEALRQQVDKDVLAFVISDLKGQIANASGVLGAISDRSKELYFNKQTIGQYLWASLKKNPHVSVKNQPFYRQDYIDEFEKIWETQASFHKELTPELKQEIRDIIIFYQRPLKSKKGLISVCELEQCKVKVTIDGKEKEITIGPKVAPKSSPMFQEFRIWHNLNNIQLIDNERNSKRSLYEEERNLLYEELSIRDRLSKTEALRVLGKKNRQWDLNYKELEGNRTQAILFSCYNKIIMMTGHEECNFKQLKAPEIRHYIKTIFKNLGFNTGILEFDSSLNGHELEQQPMYQLWHLLYSYESDKSRTGNEALLKKLETIFGFPREYASVLAEVAFEDSYGNLSVKAIREILPHLQAGLDYSQACEEAGYKHSRRSLTKEELDEKEYKEKLELLSKNSLHNPVVEKILNQMINVINAVIDEYGKPDEIRIELARELKIGAAERENMTRSISQGNAENKRIREILEKEFALSYISRNDIIKYKLYEELKPNGYKTLYSDTYIPKDKLFSKDFDIEHIIPKARLFDDSLSNKTIEARDVNIAKSNKTAFDFISGKYGQQGIEAYKKKLYILLQGGSINKAKYNRLLMKEADIPSDFINRDLQNTRYITRKAYEILSDLVRVVTPTSGAVTSRLREDWQLVDIMKELNFEKYQKLGLTEVIEDKDGRKIKRIKDWTKRNDHRHHAMDALTIAFTKPSFIQYLNNLNARSNKGDSIYAIENKELHREDGKLCFNAPLPINEFRAEAKKHLKAVLVSIKAKNKVMTQNVNKIKTKHGVIKKVQLTPRGELHNATFYGTKKRPIIKMVKVGAALDEVTIKKVSSSFIRKALQDRLYEYNGDAKKAFTGRNSIDKNPIYIDEERKRTVPALVKTIEWEMYHPTRKLISPDLKIDKVIDKGIRDILKTRLAKFNGDVQKAFSNLDENPIYKDEAKKIILKRVSLEGVSSVIPLHTLKDRSGMPITGKDSEPVLGDSVQTSNNHHVAFYIDENGNLQDNIVSFFEAAERKSQGVPIIDKNFNHDIGWRFLFTMKQDEYFVFPNEVTGFNPSEVDLTDEANYSIISPNLYRVQKMSKASGRDYWFRHHLEAMLNDDPKLRNSMFKRIKSLKALEGIVKVRINCVGKIVAVGEYD

SEQ ID NO: 22454 - protein, 1483 aa, unidentified
  REGION 1..1483: note = Cas Enzyme sequence
MKTILGLDLGTNSIGWAKVIVDDNENYLRDIQLGSRIIPMSQDVLGKFDKGVTESQTAIRTNFRGIRRLRERTLQRRERLHRVLHTLHYLPPHYDSAIGWDRKAPTTYGKFLNHGEPKLAWERRGDGTMQFLFMDAFHEMIADFAKYQPALVANGKKVPLDWTIYYLRKKALTQAIKKEELAWILLNFNQKRGYYQLRGEEDEEHAAKHEEYHELKVVGVEADEAGKGDNTWYNVKLENGWIYRRQSKIPLDDWVGKVRAFIVTTEYEKDGTTPKKDKEGNVKRSFRSPNENDWGLRKKQTEHSLEASGIPVGAFIYDHLLKEPSDKIRGKFIHTIERKYYKQELAAILREQSKHHEELCSKDMLKACVEELYPNNPLHRESLLKKDMTYLLIEDLIFYQRPLKSKKSLIAECPYEAYSYVDKENDKMKRQGIKCIARSNPYYQEFRLWQLIANLRLRNRADERDVTAEYLPHQEDYVRLFTYLNDRKEINQETLLKDFFKLKKVTIGGEKVFPIRWNYIEDKEKKYPCNATRHELLLALDRAGMEHDWLDDRDLAYRLWHLLYSVDSKDETERALRKLKEDDAFVESFLKIKPFEREYGAYSEKAIKKLLPVMRRGSLWNEADLCPSTKERIANILQGTIDEKLKKKIGAFISSCQQVSDFQGLPEWLACYVVYGRHSEATAIQHWETPQQLLDYIHGFKQYSLRNPIVEQCILETLRTVYDIWKDAGQIDEIHVELGREMKKTAEQRAHLTENVLRNENTNLRIKSLLMELKNDADMKDVRPYSPMQQEILRIYEEGALQTLSKDDAAFTEIMKISKMAQPSASELQRYRLWLKQKYRSPYTGKPISLSKLFTSAYQIEHIIPKKRYFDDSFSNKVICEAEVNREKGSMLAYEFIKKRGGDVIHCTALGDVTILSEAEYKALVTELYANNTSKKEKLLMEDIPQEFVNRQLNDSRYISRVVMTLLSNIVRIEGEEEATSKFVIPCSGGITDKLKKDWGLNDVWNNIVYPRFERLNALTNTSDFGQWENKEGKRVFQTSVPLELQRGYQKKRIDHRHHAMDALVIACASRNIINYLNNQEANDPTKQENARKQLCIKNRIIRKPWETFTQDAHEALDNIVVSFKNYVRVINKATNYYERYNTGGKKVVDEQKGEAMWAIRKPMHKDTVFGHVNLRRKAVVKLKDALENIPAICDKTLRHYIQDLQKKHFNTKQLLAHFKSINYRLNKQAVDKVEVWQYSDNKEQLAATRKPLDTSFDAKHIATITDTGIQKILLNYLQTKGGDPAIAFTPEGIAEMNRNIAVYNGGKQHQPILKVRIAEPMGAKYPIGETGNKGAKYVEAQKGTNLYFAIYEDEEGNRTYDTVALNVVAERLKQGLTPVPEKNEKGVALKFYLSPNDLVYVPTADELLSKECSLDKNRIYKMVSATKYQCFFLSHRVAKTIYDKVEFEALNKMERALTGEMIKPICWKIEVDRLGHIINIIK

SEQ ID NO: 22455 - protein, 1467 aa, unidentified
  REGION 1..1467: note = Cas Enzyme sequence
MDAAILGDFDKGNSISQTAERTRFRGVRRLRERQLLRRERLHKVLKILGFLPEHYLKGIDFEKHTGKFLSGSEPKLPWVKDRWGKYSFLFQTAFNEMLADFAKHQPSLVFDGKKIPYDWTVYYLRKKALTEMISKEELAWILLNFNQKRGYYQLRGEEEEDNAGKSVEFYALKVLSVEATDEKKGRDIWYNVHLENGWVYRRSSNVPLDWEGRVKEFIVTTDLNPDGTPKLDKYGEVKRSFRAPKEDDWMLIKKRTEADITGTHKTIGSYIYDALLQEPQQKIIGKLVKTVERKFYKEELNFILQKQCAFHAELQDRDLYMRCIEALYPGNEVQRRNIANRDFIYLLIDDVLFYQRPLKTKKSLIANCPYEENEYVNRKTGEIKTAPLKCIAKSHPLFQEFRLWYFLSNIRVYQKEREVNGTLHLDVDVTTEFLKTEDDYVALFDWLNSRKEIDQKAFLRYPAFGLKKEINNYRWNYVEDKFYPCNETRHAILSRLEKAGIGIDFLSDEKETALWHILYSVSDKQEIEKALATFAVKNGLNESFVEVFKKFPPFKSEYGAYSAKAIKKLLPLMRCGKYWDMSLIDGTTKERIERIIAGECDESIGAKVREKAMNLSDISCFKRLPLWLACYVVYNRHSEDKEITKWESPADIDAYLAAFKQHSLRNPIVEQVITETLRVVRDIWKQVGKIDEIHIELGREMKNPADKRKRMTTQILENENANLRIKALLAEFVNPEYGVENVRPYSPSQQEILRIYEDAVLKGEEQIPEDIDVILKKFNTSKLPTKSEFLRYKLWLEQKYRSPYTGELIPLAKLFTAAYEIEHVIPQSRYFDDSFSNKVICESAVNKLKDNQLGYEFIKNHHGQKVEVGFGKTVEIFSVDSYERFVKEQYAKSGIKMKKLLMDDIPEQFIERQLNDSRYISKVVKGLLSNIVREKNDSGEYEPEAVSKNILVCTGSVTDRLKKDWGMNDVWNSIVSPRFERLNALTETQCFGHWENKDGKKVFQTAVPLEYQKGFSKKRIDHRHHAMDAIVIACATRNHVNYLNNESASRNAKISRYDLQRLLCDKSRGDGNGNYRWIIKKPWTTFTQDAREALSGIIVSLKQNLRIINKTTNIYQHFDANGTRVYEKQKIGDSWAIRKPMHKDTVFGAVNLRKVKVVRLSVALDTPSMIVDKRVKNKVLELLSYKYDKKKIEKYFKENAFLWKELDIAKVAVYYFTENTTEPLVAVRKSLDSTFNEKKIASVTDTGIQKILLNHLKSKEGKAELAFSAEGIEEMNRNLLQLNDGKGHQPIYKVRVYEPRGNKFKVGVLGNKGAKWVEAAKGTNLFFAIYITEDGNRTYETIPLNWVIEREKQGLVPVPDRNEKGDKLLFWLSPNDLVYLPTEEERDFGRINEPIDRGRIYKMVSSSGNQCFFIPQSISNAIISTKELGSNNKAEKSWDGEMIKNICIPVKVDRLGRIIEVKYRVNE

SEQ ID NO: 22456 - protein, 1504 aa, unidentified
  REGION 1..1504: note = Cas Enzyme sequence
MKNILGLDLGTNSIGWAVVNGSVNDDGSEQLVKIQASGSRIIPMDAAMIGDFNKGNSISQTAERTRLRGIRRLSERYLLRRERLHRILDILGFLPSHFAQDLDRHGKIVKGKEPKLAWRKNEAGQFEFIFQDSFKEMLEDFKLNHPNLITDDKKVPYDWTIYYLRKKGLTSKISKEELAWILLNFNQKRGYYQLRGEEEEENNNKLVEFYALKVVAVEDSGEKKGKDIWYNVHLENGWVYRRTSNIPLDWVGKTKEFIVTTDLEKDGTPKKDKEGNVKRSFRAPKEDDWSLVKKKTEADIDQTHKTVGTYIYDTLLGNPSQKIRGRLVRTIERKYYKEELKLILDKQKEFHPELQDRALYAACVEELYTINEAHRNNIGNRDFTYLFLEDILFYQRPLKSKKSLIDNCPYEENHCLDKETGEIKSFPVKCIAKSHPLFQEFRLWQFIVNLRIYRKGLAQDVDVTNELLKTEEDYVALFDWLNGKKEIDQKAFLKYPLFGLKKEVENYRWNYVQDKPYPCNETRSSMLARLEKCDISIEFLTKENEEALWHILYSVEDKNEIVKALQKFADKHDLNASFVDVFRKFPPFKKEYGSYSAKAIKKLLPLMRMGKYWSENSIDKGTRERIDKIITGEYDEKIENRVREKAIHLVDVSDFRGLPLWLVCYIVYGRHSESKEITQWKSPADIDSYLKSFKQHSLRNPIVEQIIIETLRVVRDIWKQVGNIDEIHVELGREMKNPADKRKKMTQQMSENENTNLRIKYLLTEFLNPEYEVENVRPYSPSQQDILRIYEEGVLNSVSDLPEEISDILKKFTETDLKKRPSRSEVLRYKLWLEQKYRSPYTGEVIPLGKLFTSAYEIEHVIPQSCYFDDSFSNKVICEAEVNKLKSNLLGHEFIVKHHGEIVELPFGKKVRIFTVDEYEQFVKDNYSRTRGKMKKLLMDDIPEEFVTRQLNDSRYISKVVKSLLSNIVREKGEEEAISKNVIPCTGGVTDRLKKDWGINEVWNKIILPRFQRLNELTGTNKFTTKNVGIQEIPTMPLELQKGFNKKRIDHRHHAMDAIIIACANRNIINYLNNESATAKAELSRYDLQKLLCDKAKTDNNGNYKWVIRKPWASFTQDTYLALENIIVSFKQNLRVINKATNHFLHYNEEGKKIFVKQGKGDNWAIRKSMHKDTVFGEVNLRRIKTVALNEAMKNPQSIVVKDFKRKLLELWNLGFDAKRIKKYFEDNRETWSDINLSKIEVYYFSKDTKDRFFATRKPLDTSFDRKKIENNITDTGIQKILLRHLELKDNNPDIAFSPDGIDEMNRNIIQLNNGKYHQPIIKVRWYEQADKFAVGQTGNKSSKFVEAAKGTNLFFAVYESNILDKKTNTIIKKRNYATIPLNVAIKRQKQGLPVAPEDENGNDPIFVLSPNDLVYLPTAADLANGIIAQPLDRGRIYKMVSCTGNEGHFIPARIANPILQTIELGSNNKAQKAWTDEMIKEICMPIKVDRLGNVLESSSSHKK

SEQ ID NO: 22457 - protein, 1520 aa, unidentified
  REGION 1..1520: note = Cas Enzyme sequence
MKKIVGLDLGTNSIGWALINAYIDEYNKEHLYGIEACGSRIIPMDAAILGNFDKGNSISQTADRTSYRGIRRLRERHLLRRERLHRILDLLGFLPKHYSDSLNRYGKFLNDIECKLPWVKDETGSYKFIFQESFKEMLANFTEHHPILIANNKKVPYDWTIYYLRKKALTQKISKEELAWILLNFNQKRGYYQLRGEEEETPNKLVEYYSLKVEKVEDSGERKGKDTWYNVHLENGMIYRRTSNIPLDWEGKTKEFIVTTDLEADGSPKKDKEGNIKRSFRAPKDDDWTLIKKKTEADIDKIKMTVGAYIYDTLLQKPDQKIRGKLVRTIERKYYKNELYQILKTQSEFHEELRDKQLYIACLNELYPNNEPRRNSISTRDFCHLFIEDIIFYQRPLKSKKSLIDNCPYEENRYIDKESGEIKHASIKCIAKSHPLYQEFRLWQFIVNLRIYRKETDVDVTQELLPTEADYVTLFEWLNEKKEIDQKAFFKYPPFGFKKTTSNYRWNYVEDKPYPCNETHAQIIARLGKAHIPKAFLSKEKEETLWHILYSIEDKQEIEKALHSFANKNNLSEEFIEQFKNFPPFKKEYGSYSAKAIKKLLPLMRMGKYWSIENIDNGTRIRINKIIDGEYDENIRERVRQKAINLTDITHFRALPLWLACYLVYDRHSEVKDIVKWKTPKDIDLYLKSFKQHSLRNPIVEQVITETLRTVRDIWQQVGHIDEIHIELGREMKNPADKRARMSQQMIKNENTNLRIKALLTEFLNPEFGIENVRPYSPSQQDLLRIYEEGVLNSILELPEDIGIILGKFNQTDTLKRPTRSEILRYKLWLEQKYRSPYTGEMIPLSKLFTPAYEIEHIIPQSRYFDDSLSNKVICESEINKLKDRSLGYEFIKNHHGEKVELAFDKPVEVLSVEAYEKLVHESYSHNRSKMKKLLMEDIPDQFIERQLNDSRYISKVVKSLLSNIVREENEQEAISKNVIPCTGGITDRLKKDWGINDVWNKIVLPRFIRLNELTESTRFTSINTNNTMIPSMPLELQKGFNKKRIDHRHHAMDAIIIACANRNIVNYLNNVSASKNTKITRRDLQTLLCHKDKTDNNGNYKWVIDKPWETFTQDTLTALQKITVSFKQNLRVINKTTNHYQHYENGKKIVSNQSKGDSWAIRKSMHKETVHGEVNLRMIKTVSFNEALKKPQAIVEMDLKKKILAMLELGYDTKRIKNYFEENKDTWQDINPSKIKVYYFTKETKDRYFAVRKPIDTSFDKKKIKESITDTGIQQIMLRHLETKDNDPTLAFSPDGIDEMNRNILILNKGKKHQPIYKVRVYEKAEKFTVGQKGNKRTKFVEAAKGTNLFFAIYETEEIDKDTKKVIRKRSYSTIPLNVVIERQKQGLSSAPEDENGNLPKYILSPNDLVYVPTQEEINKGEVVMPIDRDRIYKMVDSSGITANFIPASTANLIFALPKATAEIYCNGENCIQNEYGIGSPQSKNQKAITGEMVKEICFPIKVDRLGNIIQVGLCILTN

SEQ ID NO: 22458 - protein, 1141 aa, unidentified
  REGION 1..1141: note = Cas Enzyme sequence
MKNILGLDLGSGSIGWSVIQEGENNRTILGMGSRIIPLSPDDTTQFTQGKSITKNADRTAFRTQRKGYDRYQLRRHYLTQYLHKLGMLPDERLIKLPQTELWEIRAKAVNEKIELPELGRVLYHLNQKRGYKSGKSDFQDKKSSKYLSEVSERYKELQERDITIGQKFYAELKADPTYRCKDWVYPRIAYIEEFDRIMECQRTHHDILTDEHIAHLRNHIIYYQRPLKSCKHLVGECSLAQMTYRLPDGSIKSRPIKVAPKSSPLFQVCKIWESINHINLQRDRERFEITPAHRQALFTHMNSKEKLKINDLYKILGIKKHDGWWGGKAIGNGLQGNTTVIALQNALTGYSRADELLRFELKTCEIEIADPETGEIATQLIIDPAFEQEPLYRLWHTLYSISDTDVLDRILERKFGIEDPEMREKLTQIDFTKSGYGNLSSIAMRRILPYLRQGYVYSEACFMAGYNHSNSITREENLARELAEHLRPITKGELRQPIVEKILNQMVNLVNALIDRYGRFDEIQVELARELQQSREERDKTYKKQLDNQKRNEEIRHHIEEMDLTPTRSRIQKYRMYEESHHLCIYCGQPVGLAAFLQGYDTEVEHIIPRSLYFDDSYNNKVCACRACNQAKNNRTAYDYMSSLPEETFHRYLDRIKNMHDNKEISDTKYKYLLTKGDEIPQDFLNRQMRESQYISRKAIAMLQEVCHHVYATSGSVTAYLRHVWGWDNVLHDLNRKRYRAGGLTEMREIDNRTVECIKDWNKRLDHRHHAIDALAIACTRQGYIQRINTLSTQAEEGDLVSLERYIRQQPHFSYDEVCAAAEKILVSFKAGKRVATKGKRYIYRGGKRILAQEDITVPRGALSEQSVYGQIAQYRKDKKGKVSFSYESVLKYPIESIDTKTLPDVVDAGIRRILQQRLDEHGGNAKKAFATPVYTASGHLIRTVRCFTRLKAIVPVKYDASGKAVGFVKPGNNHHVAIYIDRDGKPQEHIVTFWHAVERKKYGLPVIIERPGEAWDAATDAMPDPFLEQLPDATWQFRLSMQQNEMFILGMPDELYADALENRDYALLGKYLYRVQKIASKNYCFRLHTETSVDDKYNGKKNEMLSKQMGKVKIIQSIGTLDSLNPHKVKISLTGEICEI

SEQ ID NO: 22459 - protein, 1526 aa, unidentified
  REGION 1..1526: note = Cas Enzyme sequence
MKNILGLDLGTNSVGWALISVDENGNLVKDIRLGSRIIPMSQDVLGKFDSGVTVSQTAERTEYRSHRRLLERALLRRERLHRVLHLLGFLPEHYAACIGWDRNNNATYGKFLPETEPKLAWRKADDGGYRFVFMQSFEEMLDDFSASQPSLVANGKRIPLDWTLYYLRTKALTKPIAKEELAWILLNFNQKRGYYQLRGEEEEETPSKRVEYHELKVVKVEATDEGKGGNIWYNVLLENGWVYRRQSKYSLDKWLGQTLPFIVTTDLEADGVTPKRDKEGNVKRSFRSPKEDDWTLVKKRTEDHLEKSGLTVGAFIYQHLLANPSDKVRGQLVRTIDRKYYKRELQAIIAKQMEFHPELRDAELLKACAEELYRNNEAHRAQLLAKDFKHLLVEDVLFYQRPLKSKKSLIANCPYETRQYINKETGEIKDVNVKCIAKSNPYFQEFRLWQWISNLRLLRQADGQDVTAACIKGNEDKERLFDLLNNQGEIKQEHILRDFLKLKKPKGGEFPLRWNYVGDKIYPANETRHAMNKAIKGMTVDKEEKETLGQLLDQPAVAYMLWNLLYSITDRNELASALRRFALTHGVSSVDAFVESFLKVKPFKKEYGAYSEKATKKLLQVMRLGKYWCGDELPEPAKRTKGNKQAVYDEMANRGICKQTLQNISNIIEEDIDERLMGALLNPDRPLTELSHFQGLSVSDACYVVYGRHSEVAEIVKWKDAGELNTFINNFKQHSMRNPIVEQCVLETLRTVRDVWEQEGQIDEIHVELGRNMKRTAEQRARDTQAIQRNENTNMRISLLLTELKNDPSISDVRPYSPSQRELLKIYEEGALENLTNQDEDIAKISRLAQPSASELRRYKLWLDQKYVSPYTGRPIPLAKLFTPAYEIEHIIPQSRYFDNSFSNKVICEADVNKLKDNLLGMEFIKKFGGKTKGILDEEAYKLHVTTNYAHNPAKRSKLLMEDLPTDFNSRQLNDTRYISKTVMALLSNVVREEGERETRSKHVVVCTGGVTDTLKKDWGLHDVWHNLVYPRFIRLNNLTGSQDFGYWRYLNEENRKKGEDSRKVFQITLPLDLQRGFVKKRIDHRHHAMDAFVIACASPDIVNYLNNQSAANPHARQDLQRLLCDRKREIRKPWPTFTQDAQKALEDLVVSFKNTVRVVNKASNTYLRYDKDGKKKRFKQEGEGLKAIRKPMHKETYYGEVNLIRKEMLPLKRALDDVNAIVDKELRACIKGLLRDGFNLQQVLANFKAKDFKFDKRDIKKVEVYVSSEKSTPMVATRKLLDTSFNAKRIADITDTGIQKILLNYLKANDNSPEQAFTPEGIAYLNEHIAEYNNGKRHQPILKVRVSEIRGAKFAVGQTGSKKTKFVEAQSGTNLYFAIYEDKEGKRNFETIALNVAAERLKTGQTPVPETNDAGLPLKFYLSPNDLVYVPTDEDRAAAHPSIDRRRIYKMVSATDKNSFFLPFEVASIIADQVEFEAKNKVGRVIETLEYTEQYESSAINKIMIKDVCWKLEVDRLGNITKIVR

SEQ ID NO: 22460 - protein, 1175 aa, unidentified
  REGION 1..1175: note = Cas Enzyme sequence
MNKKILGLDLGVGSIGWSLITLDESGHPAEILGMGSRIVPLTSDDMQEFQKGKAITKNKDRTMKRSARRGLDRYQQRRAKLSRLLCEFGLGFPRPLMSLSPLALWGLRADAATEGKVISLAELGRVLYHLNQKRGYRHSKSDESSKQDTEYVAAVKTRFAELRNESLTIGQYMYRYLSASAERGADALSCVHYRVKDQVYPREAYMEEFDRIMAVQQKAYPDVLTSVVLQKLRDCIFFQRPLKSCKHLVSYCEFERKTREVQIPVVGADGTTSYKTKIVDIGPKVAPVSSPLAEVCRLWESINNIRIYYPDGAVYPLSLEHKQAFFNKLQESESLKFSDAKKIIGAKAKDKLWCNDLLKSGIKGNRTTATLRKLIEDYPQYKALLRFDLKQEDSCRVDLSTGEVLPLISVSYLNEPLYKLWHILYSVAEREAMGNALRKQLGVEQGDLDKGLLDACMKIDFTKQGYCNKSAKFMCKLLPYLQQGYMYSEAADLAGYKHSDSKTKEELEHRELKPRIELLPKNSLRQPIVEKVLNQMINLVNALKDKYGEIDEVRVELARELKMGREERKKYWTRNRENEDDNKRVAKEISEFCTPTKTRIQKYKLWEEANHACIYCGKEITKPSLFSDGEAEIEHIIPRSVLYDDSMSNKTCACRSCNKAKNNRAAMDWVLTQTEEFQTKYFNRLEELVAKKSLSNGKRQRLMTLLKDIPEDFIERHLRLTQYISRKATEILKDGIRYVWSSEGSVTSTLRHLWGYDKILEDLNFERYKSMGETQTILVKRGSVEQEVERIKEWNKRKDHRHHAIDALVVACTRQSYIQRLNRLSSEEDRQSMQSELGSSYAPSKEERMQLLDKWLTAQPHFSAQAVRDYVRGILVSYRPDRRTYTKSRNKIKIKGRVSLQTGILTPRGALSEETIYGAIHVNGVKKIVCKYSLDKLQGKKVLRIVDKGIQCIIKARLEAYNNDAKKAFAEPLYSDAAQTKQIRSVRCLTGRVREKLVPLRRNDAGEEIAFVATGSNHHVAFYRDSEGVLQEVVVSFYQAIERAKYQLPMIIKDPRAVVEEALERNVPDFVLSTLPHSSWTFVESLQKNEMFLIGLSDDEIARAIKNSDRAPFNDHLYRVQKIALNEYCFRFHLEPELDDLDGDIPKYYKMSFARYIELNPRKVRVDLLGNLSLM

SEQ ID NO: 22461 - protein, 1385 aa, unidentified
  REGION 1..1385: note = Cas Enzyme sequence
MKKILGLDLGTNSTGWALVNEAENTAEKSSITKLGVRIIKYDNFVNTETGSESKEPEKDFCGGKGISPNAGRTKGRSARRNLQRYKLRRANLIEYLKKCGLITDSAVLCENGNRTTFQTYRLRAMAVTEEISLEELSRVFLMINKKRGYKSSRKAKLPDEGQLIDGMAVAEQLYENDLTPGQFVFSILQQGKKSIPEFYRSDLQNELNRIWDHQKQFYPEILTDEFRKQIEGEGRPNTAKMFLGKYKIYTADIKGKDKRLQAYQWRSNALTSQLSIDEVAFVVSELNGAINNASSYLGAIGDRSKELRFNKLTVGQYLMKQLDKDPNYSLKNQVFYRQDYLDEFEAIWEKQAQYHPELTPELKKDIRDIIIFYQRPLKSQKGLVSFCEFESRQIEVNVDGKQKLRTIGCKVCPKSSPLFQEFKIWHTLHSLIVKEKKTNAERFLYQEEKETLFAELNIKETLSKLDALKLLYKNYKDLDLNYDKIEGNRTQAALFKAYQTIISMTGHGEYDFSKMMSDEVMEIVEGVFSGLGYNTNILHFDAENELFDKQPMYMLWHLLYSYEGDKSSTGNKSLIDKIFKLCGFEKEYASIIANIIFQPDYGSLSTKAIRKILPRMKEGNEYSLACEYAGYRHSQRSLTKDELDNKVYKDHLDLLPRNSLRNPVVEKILNQMINVVNFVVDAYGKPDEIRIELARELKKSSKERKEMTMAINKTTADHEKYRQILQKEFGLTNVTRNDIIRYKLYLELKSNGYKTLYSNTYIPQEKLFSKEFDIEHIIPKAKLFDDSFSNKTLESRRVNIEKSNLTAYDYVLGVYDEKGINDYEIRIENLYKSGIISKAKRDKLMMKEVDIPSGFIERDLRDSQYIAKKAREILEELVKFVVPTTGTITDRLREDWQLIDVMQELNWEKYDKLGLTEIVKDKDGREIRRIKDWTKRNDHRHHAMDALTVAFTKRSYIQYLNNLNARSDKSGSIYAIEQKELYRDKHGKLRFNPPMPLDVFRAEAKRQLENTLISIKARNKVLTQNVNITKTKKTESGYRKKVQLTPRGQLHNETFYGAIKWYVPKLESVGSGFNVEQIALVANKRYREALLTRLAACGNDPKKAFTGKNSLEKNPLYLDELHTQQVPTKVKTVTLETVYTTRKDISSDLKIEKVIDRKVRSILKERLKEFGGDPKKAFSNLDANPIWLNKEKGISIKRVTITAVSKAEPLHAKRDHFGKYILDANGAKQPVDYVNTGNNHHVAIYRDEKGVLQERVVSFYEATASASVGLPVVDKEYRKSEGWTFLFSMKQNEYFVFPNEKNGFNPNEIDLMDPDNYALISPNLFRVQKITSKDYVFRHHLETTVEDRKELQNITWKRFQSLTNLDKLVKVRVNHIGQIVSVGEY

SEQ ID NO: 22462 - protein, 1427 aa, unidentified
  REGION 1..1427: note = Cas Enzyme sequence
MKKILGLDLGTSSIGWALVNEAETSEEKSSIIKLGVRVNPLTVDELQNFEKGKSITTNADRTAGRSMRRNLQRYKLRRENLIEVLKEYNFITDETILSENGNRTTFETYRLRAKAAVEEISLEQFARVLLMINKKRGYKSSRKAKGAENGTLIDGMEVAKKMYDEGITPGELCLQLLTAGKRYFPDFYRSDLQAEFDRIWNFQKQFYPDSLIDKVKDEVRGKNKSQTWAILAKYFVWKEVENSWNEEEAQTRRVEKEYRLVGIKRGVKREELKLENFQWRVKALSERMNPEELAIVLQEINEQISNSSGYLGAISDRSKELYFNRQTVGQYQMAVLDNNPNIGLRNMVFYRQDYLDEFNTIWEKQAEFHKELTEDLKKEIRDIVIFYQRRLKSQKGLINICEFERRQIEVEIDGKKKIKTIGSRVIPRSSPLFQEFKIWQTLNDIEVSVLGVKNKRKKQDDNSTTLLDSAENIDSLKLNVSRPLDADEKSLLAKELFIRDKLTKSDVLKLLFNNPQNLNLNFKNIDGNRTGSALYQAFSKILEISGHESINFKKSADEIVEQVKTIFSALGWNTEVLCFDSEKELDKQPYFKLWHLLYSFEGDSTPTGDGNLIQKIADLCGFEKDYASILANITFQEDYGSLSTKTIRKILPHLKDGNQYDVACEYAGYKHSKSSLKKEEIKNKVLKDKLELLPKNSLRNPVVEKILNQMVNVINAIITTYGKPDEIRIELARELKKNAKEREELTKSIVDTTKTHEGIRAILQNDFGMSHVSRNAIIRYKLYEELKDNGYKTLYSNTYIPKEKLFSKDFDIEHIIPQARLFDDSFSNKTLEVKSINIEKGSKTAYDFVEEKYGEQGLQEYLNRCEVLFRDKKTKLRKLKMQESEIPEGFIDRDLRNTQYIAKKALSMLNEICRRVVATTGAITDELREDWQLVDVMKELNWEKYKVLGLVEYFEDNDGRLIGRIKDWTKRNDHRHHAMDALTVAFTKDVFIQYFNNKNASLKPDTNEAAIRNKYFQNGKAIPPMSLDEFRAEAKKHLNDTLISIKTKNKVVTINLNRTKKKNGINKKQQQTPRGQLHLETVYGSHKQYVVKEEKVNASFDAAKIATVNKPAYRDALLRRLQENGNDSKKAFTGKNSLDKQPVWLDAKQNECVPEKVKTVMLETVYTVRKPIDEKLNVDKVVDARIRKLLQDRIKEYGNAKSAFANLDENPIWLNKEKGITIKRVSVSGISKAQSLHEKKDKDGNFILDKDSRRIPVDFVNTGNNHHVAIYRKPVLDKKGQAVFDENGELKFELEEVVVSFFDAVTRVNLSQPIIDKDYKRSEGWKFLFSMKQNEYFVFPNEKTGFDPKEIDLLNPENYALISPNLFRVQKIASKDYVFRHHLETVVADRKELQEITWKRISSLSILNRIIKVRVNHIGQIVMIGEY

SEQ ID NO: 22463 - protein, 1003 aa, unidentified
  REGION 1..1003: note = Cas Enzyme sequence
LKKEIENYRWNYVEGKSYPCNETRSLILHYLEKAGISSTFLSTKIEESLWHILYSVEDRIELETALRTFASKYQLSCNFVEVFKKFPPFKKEYGAYSAKAIKRLLPLMRMGKYWKVDAIDGNTAERIEKILSGECDEKILNKVREKTIHLSETSDFQGLPLWLACYVVYNRHSEGKEVAKWKSPEDIDIYLKSFKQHSLRNPIVEQVITETLRVVRDIWKRVEQIDEIHVELGREMKNPSEKRRQMTERMLENENANIRIKALLTEFMNPEYEMENVRPYSPSQQEILRIYEDTVLNGAGDIPEDIEIILKKFKENDIKKRPGKSDFLRYKLWLEQQYRSPYTGEIIPLGKLFTTAYEIEHVIPQSRYFDDSFSNKVICESEVNKLKDNMLGYEFIKKHAGEIVELGFGKSVKIFSVEAYERFVGENYYKAGSKKSKLLMDDIPEKFIERQLNDSRYISRVVKGLLSNVVREEDANGEYESEAISKNVIVCSGSVTDRLKKDWGVNDVWNNIVYSRFERLNRLTESQQFGHWENREGKRFFQTELPLEYQKGFSKKRIDHRHHAMDAIIIACATRNHVNYLSNESASKHARIARYDLQRMLCDKSKADGGGNYKWIIQKPWATFTQDVYRTLLDIIVSFKQNLRVINKMTNYYQAYDDAGKKVFKKQKKGDSWAIRKSMHKDTVFGQVNLRKIKEVRLSVALESPEKIVDKKIKEKVLQLFAYQYDKKKIEKYFKENASLWKEVNLAKIPVYYFTDESSELLVAVRKNLDTGFTEKKIRESVTDTGIQKILLNHLSNKGDKPELAFSPDGIDEMNRNLVILNGGKPHQPIYKVRVCEPLGNKFKVGTNGNKSAKYVEAAKGTNLFFAIYETDAGKRTYETIPLNVVIEREKMGWLPVPEKNNKGEKLLFWLSPNDLVYLPTEEELMSRILSDKLDRGRIYKIVSFTGNRLYAIPYNVSNMIWDKNEYTQLNKVESTDMKESIKEICMPINVDRLGHITEIIIK

SEQ ID NO: 22464 - protein, 1457 aa, unidentified
  REGION 1..1457: note = Cas Enzyme sequence
MKKILGLDLGTNSIGWALVDKDNQKILGMGSRIIPMGKDKIDYEKGDGVTKSAMRRAKRSTRRMNKRYKLRRNKLLYILHTLGMLPEQFQFKKLNEKDKDGSLLRLNGTKENNSFKETNNGIPVPTKIQELELLPISKKTLQADSISFCQLKVDALTRTIDIKDFGRILYNFNQLRGYSGGDSDERSKKENDEEESLGNKNYEVIIRKVCIISVEKSEDTFKIRGVKNKGQQLNKFIVVISLDDQELEGTTELQDLKEKVDQEEELQITTKRDKNGEVTSRIFTLPQKSDWRKEMEANEKILKEEGLFISELKLKDLQSNGKWTKIRNRVFLRNRYKEEFDKIWDTQAQKHNFLNECPKETLEKIANYTFPGKSESQQKLRKNAIEGGLKYIIKDQIIYYQRPLKPQTELISNCRFEKSEKVIAVSHPLFQEFRCWKQINNLYITSKQQVWNEKKKKNVWQYTNRYLTNEQKQRIYEKLQNQKGISFNEVKKIVEIKDDKTEYLNGLHVKAKLIGCDTLISIKKQLGDYAESLLEKETSIIEKIWDAIFDARNHEGSEYDITSKRVAPIFEILEEYLDDSQKAEELAFKLAQKVKFVRKYGSLSAKAIQKVLPLMQLNPQNISKQITDKFNTIKNLISTGEILDNTDYNFQDYVIDFVEKNPNALENGGLMEYLAISLAYDKHTAETIEAQIANYHDINYEKRNLRNPIVEQLMNETMQVIKAIWKQYNVDTKKLEIRIELARDLKNSAKERKAIYDGQSNNQKENNKAKERLKENEIALTSENILKYRLYAQQKETSPYTGKPIDFSKLFDNKEYDIDHILPKSRYYDDSFSNKVICEKNINEEKSNRTAWEYISQQNSKHEILSTENFIKHVNNNYFGKKKKNLLSEKIPTNPVSRQLKDTQYISIAVKNELAKIVGSENIRTSTGEITDFLRSRWGLKKLFMEMTEERFKRMELWDLDKNGNPTTTTKWVTKEVMNDGEKDKNVYEIKNWSKRYDHRHHAIDALIVALTEQSHIQRLNNLNKYVQDQLERRKEEFKITTCKDETVFEAFCNLKEGQRDEILQKMESSRYFEKPFLYTNKKGEIVSSLCRQVKEHLETMIISQKPKDKLSISEDPLDPNTPNKKLKKQLKIRAAIHEDTYYGKTNERDTKRIKLSALSASDIDKIIDKSLASEIKEHRKKHIKKEDAFIGEGLKEFNDNRIGNNKQPVYNVKVWYNKNENKKDSLQRLYDNNEKQSVITGDNYLFIVMEKKTKKGVSRVFDIASLYDSVALAKEYLKEDEDKRNFKQRICEDYRLKHKNKPQKVLFYLQQNDLVYLPTSSNDPVLNMTNNKLKEWLKDCKNKKSFARRIYKVVKMTGKNCFFIPNNYATTISTPKDLSKEDLDKLSKEYEDRKIPKHKKNYEEFGSFGSSIKTEINDNFVKELVLKENFDGNQPIKIQDTCLKLKIDWLGNIEFA

SEQ ID NO: 22465 - protein, 1457 aa, unidentified
  REGION 1..1457: note = Cas Enzyme sequence
MKKILGLDLGTNSIGWALVDKDNQKILGMGSRIIPMGKDKIDYEKGDGVTKSAMRRAKRSTRRMNKRYKLRRNKLLYILHTLGMLPEQFQFKKLNEKDKDGSLLRLNGTKENNSFKETNNGIPVPTKIQELELLPISKKTLQADSISFCQLKVDALTRTIDIKDFGRILYNFNQLRGYSGGDSDERSKKENDEEESLGNKNYEVIIRKVCIISVEKSEDTFKIRGGKNKGQQLNKFIVVISLDDQELEGTTELQDLKEKVDQEEELQITTKRDKNGEVTSRIFTLPQKSDWRKEMEANEKILKEERLFISELKLKDLQSNGKWTKIRNRVFLRNRYKEEFDKIWDTQAQKHNFLNECPKETLEKIANYTFPGKSESQQKLRKNAIEGGLKYIIKDQIIYYQRPLKPQTELISNCRFEKSEKVIAVSHPLFQEFRCWKQINNLYITSKQQVWNEKKKKNVWQYTNRYLTNEQKQRIYEKLQNQKGISFNEVKKIVEIKDDKTEYLNGLHVKAKLIGCDTLISIKKQLGDYAESLLEKETSIIEKIWDAIFDARNHEGSEYDITSKRVAPIFEILEEYLDDSQKAEELAFKLAQKVKFVRKYGSLSAKAIQKVLPLMQLNPQNISKQITDKFNTIKNLISTGEILDNTDYNFQDYVIDFVEKNPNALENGGLMEYLAISLAYDKHTAETIEAQIANYHDINYEKRNLRNPIVEQLMNETMQVIKAIWKQYNVDTKKLEIRIELARDLKNSAKERKAIYDGQSNNQKENNKAKERLKENEIALTSENILKYRLYAQQKETSPYTGKPIDFSKLFDNKEYDIDHILPKSRYYDDSFSNKVICEKNINEEKSNRTAWEYISQQNSKHEILSTENFIKHVNNNYFGKKKKNLLAEKIPTNPVSRQLKDTQYISIAVKNELAKIVGSENIRTSTGEITDFLRSRWGLKKLFMEMTEERFKRMELWDLDKNGNPTTTTKWVTKEVMNDGEKDKNVYEIKNWSKRYDHRHHAIDALIVALTEQSHIQRLNNLNKYVQDQLERRKEEFKITTCKDETVFEAFCNLKEGQRDEILQKMESSRYFEKPFLYTNKKGEIVSSLCRQVKEHLETMIISQKPKDKLSISEDPLDPNTPNKKLKKQLKIRAAIHEDTYYGKTNERDTKRIKLSALSASDIDKIIDKSLASEIKEHRKKHIKKEDAFIGEGLKEFNDNRIGNNKQPVYNVKVWYNKNENKKDSLQRLYDNNEKQSVITGDNYLFIVMEKKTKKGVSRVFDIASLYDSVALAKEYLKEDEDKRNFKQRICEDYRLKHKNKPQKVLFYLQQNDLVYLPTSSNDPVLNMTNNKLKEWLKDCKNKKSFARRIYKVVKMTGKNCFFIPNNYATTISTPKDLSKEDLDKLSKEYEDRKIPKHKKNYEEFGSFGSSIKTEINDNFVKELVLKENFDGNQPIKIQDTCLKLKIDWLGNIEFA

SEQ ID NO: 22466 - protein, 1188 aa, unidentified
  REGION 1..1188: note = Cas Enzyme sequence
MGKKVLGLDLGVGSIGWCLITLDKDEKPQSILGMGSRIVPLSVDDATEFTQGKAITKNKMRTVARTIRKGMDRYQLRREALKKVLREHGMLPDEALIKLPLLELWELRARAATPGEQLSLTELGRVLLHINQKRGYKHAKADEAAEAETKTGKETGYVAQVKGRYQILKEKGQTIGQHFAGELRANQQTAPRGVYYTYRIKEQVYPREAYIEEYDRIMAVQRVFYPELLTDALIGRIRDRIIFYQRPLKSCKQLVSFCEFEKKEKVIRVKHTNKEGVQELVEKTITIGPKVAPKSSPIFQVCKVWESIHNIRLYHPDGTERKLEQEEKQKLFDYLQKNDKLTLKNLYKTLGIKDKDEEEELWCDKLLEKGIAGNTTAAILRKALKGYKQYEGLLRFDLTIRDSHEADEDGVIRPIIDESYQNEPLYKFWHILYSIEDREEMRSALIGQLGIKAEDLDRGLMDALYKIDFVKQGYGNKSAKFICKLLPHLQEGKMYSEAAEAAGVRHSDSMTAQERDERSLLEEIPLLQKNALRQPVVEKVLNQMINLVNALKREHGEIDEVRVELARELKMSREEREEATKSNNAREKKNKDIADRIKGEYGLTPTKSRIQKYRLWEESDNSCIYCGKHVDVVQFLRGEEIEVEHIIPKSILFDDSLSNKVCACRSCNQEKGNRFAMEYIQAKGWEQDYIERVDSLFQGKKISYSKRQRLLMLPKDLPEDFIERHLRLSQYISREAQGILRKGIRLVSASEGGVTAKLRQLWGYDNILRDLNLERYRSMGETEVVTVEHRDGQRKDERIKDWSKRKDHRHHAIDALVVACTRQSYIQRLNRVNAEADRQEMDAFIKEQQEQKPSKKEKLSLLEHWLIRQPHFTTGEVTKHVEGILVSLRPGKRTISRGRNIYKRSGKTDVQREVLIPRGALSEETIYGVIQAGGKDEVVCKYALRGLKAKDVDYIVDKALQEKVRERISQCGEKQAFAEPLYLDEAKTQEVRSVRCFTGKDQSKLVPLRYNAEGEAVGFVAPGNNHHLALYKDDDGNVVESIVTFWQAVERARYGLPIVVASPREVMEKALAIPGLPESVLKALPASNLRLMEVLRMNDMFLIGMTDEEIQVAIGAKDHSTLSRHLYRVQKLSSRYYVFRYHLETEVKDEKNTTGNIPKFYRIVSFNAYNKLNPRKVKIDLLGRILLV

SEQ ID NO: 22467 - protein, 1506 aa, unidentified
  REGION 1..1506: note = Cas Enzyme sequence
MFSQRNNPYCELLSNSATKVSVIFFISKFFLIFFVFISFLLSLPHQNIKRMKRILGLDLGSNSIGWALVQQDFENKQGKIIATGSRIIPMDQGILGDFEKGNTVSQTAERTTYRSMRRLRERHLLRRERLHRVLHILGFLPPHYDAQIDFTKRYGKFIDNAEPKIAYNNGNFIFMNSFNEMIEDFKKYQPQLFYKKSNGEESKIPYDWTIYYLRKKALSQKITQQELAWLILHFNQKRGYYQLRGEEETENPNKEVAFHSLKVVDVEAEAPNKKGEIWYTIRLENGWIYRRTSKNPLDDWKGKTRDFIVTTDLNDDGTIKVDKEGKEKRSFRAPDENDWNLLKKKTEHDIDFSGKTVGAYIYDHLLQNPNQKIKGKLVRTIERKYYKDELKAILAKQIALQPELFTETLLADCIRELYRKNETQQQNLLSKDFLHLFVEDIIFYQRPLRSKKSTIANCTLERRSYIDKETNERKDTPIKVCAKSNPYYQEFRVLQWLQNLRIYEIETDREVTAEFIETAEDYEALFNFLMSQKEIDNEGLLKYFLFAKNPQIKDKVAKSELKKWLTTYRWNYVYDAADNSSKKYPMNETGYELQRYLQKVEGLPANFLTFDTTYRLWHLLYSVKDKVEFEKALKKFAQEYQLDEASFVDSFKNFKPYPNEYGSFSEKAIKKLLPLMRFGNHWDFNRIDVSTQKRIDDLINGVANEDIRTIIREKAEKYQLNSETCFQGLPLWLAQYVVYNRHAEATDIEKWTSVNDLEAYLEDFKQHSLRNPIVEQVVTETLRVVRDVWQQYGRGQANFFDEIHIELGRELKKTAEERKQLSDKNQQNENTNLRIKKLLAELKEDASIQNVRPYSLVQQELLKIYEEGVFSATDEVEEDIQKIRKKAEPTTPEIQRYKLWLEQKYKSPYTGEVISLTKLFTEEYEIEHIIPQSRYYDDSLSNKVICESAVNKLKTNQLGLEFIQNHHGEKVRITGNKEVTIFTEEQYKEFVKKHYANNSAKQQKLLLNEIPEKMVARQLNDTRYISKYISEILSKIVRSDEKDEGVNSKNVIPCTGKITTALKQDWGLNDVWNELILPRFERMNQLTQTQLFTSYNDRLQKNLPTVPIEYSQGFQKKRIDHRHHAMDALVIACATREHINYMNNQHALDKNKDKEEKQQSRIDLRTILCEKKNNNWQFKKPWSTFTQEAKEALEHIVVSFKQNLRVINKATNYYEKWEEKNGVLVKKKIKQEGTNWAIRKPLHKETVSGKIVLDRKIGKDKILTATRKAVDITFTEKIISSITDTGIQKILLNYLKYKGSPEVAFSAEGLEELNKNIAQYNDGKKHQPIYKVRIFEEGSKFPLGEKSAKATKYVEAAKGTNLFFGVYQGKGKRTYATIPLNEVIERQKQGLPSVPERNEKGEPLLFSLSPNDLVYVPMEGEIAETIDFNNLSKEQKERIYNINDFSSTTCYFTPNRVAKAICPKEIDKKGKDSGSFDTKTASIEGVQIKEVCIKLKVDRLGNIIKA

SEQ ID NO: 22468 - protein, 1435 aa, unidentified
  REGION 1..1435: note = Cas Enzyme sequence
MKNILGLDLGTTSISFAHIVEDENKEKSEIKELGVRIVSLTTDEQSDFEKGKSITTNANRTLKHGARLNLDRYQQRRKYLIDLLQKANLITSSSILAENGKNTTHSTWQLRAKAVTERVEKEEFARVLLAINKKRGYKSSRKAKTEDEGQAIDGMAIAKRLYDENLTPGQLSLQLLQQNKKLLPDFYRSDLQREFDLVWNFQKQFYPDILIDSFYKELQGKGKDATSKAFSKRYHFDTAENKGSKESVRLQAYQWRAEAMSKQLSKEEVAYVLTEINNNLNNASGYLGAISDRSKELYFNRQTVGQYLYAQLQENRHNSLKNKVFYRQDYLDEFERIWETQASFHKELTDELKKQIRDVVIFYQRKLKSQKGLISFCEFESKEIEIEKDGKTITKSIGARVVPKSSPLFQEFKIWQILNNVTCKRKGIRKKKSSAKSTELDLFNEPSQTIFSLDMECKQLLFEELNLKGDLKSDKVLKLLGYSPQEWEINYNQLEGNRTQKALYEAYLKIVEMEAHDVKDILQIKSAKDDWSLDESPLSASEIKEKIKDIFQALGICTKILYFDPLLPVKEFEKQDSYQLWHLLYSYESDDSTSGNETLYRILEKKYAFKREHARILANVALQDGYGSLSTKAIRKLYPYIKENQYSTACEMAGYKHSKLSLTTEELEARELKNIIPLLKKNALRNPVVEKILNQMINVVNALIEKNSERDAEGKITKYFHFDEIRIELARELKKNAQERYEMTQNINKAKLEHQKISEILQKQFGIKNPTKSDIIRYRLYQELEHNGYKELYTNAPIARDMLFSKNIEIEHIVPKARVFDDSFSNKTLTFHRINSDKGESTAFDYITSLNSEEELNQYLTRVENAYKTKSISPAKYKNLLKKASEIGDGFINRDLRDTQYIAKKAKEILFQVTKNVLSTSGSITDRLREDWGLVDVMKELNMPKYQSLGLTEVEERKEGNKVTVIKNWTKRNDHRHHAMDALTVAFTKPSYIQYLNHLNARKDENNKNYSVILAIEEKETIKVPTNNGKNKRVFIEPIPNFRQVAKKHLEEIFISHKAKNKVVTKNVNKPAGTDKQQITLTPRGQLHKETIYGKYQYYVNKEEKIGVKFDERTIAKVSNPVYREALLKRLQANDNDPKKAFTGKNALSKKPIYLDEAKTKTLPEKVNLTYLEEDFSIRKDISPDNFKDLKSIEKVIDQGVKRILIKRLQDYDNDPKKAFVDLEKNPIWLNKEKGIAIKRVTISGVSNAQPLHIGKDHLGKTTLNKEGNEIPVDYVSTGNNHHVAIYRDKEGNLQEQIVSFFDAVVRAQQGLPIVDKTYKQAEGWQFLFTMKQNEMFVFPNEATGFNPAEIDLLDPKNKKLISPNLFRVQTISVVKYGNSVVRDFKFRHHLETTLQDDKILQGITFQQIKSLEPLRNIVKVRINHLGDIVSIGEY

SEQ ID NO: 22469 - protein, 1063 aa, unidentified
  REGION 1..1063: note = Cas Enzyme sequence
MSNFETSNFVLGLDLGPNSIGWAMLEHTPGNPDDIIGFYDTDYANHPPVGVRVFEAGLANFDSSKEKSLCQDRRTARAARRTIGRRNARRKEMRQYLRKINLLPETKETKTLFETDPYQLRSEALDRKLENFELGRVLYHLCQRRGFKSNRKGGKENTDSKMLASIGELAKSITDTGARTLGEYLYKINEAGDKHIRIRNRHTKRDMFEFEFNAIVEKQRELNPAVLADADVENLHKFIFFQHSFELTDERRERAPSRANLHRAPSVKKCILEPDEFCGQKGEWISHRFRILKEVNNLKISENYSKDRELTEDEREAVINRLSESATIKFDQLRTLLAKMGVDPEATFNLERGDRKTLNGNIVDAKLASAFGKSKWAKFNDVIQVECRQSLLHSESPEDFIRLMTQHGMDDKKADKLSGWTPADGYVAYSLKAMKKIVPFLEEGLDEYYAVEKAYPNRTSADAFYRLPTLSNKDLPQELQNITNPVVGKALVEVRKVINAITREHGIPTRIVVELARNMKAGPDARKRMSKQMREQQEKRDEARDRVDEYGGNRYSRSDVNRWMMWNEQNGQCVYTGQAIPPSELFNGAEWEVDHILPHWQSLDDSYMNKVLVSRNANHDKGDRTPTQWLGKGSQKQLDIIKRAYFMLKHGFPNGKLEKLKQEKVEADGFAQRQLNDTRYISKSVAQYLNLLYPQELRVGQKAVQTCTGGLTSELRRQWGLNNITDDMLDKDGNVVMAVETNLRGEPVKSRANHKHHAVDAIVVALSNRKTMKQYQDYCKVRREDQRPEFPVPWNGLREDTALYINTMFVSHRVMKKLSGALHKETFYGAVKDENGKVVPDKYVTRKKLENLSGKDVDNIRDDEIRSLIQQELYEKGWKGGTAVPKDWSQDGLVSKSGVPIRKVRVEVTMSNVATLGDKQHRFAALGNNNHVEIFKDADGKLLASVVPTMVAASRIKRDNIPAVKNDHGPGTEFVMSLSRKESVMITNPATKERVLCVVQMLSGKFSRPFFKYAMLRDSQDSRPASEGNKTPLLLVGTPKTLSLVDAKKVQVDPLGRIFPAND

SEQ ID NO: 22470 - protein, 1074 aa, unidentified
  REGION 1..1074: note = Cas Enzyme sequence
MRQTSFRYNKNTVRFAVALVKGFSGRRVSIGSEERGINMILGLDIGTNSVGWALIKTDSEGKPSGLHAAGARCFDAGLDGDVGSGRGEPRNAKRREARQARRQGWRRKRRRKKLIGILQKHGLLPETIERTPKGTHEGLVELDKSLKKSNPPKDHREEQLLPYLMRAKAAREKVELFELGRALYHLAHRRGFLSNRKESDKEDDESGKVKGGIKDLREAIESSGAETLGSYFATLDPSEARIRQRWTARQMYIDEFNIIMDEQQKHYDISEEKRKEIYRAIFSQRPLKSVAHLVGRCELEPSERRCIAAAPIYQQFRMLSAVNNLLIEEDEFSQRSLTPEERDTLIEALTTQGDLTFAKIRGKTILGLPRGTKFNLERGGEKRLCGDRTTSAMMSVFGDRWGEMSEKDQDRVINDLRSYEKTDALRNRAKKEWGLSGEPLQAFLDFRPEQGYGNISKKALLKLVPSLEEGLAYSTARLDEYPESFSSDESQDSIPIVEELFPNLRNPVVSRSLSEVRRVVNAICKEFGKPDVIRIELARDLKQSQKHRRDATKKMRDRESEREKAKERIKLETGIENPSRNDILKVLLAEECCFMCPYTGRSFGMRDIISSSPTMDIEHIIPFSRSLDDSFINKTLCDSGYNRNVKKNKTPFETSGGTDEWNKILNRVGKFKSQVRHLKLQRFEMEDVGEELIEEFASRQLNDTRYASKLAAKLVGTLYGGVVDKDGKKRVQTCAGRATAFLRNGWDLNGILDDGPRKTRNDHRHHAVDAVCIALCDAKSVKQIAKAAEKREKLDHRLMGSIRAPWNDFVQSVREVIEGIVVSHRVDCRLNGALHEETNYGVSKLDNGKTLTRIRKPLEALTSSEVNRILDPRVKKAVIDALDGKPAKTVFKDRKDHPKLVTKKGDEIPIHRVTVEPKVKNTVAVGSKGTPRHIAPGSNHHMAVVAVLNDKGEEVKWEGHVVTRLEAIQRKSRGEPIIQRVWEDTEKGQKRIFKFSLRSGDTISIGNGENQGTWLVSGVAASLQIQLRPVNDARIQAEVKATGDYWQPKINSLREIDTKRLSVIPLGTIRDWNA

SEQ ID NO: 22471 - protein, 974 aa, unidentified
  REGION 1..974: note = Cas Enzyme sequence
MYSVKDKREFEQALKSYANKRNIDENTFFENFKKIPPFKNEYGAYSEKAIKKLLPLMRRGKYANENDINIEVKNRIYSIIERLEEVNFDKEKIEIITDDDIPKQVLKSFLDKRENSLNGLNTYQACYAVYNRHSELGEIKYWKTPLDIVEYLDEFKQHALRNPIVEQVITETLRVVKNIWEHFGESKENFFNEIHIELGREMKNPADKRKQLTERINDNQNTNQRIKAVLEELKKDVSVSSQIKPYSPSQQEILKIYEEGVFQNSPDVYKSIKLDEVEKIRKNNSPSQTDIIKYKLWLEQGYISPYTGALIPLNKLFSTEYQIEHIIPKSRYFDNSMNNKIICESAINELKDNETAFAFIGSEKGRIVEMSGGKNVRLFSLDQFETHCNFYFKNNRAKLKNLLSLEIPEGFINRQLNDSRYISKFIKGLLSNIVREENEDNATSKNLVSVTGAITSQLKNDWGLHDKWNEIIAPRFMRLNEITNTKDFGHWDATINAFRTQVPNQLVKGFNSKRIDHRHHALDALVIACTTKDHINYITSLNSQRKNYNLVSKLRELKEVQIKNKLTGELVTKKVAKEYHKPWATFPSDTKKALEKTIISFKQNKRVITKTNNKTWQWIEKNGKLKKELVPQTKGDNRAIRKPLHKETVYGKVLIKRKKGDVSITNAIENGEMIIDKNLKKLIKEKLNFYKNDIKLLKKYFKDNPINIDGKILDKIAVFENVEATAGRIALTEKFTRKQLESITDSGIQKILENHLKNYIDQKGKENFDLAFNPEGLDELNKNIIALNNYKFHHPIYKVRVYEVGNKFALGTTGNKKDKFVEAAKGTNLFFAIYWDMENKKRSYETIPLNIVIERKKQGLGVAPEINEKGHKLQFTLSPNDLVYVPSNVEQENYNFFDKQNILKENIDNIFSVNDFSGVTIYFTPNQFAKSIAPKELDSSFDSKLSKTLDGKIIKDLCWKLKVDRIGNIIKVIR

SEQ ID NO: 22472 - protein, 1045 aa, unidentified
  REGION 1..1045: note = Cas Enzyme sequence
MTKILGLDLGTNSIGWALIENDIILGIGSRIFPEGVVNLGEGEGRETSKNASRTGARGTRRQFFRRRLRKRYLLKELAKHSLCPISSTLIKDWNGSEIFKNEQLQEWLKLNPYELRAKSIKEEISLTELGRVFYHMIQRRGFLSNSRSAGADINEKSTIYKGDSKIGKIGISKTLESISQSKTLGSYLDSIQPKINEPYIGELERIRNRYTTRQMYIDEFELIWEFQKKFHSELTLHLKTIIGGRKKEGYKEDGVLFHQRPLRSQKHLVGYCSFEPKKPKCAISTIPFELFRMYQWLNTLSYDVNGVKQQITKEEREKIVALLLSKEKPSFKEIRKAINKLDGSYQFNYKDEDNIVGSYTISNLSNKKFFGKQWFYFSDEEQEKIWHVLSFFDDRDKLKEYAIKNWSFDKEKASKISKFNLKEGYSNLSRKAINNILPFLQKGFMYDIAVGLAGVRNVLGNDWEKQEQFVLDNVPEIVRSNLKGGYIEPLKSMMKNEFNCTDKQLEKLYHHSSAIEIEKLLDKLPVNINADREIQKIKNPVVITALFEIRKLVNEIIDTYGKPNEIKVELARDLKASKKNRLETRRQQQTLEKENDRVKDELEKLNQRINHTTILKYKLWEECNHTCPFTGQTITISQLFTGEVQIEHIFPWSRSLNDSFNNKTLCFADENRAKGNKTPYEFYSTQGDKKWEEIKLQALSCFKTKANYPNCYNKFKHFVKIKHDEDFISRQLNDTRYISKEAKNYLSKICSDVLVAPGQMTATLRHHWGLNTILNTEDDTKTRDDHRHHAVDALVMACSKRSHLQELSKRNRYHKNHELKDFPDPWLHFRQDAEKAVEQILVSHKKQKNLLTVRTHTTKKNGVIHKNVGVAARGQLHLDTVYGKRKDVFTNEQNYHVRKPITSLTAAEIPKIVDIAIKIIIYKAIEEFGLNINSKDRKSIVKTKEEKVLFEQLLNKPFFLPNKNGNPVPIKKIRIKKNFSNAEPLKENMNQWVDLGKNHHVLIYKDFDGKLKEDVVTFWTAVERKRQGQDVFQLPKDGEEIISTL

SEQ ID NO: 22473 - protein, 1429 aa, unidentified
  REGION 1..1429: note = Cas Enzyme sequence
MKNILGLDLGTTSIGFAHVIESDDPLKSIIKQIGVRVNPLTTDEQTNFEKGKPITINADRTLKRGARRNLDRYQDRRANLIHALFKANIITKETKLAEDGKSTTHSTWRLRAQSVTEKIEKDDLARVLLAINKKRGYKSSRKAKNEDEGQAIDGMEMAKKLYEEKLTPGQFAYALLQAGKKNISDFYRSDLKEELDKVWAFQKNYYPEIFTDEFKKELEGKGQRATSAIFWVKYRFNTAENKGTREGKKVQAYKWRSEAISQQLEKEEVAYVITEINNNLNNSSGYLGAISDRSKELYFNKETVGQYLFKQLLKNPHTQLKNQVFYRQDYLDEFELIWSEQKKHDPELTDEPKVEIRDIVIFYQRKLKSQKGLVSFCEFERKEIEIETGKKKIIGLKVAPKSSPLFQEFKIWQVLHNVLIKKKESKKRMEKKENQSSLVESEKEIFAFSLEERKHLFEELNLKGNLPSKTVFELLGHKIQDWEINYSVFEGNRTNKALYEAYLKILDIEGYDVKELLEVKSNKDEVELDDIQIAASEIKNMIKQIFEILKIDTAILDFDPELDGKEFEKQASYQFWHLLYSYEGDESASGNEKLYELLKKKFGFKREHSQILADVTLSDDYGNLSSKAIRKIYPYIKENNYSTACELAEYSHSASSLTKEEIANRPLKDKLEILKKNSLRNPVVEKILNQLVNVVNALIEKNSKRDESGNIVEYFKFDEIRIELARDLKKNAKERAEMTSSINTAKTNHEKIFKLLQNEFGVKNPSRNDIIRYRLYEELKNNGYKDLYTNSYISREILFSKQIDIDHIIPQAKLFDDSFSNKTVVFRKDNLEKGSKTAYDYISAKHGATQLADFETRIASLFEIGKKNKEEGISKAKYQKLQKKESQIGDGFIQRDLRDTQYIAKKAKNMLFEIARSVISTTGSVTNRLREDWDLINVMQELNFDKFKKLGLTEMVEKKDGTLKERIKDWNKRNDHRHHAMDALTVAFTRHNHIQYLNNLNARKQEANKLHRNIIGIEAKETHVAIDDTGNKKRVFNLPIPNFREQAKAHLENVLVSHKAKNKVVTKNKNRTKSKTGEKIKVELTPRGQLHKETVYGKYRYYTSKVEKVGIKFDLPIIGRVANPRYKQALLNRLSESGNDPLKAFSGKNSPSKKPIYLNDEKTAILPEKVKLVWLEEDYSIRKDVTPENFKDEKSIEKVIDIGTKRILLGRLAEFGGDSKKAFSELDKKPIWLNKDKGISIKRVAISGVKNAEALHYKKDHLGNEILDKRGNQIPVDFVSTGNNHHVAIYINDKGEIQENVVALFEALERVNQGLPIIDKTYNQYLGWVFLFTMKQNEYFVFANTSTGFNPKEVDLLDSKNMLAISPNLFRVQKFTKKDYFFRHHFETTVEDNSNLKGTTWKREGLSGINGIVKVRLNHLGEIVKVGEY

SEQ ID NO: 22474 - protein, 1098 aa, unidentified
  REGION 1..1098: note = Cas Enzyme sequence
MDAAILGDFDKGNSISQTAERTRFRGVRRLRERQLLRRERLHKVLKILGFLPEHYLKGIDFEKHTGKFLSGSEPKLPWVKDRWGKYSFLFQTAFNEMLADFAKHQPSLVFDGKKIPYDWTVYYLRKKALTEMISKEELAWILLNFNQKRGYYQLRGEEEEDNAGKSVEFYALKVLSVEATDEKKGRDIWYNVHLENGWVYRRSSNVPLDWEGRVKEFIVTTDLNPDGTPKLDKYGEVKRSFRAPKEDDWMLIKKRTEADITGTHKTIGSYIYDALLQEPQQKIIGKLVKTVERKFYKEELNFILQKQCAFHAELQDRDLYMRCIEALYPGNEVQRRNIANRDFIYLLIDDVLFYQRPLKTKKSLIANCPYEENEYVNRKTGEIKTAPLKCIAKSHPLFQEFRLWYFLSNIRVYQKEREVNGTLHLDVDVTTEFLKTEDDYVALFDWLNSRKEIDQKAFLRYPAFGLKKEINNYRWNYVEDKFYPCNETRHAILSRLEKAGIGIDFLSDEKETALWHILYSVSDKQEIEKALATFAVKNGLNESFVEVFKKFPPFKSEYGAYSAKAIKKLLPLMRCGKYWDMSLIDGTTKERIERIIAGECDESIGAKVREKAMNLSDISCFKRLPLWLACYVVYNRHSEDKEITKWETPADIDAYLAAFKQHSLRNPIVEQVITETLRVVRDIWKQVGKIDEIRIELGREMKNPADKRKRMTTQILENENANLRIKALLAEFVNPEYGVENVRPYSPSQQEILRIYEDAVLKGEEQIPEDIDVILKKFNTSKLPTKSEFLRYKLWLEQKYRSPYTGELIPLAKLFTAAYEIEHVIPQSRYFDDSFSNKVICESAVNKLKDNQLGYEFIKNHHGQKVEVGFGKTVEIFSVDSYERFVKEQYAKSGIKMKKLLMDDIPEQFIERQLNDSRYISKVVKGLLSNIVREKNDSGEYEPEAVSKNILVCTGSVTDRLKKDWGMNDVWNSIVSPRFERLNALTETQCFGHWENKDGKKVFQTAVPLEYQKGFSKKRIDHRHHAMDAIVIACATRNHVNYLNNESASRNAKISRYDLQRLLCDKSRGDGNGNYRDYKETMDYFYARCKGSVEWDNS

SEQ ID NO: 22475 - protein, 1506 aa, unidentified
  REGION 1..1506: note = Cas Enzyme sequence
MKTILGLDLGPNSIGWAKVEVDDEGNYLRNIKLGSRIIPMTQDMLGDFDKGVKVSQTATRTDFRGNRRLIERHLLRRERLHRVLHALKFLPKHYEDAIGWDRNEPATYGKFVNNSEPKLAWERQEDGSMRFLFMESFNEMVADFAQNQPSLVSDGKKIPLDWTIYYLRKKALTQPIKKEELAWILLNFNQKRGYYQLRGEEEEDNLTKRKEYYKLKVVGVEADGAPKGGKTWYNIHLENGWTARCQSKIPLDDWVGKVKEYIVTTEYEDDGKTPKCDKEGKVKRSFKSPEKDDWQLIKTRTEKFIDDSNKTVGAFIYDHLLEKPFDKIRGKYIRTIERKYYKNELREILREQAKYHEGLDSLEALKICAEELYKNNQQHREYLLKKDMIFLLLNDLIFYQRPLKSKKSLIADCPYEVYKYDDKLTGKKGQKKIKCIAKSNPYYQEFRLWQFIANLRLFSVTDGKEVTAEYLKTEEDYVRLFSFLNDRKDIKQETFLRSFLKLKKVPIGSEKIYPIRWNYIEDANKSYPCNATRHELLLAFDRADIPRELLDVEGREYRLWHLLYSIEAKEETESALRKLKANKAFGDLNIDDAFVNSFLKIKPFEKEYGAYSEKAIKKLLAVMRRGSLWKEADICEATKQNIAKILQNDIDEKLKKKIEAAVSSFNKLSDFQGLPTWLACYVVYGRHSEAAQIQCWQSPEDLKTYINKFKQHSLRNPIVEQCLLETLRTVYDIWKDAGQIDEIHIELGRNMKSTAEQRARRTKDILRNENTNLRIKNLLVELKNDDKIENVRPYSPSQQEILRIYEEGALQELSKEDEMFEDISKISKMAQPSPTELSRYKLWLEQKYRSPYTGRVIPLSKLFTTAYQIEHIIPQSRYFDDSFNNKVICESEVNSLKDNMLGYEFIKECGGRIVHCTLLGDVKIFTKEEYKDFVTKHYIDNTYKRDKLLLEDIPQEFSARQLNDSRYISKMVQTVLSNIVRAENEQEATSKFVVSCNGAITDRLKKDWGLNDVWNSIVCPRFKRLNEKTKTNAFGHWEDKAGKHVFQTTVPLELQRGFSKKRIDHRHHAMDALVIACASRNIVNYLNNESANSPEKREDLRKKLCDEKRKIRKPWKTFTQDAREALSDVVVSFKNYVRVINKATNYYEHYSSSGNKVMISQKGNDMWAIRKPLHKESVFGRVNLRIKVTVSLKKALENIPAICDKTLRDYINALVEKHFNTRQLLAHFKSINYHLNRQHVDKVEVWQFSDEKIEMVARRKSLDTSFDDKQISSITDTGIQKILLNYLQTKDGNAEIAFTPEGIEEMNKNISLYNDGKAHQPILKVRVATPKGMKYPVGQTGNKATKFVVAEKGTNLYFAIYENELGVRSYDTIPLNIVVERLKEGLSPVPQANEADIPLKFYLSPNDLVYVPTKENEDELCRDRIYKFVDSSGTTANFVPHTSANTIYNVDKEYAEKCCNGAVILNEYGLGSSQSKNQRALTGEMIKEICWKLKVDRLGNIIKVIK

SEQ ID NO: 22476 - protein, 1494 aa, unidentified
  REGION 1..1494: note = Cas Enzyme sequence
MKNILGLDLGTNSIGWALIDNESHRIIKSGSRIIPMDAATMGDYEKGNLKSAASERTSFRGMRRLYERAKLRRERLLRVLNILGFLPEEFRRQIDFEHHPGQFIDGKEPLIAYHHDENGQRVFSYMSAFEEMLTDFRATQPELVRDGRRVPYDWTIYYLRHKALTQPVTKEELAWIILNFNTKRGYYQLRSESEEVTTNKNEEYAELKVVSVEKTGEDKKRAGYYWYTITYDNEAEQKITSTIPPRQIGDKVELIVTTARDKAGETKKSVRSPKEDDWTLMKKRTEHNIEEEECTVGSYIYQHILADPTVKVRGKLVHTIERKFYKKELKQILNKQKEFIPELQDTSLYEACIKELYRNNEAHIQSIANKDFTDLFVNDIIFYQRPLKSKKSTISNCPYESYYYKNKETGELIRNPIKCIAKSNPLYQEFRLWQFVHNLRIYKKSEEVSGRLQTDVDVTDRFLTTPDDYAKLFSWLNDRKEIKQKELLRYEAFGLSKSYGDYRWNFVEDKPYPCNETLYEINRRMKSILSDKKLSSEAYQQLWHILYSIDDPIEIRKALTSFAQNQKINSDDFVNAFYQYVPEKTKSYGAYSEKAIKKLLPLMRRGSYWAIGNIDEKTRRRLDNIINGVADDSISTCTREKLNNLTDITMCQGMPLWQACYAVYDRHSEAADTTKWEQPDDIDTYLSTELKQHSLRNPIVETVISETLRVVRDIWKTYGRPEEIHVELGRNLKQDAKSRKQDAIRMAENEQTNLRIRALLQELSNPECGVENVRPHSPSQMELLKIYENEVLQSTDDIPEEISNIIKDLGKTDPKKRPSLSDITKYRLWLEQKYQSPYTGHIIPLSKLFTPAYQIEHVIPQSRYFDDSISNKVICEAEVNKEKDRMLGYEFIINKGGSIVKGSFGQEFKIFDKVQYEDFVKQRYAHNKTKMKKLLMDDIPDGFIQRQLNDSRYMSKKIISILSNIVREDGEKEATSKHIIVTSGAITDRLKKEWGIKDVWNDIIAPRFKRLNKLTDSNNYGMETEKEGRQYFQINVPTELSTGLIKKRIDHRHHAMDAIIIACTTRNHVNFLNNSTAASDQKDIRRDLQHTLCTKTKTDSNGNYIWRFNKPWDTFTQDTRQELEGIIVSFKQNLRIINKMSNYYQHYVDGRKTIGRQNKGDGWAIRKSLHKATVSGKVNLKRSKTVGFKESLNDWSAIKDKTSKAILQKIIAQYKNYDPKTIFKYFKDRNFKVEGKDFSKLEVYYNTSDKEPMSAHRVNIDTTFDEKEIRSITDTGIQKIMLKHLHTYDDAQGKTHPEAAFSPEGIEKMNQNIRMLNGGKDHKPIFKVRKAEILGMKFAVGERGHKDKKWVEADKGTNLFFAIYESEENKRSYSSIPLNEAIDRLKRGENIADERDQNGNKLLFVLSPMDLVYVPDPDDAHIDEVKGNNNIFKMVSCTGKQCFFVPETYANIICKGKELGSLNKVESYDGTNIKESCYKITVDRLGKVRKIFKG

SEQ ID NO: 22477 - protein, 1467 aa, unidentified
  REGION 1..1467: note = Cas Enzyme sequence
MDAAILGDFDKGNSISQTAERTRFRGVRRLRERQLLRRERLHKVLKILGFLPEHYLKGIDFEKHTGKFLSGSEPKLPWVKDRWGKYSFLFQTAFNEMLADFAKHQPSLVFDGKKIPYDWTVYYLRKKALTEMISKEELAWILLNFNQKRGYYQLRGEEEEDNAGKSVEFYALKVLSVEATDEKKGRDIWYNVHLENGWVYRRSSNVPLDWEGRVKEFIVTTDLNPDGTPKLDKYGEVKRSFRAPKEDDWMLIKKRTEADITGTHKTIGSYIYDALLQEPQQKIIGKLVKTVERKFYKEELNFILQKQCAFHAELQDRDLYMRCIEALYPGNEVQRRNIANRDFIYLLIDDVLFYQRPLKTKKSLIANCPYEENEYVNRKTGEIKTAPLKCIAKSHPLFQEFRLWYFLSNIRVYQKEREVNGTLHLDVDVTTEFLKTEDDYVALFDWLNSRKEIDQKAFLRYPAFGLKKEINNYRWNYVEDKFYPCNETRHAILSRLEKAGIGIDFLSDEKETALWHILYSVSDKQEIEKALATFAVKNGLNESFVEVFKKFPPFKSEYGAYSAKAIKKLLPLMRCGKYWDMSLIDGTTKERIERIIAGECDESIGAKVREKAMNLSDISCFKRLPLWLACYVVYNRHSEDKEITKWETPADIDAYLAAFKQHSLRNPIVEQVITETLRVVRDIWKQVGKIDEIRIELGREMKNPADKRKRMTTQILENENANLRIKALLAEFVNPEYGVENVRPYSPSQQEILRIYEDAVLKGEEQIPEDIDVILKKFNTSKLPTKSEFLRYKLWLEQKYRSPYTGELIPLAKLFTAAYEIEHVIPQSRYFDDSFSNKVICESAVNKLKDNQLGYEFIKNHHGQKVEVGFGKTVEIFSVDSYERFVKEQYAKSGIKMKKLLMDDIPEQFIERQLNDSRYISKVVKGLLSNIVREKNDSGEYEPEAVSKNILVCTGSVTDRLKKDWGMNDVWNSIVSPRFERLNALTETQCFGHWENKDGKKVFQTAVPLEYQKGFSKKRIDHRHHAMDAIVIACATRNHVNYLNNESASRNAKISRYDLQRLLCDKSRGDGNGNYRWIIKKPWTTFTQDAREALSGIIVSLKQNLRIINKTTNIYQHFDANGTRVYEKQKIGDSWAIRKPMHKDTVFGAVNLRKVKVVRLSVALDTPSMIVNKRVKNKVLELLSYKYDKKKIEKYFKENAFLWKELDIAKVAVYYFTENTTEPLVAVRKSLDSTFNEKKIASVTDTGIQKILLNHLKSKEGKAELAFSAEGIEEMNRNLLQLNDGKGHQPIYKVRVYEPRGNKFKVGVLGNKGVKWVEAAKGTNLFFAIYITEDGNRTYETIPLNWVIEREKQGLVPVPDRNEKGDKLLFWLSPNDLVYLPTEEERDFGRINEPIDRGRIYKMVSSSGNQCFFIPQSISNAIISTKELGSNNKAEKSWDGEMIKNICIPVKVDRLGRIIEVKYRVNE

SEQ ID NO: 22478 - protein, 1425 aa, unidentified
  REGION 1..1425: note = Cas Enzyme sequence
MKHILGLDLGSNSIGWALIEQDFDNKQGKILGLGSRIIPMDQGILGEFERGNKVSQTAERTGFRGIRRLRERHLLRRERLHRVLHLLGFLPAHYDAQIDFTKRFGKFIGDSEPKLAYNNEGFIFLESFNEMVEDFKKHQPQLFYIKSNGEESKIPYDWTIYYLRKKALYEKISKEELAWIILNFNQKRGYYQLRGEEEEKSTKNVEFYSLKITDVIADTPNNKGEIWYSIHLENGWVYRRASKISLEDWKGKVRDFIVTTELNEDGSIKLDKEGKEKRSFRAPNEDDWNLLKKKTEQNITLSGKTVGEYIYDHLLQNPNQKIKGKLVRTIERKFYKEELKAILEKQVALQPELFTEELFMDCVRELYKNNEIHQNSLFSKDFVHLFLNDIIFYQRPLRSQKSNISSCSLEYRFCIDKETKQRRKTYLKVISKSNPYYQEFRVLQWLSNLKIYKKEDDKDVTSEFISSIEDKETLYEFLMSEKEVSNKSILEFLLMKSLKETYPFAKETELKKELKKEITKYRWNYVYEEGNDNKKYPMNETGYEIKKRLKEVKNIPDNFLTKDIEYQLWHIIYSVTDKYEYEKALMKFAQKHNLDTESFVENFKKIKPYPSDYGAFSEKAIKKLLPLMRFGKYWNYSDISEPVQARISDIINGVDNESIKTIVREKAEKYQLSQEADFQGLPLWLAQYIVYGIHSEAANIQHWTSPSNLEEYLKGFKQHSLRNPIVEQVVTETLRVVKDIWEYYGKGEENFFDEIHIELGRELKKTAEERNRMTREINANEETNLKVKKELQEFFENKSAENVRPYSPIQQEKYRLWLEQEKESPYTGQPIPLSKLFTDEYQIEHVIPQSRFFDDSLSNKVICESAVNAQKGAQLGLEFIKKHGGEILDIGLNKKVTILNEKEYKELVNKYFANNRGKKAKLLMEEIPEKMVERQLNDTRYISKFISQILSNIVRSPQEDNGVNSKNIIPCTGKITAALKQDWGLNDVWNDLILPRFERMNNLTQTELFTTYSEKYQKKIPTVPLEHAKGFQKKRIDHRHHALDALVVACATRSHINYMNNQHALDKHKAKEEKQNARIDLRTVLCEKKYNDNAEDKYNWTFKKPWNTFTQDVRSALEMVVVSFKQNLRVINKATNYYEKWVEERGKMVKKKVKQEGINWAIRKPLHKETISGKITLERVKVGKGKILTATRKSIDPSFTEKTIASITDTGIQKILLNYLAYKGSPELAFSPEGIEEMNKNIAQYNDGKDHQPIYKVRIFEEGSKFPLGEIGTKSQKYVEAAKGTNLFFGIYQGKEKRSYATIPLDEVIERQKQGLTSVPELNEKGEKLLFSLSPNDLVYVPIEGEDTESIDFTNLSKEQRERVYKTVSFTGNQCFFVRQDVATSIVNKMEYSSLNKMEKGIDGIMIKESCIKLKIDRLGNISKA

SEQ ID NO: 22479 - protein, 1380 aa, unidentified
  REGION 1..1380: note = Cas Enzyme sequence
MKRILGLDLGTTSIGWALVNEAENNNETSSIVRLGVRVNPLTADEKSNFEKGKAITTNAERQKGHTARINLQRYKLRRQNLYNCLKEYGWFGNNALFEEGKASTFETYKLRAKAAEEEISLHELARVLFMLNKKRGYKSNRKANNKEDGQLFDGMTIAKKLYEEHLTPAEYSLQLLNKGKRFTQGYYRSDLNAELERIWNEQKKYYPEILTDEFKQQLKGKTKVNTNKIFLAKHHIYSADLKGSDKKMQSLKWRVEALRQQVDKEILVYVISDLNGQIANTSGLLGAISDRSKELYFNKQTVGQYLWASLEENPHISIKNKPFYRQDYLDEFEKIWETQAAFHKQLTPELKQKIRDIIIFYQRPLKSKKGLISVCELEQRKVKTVIDGKEKEITIGPKVAPKSSPVFQEFRIWQNINNLLLINNDTNEKRSLNEEERNLLYQELSIKAKLSKTDALKVLNKNGKQWELNYKEIEGNRTQAILFDCYNRIITLTGHEECNFKKLKASEIRHYVTTIFKNLGFNTDILDFNPLLEKHELEKQPMYMLWHLLYSYESDNSRTGNNSLLRKLETTFGFPEEYATVLCDVTFEDDYSNLSVKAMRNILPYLQAGDDYSQACAHAGYNHSRRSLTKDELEEKVYKDKLELLPKNSLRNPVVEKILNQMINVINTIVAEYGKPDEIRIEMARELKSSAAEREKITRAISQANTENQRIRDILEKDFALSYISRNDIIKYKLYEELEANGFKTLYSGTYIPKEKLFSKDFDVEHIIPKARLFDDSFSNKTLEARNINIAKSNKTAFDFIKGEYGDEGAEVYKKKLDMLLSKDVISKAKYNKLLMSEADIPSEFIERDLRNTQYIAKKAYEILSELVRTVTPTTGEITNRLREDWQLVDVMKELNFEKYQKLGLAEVVEDRDGRKIKRIKDWTKRNDHRHHAMDALTIAFTKPAFIQYLNNLNARSNKSSSIYAIENKELHRDDNKLKFNAPIPINEFRVAAKQHLSSILISIKAKNKVMTQNVNKIKTKHGIIKKIQLTPRGALHNDTIYGTKKRPIIKKVKVGAALDELTINKISSQAIREALLKRLSEYSGDAKKAFTGKNTLEKNPIYLNAGRTKTVPSLVKTVEWESFHPTRKLIDKDLNVDKVVDKCIRNILKTRLEEFNGDAKKAFSNLEENPIYIDEAKKIALKRVSIEGVLSAIPLHTLKDQAGKLIIGKDGKPVLGNYVQTSNNHHIAFYTDEKGNLQDKAVSFFEAAERKSQGLPIVDKNYNHDKGWRFLFTMKQNEYFVFPNEATGFIPTEVNLMDEANYDMISPNLYRVQKVSRIEKGASTSRDYWFRHHLETILNDDSRLKNSAFKRINSLKPLEGIIKVRINSIGKIVAVGEYD

SEQ ID NO: 22480 - protein, 1375 aa, unidentified
  REGION 1..1375: note = Cas Enzyme sequence
MKKILGLDLGTTSIGWALVNESENKDEQSSIVRLGVRVIPLTVDEKGNFEKGKAITTNADRQQVHAARINLQRYKLRRENLRDCLQKQGWIGSEPMYEDGKSSTFETYKLRAKAAVEEVSLHEFARVLFMLNKKRGYKSNRKANDKEDGKLFDGMTIAKKLYEERLTPAEYSLRLLYKGKKFTPEYYRSDLIEEFEKIWNEQQKYYPEILTDEFKQQLEGKAKSNTSKLFLGKYGIYSADTKGLDRRLQPLKWRVEAMKQQVDKDVLAFVISDLKGQIANTSGLLGAISDRSKELYFSKQTIGQYLWASLQENPHISIKNQPFYRQDYLGEFEKIWETQATFHKELTSELKQEIRDIIIFYQRPLKSKKNLIAVCELEQRKVKVTVDGKEKEITIGPKVAPKSSPMFQEFRIWQNLNNILLLDHETNSKRPLYEEERNLLYEELSVKEKLSKTEALKVLGKKSKQWDLNYKELEGNRTQAVLYDCYNRIIVMSGHEECNFKKLKASDIRHYVKMIFKNLAFNTDILCFDSSLKGHELERQPMYRLWHLLYSYEGDNSRTGNDALLRKLETAFGFPKEYAAVLADVVFEDSYGNLSVKAMRDILPHLQAGKDYSQACEEAGYKHSRRSLTKEELNQKVYKERLELLPKNSLHNPVVEKILNQMINVINAVIDEYGKPDEIRIELARELKSSADERESITRGINQGNAENKRIREILEKEFALSYISRNDIIKYKLYEELKPNGFKTLYSDTYIPKDKLFSKDFDIEHIIPKARLFDDSLSNKTLEARDVNIAKSNKTAFDFILERYGEQGVKAYKTKLLRLLEEGAISNKKYNNLLKTEADIPSGFIDRDLRNTQYIAKKAYEILSELVKIVTPTTGSVTNRLREDWQLVDVMKELNFEKYLKLGLADVIEDRDGRKVKRIKEWTKRNDHRHHAMDALTIAFTKPSYIQYLNNLNARSDKSGSIYGIEVKELHREEGKLRFNAPLPINEFRAEAKRHLKSILVSIKAKKKVMTQNVNKIKTKHGIIKKEQLTPRGELHNATYYGTKKRPLVRMVKVGAALDEATINRVCSPAIRAALLKRLNTYNGDAKKAFTGRNSIDKNPIYLDIEQTKLVPVLVKTIEWGMYHPIRKRITPDLKIDKVIDKGIREKLKARLAEFNGDAQKAFSNLDENPIYMDEAKQITLKRVSIEGVLSVIPLHTLKDKAGKLIIGSDGRPVFGDYVQTSNNHHIAFYKDDKGNLQDNPVSFFEAAERKSQGVPVIDRRYNCDKGWHFVFTMKQNEYFVFPNEATGFIPSEVDLLDEANYCIISPNLYRVQKLSKASGRDYWFRHHLETMLNDDLRLKNSTFKRINSLKGLKDIVKVRINSIGKIVAVGEYD

SEQ ID NO: 22481 - protein, 1425 aa, unidentified
  REGION 1..1425: note = Cas Enzyme sequence
MTQKIFGLDLGTNSIGSSVRNPDLGSNLTEQLEFFSSDVFDNGVSKGESGREYSLAGVRSAHRRSRRLNEVRRRKLWATLALLIEKDLCPMSPESLEAWKTYDKKRGLYRRYPIGDEAFNSWILLDFNGDGKPDYSSPYQLRRELVTQQFDFTQKTERYKLGRALYHIAQHRGFKSSKGETIAAQEENDKIQITAESLDIASEMKASEEKISGGLQTYIEENGLRTVGEAFAKLEDEGIRIRNNSDYCAVRSQFKEEIKQIFKFQKGLSLESELYERLVSEKKGIGTIFYKRSLRSQRCNVGKCTLERNKPRCPVGHPEFEKFRAWSFINNIKIRSSVEDIFVYLPITLRKELYYERFLSYVKTDFKFEEIRKYLEKRLGLHFSYEDKTINYSDDTSVAGCPITVRLKKVLGDDWENFYKKGNKKKQGQGRINHEEHQVSYTWSDIWHICYNADELDSIEAFARNVLQFDENKIKDLKRLWAAIPQGYAMLSLKAIRNINRLLLLGLKYSDAVLLAKLPEIVPMSDDEILFISTEFLKLEKQLNEEKRIKAIINSLIAKYKSELEENRFADHNYEYQLDDEDEKIIVKQIEESIGKKCWALMGVEEQMEILQGVRAGYQKFFRSHERKFVELPKLGERLVNFLVNRYPNVGFEKWKQLYHPSQIAIYRPVQAKGDHSLLRLGNPNIGAIKNPVVMKVLNILRKRVNQLLDDGLISPDETRVVVETARELNDANTKWAIDNYDRNRSDERKRIEKILQEFYPNRKTISEQDIDNALYVLEQREGDCYTKDKGFYYKKDITRYKLWLEQGGLCMYTGKTINLSNLFNPNAFDIEHTIPESISFDSSDQNLTLCDAHYNRFIKQNRIPTDMPNYNKDMIIEGKEYSAIKPRLQMWEERIKRLRRKVEYWKAQACRAQDKDRKDKCIQQKHLWEMELSYWSAKLKRFTVTEVTDGFKNSQLVDTRIITRHATLYLKSIFSHVEVQRGSTTAKFRKILGIQASNEKKDRSLHSHHAIDATMLTVIPVSAKRDRMLELFYKIEEVEKAFKYYGNEGKNGLKQYLEGLHLKLTKEIKGCYIGRNVCNLEDFINDNIIVNHHYKNQAMTPAHRKLRKRGKIVGSMAHPQWQTGDSLRGKIHEDSYYGAITQFAKDIEGNVLVKDGQVQIDPTVIYVIRRTLKYKQSAQDSGFASWEDLENVIIDKNLFALMKAQFPEGTSFKEACEEGIYMIKKGKPGSEDVKMHRIKHVRCKAPKAGLKLKEQTYKSSKEYKQYFYAAVGDLYAMCSYTNGTIHIFKVYSLYDISCNRKAGIEDVPQFIIDNKGNRLSLEYKLQKGDMVLLYKDSPEELRDLDQINLKQRLYKVNRFESKGNLILLTNHLSATKERGSSLGKITSYQNLPAAIRCGISTIKFLIMGDHHDFVIRKGNIEFNR

SEQ ID NO: 22482 - protein, 1426 aa, unidentified
  REGION 1..1426: note = Cas Enzyme sequence
MEQKTLGLDLGTNSIGISLRNPALGDNLKEQLEYFSSDIFEAGVGTDKSGEFSYAAQRTTFRSARRLKLHRRRRLQATLRLLMDHNLCPLSEESYKQWSVYDKTQNLKREYPIGDEGFNRWIKLDFNADGKPDYTSPYQLRCELATTQLDFSSPENKFKLGRALYHIAQRRGFKSSKGETIAEQEKNEKFSANSDDLEQEMKKSEMKRSKGLRELLETQGLKTIGQAFAYLESQGTRIRNNEDIQATRDLYEKEITYIFNFQKELSIESELYKRLVSTKKGEGTIFYKNPLRSQKGLVGKCTLEPKKGRCPIGHPEFEKFRAWAFINNIRYRRTIDSDWQEPTTEMKERLYREIFTARVKADFLFSEIRKWLEKELEVQLHWDNNKSLRTINYADKQNVAGCPVTARLVKLLGTDWERFQQEGRKEHKTHSKQHPTKHTVCYSALDIWHVCFQADELEDMQSFAKDSLQWDDEKCKLLLRVWTSIPQGYAMLSLKAIRNINRMLCRGLKYSDAVMLAKVPEIAGMNENEIDTLIETFSKDLKTEVDRTKDIYIITNSLIADYKSLSFEDRFAEHDTSYCLQESDKEDIVQHIIKHFGEVTWGLMDAEEQETLMNEVEQLYQNFFSKTKRNFYDIPTYASTLRTFLCEKFPHVDEQAWARLYHPSQIASYHPERDKNCPDSWRLGTPNIEAIRNPVALRTLNILRRKINALLDANMIDPLETRVVVETTRTLNDANMRWAINRFQKEREEQNKTIRSILEKEYTTRAISETDINTARYILEQREEHIYRTEKTGELQHGFSFNIDAKRYKLWLEQGGICFYTGKVINLTNLFDDNAFDIEHTLPRSKSFDNSDANLTICDAHYNRYIKKNILPAHLPNFEHDQTINGTLYTAIKPRLEMWRKRVERLKVNVDFWKNRTRRAQDKDTRDYCIRQRHLWQMELNYWHEKLSHFEMEEIKEGFRNSQLVDTGIITRHAALFLKSLFKNVEVQKGSVTADFRKILGIQSVNEAKNRDKHSHHAIDATILTTIPIAAKRDRMLEIFLRIKELKKILCFSKDTNKQQEIISLNQKLQYEINSCHLGNDIASLPSYIENNIIIRHLRKEQTQQNSRRTIRIRGKKIYVTDHHGNKHKKWSSGDSIRGELSGQSFYGAITQWKKKTNRNETTNQKEQNIIDPTIYYVIRKPLVFKNNTSAPGFSSWEDLEKQIVNKALIPMMKSQFCEGTSFKEACGQPIYMLNRKGEKINVLRHIRCYVRIKNPIAVKQHTFLSNKPYKQTVYASVGSLYAAAEYTNGNKRQFVIYSLKDIAQNKKKNNEIIPSKILNGTKTLTLQRLLHAKDSILIYEESPEELKKLSMTELSKRLYVIKGFEAAITRIKAVNHLYNIDETGETITDYQNLPITIRLSLNKLKFLLHGYDFKFTTSGLEFLDK

SEQ ID NO: 22483 - protein, 1494 aa, unidentified
  REGION 1..1494: note = Cas Enzyme sequence
MPMKHILGLDLGSNSIGWALIEQDFDNKKGKILGLGSRIIPMDQGILGEFERGNKVSQTAERTKFRGIRRLRERHLLRRERLHRVLHLLGFLPAHYDAQIDFTKRFGKFIGDSEPKLAYNNEGFIFLESFNEMVEDFKNHQSQLFYIKSNGQESKIPYDWTIYYLRKKALYEKISKEELAWIILNFNQKRGYYQLRGEEEEKSTKNVEFYSLEITDVIADTPNNKGEVWYSIHLENGWVYRRASKISLEDWKGKVRDFIVTTELNEDGSIKLDKEGKEKRSFRAPNEDDWNLIKKKTEQNIVFSGKTVGEYIYDHLLQNPNQKIKGKLVRTIERKFYKEELKAILEKQVALQPELFTEELFVDCVRELYKNNEIHQNSLSSKDFVHLFLNDIIFYQRPLRSQKSNISSCSLEYRFCIDEETKQRRKTYLKVISKSNPYYQEFRVLQWLSNLKIYRKEDDKDVTSEFISSIEDKETLYEFLMSEKEVSNKSVLEFLLMKLLRETYPFAKETELKKELKKEITKYRWNYVYEEGNDSKKYPMNETGYEIKKRLKEVKNIPDNFLTKDIEYQLWHIIYSVTDKYEYEKALMKFAQKHNLDAESFVENFKRIKPYPSDYGAFSEKAIKKLLPLMRFGKYWNYSNISEPVQARISDIINGVDNESIKTIVREKAEKYQLSQEVDFQGLPLWLAQYIVYGIHSEAVDIQRWTSPSDLEEYLKGFKQHSLRNPIVEQVVTETLRVVKDIWEYYGKGEENFFKEIHIELGRELKKTAEERKRMTREINENEETNLKVKKELQQLFENKSAENVRPYSPIQQEKYKLWQEQKERSPYTGQIIPLSKLFTDDYQIEHVIPQSRFFDDSLSNKVICEAAVNAQKGAQLGLEFIKKHGGEIIEIGLNKKVRILTEKEYKELVNELFANNRGKKAKLLMEEIPEKMVERQLNDTRYISKFISQILSNIVRSPQEDNGVNSKNIIPCTGKITAVLKQDWGLNDVWNDLILPRFERMNNLTQTELFTTYSEKYQKKIPTVPLEHAKGFQKKRIDHRHHALDALVVACATRSHINYMNNQHALDKHKAKEEKQNARIDLRTALCEKKYNDNAEDKYNWTFKKPWNTFTQDVRSALEMVVVSFKQNLRVINKATNYYEKWVEEKGKKVKKKVKQEGINWAIRKPLHDDLPYGEIKYQTNYLKISENISKRKFIIDEFIRNQVERIYVENHSKNNLTKKYLKEYPVIDEKGKEVVSTDFRIEVIKYRKRKPISILSDRNSRTGITTIEKMLQAINKIADNVLKKELLLHLEQNNNDIDKAFAVEGIERFNSERKTPVYRLPFIEDGEKKIKLGSKGKYVEAAKGTNLFFGIYQGKEKRSYATIPLDEVIERQKQGLTSVPELNEKGEKLLFSLSPNDLVYVPMEGEDTENIDFTNLSKEQRKRVYKTVSFTGNQCFFVKQTIASLIKSYDPQTKIGELESKNKLEVTICSRIKIKESCIKLKIDRLGNISKA

SEQ ID NO: 22484 - protein, 1380 aa, unidentified
  REGION 1..1380: note = Cas Enzyme sequence
MRKILGLDLGTTSIGWALVNEADNDNESSSIVRLGVRVNPLTVDEKSNFEKGKAITTNSDRQQRHGARINLQRYKLRRQNLRNLLQDQGWLCNEALYEEGKGTTFETYKLRAKAAEEKISLHEFARVLFMLNKKRGYKSNRKANNKEEGQLFDGMTIAKKLYEEHLTPAEYSFQLLSKGKKFAQDYYRSDLIAELERIWNEQKKYYPEILTDEFKQQLEGKTKVNTNKIFLAKYGIYSADLKGLDRKLQPLKWRIEALKQQVSKEILAFVISDLKGHIANTSGYLGAISDRSKELFFNKQTVGQYLWASLKENPHISIKSKPFYRQDYLDEFEKLWETQAAFHKQLTPELKHEIRDIIIFYQRPLKSKKGLISVCELEQRKVKVTIDGKEKEITIGPKVAPKSSPVFQEFRIWQNINNILLINNDTNEKHSLNEKERNLLYQELSVKVKLSKTDVLKILNKKGKQWDLNYKEVEGNRTQAILFDCYNKIISLTGREECDFKKLQASEIRHHVTTISKNLGFNTDILDFNPSLVKHELEEQPMYMLWHLLYSYESDNSRTGNEALLRKLAIAFGFPKEYATVLCDVVFEDDYSNLSVKAMRKILPYLEVGNDYSQACAYAGYKHSRRSLTKEELDQKVYKERLELLPKNSLRNPVVEKILNQMINVINTIIDEYGKPDEIRIEMARELKSSAAEREKATRAISQANAENQRIREILERDFALSYISRNDIIKYKLYQELEANGFKTLYSDTYISKEKLFSKDFDVEHIIPKARLFDDSFSNKTLEARDINLAKSNKTAFDFVQEKYGTEGAEAYKKKLDILLSKEVISRAKYNKLLMKEADIPSEFIERDLRNTQYIAKKACEILGEIVKTVTPTTGEVTSRLREDWQLVDVMKELNFEKYQKLGLAEIVEDRDGRKIKRIKDWTKRNDHRHHAMDALTIAFTKPAFIQYLNNLNARSNKSNSIYAIENKELHREDNKLKFNAPIPIHEFRAEAKRHLSAILISIKAKNKVMTQNVNKIKTKQGVIKKIQLTPRGALHNETIYGTKKRPIITMVKVGAALDEATINKISNLTIREALLKRLAEYNGDAKKAFAGKNSLEKNPIYLNEEKTKVLPALVKTVEWETYHPIRKPITPDLKIEKVIDKGIRKILKARLAKFNGDAKKAFSNLDENPIYIDEAKKIALKRVSIEGVLSAIPLHTLKDQAGKPIIGKDGKPVLGNYVQTSNNHHIAFYYDENGNLQDNAVSFFEAAERKSQGIPIVDKNYNHDKGWRFLFTMKQNEYFVFPNEATGFIPTEVNLMDEANYDMISPNLYRVQTISKIIYDKSIIRDYLFRHHLETTVERIPNLKGITYKQLKSLPHLKGIVKVRINAIGKIVAIGEYD

SEQ ID NO: 22485 - protein, 1438 aa, unidentified
  REGION 1..1438: note = Cas Enzyme sequence
MKYIKYILGLDIGSNSIGWALILLDLLQKTKRIIATGSRIIPMDQKVLSDFGKGITISPTAQRTSYRNARHCRERHLLRRERLHRVLHILGFLPTHYDKQIDFSKRYGKFVDNTEPKIAYNERKFLFMDSFQEMLADFKIHQPDLFYTKKNGEESKIPYDWTIYYLRKKALSRKISKEELAWIILNFNQKRGYYQLREEEEENKENDFEIISSKIISVIKKDKDKKYNKYWYDIILENGLVYQAAFYNDFVYNWINQDREFIIERTSLKNGTEKVKLSYLPTFDEIDKMDKKEQDKYYKKIKIKTENSIGNKTVGCYIYDHILQNPNEKIKGKLVRTIERKYYKEELKAILEKQVALQPELFTDQLFADCIRELYSKNEAQQRNLAARDFVHLFVEDIIFYQRSLRRQKSTLANCSLESRSYIDKDSHTRKEAPLKVCPKSNPYYQEFRVLQWLQNLKIYEIDTDQEVTHEFIKTLEDKQQLFDFLMDQKEIDCEELLKYFLNQTYPNAKEKALKSELKKWKDTYRWNYVYDIGEKSSKKYPMNETRYELKRHLEKVANLPDDFLSSEVEYLLWHLIYSVKDKVAYEKGLKKFAQKHHLDKDSFVESFKKFNPYPSEYGSFSEKAIRKLLPLMRFGAYWDFNHIDKNTQKRIEDLITGVENEEIRTILREKAEKYQLEKETDFQDLPLWLAQYIVYNRHAEASSLEKWTSVNDLETYLNEFKQHSLRNPIVEQVVMETLRVVRDIWQQYGQGQASFFDEIHIELGRELKKTAKEREKLSKQNQKNEDINLSIKEKLKELEKYNTRAYSITHQEKYKLWLEQKHISPYTGQIISPENLFTDNYEIEHIIPQSRFFDDSLSNKVVCESIVNKAPYKDRQLGLEFIKNQGGRIVKELSKENKTIKIFTEEQYRTFIKEHYSNNPEKTKKLLLEEIPEKMVARQMNDTCYISKFISEILSKIVRSDEQDEGVHSKNVILCTGKITSILRQDWGLNDIWDNLILPRFERMNNLLQKEKFTIYSIEKQKKIPVVPINDQFKSFQKKRIDHRHHALDAIIIACVTGEHINYINNQHALEKGKDKKEKQKEHDKLREKLCIKKYNKGSEENYSWIFKKPWAHFTQEVRTALEGIVVSFKQNLRVINKATNYYERWVEENGRYIKKMVKQEGTNWAIRKPLHEETISGKIYLDREEITKNDILTATRKTVDSSFDEKRIKKITDTGIQKILLNYLKYKGSPEIAFSPEGLEELNKNLSIYNDGKPHKPIYKVRIYEKGSGRFALGEKGRKYKKYVQGAPNLYFGIYQGANKRSFATIPLNEVIERQKQGRPYVPEYNEKGDPLLFSLSPNDLVYVPVEGENIEDIDFQNLSKEQKERIYNVNDFSSTCYFTPNRIAKAIFPKEVDLQRKGDKLSGSYDTKTASLEGIQIKEVCIKLKVDRLGNISKA

SEQ ID NO: 22486 - protein, 1069 aa, unidentified
  REGION 1..1069: note = Cas Enzyme sequence
MAAIAIDDDGKPTEILSAISLIHDSGVDPDSAKSAATRLATSGIARRTRRLYRRKRKRLAKLDKFISSQGWPLKEFEKYEDPFYPWRVRAELATTAITDQQELGEKLSIALRHIARHRGWRNPYSKVTALYTVTEPSDAFLAMQEECAKQLGRTIPETITVGQLVTGMNLGKTRLRGENSLLAARPRQSDNANEIHTIAKVQGLSNELVRQIIDHVFAAESPKGSAAEQVGKDPLQPTKKRALKASDAFQQYRIAALIGNLRIRGGKGNRRLTTEETRLVFDYLRSLPAKQEPTWQLVAEQLKIDRGNLVGTAIMTDDGERAGAKPPVHDTNRIMENTKIKPLATWWKSADADARAAMVKALSNAEVDDFDSQAGAQVQEFFFGISDEDQEKLDGLHLPIGRAAYSEDTLDRLTKRMIGEGMDLYEARQAEFKISNDWAPPAPEIGERVGNPAVDRVLKATARWLNAAERQWGAPKSVNIEHVRAAFMSESSARELDRDNQQRAKRNVKVVAEMQEKLGIEGRPSRADVWRFQSIQRQNGKCAYCGAEISFKNSEMDHIIPQAGEGSTNTRDNLVAVCRECNSSKSNIAFAVWAENTSRPGVSVQKAIERTHHWVTDSGLRKPEFDKFRKQVCDRLRRKATDEPIDARSLESVAWMANELRSRIAQKFKDGDTKVRVYKGALTAEARRASGISGKLEFVDGKGKSRLDRRHHAVDAAVVAFTSNYVAETLALRSNMKFDQELHRKAPQWREFTGSDHVHQVEWTKWKYRMQALAELLNNALVQDRIVVMHNLRLRLGNGAAHEDTIGKLTRLKVGDAISTTDIDRASSEALWCALTRDPDYDPKTGLPENPNRTIRIHGTHLTASDEITVFPVAAASIPIRDGFAKLGSNYHHVRLFRVPSGKKYKYCLMQVYTVDLLKFRKEDLFTVELKPQTISVRTCEALLRKALANGTAEYLGWLVSDDELLIDTSSFDTPGIVKLREEYGPVNRWRLAGLTSVTRLNLRPLYLSKEGLKPNVNPEIKKIIDNRSWIITVNKLFSSGHVKIIRRDALGRPRLHSAAHLPICWEVK

SEQ ID NO: 22487 - protein, 1526 aa, unidentified
  REGION 1..1526: note = Cas Enzyme sequence
MKNILGLDLGTNSVGWALISVDENGNLVKDIRLGSRIIPMSQDVLGKFDSGVTVSQTAERTEYRSHRRLLERALLRRERLHRVLHLLGFLPEHYAACIGWDRNDNATYGKFLPETEPKLAWRKADDGSYRFVFMQSFEEMLDDFKASQPSLVANGKRMPLDWTLYYLRTKALTKPIAKEELAWILLNFNQKRGYYQLRGEEEEETPSKCVEYHELKVVKVEATDEGKGGNVWYNVLLENGWVYRRQSKYSLDKWLGQTLPFIVTTDLEADGVTPKCDKEGNVKRSFRSPKEDDWTLVKKRTEDRLEKSGLTVGAFIYQHLLANPSDKVRGQLVRTIDRKYYKRELQAIIAKQMEFHPELRDAELLKACAEELYRNNEAHRAQLLAKDFKHLLVEDVLFYQRPLKSKKSLIANCPYETRQYINKETGEIKDVNVKCIAKSNPYFQEFRLWQWISNLRLLRQADGQDVTAAYIKGNEDKERLFDLLNNQGEIKQEHILRDFLKLKKPKGGESPLRWNYVDDKIYPANETRHAINKAIKGMAVDKEEKETLGQLLDQPAVAYMLWNLLYSITDRNELASALRRFALTHGVSSVDAFVESFLKVKPFKKEYGAYSEKATKKLLQVMRLGKYWCGDELPEPANRTKGNKQAVYDEMANRGICKQTLQNISNIIEENIDERLIDALINPQRPLTALSHFQGLSVSDACYVVYGRHSEVAEIVKWKDAGELNTFINNFKQHSMRNPIVEQCVLETLRTVRDVWEQEGQIDEIHVELGRNMKRTAEQRARDTQAIQRNENTNMRISLLLTELKNDPSINDVRPYSPSQRELLKIYEEGALENLTNQDEDIAKISRLAQPSASELRRYKLWLDQKYVSPYTGRPIPLAKLFTPAYEIEHIIPQSRYFDNSFSNKVICEAEVNTLKSNNLGMEFIKKFGGKTKGILDEEAYKLHVTTNYAHNPAKRSKLLMEDLPTDFNSRQLNDTRYISKTVMALLSNVVREEGERETRSKHVVVCTGGVTDTLKKDWGLHDVWHNLVYPRFIRLNNLTDTQSFGYWRALDEENKKQGEDGKKVFQITLPPECQRGFVKKRIDHRHHAMDALVIACASANIVNYLNNQSAANPHTHENLQRLLCDRKRVIRKPWPTFTQDAQAALKDLVVSFKNTVRVVNKASNTYLRYDKDGKKKRFKQEGEGLKAIRKPMHKETYYGEVNLIRKEMLPLKRALEDVNAIVDKELRASIKGLLRDGFNLQQVLANFKAKDFKFDKRDIKKVEVYVSSEKSTPMVATRKLLDTSFNAKRIADITDTGIQKILLNYLKANDNSPEQAFTPEGIAYLNEHITEYNNGKPHQPILKVRVSEVKGAKFAVGQTGSKKTKFVEAQSGTNLYFAIYEDKEGKRNFETIALNVAAERLKMGQTPVPETNNAGQPLKFYLSPNDLVYVPTDEDRAAARPSIDKRRIYKMVSATDKNSFFLPFEVASIIADQVEFEAKNKVGRVIEALEYTEQYESSTINKIMIKDVCWKLEVDRLGNITKIVR

SEQ ID NO: 22488 - protein, 1182 aa, unidentified
  REGION 1..1182: note = Cas Enzyme sequence
MGSRVVPLTNLGDDKAFSKGKAFTANQKRTARRTMRRGFARYQLRRYRLRRELEKVGMLPDAALIQLPLLELWELRERAATAGRRLTLPELGRVLCHINQKRGYRHVKSDAAAIVGDEGEKKDSNSAYLAGIRANDEKLQDEHKTVGQYFAEQLRRSQSESPTGGISYRIKDQIFSRQRYIDEYDQIMAAQRVHYPDILTDEFIRMLRDEVIFMQRPLKSCKHLVSLCEFEKQERVMRVQQDDGKGGRQLVERKVKFGPKVAPKSSPLFQLCRIYEAVNNIRLTRPDGSPRDITPEERDKLVAYLQTYEAPKPPKRKPAKAKPVKLAHPELDLDKLKELLCIEEELLADKLLEEGLKGDATRIALSIILQPYPQYHHLLDMELETRMMTVQLTDEETGEVTEREVAVVTDSYVRQPLYRLWHILYSIEERQAMRRALITQLGMKEEDLDGGLLDQLYRLDFVKPGYGNKSAKFICKLLPQLQQGLGYSEACTAVGYRHSNSPTSEEIAERTLLEKIPLLQRNELRQPLVEKILNQMINLVNALKAEYGIDEVRVELARELKMSREERERMARNNKDREERNKEVAAKIRECGLYPTKPRIQKYMLWEEAGRQCLYCGQSIEEEQCLREGGMEVEHIIPKSVLYDDSYGNKTCACRRCNKEKGNRTALEYIRAKGWEAEYMERINGLLDKKAISYKKAISYSKYQRLRWLKEDIPSDFLERQLRLTQYISRQAMAILQQGIRRVSASEGGVTARLRSLWGYDDILHTLNLDRYDSMGETERVSREGETTEKLRIKDWSKRKDHRHHAIDALVVASTRQGYIQRLNRVNSESEREAMSGEIEVQKATKTDKLSLLERWLTQRPHLSVCAVSDKVAEILISYRPGKRVVTRGRNIYRKKTADGREVTCVQRGVLVPRGELMEASLYGKIISQGRERIVKRYPLHDLKGEVVDPRLRELIAEYNQEITSKVKAKGASLYLDAAEKQEVRSVRCYVDKPSVSSAIPIRFDERGTAIAFVQSGNNHHLAVYRTPQGVLEESIVSFWDAVERVRYGIPLVITHPREVMEQVLQRGDIPESVLKSLPPSDWMFVESLQQDEMVIIGLSDEELQSSVEAQDYRKLSEHLYRVQSLSSKYYVFRYHLETSVKDRKNTSGRIPKFHRVRNLPDYEKRNVRKVRVDLLGRISLL

SEQ ID NO: 22489 - protein, 1506 aa, unidentified
  REGION 1..1506: note = Cas Enzyme sequence
MKTILGLDLGPNSIGWAKVEVDDEGNYLRNIKLGSRIIPMTQDMLGDFDKGVKVSQTATRTDFRGNRRLIERHLLRRERLHRVLHALKFLPKHYEDAIGWDRNEPATYGKFVNNSEPKLAWERQEDGSMRFLFMESFNEMVADFAQNQPSLVSDGKKIPLDWTIYYLRKKALTQPIKKEELAWILLNFNQKRGYYQLRGEEEEDNLTKRKEYYKLKVVGVEADGAPKGGKTWYNIHLENGWTARCQSKIPLDDWVGKVKEYIVTTEYEDDGKTPKCDKEGKVKRSFKSPEKDDWQLIKTRTEKFIDDSNKTVGAFIYDHLLEKPFDKIRGKYIRTIERKYYNNELREILREQAKYHEGLHSLEALKICAEELYKNNQQHREYLLKKDMTFLLLNDLIFYQRPLKSKKSLIADCPYEVYKYDDKLTGKKGQKKIKCIAKSNPYYQEFRLWQFIANLRLFSVTDGKEVTAEYLKTEEDYVRLFSFLNDRKDIKQETFLRSFLKLKKVPIGSEKIYPIRWNYIEDANKSYPCNATRHELLLAFDRADIPHELLDVEGREYRLWHLLYSIEAKEETESALRKLKANKAFGDLNIDDDFVNSFLKIKPFEKEYGAYSEKAIKKLLAVMRRGSLWKEADICEATKQNIAKILQNDIDEKLKKKIEAAVSSFNKLSDFQGLPTWLACYVVYGRHSEAAQIQCWQSPEDLKTYINKFKQHSLRNPIVEQCLLETLRTVYDIWKDAGQIDEIHIELGRNMKSTAEQRARRTKDILRNENTNLRIKNLLVELKNDDKIENVRPYSPSQQEILRIYEEGALQELSKEDEMFEDISKISKMAQPSPTELSRYKLWLEQKYRSPYTGRVIPLSKLFTTAYQIEHIIPQSRYFDDSFNNKVICESEVNSLKDNMLGYEFIKECGGKKVYCTLLNKSVEIFTEEEYKTFVTKHYVGNPRKQDNLLLEDIPQEFSARQLNDSRYISKMVQTVLSNIVRSENEQEATSKFVVSCNGAITDRLKKDWGLNDVWSSIVCPRFKRLNEITKTNAFGHWEDKAGKHVFQTTVPLELQRGFSKKRIDHRHHAMDALVIACASRNIVNYLNNESANSPEKREDLRKKLCDEKRKIRKPWKTFTQDAREALSDVVVSFKNYVRVINKATNYYEHYSSSGNKVMISQKGNDMWAIRKPLHKESVFGRVNLRSKVIVSLKKALENIPAICDKTLRDYINALVEKHFNTRQLLAHFKSINYRLNRKRVNKVEVWQFSDEKEMVARRKSLDTSFDDKQISSITDTGIQKILLNYLQTKDGNAEIAFTPEGIEEMNKNISLYNDGKAHQPILKVRVATPKGMKYPVGQTGNKATKFVVAEKGTNLYFAIYENELGVRSYDTIPLNIVVERLKEGLSPVPQANEADIPLKFYLSPNDLVYVPTKENEDELCRDRIYKFVDSSGTTANFVPHTSANTIYNVDKEYVEKCCNGAVILNEYGLGSPQSKNQKALDGEMIKEICWKLKVDRLGNIIKVIK

SEQ ID NO: 22490 - protein, 1494 aa, unidentified
  REGION 1..1494: note = Cas Enzyme sequence
MKHNRILGLDLGSNSIGWALIEQDFDNKQGKILGMGSRIIPMDQGILGEFERGNKVSQTAERTGFRSVRRLRERHLLRRERLHRVLHLLGFLPAHYDAQIDFTKRFGKFIGDSEPKLAYNNEGFIFLESFNEMVEDFKKHQPQLFYIKSNGEESKIPYDWTIYYLRKKALREKISKEELAWIILNFNQKRGYYQLRGEEEEKSTKNVEFYSLKITDVIADTPNNKGEIWYSIHLENGWVYRRASKISLEDWKGKVRDFIVTTELNEDGSVKLDKEGKEKRSFRAPSEDDWNLIKKKTEQNIVFSGKKVGEYIYDHLLQNPNQKIKGKLVRTIERKFYKDELKAILKEQVALQPELFTEELFVDCVRELYKNNEIHQNSLSSKDFVHLFLNDIIFYQRPLRSQKSNISSCSLEYHFCIDKETKQRRKTYLKVISKSNPYYQEFRVLQWLSNLKIYRKEDDKDVTSEFISSIEDKEILYEFLMSEKEVSNKSILEFLLMKSLRETYPLAKESELKKELKKEITKYRWNYVYEEENDNKKYPMNETGYEIKKRLKEVKNIPDNFLTKDIEYQLWHIIYSVTDKYEYEKALMKFAQKHNLDTESFVENFKKIKPYPSDYGAFSEKAIKKLLPLMRFGKYWNYSDISEPVQARISDIINGVDNESIKTIVREKAEKYQLNQEADFQGLPLWLAQYIVYGVHSEAADIQRWTSPSDLEEYLKDFKQHSLRNPIVEQVVTETLRVVKDIWEYYGKGEQNFFDEIHIELGRELKKTAEERNRMTREINENEETNLNVKKKLQELFEDKSAENVRPYSPIQQEKYRLWLEQEEKSPYTGQSIPLSKLFTDEYQIEHVIPQSRFFDDSLSNKVICESAVNAEKGAQLGLEFIKKHGGKILDIGLNKKVTVLNEKEYKELVNELFANNRGKKAKLLMEEIPEKMVERQLNDTRYISKFISQILSNIVRSPQEDNGVNSKNIIPCTGKITAALKQDWGLNDVWNDLILPRFERMNNLTQTELFTTYSEKYQKKIPIVPLEHAKGFQKKRIDHRHHALDALVVACATRSHINYMNNQHALDKHKAKEEKQNARIDLRTVLCEKKYNDNAEDNYNWAFKKPWNTFTQDVRSALEMVVVSFKQNLRVINKATNYYEKWREEKGKMVKKKVKQEGINWAIRKPLHDDLPYGEIKYQTNYLKISENISKRKFIIDEFIRNQVERIYVENHSKNNLTKKYLKEYPVIDEKGKEVVSTDFRIEVIKYRKRKPISILSDRNSRTGITTIEKMLQTINKIADNVLKKELLLYLEQNNNDIDKAFAVEGIERFNSERKTPVYRLPFIEDGEKKIKLGSKGKYVEAAKGTNLFFGIYQGKEKRSYATIPLAEVIERQKQGLTSVPELNEKGEKLLFSLSPNDLVYVPVEGEDTEDIDFTNLSKEQRERIYKTVSFTGSECFFIKSSISSLIKNYDAKTKIGELGSLNKLEITIPDHIRIKEFCIKLKIDRLGNISKA

SEQ ID NO: 22491 - protein, 1430 aa, unidentified
  REGION 1..1430: note = Cas Enzyme sequence
MKKRKHILGLDLGTTSIGFSHIIEDEDREKSTIEEIGVRIIPLSVDELSNFERGKTISTNTDRTLKHGARINLDRYQLRRKQLVELSLQAGLITPSTILAEDGKNTTHSTWQLRAKAAVERIEKDELVRVFLAINKKRGYKSSRKVKNKEDGQIIDGMDIAKRLYDENLTPGQLVLQLLKEKKKQLPDFYHSDLQREFDLIWNFQKEFYPDILTNDLYKALQGKNKTDSSSIFYNYYHFNTAENRGTKEQMRLQAYRWRVDALSKKLSKEEVAYVLVEINSNLNNSSNYLGNISDRSKELYFNKQTIGQFLYAKLKEDRHYSLKNKVFYRQDYLDEFERIWETQAIFHKELTGDLKKQIRDTIIFYQRRLKSQKGLISLCEFENKEITIEKEGKTVTKQIGVRVIPKSSPLFQEFKIWQILNNVVCKKKGTRKKKAVTPAPLLFELFGTPSETFFSLDMECKQLLFEELNLKGNLKADKVIRLLGYIPQEWEINYNQLEGNRTQKSLYEAYLKIIEIEGYDIKTFLRIKSDKEDWYLEESPLSAKEIRENIQHIFETLGISTAILYFDATLPIKDFEKQASYQLWHLLYSYESDNSPSGNETLYKLLQDKFGFKREHAVFLSNISFQDDYGSLSAKAIRKIYPYIKENQYSTACELAGYRHSKLSLTKEELNNRPLKDLISPLKKNSLRNPVVEKGLNQMINVVNALIEKNSEKDAEGNIIKYFHFDEIRIELARELKKNAQERAEMTLNIKNATIEQEKVKSILISDFGIKNPTKNDITRYRLYQELAHNGYKDLYTNTYIPKELLFSKNIDIEHIIPKARVFDDSFSNKTLAYRDFNLKKGENTAFDFIDSSLGEEELNQYIARVENAFKTKNISATKYRNLLKKATEINDGFINRDLRETQYIAKKAKELLFQITRSVVSTSGSITDRLREDWGLIDIMKELNMPKYRDLGLTEIIERRDGRKVEVIKEWTKRNDHRHHAMDALTVAFTKPSYIQYLNHLNARKDENNKLYADILGIERKETTKIHDENGNEKRVFIEPIPGFRQIAKKHLEEILISHKTKNKVVTKSINKIVGTNKKQETLTPRGQLHKETIYGKYHYYSNKEEKIGSKFDKETISKVSNPIYRYALQKRLEANENNPKKAFTGKNALSKNPIYLDDAKTKILPEKVNLTYLEEDYSIRKNISPDNFKDLISIEKIVDEGIKRILKERLKTYNNDPKKAFADLDKNPIWLNKEKGISIKRVTISGVKNAQALHSKKDHLGKPILDKEGQEIPVDFVSTGNNHHVAIYRDQKGNLQEQIVSFFEAVVRAQQGLPIIDKTYKQEEGWQFLFTMKQNEMFVFPNEITGFNPSEIDLLDPKNKKLISPNLFRVQKISIKDYFFRHHLETNVETNNILKDITWKRGGLSLLKGIIKVRINHLGNIVSIGEY

SEQ ID NO: 22492 - protein, 1504 aa, unidentified
  REGION 1..1504: note = Cas Enzyme sequence
MKNILGLDLGTNSIGWAVVNGSVNDNGSEQLVKIQASGSRIIPMDAAMIGDFNKGNSISQTAERTRLRGIRRLSERYLLRRERLHRILDILGFLPSHFAQDLDRHGKIVKGKEPKLAWRKNEAGQFEFIFQDSFKEMLEDFKLNHPNLITDDKKVPYDWTIYYLRKKGLTSKISKEELAWILLNFNQKRGYYQLRGEEEEENNNKLVEFYALKVVAVEDSGEKKGKDIWYNVHLENGWVYRRTSNMPLDWVGKTKEFIVTTDLEKDGTPKKDKEGNVKRSFRAPKEDDWSLVKKKTEADIDQTHKTVGTYIYDTLLGNPSQKIRGRLVRTIERKYYKEELKLILDKQKEFHPELQDRALYAACVEELYTINEAHRNNIGNRDFTYLFLEDILFYQRPLKSKKSLIDNCPYEENHCLDKETGEIKSFPVKCIAKSHPLFQEFRLWQFIVNLRIYRKGLAQDVDVTNELLKTEEDYVALFDWLNGKKEIDQKAFLKYPLFGLKKEVENYRWNYVQDKPYPCNETRSSMLARLEKCDISIEFLTKENEEALWHILYSVEDKNEIVKALQKFADKHDLNASFVDVFRKFPPFKKEYGSYSAKAIKKLLPLMRMGKYWSENSIDKGTRERIDKIITGEYDEKIENRVREKAIYLADVSDFRGLPLWLVCYIVYGRHSEAKEITQWKSPADIDSYLKSFKQHSLRNPIVEQIIIETLRVVRDIWKQVGNIDEIHVELGREMKNPADKRKKMTQQISENENTNLRIKYLLTEFLNPEYEVENVRPYSPSQQDILRIYEEGVLNSVSDLPEEISDILKKFTETDLKKRPSRSEVLRYKLWLEQKYRSPYTGEVIPLGKLFTSAYEIEHVIPQSCYFDDSFSNKVICEAEVNKLKSNLLGHEFIVKHHGEIVELPFGKKVRIFTVDEYEQFVKDNYSRTRGKMKKLLMDDIPEEFVTRQLNDSRYISKVVKSLLSNIVREKGEEEAISKNVIPCTGGVTDRLKKDWGINEVWNKIILPRFQRLNELTGTNKFTTKNVGIQEIPTMPLELQKGFNKKRIDHRHHAMDAIIIACANRNIINYLNNESATAKAELSRYDLQKLLCDKAKTDNNGNYKWVIRKPWASFTQDTYLALENIIVSFKQNLRVINKATNHFLHYNEEGKKIFVKQGKGDNWAIRKSMHKDTVFGEVNLRRIKTVALNEAMKNPQSIVVKDFKRKLLELWNLGFDAKRIKKYFEDNRETWSDINLSKIEVYYFSKDTKDRFFATRKPLDTSFDRKKIENNITDTGIQKILLRHLELKDNNPDIAFSPDGIDEMNRNIIQLNNGKYHQPIIKVRWYEQADKFAVGQTGNKSSKFVEAAKGTNLFFAVYESNILDKKTNTIIKKRNYATIPLNVAIERQKQGLPVAPEDENGNDPIFVLSPNDLVYLPTDDELANGIIAQPLDRGRIYKMVSCTGNEGHFIPARIANPILQTIELGSNNKAQKAWTDEMIKEICMPIKVDRLGNVLESSSSYKK

SEQ ID NO: 22493 - protein, 1426 aa, unidentified
  REGION 1..1426: note = Cas Enzyme sequence
MKNILGLDLGTTSISFAHIVEDENKEKSEIKELGVRIVSLTTDEQSDFEKGKSITTNANRTLKHGARLNLDRYQQRRKYLIDLLQKANLITPSSILAENGKNTTHSTWQLRAKAVTERVEKEEFARILLAINKKRGYKSSRKAKTEDEGQAIDGMAIAKRLYDENLTPGQLSLQLLQQNKKLLPDFYRSDLQKEFDLVWNFQKQFYPDILTDSFYKELQGKGKDATSKAFSKRYHFDTAENKGSKESVRLQAYQWRAEAISKQLSKEEVAYVLTEINNNLNNASGYLGAISDRSKELYFNRQTVGQYLYAQLQENRHNSLKNKVFYRQDYLDEFERIWETQASFHKELTDELKKQIRDVVIFYQRKPKSQKGLISFCEFESKEIEIEKDGKTIIKTIGARVVPKSSPLFQEFKIWQILNNVICKRKGIRKKKVSAKTTQLDLLNESSQTVFSLDMECKQLLFEELNLKGDLKSDKVLKLLGYSPQEWEINYNQLEGNRTQKALYEAYLKIVEMEAHDVKDILQIKSAKEDWSLDESPLSASEIKEKVKDIFQTLGICTKILYFDPLLPVKEFEEQDSYQLWHLLYSYESDDSTSGNETLYRILEKKYAFKREHARILANVALQDDYGSLSTKAIRKIYPNIKENQYSTACEKAGYKHSKLSLTTEELEARELKNIIPLLKKNALRNPVVEKILNQMINVVNALIEKNSERDAEGKITKYFHFDEIRIELARELKKNAQKRYEMTQNINKAKSEHQKISEILQKQFGIKDPTKSDIIRYRLYQELEHNGYKELYTNAPIARDMLFSKNIEIEHIVPKARVFDDSFSNKTLTFHRINSDKGEYTAFDYITSLNSEEELNQYLTRVENAYKTKSISPAKYKNLLKKASEIGDDFINRDLRDTQYIAKKAKEILFQVTKNVLSTSGSITDRLREDWGLVDVMKELNMPKYQSLGLTEIIERRDGRKVEVIKDWTKRNDHRHHAMDALTVAFTKPSYIQYLNHLNARKDENNKLYTDILGIERKETTKIHDENGNEKRVFIEPIPNFRQVAKKHLEEIFISHKAKNKVVTKNINKPAGTDKQQITLTPRGQLHKETIYGKYQYYVNKEEKVGVKFDKETIAKVSNPVYREALLKRLQANDNDPKKAFTGKNALSKKPIYLDEAKTKTLPEKVNLTYLEEDFSIRKDISPDNFKELKSIEKVIDQVVKRILIKRLQAYDNDPKKAFVDLEKNPIWLNKEKGIAIKRVTISGVNNAQPLHIGKDHLGKTTLNKEGKEIPVDYVSTGNNHHVAVYRDKEGNLQEQIVSFFDAVVRAQQGLPIIDKTYKQAEGWQFLFTMKQNEMFVFPNATTGFNPAEIDLLDPKNKKLISPNLFRVQKIATKDYFFRHHLETNVETDNVLKNTTWKREGLSGLKDIVKVRINHLGDIVSIGEY

SEQ ID NO: 22494 - protein, 1472 aa, unidentified
  REGION 1..1472: note = Cas Enzyme sequence
VSCFQICSKDILNLSYFQTSFSLLFKKILTKFGIDCKDLAMKYILGLDLGSNSIGWALIEQDFDNKQGKILGLGSRIIPMDQGILGEFERGNKVSQTAERTGFRGVRRLRERHLLRRERLHRVLHLLGFLPPHYDAQIDFTKRFGKFMGDSEPKLAYNNEGFIFLESFNEMVEDFKKHQPQLFYIKSNGEESKIPYDWTIYYLRKKALQEKISKEELAWIILNFNQKRGYYQLRGEEEEKSTKNVEFYSLEITDVKADTPNNKGEIWYSIHLENGWVYRRASKISLEDWKGKVRDFIVTTELNEDGSIKLDKEGKEKRSFRAPNEDDWNLLKKKTEQNITLSGKTVGEYIYDHLLQNPNQKIKGKLVRTIERKFYKEELKAILEKQVALQPELFTEELFVDCVRELYKNNEIHQNSLSSKDFVHLFLNDIIFYQRPLRSQKSNISSCSLEYRFCIDKETKQRRKTYLKVISKSNPYYQEFRVLQWLSNLKIYRKEDDKDVTSEFISSIEDKETLYEFLMSEKEVSNKSVLEFLLMKSLREIYPFAKETELKKELKKEITKYRWNYVYEEENDNKKYPMNETGYEIKKRLKEVKNIPDNFLTKDIEYQLWHIIYSVTDKYEFEKALMKFAQKHNLDAESFVENFKRIKPYPSDYGAFSEKAIKKLLPLMRFGKYWNYSDISEPVQARISDIINGVDNESIKTIVREKAEKFQLSQEADFQGLPLWMAQYIVYGIHSEAVDIQRWTSPSDLEEYLKGFKQHSLRNPIVEQVVTETLRVVKDIWEYYGKGEENFFGEIHIELGRELKKTAEERNRMTREINENEETNLKVKKELQQIFENKSAENVRPYSPIQQEKYKLWLEQKERSPYTGQPIPLSKLFTDEYQIEHVIPQSRFFDDSLSNKVICEAAVNAEKGAQLGLEFIKRHGGEILDIGLNKKVTVLNEKEYKELVNELFANNRGKKAKLLMEEIPEKMVERQLNDTRYISKFISQILSNIVRSPQEDDGVNSKNIIPCTGKITAALKQDWGLNDVWNDLILPRFERMNNLTQTELFTTYSEKYQKKIPTVPLEHAKGFQKKRIDHRHHALDALVVACATRSHINYMNNQHALDKHKAKEERQNARIDLRTVLCEKKYNDNAEDKYNWTFKKPWNTFTQDVRSALEMVVVSFKQNLRVINKATNYYEKWVEEKGKKVKKKVKQEGINWAIRKPLHKETISGKITLERVKVGKGKILTATRKSIDPSFTEKTIASITDTGIQKILLNYLAYKGSPELAFSPEGIEEMNKNIAKYNDGKTHQPIYKVRIFEEGSKFPLGEIGTKSQKYVEAAKGTNLFFGIYQGKEKRSYATIPLDEVIERQKQGLTSVPEFNEKGEKLLFSLSPNDLVYVPVEGEDTESIDFTNLSKEQRERVYKTVSFTGNQCFFVKQTIASLIKSYDPQTKIGELESKNKLEVTICSRIKIKESCIKLKIDRLGNISKA

SEQ ID NO: 22495 - protein, 1507 aa, unidentified
  REGION 1..1507: note = Cas Enzyme sequence
MKTILGLDLGPNSIGWAKVEVDDKGNYLRNIKLGSRIIPMDQGILGKFDSGVTESQTAIRTNFRGVRRLRERHLQRRERLHRVLHALNFLPKHYEDAIGWDRNEPAIYGKFINNSEPKLAWERQEDGSMRFLFMESFYEMMADFAKMQPSLVSGEKKIPLDWTIYYLRKKALTQQIKKEELAWILLNFNQKRGYYQLRGEEEEDNPTKRKEYYKLKVIGVEADGAPKAGKIWYNIHLENGWTARCQSKVPLDNWVGNIKEYIVTTEYEADGETPKYDKEGKIKRSFKSPEKGDWQLIKTRTEKFIESSNKTVGTFIYDHLLKEPFDKIRGKYIRTIERKYYKNELYKILCEQAKYHKELDSLDTLNACAKELYKNNQQHQEYLLKKDMKYLLLDDLIFYQRPLKSKKSLIADCPYEVYKYNYKQTGKKEQKKIKCIAKSNPYYQEFRLWQFISNIHLFNVTDGKDVTSEYLKTKEDYVRLFTYLNDRKEIKQETLLKGFLKLKKETIGSEKIYPIRWNYIEDANKSYPCNTTRHELLLAFDRAGIQRELLDVEGREYRLWHLLYSIESKDKTESALRRLKSNKAFSDLNIDDAFVNSFLKIKPFKKEYGAYSEKAIKKLLAVMRRGSLWKEADICEATKQNIAKILQNDIDEKLKKKIEAAVSSFNKLSDFQGLPTWLACYVVYGRHSEAAQIQCWQSPEDLKTYINKFKQHSLRNPIVEQCLLETLRTVYDIWKDAGQIDEIHIELGRNMKSTAEQRARKTNEFLRNENTNLRIKNLLMELKNDDKIENVRPYSPSQQEILRIYEEGALQELSKEDEMYEDISKISKMAQPSPTELSRYKLWLEQKYRSPYTGRVIPLSKLFTTAYQIEHIIPQSRYFDDSFNNKVICESEVNSLKDNMLGYEFIKECGGQKVHCTLLDGNVEIFTEEEYKTFVTKHYVGNPRKKDNLLLEDIPQEFSARQLNDSRYISKMVQTVLSNIVRTKDEQEAISKFVVSCNGMITDRLKKDWGLNDVWNTIVCPRFKRLNEITKTNAFGHWEDKAGKHVFQTIVPLELQRGFSKKRIDHRHHAMDALVIACASRNIVNYLNNESANSPEKREDLRKKLCDEKRKIRKPWKTFTQDTREALSDVVVSFKNYVRVINKATNYYEHYSSSGNKVMISQKGNDMWAIRKPLHKESFFGHVNLRRKATVSLKKALENIPAICDKTLRDYINALVEKHFNTRQLLAHFKSINYRLNRKRVDKVEVWQFSDEKIEMVARRKPLDTSFDAKQISFITDTGIQKILLNYLQSKEGNAEIAFTPEGIEEMNKNISIYNDGKAHQPILNVRVATPKGMKYPVGQTGNKATKFVVAEKGTNLYFAIYENELGERSYDTIPLDIVIKRLKEGQSPVPQINKVGIPLKFYLSPNDLVYVPTKENEDELCRDRIYKFVDSSGTTANFVPHTSANTIYNVDKEYAKKYCNGAVILNEYGLGSPQSKNQKDLDGEMIKEICWKLKVDRLGNIIKVIK

SEQ ID NO: 22496 - protein, 1422 aa, unidentified
  REGION 1..1422: note = Cas Enzyme sequence
MTQKVLGLDLGTNSIGSAVRNLDLSDDLQWQLEFFSSDIFRSSVNKESNGREYSLAAQRSAHRRSRGLNEVRRRRLWATLNLLIKHGFCPMSSESLMRWCTYDKRKGLFREYPIDDKDFNAWILLDFNGDGRPDYSSPYQLRRELVTRQFDFEQPIERYKLGRALYHIAQHRGFKSSKGETLSQQETNSKPSSTDEIPDVAGAMKASEEKLSKGLSTYMKEHNLLTVGAAFAQLEDEGVRVRNNNDYRAIRSQFQHEIETIFKFQQGLSVESELYERLISEKKNVGTIFYKRPLRSQRGNVGKCTLERSKPRCAIGHPLFEKFRAWTLINNIKVRMSVDTLDEQLPMKLRLDLYNECFLAFVRTEFKFEDIRKYLEKRLGIHFSYNDKTINYKDSTSVAGCPITARFRKMLGEEWESFRVEGQKERQAHSKNNISFHRVSYSIEDIWHFCYDAEEPEAVLAFAQETLRLERKKAEELVRIWSAMPQGYAMLSQKAIRNINKILMLGLKYSDAVILAKVPELVDVSDEELLSIAKDYYLVEAQVNYDKRINSIVNGLIAKYKSVSEEYRFADHNYEYLLDESDEKDIIRQIESSLGAKRWSLMDADEQTDILQKVRDRYQDFFRSHERKFVESPKLGESFENYLTKKFPMVEREQWKKLYHPSQITIYRPVSVGKDRSVLRLGNPDIGAIKNPTVLRVLNTLRRRVNQLLDDGVISPDETRVVVETARELNDANRKWALDTYNRIRHDENEKIKKILEEFYPKRDGISTDDIDKARYVIDQREVDYFTESKTYNKDIKKYKFWLEQGGQCMYTGRTINLSNLFDPNAFDIEHTIPESLSFDSSDMNLTLCDAHYNRFIKKNHIPTDMPNYDKAITIDGKEYPAITSQLQRWVERVERLNRNVEYWKGQARRAQNKDRKDQCMREMHLWKMELEYWKKKLERFTVTEVTDGFKNSQLVDTRVITRHAVLYLKSIFPHVDVQRGDVTAKFRKILGIQSVDEKKDRSLHSHHAIDATTLTIIPVSAKRDRMLELFAKIEEINKMLSFSASEDRTGLQQELDGLKNKLQMEVKVCRIGHNVSEIGTFINDNIIVNHHIKDQALTPVRRRLRKKGYIVGGVDNPRWQTGDALRGEIHKASYYGAITQFAKDDEGKVLMKEGRPQVNPTIKFVIRRELKYKKSAADSGFASWDDLGKAIVDKELFALMKGQFPEETSFKDACEQGIYMIKKGKNGMPDKKLYRIRHIRCNTVQKNALKIKEQTYKSEKEYKRYFYAAVGDLYAMCCYTNGKIREFRIYSLYDVSCHRKSDIEDIPEFITDKKGNRLMLDYKLHTGDMILLYKDNPEELYDLDNVNLSKLLYKINGFENDGLRIRMVNHLVVKEAMGESVKDYAKLPDIIRCGVKTIKFLIMGENRDFVIKNGKIIFNHR

SEQ ID NO: 22497 - protein, 1504 aa, unidentified
  REGION 1..1504: note = Cas Enzyme sequence
MKNILGLDLGTNSIGWAVVNGSVNDNGSEQLVKIQASGSRIIPMDAAMIGDFNKGNSISQTAERTRLRGIRRLSERYLLRRERLHRILDILGFLPSHFAQDLDRHGKIVKGKEPKLAWRKNEAGQFEFIFQDSFKEMLEDFKLNHPNLITDDKKVPYDWTIYYLRKKGLTSKISKEELAWILLNFNQKRGYYQLRGEEEEENNNKLVEFYALKVVAVEDSGEKKGKDIWYNVHLENGWVYRRTSNIPLDWVGKTKEFIVTTDLEKDGTPKKDREGNVKRSFRAPKEDDWSLVKKKTEADIDQTHKTVGTYIYDTLLGNPSQKIRGRLVRTIERKYYKEELKLILDKQKEFHPELQDRALYAACVEELYTINEAHRNNIGNRDFTYLFLEDILFYQRPLKSKKSLIDNCPYEENHCLDKETGEIKSFPVKCIAKSHPLFQEFRLWQFIVNLRIYRKGLAQDVDVTNELLKTEEDYVALFDWLNGKKEIDQKAFLKYPLFGLKKEVENYRWNYVQDKPYPCNETRSSMLARLEKCDISIEFLTKENEEALWHILYSVEDKNEIVKALQKFADKHDLNASFVDVFRKFPPFKKEYGSYSAKAIKKLLPLMRMGKYWSENSIDKGTRERIDKIITGEYDEKIENRVREKAIHLVDVSDFRGLPLWLVCYIVYGRHSESKEITQWKSPADIDSYLKSFKQHSLRNPIVEQIIIETLRVVRDIWKQVGNIDEIHVELGREMKNPADKRKKMTQQISENENTNLRIKYLLTEFLNPEYEVENVRPYSPSQQDILRIYEEGVLNSVSDLPEEISDILKKFTETDLKKRPSRSEVLRYKLWLEQKYRSPYTGEVIPLGKLFTSAYEIEHVIPQSCYFDDSFSNKVICEAEVNKLKSNLLGHEFIVKHHGEIVELPFGKKVRIFTVDEYEQFVKDNYSRTRGKMKKLLMDDIPEEFVTRQLNDSRYISKVVKSLLSNIVREKGEEEAISKNVIPCTGGVTDRLKKDWGINEVWNKIILPRFQRLNELTGTNKFTTKNVGIQEIPTMPLELQKGFNKKRIDHRHHAMDAIIIACANRNIINYLNNESATAKAELSRYDLQKLLCDKAKTDNNGNYKWVIRKPWASFTQDTYLALENIIVSFKQNLRVINKATNHFLHYNEEGKKIFVKQGKGDNWAIRKSMHKDTVFGEVNLRRIKTVALNEAMKNPQSIVVKDFKRKLLELWNLGFDAKRIKKYFEDNRETWSDINLSKIEVYYFSKDTKDRFFATRKPLDTSFDRKKIENNITDTGIQKILLRHLELKDNNPDIAFSPDGIDEMNRNIIQLNNGKYHQPIIKVRWYEQADKFAVGQTGNKSSKFVEAAKGTNLFFAVYESNILDKKTNTIIKKRNYATIPLNVAIERQKQGLPVAPEDENGNDPIFVLSPNDLVYLPTDDELANGIIAQPLDRGRIYKMVSSSGEQCFFIKHIVANVLVDKFEFSPLNKMERALTGEMIKMICMPIKVDRLGNVLESSSSHKK

SEQ ID NO: 22498 - protein, 1218 aa, unidentified
  REGION 1..1218: note = Cas Enzyme sequence
MLIKKRTEADITGTHKTIGSYIYDALLQEPQQKIIGKLVKTVERKFYKEELNFILQKQCAFHAELQDRDLYMRCIEALYPGNEVQRRNIANRDFIYLLIDDVLFYQRPLKTKKSLIANCPYEENEYVNRKTGEIKTAPLKCIAKSHPLFQEFRLWYFLSNIRVYQKEREVNGTLHLDVDVTTEFLKTEDDYVALFDWLNSRKEIDQKAFLRYPAFGLKKEINNYRWNYVEDKFYPCNETRHAILSRLEKAGIGIDFLSDEKETALWHILYSVSDKQEIEKALATFAVKNGLNESFVEVFKKFPPFKSEYGAYSAKAIKKLLPLMRCGKYWDMSLIDGTTKERIERIIAGECDESIGAKVREKAMNLSDISCFKRLPLWLACYVVYNRHSEDKEITKWETPADIDAYLAAFKQHSLRNPIVEQVITETLRVVRDIWKQVGKIDEIRIELGREMKNPADKRKRMTTQILENENANLRIKALLAEFVNPEYGVENVRPYSPSQQEILRIYEDAVLKGEEQIPEDIDVILKKFNTSKLPTKSEFLRYKLWLEQKYRSPYTGELIPLAKLFTAAYEIEHVIPQSRYFDDSFSNKVICESAVNKLKDNQLGYEFIKNHHGQKVEVGFGKTVEIFSVDSYERFVKEQYAKSGIKMKKLLMDDIPEQFIERQLNDSRYISKVVKGLLSNIVREKNDSGEYEPEAVSKNILVCTGSVTDRLKKDWGMNDVWNSIVSPRFERLNALTETQCFGHWENKDGKKVFQTAVPLEYQKGFSKKRIDHRHHAMDAIVIACATRNHVNYLNNESASRNAKISRYDLQRLLCDKSRGDGNGNYRWIIKKPWTTFTQDAREALSGIIVSLKQNLRIINKTTNIYQHFDANGTRVYEKQKIGDSWAIRKPMHKDTVFGAVNLRKVKVVRLSVALDTPSMIVNKRVKNKVLELLSYKYDKKKIEKYFKENAFLWKELDIAKVAVYYFTENTTEPLVAVRKSLDSTFNEKKIASVTDTGIQKILLNHLKSKEGKAELAFSAEGIEEMNRNLLQLNDGKGHQPIYKVRVYEPRGNKFKVGVLGNKGAKWVEAAKGTNLFFAIYITEDGNRTYETIPLNWVIEREKQGLVPVPDRNEKGDKLLFWLSPNDLVYLPTEEERDFGRINEPIDRGRIYKMVSSSGNQCFFIPQSISNAIISTKELGSNNKAEKSWDGEMIKNICIPVKVDRLGRIIEVKYRVNE

SEQ ID NO: 22499 - protein, 1343 aa, unidentified
  REGION 1..1343: note = Cas Enzyme sequence
KGLTSKISKEELAWILLNFNQKRGYYQLRGEEEKKNDNVMIINSKVIDVVKAEKDKKYEKYWYNVLLENGLLYRAAFYNDISFWKGHTKEFVLKTIKLKSGGTKQELSFLPSFDEIEKMEKKQKDKMYFKIKLKTEADIDQAHKTVGTYIYDTLLGNPSQKIRGRLVRTIERKYYKEELKLILDKQKEFHPELQDRALYAACIEELYPINEAHRNNVGNRDFTYLFLEDILFYQRPLKSKKSLIDNCPYEENQGLDKETGEIKSFPVKCIAKSHPLFQEFRLWQFIVNLRIYRKDLAQDVDVTNELLKTEEDYVALFDWLNGKKEIDQKAFLKYPVFGLKKEIENYRWNYVQDKPYPCNETRLLMLARLEKCDISIEFLTKENEEALWHILYSVEDKNEIVKALQKFADKHDLNASFVDVFRKFPPFKKEYGSYSAKAIKKLLPLMRMGKYWSEDSIDKGTRKRMDKIITGEYDEKIENRVREKVIHLADVSDFRGLPLWLVCYIVYGRHSEAKEITQWKSPADIDSYLKSFKQHSLRNPIVEQIIIETLRVVRDIWKQVGNIDEIHVELGREMKNPADKRKKMTQQMSENENTNLRIKYLLTEFLNPEYEVENVRPYSPSQQDILRIYEEGVLNSVSDLPEEISDILKKFTETDLKKRPSRSEILRYKLWLEQKYRSPYTGEVIPLGKLFTPAYEIEHVIPQSCYFDDSFSNKVICEAEVNKLKSNLLGHEFIVKHHGEIVELPFGKKVRIFTVDEYEQFVKDNYSRTRGKMKKLLMDDIPEEFVARQLNDSRYISKVVKSLLSNIVREKGEEEAISKNVIPCTGGVTDRLKKDWGINEVWNKIILPRFQRLNELTGTNKFTTKNVGIQEIPTMPLELQKGFNKKRIDHRHHAMDAIIIACANRNIINYLNNESATAKAELSRYDLQKLLCDKAKTDNNGNYKWVIRKPWASFTQDTYLALENIIVSFKQNLRVINKATNRFLHYNEEGKKIFVKQGKGDNWAIRKSMHKDTVFGEVNLRRIKTVALNEAMKNPQSIVVKDFKRKLLELWNLGFDAKRIKKYFEDNRETWSDINLSKIEVYYFSKDTKDRFFATRKPLDTSFDRKKIENNITDTGIQKILLRHLELKDNNPDIAFSPDGIDEMNRNIIQLNNGKYHQPIIKVRWYEQADKFAVGQTGNKFSKFVEAAKGTNLFFAVYESNILDKKTNTIIKKRNYATIPLNVAIERQKQGLPVAPEDENGNDPIFVLSPNDLVYLPTDDELANGIIAQPLDRGRIYKMVSSSGEQCFFIKHIVANVLVDKFEFSPLNKMERALTGEMIKMICIPIKVDRLGNVLESSSSHKK

SEQ ID NO: 22500 - protein, 1431 aa, unidentified
  REGION 1..1431: note = Cas Enzyme sequence
MKRILGLDLGSSSIGWALVNEAESKNERSSIVKLGVRVNPLTVDESINFEKGKSITTNADRTLKRSMRRNLHRYKLRREALIEVLKECKFITEDTILSENGNRTTFETYRLRAKALTEEISLEEFARVLIMINKKRGYKSSRKAGGAEEDTLIDGMDIARKLYDANLTPGELCLQLLSAGKKVLPDFYRSDLQNELDRIWEKQKEYYPRVLTDALKEELRGKKRDAVWAICANAFVWKETYTEWNNEESKNEQIEKEHKLEGIYSKRKRDEAKKENLQWRVSGLKEKLSLEQLVIILQEINTQINNSSGYLGTISDRSKELYFNKQTVGQYLMDILDNNPNASLRNIVFYRQDYLDEFNALWEKQAEFHKELTGELKKEIRDIIIFYQRRLKSQKGLISFCEFESRQIEVKIDGKRKIRTVGSRVIPRSSPLFQEFKIWQILNNIEVTAVGNKNKQRMQNGSNEPDDTEQLELNSRRYLYQEEKELLAKELFVRDKMTKLEVLKLLFDNPEELDLNFKTIDGNKTGYLFFQAYSKMIEMSGHEPVDFKKPIEKIVEQVKSVFVLLNWNTDILSFDSNKELDKQSYYKLWHLLYSFEGDNTPTGNGCLVQKIMDSYGFEKEFAKILANITFQEDYGSLSAKAIHKILPHLKEGNQYDVACEYAGYRHSKSSLTKEEIANKVLKDKLEVLPRNSLRNPVVEKILNQMVNVINAIIEAYGRPDEIRVELARELKKNAKEREKLTKSIAETTKTHEAHKKLLQEEFGLKNVGRSDILRYKLYKELESRGYKTLYSNTYIPREKLFSKEFDIEHIIPQARLFDDSFSNKTLEARNVNIEKGNRTAYDFVKEKFGESGTDNSLDCYLNNIEALFVSGKISKTKYTKLKMTEQDIPGGFIERDLRNTQYIAKKALSMLNEISRCVVATSGSITDKLREDWQLVDVMKELNWEKYKALGLVEYFEDKDGKQIGRIKDWSKRNDHRHHAMDALTVAFTKEVFIQYFNNKNASLNPNTNEYAIKNKYFQNGRAIAPMPLNEFRAEAKKHLENTLISIKAKNKVITNNINKTKKRGGVNTKKQQTPRGQLHLETIYGCCRQYLTKEEKVNASFDVSKIATVSRSVYRDALLKRLQEHHNDPKKAFAGRNSLDKKPVWLDKEQIRKVPEKVKTVTFETIYTIRKEISPDLRVDKIIDSGVRKMLTGRLKEYGNDAKKAFSNLDEKPIWLNKEKGIPIKRVTISGISNAQSLHVKKDKDGKPVLDGNGRNIPVDFVNTGNNHHVAVYRRPVIDKNGQMVIDENGNLKYELEEVVVTFFDAVTRVNLGQPIIDKDYKASEGWQFLFSMKQNEYFVFPNEKTGFNPKEIDLLDADNYGLISQNLFRVQKFTHKNYVFRHHLETTIKDTSSILRGITWIDFRSSKGLDSIVKVRVNHIGQIVSVGEY

SEQ ID NO: 22501 - protein, 1072 aa, unidentified
  REGION 1..1072: note = Cas Enzyme sequence
DYLDEFDRIWEKQAEFHKELTAELKKEIRDMIIFYQRRLKSQKGLISFCEFERLEIVVEKDGKKQTKVIGCKVIPRSHPLFQEFKVWQTLNDIKVLGREKKRNALSASESRALYPEEKEILARELAIKENMKKADVLKLLFENPQELDLNFKQIDGNRTGFSLFSAYSKMIEKYGYEPLDFKKPADEIIGQLRTIFTDLGWNTNLFTIDLTKEGKELEMQPYFRLWHLLYSFEGDNTSTGNGKLIEKIMQLCGVEKEYAVELASLSFQDDYGSLSAKAIKRILPYLKEGNLYDVACEYAGYRHSKSSLTKEEIENKVLKGKLEVLPKNSLRNPVVEKILSQMVNVINTIIDTYGKPDEIRVELARELKKSAKEREELTKAIAKSTREHEEIRKLLQDEFGMMNVSRNDIIRYKLYEELKDNGYKTLYSNQYIPKEKIFSKEIDIEHIIPQSRLFDDSLSNKTLEYKAINIEKGNKTAYDFVKEKYGEEGLQQYINRCESLFNDKKAKLRKLKMEQKDIPDGFIDRDLRNTQYIAKKALAMLNEICRRVVATTGSITDQLREDWQLVDVMKELNLPKYEALGFVETYEDKDGRKIKRIKDWTKRNDHRHHAMDALTVAFTKDAFIQYFNNKNAAQDSGNRNHTNIIGIKTRYFDKGRALPPIPLEQFRIEAKQHLEKLLVSIKAKNKVVTVNVNRTKKRKGENTKIQQTPRGQLHLETVYGSHKQYVTKIEKVNASFDAAKIATVSKRAYRNALLKRLETFGNDPKKAFTGKNALEKNPLYADKYQTIRVPEKVQTVEFETIYTIRKPVDPALNVDKVVDVKVRAILERRLKEYGGDPKKAFVNFWENPIWLNKEKGISIKRVSIRGINNAQSIHVKKDKNGNPIWDENGKQIPVDFVNTGNNHHVAIYRKPVLDKKGQVTFDEDGNLMYELDEVVVPFFEAVTRANLGLPIIDKDYRKSEGWQFLFSMKQNEYFVFPNEKTGFNPKEVDLLNPDNYAMISPNLFRVQTMSKVMYGNNVVRDYKFRHHLETTVKDMKELKDIAYKQYKTLSFGNSVVKIRINHIGQIVSVGEY

SEQ ID NO: 22502 - protein, 1442 aa, unidentified
  REGION 1..1442: note = Cas Enzyme sequence
MKKILGLDLGTNSIGWAYVKQAQNDSEKSEIVELGVRVNPLTVDEKTNFEKGKPISTNADRTLKRGARRNLQRYKLRRQELIELLKEYQVISEKTILAEDGKGTTFETLRLRAKSAKEQVSLEELARILLMINKKRGYKSSRKAKNEEEGQLIDGMEIARRLYDENLTTGQLSLLLLKEGKKSLPDYYRSDLQHELDKVWNFQKQFHPDILTDEFYTSIQGKGQKATRESFSSKYRIDTAENKGSREEKRLQAYQWRADATHKELTKEELAFVITEINNNINNSSGYLGAISDRSKELIFANETVGEYLWKQIQSDPHTSLKNQVFYRQDYFDEFERIWETQSEFYPQILTESLKNELRDILIFYQRKLKSQKALVSICEFESKEIPLKDKQGNPISKNRIPVTKLVGPKVAPKSSPLFQEFKIWQNLNNVLVRPKGSRKRKVTTDQQSTFLEEQEPVFELNLEQKELLFEELNLKGNLKTDYCLELIGYSAKEWEMNYPTLEGNKTNKSLYEAYLKIIDSEGYDVKKLLKAKTDKDDINLDDIEVSASEIKTMISDIFNELGINTKILDFDAELERKQFEAQASYRLWHLLYSYEGDDSKSGNELLYRLLEDKFGFKREHSKTLATVSLLSDYGNLSTKAIRTIYPYIKENKFSTACELAGYRHSKLSITKEENENRTLKDTLDVLKKNSLRQPVVEKILNQMINLINELIEKHSEKDEKGNIVKYFKFDEIHIELARELKKNAEERRELDSKVREGKARNEKIIAILKSEFGLPYPTKNDIIRYRLYEELKDNGYKDLYTNTYIPREKLFSKEIDIEHIIPKSRLFNDSFSNKTICYRQDNLNKGERTAYDYIEGLGKTQLDEYLNRVENLYVNKIITKAKYRNLLKKESEIGDGFIERDLRETQYIAKKAKEMLLQITRHVVSTTGSITDRLRDDWELVNVMRELNLPKYKALGLTEIQERKNGQTVEVITDWTKRNDHRHHAMDALTVAFTKHSHIQYLNFLNARKDEKHKEYSNIMGIQQLETEKTTDKDGKDKRVFKAPIPNFRQVAKEHLESILISHKTKNKVVTRATNKIAGSKKQQETLSPRGQLHKETVYGKYRRYVQKEEKIGSKFDLQTIERVASPLYKRLLTKRLEENGGDPKKAFTGKNALAKSPIYLDEAQTQQLPEKVKLVWLETYFSIRKDITPDNFKDEKSIDKVLDEGIKRILKDRLKSFDGDAKRAFTDLEQNPIWLNKEKGIAIKRVTISGVSNAEPLHTKKDHLGNEIFDDTGKPIPVDYVSTGNNHHIAIYRDENGNLQEKAVSFFEAVTRANQGLPTVDKTYNQHLGWQFLFTMKQNEMFVFPNKETGFDPQEIDLLDPKNKKLISPNLFRVQTISVVKYGNNVVRDFKFRHHLETTVEDKKELQQITYQQIKSLSPLNNIVKVRINHLGDIVHIGEY

SEQ ID NO: 22503 - protein, 1346 aa, unidentified
  REGION 1..1346: note = Cas Enzyme sequence
EPKIAYNNGNFIFMNSFNEMIEDFKKHQPQLFYKKSNGKESKIPYDWTIYYLRKKALSQKITQQELAWLILHFNQKRGYYQLRGEEEIENSNKEIAFHSLKVVEVEVEAPNKKGEIWYTIRLENGWIYRRSSKIPLDDWRGKTRDFIVTTDLNDDGTIKVDKEGKEKRSFRAPDENDWNLLKKKTEHDIDFSGKTVGAYIYDHLLQNPNQKIKGKLVRTIERKYYKDELKAILAKQIALQPEFFTENLLADCIRELYRKNQTQQQTLLSKDFLHLFVEDIIFYQRLLRSQKSTIANCALEKRSYIDKETNERKDVPIKVCAKSNPYYQEFRVLQWLQNLRIYEIETDLEVTSEFIETAEDYEALFNFLMSQKEIDNEGVLKYFLLAKNPQIKDKAAKSELKKWLTIYRWNYVYDRADNSSKKYPMNETGYELQRYLQKVEGLPANFLTFDITYQLWHLLYSVKDKVEFEKALKKFANKNQLDETSFVESFKNFKPYPNEYGSFSEKAIKKLLPLMRFGNHWDFSCIDVSTQKRIDDLINGVANDEIRTIIREKAEKFQLNNEISFQGLPLWLAQYIVYNRHAEATNIEKWTSVSDLEAYLEDFKQHSLRNPIVEQVVTETLRVVRDIWQQYGGGQANFFDEIHIELGRELKNTSKERERLSKQNQENENTNLRIKKLLAELKEDASIQNVRSYSPVQHDLLKIYEEGVFSSTDEIDEDIQKIRKKAEPNKTELQRYKLWLEQKYRSPYTGEVISLTKLFTEEYEIEHIIPQSRYYDDSLSNKVICESAVNKLKTNQLGLEFIQNHHGEKVRIAGNKEVTIFTEEQYKEFVKKHYAGNSAKQQKLFLNEIPEKMVARQMNDTRYISKYISEILSRIVRSDEKDEGVNSKNVIPCTGKITTALKQDWGLNDIWNELILPRFERMNQLTQTQLFTSYNDRLQKNLPTVPIKYSQGFQKKRIDHRHHAMDALVIACATREHINYMNNQHALDKSKDKKEKQQSRIDLRTILCEKKNNNWQFKKPWNTFTQEAKEALEHIVVSFKQNLRVINKATNYYEKWEEKNGVLVKKKVKQEGTNWAIRKPLHKETVSGKIVLDRKIGKDKILTATRKAVDITFTEKIISSITDTGIQKILLNYLKYKGSPEVAFSAEGLEELNKNITQYNDGKKHQPIYKVRIFEEGSKFPLGETGAKATKYVEAAKGTNLFFGVYQGKEKHTYATIPLNEVIERQKQGLPSVPERNEKGEPLLFSLSPNDLVYVPMVGEATETIDFSNLSKEQKERIYKTVSFTGNECHFVKSTIASLIKSYDAKSKIGELGSLNKLEVTISGDSRIKEVCIKLKVDRLGNITKA

SEQ ID NO: 22504 - protein, 1504 aa, unidentified
  REGION 1..1504: note = Cas Enzyme sequence
MKNILGLDLGTNSIGWAVVNGSVNDNGSEQLVKIQASGSRIIPMDAAMIGDFNKGNSISQTAERTRLRGIRRLSERYLLRRERLHRILDILGFLPSHFAQDLDRHGKIVKGKEPKLAWRKNEAGQFEFIFQDSFKEMLEDFKLNHPNLITDDKKVPYDWTIYYLRKKGLTSKISKEELAWILLNFNQKRGYYQLRGEEEEENNNKLVEFYALKVVAVEDSGEKKGKDIWYNVHLENGWVYRRTSNIPLDWVGKTKEFIVTTDLEKDGTPKKDREGNVKRSFRAPKEDDWSLVKKKTEADIDQTHKTVGTYIYDTLLGNPSQKIRGRLVRTIERKYYKEELKLILDKQKEFHPELQDRALYAACVEELYTINEAHRNNIGNRDFTYLFLEDILFYQRPLKSKKSLIDNCPYEENHCLDKETGEIKSFPVKCIAKSHPLFQEFRLWQFIVNLRIYRKGLAQDVDVTNELLKTEEDYVALFDWLNGKKEIDQKAFLKYPLFGLKKEVENYRWNYVQDKPYPCNETRSSMLARLEKCDISIEFLTKENEEALWHILYSVEDKNEIVKALQKFADKHDLNASFVDVFRKFPPFKKEYGSYSAKAIKKLLPLMRMGKYWSENSIDKGTRERIDKIITGEYDEKIENRVREKAIHLVDVSDFRGLPLWLVCYIVYGRHSESKEITQWKSPADIDSYLKSFKQHSLRNPIVEQIIIETLRVVRDIWKQVGNIDEIHVELGREMKNPADKRKKMTQQISENENTNLRIKYLLTEFLNPEYEVENVRPYSPSQQDILHIYEEGVLNSVSDLPEEISDILKKFTETDLKKRPSRSEVLRYKLWLEQKYRSPYTGEVIPLGKLFTSAYEIEHVIPQSCYFDDSFSNKVICEAEVNKLKSNLLGHEFIVKHHGEIVELPFGKKVRIFTVDEYEQFVKDNYSRTRGKMKKLLMDDIPEEFVTRQLNDSRYISKVVKSLLSNIVREKGEEEAISKNVIPCTGGVTDRLKKDWGINEVWNKIILPRFQRLNELTGTNKFTTKNVGIQEIPTMPLELQKGFNKKRIDHRHHAMDAIIIACANRNIINYLNNESATAKAELSRYDLQKLLCDKAKTDNNGNYKWVIRKPWASFTQDTYLALENIIVSFKQNLRVINKATNHFLHYNEEGKKIFVKQGKGDNWAIRKSMHKDTVFGEVNLRRIKTVALNEAMKNPQSIVVKDFKRKLLELWNLGFDAKRIKKYFEDNRETWSDINLSKIEVYYFSKDTKDRFFATRKPLDTSFDRKKIENNITDTGIQKILLRHLELKDNNPDIAFSPDGIDEMNRNIIQLNNGKYHQPIIKVRWYEQADKFAVGQTGNKSSKFVEAAKGTNLFFAVYESNILDKKTNTIIKKRNYATIPLNVAIERQKQGLPVAPEDENGNDPIFVLSPNDLVYLPTDDELANGIIAQPLDRGRIYKMVSSSGEQCFFIKHIVANVLVDKFEFSPLNKMERALTGEMIKMICMPIKVDRLGNVLESSSSHKK

SEQ ID NO: 22505 - protein, 1499 aa, unidentified
  REGION 1..1499: note = Cas Enzyme sequence
LGPNSVGWALVNSIVKEQTERIWIEMAGSRIIPMDAAVLGDFEKGNSISQTAERTRIRGMRRLRERQLLRRERLHKVLNILGFLPKHYRDEIDFNKHPGKFLANTEPKLPWVKNEQGKYTFLFLNSFEEMLQDFKEHQPSIVSDKKKVPYDWTIYYLRKKALTQKISKEELAWILLNFNQKRGYYQLRGEDEEENTGKQVGYYALKVVSVEATDEKKGKDIWYNVHLENGWVYRRSSNVPLDWEGQVKEFIVTTSINPDGTPQLDKSGEIKRSFRAPKEEDWMLIKKRTEMDIENSQKTVGCYIYDTLLQNPQQKIIGKLVKTIERKYYKEELRQILQKQCILHCELQDKNLYKQCVEALYPSNEAYRTNIVNRDFVYLLMEDILFYQRPLKSKKSLIDNCPYEEYEYVVDKHTGEVKKAHLKCIAKSHPLYQEFRLWQFLYNLRIYQKEKEINGTIHTDVDVTSEFLKIEDDYVTLFDWLNRREKIEQKTLLKYPAFNIKKDVDNFRWNYVEDKTYPCNETRSLILSCLNKANLSEDFLSYQKEEALWHILYSVNDKQEIVKALQTFARKNGLDGTFVDAFKKIRPFNKEYGAYSAKAIKKLLPLMRTGKHWNVESIDGKTKERIDKIITGEYDEKISNRVREKAIYLSDISCFKGLPLWLACYVVYGRHSEQKEITKWETPDDIDAYLSTFKQHSLRNPIVEQIIMETLRVVRDIWKKAGSIDEIHIELGREMKNPADKRKRMTAQILENENANLRIKALLTEFMNPEYEIEDVRPYSPNQQEKLRIYEDGALNAAEQVPEDIETILKKFKENKQPTRSEFLRYKLWLEQKYRSPYTGELIPLGKLFTEAYQIEHIIPQKRYFDDSFSNKVICESAVNSLKGAQLGYEFIKEHHGEKVETGFGKVVTIFSVTAYEQFIKEHYAKSKAKMKKLLMDDIPEQFIERQLNDSRYISKVIKGLLSNIVREKDESGEYEQEAISKNVLVCNGSVTDRLKKDWGMNDVWNNIVYPRFERLNTLIGKECFGHWENKNGKRIFQTEVPLEYQKGFSKKRIDHRHHAMDAIVIACATRNHINYLNNASASKNAQISRYDLQHLLCDKTKTDDKGNYKWVIKKPWDTFTQDTKGILDNIIVSIKQNLRVINKTTNIYQHFDTDGKRTFYKQTKGDSWAIRKPMHKDTVFGIVNLRKTKEVRLSIALDIPYLIVDKKVKKKVFQLLKYKYEKKRIEKYFKENACLWKELNVAKVPVYYFTESSSERMVAVRKTIDTSFNAKKIQESVTDTGIQKILLKHLEQKDDKADLAFSAEGIEEMNRNIIALNDGKKHQLIYKVRVYEPLGNKFNVGTTGNKGKKFVEAAKGTNLFFAIYRTEDGKRIYDTIPLNIVIEREKQGLLPVPDKDEKGNTLLFWLSPNDLVYLPTEEEREFDRINEPIDKKRIYKMVSSSGNQCFFIPVNIANAIVPILELGANNKAEKSWEGNMIKSICIPIKVDRLGNIIKIKKV

SEQ ID NO: 22506 - protein, 1520 aa, unidentified
  REGION 1..1520: note = Cas Enzyme sequence
MKKIVGLDLGTNSIGWALINAYIDEYNKEHLYGIEACGSRIIPMDAAILGNFDKGNSISQTADRTSYRGIRRLRERHLLRRERLHRILDLLGFLPKHYSDSLNRYGKFLNDIECKLPWVKDETGSYKFIFQESFKEMLANFTEHHPILIANNKKVPYDWTIYYLRKKALTQKISKEELAWILLNFNQKRGYYQLRGEEEETPNKLVEYYSLKVEKVEDSGERKGKDTWYNVHLENGMIYRRTSNIPLDWEGKTKEFIVTTDLEADGSPKKDKEGNIKRSFRAPKDDDWTLIKKKTEADIDKIKMTVGAYIYDTLLQKPDQKIRGKLVRTIERKYYKNELYQILKTQSEFHEELRDKQLYIACLNELYPNNEPRRNSISTRDFCHLFIEDIIFYQRPLKSKKSLIDNCPYEENRYIDKESGEIKHASIKCIAKSHPLYQEFRLWQFIVNLRIYRKETDVDVTQELLPTEADYVTLFEWLNEKKEIDQKAFFKYPPFGFKKTTSNYRWNYVEDKPYPCNETHAQIITRLGKAHIPKAFLSKEKEETLWHILYSIEDKQEIEKALHSFANKNNLSEEFIEQFKNFPPFKKEYGSYSAKAIKKLLPLMRMGKYWSIENIDNGTRIRINKIIDGEYDENIRERVRQKAINLTDITHFRALPLWLACYLVYDRHSEVKDIVKWKTPKDIDLYLKSFKQHSLRNPIVEQVITETLRTVRDIWQQVGHIDEIHIELGREMKNPADKRARMSQQMIKNENTNLRIKALLTEFLNPEFGIENVRPYSPSQQDLLRIYEEGVLNSILELPEDIGIILGKFNQTDTLKRPTRSEILRYKLWLEQKYRSPYTGEMIPLSKLFTPAYEIEHIIPQSRYFDDSLSNKVICESEINKLKDRSLGYEFIKNHHGEKVELAFNKPVEVLSVEAYEKLVHESYSHNRSKMKKLLMEDIPDQFIERQLNDSRYISKVVKSLLSNIVREENEQEAISKNVIPCTGGITDRLKKDWGINDVWNKIVLPRFIRLNELTESTRFTSINTNNTMIPSMPLELQKGFNKKRIDHRHHAMDAIIIACANRNIVNYLNNVSASKNTKITRRDLQTLLCHKDKTDNNGNYKWVIDKPWETFTQDTLTALQKITVSFKQNLRVINKTTNHYQHYENGKKIVSNQSKGDSWAIRKSMHKETVHGEVNLRMIKTVSLNEALKKPQAIVEMDLKKKILAMLELGYDTKRIKNYFEENKDTWQDINPSKIKVYYFTKETKDRYFAVRKPIDTSFDKKKIKESITDTGIQQIMLRHLETKDNDPTLAFSPDGIDEMNRNILILNKGKKHQPIYKVRVYEKAEKFTVGQKGNKRTKFVEAAKGTNLFFAIYETEEIDKDTKKVIRKRSYSTIPLNVVIERQKQGLSSAPEDENGNLPKYILSPNDLVYVPTQEEINKGEVVMPIDRDRIYKMVDSSGITANFIPASTANLIFALPKATAEIYCNGENCIQNEYGIGSPQSKNQKAITGEMVKEICFPIKVDRLGNIIQVGLCILTN

SEQ ID NO: 22507 - protein, 1153 aa, unidentified
  REGION 1..1153: note = Cas Enzyme sequence
MKNILGLDLGSSSIGWSVIRENSEEQELVAMGSRVVSLTAAELSSFTQGNGVSINSQRTQKRTQRKGYDRYQLRRTLLRNKLDTLGMLPDDSLSYLPKLQLWGLRAKAVTQRIELNELGRVLLHLNQKRGYKSIKSDFSGDKKITDYVKSVKTRYDELKEMRLTIGELFFRRLTENAFFRCKEQVYPRQAYVEEFDCIMNCQRKFYPDILTDETIRCIRDEIIYYQRPLKSCKYLVSRCEFEKRFYLNAAGKKTEAGPKVSPRTSPLFQVCRLWESINNIVVKDRRNEIVFISAEQKVALFDFLNTHEKLKGSDLLKLLGLSKTYGYRLGEQFKTGIQGNKTRVEIERALGNYPDKKRLLQFNLQEESSSMVNTETGEIIPMISLSFEQEPLYRLWHVLYSIDDREQLQSVLRQKFGIDDDEVLERLSAIDLVKAGFGNKSSKAIRRILPFLQLGMNYAEACEAAGYNHSNNYTKAENEARALLDRLPAIKKNELRQPVVEKILNQMVNVVNALMEKYGRFDEIRVELARELKQSKEERSNTYKSINKNQRENEQIAKRIVEYGVPTRSRIQKYKMWEESKHCCIYCGQPVDVGDFLRGFDVEVEHIIPKSLYFDDSFANKVCSCRSCNKEKNNRTAYDYMKSKGEKALSDYVERVNTMYTNNQISKTKWQNLLTPVDKISTDFIDRQLRESQYIARKAKEILTSVCYNVTATSGSVTSFLRHVWGWDTVLHDLNFDRYKKVGLTEVIEVNHRGSVIRREQIKDWSKRFDHRHHAIDALTIACTKQAYIQRLNNLRAEEGPDFNKMSLERYIQSQPHFSVAQVREAVDRILVSFRAGKRAVTPGKRYIRKNRKRISVQSVLIPRGALSEESVYGVIYVWEKDEQGHVIQKQRAVMKYPITSITREMLDKEKVVDKRIHRILSGRLAQYNDNPKEAFAKPVYIDKECRIPIRTVRCFAKPAINTLVPLKKDDKGNPVAWVNPGNNHHVAIYRDEDGKYKERTVTFWEAVDRCRVGIPAIVTQPDTIWDNILQRNDISENVLESLPDVKWQFVLSLQQNEMFILGMNEEDYRYAVDQQDYALLNKYLYRVQKLSKGDYSFRYHTETSVEDKYNGKPNLKLSMQMGKLKRVSIKSLLGLNPHKVHISVLGEIKEIS

SEQ ID NO: 22508 - protein, 1427 aa, unidentified
  REGION 1..1427: note = Cas Enzyme sequence
MKKILGLDLGTSSIGWALVNEAETSEEKSSIIKLGVRVNPLTVDELQNFEKGKSITTNADRTAGRSMRRNLQRYKLRRENLIEVLKEYNFITDETILSENGNRTTFETYRLRAKAAVEEISLEQFARVLLMINKKRGYKSSRKAKGAEDGTLIDGMEVAKKMYDEGITPGELCLQLLTAGKRYFPDFYRSDLQAEFDRIWNFQKQFYPDSLIDKVKDEVRGKNKSQTWAILAKYFVWKEVENSWNEEEAQTRRVEKEYRLVGIKRGVKREELKLENFQWRVKALSERMNPEELAIVLQEINGQISNSSGYLGAISDRSKELYFNRQTVGQYQMAVLDNNPNIGLRNMVFYRQDYLDEFNTIWEKQAEFHKELTEDLKKEIRDIVIFYQRRLKSQKGLINICEFERRQIEVEIDGKKKIKTIGSRVIPRSSPLFQEFKIWQTLNDIEVSVLGVKNKRKKQDDNSTTLLDSAENIDSLKLNVSRPLDADEKSLLAKELFIRDKLTKSDVLKLLFNNPQNLNLNFKNIDGNRTGSALYQAFSKILEISGHESINFKKSADEIVEQVKTIFSALGWNTEVLCFDSEKELDKQPYFKLWHLLYSFEGDSTPTGDGNLIQKIADLCGFEKDYASILANITFQEDYGSLSTKAIRKILPHLKDGNQYDVACEYAGYKHSKSSLKKEEIKNKVLKDKLELLPKNSLRNPVVEKILNQMVNVINAIITTYGKPDEIRIELARELKKNAKEREELTKSIADTTKTHEGIRAILQNDFGMSHVSRNAIIRYKLYEELKDNGYKTLYSNTYIPKEKLFSKDFDIEHIIPQARLFDDSFSNKTLEVKSINIEKGSKTAYDFVEEKYGEQGLQEYLNRCEVLFRDKKTKLRKLKMQESEIPEGFIDRDLRNTQYIAKKALSMLNEICRRVVATTGAITDELREDWQLVDVMKELNWEKYKVLGLVEYFEDNDGRLIGRIKDWTKRNDHRHHAMDALTVAFTKDVFIQYFNNKNASLKPDTNEAAIRNKYFQNGKAIPPMSLDEFRAEAKKHLNDTLISIKTKNKVVTINLNRTKKKNGINKKQQQIPRGQLHLETVYGSHKQYVVKEEKVNASFDAAKIATVNKPAYRDALLRRLQENGNDSKKAFTGKNSLDKQPVWLDAKQNECVPEKVKTVMLETVYTVRKPIDEKLNVDKVVDARIRKLLQDRIKEYGNAKSAFANLDENPIWLNKEKGITIKRVSVFGISKAQSLHEKKDKDGNFILDKDSRRIPVDFVNTGNNHHVAIYRKPVLDKKGQAVFDENGELKFELEEVVVSFFDAVTRVNLSQPIIDKDYKRSEGWKFLFSMKQNEYFVFPNEKTGFDPKEIDLLNPENYALISPNLFRVQKIASKDYVFRHHLETVVADRKELQEITWKRISSLSILNRIIKVRVNHIGQIVMIGEY

SEQ ID NO: 22509 - protein, 1269 aa, unidentified
  REGION 1..1269: note = Cas Enzyme sequence
RKKALYEKISKEELAWIILNFNQKRGYYQLRGEEEEKSTKNVEFYSLKVTDVIADTPNNKGEIWYSIHLENGWVYRRASKISLEDWKGKVRDFIVTTELNEDGSIKLDKEGKEKRSFRAPNEDDWNLLKKKTEQNITLSGKTVGEYIYDHLLQNPNQKIKGKLVRTIERKFYKEELKAILEKQVALQPELFTEELFVDCVRELYKNNEIHQNSLSSKDFVHLFLNDIIFYQRPLRSQKSNISSCSLEYRFCIDKETKQRRKTYLKVISKSNPYYQEFRVLQWLSNLKIYRKEDDKDVTSEFISSIEDKETLYEFLMSEKEVSNKSVLEFLLMKSLREIYPFAKETELKKELKKEITKYRWNYVYEEENDNKKYPMNETGYEIKKRLKEVKNIPDNFLTKDIEYQLWHIIYSVTDKYEFEKALMKFAQKHNLDAESFVENFKRIKPYPSDYGAFSEKAIKKLLPLMRFGKYWNYSDISEPVQARISDIINGVDNESIKTIVREKAEKFQLSQEADFQGLPLWMAQYIVYGIHSEAVDIQRWTSPSDLEEYLKGFKQHSLRNPIVEQVVTETLRVVKDIWEYYGKGEENFFGEIHIELGRELKKTAEERNRMTREINENEETNLKVKKELQQIFENKSAENVRPYSPIQQEKYKLWLEQKERSPYTGQPIPLSKLFTDEYQIEHVIPQSRFFDDSLSNKVICEAAVNAEKGAQLGLEFIKRHGGEILDIGLNKKVTVLNEKEYKELVNELFANNRGKKAKLLMEEIPEKMVERQLNDTRYISKFISQILSNIVRSPQEDDGVNSKNIIPCTGKITAALKQDWGLNDVWNDLILPRFERMNNLTQTELFTTYSEKYQKKIPTVPLEHAKGFQKKRIDHRHHALDALVVACATRSHINYMNNQHALDKHKAKEERQNARIDLRTVLCEKKYNDNAEDKYNWTFKKPWNTFTQDVRSALEMVVVSFKQNLRVINKATNYYEKWVEEKGKKVKKKVKQEGINWAIRKPLHKETISGKITLERVKVGKGKILTATRKSIDPSFTEKTIASITDTGIQKILLNYLAYKGSPELAFSPEGIEEMNKNIAKYNDGKTHQPIYKVRIFEEGSKFPLGEIGTKSQKYVEAAKGTNLFFGIYQGKEKRSYATIPLDEVIERQKQGLTSVPEFNEKGEKLLFSLSPNDLVYVPVEGEDTESIDFTNLSKEQRERVYKTVSFTGNQCFFVKQTIASLIKSYDPQTKIGELESKNKLEVTICSRIKIKESCIKLKIDRLGNISKA

SEQ ID NO: 22510 - protein, 953 aa, unidentified
  REGION 1..953: note = Cas Enzyme sequence
KNNLSEEFIEQFKNFPPFKKEYGSYSAKAIKKLLPLMRMGKYWSIENIDNGTRIRINKIIDGEYDENIRERVRQKAINLTDITHFRALPLWLACYLVYDRHSEVKDIVKWKTPKDIDLYLKSFKQHSLRNPIVEQVITETLRTVRDIWQQVGHIDEIHIELGREMKNPADKRARMSQQMIKNENTNLRIKALLTEFLNPEFGIENVRPYSPSQQDLLRIYEEGVLNSILELPEDIGIILGKFNQTDTLKRPTRSEILRYKLWLEQKYRSPYTGEMIPLSKLFTPAYEIEHIIPQSRYFDDSLSNKVICESEINKLKDRSLGYEFIKNHHGEKVELAFDKPVEVLSVEAYEKLVHESYSHNRSKMKKLLMEDIPDQFIERQLNDSRYISKVVKSLLSNIVREENEQEAISKNVIPCTGGITDRLKKDWGINDVWNKIVLPRFIRLNELTESTRFTSINTNNTMIPSMPLELQKGFNKKRIDHRHHAMDAIIIACANRNIVNYLNNVSASKNTKITRRDLQTLLCHKDKTDNNGNYKWVIDKPWETFTQDTLTALQKITVSFKQNLRVINKTTNHYQHYENGKKIVSNQSKGDSWAIRKSMHKETVHGEVNLRMIKTVSFNEALKKPQAIVEMDLKKKILAMLELGYDTKRIKNYFEENKDTWQDINPSKIKVYYFTKETKDRYFAVRKPIDTSFDKKKIKESITDTGIQQIMLRHLETKDNDPTLAFSPDGIDEMNRNILILNKGKKHQPIYKVRVYEKAEKFTVGQKGNKRTKFVEAAKGTNLFFAIYETEEIDKDTKKVIRKRSYSTIPLNVVIERQKQGLSSAPEDENGNLPKYILSPNDLVYVPTQEEINKGEVVMPIDRDRIYKMVDSSGITANFIPASTANLIFALPKATAEIYCNGENCIQNEYGIGSPQSKNQKAITGEMVKEICFPIKVDRLGNIIQVGSCILTN

SEQ ID NO: 22511 - protein, 1151 aa, unidentified
  REGION 1..1151: note = Cas Enzyme sequence
MRSNVHFRVKENIIERKKLVEELNRIWEKQLDLRKANGTSLHLEDEAASEILAKILYKSNQEKQGQLRNMKLQDIFSKDIIYYQRPLKSQIKSIALCKFECEHGIQKRVIPQSHPLFQEFRILDLINNLRIYNKALQDCSSQFITNEKRDELIILFNKQEIIKSKKILEVLIPKEFRDDYTLSHDVGSDKEFIGNKTLIRIKKALKGDPREKEIVNDTKAMESIWHLLYSVDTNEAIVRALIRPKNDFKLDESTAEKLSKIIFESKYGSLSAKALRKLLPLMRSGKLWSVEGIEAVNGLRILMDKLIDGEIDDSILNKTRKFIEAHGIKDIYGFTALPYWLAASIVYQDHSNVGEIKMFLSPDEIKPIINNDLRNPIVQQILNEAMQVVADIWKTYGKPDEIRIELSRDLKNSSAERQKITERQNENKKINSAIKNKLVELKRGDTDLERYKLWMEAFDQNGIVPKDAAEYRKHLMDTIKVSGAELEKYKLWEEQKHISPYTGRPIPLSRLFNGNEYQVDHIIPKQRFFDDSLSNKVVVEANVNADKGKSGRNLMAMEYIELGSTDSQIKLLNTDSYIELVDRTYRGAKKKKLLSKEIPQDFVISQLKNSQYISVAIRKQLERIVGKENVHTTTGGITDLLREQWGIAHLFKELLLPRYEALEAKLAQKGKPEKIIDYVFDQQRQKHILKLKDYSKRLDHRHHAADALVIACTKPIHIQRLNNLGQIYSSKELKDRQVFENPKVRKHGGAWHFPEPWKGFVADAKENLEGCIVSVKNRKRLVTKGRNYYKMLVDGKPTQAKQKNGKLLSVRVQLHDQLPFGQSKELMKTKLKECLDLLKRMRAPKLQWKDDQIKSCFVNKQDFDLSVKLMDDFNNDPAKVIKHLQKTGQSPELLEREFTLVIPRYEKRIALNTLTAPQVKDIIDPVIREQVIKHLQPFGGIEKDALKKAFSGENIAKFNKDRTVPVGKVRVYQDRNMILGESAKFQLNRKNSLNDKLFIETGGNYAFAIYENQSDLDASVWPARRETAVISNFDAIQKVINGDEIFPEVTGSRKFILRANDVIYMPLVEQKPNFVDWDNSKEICSRLFIMTQATGNIVYFAPISVAAMSMPKFEFGTQDALYMLEGKPMKDSCIPMKVDRIGNLVPLFNYD

SEQ ID NO: 22512 - protein, 1135 aa, unidentified; identical to SEQ ID NO: 15172
  REGION 1..1135: note = Cas Enzyme sequence

SEQ ID NO: 22513 - protein, 1141 aa, unidentified
  REGION 1..1141: note = Cas Enzyme sequence
PLKSKTALISDCSLEFRPIKDKKGVLVKDINGKQIVKPLKCIAKSNPIFQEFRLLQFVKNLKIFRKDIANDVDVTNDYLKTEEDAAELFNWLNDKAEISQKQFVAYPKFKLKDDKYRWNFVEDKIYPCNETRNQFLNAIAKIDVDKSFFDTKNTQDLWHILYSVTDKTEITKAITTFANRHSLPDGFIVNFSKLKPYKKDYGSYSEKAIKKLLPLMRFGNHWNEKNIDTKTLVRIDKIETGEFDENIKTRVREKALHLNVLSDFKGLPLWLTSYIVYDRHSESSDISKWKTPADIEHFLKHDFKQHSLRNPIVEQVITETLRVVKDIWQYYGEGKENFFNEIHIELGREMKNNAADRKRITDNISQNENTNLRIKAILTELKNDGVNDIRPYSPSQQEILKIYEEGIYSSENNKEKLEEVEKIRRNAKPTTSEIIKYKLWLEQGYISPYTGKLIPLSDLFTTKYQIEHIIPQSRLFDDSLSNKVICESEVNDLKGNKTALEFILKNEDRIVTLTGGKTVKIFTKDAYNQHITNYYSKNKNKQKRLLSEDIPEKFIERQLNDTKYISKIVKNLLSKIVREDDEQEVTSKHIVSLNGSITSRMKQDWGLNDVWNKIVTPRFERLNAITNSTDFGKLEFKKDEFGNTGKQVFQTTVPDAIAKGFSKKRIDHRHHALDALVIACVNRTHINYLNNLNAKDENDKTIKHELRNKICFKTKPDVNGNYKWEFYKPWDNFTKNTEDELNQTIISFKQNTRVINKTVNKYQVWKEEDGAMKKVTTKQTKGDNWAIRKPMHAETVSGKVFLKRIKQSHITIANAIEQIELIVDKEVKKQLVAKIKQYPNNDAGLKKHLKAFPVMIDGKAIDKIQIYETIEATATRKTLDITFDEKRIEKITDTGIQKILLNHLQQEIYQNAIDENGRKIPAHEVAFSENGLDELNKNITALNNGKKHQPIKKVRVFEEGSRFGLGQVGNKSDKYVEAAKGTNLFFAIYQDEKGKRNYKTIPFNEVIERQKQGLCSALEIDENRNRLLFTLSPNDLVYIPTEDEKDNLTHLNFDKISKEQAERICKFVSCTGGEGHFVTHNYSKEIISNENGSNNKNERMLEFNTSNTIYDEKEKPVMIKSVCWKLEVDRLGKIKKLSDDK

SEQ ID NO: 22514 - protein, 1382 aa, unidentified
  REGION 1..1382: note = Cas Enzyme sequence
MKRILGLDLGTASVGWAVVNEAENSEEQSSITALGSRVVLLSADEKNNFLTGKSVSATATRTAKRGARRNLQRYKLRREWLKDALVSAGIINENTCLNDSNSKELFATYASRAKAVTEQIALEDFAKVLFMINKKRGYKSNRKTDNTESEDGQIIDGLDLAKKLKARNITPGQYLLELFKENKKNKAVFYRSDLQEELNRIWAFQSQFYPEILDNTLLSAITNKSKKAVIGLFKGIKNIEIADVKTKERTEKALTWRSEALHKQLETGEVAYAIAEVMGAISQSSARLALLSDNSKHLEFEGLTIGQYLLKLLRNNPNSSLKNINFYRKDYEDEFNSIWNKQASFYPQLTESLRSTIFNSIFMQRNLKSCKALLANCELEFAEKKITLPDGSCQTRTIYSKVCPKSSPYFQEFQIWQSLSNIRIIDKENAHLTKGQELSYDQKVMLLSELMIHSELKANKVIEILFGKKSNYTINMPSIKGNRTNETIFNALLEIVELTGHSIDNIVKTDANQQIEAVKNIFESLGYKTNFITFDSTIEGKDGLNQPYYKLWHLLYSYCGDNSKTGNEALIRKIEELTGLEKEEAKVLANCTFENDYASLSTKAIRKLLPHLQSNLDYSEACEAAGYNHSKRSRTKEDIKNKVYKDKLDLLPRNSLRNPIVEKILNQMIHVINQTSEAYGKPDEIRIEMAREIKKNKIQREKLANQLRQNTAELERIKDILRKDFKLSHISHNDILRYRLYEELSLNGYKTLYSNTYIERQQILDPTVTIEHIVPKALAFDDSFSNKTLEIQSVNGEKSNQTAFDFISKKYGAEALEQYINRVNNLFENGKISKTKRDNLLRKQEDIPSDFLNRDLRNTEYIAKKALEILEDYVPRITPTIGEITKTLREDWQLVNIMRELNWEKYNSLGLTSFYYDRNGTKIGLIHNWTKRNDHRHHAMDALTIAFTKPSIIQYLNNLKSQNDKGSSIYAIQVKETYIDETRKRLIKPPYDIKQFRNDAKQMLDNIFVSHKAKNKVVTPNTIVTKKKRKAGKETKAEKKRTFLTPRGALSNETVYRKICNYETKEITINSKLTYEIALTIAKKKEREAVLERLAQHNNNPTTAFKNYNKNPIMLQTSVGEKPLMSVKIVNYKELFVKRSEINEKLDIKRVLDAKVRARLTDRLKEYNNDPKAAFANLEENPIWLNEEKGIALKHVTTIERVVGLPIRPKRNINGEIMKDEQGQPLKSHYVATGGNHHVAIYEDEEGKWHEKVVSFNEAASRAIQKFPIIDKDFNKELGWVFQFTMKQNEMFVFPDKESGFDPLAIDLKDPANKSLISKHLYRIQKISSGDYYFRHHLETNVEENKEVKGITWKRIRSVSSLQGIIKVRVNHIGQIIDVGEY

SEQ ID NO: 22515 - protein, 1186 aa, unidentified
  REGION 1..1186: note = Cas Enzyme sequence
VSLVAGVITKTRTSRKDENFMENGFTYRLGLDIGIASVGAAVVQTNSFDKPCHLTEPNVRTFPAAECRENGKYYGKSAAVPRRECRSTRRRIKRKQLRMNCIKQTLQKAGLIDIDEFMKRYSDGTLPNVYQLRYEGLDRLLTDDEFAQILIHIAKHRGFLSTRRADKKDKESGAILAATSANQKLMMEKGYRTVGEMMYLDESFHTPCSSNEQGFIVTPRNKAKDYKHTIYRSMLVDEVHVLFDAQRKLGNTKATKTLESEYLEIMTRQRSYDLGPGLQADGTKSPFAMDGYKSNAGECTFYKEETRAAKGTYTAELSITLQKINNLKLVDRYGDGRFLTDEEKQKILEYISKHKTMKYKTVKTLLGIDPMIRFNLLNYGKKKKTKKESDDKTKDDSTKKKSTKKSKTKAETSEKTDKDSNKEETELERINRIEDTVFVSMEFTLSYTDCLKTRIKTLSETEKRDLFDKVGELLTSYKTDEARIEKLSNLGLTSEEIDHLLDLNPKGYARLSHKAMKEIEPYLVQGLTYDKACTAAGLDFQVTYTGEKMKYLKGPEINNIINNIQSPVVRRSVAQTVRIINAIIRKYGSPQAVNVELSREMSKSFLERKKAETAMELRHKENVKFCEEIKKLGINSPNGEDITRYRLWKDQNGICLYSGEKIPTRAMFTREYEIDHIIPYSISLDDRYQNKVLVKAKENQTKGNRLPYEYFGHDKTRWAAYENRVESLIKSDGKKAHLLKKNYTKEDQREFTERNLNDTRYATTVVYNMILQYLYLEPYNCDGKTKQVYAVNGAVTAYLRKRWGLNKKDRTNDRHHAMDAVVIACCTDEMIAKVTKYMQDRETAYSKNFRIADEETGEILTRSNFTREQYDEAYGVRFPVPWETFREEIDLRIFNDDPFGYLMKDRNLQIKIDYPDWMYGEEESPVAKGKYINYIRPMFVSVACSHKATGRAHEETIRSAKYHDSDSLVISKKALKDLKLNKDNEIKDYYNKECDPLLYEALRNRLLEYNGDGKKAFAEEFHKPKADGTDGPVVKSVKVIEKKTTGVQINHGLAGNGNMVRVDLYQKEGKYYAVPIYISDMVKKEIPRKAATGGKQYKDWRVMNPDDFLFSVYPRDLLHLKKWKPFNDGLSNDIYMYFAGLDPASASFAVTAHDSSISLRGIGIQNLELIEKCQVDMLGEIHVCRQ

SEQ ID NO: 22516 - protein, 1436 aa, unidentified
  REGION 1..1436: note = Cas Enzyme sequence
MKRILGLDLGTNSIGWALVNEAENKDERSSIVKLGVRVNPLTVDELTNFEKGKSITTNADRTLKRGMRRNLQRYKLRRETLTEVLKEHKLITEDTILSENGNRTTFETYRLRAKAVTEEISLEEFARVLLMINKKRGYKSSRKAKGVEEGTLIDGMDIARELYNNNLTPGELCLQLLDAGKKFLPDFYRSDLQNELDRIWEKQKEYYPEILTDVLKEELRGKKRDAVWAICAKYFVWKETYTEWNKEKGKTEQQEREHKLEGIYSKRKRDEAKRENLQWRVNGLKEKLSLEQLVIVFQEMNTQINNSSGYLGAISDRSKELYFNKQTVGQYQMEMLDKNPNASLRNMVFYRQDYLDEFNMLWEKQAVYHKELTEELKKEIRDIIIFYQRRLKSQKGLIGFCEFESRQIEVDIDGKKKIKTVGNRVISRSSPLFQEFKIWQILNNIEVTVVGKKRKRRKLKENYSAIFEELNDAEQLELNGSRRLCQEEKELLAQELFVRDKMTKSEVLKLLFDNPQELDLNFKTIDGNKTGYALFQAYSKMIEMSGHEPVDFKKPVEKVVEYIKAVFDLLNWNTDILGFNSNEELDNQSYYKLWHLLYSFEGDNTPTGNGRLIQKMTELYGFEKEYATILANVSFQDDYGSLSAKAIHKILPHLKEGNRYDVACVYAGYRHSESSLTREEIANKVLKDRLMLLPKNSLHNPVVEKILNQMVNVINVIIDIYGKPDEIRVELARELKKNAKEREELTKSIAQTTKANEEYKTLLQTEFGLTNVSRTDILRYKLYKELESCGYKTLYSNTYISREKLFSKEFDIEHIIPQARLFDDSFSNKTLEARSVNIEKGNKTAYDFVKEKFGESGADNSLEHYLNNIEDLFKSGKISKTKYNKLKMAEQDIPDGFIERDLRNTQYIAKKALSMLNEISHRVVATSGSVTDKLREDWQLIDVMKELNWEKYKALGLVEYFEDRDGRQIGRIKDWTKRNDHRHHAMDALTVAFTKDVFIQYFNNKNASLDPNANEHAIKNKYFQNGRAIAPMPLREFRAEAKKHLENTLISIKAKNKVITGNINKTRKKGGVNKNMQQTPRGQLHLETIYGSGKQYLTKEEKVNASFDMRKIETVSKSAYRDALLKRLYENDNDPKKAFAGKNSLDKQPIWLDKEQMRKVPEKVKIVTLEAIYTIRKEISPDLKVDKVIDVGVRKILIDRLNEYGNDAKKAFSNLDKNPIWLNKEKGISIKRVTISGISNAQSLHVKKDKDGKPILDENGRNIPVDFVNTGNNHHVAVYYRPVIDKRGQLVVDEAGNPKYELEEVVVSFFEAVTRANLGLPIIDKDYKTTEGWQFLFSMKQNEYFVFPNEKTGFNPKEIDLLDVENYGLISPNLFRVQKFSLKNYVFRHHLETTIKDTSSILRGITWIDFRSSKGLDTIVKVRVNHIGQIVSVGEY

SEQ ID NO: 22517 - protein, 1427 aa, unidentified
  REGION 1..1427: note = Cas Enzyme sequence
MKHILGLDLGSNSIGWALIEQDFDNKQGKILGLGSRIIPMEQGILGEFERGNKVSQTAERTEFRGIRRLRERHLLRRERLHRVLHLLGFLPAHYDAQIDFTKRFGKFIGDSEPKLAYNNEGFIFLESFNEMVEDFKKHQPQLFYIKSNGEESKIPYDWTIYYLRKKALYEKISKEELAWIILNFNQKRGYYQLRGEEEEKSTKNVEFYSLKITDVIADTPNTPNNKGEIWYSIHLENGWVYRRASKISLEDWKGKVRDFIVTTELNEDGTIKLDKEGKEKRSFRAPSEDDWNLLKKKTEQNITFSGKTVGEYIYDHLLQNPNQKIKGKLVRTIERKFYKEELKAILEKQVALQPELFTEELFVDCVRELYKNNEIHQNSLSSKDFVHLFLNDIIFYQRPLRSQKSNISSCSLEYRFCIDKETKQRRKTYLKVISKSNPYYQEFRVLQWLSNLKIYRKEDDKDVTSEFISSIEDKETLYEFLMSEKEVSNKSILEFLLMKSLRETYPFAKETELKKELKKEITKYRWNYVYEEENDSKKYPMNETGYEIKKRLKEVKNIPDNFLTRDIEYQLWHIIYSVTDKYEYEKALMKFAQKHNLDAESFVENFKRIKPYPSDYGAFSEKAIKKLLPLMRFGKYWNYSDISEPVQVRISDIINGVDNENIKTIVREKAEKYQLNQEADFQGLPLWLAQYVVYGIHSEAADIQRWTSPSDLEEYLKGFKQHSLRNPIVEQVVTETLRVVKDIWEYYGKGEENFFDEIHIELGRELKKTAEERNRMTREINENEETNLNVKKKLQELFENKSAENVRPYSPIQQEKYRLWLEQEKESPYTGQPIPLSKLFTDEYQIEHIIPQSRFFDDSFSNKVICEAAVNAQKGAQLGLEFIKKHGGEIIEIGLNKKVTILNEKEYKELVNKHFANNRAKKAKMLMEEIPEKMVERQLNDTRYISKFISQILSNIVRSPQEDNGVNSKNIIPCTGKITAALKQDWGLNDVWNDLILPRFERMNNLTQTELFTTYSEKYQKKIPTVPLEHAKGFQKKRIDHRHHALDALVVACATRSHINYMNNKHALDKHKAKEEKQNARIDLRTVLCEKKYNDNAEDKYNWTFKKPWNTFTQDVRSALEMVVVSFKQNLRVINKATNYYEKWVEEKGKKVKKKVKQEGINWAIRKPLHEQTVAGKITLERVKVGKGKILTATRKSIDSSFTEKTIASITDTGIQKILLNYLAYKGSSELAFSPEGLEELNKNIYLYNDGKPHKPIYKVRSYEKGSGRFVLGERGAKSKKYVQGAPNLYFGVYQSKGKRSYATIPLAEVIERQKQGLTSVPKFNEKGEKLLFSLSPNDLVYVPMEGEDTENIDFTNLSKEQRERVYKTVSFTGNQCFFVRQDVATSIVNKMEYSSLNKMEKGIDGIMIKEFCIKLKIDRLGNISKA

SEQ ID NO: 22518 - protein, 1380 aa, unidentified
  REGION 1..1380: note = Cas Enzyme sequence
MKRILGLDLGTTSIGWALVNEAESNNEASSIVRLGVRVNPLTVDEKSNFEKGKAITTNADRQLRHGARINLQRYKLRRQNLHDCLQKQGWLGTEAMYEEGKASTFETYKLRAKAAEEEISLHEFARVLFMLNKKRGYKSNRKANNKEDGQLFDGMTIAKKLYEEHLTPAEYSLQLLNKGKKFTQGYYRSDLNAELERIWGEQKKYYPEILTDEFKQQLEGKTKTNTSKIFLAKYGIYSADLKGLDRKLQPLKWRVEALKQQVDKEVLAFVISDLKGQIANTSGLLGAISDRSKELYFNKQTVGQYLWASLEENPHISIKNKPFYRQDYLDEFEKIWETQAAFHKQLTPELKQEIRDIIIFYQRPLKSKKSLISVCELEQRKVKATIDGKEKEITIGPKVAPKSSPVFQEFRIWQNLNNVLLIDNDTNEKRPLDEDERNLLYKELSIKAKLSKTEALKILNKKGKQWDLNYKELEGNRTQAILFDCYNRIITLTGHEECDFKKIKASEIRHYVSTIFKNLGFSTEILDFDPSLEKHELEKQPMYQLWHLLYSYESDNSRTGNESLLRKLETTFGFPEEYATVLCDVVFEEDYGNLSVKAMRKILPYLQAGNDYSQACSYAGYNHSRHSLTKEELDQKVYKERLELLPKNSLRNPVVEKILNQMINVINAIIDEYGKPDEIRIEMARELKSSAAERENRTRSISQGNAENQRIRKILEKEFALSYISRNDIIKYKLYEELKPNGFKTLYSDTYIPKDKLFSKNFDIEHIIPKARLFDDSSSNKTLEARDINLTKSSKTAFDFVKEKYGEQGAEAYKKKLDMLLDNDVISKAKYNKLLMAEADIPSGFIERDLRNTQYIAKKACEILGELVRTVTPTTGEITNRLREDWQLVDVMKELNFEKYEKLGLTEIVEDRDGRKTKRIKDWTKRNDHRHHAMDALAIAFTKPSFIQYLNNLNARSNKGDSIYAIENKELHYEEGKLRFNAPIPVNEFRAEAKRHLSAILVSIKAKNKVMTQNVNKIKTKHGIIKKIQLTPRGPLHNETIYGTKMRPIIKMVKVGAALDEATINKVSSPAIREALLKRLNEYSGNAKKAFTGKNTLEKNPIYLNVERTKVVPALVKTVEWENYHPIRKPITPDLKVDKVIDKGIRDILKARLEEFNGDAKKAFSNLEENPIYLDEAKKIALKRVSIEGVLSAIPLHTLKNQAGKPINGKDGKPVLGNYVQTSNNHHIAFYYDEDGNLQDNAVSFFEAAERKSQGIPVIDKDYNRDKGWRFLFTMKQNEYFVFPNEATGFIPSEVDLTDEANYGIISPNLYRVQKVSRIDKGTSASRDYWFRHHLETILNDDAKLKNLAFKRIRGLLELKDIIKVRINSTGKIVAVGEYD

SEQ ID NO: 22519 - protein, 1530 aa, unidentified
  REGION 1..1530: note = Cas Enzyme sequence
MKNILGLDLGTNSVGWALISVDENGNLVKDIRLGSRIIPMSQDVLGKFDSGVTVSQTAERAEYRSHRRLLERALLRRERLHRVLHLLGFLPEHYAACIGWDRNDNATYGKFLPETEPKLAWRKADDGSYRFVFMQSFEEMLHDFKACQPSLVANGKRIPLDWTLYYLRTKALTKPIAKEELAWILLNFNQKRGYYQLRGEEEEETPSKRVEYHELKVVKVEATGEGKGGNVWYNVLLENGWVYRRQSKYSLDKWLGQTLPFIVTTDLEADGVTPKRDKEGNVKRSFRSPKEDDWTLVKKRTEDHLEKSGLTVGAFIYQHLLADPSEKVRGQLVRTIDRKYYKRELQAIIAKQMEFHPELRDAELLKACAEELYRNNEAHRAQLLAKDFKHLLVEDVLFYQRPLKSKKSLIANCPYETRQYINKETGEIKDVNVKCIAKSNPYFQEFRLWQWISNLRLLRQADGQDVTAAYIKGNEDKERLFDLLNNQGEIKQEHILRDFLKLKKPKGGEFPLRWNYVDDKIYPANETRHAINKAIKGMAVDKEEKETLGQLLDQPAVAYMLWNLLYSITDRNELASALRRFALTHGVSSVDAFVESFLKVKPFKKEYGAYSEKATKKLLQVMRLGKYWCGDELPEPAKRRKGNKQAVYDEMANRGICKQTLQNISNIIEENIDERLMGALLNPERPLTELSHFQGLSVSDACYVVYGRHSEVAEIVKWKDAGELNTFINNFKQHSMRNPIVEQCVLETLRTVRDVWEQEGQIDEIHVELGRNMKRTAEQRARDTQAIQRNENTNMRISLLLTELKNDPSISDVRPYSPSQRELLKIYEEGALENLTNQDEDIAKISRLAQPSASELRRYKLWLDQKYVSPYTGRPIPLAKLFTPAYEIEHIIPQSRYFDNSFSNKVICEAEVNKLKDNNLGMEFIKKFGGKTKGILDEEAYKLHVTTNYAHNPAKRSKLLMEDLPTDFNSRQLNDTRYISKTVMSLLSNVVREEGERETRSKHVVVCTGGVTDTLKKDWGLHDVWNNLVHPRFIRLNNLTGTQDFGYWRALDEEKRKQGEDSKKVFQITLPPECQRGFVKKRIDHRHHAMDALVIACASANIVNYLNNQSAANPNSREDLRRLVCDIKRRIRKPWPTFTQDAQAALEDLVVSFKNTVRVVNKASNTYLRYDKDGKKKRFKQEGEGLKAIRKPMHKETYYGEVNLIRKEMLPLKRALEDVNAIVDKELRACIKGLLRDGFNLQQVLANFKAKDFKFNKRDIKKVEVYVSSAKSTPMVATRKSLDTSFNAKRIADITDTGIQKILLNYLKANDNSPEQAFTPEGIAYLNEHIAEYNNGKPHQPILKVRVSEIRGAKFAVGQTGSKKTKFVEAQSGTNLYFAIYEDKEGKRHFETIALNVAAERLKMGQTPVPETNDAGLPLKFYLSPNDLVYVPTDEDRAAARPSIDKRRIYKMVSATDRECYFLPFEVASIIADKVEFEAKNKVGRVIAALEYKEKSEEENKTSAGSKVMIKDVCWKLEVDRLGNITKIVR

SEQ ID NO: 22520 - protein, 1069 aa, unidentified
  REGION 1..1069: note = Cas Enzyme sequence
MAAIAIDDDGKPTEILSAISLIHDSGVDPDSAKSAATRLATSGIARRTRRLYRRKRKRLAKLDKFISSQGWPLKEFEEYEDPFYPWRVRAELATTPITDQQELGEKLSIALRHIARHRGWRNPYSKITALYTVAEPSDALVSIQEQCATELGRPIPPTTTVGQLIAGMNLGKTRLRGENSLLATRPRQSDNANEIHTIAKVQGLSNELVRQIIDHVFAAESPKGSAAEQVGKDPLQPTKKRALKASDAFQQYRIAALIGNLRIRGGKGNRRLTTEETRLVFDYLRSLPAKQEPTWQLVAEQLKIDRGNLVGTAIMTDDGERAGAKPPVHETNRLMESTKIKPLAAWWKSADADARAAMVKALSNAEVDDFDSQAGAQVQEFFFGISDEDQEKLDGLHLPIGRAAYSEDTLDRLTKRMIGEGMDLYEARQAEFKIPNDWAPPAPEIGERVGNPAVDRVLKATARWLNAAERQWGAPKSVNIEHVRAAFMSESSARELDRDNQQRAKRNVKVVAEMQEKLGIEGRPSRADVWRFQSIQRQNGKCAYCGTQISYKNSEMDHIVPQAGEGSTNTRDNLVAVCRECNSSKSNIAFAVWAENTSRPGVSVQKAVERTRHWVTDSGLRKPEFDKFRKQVCDRLRRKATDEPIDARSLESVAWMANELRSRIAQKFKDGDTKVRVYKGALTAEARRASGIAGKLEFVDGKGKSRLDRRHHAVDAAVVAFTSNYVAETLALRSNMKFDQELRRKAPQWREFTGSDHVHQVEWTKWKYRMQALAELLNNALAQDRIVVMHNLRLRLGNGAAHEDTIGKLTRLKVGDAISTTDIDRASSEALWCALTRDPDFDPKTGLPENPNRTIRIHGTHLTASDEITVFPVAAASIPIRDGFAKLGSNYHHVRLFRVPSGKKYKYCLMQVYTVDLLKFRKEDLFTVELKPQTISVRTCEALLRKALANGTAEYLGWLVSDDELLIDTSSFDTPGIVKLREEYGPVNRWRLAGLTSVTRLNLRPLYLSKEGLKPNVNPEIKKIIDNRSWIITVNKLFSSGHVKIIRRDALGRPRLHSAAHLPICWEVK

SEQ ID NO: 22521 - protein, 1157 aa, unidentified
  REGION 1..1157: note = Cas Enzyme sequence
MGSRVVPLTNLGDDKAFSKGKAFTASQERTARRTMRRGFARYQLRRYRLRRELEKVGMLPDAALIQLPLMELWELRERAATAGERLTLPELGRVLCHINQKRGYRHVKSDAAAIVGDEGKKKKDSNSAYLADIRANDEKLQDEHKTVGQYFAEQLRQDQSESPTGGISYRIKDQIFSRQCYIDEYDQIMAAQRVHYPDILTDEFIRMLRDEVIFMQRPLKSCKHLVSLCEFEKQEKVMRVQQDDGKGGRQLVERRVKFGPKVAPKSSPLFQLCRIYEAVNNIRLTRPDGSPRDIAPEERAKIVAHLQSSASLSFAALKKLLKEKALIADQLTSKSGLKGNSTRVALASALQPYPQYHHLLDMELETRMMTVQLTDEETGEVTEREVAVVTDSYVRQPLYRLWHILYSIEERDAMRRALITQLGMKEEDLDGGLLDQLYRLDFVKPGYGNKSAKFICKLLPQLQQGLGYSEACAAVGYRHSNSPTSEEIAERTLLEKIPLLQRNELRQPLVEKILNQMINLVNALKAEYGVDEVRVELARELKMSREERERMTIQNDKRKEANDKVAERIRQCGLYPTKPRIQKYMLWEEAGKVCMYCGRSIEEEQCLNGDDMEVEHIIPKSVLYDDSYGNKTCACHECNQTKGNRTALEYIRAEGREAKYMERINDLLKEKKISYSKHQRLRWLKEDIPSDFLERQLRLTQYISRQAMAILQQGIRRVSASEGGVTARLRSLWGYGKILHTLNLDRYDSMGETEHVSREGETTEKLHITNWSKRMDHRHHAIDALVVACTRQSYIQRLNRLSSEFGREDKKQEDQEAQEQQATETGRLSNLERWLTQRPHFSVRTVSDKVAEILISYRPGQRVVTRGRNVYLRHGKKCVQSGLLVPRGPLSKETVYGQITINGEPQIVCKYDLHSLKAKDVDYVVDLALRKRLKELLAQHGGKEKEAFAGDVYMDEAGTQGPIRSVRCFTGLDRAKMKAVKYDEQGDAVGFVSPRNNHHLAIYRTPKGKLIESIVTFWDAVDRARYGIPLVITHPREVMEQVLQREDIPESVLSLLPSSDWMFVESIQRDEMVLVGLSDEEIRQAVDAQDYCKLSEHLYRVQKIATGNYMVRYHLETDTDMNRSGRIPKLYQLSLTSYEEKNVRKVRVDLLGRISLL

SEQ ID NO: 22522 - protein, 1442 aa, unidentified
  REGION 1..1442: note = Cas Enzyme sequence
MKKILGLDLGTNSIGWAYVKQAQNDSEKSEIVELGVRVNPLTVDEKTNFEKGKPISTNADRTLKRGARRNLQRYKLRRQELIALLKEYQVISEKTILAEDGKGTTFETLRLRAKSAKELVSLEELARILLMINKKRGYKSSRKAKNEEEGQLIDGMEIARRLYDENLTTGQLSLQLLKEGKKSLPDYYRSDLQHELDKVWNFQKQFHPDILTDEFYSAIQGKGQKATRESFSSKYRIDTAENKGSREEKKLQAYQWRADAIHKELTKEELAFVITEINNNINNSSGYLGAISDRSKELIFANETVGEYLWKQIQSDPHTSLKNQVFYRQDYLDEFERIWKTQSEFYPQILTESLKNELRDILIFYQRKLKSQKALVSICEFESKEIPLKDKQGNPISKNGIPVTKLVGPKVAPKSSPLFQEFKIWQNLNNVLVRPKGSRKRKITTDQQSTFLEGQEPIFELNLEQKELLFEELNLKGNLKTDYCLELIGYSAKEWEMNYPTLEGNKTNKSLYEAYLKIIDSEGYDAKKLLKVKTDKDDINLGDIKVSASEIKTMISNIFNVLGINTKILDFDAELERKQFEAQASYRLWHLLYSYEGDDSKSGNELLYRLLEDKFGFKREHSKTIANVSLLSDYGNLSTKAIRTIYPYIKENKFSTACELAGYRHSKLSITKEENENRTLKDTLDVLKKNSLRQPVVEKILNQMINLINELIEKHSEKDEKGNIVKYFKFDEIHIELARELKKNAEERRELDSKVREGKDRNEKIITILKSEFGLPYPTKNDIIRYRLYEELKDNGYKDLYTNTYIPREKLFSKEIDIEHIIPKSRLFNDSFSNKTICYRQDNLNKGERTAYDYIERLGKTQLDEYLNRVENLYANKIITKAKYRNLLKKESEIGDGFIERDLRETQYIAKKAKEMLLQITRHVVSTTGSITDRLRDDWELVNVMRELNLPKYKALGLTEIQERKNGQTVEVITDWTKRNDHRHHAMDALTVAFTKHSHIQYLNFLNARKDEKHKEYSNIMGIQQLETEKTTDKDGKDKRVFKAPIPNFRQVAKEHLEAILISHKTKNKVVTRATNKIAGSKKQQETLSPRGQLHKETVYGKYRRYVQKEEKIGSKFDLQTIERVANPLYKRLLTKRLEENGGDPKKAFTGKNALAKNPIYLDEAQTQQLPEKVKLVWLETYFSIRKDITPDIFKDEKSIDKVLDEGIKRILKDRLKSFDGDAKRAFTDLEQNPIWLNKEKGIAIKRVTISGVSNAEPLHTQKDHLGNEIFDDTGKPIPVDYVSTGNNHHIAIYRDENGDLHDEVVSFLEAVTRANQGLPIVDKTYNRHLGWQFLFTMKQNEMFVFPNKETGFDPQEVDLLDPKNKKLISPNLFRVQKLSKLMYNNSSVREYVFRHHLETTVEDKKELQQITYQQIKSLSPLNNIVKVRINHLGDIVHIGEY

SEQ ID NO: 22523 - protein, 1526 aa, unidentified
  REGION 1..1526: note = Cas Enzyme sequence
MKKILGLDLGTNSIGWAVLNAADDNSLKYIEAAGSRIIPMDAAILGDFDRGNSISQTAERTRIRGMRHLRERYLLRRARLHRILNLLGFLPFHYAQDIDRYGNFSADMEPKIAWRKNLEGELEFIFIESFNEMLEDFRKNQPELVADNKKVPYDWVIYYLRKKALEKKISKEELAWILLNFNQKRGYYQLRGEDDDESMKTAKTRQYFDKQIIKNIIDTNQTYKGQRILIVELQNGDKGKIFKKEIPDWIGQEKNIIVTVDIDKDGNDKYEESGSLSCRFKIPTDAEWESEWKLIKMKTQKDLDESNKTVGTYIYDSILQNPTQKVRGKLVRTIERKYYKAELKQILEKQTEFHSELQDKDLYIECLNELYSNNDTHRNAITDRDFVYLFMNDILFYQRPLKSKKSLIDNCPYERNIYIDKETGEIKYSPIKCIAKSHPLFQEFRLWKFISSIRIYQRESVVEVVDKQLDLFSSQSTSVQKLVTDVDVTDKFLTCENDYVALFEWLNKKKIIDQKEFLKYRPFGLKGDIDNYRWNYVEDKSYPCNETHAMILTYFAKAGISEDILTKEMEEALWHILYSVEDRQEITKALRTFASKYHLSDSFVKVFSNIPPFKKEYGSYSAKAIKKLLSLMRMGKYWSEDAIDVNTRERIDKIVTGEYDEKIRDRVREKTIRLNDIRHFRALPDWLACYVVYDRHSETREITEWKSPEEIDEYIRNFKQHSLRNPIVEQVITETLRTVRDIWKQVGCIDEIHVELGREMKNPADKRKRITSQIIENENANLRVKALLTEFVNPEFEIENVRPYSLGQQDILRIYEDGVLNSVAEVPGDIAGILKKFNENDAKKRPTTSEILRYKLWLEQKYRSPYTGEMIPLSKLFTSAYEIEHVIPQSRYFDDSFSNKVICEAEVNKLKDNALGYEFIKKHHGEKVELGFGKIVEIFSVSVYEQFVKDNYSRNRGKMKKLLMDEIPEQFIERQLNDSRYISKVVKTLLSNVVREKAEQEAVSKNVIVCTGGVTDRLKKDWGINDVWNKIVLPRFLRLNELTNSTNFTAKNAAGNEIPAMPLELQKGFNKKRIDHRHHAMDAIVIACANRNIVNYLNNESASRKAKISRHDLQAILCDKVRTDDKGNYQWRVKKPWDTFTQDVYVALENIIVSFKQNLRVINKTSNYYWHYENGKKVLVKQVKGDSWAIRKPMHKDTVFGEVNLRKVKSVSLNEALKNPQFIVEKDLKRQLLSLLQQNFDIKKIKKYFEEHKDIWSDISLSKMNIYYFTKETKDRYFATRKPLDASFDKKKIESCITDTGIQQILLRHLELKENDPERAFSPDGIDEMNRNIIQLNKGKGHHPIAKVRVYEKADKFEVGQRGNKSSKFVEAAKGTNLFFAVYETEYPDEKTNSIVRKRNYATIPLNIAIERQKRGLSTAPEDEKGNVPSFVLSPNDLVYLPTSEDIVNGHITQPIDKSRIYKMVSSSGSQCFFIKHNIANIIVDKYEFSPLNKMERAISNEMIKEICIPVKVDRLGNIVKLGKSE

SEQ ID NO: 22524 - protein, 1392 aa, unidentified
  REGION 1..1392: note = Cas Enzyme sequence
MKKVLGLDLGSSSIGWAYVHEAEDGDKLGSSKIIKLGVRVNPLTVDEQRNFEQGKSITTNALRTLKRCMRRNLQRYKLRRENLIEVLKKHGFISDASMLSEQGNYTTFETYRLRAKAAVAEISLEELARVLLMINKKRGYKSSRKNRGEDEGKFIDGMSVAKQLYDRGITPGQFSLELLKEGKRHLPDYYRSDLQNELDRIWDFQQSFYPEILTQNFREQIRDKGQKNTSQIFLREYQIYTADNKGTDKLLRALEWRVEGLSRKLSVEELAFVMSDLNGSISGSSGYLGAIGDRSKELYLGRQTVGQYLMEKLNTNPNGSLKSKVFYRQDYLDEFERIWETQAGFHKELTPELKKEIRDIIIFYQRSLKSQKGLISFCELESKLVEIEVNGKMRKKVVGSRVCPKSSPLFQEFKIWSILNNICVWSVDKSKSSEARKMDGRNKEPNLTQEEKEILFKELSLKEKLSKRDVLELLFEDARKLDMNYEKVEGNRTQATLFKAYQKIIARSGHGEYDFERMSSSEILEIVSGVFDGLGYNTDILYFNSEGELDQQSLYRLWYLLYSFEGDKSNSGNENLINKIASLYGFDREYAVILANVVFPPDYGNLSAKAIHKILPYLKDGNKYSLACEYAGFRHSKNSLTKEEREKRVLKERLDILPKNTLRNPVVEKILNQMVHVVNGVINKYGKPDEIRIELARELKKNAKEREEWTRAINKSTIENEKLRSFLKKEFGFTQVSRNDIVRYKLYLELESRGFKTLYSNTYIPLKRLYFKEFDIEHIIPQSRLFDDSFSNKTIELKSVNQEKDNQTAYDYVSGKGGEAGLQEYLERVEELFKGGYIGKAKYNKLKMMGKDIPDDFIDRDLRDTQYIARRARAMLEEVVGNVVSTSGAVTDRLREDWQLVDVMKELNWNKYERLGLTEIVEDRDGRKVRRIKEWTKRNDHRHHAMDALTIAFTKPNFIQYLNNLNASSDKSDSIYGIKEKELSRDNKGKLRFNPPMPLKEFRMEAKRHLENVLVSTKAKNKVVTPNVNKSKKRGGMNQKVQLTPRGQLHQETIYGSIKQYVTKEVKVGSAFNMEMILNVANKAYREALLKRLNAFDQDAKKAFTGKNSLEKNPIFINDSHTCKVPGKVKIVSFETVYTIRKEIGPDLKIDKVIDKRVRDILETRLVEFGGDSKLAFTNLDEKPIWLNKEKGIDIKRVTISGLSNVIALHDKLDKDGEPVLDEHGQPQAVDFVCSGNNHHVVIYRDPEGKIQDDVVSFFEATVRAKEGQPVIDREYKKQEGWEFLFSMKQNEYFVFPNEETGFDPKEVDLMNFDNYALISPNLFRVQTMSRVMYGNQVVRDYKFRHHLETTVKDYKELKDITYKQYKSLDFANQIVKVRIDHIGQIVHVGEY

SEQ ID NO: 22525 - protein, 1375 aa, unidentified
  REGION 1..1375: note = Cas Enzyme sequence
MKKILGLDLGTTSIGWALVYESENTDEKSSIVRLGVRVNPLSVDEKGNFEKGKSITTNADRQQTHGARINLQRYKLRRENLKDCLQKQDWIGTEALYEEGKASTFEAYMLRAKAAEEEISLHELCRVLFMLNKKRGYKSNRKANNKEDGKLFDGMTVAKKLYEEHLTPAEYSFQLLSSGKKFKQEYYRSDLKEEFDRIWNEQQKYYPEILTDDFKQQLQGKSKGNTSKIFLGKYGIYSADLKGLDRKLQPLKWRVEALKQQVDKEVLAFVISDLNGQIASTSGLLGAISDRSKELYFNKQTVGQYLWTSLKESPHVSIKNKPFYRQDYLDEFEKIWETQATYHKELTPELKQEIRDIIIFYQRPLKSKKGLISVCELEQRKVKVTIDGKEKEISIGPKVAPKSSPMFQESRIWQNLNNILLIDKGNNSNRPLYEEERNLLYEELSVKEKLSKAEALKVLNKNGKQWDLNYKEIEGNRTQAVLYDCYNRIIAMTGHEECNFKKLKASEIRSYVKTIFTGLGFNTDILEFDSSLTGHELERQPSYQLWHLLYSYESDNSRTGNDALLRKLETAFSIPKEYAAVLSDVVFEDSYGNLSVKAMRKILPHLQAGLNYSQACEEAGYKHSRRSLTKNELDQKEYKEKLELLPKNSLHNPVVEKILNQMINVINAVIDEYGKPDEIRIELARELKIGAAERENMTRSISQGNAENKRIREILEKEFALSYISRNDIIKYKLYEELKSNGFKTLYSDTYISKDKLFSKDFDIEHIIPKARLFDDSLSNKTIEARDVNIAKSNKTAFDFISEKYDQQGIEAYKKKLDILLQDGSISKAKYNRLLMKEADIPSGFIDRDLRDTQYIAKKAYEILSDLVRNVTPTTGAVTSRLREDWQLVDVMKELNFEKYQKLGLVEVIEDRDGRKIKRIKDWTKRNDHRHHAMDALTIAFTKPSYIQYLNNLNARSDKNSSIYGIENKELHREDNKLRFNAPLPINEFRAEARRHLKSILVSVKAKNKVMTQNVNVIKTKHGVIKKVQLTPRGELHNATFYGTKKRPIIKMVKVGAALDEVTIKKVSSSFIREALLDRLHEYNGDAKKAFTGRNSIDKNPIYIDEEHKKTVPALVKTIEWEMYHPTRKLISPDLKIDKVIDKGIREILKTRLAKFNGDAQKAFSNLDENPIYKDEAKKITLKRVSLEGVSSVIPLHTLKDREGKLVVGKDGKPVLGDYVQTSNNHHIAFYMDENGNLQDNVVSFFEAAERKSQGVPVIDKNYNHDKGWNFLFTMKQNEYFVFPNEVTGFNPSEVDLMDEANYSIISPNLYRVQKMSKASGRDYWFRHHLEAMLNDDPKLRNSMFKRITSLKALEGIVKVRINCVGKIVAVGEYD

SEQ ID NO: 22526 - protein, 1154 aa, unidentified
  REGION 1..1154: note = Cas Enzyme sequence
MKNILGLDLGSSSIGWSVIRENSEEQELVAMGSRVVSLTAAELSSFTQGNGVSINSQRTQKRTQRKGYDRYQLRRTLLRNKLDTLGMLPDDSLSHLPKLQLWGLRAKAVTQRIELNELGRVLLHLNQKRGYKSIKSDFSGDKKITDYVKIVKTRYDELKEKRLTIGELFFRRLTENAFFRCKEQVYPRQAYVEEFDCIMNCQRKFYPDILTDETIRCIRDEIIYYQRPLKSCKYLVSRCEFEKRFYLNAAGKKTEAGPKVAPRTSPLFQVCRLWESINNIVVKDRRNEIVFISAEQRAALFDFLNTHEKLKGSDLLKLLGLSKTYGYRLGEQFKTGIQGNKTRVEIERALGNYPDKKRLLQFNLQEESSSMVNTETGEIIPMISLSFEQEPLYRLWHVLYSIDDREQLQSVLRQKFGIDDDEVLERLSAIDLVKAGFGNKSSKAIRRILPFLQLGMNYAEACEAAGYTHSNNYTKAENEAHALLDRLPAIKKNELRQPVVEKILNQMVNVVNALMEKYGRFDEIRVELARELKQSKEERSNTYKSINKNQRENEQIAKRIVEYGVPTRSRIQKYKMWEESKHCCIYCGQPVDVGDFLRGFDVEVEHIIPKSLYFDDSFANKVCSCRSCNKEKNNRTAYDYMKSKGEKALSDYVERVNTMYTNNQISKTKLQNLLTPVDKISTDFIDRQLRESQYIARKAKEILTSVCYNVTATSGSVTSFLRHVWGWDTVLHDLNFDRYKKVGLTEVIEVNHRGSVIRREQIKDWSKRFDHRHHAIDALTIACTKQAYVQRLNNLRAEEGPDFNKMSLERYIQSQPHFSVAQVREAVDRILVSFRAGKRAVTPGKRYIIRKNRKRISVQSVLIPRGALSEESVYGVIYVWEKDELGHVIQKQRAVMKYPITSINREMLDKEKVVDKRIHRILSGRLAQYNDNPKEAFAKPVYIDKECRIPIRTVRCFAKPAINTLVPLKKDDKGNPVAWVNPGNNHHVAIYRDEDGKYKERTVTFWEAVDRCRVGIPAIVTQPDTIWDNILQRNDISENVLESLPDVKWQFVLSLQQNEMFILGMNEEDYRYAMDQQDYALLNKYLYRVQKLSKGDYNFRYHTETSVEDKYDGKLNLELSRQMGKLKRVSIKSLLGLNPHKVHISVLGEIKEIS

SEQ ID NO: 22527 - protein, 1342 aa, unidentified
  REGION 1..1342: note = Cas Enzyme sequence
MAPESLEQWRTYDKKKKLFRQYPIDDKAFHSWIILDFNGDGKPDYSSPYQLRRELVSVQLDFNQPIDRYKLGRALYHIAQHRGFKSSKGETIAEQEKQEDDSKKNKNSALTEEHVDVVNAMKASEEKLSKGLLVYMQEHNLKTVGAAFAQLEDEGIRIRNNSEYKAIRSQHQDEIKEIFKFQKGLSEQTELLDTLISEKQGIGTIFYKRPLRSQRGNVGKCTLEPNKPRCPIGHPLFEKFRAWTFINNIKAKSPDSDSAEPLPMDMRINIYNKLFLSRVKADFKFEEIRHFIEKQWGVALSKADKTINYRDDTSVAGCPITARMIKVLGEDWENFQVIGTKERQTQGKSNNALHQVCYTAEDIWHLCYDAEDPEQVRVFAEQALGWDEKKAAELVRLWSAIPQGYAMLSQKAIRNINRMLLFGLKYSDAVLLAKLPDILELSDEDIQTIIKKAQQLEEVVNEEKRIGNIVNSLIANYKAESLEHRFADHNYEYQLDESDEREIIKHIESNIGKQRWELMDADEQTSILEGVRSGYQAFFARHKRTFVELPQLGKRLVELLSKEYPSVEKKQWERLYHPSQIAIYRPILLDKSDEKRRLGNPDIGAIKNPTVMRTLNNLRRRVNQLLDDGVLVPNETRVVVETARELNDANAKWALEKYQKTRRDENAQIKKILEEFYSKPNGITDTDVDKARYVIEQCEEDNYKSKKEIGTYSKDIQKYKYWLEQGGQCLYTGRVISLSNLFDSNAFDIEHTIPASVSFDNSDQNMTLCEAHYNRFIKKNNIPTAMPNYEKDVTIDGKLYTAIKPRLEKWKKRIERLSRNVEYWKVQARRAQMKDRKDECTKEKLLWQMELQYWRDKLQRFTILEVTDGFKNSQLVDTRIITRHATLYLKSVFENVEVQRGSTTAEFRKILGVQSVEEKKDRTLHSHHAIDATILTTIPTAAKRERILELFYKVQEKERRLKNCSGDAYEGLKQELEGLQAKLKKEVGDCKLGGEISQLGNFINDKIIINHCVKDQTLTPSHKRLRRRGRVVGGKEHPIWQTGDTLRGKIHKESYYGAITQYAKDEDGNVLFNDGKPKIDPTIWYVIRRELKHKKSAQDTGFASWDDLEKVIVDKNLFKLMKEQFPEGTSFKDACEQGIYMIKKGKDQEHNIKTHRIRHIRCHTSVRSALKIKEQTNKSAKDYKQYFYAESGDLYTMCCYTNGKKKEYRPYRLYDIAQHRKSGIEDIPEFITDKKGNRLELAYKLCSGDMILLYENTPEELYDMDPANLKQRLYKVDRFESESSRIYLTNHLIANGEVGHSIKDYNQMPPTVRCGVNTLKFLIMGEHNDFVIKSNNIIFNHR

SEQ ID NO: 22528 - protein, 1431 aa, unidentified
  REGION 1..1431: note = Cas Enzyme sequence
MTQKIFGIDLGTNSIGTSVRNTDLGNNLVDQLEFFSSDIFNASVSKNTNGREYSLASDRSAHRRGRRLNDSRRRKLWATLDLLIKNNLCPMAPESLEQWRTYDKKKKLFRQYPIDDKAFHSWIILDFNGDGKPDYSSPYQLRRELVSVQLDFNQAVDRYKLGRALYHIAQHRGFKSSKGETIAEQEKQEDDSKKNKNNALTEEHVDVVNAMKASEEKLSKGLLAYMQEHNLKTVGAAFAQLEDEGIRIRNNSEYKAIRSQHQDEIKEIFKFQKGLSNQTQLLDTLISEKQGIGTIFYKRPLRSQRGNVGKCTLEPNKPRCPIGHPLFEKFRAWTFINNIKAKSPDSDSAEPLPMDMRINIYNKLFLSRVKADFKFEEIRHFIEKQWGVALSKDDKTINYRDDTSVAGCPITARMIKILGEDWENFHVLGTKERQTQGKSNNVLHQVCYTAEDIWHLCYDAEDPEQVRTFAEETLGWDEKKAAELVRLWSAIPQGYAMLSQKAIRNINRMLLFGLKYSDAVLLAKLPDILELSDEDIQTIIKKAQQLEEVVNEEKRIGNIVNSLITNYKAESLEHRFADHNYEYQLDASDEREIIKHIESNIGKQRWELMDADEQISILEGVRSGYQAFFASYKRNYIELPQLGERLVELLSKEYPSVEKREWERLYHPSQIAIYRPILLDKSEQNLRLGDPNIGAIKNPTVMRTLNNLRRRVNQLLDDGVLVPSETRVVVETARELNDANAKWALEKYQKTRRDENAQIKKILEEFYSKPNGITDTDVDKARYVIEQCEEDNYKSKKEIGTYSKDIQKYKYWLEQGGQCLYTGRIISLSNLFDSNAFDLEHTIPASVSFDNSDQNMTLCEAHYNRFIKKNNIPTAMPNYEKDVTIDGKLYTAIKPRLEKWKKRIERLSRNVEYWRTQARRAQMKDDKDKYTKEKLLWQMELQYWRDKLQRFTILEVTDGFKNSQLVDTRIITRHATLYLKSVFKNVEVQRGSTTAEFRKILGLQSVDEKKDRTLHSHHAIDATVLTTIPAAAKRDRILELFYKVQEKERRLKNCSGDAPIGLKQDLEGLQERLKKEVEACKLGNKLGQLGSFINENIIISHNVKDQTLTPSRKRLRRRGRVVYNKKRENDNDKNPIWQTGDTLRGEIHKESYYAAITQYAKDKDGNVLLNNGKPKIDPTIWYVIHRELTYFDDWKPLEKVIVDKNLYKLMKEQFPDGTSFKKACEQGFYMIKKGKDKEHNIKTHRIRHVRCYSDVKGALKIKEQTNKSTKEYKQYFYTAVGDLYTICCYTNGKKKEYRPYRLYDIAQHRKAGIEDIPEFITDKKGNRLELSYKLCSGDMILLYENTPEELYDMDPVNLKQRLYRVDRFESKGSTIYLTNHLIANGEVGHSIKDYNQMPPTVRCGVNTLKFLIMGEHNDFVIKSNNIIFNHR

SEQ ID NO: 22529 - protein, 1486 aa, unidentified
  REGION 1..1486: note = Cas Enzyme sequence
MKNVLGLDLGSNSVGWALVKTEDNGTPIGSIKMGSRIIPMSQDILGSFEKGDTVSQTKKRTFYRGKRRLIERHVLRRERLCRVLHIMNFLPDHFDKLLGWDKTDNKTYGKFIDDSEPKLAWRQNKNEMGKMEFVFMDSFHEMLSDFAKHQPQLIANGKKVPLDWTIYYLRKKALTQLISKEELAWILLNFNTKRGCHQLRGEEEEEPTKKEEYKVLKVISVDADEGQKGNGIWYNIHLEDGGIYKRKSDMPLYDWVGKTLQLIVVTIYEKDGKTPKTFDSGKQNPSYRLPKEDDWGLIKKRTESQIQSSGKTVGAFIYDNILSKPDDKIRGNLVRTIERKYYKKELIEILQQQAKYHDELHNQHLLESCAKELYAHNDVRYNEVVKSNMIHLLVDDIIFYQCPLKSKKSLIDNCKYESYEYVDKETGEVKEMPIKCIAKSNPYYQEFRLWQFIHNLRLSDVVTREDVTAQYLSTPQDYCNLFTYLNDRKEIKQDILLKDFFQIKKVQIDKEKVFPIEWNYIKDATKQYPCNETRYELLSALKRAGMDKQWLDDTPNMQYRLWHLLYSVEEKEESAKALRKLYDDDNFVSSFLKIKPFKKCYGAYSEKAIKRLLTLMRMGKAWNEQAIDAKTLKCIQQIITGNVDSKLKEKIDDSRYVLHHVTDFQGLPTYLASYVIYGRHSEVTDIQCWDTPKDLLKFIYSFPQHSLRNPIVEQVILETLRVVYDIWKAEKHIDEIHVEVAREMKLTAQQRNEANLRNLNNEATNLRIKYLLEELKNDTFIKDVRPLSPMHQEKMRIYEQAVLGNLNKQDKDYDDIIKISKKERPTSAELIRYKLWLEQKYCSPYTGKAISLSKLFTTAYQIEHVIPQSRYFDNSFNNKVICESEVNKEKDKMLGYEFIKGRGGDRIYCTAHGKEVTILKEEEYKQFVNEHYAHNKRKRDNLLAENIPESFSSRQLNDTRYITKTIMSLLSNVVRQQGEEEATAKNLLPSSGAVTDKLKTDWGLKDVWNTIVTPRFERLNKLFGTNDFGEMKEENGSRYFQTNVPSEYEKGFKKKRIDHRHHAMDALVIACTTRNMVNYISNVNANSPKQREDLRQLLCDKNRIINKPWDTFTQDALKALNDIVVSFKNNVRIINRATNRYQRYDKNGKKMICSQKGNDMWAIRKSMHKEIVFGRVNLIRKEVLPIAKALDNISAICNAQLRAYVNDLVDKHFNKKQLVAHFKSLDYKWNRQDVSKVEVWISSDDKTPMVAVRKPLDTSFDKKKIASITDTGIQAILLNYLESKGGDALVAFAPEGIQEMNSNIELYNNGKAHKPIKNVRLSELLGAKYQVGERGAKTKKYVEADKGTNLFFAIYEAEEGKRYYYSVPLREAIERQKQKLSPVPEYNEKGVALKFYLSPNDLVYVPTEEERTMGICHIDKTRIYKMVSSTGNRSFFVPSTIAKVIADKVEFQSLNKMEKAITDECIKEVCWKLKVDRLGNILNVIK

SEQ ID NO: 22530 - protein, 1545 aa, unidentified
  REGION 1..1545: note = Cas Enzyme sequence
VICFILVWQNYKIKMKKTMLVLIKKITLNSVLKNNIMKTILGLDLGSNSIGWAVINSVIEKQSERIWIKMAGSRIIPMDSAVLGDFDKGSSISQTAERTHFRGVRRLRERQLLRRERLHRVLKILGFLPEHYLKEIDFEKHPGQFLTNCEPKLPWLIDERGKYTFLFQAAFNEMLADFAKHQPSLVSDGKKVPYDWTIYYLRKKALTEMISKEELAWILLNFNQKRGYYQLRGEEEEDAAGKSVEFYALKVLSVEATDEKKGRDIWYNVHLENGWIYRRSSNVPLDWENQVKEFIVTTDLNPDGTPKFDKYGEVKRSFRVPKEDDWMLIKKRTEADIANTRKTVGSYIYDTLLQKPQQKIIGKLVKTVERKLYKEELNLILQKQCAFHAELRDRDLYMRCIEALYPGNEMRRKNIVNRDFIYLLIDDILFYQRPLKTKKTLISNCPYEENEYVNRETGEIKKAPLKCIAKSHPLFQEFRLWHFLSNIRVYQKEKKVNGTLHLDVDVTAEFLRTEDDYVALFDWLNSRKEIDQKAFLKYPKFGLKKEIDNYRWNYVEDKLYPCNETRYAILSRLEKVGVSIDFLSDEKETVLWHILYSVSDKQEIEKALRTFAVKNGLNESFVEVFKKFPPFKSEYGAYSAKAIKKLLPLMRCGKYWDTSLIDDATRDRIERIITGEYDRNIAAKVREKAINLSDIYCFKRLPLWLACYVVYNRHSENKEIAKWETPADIDAYLASFKQHSLRNPIVEQVITETLRVVRDIWKQVGKIDEIHIELGREMKSPADKRKRMTAQIQENEKANLRIKTLLVEFMNPEYEVENIRPYSPSQQEILRIYEDTVLKREEPIPEDIDAILKKFNNSKLPTKSEFLRYKLWLEQKYRSPYTGELIPLGKLFTTAYEIEHIIPQSRYFDDSFSNKVICESAVNKLKDNQLGYEFIKNHHGQKVEVGFGKKVEILSVDSYERFVKEQYAKSSVKMKKLLMDDIPEQFIERQLNDSRYISKVVKGLLSNIVREKNDNDGYEPEAVSRNVLVCTGNVTDRLKKDWGMNDVWNCIVYPRFERLNALTGTQCFGHWENKDGKKVFQTELPLEYQKGFSKKRIDHRHHAMDAIVIACATRNHVNYLSNESASRNTNISRYDLQRLLCDKNRVDGGGNYRWVIKKPWNTFTQDTREALDKIVISLKQNLRIINKTTNIYQHFDITGNRIYKKQEIGDNWAVRKPMHKDTVFGAVNLRKVKRVRLSVALDTPTMIVDKRVKGKVLELLSYKYDKKKIEKYFKENVFFWKDLDIAEVAVYYFTENTSEPLVAVRKSLDSTFNEKKIKESVTDTGIQKILLNHLSVKGGKADWAFSAEGIEEMNRNILQLNDGKKHQPIYKVRVYESRGNKFSVGVSGNKGTKWVGAAKGTNLFFAIYVTENGKRTYVTVPLDVAIEREKQGLIPVPDRNDKGDKLLFWLSPNDLVYLPTEEERELGRINEPIDRGRIYKIVSFTGNRLYGVPCNVANVIVDKLEYSSLNKVELTDAKESIKEICIPIRVDRLGHIIEVKYRINE

SEQ ID NO: 22531 - protein, 1512 aa, unidentified
  REGION 1..1512: note = Cas Enzyme sequence
MKKILGLDLGTNSIGWAVVCHSDTDGQTERKWIEMAGSRIIPMDAAILGDFDKGNSKSQTSERTGFRGIRRLRERVLLRRERLHKVLKLIGFLPQHYIDSLDFSNHSGKFQLGTEVKLPWRKNEIGKYEFLFQNSFNEMLADFAKKQPELVAMGRKVPYDWTIYYLRKKALSEKITKEELAWILLNFNQKRGYYQLRGEEEEEKKNRLEDFYALKVVEVEQTDDKKGKDIWYNVHLENGWIYRRSSNVPLDWKDKIKEFIVTTELNEDGTPKVDKDGCVKRSFRMPKEDDWKLLKKKTEADIERSHKTIGCYIYDTLLQSPQQKIKGKLVRTIERKFYKDELRLILDKQQAFHPELQDRELYKACLDVLYPMNVAHKNNVANRGFVYLFMEDILFYQRPLKSKKSLIDNCPYEENQYIDVTTGEIKKAPIKCIAKSHPLYQEFRLWQFIANIRIYQKEKKVDGKLLTDIDVTTEYLSSKDDYVALYEWLCVRKEIEQKTFLKYPAFGLKKEIENYRWNYIEGKSYPCNETRSLILHYLEKAGISSTFLSTKIEESLWHILYSVEDRIELETALRTFASKYQLSCNFVEVFKKFPPFKKEYGAYSAKAIKRLLPLMRMGKYWKVDAIDGNTAERIEKILSGECDEKILNKVREKTIHLSETSDFQGLPLWLACYVVYNRHSEVKEVAKWKSPEDIDIYLKSFKQHSLRNPIVEQVITETLRVVRDIWKRVEQIDEIHVELGREMKNPSEKRRQMTERMLENENANIRIKALLTEFMNPEYEMENVRPYSPSQQEILRIYEDTVLNGAGDIPEDIEIILKKFKENDIKKRPGKSDFLRYKLWLEQQYRSPYTGEIIPLGKLFTTAYEIEHVIPQSRYFDDSFSNKVICESEVNKLKDNMLGYEFIKKHAGEIVELGFGKSVKIFSVEAYERFVGENYYKAGSKKSKLLMDDIPEKFIERQLNDSRYISRVVKGLLSNVVREEDANGEYESEAISKNVIVCSGSVTDRLKKDWGVNDVWNNIVYSRFERLNRLTESQQFGHWENREGKRFFQTELPLEYQKGFSKKRIDHRHHAMDAIIIACATRNHVNYLSNESASKHARIARYDLQRMLCDKSKADRGGNYKWIIQKPWATFTQDVYRTLLDIIVSFKQNLRVINKMTNYYQAYDDAGKKVFKKQKKGDSWAIRKSMHKDTVFGQVNLRKIKEVRLSVALESPEKIVDKKIKEKVLQLFAYQYDKKKIEKYFKENASLWKEVNLAKIPVYYFTDESSELLVAVRKNLDTGFTEKKIRESVTDTGIQKILLNHLSNKGDKPELAFSPDGIDEMNRNLVILNGGKPHQPIYKVRVCEPLGNKFKVGTNGNKSAKYVEAAKGTNLFFAIYVTDDGKRTYETIPLNVVIEREKLGWLPVPEKNDKGENLLFWLSPNDLVYLPTEEELMNGIISDSIDRNRIYKMVSCTGNEGHFIPENISNPIIPTLELGSNNKAQRAWTDEMIKEKCIPIKVDRLGQITEIINKIR

SEQ ID NO: 22532 - protein, 1153 aa, unidentified
  REGION 1..1153: note = Cas Enzyme sequence
MKNILGLDLGSSSIGWSVIRENSEEQELVAMGSRVVSLTAAELSSFTQGNGVSINSQRTQKRTQRKGYDRYQLRRTLLRNKLDTLGMLPDDSLSYLPKLQLWGLRAKAVTQRIELNELGRVLLHLNQKRGYKSIKSDFSGDKKITDYVKSVKTRYDELKEMRLTIGELFFRRLTENAFFRCKEQVYPRQAYVEEFDCIMNCQRKFYPDILTDETIRCIRDEIIYYQRPLKSCKYLVSRCEFEKRFYLNAAGKKTEAGPKVSPRTSPLFQVCRLWESINNIVVKDRRNEIVFISAEQKVALFDFLNTHEKLKGSDLLKLLGLSKTYGYRLGEQFKTGIQGNKTRVEIERALGNYPDKKRLLQFNLQEESSSMVNTETGEIIPMISLSFEQEPLYRLWHVLYSIDDREQLQSVLRQKFGIDDDEVLERLSAIDLVKAGFGNKSSKAIRRILPFLQLGMNYAEACEAAGYNHSNNYTKAENEARALLDRLPAIKKNELRQPVVEKILNQMVNVVNALMEKYGRFDEIRVELARELKQSKEERSNTYKSINKNQRENEQIAKRIVEYGVPTRSRIQKYKMWEESKHCCIYCGQPVDVGDFLRGFDVEVEHIIPKSLYFDDSFANKVCSCRSCNKEKNNRTAYDYMKSKGEKALSDYVERVNTMYTNNQISKTKWQNLLTPVDKISTDFIDRQLRESQYIARKAKEILTSVCYNVTATSGSVTSFLRHVWGWDTVLHDLNFDRYKKVGLTEVIEVNHRGSVIRREQIKDWSKRFDHRHHAIDALTIACTKQAYIQRLNNLRAEEGPDFNKMSLERYIQSQPHFSVAQVREAVDRILVSFRAGKRAVTPGKRYIRKNRKRISVQSVLIPRGALSEDSVYGVIHVWEKDEQGHVIQKQRAVMKYPITSINREMLDKGKVVDKRIHRILSDRLAQYNDNPKEAFAKPVYIDKECRIPIRTVRCFAKPAINTLVPLKKDDKGNPVAWVNPGNNHHVAIYRDEDGKYKERTVTFWEAVDRCRVGIPAIVTQPDTIWDNILQRNDISENVLESLPDVKWQFVLSLQQNEMFILGMNEEDYRYAMDQQDYALLNKYLYRVQKLSKGDYNFRYHTETSVEDKYDGKLNLELSRQMGKLKRVSIKSLLGLNPHKVHISVLGEIKEIS

SEQ ID NO: 22533 - protein, 1531 aa, unidentified
  REGION 1..1531: note = Cas Enzyme sequence
MKKTMLVLIKKITLNSVLKNNIMKTILGLDLGSNSIGWAVINSVIEKQSERIWIKMAGSRIIPMDSAVLGDFDKGSSISQTAERTHFRGVRRLRERQLLRRERLHRVLKILGFLPEHYLKEIDFEKHPGQFLTNCEPKLPWLIDERGKYTFLFQAAFNEMLADFAKHQPSLVSDGKKVPYDWTIYYLRKKALTEMISKEELAWILLNFNQKRGYYQLRGEEEEDAAGKSVEFYALKVLSVEATDEKKGRDIWYNVHLENGWIYRRSSNVPLDWENQVKEFIVTTDLNPDGTPKFDKYGEVKRSFRVPKEDDWMLIKKRTEADIANTRKTVGSYIYDTLLQKPQQKIIGKLVKTVERKLYKEELNLILQKQCAFHAELRDRDLYMRCIEALYPGNEMRRKNIVNRDFIYLLIDDILFYQRPLKTKKTLISNCPYEENEYVNRETGEIKKAPLKCIAKSHPLFQEFRLWHFLSNIRVYQKEKKVNGTLHLDVDVTAEFLRTEDDYVALFDWLNSRKEIDQKAFLKYPKFGLKKEIDNYRWNYVEDKLYPCNETRYAILSRLEKVGVSIDFLSDEKETVLWHILYSVSDKQEIEKALRTFAVKNGLNESFVEVFKKFPPFKSEYGAYSAKAIKKLLPLMRCGKYWDTSLIDDATRDRIERIITGEYDRNIAAKVREKAINLSDIYCFKRLPLWLACYVVYNRHSENKEIAKWETPADIDAYLASFKQHSLRNPIVEQVITETLRVVRDIWKQVGKIDEIHIELGREMKSPADKRKRMTAQIQENEKANLRIKTLLVEFMNPEYEVENIRPYSPSQQEILRIYEDTVLKREEPIPEDIDAILKKFNNSKLPTKSEFLRYKLWLEQKYRSPYTGELIPLGKLFTTAYEIEHIIPQSRYFDDSFSNKVICESAVNKLKDNQLGYEFIKNHHGQKVEVGFGKKVEILSVDSYERFVKEQYAKSSVKMKKLLMDDIPEQFIERQLNDSRYISKVVKGLLSNIVREKNDNDGYEPEAVSRNVLVCTGNVTDRLKKDWGMNDVWNCIVYPRFERLNALTGTQCFGHWENKDGKKVFQTELPLEYQKGFSKKRIDHRHHAMDAIVIACATRNHVNYLSNESASRNTNISRYDLQRLLCDKNRVDGGGNYRWVIKKPWNTFTQDTREALDKIVISLKQNLRIINKTTNIYQHFDITGNRIYKKQEIGDNWAVRKPMHKDTVFGAVNLRKVKRVRLSVALDTPTMIVDKRVKGKVLELLSYKYDKKKIEKYFKENVFFWKDLDIAEVAVYYFTENTSEPLVAVRKSLDSTFNEKKIKESVTDTGIQKILLNHLSVKGGKADWAFSAEGIEEMNRNILQLNDGKKHQPIYKVRVYESRGNKFSVGVSGNKGTKWVGAAKGTNLFFAIYVTENGKRTYVTVPLDVAIEREKQGLIPVPDRNDKGDKLLFWLSPNDLVYLPTEEERELGRINEPIDRGRIYKIVSFTGNRLYGVPCNVANVIVDKLEYSSLNKVELTDAKESIKEICIPIRVDRLGHIIEVKYRINE

SEQ ID NO: 22534 - protein, 1424 aa, unidentified
  REGION 1..1424: note = Cas Enzyme sequence
MKHILGLDLGSNSIGWALIEQDFDNKKGKILGLGSRIIPMDQGILGEFERGNKVSQTAERTGFRGVRRLRERHLLRRERLHRVLHLLGFLPPHYDAQIDFTKRFGKFIGDSEPKLAYNNEGFIFLESFNEMVEDFKKHQPQLFYIKSNGEESKIPYDWTIYYLRKKALQEKISKEELAWIILNFNQKRGYYQLRGEEEEKSTKNVEFYSLEITDVIADTPNNKGEIWYSIHLENGWVYRRASKISLEDWKGKVRDFIVTTELNEDGSVKLDKEGKEKRSFRAPSEDDWNLIKKKTEQNIVFSGKTVGEYIYDHLLQNPNQKIKGKLVRTIERKFYKEELKAILEKQVALQPELFTEELFVDCVRELYKNNEIHQNSLSSKDFVHLFLNDIIFYQRPLRSQKSNISSCSLEYRFCIDKETKQRRKTYLKVISKSNPYYQEFRVLQWLSNLKIYRKEDDKDVTSEFISSIEDKETLYEFLMSEKEVSNKSILEFLLMKSLRETYPFAKETELKKELKKEITKYRWNYVYEEENDSKKYPMNETGYEIKKRLKEVKNIPDNFLTRDIEYQLWHIIYSVTDKYEYEKALMKFAQKHNLDAESFVENFKRIKPYPSDYGAFSEKAIKKLLPLMRFGKYWNYSDISEPVQVRISDIINGVDNENIKTIVREKAEKYQLNQEADFQGLPLWLAQYVVYGIHSEAADIQRWTSPSDLEEYLKGFKQHSLRNPIVEQVVTETLRVVKDIWEYYGKGEQNFFDEIHIELGRELKKTAEERNRMTREINENEETNLKVKKKLQEFFEDKSAENVRPYSPIQQEKYRLWLEQEKESPYTGQPIPLSKLFTDEYQIEHVIPQSRFFDDSLSNKVICEAAVNAEKGAQLGLEFIKKHGGEIIEIGLNKKVTILNEKEYKELVNKHFANNRAKKAKMLMEEIPEKMVERQLNDTRYISKFISQILSNIVRSPQEDDGVNSKNIIPYTGKITAALKQDWGLNDVWNDLILPRFERMNNLTQTELFTTYSEKYQKKIPTVPLEHAKGFQKKRIDHRHHALDALVVACATRSHINYMNNKHALDKHKAKEEKQNARINLRTVLCEKKYNDNAEDKYNWTFKKPWNTFTQDVRSALEMIVVSFKQNLRVINKATNYYEKWVEEKGKKVKKKVKQEGINWAIRKPLHEQTVAGKITLERVKIGKGEMLTADRKFIDSSFDTKKISKITDTGIQKILLNYLAYKGSSELAFSPEGLEELNKNIYLYNDGKPHKPIYKVRSYEKGSGRFVLGERGAKSKKYVQGAPNLYFGVYQSKGKRSYATIPLAEVIERQKQGLTSVPELNEKGEKLLFSLSPNDLVYVPMESENIENIDFTNLSKEQRERVYKTVSFTGNQCFFVRQDVATSIVNKMEYSSLNKMEKGIDGIMIKEFCIKLKIDRLGNISKA

SEQ ID NO: 22535 - protein, 1515 aa, unidentified
  REGION 1..1515: note = Cas Enzyme sequence
MKKILGLDLGTNSIGWALTNNDFDNKLGSIEGLGSRIIPMSQDVLGKFDSGVSISQTAERTKYRGTRRLVQRFLLRRERLHRVLNILDFLPKHYSEAIDFDKRFGQFKPEREEKLSFYKNESGKNQFLFLESHKEMLSEFKLIYPDLKKVPYDWTIYYLRKKALTEKISKEELAWLLLNFNQKRGYYQLRGEEQEENKNKLEEFHTLTVVDVIEREKGKSGVWYNVILENGWIYKRESKIPLFNWVGKQKDFIVTTELNDDGTIKLNKDNEEKRSFRSPKEDDWGLVKIRTEQTINQSGKSVGSYIYYALLQNPNQKINGKLVRTIERKFYKQELKQIIKTQMEFHPELQNEELFFQAINELYKHNDAHKNNIKNRGFDYLFLEDIIFYQRPLKSKISLISDCTLEYRTYAKNGILEKQPIKCIAKSHPLFQEFRLWQFIQNLKIYKKEAVNDVDVTIEFLNSEEDYVKLFEVLNDKKDITQKQFLAIYKLKEDKHRWNFVEDKTYPSNETRSQFLSKIAKIEEMNSSFFNTKNSEDLWHILYSVTDKIEIESAINKFATKHNLPEEFTKTFGNLPPYKNEYGAYSAKAIKKLLPLIRMGSYWNENNIDPKTLDRINKIIDAEYDENIKTRVREKAINLTKIEHFKGLPLWITSYIVYDKHSESSDLTKWNSPADIDLFLKKDFKQHSLRNPIVEQIITETLRTVKDIWQHYGDGAANFFDEIHIELGREMKNPAEKRKQMTNTISQNENTNLRIKAVLEELKNGGSDEVRPYSPSQQEILKIYEEGIYSNETNKEQLDTIDKIRKNSKPTTAEIQRYKLWLNQGYISPYTGEIIKLSDLFSTKYQIEHIFPQSRFFDDSLTNKVICESEINALKDNQTAMEFINKHKGEKVTLSGGKTGTIFMPDIYKAHVGSFFTKNKTKLKNLLSEEIPESFIQRQMNDSRYISKVVKMYLSKIVREQQNGELEQEATSKNVISITGSITSQMKQDWGLNDVWNKIITPRFERLNTLTNSNDFGQWENKFGKRVFQTTVPDAIAKGFSKKRIDHRHHALDALVIACVNRTHINYLNNLNAKDEKDKTIKHELRNKICFKTKPDANGNYKWEFHKPWDNFTKKAEDELNQTIVSFKQNTRVVNKTVNKYDSYKDNNGNLNIGNSGKPEKKTIKQTKGDNWAIRKPLHAETVSGKVELKRIKQSHITIANAIDQVELIVDKEVKKQLKERIKLYPNNSDGLKKYLKAFPIMVNGKAIDKVEIYEKINATATRKTLDITFDKKRIEEKITDTGIQKILLNHLKQDFYQNVLDENNKIIPPHELAFSENGLEELNKNIVALNNGKNHQPIIKVRVFEEGGKFSLGQNGNKVDKFVEAAKGTNLFFAVYQDENSKRNYKTIPFNEVIERQKQGLSSAPETDENGNSLLFTLSPNDLVYVPTEEEKENLALINFDKLTKGQAQRVYKTVSFTGNRLYAIPNNIATSIVDKTEFTLLNKLEFTLNKESIKEFCLKLEVDRLGKIKKIIR

SEQ ID NO: 22536 - protein, 1414 aa, unidentified
  REGION 1..1414: note = Cas Enzyme sequence
MFSQRNNPYCDLLQNVIQRYKILFMKKILGLDLGSTSIGWAFVNEKEDEIEKSSIVKTGVRVIPLTTDEQGNFEKGKAITTNQDRTSKRSARRNLQRYKLRRQELIKILTEIGFIDNNSNLIEDGKDTTYQTLELRAKAASNRIEKDELARVFLAINKKRGYKSSRKAKNEDEGQLIDGMGVALELNKRKITPGQFSLELLKNGKKLLPDFYRSDLQTEFDIIWNTQKQFYPEIFTDSFYDELKGKGQRATSAIFWKKYKFNTAENKGNRDEKKSQAYQWRVDALSNQLNKEEVAYVITEINNDLNKSSGYLGAISDRSKELYFNKQTVGQYLHEQIKENPHARLKGQVFYRKDYEDEFDAIWNEQTKHHKELNYELKQTIKNIIIFYQRKLKSQKGLISICELEGKEKEISVDGKNKTKLIGPRVCPKSSPLFQEFRIWQRLNDLEVSNKKEKTKYKLDEESKLLLFKELNIKESLTKAQILKLLYKDFKNLDLNFKDIVGNRTNTSLYKAYQTIVEASGHDEFDFTSLPAHETTEIINGIFETIGINKGILNYNADLEGKDFEQQPYYQLWHLLYSYEDDNSTSGIDSLLKKLKEKFGFEEEYAKVLANVTFEDDYGSLSSKAIAKILPHLKDGLQYDEAAALAGYNHSNSLNKEERANRPLKDKLELLAKNSLRNPVVEKIINQTINVVNALIEEYSEKDKDGKIIKYFKFDEVRLELARELKKSAKEREDATKSMTASQTEHEKFRKILQTEYGLPYVSRNDIIRYKLYKELEPRGYKTLYTNTYIAPENIFSKEFDIEHIIPQSRLFDDSFSNKTLELRSANIEKGDKTAYDYILEKYGENGLAEYEKRVDDLFKGVDGKKGKHKKLLMAGKDIPDGFIDRDLRNSQYIAKKTKELLEDVCRTVNTTTGSVTDRLREDWQLIHVMQELNWDKYDKQGLTYYETNKEGKQLPRIKDWTKRNDHRHHAMDALTVAFTKYNHVQYLNNLNARSDKASSIYGIEQKELYRDEKGKLKFKPPMPLDEFRAEAKKHLENTIISFKAKNKVVTPNKNKITGKNKPQNTLTPRGQLHLETVYGTIKRYKTTETKIGSNFYIETINKVAKKKYREALLQRLSKFDNDPKKAFTGKNSLAKTPLYLDDLHLFQVPEKVKLVEEEIVYTIRKTISPDLKIDKVVDGKIKSILEIRLKEFNDDPKKAFVNLDENPIWLNKAKGIAIKNVTITGVSNAIALHDKKDKNGLLMLDENGNTQPVDFVNTGNNHHVAIYRDEKGNLQEKVVSFYEAVTRVNQGLTIIDKDYNKDNGWQFLFTLKQNEYFVFPNEETGFNPTEIDLLDEENYVLINPNLFRVQKISTKNYLFAHHLETQAISGDTLKDKKELSEIIYHFIQTPSKLENIIKVRVNHLGKIVQVGEY

SEQ ID NO: 22537 - protein, 1414 aa, unidentified
  REGION 1..1414: note = Cas Enzyme sequence
MFSQRNNPYCDLLQNVIQRYKILFMKKILGLDLGSTSIGWAFVNEKEDEIEKSSIVKTGVRVIPLTTDEQGNFEKGKAITTNQDRTSKRSARRNLQRYKLRRQELIKILTEIGFIDNNSNLIEDGKDTTYQTLELRAKAASNRIEKDELARVFLAINKKRGYKSSRKAKNEDEGQLIDGMGVALELNKRKITPGQFSLELLKNGKKLLPDFYRSDLQTEFDIIWNIQKRFYPEIFTDSFYDELKGKGQRATSAIFWKKYKFNTAENKGNRDEKKSQAYQWRVDALSNQLNKEEVAYVITEINNDLNKSSGYLGAISDRSKELYFNKQTVGQYLHEQIKENPHARLKGQVFYRKDYEDEFDAIWNEQTKHHKELNYELKQTIKNIIIFYQRKLKSQKGLISICELEGKEKEISVDGKNKTKLIGPRVCPKSSPLFQEFRIWQRLNDLEVSNKKEKTKYKLDEESKLLLFKELNIKESLTKAQILKLLYKDFKNLDLNFKDIVGNRTNTSLYKAYQTIVEASGHDEFDFTSLPAHETTEIINGIFETIGINKGILNYNADLEGKDFEQQPYYQLWHLLYSYEDDNSTSGIDSLLKKLKEKFGFEEEYAKVLANVTFEDDYGSLSSKAIAKILPHLKDGLQYDEAAALAGYNHSNSLNKEERANRPLKDKLELLAKNSLRNPVVEKIINQTINVVNALIEEYSEKDKDGKIIKYFKFDEVRLELARELKKSAKEREDATKSMTASQTEHEKFRKILQTEYGLPYVSRNDIIRYKLYKELEPRGYKTLYTNTYIAPENIFSKEFDIEHIIPQSRLFDDSFSNKTLELRSANIEKGDKTAYDYILEKYGENGLAEYEKRVDDLFKGVDGKKGKHKKLLMAGKDIPDGFIDRDLRNSQYIAKKTKELLEDVCRTVNTTTGSVTDRLREDWQLIHVMQELNWDKYDKQGLTYYETNKEGKQLPRIKDWTKRNDHRHHAMDALTVAFTKYNHVQYLNNLNARSDKASSIYGIEQKELYRDEKGKLKFKPPMPLDEFRAEAKKHLENTIISFKAKNKVVTPNKNKITGKNKPQNTLTPRGQLHLETVYGTIKRYKTTETKIGSNFYIETINKVAKKKYREALLQRLSKFDNDPKKAFTGKNSLAKTPLYLDDLHLFQVPEKVKLVEEEIVYTIRKTISPDLKIDKVVDGKIKSILEIRLKEFNDDPKKAFVNLDENPIWLNKAKGIAIKNVTITGVSNAIALHDKKDKNGLLMLDENGNTQPVDFVNTGNNHHVAIYRDEKGNLQEKVVSFYEAVTRVNQGLTIIDKDYNKDNGWQFLFTLKQNEYFVFPNEETGFNPTEIDLLDEENYVLINPNLFRVQKISTKNYLFAHHLETQAISGDTLKDKKELSEIIYHFIQTPSKLENIIKVRVNHLGKIVQVGEY

SEQ ID NO: 22538 - protein, 1380 aa, unidentified
  REGION 1..1380: note = Cas Enzyme sequence
MKRILGLDLGTTSIGWALVNEAENDNETSSIVRLGVRVNPLTADEKSNFEKGKAITTNADRQKKHTARINLQRYKLRRQNLYNCLKEYGWFGNNALFEEGKASTFETYKLRAKAAEEEISLHELARVLFMLNKKRGYKSNRKANNKEDGQLFDGMTIAKKLSEEHLTPAEYSLQLLNKGKRFTQGYYRSDLNAELERIWNEQKKYYPEILTDEFKEQLKGKTKVNTNKIFLAKHHIYSADLKGSDKKMQSLKWRVEALRQQVDKEILVYVISDLNGQIANTSGLLGAISDRSKELYFNKQTVGQYLWASLEENPHISIKNKPFYRQDYLDEFEKIWETQAAFHKQLTPELKQKIRDVIIFYQRPLKSKKGLISVCELEQRKVKTVIDGKEKEITIGPKVAPKSSPVFQEFRIWQNINNLLLINNDTNEKRSLNEEERNLLYQELSIKAKLSKTDALKVLNKNGKQWELNYKEIEGNRTQAILFDCYNRIITLTGHEECNFKKLKASEIRHYVTTIFKRLGFNTDILDFNPLLEKHELEKQPMYMLWHLLYSYESDNSRTGNNSLLRKLETTFGFPEEYATVLCDVVFEDDYSNLSVKAMRNILPSLQAGDDYSQACAHAGYNHSRRSLTKDELEEKVYKDKLELLPKNSLRNPVVEKILNQMINVINTIVTEYGKPDEIRIEMARELKSSAAEREKTTRAISQANTENQRIRDILEKDFALSYISRNDIIKYKLYEELEANGFKTLYSGTYIPKEKLFSKDFDVEHIIPKARLFDDSFSNKTLEARNINIAKSNKTAFDFIKGEYGDEGAEVYKKKLDMLLSKDVISKAKYNKLLMSEADIPSEFIERDLRNTQYIAKKAYEILSELVRTVTPTTGEITNRLREDWQLVDVMKELNFEKYQKLGLAEVVEDRDGRKIKRIKDWTKRNDHRHHAMDALTIAFTKPAFIQYLNNLNARSNKSSSIYAIENKELHREDNKLKFNAPIPIHEFRAEAKRHLSAILISIKAKNKMMTQNVNKIKTKQGVIKKIQLTPRGALHNETIYGTKKRPIITMVKVGAALDEATINKISNLTIREALLKRLNEYSGNAKKAFTGKNTLDKNPIYLNAERTKTVPTLVKTIEWESFHPTRKLIDKDLNVDKVVDKCIRNILKTRLEEFNGDAKKAFSNLEENPIYLDQTKKIALKRVSIEGVLSAIPLQTLKDQAGKLIIGKDGKPVLGNYVQTSNNHHIAFYTDEKGNLQDKAVSFFEAAERKSQGLPIVDKNYNHDKGWRFLFTMKQNEYFVFPNEATGFIPTEVNLMDEANYDMISPNLYRVQKVSRIEKGPSTSRDYWFRHHLETILNDDSRLKNSAFKRINSLKPLEGIIKVRINSIGKIVAVGEYD

SEQ ID NO: 22539 - protein, 1483 aa, unidentified
  REGION 1..1483: note = Cas Enzyme sequence
MKTILGLDLGTNSIGWAKVIVDDNENYLRDIQLGSRIIPMSQDVLGKFDKGVTESQTAIRTNFRGIRRLRERTLQRRERLHRVLHTLHYLPPHYDSAIGWDRKAPTTYGKFLNHGEPKLAWERREDGTMQFLFMDAFHEMIADFAKHQPALVANGKKVPLDWTIYYLRKKALTQAIKKEELAWILLNFNQKRGYYQLRGEEDEEHAAKHEEYHELKVVGVEADEAGKGDNTWYNVKLENGWIYRRQSKIPLDDWVGKVRAFIVTTEYEKDGTTPKKDKEGNVKRSFRSPNENDWGLRKKQTEHSLEASGIPVGAFIYDHLLKEPSDKIRGKFIHTIERKYYKQELAAILREQSKHHEELCSKDMLKACVEELYPNNPLHRESLLKKDMTYLLIEDLIFYQRPLKSKKSLIAECPYEAYSYVDKETGEVKRQGIKCIARSNPYYQEFRLWQLIANLRLRNRADERDVTAEYLPHQEDYVRLFTYLNDRKEINQETLLKDFFKLKKVAIGGEKVFPIRWNYIEDKEKKYPCNATRHELLLALDRAGMEHDWLDNRDLAYRLWHLLYSVDSKDETERALRKLKDDDAFVESFLKIKPFEKEYGAYSEKAIKKLLPVMRRGSLWNEADLCPSTKERIANILQGTIDEKLKKKIGAFISSCQQVSDFQGLPEWLACYVVYGRHSEATAIQHWETPEQLLAYIHGFKQYSLRNPIVEQCILETLRTVYDIWKEAGQIDEIHVELGREMKKTAEQRAHLTENVLRNENTNLRIKSLLMELKNDIDIKDVRPHSPMQQEILRIYEEGALQTLSKDDAAFAEIMKISKMAQPSTSELKRYRLWLEQKYRSPYTGKPIALSKLFTSAYQIEHIIPKKRYFDDSFSNKVICEAEVNREKGSMLAYEFIKKRGGDVIHCTALGDVTILSKAEYKALVTELYANNTSKKEKLLMEDIPQEFVNRQLNDSRYISRVVMTLLSNIVRIEGEEEATSKFVIPCSGGITDKLKKDWGLNDVWNNIVYPRFERLNALTNTTDFGQWENKEGKRVFQTSVPLELQRGYQKKRIDHRHHAMDALVIACASRNIINYLNNQEANDPTKQENARKQLCIKSRIIRKPWETFTQDAHKALDNIVVSFKNYVRVINKATNYYERYHADGKKVVDEQKGETMWAIRKPMHKDTVFGHVNLRRKAVVKLKDALENIPAICDKTLRHYIQDLQKKHFNTKQLLAHFKNINYRLNKQAVDKVEVWQYSDNKEQLAATRKPLDTSFDAKHIATITDTGIQKILLNYLQAKGGDPAIAFTPEGIAEMNRNIAVYNGGKQHQPILKVRIAEPMGAKYPIGETGNKGAKYVEAQKGTNLYFAIYEDEEGNRTYDTVALNVVAERLKQGLTPVPEKNEKGVALKFYLSPNDLVYVPTADELLSKKCSLDKNRIYKMVSATKYQCFFLSHRVAKTIYDKVEFEALNKMERALTGEMIKSVCWKIEVDRLGHIINIIK

SEQ ID NO: 22540 - protein, 1380 aa, unidentified
  REGION 1..1380: note = Cas Enzyme sequence
MKKILGLDLGTTSIGWALVNECENEDEKSSIIRLGVRVNPLTTDEKGNFERGKAITTNSDRQQTHGARINLQRYKLRRKYLCDCLNKHGWIGSEPMYEDGKSSTFETYKLRAKAAEEEVSLHEFARVLFMMNKKRGYKSNRKANDKEEGKLFDGMSVAKKLYEAHLTPAEYSLQLLNKGKRFTPEYYRSDLIEEFEKIWNEQKKYYPEILTGEFKGQLEGKTKTSTSKIFFGKYGIYSADLKGFDRKLQPVKWRVEALRQQVDKDVLAFVISDLKGQIANTSGLLGAISDRSKELYFNKQTIGQYLWASLKENPHISVKNQPFYRQDYIDEFEKIWETQASFHKELTPELKQEIRDIIIFYQRPLKSKKGLISVCELEQRKVKVTIDGKEKEITIGPKVAPKSSPMFQEFRIWQNLNNIQLIDNERNSKRPLYEEERNLLYEELSIRDRLSKAEALRVLGKKNRQWDLNYKELEGNRTQATLFSYYNKIITMTGHEECNFKQLKAPEIRHYIKTIFKNLGFNTGILEFDSSLNGHELEQQPMYQLWHLLYSYESDKSRTGNEALLKKLETIFGFPREYAIVLAEVAFEDSYGNLSVKAIRKILPHLQAGLDYSQACEEAGYKHSRRSLTKEELDQKEYKEKLELLPKNSLHNPVVEKILNQMINVINAVIDEYGKPDEIRIELARELKIGAAERENMTRSISQGNAENKRIREILEKEFALSYISRNDIIKYKLYEELKPNGYKTLYSDTYIPKDKLFSKDFDIEHIIPKARLFDDSLSNKTIEARDVNIAKSNKTAFDFISGKYGQQGIEAYKKKLYILLQGGSINKAKYNRLLMKEADIPSDFINRDLQNTQYITRKAYEILSDLVRVVTPTSGAVTSRLREDWQLVDIMKELNFEKYQKLGLTEVIEDRDGRKIKRIKDWTKRNDHRHHAMDALTIAFTKPSFIQYLNNLNARSNKGDSIYAIENKELHREDGKLCFNAPLPINEFRAEAKKHLKAVLVSIKAKNKVMTQNVNKIKTKHGVIKKVQLTPRGELHNATFYGTKKRPIIKMVRVGAALDEVTIKKVSSSFIRKVLLDRLYEYNGDAKKAFTGRNSIDKNPIYIDKERKRIVPALVKTIEWEMYHPTRKLISPDLKIDKVIDKGIRDILKTRLAKFNGDAQKAFSNLDGEPIYKDEAKKIILKRVSLEGVSSVIPLHTLKDRSGMPITGKDSEPVLGDYVQTSNNHHVAFYIDENGNLQDNIVSFFEAAERKSQGVPIIDKNYNRDKGWHFLFTMKQNEYFVFPNEVTGFNPSEVDLMDEANYDIISPNLYRVQKMSRVVYGKSIIRDYVFRHHLETTVEANANLKGLAYKQLKSLSYLEGIVKVRINCIGKIVAVGEYD

SEQ ID NO: 22541 - protein, 1467 aa, unidentified
  REGION 1..1467: note = Cas Enzyme sequence
MDAAILGDFDKGNSISQTAERTRFRGVRRLRERQLLRRERLHKVLKILGFLPEHYLKGIDFEKHTGKFLSGSEPKLPWVKDRWGKYSFLFQTAFNEMLADFAKHQPSLVFDGKKIPYDWTVYYLRKKALTEMISKEELAWILLNFNQKRGYYQLRGEEEEDNAGKSVEFYALKVLSVEATDEKKGRDIWYNVHLENGWVYRRSSNVPLDWEGRVKEFIVTTDLNPDGTPKLDKYGEVKRSFRAPKEDDWMLIKKRTEADITGTHKTIGSYIYDALLQEPQQKIIGKLVKTVERKFYKEELNFILQKQCAFHAELQDRDLYMRCIEALYPGNEVQRRNIANRDFIYLLIDDVLFYQRPLKTKKSLIANCPYEENEYVNRKTGEIKTAPLKCIAKSHPLFQEFRLWYFLSNIRVYQKEREVNGTLHLDVDVTTEFLKTEDDYVALFDWLNSRKEIDQKAFLRYPAFGLKKEINNYRWNYVEDKFYPCNETRHAILSRLEKAGIGIDFLSDEKETALWHILYSVSDKQEIEKALATFAVKNGLNESFVEVFKKFPPFKSEYGAYSAKAIKKLLPLMRCGKYWDMSLIDGTTKERIERIIAGECDESIGAKVREKAMNLSDISCFKRLPLWLACYVVYNRHSEDKEITKWETPADIDAYLAAFKQHSLRNPIVEQVITETLRVVRDIWKQVGKIDEIRIELGREMKNPADKRKRMTTQILENENANLRIKALLAEFVNPEYGVENVRPYSPSQQEILRIYEDAVLKGEEQIPEDIDVILKKFNTSKLPTKSEFLRYKLWLEQKYRSPYTGELIPLAKLFTAAYEIEHVIPQSRYFDDSFSNKVICESAVNKLKDNQLGYEFIKNHHGQKVEVGFGKTVEIFSVDSYERFVKEQYAKSGIKMKKLLMDDIPEQFIERQLNDSRYISKVVKGLLSNIVREKNDSGEYEPEAVSKNILVCTGSVTDRLKKDWGMNDVWNSIVSPRFERLNALTETQCFGHWENKDGKKVFQTAVPLEYQKGFSKKRIDHRHHAMDAIVIACATRNHVNYLNNESASRNAKISRYDLQRLLCDKSRGDGNGNYRWIIKKPWTTFTQDAREALSGIIVSLKQNLRIINKTTNIYQHFDANGTRVYEKQKIGDSWAIRKPMHKDTVFGAVNLRKVKVVRLSVALDTPSMIVNKRVKNKVLELLSYKYDKKKIEKYFKENAFLWKELDIAKVAVYYFTENTTEPLVAVRKSLDSTFNEKKIASVTDTGIQKILLNHLKSKEGKAELAFSAEGIEEMNRNLLQLNDGKGHQPIYKVRVYEPRGNKFKVGVLGNKGAKWVEAAKGTNLFFAIYITEDGNRTYETIPLNWVIEREKQGLVPVPDRNEKGDKLLFWLSPNDLVYLPTEEERDFGRINEPIDRGRIYKMVSSSGNQCFFIPQSISNAIISTKELGSNNKAEKSWDGEMIKNICIPVKVDRLGRIIEVKYRVNE

SEQ ID NO: 22542 - protein, 1190 aa, unidentified
  REGION 1..1190: note = Cas Enzyme sequence
MSKHVLGLDLGVGSIGWCLIALDAQGDPAEILGMGSRVVPLTNLGDDKAFSKGEAFTANQERTARRTMRRGFARYQLRRYRLRRELAKVGMLPDAALIQLPLLELWELRERAATAGRRLTLPELGRVLCHINQKRGYRHVKSDAAAIVGDEGEKKKDSNSAYLAGIRANDEKLQDEHKTVGQYFAEQLRQNQSESPTGGISYRIKDQIFSRQRYIDEYDQIMAAQRVHYPDILTDEFIRMLRDEVIFMQRPLKSCKHLVSLCEFEKQERVMRVQQDDGKGGRQLVERKVKFGPKVAPKSSPLFQLCRIYEAVNNIRLTRPDGSPRDITPEERAKIVVHLQSSASLSFAALKKLLKEKALIADQLTSKTGLKGNSTRVALAAALQPYPQYHHLLDMELETRIMTVQLTDEETGEVTEREVAVVTDSYVRQPLYRLWHILYSIEERDAMRRALIIQLGMKEEDLDGGLLDQLYRLDFVKPGYGNKSAKFICKLLPQLQQGLGYSEACAAVGYRHSNSPTSEEITERTLLDKIPLLQRNELRQPLVEKILNQMINLVNALKAEYGVDEVRVELARELKMSREERERMAEGNRRREKENKAIAEKIRECGLFPTKSRIRKYMLWEEAGEKCLYCGQILTLSQCLNGDDMEVEHIIPKSVLYDDSYGNKTCACRRCNKEKGNRTALEYIRAKGWEAEYMERINGLLDKKAISYSKHQRLRWLKEDIPSDFLERQLRLTQYISRQAMAILQQGIRRVSASEGGVTARLRSLWGYDDILHTLNLDRYDSMGETERVYREGETTEKLRITNWSKRMDHRHHAIDALVVASTRQGYIQRLNRVSSESEREAMSGEIEMQKVTKTDKLSLLERWLTQRPHLSVRAVSDKVAEILISYRPGKRVVTRGRNIYLRHGKKCVQSGLLVPRGPLSKETVYGQITVNGEPQIVCKYDLHSLKAKDVDYVVDLALRKRLKELLAQHGGKEKEAFAGDVYMDEAGTQGPIRSVRCFTGLDRGKMKAVKYDEQGDAVGFVSPRNNHHLAIYRTPKGKLVESIVTFWDAVDRARYGIPLVITHPREVMEQVLQRGDVPESVLSLLPSSDWVFVDSLQQDEMVIIGLSDEELQRALEAQDYRKLSEHLYRVQKMSSSYYVFRYHLETSVADDKNTMGRIPKFHRVQSLKAYEEKNIRKVRVDLLGRISLL

SEQ ID NO: 22543 - protein, 1369 aa, unidentified
  REGION 1..1369: note = Cas Enzyme sequence
  REGION 1364..1367: note = misc_feature - Xaa can be any naturally occurring amino acid
MKKILGLDLGTTSIGWALVYESENADEKSSIVRLGVRVNPLSVDEKGNFEKGKSITTNADRQQTHGARINLQRYKLRRENLKDCLQKQGWIGTEALYEEGKTSTFETYMLRAKAAEEEISLHELCRVLFMLNKKRGYKSNRKANNKEDGKLFDGMTVAKKLYEEHLTPAEYSFQLLSSGKKFKQEYYRSDLKEEFDRIWNEQQKYYPEILTDDFKQQLQGKSKGNTSKIFLGKYGIYSADLKGLDRKLQPLKWRVEALKQKVDKEVLAFVISDLNGQIASTSGLLGAISDRSKELYFNKQTVGQYLWTSLKESPHVSIKNKPFYRQDYLDEFEKIWETQATYHKELTPELKQEIRDIIIFYQRPLKSKKGLISVCELEQRKVKVTIDGKEKEISIGPKVAPKSSPMFQEFRIWQNLNNILLIDKGNNSNRPLYEEERNLLYEELSVKEKLSKAEALKVLNKNSKQWDLNYKEIEGNRTQAVLYDCYNRIIGMTGHEECNFKKLKASEIRSDVQTIFTSLGFNTDILEFDSSLTGHELERQPSYQLWHLLYSYESDNSRTGNDALLRKLETAFSIPKEYAAVLSDVVFEDSYGNLSVKAMRNILPHLQAGLDYSQACEEAGYKHSRRSLTKNELDQKEYKEKLELLPKSSLHNPVVEKILNQMINVINAVIDEYGKPDEIRIELARELKIGAAERENMTRSINQGNAENKRIREILEKEFALSYISRNDIIKYKLYEELKSNGFKTLYSDTYISKDKLFLKDFDIEHIIPKARLFDDSLSNKTIEARDVNIAKSNKTAFDFISEKYDQQGIEAYKKKLDILLQDGSISKAKYNRLLMKEADIPSGFIDRDLRDTQYIAKKAYEILSDLVRNVTPTTGAVTSRLREDWQLVDVMKELNFEKYQKLGLVEVIEDRDGRKIKRIKDWTKRNDHRHHAMDALTIAFTKPSYIQYLNNLNARSDKNSSIYGIENKELHREDNKLRFNAPLPINEFRAEARRHLKSILVSVKAKNKVMTQNVNVIKTKHGVIKKVQLTPRGELHNATFYGTKKRPIIKMVKVGAALDEVTIKKVSSSFIREALLDRLHEYNGDAKKAFTGRNSIDKNPIYIDEEHKKTVPALVKTIEWEMYHPTRKLISPDLKIDKVIDKGIREILKTRLAKFNGDAQKAFSNLDENPIYKDEAKKITLKRVSLEGVSSVIPLHTFKDREGKPVVGKDGKPVLGDYVQTSNNHHIAFYMDENGNLQDNVVSFFEAAERKSQGVPVIDKNYNHDKGWHFLFTMKQNEYFVFPNEVTGFNPSEVDLTDEANYSIISPNLYRVQKMSKASGRDYWFRHHLEAMLNDDPKLRNSMFKRIKSLKALEGIVKVRINXXXXGK

SEQ ID NO: 22544 - protein, 1210 aa, unidentified
  REGION 1..1210: note = Cas Enzyme sequence
LTPAEYSLQLLNKGKRFTPEYYRSDLVEEFEKIWNEQKKYYPEILTDEFKRQLEAKTKASTSKIFLGKYGIYSADLKGLDKKLQPIKWRVEALRQQVDKDVLAFVISDLKGLIANTSGLLGAISDRSKELYFNKQTIGQYLWASLKENPHISVKNQPFYRQDYIDEFEKIWETQASFHKELTPELKQEIRDIIIFYQRPLKSKKGLISVCELEQRKVKVTIDGKEKEITIGPKVAPKSSPMFQEFRIWQNLNNIQLIDNERNSKRPLYEEERNLLYEELSIRDRLSKTEALRVLGKKNRQWDLNYEELEGNRTQATLFRCYNKIITMTGHEECNFKQLKAPEIRHYIKTIFKNLGFNTGILEFDSSLNGHELEQQPMYQLWHLLYSYESDKSRTGNEALLKKLETIFGFPREYASVLAEVAFEDSYGNLSVKAIREILPHLQAGLDYSQACEEAGYKHSRRSLTKEELDQKEYKEKLELLPKNSLYNPVVEKILNQMINVINAVIDEYGKPDEIRIELARELKIGAAERENMTRSISQGNAENKRIREILEKEFALSYISRNDIIKYKLYEELKPNGYKTLYSDTYIPKDKLFSKDFDIEHIIPKARLFDDSLSNKTIEARDVNIAKSNKTAFDFISGKYGLQGIEAYKKKLYILLQGGSINKAKYNRLLMKEADIPSDFINRDLQNTRYITRKAYEILSDLVRVVTPTSGAVTSRLREDWQLVDIMKELNFEKYQKLGLTEVIEDRDGRKIKRIKDWTKRNDHRHHAMDALTIAFTKPSFIQYLNNLNARSDKGDSIYAIENKELHREDGKLCFNAPLPINEFRAEAKKHLKAVLVSIKAKNKVMTQNVNKIKTKHEIIKKVQLTPRGELHNATFYGTKKRPIIKMVKVGAALDEVTIKKVSSSFIRKALLDRLYEYNGDAKKAFTGRNSIDKNPIYIDEGHKKTVPALVKTIEWEMYHPTRKLISPDLKIDKVIDKGIRDILKTRLAKFNGDAQKAFSNLDENPIYKDEAKKITLKRVSLEGVSSVIPLHTLKDRSGMPITGKLGDYVQTSNNHHVAFYIDENGNLQDNIVSFFEAAERKSQGVPVIDKNYNRDKGWHFLFTMKQNEYFVFPNEVTGFNPSEVDLMDEANYDIISPNLYRVQTMSKVVYGKRIIRDYVFRHHLETTVEANANLKGLAYKQLKSLSYLEGIVKVRINCIGKIVEVGEYD

SEQ ID NO: 22545 - protein, 1438 aa, unidentified
  REGION 1..1438: note = Cas Enzyme sequence
MRHILGLDLGITSTGFCHIIEDENKKNSTIEEIGVRIIQLDNFVSTKTGEDSKDPSKDFSAGKGISSNAGRTRKRRARINLDRYQLRRRYLIELSLQAGLINSSTILAEDGKNTTHSTWQLRAKAAVERIEKDELARVFLAINKKRGYKSSRKVKNKEDGQIIDGMDIAKRLYDEDLTPGQLALQLFKEGKKQLPDFYHSDLQKEFERIWNFQKEFFPDILTEDLYKALQGKNKKDSSSIFYNYYHFNTAENRGTKEKTRLQAYRWRADALSKKLSKEEVAYVLAEINNNLNNANNYLGNISDRSKELYFNKQTIGQFLYAKLKENKHYSLKNQVFYRQDYLDEFERIWETQARFHKELTEDLKKQIRDTIIFYQRRLKSQKGLISLCEFENKEITIEKEGKTVTKQIGVRVIPKSSPLFQEFKIWQILNNVVCKKKGTRKKKAVTPAPLLFELFGTPSETFFSLDMECKQLLFEELNLKGNLKADKVIRLLGYIPQEWEINYNQLEGNRTQKSLYEAYLKIIEIEGYDIKTFLRIKSDKEDWYLEESPLSAKEIRENIQHIFETLGISTAILYFDATLPIKDFEKQASYQLWHLLYSYESDNSPSGNETLYKLLQDKFGFKREHAVFLSNISFQDDYGSLSAKAIRKIYPYIKENQYSTACELAGYRHSKLSLTKEELNNRPLKDLISPLKKNSLRNPVVEKGLNQMINVVNALIEKNSEKDAEGNIIKYFHFDEIRIELARELKKNAQERAEMTLNIKNATIEQEKVKSILISDFGIKNPTKNDITRYRLYQELAHNGYKDLYTNTYIPKELLFSKNIDIEHIIPKARVFDDSFSNKTLAYRDFNLKKGENTAFDFIDSSLGEEELNQYIARVENAFKTKNISATKYRNLLKKATEINDGFINRDLRETQYIAKKAKELLFQITRSVVSTSGSITDRLREDWGLIDIMKELNMPKYRDLGLTEIIERRDGRKVEVIKEWTKRNDHRHHAMDALTVAFTKPSYIQYLNHLNARKDENNKLYADILGIERKETTKIHDENGNEKRVFIEPIPGFRQIAKKHLEEILISHKTKNKVVTKSINKIVGTNKKQETLTPRGQLHKETIYGKYHYYSNKEEKIGSKFDKETISKVSNPIYRYALQKRLEANENNPKKAFTGKNALSKNPIYLDDAKTKILPEKVNLTYLEEDYSIRKNISPDNFKDLISIEKIVDEGIKRILKERLKTYNNDPKKAFADLDKNPIWLNKEKGISIKRVTISGVKNAQALHSKKDHLGKPILDKEGQEIPVDFVSTGNNHHVAIYRDQKGNLQEQIVSFFEAVVRAQQGLPIIDKTYKQEEGWQFLFTMKQNEMFVFPNEITGFNPSEIDLLDPKNKKLISPNLFRVQKISIKDYFFRHHLETNVETNNILKDITWKRGGLSLLKGIIKVRINHLGNIVSIGEY

SEQ ID NO: 22546 - protein, 1414 aa, unidentified
  REGION 1..1414: note = Cas Enzyme sequence
MFSQRNNPYCDLLQNVIQRYKILFMKKILGLDLGSTSIGWAFVNEKEDEIEKSSIVKTGVRVIPLTTDEQGNFEKGKAITTNQDRTSKRSARRNLQRYKLRRQELIKILTEIGFIDNNSNLIEDGKDTTYQTLELRAKAASNRIEKDELARVFLAINKKRGYKSSRKAKNEDEGQLIDGMGVALELNKRKITPGQFSLELLKNGKKLLPDFYRSDLQTEFDIIWNTQKQFYPEIFTDSFYDELKGKGQRATSAIFWKKYKFNTAENKGNRDEKKSQAYQWRVDALSNQLNKEEVAYVITEINNDLNKSSGYLGAISDRSKELYFNKQTVGQYLHEQIKENPHARLKGQVFYRKDYEDEFDAIWNEQTKHHKELNYELKQTIKNIIIFYQRKLKSQKGLISICELEGKEKEISVDGKNKTKLIGPRVCPKSSPLFQEFRIWQRLNDLEVSNKKEKTKYKLDEESKLLLFKELNIKESLTKAQILKLLYKDFKNLDLNFKDIVGNRTNTSLYKAYQTIVEASGHDEFDFTSLPAHETTEIINGIFETIGINKGILNYNADLEGKDFEQQPYYQLWHLLYSYEDDNSTSGIDSLLKKLKEKFGFEEEYAKVLANVTFEDDYGSLSSKAIAKILPHLKDGLQYDEAAALAGYNHSNSLNKEERANRPLKDKLELLAKNSLRNPVVEKIINQTINVVNALIEEYSEKDKDGKIIKYFKFDEVRLELARELKKSAKEREDATKSMTASQTEHEKFRKILQTEYGLPYVSRNDIIRYKLYKELEPRGYKTLYTNTYIAPENIFSKEFDIEHIIPQSRLFDDSFSNKTLELRSANIEKGDKTAYDYILEKYGENGLAEYEKRVDDLFKGVVGKKGKHKKLLMAGKDIPDGFIDRDLRNSQYIAKKTKELLEDVCRTVNTTTGSVTDRLREDWQLIHVMQELNWDKYDKQGLTYYETNKEGKQLPRIKDWTKRNDHRHHAMDALTVAFTKYNHVQYLNNLNARSDKASSIYGIEQKELYRDEKGKLKFKPPMPLDEFRAEAKKHLENTIISFKAKNKVVTPNKNKITGKNKPQNTLTPRGQLHLETVYGTIKRYKTTETKIGSNFYIETINKVAKKKYREALLQRLSKFDNDPKKAFTGKNSLAKTPLYLDDLHLFQVPEKVKLVEEEIVYTIRKTISPDLKIDKVVDGKIKSILEIRLKEFNDDPKKAFVNLDENPIWLNKAKGIAIKNVTITGVSNAIALHDKKDKNGLLMLDENGNTQPVDFVNTGNNHHVAIYRDEKGNLQEKVVSFYEAVTRVNQGLTIIDKDYNKDNGWQFLFTLKQNEYFVFPNEETGFNPTEIDLLDEENYVLINPNLFRVQKISTKNYLFAHHLETQAISGDTLKDKKELSEIIYHFIQTPSKLENIIKVRVNHLGKIVQVGEY

SEQ ID NO: 22547 - protein, 1139 aa, unidentified
  REGION 1..1139: note = Cas Enzyme sequence
EKKLEKYKWRNLAVKEKVDLEILAIILQEINSQINNSSGYLGAISDRSKELYFNKLTVGQYLYQQLLKNTHTQLKNQVFYRQDYLEEFESIWEKQKQYYPELTEELKKEIRDVIIFYQRPLKSQKGLLGHCEFESWEEEFIDNETGKKKKRIVGHRVIPKSSPLFQEFKIWQILNNIEIVSKETGEITRLSQETKELVFEKLSIVDKLKDTELLKLIVDKPKNYEVKNYKVIEGNRTNAELYKAYQKILELEGFEYDFTKLDVNKINELLRTKFSELGISNDILKFDAELDNDNFDKQPSMQLWHLLYSFVEDNSKLGDKKLLEKLNQKFGFSKKQAKIIVNIPLQADYGSLSSRAIRKIIPHLKEGNTYDAACALAGYNHSASLTKEERDNKKLKDYLELLPKNSLRNPIVEKILNQMVNVINAIIKDETLGKPNEIRIELSRDLKKSAEERRKTTEGINKATIEHDKIRKLLHSDFGISKVTRNDIIRYKLWKELESYGYKTIYTKTYIPKEKLFSKEFDIEHIIPQAKLFDDSFSNKTLAKRDINIEKGNETAYDYLKGKLSEEEFKQYLFSIEKMYKDKKISKSKYLKLKMKSADIPDGFIERDLRNSQYISKKAKQMLEEIVKKVNTTTGSITNRLRNDWQLKNVMKELNLAKYEKLGLVELIDGKNGQKEKKIIDWTKRNDHRHHAMDALTVAFTTYSHIQYLNYMNARHNEKHEYYHKVYGIEKKYLYRDNNHKLLFKPPIPLDEFRNSAKEQLENILISFKAKNKVITRNKNKIRIKGKDKFKTKIEFTPRGQLHKETIYGRINRYSTKHEKVGTKFNLEIIKSVANQKYREALLKRLEEFDGKPKKAFGGKNAPSKNPIYIDNEKILMVPEKVNLVWQENIYTIRKEVSPELKLDKVIDVGIKRILQKRLNEFGGDAKTAFSNLDENPIWLNKEKGISVKRVTISGVSNIQAIHSKKNHNDNFILDEEGNRQQVDFVSTGNNHHVAIYRDENGNLQDEVVSFYEAVHRVNAGLSIINKNKNGWEFLFTMKQNEYFVFPAEDFDPNEIDLLNPNNYKLISPHLFKVQKFSKVFYGKNAIRDYVFRHHLESQLIDKKELRDTSYKVAKSLNKINGIIKVRLNHLGKIVKVGE

SEQ ID NO: 22548 - protein, 1021 aa, unidentified
  REGION 1..1021: note = Cas Enzyme sequence
MAEKKNKTVGCRVIPRSHPLFQEFKIWQTLNDIEVFAWDKQSKRKKADKSSILFDNSEDALLVEGKRFLYQEEKELLAKELFVKESMKKAEVLKLLFENYQELDLNFKQIDGNHTGFALFSAYSKMIEKYGYEPVDFKRSADEIIEKLETIFTNLGWNTELLSIDLSKEDKELERQSYFRLWHLLYSFEGDNTPTGNGKLLEKIMQLCDVEKEYAVELANVSFQEDYGSLSAKAIKKILPYLKEGNQYDVACDYAGYRHSRSSLTKDEIENKILKDKLEILPKNSLRNPVVEKILNQMVNLINTLIDTYGKPDEIRVELARELKKNAKEREELTKSIARNTREHDEIRQLLRTEFGMMNVSRNDIIRYKLYEELKDNGYKTLYSNEYIPREKIFSKEIDIEHVIPQARLFDDSLSNKTLEYRAINIEKGNKTAYDFVKEKYGNDGLEKFLNRCETLFKDKRTKLRKLKMEEKDIPEGFIDRDLRNTQYISKKAFAMLNEISRRVVATTGSITDKLREDWQLVDLMKELNLPKYEKLGMVEMFEDKDGRKIKKITDWTKRNDHRHHAVDALTVAFTKDVFIQFYNNKNAAWMPASKEHANIIGIKARYFENGKALAPMPLAQFRAEAKRHLENLLVSIKAKNKVITSNVNRTKNKNGENRKLQQTPRGQLHLETVYGSHRQYATKIEKVNAAFDVTKIATVSKLAYRNALLKRLEAFGNDPKKAFTGKNTLEKNPLYLDENQTEMVPEKVQTVEFETVYTIRKPIDPNLSIDKVVDVKIRSVLEKRLKEYGGDAKKAFVNLDENPIWLNEAKGISIKRVSIRGISNAQSLHEKKDKDGNLILGKEGRKIPVDFVNTGNNHHVAIYKKPVLDKVGQVVLDEEGNPKYELDEVVVSFFDAVTRANLGQPIIDKDYRRSEGWQFLFSMKQNEYFVFPNDKTGFNPKEVDLLNPENYALISPNLFRVQKFAYKNYVFRHHLETTIKDTSSTLKGITWTDFRSSKGLDKIVKVRVDHIGQIVSIGEY

SEQ ID NO: 22549 - protein, 1432 aa, unidentified
  REGION 1..1432: note = Cas Enzyme sequence
MTQKILGIDLGTNSIGTSVRNTDLGNNLVDQLEFFSSDIFNASVSKNTNGREYSLASDRSAHRRGRRLNDSRRRKLWATLDLLIKNNLCPMAPESLEQWRTYDKKKKLFRQYPIDDKAFHSWIILDFNGDGKPDYSSPYQLRRELVSVQLDFNQPIDRYKLGRALYHIAQHRGFKSSKGETIAEQEKQEDDSKKNKNSALTEEHVDVVNAMKASEEKLSKGLLVYMQEHNLKTVGAAFAQLEDEGIRIRNNSEYKAIRSQHQDEIKEIFKFQKGLSEQTELLDTLISEKQGIGTIFYKRPLRSQRGNVGKCTLEPNKPRCPIGHPLFEKFRAWTFINNIKAKSPDSDSAEPLPMDMRINIYNKLFLSRVKADFKFEEIRHFIEKQWGVALSKADKTINYRDDTSVAGCPITARMIKVLGEDWENFQVIGTKERQTQGKSNNALHQVCYTAEDIWHLCYDAEDPEQVRVFAEQALGWDEKKAAELVRLWSAIPQGYAMLSQKAIRNINRMLLFGLKYSDAVLLAKLPDILELSDEDIQTIIKKAQQLEEVVNEEKRIGNIVNSLIANYKAESLEHRFADHNYEYQLDESDEREIIKHIESNIGKQRWELMDADEQTSILEGVRSGYQAFFARHKRTFVELPQLGKRLVELLSKEYPSVEKKQWERLYHPSQIAIYRPILLDKSDEKRRLGNPDIGAIKNPTVMRTLNNLRRRVNQLLDDGVLVPNETRVVVETARELNDANAKWALEKYQKTRRDENAQIKKILEEFYSKPNGITDTDVDKARYVIEQCEEDNYKSKKEIGTYSKDIQKYKYWLEQGGQCLYTGRVISLSNLFDSNAFDIEHTIPASVSFDNSDQNMTLCEAHYNRFIKKNNIPTAMPNYEKDVTIDGKLYTAIKPRLEKWKKRIERLSRNVEYWKVQARRAQMKDRKDECTKEKLLWQMELQYWRDKLQRFTILEVTDGFKNSQLVDTRIITRHATLYLKSVFENVEVQRGSTTAEFRKILGVQSVEEKKDRTLHSHHAIDATILTTIPTAAKRERILELFYKVQEKERRLKNCSGDAYEGLKQELEGLQAKLKKEVGDCKLGGEISQLGNFINDKIIINHCVKDQTLTPSHKRLRRRGRVVGGKEHPIWQTGDTLRGKIHKESYYGAITQYAKDEDGNVLFNDGKPKIDPTIWYVIRRELKHKKSAQDTGFASWDDLEKVIVDKNLFKLMKEQFPEGTSFKDACEQGIYMIKKGKDQEHNIKTHRIRHIRCHTSVRSALKIKEQTNKSAKDYKQYFYAESGDLYTMCCYTNGKKKEYRPYRLYDIAQHRKSGIEDIPEFITDKKGNRLELAYKLCSGDMILLYENTPEELYDMDPANLKQRLYKVDRFESESSRIYLTNHLIANGEVGHSIKDYNQMPPTVRCGVNTLKFLIMGEHNDFVIKSNNIIFNHR

SEQ ID NO: 22550 - protein, 1483 aa, unidentified
  REGION 1..1483: note = Cas Enzyme sequence
MKTILGLDLGTNSIGWAKVCIDDNGNYLRDIKLGSRIIPMSQDVLGNFDKGVTESQTSVRTGYRGIRRLRERSLLRRERLHRVLHVLDYLPPHYDCSIGWDRNAPSTYGKYLNHSEPKLAWERQEDGSMRFIFMDSFHEMMADFAKRQPSLVSDGKRIPLDWTIYYLRKKALSQAIRKDELAWILLNFNQKRGYYQLRGEEDDTNSAKCEEYYELKVISVEADEEGKGGNTWYNVKLENGWIYRRQSKISLSDWVGKTREFIVTTEYEKDGVTLKRNKDGEIKRSFRSPSEDDWGLRKKRTEERLESSKMTVGAFVYEHLLSEPSDKIRGKFIRTIERKYYKEELYAILREQSKYHEELHSEGALKKCAEELYKNNQPHRDSLLKKDLIYLLLDDLIFYQRPLKTKKSLISECPYEAYSYVDKETGEIKRQGIKCIAKSNPYYQEFRLWQFISNLRFFDKVDDKDVTADYLSTRDDYVRLFAYLNDRKDINQETLLKEFLKLKKVIINSEKEFSVRWNYIEDKEKRYPCNETRHELLLALDRAGIDRSWLDEEGREYRLWHLLYSVESKEETEGALRKLKDDDEFIKSFLKIKPFKKEYGAYSEKAIKKLLAVMRIGSLWSEADICKTTKENITKMLKGDIDDKLKEKISSCLSSYNQVSDFQGLPVWLACYVVYGRHSEAAEIQHWRTPNDLLVYINGFKQHSLRNPIVEQCILETLRTVHDIWKEAGHIDEIHVELGRNMKSTADQRARMSGNILRNENTNLRIKSLLLELKNDPDIKDVRPYSPMQQEKLRIYEEGALQELTKDDKDFAEIIKISTMAQPSAKELLRYKLWLDQKYCSPYTGRSISLAKLFTSAYQIEHVIPQSRYFDDSFNNKVICESEVNGLKDNMLGYEFIKECGGEIVHCTMLGDVKILSESEYKDFVNDHYAHNRRKKENLLLEDIPQEFLNRQMNDSRYISKVVKALLSNIVRAEGEEEATSKFVVSCSGGITDRLKKDWGLNDVWNKIVYPRFERLNKLTGTDSFGQWENKEGKKVFQTSLPLELQRGFNKKRIDHRHHAMDALVIACTSRSIVNYLNNESADNPKKREDLRQKLCDKNRIIRKPWDTFTQDATAALEDVVVSFKNYVRVINKATNYYEKYDKNGKKGIAEQKGQEMWAIRKPMHKETVFGRVNLRRKVTVKLKDALEDIPSICDKTLRDYVNGLVKKNFKTKHLIAHFKSLNYRLNRQHIEKVEVWQFSDKKEQLVATRKPLDTSFDNKHIDSITDTGIQKILKNYLQSKGGDPNIAFTPEGIVELNQNISLYNDGKQHQPILKVRVFEPKGAKYCVGQNGNKSAKYVEAQKGTNLYFAIYEDEEGKRSYETIPLNEVVERLKQGLSPVPEKNKAQVPLKFYLSPNDLVYVPTDEEVNDNRCYMNKDRIYKMVSSTGNQCMFVPFRVATCIVNKMEYSPLNKMEKAITGEMVKAICWKLVVDRLGNIIKIIK

SEQ ID NO: 22551 - protein, 1375 aa, unidentified
  REGION 1..1375: note = Cas Enzyme sequence
MKKILGLDLGTTSIGWALVNESENKDEQSSIVRLGVRVIPLTVDEKGNFEKGKAITTNADRQQVHAARINLQRYKLRRENLRDCLQKQGWIGSEPMCEDGKSSTFETYKLRAKAAVEEVSLHEFARVLFMLNKKRGYKSNRKANDKEDGKLFDGMTIAKKLYEERLTPAEYSLRLLYKGKKFTPEYYRSDLIEEFEKIWNEQQKYYPEILTDEFKQQLEGKAKSNTSKLFLGKYGIYSADTKGLDRRLQPLKWRVEAMKQQVDKDVLAFVISDLKGQIANTSGLLGAISDRSKELYFSKQTIGQYLWTSLQENPHISIKNQPFYRQDYLDEFEKIWETQATFHKELTSELKQEIRDIIIFYQRPLKSKKNLIAVCELEQRKVKVTVDGKEKEITIGPKVAPKSSPMFQEFRIWQNLNNILLLDHGTNSKRPLYEEERNLLYEELSVKEKLSKTEALKVLGKKSKQWDLNYKELEGNRTQAVLYDCYNRIIVMSGHEECNFKKLKASDIRHYVKMIFKNLAFNTDILCFDSSLKGHELERQPMYRLWHLLYSYEGDNSRTGNDALLRKLEIAFGFPKEYAAVLADVVFEDSYGNLSVKAMRNIFPHLQAGKDYSQACEEAGYKHSRRSLTKEELNQKVYKEKLELLPKNSLHNPVVEKILNQMVNVINAVIEEYGKPDEIRIELARDLKIGAAERENMTRSINQGNAENKRIREILEKEFALSYISRNDIIKYKLYEELKPNGFKTLYSDTYIPKDKLFSKDFDIEHIIPKARLFDDSLSNKTLEARDVNIAKSNKTAFDFILERYGEQGVKAYKTKLLRLLEDGAISNKKYNNLLKTEADIPSGFIDRDLRNTQYIAKKAYEILSELVKIVTPTTGSVTNRLREDWQLVDVMKELNFEKYLKLGLADVIEDRDGRKVKRIKDWTKRNDHRHHAMDALTIAFTKPSYIQYLNNLNARSDKSGSIYGIEVKELHREEGKLRFNAPLPINEFRAEAKRHLKSILVSIKAKKKVMTQNVNKIKTKHGIIKKEQLTPRGELHNATYYGTKKRPLVRMVKVGAALDEATINRVCSPAIRAALLKRLNAYNGDAKKAFTGRNSIDKNPIYLDIEQTKLVPVLVKIIEWGMYHPIRKRITPDLKIDKVIDKGIREKLKARLAEFNGDAQKAFSNLDENPIYMDEAKQITLKRVSIEGVLSVIPLHTLKDKAGKPIIGSDGRPVFGDYVQTSNNHHIAFYKDDKGNLQDNPVSFFEAAERKSQGVPVIDKRYNCDKGWHFVFTMKQNEYFVFPNEATDFIPSEVDLLDEANYDIISPNLYRVQKLSKASGRDYWFRHHLETMLNDDLRLKNSTFKRIKSLKGLEDIVKVRINSIGKIVAVGEYD

SEQ ID NO: 22552 - protein, 1432 aa, unidentified
  REGION 1..1432: note = Cas Enzyme sequence
MKYILGLDLGSNSIGWALIEQDFDNKQGKILGLGSRIIPMDQGILGEFERGNKVSQTAERTGFRGVRRLRERHLLRRERLHRVLHLLGFLPPHYDAQIDFTKRFGKFIGDSEPKLAYNNEGFIFLESFNEMVEDFKKHQPQLFYIKSNGEESKIPYDWTIYYLRKKALQEKISKEELAWIILNFNQKRGYYQLRGEEEEKSTKNVEFYSLEITDVIADTPNNKGEVWYSIYLENGWVYRRASKISLEDWKGKVRDFIVTTELNEDGSIKLDKEGKEKRSFRAPSEDDWNLIKKKTEQNIVFSGKKVGEYIYDHLLQNPNQKIKGKLVRTIERKFYKEELKAILEKQVALQPELFTEELFVDCVRELYKNNEIHQNSLSSKDFVHLFLNDIVFYQRPLRSQKSNISSCSLEYHFCIDKETKQRRKTYLKVISKSNPYYQEFRVLQWLSNLKIYRKEDDKDVTSEFISSIEDKETLYEFLMSEKEVSNKSVLEFLLMKLLKETYPFAKETELKKELKKEITKYRWNYVYEEENDNKKYPMNETGYEIRKRLREVKNIPDDFLTKDIEYQLWHIIYSVTDKYEYEKALMKFAQKHNLDAESFVENFKKIKPYPSDYGAFSEKAIKKLLPLMRFGKYWNYSDISEPVQARISDIINGVDNESIKTIVREKAEKFQLSQESDFQGLPLWLAQYIVYGIHSEAADIQRWTSSSDLEEYLKGFKQHSLRNPIVEQVVTETLRVVKDIWEYYGKGEENFFEEIHIELGRELKKTAEERNRMTREINANEETNLKVKKDLQELFENKSAENVRPYSPIQQEKYRLWLEQKEKSPYTGQSIPLSKLFTDEYQIEHVIPQSRFFDDSLSNKVICEAAVNAEKGAQLGLEFIKKHGGEIIEIGLNKKATVLNEKEYKELVNELFANNRGKKAKLLMEEIPEKMVERQLNDTRYISKFISQILSNIVRSPQEDEGVNSKNIIPCTGKITAALKQDWGLNDVWNDLILPRFERMNNLTQTELFTTYSEKYQKKIPTVPLEHAKGFQKKRIDHRHHALDALVVACATRSHINYMNNQHALDKHKAKEEKQNARIDLRTVLCDKKYNDNAEDNYNWTFKKPWNTFTQDVRSALEMVVVSFKQNLRVINKATNYYEKWREEKGKMVKKKVKQEGINWAIRKPLHKETISGKITLERVKVGKGKILTATRKSIDSSFTEKTIASITDTGIQKILLNYLAHKGSPELAFSPEGLEEMNKNIAKYNDGKDHQPIYKVRIFEEGSKFPLGEIGTKSQKYVETAKGTNLFFGIYQGKEKRSYATIPLDEVIERQKQGLTSVPEHNEKGEKLLFSLSPNDLVYVPMEGEDVESINFTNLSKEQRERVYKTVSFTGSECFFIKSSISSLIKNYDAKTKIGELGSLNKLEITIPDHIRIKEFCIKLKIDRLGNISKV

SEQ ID NO: 22553 - protein, 1498 aa, unidentified
  REGION 1..1498: note = Cas Enzyme sequence
MKHILGLDLGTNSIGWAVINAIKEENTQKEQLIGINTAGSRIIPMDAAQLGDFNKGNTVSQTANRTQFRGVRRLYERKKLRRERLHRILQLLGFLPKHYASQLDRYGKFIANSEPKLAWTTNTHEPSYFIFQSSFQEMLNDFLQNNNQVKKVPYDWTLFYLRKKALTQKIEKEELAWILLNFNQKRGYYQLREEETEKVSSKTRQYFDSQIVTDITDTGQIYKGLKIFTITLENGEKGKFFSKNMPDWKGQKKDIIAIIDLDKNGNDKYDENGELSRRFKIPTEQEWEEQWELIKTKTQKDLDTSHKTVGAYIYDTLLQTPSQKIRGKLIRTIERKYYKDELNQILKKQEEFHPELRDSNLLEACIEELYPNNEAHRNAIAKYSISQLLIEDILFYQRPLKSKKSLISNCPYEEYTYTNKETGEICTSSLKCIAKSHPLFQEFRLWQFISNLRIYQKEGTINGKFTTDIDVTSQFLKTEDDYANLFDWLNQKKEIRQDTFLKNPAFGLKKNTANYRWNYVEDKTYPCNETHYKILSYWEKAGIEQSALTSEIEEKLWHILYSISDKNELKKALQHFADKNYLSDKFADTFQQIPPFEKDYGSYSAKAIKKLLPLMRIGKFWKIENIDSTTLNRIEKILTGEFEENIKNQTREKTIHLDNLYSFQGLPTWLACYIVYNRHSEIKDVTKWQQPSDIDAFLNAFKQHSLHNPIVEQIIMETLRTVRDIWKQTGHIDEIHVELGREMKNPAEKRRKLTQQIQENENTNLRIKALLAEFANPELGIENVRPHSPSQQDLLRIYEEEVLNETKDIPEDIAVILKKFNEVDTKKRPSTSDVLRYKCWLEQKYRSPYTGAMIPLGKLFTPAYEIEHVIPQSRYFDDSFTNKVICEAEVNKLKGNMLGYEFIKNNQERIVELGFGQNVKIQTVEAYELFVKEHYSYNRTKMQKLLMEDIPDQFIERQLNDSRYISKLIKSLLSNIVRDEGEEEATSKNVIVCTGSITDRLKKDWGINDVWNKLILPRFIRLNEITESNRFTTTNACNKTIPAMPLDLQKGFNKKRIDHRHHAMDAIVIACANRNIVNYLNNESASKNAKISRQDLRQILCKKTKTDNLGNYQWLIDKPWDTFTQDMYSILSNIIVSFKQNLRIINKTTNHYIHYENGKKVSCSQKQSDSWAIRKPMHKETVYGEINLRRTTTATLKAALENPQRIIEKDLKKKIKELLTQGLNEKQIKKYFEDNKDIWQEINLKKIPVYYFTKETANRFFACRESINTTFNKKKIEEKVADTGIQQILLRHLEQNGNNPEQAFSPEGIEQMNKNIMSLNNGKFHQPIYKVRTYEQADKFAVGQTGNKSTKFVEAAKGTNLFFAIYETAHKRSFASIPLNVVIERLKKGLSPAPENEKGNLPKFILSPNDLVYVPTKEEIENGHINQPIQKDRIYKMVSCTGNQCFFIKSNVANTIIDKYEFSPLNKMERAITGEMIKETCIPIQTDRLGNIITPISL

SEQ ID NO: 22554 - protein, 927 aa, unidentified
  REGION 1..927: note = Cas Enzyme sequence
VKPFKKEYGAYSEKATKKLLQVMRLGKYWCGDKLPEPAKRTKGNKQAVYDEMANRGICKQTLQNISNIIEENIDERLMGALLNPERPLTELSHFQGLSVSDACYVVYGRHSEVAEIVKWKDAGELNTFINNFKQHSMRNPIVEQCVLETLRTVRDVWEQEGQIDEIHVELGRNMKRTAEQRARDTQAIQRNENTNMRISLLLTELKNDPSISDVRPHSPSQRELLKIYEEGALENLTNQDEDIAKISRLAQPSTSELRRYKLWLDQKYVSPYTGRPIPLAKLFTPAYEIEHIIPQSGYFDNSFSNKVICEADVNKLKDNLLGMEFIKQFGGKTKGILDEEAYKLHVTTNYAHNPAKRSKLLMEDLPTDFNSRQLNDTRYISKTVMALLSNVVREEGERETRSKHVVVCTGGVTDTLKKDWGLQDVWHNLVYPRFIRLNNLTSSQNFGYWRYLNEENSKKGEDSKKVFQITLPPECQRGFVKKRIDHCHHAMDALVIACASANIVNYLNNQSAANPHTHENLQRLLCDRKRMIRKPWPTFTQDAQKALEDLVVSFKNTVRVVNKASNTYLRYDKDGKKKRFKQEGEGLKAIRKPMHKETYYGEVNLIRKEMLPLKRALDDVNAIVDKELRASIQGLLRDGFNLQQVLANFKAKDFKFNKRDIKKVEVYVSSAKSTPMVATRKSLDTSFNAKRIADITDTGIQKILLNYLKANDNSPEQAFTPEGIAYLNEHIAEYNNGKPHQPILKVRVSEVKGAKFAVGQTGSKKAQFVVAESGTNLYFAIYEDKEGKRHFETIALNVAAERLKTGHTPVPETNDAGLPLKFYLSPNDLVYVPTDEDRAAAHPSIDKWRIYKMVSATDKNSFFLPFGVASIIADQVEFEAKNKVGRVIEDLEYTEQYESSAISKIMIKDVCWKLEVDRLGNITKIVR

SEQ ID NO: 22555 - protein, 1399 aa, unidentified
  REGION 1..1399: note = Cas Enzyme sequence
SEIKELGVRIVSLTTDEQSDFEKGKSITTNANKTLKHGARLNLDRYQQRRKYLIDLLQKANLITLFSILAENGKNTTHSTWQLRAKAVTERIEKEEFARVLLAINKKRGYKSSRKAKTEDEGQAIDGMAIAKCLYDENLTPGQLSLQLLQQNKKLLPDFYRSDLQKEFDLVWNLQKQFYPDILTDSFYKELQGKGKDATSKAFSKRYHFDTAENKGSKESVRLQAYQWRAEAISKQLSKEEVAYVLTEINNNLNNASGYLGAISDRSKELYFNRQTVGQYLYAQLQENRHNSLKNKVFYRQDYLDEFERIWETQASFHKELTDELKKQIRDVVIFYQRKLKSQKGLISFCEFESKEIEIEKDGKTITKTIGARVVPKSSPLFQEFKIWQILNNVICKRKGIRKKKSSAKTTQLDLLNESSQTIFSLDMECKQLLFEELNLKGDLKSDKVLKLLGYSPQEWEINYNQLEGNRTQKALYEAYLKIVEMEAHDVKDILQIKSTKDDWSLDESPLSASEIKEKVKDIFQALGICTKILYFDPLLPVKEFEEQDSYQLWHLLYSYESDDSTSGNETLYRILEKKYAFKREHARILANVALQDDYGSLSTKAIRKIYPYIKENQYSKACELVGYKHSKLSLTTEELEARELKNIIPLLKKNALRNPVVEKILNQMINVVNALIEKNSERDAEGKITKYFHFDEIRIELARELKKNAQKRYEMTQNINKAKLEHQKISEILQKQFGIKNPTKSDIIRYRLYQELEHNGYKELYTNAPIARDMLFSKNIEIEHIVPKARVFDDSFSNKTLAFREFNIKKGESTAFDYITSLNSEEELNQYLTRVENAYKTKSISPTKYKNLLKKASEIGDGFINRDLRDTQYIAKKAKEILFQVTKNVLSTSGSITDRLREDWGLVDVMKELNMPKYQSLGLTEVEERKEGNKVTVIKNWTKRNDHRHHAMDALTVAFTKPSYIQYLNHLNARKDENNKNYSVILAIEEKETIKVPTNNGKNKRVFIEPIPNFRQVAKKHLEEIFISHKAKNKVVTKNVNKPAGTDKQQITLTPRGQLHKETIYGKYQYYVNKEEKIGVKFDKETIAKVSNPLYREALLKRLQANDNDPKKAFTGKNALSKNPIYLDEAKTKTLPERVNLTYLEEDFSIRKDISPDNFKDLKSIEKVIDQGVKRILIKRLQAYGNDPKKAFVDLEKNPIWLNKEKGIAIKRVTISGVNNAQPLHIGKDHLGKTTLNKEGKEIPVDYVSTGNNHHVAIYRDKEGNLQEQIVSFFEAVVRAQQGLPIVDKTYKQAEGWQFLFTMKQNEMFVFPNEATGFNPTEIDLLDPKNKKQISPNLFRVQKIATKDYFFRHHLETNVETDNILKNVTWKREGLSGLKDIVKVRMNHLGDIVSIGEY

SEQ ID NO: 22556 - protein, 995 aa, unidentified
  REGION 1..995: note = Cas Enzyme sequence
EFEKSGAPFYPWRVRAELATTAITDQQELGEKLSIALRHIARHRGWRNPYSKVTALYTVTEPSDAFLAMQEECAKQLGRTIPETITVGQLVTGMNLGKTRLRGENSLLAARPRQSDNANEIHTIAKVQGLSNELVRQIIDHVFAAESPKGSAAEQVGKDPLQPTKKRALKASDAFQQYRIAALIGNLRIRGGKGNRRLTTEETRLVFDYLRSLPAKQEPTWQLVAEQLKIDRGNLVGTAIMTDDGERAGAKPPVHDTNRIMENTKIKPLATWWKSADADARAAMVKALSNAEVDDFDSQAGAQVQEFFFGISDEDQEKLDGLHLPIGRAAYSEDTLDRLTKRMIGEGMDLYEARQAEFKISNDWAPPAPEIGERVGNPAVDRVLKATARWLNAAERQWGAPKSVNIEHVRAAFMSESSARELDRDNQQRAKRNVKVVAEMQEKLGIEGRPSRADVWRFQSIQRQNGKCAYCGAEISFKNSEMDHIIPQAGEGSTNTRDNLVAVCRECNSSKSNIAFAVWAENTSRPGVSVQKAIERTHHWVTDSGLRKPEFDKFRKQVCDRLRRKATDEPIDARSLESVAWMANELRSRIAQKFKDGDTKVRVYKGALTAEARRASGISGKLEFVDGKGKSRLDRRHHAVDAAVVAFTSNYVAETLALRSNMKFDQELRRKAPQWREFTGSDHVHQVEWTKWKYRMQALAELLNNALVQDRIVVMHNLRLRLGNGAAHEDTIGKLTRLKVGDAISTTDIDRASSEALWCALTRDPDYDPKTGLPENPNRTIRIHGTHLTASDEITVFPVAAASIPIRDGFAKLGSNYHHVRLFRVPSGKKYKYCLMQVYTVDLLKFRKEDLFTVELKPQTISVRTCEALLRKALANGTAEYLGWLVSDDELLIDTSSFDTPGIVKLREEYGPVNRWRLAGLTSVTRLNLRPLYLSKEGLKPNVNPEIKKIIDNRSWIITVNKLFSSGHVKIIRRDALGRPRLHSAAHLPICWEVK

SEQ ID NO: 22557 - protein, 1504 aa, unidentified
  REGION 1..1504: note = Cas Enzyme sequence
MKNIVGLDLGTNSIGWAVVNGSVNDDGSEQLVKIQASGSRIIPMDAAMIGDFNKGNSISQTAERTRLRGVRRLSERYLLRRERLHRILDILGFLPFHFAQDLDRHGKIVKGKEPKLAWRKNEAGQFEFIFQDSFKEMLEDFKLNHPNLITDDKKVPYDWTIYYLRKKGLTSKISKEELAWILLNFNQKRGYYQLRGEEEEENKDKLVEFYALKVVAVEDSGEKKGKDIWYNVHLENGWVYRRTSNMPLDWVGKTKEFIVTTDLEKDGTPKKDKEGNVKRSFRAPKEDDWSLVKKKTEADIDQTHKTVGAYIYDTLLGNPSQKIRGRLVRTIERKYYKEELKQILEKQKEFHLELQDRALYAACIEELYPINEAHRNNVGNRDFTYLFLEDILFYQRPLKSKKSLIDNCPYEENQGLDKETGEIKSFPVKCIAKSHPLFQEFRLWQFIINLRIYRKDLAQDVDVTNELLKTEEDYVALFDWLNGKKEIDQKAFLKYPVFGLKKEIENYRWNYVQDKPYPCNETRSLMLARLEKCDISIEFLTKENEEALWHILYSVEDKNEIVKALQKFADKHDLNASFVDVFQKFPPFKKEYGSYSAKAIKKLLPLMRMGKYWSENSIDKGTRERIDKIITGEYDEKIENRVREKAIHLADVSDFKGLPLWLVCYIVYGRHSEAKEITQWKSPADIDSYLRSFKQHSLRNPIVEQIIIETLRVVRDIWKQVGNIDEIHVELGREMKNPADKRKKMTQQMSENENTNLRIKYLLTEFLNPEYEVENVRPYSPSQQDILRIYEEGVLNSVSDLPEEISDILKKFTETDLKKRPSRSEILRYKLWLEQKYRSPYTGEVIPLGKLFTPAYEIEHVIPQSCYFDDSFSNKVICEAEVNKLKSNLLGHEFIVKHHGEIVELPFGKKVRIFTVDEYEQFVKDNYSRTRSKMKKLLMDDIPEEFVTRQLNDSRYISKVVKSLLSNIVREKGEEEAISKNVIPCTGGVTDRLKKDWGINEVWNKIILPRFQRLNELTGTNKFTTKNVGIQEIPTMPLELQKGFNKKRIDHRHHAMDAIIIACANRNIINYLNNESATAKAELSRYDLQKMLCDKAKTDNNGNYKWVIRKPWASFTQDTYLALENIIVSFKQNLRVINKATNRFLHYNEEGKKIFVKQGKGDNWAIRKSMHKDTVFGEVNLRRIKTVALNEAMKNPQSIVVKDFKRKLLELWNLGFDAKRIKKYFEDNRETWSDINLSKIEVYYFSKDTKDRFFATRKPLDTSFDRKKIENNITDTGIQKILLRHLELKDNNPDIAFSPDGIDEMNRNIIQLNNGKYHQPIIKIRWYEQADKFAVGQTGNKFSKFVEAAKGTNLFFAVYESNILDKKTNTIIKKRNYATIPLNVAIERQKQGLPVAPEDENGNDPIFVLSPNDLVYLPTDDELANGIIAQPLDRGRIYKMVSCTGNEGHFIPARIANPILQTIELGSNNKAQKAWTDEMIKEICMPIKVDRLGNVLESSSSYKK

SEQ ID NO: 22558 - protein, 1084 aa, unidentified
  REGION 1..1084: note = Cas Enzyme sequence
MKKILGLDLGTSSIGWALVNEAETSEEKSSIIKLGVRVNPLTVDELQNFEKGKSITTNADRTAGRSMRRNLQRYKLRRENLIEVLKEYNFITDETILSENGNRTTFETYRLRAKAAVEEISLEQFARVLLMINKKRGYKSSRKAKGAENGTLIDGMEVAKKMYDEGITPGELCLQLLTAGKRYFPDFYRSDLQAEFDRIWNFQKQFYPDSLIDKVKDEVRGKNKSQTWAILAKYFVWKEVENSWNEEEAQTRRVEKEYRLVGIKRGVKREELKLENFQWRVKALSERMNPEELAIVLQEINEQISNSSGYLGAISDRSKELYFNRQTVGQYQMAVLDNNPNIGLRNMVFYRQDYLDEFNTIWEKQAEFHKELTEDLKKEIRDIVIFYQRRLKSQKGLINICEFERRQIEVEIDGKKKIKTIGSRVIPRSSPLFQEFKIWQTLNDIEVSVLGVKNKRKKQDDNSTTLLDSAENIDSLKLNVSRPLDADEKSLLAKELFIRDKLTKSDVLKLLFNNPQNLNLNFKNIDGNRTGSALYQAFSKILEISGHESINFKKSADEIVEQVKTIFSALGWNTEVLCFDSEKELDKQPYFKLWHLLYSFEGDSTPTGDGNLIQKIADLCGFEKDYASILANITFQEDYGSLSTKTIRKILPHLKDGNQYDVACEYAGYKHSKSSLKKEEIKNKVLKDKLELLPKNSLRNPVVEKILNQMVNVINAIITTYGKPDEIRIELARELKKNAKEREELTKSIVDTTKTHEGIRAILQNDFGMSHVSRNAIIRYKLYEELKDNGYKTLYSNTYIPKEKLFSKDFDIEHIIPQARLFDDSFSNKTLEVKSINIEKGSKTAYDFVEEKYGEQGLQEYLNRCEVLFRDKKTKLRKLKMQESEIPEGFIDRDLRNTQYIAKKALSMLNEICRRVVATTGAITDELREDWQLVDVMKELNWEKYKVLGLVEYFEDNDGRLIGRIKDWTKRNDHRHHAMDALTVAFTKDVFIQYFNNKNASLKPDTNEAAIRNKYFQNGKAIPPMSLDEFRAEAKKHLNDTLISIKTKNKVVTINLNRTKKEKWNKQKAATNSTRAIAFGNCLR

SEQ ID NO: 22559 - protein, 1517 aa, unidentified
  REGION 1..1517: note = Cas Enzyme sequence
MKNILGLDLGTNSVGWALISVDENGNLVKDIRLGSRIIPMSQDVLGKFDSGVTVSQTAERTEYRSHRRLLERALLRRERLHRVLHLLGFLPEHYAACIGWDRNDNATYGKFLPETEPKLAWRKADDGGYRFVFMQSFEEMLDEFSASQPTLVANGKRIPLDWTLYYLRTKALTKPIAKEELAWILLNFNQKRGYYQLRGEEEEETPSKRVEYHELKVVKVEATDEGKGGNVWYNVLLENGWVYRRQSKYSLDKWLGQTLPFIVTTDLEADGVTPKCDKEGNVKRSFRSPKEDDWTLVKKRTEDHLEKSGLTVGAFIYQHLLANPSDKVRGQLVRTIDRKYYKRELQAIIAKQMEFHPELRDAELLKACAEELYRNNEAHRAQLLAKDFKHLLVEDVLFYQRPLKSKKSLIANCPYETRQYINKETGEIKDVNVKCIAKSNPYFQEFRLWQWISNLRLLRQADGQDVTAAYIKGNEDKERLFDMLNNQGEIKQEHILRDFLKLKKPKGGEFPLRWNYVDDKIYPANETRHAINKAIKGMAVDKEEKETLGQLFVQPAVEYMLWNLLYSITDRNELASALRRFALTHGVSFVDAFVESFLKVKPFKKEYGAYSEKATKKLLQVMRLGKYWCGDEMPEPANRTKGNKQAVYDEMAHRGICKQTLQNISNIIEEDIDERLMGALLNPERPLTELSHFQGLSVSDACYVVYGRHSEVAEIVKWKDAGELNTFINNFKQHSMRNPIVEQCVLETLRTVRDVWKQEGQIDEIHVELGRNMKRTAEQRARDTQAIQRNENTNMRISLLLTELKNDPSISDVRPYSPSQRELLKIYEEGALENLTNQDEDIAKISRLAQPSASELRRYKLWLDQKYVSPYTGRPIPLAKLFTPAYEIEHIIPQSRYFDNSFSNKVICEAEVNKLKDNLLGMEFIKKFGGKTKGILDEEAYKLHVTTNYAHNSAKRSKLLMEDLPTDFNPRQLNDTRYISKTVMALLSNVVREEGERETRSKHVVVCTGGITDTLKKDWGLQDVWHKLVYPRFIRLNNLTGTKDFGHWESKDGKAVFQTGLPLDLQRGFVKKRIDHRHHAMDALVIACASANIVNYLNNQSAANPHARQDLQRLLCDRKREIRKPWPTFTQDAQKALEDLVVSFKNTVRVVNKASNTYLRYDKDGKKKRFKQEGEGLKAIRKPMHKETYYGEVNLIRKEMLPLKRALDDVNAIVDKGLRACIKGLLRDGFNLQQVLANFKAKDFKFDKRDIKKVEVYVSSEKSTPMVATRKLLDTSFNAKRIADITDTGIQKILLNYLKANDNSPEQAFTPEGIAYLNEHIAEYNNGKRHQPILKVRVSEIRGAKFAVGQTGSKKTKFVEAQSGTNLYFAIYEDKEGKRNFETIALNVAAERLKTGQTPVPETNDAGQPLKFYLSPNDLVYVPTDEDRAAACPSIDKRRIYKMVSATDVNCFFLPFEVASTIYNKVEFESMNKMGRAIDMMEYSDNYDSSAINKLMIKDVCWKLEVDRLGNITKIVR

SEQ ID NO: 22560 - protein, 1497 aa, unidentified
  REGION 1..1497: note = Cas Enzyme sequence
MKTILGLDLGTNSIGWAKVCIDDNGNYLRDIKLGSRIIPMSQDVLGNFDKGVTESQTSVRTGYRGIRRLRERSLLRRERLHRVLHVLGYLPPHYDCSIGWNRNEPSTYGKYLNHSEPKLAWERQEDGSMRFIFMDSFHEMMADFAKRQPSLVSDGKRIPLDWTIYYLRKKALSQAIRKDELAWILLNFNQKRGYYQLRGEEDDTNSAKCEEYYELKVISVEADEEGKGGNTWYNVKLENGWIYRRQSKISLSDWVGKTREFIVTTEYEKDGVTLKRNKDGEIKRSFRSPSEDDWGLRKKRTEERLESSKMTVGAFVYEHLLSEPSDKIRGKFIRTIERKYYKEELYAILREQSKYHEELHSEGALKKCAEELYKNNQPHRDSLLKKDLIYLLLDDLIFYQRPLKTKKSLISECPYEAYSYVDKETGEIKRQGIKCIAKLNPYYQEFRLWQFISNLRFFDKVDDKDVTADYLSTRDDYVRLFAYLNDRKDINQETLLKDFLKLKKVIINSEKEFSVRWNYIEDKEKRYPCNETRHELLLALDRAGIDRSWLDEEGREYRLWHLLYSVESKEETEGALRKLKDDDEFIKSFLKIKPFKKEYGAYSEKAIKKLLAVMRIGSLWSEADICRTTRENITKILKGDIDEKFKEKISSCLSSYNQVSDFQGLPVWLACYVVYGRHSEAAEIQHWKTPKDLLVYINGFKQHSLRNPIVEQCILETLRTVHDIWKEAGHIDEIHVELGRNMKSTADQRARMSGNILRNENTNLRIKSLLLELKNDPDIKDVRPYSPMQQEKLRIYEEGALQELTKDDKDFAEIIKISTMAQPSAKELLRYKLWLDQKYCSPYTGRSISLAKLFTSAYQIEHVIPQSRYFDDSFNNKVICESEVNALKDNMLGYEFIKECGGEIVHCTMLGDVKILSENEYKDFVNDHYAHNRRKRENLLLEDIPQEFLNRQMNDSRYISKVVKALLSNIVRAEGEEEATSKFVVSCSGGITDRLKKDWGLNDVWNKIVYPRFERLNKLTGTDSFGQWENKEGKKVFQTSVPLELQRGFNKKRIDHRHHAMDALVIACTSRSIVNYLNNESADNPKKREDLRQKLCDKNRIIRKPWDTFTQDATAALEDVVVSFKNYVRVINKATNYYEKYDKNGKKGIAEQKGQEMWAIRKPMHKETVFGHVNLRRKVTVKLKDALEDIPSICDKTLRDYVNGLVKKDFKTKHLIAHFKSLNYRLNRQHIEKVEVWQFSDKKEQLVATRKPLDTSFDNKHIDSITDTGIQKILKNYLHAKGGDPNIAFTPEGIVELNQNISLYNDGKLHQPILKVRVFEPKGAKYCVGQNGNKSAKYVEAQKGTNLYFAIYEDEEGKRSYETIPLNEVVERLKQGLSPVPEKNKAQVPLKFYLSPNDLVYVPDTGDVNEIKKEQIYKFVDSSGTTANFIPHRASDLIYNVDKKFATSFCNREVIQNEYGVGSPQSKNQKAITGEMVKAICWKLVVDRLGNIIKIIK

SEQ ID NO: 22561 - protein, 1494 aa, unidentified
  REGION 1..1494: note = Cas Enzyme sequence
MRTILGLDLGTNSIGWAKVCINDDGNYVREIKLGSRIIPMSQDTLSNFDKGVTDSPTAARTGFRGIRRIRERVLQRRERLHRVLHVMGFLPSHYEKAIGWNREEATTYGKFLDNGEPKLAWERQEDGSMRFLFMDSFHEMMADFAKCQPGLVADGRKIPLDWTLYYLRKKALTQAIKKEELAWILLNFNQKRGYYQLRGEEEEEDPTKREEYYELKVVSVEAAEEGKGGNTWYNVTLENGWIYRRQSKIELNDWTGKIRQFIVTTEYEKDGITIKKDKNGEVKRSFRAPSEDDWGLRKKRTESRLEDSGKTVGEFIYDHILSEPADKIRGNFIRTIERKFYKKELEAILREQSKHHKELKDLNTLVNCIKELYPNNKAHQDSLMKKDMIYLLITDLIFYQRPLKSKKSLIADCPYEYYEYVIKETGEIKRQGIKCIAKSNPYYQEFRLWQFIINLRLFDRANDKEVTSEYLSSMEDYTKLFTYLNDRKEINQEILLKDFFKQKKVKMGMEKEFPIRWNYIEDKEKKYPCNETRHELLAALDKAGIDHSWLDDKERFYRLWHLLYSVESKEEAEGALRKLNDNEDFVNAFLKIKPFKKEYGAYSEKAIKKLLAVMRIGTQWNEDDICEQTRNRIQSIINGDIDEKIKERMGRTFSQLSDFQGLPEWLACYVVYGRHSETTDIQRWTKPENLMSYIKGFKQHSLRNPIVEQCILETLRTVHDIWKEAGHIDEIHIELGRSMKSTADQRARMSKSILQNENTNLRIKSLLMELKDAKEFENVRPYSPMQQEILRIYEEGALQELTKEDDQYPEISKISQMAQPSAKELLKYRLWLDQKYCSPYTGKPISLSKLFTSAYQIEHIIPQSRYFDDSFSNKVICEAEVNQLKSNMLGYEFIKKHSGEIVHCTMVGDVKILDAKEYYNFVTEHYANNRRKKEKLLLEDIPQEFLNRQMNDSRYISKKVMALLSNIVREEGEQEAKSKFVIACSGGITDRLKHDWGLNDVWNSIVYPRFERLNKLTNTENFGRWENKEGKQVFQTSLPLELQRGFSKKRIDHRHHAMDALVIACASNNIINYLNNESAKSQEKREDLRKKLCDKNRIIRKPWETFTQDVRTALEDVVVSFKNYVRVINKATNYYEKYDKNGKKGIAEQKGQDMWAIRKPMHKETVFGQVNLRRKVTVKLKDALEKVPAICDKELRDYINNLVAKQFNKKQILAHFKSINYRLNMKSVDKVDVWQFSDEKEPMVATRKSVDTSFDTKRIATITDTGIQNILRNYLNAKDNDPNIAFTPEGIAEMNKHITEYNNGKQHQPILKVRVSEPKGAKYQVGETGNKTSKFVVAQKGTNLYFAIYEDKEGNRSYNSIPLNEVIERLKQGLSPVPDANEKGIPLKFHLSPNDLVYVPKTDEENEIKMGQIYKFVDSSGTTANFVPHRVSNLIYNVDKKIAENFCNHEIIQNEYGIGSQQSKNQKSITGEMIKAVCWKLEVDRLGNIHKIIK

SEQ ID NO: 22562 - protein, 1475 aa, unidentified
  REGION 1..1475: note = Cas Enzyme sequence
MSGSRIIPMPGDVTGSFERGETISKTKDRTAKRMARRMNERFQLRRERLNRVLNIMGFLPEHYARALDRYGKLNEESNTTIAWRSKEDGKNEFIFYPSFLEMASIFKERHPDIQRIPLDWTLYYLRSKALHQAITKEELSWVLHSFNQKRGYYQSREDITEEDKTKKVEYIKGVVNSVEDTGEKAKGKKIYKVTFADGTEFTSTKSEAPLWIGRTREIIVTTSLDTSGKPKLDKEGKIIQSAKTPDEKDWTLIKIRTEATIDDSKLTVGEYIFHALLKNPETKIKGAHVSTIDRRFYINEINAILKEQEKYHEELRDKSLYEQCTQALYAQNEVRRNIIAPWSMSDLLIKDILFYHRPLKSKKSQISECSLEFHTYTDKNGATHRQGIKCIPTSHPLFQEYRIWQFIANLRIYERERFDNGKHLINEDKTSDFLTTKKKEELFEWLAEKDSVSQKTLLGRLGLKVERYHWNFPEEKTYPCGETRHLIQSRLKKANLQKAFHSLISDEQKDCFERGLWHILYSVSDYNELCKALKTFARKTGFTLEEQLLFVEAFSSCPPFKKDYGAYSKRAITKLLPLMRIGKFWHEESIDSTTKNRIEHLISGEECSGIDVRVREKVAKAGLCESIEQYQGLPQWLANYVVYNRHSEASEIIKWESPDELDNYIRAFKQYSLRNPIVEQVSLETLRVVRDLWAELQKEGQTIDEIHLEMGRDLKNTAEERSRIFRRNSENEDTNFRIKLLLEEFNANEKDIKDVRPYSPSQQELLRIYEEGVWQQEKDIPQDIKDIKKRISNDKDIKDITPNDIQRYRIWMDQKYCSPYTGKTIPLSRLFTTDYEIEHVIPRSRYFDDSYNNKVICEAAVNKDKNNRLGMEYIMAAGGKTIELGNGKNVQILKEEEYVELVDKIFGNNTRKRNIMLADEITEEFSHRQLNDTRYIARFMKGILSNIVREKNADGTLEPEETSKNLIVCSGRITDRVKQDWGLNDIWSHIVTPRFERLNTKTSSNDFGEYVCKDGKRYFQTRVPLNLQKGFNKKRIDHRHHAMDAIAIACVNRSIVNYLNNAAANQTEREDLRRAVCIPERNGQTKRQLRSPWHCFARDAENALRQIVVSFKQNLRVATKATNSYECFDTASGKKIRKHQSNREHYAIRKPLHKDSVYGEVILPSIASVNLKKALMKADRILDKRLKEKIFELRKLYNYSNKQIEEHLTKVCINCPEWKNYDFKKIAVRILSNDADATHIVAIRKPLDETFDEDKIKTITDTGIQKILLNHLSRYADDPKKAFSPEGIEDMNANIASLNSGKQHLPIYKVRVSEKDNGGYFPIGQKGNRPKKYVTTAKDTNLFFAVYADSKGKRSYKTIDLRTAIECRKQGLSVAPSVNQKGDKLLFTLSPNDLVYMPSEEEEVNGFAIDNNLNKDQIYKMVSANNKQCFFIPHTVADFISRGEEYNSHNKIELTEDRRSIKEHCVPLKVNRLGK

SEQ ID NO: 22563 - protein, 1516 aa, unidentified
  REGION 1..1516: note = Cas Enzyme sequence
MKNILGLDLGTNSIGWSVIQEKHNDNNECQKLILGAGSRIIPMDAAVLGDFAKGNTISQTKDRTQYRGVRRLRERCLLRRERLFRVLDIMGFLPQHFSNALTRYGKFKDADEEPKIAWRKDDEGKMHFLFADSFNEMIEEFRSVQPELLKRGMKVPYDWTLYYLRKKAMREAVTPFELAWLILSFNQKRGYYQLRGEEEGEADNSKCEEYLAQKVVDVIDTGEKKGKSTWFDIVLENGMVYHRSAEIKPDWIGKTKEFIVTTQFDKDGNPKKDKEGNVKMSFRMPNENDWNLQKKKAEKDIDESGMTVGEYIYNALLHNPKQKIKGKLVRVVERKYYKNELQKILESQKRFIPQLSDSALYEKCIKELYQSNEAYRNSISTRNDFTYLFVDNIIFYQRPLKSKKSLIDNCPYESLTYTKDGEEHKAPVKCIAKSHPLYQEFRLWQFISNLRIYQRQKQVGDKVKLDVDVTDEFLPTDDRREALFDYLNDKTEIKQDVLLKEFFNMKKPKGKDSVYPYRWNYVEDKSYPCNVTRGKILAKLNKAGISADFLSSNGNEESLWHILYSVEDKGELRKALARFAAKNGLDDAFTEALADIEPYKKEYGAYSAKALKKLLPLMRLGKYWNYDNIAPATKARISKIIDGEYDENIRNRVREKAMSLTSASQFQGLPLWLACYIVYDRHSERADSGRWPSPEDIDKYLSDFKQHSLRNPIVEQVVTETLRTVRDIWKRYGEISEIHVELGREMKNPADKRSKMNRRMLENENANMRAKLLLTEFMNPEFGIENVRSYSPSQQELLRIYEDGAINNAGSEIDNEISDIMSRLSQVDVKKQPTASEVKRYILWLEQNYRSPYTGQMIPLAKLFTPAYEIEHVIPQSRYFDDSFSNKVICEAEVNKLKDRMLGYEFIKQHKGEKVSLSMGGTVEILSPEEYVRHVESQYKNNKAKMRKLLMDDIPDEFINRQLNDSRYISKLIISLLSNIVREEGEEEATSKNVISCNGSITDRLKKDWGINDVWNHIILPRFRRLNELTGTDKFTTSNKEGHEVPDMPLELQKGFNKKRIDHRHHAMDAIVIACTTRDHVNLLNNEAAMSKNNANRIQLSKKLRRYESVEIEKDGIRKQISVAKEFKKPWEGFTADVERTLRDIVVSFKQNLRVINKTTNYYQHFKDGKKIYSPQSKGDSWAIRKSMHKETVFGEINIRRIKEVSLKEAMKRTKDIADKELRSKIVELMALQYNEKKIKQYFSDNKDEWSDVNPKKIKIHYFTKETNERFFATRKPLDTSFDKKKIKTQVADTAIQKILLNHLSAHGDKAETAFSPDGIDEMNRNIIVLNDGKFHQPILKVRIYEKADKYAVGQQGNKKKKYVEAAKGTNLFFAIYAEEKINEKTGDIVITRTYDSIPLNVVIDREKRGLSPAPENENGASPKYVLSPNDLVYVPNEEERETGRICEPLDKERIYKMVSCTGKECHFVPYSSAKPIYDKVEYFSLNKMGRALSGEMIKEICIPISINRIGEITLR

SEQ ID NO: 22564 - protein, 1221 aa, unidentified
  REGION 1..1221: note = Cas Enzyme sequence
MKKILGLDLGVGSIGWSLINADKDNKPIAILGLGSRIISLSPDESSEFTSGNAASKNQKRTQKRTARKVYDRYQMRRQALTDKLRKLKMLPDEHLIKLPVLDLWTLRARAATPGEKLTLPEIGRVLYHINQKRGYRHSRSDDSADKEQREYVQAINKRFQEIREEGVTIGQHFVKKLKESEVVTDKGAFYNYRIKEQVFPRDAYVAEFDRVMDCQKVFYPEELSEANINEFRNEIIFYQRNLKSCKHLVSRCEFMTRSFLDEGHRPVLDASGKLVISGPKVAPKSSPIFQVCKIWEEINNLSIRNKENDELHISPEQKKEIFEYLDNNEKITSAALYKILGIGKGDGWSVDKALSKGFTGNTTKVAISKALGKANDAKKRDLLRFDLRLKENGVNKDTGEIICEIDPECENEPLYKLWHVIYSINDKDAQRHALTSQFGINDEASLAELSKIDFVKQGYGSRSVKFMRKLLPSLMDGAKYSEACDVIGVNHSGSLTKSENEARELLQRIPQLQKNELRQPVVEKILNQMINVVNAVIEKFGGVDEIRVEMARELKLSKEGRAATAKNIRDREKENKEIAEKIIELGVTPSKNKILKYRLWQEAGQKCFYCGQPVGATEFLNGLDVEIEHVVPKALLFDDSFSNKVCACRKCNAEKRNSTAYDYMKSKGENAFNDYLRRVDTAFSEHKISFTKRSRLLTPADKIPKDFISRQLVQTQYISRKAMEILKQVCHNVYGSSGEVTSYLRRIWGYDEILHSLDLPRYREGGMTAEVSYEHRGQTHTEERIKDWSKRLDHRHHAIDALTIACTRQSVIQRLNNLSSMTAVAGEAMSLDKWTLAQPHFSVQEVSDKVGGILVSFKAGKKVTTPGKRYTYRGGKRILAQDGLLIPRGALSEESVYGRISALEKNVLVKKLFERVEDIVKPGIRAVVEDRLKAYDNDVKAACTSLKEEPLYLDAEKTIPLEYGTCYKAKYVMKYALSALKPKDVEYIVDEHIRKVVSERLSEYGNDPKKAFAEPLYADDAKTIAVRTVRCYTGLDQVVPVKRDVAGNDIGFVKPGNNHHIAIYRDADGKFHECVVTFWDAVERKKCGIPVIVRNPDEVWDVVIDKNVPEELAAGLPALGWSFVMSLQQNEMFILGMEDDEFRDAMAEADYKALGAHLYRVQKLAGSDYYFRSHYETLLDDSAGARIMKKFYRISSSKALFALHPRKVAVSLLGEMSLKND

SEQ ID NO: 22565 - protein, 1436 aa, unidentified
  REGION 1..1436: note = Cas Enzyme sequence
MKRILGLDLGTNSIGWALVDEAESKDERSSIVKLGVRVNPLTVDELTNFEKGKSITTNADRTLKRGMRRNLQRYKLRRETLVEVLKEHKLITEDTILSENGNRTTFETYRLRAKAATAKISLEEFARVLLMINKKRGYKSNRKAKGAEEGTLIDGMDIARELYNNNLTPGELCLQLLDAGKKFLPDFYRSDLQNELDGILEKQKEYYPEILTDVLKEELRGKKRDAVWAICAKSFVWKESYTEWNKEKGKTEQQEREHKLEGIYSKRKREEAKRENLQWRVNGLKEKLSLEQLVIVLQEMNTQINNSSGYLGAISDRSKELYFNKQTVGQYQMEMLDKNPNASLRNMVFYRLDYLDEFNTLWEKQAEYHKELTEELKKEIRDIIIFYQRRLKSQKGLIGFCEFESRQLEVEIDGKKKIKTVGNRVIPRSSPLFQEFKIWQILNNIEVTVVGKKSRRRKQKDNSPALFNALDDAEQLELDGRRNLYQEEKELLAQELFVRDKMTKSDVLKLLFDNPQELDLNFKTIDGNKTGYALFQAYNKMIEISGHEPVDFKKPIEKIIEHIKTIFDLLNWNTDILDFNSNEELDNQAYYKLWHLLYSFEGDNTPTGNGRLVQKITELYGFEKEYATVLANVTFQNDYGSLSAKAIHKILPHLKEGNLYDVACAYAGYRHSESSLTKEEIANKVLKDRLMLLPKNNLRNPVVEKILNQMVNVINAIIDTYGKPDEIRVELARELKKNAKEREELTKSIAQTTKKHEEYKALLQNEFGLKNVSRTDILRYKLYKELESRGYKTLYSNTYISQEKLFSKEFDIEHIIPQARLFDDSFSNKTLEVRSINIEKGNKTAYDFVKEKFGESGIGNSLEHYLKNIEDLFKLGKISKTKYNKLKMTEQDIPDGFIERDLRNTQYIAKKALSMLNEISHRVITTSGSVTDKLREDWQLVDVMKELNWEKYKALGLVEYFEDRDGRQIGRIKDWTKRNDHRHHAMDALTVAFTKDVFIQYFNNKNASLNPNTNEYAIKNKYFLNGRAIAPIPLGEFRAEAKKHLENTLISIKAKNKVITGNINKTKKKGGVNRKVQQTPRGQLHLETIYGSGKQYLTREEKVNASFDMRKIVTVSKSAYRDALLKRLHENDNDPKKAFAGKNSLDKQPVWLDKEQTRKVPEKVKTVTLETIYTIRKEITPDLKVDKVIDTGVRKILTDRLNEYGNDAKKAFANLDENPIWLNKEKGISIKRVTISGISNAQSLHVKKNKDGKPILDENGRNIPVDFVNTGNNHHVAVYRRPVIDKKGQLVIDEVGNPKYELEEVVVSFFEAVTRANLGQPIIDKDYKTNEGWQFLFSMKQNEYFVFPNEKTGFSPEEIDLLDAENYGLISPNLFRVQKFTHKNYVFRHHLETTIKDTNSNLRGITWIDFRSSKGLDAIVKVRVNHIGQIVSVGEY

SEQ ID NO: 22566 - protein, 1158 aa, unidentified
  REGION 1..1158: note = Cas Enzyme sequence
KYIVGMKNILGLDLGSSSIGWSVIRENSEEQELVAMGSRVVSLTAAELSSFTQGNGVSINSQRTQKRTQRKGYDRYQLRRTLLRNKLDTLGMLPDDSLSHLPKLQLWGLRAKAVTQRIELNELGRVLLHLNQKRGYKSIKSDFSGDKKITDYVKTVKTRYDELKEMRLTIGELFFRRLTENAFFRCKEQVYPRQAYVEEFDCIMNCQRKFYPDILTDETIRCIRDEIIYYQRPLKSCKYLVSRCEFEKRFYLNAAGKKTEAGPKVAPRTSPLFQVCRLWESINNIVVKDRRNEIVFISAEQRAALFDFLNTHEKLKGSDLLKLLGLSKTYGYRLGEQFKTGIQGNKTRVEIERALGNYPDKARLLQFNLQKESSSMVNTETGEIIPMISLSFEQEPLYRLWHVLYSIDDREQLQSVLRQKFGIDDDEVLERLSAIDLVKAGFGNKSSKAIRRILPFLQLGMNYAEACEAAGYNHSNNYTKAENEARALLDRLPAIKKNELRQPVVEKILNQMVNVVNALMEKYGRFDEIRVELARELKQSKEERSNTYKSINKNQRENEQIAKRIVEYGVPTRSRIQKYKMWEESKHCCIYCGQPVDVGDFLRGFDVEVEHIIPKSLYFDDSFANKVCSCRSCNKEKNNRTAYDYMKSKGEKALSDYVERVNTMYTNNQISKTKWQNLLTPVDKISTDFIDRQLRESQYIARKAKEILTSICYNVTATSGSVTSFLRHVWGWDTVLHDLNFDRYKKAGLTEVIEVNHRGSVIRREQIKDWSKRFDHRHHAIDALTIACTKQAYIQRLNNLRAEEGPDFNKMSLERYIQSQPHFSVAQVREAVDRILVSFRAGKRAVTPGKRYIRKNRKRISVQSVLIPRGALSEESVYGVIHVWEKDEQGHVIQKQRAVMKYPITSINREMLDKEKVVDKRIHRILSGRLAQYNDNPKEAFAKPVYIDKECRIPIRTVRCFAKPAINTLVPLKKDDKGNPVAWVNPGNNHHVAIYRDEDGKYKERTVTFWEAVDRCRVGIPAIVTQPDTIWDNILQRNDISENVLESLPDVKWQFVLSLQQNEMFILGMNEEDYRYAMDQQDYALLNKYLYRVQKLSKGDYNFRYHTETSVEDKYDGKLNLELSRQMGKLKRVSIKSLLELNPHKVHISVLGEIKEIS

SEQ ID NO: 22567 - protein, 1188 aa, unidentified
  REGION 1..1188: note = Cas Enzyme sequence
MSKHVLGLDLGVGSIGWCLIVLDAQGDPAEILGMGSRVVPLNNATDAADFSVGKAFTANQERTARRTMRRGFARYQLRRYRLRRELEKVGMLPDAALIQLPLLELWELRERAATAGERLTLPELGRVLCHINQKRGYRHVKSDAAAIVGDEGEKKKDSNSAYLAGIRANDEKLQDEHKTVGQYFAEQLRQNQSESPTGGINYRIKDQIFSRQRYIDEYDQIMVAQRVHYPDILTDEFIRMLRDEVIFMQRPLKSCKHLVSLCEFEKQEKVMRVQQDDGKGGRQLVERRVKFGPKVAPKSSPLFQLCRIYEAVNNIRLTRPDGSPRDITPEERDKIVTYLQSSASLSFAALKKLLKEKALIADQLTTKSGLKGNSTRVALASALQPYPQYHHLLDMELETRMMTVQLTDEETGEVTEREVAVVTDSYVRQPLYRLWHILYSIEERAAMRRALITQLGMKEEDLDGGLLDQLYRLDFVKPGYGNKSAKFICKLLPQLQQGLGYSEACAAVGYRHSNSPTSEEITERTLLEKIPLLQRNELRQPLVEKILNQMINLVNALKAEYGVDEVRVELARELKMSREERERMAEGNRRREKENTAIAEKIRECGLFPTKSRIRKYMLWEEAGRQCLYCGQILTLSQCLNGDDMEVEHIIPKSVLYDDSYGNKTCACRRCNKEKGNRTALEYIRAKGWEAEYMERINDLLNEKKISYSKHQRLRWLKEDIPSDFLERQLRLTQYISRQAMAILQQGIRRVSASEGGVTARLRSLWGYDDILHTLNLDRYDSMGETERVSREGETTEKLRIKDWSKRKDHRHHAIDALVVASTRQGYIQRLNRVSSESEREAMSEEIEVQKATKTDKLSLLERWLTQRPHLSVRAVSDKVAEILISYRPGKRVVTRGRNIYLRHGKKCVQSGLLVPRGPLSKETVYGQITVNGEPQIVCKYDLHSLKAKDVDYVVDLALRKRLKELLAQHGGKEKEAFAGDVYMDEAGTQGPIRSVRCFTGLDRAKMKAVKYDEQGEAVGFVSPRNNHHLAIYRTPKGKLVESIVTFWDAVDRARYGIPLIVTHPREVMEQVLQRGDIPELVLSLLPSSDWMFVESIQRDEMVLVGLSDEEILQAVEAQDYCKLSEHLYRVQKIATGNYMVRYHLETDTDTGNRSGRIPKLYQLSLTSYEGKNVRKVRVDLLGRISLL

SEQ ID NO: 22568 - protein, 1375 aa, unidentified
  REGION 1..1375: note = Cas Enzyme sequence
MKKILGLDLGTTSIGWALVNESENKDEQSSIVRLGVRVIPLTVDEKGNFEKGKAITTNADRQQVHAARINLQRYKLRRENLRDCLQKQGWIGSEPMYEDGKSSTFETYKLRAKAAVEEVSLHEFARVLFMLNKKRGYKSNRKANDKEDGKLFDGMTIAKKLYEEHLTPAEYSLQLLNKGRKFTPEYYRSDLIAEFEKIWNEQQKYYPEILTDEFKQQLEGKAKSNTSKLFLGKYDIYSADTKGLDRRLQPLKWRVDAMKQQVDKDVLAFVLSDLKGQIANTSGLLGAISDRSKELYFSKQTIGQYLWASLQENPHISIKNQPFYRQDYLDEFEKIWETQATFHKELTSELKQEIRDIIIFYQRPLKSKKNLIAVCELEQRKVKVTVDGKEKEITIGPKVAPKSSPMFQEFRIWQNLNNILLLDHETNSKRPLYEEERNLLYEELSVKEKLSKTEALKILGKKGRQWYLNYKELEGNKTQAVLYDFYNRIIVMSGHEECNFKKLKASDICHYIKTIFKNLAFNTDILCFDSSLEGHELERQPMYQLWHLLYSYEGDNSRTGNDALLRKLETSFGFPKEYAAVLADVIFEDSYGNLSVKAMRNILPHLQAGKDYSQACDEAGYKHSRRSLTKEELNQKVYKEKLELLPKNSLHNPVVEKILNQMVNVINAVIEEYGKPDEIRIELARELKIGAAERENMTRGINQGNAENKRIREILEKEFALSYISRNDIIKYKLYEELKSNGFKTLYSDTYISKDKLFSKDFDIEHIIPKARLFDDSLSNKTIEARDVNIAKSNKTAFDFILERYGEQGVKTYKTKLLRLLEDGAISNKKYNNLLKSEADIPSGFIDRDLRNTQYIAKKAYEILSELVKIVTPTTGSVTNRLREDWQLVDVMKELNFEKYQKLGLADVIEDRDGRKVKRIKDWTKRNDHRHHAMDALTIAFTKPSYIQYLNNLNARSDKSSSIYGIEVKELHREEGKLRFNAPLPINEFRAEAKRHLKSVLVSIKAKKKVMTQNVNKIKTKHGIIKKVQLTPRGELHNATYYGTKKRPLVRMVKVGAALDEATIKRVCSPAIHAALLKRLNAYNGDAKKAFTGRNSIDKNPIYLDVEQTKIVPALVKTIEWGMYHPIRKRITPDLKIDKVIDKGIREKLKARLAEFNGDAQKAFSNLDENPIYMDEAKQITLKRVSIEGVLSAIPLHTLKGKAGKPIIGSDGKPVFGDYVQTSNNHHIAFYKDDKGNLQDNPVSFFEAAERKSQGVPIIDKNYNCDKGWHFVFTMKQNEYFVFPNEATGFIPSEVDLLDEANYDIISPNLYRVQKLSKTSGRDYWFRHHLETMLNDDLRLKNSTFRRIQSLKGLEGIVKVRINSIGKIVAVGEYD

SEQ ID NO: 22569 - protein, 1233 aa, unidentified
  REGION 1..1233: note = Cas Enzyme sequence
LDDWVGKVRAFIVTTEYEKDGTTPKKDKEGNVKRSFRSPNENDWGLRKKQTEHSLEASGIPVGAFIYDHLLKEPSDKIRGKFIHTIERKYYKQELAAILREQSKHHEELCSKDMLKACVEELYPNNPLHRESLLKKDMTYLLIEDLIFYQRPLKSKKSLIAECPYEAYSYVDKETGEVKRQGIKCIARSNPYYQEFRLWQLIANLRLRNRADERDVTAEYLPHQEDYVRLFTYLNDRKEINQETLLKDFFKLKKVAIGGEKVFPIRWNYIEDKEKKYPCNATRHELLLALDRAGMEHDWLDNRDLAYRLWHLLYSVDSKDETERALRKLKDDDAFVESFLKIKPFEKEYGAYSEKAIKKLLPVMRRGSLWNEADLCPSTKERIANILQGTIDEKLKKKIGAFISSCQQVSDFQGLPEWLACYVVYGRHSEATAIQHWETPEQLLAYIHGFKQYSLRNPIVEQCILETLRTVYDIWKEAGQIDEIHVELGREMKKTAEQRAHLTENVLRNENTNLRIKSLLMELKNDIDIKDVRPHSPMQQEILRIYEEGALQTLSKDDAAFAEIMKISKMAQPSTSELKRYRLWLEQKYRSPYTGKPIALSKLFTSAYQIEHIIPKKRYFDDSFSNKVICEAEVNREKGSMLAYEFIKKRGGDVIHCTALGDVTILSKAEYKALVTELYANNTSKKEKLLMEDIPQEFVNRQLNDSRYISRVVMTLLSNIVRIEGEEEATSKFVIPCSGGITDKLKKDWGLNDVWNNIVYPRFERLNALTNTTDFGQWENKEGKRVFQTSVPLELQRGYQKKRIDHRHHAMDALVIACASRNIINYLNNQEANDPTKQENARKQLCIKSRIIRKPWETFTQDAHKALDNIVVSFKNYVRVINKATNYYERYHADGKKVVDEQKGETMWAIRKPMHKDTVFGHVNLRRKAVVKLKDALENIPAICDKTLRHYIQDLQKKHFNTKQLLAHFKNINYRLNKQAVDKVEVWQYSDNKEQLAATRKPLDTSFDAKHIATITDTGIQKILLNYLQAKGGDPAIAFTPEGIAEMNRNIAVYNGGKQHQPILKVRIAEPMGAKYPIGETGNKGAKYVEAQKGTNLYFAIYEDEEGNRTYDTVALNVVAERLKQGLTPVPEKNEKGVALKFYLSPNDLVYVPTADELLSKKCSLDKNRIYKMVSATKYQCFFLSHRVAKTIYDKVEFEALNKMERALTGEMIKSVCWKIEVDRLGHIINIIK

SEQ ID NO: 22570 - protein, 1180 aa, unidentified
  REGION 1..1180: note = Cas Enzyme sequence
MNKKILGLDLGVSSIGWSLITLDEGGHPAEILGMGSRIVPLTSDNKKKGSYFKDFENGEAATKNQYRTMKRSARRGLDRYQQRRAKLSRLLSEFGLGFPRPLMSLSPLALWGLRADAATEGKVISLAELGRVLYHLNQKRGYRHSKSDESSKQDTEYVAAVKTRYAELKNESLTIGQYMYRYLSSSAEERADALSCVHYRVKDQVYPREAYMEEFDRIMAVQQKAYPEVLTSVVLQKLRDCIFFQRPLKSCKHLVSYCEFVRKTREVQIPVVGADGTTSYKTKIVDIGPKVAPVSSPLAEVCRLWESINNIRIYYPDGAVYPLSLEHKQAFFNKLQESKSLNFSDAKKIIGAKAKDKLWCNELLKSGIKGNRTTATLRKLIEDYPQYKALLRFDLKQEDSCRVDLSTGEVLPLISVSYLNEPLYKLWHILYSVAEREAMGNALRKQLGVEQGDLDKGLLDACMKIDFTQQGYCNKSAKFMCKLLPYLQQGYMYSEAADLAGYKHSDSKTKEELEHRELKPRIELLPKNSLRQPIVEKVLNQMINLVNALKDKYGEIDEVRVELARELKMGREERKKYSTRNRENEDDNKRVAKVISEFCTPTKTRIQKYKLWEEANHACIYCGKEITKPSLFSDGEAEIEHIIPRSVLYDDSMSNKTCACRSCNKAKNNRAAMDWVLTQTEEFQTKYFNRLEELAKKRLSNGKRQRLMTLLKDIPEDFIERHLRLTQYISRKATEILKDGIRYVWSSEGSVTSTLRHLWGYDKILEDLNFERYKSMGETQTILVKRGSVEQEVERIKDWNKRKDHRHHAIDALVVACTRQSYIQRLNRLSSEEDRQSMLSELGSSYAPSKEERMQLLDKWLTAQPHFSAQAVRDYVRGILVSYRPDRRTYTKSRNKVKIKGRVSLQTGILTPRGALSEETIYGAIHVDGVKKIVCKYSLDKLQGKKVLRIVDKGIQRIIKARLEAYNNDAKKAFAEPLYSDAAQTKQIRSVRCLTGRVREKLVPLRRNDAGEEIAFVATGSNHHVAFYRDSEGVLQEVVVSFYQAIERAKYQLPMIIKDPRAVVEEALERNVPDFVLSTLPHSSWTFVESLQKNEMFLIGLSDDEIARAIKNSDRAPFNDHLYRVQKIALNEYCFRFHLEPELDDLDGDIPKYYKMSFARYIELNPRKVRVDLLGNLSLM

SEQ ID NO: 22571 - protein, 1191 aa, unidentified
  REGION 1..1191: note = Cas Enzyme sequence
MLMSKHVLGLDLGVGSIGWCLIALDAQGDPAEILGMGSRVVPLTNLGDDKAFSKGEAFTANQKRTARRTMRRGFARYQLRRYRLRRELEKVGMLPDAALIQLPLLELWELRERAATAGERLTLPELGRVLCHINQKRGYRHVKSDAAAIVGDEGEKKKDSNSAYLAGIRANDEKLQDEHKTVGQYFAEQLRQNQSESPTGGISYRIKDQIFSRQRYIDEYDQIMAAQRVYYPDILTDEFIRMLRDEVIFMQRPLKSCKHLVSLCEFEKQERVMRVQQDDGKGGRQLVERKIKFGPKVAPKSSPLFQLCRIYEAVNNIRLTRPDGSPRDITPEERAKIVAHLQSSASLSFAALKKLLKEKALIADQLTSKSGLKGNSTRVALAAALQPYSQYHHLLDMELETRMMTVQLTDEETGEVTEREVAVVTDSYVRQPLYRLWHILYSIEERDAMRRALITQLGMKEEDLDGGLLDQLYRLDFVKSGYGNKSAKFICKLLPQLQQGLGYSEACAAVGYRHSNSPTSEEITERTLLEKIPLLQRNELRQPLVEKILNQMINLVNALKAEYGVDEVRVELARELKMSREERERMARQNGERKKANDKVAEKIQKCGLFPTKSRIRKYRLWEEAGRQCLYCGRSIDEKQCLNGDDMEVEHIIPKSVLYDDSYGNKTCACCRCNKEKGNRTALEYIRAKGWEAEYMERINGLLDKKTISYSKHQRLRWLKEDIPSDFLERQLRLTQYISRQAMAILRQGIRRVSASEGGVTARLRSLWGYDDILHTLNLDRYDSMGETERVSREGETTEKLRIKDWSKRKDHRHHAIDALVVASTRQGYIQRLNRVSSESEREAMSEEIEVQKVTKTDKLSLLERWLTQRPHLSVRAVSDKVAEILISYRPGKRVVTRGRNIYRKKTADGREVTCVQRGVLVPRGELMEASLYGKILSQGRERIVKRYPLHALKGEVVDPRLRELITTYNQELKSREKGAPIPPLCLDKDKKQEVRSVRCYAKTLSLDKAIPTCFDEKGEPTAFVKSASNHHLALYRTPKGRLVESIVTFWDAVDRARYGIPLVITHSREVMEQVLQRGDIPESVLRSLPPSDWVFVESLQLNEMVIIGLSDEELQRALEVQDYRKLSEHLYRVQKLSAGKYFIRYHLDTDVDEDNRLGRIPKFYQLSLDAYKKNNVRKVRVDLLGRISLL

SEQ ID NO: 22572 - protein, 1443 aa, unidentified
  REGION 1..1443: note = Cas Enzyme sequence
MSFLYLFKKILTKFGIDCKDLAMKYILGLDLGSNSIGWALIEQDFDNKQGKILGLGSRIIPMEQGILGEFERGNKVSQTAERTEFRGIRRLRERHLLRRERLHRVLHLLGFLPAHYDAQIDFTKRFGKFIGDSEPKLAYNNEGFIFLESFNEMVEDFKKHQPQLFYIKSNGEESKIPYDWTIYYLRKKALYEKISKEELAWIILNFNQKRGYYQLRGEEEEKSTKNVEFYSLKITDVIADTPNNKGEIWYSIHLENGWVYRRASKISLEDWKGKVRDFIVTTELNEDGTIKLDKEGKEKRSFRAPSEDDWNLLKKKTEQNITFSGKTVGEYIYDHLLQNPNQKIKGKLVRTIERKFYKEELKAILEKQVALQPELFTEELFVDCVRELYKNNEIHQNSLSSKDFVHLFLNDIIFYQRPLRSQKSNISSCSLEYRFCIDKETKQRRKTYLKVISKSNPYYQEFRVLQWLSNLKIYRKEDDKDVTSEFISSIEDKETLYEFLMSEKEVSNKSILEFLLMKSLRETYPFAKETELKKELKKEITKYRWNYVYEEENDSKKYPMNETGYEIKKRLKEVKNIPDNFLTRDIEYQLWHIIYSVTDKYEYEKALMKFAQKHNLDAESFVENFKRIKPYPSDYGAFSEKAIKKLLPLMRFGKYWNYSDISEPVQVRISDIINGVDNENIKTIVREKAEKYQLNQEADFQGLPLWLAQYVVYGIHSEAADIQRWTSPSDLEEYLKGFKQHSLRNPIVEQVVTETLRVVKDIWEYYGKGERNFFDEIHIELGRELKKTAEERNRMTREINENEETNLKVKKKLQEFFEDKSAENVRPYSPIQQEKYRLWLEQEKESPYTGQPIPLSKLFTDEYQIEHVIPQSRFFDDSLSNKVICEAAVNAQKGAQLGLEFIKKHGGEIIEIGLNKKVTILNEKEYKELVNELFANNRAKKAKLLMEEIPEKMVERQLNDTRYISKFISQILSNIVRSPQEDNGVNSKNIIPCTGKITAALKQDWGLNDVWNDLVLPRFERMNNLTQTELFTTYSEKYQKKIPTVPLEYAKGFQKKRIDHRHHALDALVVACATRSHINYMNNQHALDKHKAKEEKQHARIDLRTVLCEKKYNDNAEDKYNWTFKKPWNTFTQDVRSALEMVVVSFKQNLRVINKATNYYEKWVEERGKMVKKKVKQEGINWAIRKPLHKETISGKITLERVKVGKGKILTATRKSIDSSFTEKTIASITDTGIQKILLNYLAHKGSPELAFSPEGLEEMNKNIAKYNDGKDHQPIYKVRIFEEGSKFPLGEIGTKSQKYVETAKGTNLFFGIYQGKEKRSYATIPLDEVIERQKQGLTSVPEHNEKGEKLLFSLSPNDLVYVPMEGEDAESIDYANLSKEQRERIYKIVNFSKKRLYGVPNIVAIPIIDKMEYTQYNKIEFLKEKESCIKLKIDRLGNISKA

SEQ ID NO: 22573 - protein, 1380 aa, unidentified
  REGION 1..1380: note = Cas Enzyme sequence
MRKILGLDLGTTSIGWALVNEADNDNESSSIVRLGVRVNPLTVDEKSNFEKGKAITTNSDRQQRHGARINLQRYKLRRQNLRNLLQDQGWLCNEALYEEGKGTTFETYKLRAKAAEEKISLHEFARVLFMLNKKRGYKSNRKANNKEEGQLFDGMTIAKKLYEEHLTPAEYSFQLLSKGKKFAQDYYRSDLIAELERIWNEQKKYYPEILTDEFKQQLEGKTKVNTNKIFLAKYGIYSADLKGLDRKLQPLKWRIEALKQQVSKEILAFVISDLKGHIANTSGYLGAISDRSKELFFNKQTVGQYLWASLKENPHISIKSKPFYRQDYLDEFEKLWETQAAFHKQLTPELKHEIRDIIIFYQRPLKIKKGLISVCELEQRKVKVTIDGKEKEITIGPKVAPKSSPVFQEFRIWQNINNILLINNDTNEKHSLNEKERNLLYQELSVKVKLSKTDVLKILNKKGKQWDLNYKEVEGNRTQAILFDCYNKIISLTGREECDFKKLQASEIRHHVTTISKNLGFNTDILDFNPSLVKHELEEQPMYMLWHLLYSYESDNSRTGNEALLRKLAIAFGFPKEYATVLCDVVFEDDYSNLSVKAMRKILPYLEVGNDYSQACAYAGYKHSRRSLTKEELDQKVYKERLELLPKNSLRNPVVEKILNQMINVINTIIDEYGKPDEIRIEMARELKSSAAEREKATRAISQANAENQRIREILERDFALSYISRNDIIKYKLYQELEANGFKTLYSDTYISKEKLFSKDFDVEHIIPKARLFDDSFSNKTLEARDINLAKSNKTAFDFVQEKYGTEGAEAYKKKLDILLSKEVISRAKYNKLLMKEADIPSEFIERDLRNTQYIAKKACEILGEIVKTVTPTTGEVTSRLREDWQLVDVMKELNFEKYQKLGLAEIVEDRDGRKIKRIKDWTKRNDHRHHAMDALTIAFTKPAFIQYLNNLNARSNKSNSIYAIENKELHREDNKLKFNAPIPIHEFRAEAKRHLSAILISIKAKNKVMTQNVNKIKTKQGVIKKIQLTPRGALHNETIYGTKKRPIITMVKVGAALDEATINKISNLTIREALLKRLAEYNGDAKKAFAGKNSLEKNPIYLNEEKTKVLPALVKTVEWETYHPIRKPITPDLKIEKVIDKGIRKILKARLAKFNGDAKKAFSNLDENPIYIDEAKKIALKRVSIEGVLSAIPLHTLKDQAGKPIIGKDGKPVLGNYVQTSNNHHIAFYYDENGNLQDNAVSFFEAAERKSQGIPIVDKNYNHDKGWRFLFTMKQNEYFVFPNEATGFIPTEVNLMDEANYDMISPNLYRVQTISKIIYDKSIIRDYLFRHHLETTVERIPNLKGITYKQLKSLPHLKGIVKVRINAIGKIVAIGEYD

SEQ ID NO: 22574 - protein, 1457 aa, unidentified
  REGION 1..1457: note = Cas Enzyme sequence
MKHILGLDLGSNSIGWALVQQDFENKQGKIMAAGSRIIPMDQGILGDFEKGNTVSQTAERTTYRSMRRLRERHLLRRERLHRVLHILGFLPPHYDAQIDFTKRYGKFIDNAEPKIAYNNGNFIFTNSFNEMIEDFKKHQPQLFYKKSNGEESKIPYDWTIYYLRKKALSQKITQQELAWLILHFNQKRGYYQLRGEEETESPNKEVAFHSLKVVEVEAEAPNKKGEIWYTIRLENGWIYRRTSKIPLDDWKGKTRDFIVTTDLNDDGTIKVDKEGKEKRSFRAPEENDWNLLKKKTEHDIDFSGKTVGAYIYDHLLQDPNQKIKGKLVRTIERKYYKNELKAILTKQIALQPELFTENLLAGCIRELYRKNERQQQNLLSKDFLHLFVEDIIFYQRPLRSKKSTIANCTLEKRSYIDKETNERKDAPIKVCAKSNPYYQEFRALQWLQNLRIYEIETDREVTAEFIETPQDYEALFNFLMSQKEIDNESLLKYFLLAKNPQIKDKAAKSELKKWLTTYRWNYVYDVADNSSKKYPMNETGYDLQRYLQKVEGLPANFLTFDTTYRLWHLLYSVKDKVEFEKALKRFAKKKQLNETSFIESFKNFKPYPNEYGSFSEKAIKKMLPLMRFGNHWDFNRIDVSTQKRIDDLINGVANEDIRTIIREKAEKYQLNSESCFQGLPLWLAQYVVYNRHAEATDIEKWTSVNDLEAYLEDFKQHSLRNPIVEQVVTGTLRVVRDIWQQYGGGQANFFDEIHIELGRELKKTAEERKQLSNRNQENENTNLRIKKLLAELKEDASIQNVRPYSPVQQELLKIYEEGVFSSTDEIEEDIQKIRKKADPTTPEIQRYKLWLEQKYKSPYTGEVISLTKLFTEEYEIEHIIPQSRYYDDSFSNKVICESAVNKLKTNLLGLEFIQKHHGEKVRVAGNKEVTIFTEEQYKDFVKKHYANNLAKQQKLLLDEIPEKMVARQLNDTRYISKYISEILSKIVRSDEKDEGVNSKNVIPCTGKITTALKQDWGLNDVWNELILPRFERMNQLTQTQLFTSYNDRLQKNLPTVPIEYSQGFQKKRIDHRHHAMDALVIACATRDYINYMNNQHALDKSKDKKEKQQSRIDLRTILCEKKNNNWQFKKPWSTFTQEAKEALEHIVVSFKQNLRVINKATNYYEKWEEKNGVLVKKKVKQEGTNWAIRKPLHKETVSGKIVLDRKISKDKILTATRKAVDITFTEKIISSITDTGIQKILLNYLKYKGSPEVAFSAEGLEELNKNIAQYNDGKKHQPIYKVRIFEEGSKFPLGETGAKTTKYVEAAKGTNLFFGVYQGKEKRSYATIPLNEVIERQKQGLPSVPERNEKGEPLLFSLSPNDLVYVPMEGEIAETIDFNNLSKEQKERIYKTVSFTGNECHFVKSTIASLIKSYDAKSKIGELGSLNKLEVTISGDSRIKEVCIKLKVDRLGNITKV

SEQ ID NO: 22575 - protein, 1480 aa, unidentified
  REGION 1..1480: note = Cas Enzyme sequence
MKTILGLDLGTNSIGWAKVCVDDNGNYTREIKLGSRIIPMSQDTLSNFDKGVTESPTAARTGFRGIRRIRERALQRRERLHRVLHVMGFLPPHYENAIGWNRGEATTYGKFLDNGEPKLAWEKQEDGSMRFLFMDSFYEMMADFAKYQPGMVADGRKIPLDWTLYYLRKKALTQAIRKEELAWILLNFNQKRGYYQLRGEEEEEDPTKREEYYELKVVSVEAAEEGKGGNTWYNVILENGWIYRRQSKIELNDWVGKVRPFIVTTEYEIDGVTIKKDKNGEVKRSFRAPSENDWGLRKKRTESLLEESGKTVGAFIYDHILSEPADKIRGNFIRTIERKFYKKELEAILREQSKYHKELKDIDTLIACIKELYPNNKPHQDSLIKKDMTYLLITDLIFYQRPLKSKKSLIADCPYEYYEYVIKETGEIKRQGIKCIAKSNPFYQEFRLWQFIINLRLFDRNNDKEVTSEYLSSMEDYTRLFTYLNDRKDINQEILLKDFFKQKKVKRGMEKEFPIRWNYIEDKEKKYPCGETRHELLAALGKAGIDHSWLDDKERFYRLWHLLYSVESKEEAEGALRKLVDNDDFVNAFLKIKPFKKEYGAYSEKAIKKLLAVMRMGNLWNEVDICEQTRDRIQNIIKGDIDEKIKDRMGRTFSQLSDFQGLPEWLACYVVYGRHSETTDIQWWTKPENLMAYINGFKQHSLRNPIVEQCILETLRTVHDIWKEAGHIDEIHIELGRSMKSTADQRARMSKSIMQNENTNLRIKSLLMELKNAKEFENVRPYSPMQQEILRIYEEGALQELTKEDAQYNEISKISQMAQPSANELLKYRLWLEQKYCSPYTGKPISLSKLFTSAYQIEHIIPQSRYFDDSFTNKVICEAEVNQLKSNMLGYEFIKKHGGEIVHCTMVGDVKILDAKEYYNFVTEHYTNNRRKKEKLLLDDIPQEFLNRQMNDSRYISKKVMAILSNIVREEDEQEAKSKFVIACSGGITDRLKQDWGLNDVWNSIVYPRFERLNKLTNTENFGRWENKEGKQVFQTSVPLELQKGFSKKRIDHRHHAMDALVIACASNNIINYLNNESAKSQEKREDLRKKLCDKNRIIRKPWETFTQDAHTALENVVVSFKNYVRVINKATNYYEKYDKNGKKGIAEQKGQDMWAIRKPMHKETVFGQVNLQRRVTVKLKDALEKIPAICDKELRDYINNLVAKQFNKKQILAHFKSINYRLNMKYVDKVDVWQFSDEKDPMVATRKSVDTSFDTKRIATITDTGIQKILRNYLETKDNDPNIAFTPEGIAEMNKHITEYNNGKQHQPILKVRVSEPKGAKYQVGETGNKTSKFVEAQKGTNLYFAIYEDKEGNRSYSTIPLNEVIERLKQGLSPAEDLNKRGEKLKFYLSPNDLVYVPTEEEKLSSECKLNKEQIYKMVSATSNQCFFTPHRTANSIVNKVEYSPLNKMEKTILDEMIKSVCWKLEVDRLGNILKVIK

SEQ ID NO: 22576 - protein, 1171 aa, unidentified
  REGION 1..1171: note = Cas Enzyme sequence
MGSRVVPLTNLGDDKAFSKGEAFTANQKRTARRTMRRGFARYQLRRYRLRRELEKVGMLPDAALIQLPLLELWELRERAATAGRRLTLPELGRVLCHINQMRGYRHVKSDAAAIVGDEGEKKKDSNGAYLAGIRANDEKLQDEHKTVGQYFAEQLRRNQSESPTGGISYRIKDQIFSRQRYIDEYDQIMAAQRVHYPDILTDEFIRMLRDEVIFMQRPLKSCKHLVSLCEFEKQEKVMRVQQDDGKGGRKLVERRVKFGPKVAPKSSPLFQLCRIYEAVNNIRLTRPDGSPRDITPEERAKIVAHLQSSASLSFAALKKLLKEKAIIADQLTSKSGLKGNSTRVALAAALQPYPQYHHLLDMELETRMMSVQLTDEETGEVTEREVAVVTDSYVRQPLYRLWHMLYSIEERDAMRRALITQLGMKEEDLDGGLLDQLYRLDFVKPGYGNKSAKFICKLLPQLQQGLGYSEACTAVGYRHSNSPTSEEITERTLLEKIPLLQRNELRQPLVEKILNQMINLVNALKAEYGVDEVRVELARELKMSREERERMTIQNDKRKEANDKVAERIRQCGLYPTKPRIQKYMLWEEAGKVCMYCGRSIEEEQCLNGDDMEVEHIIPKSVLYDDSYGNKTCACHECNQTKGNRTALEYIRAKGWEAKYMERINDLLKEKKISYSKHQRLRWLKEDIPSDFLERQLRLTQYISRQAMAILQQGIRRVSASEGGVTARLRSLWGYGKILHTLNLDRYDSMGETERVSREGEATEELRIKDWSKRMDHRHHAIDALVVACTRQSYIQRLNRLSSEFGREDKKKEDQEAQEQQATETGRLSNLERWLTQRPHFSVRTVSDKVAEILISYRPGQRVVTRGRNIYRKKTADGREVSCVQRGVLVPRGELMEASLYGKIISQGRERIVKRYPLHDLKGEVVDPRLRELIAKYNQEITSKVKAKGAPLYLDAAEKQEVRSVRCYVTQPSVAKAIPIRFNECGRAITSVQSGSNHHLAIYRTPKGKLVESIVSFWDAVNRARYGLPLIIKSPRKAMEQVIQREDIPESVLSLLPPADYEFVEVFQQNEMAVVGLPEEEFRRAVDTQDYRTLSEHLYRLKRISSKDYEFHYHLDTDDPDETDSSKKKKKRVRNTSGRIPRIYRIRGIGPLQKKNVRKVCVDLLGRLSLL

SEQ ID NO: 22577 - protein, 1503 aa, unidentified
  REGION 1..1503: note = Cas Enzyme sequence
VFSQRNHPYCELLSNSATKVGIIFLMCKYFYIKKFITFVLSKNIIPMKHILGLDLGSNSIGWALVQQDFENKQGKIIATGSRIIPMDQGILGDFERGNTVSQTAERTTYRSTRRLRERHLLRRERLHRVLHILGFLPPHYDAQIDFTKRYGKFIDNAEPKIAYNNGNFIFMNSFNEMIEDFKKHQPQLFYKKSNGEESKIPYDWTIYYLRKKALSQKITQQELAWLILHFNQKRGYYQLRGEEETENPNKEVAFHTLKVVEVEAEAPNKKGEIWYTVRLENGWIYRRTSKIPLDDWKGKTRDFIVTTDLNDDGTIKVDKEGKEKRSFRAPDENDWNLLKKKTEHDIDFSGKPVGTYIYDHLLQNPNQKIKGKLVRTIERKYYKDELKAILAKQIALQPELFTETLLADCIRELYRKNETQQQNLLSKDFLHLFVEDIIFYQRPLRSKKSTIANCTLEKRSYIDKETNERKDTPIKVCAKSNPYYQEFRVLQWLQNLRIYEIETDREVTVEFIETAQDNEALFNFLMSQKEIDNESLLKYFLLAKNPQIKDKTAKIELKKWITTYRWNYVYDVADNSSKKYPMNETGYDLQRYLQKVEGLPANFLTFDITYRLWHLLYSVKDKVEFEKALKKFAQEYQLDEASFVDSFKNFKPYPNEYGSFSEKAIKKLLPLMRFGNHWNFNRIDVSTQKRIDDLINGVANDEIRTIIREKAEKYQLNSETCFQGLPLWLAQYVVYNRHAEATDIEKWTSVNDLEAYLEDFKQHSLRNPIVEQVITETLRVVRDIWQRYGGGQANFFDEIHIELGRELKKTAEERKQLSNRNQENENTNLRIKKLLAELKEDASIQNVRPYSPVQQELLKIYEEGVFSATDEVEEDIQKIRKKAEPTTPEIQRYKLWLEQKYKSPYTGEVISLTKLFTEEYEIEHIIPQSRYYDDSLSNKVICESAVNKLKTNQLGLEFIQNHHGEKVRITGNKEVTIFTEEQYKEFVKKHYANNSAKQQKLLLNEIPEKMVARQLNDTRYISKYISEILSKIVRSDEKDEGVNSKNVIPCTGKITTALKQDWGLNDVWNELILPRFERMNQLTQTQLFTSYNDRLQKNLPTVPIEYSQGFQKKRIDHRHHAMDALVIACATREHINYMNNQHALDKNKDKKEKQQSRIDLRAILCEKKNNNWQFKKPWATFTQEAKESLEHIVVSFKQNLRVINKATNYYEKWEEKNGVLVKKKVKQEGTNWAIRKPLHKETISGKIVLDRKIGKDKILTATRKAVDITFTEKIISSITDTGIQKILLNYLKYKGSPEVAFSAEGLEELNKNIAQYNNGKEHQPIYKVRIFEEGSKFPLGETGAKATKYVEAAKGTNLFFGVYQGKGKRTYATISLNEVIERQKQGLPSVPERNEKGEPLLFSLSPNDLVYVPMEGEIAETIDFNNLSKEQKERIYKTVSFTGNECHFVKSTIASLIKSYDAKSKIGELGSLNKLEVTISGDSRIKEVCIKLKVDRLGNITKA

SEQ ID NO: 22578 - protein, 1485 aa, unidentified
  REGION 1..1485: note = Cas Enzyme sequence
MFSQRNNPYCELLSNCATKVSIIFLMCKSFLIYFYFSFLFVIFALPNYKTMKNILGLDLGTTSISFAHIVEDENKEKSEIKELGVRIVSLTTDEQSDFEKGKSITTNANRTLKHGARLNLDRYQQRRKFLIDLLQKANLITSSSILAENGKNTTHSTWQLRAKAVTERVEKEEFARVLLAINKKRGYKSSRKAKTEDEGQAIDGMAIAKRLYDENLTPGQLSLQLLQQNKKLLPDFYRSDLQREFDLVWNFQKQFYPDILTDTFYKELQGKGKDATSKAFSKRYHFDTAENKGSKESVRLQAYQWRAEAISKQLSKEEVAYVLTEINNNLNNASGYLGAISDRSKELYFNRQTVGQYLYAQLQENRHNSLKNKVFYRQDYLDEFERIWETQASFHKELTDELKKQIRDVVIFYQRKPKSQKGLISFCEFESKEIEIEKDGKTIIKSIGARVVPKSSPLFQEFKIWQILNNVICKRKGIRKKKISAKTTQLDLLNESSQTIFSLDMECKQLLFDELNLKGDLKSDKVLKLLGYSPQEWEINYNQLEGNRTQKALYEAYLKIVEMEAHDVKNILQIKSAKDDWSLDESPLSASEIKEKVKDIFQALGICTKILYFDPLLPVKEFEEQDSYQLWHLLYSYESDDSTSGNETLYRILEKKYAFKREHARILANVALQDDYGSLSTKAIRKIYPYIKENQYSKACELAGYKHSKLSLTTEELEARELKNIIPLLKKNALRNPVVEKILNQMINVVNALIEKNSERDAEGKITKYFHFDEIRIELARELKKNAQKRYEMTQNINKAKLEHQKISEILQKQFGIKNPTKSDIIRYRLYQELEHNGYKELYTNAPIARDMLFSKNIEIEHIVPKARVFDDSFSNKTLTFHRINSDKGESTAFDYITSLNSEEELNQYLTRVENAYKTKSISPAKYKNLLKKASEIGDGFINRDLRDTQYIAKKAKEILFQVTKNVLSTSGSITDRLREDWGLVDVMKELNMPKYQSLGLTEVEERKDGNKVTVIKNWTKRNDHRHHAMDALTVAFTKPSYIQYLNHLNARKDENNKNYSVILAIEEKETIKVPTNNGKNKRVFIEPIPNFRQVAKKHLEEIFISHKAKNKVVTKNVNKPAGTDKQQITLTPRGQLHKETVYGKYQYYVNKEEKIGVKFDKETIAKVSNPLYREALLKRLQANDNDPKKAFTGKNALSKKPIYLDEAKTKTLPEKVNLTYLEEDFSIRKDISPDNFKDLKSIEKVIDQGVKRILIKRLQAYGNDPKKAFVDLEKNPIWLNKEKGIAIKRVTISGVNNAQPLHIGKDHLGKTTLNKEGKEIPVDYVSTGNNHHVAIYRDKEGNLQEQIVSFFDAVVRAQQGLPIVDKTYKQAEGWQFLFTMKQNEMFVFPNEATGFNPAEIDLLDPKNKKLISPNLFRVQTISVVKYGNSVVRDFKFRHHLETTLQDDKILQGITFQQIKSLEPLRNIVKVRVNHLGDIISVGEY

SEQ ID NO: 22579 - protein, 1380 aa, unidentified
  REGION 1..1380: note = Cas Enzyme sequence
MKRILGLDLGTTSIGWALVNEAENDNETSSIVRLGVRVNPLTADEKSNFEKGKAITTNAERQKGHTARINLQRYKLRRQNLYNCLKEYGWFGNNALFEEGKASTFETYKLRAKAAEEEISLHELARVLFMLNKKRGYKSNRKANNKEDGQLFDGMTIAKKLSEENLTPAEYSLQLLNKGKRFTQGYYRSDLNAELERIWNEQKKYYPEILTDEFKQQLKGKTKVNTNKIFLAKHHIYSADLKGSDKKMQSLKWRVEALRQQVDKEILVYVISDLNGQIANTSGLLGAISDRSKELYFNKQTVGQYLWASLEENPHISIKNKPFYRQDYLDEFEKIWETQAAFHKQLTPELKQKIRDIIIFYQRPLKSKKGLISVCELEQRKVKTVIDGKEKEITIGPKVAPKSSPVFQEFRIWQNINNLLLINNDTNEKRSLNEEERNLLYQELSIKAKLSKTDALKVLNKNGKQWELNYKEIEGNRTQAILFDCYNRIITLTGHEECNFKKLKASEIRHYVTTIFKNLGFNTDILDFNPLLEKHELEKQPMYMLWHLLYSYESDNSRTGNNSLLRKLETTFGFPEEYATVLCDVTFEDDYSNLSVKAMRNILPYLQAGDDYSQACAHAGYNHSRRSLTKDELEEKVYKDKLELLPKNSLRNPVVEKILNQMINVINTIVAEYGKPDEIRIEMARELKSSAAEREKITRAISQANTENQRIRDILEKDFALSYISRNDIIKYKLYEELEANGFKTLYSGTYIPKEKLFSKDFDVEHIIPKARLFDDSFSNKTLEARNINIAKSNKTAFDFIKGEYGDEGAEVYKKKLDMLLSKDVISKAKYNKLLMSEADIPSEFIERDLRNTQYIAKKAYEILSELVRTVTPTTGEITNRLREDWQLVDVMKELNFEKYQKLGLAEVVEDRDGRKIKRIKDWTKRNDHRHHAMDALTIAFTKPAFIQYLNNLNARSNKSSSIYAIENKELHRDDNKLKFNAPIPINEFRVAAKQHLSSILISIKAKNKVMTQNVNKIKTKHGIIKKIQLTPRGALHNDTIYGTKKRPIIKKVKVGAALDELTINKISSQAIREALLKRLSEYSGDAKKAFTGKNTLEKNPIYLNAGRTKTVPSLVKTVEWESFHPTRKLIDKDLNVDKVVDKCIRNILKTRLEEFNGDAKKAFSNLEENPIYIDEAKKIALKRVSIEGVLSAIPLHTLKDQAGKLIIGKDGKPVLGNYVQTSNNHHIAFYTDEKGNLQDKAVSFFEAAERKSQGLPIVDKNYNHDKGWRFLFTMKQNEYFVFPNEATGFIPTEVNLMDEANYDMISPNLYRVQKVSRIEKGASTSRDYWFRHHLETILNDDSRLKNSAFKRINSLKPLEGIIKVRINSIGKIVAVGEYD

SEQ ID NO: 22580 - protein, 1375 aa, unidentified
  REGION 1..1375: note = Cas Enzyme sequence
MKKILGLDLGTTSIGWALVYESENTDEKSSIVRLGVRVNPLSVDEKGNFEKGKAITTNADRQQTHGARINLQRYKLRRENLKDCLQKQGWIGTEALCEEGKASTFETYMLRAKAAEEEISLHELCRVLFMMNKKRGYKSNRKANNKEDGKLFDGMTVAKKLYEEHLTPAEYSFQLLSSGKKFKQEYYRSDLKEEFDRIWNEQQKYYPEILTDDFKQHLQGKSKGNTSKIFLGKYGIYSADLKGLDRKLQPLKWRIEALKQQVDKEVLAFVISDLNGQIASTSGLLGAISDRSKELYFNKQTVGQYLWTSLKETPHVSIKNKPFYRQDYLDEFEKIWETQATYHKELTPELKQEIRDIIIFYQRPLKSKKGLISVCELEQRKVKVTIDGKEKEISIGPKVAPKSSPMFQEFRIWQNLNNILLIDKGNNSIHPLYEEERNLLYEELSVKEKLSKAEALKVLNKNSKQWDLNYKEIEGNRTQAVLYDCYNRIIVMTGHEECNFKKLKASEIRSYFKTIFTGLGFNTDILEFDSSLTGHELERQPSYQLWHLLYSYESDNSRTGNDALLRKLETAFGFPKEYAAVLSDVVFEDSYGNLSVKAMRKILPHLQAGLDYSQACEEAGYKHSRRSLTKNELDQKEYKEKLDLLPKNSLHNPVVEKILNQMINVINAVIDEYGKPDEIRIELARELKIGAAERENMTRSISQGNAENKRIREILQKEFALSYISRNDIIKYKLYEELKSNGFKTLYSDTYISKDKLFSKDFDIEHIIPKARLFDDSLSNKTIEARDVNIAKSNKTAFDFIFGKYGQQGIEAYKKKLDILLQDGSISKAKYNRLLMKEADIPSGFIDRDLRDTQYIAKKAYEILSDLVRNVTPTTGAVTSRLREDWQLVDVMKELNFEKYQKLGLAEVIEDRDGRKIKRIKDWTKRNDHRHHAMDALTIAFTKPSYIQYLNNLNARSDKSSSIYGIENKELHREDNKLRFNAPLPINEFRAEARRHLKSVLVSVKAKNKVMTQNVNVIKTKHGVIKKVQLTPRGELHNATFYGTKKRSIIKMIKVGAALDEATIKKVSSSLIREALLDRLHEYNGDAKKAFTGRNSIDKNPIYIDEEHKKTVPSLVKTIEWEMYHPTRKLISPDLKIDKVIDKGIREILKTRLAKFNGDAQKAFSNLDENPIYKDEAKKITLKRVSLEGVSSVIPLHTIKDREGKPVVGKDGKPVLGDYVQTSNNHHIAFYMDENGNLQDNVVSFFEAAERKSQGVPVIDKSYNHDKGWHFLFTMKQNEYFVFPNEVTGFNPSEVDLTDEANYSLISPNLYRVQKMSKTSGRDYWFRHHLEAMLNDDPKLRNSMFKRINSLKALEGIVKVRINCVGKIVAVGEYD

SEQ ID NO: 22581 - protein, 904 aa, unidentified
  REGION 1..904: note = Cas Enzyme sequence
RVKFGPKVAPKSSPLFQLCRIYEAVNNIRLTRPDGSPRDITPEERAKIVAHLQSSASLSFAALKKLLKEKVLIADQLTSKSGLKGNSTRVALAAALQPYPQYLHLLDMELETRMMTVQLTDEETGEVTEREVAVVTDSYVRQPLYRLWHILYSIEERDAMRRALITQLGMKAEDLDGGLLDQLYRLDFVKSGYGNKSAKFICKLLPQLQQGLGYSEACAAVGYRHSNSSTSEEITERTLLEKIPLLQRNELRQPLVEKILNQMINLVNALKAEYGVDEVRVELARELKMSREERERMTRQNGERKKANDKVAEKIQKCGLFPTKSRIRKYRLWEEAGRQCLYCGRSIGEKQCLNGDDMEVEHIIPKSVLYDDSYGNKTCACRRCNKEKGNRTALEYIRAKGWEAEYMERINGLLDKKTISYSKHQRLRWLKEDIPSDFLERQLRLTQYISRQAMAILQQGIRRVSASEGGVTARLRSLWGYDDILHTLNLDRYDSMGETERVSREGETTEKLRIKDWSKRKDHRHHAIDALVVASTRQGYIQRLNRVSSESEREAMSGEIEVQKATKTDKLSLLERWLTQRPHLSVRAVSDKVAEILISYRPGKRVVTRGRNIYRKKTADGREVTCVQRGVLVPRGELMEASLYGKILSQGRERIVKRYSLHALKGEVVDPRLRELITTYNQELKSREKGAPIPPLCLDKDKRQEVRSVRCYVDKPSVSSAIPIRFDERGTAITFVQSGNNHHLAVYRTPQGVLEESIVSFWDAVDRARYGIPLVITHPREVMEQVLQRGDIPESVLKSLPPSDWMFVESLQQDEMVAIGLSDEELQSAIEAQDYRKLSEHLYRVQSLSSKYYVFRYHLETSVKDRKNTSGRIPKFHRVRNLPDYEKRNVRKVRVDLLGRISLL

SEQ ID NO: 22582 - protein, 1424 aa, unidentified
  REGION 1..1424: note = Cas Enzyme sequence
MTQKVLGLDLGTNSIGSAVRNLDLSDDLQWQLEFFSSDIFRSSVNKESNGREYSLAAQRSAHRRSRGLNEVRRRRLWATLNLLIKHGFCPMSSESLMRWCTYDKRKGLFREYPIDDKDFNAWILLDFNGDGRPDYSSPYQLRRELVTRQFDFEQPIERYKLGRALYHIAQHRGFKSSKGETLSQQETNSKPSSTDEIPDVAGAMKASEEKLSKGLSTYMKEHNLLTVGAAFAQLEDEGVRVRNNNDYRAIRSQFQHEIETIFKFQQGLSVESELYERLISEKKNVGTIFYKRPLRSQRGNVGKCTLERSKPRCAIGHPLFEKFRAWTLINNIKVRMSVDTLDEQLPMKLRLDLYNECFLAFVRTEFKFEDIRKYLEKRLGIHFSYNDKTINYKDSTSVAGCPITARFRKMLGEEWESFRVEGQKERQAHSKNNISFHRVSYSIEDIWHFCYDAEEPEAVLAFAQETLRLERKKAEELVRIWSAMPQGYAMLSQKAIRNINKILMLGLKYSDAVILAKVPELVDVSDEELLSIAKDYYLVEAQVNYDKRINSIVNGLIAKYKSVSEEYRFADHNYEYLLDESDEKDIIRQIESSLGAKRWSLMDADEQTDILQKVRDRYQNFFRSHERKFVESPKLGESFENYLTKKFPMVEREQWKKLYHPSQITIYRPVSVGKDRSVLRLGNPDIGAIKNPTVLRVLNTLRRRVNQLLDDGVISPDETRVVVETARELNDANRKWALDTYNRIRHDENEKIKKILEEFYPKRDGISTDDIDKARYVIDQREVDYFTGSKTYNKDIKKYKFWLEQGGQCMYTGRTINLSNLFDPNAFDIEHTIPESLSFDSSDMNLTLCDAHYNRFIKKNHIPTDMPNYDKAITIDGKEYPAITSQLQRWVERVERLNRNVEYWKGQARRAQNKDRKDQCMREMHLWKMELEYWKKKLERFTVTEVTDGFKNSQLVDTRVITRHAVLYLKSIFPHVDVQRGDVTAKFRKILGIQSVDEKKDRSLHSHHAIDATTLTIIPVSAKRDRMLELFAKIEEINKMLSFSGSEDRTGLKQELEGLKNKLQMEVKVCRIGHNVSEIGTFINDNIIVNHHIKNQALTPVRRRLRKKGYIVGGVDNPRWQTGDALRGEIHKASYYGAITQFAKDDEGKVLMKEGRPQVNPTIKFVIRRELKYKKSAADSGFASWDDLGKAIVDKELFALMKGQFPAETSFKDACEQGIYMIKKGKNGMPDIKLHHIRHVRCEAPQSGLKIKEQTYKSEKEYKRYFYAAVGDLYAMCCYTNGKIREFRIYSLYDVSCHRKSDIEDIPEFITDKKGNRLMLDYKLRTGDMILLYKDNPAELYDLDNVNLSRRLYKINRFESQSNLVLMTHHLSTSKERGRSLGKTVDYQNLPESIRSSVKSLNFLIMGENRDFVIKNGKIIFNHR

SEQ ID NO: 22583 - protein, 1380 aa, unidentified
  REGION 1..1380: note = Cas Enzyme sequence
MKRILGLDLGTTSIGWALVNEAENNNETSSIVRLGVRVNPLTADEKSNFEKGKAITTNAERQKGHTARINLQRYKLRRQNLYNCLKEYGWFGNNALFEEGKASTFETYKLRAKAAEEEISLHELARVLFMLNKKRGYKSNRKANNKEDGQLFDGMTIAKKLYEEHLTPAEYSLQLLNKGKRFTQGYYRSDLNAELERIWNEQKKYYPEILTDEFKQQLKGKTKVNTNKIFLAKHHIYSADLKGSDKKMQSLKWRVEALRQQVDKEILVYVISDLNGQIANTSGLLGAISDRSKELYFNKQTVGQYLWASLEENPHISIKNKPFYRQDYLDEFEKIWETQAAFHKQLTPELKQKIRDIIIFYQRPLKSKKGLISVCELEQRKVKTVIDGKEKEITIGPKVAPKSSPVFQEFRIWQNINNLLLINNDTNEKRSLNEEERNLLYQELSIKAKLSKTDALKVLNKNGKQWELNYKEIEGNRTQAILFDCYNRIITLTGHEECNFKKLKASEIRHYVTTIFKNLGFNTDILDFNPLLEKHELEKQPMYMLWHLLYSYESDNSRTGNNSLLRKLETTFGFPEEYATVLCDVTFEDDYSNLSVKAMRNILPYLQAGDDYSQACAHAGYNHSRRSLTKDELEEKVYKDKLELLPKNSLRNPVVEKILNQMINVINTIVAEYGKPDEIRIEMARELKSSAAEREKITRAISQANTENQRIRDILEKDFALSYISRNDIIKYKLYEELEANGFKTLYSGTYIPKEKLFSKDFDVEHIIPKARLFDDSFSNKTLEARNINIAKSNKTAFDFIKGEYGDEGAEVYKKKLDMLLSKDVISKAKYNKLLMSEADIPSEFIERDLRNTQYIAKKAYEILSELVRTVTPTTGEITNRLREDWQLVDVMKELNFEKYQKLGLAEVVEDRDGRKIKRIKDWTKRNDHRHHAMDALTIAFTKPAFIQYLNNLNARSNKSSSIYAIENKELHREDNKLKFNAPIPIHEFRAEAKRHLSAILISIKAKNKVMTQNVNKIKTKQGVIKKIQLTPRGALHNETIYGTKKRPIITMVKVGAALDEATINKISNLTIREALLKRLNEYSGNAKKAFTGKNTLDKNPIYLNAERTKTVPTLVKTIEWESFHPTRKLIDKDLNVDKVVDKCIRNILKTRLEEFNGDAKKAFSNLEENPIYLDQTKKIALKRVSIEGVLSAIPLQTLKDQAGKLIIGKDGKPVLGNYVQTSNNHHIAFYTDEKGNLQDKAVSFFEAAERKSQGLPIVDKNYNHDKGWRFLFTMKQNEYFVFPNEATGFIPTEVNLMDEANYDMISPNLYRVQKVSRIEKGPSTSRDYWFRHHLETILNDDSRLKNSAFKRINSLKPLEGIIKVRINSIGKIVAVGEYD

SEQ ID NO: 22584 - protein, 1375 aa, unidentified
  REGION 1..1375: note = Cas Enzyme sequence
MKKILGLDLGTTSIGWALVYESENTDEKSSIVRLGVRVNPLSVDEKGNFEKGKAITTNADRQQTHGARINLQRYKLRRENLKDCLQKQGWIGTEALCEEGKASTFETYMLRAKAAEEEISLHELCRVLFMMNKKRGYKSNRKANNKEDGKLFDGMTVAQKLYEEHLTPAEYSFQLLSSGKKFKQEYYRSDLKEEFDRIWNEQQKYYPEILTDDFKQHLQGKSKGNTSKIFLGKYGIYSADLKGLDRKLQPLKWRIEALKQQVDKEVLAFVISDLNGQIASTSGLLGAISDRSKELYFNKQTVGQYLWTSLKETPHVSIKNKPFYRQDYLDEFEKIWETQATYHKELTPELKQEIRDIIIFYQRPLKSKKGLISVCELEQRKVKVTIDGKEKEISIGPKVAPKSSPMFQEFRIWQNLNNILLIDKGNNSIHPLYEEERNLLYEELSVKEKLSKAEALKVLNKNSKQWDLNYKEIEGNRTQAVLYDCYNRIIVMTGHEECNFKKLKASEIRSYFKTIFTGLGFNTDILEFDSSLTGHELERQPSYQLWHLLYSYESDNSRTGNDALLRKLETAFGFPKEYAAVLSDVVFEDSYGNLSVKAMRKILPHLQAGLDYSQACEEAGYKHSRRSLTKNELDQKEYKEKLDLLPKNSLHNPVVEKILNQMINVINAVIDEYGKPDEIRIELARELKIGAAERENMTRSISQGNAENKRIREILQKEFALSYISRNDIIKYKLYEELKSNGFKTLYSDTYISKDKLFSKDFDIEHIIPKARLFDDSLSNKTIEARDVNIAKSNKTAFDFIFGKYGQQGIEAYKKKLDILLQDGSISKAKYNRLLMKEADIPSGFIDRDLRDTQYIAKKAYEILSDLVRNVTPTTGAVTSRLREDWQLVDVMKELNFEKYQKLGLAEVIEDRDGRKIKRIKDWTKRNDHRHHAMDALTIAFTKPSYIQYLNNLNARSDKSSSIYGIENKELHREDNKLRFNAPLPINEFRAESRRHLKSVLVSVKAKNKVMTQNVNVIKTKHGVIKKVQLTPRGELHNATFYGTKKRSIIKMIKVGAALDEATIKKVSSSLIREALLDRLHEYNGDAKKAFTGRNSIDKNPIYIDEEHKKTVPSLVKTIEWEMYHPTRKLISPDLKIDKVIDKGIREILKTRLAKFNGDAQKAFSNLDENPIYKDEAKKITLKRVSLEGVSSVIPLHTIKDREGKPVVGKDGKPVLGDYVQTSNNHHIAFYMDENGNLQDNVVSFFEAAERKSQGVPVIDKSYNHDKGWHFLFTMKQNEYFVFPNEVTGFNPSEVDLTDEANYSLISPNLYRVQKMSKTSGRDYWFRHHLEAMLNDDPKLRNSMFKRINSLKALEGIVKVRINCVGKIVAVGEYD

SEQ ID NO: 22585 - protein, 916 aa, unidentified
  REGION 1..916: note = Cas Enzyme sequence
SEKATKKLLQVMRLGKYWCGDELPEPAKRTKGNKQAVYDEMAHRGICKQTLQNISSIIEEDIDERLMSALLNPERPLMELSHFQGLSVSDACYVVYGRHSEVAEIVKWKDAGELNTFINNFKQHSMRNPIVEQCVLETLRTVRDVWEQEGQIDEIHVELGRNMKRTAEQRARDTQAIQRNENTNMRISLLLTELKNDPSISDVRPYSPSQRELLKIYEEGALENLTNQDEDIAKISRLAQPSSSELRRYKLWLDQKYVSPYTGRPIPLAKLFTPAYEIEHIIPQSRYFDNSFSNKVICEAEVNKLKANNLGMEFIKKFGGKTKGILDEEAYKLHVTTNYAHNPAKRSKLLMEGLPTDFNSRQLNDTRYISKTVMAMLSNVVREEGERETRSKHVVVCTGGVTDTLKKDWGLQDVWHNLVYPRFIRLNNLTGSQNFGYWRYLNEENSKKGEESKKVFQITLPPECQRGFVKKRIDHRHHAMDALVIACASANIVNYLNNQSAANPHIHENLQRLLCDRKRVIRKPWPTFTQDAQKALEDLVVSFKNTVRVVNKASNTYLRYDKDGKKKRFKQEGEGLKAIRKPMHKETYYGEVNLIRKEMLPLKRALDDVNAIVDKELRASIKGLLRDGFNLQQVLANFKAKDFKFNKRDIKKVEVYVSSAKSTPMVATRKSLDTSFNAKRIADITDTGIQKILLNYLKANDNSPEQAFTPEGIAYLNEHIAEYNNGKPHQPILKVRVSEIRGAKFAVGHTGTKRTKFVEAQSGTNLYFAIYEGNEGKRHFETIALNVAAERLKMGQTPVPETNDAGLPLKFYLSPNDLVYVPTDEDRVAAHPSIDKRRIYKMVSATYKQCFFLPFTVASVISDKVEFEALNKMERVVDASEYSSAYDSSHVKKVMIKNVCWKLEVDRLGNITKIVR

SEQ ID NO: 22586 - protein, 1192 aa, unidentified
  REGION 1..1192: note = Cas Enzyme sequence
MLMSKHVLGLDLGVGSIGWCLIALDAQGDPAEILGMGSRVVPLNNATDAADFSIGKAFTANQERTARRTMRRGFARYQLRRYRLRRELEKVGMLPDAALIQLPLLELWELRERAATAGRRLTLPELGRVLCHINQKRGYRHVKSDAAAIVGDEGEKKKDSNSAYLAGIRANDEKLQDEHKTVGQYFAEQLRQNQSESPTGGISYRIKDQIFSRQRYIDEYDQIMAAQRVHYPDILTDEFIRMLRDEVIFMQRPLKSCKHLVSLCEFEKQEKVMRVQQDDGKGGRKLVERRVKFGPKVAPKSSPLFQLCRIYEAVNNIRLTRPDGSPCDIAPEECAKIVAHLQSSASLSFAALKKLLKEKALIADQLTSKSGLKGNSTRVALAAALQPYPQYHDLLNMELETRMMTVQLTDEETGEVTEREVAVVTDSYVRQPLYRLWHILYSIEERDAMRRALITQLGMKEEDLDGGLLDQLYRLDFVKPGYGNKSAKFICKLLPQLQQGLGYSEACAAVGYRHSNSPTSEEITERTLLEKIPLLRRNELRQPLVEKILNQMINLVNALKAEYGVDEVRVELARELKMSREERERMAEGNRRREKENKAIAEKIRECGLFPTKSRIRKYMLWEEAGEQCLYCGQILTLSQCLNGDDMEVEHIIPKSVLYDDSYGNKTCACRRCNKEKGNRTALEYIRAKGWEAEYMERINGLLDKKAISYSKHQRLRWLKEDIPSDFLERQLRLTQYISRQAMAILQQGIRRVSASEGGVTARLRSLWGYDDILHTLNLDRYDSMGETERVSREGETTEKLRIKDWSKRKDHRHHAIDALVVASTRQGYIQRLNRVSSESEREAMSEEIELQKVTKTDKLSLLERWLTQRPHLSVRAVSDKVAEILISYRPGKRVVTRGRNIYRKKTADGREVTCVQRGVLVPRGELMEASLYGKILSQGRERIVKRYPLHDLEGEVVDPRLRELVAVYNQEITSKVKAKGAPLYLDAAEKQEVRSVRCYVTQPSVAKAIPIRFDERGRATTFVKSGNNHHLALYRTPQGKLEESIVTFWDAVDRARYGIPLVITHPREVMEQVLQRGDVPESVLRSLPPSDWVFVDSLQPDEMVIIGLSDEELQQALEVQDYRKLSEHLYRVQKVSSLYYVFRYHLETSVADDKNTAGRIPKFHRVQSLKAYEEKNIRKVRVDLLGRISLL

SEQ ID NO: 22587 - protein, 1426 aa, unidentified
  REGION 1..1426: note = Cas Enzyme sequence
MKNILGLDLGTTSISFAHIVEDENKQKSEIKELGVRIVSLTTDEQSDFEKGKSITTNANRTLKHGARLNLDRYQQRRKYLIDLLQKANLITSSSILAENGKNTTHSTWQLRAKAVTERVEKEEFARVLLAINKKRGYKSSRKAKTEDEGQAIDGMAIAKRLYDENLTPGQLSLQLLQQNKKLLPDFYRSDLQREFDLVWNFQKQFYPDILTDTFYKELQGKGKDATSKAFSKRYHFDTAENKGSKESVRLQAYQWRAEAISKQLSKEEVAYVLTEINNNLNNASGYLGAISDRSKELYFNRQTVGQYLYAQLQENRHNSLKNKVFYRQDYLDEFERIWETQASFHKELTEELKKQIRDVVIFYQRKPKSQKGLISFCEFESKEIEIEKDGKTITKSIGARVVPKSSPLFQEFKIWQILNNVICKRKGIREKKISAKTTQLDLLNESSQTIFSLDMECKQLLFDELNLKGDLKSDKVLKLLGYSPQEWEINYNQLEGNRTQKALYEAYLKIVEMEAHDVKDILQIKSTKDDWSLDESPLSASEIKEKVKDIFQALGICTKILYFDPLLPVKEFEEQDSYQLWHLLYSYESDDSTSGNETLYRILEKKYAFKREHARILANVALQDDYGSLSTKAIRKIYPYIKENQYSTACEMAGYKHSKLSLTTEELEARELKNIIPLLKKNALRNPVVEKILNQMINVVNALIEKNSERDAEGKIIKYFHFDEIRIELARELKKNAKKRYEMTQNINKAKSEHQKISEILQKKFGIKNPTKSDIIRYRLYQELEHNGYKELYTNAPIARDMLFSKNIEIEHIVPKARVFDDSFSNKTLAFREFNIKKGESTAFDYITSLNSEEELNQYLTRVENAYKTKSISPTKYKNLLKKASEIGDDFINRDLRDTQYIAKKAKEILFQVTKNVLSTSGSITDRLREDWGLVDVMKELNMPKYQSLGLTEVEERKDGNKVTVIKNWTKRNDHRHHAMDALTVAFTKPSYIQYLNHLNARKDKNNKNYSVILAIEEKETIKVPTNNGKNKRVFIEPIPNFRQVAKKYLEEIFISHKAKNKVVTKNVNKPAGTDKQQITLTPRGQLHKETIYGKYQYYVNKEEKIGVKFDKETIAKVSNPLYREALLKRLQANDNDPKKAFTGKNALSKKPIYLDEAKTKTLPEKVNLTYLEEDFSIRKDISPDNFKDLKSIEKVIDQGVKRILIKRLQAYDNDPKKAFVDLEKNPIWLNKEKGIAIKRVTISGVSNAQPLHIGKDHLGKTTLDKEGKEIPVDYVSTGNNHHVAIYWDKDGNLQEQIVSFFEAVVRAQQGLPIIDKTYKQAEGWQFLFTMKQNEMFVFPNATTGFNPAEIDLLDPKNKKLISPNLFRVQKIATKDYFFRHHLETNVETDNVLKNTTWKREGLSGLKDIVKVRINHLGDIVSIGEY

SEQ ID NO: 22588 - protein, 1550 aa, unidentified
  REGION 1..1550: note = Cas Enzyme sequence
LKSFRKFNDNIANCKTNFNKMKNILGLDLGTNSVGWALISVDENGNLVKDIRLGSRIIPMSQDVLGKFDSGVTVSQTAERTEYRSHRRLLERALLRRERLHRVLHLLGFLPEHYAACIGWDRNDNATYGKFLPETEPKLAWRKADDGEHRFIFMQSFDEMLEDFKESQPSLLANGKRIPLDWTLYYLRTKALSKPIAKEELAWILLNFNQKRGYYQLRGEEEEETPSKRVEYHELKVVKVEATDEGKGGNVWYNVLLENGWVYRRQSKYPLDKWLGQTLPFIVTTDLEADGVTPKRDKDGNEKRSFRSPKEDDWTLVKKRTEDHLEKSGLTVGAFIYQHLLANPSDKVRGQLVRTIDRKYYKRELQAIIAKQMEFHPELRDVELLKACAEELYRNNEAHRSQLMAKDFKHLLVEDVLFYQRPLKSKKSLIANCPYETRQYINKETGEIKDVNVKCIAKSNPYFQEFRLWQWISNLRLLRQADGQDVTASYIKGNEDKERLFDLLNNQGEIKQEHILRDFLKLKKPKGGEFPLRWNYVDDKVYPANETRHAMNKAIKAMSAAKEEKETIGQLLVQPAVEYMLWNLLYSITDRNELTSALRRFALAHGISSVDAFVEAFLKVKPFKKEYGAYSEKATKKLLQVMRVGKYWCGDELADPAKRTKGNKQAVYDEMANRGICKQTLQNISNIIEENIDERLMGALLNPERPLTELSHFQGLSVSDACYVVYGRHSEVAEIVKWKDAGELNTFINNFKQHSMRNPIVEQCVLETLRTVRDVWEQEGQIDEIHVELGRNMKRTAEQRAHDTQAIQRNENTNMRISLLLTELKNDPSISDVRPYSPSQRELLKIYEEGALENLTNQDEDIAKISRLAQPSASELRRYKLWLDQKYVSPYTGRPIPLAKLFTPAYEIEHIIPQSRYFDNSFSNKVICEAEVNKLKDNNLGMEFIKKFGGKTKGILDEEAYKLHVTTNYAHNPAKRSKLLMEDLPTDFNSRQLNDTRYISKTVMSLLSNVVREEGERETRSKHVVVCTGGVTDTLKKDWGLHDVWNNLVHPRFIRLNNLTGTQDFGYWRALDEEKRKQGEDSKKVFQITLPPECQRGFVKKRIDHRHHAMDALVIACASANIVNYLNNQSAANPNSREDLRRLVCDIKRRIRKPWPTFTQDAQAALEDLVVSFKNTVRVVNKASNTYLRYDKDGKKKRFKQEGEGLKAIRKPMHKETYYGEVNLIRKEMLPLKRALEDVNAIVDKELRACIKGLLRDGFNLQQVLANFKAKDFKFNKRDIKKVEVYVSSAKSTPMVATRKSLDTSFNAKRIADITDTGIQKILLNYLKANDNSPEQAFTPEGIAYLNEHIAEYNNGKPHQPILKVRVSEIRGAKFAVGQTGSKKTKFVEAQSGTNLYFAIYEDKEGKRHFETIALNVAAERLKMGQTPVPETNDAGLPLKFYLSPNDLVYVPTDEDRAAARPSIDKRRIYKMVSATDRECYFLPFEVASIIADKVEFEAKNKVGRVIAALEYKEKSEEENKTSAGSKVMIKDVCWKLEVDRLGNITKIVR

SEQ ID NO: 22589 - protein, 1480 aa, unidentified
  REGION 1..1480: note = Cas Enzyme sequence
MKTILGLDLGTNSIGWAKVCVDDNGNYTRDIKLGSRIIPMSQDTLSNFDKGVTESPTAVRTGFRGIRRIRERALQRRERLHRVLHVMGFLPPHYENAIGWNREEATTYGKFLDNAEPKLVWEKQEDGSMRFLFMDSFYEMMADFAKYQPGLVADGRKIPLDWTLYYLRKKALTQAIRKEELAWILLNFNQKRGYYQLRGEEDEEDPTKREEYYELKVVSVEAAEEGKGGNTWYNVTLENGWIYRRQSKIELNDWTGKIRQFIVTTEYEKDGITIKKDKNGEVKRSFRAPSEDDWGLRKKRTESRLEDSGKTVGEFIYDHILSDPVDKIRGNFIRTIERKFYKKELETILREQSKYHKELKDQNTLVNCIKELYPNNKAHQDSLMKKDMIYLLITDLIFYQRPLKSKKSLIADCPYEYYEYVIKETGEIKRQGIKCIAKSNPYYQEFRLWQFIINLRLFDRTNDKEITSEYLSSMEDYTKLFTYLNDRKEINQEILLKDFFKQKKVKMGMEKEFPIRWNYIEDKEKKYPCNETRHELLAALDKAGIDHSWLDDKERFYRLWHLLYSVESKEEAEGALRKLNDNEDFVNAFLKIKPFKKEYGAYSEKAIKKLLAVIRMGTQWNEDDICEQTRNRIQSIINGDIDEKIKERMGRTFSHLSDFQGLPEWLACYVVYGRHSETTDIQRWTKPENLMSYIKGFKQHSLRNPIVEQCILETLRTVHDIWKEAGHIDEIHIELGRSMKSTADQRARMSKSILQNENTNLRIKSLLMELKNTKEFENVRPYSPMQQEILRIYEEGALQELTKEDDQYPEISKISQMAQPSAKELLKYRLWLDQKYCFPYTGKPISLSKLFTSAYQIEHIIPQSRYFDDSFSNKVICEAEVNQLKSNMLGYEFIKKHSGEIVHCTMVGDVKILDAKEYYNFVTEHYANNRRKKENLLLEDIPQEFLNRQMNDSRYISKKVMALLSNIVREEGEQEAKSKFVIACSGGITDRLKHDWGLNDVWNSIVYPRFERLNKLTNTENFGRWENKEGKQVFQTSVPLELQRGFSKKRIDHRHHAMDALVIACASNNIINYLNNESAKSQEKREDLRKKLCDKNRIIRKPWETFTQDVRTALEDVVVSFKNYVRVINKATNYYEKYDKNGKKGIAEQKGQDMWAIRKPMHKETVFGQVNLRRKVTVKLKDALEKIPAIYDKELRDYINILVAKQFNKKQILAHFKSINYRLNMKSVDKVDVWQFSNEKEPMVATRKPIDTSFDDKRIATITDTGIQKILLNYLKAKDNNPNIAFTPEGIAEMNKHITEYNNGKQHQPILKVRVSEPKGAKYQVGETGNKTSKFVEAQKGTNLYFAIYEDKEGNRSYSTIPLNEVIERLKQGLSPAEDLNKRGENLKFYLSPNDLVYVPTEEEKLSGECKLNKDRIYKMVSATSNQCFFTPHRTANSIVNKVEYSPLNKMEKTIWGEMIKAVCWKLEVDRLGNILKIIK

SEQ ID NO: 22590 - protein, 1494 aa, unidentified
  REGION 1..1494: note = Cas Enzyme sequence
MKNILGLDLGTNSIGWALIDNESHRIIKSGSRIIPMDAATMGDYEKGNLKSADWKRTSFRGMRRLYERAKLRRERLLRVLNILGFLPEEFRRQIDFEHHPGQFIDGKEPLIAYHHDENGQRVFSYMSAFEEMLTDFRATQSELVRDGRRVPYDWTIYYLRHKALTQPVTKEELAWIILNFNTKRGYYQLRSESEEVTTNKNEEYAELKVVSVEKTGEDKKRAGYYWYTITYDNEAEQKITSTIPPRQIGDKVELIVTTARDKAGEIKKSVRSPKEDDWTLMKKRTEHNIEEEECTVGSYIYQHILADPTVKVRGKLVHTIERKFYKKELKQILNKQKEFIPELQDASLYEACIKELYRNNEAHIQSIANKDFTDLFVNDIIFYQRPLKSKKSTISNCPYESYYYKNKETGELIRKPIKCIAKSNPLYQEFRLWQFVHNLRIYKKSEEVSGRLQTDVDVTDRFLTTPDDYAKLFSWLNDRKEIKQKELLRYEAFGLSKSYGDYRWNFVEDKPYPCNETLHEINRRMKSILSDKKLSSEAYQQLWHILYSIDDPIEIRKALTSFAQNQEINSDDFVNAFYQYVPEKTKSYGAYSEKAIKKLLPLMRRGSYWAIGNIDEKTHRRLDNIINGVADDSISTCTREKLNNLTDITMCQGMPLWQACYAVYDRHSEAADTTKWEQPDDIDTYLSTELKQHSLRNPIVETVISETLRVVRDIWKAYGRPEEIHVELGRNLKQDAKSRKQDAIRMAENEQTNLRIRALLQELSNPECGVENVRPHSPSQMELLKIYENEVLQSTDDIPEEISNIIKDLGKTDSKKRPSLSDITKYRLWLEQKYQSPYTGHIIPLSKLFTPAYQIEHVIPQSRYFDDSISNKVICEAEVNKEKDRMLGYEFIINKGGSIVKGSFGQQFKIFDKVQYEDFVKQRYAHNKTKMKKLLMDDIPDGFIQRQLNDSRYMSKKIISILSNIVREDGEKEATSKHIIVTSGAITDRLKKEWGIKDVWNDIIAPRFKRLNKLTDSNNYGMETEKEGRQYFQINVPTELSTGLIKKRIDHRHHAMDAIIIACTTRNHVNFLNNSTAASDQKDIRRDLQHTLCTKTKTDSNGNYVWRFNKPWDTFTQDTRQELEGIIVSFKQNLRIINKMSNYYQHYVDGRKTISRQNKGDGWAIRKSLHKATVSGKVNLKRSKTVGFKEALNDWSAIKDKTSKAILQKIIAQYKNYDPKTIFKYFKDRNFKVEGKDFSKLEVYYNTSDKEPMSAHRVNIDTTFDEKEIRSITDTGIQKIMLKHLHTYDDAQGKTHPEAAFSPEGIEKMNQNIRMLNGGKDHKPIFKVRKAEILGMKFAVGERGHKDKKWVEADKGTNLFFAIYESEENKRSYSSIPLNEAIDRLKRGENIADERDQNGNKLLFVLSPMDLVYVPDPDDAHIDEVKGNNNIFKMVSCTGTECYFVPETYANVICKGKELESKNKVESYDGINIKKSCYKITVDRLGKVRKIFKG

SEQ ID NO: 22591 - protein, 1434 aa, unidentified
  REGION 1..1434: note = Cas Enzyme sequence
MKNILGLDLGTNSIGWAYVKQAQNDSEKSEIVELGVRVNPLTVDEKTNFEKGKPISTNADRTLKRGARRNLQRYKLRRQELIALLKEYQVISDKTILAEDGKGTTFETLRLRAKSAKEQVSLEELARILLMINKKRGYKSSRKAKNEDEGQLIDGMEIARRLYDENLTTGQLSLQLLKEGKKSLPDYYRSDLQHELDKVWNFQKQFHPDILTDEFYTAIQGKGQKATRESFSSKYRIDTAENKGSREEKKLQAYQWRADAIHKELTKEELAFVITEINNNINNSSGYLGAISDRSKELIFANETVGEYLWKQIQNDPHTSLKNQVFYRQDYLDEFERIWKTQSEFYPQILTESLKNELRDILIFYQRKLKSQKALVSICEFESKKIPLKDKQGNPISKNGIPVTKLVGPKVAPKSSPLFQEFKIWQNLNNVLVRPKGSRKRKVTTDQQSTLLEGQEPVFELNLEQKELLFEELNIKGNLKTDYCLELIGYSAKEWEMNYPTLEGNKTNKALYEAYLKIIDSEGYDAKKLLKVKTDKDDINLDDIKVSASEIKIMISDIFNELGINTKILDFDAELERKQFEAQASYRLWHLLYSYEGDDSKSGNELLYRLLEDKFGFKREHSKTLANVSLLSDYGNLSTKAIRTIYPYIKENKFSTACELAGYRHSKLSITKEENENRTLKDTLDVLKKNSLRQPVVEKILNQMINLINELIEKHSEKDEKGNIVKYFKFDEIHIELARELKKNAEERRELDSKVREGKDRNEKIITILKSEFGLPYPTKNDIIRYRLYEELKYNEYKDLYTNTDIPKEKLFSKEIDIEHIIPKSRLFNDSFSNKTICYRQDNLNKGERTAYDYIEGLGKTQLDEYLNRIENLYANKIITKAKYRNLLKKESEIGDGFIERDLRETQYIAKKAKEMLLQITRHVVSTTGSITDRLRDDWELVNVMRELNLPKHKALGLTEIQERKNGQTVEVITDWTKRNDHRHHAMDALTVAFTKHSHIQYLNFLNARKDEKHKEYSNIMGIQQLETEKTTDKDGKDKRVFKAPIPNFRQVAKEHLESILISHKTKNKVVTRATNKIAGSKKQQETLSPRGQLHKETVYGKYRRYVQKEEKIDSKFDLQTIARVANPLYKRLLTKRLKENGGDPKKAFTGKNALAKTPIYLDEVQTQQLPEKVKLVWLETDFSIRKDITPDNFKDEKSIDKVLDEGIKRILKDRLKSFDGDAKRAFTDLEQNPIWLNKEKGITIKRVTISGVSNAEPLHTKKDHLGNEIFDETGKPIPVDYVSTGNNHHVAIYRDENGNLQEKAVSFFEAVTRANQGLPIVDKTYNRHLGWQFLFTMKQNEMFVFPNKEIGFDPQEIDLLDPKNKKLISPNLFRVQKISTKNYFFRHHLETTVEEKKELQQITYQQIRSLSPLNNIVKVRINHLGDIVHIGEY

SEQ ID NO: 22592 - protein, 1382 aa, unidentified
  REGION 1..1382: note = Cas Enzyme sequence
MKRILGLDLGTASVGWAVVNEAENSEEQSSITALGSRVVLLSADEKNNFLTGKSVSATATRTAKRGARRNLQRYKLRREWLKDALVSAGIIHENTCLNDSNSKELFATYISRAKAVTEQIALEDFAKVLFMINKKRGYKSNRKTDNTESEDGQIIDGLDLAKKLKARNITPGQYLLELFKENKKNKAVFYRSDLQEEVNRIWDFQSQFYPEILDNTLLSAITNKSKKAVIGLFKGIKNVEIADVKTKERTEKALTWRSEALHKQLEIGEVAYAIAEVMGAISQSSARLALLSDNSKHLEFEGLTIGQYLLKLLRNNPNSSLKNINFYRKDYEDEFNTIWKKQASFYPQLTESLRSTIFNSIFMQRNLKSCKALLANCELEFAEKKITLPDGSCQTRTIYSKVCPKSSPYFQEFQIWQSLSNIRIIDKENTHLTKGQELSYDQKVMLLPELMIHSELKANKIIEILFGKKSNYTINMPSIKGNRTNETIFNALLEIVELTGHSIDNIVKTDANQQIEAVKNIFESLGYKTDFITFDSTIEGKDGLNQPYYKLWHLLYSYCGDNSKTGNEALIRKIEELTGLEKEEAKVLANCTFENDYASLSTKAIRKLLPHLQSNLDYSEACEDAGYNHSKRSRTKEDIKNKVYKDKLDLLPRNSLRNPIVEKILNQMIHVINQTSEAYGKPDEIRIEMAREIKKNKIQREKLANQLRQNTAELERIKDILRKDFKLSHISHNDILRYRLYEELSLNGYKTLYSNTYIERQQILDPTVTIEHIVPKALAFDDSFSNKTLEIQSVNGEKSNQTAFDFISKKYGSEALEQYINRVNNLFENGKISKTKRDNLLRKQEDIPSDFLNRDLRNTEYIAKKALEILEDYVPRVTPTIGEITKTLREDWQLVYIMRELNWEKYNSLGLTSFYYDRNGTKIGLIHNWTKRNDHRHHAMDALTIAFTKPSIIQYLNNLKSQNDKGSSIYAIQAKETYIDETRKRLIKPPYDIKQFRNDAKQMLDNIFVSHKAKNKVVTPNTIVTKKKRKAGKETKAEEKRTFLTPRGALSNETVYRKICNYETKEITINSKLTYEIALTIAKKKEREAVLERLAQHNNNPTTAFKNYNKNPIMLQTSVGEKPLMSVKIVNYKELFVKRSEINEKLDIKRVLDAKVRARLTDRLKEYNNDPKATFANLEENPIWLNEEKGIALKHVTTIERVVGLPIRPKRNINGEIMKDEQGQPLKSHYVATGGNHHVAIYEDEEGKWHEKVVSFNEAASRAIQKLPIIDKDFNKELGWVFQFTMKQNEMFVFPDKESGFDPLAIDLKDPANKSLISKHLYRVQKLSSCYYHFRHHLETNVEDSKELQGITWKSIRTTNNLCGIIKVRINHIGQIIDIGEY

SEQ ID NO: 22593 - protein, 1422 aa, unidentified
  REGION 1..1422: note = Cas Enzyme sequence
MTQKVLGLDLGTNSIGSAVRNLDLSDDLQWQLEFFSSDIFRSSVNKESNGREYSLAAQRSAHRRSRGLNEVRRRRLWATLNLLIKHGFCPMSSESLMRWCTYDKRKGLFREYPIDDKDFNAWILLDFNGDGRPNYSSPYQLRRELVTRQFDFEQPIERYKLGRALYHIAQHRGFKSSKGETLSQQETNSKPSSTDEIPDVAGAMKASEEKLSKGLSTYMKEHNLLTVGAAFAQLEDEGVRVRNNNDYRAIRSQFQHEIETIFKFQQGLSVESELYERLISEKKNVGTIFYKRPLRSQRGNVGKCTLERSKPRCAIGHPLFEKFRAWTLINNIKVGMSVDTLDEQLPMKLRLDLYNECFLAFVRTEFKFEDIRKYLEKRLGIHFSYNDKTINYKDSTSVAGCPITARFRKMLGEEWESFCVEGQKERQAHSKNNISFHRVSYSIEDIWHFCYDAEEPEAVLAFAQETLRLERKKAEELVRIWSAMPQGYAMLSQKAIRNINKILMLGLKYSDAVILAKVPELVDVSDEELLSIAKDYYLVEAQVNYDKRINSIVNGLIAKYKSVSEEYRFADHNYEYLLDESDEKDIIRQIESSLGARRWSLMDANEQTDILQKVREKYQSFFRSHDRKFVESPKLGDSFENYLIKKFPMVEGEQWKKLYHPSQIAIYRPVPANKDRTALRLGNPDIGAIKNPTVLRVLNTLRKRVNQLLDDGVISPDETRVVVETARELNDANRKWALDTYNRIRHDENEKIKKILEEFYPKRDGISTDDIDKARYVIDQREVDYFTGSKTYNKDIKKYKFWLEQGGQCMYTGRTINLSNLFDPNAFDIEHTIPESLSFDSSDMNLTLCDAHYNRFIKKNHIPTDMPNYDKAITIDGKEYPAITSQLQRWVERVERLNRNVEYWKGQARRAQNKDRKDQCMREMHLWKMELEYWKKKLERFTVTEVTDGFKNSQLVDTRVITRHAVLYLKSIFPHVDVQRGDVTAKFRKILGIQSVDEKKDRSLHSHHAIDATTLTIIPVSAKRDRMLELFAKIEEINKMLSFSGSEDRTGLKQELEGLKNKLQMEVKVCRIGHNVSEIGTFINDNIIVNHHIKNQALTPVRRRLRKKGYIVGGVDNPRWQTGDALRGEIHKASYYGAITQFAKDDEGKVLMKEGRPQVNPTIKFVIRRELKYKKSAADSGFASWDDLGKAIVDKELFALMKEQFPEETSFKDACEQGVYMIKKGKNGMPDKKLYRIRHIRCNTVQKNALKIKEQTYKSEKEYKRYFYAAVGDLYAMCCYTNGKIREFRIYSLYDVSSHRKSDIEDIPEFITDKKGNRLMLDYKLHTGDMILLYKDNPEELYDLDNVELSKLLYKINGFENDGLRIRMVNHLIVKEAMGESIKDYAKLPDIIRCGVKTIKFLIMGENRDFVIKNGKIIFNHR

SEQ ID NO: 22594 - protein, 1197 aa, unidentified
  REGION 1..1197: note = Cas Enzyme sequence
MTKKVLGLDLGVGSIGWCLITLDNDEKPQSILGMGSRIVPLSTDDATEFTQGKAITKNKMRTVARTIRKGMDRYQLRREALKKVLRERAMLPDEALIRLPLLELWELRARAATPGEQLSLTELGRVLLHINQKRGYKHAKADEAAEAEAEGKSKKEKEGYVAQVKGRYQALKEKGQTIGQHFAEELRANQQTAPRGVYYTYRIKEQVYPREAYLEEYDRIIAVQREFYPEILTDELIQRIRDRIIFYQRPLKSCKQLVSTCEFEKKERVVQVKRINKEDVEELVERTITIGPKVAPKSSPIFQVCKVWESIQNIRLYYPDGTERKLEQEEKQKLFDYLQKNDKLSLTALRKVLKIKPKEKLWCDKLLEKGIAGNTTTAILRKALKGYEQYEGLLRFDLTIRDGHKADEDGVIRPIVDESYQNEPLYKLWHILYSIEDRADMYRALVGQLGIKEEDLKNGLMDALYKIDFVKQGYGNKSAKFICKLLPHLQEGKMYSEAAEAAGVRHSDSMTAQERDERSLLEEIPLLQKNALRQPVVEKILNQMINLVNALKREHGEIDEVRVELARELKMSREEREETTKSNNAREKENKAIAERIKGYDITPTKSRIQKYRLWEESVESCIYCGKHVDLVQFLRGEEIEVEHIIPRSILFDDSMSNKVCACRSCNQEKGNRFAMEYIQSKGWEQDYIKRVDSLFYAKKDKKISYSKRQRLLMLPKDLPEDFIERHLRLSQYISREAQGILRKGIRLVSASEGGVTAKLRQLWGYDNILRDLNLERYRSMGETEVVTVEHRDGQRTDERIKDWSKRKDHRHHAIDALVVACTRQSYIQRLNRVNAEADREEMDTFIKEQQQEHKLSKKEKLSLLEHWLIRQPHFTTGEVMKHVEGILVSLRPGKRTISRGRNIYKRSGKTDVQRGVLIPRGALSEETIYGTIQLHRKDRSGTELVRSYVKRIPLSKVNPSNVKNIVDSQIREVVQAALLSLSGRKGVLPAELYLDDSRRRVVRSVRCLVRSSTLIPIRFNADGEAIGFTKPGLNHHVALYRDGVGNIRESVVPFFRAVERARYGIPMIISDPSKAREQARANPNLPESVLLSLPEEDWQLEEFLQGDEMFLLGMTDEAIDRAMETKDYTTLGRHLYRVQNLAAGDYVFRYHLETTLDGKDNVGDIPSSYRIASQKRYRELNPRKVKIDLLGRISLV

SEQ ID NO: 22595 - protein, 1438 aa, unidentified
  REGION 1..1438: note = Cas Enzyme sequence
MKHILGLDLGSNSIGWALIEQDFDNKQGKIIGLGSRIIPIEQKILSKFKEGTTVSQTAKRTEFRGIRRLRERHLLRRERLHRVLHLLGFLPAHYDAQIDFTKRFGKFIGDSEPKLAYNNEGFIFLESFNEMVEDFKKHQPQLFYIKSNGEESKIPYDWTIYYLRKKALYEKISKEELAWIILNFNQKRGYYQLREEEEEKENDFEIISSKVLSVVKKEKDKKDKKYNKYWYDIILENGLVYTAAFYNDFVYSWVDQEREFVAKRTLLKNGSEKVELSYLPTFDEIAKMNKQQQDKFYQKIKIKTENSIGNKPVGAYIYDHLLQNPNQKIKGKLVRTIERKFYKEELKAILEKQVALQPELFTEELFVDCVRELYKNNEIHQNSLSSKDFVHLFLNDIIFYQRPLRSQKSNISSCSLEYRFCIDKETKQRRKTYLKVISKSNPYYQEFRVLQWLSNLKIYRKEDDKDVTSEFISSIEDKETLYEFLMSEKEVSNKSVLEFLLMKSLRETYPFAKETELKKELKKEITKYRWNYVYEEGNDSKKYPMNETGYEIKKRLKEVKNIPDNFLTKDIEYQLWHIIYSVTDKYEYEKALMKFAQKHNLDAESFVEHFKKIKPYPSDYGAFSEKAIKKLLPLMRFGKYWNYSDISEPVQARISDIINGVDNESIKTIVREKAEKFQLSQEADFQGLPLWMAQYVVYGIHSEAADIQRWTSPSDLEEYLKGFKQHSLRNPIVEQVVTETLRVVKDIWEYYGKGEENFFDEIHIELGRELKKTAEERNRMTREINENEETNLKVKKELQQIFENKSAENVRPYSPIQQEKYRLWLEQKKSPYTGQTIPLSKLFTDEYQIEHVIPQSRFFDDSLSNKVICESAVNAEKGALLGLEFIKEHRGKIVDIGLNKKVRILNEKEYKELVNELFANNRGKKAKLLMEEIPEKMVERQLNDTRYISKFISQILSNIVRSPQEDNGVNSKNIIPCTGKITAALKQDWGLNDVWNDLILPRFERMNNLTQTELFTTYSEKYQKKIPTVPLEHAKGFQKKRIDHRHHAMDALVVACATRSHINYMNNQHALDKHKAKEEKQNARIDLRTVLCEKKYNDNAEDKYNWTFKKPWNTFTQDVRSALEMVVVSFKQNLRVINKATNYYEKWVEEKGKKVKKKVKQEGINWAIRKPLHEQTVSGKITLERVKVGKGKILTATRKSIDSSFTEKTIASITDTGIQKILLNYLAYKGSSELAFSPEGLEELNKNIYLYNDGKPHKPIYKVRSYEKGSGRFVLGERGAKSKKYVQGAPNLYFGVYQSKGKRSYATIPLAEVIERQKQGLISVPELNEKGEKLLFSLSPNDLVYVPMEGEDTESIDFTNLSKEQRERVYNVNDFSSTCYFTPNRIAKAICPKEVDMQRKGDELSGSYDTKTASMRSIQIKEFCIKLKIDRLGNIFKA

SEQ ID NO: 22596 - protein, 1424 aa, unidentified
  REGION 1..1424: note = Cas Enzyme sequence
MTQKIFGIDLGTNSIGTSVRNTDLGNNLVDQLEFFSSDIFKASVNREGVNGGKGREYSLASSRSAKRRKRRLYEHRRYKLWATLDLLIKNKLCPMTPESLEQWRTYDKKKKLFRQYPIEDKAFHSWIILDFNSDGKPDYSSPYQLRRELVSVQLDFNQAIDRYKLGRALYHIAQHRGFKSSKGETIAEQEKQEDDSKKNKNNALIEEHVDATKASEEKHSKGLSTYMQEHNLKTVGAAFAQLEDEGIRIRNNSEYKAIRSQHQDEIKEIFKFQKGLSSQTQLLDTLISEKQGIGTIFYKRPLCSQRGNVGKCTLEPNKPRCPIGHPLFEKFRAWTFINNIKAKSPDADSAEPLPMDMRINIYNKLFLSRVKADFKFEEIRNFIEKQWRVALSKDDKTINYRDDTSVAGCPITARMIKVLGEDWEKFQVLGTKERQTQGKSNNALHQVCYTAEDIWHFCYDAEDSGKVRTFAEETLGWDEKKAAELVRLWSAIPQGYAMLSQKAIRNINRMLLFGLKYSDAVLLAKLPDILELSDEDIQTIIKKAQQLEEVVNEEKRIGNIVNSLIANYKAESLEDRFADHNYEYQLDESDEREIIKHIENNIGKQRWELMDADEQISILEGVRSGYQAFFARHKRTFVELPQLGKRLVELLSKEYPSVTEKQWERLYHPSQIAIYRPILLDKSDEKRRLGNPDIGAIKNPTVMRTLNNLRRRVNQLLDDGVLMPDETRVVVETARDLNNANEKWALEKYQEIRRKENDKIKKILEEFYPQFSNITSTDVDKARYVIEQCEEDNYTSKKESGTYSKNIQKYKYWLEQGGQCLYTGRIISLSNLFDSNAFDLEHTIPASVSFDNSDQNMTLCEAHYNRFIKKNNIPTAMPNYEEDVTIDGKLYTAIKPRLEKWKKRIKRLSKNVEYWRTQARRTQMKDHKDECTKEKLLWQMELQYWRDKLQRFTILEVTDGFKNSQLVDTRIITRHAILYLKSVFKKVEVQRGSTTAEFRKILGVQSVEEKKDRTLHSHHAIDATILTTIPTAGKRERILELFYKVQEKERRLKNCSGDAYEGLKQDLEGLQAKLKKEVVDCKLGGEISQLGNFINDKIIINHCVKDQTLTPSHKRLRRRGRIVGGKEHPIWQTGDTLRGEIHAESYYGAITQYAKDKEGNVLFNNGKPKIDPTLWYVIRRKPTYFNDWKPLEKDIVDKNLFKLMKEQFPDGTSFEDACKQGFYMIKKGKDKKHNIKTHRIRHVRCYAVKTALKIKEQIYKSTKDYKQYFYAAVGDLYTMCCYTNGKNKEYRIYSLYDIAQHRKSGIEDIPEFITDEKGNRLELSYKLRKGDMVLLYEKTPEELYDMDPVNLKRRLYKVNSFENDGLRIIMTNHMVTNKEKGESIKAYSQIPQTVRCAVNTLKFLIMGDHNDFIIKSNNIIFNHR

SEQ ID NO: 22597 - protein, 1210 aa, unidentified
  REGION 1..1210: note = Cas Enzyme sequence
MKLVLGLDLGVGSVGWALIFMTDSGEPIKILALGERIVSMDPDNSKEFSAGATCTLNQKKAKAKSARKGYSRYVQRREALTAELRHIGMMPDETLIKLPVLDLWQLRANAATEGKKLSLAEIGRVLYHINQRRGYKHSKSDVSSDNKQKGYVKAVNERYCMIQERQQTIGQYFALKLKETAVTTEKGAFYTFRIKDQVFPREAYEEEFDRIIECQKKFYPELLTEKVINKLRNYIIFYQRHGKSCKHLVSVCDFERKPYKDENGKVFYNGPKVAAKSNPLYQIEKIWEEVNNISLRNKKGEELEITLAQKRELFNYLNTHEILRLTVLYKILGISKRDGWSANDAVKRGLKGNTTFVQLQKALQGVEDCEELLRFQLNNMPTAVCDEMTGELLQIVNPDCIRQPLYRLWHAIYSLKDKRQLKDTLRKNFKIEDDETIDLLYNIDFTKDGYGNKSVKVIRRLLPYLQAGLKYNEACEYIGINHSNSLTKEENAQRVLLEKLPQIGKNELRQPIVEKILNQMINVVNAIIAKYGRPDTIRVELARELKQSKEERKLMSDGIAAREREKKRDGKILKEEGIHPTKNRLERYRLWKETGERCLYCGNGINLNEFLCGGEVETEHIIPKALLFDNSYSNKTCSCRECNRKKGRRTAYEYVSSLGEERFEVYLNVVKMLYDEGKISKKKMDWLLMKSEDIPQDFINRDLRQTQYISRKAMELLQKVCYDVTATSGHVTSFIRHIWGYDTILHKLNFNRYKQGGLTEVVQFEHRGGKHEREVISGWSKRLDHRHHAIDALVIAMTKQSVIQRLNTLNTCRDEMYQEVESEKKEWRDDYSLLEQWLRELKHFSVEEVQMAIAKTLVSYKVNKKITSPGTRAVYSKRKKKVVQRGILIPRGVLHEDSVYGKIKIQGDLDPVYVIKYKLGVGAMGFVFTGKETYQETIKFNKKTGLDEVKVKDDIGNTLMSIVDGNIRNRIKQHLNIGFPEGEDYRNNPKKALENLKDLDDHPLYADDACKIPIRSVRCRTGLSAVVPLRYNREGQAIGFVKTGNNHHVAIYRDRQGAYHEIILTFWQAVNRKRYGIPVIIEQPSALWESISNGFQQQIPPSILETFPEPEWTFIVSMQKNESFILGMEEDDYQRAMDEKDHVTLGNNLYVVQNISSMVYRFCLSTTTIFDSQKMNKPDKRFLNIQSFQAFFDKNPHKIKIDLLGEIVNN

SEQ ID NO: 22598 - protein, 1422 aa, unidentified
  REGION 1..1422: note = Cas Enzyme sequence
MTQKVLGLDLGTNSIGSSVRNLDLSDDLKGQLEFFSSDIFRSSVNKESNGREYSLAAQRSAHSRSRGLNEARRRKLWATLDLLIKYGFCPMSPDSLMRWRTYDKQRGLFREYPIDDKDFNAWILLDFDGDGKPDYSSPYQLRRELVTRQFDFDQPIERYKLGRALYHIAQHRGFKSSKGETLLQKETNSKQSLTDETTDVAGEMKASEEKLSKGLSTYMKENNLLTVGAAFAQLEDEGVRVRNNNDYRAIRSQFQREIETIFKFQQGLSVENELYERLVSEKKNIGTIFYKRPLRSQRGNVGKCTLERTKPRCAIGHPLFEKFRAWTLINNIKIRMSEEEQAEQLPMKLRFELYNDCFLAFVRAEFKFEDIRKYLEKRLCVHFSYNDKTINYKDSTSVAGCSITARFRKLLGEDWESFHVDGQKQRQAHGKNNASFHTVSYTVDDIWHFCYDAEEPEAVLSFAQETLKWEKKKADELVRIWSAIPQGYAMLSQKAIRNINKMLILGMKYSDAVLLAKVPEIVEIADEEILSVTEYYHRVEAQVGHEKQINNIVNALIAKYKSTSEEYRFADHNYDYQLDESDEKDIIKQIESNIGTRKWSLLDADEQTDILQKVRDKYQNFFRSHERKFVESPKLGECFEEYLMKKFPMIEGEQWKKLYHPSQIAIYRPVSAGKDRSALRLGNPDIGAIKNPTVLRVLNTLRKRVNQLLDDGVISPDETRVVVETARELNDANRKWALDTYNRIRHDENEKIKKILKEFYPKRDTISTDDIDKARYVIDQREVDYFTESKTYNKDIKKYKFWLEQGGQCMYTGRTINLSNLFDPNAFDIEHTIPESLSFDSSDMNQTLCDAHYNRFIKKNHIPADMPNYDKAVIIDGKEYPAITSQLQRWVDRVERLNRNVEYWKGQARRAQNKDRKDQCMREMHLWGMELEYWKKKLERFTVIEVTDGFKNSQLVDTRVITRHAVLYLKSIFPHVDVQRGDVTAKFRKILGIQSVDEKKDRSLHSHHAIDATTLTIIPSSAKRERMLELFAKIEEINKMLSFSGSEDRTGLKQELEGLKNKLQIEVKACRIGHNVSEIGTFINDNIIVNHHIKNQALTPVRRRLRKKGHIVGGVDSPRWQTGDALRGEIHKASYYGAITQFAKDDEGKVLMKEGRPQVNPTIKFVIRRELKYKKSAADSGFASWDDLGKAIVDKELFALMKGQFPAETSFKDACEQGIYMIKKGKNGEADKKLYRIRHIRCNTVQKNALKIKEQTYKSEKEYKRYFYAAVGDLYAMCCYTNGKIREFRIYSLYDVSCHRKSDIEDIPEFITDKKGNRLMLDYKLHTGDMILLYKDTPEELYDLDNVNLSKLLYKINGFENDGLRIRMVNHLVVKEAMGESVKDYAKLPDIIRCGIKTIKFLIMGENRDFVIKNGKIIFNHR

SEQ ID NO: 22599 - protein, 1135 aa, unidentified
  REGION 1..1135: note = Cas Enzyme sequence
MKTILGLDLGPNSIGWAKVEVDDEGNYLRNIKLGSRIIPMTQDMLGDFDKGVKVSQTATRTDFRGNRRLIERHLLRRERLHRVLHALKFLPKHYEDAIGWDRNEPATYGKFVNNSEPKLAWERQEDGSMRFLFMESFNEMVADFAQHQPSLVSDGKKIPLDWTIYYLRKKALTQPIKKEELAWILLNFNQKRGYYQLRGEEEEDNLTKRKEYYKLKVVGVEADGAPKGGKTWYNIHLENGWTARCQSKIPLDDWVGKVKEYIVTTEYEDDGKTPKCDKEGKVKRSFKSPEKDDWQLIKTRTEKFIDDSNKTVGAFIYDHLLEKPFDKIRGKYIRTIERKYYKNELREILREQAKYHEGLHSLEALKICAEELYKNNQQHQEYLLKKDMTFLLLNDLIFYQRPLKSKKSLIADCPYEVYKYDDKLTGKKGQKKIKCIAKSNPYYQEFRLWQFIANLRLFSVTDGKEVTAEYLKTEEDYVRLFSFLNDRKDIKQETFLRSFLKLKKVPIGSEKIYPIRWNYIEDANKSYPCNATRHELLLAFDRADIPRELLDVEGREYRLWHLLYSIEAKEETESALRKLKANKAFGDLNIDDAFVNSFLKIKPFEKEYGAYSEKAIKKLLAVMRRGSLWKEADICEATKQNIAKILQNDIDEKLKKKIEAAVSSFNKLSDFQGLPTWLACYVVYGRHSEAAQIQCWQSPEDLKTYINKFKQHSLRNPIVEQCLLETLRTVYDIWKDAGQIDEIHIELGRNMKSTAEQRARRTNEFLRNENTNLRIKNLLVELKNDDKIENVRPYSPSQQEILRIYEEGALQELSKEDEMFEDISKISKMAQPSPTELSRYKLWLEQKYRSPYTGRIIPLSKLFTTAYQIEHIIPQSRYFDDSFNNKVICESEVNSLKDNMLGYEFIKECGGQTVPCTLLGDVKIFTKEEYKDFVTKHYIDNTYKRDKLLLEDIPQEFSARQLNDSRYISKMVQTVLSNIVRAENEQEATSKFVVSCNGAITDRLKKDWGLNDVWNSIVCPRFKRLNEITKTNAFGHWEDKAGKHVFQTTVPLELQRGFSKKRIDHRHHAMDALVIACASRNIVNYLNNESANSPEKREDLRKKLCDEKRKIRKPWKTFTQDAREALSDVVVSFKN

SEQ ID NO: 22600 - protein, 998 aa, unidentified
  REGION 1..998: note = Cas Enzyme sequence
TQLDLFNEPSQTIFSLDMECKQLLFDELNLKGDLKSDKVLKLLGYSPQEWEINYNQLEGNRTQKSLYEAYLKIIEIEGYEVKDILQIKSTKDDWSLDESPLSASEIIERVKAIFQTLGICTKILYFDPLLPVKEFEQQYSYQLWHLLYSYESDDSTSGNETLYQILEKKYAFKREHARILANVALQDDYGSLSTKAIRKIYPYIKENQYSKACELAGYKHSKLSLTTEELEARELKNIIPLLKKNALRNPVVEKILNQMINVVNALIEKNSERDAKGEITKYFHFDEIRIELARELKKNAQERDEMTQNINKAKLEHQKISEILQKEFGIKNPTKSDIIRYRLYQELEHNGYKELYTNTYIAPDVLFSKNIDIEHIIPKARVFDDSFSNKTLAFKDFNIKKGEYTAFDYITSLNNEEKLNQYLARVENAYKTKSISLTKYKNLLKKASEIGDGFINRDLRDTQYIAKKAKEILFQVTKNVLSTSGNITDRLREDWGLVNVMKELNMPKYQSLGLTEVEERKDGNKVTVIKDWTKRNDHRHHAMDALTVAFTKPSYIQYLNHLNARKDENNKNYSVILAIEKKETIKVPTNNGKNKRVFIEPIPNFRQVAKKHLEEIFISHKAKNKVVTKNINKPAGTDKQQITLTPRGQLHKESIYGKYQYYVNKEEKVGVKFDERTITKVSNPLYREALLKRLQANDNDPKKAFTGKNALSKNPIYLDEAKTKTLPEKVNLTYLEEDFSIRKDISPDNFKDLKSIEKVIDQGVKRILIKRLQAYDNDPKKAFVDLEKNPIWLNKEKGIAIKRVTISGVSNAQPLHIGKDHLGKTTLNKEGKEVPVDYVSTGNNHHVAIYRDKEGNLQEQIVSFFEAVVRAQQGLPIIDKTYKQAEGWQFMFTMKQNEMFVFPNEATGFNPAEIDLLDPKNKKLISPNLFRVQTISVVKYGNSVVRDFKFRHHLEATLQDDKILQGITFQQIKSLEPLRNIVKVRINHLGDIVNIGEY

SEQ ID NO: 22601 - protein, 1492 aa, unidentified
  REGION 1..1492: note = Cas Enzyme sequence
MKHILGLDLGSNSIGWALIEQDFDNKQGKILGLGSRIIPMDQGILGEFERGNKVSQTAERTGFRGIRRLRERHLLRRERLHRVLHLLGFLPAHYDAQIDFTKRFGKFIGDSEPKLAYNNEGFIFLESFNEMVEDFKKHQPQLFYIKSNGEESKIPYDWTIYYLRKKALQEKISKEELAWIILNFNQKRGYYQLRGEEEEKSTKNVEFYSLEITDVIADTPNNKGEIWYSIHLENGWVYRRASKISLEDWKGKVRDFIVTTELNEDGSIKLDKEGKEKRSFRAPNEDDWNLLKKKTEQNITLSGKTVGEYIYDHLLQNPNQKIKGKLVRTIERKFYKEELKAILEKQVALQPELFTEELFVDCVRELYKNNEIHQNSLSSKDFVHLFLNDIIFYQRPLRSQKSNISSCSLEYRFCIDKETKQRRKTYLKVISKSNPYYQEFRVLQWLSNLKIYRKKDDKDVTSEFISSIEDKETLYEFLMSEKEVSNKSVLEFLLMKSLREIYPFAKETELKKELKKEITKYRWNYVYEEENDNKKYPMNETGYEIRKKLKEVKNIPDNFLTKDIEYQLWHIIYSVTDKYEYEKALMKFAQKHNLDAESFVEHFKKIKPYPSDYGAFSEKAIKKLLPLMRFGKYWNYSNISEPVQARISDIINGVDNESIKTIVREKAEKYQLNQEADFQGLSLWLAQYIVYGIHSEAADIQRWTSPSDLEEYLKGFKQHSLRNPIVEQVVTETLRVVKDIWEYYGKGEQNFFKEIHIELGRELKKTAEERKRMTREINENEETNLKVKKELQQLFENKSAENVRPYSPIQQEKYKLWQEQKERSPYTGQPIPLSKLFTDEYQIEHVIPQSRFFDDSLSNKVICEAAVNAQKGAQLGLEFIKRHGGEILDIGLNKKVTVLNEKEYKELVNELFANNRGKKAKLLMEEIPEKMVERQLNDTRYISKFISQILSNIVRSPQEDDGVNSKNIIPCTGKITAALKQDWGLNDVWNDLILPRFERMNNLTQTELFTTYSEKYQKKIPTVPLEHAKGFQKKRIDHRHHALDALVVACATRSHINYMNNQHALDKHKAKEERQNARIDLRTVLCEKKYNDNAEDKYNWTFKKPWNTFTQDVRSALEMVVVSFKQNLRVINKATNYYEKWVEEKGKKVKKKVKQEGINWAIRKPLHDDLPYGEIKYQTNYLKISENISKRKFIIDEFIRNQVERIYVENHSKNNLTQKYLKEYPVIDKKGKKVISTDFRIEVIKYRKRKPISILSDRNSRTGITTIEKMLQAINKIADNVLKKELLLHLEQNNNDIDKAFAVEGIERFNSERKTPVYRLPFIEDGEKKIKLGSKGKYVETAKGTNLFFGVYQGKEKRSYATIPLDEVIERQKQGLISVPELNEKGEKLLFSLSPNDLVYVPMEGEDTENIDFTNLSKEQRERIYKTVSFTGNECFFVKSSISSLIKNYDAKTKIGELGSLNKLEITIPDHIRIKEFCIKLKIDRLGNISKA

SEQ ID NO: 22602 - protein, 1443 aa, unidentified
  REGION 1..1443: note = Cas Enzyme sequence
MSFLSLFKKILTKFGIDCKNISMKHILGLDLGSNSIGWALIEQDFDNKQGKILGLGSRIIPMDQGILGEFERGNKVSQTAERTGFRGVRRLRERHLLRRERLHRVLHLLGFLPPHYDAQIDFTKRFGKFIGDSEPKLAYNNEGFIFLESFNEMVEDFKKHQPQLFYIKSNGEESKIPYDWTIYYLRKKALQEKISKEELAWIILNFNQKRGYYQLRGEEEEKSTKNVEFYSLEITDVIADTPNNKGEIWYSIHLENGWVYRRASKISLEDWKGKVRDFIVTTELNEDGSVKLDKEGKEKRSFRAPSEDDWNLIKKKTEQNIVFSGKTVGEYIYDHLLQNPNQKIKGKLVRTIERKFYKEELKAILEKQVALQPELFTEELFVDCVRELYKNNEIHQNSLSSKDFVHLFLNDIIFYQRPLRSQKSNISSCSLEYRFCIDKETKQRRKTYLKVISKSNPYYQEFRVLQWLSNLKIYRKEDDKDVTSEFISSIEDKETLYEFLMSEKEVSNKSILEFLLMKSLRETYPFAKETELKKELKKEITKYRWNYVYEEENDSKKYPMNETGYEIKKRLKEVKNIPDNFLTRDIEYQLWHIIYSVTDKYEYEKALMKFAQKHNLDAESFVENFKRIKPYPSDYGAFSEKAIKKLLPLMRFGKYWNYSDISEPVQVRISDIINGVDNENIKTIVREKAEKYQLSQEVDFQGLPLWLAQYIVYGIHSEAADIQHWTSPSDLEEYLKGFKQHSLRNPIVEQVVTETLRVVKDIWEYYGKGEQNFFDEIHIELGRELKKTAEERNRMTREINENEETNLKVKKELQQIFENKSAENVRPYSPIQQEKYRLWLEQEKESPYTGQPIPLSKLFTDEYQIEHVIPQSRFFDDSLSNKVICEAAVNAEKGAQLGLEFIKKHGGEIIEIGLNKKVTILNEKEYKELVNKHFANNRAKKAKMLMEEIPEKMVERQLNDTRYISKFISQILSNIVRSPQEDDGVNSKNIIPYTGKITAALKQDWGLNDVWNDLILPRFERMNNLTQTELFTTYSEKYQKKIPTVPLEHAKGFQKKRIDHRHHALDALVVACATRSHINYMNNKHALDKHKAKEEKQNARIDLRTVLCEKKYNDNAEDKYNWTFKKPWNTFTQDVRSALEMIVVSFKQNLRVINKATNYYEKWVEEKGKMVKKKVKQEGINWAIRKPLHKETISGKITLERVKVGKGKILTATRKSIDSSFTEKTIASITDTGIQKILLNYLAHKGSPELAFSPEGLEEMNKNIAKYNDGKDHQPIYKVRIFEEGSKFPLGEIGTKSQKYVEAAKGTNLFFGIYQGEEKRSYATILLDEVIERQKQGLTSVPELNEKGEKLLFSLSPNDLVYVPVEGEDTQSIDYANLSKEQRERIYKIVSFTKNRLYGIPNIVAVSIVNKMEYTQLNKIEFLKEKETCIKLKIDRLGNISKA

SEQ ID NO: 22603 - protein, 929 aa, unidentified
  REGION 1..929: note = Cas Enzyme sequence
MNETRYELKRYLEKVANLPDDFLSSEVEYLLWHLIYSVTDKVAYEKGLKKFAQKHHLDEDSFVESFKKFKPYPSEYGSFSEKAIRKLLPLMRFGSYWNFNHIDKNTQKRIDDLITGVENEEIRTILREKAEKYQLEKETDFQDLPLWLAQYIVYNRHAEASSLEKWTSVNDLETYLNEFKQHSLRNPIVEQVVTETLRVVRDIWQQYGQGQADFFDEIHIELGRELKKTAKEREELSKQNQKNEDTNLRIKALLAELGEDSAIENVRPYSLMQQELLKLYEEGVFSSSMEIEDDIKKIHKKATPSKAELQRYKLWLEQKYKSPYTGQIISLKRLFTEDYEIEHIIPQSRYYDDSLSNKVICESAVNKLKDNQLGLEFIKNHYGEKVHAAGKEVSIFTEEQYKEFVKNHYANNSGKMKKLLLEDIPEKMVARQMNDTRYISKYISEILSKIVRADERDEGVNSKNVILCTGKITTALKQDWGVNDVWNDLILPRFERMNDLTQTSLFTSYNEKYQKYLPTVPMEYSNGFQKKRIDHRHHAMDAIIIACATREHINYINNQHALEKGKDKKEKQEKRDTLRERLCIKKYNNKSEGNYNWVFKKPWDTFTQEVRAALEGIVVSFKQNLRVINKATNYYERWVEENGKYIKKMVKQEGTNWAIRKPLHEETVSGKITLEREKVSKGKILTATRKAIDSTFTEKVIEGITDTGIQKILLNYLKFKKSPEIAFSPEGLEELNKNISLYNDGKPHKPIRKVRIFEQGSKFPLGEVGNKSQKYVEAAKSTNLYFGVYQGKDKRSFATIPLNEVIERQKQGLSSVPEYNEKGDPLLFSLSPNDLVYVSIEGEIIEDIDFRNLSNEQKERIYKAASFTRNECFFIKSSIASLIKNYDAKTKIGELGSQNKLEVTICKGIRIKEVCIKLKVDRLGNISKA

SEQ ID NO: 22604 - protein, 1169 aa, unidentified
  REGION 1..1169: note = Cas Enzyme sequence
MGSRVVPLTNLGDDKAFSKGEAFTANQKRTARRTMRRGFARYQLRRYRLRRELEKVGMLPDAALIQLPLLELWELRERAATAGRRLTLPELGRVLCHINQKRGYRHVKSDAAAIVGDEGEKKKKDSNSAYLAGIRANDEKLQDEHKTVGQYFAEQLRRSQSESPTGGISYRIKDQIFSRQRYIDEYDQIMAAQRVYYPDILTDAFIRMLRDEVIFMQRPLKSCKHLVSLCEFEKQEKVMCVQQDDGKGGRQLVERRVKFGPKVAPKSSPLFQLCRIYEAVNNIRLTRPDGSPRDITPEERAKIVAHLQSSASLSFAALKKLLKEKALIADQLTTKSGLKGNSTRVALAAALQSYPQYHHLLDMELEMRMMTVQLTDEETGEVTEREVSVVTDSYVRQPLYRLWHILYSIEERDAMRRALITQLGMTEEDLDGGLLDQLYRLDFVKPGYGNKSAKFICKLLPQLQQGLGYSEACAAVGYRHSNSPTSEEIAERTLLEKIPLLQRNELRQPLVEKILNQMINLVNALKAEYGVDEVRVELARELKMSREERERMTRQNGQRKEANDKVAERIRQCGLYPTKPHIQKYMLWEEAGKVCLYCGRSIEEEQCLNGDDMEVEHIIPKSVLYDDSYGNKTCACHECNQTKGNRTALEYIRAKGWETKYMERINDLLKEKKISYSKHQRLRWLKEDIPSDFLERQLRLTQYISRQAMAILQQGIRRVSASEGGVTARLRSLWGYGKILHTLNLDRYDSMGETERVSREGEATEELRIKDWSKRMDHRHHAIDALVVASTRQGYIQRLNRVSSESEREAMSGEIEMQKVTKTDKLSLLERWLTQRPHFSVRAVSDKVAEILISYRPGKRVVTRGRNIYRKKTADGQEVTCVQRGVLVPRGELMEASLYGKILSQGRERIVKRYPLHDLKGEVVDPRLRELIAEYNQEITSKVKAKGAPLYLDAAEKQEVRSVRCYVDKPSVAKAIPIRFDECGRAITFVKSGSNHHLAIYRTPKGELVESIVSFWDAVNRARYGLPLIIKYPRKAMEQVIQREDIPESVLSLLPPADYEFVEVFQQNEMAVVGLPEEELRRAVDMQDYRTLSEHLYCLKGISSKDYEFHYHLDTDDPDETDSSKKKKKRVRNTSGRIPRIYRIRGIGSLQKKNVHKVRVDLLGRISLL

SEQ ID NO: 22605 - protein, 1458 aa, unidentified
  REGION 1..1458: note = Cas Enzyme sequence
MKRILGLDLGSNSIGWGLIEQDFKQKEGKIIASGSRIIPMDQGILGDFEKGNTVSQTAERTFYRSTRKLRQRHLLRRERLHRVLHILGFLPTHYDKQIDFSKRYGKFIGDIEPKIAYNEGKFLFMDSFQEMLSDFKSHQPTLFYTKRNGEESKIPYDWTIYYLRKKALSQKISKEELAWIILNFNQKRGYYQLRGEDEAENPNKEIAYYSLIVTDVTAEAPNKKGEIWYSIQLENGWVYRRTSKIPLDDWKGKVRDFIVTTELEEDGSIKRDKEGKEKRSFRAPSEDDWNLLKKKTEQDINTSKKTVGTYIYDHLLQNPNEKIKGKLVRTIERKYYKEELKAILEKQIALQPELFTDQLFADCIRELYSKNEAQQRNLAARDFVHLFVEDIIFYQRPLRSQKSTIANCSLESRSYIDKDSHTRKGAPLKVCPKSNPYYQEFRVLQWLQNLKIYEIDSDQEVTHQFIKTLEDKQQLFDFLMNQKEIDCEELLKYFLNQTYPNAKEKALKSELKKWKDTYRWNYVYDIGEKSSKKYPMNETRYDLKRYLEKVANLPDDFLSSEVEYLLWHLIYSVTDKVSYEKGLKKFAQKHHLDEDSFVESFKKFKPYPSEYGSFSEKAIRKLLPLMRFGAYWDFNHIDKNTQKRIEDLITGVENEEIRTILREKAEKYQLEKETDFQDLPLWLAQYVVYNRHAEASSLEKWTSVNDLETYLNEFKQHSLRNPIVEQVVTETLRVVRDIWQQYGQGQANFFNEIHIELGRELKKTAKEREDLSKQNQKNEDTNLRIRALLAELGEDSTIENVRPYSLMQQELLKLYEEGVFSSSIEIEDDIEKIHKKATPSKAELQRYKLWLEQKYKSPYTGQIISLKRLFTEDYEIEHIIPQSRYYDDSLSNKVICESVVNKTPYKDRQLGLEFIKNQGGRIVKELSKENKTIKIFTEEQYRTFIKEHYSNNPAKTKKLLLEDIPEKMVARQMNDTRYISKYISEILSKIVREDERDEGVNSKNVILCTGNITSALKQDWGVNDVWNDLILPRFERMNSLTQSTLFTTYNERYQKYLPTVPMEYSKGFQKKRIDHRHHAMDAIIIACTTREHINYINNQHALEKGKDKKEKQEERDKVRERLCIKKYNNRSEGNYSWIFKKPWDTFTQDVRVALEGIVVSFKQNLRVINKATNYYEHWVEENDKLIKKMVKQEGTNWAIRKPLHKETVSGKITLQREKVSGGKILTATRKVIDSTFTEKVIEGITDTGIQKILLNYLKFKKSPEIAFSPEGIEELNKNIALYNDGKPHKPIYKVRIFEQGSKFPLGEVGNKSQKYVEAAKGTNLYFGVYQGKDKRSFATIPLNEVIERQKQGLPSVPEYNEKGDPLLFSLSPYDLVYVPIEGEIIEDIDFQHLSKEQKERIYKIVSFTKGRIYGIPNKVAVSIVNKMEYTQLNKIEFIKEKEVCIKLKVDRLGNICKA

SEQ ID NO: 22606 - protein, 1457 aa, unidentified
  REGION 1..1457: note = Cas Enzyme sequence
MKRILGLDLGSNSIGWALVQQNFKNKQGQIMAAGSRIIPMDQSILGDFEKGNAVSQTAERTAYRSTRRLRERHLLRRERLHRVLHILGFLPPHYDLQIDFSKRYGKFIDDAEPKIAYNKGNFIFMDSFNEMIEDFRKHQPQLFYKKSNGEESKIPYDWTIYYLRKKALSQKITQQELAWLILHFNQKRGYYQLRGEEEIENSNKEIAFHSLKVVEVEVEAPNKKGEIWYTIRLENGWIYRRSSKIPLDDWRGKTRDFIVTTDLNDDGTIKVDKEGKEKRSFRAPDENDWNLLKKKTEHDIDFSGKTVGAYIYDHLLQNPNQKIKGKLVRTIERKYYKDELKAILAKQIALQPEFFTENLLADCIRELYRKNQTQQQTLLSKDFLHLFVEDIIFYQRLLRSQKSTIANCALEKRSYIDKETNERKDVPIKVCAKSNPYYQEFRVLQWLQNLRIYEIETDLEVTSEFIETAEDYEALFNFLMSQKEIDNEGVLKYFLLAKNPQIKDKAAKSELKKWLTIYRWNYVYDRADNSSKKYPMNETGYELQRYLQKVEGLPANFLTFDITYQLWHLLYSVKDKVEFEKALKKFANKNQLDETSFVESFKNFKPYPNEYGSFSEKAIKKLLPLMRFGNHWDFSCIDVSTQKRIDDLINGVANDEIRTIIREKAEKFQLNNEISFQGLPLWLAQYIVYNRHAEATNIEKWTSVSDLEAYLEDFKQHSLRNPIVEQVVTETLRVVRDIWQQYGGGQANFFDEIHIELGRELKNTSKERERLSKQNQENENTNLRIKKLLAELKEDASIQNVRSYSPVQHDLLKIYEEGVFSSTDEIDEDIQKIRKKAEPNKTELQRYKLWLEQKYRSPYTGEVISLTKLFTEEYEIEHIIPQSRYYDDSLSNKVICESAVNKLKTNQLGLEFIQNHHGEKVRIAGNKEVTIFTEEQYKEFVKKHYAGNSAKQQKLFLNEIPEKMVARQMNDTRYISKYISEILSRIVRSDEKDEGVNSKNVIPCTGKITTALKQDWGLNDIWNELILPRFERMNQLTQTQLFTSYNDRLQKNLPTVPIKYSQGFQKKCIDHRHHAMDALVIACATREHINYMNNQHALDKSKDKKEKQQSRIDLRTILCEKKNNNWQFKKPWNTFTQEAKEALEHIVVSFKQNLRVINKATNYYEKWEEKNGVLVKKKVKQEGTNWAIRKPLHKETVSGKIVLDRKIGKDKILTATRKAVDITFTEKIISSITDTGIQKILLNYLKYKGSPEVAFSAEGLEELNKNITQYNDGKKHQPIYKVRIFEEGSKFPLGETGAKATKYVEAAKGTNLFFGVYQGKEKHTYATIPLNEVIERQKQGLPSVPERNEKGEPLLFSLSPNDLVYVPMVGEATETIDFSNLSKEQKERIYKTVSFTGNECHFVKSTIASLIKSYDAKSKIGELGSLNKLEVTISGDSRIKEVCIKLKVDRLGNITKA

SEQ ID NO: 22607 - protein, 1187 aa, unidentified
  REGION 1..1187: note = Cas Enzyme sequence
MGKKVLGLDLGVGSIGWCLITLDKDEKPQSILGMGSRIVPLSADDATEFTQGKAITKNKMRTVARTIRKGMDRYQLRREALKKVLREHGMLPDEALIKLPLLELWELRARAATPGEQLSLTELGRVLLHINQKRGYKHAKADEAAEAETESKAKKEKESYVAQVKGRYQALKEKGQTIGQHFAGELRANQQTAPRGTYYTYRIKKQVYPREAYIEEYDRIMAAQRVFYPEFLTDALIGRIRDRIIFYQRPLKSCKQLVSFCEFEKKEKVIRVKHTNKEGVEEFVEKTITIGPKVAPKSSPIFQVCKVWESIHNIRLYHPDGTERKLEQEEKQKLFDYLQKNDKLSLTVLRKELKIKPKDKLWCDKLLVNGIGGNTTATILRKALKGYEQYEGLLRFNLTTRDSHEVDEDGVIRPIIDESYQNEPLYKLWHILYSIEDREEMRSALIGQLGIKAEDLDSGLMDALYKIDFVKQGYGNKSAKFICKLLPHLQEGKMYSEAAEAAGIRHSDSMTAQERDERSLLDEIPLLQKNALRQPVVEKILNQMINLVNALKREHGEIDEVRVELARELKMSREEREKTTKNNSSREKENKAIAEKIKEYSITPTKSRIQKYRLWQESAESCIYCGRRVDVVQFLRGEETEVEHIIPRSILFDDSMSNKVCACRSCNQEKGNRFAMEYIQSKGWEQDYIERVDSLFQGKTISYSKRQRLLMLPKDLPEDFIERHLRLSQYISREAQGILRKGIRLVSASEGGVTAKLRQLWGYDNILRDLNLDRYRSMGETEVVTVEHRDGQRTDERIKDWSKRKDHRHHAIDALVVACTRQSYIQRLNRVNAEADRQEMDAFIKEQQQVHKLSKKEKLSLLEHWLIRQPHFTTKEVMKHVEEILISFRPGKRTVTRGRNVYKRSGKTDVQRDVLIPRGALSEETIYGVISVDGENKVVCKYPLQGLKAKDVDYIVDKALQEVVRERISQYGEKQAFAEPLYLDEAKTQEVRSVRCFTGKDQSKLVPLRYNVEGEAVGFVAPGNNHHLALYKDDDGNVVESIVTFWQAVERARYGLPIVVVNPREVMEKALAIPELPESVLKALPASNLRLMEVLRMNDMFLIGMKNGEIQTAIEGEDYPTLSRHLYRVQKLATHDYVFRYHLETTLDGKDNVGEIPKSYRAQSLKAYVKLNPRKVKIDLLGRVSLV

SEQ ID NO: 22608 - protein, 1529 aa, unidentified
  REGION 1..1529: note = Cas Enzyme sequence
MKNILGLDLGTNSVGWALISVDENGNLVKDIRLGSRIIPMSQDVLGKFDSGVTVSQTAERTEYRSHRRLLERALLRRERLHRVLHLLGFLPEHYAACIGWDRNDNATYGKFLPETEPKLAWRKADDGSYRFVFMQSFEEMLDDFKASQPSLVANGKRIPLDWTLYYLRTKALTKPIAKEELAWILLNFNQKRGYYQLRGEEEEETPSKCVEYHELKVVKVEATDEGKGGNVWYNVLLENGWVYRRQSKYSLDKWLGQTLPFIVTTDLEADGVTPKCDKEGNVKRSFRSPKEDDWTLVKKRTEDHLEKSGLTVGAFIYQHLLANPSDKVRGQLVRTIDRKYYKRELQAIIAKQMEFHPELRDAELLKACAEDLYRNNEAHRAQLLAKDFKHLLVEDVLFYQRPLKSKKSLVANCPYETRQYINKETGEIKDVNVKCIAKSNPYFQEFRLWQWISNLRLLRQADGQDVTAAYIQGNEDKERLFDMLNSQGEIKQEHILRDFLKLKKPKGGEFPLRWNYVDDKIYPANETRHAMNKAIKGMAVDKEEKETLVQLLDQPAVAYMLWNLLYSITDRNELASALRRFALTHGGSSVDAFVESFLKVKPFKKEYGAYSEKATKKLLQVMRLGKYWCGDELPEPANRTKGNNQAVYDEMANRGICKQTLQNISNIIEENIDERLMGALFNPERPLTELSHFQGLSVSDACYVVYARHSEVAEIVKWKDAGELNTFINNFKQHSMRNPIVEQCVLETLRTVRDVWEQEGQIDEIHVELGRNMKRTAEQRARDTQAIQRNENTNMRISLLLTELKNDPSISDVRPYSPSQRELLKIYEEGALENLTNQDEDIAKISRLAQPSASELRRYKLWLDQKYVSPYTGRPIPLAKLFTPAYEIEHIIPQSRYFDNSFSNKVICEAEVNKLKDNLLGMEFIKKFGGKTKGILDEEAYKLHVTTNYAHNPAKRSKLLMEDLPTDFNSRQLNDTRYISKTVMALLSNVVREEGERETRSKHVVVCTGGVTDTLKKDWGLQEVWHNLVYPRFIRLNNLTGTKDFGHWESKDGKAVFQTGLPLDLQRGFVKKRIDHRHHAMDALVIACASPDIVNYLNNQSAANPHARQDLQRLLCDRKREIRKPWPTFTQDAHTALKDLVVSFKNTVRVVNKASNMYLRYDKDGKKKRFKQEGEGLKAIRKPMHKETYYGEVNLIRKEMLPLKRALEDVNALVDKELRASINGLLRDGFNLQQVLANFKAKDFKFNKRDIKKVEVYVSSTKSTPMVATRKSLDTSFNAKRIADITDTGIQKILLNYLKANDNSPEQAFTPEGIAYLNEHIAEYNNGKRHQPILKVRVSEIKGAKFAVGQTGSKKTKFVEAQSGTNLYFAIYEGNEGKRHFETIALNVAAERLKMGQTPVPETNDAGQHLKFYLSPNDLVYVPTDEDLAAARPSIDKRRIYKMVSATDRECYFLPFEVASIIADRVEFEAKNKVGRVIDALEYKDESKENSEDENKEENKPSAGNKIMIKDVCWKLEVDRLGNITKIVR

SEQ ID NO: 22609 - protein, 1150 aa, unidentified
  REGION 1..1150: note = Cas Enzyme sequence
MDKKEQDKYYKKIKIKTENSIGNKTVGCYIYDHILQNPNEKIKGKLVRTIERKYYKEELKAILEKQVALQPELFTDQLFADCIRELYSKNEAQQRNLAARDFVHLFVEDIIFYQRSLRRQKSTLANCSLESRSYIDKDSHTRKEAPLKVCPKSNPYYQEFRVLQWLQNLKIYEIDTDQEVTHEFIKTLEDKQQLFDFLMNQKEIDCEELLKYFLNQTYPNAREKALKSELKKWKDTYRWNYVYDIGEKSSKKYPMNETRYELKRHLEKVANLPDDFLSSEVEYLLWHLIYSVKDKVAYEKGLKKFAQKHHLDKDSFVESFKKFKPYPSEYGSFSEKAIRKLLPLMRFGAYWDFNHIDKNTQKRIEDLITGVENEEIRTILREKAEKYQLEKETDFQDLPLWLAQYIVYNRHAEASSLEKWTSVNDLETYLNEFKQYSLRNPIVEQVVMETLRVVRDIWQQYGQGQASFFDEIHIELGRELKKTAKEREKLSKQNQKNEDINLSIKEKLKELKKYNTRAYSITHQEKYKLWLEQKHISPYTGQIISPENLFTDNYEIEHIIPQSRFFDDSLSNKVVCESIVNKAPYKDRQLGLEFIKNQGGRIVKELSTENKTIKIFTEEQYRTFIKEHYSNNPEKTKKLLLEEIPEKMVARQMNDTCYISKFISEILSKIVRSDEQDEGVHSKNVILCTGKITSILRQDWGLNDIWDNLILPRFERMNNLLQKEKFTIYSIEKQKKIPVVPINDQFKSFQKKRIDHRHHALDAIIIACVTGEHINYINNQHALEKGKDKKEKQKEHDKLREKLCIKKYNKGSEENYSWIFKKPWDTFTQEVQAALEGIVVSFKQNLRVINKATNYYERWVEENGKYIKKMVKQEGTNWAIRKPLHEETISGKIYLDREKITKNDILTATRKTVDSSFDEKRIKKITDTGIQKILLNYLKYKGSPEIAFSPEGLEELNKNLSIYNDGKPHKPIYKVRIYEKGSGRFALGEKGRKYKKYVQGAPNLYFGIYQGANKRSFATIPLNEVIERQKQGRSSVPEYNEKGDPLLFSLSPNDLVYVPIEGENIENIDFQNFSKEQKERIYNVNDFSSTCYFTPNRIAKAIFPKEVDLQRKGDKLSGSYDTKTASLEGIQIKEVCIKLKVDRLGNISKA

SEQ ID NO: 22610 - protein, 1547 aa, unidentified
  REGION 1..1547: note = Cas Enzyme sequence
MMKRILGLDLGTNSIGWALIEILEDGTKRIIKLGSRIIPMSKEVLGNFEKGVTKSQTAERTDDRGARRLYARSRTRRERLLRILNILDYLPDNFSNQIDFDEKKGQFKKGSEPLIAYSYKVDENGNRIFNFMDSYEEMEKEFRMRYPNLPKLNKKGKPYRLPYDWTIYYLRKKGLTQKISNQELAWILLNFNQKRGYYQERDEKEVEIDENKKVELIVLKAEQFKITDQKVDDKPLYEIIFDNGWIYDNTTTKPEIWEGVDIEFIVTSTINKDGSIKRTFKKVDSEKDWEAIKRKTEQDLRKSQKGAYKTFVGKYIYETLLENPKQKIRGELIRTIDRDFYFDELEVILRTQLKFREEQWGDKNLYKRTVQELYAHNIAHQENLLKQKDTFIHLFLKDILFYHRPLKSQTGLVSRCSFEKRVYVDSLTGDKHEVKIKGMPKSHPLFQEFRIWQLAHNLRIQKREAEENGKLKINLDVTNQFIRNKSDLAKFFNFLYNKKDINQKQLVAYFIRDKKEQSLYRWNFTDDNKIKLDCNQTRPALLSKLSKEDKRKFDEQFELKLWHIIYSVTDKSEYDTAIGRFGENNSLSEETTEKLKRAPMLKKEYATYSEKAVKKLLGLMRCGCHWSEVSIHPSSIQIIDKLLTGEFDERIENQVREKAIKLDKIEHFQGLPLWLASYIVYGKHSEVDATQWKSSKDLAEYINTFKQHSLRNPIVEQVLLESLRVTLDIWEYYAEKFGLQFEEYIDEKTGKKVKSYDRLFSKIHIEIGRELKNPKKVREKMTNSINKNKDTNQRIRKLLFELKNVKEVENVIPNSRTHFDKLKIFEQTVLSNYSEKELKAEKLDSKLTVEKFIKKNQPTFSEILKYKLWLEQKYISPYTGKIIPLTQLFTSKYEIEHVIPQSKFLDNSFNNKIICETEVNTLKDNRTAYTFIQEFQEAEVPLSGGGSVSILKKETYEKLVKENYDGRKKENLLRETMPQKMSERQMNDMRYISKAALKIYSNIVREEGERESTVKNVLPVAGKVTAKLRREWGLNQVWSGLVEERFKRLNRLICGEENENNGLFGTWVDDGGYFRTEVPLEIREDFDIKRIDHRHHALDALIIASLTSNHVNYINNEHTKSDLKRYDLGLTLRDTKQIEKTHPLTEKKTKHTVLGNYKKPWKTFTQDAKSALQEIVISFKQNLRAINKAQNYNWRYKDNAGKVVYTKNGVPKKQWIEQVSSKTDKTSNNKTNWAIRKPLHEETVYGILENGEYKGDLVKREPLNISFDEKKIETVIDPVVRSILLRHIKQDKFKGQIDEKGNIFKPEEVAFSAKGIKDLNENILTLNNGVFHHPIKKARLRFPKGKKFSIKKWEDKEGNLLRETKFVKSATGTNLYFCIYEKEGKRKYYVPPFEEILEIQKLEQDLPLEQKKNVPEQHPDFHDFKLKFYLQPNDLVYIPVKNDEDMGFENLGRQQLENIYLFKDGSGTTANFIPMFSADVIYNISNKENREKFADAYNLDKGELIKNEYGLGSPQLKNQNSVDGIQVKSVCWKLQTDRLGNITKVLK

SEQ ID NO: 22611 - protein, 1520 aa, unidentified
  REGION 1..1520: note = Cas Enzyme sequence
MKKIVGLDLGTNSIGWALINAYIDEYNKEHLYGIEACGSRIIPMDAAILGNFDKGNSISQTADRTSYRGIRRLRERHLLRRERLHRILDLLGFLPKHYSDSLNRYGKFLNDIECKLPWVKDETGSYKFIFQESFKEMLADFTEHHPKLIANNKKVPYDWTIYYLRKKALTQKISKEELAWILLNFNQKRGYYQLRGEEEETPNKLVEYYSLKVEKVEDSGEKKGKDTWYNVHLENGMIYRRTSNIPLDWEGKTKEFIVTTDLEADGSPKKDKEGNIKRSFRAPKDDDWTLIKKKTEADIDKIKMTVGAYIYDTLLQKPDQKIRGKLVRTIERKYYKNELYQILKTQSEFHEELRDKQLYIACLNELYPNNEPRRNSISTRDFCHLFIEDIIFYQRPLKSKKSLIDNCPYEENRYIDKESGEIKHASIKCIAKSHPLYQEFRLWQFIVNLRIYRKETDVDVTQELLPTEADYVTLFEWLNEKKEIDQKAFFKYPPFGFKKTTSNYRWNYVEDKPYPCNETHAQIIARLGKAHIPKAFLSKEKEETLWHILYSIEDKQEIEKALHSFANKNNLSEEFIEQFKNFPPFKKEYGSYSAKAIKKLLPLMRMGKYWSIENIDNGTRIRINKIIDGEYDENIRERVRQKAINLTDITHFRALPLWLACYLVYDRHSEVKDIVKWKTPKDIDLYLKSFKQHSLRNPIVEQVITETLRTVRDIWQQVGHIDEIHIELGREMKNPADKRARMSQQMIKNENTNLRIKALLTEFLNPEFGIENVRPYSPSQQDLLRIYEEGVLNSILELPEDIGIILGKFNQTDTLKRPTRSEILRYKLWLEQKYRSPYTGEMIPLSKLFTPAYEIEHIIPQSRYFDDSLSNKVICESEINKLKDRSLGYEFIKNHHGEKVELAFDKPVEVLSVEAYEKLVHESYSHNRSKMKKLLMEDIPDQFIERQLNDSRYISKVVKSLLSNIVREENEQEAISKNVIPCTGGITDRLKKDWGINDVWNKIVLPRFIRLNELTESTRFTSINTNNTMIPSMPLELQKGFNKKRIDHRHHAMDAIIIACANRNIVNYLNNVSASKNTKITRRDLQTLLCHKDKTDNNGNYKWVIDKPWETFTQDTLTALQKITVSFKQNLRVINKTTNHYQHYENGKKIVSNQSKGDSWAIRKSMHKETVHGEVNLRMIKTVSFNEALKKPQAIVEMDLKKKILAMLELGYDTKRIKNYFEENKDTWQDINPSKIKVYYFTKETKDRYFAVRKPIDTSFDKKKIKESITDTGIQQIMLRHLETKDNDPTLAFSPDGIDEMNRNILILNKGKKHQPIYKVRVYEKAEKFTVGQKGNKRTKFVEAAKGTNLFFAIYETEEIDKDTKKVIRKRSYSTIPLNVVIERQKQGLSSAPEDENGNLPKYILSPNDLVYVPTQEEINKGEVVMPIDRDRIYKMVDSSGITANFIPASTANLIFALPKATAEIYCNGENCIQNEYGIGSPQSKNQKAITGEMVKEICFPIKVDRLGNIIQVGSCILTN

SEQ ID NO: 22612 - protein, 1061 aa, unidentified
  REGION 1..1061: note = Cas Enzyme sequence
MRTILGLDLGTNSIGWAKVCVDDNGNYAREIKLGSRIIPMSQDTLSNFDKGVTESPTAERTTFRGIRRIRERALQRRERLHRVLHTIEFLPKHYDEAIRWNREEATTYGKFLNHEETKLAWEKQEDGSMRFLFMDSFKEMMADFAKHQPGMVADGKKIPLDWTLYYLRKKALTQAIKKEELAWILLNFNQKRGYYQLRGEEDEENPTKCEEFYELKVISVEAAEEGKGGNTWYNVKLENGWIYRRQSKTELNDWVGKIRQFIVTTEYEKDGVTVKKDKNGEVKRSFRAPSEDDWGLRKKRTEKSLENSGKTVGAFIYDHILSKPTDKIRGNFIRTIERKFYKKELEAILREQSKHHKELSGHNSLVDCIKELYPNNKPHQDSLMKKDMSYLLITDLIFYQRPLKSKKSLIADCPYEYYEYVVKETGEIKRQGIKCIAKSNPYYQEFRLWQFLINLRLFDRTDDKEVTSEYLSSKDDYSKLFEYLNDKKDINQETLLKDFFKQKKIKMGMEKEYPIRWNYIEDKEKKYPCNETRHELLAALDKAGIDHSWLDDKEQYYRLWHLLYSVESKEEAQGALRKLNNNDDFVNAFLKVKPFKKEYGAYSEKAIKKLLAVMRIGDFWDEANICEQTKNRIHNIINGEIDEKIKERMGRSFTQISDFQGLPEWLSCYVVYGRHSEASDNQRWRTPEDLMAYINGFKQHSLRNPIVEQCILETLRTVHDIWKEAGHIDEIHVELGRNMKSTSEQRAQNSKRILQNENTNLRIKSLLMELKNVKEVENVRPYSPMQQEILRIYEEGALQELTTEDAQYPEIYKISQMAQPSAKELLKYRLWLEQKYCSPYTGKPISLSKLFTSAYQIEHIIPQSRYFDDSFTNKVICEAEVNQLKSNMLGYEFIKKHGGEIVYCTKIGDVKILDEKEYHNFVTEHYANNRNKKEKLLLEDIPQEFLNRQLNDSRYISKKVTSILSNIVRGEDEQEVNSKFVVPCTGGITDRLKQDWGLHDVWNRLVYPRFERLNQLTQSEAFGRWENKEGKQVFQTSVPLELQRGFSKNELTIVIMQWMHL

SEQ ID NO: 22613 - protein, 1479 aa, unidentified
  REGION 1..1479: note = Cas Enzyme sequence
MCKYFYIKKFITFVLSKNIIPMKHILGLDLGSNSIGWALVQQDFENKQGKIIATGSRIIPMDQGILGDFERGNTVSQTAERTTYRSTRRLRERHLLRRERLHRVLHILGFLPPHYDAQIDFTKRYGKFIDNAEPKIAYNNGNFIFMNSFNEMIEDFKKHQPQLFYKKSNGEESKIPYDWTIYYLRKKALSQKITQQELAWLILHFNQKRGYYQLRGEEETENPNKEVAFHTLKVVEVEAEAPNKKGEIWYTVRLENGWIYRRTSKIPLDDWKGKTRDFIVTTDLNDDGTIKVDKEGKEKRSFRAPDENDWNLLKKKTEHDIDFSGKPVGTYIYDHLLQNPNQKIKGKLVRTIERKYYKDELKAILAKQIALQPELFTETLLADCIRELYRKNETQQQNLLSKDFLHLFVEDIIFYQRPLRSKKSTIANCTLEKRSYIDKETNERKDTPIKVCAKSNPYYQEFRVLQWLQNLRIYEIETDREVTVEFIETAQDNEALFNFLMSQKEIDNESLLKYFLLAKNPQIKDKTAKIELKKWITTYRWNYVYDVADNSSKKYPMNETGYDLQRYLQKVEGLPANFLTFDITYRLWHLLYSVKDKVEFEKALKKFAQEYQLDEASFVDSFKNFKPYPNEYGSFSEKAIKKLLPLMRFGNHWNFNRIDVSTQKRIDDLINGVANDEIRTIIREKAEKYQLNSETCFQGLPLWLAQYVVYNRHAEATDIEKWTSVNDLEAYLEDFKQHSLRNPIVEQVITETLRVVRDIWQRYGGGQANFFDEIHIELGRELKKTAEERKQLSNRNQENENTNLRIKKLLAELKEDASIQNVRPYSPVQQELLKIYEEGVFSATDEVEEDIQKIRKKAEPTTPEIQRYKLWLEQKYKSPYTGEVISLTKLFTEEYEIEHIIPQSRYYDDSLSNKVICESAVNKLKTNQLGLEFIQNHHGEKVRITGNKEVTIFTEEQYKEFVKKHYANNSAKQQKLLLNEIPEKMVARQLNDTRYISKYISEILSKIVRSDEKDEGVNSKNVIPCTGKITTALKQDWGLNDVWNELILPRFERMNQLTQTQLFTSYNDRLQKNLPTVPIEYSQGFQKKRIDHRHHAMDALVIACATREHINYMNNQHALDKNKDKKEKQQSRIDLRAILCEKKNNNWQFKKPWATFTQEAKESLEHIVVSFKQNLRVINKATNYYEKWEEKNGVLVKKKVKQEGTNWAIRKPLHKETISGKIVLDRKIGKDKILTATRKAVDITFTEKIISSITDTGIQKILLNYLKYKGSPEVAFSAEGLEELNKNIAQYNNGKEHQPIYKVRIFEEGSKFPLGETGAKATKYVEAAKGTNLFFGVYQGKGKRTYATIPLNEVIERQKQGLPSVPERNEKGEPLLFTLSPNDLVYVPMEGEIAETIDFNNLSKEQKERIYKTVSFTGNECHFVKSTIASLIKSYDAKSKIGELGSLNKLEVTISGDNSRIKEVCIKLKVDRLGNITKA

SEQ ID NO: 22614 - protein, 1455 aa, unidentified
  REGION 1..1455: note = Cas Enzyme sequence
MARVLGLDLGTASIGYSLRDTDKGTNITEQLVRFGSIIFQKGVGNSKTGEFSYAAERTKHRASRRLYQARRYRIWETLATLIEFGFCPLSIEDLDRWRVYDKARNLKRRYPVDAVNFEQWVRLDFDGDGKSDYSSPYQLREELAIVQLDFSQEINRFKLGRALYHIAQRRGFKSSKGETLKEQEDAVKDGIANEMSLESVSLKKSEERKSKDLASYMEENALHTVGCAFAQLEREGVRVRASKYQAVRSQYKEEIKYIFEFQNGLDIDGDFFKRIYSDRKDGCIFYKRPLRSQKGLVGKCTLEPAKSRCPISHPEFEKFRAFAFINNIQYRRTTEDEWLNLTAEQKLKLYNDKFLQAKPSFKFEAIRKWIEKEIGLLQDYHLSKEKRTINYSDRTNVTGCPISGRMKALLGEKWEEYKQQSDKIRKNKNGKEHVVSYMMEDIWHVCFSYDDEEAVSEFAKSLKFDDKQVKQFLNLWIAIPQGYAMLSLKAIRNINRFLVPKRDNPLYKGHIYTEAALLGKMPEILGEKQWADNEKSILGAINGWINQNREEKRILNIVNNLISAYKSLEYAEQFAYKNIEYQLDDSDKEDIEKYTIEAFGQKSWEKETQEMKDKVLKDVERMYQQFFFTSKRDYFRLPKLGDTIKLYLSSNFPEFYCANSFVESQTGLQCRCAACKKLNKLYHPSMVEFYKPANEQEFEYDGVMLSKKLLANPVIGAFKNPMVMRTLHQLRNLINYFIKEGLVEEDTRIVVETARDLNDANMRWAIEEYQREREKENKAILEAIKELKGEEKNNDDIDKARLLIEQNPEYLFNKDRYEVESGDDTNNKKKKAVGKATDFLYKKDVAKYRLWLEQGMQCIYTGKTISISELFDENKTDFEHTIPRSKSFDSSLANLTVCDAYYNRHIKKNCIPTELPNYEEIEHRLQPWKKKVEQLKNNVEFWRQKSKQAQTKDVKDKAIRQKHLWQMELDYWQDKLSRFTMTEVTSGFKHSQLNDTRLITKYAYHYLKSVFSKVEVQKGLVTADFRKMLGVQSADEKKDRNKHSHHAIDATILSLIPVAAKRDKILELFYKIQEEKKLNFNTEYWEKELQKEIRSCQIGNISSLPDYIEENILINHISKDQTLVPAKRKMRTRGKVIWQRDEDGQICMDKDGYKMPKHWIKGDCIRGKLHGDSFYGAIKQSKKKGEKDYLTSYEDISYVIRRELKYKKTPTDKGFKDLDDLHLSIVDEGLFNIIKQQCDGKSFKEACDDGFYMLNRDGYKVNKIRHIRCYTSVKKPLSIKRQSYLSDKEYKQSYYAEVGDLYAMCKYCNADKTKVRYEVINLFDITENRRYGYNIAEVLEDDKKKEKYYLVAVLQAGKQVILYKNDDELESIIEMSNDKLSDRLYVISGFESPYRIILKKHICAKSDSELGRGESIKSFNELPDKIRQSVNATNYLLEDIDFYISPDGLITFKND

SEQ ID NO: 22615 - protein, 1381 aa, unidentified
  REGION 1..1381: note = Cas Enzyme sequence
MKRILGLDLGTASVGWAVVNEAENSEEQSSITALGSRVVLLSADEKNNFLTGKSVSATATRTAKRGARRNLQRYKLRREWLKDALVSAGIINENTCLNDSNSKELFATYISRAKAVTEQIALEDFAKVLFMINKKRGYKSNRKTDNTESEDGQIIDGLDLAKKLKARNITPGQYLLELFKENKKDKAVFYKSDLQEEVNRIWAFQSQFYPEILDNTLLSAITNKSKKAVIGLFKGIKNVEIADVKTKERTEKALTWRSEALHKQLEIGEVAYAIAEVMGAISQSSARLALLSDNSKHLEFEGLTIGQYLLKLLRNNPNSSRKNINFYRKDYEDEFTIWKKQASFYPQLTGSLRSTVFNSIFMQRNLKSCKALLANCELEFAEKKITLPDGSCQTRTIYSKVCPKSSPYFQEFQIWQSLSNIRIIDKENTHLTKGQELSYDQKVMLLPELMIHSELKANKIIEILFGKKSNYTINMPSIKGNRTNETIFNALLEIVELTGHSIDNIVKTDANQQIEAVKNIFESLGYKTDFITFDSTIEGKDGLNQPYYKLWHLLYSYCGDNSKTGNEALIRKIEELTGLEKEEAKVLANCTFENDYASLSTKAIRKLLPHLQSNLDYSEACEAAGYNHSKRSRTKEDIKNKVYKDKLDLLPRNSLRNPIVEKILNQMIHVINQTSEAYGKPDEIRIEMAREIKKNKIQREKLANQLRQNTAELERIKDILRKDFKLSHISHNDILRYRLYEELSLNGYKTLYSNTYIERQQILDPTVTIEHIVPKALAFDDSFSNKTLEIQSVNGEKSNQTAFDFISKKYGSEALEQYINRVNNLFENGKISKTKRDNLLRKQEDIPSDFLNRDLRNTEYIAKKALEILEDYVPRVTPTIGEITKTLREDWQLVNIMRELNWEKYNSLGLTSFYYDRNGTKIGLIHNWTKRNDHRHHAMDALTIAFTKPSIIQYLNNLKSQNDKGSSIYAIQAKETYIDETRKRLIKPPYNIKQFRNDAKQMLDNIFVSHKAKNKVVTPNTIVTKKKRKAGKETKAEEKRTFLTPRGALSNETVYRKICNYETKEITINSKLTYEIALTIAKKKEREAVLERLAQHNNNPTTAFKNYNKNPIMLQTSVGEKPLISVKIVNYKELFVKRSEINEKLDIKRVLDAKVRARLTDRLKEYNNDPKAAFANLEENPIWLNEEKGIALKHVTTIERVVGLPIRPKRNINGEIMKDEQGQPLKSHYVATGGNHHVAIYEDEEGKWHEKVVSFNEAASRSIQKLPIIDKDFNKELGWVFQFTMKQNEMFVFPDKEAGFDPLAIDLKDPANKSLISKHLYRIQKISSGDYYFRHHLETNVEENKEVKGITWKRITSLSPLQGIIKVRINHIGQIIDIGEY

SEQ ID NO: 22616 - protein, 1349 aa, unidentified
  REGION 1..1349: note = Cas Enzyme sequence
LQKANLITSSSILAENGKNTTHSTWQLRAKAVTERVEKEEFARILLAINKKRGYKSSRKVKTEDEGQAIDGMAIAKRLYDENLTPGQLSLQLLQQNKKLLPDFYRSDLQKEFDLVWNFQKQFYPDILTNTFYKELQGKGKDATSKAFSKKYHFDIAENKGSKESVRLQAYQWRAEALSKELSKEEVAYVLTEINNNLNNASGYLGAISDRSKELYFNRQTVGQYLYAQLQENRHNSLKNKVFYRQDYLDEFERIWETQASFHKELTEELKKQIRDVVIFYQRKLKSQKGLISFCEFESKEIEIEKDGKTITKSIGARVVPKSSPLFQEFKIWQILNNVICKRKGIRKKKISAKTTQLDLLNESSQTIFSLDMECKQLLFDELNLKGDLKSDKVLKLLGYSPQEWEINYNQLEGNCTQKALYEAYLKIVEMEAHDVKDILQIKSAKDDWSLDESPLSASEIKEKVKDIFQALGICTKILYFDPLLPVKEFEEQDSYQLWHLLYSYESDDSTSGNETLYRILEKKYAFKREHARILANVALQDDYGNLSTKVIRKIYPYIKENQYSTACEKAGYKHSKLSLTKEELEARELKNIIPLLKKNALGNPVVEKILNQMINVVNALIEKNSERDAEGKITKYFHFDEIRIELARELKKNAQERYEMTQNINKAKSEHQKISEILQKEFGIKNPTKSDIIRYRLYQELEHNGYKELYTNARIDRDMLFSKNIEIEHIVPKARVFDDSFSNKTLTFQRINSDKGEYTAFDYITSLNSEEELNQYLTRVKNAYKTKSISPTKYKNLLKKASEIGDGFINRDLRDTQYIAKKAKEILFQVTKNVMSTSGSITDRLREDWGLVDVMKELNMPKYQSLGLTEVEERKDGNKVTVIKNWTKRNDHRHHAMDALTVAFTKPSYIQYLNHLNARKDENNKNYSVILAIEEKETIKVPTNNGKNKRVFIEPIPNFRQVAKKHLEEIFISHKAKNKVVTKNVNKPAGTDKQQITLTPRGQLHKETIYGKYQYYVNKEEKVGVKFNKETIAKVSNPLYREALLKRLQANGNDPKKAFTGKNALSKKPIYLDESKTKTLPEKVNLTYLEEDFSVRKKIVPKNPTSKEFVPNLKSIEKVVDEGVRNILIERLRVYNNDPEKAFVDLEKNPIWLNKEKGIAIKRVTISGVSNAQPLHIGKDHLGKTTLNKEGNEIPVDYVSTGNNHHVAIYRDKEGNLQEQIVSFFDAVVRAQQGLPIIDKTYKQAEGWQFLFTMKQNEMFVFPNATTGFNPAEIDLLDPKNKKLISPNLFRVQKIATKDYFFRHHLETNVETDNVLKNTTWKREGLSGLKDIVKVCINHLGDIVSIGEY

SEQ ID NO: 22617 - protein, 1190 aa, unidentified
  REGION 1..1190: note = Cas Enzyme sequence
MSKHVLGLDLGVGSIGWCLIALDAQGDPVEILGMGSRVVPLNNATDAADFSIGKAFTANQERTARRTMRRGFARYQLRRYRLRRELAKVGMLPDAALIQLPLLELWELRERAATAGRRLTLPELGRVLCHINQKRGYRHVKSDAAAIVGDEGEKKKDSNSAYLAGIRANDEKLQDEHKTVGQYFAEQLRQNQSESPTGGISYRIKDQIFSRQRYIDEYDQIMAAQRVHYPDILTDEFIRMLRDEVIFMQRPLKSCKHLVSLCEFEKQEKVMRVQQDDGKGGRQLVERRVKFGPKVAPKSSPLFQLCRIYEAVNNIRLTRPDGSPRDITPEERAKIVAHLQSSASLSFAALKKLLKEKALIADQLTTKSGLKGNSTRVALASALQPYPQYHHLLDMELETRMMTVQLTDEETGEVTEREVAVVTDSYVRQPLYHLWHILYSIEERDAMRRALIKQLGMKKEDLDGGLLDQLYRLDFVKPGYGNKSAKFICKLLPQLQQGLGYSEACAAVGYRHSNSPTSEEITERTLLEKIPLLQRNELRQPLVEKILNQMINLVNALKAEYGVDEVRVELARELKMSREERERMAEGNRRREKENKAIAEKIRECGLFPTKSRIRKYMLWEEAGEKCLYCGQILTLSQCLNGDDMEVEHIIPKSVLYDDSYGNKTCACRRCNKEKGNRTALEYIRAKGWEAEYMERINGLLDKKAISYSKHQRLRWLKEDIPSDFLERQLRLTQYISRQAMAILQQGIRRVSASEGGVTARLRSLWGYDDILHTLNLDRYDSMGETERVSREGEMTEKLRIKDWSKRKDHRHHAIDALVVASTRQGYIQRLNRVSSESEREAMSEEIEVQKATKADKLSLLERWLTQRPHLSVRAVSDKVAEILISYRPGKRVVTRGRNIYLRHGKKCVQSGLLVPRGPLSKETVYGQIMVNGEQQIVCKYDLHSLKAKDVDYVVDLALRKRLKELLAQHGGKEKEAFAGDVYMDEAGTQGPIRSVRCFTGLDRGKMKAVKYDEQGDAVGFVSPRNNHHLAIYRTPKGKLVESIVTFWDAVDRVRYGIPLVITHPREVMEQVLQRGDIPESVLSLLPPSDWVFVDSLQQDEMVVIGLSDEELQRALEEQDYRKLSEHLYRVQKLSSREYCFRYHLETSVADVTNSSGRIPKFHRIQSLKVYEEKNVRKVRVDLLGWISLL

SEQ ID NO: 22618 - protein, 915 aa, unidentified
  REGION 1..915: note = Cas Enzyme sequence
SCARAVAPKSSPLFQLCRIYEAVNNIRLTRPDGSPRDITPEERDKIVAHLQSSASLSFAALKKLLKEKAIIADQLTTKSGLKGNSTRVALAAALQPYPQYHHLLDMELETRIMTVQLTDEETGEVTEREVAVVTDSYVRQPLYRLWHILYSIEERDAMRRALIIQLGMKEEDLDGGLLDQLYRLDFVKPGYGNKSAKFICKLLPQLQQGLGYSEACAAVGYRHSNSPTSEEITERTLLDKIPLLQRNELRQPLVEKILNQMINLVNALKAEYGVDEVRVELARELKMSREERERMTIQNDKRKKANGKVAERIRQCGLYPTKPRIQKYMLWEEAGKVCMYCGRSIEEEQCLNGDDMEVEHIIPKSVLYDDSYGNKTCACHECNQTKGNRTALEYIRAEGREAEYMKRINDLLKEKKISYSKHQRLRWLKEDIPSDFLERQLRLTQYISRQAMAILQQGIRRVSASEGGVTARLRSLWGYGKILHTLNLDRYDSMGETERVSREGETTEELRIKDWSKRMDHRHHAIDALVVACTRQSYIQRLNRLSSEFGREDKKKEDQEAQEQQATETGRLSNLERWLTQRPHFSVRTVSDKVAEILISYRPGQRVVTRGRNIYRKKMADGREVSCVQRGVLVPRGELMEASLYGKIISQGRERIVKRYPLHDLKGEVVDLRLRELIAEYNQEITSKVKAKGAPLYLDAAEKQEVRSVRCYVTQPSVAKAIPIRFDERGRAITFVQSGSNHHLAIYRTPKGKLVESIVSFWDAVNRARYGLPLIIKYPRKAMEQVIQREDIPESVLSLLPPADYESVEVFQQNEMAVVGLPEEELRRAVDTQDYRTLSEHLYRLKRISSKDYEFHYHLDTDDPDETDSSKKKKKRVRNTSGRIPRIYRIRGVGSLQKKNVHKVCIDLLGRISLL

SEQ ID NO: 22619 - protein, 1382 aa, unidentified
  REGION 1..1382: note = Cas Enzyme sequence
MKRILGLDLGTASVGWAVVNEAENSEEQSSITALGSRVVLLSADEKNNFLTGKSVSATATRTAKRGARRNLQRYKLRREWLKDALISAGIINENTCLNDSNSKELFATYISRAKAVTEQIALEDFAKVLFIINKKRGYKSNRKTDNTESEDGQIIDGLDLAKKLKARNITPGQYLLELFKENKKNKAVFYRSDLQEEVNRIWAFQSQFYPEIFDNTLLSAITNKSKKAVIGLFKGIKNVEIADVKTKERTEKALTWRSEALHKQLEIGEVAYAIAEVMGAISQSSARLALLSDNSKHLEFEGLTIGQYLLKLLRNNPNSSLKNINFYRKDYEDEFNSIWNKQASFYPQLTESLRSTIFNSIFMQRNLKSCKALLANCELEFAEKKITLPDGSCQTRTIYSKVCPKSSPYFQEFQIWQILSNIRIIDKENTHLTKGQELSYDQKVMLLPELMIHSELKANKIIEILFGKKSNYTINMPSIKGNRTNETIFNALLEIVELTGHSIDNIVKTDANQQIEAVKNIFESLGYKTNFITFDSTIEGKDGLNQPYYKLWHLLYSYCGDNSKTGNEALIRKIEELTGLEKEEVKVLANCTFENDYASLSTKAIRKLLPHLQSNLDYSEACEAAGYNHSKRSRTKEDIKNKAYKDKLDLLPRNSLRNPIVEKILNQMIHVINQTSEAYGKPDEIRIEMAREIKKNKIQREKLANQLRQNTAELERIKDILRKDFKLSHISHNDILRYRLYEELSLNGYKTLYSNTYIERQQILDPTVTIEHIVPKALAFDDSFSNKTLEIQSVNGEKSNQTAFDFISKKYGSEALEQYINRVNNLFENGKISKTKRDNLLRKQEDIPSDFLNRDLRNTEYIAKKALEILEDYVPRVTPTIGEITKTLREDWQLVNIMRELNWEKYNSLGLTSFYYDRNGTKIGFIHNWTKRNDHRHHAMDALTIAFTKPSIIQYLNNLKSQNDKGSSIYAIQAKETYIDETRKRLIKPPYDIKQFRNDAKQMLDNIFVSHKAKNKVVTPNTIVTKKKRKAGKETKAEEKRTFLTPRGALSNETVYRKICNYETKEITINSKLTYEIALTIAKKKEREAVLDRLAQHKNNPTTAFKNYNKNPIMLQTSVGEKPLMSVKIVNYKELFVKRSEINEKLDIKRVLDAKVRARLTDRLKEYNNDPKAAFANLEENPIWLNEEKGIALKHVTTIERVVGLPIRPKRNINGEIMKDQLGQPLKSHYVATGGNHHVAIYEDEEGKWHEKVVSFNEATSRAIQKLPIIDKDFNKELGWVFQFTMKQNEMFVFPDKEAGFDPLAIDLKDPANKSLISKHLYRVQKISGGDYSFRHHIETNVEDNKELKGITWKRISSFASLKGAIKVRVDHIGQIIDVGEY

SEQ ID NO: 22620 - protein, 1158 aa, unidentified
  REGION 1..1158: note = Cas Enzyme sequence
MGSRVVPLNNATDAADFSIGKAFTASQERTARRTMRRGFARYQLRRYRLRRELEKVGMLPDAALIQLPLLELWELRERAATAGECLTLPELGRVLCHINQKRGYRHVKSDAAAIVGDEGEKKKDSNSAYLAGIRANDEKLQDEHKTVGQYFAEQLRQNQSESPTGGISYRIKDQIFSRQRYIDEYDQIMAAQRVYYPDILTDEFIQMLRDEVIFMQRPLKSCKHLVSLCEFEKQEKVMRVQQDDGKGGRQLVERKVKFGPKVAPKSSPLFQLCRIYEAVNNIRLTRPDGSPRDITPEERAKIVAHLQSSASLSFAALKKLLKEKVLIADQLTSKSGLKGNSTRVALAAALQPYPQYLHLLDMELETRMMTVQLTDEETGEVTEREVAVVTDSYVRQPLYRLWHILYSIEERDAMRRALITQLGMKAEDLDGGLLDQLYRLDFVKSGYGNKSAKFICKLLPQLQQGLGYSEACAAVGYRHSNSSTSEEITERTLLEKIPLLQRNELRQPLVEKILNQMINLVNALKAEYGVDEVRVELARELKMSREERERMTRQNGERKKANDKVAEKIQKCGLFPTKSRIRKYRLWEEAGRQCLYCGRSIGEKQCLNGDDMEVEHIIPKSVLYDDSYGNKTCACRRCNKEKGNRTALEYIRAKGWEDEYMERINGLLDKKAISYSKHQRLRWLKEDIPSDFLERQLRLTQYISRQAMAILQQGIRRVSASEGGVTARLRSLWGYDDILHTLNLDRYDSMGETERVSREGETTEKLRITNWSKRMDHRHHAIDALVVASTRQGYIQRLNRVSSESEREAMSGEIEVQKATKTDKLSLLERWLTQRPHLSVRAVSDKVAEILISYRPGKRVVTRGRNIYRKKTADGREVTCVQRGVLVPRGELMEASLYGKILSQGRERIVKRYSLHALKGEVVDPRLRELITTYNQELKSREKGAPIPPLCLDKDKRQEVRSVRCYVDKPSVSSAIPIRFDERGTAITFVQSGNNHHLAVYRTPQGVLEESIVSFWDAVDRARYGIPLVITHPREVMEQVLQRGDIPESVLKSLPPSDWMFVESLQQDEMVAIGLSDEELQSAIEAQDYRKLSEHLYRVQSLSSKYYVFRYHLETSVKDRKNTSGRIPKFHRVRNLPDYEKRNVRKVRVDLLGRISLL

SEQ ID NO: 22621 - protein, 1480 aa, unidentified
  REGION 1..1480: note = Cas Enzyme sequence
MRTILGLDLGTNSIGWAKVCINDDGNYVREIKLGSRIIPMSQDTLSNFDKGVTDSPTAARTGFRGIRRIRERVLQRRERLHRVLHVMGFLPSHYEKAIGWNREEATTYGKFLDNGEPKLAWERQEDGSMRFLFMDSFHEMMADFAKCQPGLVADGRKIPLDWTLYYLRKKALTQAIKKEELAWILLNFNQKRGYYQLRGEEDEEDPTKREEYYELKVVSVEAAEEGKGGNTWYNVTLENGWIYRRQSKIELNDWTGKIRQFIVTTEYEKDGITIKKDKNGEVKRSFRAPSEDDWGLRKKRTESRLEDSGKTVGEFIYDHILSDPADKIRGNFIRTIERKFYKKELEAILREQSKYHKELKDLNTLVNCIKELYPNNKAHQDSLMKKDMIYLLITDLIFYQRPLKSKKSLIADCPYEYYEYVIKETGEIKRQGIKCIAKSNPYYQEFRLWQFIINLRLFDRTNDKEITSEYLSSMEDYTKLFIYLNDRKEINQEILLKDFFKQKKVKMGMEKEFPIRWNYIEDKEKKYPCNETRHELLAALDKAGIDHSWLDDKERFYRLWHLLYSVESKEEAEGALRKLNDNEDFVNAFLKIKPFKKEYGAYSEKAIKKLLAVMRIGTQWNEDDICEQTRNRIQSIINGDIDEKIKERMGRTFSQLSDFQGLPEWLACYVVYGRHSETTDIQRWTKPENLMAYINGFKQHSLRNPIVEQCILETLRTVHDIWKEAGHINEIHIELGRSMKSTADQRARMSKSILQNENTNLRIKSLLMELKNAKEFENVRPYSPMQQEILRIYEEGALQELTKEDDQYPEISKISQMAQPSAKELLKYRLWLDQKYCSPYTGKPISLSKLFTSAYQIEHIIPQSRYFDDSFSNKVICEAEVNQLKSNMLGYEFIKKHSGEIVHCTMVGDVKILDAKEYYNFVTEHYANNRRKKEKLLLEDIPQEFLNRQMNDSRYISKKVMALLSNIVREEGEQEAKSKFVIACSGGITDRLKHDWGLIDVWNSIVYPRFERLNKLTNTENFGRWENKEGKQVFQTSLPLELQRGFSKKRIDHRHHAMDALVIACASNNIINYLNNESAKSQEKREDLRKKLCDKNRIIRKPWETFTQDVRTALEDVVVSFKNYVRVINKATNYYEKYDKNGKKGIAEQKGQDMWAIRKPMHKETVFGQVNLRRKVTVKLKDALEKIPAIYDKELRDYINILVAKQFNKKQILAHFKSINYRLNMKSVDKVDIWQFSDEKEPMVATRKSVDTSFDTKRIATITDTGIQKILRNYLETKDNDPNIAFTPEGIAEMNKHITEYNNGKQHQPILKVRVSEPKGAKYQVGETGNKTSKFVVAQKGTNLYFVIYEDKEGNRSYNSIPLNEVIERLKQGLSPAEDLNKRGEKLKFYLSPNDLVYVPTEEEKLSGECKLNKDRIYKMVSSTGNECHFIPYSAAMPIYDKFEFEAKNKMGRALTGEMIKAVCWKLEVDRLGNILKIIK

SEQ ID NO: 22622 - protein, 1483 aa, unidentified
  REGION 1..1483: note = Cas Enzyme sequence
MKTILGLDLGTNSIGWAKVTVDDNENYLRDIQLGSRIIPMSQDVLGKFDKGVTESQTAIRTSFRGVRRLRERTLQRRERLHRVLHTLHCLPPHYDSAIGWDRKAPTTYGKFLNHGEPKLAWERREDGTMQFLFMDAFHEMIADFAKYQPALVADGKKVPLDWTIYYLRKKALTQPIKKEELAWILLNFNQKRGYYQLRGEEDEENAAKHEEYHELKVVGVEVDEAGKGDNTWYNVKLENGWIYRRQSKIPLDDWVGKVRAFIVTTEYEKDGTTPKKDKEGNVKHSFRSPNENDWGLRKKQTEHSLEASGMPVGAFIYDHLLKEPSDKIRGKFIHTIERKYYKQELAAILREQSKHHEELRSKDMLKACVEELYPNNPLHRESLLKKDMTYLLIEDLIFYQRPLKSKKSLIAECPYEAYSYVDKETDKMKRQGIKCIAKSNPYYQEFRLWQLIANLRLRNRSDERDVTAEYLPHQEDYVRLFTYLNDRKEINQETLLKDFFKLKKVAIGGEKVFPIRWNYIEDKEKKYPCNATRHELLLALDRAGMEHDWLDDRDLAYRLWHLLYSVDSKDETERALRKLKDDDAFVESFLKIKPFEKEYGAYSEKAIKKLLPVMRRGSLWNEADLCPSTKERIANILQGTIDEKLKKKIGAFISSCQQVSDFQGLPEWLACYVVYGRHSEATAIQRWETPEQLLAYIHKFKQYSLRNPIVEQCILETLRTVYDIWKEAGQIDEIHVELGREMKKTAEQRAHLTEKVLRNENTNLRIKSLLMELKNDADMKDVRPHSPMQQEILRIYEEGALQTLSKDDAAFAEIMKISKMAQPSASELQRYRLWLEQKYRSPYTGKPISLSKLFTSAYQIEHIIPKKRYFDDSFSNKVICEAEVNGAKGSMLAYEFIKDCGGDVIHCTTLGDVTILSEAEYKALVTELYANNKSKKEKLLMEDIPQEFINRQLNDSRYISRVVMTLLSNIVRIEGEEEATSKFVIPCSGGITDKLKKDWGLNDVWNNIVYPRFEGLNALTNTSDFGQWENKEGKRVFQTSVPLELQRGYQKKRIDHRHHAMDALVIACASRNIINYLNNQEANDPTKQENARKQLCIKSRIIRKPWETFTQDAYKALDNIVVSFKNYVRVINKATNYYERYNADGKKVVDEQKGEAMWAIRKPMHKDTVFGHVNLRRKAVVKLKDALENTPAICDKTLRHYIQDLQKKHFNTKQLLAHFKSINYRLNKQAVDKVEVWQYSDDKEQLAATRKPLDTSFDAKHIAAITDTGIQKILLNYLQAKGGDPAIAFTPEGIAEMNQNIAVYNGGKQHQPILKVRIAEPMGAKYPVGETGNKGAKYVEAQKGTNLYFAIYEDEEGNRTYDTVTLKIVAEQLKLGYSPVPEKSEKGVALKFYLSPNDLVYVPTADELLSKACSLDKNRIYKMVSATKSECLFIPHSVAKPIYDKVEFEALNKMGRALTGEMIKSVCWKIEVDRLGHIVNIIK

SEQ ID NO: 22623 - protein, 1370 aa, unidentified
  REGION 1..1370: note = Cas Enzyme sequence
MKLIFGFDLGSTSIGWAVVQEKENDTETSRILKLGVRVNPLTTDEKTNFEKGKPITTNANRRLAHGMRLNLSRYKQRRKELIKSLIRFKFISPDTVLCENGSNTTFETLRLRAKAATEEITLEELSRVLLMINKKRGYKSNRKAQPNDNGAIDNIDIAKKLYQSHLTPGEYVFNNLKQGIQYIPPFYRSDLINEFNKIVDCQTQFYPHLKNIDTGSLLKAKNCDIILDGQDVQRIKQKGSPSEKKRELYCLRAQAATQQIRLEELALVLEKISSEIRNSSGYLGDISDRSKELFINNQTIGQYLMSQLDRNPNNKLKGQVFYRQDYEDEFNRIWETQARFHKELTPERLHIIRDIIIFFQRDLKSQKSNIAICEFEKQKREITVDGKKKIIEFGPKVCPKSSPIFQEFKIWQTINNLKISNIYGEELSLSSDERQILFEELSIRKKLTCAEILKLLHKDSKCSLNYKEIQGNSTISAIFDAFKEIILQSGHDNNNFNKASFKDTMLIIEPIFKMLGINTDILSLDCPTDSPSLKTCPIYQLWHLLYSYVGDNSKTGDSSLIKKLQRRYGFSKEYASIMSKISFDNDYGNLSAKAIMRILPHLRNGLQYSDACNAAGYNHSKRSLTKQDILNKVLVSQIDLLPRNSLRQPVVEKILNQLINITNALISTYGNPDEIRIELARELKKSADERAKLNSANNANEKENNSIRKLLQERFGIQNPSRNDIVRYKLYKELEHTGFKTLYSQSLITDDILFSKEIEIEHIIPQARLFDDSLSNKTLEFHNINQNKSNQTAYDYILSEFGEDYAVQYKKRIDDLLRNGKISRTKHKYLLMSESEIPTDFINRDIRETQYISRKAMEILEPATRKVVASSGAITARLREDWQLVDVMKELNWEKYKALNLTETIQDKDGRRIYKIKDWTKRNDHRHHAMDALTVAFTKPSFIQFLNNLNARSDKGNAIYAIQQKELHRNKDGKLCFNPPLPLDEFRAEAKRQLNDIFVSHKAKNKVATRNSYMTKNGKGTKIVELTPRGQLFNETTYGCVKQYETKLESVNSSFDTDKIMTVADKSYRQALMKRIEEFDGNASLAFSRKNSITKNPIYVDDSHSDTVPVKVKTVVPKPVFTQRIAVDIKLDKTKIAQILDAKIRRILTDRFYEFGEDPQKAFSNIDENPIWLNKEKGIAIKKVTIKTGISGVPIRHKRNNMGRPILNSDGNKIPSDFVVPGNNHHIAIYKDADGNIKEQAVPFYIATNRVIHKQPAVDRNFNADKGWKFLFSIKKNEYFVFPNEKTGFNPAEIDLLNPDNNKIISPNLFRVQKISPGDYFFRHHLETTVDANNALKGTTWIRIRSLPALENIIKVRVNNIGQIVAVGEY

SEQ ID NO: 22624 - protein, 1332 aa, unidentified
  REGION 1..1332: note = Cas Enzyme sequence
ISKEELAWILLNFNQKRGYYQLRGEEEEENKNKLVEFYALKVVAVEDSGEKKGKDIWYNVHLENGWVYRRTSNMPLDWVGKTKEFIVTTDLEKDGTPKKDKEGNVKRSFRAPKEDDWSLVKKKTEADIDQTHKTVGAYIYDTLLGNPSQKIRGRLVRTIERKYYKEELKQILEKQKEFHLELQDRALYAACIEELYPINEAHRNNVGNRDFTYLFLEDILFYQRPLKSKKSLIDNCPYEENQGLDKETGEIKSFPVKCIAKSHPLFQEFRLWQFIINLRIYRKDLAQDVDVTNELLKTEEDYVALFDWLNGKKEIDQKAFLKYPVFGLKKEIENYRWNYVQDKPYPCNETRSLMLARLEKCDISIEFLTKENEEALWHILYSVEDKNEIVKALQKFADKHDLNASFVDVFQKFPPFKNEYGSYSAKAIKKLLPLMRMGKYWSENSIDKGTRERIDKIITGEYDEKIENRVREKAIHLADVSDFKGLPLWLVCYIVYGRHSEAKEITQWKSPADIDSYLKSFKQHSLRNPIVEQIIIETLRVVRDIWKQVGNIDEIHVELGREMKNPADKRKKMTQQMSENENTNLRIKYLLTEFLNPEYEVENVRPYSPSQQDILRIYEEGVLNSVSDLPEEISDILKKFTETDLKKGPSRSEILRYKLWLEQKYRSPYTGEVIPLGKLFTPAYEIEHVIPQSCYFDDSFSNKVICEAEVNKLKSNLLGHEFIVKHHGEIVELPFGKKVRIFTVDEYEQFVKDNYSRTRSKMKKLLMDDIPEEFVTRQLNDSRYISKVVKSLLSNIVREKGEEEAISKNVIPCTGGVTDRLKKDWGINEVWNKIILPRFQRLNELTGTNKFTTKNVGIQEIPTMPLELQKGFNKKRIDHRHHAMDAIIIACANRNIINYLNNESATAKAELSRYDLQKMLCDKAKTDNNGNYKWVIRKPWASFTQDTYLALENIIVSFKQNLRVINKATNRFLHYNEEGKKIFVKQGKGDNWAIRKSMHKDTVFGEVNLRRIKTVALNEAMKNPQSIVVKDFKRKLLELWNLGFDAKRIKKYFEDNRETWSDINLSKIEVYYFSKDTKDRFFATRKPLDTSFDRKKIENNITDTGIQKILLRHLELKDNNPDIAFSPDGIDEMNRNIIQLNNGKYHQPIIKIRWYEQADKFAVGQTGNKFSKFVEAAKGTNLFFAVYESNILDKKTNTIIKKRNYATIPLNVAIERQKQGLPVAPEDENGNDPIFVLSPNDLVYLPTDDELANGIIAQPLDRGRIYKMVSCTGNEGHFIPARIANPILQTIELGSNNKAQKAWTDEMIKEICMPIKVDRLGNVLESSSSYKK

SEQ ID NO: 22625 - protein, 1375 aa, unidentified
  REGION 1..1375: note = Cas Enzyme sequence
MKKILGLDLGTTSIGWALVYESENTDEKSSIVRLGVRVNPLSVDEKGNFEKGKAITTNADRQQTHGARINLQRYKLRRENLKDCLQKQGWIGTEALCEEGKASTFETYMLRAKAAEEEISLHELCRVLFMMNKKRGYKSNRKANNKEDGKLFDGMTVAKKLYEEHLTPAEYSFQLLSSGKKFKQEYYRSDLKEEFDRIWNEQQKYYPEILTDDFKQHLQGKSKGNTSKIFLGKYGIYSADLKGLDRKLQPLKWRIEALKQQVDKEVLAFVISDLNGQIASTSGLLGAISDRSKELYFNKQTVGQYLWTSLKETPHVSIKNKPFYRQDYLDEFEKIWETQATYHKELTPELKQEIRDIIIFYQRPLKSKKGLISVCELEQRKVKVTIDGKEKEISIGPKVAPKSSPMFQEFRIWQNLNNILLIDKGNNSIHPLYEEERNLLYEELSVKEKLSKAEALKVLNKNSKQWDLNYKEIEGNRTQAVLYDCYNRIIVMTGHEECNFKKLKASEIRSYFKTIFTGLGFNTDILEFDSSLTGHELERQPSYQLWHLLYSYESDNSRTGNDALLRKLETAFGFPKEYAAVLSDVVFEDSYGNLSVKAMRKILPHLQAGLDYSQACEEAGYKHSRRSLTKNELDQKEYKEKLELLPKNSLHNPVVEKILNQMINVINAVIDEYGKPDEIRIELARELKIGAAERENMTRSISQGNAENKRIREILQKEFALSYISRNDIIKYKLYEELKSNGFKTLYSDTYISKDKLFSKDFDIEHIIPKARLFDDSLSNKTIEARDVNIAKSNKTAFDFIFGKYGQQGIEAYKKKLDILLQDGSISKAKYNRLLMKEADIPSGIIDRDLRDTQYIAKKAYEILSDLVRNVTPTTGAVTSRLREDWQLVDVMKELNFEKYQKLGLAEVIEDRDGRKIKRIKDWTKRNDHRHHAMDALTIAFTKPSYIQYLNNLNARSDKSSSIYGIENKELHREDNKLRFNAPLPINEFRAEARRHLKSVLVSVKAKNKVMTQNVNVIKTKHGVIKKVQLTPRGELHNATFYGTKKRSIIKMIKVGAALDEATIKKVSSSLIREALLDRLHEYNGDAKKAFTGRKSIDKNPIYIDEEHKKTVPSLVKTIEWEMYHPTRKLISPDLKIDKVIDKGIREILKTRLAKFNGDAQKAFSNLDENPIYKDEAKKITLKRVSLEGVSSVIPLHTIKDREGKPVVGKDGKPVLGDYVQTSNNHHIAFYMDENGNLQDNVVSFFEAAERKSQGVPVIDKSYNHDKGWHFLFTMKQNEYFVFPNEVTGFNPSEVDLTDEANYSLISPNLYRVQKMSKTSGRDYWFRHHLEAMLNDDPKLRNSMFKRINSLKALEGIVKVRINCVGKIVAVGEYD

SEQ ID NO: 22626 - protein, 1380 aa, unidentified
  REGION 1..1380: note = Cas Enzyme sequence
MKKILGLDLGTTSIGWALVNECENEDEKSSIIRLGVRVNPLTTDEKGNFERGKAITTNSDRQQTHGARINLQRYKLRRKYLCDCLNKHGWIGSEPMYEDGKSSTFETYKLRAKAAVEEVSLHEFSRILFMMNKKRGYKSNRKANDKEEGKLFDGMSVAKKLYEEHLTPAEYSLQLLNKGKRFTPEYYRSDLIEEFEKIWNEQKKYYPEILTDEFKRQLEAKTKTSTSKIFLGKYGIYSADLKGLDRKLQPIKWRVEALRQQVDKDVLAFVISDLKGQIANTSGLLGAISDRSKELYFNKQTIGQYLWASLKENPHVSVKNQPFYRQDYIDEFEKIWETQASFHKELTPELKQEIRDIIIFYQRPLKSKKGLISVCELEQRKVKITIDGKEKEITIGPKVAPKSSPMFQEFRIWQNLNNIQLIDNERNSKRSLYEEERNLLYEELSIRDRLSKAEALRVLGKKNRQWDLNYKELEGNRTQATLFSCYNKIIMMTGHEECNFKQLKAPEIRHYIKTIFKNLGFNTGILEFDSSLNGHELEQQPMYQLWHLLYSYESDKSRTGNEALLKKLETIFGFPREYASVLAEVAFEDSYGNLSVKAIREILPHLQAGLDYSQACKEAGYKHSRRSLTKEELDQKEYKEKLELLPKNSLHNPVVEKILNQMINVINAVIDEYGKPDEIRIELARELKIGAAERENMTRSISQGNAENKRIREILEKEFALSYISRNDIIKYKLYEELKPNGYKTLYSDTYIPKDKLFSKDFDIEHIIPKARLFDDSLSNKTIEARDVNIAKSNKTAFDYISGKYGQQGIEAYKKKLYILLQGGSINKAKYNRLLMKEADIPSDFINRDLQNTRYITRKAYEILSDLVRVVTPTSGAVTSRLREDWQLVDIMKELNFEKYQKLGLTEVIEDKDGRKIKRIKDWTKRNDHRHHAMDALTIAFTKPSFIQYLNNLNARSNKGDSIYAIENKELHREDGKLCFNAPLPINEFRAEAKKHLKAVLVSIKAKNKVMTQNVNKIKTKHGVIKKVQLTPRGELHNATFYGTKKRPIIKMVKVGAALDEVTIKKVSSSFIRKALLDRLYEYNGDAKKAFTGRNSIDKNPIYIDKERKRIVPALVKTIEWEMYHPTRKLISPDLKIDKVIDKGIRDILKTRLAKFNGDAQKAFSNLDEDPIYKDEAKKIILKRVSLEGVSSVIPLHTLKDRSGMPITGKDSEPVLGDYVQTSNNHHVAFYIDENGNLQDNIVSFFEAAERKSQGVPIIDKNFNHDIGWRFLFTMKQNEYFVFPNEVTGFNPSEVDLMNEANYDIISPNLYRVQTMSKVVYGKRIIRDYVFRHHLETTVEANANLKGLAYKQLKSLSYLEGIVKVRINCIGKIVAVGEYD

SEQ ID NO: 22627 - protein, 1504 aa, unidentified
  REGION 1..1504: note = Cas Enzyme sequence
MKNIVGLDLGTNSIGWAVVNGSVNDDGSEQLVKIQASGSRIIPMDAAMIGDFNKGNSISQTAERTRLRGVRRLSERYLLRRERLHRILDILGFLPFHFAQDLDRHGKIVKGKEPKLAWRKNEAGQFEFIFQDSFKEMLEDFKLNHPNLITDDKKVPYDWTIYYLRKKGLTSKISKEELAWILLNFNQKRGYYQLRGEEEEENKNKLVEFYALKVVAVEDSGEKKGKDIWYNVHLENGWVYRRTSNMPLDWVGKTKEFIVTTDLEKDGTPKKDKEGNVKRSFRAPKEDDWSLVKKKTEADIDQTHKTVGAYIYDTLLGNPSQKIRGRLVRTIERKYYKEELKQILEKQKEFHLELQDRALYAACVEELYTINEAHRNNIGNRDFTYLFLEDILFYQRPLKSKKSLIDNCPYEENHCLDKETGEIKSFPVKCIAKSHPLFQEFRLWQFIVNLRIYRKDLAQDVDVTNELLKTEEDYVALFDWLNGKKEIDQKAFLKYPLFGLKKEVENYRWNYVQDKPYPCNETRSSMLARLEKCDISIEFLTKENEEALWHILYSVEDKNEIVKALQKFADKHDLNASFVDVFQKFPPFKKEYGSYSAKAIKKLLPLMRMGKYWSENSIDKGTRERMDKIITGEYDEKIENRVREKAIHLADVSDFKGLPLWLVCYIVYGRHSEAKEITQWKSPADIDLYLRSFKQNSLRNPIVEQIIIETLRVVRDIWKQVGNIDEIHVELGREMKNPADKRKKMTQQMSENENTNLRIKYLLMEFLNPEYEVENVRPYSPSQQDILRIYEEGVLNSVSDLPEEISDILKKFTETDLKKRPSRSEVLRYKLWLEQKYRSPYTGEVIPLGKLFTPAYEIEHVIPQSCYFDDSFSNKVICEAEVNKLKSNLLGHEFIVKHHGEIVELPFGKKVRIFTVDEYEQFVKDNYSRTRSKMKKLLMDDIPEEFVARQLNDSRYISKVVKSLLSNIVREKGEEEAISKNVIPCTGGVTDRLKKDWGINEVWNKIILPRFQRLNELTGTNKFTTKNVGIQEIPTMPLELQKGFNKKRIDHRHHAMDAIIIACANRNIINYLNNESATAKAELSRYDLQKMLCDKAKTDNNGNYKWVIRKPWASFTQDTYLALENIIVSFKQNLRVINKATNHFLHYNEEGKKIFVKQGKGDNWAIRKSMHKDTVFGEVNLRRIKTVALNEAMKNPQSIVVKDFKRKLLELWNLGFDAKRIKKYFEDNRETWSDINLSKIEVYYFSKDTKDRFFATRKPLDTSFDRKKIENNITDTGIQKILLRHLELKDNNPDIAFSPDGIDEMNRNIIQLNNGKYHQPIIKVRWYEQADKFAVGQTGNKSSKFVEAAKGTNLFFAVYESNILDKKTNTIIKKRNYATIPLNVAIERQKQGLPVAPEDENGNDPIFVLSPNDLVYLPTAADLANGIIAQPLDRGRIYKMVSCTGNEGYFIPARIANPILQTIELGSNNKAQKAWTDEMIKEICMPIKVDRLGNVLESSSSYKK

SEQ ID NO: 22628 - protein, 1483 aa, unidentified
  REGION 1..1483: note = Cas Enzyme sequence
MKTILGLDLGTNSIGWAKVCIDDNGNYLRDIKLGSRIIPMSQDVLGNFDKGVTESQTSVRTGYRGIRRLRERSLLRRERLHRVLHVLGYLPPHYDCSIGWNRNEPSTYGKYLNHSEPKLAWERQEDGSMRFIFMDSFHEMMADFAKRQPSLVSDGKRIPLDWTIYYLRKKALSQVIRKDELAWILLNFNQKRGYYQLRGEEDDTNSAKCEEYYELKVISVEADEEGKGGNTWYNVKLENGWIYRRQSKISLSDWVGKTREFIVTTEYEKDGVTLKRNKDGEIKRSFRSPSEDDWGLRKKRTEERLESSKMTVGAFVYEHLLSEPSDKIRGKFIRTIERKYYKEELYAILREQSKYHEELHSEGALKKCAEELYKNNQPHRDSLLKKDLIYLLLDDLIFYQRPLKTKKSLISECPYEAYSYVDKETGEIKRQGIKCIAKSNPYYQEFRLWQFISNLRFFDKVDDKDVTADYLSTRDDYVRLFAYLNDRKDINQETLLKDFLKLKKVIINSEKEFSVRWNYIEDKEKRYPCNETRHELLLALDRAGIDRSWLDEEGREYRLWHLLYSVESKEETEGALRKLKNDDEFIKSFLKIKPFKKEYGAYSEKAIKKLLAVMRIGSLWSEADICRTTRENITKILKGDIDEKFKEKISSCLSSYNQVSDFQGLPVWLACYVVYGRHSEAAEIQHWKTPKDLLVYINGFKQHSLRNPIVEQCILETLRTVHDIWKEAGHIDEIHVELGRNMKSTADQRARMSGNILRNENTNLRIKSLLLELKNDPDIKDIRPYSPMQQEKLRIYEEGALQELTKDDKDFAEIIKISTMAQPSAKELLRYKLWLDQKYCSPYTGRSISLAKLFTSAYQIEHVIPQSRYFDDSFNNKVICESEVNGLKDNMLGYEFIKECGGEIVHCTMLGDVKILSESEYKDFVNDHYAHNRRKKENLLLEDIPQEFLNRQMNDSRYISKVVKALLSNIVRAEGEEEATSKFVVSCSGGITDRLKKDWGLNDVWNKIVYPRFERLNKLTGTDSFGQWENKEGKKVFQTSLPLELQRGFNKKRIDHRHHAMDALVIACTSRSIVNYLNNESADNPKKREDLRQKLCDKNRIIRKPWDTFTQDATAALEDVVVSFKNYVRVINKATNYYEKYDKNGKKGIAEQKGQEMWAIRKPMHKETVFGRVNLRRKVTVKLKDALEDIPSICDKTLRDYVNGLVKKNFKTKHLIAHFKSLNYRLNRQHIEKVEVWQFSDKKEQLVATRKPLDTSFDNKHIDSITDTGIQKILKNYLHAKGGDPNIAFTPEGIVELNQNISLYNDGKLHQPILKVRVFEPKGAKYCVGQNGNKSAKYVEAQKGTNLYFAIYEDEEGKRSYETIPLNEVVERLKQGLSPVPEKNKAQIPLKFYLSPNDLVYVPTDEEVNDNRCYMNKDRIYKMVSSTGNQCMFVPFRVATCIVNKMEYSPLNKMEKAITGEMVKAICWKLVVDRLGNIIKIIK

SEQ ID NO: 22629 - protein, 1375 aa, unidentified
  REGION 1..1375: note = Cas Enzyme sequence
MKKILGLDLGTTSIGWALVNECENEDEKSSIIRLGVRVNPLTTDEKGNFERGKAITTNSDRQQTHGARINLQRYKLRRKYLCDCLNKHGWIGSEPMYEDGKSSTFETYKLRAKAAVEEVSLHEFARVLFMMNKKRGYKSNRKANDKEEGKLFDGMSVAKKLYEAHMTPAEYSLLLLNKGKRFTPEYYRSDLIEEFEKIWNEQKKYYPEILTDEFKRQLEAKTKTSTSKIFLGKYGIYSADLKGLDRKLQPIKWRVEALRQQVDKDVLAFVISDLKGQIANTSGLLGAISDRSKELYFNKQTIGQYLWASLKENPHVSVKNQPFYRQDYIDEFEKIWEMQASFHKELTPELKQEIRDIIIFYQRPLKSKKGLISVCELEQRKVKVTIDGKEKEITIGPKVAPKSSPMFQEFRIWQNLNNIQLIDNERNSKRSLYEEERNLLYEELSIRDRLSKAEALRVLGKKNRQWDLNYKELEGNRTQATLFRCYNKIITMTGHEECNIKQLKAPEIRHYIKTIFKNLGFNTGILEFDSSLNGHELEQQPMYQLWHLLYSYESDKSRTGNEALLKKLETIFGFPREYASVLAEVAFEDSYGNLSVKAIREILPHLQAGLDYSQACEEAGYKHSRRSLTKEELDKKEYKEKLELLSKNSLHNPVVEKILNQMINVINAVIDEYGKPDEIRIELARELKIGAAERENMTRSISQGNAENKRIREILEKEFALSYISRNDIIKYKLYEELKPNGYKTLYSDTYIPKDKLFSKDFDIEHIIPKARLFDDSLSNKTIEARDVNIAKSNKTAFDFISGKYGQQGIEAYKKKLYILLQGGSINKAKYNRLLMKEADIPSDFINRDLQNTRYITRKAYEILSDLVRVVTPTSGAVTSRLREDWQLVDIMKELNFEKYQKLGLTEIIEDRDGRKIKRIKDWTKRNDHRHHAMDALTIAFTKPSFIQYLNNLNARSNKGDSIYAIENKELHREVGKLCFNAPLPINEFRAEAKKHLKAVLVSIKAKNKVMTQNVNKIKTKHGIIKKVQLTPRGELHNATFYGTKKRPIIKMVKVGAALDEVTIKKVSSSFIREALLDRLYEYNGDAKKAFTGRNSIDKNPIYIDEERKRTVPALVKTIEWEMYHPTRKMISPDLKIDKVIDKGIRDILKTRLAKFNGDAQKAFSNLDENPIYKDEAKKITLKRVSLEGVSSVIPLHTLKDRSGMPITGKDSEPALGDYVQTSNNHHVAFYIDENGNLQDNIVSFFEAAERKSQGVPIIDKNFNHDIGWRFLFTMKQDEYFVFPNEVTGFNPSEVDLTDEANYSIISPNLYRVQKMSKASGRDYWFRHHLEAMLNDDPKLRNSMFKRIKSLKALEGIVKVRINCVGKIVAVGEYD

SEQ ID NO: 22630 - protein, 1424 aa, unidentified
  REGION 1..1424: note = Cas Enzyme sequence
MKHILGLDLGSNSIGWALIEQDFDNKKGKILGLGSRIIPMDQGILGEFERGNKVSQTAERTGFRGVRRLRERHLLRRERLHRVLHLLGFLPPHYDAQIDFTKRFGKFIGDSEPKLAYNNEGFIFLESFNEMVEDFKKHQPQLFYIKSNGEESKIPYDWTIYYLRKKALQEKISKEELAWIILNFNQKRGYYQLGGEEEEKSTKNVEFYSLEITDVIADTPNNKGEIWYSIHLENGWVYRRASKISLEDWKGKVRDFIVTTELNEDGSVKLDKEGKEKRSFRAPSEDDWNLIKKKTEQNIVFSGKTVGEYIYDHLLQNPNQKIKGKLVRTIERKFYKEELKAILEKQVALQPELFTEELFVDCVRELYKNNEIHQNSLSSKDFVHLFLNDIIFYQRPLRSQKSNISSCSLEYRFCIDKETKQRRKTYLKVISKSNPYYQEFRVLQWLSNLKIYRKEDDKDVTSEFISSIEDKETLYEFLMSEKEVSNKSILEFLLMKSLRETYPFAKETELKKELKKEITKYRWNYVYEEENDSKKYPMNETGYEIKKRLKEVKNIPDNFLTRDIEYQLWHIIYSVTDKYEYEKALMKFAQKHNLDAESFVENFKRIKPYPSDYGAFSEKAIKKLLPLMRFGKYWNYSDISEPVQVRISDIINGVDNENIKTIVREKAEKYQLNQEADFQGLPLWLAQYVVYGIHSEAADIQRWTSPSDLEEYLKGFKQHSLRNPIVEQVVTETLRVVKDIWEYYGKGEQNFFDEIHIELGRELKKTAEERNRMTREINENEETNLKVKKKLQEFFEDKSAENVRPYSPIQQEKYRLWLEQEKESPYTGQPIPLSKLFTDEYQIEHVIPQSRFFDDSLSNKVICEAAVNAEKGAQLGLEFIKKHGGEIIEIGLNKKVTILNEKEYKELVNKHFANNRAKKAKMLMEEIPEKMVERQLNDTRYISKFISQILSNIVRSPQEDDGVNSKNIIPYTGKITAALKQDWGLNDVWNDLILPRFERMNNLTQTELFTTYSEKYQKKIPTVPLEHAKGFQKKRIDHRHHALDALVVACATRSHINYMNNKHALDKHKAKEEKQNARINLRTVLCEKKYNDNAEDKYNWTFKKPWNTFTQDVRSALEMIVVSFKQNLRVINKATNYYEKWVEEKGKKVKKKVKQEGINWAIRKPLHEQTVAGKITLERVKIGKGEMLTADRKFIDSSFDTKKISKITDTGIQKILLNYLAYKGSSELAFSPEGLEELNKNIYLYNDGKPHKPIYKVRSYEKGSGRFVLGERGAKSKKYVQGAPNLYFGVYQSKGKRSYATIPLAEVIERQKQGLTSVPELNEKGEKLLFSLSPNDLVYVPMESENIENIDFTNLSKEQRERVYKTVSFTGNQCFFVRQDVATSIVNKMEYSSLNKMEKGIDGIMIKEFCIKLKIDRLGNISKA

SEQ ID NO: 22631 - protein, 1189 aa, unidentified
  REGION 1..1189: note = Cas Enzyme sequence
MARKVLGLDLGVGSIGWCLITLDKDEKPQSILGMGSRIVPLSADDATEFTQGKAITKNKMRTVARTIRKGMDRYQLRREALKKVLSEHGMLPDESLIKLPLLELWELRARAATPGEQLSLAELGRVLLHINQKRGYKHAKADEAAEAEAEGKSKKEKEGYVAQVKGRYQALKEKGQTIGQHFAEELRANQQTAPRGGVYYTYRIKEQVYPREAYIEEYDRIMAVQREFYPEILTDELIQRIRDRIIFYQRPLKSCKQLVSTCEFEKKERVVQVKRINKEGVEELVERTITIGPKVAPKSSPIFQVCKVWESIQNIRLYYPDGTERVLEQEEKQKLFDYLQKNDKLSLTALRKELKIKPKDKLWCDKLLEKGIAGNTTAAILRKAFKGYEQYEDLLRFDLVRRDSHEADEDGVIRPIIDESYQNEPLYKLWHILYSIEDRADMYRALVGQLGIKREDLDDGLMDALYKIDFVKQGYGNKSAKFICKLLPHLQEGKMYSEAAEAAGVRHSDSMTAQERDERSLLEEIPLLQKNALRQPVVEKILNQMINLVNALKREHGEIDEVRVELARELKMSREEREEATRSNNAREKENEKTAERIKGEHGLTPTKSRIQKYRLWQESGGCCIYCGKRFGIKQFLEGEEIEVEHIIPRSILFDDSMSNKVCACRSCNQEKGNRFAMEYIQSKGWEQDYIKRVDSLFHDKNISYSKRQRLLMLPKDLPEDFIERHLRLSQYISREAQGILRKGIRLVSASEGGVTAKLRQLWGYDNILRDLNLERYRSMGETEVVTVEHRDGERTDERIKDWSKRKDHRHHAIDALVVACTRQSYIQRLNRVNAEADREEMDAFIKEQQQEHKLSKREKLSLLEHWLIRQPHFTTGEVTSHVEGILVSLRPGKRTISRGRNIYKRSGKTDVQRGILIPRGALSEETIYGVISVDGENKVVCKYPLQSLKPKDVGYIVDEVLRKKVRERITQRGEKEAFAEPLYLDEAQTQEVSSVRCFTGKDLSKLVPLRYNAESEAVGFVAPGNNHHLALYRDVDGRLVESVVTFWQAVARIRYGLPAIVTHPREVMEQAFSIPDLPEEVLEALPISRLRLMEVLRINDMFLIGMKDGEIKAAIEGEDYPTLSRHLYRVQKLTTHDYVFRYHLETTLDGKDNVGDIPSSYRIASQKRYQELNPRKVKIDLLGRISLA

SEQ ID NO: 22632 - protein, 1520 aa, unidentified
  REGION 1..1520: note = Cas Enzyme sequence
MKKIVGLDLGTNSIGWALINAYIDEYNKEHLYGIEACGSRIIPMDAAILGNFDKGNSISQTADRTSYRGIRRLRERHLLRRERLHRILDLLGFLPKHYSDSLNRYGKFLNDIECKLPWVKDETGSYKFIFQESFKEMLANFTEHHPILIANNKKVPYDWTIYYLRKKALTQKISKEELAWILLNFNQKRGYYQLRGEEEETPNKLVEYYSLKVEKVEDSGEKKGKDTWYNVHLENGMIYRRTSNIPLDWEGKTKEFIVTTDLEADGSPKKDKEGNIKRSFRAPKDDDWTLIKKKTEADIDKIKMTVGAYIYDTLLQKPDQKIRGKLVRTIERKYYKNELYQILKTQSEFHEELRDKQLYIACLNELYPNNEPRRNSISTRDFCHLFIEDIIFYQRPLKSKKSLIDNCPYEENRYIDKESGEIKHASIKCIAKSHPLYQEFRLWQFIVNLRIYRKETDVDVTQELLPTEADYVTLFEWLNEKKEIDQKAFFKYPPFGFKKTTSNYRWNYVEDKPYPCNETHAQIITRLGKAHIPKAFLSKEKEETLWHILYSIEDKQEIEKALHSFANKNNLSEEFIEQFKNFPPFKKEYGSYSAKAIKKLLPLMRMGKYWSIENIDNGTRIRINKIIDGEYDENIRERVRQKAINLTDITHFRALPLWLACYLVYDRHSEVKDIVKWKTPKDIDLYLKSFKQHSLRNPIVEQVITETLRTVRDIWQQVGHIDEIHIELGREMKNPADKRARMSQQMIKNENTNLRIKALLTEFLNPEFGIENVRPYSPSQQDLLRIYEEGVLNSILELPEDIGIILGKFNQTDTLKRPTRSEILRYKLWLEQKYRSPYTGEMIPLSKLFTPAYEIEHIIPQSRYFDDSLSNKVICESEINKLKDRSLGYEFIKNHHGEKVELAFDKPVEVLSVEAYEKLVHESYSHNRSKMKKLLMEDIPDQFIERQLNDSRYISKVVKSLLSNIVREENEQEAISKNVIPCTGGITDRLKKDWGINDVWNKIVLPRFIRLNELTESTRFTSINTNNTMIPSMPLELQKGFNKKRIDHRHHAMDAIIIACANRNIVNYLNNVSASKNTKITRRDLQTLLCHKDKTDNNGNYKWVIDKPWETFTQDTLTALQKITVSFKQNLRVINKTTNHYQHYENGKKIVSNQSKGDSWAIRKSMHKETVHGEVNLRMIKTVSFNEALKKPQAIVEMDLKKKILAMLELGYDTKRIKNYFEENKDTWQDINPSKIKVYYFTKETKDRYFAVRKPIDTSFDKKKIKESITDTGIQQIMLRHLETKDNDPTLAFSPDGIDEMNRNILILNKGKKHQPIYKVRVYEKAEKFTVGQKGNKRTKFVEAAKGTNLFFAIYETEEIDKDTKKVIRKRSYSTIPLNVVIERQKQGLSSAPEDENGNLPKYILSPNDLVYVPTQEEINKGEVVMPIDRDRIYKMVDSSGITANFIPASTANLIFALPKATAEIYCNGENCIQNEYGIGSPQSKNQKAITGEMVKEICFPIKVDRLGNIIQVGSCILTN

SEQ ID NO: 22633 - protein, 1508 aa, unidentified
  REGION 1..1508: note = Cas Enzyme sequence
MRTILGLDLGTNSIGWAVINSVIKEQTEKIWIEMAGSRIIPMDAAILGDFDKGNSISQTAERTRFRGVRRLRERQLLRRERLHKVLKILGFLPEHYLKGIDFEKHTGKFLSGSEPKLPWVKDRWGKYSFLFQTAFNEMLADFAKHQPSLVFDGKKIPYDWTVYYLRKKALTEMISKEELAWILLNFNQKRGYYQLRGEEEEDNAGKSVEFYALKVLSVEATDEKKGRDIWYNVHLENGWVYRRSSNVPLDWEGRVKEFIVTTDLNPDGTPKLDKYGEVKRSFRAPKEDDWMLIKKRTEADIAGTHKTIGSYIYDALLQEPQQKIIGKLVKTVERKFYKEELNLILQKQCAFHAELQDRDLYMRCIEALYPGNEVQRRNIANRDFIYLLIDDVLFYQRLLKTKKSLIANCPYEENEYVNRKTGEIKTAPLKCIAKSHPLFQEFRLWHFLSNIRVYQKEREVNGTLYLDVDVTTEFLKTEDDYVALFDWLNSRKEIDQKAFLRYPAFGLKKEINNYRWNYVEDKFYPCNETRHAILSRLEKAGIGIDFLSDEKETALWHILYSVSDKQEIEKALATFAVKNGLNESFVEVFKKFPPFKSEYGAYSAKAIKKLLPLMRCGKYWDMSLIDGTTKERIERIIAGECDESIGAKVREKAMNLSDISCFKRLPLWLACYVVYNRHSEDKEITKWETPADIDAYLAAFKQHSLRNPIVEQVITETLRVVRDIWKQVGKIDEIHIELGREMKNPADKRKRMTTQILENENANLRIKALLAEFVNPEYGVENVRPYSPSQQEILRIYEDAVLKGEEQIPEDIDVILKKFNTSKLPTKSEFLRYKLWLEQKYRSPYTGELIPLAKLFTAAYEIEHVIPQSRYFDDSFSNKVICESAVNKLKDNQLGYEFIKNHHGQKVEVGFGKTVEIFSVDSYERFVKEQYAKSGIKMKKLLMDDIPEQFIERQLNDSRYISKVVKGLLSNIVREKNDSGEYEPEAVSKNILVCTGNVTDRLKKDWGMNDVWNSIVSPRFERLNALTETQCFGHWENKDGKKVFQTAVPLEYQKGFSKKRIDHRHHAMDAIVIACATRNHVNYLNNESASRNAKISRYDLQRLLCDKSRGDGNGNYRWIIKKPWTTFTQDAREALSGIIVSLKQNLRIINKTTNIYQHFDANGTRVYEKQKIGDSWAIRKPMHKDTVFGAVNLRKVKVVRLSVALDTPSMIVDKRVKNKVLELLSYKYDKKKIEKYFKENAFLWKELDIAKVAVYYFTENTTEPLVAVRKSLDSTFNEKKIASVTDTGIQKILLNHLKSKEGKAELAFSAEGIEEMNRNLLQLNDGKGHQPIYKVRVYEPRGNKFKVGVLGNKGAKWVEAAKGTNLFFAIYITEDGNRTYETIPLNWVIEREKQGLVPVPDRNEKGDKLLFWLSPNDLVYLPTEEERDFGRINEPIDRGRIYKMVSSSGNQCFFIPQSISNAIISTKELGSNNKAEKSWDGEMIKNICIPVKVDRLGRIIEVKYRVNE

SEQ ID NO: 22634 - protein, 1424 aa, unidentified
  REGION 1..1424: note = Cas Enzyme sequence
MTQKVLGLDLGTNSIGSSVRNLDLSDDLKGQLEFFSSDIFRSSVNKESNGREYSLAAQRSAHSRSRGLNEARRRKLWATLDLLIKYGFCPMSPDSLMRWRTYDKQRGFFREYPIDDKDFNAWILLDFDGDGKPDYSSPYQLRRELVTRQFDFDQPIERYKLGRALYHIAQHRGFKSSKGETLLQQETNSKQSLTDETTDVAGEMKASEEKLSKGLSTYMKENKLLTVGAAFAQLEDEGVRVRNNNDYRAIRSQFQREIETILKFQQGLSVENEFYGCLVSEKKNIGTIFYKRPLRSQRGNVGKCTLERTKPRCALGHPLFEKFRAWTLINNIKVRMPEEEQAEQLPMKLRFELYNDCFLAFVRAEFKFEDIRKYLEKRLGIHFSYNDKTINYKDSTSVAGCPITARFRKLLGEDWESFHVDGQKQRQAHGKNNTSFHTVSYSTNDIWHFCYDAEEPEAVLSFAQDNLKWEKKKAEELIRIWSAIPQGYAMLSQKAIRNINKMLILGMKYSDAVLLAKVPEIVEITDSEILSVTEDYHRVEAQVRYEKQINNIVNALIAKYKSASEEYRFADHNYEYQLDKSDEEEIVRQIESCLGTRKWGLMDADEQTDILQKVRDKYQNFFRSHERKFVESPKLGDCFEEYLVKRFPMVKGEQWKKLYHPSQIAIYRPVSAGMDRSALRLGNPDIGAIKNPTVLRVLNTLRKRVNQLLDDGVISPDETRVVVETARELNDANRKWALDTYNRIRHDENEKIKKILEEFYPKRDGISTDDIDKARYVIDQREVDYFTESKTYNRDIKKYKFWLEQGGQCMYTGRTINLSNLFDPNAFDIEHTIPESLSFDSSDMNQTLCDAHYNRFIKKNHIPADMPNYDKAVIIDGKEYPAITSQLQRWIDRVERLNRNVEYWKGQARRAQNKDRKDQCIREMHLWGMELEYWEKKLERFTVTEVTDGFKNSQLVDTRVITRHAVLYLKSIFPHVDVQRGDVTAKFRKILGIQSVDEKKDRSLHSHHAIDATTLTVIPSSAKRERMLELFAKIEEVNKMLFFSGNEDRTGLKQELDGLKNQLNKEVKACRIGHNVSEIGTFINDNIIVNHHIKNQALTPVRRRLRKKGHIVGGVDSPRWQTGDALRGEIHKASYYGAITQYAKDKEGKVLMKEGRPQINPTIKFVIRRELKYKKSSTDSGFASWDDLGKAIVDKELFALMKGQFPAETSFKDACEQGIYMIKKGKNGMPDIKLHHIRHVRCEAPQSGLKIKEQTYKSEKECKRYFYAAVGDLYAMCCYTNGKIREFRIYSLYDVSCHRKSDIEDIPEFITDKKGNRLMLDYKLRTGDMILLYKDNPAELYDLDNVKLSRRLYKINRFESQSNLVLMTHHLSTSKERGRSLGKTVDYQNLPESIRSSVKSLNFLIMGENRDFVIKNGKIIFNHR

SEQ ID NO: 22635 - protein, 1394 aa, unidentified
  REGION 1..1394: note = Cas Enzyme sequence
MGFLPSHYEKAIGWNREEATTYGKFLDNGEPKLAWERQEDDSMRFLFMDSFHEMMADFAKCQPGLVADGRKIPLDWTLYYLRKKALTQAIKKEELAWILLNFNQKRGYYQLRGEEDEEDPTKREEYYELKVVSVEAAEEGKGGNTWYNVTLENGWIYRRQSKIELNDWTGKIRQFIVTTEYEKDGITIKKDKNGEVKRSFRAPSEDDWGLRKKRTESRLEDSGKTVGEFIYDHILSDPADKIRGNFIRTIERKFYKKELEAILREQSKYHKELKDLNTLVNCIKELYPNNKAHQDSLMKKDMIYLLITDLIFYQRPLKSKKSLIADCPYEYYEYVIKETGEIKRQGIKCIAKSNPYYQEFRLWQFIINLRLFDRTNDKEITSEYLSSMEDYTKLFIYLNDRKEINQEILLKDFFKQKKVKMGMEKEFPIRWNYIEDKEKKYPCNETRHELLAALDKAGIDHSWLDDKERFYRLWHLLYSVESKEEAEGALRKLNDNEDFVNAFLKIKPFKKEYGAYSEKAIKKLLAVMRIGTQWNEDDICEQTRNRIQSIINGDIDEKIKERMGRTFSQLSDFQGLPEWLACYVVYGRHSETTDIQRWTKPENLMAYINGFKQHSLRNPIVEQCILETLRTVHDIWKEAGHINEIHIELGRSMKSTADQRARMSKSILQNENTNLRIKSLLMELKNAKEFENVRPYSPMQQEILRIYEEGALQELTKEDDQYPEISKISQMAQPSAKELLKYRLWLDQKYCSPYTGKPISLSKLFTSAYQIEHIIPQSRYFDDSFSNKVICEAEVNQLKSNMLGYEFIKKHSGEIVHCTMVGDVKILDAKEYYNFVTEHYANNRRKKEKLLLEDIPQEFLNRQMNDSRYISKKVMALLSNIVREEGEQEAKSKFVIACSGGITDRLKHDWGLIDVWNSIVYPRFERLNKLTNTENFGRWENKEGKQVFQTSLPLELQRGFSKKRIDHRHHAMDALVIACASNNIINYLNNESAKSQEKREDLRKKLCDKNRIIRKPWETFTQDVRTALEDVVVSFKNYVRVINKATNYYEKYDKNGKKGIAEQKGQDMWAIRKPMHKETVFGQVNLRRKVTVKLKDALEKIPAIYDKELRDYINILVAKQFNKKQILAHFKSINYRLNMKSVDKVDIWQFSDEKEPMVATRKSVDTSFDTKRIATITDTGIQKILRNYLETKDNDPNIAFTPEGIAEMNKHITEYNNGKQHQPILKVRVSEPKGAKYQVGETGNKTSKFVVAQKGTNLYFVIYEDKEGNRSYNSIPLNEVIERLKQGLSPAEDLNKRGEKLKFYLSPNDLVYVPTEEEKLSGECKLNKDRIYKMVSSTGNECHFIPYSAAMPIYDKFEFEAKNKMGRALTGEMIKAVCWKLEVDRLGNILKIIK

SEQ ID NO: 22636 - protein, 1436 aa, unidentified
  REGION 1..1436: note = Cas Enzyme sequence
MKYIKYILGLDIGSNSIGWALIQLDLLQKTKRIIATGSRIIPMDQKVLSDFGKGITISPTAQRTSYRNARHCQERHLLRRERLHRVLHILGFLPTHYDKQIDFSKRYGKFVDNTEPKIAYNEGKFLFMDSFQEMLADFKSHQPDLFYTKKNGEESKIPYDWTIYYLRKKALSQKISKEELAWIILNFNQKRGYYQLREEEENKENDFEIISSKIISVIKKDKDKKYNKYWYDIILENGLVYQAAFYNDFVYNWINQDREFIIERISLKNGTEKVKLSYLPTFDEIDKMDKKEQDKYYKKIKIKTENSIGNKTVGCYIYDHILQNPNEKIKGKLVRTIERKYYKEELKAILEKQIALQPELFTDQLFADCIRELYSKNEAQQRNLVARDFVHLLVEDIIFYQRPLRRQKSTLANCSLESRSYIDKDSHTRKESPLKVCPKSNPYYQEFRVLQWLQNLRIYEIDTDQEVTHEFIKTLEDKQQLFDFLMDQKEIDCEELLKYFLNQTYPNAKEKALKSELKKWKDTYRWNYVYDIGEKSSKKYPMNETRYELKRHLEKVANLPDDFLSSEVEYLLWHLIYSVKDKVAYEKGLKKFAQKHHLDKDSFVESFKKFNPYPSEYGSFSEKAIRKLLPLMRFGAHWDFNHIDKNTQKRIEDLITGVENEEIRTILREKAEKYQLEKETDFQDLPLWLAQYIVYNRHAEASSLEKWTSVNDLETYLNEFKQHSLRNPIVEQVVMETLRVVRDIWQQYGQGQASFFNEIHIELGRELKKTAKEREKLSKQNQKNEDINLSIKEKLKELEKYNTRAYSITHQEKYKLWLEQKHISPYTGQIISPENLFTDNYEIEHIIPQSRFFDDSLSNKVVCESIVNKAPYKDRQLGLEFIKNQGGRIVKELSKENKTIKIFTEEQYRTFIKEHYSNNPEKTKKLLLEEIPEKMVARQMNDTCYISKFISEILSKIVRSDEQDEGVHSKNVILCTGKITSILRQDWGLNDIWDNLILPRFERMNNLLQKEKFTIYSIEKQKKIPVVPINDQFKSFQKKRIDHRHHAMDAIIIACTTREHINYINNQHALEKEKDKKEKQEERDKLREKLCIKKYNKGSEGNYSWIFKKPWDTFTQEVRVALEDIVVSFKQNLRVINKATNYYERWVEENGKYIKKMVKQEGTNWAIRKPLHEETISGKIYLDREKITKNDILTATRKTVDSSFDDKRIKKITDTGIQKILLNYLKYKGSPEIAFSPEGLEELNKNLSIYNDGKPHKPIYKVRIYEKGSGRFALGEKGRKYKKYVQGASNLYFGIYQGAKRSFATIPLNEVIERQKQGLPSVPEYNEKGDLLLFSLSPNDLVYVPIEGEIIENIDFRNLSKEQKERIYNVNDFSSTCYFTPNRIAKAIFPKEVDLQRKGDKLSGSYDTKTASLEGIQIKEVCIKLKVDRLGNISKA

SEQ ID NO: 22637 - protein, 1422 aa, unidentified
  REGION 1..1422: note = Cas Enzyme sequence
MTQKVLGLDLGTNSIGSSVRNLDLSDDLKGQLEFFSSDIFRSSVNKESNGREYSLAAQRSAHSRSRGLNEARRRKLWATLDLLIKYGFCPMSPDSLMRWRTYDKQRGFFREYPIDDKDFNAWILLDFDGDGKPDYSSPYQLRRELVTRQFDFDQPIERYKLGRALYHIAQHRGFKSSKGETLLQQETNSKQSLTDETTDVAGEMKASEEKLSKGLSTYMKENKLLTVGAAFAQLEDEGVRVRNNNDYRAIRSQFQREIETIFKFQQGLSVENEFYECLVSEKKNIGTIFYKRPLRSQRGNVGKCTLERTKPRCALGHPLFEKFRAWTLINNIKVRMPEEEQAEQLPMKLRFELYNDCFLAFVRAEFKFEDIRKYLEKRLGIHFSYNDKTINYKDSTSVAGCPITARFRKLLGEDWESFHVDGQKQRQAHGKNNTSFHTVSYSTNDIWHFCYDAEEPEAVLSFAQDNLKWEKKKAEELVRIWSAIPQGYAMLSQKAIRNINKMLILGMKYSDAVLLAKVPEIVEITDGEILSVTEDYHRVEAQVRYEKQINNIVNALIAKYKSTSEEYRFADHNYEYQLDKSDEEEIVRQIESCLGARKWGLMDADEQTDILQKVRDKYQNFFRSHERKFVESPKLGDCFEEYLVKRFPMVKGEQWKKLYHPSQIAIYRPVSAGKDRSALRLGNPDIGAIKNPTVLRVLNTLKKRVNQLLDDGVISPDETRVVVETARELNDANRKWALDTYNRIRHDENEKIKKILEEFYPKRDGISTDDIDKARYVIDQREVDYFTESKTYNKDIKKYKFWLEQGGQCMYTGRTINLSNLFDPNAFDIEHTIPESLSFDSSDMNQTLCDAHYNRFIKKNHIPADMPNYDKAVIIDGKEYPAMTSQLQRWIDRVERLNRNVEYWKGQARRAQNKDRKDQCMREMHLWKMELEYWKKKLERFTVTEVTDGFKNSQLVDTRVITRHAVLYLKSIFPHVDVQRGDVTAKFRKILGIQSVDEKKDRSLHSHHAIDATTLTIIPSSAKRERMLELFAKIEEVNKMLSFSGNEDRTGLKQELDGLKNQLNKEVKACRIGHNVSEIGTFINDNIIVNHHIKNQALTPVRRRLRKKGHIVGGVDSPRWQTGDALRGEIHKASYYGAITQYAKDKEGKVLMKEGRPQINPTIKFVICRELKYKKSSTDSGFASWDDLGKAIVDKELFALMKGQFPAETSFKDACEQGIYMIKKGKNGMPDKKLYRIRHIRCNTVQKNALKIKEQTYKSGKEYKRYFYAAVGDLYAMCCYTNGKIREFRIYSLYDVSCHRKSDIEDIPEFITDKKGNRLMLDYKLHTGDMILLYKNSPEELYDLDNVNLSKLLYKINGFENDGLRIRMVNHLVVKEAMGESVKDYAKLPDIIRCGVKTIKFLIMGENRDFVIKNGKIIFNHR

SEQ ID NO: 22638 - protein, 1069 aa, unidentified
  REGION 1..1069: note = Cas Enzyme sequence
MAAIAIDDDGKPTEILSAISLIHDSGVDPDSAKSAATRLATSGIARRTRRLYRRKRKRLAKLDKFISSQGWPLKEFEKYEDPFYPWRVRAELATTAITDQQELGEKLSIALRHIARHRGWRNPYSKVTALYTVTEPSDAFLAMQEECAKQLGRTIPETITVGQLVTGMNLGKTRLRGENSLLAARPRQSDNANEIHTIAKVQGLSNELVRQIIDHVFAAESPKGSAAEQVGKDPLQPTKKRALKASDAFQQYRIAALIGNLRIRGGKGNRRLTTEETRLVFDYLRSLPAKQEPTWQLVAEQLKIDRGNLVGTAIMTDDGERAGAKPPVHDTNRIMENTKIKPLATWWKSADADARAAMVKALSNAEVDDFDSQAGAQVQEFFFGISDEDQEKLDGLHLPIGRAAYSEDTLDRLTKRMIGEGMDLYEARQAEFKISNDWAPPAPEIGERVGNPAVDRVLKATARWLNAAERQWGAPKSVNIEHVRAAFMSESSARELDRDNQQRAKRNVKVVAEMQEKLGIEGRPSRADVWRFQSIQRQNGKCAYCGAEISFKNSEMDHIIPQAGEGSTNTRDNLVAVCRECNSSKSNIAFAVWAENTSRPGVSVQKAIERTHHWVTDSGLRKPEFDKFRKQVCDRLRRKATDEPIDARSLESVAWMANELRSRIAQKFKDGDTKVRVYKGALTAEARRASGISGKLEFVDGKGKSRLDRRHHAVDAAVVAFTSNYVAETLALRSNMKFDQELRRKAPQWWEFTGSDHVHQVEWTKWKYRMQALAELLNNALVQDRIVVMHNLRLRLGNGAAHEDTIGKLTRLKVGDAISTTDIDRASSEALWCALTRDPDYDPKTGLPENPNRTIRIHGTHLTASDEITVFPVAAASIPIRDGFAKLGSNYHHVRLFRVPSGKKYKYCLMQVYTVDLLKFRKEDLFTVELKPQTISVRTCEALLRKALANGTAEYLGWLVSDDELLIDTSSFDTPGIVKLREEYGPVNRWRLAGLTSVTRLNLRPLYLSKEGLKPNVNPEIKKIIDNRSWIITVNKLFSSGHVKIIRRDALGRPRLHSAAHLPICWEVK

SEQ ID NO: 22639 - protein, 1457 aa, unidentified
  REGION 1..1457: note = Cas Enzyme sequence
MKRILGLDLGSNSIGWGLIEQDFGQREGKIIAAGSRIIPMDQGLLGDFEKGNTVSQTAERTFYRSTRKLRQRHLLRRERLHRVLHILGFLPPHYDKQIDFSKRYGKFLDNTEPKLAYEEGRFLFMDSFQEMLSDFKSHQPTLFYSKKKGEESKIPYDWTIYYLRKKALSQKISKEELAWIILNFNQKRGYYQLRGEEEAENPNKEVAYYSLMVTEVTAEAPNKKGEIWYSIQLENGWVYRRTSKIPLDDWKGKVRDFIVTTELEEDGSVKRDKEGKEKRSFRAPDENDWNLLKKKTEQDINTSQKTVGSYIYDHLLQNPNEKIKGKLVRTIERKYYKEELKAILEKQIALQPELFTDQLFADSIRELYSKNEAQQRNLAARDFVHLFVEDIIFYQRPLRSQKSTIANCSLESRSYIDKDSHTRKGVPLKVCPKSNPYYQEFRVLQWLQNLKIYEIDSDQEVTHQFIKTLKDKQQLFEFLMTQKEIDCEELLKYFLNQTYPNAKEKALKSELKKWKDTYRWNYVYDIGEKSSKKYPMNETRYDLKRYLEKVANLPDDFLSSEVEYLLWHLIYSITDKVAYEKGLKKFAQKHHLDEDSFVESFKKFKPYPSEYGSFSEKAIRKLLPLMRFGSYWDFNHIDKNTQKRIDDLITGVENEEIRTILREKAEKYQLEKETDFQDLPLWLAQYIVYNRHAEASSLEKWTSVNDLETYLNEFKQHSLRNPIVEQIVTETLRVVRDIWQQYGQGEADFFDEIHIELGRELKKTAKEREELSKQNQKNEDTNLRIRALLAELGEDSTIENVRPYSPLQQELLKLYEEGVFSSSMEIEDDIEKIHKKATPSKAELQRYKLWLEQKYKSPYTGQIISLKRLFTEDYEIEHIIPQSRYYDDSLSNKVICESAVNKLKGNQLGLEFIKNHYGEKVHAAGKEVSILTEEQYKEFVKNHYANNSGKMKKLLLEDIPEKMVARQMNDTRYISKYISEILSKIVRSGERDEGVNSKNVILCTGKITSALKQDWGVNDVWNDLILPRFERMNDLTQSTLFTTYNEKYQKYLPTVPMEYSNGFLKKRIDHRHHAMDAIIIACATREHINYINNQHTLEKGKNKEEKQKSRIDLRTILCEKKYSDNAEENYSWIFKKPWDTFTQEVRSALEGIVVSFKQNLRVINKATNYYEHWVEENGKFIKKMVKQEGTNWAIRKPLHKETVSGKITLEREKVSKGKILTATRKAIDSTFTEKVIEGITDTGIQKILLNYLKFKKSPEIAFSPEGIEELNKNIALYNDGKPHKPIRKVRIFEQGSKFPLGEVGNKSQKYVEAAKGTNLYFGVYQGKDKRSFATIPLNEVIERQKQGLSSVPEYNEKGDPLLFSLSPNDLVYVPVEGEIIEDIHFRNLSNEQKERIYKTVSFSGYQCFFVKQTVSTPIVNKMEYSPLNKMEKSIIGIMIKEVCVKLKVDRLGNISKA

SEQ ID NO: 22640 - protein, 1187 aa, unidentified
  REGION 1..1187: note = Cas Enzyme sequence
MGKKVLGLDLGVGSIGWCLITLDKDEKPQSILGMGSRIVPLSADDATEFTQGKAITKNKMRTVARTIRKGMDRYQLRREALKKVLREHGMLPDEALIKLPLLELWELRARAATPGEQLSLTELGRVLLHINQKRGYKHAKADEAAEAETESKAKKEKESYVAQVKGRYQALKEKGQTIGQHFAGELRANQQTAPRGTYYTYRIKKQVYPREAYIEEYDRIMAAQRVFYPEFLTDALIGRIRDRIIFYQRPLKSCKQLVSFCEFEKKEKVIRVKHTNKEGVEEFVEKTITIGPKVAPKSSPIFQVCKVWESIHNIRLYHPDGTERKLEQEEKQKLFDYLQKNDKLSLTVLRKELKIKPKDKLWCDKLLVNGIGGNTTATILRKALKGYEQYEGLLRFNLTTRDSHEVDEDGVIRPIIDESYQNEPLYKLWHILYSIEDREEMRSALIGQLGIKAEDLDSGLMDALYKIDFVKQGYGNKSAKFICKLLPHLQEGKMYSEAAEAAGIRHSDSMTAQERDERSLLDEIPLLQKNALRQPVVEKILNQMINLVNALKREHGEIDEVRVELARELKMSREEREKTTKNNSSREKENKAIAEKIKEYSITPTKSRIQKYRLWQESAESCIYCGRRVDVVQFLRGEETEVEHIIPRSILFDDSMSNKVCACRSCNQEKGNRFAMEYIQSKGWEQDYIERVDSLFQGKTISYSKRQRLLMLPKDLPEDFIERHLRLSQYISREAQGILRKGIRLVSASEGGVTAKLRQLWGYDNILRDLNLDRYRSMGETEVVTVEHRDGQRTDERIKDWSKRKDHRHHAIDALVVACTRQSYIQRLNRVNAEADRQEMDAFIKEQQQVHKLSKKEKLSLLEHWLIRQPHFTTKEVMKHVEEILISFRPGKRTVTRGRNVYKRSGKTDVQRDVLIPRGALSEETIYGVISVDGENKVVCKYPLQGLKAKDVDYIVDKALQEVVRERISQYGEKQAFAEPLYLDEAKTQEVRSVRCFTGKDQSKLVPLRYNVEGEAVGFVAPGNNHHLALYKDDDGNVVESIVTFWQAVERARYGLPIVVVNPREVMEKALAIPELPESVLKALPASNLRLMEVLRMNDMFLIGMKNGEIQAAIEGEDYPTLSRHLYRVQKLATHDYVFRYHLETTLDGKDNVGEIPKSYRAQSLKAYVKLNPRKVKIDLLGRVSLV

SEQ ID NO: 22641 - protein, 1380 aa, unidentified
  REGION 1..1380: note = Cas Enzyme sequence
MRKILGLDLGTTSIGWALVNEADNDNESSSIIRLGVRVNPLTVDEKSNFEKGKAITTNSDRQQRHGARINLQRYKLRRQNLRNLLQDQGWLCNDTLYEEGKGTTFETYKLRAKAAEEMISLHEFARVLFMLNKKRGYKSNRKANNKEEGQLFDGMTIAKKLYEEHLTPAEYSFQLLSKGKKFAQDYYRSDLIAELERIWNEQKKYYPEILTDEFKQQLEGKTKVNTNKIFLAKYGIYSADLKGLDKKLQPLKWRIEALKQQVSKEILAFVISDLKGHIANTSGYLGAISDRSKELFFNKQTVGQYLWASLKENPHISIKSKPFYRQDYLDEFEKLWETQAAFHKQLTPELKHEIRDIIIFYQRPLKSKKGLISVCELEQRKVKVTIDGKEKEITIGPKVAPKSSPVFQEFRIWQNINNILLINNDTNEKHSLNEKERNLLYQELSVKVKLSKTDVLKILNKKGKQWDLNYKEVEGNRTQAILFDCYNRIISLTGHEECDFKKLRASEIRHYVTTIFKNLGFNTDILDFNPSLVKHELEQQPMYMLWHLLYSYESDNSRTGNEALLRKLETDFGFPKEYATELCDVVFEDDYSNLSVKAMRKILPYLEVGNDYSQACAYAGYKHSRRSLTTEELDQKVYKERLELLPKNSLRNPVVEKILNQMINVINTIIDEYGKPDEIRIEMARELKSSAAEREKATRAISQANTENQRIRDILEKEFALSYISRNDIIKYKLYQELEANGFKTLYSDTYISKEKLFSKDFDVEHIIPKARLFDDSFSNKTLEARDINLAKSNKTAFDFVQEKYGTEGAEAYKKKLDIFLLKEVISRAKYNKLLMKEADIPSEFIERDLRNTQYIAKKACEILGELVKIVTPTTGEVTSRLREDWQLVDVMKELNFDKYQKLGLAEIVEDRDGRKIKRIKDWTKRNDHRHHAMDALTIAFTKPAFIQYLNNLNARSNKSNSIYAIENKELHREDNKLKFNAPIPIHDFRAEAKRHLSAILISIKAKNKVMTQNVNKIKTKQGVIKKIQLTPRGALHNDTIYGTKKRPIITMVKVGAALDEATINKISNLTIREALLKRLAEYNGDAKKAFAGKNSLEKNPIYLNEEKTKVLPALVKTVEWETYHPIRKPITPDLKIEKVIDKGIREILKARLAEFNGDAKKAFSNLDENAIYIDEAKKIALKRVSIEGVLSAIPLHTLKDQAGKLIIGKDGKPVLGNYVQTSNNHHIAFYYDENGNLQDNAVSFFEAAERKSQGIPIVDKNYNHDKGWRFLFTMKQNEYFVFPNEATGFIPTEVNLMDEANYDMISPNLYRVQKVSRIEKGTSASRDYWFRHHLETILNDDVRLKNSAFKRIQSLKFLEGIVKVRINSIGKIVAVGEYD

SEQ ID NO: 22642 - protein, 1192 aa, unidentified
  REGION 1..1192: note = Cas Enzyme sequence
MLMSKHVLGLDLGVGSIGWCLIALDAQGDPAEILGMGSRVVPLNNATDAADFSIGKAFTANQERTARRTMRRGFARYQLRRYRLRRELAKVGMLPDAALIQLPLLELWELRERAATAGERLTLPELGRVLCHINQKRGYRHVKSDAAAIVGDEGEKKKDSNSAYLAGIRANDEKLQDEHKTVGQYFAEQLRQSQSESPTGGISYRIKDQIFSRQRYIDEYNQIMAAQRVHYPDILTDEFIRMLRDEVIFMQRPLKSCKHLVSLCEFEKQERVMRVQQDDGKGGRQLVERKVKFGPKVAPKSSPLFQLCRIYEAVNNIRLTRPDGSPRDITPEERAKIVVHLQSSASLSFAALKKLLKEKALIADQLTSKTGLKGNSTRVALAAALQPYPQYHHLLDMELETRIMTVQLTDEETGEVTEREVAVVTDSYVRQPLYRLWHILYSIEERDAMRRALIIQLGMKEEDLDGGLLDQLYRLDFVKPGYGNKSAKFICKLLPQLQQGLGYSEACAAVGYRHSNSPTSEEITERTLLEKIPLLQRNELRQPLVEKILNQMINLVNALKAEYGVDEVRVELARELKMSREERERMAEGNRRREKENKAIAEKIRECGLFPTKSRIRKYMLWEEAGEQCLYCGQILTLSQCLNGDDMEVEHIIPKSVLYDDSYGNKTCACRRCNKEKGNRTALEYIRAKGWEAEYMERINGLLDKKAISYSKHQRLRWLKEDIPSDFLERQLRLTQYISRQAMAILQQGIRRVSASEGGVTARLRSLWGYDDILHTLNLDRYDSMGETERVSREGETTEKLRIKDWSKRKDHRHHAIDALVVASTRQGYIQRLNRVSSESEREAMSGEIEMQKVTKIDKLSLLERWLTQRPHLSVRAVSDKVAEILISYRPGKRVVTRGRNIYLRHGKKCVQSGLLVPRGPLSKETVYGQITVNGEQQIVCKYDLHSLKAKDVDYVVDLALRKRLKELLAQHGGKEKEAFAGDVYMDEAGTQGPIRSVRCFTGLDRDKMKAVKYDEQGEAVGFVSPRNNHHLAIYRTPKGKLVESIVTFWDAVDRARYGIPLVITHPREVMEQVLQRGDIPESVLSLLPPSDWVFVDSLQQDEMVIIGLSYEELQRAFEAQDYRKLSEHLYRVQKMSSSYYVFRYHLETSVADDKNTAGRIPKFHRVQSLKAYEEKNIRRVRVDLLGRISLL

SEQ ID NO: 22643 - protein, 1069 aa, unidentified
  REGION 1..1069: note = Cas Enzyme sequence
MAAIAIDDDGKPTEILSAISLIHDSGVDPDSAKSAATRLATSGIARRTRRLYRRKRKRLAKLDKFISSQGWPLKEFEKYEDPFYPWRVRAELATTAITDQQELGEKLPIALRHIARHRGWRNPYSKVTALYTVTEPSDAFLAMQEECAKQLGRTIPETITVGQLVTGMNLGKTRLRGENSLLAARPRQSDNANEIHTIAKVQGLSNELVRQIIDHVFAAESPKGSAAEQVGKDPLQPTKKRALKASDAFQQYRIAALIGNLRIRGGKGNRRLTTEETRLVFDYLRSLPAKQEPTWQLVAEQLKIDRGNLVGTAIMTDDGERAGAKPPVHDTNRIMENTKIKPLATWWKSADADARAAMVKALSNAEVDDFDSQAGAQVQEFFFGISDEDQEKLDGLHLPIGRAAYSEDTLDRLTKRMIGEGMDLYEARQAEFKISNDWAPPAPEIGERVGNPAVDRVLKATARWLNAAERQWGAPKSVNIEHVRAAFMSESSARELDRDNQQRAKRNVKVVAEMQEKLGIEGRPSRADVWRFQSIQRQNGKCAYCGAEISFKNSEMDHIIPQAGEGSTNTRDNLVAVCRECNSSKSNIAFAVWAENTSRPGVSVQKAIERTHHWVTDSGLRKPEFDKFRKQVCDRLRRKATDEPIDARSLESVAWMANELRSRIAQKFKDGDTKVRVYKGALTAEARRASGISGKLEFVDGKGKSRLDRRHHAVDAAVVAFTSNYVAETLALRSNMKFDQELRRKAPQWREFTGSDHVHQVEWTKWKYRMQALAELLNNALVQDRIVVMHNLRLRLGNGAAHEDTIGKLTRLKVGDAISTTDIDRASSEALWCALTRDPDYDPKTGLPENPNRTIRIHGTHLTASDEITVFPVAAASIPIRDGFAKLGSNYHHVRLFRVPSGKKYKYCLMQVYTVDLLKFRKEDLFTVELKPQTISVRTCEALLRKALANGTAEYLGWLVSDDELLIDTSSFDTPGIVKLREEYGPVNRWRLAGLTSVTRLNLRPLYLSKEGLKPNVNPEIKKIIDNRSWIITVNKLFSSGHVKIIRRDALGRPRLHSAAHLPICWEVK

SEQ ID NO: 22644 - protein, 1380 aa, unidentified
  REGION 1..1380: note = Cas Enzyme sequence
MKRILGLDLGTTSIGWALVNEAESNNEASSIVRLGVRVNPLTVDEKSNFEKGKAITTNADRQLRHGARINLQRYKLRRQNLHDCLQKQGWLGTEAMYEEGKASTFETYKLRAKAAEEEISLHEFARVLFMLNKKRGYKSNRKANNKEDGQLFDGMTIAKKLYEEHLTPAEYSLQLLNKGKKFTQGYYRSDLNAELERIWDEQKKYYPEILTDEFKQQLEGKTKTNTRKIFLAKYGIYSADLKGLDRKLQPLKWRVEALKQQVDKEVLAFVISDLKGQIANTSGLLGAISDRSKELYFNKQTVGQYLWASLEENPHISIKNKPFYRQDYLDEFEKIWETQAAFHKQLTPELKQEIRDIIIFYQRPLKSKKSLISVCELEQRKVKATIDGKEKEITIGPKVAPKSSPVFQEFRIWQNLSNLLLIDNDTNEKRPLDEDERNLLYEELSIKAKLSKTEALKILNKKGKQWDLNYKELEGNRTQAILFDCYNRIITLTGHEECDFKKIKASEIRHYVSTIFKNLGFSTEILDFDPSLEKHELEKQPMYQLWHLLYSYESDNSRTGNESLLRKLETTFGFPEEYATVLCDVVFEEDYGNLSAKAMRKILPYLQAGNDYSQACAYAGYNHSRHSLTKEELDQKVYKERLELLPKNSLRNPVVEKILNQMINVINAIIDEYGKPDEIRIEMARELKSSAAERENAIRAISQGNAENQRIREILEKEFALSYISRNDIIKYKLYEELKPNGFKTLYSDTYIPKDKLFSKDFDIEHIIPKARLFDDSFSNKTLEARDINLAKSSKTAFDFIKEKYGEEGAKIYKERLNILLKDSVINEAKYNKLLMTEADIPSDFINRDLNNTQYIAKKAYEILGELVRTVTPTTGKITNRLREDWQLVDVMKELNFEKYEKLGLTEIVEDRDGRKIKRIKDWTKRNDHRHHAMDALAIAFTKPSFIQYLNNLNARSNKGDSIYAIENKELHYEEGKLRFNAPIPVNEFRAEAKRHLSAILVSIKAKNKVMTQNVNKIKTKHGIIKKIQLTPRGPLHNSTIYGTKMRPIIKMVKVGAALDEATINKVSSPAIREALLKRLNEYSGNAKKAFTGKNILEKNPIYLNAGRTKTVPSLVKTVEWENYHPIRKPITPDLKVDKVIDKGIRNILKARLEEFNGDAKKAFSNLEESPIYLDEAKKIALKRVSIEGVLSAIPLHTLKNQAGKPITGKDGKPVLGNYVQTSNNHHIAFYYDEDGNLQDNAVSFFEAAERKSQGVPVIDKDYNRDKGWRFLFTMKQNEYFVFPNEATGFIPSEVDLTDEANYSIISPNLYRVQKVSRIDKGTSASRDYWFRHHLETILNDDAKLKNLAFKRIRGLLELKDIIKVRINSTGKIVAVGEYD

SEQ ID NO: 22645 - protein, 1426 aa, unidentified
  REGION 1..1426: note = Cas Enzyme sequence
MKNILGLDLGTTSIGFAHIVEDENKEKSEIKELGVRIVSLTTDEQSDFEKGKSISTNANRTLKHGARLNLDRYQQRRKFLIDLLQKANLITSFSILAENGKNTTHSTWQLRAKAVTERIEKEEFARVLLAINKKRGYKSSRKAKTEDEGQAIDGMAIAKRLYDENLTPGQLSLQLLQQNKKLLPDFYRSDLQKEFDLVWNFQKQFYPDILTDSFYKELQGKGKDATSKAFSKRYHFDTAENKGSRESVRLQAYQWRAEAISKKLSKEEVAYVLTEINNNLNNASGYLGAISDRSKELYFNRQTVGQYLYAQLQENRHNSLKNKVFYRQDYLDEFERIWETQASFHKELTDELKKQIRDVVIFYQRKLKSQKGLISFCEFESKEIEIEKDGKTITKSIGARVVPKSSPLFQEFKIWQILNNVTCKRKGIRKKKSSAKSTELDLFNESSQAIFSLDMECKQLLFDELNLKGDLKSDKVLNLLGYSPQEWEINYNQLEGNRTQKALYEAYLKIVEMEAHDVKDILQIKSAKDDWSLDESPLSASEIKEKVKDIFQALGICTKILYFDPLLPVKEFEKQDSYQLWHLLYSYESDDSTSGNETLYRILEKKYAFKREHARILANVALQDDYGSLSTKAIRKIYPNIKENQYSKACELAGYKHSKLSLTTEELEARELKNIIPLLKKNALRNPVVEKILNQMINVVNALIEKNSERDAEGKITEYFHFDEIRIELARELKKNAQKRYEMTQNINKAKLEHQKISEILQKQFGIKNPTKSDNIRYRLYQELEHNGYKELYTNAYIAPDVLFSKNIDIEHIVPKARVFDDSFSNKTLAFRDFNIKKGESTAFDYITSLNSEEELNQYLTRVENAYKTKSISPTKYKNLLKKASEIGDDFINRDLRDTQYIAKKAKEILFQVTKNVLSTSGSITDRLREDWGLVDVMKELNMPKYQSLGLTEVEERKDGNKVTVIKNWTKRNDHRHHAMDALTVAFTKPSYIQYLNHLNARKDENNKNYSVILAIEEKETIKVPTNNGKNKRVFIEPIPNFRQVAKKHLEEIFISHKAKNKVVTKNVNKPAGTDKQQITLTPRGQLHKETIYGKYQYYVNKEEKVGVKFDERTITKVSNPLYREALLKRLQANGNDPKKAFTGKNALSKKPIYLDETKTKTLTEKVNLTYLEEDFSIRKDISPDNFKDLKSIEKVIDQGVKRILIKRLQDYDNDPKKAFVDLEKNPIWLNKEKGIAIKRVTISGVSNAQPLHIGKDHLGKTTLNKEGNEIPVDYVSAGNNHHVAIYRDKEGNLQEQIVSFFEAVVRAQQGLPIVDKTYKQAEGWQFLFTMKQNEMFVFPNEATGFNPAEIDLLDPKNKKQISPNLFRVQKIATKDYFFRHHLETNVETDNILKNVTWKREGLSGLKDIVKVRMNHLGDIVSIGEY

SEQ ID NO: 22646 - protein, 1507 aa, unidentified
  REGION 1..1507: note = Cas Enzyme sequence
MKTILGLDLGPNSIGWAKVEVDDKGNYLRNIKLGSRIIPMDQGILGKFDSGVTESQTAIRTNFRGVRRLRERHLQRRERLHRVLHALKFLPKHYEDAIGWDRNEPAIYGKFINNSEPKLAWERQEDGSMHFLFMESFYEMMADFAKMQPSLVSGEKKIPLDWTIYYLRKKALTQQIKKEELAWILLNFNQKRGYYQLRGEEEEDNPTKRKEYYKLKVIGVEADGAPKAGKIWYNIHLENGWTARCQSKVPLDNWVGNIKEYVVTTEYEADGETPKYDKEGKIKRSFKSPEKGDWQLIKTRTEKFIESSNKTVGTFIYDHLLKEPFDKIRGKYIRTIERKYYKNELYKILCEQAKYHKELDSLDTLNACAKELYKNNQQHQEYLLKKDMKYLLLDDLIFYQRPLKSKKSLIADCPYEVYKYNYKQTGKKEQKKIKCIAKSNPYYQEFRLWQFISNIHLFNVTDGKDVTSEYLKTKEDYVRLFTYLNDRKEIKQETLLKGFLKLKKETIGSEKIYPIRWNYIEDANKSYPCNTTRHELLLAFDRAGIQRELLNVEGREYRLWHLLYSIESKDKTESALRKLKSNKAFSDLNIDDAFVNSFLKIKPFKKEYGAYSEKAIKKLLAVMRRGSLWKEADICEATKQNIAKILQNDIDEKLKKKIEAAVSSFNKLSDFQGLPTWLACYVVYGRHSEAAQIQCWQSPEDLKTYINKFKQHSLRNPIVEQCLLETLRTVYDIWKDAGQIDEIHIELGRNMKSTAEQRARKTNEFLRNENTNLRIKNLLMELKNDDKIENVRPYSPSQQEILRIYEEGALQELSKEDEMYEDISKISKMAQPSPTELSRYKLWLEQKYRSPYTGRVIPLSKLFTTAYQIEHIIPQSRYFDDSFNNKVICESEVNSLKDNMLGYEFIKECGGQKVHCTLLEGNVEIFTEEEYKTFVTKHYVGNPRKKDNLLLEDIPQEFSARQLNDSRYISKMVQTVLSNIVRTKDEQEAISKFVVSCNGMITDRLKKDWGLNDVWNTIVCPRFKRLNEITKTNAFGHWEDKAGKHVFQTIVPLELQRGFSKKRIDHRHHAMDALVIACASRNIVNYLNNESANNPEKREYLRKQLCNEKRKIKKPWNTFTQDAREALADIVVSFKNYVRVINKATNHYEHYSSSGSKVMISQKGNDMWAIRKPLHKESFFGHVNLRRKATVSLKKALENIPAICDKTLRDYINFLVEKRFNTRQLLAHFKSINYRLNRKRVDKVEVWQFSDEKIEMVAKRKPLDTSFDAKQISFITDTGIQKILLNYLQSKDGNAEIAFTPEGIEEMNKNISIYNGGKAHQPILNVRVATSKGMKYPVGQTGNKATKFVVAEKGTNLYFAIYENELGERSYDTIPLDIVIKRLKEGQSPVPQINKVGIPLKFYLSPNDLVYVPTKENEDELCRDRIYKFVDSSGTTANFVPHTSANTIYNVDKEYAKKYCNGAVILNEYGLGSSQSKNQKDLDGEMIKEICWKLKVDRLGNIIKVIK

SEQ ID NO: 22647 - protein, 1450 aa, unidentified
  REGION 1..1450: note = Cas Enzyme sequence
MKHILGLDLGSNSIGWALVQQDFENKQGKIMAAGSRIIPMDQGILGDFEKGNTVSQTAERTTYRSMRRLRERHLLRRERLHRVLHILGFLPPHYDAQIDFTKRYGKFIDNAEPKIAYNNGNFIFTNSFNEMIEDFKKHQPQLFYKKSNGEESKIPYDWTIYYLRKKALSQKITQQELAWLILHFNQKRGYYQLRGEEETETPNKEVAFHSLKVVEVEAEAPNKKGEIWYKIRLENGWIYRRTSKIPLDDWKGKTRDFIVTTDLNDDGTIKVDKEGKEKRSFRAPEENDWNLLKKKTEHDIDFSGKTVGAYIYDHLLQDPNQKIKGKLVRTIERKYYKNELKAILTKQIALQPELFTKNLLADCIRELYRKNETQQQNLLSKDFLHLFVEDIIFYQRPLRSKKSTIANCTLEKRSYIDKETNERKDAPIKVCAKSNPYYQEFRALQWLQNLRIYEIETDREVTAEFIETPQDYEALFNFLMSQKEIDNESLLKYFLHAKNPQIKDKAAKSELKKWLTTYRWNYVYDVADNSSKKYPMNETGYDLQRYLQKVEGLPANFLTFDTTYRLWHLLYSVKDKVEFEKALKRFAKKKQLNETSFIESFKNFKPYPNEYGSFSEKAIKKLLPLMRFGNHWDFNRIDVSTQKRIDDLINGVANEDIRTIIREKTEKYQLNSETCFQGLPLWLAQYVVYNRHAEATDIEKWTSVSDLEAYLEDFKQHSLRNPIVEQVVTETLRVVRDIWQQYGGGQANFFDEIHIELGRELKKTAEERKQLSDKNQENENTNLRIKKLLAELKEDASIQNVRPYSPVQQELLKIYEEGVFSSTDEIEEDIQKIRKKAEPTTPEIQRYKLWLEQKYKSPYTGEVISLTKLFTEEYEIEHIIPQSRYYDDSLSNKVICESAVNKLKTNQLGLEFIQNHHGEKVRITANKEVTIFTEEQYKDFVKKHYANNLAKQQKLLLNEIPEKMVARQMNDTRYISKYISEILSKIVRSDEKDEGVNSKNVIPCTGKITTALKQDWGLNDVWNELIIPRFERMNQLTQTQLFTSYNDRLQKNLPTVPIEYSQGFQKKRIDHRHHAMDALVIACATREHINYMNNQHALDKSKDKKEKQQSRIDLRTILCEKKNNNWQFKKPWGTFTQEAKESLEHIVVSFKQNLRVINKATNYYEKWEEKNGILVKKKVKQEGTNWAIRKPLHKETISGKILLDRKIGKDKILTATRKAVDITFTEKIISSITDIGIQKILLNYLKYKGSPEVAFSAEGLEELNKNIAQYNEGKKHQPIYKVRIFEEGSKFPLGETGAKATKFVEAAKGTNLFFGVYQGKEKRSYATIPLNEVIERQKQGLPSVPERNEKGEPLLFSLSPNDLVYVPMEGEIAETIDFNNLSKEQKERIYKTVSFTGNQCFFVQEAVATPIVNKMEYSPLNKMERDIVGTMIKEVCIKLKVDRLGNITKA

SEQ ID NO: 22648 - protein, 945 aa, unidentified
  REGION 1..945: note = Cas Enzyme sequence
EIVKALQKFADKHDLNASFVDVFRKFPPFKKEYGSYSAKAIKKLLPLMRMGKYWSEDSIDKGTRKRMDKIITGEYDEKIENRVREKVIHLADVSDFRGLPLWLVCYIVYGRHSEAKEITQWKSPADIDSYLKSFKQHSLRNPIVEQIIIETLRVVRDIWKQVGNIDEIHVELGREMKNPADKRKKMTQQMSENENTNLRIKYLLTEFLNPEYEVENVRPYSPSQQDILRIYEEGVLNSVSDLPEEISDILKKFTETDLKKRPSRSEVLRYKLWLEQKYRSPYTGEVIPLGKLFTSAYEIEHVIPQSCYFDDSFSNKVICEAEVNKLKSNLLGHEFIVKHHGEIVELPFGKKVRIFTVDEYEQFVKDNYSRTRGKMKKLLMDDIPEEFVTRQLNDSRYISKVVKSLLSNIVREKGEEEAISKNVIPCTGGVTDRLKKDWGINEVWNKIILPRFQRLNELTGTNKFTTKNVGIQEIPTMPLELQKGFNKKRIDHRHHAMDAIIIACANRNIINYLNNESATAKAELSRYDLQKLLCDKAKTDNNGNYKWVIRKPWASFTQDTYLALENIIVSFKQNLRVINKATNHFLHYNEEGKKIFVKQGKGDNWAIRKSMHKDTVFGEVNLRRIKTVALNEAMKNPQSIVVKDFKRKLLELWNLGFDAKRIKKYFEDNRETWSDINLSKIEVYYFSKDTKDRFFATRKPLDTSFDRKKIENNITDTGIQKILLRHLELKDNNPDIAFSPDGIDEMNRNIIQLNNGKYHQPIIKVRWYEQADKFAVGQTGNKSSKFVEAAKGTNLFFAVYESNILDKKTNTIIKKRNYATIPLNVAIKRQKQGLPVAPEDENGNDPIFVLSPNDLVYLPTAADLANGIIAQPLDRGRIYKMVSCTGNEGHFIPARIANPILQTIELGSNNKAQKAWTDEMIKEICMPIKVDRLGNVLESSSSHKK

SEQ ID NO: 22649 - protein, 1509 aa, unidentified
  REGION 1..1509: note = Cas Enzyme sequence
MKTILGLDLGTNSVGWAVINSVIKEQAERIWIEMAGSRIIPMDAAVLGDFDKGNSISQTSERTRLRGARQLRERQLLRRERLHKVLNILGFLPNHYLEYIDFEKHPGKFLADAEPKLAWVKDEQGKYTFLFQAAFDEMLADFAIHQPSLVSGDKKIPYDWTIYYLRKKALTEMISKEELAWILLNFNQKRGYYQLRGEEEEDNAGKSVEFYALKVLTVEATDEKKGRDVWYNVHLENGWIYRRSSSVPLDWEGQVKEFIVTTDLNPDGTPKLDKYGEVKRSFRAPKEDDWMLIKKRTEADIANTHKTVGAYIYDTLLQKPQQKIIGKLVKTVERKLYRDELSLILQKQCAFHAELQDRALYARCVEALYPSNEVRRKNIANRDFVYLLMDDILFYQRPLKTKKSLIANCPYEENEYVDRETGEIKKAPLKCIAKSHPLFQEFRLWNFLSNIRIYQKEKEINGTLHLDVDVTAEFLKTEDDYVALFDWLNSRKEIEQKTFLKYPKFGLKKEISNYRWNYVEDKQYPCNETRHAILSRLEKANVCIDFLSNEKEVALWHILYSVSDKQEIEKALRTFAAKNGLDESFVEAFKKFPPFKSEYGAYSAKAIKKMLPLMRCGKYWDVSSIDDTTKERIKKIVTGEYDERISVKVRDKVMNLSDISCFRRLPLWLACYIVYNRHSEDKEAVKWESPADIDAYLASFKQHSLRNPIVEQVITETLRVVRDIWKQVGRIDEIHIELGREMKNPADKRKRMTAQILENENANLRIKALLAEFMNPEYEIENVRPYSPSQQEILRIYEDTVLHAEDQLPEEIDAILKKFNSSKVPTKSEFLRYKLWLEQKYRSPYTGELIPLGKLFTAAYEIEHVIPQSRYFDDSFSNKVICESAVNKLKDNQLGYEFIKNHHGQKVEVGFGKSVEIFSVDSYERFVKEQYAKSAVKMKKLLMDDIPEQFIERQLNDSRYISKVIKGLLSNIVREKNDSGEYEPEAVSKNIVVCTGSVTDRLKRDWGMNDVWNSIVYPRFERLNSLTDTQSFGHWENKSGKKVFQTELPLEYQKGFSKKRIDHRHHAMDAIVIACATRNHVNYLSNESASRNAKISRYDLQRLLCDKNRTDDNGNYKWVIKKPWDTFTQDAREVLSKIVVSLKQNLRIINKTTNVYRHFDATVNRVYEKQKTGDSWAIRKPMHKDTVFGAVNLRKVKVVRLSVALDTPAMIVDKRVKNKVFELLSYKYDKKRIEKYFKENAFLWKELDLAKVAVYYFTEATTEPLVAVRKPLDSTFNEKKIKESVTDTGIQKILLNHLCTKEGKPDLAFSAEGIEEMNRNLLQLNNGKSHQPIYKVRVYEPRGNKFSVGVLGNKGTKWVEAAKGTNLFFAIYITEDGKRTYETIPLNVVIEREKQGLVPVPDRNEKGDKLLFWLSPNDLVYLPTEEEREFGRINEPIDRGRIYKMVSCTGNEGHFIPANVANPIVPVIELGSNNKAQRAWTNEMIKDICIPIKVDRLGHIIEVKYRIDE

SEQ ID NO: 22650 - protein, 1380 aa, unidentified
  REGION 1..1380: note = Cas Enzyme sequence
MRKILGLDLGTTSIGWALVNEADNDNESSSIIRLGVRVNPLTVDEKSNFEKGKAITTNSDRQQRHGARINLQRYKLRRQNLRNLLQDQGWLCNEALYEEGKGTTFEIYKLRAKAAEEKISLHEFARVLFMLNKKRGYKSNRKANNKEEGQLFDGMTIAKKLYEEHLTPAEYSFQLLSKGKKFAQDYYRSDLIAELERIWNEQKKYYPEILTDEFKQQLEGKTKVNTNKIFLAKYGIYSADLKGLDKKLQPLKWRIEALKQQVSKEILAFVISDLKGHIANTSGYLGAISDRSKELFFNKQTVGQYLWASLKENPHISIKSKPFYRQDYLDEFEKLWETQAAFHKQLTPELKHEIRDIIIFYQRPLKSKKGLISVCELEQRKVKVTIDGKEKEITIGPKVAPKSSPVFQEFRIWQNINNILLINNDTNEKHSLDEKERNLLYQELSVKVKLSKTDVLKILNKKGKQWDLNYKEVEGNRTQAILFDCYNKIISLTGREECDFKKLQASEIRHHVTTIFKNLGFNTDILDFNPSLVKHELEKQPMYMLWHLLYSYESDNSRTGNEALLRKLEIDFGFPKEYATVLCDVVFEDDYSNLSVKAMRKILPYLEVGNDYSQACAYAGYKHSRRSLTKEELDQKVYKERLELLPKNSLRNPVVEKILNQMINVINTIIDEYGKPDEIRIEMARELKSSAAEREKATRAISQANAENQRIREILERDFALSYISRNDIIKYKLYQELEANGFKTLYSDTYISKEKLFSKDFDVEHIIPKARLFDDSFSNKTLEARDINLAKSNKTAFDFVQKKYGTEGAEAYKKKLDILLSKEVISRAKYNKLLMKEADIPSEFIERDLRNTQYIAKKACEILGELVKTVTPTTGEVTSRLREDWQLVDVMKELNFEKYQKLGLAEIVEDRDGRKIKRIKDWTKRNDHRHHAMDALTIAFTKPAFIQYLNNLNARSNKSNSIYAIENKELHREDNKLKFNAPIPIHEFRAETKRHLSAILISIKAKNKVMTQNVNKIKTKQGVIKKIQLTPRGALHNETIYGTKKRPIITMVKVGAALDEATINKISNLTIREALLKRLAEYNGDAKKAFAGKNSLEKNPIYLNEEKTKVLPALVKTVEWETYHPIRKPITPDLKIEKVIDKGIRKILKARLAKFNGDAKKAFSNLDENPIYIDEAKKIALKRVSIEGVLSAIPLHTLKDQAGKPIIGKDGKPVLGNYVQTSNNHHIAFYYDEDGNLQDNAVSFFEAAERKSQGIPIVDKNYNHDKGWSFLFTMKQNEYFVFPNEATGFIPTEVNLMDEANYDMISPNLYRVQTISKIIYDKSIIRDYLFRHHLETTVERIPNLKGITYKQLKSLPHLKGIVKVRINAIGKIVAIGEYD

SEQ ID NO: 22651 - protein, 1506 aa, unidentified
  REGION 1..1506: note = Cas Enzyme sequence
MKTILGLDLGSNSIGWAKVEVDDEGNYLRNIKLGSRIIPMTQDMLGDFDKGVKVSQTATRTDFRGIRRLIERHLLRRERLHRVLHALKFLPKHYEDAIGWDRNEPATYGKFVNNSEPKLAWERQEDGSMRFLFMESFNEMVADFAQNQPSLVSDGKKIPLDWTIYYLRKKALTQPIKKEELAWILLNFNQKRGYYQLRGEEEEDNLTKRKEYYKLKVVGVEADGAPKGGKTWYNIHLENGWTARCQSKIPLDDWVGKVKEYIVTTEYEDDGKTPKCDKEGKVKRSFKSPEKDDWQLIKTRTEKFIDDSNKTVGAFIYDHLLEKPFDKIRGKYIRTIERKYYKNELREILREQAKYHEGLHSLEALKICAEELYKNNQQHQEYLLKKDMTFLLLNDLIFYQRPLKSKKSLIADCPYEVYKYDDKLTGKKGQKKIKCIAKSNPYYQEFRLWQFIANLRLFSVTDGKEVTAEYLKTEEDYVRLFSFLNDRKDIKQETFLRSFLKLKKVPIGSEKIYPIRWNYIEDANKSYPCNATRHELLLAFDRADIPRKLLDVEGREYRLWHLLYSIEAKEETESALRKLKANKAFGDLNIDDDFVNSFLKIKPFEKEYGAYSEKAIKKLLAVMRRGSLWKEADICEATKQNIAKILQNYIDEKLKKKIEAAVSSFNKLSDFQGLPTWLACYVVYGRHSEAAQIQCWQSPEDLKTYIKKFKQHSLRNPIVEQCLLETLRTVYDIWKDAGQIDEIHIELGRNMKSTAEQRARRTKDILRNENTNLRIKNLLVELKNDDKIENVRPYSPSQQEILRIYEEGALQELSKEDEMFEDISKISKMAQPSPTELSRYKLWLEQKYRSPYTGRVIPLSKLFTTAYQIEHIIPQSRYFDDSFNNKVICESEVNSLKDNMLGYEFIKECGGRIVHCTLLGDVKIFTKEEYKDFVTKHYIDNTYKRDKLLLEDIPQEFSARQLNDSRYISKMVQTVLSNIVRTENEQEATSKFVVSCNGAITNRLKKDWGLNDVWSSIVCPRFKRLNEITKTNAFGHWEDKAGKHVFQTTVPLELQRGFSKKRIDHRHHAMDALVIACASRNIVNYLNNESANSPEKREDLRKKLCDEKRKIRKPWKTFTQDAREALSDVVVSFKNYVRVINKATNYYEHYSSSGNKVMISQKGNDMWAIRKPLHKESVFGRVNLRIKVTVSLKKALENIPAICDKTLRDYINALVEKHFNTRQLLAHFKSINYHLNRQHVDKVEVWQFSDEKIEMVARRKSLDTSFDDKQISSITDTGIQKILLNYLQTKDGNAEIAFTPEGIEEMNKNISLYNDGKAHQPILKVRVATPKGMKYPVGQTGNKATKFVVAEKGTNLYFAIYENELGVRSYDTIPLNIVVERLKEGLSPVPQANEADIPLKFYLSPNDLVYVPTKENEDELCRDRIYKFVDSSGTTANFVPHTSANTIYNVDKEYAEKCCNGAVILNEYGLGSSQSKNQRALTGEMIKEICWKLKVDRLGNIIKVIK

SEQ ID NO: 22652 - protein, 1053 aa, unidentified
  REGION 1..1053: note = Cas Enzyme sequence
LTAELKKEIRDMIIFYQRRLKSQKGLISFCEFERLEIVVEKDGKKQTKVIGCKVIPRSHPLFQEFKVWQTLNDIKVLGREKKRNALSASESRALYPEEKEILARELAIKENMKKADVLKLLFENPQELDLNFKQIDGNRTGFSLFSAYSKMIEKYGYEPLDFKKPADEIIGQLRTIFTDLGWNTNLFTIDLTKEGKELEMQPYFRLWHLLYSFEGDNTSTGNGKLIEKIMQLCGVEKEYAVELASLSFQDDYGSLSAKAIKRILPYLKEGNLYDVACEYAGYRHSKSSLTKEEIENKVLKGKLEVLPKNSLRNPVVEKILSQMVNVINTIIDTYGKPDEIRVELARELKKSAKEREELTKAIAKSTREHEEIRKLLQDEFGMMNVSRNDIIRYKLYEELKDNGYKTLYSNQYIPKEKIFSKEIDIEHIIPQSRLFDDSLSNKTLEYKAINIEKGNKTAYDFVKEKYGEEGLQQYINRCESLFNDKKAKLRKLKMEQKDIPDGFIDRDLRNTQYIAKKALAMLNEICRRVVATTGSITDQLREDWQLVDVMKELNLPKYEALGFVETYEDKDGRKIKRIKDWTKRNDHRHHAMDALTVAFTKDAFIQYFNNKNAAQDSGNRNHTNIIGIKTRYFDKGRALPPIPLEQFRIEAKQHLEKLLVSIKAKNKVVTVNVNRTKKRKGENTKIQQTPRGQLHLETVYGSHKQYVTKIEKVNASFDAAKIATVSKRAYRNALLKRLETFGNDPKKAFTGKNALEKNPLYADKYQTIRVPEKVQTVEFETIYTIRKPVDPALNVDKVVDVKVRAILERRLKEYGGDPKKAFVNFWENPIWLNKEKGISIKRVSIRGINNAQSIHVKKDKNGNPIWDENGKQIPVDFVNTGNNHHVAIYRKPVLDKKGQVTFDEDGNLMYELDEVVVPFFEAVTRANLGLPIIDKDYRKSEGWQFLFSMKQNEYFVFPNEKTGFNPKEVDLLNPDNYAMISPNLFRVQTMSKVMYGNNVVRDYKFRHHLETTVKDMKELKDIAYKQYKTLSFGNSVVKIRINHIGQIVSVGEY

SEQ ID NO: 22653 - protein, 1064 aa, unidentified
  REGION 1..1064: note = Cas Enzyme sequence
MIIANIRIYQKEKKVDGKLLTDIDVTTEYLSSKDDYVALYEWLCVRKEIEQKTFLKYPAFGLKKEIENYRWNYVEGKSYPCNETRSLILHYLEKAGISSTFLSTKIEESLWHILYSVEDRIELETALRTFASKYQLSCNFVEVFKKFPPFKKEYGAYSAKAIKRLLPLMRMGKYWKVDAIDGNTAERIEKILSGECDEKILNKVREKTIHLSETSDFQGLPLWLACYVVYNRHSEGKEVAKWKSPEDIDIYLKSFKQHSLRNPIVEQVITETLRVVRDIWKRVEQIDEIHVELGREMKNPSEKRRQMTERMLENENANIRIKALLTEFMNPEYEMENVRPYSPSQQEILRIYEDTVLNGAGDIPEDIEIILKKFKENDIKKRPGKSDFLRYKLWLEQQYRSPYTGEIIPLGKLFTTAYEIEHVIPQSRYFDDSFSNKVICESEVNKLKDNMLGYEFIKKHAGEIVELGFGKSVKIFSVEAYERFVGENYYKAGSKKSKLLMDDIPEKFIERQLNDSRYISRVVKGLLSNVVREEDANGEYESEAISKNVIVCSGSVTDRLKKDWGVNDVWNNIVYSRFERLNRLTESQQFGHWENREGKRFFQTELPLEYQKGFSKKRIDHRHHAMDAIIIACATRNHVNYLSNESASKHARIARYDLQRMLCDKSKADGGGNYKWIIQKPWATFTQDVYRTLLDIIVSFKQNLRVINKMTNYYQAYDDAGKKVFKKQKKGDSWAIRKSMHKDTVFGQVNLRKIKEVRLSVALESPEKIVDKKIKEKVLQLFAYQYDKKKIEKYFKENASLWKEVNLAKIPVYYFTDESSELLVAVRKNLDTGFTEKKIRESVTDTGIQKILLNHLSNKGDKPELAFSPDGIDEMNRNLVILNGGKPHQPIYKVRVCEPLGNKFKVGTNGNKSAKYVEAAKGTNLFFAIYETDAGKRTYETIPLNVVIEREKMGWLPVPEKNNKGEKLLFWLSPNDLVYLPTEEELMSRILSDKLDRGRIYKIVSFTGNRLYAIPYNVSNMIWDKNEYTQLNKVESTDMKESIKEICMPINVDRLGHITEIIIK

SEQ ID NO: 22654 - protein, 1494 aa, unidentified
  REGION 1..1494: note = Cas Enzyme sequence
MKNILGLDLGTNSIGWALIDNESHRIIKSGSRIIPMDAATMGDYEKGNLKSAASERTSFRGMRRLYERAKLRRERLLRVLNILGFLPEEFRRQIDFEHHPGQFIDGKEPLIAYHHDENGQRVFSYMCAFKEMLTDFRATQPELVRDGRRVPYDWTIYYLRHKALTQPVTKEELAWIILNFNTKRGYYQLRSESEEVTTNKNEEYAELEVVSVEKTGEDKKRAGYYWYTITYDNEAEQKITSTIPPRQIGDKVELIVTTARDKAGETKKSVRSPKEDDWTLMKKRTEHNIEEEECTVGSYIYQHILADPTVKVRGKLVHTIERKFYKKELKQILNKQKEFIPELQDTSLYEACIKELYRNNEAHIQSIANKDFTDLFVNDIIFYQRPLKSKKSTISNCPYESYYYKNKETGELIRKPIKCIAKSNPLYQEFRLWQFVHNLRIYKKSEEVSGRLQTDVDVTDRFLTTPDDYAKLFSWLNDRKEIKQKELLRYEAFGLSKSYGDYRWNFVEDKPYPCNETLHEINRRMKSILSDKKLSSEAYQQLWHILYSIDDPIEIRKALTSFAQNQKINSDDFVNAFYQYVPEKTKSYGAYSEKAIKKLLPLMRRGSYWAIGNIDEKTRRRLDNIINGVADDSISTCTREKLNNLTDITMCQGMPLWQACYAVYDRHSEAADTTKWEQPDDIDTYLSTELKQHSLRNPIVETVISETLRVVRDIWKAYGRPEEIHVELGRNLKQDAKSRKQDAIRMAENEQTNLRIRALLQELSNPECGVENVRPHSPSQMELLKIYENEVLQSTDDIPEEISNIIKDLGKTDPKKRPSLSDITKYRLWLEQKYQSPYTGHIIPLSKLFTPAYQIEHVIPQSRYFDDSISNKVICEAEVNKEKDRMLGYEFIINKGGSIVKGSFGQEFKIFDKVQYEDFVKQRYAHNKTKMKKLLMDDIPDGFIQRQLNDSRYMSKKIISILSNIVREDGEKEATSKHIIVTSGAITDRLKKEWGIKDVWNDIIAPRFKRLNKLTDSNNYGMETEKEGRQYFQINVPTELSAGLSKKRIDHRHHAMDAIIIACTTRNHVNFLNNSVAASDRKDIRRDLQHTLCTKTKTDSNGNYVWRFNKPWDTFTQDTRQELEGIIVSFKQNLRIINKMSNYYQHYVDGRKTIGRQNKGDGWAIRKSLHKATVSGKVNLKRSKTVGFKEALNDWSAIKDKTSKAILQKIIAQYKNYDPKTIFKYFKDRNFKVEGKDFSKLEVYYNTSDKEPMSAHRVNIDTTFDEKEIRSITDTGIQKIMLKHLHTYDDAQGKTHPEAAFSPEGIEKMNQNIRTLNGGKDHKPIFKVRKAETLGMKFAVGERGHKDKKWVEADKGTNLFFAIYESEENKRSYSSIPLNEAIDRLKRGENVTDERDQNGNKLLFVLSPMDLVYVPDPDDAHIDEVKGNNNIFKMVSCTGTECYFVPETYANVICKGKELGSLNKVESYDGINIKKSCYKITVDRLGKVRKIFKG

SEQ ID NO: 22655 - protein, 1493 aa, unidentified
  REGION 1..1493: note = Cas Enzyme sequence
MKRILGLDLGTNSIGWAYLVFDDNGNLIEKIRLGSRIIPMSQDVMGKFESGISVSQTAERTQYRSTRHLRERSLQRRERLFRVLHMMGFLPQHFDQSIGWDKNDNKTYGKFLDESEPKLAWKRNKDGKMEFLFMDSFHEMIADFMSHNSSWTPDQKVPLDWTIYYLRSKALRAPISKEELAWIILNFNQKRGYYQLRGEEEEEDKTKRVEFLEARVVRVEATDRKKGKSTWYNVYFDNGMIDRRTSAISLENWVGQTRQFIVTSEYEADGVTLKLDKEGNVKRSFRIPKDDDWTLRKKRTEHDIEESGLHVGTFIYQALRDRPKVKIRGNFVHTIERKFYKQELRAILTKQAEFIPELQDQALLQDCIANLYPSNEAQRQKLQSKDFIYLFLDDIIFYQRPLKSKKNLISNCSLEKRISIDHSTGECIDRPIKCIARSNPYYQEFRLWQFITNIRLFDRDSQEDVTSRYLSTSEEWERLYAFLYNRKEINQDTLFKEFFGWKKPKGRNSVYPIHWNYAEDKEKTYPCNETRATLLTTFEKAEMNAAELNTREGEMQWWHLLYSVTDKLELEQALRKRGLSQEQIRVFTRIKPFEKDYGAFSEKAIKRFLTLLRKGSFWNADTIDTTTRARIDNIIAGNIEEKLRDKMQHKSYPLQKLEDFQGLPVWLASYIIYGRHSEVSEIVRWETPQDLQNYIHNFKQHSLRNPIVEQVVLETLRTVYDIWKNFGDIDEIHLEMGREMKKTAKQRQDDSQHIQRNENTKLRIKALLMELKNDATISDVRPYSPSQQDILRIYEEGALATLEKSDQDYDEIIKISQKSQPSASEMKRYKLWLEQKYQSPYTGRFISLTKLFTPAYEIEHVIPQKRFFDDSFSNKVICEAEINKAKSSMLAHEFITKRGGEIIHSQSLGDLRVLKVDDYESLVKHIYKDNATKRRKLLLDDIPTEFIQRQLNDSRYIARFIQSVLSNLVREEGEEEAKSKHVIVCTGGITDRLKKDWGLQDVWNHLVSPRYQRLNELTNSEDFGHWENKDGKRVFQTSMPIELQKGYSKKRIDHRHHAMDALVIACASHNIINYLNNENAASPQSREDLRKQLCDKGRTLRKPWKTFTQDAEQALHGVVVSFKNYVRIINKATNFYQHYEQGKKKYIPQKGETLWAIRKPMHKGMPFGHVNLRYPLMVSLAYALERPQNIVDKALREYILHLIAQNFDTKQLKKHFKTLGNKFENRDISKVEIWVMSDDREPLVASRKPLNENFGKDSIAKITDTGIQKILLNFLKYKGDDPKVAFSPEGIIELNANIAKFNDGKSHQPIKKVRIFELLGNKYPVGQRGNRKTKFVEAQSGTNLYFAIFEDGEGKRSYETIQLIEVVERLKQGLSPVPDSNDKNISLTFFLSPNDLVYVPNEEEIGSNMKVEDLQRERIYKFIDSSNTTANFIPHRIATTLLDVKTPINNIQNELGLGSPQSKHQRALTGEMIKSVCWKLEVDRLGNITKIIR

SEQ ID NO: 22656 - protein, 1431 aa, unidentified
  REGION 1..1431: note = Cas Enzyme sequence
MKHILGLDLGSNSIGWALIEQDFDNKQGKILGLGSRIIPMDQGILGEFERGNKVSQTAERTGFRGIRRLRERHLLRRERLHRVLHLLGFLPPHYDAQIDFTKRFGKFIGDSEPKLAYNNEGFIFLESFNEMVEDFKKHQPQLFYIKSNGEESKIPYDWTIYYLRKKALQEKISKEELAWIILNFNQKRGYYQLRGEEEEKSTKNVEFYSLEITDVIADTPNNKGEIWYSIHLENGWVYRRASKISLEDWKGKVRDFIVTTELNEDGSVKLDKEGKEKRSFRAPSEDDWNLIKKKTEQNIVFSGKTVGEYIYDHLLQNPNQKIKGKLVRTIERKFYKEELKAILEKQVALQPELFTEELFVDCVRELYKNNEIHQNSLSSKDFVYLFLNDIIFYQRPLHSQKSNISSCSLEYRFCIDKETKQRRKTYLKVISKSNPYYQEFRVLQWLSNLKIYRKEDDKDVTSEFISSIEDKETLYEFLMSEKEVSNKSVLEFLLMKLLRETYPFAKETELKKELKKEITKYRWNYVYEEENDSKKYPMNETGYEIKKRLKEVKNIPDNFLTKDIEYQLWHIIYSVTDKYEFEKALMKFAQKHNLDAESFVENFKRIKPYPGDYGAFSEKAIKKLLPLMRFGKYWNYSDISEPVQARISDIINGVDNESIKTIVREKAEKFQLSQEAYFQGLPLWMAQYIVYGIHSEVADIQRWTSPSDLEEYLKGFKQHSLRNPIVEQVVTETLRVVKDIWEYYGKGEENFFGEIHIELGRELKKTAEERNRMTREINENEETNLKVKKELQQIFENKSAENVRPYSPIQQEKYKLWLEQKERSPYTGQPIPLSKLFTDDYQIEHVIPQSRFFDDSLSNKVICEASVNAQKGAQLGLEFIKKHGGEIIEIGLNKKVRILNEKEYKELVNELFANNRGKKAKLLMEEIPEKMVERQLNDTRYISKFISQILSNIVRSPQEDNGVNSKNIIPCTGKITAALKQDWGLNDVWNDLILPRFERMNNLTQTELFTTYSEKYQKKIPTVPLEHAKGFQKKRIDHRHHALDALVVACATRSHINYMNNQHALDKHKAKEEKQNARIDLRTALCEKKYNDNAEDKYNWTFKKPWNTFTQDVRSALEMIVVSFKQNLRVINKATNYYEKWVEEKGKKVKKKVKQEGINWAIRKPLHEQTVAGKITLERVKIGKGEMLTADRKFIDSSFDTKKISKITDTGIQKILLNYLAYKGSSELAFSPEGLEELNKNIYLYNDGKPHKPIYKVRSYEKGSGRFVLGERGAKSKKYVQGAPNLYFGVYQSKGKRSYATIPLAEVIERQKQGLTSVPKFNEKGEKLLFSLSPNDLVYVPMEGEDTENIDFTNLSKEQRERVYKTVSFTGNQCFFVKQTIASLIKSYDPQTKIGELESKNKLEVTICSRIKIKEFCIKLKIDRLGNISKA

SEQ ID NO: 22657 - protein, 1450 aa, unidentified
  REGION 1..1450: note = Cas Enzyme sequence
MKRILGLDLGSNSIGWALVQQDFENKQGKIMATGSRIIPMDQSILGDFEKGNTVSQTAERTAYRSIRRLRERHLLRRERLHRVLHILGFLPPHYDAQIDFSKRYGKFIDNAEPKIAYNNGNFIFTNSFNEMIEDFKKHQPQLFYKKSNGEESKIPYDWTIYYLRKKALSQKITQQELAWLILHFNQKRGYYQLRGEEETESPNKEVAFHSLKVVEVEAEAPNKKGEIWYTIRLENGWIYRRTSKIPLDDWKGKTRDFIVTTDLNDDGTIKLDKEGKEKRSFRAPDENDWNLLKKKTEHDIDFSGKTVGAYIYDHLLQDPNQKIKGKLVRTIERKYYKNELKAILTQQIALQPELFTKNLLADCIRELYRKNETQQQNLLSKDFLHLFVEDIIFYQRPLRSKKSTIANCTLEKRLYIDKESNERKDTPIKVCAKSNPYYQEFRALQWLQNLRIYEIETDREVTAEFIETPQDYEALFNFLMSQKEIDNESLLKYFLHAKNPQIKDKAAKSELKKWLTTYRWNYVYDVADNSSKKYPMNETGYDLQRYLQKVEGLPANFLTFDTTYRLWHLLYSVKDKVEFEKALKRFAKKKQLNETSFIESFKNFKPYPNEYGSFSEKAIKKLLPLMRFGNHWDFNRIDVSTQKRIDDLINGVANENIRTIIREKAEKYQLNSESCFQGLPLWLAQYVVYNRHAEATDIEKWTSVSDLEAYLEDFKQHSLRNPIVEQVVTETLRVVRDIWQQYGGGQANFFDEIHIELGRELKKTAEERKQLSNRNQENENTNLRIKKLLAELKEDASIQNVRPYSPVQQELLKIYEEGVFSSTDEIEEDIQKIRKKTEPSKADLQRYKLWLEQKYKSPYTGEVISLTKLFTEEYEIEHIIPQSRYYDDSFSNKVICESAVNKLKTNLLGLEFIQKHHGEKVRITANKEVTIFTEEQYKEFVKKHYANNLAKQQKLLLNEIPEKMVARQLNDTRYISKYISEILSKIVRSDEKDEGVNSKNVIPCTGKITTALKQDWGLNDVWNELILPRFERMNQLTQTQLFTSYNDRLQKNLPTVPMEYSQGFQKKRIDHRHHAMDALVIACATRDHINYMNNQHALDKSKDKKEKQQSRIDLRTILCEKKNNNWQFKKPWSTFTQEAKEALEHIVVSFKQNLRVINKATNYYEKWEEKNGTLVKKKVKQEGANWAIRKPLHKETVSGKIVLDRKIGKDKILTATRKAVDITFTEKIISSITDTGIQKILLNYLKYKGSPEVAFSAEGLEELNKNIAQYNDGKKHQPIYKVRIFEEGSKFPLGETGAKATKYVEAAKGTNLFFGVYQGKGKRTYATIPLNEVIERQKQGLPSVPERNEKGEPLLFSLSPNDLVYVPMEGEIAETIDFNNLSKEQKERIYKTVSFTGNQCFFVQEAVASPIVNKMEYSPLNKMERSIVGIMIKEVCIKLKVDRLGNITKA

SEQ ID NO: 22658 - protein, 1203 aa, unidentified
  REGION 1..1203: note = Cas Enzyme sequence
MLMSKHVLGLDLGVGSIGWCLIALDAQGDPAEILGMGSRVAPLTNLGDDKAFSKGEAFTANQKRTARRTMRRGFARYQLRRYRLRRELEKVGMLPDAALIQLPLLELWELRERAATAGEHLTLPELGRVLCHINQKRGYRHVKSDAAAIVGDEGEKKKDSNSAYLAGIRANDEKLQGEHKTVGQYFAEQLRQSQSESPTGGISYRIKDQIFSRQRYINEYDQIMAAQRVHYPDILTDAFIRMLRDEVIFMQRPLKSCKHLVSLCEFEKQERVMRVQQDDGKGGRQLVERKVKFGPKVAPKSSPLFQLCRIYEAVNNIRLTRPDGSPRGITPEERAKIVAHLQSSASLSFAALKKLLKEKAIIADQLTTKSGLKGNSTRVALAAALQPYPQYHHLLDMELETRMMSVQLTDEETGEVTEREVAVVTDSYVRQPLYRLWHILYSIEERDAMRRALITQLGMKEEDLDGGLLDQLYRLDFVKPGYGNKSAKFICKLLPQLQQGLGYSEACAAVGYRHSNSPTSEEITERTLLEKIPLLQRNELRQPLVEKILNQMINLVNALKAEYGVDEVRVELARELKMSREERARMTIQNDKRKKANGKVAARIRQCGLYPTKPRIQKYMLWEEAGRQCLYCGRSIEEEQCLNGDDMEVEHIIPKSVLYDDSYGNKTCACHECNQTKGNRTALEYIRAKGWEAEYMERINGLLDKKAISYSKHQRLRWLKEDIPSDFLERQLRLTQYISRQAMAILQQGIRRVSASEGGVTARLRSLWGYDDILHTLNLDRYDSMGETERVSREGETTEKLRIKDWSKRKDHRHHAIDALVVASTRQGYIQRLNRVSSESEREAMSGEIEVQKATKIDKLSLLERWLTQRPHLSVRAVSDKVAEILISYRPGKRAVTRGRNIYRKKTADGREVTCVQRGVLVPRGELMEASLYGKILSQGRERIVKRYPLHDLKGEVVDPRLRELIAEYNQEITSKVKAKGTPLYLDAAEKQEVRSVRCYVTQPSVAKAIPIRFDERGRAITFVQSGSNHHLAIYRTPKGKLVESIVSFWDAVNRARYGLPLIIKYPRKAMEQVIQREDIPESVLSLLPPADYEFVEVFQQNEMAVVGLPEEEFRRAVDTQDYRTLSEHLYRLKGISSKDYEFHYHLDTDDPDETDSSKKKKKRVRNTSGRIPRIYRIRGIGSLQKKNVHKVCVDLLGRISLL

SEQ ID NO: 22659 - protein, 1450 aa, unidentified
  REGION 1..1450: note = Cas Enzyme sequence
LLFQTSFSPLFKKILTKFGIDCKDIPMKHILGLDLGSNSIGWALIEQDFDNKQGKILGLGSRIIPMDQGILSDFKEGATVSQTAKRTEFRGIRRLRERHLLRRERLHRVLHLLGFLPPHYDAQIDFTKRFGKFIGDSEPKLAYNNEGFIFLESFNEMVEDFKKHQPQLFYIKSNGEESKIPYDWTIYYLRKKALQEKISKEELAWIILNFNQKRGYYQLRGEEEEKSTKNVEFYSLEITDVIADTPNNKGEIWYSIHLENGWVYRRASKISLEDWKGKVRDFIVTTELNEDGSVKLDKEGKEKRSFRAPSEDDWNLIKKKTEQNIVFSGKTVGEYIYDHLLQNPNQKIKGKLVRTIERKFYKEELKAILEKQVALQPELFTEELFVDCVRELYKNNEIHQNSLSSKDFVYLFLNDIIFYQRPLHSQKSNISSCSLEYRFCIDKETKQRRKTYLKVISKSNPYYQEFRVLQWLSNLKIYRKEDDKDVTSEFISSIEDKETLYEFLMSEKEVSNKSVLEFLLMKLLRETYPFAKETELKKELKKEITKYRWNYVYEEENDSKKYPMNETGYEIKKRLKEVKNIPDNFLTKDIEYQLWHIIYSVTDKYEFEKALMKFAQKHNLDAESFVENFKRIKPYPGDYGAFSEKAIKKLLPLMRFGKYWNYSDISEPVQARISDIINGVDNESIKTIVREKAEKFQLSQEAYFQGLPLWMAQYIVYGIHSEVADIQRWTSPSDLEEYLKGFKQHSLRNPIVEQVVTETLRVVKDIWEYYGKGEENFFGEIHIELGRELKKTAEERNRMTREINENEETNLKVKKELQQIFENKSAENVRPYSPIQQEKYKLWLEQKERSPYTGQPIPLSKLFTDDYQIEHVIPQSRFFDDSLSNKVICEASVNAQKGAQLGLEFIKKHGGEIIEIGLNKKVRILNEKEYKELVNELFANNRGKKAKLLMEEIPEKMVERQLNDTRYISKFISQILSNIVRSPQEDNGVNSKNIIPCTGKITAALKQDWGLNDVWNDLILPRFERMNNLTQTELFTTYSEKYQKKIPTVPLEHAKGFQKKRIDHRHHALDALVVACATRSHINYMNNQHALDKHKAKEEKQNARIDLRTALCEKKYNDNAEDKYNWTFKKPWNTFTQDVRSALEMIVVSFKQNLRVINKATNYYEKWVEEKGKKVKKKVKQEGINWAIRKPLHEQTVAGKITLERVKIGKGEMLTADRKFIDSSFDTKKISKITDTGIQKILLNYLAYKGSSELAFSPEGLEELNKNIYLYNDGKPHKPIYKVRSYEKGSGRFVLGERGAKSKKYVQGAPNLYFGVYQSKGKRSYATIPLAEVIERQKQGLTSVPELNEKGEKLLFSLSPNDLVYVPMESENIENIDFTNLSKEQRERVYKTVSFTGNQCFFVRQDVTTSIVNKMEYSSLNKMEKGIDGIMIKEFCIKLKIDRLGNISKA

SEQ ID NO: 22660 - protein, 1157 aa, unidentified
  REGION 1..1157: note = Cas Enzyme sequence
MGSRVVPLTNLGDDKAFSKGEAFTANQERTARRTMRRGFARYQLRRYRLRRELAKVEMLPDAALIQLPLLELWELRERAATAGRRLTLPELGRVLCHINQKRGYRHVKSDAAAIVGDEGEKKKDSNSAYLAGIRANDEKLQDEHKTVGQYFAEQLRQNQSESPTGGISYRIKDQIFSRQRYIDEYDQIMAAQRVHYPDILTDEFIRMLRDEVIFMQRPLKSCKHLVSLCEFEKQEKVMRVQQDDGKGGRKLVERRVKFGPKVAPKSSPLFQLCRIYEAVNNIRLTRPDGSPCDIAPEECAKIVAHLQSSASLSFAALKKLLKEKALIADQLTSKSGLKGNSTRVALAAALQPYPQYHDLLNMELETRMMTVQLTDEETGEVTEREVAVVTDSYVRQPLYRLWHILYSIEERDAMRRALITQLGMKEEDLDGGLLDQLYRLDFVKPGYGNKSAKFICKLLPQLQQGLGYSEACAAVGYRHSNTPTSEEITERTLLEKIPLLRRNELRQPLVEKILNQMINLVNALKAEYGVDEVRVELARELKMSREERERMAEGNRRREKENKAIAEKIRECGLFPTKSRIRKYMLWEEAGEQCLYCGQILTLSQCLNGDDMEVEHIIPKSVLYDDSYGNKTCACRRCNKEKGNRTALEYIRAKGWEAEYMERINGLLDKKAISYSKHQRLRWLKEDIPSDFLERQLRLTQYISRQAMAILQQGIRRVSASEGGVTARLRSLWGYDDILHTLNLDRYDSMGETERVSREGETTEKLRIKDWSKRKDHRHHAIDALVVASTRQGYIQRLNRVSSESEREAMSEEIELQKVTKTDKLSLLERWLTQRPHLSVRAVSDKVAEILISYRPGKRVVTRGRNIYRKKTADGREVTCVQRGVLVPRGELMEASLYGKILSQGRERIVKRYPLHDLKGEVVDPRLRELVAVYNQEITSKVKAKGAPLYLDAAEKQEVRSVRCYVTQPSVAKAIPIRFDERGRATTFVKSGNNHHLALYRTPQGKLEESIVTFWDAVDRARYGIPLVITHPREVMEQVLQRGDVPESVLRSLPPSDWVFVDSLQPDEMVIIGLSDEELQQALEVQDYRKLSEHLYRVQKVSSLYYVFRYHLETSVADDKNTAGRIPKFHRVQSLKAYEEKNIRKVRVDLLGRISLL

SEQ ID NO: 22661 - protein, 1483 aa, unidentified
  REGION 1..1483: note = Cas Enzyme sequence
MKTILGLDLGTNSIGWAKVIVDDNENYLRDIQLGSRIIPMSQDVLGKFDKGVTESQTAIRTNFRGIRRLRERTLQRRERLHRVLHTLHYLPPHYDSAIGWDRKAPTTYGKFLNHGEPKLAWERRGDGTMQFLFMDAFHEMIADFAKHQPALVANGKKVPLDWTIYYLRKKALTQPIKKEELAWILLNFNQKRGYYQLRGEEDEEHAAKHEEYHELKVVGVEADEAGKGDNTWYNVKLENGWIYRRQSKIPLDDWVGKVRAFIVTTEYEKDGTTPKKDKEGNVKRSFRSPNENDWGLRKKQTEHSLEASGIPVGAFIYDHLLKEPSDKIRGKFIHTIERKYYKQELAAILREQSKHHEELCSKDMLKACVEELYPNNPLHRESLLKKNMTYLLIEDLIFYQRPLKSKKSLIAECPYEAYSYVDKETGEVKRQGIKCIARSNPYYQEFRLWQLIANLRLRNRADERDVTAEYLPHQEDYVRLFTYLNDRKEINQETLLKDFFKLKKVTIGGEKVFPIRWNYIEDKEKKYPCNATRHELLLALDRAGMEHDWLDDRDLAYRLWHLLYSVDSKDETERALRKLKDDDAFVGSFLKIKPFEKEYGAYSEKAIKKLLPVMRRGSLWNEADLCPSTKERIANILQGTIDEKLKKKIGAFISSCQQVSDFQGLPEWLACYVVYGRHSEATAIQHWETPEQLLAYIHGFKQYSLRNPIVEQCILETLRTVYDIWKEAGQIDEIHVELGREMKKTSEQRAHLTENVLRNENTNLRIKSLLMELKNDADMKDVRPHSPMQQEILRIYEEGALQTLSKDDAAFTEIMKISKMAQPSTSELKRYRLWLEQKYRSPYTGKPIALSKLFTSAYQIEHIIPKKRYFDDSFSNKVICEAEVNGAKGSMLAYEFIKDCGGNVIHCTTLGDVTILSEAEYKALVTELYANNTSKKEKLLMEDIPQEFVNRQLNDSRYISRVVMTLLSNIVRIEGEEEATSKFVIPCSGGITDKLKKDWGLNDVWNNIVYPRFERLNALTNTTDFGQWENKEGKRVFQTSVPLELQRGYQKKRIDHRHHAMDALVIACASRNIINYLNNQEANDPTKQENARKQLCIKSRIIRKPWETFTQDAHKALDNIVVSFKNYVRVINKATNYYERYHADGKKVVDEQKGETMWAIRKPMHKDTVFGHVNLRRKAVVKLKDALENIPAICDKTLRHYIQDLQKKHFNTKQLLAHFKSINYRLNKQAVDKVEVWQYSDDKEQLAATRKPLDTSFDVKHIAAITDTGIQKILLNYLQAKGGDPAIAFTPEGIAEMNRNIAVYNGGKQHQPILKVRIAEPMGAKYPVGETGNKGTKYVEAQKGTNLYFAIYEDEEGNRTYETITLRIVAEQLKLECSPVPEKNEKGVALKFYLSPNDLVYVPTADELLSKECSLDKNRIYKMVSATKSECLFIPHSVAKTIYDKVEFEALNKMGRALTGEMIKSVCWKIEVDRLGHIVNIIK

SEQ ID NO: 22662 - protein, 1394 aa, unidentified
  REGION 1..1394: note = Cas Enzyme sequence
MGFLPSHYEKAIGWNREEATTYGKFLDNGEPKLAWERQEDGSMRFLFMDSFHEMMADFAKCQPGLVADGRKIPLDWTLYYLRKKALTQAIKKEELAWILLNFNQKRGYYQLRGEEDEEDPTKREEYYELKVVSVEAAEEGKGGNTWYNVTLENGWIYRRQSKIELNDWTGKIRQFIVTTEYEKDGITIKKDKNGEVKRSFRAPSEDDWGLRKKRTESRLEDSGKTVGEFIYDHILSEPADKIRGNFIRTIERKFYKKELEAILREQSKYHKELKDLNTLVNCIKELYPNNKAHQDSLMKKDMIYLLITDLIFYQRPLKSKKSLIADCPYEYYEYVIKETGEIKRQGIKCIAKSNPYYQEFRLWQFIINLRLFDRTNDKEITSEYLSSMEDYTKLFIYLNDRKEINQEILLKDFFKQKKVKMGMEKEFPIRWNYIEDKEKKYPCNETRHELLAALDKAGIDHSWLDDKERFYRLWHLLYSVESKEEAEGALRKLNDNEDFVNAFLKIKPFKKEYGAYSEKAIKKLLAVMRIGTLWNEDDICEQTRNRIQSIINGDIDEKIKERMGRTFSQLSDFQGLPEWLACYVVYGRHSETTDIQRWTKPENLMSYIKGFKQHSLRNPIVEQCILETLRTVHDIWKEAGHIDEIHIELGRSMKSTADQRARMSKSILQNENTNLRIKSLLMELKNAKEFENVRPYSPMQQEILRIYEEGALQELTKEDDQYPEISKISQMAQPSAKELLKYRLWLDQKYCSPYTGKPISLSKLFTSAYQIEHIIPQSRYFDDSFSNKVICEAEVNQLKSNMLGYEFIKKHSGEIVHCTMVGDVKILDAKEYYNFVTEHYANNRRKKEKLLLEDIPQEFLNRQMNDSRYISKKVMALLSNIVREEGEQEAKSKFVIACSGGITDRLKHDWGLIDVWNSIVYPRFERLNKLTNTENFGRWENKEGKQVFQTSLPLELQRGFSKKRIDHRHHAMDALVIACASNNIINYLNNESAKSQEKREDLRKKLCDKNRIIRKPWETFTQDVRTALEDVVVSFKNYVRVINKATNYYEKYDKNGKKGIAEQKGQDMWAIRKPMHKETVFGQVNLRRKVTVKLKDALEKIPAIYDKELRDYINILVAKQFNKKQILAHFKSINYRLNMKSVDKVDVWQFSNEKEPMVATRKPIDTSFDDKRIATITDTGIQKILRNYLETKDNDPNIAFTPEGIAEMNKHITEYNNGKQHQPILKVRVSEPKGAKYQVGETGNKTSKFVEAQKGTNLYFAIYEDKEGNRSYSTIPLNEVIERLKQGLSPAEDLNKRGENLKFYLSPNDLVYVPTEEEKLSGECKLNKDRIYKMVSSTGNECYFIPYTVSNVIFNKVEFESLNKMGRALTGEMIKAVCRKLEIDRLGNILKIIK

SEQ ID NO: 22663 - protein, 1375 aa, unidentified
  REGION 1..1375: note = Cas Enzyme sequence
MKKILGLDLGTTSIGWALVNESENKGEQSSIVRLGVRVNPLTVDEKGNFEKGKAITTNADRQQVHAARINLQRYKLRRENLRSCLQKQGWIGSEPMYEDGKSSTFETYKLRAKAAEEEVSLHEFARVLFMLNKKRGYKSNRKANDKEEGKLFDGMTIAKKLYEEHLTPAEYSLRLLYKGKKFTPEYYRSDLIEEFEKIWNEQKKYYPEILTDEFKQQLEGKAKSNTSKLFLGKYGIYSADTKGLDRRLQPLKWRVEAMKQQVDKDVLAFVISDLKGQIANTSGLLGAISDRSKELYFSKQTIGQYLWASLQENPHISIKNQPFYRQDYLDEFEKIWETQATFHKELTSELKQEIRDIIIFYQRPLKSKKNLIAVCELEQRKVKVTVDGKEKEITIGPKVAPKSSPMFQEFRIWQNLNNILLLDHETNSKRPLYEEERNLLYEELSVKEKLSKTEALKVLGKKSKQWDLNYKELEGNRTQAVLYDCYNRIIVMSGHEECNFKKLKASDIRHYVKMIFKNLAFNTDILCFDSSLEGHELERQPMYQLWHLLYSYEGDNSRTGNDALLRKLETAFGFSKEYAAVLADLVFEDSYGNLSVKAMRNILPHLQAGKDYSQACEEAGYKHSRRSLTKEELNQKVYKEKLELLPKNSLHNPVVEKILNQMVNVINAVIEEYGKPDEIRIELARELKIGAAERENMTRGINQGNAENKRIREILEKEFALSYISRNDIIKYKLYEELKPNGFKTLYSDTYIPKDKLFSKDFDIEHIIPKARLFDDSLSNKTLEARDVNIAKSNKTAFDFILERYGEQGVKTYKTKLLRLLEDGAISNKKYNNLLKTEADIPSGFIDRDLRNTQYIAKKAYEILSELVKIVTPTTGSVTNRLREDWQLVDVMKELNFEKYQKLGLADVIEDRDGRKVKRIKDWTKRNDHRHHAMDALTIAFTKPSYIQYLNNLNARSDKSSSIYGIEVKELHREEGKLRFNAPLPINEFRAEAKRHLKSVLVSIKAKKKVMTQNVNKIKTKHGIIKKVQLTPRGELHNATYYGTKKRPLVRMVKVGAALDEATIKRVCSPAIRAALLKRLNAYNGDAKKAFTGRNSIDKNPIYLDIEQTKIVPALVKTIEWRMYYPIRKRITPDLKIDKVIDKGIREKLKARLAEFNGDAQKAFSNLDENPIYMDEAKQITLKRVSIEGVLSVIPLHTLKDKAGKPIIGSDGRPVFGDYVQTSNNHHIAFYKDDKGNLQDNPVSFFEAAERKSQGVPVIDRRYNCDKGWHFVFTMKQNEYFVFPNEATGFIPSEVDLLDEANYCIISPNLYRVQKLSKASGRDYWFRHHLETMLNDDLRLKNSTFKRINSLKGLKDIVKVRINSIGKIVAVGEYD

SEQ ID NO: 22664 - protein, 1380 aa, unidentified
  REGION 1..1380: note = Cas Enzyme sequence
MKRILGLDLGTTSIGWALVNEAESNNEASSIVRLGVRVNPLTVDEKSNFEKGKAITTNADRQLRHGARINLQRYKLRRQNLHDCLQKQGWLGTEAMYEEGKASTFETYKLRAKAAEEEISLHEFARVLFMLNKKRGYKSNRKANNKEDGQLFDGMTIAKKLYEEHLTPAEYSLQLLNKGKKFTQGYYRSDLNAELERIWGEQKKYYPEILTDEFKQQLEGKTKTNTSKIFLAKYGIYSADLKGLDRKLQPLKWRVEALKQQVDKEVLAFIISDLKGQIANTSGLLGAISDRSKELYFNKQTVGQYLWASLEENPHISIKNKPFYRQDYLDEFEKIWETQAAFHKQLTPELKQEIRDIIIFYQRPLKSKKSLISVCELEQRKVKATIDGKEKEITIGPKVAPKSSPVFQEFRIWQNLNNVLLIDNDTNEKRPLDEDERNLLYEELSIKAKLSKTEALKILNKKGKQWDLNYKELEGNRTQAILFDCYNRIITLTGHEEYDFKKIKASDIRRRISTIFKNLGFSTEILDFDPSLEKHELEKQPMYQLWHLLYSYESDNSRTGNESLLRKLETTFGFPEEYATVLCDVVFEEDYGNLSVKAMRKILPYLQAGYNYSNACKKAGYKHSRHSLTTEELDQKVYKGKLELLPKNSLRNPVVEKILNQMINVINAIIDEYGKPDEIRIEMARELKSSANERESRTRAISQGNAENQRIREILEKEFALSYISRNDIIKYKLYEELKPNGFKTLYSDTYIPKDKLFSKDFDIEHIIPKARLFDDSFSNKTLEARDINLAKSSKTAFDFIKEKYGEEGAEAYKKKLDMLLENNVISRAKYNKLLMAEADIPSGFIERDLRNTQYIARKACEILGELVRTVTPTTGEITNRLREDWQLVDVMKELNFEKYEKLGLTEIVEDRDGRKIKRIKDWTKRNDHRHHAMDALAIAFTKPSYIQYLNNLNARSNKGDSIYAIENKELHYEEGKLRFNAPIPVNEFRAEAKRHLSAILVSIKAKNKVMTQNVNKIKTKHGIIKKIQLTPRGPLHNSTIYGTKMRPIIKMVKVGAALDEATINKVSSPAIREALLKRLNEYSGNAKKAFTGKNTLEKNPIYLNAGRTKTVPSLVKTVEWESFHPTRKLIDKDLNVDKVVDKGIREILKARLEEFNGDAKKAFSNLEENPIYLDEAKKIALKRVSIEGVLSAIPLHTLKNQAGKPITGKDGKPVLGNYVQTSNNHHIAFYYDENDNLQDNAVSFFEAAERKSQGVPVIDKDYNRDKGWRFLFTMKQNEYFVFPNEATGFIPSEVDLTDEGNYGIISPNLYRVQKVSRIDKGTSASRDYWFRHHLETILNDDSRLKNSAFKRINSLKPLEGIIKVRINSTGKIVAVGEYD

SEQ ID NO: 22665 - protein, 1431 aa, unidentified
  REGION 1..1431: note = Cas Enzyme sequence
MKRILGLDLGSSSIGWALVNEAESKNERSSIVKLGVRVNPLTVDESINFEKGKSITTNADRTLKRSMRRNLHRYKLRREALIEVLKECKFITEDTILSENGNRTTFETYRLRVKALTEEISLEEFARVLIMINKKRGYKSSRKAGGAEEDTLIDGMDIARKLYDANLTPGELCLQLLSAGKKVLPDFYRSDLQNELDRIWEKQKEYYPGILTAALKEELRGKKRDAVWAICANAFVWKETYTEWNNEESKNEQIEKEHKLEGIYSKRKRDEAKKENLQWRVSGLKEKLSLEQLVIILQEINTQINNSSGYLGTISDRSKELYFNKQTVGQYLMDILDNNPNASLRNIVFYRQDYLDEFNVLWEKQAEFHKELTGELKKEIRDIIIFYQRRLKSQKGLISFCEFESRQIEVKIDGKRKIRTVGNRVIPRSSPLFQEFKIWQILNNIEVTAVGNKNKQRMQNGSNEPDDTEQLELNGRRYLYQEEKELLAKELFVRDKMTKLDVLRLLFDNPEELDLNFKTIDGNKTGYLFFQAYSKMIEMSGHEPVDFKKPIEKIVEQVKSVFVLLNWNTDILSFDSNKELDKQSYYKLWHLLYSFEGDNTPTGNGCLVQKIMDSYGLGKEFAKILANITFQEDYGSLSAKAIHKILPHLKEGNQYDVACEYTGYRHSKSSLTKEEIANKVLKDKLEVLPRNSLRNPVVEKILNQMVNVINAIIEAYGRPDEIRVELARELKKNAKEREKLTKSIAETTKTHEAHKKLLQEEFGLKNVGRSDILRYKLYKELESRGYKTLYSNTYIPREKLFSKEFDIEHIIPQARLFDDSFSNKTLEARNVNIEKGNRTAYDFVKEKFGESGTDNSLDCYLNNIEVLFVSGKISKTKYTKLKMTEQDIPGGFIERDLRNTQYIAKKALSMLNEISRCVVATSGSITDKLREDWQLVDVMKELNWEKYKALGLVEYFEDKDGKQIGRIKDWSKRNDHRHHAMDALTVAFTKEVFIQYFNNKNASLNPNTNEYAIKNKYFQNGRAIAPIPLNEFRAEAKKHLENTLISIKAKNKVITNNINKTKKRGGVNTKKQQTPRGQLHLETIYGCCRQYLTKEEKVNASFDVSKIATVSSSVYRDALLKRLQEHHNDPKKAFAGRNSLDKKPVWLDKEQIRKVPEKVKTVTFETIYTIRKEISPDLRVDKIIDSGVRKMLTGRLKEYGNDAKKAFSNLDEKPIWLNKEKGIPIKRVTISGISNAQSLHVKKDKDGKPVLDGNGRNIPVDFVNTGNNHHVAVYRRPVIDKNGQMVIDENGNLKYELEEVVVTFFDAVTRVNLGQPIIDKDYKASEGWQFLFSMKQNEYFVFPNKKTGFNPKEIDLLDADNYGLISPNLFRVQKFTHKNYVFRHHLETTIKDTSSILRGITWIDFRSSKGLDSIVKVRVNHIGQIVSVGEY

SEQ ID NO: 22666 - protein, 1507 aa, unidentified
  REGION 1..1507: note = Cas Enzyme sequence
MKTILGLDLGPNSIGWAKVEVDDKGNYLRNIKLGSRIIPMDQGILGKFDSGVTESQTAIRTNFRGVRRLRERHLQRRERLHRVLHALNFLPKHYEDAIGWDRNEPAIYGKFINNSEPKLAWERQEDGSMRFLFMESFYEMMADFAKMQPSLVSGEKKIPLDWTIYYLRKKALTQQIKKEELAWILLNFNQKRGYYQLRGEEEEDNPTKRKEYYKLKVIGVEADGAPKAGKIWYNIHLENGWTARCQSKVPLDNWVGNIKEYIVTTEYEADGETPKYDKEGKIKRSFKSPEKGDWQLIKTRTEKFIESSNKTVGTFIYDHLLKEPFDKIRGKYIRTIERKYYKNELYKILCEQAKYHKELDSLDTLNACAKELYKNNQQHQEYLLKKDMKYLLLDDLIFYQRPLKSKKSLIADCPYEVYKYNYKQTGKKEQKKIKCIAKSNPYYQEFRLWQFISNIHLFNVTDGKDVTSEYLKTKEDYVRLFTYLNDRKEIKQETLLKGFLKLKKETIGSEKIYPIRWNYIEDANKSYPCNTTRHELLLAFDRAGIQRELLDVEGREYRLWHLLYSIESKDKTESALRRLKSNKAFSDLNIDDAFVNSFLKIKPFKKEYGAYSEKAIKKLLAVMRRGSLWKEADICEATKQNIAKILQNDIDEKLKKKIEAAVSSFNKLSDFQGLPTWLACYVVYGRHSEAAQIQCWQSPEDLKTYINKFKQHSLRNPIVEQCLLETLRTVYDIWKDAGQIDEIHIELGRNMKSTAEQRARKTNEFLRNENTNLRIKNLLMELKNDDKIENVRPYSPSQQEILRIYEEGALQELSKEDEMYEDISKISKMAQPSPTELSRYKLWLEQKYRSPYTGRVIPLSKLFTTAYQIEHIIPQSRYFDDSFNNKVICESEVNSLKDNMLGYEFIKECGGQKVHCTLLEGNVEIFTEEEYKTFVTKHYVGNPRKKDNLLLEDIPQEFSARQLNDSRYISKMVQTVLSNIVRTKDEQEAISKFVVSCNGMITDRLKKDWGLNDVWNTIVCPRFKRLNEITKTNAFGHWEDKAGKHVFQTIVPLELQRGFSKKRIDHRHHAMDALVIACASRNIVNYLNNESANSPEKREDLRKKLCDEKRKIRKPWKTFTQDTREALSDVVVSFKNYVRVINKATNYYEHYSSSGNKVMISQKGNDMWAIRKPLHKESFFGHVNLRRKATVSLKKALENIPAICDKTLRDYINALVEKHFNTRQLLAHFKSINYRLNRKRVDKVEVWQFSDEKIEMVARRKPLDTSFDAKQISFITDTGIQKILLNYLQSKEGNAEIAFTPEGIEEMNKNISIYNDGKAHQPILNVRVATPKGMKYPVGQTGNKATKFVVAEKGTNLYFAIYENELGERSYDTIPLDIVIKRLKEGQSPVPQINKVGIPLKFYLSPNDLVYVPTKENEDELCRDRIYKFVDSSGTTANFVPHTSANTIYNVDKEYAKKYCNGAVILNEYGLGSPQSKNQKDLDGEMIKEICWKLKVDRLGNIIKVIK

SEQ ID NO: 22667 - protein, 1267 aa, unidentified
  REGION 1..1267: note = Cas Enzyme sequence
MLRAKAAEEEISLHELCRVLFMMNKKRGYKSNRKANNKEDGKLFDGMTVAQKLYEEHLTPAEYSFQLLSSGKKFKQEYYRSDLKEEFDRIWNEQQKYYPEILTDDFKQHLQGKSKGNTSKIFLGKYGIYSADLKGLDRKLQPLKWRIEALKQQVDKEVLAFVISDLNGQIASTSGLLGAISDRSKELYFNKQTVGQYLWTSLKETPHVSIKNKPFYRQDYLDEFEKIWETQATYHKELTPELKQEIRDIIIFYQRPLKSKKGLISVCELEQRKVKVTIDGKEKEISIGPKVAPKSSPMFQEFRIWQNLNNILLIDKGNNSIHPLYEEERNLLYEELSVKEKLSKAEALKVLNKNSKQWDLNYKEIEGNRTQAVLYDCYNRIIVMTGHEECNFKKLKASEIRSYFKTIFTGLGFNTDILEFDSSLTGHELERQPSYQLWHLLYSYESDNSRTGNDALLRKLETAFGFPKEYAAVLSDVVFEDSYGNLSVKAMRKILPHLQAGLDYSQACEEAGYKHSRRSLTKNELDQKEYKEKLDLLPKNSLHNPVVEKILNQMINVINAVIDEYGKPDEIRIELARELKIGAAERENMTRSISQGNAENKRIREILQKEFALSYISRNDIIKYKLYEELKSNGFKTLYSDTYISKDKLFSKDFDIEHIIPKARLFDDSLSNKTIEARDVNIAKSNKTAFDFIFGKYGQQGIEAYKKKLDILLQDGSISKAKYNRLLMKEADIPSGFIDRDLRDTQYIAKKAYEILSDLVRNVTPTTGAVTSRLREDWQLVDVMKELNFEKYQKLGLAEVIEDRDGRKIKRIKDWTKRNDHRHHAMDALTIAFTKPSYIQYLNNLNARSDKSSSIYGIENKELHREDNKLRFNAPLPINEFRAESRRHLKSVLVSVKAKNKVMTQNVNVIKTKHGVIKKVQLTPRGELHNATFYGTKKRSIIKMIKVGAALDEATIKKVSSSLIREALLDRLHEYNGDAKKAFTGRNSIDKNPIYIDEEHKKTVPSLVKTIEWEMYHPTRKLISPDLKIDKVIDKGIREILKTRLAKFNGDAQKAFSNLDENPIYKDEAKKITLKRVSLEGVSSVIPLHTIKDREGKPVVGKDGKPVLGDYVQTSNNHHIAFYMDENGNLQDNVVSFFEAAERKSQGVPVIDKSYNHDKGWHFLFTMKQNEYFVFPNEVTGFNPSEVDLTDEANYSLISPNLYRVQKMSKTSGRDYWFRHHLEAMLNDDPKLRNSMFKRINSLKALEGIVKVRINCVGKIVAVGEYD

SEQ ID NO: 22668 - protein, 1382 aa, unidentified
  REGION 1..1382: note = Cas Enzyme sequence
MKRILGLDLGTASVGWAVVNEAENSEEQSSITALGSRVVLLSADEKNNFLTGKSVSATATRTAKRGARRNLQRYKLRREWLKDALVSAGIINENTCLNDSNSKELFATYVSRAKAVTEQIALEDFAKVLFMINKKRGYKSNRKTDNTESEDGQIIDGLDLAKKLKARNITPGQYLLELFKENKKNKAVFYRSDLQEELNRIWAFQSQFYPEILDNTLLSAITNKSKKVVIGLFKGIKNIEIADVKTKERTEKALTWRSEALHKQLETGEVAYAIAEVMGAISQSSARLALLSDNSKHLEFEGLTIGQYLLKLLRNNPNSSLKNINFYRKDYEDEFNSIWNKQASFYPQLTESLRSTIFNSIFMQRNLKSCKALLANCELEFAEKKITLPDGSCQTRTIYSKVCPKSSPYFQEFQIWQSLSNIRIIDKENAHLTKGQELSYDQKVMLLSELMIHSELKANKVIEILFGKKSNYTINMPSIKGNRTNETIFNALLEIVELTGHSIDNIVKTDANQQIEAVKNIFESLGYKTNFITFDSTIEGKDGLNQPYYKLWHLLYSYCGDNSKTGNEALIRKIEELTGLEKEEAKVLANCTFENDYASLSTKAIRKLLPHLQSNLDYSEACEAAGYNHSKRSRTKEDIKNKVYKDKLDLLPRNSLRNPIVEKILNQMIHVINQTSEAYGKPDEIRIEMAREIKKNKIQREKLANQLRQNTAELERIKDILRKDFKLSHISHNDILRYRLYEELSLNGYKTLYSNTYIERQQILDPTVTIEHIVPKALAFDDSFSNKTLEIQSVNGEKSNQTAFDFISKKYGSEALEQYINRVNNLFENGKISKTKRDNLLRKQEDIPSDFLNRDLRNTEYIAKKALEILEDYVPRVTPTIGEITKTLREDWQLVNIMRELNWEKYNSLGLTSFYYDRNGTKIGLIHNWTKRNDHRHHAMDALTIAFTKPSIIQYLNNLKSQNDKGSSIYAIQAKETYIDETRKRLIKPPYDIKQFRNDAKQMLDNIFVSHKAKNKVVTPNTIVTKKKRKAGKETKAEEKRTFLTLRGALSNETVYRKICNYETKEITINSKLTYEIALTIAKKKEREAVLERLAQHNNNPTTAFKNYNKNPIMLQTSVGEKPLMSVKIVNYKELFVKRSEINEKLDIKRVLDAKVRARLTDRLKEYNNDPKAAFANLEENPIWLNEGKGIALKHVTTIERVMGLPIRPKRNINGEIMKDELGQPLKSHYVATGGNHHVAIYEDEEGKWHEKVVSFNEAASRAIQKLPIIDKDFNKELGWIFQFTMKQNEMFVFPDKESGFDPLAIDLKDPANKTLISKHLYRVQKLSSCYYHFRHHLETNVEDSKELQGITWKSIRTTNNLRGIIKVRINHIGQIIDIGEY

SEQ ID NO: 22669 - protein, 1366 aa, unidentified
  REGION 1..1366: note = Cas Enzyme sequence
MRRNLQRYKLRRDALIKLLRKVGFITDDTILSEQGNRSTFETYRLRAKAPDEEISLQELARVLLMINKKRGYKSSRKIKEKEAGTLIDGMEVAKKLYDEDLTPGQLCLQLLESGKKSLPDFYSSDLQEEFDRIWNFQKQFNPKAFCDTAKEEIKGKNKSQTWAILAKYFIWTDEMVVWNEKESKTERVEKECKLVGLKRTVKKEEQRKENYRWRVQALTEQLDLEKVAVVLQEINGQISTSSGYLGAISDRSKVLYFNRQTVGQYQMAELEKNPNTSLRNMVFYRQDYLDEFDKIWEKQAEFHKELTVELKKEIRDIIIFYQRRLKSQKGLIGFCEFENREIMVEKNGKMQAKVVGCKVIPRSHPLFQEFKIWQTLNNVEVFAGEKKCKRKRTDAFPGLFDGTEDTLMVEGWRYLYQEEKEILAKELSVKKSLKKEYILKLLFDNPQDLDMNFEQIEGNDTGNVLFSAYSKMIEKYGYEPLDFGKPTDEIIERLQVIFTDLGWNTDLLFVDLNKEGKDLEKQPYFKLWHLLYSFEGDNTPTGNGKLVEKLMELCHVGKECALELVNISFQNDYGSLSAKAIKKILPYLKEGNRYDVACGYAGYRHSKSSLTKEEIENKVLKDKLDILPKNSLRNPVIEKILNQMVNVINAIIDTYGKPDEIRVELARELKKSAKERDELTKAIAKSTREHEEIRKVLQEEFGMINVSRNDIIRYKLYEELKDNGYKTLYSNQYIPKEKVFSKEIDIEHIIPQARLFDDSLSNKTLEYKAINIEKGNKTAYDFVKEKYGEKGLQQYLNRCESLFKGHRTKLRKLKMGQENIPEGFIDRDLRNTQYIAKKALAMLNEICRRVVATTGSITDRLREDWQLVDVLKELNLPKYETLGLVEVYEDKDGRKIKRIKDWTKRNDHRHHAMDALTVAFTKDVFIQYFNNKNAAWQADCKEHSDIIGIKTRYFENGRALPPMPLVRFRAEAKSHLETLLVSIKAKNKVVTNNVNCTKRKGGENKKLQQTPRGQLHLETIYGSHRQYVMKEEKVNASFDSSKIAIVCKQAYRNALLERLAAFGNDPKKAFTGKNSLEKNPVCLDREQTARVPERVRTVELETVYTIRKPVDPNLSVDKVVDAKVRSILEQRLREYDGEAKRAFVNLDENPIWLNEEKGIAIKRVTIRGINKVQSLHGKKDKNGNLILDETGKKIPVDFVNTGNNHHVAIYRKPVLDKTGQEMLDNEGNPVYELDEVVVSFFEAVTRVNLGLPVIDKNYNKSEGWQFMFTMKQNEYFVFPNEKTGFDPKEVDLLNPENYAVISPNLFRVQKITEKDYMFRHHLETKVVDDKFLKEITWKRILTPNKLEGIVKVRVNHIGQIVSVGEY

SEQ ID NO: 22670 - protein, 1509 aa, unidentified
  REGION 1..1509: note = Cas Enzyme sequence
MKNILGLDLGTNSIGWAVVNGSVNDNGSEQLVKIQASGSRIIPMDAAMIGDFNKGNSISQTAERTRLRGIRRLSERYLLRRERLHRILDILGFLPSHFAQDLDRHGKIVKGKEPKLAWRKNEAGQFEFIFQDSFKEMLEDFKLNHPNLITDDKKVPYDWTIYYLRKKGLTSKISKEELAWILLNFNQKRGYYQLRGEEEKKNDNVMIINSKVIDVVKAEKDKKYEKYWYNVLLENGLLYRAAFYNDISFWKGHTKEFVLKTIKLKSGGTKQELSFLPSFDEIEKMEKKQKDKMYFKIKLKTEADIDQAHKTVGTYIYDTLLGNPSQKIRGRLVRTIERKYYKEELKLILDKQKEFHPELQDRALYAACIEELYPINEAHRNNVGNRDFTYLFLEDILFYQRPLKSKKSLIDNCPYEENQGLDKETGEIKSFPVKCIAKSHPLFQEFRLWQFIVNLRIYRKDLAQDVDVTNELLKTEEDYVALFDWLNGKKEIDQKAFLKYPVFGLKKEIENYRWNYVQDKPYPCNETRLLMLARLEKCDISIEFLTKENEEALWHILYSVEDKNEIVKALQKFADKHDLNASFVDVFRKFPPFKKEYGSYSAKAIKKLLPLMRMGKYWSEDSIDKGTRKRMDKIITGEYDEKIENRVREKVIHLADVSDFRGLPLWLVCYIVYGRHSEAKEITQWKSPADIDSYLKSFKQHSLRNPIVEQIIIETLRVVRDIWKQVGNIDEIHVELGREMKNPADKRKKMTQQMSENENTNLRIKYLLTEFLNPEYEVENVRPYSPSQQDILRIYEEGVLNSVSDLPEEISDILKKFTETDLKKRPSRSEILRYKLWLEQKYRSPYTGEVIPLGKLFTPAYEIEHVIPQSCYFDDSFSNKVICEAEVNKLKSNLLGHEFIVKHHGEIVELPFGKKVRIFTVDEYEQFVKDNYSRTRGKMKKLLMDDIPEEFVARQLNDSRYISKVVKSLLSNIVREKGEEEAISKNVIPCTGGVTDRLKKDWGINEVWNKIILPRFQRLNELTGTNKFTTKNVGIQEIPTMPLELQKGFNKKRIDHRHHAMDAIIIACANRNIINYLNNESATAKAELSRYDLQKLLCDKAKTDNNGNYKWVIRKPWASFTQDTYLALENIIVSFKQNLRVINKATNRFLHYNEEGKKIFVKQGKGDNWAIRKSMHKDTVFGEVNLRRIKTVALNEAMKNPQSIVVKDFKRKLLELWNLGFDAKRIKKYFEDNRETWSDINLSKIEVYYFSKDTKDRFFATRKPLDTSFDRKKIENNITDTGIQKILLRHLELKDNNPDIAFSPDGIDEMNRNIIQLNNGKYHQPIIKIRWYEQADKFAVGQTGNKFSKFVEAAKGTNLFFAVYESNILDKKTNTIIKKRNYATIPLNVAIERQKQGLPVAPEDENGNDPIFVLSPNDLVYLPTDDELANGIIAQPLDRGRIYKMVSCTGNEGHFIPARIANPILQTIELGSNNKAQKAWTDEMIKEICMPIKVDRLGNVLESSSSYKK

SEQ ID NO: 22671 - protein, 1436 aa, unidentified
  REGION 1..1436: note = Cas Enzyme sequence
MKRILGLDLGTNSIGWALVNEAENKDERSSIVKLGVRVNPLTVDELTNFEKGKSITTNADRTLKRGMRRNLQRYKLRRETLTEVLKEHKLITEDTILSENGNRTTFETYRLRAKAVTEEISLEKFARVLLMINKKRGYKSSRKAKGVEEGTLIDGMDIARELYNNNLTPGELCLQLLDAGKKFLPDFYRSDLQNELDRIWEKQKEYYPEILTDVLKEELRGKKRDAVWAICAKYFVWKENYTEWNKEKGKTEQQEREHKLEGIYSKRKRDEAKRENLQWRVNGLKEKLSLEQLVIVFQEMNTQINNSSGYLGAISDRSKELYFNKQTVGQYQMEMLDKNPNASLRNMVFYRQDYLDEFNMLWEKQAVYHKELTEELKKEIRDIIIFYQRRLKSQKGLIGFCEFESRQIEVDIDGKKKIKTVGNRVISRSSPLFQEFKIWQILNNIEVTVVGKKRKRRKLKENYSAIFEELNDAEQLELNGSRRLCQEEKELLAQELFVRDKMTKSEVLKLLFDNPQELDLNFKTIDGNKTGYALFQAYSKMIEMSGHEPVDFKKPVEKVVEYIKAVFDLLNWNTDILGFNSNEELDNQSYYKLWHLLYSFEGDNTPTGNGRLIQKMTELYGFEKEYATILANVSFQDDYGSLSAKAIHKILPHLKEGNRYDVACVYAGYRHSESSLTREEIANKVLKDRLMLLPKNSLHNPVVEKILNQMVNVINVIIDIYGKPDEIRVELARELKKNAKEREELTKSIAQTTKAHEEYKTLLQTEFGLTNVSRTDILRYKLYKELESCGYKTLYSNTYISREKLFSKEFDIEHIIPQARLFDDSFSNKTLEARSVNIEKGNKTAYDFVKEKFGESGADNSLEHYLNNIEDLFKSGKISKTKYNKLKMAEQDIPDGFIERDLRNTQYIAKKALSMLNEISHRVVATSGSVTDKLREDWQLIDVMKELNWEKYKALGLVEYFEDRDGRQIGRIKDWTKRNDHRHHAMDALTVAFTKDVFIQYFNNKNASLDPNANEHAIKNKYFQNGRAIAPMPLREFRAEAKKHLENTLISIKAKNKVITGNINKTRKKGGVNKNMQQTPRGQLHLETIYGSGKQYLTKEEKVNASFDMRKIGTVSKSAYRDALLKRLYENDNDPKKAFAGKNSLDKQPIWLDKEQMRKVPEKVKIVTLEAIYTIRKEVSPDLKVDKVIDVGVRKILIDRLNEYGNDAKKAFSNLDKNPIWLNKEKGISIKRVTISGISNAQSLHVKKDKDGKPILDENGRNIPVDFVNTGNNHHVAVYYRPVIDKRGQLVVDEAGNPKYELEEVVVSFFEAVTRANLGLPIIDKDYKTTEGWQFLFSMKQNEYFVFPNEKIGFNPKEIDLLDVENYGLISPNLFRVQKFSLKNYVFRHHLETTIKDTSSILRGITWIDFRSSKGLDTIVKVRVNHIGQIVSVGEY

SEQ ID NO: 22672 - protein, 1210 aa, unidentified
  REGION 1..1210: note = Cas Enzyme sequence
MSKHVLGLDLGVGSIGWCLIALDAQGDPAEILGMGSRVVPLNNATKAIEAFNAGAAFTANQERTARRTMRRGFARYQLRRYRLRRELEKVGMLPDAALIQLPLLELWELRERAATAGRRLTLPELGRVLCHINQKRGYRHVKSDAAAIVGDEGEKKKDSNSAYLAGIRANDEKLQDEHKTVGQYFAEQLRQNQSESPTGGISYRIKDQIFSRQRYIDEYDQIMAAQRVHYPDILTDAFIRMLRDEVIFMQRPLKSCKHLVSLCEFEKQEKVMRIQQDDGKGGRQLVERKVKFGPKVAPKSSPLFQLCRIYEAVNNIRLTRPDGSPRDITPEERDKIVAYLQTYEAPKPPKRKPAKAKPVKLAHPKLDLDKLKELLCIEEELFADKLLEEGLKGDATRIALSIILQPYPQYHHLLDMELETRMMTVQLTDEETGEVTEREVAVVTDSYVRQPLYRLWHILYSIEERDAMRRALITQLGMKEEDLDGGLLDQLYRLDFVKPGYGNKSAKFICKLLPQLQQGLGYSEACVAVGYRHSNSPTSEEITERTLLEKIPLLQRNELRQPLVEKILNQMINLVNALKAEYGIDEVRVELARELKMSRKERERMARNNKDREERNKEVAAKIRECGLYPTKPRIQKYMLWEEAGKVCLYCGRSIEEEQCLNGDDMEVEHIIPKSVLYDDSYGNKTCACHECNQTKGNRTALEYIRAKGWEAEYMKRINDLLKEKKISYSKHQRLRWLKEDIPSDFLERQLRLTQYISRQAMAILQQGIRRVSASEGGVTARLRSLWGYGKILHTLNLDRYDSMGETERVSREGETTEELHITNWSKRMDHRHHAIDALVVASTRQGYIQRLNRVSSESEREAMSGEIEMQKATKTDKLSLLERWLTQRPHFSVRTVSDKVAEILISYRPGQRVVTRGRNIYRKKTADGREVTCVQRGVLVPRGELMEASLYGKILSQGRERIVKRYPLHDLKGEVVDPRLRELITTYNQELKSREKGAPIPPLCLDKDKKQEVRSVRCYAKTLSLDKAIPMCFDENGEPTAFVKSASNHHLALYRTPKGKLVESIVTFWDAVDRARYGIPLVITHPREVMEQVLQRGDIPESVLRSLPPSDWVFVESLQLNEMVIIGLSDEELQRALEVQDYRKLSEHLYRVQKLSAGKYFIRYHLDTDVDEDNRSGRIPKFYQLSLDAYKKNNVRKVRVDLLGRISLL

SEQ ID NO: 22673 - protein, 1038 aa, unidentified
  REGION 1..1038: note = Cas Enzyme sequence
YTLGLDIGSKSIGWALVGKGKKPSVIDIGVRVFPEGVDRDTKGSEKSKNATRREARGARRIHQRRNLRRDKLVKTLRKSGILPKDNKDLEQLLEKEPYQLRAKGLDEKLELFEFGRTLFHINQRRGFKSNRKTGEANEKSKIAKGDKEHRGANDLQKAVEDNNIRTIGKYFAKIDPEKQRIRGQYTFRSMYEEEYKMLWDKQAEFYPDVLTEALRKKVRDKIIFYQRPLRWDQKTIGKCDLERDEQGIPLPRCPRGDWYARRFRLLQDVNNLKIHNQDGTIDELRNEQRRIILSELSKSNEVSFAKLRKALGLMKTQEFNAEYEINEKGKKKEKLKGDVFTASMRSKKIFGSKVWDSMDKQKKIKINDWLVELEDDELVEKMSVEYGLNDEKIESIFKIQLPQRYMSYSRKAIQKLLPLMEDGKRTDEALAEIYPDRNKVSATEVKEKLDLPEDLRNPIVNRGLFEIRKVVNAIIGEYGKPAKTVIEMARDVKGNSRERRELQFKIWENEKRNEEARKRLADDIGIRNPSRDDIIKYNLWEECGHTCVYTGKHISQIALFSDNPEFQIEHILPYARSLDDSYMNKTLCEVHENIHVKGNKTPYEAYSNNPEKYEQIQKRIKVLPWPKRQKFLQKEIDLEKCISRELNDDRYICKEVVKYLKQLGVNVRGSKGRVTSELRHQWGLNSILDLSNSDMKNRDDHRHHAIDAVVTAVTKNEHLRRLAKSKYSKTDSSFSKPWTDFREELAEKVKHINVSHRSTKKTSGKLHEETFYGLTKETENYFNKGNFKKEEMRQISRNAWICRKKLNYVYSRTPVEILKKVKDLDKITDDAKNVKDALRKRLIEGGVDISNKKDKIPKDLIKETIYIYSKNGKRIPIKKIRIETSESNMIIFTDKRGNPYRACRTGGNHHIEIFEYADKKGKVMRGGDVVTMFEAVRRNKNGEPVIKRDHGVGKKFICSLAINELFMLDSDNEERELHRVQKITQSGNSISIILRPHNYAGKVSDYDKPPIIQRRSPNTLKGHKVTVDMLGRVHLAND

SEQ ID NO: 22674 - protein, 1380 aa, unidentified
  REGION 1..1380: note = Cas Enzyme sequence
MRKILGLDLGTTSIGWALVNEADNDNESSSIIRLGVRVNSLTVDEKSNFEKGKAITTNSDRQQRHGARINLQRYKLRRQNLRNLLQDQGWLCNDALYEEGKGTTFETYKLRAKAAEEKISLHEFARVLFMLNKKRGYKSNRKANNKEEGQLFDGMTIAKKLYEEHLTPAEYSFQLLSKGKKFAQDYYRSDLIAELERIWNEQKKYYPEILTDEFKQQLEGKTKVNTNKIFLAKYGIYSADLKGLDRKLQPLKWRIEALKQQVSKEILAFVIGDLKGQIANTSGLLGAISDRSKELYFNKQTVGQYLWASLKENPHISIKSKPFYRQDYLDEFEKLWETQAAFHKQLTPELKHEIRDIIIFYQRPLKSKKGLISVCELEQRKVKVTIDGKEKEITIGPKVAPKSSPVFQEFRIWQNINNILLINNDTNEKHSLDEKERNLLYQELSVKVKLSKTDVLKILNKKGKQWDLNYKEVEGNRTQAILFDCYNKIISLTGREECDFKKLQASEIRHHVTTIFKNLGFNTDILDFNPSLVKHELEKQPMYMLWHLLYSYESDNSRTGNEALLRKLEIDFGFPKEYATVLCDVVFEDDYSNLSVKAMRKILPYLEVGNDYSQACAYAGYKHSRRSLTKEELDQKVYKERLELLPKNSLRNPVVEKILNQMINVINTIIDEYGKPDEIRIEMARELKSSAAEREKATRAISQANAENQRIREILERDFALSYISRNDIIKYKLYQELEANGFKTLYSDTYISKEKLFSKDFDVEHIIPKARLFDDSFSNKTLEARDINLAKSNKTAFDFVQKKYGTEGAEAYKKKLDILLSKEVISRAKYNKLLMKEADIPSEFIERDLRNTQYIAKKACEILGELVKTVTPTTGEVTSRLREDWQLVDVMKELNFEKYQKLGLAEIVEDRDGRKIKRIKDWTKRNDHRHHAMDALTIAFTKPAFIQYLNNLNARSNKSNSIYAIENKELHREDNKLKFNAPIPIHEFRAETKRHLSAILISIKAKNKVMTQNVNKIKTKQGVIKKIQLTPRGALHNETIYGTKKRPIITMVKVGAALDEATINKISNLTIREALLKRLAEYNGDAKKAFAGKNSLEKNPIYLNEEKTKVLPALVKTVEWETYHPIRKPITPDLKIEKVIDKGIRKILKARLAKFNGDAKKAFSNLDENTIYIDEAKKIALKRVSIEGVLSAIPLHTLKDQAGKPIIGKDGKPVLGNYVQTSNNHHIAFYYDEDGNLQDNAVSFFEAAERKSQGIPIVDKNYNHDKGWSFLFTMKQNEYFVFPNEATGFIPTEVNLMDEANYDMISPNLYRVQTISKIIYDKSIIRDYLFRHHLETTVERIPNLKGITYKQLKSLPHLKGIVKVRINAIGKIVAIGEYD

SEQ ID NO: 22675 - protein, 1512 aa, unidentified
  REGION 1..1512: note = Cas Enzyme sequence
MTKQILGLDIGTNSIGWAVVRGQGDDAQPLQEIVAAGSRVIPVDAGVLGDFERGVSSKSKAAERTAFRQVRRMIERSHLRRQRLLRVLQVMDYLPPHYARCLDRYGKFLPHTEPKIAWSETADGHYEFLFRDAFDEMMAAFRQRNPEWVARGGKVPYDWTLYYLRTKALSQPVSPYELAWILLSFNQKRGYRQARGEQQEDDSRKLEEYKSLKVLSVEDTGEKKGDQTWYRVLLEDGSEYKRLSRNPLPWEGQVRDFIVTTTLDAQGNPKTEKDGRVKRTYRSPKADDWTLLKKKTEAQIAQAHQTVGAYIFEALLRNPSQKIRGKLVHTIDRKLYYDELKAILQAQQPYHAALTDSAVLERCVRTLYQKNEAHARQALCHDLTAFLLDDVLFYQRPLKSQKALIANCCFESLTYYDRQTGEEKQAPVKCIPKSHPLYAEYRLWQFLDNLRIYQLEGEVDGKKCFDIDVTRQFLPDHEAYARLFDWLYHRENVSWKDLPKYPPFGLTRTTADLYRWNYAQDKSYPCHETWGHMQQCLKKAGLSPDFLTPEREEALWHILYSVSDMQELGRALHTFAHKNELTDDEAERFAKFFGKMEPFAHDYGACSAKALKKLLPLMRRGSYWSEEALAPGVRERIGQLLAGTDDAALPAKAREALKALHAVSDYQGLPLWLASYVVYNRHAEAKDIVRWETPADIDRFLLNFRPNELRNPIVELVVRETLRVVRDIWTRYGSFDEIHVELGREMKMPAQQRQKLSERMLENERTNLRIKMMLACFQHPEFGVDDVRPYSPYQQEILKIYEEYVLRDVKDIPDDIAAILRKFGESTAAKQPSAKEVLRYRLWLDQKYTSPYTGQIIPLGRLFTRDYEIEHIIPQKRYFDDSLSNKVICESAVNKLKSAQLAHEFISQHHGEVVELGNGRTARILELEDYERLVKDNYSHVRLSHKRRNLLLDEVPEAFIARQLNDTRYISKYVSMLLSNIVRGEDERSVNSTHLIATNGSITTRLKQDWGINDVWNAIVMPRFERLNGMVQTGDHMENVYVKLNTQGHLIPNVPLDRQRGFSMKRIDHRHHAMDAIVIACASRNMVNYLNNESARKGAKVTRMDLQHLLCTKTRADANGNYRWVMNKPWPTFTTDVRHALEDIVASFKQNRWIMSPTVNYFDHYDPATGKKRRKKQTQGEMQAVRKPLHKATLYGEINLRSIKEVSLKQALEQPQRMVNKDLRHKLQTLQAEGLNLKQMTAYFAEHHDEWADVNVKKIPIYVYSKEEGKARYFASRCALDKSFTRETIERKVADTGIQQILLRHLAHYENAEQAFSPEGIEEMNRHLTELNGGKPHQPIYKVRKYEQADKYPVGQRNCKAAQFVEAEKGTNLYFAVYEAESEPHKRSFATIPLREAVLRLKKGLPVALETNMAGEKLKFVLSPLDLVYVPTPEDLARGQVQLPLDKKRIYKMVSSSGNQCFFVLANVASAIVDKYEFSSLNKMERAVTGEMIKEICLPLDVDRLGNVHLRQ

SEQ ID NO: 22676 - protein, 1499 aa, unidentified
  REGION 1..1499: note = Cas Enzyme sequence
MKHILGLDLGTNSIGWAVISSSFDETTQKEQLKGIEAAGSRIIPMDAAQLGDFNKGNTVSQTANRTQFRGVRRLYERKKLRRERLHRILQLLGFLPKHYANQLDRYGKFIANSEPKLAWTTNTHGLPYFIFQSSFQEMLNDFLQNNSQIKKVPYDWTLFYLRKKALIQKIEKEELAWVLLNFNQKRGYYQLREEETEKASSKTRQYFDSQIVTDITDTGQVYKGLKIFTITLENGEKGKFFSKNMPDWKSQKKDIIAIIDLDKNGNDKYDENGELSRRFKIPTEQEWEEQWELIKTKTQKDLDTSHKTVGAYIYDTLLQTPSQKIRGKLIRTIERKYYKDELNQILKKQEEFHPELRDSNLLEACIEELYPNNEAHRNAIAKYSIAQLLIEDILFYQRPLKSKKSLISNCPYEEYTYINKETGEICTSPLKCIAKSHPLFQEFRLWQFISNLRIYQKEGTINGKFTTDIDVTSQFLKTEDAYANLFDWLNQKKEIRQDTFLKNPAFGLKKNTANYRWNYVEDKTYPCNETHYKILSYWEKAGIEQSALTSEIEEKLWHILYSISDKNELRKALQHFADKNYLSDKFADTFQQIPPFEKDYGSYSAKAIKKLLPLMRIGRYWKAENFDSTTLDRIEKILTGEFEENIKNRTREKTIHLDNLYSFQGLPTWLACYIVYNRHSEIKDVTKWQQPSDIDAFLNAFKQHSLHNPIVEQIIMETLRTVRDIWKQTGHIDEIHVELGREMKNPAEKRRKLTQQIQENENTNLRIKALLAEFANPELGIENVRPHSPSQQDLLRIYEEEALNETKDIPEDIAVILKKFNEVDTKKRPSTSDVLRYKCWLEQKYRSPYTGAMIPLGKLFTPAYEIEHVIPQSRYFDDSFTNKVICEAEVNKLKGNMLGYEFIKNNQERIVELGFGQNVKIQTVEAYELFVKEHYSYNRTKMQKLLMEDIPDQFIERQLNDSRYISKLIKSLLSNIVRDEGEEEATSKNVIVCTGSITDRLKKDWGINDVWNKLILPRFIRLNEITESNRFTTTNACNKTIPAMPLDLQKGFNKKRIDHRHHAMDAIVIACANRNIVNYLNNESASKNAKISRQDLRQILCKKTKTDNLGNYQWLIDKPWDTFTQDVYSILGNIIVSFKQNLRIINKTTNHYIHYENGKKVSCSQKQGDSWAIRKPMHKETVYGEINLRRTTTATLKAVLENPQRIIEKDLKKKIKELLTQGLNEKQIKKYFEDNKDIWQEINLKKIPVYYFTKETANRFFACRESINTTFNKKKIEEKVADTGIQQILLRHLEQNGNNPEQAFSPEGIEQMNKNIMSLNNNGKFHQPIYKVRTYEQADKFAVGQTGNKSTKFVEAAKGTNLFFAIYETAHKRSFASIPLNVVIERLKKGLSPAPENEKGNLPKFILSPNDLVYVPTKEEIENGHINQPIQKDRIYKMVSCTEGECHFIPYFVAKPIIQTIELGSNNKAQKTWQDEMIKEICIPIKTDRLGNIITSISL

SEQ ID NO: 22677 - protein, 1517 aa, unidentified; identical to SEQ ID NO: 17540
  REGION 1..1517: note = Cas Enzyme sequence

SEQ ID NO: 22678 - protein, 1422 aa, unidentified
  REGION 1..1422: note = Cas Enzyme sequence
MTQKVLGLDLGTNSIGSAVRNLDLSDDLQWQLEFFSSDIFRSSVNKESNGREYSLAAQRSAHRRSRGLNEVRRRRLWATLDLLIKHGFCPMSPGSLMRWRTYDKRKGLFREYPIDDKDFNAWILLDFNGDGRPDYSSPYQLRRELVTRQFDFEQPIERYKLGRALYHIAQHRGFKSSKGETLSQQETNSKPSSTDEIPDVAGAMKASEEKLSKGLSTYMKEHNLLTVGAAFAQLEDEGVRVRNNNDYRAIRSQFQHEIETIFKFQQGLSVESELYERLISEKKNVGTIFYKRPLRSQRGNVGKCTLERSKPRCAIGHPLFEKFRAWTLINNIKVRMSVDTLDEQLPMKLRLDLYNECFLAFVRTEFKFEDIRKYLEKRLGIHFSYNDKTINYKDSTSVAGCPITARFRKMLGEEWESFRVDGQKERQAHSKNNILFHRVSYSIEDIWHFCYDAEEPEAVLAFAQETLRLERKKAEELVRIWSAMPQGYAMLSQKAIRNINKILMLGLKYSDAVILAKVPELVDVSDEELLSIAKDYYLVEAQVNYDKRINSIVNGLIAKYKSVSEEYRFADHNYEYLLDESDEKDIIRQIESSLGAKRWRLMDADEQTDILQKIRDRYQDFFRSHERKFVESPKLGESFENYLTKKFPMVEREQWKKLYHPSQITIYRPVSVGKDRSVLRLGNPDIGAIKNPTVLRVLNTLRRRVNQLLDDGVISPDETRVVVETARELNDANRKWALDTYNRIRHDENEKIKKILEEFYPKRDGISTDDIDKARYVIDQREVDYFTESKTYNKDIKKYKFWLEQGGQCMYTGRTINLSNLFDPNAFDIEHTIPESLSFDSSDMNLTLCDAHYNRFIKKNHIPTDMPNYDKAITIDGKEYPAITSQLQRWVERVERLNRNVEYWKGQARRAQNKDRKDQCMREMHLWKMELEYWKKKLERFTVTEVTDGFKNSQLVDTRVITRHAVLYLKSIFPHVDVQRGDVTAKFRKILGIQSVDEKKDRSLHSHHAIDATTLTIIPVSAKRDRMLELFAKIEEINKMLSFSGSEDRTGLQQELDGLKNKLQMEVKVCRIGHNVSEIGTFINDNIIVNHHIKNQALTPVRRRLRKKGYIVGGVDNPRWQTGDALRGEIHKASYYGAITQFAKDDEGKVLMKEGRPQVNPTIKFVIRRELKYKKSAADSGFASWDDLGKAIVDKELFALMKGQFPEETSFKDACEQGVYMIKKGKNGMPDKKLYRIRHIRCNTVQKNALKIKEQTYKSEKEYKRYFYAAVGDLYAMCCYTNGKIREFRIYSLYDVSCHRKSDIEDIPEFITDKKGNRLMLDYKLHTGDMILLYKNSPEELYDLDNVNLSKLLYKINGFENDGLRIRMVNHLVVKEAMGESVKDYAKLPDIIRCGVKTIKFLIMGENRDFVIKNGKIIFNHR

SEQ ID NO: 22679 - protein, 1375 aa, unidentified
  REGION 1..1375: note = Cas Enzyme sequence
MKKILGLDLGTTSIGWALVYESENTDEKSSIVRLGVRVNPLSVDEKGNFEKGKAITTNADRQQTHGARINLQRYKLRRENLKDCLQKQGWIGTEALCEEGKASTFETYMLRAKAAEEEISLHELCRVLFMMNKKRGYKSNRKANNKEDGKLFDGMTVAKKLYEEHLTPAEYSFQLLSSGKKFKQEYYRSDLKEEFDRIWNEQQKYYPEILTDDFKQQLQGKSKGNTSKIFLGKYGIYSADLKGLDRKLQPLKWRVEALKQQVDKEVLAFVISDLNGQIASTSGLLGAISDRSKELYFNKQTVGQYLWTSLKETPHVSIKNKPFYRQDYLDEFEKIWETQATYHKELTPELKQEIRDIIIFYQRPLKSKKGLISVCELEQRKVKVTIDGKEKEISIGPKVAPKSSPMFQEFRIWQNLNNILLIDKGNNSIHPLYEEEKNLLYEELSVKEKLSKAEALKVLNKNSKQWDLNYKEIEGNRTQAVLYDCYNRIIVMTGHEEYNFKKLKASEIRSYVKTTFTGLGFNTDILEFDSSLTGHELEKQPMYQLWHLLYSYESDNSRTGNDALLRKLETAFGFPKEYAAVLSDVVFEDSYGNLSVKAMRKILPHLQAGLDYSQACEKAGYKHSRRSLTKNELDQKEYKEKLELLPKNSLHNPVVEKILNQMINVINAVIDEYGKPDEIRIELARELKIGAAERENMTRSISQGNAENKRIREILQKEFALSYISRNDIIKYKLYEELKSNGFKTLYSDTYISKDKLFSKDFDIEHIIPKARLFDDSLSNKTIEARDVNIAKSNKTAFDFIFGKYGQQGIEAYKKKLDILLQDGSISKAKYNRLLMKEADIPSGFIDRDLRDTQYIAKKAYEILSDLVRNVTPTTGAVTSRLREDWQLVDVMKELNFEKYQKLGLAEVIEDRDGRKIKRIKDWTKRNDHRHHAMDALTIAFTKPSYIQYLNNLNARSDKSSSIYGIENKELHREDNKLRFNAPLPINEFRAEARRHLKSVLVSVKAKNKVMTQNVNVIKTKHGVIKKVQLTPRGELHNATFYGTKKRSIIKMIKVGAALDEATIKKVSSSLIREALLDRLHEYNGDAKKAFTGRNSIDKNPIYIDEEHKKTVPSLVKTIEWEMYHPTRKLISPDLKIDKVIDKGIREILKTRLAKFNGDAQKAFSNLDENPIYKDEAKKITLKRVSLEGVSSVIPLHTIKDREGKPVVGKDGKPVLGDYVQTSNNHHIAFYMDENGNLQDNVVSFFEAAERKSQGVPVIDKSYNHDKGWHFLFTMKQNEYFVFPNEVTGFNPSEVDLTDEANYSLISPNLYRVQKMSKTSGRDYWFRHHLEAMLNDDPKLRNSMFKRINSLKALEGIVKVRINCVGKIVAVGEYD

SEQ ID NO: 22680 - protein, 1504 aa, unidentified
  REGION 1..1504: note = Cas Enzyme sequence
MKNIVGLDLGTNSIGWAVVNGSVNDDGSEQLVKIQASGSRIIPMDAAMIGDFNKGNSISQTAERTRLRGVRRLSERYLLRRERLHRILDILGFLPFHFAQDLDRHGKIVKGKEPKLAWRKNEAGQFEFIFQDSFKEMLEDFKLNHPNLITDDKKVPYDWTIYYLRKKGLTSKISKEELAWILLNFNQKRGYYQLRGEEEEENKNKLVEFYALKVVAVEDSGEKKGKDIWYNVHLENGWVYRRTSNMPLDWVGKTKEFIVTTDLEKDGTPKKDKEGNVKRSFRAPKEDDWSLVKKKTGADIDQTHKTVGTYIYDTLLGNPSQKIRGRLVRTIERKYYKEELKQILDKQKEFHPELQDRALYAACVEELYTINEAHRNNIGNRDFTYLFLEDILFYQRPLKSKKSLIDNCPYEENHCLDKETGEIKSFPVKCIAKSHPLFQEFRLWQFIVNLRIYRKGLAQDVDVTNELLKTEEDYVALFDWLNGKKEIDQKAFLKYPLFGLKKEVENYRWNYVQDKPYPCNETRSSMLARLEKCDISIEFLTKENEEALWHILYSVEDKNEIVKALQKFADKHDLNASFVDVFRKFPPFKKEYGSYSAKAIKKLLPLMRMGKYWSENSIDKGTRERIDKIITGEYDEKIENRVREKAIHLADVSDFRGLPLWLVCYIVYGRHSEAKEITQWKSPADIDSYLKSFKQHSLRNPIVEQIIIETLRVVRDIWKQVGNIDEIHVELGREMKNPADKRKKMTQQMSENENTNLRIKYLLTEFLNPEYEVENVRPYSPSQQDILRIYEEGVLNSVSDLPEEISDILKKFTETDLKKRPSRSEVLRYKLWLEQKYRSPYTGEVIPLGKLFTPAYEIEHVIPQSCYFDDSFSNKVICEAEVNKLKSNLLGHEFIVKHHGEIVELPFGKKVRIFTVDEYEQFVKDNYSRTRGKMKKLLMDDIPEEFVTRQLNDSRYISKVVKSLLSNIVREKGEEEAISKNVIPCTGGVTDRLKKDWGINEVWNKIILPRFQRLNELTGTNKFTTKNVGIQEIPTMPLELQKGFNKKRIDHRHHAMDAIIIACANRNIINYLNNESATAKAELSRYDLQKMLCDKAKTDNNGNYKWVIRKPWASFTQDTYLALENIIVSFKQNLRVINKATNHFLHYNEEGKKIFVKQGKGDNWAIRKSMHKDTVFGEVNLRRIKTVALNEAMKNPQSIVVKDFKRKLLELWNLGFDAKRIKKYFEDNRETWSDINLSKIEVYYFSKDTKDRFFATRKPLDTSFDRKKIENNITDTGIQKILLRHLELKDNNPDIAFSPDGIDEMNRNIIQLNNGKYHQPIIKIRWYEQADKFAVGQTGNKSSKFVEAAKGTNLFFAVYESNILDKKTNTIIKKRNYATIPLNVAIERQKQGLSVAPEDENGNDPIFVLSPNDLVYLPTDDELANGIIAQPLDRGRIYKMVSCTGNEGHFIPARIANPILQTIELGSNNKAQKAWTDEMIKEICMPIKVDRLGNVLESSSSYKK

SEQ ID NO: 22681 - protein, 1432 aa, unidentified
  REGION 1..1432: note = Cas Enzyme sequence
MTQKIFGIDLGTNSIGTSVRNTDLGNNLVDQLEFFSSDIFNASVSKNTNGREYSLASDRSAHRRGRRLNDSRRRKLWATLDLLIKNNLCPMAPESLEQWRTYDKKKKLFRQYPIDDKAFHSWIILDFNGDGKPDYSSPYQLRRELVSVQLDFNQPIDRYKLGRALYHIAQHRGFKSSKGETIAEQEKQEDDSKKNKNNALTEEHVDVVNAMKASEEKLSKGLLAYMQEHNLKTVGAAFAQLEDEGIRIRNNSEYKAIRSQHQDEIKEIFKFQKGLSNQTQLLDTLISEKQGIGTIFYKRPLRSQRGNVGKCTLEPNKPRCPIGHPLFEKFRAWTFINNIKAKSPDSDSAEPLPMDMRINIYNKLFLSRVKADFKFEEIRNFIEKQWGVALSKDDKTINYRDDTSVAGCPITARMIKVLGEDWENFQVIGTKERQTQGKSNNVLHQVCYTAEDVWHLCYDAEDPEQVRTFAEETLGWDEKKAAELVRLWSAIPQGYAMLSQKAIRNINRMLLFGLKYSDAVLLAKLPDILELSDEDIQTIIKKAQQLEEVVNEEKRIGNIVNSLIANYKAESLEDRFADHNYEYQLDASDEREIIKHIESNIGKQCWELMDADEQISILEGVRSGYQAFFARHKRTYVELPQLGKRLVELLSKEYPSVTEKQWERLYHPSQIAIYRPILLDKSDEKRRLGNPDIGAIKNPTVMRTLNNLRRRVNQLLDDGVLVPSETRVVVETARELNDANAKWALEKYQKTRRDENAQIKKILEEFYSKSNGITDTDVDKARYVIEQCEEDNYKSKKDIGTYSKDIQKYKYWLEQGGQCLYTGRIISLSNLFDSNAFDLEHTIPASVSFDNSDQNMTLCEAHYNRFIKKNNIPTAMPNYEKDVTIDGKLYTAIKPRLEKWKKRIERLSRNVEYWKVQARRAQMKDRKDECTKEKLLWQMELQYWRDKLQRFTILEVTDGFKNSQLVDTRIITRHATLYLKSIFENVEVQRGSTTAEFRKILGVQSVDEKKDRTLHSHHAIDATILTTIPTAAKRERILELFYKVQEKERILKNCSGDARIGLKQDLEGLQEKLRKEVADCKLGGEISQLGNFINDKIIINHCVKDQTLTPSHKRLRRRGRIVGTKEHPIWQTGDTLRGKIHKESYYGAITQYAKDQAGNVLFNNGKPKIDPTIWFVIRRELKHKKSAQDTGFASWDDLEKVIVDKNLFKLMKEQFPDGTSFKDACEQGIYMIKKGKDQEHNIKIHRIRHVRCHTSVRSALKIKEQLNKSTKDYKQYFYAESGDLYTICCYTNGKKKEYRPYRLYDIAQHRKSGIEDIPEFITDKKGNRLELSYKLRSGDMILLYENTPEELYDMDPVNLKQRLFKVDRFEYKSNLIYLTNHLIAYGEIGHSVKDYSQMPPTVRCGVNTLKFLIMGEHNDFVIKSNNIIFNHR

SEQ ID NO: 22682 - protein, 1382 aa, unidentified
  REGION 1..1382: note = Cas Enzyme sequence
MKRILGLDLGTASVGWAIVNEAENSEEQSSITALGSRVVLLSADEKNNFLTGKSVSATATRTAKRGARRNLQRYKLRREWLKDALVSAGIINENTCLNDSNSKELFATYISRAKAVTEQIALEDFAKVLFMINKKRGYKSNRKTDNTESEDGQIIDGLDLAKKLKARNITPGQYLLELFKENKKNKAVFYRSDLQEELNRIWDFQSQFYPEIFDNTLLSAITNKSKKAVIGLFKGIKNVEIADVKTKERTEKALTWRSEALHKQLEIGEVAYAIAEVMGAISQSSARLALLSDNSKHLEFEGLTIGQYLIKLLINNPNSSLKNINFYRKDYEDEFNSIWNKQASFYPQLTESLRSTIFNSIFMQRNLKSCKALLANCELEFAEKKITLPDGSCQTRTIYSKVCPKSSPYFQEFQIWQSLSNIRIIDKENTHLTKGQELSYDQKVMLLPELMIHSELKANKIIEILFGKKSNYTINMPSIKGNRTNETIFNALLEIVELTGHSIDNIVKTDANQQIEAVKNIFESLGYKTDFITFDSTIEGKDGLNQPYYKLWHLLYSYCGDNSKTGNEALIRKIEELTGLEKEEAKVLANCTFENDYASLSTKAIRKLLPHLQSNLDYSEACEAAGYNHSKRSRTKEDIKNTVYKDKLDLLPRNSLRNPIVEKILNQMIHVINQTSEAYGKPDEIRIEMAREIKKNKIQREKLANQLRQNTAELERIKDILRKDFKLSHISHNDILRYRLYEELSLNGYKTLYSNTYIERQQILDPTVTIEHIVPKALAFDDSFSNKTLEIQSVNGEKSNQTAFDFISKKYGSEALEQYINRVNNLFENGKISKTKRDNLLRKQEDIPSDFLNRDLRNTEYIAKKALEILEDYVPRVTPTIGEITKTLREDWQLVNIMRELNWEKYNSLGLTSFYYDRNGTKIGIIHNWTKRNDHRHHAMDALTIAFTKPSIIQYLNNLKSQNDKGSSIYAIQAKETYIDETRKRLIKPPYDIKQFRNDAKQMLDNIFVSHKAKNKVVTPNTIVTKKKRKAGKETRAEEKRTFLTPRGPLSNETVYRKICNYETKEITINSKLTYEIALTIAKKKEREAVLDRLAQHNNNPTTAFKNYNKNPIMLQTSVGEKPLMSVKIVNYKELFVKRSEINEKLDIKRVLDAKVRARLTDRLKEYNNDPKAAFANLEENPIWLNEEKGIALKHVTTIERVVGLPIRPKRNINGEIMKDEQGQPLKSHYVATGGNHHVAIYEDEEGKWHEKVVSFNEAASRAIQKLPIIDKDFNKELGWVFQFTMKQNEMFIFPDKEAGFDPLAIDLKDPANKTLISNHLYRVQKLSSCYYIFRHHLETNVEESKELKEITWKRITSFTSLKGVIKVRINHIGQIIDIGEY

SEQ ID NO: 22683 - protein, 1112 aa, unidentified
  REGION 1..1112: note = Cas Enzyme sequence
LDPGVRRGLGVSGCCGDAPGERGGGSPERRARAAPAGRRLTLPELGRVLCHINQKRGYRHVKSDAAAIVGDEGEKKKDSNSAYLAGIRANDEKLQAEHKTVGQYFAEQLRQNQSESPTGGISYRIKDQIFSRQRYIDEYDQIMAAQRVHYPDILTDEFIRMLRDEVIFMQRPLKSCKHLVSLCEFEKQERVMRVHQDDGKGGRQLVERRVKFGPKVAPKSSPLFQLCRIYEAVNNIRLTRPDGSPRDITPEERAKIVAHLQSNASLSFAALKKLLKEKALIADQLTSKSGLKGNSTRVALASALQPYPQYHHLLDMELETRMMTVQLTDEETGEVTEREVAVVTDSYVHQPLYRLWHILYSIEERDAMRRALITQLSMKEEDLDGGLLDQLYRLDFVKPGYGNKSAKFICKLLPQLQQGLGYSEACAAVGYRHSNSPTSEEITERTLLEKIPLLQRNELRQPLVEKILNQMINLVNALKAEYGVDEVRVELARELKMSREERERMVRNNKDREDHNKEVAEKIQKCGLFPTKSRIRKYRLWEEAGRQCLYCGRSIDEKQCLNGDDMEVEHIIPKSVLYDDSYGNKTCACRRCNKEKGNRTALEYIRAKGWEAEYMERINGLLDKKAISYSKHQRLRWLKEDIPSDFLERQLRLTQYISRQAMAILQQGIRRVSASEGGVTARLRSLWGYDDILHTLNLDRYDSMGETERVSREGETTEKLRIKDWSKRKDHRHHAIDALVVASTRQGYIQRLNRVSSESEREAMSGEIEMQKVTKTDKLSLLERWLTQRPHLSVRAVSDKVAEILISYRPGRRVVTRGRNIYRKKTADGREVSCVQRGVLVPRGELMEASLYGRIISQGRERIVKRYPLHDLKGEVVDPRLRELITTYNQELKSREKGAPIPPLCLDKDKRQEVRSVRCYVDKPSVSSAIPIRFDERGTAITFVQSGNNHHLAVYRTPQGVLEESIVSFWDAVDRARYGIPLVITHPREVMEQVLQRGDIPESVLKSLPPSDWMFVESLQQDEMVAIGLSDEELQSAIEAQDYRKLSEHLYRVQSLSSKYYVFRYHLETSVKDRKNTSGRIPKFHRVRNLPDYEKRNVRKVRVDLLGRISLL

SEQ ID NO: 22684 - protein, 1432 aa, unidentified
  REGION 1..1432: note = Cas Enzyme sequence
MKYILGLDLGSNSIGWALIEQDFDNKQGKILGLGSRIIPMDQGILGEFERGNKVSQTAERTGFRGIRRLRERYLLRRERLHRVLHLLGFLPPHYDAQIDFTKRFGKFMGDSEPKLAYNNEGFIFLESFNEMVEDFKKHQPQLFYIKSNGEESKIPYDWTIYYLRKKALYDKISKEELAWIILNFNQKRGYYQLRGEEEEKSTKNVEFYSLEITDVIADAPNNKGEIWYSIHLENGWVYRRASKISLEDWKGKVRDFIVTTELNEDGSIKLDKEGKEKRSFRAPNEDDWNLLKKKTEQNITLSGKTVGEYIYYHLLQNPNQKIKGKLVRTIERKFYKEELKAILEKQVALQPELFTEELFVDCVRELYKNNEIHQNSLSSKDFVHLFLNDIIFYQRPLRSQKSNISSCSLEYRFCIDEETKQRRKTYLKVISKSNPYYQEFRVLQWLSNLKIYRKEDDKDVTSEFISSIEDKETLYEFLMSEKEVSNKSVLEFLLMKLLRETYPFAKETELKKELKKEITKYRWNYVYEEGNDSKKYPMNETGYEIKKRLKEVKNIPDNFLTKDIEYQLWHIIYSVTDKYEYEKALMKFAQKHNLDAESFVENFKRIKPYPSDYGAFSEKAIKKLLPLMRFGKYWNYSNISEPVQARISDIINGVDNESIKTIVREKAEKYQLSQEVDFQGLPLWLAQYIVYGIHSEAVDIQRWTSPSDLEEYLKGFKQHSLRNPIVEQVVTETLRVVKDIWEYYGKGEENFFKEIHIELGRELKKTAEERKRMTREINENEETNLKVKKDLQELFENKSAENVRPYSPIQQEKYRLWLEQKEKSPYTGQSIPLSKLFTDEYQIEHVIPQSRFFDDSLSNKVICEAAVNAEKGAQLGLEFIKKHGGEIIEIGLNKKATVLNEKEYKELVNELFANNRGKKAKLLMEEIPEKMVERQLNDTRYISKFISQILSNIVRSPQEDEGVNSKNIIPCTGKITAALKQDWGLNDVWNDLILPRFERMNNLTQTELFTTYSEKYQKKIPTVPLEHAKGFQKKRIDHRHHALDALVVACATRSHINYMNNQHALDKHKAKEEKQNARIDLRTVLCDKKYNDNAEDNYNWTFKKPWNTFTQDVRSALEMVVVSFKQNLRVINKATNYYEKWREEKGKMVKKKVKQEGINWAIRKPLHKETISGKITLERVKVGKGKILTATRKSIDSSFTEKTIASITDTGIQKILLNYLAHKGSPELAFSPEGLEEMNKNIAKYNDGKDHQPIYKVRIFEEGSKFPLGEIGTKSQKYVETAKGTNLFFGIYQGKEKRSYATIPLDEVIERQKQGLTSVPEHNEKGEKLLFSLSPNDLVYVPMEGEDVESINFTNLSKEQRERVYKTVSFTGSECFFIKSSISSLIKNYDAKTKIGELGSLNKLEITIPDHIRIKEFCIKLKIDRLGNISKV

SEQ ID NO: 22685 - protein, 1380 aa, unidentified
  REGION 1..1380: note = Cas Enzyme sequence
MRKILGLDLGTTSIGWALVNEADNDNESSSIIRLGVRVNPLTVDEKSNFEKGKAITTNSDRQQRHGARINLQRYKLRRQNLRNLLQDQGWLCNDTLYEEGKGTTFETYKLRAKAAEEMISLHEFARVLFMLNKKRGYKSNRKANNKEEGQLFDGMTIAKKLYEEHLTPAEYSFQLLSKGKKFAQDYYRSDLIAELERIWNEQKKYYPEILTDEFKQQLEGKTKVNTNKIFLAKYGIYSADLKGLDRKLQPLKWRIEALKQQVSKEILAFVISDLKGQIANTSGLLGAISDRSKELYFNKQTVGQYLWASLEENPHISIKNKPFYRQDYLDEFEKLWETQAAFHKQLTPELKHEIRDIIIFYQRPLKSKKGLISVCELEQRKVKVTIDGKEKEITIGPKVAPKSSPVFQEFRIWQNINNILLINNDTNEKHSLDEKERYLLYQELSVKVKLSKTDVLKILNKKGKQWDLNYKEVEGNRTQAILFDCYNRIISLTGHEECDFKKLRASEIRHYVTTIFKNLGFNTDILDFNPSLVKHELEQQPMYMLWHLLYSYESDNSRTGNEALLRKLETDFGFPKEYATELCDVVFEDDYSNLSVKAMRKILPYLEVGNDYSQACAYAGYKHSRRSLTTEELDQKVYKERLELLPKNSLRNPVVEKILNQMINVINTIIDEYGKPDEIRIEMARELKSSAAEREKATRAISQANTENQRIRDILEKEFALSYISRNDIIKYKLYQELEANGFKTLYSDTYISKEKLFSKDFDVEHIIPKARLFDDSFSNKTLEARDINLAKSNKTAFDFVQEKYGTEGAEAYKKKLDIFLLKEVISRAKYNKLLMKEADIPSEFIERDLRNTQYIAKKACEILGELVKIVTPTTGEVTSRLREDWQLVDVMKELNFDKYQKLGLAEIVEDRDGRKIKRIKDWTKRNDHRHHAMDALTIAFTKPAFIQYLNNLNARSNKSNSIYAIENKELHREDNKLKFNAPIPIHDFRAEAKRHLSAILISIKAKNKVMTQNVNKIKTKQGVIKKIQLTPRGALHNDTIYGTKKRPIITMVKVGAALDEATINKISNLTIREALLKRLAEYNGDAKKAFAGKNSLEKNPIYLNEEKTKVLPALVKTVEWETYHPIRKPITPDLKIEKVIDKGIREILKARLAEFNGDAKKAFSNLDENAIYIDEAKKIALKRVSIEGVLSAIPLHTLKDQAGKPIIGKDGKPVLGNYVQTSNNHHIAFYYDENGNLQDNAVSFFEAAERKSQGIPIVDKNYNHDKGWRFLFTMKQNEYFVFPNEATGFIPTEVNLMDEANYDMISPNLYRVQTISKIIYDKSIIRDYLFRHHLETTVERIPNLKGITYKQLKSLPHLKGIVKVRINAIGKIVAIGEYD

SEQ ID NO: 22686 - protein, 1480 aa, unidentified
  REGION 1..1480: note = Cas Enzyme sequence
MKTILGLDLGTNSIGWAKVCVDDNGNYTREIKLGSRIIPMSQDTLSNFDKGVTESPTAARTGFRGIRRIRERALQRRERLHRVLHVMGFLPPHYENAIGWNREEATTYGKFLDNAEPKLAWEKQEDGSMRFLFMDSFYEMMADFAKYQPGIVADGRKIPLDWTLYYLRKKALTQAIRKEELAWILLNFNQKRGYYQLRGEEDEENPTKREEYYELKVVGVEAAEEGKGGNRWYNITLENGWIYRRQSKIELNDWIGKVRPFIVTTEYEIDGVTIKKDKNGEVKRSFRAPSEDDWGLRKKRTESLLEESGKTVGTFIYDHILSEPADKIRGNFVRTIERKFYKKELEAILREQSKHHKELKKQDTLIACIKELYPNNKPHQDSLMKKDMAYLLITDLIFYQRPLKSKKSLIADCPYEYYEYVIKETGEIKRQAIKCIAKSNPYYQEFRLWQFIINLRLFNRTNDKEVTSEYLSSMEDYTRLFTYLNDRKDINQETLLKDFCKQKKVKMGMEKEFPIRWNYIEDKEKKYPCNETRHELLAALGKAGIDHSWLDDKELFYRLWHLLYSVESKEEAEGALRKLNDNDDFVNAFLKIKPFKKEYGAYSEKAIKKLLAVMRMGDLWNETDICEQTRDRIQNIIKGDIDEKIKDRMGRTFCQISDFQGLPEWLACYVVYGRHSEATDIQRWTKPENLMAYINGFKQHSLRNPIVEQCILETLRTVHDIWKEAGHIDEIHIELGRSMKSTADQRARMSKSIIQNENTNLRIKSLLMELKNAKEFENVRPYSPMQQEILRIYEEGALQELTKEDAQYTEISKISQMAQPSANELLKYRLWLEQKYCSPYTGKPISLSKLFTSAYQIEHIIPQSRYFDDSFTNKVICETEVNQLKSNMLGYEFIKKHGGEIVHCTMIGDVKIYDAKEYSNFVTEHYANNRRKKEKLLMEDIPQEFLNRQMNDSRYISKKVMAILSYIVRGEDEQEAKSKFVIACSGGITDRLKQDWGLNDVWNSIVYPRFERLNKLTNTENFGRWENKEGKQVFQTSVPLELQKGFSKKRIDHRHHAMDALVIACASNNIINYLNNESAKSQEKREDLRKKLCDKNRIIRKPWETFTQDAHTALENIVVSFKNYIRVINKATNYYEKYDKNGKKGIAEQKGQDMWAIRKPMHKETVFGQVNLQRKVTIKLKDTLEKIPAICDKKLRDYINILVAKQFNKKQILAHFKSINYRLNMKSVDKVVVWQFSNEKEPMVATRKPIDTSFDDKRIATITDTGIQNILRNYLKAKDNNPNIAFTPEGIAEMNKHITEYNNGKQHQPILKVRVSEPKGAKYQVGETGNKTSKFVEAQKGTNLYFAIYEDKEGNRSYNTIPLNEVIERLKQGLSPVEDLNKQGEKLKFYLSPNDLVYVPTEEEKLSSECKLNKEQIYKMVSATSNQCFFTPHRTANSIVNKVEYSPLNKMEKTILGEMIKSVCWKLEVDRLGNIHKIIK

SEQ ID NO: 22687 - protein, 1526 aa, unidentified
  REGION 1..1526: note = Cas Enzyme sequence
MKKILGLDLGTNSIGWAVLNAADDNSLKYIEAAGSRIIPMDAAILGDFDRGNSISQTAERTRIRGMRHLRERYLLRRARLHRILNLLGFLPFHYAQDIDRYGNFSADMEPKIAWCKNLEGELEFIFIESFNEMLEDFRKNQPELVADNKKVPYDWVIYYLRKKALEKKISKEELAWILLNFNQKRGYYQLRGEDDDESMKTAKTRQYFDKQIIKNIIDTNQTYKGQRILIVELQNGDKGKIFKKEIPDWIGQEKNIIVTVDIDKDGNDKYEESGSLSCRFKIPTDAEWESEWKLIKMKTQKDLDESNKTVGTYIYDSILQNPTQKVRGKLVRTIERKYYKAELKQILEKQTEFHSELQDKDLYIECLNELYSNNDTHRNAITDRDFVYLFMNDILFYQRPLKSKKSLIDNCPYERNIYIDKETGEIKYLPIKCIAKSHPLFQEFRLWKFISSIRIYQRESVVEVVDKQLDLFSSQSTSVQKLVTDVDVTDKFLTCENDYVALFEWLNKKKIIDQKEFLKYRPFGLKGDIDNYRWNYVEDKSYPCNETHAMILTYFAKAGISEDILTKEMEEALWHILYSVEDRQEITKALRTFASKYHLSDSFVKVFSNIPPFKKEYGSYSAKAIKKLLSLMRMGKYWSEDAIDVNTRERIDKIVTGEYDEKIRDRVREKTIRLNDIRHFRALPDWLACYVVYDRHSETREITEWKSPEEIDEYIRNFKQHSLRNPIVEQVITETLRTVRDIWKQVGCIDEIHVELGREMKNPADKRKRITSQIIENENANLRVKALLTEFVNPEFEIENVRPYSLSQQDILRIYEDGVLNSVAEVPGDIAGILKKFNENDAKKRPTTSEILRYKLWLEQKYRSPYTGEMIPLSKLFTSAYEIEHVIPQSRYFDDSFSNKVICEAEVNKLKDNALGYEFIKKHHGEKVELGFGKIVEIFSVSVYEQFVKDNYSRNRGKMKKLLMDEIPEQFIERQLNDSRYISKVVKTLLSNVVREKAEQEAVSKNVIVCTGGVTDRLKKDWGINDVWNKIVLPRFLRLNELTNSTNFTAKNAAGNEIPAMPLELQKGFNKKRIDHRHHAMDAIVIACANRNIVNYLNNESASRKAKISRHDLQAILCDKVRTDDKGNYQWRVKKPWDTFTQDVYVALENIIVSFKQNLRVINKTSNYYWHYENGKKVLVKQVKGDSWAIRKPMHKDTVFGEVNLRKVKSVSLNEALKNPQFIVEKDLKRQLLSLLQQNFDIKKIKKYFEEHKDIWSDISLSKMNIYYFTKETKDRYFATRKPLDASFDKKKIESCITDTGIQQILLRHLELKENDPERAFSPDGIDEMNRNIIQLNKGKGHHPIAKVRVYEKADKFEVGQRGNKSSKFVEAAKGTNLFFAVYETEYPDEKTNSIVRKRNYATIPLNIAIERQKRGLSTAPEDEKGNVPSFVLSPNDLVYLPTSEDIVNGHITQPIDKSRIYKMVSSSGSQCFFIKHNIANIIVDKYEFSPLNKMERAISNEMIKEICIPVKVDRLGNIVKLGKSE

SEQ ID NO: 22688 - protein, 1504 aa, unidentified
  REGION 1..1504: note = Cas Enzyme sequence
MKNIVGLDLGTNSIGWAVVNGNINDDGSEQLVKIQASGSRIIPMDAAMIGDFNKGNSISQTAERTRLRGIRRLSERYLLRRERLHRILDILGFLPSHFARDLDRYGKIVKDKEPKLAWRKNEAGQFEFIFQNSFKEMLEDFKLNHPNLITDDKKVPYDWTIYYLRKKGLTSKISKEELAWILLNFNQKRGYYQLRGEEEEENKNKQVEFYALKVIAVEDSGEKKGKDTWYNVHLENGWIYRRTSNMPLDWVGKTKEFIVTTDLEKDGTPKKDKEGNIKRSFRAPKEDDWSLVKKKTEADIDQTHKTVGTYIYDTLLGNPSQKIRGRLVRTIERKYYKEELKLILDKQKEFHPELQDRALYAACVEELYTINEAHRNNIGNRDFTYLFLEDILFYQRPLKSKKSLIDNCPYEENHCLDKETGEIKFFPVKCIAKSHPLFQEFRLWQFIVNLRIYRKGLAQDVDVTNELLKTEEDYVALFDWLNGKKEIDQKAFLKYPPFGLKKEVENYRWNYVQDKSYPCNETRSLMLARLEKCDISIEFLTKENEEALWHILYSVEDKNEIVKALQKFADKHNLNASFVDIFQKFPSFKKEYGSYSAKAIKKLLPLMRMGKYWSEDSIDKGTRERMDKIITGEYDEKIENRVREKAIHLADISEFKGLPLWLVCYIVYGRHSESKEIAKWESPADIDSYLKSFKQHSLRNPIVEQIIIETLRVVRDIWKQVGNIDEIHVELGREMKNPADKRRKMTQQISENENTNLRIKYLLTEFLNPEYEVENVRPYSPSQQDILRIYEEGVLNSVSNLPEEISDILKKFTETDLKKRPSRSEVLRYKLWLEQKYRSPYTGEVIPLGKLFTPAYEIEHVIPQSRYFDDSFSNKVICEAEVNKLKSNLLGHEFIVKHHGEIVELPFGKKVKIFTVDEYEQFVKDNYSRTRGKMKKLLMDDILEEFVARQLNDSRYISKVVKSLLSNIVREKGEEEAISKNVIPCTGGVTDRLKKDWGVNDVWNKIILPRFQRLNELTGTNKFTTMSLNNHEIPAMPLELQKGFNKKRIDHRHHAMDAIIIACANRNIINYLNNESATAKAELSRYDLQRLLCDKAKTDDNGNYKWVIRKPWASFTQDVHGVLEDIIVSFKQNLRVINKATNHFLHYNEEGKKIFVKQEKGDSWAIRKSMHKDTVFGEVNLRRIKTVALNEAMKNPQSIVVKDFKRKLLELLNLGFDAKRIKKYFEDNRETWSDINLSKITVYYFSKDTKDRFFATRKPLDTSFDRKKIENNITDTGIQKILLRHLELKDNNPDIAFSPDGIDEMNRNIIQLNNGKYHQPIIKVRWYEQADKFAVGQTGNKSSKFVEAAKGTNLFFAVYESNILDEKTNTIIKKRNYATIPLNVAIERQKQGLSVAPEEENGNDPIFVLSPNDLVYLPTTDELANGVVAQPLDKERIYKMVSCTGNEGHFIPARIANPILQTIELGSNNKAQKAWTDEMIKEICMPIKVDRLGNILESSSLHKK

SEQ ID NO: 22689 - protein, 1520 aa, unidentified
  REGION 1..1520: note = Cas Enzyme sequence
MKKIVGLDLGTNSIGWALINAYIDEYNKEHLYGIEACGSRIIPMDAAILGNFDKGNSISQTADRTSYRGIRRLRERHLLRRERLHRILDLLGFLPKHYSDSLNRYGKFLNDIECKLPWVKDETGSYKFIFQESFKEMLANFTEHHPILIANNKKVPYDWTIYYLRKKALTQKISKEELAWILLNFNQKRGYYQLRGEEEETPNKLVEYYSLKVEKVEDSGERKGKDTWYNVHLENGMIYRRTSNIPLDWEGKTKEFIVTTDLEADGSPKKDKEGNIKRSFRAPKDDDWTLIKKKTEADIDKIKMTVGAYIYDTLLQKPDQKIRGKLVRTIERKYYKNELYQILKTQSEFHEELRDKQLYIACLNELYPNNEPRRNSISTRDFCHLFIEDIIFYQRPLKSKKSLIDNCPYEENRYIDKESGEIKHASIKCIAKSHPLYQEFRLWQFIVNLRIYRKETDVDVTQELLPTEADYVTLFEWLNEKKEIDQKAFFKYPPFGFKKTTSNYRWNYVEDKPYPCNETHAQIIARLGKAHIPKAFLSKEKEETLWHILYSIEDKQEIEKALHSFANKNNLSEEFIEQFKNFPPFKKEYGSYSAKAIKKLLPLMRMGKYWSIENIDNGTRIRINKIIDGEYDENIRERVRQKAINLTDITHFRALPLWLACYLVYDRHSEVKDIVKWKIPKDIDLYLKSFKQHSLRNPIVEQVITETLRTVRDIWQQVGHIDEIHIELGREMKNPADKRARMSQQMIKNENTNLRIKALLTEFLNPEFGIENVRPYSPSQQDLLRIYEEGVLNSILELPEDIGIILGKFNQTDTLKRPTRSEILRYKLWLEQKYRSPYTGEMIPLSKLFTPAYEIEHIIPQSRYFDDSLSNKVICESEINKLKDRSLGYEFIKNHHGEKVELAFDKPVEVLSVEAYEKLVHESYSHNRSKMKKLLMEDIPDQFIERQLNDSRYISKVVKSLLSNIVREENEQEAISKNVIPCTGGITDRLKKDWGINDVWNKIVLPRFIRLNELTESTRFTSINTNNTMIPSMPLELQKGFNKKRIDHRHHAMDAIIIACANRNIVNYLNNVSASKNTKITRRDLQTLLCHKDKTDNNGNYKWVIDKPWETFTQDTLTALQKITVSFKQNLRVINKTTNHYQHYENGKKIVSNQSKGDSWAIRKSMHKETVHGEVNLRMIKTVSFNEALKKPHAIVEMDLKKKILAMLELGYDTKRIKNYFEENKDTWQDINPSKIKVYYFTKETKDRYFAVRKPIDTSFDKKKIKESITDTGIQQIMLRHLETKDNDPTLAFSPDGIDEMNRNILILNKGKKHQPIYKVRVYEKAEKFTVGQKGNKRTKFVEAAKGTNLFFAIYETEEIDKDTKKVIRKRSYSTIPLNVVIERQKQGLSSAPEDENGNLPKYILSPNDLVYVPTQEEINKGEVVMPIDRDRIYKMVDSSGITANFIPASTANLIFALPKATAEIYCNGENCIQNEYGIGSPQSKNQKAITGEMVKEICFPIKVDRLGNIIQVGSCILTN

SEQ ID NO: 22690 - protein, 1436 aa, unidentified
  REGION 1..1436: note = Cas Enzyme sequence
MKYIKYILGLDIGSNSIGWALIQLDLLQKTKRIIAAGSRIIPMDQKVLSDFGKGITISPTAQRTSYRNARHCRERHLLRRERLHRVLHILGFLPTHYDKQIDFSKRYGKFVDNTEPKIAYNEGKFLFMDSFQEMLSDFKSHQPDLFYTKKNGEESKIPYDWTIYYLRKKALSQKISKEELAWIILNFNQKRGYYQLREEEGNKENDFEIISSKIISVIKKDKDKKYNKYWYDIILENGLVYQAAFYNDFVYNWINQDREFIIERTSLKNGAEKVKLSYLPTFDEIDKMDKKEQDKYYKKIKIKTENSIGNKTVGCYIYDHILQNPNEKIKGKLVRTIERKYYKEELKAILEKQIALQPELFTDQLLADCIRELYSKNEAQQRNLAARDFVHLLVEDIIFYQRPLRRQKSTLANCSLESRSYIDKDSHTRKEAPLKVCPKSNPYYQEFRVLQWLQNLKIYEIDSDQEVTHQFIKTLEDKQQLFEFLMAQKEIDCEELLKYFLNQTYPNAKEKALKSELKKWKDTYRWNYVYDIGEKSSKKYPMNETRYELKRHLEKVANLPDDFLSSEVEYLLWHLIYSVKDKVAYEKGLKKFAQKHHLDKDSFVESFKKFNPYPSEYGSFSEKAIRKLLPLMRFGAHWDFNHIDKNTQKRIEDLITGVENEEIRTILREKAEKYQLEKETDFQDLPLWLAQYIVYNRHAEASSLEKWTSVNDLETYLNEFKQHSLRNPIVEQVVMETLRVVRDIWQQYGQGQASFFNEIHIELGRELKKTAKEREKLSKQNQKNEDINLSIKEKLKELEKYNTRAYSITHQEKYKLWLEQKHISPYTGQIISPENLFTDNYEIEHIIPQSRFFDDSLSNKVVCESIVNKAPYKDRQLGLEFIKNQGGRIVKELSKENKTIKIFTEEQYRTFIKEHYSNNPEKTKKLLLEEIPEKMVARQMNDTCYISKFISEILSKIVRSDEQDEGVHSKNVILCTGKITSILRQDWGLNDIWDNLILPRFERMNNLLQKEKFTIYSIEKQKKIPVVPINDQFKSFQKKRIDHRHHAMDAIIIACTPREHINYINNQHALEKEKDKKEKQEERDKLREKLCIKKYNNRSEGNYSWIFKKPWDTFTQEVRVALEDIVVSFKQNLRVINKATNYYERWVEENGKYIKKMVKQEGTNWAIRKPLHEETISGKIYLDREKITKNDILTATRKTVDSSFDDKRIKKITDTGIQKILLNYLKYKGSPEIAFSPEGLEELNKNLSIYNDGKPHKPIYKVRIYEKGSGRFALGEKGRKYKKYVQGASNLYFGIYQGAKRSFATIPLNEVIERQKQGLPSVPEYNEKGDLLLFSLSPNDLVYVPIEGEIIENIDFRNLSKEQKERIYNVNDFSSTCYFTPNRIAKAIFPKEVDLQRKGDKLSGSYDTKTASLEGIQIKEVCIKLKVDRLGNISKA

SEQ ID NO: 22691 - protein, 954 aa, unidentified
  REGION 1..954: note = Cas Enzyme sequence
SDKVLKLLGYSPQEWEINYNQLEGNRTQKALYEAYLKIVEMEAHDVKDILQIKSAKDDWSLDESPLSASEIKEKVKDIFQALGICTKILYFDPLLPVKEFEKQDSYQLWHLLYSYESDDSTSGNETLYRILEKKYAFKREHARILANVALQDDYGSLSTKAIRKIYPYIKENQYSTACELAGYKHSKLSLTTEELEARELKNIIPLLRKNVLRNPVVEKILNQMINVVNALIEKNSERDAEGKITKYFHFDEIRIELARELKKNAQERYEMTQNINKAKLEHQKISEKLQKQFGIKNPTKSDIIRYRLYQELEHNGYKELYTNTYIAPDVLFSKNIDIEHIVPKARVFDDSFSNKTLAFKEFNIKKGESTAFDYITSLNCEGELNQYLTRVENAYKTKSISLTKYKNLLRKASEIGDGFINRDLRDTQYIAKKAKEILFQVTKNVLSTSGSITDRLREDWGLVDVMKELNMPKYQSLGLTEVEERKDGNKVTVIKNWTKRNDHRHHAMDALTVAFTKPSYIQYLNHLNARKDKNNKNYSVILAIEEKETIKVPTNNGKNKRVFIEPIPNFRQVAKKHLEEIFISHKAKNKVVTKNINKPAGTDKQQITLTPRGQLHKETIYGKYQYYVNKEEKVGVKFDERTIIKVSNPLYREALLKRLQANDNDPKKAFAGKNALSKNPIYLDEAKTKTLPEKVNLTYLEEDFSIRKDISPDNFKDLKSIEKVIDQGVKRILIKRLQAYGNDPKKAFVDLEKNPIWLNKEKGIAIKRVTISGVNNAQPLHIGKDHLGKTTLNKEGKEIPVDYVSTGNNHHVAIYRDKEGNLQEQIVSFFEAVVRAQQGLPIVDKTYKQAEGWQFLFTMKQNEMFVFPNKATGFNPAEIDLLDPKNKKQISPNLFRVQKIATKDYFFRHHLETNVETDNILKNVTWKREGLSGLKDIVKVRMNHLGDIVSIGEY

SEQ ID NO: 22692 - protein, 1509 aa, unidentified
  REGION 1..1509: note = Cas Enzyme sequence
MKKILGLDLGTNSVGWAVINSVVNDEGKEQLVNISSCGSRIIPMDAATLGDFDKGNSKSPVAERTRLRGVRRLLERSLLRRQRLHRVLSVMGFLPEHYASQLDRYGKFLPEREPKLAWYQDETGKYRFLFQDSFNEMLEDFRQHHPELVAEGKKIPYDWTIYYLRKKALSQKITKEELAWILLNFNQKRGYYQLRGEEEKEDNKKSVEYYALKVVSVEDSGDRKGKDIWYNVKLENGWVYRRASSVPLDWVGKIKEFIVTTDLDEKGNPKKDKDGNVKRSFRAPKEDDWGLLKTRTQAQIDESGQTVGTYIYESLLRMPDQKIRGKLVRTIERKYYKDELRKILVKQSEFHAALQDHNLLLACIEELYPNNEAHRRLLSTSDFTNFLVEDILFYQRPLKSQKGLIDDCPYESHVYRDKKDGSLQHVPLKCVSKSHPLFQEFRLWQFLASLRIYQRERQVEGSLKLDVDVTNEFLQSEDDYVKLFDWLNDRKDIDQKTILAYKPFGLKKSEQSKYRWNYVEDKSYPCNETRADIIFRLNKAGVPEEFLTREKEEALWHILYSISDKKELTKALGTFAEKNGLNETFVEIFSKMPPFESDYAAYSLKAIRKLLALMRMGKYWDEQAIDEQTRSRIEKMLTGEYDETIRTRVREKAMHLTDMSSFRGLPLWLACYVVYDRHSEAKELVKWETPDDIDHFLRKFKQHSLRNPIVEQVIMETLRTVRDIWKLEGKIDEIHVELGREMKNPSKERARITAQVLENENTNLRIKALLTEFMNPEFEIENVRPYSPAQQEILRIYEEGVLSGVAEKDLPDDIASILKKFRENDVKKRPTTSEVLRYKLWLEQRYRSPYTGRIIPLGKLFTPAYEIEHVIPQSRYFDDSLTNKVICESAVNKLKDNCLGYEFIKKHSGEKVELGNGETATIFSVEEYERFVKDSYLGNSKKMKKLLLEDIPDNFIERQLNDSRYISKVVKSLLSNIVCEEGEQEGMSKNVIVCTGGVTDRLKKDWGVQDVWNRIILPRFLRLNKITDSTDFTSVSTNGHLLPAVPLHLQKGFNKKRIDHRHHAMDAIVIACAGRNIVNYLNNASARKGSEISRYDLQHLLCDKVKTDANGNYKWILRKPWETFTQDVYVALTNIVVSFKQNLRVINRTTNHYQHYNEDGEKKMIPQTKGDRWAIRKPMHKDTVYGEVNLRKEKTLPLKDVLNNPSIVVDKSLKNKLYELLKSQYDLKAITKYFETHQDVWADVNLKKIKVYYFTKETNERFFATRKSLDSSFNQKKIEEEVTDTGIQKILLRHLQQNGNNPDIAFSPDGVERMNQNMTILNNGKWHQPIYKVRTYEKADKFAVGESGNKVKKFVEAAKGTNLFFAVYESMQEDEATGKQVRKRTFATIPLNEVIKRKKQGLSVAPEDSKGNLPIFVLSPNDLVYLPTEEERNSGKIIQPLDRERIYKMVSCTGNRLFLVPYMVASSIYDKNEYTSLNKVELSDDKISIKEWCIPIEVDRLGNISIQNY

SEQ ID NO: 22693 - protein, 1504 aa, unidentified
  REGION 1..1504: note = Cas Enzyme sequence
MKNIVGLDLGTNSIGWAVVNGSVNDDGSEQLVKIQASGSRIIPMDAAMIGDFNKGNSISQTAERTRLRGVRRLSERYLLRRERLHRILDILGFLPFHFAQDLDRHGKIVKGKEPKLAWRKNEAGQFEFIFQDSFKEMLEDFKLNHPNLITDDKKVPYDWTIYYLRKKGLTSKISKEELAWILLNFNQKRGYYQLRGEEEEENKNKLVEFCALKVVAVEDSGEKKGKDIWYNVHLENGWVYRRTSNMPLDWVGKTKEFIVTTDLEKDGTPKKDKEGNVKRSFRAPKEDDWSLVKKKTEADIDQTHKTVGAYIYDTLLGNPSQKIRGRLVRTIERKYYKEELKQILEKQKEFHLELQDRALYAACVEELYTINEAHRNNIGNRDFTYLFLEDILFYQRPLKSKKSLIDNCPYEENHCLDKETGEIKSFPVKCIAKSHPLFQEFRLWQFIVNLRIYRKDLAQDVDVTNELLKTEEDYVALFDWLNGKKEIDQKAFLKYPLFGLKKEVENYRWNYVQDKPYPCNETRSSMLARLEKCDISIEFLTKENEEALWHILYSVEDKNEIVKALQKFADKHDLNASFVDVFQKFPPFKKEYGSYSAKAIKKLLPLMRMGKYWSENSIDKGTRERMDKIITGEYDEKIENRVREKAIHLADVSDFKGLPLWLVCYIVYGRHSEAKEITQWKSPADIDLYLRSFKQNSLRNPIVEQIIIETLRVVRDIWKQVGNIDEIHVELGREMKNPADKRKKMTQQMSENENTNLRIKYLLTEFLNPEYEVENVRPYSPSQQDILRIYEEGVLNSVSDLPEEISDILKKFTETDLKKRPSRSEVLRYKLWLEQKYRSPYTGEVIPLGKLFTPAYEIEHVIPQSCYFDDSFSNKVICEAEVNKLKSNLLGHEFIVKHHGEIVELPFGKKVRIFTVDEYEQFVKDNYSRTRSKMKKLLMDDIPEEFVARQLNDSRYISKVVKSLLSNIVREKGEEEAISKNVIPCTGGVTDRLKKDWGINEVWNKIILPRFQRLNELTGTNKFTTKNVGIQEIPTMPLELQKGFNKKRIDHRHHAMDAIIIACANRNIINYLNNESATAKAELSRYDLQKMLCDKAKTDNNGNYKWVIRKPWASFTQDTYLALENIIVSFKQNLRVINKATNHFLHYNEEGKKIFVKQGKGDNWAIRKSMHKDTVFGEVNLRRIKTVALNEAMKNPQSIVVKDFKRKLLELWNLGFDAKRIKKYFEDNRETWSDINLSKIEVYYFSKDTKDRFFATRKPLDTSFDRKKIENNITDTGIQKILLRHLELKDNNPDIAFSPDGIDEMNRNIIQLNNGKYHQPIIKVRWYEQADKFAVGQTGNKSSKFVEAAKGTNLFFAVYESNILDKKTNTIIKKRNYATIPLNVAIERQKQGLPVAPEDENGNDPIFVLSPNDLVYLPTAADLANGIIAQPLDRGRIYKMVSCTGNEGYFIPARIANPILQTIELGSNNKAQKAWTDEMIKEICMPIKVDRLGNVLESSSSYKK

SEQ ID NO: 22694 - protein, 1156 aa, unidentified
  REGION 1..1156: note = Cas Enzyme sequence
MKYRLGLDLGVGSIGSAVIELDNENNAKNIIDAGVRIFEVSEGAEERRLKRTARKNLVRTKKRLELLAKKLFENGLWPNENPEGTDKLKSKSPYKIRTDALNEKLASPYYVGRAVLHIAKHRGAGFVSASEETEEEILEEGEKSKAKKSSYDMMLHHLKETNSKTIGEFFYNKIISGKGNDKTVRQKKYAIEKNIVDYAIPRYLVKDEFNKIWDKQAEFYPQMKKENLKKEIYDILFYERPAAPYATGKCIYFREEDRLLKAHPLSEMRRIYEEVNNIRILNDMNKRKLTLEERDSIVNELLLKGQNAGKQAIKKLLNLSAQHKISLVDDRVIKAYLYSRPEFANNEHLQNMNENELSSFIEFLAEPKMSKDKNARLYNEDALIEYLKPILKIDDEKEIGNLLTKLPKGRGMLGISATKIILEKLKKDVLTHREITDKLAETDKRFMAEEEIARQNQGKCFQLPYYGEILQTDTAPLPPLMINNNKSLNPDEIRWGKIANPAVHMILNQIRLVVNEIIKIYGKPYDINIELGRDVGMSTKKKKEFENQQKQNEKLNEEAKNYLKEHKIAINNKNILKYKLAKEQGWKDAYNPTQNISSIFTGMEIEHIIPQAKGGTDTYNNLCLVNNNDNLNKGDRYAYEYFEETKTQEEIREILKNARSRTPQKSWRFEADAREKYEESGDKEESTRYLTDTRYVAKMAQRYLRAIVDCSDCDEVMQTRILAVKGGQTAKLRQHWNLYGLEYDLMGLDIPRYVNCPPYWLELDTGEIIEGINKPDIDGKWKFFDKAKNKEWQPKPRIDHRHHAMDAITVACANRGLIQKMAEENDINKIHYPLPLTSVESLADFRRKVISCLKDIKVSHKPNHSKAGQFHKETGRTVLCQNPDDPNSLITVYSRKILQVVKSAKDLTKLLIPETIKNEWHEDIAEHKAKQAKLVQDFELYMNTAEQILIAENEQGVAEGKKETKITEGRILLKAFRIIQDKGLWKGDKFRCYSNSSSMINIPKHGVAYEAQNNHCIDFYQKNGKIGWEVIKRFDANQADFEPQWKKEGGKIIWSVQQGDILELDTPDEWKQYTDKERCLAKVKKFSDGDLSIDYITDARMTSPKDKNLQYMFVDSKRLRSINAICKANIRKVELTPFGKIKKKHKVLWNGTKTAA

SEQ ID NO: 22695 - protein, 1432 aa, unidentified
  REGION 1..1432: note = Cas Enzyme sequence
MTQKILGIDLGTNSIGTSVRNTDLGNNLVDQLEFFSSDIFNASVSKNTNGREYSLASDRSAHRRGRRLNDSRRRKLWATLDLLIKNNLCPMAPESLEQWRTYDKKKKLFRQYPIDDKAFHSWIILDFNGDGKPDYSSPYQLRRELISVQLDFNQPIDRYKLGRALYHIAQHRGFKSSKGETIAEQEKQEDDSKKNKNSALTEEHVDVVNAMKASEEKLSKGLLAYMQEHNLKTVGAAFAQLEDEGIRIRNNSEYKAIRSQHQDEIKEIFKFQKGLSNQTQLLDTLISEKQGVGTIFYKRPLRSQRGNVGKCTLEPNKPRCPIGHPLFEKFRAWTFINNIKAKSPDSDSAEPLPMDMRINIYNKLFLSRVKADFKFEEIRHFIEKQWGVALSKDDKTINYRDDTSVAGCPITARMIKVLGEDWENFQVIGTKERQTQGKSNNALHQVCYTAEDIWHLCYDAEDPEQVRTFAEETLGWDEKKAAELVRLWSAIPQGYAMLSQKAIRNINRMLLFGLKYSDAVLLAKLPDILELSDEDIQTIIKKAQQLEEVVNEEKRIGNIVNSLIANYKAESLEHRFADHNYEYQLDASDEREIIKHIESNIGKQRWELMDADEQISILEGVRSGYQAFFARHKRTFVELPQLGKRLVELLSKEYPSVEKKQWERLYHPSQIAIYRPILLDKSDEKRRLGNPDIGAIKNPTVMRTLNNLRRRVNQLLDDGVLVPSETRVVVETARELNDANAKWALEKYQKTKRDENAQIKKILEEFYSKPNGITDTDVDKARYVIEQCEEDNYKSKKEIGTYSKDIQKYKYWLEQGGQCLYTGRIISLSNLFDSNAFDLEHTIPASVSFDNSDQNMTLCEAHYNRFIKKNNIPTAMPNYEKDVTIDGKLYTAIKPRLEKWKKRIERLSRNVEYWKVQARRAQMKDRKDECTKEKLLWQMELQYWRDKLQRFTILEVTDGFKNSQLVDTRIITRHATLYLKSVFKNVEVQRGSTTAEFRKILGVQSVEEKKDRTLHSHHAIDATILTTIPTAAKRERILELFYKVQEKERILKNCSGDAPIGLKQDLEGLQAKLKKEVADCKLGGEISQLGNFINDKIIINHCVKDQTLTPSHKRLRRRGRVVGGKEHPIWQTGDTLRGKIHKESYYGAITQYAKDKDGNVLFNDGKPKIDPTIWYVIRRELKHKKSAQDTGFASWDDLEKVIVDKNLFKLMKEQFPEGTSFKDACEQGIYMIKKGKDQEHNIKTHRIRHIRCHTSVRSALKIKEQLNKSIKDYKQYFYAESGDLYTICCYTNGKKKEYRPYRLYDIAQHRKSGTEDIPEFITDKKGNRLELTYKLRSGDMILLYENTPEELYDMDPVNLKQRLFKVDRFESKGLRIYLTNHLIANGEVGHSIKDYNQMPPTVRCGVNTLKFLIMGEHNDFVIKSNNIIFNHR

SEQ ID NO: 22696 - protein, 1380 aa, unidentified
  REGION 1..1380: note = Cas Enzyme sequence
MRKILGLDLGTTSIGWALVNEADNDNESSSIIRLGVRVNPLTVDEKSNFEKGKAITTNSDRQQRHGARINLQRYKLRRQNLRNLLQDQGWLCNEALYEEGKGTTFEIYKLRAKAAEEKISLHEFARVLFMLNKKRGYKSNRKANNKEEGQLFDGMTIAKKLYEEHLTPAEYSFQLLSKGKKFAQDYYRSDLIAELERIWNEQKKYYPEILTDEFKQQLEGKTKVNTNKIFLAKYGIYSADLKGLDKKLQPLKWRIEALKQQVSKEILAFVISDLKGHIANTSGYLGAISDRSKELFFNKQTVGQYLWASLKENPHISIKSKPFYRQDYLDEFEKLWETQAAFHKQLTPELKHEIRDIIIFYQRPLKSKKGLISVCELEQRKVKVTIDGKEKEITIGPKVAPKSSPVFQEFRIWQNINNILLINNDTNEKHSLDEKERNLLYQELSVKVKLSKTDVLKILNKKGKQWDLNYKEVEGNRTQAILFDCYNKIISLTGREECDFKKLQASEIRHHVTTIFKNLGFNTDILDFNPSLVKHELEKQPMYMLWHLLYSYESDNSRTGNEALLRKLEIDFGFPKEYATVLCDVVFEDDYSNLSVKAMRKILPYLEVGNDYSQACAYAGYKHSRRSLTKEELDQKVYKERLELLPKNSLRNPVVEKILNQMINVINTIIDEYGKPDEIRIEMARELKSSAAEREKATRAISQANAENQRIREILERDFALLYISRNDIIKYKLYQELEANGFKTLYSDTYISKEKLFSKDFDVEHIIPKARLFDDSFSNKTLEARDINLAKSNKTAFDFVQEKYGTESAEAYKKKLDILLLKEVISRAKYNKLLMKEADIPSEFIERDLRNTQYIAKKACEILGELVKTVTPTTGEVTNRLREDWQLVDVMKELNFEKYQKLGLADIVEDRDGRKIKRIKDWTKRNDHRHHAMDALTIAFTKPAFIQYLNNLNARSNKSNSIYAIENKELHREDNKLKFNAPIPIHEFRAEAKRHLSAILISIKAKNKVMTQNVNKIKTKQGVIKKIQLTPRGALHNETIYGTKKRPIITMVKVGAALDEATINKISNLTIREALLKRLAEYNGDAKKAFAGKNSLEKNPIYLNEEKTKVLPALVKTVEWETYHPIRKPITPDLKIEKVIDKGIRKILKARLAKFNGDAKKAFSNLDENPIYIDEAKKIALKRVSIEGVLSAIPLHTLKDQAGKPIIGKDGKPVLGNYVQTSNNHHIAFYYDEDGNLQDNAVSFFEAAERKSQGIPIVDKNYNHDKGWSFLFTMKQNEYFVFPNEATGFIPTEVNLMDEANYDMISPNLYRVQTISKIIYDKSIIRDYLFRHHLETTVERIPNLKGITYKQLKSLPHLKGIVKVRINAIGKIVAIGEYD

SEQ ID NO: 22697 - protein, 930 aa, unidentified
  REGION 1..930: note = Cas Enzyme sequence
LCEFEKQERVMRIQQDDGKGGRQLVERRVKFGPKVAPKSSPLFQLCRIYEAVNNIRLIRPDGSPRDITPEERAKIVAHLQSSASLSFAALKKLLKEKALIADQLTSKSGLKGNSTRVALTAALQPYPQYHHLLDMELETRMMTVQLTDEETGEVTEREVAVVTDSYVRQPLYRLWHILYSIEERDAMRRALITQLGMKEEDLDGGLLDQLYRLDFVKPGYGNKSAKFICKLLPQLQQGLGYSEACAAVGYRHSNSPTSEEITERTLLVKIPLLQRNELRQPLVEKILNQMINLVNALKVEYGVDEVRVELARELKMSREERERMAEGNRRREKENKAIAEKIRECGLFPTKSRIRKYMLWEEAGEQCLYCGQILTLSQCLNGDDMEVEHIIPKSVLYDDSYGNKTCACRRCNKEKGNRTALEYIRAKGWEAEYVERINGLLDKKAISYSKHQRLRWLKEDIPSDFLERQLRLTQYISRQAMAILQQGIRRVSASEGGVTARLRSLWGYDDILHTLNLDRYDSMGETERVSREGETTEKLRIKDWSKRKDHRHHAIDALVVASTRQGYIQRLNRVSSESEREAMSGEIEMQKVTKIDKLSLLERWLTQRPHLSVRAVSDKVAEILISYRPGKRVVTRGRNIYLRHGKKCVQSGLLVPRGPLSKETVYGQITVNGEPQIVCKYDLHSLKAKDVDYVVDLALRKRLKELLAQHGGKEKEAFAGDVYMDEAGTQGPIRSVRCFTGLDRGKMKAVKYDEQGDAVGFVSPRNNHHLAIYRTPKGKLEESIVTFWDAVDRARYGIPLVITYPREVMEQVLQRGDIPEAIQNLLPSSDWVFVDSLQQDEMVIIGLSDEELQRALEAQDYRKLSEHLYRVQAISSRDYYFRYHLETSVSDMRNSSGYIPKFYRIRSLKDYEKRNLRKVRVDLLGRISLL

SEQ ID NO: 22698 - protein, 1450 aa, unidentified
  REGION 1..1450: note = Cas Enzyme sequence
MKHILGLDLGSNSIGWALVQQDFENKQGKIMAAGSRIIPMDQGILGDFEKGNTVSQTAERTTYRSMRRLRERHLLRRERLHRVLHILGFLPPHYDAQIDFTKRYGKFIDNAEPKIAYNNGNFIFTNSFNEMIEDFKKHQPQLFYKKSNGEESKIPYDWTIYYLRKKALSQKITQQELAWLILHFNQKRGYYQLRGEEETETPNKEVAFHSLKVVEVEAEAPNKKGEIWYKIRLENGWIYRRTSKIPLDDWKGKTRDFIVTTDLNDDGTIKVDKEGKEKRSFRAPEENDWNLLKKKTEHDIDFSGKTVGAYIYDHLLQDPNQKIKGKLVRTIERKYYKNELKAILTKQIALQPELFTKNLLADCIRELYRKNETQQQNLLSKDFLHLFVEDIIFYQRPLRSKKSTIANCTLEKRSYIDKETNERKDAPIKVCAKSNPYYQEFRALQWLQNLRIYEIETDREVTAEFIETPQDYEALFNFLMSQKEIDNESLLKYFLHAKNPQIKDKAAKSELKKWLTTYRWNYVYDVADNSSKKYPMNETGYDLQRYLQKVEGLPANFLTFDTTYRLWHLLYSVKDKVEFEKALKRFAKKKQLNETSFIESFKNFKPYPNEYGSFSEKAIKKLLPLMRLGNHWDFNRIDVSTQKRIDDLINGVVNEDIRTIIREKAEKYQLNSETCFQGLPLWLAQYVVYNRHAEATDIEKWTSVNDLEAYLEDFKQHSLRNPIVEQVVTETLRVVRDIWQQYGGGQANFFDEIHIELGRELKKTAEERKQLSNRNQENENTNLRIKKLLAELKEDASIQNVRPYSPIQQELLKIYEEGVFSSTDEIEEDIQKIRKKAEPTTPEIQRYKLWLEQKYKSPYTGEVISLTKLFTEEYEIEHIIPQSRYYDDSLSNKVICESAVNKLKTNLLGLEFIQKHHGEKVRVAGNKEVTIFTEEQYKDFVKKHYANNLAKQQKLLLDEIPEKMVARQLNDTRYISKYISEILSKIVRSDEKDEGVNSKNVIPCTGKITTALKQDWGLNDVWNELILPRFERMNQLTQTQLFTSYNDRLQKNLPTVPIEYSQGFQKKRIDHRHHAMDALVIACATREHINYMNNQHALDKSKDKKEKQQSRIDLRTILCEKKNNNWQFKKPWGTFTQEAKESLEHIVVSFKQNLRVINKATNYYEKWEEKNGILVKKKVKQEGTNWAIRKPLHKETISGKILLDRKIGKDKILTATRKAVDITFTEKIISSITDTGIQKILLNYLKYKGSPEVAFSAEGLEELNKNIAQYNEGKKHQPIYKVRIFEEGSKFPLGETGAKATKFVEAAKGTNLFFGVYQGKEKRSYATIPLNEVIERQKQGLPSVPERNEKGEPLLFSLSPNDLVYVPMEGEIAETIDFNNLSKEQKERIYKTVSFTGNQCFFVQEAVATPIVNKMEYSPLNKMERDIVGTMIKEVCIKLKVDRLGNITKA

SEQ ID NO: 22699 - protein, 1432 aa, unidentified
  REGION 1..1432: note = Cas Enzyme sequence
MTQKIFGIDLGTNSIGTSVRNTDLGNNLVDQLEFFSSDIFNASVSKNTNGREYSLASDRSAHRRGRRLNDSRRRKLWATLDLLIKNNLCPMAPESLEQWRTYDKKKKLFRQYPIDDKAFHSWIILDFNGDGKPDYSSPYQLRRELVSVQLDFNQAIDRYKLGRALYHIAQHRGFKSSKGETIAEQEKQEDDSKKNKNNVLTEGNVDVVNAMKASEEKLSKGLLAYMQQHNLKTVGAAFAQLEDEGIRIRNNSEYKAIRSQHQDEIKEIFKFQKGLSEETQLLETLISEKQGVGTIFYKRPLRSQRGNVGKCTLEPNKPRCPIGHPLFEKFRAWTFINNIKAKSPDSDSAEPLPMDLKINIYNKLFLSRVKADFKFEEIRHFIEKQWGVALSKDDKTINYRDDTSVAGCPITARMIKILGEDWENFQVLGTKERQMQGKSNNALHQVCYTAEDIWHLCYDAEDPEQVRTFAEETLGWDEKKASELVRLWSAIPQGYAMLSQKAIRNINRMLLFGLKYSDAVLLAKLPDLLELSDEDIQTIIKKAQQLEEVVNEEKRIGNIVNSLIANYKAESLEHRFADHNYEYQLDESDEREIIKHIESNIGKQRWELMDADEQISILEGVRSGYQAFFARHKRTFVELPQLGKRLVELLSKEYPSVTEKQWERLYHPSQIAIYRPILLDKSEQNLRLGDPNIGAIKNPTVMRTLNNLRRRVNQLLDDGVLVPNETRVVVETARELNDANAKWALEKYQKTRRDENAQIKKILEEFYSKPNGITDTDVDKARYVIEQCEEDNYKSKKDIGTYSKDIQKYKYWLEQGGQCLYTGRIISLSNLFDSNAFDLEHTIPASVSFDNSDQNMTLCEAHYNRFIKKNNIPTAMPNYEKDVTIDGKLYTAIKPRLEKWKKRIERLSRNVEYWKVQARRAQMKDRKDECTKEKLLWQMELQYWRDKLQRFTILEVTDGFKNSQLVDTRIITRHATLYLKSVFENVEVQRGSTTAEFRKILGVQSVEEKKDRTLHSHHAIDATILTTIPTAAKRERILELFYKVQEKERRLKNCSGDAYEGLKQELEGLQAKLKKEVGDCKLGGEISQLGNFINDKIIINHCVKDQTLTPSHKRLRRRGRVVGGKEHPIWQTGDTLRGKIHKESYYGAITQYAKDEDGNVLFNDGKPKIDPTIWYVIRRELKHKKSAQDTGFASWDDLEKVIVDKNLFKLMKEQFPEGTSFKDACEQGIYMIKKGKDQEHNIKTHRIRHIRCHTSVRSALKIKEQTNKSAKDYKQYFYAESGDLYTMCCYTNGKKKEYRPYRLYDIAQHRKSGIEDIPEFITDKKGNRLELAYKLCSGDMILLYENTPEELYDMDPANLKQRLYKVDRFESESSRIYLTNHLIANGEVGHSIKDYNQMPPTVRCGVNTLKFLIMGEHNDFVIKSNNIIFNHR

SEQ ID NO: 22700 - protein, 1375 aa, unidentified
  REGION 1..1375: note = Cas Enzyme sequence
MKKILGLDLGTTSIGWALVYESENTDEKSSIVRLGVRVNPLSVDEKGNFEKGKAITTNADRQQTHGARINLQRYKLRRENLKDCLQKQGWIGAEALCEEGKASTFETYMLRAKAAEEDISLHELCRVLFMLNKKRGYKSNRKANNKEDGKLFDGMTVAKKLYEEHLTPAEYSLKLLSSGKKFKQEYYRSDLKEEFDRIWNEQQKYYPEILTDDFKQQLQGKSKGNTSKIFLGKYGIYSADLKGLDRKLQPLKWRVEALKQKVDKEALAFVISDLNGQIASTSGLLGAISDRSKELYFNKQTVGQYLWTSLKESPHVSIKNKPFYRQDYLDEFEKIWETQATYHKELTPELKQEIRDIIIFYQRPLKSKKGLISVCELEQRKVKVTIDGKEKEISIGPKVAPKSSPMFQEFRIWQNLNNILLIDKGNNSNRPLYEEERNLLYEELSVKEKLSKAEALKVLNKNSKQWDLNYKEIEGNRTQAVLYDCYNRIIGMTGHEECNFKKLKASDIRYYVKTIFKKLGFSTDILDFDSSLQGHELERQPSYQLWHLLYSYESDNSRTGNDALLRKLETAFSFPKEYAAVLSDVVFEDSYGNLSVKAMRKILPHLQAGLNYSQACEEAGYKHSRRSLTKNELDQKEYKEKLELLPKNSLHNPVVEKILNQMINVINAVIDEYGKPDEIRIELARELKIGAAERENMTRSINQGNAENKRIREILEKEFALSYISRNDIIKYKLYEELKSNGFKTLYSDTYISKDKLFSKDFDIEHIIPKARLFDDSLSNKTIEARDVNIAKSNKTAFDFISEKYDQQGIEAYKKKLDILLQDGSISKAKYNRLLMKEADIPSGFIDRDLRDTQYIAKKAYEILSDLVRNVTPTTGAVTSRLREDWQLVDVMKELNFEKYQKLGLVEVIEDRDGRKIKRIKDWTKRNDHRHHAMDALTIAFTKPSYIQYLNNLNARSDKNSSIYGIENKELHREDNKLRFNAPLPINEFRAEARRYLKSILVSVKAKNKVMTQNVNVIKTKHGVIKKVQLTPRGELHNATFYGTKKRPIIKMVKVGAALDEVTIKKVSSSFIREALLDRLHEYNGDAKKAFTGRNSIDKNPIYIDEEHKKTVPALVKTIEWEMYHPTRKLISPDLKIDKVIDKGIREILKTRLAKFNGDAQKAFSNLDENPIYKDEAKKITLKRVSLEGVSSVIPLHTLKDREGKLVVGKDGKPVLGDYVQTSNNHHIAFYMDENGNLQDNVVSFFEAAERKSQGVPVIDKNYNHDKGWNFLFTMKQNEYFVFPNEVTGFNPSEVDLMDEANYSIISPNLYRVQKMSKASGRDYWFRHHLEAMLNDDPKLRNSMFKRITSLKALEGIVKVRINCIGKIVAVGEYD

SEQ ID NO: 22701 - protein, 1495 aa, unidentified
  REGION 1..1495: note = Cas Enzyme sequence
MKTILGLDLGTNSIGWAKVCVDDNGNYTREIKLGSRIIPMSQDTLSNFDKGVTESPTAARTGFRGIRRIRERALQRRERLHRVLHVMGFLPPHYENAIGWNREEATTYGKFLNNGEPKLAWEKQEDGSMRFLFMDSFYEMMADFAKYQPGMVADGRKIPLDWTLYYLRKKALTQAIRKEELAWILLNFNQKRGYYQLRGEEEEEEDPTKREEYYELKIVSVEAAEEGKGGNTWYNVTLENGWIYRRQSKIELNDWVGKVRPFIVTTEYEIDGVTIKKDKNGEVKRSFRAPSENDWGLRKKRTESLLEESGKTVGAFIYDHILSEPTDKIRGNFIRTIERKFYKKELEAILREQSKYHKELKDIDTLIACIKELYPNNKPHQDSLIKKDMTYLLITDLIFYQRPLKSKKSLIADCPYEYYEYVIKETGEIKRQGIKCIAKSNPFYQEFRLWQFIINLRLFDRNNDKEVTSEYLSSMEDYTRLFTYLNDRKDINQEILLKDFFKQKKVKRGMEKEFPIRWNYIEDKEKKYPCGETRHELLAALGKAGIDHSWLDDKERFYRLWHLLYSVESKEEAEGALRKLVDNDDFVNAFLKIKPFKKEYGAYSEKAIKKLLAVMRMGDLWNETDICEQTRDRIQNIIKGDIDEKIKDRMGRTFSQLSDFQGLPEWLACYVVYGQHSEATDIQRWTKPENLMAYINGFKQHSLRNPIVEQCILETLRTVHDIWKEAGHIDEIHIELGRSMKSTADQRARMSKSIMQNENTNLRIKSLLMELKNAKEFENVRPYSPMQQEILRIYEEGALQELTKEDAQYTEISKISQMAQPSANELLKYRLWLEQKYCSPYTGKPISLSKLFTSAYQIEHIIPQSRYFDDSFTNKVICEAEVNQLKSNMLGYEFIKKHGGEIVHCTMVGDVKILDAKEYYNFVTEHYTNNRRKKEKLLLDDIPQEFLNRQMNDSRYISKKVMAILSNIVREEDEQEAKSKFVIACSGGITDRLKQDWGLNDVWNSIVYPRFERLNKLTNTENFGRWENKEGKQVFQTSVPLELQKGFSKKRIDHRHHAMDALVIACASNNIINYLNNESAKSQEKREDLRKKLCDKNRIIRKPWETFTQDAHTALENVVVSFKNYVRVINKATNYYEKYDKNGKKGIAEQKGQDMWAIRKPMHKETVFGQVNLRRRVTVKLKDALEKIPAICDKELRDYINNLVAKQFNKKQILAHFKSINYRLNMKYVDKVDVWQFSDEKDPMVATRKSVDTSFDTKRIATITDTGIQKILRNYLETKDNDPNIAFTPEGIAEMNKHITKYNNGKQHQPILKVRVSEPKGAKYQVGETGNKTSKFVEAQKGTNLYFAIYEDKEGYRSYSTIPLNEVIERLKQGLSPVPDANEKGIPLKFHLSPNDLVYVPKTDEENEIKIGQIYKFVDSSGTTANFIPHRVSNLIYNVDKKNAENFCNHEIIQNEYGIGSPQSKNQKSITGEMIKAVCWKLEVDRLGNIHKIIK

SEQ ID NO: 22702 - protein, 1425 aa, unidentified
  REGION 1..1425: note = Cas Enzyme sequence
MTQKVLGLDLGTNSIGSSVRNLDLSDDLKGQLEFFSSDIFRSSVNKESNGREYSLAAQRSAHSRSRGLNEARRRKLWATLDLLIKYGFCPMSPDSLMRWRTYDKQRGLFREYPIDDKNFNAWILLDFDGDGKPDYSSPYQLRRELVTRQFDFNQPIERYKLGRALYHIAQHRGFKSSKGETLLQQETNSKQSLTDETTDVAGEMKASEEKLSKGLSTYMKENNLLTVGAAFAQLEDEGVRVRNNSDYRAIRSQFQREIETIFKFQQGLSVENELYERLVSEKKNIGTIFYKRPLRSQRGNVGKCTLERTKPRCAIGHPLFEKFRAWTLINNIKVRMSEEEQAEQLPMKLRFELYNDCFLAFVRAEFKFEDIRKYLEKRLGIHFSYNDKTINYKDSTSVAGCPITARFRKLLGEDWESFHVDGQKQRQVHGKNNDSFHTVSYTVEDIWHFCYDAEEPEAVLSFAQDSLKWEKKKADELVRIWSATPQGYAMLSQKAIRNINKMLILGLKYSDAVLLAKVPEIVEIADEEILSVTEDYHRVDAQVGHEKQINNIVNALIAKYKSTSEEYRFADHNYDYQLDESDEKDIIKQIESNIGTRKWSLLDADEQTDILQKVRDKYQNFFRSHERKFVESPKLGECFEEYLMKKFPMIEGEQWKKLYHPAQIAIYRPVSAGKDRSALRLGNPDIGAIKNPTVLRVLNTLRKRVNQLLDDGVISPDETRVVVETARELNDANRKWALDTYNRIRHDENEKIKKILEEFYPKRRDTISTDDIDKARYVIDQRKIDYFTESKTYNKDIKKYKFWLEQGGQCMYTGRTINLSNLFDPNAFDIEHTIPESLSFDSSDMNLTLCDAHYNRFIKKNHIPADMPNYDKAVTIDGKEYPAITSQLQRWVDRVERLNRNVEYWKGQARRAQNKDRKDQCMREMHLWSMELEYWKKKLERFTVTEVTDGFKNSQLVDTRVITRHAVLFLKSIFPHVDVQRGDVTAKFRKILGIQNVDEKKDRSLHSHHAIDATTLTIIPSSAKRERMLELFAKIEEINKMLSFSGSEDRTGLKQELEGLKNKLQMEVKACRIGHNVSEIGTFINDNIIINHHIKDQALTPARRRLRKKGHIFGGVDNPRWQTGDALRGEIHKASYYGVITQFTKDDEGKVLMKEGRPQVNPTINFVIRRELKYKKSAADSGFASWDDLGKAIVDKELFALMKGQFPEGTSFKDACEQGVYMIKKGKNGMPDIKLHHIRHVRCEAPQSGLKIKEQTYKSEKEYKRYFYAAVGDLYAMCCYTNGKIREFRIYSLYDVSCHRKSDIEDIPEFITDKKGNRLMLDYKLRTGDMILLYKDNPAELYDLDNVNLSRRLYKINRFESQSNLVLMTHHLSTSKERGRSLGKTVDYQNLPESIRSSVKSLNFLIMGENRDFVIKNGKIIFNHR

SEQ ID NO: 22703 - protein, 1506 aa, unidentified
  REGION 1..1506: note = Cas Enzyme sequence
MKKILGLDLGTNSIGWAVINSSVDDEGKEKLTSISSCGSRIIPMDAATLGDFDKGNAKSSVAERTRLRGIRRLLERSLLRRERLHRVLSVMGFLPEHYASQLDRYGKFLPETEPKLAWYKDNTGSYRFLFQDSFNEMLEDFRLYHPELVAEGKKIPYDWTIYYLRKKALSQKIAKEELAWILLNFNQKRGYYQLRGEEEQEDNKKSVEYYALKVVAVEDSGERKGKDIWYNVKLENGWIYRRASSIPLDWTGKVKEFVVTTDLDDAGNPKKDKDGNVKRSFRAPKEDDWGLLKTKTQTQIDESGQTVGAYIYDSLLRMPDQKIRGKLVRTIERKYYKDELRKILLKQTEFHAALKDHNLLLSCIEELYPNNEAHRRLLSTSNFTCFLLEDILFYQRPLKSQKGLIDDCPYESHVYKKDGSLHRTPLKCISKSHPLFQEFRLWHFLSFLRIYQRERMIDGSLKLDVDVTNEFLQNEDDYVKLFDWLNGRKEIDQKTILAYKPFGLKKNEQPKYRWNYVEDKSYPCNETRADMISRLSKAGVSEGFLTEEREEALWHILYSISDKKELTKALGTFAEKNGLNEAFVELFSKMPPFESNYAAYSLKAIRKLLALMRMGKYWNEQDIDKQTRSRIEKILTGEYDETIRTRVREKAIHLTDISSFRGLPLWLACYVVYNRHSEAKELVKWETPADIDHFLSKFRQHSLRNPIVEQVIMETLRTVRDIWKQEGQIDEIHVELGREMKNPAKERARITAQVLENENTNLRIKALLTEFMNPEFEIENVRPYSPGQQEILRIYEEGVLSGVAEKDLPEDIISILKKFRENDVKKRPTTSEVLRYKLWLEQRYRSPYTGRIIPLGKLFTPAYEIEHVIPQSRYFDDSISNKVICESAVNKLKDNCLGYEFIKKHSGEIVELGNGEKATVFTSEEYEHFVKESYLGNGKKMKKLLLEDIPDNFIERQLNDSRYISKVVKSLLSNIVCEEGEQEGMSKNVIVCTGGVTDRLKKDWGVQDVWNRIILPRFLRLNKMTDSTGFTSVSTNGHLLPALPLHLQKGFNKKRIDHRHHAMDAIVIACADRNIVNYLNNASARKGSEISRYDLQHLLCDKVKTDSNGNYKWMLRKPWDTFTQDVYTALTNIVVSFKQNLRVINRTTNYHQHYNESGEKKMIPQVKGDRWAIRKPMHKDTVYGEVNLRREKTLPLKDVLNNPSIVVDKSLKSKLHELLKAQYDLKAITKYFEAHQDVWADINLKKIKVYYFTKETNERFFATRKSLDSSFNQKKIQEEVTDTGIQRILLRHLQLNDNNPDIAFSPDGIERMNQNMNILNDGKGHQPIYKVRTYEKAEKFAVGEHGNKVKKFVEAAKGTNLFFAVYESIQEDEATGKQVRKRTFATIPLNEVIKRKKQGLSVAPEDSNGNLPIFVLSPNDLVYLPTEEERNSGKVTQPLDRERIYKMVSCTGNRLFLVPYMVASPIYDKKEYTSLNKIELTDDKISIKEWCIPILIDRLGNISINY

SEQ ID NO: 22704 - protein, 1432 aa, unidentified
  REGION 1..1432: note = Cas Enzyme sequence
MTQKIFGIDLGTNSIGTSVRNTDLGNNLVDQLEFFSSDIFNASVSKNTNGREYSLASDRSAHRRGRRLNDSRRRKLWATLDLLIKNNLCPMTPESLEQWRTYDKKKKLFRQYPIDDKAFHSWIILDFNGDGKPDYSSPYQLRRELVSVQLDFNQPIDRYKLGRALYHIAQHRGFKSSKGETIAEQEKQEDDSKKNKNSALTEEHVDVVNAMKASEEKLSKGLLAYMQEHNLKTVGAAFAQLEDEGIRIRNNSEYKAIRSQHQDEIKEIFKFQKGLSEQTELLDTLISEKQGIGTIFYKRPLRSQRGNVGKCTLEPNKPRCPIGHPLFEKFRAWTFINNIKAKSPDSDSAEPLPMDMRINIYNKLFLSRVKADFKFEEIRHFIEKQWGVALSKDDKTINYRDDTSVAGCPITARMIKVLGEDWENFHVLGTKERQTQGKSNNVLHQVCYTAEDIWHLCYDAEDPEQVRTFAEETLGWDEKKAAELVRLWSAIPQGYAILSQKAIRNINRMLLFGLKYSDAVLLAKLPDILELLDEDIQTIIKKAQQLEEVVNEEKRIGNIVNSLIANYKAESLEHRFADHNYEYQLDASDEREIIKHIESNIGKQRWELMDADEQISILEGVRSGYQAFFARHKRTFVELPQLGKRLVELLSKEYPSVEKKQWERLYHPSQIAIYRPILLDKSDEKRRLGNPDIGAIKNPTVMRTLNNLRRRVNQLLDDGVLVPNETRVVVETARELNDANAKWALEKYQKTRRDENAQIKKILEEFYSKPNGITDTDVDKARYVIEQCEEDNYKSKKEIGTYSKDIQKYKYWLEQGGQCLYTGRIISLSNLFDSNAFDLEHTIPASVSFDNSDQNMTLCEAHYNRFIKKNNIPTAMPNYEKDVTIDGKLYTAIKPRLEKWKKRIERLSRNVEYWKVQARRAQMKDRKDECTKEKLLWQMELQYWRDKLQRFTILEVTDGFKNSQLVDTRIITRHATLYLKSVFENVEVQRGSTTAEFRKILGVQSVEEKKDRTLHSHHAIDATILTTIPTAAKRERILELFYKVQEKERILKNCSGDARIGLKQDLEGLQAKLKKEVADCRLGGEISQLGNFINDKIIINHCVKDQTLTPSHKRLRRRGRVVGGKEHPIWQTGDTLRGKIHKESYYGAITQYAKDEDGNVLFNDGKPKIDPTIWYVIRRELKHKKSAQDTGFASWDDLEKVIVDKNLFKLMKEQFPEGTSFKDACEQGIYMIKKGKDQEHNIKTHRIRHIRCHTSVRSALKIKEQLNKSTKDYKQYFYAESGDLYTICCYTNGKKKEYRSYRLYDIAQHRKAGIEDIPEFITDEKGNRLELAYKLRSGDMILLYENTPEELYDMDPVNLKQRLYKVDRFESKGFKIYLTNHLIANGEIGHSIKDYNQMPQTVRCGVNTLKFLIMGEHNDFIIKGNNIIFNHR

SEQ ID NO: 22705 - protein, 1070 aa, unidentified
  REGION 1..1070: note = Cas Enzyme sequence
LDEFDRIWEKQAEFHKELTAELKKEIRDMIIFYQRRLKSQKGLISFCEFERLEIVVEKDGKKQTKVIGCKVIPRSHPLFQEFKVWQTLNDIKVLGREKKRNALSASESRALYPEEKEILARELAIKENMKKADVLKLLFENPQELDLNFKQIDGNRTGFSLFSAYSKMIEKYGYEPLDFKKPADEIIGQLRTIFTDLGWNTNLFTIDLTKEGKELEMQPYFRLWHLLYSFEGDNTSTGNGKLIEKIMQLCGVEKEYAVELASLSFQDDYGSLSAKAIKRILPYLKEGNLYDVACEYAGYRHSKSSLTKEEIENKVLKGKLEVLPKNSLRNPVVEKILSQMVNVINTIIDTYGKPDEIRVELARELKKSAKEREELTKAIAKSTREHEEIRKLLQDEFGMMNVSRNDIIRYKLYEELKDNGYKTLYSNQYIPKEKIFSKEIDIEHIIPQSRLFDDSLSNKTLEYKAINIEKGNKTAYDFVKEKYGEEGLQQYINRCESLFNDKKAKLRKLKMEQKDIPDGFIDRDLRNTQYIAKKALAMLNEICRRVVATTGSITDQLREDWQLVDVMKELNLPKYEALGFVETYEDKDGRKIKRIKDWTKRNDHRHHAMDALTVAFTKDAFIQYFNNKNAAQDSGNRNHTNIIGIKTRYFDKGRALPPIPLEQFRIEAKQHLEKLLVSIKAKNKVVTVNVNRTKKRKGENTKIQQTPRGQLHLETVYGSHKQYVTKIEKVNASFDAAKIATVSKRAYRNALLKRLETFGNDPKKAFTGKNALEKNPLYADKYQTIRVPEKVQTVEFETIYTIRKPVDPALNVDKVVDVKVRAILERRLKEYGGDPKKAFVNFWENPIWLNKEKGISIKRVSIRGINNAQSIHVKKDKNGNPIWDENGKQIPVDFVNTGNNHHVAIYRKPVLDKKGQVTFDEDGNLMYELDEVVVPFFEAVTRANLGLPIIDKDYRKSEGWQFLFSMKQNEYFVFPNEKTGFNPKEVDLLNPDNYAMISPNLFRVQTMSKVMYGNNVVRDYKFRHHLETTVKDMKELKDIAYKQYKTLSFGNSVVKIRINHIGQIVSVGEY

SEQ ID NO: 22706 - protein, 1341 aa, unidentified
  REGION 1..1341: note = Cas Enzyme sequence
  REGION 117..120: note = misc_feature - Xaa can be any naturally occurring amino acid
  REGION 1318..1321: note = misc_feature - Xaa can be any naturally occurring amino acid
MKRILGLDLGTTSIGWALVNEAENDNETSSIVRLGVRVNPLTADEKSNFEKGKAITTNADRQKKHTARINLQRYKLRRQNLYNCLKEYGWFGNNALFEEGKASTFETYKLRAKAAEXXXXAEEEISLHELARVLFMLNKKRGYKSNRKANNKEDGQLFDGMTIAKKLSEEHLTPAEYSLQLLNKGKRFTQGYYRSDLNAELERIWNEQKKYYPEILTDEFKEQLKGKTKVNTNKIFLAKHHIYSADLKGSDKKMQSLKWRVEALRQQVDKEILVYVISDLNGQIANTSGLLGAISDRSKELYFNKQTVGQYLWASLEENPHISIKNKPFYRQDYLDEFEKIWETQAAFHKQLTPELKQKIRDVIIFYQRPLKSKKGLISVCELEQRKVKTVIDGKEKEITIGPKVAPKSSPVFQEFRIWQNINNLLLINNDTNEKRSLNEEERNLLYQELSIKAKLSKTDALKVLNKNGKQWELNYKEIEGNRTQAILFDCYNRIITLTGHEECNFKKLKASEIRHYVTTIFKRLGFNTDILDFNPLLEKHELEKQPMYMLWHLLYSYESDNSRTGNNSLLRKLETTFGFPEEYATVLCDVVFEDDYSNLSVKAMRNILPSLQAGDDYSQACAHAGYNHSRRSLTKDELEEKVYKDKLELLPKNSLRNPVVEKILNQMINVINTIVTEYGKPDEIRIEMARELKSSAAEREKTTRAISQANTENQRIRDILEKDFALSYISRNDIIKYKLYEELEANGFKTLYSGTYIPKEKLFSKDFDVEHIIPKARLFDDSFSNKTLEARNINIAKSNKTAFDFIKGEYGDEGAEVYKKKLDMLLSKDVISKAKYNKLLMSEADIPSEFIERDLRNTQYIAKKAYEILSELVRTVTPTTGEITNRLREDWQLVDVMKELNFEKYQKLGLAEVVEDRDGRKIKRIKDWTKRNDHRHHAMDALTIAFTKPAFIQYLNNLNARSNKSSSIYAIENKELHREDNKLKFNAPIPIHEFRAEAKRHLSAILISIKAKNKVMTQNVNKIKTKQGVIKKIQLTPRGALHNETIYGTKKRPIITMVKVGAALDEATINKISNLTIREALLKRLNEYSGNAKKAFTGKNTLDKNPIYLNAERTKTVPTLVKTIEWESFHPTRKLIDKDLNVDKVVDKCIRNILKTRLEEFNGDAKKAFSNLEENPIYLDQTKKIALKRVSIEGVLSAIPLQTLKDQAGKLIIGKDGKPVLGNYVQTSNNHHIAFYTDEKGNLQDKAVSFFEAAERKSQGLPIVDKNYNHDKGWRFLFIMKQNEYFVFPNEATGFIPTEVNLMDEANYDMISPNLYXXXXQSSKGVKNRERTVYFKGLLV

SEQ ID NO: 22707 - protein, 1507 aa, unidentified
  REGION 1..1507: note = Cas Enzyme sequence
VFSQRNNPYCELLSNSTAKVSIIFFISKFFLTFFVFISFLLSLPHQNVKRMKRILGLDLGSNSIGWAFVQQDFENKQGKIIAAGSRIIPMDQKMLSNFEEGTTVSQTAERTTYRSMRRLRERHLLRRERLHRVLHILGFLPPHYDSQIDFSKRYGKFIDNAEPKIAYNNGNFIFMNSFNEMIEDFKKHQPQLFYKKSNGEESKIPYDWTIYYLRKKALSQKITQQELAWLILHFNQKRGYYQLRGEEEIENPNKEIAFHSLKVVEVEAEAPNKKGEIWYTIRLENGWIYRRTSKIPLDDWRGKTRDFIVTTDLNDDGTIKVDKEGKEKRSFRAPDENDWNLLKKKTEHDIDFSGKTVGAYIYDHLLQNPNQKIKGKLVRTIERKYYKDELKAILAKQIALQPEFFTENLLADCIRELYRKNETQQQNLLSKDFLHLFVEDIIFYQRPLRSKKSTIANCTLEKRSYIDKESNECKDAPIKVCAKSNPYYQEFRVLQWLQNLRIYEIETDREVTAEFIETAQDYEALFNFLMSQKEIDNEGLLKYFLLAKNPQIKDKAAKSELKKWITTYRWNYVYDAADNSSKKYPMNETGYELQRYLQKVEGLPVNFLTFDITYQLWHLLYSVKDKVEFEKALKKFAQKYQLDEASFVDSFKNFKPYPNEYGSFSEKAIKKMLPLMRFGKHWNFKNIDVHTQKRIDDIINGMANEDIRTIIREKAEKYQLNNETYFQGLPLWLAQYIVYNRHAEATNIEKWTSVSDLEAYLEDFKQYSLRNPIVEQVVTETLRVVRDVWQQYGGGQANFFDEIHIELGRELKNTSKERERLSKQNQENENTNLRIKKLLAELKEDANIQNVRPYSLVQQELLKIYEEGVFSSTDEIEEDIQKIRKKAEPTTPEIQRYKLWLEQKYKSPYTGEVISLTKLFTEEYEIEHIIPQSRYYDDSLSNKVICESAVNKLKTNQLGLEFIQNHHGEKVRIVGNKEVTIFTEEQYKEFVKKHYAGNSAKQQKLFLNEIPEKMVARQMNDTRYISKYVSEILSRIVRSDEKDEGVNSKNVIPCTGKITTALKQDWGLNDVWNELILPRFERMNQLTQTQLFTSYNDRLQKNLPTVPIKYSQGFQKKRIDHRHHAMDALVIACVTREHINYMNNQHALDKSKDKKEQQQSRIDLRTILCEKKNNNWQFKKPWGTFTQEAKEALEHIVVSFKQNLRVINKATNYYEKREEKNGVLVKKKVKQEGTNWAIRKPLHKETVSGKIILDRKIGKDKILTATRKAVDITFTEKIISSITDTGIQKILLNYLKYKGSPEVAFSAEGLEELNKNIAKYNDGKKHQPIYKVRIFEEGSKFPLGETGAKATKYVEAAKGTNLFFGVYQGKGKRTYATIPLNEVIERQKQGLPSVPGRNEKGEPLLFSLSPNDLVYVPIEGEIIETIDFNNLSKEQKERIYKTVSFTGNECHFVKSTIASLIKSYDAKSKIGELGSLNKLEVTISGDSRIKEVCIKLKVDRLGNITKA

SEQ ID NO: 22708 - protein, 1205 aa, unidentified
  REGION 1..1205: note = Cas Enzyme sequence
MSKHVLGLDLGVGSIGWCLIALDAQGDPAEILGMGSRVVPLTNLGDDKAFSKGEAFTANQKRTARRTMRRGFARYQLRRYRLRRELEKVGMLPDAALIQLPLLELWELRERAATAGRRLTLPELGRVLCHINQKRGYRHVKSDAAAIVGDEGEKKKKDSNSAYLAGIRANDEKLQAEHKTVGQYFAEQLRQNQSESPTGGISYRIKDQIFSRQRYIDEYDQIMAAQRVHYPDILTDEFIRMLRDEVIFMQRPLKSCKHLVSLCEFEKQEKVMRVQQDDGKGGRQLVERKIKFGPKVAPKSSPLFQLCRIYEAVNNIRLTRPDGSPRDITPEERAKIVAHLQSSASLSFAALKKLLKEKALIADQLTSKSGLKGNSTRVALATALQPYPQYHHLLDMELETRMMTVQLTDEETGEVTEREVSVVTDSYVHQPLYRLWHILYSIEERDAMRRALITQLGMKEEDLDCGLLDQLYRLDFVKPGYGNKSAKFICKLLPQLQQGLGYSEACAAVGYRHSNSPTSEEIAERTLLEKIPLLQRNELRQPLVEKILNQMINLVNALKAEYGIDEVRVELARELKMSREERERMARNNKDREERNKEVAAKIRECGLYPTKPRIQKYMLWEEAGKVCMYCGRSIEEEQCLNGDDMEVEHIIPKSVLYDDSYGNKTCACHECNQTKGNRTALEYIRAKGREAEYMKRINDLLKEKKISYSKHQRLRWLKEDIPSDFLERQLRLTQYISRQAMAILQQGIRRVSASEGGVTARLRSLWGYGKILHTLNLDRYDSTGETERVSREGEATEELRITNWSKRMDHRHHAIDALVVACTRQSYIQRLNRLSSEFGREDKKKEDQEAQEQQATETGRLSNLERWLTQRPHFSVRTVSDKVAEILISYRPGKRVVTRGRNIYRKKMADGREVTCVQRGVLVPRGELMEASLYGKILSQGRERIVKRYPLHDLKGEIVDPRLRELIAVYNQEITSKVKAKGTPLYLDAAEKQEVRSVRCYVDKPSVAKAIPIRFDECGRAITFVKSGSNHHLAIYRTPKGELVESIVSFWDAVNRARYGLPLIIKYPRKAMEQVIQREDIPESVLRLLPPADYEFVEVFQQNEMVVVGLPEEELRRAVDMQDYRTLSEHLYRLKGISSKDYEFHYHLDTDDPDETDSSKKKKKRVRNTSGRIPRIYRTRGIGPLQKKNVRKVRVDLLGRISLL

SEQ ID NO: 22709 - protein, 1364 aa, unidentified
  REGION 1..1364: note = Cas Enzyme sequence
MKKILGLDLGTTSIGWALVNECENEDEKSSIIRLGVRVNPLTTDEKGNFERGKAITTNSDRQQTHGARINLQRYKLRRKYLCDCLNKHGWIGSEPMYEDGKSSTFETYKLRAKAAEEEVSLHEFARVLFMMNKKRGYKSNRKANDKEDGKLFDGMTVAKKLYEEHLTPAEYSLQLLNKGKRFTPEYYRSDLIEEFEKIWNEQKKYYPEILTDEFKRQLEAKTKTSTSKIFLGKYGIYSADLKGLDRKLQPVKWRVEASRQQVDKDVLAFVISDLKGQIANTSGLLGAISDRSKELYFNKQTIGQYLWASLKENPHVSVKNQPFYRQDYIDEFEKIWETQASFHKELTPELKQEIRDIIIFYQRPLKSKKGLISVCELEQRKVKVTIDGKEKEITIGPKVAPKSSPMFQEFRIWHNLNNIQLIDNERNSKRPLYEEERNLLYEELSIRDRLSKTEALRVLGKKNRQWDINYKELEGNRTQATLFSCYNKIIMMTGHEECNFKQLKVPEIRHYIKTIFKNLGFNTGILEFDSSLNGHELEQQPMYQLWHLLYSYESDKSRTGNEALLKKLETIFGFPREYASVLAEVAFEDSYGNLSVKAIREILPHLQAGLDYSQACEEAGYKHSRRSLTKEELVQKEYKEKLELLPKNSLHNPVVEKILNQMINVINAVIDEYGKPDEIRIELARELKIGAAERENMTRSISQGNAENKRIREILEKEFALSYISRNDIIKYKLYEELKPNGYKTLYSDTYIPKDKLFSKDFDIEHIIPKARLFDDSLSNKTIEARDVNIAKSNKTAFDFISGKYGLQGIEAYKKKLYILLQGGSINKAKYNRLLMKEADIPSDFINRDLQNTRYITRKAYEILSDLVRVVTPTSGVVTSRLREDWQLVDIMKELNFEKYQKLGLTEVIEDRDGRKIKRIKDWTKRNDHRHHAMDALTIAFTKPSFIQYLNNLNARSNKGDSIYAIENKELYREDGKLCFNAPLPINEFRAEAKKHLKAVLVSIKAKNKVMTQNVNKIKTKHGIIKKVQLTPRGELHNATFYGTKKRPIIKMVKVGAALDEVTIKKVSSSFIRKALLDRLYEYNGDVKKAFTGRNSIDKNPIYIDEERKRTVPALVKTIEWEMYHPTRKLISPDLKIDKVIDKGIRDILKTQLAKFNGDAQKAFSNLDENPIYKDEAKKITLKRVSLEGVSSVIPLHTLKDRSGMPITGKDSEPVLGDYVQTSNNHHVAFYIDENGNLQDNIVSFFEAAERKSQGVPIIDKNFNHDIGWRFLFTMKQDEYFVFPNEVTGFNPSEVDLTDEANYSIISPNLYRVQKMSKASGRDYWFRHHLEAMLNNDPKLRNSMFKRIKSLKAFGKIVAVGEYD

SEQ ID NO: 22710 - protein, 1525 aa, unidentified
  REGION 1..1525: note = Cas Enzyme sequence
MKNILGLDLGTNSVGWALISVDENGNLVKDIHLGSRIIPMSQDVLGKFDSGVTVSQTAERTEYRGHRRLLERALLRRERLHRVLHLLGFLPDHYAACIGWDRNDNATYGKFLPDTEPKLAWRKADNGVYRFVFMQSFQEMLHDFNASQPSLVANGKRIPLDWTLYYLRTKALNQPITKEELAWILLNFNQKRGYYQLRGEEEEETASKRVEYHELKVVKVEASNERKGDNVWYNVLLENGWVYRRQSKYSLDKWLGQTLPFIVTTELEADGTPKYDKEGNVKRSFRSPKEDDWTLVKKRTEDHLEKSGLTVGAFIYQNLLLNPSDKVRGKLVRTIDRKYYKRELQAIIAKQMEFHPELRDAQLLKACAEELYRNNEAHRAQLLAKDFKHLLVEDVLFYQRPLKSKKSLIANCPYETRQYVDKQTGEIKAVNVKCIAKSNPYFQEFRLWQWINNLRLLRQTDSQDVTADYIKGNEDKERLFDMLNSQGEIKQEHILRDFLKLKKPKGGEFPLRWNYVDDKIYPANETRHAINKAIKGMAVDKEEKETVEQLFVQPAVEYVFWNLLYSITDRNELACALRRFALTHSVASVDAFVQAFLRVKPFKKEYGAYSEKATKKLLQVMRLGKYWCANELPEPANRTKGNKQAVYDEMAQRGICKQTLQNISNIIVEDIDERLIGALLNPERPLTELSHFQGLSVSDACYVVYGRHSEVAEIVKWKDAGELNTFINNFKQHSMRNPIVEQCVLETLRTVRDVWEKEGRIDEIHVELGRNMKQTAEKRASDNQAIQRNENTNMRINLLLAELGNDPTISNVRPYSPSQRELLKIYEEGALEKLTNADEDIAKISRLAQPSASELRRYKLWLDQKYVSPYTGQPISLTKLFTPAYEIEHIIPQSRYFDNSFSNKVICEAEVNSLKDNLLGMEFIKKFGGRTKGILDEEAYKLHVTTNYAHSPAKRSKLLMVDLPTDFNSRQLNDTRYISKTVMALLSNVVRENDERETRSKHVVVCTGGVTDTLKKNWGLHDVWHNLVYPRFIRLNNLTGTQNFGYWRALDEENKKQGEDGKKVFQITLPPECQRGFVKKRIDHRHHAMDALVIACASADMVNYLNNQSAANPHARKDLQRLLCDKKRVIRKPWPTFTQDAQTALENLVVSFKNTVRVVNKASNTYLRYDDYGKKKRFKQEGEGLKAIRKPMHKETYYGQVNLIRKEMMPFKRALEDVNAIVDKELRACIKALQRDGFKPQQVLANFKAKDFKFNKRDVKKVEVFVSSAKTTPMVATRKSLDTSFTAKRIADITDTGIQKILLNYLKANDNSPEQAFTPEGIAYLNEHIAEYNNGKPHQPILKVRVSEVMGAKFAVGQTGSKKTKFVEAQAGTNLYFAIYEDKEGKRHFETIALNVAAERLKMGQTPVPETNDAGLPLKFYLSPNDLVYVPTDEDRAAAHPSIDKRRIYKMVSATEGKCHCLPFSVASIIADKVEFEAMNKIGRVIDALEYTEQYDSSAISKIMIKDVCWKLEVDRLGNITKIVR

SEQ ID NO: 22711 - protein, 1191 aa, unidentified
  REGION 1..1191: note = Cas Enzyme sequence
MSKHVLGLDLGVGSIGWCLIALDAQGDPAEILGMGSRVVPLNNATDAADFSIGKAFTASQERTARRTMRRGFARYQLRRYRLRRELEKVGMLPDAALIQLPLLELWELRERAATAGECLTLPELGRVLCHINQKRGYRHVKSDAAAIVGDEGEKKKDSNSAYLAGIRANDEKLQDEHKTVGQYFAEQLRQNQSESPTGGISYRIKDQIFSRQRYIDEYDQIMAAQRVYYPDILTDEFIQMLRDEVIFMQRPLKSCKHLVSLCEFEKQEKVMRVQQDDGKGGRQLVERKVKFGPKVAPKSSPLFQLCRIYEAVNNIRLTRPDGSPRDITPEERAKIVAHLQSSASLSFAALKKLLKEKVLIADQLTSKSGLKGNSTRVALAAALQPYPQYLHLLDMELETRMMTVQLTDEETGEVTEREVAVVTDSYVRQPLYRLWHILYSIEERDAMRRALITQLGMKAEDLDGGLLDQLYRLDFVKSGYGNKSAKFICKLLPQLQQGLGYSEACAAVGYRHSNSSTSEEITERTLLEKIPLLQRNELRQPLVEKILNQMINLVNALKAEYGVDEVRVELARELKMSREERERMTRQNGERKKANDKVAEKIQKCGLFPTKSRIRKYRLWEEAGRQCLYCGRSIGEKQCLNGDDMEVEHIIPKSVLYDDSYGNKTCACRRCNKEKGNRTALEYIRAKGWEAEYMERINGLLDKKTISYSKHQRLRWLKEDIPSDFLERQLRLTQYISRQAMAILQQGIRRVSASEGGVTARLRSLWGYDDILHTLNLDRYDSMGETERVSREGETTEKLRIKDWSKRKDHRHHAIDALVVASTRQGYIQRLNRVSSESEREAMSGEIEVQKATKTDKLSLLERWLTQRPHLSVRAVSDKVAEILISYRPGKRVVTRGRNIYRKKTADGREVTCVQRGVLVPRGELMEASLYGKILSQGRERIVKRYSLHALKGEVVDPRLRELITTYNQELKSREKGAPIPPLCLDKDKRQEVRSVRCYVDKPSVSSAIPIRFDERGTAITFVQSGNNHHLAVYRTPQGVLEESIVSFWDAVDRARYGIPLVITHPREVMEQVLQRGDIPESVLKSLPPSDWMFVESLQQDEMVAIGLSDEELQSAIEAQDYRKLSEHLYRVQSLSSKYYVFRYHLETSVKDRKNTSGRIPKFHRVRNLPDYEKRNVRKVRVDLLGRISLL

SEQ ID NO: 22712 - protein, 1192 aa, unidentified
  REGION 1..1192: note = Cas Enzyme sequence
MLMSKHVLGLDLGVGSIGWCLIALDAQGDPAEILGMGSRVVPLNNATDAADFSIGKAFTANQERTARRTMRRGFARYQLRRYRLRRELEKVGMLPDAALIQLPLLELWELRERAATAGRRLTLPELGRVLCHINQKRGYRHVKSDAAAIVGDEGEKKKDSNSAYLAGIRANDEKLQDEHKTVGQYFAEQLRQNQSESPTGGISYRIKDQIFSRQRYIDEYDQIMAAQRVHYPDILTDAFIRMLRDEVIFMQRPLKSCKHLVSLCEFEKQERVMRIQQDDGKGGRQLVERRVKFGPKVAPKSSPLFQLCRIYEAVNNIRLIRPDGSPRDITPEERAKIVAHLQSSASLSFAALKKLLKEKALIADQLTSKSGLKGNSTRVALTAALQPYPQYHHLLDMELETRMMTVQLTDEETGEVTEREVAVVTDSYVRQPLYRLWHILYSIEERDAMRRALITQLGMKEEDLDGGLLDQLYRLDFVKPGYGNKSAKFICKLLPQLQQGLGYSEACAAVGYRHSNSPTSEEITERTLLVKIPLLQRNELRQPLVEKILNQMINLVNALKVEYGVDEVRVELARELKMSREERERMAEGNRRREKENKAIAEKIRECGLFPTKSRIRKYMLWEEAGEQCLYCGQILTLSQCLNGDDMEVEHIIPKSVLYDDSYGNKTCACRRCNKEKGNRTALEYIRAKGWEAEYVERINGLLDKKAISYSKHQRLRWLKEDIPSDFLERQLRLTQYISRQAMAILQQGIRRVSASEGGVTARLRSLWGYDDILHTLNLDRYDSMGETERVSREGETTEKLRIKDWSKRKDHRHHAIDALVVASTRQGYIQRLNRVSSESEREAMSGEIEMQKVTKIDKLSLLERWLTQRPHLSVRAVSDKVAEILISYRPGKRVVTRGRNIYLRHGKKCVQSGLLVPRGPLSKETVYGQITVNGEPQIVCKYDLHSLKAKDVDYVVDLALRKRLKELLAQHGGKEKEAFAGDVYMDEAGTQGPIRSVRCFTGLDRGKMKAVKYDEQGDAVGFVSPRNNHHLAIYRTPKGKLEESIVTFWDAVDRARYGIPLVITYPREVMEQVLQRGDIPEAIQNLLPSSDWVFVDSLQQDEMVIIGLSDEELQRALEAQDYRKLSEHLYRVQAISSRDYYFRYHLETSVSDMRNSSGYIPKFYRIRSLKDYEKRNLRKVRVDLLGRISLL

SEQ ID NO: 22713 - protein, 1504 aa, unidentified
  REGION 1..1504: note = Cas Enzyme sequence
MKNILGLDLGTNSIGWAVVNGSVNDDGSEQLVKIQASGSRIIPMDAAMIGDFNKGNSISQTAERTRLRGIRRLSERYLLRRERLHRILDILGFLPSHFAQDLDRHGKIVKGKEPKLAWRKNEAGQFEFIFQDSFKEMLEDFKLNHPNLITDDKKVPYDWTIYYLRKKGLTSKISKEELAWILLNFNQKRGYYQLRGEEEEENNNKLVEFYALKVVAVEDSGEKKGKDIWYNVHLENGWVYRRTSNMPLDWVGKTKEFIVTTDLEKDGTPKKDKEGNVKRSFRAPKEDDWSLVKKKTEADIDQTHKTVGTYIYDTLLGNPSQKIRGRLVRTIERKYYKEELKLILDKQKEFHPELQDRALYAACVEELYTINEAHRNNIGNRDFTYLFLEDILFYQRPLKSKKSLIDNCPYEENHCLDKETGEIKSFPVKCIAKSHPLFQEFRLWQFIVNLRIYRKGLAQDVDVTNELLKTEEDYVALFDWLNGKKEIDQKAFLKYPLFGLKKEVENYRWNYIQDKPYPCNETRSSMLARLEKCDISIEFLTKENEEALWHILYSVEDKNEIVKALQKFADKHDLNASFVDVFRKFPPFKKEYGSYSAKAIKKLLPLMRMGKYWSENSIDKGTRERIDKIITGEYDEKIENRVREKAIHLVDVSDFRGLPLWLVCYIVYGRHSESKEITQWKSPADIDSYLKSFKQHSLRNPIVEQIIIETLRVVRDIWKQVGNIDEIHVELGREMKNPADKRKKMTQQISENENTNLRIKYLLTEFLNPEYEVENVRPYSPSQQDILRIYEEGVLNSVSDLPEEISDILKKFTETDLKKRPSRSEVLRYKLWLEQKYRSPYTGEVIPLGKLFTSAYEIEHVIPQSCYFDDSFSNKVICEAEVNKLKSNLLGHEFIVKHHGEIVELPFGKKVRIFTVDEYEQFVKDNYSRTRGKMKKLLMDDIPEEFVTRQLNDSRYISKVVKSLLSNIVREKGEEEAISKNVIPCTGGVTDRLKKDWGINEVWNKIILPRFQRLNELTGTNKFTTKNVGIQEIPTMPLELQKGFNKKRIDHRHHAMDAIIIACANRNIINYLNNESATAKAELSRYDLQKLLCDKAKTDNNGNYKWVIRKPWASFTQDTYLALENIIVSFKQNLRVINKATNHFLHYNEEGKKIFVKQGKGDNWAIRKSMHKDTVFGEVNLRRIKTVALNEAMKNPQSIVVKDFKRKLLELWNLGFDAKRIKKYFEDNRETWSDINLSKIEVYYFSKDTKDRFFATRKPLDTSFDRKKIENNITDTGIQKILLRHLELKDNNPDIAFSPDGIDEMNRNIIQLNNGKYHQPIIKVRWYEQADKFAVGQTGNKSSKFVEAAKGTNLFFAVYESNILDKKTNTIIKKRNYATIPLNVAIERQKQGLPVAPEDENGNDPIFVLSPNDLVYLPTDDELANGIIAQPLDRGRIYKMVSSSGEQCFFIKHIVANVLVDKFEFSPLNKMERALTGEMIKMICMPIKVDRLGNVLESSSSHKK

SEQ ID NO: 22714 - protein, 1520 aa, unidentified
  REGION 1..1520: note = Cas Enzyme sequence
MKKIVGLDLGTNSIGWALINAYIDEYNKEHLYGIEACGSRIIPMDAAILGNFDKGNSISQTADRTSYRGIRRLRERHLLRRERLHRILDLLGFLPKHYSDSLNRYGKFLNDIECKLPWVKDDTGSYKFIFQESFKEMLANFTEHHPILIANNKKVPYDWTIYYLRKKALTQKISKEELAWILLNFNQKRGYYQLRGEEEETPNKLVEYYSLKVEKVEDSGERKGKDTWYNVHLENGMIYRRTSNIPLDWEGKTKEFIVTTDLEADGSPKKDKKGNIKRSFRAPKDDDWTLIKKKTEADIDKIKMTVGAYIYDTLLQKPDQKIRGKLVRTIERKYYKNELYQILKTQSEFHEELRDKQLYIACLNELYPNNEPRRNSISTRDFCHLFIEDIIFYQRPLKSKKSLIDNCPYEENRYIDKESGEIKHASIKCIAKSHPLYQEFRLWQFIVNLRIYRKETDVDVTQELLPTEADYVTLFEWLNEKKEIDQKAFFKYPPFGFKKTTSNYRWNYVEDKPYPCNETHAQIIARLGKAHIPKAFLSKEKEETLWHILYSIEDKQEIEKALHSFANKNNLSEEFIEQFKNFPPFKKEYGSYSAKAIKKLLPLMRMGKYWSIENIDNGTRIRINKIIDGEYDENIRERVRQKAINLTDITHFRALPLWLACYLVYDRHSEVKDIVKWKTPKDIDLYLKSFKQHSLRNPIVEQVITETLRTVRDIWQQVGHIDEIHIELGREMKNPADKRARMSQQMIKNENTNLRIKALLTEFLNPEFGIENVRPYSPSQQDLLRIYEEGVLNSILELPEDIGIILGKFNQTDTLKRPTRSEILRYKLWLEQKYRSPYTGEMIPLSKLFTPAYEIEHIIPQSRYFDDSLSNKVICESEINKLKDRSLGYEFIKNHHGEKVELAFDKPVEVLSVEAYEKLVHESYSHNRSKMKKLLMEDIPDQFIERQLNDSRYISKVVKSLLSNIVREENEQEAISKNVIPCTGGITDRLKKDWGINDVWNKIVLPRFIRLNELTESTRFTSINTNNTMIPSMPLELQKGFNKKRIDHRHHAMDAIIIACANRNIVNYLNNVSASKNTKITRRDLQTLLCHKDKTDNNGNYKWVIDKPWETFTQDTLTALQKITVSFKQNLRVINKTTNHYQHYENGKKIVSNQSKGDSWAIRKSMHKETVHGEVNLRMIKTVSFNEALKKPQAIVEMDLKKKILAMLELGYDTKRIKNYFEENKDTWQDINPSKIKVYYFTKETKDRYFAVRKPIDTSFDKKKIKESITDTGIQQIMLRHLETKDNDPTLAFSPDGIDEMNRNILILNKGKKHQPIYKVRVYEKAEKFTVGQKGNKRTKFVEAAKGTNLFFAIYETEEIDKDTKKVIRKRSYSTIPLNVVIERQKQGLSSAPEDENGNLPKYILSPNDLVYVPTQEEINKGEVVMPIDRDRIYKMVDSSGITANFIPASTANLIFALPKATAEIYCNGENCIQNEYGIGSPQSKNQKAITGEMVKEICFPIKVDRLGNIIQVGSCILTN

SEQ ID NO: 22715 - protein, 1458 aa, unidentified
  REGION 1..1458: note = Cas Enzyme sequence
VKKILGLDLGTNSIGWALVDKDNQKILGMGSRIIPMGKDKIDYEKGDGVTKSAMRRAKRSTRRMNKRYKLRRNKLLYILHTLGMLPEQFQFKKLNEKDKDGSLLRLNGTKENNSFKETNNGIPVPTKIQELELLPISKKTLQADSISFCQLKVDALTRTIDIKDFGRILYNFNQLRGYSGGDSDERSKKENDEEESLGNKNYEVIIRKVCIISVEKSEDTFKIRGGKNKGQQLNKFIVVISLDDQELEGTTELQDLKEKVDQEEELQITTKRDKNGEVTSRIFTLPQKSDWRKEMEANEKILKEEGLFISELKLKDLQSNGKWTKIRNRVFLRNRYKEEFDKIWDTQAQKHNFLNECPKETLEKIANYTFPGKSESQQKLRKNAIEGGLKYIIKDQIIYYQRPLKPQTELISNCRFEKSEKVIAVSHPLFQEFRCWKQINNLYITSKQQVWNEKKKKNVWQYTNRYLTNEQKQRIYEKLQNQKGISFNEVKKIVEIKDDKTEYLNGLHVKAKLIGCDTLISIKKQLGDYAESLLEKETSIIEKIWDAIFDARNHEGSEYDITSKRVAPIFEILEEYLDDSQKAEELAFKLAQKVKFVRKYGSLSAKAIQKVLPLMQLNPQNISKQITDKFNTIKNLISTGEILDNTDYNFQDYVIDFVEKNPNALKNGGLMEYLAISLAYDKHTAETIEAQIANYHDINYEKRNLRNPIVEQLMNETMQVIKAIWKQYNVDTKELEIRIELARDLKNSAKERKAIYDGQSNNQKENNKAKERLKENEIALTSENILKYRLYAQQKETSPYTGKPIDFSKLFDNKEYDIDHILPKSRYYDDSFSNKVICEKNINEEKSNRTAWEYISQQNSKHEILSTENFIKHVNNNYFGKKKKNLLAEKIPTNPVSRQLKDTQYISIAVKNELAKIVGSENIRTSTGEITDFLRSRWGLKKLFMEMTEERFKRMELWDLDKNGNPTTTTKWVTKEVMNDGEKDKNVYEIKNWSKRYDHRHHAIDALIVALTEQSHIQRLNNLNKYVQDQLERRKEEFKITTCKDETVFEAFCNLKEGQRDEILQKMESSRYFEKPFLYTNKKGEIVSSLCRQVKEHLETMIISQKPKDKLSISEDPLDPNTPNKKLKKQLKIRAAIHEDTYYGKTNERDTKRIKLSALSASDIDKIIDKSLASEIKEHRKKHIKKEDAFIGEGLKEFNDNRIKNNKQPVYNVKVWYNKNEKKKDSLQRLYDNNEKQSVITGDNYLFIVMEKETKKGVSRVFDIAPLYDSVALAKEYLKEGKRNFKQLICEDYRLKNTDKPQKVLFYLQQNDLVYLPTSSNDPVAKMTNNELKEWLNKDCENKKSFARRIYKVVKMTGKNCFFIPNNYATTISTPKDLSKEDLEKLYKEYKDQDKDIPKHKKNYEEFGSFGSSIKTEINDNFVKELVLKENFDGNQPIKIQDTCLKLKIDWLGNIEFA

SEQ ID NO: 22716 - protein, 1380 aa, unidentified
  REGION 1..1380: note = Cas Enzyme sequence
MKRILGLDLGTTSIGWALVNEAESNNEASSIVRLGVRVNPLTVDEKSNFEKGKAITTNADRQLRHGARINLQRYKLRRQNLHDCLQKQGWLGTEAMYEEGKASTFETYKLRAKAAEEEISLHEFARVLFMLNKKRGYKSNRKANNKEDGQLFDGMTIAKKLYEEHLTPAEYSLQLLNKGKKFTQGYYRSDLNAELERIWDEQKKYYPEILTDEFKQQLEGKTKTNTSKIFLAKYGIYSADLKGLDRKLQPLKWRVEALKQQVDKEVLAFVISDLKGQIANTSGLLGAISDRSKELYFNKQTVGQYLWASLEENPHISIKNKPFYRQDYLDEFEKIWETQATFHKQLTPELKQEIRDIIIFYQRPLKSKKSLISVCELEQRKVKATIDGKEKEITIGPKVAPKSSPVFQEFRIWQNLNNVLLIDNDTNEKRPLDEDERNLLYEELSIKAKLSKTEALKILNKKGKQWDLNYRELEGNRTQAILFDCYNRIITLTGHEECDFKKIKASEIRHYVSTIFKNLGFSTEILDFDPSLKKHELEKQPMYQLWHLLYSYESDNSRTGNEALLRKLETTFGFPEEYATVLCDVVFEEDYGNLSVKAMRKILPYLQAGNDYSQACAYAGYNHSRHSLTKEELDQKVYKERLELLPKNSLRNPVVEKILNQMINVINAIIDEYGKPDEIRIEMARELKSSAIERESRTRAISQGNAENQRIREILEKEFALSYISRNDIIKYKLYEELKPNGFKTLYSDTYIPKDKLFSKDFDIEHIIPKARLFDDSFSNKTLEARDINLAKSNKTAFDFIKEKYGEQGAEAYKKKLDMLLENNAISRPKYNNLLRAEADIPSGFIERDLRNTQYIAKKACEILGELVRTVTPTTGEITNRLREDWQLVDVMKELNFEKYEKLGLTEIVEDRDGRKIKRIKDWTKRNDHRHHAMDALAIAFTKPSYIQYLNNLNARSNKGDSIYAIENKELHYEEGKLRFNAPIPVNEFRAEAKRHLSAILVSIKAKNKVMTQNVNKIKTKHGIIKKIQLTPRGPLHNETIYGTKMRPIIKMVKVGAALDEATINKVSSPAIREALLKRLNEYSGNAKKAFTGKNTLEKNPIYLNVERTKVVPALVKTVEWENYHPIRKPITPDLKVDKVIDKGIRNILKARLEEFNGDAKKAFSNLEESPIYLDEAKKISLKRVSIEGVLSAIPLHTLKNQAGKPITGKDGKPVLGNYVQTSNNHHIAFYYDEDGNLQDNAVSFFEAAERKSQGVPVIDKDYNRNKGWRFLFTMKQNEYFVFPNEATGFIPSEVDLTDEANYGIISPNLYRVQKVSRIDKGTSASRDYWFRHHLETILNDDAKLKNLAFKRIRGLLELKDIIKVRINSTGKIVAVGEYD

SEQ ID NO: 22717 - protein, 1534 aa, unidentified
  REGION 1..1534: note = Cas Enzyme sequence
MISQRNNPYCDLLENCYKYKALKINLQIKTKKMKNILGLDLGTNSIGWAKVSMDDEGKYLKDIVLGSRIIPMSEDVLSNFDKGITVSQTALRTGFRSVRRLRERCLLRRERLHRVLHVLGFLPEHYDKALGWDRNCATTYGKFLDDSEPKLAWKRAEDGHFRFLFMDSFKEMVADFGLHQPTLVAGGRQIPLDWTVYYLRKKALSEPILKEELAWLLLNFNQKRGYYQLRGEEEEENPTKKEEYEELKVVSVEATEERKGDAIWYHAHLENGWIYRRQSKVPLDNWVGQVKAFIVTTEFEKDGVTPKLDKNGEVKRSLRAPSEDDWALRKKRTEKQLENSGQTVGCFIYDRLLAEPSDKIRGNFVRTIERKYYKDELRAILRKQMEFHPALCDDGMLRACIAELYQKNEAHRKSLLQKDMEYLLVDDLLFYQRPLKSKKSLIANCPYERHLYKWTNQETGETKRDQILPIKCIAKSNPYFQEFRLWQFVHNLRLFRREDQVEVTGEYLSSREDYVRLFLCLNDRKEIKMETVLKDCFGLKKPRGKDSVYPLYWNYVQDKVYPGNETRYEILSALGKAGISLDWADKEGRMYRLWHLLYSVSDRLELKEALRKLNDDDAFVEAFLKVKPFKKDYGAYSEKAVKKLLAVMRMGGLWHEEDLCAQTKAKIAAIIEGRIDSKLKEKMGTERVFTSLNDFQGLPLWLACYVVYGRHSEVSEIKKWETPEQLMTYIRGFKQHSMRNPIVEQCVLETLRTVHDLWKEVGHIDEIHVELGRSMKKTAEQRERDMRQMMRNENTNLRIKHLLMELKRDQEMADVRPYSPMQQEILRIYEEGALLRLTKEDEDYDEIMKISQQAQPSQAQLTRYKLWLEQKYVSPYTGRPISLSKLFTPAYQIEHVIPQSRFFDDSLMNKVICEAEVNLLKGAMLGYEFIKAHGGEIVHCTMLGDVRILSEPEYKELVDACYTNHQKKRERLLAEDIPEGFLARQMNDTRYISRVVMSLLSNVVREKDEEEATSKNVIPCTGGITDRLKKDWGLKDVWNTIVTPRFERLNELTKTEHFGRWENKEGKRVFQTDVPLELQQGYSKKRIDHRHHAMDALVIACASRSMINYLNNESAKKPKCREDLRIKLCDKNRVMRKPWETFTQDALAALENVVVSFKNHVRVINKATNYYEKFNEKGKKVYVPQIGGALWAIRKPMHKDTVFGEVNLRRKALVPIAKALENIPAICNKDLRRYIDGLVANKFNKKQLVAHFKSLHYRWNRQDVSKVEVILESKDKERMVATRKLLDTSFDRKRIGSITDTGIQTILLCYLEAKGGDPAMAFTPDGIAEMNRDISLYNGGKRHQPILKVRVSESKGAKFQVGERGAKVRKFVEAQKGTNLYFAIYEDREGIRSYSTEPLDEVAERLKQRQSPVPEKNDNDVPLKFYLSPNDLVYVPSEEERMSEDVCMNKSRIYRFVDASGTTANFVPHTVASLIYSVDKKAAESFCQGNIIQDEFGVGSSQSKNQRAITGEMVKAVCWKLEVDRLGKILKIIR

SEQ ID NO: 22718 - protein, 1470 aa, unidentified
  REGION 1..1470: note = Cas Enzyme sequence
MKKLGLDLGSSSLGWAILDIDESKIIKQGVITFDTGMLKTQGGYTSPTRDRRMTRSGRNLIRARKYRKWSLLKILIKHDFVPLNEEELNDWSKYEKGKIRKFPSNTRFLKWLACDFGYQQDGKKYKNPYELRVKAIDEKLTGHEFGRALYHLIQRRGYKDIGGQDDDTKKQLERRSKEGLDSAIKENRTLAEALQKDFLQKNKKARTQYPYRYEYEHELEVICKQQGYNIDKDNKGNYQDGLVKKLWKAIIWQRPLRTQKGNIGKCTFEPSRQRCPISHPIFEVFRAWQYINTIKYLDQDDNKQPLPIEHKRELFDFLLKKDKNFKFEEIKKFLDKKAGKDQKYNYISKEGKYDSSVSGMPICKELINLFGDKAKEAILSIEDEDENKSSKIVKSKIKRENKKEAEADYSIYDLWHFIFNFDKEFLETFAQNNLGIANELSKKGVESNPMVKIQEKMIQGYADLSVKAIRKILPFLKEGYLYDKAVLLAKIPDILGDRWIEHKSLILEILEQSYNTYIYRKQIIDITNKLIDKHKGLPCEDKFAYKDYSYTIDQDDETDIECCCENHFGEKSWPKVKNRDEIKRDVKEQYQSYFADNKRAYKTIPSLTEVFKKLLNDNQIALNGELYHHSNRENIYNKKLDINYKTGEKRLPTRKNNKGIEIEILPIPLIDSIKNPMFNKAMSILRKLVNELILNGDIDQDTEIIIELARELNDNNRRIAIERYQKARRDERDKIRTFLEQYKTEENQHFNIEEKIPVFELWTEQIFDKPKENKHFNKAQEILSKEKEERYQLWLEQKGQCMYTGKMISITELFSNETDIEHTIPRSKLPDNTMANKTIAFKRYNEKIKIDKIPSECPNYLKDGEVGTAIIPRLDKWKELRDRYQKLYEDRKKAKGREDENAKNKRIQDKHYYKFYFDYWNDKVSRFEATEIKSGWVRRQLTDTQLTSKYAREFLKLYFKKVFVQKGSITSEFRKILGIQGQEEIKERGRHTHHTIDAFVLTLVPTNSSYKEDILKKYYLWLKSKDNVILEELEKSKKVLLQGISIQKMIQTIENTTLVYNFHKDTILVQSNKIVRHRGKIQYVKNKSGQYILDKNGNRIIKRTKGDTVRSELFAQTYIGKIRDVERDEKGKPIRENGDWKYKTGKEEFVFVKREPINSVKSSEKNINSIVDPQIRKLVKEQKNNSVIRDSQNNIIRHVRIQTKAGREVKQRINYESKYDYKNKFYSEAGSIPYAILLQKIHKGKNIKNIIPIPSFEIAKIHKQEGKFDIESCIQRFHPNYKDNNWNKQLLKVGQKVLVLKDDSEYSQIENIDFITKRLYVIKQFKTDNRIVLEYHLNAIPEQDIDNAIKKYKDNLLLEYEKKYGIPEVVEDLSIKDEKERDKDYKNRKYSFNNLGDFRLSRLTNIIGREETLKVTHILGSYKKYSSTIEKDGDTPLLLMSRNNWNFLYEGIDFDTTITGKLNFKKANNL

SEQ ID NO: 22719 - protein, 1457 aa, unidentified
  REGION 1..1457: note = Cas Enzyme sequence
MKHILGLDLGSNSIGWAFVQQDFENKQGKIMAAGSRIIPMDQGILGDFEKGNTVSQTAERTTYRSMRRLRERHLLRRERLHRVLHILGFLPPHYDAQIDFTKRYGKFIDNAEPKIAYNNGNFIFTNSFNEMIEDFKKHQPQLFYKKSNGEESKIPYDWTIYYLRKKALSQKITQQELACLILHFNQKRGYYQLRGEEETESPNKEVAFHSLKVEEVEAEAPNKKGEIWYTIRLENGWIYRRTSKIPLDDWKGKTRDFIVTTDLNDDGTIKVDKEGKEKRSFRAPEENDWNLLKKKTEHDIDFSGKTVGAYIYDHLLQDPNQKIKGKLVRTIERKYYKNELKAILTKQIALQPELFTETLLADCIRELYRKNETQQQNLLSKDFLHLFVEDIIFYQRPLRSKKSTIANCTLEKRSYIDKETNERKDAPIKVCVKSNPYYQEFRVLQWLQNLRIYEIETDREVTAQFIETAEDYEALFNFLMSQKEIDSESLLKYFLLAKNPQIKDKVAKSELKKWLTTYRWNYVYDVADNSSKKYPMNETGYDLQRYLQKVEGLPANFLTFDTTYRLWHLLYSVKDKVEFEKALKRFAKKKQLNETSFIESFKNFKPYPNEYGSFSEKAIKKLLPLMRFGNHWDFNRIDVSTQKRIDDLINGVANEDIRTIIREKAEKYHLNNEISFQGLPLWLAQYIVYNCHAEATDIEKWTSVSDLEAYLEDFKQHSLRNPIVEQVVTETLRVVRDIWQQYGGGQANFFDEIHIELGRELKKTAEERKQLSNRNQENENTNLRIKKLLAELKEDASIQNVRPYSPVQQELLKIYEEGVFSSTDEIEEDIQKIRKKAEPTTPEIQRYKLWLEQKYKSPYTGEVISLTKLFTEEYEIEHIIPQSRYYDDSLSNKVICESAVNKLKTNQLGLEFIQNHHGEKVRITANKEVTIFTEEQYKDFVKKHYANNLAKQRKLLLNEIPEKMVARQLNDTRYISKYISEILSKIVRSDEKDEGVNSKNVIPCTGKITTALKQDWGLNDVWNELILPRFERMNLLTQTQLFTSYNDRYQKNLPTVPIQYSQGFQKKRIDHRHHAMDALVIACATREHINYMNNQHALDKSKDKKEKQQSRIDLRTILCEKKNNNWQFKKPWATFTQEAKESLEHIVVSFKQNLRVINKATNYYEKWEEKNGVLVKKKVKQEGTNWAIRKPLHKETVSGKIILDKKISKDKILTATRKAVDITFTEKIISSITDTGIQKILLNYLKYKGSPEVAFSAEGLEELNKNIAQYNNGKKHQPIYKVRIFEEGSKFPLGETGAKATKYVEAAKGTNLFFGVYQGKGKRTYATIPLNEVIERQKQGLSSVPERNEKGEPLLFTLSPNDLVYVPMEGEIAETIDFNNLSKEQKERIYKTVSFTGNECHFVKSTIASLIKSYDAKSKIGELGSLNKLEVTISGDSRIKEVCIKLKVDRLGNITKA

SEQ ID NO: 22720 - protein, 1457 aa, unidentified
  REGION 1..1457: note = Cas Enzyme sequence
MKHILGLDLGSNSIGWALVQQDFENKQGKIMAAGSRIIPMDQGILGDFEKGNTVSQTAERTTYRSMRRLRERHLLRRERLHRVLHILGFLPPHYDAQIDFTKRYGKFIDNAEPKIAYNNGNFIFTNSFNEMIEDFKKHQPQLFYKKSNGEESKIPYDWTIYYLRKKALSQKITQQELAWLILHFNQKRGYYQLRGEEETESPNKEVAFHSLKVVEVEAEAPNKKGEIWYTIRLENGWIYRRTSKIPLDDWKGKTRDFIVTTDLNNDGTIKVDKEGKEKRSFRAPEENDWNLLKKKTEHDIDFSGKTVGAYIYDHLLQDPNQKIKGKLVRTIERKYYKNELKAILTKQIALQPELFTENLLAGCIRELYRKNERQQQNLLSKDFLHLFVEDIIFYQRPLRSKKSTIANCTLEKRSYIDKETNERKDAPIKVCAKSNPYYQEFRALQWLQNLRIYEIETDREVTAEFIETPQDYEALFNFLMSQKEIDNESLLKYFLLAKNPQIKDKAAKSELKKWLTTYRWNYVYDVADNSSKKYPMNETGYDLQRYLQKVEGLPANFLTFDTTYRLWHLLYSVKDKVEFEKALKRFAKKKQLNETSFIESFKNFKPYPNEYGSFSEKAIKKMLPLMRFGNHWDFNRIDVSTQKRIDDLINGVANEDIRTIIREKAEKYQLNSESCFQGLPLWLAQYVVYNRHAEATDIEKWTSVNDLEAYLEDFKQHSLRNPIVEQVVTGTLRVVRDIWQQYGGGQANFFDEIHIELGRELKKTAEERKQLSNRNQENENTNLRIKKLLAELKEDASIQNVRPYSPVQQELLKIYEEGVFSSTDEIEEDIQKIRKKADPTTPEIQRYKLWLEQKYKSPYTGEVISLTKLFTEEYEIEHIIPQSRYYDDSFSNKVICESAVNKLKTNLLGLEFIQKHHGEKVRVAGNKEVTIFTEEQYKDFVKKHYANNLAKQQKLLLDEIPEKMVARQLNDTRYISKYISEILSKIVRSDEKDEGVNSKNVIPCTGKITTALKQDWGLNDVWNELILPRFERMNQLTQTQLFTSYNDRLQKNLPTVPIEYSQGFQKKRIDHRHHAMDALVIACATRDYINYMNNQHALDKSKDKKEKQQSRIDLRTILCEKKNNNWQFKKPWSTFTQEAKEALEHIVVSFKQNLRVINKATNYYEKWEEKNGVLVKKKVKQEGTNWAIRKPLHKETVSGKIVLDRKISKDKILTATRKAVDITFTEKIISSITDTGIQKILLNYLKYKGSPEVAFSAEGLEELNKNIAQYNDGKKHQPIYKVRIFEEGSKFPLGETGAKTTKYVEAAKGTNLFFGVYQGKEKRSYATIPLNEVIERQKQGLPSVPERNEKGEPLLFSLSPNDLVYVPMEGEIAETIDFNNLSKEQKERIYKTVSFTGNECHFVKSTIASLIKSYDAKSKIGELGSLNKLEVTISGDSRIKEVCIKLKVDRLGNITKV

SEQ ID NO: 22721 - protein, 1526 aa, unidentified
  REGION 1..1526: note = Cas Enzyme sequence
MKKILGLDLGTNSIGWAVLNAADDNSLKYIEAAGSRIIPMDAAILGDFDRGNSISQTAERTRIRGMRHLRERYLLRRARLHRILNLLGFLPFHYAQDIDRYGNFSADMEPKIAWRKNLEGELEFIFIESFNEMLEDFRKNQPELVADNKKVPYDWVIYYLRKKALEKKISKEELAWILLNFNQKRGYYQLRGEDDDESMKTAKTRQYFDKQIIKNIIDTNQTYKGQRILIVELQNGDKGKIFKKEIPDWIGQEKNIIVTVDIDKDGNDKYEESGSLSCRFKIPTDAEWESEWKLIKMKTQKDLDESNKTVGTYIYDSILQNPTQKVRGKLVRTIERKYYKAELKQILEKQTEFHSELQDKDLYIECLNELYSNNDTHRNAITDRDFVYLFMNDILFYQRPLKSKKSLIDNCPYERNIYIDKETGEIKYSPIKCIAKSHPLFQEFRLWKFISSIRIYQRESVVEVVDKQLDLFSSQSTSVQKLVTDVDVTDKFLTCENDYVALFEWLNKKKIIDQKEFLKYRPFGLKGDIDNYRWNYVEDKSYPCNETHAMILTYFAKAGISEDILTKEMEEALWHILYSVEDRQEITKALRTFASKYHLSDSFVKVFSNIPPFKKEYGSYSAKAIKKLLSLMRMGKYWSEDAIDVNTRERIDKIVTGEYDEKIRDRVREKTIRLNDIRHFRALPDWLACYVVYDRHSETREITEWKSPEEIDEYIRNFKQHSLRNPIVEQVITETLRTVRDIWKQVGCIDEIHVELGREMKNPADKRKRITSQIIENENANLRVKALLTEFVNPEFEIENVRPYSLSQQDILRIYEDGVLNSVAEVPGDIAGILKKFNENDAKKRPTTSEILRYKLWLEQKYRSPYTGEMIPLSKLFTSAYEIEHVIPQSRYFDDSFSNKVICEAEVNKLKDNALGYEFIKKHHGEKVELGFGKIVEIFSVSVYEQFVKDNYSRNRGKMKKLLMDEIPEQFIERQLNDSRYISKVVKTLLSNVVREKAEQEAVSKNVIVCTGGVTDRLKKDWGINDVWNKIVLPRFLRLNELTNSTNFTAKNAAGNEIPAMPLELQKGFNKKRIDHRHHAMDAIVIACANRNIVNYLNNESASRKAKISRHDLQAILCDKVRTDDKGNYQWRVKKPWDTFTQDVYVALENIIVSFKQNLRVINKTSNYYWHYENGKKVLVKQVKGDSWAIRKPMHKDTVFGEVNLRKVKSVSLNEALKNPQFIVEKDLKRQLLSLLQQNFDIKKIKKYFEEHKDIWSDISLSKMNIYYFTKETKDRYFATRKPLDASFDKKKIESCITDTGIQQILLRHLELKENDPERAFSPDGIDEMNRNIIQLNKGKGHHPIAKVRVYEKADKFEVGQRGNKSSKFVEAAKGTNLFFAVYETEYPDEKTNSIVRKRNYATIPLNIAIERQKRGLSTAPEDEKGNVPSFVLSPNDLVYLPTSEDIVNGHITQPIDKSRIYKMVSSSGSQCFFIKHNIANIIVDKYEFSPLNKMERAISNEMIKEICIPVKVDRLGNIVKLGKSE

SEQ ID NO: 22722 - protein, 1247 aa, unidentified
  REGION 1..1247: note = Cas Enzyme sequence
MNKRVLGLDLGVGSIGWCLITLDEQDNPAEIVAMGSRVVPLDDPTKDANNFRIGEAFTANQNRTARRAMRRGFDRYQLRRHRLHRELSKVGMLPDAQLIQLPLLELWELRERAAQFGEQLTLPELGRVLCHINQKRGYRHVKGDRSSSVVEEDKKKKETNSDYVTAINQRYAHLQEAHLTVGQYFAKQLRSSKTESGAIVYRVKDQVYPRQAYIDEYNQIMQVQSAYYPEVLTPHFIKMLRDEVIFMQRPLKSCKHLVSLCEFEKQEKMMRVQQDDGKGGKEVVERKIKFGPKVAPKSSPLFQLCRLYEAVNNIRLTYPDNSPRPLTNEERAKLVAYLQGCETLQEKKPTKRPSKKPKKETCPEVNLDSLKQVLQIEEELRADKLLESGITGDTTRIALATILQPYEQYHHLLTMELETRPMKVQTTDEATGEITEHEVAVLTDSYTRQPLYRLWHILYSIEERDAMRKALITQLGMSEEELDGGLLDQLYRLDFVKPGYGNKSAKFMCKLLPQLHQGLGYSEACAAVGYRHSGSLTREEIAERILLPQIPLLQRNELRQPMVEKILNQMINLVNTLQAEYGIDEVRIELARELKMSREERERISRSNGTRKTKNDAVAKYIQEYGLYPTKTLIRKYLLWEEADRRCMYCGKEISLSQCLNGDEMEVEHIIPKSILYDDSFGNKTCACRQCNKEKGNMTALEYILTKGWEKEYRDRLDKLREEAKRQEKATQKKKKEVQKQTISYSKCQRLLWLKKDIPTDFLERQLRLTQYISRQAMSILQQSIRRVTASEGGVTARLRSLWGYDDILHSLNLDRYESMGETELVPKHPNSEEDDSMKCRITDWSKRKDHRHHAIDALVVACTRQGYIQRLNRLSSETDREEMRRETELRKESTADKLSLLERWLSQRPHFSVQDVSDKVAEILISYPKPKRTHTWGRNRYKKKTADGKEKTCIQTRVLVPRGELMEASLYGKIISDGKERIVKRYPLHALKGTVVDPRLRELITQRKQGSATEAKGAPLYLDAEKKQEVRSVRCYAAKLSTDKAIPLCFDEQGKAITFAKSGSNHHVVHYLDAAGKTHPIILSIWDVIERVRYGLPTIITDYAQVPQDLELPASVRDKLPQAEWKCIDVLLRNEMFLLGLSDEEITQAITRADYTLLSKHLYQLRTISISSDKKIDYTFYYHLDAPDPNQKKKEQGDKKKEKEQSKPAKGTSLTLHKYRVQGLSTFLELNIHKVRIDLLGRITLL

SEQ ID NO: 22723 - protein, 1500 aa, unidentified
  REGION 1..1500: note = Cas Enzyme sequence
MNYSMMELVWLLLIYSFLGWVVETIVGTVKKKKFVRVVKCIGFLPEHYSQNIDKYGKFFLDNEVKLSWKKDKMGKNEFIFLDSFNEMLEDFRHSQPQLLLDGRKVPYDWTIYYLRKKALTEKISKEELAWILLNFNQKRGYFQLRGEDEEVQGKKIEFYALKVVRVEDTGEKKGKDTWYNVYLESGLGDTDDYWVYRRASSVPIDEWEGQVKEFIVTTTLDNNGSPQIDKEGKVKRSFSIPKPEDWMLVKKKTEVDIKSSGKTVGTYIYDTLLQKPDQKIKGKLIRTIERENYTNELSLILENQKKFHLELQDRELYHQCIELLYCKNEAHKRVIGTWDFTSLFIKDILFYQRPLKSKKALIDNCPYEESFYIENGEKKSKPRKCIAKSHPLFQEFRIWQFISNLRIYQKVKEVDGKLQFNVDVTSDFLRDESAYVELFKWLNERAEVSQEDLLKHLGLKKTKTEDTVSLYRWNYVEDKKYPGNKTRSSILKKLLNDEKEALSEDIELKIWHLLYSVSAQSEIDKALSSKNVSTKGIYSGLSVYFSDETIQKIKNVKLESGYGSYSAKAIGKLLPLMRRGKYWNLESIDNHTKERIEKILNGECDETIRARTREKSISLTDISQFKGLPLWLACYIVYDRHSELKTIKKWNGPEDIDKFLKEFKQHTLRNPIVEQVIMETLRVVRDIWRRVGSIDEIHIEMGRDMKQTAQERARRSAIISRNENDNLRIKALLHEFMNPELGIENVRPYSPAQQEILRIYEDGVLSSVSEIEDEIKNILKKFNESEEGKRPTKNEIIRYKCWLEQKYRSPYTGEIIPLGKLFTPAYQIEHIIPQARFFDDSFTNKVICEAEVNAKKGDLLGYEFVKEKGGEIVELSGGRNVRIFSVEEYEDFVKEHYKSNKQKMQRLLAEDIPTEFSHRQLNDSRYISKYIRNLLSNIVREDDEQESVSKNVISCNGAITDRLKKDWGVNDVWNHIILPRFVRLEEIRADNGEKFTAFNQEGHLIPSMPLMYQKGFNKKRIDHRHHAMDAIVIACTTRDHVNLLNNECSNTQNNANKHQLSRKLRRYENVSYKQDGKLKEREVPKEFLKPWEEFTRDVEFALKNVIVSFRQNLRVLNKTVNYFQHWKDNSSEKEWKEQKSADHWSIRKPLHKETVSGEVFLWRTRFVSLREALTNPKRIVEKDLRSKILELQSKGYDTKRIKKYFEDNKDVWQDVNLSKIEVRYYSREIVDPQTELPKNRYFATRFGNDLISLFSGVSNFEKAKKIIESITDTGIQKILFRHLENKGNDPVLAFSPEGIDEMNRTIKTLNNGKDHKPIYKVRIYECSTMKFPLGSVGNKSKKFVEAAKGTNLYFAVYEKEVENDRGECHKERTFKTIPLNDVIRNLKQGLSIAPNDENGNPPAFILSPNDLVYLPTKEESETDSISQPLDRNRIYKMVSCTGYQVFFVPAFVAAPVLQKIELGSNNKSERARTDEMIKESCIPIKVDRLGMLISINGKAV

SEQ ID NO: 22724 - protein, 1436 aa, unidentified
  REGION 1..1436: note = Cas Enzyme sequence
MKRILGLDLGTNSIGWALVNEAENKDERSSIVKLGVRVNPLTVDELTNFEKGKSITTNADRTLKRGMRRNLQRYKLRRETLTEVLKEHKLITEDTILSENGNRTTFETYRLRAKAVTEEISLEEFARVLLMINKKRGYKSSRKAKGVEEGTLIDGMDIARELYNNNLTPGELCLQLLDAGKKFLPDFYRSDLQNELDRIWEKQKEYYPEILTDVLKEELRGKKRDAVWAICAKYFVWKENYTEWNKEKGKTEQQEREHKLEGIYSKRKRDEAKRENLQWRVNGLKEKLSLEQLVIVFQEMNTQINNSSGYLGAISDRSKELYFNKQTVGQYQMEMLDKNPNASLRNMVFYRQDYLDEFNMLWEKQAVYHKELTEELKKEIRDIIIFYQRRLKSQKGLIGFCEFESRQIEVDIDGKKKIKTVGNRVISRSSPLFQEFKIWQILNNIEVTVVGKKRKRRKLKENYSALFEELNDAEQLELNGSRRLCQEEKELLAQELFIRDKMTKSEVLKLLFDNPQELDLNFKTIDGNKTGYALFQAYSKMIEMSGHEPVDFKKPVEKVVEYIKAVFDLLNWNTDILGFNSNEELDNQPYYKLWHLLYSFEGDNTLTGNGRLIQKMTELYGFEKEYATILANVSFQDDYGSLSAKAIHKILPHLKEGNRYDVACVYAGYRHSESSLTREEIANKVLKDRLMLLPKNSLHNPVVEKILNQMVNVINVIIDIYGKPDEIRVELARELKKNAKEREELTKSIAQTTKAHEEYKTLLQTEFGLTNVSRTDILRYKLYKELESCGYKTLYSNTYISREKLFSKEFDIEHIIPQARLFDDSFSNKTLEARSVNIEKGNKTAYDFVKEKFGESGADNSLEHYLNNIEDLFKSGKISKTKYNKLKMAEQDIPDGFIERDLRNTQYIAKKALSMLNEISHRVVATSGSVTDKLREDWQLIDVMKELNWEKYKALGLVEYFEDRDGRQIGRIKDWTKRNDHRHHAMDALTVAFTKDVFIQYFNNKNASLDPNANEHAIKNKYFQNGRAIAPMPLREFRAEAKKHLENTLISIKAKNKVITGNINKTRKKGGVNKNMQQTPRGQLHLETIYGSGKQYLTKEEKVNASFDMRKIGTVSKSAYRDALLKRLYENDNDPKKAFAGKNSLDKQPIWLDKEQMRKVPEKVKIVTLEAIYTIRKEISPDLKVDKVIDVGVRKILIDRLNEYGNDAKKAFSNLDKNPIWLNKEKGISIKRVTISGISNAQSLHVKKDKDGKPILDENGRNIPVDFVNTGNNHHVAVYYRPVIDKRGQLVVDEAGNPKYELEEVVVSFFEAVTRANLGLPIIDKDYKTTEGWQFLFSMKQNEYFVFPNEKTGFNPKEIDLLDVENYGLISPNLFRVQKFSLKNYVFRHHLETTIKDTSSILRGITWIDFRSSKGLDTIVKVRVNHIGQIVSVGEY

SEQ ID NO: 22725 - protein, 975 aa, unidentified
  REGION 1..975: note = Cas Enzyme sequence
MYQEFRIWQNLNNVLLIDTEINESRPLDEEEKALLYNELSVRAKLSETEALKTINKKGKHWDLNFKELEGNRTQAVLFECYNRIITQTGHEECNFKKISAEDIRHYVATIFKNLGFNTDILDFNPSLEKHELEKQPMYQLWHLLYSYESDKSRTGNESLLNKLEANFGFPQEYASVLADATFEDDYGNISVKAIRKILPHLHDGYDYSEACERAGYNHSVRSLTKEELAQKVYKDRLDLLPKNSLRNPVVEKILNQMINVINAIIVEYGKPDEIRIEMARELKSSAAKREERTKSINQNAAENKRITEILQTEFGLSYISRNDIVKYKLYQELEANGFKTLYSNTYIPKEKLFSKDFDIEHIVPKARLFDDSFGNKTIEARDVNLAKSNKTAFDFVKEKYGEQGIEEYKKKLDTLLKENAISSGKYKKLMMSEADIPSDFINRDLRNTQYIARKAYEILGELVKTITPTTGKITDRLREDWQLIDVMKELNFEKYDRLGLTEVIEDRDGRKIKRIKDWTKRNDHRHHAMDALTIAFTKPSYIQYLNNLNARSDKSGSIYAIETKELHRENNTLRFNAPMPLNEFRKEAKRHLSAILVSIKAKNKVMTQNVNKIKTKNGIIKKVQLTPRGALHNETIYGTKMRPIIKMVKIGAALDEATINKVSSPTIREALLKRLNEYSGDAKKAFAGKNAITKNPIYLNAEHTKTAPAMVKIVEWEMYYPIRKLITPDLKIEKVIDNGIKEILKKRLKEFGGDAKKAFSNLDECPIYLDEEKNITLKRVSIEGVLSAIPVHTLKNHAGKEIKDEDGKAVLGDYVQTSNNHHVAIYQDAKGNLQDNVISFFEAAERKSQNVPIVDKNLNRDKGWHFLYTMKQNEYFVFPNEETGFVPSEIDLMDENNYEMISPNLFRVQTMSRVDYGKTIIREYVFRNHLETILNDNLKLKGLVFKKIKSLKALEGIVKVRVNAIGKIVAVGEYD

SEQ ID NO: 22726 - protein, 1064 aa, unidentified
  REGION 1..1064: note = Cas Enzyme sequence
LEIIANIRIYQKEKKVDGKLLTDIDVTTEYLSSKDDYVALYEWLCVRKEIEQKTFLKYPAFGLKKEIENYRWNYIEGKSYPCNETRSLILHYLEKAGISSTFLSTKIEESLWHILYSVEDRIELETALRTFASKYQLSCNFVEVFKKFPPFKKEYGAYSAKAIKRLLPLMRMGKYWKVDAIDGNTAERIEKILSGECDEKILNKVREKTIHLSETSDFQGLPLWLACYVVYNRHSEGKEVAKWKSPEDIDIYLKSFKQHSLRNPIVEQVITETLRVVRDIWKRVEQIDEIHVELGREMKNPSEKRRQMTERMLENENANIRIKALLTEFMNPEYEMENVRPYSPSQQEILRIYEDTVLNGVEDIPEDIEIILKKFKENDIKKRPGKSDFLRYKLWLEQQYRSPYTGEIIPLGKLFTTAYEIEHVIPQSRYFDDSFSNKVICESEVNKLKNNMLGYEFIKKHAGEIVELGFGKSVKIFSVEAYEQFVRENYYKAGSKKSKLLLDDIPEKFIERQLNDSRYISRVVKGLLSNVVREEDANGEYESEAISKNVIVCSGSVTDRLKKDWGVNDVWNNIVYSRFERLNRLTESQQFGHWENRGGKRFFQTELPLEYQKGFSKKRIDHRHHAMDAIIIACATRNHVNYLSNESASKHAQIARYDLQRMLCDKSKTDGGGNYKWIIQKPWTTFTQDVYRTLLDIIVSFKQNLRVINKMTNYYQSYDDGKKVFKKQKKGDSWAIRKSMHKDTVFGQVNLRKIKEVRLSVALESPEKIVDKKIKEKVLQLFAYQYDKKKIEKYFKENASLWKEVNLAKIPVYYFTDESSELLVAVRKNLDTGFTEKKIRESVTDTGIQKILLNHLSNKGDKPELAFSPDGIDEMNRSLVILNGGKPHQPIYKVRVCEPLGNKFKVGTNGNKAAKYVEAAKGTNLFFAIYETDAGKRTYETIPLNVVIEREKMGWLPVPEKNNKGEKLLFWLSPNDLVYLPTEEELMSRILSDKLDRSRIYKIVSFTGNRLYAIPYNVSNMIWDKNEYTQLNKVESTDMKESIKEICMPINVDRLGHITEIIIK

SEQ ID NO: 22727 - protein, 978 aa, unidentified
  REGION 1..978: note = Cas Enzyme sequence
LILHYLEKAGISSTFLSTKIEESLWHILYSVEDRIELETALRTFASKYQLSCNFVEVFKKFPPFKKEYGAYSAKAIKRLLPLMRMGKYWKVDAIDGNTAERIEKILSGECDEKILNKVREKTIHLSETSDFQGLPLWLACYVVYNRHSEGKEVAKWKSPEDIDIYLKSFKQHSLRNPIVEQVITETLRVVRDIWKRVEQIDEIHVELGREMKNPSEKRRQMTERMLENENANIRIKALLTEFMNPEYEMENVRPYSPSQQEILRIYEDTVLNGAGDIPEDIEIILKKFKENDIKKRPGKSDFLRYKLWLEQQYRSPYTGEIIPLGKLFTTAYEIEHVIPQSRYFDDSFSNKVICESEVNKLKDNMLGYEFIKKHAGEIVELGFGKSVKIFSVEAYERFVGENYYKAGSKKSKLLMDDIPEKFIERQLNDSRYISRVVKGLLSNVVREEDANGEYESEAISKNVIVCSGSVTDRLKKDWGVNDVWNNIVYSRFERLNRLTESQQFGHWENREGKRFFQTELPLEYQKGFSKKRIDHRHHAMDAIIIACATRNHVNYLSNESASKHARIARYDLQRMLCDKSKADGGGNYKWIIQKPWATFTQDVYRTLLDIIVSFKQNLRVINKMTNYYQAYDDAGKKVFKKQKKGDSWAIRKSMHKDTVFGQVNLRKIKEVRLSVALESPEKIVDKKIKEKVLQLFAYQYDKKKIEKYFKENASLWKEVNLAKIPVYYFTDESSELLVAVRKNLDTGFTEKKIRESVTDTGIQKILLNHLSNKGDKPELAFSPDGIDEMNRNLVILNGGKPHQPIYKVRVCEPLGNKFKVGTNGNKSAKYVEAAKGTNLFFAIYETDAGKRTYETIPLNVVIEREKMGWLPVPEKNNKGEKLLFWLSPNDLVYLPTEEELMSRILSDKLDRGRIYKIVSFTGNRLYAIPYNVSNMIWDKNEYTQLNKVESTDMKESIKEICMPINVDRLGHITEIIIK

SEQ ID NO: 22728 - protein, 1480 aa, unidentified
  REGION 1..1480: note = Cas Enzyme sequence
MKTILGLDLGTNSIGWAKVCVDDNGNYTREIKLGSRIIPMSQDTLSNFDKGVTESPTAARTGFRGIRRIRERALQRRERLHRVLHVMGFLPLHYENAIGWNREEATTYGKFLDNGEPKLAWERQEDGSMRFLFMDSFYEMMADFAKNQPGMVADGRKIPLDWTLYYLRKKALTQAIRKEELAWILLNFNQKRGYYQLRGEEEEENPTKREEYYELKVVSVEAAEEGKGGNTWYNVTLENDWIYRRQSKIELNDWGGKVRPFIVTTEYEIDGVTIKKDKNGEVKRSFRAPNENDWGLRKKRTESLLEESGKTVGAFIYNHILSEPADKIRGNFIRTIERKFYKKELEAILREQSKHHKELKDIDTLIACIKELYPNNKPHQDSLIKKDMTYLLITDLIFYQRPLKSKKSLIADCPYEYYEYVIKETGEIKRQSIKCIAKSNPYYQEFRLWQFIINLRLFDRNNDKEVTSEYLSSMEDYTRLFTYLNDRKDINQETLLKDFFKQKKVKRGMEKEFPIRWNYIEDKEKKYPCNETRHELLAALGKAGIDHSWLDDKELFYRLWHLLYSVESKEEAEGALRKLNDNDDFVNAFLKVKPFKKEYGAYSEKAIKKLLAVMRMGDLWNETDICEQTRDRIQNIIKGVIDEKIKERMGRTFSQLSDFQGLPEWLACYVVYGRHSEATDIQRWTKPEDLMAYINGFKQHSLRNPIVEQCILETLRTVYDIWKEAGHIDEIHIELGRSMKSTADQRARMSKSIMQNENTNLRIKSLLMELKNTKEFENVRPYSPMQQEILRIYEEGALQELTKEDAQYNEISKISQMAQPSANELLKYRLWLEQKYCSPYTGKPISLSKLFTSAYQIEHIIPQSRYFDDSFTNKVICEAEVNQLKSNMLGYEFIKKHGGEIVHCTMVGDVKLLDAKEYYNFVTEHYANNRRKKEKLLMEDIPQDFLNRQMNDSRYISKKVMAILSNIVREEDEQEAKSKFVIACSGGITDRLKQDWGLNDVWNSIVYPRFERLNKLTNTENFGRWENKEGKQVFQTSVPLELQKGFSKKRIDHRHHAMDALVIACASNNIINYLNNESAKSQEKREDLRKKLCDKNRIIRKPWDTFTQDAHTALENVVVSFKNYIRVINKATNYYEKYDKNGKKEIAEQKGQDMWAIRKPMHKETVFGQVNLRRKVTIKLKDALEKIPAICDKELRDYINILVAKQFNKKQILAHFKSINYRLNMKSVDKVDVWQFSNEKEPMVATRKSVDTSFGTKRIATITDTGIQKILLNYLKAKNNDPNIAFTPEGIAEMNKHITEYNNGKQHQPILKVRVSEPKGAKYQVGETGNKTSKFVEAQKGTNLYFAIYEDKEGNRSYNTIPLNEVIERLKQGLSPAEDLNKQGEKLKFYLSPNDLVYVPTEEEKLSSECKLNKEQIYKMVSSTGSECYFIPYTVSNVIFNKVEFESLNKMGRALTGEMIKSVCWKLELDRLGNILKVIK

SEQ ID NO: 22729 - protein, 1382 aa, unidentified
  REGION 1..1382: note = Cas Enzyme sequence
MKRILGLDLGTASVGWAVVNEAENSEEQSSITALGSRVVLLSADEKNNFLTGKSVSATATRTAKRGARRNLQRYKLRREWLKDALVSAGIINEDTCLNDSNSKELFATYISRAKAVTEQIALEDFAKVLFMINKKRGYKSNRKTDNTESEDGQIIDGLDLAKKLKARNITPGQYLLELFKENKKNKAVFYRSDLQEEVNRIWAFQSQFYPEILDNTLLSAITNKSKKAVIGLFKGIKNVEIADVKTKERTEKALTWRSEALHKQLEIGEVAYAIAEVMGAISQSSARLALLSDNSKHLEFEGLTIGQYLLKLLRNNPNSSLKNINFYRKDYEDEFNTIWKKQASFYPQLTESLRSTVFNSIFMQRNLKSCKALLANCELEFAEKKITLPDGSCQTRTIYSKVCPKSSPYFQEFQIWQSLSNIRIIDKENTHLTKGQELSYDQKVMLLPELMIHSELKANKIIEILFGKKSNYTINMPSIKGNRTNETIFNALLEIVELTGHSIDNIVKTDANQQIEAVKSIFESLGYKTDFITFDSIIEGKDGLNQPYYKLWHLLYSYCGDNSKTGNEALIRKIEELTGLEKEEAKVLANCTFENDYASLSTKAIRKLLPHLQSNLDYSEACEAAGYNHSKRSRTKEDIKNKVYKDKLDLLPRNSLRNPIVEKILNQMIHVINQTSEAYGKPDEIRIEMAREFKKNKIQRKKLDNQLKENTAKLEHIKDILRKDFKLSHISHNDILRYRLYEELSLNGYKTLYSNTYIDRQQILDPTVTIEHIVPKALAFDDSFSNKTLEIQSVNGEKSNQTAFDFISKKYGSEALEQYINRVNNLFENGKISKTKRDNLLRKQEDIPSDFLNRDLRNTEYIAKKALEILEDYVPRVTPTIGKITKRLREEWQLVNIMKELNWKKYNSLGLTFFDYTRNGEKIGIIPNWTKRNDHRHHAIDALTIAFTKPSIIQYLNNLKAQNDKGSSIYAIQAKETYIDETRKRLIKPPYDIKQFRNDAKQMLDNIFVSHKAKNKVVTPNTIVTKKKRKTGKETKAEEKRTFLTPRGPLSNETVYRKICNYETKEITINSKLTYEIALTIAKKKEREAVLERLAQHNNNPTKAFKNYNKNPIMLQTSVGEKSLMSVKIVNYKELFVKRSEINEELDIKRVLDAKVRARLTDRLKEYNNDPKTAFANLEENPIWLNEEKGIALKHITTIERVVGLPIRPKRNINGEIMKDEQGQPLKSHYIETDGNHHAAIYEDEEGKWHEKVVSFNEAASRAIQKLPIIDKDFNKELGWVFQFTMKQNEMFVFPDKESGFDPLAIDLKDPANKSLISKHLYRVRSISSNDYRFCHHLETTVATPKELKDITWKRIRSLSSLQGIIKVRVNHIGQIIDIGEY

SEQ ID NO: 22730 - protein, 1422 aa, unidentified
  REGION 1..1422: note = Cas Enzyme sequence
MTQKVLGLDLGTNSIGSAVRNLDLSDDLQWQLEFFSSDIFRSSVNKESNGREYSLAAQRSAHRRSRGLNEVRRCRLWATLNLLIKHGFCPMSSESLMRWCTYDKRKGLFREYPIDDKDFNAWILLDFNGDGRPDYSSPYQLRRELVTRQFDFEQPIERYKLGRALYHIAQHRGFKSSKGETLSQQETNSKPSSTDEIPDVAGAMKASEEKLSKGLSTYMKEHNLLTVGAAFAQLEDEGVRVRNNNDYRAIRSQFQHEIETIFKFQQGLSVESELYERLISEKKNVGTIFYKRPLRSQRGNVGKCTLERSKPRCAIGHPLFEKFRAWTLINNIKVRMSVDTLDEQLPMKLRLDLYNECFLAFVRTEFKFEDIRKYLEKRLGIHFSYNDKTINYKDSTSVAGCPITARFRKMLGEEWESFRVEGQKERQAHSKNNISFHRVSYSIEDIWHFCYDAEEPEAVLAFAQETLRLERKKAEELVRIWSAMPQGYAMLSQKAIRNINKILMLGLKYSDAVILAKVPELVDVSDEELLSIAKDYYLVEAQVNYDKRINSIVNGLIAKYKSVSEEYRFADHNYEYLLDESDEKDIIRQIESSLGAKRWSLMDADEQTDILQKVRDRYQNFFRSHERKFVESPKLGESFENYLTKKFPMVEREQWKKLYHPSQITIYRPVSVGKDRSVLRLGNPDIGAIKNPTVLRVLNTLRRRVNQLLDDGVISPDETRVVVETARELNDANRKWALDTYNRIRHDENEKIKKILEEFYPKRDGISTDDIDKARYVIDQREVDYFTGSKTYNKDIKKYKFWLEQGGQCMYTGRTINLSNLFDPNAFDIEHTIPESLSFDSSDMNLTLCDAHYNRFIKKNHIPTDMPNYDKAITIDGKEYPAITSQLQRWVERVERLNRNVEYWKGQARRAQNKDRKDQCMREMHLWKMELEYWKKKLERFTVTEVTDGFKNSQLVDTRVITRHAVLYLKSIFPHVDVQRGDVTAKFRKILGIQSVDEKKDRSLHSHHAIDATTLTIIPVSAKRDRMLELFAKIEEINKMLSFSGSEDRTGLQQELDGLKNKLQMEVKACRIGHKVSEIGTFINDNIIVNHHIKNQALTPVRRRLGKKGHIVGGVDKPRWQTGDALRGEIHKASYYGAITQFVKDEEGKVLMKEGRPQINLTIKFVIRRELKYKKSATDSGFASWDDLGKAIVDKELFALMKGQFPEETSFKDACEQGVYMIKKGKNGMPDKKLYRIRHIRCNTVQKNALKIKEQTYKSEKEYKRYFYAAVGDLYAMCCYTNGKIREFRIYSLYDVSCHRKSDIEDIPEFITDKKGNRLMLDYKLHTGDMILLYKNSPEELYDLDNVNLSKLLYKINGFENDGLRIRMVNHLVVKEAMGESVKDYAKLPDIIRCGVKTIKFLIMGENRDFVIKNGKIIFNHR

SEQ ID NO: 22731 - protein, 959 aa, unidentified
  REGION 1..959: note = Cas Enzyme sequence
MRYSLGLDIGTTSVGWAVINEDRNRIEDLGVRIFERPENPKNGESLAKPRRDSRSTRRRLKRRRQRLNNLKHFFINQQLLTNEEIQDLLNPSKTAEQKAQFDPYQLREKAINSQVSPTELFVALYHIAKRRGYKSNRKKVEENSKEESGRVLMAIKQNKALLDNYRSVAIALLRDDKFKLHKRNKLDSYTNSFIREDFEKEMLAILNAQQWPDSWIEELLYSKPNGLFFQRPFMTSELIEKMRGKCPLEGTPRAQKASFSFELFRLAQDLAHLTYNDGNKLSEDQINRVVEKAKTTAKVTYKAVKEAIGFKSDPNFRFDYIRGKQTEYTEMEKREFCNLRFYHAIKKACTEIDWDRISQDLDTFDQIGYILTAYKDDESVEAELLKLNLQPETINQLESLSFSGFCGHSLTALQKLTPHLLSSKTYNQAVELEYPGQFNEKLSGENNELPSLTEAQLCQLTNPVVKRAISQTRKVINAVIHKYGAPTQIKIECANDLAKNFKERHDIKKAQDENANYNEKIIEKLKELGITTPTGTQITKYKLREQQLAKCAYCGANLTEDTLLDDRLTEIDHIIPFSRSGNDSNNNKVLVCPTCNQEKLNRTPFEKWGNDTERWLKIQALAESFNIPFAKKKRLLTEKLPKEEWGSHALNDTRYAMRFISQYIKSNLKFSDESSGKQKVLLPTGFITSYLRKMYHLGEKDRDLNNCHHAVDACIIATVSQAQIKKFAEYNKWKELGASYQTVIWYDEDGESHQKTKVEYAEMKAELLPWPRFDEEVKKRSGSTYDSSKIEKLSDFRDKFRDFDTYDETFLEKIHPLFVSRMPKRSTKGQAHKETIRSPKAEAGGRRLTRKRLSDCDLEDIKNSILPESDQALYQQLCNLYSENGKDAFKEPIYKNNQRIDKNGKAISPVKSIKVYSTEPHLASSLTMVLSSSTMATRSVSTFTNAKISSSQLQFTCTP

SEQ ID NO: 22732 - protein, 1405 aa, unidentified
  REGION 1..1405: note = Cas Enzyme sequence
LPPHYENAIGWNREEATTYGKFLDNGEPKLAWEKQEDGSMRFLFMDSFYEMMADFAKYQPGMVADGRKIPLDWTLYYLRKKALTQAIRKEELAWILLNFNQKRGYYQLRGEEDEEDPTKREEYYELKVVSVEAAEEGKGGNTWYNVTLENGWIYHRQSKIELNDWVGKVRPFIVTTEYEIDGITIKKDKNGEVKRSFRAPSEDDWGLRKKRTESRLEDSGKTVGEFIYDHILSEPADKIRGNFIRTIERKFYKKELEAILREQSKHHKELKDQNTLVNCIKELYPNNKAHQDSLMKKDMIYLLITDLIFYQRPLKSKKSLIADCPYEYYEYVIKETGEIKRQGIKCIAKSNPYYQEFRLWQFIINLRLFDRTNDKEITSEYLSSMEDYTRLFTYLNDRKEINQEFLLKDFFKQKKVKMGMEKEFPIRWNYIEDKEKKYPCNETRHELLAALDKAGIDHSWLDDKERFYRLWHLLYSVESKEEAEGALRKLNDNEDFVNAFLKIKPFKKEYGAYSEKAIKKLLAVMRIGALWNEDDICEQTRNRIQSIINGVIDEKIKERMGRTFSQLSDFQGLPEWLACYVVYGRHSETTDIQRWTKPENLMAYINGFKQHSLRNPIVEQCILETLRTVHDIWKEAGHIDEIHIELGRSMKSTADQRARMSKSILQNENTNLRIKSLLMELKNAKEFENVRPYSPMQQEILRIYEEGALQELTKEDDQYPEISKISQMAQPSAKELLKYRLWLDQKYCSPYTGKPISLSKLFTSAYQIEHIIPQSRYFDDSFSNKVICEAEVNQLKSNMLGYEFIKKHSGEIVHCTMVGDVKILDAKEYYNFVTEHYANNRRKKENLLLEDIPQEFLNRQMNDSRYISKKVMALLSNIVREEGEQEAKSKFVIACSGGITDRLKHDWGLNDVWNSIVYPRFERLNKLTNTENFGRWENKEGKQVFQTSLPLELQRGFSKKRIDHRHHAMDALVIACASNNIINYLNNESAKSQEKREDLRKKLCDKNRIIRKPWDTFTQDAHTALENVVVSFKNYVRVINKATNYYEKYDKNGKKGIAEQKGQDMWAIRKPMHKETVFGQVNLRRRVTVKLKDALEKIPAICDKELRDYINNLVAKQFNKKQILAQFKNINYRLNMKYVDKVDVWQFSDEKDPMVATRKSVDTSFDTKRIATITDTGIQKILLNYLETKDNDPNIAFTPEGIAEMNKHITEYNNGKQHQPILKVRVSEPKGAKYQVGETGNKTSKFVEAQKGTNLYFAIYEDKEGNRSYSTIPLNEVIERLKQGLSPVPDANEKGIPLKFHLSPNDLVYVPKTDEENEIKMGQIYKFVDSSGTTANFIPHRVSNLIYNVDKKIAENFCNHEIIQNEYGIGSPQSKNQKSITGEMIKAVCWKLEVDRLGNIHKIIK

SEQ ID NO: 22733 - protein, 1504 aa, unidentified
  REGION 1..1504: note = Cas Enzyme sequence
MKNIVGLDLGTNSIGWAVVNGSVNDDGSEQLVKIQASGSRIIPMDAAMIGDFNKGNSISQTAERTRLRGVRRLSERYLLRRERLHRILDILGFLPFHFAQDLDRHGKIVKGKEPKLAWRKNEAGQFEFIFQDSFKEMLEDFKLNYPNLITDDKKVPYDWTIYYLRKKGLTSKISKEELAWILLNFNQKRGYYQLRGEEEEENKDKLVEFYALKVVAVEDSGEKKGKDIWYNVHLENGWVYRRTSNMSLDWVGKTKEFIVTTDLEKDGTPKKDKEGNVKRSFRAPKEDDWSLVKKKTEADIDQTHKTVGAYIYDTLLGNPSQKIRGRLVRTIERKYYKEELKLILEKQKEFHLELQDRALYAACIEELYPINEAHRNNVGNRDFTYLFLEDILFYQRPLKSKKSLIDNCPYEENQGLDKETGEIKSFPVKCIAKSHPLFQEFRLWQFIINLRIYRKDLAQDVDVTNELLKTEEDYVALFDWLNGKKEIDQKAFLKYPVFGLKKEIENYRWNYVQDKPYPCNETRSLMLARLEKCDISIEFLTKENEEALWHILYSVEDKNEIVKALQKFADKHDLNASFVDVFQKFPPFKKEYGSYSAKAIKKLLPLMRMGKYWSENSIDKGTRERIDKIITGEYDEKIENRVREKAIHLADVSDFKGLPLWLVCYIVYGRHSEAKEIIQWKSPADIDSYLRSFKQHSLRNPIVEQIIIETLRVVRDIWKQVGNIDEIHVELGREMKNPADKRKKMTQQMSENENTNLRIKYLLTEFLNPEYEVENVRPYSPSQQDILRIYEEGVLNSVSDLPEEISDILKKFTETDLKKRPSRSEVLRYKLWLEQKYRSPYTGEVIPLGKLFTPAYEIEHVIPQSCYFDDSFSNKVICEAEVNKLKSNLLGHEFIVKHHGEIVELPFGKKVRIFTVDEYEQFVKDNYSRTRSKMKKLLMDDIPEEFVTRQLNDSRYISKVVKSLLSNIVREKGEEEAISKNVIPCTGGVTDRLKKDWGINEVWDKIILPRFQRLNELTGTNKFTTKNVGIQEIPTMPLELQKGFNKKRIDHRHHAMDAIIIACANRNIINYLNNESATAKAELSRYDLQKMLCDKAKTDNNGNYKWVIRKPWASFTQDTYLALENIIVSFKQNLRVINKATNRFLHYNEEGKKIFVKQGKGDNWAIRKSMHKDTVFGEVNLRRIKTVALNEAMKNPQSIVVKDFKRKLLELWNLGFDAKRIKKYFEDNRETWSDINLSKIEVYYFSKDTKDRFFATRKPLDTSFDRKKIENNITDTGIQKILLRHLELKDNNPDIAFSPDGIDEMNRNIIQLNNGKYHQPIIKIRWYEQADKFAVGQTGNKSSKFVEAAKGTNLFFAVYESNILDKKTNTIIKKRNYATIPLNVAIERQKQGLPVAPEDENGNDPIFVLSPNDLVYLPTDDELANGIIAQPLDRGRIYKMVSSSGEQCFFIKHIVANVLVDKFEFSPLNKMERALTGEMIKMICIPIKVDRLGNVLESSSSYKK

SEQ ID NO: 22734 - protein, 1432 aa, unidentified
  REGION 1..1432: note = Cas Enzyme sequence
MTQKILGIDLGTNSIGTSVRNTDLGNNLVDQLEFFSSDIFNASVSKNTNGREYSLASDRSAHRRGRRLNDSRRRKLWATLDLLIKNNLCPMAPESLEQWRTYDKKKKLFRQYPIDDKAFHSWIILDFNGDGKPDYSSPYQLRRELVSVQLDFNQAVDRYKLGRALYHIAQHRGFKSSKGETIAEQEKQEDDSKKNKNNALTEEHVDVVNAMKASEEKLSKGLLAYMQEHNLKTVGAAFAQLEDEGIRIRNNSEYKAIRSQHQDEIKEIFKFQKGLSNQTQLLDTLISEKQGIGTIFYKRPLRSQRGNVGKCTLEPNKPRCPIGHPLFEKFRAWTFINNIKAKSPDSDSAEPLPMDLKINIYNKLFLSRVKADFKFEEIRHFIEKQWGVALSKADKTINYRDDTSVAGCPITARMIKVLGEDWENFQVIGTKERQTQGKSNNALHQVCYTAEDIWHLCYDAEDPEQVRVFAEQALGWDEKKAAELVRLWSAIPQGYAMLSQKAIRNINRMLLFGLKYSDAVLLAKLPDILELSDEDIQTIIKKAQQLEEVVNEEKRIGNIVNSLIANYKAESLEHRFADHNYEYQLDESDEREIIKHIESNIGKQCWELMDADEQISILEGVRSGYQAFFASYKRNYIELPQLGERLVELLSKEYPSVEKREWERLYHPSQIAIYRPILLDKSDEKRRLGNPDIGAIKNPTVMRTLNNLRRRVNQLLDDGVLVPSETRVVVETARELNDANAKWALEKYQKTRRDENAQIKKILEEFYSKPNGITDTDVDKARYVIEQCEEDNYKSKKEIGTYSKDIQKYKYWLEQGGQCLYTGRIISLSNLFDSNAFDLEHTIPASVSFDNSDQNMTLCEAHYNRFIKKNNIPTAMPNYEKDVTIDGKLYTAIKPRLEKWKKRIERLSRNVEYWKVQARRAQMKDRKDECTKEKLLWQMELQYWRDKLQRFTILEVTDGFKNSQLVDTRIITRHATLYLKSVFENVEVQRGNTTAEFRKILGVQSVEEKKDRTLHSHHAIDATILTTIPTAAKRERILELFYKVQEKERILKNCSGDARIGLKQDLEGLQAKLKKEVADCRLGGEISQLGNFINDKIIINHCVKDQTLTPSHKRLRRRGRVVGGKEHPIWQTGDTLRGKIHKESYYGAITQYAKDEDGNVLFNDGKPKIDPTIWYVIRRELKHKKSAQDTGFASWDDLEKVIVDKNLFKLMKEQFPEETSFKDACEQGIYMIKKGEDQEHNIKTHRIRHIRCHTSVRSALKIKEQLNKSTKDYKQYFYAESGDLYTMCCYTNGKKKEYRPYRLYDIAQHRKAGIEDIPEFITDKKGNRLELSYKLCSGDMILLYENTPEELYDMDPVNLKQRLYRVDRFESKGSTIYLTNHLIANGEVGHSIKDYNQMPPTVRCGVNTLKFLIMGEHNDFVIKGNNIIFNHR

SEQ ID NO: 22735 - protein, 1190 aa, unidentified
  REGION 1..1190: note = Cas Enzyme sequence
MSKHVLGLDLGVGSIGWCLIALDAQGDPVEILGMGSRVVPLNNATDAADFSIGKAFTANQERTARRTMRRGFARYQLRRYRLRRELEKVGMLPDAALIQLPLLELWELRERAATAGRRLTLPELGRVLCHINQKRGYRHVKSDAAAIVGDEGEKKKDSNSAYLAGIRANDEKLQDEHKTVGQYFAEQLRQSQSESPTGGISYRIKDQIFSRQRYIDEYNQIMAAQRVHYPDILTDEFIRMLRDEVIFMQRPLKSCKHLVSLCEFEKQERVMRVQQDDGKGGRQLVERKIKFGPKVGPKSSPLFQLCRIYEAVNNIRLTRPDGSPRDITPEERVKIVAHLQSSASLSFAALKKLLKEKALIADQLTSKSGLKGNTTRVALAAALQPYPQYHRLLDMELETRMMTVQLTDEETGEVTEREVAVVTDSYVHQPLYRLWHILYSIEERDAMRRALITQLGMKEEDLDGGLLDQLYRLDFVKPGYGNKSAKFICKLLPQLQQGLGYSEACAAVGYRHSNSPTSEEITERTLLEKIPLLQRNELRQPLVEKILNQMINLVNALKAEYGIDEVRVELARELKMSREERERMAEGNRRREKENKAIAEKIRECGLFPTKSRIRKYMLWEEAGEQCLYCGQILTLSQCLNGDDMEVEHIIPKSVLYDDSYGNKTCACRRCNKEKGNRTALEYIRAKGWEDEYMERINGLLDKKAISYSKHQRLRWLKEDIPSDFLERQLRLTQYISRQAMAILQQGIRRVSASEGGVTARLRSLWGYDDILHTLNLDRYDSMGETERVSREGETTEKLRITNWSKRMDHRHHAIDALVVASTRQGYIQRLNRVSSESEREAMSGEIEVQKATKTDKLSLLERWLTQRPHLSVRAVSDKVAEILISSRPGKRVVTRGRNIYLRHGKKCVQSGLLVPRGALSKETVYGQITVNGEPQIVCKYDLHSLKAKDVDYVVDLALRKRLKELLAQHGGKEKEAFAGDVYMDEAGTQGPIRSVRCFTGLDRGKMKAVKYDEQGDAVGFVSTQNNHHLAIYRTPKGKLVESIVTFWDAVDRARYGIPLVITHPREVMEQVLLRGDVPESVLSLLPPSDWVFVDSLQQDEMVVIGLSDEELWRALEAQDYRKLSEHLYRVQNLSSLYYVFRYHLETSVADNKNTSGRIPKFHRVRSFSDYERRNVRKVRVDLLGRISLL

SEQ ID NO: 22736 - protein, 1481 aa, unidentified
  REGION 1..1481: note = Cas Enzyme sequence
MKTILGLDLGTNSIGWAKVCVDDNGNYTREIKLGSRIIPMSQDTLSNFDKGVTESPTAARTGFRGIRRIRERALQRRERLHRVLHVMGFLPPHYENAIGWYREEATTYGKFLDNAEPKLAWEKQEDGSMRFLFMDSFYEMMADFAKYQPGIVADGRKIPLDWTLYYLRKKALTQAIRKEELAWILLNFNQKRGYYQLRGEEEDEENPTKREEYYELKVVGVEAAEEGKGGNRWYNITLENGWIYRRQSKIELNDWIGKVRPFIVTTEYEIDGVTIKKDKNGEVKRSFRAPSEDDWGLRKKRTESLLEESGKTVGTFIYDHILSEPADKIRGNFVRTIERKFYKKELEAILREQSKHHKELKKQDTLIACIKELYPNNKPHQDSLMKKDMAYLLITDLIFYQRPLKSKKSLIADCPYEYYEYVIKETGEIKRQAIKCIAKSNPYYQEFRLWQFIINLRLFNRTNDKEVTSEYLSSMEDYTRLFTYLNDRKDINQETLLKDFCKQKKVKMGMEKEFPIRWNYIEDKEKKYPCNETRHELLAALGKAGIDHSWLDDKELFYRLWHLLYSVESKEEAEGALRKLNDNDDFVNAFLKIKPFKKEYGAYSEKAIKKLLAVMRMGDLWNETDICEQTRDRIQNIIKGDIDEKIKDRMGRTFCQISDFQGLPEWLACYVVYGRHSEATDIQRWTKPENLMAYINGFKQHSLRNPIVEQCILETLRTVHDIWKEAGHIDEIHIELGRSMKSTADQRARMSKSIIQNENTNLRIKSLLMELKNAKEFENVRPYSPMQQEILRIYEEGALQELTKEDAQYTEISKISQMAQPSANELLKYRLWLEQKYCSPYTGKPISLSKLFTSAYQIEHIIPQSRYFDDSFTNKVICETEVNQLKSNMLGYEFIKKHGGEIVHCTMIGDVKIYDAKEYSNFVTEHYANNRRKKEKLLMEDIPQEFLNRQMNDSRYISKKVMAILSYIVRGEDEQEAKSKFVIACSGGITDRLKQDWGLNDVWNSIVYPRFERLNKLTNTENFGRWENKEGKQVFQTSVPLELQKGFSKKRIDHRHHAMDALVIACASNNIINYLNNESAKSQEKREDLRKKLCDKNRIIRKPWETFTQDAHTALENIVVSFKNYIRVINKATNYYEKYDKNGKKGIAEQKGQDMWAIRKPMHKETVFGQVNLQRKVTIKLKDALEKIPAICDKKLRDYINILVAKQFNKKQILAHFKSINYRLNMKSVDKVVVWQFSNEKEPMVATRKPIDTSFDDKRIATITDTGIQNILRNYLKAKDNNPNIAFTPEGIAEMNKHITEYNNGKQHQPILKVRVSEPKGAKYQVGETGNKTSKFVEAQKGTNLYFAIYEDKEGNRSYNTIPLNEVIERLKQGLSPVEDLNKQGEKLKFYLSPNDLVYVPTEEEKLSSECKLNKEQIYKMVSATSNQCFFTPHRTANSIVNKVEYSPLNKMEKTILGEMIKSVCWKLEVDRLGNIHKIIK

SEQ ID NO: 22737 - protein, 1069 aa, unidentified
  REGION 1..1069: note = Cas Enzyme sequence
MAAIAIDDDGKPTEILSAISLIHDSGVDPDSAKSAATRLATSGIARRTRRLYRRKRKRLAKLDKFISSQGWPLKEFEKYEDPFYPWRVRAELATTAITDQQELGEKLSIALRHIARHRGWRNPYSKVTALYTVTEPSDAFLAMQEECAKQLGRTIPETITVGQLVTGMNLGKTRLRGENSLLAARPRQSDNANEIHTIAKVQGLSNELVRQIIDHVFAAESPKGSAAEQVGKDPLQPTKKRALKASDAFQQYRIAALIGNLRIRGGKGNRRLTTEETRLVFDYLRSLPAKQEPTWQLVAEQLKIDRGNLVGTAIMTDDGERAGAKPPVHDTNRIMENTKIKPLATWWKSADADARAAMVKALSNAEVDDFDSQAGAQVQEFFFGISDEDQEKLDGLHLPIGRAAYSEDTLDRLTKRMIGEGMDLYEARQAEFKISNDWAPPAPEIGERVGNPAVDRVLKATARWLNAAERQWGAPKSVNIEHVRAAFMSESSARELDRDNQQRAKRNVKVVAEMQEKLGIEGRPSRADVWRFQSIQRQNGKCAYCGAEISFKNSEMDHIIPQVGEGSTNTRDNLVAVCRECNSSKSNIAFAVWAENTSRPGVSVQKAIERTHHWVTDSGLRKPEFDKFRKQVCDRLRRKATDEPIDARSLESVAWMANELRSRIAQKFKDGDTKVRVYKGALTAEARRASGISGKLEFVDGKGKSRLDRRHHAVDAAVVAFTSNYVAETLALRSNMKFDQELRRKAPQWREFTGSDHVHQVEWTKWKYRMQALAELLNNALVQDRIVVMHNLRLRLGNGAAHEDTIGKLTRLKVGDAISTTDIDRASSEALWCALTRDPDYDPKTGLPENPNRTIRIHGTHLTASDEITVFPVAAASIPIRDGFAKLGSNYHHVRLFRVPSGKKYKYCLMQVYTVDLLKFRKEDLFTVELKPQTISVRTCEALLRKALANGTAEYLGWLVSDDELLIDTSSFDTPGIVKLREEYGPVNRWRLAGLTSVTRLNLRPLYLSKEGLKPNVNPEIKKIIDNRSWIITVNKLFSSGHVKIIRRDALGRPRLHSAAHLPICWEVK

SEQ ID NO: 22738 - protein, 1560 aa, unidentified
  REGION 1..1560: note = Cas Enzyme sequence
MLTCIYLCRTLLFFAPYADFLYKKNSSFGKNNNTMKKILGLDLGTNSIGWAVLNAADDNSLKYIEAAGSRIIPMDAAILGDFDRGNSISQTAERTRIRGMRHLRERYLLRRARLHRILNLLGFLPFHYAQDIDRYGNFSADMEPKIAWCKNLEGELEFIFIESFNEMLEDFRKNQPELVADNKKVPYDWVIYYLRKKALEKKISKEELAWILLNFNQKRGYYQLRGEDDDESMKTAKTRQYFDKQIIKNIIDTNQTYKGQRILIVELQNGDKGKIFKKEIPDWIGQEKNIIVTVDIDKDGNDKYEESGSLSCRFKIPTDAEWESEWKLIKMKTQKDLDESNKTVGTYIYDSILQNPTQKVRGKLVRTIERKYYKAELKQILEKQTEFHSELQDKDLYIECLNELYSNNDTHRNAITDRDFVYLFMNDILFYQRPLKSKKSLIDNCPYERNIYIDKETGEIKYSPIKCIAKSHPLFQEFRLWKFISSIRIYQRESVVEVVDKQLDLFSSQSTSVQKLVTDVDVTDKFLTCENDYVALFEWLNKKKIIDQKEFLKYRPFGLKGDIDNYRWNYVEDKSYPCNETHAMILTYFAKAGISEDILTKEMEEALWHILYSVEDRQEITKALRTFASKYHLSDSFVKVFSNIPPFKKEYGSYSAKAIKKLLSLMRMGKYWSEDAIDVNTRGRIDKIVTGEYDEKIRDRVREKTIRLNDIRHFRALPDWLACYVVYDRHSETREITEWKSPEEIDEYIRNFKQHSLRNPIVEQVITETLRTVRDIWKQVGCIDEIHVELGREMKNPADKRKRITSQIIENENANLRVKALLTEFVNSEFEIENVRPYSLSQQDILRIYEDGVLNSVAEVPGDIAGILKKFNENDAKKRPTTSEILRYKLWLEQKYRSPYTGEMIPLSKLFTSAYEIEHVIPQSRYFDDSFSNKVICEAEVNKLKDNALGYEFIKKHHGEKVELGFGKIVEIFSVSVYEQFVKDNYSRNRGKMKKLLMDEIPEQFIERQLNDSRYISKVVKTLLSNVVREKAEQEAVSKNVIVCTGGVTDRLKKDWGINDVWNKIVLPRFLRLNELTNSTNFTAKNAAGNEIPAMPLELQKGFNKKRIDHRHHAMDAIVIACANRNIVNYLNNESASRKAKISRHDLQAILCDKVRTDDKGNYQWRVKKPWDTFTQDVYVALENIIVSFKQNLRVINKTSNYYWHYENGKKVLVKQVKGDSWAIRKPMHKDTVFGEVNLRKVKSVSLNEALKNPQFIVEKDLKRQLLSLLQQNFDIKKIKKYFEEHKDIWSDISLSKMNIYYFTKETKDRYFATRKPLDASFDKKKIESCITDTGIQQILLRHLELKENDPERAFSPDGIDEMNRNIIQLNKGKGHHPIAKVRVYEKADKFEVGQRGNKSSKFVEAAKGTNLFFAVYETEYPDEKTNSIVRKRNYATIPLNIAIERQKRGLSTAPEDEKGNVPSFVLSPNDLVYLPTSEDIVNGHITQPIDKSRIYKMVSSSGSQCFFIKHNIANIIVDKYEFSPLNKMERAISNEMIKEICIPVKVDRLGNIVKLGKSE

SEQ ID NO: 22739 - protein, 1509 aa, unidentified; identical to SEQ ID NO: 22132
  REGION 1..1509: note = Cas Enzyme sequence

SEQ ID NO: 22740 - protein, 1190 aa, unidentified
  REGION 1..1190: note = Cas Enzyme sequence
MARKVLGLDLGIGSIGWCLITLDKDEKPQSILGMGSRIVPLSTDDATEFTQGKAISKNKMRTVARTIRKGMDRYQLRREALKKVLSEHGMLPDESLIKLPLLELWELRARAATHGEQLSLTELGRVLLHINQKRGYKHAKADEAAEAEAESKSKKEKEGYVAQVKGRYQALKEKGQTIGQHFAGELRANQQTAPRGVYYTYRIKEQVYPREAYLEEYDRIIAVQREFYPEILTDELIQRIRDRIIFYQRPLKSCKQLVSTCEFEKKERVVQVKRINKEGVEELVERTITIGPKVAPKSSPIFQVCKVWESIQNIRLYYPDGTERVLEQEEKQKLFDYLQKNDKLSLTALRKELKIKPKDKLWCDKLLEKGIAGNTTAAILRKAFKGYEQYEDLLRFDLVRRDSHEADEDGVIRPIIDESYQNEPLYKLWHILYSIEDRADMYRALVGQLGIKREDLDDGLMDALYKIDFVKQGYGNKSAKFICKLLPHLQEGKMYSEAAEAAGVRHSDSMTAQERDERSLLEEIPLLQKNALRQPVVEKILNQMINLVNALKREHGEIDEVRVELARELKMSREEREEATKSNNAREKENKAIAERIKEDGLTPTKSRIQKYRLWQESDECCIYCGKRVDRVQFLRGEEIEVEHIIPRSILLDDSMSNKVCACRSCNQEKGNRFAMEYIQSKGWEQDYIKRVDSLFHDKDKKISYSKRQRLLMQPKDLPEDFIERHLRLSQYISREAQGILRKGIRLVSASEGGVTAKLRQLWGYDNILRDLNLDRYRSMGETEVVTVEHRDGERTDERIKDWSKRKDHRHHAIDALVVACTRQSYIQRLNRVNAEADREEMDAFIKEQQQEYKLSKREKLSLLEHWLIRQPHFTTGEVTRHVEGILVSLRPGKRTISRGRNIYKRSGKTDVQRGVLIPRGALSEETVYGVICVDGENKVVCRYPLQSLKAKDVDYIVDEVLREKVRERITQRGEKEAFAEPLYLDDAQKQEVHSARCFTGKDLSKLIPLRYNDENEAVGFVAPGSNHHLALYRDVDGRLVESVVTFWQAVARIRYGLPAIVTHPREVMEQAFSIPDLPEEVLEALPISRLRLMEVLRINDMFLIGMKDGEIQAAIEGEDYPTLSRHLYRVQKLSSMYYVFRYHLETEVKDEKNTSGEIPKFYRITSFSAYQKLNPRKVKIDLLGRISLA

SEQ ID NO: 22741 - protein, 1380 aa, unidentified
  REGION 1..1380: note = Cas Enzyme sequence
MKKILGLDLGTTSIGWALVNECENEDEKSSIIRLGVRVNPLTTDEKGNFERGKAITTNSDRQQTHGARINLQRYKLRRKYLCDCLNKHGWIGSEPMYEDGKSSTFETYMLRAKAAVEEVSLHEFARVLFMMNKKRGYKSNRKANDKEEGKLFDGMSVAKKLYEEHLTPAEYSLQLLNKGKRFTPEYYRSDLVEEFEKIWNEQKKYYPEILTDEFKRQLEAKTKTSTSKIFLGKYGIYSADLKGLDRKLQPVKWRVEALRQQVDKDVLAFVISDLKGQIANTSGLLGAISDRSKELYFNKQTIGQYLWASLKENPHVSVKNQPFYRQDYIDEFEKIWETQASFHKELTPELKQEIRDIIIFYQRPLKSKKGLISVCELEQRKVKVTIDGKEKEITIGPKVAPKSSPMFQEFRIWHNLNNIQLIDNERNSKRSLYEEERNLLYEELSIRDRLNKAEALRVLGKKNRQWDLNYKELEGNRTQATLFSYYNKIIMMTGHEECNIKQLKAPEIRHYIKTIFKNLGFNTGILEFDSSLNGHELEQQPMYQLWHLLYSYESDKSRTGNEALLKKLETIFGFPREYASVLAEVAFEDSYGNLSVKAIREILPHLQAGLDYSQACEEAGYKHSRRSLTKEELDEKEYKEKLELLSKNSLHNPVVEKILNQMINVINAVIDEYGKPDEIRIELARELKIGAAERENMTRSISQGNAENKRIREILEKEFALSYISRNDIIKYKLYEELKPNGYKTLYSDTYIPKDKLFSKDFDIEHIIPKARLFDDSLSNKTIEARDVNIAKSNKTAFDFISGKYGQQGIEAYKKKLYILLQGGSINKAKYNRLLMKEADIPSDFINRDLQNTRYITRKAYEILSDLVRVVTPTSGAVTSRLREDWQLVDIMKELNFEKYQKLGLTEVIEDKDGRKIKRIKDWTKRNDHRHHAMDALTIAFTKPSFIQYLNNLNARSNKGDSIYAIENKELHREDGKLCFNAPLPINEFRAEAKKHLKAVLVSIKAKNKVMTQNVNKIKTKHGVIKKVQLTPRGELHNATFYGTKKRPIIKMVKVGAALDEVTIKKVSSSFIRKALQDRLYEYNGDAKKAFTGRNSIDKNPIYIDEERKRTVPALVKTIEWEMYHPTRKLILPDLKIDKVIDKGIRDILKTRLAKFNGDAQKAFSNLDEEPIYKDEAKKIILKRVSLEGVSSVIPLHTLKDRSGMPITGKDSEPVLGDYVQTSNNHHVAFYIDENGNLQDNIVSFFEAAERKSQGVPIIDKNFNHDIGWRFLFTMKQNEYFVFPNEVTGFNPSEVDLMNEANYDIISPNLYRVQTMSRVVYGKSIIRDYVFRHHLETTVEANANLKGLAYKQLKSLSYLEGIVKVRINCIGKIVAVGEYD

SEQ ID NO: 22742 - protein, 1494 aa, unidentified
  REGION 1..1494: note = Cas Enzyme sequence
MKTILGLDLGTNSIGWAKVCVDDNGNYTRDIKLGSRIIPMSQDTLSNFDKGVTESPTAARTGFRGIRRIRERVLQRRERLHRVLHVMGFLPPHYENAIGWNREEATTYGKFLDNAEPKLAWEKQEEGSMRFLFMDSFYEMMADFAKCQPGLVADGRKIPLDWTLYYLRKKALTQAIRKEELAWILLNFNQKRGYYQLRGEEDEEDPTKREEYYELKVVSVEAAEEGKGGNTWYNVTLENGWIYRRQSKIELNDWIGKIRQFIVTTEYEKDGITIKKDKNGEVKRSFRAPSEDDWGLRKKRTESRLEDSGKTVGEFIYDHILSEPADKIRGNFIRTIERKFYKKELEAILREQSKHHKELKDLNMLVNCIKELYPNNKAHQDSLMKKDIIYLLITDLIFYQRPLKSKKSLIADCPYEYYEYVIKETGEIKRQGIKCIAKSNPYYQEFRLWQFIINLRFFDRTNDKEVTSEYLSSMEDYTRLFTYLNDRKEINQEILLKDFFKQKKVKRGMEKEFPIRWNYIEDKEKKYPCNETRHELLAALDKAGIEHSWLDDKERFYRLWHLLYSVESKEEAEGALRKLNDNDDFVNAFLKIKPFKKEYGAYSEKAIKKLLAVMRIGTQWNEDDICEQTRNRIQSIINGDINEKIKERMGRTFSQLSDFQGLPEWLACYVVYGRHSETTDIQRWTKPENLMSYIKGFKQHSLRNPIVEQCILETLRTVHDIWKEAGHIDEIHIELGRSMKSTADQRARMSKSILQNENTNLRIKSLLMELKNAKEFENVRPYSPMQQEILRIYEEGALQELTKEDDQYPEISKISQMAQPSAKELLKYRLWLDQKYCSPYTGKPISLSKLFTSAYQIEHIIPQSRYFDDSFSNKVICEAEVNQLKSNMLGYEFIKKHSGEIVHCTMVGDVKILDAKEYYNFVTEHYANNRRKKENLLLEDIPQEFLNRQMNDSRYISKKVMALLSNIVREEGEQEAKSKFVIACSGGITDRLKHDWGLNDVWNSIVYPRFERLNKLTNTENFGRWENKEGKQVFQTSLPLELQRGFSKKRIDHRHHAMDALVIACASNNIINYLNNESAKSQEKREDLRKKLCDKNRIIRKPWETFTQDAHTALENVVVSFKNYVRVINKATNYYEKYDKNGKKGIAEQKGQDMWAIRKPMHKETVFGQVNLRRRVTVKLKDALEKIPAICDKELRDYINNLVAKQFNKKQILAQFKNINYRLNMKYVDKVDVWQFSDEKDPMVATRKSVDTSFDTKRIATITDTGIQKILLNYLETKDNDPNIAFTPEGIAEMNKHITEYNNGKQHQPILKVRVSEPKGAKYQVGETGNKTSKFVEAQKGTNLYFAIYEDKEGNRSYSTIPLNEVIERLKQGLSPVPDANEKGIPLKFHLSPNDLVYVPKTDEENEIKMGQIYKFVDSSGTTANFIPHRVSNLIYNVDKKIAENFCNHEIIQNEYGIGSPQSKNQKSITGEMIKAVCWKLEVDRLGNIHKIIK

SEQ ID NO: 22743 - protein, 1193 aa, unidentified
  REGION 1..1193: note = Cas Enzyme sequence
MLMSKHVLGLDLGVGSIGWCLIALDAQGDPAEILGMGSRVVPLNNATDAADFSIGKAFTASQERTARRTMRRGFARYQLRRYRLRRELEKVGMLPDAALIQLPLLELWELRERAATAGECLTLPELGRVLCHINQKRGYRHVKSDAAAIVGDEGEKKKDSNSAYLAGIRANDEKLQDEHKTVGQYFAEQLRQNQSESPTGGISYRIKDQIFSRQRYIDEYDQIMAAQRVYYPDILTDEFIQMLRDEVIFMQRPLKSCKHLVSLCEFEKQEKVMRVQQDDGKGGRQLVERKVKFGPKVAPKSSPLFQLCRIYEAVNNIRLTRPDGSPRDITPEERAKIVAHLQSSASLSFAALKKLLKEKVLIADQLTSKSGLKGNSTRVALAAALQPYPQYLHLLDMELETRMMTVQLTDEETGEVTEREVAVVTDSYVRQPLYRLWHILYSIEERDAMRRALITQLGMKEEDLDGGLLDQLYRLDFVKPGYGNKSAKFICKLLPQLQQGLGYSEACVAVGYRHSNSPTSEEITERTLLEKIPLLQRNELRQPLVEKILNQMINLVNALKAEYGVDEVRVELARELKMSREERERMTRQNGERKKANDKVAEKIQKCGLFPTKSRIRKYRLWEEAGRQCLYCGRSIGEKQCLNGDDMEVEHIIPKSVLYDDSYGNKTCACRRCNKEKGNRTALEYIRAKGWEAEYMERINGLLDKKTISYSKHQRLRWLKEDIPSDFLERQLRLTQYISRQAMAILQQGIRRVSASEGGVTARLRSLWGYDDILHTLNLDRYDSMGETERVSREGETTEKLRIKDWSKRKDHRHHAIDALVVASTRQGYIQRLNRVSSESEREAMSGEIEVQKATKTDKLSLLERWLTQRPHLSVRAVSDKVAEILISYRPGKRVVTRGRNIYRKKTADGREVTCVQRGVLVPRGELMEASLYGKILSQGRERIVKRYSLHALKGEVVDPRLRELITTYNQELKSREKGAPIPPLCLDKDKRQEVRSVRCYVDKPSVSSAIPIRFDERGTAITFVQSGNNHHLAVYRTPQGVLEESIVSFWDAVDRARYGIPLVITHPREVMEQVLQRGDIPESVLKSLPPSDWMFVESLQQDEMVAIGLSDEELQSAIEAQDYRKLSEHLYRVQSLSSKYYVFRYHLETSVKDRKNTSGRIPKFHRVRNLPDYEKRNVRKVRVDLLGRISLL

SEQ ID NO: 22744 - protein, 980 aa, unidentified
  REGION 1..980: note = Cas Enzyme sequence
MLSDFRSHQPDLFYTKRNGEESKIPYDWTIYYLRKKALSQKISKEELAWIILNFNQKRGYYQLRGEEEVENPNKEVTYYSLMVTEVTAEAPNKKGEIWYSIQLENGWVYRRTSKIPLDNWRGKSRDFIVTTELEEDGSVKRDKEGKEKRSFRAPDENDWNLLKKKTEQDINTSQKTVGTYIYDHLLQNPNEKIKGKLVRTIERKYYKEELKAILEKQVALQPELFTDQLFADCIRELYSKNEAQQRNLAARDFVHLFVEDIIFYQRPLRSQKSTIANCSLESRSYIDKDSHTRKEVSLKVCPKSNPYYQEFRVLQWLQNLKIYEIESDREVTHELIKTLEDKQQLFDFLMAQKEIDCEELLKYFLSLTYPNAKEKALKSELKKWKDTYRWNYVYDIGEKSSKKYPMNETRYDLKRYLERVANLPDDFLSSEVEYMLWHLIYSVTDKVAYEKGLKKFAQKHHLDEDSFVESFKKFKPYPSEYGSFSEKAIRKLLPLMRFGSYWDFNHIDKNTQKRIEDLITGVENEEIRTILREKAEKYQLEKETDFQNLPLWLAQYIAYNRHAEASSLEKWTSVNDLETYLNEFKQHSLRNPIVEQVITETLRVVRDIWQQYGQGKADFFDEIHIELGRELKKTAKEREELSKQNQKNEDTNLRIKALLAELGEDSTIENVRPYSLMQQELLKLYEEGVFSSSMEIEDDIEKIHKKATPNKAELQRYKLWLEQKYKSPYTGQIISLKRLFTEDYEIEHIIPQSRYYDDSLSNKVICESAVNKLKGNQLGLEFIKNHYGEKVHAAGKEVSIFTEEQYKEFVKNHYANNSGKMKKLLLENIPEKMVARQMNDTRYISKYISEILSKIVRADERDEGVNSKNVILCTGKITTALKQDWGINDVWNDLILPRFERMNDLTQTSLFTSYNEKYQKYLPTVPMEYSNGFQKKRIDHRHHAMDAIIIACATREHINYINNQHALEKGKTKKKNKSLV

SEQ ID NO: 22745 - protein, 1556 aa, unidentified
  REGION 1..1556: note = Cas Enzyme sequence
MTKTTLGLDLGTNSIGWALVKSNAEDKSDFGTSIGKILGMGSRIIPMSQDILNNFSAGVSHSQTANRTAYRGARRLRERHLLRRERLHRVLNILGLLPTNYAKKIDFDKRLGKFLPNTEPKLTLDEEGKFVFMKSFLEMINDFPEGTKVPLEWTIYYLRKKALTDKISKQELAWILLNFNQKRGYYQQRGDIEEEVKDKLVEFHTLKITDVIDTGENRKNETWYNCKLENGWVYKRASKVPLNDWIGKTRDFIVTTSLDADGNPKVDDEGAVKRTFRSPKEDDWTLVKKKTEKMLEDSNKTVGAFIYDTLLEKKKGENIKQKVRGKLITTIERDFYKDELLQILNKQKEHHAELRDEDLYKKCVNELYKSNEAHRNMIANKDLTYLFVEDILFYHRPLKSKKHLIGTCRFEKRSFINAEGKKEEKGIRGVPKSHPLFQEFRIWNWINNLRIIQKQKEIDGKLKVDEDVTQLHLKNSKDKTHLFDFLNTKKQINEKQLLGHFGLEQKTHKWNYVRDDKVVKYYPCNETRYDLLKYFDKAGIEIILEEEEDAKSDNKPSLTYKQFETPLWHLLYSVDDLKQLKKGLTKFAGKNNLPDAFVDAFIKFPKLDKDYGSYSLKAIKKLLPLIRVGKYWSEEDIVHKFGLYYGNIKTVIKDKLKQQQKAKEENKHFNSDFLAKLQLLDDAPSAHQGLELHTACYATYARFAEADDTTKWKNPKAISDFLKNEFKQHSLRNPIVEQVISETLRLVADVWQQYGNGEKDFFDAIHIELGRELKNPKDVREQITASNLKNQNTNQRIRYLLAEFAKDPKIKGVVPYSTHQQEKLKIFEDNIVSNYEMPDDVKKIASAEQPTQKQIERYKLWLEQKYVSPYTREPIKLSDLFDRGKYEIEHIIPQATYFDNSFNNKVICEAEVNKLKDKELAYNFIENNEGTEVQVNGGMKTVKILSIEKYEKLVEQNFSGNDKKKKNLLRTEIPTKMIERQLNDTRYISKKIMGLLSNIVREPGELDHKAKRILNVNGAVTARLRNDWGLNNIWNELITPRFKRMNKITNSNNYGSINEKIKKFLPDVPIDEKKDFKKKRIDHRHHPLDAVLIACCTLNHTNLLNNETHLRAGKTKEEKKKIREDLKAKLMYNKKTTNHKTGKTEKETAFKKPWENFEQDVLTHLKKTVASFKQNTRVINKTTNYYQRFIKNENGQLKKKSVKQTKGDSWAIRKPLHKETVYGKVKVKVDNNKIITLNKALEQPYLIVDKQIRKHVLESIKTLNTTDVKLVKKHFKTNPIIIEGKKIERVKVWQWLEGTASRNLLDTSFNEKKIRNITDSGIQKILLRHLNKPNYQNQTDEEGKDIAPEKLAFTPEGITDMNVNIAALNNGKFHQPIYKVRTWEEGSRFAVGYKNSKSTKYVEAAKGTNLFYAVYQKDDKRNYTTIPLNEVIEHQKQMAEEKIKDALPIPIHPNNGQFLFYLTVNDLVYVPLENENINEIDFSNLNEHQINRIYKAVSFNKKQAFFIQANVAYPIKNKFEFSSLNKMERSINGDMIKAVCIKLNIDRLGNISLAKY

SEQ ID NO: 22746 - protein, 1180 aa, unidentified
  REGION 1..1180: note = Cas Enzyme sequence
MTMKKVLGLDLGVASIGWAYLEENGAKSRIIRTGVRIVPVTDQEDDFKAGRSISINADRTRYRGMRRNNQRWKGKRDKLADILKANQMYPDKELLTFKEIDPYNIGKEYPNRKKRKDGEDANLPVSLKLYHLRARAVDKKIELKELGRVLLHMTQKRGYKSNRKTDASPDETTEYLDKIKENSETLKANDETIGQHFYKKFKTDPHTKVRQKIFYRHDYQDEFEQIWTRQQKEYPDILTDELKHEIGTRTLFYQRPLKSQKGLISRCQFEPGYRVAPKSSPYFQAFRIWQNINNLEITDDELRTFDLTLKDKQKLFAFLNKKDGSKKSGILKELGYSSKKFDLNFDDAQGNRTKSRLLKIFKDNDIQDTSILDFDPFIENPENQPAYRLWHLLYSIEEPEHLYKALIERFSFTREQAIAVSKCKLEKDYGNISAKAIKKILPHLINGDKYSEACERVGYKHSDSLTNEEKENKELLPHLELIKRGDLRNPVVEKILNQLAHLVNEIIDSEELGRPDEIRVELARELKMNAKKRQQVSKSYNDRKKTNQKIREILQAPPFNFKNVSRNALDRYKLWEETGGISVYTGKSIKLTNLYDKSLYDIEHIIPKARLFDDSFLNKTICESHINKDKDASTAHDYMEKKGEKAYQAYVQRVKQIKSKPKRDRLMMAEKDIPEGFIERQKKDSQYIARTAIKMLETVCKNVHSTTGSVTDVLRHQWGLTDMMKELNFEKYKKQERIEWRERPSGERYFVIKDWSKREDHRHHAMDAIVVACTKQGYIQQLNNLNKTFVTEKTQSALRTSARKFAPPWASFRQDARKALSETMISFKSKQRVATKNKNKIKHRDKNRKPQELLTPRGFLHKETVYAKMKRYAEKRVPLNGKFKLETLDIIAHAIEKQAITKRLAEYDNDPKKAFKKLEDNPILVKGKRKTLTEVVVWETIYTIKKPLNALNKKQIEKDILDVGISRLVNERLDEHDGDLKKMIASLEESPIWVNEEKGICVKSVKLKTDLKNLKPLHENEKGKPIDFVNLRNNHHFAVYEDENGKFQFEKVSFWEAFERKKNGFAVIKTQHENGWRFVVSLAINEMIVFPKGNDEIDENFILNPDNYATVSEHLYRVQKLSSSGNAPKLNFRHHLATTLNNPNTEIFIQSLKHLNGIFKVTINRLGMITDVQKITPTEK

SEQ ID NO: 22747 - protein, 1135 aa, unidentified; identical to SEQ ID NO: 15227
  REGION 1..1135: note = Cas Enzyme sequence

SEQ ID NO: 22748 - protein, 1414 aa, unidentified
  REGION 1..1414: note = Cas Enzyme sequence
MKRILGLDLGTTSIGWAVINEAENEAERAEIIRTGVRVVPLSTDEQTDFEKGNPLTTNADRTQKRGMRRNLDRYQDRRDHLLDLLKTHGLISESTSLAETGKGSTHTLWQLRADAANKMIGLEQFARVLLTINKKRGYKSNRKAKDEDDGQAVDGMTIAKELYDNDLTCGQYGLQRLQAGRRHIPDFYRSDLKAELDRIWAKQREFHGELLGHELKDKIAGKAQKATWAILKEPWGLVGEKRTTKGFEKKVEDYQWRVDALTRALTLEQLAVVVQQVNGGISSSSGLLGAISDRSKQLLIQDLTVGQFLYAQIQQDPHSRVKGQAFYRQDYLDEFERIWEMQKDFHPQLTPELKHDVRDTVIFYQRRLKSQKGLLAVCEFEGTKQPVVDEQGQPALTKDGKPKMHSVGPRVCPKSSPLFQEFRIWQVLNNVELTYEGSEGTGDERSENGIQRKGKAWCLGPAYKAQLFAELSWTKELSATDVLKTLKLKPKEWKMNFKNIEGNRTNQKYMDAYAAMLEVSGHDDVDLDKLSAEERLKTVEEVLGALGVDTDLLHFDATLAGKEFEQQPAYALWHLLYSYESDNKSRTGNERLIKQLISKYGFNRECAEILVKVHFEEDHGSLSAKAIKKILPHLKEGHIYDVACDMAGYNHSHSVTAEENETRALIDALEILPKNSLRNPVVEKILNQMVHVVNKVIEVYGKPDEIRVELARELKKSAKERAEMTTSISAANSAHDVIRKEIAKLHPFNTGVRITRNDIIKYKLYEELKENGYKTFYTGVFIPREMLFSKDFDVEHIIPKTRLFDDSFSNKTLCEAAINRDKSSATAMDFMHTKYGADSDAVAQYTERVERFFKKTNPAKYKKLMMKEADIPDGFIERDLRNTQYIARMSMGLLRQVARTVTATTGSVTDRLRQDWELINVLQELNWEKYEKAGLTYTETNKDGAAIGKIKDWTKRNDHRHHAMDAIAVAFTRPSHIQYLNYLNARRDEDHKKHKVIHAIEQKETDIDSKKKRYFKPPMEINLLRDQVKCHLEATLISFKAKNKVTTWNVNKSKTEKGYHRKKEQTPRGQLHKETVYGKQQVYVTKLAKVGPGFDQDTIAQVAKKSHRQALLLRLHASGGDPSKAFGGKNALSKNPIWLDEHHKEQVPEKVKLVAVETQYTIRKLITPDLKLDKVVDGRAKRLLQERLNKYAGDAQKAFSNLGQDPIWVNGKNGAQLKSVTITGVSNAEALHIKRDLHGKPVLDADGKEIPTSYVQTGSNHHVAIYRDGEGNLQEKVVSFYEAVARRLQDEHVVDRTYNEVLGWVFLYTMKQNEMFVIPNKIAAFDPTMIDLMEPKNAARIAPHLFRVQSLSRSEYGNNVIRDYQFRHHLESQLLNAKELQNTTYYKIKSLKDLEGLQKVRIDHLGRIVHVGEY

SEQ ID NO: 22749 - protein, 1512 aa, unidentified
  REGION 1..1512: note = Cas Enzyme sequence
MKKILGLDIGTNSIGWAFIESNAYENPEALDGKIIQLGSRIIPMDADSLNKFEAGNPVSKAAGRRQARGARRLNQRYKLRRTRLIEAFKILGWVPKEFPVNFKKLNKHNINKYLPYSNSLKNEVAEFFGTAGKRTIKGEECEISEDWIIYFLKAKALNTQVSLPELARILYHYNQRRGFKSSRKDNKFEDDATEVKYPLYEKWVEIVTVTSIAEKNKGEGKDSDYIFYEFTCKTTDLEFTAIKKRKNPLDWLNKNIEVEITKKTTKDQKITYTITEVDQNAWESRKKAWEKFLIAEGKHISETYLNELRKDRNFKIKQRIFDRKFYQDELKAIWKKQSKFYQNEFEDKNNISEIADSFYTHNTEKNKEIKGKDLFHIFFNDIIYYQRGLKSQKGLLASCQYETKAYKTKSGEIKIVGIQVTSKSSPTFQEFRIWQTIHNLKIIKKEEIENNKLKINIDVSVKYLTTENKERLFELFDSSIEVTHDSILRLFGFKKDIIENGEKTFEYKLNYPEDNFTGNETKGLFRKIFKKNGFVEEGEKYLNNKELFNHLWHIVYSLPEEKEIANALRNPKYFDLPEPLIKSISKMPEFKRQYSSLSTKAINKLLPLMRIGKYWNEFDINILFEKSEKYKDFDKAISDKNIPEILRHEIVKRDLKDIYDFAGLPTFLAAYIIYGRHSESANDTKYEKIDDFKINEIIPHNSLRNPIVEKVIRETLNLVKEIWKDENLGRPDYIHVELGREMKNSNKEREAIYKVNQKNRIERERITALLKELKYPNFNPDSPFDIEKFRLWKETGGNKGEDEFDLLFKNNNSEFIKDADIEKYRHWAEQNYRSPYTGRIIKLSELFSERYQIDHIIPRAKFYDNSFANKVVVEAEVNALKDNRLAIQFIEDSQGREIKLNSGEVTKVLTLEEYKDFADNVFTNKKKKRHLKLYEVPDDFVERQMNDTKYISKTVAQFLLPVANGSDTDAGLVYSSGNITSNLKNKWGLNKLWKEILLPRFVRLESILEEKLVILSDSKKADFHFAKDYKRIDHRHHALDALVVACTSRSHIKYLNSLNSLSNNKKDIANYNEWAKWKYLLNKKKQLENLENGMTEFASPWERFYLDAKDAIESVIVSYKPTTKLISKAINKYYKWVEVEKVDGEKIWEKKIHYQVAPKDDEKYWVAVRQSLFGQPFGKIHIAEYRNNVDFKKALQVQIAFNKREKFEWNSEDWRIAKKDIRKKINNILFKYDNNEQESIKYFAANPLFDDYGNKIDQLDLLHFKKYASKRVNIDETFTPDKIEKMPYSNLKNNWLTTLLREHLKEYNDNPKLAFKGEALEMLHKKSPYPINKVTRKESGTKIEKDNKLLEGDAGVNQYFIIEINKQINKKTGEEKVVRNYYTPNFLDTIERLAKGLPIHDVKPDSQYIILSPGDLVYVPTEEEKNNKIDWNNKKALAERIYVMKSTQTSAAYFLPASVSLLIQPYDPKLKKGEFESMNKSEKTIDRLQVIKENFIKLKVDRLGNISPHILM

SEQ ID NO: 22750 - protein, 1306 aa, unidentified
  REGION 1..1306: note = Cas Enzyme sequence
LNNIKNEIFMKKILGLDLGSSSVGWAFILEDEMESKILGAGVRLVSLSSDESNDFQKGKAISINKDRTLRRGARRSLERFKQRRDAILRKFKSIGFITNEFNQAEDSTLFTHYSYAIRSKAATEAVSKEEFVKVLLMLNKKRGYKSSRKDAPLVEGSQENDVIFDGMDVARKLYQQNLTPGQYALSVIEKGGEVPAFYASDLTNELRRIVTFQLVENENLPPDLLDLVLNKSRNATYYFFDKVLNISIAENKGSKEDIKKQRFIWRAEAVSQKVDASVLAFIIGDLNDQISKSSNYLGKISDNSKELLINNLTVGQFQFQALVENPHASQRNVVFKRTDYLNEFEQIWEVQKKFHPELTEELKKEIRDVTIFYQRKLKSQKHLISFCEFEPRNRVAPKSSPVFQLFRMWQNVNNLVSKNSLVIDEDVKEGIIEILSYNGTLSEKELSKLLGLDPSIVKLNFEKINGDQTRTNFLKVLIQLWEKQGNSKKNLGTPLTRMDVALILKDLGLPGDLLDLNLDLKENDFDKQPYYQLWHLLYSLDDDALVKSALINKFGFSESQAQAMLYVKLESNYASLSVKAMRKILPHLMDGLKDEEARAYFYKSQSSTTETKDLKETLDLVKKNSLRNPVVEKVLNQTINVVNAIIASDLYGRPDEIRIELARELRASNEERSAMTKNLMDGTKKNENIRKQLQENFRIQRVTKNDIIRYKLWEETGGVSIYTGNTIQASDIFGGKYDIDHIIPQSRLFDDSFSNKTLCERALNIEKGNQTAYSFLKQKYSPAEFEQYLSRVKDLEKSEKIKKTKAFKLNLTNEKIPDDFIIRQLNETQYISRKAKEILTDICSKVYTTTGSVTDRLREDWGLVDMMKELNFEKYKALGLTYEDKGKNGERLLKIKDWSKRNDHRHHAMDAITIALTKQAYILYLNNLNANIGGIVQGNIENKYTERIGGKIVFKSPMVNIRDEFKRALDTILISHKAKNKVVTKNKNKIKTKSGLVIQNTLTPRGQLHKETIYGSQNIYETKWVAIDAKMDVDLISKVANKQQRETLTARLFAFDNDPKKAFSGKNSPSNNPIYLDEHKRYTLNDKVKLVDLVPQFTIRKNVGPDLDVKKIEKVVDVGIKNKLMERIQAFGGDPKKAFSNLDENPIFLDKAQKITIKTVKMQGVSNALALHSYVDDDGILKPKDWVSSGNNHHVAIYEDENGDYQDEVVSFFTAVTRATSIPSLPIIQKHHEKGWKFLFTMKANELFIFPFEEFNPSEVDLTNPANYPQISKHLYRVQKLALKNYVFRHHLETNVEETKELKGIA

SEQ ID NO: 22751 - protein, 1382 aa, unidentified
  REGION 1..1382: note = Cas Enzyme sequence
MKKILGLDLGTTSIGWAIVNEAEDDKEQSEIIKLGVRVNPLSTDEQTNFEKGKSITTNADRTLKRSMRRNLQRFKLRKENLIEILKENGFITNDSLLSENGNKSTFETYRLRANAASKQISLEEFARVLLMINKKRGYKSSRKAKSQDEGQLIDGMEIAKKLYNDNITPGQLVLDLLKENKKYIPDFYRSDLQAEFDKVFDKQVFFHSNILSNELKEELKGKKRDAVWTICAKTFKDKGIELIGSKRQGKAAEQKNENYTWRVKGLTEKLNLEQLVIVLQQINMQLNSSSGYLGSISDRSKELYFNKETVGQSLMRQLDINPHTRLKNQVFYRQDYLDEFNTIWEVQSKFHKILTIELKTEIRDIIIFYQRRLKSQKGLISFCEFENRQIELIIDGKKKTKTIGNKVCPKSSPLFQEFKIWQILNNIEVFEKSNLIKRLLYQEEKDVLFKELNLKEKLSKNDALKILFDNHKELDLNYKEIEGNRTNASMYRAFEIIIELTGHGEYDFTKLDADKIIELTSSVFKGLGYNTDILIFNTNLEGSDFEKQPAYQLWHLLYSYEGDNTNTGNDKLIQKLINNYGFEKEYASIISNISFQPDYSSLSTKAIRKILPHLKEGNEFSVACTLAGYKHSKNSLTKEEKEKKVLKSKLEILPKNSLRNPVVEKILNQMINLVNTSIDVYGKPDEIRIELARELKKSAKEREELTSVVAKSKLEHEKHRATLQNEFGLSHVSRNDIIRYKLYLELEHRGFKTLYSNTYIEPNKLFSKEFDIEHIIPQSRLSDDSFSNKTLESRSVNIEKSNETAIDFIKLKQDENGLKEYLDRIEDLYKAFKISKTKYNKLKMTGAQIPDNFIARDLRDTQYIAKKAKSILEDLVKDVISTSGMVTDRLRQDWQLIDVMQELNWDKYNKLGLTEVIETRDGHKINRIKDWTKRNDHRHHAMDALTIAFTKRSHIQYLNNLNARSDKTGSIYGIEAKELYRDEKNKLKFKPPFALNDFRSEAKKHLENILVSIKAKNKVTTININTTKKQGGLNKKMQLTPRGQLHLETIYGSIKQYVTKIEKVGANFTEELIKTVANKKYREALLKQLIEFDNDPKKAFTAKNSLEKTPLYIDALKTIKVPVKVKTVTLETIYTIRKEITHELKIEKVVDPKIREVLNARLKEYNNDSKKAFSNLDENPIWLNKLKGIAIKRVAITGINNAQALHSKKDKEGNLVLDENGITMPIDFVNTGNNHHVAIYSNENGELQEVVVSFFDATTRVNLGLPIIDKNYKEKEGWQFLFSMKQNEYFVFPNEVTGFNPKEIDLLNPENYHLISPNLFRVQKFGSLLSGIWFRHHLETTINSDKELKGLTFKVIQSTKSLLKIIKLRVNHIGQIVSVGEY

SEQ ID NO: 22752 - protein, 1293 aa, unidentified; identical to SEQ ID NO: 15258
  REGION 1..1293: note = Cas Enzyme sequence

SEQ ID NO: 22753 - protein, 1368 aa, unidentified
  REGION 1..1368: note = Cas Enzyme sequence
MKTILGLDLGTTSIGWALVKEGDNADIIKIGSRVIPLTTDEITNFDKGKSITTNADRTLKRSMRRNLERYKLRRENLIQLLIEKKAINEATLLNEHTNDSTFQTYKLRANAAKVKIELDEFARVLLMINKKRGYKSSRKAQGEDEGQAIDGMAVAKILYEQNLTPGQFAFDILKKDKKAIPDFYRSDLNDEFDKIWSFQSKFYPEVLNKTNKELFEGKAKNQTSAIFYKELKIESVDLVGKMNEKKFQRYELRSKAINKQLTLGELVEVFSDIKGNINNSSGYLGAISDRSKELFFNNVTVGEYLYNQVIENPHTRLKGQVFYRQDYLDEFETIWEQQAKFHTVLTPDLKKEIRDIVIFYQRRLKSQKGLLSTCEFESFTRNTIVDEKPKAQKFGPKVIPKSSPLFQDFKIWAQLNNVEILDVFGKSKVRNHLELEEMNLLYDELKYTDKLSTTEINRILGFQVKYKYNFENLEGNRTMAAFIDSFQKIIELSGHDDIDFKKMSGGEKIKTITDIFSMLDFETSILSYSSDIEGKDHMNQPIYQLWHLLYSYEGDNSKSGIESLLTILKTKFGFDKEYASILSNTKLQDDYSSLSAKAIQKILPYLKEGQKYDKACALAGYNHSNSQTTAQLDAKVLKDKLSILSKNSLRNPVVEKILNQMINVVNSVIETYGKPDEIRVEMARELKKGAKERENMTKSMNEANRNHDAIRITLQTEFGIKNVSRNDVIRYKLYLELKDNGYHTLYSNKKISKEMLFNGEVDIEHIIPQAKLFDDSFSNKTLELRQVNIKKGNLTAIDFVTEEYGEEGLKQYEERVNTLFNKAEKRTKFKKLMWKEEDIPDNFINRDLNDTQYIAKKAKEILEEIVRTVGTTTGSITNRLREDWQLVDVMKELNKPKYQALGLVEEIENRHGHKISKIKDWTKRNDHRHHAMDAITIAFTKPSYIQYLNNLNAKNDKTGVIYAIQNKETYFDKDNKRRFKPPMPLDVFRAKAKDHLENTLISFKAKNKVTTKNKNTTSKAGGQSTVISETPRGQLHLETIYGSSYKYETKIEKVNASFDALKIEKVAKKKYREALLQRLNENDGDSKKAFTGKNSLDNNPIFLDPLHTDFVPDSVKLVWKEQQFTIRKGISPELKIDKVIDKKTREILQKRLDEFNGDPKKAFINLEENPIYLNKERGIVLKSVTITGVSNAIALHNKKDHFGKDVHDADGNTIPVDFVNTGNNHHVAIYRDEKGNLQEEVVSFMEAVTRKNMGLPIVKNKHEKGWEFLFTMKQNEYFIFPNEKTGFNPNEIDIMDVKNYVLISPNVFRVQKLGSKDYWFRHHLETTLIDTADLKEICFKRKQNNNSLIGIVKIRLNNIGHIVQVGEY

SEQ ID NO: 22754 - protein, 1069 aa, unidentified
  REGION 1..1069: note = Cas Enzyme sequence
MAAIAIDDDGKPTEILSAISLIHDSGVDPDSAKSAATRLATSGIARRTRRLYRRKRKRLAKLDKFISSQGWPLKEFEKYEDPFYPWRVRAELATTAITDQQELGEKLSIALRHIARHRGWRNPYSKVTALYTVTEPSDAFLAMQEECAKQLGRTIPETITVGQLVTGMNLGKTRLRGENSLLAARPRQSDNANEIHTIAKVQGLSNELVRQIIDHVFAAESPKGSAAEQVGKDPLQPTKKRALKASDAFQQYRIAALIGNLRIRGGKGNRRLTTEETRLVFDYLRSLPAKQEPTWQLVAEQLKIDRGNLVGTAIMTDDGERAGAKPPVHDTNRIMENTKIKPLATWWKSADADARAAMVKALSNAEVDDFDSQAGAQVQEFFFGISDEDQEKLDGLHLPIGRAAYSEDTLDRLTKRMIGEGMDLYEARQAEFKISNDWAPPAPEIGERVGNPAVDRVLKATARWLNAAERQWGAPKSVNIEHVRAAFMSESSARELDRDNQQRAKRNVKVVAEMQEKLGIEGRPSRADVWRFQSIQRQNGKCAYCGAEISFKNSEMDHIIPQAGEGSTNTRDNLVAVCRECNSSKSNIAFAVWAENTSRPGVSVQKAIERTHHWVTDSGLRKPEFDKFRKQVCDRLRRKATDEPIDARSLESVAWMANELRSRIAQKFKDGDTKVRVYKGALTAEARRASGISGKLEFVDGKGKSRLDRRHHAVDAAVVAFTSNYVAETLALRSNMKFDQELRRKAPQWREFTGSDHVHQVEWTKWKYRMQALAELLNNALVQDRIVVMHNLRLRLGNGAAHEDTIGKLTRLKVGDAISTTDIDRASSEALWCALTRDPDYDPKTGLPENPNRTIRIHGTHLTASDEITVFPVAAASIPIRDGFAKLGSNYHHVRLFRVPSGKKYKYCLMQVYTVDLLKFRKEDLFTVELKPQTISVRTCEALLRKALANGTAEYLGWLVSDDELLIDTSSFDTPGIVKLREEYGPVNRWRLAGLTSVTRLNLRPLYLSKEGLKPNVNPEIKKIIDNRSWIITVNKLFSSGHIKIIRRDALGRPRLHSAAHLPICWEVK

SEQ ID NO: 22755 - protein, 1483 aa, unidentified
  REGION 1..1483: note = Cas Enzyme sequence
MKTILGLDLGTNSIGWAKVTVDDNENYLRDIQLGSRIIPMSQDVLGKFDKGVTESQTAIRTSLRGKRRRIERTLQRRERLHRVLHTLYCLPPHYDSAIGWDRKAPTTYGKFLNHGEPKLAWERREDGTVQFLFMDAFHEMIADFAKYQPALVADGKKVPLDWTIYYLRKKALTQPIKKEELAWILLNFNQKRGYYQLRGEEDEENAAKHEEYHELKVVGVEVDEAGKGDNTWYNVKLENGWIYHRQSKIPLDDWVGKVRAFIVTTEYEKDGTTPKKDKEGNVKRSFRSPNGNDWGLRKKQTEHSLEASGIPVGAFIYDHLLKEPSDKIRGKFIHTIERKYYKQELAAILREQSKHHEELRSKDMLKACVEELYPNNPLHRESLLKKDMTYLLIEDLIFYQRPLKSKKSLIAECPYEAYSYVDKETDKMKRQGIKCIAKSNPYYQEFRLWQLIANLRLRNRSDERDVTAEYLPHQEDYVRLFTYLNDRKEINQETLLKDFFKLKKVAIGGEKVFPIRWNYIEDKEKKYPCNATRHELLLALDRAGMEHDWLDDRDLAYRLWHLLYSVDSKDETERALRKLKDDDAFVESFLKIKPFEKEYGAYSEKAIKKLLPVMRRGSLWNEADLCPSTKERIANILQGTIDEKLKKKIGAFISSCQQVSDFQGLPEWLACYVVYGRHSEATAIQRWETPEQLLAYIHKFKQYSLRNPIVEQCILETLRTVYDIWKEAGQIDEIHVELGRKMKQTAEQRAHLTENVLRNENTNLRIKSLLMELKNDADIKDVRPHSPMQQEILRIYEEGALQTLSKDDAAFAEIMKISKMAQPSASELQRYRLWLEQKYRSPYTGKPISLSKLFTSAYQIEHIIPKKRYFDDSFSNKVICEAEVNREKGSMLAYEFIKRRGGDVIHCTTLGDVTILREAEYKALVTELYANNNSKKEKLLMEDIPQEFINRQLNDSRYISRVVMTLLSNIVRIEGEEEATSKFVIPCSGGITDKLKKDWGLNDVWNNIVYPRFERLNALTNTTDFGQWENKEGKRVFQTSVPLELQRGYQKKRIDHRHHAMDALVIACASRNIINYLNNQEANDPTKQENARKQLCIKNRIIRKPWETFTQDAYKALDNMVVSFKNYVRVINKATNYYERYNADGKKVVDEQKGEAMWAIRKPMHKDTVFGHVNLRRKAVVKLKDALENIPAICDKTLRHYIQDLQKKHFNIKQLLAHFKSINYQLNKQAVDKVEVWQYSDDKKQLAATRKPLDTSFDTKCIAAITDTGIQKILLNYLQAKGGDPAIAFTPEGIAELNQNIAVYNGGKQHQPILKVRIAKPMGKKFPIGQTGNKAFQYVIAEEGTNLYFAIYEDEEGNRTYDTVALNVVAERLKQGLTPVPEKNEKGVALKFHLSPNDLVYVPTADELLSKECSLDKNRIYKMVSATKSECLFIPHSVAKTIYDKVEFEALNKMGRALTGEMIKSVCWKIEVDRLGHIVNIIK

SEQ ID NO: 22756 - protein, 1467 aa, unidentified
  REGION 1..1467: note = Cas Enzyme sequence
LHISFCRLYLDLGSNSIGWGLIEQDFQQKEGKIIAAGSRIIPMDQGLLGDFEKGNSVSQTAERTFYRSTRKLRQRHLLRRERLHRVLHILGFLPPHYDEQIDFSKRYGKFLDNTEPKLAYEEGRFLFMDSFQEMLSDFKSHQPNLFYSKKKGEESKIPYDWTIYYLRKKALSQKISKEELAWIILNFNQKRGYYQLRGEEEVENPNKKVTYYSLMVTEVTAEAPNKKGEIWYSTQLENGWVYRRTSKIPLDDWKGKVRDFIVTTELEEDGSIKRDKEGKEKRSFRAPSEDDWNLLKKKTEQDINTSKKTVGTYIYDHLLQNPNEKIKGKLVRTIERKYYKEELKAILEKQIALQPELFTDQLFADSIRELYSKNEAQQRNLAARDFVHLFVEDIIFYQRPLRSQKSTIANCSLESRSYIDKDSHTRKEAPLKVCPKSNPYYQEFRVLQWLQNLKIYEIESDQEVTHQFIKTLENKQQLFDFLMAQKEIDCEELLKYFLSLTYPNAKEKALKSELKKWKDTYRWNYVYDIGEKSSKKYPMNETRYDLKRYLEKVANLPDDFLSSEVEYLLWHLIYSVTDKVAYEKGLKKFAQKHHLDEDSFLESFKKFKPYPSEYGSFSEKAIRKLLPLMRFGSYWDFNHIDKNTQKRIEDLIMGVENEEIRTILREKAEKYQLEKETDFQNLPLWLAQYIAYNRHAEASSLEKWTSVNDLETYLNEFKQHSLRNPIVEQVVTETLRVVRDIWQQYGQGKADFFDEIHIELGRELKKTAKEREELSKQNQKNEDTNLRIKALLAELGEDSTIENVRPYSLMQQELLKLYEEGVFSSSMEIEDDIEKIHKKATPNKAELQRYKLWLEQKYKSPYTGQIISLKRLFTEDYEIEHIIPQSRYYDDSLSNKVICESAVNKLKGNQLGLEFIKNHYGEKVHAAGKEVSIFTEEQYKEFVKNHYANNSGKMKKLLLEDIPEKMVARQMNDTRYISKYISEILSKIVRADERDEGVNSKNVILCTGKITSALKQDWGVNDVWNDLILPRFERMNALTQSTLFTTYNEKYQKYLPTVPIEYSNGFQKKRIDHRHHAMDAIIIACATREHINYINNQHALEKGKNKEEKQKSRIDLRTILCEKKYNDNAEENYNWVFKKPWDTFTQEVRAALEGIVVSFKQNLRVINKATNYYERWVEENGKLIKKMVKQEGTNWAIRKPLHKETVSGKITLEREKVSKGKILTATRKAIDSTFTEKVIEGITDTGIQKILLNYLKFKKSPEIAFSPEGIEELNKNISLYNDGKPHKPIRKVRIFEKGSKFPLGEVGNKATKYVEAAKGTNLYFGVYQGKDKCSFATIPLNEVIERQKQGLSSVPEYNEKGDPLLFSLSPNDLVYIPIEGEIIEDIDFRNLSNEQKERIYKAASFTRNECFFIKSSIASLIKNYDAKTKIGELGSQNKLEVTICKGIRIKEVCIKLKVDRLGNISKA

SEQ ID NO: 22757 - protein, 1380 aa, unidentified
  REGION 1..1380: note = Cas Enzyme sequence
MKKILGLDLGTTSIGWALVNECENEDEKSSIIRLGVRVNPLTTDEKGNFERGKAITTNSDRQQTHGARINLQRYKLRRKYLCDCLNKHGWIGSEPMYEEGKSSTFETYKLRAKAAEEEVSPHEFARILFMMNKKRGYKSNRKANDKEEGKLFDGMSVAKKLYEEHLTPAEYSLQLLNKGKRFTPEYYRSDLVEEFEKIWNEQKKYYPEILTDEFKRQLEAKTKTSTSKIFLGKYGIYSADLKGLDRKSQPVKWRVEALRQQVDKDVLAFVISDLKGQIANTSGLLGAISDRSKELYFNKQTIGQYLWASLKENPHVSVKNQPFYRQDYIDEFEKIWETQASLHKELTPELKQEIRDIIIFYQRPLKSKKGLISVCELEQRKVKVIIDGKEKEITIGPKVAPKSSPMFQEFRIWHNLNNVQLIDNERNSKRSLYEEERNLLYEELSIRDRLSKTEALRVLGKKNRQWDLNYKELEGNRTQATLFRCYNKIITMTGHEECNFKQLKAPEIRHYIKTIFKNLGFNTGILEFDSSLNGHELEQQPMYQLWHLLYSYESDKSRTGNEALLKKLETILGFPREYASVLAEVAFEDSYGNLSVKALRKILPHLQAGLDYSQACEEAGYKHSRRSLTKEELDQKEYKKKLELLPKNSLHNPVVEKILNQMINVINTVIDEYGKPDEIRIELARELKIGAAERENMTRSISQGNAENKRIREILEKEFALSYISRNDIIKYKLYEELKPNGYKTLYSDTYIPKDKLFSKDFDIEHIIPKARLFDDSLSNKTIEARDVNIAKSNKTAFDFISGKYGQQGIEAYKKKLYILLQGGSINKAKYNRLLMKEADIPSDFINRDLQNTRYITRKAYEILSDLVRVVTPTSGAVTSRLREDWQLVDIMKELNFEKYQKLGLTEVIEDRDGRKIKRIKDWTKRNDHRHHAMDALTIAFTKPSFIQYLNNLNARSNKGDSIYAIENKELHREDGKLCFNAPLPINEFRAEAKKHLKAVLVSIKAKNKVMTQNVNKIKTKHGVIKKVQLTPRGELHNATFYGTKKRPIIKMVKVGAALDEVTIKKVSSSFIRKALLDRLYEYNGDAKKAFTGRNSIDKNPIYIDEERKRTVPALVKTIEWEMYHPTRKLISPDLKIDKVIDKGIRDILKNRLAKFNGDAQKAFSNLDENPIYKDEAKKITLKRVSLEGVSSVISLHKIKDRSGKPITGEDGKSVSGDYVQTSNNHHVAFYIDADGNLQDNVVSFFKAAERKSQGVPVIDKNYNRDKGWRFLFTMKQNEYFVFPNEVIRFNPSEVDLMDEANYDIISPNLYRVQTMSKVVYGKRIIRDYVFRHHLETTVEANANLKGLAYKQLKSLSYFEGIVKVRINCIGKIVAVGEYD

SEQ ID NO: 22758 - protein, 1494 aa, unidentified
  REGION 1..1494: note = Cas Enzyme sequence
MKNILGLDLGTNSIGWALIDNESHRIIKSGSRIIPMDAATMGDYEKGNLKSADWKRTSFRGMRRLYERAKLRRERLLRVLNILGFLPEEFRRQIDFEHHPGQFIDGKEPLIAYHHDENGQRVFSYMSAFEEMLTDFRATQSELVRDGRRVPYDWTIYYLRHKALTQPVTKEELAWIILNFNTKRGYYQLRSESEEVTTNKNEEYAELKVVSVEKTGEDKKRAGYYWYTITYDNEAEQKITSTIPPRQIGDKVELIVTTARDKAGEIKKSVRSPKEDDWTLMKKRTEHNIEEEECTVGSYIYQHILADPTVKVRGKLVHTIERKFYKKELKQILNKQKEFIPELQDASLYEACIKELYRNNEAHIQSIANKDFTDLFVNDIIFYQRPLKSKKSTISNCPYESYYYKNKETGELIRKPIKCIAKSNPLYQEFRLWQFVHNLRIYKKSEEVSGRLQTDVDVTDRFLTTPDDYAKLFSWLNDRKEIKQKELLRYEAFGLSKSYGDYRWNFVEDKPYPCNETLHEINRRMKSILSDKKLSSEAYQQLWHILYSIDDPIEIRKALTSFAQNQEINSDDFVNAFYQYVPEKTKSYGAYSEKAIKKLLPLMRRGSYWAIGNIDEKTHRRLDNIINGVADDSISTCTREKLNNLTDITMCQGMPLWQACYAVYDRHSEAADTTKWEQPDDIDTYLSTELKQHSLRNPIVETVISETLRVVRDIWKAYGRPEEIHVELGRNLKQDAKSRKQDAIRMAENEQTNLRIRALLQELSNPECGVENVRPHSPSQMELLKIYENEVLQSTDDIPEEISNIIKDLGKTDSKKRPSLSDITKYRLWLEQKYQSPYTGHIIPLSRLFTPAYQIEHVIPQSRYFDDSISNKVICEAEVNKEKDRMLGYEFIINKGGSIVKGSFGQQFKIFDKVQYEDFVKQRYAHNKTKMKKLLMDDIPDGFIQRQLNDSRYMSKKIISILSNIVREDGEKEATSKHIIVTSGAITDRLKKEWGIKDVWNDIIAPRFKRLNKLTDSNNYGMETEKEGRQYFQINVPTELSTGLIKKRIDHRHHAMDAIIIACTTRNHVNFLNNSTAASDQKDIRRDLQHTLCTKTKTDSNGNYVWRFNKPWDTFTQDTRQELEGIIVSFKQNLRIINKMSNYYQHYVDGRKTISRQNKGDGWAIRKSLHKATVSGKVNLKRSKTVGFKEALNDWSAIKDKTSKAILQKIIAQYKNYDPKTIFKYFKDRNFKVEGKDFSKLEVYYNTSDKEPMSAHRVNIDTTFDEKEIRSITDTGIQKIMLKHLHTYDDAQGKTHPEAAFSPEGIEKMNQNIRMLNGGKDHKPIFKVRKAEILGMKFAVGERGHKDKKWVEADKGTNLFFAIYESEENKRSYSSIPLNEAIDRLKRGENIADERDQNGNKLLFVLSPMDLVYVPDPDDAHIDEVKGNNNIFKMVSCTGTECYFVPETYANVICKGKELESKNKVESYDGINIKKSCYKITVDRLGKVRKIFKG

SEQ ID NO: 22759 - protein, 1016 aa, unidentified
  REGION 1..1016: note = Cas Enzyme sequence
LDCNQTRPALLSKLSKEDKRKFDEQFELKLWHIIYSVTDKSEYDTAIGRFGENNSLSEETTEKLKRAPMLKKEYATYSEKAVKKLLGLMRCGCHWSEVSIHPSSIQIIDKLLTGEFDERIENQVREKAIKLDKIEHFQGLPLWLASYIVYGKHSEVDATQWKSSKDLAEYINTFKQHSLRNPIVEQVLLESLRVTLDIWEYYAEKFGLQFEEYIDEKTGKKVKSYDRLFSKIHIEIGRELKNPKKVREKMTNSINKNKDTNQRIRKLLFELKNVKEVENVIPNSRTHFDKLKIFEQTVLSNYSEKELKAEKLDSKLTVEKFIKKNQPTFSEILKYKLWLEQKYISPYTGKIIPLTQLFTSKYEIEHVIPQSKFLDNSFNNKIICETEVNTLKDNRTAYTFIQEFQEAEVPLSGGGSVSILKKETYEKLVKENYDGRKKENLLRETMPQKMSERQMNDMRYISKAALKIYSNIVREEGERESTVKNVLPVAGKVTAKLRREWGLNQVWSGLVEERFKRLNRLICGEENENNGLFGTWVDDGGYFRTEVPLEIREDFDIKRIDHRHHALDALIIASLTSNHVNYINNEHTKSDLKRYDLGLTLRDTKQIEKTHPLTEKKTKHTVLGNYKKPWKTFTQDAKSALQEIVISFKQNLRAINKAQNYNWRYKDNAGKVVYTKNGVPKKQWIEQVSSKTDKTSNNKTNWAIRKPLHEETVYGILENGEYKGDLVKREPLNISFDEKKIETVIDPVVRSILLRHIKQDKFKGQIDEKGNIFKPEEVAFSAKGIKDLNENILTLNNGVFHHPIKKARLRFPKGKKFSIKKWEDKEGNLLRETKFVKSATGTNLYFCIYEKEGKRKYYVPPFEEILEIQKLEQDLPLEQKKNVPEQHPDFHDFKLKFYLQPNDLVYIPVKNDEDMGFENLGRQQLENIYLFKDGSGTTANFIPMFSADVIYNISNKENREKFADAYNLDKGELIKNEYGLGSPQLKNQNSVDGIQVKSVCWKLQTDRLGNITKVLK

SEQ ID NO: 22760 - protein, 1151 aa, unidentified
  REGION 1..1151: note = Cas Enzyme sequence
MKKILGLDLGVASIGWAYLEENNEKSRIVRAGVRIVPVADQEDDFRAGRSVSINADRTRYRGMRRNNQRWKGRRDKIVTLLESIDMYDEALINLHKTDLYALRARAVDEKITLSELGRVILHLTQKRGYKSNRKTDASPDETTEYLDKIKENSETLETKRQTIGQHFHEKFKTEPHTKVRQQIFYRHNYQDEFEQIWTRQHKEYPDILTDELKHEIGTRTLFYQRPLKSQKGLVSRCRFEQNMRVAPKSSPYFQAFRIWQNINNLEITDDETRKFDLTLKDKQKLFAFLNKKDGSKKSGILKELGYSSKKFDLNFDEVQGNRTKSRLLKIFKDNDIQDTSILDFDPFTENPENQAAYRLWHLLYSIEEPEHLYKALVEKFGFTREQAIAVSKCKLEKDYGNLSAKAIKKILPHLMNGDTYDKACGHAKYEHSDSITTEENENRKLDEYLKLINRGDLRNPVVEKILNQLVHLVNEIIADEELGKPDEIRVELARELKMNAKKRQQVNKSYGERKKANDKIKALLQAPPFNFKNVSRNALDRYKLWEETGGISVYTGEPIKLAHLYDKSLYDIEHIIPKARLFDDSFLNKTICESSINKDKDASTAHDYMEKKGEKAYQSYVQRVKQIKSKPKRERLMMAEKDIPEGFIERQKKDSQYIARTVMKMLETVCRKVHSTTGSVTDVLRHQWGLTDMMKELNFEKYKKQERIIWRERPSGERYFVIEDWSKRDDHRHHAMDAIVVACTKQGYIQQLNNLNKTFVNDKTQRVLRTSSRKFALPWTNFRQDARKALSDALISFKSKQRVATKNKNKIKHRDKNREPQAVLTPRGFLHKETVYGKMKRYAENRVALNGRFSLETIENIAHPIEKQAVIQRLAAFDNDPKKAFKGLDKNPIIVEGKRKPLTQVVVWETIYTIKKTLNMLNKKQIEKDILDVRISRLVNERLAEHGGDLKKMVASLEEQPIWVNEAQKICVKSVKLKTDLKDLKPLHENEQGKPIDFVNLRNNHHFAVYEDEKGKFQFEKVSFWEAFERKKNGFSVIKTQHEKGWRFVVSLAINEMIVFPKGNEEIDENFILNPDNYAVVSEHLYRVQKLSSTAKGAPNLSFRHHLATTLKDDNQLIHVQSLGRLYNIYKVSINRLGMITDVQKIAPAKK

SEQ ID NO: 22761 - protein, 1136 aa, unidentified
  REGION 1..1136: note = Cas Enzyme sequence
KPDQKIRGKLIKTIERKYYRRELREILRVQEKFHQVLMDETVFEKCLIELYKRNEAHRNNIKSLSLSYLIEEDIIFYQRPLKSKKSTVGGCQFEYRTYYKNDADSGDTIQQRVPLKAIPKSHPLYQEFRLWQFVLNIKIIDQDLELLQAKNADITQELLSSDEEIVELYEELNGRKEVEQKNIIDYFIKKSKIDKSKRGNFRWNYAKDKKYPCNETRAEILKRLKKVNGVKPHQFLTKEIELKLWHIVYSVTDRIEYASSIENFAKKNGLHVESFVLAFGNMPPYSSDYGSLSHKAIVKILSLMRMGKYWDPDVIDPHTFDRITKIISGEYDESIRDRVRDKAIMLKSINDFSGLPYWLASYVIYNRHSEGSDTAQWTSASDIDEYLKQFKQHRLRNPIVEQVVTETLRVVRDVWLKYGDGAKDFFDEIHLELGRSLKNSAEKRKSISTKQNENENTNERIRQLLEELGQDDSILGDIRAYSPSHQEILKIYEDGVYQNPDAKYGTVSEDEIYKIRRNKTPSYNEIQRYRLWLEQGYVSPYTGSIISLSRLFTTEYQIEHIIPQSRYFDNSFNNKIICEADINQDKGNLTAYDYMTRMSEEVRDGHELLSKENYEAHCQKYFKKNRVKLANLLSEDIPEGFINRQMNDSRYIAKYVKGLLSNIVRDDGEQESTAKRLLPVSGAITAKLKQDWGLNDKWNDIIAPRFMRMNEITRTSDYGYYDKKINAFRITVPDKIRKGFSKKRIDHRHHALDAIVIACITREQVNYLNSLNSERENYSLRSRLLVKNKHGDYTKHFRLPWSNFPIEVQQSLEQMIVSFKQNIRVINKTNNKTWQWIYEDGRYVKRRVRQEGKNWAIRKSLHKETVSGQVMHIPTSKGKIATASRVLLSSITNKKHIDKITDVSIQKILLNHLSSYLDDKGKPQYDVAFSTEGIEDMNKNIKMLNGGVSHKPIKKVRQYEIGSKFQVGIKGNNHKKYVEAAKGTNLYFAVYWNENINKRTYETVPLNEVVEHQKQTTHISKSEKHPFQPDNSKGKFLFCLSPNDLVYVPDEDEILNSGLVSVVSLRIKNIYRMVSSSGNQVFFLKSEVAKSIANKLEFSGLNKMEKDINGVMIKSLCWKLVIDRIGNILNIKKGIL

SEQ ID NO: 22762 - protein, 1353 aa, unidentified
  REGION 1..1353: note = Cas Enzyme sequence
LDLGIASVGWAFVMEDDNYVKSKIIDSGVRLVPLSSDEKKEFSSGKALSTNAGRTMKRGMRRNNFRYKMRRNRLINLLKEMNLITDDTPLAEEGKLSHYETIALRNKAAIERMEKHELARVLLAINKKRGYKSNRKAKNDEETKDGSQLSNDLAIAEELKSRHLTPGQLALERLKKGEGIPGFYRSDLANEFETIWKMQSAKYSELLDTSRKKDILNSSAKGIIALFEKVYGVTVAQVNGSKSEKEKFTYDERAKAAHQVIEQDKLAIVFRSLLTDLAASSGYLSRISDLSKQLHFNNWTVGQYLHHQINESPNNSLKNQIFQRRDYLNEFEKIWKVQEQHHPELTSKMKGIIRDEIIFYQRRLKSQKHLVGNCTLEPGNKTIPQSAPLFQLFRIWQNLSNLRLENKIGGEIIKPDFEQRKLLFEVLNTRPYLSKRDVFSILDQRASQWNINYEKLEGNRFQNHLVDLGLEICEANEIVINPKKTRGANLLNILIDNLKSLGVQLPFMTLENLDNIKNIELHPQYSLWHLLYSYEGDSTSSGEEKLINRLCKKYGLNTGQAKKLANIPLSDQYGNLSAKAIKNILPSLLEGMTYDEAASLAEYRHSLHETADERDARELKDALPLMEKNSLRNPVVEKILNQVVHVINAIIADPKMGRPDEIRIELGRDLKMNAKQRSEMESRIKENTKKHEEIKKVLRNEFGITRNVSRKDIIRYKLYKELEPNGYKTLYTNQYISKGMLFTNEVDVDHILPQSLFFDDSFSNKILTTRSENLDKSNTTAIDYVANFGEEAVGAYKQRLKNLFGDSDRMTTKQKRLLTPKEEIPTDFLNRDLGNTQYIAKAAMEMLKQVCRIVTPSTGKITARLRKDWGLIDVLKDLNWDKYEAVGMTSQKTTRNDRVIRIINDWSKRNDHRHHAMDAITVAFTRPAIVQLLNNLNARDNRDNPLWGIQKKHTYSDQGKLSFKVPVEHMRSIVKEQLSKLLVSRKAKNKVTTLSKNKIKVKGKKGFLVQVTQAPRGALHKETIYGGAKRYETRLEKVGAKFVEEKILLVAKKTYREALLQRLEEFNGDAKKAFTGKNSLLKNPIILTRQKENQVPEKVKLVELKTVYTTRKQIDRDFKEGHVKKVIDVGLRRILKNRLKKYDNDSKKAFGDLEKNPIWIDEKKGIALKRVTMEGPKTVLAIHEKKNHHGEMINGSQGETFPVDFVQEGNNHHTAIYRDGKGNLQAEIISFFKAVTRKKNEIPVVKKEHEEGWEFLYTLKQDEFFIFPPDEFKLTHKEICSGKFKNEIFSYLFYLVKQSQNDYLFRHHIEATVDDPKALRDILWKRIRSIKDLEGIIKVRLNHLGNIVQVGEY

SEQ ID NO: 22763 - protein, 1241 aa, unidentified
  REGION 1..1241: note = Cas Enzyme sequence
RAPAEEDWTLVKQKTENEIEKSNKTAGCYIYDKLLENPAQKVRGKLIRTIERKFYRNELTSILEKQREFHSELQDRNLYQECIQEIYRTNDNFRNGIENKDFLYLFLDDIIFYQRPLKSKKSLISNCRYETREYKDKHGNIVKDPIKCAPKSHPLFQEFRLWQFVHNLRIYQRGKVLDGKLHIDVDVTNDFLKIEGEWVALFEWMNDRQKIDQKTFFKYPPFQLKKLAADYRWNYVEEKIYPANETRGAFLEKMKQIPSFSIDLMTREREEALWHILYSVKDKKELEKALVTFGRKNDLDEAFAEVFKKFPPFANDYGAYSVKALKKLLPLMRKGRYWNEANIDQETKVRLSQISERLESIGHDPGKIQDISDDYLSKNILKSLIDCTEPFQGLNTYQACYAVYGKHSEANEIIKWSNPADIDQYLRDVFKQHSLRNPVVEKVIAETLRVISDIWKKYGESRENFFNEIHIELGREMKNPADVRKRITESVTENENTNLRIKALLAELSYDKEIENVRPYSPGQMEILKIYEEGALNSAQDLPDDIIKISKNAQPTNAELTRYKLWMEQKYRSPYTGEVIPLGKLFTPAYEIEHVIPQARFFDDSFNNKVICESEVNKEKSDWTAYEFIRENSGKIIELSFGKTAKIFTIEEYEDFIKENYARSKGKMKRLLMDEIPDSFIDRQMNDTRYISTIVKTLLSNIVREENEQEATSKNILSTNGAITTRLKQDWGMHDVWNEIITPRFERLNSLSGSNNFGEMTQKDGKQIFQTRVPIELQKGFTKKRIDHRHHAMDALVIACATRNHINYLNNQSAKQSGKDTRYDLRCLLCYKDHRGLNGNSQWSFTQPWDSFTMEAKDKLLSTIVSFKQNTRIINKTVNYYQVLRRDEKDQLKKVLIKQEKGDNWAIRKPLHKDTVAGAVCLRCKKTVSLSSALDEWKMIADKSLRHLVMKLTSENFDKKKILKYFKEQGNELEGKDISRVEISYFDSENVATRVKIDDSFSSKTIESITDTGIRKIMLSHLAKYNELKDGKTIEHPELAFSEDGIDEMNKNIMILNHGKFHKPIYKVRTFELRGNKFQVGTAGNKSSKFVEAAKGTNLFFAIYQDSSGKRSYESIPLNEVIERQKQGLQSVPETNAKGHLLLFFLSPNDLVYIPNTEEIANSHMIKPDKLSKDGCTRIYKMVSSSGAQCFFIGVNISSPIWNKVEYSALNKMEKSIEGIMIKDVCRKLHTDRLGNILNFQ

SEQ ID NO: 22764 - protein, 960 aa, unidentified
  REGION 1..960: note = Cas Enzyme sequence
MARIWGFDLGTSSVGFAVIDYDEGSSQGKLVRVGVRVFPEGVDEKKKEPRNAVRRAKRLARRQFRRRRWRKRHMRELLVDAGLLPASERKPRSHQGRDDFFLNSDGADPYRLRARAVNERIEPFEIGRVLFHLCKHRGFTGSRKFDTSRADDRSRASEERQIRQEIEDLRRQLAGRTLGEYLHGLPPTEAKRRRHIHRDMVQDEFRRIWDKQRTFYPDLLTDDLRERIWHTLFAQRPTFFSLKTIGKCELEPDEWRCLKGDWHAQRFVMLQMLNNLRFLGDRQLSAEQRERLLNELEAKASLTFDQIRKKLGLGDERFNFESGGEKKIIGNATECELAKVFGRQWETLPARDRIRAEIAERLWHLEYRQVGDKRAEIRTAAQWQAERDAFVKSAMRDWSITAEQAESLSKLDLPAGYVMHSKRAILKMLPYLEQGLRYDEAKDRAYPKPPPARPPAEKLSEPDPNRVRNPTVIRTLGELQKVVNNLLRVDGRPDLIRIELARDLKLPRTRRLKLMAEQRQNEKRRKDARDELARRGLPVTHENVEKYLLANEQGWRCPYSGEQISCDGLFQSGLFEVDHILPRSRSFEDSFANKVVCHRDANKEKANRTPFEAWGADPERWAAIEHILSDIQKHAGFPISKVDRIKRKEFPALGGEDFTNRQLVDSAYIARMAVDYLSELGVKVEPTNGRVTAHLRRLWGLETILSDAPEGKNRDDHRHHAVDAIAVALTTPAFVKRLSDYYGTDRTPDRERFRVPWDSLRADAERAVAEIVVSHRAQRKVSGALHDENPWRDTGEESEENGIRYRLYSQRKSSGQRAVERIQQKLMRPVGPDRAAWVKTNSNHHILIYTDEAGKLRYETVSMFDAAMRISKRQPIVDRSRPQAAPFRSLCIGDMIERTVDGRKTYWTVKKLSANGPITIQPHNFARDLGRTGPSVTTLVREGARKVVVDPIGRVSYAND

SEQ ID NO: 22765 - protein, 1397 aa, unidentified
  REGION 1..1397: note = Cas Enzyme sequence
MKKILGLDLGTNSIGWALINKDEQQILGMGSRIIPMGTDKLDYEKGAGITKNADRRMSRTIRKMNKRYKLRRNKLLFILNELGILPDQFQFKNGIPEPTKLQDLELLPIRKGTLQLDSLSHYQLRVNALTKEIPAKDFGKILYQFNQLRGYAGGSNNDETKKKKDETNEEETEKKKSYEVITQKVTILNIEKSDRKYKAKGGKNKGQELSLFDITFLLDNEEKEGNTMLQTLEVGKEEELEIRIKQTKKGENIIIALPQKTNWKKQMEATEEIIKTEKLFIGQLLQKDLLNSRWTKIRNRVILRHRYQEEFDAIWEEQAKHHSILSNYPNEKIIKIVNYLYPGSSQTQKELRQQGIEGGLKYIIKEQVIYYQRPLKSQTELISKCQFEKEEKVIATSHPLFQEFRCWKQINQLYVRSKAGTYNEKKGKTIYKYSDKYLTNEQKNTIYLKLKDQKQVGFSDVAKIVGLKNDNTEYLNGLNVKAKLKGCDTTITIKKILGEEYNTIIQQDKEIIFKIWDSLFDLKNSGSEYDKKSKKVSSLIDILKIATDEEKATAIAFKLAQSIIYPRKYASLSAKAIENILPLVQLNPSNINILTKENFEKIKHAIDTGELLEGIEPYMVDYINSNPEIIEVGGMMDSFAASLVYGKHTTDNIKPTIKNYHDIKYNPNRNLRNPIVEQITNEALQVIKAIWKEYKFNPNELEIRIELARDLKNSAAEREKIYKGQLNNQKQNSRIKERLAEERIPVTDENVVKYKLYEQQKYISPYSGNSLEVNLFDEYEIDHIVPKSRLFDDSISNKVLVEGFLNKEKSNRTAWEYISQQNTKYQICSIERFIDLVNANYFGKKKKNLLLEKIPTDFIERQIKETQYIALAVKAELAQIVGSNNVKSSTGMITDFLRSRWGLKKLFMELTESRFKQMELWDSSNKWVTREFDERKNKDILKIKNWSKRYDHRHHSIDALVVALTEQSHIQRLNNLNKELQDWLVKHKEEIKLEVKEDETILEAFFNLKESDREIIQKKIEGFRNFDTPFNDLVKQARTHLEAMIVSHKPKDNLTIQINEKTEKKEIKIRGSLHEATLYGKHNGQDTKTISISNLTAKDIDKIIDPVLKAEINSHRSKSEYGSVKEALTGEGLKAFNESRFQRKKPESLKPPVYKVKIYYNNKEVKESSLQRLYDNNDKLSVKTGGNYLFLVMEKTNIKDGTKERVFDIVSLYDATDIAKREWKNQIEDFKKKIFEDYLIMNNADKVLFALKQNELVYLPENKEDPVLKFSSEEFNKWISEKENKARFNERVYKVVKFTGGDCSFIPHNYASTISVAKDLTEDQKSELKKKYGEKDIPKKEMNFVEYGSYRDSAPVEVNAHFVKGLTDKTYKVKPMKIQDFCIKIKTDWLGNINLDI

SEQ ID NO: 22766 - protein, 1194 aa, unidentified
  REGION 1..1194: note = Cas Enzyme sequence
VENPQTRIRYNKENIAGNGDKVKRKIFFLGRNNMKLLGLDIGSNSVGSAWIDTEAKTIKMGVSVFPAGVEESDTKRGAPKNQARRGYRGQRRSIERRAKRKHQMRRFLLEKGWMPYNPVDEKKWLQEKNPWILRREGLRMELNPDEFGRVLLHLAQRRGAYGFDVGEEEKEAGKIKDAISGTKEEMKKYSTKTFGELIAMKFEERRKEVGKKNKSVGIPIRNRKKSSGEGTYEFCADRSMIWDEFDKLWTKQKSFGGELAGQLTDDCRKELDDPEGDETWRYKGVLFGQRRTYWDVGTMARCDLEPTDLRCPKVDMYAQEFLVLETVNNIRITPRGEVKRRLKPEERVAVINVLEKQKTASESTIRKALKIDKGQKKTQYTLSLEKDPERGLNTNWFRREIVSAVGANKWKEMSTEAKESLNRAILKFEPKVEKDVHQLRAGCQRWWEFSEEQASRFVEAWKKRARIDDRVNYSRRAIKNLLPYMREGFTVNEARKLFAEDAENGASNEQRERYSFCAKVENRAARRYVVKHPDLLPPAPEKLSNPVVRKAIHEVRRHIQAYIREVGRKPDRVVVELAREARQSAIVRNRQLAKNREREKERKEILKKFHLERETKTQQAKAVKRVLLSREQRYRCTYCGDERDTISEELAASGEGVELDHIIPESRGGNSYLSNLVLCHSRCNRGKGNKTPIEWLTEEQFGLLEQRLKHLKKENEVKWDNLHKEAPDLDGFVESQLTDTAYASRQVAGWLRDVLYEGERDGRRRVFTTKGRYTSILRSDWGLIPDKSIKKKDRSDHRNHALDAVVIALSGPERLSQLAKAAEKQELAKSEGYEYPKRKRLEPAWGNFDSFRANVMKEWKKLVVAHRPEGRKITGSLHNDTQFGPVIDESGNPTGDFTIRKAIGELTHNHLRVPQGWEELRDQLEQSKSEVQRRRMRSQMLSLADVKPGKAGIVRDRWFREELRGWMRRNGLDPDSFDKNKEDKRKFKELVKGGCVALASGVPVRRVRLLRRPTVIEIKRKHWDPETEKMEYDPNLKSRRYYEPQNNHHIEIRKNTKGKWIGKVIRNFDAAKRVRVKPPRQKPRGWAPPSAVNREDTKQGRFVMSLSIGEIVYMKHPENEETDYFVVFKIDGTGCIHFTPHWDAGRDKETERCPAREDIRLSAAQLQKLGVEEGGHPQKVWVGPLGDVKFLQLD

SEQ ID NO: 22767 - protein, 1417 aa, unidentified
  REGION 1..1417: note = Cas Enzyme sequence
MFSQRNNPYCELLSDSKSNKSQLINKMKRILGLDLGTNSIGWALVNEKEAKYENSSIVKLGVRVNPLTVDEKTDFEKGRPLTTNASRTLKRSMRRNLQRYKLRRNDLIAIMKENGWISRDTPLTEIGKDTTHQTLALRAKAAREKVDLEDLAKILLSINKKRGYKSNRKVKDDDQGLSIDGMAIAKKLYDENLTPGQYVLRVLKAGRKYIPDFYRSDLITEFNRVWNKQIEFYPGVMTNSLYHEVLGKNKKQTWAICEKPFNIVGVKRKGSFAEKKLENFEWRVKALSEEIELEKLVIVLQEINNDLNKSSGYLGAISDRSKKLYFNRQTVGEYLYNQLQQDPHTSLKNQVFYRQDYLDEFERIWETQAQHYSQLTPKLKEEIRDTIIFFQRKLKSQKGQLSYCQFERWEQQYEDPDTGSPKKRTIGRPVIPKASPLFQEFKIWQNLNSLVFSNTEESQEIKVKDLDCEIRQELFDHLTIRGASKPVELLRILKRHIKLGRISKWKANYDKIEGNSTNATLFNCYQRISENEGYGIDWNSADAQSILHELKNTLPEIGINPSILTFDSEKKNIDKQLSYQLWHLLYSAEEDFKIEEKDKIVYGNSAVSLKKKLHNKFGFKPDYAKMLANISFSQDYGNLSAKAIRKILPFLKDGHVYSEACRLAGYNHSSSLTSEQLKNRELKPHLELLSKNSLRNPVVEKILNQMVNVVNQIIETYGKPDEVRIELARELKKSAKERAEMAKGIGEATRRNEDIRKLIIKKFGIPSPTKNDIVRYRLYQELESRGFKEVFTDRYIAPDQIFSKEIDIEHIIPKALLFDDSYSNKTLAFKEINLKKGNRTALDFISEEFNQNLESYRSRVEELYKSGSITKGKRNKLLLAQSEISDGFIERDLRNSQYIARKAREMLFEVFADVTVTTGSITEKLRKDWDLVNVMKELNMPKYKAAGLTIYEERLDIGTGKFKKYEIIKDWSKRNDHRHHAMDALTVAFTTKNHIQYINNLNARRDTSKDNHPIIRNIENQITEINMRGKRIFRPPLNNFRTEAKDHIESILVSFKTKNKVVTRNVNKTQRKNGKLNYKVQLTPRGQLHKETVYGKSKRLLAKPTRLNKRFSLEQAQLIADKKQREAVLKHLKEYEGNSEKAFSTNSLKTRPLCVDGEELKEVLCYEEIFTIRKDVTPNNFKNDKLIEKIIDQGVRNVMKNRLAEYKGDYKRAFSDLDTNPIYLNKTKGIKIKRVTITGVSNAEPLHFANDHLGRVLKQENGHLKPVDYVSTGNNHHVAIYKDGDGNLQEEVVSFFEAVTRKNQGQDVIQREHPKGWKFLFTMKQNEMFVFPNEGFNPGDIDLLDESNAKVISENLFRVQKIATKNYFFRHHLETTVEQIKELKNLTYKPQLGLNAIHGIVKVRINHLGKIIHVGEY

SEQ ID NO: 22768 - protein, 1557 aa, unidentified
  REGION 1..1557: note = Cas Enzyme sequence
LFLRNHIEIEMMKRILGLDLGTNSIGWALIEILEDGTKRIIKLGSRIIPMSKEVLGNFEKGVTKSQTAERTDDRGARRLYARSRTRRERLLRILNILDYLPDNFSNQIDFDEKKGQFKKGSEPLIAYSYKVDENGNRIFNFMDSYEEMEKEFRMRYPNLPKLNKKGKPYRLPYDWTIYYLRKKGLTQKISNQELAWILLNFNQKRGYYQERDEKEVEIDENKKVELIVLKAEQFKITDQKVDDKPLYEIIFDNGWIYDNTTTKPEIWEGVDIEFIVTSTINKDGSIKRTFKKVDSEKDWEAIKRKTEQDLRKSQKGAYKTFVGKYIYETLLENPKQKIRGELIRTIDRDFYFDELEVILRTQLKFREEQWGDKNLYKRTVQELYAHNIAHQENLLKQKDTFIHLFLKDILFYHRPLKSQTGLVSRCSFEKRVYVDSLTGDKHEVKIKGMPKSHPLFQEFRIWQLAHNLRIQKREAEENGKLKINLDVTNQFIRNKSDLAKFFNFLYNKKDINQKQLVAYFIRDKKEQSLYRWNFTDDNKIKLDCNQTRPALLSKLSKEDKRKFDEQFELKLWHIIYSVTDKSEYDTAIGRFGENNSLSEETTEKLKRAPMLKKEYATYSEKAVKKLLGLMRCGCHWSEVSIHPSSIQIIDKLLTGEFDERIENQVREKAIKLDKIEHFQGLPLWLASYIVYGKHSEVDATQWKSSKDLAEYINTFKQHSLRNPIVEQVLLESLRVTLDIWEYYAEKFGLQFEEYIDEKTGKKVKSYDRLFSKIHIEIGRELKNPKKVREKMTNSINKNKDTNQRIRKLLFELKNVKEVENVIPNSRTHFDKLKIFEQTVLSNYSEKELKAEKLDSKLTVEKFIKKNQPTFSEILKYKLWLEQKYISPYTGKIIPLTQLFTSKYEIEHVIPQSKFLDNSFNNKIICETEVNTLKDNRTAYTFIQEFQEAEVPLSGGGSVSILKKETYEKLVKENYDGRKKENLLRETMPQKMSERQMNDMRYISKAALKIYSNIVREEGERESTVKNVLPVAGKVTAKLRREWGLNQVWSGLVEERFKRLNRLICGEENENNGLFGTWVDDGGYFRTEVPLEIREDFDIKRIDHRHHALDALIIASLTSNHVNYINNEHTKSDLKRYDLGLTLRDTKQIEKTHPLTEKKTKHTVLGNYKKPWKTFTQDAKSALQEIVISFKQNLRAINKAQNYNWRYKDNAGKVVYTKNGVPKKQWIEQVSSKTDKTSNNKTNWAIRKPLHEETVYGILENGEYKGDLVKREPLNISFDEKKIETVIDPVVRSILLRHIKQDKFKGQIDEKGNIFKPEEVAFSAKGIKDLNENILTLNNGVFHHPIKKARLRFPKGKKFSIKKWEDKEGNLLRETKFVKSATGTNLYFCIYEKEGKRKYYVPPFEEILEIQKLEQDLPLEQKKNVPEQHPDFHDFKLKFYLQPNDLVYIPVKNDEDMGFENLGRQQLENIYLFKDGSGTTANFIPMFSADVIYNISNKENREKFADAYNLDKGELIKNEYGLGSPQLKNQNSVDGIQVKSVCWKLQTDRLGNITKVLK

SEQ ID NO: 22769 - protein, 1466 aa, unidentified
  REGION 1..1466: note = Cas Enzyme sequence
MKNILGLDLGTNSIGWALIDKENNKIIDMGSRIIPMSQDILGEFGKGNSISQTAERTNYRSIRRLRERYLLRRERLHRVLNILEFLPKHYSDQIDFETRLGKFKEDTEPKIAYKSTIDETNSKSRFDFIFKKSFAEMLEDFHQYQPELFANDNKIPYDWTIYFLRKKALTKKIEKEELAWILLNFNQKRGYYQLREELEEDTNKKEYVVSLKVIKIVKGEEDKKNKNRNWYSISLENGWVYNATFSTEPQWLMTEKEFLVTEELDENGQVKIVKDKKSDKEGKEKRRIIPLPSFDEINLMSKSEPDRIYKKIKAKTETAISNSGKTVGEYIYENLLQNPSQKIRGKLIRTIERKFYKEELKQILQKQKEFHPELQNDDLYNDCVRELYKNNEGHQFLLSKRDFIHLLLDDIIFYQRPLKSQKSLISNCTFEFKKYNVGNEEKIKYLKAIPKSHPLYQEFRFWQWIYNLRVYRKDDDQDVTNDYLNDPEKYADLFEFLSNRKEIDQKALLKYFKLKESTHRWNFVEDKKYPCFETRTLISTRLEKVKDLPPNFLTDQTELQLWHIIYSVTDKIEFEKALSTFAKRNKLDVTTFVENFKKFPPFKSEYGSYSGKALKKLLPLMRSGRYWKWDDIDEKTKTRIDKIITGEFDEDIKNKVREKSINLTTENHFQGLQVWLASYIVYDRHAEAATINKWDTIEHLENYIKEFKQHSLRNPIVEQVTLEALRVIKDIWKQFGKSAENFFDEIHIELGREMKNTADERKRLTSQINDNENTNVRIKALLAELKNDSNIENVRPFSPIQQELLKIYEDGVLNSEIEIPDDISKISKTAQPSSSELQRYKLWLEQKYRSPYTGQVIPLAKLFTTDYEIEHIIPQSRYFDDSFNNKVICEAAVNKLKDNQTGLEFIKNHHGEIVQTVFDNKVKIFEENDYRDFVKTHYIKNRSKRNKLLMEEIPDKMIERQINDTRYITKFISALLSNIVRAENNDEGLNSKNLIQVNGKITSLLRQDWGINDIWNDLILPRFLRMNQITNSDAFTRYNDKYQKYLPTVPLELSKNYQSKRIDHRHHALDALIIACATRDHVNLLNNKYAKSKERYDLNRKLRLFEKVVYTHPKTGEKIEREIPKNFIKPWDTFTVDTKNFLDTIVVSFKQNLRIINKATNQYQKWVKLNGRNVKKEVKQSGINWAIRKPLHKETVAGKVELKRIKVPKGKILTATRKNLDTSFDIKTIESITDTGIQKILKNYLSAKGNDPTIAFSPEGIEEMNKNITRYNNGKPHRPIYKARIFELGSKFILGLTGNKKAKYVEAAKGTNLFYAIYVDENNKRSFETIPLNIVIERQKQGLSSVPENDDKGNKLLFYLSPNDLVYVPDEDEIINESYLDVSNLSNEQKKRLYNVNDFSSTCYFTPNRIAKAIAPKEVDLNYDNNKKKLFGSYDTKTASVNGIQIKDICIKLKADRLGNISKANR

SEQ ID NO: 22770 - protein, 1395 aa, unidentified
  REGION 1..1395: note = Cas Enzyme sequence
MKKILGLDLGTNSIGWALVNEAENDNEKSSIIKLGVRVNPLTVDELTNFEKGKSITTNADRTLKRSMRRNLQRYKLRKENLINILKQNGWISDQTILSEHGNKTTFETYRLRAKAAIEEVTLEEFSRILLMINRKRGYKSSRKAKSTDEGQLIDGMEIAKKLYHENLTPGQLVLELVKAGKKYSPDFYRSDLQSEFDRIWDFQKQFYPEVLTDEFKKQLAGKGKQNTTKIFLAKYGIYTAANKGANKKLEATQWRVDALSKQLSKEELAFVISDLNGNVNNSSGYLGAISDRSKELYFNKQTVGQYLMEQLAQNPHARLKSQVFYRQDYLDEFNALWETQAKFHNELTPELKGEIRDVIIFFQRRLKSQKGLISFCEFERKQIEVEVEGKKKLKTIGMKVCPKSSPLFQEFKIWQILNNIQVNDKESHAKRFLEQEEKEMLFLELSIREKLTKADALKILFKNHKELDLNYKDIEGNRTQAALFNAYNDIFELSGHDKIDFSKCSANEIVNSVKEVFTALGINSEILFFNSLIEGDKFDKQPIYQLWHLLYSFEGDNSNSGQDKLIETLSSRYGFEKEFAKRIASITFQPDYGSLSTKAIRKILPYMREGNEYSVACVHAGYNHSKSSLTKEELDKKVLKDKLDILPKNSLRNPVVEKILNQMINVVNAVNESYGKPDEIRIELARELKKSAKEREELTTAINQTTAEHDKYRLELQKNFGLSHVSRNDIIRYKLYLELEPFGFKTLYSQTYISPDKLFSGDFDIEHIIPQSRLFDDSFSNKTLETRSINLEKGNDTAIEFIEKKYGKEELANYIAHIEGLFKNNPTKQGKLKKLKMKGDEIPDDFISRDLRDTQYIAKKAKSILEEFVRDVVSTSGSITDRLREDWQLINVMQELNWYKYDKLGLTETIIGRDGQEIPRIKDWTKRNDHRHHAMDALTIAFTKRSHIQYLNNLNARSDKAGSIYGIEQKELERDSKGKLRFKAPMADFRSEAKRHLENTLISIKAKNKVTTININTTKKKGGTNKKKQLTPRGQLHDQTVYGSNPWSRIELSSKISKNEIDNICSDNLKVYIKEHIKQRGSIAKAFTEEELLKLRYNNKPLREVEINIPCYTQRIDIIKFFTDSQRTVSSKIKNLKSVLDIKIREILNNRLDEYGGDFMKAFSDLETNPIWLNKEKGISIKRVTITGISNAQALHDKKDKDGKLILDNEGKPQPVDFVNTGNNHHVAVYRDEKGNLQENVVSFFEATERVNQGLSVIDKEYKKKEGWEFLFSMKQNEYFVFPRTEKKDKVHEETGEIYQIEETVFNPKEIDLLDPDNYKLISPNLFKVQTISKVMYGNSVIRDYKFRNHLETTVKDVKELRDLAFKQYKTLAFCDEIVKVRVNHIGQIVTVGEY

SEQ ID NO: 22771 - protein, 1379 aa, unidentified
  REGION 1..1379: note = Cas Enzyme sequence
MKRILGLDLGTTSIGWALVNEAENNEEQSTIIRLGVRVNPLSVDERSNFEKGKSITTNADRTLKRSMRRNLQRYKLRRAQLRKVLIENGFISEDTLLSENGENTTYESYRLRAKAAKEEITLEQLARVLLMINKKRGYKSSRKLKGQDEGQIIDGMTIAKKLYDENLTPGEYLLSLHKEGKKYSPDFYRSDLLDELDKIWSEQSKYYPEILTEDFRKQIEGKGKLNTSKIFLAKYQIYTADNKAPDKKGQALEWRVKATKEKLPIEEMAFVIADVNGSISNSSGYLGEISDRSKELYFKKQTVGQNLYEKLISDRNFSLRNKTFYRQDYLDEFEKIWETQAKYHKELTPKLKKEIRDIIIFYQRRLKSQKGLINICEFEGKEIEYIVDGKAKKKLVGPRVCPKSSPLFQEFKIWQILNNVKVISKKDNADRFLYPEEMETLAQELAIRESLKSDDALKILFNNYKDFKLNYEKLEGNRTISSLFDAYKKIVELSGHDISGFTKQRAPEVINAIKEVFTALGFNTGILWFDSLAKGKDLENQPLYILWHLLYSFEGDNSRTGNEALINKIMALTSFPKEFAAIISSISFQPDYGSLSTKAICKIIPHLKDGIAFAGRKERPEEPSACEYAGYRHSKHSLTKEEIENKKLLDRLEIIKKNSLRNPVVEKILNQMVNVVNAVIEKYGRPDEIRLELARELKNSAEERKSLTDTINKNTIENEQIRKILRTEFGLQYISRNDIIRYKLYKELEYRGYKTLYTNTDIPKEKLFSEEFDIEHIIPRSRLFDDSFSNKTLETREANIEKGNDTAYDYVLRKYGQEGLDSFLACIKDLEEKRIITGSKYKKLKTSINEIPDDFIDRDLRDTQYIARKAKEILETISKHVVTTTGSITARLREDWQLVDVMKDLNWDKYKALGLTEEIEGKNGQRVRVVKDWTKRNDHRHHAVDALVIAFTKRCYIQYLNNLNARSDKGSEIFAIEAKELERDNKGKLRFKAPIEIKAFRTIAKEHLENVLVSIKAKNKVVTRNINITKKKNGLNKKIQLTPRGQLHNETIYGSALRYVSKEEKVGAAFNEELINKVANKKYREALLNRLHTNGGDPKKAFTGKNSLAKQPIYLDKQRGIVVPDKVKIVNKELIYTIRKEVAPDLNVEKVLDKKVRLCLEARLKEYNNDPKKAFSNIDEYPIWLNKEKGIKIRRVTITGVANAQALHDKNDKDGKPVLDEYGNPIPVDFVNTGNNHHVAIYRDSKGILQERVVSFLEATTRAVLGLTIIDKEYNSELGWEFLFSMKQNEYFVFPDKDFKPNEIDLMKSENYSDVSPHLFRVQKLSSKDYWFRHHLDTTVDVHNALKGIAWLRIGPSGLEGAVKVRINHIGEIVFVGEE

SEQ ID NO: 22772 - protein, 1463 aa, unidentified
  REGION 1..1463: note = Cas Enzyme sequence
VICVANIIKIIKKNIMAKKLGLDLGTNSIGWALRESDVDVRKRYLIDYKNYNDETDKDKKILSNEIVDYGVVIFKKGVGDGKNGEFSLAAERRTNRSKRRLYNAKRYRKWELLKILVENNMCPLTMEELRLWSNGNWKQIDGKWKNLGRIYPVFNENFQQWLAFEPNIFDQKGTSHNNKAVRKNPYDLRCELIMNEEENDYLKKLKIGRTLYHLVQRRGFKSSRKSGKSAYAKNEDIEKLKTENPDFQISILAKSKLDNGLRFRASGVIQRKYFEDEFFAICSKQKLDSEMTDKLYKAIYFVRPLRSQKGLVGNCTLEKGKPRIPVSHPKYEEFRALQFINNIKWREKGKKEFNEIPITLKKRILEDLFFRKIEKGQNKGKISTDGYFKFDEIIKNYSENGQYEFNYNNLPNVSTCPTIAELMNVFDADWHEKFIQDQNKIGINWSGLQIKYIPKYGKLKRVIKNGKKIYVNKDFSEKTLRVDEIWHLLFDYIQTKDDAEKLEKFCKDVLGFDDTKANSFSAIDIPQGYGSLSYKAILKVLPFLQDGYIYSEAVLFANLKKVLGNKFEENKEPARKIIAKTIKETGKIKEKLNIVNGLIQKFFEDTEMTHAKGVDDTIKEMAWQDTKDKLKKYFGETDWNKKPESEKEVLENDVFNLYIKFLNGEQTKEEKASAKENKIPEIDYYKLPRLDVAIKMKLKETFNVNDSELKHLYHPSDIEMYPQSKTEREFVINGYKTNVKLLESPQPPSKGWKNPMAMRTLHELRHLLNYLLKIGKIDSDTKIVVEMARELNDANKRWAIQTYQKFRELENKEFAKAIVGVAKEKYPHLKENDIENINKVRLWWEQLDNHEEVYKQIKALKDDIEKYRLWKEQDCTCMYTGKLINISNLFDGAQTQLMHTFPISSSFDSSLSNLTVGDAYYNNEIQGNLIPTQLPNYFDDAMINGHKYTAIKPRIKKWEEKVEHLKELIEDNKRRTKKIQDPEAKKGLIQKRHLLQFNYDYWKKKIETFTLEEIPLKWKNSQLIDTQIISKYARAYLKTVFEKVDVQKGTITDTFKKIYQIKGEEKKDRSKHSHHAIDAAVLTLIPGSAKREAILKEYFKAIEINQKFYATPYTKYDSLHVHEIENNILINHISNDKTLTSTIKNIRKRGELTGRIAKGDSIRGQLHKETFFGAIKALERNEQGFPIKENGKYKVIKNKNGEDEIWIVSRKQIKDINIEKDIIIDELLKQHIQKQLEKGIGIANVIDFNNKPIRHIRTRVKAGIGFLSKEKAIPIKKQTYVSQHNHKNEYLVQNEENYLFLLYEGFNEKMKIIRHYRILNLFDIAQLKIKNINEIRNEKEFQTITKGKIELGLKAILKTGDRVIFYKDSKDEITMDNAKFRLFKLFKFNEMGCPFLYFQNHLESRSDVEIEKPENTFNFSKYQARLTLVLDKINCLIENMDFEIKPDGAIIFINQKFDNSPHI

SEQ ID NO: 22773 - protein, 1436 aa, unidentified
  REGION 1..1436: note = Cas Enzyme sequence
MKKILGLDLGTSSIGWALVNEAENEGEKSEIIKLGVRVNPLTVDELLNFEKGKSITTNADRTLKRSMRRNLQRYKLRRENLISILKDNNLITHESILTENGNRTTFETYRLRAKAATEEITLEQFARVLLMINKKRGYKSSRKAKGSEEGTLIDGMEVAKILYNEHLTPGQYCLKQIKNGKKYLPDFYRSDLQQEFDKIFEKQMTFYPELLTKDLQRELRGKKRDAVWAICSKSFKEKGFELVGIKRQGNSAEQKLENFVWRDKGLSEKLDLEQLVVVLQQINIQVNSSSGYLGSISDRSKELFFNQIAKSDGSTRAQTVGEYQIAILKNNPNASLRNMVFYRQDYLDEFNTIWEKQAEYHKELTEELKREIRDVVIFYQRPLKSQKSLISFCEFESRKVEITVDGKKKIRTIGSRVIPRSSPLFQEFKIWQILNNIEVYGKGRKNRKQQEPSLLNISEDPLKNSGKRKLYQEEKELLAAELTIIKELKKADVLKLLFDNHKELDMNFNSIQGNSTQAALFDAYKQIIELSGHEVDYEKKSANEIIKAVEEIFSGLGFNTDILYFNSDKPLDEQPMYKLWHLLYSFEGDSSKTGNENLINKIKELYGFDRESAKILANVTFQDDYGSLSARAIYKILPRMKQGEDYATACAYIYNKHSKNSLTKEELEKKVYKDKLEILPKNSLRNPVVEKILNQMINVINSIIDNYGKPDEIRIELARELKKSAKEREELTKSIAETTKLHEQYKSILSKPPFNLQYISHNDIVRYKLYEELKENGYKTLYSNTYISPTTVFSGDFDVEHIIPQSRLFDDSFSNKTLELKSINIEKGNKTAYDFIKEKYGETGSENCLDVYLIRIEDLRKKGVISKTKYNKLKMQEKDIPDGFINRDLANSQYIAKYAKTMLGELVKFVVSTTGSITDRLREDWQLVDVMKELNWEKYKSLGLTEEITNGEGQRIRKIKDWTKRNDHRHHAMDALTVAFTKRQYIQYLNNLNARRVSDYQGISNAEKEEHDNFSIAAEDVILNTRDVLGIEKKYLYRDDKNKLRFKPPIPLDEFRAEAKHQLENTLISIKAKNKVTTKNINITKKKGGVNKKEQLTPRGQLHNETVYGSHKEYVVKEETVSAKFNSEKIALVANPEYRKALAERLQQFGNDPKKAFTGSNALSKKPIWLNELHTKQVPEKVKTVSFETIYTIRKEVSPDLKVDKVVDKKIRQKLETRLKGFEGDAKKAFSSLEENPIWLNEEKGISIKRVTITGVNNVESLHEKRDKYGNYVLDKNGNRQPVDFVSTSNNHHVAIYRDAEGNLQENVVSFFEAVNRRNLGLPVIDKNYKSGDGWKFLFSMKQNEYFVFPNEKTGFNPNEIDLLNPDNYSLISPNLFRVQKMATKDYTLRHHLETNVETNNQLKGITWIRTGLNGLLNIVKVRINHLGQIVSVGEY

SEQ ID NO: 22774 - protein, 988 aa, unidentified
  REGION 1..988: note = Cas Enzyme sequence
LHEPEEYIFDLDARVSLFEELNIKGNLTAKKALELLGHDANQWEVNFVKLEGNHTNQLLYKAYLDILEYEGYDIKELLHVKSNKDEVDLDDLNVPALQIKNMIKDVFGALKIDTSILDFNAELDGVDFEQQPAYQLWHLLYSYEGDDSNSGNERLYRLLNKKFGFTTEHAKILAGISFQNDYGSLSTKAIRRIYPYLKENKYSDACVLAEYRHSKNSLTKEELESRELKDRLEPIKKNSLRQPVVEKILNQMVNVVNALIDKENDQLEASGHQRNFHFDEIRIELARELKKNAAERAEMTSNINAAKLNHDKIVKILQKEFGILNPSRNDIIRYKLYEELKNNSYKDLYSNRYIAKEDLFTNKIDIEHIIPKSRMFDDSFSNKTLAFRDVNLRKGEKTAFDFMQIDTDDEGFELYLSRVENLYKLGMRSPEEGISKAKYKKLLKKESELDDGFIERDLRETQYIAKKARQMLFEVTRSVISTTGSITDRLREDWGLINVMKELNFQKYKALGLTETLERRSGQKIEVITDWTKRNDHRHHAMDALTIAFTRHSHIQYLYYLNARKDEHHKLHSVILAIENKETLSRPDADGSKKRVFKEPITNFRKIAKEHLEDIIISHKAKNKVVTKNKNKIAKNNHVQTTLTPRGQLHKETVYGQYRYSVKKEESVGAKMTYDTIMKVTKPAYRNALLERLKESGGDPKRAFTGKNAISRNPIFLNEAKTECLPEKVQLVWLEKDYSIRKDVNPDNFKDEKLIDKILDEGIKRIMKERLRQYGGDPKKAFTDLANNPIWLNKEKGISIKRVTISGVSNAEPLHYKKDHHGQFLVDENGNNIPADYVSTGNNHHVAVYRDENGNIQENVVSFYEAVSRKNQGLPIIDRSYNQHLGWQFLFTMKQNELFVFPNAQTGFDPLNIDLFDAENKKIISPNIFRVQKIAQKDYFFRHHLETNVENNPATKNFTWKREGTLGLKGIIKVRVNHLGDIVSVGEN

SEQ ID NO: 22775 - protein, 1459 aa, unidentified
  REGION 1..1459: note = Cas Enzyme sequence
MKKILGLDLGTNSIGWALVEQDFNNRQGKILGMGSRIIPMSQDILGDFDKGNSVSQTSERTRLRGIRRLRERHLLRRQRLHRVLKILSFLPEHYAKQIDFERRLGQFLPDKEPKLAYNDRGFIFIKSFEEMLNDFRSRCPELLIDKRGESRLIPYDWTIYYLRNKALNQKIEKEELAWILLNFNQKRGYYQLRDEEEEENPNKLSEYYRLKIIDVIIDPEKNRKGETWYSLILENGWVYRRSSKTSLLNWKDRIRDFIVTTDLNEDGSVKKDKEGNEKRSFRSPGEEDWTLQKKKTEHDIGEMNVTVGTFIYTALLRGPQQKIKGQLVRTIERKFYKDELKKILEKQIEFHSELQDESIYNDCIHELYRNNESHQNLLMSKDFVHLFINDIIFYQRPLRSQKSSIGNCTLEFRKYKDKNSHEQTQYLKAIPKSNPYYQEFRIWQWMYNITVYRKDDNFNVTTDYLSCVKDWEDLFAFLNDRKEIDQKGLLKYLIGQKGVKGKKLTEEIEKFRWNYVEDKKYPCNETRTNIIHRLGKVENVSDKFLTREIEQTLWHIIYSITDKADFEKALKTFAIKFGLDTTSFVTTFVKFPPFKSEYGAYSEKAIKKLLPLMRIGKYWNWDNIDEKTKERIDKILTGEYDGGIKERVREKALHLKTTDDFQGLQLWLAQYIIYDRHSEASLVGKGNSLTDLEKYLLEFKQYSLRNPIVEKIVTETLRVTRDIWSSYGNGDSNYFDEIHIELGREMKNTAEARKRITSQISENENTNLRIKALIAELKRDASIANVRPHSPLQQEALKIYEEGVLNSDIEIPDDIARISKSSQPERSEMLRYKLWLEQKYRSPYTGEIIPLSGLFTSNYQIEHIIPQSRYFDDSMSNKVICESAVNQLKDNQLGLEFIKKHHGEIIPAENGNKVKIFLEDEYVAFVKMHYGKNRTKQNKLMLEEIPDKMIERQLNDTRYISKFISNLLSNIVRGSENDDGINSKNIISVNGKITSILKKDWGLNDVWNELILPRFERMNQITHSDKFTSKNTSGKTIPSIPIEISKGFQKKRIDHRHHAMDALVIACTTRDHINLLNNKHANERNQRFDLNRKLRKFEKVSYIDVKSGKQIDREVPREFIKPWGNFTVDSKNTLSKIIVSFKQNIRVINRASNSYSKWIVNNGDKAKGILKQAGTNWAIRKSLHKDTVSGKVDLRRIKIPKGKILTATRKTINSSFNLKTIESITDTGIQKILINYLSSKGNDPELAFSPEGVEDMNRNIRQYNDGQFHQPIYKARIFELGNKFPLGSVGNKKTKFVEADKGTNLFFAVYENEEGKRTYETVPLNEVIEYQKQSAHLQKEQRIPIQPNPDKGKFLFVISPNDLVLVPKNEDIGDVMNENDLYDIATDRIYKMVSCTGNECHFVQANIASLIKNYESRSKIGELGSLNKLETTMDLIDPCRIKEKCHKIKVDRLGNLCRN

SEQ ID NO: 22776 - protein, 1462 aa, unidentified
  REGION 1..1462: note = Cas Enzyme sequence
MKKILGLDLGTNSIGWALVNEAENENEKSSIIMLGVRVNPLTVDEQKNFEKGKSITTNADRTMKRGMRRNLQRYKLRRENLIEILKEHGFITDETILSENGNYTTFETYRLRAKAVTEEITLEQFARVLLMINKKRGYKSNRKAKGAEEEGVLIDGMEVAKLLYEKDLTPGQYCLQLMEQGKKQLPDFYRSDLQEEFNRIWAKQQEFYSEILTDKLKENLREKSEKATWTICKEPFNIVGIPRTTKGEELKKENFAWRTKALSEKLDLESLAVVLQKINGQINNSSGYLGAISDRSKELYFNIQTVGQYQMTVLAQNPNASLKNMVFYRQDYLDEFNIIWEKQAEFHKKELTEELKKEIRDVIIFYQRRLKSQKGLIGFCEFESRQIEVEIDGKKKIKTVGSRVIPRSSPLFQEFKIWQTLNNLEVSGKGRKSKKKKEHSLSLFTNQEDPLLIYGKRELYQEEKELLATELSIKEKLTKSDILKLLFDNPQELDLNFKEVQGNLTQAKLFAAYRDIIEQTGHILDLKKSASEILENVEQIFSGLGYNTDIIRFNSDTDNLDNDPMYKLWHLLYSFEGDNSKTGNENLINKITNLYGFEKEYAAILANITFQDDYGSLSAKAIRKIFPYLKEGNKYDISCEYAGYRHSASSLTKEELENKIYKDRLEILPKNSLRNPVVEKILNQMVHVVNAIIADPQLGKPDEIRIELARELKKNAKERQELTKSIEESTRMHEQYREILSKPPFNLSYISRNDIIRYKLYEELKDNGYHTLYSNTYISPTTLFSGDFDVEHIIPQSRLFDDSFSNKTLELRSINIEKGNATACDFVKEKYGETNNENSMENYLNRIEKLYKTGVLSRAKYNKLKMQEKDIPSGFIERDIRNTQYIAKYAKTMLNDLVKVVVSTTGAITDRLREDWQLIDVMKELNWEKYKNLGLTTEFTNEEGYRIRQINDWTKRNDHRHHAMDALTVAFTKRQFIQYLNNLNARRTDKNQSISNTEEEEYDNFAITTEDMLLNTRDVLGIEKNYLYRDHRNKLRFYPPIPLNDFRAEAKYHLENTLISIKAKNKVTTQNINFTKRKGGVNKKTQQTPRGQLHLETVYGSQKQYVVKEESVNAKFDAEKIATVSKPAYREALLRRLQEFDNDPKKAFTGKNSLTKNPIWLNKLQTAQVPEKVKTISFETAYTIRKEISPDLKLDKVIDLGIRRILENRLKEFRNDAKKAFSNLDENPIRPNKEKGIAIKRVTISGISNAEALHDKRDKEGNLILDKNGKPQPVDFVNTGNNHHVAVYRKPVLDKNWNHAEDENGNKKYELEENVVSFYEAVSRKNLGLPVIDKTYKASEGWQFLFSMKQNEYFVFPRTEKVEKIDEETGEITEEEIVVFDPNDIDLLNPDNYKLISPNLFRVQKFSFKNYVFRHHLETTIKDTSSVLKGITWTDFRSSKGLDKIVKVRVNHIGKIVSVGEY

SEQ ID NO: 22777 - protein, 988 aa, unidentified
  REGION 1..988: note = Cas Enzyme sequence
LHEPEEYIFDLDARVSLFEELNIKGNLTAKKALELLGHDANQWEVNFVKLEGNHTNQLLYKAYLDILEYEGYDIKELLHVKSNKDEVDLDDLNVPALQIKNMIKDVFGALKIDTSILDFNAELDGVDFEQQPAYQLWHLLYSYEGDDSNSGNERLYRLLNKKFGFTTEHAKILAGISFQNDYGSLSTKAIRRIYPYLKENKYSDACVLAEYRHSKNSLTKEELESRELKDRLEPIKKNSLRQPVVEKILNQMVNVVNALIDKENDQLEASGHQRNFHFDEIRIELARELKKNAAERAEMTSNINAAKLNHDKIVKILQKEFGILNPSRNDIIRYKLYEELKNNSYKDLYSNRYIAKEDLFTNKIDIEHIIPKSRMFDDSFSNKTLAFRDVNLRKGEKTAFDFMQIDTDDEGFELYLSRVENLYKLGMRSPEEGISKAKYKKLLKKESELDDGFIERDLRETQYIAKKARQMLFEVTRSVISTTGSITDRLREDWGLINVMKELNFQKYKALGLTETLERRSGQKIEVITDWTKRNDHRHHAMDALTIAFTRHSHIQYLNYLNARKDEHHKLHSVILAIENKETLSRPDADGSKKRVFKEPITNFRKIAKEHLEDIIISHKAKNKVVTKNKNKIAKNNHVQTTLTPRGQLHKETVYGQYRYSVKKEESVGAKMTYDTIMKVTKPAYRNALLERLKESGGDPKRAFTGKNAISRNPIFLNEAKTECLPEKVQLVWLEKDYSIRKDVNPDNFKDEKLIDKILDEGIKRIMKERLRQYGGDPKKAFTDLANNPIWLNKEKGISIKRVTISGVSNAEPLHYKKDHHGQFLVDENGNNIPADYVSTGNNHHVAVYRDENGNIQENVVSFYEAVSRKNQGLPIIDRSYNQHLGWQFLFTMKQNELFVFPNAQTGFDPLNIDLFDAENKKIISPNIFRVQKIAQKDYFFRHHLETNVENNPATKNFTWKREGTLGLKGIIKVRVNHLGDIVSVGEN

SEQ ID NO: 22778 - protein, 1470 aa, unidentified
  REGION 1..1470: note = Cas Enzyme sequence
MGKKILGLDLGTNSIGWALISTDESGKPHKIEGMGSRIIPMTQDVLDTFSGGKPLETQTAARTSYRSIRRLRERHLLRRQRLHRVLNVLGFLPEHYAKQIDFEKRLGQFLNEKEPKLAYNDRDFIFKASFEEMLNDFKQTQPQLFYKKKNGEENRIPYDWTIYYLRKKALSHKITKEELAWIILNFNQKRGYYQLRGEDEENPNKLVEYHSLKVIDVIADEKPNNKGDIWYSLILENGWVYHRSSKTPLFDWKNKVRDFIVTTNLNDNGTIKTNKEGKEDRSFRAPSEEDWTLLKKKTEQEIVKSNKTVGAYIYENLLQNPSQKIRGKLVRTIERKYYKEELIAILKKQIELQPELFTDDLYNDCIRELYRNNEAHQFVLSKRDFVHLFVEDIIFYQRPLRSQKSSISNCSLEYRVYKDKDGNEVKEYLQAIPKSHPLYQEFRVWQWLSNLKIYRKEDDADVTTEFLKSSEDMVNLFDFLMTQKEVGHNDILKHLFTPALKEKFPNAKPTAFNKELDKEIAKYRWNYVFDDSKDKEEEKSKKYPCNTTGYEIRRRLEKANIMPVVFFTPEIEQHLWHIIYSVTDKKEYEAALKSFAKKYNLDENSFVEAFKKFPPFPSEYGSYSEKAIKKLLPLMRMGKYWKWETIDKNTQNRINKIITGEFDENIKNRVREKSINLTEINQFQGLPLWLACYIVYDRHSETDIAGKWNSVAELEEYLNNFKQHSLRNPIVEQIITETLRVVRDIWKYYGNGEKDFFSEIHIELGREMKNTAEDRKRITEQTTKNEATNTRIKALLMELKENTDGKLHVENVRPESPMQQDALKIYEEGVLNSAYEIPEDILKISKSAQPSKAELYRYKLWLEQKYRSPYTGDVIPLGRLFTEDYQIEHIIPKSRYFDDSFNNKVICESAVNQLKDKQLGLEFIKNHHGTKVDCGFGKMVEIFSEEAYKAFVNEHYKKNKAKRQNLLLEDIPEKMITRQLNDTRYISKYISALLSNIVRSDKDDDGVNSKNLIPGNGKITSVLKKDWGLDAVWNDLILPRFERMNQITNSNSFTYWNEQYQKYVPVDYSPIDSKKIDKKRIDHRHHAMDALVIACMTRDHVNLLNNQSANSETHRYDLQNKLRNKSKETWIDKKTNKQIVRDVFKEFKKPWDNFTVDAKNALENVVVSFKQNLRIINKATNYYQKWIDKDGRKVKVFVKQEGINWAIRKPLHKETVSGKVSLRHIKVPKDKILTATRKNIDDTFDLKKIESITDTGIQKILRNYLAYKENKPEIAFSPEGLEEMNINIKQFNNGKFHQPIFKARIFELGSKFPLGEKGNKKTNYVEAEKGTNLYFAIYQNDEGKRTFETIPLNIVIERLKQGLPPVELKGKNDFYLTPNDLVYVPNEDERINISVSKQIELTKEKRQNIYKVVSFSGNQIFFVRNEIATSIINKAEFTTLNKMERALDGTMIKESCIKLKVDRLGNISLS

SEQ ID NO: 22779 - protein, 1430 aa, unidentified
  REGION 1..1430: note = Cas Enzyme sequence
MIGGRIMKKILGLDIGTTSIGWAYVNEAETEDEKSLIKKLGVRVIQYDDNLKTVDRKTGKISDSKNPAKDFESGKGLSPNAGRTLKRGARRNLDRYQLRRAALIKILKENNIITDNTTFSESGKQTTYSTYEKRAKAAHTKINKDDFARILLMINKKRGYKSSRKAKSQDDGEAIDGMEVAKKLYENDLTPGEYVHKLLLKGKKYIPDFYRSDLQSELDKIWTFQKAFYGEILTDKLKEDIKGKNKGATWKICEKPFCIMGIKQKGSREEQKLEKYSWRTKGIKAKLDLEQLAIVLQEINSQINNSSGYLGAISDRSKELYFKKETVGEYLYKQLKQRPSIRLKNQVFYRQDYLDEFEIIWEKQKEFYPEFTDKLKSEIRDIIIFYQRPLKSQKGLLGFCEFESWEEEYFDEKSGKKKKKRVGHRVIPKSSPLFQEFRIWQNLNNLILTDITTGETGSLNQELKELAFENLNVVGKLSTNNFLKIIVDKPKNYELNYENIEGNRTNSGLIKAYQKIVEYEGGKYDFSKMKTTEVIRIIEEKFTELNIPTEILYFNSDLEGNDFDKQPIMQLWHLLYSAVDDEKLIIKLTQKFGFKKEYAKIIADVSLQGDYGSLSARAIRKILPYLKEGNTYDEACALANYNHSKSLTKKENEERELKDKLELLPKNSLRNPIVEKILNQMVNVVNAIIEDENLGKPDEIRVELARELKKSASEREKITKYIGKATKENEEIRKLLISDFGISKVTRNDIIRYKLWKELESNGYKTLYTNKYISKEEIFSKKFNIEHIIPQAKLFDDSFSNKTLSARDINIEKGNETAFDYLKKKLSPEEIENYLLRIERLYKKGKITRAKFNKLKMRNSEIPDGFIDRDLRNSQYIAKKAVQMLNEVFRKVSTTTGSVTQRLREDWQIINVMKELNLPKYEKLGLVETIEGKNGQPEKRIKDWTKRNDHRHHAMDALTVAFTSYAHIQYLNNMSARGNKKHKKYHKVYGIEQKYLYRNDKNKLLFKPPMPLHQFREEAKKHLESILISFKAKNKVVTRNKNKIKIKGKNNYKIKIELTPRGQLHKETVYGSINRYATKEEKIGKNFDLEKIKTVANQSYREALLIRLAKFNGNPQKAFTGKNSPSKNPIYIDNAGVLKVLEKVKLVWKEKQYTIRKEISPDLFKDSKKRDDFVKRIDNIYDEGIKRILKKRYENSKREVEKFNATINKTSEKKKILETAFSNLDENPIWLNKEKAITIKRVKISGFSNVVAIHSKKDHNGNFILDKEGNKQPVDFVSTGNNHHVVIYRDENGKLQDEVVSFYEAVHRVNADLPIINKNKNGCEFLFTMKQNECFVFPSNDFDPNEIDLMNPDNAKIISMHLFRVQKFSKVEYGNSAVRDYVFRHHLETQLIDKNETKDICYKVVKSLGRLEGVVKVRLNHLGKIVKVGE

SEQ ID NO: 22780 - protein, 1209 aa, unidentified
  REGION 1..1209: note = Cas Enzyme sequence
VPLSTDDIKEFTSGNAITRNQERRQKRMQRRRYDRFQLRRDSLIKVLSEKNMMPGNDLINANKLHLWELRSKASEQQIGLQEIGRVLLHLNQKRGYKSVRKSVNADRKETEYVSEIKNRYEKLKETGKTIGQFFYENLLNDRFYRIKNQVFPREAYIEEYDRIMAVQKNFYPETLTDDFIDKVKNEIIYYQRPLKSQKKLVSLCEFEKKTILIDDGKGGKTEAEKGPRVAHRSSPLFQICRIWENINNIKIKDKYGKDLIIPHDKKLEIFNYLDNNEKLRFSDLLKILNLKSNDGWTANSMLDKGITGHTTKVQILKCLNNTGANNNLLKFEIKFIERDKILECVDRETGEIIIKVQERIVDRSIEKEPLYRLWHTIYSINDEKDCINALIRNFNIPEESAKKLANLDFTKEGYGNKSVKAIRKILPYLMDGFGYSDACCIVGYNHSDSLTKEERVARELLDRLPLLKKNTLRQPIVEKILNQMINLVNSIMDNYCINEEGEKIPIDEIRIELARELKQNMEERRNTTFNINRRERENEAIRKRLVEEYGQRATRNNVLKWRLFHSVRGDESKVNNICVYCGKPFGITDALAGIEVDVEHILPRTLFFDDSENNKVLAHRKCNQDKGNMTAYDFMYSKGEKEFNDFIERVNHLYSQGLINKIKKERLLTPAEGIPKDFIKRQLRETQYISRKAVEILSMVCREVNTTSGSVTDFLRRLWGWDDVLMNLHLPAYRNAGLTEWIDIEKDGHSIKKEIIPDWTKRLDHRHHAIDALVIACTKQGFIQRINNLSSEITREDMYKEIAELEDIKAGRRTLLEKYLAGKQPFSTAEVEKAATGILVSFKSGKKVATQGTRKVKIKGHKKIVQEGIIVPRGPLSEESVYGKIKILDKHKPVKYLFENPHLIFKNRIKRLVEERIEKFDGDVKKAYNSIKREPIYLDEAKTVKLEYGTCYREEYVIKYPVGSLKPQDVNSIVDEEIRRKFQKRLEEFKGNEKNAFKDLENNPVWYDEEKKIPVRSVRCFTGLSMVEPVRYNEKGEPVGYVKPGNNHHIAIYEDNEGNKYEHVCTFWHAVERKKFGLPVIIENPTEVWNQILNEEKELPEDFLKKLPLDGWKFLVSLQQNEMFLLGLPDEEIEKAISENDNALLSRHLYRVQKIASKDYFFRHHLETEINDSADALKLKKFYRIPSIKSFEQLNPVKVRINLLGQLKV

SEQ ID NO: 22781 - protein, 1373 aa, unidentified
  REGION 1..1373: note = Cas Enzyme sequence
MKKILGLDLGTTSIGWALVNEAENNEEKSSIIKLGVRVNPLTVDEQQNFEKGKSITTNADRTLKRSMRRNLQRYKLRRENLIEILKENGFITDETILSENGNDTTFETYRLRAKAAIEEISLEELARVLLMINKKRGYKSSRKVKSNEEGQLIDGMEVVKQMYENNLTPGQYSLSLLKKGGKNLPDFYRSDLEAEFDKVFDKQMKFYPDILSLDLKEELRGKKRDAVWAICAKHFKENGFELVGVKRQGKIAEQKEENYEWRTKALSEKMELEQFVIVIQQINIQLNNSSGYLGAISDRSKELYFNKQTVGQYQMAELDKNPNYSFKNQVFYRQDYLDEFEKIWETQSKFHKELSADLKKEIRDVVIFYQRPLKSQKGLISFCEFENKQVEVEVDGKKKIKTIGLRVCPKSSPLFQEFKIWQVLNNLSVNGEDLEQEEKEALFAELSIKEKLTKTEVLKLLFENHKDLDLNYKEVEGNRTQAALFKAYQQIIELSGHGEYDFSKMSYSEVMEIVEPVFKGLGYNTEILHFDSSLEGKEFEKQPAYQLWHLLYSFEGDNSKVGNEKLVNKISTLYGFEKEYAKLIASVTFQSDYGNLSTKAMRKILPYMKEGSEYSVACEYAGYRHSKKSLTKEELDNKVYKEKLELLPRNSLRNPVVEKILNQMINVVNCIVDTYGKPDEIRIELARELKKSAKEREEMTKAISQVKAEHDKYRAILQNEFGITNVSRNDIIRYKLYLELKDNGYKTLYSNIYIPQEKLFSKEFDIEHIIPQAKLFDDSFSNKTIESRSINIEKGNLTAFDYVKEKYGIQGLSDYQTRVEDLCKKGLISKTKRNKLLMQEADIPSGFIERDLRDSQYIAKKAREILEDLVKFVVPTTGAVTDRLREDWQLINVMQELNWDKYDKLGLTEYYQDKDGRQISRIKDWTKRNDHRHHAMDALTIAFTKRSIIQYLNNLNARSDKSGSIYGIEQKELYRDSHGKLKFNPPIPLDEFRAEVKHHLENTLISIKAKNKVTTQNINITKRKGGVNKTEQQTPRGQLHNETIYGSIKQYVTKFEKVGSDFNAEKIVTVSKPAYREALLRRLQEFNNDPKKAFTGKNSLEKNPIFLDKACSKQLPERVKTVSLETVYTIRKDVSPNLKLDKVIDANIRKILEARLKEYDGDAKKAFSNLDENPIWLNKEKGIAIKSVTITGVSNAIALHEKRDKDGKLILDTDGKVQPSDFVSTGNNHHVAVYRDAAGNLQENVVSFFEATTRLNIGLPVIDKNYKSDEGWKFLFTMKQNEYFIFPNKEVGFDPNEIDLLNPDNYALISPNLFRVQKIAIKDYSFRHHFETTVDGKNDLKGITWKRCSLSGIIGIVKVRINHIGQIVSVGEY

SEQ ID NO: 22782 - protein, 1375 aa, unidentified
  REGION 1..1375: note = Cas Enzyme sequence
MKKILGLDLGVASIGWALVNQAENEGEKSSIIKTGVRVVPLSANEANNFEAGRPCETNAERRKYRTMRRNLQRYKLRRSNLKEILKEAAWIDEKTILAEQSNASTFETYRLRAQAATGPVSLEEFARILLMINKKRGYKSNRKANNPEDGTATDGMEVAKELYASGLTPGEYGLKILKSGKKYIPEFFRSDLQAELDKIWEVQKAYYPEILTDDFKNIIAGRGKNDISKIFLARYGIYTADNKGKSKNLQEYQWRVDALANRLEKDVLAYVIAGLSGAIRNSSGYLGEISDRSKELFFSKKTVGQYLYEHIKADPHFSTKNIVFYRADYIDEFEKLWEEQSKHHPELTPELKKKIKEEIIFYQRRLKSQKGLISFCEFESKQVKVIIDGKEKSVLRGPRVAPRSSLIFQEFKKWQILNNLELTDKETGEQWELSIEEKKLLSDELNTRDKMTAADAIKFLYNKQSGGKTLNYKTLEGNTTYAAFLRKFMEIVNILESTEYDINKMRSEDALLLIRNIFEKNKFNTDILNFDPLLSKEELEQQALFKLWHLLYSFEGDDSRTGDESLVKHIQEICNMPKQFARMISTISFTDDYGSLSNKAMRNILPYLIEGNKYSVACSLAGYNHSKHSMTKEQIENKELVNRLEILPKGSLRNPVVEKILNQMINVINALGDEYGKPDEIHVEFARKLKMDQKSRENHTERINKNEKNNARIRQILTEKFGIQNVRSSDILRYKLWEELKDNGYKALYSNKYIPAEKIFSNETDIDHIIPQAVYFDDSFKNKTLEYKDINLKKGKSTARDFVESEFGPEGLEEYIGRVNSLFENDVNSRTKRKYLLMRSSEIPDDFLNRDLSNSQYIAKKATEILESYVKTVMPTTGSITARLREDWQLVNVMKEINLPKYREVGLTYKEDRGESGEVEKIEDWSKRDDHRHHAMDAITIAFTKLSHIQYLNNLNARSDKSSSVYGIEKYETILNANGKRIFTPPMPLNELRAEFRNQLNSALVSVKAKNKVVTRNVNKTKKKNGYNTAIELTPRGQIHKEQVYGVRNVYETFYVPVGGKLDKDAIAQVASKREREALNKRLTEFEGDPKKAFTGKNAPDKNPIWLDEAHSASIGAKVKCVRMKRVFSIRKDIDKNLSIEKVMDTRIKKILKERLEEFEGDASKAFANLDENPIWLNKEKGICIKKVTIQENFDLDAIREKHDMLGNPILDESGNPIASDYVNLRNNHHVAIYQKPNGDYEEDVVSFFEALERVTNDDPVVDKAYNKADGWEFLFSMKINEMFVFPNPQTGFDPKEIDLMDEKNYSTISPNLYRVQKLSSKYYVFRLHTDTGTQYPNELRDITWKRITNLPEIAKAVKVRVDHTGKIVAVGEYD

SEQ ID NO: 22783 - protein, 1395 aa, unidentified
  REGION 1..1395: note = Cas Enzyme sequence
MKRILGLDLGVGSIGWALVNEAENKDEKSSIIKIGVRVNPLTVDEQTNFEAGKTITTNANRTLKRTMRRNLQRFKLRRADLIKVLKEYHFIKDDTLLNETGNRTTFETYHFRAKAASEEISLEQFARVLLMINKKRGYKSNRKVNNSKEESGQLIDGMSIAKILYEDDITPGEYMLKSIRNNTKKDISFYRSDLQTELNRIWNFQQQFHPEILTENFKNQITGKSQSATSRLFGGIYQISTAENKGKEKVMQSYKWRVDGLTKELSKEILAYVISNVNGEISNSSGYLGAISDRSKRLIINKQTVGQYLMDELNKNANASLSNQVFYRQDYLDEFEKIWETQAQFHSELTPELKREIRDIIIFYQRNLRSQKGLVSFCEFESRKKELTIDGKKKMKIIGYKVCPKSSPVFQEFKIWQTLNNIKVLGKGSSKKSKKTTDDLPLFAGQTVESNERYLNLEEKKILFSELNIKKKMTKDEILKLLFTNYKELDLNFKEIEGNDTQAELYNAYQKIIETSGHEEHDFTKMPSSEIMELVSSVFNTLGIETKILHLDFSLNDVDFQKQPAYKLWHLLYSFIGDNSRTGNEKLIDKISDSFHMDPEYAKIIAGITFKPDYGNLSTKAIRKILPFMKNGEEYSVACEHAGYRHSKNSLTKDEIEKKTLKDHLDLLPRNSLRNPVVEKILNQMINVVNAIISTYGKPDEIRVELARELKKNAKERELMSKNINASKAEYEQYRELLHRDFGILNVSKNDILRYRLYQELKLNDYKTLYSDQYIPQEKLFSKEIDIEHIIPQAKLFDDSYSNKTLEYKSVNIEKADMTAIDFVSSKYGESGLKRYEQHVNFLFANQAINKTKKDKLLTIEDKIPKDFIERDLRDSQYIAIIAKEILEELVRFVVPTTGSITDRLREDWQLIDVMQELNWDKYDKLGLTEIIEDKDGRRIRRIKDWTKRNDHRHHAMDALTIAFTKRSIIQYLNNLNARSNKSSSIYGIEQNELYRDNHGKLRFVPPMPLDEFRNEAKCQLMNILVSIKAKNKVMTQNTNITKTKKGTIKKIQLTPRGQLHNETIYGQIKQYVTKLEKIGSAFDAEKIATVTLRSYQEALLNRLKEYDNDPKKAFTGKNSLDKKPIFLNESHTQKIPEKVKTVTLEPVYTIRKEIGPDLKVEKVVDIHIRQILRNRLEENGNDSHKAFSNLAENPIWLNKEKGIAIKRVKITGVSNAVALRDKRDQLGEPLLDNAGNKQPVDYVSTSNNHHVAIFKDANGDIQEHIISFYEATIRESLRLPIIDREYKNEEGWQFLFSMKQNEYFIFPNKETGFDPKDIDLLNPLNFAIISPNLYRVQKFTTKDYFFRHHLETTVEDKSELRGIAFKRINSLNALKDIVKVRVNHIGQIVFVGEY

SEQ ID NO: 22784 - protein, 1080 aa, unidentified
  REGION 1..1080: note = Cas Enzyme sequence
MARTLGLDIGTNSIGWCLIEDGKKIIGMGSRIFPVGVKEDSYAKSGTEESRNAARRAARGIRRGYDRYKQRRGKLEALLTEHGMMFDKTTSLPTKKLYGLRKEALDRKLELQELGRIFFLMNQRRGFKSNRKEAAKDGDDAKKLTAYKQAMSDFEARLQASGLRTVGEYLASLFDDQPENWHNENEPRERIREHQRIKRELYQQEFDLIWAKQSSYHPAVLTAELKDQLRDKVIFFQRKLKSAKHLVSKCRFEPNKRVMAKSDPLFQEFRMWQRLRDIRVTHGENRVNDPLTNEERGTLAAELGGTASLSKTEIKDLLGFKRSATFNDIGEKLLGNVTVARIKDAVGEDWYWKQDPEKRSKLWHTLYFAEDEGWIEAYAQKSLGMNDEQAKRYAEVNLELDYGSISHKAAQKILPHLVDGLDFASACQQAGYHHSQRELDDPSRMLEAKLNTSKMEPIRNPLVQMTVNETARLVNAVIEEHGKPDLVRVELLRDLKKPKAVREKMRNSMRDKEKLRDEYRAFLQAKKVLPEIRMSDIKKFELWLELEYSVTALEQLDPDVDLMAFAKFADAVSSKDKDKFHLWLECGRVSPYTGEMIPLNKLFTEAIHVEHILPYSRSIDDSFVNKTLCEDHVNDAKGNLTPLEYFEQKRTPADLKAFKQRVKNFSQGKLDKFLATEVKDDFLNSQFTNSAYIGTEVRDLLRTTCKDVRVTNGQLTSLLRNRWSLNRLLNNEADQKNRDDHRHHAVDALVIACTTQSLVQKISSESKFDHTGWQQLPDIGLPWSTFRADVGAKLSGMLVSYKGGKRLLSTKLNKYRHSKAHEGKPEKYQRTVAVRGPLHEETLYGRITIQGKGTKEETYVVRKALTTLTKVEQLENIVDPIVRKTIQDHVAAHNGSLKEAMKIPVHMPVKESNKGKLIPIKSVRMRVNTEEMVELRPMTFVEPGNNFCIAIYEDTKGKRAFRTVSFFEASKRALNNEAIYPPEVEGKKLLMALQQRDLVVLYDKHVDEIQWGSPNWLAQHLYMVRKFDRLGRIGIVLHKASNVDLSKPKDRPEGTSYVVRVGNFSGLPVRLNELGQLVRK

SEQ ID NO: 22785 - protein, 1466 aa, unidentified
  REGION 1..1466: note = Cas Enzyme sequence
MKNILGLDLGTNSIGWALIDKENNKIIGMGSRIIPMSQDILGEFGKGNSISQTAERTNYRSIRRLRERYLLRRERLHRVLNILEFLPKHYSDQIDFETRLGKFKEDTEPKIAYKSTIDETNSKSRFDFIFKKSFAEMLEDFHQYQPELFANDNKIPYDWTIYFLRKKALTKKIEKEELAWILLNFNQKRGYYQLREELEEDTNKKEYVVSLKVIKIVKGEEDKKNKNRNWYSISLENGWVYNATFSTEPQWLMTEKEFLVTEELDENGQVKIVKDKKSDKEGKEKRRITPLPSFDEINLMSKSEQDRIYKKIKAKTETAISNSGKTVGEYIYENLLQNPSQKIRGKLIRTIERKFYKEELKQILQKQKEFHPELQNDDLYNDCVRELYKNNEGHQFLLSKRDFIHLLLDDIIFYQRPLKSQKSLISNCTFEFKKYNVGNEEKIKYLKAIPKSHPLYQEFRLWQWIYNLRVYRKDDDQDVTNDYLNDPEKYADLFEFLSNRKEIDQKALLKYFKLKESTHRWNFVEDKKYPCFETRTLISTRLEKVKDLPPNFLTDQTELHLWHIIYSVTDKIEFEKAVSTFAKRNKLDVTSFVENFKKFPPFKSEYGSYSGKALKKLLPLMRSGRYWKWDDIGEKTKIRIDKIITGEFDEEIKNKVREKSINLTTENHFQGLQVWLASYIVYDRHAEAATINKWDTIEHLENYIKEFKQHSLRNPIVEQVTLEALRVIKDIWKQFGKSAENFFDEIHIELGREMKNTADERKRLTSQINDNENTNVRIKALLAELKNDSNIENVRPFSPIQQELLKIYEDGVLNSEIEIPDDISKISKTAQPSSSELQRYKLWLEQKYRSPYTGQVIPLAKLFTTDYEIEHIIPQSRYFDDSFNNKVICEAAVNKLKDNQTGLEFIKDHHGEIVQTVFDNKVKIFEENDYRDFVKTHYIKNRSKRNKLLMEEIPDKMIERQINDTRYITKFISALLSNIVRAENNDEGLNSKNLIQVNGKITSLLRQDWGINDIWNDLILPRFLRMNQITNSDAFTRYNDKYQKYLPTVPLELSKNYQSKRIDHRHHALDALIIACATRDHVNLLNNKYAKSKERFDLNRKLRLFEKVVYTHPKTGEKIEREIPKDFIKPWDTFTVDTKNFLDTIVVSFKQNLRIINKATNQYQKWVKLNGRNVKKEVKQSGINWAIRKPLHKETVAGKVELKRIKVPKGKILTATRKNLDTSFDIKTIESITDTGIQKILKNYLSAKGNDPTIAFSPEGIEEMNKNITQYNNGKPHRPIYKARIFELGSKFILGLIGNKKAKYVEAAKGTNLFYAIYVDENNKRSFETIPLNIVIERQKQGLSSVPENDDKGNKLLFYLSPNDLVYVPDEDEIINESYLDVSNLSNEQKKRLYNVNDFSSTCYFTPNRIAKAIAPKEVDLNYDNNKKKLFGSYDTKTASVNGIQIKDICIKLKADRLGNISKANR

SEQ ID NO: 22786 - protein, 1078 aa, unidentified
  REGION 1..1078: note = Cas Enzyme sequence
MSRTLGLDIGTNSIGWCLVEDGKGIVAMGSRIFPVGVKEDSYAKSGTEESRNAARRTARGIRRGYARYKLRRTELEQLLTANGMMFDKAVSLPTKQLYSLRREALDRKLELEELGRIFFLMNQRRGFKSNRKEQAKGDEEKKLTATKQAMRDFEARMHAAGCRTAGEYLATLFDDLPENWHNENEPKERIRERQRVRRELYQQEFDLIWEKQQQYHPQVLTPELKHQLRDRVIFFQRKLKSAKHLVSKCRFEPAKHVVPRSHPLFQEFRILQALSNIRITDRDRVNDLLTMEERDALAVQLGQAEKVNVSLIKEWLDYPRSARINDLGDLRGHTTWSRIRKAVGDDWFEEQSKEARLKLWHTLYFAADEGWIEEYAQRALGMNDEQAKRFAEVNLELDYGSISHKAAQKILPFMREGYDFAGACEQAGYHHSQNELDNPARELKDKLTGADIDELRNPLVQMTVNETARLVSAVIKQHGRPDMVRVELLRDLKKPKAKRETMRRDMLAKEKQRDAYRDFLKEKGIISNPYPSDIKKFELWLELEYSESDVTRLSPDMDLKAFKKFAEAVKPADKEKYRLWLECERISPYTGKAIPLSALFTEAYHVEHILPYSRSLDDSFANKTLCEDAVNTEKGNLTPLEYYEQKRTADELKAFKQRVKNFSEGKLAKFLATEVKDDFLNSQFTNSAYIGTEVRKLLRKAFKDVRVTNGQLTGLLRNKVWNLNTLLNTADGQKNRDDHRHHALDALVIACTTQSLVNRISRESQFDFRGVQRVPDVGLPWNTFRVDAAEKLNAMLVSYKGGKRLLTTKTNKYRHSMAHEGKPEKWQRTKAVRGPLHEETLYGRITLQHKGSKEETYVVRKALTSLTKPEQLENIVDPVVRKTVQDHVAKHGSLKEALKMPVYMPVKKENESKLVPIKKVRLRTNAEELVELRPGTYVEPGNNYCIAIYEDRRGKRDFRTINFLEASKRALHKQPIYPSELDGKQLLMTLQQKDLVILYDEHQDEIQWHDPNWLANHLYMVKSFDRIGAIRMVLHKRSNANPNFPKLYPAGTTYTKKVSSFRGVPVAVDALGQITKVQ

SEQ ID NO: 22787 - protein, 1630 aa, unidentified
  REGION 1..1630: note = Cas Enzyme sequence
MVKKILGLDLGTNSIGWALVEQDAENKQGKILGMGSRIIPMSQDILGKFDSGQSISQTAERTRLRGIRRLRERNLLRRERLHRVLNVLKFLPEHYSKEIDFENRLGQFFPEKEPKLAYKLTAGNTNEFIFKDSFHEMITDFKKFQPKLFYLKNSGEETKIPYDWTIYYLRKKALSERIEKEELAWILLNFNQKRGYYQLRGEEEEVQEGKEKTYEVLKVGQVIDSGEKISGKNLKLYDVIFENGWKYDKQIVKTEEWIGKTKEFIVTTSFQSSGEIKRTYKAVDSEQDWIAIKKKAEQDVLKSNKTVGLYIYDTLLQNHNQKIRGKLIRTIERIFYKKELFQILEKQKEFHPELKDLHLYKICLNELYKQNESHKNNIAQRDFTYLFLEDIIFYQRPLKSKKSLISDCSLEHRFYINQLGVSVKSSIKCIAKSHPLYQEFRLLQWLKNLKIFKKTEKEDIEITDVLIQNEEDKKKLYQWLNDKTEIDQNGLLKYPDFDLENKLLTEIGAEQFRIFKKDKELGLSTYYRWNYVEDKKYPLNETRGEILKRLNKNKIDISFLTKENEEILWHLLYSVIDKKEVESALTKFAHKHRLPADFIESFKNFPQFKKDYGTFSAKAIKKLLPLMRFGEFWNASSIDTNTLNRIEKIITGEYDAAIRKRVREKSIHLNDIHNFKDLPLWLASYIIYDRHSEIGEITYWKKAEEIQFLKQHALRNPIVEQVINETLQVIKDIWQHYGNGAEGFFDEIHVELGREMKNPADQRAKMTKQISENENTNLRIKALLAELAQDQNIENVRPHSPMQQEILKIFEEGVYQNEQNDKEKEEIEKIRKKTQPSSSELKKYKLWLEQGYKSPYTGAMIPLSKLFTPSYEIEHIIPQSRYFDDSLSNKIICEAEVNKLKDNQLAYEFIKNNQGLKIELSHGKYVQLYNLPSYELNVKQYFMKNKSKMTKLLLEEIPESFIQRQLNDSRYISKVVKSLLSNLVREEGESEGVAKNVISSNGSITSRLKQDWGLHDVWNELISPRFERLNKITGTQDFGKINENTGKFLPQVPLELSKGFNKKRIDHRHHAVDALVVACTTRNHINYLNNESASENKKSERFDLRNKLRHLEEYNDRTGKKRVIAKDFIKPWPGFTKDAKDLLNKIIVSFKSNHRVINKTVNRYQNWENKPDGTIRKVIKKQTKGDSWAIRKPIHKDTVSGLVNLQFKKSVNFSSAIDNWESIANKALRFKIKEMVKAGLDKKKILSHFKSENYIFNGENIAKVKIYYFTNENENTRVAASRVKLDESFTSTKIESITDSGIQKILLRHLENYIGRMDENSKPVAPEVLAFSADGIEALNSNLRVLNNGKYHAPIYKVRTYETFGNKFCIGTIGNKKAKYVEAAKGTNLFFAIYIDEKGTRSYETIPLNVVIERQKQGLPSVPEQDENGNPLLFHLSPNDLVYVPSEEEIVNPSLVDFKKLKFNQFKRLYNVNDFSTAIYFTPNSHSNSISPKEVDMNWNEIKQKLTGSYDSKTASFDDKQIKDICWKLHVDRLGNIKPIFPIKRNQNFEDQIDNRIQAFSEPSASYITNPKLSFFSDLPSMSEAESGVIAALSMEERLKLGLELIRRVYGDKDISPDFPGKITIKKYPI

SEQ ID NO: 22788 - protein, 1067 aa, unidentified; identical to SEQ ID NO: 15454
  REGION 1..1067: note = Cas Enzyme sequence

SEQ ID NO: 22789 - protein, 922 aa, unidentified
  REGION 1..922: note = Cas Enzyme sequence
CQEFRIEKQIADLRWAKKGRRHPKPLEEPAKQVIRKLLSENERVKFEEIYKALEKTGIPPAPDEYLNLSEGGREDLHGNVTNACMKKLGLESEWQSLTDGHQIAALNLLANTGSPDIFYARNWHENIPKGKKRADGTPEYRCIPGKVVNFINSLAQMEKLDWLSNMGFDSGRSAYSIKALRRLATAMREKGLDETDAISLLYPQVANAAMREELLGELPPHQHTGNVVVDVSLRQVRREVNATIRKLGGPPDSVIIELSRDMPLGVKRRGEIVDGINKNQRARKKAAREIEKETGKAASNVAIRNYLLWREQDEQCLYCGKDISLPDALDELKTNRDHIIPRSITRIGKSRNYLVLVCHSCNDEKGARTPREKWSDDPERWKVIEKQAKRLGKKKLLGKMRQILSKESGESLLDSEEIGDFSARQLQDTSWIAKNCAQWMGMICSNVAVSRGILTESLRRKWGLDTVIPEVRLEKKLPVFDEEEQLITPEDFERHRAYWEERGEGGDSGKTHRRIDKRIDHRHHLIDALVIGLTSRGLYQKMAQAYKREAERTASPADRRRIPLRAKPPIPGIRNLALELVRNCNLTHKRDRWLGGPLFDLNPVSVYEVQVSGNWKLTKLAKNLSGKVSEDIEQRAKDREAGLNQISKIADKAIREIVRQVYEERIDSGASPKRALSKLILDREGNQIQQVRVSYKEKRFSQRWELTKLAEKLSDKVSDNPEKRAKDLAAGLKQINKIANPSTREIVERAYEERIATGKSPKQALSMPILDMRFNKRFGTQIRRVLVKYDEKAKGQITVKHGRNGELKKYLKTEGYAWLEWDAQKGEARLVTLYEAMKSGRSEAPKGVRFFKGDTVLNTSDQKRYVVCQIWAENGGSLVLILHTETRGAKLTGSDSGKKRVSGRNLSKLTLISDDWPPHSSD

SEQ ID NO: 22790 - protein, 1453 aa, unidentified
  REGION 1..1453: note = Cas Enzyme sequence
MIFNMSKKILGLDLGTNSIGWALIDQDFENKKGEILGMGSRIIPMGQELSKFEQGQAQTKNANRRISRGIRKLNKRYKQRRNKLIYTLQQVGMLPEQIKLSEPFEDPLKLDRISILPISKKQKQYTAVDLLELRVKALKEAVSIQELGKIIYLFNQLRGYAGGENEPEKEDDTDEDVDSSEKKETKSYVTFGKVISISDPEKISVKGKEINKYRITLETEDEIIEGDSFLEILKIGDSLELFVNVTVSKKHGETIFFKLPNKTSWRKKMENLEKELAELSKERGAEIYLSEYFLSILKENKWAKIRNNVILRSRYQAEFDAIWKEQCKHHPYLNNLPNETLLEILNFIFPGSKDTQIKYRKAGLEKGLMHVIRNQIIYYQRELKDQSNLISDCRYEKGEKAIAKSHPVFQEFKIWEQINKLTINTKIEYGKNRKGQLQYKYVDRPIPSALKEWLFDELQEKKEIGFSSILTKLKKEYGLRDGIDFFNGMNPKAKLRGNETKLILKKTLGDHLWNELGLSNKKDQVELWDILYNSKGNEYDIESERTSKIIALLKKYSVTTENINQTAIHISKIKFTRSYSSLSLKAIEKILPLVRSGKYFDDIFSFQLKEKIIKLLNENVSDPFEKAAQEYLESNLEVLAEGGIINAYAVILAYDKHTAKEYGETERLDDYKKIQRLIPGELRNPLVEQLISEALMVVKDIWKQYGKPDEIRLELARELKNNADRRAKIYKLNNANQKANDEVKNLLIELKQETTLANIEKYKLWLSQENLGEEFVKQYKDPSKSEIEKMKLWREQGHVSPYTGQPIPLSDLFNRERYDIDHIIPQSRYFDDSFANKIICEKAVNKEKSNRTAMEYFEIGSYIPSVLSKEEFIDHVNKKFEGQKRKNLLATKVPDDPVARQIKETQYISVRVKEELNKIVGNKNVKTTTGGVTDYLRNQWGLTDKFKELLKSRYEKSQPLLAEIEYDNYAKAFAKRKKEYEEKNIPLIDIELSKEQFIQSFNNNFFQKKNNKLIIKGWSKRIDHRHHAIDALIIACTQPAHVKRLNDLNKELQQWLNEHKKEFLADFEGSPSELLDEILNLDEGKREIIFKQIQKFKTIDMPWFGFPESAEQEIQKIIVSQKPKDQLLIQPDKNKQLQIKIRGQLHEGTLYGKSQGLEAYRIPLLKFSGKQFATEKTIEKITNNYLKGVIKEHLKTFSYKKEEAFSAEGIIALNKTLAEKKREKEWKRNGKKKKVGETAFHTPISSVKIFYRDPLKIKKKKNEVDIEDTLQKLDRNRAFNENLYVKTGDNYLFAILEKDGKRIFDLITFFDAANFLKEEFNKAYDKKMLNKEIIFKKYFEEKNKASLLFTLKQGDPVYMTSKDEEVIIDDNSPFYESFWNDTDIRGHNIHYVTKYSGNEIYFINNRIAEPIVKGKEFGSQNAYQNIDGLSIKQHCIKLNIDRLGNVRPAIKFI

SEQ ID NO: 22791 - protein, 1411 aa, unidentified
  REGION 1..1411: note = Cas Enzyme sequence
MSNLTLGLDLGTNSIGWAIRDVSALDNQIIKSGVLIFDKGVGEEKGIEFPKVKKRTESRGKRRNYQAEKYRKWELLEFLINENMCPLTIEELDEWRKYKKNSPRKYPRTEAFINWLRYDFNGDGKPDFHLFGGDKHESYYLFRAKAVSEEDRNEIQKNPQILGRIFYQLVQRRGFKGRNEEEAETMMKGSKDGTTKGRNAIADYIQKYKSLGAALYYYQKERSPSYGKIRIRQRYNLRKDYENELKEICRVQGLDKEFYDKLWKAIIWQRPLRTQKGSVGLCTYERNKRRAPISHPLYEEYRTWVFINNLKIEAPEGWEQEEYLQEKIYPLFFKTTNDFSLKSILNQLHKDGASIISGYATREKTKVLSAKLLKLFEDILGENWKEKYGWKGAFIRVQQPAKKDSNTYTFEDIWHVLFTFDSEEKLKVFALEKLNLQEEKAQKFSKIRLQQGYTTLSLSAIKKILPYLQKGFLYSKAIYLANLQKVLGTHEMSEEFINHFASEIDEIYEKLSTERKLNNVLNGLFRKELVAEGDYHLGENEDLDASDVELVQENIIDVLGQKTWEGITKEEQDKHLNNVLNEYRKFLQKPFQGKKRGFIEQPRLHQAVFNYLQEYYNVPQENIKFLWHPSEQEKYPNADIYQEVNKKGKKFYIKESEIETFLHKNPNAEADGVSLELLGNPLPISKGFKNPMALKTLHKLKQLLNFLLQTQQIDAHTRLVVEIARNLNDTNYRKALEQWQNDRERENQNFRKTIEEINKECQTTFDPNSKNLIRKIRLWEEQDRKCLYTGKTINMCDVLNGEYFDIEHTIPASISFDNELKNLTLADKHYNANIKGKKFPAQLDNYDTNADLNGKSIQPILKNIEAIFGKRSLEKKNIMKVGTEKEIIIERWSKITELEYQLSKLRSLRGVEPKEKRDNLIQKRHKLKFELDYLKQKLQTFTIEEYKASWRNSQLRDTQIMTKYAIPYLKTVFNRVEVQKGKIVSNFKEIYSVKLSTEKKDRSVHSHHAVDAAILTLIPKPAYRDEILKKYQLEIDNRTGRTYHEDPMDWENFKVSYIKNIEEETLINNLKDHRTLTPTFKRMRKRGKFDKKGNGEVKWAKGDSIRGQLHGESFYGAIKQPRRDINNKIMFDDNHQMQLKEDINLVIRKPLLYAKEAASPGFKNLAELEKTIVDKDLFKIIEKQVKEAKGFKEALEKGIFMLNKNGKKINRIRHVRCFERLNHATAVQPHYHDFKSDKEYKRSTYTQNGENVYCLYYKGQLKSKEERSIEIVGIFDLAKLGISNENEFYQIPLFKKLTKKKTELALYAILKTGQKAIFYKENIDELKELSTVELSNRLYKMYQFENDGRIKLKHHMISGSNTEIKKKYKEKSSFEFNQYAPLLRLSSSNWNFAIEDKDFDIELDGNLSFKF

SEQ ID NO: 22792 - protein, 1386 aa, unidentified
  REGION 1..1386: note = Cas Enzyme sequence
MKKILGLDLGTTSIGWALVNEAENEEETSSIIKTGVRVVPLSTDEQISFEKGQSITINADRTLKRGMRRNLHRYKMRRNAVVDVLKEISFISKTTNLAEVDENSTFSTYAARAKAPDEKISKEEFARVLLMINKKRGYKSSRKANNEEEGQLIDGMAIAKKLYNENLTPGQLSFQLLKDGKKSLPAYYRSDLQAEFDTIWKFQKQFYPESLTTEHQENLYGKNKGDTIKYFEKTMGLERAENKGSDKKLQQYEWRQKAINEKLELAEVAFILTEINNQINQSSGYLGAISDRSKELFFNNLTVGQYLYNQLKEDPHASLKNQVFYRQDYIDEFDAIWKEQAKHYQELTSEIREQLRDITIFYQRRLKSQKGLINICEFEGIERIVTIDGEKKKKLVGPRVAPKSSPVFQQFKIWQNINAIRVSKRNNETVVYELEEETKKELFKELNWVKQMTDKLFLSWLFKDSEDNPKEWKLNYKHLEGNRTNAELLEAYNKILESEGYEKVIFGKLPAEDNLLALKECFKTIGINPNILDFKIDLKGDDFAQQPSYELWHLIYSYEDDNSPTGTASLLLKLQDKFGFKEEHARLLAGISFPKDYGSLSARAMRKIIPYLQEGHPFSGTGEDNNQIGACELAGYNHSNSVTKAENEDRELKEELEILKKNSLRNPVVEKILNQMINVVNAIIKDPELGRPDEIRIELARELKKTAQQRSEMTNQIAKVTKDYQEIRELLKKEFGLTYVSRKDLIKYRLYKELKATGYKTLYSGTYIKPEELFTNKFDVEHIIPQSLLFDDSYSNKTLELRDVNLEKGNETALDYCERKGWLEDFKRRVEEVYSAGDIKYMNRKKLLMTKAEIPEGFLNRDLGNSAYIARQSAQILLNITRKVNLTSGTITSKLREDWELVDVLKELNFEKYKAQGLTYTVENRHGKELNRITDWTKRNDHRHHAMDAITVAFTKPAYIQYLNNMSGNSDKGGDFYGVKEKYTYRDKEGGRKFVKPFNNIRQEAKKHLESILISHKAKNKVVTKNKNKIKEKGKGNFKIKTELTPRGQLHKETIYGSSKEYTTKLEKIGGTFDTEKINTVAKKKHREALLKRLEEFDKDPKKAFTGKNSLAKNPVKLNDKGATLPEKVNTVSLSNRFTIRKNITPDLKINKVVDFGIRKILQKRLEDFGRKPKEAFSNLDDNPIWLNEKKKIPLKRVTITGVSNAEPLHNAKDHLGKEIKDEKGEVIPVDYVSTGNNHHVAIYKDEKGNLQEEVVSFYEAVIRKNLGQPIINRNHEKGWEFLFTMKQNEMFIFPSEEFNPLEVDLLDPANSTSISKRLFRVQKISTKNYVFTHHLETEAVGAETFKNKKELAGITYQFHQSEKHLQGIVKVRINHLGDIVQVGEY

SEQ ID NO: 22793 - protein, 1400 aa, unidentified
  REGION 1..1400: note = Cas Enzyme sequence
VKTQSTTAIEMKNIFGLDLGTTSIGWAVVNEAENGNEQSALIALGERVNPLSTDERTNFEKGKSITTNSDRNLKHGARLKLFRYKMRRNNLISLLRDNGIIDDSSILAENGEHTTFETHKLRAKAATERIELTEFARVLLSINKKRGYKSSRKADSAEEGKAIDGMSIAKELYENDLTPGQYVYARLLQNKKYVPDFYRSDLNAEFNRIYARQSTYYPDVLTPELAEQLNGRNEKATWAIVADAFNIKGAKRATKGFDKKVEDYKWRVDALVDKLDPEQIASVLSKINRDISGSSGYLGAIGDRSKSLYFSGLTVGQYQYECLAKNPHHSLKNEVFYRQDYLDEFERIWSVQASHHDKLTEKLKSEVRDIIIFYQRRLKSQKGSVAICELEQYSVDVTVDGKTKRKIVGPKVCPKSSPVFQEAKILQILNNVKVTNRNNDTERPLSGDEKSALFRDLNWCDKMSATEALKLISLNPRIYSINYKQLEGNTTNASLLKSFMSVVDVTGHDSEAIEELPASKKAEIVEEIFKSQGFNTDIFHFDSSVESQAIEHQPAYMLWHLIYSYEGDDSISGNEALIKKLCEKFNFDSESAAIIASVVFKADYGNLSTRALRKILPYLKQGVIYSDACDKAGYRHSKRSLTREEIDNRDYKSHLDQLPRNSLRNPVVEKILNQMINVVNSLIETYGRPDEIRIELARELKKSAKERADLISSINKATADNEKIRQLLINEFGIQRPSRNDVIRYRLYDELSAVGYQTLYSDTYIPREELFSKRFDIEHIIPQSRLFDDSFANKTIEARDINIEKGNATALDFVEAKYDSEYVKEYRNRVDKLLKEGKIGHGKYNKLLTKENDIPEDFINRDLRNTQYISRKALEILSEVAPEVTATSGSITERLREDWQLIDVLQELNWDKYDRQGLTETFVNRDGNTVRRIKDWTKRNDHRHHAVDAVAIAFTRAEYVHYLNNLNAQSDKGKEFYAIRERYLERDKHNNLRFRSPIPVKEFRAVVKDQLEKSFVSHKSKNKVVTKNVNATKCSGGVNRKVQLTPRGELHEATICGRIMQPVVDKEKIGVSFDYDKIATVASAVERKALTRRLDMFNGDPKKAFTGKNSPTKNPIYIDDDRKVELGTKVKTVTMKCVYTKRKEISEDLKLDKVIDKGVKRILQQRLDEYGGDPKKAFTNLDANPIYLNKEKGITIKRVTITGPTEVEPLHSKRDHLGNEMRDADGRTIPTDFINTGNNHHIAIYRDASGNLQERVMSFFEATARACALPPLPVIDKDYRKCDGWEFLFTMKRNEYFVFPRYESVVDSSTGQEKLIKTFDPKAVDLLDRDNYAKISPNLFRVQKLASKYYVFRHHLETNVEEVKELRDITWKRIQTIKLMDDAVKVRIDNLGRIVAVGES

SEQ ID NO: 22794 - protein, 1424 aa, unidentified
  REGION 1..1424: note = Cas Enzyme sequence
MKRILGLDLGTNSIGWALVNEAETDEEVSSIIRLGVRVNPLTVDETQNFEKGKSITTNAERTLKRSMRRNLQRYKLRRDALVEFLKELGFITDETILSEQGNRTTFETCRLRAKAAEEEISLEELSRVLLMINKKRGYKSSRKAKREEDGVLIDGMEIAKKLYEEDLTPGQLCSQLLESGKKVLPDFYRSDLQEELDRIWNVQKQFHPDVFCDAAKEEIKGKNRSQTWAILANYFVWKEEVISWNDREAKNETIEKECKLVGLKRTTKGYELKKENYRWRVQALTEQLGLEEIAVVLQEINGQINASSGYLGAISDRSKVLYFNHQTVGQYQMAELDKNPHASLRNMVFYRQDYLDEFDRIWEKQTEFHKELTAELKKEIRDMIIFYQRRLKSQKGLISFCEFERLEIVVEKDGKKQTKVIGCKVIPRSHPLFQEFKIWQTLNDIKVLGREKKRNALSASESRALYPEEKEILARELAIKENMKKADVLKLLFENPQELDLNFKQIDGNRTGFSLFSAYSKMIEKYGYEPLDFKKPADEIIGQLRTIFTDLGWNTNLFTINLTKEGKELEMQPYFRLWHLLYSFEGDNTPTGNGKLIEKIMQLCGVEKEYAVELASLSFQDDYGSLSAKAIKRILPYLKEGNQYDVACEYAGYRHSKSSLTKEEIENKVLKDKLDVLPKNSLRNPVVEKILNQMVNVINTIIDTYGKPDEIRVELARELKKSAKEREELTKAIAKSTREHEEIRKLLQDEFGMMNVSRNDIIRYKLYEELKDNGYKTLYSNQYIPKEKIFSKEIDIEHIIPQSRLFDDSLSNKTLEYKAINIEKGNKTAYDFVKEKYGEEGLRQYINRCESLFNDKKAKLRKLKMEQKDIPDGFIDRDLRNTQYIAKKALAMLNEICRRVVATTGSITDQLREDWQLVDVMKELNLPKYEALGFVETYEDKDGRKIKRIKDWTKRNDHRHHAMDALAVAFTKDAFIQYFNNKNAAQDSDNRNHTNIIGIKTRYFDKGRALPPIPLEQFRVEAKRHLENLLVSIKAKNKVVTVNVNRTKKKKGENTKIQQTPRGQLHLETVYGSLKQYVTKIEKVNASFDVAKIATVSKQAYRNALLKRLETFSNDPKKAFTGKNTLEKNPLYVDKYQTIRVPEKVQTVEFETIYTIRKPVDPALNVDKVVDVKVRAILEQRLKEYGGDPKKAFVNLDENPIWLNKEKGISIKRVSIRGINNAQSIHVKKDKNGNPIWDENGKQIPVDFVNTGNNHHVAIYRKPVLDKKGQVTFDEDGNLMYELDEVVVPFFEAVTRANLGLPIIDKDYRKSEGWQFLFSMKQNEYFVFPNEKTGFNPKEVDLLDPDNYAMISPNLFRVQTMSKVMYGNNVVRDYKFRHHLETTVKDMKELKDIAYKQYKTLSFGNSVVKIRINHIGQIVSVGEY

SEQ ID NO: 22795 - protein, 1446 aa, unidentified
  REGION 1..1446: note = Cas Enzyme sequence
MKKILGLDLGTNSIGWALVEQDFDAKTGKILGMGSRIIPMGSDKIDYEKGVGITKNAARREKRTARKGNKRYKMRRNKLLYILNEFGMLPEQFQFKDGIPEPKKLQELELLPIKKGTLQPDSLAFCQMKVDALTQKVELKDFGKILYSFNQLRGYSGGNNDEDNKKKKIDDENDEETKKKYEVIVQKIEIKEVKKSEDTFTVRGGKNKGEKQNKYDVTILLDNEEIEGQTELQNLEEKIGLEEELEIRIKRTKTGETVTFALPQKSNWRKNMEAAEKILKEENIFTSELRLRDLQQNKWTKIRNRVFLRNRYKEEFDKIWETQANAHNILKNCPKETLEEIANYIFPGTSESQQNLRKEAIEKGLKYIIKEQVIYYQRPLKPQTELISNCRFEKEEKVISTSHPSFQEFRCWKQINNLYITTKTFNSNAKSKYQYQNRYLTPEEKQSLYEKLQTQKEIGFGAVIDVLNLNKSKAEKLDKEPKDYFLNGLNIKAKLKGCDTLISIKKVLGDSFDRFLEQDKHIVAKIWEVIFDMKNHDGSEYDSTSKRVSSIVELLQNYTDKDTVTELALKLAQNIKFPRKYASLSEKAIQNVLPLIQLNSQNVSETFKTKFENIKHLIDTGEIIDNVDYNLEDYVIDFIKSNPDALQNGGLMESFAVSLVYGKHTAETVKAQISNYHDIKYEERNLRNPIVEQLTNETMQVIKAIWKQYEFNPNELEIRIELARDLKNSAQERDKIYKGQLKNKKINDRVKERLQEEQIPITDENILKYRLYEQQKYRSPYSGDILTAGAFDTYQIDHILPKQRYYDDSFSNKVLVEGTLNQEKSNLTAWEYITQQSSQYKILSVDNYVQHINDNFFGKKKKNLLAEKIPSNPVERQLKDTQYISVAVKNELAKIVGSENVKTSTGEVTDFLRSKWGLKKLFMELTESRFKQMELWDLDEKGNSKTNWITKYYDKEQQKHIYEIKNWSKRYDHRHHAIDALVVAFTEQSHIQRLNNLNKYVQEELNKRKDEFKIEQKEDETILDAFFNLEANRRDEILRTMESSRKFEMPFEGFVNEVREHLETMAVSHKPKDKLGIKVDKKTQKKQLKIRGALHQETYYGKLDERDTKRIDLSALSFADVPKIVIDKGLSNDIIEHKKQSTSMKEAFTGEGLKAFNDNRITRGKQPAYKVKVWYNKEEKKESSLLPLYGKDKKQSVVTGDNYLFVVMEKNTSNKKERMFDVVSLYDSVIIAKGALQESKTNLKREIVEAKIAIIKNEIITDLQEKIKTATKASKKKLEQEKQDWLDEKITIKPLFTLQQNELVYLPTDENDQILNLSKSEFKEWISNKDNKKVFRQRIYKVVKFSGKDCFFISNTYANPISVAKELSEEEQKALKEKYGEKKIPKQEKNYEEFSSFGNCAKTEVNDNFVKDLVLKKDFTGDKPLKIQDTCIKIQIDWLGNITLNR

SEQ ID NO: 22796 - protein, 1515 aa, unidentified
  REGION 1..1515: note = Cas Enzyme sequence
MRYNMKEKHILGLDLGTNSIGWAIVKETTDANTTDAQKSIADAGSRIIPMDAAMQSDFAKGNTVSQTHDRTQYRGVRRLRERQLLRRERLHRVLTLMGFLPKHYANALTRFGKFKPEMEVRLPWNNDLEGNPQFIFMKSYEEMLQRFWSEQPELMHNNMKVPYDWTIYYLRQKALREPITGQELAWILLNFNQKRGYYQTRGEDAETDKTKEEKYYALEVIDVVDTGEKRGKDTWYNVFLENGMIYRRTASEKPDWIGKVKEFIVTTPLDENGMPKKDKEGEIKRSFRMPNSEDWGLQKIKTENDIHQSGLTIGEYIFRALLQNPKQKIIGGLVRVVERDMYKDELRQILEKQKEFIPQLRDAQLYADCIAELYQHNKAYRLSIANRDFTYLLLNDIIFYQRPLKSKKSMIDECPYEYHEYKDENGETKKRHIKCISKSHPLYQEFRLWQFVNNLKIYTSGKDAEGREIDDIDVTSDFLPDEESRANLFDFLNDITNIKQDELLTKYFKIKKPKGKGAKLPYHWNYVQDRQYPCNTTRGEIVSRLSKAHIETSFLNDKKAELHLWHILYSVCDRIELRRALSSYATQYALDKDFVEAMAKFPPFDSEYGAYFAKAIKRLLPLMRMGHHWHLEDIDPQTVERINHIIDGEVDETISERVREKAADLTEIGQYRGQPLWMACYMVYGRHSESTDSAHWRTPADIDAYLSAFRQHSLRNPVVEQVVTETLRTVRDIWEKHHHIDEIHIEMGRELKSPADKRRKDTERMLNNENANLRIKALLTEFLNPELGIENVRPYSPIQQEILRIYEDTVLNSVDELDNDISNILKKFADAKNRPSTNEVKRYKLWLEQHYVSPYTGQPIPLTRLFTPDYEIEHVIPQSRYFDDSMTNKVICESEVNKLKDNALGFEFIKQHHGETIQLSGGRHAVRILEVDSYCELIERIYHNNRTKKRKLLMDDIPAEFIERQLNDSRYISKLVKSLLSNIVREEDEQEAISKNVIVCTGSVTDRLKKDWGINDVWNHIIIPRFLRMNELTDSQNFTSNSANGHLIPAMPLELQKGFNKKRIDHRHHAMDAIVIACTTRDHVNLLSNEAASPKSNTNRYQLSRKLRRYEDIVVNRSDGPKRISVAKEFMLPWIGFQTDVERALRNIIVTFKQNLRVINKTSNHSLRIVDGKKKLVAQTSGDSWAIRKSMHKETVHGEINLRRIKTSSLKDAMQNPQRIVNSDLRAKLKELIMHGYDEKMIKKYFDTYRDSWQDVNLKKIELWYFTKETADRFFATRKSIDTSFTADAIKNKIADTAIQKIMLRHLERYNNKADLAFSPDGIDEMNRNITELNDGHFHQPIYKVRTYEKADKFAVGHTGNKKSKFVEAAKGTNLFFSIHEDDIIDKTTGDIIKKRSFKTIPLNVAIEKMKSGLPIDEEATFILSPNDLVYLPTEAERKSGKITMPIDKERVYKMVSSNKFQAFFINERVASAIQDKFEFSPLNKMERAITGEMIKETCIPLKVDRLGNIIKIGV

SEQ ID NO: 22797 - protein, 1508 aa, unidentified
  REGION 1..1508: note = Cas Enzyme sequence
MRTILGLDLGTNSIGWAVINSVIKEQTERIWIEMAGSRIIPMDAAILGDFDKGNSVSQTAERTRFRGVRRLRERQLLRRERLHKVLKILGFLPEHYLKGIDFEKHTGKFLSGSEPKLPWVKDRWGKYSFLFQTAFNEMLADFAKHQPSLVFDGKKIPYDWTVYYLRKKALTEMISKEELAWILLNFNQKRGYYQLRGEEEEDNAGKSVEFYALKVLSVEATDEKKGRDIWYNVHLENGWVYRRSSNVPLDWEGRVKEFIVTTDLNPDGTPKLDKYGEVKRSFRAPKEDDWMLIKKRTEADITGTHKTIGSYIYDALLQEPQQKIIGKLVKTVERKFYKEELNFILQKQCAFHAELQDRDLYMRCIEALYPGNEVQRRNIANRDFIYLLIDDVLFYQRPLKTKKSLIANCPYEENEYVNRKTGEIKTAPLKCIAKSHPLFQEFRLWYFLSNIRVYQKEREVNGTLHLDVDVTTEFLKTEDDYVALFDWLNSRKEIDQKAFLRYPAFGLKKEINNYRWNYVEDKFYPCNETRHAILSRLEKAGIGIDFLSDEKETALWHILYSVSDKQEIEKALATFAVKNGLNESFVEVFKKFPPFKSEYGAYSAKAIKKLLPLMRCGKYWDMSLIDGTTKERIERIIAGECDESIGAKVREKAMNLSDISCFKRLPLWLACYVVYNRHSEDKEITKWESPADIDAYLAAFKQHSLRNPIVEQVITETLRVVRDIWKQVGKIDEIHIELGREMKNPADKRKRMTTQILENENANLRIKALLAEFVNPEYGVENVRPYSPSQQEILRIYEDAVLKGEEQIPEDIDVILKKFNTSKLPTKSEFLRYKLWLEQKYRSPYTGELIPLAKLFTAAYEIEHVIPQSRYFDDSFSNKVICESAVNKLKDNQLGYEFIKNHHGQKVEVGFGKTVEIFSVDSYERFVKEQYAKSGIKMKKLLMDDIPEQFIERQLNDSRYISKVVKGLLSNIVREKNDSGEYEPEAVSKNILVCTGSVTDRLKKDWGMNDVWNSIVSPRFERLNALTETQCFGHWENKDGKKVFQTAVPLEYQKGFSKKRIDHRHHAMDAIVIACATRNHVNYLNNESASRNAKISRYDLQRLLCDKSRGDGNGNYRWIIKKPWTTFTQDAREALSGIIVSLKQNLRIINKTTNIYQHFDANGTRVYEKQKIGDSWAIRKPMHKDTVFGAVNLRKVKVVRLSVALDTPSMIVDKRVKNKVLELLSYKYDKKKIEKYFKENAFLWKELDIAKVAVYYFTENTTEPLVAVRKSLDSTFNEKKIASVTDTGIQKILLNHLKSKEGKAELAFSAEGIEEMNRNLLQLNDGKGHQPIYKVRVYEPRGNKFKVGVLGNKGAKWVEAAKGTNLFFAIYITEDGNRTYETIPLNWVIEREKQGLVPVPDRNEKGDKLLFWLSPNDLVYLPTEEERDFGRINEPIDRGRIYKMVSSSGNQCFFIPQSISNAIISTKELGSNNKAEKSWDGEMIKNICIPVKVDRLGRIIEVKYRVNE

SEQ ID NO: 22798 - protein, 1264 aa, unidentified
  REGION 1..1264: note = Cas Enzyme sequence
MQKKDEELLPRLECFHNGIILIVICFRWCKIKTIYRKTKIIVILMKKILGLDLGVGSVGWSVVSCDDEHKPVEILGMGSRIVPLTPDESNEFSSGNAASKNQSRTQKRTARKGYDRYQLRRQALTVKLRELGMLPDEALIKLPVLDLWTLRARAATPGEKLSLAEIGRVLYHLNQKRGYRHSKEDDSADKTQRDYVQAVNKRFQEIKDEGLTIGQHFAVKLKESEVITDKGAFYNYRIKEQVLPRAAYVEEFDRIIQCQREFYPEVLTAADVNEIRNEIIYYQRPLKSCKHLVSSCEFMQRELFDAEHNPIRNRKGEIVVAGPKCAPKSSPLAQVCKIWEEINNIRVTNKENDEYFVSIDNKHEIFDFLNTHEKMKADDLFKILGLAKNSGWSADRAMSKGMAGNTTRVSLMKALKGRRDIDEILRFDLREVESNQVNADTGEVLMEIGAECESEPLYRLWHIIYSISDKNEQKAALEKQFGITDESMLESLCRIDFVKQGYSSRSFKFMRKILPSLMDGAKYSEACDVIGINHSDSITKAENQTRKLLTKLPQLQKNELRQPVVEKILNQMINVVNAVIDKYGAIDEIRVEMARELKLSKAGRESAAKNIRTREKANGEIAKRIEELGLVPSKNKILKYRLWEESGKRCFYCGQPVSATEFLNGLDVEIEHVVPKSLLFDDSFSNKVCACRKCNAEKGNATAFDYMKGRGENAFEDYLKRVETAFKENKISQTKKNRLLTPADKIPKDFISRQLVQTQYISRKAMEILNQVCRNVYGSSGDVTAYLRRIWGYDEILHSLDLPRYREGNLTGDVTYVHRGQTHTEERIKDWSKRLDHRHHAIDALTIACTRQSIIQRLNTLNAKTAIGEEQMTLDKWTLAQAHFSVADVADHVADILVSFKSGKKVTTPGKRYVYKSGRRIVAQKNILVPRGALSKESVYGRIKSIEEKVPVKKLFERVDDIVKPRIRHLVRERLESCGGDCSKAVSSLKKSPLYLDEENTIMLEYGSCFKPEYVIKYSLNSIKAKDAASIVDKHIRGVVTARLAAFGDDPKKAFAEPLYADEAGKIQIKTVRCYTGLSQVVPVKKDAAGNDIGFVKPDNNHHIAIYKDADGKYQESIVTFRDAVERKKYGIPVVVRNPAAVLDTIIDKNVPEDLAGGLPSPEWTFVMSMQQNEMFVLGMGDDEFNDALAGRDYKSLGEHLYRVQKLASLDYFFRSQFETKLDDSKGASAMKKFYRTASFKALFALNPRKVSISLLGEISLKDD

SEQ ID NO: 22799 - protein, 924 aa, unidentified
  REGION 1..924: note = Cas Enzyme sequence
ENFQELDMNFKQIDGNHTGFALFSAYSKMIEKYGYEPVDFKKPADEIIEKLETIFTNLGWNTELLSIDLSKEDKELERQSYFRLWHLLYSFEGDNTPTGNGKLLEKIMQLCDVEKEYAVELANVSFQEDYGSLSAKAIKKILPYLKEGNQYDVACDYAGYRHSKSSLTKDEIENKILKDKLEILPKNSLRNPVVEKILNQMVNLINTIIDTYGKPDEIRVELARELKKNAKEREELTKSIARNTREHDEIRQLLRTEFGMMNVSRNDIIRYKLYEELKDNGYKTLYSNEYIPREKIFSKEIDIEHIIPQARLFDDSLSNKTLEYRAINIEKGNKTAYDFVKEKYGDDGLEKFLNRCEALFKDKKTKLRKLKMEEKDIPEGFIDRDLRNTQYISKKALAMLNEISHRVVATTGVITDKLREDWQLVDLMKELNLPKYEKLGMVEMLEDKDGRKIKKITDWTKRNDHRHHAMDALTVAFTKDVFIQYYNNKNAAWMPASKEHANIIGIKARYFENGKALAPMPLAQFRAEAKRHLENLLVSIKAKNKVITSNVNRTKKKNGENRKLQQTPRGQLHLETVYGSHRQYATKMEKVNATFDVAKIATVSKLAYRNALLKRLEAFGNDPKKAFTGKNTLEKNPLYLDEKQTEMVPEKVQTVEFETVYTIRKPIDPNLSIDKVIDVKIRSVLEKRLKEYGGDAKKAFVNLDENPIWLNAAKGISIKRVSIRGISNAQSLHEKKDKDGNLILDKEGRKKPVDFVNTGNNHHVAIYKKPVLDKMGQIVLDEEGNPKYELDEVVVSFFDAVTRANLGQPIIDKDYRRSEGWQFLFSMKQNEYFVFPNEKTGFNPKEVDLLNPENYAMISPNLFRVQKFAYKNYVFRHHLETTIKDTSSTLKGITWTDFRSSKGLDKIVKVRVDHIGQIVSLGEY

SEQ ID NO: 22800 - protein, 1179 aa, unidentified
  REGION 1..1179: note = Cas Enzyme sequence
  REGION 1173..1179: note = misc_feature - Xaa can be any naturally occurring amino acid
SIGWALISESENNGNVNREILGLGCRIIPYEGTEGKDFEKGTGESRNSIRTKMRTVRKGYDRYQLRRKYLVQELIKHNMYPTDELKGLPKMQLWELRSKAVSEKVSLPELGRILLWLNQKRGYKSSRSDSNLDKKDTEYVAKVKSRHQLIKEQNLTIGQYFYQQLKNDPFFRVKENVFPREAYIEEFDSICNEQKKHYPDILTDELISKIRDEIIYYQRPLKSQKGLVSVCEFEGFWRKGNDGKEYFVGPKVAPKSSPLFQLAKIWENINNIRIENKQGNNVEITLEQKKALFEHLDNNEKLTPTDIIRILGLKKNECFFNKQLAKGINGNTTKCAILNCFDDVSKYAHLLKFDVEVIETGKQTYLYDNSTGEVINEKTIKYIHPKIEKEPLYVLWHTIYSISDQDECSRVLQAKFNIEKEIADKLSGIDFTKQGFGNKSAKTLRKILPYLMEGDGYSEAMCYAGYNHSNSLTKDENLKRELLDKLKPIPKNSLRQPIVEKILNQMVNVVNAIIDKYGKPDEIRVELARELKQSKDERNETYLNITKRERENEQIAKKLQEFGLRATRNNILKWRLYEEMDNEDKKLNAICIYCGQPISLVEAIKGTDVDIEHIIPKSKLFDDSQSNKTLAHRHCNSGKGDMTAYDFMKSKPTEVFNAYIERVSKLYANKVISKAKRDKLLMTESKIPENFIDRQLRESQYIAKKAREVLQSISHNVWTTSGNVTAELRRLWGWDDVTMNLQFNKYKELGLTSFVEWESEHGKNKHRKEVITGWSKRDDHRHHAVDALVIACTKQGYIQRFNTLNSSKTKQDLIADVEKKSLEFREKLSLLEKYIISEQPFTVKEVEEKVAEILVSFKAGKKVAVIGKRKVGKKGNKKVVQTGIIVPRGALHEESVYGKVKTVERKPIKYAFENPHLIVLPKIKKLVEERLSKHENVKDAIASLKKEPLYIDKNKQVLLEYASCFSSDYVIKYPVDINFNKVDKVVDGRIKQILQARLNKFNGKPKEAFKDIQRGDKVIKWYEDEGLPIPIKTVRCYTGLSAVVPVKKDENGNNIGYVKPGNNHHIAIYTDSEGNKHEHVCTFWHAVERKKFGFPVIIKNTNEVWDKIQEKPDGTYPEEFLEKLPSPNLTLELSMQQNEMFVLGMAPEEFSDCMVKKDFKAISNKLYRVQKLXXXXXXX

SEQ ID NO: 22801 - protein, 1335 aa, unidentified
  REGION 1..1335: note = Cas Enzyme sequence
MCPLTSDELKLWSVGNWIEIDGKWKNKGRIYPINNVDFQRWLAFDPAIFGDKGKSDKGNPIRKNPYDLRCELINRKEENEYLRKLKTGRALYHLAQRRGFKSSRKSGQSTYAKNEDIEKLKLENPDFQIALLAKEKLNEGKRFRASGVIQRKYFEDEFYAICEKQEIDQDLVEILHKAIYFVRPLRSQKGLVGNCTLEKGKPRIPISHPKFEEFRALQFINNIKWREKGSKEFVEIPISLKKKILEELFFRKLSSGKNKGKISEDNYFKFEEIIKKYSENGTYEFNYKNLPNVSTCPTIASIMNVFQDEWSDCFIQDENRYGINWDGLSIKYKTQDYKNLGRRLKRKIVKGKIKYIEAELKEEKTLGIDEIWHLLFDYIQTKDNQDALEIFCKEVLGFDENKAKSFAAIDIPQGYGSLSYKAISKILPFLQEGYIYSEAVLFANLKSVLGDKFEDNKEDAKRIIAETIKEVSQKKEILNIVNGLIQNYFSKAEISHAKGVDKCIKDLAWQETNNRLKQYFGVADWNKKSETEKEKLEQKVFELYLRFLNGEQKDDEKASAKGIKVPEIDYYKLPRLDIAIKEKLKAKFNVSDNALKLLYHPSDIEMYPVSKTEIKGTDIKLLESPQPPSKGWKNPMAMRTLHELRHLVNYLLKIGKIDKDTKVVVEMARELNDANKRWAIETYQRYREEENKEFAKAIVGVVKQKYPNINENDIENINRIRLWWEQIDNNEETYRQIKSLKEDVEKYRLWKEQNCVCMYTGKLINITNLFDGTQTQLMHTFPISISFDSSLANLTVGDAFYNNEIQGNKIPTQLPNYKNDITINGRTYTAIEPRLKKWQDKIQHLRDLIEENKRRTKKTQDVETKNDLIRKRHLLQFDYEYWQKKVDTFTLEEVPLKWKNSQLVDTQIISKYARAYLKTVFEKVDVQKGTITDSFKKIYQIKGEEQKDRSKHSHHAQDAAVLTLIPVSAKRDAILEEYYKSLEKNEKYHIKPYESYVSAHIIEIENNVIINHIPHDKTLTPTIKHIRKRGKKTGKIAQGDSIRGQLHKETFLGAIKVLERNSQGFPVKENGEYKVLKDKTGKDEIWIVSRKSIKDINIDKDIIVDELLKQHIHKQLNNGVELSNVVDFNNKPIRHIRVRYKAGKGFLSKDKTLPLKSHTYNSKRNHKINYLVQNEENYLFLFYEGINEKNQIIRHYRILNLFDIAQLKIRSIHDIRKEPKFKTILKGKISLNLKNILKVGDRVILFKESKDEITEENLKSRLYTIFKFNEPAKNTAYIYLQHQNEARPDNELDNGEKVFNPFKYQPRLELTPDKMNCLFEGIDFEITPDGTIIFK

SEQ ID NO: 22802 - protein, 1237 aa, unidentified
  REGION 1..1237: note = Cas Enzyme sequence
MKILGLDLGVASIGWALVEKNNENGEINLIKSGVRIIPIETKDALQFSSGNTASPNIERREKRMQRRMYFRRKKRNQSLIKALKDKGLWDVNLINIEKNKLWELRNNAVNEQIPLTELGRILYHLAQRRGYKQMRIEQDESDANSKSDYKKNIYTRYQTIKNENVTVGQYFYKELSNNEHYRVKEQIFPRKAYEEEFEKIINKQKEYYPDILTDEYNNKIRHIIFHQRPLKSQKHLLGVCTLEGKTIKIKNNDGTVKEKYAGPPVVAKTNPLFQIHRIWQTINNITIKNKKTHKIYELSIEEKNKIFNELQNKDSLSIKQLYKILNLSDDEWYFDKLSKNGIKGNELLTLIRNALKGENYPQDMLKLEIKIINYKKKIVDKDTGEIKEQELEMIDPDVVNEPLYKLWHILYSVVDKEECMKALMKNFKLTESAADKLSDINMNSMKYGSLSLKAIRKTLPYLMKGMIYSVACDTAGYDFSNAITKEENTFRKVKNKLDLLPKNSLRQPIVEKILNQMIHVINYIIDENNGLVSREEREKGNFAIHIELARELKTSKDEKQKISSSIRRNKIENERIKSELINQYKLTPTRKLIEKYKLYNELIPEGSNIVQPQCLYCGGFISLTEALTGDAIDVDHIIPQSKLFDDSKNNKILVHASCNRTKGNLTAYDFMKTKNSDIFNNYLSLVETLKNKKSISYIKYKYLLISEKDIPQDFLDRDLRVSQYITKKARELCMNISRDVLVTSGTITARLRELWGYNDILFEINNELMNNLDLTDDDIAQLEEIFRDKRTDHRHHAIDAVTIASTTRSIIQRINTLSSTESKEKINEYLKQMNQESLDTVYNPNEKNLRLLHKYLANQPHPKRDQVKQSMKYILISFKPGKKVATYSKRIVYLGNKPKILQTRILTPRGALHEESYYGRIPIYEFKDLKYAIQNPDLVVNNHIRNQIKELLDKYNNDTKKLWKDIDKEKVFIYSDINNSNAIKDVKCYHYEYVIKKSVQGDKVDQKAIDKKIKEILTNSKNVKEEVYFNYAKHIPIRSVRVFTGLNESSMRPIRLNDKNEPITFVKLGNNHHIAIYQDKNEKYQEHLCDFWHAVERKKYNIPVIIENPDKIWDEILENPDSYPQDFLNKLPDPSWHLVLSFQANEMFVLGLSNEEFDQYFVDKNYAILSNHLYRVQKLSTNQYFFRKQNDTSSDLSSLYRKIEYLKQLSIQSLLKENPIKVRINYLGEIVDYKKTF

SEQ ID NO: 22803 - protein, 1527 aa, unidentified
  REGION 1..1527: note = Cas Enzyme sequence
MKKILGLDLGTNSIGWALVNEAENENEKSSIIMLGVRVNPLTVDEQKNFEKGKSITTNADRTMKRGMRRNLQRYKLRRENLIEILKENGFITDETILSENGNYTTFETYRLRAKAVTEEITLEQFARVLLMINKKRGYKSNRKAKGAEEEGALIDGMEVAKLLYEKDLTPGQYCLQLMEQGKKQLPEFYRSDLQEEFNRIWAKQQEFYSEILTDKLKENLREKSEKATWTICKEPFNIVGIPRTTKGEELKKENFAWRTKALSEKLDLESLAVVLQKINGQINNSSGYLGAISDRSKELYFNKQTVGQYQMAVLAQNPNASLKNMVFYRQDYLDEFNIIWEKQAEFHKKELTEELKKEIRDVIIFYQRRLKSQKGLIGFCEFESRQIEVEIDGKKKIKTVGSRVIPRSSPLFQEFKIWQTLNDIEIFPSNEKNKKRKPNARRLEQDEKELLFKELSIKEKLSKNQTLNLLDLQEFDMNFKNIDGNKTQYELFKAYKKIIEMSDYEIDDDFSIETVDEFFKQLGINTDILYFDSQSPLDEQPMYRLYHLLYSFEGDNSNSGVEKLIAILKKNYGFEERFAKILIGVEFQEDYGNLSAKAIGKILPLMKMGQDYATACSNIYERHSASSLTKEELENKIYKDCLEILPKNSLRNPVVEKILNQMVHVVNAIIADPQLGKPDEIRIELARELKKSADERFLLTDSVSSNTESAEKIRKRLKEEFSIFKTHEPSRNDIIRYRLWEELAPNGYKPLYGSKENLQKGISSEILFTKEIEVEHILPKARLFDDSFSNKTLVYSSDNKEKKEQTAIDYVMKKEGDLNDYLDRIISVYGTKTTKKVITNKKTRNKTIKTETKTFDTLYKEHEKGLKKQKEKIEKWNKATEKERKKLVKPWGLMSDIEKKIEIINKYYSNKLKKLVITESELPEGFINRDLANTQYITKKARKMLSDLVKSVVTTTGSITDRLREDWQLVDVMKEINFPKYKQLGLVENVERIDYETGEVLYTNKKIKDWTKRNDHRHHAMDALTVAFTKRQFIQYLNNLNARRTDENQSISNTEEEEYDNFAITTEDVLLNTRDVLGIEKNYLYRDHRNKLRFYPPIPLNDFRAEAKHHLENTLISIKAKNKVTTQNINFTKRKGGVNKKTQQTPRGQLHLETVYGSQKQYVVKEESVNAKFDAEKIATVSKPAYREALLRRLQEFDNDPKKAFTGKNSLTKNPIWLNKLQTAQVPEKVKTISFETAYTIRKEISPDLKLDKVIDLGIRRILENRLKEFRNDAKKAFSNLDENPIRPNKEKGIAIKRVTISGISNAEALHDKRDKEGNLILDKNGKPQPVDFVNTGNNHHVAIYRKPVLDKNWNHAEDENGNKKYELEENVVSFYEAVSRKNLGLPVIDKTYKASEGWQFLFSMKQNEYFVFPRTEKVEKIDEETGEITEEEIVVFDPNDIDLLNPDNYKLISPNLFRVQKFSKLIYGNSVVREYVFRHHLETSIKNTSSVLKGITWIDFRSSKGLDKIVKVRVNHIGKIVSVGEY

SEQ ID NO: 22804 - protein, 1565 aa, unidentified
  REGION 1..1565: note = Cas Enzyme sequence
NFFSTFIKNFDMKKILGLDLGTNSIGWALVEHDAEIRNGKILGMGSRIIPMTQDVLDTFSGGKPLETQTALRTNYRAIRRMRERHLLRRERLHRVLNVMGFLPEHYANQIDFENKLGQFLEETEPKLAYKDSSFIFKKSFEEMLSDFKHNQPQLFYKKENGKETKIPYDWTIYYLRKKALTQKIFKEELAWIILNFNQKRGYYQLRGEEDEDATRTAQTRIYFDTQVVVEIIDTGSVYKGLKVIQIKLENGDTGKYFSKEIPNWVGVQKNIIATVDLDKDGNDRFEDDGNLKRRFSIPSEEDWEKKWKLIKIKTEKEIKDSQKTVGSYIYDTLLQKPNQKIRGRLVRTIERKFYKDELKQILEKQIELQPELFTPDLYNDCVRKLYRHNEAQQFVLSKRNFVHLFVEDIIFYQRPLKSQKSSIGNCKMEFRVHKDKDGNEIKEFLKTTPKSNPLYQEFRVWQWLNNLKIYRKEDDVDVTSEFLKDVDDSVRLFDFLMSQKEVGHCDILKHLLTPILKGKYPNSKITAINKEVDKEISKYRWNYVFDDSKEKEEDKSKKYPCNTTGYEIRWRLKKVENLPANILTPEIEQHLWHIIYSVTDKKEYEMALKSFAKKYNLDEVSFVENFKKIPPFKSEYGAFSEKAIKKLLPLMRFGYYWNSNAIDAKTKERINKIITGEYDEDIKNRVREKTINLTEINHFQGLPLWLASYVVYGRHSEAEISDKWTFITDLEKYLEDFKQHSLRNPIVEQIVTETLRVVRDIWKHFGQGAAKFFDEIHVELGREMKNTADDRKYLSEQVRINEATNLRIKALLMELKENSDGKLSVKDVRPYSPVQQDVLRIYEEGVLNSNIEFPEDILKISRTAQPSKPELQRYKLWLEQKYRSPYTGQIIPLGKLFTEEYQIEHIIPKSRYFDDSFNNKVICEAAVNQMKDKLLGLEFIQKYYGQEVEIGLSKIVRIFTVNDYKDFVKQNYVNNNAKRRNLLLDDIPEQMIARQMNDTRYVSKFISALLSNIVRAEKDDDGINSKNLIPGNGKITNVLKKDWGLNDVWNDLILPRFERMNQLTNSEAFTYWNEQYQKFLPVDYSPFDSKKIEKKRIDHRHHAMDALVIACMTRDHVNLLNNQSAKSDTSRYDLQNKLRHKVKETWIHKETNKIIERDIFKEFKKPWENFTVDTQNELEKTIVSFKQNLRIINKATNYYEKWIEKNGKKIKETIKQEGINWAVRKPLHKETVSGKVDLRRIKVPRGKILTATRKNIDTTFDLKTIESITDTGLQKILKNYLAYKNNLPELAFTPEGLDELNENIKQFNDGKDHKPIKKVRIFELGNKFPLGESGNKKDKYVEAAKGTNLFFAIYESKEGKRNYDSIPLNIVIERLKQGLPPLELKGENDFYLTPNDLVYVPNEEERENNDNINPKNFNKEQKKKIYKVVSFTGNRLSCVPCNVSSSIVNKLEFTQSNKVEFTKEKEILIKVEVDRLGNISLPNPSNKSNTNSSDSDNTAKEPGTSYATTKKITIFQSPEDAENSQLDYWAKLTPEQRFERFLELMNRFYKFVKPDWSTKKIILDL

SEQ ID NO: 22805 - protein, 1245 aa, unidentified
  REGION 1..1245: note = Cas Enzyme sequence
MKRILGLDLGSASIGWALISESEINGNVNREILGLGCRIIPYEGTEGKDFEKGTGESRNSIRTKMRTVRKGYDRYQLRRKYLVQELIKHNMYPTDELKGLPKMQLWELRSKAVSEKVSLPELGRILLWLNQKRGYKSSRSDSNLDKKDTEYVAKVKSRHQLIKEQNLTIGQYFYQQLKNDPFFRVKENVFPREAYIEEFDSICNEQKKHYPDILTDELISKIRDEIIYYQRPLKSQKGLVSVCEFEGFWRKGNDGKEYFVGPKVAPKSSPLFQLAKIWENINNIRIENKQGNNVEITLEQKKALFEHLDNNEKLTPTDIIRILGLKKNECFFNKQLAKGINGNTTKCAILNCFDDVSKYAHLLKFDVEVIETGKQTYLYDNSTGEVINEKTIKYIHPKIEKEPLYVLWHTIYSISDQDECSRVLQAKFNIEKEIADKLSGIDFTKQGFGNKSAKTLRKILPYLMEGDGYSEAMCYAGYNHSNSLTKDENLKRELLDKLKPIPKNSLRQPIVEKILNQMVNVVNAIIDKYGKPDEIRVELARELKQSKDERNETYLNITKRERENEQIAKKLQEFGLRATRNNILKWRLYEEMDNEDKKLNAICIYCGQPISLVEAIKGTDVDIEHIIPKSKLFDDSQSNKTLAHRHCNSGKGDMTAYDFMKSKPTEVFNAYIERVSKLYANKVISKAKRDKLLMTESKIPENFIDRQLRESQYIAKKAREVLQSISHNVWTTSGNVTAELRRLWGWDDVTMNLQFNKYKELGLTSFVEWESEHGKNKHRKEVITGWSKRDDHRHHAVDALVIACTKQGYIQRFNTLNSSKTKQDLIADVEKKSLEFREKLSLLEKYIISEQPFTVKEVEEKVAEILVSFKAGKKVAVIGKRKVGKKGNKKVVQTGIIVPRGALHEESVYGKVKTVERKPIKYAFENPHLIVLPKIKKLVEERLSKHENVKDAIASLKKEPLYIDKNKQVLLEYASCFSSDYVIKYPVDINFNKVDKVVDGRIKQILQARLNKFNGKPKEAFKDIQRGDKVIKWYEDEGLPIPIKTVRCYTGLSAVVPVKKDENGNNIGYVKPGNNHHIAIYTDSEGNKHEHVCTFWHAVERKKFGFPVIIKNTNEVWDKIQEKPDGTYPEEFLEKLPSPNLTLELSMQQNEMFVLGMAPEEFSDCMVKKDFKAISNKLYRVQKLGSSDYNFRHHLETEIINDENARVSKRFYRITSISGLFAFNPIKVKIDCIGNITAWNNTDRV

SEQ ID NO: 22806 - protein, 1360 aa, unidentified
  REGION 1..1360: note = Cas Enzyme sequence
VRVNPLTVDEQTNFEAGKTITTNANRTLKRTMRRNLQRFKLRRADLIKVLKEYHFIKDDTLLNETGNRTTFETYHFRAKAASEEISLEQFARVLLMINKKRGYKSNRKVNNSKEESGQLIDGMSIAKILYEDDITPGEYMLKSIRNNTKKDISFYRSDLQTELNRIWNFQQQFHPEILTENFKNQITGKSQSATSRLFGGIYQISTAENKGKEKVMQSYKWRVDGLTKELSKEILAYVISNVNGEISNSSGYLGAISDRSKRLIINKQTVGQYLMDELDKNANASLTNQVFYRQDYLDEFEKIWETQAQFHSELTPELKREIRDIIIFYQRNLRSQKGLVSFCEFESRKKELTIDGKKKMKIIGYKVCPKSSPVFQEFKIWQTLNNIKVLGKGSSKKSKKTTDDLPLFAGQTVESNERYLNLEEKKILFSELNIKKKMTKDEILKLLFTNYKELDLNFKEIEGNDTQAELYNAYQKIIETSGHEEHDFTKMPSSEIMELVSSVFNTLGIETKILHLDFSLNDVDFQKQPAYKLWHLLYSFIGDNSRTGNEKLIDKISDSFHMDPEYAKIIAGITFKPDYGNLSTKAIRKILPFMKNGEEYSVACEHAGYRHSKNSLTKDEIEKKTLKDHLDLLPRNSLRNPVVEKILNQMINVVNAIISTYGKPDEIRVELARELKKNAKERELMSKNINASKAEYEQYRELLHRDFGILNVSKNDILRYRLYQELKLNDYKTLYSDQYIPQEKLFSKEIDIEHIIPQAKLFDDSYSNKTLEYKSVNIEKADMTAIDFVSSKYGESGLKRYEQHVNFLFANQAINKTKKDKLLTIEDKIPKDFIERDLRDSQYIAIIAKEILEELVRFVVPTTGSITDRLREDWQLIDVMQELNWDKYDKLGLTEIIEDKDGRRIRRIKDWTKRNDHRHHAMDALTIAFTKRSIIQYLNNLNARSNKSSSIYGIEQNELYRDNHGKLRFVPPMPLDEFRNEAKCQLMNILVSIKAKNKVMTQNTNITKTKKGTIKKIQLTPRGQLHNETIYGQIKQYVTKLEKIGSAFDAEKIATVTLRSYQEALLNRLKEYDNDPKKAFTGKNSLDKKPIFLNESHTQKIPEKVKTVTLEPVYTIRKEIGPDLKVEKVVDIHIRQILRNRLEENGNDSHKAFSNLAENPIWLNKEKGIAIKRVKITGVSNAVALRDKRDQLGEPLLDNAGNKQPVDYVSTSNNHHVAIFKDANGDIQEHIISFYEATIRESLRLPIIDREYKNEEGWQFLFSMKQNEYFIFPNKETGFDPKDIDLLNPLNFAIISPNLYRVQKFTTKDYFFRHHLETTVEDKSELRGIAFKRINSLNALKDIVKVRVNHIGQIVFVGEY

SEQ ID NO: 22807 - protein, 914 aa, unidentified
  REGION 1..914: note = Cas Enzyme sequence
AYKQIIELSGHEVDYEKKSANEIIKAVEEIFSGLGFNTDILYFNSDKPLDEQPMYKLWHLLYSFEGDSSKTGNENLINKIKELYGFDRESAKILANVTFQDDYGSLSARAIYKILPRMKQGEDYATACAYIYNKHSKNSLTKEELEKKVYKDKLEILPKNSLRNPVVEKILNQMINVINSIIDNYGKPDEIRIELARELKKSAKEREELTKSIAETTKLHEQYKSILSKPPFNLQYISHNDIVRYKLYEELKENGYKTLYSNTYISPTTVFSGDFDVEHIIPQSRLFDDSFSNKTLELKSINIEKGNKTAYDFIKEKYGETGSENCLDVYLIRIEDLRKKGVISKTKYNKLKMQEKDIPDGFINRDLANSQYIAKYAKTMLGELVKFVVSTTGSITDRLREDWQLVDVMKELNWEKYKSLGLTEEITNGEGQRIRKIKNWTKRNDHRHHAMDALTVAFTKRQYIQYLNNLNARRVSDYQGISNAEKEEHDNFSIAAEDVILNTRDVLGIEKKYLYRDDKNKLRFKPPIPLDEFRAEAKHQLENTLISIKAKNKVTTKNINITKKKGGVNKKEQLTPRGQLHNETVYGSHKEYVVKEETVSAKFNSEKIALVANPEYRKALAERLQQFGNDPKKAFTGSNALSKKPIWLNELHTKQVPEKVKTVSFETIYTIRKEVSPDLKVDKVVDKKIRQKLETRLKGFEGDAKKAFSSLEENPIWLNEEKGISIKRVTITGVNNVESLHEKRDKYGNYVLDKNGNRQPVDFVSTSNNHHVAIYRDAEGNLQENVVSFFEAVNRRNLGLPVIDKNYKSGDGWKFLFSMKQNEYFVFPNEKTGFNPNEIDLLNPDNYSLISPNLFRVQKMATKDYTLRHHLETNVETNNQLKGITWIRTGLNGLLNIVKVRINHLGQIVSVGEY

SEQ ID NO: 22808 - protein, 1462 aa, unidentified
  REGION 1..1462: note = Cas Enzyme sequence
MKKILGLDLGTNSIGWALVNEAENENEKSSIIMLGVRVNPLTVDEQKNFEKGKSITTNADRTMKRGMRRNLQRYKLRRENLIEILKENGFITDETILSENGNYTTFETYRLRAKAVTEEITLEQFARVLLMINKKRGYKSNRKAKGAEEEGALIDGMEVAKLLYEKDLTPGQYCLQLMEQGKKQLPDFYRSDLQEEFNRIWAKQQEFYSEILTDKLKENLREKSEKATWTICKEPFNIVGIPRTTKGEELKKENFAWRTKALSEKLDLESLAVVLQKINGQINNSSGYLGAISDRSKELYFNKQTVGQYQMAVLAQNPNASLKNMVFYRQDYLDEFNTIWEKQAEFHKKELTEELKKEIRDVIIFYQRRLKSQKGLIGFCEFESRQIEVEIDGKKKIKTVGSRVIPRSSPLFQEFKIWQTLNNLEVSGKGRKSKKKKEHSLSLFTNQEDPLLIYGKRELYQEEKELLATELSIKEKLTKSDILKLLFDNPQELDLNFKEVQGNLTQAKLFAAYRDIIEQTGHILDLKKSASEILENVEQIFSGLGYNTDIIRFNSDTDNLDNDPMYKLWHLLYSFEGDNSKTGNENLINKITNLYGFEKEYAAILANITFQDDYGSLSAKAIRKIFPYLKEGNKYDISCEYAGYRHSASSLTKEELENKIYKDCLEILPKNSLRNPVVEKILNQMVHVVNAIIADPQLGKPDEIRIELARELKKNAKERQELTKSIEESTRMHKQYREILSKPPFNLSYISRNDIIRYKLYEELKDNGYHTLYSNTYISPTTLFSGDFDVEHIIPQSRLFDDSFSNKTLELRSINIEKGNATACDFVKEKYGETNNENSMENYLNRIEKLYKTGVLSRAKYNKLKMQEKDIPSGFIERDIRNTQYIAKYAKTMLNDLVKVVVSTTGAITDRLREDWQLIDVMKELNWEKYKNLGLTTEFTNEEGYRIRQINDWTKRNDHRHHAMDALTVAFTKRQFIQYLNNLNARRTDKNQSISNTEEEEYDNFAITTEDMLLNTRDVLGIEKNYLYRDHRNKLRFYPPIPLNDFRAEAKYHLENTLISIKAKNKVTTQNINFTKRKGGVNKKTQQTPRGQLHLETVYGSQKQYVVKEESVNAKFDAEKIATVSKPAYREALLRRLQEFDNDPKKAFTGKNSLTKNPIWLNKLQTAQVPEKVKTISFETAYTIRKEISPDLKLDKVIDLGIRRILENRLKEFRNDAKKAFSNLDENPIRPNKEKGIAIKRVTISGISNAEALHDKRDKEGNLILDKNGKPQPVDFVNTGNNHHVAVYRKPVFDKDGNHAEDENGNKKYELEENVVSFYEAVSRRNLGLPVIDKAYKASEGWQFLFSMKQNEYFVFPRTEKVEKIDEETGEITEEEIVVFDPNDIDLLNPDNYKLISPNLFRVQKFSFKNYVFRHHLETTIKDTSSVLKGITWTDFRSSKGLDKIVKVRVNHIGKIVSVGEY

SEQ ID NO: 22809 - protein, 1313 aa, unidentified
  REGION 1..1313: note = Cas Enzyme sequence
MKKILGLDLGTNSIGWALIEIDIDGIPIRIIAMGSRIIPLTSEDRDQFTKGQAISKNQERTTARSQRKGYDRKQLRKDYDFKYSLIKVMKNYGLIPNEELFNLPMLDLWKLRSMAASEPISPEQLGRILYMMNQKRGYKSARSEANQDKKDTDYIADIKGRYAQLKEKEQTIGQHFYSELKCANQNNTYYRIKEKVYPREAYIDEFDTIINVQKDAHSFLTDEVINNLRNEIIYYQRKLKSQKGLVNICEFEGFNVVYLDPKTQQEKSKFVGPKVAPKTSPLFQLCKIWEVVNNISLKIKNPEGAKYKWSDKIPTLEEKQQIANYLFHHSNLSSSELLNILNLKKENVYLNKQILKGIQGNNTFSEIHALIGDSEHLSFNFSIVPSRHEALLVDKKTGEIIEEKDALQIDPSIEKEPLYQLWHTIYSIKDLEECKKALIKCFAFDETTADKLSRIDFNKQSFGNKSNKAMRKILPYLMQGYNYSDACSFAGYNHSNSLTKDEQAKLETENILKLLPKNSLRQPIVEKIINQMINVVNALIIEFSEKDEKGEIRKYWKPDEIRIELARELKQSKEERNDSTVNNTANEVINKEIENRLKELGVKTTKRFIEKYKLIFPIRTVIDGKTGKALPKKLKDAIVTNRCIYCGKTFSLAEALTGDNFDVDHIIPKDLLPIDNSLTNKVLVHRNCNATKTNYTAYDYIAKQGETVLRQYVERVDEWYKQGIISYGKMLRLKVSYEEYIERKKNHKETEADKRLWEDFLSRDLKATQYIARKSTEILKQVCNNVTMTEGSVTATLRRLWGWDDVLMNLQLPKYKELEEKIGQKFTQIKEWESDHGKRKHQKEEIIGWTKRDDHRHHAIDALVIACTKQGFIQRINTLNASETKDAMQKEMDVAKSKLGKAYDENILKATNEIVKNHSGRLSRLDEYLINQKPFNTADVMKEADKILVSFKAGKKVVTISKYKAKGKNEQTGVITPRGALHEQSVYGKIKVIEKRKSIKYIFENPDKIVNKKIQCLVMERLANFKNEVKMAIESLKKNPIYLDEQNKKTLETAACFKDEIVIKYPVTSIKAKDVPFIVDKKIRKIVQSRLDEFNGKETEAFKDILWLNKEKQIPIRTVRCFTGLSAVQPIKKDKNGRGIGYALTKNNHHIAIYEDIEGKLIEHSCTFWNAVERKKYKIPYVIKDTPEMWNSIIDKDLPESFLNKLPPDNLKLRFSMQQNEMFILGMTNEDFAIAISEKNKSVLSNHFYLVWSIAEGDYWFRHHLETKNSELKKISGAKEGKRYYRLSSKGLLELNPIKVRLNHLGEITKIGE

SEQ ID NO: 22810 - protein, 1462 aa, unidentified
  REGION 1..1462: note = Cas Enzyme sequence
MKKILGLDLGTNSIGWALVNEAENENEKSSIIMLGVRVNPLTVDEQKNFEKGKSITTNADRTMKRGMRRNLQRYKLRRENLIEILKEHGFITDETILSENGNYTTFETYRLRAKAVTEEITLEQFARVLLMINKKRGYKSNRKAKGAEEEGVLIDGMEVAKLLYEKDLTPGQYCLQLMEQGKKQLPDFYRSDLQEEFNRIWAKQQEFYSEILTDKLKENLREKSEKATWTICKEPFNIVGIPRTTKGEELKKENFAWRTKALSEKLDLESLAVVLQKINGQINNSSGYLGAISDRSKELYFNKQTVGQYQMTVLAQNPNASLKNMVFYRQDYLDEFNIIWEKQAEFHKKELTEELKKEIRDVIIFYQRRLKSQKGLIGFCEFESRQIEVEIDGKKKIKTVGSRVIPRSSPLFQEFKIWQTLNNLEVSGKGRKSKKKKEHSLSLFTNQEDPLLIYGKRELYQEEKELLATELSIKEKLTKSDILKLLFDNPQELDLNFKEVQGNLTQAKLFAAYRDIIEQTGHILDLKKSASEILENVEQIFSGLGYNTDIIRFNSDTDNLDNDPMYKLWHLLYSFEGDNSKTGNENLINKITNLYGFEKEYAAILANITFQDDYGSLSAKAIRKIFPYLKEGNKYDISCEYAGYRHSASSLTKEELENKIYKDRLEILPKNSLRNPVVEKILNQMVHVVNAIIADPQLGKPDEIRIELARELKKNAKERQELTKSIEESTRMHEQYREILSKPPFNLSYISRNDIIRYKLYEELKDNGYHTLYSNTYISPTTLFSGDFDVEHIIPQSRLFDDSFSNKTLELRSINIEKGNATACDFVKEKYGETNNENSMENYLNRIEKLYKTGVLSRAKYNKLKMQEKDIPSGFIECDIRNTQYIAKYAKTMLNDLVKVVVSTTGAITDRLREDWQLIDVMKELNWEKYKNLGLTTEFTNEEGYRIRQINDWTKRNDHRHHAMDALTVAFTKRQFIQYLNNLNARRTDKNQSISNTEEEEYDNFAITTEDMLLNTRDVLGIEKNYLYRDHRNKLRFYPPIPLNDFRAEAKYHLENTLISIKAKNKVTTQNINFTKRKGGVNKKTQQTPRGQLHLETVYGSQKQYVVKEESVNAKFDAEKIATVSKPAYREALLRRLQEFDNDPKKAFTGKNSLTKNPIWLNKLQTAQVPEKVKTISFETAYTIRKEISPDLKLDKVIDLGIRRILENRLKEFRNDAKKAFSNLDENPIRPNKEKGIAIKRVTISGISNAEALHDKRDKEGNLILDKNGKPQPVDFVNTGNNHHVAVYRKPVLDKNWNHAEDENGNKKYELEENVVSFYEAVSRKNLGLPVIDKTYKASEGWQFLFSMKQNEYFVFPRTEKVEKIDEETGEITEEEIVVFDPNDIDLLNPDNYKLISPNLFRVQKFSFKNYVFRHHLETTIKDTSSVLKGITWTDFRSSKGLDKIVKVRVNHIGKIVSVGEY

SEQ ID NO: 22811 - protein, 1436 aa, unidentified
  REGION 1..1436: note = Cas Enzyme sequence
MKKILGLDLGTSSIGWALVNEAENEGEKSEIIKLGVRVNPLTVDELLNFEKGKSITTNADRTLKRSMRRNLQRYKLRRENLISILKDNNLITHESILTENGNRTTFETYRLRAKAATEEITLEQFARVLLMINKKRGYKSSRKAKGSEEGTLIDGMEVAKILYNEHLTPGQYCLKQIKNGKKYLPDFYRSDLQQEFDRIFEKQMTFYPELLTKDLQGELRGKKRDAVWAICSKSFKEKGFELVGTKRQGNAAEQKLENFVWRAKGLADKLDLEQLVVVLQQINIKINNSSGDLGSISDRSKELFFNQIAKSDGSTRAQTVGEYQMTILKNNPNASLRNMKFYRQDYLDEFNTIWEKQAEFHKELTEELKREVRDVVIFYQRPLKSKKNSISFCEFESRNVEIVVDGKKKTKTVGSRVTPRSSPLFQEFKVWQILNNIEVFGKGRKNKKQAESSLFSSMEDPLQNGRKRKLYQEEKEMLAAELSIKKELKKADVLKLLFDNPKELDMNFNSIQGNLTQTSLFDAYKQIIELSGHEVDYEKKSANEIIKAVEEIFSGLGFNTDILYFNSDKPLDEQPMYKLWHLLYSFEGDSSKTGNENLINKIKELYGFDRESAKILANVTFQDDYGSLSARAIYKILPRMKQGEDYATACAYIYNKHSKNSLTKEELEKKVYKDKLEILPKNSLRNPVVEKILNQMINVINSIIDNYGKPDEIRIELARELKKSAKEREELTKSIAETTKLHEQYKSILSKPPFNLQYISHNDIVRYKLYEELKENGYKTLYSNTYISPTTVFSGDFDVEHIIPQSRLFDDSFSNKTLELKSINIEKGNKTAYDFIKEKYGETGSENCLDVYLIRIEDLRKKGVISKTKYNKLKMQEKDIPDGFINRDLANSQYIAKYAKTMLGELVKFVVSTTGSITDRLREDWQLVDVMKELNWEKYKSLGLTEEITNGEGQRIRKIKDWTKRNDHRHHAMDALTVAFTKRQYIQYLNNLNARRVSDYQGISNAEKEEHDNFSIAAEDVILNTRDVLGIEKKYLYRDDKNKLRFKPPIPLDEFRAEAKHQLENTLISIKAKNKVTTRNINITKKKGGVNKKEQLTPRGQLHNETVYGSHKEYVVKEETVSAKFNSEKIALVANPEYRKALAERLQQFGNDPKKAFTGSNALSKKPIWLNELHTKQVPEKVKTVSFETIYTIRKEVSPDLKVDKVVDKKIRQKLETRLKGFEGDAKKAFSSLEENPIWLNEEKGISIKRVTITGVNNVESLREKRDKYGNYVLDKNGNRQPVDFVSTSNNHHVAIYRDAEGNLQENVVSFFEAVNRRNLGLPVIDKNYKSGDGWKFLFSMKQNEYFVFPNEKTGFNPNEIDLLNPDNYSLISPNLFRVQKMATKDYTLRHHLETNVETNNQLKGITWIRTGLNGLLNIVKVRINHLGQIVSVGEY

SEQ ID NO: 22812 - protein, 1241 aa, unidentified
  REGION 1..1241: note = Cas Enzyme sequence
LVFADFGKWLGLSPFQQNPVVDWKNKVRDFIVTTNLNDNGTIKTNKEGKEDRSFRAPSEEDWTLLKKKTEQEIVKSNKTVGAYIYENLLQNPSQKIRGKLVRTIERKYYKEELIAILKKQIELQPELFTDDLYNDCIRELYRNNEAHQFVLSKRDFVHLFVEDIIFYQRPLRSQKSSISNCSLEYRVYKDKDGNEVKEYLQAIPKSHPLYQEFRVWQWLSNLKIYRKEDDADVTTEFLKSSEDMVNLFDFLMTQKEVGHNDILKHLFTPALKEKFPNAKPTAFNKELDKEIAKYRWNYVFDDSKDKEEEKSKKYPCNTTGYEIRRRLEKANIMPVVFFTPEIEQHLWHIIYSVTDKKEYEAALKSFAKKYNLDENSFVEAFKKFPPFPSEYGSYSEKAIKKLLPLMRMGKYWKWETIDKNTQNRINKIITGEFDENIKNRVREKSINLTEINQFQGLPLWLACYIVYDRHSETDIAGKWNSVAELEEYLNNFKQHSLRNPIVEQIITETLRVVRDIWKYYGNGEKDFFSEIHIELGREMKNTAEDRKRITEQTTKNEATNTRIKALLMELKENTDGKLHVENVRPESPMQQDALKIYEEGVLNSAYEIPEDILKISKSAQPSKAELYRYKLWLEQKYRSPYTGDVIPLGRLFTEDYQIEHIIPKSRYFDDSFNNKVICESAVNQLKDKQLGLEFIKNHHGTKVDCGFGKMVEIFSEEAYKAFVNEHYKKNKAKRQNLLLEDIPEKMITRQLNDTRYISKYISALLSNIVRSDKDDDGVNSKNLIPGNGKITSVLKKDWGLDAVWNDLILPRFERMNQITNSNSFTYWNEQYQKYVPVDYSPIDSKKIDKKRIDHRHHAMDALVIACMTRDHVNLLNNQSANSETHRYDLQNKLRNKSKETWIDKKTNKQIVRDVFKEFKKPWDNFTVDAKNALENVVVSFKQNLRIINKATNYYQKWIDKDGRKVKVFVKQEGINWAIRKPLHKETVSGKVSLRHIKVPKDKILTATRKNIDDTFDLKKIESITDTGIQKILRNYLAYKENKPEIAFSPEGLEEMNINIKQFNNGKFHQPIFKARIFELGSKFPLGEKGNKKTNYVEAEKGTNLYFAIYQNDEGKRTFETIPLNIVIERLKQGLPPVELKGKNDFYLTPNDLVYVPNEDERINISVSKQIELTKEKRQNIYKVVSFSGNQIFFVRNEIATSIINKAEFTTLNKMERALDGTMIKESCIKLKVDRLGNISLS

SEQ ID NO: 22813 - protein, 1480 aa, unidentified
  REGION 1..1480: note = Cas Enzyme sequence
VICFKIVLQNYELFFSKQVISVEKYIFLEKMYFESNIMKKILGLDLGTNSIGWALVNESENNDEKSSIVKLGVRVNPLTVDEQQNFEKGKSITTNADRTLKRSMRRSLQRYKLRREALIESLKEHGFISDDTILSENGNSTTFETYRLRAKAAVEEITLEQFARVLLQINKKRGYKSSRKAKGTEDGQLIDGMEVAKRLYEEHLTPGQLCLQLLNAGKKYFPDFYRSDLQAEFDNIWSKQALFYPEIFTETLKEALQGKNEKATWVICRDNFSWTETERVWNELEAKHENIVKEKRLVGIKREGNIQEQKLENFIWREKALSEKMHPEQIAVILSKINSQINNSSGYLGTISDRSKELYFNKQTVGQYQMVVLNNNPSAGLRNMVFYRQDYLDEFNTIWEEQAKYHPELTDELKTEIRDIVIFYQRRLKSQKGLISFCEFESKQIEVTVEGKTKTKTVGSRVAPRSSPLFQEFKIWQSLNNLEVSGKGKKTKKKKGALPNETVDQEDLLLVYGKRELYQEEKAILLHELSIKEKLTKTEILKLLFDNPQELELNLPSIQGNLTLATLFKAYQTIIEHSGHALDLKKPANEILADMKTIFTALGWNTAILQFNSDAENLDAEPMYKLWHLLYSFEGDNSNTGNENLIQKLMRDYGFDRDSAVILANITFQDDYGSLSTKAMRKILPYLKEGNKYDIACEYAGYRHSKSSLTKEEKENKVLVDKLKILPKNSLRNPVVEKIINQMVNVINTIIETYGKPDEIRVELARELKKNAKEREELTKSLADTTKVYDEYKKILTKPLSEGGQFGLTYVSRTDIIRYRLWKELEQNGYNTLYSNTYISPAAVFSGNFDIEHIIPQSRLFDDSFSNKTLELRSINSEKGNLTAYDFVKEKYGETSHENSLDKYLARVEELYKKGIISRGKYNKLKMQTKDIPDGFINRDLGNTQYIASFARTMLETLCKNVIATTGSVTDALREDWQLIDVMKELNWDKYDKLGLTYYEENREGKKLGRIKGWTKRNDHRHHAMDALTVAFTKNAFVQYFNNKNASLTPTSNEYAIRAKYFENGKAIPPMPLNEFRAEAKRHLENTLVSIKSKNKVVTQNNNVTKKRGGVNKKVQLTPRGQLHLETVYGARRQYVVKEQIINAKFDLEKVNTVCNKKYRDALLQRLQNNGNDPAKAFAGKNALSKTPIYYNVGFEKFEKLPEKVKTVTTETLFAIRKDVSSLTDLKQVEKVLDKKVKQILLSRIEEFNGEIKKAFSNLDENPIWLNKEKGISIKRVTITGISNAEALHEKRDKEGKLILDSEGNKIPVDFVNTGNNHHVAVYRMPVLDKMGNPVINEDGVPKYELQEKVVSFYEAVARSNNGFPIIDKTYKVSEGWEFLFSMKQNEYFVFPNEQTGFNPQHIDLFNPDNYSEISRNLFRVQKITHKNYVFRHHLETTVADSPSHLKRITWTDFRSSKGLDKIVKVRVNHIGEIVGVGEY

SEQ ID NO: 22814 - protein, 1618 aa, unidentified
  REGION 1..1618: note = Cas Enzyme sequence
MENKILSVDLGSNSIGATIRDLSDKENQFKKTTVITFKTGVGKDDYGRFTLSHAAERTSKRSLRRLYQSRKYKLLQTLEILREEKYCPIEKQSLERWKHYDKDEAIKGNDGRAYPINDVLFNNWIKLDFNNDGIPDYTSPYELREKLVTEKFNFTIEKDRYKLGRVLYHIAQHRGFKSSKKIQNADDEKDDNNGESYDKDKGAEVKKKKKFWEAIEKLDLKIDTTITIGKVFSIIEKKNKVNKTNIRIRKELHQFVTRKMLMQEVEDIFKFQGISFGSIFKNKKGEALKVSQSPMFWQRPLRSQKGAIGKCTLEPNKYRCPTSHPAFEEFRALSFLNNIQFKIKDEKESEWQQIPFKFRKEIYDDKFFRVSKKDFDFYEIAEWIKKKNQHDQWQLNYNVKTNVSACPVSAKLKDIFGEDWQHYQLTTNKPKQVKKKDGTIKEHKTSYNIDDIWHILFDGDDDDIIEEFATGTLKLDDKKANKFIGLYKSMPVAYSMLSLKAINNILPFLRDGLIYTEATLLAKVPKILGNEIWHLNKKNILSNLQTHVIDKNREEKRILNIANNLIAQYKALPRDEKFAEKTFSYKLSETDHKIDKASKETDTNQILSAIQDAFGKNTWSEKEDIEQKQIINQVSDVYQSFFFDKERRFKKLPHLQKSMKQFLADNFDFLQCPNTFKELEDGEKKCDCIACKKLNSLYHPSQIDIYPPAKEGYYRYGDIQKKMVMLGSPKTGAFKNPMAMRALHELRKYINYLIATEQIDEQTRIVVEIARELDDNNKRWAWKEYQDRRALENKEFRDAIYELLKDPEASGSIVNPDSDSDIDKFRIWYEMIEGNDAIEGFEEKKIFVPLEKTTTKKNKKGKEEDVEEFNENNYLKINKSLFFKLQKAKENIEIKYRLWKEQEYCCLYTGRMIGITDLFQENEIDFEHTIPRSKSLDNSLANLCVCDANFNRNIKKNKIPFELDNYAEIEKRLEKWKQKVKDLELNVDFWRAESKRATTKDRKDQCIRQRHLWQFELDYWNNKVSRFTMKEIKGGFRKSQLVDTQIISKYAFHFLKTFFNTVEVQKGRVTAEFRKIFGVQEVDTEKDRSKHSHHAKDAIILALIPSTAIREQMLTTWYEIKETRNLLLSDTEKDKTKIQEDIYLLEERLRLLKYQCNLPNVNAVIDKVDGQILINNITKNNTLVGAKRRIRSRGKVVPSKNNDSSIIYQTDENGNPIQRRHKDGNLVWKNDEFGKPLFDNAGNKIPVFIVKEMWAKGDAIRGQLHKDSFLGAIKLVKKDDNGKWIKNQNGEFEFEEVKYVIREDLVYKKNAQSPGFKDLDDLKNQIIDKALFNIIEEQVKEVGNFKDALEKGIWMVNRKGEKVHKIRRVRIEVSAMNPISIKEQTYKNTNFSTILPDRKHKEQYWAVNGENIILTLYQKEIAGKEKPERELEIISLKDAAALLALEQIDKNREIELYKKDKKGKAVLNENGNKEKPYALLKPGMKVIFFDEKISELKQEDDDEEIDYLKRLNYRMYYVIKFSGGRVTFQHHLEARDDKKLKLAYPKDKVFIIEDGKEIKYGVGGTSGFSRPVSDALKLNGPNNYEPWPRLLYSKDALNIAIEGKHFEINPDGEINWIL

SEQ ID NO: 22815 - protein, 1440 aa, unidentified
  REGION 1..1440: note = Cas Enzyme sequence
MKKVLGLDIGTNSIGWAVVETDLDTATGKIDGLGVRIIPTDSELLSKYEAGQAASKNAIRRQARGARRLRQRYILRRQRLIDSLKILGWLPENFQPGHQMPPSASTLLEMKAAFGTTEISEDWVVYFLRHKALSEQISKEELARVLYHMNQRRGFKSNRKSSEITPDAEDGSELPRKKREKKVEIVQVVSIEDSGEKTGGSSIFNVTLSDGRKGTVAKKVRPEWENRELELEITTIPPTKKDPARYEFRPLNNTDADSWAKQKVAREEDIRRSGLLFPGTYYYHALKKDPRYVIKDVSIDRSFYISELQAILATQLTLNPALDDRAAMTSIAKMLYAQNLEKQKEIRNNSIVHLFIKDIIYYQRRLKTKKSSIADCRLAMKNYADPRTGKKVPYKVAPVSSPTFQEFRIWQTVNNIRILERNKRDVQGRPGFDVDVSRDYLNPSVMESLFELFDSRERVSQGQILRQLGLSESLYSINLYRQNETKELPGNETKAIIRKQFKKAGLDCANFLNNPSRLYLLWHILYSLEDHSWVSSALHKQFEVPLPAANIIAEAPAFRQAYSSISHQAMSRMLPLMRSGKYWRWETIDEGTRSRLGKILSGEFDECISDPVRDLFRKYKVSVESDCQGMMVPMASYAVYGIHSERDNTYYLNPDQVLPSEPLNLRNPIVEQVVNETLRVVRDIWNEFGRPTEIHIELARELKKNAKERQEIMEKMAENENENRRIAAILRELNLGNPNSFADIERLKLWEKQADPIARDDFKNVRFKRPSEPTREEIQKYKLWSSQKFLSPYSGRPIPISKLFSREYDIDHIIPRSRYFDDSLENKVVVETHLNKDKGNMTAFEYIMSGGKHNDLLSPPAYEAHVNLYFFRKKRVLLLSEDVPASFSNRQLGDTRYISRKLHELLSPVAENRKNPVVATSGKITSELKSAFGLGEKMKELVKWRFERIEEKTKEPYVWDEEETDQDGKSTGRRILRLKGYEKRIDHRHHAMDALVIACTSLSHIKYLNDLNASQHKKSPTDQDLKQYLPKLLQLNSDSDNWQSRKFRKPWPEFTRDSIKALEGIVVSFRTVNRIYGRKANKNWRFIEQPDGSFKKCFKSVMDPQGKPKLSPYVRQSLHKATVAGEIMLKEYEGISISEALKAPDTIASKTEKQHLKELIRRAGSDLKKAVRLYKESPLKDMNGADLTRVTRINLAKYYANRVDLSSGFDEKKISKIPDPSMRNELLIHIQNINDINRGREKNEQIDPFGAEGMEILNKGRKTSLTKVTIKEESQAKFEIRPGAFVEADKGTNLFFVIYESKDEPTDRKFESIPLRKVVEAKSEGSGFLEEKPGYWWFTLSPNELVYMPDDGEGIAGIDWKAKEKLAAKIYKLVSCNKGQAFFVPQTVSKVIVDRVEFDSMNKVERALDGRRMIKQHCIKLSVDRLGNIKPAHRQDIIKS

SEQ ID NO: 22816 - protein, 1385 aa, unidentified
  REGION 1..1385: note = Cas Enzyme sequence
MKFKHVLGLDIGTNSLGWSLVKEFEDATIEIVKTGVHIFPIGTIVDDKNNKEKTRNEQRRSYRGSSRMRYRFKLRRKNLKKILTDLNMLPDYSVYHKAKGKGQSYELYKLRADAINSRNQIPLKEIGRIFMLLNKYRGFKSNSKKLQQNDKQIGEVKKGYESLQKLIDNSGAQTIGEYFFKMHELGKQWYEGDKWHNPNEPIDERGFNQESGEFILFNSNGIRRHHGRYTLRDMYLLEFDKIWAAQKNYYPNIFTGSKLEYDEIMLLPYKQRIEALKEFKKTNYWHIRDYCIYFQRPLKSQKRYVSNCQFERGDYEIRKHQVIEDGTEKIKEERYWKKKAKKATPKSHPYFQEFRIWQKMHQINYSSTEEDVFKKPLKPEWLKVLANSLMENFELFLNKTPKIEKENKIWFGKILKDEGLIHNSDNYSFFIDKSDEEIDHEEKNENKITGNITYASFLEALGRDTFNQLKNETIKRKEHKSKNEIIVIEESKLLQLWHHLYIAKDALFREDDWLKCILTEPSKWNLTDEQAHSLISKGLIADYGSYSIKVLKAILPEMRKGIKEYGALEGVNRGYVNDDNTVGKQIKLKDKISQLKYQELRNPVVERALSKTIKLANAILEKYESIIDRETFEIRIESTRQFRKPRQKRENERRENADKDKLREQYADYLNKKNKELNGKLFSKHIYKNDSIIRIYELWLEMNMNEHDELFEKEFKAFSKITKKEDQLKHSLWLECGRTCPYTGRIINLTDCFSSEVEIEHIIPLSRSLDDSYNNKTLTYSSTNAEKGKMTPFEFMKKKGGNALKEFKARIENKLNKFPESKKEQLLAEKVSETFSSSQLSNTSYIAKYTMQKMKEVCKNVRFTNGSATSELRNIDWKLSNLLDKIRYQEDFGIDMDIVYDNYFRLKYDFKSWCEKKYNSSDLNFKWKELKENKDIEEYFSLTNNDLLYWYDEVEKFNQFRNRDGKKDRSDNRHHAIDAFITSCCSPKIIQLLSTFNAAREEQHLDYREKIEKNFDYMSLKENIRLILVSHSEKQSLIKKRINKIKTKNGVIEQISFAPQGKLHEESFYGKRNGATVRRVELFDDQRQEKNLFVSFEDLHYKVKGETKWNYIDDSELYSITKKRLESLNKKTFTKEQMEKNPFFRVSPKTPDEIKSRKNKKPLPIVKSVRKRFNTDRTLITLPAKDEDGNILNENRYSENESNYLIAFYKNGKKKFARPITFFNSVKNKKQGIPLIPDEIVYKDVTYGLDYNLPWLKNGDIILLKEEDSEINIKDIDGMKDRLYKVKGLSTLITPNEKYGSYEYGRISLLKIKIAKANNYPNQKNISEAVKMNSFTISHDKFNAIKIRLNILGEIDAIGEECFNILYHDQTHPLLRQPFLSQNHQ

SEQ ID NO: 22817 - protein, 1144 aa, unidentified
  REGION 1..1144: note = Cas Enzyme sequence
MSSINSLGIDLGVTSIGWALVEKKDGKPIAIKDIGVRIIPLSSEDEREFTQGNAISKNQHRTTQRTQRKGLDRYQLRRKALLKVLREYNMMPDRHLLLKLSPIEIWGLRARAISQQVSLGELGRIWLHLNQRRGYNHSTRDNIGDAKQTEYVQEVNNRYNIIHAAGQTIGQHFYTELSKYFSVNNKTDAAYRIKEKVFPRAAYIEEFDKIWQTQKTHYPDLLTDDLYQKVRNEIIYYQRRLKSQKGLINVCEFEGKTYVNKNGKEIFGGPKVAPRSSPLFQVEKIWESINNIIIKNKTGEVFSISNEQKLKIFAYLDENINLSQARLFDILGIGKKDGCYTNAQIRQKGLQGNLTKAELIKILKKEHPLLSFELKTESYQFIDNNTGEISEKLHISGAFEQQPLYQLWHCIYSLSETDCINRLIRHFELAEDIAIKIAQQVDLTKGGFGNKSASAIRKILPYLQQGFTYDKACKQAGYNHSDSLTKEENLKRSLKERLELISKNSLRQPIVEKILNQLVNLVNALIEKHGHPDEIRVELARELRQNREERNDNYIRNNKRERENKEIEKKLLEHVMFKKKKVSKRDIEKYRLWKEFNECSPYEPGKTISFAELFSGDYEIEHIIPRSLRFDDSFSNKTICHRAYNSGEFAKNNFCAFDYMYDRRSKEDYNAFVTCIEKAYTDKRISKTKYENLLCQSVNLQSDFIIRQLNETRYIARKAKGLLEGVCRHVYATSGTITQRLRELWGWNSVLEKLNIEKYRTAGLTEQIEIHHDEQTHFVERIKDWHKRDDHRHHAIDALTIACTEQRIIQRINNLNSEHTKKEIYETVQMTEYKYKLSLLDNYLLQFKPFSTAEVAEHIADINISYKPGKKVVTYSRRLEKKGRSRKIAQQNILTPRGALSEENVYGRINYKTSKTVKFDSKFRHFDKIIDKDIKQNVLQWLTKYDNDPVLAFKNIKKDPVWLDIANNKMLTHVIIEDIKPEYVKKYPLNTLTSKDVAFIVDKAVKEKVADRLKEYDNDHKQAWKDLENKPVWLNEEKKIPIKRIRMFTGLDASSVVPIVVNDKTWDIEFEKYVKPGNNHHIAIYRDKEGKLKEHVVTFWHAVERKKWGLPVIIKDVKECWDSILFNNREFSESFLEQLPKDDW

SEQ ID NO: 22818 - protein, 915 aa, unidentified
  REGION 1..915: note = Cas Enzyme sequence
MGRVLFHLSQRRGFKSNRKETKKTAKENEDLGQVKADIHALELAIKEAGARTIGEYFAGLDPHTEKVRRRWTARKMFEQEFALIWAAQVVHHGSLLTQELYDRVHELLFFQRPISAQKHLVGTCELERGDDKHPPKRRAPWATMAAQRFRMLQKVNDLVVIDTKNQTSRKLIKEERGKLYQLLDREGTQSFTSIRKHLDLKGTTFNLEAGGDKDLPGNRTQKSMRKVFGIFWDEFTEGKQNQIIENWRNSESDDLLIQEAMEHLGLDAEAAAVLAKEAPQADYCSLSLTAIAKLMPLMMSGRSFKDAETEIYGSRFSGLAVHDTLPPVREALPTLRNPAVERAMTELRKVVNAIVREYGKPYEIRIELARELKKPRQERVKTTTANRKREAENKAIAAKILKECGIANPSRGDLEKAKLFVECGGICPYTGRSIPFSQLFQDSEFDVEHIIPRSRYPDDSFQNKTLCYLPENREHKRNQTPFEAYSNNPDVWAQILSRVVKWSNPGKLSRFKLQGERELADFSARQMNDTRYTSVLAGRLLAMLYGGRDVETDNGNRQVIFASSGAVTATLRRSWGFERILQAIVSPEPGETRGKPRTDHRHHAVDAITIALTRQSVIQAMANASAFEPWQPGTRTWRRVPEPWTTPDFIGNLTEQVAKMTVSHRPEHKVSHEMHKGTNYGKPRKEGGKTVVHNRVSLASLRAKDIHDDDCIVDSAVREAVRQKLGELGDDPKKLSIVGNEPVLPSRNGKTVPIRKVRVRETKNALQVGKGLRERWVASGGIHHVELFVTRDERRKESWVSSVVQVPEAYERMRRKVPVIARRIPASDAAFLFSLCKDDTVELTRDGKLQLVRVKLFYDQGDSCSICFVPLNDANLSKDHRARGIEWYARPSSLQKLNARKVVVDLLGKVHPAND

SEQ ID NO: 22819 - protein, 994 aa, unidentified
  REGION 1..994: note = Cas Enzyme sequence
DLLHRYKLQPDANTNSLAGALQRISPKGTHPPVTPWQLRAAAFGRTLSDDELAVTLGHIARHRGFRSNAKSEGKANAADDTSKMKKAMEQTREGLARYHSFGDMLANDPKFANRKRNREKDYSHTAKRSDLEDEVRALFATQRRLGNAKATSELEQQFAHRAFDQRPLQDSEDKVGPCPFEQDQKRTARRAPSFEMFRYLSKLATLTLAVGRSERRLSADEIRTAAAAFGQQKSVTYKTLRELLDLDPNARFAGISRDKEKLDVVARSGAAAEGTYTLHKVLGEAPWTSLTKLPDKLDRIAEVLSFREDVASIRKGLTEIGLEPLVIEQLVTGAEQGEFNDFTRPAHISAKAARNIVPGLLDGLVYSEACARAGYDHTARPAISLDQINSPVARRSFGEAIKQIRTVTREYAPIQFVHVELARDVGKSADERREITDGIEKRNAEKDRRKVDAAGILGSAVTDDELLRYELATEQNFKCVYCDGSIAPNGFAANDARYQVDHILPWSRFGDDSFLNKTLCCVTCNQHKRRRTPFEWFSEDKTDADWEALTARVETLTETKGLKRRNYRLRDASLIEEKFKARNLTDTRWATRLLADELKRMFPAPEDKQRVFTRPGAITAKLRRAWGLAGLKKVDGERVEDDRHHAVDALVLAATTNSLLQKMTRDIQKREDEGRSDDIFHVQAPWPGFRLDVSRTIYGDNGNGGIFVSRAERRRARGKAHDATVKQIKEREGETIVYERRSVEKLTEKDLTRVKDAERNHRLVEVLREWVGAGKPKDKPPVWKYRNGDGTTREEPIRKVRLETKDQPAVLLNGGTVDRGDMARVDVFRKKNKKSKWEFYAVPIYPHQIATMQVPPNLAAVAYKDEGDWVKIDGTFEFLWSLTPMSYVTAVKSNGEIKEGYFRGLHRGTGAMNLSRHESLGKDAASDGIGIKTLLEFRKFTVDRLGRKFEVQREQRTWRGKTVSSAEHDPAVPYVKRSVSSVDGVEGIAPDAAE

SEQ ID NO: 22820 - protein, 1348 aa, unidentified
  REGION 1..1348: note = Cas Enzyme sequence
MNKILGLDLGTNSIGWALRETSVPGNQIVDKGVLTFQKGVGEGKSGEFPLVQKRTESRSKRRNYQAEKYRKWALLQTLIENKMCPLSSSELDVWRKYNKGVPRQYPQSAEFTQWLRYDFDGDGKPDFQRLGFDKDENHYLFRMLAASEKKEHRSILTNNPMILGRVLYHLVQRRGFRGRDETEAKTIMQGSKENGTEGVNAIIPYLQKYKTLGAALYYLQKENKKERIRRRYNLRSDYEQELKIICEQQGIDEGLYKRFWKAIIWQRPLRSQKGLVGACTFESNKARCPVSHPFYEEFRIWNEINNLKIKFPDGINCEKTILEKIYPLFYVASRDFKLSSIASTLRKFDGKITSAKGSDANAERAKYKLDNTKLPSAGLLHQLQSLLGTDWKETYGWQGALENKPKTCPYSIEDIWHILFTFDDQENLRSFAKEKLHLSDDAAEKFSKLKLTQGYAPLSISAIKKLLPYLRQGYLYSHAVYLANIHKVLGQKQISQDQAKTIAQSIDALISKSLDDRLLTAAVNSLISDQLNSSTRFGMDSGYKLDDDDRSDIDRKLTEVFGEESWNKRSDKEKQRGHEFVARHYLSFLQKPIQYAKEKLFLKRNSLHDNIFEYLQETYDVPADRKLLLWHPSEQEIYRRSKNANGIPQLGSPVPDSRGFRNPMALKTLHKLKRLLNHMLREGKIDSDTRIVIEIARELNDANKRKAIDKWQRDRERQNDEYRSRIKELNDEYNLELDINNKNLIEKYRLWVEQKGQCLYTGEVINFKDLFDGTRYDFEHTIPASISFDNELKNLTIANSKYNREIKVNRFPTHLPNYREEFSGYKPIIQNIQFIGDEVARLEGLYEEWLNKAKFASDKEKKDACIQRRHIIRMDLDYWRYKLHTFTLTEYKFGWRNSQLRDTQLVTKYALPYLKTVFDRVEVQKASVVADFRNIYKIIPRNEAKSRDQHSHHAKDAAVLTLIPPPAIRDKILLRYNQAKDVQSNAVTHESVRDWKDFDPSYIHSIEDDVLINFQGQQRALTPTYKNVRKRGRQVYVKERGPDKHMKYKLDEKGQWIPLKARGDSIRGQLHKESVFGIINRNGEKWLVERYAISQFTSINDCRNIVDDAVRKIVRDGLERRMAAGESFEKAKHGEIFFPSGKAAIKKVRCRVAAGRGYLTQEKALEISRRTHLSRHDYKQVAYAQNEENILCLYYEDGSERGLRIVGLFELAQLKVKSFHDLEKEKYYQTMEVGKGKNRRQLPLAHIITTGMKAIVWQNEKEELKELSRQDLLRRLFRIYKFNERPSPFVYLQNHLEARPNDVLGYGDSEIDINDYQPRLSLSAGNFKCALEGHDFAVSLDGAIEWKF

SEQ ID NO: 22821 - protein, 1248 aa, unidentified
  REGION 1..1248: note = Cas Enzyme sequence
MKKILGLDLGVTSIGWALVESENDIPKEILGMGVRIVPLTSDENDEFTKGNSISKNRSRTIKRTQRKGYDRYKLRRANLIKCLQKNGLMPDKYLMLHLSNIELWGLRSKASEQEVTLIELGRIFLHMNQKRGYKHSKIEQAEDDKKQTEYVETVNNRFEYIKSKDLTIGNLFYKGFRDFESLKKEWEEIANDPVFRTKERVFPREAYMKEFDIIWETQKKYHPKVLTDILLNEIRNEILYYQRKLKSQKGLVNVCEFETKPYKTSDEKIVYSGPKVAPRSSPISQVCKNWENVNNIILNKRGQEYPLTNEQKKKIYDFLNENSQLKKSDLFTILQISKNDGYMVNDQIAKKGLKGNTTFTEIANIIGKDNSALRFNLGVEDIIEKATGEITYKKQISAEFEKEPLYRLWHIIYSLNDYEKDCIAKLKSEFGFDEQIAKKLASLDFTKSAFGNKSAKAMRKILPYLMIGDKYSDACTKAGYNHSNFLTKEQNLQRELLDKLEPLKKNSLRQPVVEKILNQIINLVNSLIGQYGLNEKDENGKLIHDFEIRVELARELKQSKEERNKAYSNINERDRQNDKIRKLLLEHPEFRKKGVSKRDIDRYRLWEEFGGVSPYESSKVISVGELYSGLYDIEHIIPKSLRFDDSFSNKTLCPRKYNSGQDGKNSLTAYDYMSTKRSLNEFGEFNTFIDDAYKNKKISKSKYENLLVSSNQLKEGFIDRQLRETQYIAKKSKEILSTVCHNVHATSGTITQRLRQLWGWEEVLENINLPKYRILNLTKEIQITHNGNVLRKEVIEGWSKRDDHRHHAIDALTIACTKQSFIQRLNTLNSQQTRDEMFKEIGGHKNKEFSLLDSYLLNFKPFDTNLVISKTSEILISFKPGKKVSTYSRRMGKKNGKKEIVQTKIVEPRGALSEESVYGKIKRKVKKVIKLDENFTFASEVVNERIKSLIISHLTKFDNDPQKAFGNLKKEPIWLNENEKTRLTEVEIYEFVEEFVVKYPLANIAPKDLKYIVDKGVRDAVEARLVTFDNKPKEAFKDLIKNPIWLNKEKKIPIKSVRCYTGISQESIVPIKIKDESWEIEYEKYVKPGNNHHIAIYKDENGKLVEHLVTFWHAVERKRYGLPVIIKEPAEIWDKVLNRELRQDFLVQLPKDNWKYETSLQQNETFVFFMTKEELTNAIETQKFGLISPNVFRVRKLTSGAYWFNQQYETTPRESTNDKKAKRTIQAALSTMNGIKVKINNIGEIFIV

SEQ ID NO: 22822 - protein, 1346 aa, unidentified
  REGION 1..1346: note = Cas Enzyme sequence
MSKILGLDLGTNSIGWAIRDPSEPDNQIVDKGVLTFEKGVGEGKSGEFPLVQKRTESRSKRRNYQAEKYRKWSLLLALIEYRMCPLTLPELDEWRKYTKGSPRKYPQSESFVQWLRYDFDRDGKADFESLGFDKGENHYLFRMLAASEKKEHQAIFTGNPFVLGRVLYHMVQRRGFRGRDEDEAKTIMHGSKESGTVGADAIAPYIERYKTLGAALYYLQKETGHKIRRRYNLRSDYEKELKIICECQGIDETLYKRFWKAIIWQRPLRSQKGLVGVCTFEPKKARCPSSHPFYEEFRIWNEINNLKIRFLDETNRVSLLADKVYPLFYVASRDLKLKSIATALRKADGRITSGKGCDTDPNREKYKLENTKILSAGLLYQFQSLLGESWKDKYGWQDGQENKAKTCPYSVEDIWHVLFNFDDREKLRLFASEKLHLGEEAAEKFSKLKLIQGYASISLSAIKKILPYLRQGYLYSHAVYLANVHKVLGLTKISEDTAKSIGQSIESIFSQSAEEKLLNAAVNNLIAEQLNSNTRFGMDPSYQLDQDDTRDINRVLEETFGKKSWDKKTEEGKTVAYDFVARHYLSFLQRPIQYRRERLFLKAEPLHDKIFTYLQLNYGVPDNRKSLLWHPSEQENYRPAEPINGIPQLGSPVPISRGFKNPMALKTLYKLKRLVNHLLLAGKIDEETRVVVEIARELNDANKRKAIEKWQRDREKQNDEYRARIRELDEEFHLGLDLYSKSLIDKYRLWIEQNGQCLYTGEVINCKDLFDGTKYDFEHTIPASLSFDNELKNLTIANSRYNREIKGKRFPSQLPNYSDTSSEFQPILANIEFMRKKVADLKSLYEEWLNKAKFASTKDIKDACIQRKHLIQMDLDYWRYKLHTFTLTEYKSGWRNSQLKDTQIVTKYALPYLKTVFERVEVEKGSVVADFRKIYKISPPDESKDRTRHSHHAKDAAVLTLIPPASIRDKILLRYNQAKENKSNMIVHEPVREWKNFDPRHILSIEDNLLINFQGQQRALTPTYKNVRKRGRQQYVKQKNDGHVRYKLDANGDRIPLKAEGDSIRGQLHKESTFGVIDKNGERWLVERYPISQFTSINDCRNIVDDGVRKIVQNELEKRLAAGESFEKAKFREIPFPTGKAVIKKVRCRVAAGRGYLTPEKALEISRRSHVSRHDYKRVAYAQNEENVLCLYYEQGKDRGFRVVGLFELAQMKIKSFPELQKEKYYQTLDTGKGKNKKELPLAHIINTGMKAIVWESKIEELKDLARQELLRRVFRIYKFNEKPSATVYLQHHLEARPSELLGTGATEIDITEYQPRLALTAGSFKCALEGRDFSVSLDGSIEWKI

SEQ ID NO: 22823 - protein, 1292 aa, unidentified
  REGION 1..1292: note = Cas Enzyme sequence
SRKLKSQDEGQLIDGMEIAKKLYEENLTPGQFCLQLLNNGKKYLPDFYRSDLQTEFDKIWKKQKEFYPEILTDELKEELRGKKREVVWAICAKHFIWKEKHIEWNNEEGKNIEVEKEYKLVGIKRDGKKDEQNIENLLWRTQGILEQLSLEQLVIVFQEINAKIYNSSGYLGAISDRSKELFFNKQTVGQYQMAILDKNPNASLKNMMFYRQDYMDEFNTLWETQAKSHKELTYELKNEIRDVVIFYQRRLKSQKGLISFCEFESRKIEVEIDGKKKTKTIGSRVIPRSSPLFQEFKIWQVLNNIEVFGKGKKTKKQKGASLFDNIEDAVEYGGRRELYQEEKELLAAELSIKKELKKTDILKLLFDNPNELDLNFNSVQGNLTQNALLEAYKKIIEMSGHDIDILKKPAKDIIKSVEEVFNALGYNSDILYFDSIKEPDKQPMYQLWHLLYSFEGDNSNTGNENLINKLIANFGFNRDSASIIANVTFKNDYGSLSAKAIRKILPHLKEGNKYDVACEYAGYRHSKSSLTKDEIENKILKDRLEILPKNSLRNPVVEKILNQMINVINTIIDVYGKKDENGKIVEKPFDEIRIELARELKKNAKEREELTKSIAETTKLHEQYKVILSKPPFNLSYISRNDIIRYKLYEELKDNGYKTLYSNTYISPGAVFSGDFDVEHIIPQSRLFDDSFSNKTLELRSINIEKGNETAYDFVKEKYGEKGLEDYLNRIETMYKNGVFSRTKYNKLIMQGKDIPDGFIDRDIRDTQYIAKYAKNILEDLVKFVVSTTGSITDRLREDWQLVDVMKELNWDKYKNLDMTEEFTNEEGHRIRKIKDWTKRNDHRHHAMDALTVAFTKRNIIQYLNNLNAKSDKSSSIYGIEQNELYRNDKGKLLFNPPFALNEFRTEAKKHLDNTLISIKAKNKIVTQNINTTKKQAGINKKIQQTPRGQLHNETIYGCQKQYVIKEENVNAKFDETKILTITKPAYRDALLKRLQENGNDPKKAFTGKNSLSNNPIYLDKLNTKKVPEKVKTVTFETVYTIRKEVSSDLKTDKVIDVKIRRILEKRLEEYKNDAKIAFSNLDENPIWLNQEKGISIKRVTISGISNAESLHNKCDKDGNFILDENDNKQRIDFISTSNNHHVAIYSDADGNLQEKVVSFFEAVARANAGLQLIDKEYKRYEGWEFLFSMKKNEYFVFPNEKTGFNPKEVDLINPENYGLISPNLFIVKKLSTKNYVFNHHLETMAVTGETLKNKKQLSNITYHFIQSLLPIENIVKVRVNHIGQIVKIGEY

SEQ ID NO: 22824 - protein, 1378 aa, unidentified
  REGION 1..1378: note = Cas Enzyme sequence
MEKILGVDLGTNSIGLTLREDHDFTWYGVYTFKKGVGEGKSGEFSFAAERTKHRSSRRLYNARRYRKWETLKVLIENDYCPLRKENLDNWKHFKKGTGRTFPIEDILFQEWIKLDFDGDGIPDFSSPYQLRRVLITQSLDLSLAENRYKIGRALFHIAQRRGFKSSRKSGMNEKTAVFNGSSETKTIGRNEYENLIIEHGSLGAAFAACEDQNIRVRNRYTLRSDYQVEVQEILEYQAIKDAVFCNNIDKAIFYQRPLRSQKGLIGKCTLEPNKPRCPISHPKFEEYRAWSFINNIKYKNIDTNQFVPIPIALKEKLYQEKFFFKSKRDFPFKEIRKFIYANGGKDWELNYNKKMDDISVSSCYVSARLKSVFGEAWESYKKQIERVNKKGEIETINYSIEDIWHILFSFEDEEYFVEFLSNVLKLEVDQIKELTTLFNGFPVGYANLSLKAINNILPFLHEGVIYSESVILAKIPVIIGEKLFEDNKTDILHEIQDKVEEIRKQKTIVTIANNLIFKYYALDYDQRFGWKNTAYKLDESDIKDIEVASEEYFGEKTWSKFDLNSKESIQGGVTVLYQDFFASSKREHIPQPHLVNSVKELLSKDFDAADNALSKIYHPSQIDIYPKKEGQQFLLSPKTAAFKNPMAYKTLYKLKDVFNYLIEKGIIDYETRIVVEIARELNDSNKRWAIEKYQRDREAENIEFSNAISELIKDPEFAGVADPNSDSDTDKFRLWLEQIENTEEIIKEVQNINKNKQLSVSQKDVQKYRLWKEQNCICFYTGKVISLTDLFDANKVDFEHTIPRSKSFDNSLANLTVCYADYNRNVKKNQMPTELPNYSEPSDGYPAIKPRLESWEKKVDDLFKQIDFWKFKSRTAMDKAAKDEAIKQKHLRQMHYDYWRNKVERFSQTEISQGFVNSQLNDTQIITKYAFHYLKTVFIKVDVIKGSNTAEFRKIFGVQTKDEIKDRGVHSHHAIDAAVLTLIPSSKKREEILKKSFEYEESNYGKQYHEKPFSGFHNSMIEEIKKKILINNIPEKDQVLTPGRKIVRKRGRVVWIDKPNRIPKIAQGDSIRGELHLQTYYGKIKVAAKDENGSLNRDDKGNVLYNQVDGKDEVWMVIRKPMDNINFSTDIIVDEHLSAILKKQLEDGIKQNDLVDFQGKKLRHLRCRVKSARGFMNPENVTVVKEQTYKSVKDYKSYIYADSGENYIFGLYENDKGREVKSINKFEAALYLKNIGRPENKSELFSQKEPVLIRNEESRLIHVFEVGQKVIFYNTLEELREIENDTQSLSERLYFIKRLHQASVGNIMFQHHLEARSDEELSKAFPKEIFKSAGKDGFSKFQTDFVAPRLLFKPSKPNFIIEGKDFEMTLDSKIKFKF

SEQ ID NO: 22825 - protein, 1381 aa, unidentified
  REGION 1..1381: note = Cas Enzyme sequence
LYLSAKLDNKNDKTKYSIKKMKEKVVGIDLGTGSLGILLRNLELGNNIIDQLEWFSVTTFNAGTGMSQTGEYTLASDRRSHIQSRRLKEHSRWKRWATLALLIEYDMCPIRTESLEKWSVYDKRRNLKREYPIEDQAFAQWIKLDFNGDGVPEYSSPFQLRKELVEQQLDFSQPENRYKLGRAIYHIAIHRGFKSSKGETLADMEEEGKNSEINTDDLEGAMKKSEEKKSKDLVEYMESRQLKTVGQAFAYLENEGIRIRNSRFQAVRSQNVEEFDEYFKFQEGLGQYDDLHKRLVSTKKGEGTLFYKLPLRSQKGHIGKCTFEKNKRRCPISHPEYEKYRAWSFINNIRYKTSAADVWLELSLDIKAQLYQEVFVSKVRKDFRFEVIRKFLEKQLGLSFENSEKVKTINLKDSTLVAGCPVTARLQNIVSLFDTDLEHFEQKGVKTRETHTKRTEKDKHTVTYHAMDLWNVCFDADEKEDVKAFAHNSLGWDDNATDKLCKLWTAIEQGYTTLSLKAIRNINRMLVYGVKASDAIFLAKIPDITGMQEDGIKGLIDLYLSQVKGQVDREIRISRIANILIANYKSLPVRDRFADHDYMYQLKDDDKKAVIDCITANDKDFALLDANEQQEFIDKVASLYQSFFADIHRDFVNSPRIVDALREELSKKYPGIDDKKWDKLYHPSLLSDFPRDKENANHLGSPNIGAIRNPTVLRTLNVLRKVINKMIDEGLIDPQETRLVVETTRVNNDINKRWAILKYNDERRDENKAIEKILQEQYPEKDIDEADINAARYVLEQSGEDLYGDDTRYQHQIKKYKLWLEQGCQCLYTGHIINLSNLLNGDMFDAEHTVPRSLSFDSSDKNLTLCDSYYNRHVKKNMIPSQLPNYEHDVVIDGHEYTAIKPRLEKWEEKVERLSKNVIFWKNKARRAQTESYKNTCTRQKLLWQMEYDYWRSKLDRFKMKPNDLTDGFRNSQLVDTGIITKYALLYLKTIFRSVDVQNGQSTSAFRKIFGIPEKDRSTNYHHAVDAAILSMIPSSAQRSRMLKLFYEIDEMKRGGHEYSGLQYQLNKEIESCGIGKGAADVDQYIEKHVLVDYYKQDRTLQNAHGIRGKLHAETFLGAITQWNGEEKKYVKRVELKFKKSSLDSGFKDWDDLEKAIVNKSLVQMMKSQFLEGTTFQEACEQGIYMLNKKGEKVNKIRHIRIEVKEKNPLAIKKHTYLSDKDYKQYYYAGMGDLYVMCEYQNQQEKVFQIYSLFSIAENRKYGVEDIPQTIIGKKGNRLTLSRVIKPGDMVLIYKDSPDELYDLDTTALSKRLYRVPNGAFESDGRISLCHHLCANQSKGSAITDYENLPLNIRCNASKIKFLQKDIDFFFEKGKIVFTRL

SEQ ID NO: 22826 - protein, 1423 aa, unidentified
  REGION 1..1423: note = Cas Enzyme sequence
MNKILGIDLGTGSIGVSLRNPNLGSSLFEQLEYFSSDIFQSGVGKDKSGEYSLAAERLSHRQSRRLKASRRRRLWATLELLIEYGLCPLDSLLLKDWKTYDKSKALFRSYPNSDKAFSSWIMMDFDCDGIPDYSSPYQLRRELATVQLDFAKAENKRKLGRALYHIAQRRGFKSSKGETMSAQENDSKESFDLSDKDIALEMQKSESKLSQDLKQYMAEHQCHTVGEAFACLEDEGIRVRNSRYAAVRTQYEDEIRFIFDFQNGLSLDSDLFKRLISKKKGVGTIFYRKPLRSQKWLVGKCTLETNKTRCPISHPEYEKFRAFCLLNNIKIRTDYLSDWHPLTVETKRLLFDQIFTKRVKADFPFKDIREKLQILLHQRFDGDCTKERRTINYKDKVSIAGCPVIARLRNLLGDEWEQFHAMGQKQRTSHSKHHIGKHCVEYSAYDIWHICYETDDPEYLTEFALQKLNWDEDQAKKLVRLWSTQAQGYAMLSLKAITNINRFLEMGLIYSDAVLLAKIPDIIPMTNDDIKNLVNVYTDTIKDSITQEKTCNTIVNSLIANYKAMDVTHQFAFHNTSYTLDEADRREVERQIVETIGIKTWGLMDVDEQRQIYDTVERKYQEFFSSTQRDYFKLPKLSDALIEYLTGKYPNIPLRQWKKLYHPSQISLYNVDKVTDSGSEVLRLGSPSIGAMRNPVARKTLNILRRKINAMLDAGLIDVDDTRIVVETTRQFNDSNMRWAIETYQRERENENQEIRKLLEELLPDRKMSESDITAARIAFEQQGVDKYKEKGRVFGIDVSKYRLWKEQGGICMYTGKLISISNLFKEGCFDVEHTIPRSLSFDSSDMNLTMCDTYYNRSIKQNRIPTELPNFEHDAVINGVLYTAIKPRLEAWENRVERLRDNVNFWKAQSRKAFEKSRKDYCIRQRHLWEMELNYWQGKVSRFTMTEVTDGFRNSQLVDTGIITKYATLYLKSLFHNVEVQKGSATAEFRKMLGIQAMDEKKNRSIHSHHAIDATVLTLIPVAAKRQKMLKLYYEIEELKELGLNSDDKKAMLRHEIEECEFEKDVSLIPSYIEEHIVAKHHSEDRTFDHSKRRPDKNNHVAGGDSVRGRLHKDTYYGAIKLPQEIGTGIDRMPMVKDGKFVYPANDAITMVMNVEITSFTSEKDFSIIIDPRVRMSIAKAVEKRLGEGLSFKEAINQPFWMLNDDGIEIKEDKNGKPISPIRHVRCKVKAGRGFMTAEKALEIRQHNFVSTKSNVNVPNKDYKRKVYAQNDTNYLYLLYEGIKKGKVDRKSRIVNLWEATLLKKNYSHQTIDTIIRETSDYNHITEKNVEYRLSAIIRVGDYVLLWKDSPDELRGMDVAHLSTRLYNVVKFNTTSSDRIFLKGHLSATIDPDLSLVSNDFNCLIEHRDFEIDTLGFITFKD

SEQ ID NO: 22827 - protein, 1391 aa, unidentified
  REGION 1..1391: note = Cas Enzyme sequence
MIKNHYLCSSIIKNKEQFIMKRILGLDLGTSSVGWAVVDQAENDNEKSQIIKMGVRIVPLDTQEKDDFEKGKSITTTAVRNQKHGMRINLQRYKQRRAHLVSLLRREHFITDDTLLYEDGNNSTFETYRLRARAASEEISLEQLARVLLMINKKRGYKSNRKADKQEDGQLIDGMAVARKLYDEHMTPGQFVNETLLQGKRYVPTFYQSDLRAEFNTIWNFQSQFYPDVLDDELKDKVIGKNKKSTAQTFYAAKNVSAAENKDRKTRLQVAYRWRAEAVTQQLPIEQVVAVLSDINGDINNSSGYLGKISDHSKELYFNKLTVGQYLMQQLDKDPHFRIKNRVFYRQDYLNEFNTIWETQCRFHPELTDELKEEMRDTIIFYQRRLKSKKGLISYCEFEGKEITVTVNGKTKKVMTGPRVCPKSSPLFQEFKIWQELNHMFKNVPLSGDQRMILYKELSVNKELSKSSVLKLLGLKDKEHALNFKSLQGNNTQVQLMNAYKQILDWSGHDVEKFDKLDYDTKMSFIKSVFGAIGAKTDFLEFDPNNLDNYLEQPAYRLWHLLYSYESDNSETGDDKLKKHLKELTGLSDEYVTALASVQFEQDYGSLSAKAIKHILPHLLSGKVYSEACEAAGYRHSAQSLTREELENRPLEAALEVLPKNSLRNPVVEKILNQMIHVVNAAMEEYGVERDGVKRFDEIHLEMARTLKQTKDQRENASRIIEERTRENDRFVKELQEQFGIAHPSRNDIIRYRLYLELKDNGFHTLYSNTYIPREELFSKRFEVEHIIPQAKLFDDSQSNKTLETHEANLEKGNKTAMDYVLEKYGEVGAEQYRQRIAFLYDRNNKNHTNKKYKNLLTTEADIPKDFLNRDLGNTQYIASKARDILMQVTRTVVPTIGAITARLREDWKLIDMMKELNWSKYKALGQTEEYRNRDGHQVRIIKNWTKRNDHRHHAMDALTVAFTRWEHVQYLNNMNAQEGDAHNSNAWMLRSKLMKDGKFLPPMPLDQFRADAFEHMKGILVSIKAKNKVATPSVNRISGSDVRQVTQTPRTQLHKEKFYGARQRYVTTIKKVDGKFDAETISKVARKDYREALMRRLDECGGNAKKAFTGKNSLSKMPIYCDALHTKQVPESVKLSWLETYFVIREAVGPSITIDNVLDRRVRDILQERLGAYGGDANKAFSNLEENPIWLNQEKGISIKRVTIKARLAEPVPLHHKLNRDGSRLEDSEGNTKPVDFVNTSNNHHIAIYEDADGNWHERIVPYFEAIARINNEMPVVDRHYNESEGWKFKFTMKQNEYFVFPDKETKFLPNEIDLMDKDNYSTIAPHLFRVQSLSQKDYIFRHQFESSVTAGKSLPQGMAYIRIRKEDNLKGIVKVRINHVGEIVHVGEY

SEQ ID NO: 22828 - protein, 1438 aa, unidentified
  REGION 1..1438: note = Cas Enzyme sequence
MKKILGLDLGTNSIGWAVVNADENGSPVKIEGMGSRIIPMGSDKIDYEKGATITKNADRRAKRSARRMGKRYKMRRNKLLFILNELGMLPEQFQFKNGFPEANKLQELELLPIRKNTLQLDSLQHYELRAKALKEKIELRELGTILFQYNRLRGYAGGGDEEPEKKNSSKDEDQDDKKKYEIRVQKFVIKEIEKSDQTFKAKSGKDKGKDLPVFNITVLDENSEINGTTLLQNLEEKVGQEIELEIRIKRTKKAEIVTFALPQKTNWRKQMEETEKTLKEKGFFPSQLFVEDLRKNRWTKIRNRVILRQQYTKEFDAVWNEQAKYYSFLNECPPETLRKILDYIFPGKSPSQEQLRNDGLRNGLKYIIKNQVIYYQRPLKSQSDLIAKCQFEKDEQVIPVSHPLFQEFRCWDQINRLYITSKQDVWNERKQKNILQYTNRFLSDEEKEAIYNELQIQKQVGFNAVAKIVKLKGDNTEYLNGLNVKAKLKGCDTSISINKVLSKRGINSASVEDIWQALYNNVHEGSEYDENSKRIQSIVSTLPQNIKEEDRVEIALELAQTLKFPRKYASLSKKAIEKILPLMRLNPQSQDIPDVVKHNFGQIHHLLETGEAIEDYLLNDYIIDFVNNNPNALEKGGLMYAFAASLVYGRHTKENIKPQITNYHDIKYDKERERNLRNPIVSQIANETMQVVKAVWKNYKLDPNELEIRVELARDLKNSAQERDKIYKSQIKNRNVNENIKKRLIELHQEVNERNIELYKIWSRQEKTTDKEGKPLVRPKFKNENNPTPDEIEKMKLWEEQQFISPYTLNPIPLSKLFDDRLYDIDHIIPKSRYFDNSLTNKVVCESNINEEKDNRTAWEYISQQNSSLGICSLKEYLGHVNKNFFGQKKRNLLAEKIPSNPVNRQLKDTQFISIAIKDELAKIVGSDNVKTTTGGVTDYLRSHWGLKKLFMNLTESRFKQMELWNLDENGNPKESWITKGFDKKRKRNIYEIKGWSKRYDHRHHAIDALVVALSDNKFIKRLNDLNKYFQDELNKHKGEISFSDEDSLKEAFFKLNKEQRDAIMKEIESSRKFKSPIEDLIPEAKEFLETMIVSQKPKDKLAITEKDGKKQLKIRAALHQETYYGKTNNRDTKTINISLLQAKDIGQIIDKNLQDEIDLHRKKYDTMKEAFSGEGLVAFNDYRIQNNKPPVYKVKVWYSKKETEESGLQQLYSNNPKQSVLTGDNYMFIVMAKKEKRIFDIAPLYDSVALAKELMKTKTVDIEEYKRLICEKIREENADKPDSTLFYLQQNDLVYMPNSDDNILELNADALKEWFKDNDNKKDFANRVYKVVKFTGKDCFFIPNNYAKEISLAKDLSDAEIADLKNSKYKDKKIPKQELNYEEFSSFGNCVKFVPDERFIRNIIDKKNPKPPKIQDFCVKIKTDWLGNVIEFNGLRL

SEQ ID NO: 22829 - protein, 1439 aa, unidentified
  REGION 1..1439: note = Cas Enzyme sequence
MTKTILGLDLGTNSIGWALVQQDFENKQGEILGMGSRIIPMSQDILGEFGRGNSISQTAERTGYRGVRRLRERHLLRRERLHRTLNILGFLPKHYANEIDFTKRFGKFINHAEPKLPYKNGDFLFKKSFLEMLEDFKSNQPEFLKDKNGNNCLVPYDWTIYYLRKKALSQKIEKEELAWLILNFNQKRGYYQLRGEDFAEEKDKLFVKLKVDKVVDSGEKIKGNILHDVYFDNGWKYDRQIVKTEDWVGKTKEFIVTESCLKNGDIKRTYKAVDSEKDWIAIKSKTEQDIDNSNKTVGTYIYENLLLNPKQKIKGKLVRTIERKFYKEELNQILRKQQEFHSELQNEELLQDCVRELYKHNEQHQQMLESKDFVHLFLNDIIFYQRPLRSQKSSISNCTLEKRISKEGVVFSIKVISKSNPYYQEFRLLQWLQNLEIYRNEDDTKVTTEFITSVEDKEALFDFLNSKKEVEQKHVIDFLLKQKSNKNKLPKGEAEKYRWNYVQDKKYPMNETRYLIQSKLDKVEDVPNDFLSFENEMALWHIIYSVNDKIEYEKALAKFALKHQLDEASFVESFKKFPPFKSDYGSFSEKAIKKLLPLMRFGNQWNYDAIDNISKERIYKIITGEYDEKIKNRVREKAEQFNLTTENNFQNLPLWLAQYVAYGRHSEAEITGKWNSVSDLENYLKEFKQHSLRNPIVEQVITETLRVVKDIWQEYGKGAQDFFSEIHIELGREMKNTADERKRLTNVVTENENTNLRIKALLAELALDATVENVRPYSPMQQDILKIYEEGVLNAEENIEEDILKISKTAQPSSSDLKRYKLWLEQRYRSPYTGQMIPLNKLFSHEYEIEHIIPQSLFFDDSLSNKIICESAVNKLKDNRIGLAFIKAYHGEVVPLGNGKTVKILEVQDYEDFVKQNYSKNRTKRNKLLMEDIPEKMIERQLNDTRYISKYISQLLSNIVRDVTPDSKDDGINSINVLPGNGKITTRLKQDWGLNDVWNELILPRFERMNELTNSTDFTSTNTNGKVIPTVPIELSKGFSKKRIDHRHHAMDALVIACATRDHVNLLNNESAKSETKRYDLNRKLRVYEKVTYKDQKTGEQITREVPKDFLKPWTQFTIEAKNALENIVVSFKQNTRVINKATNYYESYKDENGNLRFDKNGKPKKDFVEQKGMNWAVRKPLHKETVSGQVHLDRVKVAKGKILSATRKSLDTTFNEKTIQSITDTGIQKILLNYLKAKGSPEVAFSPEGIEEMNKTISLYNEGKNHQPILKVRVFEQGSKFPLGETGNKTKKFVEAAKGTNLFFGIYEDKAGKRSYNTIPLNLVIERQKQGLSPVSEINDKGHRLLFHLSPNDLVVIPKDGDINSKDVYKVVSFTGGRLYVIPHFVSSVIVNKIEYTQLNKIELTKEKDLIKKIEFDRLGNLISKSSKLEELFYKRRM

SEQ ID NO: 22830 - protein, 917 aa, unidentified
  REGION 1..917: note = Cas Enzyme sequence
MNFDKLDGNRTNCKLLNAYQRIVEASGHGEYDFSSSTMKAVEIFEILESVFGALNISTEIMRFHSNLEGKEVELQPFYQLWHLLYSYEGDDSATGNDSLIETLSKKYGFEKEYAKVLAKLTFEDDYGSLSAKAISKILPHLKDGFQYDEAAEYAGYKSHSHSENKQERANKVLKAKLDLLPKNSLRNPVVEKILNQTINVVNAIIEEYGKPDEIRIELARELKKSASEREEMTKAINKSTTEYQNIRKVLSSEFGLSYVSRNDIIRYRLWKELEPRGHKTLYTDTYIAPDKLFSKEFDIEHIIPQSRLFDDSFSNKTLEKRSANIEKGDKTALDYVVEKFGEKGEEDYTTRVEELYKNGKDGISKGMYKKLLMSGADIPDGFVERDLRNSQYIAKKTKELLEEVCRTVNTTTGMVTDRLREDWQLIHVMQELNWDKYDKLGLTFFETNREGKKLPRIKDWTKRNDHRHHAMDALTVAFTRRSHVQYLNYLNARKDETHKLSSSVSAMETKELYRDDRGKLKFNPPMPLETFRAEAKKHLAQTLISFKAKNKVVTPNKNKISGSSKVQTTLTPRGQLHNETIYGSILQYRTTEVKVGGNMDEVIISKVAKKKYREALLKRLSENENDPKKAFTGKNSLIKNPLYIDGLQTQSVPAKVKLVEQETVYTIRKPIGPELKTDKVIDAKVKKILESRLKDFGGDPKKAFVNLDENPIWMNKEKGVQVKSVTITGISNAVSLHDKKDKFGNLVFDKNGNTLPVDYVSTSNNHHVAIYRDEKGNLQENVVSFFEAVVRVNQGLTIVDKEFNKSLGWEFLFTLKQNEYFVFPNEQTGFDPSGIDLVDEKNYHLISPHLFRVQKIATKNYMFTHHIETQAITGEILKNKKMLSKVTYNFIQTPSHLFNIIKIRLNHLGKIADIGEY

SEQ ID NO: 22831 - protein, 1269 aa, unidentified
  REGION 1..1269: note = Cas Enzyme sequence
MTKNILGLDLGVASVGWALIEVNGETYKPLRILGMGSRIIPLGTEDKTQFERGQSITKNQDRTKARTQRKGYDRKQLKKSEDFKYSLKKELEKFGIYPDSVLMNLPMLDLWKLRSDAASEPISVEQLGRIFYMLNQKRGYKSARSEANADKRDTDYVAEVKGRYAILKEENKTIGQHFYNKLSTSFLNNEYYRVKEQVFPREAYLEEFDTIINVQKKSHDFLTEETINRLRNEIIYYQRKLKSQKGLVSVCEFEGFEKEIENKEKSTNKIVFVGPKVAPKTSPLFQLCKIWEVVNNITLKVKNPEGSKYKWSDYSPTIDQKEKIANYLSTNALLSYSELLKILELRKDDVFVNKQVQKGIQGNITYAELNLILKDESLLQFNIFIEESTNEALLVDKKTGEILEEKKRLIVSRDFEKEPLYQLWHTIYSIKDLDECREALIKRFNLEEEIADKLSRIDFNKQAFGNKSAKAMRKILPYLMEGFGYDKACSLAGYNHSNSLTKEEQESREVKERLELLPKNSLRQPVVEKIINQMINVVNAVIDEFGKPDEIRLELARELKQSKDERDQADKANSNNKKQNELIAQRLNAMGIAATKKYIQKYKFIFPAKDKKWKEADVVNQCIYCGEHFSLSEALTGDNFDVDHIVPKALLFDDSQTNKVLVHRHCNSKKLDKTAYDYIAKKGEAELEKYIQRVDDWFSRGILSYGKMQRLKVSFEEYQERKKLKKEREADKKLWENFIDRQLRESQYIAKKARQILEQICNKVTVSEGTVTAKLRKIWGWDDVLMNLQMPKYKSLGQTKMIEWTSEHGKRLHNKEQIINWTKRDDHRHHAVDALVIACTKQGYIQRINTLNSSDVRNEMLKEVEEAKIQYNEKLTLLEKYFNTEKPFTTSEVEKEADKILISFKAGKKVATISKFKAKGKNKEQGVIVPRGALHEQSVYGKIKVEEPDKPLKYLLENPSTIKDEKIKRKVFDRLQQFENDTKKALSSLKKEPIYLDEKQEIVLEKAICYKDATVMKYDLLSLNAKQVNDIVDEKVKSIVKDRLAQFGNKEKEAFKEILWYNEEKQIPIKTVRLFARPDANGLQPIKKDENGKNIGFVVQGNNHHIAIYTDKDGKQVQHSCTFWHAVERKMNSIPVLIKDSSSIWDNLSNERLPQEFLNLLPEDGLNLQFSMQQNEMFILGLSDDEFNDAIRSNDKSTLSKNLYLVWSIAEGDYWFRHHLETKNTELKKTEGAKESKRYYRLSLKGLNDLNPKKVKINHLGKIVHIGEY

SEQ ID NO: 22832 - protein, 1439 aa, unidentified
  REGION 1..1439: note = Cas Enzyme sequence
MTKTILGLDLGTNSIGWALVQQDFENKQGEILGMGSRIIPMSQDILGEFGRGNSISQTAERTGYRGVRRLRERHLLRRERLHRTLNILGFLPKHYANEIDFTKRFGKFINHAEPKLPYKNGDFLFKKSFLEMLEDFKSNQLEFLKDKNGNNCLVPYDWTIYYLRKKALSQKIEKEELAWLILNFNQKRGYYQLRGEDFAEEKDKLFVKLKVDKVVDSGEKIKGNILHDVYFDNGWKYDRQIVKTEDWVGKTKEFIVTESCLKNGDIKRTYKAVDSEKDWIAIKSKTEQDIDNSNKTVGTYIYENLLLNPKQKIKGKLVRTIERKFYKEELNQILRKQQEFHSELQNEELLQDCVRELYKHNEQHQQMLESKDFVHLFLNDIIFYQRPLRSQKSSISNCTLEKRISKEGVVFSIKVISKSNPYYQEFRLLQWLQNLEIYRNEDDTKVTTEFITSVEDKEALFDFLNSKKEVEQKHVIDFLLKQKSNKNKLPKGEAEKYRWNYVQDKKYPMNETRYLIQSKLDKVEDVPNDFLSFENEMALWHIIYSVNDKIEYEKALAKFALKHQLDEASFVESFKKFPPFKSDYGSFSEKAIKKLLPLMRFGNQWNYDAIDNISKERIYKIITGEYDEKIKNRVREKAEQFNLTTENNFQNLPLWLAQYVAYGRHSEAEITGKWNSVSDLENYLKEFKQHSLRNPIVEQVITETLRVVKDIWQEYGKGAQDFFSEIHIELGREMKNTADERKRLTNVVTENENTNLRIKALLAELALDATVENVRPYSPMQQDILKIYEEGVLNAEENIEEDILKISKTAQPSSSDLKRYKLWLEQRYRSPYTGQMIPLNKLFSHEYEIEHIIPQSLFFDDSLSNKIICESAVNKLKDNRIGLAFIKAYHGEVVPLGNGKTVKILEVQDYEDFVKQNYSKNRTKRNKLLMEDIPEKMIERQLNDTRYISKYISHLLSNIVRDVTPDSKDDGINSINVLPGNGKITTRLKQDWGLNDVWNELILPRFERMNELTNSTDFTSTNTNGKVIPTVPIELSKGFSKKRIDHRHHAMDALVIACATRDHVNLLNNESAKSETKRYDLNRKLRVYEKVTYKDQKTGEQITREVPKDFLKPWTQFTIEAKNALENIVVSFKQNTRVINKATNYYESYKDENGNLRFDKNGKPKKDFVEQKGMNWAVRKPLHKETVSGQVHLDRVKVAKGKILSATRKSLDTTFNEKTIQSITDTGIQKILLNYLKAKGSPEVAFSPEGIEEMNKTISLYNEGKNHQPILKVRVFEQGSKFPLGETGNKTKKFVEAAKGTNLFFGIYEDKAGKRSYNTIPLNLVIERQKQGLSPVSEINDKGHRLLFHLSPNDLVVIPKDGDINSKDVYKVVSFTGGRLYVIPHFVSSVIVNKIEYTQLNKIELTKEKDLIKKIEFDRLGNLISKSSKLEELFYKRRM

SEQ ID NO: 22833 - protein, 1480 aa, unidentified
  REGION 1..1480: note = Cas Enzyme sequence
MKTILGLDLGTNSIGWAKVCVDDNGNYTREIKLGSRIIPMSQDTLSNFDKGVTESPTAARTGFRGIRRIRERALQRRERLHRVLHVMGFLPLHYENAIGWNREEATTYGKFLDNGEPKLAWQRQEDGSMRFLFMDSFYEMMADFAKYQPGMVADGRKLPLDWTLYYLRKKALTQAIRKEELAWILLNFNQKRGYYQLRGEEEEEDPTKREEYYELKVVSVEAAEEGKGGNTWYNVTLENGWIYRRQSKIELNDWVGKVRPFIVTTEYEIDGITIKKDKNGEVKRSFRAPSEDDWGLRKKRTESLLEESGKTVGAFIYDHILSEPADKIRGNFIRTIERKFYKKELEAILREQSKHHKELKDIDTLIACIKELYPNNKPHQDSLIKKDMTYLLITDLIFYQRPLKSKKSLIADCPYEYYEYVIKETGEIKRQGIKCIAKSNPYYQEFRLWQFIINLRLFDRNNDKEVTSEYLSSTEDYTKLFTYLNDRKDINQEVLLKDFFKQKKVKRGMEKEFPIRWNYIEDKDKKYPCNETRHELLAALDKAGIDHSWLDDKERFYRLWHLLYSVESKEEAEGALRKLVDNDDFVNAFLKIKPFKKEYRAYSEKAIKKLLAVMRMGNLWNEVDICEQTRNRIQSIINGDIDEKIKERMNRTFSQLSDFQGLPEWLACYVVYGRHSEATDIQRWTKPENLMAYINGFKQHSLRNPIVEQCILETLRTVHDIWKEAGHIDEIHIELGRSMKSTADQRARMSKSIMQNENTNLRIKSLLMELKNAKEFENVRPYSPMQQEILRIYEEGALQELTKEDAQYNEISKISQMAQPSANELLKYRLWLEQKYCSPYTGKPISLSKLFTSAYQIEHIIPQSRYFDDSFTNKVICEAEVNQLKSNMLGYEFIKKHGGEIVHCTMVGDVKILDAKEYYNFVTEHYTNNRRKKEKLLLDDIPQEFLNRQMNDSRYISKKVMAILSNIVREEDEQEAKSKFVIACSGGITDRLKQDWGLNDIWNSIVYPRFERLNKLTNTENFGRWENKEGKQVFQTSVPLELQRGFSKKRIDHRHHAMDALVIACASNNIINYLNNESAKSQEKREDLRKKLCDKNRIIRKPWETFTQDAHTALENVVVSFKNYVRVINKATNYYEKYDKNGKKGIAEQKGQDMWAIRKPIHKETVFGQVNLRRKVTVKLKDALEKIPAICNKELRDYINNLVAKQFNKKQILAHFKSINYRLKMKYVDKVDVWQYSDEKEPMVATRKPVDTSFDAKRIAAITDTGIQKILRNYLETKDNDPNIAFTPEGIAEMNKHITEYNNGKRHQPILKVRVSEPKGAKYQVGETGNKTSKFVEAQKGTNLYFAIYEDKEGNRSYNTIPLNEVIERLKQGLSPAEDLNKQGEKLKFYLSPNDLVYVPTEEEKLSSECKLNKEQIYKMVSATSNQCFFTPHRTANSIVYKVEYSPLNKMEKTILGEMIKSVCWKLEVDRLGNILKVIK

SEQ ID NO: 22834 - protein, 1278 aa, unidentified
  REGION 1..1278: note = Cas Enzyme sequence
MRILGIDAGTNSLGWSIRDTEVINNQIIDFGVLTFEKGVASEKGNEFPKVKKRTESRGKRNNYRAEKYRKWDLLYFLIENNMCPLSHEELNKWKNYKKGTKRKYPQNDLFLNWLRFDFDGDGKPDFHLIGKNKHDSLFAFRALAVDPNFHSVYKTNPYLLGRIFYQLVQRRGFKGRDEEEAKTMLQGSDKNGTKGRDDIAEFIENHKTLGAALYYYQKETGERIRQRYNLRKDYEAELKLLCQLYDINDEDYQKLWKAIIWQRPLRTQKGLVGYCIYEKNKKRVQVSHPLYEEYRTWAFINNLKIIPPIGVDKQTYIQEKIYPLFFKSSNDFELKTILNQLKKDGGKIDSKFKEKTKVISAKLLKSFQDIFGDNWKELLHWDNINERDSQPSKKQNSSFNYDEIWHVLKTFDSQENLKDFALNKLNLDDEKAEKFSKIKLNQGYATMSLSAIKKILPFLRKGIPYHYAVFLANLYKVLGMETISDKMIDYFIEEFREVEKSNEQTRLLNTVVNSLVLDELNSKYRYSIENDRDLDDSEKKNINAKLIEIFGEKTWLLLSDDEKTASYDYVAKYYKEFLRKSVLSKTNLFMENERIHDQIFNVIAEKYDIPEDKKKFLWHPSEQENYTQAEEYDYFTLNGKPVYIKQIDRENFIKNNKDAEFQGRSLKLLGSPEPVTKGLKNPMALKTMHKMKQLINFLLQEGKIDEDTRIVIEIARELNDANRRKAIEKWNNEREKENLKFSETIIEINKECNTTFNPSDKTLLRKIRLWEEQNKTCLYTGKLIKLCDVLDGNKYDLEHTIPASISFDNELRNLTLTDTEFNRNIKKKQYPSQLYNHVDILNNIQFMKEKIEHLEDLYKEWKNKASYASTKEIKDNCIQRYHFIKMDLDYWSYKYNTFILEEYKSGWKNSQLRDTQIITKYALPYLKTLFKRVSVEKASVVNVFKEVYNVKLLSDKKNRSTHSHHAGDASILTLIPSAFDRERILKLYNEEKDNHTGKIYHEQPKDWKDFSPSYIKEIENVILINNIVENRTTVPTYKVVRKKGKIVWEDKSLDKKRIAQGDTIRGQLHDESLYGAIKLPLRNEENKILFDDNGKMKLTEEPILVIRKDLVYKQNADSPGFKTLEEVEKVIVDKALFEMIKMQVEDAVGFKEALTKGVWMFDKQGNKVNKIRRIRCKGLMKYNTALKVHTHAFTSKFDYKKTTLAKSGENALCLFYKNEDGKAMEILSISDVAQLKFKNDRSYFLEPEYNTKSIGKGKKSKETTALCCFTFWAKSIVL

SEQ ID NO: 22835 - protein, 1494 aa, unidentified
  REGION 1..1494: note = Cas Enzyme sequence
MKNILGLDLGTNSIGWALIDNESHRIIKSGSRIIPMDAATMGDYEKGNLKSAASERTSFRGMRRLYERAKLRRERLLRVLNILGFLPEEFRRQIDFEHHPGQFIDGKEPLIAYHHDENGQRVFSYMCAFKEMLTDFRATQPELVRDGRRVPYDWTIYYLRHKALTQPVTKEELAWIILNFNTKRGYYQLRSESEEVTTNKNEEYAELEVVSVEKTGEDKKRAGYYWYTITYDNEAEQKITSTIPPRQIGDKVELIVTTARDKAGETKKSVRSPKEDDWTLMKKRTEHNIEEEGCTVGSYIYQHILADPTVKVRGKLVHTIERKFYKKELKQILNKQKKFIPELQDASLYEACIKELYRNNEAHIQSIANKDFTDLFVNDIIFYQRPLKSKKSTISNCPYESYYYKNKETGELIRKPIKCIAKSNPLYQEFRLWQFIHNLRIYKKSEEVSGRLQTDVDVTDRFLTTPDDYAKLFSWLNDRKEIKQKELLKYEAFGLSKSYGDYRWNFVEDKQYPCNETLHEINRRMKSILSDKKLSSEAYQQLWHILYSIDDPIEIRKALTSFAQNQKINSDDFVNAFYQYVPEKTKSYGAYSEKAIKKLLPLMRRGSYWAIGNIDEKTRRRLDNIINGVADDSISTCTREKLNNLTDITMCQGMPLWQACYAVYDRHSEAADTTKWEQPDDIDTYLSTELKQHSLRNPIVETVISETLRVVRDIWKAYGRPEEIHVELGRNLKQDAKSRKQDAIRMAENEQTNLRIRALLQELSNPECGVENVRPHSPSQMELLKIYENEVLQSTDDIPEEISNIIKDLGKTDPKKRPSLSDITKYRLWLEQKYQSPYTGHIIPLSKLFTPAYQIEHVIPQSRYFDDSISNKVICEAEVNKEKDRMLGYEFIINKGGSIVKGSFGQEFKIFDKVQYEDFVKQRYAHNKTKMKKLLMDDIPDGFIQRQLNDSRYMSKKIISILSNIVREDGEKEATSKHIIVTSGAITDRLKKEWGIKDVWNDIIAPRFKRLNKLTDSNNYGMETEKEGRQYFQINVPTELSTGLIKKRIDHRHHAMDAIIIACTTRNHVNFLNNSTAASDQKDIRRDLQHTLCTKTKTDSNGNYIWRFNKPWDTFTQDTRQELEGIIVSFKQNLRIINKMSNYYQHYVDGRKTIGRQNKGDGWAIRKSLHKATVSGKVNLKRSKTVGFKESLNDWSAIKDKTSKAILQKIIAQYKNYDPKTIFKYFKDRNFKVEGKDFSKLEVYYNTSDKEPMSAHRVNIDTTFDEKEIRSITDTGIQKIMLKHLHTYDDAQGKTHPEAAFSPEGIEKMNQNIRMLNGGKDHKPIFKVRKAEILGMKFAVGERGHKDKKWVEADKGTNLFFAIYESEENKRSYSSIPLNEAIDRLKRGENIADERDQNGNKLLFVLSPMDLVYVPDPDDAHIDEVKGNNNIFKMVSCTGKQCFFVPETYANIICKGKELGSLNKVESYDGTNIKESCYKITVDRLGKVRKIFKG

SEQ ID NO: 22836 - protein, 1457 aa, unidentified
  REGION 1..1457: note = Cas Enzyme sequence
MKKILGLDLGTNSIGWALVDKDNQKILGMGSRIIPMGKDKIDYEKGDGVTKSAMRRAKRSTRRMNKRYKLRRNKLLYILHTLGMLPEQFQFKKLNEKDKDGSLLRLNGTKENNSFKETNNGIPVPTKIQELELLPISKKTLQADSISFCQLKVDALTRTIDIKDFGRILYNFNQLRGYSGGDSDERSKKENDEEESLGNKNYEVIIRKVCIISVEKSEDTFKIRGGKNKGQQLNKFIVVISLDDQELEGTTELQDLKEKVDQEEELQITTKRDKNGEVTSRIFTLPQKSDWRKEMEANEKILKEEGLFISELKLKDLQSNGKWTKIRNRVFLRNRYKEEFDKIWDTQAQKHNFLNECPKETLEKIANYTFPGKSESQQKLRKNAIEGGLKYIIKDQIIYYQRPLKPQTELISNCRFEKSEKVIAVSHPLFQEFRCWKQINNLYITSKQQVWNEKKKKNVWQYTNRYLTNEQKQRIYEKLQNQKGISFNEVKKIVEIKDDKTEYLNGLHVKAKLIGCDTLISIKKQLGDYAESLLEKETSIIEKIWDAIFDARNHEGSEYDITSKRVAPIFEILEEYLDDSQKAEELAFKLAQKVKFVRKYGSLSAKAIQKVLPLMQLNPQNISKQITDKFNTIKNLISTGEILDNTDYNFQDYVIDFVEKNPNALENGGLMEYLAISLAYDKHTAETIEAQIANYHDINYEKRNLRNPIVEQLMNETMQVIKAIWKQYNVDTKKLEIRIELARDLKNSAKERKAIYDGQSNNQKENNKAKERLKENEIALTSENILKYRLYAQQKETSPYTGKPIDFSKLFDNKEYDIDHILPKSRYYDDSFSNKVICEKNINEEKSNRTAWEYISQQNSKHEILSTENFIKHVNNNYFGKKKKNLLAEKIPTNPVSRQLKDTQYISIAVKNELAKIVGSENIRTSTGEITDFLRSRWGLKKLFMEMTEERFKRMELWDLDKNGNPTTTTKWVTKEVMNDGEKDKNVYEIKNWSKRYDHRHHAIDALIVALTEQSHIQRLNNLNKYVQDQLERRKEEFKITTCKDETVFEAFCNLKEGQRDEILQKMESSRYFEKPFLYTNKKGEIVSSLCRQVKEHLETMIISQKPKDKLSISEDPLDPNTPNKKLKKQLKIRAAIHEDTYYGKTNERDTKRIKLSALSASDIDKIIDKSLASEIKEHRKKHIKKEDAFIGEGLKEFNDNRIGNNKQPVYNVKVWYNKNENKKDSLQRLYDNNEKQSVITGDNYLFIVMEKKTKKGVSRVFDIASLYDSVALAKEYLKEDEDKRNFKQRICEDYRLKHKNKPQKVLFYLQQNDLVYLPTSSNDPVLNMTNNKLKEWLKDCKNKKSFARRIYKVVKMTGKNCFFIPNNYATTISTPKDLSKEDLDKLSKEYEDRKIPKHKKNYEEFGSFGSSIKTEINDNFVKELVLKENFDGNQPIKIQDTCLKLKIDWLGNIEFA

SEQ ID NO: 22837 - protein, 1464 aa, unidentified
  REGION 1..1464: note = Cas Enzyme sequence
MKRILGLDLGSNSIGWGLIEQDFGQREGKIIAAGSRIIPMDQGLLGDFEKGNTVSQTAERTFYRSARKLRARHLLRRERLHRVLHILGFLPTHYDKQIDFSKRYGKFIGDIEPKIAYNDGKFLFMDSFQEMLSDFKSHQPDLFYTKRNGEESKIPYDWTIYYLRKKALSQKISKEELAWIILNFNQKRGYYQLRGEEEVENPNKEVTYYSLMVTEVTAEAPNKKGEIWYSIQLENGWVYRRTSKIPLDNWRGKSRDFIVTTELEEDGSVKRDKEGKEKRSFRAPDENDWNLLKKKTEQDINTSQKTVGTYIYDHLLQNPNEKIKGKLVRTIERKYYKEELKAILEKQIALQPELFTDQLFADCIRELYSKNEAQQRNLAARDFVHLLAEDIIFYQRPLRSQKSTIANCSLESRSYIDKDSHTRKEVSLKVCPKSNPYYQEFRVLQWLQNLKIYEIESDREVTHEFIKTLEDKQQLFDFLMAQKEIDCEELLKYFLSLTYPNAKEKALKSELKKWKDTYRWNYVYDIGEKSSKKYPMNETRYELKRHLEKVANLPDNFLSSEVEYLLWHLIYSVTDKVAYEKGLKKFAQKHHLDEDSFVESFKKFKPYPSEYGSFSEKAIRKLLPLMRFGSYWDFNHIDKNTQKRIEDLITGVENEEIRTILREKAEKYQLEKETDFQDLPLWLAQYIAYNRHAEASSLEKWTSVNDLETYLNEFKQHSLRNPIVEQVVTETLRVVRDIWQQYGQGKADFFDEIHIELGRELKKTAKEREELSKQNQKNEDTNLRIKALLAELGEDSTIENVRPYSLMQQELLKLYEEGVFSSSMEIEDDIEKIHKKATPNKAELQRYKLWLEQKYKSPYTGQIISLKRLFTEDYEIEHIIPQSRYYDDSLSNKVICESAVNKLKGNQLGLEFIKNHYGEKVHAAGKEVSIFTEEQYKEFVKNHYTNNSGKMKKLLLEDIPEKMVARQMNDTRYISKYISEILSKIVRANERDEGVNSKNVILCTGKITSALKQDWGVNDVWNDLILPRFERMNDLTQTSLFTTYNERYQKYLPTVPMEYSNGFQKKRIDHRHHAMDAIIIACATREHINYINNQHALEKGKNKEEKQKSRIDLRTILCEKKYNDNAEENYNWVFKKPWDTFTQEVRVALEGIVVSFKQNLRVINKATNYYEHWVEENGKLIKKMVKQEGTNWAIRKPLHKETVSGKITLEREKVSKGKILTATRKAIDSTFTEKVIQGITDTGIQKILLNYLKFKKSPEIAFSPEGLEELNKNISLYNDGEPHKPIRKVRIFEQGSKFPLGEVGNKATKYVEAAKGTNLYFGVYQGKDKRSFATIPLNEVIERQKQGLSSVPEYNEKGDPLLFSLSPNDLVYVPIVGEIIEDIDFRNLSNEQKGRIYKAASFTRNECFFIKSSIASLIKNYDAKTKIGELGSQNKLEVTICKGIRIKEVCIKLKVDRLGNISKA

SEQ ID NO: 22838 - protein, 1454 aa, unidentified
  REGION 1..1454: note = Cas Enzyme sequence
MSFLYLFKKILTKFGIDCKDLAMKYILGLDLGSNSIGWALIEQDFDNKQGKILGLGSRIIPMDQGILGEFERGNKVSQTAERTGFRGVRRLRERHLLRRERLHRVLHLLGFLPPHYDAQIDFTKRFGKFIGDSEPKLAYNNEGFIFLESFNEMVEDFKKHQPQLFYIKSNGEESKIPYDWTIYYLRKKALQEKISKEELAWIILNFNQKRGYYQLRGEEEEKSTKNVEFYSLEITDVIADTPNNKGEVWYSIHLENGWVYRRASKISLEDWKGKVRDFIVTTELNEDGSIKLDKEGKEKRSFRAPSEDDWNLLKKKTEQNITLSGKTVGEYIYDHLLQNPNQKIKGKLVRTIERKFYKEELKAILEKQVALQPELFTEELFVDCVRELYKNNEIHQNSLSSKDFVHLFLNDIIFYQRPLRSQKSNISSCSLEYRFCIDKETKQRRKTYLKVISKSNPYYQEFRVLQWLSNLKIYRKEDDKDVTSEFISSIENKEILYEFLMSEKEVSNKSVLEFLLMKSLRETYPLAKESELKKELKKEITKYRWNYVYEEGNDNKKYPMNETGYEIKKRLKEVKNIPDNFLTKDIEYQLWHIIYSVTDKYEYEKALVKFAQKHNLDTESFVENFKKIKPYPSDYGAFSEKAIKKLLPLMRFGKYWNYSDISEPVQARISDIINGVDNESIKTIVREKAEKFQLSQESDFQGLPLWLAQYIVYGIHSEAADIQRWTSSSDLEEYLKGFKQHSLRNPIVEQVVTETLRVVKDIWEYYGKGEENFFEEIHIELGRELKKTAEERNRMTREINANEETNLKVKKDLQELFENKSAENVRPYSPIQQEKYRLWLEQKEKSPYTGQSIPLSKLFTDEYQIEHVIPQSRFFDDSLSNKVICEAAVNAEKGAQLGLEFIKKHGGEIIEIGLNKKVTILNEKEYKELVNELFANNRGKKAKLLMEEIPEKMVERQLNDTRYISKFISQILSNIVRSPQEDNGVNSKNIIPCTGKITAALKQDWGLNDVWNDLILPRFERMNNLTQTELFTTYSEKYQKKIPTVPLEYAKGFQKKRIDHRHHALDALVIACATRSHINYMNNQHALDKHKAKEEKQNARIDLRNTLCEKKYNDNAEDKYNWTFKKPWNTFTQDVRSALEMVVVSFKQNLRVINKATNYYEKWVEEKGKMVKKKVKQEGINWAIRKPLHKETISGKITLERVKVGKGKILTATRKSIDSSFTEKTIASITDTGIQKILLNYLAYKGSPELAFSPEGIEEMNKNIAKYNDGKDHQPIYKVRIFEEGSKFPLGEIGTKSQKYVETAKGTNLFFGIYQGKEKRSYATIPLDEVIERQKQGLTSVPEHNEKGEKLLFSLSPNDLVYVPMEGEDVESINFTNLSKEQRERVYKTVSFTGSECFFIKSSISSLIKNYDAKTKIGELGSLNKLEITIPDHIRIKEFCIKLKIDRLGNISKV

SEQ ID NO: 22839 - protein, 1069 aa, unidentified
  REGION 1..1069: note = Cas Enzyme sequence
MAAIAIDDDGKPTEILSAISLIHDSGVDPDSAKSAATRLATSGIARRTRRLYRRKRKRLAKLDKFISSQGWPLKEFEKYEDPFYPWRVRAELATTAITDQQELGEKLSIALRHIARHRGWRNPYSKVTALYTVTEPSDAFLAMQEECAKQLGRTIPETITVGQLVTGMNLGKTRLRGENSLLAARPRQSDNANEIHTIAKVQGLSNELVRQIIDHVFAAESPKGSAAEQVGKDPLQPTKKRALKASDAFQQYRIAALIGNLRIRGGKGNRRLTTEETRLVFDYLRSLPAKQEPTWQLVAEQLKIDRGNLVGTAIMTDDGERAGAKPPVHDTNRIMENTKIKPLATWWKSADADARAAMVKALSNAEVDDFDSQAGAQVQEFFFGISDEDQEKLDGLHLPIGRAAYSEDTLDRLTKRMIGEGMDLYEARQAEFKISNDWAPPAPEIGERVGNPAVDRVLKATARWLNAAERQWGAPKSVNIEHVRAAFMSESSARELDRDNQQRAKRNVKVVAEMQEKLGIEGRPSRADVWRFQSIQRQNGKCAYCGAEISFKNSEMDHIIPQAGEGSTNTRDNLVAVCRECNSSKSNIAFAVWAENTSRPGVSVQKAIERTHHWVTDSGLRKPEFDKFRKQVCDRLRRKATDEPIDARSLESVAWMANELRSRLAQKFKDGDTKVRVYKGALTAEARRASGISGKLEFVDGKGKSRLDRRHHAVDAAVVAFTSNYVAETLALRSNMKFDQELRRKAPQWREFTGSDHVHQVEWTKWKYRMQALAELLNNALVQDRIVVMHNLRLRLGNGAAHEDTIGKLTRLKVGDAISTTDIDRASSEALWCALTRDPDYDPKTGLPENPNRTIRIHGTHLTASDEITVFPVAAASIPIRDGFAKLGSNYHHVRLFRVPSGKKYKYCLMQVYTVDLLKFRKEDLFTVELKPQTISVRTCEALLRKALANGTAEYLGWLVSDDELLIDTSSFDTPGIVKLREEYGPVNRWRLAGLTSVTRLNLRPLYLSKEGLKPNVNPEIKKIIDNRSWIITVNKLFSSGHVKIIRRDALGRPRLHSAAHLPICWEVK

SEQ ID NO: 22840 - protein, 1494 aa, unidentified
  REGION 1..1494: note = Cas Enzyme sequence
MKNILGLDLGTNSIGWALIDNESHRIIKSGSRIIPMDAATMGDYEKGNLKSAASERTSFRGMRRLYERAKLRRERLLRVLNILGFLPEEFRRQIDFEHHPGQFIDGKEPLIAYHHDENGQRVFSYMSAFEEMLTDFRATQSELVRDGRRVPYDWTIYYLRHKALTQPVTKEELAWIILNFNTKRGYYQLRSESEKVTTNKNEEYAELEVVSVEKTGEDKKRAGYYWYTITYDNEAEQKITSTIPPRQIGDKVELIVTTARDKAGEIKKSVRSPKEDDWTLMKKRTEHNIEEEECTVGSYIYQHILADPTVKVRGKLVHTIERKFYKKELKQILNKQKEFIPELQDASLYEACIKELYRNNEAHIQSIANKDFTDLFVNDIIFYQRPLKSKKSTISNCPYESYYYKNKETGELIRKPIKCIAKSNPLYQEFRLWQFVHNLRIYKKSEEVSGRLQTDVDVTDRFLTTPDDYAKLFSWLNDRKKIKQKELLRYEAFGLSKSYGDYRWNFVEDKPYPCNETLYEINRRMKSILSDKKLSSEAYQQLWHILYSIDDPIEIRKALTSFAQNQKINSDDFVNAFYQYVPEKTKSYGAYSEKAIKKLLPLMRRGSYWAIGNIDEKTRRRLDNIINGVADDSISTCTREKLNNLTDITMCQGMPLWQACYAVYDRHSEAADTTKWEQPDDIDTYLGTELKQHSLRNPIVETVISETLRVVRDIWKTYDRPEEIHVELGRNLKQDAKSRKQDAIRMAENEQTNLRIRALLQELSNPECGVENVRPHSPSQMELLKIYENEVLQSTDNIPEEISNIIKDLGKTDPKKRPSLSDITKYRLWLEQKYQSPYTGHIIPLSKLFTPAYQIEHVIPQSRYFDDSISNKVICEAEVNKEKDRMLGYEFIINKGGSIVKGSFGQEFKIFDKVQYEDFVKQRYAHNKTKMKKLLMDDIPDGFIQRQLNDSRYMSKKIISILSNIVREDGEKEATSKHIIVTSGAITDRLKKEWGIKDVWNDIIAPRFKRLNKLTDSNNYGMETEKEGRQYFQINVPIELSAGFSKKRIDHRHHAMDAIIIACTTRNHVNFLNNSVAASDRKDIRRDLQHTLCTKTKTDSNGNYVWRFNKPWDTFTQDTRQELEGIIVSFKQNLRIINKMSNYYQHYVDGRKTISRQNKGDGWAIRKSLHKATISGKVNLKRSKTVGFKEALNDWSAIKDKTSKAILQKIIAQYKNYDPKTIFKYFKDRNFKVEGKDFSKLEVYYNTSDKEPMSAHRVNIDTTFNEKEIRSITDTGIQKIMLKHLHTYDDAQGKTHPEAAFSPEGIEKMNQNIRMLNGGKDHKPIFKVRKAEILGMKFAVGERGHKDKKWVEADDYTNLFFAIYTNEQGKRSYKSISLRLAIERLKNKQKVVEERNENGDKLLFVLSPLDLVYIPDPDDAHIDEVKGNNNIFKMVSCTGKQCFFVPETYANIICKGKELESKNKVESYDGINIKKSCYKITVDRLGKVRKIFKG

SEQ ID NO: 22841 - protein, 1356 aa, unidentified
  REGION 1..1356: note = Cas Enzyme sequence
EDGSMRFLFMDSFYEMMADFAKYQPGMVADGRKIPLDWTLYYLRKKALTQAIRKEELAWILLNFNQKRGYYQLRGEEEEDDPTKREEYYELKVVSVEAAEEGKGGNTWYNVTLENGWIYRRQSKIELNDWVGKVRPFIVTTEYEIDGVTIKKDKNGEVKRSFRAPSENDWGLRKKRTESLLEESGKTVGAFIYNHILSEPADKIRGNFIRTIERKFYKKELEAILREQSKHHKELKDINTLIACIKELYPNNKPHQDSLIKKDMTYLLITDLIFYQRPLKSKKSLIADCPYEYYEYVIKETGEIKRQGIKCIAKSNPYYQEFRLWQFIINLRLFDRNNDKEVTSEYLSSTEDYTKLFTYLNDRKDINQEALLKDFFKQKKVKRGMEKEFPIRWNYIEDKDKKYPCNETRHELLAALDKAGIDHSWLDDKERFYRLWHLLYSVESKEEAEGALRKLVDNDDFVNAFLKIKPFKKEYGAYSEKAIKKLLAVMRIGALWNEDDICEQTRNRIQSIINGDIDEKIKERMNRTFSQLSDFQGLPEWLACYVVYGRHSEATDIQRWTKPENLMAYINGFKQHSLRNPIVEQCILETLRTVHDIWKEAGHIDEIHIELGRSMKSTADQRARMSKSIMQNENTNLRIKSLLMELKNAKEFENVRPYSPMQQEILRIYEEGALQELTKEDAQYNEISKISQMAQPSANELLKYRLWLEQKYCSPYTGKPISLSKLFTSAYQIEHIIPQSRYFDDSFTNKVICEAEVNQLKSNMLGYEFIKKHGGEIVHCTMVGDVKILDAKEYYNFVTEHYTNNRRKKEKLLLDDIPQEFLNRQMNDSRYISKKVMAILSNIVREEDEQEAKSKFVIACSGGITDRLKQDWGLNDVWNSIVYPRFERLNKLTNTENFGHWENKEGKQVFQTSVPLELQRGFSKKRIDHRHHAMDALVIACASNNIINYLNNESAKSQEKREDLRKKLCDKNRIIRKPWETFTQDAHTALENVVVSFKNYVRVINKATNYYEKYDKNGKKGIAEQKGQDMWAIRKPMHKETVFGQVNLRRKVTVKLKDALEKIPAICNKELRDYINNLVAKQFNKKQILAHFKSINYRLNMKYVDKVYVWQYSDEKEPMVATRKPVDTSFDDKRIATITDTGIQKILRNYLETKDNDPNIAFTPEGIAEMNKHITEYNNGKQHQPILKVRVSEPKGAKYQVGETGNKTSKFVEAQKGTNLYFAIYEDKEGNRSYNTIPLNEAAERMKQGYSPVETTNSKGNLLKFYLSPNDLVYVPAEEDKLSGDCKLNKERIYKMVSSTESTCLFIPYSAAKPIYDKFEFEAKNKMGRALTGEMIKAVCWKLELDRLGNILKVIK

SEQ ID NO: 22842 - protein, 1054 aa, unidentified
  REGION 1..1054: note = Cas Enzyme sequence
LISFCEFESKEIEIEKDGKTITKTIGARVVPKSSPLFQEFKIWQILNNVICKRKGIRKKKSSAKTTQLDLLNESSQTIFSLDMECKQLLFEELNLKGDLKSDKVLKLLGYSPQEWEINYNQLEGNRTQKALYEAYLKIVEMEAHDVKDILQIKSTKDDWSLDESPLSASEIKEKVKDIFQALGICTKILYFDPLLPVKEFEEQDSYQLWHLLYSYESDDSTSGNETLYRILEKKYAFKREHARILANVALQDDYGSLSTKAIRKIYPNIKENQYSTACEKAGYKHSKLSLTTEELEARELKNIIPLLKKNALRNPVVEKILNQMINVVNALIEKNSERDAEGKITKYFHFDEIRIELARELKKNAQKRYEMTQNINKAKLEHQKISEILQKEFSIKNPTKSDIIRYRLYQELEHNGYKELYTNAPIARDMLFSKNIEIEHIVPKARVFDDSFSNKTLTFHRINSDKGEYTAFDYITSLNSEEELNQYLTRVENAYKTKSISPAKYKNLLKKASEIGDGFINRDLRDTQYIAKKAKEILFQVTKNVLSTSGSITDRLREDWGLVDVMKELNMPKYQSLGLTEVEERKDGNKVTVIKNWTKRNDHRHHAMDALTVAFTKPSYIQYLNHLNARKDENNENYSVILAIEEKETIKVPTNNGKNKRVFIEPIPNFRQVAKKHLEEIFISHKAKNKVVTKNVNKPAGTDKQQITLTPRGQLHKETIYGKYQYYVNKEEKIGVKFDERTIAKVSNPLYREALLKRLQANDNDPKKAFAGKNALSKNPIYLDEAKTKTLPEKVNLTYLEEDFSIRKDISPDNFKDLKSIEKVIDQGVKRILIKRLQAYGNDPKKAFVDLEKNPIWLNKEKGIAIKRVTISGVNNAQPLHIGKDHLGKTTLNKEGKEIPVDYVSTGNNHHVAIYRDKEGNLQEQIVSFFEAVVRTQQGLPIIDKTYKQEEGWQFLFTMKQNEMFVFPNATTGFNPAEIDLLDPKNKKLISPNLFRVQKIATKDYFFRHHLETNVETDNVLKNTTWKREGLSGLKDIVKVRMNHLGDIVSIGEY

SEQ ID NO: 22843 - protein, 1467 aa, unidentified
  REGION 1..1467: note = Cas Enzyme sequence
MKYILGLDIGSNSIGWALIQLFFEEKQGKIIATGSRIIPMDQKVLIDFGKGITISPTAQRTSYRNARHCRERHLLRRERLHRVLHILGFLPTHYDKQIDFSKRYGKFVDNTEPKIAYNEGKFLFMDSFQEMLSDFKSHQPDLFYTKKNGEESKIPYDWTIYYLRKKALSQKISKEELAWIILNFNQKRGYYQLREEEGNKENDFEIISSKIISVIKKDKDKKYNKYWYDIILENGLVYQAAFYNDFVYNWINQDREFIIERTSLKNGAEKVKLSYLPTFDEIDKMDKKEQDKYYKKIKIKTENSIGNKTVGCYIYDHILQNPNEKIKGKLVRTIERKYYKEELKAILEKQIALQPELFTDQLLADCIRELYSKNEAQQRNLAARDFVHLFVEDIIFYQRPLRRQKSTIANCSLESRSYIDKDSHTRKGAPLKVCSKSNPYYQEFRVLQWLQNLKIYEIESDQEVTHEFIKTLEDKQQLFDFLMAQKEIDCEELLKYFLSLTYPNAKEKALKSELKKWKDTYRWNYVYDIGEKSSKKYPMNETRYELKRYLEKVANLPDDFLSSEVEYLLWHLIYSVTDKVAYEKGLKKFAQKHHLDEDSFVESFKKFKPYPSEYCSFSEKAIRKLLPLMRFGSYWNFNHIDKNTQKRIDDLITGVENEEIRTILREKAEKYQLEKETDFQDLPLWLAQYIVYNRHAEASSLEKWTSVNDLETYLNEFKQHSLRNPIVEQVVTETLRVVRDIWQQYGQGQADFFDEIHIELGRELKKTAKEREELSKQNQKNEDTNLRIKALLAELGEDSAIENVRPYSLMQQELLKLYEEGVFSSSMEIEDDIKKIHKKATPSKAELQRYKLWLEQKYKSPYTGQIISLKRLFTEDYEIEHIIPQSRYYDDSLSNKVICESAVNKLKDNQLGLEFIKNHYGEKVHAAGKEVSIFTEEQYKEFVKNHYANNSGKMKKLLLEDIPEKMVARQMNDTRYISKYISEILSKIVRADERDEGVNSKNVILCTGKITTALKQDWGVNDVWNDLILPRFERMNDLTQTSLFTSYNEKYQKYLPTVPMEYSNGFQKKRIDHRHHAMDAIIIACATREHINYINNQHALEKGKDKKEKQEKRDTLRERLCIKKYNNKSEGNYNWVFKKPWDTFTQEVRAALEGIVVSFKQNLRVINKATNYYERWVEENGKYIKKMVKQEGTNWAIRKPLHEETVSGKITLEREKVSKGKILTATRKAIDSTFTEKVIEGITDTGIQKILLNYLKFKKSPEIAFSPEGLEELNKNISLYNDGKPHKPIRKVRIFEQGSKFPLGEVGNKSQKYVEAAKSTNLYFGVYQGKDKRSFATIPLNEVIERQKQGLSSVPEYNEKGDPLLFSLSPNDLVYVSIEGEIIEDIDFRNLSNEQKERIYKAASFTRNECFFIKSSIASLIKNYDAKTKIGELGSQNKLEVTICKGIRIKEVCIKLKVDRLGNISKA

SEQ ID NO: 22844 - protein, 1426 aa, unidentified
  REGION 1..1426: note = Cas Enzyme sequence
MKNILGLDLGTTSISFAHIVEDENKEKSEIKELGVRIVSLTTDEQSDFEKGKSITTNANRTLKHGARLNLDRYQQRRKYLIDLLQKANLITSSSILAENGKNTTHSTWQLRAKAVTERVEKEEFARVLLAINKKRGYKSSRKAKTEDEGQAIDGMAIAKRLYDENLTPGQLSLQLLQQNKKLLSDFYRSDLQKEFDLVWNFQKQFYPDILTDTFYKELQGKGKDATSKAFSKRYHFDTAENKGSKESVRLQAYQWRAEAISKQLSKEEVAYVLTEINNNLNNASGYLGAISDRSKELYFNRQTVGQYLYAQLQENRHNSLKNKVFYRQDYLDEFERIWETQASFHKELTDELKKQIRDVVIFYQRKLKSQKGLISFCEFESKEIEIEKDGKTITKTIGARVVPKSSPLFQEFKIWQILNNVICKRKGIRKKKSSAKTTQLDLLNESSQTIFSLDMECKQLLFEELNLKGDLKSDKVLKLLGYSPQEWEINYNQLEGNRTQKALYEAYLKIVEMEAHDVKDILQIKSTKDDWSLDESPLSASEIKEKVKDIFQALGICTKILYFDPLLPVKEFEEQDSYQLWHLLYSYESDDSTSGNETLYRILEKKYAFKREHARILANVALQDDYGSLSTKAIRKIYPNIKENQYSTACEKAGYKHSKLSLTTEELEARELKNIIPLLKKNALRNPVVEKILNQMINVVNALIEKNSERDAEGKITKYFHFDEIRIELARELKKNAQKRYEMTQNINKAKLEHQKISEILQKEFSIKNPTKSDIIRYRLYQELEHNGYKELYTNAPIARDMLFSKNIEIEHIVPKARVFDDSFSNKTLTFHRINSDKGEYTAFDYITSLNSEEELNQYLTRVENAYKTKSISPAKYKNLLKKASEIGDGFINRDLRDTQYIAKKAKEILFQVTKNVLSTSGSITDRLREDWGLVDVMKELNMPKYQSLGLTEVEERKDGNKVTVIKNWTKRNDHRHHAMDALTVAFTKPSYIQYLNHLNARKDENNENYSVILAIEEKETIKVPTNNGKNKRVFIEPIPNFRQVAKKHLEEIFISHKAKNKVVTKNVNKPAGTDKQQITLTPRGQLHKETIYGKYQYYVNKEEKIGVKFDERTIAKVSNPLYREALLKRLQANDNDPKKAFAGKNALSKNPIYLDEAKTKTLPEKVNLTYLEEDFSIRKDISPDNFKDLKSIEKVIDQGVKRILIKRLQAYGNDPKKAFVDLEKNPIWLNKEKGIAIKRVTISGVNNAQPLHIGKDHLGKTTLNKEGKEIPVDYVSTGNNHHVAIYRDKEGNLQEQIVSFFEAVVRTQQGLPIIDKTYKQEEGWQFLFTMKQNEMFVFPNATTGFNPAEIDLLDPKNKKLISPNLFRVQKIATKDYFFRHHLETNVETDNVLKNTTWKREGLSGLKDIVKVRMNHLGDIVSIGEY

SEQ ID NO: 22845 - protein, 1507 aa, unidentified
  REGION 1..1507: note = Cas Enzyme sequence
MKTILGLDLGPNSIGWAKVEVDDEGNYLRNIKLGSRIIPMTQDMLGDFDKGVKVSQTATRTDFRGIRRLIERHLLRRERLHRVLHALKFLPKHYEDAIGWDRNEPATYGKFVNNSEPKLAWERQEDGSMRFLFMESFNEMVADFAQNQPSLVSDGKKIPLDWTIYYLRKKALTQPIKKEELAWILLNFNQKRGYYQLRGEEEEDNLTKRKEYYKLKVVGVEADGAPKGGKTWYNIHLENGWTARCQSKIPLDDWVGKVKEYIVTTEYEDDGKTPKCDKEGKVKRSFKSPEKDDWQLIKTRTEKFIDDSNKTVGAFIYDHLLEKPFDKIRGKYIRTIERKYYKNELREILREQTKYHEGLHSLEALKICAEELYKNNQQHQEYLLKKDMTFLLLNDLIFYQRPLKSKKSLIADCPYEVYKYDDKLTGKKGQKKIKCIAKSNPYYQEFRLWQFIANLRLFSVTDGKEVTAEYLKTEEDYVRLFSFLNDRKDIKQETFLRSFLKLKKVPIGSEKIYPIRWNYIEDANKSYPCNATRHELLLAFDRADIPRELLDVEGREYRLWHLLYSIEAKEETESALRKLKASKAFGDLNIDDDFVNSFLKIKPFEKEYGAYSEKAIKKLLAVMRRGSLWKEADICEATKQNIAKILQNDIDEKLKKKIEAAVSSFNKLSDFQGLPTWLACYVVYGRHSEAAQIQCWQSPEDLKTYINKFKQHSLRNPIVEQCLLETLRTVYDIWKDAGQIDEIHIELGRNMKSTAEQRARKTNEFLRNENTNLRIKNLLVELKNDDKIENVRPYSPSQQEILRIYEEGALQELSKEDEMFEDISKISKMAQPSPTELSRYKLWLEQKYRSPYTGRVIPLSKLFTTAYQIEHIIPQSRYFDDSFNNKVICESEVNSLKDNMLGYEFIKECGGKKVYCTLLNKSVEIFTEEEYKTFVTKHYVGNPRKQDNLLLEDIPQEFSARQLNDSRYISKMVQTVLSNIVRAENEQEATSKFVVSCNGAITNRLKKDWGLNDVWSSIVCPRFKRLNEITKTNAFGHWEDKAGKHVFQTTVPLELQRGFSKKRIDHRHHAMDALVIACASRNIVNYLNNESANSPEKREDLRKKLCDEKRKIRKPWKTFTQDAREALSDVVVSFKNYVRVINKATNYYEHYSSSGNKVMISQKGNDMWAIRKPLHKESVFGRVNLRRKVIVSLKKALENIPAICDKTLRDYINALVEKHFNTRQLLAHFKSINYRLNRKRVNKVEVWQFSDEKIEMVARRKSLDTSFDDKQISSITDTGIQKILLNYLQTKDGNAEIAFTPESIEEMNKNISIYNGGKAHQPILKVRVATPKGMKYPVGQTGNKATKFVVAEKGTNLYFAIYENELGVRSYDTIPLNIVVERLKEGLSPVPQANEADIPLKFYLSPNDLVYVPTKENEDELCRDRIYKFVDSSGTTANFVPHTSANTIYNVDKEYAEKCCNGAVILNEYGLGSSQSKNQKALDGEMIKEICWKLKVDRLGNIIKVIK

SEQ ID NO: 22846 - protein, 1434 aa, unidentified
  REGION 1..1434: note = Cas Enzyme sequence
MKKILGLDLGTNSIGWAYVKQAQNDSEKSEIVELGVRVNPLTVDEKTNFEKGKPISTNADRTLKRGARRNLQRYKLRRQELIELLKEYQVISEKTILAEDGKGTTFETLRLRAKSAKEQVSLEELARILLMINKKRGYKSSRKAKNEEEGQLIDGMEIARRLYDENLTTGQLSLLLLKEGKKSLPDYYRSDLQHELDKVWNFQKQFHPDILTDEFYTSIQGKGQKATRESFSSKYRIDTAENKGSREEKRLQAYQWRADATHKELTKEELAFVITEINNNINNSSGYLGAISDRSKELIFANETVGEYLWKQIQSDPHTSLKNQVFYRQDYFDEFERIWETQSGFYPQILTESLKNELRDILIFYQRKLKSQKALVSICELKSKEIPLKDKQGNPISKNGIPVTKLVGPKVAPKSSPLFQEFKIWQNLNNVLVRPKGSRKRKVTTDQQSTFLEEQEPVFELNLEQKELLFEELNLKGNLKTDYCLELIGYSAKEWEMNYPTLEGNKTNKALYEAYLKIIDSEGYDAKKLLKVKTDKDDINLDDIKVSASEIKTMISDIFNELGINTKILDFDAELERKQFEAQASYRLWHLLYSYEGDDSKSGNELLYRLLEDKFGFKREHSKTLANVSLLSDYGNLSTKAIRTIYPYIKENKFSTACELAGYRHSKLSITKEENENRTLKDTLDVLKKNSLRQPVVEKILNQMINLINELIEKHSEKDEKGNIVKYFKFDEIHIELARELKKNAEERRELDSKVREGKDRNEKIITILKSEFGLPYPTKNDIIRYRLYEELKDNGYKDLYTNTYIPREKLFSKEIDIEHIIPKSRLFNDSFSNKTICYRQDNLNKGERTAYDYIEGLGKTQLDEYLNRIENLYTNKIITKAKYRNLLKKESEIGDGFIERDLRETQYIAKKAKEMLLQITRHVVSTTGSITDRLRDDWELVNVMRELNLPKYKALGLTEIQERKNGQTVEVITDWTKRNDHRHHAMDALTVAFTKHSHIQYLNFLNARKDEKHKEYSNIMGIQQLETEKTTDKDGKDKRVFKAPIPNFRQVAKEHLESILISHKTKNKVVTRATNKIAGSKKQQETLSPRGQLHKETVYGKYRRYVQKEEKIGSKFDLQTIERVANPLYKRLLTKRLEENGGDPKKAFTGKNALAKTPIYLDETQTQQLPEKVKLVWLETDFSIRKDITPDNFKDEKSIDKVLDEGIKRILKDRLKSFDGDAKRAFTDLEQNPIWLNKEKGIAIKRVTISGVSNAEPLHTKKDHLGNEIFDDTGKPIPVDYVSTGNNHHIAIYRDENGNLQEKAVSFFEAVTRANQGLPIVDKTYNRHLGWQFLFTMKQNEMFVFPNKETGFDPQEVDLLDPKNKKLISPNLFRVQKISTKNYFFRHHLETSVETHNALNGVTYKSQLGLNGITDIIKVRINHLGDIVHIGEY

SEQ ID NO: 22847 - protein, 1442 aa, unidentified
  REGION 1..1442: note = Cas Enzyme sequence
VYLAANLQLFFEYTSKTIKNMTQKILGLDLGTNSIGSSVRNLDLSDDLKGQLEFFSSDIFRSSVNKESNGREYSLAAQRSAHSRSRGLNEVRRRKLWATLDLLIKYELCPMSSDSLMKWRTYDKRRGFFRKYPIDDKDFNAWIMLDFDGDGIPDYSSPYQLRRELVIRQFDFNQPIERYKLGRALYHIAQHRGFKSSKGETLLQQETNSKQSLTDEAADVAGEMKASEEKLSKGLSTYMKENNLLTVGAAFAQLEDEGVRIRNNNNYRAIRSQFQHEIETIFMFQQGLSIKSELYEHLISEKKNVGTIFYKRPLRSQRGNVGKCTLERTKPRCAIGHPLFEKFRAWTLINNIKIRMSEEEQAEQLPMKLRFELYNDCFLAFVRAEFKFADIRKYLEKRLGVHFSYNDKTINYKDSTSVAGCPITARFRKILGEDWESFRVDGQKQRQAHGKNNASFHRVSYSIEDIWHFCYDAEEPEAVLSFAQDNLKWEKKKAEELVRIWSAMPQGYAMLSQKAIRNINKMLILGLKYSDAVLLAKVPEIVEITDGEILSVTEDYHRVEAQVGYEKQINNIVNALIAKYKSASEEYRFADHNYEYQLDKSDEKDIIKQIESNIGTRKWSLLDADEQTDILQKVRDKYQNFFRSHERKFVESPKLGECFEEYLMKKFPMVEGERWKKLYHPSQIAIYRPVPANKDRSALRLGNPDIGAIKNPTVLRVLNTLRKRVNQLLDDGIISPDETRVVVETARELNDANRKWALDTYNRIRHDENEKIKKILAEFYPKRDNISTVDIDKARYVIDQREMDYFTEAKTYHKDIKKYKLWLEQGGQCMYTGRTINLSNLFDPNSFDVEHTIPESISFDSSDMNLTLCDAHYNRFIKKNHIPADLPNYDKSVVIDGKEYSPIKPRLQRWADRVERLNRNVEYWRGQARRAQNKDRKDQCMREMHLWKMELEYWTKKLERFTITEVTDEFKNSQLVDTRVITRHAVLYLKSIFPHVDVQRGDVTAKFRKILGIQSVDEKKDRSLHSHHAIDATTLTIIPGAAKRERMLELFAKIEEVNKMLSFSGNEDRTGLKQELDGLKNQLNKEVKACRIGHNVSEIGTFINDNIIINHHVKNQALTPVRRRLRKRGHIVGGMDNPRWQTGDALRGEIHKASYYGAITQFAKDKDGKVLLKEGHPLVDPTIKFVIRRELKYKKSTADSGFASWDDLEKAIVDKELFALMKGQFPEETSFKDACEQGIYMIKKGKNGEVDTKLYRIRHIRCKTKQKNALKIKEQAYKSEKEYKRYFYAAVGDLYAMCCYTNGKTREFKIYSLYDISCHRKVGVEDIPEFITDKKGNRLMLDYKLHTGDMILLYKENPEELYDLDNVSLSKLLYKINGFENDGLRIRMVNHLVAKEAMGESVKDYAKLPDIIRCGVKTIKFLVMGENRDFVIKNGKISFNHR

SEQ ID NO: 22848 - protein, 985 aa, unidentified
  REGION 1..985: note = Cas Enzyme sequence
VQPAVEYMLWNLLYSITDRNELASALRRFALTHGVSSVDAFVESFLKVKPFKKEYGAYSEKATKKLLQVMRVGKYWCGDELADPAKRTKGNKQAVYDEMANRGICKQTLQNISNIIEENIDERLIGALINPQRPLTALSHFQGLSVSDACYVVYGRHSEVAEIVRWKDAGELNTFINNFKQHSMRNPIVEQCVLETLRTVRDVWEQEGQIDEIHVELGRNMKRTAEQRARDTQAIQRNENTNMRISLLLTELKNDPSISDVRPYSPSQRELLKIYEEGALENLTNQDEDIAKISRLAQPSSSELRRYKLWLDQKYVSPYTGRPIPLAKLFTSAYEIEHIIPQSRYFDNSFSNKVICEAEVNKLKDNLLGMEFIKQFGGKQKGILDEDAYKQHVTTNYAHNPAKRSKLLMEDLPTDFNSRQLNDTRYISKTVMALLSNVVREEGERETRSKHVVVCTGGVTDTLKKDWGLHDVWHNLVYPRFIRLNNLTGTQNFGYWRALDEENKKQGEDSKKVFQITLPPECQRGFVKKRIDHRHHAMDALVIACASANIVNYLNNQSAANPNSREDLRRLVCDVKRRIRKPWPTFTQDAQAALEDLVVSFKNTVRVVNKASNTYLRYDKDGKKKRFKQEGEGLKAIRKPMHKETYYGEVNLIRKEMLPLKRALEDVNAIVDKELRANIKALLRDGFNLQQVLANFKAKDFKFNKRDIKKVEVYVSSAKSTPMVATRKSLDTSFNAKRIVDITDTGIQKILLNYLKANDNSPEQAFTPEGIAYLNEHIAEYNNGKPHQPILKVRVSEVMGAKFAVGQTGSKKNKFVEAQSGTNLYFAIYEDKDGKRNFETIALNVAAERLKKGRTPVCEKKGEGLSLKFYLSPNDLVYVPTDEDRTAEHPSIDKRRIYKMVSATDKECHFLPVSVASIIADKVEFEAMNKVGRVIDTSEYEEKEGRNKEEDKEVNKPSGISKIMIKDVCWKLEVDRLGNITKIVR

SEQ ID NO: 22849 - protein, 1430 aa, unidentified
  REGION 1..1430: note = Cas Enzyme sequence
MKKRKHILGLDLGTTSIGFSHIIEDEDREKSTIEEIGVRIIPLSVDELSNFERGKTISTNADRTLKHGARINLDRYQLRRKQLIELSLQAGLITSSTILAEDGKNTTHSTWQLRAKAAVERIEKDELVRVFLAINKKRGYKSSRKVKNKDDGQIIDGMDIAKRLYDENLTPGQLVLLLLKEKKKQLPDFYHSDLQREFDLIWNFQKEFYPDILTNDLYKALQGKNKTDSSSIFYNYYHFNTAENRGTKEQMRLQAYRWRVDALSKKLSKEEVAYVLVEINSNLNNSSNYLGNISDRSKELYFNKQTIGQFLYTKLKEDRHYSLKNKVFYRQDYLDEFERIWETQAIFYKELTGDLKKQIRDTIIFYQRRLKSQKGLISLCEFENKEITIEKEGKTVTKQIGVRVIPKSSPLFQEFKIWQILNNVVCKKKGTRKKKAVTPAPLLFELFGTPSETFFSLDMECKQLLFEELNLKGNLKADKVIRLLGYIPQEWEINYNQLEGNRTQKSLYEAYLKIIEIEGYDIKTFLRIKSDKEDWDLEESPLSAKEIRENIQHIFETLGISTAILYFDATLPIKDFEKQASYQLWHLLYSYESDNSPSGNETLYKLLQDKFGFKREHAVFLSNISFQDDYGSLSAKAIRKIYPYIKENQYSTACELAGYRHSKLSLTKEELNNRPLKDLISPLKKNSLRNPVVEKGLNQMINVVNALIEKNSEKDAEGNIIKYFHFDEIRIELARELKKNAQERAEMTLNIKNATIEQEKIKSILISDFGIKNPTKNDITRYRLYQELAHNGYKDLYTNTYIPKELLFSKNIDIEHIIPKARVFDDSFSNKTLAYRDFNLKKGENTAFDFIDSSLGEEELNQYIARVENAYKTKNISATKYKNLLKKATEINDGFINRDLRETQYIAKKAKELLFQITRSVVSTSGSITDRLREDWGLIDIMKELNMPKYRDLGLTEIIERRDGRKVEVIKDWTKRNDHRHHAMDALTVAFTKPSYIQYLNHLNARKDEKNKLYADILGIERKETTKIHDENGNEKRIFIEPIPGFRQIAKKYLEEILISHKTKNKVVTKSINKIAGTNKKQETLTPRGQLHKETIYGKYHYYSNKEEKIGTKFDKETISKVSNPIYRYALQKRLEANENNPKKAFTGKNALSKNPIYLDDAKTKILPEKVNLTYLEEDYSIRKDISPDNFKDLISIEKIVDEGIKRILKERLKTYNNDPKKAFADLDKNPIWLNKEKGISIKRVTISGVKNAQALHSKKDHLGKPILDKEGQEIPVDFVSTGNNHHVAIYRDQKGNLQEQIVSFFEAVVRAQQGLPIIDKTYKQEEGWQFLFTMKQNEMFVFLNEITGFNPSEIDLLDPKNKKLISPNLFRVQKISIKDYFFRHHLETNVETNNILKDITWKRGGLSLLKGIIKVRINHLGNIVSIGEY

SEQ ID NO: 22850 - protein, 1458 aa, unidentified
  REGION 1..1458: note = Cas Enzyme sequence
MKRILGLDLGSNSIGWGLIEQDFQQKEGKIIASGSRIIPMDQGILGDFEKGNTVSQTAERTFYRSTRKLRQRHLLRRERLHRVLHILGFLPTHYDKQIDFSKRYGKFVDNTEPKLAYEEGRFLFMDSFQEMLSDFKSHQPTLFYSRKNGKESKIPYDWTIYYLRKKALSQKISKEELAWIILNFNQKRGYYQLRGEEEVENPNKEITYYSLMVTEVTAEAPNKKGEIWYSIQLENGWVYRRTSKIPLDDWKGKVRDFIVTSELEEDGSIKRDKEGKEKRSFRAPSEDDWNLLKKKTEQDINTSKKTVGTYIYDHILQNPNEKIKGKLVRTIERKYYKEELKAILEKQIALQPELFTDQLFADCIRELYSKNEAQQRNLAARDFIHLFVEDIIFYQRPLRSQKTTIANCSLESRFYIDKDSHTRKGAPLKVCSKSNPYYQEFRVLQWLQNLKIYEIESDQEVTHQFIKTLEDKQQLFEFLMNQKEIDCEELLKYFLNQTYPNAKEKALKSELKKWKDTYRWNYVYDIGEKSSKKYPMNETRYELKRYLEKVANLPDDFLSSEVEYLLWHLIYSVTDKVAYEKGLKKFAQKHHLDEESFVESFKKFKPYPSEYGSFSEKAIRKLLPLMRFGSYWNFNHIDKNTQKRIDDLITGVENEEIRTILREKAEKYQLEKETDFQDLPLWLAQYVVYNRHAEASSLEKWTSVNDLETYLNEFKQHSLRNPIVEQVVTETLRVVRDIWQQYGQGQADFFNEIHIELGRELKKTAKEREDLSKQNQKNEDTNLRIRALLAELGEDSTIENVRPYSLMQQELLKLYEEGVFSSSMEIEDDIEKIHKKATPSKAELQRYKLWLEQKYKSPYTGQIISLKRLFTEDYEIEHIIPQSRYYDDSLSNKVICESVVNKAPYKDRQLGLEFIKNQGGRIVKELSKENKTIKIFTEEQYRTFIKEHYSNNPAKTKKLLLEDIPEKMVARQMNDTRYISKYISEILSKIVREDERDEGVNSKNVILCTGNITSALKQDWGVNDVWNDLILPRFERMNSLTQSTLFTTYNERYQKYLPTVPMEYSKGFQKKRIDHRHHAMDAIIIACTTQEHINYINNQHALEKGKDKKEKQEERDKVRERLCIKKYNNRSERNYSWIFKKPWDTFTQEVRSALEGIVVSFKQNLRVINKATNYYEHWVEENDKLIKKMVKQEGTNWAIRKPLHKETVSGKIILEREKVSGGKILTATRKTIDSTFTEKVIEGITDTGIQKILLNYLKFKKSPEIAFSPEGIEELNKNIALYNDGKPHKPIYKVRIFEQGSKFPLGEVGNKSQKYVEAAKGTNLYFGVYQGKDKRSFATIPLNQVIERQKQGLPSVPEYNEKGDPLLFSLSPYDLVYVPIEGEIIEDIDFRNLSKEQKERIYKIVSFTKGRIYGIPNKVAVSIVNKMEYTQLNKIEFIKEKEVCIKLKVDRLGNICKA

SEQ ID NO: 22851 - protein, 1438 aa, unidentified
  REGION 1..1438: note = Cas Enzyme sequence
MRHILGLDLGITSTGFCHIIEDENKKNSTIEEIGVRIIQLDNFVSTKTGEDSKDPSKDFSAGKGISSNAGRTQKRRARINLDRYQLRRKQLIELSLQAGLITSSTILAEDGKNTTHSTWQLRAKAAVERIEKDELVRVFLAINKKRGYKSSRKVKNKDDGQIIDGMDIAKRLYDENLTPGQLVLQLLKEKKKQLPDFYHSDLQREFDLIWNFQKEFYPDILTSDFCKALQGKNKTDSSSIFYNYYHFNTAENRGTKEQMRLQAYRWRVDALSKKLSKEEVAYVLVEINSNLNNSSNYLGNISDRSKELYFNKQTIGQFLYTKLKEDRHYSLKNKVFYRQDYLDEFERIWETQAIFHKELTGDLKKQIRDTIIFYQRRLKSQKGLISLCEFENKEITIEKEGKTVTKQIGVRVIPKSSPLFQEFKIWQILNNVVCKKKGTRKKKAVTPAPLLFELFGTPSETFFSLDMECKQLLFEELNLKGNLKADKVIRLLGYIPQEWEINYNQLEGNRTQKSLYEAYLKIIEIEGYDIKTFLRIKSDKEDWDLEESPLSAKEIRENIQHIFETLGISTAILYFDATLPIKDFEKQASYQLWHLLYSYESDNSPSGNETLYKLLQDKFGFKREHAVFLSNISFQDDYGSLSAKAIRKIYPYIKENQYSTACELAGYRHSKLSLTKEELNNRPLKDLISPLKKNSLRNPVVEKGLNQMINVVNALIEKNSEKDAEGNIIKYFHFDEIRIELARELKKNAQERAEMTLNIKNATIEQEKTKSILISDFGIKNPTKNDITRYRLYQELAHNGYKDLYTNTYIPKELLFSKNIDIEHIIPKARVFDDSFSNKTLAYRDFNLKKGENTAFDFIDSSLGEEELNQYIARVENAFKTKNISATKYRNLLKKATEINDGFINRDLRETQYIAKKAKDLLFQITRSVVSTSGSITDRLREDWGLIDIMKELNMPKYRDLGLTEIIERRDGRKVEVIKDWTKRNDHRHHAMDALTVAFTKPSYIQYLNHLNARKDENNKLYADILGIERKETTKIHDENGNEKRVFIEPIPGFRQIAKKYLEEILISHKTKNKVVTKSINKIAGTNKKQETLTPRGQLHKETIYGKYHYYSNKEEKIGTKFDKETISKVSNPIYRYALQKRLEANENNPKKAFTGKNALSKNPIYLDDAKTKILPEKVNLTYLEEDYSIRKDISPDNFKDLISIEKIVDEGIKRILKERLKTYNNDPKKAFADLDKNPIWLNKEKGISIKRVTISGVKNAQALHSKKDHLGKPILDKEGQEIPVDFVSTGNNHHVAIYRDQKGNLQEQIVSFFEAVVRAQQGLPIIDKTYKQEEGWQFLFTMKQNEMFVFPNEITGFNPSEIDLLDPKNKKLISLNLFRVQKISIKDYFFRHHLETNVETNNILKDITWKRGGLSLLKGIIKVRINHLGNIVSFGEY

SEQ ID NO: 22852 - protein, 1069 aa, unidentified
  REGION 1..1069: note = Cas Enzyme sequence
MAAIAIDDDGKPTEILSAISLIHDSGVDPDSAKSAATRLATSGIARRTRRLYRRKRKRLAKLDKFISSQGWPLKEFEEYEDPFYPWRVRAELATTPITDQQELGEKLSIALRHIARHRGWRNPYSKITALYTVAEPSDALVSIQEQCAAELGRPIPPTTTVGQLVASMNLGKTRLRGEDSLLAARPRQSDNANEIHTIAKVQGLSNKLVKQIIDHVFAAESPKGSAAERVGKDPLQPTKKRALKASDAFQLYRIAALIGNLRIRGGKGNRRLTAEETKLIFDYLRSLPAKQEPTWQLVAEQLKIDRGNLVGTAIMTDDGERAGAKPPVHETNRLMESTKIKPLAAWWKSADADARAAMVKALSNAEVDDFDSQAGAQVQEFFFGISDEDQEKLDGLHLPIGRAAYSEDTLDRLTKRMIGEGMDLYEARQAEFKISNDWAPPAPEIGERVGNPAVDRVLKATARWLNAAERQWGAPKSVNIEHVRAAFMSESSARELDRDNQQRAKRNVKVVAEMQEKLGIEGRPSRADVWRFQSIQRQNGKCAYCGAEISFKNSEMDHIIPQAGEGSTNTRDNLVAVCRECNSSKSNIAFAVWAENTSRPGVSVQKAIERTHHWVTDSGLRKPEFDKFRKQVCDRLRRKATDEPIDARSLESVAWMANELRSRIAQKFKDGDTKVRVYKGALTAEARRASGISGKLEFVDGKGKSRLDRRHHAVDAAVVAFTSNYVAETLALRSNMKFDQELRRKAPQWREFTGSDHVHQVEWTKWKYRMQALAELLNNALVQDRIVVMHNLRLRLGNGAAHEDTIGKLTRLKVGDAISTTDIDRASSEALWCALTRDPDYDPKTGLPENPNRTIRIHGTHLTASDEITVFPVAAASIPIRDGFAKLGSNYHHVRLFRVPSGKKYKYCLMQVYTVDLLKFRKEDLFTVELKPQTISVRTCEALLRKALANGTAEYLGWLVSDDELLIDTSSFDTPGIVKLREEYGPVNRWRLAGLTSVTRLNLRPLYLSKEGLKPNVNPEIKKIIDNRSWIITVNKLFSSGHVKIIRRDALGRPRLHSAAHLPICWEVK

SEQ ID NO: 22853 - protein, 1426 aa, unidentified
  REGION 1..1426: note = Cas Enzyme sequence
MKNILGLDLGTTSISFAHIVEDENKEKSEIKELGVRIVSLTTDEQSDFEKGKSITTNANRTLKHGARLNLDRYQQRRKYLIDLLQKANLITSSSILAENGKNTTHSTWQLRAKAVTERIEKEEFARILLAINKKRGYKSSRKAKTEDEGQAIDGMAIAKRLYDENLTPGQLSLQLLQQNKKLLPDFYRSDLQKEFDLVWNFQKQFYPDILTDTFYKELQGKGKDATSKAFSKRYHFDTAENKGSKESVRLQAYQWRAEAIFKQLSKEEVAYVLTEINNNLNNASGYLGAISDRSKELYFNRQTVGQYLYAQLQENRHNSLKNKVFYRQDYLDEFERIWETQASFHKELTDELKKQIRDVVIFYQRKLKSQKGLISFCEFESKEIEIEKDGKTITKSIGARVVPKSSPLFQEFKIWQILNNVTCKRKGIRKKKSSAKSTELDLFNESSQAIFSLDMECKQLLFDELNLKGDLKSDKVLKLLGYSPQEWEINYNQLEGNRTQKALYEAYLKIVEMEAHDVKNILQIKSAKDDWSLDESPLSASEIKEKVKDIFQALGICTKILYFDPLLPVKEFEKQDSYQLWHLLYSYESDDSTSGNETLYRILEKKYAFKREHARILANVALQDEYGSLSTKAIRKIYPNIKENQYSTACEMAGYKHSKLSLTTEELEARELKNIIPLLKKNALRNPVVEKILNQMINVVNALIEKNSERDAEGKITKYFHFDEIRIELARELKKNAQKRYEMTQNINKAKLEHQKISEILQKKFGIKNPTKSDIIRYRLYQELEHNGYKELYTNAPIARDMLFSKNIEIEHIVPKARVFDDSFSNKTLAFREFNIKKGESTAFDYITSLNSEEELNQYLTRVENAYKTKSISLTKYKNLLKKASEIGDGFINRDLRDTQYIAKKAKEILFQVTKNVLSTSGSITDRLREDWGLVDVMKELNMPKYQSLGLTEVEERKEGNKVTVIKNWTKRNDHRHHAMDALTVAFTKPSYIQYLNHLNARKDENNKNYSVILAIEEKETIKVPTNNGKNKRVFIEPIPNFRQVAKKHLEEIFISHKAKNKVVTKNVNKPAGTDKQQITLTPRGQLHKETIYGKYQYYVNKEEKIGVKFDKETIAKVSNPVYREALLKRLQANDNDPKKAFTGKNALSKKPIYLDEAKTKTLPEKVNLTYLEEDFSIRKDISPDNFKDLKSIEKVIDQGVKRILIKRLQAYGNDPKKAFVDLEKNPIWLNKEKGIAIKRVTISGVNNAQPLHIGKDHLGKTTLNKEGKEIPVDYVSTGNNHHVAIYRDKEGNLQEQIVSFFEAVVRTQQGLPIIDKTYKQEEGWQFLFTMKQNEMFVFPNATTGFNPAEIDLLDPKNKKLISPNLFRVQKIATKDYFFRHHLETNVETDNVLKNTTWKREGLSGLKDIVKVRINHLGDIVSIGEY

SEQ ID NO: 22854 - protein, 1380 aa, unidentified
  REGION 1..1380: note = Cas Enzyme sequence
MKRILGLDLGTTSIGWALVNEAESNNEASSIVRLGVRVNPLTVDEKSNFEKGKAITTNADRQLRHGARINLQRYKLRRQNLHDCLQKQGWLGTEAMYEEGKASTFETYKLRAKAAEEEISLHEFARVLFMLNKKRGYKSNRKANNKEDGQLFDGMTIAKKLYEEHLTPAEYSLQLLNKGKKFTQGYYRSDLNAELERIWNEQKKYYPEILTDEFKQQLEGKTKTNTSKIFLAKYGIYSADLKGLDRKLQPLKWRVEALKQQVDKEVLAFVVSDLKGQIANTSGLLGAISDRSKELYFNKQTVGQYLWASLEENPHISIKNKPFYRQDYLDEFEKIWETQAAFHKQLTPELKQEIRDIIIFYQRPLKSKKSLISVCELEQRKVKATIDGKEKEITIGPKVAPKSSPVFQEFRIWQNLNNVLLIDNDTNEKRPLDEDERNLLYEELSIKAKLSKTEALKILNKKGKQWDLNYKELEGNRTQAILFDCYNRIITLTGHEECDFKKIKASEIRRRVSTIFKNLGFSTEILDFDPSLEKHELEKQPMYQLWHLLYSYESDNSRTGNESLLRKLETTFGFPEEYATVLCDIVFEEDYGNLSVKAMRKILPYLQAGNDYSQACAYAGYNHSRHSLTKEELDQKVYKERLELLPKNSLRNPVVEKILNQMINVINAIIDEYGKPDEIRIEMARELKSSAIERESRTRAISQGNAENQRIREILEKEFALSYISRNDIIKYKLYEELKPNGFKTLYSDTYIPKDKLFSKDFDIEHIIPKARLFDDSFSNKTLEARDINLAKSSKTAFDFVKEKYGKEGAEAYKKKLDMLLGNNVISKPKYNKLLMTEADIPSDFINRDLRNTQYIARKACEILGELVRTVTPTTGEITNRLREDWQLVDVMKELNFEKYEKLGLTEIVEDRDGRKIKRIKDWTKRNDHRHHAMDALAIAFTKPSYIQYLNNLNARSNKGDSIYAIENKELHYEEGKLRFNAPIPVNEFRAEAKRHLSAILVSIKAKNKVMTQNVNKIKTKHGIIKKIQLTPRGPLHNETIYGTKMRPIIKMVKVGASLDEATINKVSSPAIREALLKRLNEYSGNAKKAFTGKNTLDKNPIYLNVERTKVVPALVKTVEWENYHPIRKPITPDLKVDKVIDKGIRDILKARLEEFNGDAKKAFSNLEENPIYLDEAKKIALKRVSIEGVLSAIPLHTLKNQAGKPINGKDGKPVLGNYVQTSNNHHIAFYYDEDGNLQDNAVSFFEAAERKSQGIPVIDKDYNRDKGWRFLFTMKQNEYFVFPNEATGFIPSEVDLTDEANYGIISPNLYRVQKVSRIDKGISASRDYWFRHHLETILNDDSRLKNSAFKRIQSLKFLEGIIKMRINSTGKIVAVGEYD

SEQ ID NO: 22855 - protein, 1380 aa, unidentified
  REGION 1..1380: note = Cas Enzyme sequence
MKRILGLDLGTTSIGWALVNEAENNNEASSIVRLGVRVNPLTVDEKSNFEKGKAITTNADRQLRHGARINLQRYKLRRQNLHDCLQKQGWLGTEAMYEEGKASTFETYKLRAKAAEEEISLHEFARVLFMLNKKRGYKSNRKANNKEDGQLFDGMTIAKKLYEEYLTPAEYSLQLLNKGKKFTQGYYRSDLNAELERIWDEQKKYYPEILTDEFKQQLEGKTKTNTSKIFLAKYGIYSADLKGLDRKLQPLKWRVEALKQQVDKEVLAFVISDLKGQIANTSGLLGAISDRSKELYFNKQTVGQYLWASLEENPHISIKNKPFYRQDYLDEFEKIWETQATFHKQLTPELKQEIRDIIIFYQRPLKSKKSLISVCELEQRKVKATIDGKEKEITIGPKVAPKSSPVFQEFRIWQNLNNVLLIDNDTNEKRPLDESERNLLYEELSIKAKLSKTEALKILNKKGKQWDLNYKELEGNRTQAILFDCYNRIITLTGHEECDFKKIKASEIRHYVSTIFKNLGFSTEFLDFDPSLEKHELEKQPMYQLWHLLYSYESDNSRTGNESLLRKLETTFGFPEEYATVLCDVVFEEDYGNLSVKAMRKILPYLQAGNDYSQACAYAGYNHSRHSLTKEELDKKVYKERLELLPKNSLRNPVVEKILNQMINVINAIIDEYGKPDEIRIEMARELKSSAIERENATRAISQGNAENQRIREILEKEFSLSYISRNDIIKYKLYEELEPNYYKTLYSDTYITKDKLFSKDFDIEHIIPKARLFDDSFSNKTLEARDINLAKSSKTAFDFIKEKYGEEGAEAYKKKLDMLLGNNVISRAKYNKLLMAEADIPSGFIERDLRNTQYIARKACEILGELVRTVTPTTGEITNRLREDWQLVDVMKELNFEKYEKLGLTEIVEDRDGRKIKRIKDWTKRNDHRHHAMDALAIAFTKPSFIQYLNNLNARSNKGDSIYAIENKELHYEEGKLRFNAPIPVNEFRAEAKRHLSAILVSIKAKNKVMTQNVNKIKTKHGIIKKIQLTPRGALHNETIYGTKMRPIIKMVKVGASLDEATINKVSSPAIREALLKRLNEYSRNAKKAFTGKNTLEKNPIYLNVERTKVVPALVKTVEWENYHPIRKPITPDLKVDKVIDKGIRDILKARLEEFNGDAKKAFSNLEENPIYLDEAKKIALKRASIEGVLSAIPLHTLKNQAGKPITGKDGKLVLGNYVQTSNNHHIAFYYDEDGNLQDNAVSFFEAAERKSQGVPIIDKDYNRDKGWRFLFTMKQNEYFVFPNEATGFIPSEVDLTDEANYGIISPNLYRVQKVSRIDKGTSASRDYWFRHHLETILNDDAKLKNLAFKRIRGLLELKDIIKVRINSTGKIVAVGEYD

SEQ ID NO: 22856 - protein, 1442 aa, unidentified
  REGION 1..1442: note = Cas Enzyme sequence
MKKILGLDLGTNSVGWAYVKQAQNDSEKSEIVELGVRVNPLTVDEKTNFEKGKPISTNADRTLKRGARRNLQRYKLRRQELIALLKEYQVISDKTILAEDGKGTTFETLRLRAKSAKEQVSLEELARILLMINKKRGYKSSRKAKNEDEGQLIDGMEIAQRLYDENLTTGQLSLQLLKEGKKSLPDYYRSDLQHELDKIWNFQKQFHPDILTDEFYTSIQGKGQKATRESFSSKYGIDTAENKGSREEKRLQAYQWRADATHKELTKEELAFVITEINNNINNSSGYLGAISDRSKELIFANETVGEYLWKQIQNDPHTSLKNQVFYRQDYFDEFERIWETQSGFYPQILTESLKNELRDILIFYQRKLKSQKALVSICELESKEIPLKDKQGNPISKNGIPVTKLVGPKVAPKSSPLFQEFKIWQNLNNVLVRPQGSRKRKVTTDQQSTLLEGQEPVFELNLEQKELLFEELNLKGNLKTDYCLELIGYSAKEWEMNYPTLEGNKTNKSLYEAYLKIIDSEGYDAKKLLKVKTDKDDINLDDIKVSASEIKTMISDIFNVLGINTKILDFDAELERKQFEAQASYRLWHLLYSYEGDDSKSGNELLYRLLEDKFGFKREHSKTLANVSLLSDYGNLSTKAIRKIYPYIKENKFSTACELAGYRHSKLSITKEENENRTLKDTLDVLKKNSLRQPVVEKILNQMINLINELIEKHSEKDEKGNIVKYFKFDEIHIELARELKKNAEERRELDSKVREGKDRNEKIITILKSEFGLPYPTKNDIIRYRLYEELKDNGYKDLYTNTYIPREKLFSKEIDIEHIIPKSRLFNDSFSNKTICYRQDNLNKGERTAYDYIEGLGKTQLDEYLNRVENLYVNKIITKAKYRNLLKKESEIGDGFIERDLRETQYIAKKAKEMLLQITRHVVSTTGSITDRLRDDWELVNVMRELNLPKYKALGLTEIQERKNGQTVEVITDWTKRNDHRHHAMDALTVAFTKHSHIQYLNFLNARKDEKHKEYSNIMGIQQLETEKTTDKDGKDKRVFKAPIPNFRQVAKEHLESILISHKTKNKVVTRATNKIAGSKKQQETLSPRGQLHKETVYGKYRRYVQKEEKIGSKFDLQTIERVANPLYKRLLTKRLEENGGDPKKAFTGKNALAKTPIYLDEAQTQQLPEKVKLVWLETYFSIRKDITPDNFKDEKSIDKVLDEGIKRILKDRLKSFDGDAKRAFTDLEQNPIWLNKEKGIAIKRVTISGVSNAEPLHTKKDHLGNEIFDDTGKPIPVDYVSTGNNHHIAIYRDENGDLHDEVVSFFEAVTRANQGLPIVDKTYNQHLGWQFLFTMKQNEMFVFPNKETGFDPQEVDLLDPKNKKLISPNLFRVQKLSKLMYDNSSGREYVFRHHLETTVEDKKELQQITYQRIRSLSPLNNIVKVRINHLGDIVHIGEY

SEQ ID NO: 22857 - protein, 1017 aa, unidentified
  REGION 1..1017: note = Cas Enzyme sequence
DRKEIKQKELLRYEAFGLSKSYGDYRWNFAEDKPYPCNETLPEINRRMKSILSDKKLSSEAYQQLWHILYSIDDPIEIRKALTSFAQNQKINSDDFVNAFYQYVPEKTKSYGAYSEKAIKKLLPLMRRGSYWAIGNIDEKTRRRLDNIINGVADDSISTCTREKLNNLTDITMCQGMPLWQACYAVYDRHSEAADTTKWEQPDDIDTYLSTELKQHSLRNPIVETVISETLRVVRDIWKTYGRPEEIHVELGRNLKQDTKSRKQDAIRMAENEQTNLRIRALLQELSNPECGVENVRPHSPSQMELLKIYENEVLQSTDDIPEEISNIIKDLGKTDPKKRPSLSDITKYRLWLEQKYQSPYTGHIIPLSKLFTPAYQIEHVIPQSRYFDDSISNKVICEAEVNKEKDRMLGYEFIINKGSSIVKGSFGQEFKIFDKVQYEDFVKQRYAHNKTKMKKLLMDDIPDGFIQRQLNDSRYMSKKIISILSNIVREDGEKEATSKHIIVTSGAITDRLKKEWGIKDVWNDIIAPRFKRLNKLTDSNNYGMETEKEGRQYFQINVPIELSAGFSKKRIDHRHHAMDAIIIACTTRNHVNFLNNSVAASDRKDIRRDLQHTLCTKTKTDSNGNYVWRFNKPWDTFTQDTRQELEGIIVSFKQNLRIINKMSNYYQHYVDGRKTIGRQNKGDGWAIRKSLHKATVSGKVNLKRSKTVGFKEALNDWSAIKDKTSKAILQKIIAQYTNYDPKTIFKYFKDRNFKVEGKDFSKLEVYYNTSDKEPMSAHRVNIDTTFDEKEIRSITDTGIQKIMLKHLHTYDDAQGKTHPEAAFSPEGIEKMNQNIRTLNGGKDHKPIFKVRKAETLGMKFAVGERGHKDKKWVEADKGTNLFFAIYESEENKRSYSSIPLNEAIDRLKRGENIADERDQNGNKLLFVLSPMDLVYVPDPDDAHIDEVKGNNNIFKMVSCTGTECYFVPETYANVICKGKELGSLNKVESYDGINIKKSCYKITVDRLGKVRKIFKG

SEQ ID NO: 22858 - protein, 1378 aa, unidentified
  REGION 1..1378: note = Cas Enzyme sequence
MKKILGLDLGTTSIGWAFVKEAEDGDNEPSSIVKIGVRVNPLTTDEQKDFEKGKSVSVNADRTLKRGARRNLQRYKQRRGNLIEVLKQNNLINTDSILAENDKDTTHFTYAIRAKAAAEGITKEEFARILLMINKKRGYKSSRKATKEDEGQAIDGMAVAKQLYEDNLTPGQLSYQFLKEGKKHLPDFYRSDLQAELSRVWDYQEKFYPNILTAEFKKELEGKGQRATSAIFWNKYKFNTAENKGTRDEKKLKAYEWRSKAINSQLAIEEVAFVITEINNNINNSSGYLGAISDRSKELYFNKQTIGQYLFNQLQNNPHTRMKNQVFYRQDYFDEFETIWETQAKYHAELTLVLKEEIRDIIIFYQRKLKSQKGLVSFCEFESKKVEYEIDGKTVIKTIGARVIPKSSPLFQEFKIWQNLNNIELKNKKDKSRILIKDFDLDIKEQLFNELNIKGNLTKAKILPILVDKPNDWELNYMVIEGNRTHQALYESYFKMMEYESHDDIDLEKLTAAEMKSAVLSFFETQHIDRTILDFNAELDGNHFEKQPAYQFWHLLYAYEGDNSNTGNDKLYELLKSKFGFKKEYASILANIKIQDDYGSLSAKAIKKIFPFIKENNYSDACALAGYNHSSSLTKEENDKRPLKGELKILPKNSLRNPVVEKILNQMVNVINAIIKDPPLGKPDEIRIELARELKKNAKEREEDTKRINEAKSNHDKIREILIREDKIPNPTRNDIIRYKLYQELKFNAYKDLYTNEYIARQDLFTKKYDIDHIIPQASLFDDSFSNKTLAPREANYTKGNRTAYDYIDKDRGAESLTDYLERVEMLYQVNYKSKDEGISKAKYKKLLLKGSEIGEGFIQRDLRDTQYIAKKAKEMLHEVCRTVVATTGSITDKLRDDWGLVNVMQELNMDKYRKLGLTEMIEKKDGGFKERIVDWTKRNDHRHHAMDALTIAFTKHEHIQYLNNLNAKTKEDKKGKEIYAIEQKITEKFDKDKRRFKSPLDNFREEAKNHLESVLISCKAKNKVVTKNKNKTKSSKGEKSQPTLTPRGQLHKETVYGKIKQYVIKEEKVSGKFDEETIFKVSKPQYSSALLKRLHENNNDPVKAFTGKNSLAKNPIYLDDQKTVQVPEKVKLVWLDDDFTIRKDISPDLKIDKVIDIGIQNILYKRLEQFGGKEKEAFSNLDKDPIWLNKDKGIAIKRVTISGVKNAEPLHYKKDHHGKEILDDNGKPTPVDFISTGNNHHVAIYRDENGDLQDEVISLHKVITERVNQGLPVVDKTYNQHLGWRFLFTMKQNEYFIFPSYNFDPSEVGLLDPANNKLISPHLFRVQKFSKVTYGNSSVRDYVFRHHFETSVEDKKELKDITYKSIKSLPYFENIIK

SEQ ID NO: 22859 - protein, 1081 aa, unidentified
  REGION 1..1081: note = Cas Enzyme sequence
LPKWAEAKSLQNNLYSELLSPQIYDKLLNVMKKILGIDLGTNSLGWALIEENTKLIDGGVIIFPRGNQQDPKSGKETSFAQNRTIFRGARRLLFRRKLRRQRLLELAKKYFNLSPEDIYTDTDPNTIYRLRSEGLERLLTEKELFRICLYFAKKRGFLSNRKDEARSSEADKGKVNQSIAELNSSIIENGCTTLGQYYYKLISDHRNGLRLDERILERYTSRKMYLDELDFIINFQINNKSTFLTPEIAAELKKQVFYQRPLKSAKHLIGKCRLESTKRCMPKSHPIYQEFRAWTIINNLRWTNHDTGESEGLTLDQKNKAFTYFNTELKLTETKLKKILGISNRAKFNDVELKPCRTIIEMQTIFSESKIEISENQFKSIYHSLLFTQDSQFENFKNYLLSKYKISNEIADKLWKVHLEPDYGNISHKAALKLLHYMRQGMRYDEACLEAGYHHSFENKFKNYDKVRELKTNELRNPVVQKAIATCINLVNKIIDNYGKPDEVRIELARELKKPKSVRENIRFKNLNKQKQRDKYREILEKHFNRTIANSESLLTKYELWLELGCEELGLGGFDEFVKNSRKVDLEKYNLWLEADRISPYTGKVISLSRLMSPEIQIEHILPYSRTLDNSFMNKTLCESHFNANLKGKYTPMEYFSKRPQEEQNDFLKRIYLFSNPAKRDVFLADSLPDSFTNNQLTDTAYIAKLAIQRISQCIEKVYPTKGGATSIIRRELGLNSILHYGDDINVANDIKNRGDHRHHFIDAVVIAATTTAQLQQLSRANTINGKIDVDITAPWNSFRSDIEEKANSLLVVHKVNHKLTRKSINTYKHGSKATKNQELTAIRGSLHEDSLYGKIINSKTGEENYVIRKDLKSLDEKQLEKIIDEGIKRFLKAEIEKLGSWANVIKSPIIYNGKPIRKVRWQNTAKSLNLLREETKTYTEPGNNYVLAIYEDVNGKRDYESVSFYDAINKVISGKLVYPKSKQNKNLKYTVKILDKFIIYSESPEEINWTDFTSLNSRLYHLKKFTGSTVYISKSTIANEDSKVYKMPASKQSSVNTFSAIKIKLNLLGQIIWRSDIGKV

SEQ ID NO: 22860 - protein, 1450 aa, unidentified
  REGION 1..1450: note = Cas Enzyme sequence
MSELKKIVGLDVGTNSIGWAYVSLNLEARKGEIHDLGSRIIPMPADEISNFNQGNLESATSARTAKRGMRRLRERQLKRRERLVDVLKIYGMIPEEWNPNRYSSFAYNYTDGKAEFKFKQAYKEMKAIFESAHPDISVIPNDWTIYYLRKKALEYKISLEELAWVILQFNAKRGYYQLRGDDDLDTADNKFFISDIVDEIVDLDDEVRGKKKFRIVLRDGVEGEFSDKEKPEFIGKRIEFIATEKSTKEGDYISLTKPDGDDWTLRKKRTEHKIAESGKSLGAYIFDRILEEPGIKIRGKEVHTIDRKWYRKELEAILAAQIEFHPELKDEKTYEKAIQHLYNHNESHKKNLRKYGFGHLIATDIIYYQRPLKTKKYLIRNCKFEKYFFKDKNGELESRPVKVTARSNPYFQEFRVWSTLQNLRIIAEERRNEKGELVQDVDVSQEYLHAENIGKLFELFMLKKEVSETQILKELKLDKNAYRINFESQNKLPGNITISSILQPFSKEKKLKKEVLELVRNQNDLHKLWHIIYSLGEDESHMRSGIQTAFPDRLSKDAVDLLLQVPGFDKNYAAFSEKALKKLLPVMRMGKYFDEKEIHSSTKERIEKVINAEFDLSIKDEVREELMNRTEMHQFQGLPLHTASYLVYGRHSEAESDRRFEKPEDIDVDELIPQYSLRNPTAEQVIRETLLLVKKLWEVHGKPDEIHVEMARELKLPNDKRAKYTQRRDENYNTNQRAIAMLNELKADQPSINPHSKGHIETFKIFEEGAHANAGSTADTKIKAIRKKGDPTPKELEKYKLWLEQKYRSPYSGQVIPLSSLFTSSYEIEHVIPKTLFYDDSFNNKIICETELNRFKDNKTAYQMILDAGGTVQNGIRILEREEYEELTKKMYGQNKIKYKNLMRTEPPYDFAQRQLNNTRYISRKLYELLDPFVREEGEEAARSKNLMPMAGGITHELRNDWGLHHIWKKLLAPRFLRMNELTQTDEYYQKNGQRIDLSGYENELKRLDHRHHAVDALTVACTTRQHINYINSRRAENTRYNLRDVLFDKDENGKYQGYRLPWKGFPEEAERSLRQVVVSFKNRIRVINKTINYYQKYIEQADGSFKKKFVRQESNGANWAVRQPLSKETYNGKVILREYKPMSINSAVKDPHLIADPKIRKHMIRLLKKFEDKKSKVKKYLKEKPFQRDGKEIKKLQMIEYNTYATSTMDLDESTTQKHIDKIVDPNLQQELYDHLEKYGGDAELAFSTNGLIDFNSSRKLPVQNVRVKEKFGLKYPVGQTGNKQDKYVESAKGTNLFFNVYWNEKKQKREFETISLQEVVLHQMSVAHLSKKERRPVPIDTDKGEFLFYLSPHDLVYVPTKNQIDSYRPKNVELSTLSAERIYKSVSFSNTTALFLPQTVSSIIKDKKEFEAKNKMQKDILGNSIKNNCWKLQVDKLGRIKNIITGPA

SEQ ID NO: 22861 - protein, 990 aa, unidentified
  REGION 1..990: note = Cas Enzyme sequence
LFQEFKVWQTINNILVNGAALDDEEKSVIAKELMFKDKLKDSDLLKHLFKTTKGLSVNFKEVDGNRTMAALMKACFRIAGNLGYDDTDLAKLSSEDQMDRVEEIFKKQGFKTGFLHFDSSLASPEFENQDSYRLWHLLYSYEGDKSASGNESLVKCIMGLCSMDEESAKILATCTFLPDYGSLSAKAIRKILPNMKDGLEYSTACTMAGYRHSKRSLTKEELDTREYSDRLTLLPKNSLRNPVVEKILNQMINVVNSVIDVYGKPDEIRIEMARELKKSAKEREEALRDIASATAESQKIIEILKGEPFFLPFPTRNDIIRYRLYQELAQNGFKTLYSNTYIPKDKLFSKEFDIEHIIPQALIFNDSFSNKTLESRQCNLEKGKATAMDYVKSKCDEAGVQAYHNRVNGLIGKGISKTKAKWLLMEGKDIPDDFINRELRDSQYIAKKAREILESLVKFVVPTTGSVTARLREDWQLVNVMQELNWEKYARLGLTGVREDKDGRRIPFIQDWTKRNDHRHHAMDALTIAFTRRQFIQYLNHLNSKIDAVSWDKKDLDLRDYDLDDIKFGNMSTGDRYGIVKALQDRFLYKDDNDKYRFIPPIPLDEFRTQAKEQLSDILISFKAKNKVCTRNVNVTKSKGGVNRKTQLTPRGPLHEDTIYGCSLEYVTKENEKIGSSFDAEKITTVCKKKFRDALLRRLEEFGRDPKKAFTGKNSPEKNPIWVDEHHSEQVPTKVRTMTMEQRFTGRKPIDAKLKIEKVLDKRIREILQARLDEFGGKAEKAFTNLDENPIWLNKEKGIAIKRVTVSGPANPVTVRFKRDKDGKPVIDDAGKTIGSDFVTPGNNHHIAIFRDSSGKLQEHPVSFLEATIAKSNGLDVIDRNYKKDKGWEFLFTLKQNEYFVFPNPETGFNPLDYDLTDPRNYAEISPNLYRVQKIATGDYYFRLHLETTVEDSKALKGITWKRIGLSGLEGAIKVRIDNLGRIVAVGEYD

SEQ ID NO: 22862 - protein, 1151 aa, unidentified
  REGION 1..1151: note = Cas Enzyme sequence
NDGRNGVIKKFLSRYSIYTADNKGKDKKKTALEWRVKALADQLDKETLAYVIADLKGAIQGSSGYLGAISDRSKELVFDNLTVGQYLWRQIEQDPNYSTRNKVFYRQDYMDEFERIWVCQKRFHPELNDELKSEIRDVVIFYQRRLKSQKNLISFCEFETRDITVEEAGVQKVKKCGCRVAPRSSLIFQEFKIWSVLNNISVKSKTDGSTVEVTDEMKRRLFDYLSVNDKITVSDMLRLFELKPKGYDVNYKEIQGNLTLAELYRKFFEVVSASGNGEHDLAKLSYSGAYKILFEVYSALGFSTEILTFDASLPKKEYECQPLFKLWHLLYSYEGDNSKTGDASLIRRVAEICRMPEEYARIIASVKLLDDYASLSHKAMKKILPHLKDGCAYDEACARAGYNHSSSMTKEENEARVLKDRLEVLPKGALRNPVVEKILNQMVNVVNTLADEYGKPDEIHIEMARELKQNAKQREKATKDIADNTKRDEEIVKKLQEEFGLKYVSKKDILRYRLYEELKSLGYKTLYSGQYIPKDRLFSNSIDIEHIIPQALMFDDSYSNKTLEFSDVNRDKGKETAFDYVSRKYGPAELDAYKLRVHELYSHEVISARKRDRLLMRQSDIPSDFVNRDLTNSQYIARKSTEMLGEFVRDVMPTTGSITALLREQWQLVDVMKELNLPKYRQAGKTFTVTKSDGQSLEKISDDWTKRNDHRHHAMDALTIAFTRRSHIKVLNTLNALPGSEDYSLKEMVTTVLPNRKRIFTPPMPLGELRSAFKSALESTLVSIKAKNKVATRNVNKSKVKNGTIAVETLTPRGQLHKEQVYGRRKVYEPFEVTVGGKMDAAMIASVASRAEREALKRRLEAFGGDPKKAFTGKNSLEKNPLYVDELQSVAVPAKVKCVRMKEVYSIKKEIGPDISVDKVVDGRVRALLKARLDEYDGDPKKAFVNLEEKPIWVDESKGIKMKKVTVAENFDLCAIRDKRDKDGKLILDSAGNTIPSDYVNPRNNHHIAIYEDADGNYQELVVTLLEALQRKTAGLPVIDKTYHEDLGWKFVFSMKLNEMFVFPNPATGFDPSEMDLMDPANYAAISPNLFRVQTLSSGDYRFRHHLETSIESDKELKDVTWKRLKSLSSLKGIVKVRINHIGQIVAVGEY

SEQ ID NO: 22863 - protein, 1428 aa, unidentified
  REGION 1..1428: note = Cas Enzyme sequence
MAKNILGLDLGTNSIGWALINQDFENKQGEILGMGSRIIPMSQDILGDFGKGNSVSQTAARTGYRGVRRLRERFLLRRERLHRVLNIINYLPEHYASQIDFEKRFGKFKEETEPKLAYNKDGFVFKNSFEEMLADFKNSQPQLLENDKKIPYDWTIYYLRKKALSQKIEKEELAWILLNFNQKRGYYQLRGEEEEENPNKLVEFYSLKIVDVVADEPQKGKSDIWYSLVLENGWVYRRASKTPLFDWKDKTRDFIVTTDLNDDGSIKTDKDGNEKRSFRAPAETDWTLVKKKTEQEIDKSHKTVGVYIYEALLQNPKQKIKGKLVRTIERKFYKDELKQILEKQKEFHQELKNDDLYNDCVRELYRNNEAHQLTLSKKEFVHLLMEDIIFYQRPLRSQKSSISNCSLESRKYKDEYVVEHTQFLKVIPKSNPYYQEFRIWQWIFNLNIYKKDDDTNVTKEFLDTTENFESLFEFLNNRKEVDQKALLKHFKLNEKTYRWNFVEDKKYPCNETKTMISSRLDKVENISDDFFTRETEQKIWHIIYSVNDKMEYEKALKSFARKNNLDENSFFEAFKKFPPFKSEYGSFSEKAIKKLLLLMRLGKYWNYENIDDSKERIQKIITGEYDEKIKDRVREKAIHLTSENNFQGLQLWLAQYVVYGRHSEASIIGKWNSTDDLEEFLKEFKQHSLRNPIVEQVITETIRVVKDIWIKYGNGAKDFFNEIHIELGREMKLPADEREQLTRQISENENTNLRIKALLAEMMTDNSVENVRPYSPMQQEILKIYEDGILKSDIEIEDDILKISKTAQPSSSDLKRYKLWLEQRYKSPYTGQIIPLNKLFTPEYEIEHIIPQSRYFDDSFSNKIICESAVNKLKDNYIGLGFIKQFGGTIVECGLGKNVKVFEVDEYEDFVKKHYANNRGKRNKLLLEEIPEKMIERQLNDTRHISRYISGVLSNIVRVEDGSDEGVNSKNIVPGNGKITTQLKQDWGLNDVWNDLILPRFERMNQLTNSTDFTAWNENHQKYLRTVPIKESKGFSKKRIDHRHHALDALVIACATKDHVNLLNNQSAKSDTKRYDLKKKLMKFEKAVYKHPQTGERIERDVPKQFLKPWESFTIDAKNNLDKIIVSFKQNLRVINKATNYYEKYVEKDGIKTKERVEQTGTNWAIRKPMHKETVSGKIDLPWVKVPKGKILTATRKSLDTSFDLKSINSITDTGIQKILRNYLEFKGSAEAAFSPEGIEDMNKNIEKYNDGKLHQPINKVRVFELGSKFQVGQTGNKKDKYVEAAKGTNLFFAVYEDKNGKRIYETIPLNIVIERQKQGLSVVDLKGVNDFYLCPNDLVYIPSEDELENVNNIDFKNFTKEKNERIYKVVSFSGSQIFFVRQDVSTSVVNKAEFSTLNKMERAIDGSMVKEHCLKLNVDRLGNISKT

SEQ ID NO: 22864 - protein, 1428 aa, unidentified
  REGION 1..1428: note = Cas Enzyme sequence
MAKNILGLDLGTNSIGWALINQDFENKQGEILGMGSRIIPMSQDILGDFGKGNSVSQTAARTGYRGVRRLRERFLLRRERLHRVLNIINYLPEHYASQIDFEKRFGKFKEETEPKLAYNKDGFVFKNSFEEMLADFKNSQPQLLENDKKIPYDWTIYYLRKKALSQKIEKEELAWILLNFNQKRGYYQLRGEEEEENPNKLVEFYSLKIVDVVADEPQKGKSDIWYSLVLENGWVYRRASKTPLFDWKDKTRDFIVTTDLNDDGSIKTDKDGNEKRSFRAPAETDWTLVKKKTEQEIDKSHKTVGVYIYEALLQNPKQKIKGKLVRTIERKFYKDELKQILEKQKEFHQELKNDDLYNDCVRELYRNNEAHQLTLSKKEFVHLLMEDIIFYQRPLRSQKSSISNCSLESRKYKDEYGVEHTQFLKVIPKSNPYYQEFRIWQWIFNLNIYKKDDDTNVTKEFLDTTENFESLFEFLNNRKEVDQKALLKHFKLNEKTYRWNFVEDKKYPCNETKTMISSRLDKVENISDDFFTRETEQKIWHIIYSVNDKMEYEKALKSFARKNNLDENSFFEAFKKFPPFKSEYGSFSEKAIKKLLLLMRLGKYWNYENIDDSKERIQKIITGEYDEKIKDRVREKAIHLTSENNFQGLQLWLAQYVVYGRHSEASIIGKWNSTDDLEEFLKEFKQHSLRNPIVEQVITETIRVVKDIWIKYGNGAKDFFNEIHIELGREMKLPADEREQLTRQISENENTNLRIKALLAEMMTDNSVENVRPYSPMQQEILKIYEDGILKSDIEIEDDILKISKTAQPSSSDLKRYKLWLEQRYKSPYTGQIIPLNKLFTPEYEIEHIIPQSRYFDDSFSNKIICESAVNKLKDNYIGLGFIKQFGGTIVECGLGKNVKVFEVDEYEDFVKKHYANNRGKRNKLLLEEIPEKMIERQLNDTRHISRYISGVLSNIVRVEDGSDEGVNSKNIVPGNGKITTQLKQDWGLNDVWNDLILPRFERMNQLTNSTDFTAWNENHQKYLRTVPIKESKGFSKKRIDHRHHALDALVIACATKDHVNLLNNQSAKSDTKRYDLKKKLMKFEKAVYKHPQTGERIERDVPKQFLKPWESFTIDAKNNLDKIIVSFKQNLRVINKATNYYEKYVEKDGIKTKERVEQTGTNWAIRKPMHKETVSGKIDLPWVKVPKGKILTATRKSLDTSFDLKSINSITDTGIQKILRNYLEFKGSAEAAFSPEGIEDMNKNIEKYNDGKLHQPINKVRVFELGSKFQVGQTGNKKDKYVEAAKGTNLFFAVYEDKNGKRIYETIPLNIVIERQKQGLSVVDLKGVNDFYLCPNDLVYIPSEDELENVNNIDFKNFTKEKNERIYKVVSFSGSQIFFVRQDVSTSVVNKAEFSTLNKMERAIDGSMVKEHCLKLNVDRLGNISKT

SEQ ID NO: 22865 - protein, 1528 aa, unidentified
  REGION 1..1528: note = Cas Enzyme sequence
MMKKILGLDLGTNSIGWALVENNQEEKDGRIIAANSRIIPMDQSILGDFEKGNTISQTAERTGYRGVRRLRERSLLRRERLHRVLHILGLLPKHYENEIDFDLHPGKFVNHAEPKIAYCKSEDTGKYDFFFKSSFNEMICDFSENITQLITSQKLLPYDWTIYYLRKKALTEPIEKSELAWILLNFNQKRGYYQLRGEEEEENKNKLVELYSLKVVDVIAANEKKADVDWYNVVLENGWIYRRQSKVFLDWVGQTKDFIVTTELNDDGTVKLNKYGEEKRTFKAPEEKDWTLVKKKTEAEIEHSEKTVGEYIYDTLLANPDQKIKGKLVRTIERKFYKNELEMILNAQKQFHPELRDRDLYNACVEELYPHNYNHRDSIRNRDFTYLFIDDILFYQRPLKSKKSLISNCPYEVWKYKDKDGNEKVESIKCIAKSHPLFQEFRLWQFIQNLKVYIKETTVDGKLQTDVNVTPQFFPSEKEYVELFEWLNERKEIDQKAFLKYPPLGLKGKVAENYRWNYVEDKIYPCNETHALIKNRLNKIGIPQLKKNEEEELWHILYSVEDRQELLKALTSFSNKKNLPSDFVEEFIKFPPFKKEYGAYSAKAIKKLLSVMRLGKYWSEDGIDVLTKKRINKLIDGEWDEQIKQRTREKVSDKDLTSIEQFRGLPLWLACYVVYDRHSESGDILKWNSPDDIEHYLRDEFKQHSLRNPIVEQVITETLRVVKDVWKYYGKGKQHFFDEIHVELGRDIKNPADKRKQMTNRITENENTNLRIKAILTELKNDPTVENVRPYSPSQQEILKIFEEDIINSGIEIPDDILKISRLSQPTSTEIIRYKLWLEQKYRSPYTGEIIPLSKLFTPAYEIEHIIPQSRYFDDSFSNKVICESAVNKDKDNKLGFEYIRDNRGKKVEVGFGKEVTIFTVQAYEEFVKSRYRGNYNKMKKLLLEDIPESFITRQMNDSRYISRVVQHLLSAIVRTDDEQETVSKNLISCNGTITTRLKNDWGMNDVWNDIVYPRFVRMNDLTSSNDYGEWINKEGKKVFQTRMPLLLQKGFEKKRIDHRHHAMDAIVIACASRNHINYLNNSYANKDAQRKDLRSILCYKSKQDDKGNYQWVFNKPWHTFTQDSKEVLKTAIVSFKQNLRVINKTVNQYQKWVPNSDGVFEKKLCRQTKGDSWAIRKPMHKETVYGKISLRFKKEVNLSAALDNWESIVDKELKSAIKNLINQYGKFDKKILIKYFKDREYRLGDKNISKVEIYYFDNNISACRSVIDESFNSKRIGNVSDTGIQKILFKHLESYNEIKNNKVIEHPDLAFSADGIDTMNKNIIQLNDGVYHKPIFRVRVCEPIGNKFNVGTIGNNKNKYVEAAKGTNLFFGIYQNQEGKRSYETIPLNIVIERQKQGLSSVPEVNEKGDQLLFSLSPNDLVYLPTLDEIENQRINWDDKITLSNRIYKMVSCTEGEFHCIPYFIASPILKTIELGSNNKSERAWTGEMIKNTCVKINVDRLGNLIIKDYDKENAIFWQSGVFELKQ

SEQ ID NO: 22866 - protein, 1327 aa, unidentified
  REGION 1..1327: note = Cas Enzyme sequence
IQNFEKGKSITTEAYRTLKRGMRRNLQRYKLRRENLIAVLKSNHFITDETILSESGNRTTFETYKLRAKATTEEISLEQLARVLLMINKKRGYKSNRKANNQEEGSFINGMDIARKLYDDNITPGEFVLELLKEGKNYIPDFYRSDLQNEFEKIWNKQAPYYSEYLTQDFKKQIFNKSKTQTNKIFLGKYKIFSADNKGKDKKLQAYQWRVNALKDKLDINQLAYVISDVNGNITSSSGYLGGISDRSKELFFKKITVGQYKMLKLVENPNYSLKNKTFYRQDYLDEFEIIWETQAKFHKELTSELKKEIRDMVIFYQRNLKSQKGLVGYCELESKQIETTIEGKKKIITIGSKVCPKSSPFYQEYRIWQKLNDFIVINEKSEEKRALTQDEKRLIAKELNYKGKLSKSEVLKILFKNYRSYDANFKELIGNRTNTLIYNALSLIISESGNGDYDFSKTNADEINRITNEIYNGLGYKTDYFTFDSKIPGNPDTQPYYKLWHLLYSYEGDNSKTGDEKLIADIQTITGLPKEYAMVLSRIKFEPDYGELSTKAIRKILPFLMGGNNYSSACELAGYSHSKRSLTKDEIENKTLVKKLQLLPKNTLRNPVVEKILNQMINVINQLDDTYGKPDEVRIELARELKKSAEDRQELTDAINKSTAEYDGYKKLLTSDSNFHLQDSHISRNDLVKYKLYLELKDNGFKTLYSNTYISKEQLFSGDFDIEHIVPQARLFDDSFSNKTLESKSCNIEKGNMTALDYVESKGHSEEYLNKIEQLMKSGAISRAKYSKLKMHESDIPDDFLNRDLGNTQYIAKKANEILSTYVKTVIPTTGTITDRLREDWQLVDTMQELNWNKYDKLGLTETFANRDGKQVRRIKDWTKRNDNRHHAMDALTIAFTKHSYVQYLNNLNARSNKSSSIYAIEQKELTRNNHNKLVFNPPIPLNEFRAEAKKQLENILVSIKPKNKVITDNVNITRKKGGVNKKVQTTPRGQLHNETIYGHIKQYSTKEEKIGATFDEAKISTVVNKAYRVLLLNRLKEFDGDAKKAFTAKNSLVKNPLFADAAHSIRVPEKVATMQFTDLYTIRKAVDKDLSVDKVVDGHIRAILENRLKEFGGDANKAFSNLDGNPIWLNREKGISIKRVTIKGVNNVVALHDKKDKDGKLVLDKENNTQPTDFVSTGNNHHIAIYKDEKGELQEVPVSFFEATVRANNNLPIVDKTYKQSEGWKFMFTLKQNEYFVFPNPATGFDPSQIDLKDPNNYSAISPNLYRVQKIATKNYFFRHHLETNVNEPNELKSITYKNIQSESGLKGIVKVRINHIGKITNVGE

SEQ ID NO: 22867 - protein, 1101 aa, unidentified
  REGION 1..1101: note = Cas Enzyme sequence
VYGDCIRELYRNNEAHQTTLRKKDFVHLFVNDVIFYQRPLRSQKSSIGNCSLEYRVFTAKDKEGKTIDKTEYLKAIPKSHPLYQEFRLWQWLYNLKIYTKEDDKDVTKQFIQSVEDYESLFDFLTERKEIKQEILIKYFVEKTGLKGRLLNNELVKYRWNYVEEKIYPCNETGTQIRTRLSKLQNVPDGFLTSDVEYRLWHLIYSVTDKVDFEKALKSFASKYGLDEVSFVENFKKVSPFKSEYGSFSEKAIKKLLPLMRLGKYWDWSEIDENTKNRIGKIITGEFDEEIKDRVREKAINLATEENFQGLPLWLAQYVVYDRHSEAVAAGKWNSVTDLEKYLDEFKQHSLRNPIVEQVITETLRVVRDIWEKYGQGAKDFFDEIHIELGREMKNTAEDRKRITSQVTENENTNLRVKALLTELLNDSNVENVRPFSTMQQEILKVYEEYAVGSNERYNPHTGNFEHDPISDEMLKISKTAQPTKPELQRYKLWLEQRYRSPYTGQMIPLNKLFTSEYEIEHIIPQSRYFDDSFSNKVICEAAINKLKDKQLGLEFIKNYHGAIVETGFGRSVRVFDEDAYQEFVKERYAKNRSKRNKLLMDEIPDKMIERQLNDTRYISKFISNVLSNIVRVDNNDDGINSKNVLPGNGKITSTLKQDWGLNDVWNDLILPRFERMNLLTNSAAFTAWNANHQKLLPTVPLEYSKGFSKKRIDHRHHALDALVIACATRDHINLLNNKHAKSPERYDLNRKLRRFEKVVYTHPQTSEQVVKEVPKDFIKPWANFTVEAKDALERIIVSFKQNLRVINKTTNKYEKFVEKNGKLVKELVPQTKGDSWAIRKPMHKDTVSGMVKLPRIKVPKGKNLTATRKAIDASFNSKAIASITDTGIQKILLNYLSYKGDNPELAFSPEGLEELNANIALFNDGKFHQPIYKARIFEIGSKFPLGQTGNKNKKFVEAAKGTNLFFAVYHDKNGKRSYETIPLNVIIERQKQGLPPVDLRDFRDFFLSPNDLVYVPTEDEQENVSTIDFSSLSRDQLSNIYKMVSSSGAQCFFVRQDIASSVVNKMEFSTLNKMEKSIYGVMIKEVCIKLKVDRLGNISKA

SEQ ID NO: 22868 - protein, 1265 aa, unidentified
  REGION 1..1265: note = Cas Enzyme sequence
MKRILGLDLGTNSIGWALVEKDEKKKEIIGMGSRIVPLSPDDKDEFSKGNTISKNHRRTVKRTQRKLYDRYQLRRNALIEELKNKNMMPDEDLIHVSKFRLWELRSKAVETKLTLPEIGRILLHLNQKRGYKSARSEENLDKKDTEYVEKVKNRHEELRDAGLTIGQYLLKELKKSENFRTKDLVYPREAYIEEFDRIISIQKGYYPEELSEDFIQRIRNEIIFYQRALKSQKGLVSICEFEGFWMEKEGKNLYVGPKVAPKSSPLFQIEKIWETINNIRLKDKYGQPIVLGIREKEKLFKVLNIPGAGSEDFDNFSKYSLDRNGKLSYSKLLNLLGLSKDDVYANKQLENGIQGNILRQKILNCFNNPDEFSELLRFDISFIKTDKKVHLYDRKTGEVIHEEKESIIANKAEDIEKEPLYRLWHVLYSIKDREECENILKKKFNIPPDSAEKLSALDFTLMAFGNKSVRAIRRILPYLAEGYDYSESCMLAGYNHSNSLTKDQNRDRQIAERLSLLEKNSLRQPVVEKILNQMINLVNAVIEEYGHPDEIRIELARELKQSRQERFDADKAIRKIERDNQSIRKELVENYALRASRNNVIKWRLYHEMNNQKLNAICVYCGQPISFTDAIKGNDVDIEHIIPKAKLFDDSQSNKTLSHRSCNRQKDKQTAFDYMKTKKEDEFHEYIERVNYLYKNRLIGKAKRDKLLMSEDKIPQDFIQRQLRESQYIARKSREILMEVCHDVWTTSGTVTAELRHIWGWDDVLMNLQMPKYKKYDLTEEIEFENNGQKHKKERITDWNKRNDHRHHAIDALTVACTEQGFIQRLNTLNSGKTRNEMLRAINEFQKNASEVDNKRSEFEIEKRKLYQDYLFVNKPFSTNEVEQAASKIMISFKPGKKVATWGKRKVKRNGRKVTVQSDILVPRGALSEEQVYGRIKVLKRENPVKFLFHNPHLIVKERIRKKVQKRLSEYDDNPDKALKSLENEPIYIKDDILLEWASCYSEEYVYKYKVDVDFKKADKIIDDRVREIVKQRLSEFDNNPKEAFKDLDGNPIWFNEEKNIPIKSVRCFTGLSSIEPLKKNANNEVTGFVKPGNNHHIALYLDENGKLQEHICTFWHAVERKKYDIPVIIKNTDEIWEKVLSEGEDYFPDDFLEKLPDIKWQFVTSLQQNEMFLLGLPEENVRQINVNQKDNYSFLSDYLYRVQKITSGDYVFRHHLETQIVDTTDSKLCKRWYRVQSLKAFAGLNPVKIRVDVLGRMVWYQKCF

SEQ ID NO: 22869 - protein, 1265 aa, unidentified
  REGION 1..1265: note = Cas Enzyme sequence
MKRILGLDLGTNSIGWALVEKDEKKKEIIGMGSRIDPLSPDDKDEFSKGNTISKNHRRTVKRTQRKLYDRYQLRRNALIEELKNKNMMPDEDLIHVSKFRLWELRSKAVETKLTLPEIGRILLHLNQKRGYKSARSEENLDKKDTEYVEKVKNRHEELRDAGLTIGQYLLKELKKSENFRTKDLVYPREAYIEEFDRIISIQKGYYPEELSEDFIQRIRNEIIFYQRALKSQKGLVSICEFEGFWMEKEGKNLYVGPKVAPKSSPLFQIEKIWETINNIRLKDKYGQPIVLGIREKEKLFKVLNIPGAGSEDFDNFSKYSLDRNGKLSYSKLLNLLGLSKDDVYANKQLENGIQGNILRQKILNCFNNPDEFSELLRFDISFIKTDKKVHLYDRKTGEVIHEEKESIIANKAEDIEKEPLYRLWHVLYSIKDREECENILKKKFNIPPDSAEKLSALDFTLMAFGNKSVRAIRRILPYLAEGYDYSESCMLAGYNHSNSLTKDQNRDRQIAERLSLLEKNSLRQPVVEKILNQMINLVNAVIEEYGHPDEIRIELARELKQSRQERFDADKAIRKIERDNQSIRKELVENYALRASRNNVIKWRLYHEMNNQKLNAICVYCGQPISFTDAIKGNDVDIEHIIPKAKLFDDSQSNKTLSHRSCNRQKDKQTAFDYMKTKKEDEFHEYIKRVNYLYKNRLIGKAKRDKLLMSEDKIPQDFIQRQLRESQYIARKSREILMEVCHDVWTTSGTVTAELRHIWGWDDVLMNLQMPKYKKYDLTEEIEFENNGQKHKKERITDWNKRNDHRHHAIDALTVACTEQGFIQRLNTLNSGKTRNEMLRAINEFQKNASEVDNKRSEFEIEKRKLYQDYLFVNKPFSTNEVEQAASKIMISFKPGKKVATWGKRKVKRNGRKVTVQSDILVPRGALSEEQVYGRIKVLKRENPVKFLFHNPHLIVKERIRKKVQKRLSEYDDNPDKALKSLENEPIYIKDDILLEWASCYSEEYVYKYKVDVDFKKADKIIDDRVREIVKQRLSEFDNNPKEAFKDLDGNPIWFNEEKNIPIKSVRCFTGLSSIEPLKKNANNEVTGFVKPGNNHHIALYLDENGKLQEHICTFWHAVERKKYDIPVIIKNTDEIWEKVLSEGEDYFPDDFLEKLPDIKWQFVTSLQQNEMFLLGLPEENVRQINVNQKDNYSFLSDYLYRVQKITSGDYVFRHHLETQIVDTTDSKLCKRWYRVQSLKAFAGLNPVKIRVDVLGRMVWYQKCF

SEQ ID NO: 22870 - protein, 975 aa, unidentified
  REGION 1..975: note = Cas Enzyme sequence
MTRRVLQRRAKRKLRMLKFLISLHLLPEDLQNSLAPEVQLNAIGDPYLLRAKALDEALTPYELGRVLLHLVQRRGFLSNRKTLLGDMADDPDVLAVLAELEEAEDNSSERAKEETAFKKDINELRQTIAAANCRTLGEYLATRSHHECQRNRSREGGHLRTDRQMYREELAAIWETQQNFHAVLTDEAREQIEHIIFFQRPLKLRADRIGKCSLEPKRNRATIARLKCQRFRYWQDINNLQYFEHYTDQWLSLNEAQKTKLADVFEHQASISFAGIRKALGFYKTIEFNLERGSKKLKGNITACEIRRVLPAWDNFSDDQQQTLVEDLLTFEKKSALKKRLENHWNFTPEIAVQLCLLEFEPGHSNLSVKAINALLPFLQQGQIFSDARVSAGYGYEQETIIPLAKLPAPPETTNPIVNKGLHELKRLINAIIAEYGKPDAIRIEMARDLEMNTKRYTEHEKQQKANTKANDEAIGKYQEMRQQNPHLQLRNYPGKTDKIKYRLWKDQDQHQHCAYSGKAISLSTLFSAEIEIDHILPYSESLDDSYMNKVVCHAAENRNKGPKTPIDAFGKNDSQWNQITQALKHWDRRLQSKKNRFFMTAADVQKRDFISSQLNDTRYISRVALDYVKQLGVDVSVSKGITIAWVRHQWGLNNLLGEGDEKDRSDHRHHAIDAVVIACVDRRFYTALVGIAKDLERKQSQLNMKDIHIDPLWPNLRDDLQQALSEVIIAHAPQLKLSGELHEVTGAGFIEGIGNVNRKNLDGNFTQVDKIYDAAVKKQVEKHLQRFGNKPKEAFAEVNVVLHKDGKTPIKRVRIRQSETTLKELTKSKFGARDKQGKVFKWLAYGSFHHVEILRNKQTGKCSGEFVTMMEASHRAKGIGKPKQPIIKTDHGDAFEFVMALHRNDIVSIETNGQRVFYRVQKLDAGINRFMLRLHTTSVLDRKNQELHLSINELMFTKWQLQKHKLNILGKIIA

SEQ ID NO: 22871 - protein, 1429 aa, unidentified
  REGION 1..1429: note = Cas Enzyme sequence
MKKILGLDLGTNSIGWALVDKEERQILGMGSRIIPMGAELSKFEQGQAQTKNANRRRDRGMRKQNKRYKQRRNKLIYILQKLNMLPDQVKLADEFNDPLKIDKVSILPIEKKQSQYSAFDLINLRVKALNEKISLKDFGRIIYLFNQLRGYSGGGIEPDEKDSDSDEDNDSKKRRENYIVFAKIIELSEPEIVSFKNKQVAKRKVTIETEDGILQGETFIEILRVNESLEIQVNISKSKKGESIFFKLPNKTSWRKKMENLEQELVNISKEKGREIYLSEYFLEILKENRWVKIRNNVILRSRYQAEFDAIWSEQSKHYTFLINSDHDRLSEILNFIFPGTKDSQLKYKKEGLEKGLYHVIRNQVIYYQRELKDQSHLISDCRYEKGEKAIAKSHPVFQEFKIWEQINKLTINTKIENGRNKKGEIKYTYKDQVIPSKLKEWLYDELQNKKEIGFGTILSKLKREYKLRENIDFLNGINANAKLRGNETKLLLKSSLGIDLWQQLNLDKIENQIELWTILYDLKGNEYDLYSERTSAVLLYLKKHAPNIPNIEQTAIQISKIKFARSYAALSLKAIEKILPLVRCGKYFNHKLSDSLNEKIIRILNETVDSPFEKAAQEYLEQNVELLIDGGIMNVYATILVYDNHTSREFNETELVMNYSDIKRLKQGELRNPLVEQVINETLMIIKDIWKQYGYKPSEIRVELARELKNNAERRAKIYKSNRENQNANDEVKKMLIEIKQDTTLANIEKYKLWRSQENLTEEYLKRYRDPSRSETEKMKLWKEQGHISPYTGQPIPLAELFDRERYDVDHIIPQSRYFDDSFANKVICEKSVNKEKGNKTAMEYFEAGSLIPSVLTKNQYIEHVNNQYVGLKRKNLLSTKVPEDPIARQIKETQYISIRVKEELNKIVGNDNVKTTTGGVTDYLRNQWGLTDKFKKLLKDRYEKIVPIIAELEYEKYVADVTKKDKGVIKNENEFSLAEIAKDQFIQNFKEGFIQKKNNKLIIKGWSKRIDNRHHAIDALVIACTEPAYIKRLNDLNKELQTWLDKNRKDLLPDFEGSPSELLDEVLSLDEQKRELIFKQIEKFRSIEMPWIGFDEDAESEIKKVIVSQKSKDKLLIQPANDKDRKLQLKIRGQLHESTLYGKSQGIEAYRIPLNKLAGKNFATDKVIDKICNKYLKKVISEHLKELQSKEDAFSAEGIMILNKKLEEKTDANGRSAPHKPISSIKIFYRDPAKQKKIKGSDEIEDALQKLDRVKSYNESLFVKTGDNYLFAILDKQGKRCFDLISFFDATNLLKDEFNDSENKHKFNKDIVFKKYFETQNAAKLLFTLKQGDAVYMPGDSEEVILDPASPLFEDYWDNRTLRGNNIHYVTKYSGKQIYFIKHNIANPIVNGKEFGSQNAYEKIGTRSIKDFCIKLSIDRLGNIRPA

SEQ ID NO: 22872 - protein, 1427 aa, unidentified
  REGION 1..1427: note = Cas Enzyme sequence
MAKNILGLDLGTNSIGWALINQDFENKQGKILGMGSRIIPMSQDILGDFGKGNSVSQTAARTGYRGVRRLRERFLLRRERLHRVLNIINFLPEHYASQIDFEKRFGRIKEDTEPKLAYNKDGFVFKNSFDEMLADFKNYQPQENDKKIPYDWTIYYLRKKALSQKIEKEELAWILLNFNQKRGYYQLRGEEEEENPNKLVEFYSLKIVDVLADEPQKGKSDIWYSLVLENGWVYRRASKTPLFDWKDKTRDFIVTTDLNDDGSVKTDKDGNEKRSFRAPAETDWTLVKKKTEQEIDKSHKTVGAYIYEALLRNPKQKIKGKLVRTIERKFYKDELKQILEKQKEFHQELKNDDLYNDCVRELYRNNEAHQLTLSKKEFVHLLMEDIIFYQRPLRSQKSSISNCSLESRKYKDENGVEHIQFLKAIPKSNPYYQEFRIWQWIFNLNIYKKDDDANVTKEFLDTIENFESLFEFLNNRKEVDQKALLKHFKLNEKTYRWNFVEDKKYPCNETKTMISSRLDKVENISEDFLTREVEQRIWHIIYSVNDKMEYEKALKSFARKNNLDENSFFEAFKKFPPFKSEYGSFSEKAIKKLLPLMRLGKYWNYADIDKYSKDRIQKIINGEFDEKIKDRVREKAIHLTSENDFQGLQLWLAQYVVYGRHSEASIIGKWNSTDDLEEFLKEFKQHSLRNPIVEQVITETIRVVKDIWIKYGNGAKDFFNEIHIELGREMKLPADEREQLTRQISENENTNLRIKALLAEMMTDNSVENVRPYSPMQQEILKIYEDGILKSDIEIEDDILKISKTAQPSSSDLKRYKLWLEQRYKSPYTGQIIPLNKLFTPEYEIEHIIPQSRYFDDSFSNKIICESAVNKLKDNYIGLGFIKQFGGTIVECGLGKNVKVFEVDEYEDFVKKHYANNRGKRNKLLLEEIPEKMIERQLNDTRHISKYISGVLSNIVRVEDESDEGVNSKNIVPGNGKITTQLKQDWGLNDVWNDLILPRFERMNQLTNSTDFTAWNENHQKYLPTVPIEFSKGFSKKRIDHRHHALDALVIACATKDHVNLLNNQSAKSDTKRYDLKNKLMKFEKAVYKHPQTGERIERDVPKQFLKPWESFTIDAKNNLDKIIVSFKQNLRVINKATNYYEKYVEKDGVKTKEKIQQTGTNWAIRKPMHKETVSGKIDLPWVKVPKGKILTATRKNLDTSFDLKSINSITDTGIQKILRNYLEFKGSAEAAFSPEGIEDMNKNIEKYNDGKLHQPINKVRVFELGSKFQVGQTGNKKDKYVEAAKATNLFFAVYEDKNGKRIYETIPLNIVIERQKQGLSVVDLKGVNDFYLCPNDLVYIPSEDELENVNNIDFKNFTKEKNERIYKVVSFSGSQIFFVRQDVSTSVVNKAEFSTLNKMERAIDGSMIKEHCLKLNVDRLGNISKT

SEQ ID NO: 22873 - protein, 1521 aa, unidentified
  REGION 1..1521: note = Cas Enzyme sequence
MQKNILGLDLGTNSIGWALICEDDDEKKSEIVAAGSRIIPMSQDILGKFDSGQSISQTAERTGFRSARRLRERQLLRRERLHRVLNLLDFLPKHYSREIDFDKHPGQFLPDAEPKLAYYKNSNGKMEFLFRHSFQEMLNDFAQYQPQLIGKGKLVPYDWTIYYLRKKALTDRIEKEELAWLLLQFNQKRGYYQLRGEEEVEDNNRTVEFHSLRVVNVEATEDKKKEDEVWYNIYLENGWIYRRTSKIPLDWTGKTKEFIVTTDLNPDGSVKKGKDGKEKRSFRAPGEDDWTLIKKKTEYDIEKSQNTVGTYIYDHLLQNPNEKIRGKLVRTVERKFYKAELEMILRKQSAFHQKLNDRNLYLACLQELYPNNSVHRNSIEIRDFIHLFINDILLYQRPLKSKKSLICNCKYERRYFKREGRLEVEPLKGIPKSHPLFQEFRLWKFVRSLKLIQFDKMVDNKLQTDVDVTAEFLVTEDQLVNLFDWLNEKKEIDQKAFLKYPGFKLKKNAAGYRWNFVEDKFYPCNETRSQFIRYLNKVGNIPENFLDKGREEALWHILYSVEDKTDIEKALRTFATKNGLEHDFVEVFRKFPSFEKEYSQLSSKAIKKMLALMRAGKYWKEEDIDQNTRKRIENLRTGEVDETIKDRVREKAFLLKTIADFSGLPEWLASYIVYDRHAEEEGTMQWKTPQQIRYLPQHSLRNPIVEQLINETLQVVKDIWIKFGNGKEHYFDEIHVELGREMKNPGDKRKRMTTQNIENENTNLRIKALLAELLNDHEVENVRPYSPMQQEILKIYEEGALNSQQGIPEDILKISTLAQPSQSELIRYKLWLQQRYRSPYTGEIIPLNKLFTREYDIEHIIPQSRYFDDSFSNKVICESVVNGERYKSNMTGYEFIKAFRGQIVDELSTHQKLVKVFTEDQYEQFVKDNFSNSRAKMKKLLMEDIPETFVQRQLNDSRYISKVVKDRLSNIVRCEDERETTSKNVILSNGNITSVLRQHWGLNDVWNELITPRFEALNSKTGSNNFGNINKTTGKFLPQVPLQLQKGFSKKRIDHRHHTLDAIVIACTSRNHINYLNNESALGNGATKDEALKKRYDLRAKLCRKKYNDDSDKNYSWVFEKPWESFTGETKSVLSKVIISVKQNLRIVNKTSNRYSKWKSDVTGNLSKGREHQLKGNNWSIRKPMHKANPYGSVQLKLTKKVSLSAALNDWKMIADKALRTQVSMLFRQSADKKSVLQFFNALDYHWQGKDISEVEINYWDETNVASRDSINEGYTREKIKRITDTGIQAIMLRHLAVYNEKKGDLIVEHPELAFSPEGLEEMNKNIKALNGGKPHQPIFKVRTYEPMGNKFPIGNLGNKNRQYVEAAKGTNLFYAIYKDPKGKRKYETIPLNIVIERKKQGLEPVPGNNDAGDILLFCLSPNDLVYVPTPEEIAGESKINLSPLTDKLVSQIYKVVSFTNGRLYCIPQSVAVSIVDKVEFTQLNKVEFTPDKRSIREICVKLKTDRLGAIGIGIADRTDC

SEQ ID NO: 22874 - protein, 1233 aa, unidentified
  REGION 1..1233: note = Cas Enzyme sequence
MKKTILGLDLGIASLGWAIISEEDNSPVKIIDMGSRIIPLSADDKDEFSKGNAISKNQKRTIKRTQRKGYFRYKLRRENLRQLLKNLNMLPEKLINISSLELFGLRDKAVKERISLHELGRVLYHLNQKRGYKSSRSDANLDKKDTDYVAEVKSRHQMLKDSGETIGQYFYKELQKDRYYRIKQQVFPREAYIEEFDAIVKEQRQHYPQILTDIIVNKFRNEIIYYQRKLKSQKGLVSVCEFGGIPRTNKEGKEVFAGPKVTPKSSPLFQVCKIWETINNITLKNKKGEYYSISLEQKQEVFKKLNENSILTQPKLYEILGLKSNEGWYGNKQISKGLQGNNTRAILQEILKDRQDLLNFNLTIDLGKEEAFLVDHKTGEVLESQPKKVISSDFEKQPLYQLWHTIYSIQDTEECSKALQSRFNLSEEISNKLAKIDFTKFAFGNKSAKAMRKILPYLMEGYVYSEACSFAGYNHSNFLTKDERLKKDLLLKLPLLKKNSLRQPIVEKILNQLVNLVNALIEKHGRPDEIRIELARELKQSKDERNDTFNNLSKIERENKNIIDRIEKDYSAYGVRATKTNILKWRLFHEINNEEGRLNATCIYCGNPFGITDALLGNSVDVEHIIPKAKLFDDSKSNKTLVHRKCNEDKGNKTAYDYISEKGEAALARYIETVDSLYKSKIIGKGKRDKLLMSESKIPTDFIERQLRETQYIARKAKEILEQVCYTVWSTSGNITEYLRRIWGWNDVLMNLQMPKYKEQGLTVIKEWQTNDGQLHKREEIKDWSKRDDHRHHAIDALVIACTKQDYITKINTLNASKTRDEMLKEIEASKDEYDRRKNLLENYFFKQKPFTTKQVELVASKILISFKPGKRVATLSKLKATGLNADKGVIVPRGPLSEESVYGKIKSIEKNKPVKYLFENSDLIFKPYIKALVKERLSEHENNHKAALASLKKSPIYLDDNKTIPLEHGTCFKDEYVIKYPLLNLKAKDVQYIVDKKIKEVIKTRLEQFGNNEKEAFKSPVWLNEEKQIPIKTVRCFTGLAAVVPVKKDNEGRDIGFVKPGNNHHIAIYLDENGKKQEHICTFWHAVERKKYGIPVVIQDPKEIWSLILTSSLKYPDSFLSKLPLDNWRFNHSLQQNEMFILGMQKEELMKALQENNKELISKYLYVTWSISESDYWFRHHLETKNSELKSIPGAKESKRYYRCKSIGAFELLNPLKVKITNLGDINYYTEE

SEQ ID NO: 22875 - protein, 1442 aa, unidentified
  REGION 1..1442: note = Cas Enzyme sequence
MKTILGLDLGPGSIGWALVNTENGKPESIIKAGSRIIPMDAGEMSDYESGKLQSSASVRTAFRGMRRLYERAALRRERLLRVLNVLGFLPQHYRDQIDFDEHTGKFKNHGEPLLPYRKNETGKSEFIFQQSFLEMLEDFMKNNPQVLEGGRLIPRDWTLYYCRKKALDREISRGELAWILLNANSKRGYYQLDEEKTEKSNAEKEYRRAKVVSVEKQDEDRKQKGYFFYKITYEGGLTQTRKCKMQPWRVGDYVDLVITTPLDNNGKPKKDEDGEIRKTLSSPKEDDWGLVMQKTQAGIDHGNGTVGEYIYNSLLENPSEKVKGGIVKTIERHYYKDELRKILEAQSRFIPELQDHGLYIKCVKELYHNNESHANELRHRNIIDFLINDVIYYQRPLKSKKSCVADCPYESYTYVDKETGEIKKRPLKVMPKSHPLFQEFRLWQFIRNLRVTENEKIVDERRFFGYDVTAKYIGTPEDVCRLYEKLSGYADISESKVLKALGLNAKMFKWNYGSKKEFPGLKTHHEFASRIAKLENARELTQKEEYKLWHILYSVSDRDELEKALKHFAEECEFNPQNFYEQFKAAPKMRGDYASYSERAVRRLLPLMRTGKYWDEKEIDAATLKRINAIIADGYNPCEDFPEFKRVGDFQNLQLSDACYVVYGRHSENADNSVWTSPEEIDEYLCGEFRKNSMRNPVVEKVVAETLKVVRDVWKTYGKPAEIHVEMARSLKDPNDKRKEATERMAENRRDTIDVREKLQELKDGHKADNVNPNSSIHILKYKLWKEQGGQSPYTGKSISIARLFTDEYQVDHIIPQKRYYDDSFTNKVVCESAVNLDKGARLAYGYILAEGGKEIDVTVNGKREKTAIFPKEQYEEWVKKHCVRENGIGRKGKNLMMTDVPASFNASQLNNTRYIARKTAEILSHIVREGSDPGARSKNIIMTNGSITDRLKKDWGLKQIWSELMQPRFERLNDKTQSNDYGEEITDSNGKRYFQTRVPEVLAEKFDIKRIDHRHHAMDAIVIACTSLSHINYMNNLSGGEKERYDLRRVLCEKDSRAFLKPWETFTQDSREALNSIIVSFRQNLRIVSRASNYYNHYVDGKKVTERQTKGEHFSIRKPLHKATYSGLVRLPETKMEKIENTIDNPEQIVDKSIRKGLKEVLAQYNGTADKKKIKKYFKDRDYKLNGVDVSKVKIRFVPEQARHSAHRTALGSITNKKQLDSITDSGIRKILLNHLENYGGNYEEAFSPEGISSLNDNIRQLNGGRDHKPVKCVRVSEKFSLKFSVGQNCSKIKTYVEAADNTNLFFAIYVDEEGKRAFETIPLNVVVERKRQHLSAVPEHNDKENKLLFSLSPGDLVYVPEEGEHIAMPLDYERIYKMQSTDSNKCFFVPQYVAARIADKIEYGPKNKSERDLNGNQIKKVCLKLEIDRLGNIIKITGND

SEQ ID NO: 22876 - protein, 1423 aa, unidentified
  REGION 1..1423: note = Cas Enzyme sequence
MTQKVLGLDLGTNSIGSSVRNLDLSDDLKGQLEFFSSDIFRSSVNKESNGREYSLAAQRSAHSRSRGLNEARRRKLWATLDLLIKYGFCPMSPDSLMRWRTYDKRRGLFREYPIDDKNFNAWILLDFDGDGKPDYSSPYQLRRELVTRQFDFDQPIERYKLGRALYHIAQHRGFKSSKGETLLQQETNSKQSLTDETTDVAGEMKASEEKLSKGLSTYMKENNLLTVGAAFAQLEDERVRVRNNNDYRAIRSQFQQEIETIFKFQQGLSVENELYERLVSEKKNIGTIFYKRPLRSQRGNVGKCTLERTKPRCAIGHPLFEKFRAWTLINNIKIKMPEEEQAEQLPMKLRFELYNDCFLAFVRAEFKFEDIRKYLEKRLGVHFSYNDKTINYKDSTSVAGCPITARFRKLLGEDWESFHVDGQKKRQAHGKNNASFHTVSYTVDDIWHFCYDAEEPEAVLSFAQDSLKWEKKKADELVRIWSAIPQGYAMLSQKAIRNINKMLILGLKYSDAVLLAKVPEIVDISDEDILSVTEDYHRVEAQIGHEKQINNIVNALIAKYKSTSEEYRFADHNYDYQLDESDEKDIIKQIESNIGTRKWSLLDADEQTDILQKVRDKYQNFFRSHERKFVESPKLGECFEEYLMKKFPMIEGEQWKKLYHPSQIAIYRPVSAGKDRSALRLGNPDIGAIKNPTVLRVLNTLRKRVNHLLDDGVISPDETRVVVETARELNDANRKWALDTYNRIRHDENEKIKKILEEFYPKRDTISTDDIDKARYVIDQREVDYFTESKIYNKDIKKYKLWLEQGGQCMYTGRTINLSNLFDPNAFDIEHTIPESLSFDSSDMNLTLCDAHYNRFIKKNHIPAYMPNYDKAVMIDGKEYPAITSQLQRWVDRVERLNRNVEYWKGQARRAQNKDRKDQFMREMHLWSMELEYWKKKLERFTVTEVTDGFKNSQLVDTRVITRHAVLYLKSIFPHVDVQRGDVTAKFRKILGIQSVDEKKDRSLHSHHAIDATTLTIIPSSAKRERMLELFAKIEEVNKMLSFSGNEERTGLKQELDGLKNQLNKEVKACRIGHNVSEIGTFINDNIIINHHIKNQALTPVRRRLRKKGHIVGGVDNPRWQTGDALRGEIHKASYYGAITQFAKDKEGKVLMKEGRPQINPTIKFVIRRELKYKKSAADSGFASWDDLGKTIVDKELFALMKGQFPEETSFKDACEQGIYMIKKGKNGEDDIKLHHIRHVRCEAPQSGLKIKEQTYKSEKEYKRYFYAAVGDLYAMCCYTNGKIREFRIYSLYDVSCHRKSGIEDIPEFITDKKGNRLMLDYKLQAGDMILLYKDNPEELYDLDNVNLSRRLYKINRFESQSNLVLMTHHLSTSKERGRSLGKTVDYQNLPESIRSSVKSLNFLIMGENRDFVIKNGKIIFNH

SEQ ID NO: 22877 - protein, 1063 aa, unidentified
  REGION 1..1063: note = Cas Enzyme sequence
MSIKEPGLTISESKVKAFNKHKDDLAILKSLLKADKNIYKAMFKADEKGLHNYVHYIKQGRTEETSCNREDFYKYTKKIVEGLSDSNDKEYILSQIELQTLLSLQRIKDNGVIPYQLHLEELKAILDKCGPKFPFLNEVADGFSVAEKLIKMLEFRIPYYVGPLNTHHNVDNGGFAWAVRKASGRVTPWNFDDKIDREKSAAAFIKKLTNKCTYLLGEDVLPKSSLLYSEFMLLNELNNVRIDGKPLEKAVKEHLIEAVFKQDHKKMTKNRIEQFLKDNNYIPKKYKPEITGLDGEIKNDLASYRDMVRILGTNFDVSMAEDIIADITIFGESKKMLRETLRNKFSSRLDDDAIKKLSKLRYRDWGRLSRKLLNGIEGCDKTGDGTPETIIKLMRNFNYNLMELLGDKFSFMERIQEINDKLTDGQVVDPHDIIDDLALSPAVKRAVWQALRIVDEVAHIKKALPTRIFVEVTRSNKAEKKKKDSRQKRLSDLYAAIKKDDVLLNGINNEIFGELKSSLAKYDDAALRSKKLYLYYTQMGRCAYTGEIIELSLLNTDNYDIDHIYPRSLTKDDSFDNLVLCKRTANAQKSDTYPISEEIQKAQKPFWTFLKQQGLISERKYERLTRITPLTADDLSGFIARQLVETNQSVKAATTLLRRLYPDIDVVFVKAENVTDFRHDNNFIKVRSLNHHHHAKDAYLNIVVGNVYHEKFTRNFRAFFKKNGANRTYNLAKMFSYDVKCTNAKDGKAWDVKTSMDTVRKMLASNDVRVTKRVYEQKGQLSDINLTKASKVKADIYLPIKANDPIMSQNMKYGGYSDIKNAYYTIIEYSDKKNNSIKAFIPIPIFIATKTLTKQALLGYIKTVLPKANNLRIIYKKVYNDQLLKIDGFNYYLGGRSNDRFCIDNAIQLIVPLEIQFYIKLVEKFTAIISENKNIALKASSVKSRNPINNQVENITLEYTQKLFDYLVSKFNELIYLKMRGNKLTDVNNIGRKQFIKLSLEERCKALAELLNIFTNMNKKLSLSTINVSASRKVVNFKISSLDEFKIVNESITGLYSNEITIV

SEQ ID NO: 22878 - protein, 1172 aa, unidentified
  REGION 1..1172: note = Cas Enzyme sequence
MKRILGLDLGSNSIGWGLIEQDFGQREGKIIAAGSRIIPMDQGLLGDFEKGNTVSQTAERTFYRSARKLRARHLLRRERLHRVLHILGFLPTHYDKQIDFSKRYGKFIGDIEPKIAYNDGKFLFMDSFQEMLSDFKSHQPDLFYTKRNGEESKIPYDWTIYYLRKKALSQKISKEELAWIILNFNQKRGYYQLRGEEEVENPNKEVTYYSLMVTEVTAEAPNKKGEIWYSIQLENGWVYRRTSKIPLDNWRGKSRDFIVTTELEEDGSVKRDKEGKEKRSFRAPDENDWNLLKKKTEQDINTSQKTVGTYIYDHLLQNPNEKIKGKLVRTIERKYYKEELKAILEKQIALQPELFTDQLFADCIRELYSKNEAQQRNLAARDFVHLLAEDIIFYQRPLRSQKSTIANCTLESRSYIDKDSHTRKEASLKVCPKSNPYYQEFRVLQWLQNLKIYEIESDQEVTHEFIKTLEDKQQLFDFLMAQKEIDCEELLKYFLSLTYPNAKEKALKSELKKWKDTYRWNYVYDIGEKSSKKYPMNETRYDLKRYLEKVANLPDDFLSSEVEYLLWHLIYSVTDKVAYEKGLKKFAQKHHLDEDSFLESFKKFKPYPSEYGSFSEKAIRKLLPLMRFGSYWDFNHIDKNTQKRIDDLITGVENEEIRTILREKAEKYQLEKETDFQNLPLWLAQYIVYNRHAEASSLEKWTSVNHLETYLNEFKQHSLRNPIVEQVVTETLRVVRDIWQQYGQGQADFFDEIHIELGRELKKTAKEREELSKQNQKNEDTNLRIKALLAELGEDSTIENVRPYSLMQQELLKLYEESVFSSSMEIEDDIEKIHKKATPSKAELQHYKLWLEQKYKSPYTGQIISLKRLFTEDYEIEHIIPQSRYYDDSLSNKVICESAVNKLKGNQLGLEFIKNHYGEKVHAAGKEVSIFTEEQYKEFVKNHYVNNSGKMKKLLLEDIPEKMVARQMNDTRYISKYISEILSKIVRADERDEGVNSKNVILCTGKITTALKQDWGINDVWNDLILPRFERMNDLTQTSLFTSYNEKYQKYLPTVPMEYSNGFQKKRIDHRHHAMDAIIIACATREHINYINNQHALEKGKDKKEKQEERDTLRERLCIKKYNNKSEGNYNWVFKKPWDTFTQEVRSALEGIVVSFKQNLRVINKATNYYER

SEQ ID NO: 22879 - protein, 1069 aa, unidentified
  REGION 1..1069: note = Cas Enzyme sequence
MAAIAIDDDGKPTEILSAISLIHDSGVDPDSAKSAATRLATSGIARRTRRLYRRKRKRLAKLDKFISSQGWPLKEFEKYEDPFYPWRVRAELATTAITDQQELGEKLSIALRHIARHRGWRNPYSKVTALYTVTEPSDAFLAMQEECAKQLGRTIPETITVGQLVTGMNLGKTRLRGENSLLAARPRQSDNANEIHTIAKVQGLSNELVRQIIDHVFAAESPKGSAAEQVGKDPLQPTKKRALKASDAFQQYRIAALIGNLRIRGGKGNRRLTTEETRLVFDYLRSLPAKQEPTWQLVAEQLKIDRGNLVGTAIMTDDGERAGAKPPVHDTNRIMENTKIKPLATWWKSADADARAAMVKALSNAEVDDFDSQAGAQVQEFFFGISDEDQEKLDGLHLPIGRAAYSEDTLDRLTKRMIGEGMDLYEARQAEFKISNDWAPPAPEIGERVGNPAVDRVLKATARWLNAAERQWGAPKSVNIEHVRAAFMSESSARELDRDNQQRAKRNVKVVAEMQEKLGIEGRPSRADVWRFQSIQRQNGKCAYCGAEISFKNSEMDHIIPQAGEGSTNTRDNLVAVCRECNSSKSNIAFAVWAENTSRPGVSVQKAIERTHHWVTDSGLRKPEFDKFRKQVCDRLRRKATDEPIDARSLESVAWMANELRSRIAQKFKDGDTKVRVYKGALTAEARRASGISGKLEFVDGKGKSRLDRRHHAVDAAVVAFTSNYVAETLALRSNMKFDQELRRKAPQWRGFTGSDHVHQVEWTKWKYRMQALAELLNNALVQDRIVVMHNLRLRLGNGAAHEDTIGKLTRLKVGDAISTTDIDRASSEALWCALTRDPDYDPKTGLPENPNRTIRIHGTHLTASDEITVFPVAAASIPIRDGFAKLGSNYHHVRLFRVPSGKKYKYCLMQVYTVDLLKFRKEDLFTVELKPQTISVRTCEALLRKALANGTAEYLGWLVSDDELLIDTSSFDTPGIVKLREEYGPVNRWRLAGLTSVTRLNLRPLYLSKEGLKPNVNPEIKKIIDNRSWIITVNKLFSSGHIKIIRRDALGRPRLHSAAHLPICWEVK

SEQ ID NO: 22880 - protein, 1509 aa, unidentified
  REGION 1..1509: note = Cas Enzyme sequence
MKTILGLDLGTNSVGWAVINSVIKEQAERIWIEMAGSRIIPMDAAVLGDFDKGNSISQTSERTRLRGARRLRERQLLRRERLHKVLNILGFLPNHYLEYIDFEKHPGKFLADAEPKLAWVKDEQGKYTFLFQAAFDEMLADFAIHQPSLVSGDKKIPYDWTIYYLRKKALTEMISKEELAWILLNFNQKRGYYQLRGEEEEDNAGKSVEFYALKVLTVEATDEKKGRDVWYNVHLENGWIYRRSSSVPLDWEGQVKEFIVTTDLNPDGTPKLDKYGEVKRSFRAPKEDDWMLIKKRTEADIANTHKTVGAYIYDTLLQKPQQKIIGKLVKTVERKLYRDELSLILQKQCAFHAELQDRALYARCVEALYPSNEVRRKNIANRDFVYLLMDDILFYQRPLKTKKSLIANCPYEENEYVDRETGEIKKAPLKCIAKSHPLFQEFRLWNFLSNIRIYQKEKEINGTLHLDVDVTAEFLKTEDDYVALFDWLNSRKEIEQKTFLKYPKFGLKKEISNYRWNYVEDKQYPCNETRHAILSRLEKANVCIDFLSNEKEVALWHILYSVSDKQEIEKALRTFAAKNGLDESFVEAFKKFPPFKSEYGAYSAKAIKKMLPLMRCGKYWDVSSIDDTTKERIKKIVTGEYDERISVKVRDKVMNLSDISCFRRLPLWLACYIVYNRHSEDKEAVKWESPADIDAYLASFKQHSLRNPIVEQVITETLRVVRDIWKQVGRIDEIHIELGREMKNPADKRKRMTAQILENENANLRIKALLAEFMNPEYEIENVRPYSPSQQEILRIYEDTVLHAEDQLPEEIDAILKKFNSSKVPTKSEFLRYKLWLEQKYRSPYTGELIPLGKLFTAAYEIEHVIPQSRYFDDSFSNKVICESAVNKLKDNQLGYEFIKNHHGQKVEVGFGKSVEIFSVDSYERFVKEQYAKSAVKMKKLLMDDIPEQFIERQLNDSRYISKVIKGLLSNIVREKNDSGEYEPEAVSKNIVVCTGSVTDRLKRDWGMNDVWNSIVYPRFERLNSLTDTQSFGHWENKSGKKVFQTELPLEYQKGFSKKRIDHRHHAMDAIVIACATRNHVNYLSNESASRNAKISRYDLQRLLCDKNRTDDNGNYKWVIKKPWDTFTQDAREVLSKIVVSLKQNLRIINKTTNVYRHFDATVNRVSEKQKTGDSWAIRKPMHKDTVFGAVNLRKVKVVRLSVALDTPAMIVDKRVKNKVFELLSYKYDKKRIEKYFKENAFLWKELDLAKVAVYYFTEATTEPLVAVRKPLDSTFNEKKIKESVTDTGIQKILLNHLCTKEGKPDLAFSAEGIEEMNRNLLQLNNGKSHQPIYKVRVYEPRGNKFSVGVLGNKGTKWVEAAKGTNLFFAIYITEDGKRTYETIPLNVVIEREKQGLVPVPDRNEKGDKLLFWLSPNDLVYLPTEEEREFGRINEPIDRGRIYKMVSCTGNEGHFIPANVANPIVPVIELGSNNKAQRAWTNEMIKDICIPIKVDRLGHIIEVKYRIDE

SEQ ID NO: 22881 - protein, 1380 aa, unidentified
  REGION 1..1380: note = Cas Enzyme sequence
MKRILGLDLGTTSIGWALVNEAESNNEASSIVRLGVRVNPLTVDEKSNFEKGKAITTNADRQLRHGARINLQRYKLRRQNLHDCLQKQGWLGTEAMYEEGKASTFETYKLRAKAAEEEISLHEFARVLFMLNKKRGYKSNRKANNKEDGQLFDGMTIAKKLYEEHLTPAEYSLQLLNKGKKFTQGYYRSDLNAELERIWEEQKKYYPEILTDEFKQQLESKTKTNTSKIFLAKYGIYSADLKGLDRKLQPLKWRVEALKQQVDKEVLAFVISDLKGQIANTSGLLGAISDRSKELYFNKQTVGQYLWASLEENPHISIKNKPFYRQDYLDEFEKIWETQAAFHKQLTPELKQEIRDIIIFYQRPLKSKKSLISVCELEQRKVKATIDGKEKEITIGPKVAPKSSPVFQEFRIWQNLNNVLLIDNDTNEKRPLDEDERNLLYEELSIKAKLSKTEALKILNKKGKQWDLNYKELEGNRTQAILFDCYNRIITLTGHEECDFKKIKASEIRHYVSTIFKNLGFSTEILDFDPSLEKHELEKQPMYQLWHLLYSYESDNSRTGNESLLRKLETTFGFPEEYATVLCDVVFEEDYGNLSVKAMRKILPYLQAGNDYSQACAYAGYNHSRHSLTKEELDQKVYKERLELLPKNSLRNPVVEKILNQMINVINAIIDEYGKPDEIRIEMARELKSSAIERENATRAISQGNAENQRIREILEKEFALSYISRNDIIKYKLYEELKPNGFKTLYSDTYIPKDKLFSKDFDIEHIIPKARLFDDSFSNKTLEARDINLAKSSKTAFDFIKEKYGEEGAEAYKKKLDMLLDNDVISKAKYNKLLMAEADIPSGFIERDLRNTQYIAKKACEVLGELVRTVTPTTGEITNRLREDWQLVDVMKELNFEKYEKLGLTEIVEDRDGRKIKRIKDWTKRNDHRHHAMDALAIAFTKPSYIQYLNNLNARSNKGDSIYAIENKELHYEEGKLRFNAPIPVNEFRAEAKRHLSAILVSIKAKNKVMTQNVNKIKTKHGIIKKIQLTPRGPLHNETIYGTKMRPIIKMVKVGASLDEATINKVSSPAIREALLKRLNEYSGNAKKAFTGKNTLDKNPIYLNVERTKVVPALVKTVEWENYHPIRKPITPDLKVDKVIDKGIRDILKARLEEFNGDAKKAFSNLEENPIYLDEAKKIALKRVSIEGVLSAIPLHTLKNQAGKPINGKDGKPVLGNYVQTSNNHHIAFYYDEDGNLQDNAVSFFEAAERKSQGIPVIDKDYNRDKGWRFLFTMKQNEYFVFPNEATGFIPSEVDLTDEANYGIISPNLYRVQKVSRIDKGTSASRDYWFRHHLETILNDDSRLKNSAFKRINSLKPLEGIIKVRINSTGKIVAVGEYD

SEQ ID NO: 22882 - protein, 1496 aa, unidentified
  REGION 1..1496: note = Cas Enzyme sequence
MFSQRNHPYCELLSNSATKVGIIFLMCKYFYIKNFITFVLSKSIIPMKHILGLDLGSNSIGWAFVQQDFENKQGKIIATGSRIIPMDQGILGDFERGNTVSQTAERTTYRSTRRLRERHLLRRERLHRVLHILGFLPPHYDAQIDFTKRYGKFIDNAEPKIAYNNGNFIFMNSFNEMIEDFKKHQPQLFYKKSNGEESKIPYDWTIYYLRKKALSQKITQQELAWLILHFNQKRGYYQLRGEEETENPNKEVAFHSLKVVDVEAEAPNKKGEIWYTIRLENGWIYRRTSKIPLDDWKGKTRDFIVTTDLNDDGTIKVDKEGKEKRSFRAPDENDWNLLKKKTEHDIDFSGKPVGTYIYDHLLQNPNQKIKGKLVRTIERKYYKDELKAILAKQIALQPELFTETLLADCIRELYRKNETQQQNLLSKDFLHLFVEDIIFYQRPLRSKKSTIANCTLEKRSYIDKETNERKDTPIKVCAKSNPYYQEFRVLQWLQNLRIYEIETDREVTAEFIETPQDCEALFNFLMSQKEIDNKGLLKYFLFAKNPQIKDKAAKSELKKWLTTYRWNYVYDAADNSSKKYPMNETGYELQRYLQKVEGLPANFLTFDTTYRLWHLLYSVKDKVEFEKALKKFAQEYQLDEASFVDSFKNFKPYPNEYGNFSEKAIKKLLPLMRFGNHWDFNRIDVSTQKRIDDLINGVANEDIRTIIREKAEKYQLNSETCFQDLPLWLAQYVVYNRHAEATDIEKWTSVSDLEAYLEDFKQHSLRNPIVEQVVTETLRVVRDIWQQYGGGQANFFDEIHIELGRELKKTAEERKQLSDKNQENESTNLRIKKLLAELKEDASIQNVRPYSLVQQELLKIYEEGVFSATDEVEEDIQKIRKKAEPSKADLQRYKLWLEQKYKSPYTGEVISLTKLFTEEYEIEHIIPQSRYYDDSLSNKVICESAVNKLKTNQLGLEFIQNHHGEKVRITGNKEVTIFTEEQYKEFVKKHYANNSAKQQKLLLNEIPEKMVARQLNDTRYISKYISEILSKIVRSDEKDEGVNSKNIIPCTGKITTALKQDWGLNDVWNKLILPRFERMNQLTQTQLFTSYNDRLQKNLPTVPIEYSQGFQKKRIDHRHHAMDALVIACATKEHINYMNNQHALDKSKDKKEKQQSRIDLRTILCEKKNNNWQFKKPWSTFTQEAKEALEHIVVSFKQNLRVINKATNYYEKWEEKNGVLVKKKVKQEGTNWAIRKPLHKETVSGKIVLDRKIGKDKILTATRKAVDITFTEKIISSITDTGIQKILLNYLKYKGSPEVAFSTEGLEELNKNIAQYNNGKKHQPIYKVRIFEEGSKFPLGETGAKATKYVEAAKGTNLFFGVYQGKGKRTYATIPLNEVIERQKQGLPSVPERNEKGEPLLFSLSPNDLVYVPMEGEIAETIDFNNLSKEQKERIYKTVSFTGNQCFFVQEAVATPIVNKMEYSPLNKMERDILGTMIKEVCIKLKVDRLGNITKA

SEQ ID NO: 22883 - protein, 1503 aa, unidentified
  REGION 1..1503: note = Cas Enzyme sequence
MNKKIIGLDLGTNSIGWALVEKDTEQNEGKIVDAGSRIIPMPQDAISKYETGNLQSAASVRTDYRGMRRLYERAELRRSRLLRVLNILGFLPEHYREAIDFTNHLGQFKDHGEPLLPYKRNEEGKNEFIFKNAFHEMLEDMRTHHPELVANGKKIPYDWTIYYLRKKALSKSISKEELAWIILNFNTKRGYYQLRGKEEETATNDNQVYDVLEVSNVEETGPNNKKKGYNWYLIHFTNGKVQNRTWKEAPCHIGDKVECIITYQVKKDGSPKLDENGEQLYKITAPDPNDWTLRKKRTESIINNEHVTVGAYIYDHLMEHPEDKIRGKYVHTIERKYYKEELRIILDKQKEYIPELRDKDLLSQCISELYQNNEAHRKALNDQDFTRLFVDDIIFYQRPLKSKKSLIADCPLEFYPYRDKDGVWKHRPIKCTPRSNPLFQEFRLWQFIQNLRIFLREQKQENGKLKLDVDVTNQFLSTPEDYCDLFDWMKQKSDITQKQLLAYPAFHLGKKAKDYRWNYVDDDKHTYPLCSTHHDICQALKNVDGAPSLSTGQEENLWHILYSVDDRYELEKALCHFAEKCSLDSESFVNAFMTFKPFDNSYASYSEKAIKKMLPLMRTGRYWNVEGIDSHTLQRIEHLITGEADDNISNSVREKCQGLDQIEKYQFLPVWKVCYVVYNRHSEAIDTGRWSSPEDIDNYLKSELRQGSLRNPVVESVLTESLRVVRDVWKQYGKPEEVHIEMGRDLKQNKAQRQKANSAMLANQQTNLRIRCMLQEFADPDFHIDNVRPQSPSQQELLKIYEQGVLDSTDNIPDDIQTIIDHIGDKNKGASRSDMLRYKLWLEQKYQSPYTGQPISLSRLFTSEYEIEHVIPQARYFDDSLNNKVICETEVNREKGSMLAYEFIKSKGGMIVKGTGGRQYKILDTVQYEEFVKSHYSSNKRKMRNLLLDDIPDSFISKQLNDTRYMARKALDIFSHLAREEHKDDGAVSKNVIACNGAITDRLKKDWGLNDVWNDIVAPRFERMNAITHSTDYGQWTNKKGKRYFQINIPLALSKGFSKKRIDHRHHAMDAIVIACTTRNIVNYLNNASGADTEARHDLRNAVCFKNKNVDGSGNYQWTIKKPWCTFTQDAHTMLDHTVVSFKQNNRIITQSSNRYWHYSNGKKVLDRQVKGDHRAIRKSLHKATVSGALYMPEKKKVKLKVALEDINAICNAKARKVIRHIINDTYHGHVDNATLLKYFKARDYLINGINFNTLEIRIVPAQPNYTASRVALDSTFTEKDIEKVTDTGIQSILKRHLEHYIDDKGRYDCAAAFSPEGIDEMNEHLTELNGGKSHKPIYKVREKETIGLKFNIGTAGFKNKKFVEADKGTNLFYAVYADNEGKRSFESIPLNMAIERKKNKMDVAPAMNAKGDKLLFVLSPGDLVYLPQEGEHVALPLDERRIYKMVSCTEARSYFVPYSSACMISDKVEYGPQNKMERSLDGIMVKTTCVKLKIDRLGHISI

SEQ ID NO: 22884 - protein, 1504 aa, unidentified
  REGION 1..1504: note = Cas Enzyme sequence
MKNIVGLDLGTNSIGWAVVNGSVNDDGSEQLVKIQASGSRIIPMDAAMIGDFNKGNSISQTAERTRLRGVRRLSERYLLRRERLHRILDILGFLPFHFAQDLDRHGKIVKGKEPKLAWRKNEAGQFEFIFQDSFKEMLEDFKLNHPNLITDDKKVPYDWTIYYLRKKGLTSKISKEELAWILLNFNQKRGYYQLRGEEEEENKNKLVEFYALKVVAVEDSGEKKGKDIWYNVHLENGWVYRRTSNMPLDWVGKTKEFIVTTDLEKDGTPKKDKEGNVKRSFRAPKEDDWSLVKKKTEADIDQTHKTVGAYIYDTLLGNPSQKIRGRLVRTIERKYYKEELKQILEKQKEFHLELQDRALYAACVEELYTINEAHRNNIGNRDFTYLFLEDILFYQRPLKSKKSLIDNCPYEENHCLDKETGEIKSFPVKCIAKSHPLFQEFRLWQFIVNLRIYRKDLAQDVDVTNELLKTEEDYVALFDWLNGKKEIDQKAFLKYPLFGLKKEVENYRWNYVQDKPYPCNETRSSMLARLEKCDISIEFLTKENEEALWHILYSVEDKNEIVKALQKFADKHDLNASFVDVFQKFPPFKKEYGSYSAKAIKKLLPLMRMGKYWSENSIDKGTRERMDKIITGEYDEKIENRVREKAIHLADVSDFKGLPLWLVCYIVYGRHSEAKEITQWKSPADIDLYLRSFKQNSLRNPIVEQIIIETLRVVRDIWKQVGNIDEIHVELGREMKNPADKRKKMTQQMSENENTNLRIKYLLTEFLNPEYEVENVRPYSPSQQDILRIYEEGVLNSVSDLPEEISDILKKFTETDLKKRPSRSEVLRYKLWLEQKYRSPYTGEVIPLGKLFTPAYEIEHVIPQSCYFDDSFSNKVICEAEVNKLKSNLLGHEFIVKHHGEIVELPFGKKVRIFTVDEYEQFVKDNYSRTRSKMKKLLMDDIPEEFVARQLNDSRYISKVVKSLLSNIVREKGEEEAISKNVIPCTGGVTDRLKKDWGINEVWNKIILPRFQRLNELTGTNKFTTKNVGIQEIPTMPLELQKGFNKKRIDHRHHAMDAIIIACANRNIINYLNNESATAKAELSRYDLQKMLCDKAKTDNNGNYKWVIRKPWASFTQDTYLALENIIVSFKQNLRVINKATNHFLHYNEEGKKIFVKQGKGDNWAIRKSMHKDTVFGEVNLRRIKTVALNEAMKNPQSIVVKDFKRKLLELWNLGFDAKRIKKYFEDNRETWSDINLSKIEVYYFSKDTKDRFFATRKPLDTSFDRKKIENNITDTGIQKILLRHLELKDNNPDIAFSPDGIDEMNRNIIQLNNGKYHQPIIKVRWYEQADKFAVGQTGNKSSKFVEAAKGTNLFFAVYESNILDKKTNTIIKKRNYATIPLNVAIERQKQGLPVAPEDENGNDPIFVLSPNDLVYLPTAADLANGIIAQPLDRGRIYKMVSCTGNEGYFIPARIANPILQTIELGSNNKAQKAWTDEMIKEICMPIKVDRLGNVLESSSSYKK

SEQ ID NO: 22885 - protein, 1399 aa, unidentified
  REGION 1..1399: note = Cas Enzyme sequence
MKTILGLDLGTTSIGWALVKEAEPFSDEKSEIVRLGVRVVPLTVDERTSFEKGKSITKNAERTLKRGMRRNLQRYKLRRQALIDELKNAGWIGDDFIYSETGPGSTFRTLRLRAKSASEEVTLGDLARILLQINKKRGYKSSRKAVSSDDGQAIDGMAVAKEMYDKGLTPGEYVYQRMLEGKYAIPEFYKSDLQDEFDRIWTLQKSFHPELTDQLYRKLADRNKSQTWAICRDELGIQGLKSKFTGKERLKEAYHYRHSATTQEVDLEVLTCALQEINGQKASLSGLLSKISDRSKELYFNNLTVGQMLLKRIEENPNNSLKNIVFYRQDYLDEFERIWTEQSKYHVELTPELKKRLRDIIIFYQRPLKSQKGLISLCELETREIEVTVDGVKKMKNIGPRVCPRSSPLFQEFKVWQTINNILVNGAALDDEEKAIIAKELMFKDKLKDSDLLKLLFKTTKGLNVNFKEVDGNRTMATLMKACFKIAGNLGYDDTDLAKLSSEGQMDRIEEIFKKQGFKTGFLHFDSSLASPEFENQDSYRLWHLLYSYEGDKSASGNESLVKCIMGLCSMDEESAKILATCTFLPDYGSLSAKAMRKILPYMKDGLEYSAACAMAGYQHSKRSLTKAELDTREYSDRLSLLPKNSLRNPVVEKILNQMINVVNSVIDAYGKPDEIRIEMARELKKSAKEREEAQRNIASATAESQKIVEMLKGEPFFITSPTRNDVIRYRLYQELAQNGYKTLYSNTYIPKDKLFSKEFDIEHIIPQALIFNDSFSNKTLESRQCNLEKGKATAMDYVNSKYDEVGVQAYRDRVKGLIDKGISKTKAKWLLMDGKDIPEDFINRELRDSQYIAKKAREILESLVKFVVPTTGSVTARLREDWQLVNVMQELNWEKYARLGLTGVREDKDGRRIPFIQDWTKRNDHRHHAMDALTIAFTRRQFIQYLNHLNSKIDAVSWDKKDLDLRDYDLDDIKFGNMSTGDRYGIVKALQDRFLYKDGNDKYRFVPPIPLDEFRTQAKEQLSDILISFKAKNKVCTRNVNVTKNKGGANKKVQLTPRGPLHNETIYGSSLEYVTKENEKIGSSFDADKITTVCKKQFRDALLRRLEEFGGDPKKAFTGKNSPEKNPIWVDEHHSEQVPAKVRTVTMGQQFTIRKPVDATLKIEKVIDKKIREILQARLDEFGGKAEKAFTNLDENPIWLNKEKGIAIKRVTVSGPANPVSIRVKRDKDGKPVIDDVGKTIGSDFVTPGNNHHIAIFRDSSGKLQEHPVSFLEATITKSNGLDVIDRNYKKDEGWEFLFTLKQNEYFVFPNPETGFNPLDYDLTDPKNYAEISPNLYRVQKISRSNYMFRHHLETTVEENAMVKGIAWINIRSVSNLANIVKVRIDNLGRIVAVGEYD

SEQ ID NO: 22886 - protein, 1398 aa, unidentified
  REGION 1..1398: note = Cas Enzyme sequence
MKTILGLDLGTTSIGWALVKEAEPFSDEKSEIVRLGVRVVPLTVDERTSFEKGKSITKNAERTLKRGMRRNLQRYKLRRQALIEELKDAGWIGDDFIFSETGPGSTFRTLRLRAKSASEEVTLGDLARILLQINKKRGYKSSRKAVSSDDGQAIDGMAVAKEMYDKGLTPGEYVYQRMLEGKYAIPEFYKSDLQDEFDRIWTLQKSFHPELTDQLYRKLADRNKSQTWAICRDELGIQGLKSKFTGKERLKEAYHYRHSATTQEVDLEVLTCALQEINGQKASLSGLLSKISDRSKELYFNNLTVGQMLLKRIEENPNNSLKNIVFYRQDYLDEFERIWTEQSKYHVELTPELKKRLRDIIIFYQRPLKSQKGLISLCELETRKVEVTVDGVKKEKNIGPRVCPRSSPLFQEFKVWQTINNILVNGTALDDEEKSVIAKELMFKDKLKDRDILKLLFKTTKGLNVNFKEVDGNRTMAALMKACFRIAGNLGYDDMDLAKLSSEDQMDRIEEIFKKQGFKTGFLHFDSSLASPEFENQDSYRLWHLLYSYEGDKSASGNESLVKCIMGLCSMDEEPAKILATCTFLPDYGSLSAKAMRKILPYMKGGLEYSAACAMAGYRHSKRSLTKEELDTREYSDRLSILPRNSLRNPVVEKILNQMINVVNSVIDVYGKPDEIRIEMARELKKSAKEREEAQRDIASATAESQKIIEILKGEPFFLPFPTRNDIIRYRLYQELAQNGFKTLYSNTYIPKDKLFSKEFDIEHIIPQALIFNDSFSNKTLESRQCNLEKGKATAMDYVKSKYDEAEVQAYRDRVKGLIDKGISKTKAKWLLMEGKDIPEDFINRELRDSQYIAKKAREILESLVKFVVPTTGSVTARLREDWLLVNVMQELNREKYARLGLTGVREDKDGRRIPFIQNWTKRNDHRHHAMDALTIAFTRRQFIQYLNHLNSKIDAVSWDKKDLDLRDYDLDDIKFGDMSAGDRYGIVKALQDRFLYKDGNDKYRFVPPIPMDKFRTKAKEQLSDILISFKAKNKVCTRNVNVTKNKGGVNKKVQLTPRGPLHNETIYGSSREYVAKDEKIGGSFNSEKILTVCKKQFRDALARRLEEFGGDPKKAFTGKNSPEKNPIWVDEHHSEQIPAKVRTVTMGQRFTIRKPVDASLKIEKVIDKKIREILQARLDEFGGKAEKAFANLDENPIWLNKEKGIAIKRVTVSGPANPVPVRIRRNKDGKPIIDDAGKTIGADFVTPGNNHHIAIFRDSSGKLQEHPVSFLEATITKSNGLDVIDRNYKKDDGWEFLFTLKQNEYFVFPNPETGFNPLDYDLTDPRNYAEISPNLYRVQKISRGNYMFRHHLETTVEENAMVKGITWINIQSVSKLANVIKVRIDNLGRIVAVGEYD

SEQ ID NO: 22887 - protein, 1520 aa, unidentified
  REGION 1..1520: note = Cas Enzyme sequence
MKKIVGLDLGTNSIGWALINAYIDEYNKEHLYGIEACGSRIIPMDAAILGNFDKGNSISQTADRTSYRGIRRLRERHLLRRERLHRILDLLGFLPKHYSDSLNRYGKFLNDIECKLPWVKDETGSYKFIFQESFKEMLADFTEHHPKLIANNKKVPYDWTIYYLRKKALTQKISKEELAWILLNFNQKRGYYQLRGEEEETPNKLVEYYSLKVEKVEDSGERKGKDTWYNVHLENGMIYRRTSNIPLDWEGKTKEFIVTTDLEADGSPKKDKEGNIKRSFRAPKDDDWTLIKKKTEADIDKIKMTVGAYIYDTLLQKPDQKIRGKLVRTIERKYYKNELYQILKTQSEFHEELRDKQLYIACLNELYPNNEPRRNSISTRDFCHLFIEDIIFYQRPLKSKKSLIDNCPYEENRYIDKESGEIKHASIKCIAKSHPLYQEFRLWQFIVNLRIYRKETDVDVTQELLPTEADYVTLFEWLNEKKEIDQKAFFKYPPFGFKKTTSNYRWNYVEDKPYPCNETHAQIITRLGKAHIPKAFLSKEKEETLWHILYSIEDKQEIEKALHSFANKNNLSEEFIEQFKNFPPFKKEYGSYSAKAIKKLLPLMRMGKYWSIENIDNGTRIRINKIIDGEYDENIRERVRQKAINLTDITHFRALPLWLACYLVYDRHSEVKDIVKWKTPKDIDLYLKSFKQHSLRNPIVEQVITETLRTVRDIWQQVGHIDEIHIELGREMKNPADKRARMSQQMIKNENTNLRIKALLTEFLNPEFGIENVRPYSPSQQDLLRIYEEGVLNSILELPEDIGIILGKFNQTDTLKRPTRSEILRYKLWLEQKYRSPYTGEMIPLSKLFTPAYEIEHIIPQSRYFDDSLSNKVICESEINKLKDRSLGYEFIKNHHGEKVELAFDKPVEVLSVEAYEKLVHESYSHNRSKMKKLLMEDIPDQFIERQLNDSRYISKVVKSLLSNIVREENEQEAISKNVIPCTGGITDRLKKDWGINDVWNKIVLPRFIRLNELTESTRFTSINTNNTMIPSMPLELQKGFNKKRIDHRHHAMDAIIIACANRNIVNYLNNVSASKNTKITRRDLQTLLCHKDKTDNNGNYKWVIDKPWETFTQDTLTALQKITVSFKQNLRVINKTTNHYQHYENGKKIVSNQSKGDSWAIRKSMHKETVHGEVNLRMIKTVSFNEALKKPQAIVEMDLKKKILAMLELGYDTKRIKNYFEENKDTWQDINPSKIKVYYFTKETKDRYFAVRKPIDTSFDKKKIKESITDTGIQQIMLRHLETKDNDPTLAFSPDGIDEMNRNILILNKGKKHQPIYKVRVYEKAEKFTVGQKGNKRTKFVEAAKGTNLFFAIYETEEIDKDTKKVIRKRSYSTIPLNVVIERQKQGLSSAPEDENGNLPKYILSPNDLVYVPTQEEINKGEVVMPIDRDRIYKMVDSSGITANFIPASTANLIFALPKATAEIYCNGENCIQNEYGIGSPQSKNQKAITGEMVKEICFPIKVDRLGNIIQVGSCILTN

SEQ ID NO: 22888 - protein, 1180 aa, unidentified
  REGION 1..1180: note = Cas Enzyme sequence
MGSRVVPLTNLGDDKAFSKGEAFTANQKRTARRTMRRGFARYQLRRYRLRRELEKVGMLPDAALIQLPLLELWELRERAATAGRRLTLPELGRVLCHINQKRGYRHVKSDAAAIVGDEGEKKKKKDSNSAYLAGIRANDEKLQAEHKTVGQYFAEQLRQNQSESPTGGISYRIKDQIFSRQRYIDEYDQIMAAQRVYYPDILTDAFIRMLRDELIFMQRPLKSCKHLVSLCEFEKQERVMRVQQDDGKGGRQLVERKVKFGPKVAPKSSPLFQLCRIYEAVNNIRLTRPDGSPRDITPEERAKIVAHLQSSASLSFAALKKLLKEKALIADQLTTKSGLKGNSTRVALAAALQPYPQYHHLLDMELETRMMTVQLTDEETGEVTEREGAVVTDSYVRQPLYRLWHILYSIEERDAMRRALITQLGMKEEDLDGGLLDQLYRLDFVKPGYGNKSAKFICKLLPQLQQGLGYSEACAAVGYRHSNSPTSEEITERTLLEKIPLLQRNELRQPLVEKILNQMINLVNALKAEYGVDEVRVELARELKMSREERERMTRQNGQRKEANDKVAERIRQCGLYPTKPRIQKYMLWEEAGKVCLYCGRSIEEEQCLNGDDMEVEHIIPKSVLYDDSYGNKTCACHECNQTKGNRTALEYIRAKGWEAEYMERINDLLKEKKISYSKHQRLRWLKEDIPSDFLERQLRLTQYISRQAMAILQQGIRRVSASEGGVTARLRSLWGYGKILHTLNLDRYDSMGETERVSREGEATEELHITNWSKRMDHRHHAIDALVVACTRQSYIQRLNRLSSEFGRGNKKMEDLEAQEQQAKETGRFSNLERWLTQRPHFSVRTVSDKVAEILISYRPGQRVVTRGRNIYRKKTADGREVTCVQRGVLVPRGELMEASLYGKILSQGRERIVKRYPLHDLKGEVVDPRLRELIAVYNQEITSKVKAKGTPLYLDAAEKQEVRSVRCYVDKPSVAKAIPIRFDECGRAITFVKSGSNHHLAIYRTPKGELVESIVSFWDAVNRARYGLPLIIKYPRKAMEQVIQREDIPEPVLSLLPPADYEFVEVFQQNEMVAVGLPEEELRRAVDMQDYRTLSEHLYRLKRISSKDYEFHYHLDTDDPDETDSSKKKKKRVRNTSGRIPRIYRIRGIGSLQKKNVHKVCVDLLGRISLCSDAPQLP

SEQ ID NO: 22889 - protein, 1319 aa, unidentified
  REGION 1..1319: note = Cas Enzyme sequence
MIQKIFGLDLGTNSIGSSVRNLELGENLTEQLEFFSSDIFGSSVSKNSNGREYSLAGNRSAHRRSRGLNEARRRKLWATLDLLIEHDLCPMSPDSLIQWRTYDKQKGLYRHYPIGDKDFNAWIMLDFNGDGKPDYSSPYQLRRELVVRQFDFDQPIERYKLGRALYHIAQHRGFKSSKGETIADQEKNEKKPIAEEGADIANEMKASETKLSKGLVAYMQENHLRTVGEAFAKLEDEGVRIRNNESYRAIRSQYQDEIKEIFTYQKKLSVESGLYERLTSEKKGVGTIFYKRPLRSQRGNVGKCTLERNKPRCPIGRPEFEEFRAWTLINNIKIRETAGEPYKQLPIKLRQELLKDCFLSKVKADFKFEDIRKYIEKRLGLSFSNDDKTINYKDSVSIAACPVTVRMKKLLGENWANCRIDGEKRRQAHGKNNNNEHIVSYTAEDIWHVCYNAEDPQEVSNFARKALHWDENKIKELVRLWTSIPQGYAMLSLKAIRNINRMLLLGLKYSDAVLLAKLPDIVPVSDEDILAITKEFLQLEDKLNQEKQINNIVNSLIANYKSELEDNRFADHNYQYQLGEGDDKDIKTQIKSHIGTKLWAQMGTDEQTKIFQAARSKYQDFFKSYKRKFVESPKLGELLVAFLTEKFPNVKSKQWERLYHPSQIAIYRPIPVDNDRSKLRLGNPNIGAIKNPTVMRVLNTLRRRVNQLLDDGVISPDETRVVVETARELNDANTKWALDRYNRIRRDENKKIREILEELNPTTNSISEQDIDKARYIFEQCETDFYTDGKVPYYNKDIKKYKLWLEQGGQCLYTGQTINLTNLFNPNAFDMEHTIPKSISFDNSDQNLTLCESYYNRFIKKNNIPTDMPNYDKDVTINGKEYTAIKPRLQRWKERVDRLSRNVDFWKGQARRAQDKDRKDECIREKHLWEMELAYWKGKLERFTMTDVTDGFKNSQLVDTRVITRHAVLYLKSIFNHVEVQRGETTAEFRKILGLQSIDENKDRSLHSHHAIDATMLTVIPSAAKRDRMLELFYKIEETKKALKNYNDNNKTGLNLELKGLKEKLDKEKKDCRVGRRVNELDRFINENIIVSHHTKDQALTPAHRRLRKRGKIVGGKEHPRWQTGDSLRGEIHKASYYGAITQFAKDANGKVLMKDGQAQIDPTIYYVIRRELKYKRPKQDSGFTEWEDLEKVIVDTNLFGLMKGQFPEGTSFKDACEQGFYMIKKGKNGERDVKTHRIRHVRCKAVKTALRIKEQTYKSSKDYKQFFYAAVGELYVMCSYTDGKKRNFKIYSLYDISNHRKSGTEDIPKFLPIRTEIV

SEQ ID NO: 22890 - protein, 1484 aa, unidentified
  REGION 1..1484: note = Cas Enzyme sequence
MKNVLGLDLGTNSIGWAKVSMDDDGKYLHDIKLGSRIIPMSQDILGKFDSGVTESQTAQRTGFRSVRRLRERCLLRRERLHRVLHVLGFLPEHYDRALGWDKDHPTTYGKFLDDSEPKLAWKRTEDGRYHFLFMDSFKEMLDDFALHQSQLVADGRRIPLDWTLYYLRKKALSQPILKEELAWILLNFNQKRGYYQLRGEEEEEVPTKKEEYYELKVIQVEATDDKKGDAVWYHIHLENGWIYRRSSKIPLDNWNGQVKAFIVTTEFEKDGVTPKLDKDGEVKRSFRAPSEDDWGLRKKRTEKQLETSGQTVGCFIYDHLLAEPSDKIRGNFVRTIERKYYKDELRVILRKQMEFHAELRDSEMLAACAEELYQKNEAHRKNLIQKDMEYLLVDDLLFYQRPLKSKKSLIDNCPYEQHIYEFVDKETGEIKKDQIQNIKCIAKSNPYFQEFRLWQFIHNLRIFRREDDTEVTGEYLKSREDYARLFLYLNDKKEIKMETVLKDFLGMKKARGKDAGYPLRWNYVEDKTFPGNETRYEILSALHKAGISPDWADENNRIYRLWHLLYSVNDRLELKEALKKFKDDEAFVESFLKVKPFKKDYGAYSEKAVKKLLAVMRMGSLWHEEDICAETRTRITNIITGNIDSKLKEKIGGTRAFTTITDFQGLPVWLACYVVYGRHSEVSEIKKWETPEQLMEYIRGFKQHSMRNPIVEQCILEALRTVHDIWKEVGHIDEIHVELGRSMKKTAIERERDMRNSMRNENTNLRIRNLLIELKNDKDIADVRPYSPTQQEILRIYEEGALQQLTKENKEYDEIVKISQQAQPTSAQLNRYKLWLDQKYVSPYTGKTISLSKLFTSAYQIEHIIPQKRYFDDSFTNKVICEAEVNQLKSDMLGYEFIKAHGGEIVHCTMLGDVKILDEASYKELVVSHYANNNAKRKKLLAEDIPEEFLARQMNDTRYISKMVMSLLSNIVREKDEEEATSKNVIPCTGGITDKLKKDWGLNDIWNTIVMSRFERLNELTKTEAFGRWENKEGKRVFQTDVPLELRRGFSKKRIDHRHHAMDALVIACASRNVINYLNNESAKDSKRREDLRVKLCDKNRIIRKPWETFTQDALVALENIIVSFKNYVRVINKATNYYERYDEKGKKVNVPQKGVALWAIRKPMHKETVFGEVNLRRKEIIPIAKALDTVPAICNKALRKYIYGLIANKFNKKQLLAHFKSINYRWNRQDVSKVEVIVESKNNEEMVATRKPLDISFDNKRIMSITDTGIQKILLCYLDAKGGDPTVAFTPEGIAEMNGDISIYNGGKWHQPIFKVRVSEPKGAKFQVGEKGAKSRKFVEAQKGTNLYFAIYEDMERVRSYSTVPLDEVAERLKQGLSPVPEKNDNDVPLKFYLSPNDLVYVPSEEDLLTDTVVLDKDRIYKMVSATGKECLFLPYSVASIIYNKFEFESLNKMGRALTGEMIKDVCWKLEVDRLGKILRIIK

SEQ ID NO: 22891 - protein, 1159 aa, unidentified
  REGION 1..1159: note = Cas Enzyme sequence
MGSRVVPLTNLGDDKAFSKGKAFTANQERTARRTMRRGFARYQLRRYRLRRELEKVGMLPDAALIQLPLLELWELRERAATAGGRLTLPELGRVLCHINQKRGYRHVKSDAAAIVGDEGEKKKKDSNSAYLAGIRANDEKLQAEHKTVGQYFAEQLRQNQSESPTGGISYRIKDQIFSRQRYIDEYDQIMAAQRVHYPDILTDEFIRMLRDEVIFMQRPLKSCKHLVSLCEFEKQERVMRVQQDDGKGGRQLVERRVKFGPKVAPKSSPLFQLCRIYEAVNNIRLTRPDGSPRDITPEERAKIVAHLQSSASLSFAALKKLLKEKVLIADQLTTKSGLKGDSTRVALAAALQPYSQYHHLLDMELETRMMTVQLTDEETGEVTEREVAVVTDSYVRQPLYRLWHILYSIEERDAMRRALITQLGMKEEDLDGGLLDQLYRLDFVKPGYGNKSAKFICKLLPQLQQGLGYSEACAAGGYRHSNSPTSEEITERTLLEKIPLLQRNELRQPLVEKILNQMINLVNALKAEYGVDEVRVELARELKMSREERERMARNNKDREERNKEVAARIRQCGLYPTKPRIQKYMLWEEAGKVCLYCGRSIEEEQCLNGDDMEVEHIIPKSVLYDDSYGNKTCACHECNQTKGNRTALEYIRAKGWEAEYMERINDLLKEKKISYSKHQRLRWLKEDIPSDFLERQLRLTQYISRQAMAILQQGIRRVSASEGGVTARLRSLWGYGKILHTLNLDRYDSMGETERVSREGETTEELRITNWSKRMDHRHHAIDALVVASTRQGYIQRLNRVSSESEREAMSGEIEVQAATKTDKLSLLERWLTQRPHLSVRAVSDKVAEILISYRPGRRVVTRGRNIYRKKTADGREVSCVQRGVLVPRGELMEASLYGRIISQGRERIVKRYPLHDLKGEVVDPRLRELITTYNQELKSREKGAPIPPLCLDKDKRQEVRSVRCYVDKPSVSSAIPIRFDERGTAITFVQSGNNHHLAVYRTPLGVLEESIVSFWDAVDRARYGIPLVITHPREVMEQVLQRGDIPESVLKSLPPSDWMFVESLQQDEMVAIGLSDEELQSAIEAQDYRKLSEHLYRVQSLSSKYYVFRYHLETSVKDRKNTSGRIPKFHRVRNLPDYEKRNVRKVRVDLLGRISLL

SEQ ID NO: 22892 - protein, 1507 aa, unidentified
  REGION 1..1507: note = Cas Enzyme sequence
MKTILGLDLGPNSIGWAKVEVDDEGNYLRNIKLGSRIIPMTQDMLGDFDKGVKVSQTATRTDFRGNRRLIERHLLRRERLHRVLHALKFLPKHYEDAIGWDRNEPATYGKFVNNSEPKLAWERQEDGSMRFLFMESFNEMVADFAQNQPSLVSDGKKIPLDWTIYYLRKKALTQPIKKEELAWILLNFNQKRGYYQLRGEEEEDNLTKRKEYYKLKVVGVEADGAPKGGKTWYNIHLENGWTARCQSKIPLDDWVGKVKEYIVTTEYEDDGKTPKCDKEGKVKRSFKSPEKDDWQLIKTRTEKFIDDSNKTVGAFIYDHLLEKPFDKIRGKYIRTIERKYYKNELREILREQAKYHEGLHSLEALKICAEELYKNNQQHREYLLKKDMIFLLLNDLIFYQRPLKSKKSLIADCPYEVYKYDDKLTGKKGQKKIKCIAKSNPYYQEFRLWQFIANLRLFSVTDGKEVTTEYLKTEEDYVRLFSFLNDRKDIKQETFLRSFLKLKKVPIGSEKIYPIRWNYIEDANKSYPCNATRHELLLAFDRADIPRELLDVEGREYRLWHLLYSIEAKEETESALRKLKANKAFGDLNIDDDFVNSFLKIKPFEKEYGAYSEKAIKKLLAVMRRGSLWKEADICEATKQNIAKILQNDIDEKLKKKIEAAVSSFNKLSDFQGLPTWFACYVVYGRHSEAAQIQCWQSPEDLKTYINKFKQHSLRNPIVEQCLLETLRTVYDIWKDAGQIDEIHIELGRNMKSTAEQRARKTNEFLRNENTNLRIKNLLVELKNDDKIENVRPYSPSQQEILRIYEEGALQELSKEDEMFEDISKISKMAQPSPTELSRYKLWLEQKYRSPYTGRVIPLSKLFTTAYQIEHIIPQSRYFDDSFNNKVICESEVNSLKDNMLGYEFIKECGGKKVYCTLLNKSVEIFTEEEYKTFVTKHYVGNPRKQDNLLLEDIPQEFSARQLNDSRYISKMVQTVLSNIVRAENEQEATSKFVVSCNGAITNRLKKDWGLNDVWSSIVCPRFKRLNEITKTNAFGHWEDKAGKHVFQTTVPLELQRGFSKKRIDHRHHAMDALVVACASRNIVNYLNNESANSPEKREDLRKKLCDEKRKIRKPWKTFTQDAREALSDVVVSFKNYVRVINKATNYYEHYSSSGNKVMISQKGNDMWAIRKPLHKESVFGRVNLRIKVTVSLKKALENIPAICDKTLRDYINALVEKHFNTRQLLAHFKSINYRLNRQCVDKVEVWQFSDEKIEMVARRKSLDTSFDDKQISSITDTGIQKILLNYLQTKDGNAEIAFTPEGIEEMNKNISLYNDGKAHQPILKVRVATPKGMKYPVGQTGNKATKFVVAEKGTNLYFAIYENELGVRSYDTIPLNIVVERLKEGLSPVPQANEADIPLKFYLSPNDLVYVPTKENEDELCRDRIYKFVDSSGTTANFVPHTSANTIYNVDKEYAEKCCNGAVILNEYGLGSSQSKNQKALDGEMIKEICWKLKVDRLGNIIKVIK

SEQ ID NO: 22893 - protein, 1393 aa, unidentified
  REGION 1..1393: note = Cas Enzyme sequence
MKSILGLDLGTTSIGWALVKEAENESEKSEIVKLGVRLVPLTVDERTDFEKGKSITTNADRRLKRGMRRNLQRYKLRREALIEELKKEHWIEDGFCFSEEGPGSTFRTLEIRAKSAFEEVSLQELARILLQINKKRGYKSSRKSDSSDDGHAVDGMDVAKYMYDNDLTPGEYVYERILNGQYRIPEFYKSDLQLEFDKVWNFQKAFHPQLSDELYEKLKDKNKSQTWAICRETLGIQGKKSSSTGKERTKESYYNRQLALRKELDLETLTCVLQDINGQKSSLSGLLSAISDRSKELYLAHMTVGQMLVRRLHDNPNASLKNIVFYRKDYMDEFEKIWSVQSQFHPELTPELKKRLRDIIIFYQRPLKSQKGLVNLCEFESRTFNKCVDGAVKKITIGPRVCPRSSPLFQEFKICQTINNILIDGQCLDDDERADLVSELTYRDGMTDSEILRLLHKSPKEHRVNFKKVDGNKTMSALLKACEKIINSLGYDVDLSKGPARDKLFKIEEILGKEGVKTDFLHFDSSLSSPAFESQDSYALWHLLYSYEGDKSTSGDKSLVDKIKSLCSMDEGSAKIMAGCVFSSDYGSLSAKAMRKILPYMKDGLEYSAACAMAGYRHSKSSLTKEELASKEYVDHLKLLPKNSLRNPVVEKILNQMINVVNSVVDAYGKPDEIRIEMARELKKSASEREQAQKNISAASKVNESIVATLKGSPFFIDSPSRNDVIRYRLWEELKPNGYKTLYSGTYIPKESLFSKEFDIEHIIPQALLFDDSFANKTLEARWCNLEKSNKTAMDYVLSKYDEAGVQAYLDRVNSLAKDGISKTKISRLKMKGTEIPDDFINRELRDSQYIARKAREILESMVKFVVPTTGSVTARLRDDWQLVNVMQELNWEKYSKLGMTSYRQDRDGRRIPVIEDWTKRNDHRHHAMDALTIAFTRRQFIQYLNHLNAKIDVTDKSDIELRDYNLDDVDFSAKSPRDRFGIVRALQNKYLYKDEKQKYRFVPPMPIDELRMEAKRQLDSVLVSFKAKNKVCTKNVNVIKSRNGNKRCPQLTPRGPLHNETIYGKNLEYVTKDEKVGSSFDMEKIATVCKKSYREALLRRLNEFGGDAKKAFTGKNALDKNPIWVDEHHSAKVPGRVNTVSMEPVYTIRKAVDSSLNIDKVIDRRVRAVLQARLDEYGGNASKAFSNLDENPIWLNKEKGIAVKRVAIDESVIPIPIRNKRDKDGQFVLDYKNNPVQSDFVKTGGNHHAAIFLTPSGKLQDVVVSFNEAVMRKSLGLEVVDRNYKKDEGWQFLFTLKQNEYFVFPNPEAGFSPKDYDLMDPANNAVISPNLYRVQKIAAGDYFLRHHLETTVEDNKLLKGLTWKRVGPSGLEGAVKVRVDNLGRIVAVGEYD

SEQ ID NO: 22894 - protein, 1323 aa, unidentified
  REGION 1..1323: note = Cas Enzyme sequence
MIINSKVIDVVKAEKDKKYEKYWYNVLLENGLLYRAAFYNDISFWKGHTKEFVLKTIKLKSGGTKQELSFLPSFDEIEKMEKKQKDKMYFKIKLKTEADIDQAHKTVGTYIYDTLLGNPSQKIRGRLVRTIERKYYKEELKLILDKQKEFHPELQDRALYAACVEELYTINEAHRNNIGNRDFTYLFLEDILFYQRPLKSKKSLIDNCPYEENHCLDKETGEIKSFPVKCIAKSHPLFQEFRLWQFIVNLRIYRKGLAQDVDVTNELLKTEEDYVALFDWLNGKKEIDQKAFLKYPLFGLKKEVENYRWNYVQDKPYPCNETRSSMLARLEKCDISIEFLTKENEEALWHILYSVEDKNEIVKALQKFADKHDLNASFVDVFRKFPPFKKEYGSYSAKAIKKLLPLMRMGKYWSENSIDKGTRERIDKIITGEYDEKIENRVREKAIHLADVSDFRGLPLWLVCYIVYGRHSEAKEITQWKSPADIDSYLKSFKQHSLRNPIVEQIIIETLRVVRDIWKQVGNIDEIHVELGREMKNPADKRKKMTQQMSENENTNLRIKYLLTEFLNPEYEVENVRPYSPSQQDILRIYEEGVLNSVSDLPEEISDILKKFTETDLKKRPSRSEVLRYKLWLEQKYRSPYTGEVIPLGKLFTPAYEIEHVIPQSCYFDDSFSNKVICEAEVNKLKSNLLGHEFIVKHHGEIVELPFGKKVRIFTVDEYEQFVKDNYSRTRGKMKKLLMDDIPEEFVTRQLNDSRYISKVVKSLLSNIVREKGEEEAISKNVIPCTGGVTDRLKKDWGINEVWNKIILPRFQRLNELTGTNKFTTKNVGIQEIPTMPLELQKGFNKKRIDHRHHAMDAIIIACANRNIINYLNNESATAKAELSRYDLQKLLCDKAKTDNNGNYKWVIRKPWASFTQDTYLALENIIVSFKQNLRVINKATNRFLHYNEEGKKIFVKQGKGDNWAIRKSMHKDTVFGEVNLRKIKTVALNEAMKNPQSIVVKDFKRKLLELWNLGFDAKRIKKYFEDNRETWSDINLSKIEVYYFSKDTKDRFFATRKPLDTSFDRKKIENNITDTGIQKILLRHLELKDNNPDIAFSPDGIDEMNRNIIQLNNGKYHQPIIKVRWYEQADKFAVGQTGNKSSKFVEAAKGTNLFFAVYESNILDKKTNTIIKKRNYATIPLNVAIKRQKQGLPVAPEDENGNDPIFVLSPNDLVYLPTDDELANGIIAQPLDRGRIYKMIDSSETTANFIPYSIANLIYSLPKSLAESFCRGGILVQNEFGVGSPQSKNQRALTGEMIKEICIPIKVDRLGNVLESSSSHKK

SEQ ID NO: 22895 - protein, 1219 aa, unidentified
  REGION 1..1219: note = Cas Enzyme sequence
MKKILGLDPGIASVGWAVVQTAEEASEKSGILDAGVVKVDFDNFAYQKPDGKISSTGKIDELYRKGVTVSPNLVRRQARQARRRLQHYQQRREQLIKLLMANGFITAATPLNEEGKDTTFQTHALRAKAVTEAVTLEELAKVLLMINKSRGYKSTRKGESEGEDTNYLKTITERSKVLLERDLTVGQYLYEMLQQHPLKGIKNQTFYRKDYEDEFEKIWSCQMKFHKELTKKLKKQIRDKVIFFQRPIESKKGDVGFCQLESREVVVNGKTYTTGSRVIPTSSPLYQEFRMWQRLNDTVIKNIMTGEVRHLTQEEKERLAAELSIRKELTKTAVVRLLYGKAIKSVELNFDTLIGNDTAARIYKACLEVIKLSGHELDTKKMSSAAVIAAVQDIFGMLGYRTVALTDAGEFAKLWHLIYSFPGDSSRSGHDTLTAHIKQLFNFATDEQAEKLANIIFDDGYGNLSSKAISKILPKMKEGLQYSDACLAAGYNHSVRSVTKEDNENRVLSATVTPIPHNSLRNPLVERILNKMVYTINAIMQKHGQFDEIHIELPRELCSNAEKRAKDTAAIDRNTKDKEKAEQELKEKLAEMGYPVTYVSPNDVLKYRLYKELAANGYRTLYSDTLIDLKELILGRGFDKEHIIPKALRLDNGFSNLTIEKTDINLKKSKQTALDFVQEEYGDAAAEQYRQRVIDLFEKKAISKTKHDNLLRTAAEIPANPLDRDLNLTRYITKKAVELLEPVTRKVLVTTGAVTVKLREDWQLVDVLKEMVFEKYQELGLTEKFTDKEGKVIERIREDVWSKRNDHRNHAMDAITVAFTTQSMIHYINSLSSQGEGREQLFHMRQKHLHKDGKGNWIFNSPMPIDEMRRASKQVLEDIFVIHPTPKVAPVTRNKGTLVPRGKLHDATFYGRKKKEVISFEKVDKSFTEEKISTVTNPKYRSALLHRLQEFGGDAKLAFTGKNSLEKNPIWLDEFHSAAVPLKVKCMTTKHVYTKRVTVNENLNIDKVLDEGVRAILKARLQAFGGKTKEAFANLEENPIWMNEEKGIAIKSVIVETDLKDLTPLHRKEDGTGKDFVKPNNNYRADIYIDNKGELHDNVVSFFDAVQHSSAVDSSWRCLFSIKRNEYFVMPGKDFNPLEIDLEDSQNRSIVANHLFVVQKMSSKDYLLRLHNDTSSGIVKELKDITSIRVTSLSKFIGSVKVSIDTSGGLKVLQKMVID

SEQ ID NO: 22896 - protein, 1454 aa, unidentified
  REGION 1..1454: note = Cas Enzyme sequence
MDAGRLGDFEKGNSVSFTKERTQYRGARRLRERYLLRRERLLRVLRIMGFLPEHFASQLSRYGKLPEDKEPKLAWREGKDGKLDFIFKSSFEEMVEDFRQAGSDNKIPYDWTIYYLRQKALTHPISKEELAWVLMQFNQKRGYYQLRGKADEGAADAESKNEIRSYHELTVTSVAKTEEHDKKGLTWYDITLENGWIYRRAFSVKPDWEGKTRGFIATFKLDKDGNPKEETPRLSSPSDDDWGLRKIKTENDIHESGLTIGAYIYQSLLHHPDRKIIGDFVQTIDRELYKKELLQILETQKQFIPELNDEQLYANCIEELYPSNDAYRTSIAKRDFIYLLVEDILFYQRPLKSKLSLIDDCPFEQRNSKPVKCVAKSHPIYQEFRLWQFLSNLHILLDDVDITPNLLPDGDAYADLYDYLSTIKEVDQSAMLRYFKIGKKEMPRYRWKYVPDRKYPAGETRATLLGGLSKAGIDKGFLSPEKELQLWHILYSVDDQQQYRKALRTFAHKQGWDDSQTDRFTKAFDRLTVYKEKDYGAYSAKAIGKLLPLMRRGRYWNPQDIDCQTRQRINHIITGEEDDTLTSSVREKFEGLESIEQCQGLAPWQACYLVYNRHSEAIDAQRWTKPEDIDNYLGQFRHNSLNNPVVEQVVTESLRVVRDIWKKTGHIDEIHIELGRELKKTQSERQSLSQSILEGETTNQRIRLLLTELMNPELEVENVRPQSPSQQEILKIYEEGAMQNADEIPDYIKDIQKRFSDAKKQPTPAEVKKYRIWLDQRYISPYTGRPIPLAKLFTPAYEIEHIIPQSRWFDDSMSNKVICEAEVNKLKGRELGHEFIVHHHGESVPLSLGGEVKILEVEAYEKLIKSNITNSKKRQKLMMDDIPDDFTSRQLNDSRYISRLMMHLLSNIVRSTDEDGNLENTATSKNVIVCNGSITDRLKRDWGIGDVWNRIILPRFERMNRITETTDYTATTDSGHLIPQVPLHMRQGFNKKRIDHRHHAMDAIIIACATRNHVNLLNNENAKSQQRYDLQHTLRTKETYVDGQGNTRTRPGDFIKPWPTFTEDVYHVLESIIVSFKQNQRIINKTSNHYTVIRNGKHTGCPQTKGDSWAIRKPLHKETVFGEVNLQLKKKINLKDAIKNPNTIVNRELKLKIKEQLDKGYSAKQIIDYYDKRKDVWPEAADGKVEVYYYTKDTKDRYFATRKSLIDLFKDTATQPAATKIIESITDSGIRSILYAHLANEGNNPVEAFSADGLERMNRNIRNLNGGHDHLPIKKIRVYEQANKYSVGAHGQKATKYVEAAKGTNLFFVIYTDKKGSRGYATVPLNVIIDLQKQYEKQWRAHLAERLQQDDLALMPSDSTLLYILSPGDLVYVPSEEERKNGIISLDLKRVYKCVSATGKQCLFIPCPVASLIQTGKEFEAQNKIERALTKEMIKEVCIPIQIDRLGNIIRIGQ

SEQ ID NO: 22897 - protein, 1242 aa, unidentified
  REGION 1..1242: note = Cas Enzyme sequence
MKRILGLDLGTNSIGWAVVNTDENDKPVSIESMGSRIVPLTSDDTNEFTKGNAITKNQSRTEKRTARKGYDRYQLRREHLTAELRKLKMLPDERLIKLPVLELWELRGKAASKGNQLTLSEIGRVLYHINQKRGYKHAKSDESADTKQKAYVAEVNARYAMIKERNQTIGQFFAEKLKENEIETPKGKFYTYRIKEQVFPRKAYEAEFDQIIECQKEFYPDILTNEEINRLRNEIIFYQRRLKSCKHLVSFCDFEKREYINKVGKVVYGGPKVAPKSSPLFQLCKIWEEVNNLTLRNRKNDELFITIEQRQAMVDFLDTHEKLTLSDMYSILGISKQDGWWGGKAIGRGLQGNTTKIALKKALGDFVNADTLLQFNLKQTDSNLVDEVTGEILQVIDPKLEKEPLYDLWHTIYSISDKEELANALKKKYNIHDEDIINRLYAIDFVKSGFGNKSTKAMRRILPYLQQGLKYSDACEYAGFRHSDSLTKAENEARQLLEKLPPVQKNALHQPIVEKILNQMINVVNALMIEYGQFDSIRVELARELKQSKDERNTTFLQNEAMQRLNESIATRLSSEGIKPTKRTIEKYKFIFPTKGCFDKRTGKFITKNFENLSTVNRCIYCGQPFSLSAALNGDGYEIEHILPRDLICDNSQSNKVLSCRKCNSIKSNKTAFDFMRSQGEHAFETYLERVELWYKDGIISPSKRERLLLSHEDYLERKKKDKATDIDKKYWENFVSRQAGETQYISREAIRILKQCCRYVNATSGSITATLRHLWGYDEILHQLNFERYKQAGLTKIVTWESNHGKNKHSKEQIVDWSKRIDHRHHAIDALVVACTQQGFIQRINTLNADETKDLMKKQIESAGIKFEEKKVLLDKYLTSLIPFKTQFVADAVNKILVSFKAGKKTATIGKRIEYKDGKKHVVQEGIIIPRGALHEEGVYGAILIDGKKEIVKKYKLGKGAQGFVFTGKETYVEKVNKKTGEIQIEDKIKNVLDSIVDGNIRNKVLQRLNQGFEEGQDYRNNVKKALDNLNNLDENPIFADKNNTIPIRTVRCRTGLSAVVPIKKNERGEAIGYVKPGNNHHIAIYRDKEGKLKEHAVTFWNAVERKKYGIPVVIENPLEVWDSIRDKQLPETFLEKLPDVNWTFEMSLQQNEMFILGLEDDAFEDAMRNKNYALISKYLYRVQSISESDYWFRLHLETQNDKTASAKLAKKYYRTKSIKGFYSLNPHKVYISVIGKIKEL

SEQ ID NO: 22898 - protein, 1201 aa, unidentified
  REGION 1..1201: note = Cas Enzyme sequence
KIWKIQSTYYPNILTDDFKTSIRGFNKTQTSGAFYGAYKIYTAKKSGKEGYIQSLKWRTEALSHKIGIEEVAYILADINGAINNSSKRLAMISDRSKELYFSRQTIGQYLMQHLDENPNASLTNIIFYRQDYMDEFEAIWEKQAQYHPELTAELKKEIRDIIIFYQRDLKSCKNLVSYCELEHQEREVVIDGKKKMIFTGCKVCPKSSPLYQDFKIWQILNNLQVSVIGYQKKKIKKEASQLSLFDDIETGSLNRFLSQEEKDILYHELSIKEKMGKKDVLKLLFDNPKDLDLNYKEVEGNRTIALLFKAFQDIISMTGNGEYDFSKMPTDDVLSITTEIFRGLGYKTDYLTFDSLLEGKALEQQPSYRLWHLLYSYTGDKSTTGNVALLERIKDICGFEKEYANILANVSLPLDYGSLSAKAIRKILPHMMKGYEYSEACRKAGYNHSARSLTKEELATKNYKTHLDEIKRNSLRNPVVEKILNQMINVINEVVTTYGKPDEIRIEMARELKKSQEERQLLEEAIRKNTTESEKLRQELETEFGIQHVNRNDILRYKLYNELKLNGYKTLYSNTYIPREELFSKRFDIEHIIPKARLLDDSFSNKTLEVRDINIEKGNMTAFDYVAGKYDEKYLSDYESRIEELYSQKVISRTKRNNLLMKESEIPSDFLERDLRDSQYIARKAREILEEMVPHVVTTTGAVTSRLREDWQLVNLMQELNWDKYENLGMTERYTDKNGNIVKRIKDWTKRNDHRHHAMDALTIAFTKRSIVQYLSNLNARSDKSKSIYGIEQKELHRDEKDHKLVFNAPMPLNEFRAEAKKHLESILVSIKAKNKVVTKNINRFKNKEGQQQKIQLTPRGALHNETVYGKIQNYEAEYRKVDGKFTEEVILRVSNQKYRHALLERLAAFGNDPKKAFTGKNSLEKNPIWLNANHSHCVPAKVKLYKIVDVFTIKKAVDKDLKIDKVIDGRIRQILQERLNEFGGDASKAFSNLDENPIWLNQEKGISIKRVKIRAKVSSDTSVPLHIKKDMYGNIMKNKDGQPIPIDYVNTANNHHVAIFIDEDGNWHEHVVSFYEATASALLGLPIVDKDYKREEGWKFLFSMKQNEYFVFPNEKSGFVPSEIDLTAPENYHLISPNLYRVQKFSSSFYVFRHHLETNVDESNELKDLTWKRITSIKNLEGIVKVRVNHIGQIVTVGEY

SEQ ID NO: 22899 - protein, 1483 aa, unidentified
  REGION 1..1483: note = Cas Enzyme sequence
MKTILGLDLGTNSIGWAKVCIDDNGNYLRDIKLGSRIIPMSQDVLGNFDKGVTESQTSVRTGYRGIRRLRERSLLRRERLHRVLHVLDYLPPHYDCSIGWDRNAPSTYGKYLNHSEPKLAWERQEDGSMRFIFMDSFHEMMADFAKRQPSLVSDGKRIPLDWTIYYLRKKALSQAIRKDELAWILLNFNQKRGYYQLRGEEDDTNSAKCEEYYELKVISVEADEEGKGGNTWYNVKLENGWIYRRQSKISLSDWVGKTREFIVTTEYEKDGVTLKRNKDGEIKRSFRSPSEDDWGLRKKRTEERLESSKMTVGAFVYEHLLSEPSDKIRGKFIRTIERKYYKEELYAILREQSKYHEELHSEGALKKCAEELYKNNQPHRDSLLKKDLIYLLLDDLIFYQRPLKTKKSLISECPYEAYSYVDKETGEIKRQGIKCIAKSNPYYQEFRLWQFISNLRFFDKVDDKDVTADYLSTRDDYVRLFAYLNDRKDINQETLLKEFLKLKKVIINSEKEFSVRWNYIEDKEKRYPCNETRHELLLALDRAGIDRSWLDEEGREYRLWHLLYSVESKEETEGALRKLKDDDEFIKSFLKIKPFKKEYGAYSEKAIKKLLAVMRIGSLWSEADICKTTKENITKMLKGDIDDKLKEKISSCLSSYNQVSDFQGLPVWLACYVVYGRHSEAAEIQHWRTPNDLLVYINGFKQHSLRNPIVEQCILETLRTVHDIWKEAGHIDEIHVELGRNMKSTADQRARMSGNILRNENTNLRIKSLLLELKNDPDIKDVRPYSPMQQEKLRIYEEGALQELTKDDKDFAEIIKIATMAQPSAKELLRYKLWLDQKYCSPYTGRSISLAKLFTSAYQIEHVIPQSRYFDDSFNNKVICESEVNGLKDNMLGYEFIKECGGEIVHCTMLGDVKILSESEYKDFVNDHYAHNRRKKENLLLEDIPQEFLNRQMNDSRYISKVVKALLSNIVRAEGEEEATSKFVVSCSGGITDRLKKDWGLNDVWNKIVYPRFERLNKLTGTDSFGQWENKEGKKVFQTSLPLELQRGFNKKRIDHRHHAMDALVIACTSRSIVNYLNNESADNPKKREDLRQKLCDKNRIIRKPWDTFTQDATAALEDVVVSFKNYVRVINKATNYYEKYDKNGKKGIAEQKGQEMWAIRKPMHKETVFGRVNLRRKVTVKLKDALEDIPSICDKTLRDYVNGLVKKNFKTKHLIAHFKSLNYRLNRQHIEKVEVWQFSDKKEQLVATRKPLDTSFDNKHIDSITDTGIQKILKNYLHAKGGDPNIAFTPEGIVELNQNISLYNDGKLHQPILKVRVFEPKGAKYCVGQNGNKSAKYVEAQKGTNLYFAIYEDEEGKRSYETIPLNEVVERLKQGLSPVPEKNKAQIPLKFYLSPNDLVYVPTDEEVNDNRCYMNKDRIYKMVSSTGNQCMFVPFRVATCIVNKMEYSPLNKMEKAITGEMVKAICWKLVVDRLGNIIKIIK

SEQ ID NO: 22900 - protein, 1226 aa, unidentified
  REGION 1..1226: note = Cas Enzyme sequence
MLMSKHVLGLDLGVGSIGWCLIALDEQGDPAEILGMGSRVVPLTNLGDDKAFSKGEAFTANQKRTARRTMRRGFARYQLRRYRLRRELEKVGMLPDAALIQLPLLELWELRERAATAGEHLTLPELGRVLCHINQKRGYRHVKSDAAAIVGDEGEKKKDSNSAYLAGIRANDEKLQDEHKTVGQYFAEQLRRSQSESPTGGISYRIKDQIFSRQRYIDEYDQIMAAQRVHYPDILTDEFIRMLRDEVIFMQRPLKSCKHLVSLCEFEKQERVMRVQQDDGKGGQQLVERKVKFGPKVAPKSSPLFQLCRIYEAVNNIRLTRPDGSPRDITPEERDKLVAYLQTYEAPKPPKRKPAKAKPVKLAHPELDLDKLKELLCIEEELLADKLLEEGLKGDATRIALSIILQPYPQYHHLLDMELETRMMTVQLTDEETGEVTEREVAVVTDSYVRQPLYRLWHILYSIEERDAMRRALITQLGMKEEDLDGGLLDQLYRLDFVKPGYGNKSAKFICKLLPQLQQGLGYSEACTAVGYRHSNSPTSEEIAERTLLEKIPLLQRNELRQPLVEKILNQMINLVNALKAEYGIDEVRVELARELKMSREERERMARNNKDREERNKEVAAKIRECGLYPTKPHIQKYMLWEEAGRQCLYCGRSIEEEQCLNGDDMEVEHIIPKSVLYDDSYGNKTCACHECNQTKGNRTALEYIRAEGREAEYMERINGLLDKKAISYSKHQRLRWLKEDIPSDFLERQLRLTQYISRQAMAILQQGIRRVSASEGRVTARLRSLWGYGKILHTLNLDRYDSMGETERVSREGEATEELRIKEWSKRMDHRHHAIDALVVACTRQSYIQRLNRLSSEFGREDKKKEDQEAQEQQATETGRLSSLERWLTQRPHFSVRTVSDKVAEILISYRPGQRVVTRGRNIYRKKMADGREVTCVQRGVLVPRGELMEASLYGKILSQGRERIVKRYPLHDLKGEVVDPRLRELIAEYNQEITSKVKAKGAPLYLDAAEKQEVRSVRCYVDKPSVAKAIPIRFDECGRAITFVKSGSNHHLAIYRTPKGELVESIVSFWDAVNRARYGLPLIIKYPRKAMEQVIQRDDIPESVLRLLPPADYEFVEVFQQNEMAVVGLPEEEFRRAVDTQDYRTLSEHLYRLKGISSKDYEFHYHLDTDDPDETDSSKKKKKRVRNTSGRIPRIYRIRGIGPLQKKNVRKVRVDLLGRISLL

SEQ ID NO: 22901 - protein, 969 aa, unidentified
  REGION 1..969: note = Cas Enzyme sequence
AELSWTLELSAADALKAIGLEPKEWKVNFKKLEGNRTNHKYLEAYGAMLSASGHDEVDLNELSAEERAQTVEEILGALGVRTEILHFDATLAGKAFEQQPAYALWHLLYSYESDNKSRTGNERLIKQLTSKFGFNRECAEILCKVHFEDDHGSLSARAIKRILPHLKEGQIYDVACDLAGYNHSHSVTAEENEARELIAALGILPKNSLRNPVVEKILNQMVHVVNKVIEVYGRPDEIRVEMARELKKSAKEREEMTKSIEDATKAHGAIRKEIAQYHPFNTGVRITRNDIVKYKLYQELKDNGFKTLYSQTPVVPEKLFGKEFDIEHIIPRSRLFDDSFSNKTLELASVNRDKDKATAMDYMEDKYGPESEQVIQYKARVERFFKKTSPAKFKKLMMKGSEIPDSFIDRDLRNTQYITRTALGMLRQVARTVTPTTGSVTDRLRQDWQLINVLQELNWSKYEKAGLTYTEKNKDGDVVRMIKDWTKRNDHRHHAMDAIAVAFTRPSHIQYLNHLNARRDENHKKHMVIQAIENKETEVDSKGRRYFKPPIPLDELRELVRKQLESTLVSFKAKNKVTTRNVNKSKTKNGHHRKVELTPRGQLHKESVYGKQQFYATKEVKVGPSLDQSTIALVAKKSHRQALLLRLYAFGCDPKKAFGGKNALDKNPIWLDEHHKEQVPEKVKLVQMGSQYTIRKPLTPDLFKDSKGNDDFLARVVDVHDGAVVNALKAHYERTRIEVEAFNLTVTNTKEKRKVLETAFSNLEGNPVWLNKAKGIRVNRVTVSGVTNAEPLHIKRDHHGNALLNAEGKEIPSSYVQTGSNHHVAIYRDAQGNLQEQPVSFYEAVARRLQDPPLPIVDRAYGADKGWTFLFTMKQNEMFVFPNKEVGFDPATVNLLDPKNAVFIMPHLYRVQKIASKNYTFRHHLETDVENRKGLNGVSYQSQLGLNAIGGIQKVRLDHLGRVVHVGEY

SEQ ID NO: 22902 - protein, 1731 aa, unidentified
  REGION 1..1731: note = Cas Enzyme sequence
MFKIMSKNILGLDLGTNSIGWALVEIDNLNRRVRIVGLGSRILTMDAAEIAKFESGAKIDSLAAQRTTKRSPRKLNERYLLRRDRLHSVLNLLHSLPEHYKLSIEFENENGKRSGKFIKGTEEKLAYYKDGRGKSQFLFMDAYYQMEVEFQSLHPDLFYNKKNGNQTQIPFDWTLYYLRHKAVTDKEFELTKEQLAWITLSFNQKRGYEKVIGQDEKIQKEGELTDAFVAKVSKINKLDNEDVYQITLVDSANDKLEIFKYKEESRIKITEIGDLKELEIISRFDEDGAIDSKKTEYIISEVREFFITDVRNTGQKRKENFVFEVELETGWVKEQQSKFTPKWKDTTRDFIIRTKYDEKGDRILKGADKGRNINIPKEEDWTLMKLKTETSITSFNAKNNTVGVASFIYYNLLQNPKQKIKGDLVTVIERDYYKKELNAIYENQKQFHSELNNRELYEQAIKLLYPNNINHQRNIKELDFNYLIKEDILLYQRDLKSKKSLISDCAYEKENYERTDEHREKKYKKPLKAIHKSNPLYQEFRLWQFVKRLKIIQKEGFINEEIKINEDVTIQLLTPKIKEELFEYLNDKEFATEKNILDFLQKKNKNLKINNNTYKWNFASEKEPCNVTRYNFILRTKRIKGLDYRSFLTFENEYNLWHFFYSVKKIDEFSKGLRNLMIKLLERSNLPLEYLDELVKNFSSFGGYTNDYGTYSEKAIKKLLPFLRLGKYWNAIVVENILKNIAHEVKEKVLLKEEINGEIEDFQGLWVSSACYLAYGRYSEVGEVQHWKSPYDIENYLKNEFRQHTLNNPIVEKVLVETLHIVKDIWKCFGKEIGKDEEGNIIYDVLFDRIHIELGREMKKNNKQKDKDDKKNKENRKANERIVELLKELKRDNISLQEKSPFQQEKLRIIEESLLSSIEYDKDTTAYKLVDGEITKKDIKDIISKEFSKISKADFERYKLWLDQRYQSPYTGKFIKLSDLFDRKKYEIEHVFPQERITLNALYNKVICESEINKEKKANTGYGFILKAKSKTVFCSAYNEAIPVLNIEEYEELVKSNFTGKKREILLSKDIPEEFTNSQLNNSQYIAKMAMKLLSNIVREKDEDTFRSKNVLATNGTITSTLKRHWKLNDTWNEIISARFKRLNEITNSNSFGDYREINGHQVFINEVPEGTNNNFDPKRIDHRHHAMDALIIVLTSENHVQYLNNISSQEKDDKEKLETRKGIKFQLTNSRKGFNDEKEWYFLPPAHLKTKDGIEEYEYLFKNDKSKIFKEIAQNALENTIASFKQRNRTIRQRSNKYLTSKDGEIELATEENLQETKNYNVRKQLHLDTFYGKVKLQDNVISMSLEKAINEKYEFVNNLLTKQISDLKTIQKKSQEEILQQLSKEYKTVQVYEKFVASRFNNDLESFSLIAADKIIKTIEAITDTGIQKILKNHLKQYDTILKKIEDIQQYVELVVDDERRNILKELFRANSKIDHITVDTKEVKETEIFIKKLNEEIDRNLIKRNPQFAFSQDGIKELNRNIKKLNNEKDHQPIYKVRIADAMGTKFPVAEQGQKSTKFVVTAPGSNSFCGFYQKGAERKFYIPTLRESVESLKQGLKPCPSTHPDDPDFVLIFVLNPKDVVYVPAEEELETTSSVDYNCLRPEQLNRIYKFTDGSGTTMNFTPLNISSLLFNLSNKEQEKLNLNLPIQNELGLGSPQSKNQNSLDGIQIKSVCIKLQIDRLGNISKA

SEQ ID NO: 22903 - protein, 1456 aa, unidentified; identical to SEQ ID NO: 19258
  REGION 1..1456: note = Cas Enzyme sequence

SEQ ID NO: 22904 - protein, 1479 aa, unidentified
  REGION 1..1479: note = Cas Enzyme sequence
MKTILGLDLGTNSIGWAKVCVDDNGNYTRDIKLGSRIIPMSQDTLSNFDKGVTESPTAARTGFRGIRRIRERVLQRRERLHRVLHVMGFLPPHYENAIGWNREEATTYGKFLDNGEPKLAWEKQEDGSMRFLFMDSFYEMMADFAKYQPGMVADGRKIPLDWTLYYLRKKALTQAIRKEELAWILLNFNQKRGYYQLRGEEEEDPTKREEYYELKVVSVEAAEEGKGGNTWYNVTLENGWIYRRQSKIELNDWVGKVRPFIVTTEYEIDGITIKKDKNGEVKRSFRAPSEDDWGLRKKRTESLLEESGKTVGAFIYNHILSEPADKIRGNFIRTIERKFYKKELEAILREQSKHHKELKDIDTLIACIKELYPNNKPHQDSLIKKDMTYLLITDLIFYQRPLKSKKSLIADCPYEYYEYVIKETGEIKRQGIKCIAKSNPYYQEFRLWQFIINLRLFDRNNDKEVTSEYLSSMEDYTRLFTYLNDRKDINQEILLKDFFKQKKVKMGMEKEFPIRWNYIEDKEKKYPCNETRHELLAALDKAGIDHSWLDDKERFYRLWHLLYSVESKEEAEGALRKLNDNEDFVNAFLKIKPFKKEYGAYSEKAIKKLLAVMRMGTQWNEDDICEQTRNRIQSIINGVIDEKIKERMGRTFSQLSDFQGLPEWLACYVVYGRHSETTDIQRWTKPENLMSYIKGFKQHSLRNPIVEQCILETLRTVHDIWKEAGHIDEIHIELGRSMKSTAYQRACMSKSILQNENTNLRIKSLLMELKNAKEFENVRPYSPMQQEILRIYEEGALQELTKEDDQYPEISKISQMAQPSAKELLKYRLWLDQKYCSPYTGKPISLSKLFTSAYQIEHIIPQSRYFDDSFSNKVICEAEVNQLKSNMLGYEFIKKHSGEIVHCTMVGDVKILDAKEYYNFVTEHYANNRRKKENLLLEDIPQEFLNRQMNDSRYISKKVMALLSNIVREEGEQEAKSKFVIACSGGITDRLKHDWGLNDVWNSIVYPRFERLNKLTNTENFGRWENKEGKQVFQTSLPLELQRSFSKKRIDHRHHAMDALVIACASNNIINYLNNESAKSQEKREDLRKKLCDKNRIIRKPWETFTQDVRTALEDVVVSFKNYVRVINKATNYYEKYDKNGKKGIAEQKGQDMWAIRKPMHKETVFGQVNLRRRVTVKLKDALEKIPAICDKELRDYINNLVAKQFNKKQILAQFKSINYRLNMKSVDKVDVWQFSDEKEPMVATRKSVDTSFDTKRIATITDTGIQKILRNYLNAKDNDPNIAFTPEGIAEMNKHITEYNNGKQHQPILKVRVSEPKGAKYQVGETGNKTSKFVEAQKGTNLYFAIYEDKEGNRSYSTIPLNEVIERLKQGLSPAEDLNKRGEKLKFYLSPNDLVYVPTEEEKLSSECKLNKDRIYKMVSATSNQCFFTPHRTANSIVNKVEYSPLNKMEKTIWGEMIKAVCWKLEVDRLGNILKIIK

SEQ ID NO: 22905 - protein, 1480 aa, unidentified
  REGION 1..1480: note = Cas Enzyme sequence
MKTILGLDLGTNSIGWAKVCVDDNGNYTREIKLGSRIIPMSQDTLSNFDKGVTESPTAARTGFRGIRRIRERALQRRERLHRVLHVMGFLPPHYENAIGWNREEATTYGKFLDNAEPKLAWEKQEDGSMRFLFMDSFYEMMADFAKYQPGLVADGRKIPLDWTLYYLRKKALTQAIRKEELAWILLNFNQKRGYYQLRGEEEEEDPTKREEYYELKIVSVEAAEEGKGGNTWYNVTLENGWIYRRQSKIELNDWVGKVRPFIVTTEYEIDGITIKKDKNGEVKRSFRAPSENDWGLRKKRTESLLEESGKTVGAFIYDHILSEPADKIRGNFIRTIERKFYKKELEAILREQSKYHKELKDLNTLVNCIKELYPNNKAHQDSLMKKDMIYLLITDLIFYQRPLKSKKSLIADCPYEYYEYVIKETGEIKRQGIKCIAKSNPYYQEFRLWQFIINLRLFDRTNDKEITSEYLSSMEDYTRLFTYLNDRKEINQEFLLKDFFKQKKVKMGMEKEFPIRWNYIEDKEKKYPCNETRHELLAALDKAGIDHSWLDDKERFYRLWHLLYSVESKEEAEGALRKLNDNEDFVNAFLKIKPFKKEYGAYSEKAIKKLLAVMRMGDLWNETDICEQTRDRIQNIIKGDIDEKIKDRMGRTFSQLSDFQGLPEWLACYVVYGRHSETTDIQRWTKPENLMSYIKGFKQHSLRNPIVEQCILETLRTVHDIWKEAGHIDEIHIELGRSMKSTADQRARMSKSILQNENTNLRIKSLLMELKNAKEFENVRPYSPMQQEILRIYEEGALQELTKEDDQYPEISKISQMAQPSAKELLKYRLWLDQKYCSPYTGKPISLSKLFTSAYQIEHIIPQSRYFDDSFSNKVICEAEVNQLKSNMLGYEFIKKHSGEIVHCTMVGDVKILDAKEYYNFVTEHYANNRRKKENLLLEDIPQEFLNRQMNDSRYISKKVMALLSNIVREEGEQEAKSKFVIACSGGITDRLKHDWGLNDVWNSIVYPRFERLNKLTNTENFGRWENKEGKQVFQTSIPLELQKGFSKKRIDHRHHAMDALVIACASNNIINYLNNESAKSQEKREDLRKKLCDKNRIIRKPWETFTQDAHTALENVVVSFKNYVRVINKATNYYEKYDKNGKKGIAEQKGQDMWAIRKPMHKETVFGQVNLRRRVTVKFKDALEKSPAICDKELRDYINNLVAKQFNKKQILAHFKSINYRLKMKYVDKVDVWQYSDEKESMVATRKPIDTSFDAKRIATITDTGIQKILLNYLETKDNDPNIAFTPEGIAEMNKHITEYNNGKQHQPILKVRVSEPKGTKYQVGETGNKTSKFVEAQKGTNLYFAIYEDKEGNRSYSTIPLNEVIERLKQGLSPAEDLNKLGEKLKFYLSPNDLVYVPTEEEKLSSECKLNKKQIYKMVSSTGNKCLFVPYSIAKPIYDKFEFEAMNKMGRTLTGEMIKDICWKLEVDRLGNILKVIK

SEQ ID NO: 22906 - protein, 1044 aa, unidentified
  REGION 1..1044: note = Cas Enzyme sequence
DEVITKLKQEIIYYQRKLKSQKGLVSICELEGFETQITDKETNQEKIKFVGPRVAPKTSPLFQLCKIWEVVNNISLKTKNPEGSKNKWGDRTPTLAEKIEIVNHLSINENLNLIQLLRILKLKKEQVYANKQLQKGIQGNITYASIQKIVGESEFLKFEPTIVSLPDKANLVDKKTGEVIEQLNGFIISDAIEKEPFYQLWHTIYSIKDMDECRNALIKRFKFTEDIAEKLSRLDFNKQSFGDKSNKAMRKILPYLMKGYNYYEATTLAGYNHSKSLTKQEQEDRETKDRLELLPKNSLRQPVVEKILNQMINVVNAIIDKYGKPTTIRVELARELKQSKDERESSDKQNGFNKKLNELVANRLTELGLPSTKRYIQKYKFIFPAKDKNWKEADVVNQCIYCGQSFNLTDALSGDNFDVDHIVPKALLFDDSQTNKVLVHRKCNSDKLAQTAYDYIAKKGAKELDSYILRVDDWFARGIISYPKMQRLKVSFEEYQERKAAKKETEADKKIWESFIDRQLRETAYISRKATELLSKICNQVTTSEGGVTAKLRSLWGWDDVLMNLQLSKYKEIGQTQLKEWTSEHGKRKHQKEEIANWTKRDDHRHHAIDALVVACTKQGFIQRINTLNASEVRNEMNREVEQSKIDFKEKNTLLEKYLITQKPFGTKDVELEADKILVSFKTGKKVSTISRYKATGKNKETGVIVPRGALHEQFVYGKIKVNDAKKSLKFLFSNPSKIINSEIRNLVLQRLEANDNDPKAAENSCKKDPLYLDAERTILIENADCFKDEYVIKYKIQDLKTKDVPFIVDEKVKSIVKAQLDKFGGKEKEAFKETVWFNKAKQIPIRTVRCFTGLSAVEAIKKDDTGKEIGFAKTGNNHHIAIYKDKDGKQIQHICTFWHAVERKKYGIPPIVKNTSSLWTEVLKNELPQSFLDKLPPDNLELGFSMQQNEMFILGLSKEDAENAIKNGDYSLLSKYMYLVWSISENNYWFRHHLETKNSELKVIEGTKESKRYYNIRSIGAFIALNPIKVRLNHLGDITKIGE

SEQ ID NO: 22907 - protein, 1438 aa, unidentified
  REGION 1..1438: note = Cas Enzyme sequence
MATIILGLDLGTNSIGWSIRDTEAIEDNQIIDYGVTVFRKGVGDGKSGEFSLAAERRKNRGKRRLYNAKRYRKWELLKVLIENGICPLTKDELRLWSIGNWHVIDGKNKNLGRIYPIENKLFLQWLAIDPIYFGEKGVSENGKPIRKNPYDIRCELIEKFEENERTRNYKIGRALYHLVQRRGFKSNRKSGKSTYAENKELEQLKTENPNFQIALLAKERLDKGERFRASGVIQRKYFEDEFYAICKAQNIGDALTDKLHKAIYFVRPLRTQKGLIGTCTLEKGKPRIPISHPKYEEFRALQFINNIQWRETGTRNFSPIPMQLKKRIFEELFFRKLEKGANKGKVSTKDYFGFEEIVKQYSENHTYEFNFAKYNTKKLREEGKYELTKNPSVSTCPVIAGLMNVFAETWQNKFIEDENRIGINWCGLSLHYKIKYVTKKENGKGLRKKGDKFIPKEIGEERVLHCEEIWHLLFDFLQTRDKEEELKRFCKDVLGWNDETTDQFADIGIQQGYGSLSYNAISKILPFLQQGYIYTTAVLYANLQQVLGDKYESHNGEAQRVITRTKREIDTIKEKFDLVNGLIQKTFVELGAANAKTISDHKIDTAHSDALDYLKMYFGTDEWEKIPENDRQNYIADITDLYWKFLEGIQAKEEKASAKENYEPERDYYRLPRLDDAIKYNLRQTFNISDTKLQRLYHPSDIEIYSHTSVKDKDVIIDDKKRIVKQLGSPQPPSKGWKNPMAMRTMHELRKLLNYLLSIGKIDPETKIVIEMARELNDANRRWAIENYQRYREEENKEFAKAIIGVAKEKYPNIDENSIDNINQVRLWWEQIPNNEEIYKQVKALKEDVDKYRLWKEQECQCLYTGKTLSITDLFDGTKTNIDHTLPLSDSFDNSLSNKTVTDAYYNQQIKKDKLPTQLENYDHDAIGYTAIKPRLNKWEEKVKHLQELIEDNKLRTKKAQDPETKKDNIQKRRLKELELEYCEKKLRTFTLKEIPNTWKNSQLVDTQIISKYARAYLKTLFEKVDVQKAKVVNDFKMIYQIKGDEQKDRSKHSHHAIDAATLTLIPGSARREAILKEYYWARGHNKTYHVPPYKDFQTMHVLNIENDVLINHADKDKTLVPTFKKIRKRGKLQHTANGTEMIMQGDSIRGQLHDETYLGAIKPQKQNEQGFPIKENDKYVTRTDDKTGEEEIWLVVRKSIEKAKLDQIIDHPLRDKIQGQLNQGVNIQDVVDFNGKKIRHVRCKINTTSFDKALQIKKHLFLSKSEHKKFYKADNTENYLCVWYEGIDEKEKSIFAFRFISLFEYSQLKNKDIKSNLEYSNYVKMARKKETILSIKHIFKAGNKVILYNDSIEEIDRTNPPINHIYKVYKFNNSGADYIFLQNVLEARPDKELGDGDTLFVPEKYQPRLKLTASNFNCLTEGKDFEIKPDGQIVFKE

SEQ ID NO: 22908 - protein, 1038 aa, unidentified
  REGION 1..1038: note = Cas Enzyme sequence
GLMNVFAETWQNKFIEDENRIGINWCGLSLHYKIKYVTKKENGKGLRKKGDKFIPKEIGEERVLHCEEIWHLLFDFLQTRDKEEELKRFCKDVLGWNDETTDQFADIGIQQGYGSLSYNAISKILPFLQQGYIYTTAVLYANLQQVLGDKYESHNGEAQRVITRTKREIDTIKEKFDLVNGLIQKTFVELGAANAKTISDHKIDTAHSDALDYLKMYFGTDEWEKIPENDRQNYIADITDLYWKFLEGIQAKEEKASAKENYEPERDYYRLPRLDDAIKYNLRQTFNISDTKLQRLYHPSDIEIYSHTSVKDKDVIIDDKKRIVKQLGSPQPPSKGWKNPMAMRTMHELRKLLNYLLSIGKIDPETKIVIEMARELNDANRRWAIENYQRYREEENKEFAKAIIGVAKEKYPNIDENSIDNINQVRLWWEQIPNNEEIYKQVKALKEDVDKYRLWKEQECQCLYTGKTLSITDLFDGTKTNIDHTLPLSDSFDNSLSNKTVTDAYYNQQIKKDKLPTQLENYDHDAIGYTAIKPRLNKWEEKVKHLQELIEDNKLRTKKAQDPETKKDNIQKRRLKELELEYCEKKLRTFTLKEIPNTWKNSQLVDTQIISKYARAYLKTLFEKVDVQKAKVVNDFKMIYQIKGDEQKDRSKHSHHAIDAATLTLIPGSARREAILKEYYWARGHNKTYHVPPYKDFQTMHVLNIENDVLINHADKDKTLVPTFKKIRKRGKLQHTANGTEMIMQGDSIRGQLHDETYLGAIKPQKQNEQGFPIKENDKYVTRTDDKTGEEEIWLVVRKSIEKAKLDQIIDHPLRDKIQGQLNQGVNIQDVVDFNGKKIRHVRCKINTTSFDKALQIKKHLFLSKSEHKKFYKADNTENYLCVWYEGIDEKEKSIFAFRFISLFEYSQLKNKDIKSNLEYSNYVKMARKKETILSIKHIFKAGNKVILYNDSIEEIDRTNPPINHIYKVYKFNNSGADYIFLQNVLEARPDKELGDGDTLFVPEKYQPRLKLTASNFNCLTEGKDFEIKPDGQIVFKE

SEQ ID NO: 22909 - protein, 1432 aa, unidentified
  REGION 1..1432: note = Cas Enzyme sequence
MKKILGLDLGSNSIGWALVNEAENRDEASSIIKLGVRVNPLTVDEMQNFEKGKSITTNADRTLKRSMRRNLQRYKLRRDALIKLLKKVGFIADGTILSEQGNRSTFETYRLRAKAPDEEISLQELARVLLMINKKRGYKSSRKIKEKEAGTLIDGMKVAKKLYDEDLTPGQLCLQLLESGKKSLPDFYSSDLQEEFDRIWNFQKQFNPKAFCDTAKEEIKGKNKSQTWAILAKYFIWTDEMVVWNEKESKTERVEKECKLVGLKRTVKKEEQRKENYRWRVQALTEQLDLGKVAVVLQEINGQISTSSGYLGAISDRSKVLYFNRQTVGQYQMAELEKNPNTSLRNMVFYRQDYLDEFDKIWEKQAEFHKELTVELKKEIRDIIIFYQRRLKSQKGLIGFCEFENREIMVEKNGKMQAKVVGCKVIPRSHPLFQEFKIWQTLNNVEVFAGEKKCKRKRTDAFPGLFDGTEDTLMVEGWRYLYQEEKEILAKELSVKKSLKKEYILKLLFDNPQDLDMNFEQIEGNDTGNVLFSAYSKMIEKYGYEPLDFGKSTDEIIERLQVIFTDLGWNTDLLFVDLNKEGKDLEKQPYFKLWHLLYSFEGDNTPTGNGKLVEKLMELCHVGKECALELVNISFQNDYGSLSAKAIKKILPYLKEGNRYDVACGYAGYRHSKSSLTKEEIENKVLKDKLDILPKNSLRNPVIEKILNQMVNVINAIIDTYGKPDEIRVELARELKKSAKERDELTKAIAKSTREHEEIRKVLQEEFGMINVSRNDIIRYKLYEELKDNGYKTLYSNQYIPKEKVFSKEIDIEHIIPQARLFDDSLSNKTLEYKAINIEKGNKTAYDFVKEKYGEKGLQQYLNRCESLFKGHRTKLRKLKMGQENIPEGFIDRDLRNTQYIAKKALAMLNEICRRVVATTGSITDRLREDWQLVDVLKELNLPKYETLGLVEVYEDKDGRKIKRIKDWTKRNDHRHHAMDALTVAFTKDVFIQYFNNKNAAWQADCKEHSDIIGIKTRYFENGRALPPMPLVRFRAEAKSHLETLLVSIKAKNKVVTNNVNCTKRKGGENKKLQQTPRGQLHLETIYGSHRQYVMKEEKVNASFDSSKIATVCKQAYRNALLERLAAFGNDPKKAFTGKNSLEKNPVYLDREQTARVPERVRTVELETVYTIRKPVDPNLSVDKVVDAKVRSILEQRLREYDGEAKRAFVNLDENPIWLNEEKGIAIKRVTIRGINKVQSLHGKKDKNGNLILDETGKKIPVDFVNTGNNHHVAIYRKPVLDKTGQEMLDNEGNPVYELDEVVVSFFEAVTRVNLGLPVIDKNYNKSEGWQFMFTMKQNEYFVFPNEKTGFDPKEVDLLNPENYAVISPNLFRVQKITEKDYMFRHHLETKVVDDKFLKEITWKRILTPNKLEGIVKVRVNHIGQIVSVGEY

SEQ ID NO: 22910 - protein, 1424 aa, unidentified
  REGION 1..1424: note = Cas Enzyme sequence
MKRILGLDLGTNSIGWALVNEAETDEEVSSIIRLGVRVNPLTVDETQNFEKGKSITTNAERTLKRSMRRNLQRYKLRRDALVEFLKELGFITDETILSEQGNRTTFETCRLRAKAAEEEISLEELSRVLLMINKKRGYKSSRKVKKEEDGVLIDGMEIAKKLYEEDLTPGQLCSQLLESGKKVLPDFYRSDLQEELDRIWSVQKQFHPDVFCDAAKEEIKGKNRSQTWAILANYFVWKEEVVGWNDREAKNETIEKECKLVGLKRTTKGYELKKENYRWRAQALTEQLGLEEIAVVLQEINGQINASSGYLGAISDRSKVLYFNHQTVGQYQMAELDKNPHASLRNMVFYRQDYLDEFDRIWEKQAEFHKELTAELKKEIRDMIIFYQRRLKSQKGLISFCEFERLEIVVEKDGKKQTKVIGCKVIPRSHPLFQEFKVWQTLNDIKVLGREKKRNALSASESRALYPEEKEILARELAIKENMKKADVLKLLFENPQELDLNFKQIDGNRTGFSLFSAYSKMIEKYGYEPLDFKKPADEIIGQLRTIFTDLGWNTNLFTIDLTKEGKELEMQPYFRLWHLLYSFEGDNTSTGNGKLIEKIMQLCGVEKEYAVELASLSFQDDYGSLSAKAIKRILPYLKEGNLYDVAFEYAGYRHSKSSLTKEEIENKVLKGKLEVLPKNSLRNPVVEKILSQMVNVINTIIDTYGKPDEIRVELARELKKSAKEREELTKAIAKSTREHEEIRKLLQDEFGMMNVSRNDIIRYKLYEELKDNGYKTLYSNQYIPKEKIFSKEIDIEHIIPQSRLFDDSLSNKTLEYKAINIEKGNKTAYDFVKEKYGEEGLQQYINRCESLFNDKKAKLRKLKMEQKDIPDGFIDRDLRNTQYIAKKALAMLNEICRRVVATTGSITDQLREDWQLVDVMKELNLPKYEALGFVETYEDKDGRKIKRIKDWTKRNDHRHHAMDALTVAFTKDAFIQYFNNKNAAQDSGNRNHTNIIGIKTRYFDKGRALPPIPLEQFRIEAKQHLEKLLVSIKAKNKVVTVNVNRTKKRKGENTKIQQTPRGQLHLETVYGSHKQYVTKIEKVNASFDAAKIATVSKRAYRNALLKRLETFGNDPKKAFTGKNALEKNPLYADKYQTIRVPEKVQTVEFETIYTIRKPVDPALNVDKVVDVKVRAILERRLKEYGGDPKKAFVNFWENPIWLNKEKGISIKRVSIRGINNAQSIHVKKDKNGNPIWDENGKQIPVDFVNTGNNHHVAIYRKPVLDKKGQVTFDEDGNLMYELDEVVVPFFEAVTRANLGLPIIDKDYRKSEGWQFLFSMKQNEYFVFPNEKTGFNPKEVDLLNPDNYAMISPNLFRVQTMSKVMYGNNVVRDYKFRHHLETTVKDMKELKDIAYKQYKTLSFGNSVVKIRINHIGQIVSVGEY

SEQ ID NO: 22911 - protein, 1520 aa, unidentified
  REGION 1..1520: note = Cas Enzyme sequence
MKKIVGLDLGTNSIGWALINAYIDEYNKEHLYGIEACGSRIIPMDAAILGNFDKGNSISQTADRTSYRGIRRLRERHLLRRERLHRILDLLGFLPKHYSDSLNRYGKFLNDIECKLPWVKDETGSYKFIFQESFKEMLANFTEHHPILIANNKKVPYDWTIYYLRKKALTQKISKEELAWILLNFNQKRGYYQLRGEEEETPNKLVEYYSLKVEKVEDSGERKGKDTWYNVHLENGMIYRRTSNIPLDWEGKTKEFIVTTDLEADGSPKKDKEGNIKRSFRAPKDDDWTLIKKKTEADIDKIKMTVGAYIYDTLLQKPDQKIRGKLVRTIERKYYKNELYQILKTQSEFHEELRDKQLYIACLNELYPNNEPRRNSISTRDFCHLFIEDIIFYQRPLKSKKSLIDNCPYEENRYIDKESGEIKHASIKCIAKSHPLYQEFRLWQFIVNLRIYRKETDVDVTQELLPTEADYVTLFEWLNEKKEIDQKAFFKYPPFGFKKTTSNYRWNYVEDKPYPCNETHAQIITRLGKAHIPKAFLSKEKEETLWHILYSIEDKQEIEKALHSFANKNNLSEEFIEQFKNFPPFKKEYGSYSAKAIKKLLPLMRMGKYWSIENIDNGTRIRINKIIDGEYDENIRERVRQKAINLTDITHFRALPLWLACYLVYDRHSEVKDIVKWKTPKDIDLYLKSFKQHSLRNPIVEQVITETLRTVRDIWQQVGHIDEIHIELGREMKNPADKRARMSQQMIKNENTNLRIKALLTEFLNPEFGIENVRPYSPSQQDLLRIYEEGVLNSILELPEDIGIILGKFNQTDTLKRPTRSEILRYKLWLEQKYRSPYTGEMIPLSKLFTPAYEIEHIIPQSRYLDDSLSNKVICESEINKLKDRSLGYEFIKNHHGEKVELAFDKPVEVLSVEAYEKLVHESYSHNRSKMKKLLMEDIPDQFIERQLNDSRYISKVVKSLLSNIVREENEQEAISKNVIPCTGGITDRLKKDWGINDVWNKIVLPRFIRLNELTESTRFTSINTNNTMIPSMPLELQKGFNKKRIDHRHHAMDAIIIACANRNIVNYLNNVSASKNTKITRRDLQTLLCNKDKTDNNGNYKWVIDKPWETFTQDTLTALQKITVSFKQNLRVINKTTNHYQHYENGKKIVSNQSKGDSWAIRKSMHKETVHGEVNLRMIKTVSLNEALKKPQAIVEMDLKKKILAMLELGYDTKRIKNYFEENKDTWQDINPSKIKVYYFTKETKDRYFAVRKPIDTSFDKKKIKESITDTGIQQIMLRHLETKDNDPTLAFSPDGIDEMNRNILILNKGKKHQPIYKVRVYEKAEKFTVGQKGNKRTKFVEAAKGTNLFFAIYETEEIDKDTKKVIRKRSYSTIPLNVVIERQKQGLSSAPEDENGNLPKYILSPNDLVYVPTQEEINKGEVVMPIDRDRIYKMVDSSGITANFIPASPANLIFALPKATAEIYCNGENCIQNEYGIGSPQSKNQKAITGEMVKEICFPIKVDRLGNIIQVGLCILTN

SEQ ID NO: 22912 - protein, 1436 aa, unidentified; identical to SEQ ID NO: 16870
  REGION 1..1436: note = Cas Enzyme sequence

SEQ ID NO: 22913 - protein, 973 aa, unidentified
  REGION 1..973: note = Cas Enzyme sequence
LEKAGISSTFLSTKIEESLWHILYSVEDRIELETALRTFASKYQLSCNFVEVFKKFPPFKKEYGAYSAKAIKRLLPLMRMGKYWKVDAIDGNTAERIEKILSGECDEKILNKVREKTIHLSETSDFQGLPLWLACYVVYNRHSEGKEVAKWKSPEDIDIYLKSFKQHSLRNPIVEQVITETLRVVRDIWKRVEQIDEIHVELGREMKNPSEKRRQMTERMLENENANIRIKALLTEFMNPEYEMENVRPYSPSQQEILRIYEDTVLNGAGDIPEDIEIILKKFKENDIKKRPGKSDFLRYKLWLEQQYRSPYTGEIIPLGKLFTTAYEIEHVIPQSRYFDDSFSNKVICESEVNKLKDNMLGYEFIKKHAGEIVELGFGKSVKIFSVEAYERFVGENYYKAGSKKSKLLMDDIPEKFIERQLNDSRYISRVVKGLLSNVVREEDANGEYESEAISKNVIVCSGSVTDRLKKDWGVNDVWNNIVYSRFERLNRLTESQQFGHWENREGKRFFQTELPLEYQKGFSKKRIDHRHHAMDAIIIACATRNHVNYLSNESASKHARIARYDLQRMLCDKSKADGGGNYKWIIQKPWATFTQDVYRTLLDIIVSFKQNLRVINKMTNYYQAYDDAGKKVFKKQKKGDSWAIRKSMHKDTVFGQVNLRKIKEVRLSVALESPEKIVDKKIKEKVLQLFAYQYDKKKIEKYFKENASLWKEVNLAKIPVYYFTDESSELLVAVRKNLDTGFTEKKIRESVTDTGIQKILLNHLSNKGDKPELAFSPDGIDEMNRNLVILNGGKPHQPIYKVRVCEPLGNKFKVGTNGNKSAKYVEAAKGTNLFFAIYETDAGKRTYETIPLNVVIEREKMGWLPVPEKNNKGEKLLFWLSPNDLVYLPTEEELMSRILSDKLDRGRIYKIVSFTGNRLYAIPYNVSNMIWDKNEYTQLNKVESTDMKESIKEICMPINVDRLGHITEIIIK

SEQ ID NO: 22914 - protein, 1507 aa, unidentified
  REGION 1..1507: note = Cas Enzyme sequence
MKKILGLDLGTNSIGWALLNAQELENGNGFVFDHIERAGSRIIPMDAAILGDFDKGNSKSQTSERTRFRGVRRLRERHLLRRERLHRVLNLLGFLPGHYLREIDFENHPGKFIASVEPKLPWVKNISGQFEFLFNSSFEEMLNDFKNSQPQLVADGRKIPYDWTIYYLRKKALHEKISKEELVWLLLNFNQKRGYYQLRGEDEEEDRSKRVEFHALKVLSVKATDQKKGKDVWYEVTLENGWIYRRASSLPLDWEGKVKEFIVTTDIAEGGTPKMDKDGNVKRSFRAPKEDDWTLLKKKTEADIEQSNKTIGTYIYDTLLQDPFQKIRGKLIRTIERKYYKAELEAILRKQKEYHQELNSPDVYKKCIEHLYPNNEPHRENIANKDFVYLFLDDIIFYQRPLKTKKSLISDCPFEYRRYKDPKTGEEKISTIKCIAKSNPLYQEFRLWQFISNLRIYQREKEINGQLKIDVDITSEWLKSEEDYAALFEWLNDRKEIKQDTLIQSYFKQKKIKGQTTFPFRWNYVEEKIYPCNETRASILSRLENANISSGFLTKEREVALWHILYSVEDKYEIIKALRTFKEKNQLDDTFVDAFCKFPPFKKEYGAYSEKAIKKLLPLMRRGKFWSESSIDSYTQTRIEKIITGEVDATILERVRDKAIHLSNVTHFQGLPVWLASYVVYNRHAEAQEVIKWQTAEEMDVYINAFKQHSLRNPIVEQVILETLRTVRDIWKEAGQIDEIHVELGRQMKNPKDKRAQMTEQALENENTNLRIKQLLTEFLNPEYEIENVRPYSPMQQEIFRIYEDCALNNSMEVPDEILDVVKKFKEADVKKRPGKSEIMKYKLWLEQKYRSPYTGEIIPLGKLFTPAYEIEHVIPQSRYFDDSFSNKVICEAEVNKLKSNQLGYEFIKNHHGEKVTLGFGKSVEIFSVSAYEEFIKQNYNGLKNRGKMKKMLMEDIPEAFIERQLNDSRYISKVIKGLLSNVVREKDEQDAISKNVITCTGGVTDRLKKDWGINDVWNDIVLPRFERLNRLTDSKQFTRYNERIQKYIPDMPLDLQKGFNKKRIDHRHHAMDAIVIACATRNIVNYLNNESASKRSKFSRYDLQHLLCEKRHTDDKGNYTWLVKKPWESFTQDTRLALENIVVSFKQNLRVINKATNSYQHYDESGKKIFKKQIKGNNWAIRKPMHKETVFGNVNLRKVKYVRLSVALDTPAMIVDKLLKSKVKELLSLKYEKKKIEKYFKENVDDWKEYDFTKVAFYYYTNDTKDRLVAVRKPLDASFNIKKIEESVTDTGIRKILLKHLANNEEKADLAFSSDGIDDLNRNIRMLNDGKEHQPIYKVRVYELQGNKFNVGVTGNKSSKYVEAAKGTNLFFVIYETEEGKRSYESIPLNIVIERQKQGLLSVPEIDENGNKLLFWLSPNDLVYVPSEDEVVNGRIADCLDKNRIYKIVSFTGKRLYGIPYSVANVIVDKFEFSLLNKIEFIGEKEICIPVKISRLGRVLSVGKRL

SEQ ID NO: 22915 - protein, 1467 aa, unidentified
  REGION 1..1467: note = Cas Enzyme sequence
MDAAILGDFDKGNSISQTAERTRFRGVRRLRERQLLRRERLHKVLKILGFLPEHYLKGIDFEKHTGKFLSGSEPKLPWVKDRWGKYSFLFQTAFNEMLADFAKHQPSLVFDGKKIPYDWTVYYLRKKALTEMISKEELAWILLNFNQKRGYYQLRGEEEEDNAGKSVEFYALKVLSVEATDEKKGRDIWYNVHLENGWVYRRSSNVPLDWEGRVKEFIVTTDLNPDGTPKLDKYGEVKRSFRAPKEDDWMLIKKRTEADITGTHKTIGSYIYDALLQEPQQKIIGKLVKTVERKFYKEELNFILQKQCAFHAELQDRDLYMRCIEALYPGNEVQRRNIANRDFIYLLIDDVLFYQRPLKTKKSLIANCPYEENEYVNRKTGEIKTAPLKCIAKSHPLFQEFRLWYFLSNIRVYQKEREVNGTLHLDVDVTTEFLKTEDDYVALFDWLNSRKEIDQKAFLRYPAFGLKKEINNYRWNYVEDKFYPCNETRHAILSRLEKAGIGIDFLSDEKETALWHILYSVSDKQEIEKALATFAVKNGLNESFVEVFKKFPPFKSEYGAYSAKAIKKLLPLMRCGKYWDMSLIDGTTKERIERIIAGECDESIGAKVREKAMNLSDISCFKRLPLWLACYVVYNRHSEDKEITKWETPADIDAYLAAFKQHSLRNPIVEQVITETLRVVRDIWKQVGKIDEIHIELGREMKNPADKRKRMTTQILENENANLRIKALLAEFVNPEYGVENVRPYSPSQQEILRIYEDAVLKGEEQIPEDIDVILKKFNTSKLPTKSEFLRYKLWLEQKYRSPYTGELIPLAKLFTAAYEIEHVIPQSRYFDDSFSNKVICESAVNKLKDNQLGYEFIKNHHGQKVEVGFGKTVEIFSVDSYERFVKEQYAKSGIKMKKLLMDDIPEQFIERQLNDSRYISKVVKGLLSNIVREKNDSGEYEPEAVSKNILVCTGSVTDRLKKDWGMNDVWNSIVSPRFERLNALTETQCFGHWENKDGKKVFQTAVPLEYQKGFSKKRIDHRHHAMDAIVIACATRNHVNYLNNESASRNAKISRYDLQRLLCDKSRGDGNGNYRWIIKKPWTTFTQDAREALSGIIVSLKQNLRIINKTTNIYQHFDANGTRVYEKQKIGDSWAIRKPMHKDTVFGAVNLRKVKVVRLSVALDTPSMIVDKRVKNKVLELLSYKYDKKKIEKYFKENAFLWKELDIAKVAVYYFTENTTEPLVAVRKSLDSTFNEKKIASVTDTGIQKILLNHLKSKEGKAELAFSAEGIEEMNRNLLQLNDGKGHQPIYKVRVYEPRGNKFKVGVLGNKGAKWVEAAKGTNLFFAIYITEDGNRTYETIPLNWVIEREKQGLVPVPDRNEKGDKLLFWLSPNDLVYLPTEEERDFGRINEPIDRGRIYKMVSSSGNQCFFIPQSISNAIISTKELGSNNKAEKSWDGEMIKNICIPVKVDRLGRIIEVKYRVNE

SEQ ID NO: 22916 - protein, 1504 aa, unidentified
  REGION 1..1504: note = Cas Enzyme sequence
MKNIVGLDLGTNSIGWAVVNGSVNDDGSEQLVKIQASGSRIIPMDAAMIGDFNKGNSISQTAERTRLRGVRRLSERYLLRRERLHRILDILGFLPFHFAQDLDRHGKIVKGKEPKLAWRKNEAGQFEFIFQDSFKEMLEDFKLNYPNLITDDKKVPYDWTIYYLRKKGLTSKISKEELAWILLNFNQKRGYYQLRGEEEEENKDKLVEFYALKVVAVEDSGEKKGKDIWYNVHLENGWVYRRTSNMSLDWVGKTKEFIVTTDLEKDGTPKKDKEGNVKRSFRAPKEDDWSLVKKKTEADIDQTHKTVGAYIYDTLLGNPSQKIRGRLVRTIERKYYKEELKLILEKQKEFHLELQDRALYAACIEELYPINEAHRNNVGNRDFTYLFLEDILFYQRPLKSKKSLIDNCPYEENHCLDKETGEIKSFPVKCIAKSHPLFQEFRLWQFIVNLRIYRKGLAQDVDVTNELLKTEEDYVALFDWLNGKKEIDQKAFLKYPLFGLKKEVENYRWNYVQDKPYPCNETRSLMLARLEKCDISIEFLTKENEEALWHILYSVEDKNEIVKALQKFADKHDLNASFVDVFRKFPPFKKEYGSYSAKAIKKLLPLMRMGKYWSENSIDKGTRERIDKIITGEYDEKIENRVREKAIHLADVSDFKGLPLWLVCYIVYGRHSEAKEIIQWKSPADIDSYLRSFKQHSLRNPIVEQIIIETLRVVRDIWKQVGNIDEIHVELGREMKNPADKRKKMTQQMSENENTNLRIKYLLTEFLNPEYEVENVRPYSPSQQDILRIYEEGVLNSVSDLPEEISDILKKFTETDLKKRPSRSEVLRYKLWLEQKYRSPYTGEVIPLGKLFTPAYEIEHVIPQSCYFDDSFSNKVICEAEVNKLKSNLLGHEFIVKHHGEIVELPFGKKVRIFTVDEYEQFVKDNYSRTRGKMKKLLMDDIPEEFVTRQLNDSRYISKVVKSLLSNIVREKGEEEAISKNIIPCTGGVTDRLKKDWGINEVWNKIILPRFQRLNELTGTNKFTTKNVGIQEIPTMPLELQKGFNKKRIDHRHHAMDAIIIACANRNIINYLNNESATAKAELSRYDLQKMLCDKAKTDNNGNYKWVIRKPWASFTQDTYLALENIIVSFKQNLRVINKATNRFLHYNEEGKKIFVKQGKGDNWAIRKSMHKDTVFGEVNLRRIKTVALNEAMKNPQSIVVKDFKRKLLELWNLGFDAKRIKKYFEDNRETWSDINLSKIEVYYFSKDTKDRFFATRKPLDTSFDRKKIENNITDTGIQKILLRHLELKDNNPDIAFSPDGIDEMNRNIIQLNNGKYHQPIIKVRWYEQADKFAVGQTGNKSSKFVEAAKGTNLFFAVYESNILDKKTNTIIKKRNYATIPLNVAIERQKQGLPVAPEDENGNDPIFVLSPNDLVYLPTAADLANGIIAQPLDRGRIYKMVSSSGEQCFFIKHIVANVLVDKFEFSPLNKMERALTGEMIKMICIPIKVDRLGNVLESSSSYKK

SEQ ID NO: 22917 - protein, 1494 aa, unidentified
  REGION 1..1494: note = Cas Enzyme sequence
MRTILGLDLGTNSIGWAKVCVDDNGNYVREIKLGSRIIPMSQDTLSNFDKGVTDSPTAARTGFRGIRRIRERVLQRRERLHRVLHVMGFLPPHYENAIGWNREEATTYGKFLDNAEPKLAWEKQEDGSMRFLFMDSFYEMMADFAKCQPGLVADGRKIPLDWTLYYLRKKALTQAIRKEELAWILLNFNQKRGYYQLRGEEDEEDPTKREEYYELKVVSVEAAEEGKGGNTWYNVTLENGWIYRRQSKIELNDWIGKIRQFIVTTEYEKDGITIKKDKNGEVKRSFRAPSEDDWGLRKKRTESRLEDSGKTVGEFIYDHILSEPADKIRGNFIRTIERKFYKKELEAILREQSKYHKELKDLNTLVNCIKELYPNNKAHQDSLMKKDMIYLLITDLIFYQRPLKSKKSLIADCPYEYYEYVIKETGEIKRQGIKCIAKSNPYYQEFRLWQFIINLRLFDRTNEKEVTSEYLSSIEDYTRLFTYLNDRKEINQEILLKDFFKQKKVKMGMEKEFPIRWNYIEDKEKKYPCNETRHELLAALDKAGIDHSWLDDKERFYRLWHLLYSVESKEEAEGALRKLNDNEDFVNAFLKIKPFKKEYGAYSEKAIKKLLAVMRIGTQWNEDDICEQTRNRIQSIINGDIDEKIKERMGRTFSQLSDFQGLPEWLACYVVYGRHSETTDIQRWTKPENLMAYINGFKQHSLRNPIVEQCILETLRTVHDIWKEAGHIDEIHIELGRSMKSTADQRARMSKSILQNENTNLRIKSLLMELKNAKEFENVRPYSPMQQEILRIYEEGALQELTKEDDQYPEISKISQMAQPSAKELLKYRLWLDQKYCSPYTGKPISLSKLFTSAYQVEHIIPQSRYFDDSFSNKVICEAEVNQLKSNMLGYEFIKKHSGEIVHCTMVGDVKILDAKEYYNFVTEHYANNRRKKENLLLEDIPQEFLNRQMNDSRYISKKVMALLSNIVREEGEQEAKSKFVIACSGGITDRLKHDWGLNDVWNSIVYPRFERLNKLTNTENFGRWENKEGKQVFQTSVPLELQRGFSKKRIDHRHHAMDALVIACASNNIINYLNNESAKSQEKREDLRKKLCDKNRIIRKPWETFTQDVRTALEDVVVSFKNYVRVINKATNYYEKYDKNGKKGIAEQKGQDMWAIRKPMHKETVFGQVNLRRKVTVKLKDALEKVPAICNKELRDYINNLVAKQFNKKQILAHFKSINNRLNMKSVDKVDVWQFSDEKEPMVATRKSVDTSFDTKRIATITDTGIQKILRNYLNAKDNDPNIAFTPEGIAEMNKHITEYNNGKQHQPILKVRVSEPKGAKYQVGETGNKTSKFVEAQKGTNLYFAIYEDKEGNRSYSTIPLNEVIERLKQGLSPVPDTNEKGIPLKFHLSPNDLVYVPKTDEENEIKTGQIYKFVDSSGTTANFVPHRVSNLIYNVDKKIAENFCNHEIIQNEYGIGSQQSKNQKSITGEMIKAVCWKLEVDRLGNIHKIIK

SEQ ID NO: 22918 - protein, 1431 aa, unidentified
  REGION 1..1431: note = Cas Enzyme sequence
MKRILGLDLGSSSIGWALVNEAESKNERTSIVKLGVRVNPLTVDESINFEKGKSITTNADRTLKRSMRRNLHRYKLRREALIEVLKECKFITEDTILSENGNRTTFETYRLRVKALTEEISLEEFARVLIMINKKRGYKSSRKAGGAEEDTLIDGMDIARKLYDANLTPGELCLQLLSAGKKVLPDFYRSDLQNELDRIWEKQKEYYPGILTAALKEELRGKKRDAVWAICANAFVWKETYTEWNNEESKNEQIEKEHKLEGIYSKRKRDEAKKENLQWRVSGLKEKLSLEQLVIILQEINTQINNSSGYLGTISDRSKELYFNKQTVGQYLMDILDNNPNASLRNIVFYRQDYLDEFNVLWEKQAEFHKELTGELKKEIRDIIIFYQRRLKSQKGLISFCEFESRQIEVKIDGKRKIRTVGNRVIPRSSPLFQEFKIWQILNNIEVTAVGNKNKQRMQNGSNEPDDTEQLELNGRRYLYQEEKELLAKELFVRDKMTKLDVLRLLFDNPEELDLNFKTIDGNKTGYLFFQAYSKMIEMSGHEPVDFKKPIEKIVEQVKSVFVLLNWNTDILSFDSNKELDKQSYYKLWHLLYSFEGDNTPTGNGCLVQKIMDSYGLGKEFAKILANITFQEDYGSLSAKAIHKILPHLKEGNQYDVACEYAGYRHSKSSLTKEEIANKVLKDKLEVLPRNSLRNPVVEKILNQMVNVINAIIEAYGRPDEIRVELARELKKNAKEREKLTKSIAETTKTHEAHKKLLQEEFGLKNVGRSDILRYKLYKELESRGYKTLYSNTYIPREKLFSKEFDIEHIIPQARLFDDSFSNKTLEARNVNIEKGNRTAYDFVKEKFGESGTDNSLDCYLNNIEVLFVSGKISKTKYTKLKMTEQDIPGGFIERDLRNTQYIAKKALSMLNEISRCVVATSGSITDKLREDWQLVDVMKELNWEKYKALGLVEYFEDKDGKQIGRIKDWSKRNDHRHHAMDALTVAFTKEVFIQYFNNKNASLNPNTNEYAIKNKYFQNGRAIAPIPLNEFRAEAKKHLENTLISIKAKNKVITNNINKTKKRGGVNTKKQQTPRGQLHLETIYGCCRQYLTKEEKVNASFDVSKIATVSSSVYRDALLKRLQEHHNDPKKAFAGRNSLDKKPVWLDKEQIRKVPEKVKTVTFETIYTIRKEISPDLRVDKIIDSGVRKMLTGRLKEYGNDAKKAFSNLDEKPIWLNKEKGIPIKRVTISGISNAQSLHVKKDKDGKPVLDGNGRNIPVDFVNTGNNHHVAVYRRPVIDKNGQMVIDENGNLKYELEEVVVTFFDAVTRVNLGQPIIDKDYKASEGWQFLFSMKQNEYFVFPNKKTGFNPKEIDLLDADNYGLISPNLFRGQKFTHKNYVFRHHLETTIKDTSSILRGITWIDFRSSKGLDSIVKVRVNHIGQIVSVGEY

SEQ ID NO: 22919 - protein, 1509 aa, unidentified
  REGION 1..1509: note = Cas Enzyme sequence
MKTILGLDLGTNSVGWAVINSVIKEQAERIWIEMAGSRIIPMDAAVLGDFDKGNSISQTSERTRLRGARRLRERQLLRRERLHKVLNILGFLPNHYLEYIDFEKHPGKFLADAEPKLAWVKDEQGKYTFLFQAAFDEMLADFAIHQPSLVSGDKKIPYDWTIYYLRKKALTEMISKEELAWILLNFNQKRGYYQLRGEEEEDNAGKSVEFYALKVLTVEATDEKKGRDVWYNVHLENGWIYRRSSSVPLDWEGQVKEFIVTTDLNPDGTPKLDKYGEVKRSFRAPKEDDWMLIKKRTEADIANTHKTVGAYIYDTLLQKPQQKIIGKLVKTVERKLYRDELSLILQKQCAFHAELQDRALYARCVEALYPSNEVRRKNIANRDFVYLLMDDILFYQRPLKNKKSLIANCPYEENEYVDRETGEIKKAPLKCIAKSHPLFQEFRLWNFLSNIRIYQKEKEINGTLHLDVDVTAEFLKTEDDYVALFDWLNSRKEIEQKTFLKYPKFGLKKEISNYRWNYVEDKQYPCNETRHAILSSLEKANVCIDFLSNEKEVALWHILYSVSDKQEIEKALRTFAAKNGLDESFVEAFKKFPPFKSEYGAYSAKAIKKMLPLMRCGKYWDVSSIDDTTKERIKKIVTGEYDERISVKVRDKVMNLSDISCFRRLPLWLACYIVYNRHSEDKEAVKWESPADIDAYLASFKQHSLRNPIVEQVITETLRVVRDIWKQVGRIDEIHIELGREMKNPADKRKRMTAQILENENANLRIKALLAEFMNPEYEIENVRPYSPSQQEILRIYEDTVLHAEDQLPEEIDAILKKFNSSKVPTKSEFLRYKLWLEQKYRSPYTGELIPLGKLFTAAYEIEHVIPQSRYFDDSFSNKVICESAVNKLKDNQLGYEFIKNHHGQKVEVGFGKSVEIFSVDSYERFVKEQYAKSAVKMKKLLMDDIPEQFIERQLNDSRYISKVIKGLLSNIVREKNDSGEYELEAVSKNIVVCTGSVTDRLKRDWGMNDVWNSIVYPRFERLNSLTDTQSFGHWENKSGKKVFQTELPLEYQKGFSKKRIDHRHHAMDAIVIACATRNHVNYLSNESASRNAKISRYDLQRLLCDKNRTDDNGNYKWVIKKPWDTFTQDAREVLSKIVVSLKQNLRIINKTTNVYRHFDATVNRVYQKQKTGDSWAIRKPMHKDTVFGAVNLRKVKVVRLSVALDTPAMIVDKRVKNKVFELLSYKYDKKRIEKYFKENAFLWKELDLAKVAVYYFTEATTEPLVAVRKPLDSTFNEKKIKESVTDTGIQKILLNHLCTKEGKPDLAFSAEGIEEMNRNLLQLNNGKSHQPIYKVRVYEPRGNKFSVGVLGNKGTKWVEAAKGTNLFFAIYITEDGKRTYETIPLNMVIEREKQGLVPVPDRNEKGDKLLFWLSPNDLVYLPTEEEREFGRINEPIDRGRIYKMVSCTGNEGHFIPANVANPIVPVIELGSNNKAQRAWTNEMIKDICIPIKVDRLGHIIEVKYRIDE

SEQ ID NO: 22920 - protein, 1318 aa, unidentified
  REGION 1..1318: note = Cas Enzyme sequence
QKRGYYQLRGEEEEENNNKLVEFYALKVVAVEDSGEKKGKDIWYNVHLENGWVYRRTSNIPLDWVGKTKEFIVTTDLEKDGTPKKDREGNVKRSFRAPKEDDWSLVKKKTEADIDQTHKTVGTYIYDTLLGNPSQKIRGRLVRTIERKYYKEELKLILDKQKEFHPELQDRALYAACIEELYPINEAHRNNVGNRDFTYLFLEDILFYQRPLKSKKSLIDNCPYEENHCLDKETGEIKSFPVKCIAKSHPLFQEFRLWQFIVNLRIYRKDLAQDVDVTNELLKTEEDYVALFDWLNGKKEIDQKAFLKYPLFGLKKEVENYRWNYVQDKPYPCNETRLLMLARLEKCDISIEFLTKENEEALWHILYSVEDKNEIVKALQKFADKHDLNASFVDVFRKFPPFKKEYGSYSAKAIKKLLPLMRMGKYWSEDSIDKGTRKRMDKIITGEYDEKIENRVREKVIHLADVSDFRGLPLWLVCYIVYGRHSEAKEITQWKSPADIDSYLKSFKQHSLRNPIVEQIIIETLRVVRDIWKQVGNIDEIHVELGREMKNPADKRKKMTQQMSENENTNLRIKYLLTEFLNPEYEVENVRPYSPSQQDILRIYEEGVLNSVSDLPEEISDILKKFTETDLKKRPSRSEILRYKLWLEQKYRSPYTGEVIPLGKLFTSAYEIEHVIPQSCYFDDSFSNKVICEAEVNKLKSNLLGHEFIVKHHGEIVELPFGKKVRIFTVDEYEQFVKDNYSRTRGKMKKLLMDDIPEEFVTRQLNDSRYISKVVKSLLSNIVREKGEEEAISKNVIPCTGGVTDRLKKDWGINEVWNKIILPRFQRLNELTGTNKFTTKNVGIQEIPTMPLELQKGFNKKRIDHRHHAMDAIIIACANRNIINYLNNESATAKAELSRYDLQKLLCDKAKTDNNGNYKWVIRKPWASFTQDTYLALENIIVSFKQNLRVINKATNHFLHYNEEGKKIFVKQGKGDNWAIRKSMHKDTVFGEVNLRRIKTVALNEAMKNPQSIVVKDFKRKLLELWNLGFDAKRIKKYFEDNRETWSDINLSKIEVYYFSKDTKDRFFATRKPLDTSFDRKKIENNITDTGIQKILLRHLELKDNNPDIAFSPDGIDEMNRNIIQLNNGKYHQPIIKIRWYEQADKFAVGQTGNKSSKFVEAAKGTNLFFAVYESNILDKKTNTIIKKRNYATIPLNVAIERQKQGLPVAPEDENGNDPIFVLSPNDLVYLPTDDELANGIIAQPLDRGRIYKMVSSSGEQCFFIKHIVANVLVDKFEFSPLNKMERALTGEMIKMICMPIKVDRLGNVLESSSSHKK

SEQ ID NO: 22921 - protein, 1436 aa, unidentified
  REGION 1..1436: note = Cas Enzyme sequence
MKRILGLDLGTNSIGWALVNEAENKDERSSIVKLGVRVNPLTVDELTNFEKGKSITTNADRTLKRGMRRNLQRYKLRRETLTEVLKEHKLITEDTILSENGNRTTFETYRLRAKAVTEEISLEEFARVLLMINKKRGYKSSRKAKGVEEGTLIDGMDIARELYNNNLTPGELCLQLLDAGKKFLPDFYRSDLQNELDRIWEKQKEYYPEILTDVLKEELRGKKRDAVWAICAKYFVWKENYTEWNKEKGKTEQQEREHKLEGIYSKRKRDEAKRENLQWRGNGLKEKLSLEQLVIVFQEMNTQINNSSGYLGAISDRSKELYFNKQTVGQYQMEMLDKNPNASLRNMVFYRQDYLDEFNMLWEKQAVYHKELTEELKKEIRDIIIFYQRRLKSQKGLIGFCEFESRQIEVDIDGKKKIKTVGNRVISRSSPLFQEFKIWQILNNIEVTVVGKKRKRRKLKENYSALFEELNDAEQLELNGSRRLCQEEKELLAQELFIRDKMTKSEVLKLLFDNPQELDLNFKTIDGNKTGYALFQAYSKMIEMSGHEPVDFKKPVEKVVEYIKAVFDLLNWNTDILGFNSNEELDNQSYYKLWHLLYSFEGDNTPTGNGRLIQKMTELYGFEKEYATILANVSFQDDYGSLSAKAIHKILPHLKEGNRYDVACVYAGYRHSESSLTREEIANKVLKDRLMLLPKNSLHNPVVEKILNQMVNVINVIIDIYGKPDEIRVELARELKKNAKEREELTKSIAQTTKAHEEYKTLLQTEFGLTNVSRTDILRYKLYKELESCGYKTLYSNTYISREKLFSKEFDIEHIIPQARLFDDSFSNKTLEARSVNIEKGNKTAYDFVKEKFGESGADNSLEHYLNNIEDLFKSGKISKTKYNKLKMAEQDIPDGFIERDLRNTQYIAKKALSMLNEISHRVVATSGSVTDKLREDWQLIDVMKELNWEKYKALGLVEYFEDRDGRQIGRIKDWTKRNDHRHHAMDALTVAFTKDVFIQYFNNKNASLDPNANEHAIKNKYFQNGRAIAPMPLREFRAEAKKHLENTLISIKAKNKVITGNINKTRKKGGVNKNMQQTPRGQLHLETIYGSGKQYLTKEEKVNASFDMRKIGTVSKLAYRDALLKRLYENDNDPKKAFAGKNSLDKQPIWLDKEQMRKVPEKVKIVTLEAIYTIRKEISPDLKVDKVIDVGVRKILIDRLNEYGNDAKKAFSNLDENPIWLNKEKGISIKRVTISGISNAQSLHVKKDKDGKPILDENGRNIPVDFVNTGNNHHVAVYYRPVIDKRGQLVVDEAGNPKYELEEVVVSFFEAVTRANLGQPIIDKGYKTTEGWQFLFSMKQNEYFVFPNEKTGFNPKEIDLLDVENYGLISPNLFRVQKFSLKNYVFRHHLETTIKDTSSILRGITWIDFRSSKGLDTIVKVRVNHIGQIVSVGEY

SEQ ID NO: 22922 - protein, 1458 aa, unidentified
  REGION 1..1458: note = Cas Enzyme sequence
MKNKIAMTKNILGLDLGTNSIGWALIKQDFENKQGEILGMGSRIIPMSQDILGEFGKGNSVSQTAERTGYRGVRRLRERYLLRRERLHRVLNIIKFLPEHFANEIDFEKRFGKFKSDNEPKIAYNTDGFVFKNSFEEMLADFKMHQSQILKNEKGEDKLVPYDWTIYYLRKKALSQKIKKEELAWILLNFNQKRGYYQLRGEEEEENPNKLVEFYSLRIVEVTADEPQRGKTDIWYSLTLENGWVYRRASKTPLFDWKDKTRDFIVTTDLNDDGSIKKDKDGNEKRSFRAPAETDWTLVKKKTEQEIDNSHKTVGTYIYDTLLQNPKQKIKGKLVRTIERKFYKAELKQILEKQTAFHPELQNLDLYNDCVRELYKNNDAHQLTLSKKDFVHLFLEDIIFYQRPLRSQKSSISNCTLEFKEYVGKDGVEHTQYLKAIPKSNPYYQEFRIWQWMYNLNIYRKDDNENVTKEFLNSYEDLENLFVFLDGRKEIEQKALLKFLLEQKDFKGKGLTAEIEKYRWNFVEGKAYPCNETKTMISTRLSKVDNIADDFFTREIEQQIWHIIYSVNDKIEYEKALKSFARKHNLDEISFFEAFKKFPPFKSEYGSFSEKAIKKLLPLIRVGKYWSYDNIDEHSKARIDKIITGEYDENIKDKVREKAINLTTESHFRGLQLWLAQYIVYGRHSEASMIGKWNSADDLELFLKEFKQHSLRNPIVEQVITETLRVVKDIWVQYGKGAKDFFSEIHIELGREMKNTAEDRKKITNQVTENENTNLRIKALLAEMMNDANVENVRPFSPMQQEILKIYEDGVLNSDIEIDDDILKISKTAQPSSSDLKRYKLWLEQGYKSPYTGQIIPLNKLFTPEYEIEHIIPQSRYFDDSFSNKIICESAVNKLKDNYIGLAFIKQFHGTIVDCGFGKTVKIFEADEYEEFVKKHYAKNRSKKAKLLLEEIPEKMIERQMNDTRYISKFISGVLSNIVRVEDGTDEGVNSKNIVPGNGKITTTLKQDWGLNDVWNDLILPRFERMNQLTNSTDFTAWNENHQKFLPTVPIELSKGFSKKRIDHRHHAMDALVIACATKEHVNLLNNQSAKSDAKRYDLKKKLMNFEKAVYTDAKTGKRIERDVPTQFLKPWENFTADARNSLENIIVSFKQNLRVINKATNYYESYKDEDGNIRLGSDGKPKKDFISQKGTNWAIRKPMHKETVSGKVNLPWVKLPKGKILTATRKSLDTSFDMKTIGSITDTGIQKILRNYLAAKGSSDLAFSPEGIEDLNRNIKQYNDGKDHQPITKVRVFEMGSKFQVGYSGNKKDKYVEAAKGTNLFFTVYEDEKGKRSYESVPLNIVIERQKQGLDVVDLKGDKDFYLSPNDLVYLPSGDELENSNNIDFENLSKQKKQNIYKVVSFSGNQLFFIRQDVATSVVNKAEFSTLNKMERAIDGLMIKETCLKLKTDRLGNISKA

SEQ ID NO: 22923 - protein, 1424 aa, unidentified
  REGION 1..1424: note = Cas Enzyme sequence
MKRILGLDLGTNSIGWALVNEAETDEEVSSIIRLGVRVNPLTVDETQNFEKGKSITTNAERTLKRSMRRNLQRYKLRRDALVEFLKELGFITDETILSEQGNRTTFETCRLRAKAAEEEISLEELSRVLLMINKKRGYKSSRKVKKEEDGVLIDGMEIAKKLYEEDLTPGQLCSQLLESGKKVLPDFYHSDLQEELDRIWSVQKQFHPDVFCDAAKEEIKGKNRSQTWAILANYFVWKEEVVGWNDREAKNETIEKECKLVGLKRTTKGYELKKENYRWRAQALTEQLGLEEIAVVLQEINGQINASSGYLGAISDRSKVLYFNHQTVGQYQMAELDKNPHASLRNMVFYRQDYLDEFDRIWEKQAEFHKELTAELKKEIRDMIIFYQRRLKSQKGLISFCEFERLEIVVEKDGKKQTKVIGCKVIPRSHPLFQEFKVWQTLNDIKVLGREKKRNALSASESRALYPEEKEILARELAIKENMKKADVLKLLFENPQELDLNFKQIDGNRTGFSLFSAYSKMIEKYGYEPLDFKKPADEIIGQLRTIFTDLGWNTNLFTIDLTKEGKELEMQPYFRLWHLLYSFEGDNTSTGNGKLIEKIMQLCGVEKEYAVELASLSFQDDYGSLSAKAIKRILPYLKEGNLYDVACEYAGYRHSKSSLTKEEIENKVLKGKLEVLPKNSLRNPVVEKILSQMVNVINTIIDTYGKPDEIRVELARELKKSAKEREELTKAIAKSTREHEEIRKLLQDEFGMMNVSRNDIIRYKLYEELKDNGYKTLYSNQYIPKEKIFSKEIDIEHIIPQSRLFDDSLSNKTLEYKAINIEKGNKTAYDFVKEKYGEEGLQQYINRCESLFNDKKAKLRKLKMEQKDIPDGFIDRDLRNTQYIAKKALAMLNEICRRVVATTGSITDQLREDWQLVDVMKELNLPKYEALGFVETYEDKDGRKIKRIKDWTKRNDHRHHAMDALTVAFTKDAFIQYFNNKNAAQDSGNRNHTNIIGIKTRYFDKGRALPPIPLEQFRIEAKQHLEKLLVSIKAKNKVVTVNVNRTKKRKGENTKIQQTPRGQLHLETVYGSHKQYVTKIEKVNASFDAAKIATVSKRAYRNALLKRLETFGNDPKKAFTGKNALEKNPLYADKYQTIRVPEKVQTVEFETIYTIRKPVDPALNVDKVVDVKVRAILERRLKEYGGDPKKAFVNFWENPIWLNKEKGISIKRVSIRGINNAQSIHVKKDKNGNPIWDENGKQIPVDFVNTGNNHHVAIYRKPVLDKKGQVTFDEDGNLMYELDEVVVPFFEAVTRANLGLPIIDKDYRKSEGWQFLFSMKQNEYFVFPNEKTGFNPKEVDLLNPDNYAMISPNLFRVQTMSKVMYGNNVVRDYKFRHHLETTVKDMKELKDIAYKQYKTLSFGNSVVKIRINHIGQIVSVGEY

SEQ ID NO: 22924 - protein, 1520 aa, unidentified
  REGION 1..1520: note = Cas Enzyme sequence
MKKIVGLDLGTNSIGWALINAYIDEYNKEHLYGIEACGSRIIPMDAAILGNFDKGNSISQTADRTSYRGIRRLRERHLLRRERLHRILDLLGFLPKHYSDSLNRYGKFLNDIECKLPWVKDDTGSYKFIFQESFKEMLANFTEHHPILIANNKKVPYDWTIYYLRKKALTQKISKEELAWILLNFNQKRGYYQLRGEEEETPNKLVEYYSLKVEKVEDSGERKGKDTWYNVHLENGMIYRRTSNIPLDWEGKTKEFIVTTDLEADGSPKKDKEGNIKRSFRAPKDDDWTLIKKKTEADIDKIKMTVGAYIYDTLLQKPDQKIRGKLVRTIERKYYKNELYQILKTQSEFHEELRDKQLYIACLNELYPNNEPRRNSISTRDFCHLFIEDIIFYQRPLKSKKSLIDNCPYEENRYIDKESGEIKHASIKCIAKSHPLYQEFRLWQFIVNLRIYRKETDVDVTQELLPTEADYVTLFEWLNEKKEIDQKAFFKYPPFGFKKTTSNYRWNYVEDKPYPCNETHAQIIARLGKAHIPKAFLSKEKEETLWHILYSIEDKQEIEKALHSFANKNNLSEEFIEQFKNFPPFKKEYGSYSAKAIKKLLPLMRMGKYWSIENIDNGTRIRINKIIDGEYDENIRERVRQKAINLTDITHFRALPLWLACYLVYDRHSEVKDIVKWKTPKDIDLYLKSFKQHSLRNPIVEQVITETLRTVRDIWQQVGHIDEIHIELGREMKNPADKRARMSQQMIKNENTNLRIKALLTEFLNPEFGIENVRPYSPSQQDLLRIYEEGVLNSILELPEDIGIILGKFNQTDTLKRPTRSEILRYKLWLEQKYRSPYTGEMIPLSKLFTPAYEIEHIIPQSRYFDDSLSNKVICESEINKLKDRSLGYEFIKNHHVEKVELAFDKPVEVLSVEAYEKLVHESYSHNRSKMKKLLMEDIPDQFIERQLNDSRYISKVVKSLLSNIVREENEQEAISKNVIPCTGGITDRLKKDWGINDVWNKIVLPRFIRLNELTESTRFTSINTNNTMIPSMPLELQKGFNKKRIDHRHHAMDAIIIACANRNIVNYLNNVSASKNTKITRRDLQTLLCHKDKTDNNGNYKWVIDKPWETFTQDTLTALQKITVSFKQNLRVINKTTNHYQHYENGKKIVSNQSKGDSWAIRKSMHKETVHGEVNLRMIKTVSFNEALKKPQAIVEMDLKKKILAMLELGYDTKRIKNYFEENKDTWQDINPPKIKVYYFTKETKDRYFAVRKPIDTSFDKKKIKESITDTGIQQIMLRHLETKDNDPTLAFSPDGIDEMNRNILILNKGKKHQPIYKVRVYEKAEKFTVGQKGNKRTKFVEAAKGTNLFFAIYETEEIDKDTKKVIRKRSYSTIPLNVVIERQKQGLSSAPEDENGNLPKYILSPNDLVYVPTQEEINKGEVVMPIDRDRIYKMVDSSGITANFIPASTANLIFALPKATAEIYCNGENCIQNEYGIGSPQSKNQKAITGEMVKEICFPIKVDRLGNIIQVGLCILTN

SEQ ID NO: 22925 - protein, 1156 aa, unidentified
  REGION 1..1156: note = Cas Enzyme sequence
MKYRLGLDLGVGSIGSAVIELDNKNNAKDIIDAGVRIFEVSEGAEERRLKRTARKNLVRTKKRLELLAKKLFENGLWPNENPEGTDKLKSKSPYKIRTDALNEKLASPYYVGRAVLHIAKHRGAGFVSAIEETEEEILEEGEKSKAKKSSYDMMLHHLKETNSRTIGEFFYNKIISGKGNDKTVRQKKYAIEKNIVDYAIPRYLVKDEFNKIWDKQAEFYPQMKKENLKKEIYDILFYERPAAPYATGKCIYFREEDRLLKAHPLSEMRRIYEEVNNIRILNDMNKRKLTLEERDSIVNELLLKGQNAGKQAIKKLLNLSAQHKISLVDDRVIKAYLYSRPEFANNEHLQNMNENELSSFIEFLAEPKMSKDKNARLYNEDALIEYLKPILKIDDEKEIGNLLTKLPKGRGMLGISATKIILEKLKEDVLTHREITDKLAETDKRFMAEEEIARQNQGKCFQLPYYGEILQTDTAPLPPLMINNNKSLNPDEIRWGKIANPAVHMILNQIRLVVNEIIKIYGKPYDINIELGRDVGMSTKKKKEFENQQKQNEKLNEEAKNYLKEHKIAINNKNILKYKLAKEQGWKDAYNPTQNISSIFTGMEIEHIIPQAKGGTDTYNNLCLVNSNDNLNKGNRYAYEYFEETKTQEEIREILKNARSRTPQKSWRFEADAREKYEESGDKEESTRYLTDTRYVAKMAQRYLRAIVDCSDCDEVMQTRILAVKGGQTAKLRQHWNLYGLEYDLMGLDIPRYVNCPPYWLELDTGEIIEGINKPDIDGKWKFFDKAKNKEWQPKPRIDHRHHAMDAITVACANRGLIQKMAEENDINKIHYPLPLTSVESLADFRRKVISCLKDIKVSHKPNHSKAGQFHKETGRTVLCQNPDDPNSLITVYSRKILQVVKSAKDLTKLLIPETIKNEWHEDIAEHKAKQAKLVQDFELYMNTAEQILIAENEQGVAEGKKEIKITEGRILLKAFRIIQDKGLWKGDKFRCYENNSSLVYIKKHGVAYEGRNNHCVDFYQKNGKIGWEVIKRFDANQADFEPQWKKEGGKIIWSVQQGDILELDTPDEWKQYTDKERCLAKVKKFSNGAVTIDFVSDARMTSPKDKNLQYMFVDSLVNRGLSYFTNNKARKIELTPFGKIKKKHKALWNGTKTAA

SEQ ID NO: 22926 - protein, 1509 aa, unidentified
  REGION 1..1509: note = Cas Enzyme sequence
MKTILGLDLGTNSVGWAVINSVIKEQAERIWIEMAGSRIIPMDAAVLGDFDKGNSILQTSERTRLRGARRLRERQLLRRERLHKVLNILGFLPNHYLEYIDFEKHPGKFLADAEPKLAWVKDEQGKYTFLFQAAFDEMLADFAIHQPSLVSGDKKIPYDWTIYYLRKKALTEMISKEELAWILLNFNQKRGYYQLRGEEEEDNAGKSVEFYALKVLTVEATDEKKGRDVWYNVHLENGWIYRRSSSVPLDWEGQVKEFIVTTDLNPDGTPKLDKYGEVKRSFRAPKEDDWMLIKKRTEADIANTHKTVGAYIYDTLLQKPQQKIIGKLVKTVERKLYRDELSLILQKQCAFHAELQDRALYARCVEALYPSNEVRRKNIANRDFVYLLMDDILFYQRPLKTKKSLIANCPYEENEYVDRETGEIKKAPLKCIAKSHPLFQEFRLWNFLSNIRIYQKEKEINGTLHLDVDVTAEFLKTEDDYVALFDWLNSRKEIEQKTFLKYPKFGLKKEISNYRWNYVEDKQYPCNETRHAILSSLEKANVCIDFLSNEKEVALWHILYSVSDKQEIEKALRTFAAKNGLDESFVEAFKKFPPFKSEYGAYSAKAIKKMLPLMRCGKYWDVSSIDDTTKERIKKIVTGEYDERISVKVRDKVMNLSDISCFRRLPLWLACYIVYNRHSEDKEAVKWESPADIDAYLASFKQHSLRNPIVEQVITETLRVVRDIWKQVGRIDEIHIELGREMKNPADKRKRMTAQILENENANLRIKALLAEFMNPEYEIENVRPYSPSQQEILRIYEDTVLHAEDQLPEEIDAILKKFNSSKVPTKSEFLRYKLWLEQKYRSPYTGELIPLGKLFTAAYEIEHVIPQSRYFDDSFSNKVICESAVNKLKDNQLGYEFIKNHHGQKVEVGFGKSVEIFSVDSYERFVKEQYAKSAVKMKKLLMDDIPEQFIERQLNDSRYISKVIKGLLSNIVREKNDSGEYEPEAVSKNIVVCTGSVTDRLKRDWGMNDVWNSIVYPRFERLNSLTDTQSFGHWENKSGKKVFQTELPLEYQKGFSKKRIDHRHHAMDAIVIACATRNHVNYLSNESASRNAKISRYDLQRLLCDKNRTDDNGNYKWVIKKPWDTFTQDAREVLSKIVVSLKQNLRIINKTTNVYRHFDATVNRVYEKQKTGDSWAIRKPMHKDTVFGAVNLRKVKVVRLSVALDTPAMIVDKRVKNKVFELLSYKYDKKRIEKYFKENAFLWKELDLAKVAVYYFTEATTEPLVAVRKPLDSTFNEKKIKESVTDTGIQKILLNHLCTKEGKPDLAFSAEGIEEMNRNLLQLNNGKSHQPIYKVRVYEPRGNKFSVGVLGNKGTKWVEAAKGTNLFFAIYITEDGKRTYETIPLNVVIEREKQGLVPVPDRNEKGDKLLFWLSPNDLVYLPTEEEREFGRINEPIDRGRIYKMVSCTGNEGHFIPANVANPIVPVIELGSNNKAQRAWTNEMIKDICIPIKVDRLGHIIEVKYRIDE

SEQ ID NO: 22927 - protein, 1494 aa, unidentified
  REGION 1..1494: note = Cas Enzyme sequence
MKTILGLDLGTNSIGWAKVCVDDNGNYTRDIKLGSRIIPMSQDTLSNFDKGVTESPTAARTGFRGVRRIRERALQRRERLHRVLHVMGFLPPHYENAIGWNREEATTYGKFLDNGEPKLAWEKQEDGSMRFLFMDSFYEMMADFAKYQPGMVADGRKIPLDWTLYYLRKKALTQAIRKEELAWILLNFNQKRGYYQLRGEEDEEDPTKREEYYELKVVSVEAAEEGKGGNTWYNVTLENGWIYRRQSKIELNDWTGKIRQFIVTTEYEKDGITIKKDKNGEVKRSFRAPSEDDWGLRKKRTESRLEDSGKTVGEFIYDHILSEPADKIRGNFIRTIERKFYKKELEAILREQSKHHKELKDQNTLVNCIKELYPNNKAHQDSLMKKDMIYLLITDLIFYQRPLKSKKSLIADCPYEYYEYVIKETGEIKRQGIKCIAKSNPYYQEFRLWQFIINLRLFDRTNDKEITSEYLSSMEDYTRLFTYLNDRKEINQEFLLKDFFKQKKVKMGMEKEFPIRWNYIEDKEKKYPCNETRHELLAALDKAGIDHSWLDDKERFYRLWHLLYSVESKEEAEGALRKLNDNEDFVNAFLKIKPFKKEYGAYSEKAIKKLLAVMRIGALWNEDDICEQTRNRIQSIINGVIDEKIKERMGRTFSQLSDFQGLPEWLACYVVYGRHSETTDIQRWTKPENLMSYIKGFKQHSLRNPIVEQCILETLRTVHDIWKEAGHIDEIHIELGRSMKSTADQRARMSKSILQNENTNLRIKSLLMELKNAKEFENVRPYSPMQQEILRIYEEGALQELTKEDDQYPEISKISQMAQPSAKELLKYRLWLDQKYCSPYTGKPISLSKLFTSAYQIEHIIPQSRYFDDSFSNKVICEAEVNQLKSNMLGYEFIKKHSGEIVHCTMVGDVKILDAKEYYNFVTEHYANNRRKKENLLLEDIPQEFLNRQMNDSRYISKKVMALLSNIVREEGEQEAKSKFVIACSGGITDRLKHDWGLNDVWNSIVYPRFERLNKLTNTENFGRWENKEGKQVFQTSLPLELQRGFSKKRIDHRHHAMDALVIACASNNIINYLNNESAKSQEKREDLRKKLCDKNRIIRKPWETFTQDAHTALENVVVSFKNYVRVINKATNYYEKYDKNGKKGIAEQKGQDMWAIRKPMHKETVFGQVNLRRRVTVKLKDALEKIPAICDKELRDYINNLVAKQFNKKQILAQFKNINYRLNMKYVDKVDVWQFSDEKDPMVATRKSVDTSFDTKRIATITDTGIQKILLNYLETKDNDPNIAFTPEGIAEMNKHITEYNNGKQHQPILKVRVSEPKGAKYQVGETGNKTSKFVEAQKGTNLYFAIYEDKEGNRSYSTIPLNEVIERLKQGLSPVPDANEKGIPLKFHLSPNDLVYVPKTDEENEIKMGQIYKFVDSSGTTANFIPHRVSNLIYNVDKKIAENFCNHEIIQNEYGIGSPQSKNQKSITGEMIKAVCWKLEVDRLGNIHKIIK

SEQ ID NO: 22928 - protein, 1422 aa, unidentified
  REGION 1..1422: note = Cas Enzyme sequence
MTQKVLGLDLGTNSIGSAVRNLDLSDDLQWQLEFFSSDIFRSSVNKESNGREYSLAAQRSAHRRSRGLNEVRRRRLWATLNLLIKHGFCPMSSESLMRWCTYDKRKGLFREYPIDDKDFNAWILLDFNGDGRPDYSSPYQLRRELVTRQFDFEQPIERYKLGRALYHIAQHRGFKSSKGETLSQQETNSKPSSTDEIPDVAGAMKASEEKLSKGLSTYMKEHNLLTVGAAFAQLEDEGVRVRNNNDYRAIRSQFQHEIETIFKFQQGLSVESELYERLISEKKNVGTIFYKRPLRSQRGNVGKCTLERSKPRCAIGHPLFEKFRAWTLINNIKVRMSVDTLDEQLPMKLRLDLYNECFLAFVRTEFKFEDIRKYLEKRLGIHFSYNDKTINYKDSTSVAGCPITARFRKMLGEEWESFRVEGQKERQAHSKNNISFHRVSYSIEDIWHFCYDAEEPEAVLAFAQETLRLERKKAEELVRIWSAMPQGYAMLSQKAIRKINKILMLGLKYSDAVILAKVPELVDVSDEELLSIAKDYYLVEAQVNYDKRINSIVNGLIAKYKSVSEEYRFADHNYEYLLDESDEKDIIRQIESSLGAKRWSLMDADEQTDILQKVRDRYQNFFRSHERKFVESPKLGESFENYLTKKFPMVEREQWKKLYHPSQITIYRPVSVGKDRSVLRLGNPDIGAIKNPTVLRVLNTLRRRVNQLLDDGVISPDETRVVVETARELNDANRKWALDTYNRIRHDENEKIKKILEEFYPKRDGISTDDIDKARYVIDQREVDYFTGSKTYNKDIKKYKFWLEQGGQCMYTGRTINLSNLFDPNAFDIEHTIPESLSFDSSDMNLTLCDAHYNRFIKKNHIPTDMPNYDKAITIDGKEYPAITSQLQRWVERVERLNRNVEYWKGQARRAQNKDRKDQCMREMHLWKMELEYWKKKLERFTVTEVTDGFKNSQLVDTRVITRHAVLYLKSIFPHVDVQRGDVTAKFRKILGIQSVDEKKDRSLHSHHAIDATTLTIIPVSAKRDRMLELFAKIEEINKMLSFSGSEDRTGLQQELDGLKNKLQMEVKACRIGHKVSEIGTFINDNIIVNHHIKNQALTPVRRRLGKKGHIVGGVDKPRWQTGDALRGEIHKASYYGAITQFVKDEEGKVLMKEGRPQINLTIKFVIRRELKYKKSATDSGFASWDDLGKAIVDKELFALMKGQFPEETSFKDACEQGVYMIKKGKNGMPDKKLYRIRHIRCNTVQKNALKIKEQTYKSEKEYKRYFYAAVGDLYAMCCYTNGKIREFRIYSLYDVSCHRKSDIEDIPEFITDKKGNRLMLDYKLHTGDMILLYKNSPEELYDLDNVNLSKLLYKINGFENDGLRIRMVNHLVVKEAMGESVKDYAKLPDIIRCGVKTIKFLIMGENRDFVIKNGKIIFNHR

SEQ ID NO: 22929 - protein, 1504 aa, unidentified
  REGION 1..1504: note = Cas Enzyme sequence
MKNIVGLDLGTNSIGWAVVNGSVNDDGSEQLVKIQASGSRIIPMDAAMIGDFNKGNSISQTAERTRLRGVRRLSERYLLRRERLHRILDILGFLPFHFAQDLDRHGKIVKGKEPKLAWRKNEAGQFEFIFQDSFKEMLEDFKLNHPNLITDDKKVPYDWTIYYLRKKGLTSKISKEELAWILLNFNQKRGYYQLRGEEEEENKNKLVEFYALKVVAVEDSGEKKGKDIWYNVHLENGWVYRRTSNMPLDWVGKTKEFIVTTDLEKDGTPKKDKEGNVKRSFRAPKEDDWSLVKKKTGADIDQTHKTVGTYIYDTLLGNPSQKIRGRLVRTIERKYYKEELKQILDKQKEFHPELQDRALYAACVEELYTINEAHRNNIGNRDFTYLFLEDILFYQRPLKSKKSLIDNCPYEENHCLDKETGEIKSFPVKCIAKSHPLFQEFRLWQFIVNLRIYRKGLAQDVDVTNELLKTEEDYVALFDWLNGKKEIDQKAFLKYPLFGLKKEVENYRWNYVQDKPYPCNETRSSMLARLEKCDISIEFLTKENEEALWHILYSVEDKNEIVKALQKFADKHDLNASFVDVFRKFPPFKKEYGSYSAKAIKKLLPLMRMGKYWSENSIDKGTRERIDKIITGEYDEKIENRVREKAIHLADVSDFRGLPLWLVCYIVYGRHSEAKEITQWKSPADIDSYLKSFKQHSLRNPIVEQIIIETLRVVRDIWKQVGNIDEIHVELGREMKNPADKRKKMTQQMSENENTNLRIKYLLTEFLNPEYEVENVRPYSPSQQDILRIYEEGVLNSVSDLPEEISDILKKFTETDLKKRPSRSEVLRYKLWLEQKYRSPYTGEVIPLGKLFTPAYEIEHVIPQSCYFDDSFSNKVICEAEVNKLKSNLLGHEFIVKHHGEIVELPFGKKVRIFTVDEYEQFVKDNYSRTRGKMKKLLMDDIPEEFVTRQLNDSRYISKVVKSLLSNIVREKGEEEAISKNVIPCTGGVTDRLKKDWGINEVWNKIILPRFQRLNELTGTNKFTTKNVGIQEIPTMPLELQKGFNKKRIDHRHHAMDAIIIACANRNIINYLNNESATAKAELSRYDLQKMLCDKAKTDNNGNYKWVIRKPWASFTQDTYLALENIIVSFKQNLRVINKATNHFLHYNEEGKKIFVKQGKGDNWAIRKSMHKDTVFGEVNLRRIKTVALNEAMKNPQSIVVKDFKRKLLELWNLGFDAKRIKKYFEDNRETWSDINLSKIEVYYFSKDTKDRFFATRKPLDTSFDRKKIENNITDTGIQKILLRHLELKDNNPDIAFSPDGIDEMNRNIIQLNNGKYHQPIIKVRWYEQADKFAVGQTGNKSSKFVEAAKGTNLFFAVYESNILDKKTNTIIKKRNYATIPLNVAIERQKQGLSVAPEDENGNDPIFVLSPNDLVYLPTDDELANGIIAQPLDRGRIYKMVSCTGNEGHFIPARIANPILQTIELGSNNKAQKAWTDEMIKEICMPIKVDRLGNVLESSSSYKK

SEQ ID NO: 22930 - protein, 1338 aa, unidentified
  REGION 1..1338: note = Cas Enzyme sequence
LNFNQKRGYYQLRGEEEETPNKLVEYYSLKVEKVEDSGEKKGKDTWYNVHLENGMIYRRTSNIPLDWEGKTKEFIVTTDLEADGSPKKDKEGNIKRSFRAPKDDDWTLIKKKTEADIDKIKMTVGAYIYDTLLQKPDQKIRGKLVRTIERKYYKNELYQILKTQSEFHEELRDKQLYIACLNELYPNNEPRRNSISTRDFCHLFIEDIIFYQRPLKSKKSLIDNCPYEENRYIDKESGEIKHASIKCIAKSHPLYQEFRLWQFIVNLRIYRKETDVDVTQELLPTEADYVPLFEWLNEKKEIDQKAFFKYPPFGFKKTTSNYRWNYVEDKPYPCNETHAQIIARLGKAHIPKAFLSKEKEETLWHILYSIEDKQEIEKALHSFANKNNLSEEFIEQFKNFPPFKKEYGSYSAKAIKKLLPLMRMGKYWSIENIDNGTRIRINKIIDGEYDENIRERVRQKAINLTDITHFRALPLWLACYLVYDRHSEVKDIVKWKTPKDIDLYLKSFKQHSLRNPIVEQVITETLRTVRDIWQQVGHIDEIHIELGREMKNPADKRARMSQQMIKNENTNLRIKALLTEFLNPEFGIENVRPYSPSQQDLLRIYEEGVLNSILELPEDIGIILGKFNQTDTLKRPTRSEILRYKLWLEQKYRSPYTGEMIPLSKLFTPAYEIEHIIPQSRYFDDSLSNKVICESEINKLKDRSLGYEFIKNHHGEKVELAFDKPVEVLSVEAYEKLVHESYSHNRSKMKKLLMEDIPDQFIERQLNDSRYISKVVKSLLSNIVREENEQEAISKNVIPCTGGITDRLKKDWGINDVWNKIVLPRFIRLNELTESTRFTSINTNNTMIPSMPLELQKGFNKKRIDHRHHAMDAIIIACANRNIVNYLNNVSASKNTKITRRDLQTLLCHKDKTDNNGNYKWVIDKPWETFTQDTLTALQKITVSFKQNLRVINKTTNHYQHYENGKKIVSNQSKGDSWAIRKSMHKETVHGEVNLRMIKTVSFNEALKKPQAIVEMDLKKKILAMLELGYDTKRIKNYFEENKDTWQDINPSKIKVYYFTKETKDRYFAVRKPIDTSFDKKKIKESITDTGIQQIMLRHLETKDNDPTLAFSPDGIDEMNRNILILNKGKKHQPIYKVRVYEKAEKFTVGQKGNKRTKFVEAAKGTNLFFAIYETEEIDKDTKKVIRKRSYSTIPLNVVIERQKQGLSSAPEDENGNLPKYILSPNDLVYVPTQEEINKGEVVMPIDRDRIYKMVDSSGITANFIPASTANLIFALPKATAEIYCNGENCIQNEYGIGSPQSKNQKAITGEMVKEICFPIKVDRLGNIIQAGSCILTN

SEQ ID NO: 22931 - protein, 1467 aa, unidentified
  REGION 1..1467: note = Cas Enzyme sequence
  REGION 1464..1467: note = misc_feature - Xaa can be any naturally occurring amino acid
MKNIVGLDLGTNSIGWAVVNGSVNDDGSEQLVKIQASGSRIIPMDAAMIGDFNKGNSISQTAERTRLRGVRRLSERYLLRRERLHRILDILGFLPFHFAQDLDRHGKIVKGKEPKLAWRKNEAGQFEFIFQDSFKEMLEDFKLNYPNLITDDKKVPYDWTIYYLRKKGLTSKISKEELAWILLNFNQKRGYYQLRGEEEEENKDKLVEFYALKVVAVEDSGEKKGKDIWYNVHLENGWVYRRTSNMSLDWVGKTKEFIVTTDLEKDGTPKKDKEGNVKRSFRAPKEDDWSLVKKKTEADIDQTHKTVGAYIYDTLLGNPSQKIRGRLVRTIERKYYKEELKLILEKQKEFHLELQDRALYAACIEELYPINEAHRNNVGNRDFTYLFLEDILFYQRPLKSKKSLIDNCPYEENQGLDKETGEIKSFPVKCIAKSHPLFQEFRLWQFIINLRIYRKDLAQDVDVTNELLKTEEDYVALFDWLNGKKEIDQKAFLKYPVFGLKKEIENYRWNYVQDKPYPCNETRSLMLARLEKCDISIEFLTKENEEALWHILYSVEDKNEIVKALQKFADKHDLNASFVDVFQKFPPFKKEYGSYSAKAIKKLLPLMRMGKYWSENSIDKGTRERIDKIITGEYDEKIENRVREKAIHLADVSDFKGLPLWLVCYIVYGRHSEAKEIIQWKSPADIDSYLRSFKQHSLRNPIVEQIIIETLRVVRDIWKQVGNIDEIHVELGREMKNPADKRKKMTQQMSENENTNLRIKYLLTEFLNPEYEVENVRPYSPSQQDILRIYEEGVLNSVSDLPEEISDILKKFTETDLKKRPSRSEVLRYKLWLEQKYRSPYTGEVIPLGKLFTPAYEIEHVIPQSCYFDDSFSNKVICEAEVNKLKSNLLGHEFIVKHHGEIVELPFGKKVRIFTVDEYEQFVKDNYSRTRSKMKKLLMDDIPEEFVTRQLNDSRYISKVVKSLLSNIVREKGEEEAISKNVIPCTGGVTDRLKKDWGINEVWNKIILPRFQRLNELTGTNKFTTKNVGIQEIPTMPLELQKGFNKKRIDHRHHAMDAIIIACANRNIINYLNNESATAKAELSRYDLQKMLCDKAKTDNNGNYKWVIRKPWASFTQDTYLALENIIVSFKQNLRVINKATNRFLHYNEEGKKIFVKQGKGDNWAIRKSMHKDTVFGEVNLRRIKTVALNEAMKNPQSIVVKDFKRKLLELWNLGFDAKRIKKYFEDNRETWSDINLSKIEVYYFSKDTKDRFFATRKPLDTSFDRKKIENNITDTGIQKILLRHLELKDNNPDIAFSPDGIDEMNRNIIQLNNGKYHQPIIKIRWYEQADKFAVGQTGNKSSKFVEAAKGTNLFFAVYESNILDKKTNTIIKKRNYATIPLNVAIERQKQGLPVAPEDENGNDPIFVLSPNDLVYLPTDDELANGIIAQPLDRGRIYKMVSSSGEQCFFIKHIVANVLVDKFXXXX

SEQ ID NO: 22932 - protein, 1180 aa, unidentified
  REGION 1..1180: note = Cas Enzyme sequence
MKNIVGLDLGTNSIGWAVVNGSVNDDGSEQLVKIQASGSRIIPMDAAMIGDFNKGNSISQTAERTRLRGVRRLSERYLLRRERLHRILDILGFLPFHFAQDLDRHGKIVKGKEPKLAWRKNEAGQFEFIFQDSFKEMLEDFKLNHPNLITDDKKVPYDWTIYYLRKKGLTSKISKEELAWILLNFNQKRGYYQLRGEEEEENKNKLVEFYALKVVAVEDSGEKKGKDIWYNVHLENGWVYRRTSNMPLDWVGKTKEFIVTTDLEKDGTPKKDKEGNVKRSFRAPKEDDWSLVKKKTEADIDQTHKTVGAYIYDTLLGNPSQKIRGRLVRTIERKYYKEELKQILEKQKEFHLELQDRALYAACIEELYPINEAHRNNVGNRDFTYLFLEDILFYQRPLKSKKSLIDNCPYEENQGLDKETGEIKSFPVKCIAKSHPLFQEFRLWQFIINLRIYRKDLAQDVDVTNELLKTEEDYVALFDWLNGKKEIDQKAFLKYPLFGLKKEIENYRWNYVQDKPYPCNETRSLMLARLEKCDISIEFLTKENEEALWHILYSVEDKNEIVKALQKFADKHDLNASFVDVFQKFPPFKKEYGSYSAKAIKKLLPLMRMGKYWSENSIDKGTRERIDKIITGEYDEKIENRVREKAIHLADVSDFKGLPLWLVCYIVYGRHSEAKEITQWKSPADIDSYLRSFKQHSLRNPIVEQIIIETLRVVRDIWKQVGNIDEIHVELGREMKNPADKRKKMTQQMSENENTNLRIKYLLTEFLNPEYEVENVRPYSPSQQDILRIYEEGVLNSVSDLPEEISDILKKFTETDLKKRPSRSEILRYKLWLEQKYRSPYTGEVIPLGKLFTPAYEIEHVIPQSCYFDDSFSNKVICEAEVNKLKSNLLGHEFIVKHHGEIVELPFGKKVRIFTVDEYEQFVKDNYSRTRSKMKKLLMDDIPEEFVTRQLNDSRYISKVVKSLLSNIVREKGEEEAISKNVIPCTGGVTDRLKKDWGINEVWNKIILPRFQRLNELTGTNKFTTKNVGIQEIPTMPLELQKGFNKKRIDHRHHAMDAIIIACANRNIINYLNNESATAKAELSRYDLQKMLCDKAKTDNNGNYKWVIRKPWASFTQDTYLALENIIVSFKQNLRVINKATNRFLHYNEEGKKIFVKQGKGDNWAIRKSMHKDTVFGEVN

SEQ ID NO: 22933 - protein, 1423 aa, unidentified
  REGION 1..1423: note = Cas Enzyme sequence
MALQKKSQHTAYEQERKYAMKKLKQMSGPYSIGFELSSTAHGFVATDPNGNVLYHGKQPVMGTRVFKEGQHAAEARMPRTSRRGIQRRRGREHEMERVFAPVISPIDPDFFIRRRMSYKLGKIRFESDPIGFSYSCLFHSFPTLAHLDVALMESDSAMDPRLIFEAVANHVVRRGHFLLENQNVSSTNSDIDTQVANYAEVLVSYFEDTLDERIEPSLEALDINGNVTARELQKRFASAMCVSGDDIQKKTEKAQIKAIADLVAGYKADLTALVPDAEKLPKVSISDGDALEEFLSDSCPDSLVSVLMAAQALYTSWKLQGMLSYAPGKSLSHNQVAQYDVYGKQLRMLKNLALKYVAKQDADGNIDEDGFKDYVRFFGGPKCEDRYRYDKVQVKKQDSPKKNMGYTAYNLNVLGYEEFAKRVELLFKDTDAVNDPQYKTMMEAFANHAFLRRIHTVDNAAIPYQLHAEVVNRIIDNQGRFYPWLIDAREHILKVLTSRIPYYVGPLDSTDHGKAGENGTRFAWVKRLAGHEDAFVSPWNYEDHIDIDTTAELFIRRMTGECSYLDGEDVLAKNSLLYEKYCFFNELASLSFTEDGDSWMPFDAGMRKAIYDAASDGKTMTVKRIESVLQRDFFIAHPHVRGTSNPKAMSSKRSNYAYFCRLFDVKALSASDMSMAEDLVLWNTVFEDRDILRRKILKTYGDLLTEKAVDDFCHKRLSGWGKLSERLLTGIWADTASGDLCVMDVLEQGRPYGRYRGSSMNLMQILNDDVLGFKMEIKRLNDSHMQMAEGFDLNALPGSPALRRGVSQAMKVLDDIVSVAGKAPDRIYLKVTRTASNSRKGKRTAKRSDKIKQALKALDADAAVDLGAAKLLRELGMFDEKEINERIYLYFHQAGKCLYTGKAIDITRIASNDYYVDHVVPLAYRKDESLDNKVLVYAEASRYKSETLLVSPAVQRKMLPFWRMLRNAGLMSERKLNALIRTEISEGMLKSIIGRQFTENSWEAKLFTAAVAAKYPGTVVIPVKAGVIGAVRSRIGIPKSLKANQFYHAHDALLAAEVGRYMELAKPAFVHNRVKYEQYMRKIKLVDEENKKAPKSQLDFFAGGFFFDRVDKDTGEVYWNKDEEVERIYRACGWKNLRVTYAAFEDGGAFWKQTIYSPREKSKLIATKSDRPAEIYGGYSSQTFANFFVYEVMKKKVKQLRFGAVPAAIASKSDPDTYNAMLEMYARGLAKTAKEKFVRIVRARVLKNTMIELYGERFRIAGEKQVYPVRQMPLAIDEVYLLKGVETIAAAGNAGASAKIDFEKAAESLVGFWDLLLEKLPVNYPKLTVQLKLGSLKHPKDILAATSESEFPAIVYKIAEAEIQVMEQASGLRNKSDTKILGGNTFGGSLVFTFNKVLNDPKSKACFIDTTPAGLHEVKTKIW

SEQ ID NO: 22934 - protein, 1192 aa, unidentified
  REGION 1..1192: note = Cas Enzyme sequence
VRLSIFERFVFPKGSKFNRLVWDSLEIWKCGLYIKYIVGMKNILGLDLGSSSIGWAVIRENSEEQELVAMGSRVVSLTAAELSSFTQGNGVSINSQRTQKRTQRKGYDRYQLRRTLLRNKLDTLGMLPDDSLSHLPKLQLWGLRAKAVTQRIELNELGRVLLHLNQKRGYKSIKSDFSGDKKITDYVKTVKTRYDELKEMRLTIGELFFRRLTENAFFRCKEQVYPRQAYVEEFDCIMNCQRKFYPDILTDETIRCIRDEIIYYQRPLKSCKYLVSRCEFEKRFYLNAAGKKTEAGPKVAPRTSPLFQVCRLWESINNIVVKDRRNEIVFISAEQRAALFDFLNTHEKLKGSDLLKLLGLSKTYGYRLGEQFKTGIQGNKTRVEIERALGNYPDKKRLLQFNLQEESSSMVNTETGEIIPMISLSFEQEPLYRLWHVLYSIDDREQLQSVLRQKFGIDDDEVLERLSVIDLVKAGFGNKSSKAIRRILPFLQLGMNYAEACEAAGYTHSNNYTKAENEAHALLDRLPAIKKNELRQPVVEKILNQMVNVVNALMEKYGRFDEIRVELARELKQSKEERSNTYKSINKNQRENEQIAKRIVEYGVPTRSRIQKYKMWEESKHCCIYCGQPVDVGDFLRGFDVEVEHIIPKSLYFDDSFANKVCSCRSCNKEKNNHTAYDYMKSKGEKALSDYVERVNTMYTNNQISKTKLQNLLTPVDKISTDFIDRQLRESQYIARKAKEILTSVCYNVTATSGSVTSFLRHVWGWDTVLHDLNFDRYKKVGLTEVIEVNHRGSVIRREQIKDWSKRFDHRHHAIDALTIACTKQAYIQRLNNLRAEEGPDFNKMSLERYIQSQPHFSVAQVREAVDRILVSFRAGKRAVTPGKRYIRKNRKRISVQSVLIPRGALSEESVYGVIYVWEKDELGHVIQKQRAVMKYPITSINREMLDKEKVVDKRIHRILSGRLAQYNDNPKEAFAKPVYIDKECRIPIRTVRCFAKPAINTLVPLKKDDKGNPVAWVNPGNNHHVAIYRDEDGKYKERTVTFWEAVDRCRVGIPAIVTQPDTIWDNILQRNDISENVLESLPDVKWQFVLSLQQNEMFILGMNEEDYRYAMDQQDYALLNKYLYRVQKLSKGDYNFRYHTETSVEDKYDGKLNLELSRQMGKLKRVSIKSLLGLNPHKVHISVLGEIKEIS

SEQ ID NO: 22935 - protein, 1088 aa, unidentified
  REGION 1..1088: note = Cas Enzyme sequence
  REGION 1080..1083: note = misc_feature - Xaa can be any naturally occurring amino acid
MKNILGLDLGSGSIGWSVIQEGENNRTILGMGSRIIPLSPDDTTQFTQGKSITKNADRTAFRTQRKGYDRYQLRRHYLTQYLHKLGMLPDERLIKLPQTELWEIRAKAVNEKIELPELGRVLYHLNQKRGYKSGKSDFQDKKSSKYLSEVSERYKELQERDITIGQKFYAELKADPTYRCKDWVYPRIAYIEEFDRIMECQRTHHDILTDEHIAHLRNHIIYYQRPLKSCKHLVGECSLAQMTYRLPDGSIKSRPIKVAPKSSPLFQVCKIWESINHINLQRDRERFEITPAHRQALFTHMNSKEKLKINDLYKILGIKKHDGWWGGKAIGNGLQGNTTVIALQNALTGYSRADELLRFELKTCEIEIADPETGEIATQLIIDPAFEQEPLYRLWHTLYSISDTDVLDRILERKFGIEDPEMREKLTQIDFTKSGYGNLSSIAMRRILPYLRQGYVYSEACFMAGYNHSNSITREENLARELAEHLRPITKGELRQPIVEKILNQMVNLVNALIDRYGRFDEIQVELARELQQSREERDKTYKKQLDNQKRNEEIRHHIEEMDLTPTRSRIQKYRMYEESHHLCIYCGQPVGLAAFLQGYDTEVEHIIPRSLYFDDSYNNKVCACRACNQAKNNRTAYDYMSSLPEETFHRYLDRIKNMHDNKEISDTKYKYLLTKGDEIPQDFLNRQMRESQYISRKAIAMLQEVCHHVYATSGSVTAYLRHVWGWDNVLHDLNRKRYRAGGLTEMREIDNRTVECIKDWNKRLDHRHHAIDALAIACTRQGYIQRINTLSTQAEEGDLVSLERYIRQQPHFSYDEVCAAAEKILVSFKAGKRVATKGKRYIYRGGKRILAQEDITVPRGALSEQSVYGQIAQYRKDKKGKVSFSYESVLKYPIESIDTKTLPDVVDAGIRRILQQRLDEHGGNAKKAFATPVYTASGHLIRTVRCFTRLKAIVPVKYDASGKAVGFVKPGNNHHVAIYIDRDGKPQEHIVTFWHAVERKKYGLPVIIERPGEAWDAATDAMPDPFLEQLPDATWQFRLSMQQNEMFILGMPDELYADALENRDYALLGKYLYRVQKIXXXXFQTSY

SEQ ID NO: 22936 - protein, 1376 aa, unidentified
  REGION 1..1376: note = Cas Enzyme sequence
MKKILGLDLGTTSIGWAFVKEAEDGDNEPSSIVKIGVRVNPLTTDEQKDFEKGKSVSVNADRTLKRGARRNLQRYKQRRGNLIEVLKQNNLINTDSILAENDKDTTHFTYAIRAKAAAEGITKEEFARILLMINKKRGYKSSRKATKEDEGQAIDGMAVAKQLYEDNLTPGQLSYQFLKEGKKHLPDFYRSDLQAELSRVWDYQEKFYPNILTAEFKKELEGKGQRATSAIFWNKYKFNTAENKGTRDEKKLKAYEWRSKAINSQLAIEEVAFVITEINNNINNSSGYLGAISDRSKELYFNKQTIGQYLFNQLQNNPHTRMKNQVFYRQDYFDEFETIWETQAKYHAELTLVLKEEIRDIIIFYQRKLKSQKGLVSFCEFESKKVEYEIDGKTVIKTIGARVIPKSSPLFQEFKIWQNLNNIELKNKKDKSRILIKDFDLDIKEQLFNELNIKGNLTKAKILPILVDKPNDWELNYMVIEGNRTHQALYESYFKMMEYESHDDIDLEKLTAAEMKSAVLSFFETQHIDRTILDFNAELDGNHFEKQPAYQFWHLLYAYEGDNSNTGNDKLYELLKSKFGFKKEYASILANIKIQDDYGSLSAKAIKKIFPFIKENNYSDACALAGYNHSSSLTKEENDKRPLKGELKILPKNSLRNPVVEKILNQMVNVINAIIKDPPLGKPDEIRIELARELKKNAKEREEDTKRINEAKSNHDKIREILIREDKIPNPTRNDIIRYKLYQELKFNAYKDLYTNEYIARQDLFTKKYDIDHIIPQASLFDDSFSNKTLAPREANYTKGNRTAYDYIDKDRGAESLTDYLERVEMLYQVNYKSKDEGISKAKYKKLLLKGSEIGEGFIQRDLRDTQYIAKKAKEMLHEVCRTVVATTGSITDKLRDDWGLVNVMQELNMDKYRKLGLTEMIEKKDGGFKERIVDWTKRNDHRHHAMDALTIAFTKHEHIQYLNNLNAKTKEDKKGKEIYAIEQKITEKFDKDKRRFKSPLDNFREEAKNHLESVLISCKAKNKVVTKNKNKTKSSKGEKSQPTLTPRGQLHKETVYGKIKQYVIKEEKVSGKFDEETIFKVSKPQYSSALLKRLHENNNDPVKAFTGKNSLAKNPIYLDDQKTVQVPEKVKLVWLDDDFTIRKDISPDLKIDKVIDIGIQNILYKRLEQFGGKEKEAFSNLDKDPIWLNKDKGIAIKRVTISGVKSAKPLHYKKDHHGKEILDDNGKPTPVDFISTGNNHHVAIYRDENGDLQDEVISLHKVITERVNQGLPVVDKTYNQHLGWRFLFTMKQNEYFIFPSYNFDPSEVGLLDPANNKLISPHLFRVQKFSKVTYGNSSVRDYVFRHHFETSVEDKKELKDITYKSIKSLPYFENI

SEQ ID NO: 22937 - protein, 1154 aa, unidentified
  REGION 1..1154: note = Cas Enzyme sequence
MKNILGLDLGSSSIGWSVIRENSEEQELVAMGSRVVSLTAAELSSFTQGNGVSINSQRTQKRTQRKGYDRYQLRRTLLRNKLDTLGMLPDDSLSHLPKLQLWGLRAKAVTQRIELNELGRVLLHLNQKRGYKSIKSDFSGDKKITDYVKIVKTRYDELKEKRLTIGELFFRRLTENAFFRCKEQVYPRQAYVEEFDCIMNCQRKFYPDILTDETIRCIRDEIIYYQRPLKSCKYLVSRCEFEKRFYLNAAGKKTEAGPKVAPRTSPLFQVCRLWESINNIVVKDRRNEIVFISAEQRAALFDFLNTHEKLKGSDLLKLLGLSKTYGYRLGEQFKTGIQGNKTRVEIERALGNYPDKKRLLQFNLQEESSSMVNTETGEIIPMISLSFEQEPLYRLWHVLYSIDDREQLQSVLRQKFGIDDDEVLERLSAIDLVKAGFGNKSSKAIRRILPFLQLGMNYAEACEAAGYTHSNNYTKAENEAHALLDRLPAIKKNELRQPVVEKILNQMVNVVNALMEKYGRFDEIRVELARELKQSKEERSNTYKSINKNQRENEQIAKRIVEYGVPTRSRIQKYKMWEESKHCCIYCGQPVDVGDFLRGFDVEVEHIIPKSLYFDDSFANKVCSCRSCNKEKNNRTAYDYMKSKGEKALSDYVERVNTMYTNNQISKTKLQNLLTPVDKISTDFIDRQLRESQYIARKAKEILTSVCYNVTATSGSVTSFLRHVWGWDTVLHDLNFDRYKKVGLTEVIEVNHRGSVIRREQIKDWSKRFDHRHHAIDALTIACTKQAYVQRLNNLRAEEGPDFNKMSLERYIQSQPHFSVAQVREAVDRILVSFRAGKRAVTPGKRYIIRKNRKRISVQSVLIPRGALSEESVYGVIYVWEKDELGHVIQKQRAVMKYPITSINREMLDKEKVVDKRIHRILSGRLAQYNDNPKEAFAKPVYIDKECRIPIRTVRCFAKPAINTLVPLKKDDKGNPVAWVNPGNNHHVAIYRDEDGKYKERTVTFWEAVDRCQVGIPAIVTQPDTIWDNILQRNDISENVLESLPDVKWQFVLSLQQNEMFILGMNEEDYRYAMDQQDYALLNKYLYRVQKLSKGDYNFRYHTETSVEDKYDGKLNLELSRQMGKLKRVSIKSLLGLNPHKVHISVLGEIKEIS

SEQ ID NO: 22938 - protein, 1312 aa, unidentified
  REGION 1..1312: note = Cas Enzyme sequence
VQNGFLGITVSSEQVGWAVTNPKYELERASRKDLWGVRLFDKAETAEDRRMFRTNRRLNQRKKNRIHYLRDIFHEEVNQKDPNFFQQLDESNFCEDDRTVEFNFDTNLYKNQFPTVYHLRKYLMETKDKPDIRLVYLAFSKFMKNRGHFLYKGNLGEVMDFENSMKGFCESLEKFNIDFPTLSDEQVKEVRDILCDHKIAKTVKKKNIITITKVKSKTAKAWIGLFCGCSVPVKVLFQDIDEEIVTDPEKISFEDASYDDYIANIEKGVGIYYEAIVSAKMLFDWSILNEILGDHQLLSDAMIAEYNKHHDDLKRLQKIIKGTGSRELYQDIFINDVSGNYVCYVGHAKTMSSADQKQFYTFLKNRLKNVNGISSEDAEWIDTEIKNGTLLPKQTKRDNSVIPHQLQLREFELILDNMQEMYPFLKENREKLLKIFNFVIPYYVGPLKGVVRKGESTNWMVPKKDGVIHPWNFDEMVDKEASAECFISRMTGNCSYLFNEKVLPKNSLLYETFEVLNELNPLKINGEPISVELKQRIYEQLFLTGKKVTKKSLTKYLIKNGYDKDIELSGIDNEFHSNLKSHIDFEDYDNLSDEEVEQIILRITVFEDKQLLKDYLNREFVKLSEDERKQICSLSYKGWGNLSEMLLNGITVTDSNGVEVSVMDMLWNTNLNLMQILSKKYGYKAEIEHYNKEHEKTIYNREDLMDYLNIPPAQRRKVNQLITIVKSLKKTYGVPNKIFFKISREHQDDPKRTSSRKEQLKYLYKSLKSEDEKHLMKELDELNDHELSNDKVYLYFLQKGRCIYSGKKLNLSRLRKSNYQNDIDYIYPLSAVNDRSMNNKVLTGIQENRADKYTYFPVDSEIQKKMKGFWMELVLQGFMTKEKYFRLSRENDFSKSELVSFIEREISDNQQSGRMIASVLQYYFPESKIVFVKEKLISSFKRDFHLISSYGHNHLQAAKDAYITIVIGNVYHTKFTMDPAIYFKNHKRKDYDLNRLFLENISRDGQIAWESGPYGSIQTVRKEYAQNHIAVTKRVVEVKGGLFKQMPLKKGHGEYPLKTNDPRFGNIAQYGGYTNVTGSYFVLVESMEKGKKRISLEYVPVYLHERLEDDPGHKLLKEYLVDHRKLNHPKILLAKVRKNSLLKIDGFYYRLNGRSGNALILTNAVELIMDDWQTKTANKISGYMKRRAIDKKARVYQNEFHIQELEQLYDFYLDKLENGVYKNRKNNQAELIHNEKEQFMELKTEDQCVLLTEIKKLFVCSPMQADLTLIGGSKHTGMIAMSSNVTKADFAVIAEDPLGLRNKVIYSHKGEK

SEQ ID NO: 22939 - protein, 1283 aa, unidentified
  REGION 1..1283: note = Cas Enzyme sequence
TEKIEKEELAWILLNFNQKRGYYQLRGEEEEEFLNKIVEFHSLAITDVKADDQQKGKSEVWYSLVLENGWIYRRSSKIPLYDWKDKVRDFIVTTELNDDGTVKKDKEGREKRSFRAPGEDDWTLLKKKTEQEIEQANETVGAYIYDTLLQNPKQKIRGKLVRTIERKYYKDELRQILKKQSEYHSELQDEEIYNDCVRELYKNNETHQLTLSKRDFVHLFLDDIIFYQRPLKSKKSSITNCTLEYREFTDKEGKRQIQHLKAIPKSHPAYQEFRLWQWIYNLSIYKKDDDTNITKSVLQNTEDYEKLFEFLNNRKDVDQKAVIKYLLANTGLKGKDLNNEIIKYRWNFVEDKLYPCNETHTNIKNRIEKVVNIGNDFLTAETEQQLWHIIYSVTDKTEYEKALKQYAKKHKLDIDSFVENFIKYPPFKSEYGSYSVKAIKKLLPLIRLGKYWEWDNIDHKTKQRIDKIINAEEDSEIRVLVREKASKNELKTPNDFQGLQLWLASYIVYDRHSEATSNDKWNSLEDLSQYLEDFKQHSLRNPIVEQVITETLRVVKDIWAKFGNGAKDYFNEIHVELGREMKNTAEERKSITNLVVENENTNLRIKSLLAELKNDPKIENVRPHSPMQQEILKIFEDGVLKSNIELPDEILKISKSALPTNSELQRYKLWLEQKYRSPYTGKIIPLHKLFTPAYEIEHIIPQSRFFDDSFNNKIICESAVNKLKDNLLGLEFVKKHHGEIIELGIGNESVKIFSEEEYLDFIKQNYLNNRSKRNKLLLDEIPDKMIKRQLNDTRYISKFISALLSNIVRSAHNDDGINSKNVIPGNGKITSRLKQDWGLNDVWNDLILPRFQRMNKLTNTTDFTTYNEKYQKELPTVPIGLSKGFQKKRIDHRHHALDALVIACATRDHVNLLNNLYAKSNERFDLNRKLRKFEKVSYKQPKKGKTVEREVPMDFIKPWENFTEDANNNLESIIVSFKQNLRVINKTTNKYTNWIEKDGKKVKGVVSQTKGDSWAIRKPMHKDTVSGEVKLAWIKVPKGKRLTATRKPIDITFDLKTIESITDTGIQKILKNYLISKENNPELAFTPEGLEEMNKNILIYNDGKLHQPIYKARVFELGSKFPLGQIGNKESKFVEAAKGTNLFFAIYIDNKGKRDYDSIPLNIVIERQKHGLNAVPETNEKGYKLLFHLSPNDLVYAPTLEEIPEIGHKQIDINYIKKVNRVYKMVSSSGKQCFFIKHEVSTPIVYKSEYSALNKMERSIDDLMIKDVCSKIIVDRLGNVIYT

SEQ ID NO: 22940 - protein, 959 aa, unidentified
  REGION 1..959: note = Cas Enzyme sequence
MLQSDEQHNRKEIELWHILYSVNDPILLRKALNTYANKNGLDVETFVEDHIHIKPFDADYGAYSEKALKRLLPLMRIGKYWHEEDIDAKTRSKIDIIINGEADDTIYDVAAKNHISLTSIDSFQGLPLFLAEMIVYGKRKEVNVWKSPDDITYYLKYDFKQHSLHNPVVETVLGETLRVVRDIWAKYGKIDEIHVEMGRDLKQPKDKRIKDMQRNSNNEHTNLRIRRLLQEFVNPDCEIDNVRPYSPSQMELFKIYETDVLNSNEPDDDILSIIKDLGDTSKHVPHQEIIKYRLWLEQRYTSPYTGDMIPLSKLFTPAYEIEHVIPQSRYFDDSLSNKVICESEVNKLKDNRLGYEFIVAEHGHIIGKHRVFDKVQYEEYVREHYANDRLKMKKLLMEDIPDSFIQKQLNDSRYIARKTIEILSSVVRITDESGEIADNDKAATAINVIATNGSITDYLKKDWGVKQVWSHIIAPRFERLNEITSTEQFGKWIEKNGERYFQTEVPIDLSSGFNKKRIDHRHHAMDAIVIACATRNHVNYLNNSAAIDKKTDLRMDLRSKLCFKDKTDGNGNYVWRLNKPWDTFTQDVESQLDSIIVSFKQNLRVINKMTNHYSHYVNGKKEIVPQNTTDSWAVRKSLHKATVSGAVRLQTQKKVSLKDALNTDWHLIADKDVRKAIKNLIEQYHKFDAKIILKYFKDRKNKLDKKDISKVMVYYTPEVPELSASRVMVDDTFDEKKINAVTDSGIRNILLNHLKANDNNPKLAFSPEGITRMNQNLKELNGGKDHKPIIKVRKYETLGMKFSIGERGNKNKKYVEADKGTNLFFAIYADKDGNRSFESIPFYEAMECMKNKLPVAKDINDKGERLQFVLSPGDLVVVTDENGTIPDMENTRIYKVVSLNKGQAFFIPQYTATPIINTAELGSNNKSENSWDGVAIKKNCFKLIVDRLGNIEKIIKGNV

SEQ ID NO: 22941 - protein, 1482 aa, unidentified
  REGION 1..1482: note = Cas Enzyme sequence
MKKILGLDLGTNSIGWSLIEQDFENKIGKILGIGSRIIPMSQEIMGEFDKGNSISQTAERTRFRGIRHLRERHLVRRERLHRVLNVLGFLPKHYASQIDFEKRIGQFLEDTEPKLAYNNNNFIFKKCFEEMLEDFRKNQPELLNRKNRIGEDAKIPYDWTIYYLRKKALSRKIEKEELAWLILNFNQKRGYYQLRGEEDDAPSNIKEYVELFKVVKIIKGEPDKRNNKKHWYNITLENGWIYSATFSSEPKWLNTEKEFLVTEELDEKGNIKIVKDRRQDKDGKEKRKITPLPSFEEIDLMSKQEQDKIYKKIKAKTEITIANSGKTVGTFIYDTLLQKPNQKIRGKLVRTIERRFYKDELKSILQKQIELQPELFGDDLYNDCVRELYRNNEAHQFTLSKRDFVHLFVEDILFYQRPLKSQKSSIGNCSLEFRKYKDENGNEKTEYLKAISKSHPLYQEFRVWQWLFNLKFYQINDDTDITADLLKNTEDLENLFSFLMTKKEVGHEDVLKYLFDSKKLKSKDLKAEIAKYRWNYVYDSVKGESKKYPCNETGYEFRKRLEKVTNLSDNFLTFEIEQQLWHIIYSVTDKIDFEKALKSFANKHGIDENSFVENFKKCPPFKSEYGSYSEKAIKKLLPLMRLGKYWNWQAIDIKTKDRIGKILTGEYDEEIKIRVREKAIHLTEKNHFQGLQLWLAQYIVYDRHSEAALAGKWKTVIDLEKYLKEFKQHSLRNPIVEQVVTETLRVVKDIWLKYGNGTGNFFDEIHIELGREMKNTAEDRKKITNQVSENENTNLRIKSLIMELKENSDGNLPVKDVRPYSPIQLEALRIYEDGVLNSGIEIPDDIVKISKTAQPSKTDLIRYKLWLEQKYRSPYSGEMIPLSSLFSENYQIEHVIPQSRYFDDSFNNKVICEAAVNQLKDNQLGLEFIKNHHGEIVETGNGNKLKIFTEDEYKDFVNKQYDKNRNKRNKLLLEEIPEKMIERQLNDTRYISKFISNVLSNVVRSDKEDDNINSKNVIPGNGKITSILKQDWGLNDVWNELILPRFERMNKISNSECFTSKNTNNKVIPTVPLELSKGFQKKRIDHRHHAMDALVIACATRNHVNLLNNKHAKSNERFDLNRKLRKHEKVAYNDPNTGKGIEKAVPKEFLKPWENFTKEAKDELGKIIVSFKQNLRVINKTTNKYQIFVVKNGKKRKESVQQTKGDSWAIRKPMHKDTVSGEVKLSRIKVPEGKILTASRKAVNISFDLKTIESITDTGIQRILKNYLISKDNNPEIAFSPEGLEEMNKNIGQYNDGKPHKPIYKARIFELGNKFPLGQTGNKRLKFVEAAKGTNLFFAIYQDDNRERSYETIPLNIVIERQKQGLNSVPEINEKGDKLLFHLSPNDFVYVPSIEEHEIPNSVDFLNLNTKQIHRVYKIVSFTGNRLYAIQNQIAKPIVDKIEYTQLNKVEFEIELNNSIKEICWKVQIDRLGNIIKVFGNK

SEQ ID NO: 22942 - protein, 1504 aa, unidentified
  REGION 1..1504: note = Cas Enzyme sequence
MKNIVGLDLGTNSIGWAVVNGSVNDDGSEQLVKIQASGSRIIPMDAAMIGDFNKGNSISQTAERTRLRGVRRLSERYLLRRERLHRILDILGFLPFHFAQDLDRHGKIVKGKEPKLAWRKNEAGQFEFIFQDSFKEMLEDFKLNHPNLITDDKKVPYDWTIYYLRKKGLTSKISKEELAWILLNFNQKRGYYQLRGEEEEENKNKLVEFYALKVVAVEDSGEKKGKDIWYNVHLENGWVYRRTSNMPLDWVGKTKEFIVTTDLEKDGTPKKDKEGNVKRSFRAPKEDDWSLLKKKTEADIDQTHKTVGVYIYDTLLGNPSQKICGRLVRTIERKYYKEELKQILEKQKEFHLELQDRALYAACIEELYPINEAHRNNVGNRDFTYLFLEDILFYQRPLKSKKSLIDNCPYEENQGLDKETGEIKSFPVKCIAKSHPLFQEFRLWQFIVNLRIYRKDLAQDVDVTNELLKTEEDYVALFDWLNGKKEIDQKAFLKYPIFGLKKEIENYRWNYVQDKPYPCNETRSLMLARLEKCDISIEFLTKENEEALWHILYSVEDKNEIVKALQKFADKHDLNASFVDVFQKFPPFKKEYGSYSAKAIKKLLPLMRMGKYWSENSIDKGTRERIDKIITGEYDEKIENRVREKAIHLADVSDFKGLPLWLVCYIVYGRHSEAKEITQWKSPADIDSYLRSFKQHSLRNPIVEQIIIETLRVVRDIWKQVGNIDEIHVELGREMKNPADKRKKMTQQMSENENTNLRIKYLLTEFLNPEYEVENVRPYSPSQQDILRIYEEGVLNSVSDLPEEISDILKKFTETDLKKRPSRSEILRYKLWLEQKYRSPYTGEVIPLGKLFTPAYEIEHVIPQSCYFDDSFSNKVICEAEVNKLKSNLLGHEFIVKHHGEIVELPFGKKVRIFTVDEYEQFVKDNYSRTRSKMKKLLMDDIPEEFVTRQLNDSRYISKVVKSLLSNIVREKGEEEAISKNVIPCTGGVTDRLKKDWGINEVWNKIILPRFQRLNELTGTNKFTTKNVGIQEIPTMPLELQKGFNKKRIDHRHHAMDAIIIACANRNIINYLNNESATAKAELSRYDLQKMLCDKAKTDNNGNYKWVIRKPWASFTQDTYLALENIIVSFKQNLRVINKATNRFLHYNEEGKKIFVKQGKGDNWAIRKSMHKDTVFGEVNLRRIKTVALNEAMKNPQSIVVKDFKRKLLELWNLGFDAKRIKKYFEDNRETWSDINLSKIEVYYFSKDTKDRFFATRKPLDTSFDRKKIENNITDTGIQKILLRHLELKDNNPDIAFSPDGIDEMNRNIIQLNNGKYHQPIIKIRWYEQADKFAVGQTGNKFSKFVEAAKGTNLFFAVYESNILDKKTNTIIKKRNYATIPLNVAIERQKQGLPVAPEDENGNDPIFVLSPNDLVYLPTDDELANGIIAQPLDRGRIYKMVSCTGNEGHFIPARIANPILQTIELGSNNKAQKAWTDEMIKEICMPIKVDRLGNVLESSSSYKK

SEQ ID NO: 22943 - protein, 1518 aa, unidentified
  REGION 1..1518: note = Cas Enzyme sequence
LYIWEKSKKYTMKRILGLDLGPNSVGWALVNSIVKEQTERIWIEMAGSRIIPMDAAVLGDFEKGNSISQTAERTRIRGMRRLRERQLLRRERLHKVLNILGFLPKHYRDEIDFNKHPGKFLANTEPKLPWVKNEQGKYTFLFLNSFEEMLQDFKEHQPSIVSDKKKVPYDWTIYYLRKKALTQKISKEELAWILLNFNQKRGYYQLRGEDEEENTGKQVGYYALKVVSVEATDEKKGKDIWYNVHLENGWVYRRSSNVPLDWEGQVKEFIVTTSINPDGTPQLDKSGEIKRSFRAPKEEDWMLIKKRTEMDIENSQKTVGCYIYDTLLQNPQQKIIGKLVKTIERKYYKEELRQILQKQCILHCELQDKNLYKQCVEALYPSNEAYRTNIVNRDFVYLLMEDILFYQRPLKSKKSLIDNCPYEEYEYVVDKHTGEVKKAHLKCIAKSHPLYQEFRLWQFLYNLRIYQKEKEINGTIHTDVDVTSEFLKIEDDYVTLFDWLNRREKIEQKTLLKYPAFNIKKDVDNFRWNYVEDKTYPCNETRSLILSCLNKANLSEDFLSYQKEEALWHILYSVNDKQEIVKALQTFARKNGLDGTFVDAFKKIRPFNKEYGAYSAKAIKKLLPLMRTGKHWNVESIDGKTKERIDKIITGEYDEKISNRVREKAIYLSDISCFKGLPLWLACYVVYGRHSEQKEITKWETPDDIDAYLSTFKQHSLRNPIVEQIIMETLRVVRDIWKKAGSIDEIHIELGREMKNPADKRKRMTAQILENENANLRIKALLTEFMNPEYEIEDVRPYSPNQQEKLRIYEDGALNAAEQVPEDIETILKKFKENKQPTRSEFLRYKLWLEQKYRSPYTGELIPLGKLFTEAYQIEHIIPQKRYFDDSFSNKVICESAVNSLKGAQLGYEFIKEHHGEKVETGFGKVVTIFSVTAYEQFIKEHYAKSKAKMKKLLMDDIPEQFIERQLNDSRYISKVIKGLLSNIVREKDESGEYEQEAISKNVLVCNGSVTDRLKKDWGMNDVWNNIVYPRFERLNTLIGKECFGHWENKNGKRIFQTEVPLEYQKGFSKKRIDHRHHAMDAIVIACATRNHINYLNNASASKNAQISRYDLQHLLCDKTKTDDKGNYKWVIKKPWDTFTQDTKGILDNIIVSIKQNLRVINKTTNIYQHFDTDGKRTFYKQTKGDSWAIRKPMHKDTVFGIVNLRKTKEVRLSIALDIPYLIVDKKVKKKVFQLLKYKYEKKRIEKYFKENACLWKELNVAKVPVYYFTESSSERMVAVRKTIDTSFNAKKIQESVTDTGIQKILLKHLEQKDDKADLAFSAEGIEEMNRNIIALNDGKKHQLIYKVRMYEPLGNKFNVGTTGNKGKKFVEAAKGTNLFFAIYRTEDGKRIYDTIPLNIVIEREKQGLLPVPDKDEKGNTLLFWLSPNDLVYLPTEEEREFDRINEPIDKKRIYKMVSSSGNQCFFIPVNIANAIVPILELGANNKAEKSWEGNMIKSICIPIKVDRLGNIIKIKKV

SEQ ID NO: 22944 - protein, 1330 aa, unidentified
  REGION 1..1330: note = Cas Enzyme sequence
KEELAWILLNFNQKRGYYQLRGEEEEENKNKLVEFYALKVVAVEDSGEKKGKDIWYNVHLENGWVYRRTSNMPLDWVGKTKEFIVTTDLEKDGTPKKDKEGNVKRSFRAPKEDDWSLVKKKTEADIDQTHKTVGAYIYDTLLGNPSQKIRGRLVRTIERKYYKEELKQILEKQKEFHLELQDRVLYAACIEELYPINEAHRNNVGNRDFTYLFLEDILFYQRPLKSKKSLIDNCPYEENQGLDKETGEIKSFPVKCIAKSHPLFQEFRLWQFIINLRIYRKDLAQDVDVTNELLKTEEDYVALFDWLNGKKEIDQKAFLKYPVFGLKKEIENYRWNYVQDKPYPCNETRSLMLARLEKCDISIEFLTKENEEALWHILYSVEDKNEIVKALQKFADKHDLNASFVDVFQKFPPFKNEYGSYSAKAIKKLLPLMRMGKYWSENSIDKGTRERIDKIITGEYDEKIENRVREKAIHLADVSDFKGLPLWLVCYIVYGRHSEAKEITQWKSPADIDSYLKSFKQHSLRNPIVEQIIIETLRVVRDIWKQVGNIDEIHVELGREMKNPADKRKKMTQQMSENENTNLRIKYLLTEFLNPEYEVENVRPYSPSQQDILRIYEEGVLNSVSDLPEEISDILKKFTETDLKKGPSRSEILRYKLWLEQKYRSPYTGEVIPLGKLFTPAYEIEHVIPQSCYFDDSFSNKVICEAEVNKLKSNLLGHEFIVKHHGEIVELPFGKKVRIFTVDEYEQFVKDNYSRTRSKMKKLLMDDIPEEFVTRQLNDSRYISKVVKSLLSNIVREKGEEEAISKNVIPCTGGVTDRLKKDWGINEVWNKIILPRFQRLNELTGTNKFTTKNVGIQEIPTMPLELQKGFNKKRIDHRHHAMDAIIIACANRNIINYLNNESATAKAELSRYDLQKMLCDKAKTDNNGNYKWVIRKPWASFTQDTYLALENIIVSFKQNLRVINKATNRFLHYNEEGKKIFVKQGKGDNWAIRKSMHKDTVFGEVNLRRIKTVALNEAMKNPQSIVVKDFKRKLLELWNLGFDAKRIKKYFEDNRETWSDINLSKIEVYYFSKDTKDRFFATRKPLDTSFDRKKIENNITDTGIQKILLRHLELKDNNPDIAFSPDGIDEMNRNIIQLNNGKYHQPIIKIRWYEQADKFAVGQTGNKFSKFVEAAKGTNLFFAVYESNILDKKTNTIIKKRNYATIPLNVAIERQKQGLPVAPEDENGNDPIFVLSPNDLVYLPTDDELANGIIAQPLDRGRIYKMVSCTGNEGHFIPARIANPILQTIELGSNNKAQKAWTDEMIKEICMPIKVDRLGNVLESSSSYKK

SEQ ID NO: 22945 - protein, 1064 aa, unidentified
  REGION 1..1064: note = Cas Enzyme sequence
LFIANIRIYQKEKKVDGKLLTDIDVTTEYLSSKDDYVALYEWLCVRKEIEQKTFLKYPAFGLKKEIENYRWNYVEGKSYPCNETRSLILHYLEKAGISSTFLSTKIEESLWHILYSVEDRIELETALRTFASKYQLSCNFVEVFKKFPPFKKEYGAYSAKAIKRLLPLMRMGKYWKVDAIDGNTAERIEKILSGECDEKILNKVREKTIHLSETSDFQGLPLWLACYVVYNRHSEGKEVAKWKSPEDIDIYLKSFKQHSLRNPIVEQVITETLRVVRDIWKRVEQIDEIHVELGREMKNPSEKRRQMTERMLENENANIRIKALLTEFMNPEYEMENVRPYSPSQQEILRIYEDTVLNGAGDIPEDIEIILKKFKENDIKKRPGKSDFLRYKLWLEQQYRSPYTGEIIPLGKLFTTAYEIEHVIPQSRYFDDSFSNKVICESEVNKLKDNMLGYEFIKKHAGEIVELGFGKSVKIFSVEAYERFVGENYYKAGSKKSKLLMDDIPEKFIERQLNDSRYISRVVKGLLSNVVREEDANGEYESEAISKNVIVCSGSVTDRLKKDWGVNDVWNNIVYSRFERLNRLTESQQFGHWENREGKRFFQTELPLEYQKGFSKKRIDHRHHAMDAIIIACATRNHVNYLSNESASKHARIARYDLQRMLCDKSKADGGGNYKWIIQKPWATFTQDVYRTLLDIIVSFKQNLRVINKMTNYYQAYDDAGKKVFKKQKKGDSWAIRKSMHKDTVFGQVNLRKIKEVRLSVALESPEKIVDKKIKEKVLQLFAYQYDKKKIEKYFKENASLWKEVNLAKIPVYYFTDESSELLVAVRKNLDTGFTEKKIRESVTDTGIQKILLNHLSNKGDKPELAFSPDGIDEMNRNLVILNGGKPHQPIYKVRVCEPLGNKFKVGTNGNKSAKYVEAAKGTNLFFAIYETDAGKRTYETIPLNVVIEREKMGWLPVPEKNNKGEKLLFWLSPNDLVYLPTEEELMSRILSDKLDRGRIYKIVSFTGNRLYAIPYNVSNMIWDKNEYTQLNKVESTDMKESIKEICMPINVDRLGHITEIIIK

SEQ ID NO: 22946 - protein, 1255 aa, unidentified
  REGION 1..1255: note = Cas Enzyme sequence
MVSSDDGQAIDGMAVAKEMYDKGLTPGEYVYQRMLEGKYAIPEFYKSDLQEEFDRIWALQKSFHTELTDELYRKLSDRNKSQTWAICRDELGIQGLKSSFTGKERLKEAYRYRHLAATQEVNMEVLTCALQEINGQKASLSGLLSKISDRSKELYLNNLTVGQMLLKRIEDNPNNSLKNIVFYRQDYLDEFERIWTVQSKYHTELTHELKKRLRDIIIFYQRPLKSQKGLISLCELETKDIEVAIDGVKKMKNIGPRVCPRSSPLFQEFKIWQTINNIFVNGAALDDEDKSVIAKELIFKDKLKDSDLLKLLFKTTKGQSVNFKEVDGNRTMATLMKACFKIAENLGYDDIDLSKLSSEDQMVRIEGIFKEQGFKTGFLHFDSSLASPEFENQDSYRLWHLLYSYEGDKSASGNESLVKCIMDLCSMDEGSAKILASCTFLPDYGSLSAKAMRKILPYMKDGLEYTAACAMAGYRHSKRSLTKEELDTKEYSDRLSLLPKNTLRNPVVEKILNQMINVVNSVIDVYGKPDEIRIEMARELKKSAKEREEAQRDIASSTAESQKVIEILKGEPFFIQFPTRNDIIRYRLYQELAQNGFKTLYSNTYIPKDKLFSKEFDIEHIIPQALIFNDSFANKTLESRQCNLEKGKETAMDYVKSKYDETGVQAYCDRVNGLIGKGISKTKAKWLLMEGKDIPEDFINRELRDSQYIAKKAREILESLVKFVVPTTGSVTARLREDWQLVNVMQELNWEKYARLGLTGVREDKDGRRIPFIQDWTKRNDHRHHAMDALTIAFTRRQFIQYLNHLNSKIDVVSWDKKDLDLRDYDLEDIKFGNLSAGDRYGIVKALQDKFLYKDGNDKYRFVPPIPLDEFRRQAKEQLSDILISFKAKNKVCTRNVNVTKNKGGANRKTQLTPRGPLHNETIYGSSLEYVTKENEKIGSSFDTERITTVCKKKFRDALARRLEEFGGDPKKAFTGKNSPEKNPIWVDEHHSEQVPAKVRTVTMGQRFTGRKPIDATLKIEKVIDKRIREILQARLDEFDGKAAKAFSNLDENPIWLNKEKGIAIKRVTVSGPANPVPVRFKRDKDGKPIIDDAGKTIGADFVTPGNNHHIAIFRDSSGKLQEHPVSFLEATIAKSHGLDVIDRNYNKDEGWEFLFTLKQNEYFVFPNSETGFNPLDYDLTDPRNYAEISPNLYRVQSISTNDYFFRHHLETTSEKNNSLYGITWKRIRNASALEGLVKVRIDNLGRIVAVGEYD

SEQ ID NO: 22947 - protein, 1436 aa, unidentified
  REGION 1..1436: note = Cas Enzyme sequence
MKRILGLDLGTNSIGWALVNEAENKDERSSIVKLGVRVNPLTVDELTNFEKGKSITTNADRTLKRGMRRNLQRYKLRRETLTEVLKEHKLITEDTILSENGNRTTFETYRLRAKAVTEEISLEEFARVLLMINKKRGYKSSRKAKGVEEGTLIDGMDIARELYNNNLTPGELCLQLLDAGKKFLPDFYRSDLQNELDRIWEKQKEYYPEILTDVLKEELRGKKRDAVWAICAKYFVWKENYTEWNKEKGKTEQQEREHKLEGIYSKRKRDEAKRENLQWRVNGLKEKLSLEQLVIVFQEMNTQINNSSGYLGAISDRSKELYFNKQTVGQYQMEMLDKNPNASLRNMVFYRQDYLDEFNMLWEKQAVYHKELTEELKKEIRDIIIFYQRRLKSQKGLIGFCEFESRQIEVDIDGKKKIKTVGNRVISRSSPLFQEFKIWQILNNIEVTVVGKKRKRRKLKENYSALFEELNDAEQLELNGSRRLCQEEKELLAQELFIRDKMTKSEVLKLLFDNPQELDLNFKTIDGNKTGYALFQAYSKMIEMSGHEPVDFKKPVEKVVEYIKAVFDLLNWNTDILGFNSNEELDNQSYYKLWHLLYSFEGDNTPTGNGRLIQKMTELYGFEKEYATILANVSFQDDYGSLSAKAIHKILPHLKEGNRYDVACVYAGYRHSESSLTREEIANKVLKDRLMLLPKNSLHNPVVEKILNQMVNVINVIIDIYGKPDEIRVELARELKKNAKEREELTKSIAQTTKAHEEYKTLLQTEFGLTNVSRTDILRYKLYKELESCGYKTLYSNTYISREKLFSKEFDIEHIIPQARLFDDSFSNKTLEARSVNIEKGNKTAYDFVKEKFGESGADNSLEHYLNNIEDLFKSGKISKTKYNKLKMAEQDIPDGFIERDLRNTQYIAKKALSMLNEISHRVVATSGSVTDKLREDWQLIDVMKELNWEKYKALGLVEYFEDRDGRQIGRIKDWTKRNDHRHHAMDALTVAFTKDVFIQYFNNKNASLDPNANEHAIKNKYFQNGRAIAPMPLREFRAEAKKHLENTLISIKAKNKVITGNINKTRKKGGVNKNMQQTPRGQLHLETIYGSGKQYLTKEEKVNASFDMRKIGTVSKLAYRDALLKRLYENDNDPKKAFAGKNSLDKQPIWLDKEQMRKVPEKVKIVTLEAIYTIRKEISPDLKVDKVIDVGVRKILIDRLNEYGNDAKKAFSNLDENPIWLNKEKGISIKRVTISGISNAQSLHVKKDKDGKPILDENGRNIPVDFVNTGNNHHVAVYYRPVIDKRGQLVVDEAGNPKYELEEVVVSFFEAVTRANLGQPIIDKGYKTTEGWQFLFSMKQNEYFVFPNEKTGFNPKEIDLLDVENYGLISPNLFRVQKFSLKNYVFRHHLETTIKDTSSILRGITWIDFRSSKGLDTIVKVRVNHIGQIVSVGEY

SEQ ID NO: 22948 - protein, 1498 aa, unidentified
  REGION 1..1498: note = Cas Enzyme sequence
MKHILGLDLGTNSIGWAVINAIKEENTQKEQLIGINTAGSRIIPMDAAQLGDFNKGNTVSQTANRTQFRGVRRLYERKKLRRERLHRILQLLGFLPKHYASQLDRYGKFIANSEPKLAWTTNTHEPSYFIFQSSFQEMLNDFLQNNNQVKKVPYDWTLFYLRKKALTQKIEKEELAWILLNFNQKRGYYQLREEETEKVSSKTRQYFDSQIVTDITDTGQIYKGLKIFTITLENGEKGKFFSKNMPDWKGQKKDIIAIIDLDKNGNDKYDENGELSRRFKIPTEQEWEEQWELIKTKTQKDLDTSHKTVGAYIYDTLLQTPSQKIRGKLIRTIERKYYKDELNQILKKQEEFHPELRDSNLLEACIEELYPNNEAHRNAIAKYSISQLLIEDILFYQRPLKSKKSLISNCPYEEYTYTNKETGEICTSSLKCIAKSHPLFQEFRLWQFISNLRIYQKEGTINGKFTTDIDVTSQFLKTEDDYANLFDWLNQKKEIRQDTFLKNPAFGLKKNTANYRWNYVEDKTYPCNETHYKILSYWEKAGIEQSALTSEIEEKLWHILYSISDKNELKKALQHFADKNYLSDKFADTFQQIPPFEKDYGSYSAKAIKKLLPLMRIGKFWKIENIDSTTLNRIEKILTGEFEENIKNQTREKTIHLDNLYSFQGLPTWLACYIVYNRHSEIKDVTKWQQPSDIDAFLNAFKQHSLHNPIVEQIIMETLRTVRDIWKQTGHIDEIHVELGREMKNPAEKRRKLTQQIQENENTNLRIKALLAEFANPELGIENVHPHSPSQQDLLRIYEEEVLNETKDIPEDIAVILKKFNEVDTKKRPSTSDVLRYKCWLEQKYRSPYTGAMIPLGKLFTPAYEIEHVIPQSRYFDDSFTNKVICEAEVNKLKGNMLGYEFIKNNQERIVELGFGQNVKIQTVEAYELFVKEHYSYNRTKMQKLLMEDIPDQFIERQLNDSRYISKLIKSLLSNIVRDEGEEEATSKNVIVCTGSITDRLKKDWGINDVWNKLILPRFIRLNEITESNRFTTTNACNKTIPAMPLDLQKGFNKKRIDHRHHAMDAIVIACANRNIVNYLNNESASKNAKISRQDLRQILCKKTKTDNLGNYQWLIDKPWDTFTQDMYSILSNIIVSFKQNLRIINKTTNHYIHYENGKKVNCSQKQSDSWAIRKPMHKETVYGEINLRRTTTATLKAALENPQRIIEKDLKKKIKELLTQGLNEKQIKKYFEDNKDIWQEINLKKIPVYYFTKETANRFFACRESINTTFNKKKIEEKVTDTGIQQILLRHLEQNGNNPEQAFSPEGIEQMNKNIMSLNNGKFHQPIYKVRTYEQADKFAVGQTGNKSTKFVEAAKGTNLFFAIYETAHKRSFASIPLNVVIERLKKGLSPAPENEKGNLPKFILSPNDLVYVPTKEEIENGHINQPIQKDRIYKMVSCTGNQCFFIKSNVANTIIDKYEFSPLNKMERAITGEMIKETCIPIQTDRLGNIITPISL

SEQ ID NO: 22949 - protein, 1424 aa, unidentified
  REGION 1..1424: note = Cas Enzyme sequence
MKRILGLDLGTNSIGWALVNEAETDEEVSSIIRLGVRVNPLTVDETQNFEKGKSITTNAERTLKRSMRRNLQRYKLRRDALVEFLKELGFITDETILSEQGNRTTFETCRLRAKAAEEEISLEELSRVLLMINKKRGYKSSRKVKKEEDGVLIDGMEIAKKLYEEDLTPGQLCSQLLESGKKVLPDFYRSDLQEELDRIWSVQKQFHPDVFCDAAKEEIKGKNRSQTWAILANYFVWKEEVVGWNDREAKNETIEKECKLVGLKRTTKGYELKKENYRWRAQALTEQLGLEEIAVVLQEINGQINASSGYLGAISDRSKVLYFNHQTVGQYQMAELDKNPHASLRNMVFYRQDYLDEFDRIWEKQAEFHKELTAELKKEIRDMIIFYQRRLKSQKGLISFCEFERLEIVVEKDGKKQTKVIGCKVIPRSHPLFQEFKVWQTLNDIKVLGREKKRNALSASESRALYPEEKEILARELAIKENMKKADVLKLLFENPQELDLNFKQIDGNRTGFSLFSAYSKMIEKYGYEPLDFKKPADEIIGQLRTIFTDLGWNTNLFTIDLTKEGKELEMQPYFRLWHLLYSFEGDNTSTGNGKLIEKIMQLCGVEKEYAVELASLSFQDDYGSLSAKAIKRILPYLKEGNLYDVACEYAGYRHSKSSLTKEEIENKVLKGKLEVLPKNSLRNPVVEKILSQMVNVINTIIDTYGKTDEIRVELARELKKSAKEREELTKAIAKSTREHEEIRKLLQDEFGMMNVSRNDIIRYKLYEELKDNGYKTLYSNQYIPKEKIFSKEIDIEHIIPQSRLFDDSLSNKTLEYKAINIEKGNKTAYDFVKEKYGEEGLQQYINRCESLFNDKKAKLRKLKMEQKDIPDGFIDRDLRNTQYIAKKALAMLNEICRRVVATTGSITDQLREDWQLVDVMKELNLPKYEALGFVETYEDKDGRKIKRIKDWTKRNDHRHHAMDALTVAFTKDAFIQYFNNKNAAQDSGNRNHTNIIGIKTRYFDKGRALPPIPLEQFRIEAKQHLEKLLVSIKAKNKVVTVNVNRTKKRKGENTKIQQTPRGQLHLETVYGSHKQYVTKIEKVNASFDAAKIATVSKRAYRNALLKRLETFGNDPKKAFTGKNALEKNPLYADKYQTIRVPEKVQTVEFETIYTIRKPVDPALNVDKVVDVKVRAILERRLKEYGGDPKKAFVNFWENPIWLNKEKGISIKRVSIRGINNAQSIHVKKDKNGNPIWDENGKQIPVDFVNTGNNHHVAIYRKPVLDKKGQVTFDEDGNLMYELDEVVVPFFEAVTRANLGLPIIDKDYRKSEGWQFLFSMKQNEYFVFPNEKTGFNPKEVDLLNPDNYAMISPNLFRVQTMSKVMYGNNVVRDYKFRHHLETTVKDMKELKDIAYKQYKTLSFGNSVVKIRINHIGQIVSVGEY

SEQ ID NO: 22950 - protein, 1075 aa, unidentified
  REGION 1..1075: note = Cas Enzyme sequence
MKRILGLDLGTNSIGWALVNEAETDEEVSSIIRLGVRVNPLTVDETQNFEKGKSITTNAERTLKRSMRRNLQRYKLRRDALVEFLKELGFITDETILSEQGNRTTFETCRLRAKAAEEEISLEELSRVLLMINKKRGYKSSRKAKREEDGVLIDGMEIAKKLYEEDLTPGQLCSQLLESGKKVLPDFYRSDLQEELDRIWNVQKQFHPDVFCDAAKEEIKGKNRSQTWAILANYFVWKEEVISWNDREAKNETIEKECKLVGLKRTTKGYELKKENYRWRVQALTEQLGLEEIAVVLQEINGQINASSGYLGAISDRSKVLYFNHQTVGQYQMAELDKNPHASLRNMVFYRQDYLDEFDRIWEKQTEFHKELTAELKKEIRDMIIFYQRRLKSQKGLISFCEFERLEIVVEKDGKKQTKVIGCKVIPRSHPLFQEFKIWQTLNDIKVLGREKKRNALSASESRALYPEEKEILARELAIKENMRKADVLKLLFENPQELDLNFKQIDGNRTGFSLFSAYSKMIEKYGYEPLDFKKPADEIMGQLRTIFTDLGWNTNLFTIDLTKEGKELEMQPYFRLWHLLYSFEGDNTPTGNGKLIEKIMQLCGVEKEYAVELASLSFQDDYGSLSAKAIKRILPYLKDGNQYDVACEYAGYRHSKSSLTKEEIENKVLKDKLDVLPKNSLRNPVVEKILNQMVNVINTIIDTYGKPDEIRVELARELKKSAKEREELTKAIAKSTREHEEIRKLLQAEFGMMNVSRNDIIRYKLYEELKDNGYKTLYSYQYIPKEKIFSKEIDIEHIIPQSRLFDDSLSNKTLEYKAINIEKGNKTAYDFVKEKYGEEGLQQYINRCESLFNDKKAKLRKLKMGQKDIPDGFIDRDLRNTQYIAKKALAMLNEICRRVVATTGSITDQLREDWQLVDVMKELNLPKYEALGFVETYEDKDGRKIKRIKDWTKRNDHRHHAMDALTVAFTKDAFIQYFNNKNAAQDSDNRNHTNIIGIKTRYFDKGRALPPIPLEQFRVEAKRHLENLLVSIKAKNKVVTVNVNRTKKKKGENTKIQQTPRGQLHLETVYGSLK

SEQ ID NO: 22951 - protein, 1507 aa, unidentified
  REGION 1..1507: note = Cas Enzyme sequence
MKKILGLDLGTNSIGWAVVTSVDEGQNENRLIELSGSRIIPMDAATLGDFDKGVTKSQTSERTTFRGIRRLRERGLLRRERLHKVLKILGFLPEHYANEIDFDHHPGKFKPDVEPKLPWKKNEMGQWVFLFQNSFQAMLADFSHYQPEWVADSKKVPYDWTIYYLRKKALTEKISKEELAWILLNFNQKRGYYQLRGEDEEEPSNKLKEYCALQVVRVEATDEKKGKETWYNVHLENGWIYRRTSAVPLKWEGMVKEFIVTTDLNEDGTPKLGKDGSVKRSFSIPKEGDWTLIKKKTEADITKSNKTIGTYIYDTLLRNPGQKIKGQLIRTVERKYYKEELRAILLKQISFHSELQDNDIFKRCVEALYPNNEVHKRNIANRDFVYLFIDDILFYQRPLKTKKSLIDNCPYEENQYVDKETGEIKRVSIKCIAKSQPLFQEFRLWQFIDNIRIYKREKEVDGRLQTDVDVTVDFLKTEGDYVALFEWLNDKGKIDQKSFLANPAFGIKKVAEQYRWNYVEDKSYPCNETRSLILSLLEKTEIPTSFLSEEGGREEALWHILYSVEDKQEIVKALTTFATKYNLPDRFVEVFCKCPPFKKEYGAYSAKAIKKLLPLMRRGKYWTDTAIDDKTTERIKKIINGEFDESICKQVREKCVNLSTLNDFRGLPLWLACYIVYNRHSEAKETTKWESPEDIDIYLRNFKQHSLRNPIVEQVVLETLRTVRDIWKKVGRIDEIHVELGREIKNSSEKRKQISEQIQANENANLRIKALLIEFMNPEFGVENVRPYSPSQQELLRIYEDGVLNSVEELPDDIAVFLKKFDVMRQPTHSEFLRYKLWLEQRYRSPYTGNVIPLGQLFTPAYEIEHIIPQARYFDDSFSNKVICESAVNKLKDNLLGYEFIKEHHGRKLSEHIQIFSVEAYEAFVKEHYAKSRNKMKKLLMDEIPEKFIERQLNDSRYISKLVKRLLSNIVREKDKDGEYEQEDISKNMVVCTGTVTDRLKRDWGMNDVWNQIVYPRFDRLNHLTDSCQFGGWEDKAGKRVFQTAMPLEYQKGFNKKRIDHRHHAMDAIIIACATRNHVNYLSNESASKNSKVSRTDLQRQLCDKKKTNDKGDYIWSIKKPWDTFTQDARKSLEHIIVGFKQNLRVINKSSNTYQCFDEHGIKVLKKQVHGDNLAIRKPMHKDTAFGSVNLRRVKEVRLSVALDAPSMIVDKKMKKKVLELMSYKYDKKGIERYFKENIYLWKNLNLSKVPVYYFTDNTSEPLVAVRKLLDASFNMKKIKEAVTDTGIQKILLNHLSNNDDNPALAFSPDGISEMNKNLTVLNGGKLHQPIYRVRVYEPKGNKFNVGSVANKRSKYVEAAKGTNLFFAVYQTSSGDRVYETIPLNIVIERLKMRWTPVPETNAKGDRLLFTLSPNDLVYIPTVEECESGNISPEIDSRRIYKMVSSSGPQCFFVPHTIANPIVSTLELGANNKAEKSWDGEMIKSICVPVKIDKVGNIISIGGRKSL

SEQ ID NO: 22952 - protein, 1540 aa, unidentified
  REGION 1..1540: note = Cas Enzyme sequence
MKNILGLDLGSNSIGWAIVKALKNEDGKEILQSIDLAGSRIIPMDQATLGNFENGNSVSQTRERTGYRSARRLRERYLLRRERLLRVLNCMGFLPEHYSQNIDKYGKFFLDNEVKLSWKKDKMGKNEFIFLDSFNEMLEDFRHSQPQLLLDGRKVPYDWTIYYLRKKALTEKISKEELAWILLNFNQKRGYFQLRGEDEEVQGKKIEFYALKVVRVEDTGEKKGKDTWYNVYLESGLGDTDDYWVYRRASSVPIDEWEGQVKEFIVTTTLDNNGSPQIDKEGKVKRSFSIPKPEDWMLVKKKTEVDIKSSGKTVGTYIYDTLLQKPDQKIKGKLIRTIERENYTNELSLILENQKKFHLELQDRELYHQCIELLYCKNEAHKRVIGTWDFTSLFIKDILFYQRPLKSKKALIDNCPYEESFYIENGEKKSKPRKCIAKSHPLFQEFRIWQFISNLRIYQKVKEVDGKLQFNVDVTSDFLRDESAYVELFKWLNERAEVSQEDLLKHLGLKKTKTEDTVSLYRWNYVEDKKYPGNKTRSSILKKLLNDEKEALSEDIELKIWHLLYSVSAQSEIDKALSSKNVSTKGIYSGLSVYFSDETIQKIKNVKLESGYGSYSAKAIGKLLPLMRRGKYWNLESIDNHTKERIEKILNGECDETIRARTREKSISLTDISQFKGLPLWLACYIVYDRHSELKTIKKWNGPEDIDKFLKEFKQVIMETLRVVRDIWRRVGSIDEIHIEMGRDMKQTAQERARRSAIISRNENDNLRIKALLHEFMNPELGIENVRPYSPAQQEILRIYEDGVLSSVSEIEDEIKNILKKFNESEEGKRPTKNEIIRYKCWLEQKYRSPYTGEIIPLGKLFTPAYQIEHIIPQARFFDDSFTNKVICEAEVNAKKGDLLGYEFVKEKGGEIVELSGGRNVRIFSVEEYEDFVKEHYKSNKQKMQRLLAEDIPTEFSHRQLNDSRYISKYIRNLLSNIVREDDEQESVSKNVISCNGAITDRLKKDWGVNDVWNHIILPRFVRLEEIRADNGEKFTAFNQEGHLIPSMPLMYQKGFNKKRIDHRHHAMDAIVIACTTRDHVNLLNNECSNTQNNANKHQLSRKLRRYENVSYKQDGKLKEREVPKEFLKPWEEFTRDVEFALKNVIVSFRQNLRVLNKTVNYFQHWKDNSSEKEWKEQKSADHWSIRKPLHKETVSGEVFLWRTRFVSLREALTNPKRIVEKDLRSKILELQSKGYDTKRIKKYFEDNKDVWQDVNLSKIEVRYYSREIVDPQTELPKNRYFATRFGNDLISLFSGVSNFEKAKKIIESITDTGIQKILFRHLENKGNDPVLAFSPEGIDEMNRTIKTLNNGKDHKPIYKVRIYECSTMKFPLGSVGNKSKKFVEAAKGTNLYFAVYEKEVENDRGECHKERTFKTIPLNDVIRNLKQGLSIAPNDENGNPPAFILSPNDLVYLPTKEESETDSISQPLDRNRIYKMVSCTGYQVFFVPAFVAAPVLQKIELGSNNKSERARTDEMIKESCIPIKVDRLGMLISINGKAV

SEQ ID NO: 22953 - protein, 1274 aa, unidentified
  REGION 1..1274: note = Cas Enzyme sequence
MKTILGLDLGTTSIGWALIEVNENNIPIRILAMGSRIIPLTTNDKTQFEKGQSISKNQDRTKIRTQRKNYDRKQLKKSDDFKFSLKRELEKLCIFPSKELLNLPMLELWKIRSDASSKPIEAEQLGRILYMLNQKRGYKSARSEANADKKDTDYVTEVKGRYVELKDRGQTIGQYFYEELSNANQHNSYFRIKEKVYPREAYIEEFDTIINVQKEHHSFLTDSVINKLRNEIIYYQRKLKSQKGLVSICEFEGFEKIIFDKEKQKEKPVFVGPKVTPKTSPLFQLCKIWETVNNITLKVKNPEGSKYKWSDKILTLDEKQKVVEYLFVNPIITYSELLKILNLKKDDVFANKQIQKGIQGNITYSEIHKIIGDSKWLNFDITIDEIQNLAILVDKKTGEILKEQQSLIISKSFEKEPLYQLWHTIYSIKELDECKNALIKRFGFDEETASQLSKIDFNKQAFGNKSTKAIRKILPYLIQGYGYSQACSLAGYNHSNSLTKEEREQRQINDKLELLPKNSLRQPIVEKIINQMINVINSIIDNYGKPDEIRLELARELKQSKDERDEADKTNTNNKKQNELIAKRLEVMGIPSTKKYIQKYKFIFPVKDKKWKEADIVNQCIYCGEHFNLTEALTGDNFDVDHIIPKALLFDDSQTNKVLVHRYCNSNKLDKTAYDYIANKGDAELQKYIHRVDDWFKRGILSYGKMQRLKTSFEEYLERKKQKKETEADKKLWENFIDRQLRESQYIARKSREILEQISNKVTVTEGTVTAKLRKLWGWDDVLMNLQLPKYRELENITGQKYIQTIEWTSDHGKRTHKKEEIINWTKRDDHRHHAVDALVIACTQQGFIQRINTLNSSNVRDEMFRKVEGAEILYNEKLTLLEKYLVTQKPFTTSQVEKEADKILVSFKAGKKIATISRFKAKGKNKTKGVIVPRGALHEQSVYGKIKIEDRDKPLKYLLENSEKIINKTIKSLVQQRLKDNNGNVKLALSSVKKNPIYLDNKKEKILDKASCFKHTTVMKYDLINLKVNQAEDIVDKKVKELVKERLNQFGNKEKEAFKDTLWFNEEKQIPIRTVRLFARPDANSLQPIKKDEHGKEIGFVVQGNNHHIAIYQNKEGKQIQHSCTFWHAVERKKNNIPIIIKNSTELWNSMVNKELPETLLQMLPEDGLILDFSMQQNEMFILGLSEEEFNDAIKNMDKSILSKHLYLVWSISNNDFWFRHHLETKNTELKNTEGAKESKRYYRFKSVGSLVSINPQKVRINHLGDIVSVGEY

SEQ ID NO: 22954 - protein, 1420 aa, unidentified
  REGION 1..1420: note = Cas Enzyme sequence
LGKNFTKPEKIVNFVTIIFTNVNHDIMKRILGLDLGTGSIGWAVVDQAETEGENSQIIKLGVRVVPLTVDEENNFEAGKTITTTADRTLKRGMRRSLQRYKQRRKALVSILKRKHFITDDTLLSEDGPRTTFETYRLRAKAAKEEISLNELARVLLMINKKRGYKSNRKANKQEDGQLVDGMDIARKLYDEHLTPGQYTYQLLRSRNGKTKVPSFYRSDLVAEFNAIWERQAEFYPDVLTEELKKKVMGRGKRDTASIFFAAKGVSTAENRDRKTKLIKSYIWRTEALNGKLDIEAVAAALCDINGEIAGSSGYLGSISDHSKELYFQHLTVGEYLMKQLAANPHYRVKNRVFFRQDYLHEFNTIWETQAKFHPELTEELKHEIRDVVIFYQRRLKSQKSLISFCEFEGKQITLSDGKKVMTGPRVSPKSSPIFQEFKIWQELNNVVIENRAVKASKAKKPSEPTLFPMLEVEKYTPLTSEQRKLLHDELSVNKELTKSAIMKTLGLNEKQYNINVKSLHGNVTQVALMDAYKNILEWSGHDATKFDKLTYAQKMEFITSVFEALGAKTDFLEFDVNDLTNYAQQPAYRLWHLLYSFEEDNSTSGYDKLTQHIQELTGLDREYAAAIAAVAFTDDYGSLSTKAMCKILPHLLRGLQYDKACEQAGYRHSAESLTREEIDSKPLVDKLETLSKNSLRNPVVEKILNQMIHVVNTATQEYGIQGKDGKHFDEIHVEMARELKQSQSQREEAFKSIGARTKENEAIIKILANEFPIQHPGRNDILRYRLYQELAMNGYKTLYSNTLISKEKLFSKDFEIEHIIPQALKFDDSYSNKTLETHHVNQTKGNKTAIEYVRDTQGEEGVQQYMERIAYLNKPGTTGKYKNLITERNKVENTFLNRDLTDTQYIARKAREILMQATRTVVTTTGTITARLREDWQLVDTMKELNFPKFEKLGMTESYRNRDGHEVRRISNWSKRNDHRHHAMDALTVAFTRLEHINYLNNLSSHADQATMQANAFVLRHKLINERKFIPPMPLDTFRATAMQHLGNILVSIKAKNKVVTPHVNRPRGSNKPQTCLTPRAQLHKETIYGTQMRYVTKEEKVGAAFTAEKIATVATKAYREALMRRLDEHNGDPKKAFTGKNALSKVPLFVDPMHTRKVPDKVKTVTQERIFTIRKSIDKDLKLDKVVDKGIHAILQQRLDEFGGDAAKAFTNLDENPIWLNKEKGIAIKTVTITGVNNATPIHDKKDKDGNPILTAGGDTIPVDYVSLGNNHHVAIYEDEQGDWHEHVVSYFEATERARQHLPIVDKSYNHDEGWKFLFTMKQNEYFVFPDPEQGFYPEEIDLMDENNYALIAPHLFRVQKFTTGDYFFRQQYESTVDAKDVALKGLAFHRITTVNNLKGIIKVRINHCGKIVHVGEYQ

SEQ ID NO: 22955 - protein, 1023 aa, unidentified
  REGION 1..1023: note = Cas Enzyme sequence
SATWVKIWQNLSNVIIRKKGSPALKKKKPSSGDSSLHEPEEYIFDLDARVSLFEELNIKGNLTAKKALELLGHDANQWEVNFVKLEGNHTNQLLYKAYLDILEYEGYDIKELLHVKSNKDEVDLDDLNVPALQIKNMIKDVFGALKIDTSILDFNAELDGVDFEQQPAYQLWHLLYSYEGDDSNSGNERLYRLLNKKFGFTTEHAKILAGISFQNDYGSLSTKAIRRIYPYLKENKYSDACVLAEYRHSKNSLTKEELESRELKDRLEPIKKNSLRQPVVEKILNQMVNVVNALIDKENDQLEASGHQRNFHFDEIRIELARELKKNAAERAEMTSNINAAKLNHDKIVKILQKEFGILNPSRNDIIRYKLYEELKNNSYKDLYSNRYIAKEDLFTNKIDIEHIIPKSRMFDDSFSNKTLAFRDVNLRKGEKTAFDFMQIDTDDEGFELYLSRVENLYKLGMRSPEEGISKAKYKKLLKKESELDDGFIERDLRETQYIAKKARQMLFEVTRSVISTTGSITDRLREDWGLINVMKELNFQKYKALGLTETLERRSGQKIEVITDWTKRNDHRHHAMDALTIAFTRHSHIQYLNYLNARKDEHHKLHSVILAIENKETLSRPDADGSKKRVFKEPITNFRKIAKEHLEDIIISHKAKNKVVTKNKNKIAKNNHVQTTLTPRGQLHKETVYGQYRYSVKKEESVGAKMTYDTIMKVTKPAYRNALLERLKESGGDPKRAFTGKNAISRNPIFLNEAKTECLPEKVQLVWLEKDYSIRKDVNPDNFKDEKLIDKILDEGIKRIMKERLRQYGGDPKKAFTDLANNPIWLNKEKGISIKRVTISGVSNAEPLHYKKDHHGQFLVDENGNNIPADYVSTGNNHHVAVYRDENGNIQENVVSFYEAVSRKNQGLPIIDRSYNQHLGWQFLFTMKQNELFVFPNAQTGFDPLNIDLFDAENKKIISPNIFRVQKIAQKDYFFRHHLETNVENNPATKNFTWKREGTLGLKGIIKVRVNHLGDIVSVGEN

SEQ ID NO: 22956 - protein, 1008 aa, unidentified
  REGION 1..1008: note = Cas Enzyme sequence
NIANNLIAQYKARPKGNDRFADHDTSYIVGSRDAKLPIGSIERDEIQIAKAAEEGFGKETWKKFPEQEKRQALVQITEAYQQFFKSHQRDFYKLPRLGDAMKKFLIDNFPDLLYCPNTFKRLEIGEEKCNCGKCKRINKLYHPSMIAIFPRAKDEYYKYGGKEINKVMLGSPKTGSFKNPMAMRALHELRKLVNYYIVTGQIDEETRVVVEVSRELNDTNKSWAIEKYQEIRRKENEEFAAAILALLNDPDAKGSLANADSDSDIDKFRLWYEMVESPEGFEKNGKFNAVESDRTAKEKKSNRKKIGKYEDSDGDELYEFSENRFENIKKEIWIKLKKAKESIVEKYRLWKEQQCFCIYTGKLIRITDLFKETVIDIEHTIPRSISFDNSLANKTVCFADYNRNVKKNKIPTELVNYNDISSRIESWKQKVKDLEIRVEFWKGKSKRASTPEYKNKAIREKHLWQFELDYWRNKVERFTMKEVKPGFKNSQLKDTQIISKYALHYLKSYFNLVEVQKGEVTAQFRKIFDIQDTGTEKDRSKHSHHVKDAMVLSVIPVASIRDRMLELWYKINEEELLLESDTEKEKTAIQEKIKELKDELNDYKIRLKPTRFNNTIQQLDETILNNNIARNRSIIPASKKVRFKGKDYVAKGDAIRGQLHKDSFLGAIRLVKKDKNGEWIKNGKGNFEFEPIKYVIREDLVYKPNSQSPGFKDVKDLEDQIVDKDLFYKIIKPQIEKNEGDFKEALSKGIWMLDKQGNKVNKIRRVRIVLAVKEPQEIKHQTYISNKPSKILLDRKHKNLYYAENGANILCVLYQKTVQDKKGNEKKNREFEIISLMDIARLVQAGEVKNIDDIEIYRSDKKTGKVAIDETGNKEKPYAILKRGMKVIFYEENIDELYRKDGDKHDDYKKRVSYRTYILVKFSGGQITFKHHLESRNDDKLKKAYPKNEYGVGGTSGFTKKVSDALIQNKLNNYEPWPKLLYTANWLNMAIEGKHFEVMPDGEIKWKY

SEQ ID NO: 22957 - protein, 981 aa, unidentified
  REGION 1..981: note = Cas Enzyme sequence
MLSLILGAGALGWALIKRNEKAGKKLVPEKLGACLIPLSDLEMKSIHFHRYTSYSPADGSGCCPLENRPLTAADPTRDRPDKIGEKTAALSFPIAQEFRVWCCLSCLMLINKGTLERKYLSPGQRQLLFEELTIKGDLEASTVIRLLGLDPEAWGLNASVVEGNQTVHALYEAYFSILQSEGWSAPQLLLKRKIENIWDLPARKITNAVRYAFGMLEIHKVSDVSDAHGESEHSSIIALWQVLSSSSGENRISTLCRQFGYSRKQAAILAEAKLPDGKALLSEKAMRKIIPFLRENRFTQALGLAGYRQDALAGWLSEASLGIRKLCSVAPLLVKAVMDIPGIGNIDQIHISIAPELEEPLVMTERENDEDVRQALITKWKIPDPGENEIRRYRLYQELEFNGFRTICTDTPVPADKLFSPAFIVRKIIPDELLPGDDSLSNHILCIAKLQPEKYETLLDQILMLGGNADLYLERVEALYNIGRQIPGAGISEAKYQKLTLLDRDLGAISERGETGALVLRELRSQLGGLCGSIKPVAYEEINAELRRMGGGDLIRDLKREQYRRLKADSSQTGEGENYYSILGEWCGQRDFRSLMLEAAMAASIDDDAKAEVGEPDAGSGEFIEKLKSQINAAIVTVTRPPGKKSKTEKAASSANEVMLKVDAHFDEAMIRRVVCPGYRSALMNRLRRHDNDPRRAFSGFNNIRSNPVFVRGTGEPVPEHVLVNMAEADPPLVRVDLNPINFRTVEDIFRIRDWGIRNLVLHRFEACRQDPMAAFGNLTENPIWLNREKGISIRQVTVVKEEAATRSRNGDRNLLKPDPQGIHHVEFYRDGEGVLHDRAVTNAEAEERTRHGQPAVDRHFNIQWKWKYELSLRKGDYVFIPPPSSFVPDSEHAPPLSNAEMSLHIYRLENVSWVKSEGMVVFREYIFTHHLELPRAGGVELPEISSRRVRSLRVLETVRKLRTRLLEQDFGVKKEGVEQD

SEQ ID NO: 22958 - protein, 1436 aa, unidentified
  REGION 1..1436: note = Cas Enzyme sequence
LIMNKILGIDLGTNSIGWALRNPKISGNQIEKFGVVTFNKGVGIGKTGEYSFAAERTQKRSTRRLYQARKYRLWKTLEELINQGYCPLSIEDLNKWRHYNKEEALEHNNGGRVYPVNNTSFNNWIKLDFNKDGIPDYTSPYQLRKELAEVKLDFSLEENRFKLGRALYHIAQRRGFKSSRKEVDDVKEKENEEGGEIELQASEKKKSKLLKELYPDFDPSIPIGVFLANKENEGKRVRLDITQYLVRENYKDEIKYIFDFQGLSTEHSLYLKLVESGKNRNDGWIFYKRPLRSQKGLVGKCSLERNKYRAPISHPSFEIFRAWAFLNNIKYKEGSEWNPLPLELKQDIYKDKFFRKSKAYFQFSEIADFIKAKGKNWELNYKPKTTVTACPVSARLKDIFGENYLKIKIPKAQAVKSDKAYYDIKDIWHVLFSFEDQESVAEFAEQKLHLSPDKVKQFVAAWNTLPVGYGMLSINALDKINAFLQKGLIYTEAVLLANVPKIIGQDLYEKNESEIIQGISNVIEENRRQKSILTIVNSLISKHKNLEADETFGYKDSTYTLKDSDIKELYGAIEEQFGTSKWNALSEDKRQDIFNTVRDCYQAYFTSRGLPLRYINDERHAVVQSGGKHYYKTDSGYSGYYRLPKLADSLGEFLQSHFTIEDNLLSKIYHPSELSVYQPAQTDSNGVLKLGSPKTGSFKNPMAMRALHELRKLLNYMIESGQIDSETRVVVEVARELNDANRRWAIEAWQRQRESENQEFECAIQQIKGGDTTAQVKVQESDIDKMRLWYEQNEEEAIPPIASGKRDVKGIKWSDNKKDSFKKIAAQKSLIEKYRLWKEQECQCIYTGKIINLSDLFDENIIDIEHTIPRSQSFDNSLSNLTVCYASYNRTIKKNQIPTQLNNYEEDFGGYTAIKPRLKRWEDKVERIKQQIDFWKTKSKRAVDKSSKDDAIRQRLLWEMELDYWQNKLSRFTIKEVTSGFKNSQKVDTQLISKYAFHYLKTYFEKVDIQKGLITAEFRKIYGLSMENEKKDRSKHSHHAKDAAILTLIPVAAKRDAILEKYYDSIERRIKFTDYLPYKGFDRAHIMDIDAKILINNITNNQALTPAKKKVRKRGKEQFIPGTNKVKWATGDCIRGQLHQETFYGAIRPAKRGENGSLLKDDTGQFIQEEKVKYVVRVPFQYKKDSNSPGFKTLEEIQKCIVDEGLKKDIEQQVKEAGGLKEAFEKGIYLLDKYGNPHGNKIRHIRVWANVTEPLPIKKQTNLSRAEYKQYYWAANATNSFFAIYEGEGKKDFDYRNLYETAQLLSRNGVTTPEELFEKSIQVIKGKKTSELYLKYVLKAGVKILFKKDEEENLKSLSLMELQKRLYVLTNFEKDGRLNLRFHMEARNKIEEKYLESELDLISPKPTLRFGYAKYDFIVEGYEFVVKPDGKIDWRI

SEQ ID NO: 22959 - protein, 1020 aa, unidentified
  REGION 1..1020: note = Cas Enzyme sequence
MLKMQYRLALDLGSTSIGWAMIRLNALQEPVAVIKAGCRIFSDGRHPKLGTSLAVERREKRAMRRNRDRRLRRKARLIQGLVDFGFFPADKAGQKALVDKDPYELRARGLDQAITPAEFGRALFHMNQRRGFKSNRKYDGAVDADKDVGALKTAISTLRREIEASNMVTVGAWLHNRHKDEISVRARLRKTTVLTDTGKEKKVDQYDFYIDRAMIEHEFDCLWAAQAPHHPEVYTEEARQYLRSTLLFQRNLRPVSAGRCTLIPNEQRAALALPSQQRFRIYQELNNLRYSGDSLEAIALTLEQRDTLAATLETKPKLTFEQIRRALKISVTFTHEGSNRDALKGNTTGILLSKKEYYGAQWASFSDEQQDAIVTQLLNEPSSEQLTNWLVEETGITNDVARKISGVRLVADYGKLSAAAVTAILPYLKSQVITYDKAVLAAGFEHHSRLADEHTGEILPCLPYYGEYLQRHVGFVSVEDAQNENPEKRFGKIANPTVHIGLNQIRVVVNALIKRYGHPAEVVVEVARDLKQSQEMKYEETKRQGERKTRNERMREQIALLVGCTLERVKLADLQKMILWEELSQNAADRRCPYSGRQISAAMLFSPEVEIEHILPFSATLDDTLNNKTVAIKQANRIKGNRTPAEAASDFARQGWVYDDILVRAQQMPPNKRYRFAADGYERWLAQDSHFLARALNDTKYLSVVAQTYLRLICPGKTRAIPGRLTALLRANFGLNGILGLKGEKNRDDHRHHAVDACVIGVTDTRMLQRVSAASASARERNLQRTIENMPLPWDGYYDHVKRAVERIKVSHKPNHSHEGRMMEDSAWGLVGDSQTRRYERDENGRRHRTPPTNHSRIRISSSNDPVRHTPPGSAYKGYVGGSNHSYEIFKDEKGAWALQLVSTYQAYQIVRDIGAVLASSRLQSPWQTTSGQPLVMRLHKNDTVRMNVDGRVVLMRVLKFGSNGQIFFVPVNEANAASRSASKDDSFSVLSKYPGTLQRANAQAVTISPIGIVRRKRHR

SEQ ID NO: 22960 - protein, 1448 aa, unidentified
  REGION 1..1448: note = Cas Enzyme sequence
MKKILGLDLGTNSIGWAVVNEAESNDEKSSIVKLGVRAIKFDTFVSSDTKSAVKGDPADFFNSGKGVSPNAGRTLMRSMRRNLQRYKLRRAELINVLKENGFITDESCLSESGNRSTFETYRLRAKAVTEEISLEQLARVLIMINKKRGYKSSRKAKGGEEGALIDGMEIAKRLYDEGLTPAELSLELLRKGKKYLPDFYSSDLQNELDRIWNKQKEFYPNVLTDSVKDELKGKSASQTWAILAKYFVWDESSDSWNQDEGSRVSHIVERKLQGIKRAVKGEALKMENYEWRVKALSEKMDPEELAIAFQEINKQIASTSGYLGKISDRSKVLYFGKMTVGQYQMSILDKDPNASLKNMVFYRQDYLDEFNAIWEKQREYHPELTEELKHEIRDVVIFYQRRLKSQKGLVSFCELESEEREIVTSDGKVRKITVGSKVIPRSSPLFQEFKIWQILNNIEVSVKGKKSSKRKLKNAEPGLFDGEASVDALEVNGKRPLFQEEKELLAFELSVKKEMLKSEALALLFDEPSRYDLNFKTIDGNRTGFALYSAYNTILERSGHNPINFKNGAQEIIDQVKSVFETLGWKTDYLQYNSSVDKPSSSKKNPLINQPYYQLWHLLYSFEGDNSNVGDAKLVDKVMQLTGMDKEYATILANVSFLEDYGSLSAKAISKILPYMKEGNMYDVACTYAGYNHSKESLTKEEIESKELKERLEILPKNFLRNPVVEKILNQMVNVINALIDEYGAFDEIRVELARELKKNAKEREDLAKAIADTTKLHEEYRKILQQPPFSLVHVTRNDIIRYKLYEELKDNGYKTLYSQTYIPKEKLFTGEFDIEHIIPQARLFDDSLSNKTLELRSVNIEKGKTTAYDYVLEKYGETGVEAYINRCEKLFSGKRAKLKKLLTKESEIEDGFIDRDIRNTQYIARTALRMLKSICRRVVATTGSITDRLRQDWQLVNVMKELNWDKYKAIGKVEYHEDRDGRKIGRITDWTKRNDHRHHAMDALTVAFTKDVFIQYFNNVNASQTPNSNEYAIKSKYFDNGKALPPIPLDEFRAQAMRHMEEILISIKARNKVVTNNVNKSRSNNGVKRVVQQTPRGQLHQETIYGTRKEYVTFEEKVGGSFDEAKVMLVAKRRYREALLARLNEFGGDPKKAFTGKNSLEKNPIWIDQMHTESVPERVKLVELQKVYTVRKPLDSSINVEKIVDPRIRRIVGERLAKDKDALKNLDENPIYLNEEKGIKVKRVTISGITNGIPVHVKHDKNGKVIFDADGNPIPTDIVATGNNHHVAIYRRPVLDKKSGVQKLDNNGEPLYELEEVVVSFFEAVTRANMGLTIVDKEYKRSEGWEFLFTMKQNEYFVFPNAETGFNPKEIDLLNPDNYALISPNLFRVQKLATKNYFFRHHLETTVETPKELSGITYKPQLGLKAIYGIVKVRVNHIGQIVSVGEY

SEQ ID NO: 22961 - protein, 1236 aa, unidentified
  REGION 1..1236: note = Cas Enzyme sequence
MKKILGLDLGVGSIGWSLINVDDNNNPKEIMAMGSRIVPLSSDDTTQFTKGQAITKNQDRTTKRTTRKGYDRYQQRRENLTIEFRKLGMLPDERLIKLPVMELWQLRADAATLGKKLTLPEIGRVLYHINQRRGYKHAKADESGDSKQRDYVAGINQRYSMIIERNQTIGQYFAEQLKESEITNVKGTYYTFRIKEQVFPRRAYEAEFDQIMKAQQGYYPEILTTQVINRLRNEIIFYQRDLKSCKHLVSICEFEKKEYKNAEGKVVFDGPKVSPRTSPLFQVCKIWESINNITLTNRYNEHYSITQEQRQKMFEFLDNNEKMGIKDMYKILGISPKEGWWGGKAIGKGLQGNTTKMQLKKALALLSQSEINQLLQFNLVQDESGLVDEETGEVIPIIDTQFLNEPLYKLWHTIYSIQDKAELKNALSKNFGITDEEVVNSLYKLDFIKPGYGNKSTKAMRRILPFLQQGNMYSEACAQAGFRHSESLTLEENLNRKLLEKLPQIQKNALRQPIVEKILNQMVNIVNAIIDEYGKPDAIRVELARELKMSKDERESMDKNIRAREKENEIYRNKILEYDGVRVSRNRIQKYRLWEESQERCFYCGAKVSSVEFLQGFDVEVEHIIPRSLFFDNSFSNKVCACRKCNASKGNMTGYDFMKSKSEAAFQEYLTRVEEAYKEKRISKTKRDRLLTTAKDIPSDFIDRDLRLSQYISRKSIEILKQVCRNVHSTTGCVTDFVRRVWGYDMVLHNLNIDRYRKGDMTEIVEFDHKGQIHKEERIIGWSKRFDHRHHAIDALVIAMTQQSFIQRLNRLNTERDQMFAEIEKQREEWRNDFSLLEQWLRERPHFSVEDVEKVVSGIAISYKSGKRVATLSKRVKYAKGKKVVLQNGIIVPRGALSQESVYGKIKILEKNKPIKYAFENPHLIFKGYIKRLVEERLVQQDGNVKKAIASLKKSPIMIGHNREVELTYATCYKDEYVIKYSISSLEKMSDIDSIVDENIKGRVKARVAQFNGKIKEAFKNLDNNPIYADDNNTIPIKTVRCFTGLNAVTPLRYNENGEAISFVKPGNNHHIAIYRDKDGNLQEHVVTFWTAVERKKYRVPIVIKNPDEVWDTIADKDLPDAFLETLPGVNWTFVESLQVNEMFILGLSDDEYNDAIRNNDKTTLCNHLYRVQKLSSSYYCFRLHIETTVDDKYNGTKDMMRSKKMGKLIVIQSLGRYESLHPYKVKINTLGEIVE

SEQ ID NO: 22962 - protein, 1499 aa, unidentified
  REGION 1..1499: note = Cas Enzyme sequence
MKRILGLDLGTNSIGWAVLSAEENNDNLFLKKIEATGCRIIPMDASVLGDFDRGNSISQTAERTRLRSARHLTERSQQRRERLHRVLDIIGFLPEHYSQALNRYGKIKDGEEPKLAWRKNNYGKYEFLFVESFNEMLEEFRTLHPEFSNKKVPYDWTIYYLRKKALTHKISKYELAWILLNFNQKRGYYQLRGKEENTDNNKKEEYVALKVLSVEDSGDKKGKDTWYNVRLENGWTYRRASNVFLNWEGKIKEFIVTTDLNDDGTPKKDKEGNIKRSFRAPKEDDWTLIKERTQTDIEHSGKTVGTYIYDNILQNPNQKVRGKLIHTIERKFYKEELKKILKKQIVLHTELQDKELYKACIEELYSSNEAYRQSIAGKDFTYLFIEDILFYQRPLKTKKSLIANCPYEEHTVIDKATGEKKNYGIKCIAKSHPLYQEFRLWQFIGNLRIYKKELSNDIDVTREFLTNEDDYAALFNWLNEKQTINQKSFLRYPEFGIKKNTEDYRWNYVEDKDYPCNETHAQILSYLHKANIEPDFLTPETEEKLWHILYSVEDKQELTKALQKFANTYCLEESFTTTFQKYPPFKKEYGAYSAKAIKKLLPLMRMGKYWSETDFDKKTLERIDKIITGEYDDNIKDRVREKAFNLTNISAFKALPLWLACYIVYNRHSEAKDVTKWHTPEDLQRYLDSFKQHSLRNPIVEQIITETLRTVRDIWEKHGNIDEIHIELGREMKNPAEKRKKMTLQILENENASHRIKTLLMEFANPQFEIENVRPYSPSQQEILRIYEEEVLSRDDVYRNEEERNDIENILKKFKESDSAKRPTKSEVNRYKLWLEQKYHSPYTGQPIPLAKLFTPAYEIEHIIPQSRYFDDSLSNKVICESEINKLKDKRLGFEFIKEENGRKIELSNGKVVKIFTIGEYEQFIKDHYNNNRTKMRKLMMDTIPDEFIARQLNDSRYISKVVKGLLSNIVREEGEEEAISKNIIVCTGGITDRLKRDWGVNDVWNRIILPRFLRLNEKLSTTQFTTTTANGHTVPSMPLELQKGFNKKRIDHRHHAMDAIVIACANRNIVNYLNNESASGKAKISRNDLQRLICDKVKEEGDNYRWLIKKPWETFTQDIYNVLNEIIVSFKQNLRVINKASNKYIHIVDGKKKLTKQEGTNWAIRKPMHKDTVFGEVNLRKIKEVSLNEAIKVPERIVVKDFKLKLRELLNQGYDAKKIKKYLEENKDIWQDINPAKIKVYYFTRETKDRFFATRKNIDTSFTKKKIEESVTDTGIQKILLRHLEQKDNNNLLAFSPDGIDEMNKNIVQLNNGKFHQPIFKVRVYEKADKFAIGKKGNKSSKYVEAAKGTNLYFAIYEVEKLDNNTGEVIKERKYATIPLNIVIERLKQGLPPVPTDDNGNEPKFVLSPNDLVYVPTENENKNGYNPNSLRIERLYKMVSSAGSQCFYIKANVANSIIDKVEFSSSNKMERAITGEMIKEVCIPVKVDRLGNIIKIDY

SEQ ID NO: 22963 - protein, 1228 aa, unidentified
  REGION 1..1228: note = Cas Enzyme sequence
MKKILGLDLGTNSIGWAVISTENNEPKEILGLGSRIIPLTPDDANEFSSGNAISKNQKRTEKRTTRKGYDRYQQRRQNLTNKLRELGMLPDERLIKLPVLELWQLRADAATSGKQLSLPEIGRVLYHINQKRGYKHAKADENADTKQREYVANVNSRYAHIQELNKTIGQFFADNLRANEVTTEKGKFYTYRTKEQVFPRKAYEAEYDQIMECQKVFYPNILTDEAIDEIRNEIIFYQRKLKSCKHLISICEFEKRAYTNKDGKVVYDGPKVAPKSSPLFQMCKIWESVNNLTLKNRKNDELYITKEQRKAMFDHLNKNEKMTLTDMYKILNITKADGWWGGKAIGKGLQGNTTLCQLKKALSKIEGADKLLEFNLSYITLDKANPDTGEIIKIVNPNFEEEPLYKLWHTVYSIQDKEELRNALKKNFGIEDDETVNALFALDFVKPGFGNKSAKFMRKILPYLEDGMKYNEACEYVGVDHSNSITKAENEARELLAKLPQIQKNELHQPIVEKILNQMINVVNAIIDQYGTIDEIRVELARELKQSKDERNETFKRNNKSQKENEDISKRIAEYGIRSSRNRIQKYKMWNEAEQKCFYCGQPVNVEEFLAGTDSEVEHIIPKSLFFDDSFSNKVCSCRKCNAEKNNRTAYDYMKSKGEEVFNEYVKRVENYYENKKISKTKRERFLTPADKIPTDFIDRQLRESQYIARKSQEILRQVCRNVWSTSGSVTDFLRHNWGYDEILHRINFERYKLGGLTEMVEYDHRGQKHTEERIKDWSKRMDHRHHAIDALTIACTKQGYIQRLNNLNTERDEMFDEVEKQGAEWKEKLSLLNKWIAIQPHFSVDVVREKVEEILVSFKAGKKATTPGKRVVYKKGKKVIMQSGIVVPRGSLSEESVYGKIKTIEEKKPIKYIFENPDLIFKPYIKKLVEERLAKFDGDTKKAIASLKKDPIYLREDKSVILEYATCFKEEYVIKYPLTNIKAKDAEYIIDKKIKEIVKQRLSEHNNNEKQAFSTPLYADESCNIPIKTVRCFTGLSAVEPIKYNDDNEPIGFVKPGNNHHIAIYTDKEGNKIEHVVTFWHAVERKKYGLPAIITNPNEVWDKVMDMELPEAFLSNLPAPNLTYQLSMQQNEMFILGMNEDDYKDAINSNDYNTLSKYLYRVQKISKKEYCFRLHTETVVDDKYNGVKNQMLSKQMKKLKIIQSFDALYSNNPHKVKIDLLGKIVEA

SEQ ID NO: 22964 - protein, 1254 aa, unidentified
  REGION 1..1254: note = Cas Enzyme sequence
MKKILGLDLGVGSCGWALILVDDDYYPKNILGIGSRVIPLSADDSNDFSRGNAISKNANRTAKRTQRKGYDRYQLRRFTLRRMLEKLGMLPDESLVGLDILSLWTLRANSAKQGCKVSLKELGRILLHLNQKRGYKHSKLDVSADAKQTEYVRNVNERKSNIDSLGLTIGQYFASKIKESEVVHENGKRFYTYRTKDQVFPRSAYEAEYDQIMKCQQAFYPELLTNEVIAEIRNIIYYQRPLKSCKHLVALCEFEKRAYINKDGKTVFDGPKVAPCSSPLFQICRIYEAINNISIYNLRLKNKASERDLFDDHICGNRYELDAYQRQEIFDYLYKNDKITGKYILEKILKLKSSDGWRFDKLVDKGIKGNTTYTKLANALKRLPNKDELLRFDIKVVDTKIVDTDTGEIIQEVSADIIKQPLYQLWHAVYSIKERQDLEKTLRRNFGITDSEVVDSLYNIDFVTDGFGNRSNKFMRKLIPYLRQGMVYSDASTHVGVNHSNSLTKEENEQRQLLSVLPNLPKNSLRQPIVEKILNQMINVVNAIKAKYGDIDEIRVELARELKQNKDERNQMSLNNSKRERENKTFEERIESYGCKATRSRVQKYRMYEESGCKCMYCGQPVGIKEFLIGYNSEVEHVIPRSLFFDDSFSNKVCSCRACNQAKGNMTAYDFMQSKGDKEFEKYQNRVNELYETKKISKTKRDRLLTSRQNIPTDFLNRDLRETQYISKKAKEILLQICYHVNTTTGSVTDFFRHAWGYDEILSELNLPRYKQAGLTELQEFEHAGQKHVEEKIVGWSKRMDHRHHAIDALTIALTRQGYIQRLNNLNTERDAMFAELNAQSEDYKMKHTLLQEWAKMCPHFDVGNVLSAVGDIAVSFKAGKKVSTPAKRIKYVKGKRVVLQDGLLTPRGAMSEETVYGKIKQIDKDKPLKYLFEHPDLIVNPKVRHEVVVRLQQHDGEIKKAIASVKKNPLYRDSAKKIEIKSANCFKNELVVKYKIDSLKLTDIDYIVDHGIRERVRRRFEECGNKNGDYQKSFKDNPLYFDDDKHIPINSVRCFTGLAEDRVKVVKKDSHGRDIGYAKPGNNHHVALYSTPEGKMEEKIVSFWEAVERKNLGLPVIVDNPAEIWDNLTSSDKEYPKDILTNLPEHDWKFIVSMQQNEMFILGMSDDEYNDAIEAKDKKALCEHLYRVQKLSFGKYMFRRHVETNVEANSESRNAKKYYEIQSFKALFTLNPRKVSITSLGEIFDYYTKEPIV

SEQ ID NO: 22965 - protein, 1367 aa, unidentified
  REGION 1..1367: note = Cas Enzyme sequence
MKKILGLDLGVGSIGWAYVHEAENSSEQSSIVKLGVRVVPLTVDEQQNFEKGKSITTNADRALKKSMRRNLQRYKLRRDNLIDCLLKNKIISNETILSESGNNTTFETYRLRAKAATEMVSLEALARILLMLNKKRGYKSNRKANKQEDGTIIDGMSIAKDLYEKDITPGQYVFKRLNENKRHIPEFYKSDLQKEFDRIFFFQQSFYPTILTQELYTAIQGKSDKATYAILSSNNIPVAENKGKDKNRTAYGWRNDAVIKQQPIETVAYALLELNAAISNGSNYLGAIGDRSKELYFNRMTVGQMLMKRLAENPNASLKNIVYYRQDYLDEFECIWETQRKYHNELTQELKKEIRDIIIFYQRELKSKKSSISLCEFEKREVEVSIDGTTRKKITGCRVCPKSSPLFQEFKIWQMLNNIRVCDTETNETWPLDIEEKDVLFKELNIKQKLSKNEILKILYRNSKHLDLNYKEIEGNRTLFALVNACQSIIVATGHDEYTFSKMRASEIYEIIHRIFGAVGFNTNFLHFDSNCKNLEEEPMFKLWHLLYSYTDDKSKTGNESLINKIRELTNMDEECARILANISFMDDYGSLSSKAIRKILPHMQEGNEYSVACMYAGYNHSHSLTKEELLNKVYVDTLELLPRNSLRNPVVEKILNQMINVVNAIVKEYGKPDEIRIELSRELKSNAKERKRATEAISEANKKNETVRKILIEKFGIKNPSRNDIIRYRLYEELEKNGYHTLYSNTYIPQEELFTNRFNVEHIIPQACMFDDSFSNKTLEAMDINIEKGKETAYDYVLAKYGNEGMAQYKARIDYLYNAGAIRKSKRDKLLMQGKNIPNGFIERDLRDTQYIARKAHEILERLVPHVISTTGQITERLREDWHLIDVMQELNWHKYHELGLTETIVNRENKEIRRIKEWSKRNDHRHHAMDALTIAYTKRSIIQYLNNLNARDDKNGEIYGIERKELERDAHGKLRFKLPFKNFREEAKIALEGILISIKSKNKVVTKNTNKTKSKNGGTKKRTQLTPRGQLHLETIHGSIQRYATYEEKVGSSFNAEKIAKVANKREREALLARLNEFYGDAKKAFTGKNSLEKNPVYLDAARTAAVPIKVKLVELETVYTIRKSIDKDLNIEKVIDKRIRKILESRLKEYGNDSKAAFSNLDDNPIWLNKEKGICIKRVTISGIANAVSLREKKNHNGDYILDEHGKRQPVDFVNPGNNHHVAIYIDEDGNYQENIVSFFDATARAINEQPIIDYEYNSEMGWKFCFTLKQNEYFVFPNEKTGFNPEDIDLTNPKNYHLISPNLFRVQKLSSKDYWFRHHLETTVEDNKVLKGITWKRIRTLQELKGAIKVRINHIGQIVQIGE

SEQ ID NO: 22966 - protein, 1437 aa, unidentified
  REGION 1..1437: note = Cas Enzyme sequence
MRILGFDIGTHSLATFVRDIALGNILKEQIVYYSVDSFNSGIGNGKSGEYSYAAERSTSKRKRVLNERRRYRNWATLKVLIQHKMCPLTMEELEHWTTYDKKRGLFRQYPIGAVHFERWIRLDFDNDGLPDYSSPYQLRRELMSRQFDFSQEIERFKLGRALYHISQRRGFKSSKGESLKVLEKLMEKNNDFEVNGDSALIEIKKSEEKLSGILAEYMRKYNLPTIGCAFAQLEDEGIRVRNSIYQPVRSQYKDEIVKIFEYQDGLTSEAELLKRLISEKKGEGTIFYKCPLKSQKGSVGKCTLEPNKPRCPISHPKYEEFRAWCFINNIRYRRSASDSWSELSIEDKETIYANIFTSKVRSDFSFKEIRLWIEKHYQIKLHCGENDRTINYKDHLKVPSCPITARLIKLLGNNWEVYCQQGGKERWSHSKNNSTRHNTSYDAYDIWHVCYSSDEDADVISFAEEKLGWDSNMTKQLRLIWGDIREGYAMLSLKAIKNITYFLRKGLGYSNAVMLAKLPDILGRELWMSRVNEYLPQILHVFDNIKQENKKHKTICDITNRLIANYKSLGLSTGVFAYKDYNYTLDESDKKDVLNAITQHIGERTWAKKDTDEQNKILCQVEGLYQSFFNDTKRDYIHAPQLGDKLKEALNTIFGDEFDFGKLYHHSKLSRYSAQYAENTSQCLLGTPNIGAIKNPVALRTLQIIRKKVNALITNNIIDPDDTRVVIETTRSFNDANMRWAIREYQKTRENEHKEIIAALQEFFPNRDFSDKDIDKARFFFEQQEDYDKIYAKNSYTKDIKKYKLWKEQGCICMYTGNVISLSELFSEDVQIEHTIPRSISYDNSLSNLTVCDSYYNRVVKNNLYPTQLPNYEKDIVIDGRTYKAMLPQLKKWEELVERLKDNVAAWKARSRKAIDKSRKDECIRQMHLWQMELDYWGTKLQHFKQEEVSDGFRNRQLIDTGLITRHTAIYLKSLFHNVDVQKGEVTALFRKIFGIQEENEKKNRDFLSHHAIDAMILTLIPVAAKRERMLKLFFQKEEAQGHEKEYFANELYKEIADCHIGGNIEKVVSLIESQLLVNHHSSDKTLIPSKKIIRKRGKTVLFHHKDGSVHPHISTGDSIRASLHKDSFFGAIKYPVKDENGLPMTGNSRFVYDNSDPVMVIRIPVKDIKEKDIEKIVIDPYVRRSISATIAKRMATGQSYKEAINGEFWMLDKDGNEIKYSKNGRKLCPIRHVRCRVKTGLGYMTYKTSLQIKDQLYASNKALVNLTDRSHKKKLYAQNDDNYLFLLYEGVKKGQVVRRSRIVNYYEIALLRQEKTADGTYKINSIEDLLNEPYYNKIEEKSVVYNLSAVIRRKTRLLAWEQSPEELNELSIDELSKRLFVVVKFNNIGSDCLYLKSHIKETEDYDKSTGVVKDFKYMIEGRDFDVDDLGNILFKD

SEQ ID NO: 22967 - protein, 1157 aa, unidentified
  REGION 1..1157: note = Cas Enzyme sequence
MKRILGLDLGSTSIGWAVIEEFSQEILSESQDSQQDNIVALGSRIIPLTTDESTQFTKGQALTKNADRTLRRTQRKGYDRYQLRRKLLLEQLAKLGMYNGQTLHLSKLELWGLRAKATDEQISLLELGRVLCHINQKRGYKTAKSDFGDKKTGEYVTSVVNRYHELHETGQTIGQYMYANLCDNPAFRCKERVYPRDAYIEEFDAIMARQSTFYPELLTDEVVQHIRDYIIFHQRPLKSCKHLIGRCELERCDVVVDGRVYNRGPKVAPRSSPLFQLCKIWEAVNNITITNKNDHKEKLYITLEQKQSIVSFMSTHDKLKAADLKKILGIVSRDWPLGKVVGAGLQGNTTYCAIAKALGGDSKYAHLLDFNVHIVDSTRVDAETGEVLPIIAADFEHQPLYRLWHTLYSLSDISELEHTLRNNFGITDSQVIEALCHIDFVKSGYSNKSSRAMRKILPHLMAGAQYYDAKLAAGYDDTTLTNEQNESRELAAALQPIPKGALRQPVVEKILGQLVNLVNALMEEYGRFDEIRVELARELKQSREERESTEKNIRANNKKNDQIATRIASEYGLTPTRSRIQKYKMWEESNHTCIYCGKTVGVVDFLQGFGVEVEHIIPRSVLFDDSFTNKVCACRECNQQKGNRTAYDFVASRGEGELQAYIERINTLADKKAISHSKLVKLMMRGDQIPTDFIERQLRESQYIAKKARQMLSTVCRNVYATSGSITDFIRHIWGWDEVLHRLNIDRYRTAGLTEMIDREVEGVVIPVERITGWSKRMDHRHHAVDALTIACTKQGYIQRINNLNSLKEVAFRPLTHQEQGEATGQRLTRLERYIAMQPHFTTAEVEKAVAGIVVSFKSGKRAASIGKRYIRKGGKRICVQRGIIIPRGALCEESVYGQITSNQTGKREIVIKYKVGTIDIKKVDSVVDLRIREILQARLMLHNGNPDKAFAEPVLDHQGNVIRSVRCYTGLNSTVPVRYNERGEAIAFVKPGNNHHVAIYEDENGVLQEHIVTFWHAVERKKYSIPTIITNCAAAWELVCEDMPHSFVEQLPPSAHWTFKFSMQQNEMFILGMEEELFQDAMTHKDYALLSKYLYRVQKLSHNDYYFRHHLETTVDDESKEAKQMGKMKRIKSLKALSQLNPHKVHISVTGKISEI

SEQ ID NO: 22968 - protein, 1406 aa, unidentified
  REGION 1..1406: note = Cas Enzyme sequence
MKKILGLDLGVNSIGWAVVNEAETETEKSSITKVGVRGNLLSSDEVKNFNDGKSITTNADRTLKRSMRRNLQRYKLRRAELLRILKDNDIITDSSLLSENGNFTTFETYRLRAKAVTERISLEQFARVLLMINKKRGYKSSRKAKGDEDGNLIDGMAVAKMLYDENLTPGQLCLRLMQQGRKRMPDFYRSDLQNELNRIWAYQREFYPDSLTDEAKEEIHGRNKSQTWAILAKYFVWRDDVSVWDSDNAVSRVETVEKRIVGVKRQTKRDAQKLENYQWRAEALVKQMDLERLAVVFQEINGEISSSSGYLGAISDRSKMLFFNRQTVGQYLLSKIDADPHCSLKNIVFYRQDYLDEFEKIWETQARYHSVLTDELKRYIRDVVIFYQRRLKSQKSLIGFCEFEQCRREVIKDGKTKTITIGSRVIPRSSPLFQEFKVWQILNNVEVTDKTEKSKFQLSQEEKELLAEELSVRESMKKGEVLKMLFEDPKKYDLNFKELDGNKTSAQFYQAYSQILEDSGHLPLNFNLPASDIKATVKTIFESLGWNIDVLEFDASRPLDGQAFYRLWHLLYSFEGDNTVTGDGQLKDKIAEIMGFDRDFAQHLVKIKMMDDYGSLSAKAIRKILPFLKDGNRYDVACLYAGYRHSAASETKEEIENKALKDKLEILPRNSLRNPVVEKILNQMVNVVNGVIDTYDRPDEIRVELARELKKNAKERENLTKSLESATKEQNRIRDILQTEFQLAHVSKNDIIRYRLYEELKDNGYKTLYSNTYISKEELFSKNFDIEHIIPQARLFDDSFSNKTLELRSENLEKGKQTAADFVLMKYGEDGLIRYKQTCEKLFSDQKAKLRKLLMTESEIPSDFIERDLRNTQYIAKKAQEMLREVSRRVVATTGQITAQLREDWQLVDVMKELNWDKYEALGMVEYHCNRDGKMIGRIKDWSKRNDHRHHAMDALTIAFTKDVFIQYFNNKNAAENLNSNEFAIRNKYFREGKAVPPMPLNEFRAAAKAHLQGVLVSIKAKSKVVTNNFNHTPLKNGERVSFKTPRGQLHLETVYGSHKEFEVSEEKIGSAFNEAKIRTVCRKAYREALMRRLDQFGGDAKKAFTGRNALAKNPVWINQEKGIAVPSKVKVAVQKVVYTIRKPITDDLKIDKVVDKRIQRILRERVERYGSAKKAFANLDEDPIWLNKEKGIKLKRVTIYGISKAQAIHDKRDKSGHLILDEYGRKIPVDFVNTGNNHHVAVYRRPVLDNDGEPVYDERGEVLYEMCENVVSFYEAVERAGQGLPIIDKTRYQDEGWEFLFSMKQNEYFVFPNAATGFDPAEVDLLDPNNYAEISPNLFRVQKFSIDAKGGKQYIFRHHLETQVADESDVLRNITWKRIQSSKGLKGMIKVRINHLGEIVTVGEY

SEQ ID NO: 22969 - protein, 1520 aa, unidentified
  REGION 1..1520: note = Cas Enzyme sequence
MRKILGLDLGTNSIGWALVNEESADETSYITGIDGAGSRIIPMSADLMGNYEKGNSVSQTEERTRYRGTRRLRERFLLRRERLHRVLRIMGFLPEHYSVSIDRIGKFLQGTEPKIEWGKNRDGKYEFLFQDSFLEMLEAFKAKHPEFSDGRKIPADWTLYYLRKKALNKRVSKEELAWILLNFNQKRGYYQLRGEEADADSTVRKEYMKLIVVNVEDTGERKGKNTWYNVHLSNGLIYKRASDHPLDWIGKEKEFIVTTQLAPDGSVKTDKEGAPRISLKIPDENDWTLIKKRTEADICDSGKTVGEFIFDEILSDPDVKVIGKLVRTIERKFYKDELKKIIRKQCEFHSELNDQDLYLSCIKELYPNNEAYRSSISEKGFVYLLTDDIIFYQRPLKSKKHLISNCPYEKRRYRNPENGELQTIPVKCIAKSHPLFQEFRIWQFISNLRIYDNNRNIDTTHEYLPDERKADLFEWLNDRKEIDQDTLLTKFFGLKKINDRFPVRWNYVEDKKYPCNKTRHAILSKLKKDETSNLTQDVLIRIWHLLYSVTTKEEIDSVFCDGKKKRAGIYEYLLKRFSDETVQKFKSVQFEEDDYGSYSEKALKKLLPMMRTGRLWTFENIDSKTQERIEKILSGEFDADLTDKIREKCAIFSDITDFQSLPVWMACYVAYGRHSEAKETGKWSSPDDIDTFLNNFRQHSLNNPIVEQIVMETLRTVKDIWTHFGRIDEIHIELGRELKSTKEQRERNTRRITENENTNQRIRTLLKEFMNPEFDIEGVRPYSSSQQDILKIYEDAVLQKETDRNEDINNIINKLNSSEPSKRPSRSEVLRYKLWLDQKYLSPYTGQPIPLAKLFTYEYEIEHVIPQSRYFDDSFQNKVICEAEVNKLKDRQLGLEFIKNHHGQIVTLNGGRTVSIFSVESYEKFVKDTYSGNRTKMKNLLLEDIPDNFIERQLNDSRYISRYIMSLLSNIVRKEVASGVYEEESNSRNLIACNGSITTRLKQDWGLNDTWNSIILPRFVRMNEICGTDQFTSVNSEGHLIPAMPDELKKGFSRKRVDHRHHAMDAIVIACATRSHIHLLNNEAAKSENKKIRHQLSHKLRRYEKILIDGIEREVAREFLKPWPTFTQDVRTALENIIVSFKQNLRVINKATNKYISYSDETGKLRLDKAGKPIKGCTAQKSNPDWWAIRKPLHKDTVFAKVSLRKTTDVRLGTALQNINQIVDKDLRKEIKRLLGLGYDEKRIKKFFNEGDNKDIWAEFNPNKIRIYCFTDDTFAVRKSLDESFSSKKIEDSVTDTGIQKILLRHLDENGNDPKIAFCPDGIERMNADIERLNDGKRHKPIYKVRWYESANKFAVGKTGNKKDKYVEAAKGTNLYFAVYTTADGTRSFETIPLNEVVERLKNKLHPVPEKNGKGESLLFYLSPNDLVYIPTEEEITEGNIFEYINNERIYKTVSSSGAQCFFIAERVSTPIVNKLEFSPLNKMERALTGEMIKEICIPIKVDRLGVVTHLGREFLPKKR

SEQ ID NO: 22970 - protein, 1548 aa, unidentified
  REGION 1..1548: note = Cas Enzyme sequence
MKKILGLDLGTNSIGWAVIEAEEVFDNEKIFTKPIRIEASNSRIIPLDAAILGEFDKGNSISQTSERTGYRGTRRLKERSLLRRERLYRVLDVIGFLPKHFSDKLTRYGKFSDDSEPKLAWYKDDCGVNTFLFQESFNEMLSEFMAKHTNINKIPYDWTIYYLRKKALSKPITKEELAWILLNFNQKRGYYQLRGEEEEVDKTKDVKFYALKVLRVEATDDKKGKDTWYNVYLENGMIYRRASSTPLEWEGKIKEFIVTTDLNEDGTPKTDKEGNIKRSFRSPKEDDWGLLKIKTEADIETSNKTVGCYIFDSLLENPTQKIKGKLIRTIERKYYKEELQKILEVQKEFIPELRDRDLYNKCIEELYPINEAHRNNIAQWDFTSLFINDIIFYQRPLKSKKSLISDCPYESYLYNKKDNNGNCMKDENGNDIVFEQHLKCIAKSHPLFQEFRLWQFVQNLKIYQREKEVNGKLCTDVDVTSEFIKNEDDVVAIFEWLNDRKEIDQKEFLKFPQFGLKKDLSKYRWNYVEDKKYPCNETRALILSRLKKANIDTKFLNYEKIEALWHILYSVEDKSEIKSALNKYAEKHSLPDTFIEEFSKVPPFKKEYGSYSAKAIKKLLSLMRMGKYWNEEDIDNKTKERIDKIINGEYDENIKIRVREKASELNDISQFRGLPLWLACYIVYGRHSEAKEITKWEKPEDIDEFLKKFKQHSLRNPIVEQIVLETLRTVRDIWKQVGHIDEIHIELAREMKNPADKRKQMTAQILENENTNLRIKAILEELKNPEHDVANVRPYSPTQQEIFKIYEEYAVGNIAKDDNDFDFVSQISKKAQPTRSEIIRYKAWLEQKYQSPYTGQFIPLSKLFTAEYEIEHIIPQSRYFDDSFSNKVICESVVNKNPYKDNQLGYEFIKKNSGRIVNELSINGKTVKIFTVEEYERFVKEHYSHNRIKMSKLLMDEIPDKFIERQLNDSRYISKYIKGILSNIVREKDANGEYEQEAVSKNLITCNGTITDRLKKDWGMNDVWNRIVLPRFERLNQITGTTNFTQNNTEGHPIPSMPLELQKGFNKKRIDHRHHAMDAIVIACTTREHVNLLNNEAAHSKHNANRYQLSYKLRRREKVRIGNEEKEVFKEFFMPWQTFPIDVQNAIENMVVSFKQNLRVVNKTTNKYEHYNENGKKVLTKQTKGDNWAIRRSIHKETVWGKINLRFKKEVSLIEALKNPNRIVNSEFKEKIIELLSNGFDAKYIKNYIDKNKDIWSDIDLKKIEVYYFTNETNDSYFATRFLSDLVGYMSGISDYDKAVKKINGITDTGIQKILLTHLHSKSNNPEIAFSPDGIDEMNRNIVDLNGGKFHCPIYKVRRFEKGNKFAIGNNGNKRAKFVEADDGTNLFYAVYQNPDGKRLFATIPLEISIECKKEKTTNWIILLDERLRNKSDDDKQKKYKELGIPQDAKLLFVLSVNDLVYVPSNEELINGIKKIDSNRIYKTVSFNKKQCFCIKHNVATPILNKIEFSSSNKMERAISGEMIKEICIPIKVDRLGNIIEFNGMKKQ

SEQ ID NO: 22971 - protein, 1424 aa, unidentified
  REGION 1..1424: note = Cas Enzyme sequence
MKRILGLDLGTNSIGWAVVDEAENINEKSSIVKLGVRVNPLTVDELQNFEKGKSIETNTARTLKRSMRRNLQRYKLRREELINILREVGFITDATILSENGNKTTFETYRLRAKAVTDEISLEEFARVLLMINKKRGYKSSRKAKGEEDGALIDGMEVAKKLYEEELTPGELCLQLLMNGKKHFPDFYRSDLQNELDRIWDFQKQFYPQALLGEAKEEIRGKNKSQTWAILQKFFIWDEIVTMWNEDTNQTENIERQFKLTGIKRTTKGHEQKVEDYQWRVKALSEQLGLEELAVVLQNINGEINSSSGYLGAISDRSKSLYFKKQTVGQALMESLDENPNKSLKNTVYYRQDYLDEFETIWEKQVEYHKELTPELKAKIRDVVIFYQRRLKSQKSLISICEFENEERTIIKNGKEKTITTGLRVIPRSSPLFQEFKIWQTLNNIEVSVADRQIKRKKKKEDTLSLFSEPDEFELTGKRGLTQEEKELLAKELFIRERLTKSEVLKILFENPQELDMNFKQIDGNKTGYQLFQAYSKVLELSGHEPIDFKKPVDEIMEQTESVFSSLGWNTNVLSFDSSKKPDEQDYYKLWHLLYSFEGDNTITGDGNLKQKIAMLCGFDLEYAPALSAVTFIDDYGNLSAKAIRKILPFMKEGNQYDIACTYAGYRHSASSLTKEEIENKQLKEKLELLPKNSLRNPVVEKILNQMVNVINEIITTYGKPDEIRIELARELKKNQKEREELTKSIANATKETEAIRKILQTEFGMAHVSRNDILRYRLYEELKDNGYKTLYSDTYIPREDIFSKKFDIEHIIPKSRLFDDSFSNKTLEVRSINIEKGNKTAYDFVADKYGEDTLQKYINRCEALFKNKKTKLRKLKMTESEIPSDFIERDLRNTQYIAKKALAMLNEICRRVVATTGSVTDKLREDWQLVDVMKELNWDKYATIGAVEYFEDKDGRRIGRIKDWTKRNDHRHHAMDALTVAFTKDVFIQYFNNKNASGKPNSNEFAIKNKYFNEGKAIAPIPLSEFRSEAKRKMEDILVSIKAKNKVVTNNINFSKRKGGVNQRVQQTPRGQLHLETVYGSHKEYVTKEEKVNASFDETKIMTVCKRIYRDALLKRLKDNGNDPKKAFIGKNFLEKNPIWLNEEKSKAVPVKVKTVTMETVYTVRKPIDTNLNIEKVVDAKIRRLLEERVAKYGNAKLAFANLEDDPIWLNKEKSIQLKRVTIYGISNAQAIHEKRDKDGNYVLDDRGNHIPVDFVNTGNNHHVAIYRKPVLDKQGLPTYDEQGNPLYELDEKVVSFYEAVARINEGLPVIDKTYRQEEGWQFLFTMKQNEYFVFPNEKTGFNPKDVDLINPNNYAMISPNLFRVQKFSSKDYTFRHHLETNVDSKKELQDITWKRLKSLPYLNDVVKVRINHIGQIVSVGEY

SEQ ID NO: 22972 - protein, 1369 aa, unidentified
  REGION 1..1369: note = Cas Enzyme sequence
MKKILGLDLGTNSIGWAIVNEAENNDEKSSIVKIGVRVNPLTVDELTNFEKGKSITTNADRTLKRSARRNLQRYKDRRASLIEVLFEHNIISDTTILSENGNRTTFETYRLRAKSAKEEISLEEFARVLLMINKKRGYKSSRKAKSNDEGALIDGMEVAKLLYNERLTPGEYVLHLLESGKNYIPDFYKSDLQNELDAIWETQKKYHPDILTDELKIQIAGKGKQNTAKIFLAKYNIYTADNKGKEKKLQAYRWRVNALCEEVTQDILAYIISDLNGIINNSSGYLGAISDRSKELYFNQLTVGEYLMSRIEDNPHFSTKNVVFYRQDYLDEFEKIWETQAKFHAELTDELKHQIRDIIIFYQRPLKSQKGLVSICEFENKEIEIEVDGKRKKKVIGSKVCPKSSPIFQNFKIWQILNNIEIKGKVNRTLYEEEKVLLYNQLEYKDKLSESDAIRLLFSDTKGLSLNYKSIEGNRTQTSLFKAYEHIIEMSGHGEYDFEKMDSEKVLKIVREVFETLGFNTDILSYNPYLEDKEIEKQPMYQLWHLLYSYEGDNSCTGIESLINIIHTKYGFDYEYARVLANVSFQEDYASLSAKAIKKIMPHLIAGNEYSEACELAGYRHSKSSLTKEEIDNRVLQDKLQELPKNSLRNPVVEKILNQMVNVVNATIDAYGKPDEIRIELARELKKSSKEREKDTENISKATKEYEEYRKIIQHEYGFSHVSRNDIIRYRLYKELEPRGYKTLYSNTYIPKEQLFSKSFDIEHIIPQSRLFDDSFSNKTLEARDVNIEKGNATAYDYVLGKYGEEKIYDYETAVNDLFKGKGGVSESKRRKLLMKGADIGEGFIARDLRDTQYIAKKAREMLGSIVRTVIPTTGSVTDRLREDWQLVDIMQELNWEKYDKLGLTEVIEGRDGQRIKRIKDWTKRNDHRHHAMDALTIAFTKNSHIQYLNNLNARSDKNSVIYAIENKEFERDKNNKLRFRAPIENFREEAKRQLESVLVSIKAKNKVVTRNINKSKKDGGVNKRIQLTPRGQLHLETVYGKSLRYSTKIEKVGSAFTAEYIANVANKGERSALLARLSEYGGDAKKAFTGKNSLEKNPVYIDDSKTVAVPAKVKVVTLEPIYTIRKEITPDLKIDKVIDKGIRTILEQRLSEYNGDAKKAFSNLDEKPIYLNREKGISIKRVTISGISNAVALHDKRDKEGKLMLDSSDNKMPVDFVNTGNNHHVAIYRDADGNLQENVVSFYEATIRACNGDSVVDKNFKSNEGWEFLFTMKQNEYFVFPNKDTGFNPNEINLLSPDNYALISPNLFRVQKIATKNYFFRHHLETTVDTPKVLNGITFKSQLGLNGIVGIVKVRINHIGQIVAVGEY

SEQ ID NO: 22973 - protein, 949 aa, unidentified
  REGION 1..949: note = Cas Enzyme sequence
FSSETINRIKNIKFEEKDYGSYSEKAIKKLLPLMRMGKYWNADAIDAKTKERIDKIITGEYDEKIKDRVREKTINLTDISQFKGLPLWLACYVVYDRHSETKEITRWESPDDIDTYLKNFKQHSLRNPIVEQVVTETLRTVRDIWKQEGNIDEIHIELGREMKNPADKRKKMAERIQQNENTNLRIKAMLMEFMDPDMGIENVRPYSPSQQDILRIYEEYALDNLTKDDKEFDFISKVSRQAQPSKSDITRYKCWLEQKYRSPYTGEMIPLAKLFTSAYEIEHVIPQSRYFDDSFSNKVICEAEVNKLKDRQLGFEFIKAHKGEKVQISQGKTVEIFSIEAYEKFVKDNYANNRTKMKKLLMDDIPDGFIERQLNDSRYISKLIKGLLSNIVREKLPNGEYEQEAVSKNLISCNGSITDRLKKDWGMDDVWNRIVLPRFERLNELTGKDNFTAVNKQGHLIPNMPLELQKGFNKKRIDHRHHAMDAIVIACTTRDHVNLLNNEAAHSKKYDKSYRYDLQSKLRRKDEEGHYKEFVKPWDSFTSDAKQALDNIIVSFKQNLRVINKTTNYYQHYDENGKKVLVKQEKGDNWAIRKSMHKDTGWGEINLRFTKEVSLNEALKNPKSIVNKDFKRKVQELLVQGHDAKYIKKYVEDNKDVWSDIDIKKIKVYYFTKDTNERYFATRFMSDLVGYMSGIKDYDKAIAKIEGITDTGIQKILKAHLQAKDNNPELAFSADGIDEMNHNIVDLNGGKPHKPIYKVRHYESGNKYSIGQKGCKVKKFVEADKGTNLFFAVYTIDKLDKKTGNVEKVRTFATVPLNIVIDCQKKYQKEWKMELDKVLKEKEFVANDAVFQFIISPNDLVYVPTSDELRNGINADKIDKSRVYKMVSSSGSQCFFINNKVASIIVNKVEYSPLNKMERSISGEMIKEICIPIKVDRLGNVIEFNGIKS

SEQ ID NO: 22974 - protein, 1377 aa, unidentified
  REGION 1..1377: note = Cas Enzyme sequence
MKKILGLDLGTNSIGWAVVNEAETKDEKSSIVRIGVRVNPLTVDELTNFEKGKSITTNADRTLKRSARRNLQRYKARRDNLIEVLRENNIISDSTILSENGNRTTFETYRLRAKSASEEVSLEEFAKILLMINKKRGYKSSRKAKSNDEGTLVDGMEVAKLLYEQHLTPGEYVLQLLEKGKNYVPDFYKSDLQNEFDIIWETQKRYHKNILTDEFKAQIVGKGKQNTAKIFLAKYNIYTADNKGKEKKLQAYRWRVSALNKEVPQDVLAYVMSDLNGIINNSSGYLGAISDRSKELYFSKRTVGEYLMSKIEADSHFSTRNVVFYRQDYLDEFERIWETQAQYHPELTKDLKHEIRDIIIFYQRALKSQKGLVSICEFENKEIEIEADGKMKKKTIGYKVCPKSSPIFQNFKIWQILNNIELKGKINRPLYEEEKTMLYNELSYKGKISESEAVKLLFSNSKGLSLNFKSIEGNKTQATLFKAYEKIIEISGHGEYDFEKMSSGKVIQLVHEIFETLGFNTDILYYNVSLDDKEIEKQPMYQLWHLLYSYEGDKSNTGLDSLINIIHTKYGFDKEYAKIIAGVSFQDDYGSLSAKAIKKIMPHLIAGNEYSVACELAGYRHSKSSLTKEEIENKVLQDKLHELPKNSLRNPVVEKILNQMVNVVNAAIDAYGKPDEIRIELARELKKSAKEREKDTENISKATKEYEDYKKIIQQEYGFSHVSRNDIIRYRLYKELEPRGYRTLYSNTYIPKEQLFSKSFDIEHIIPQSRLFDDSFSNKTLEARDINIEKGNLTAYDYVLGKYGEEKICEYETTVNDLFKGKGGASESKRRKLLMKGADIGEGFIARDLRDTQYIAKKAREILGSIVRAVVPTTGSVTDRLREDWQLIDIMQELNWDKYDKLGLTETIQGRDGQRIKRIKDWTKRNDHRHHAMDALTIAFTKNSYIQYLNNLNARSDKNSVIYAIESKELERDKNNKLRFKAPVDNFREEAKRQLESVLVSIKAKNKVVTRNINKSKKDGGVNKKVQLTPRGQLHLETTYGKKLRYSTKIEKVGSAFTSEYIANVAKKDEREALLARLLEYGGDPKKAFTGKNSLEKNPVYLDEAKAIAVPDKVKVVTFEPVYTIRKDITPDLKIDKVIDKGIRTILEQRLSEFNGDAKKAFSNLDENPIYLNKEKGITIKRVAISGISNAIALHDKRDKEGNLILDAKGNRIPVDFVNTGNNHHVAVYRDADGNLQDVMVSFYEATCRACNGNPIIDTTFSSKEGWQFLFTMKQNEYFVFPNKSTGFDPHEIDLLNPDNYSLISPNLYRVQKLSKVAYGNSFVRDYVFRHHLETTVDDKKELRDITWVRIQSLSGLDSIVKVRINHIGQIVAVGEY

SEQ ID NO: 22975 - protein, 1220 aa, unidentified
  REGION 1..1220: note = Cas Enzyme sequence
MNRIILGLDIGTTSIGWAVVAENDGTKTTIKGIGSRIIPLANDEKNEFQAGNAISKNQKRTLKRTQRKGYDRYQLRKEYLRVKLSELGMLPDIALFTLTALELYGLRVKAINEQISLQELGRILFHLNQKRGYKSSRKDESKDKKETEYVAEVISRYSKIKEAGLTIGQFFYNDLLTDERYRIKDQIFPREAYIEEFNAICTKQSQFYPVSLTGKNITQLRDEIIYYQRPLKSQKGLVSICEFEGKWYKNKDGKEVFGGPKVTPRSSPLFQVCKLWETINNITISSKRGEQFVISMEKKNELFNYLDNHDKLTETELFKILGITRNDGYYGNKQLTKGLQGNLTKTAMAKILKDQPDIEKIITFDLSPEPYEEVDKNSGEIVNRIRIKADFETLPLYKLWHILYSIPEEKDIVKKLLMDFNLPEEEARKLAKLDLTKGGFSNKSARAIRNILPYLQKGAKYSDAMTLAGYKHSDSQTVEENLIRPLKDKLKLLPKNSLRQPVVEKILNQLINLVNAIIEQYGKPDEIRIELARELKQSLDERNNTFKNNTKRENENKGIVLRLATEYHVKANRRNIEKWRLYEQTDGHCLYCGNKIELSDFLNGDESDVEHIIPKAKIFDDSFQNKTISHRRCNKAKDNSTAYDYMLTQSEEQLHRFEESVAQLFKTYKITKAKRDKLLMTEAKIPTDFIARQLRETQYIARKSREILHEVCRNVWATSGSITQKLRKLWGWEEALMHLQLEKYKAAGKTEWVEFESNGQQHKKERIIGWTKRDDHRHHAIDALTIACTQQGFIQRINTLSAKHTRDEMLAEVKDQVYKEKLTLLEKSLLTKRPFDTAAIENLVSQILISFKSGKKVATLGKRKVKKDGKLITKQEGIIIPRGALSEESVYGKIKRRVNETVKLSSSFTDVDLIINKTCKALVKQRLKNFDNDPKKAFGGLTKNPIWIDAAKTQALASVIVSTYKEEYVIKYPIGTITVKDLPSIVDFGVRKAIQKRLETYNNNPKEAFKDLENKPVWLNEEKKIAIKTVRCFTGLDAVVPVKYNDQKDAIGFVKPGNNHHIAIYVDKEGKKQEHSVTFWDAVERKMNGLPVIIKSPKETWDTILLNKDKYTQGFLNKLPQDDWAYLTSMQQNEMFAFNLNQEALNEAVQNEDYGLISQNLFRTRKISSGIYWFNHHLETEPKESLEDKKLKRCIQASMGSFSGIKVNIDALGRIVKIGE

SEQ ID NO: 22976 - protein, 1307 aa, unidentified
  REGION 1..1307: note = Cas Enzyme sequence
MKKILGLDIGTNSIGWALIEEENNILRKINSIGSRIIPLDKGLLDEYEKGNDISKNATRRQKRGSRRLNHRYRLRRNNLITLFRILGIVPAGLEPIFNKIKIEGKKLLLPQSAFEKGVKQLNPYELYELRSIALNKKISLEELFRIIYHLNQRRGFKSNRKANKTEDENQTENIFADSKKQSEISYEKVTIVNVEPTGERKGKKQNEELRVILEDGRSSLTDKFIFKKLIGETVILKIKKEILKSTKEPKYTFSIPSKWQKNRKELNEAIIKAGGFPGKYFFEEYLKAKNESKWYEFKVRESIVNRELYENEFQTIWDTQHKFWLQENNIDINFLKNYKEAIETIVPFHNKKEKQKWIQKGIGSFIRNYIIYYQRELRSQTRTIGDCRFEEKYFKKINEETGEVTLERSGPKCCPKSHPAFQEFRIWQQINNLIVYDEKEEVVNIDDNIKVNLFNYLNEREEVKPEEIKKFLQKKFPQINEINVVKNWMGNRMLHFFKKIFNSKDFNGKAILEYKEKFMHLWHLIYSVTSEKGIKTGLTKLDPNIPQDLIKILSSIDYKEKQYASLSLKAIKNLLPLMKCGSLFNENELTEKAKSRIDQFLSGELDREFDEKTLEKLKVKKTTEDFKGLSYYQAASLIYGKHTAKQENRYEQPEDILPVPRNSLRNPIVEQVVNETLMLVKDIWVKHPELKEGEIRIELARELKSNKEERQRVANRQEINKNENLQAVEEIRRHFGSNYNPSLADIEKVKLWKEAGMKSPYTGQTINISDLFSSNVEVDHIIPRTRYYNDGLINKTICESHINSDKDKMTAYEYMNTGTPYQFEKLSYDKFLEFIKRFPVPKRRMFTMKEIPDDFIERQIKDTQYIAVRIKEELGKIVGLNNVKTTTGQITDYLREQWGLGELMKKLLKPRFEKLQEKFSEQLVNEEEIIGSNGKPTGKKRTVIKGYSKRFDHRHHAIDALIVACTRQGIVQQLNLLNKITKGKTKQIEETIGDSLRKFIPPTGKDDIKANKFFAIAEEAVSSIIVSYKNRKRLVSKGINWYQKFNSNKNKIEKFRQEKGIPWAIKGRLHEETNYGVIEHDGQLKFTCRYLLSELTTPQIHNILSLPIKEAVLMHLNKPEYNGDLKKAFGPEGLIDFNKNRKIPVYSVVVIKRGNVDEVRGTQYLYEKERKLVVDTGGNYYFSVYEHPETKERKFDVVSFFDAVQLKINGENPYKTEIGYKYESEGYKLIFSITHNDLVYASAENESVEEIDWTNIKLLSDNIYRVVKFSGTQIYFQPYNYSQEITIHEGKASSAKEYKGEFNKGTN

SEQ ID NO: 22977 - protein, 1416 aa, unidentified
  REGION 1..1416: note = Cas Enzyme sequence
MAKIVGFDLGTNSIGVSVRNTSLGDELHDQLEYYSVDIFDSGVGKSKSGEYSYAAERSKGIRQRRLYDVRRRRRWETLKYLIQADCCPLSMVELEEWRSYDKSKGLNRRYPIDNELFMRWIRLDFDNDGVTDCSPYELRSMLVNRQFDFSIPVERYRFGRAIFHICQHRGFKSSKGETLAEKDITDDVDLSDELKLSEQKKSGELTAYMNEHGCKTVGEALYQINHSGIRIRASIYQVIRSQLKDEITTIFNFQDGLDINSELYLHLTSEQKHVGSIFYKNPLRSQKGLIGHCTLEPQKPRCPISHPEYEKYRALNFIANIRTRQSEGDEWKPLDCEMKHEVYHSCFISKVGTDFPFKRIREFIEKKLGQHLSYEGNKKGTINFKDTLNVSGCPVTARSIQLLGEDWQTISIQGNKERNSQSKVNPVRHNVTYNAEDIWHYCFTADEMEDVECFAKSCLHWDDAKAKQLVKLWSNIKQGYGMLSRKAMFNINRMLSLGFDNTDAILLAKIPDLVGVKAWENNEDNVRDILTKYTGSIKQEHARERMICTIVNSLIANYKSLPEQHIFAYKDVSYKLQQSDLIDVDNAIVDYWGAHTWEQLSADEQEPIIDEVRRRYQDFFATSKRDFCKAKRLSDYFADFLNTNILGFDDSKLRKLYHPSMSEFPSANQGCREKSEWRLGSPKLGGIRNPVALRTLHTLRRKVNAMLDDHIIDPDTTRVVIETTRGINDANMRWAIEQYQKKREEQHREIERIITELALGREVNETDIEKGIYYMEQKQFEGTVSGETEYAPGRTFAKDIKKYALWKEQGCMCLYTGKVISLADLFSDNKMDFEHTLPLSQSFDDSQANLTICDSHYNRAIKRNKMPSQLPNYSEDAVIDGILYTAILPRLEAWEKRVEKIKENVDFWRAQAKKAQEKSRKDQCIRQRHLWQMELDYWSDKLYRFKTKEIPQGFRNRQLADTGIISRYAVQYLKTIFDKVEVQKGEVTATFRKILGIQSTEEKKDRSLHSHHAIDATVLTLIPVAAKRERMMKLYYEKEEAISNNEKAAIQRRLDAELESQNIGSSFTQIGHIITENILINHIAKDKSLIPSSKKVRSRGKEVQYLQADGTLKGRVKRGDAIRGNLHKDTFYGAITQNKQNVPFEEITVSDISFVCRRKLEYANDGFKTWDDVEKVIVDKSLFQKMKAQFPEGTSFKDASAQGIYAISNDGKTHGCPIRHIRCYASTSNPIRLKKNTYSSQKPYKNYSYVASGDLVYLCCYENDTKREFVPLSLYEVTQLKKSTGESIPKEYLSKKGVAMKLRYCIKAGSMILLYNNNPEELKEMSPDMLMKRLYVVQGFEGDSRITLKHHLCALSDNDVPNEFKKGANPKKVGIDSIPKIRCVASSIKFLLKGDKPNDGDFWTEIIGSETRISFK

SEQ ID NO: 22978 - protein, 1530 aa, unidentified
  REGION 1..1530: note = Cas Enzyme sequence
MSKKMILGLDLGTNSIGWALVKHDIENNQGEILGMGSRIIPMGQDVLGEFGKGNSISQTAERTGYRSVRRLRERFLLRRERLHRVLNVLGFLPKHYASEIDFEKRFGKFKSETEPKLPWKKGDDGKFSFLFQNSFNEMLTDFKVNGQDLKIPYDWTIYYLRKKALTQKIEKEELAWILLNFNQKRGYYQLRGEEEEENLNKQVEFYSLKVMDVIADEPQKGKADIWYSLILENGWVYRRSSKMPLFDWKDKVRDFIVTTDLDDDGAIKTDKEGNEKRSFRAPAETDWTLVKKKTEQEIDQSHKTVGAYIYENLRQNPKQKIKGKLVRTIERKFYKEELKQILEKQKGFHLDLQSEDLYSDCVRELYRNNDAHQLTLSKKDFVHLLMEDILFYQRPLRSQKSSISNCTLEYWMYKDKDGLEHTEYLKAIPKSNPYYQEFRIWQWIYNLNIYKKDDDTNVTSEFLNATGDFEKLFEFLDNRKEVEQKALLKFLLEQKGFKGKILNAEVEKYRWNYVEDKKYPCNETKTMISSRLEKVENVPVSFLTRETAQKLWHIIYSVNDKIEFEKALKSFAGKNNLHENSFIEVFKKFPPFKSEYGSFSEKAIKKLLPLMRLGKYWSWDNVGEKSKDRISKIITGEYDENIKDKVREKAIHLTSESHFQGLQLWLAQYIVYGRHSEAAMAGKWNSVGDMGEFLKEFKQHSLRNPIVEKVVTETLRVVKDIWQQHGNGAKDFFSEIHIELGREMKNTTEERKNITNAITENENTNLRIKALLAEMMNDGKVENVRPFSPMQQEILKIYEDGVLNSDIEIEDDILKISKTAQPSSSDLKRYKLWLEQKYRSPYTGAVIPLNKLFTPEYEIEHIIPQSRYFDDSFNNKVICEAAVNKLKDNYIGLAFIKQFGGTIVECGMGKTVTVLKQEAYEDFVKQHYAKNRSKRTKLLLEEIPEKMIERQMNDTRYISKYISGVLSNIVRAEDGTDEGINSKNILPGNGKITATLKQDWGLNDVWNELILPRFERMNNLTKSKDFTAWNENHQKFLPTVPIELSKGFQKKRIDHRHHALDALVIACATRDHVNLLNNQSARSDMKRYDLQRKLRHAEKWTDKEGKIKDKFTEFKKPWEEFTLEARTALENIVVSFKQNLRIINKATNNYQIIDNGKKVKKKQEGINWVIRKPMHKETVSGKVNLPWIKVPKGRILTATRKSLDTSFDLKTIESITDTGIQKILKNYLVEKGSPELAFSPEGIEDMNRNIAKYNGEKPHQPINKVRVFELGSKFPLGQTGNKKDKYVEAAKGTNLFFAIYEDENGKRSYNSVPLNEVIERQKQGLSTVPFENEKGHRLLFHLSPNDLVYVPTEDELENNDQIDFNNLNKEQRKRIYKFVSCTGGEGYLIPQTNAFEIVKNENGTNSKSERLQDLKDGNCGYDKNGKPLMIKEVCIKLKVDRLGNISPEKKIYRSTMDKSLVSELEVIYETRKWGLKKFDSFDDMENEQLRYFASLSPTELFRNLKKLTLAAFGIADESKLKHPKRIVKYE

SEQ ID NO: 22979 - protein, 1544 aa, unidentified
  REGION 1..1544: note = Cas Enzyme sequence
MKRILGLDLGTNSIGWALIEQDFQNKYGKILGVGSRIIPMSQDVLGEFGKGNSVSQTAERTGYRSIRRLRERYLLRRERLHRVLNMLGFLPEHYARQIDFEKRLGKFFEGSDPKLAYNGKEFIFKFSFEEMLADFRDHQPQLLVNKHGEAALIPYDWTIYYLRKKALINRITKEELAWVILNFNQKRGYYQLRGEEEDSVSNNKEFVARLKVVQIEKGEKDKKNENKNWYNIVLENGWVYSAPFSSEPLWLNTEREFLVVEEYDADGNIKIVKDKRTDKEGKEKRKITPLPSFEEIELMSKKEQDKIFKKIKARTEITISNSGKTVGAYIYDTLLQNPGQKIKGKLVRTIERKFYKDELKRILEKQIELQPELFTYDLYNDCVRELYRSNEAQQLSLGKRDFVHLFLEDIIFYQRPLRSQKSSISNCSLECRAYRLNGEEKTEHLKAIPKSNPYYQEFRVWQWLYNLRFYKKDDDTDVTNEFIKSVEDLENLFGFLMIQKEVDHKDILKYFFIDLKGNAQKAEIAKYRWNYVFNSDKDESKKYPMNETGYEIRRRLARVETVPPDFLTGDVEKRLWHIIYSVTDKKEYESALKSFAEKHHLNIESFAENFKKFPPFKSEYGTFSEKAIKKLLLLLRIGKYWSWEAIDNKTKSRIGKIITGEFDEEIKNKVREKAERHQLKTEADFQGLPLWLAQYIVYGRHSKASITGKWNAVKDLEAYLEAFRQHSLRNPIVEQVVIETLRVVRDIWQHYGNGNKNYFDEIHIELGREMKNTAEERKRLTNIVSENENTNLRIKALLIELLNDGAVEHVRPFSPMQQEILKIYEDDVLNSGVEVPEDIGKISRKAEPTRSELQRYKLWLEQKYRSPYTGEVIPLNKLFTPEYEIEHIIPQSRFFDDSFSNKVICETTVNKLKDNQIGLTFIKNHHGEKVPTGFGREVQIFTEEQYKAFVKEHYAKSRSKRNKLLLEDIPEKMIERQINDTRYISKFISNVLSNIVRSDQNDDGVNSKNLIPGNGKITATLKQDWGLNDVWNDLILSRFERMNKITGSNLFTAYNEKYQKNLPTVPLGHSKGFQKKRIDHRHHALDALVIACATRDHVNLLNNKHAKSKERFDLNRKLRKFENVVYIHTKTGERIEKEVPKDFIKPWEIFTIDAKKELEKIVVSFKQNLRVINKATNKYEKWVENNGKKRKELVEQKGVNWAIRKSLHSPMPYSRKEYEFNVLKIADCVGKKELIIDQYIRNEVERVFNQNNGKISEAQKALKENSIFDKKGEAIVVTPFKIKTEKFRRRQPITILANRGQGGIKTVDDATKIINKVADFNIRKDLLEYLKECNYDIDKAFSSEGLENFNSKRKIPIYRLPIAESGTGRFAVGHTIGTKHKWVESDKGTNLFFAIYQDGNGKRNYVTIPLNEVVERQKQGLSSVPEINERGDRLLFHLSPNDLVYVPSEEESTSTISFNILTKEQADRIYRMVSSTGSECYFVHSSIASLIKNYDAKSKIGELGSLNKLETTLDGILRIKEKCVKLKVDRLGSVSISRPAFPSI

SEQ ID NO: 22980 - protein, 1662 aa, unidentified
  REGION 1..1662: note = Cas Enzyme sequence
MKIKKILGLDIGTTSIGYSIIEINDEKNKNSISDKLAVSDINNDRIGIFKDAIGVRIINQDTDRFDRGLKLNDPKGSTLTPTANRRKFRGIRRMRNRYKLRRNKLYKLLALLGLSPDENYFTNKKGKRGKDNDIGKALYGLRERAAREKITLSELARVLLHLNQLRGYSSNRFAKDEETKFDYYLTEVVELDWENKIPVFEKGSTEDVKYYQIKTKLRFVEPYVIIEDDEKIILEDVEGYIFKKEIDFAVGDFITIKAPEFKQNKKGKVIIEEYYKITPTKPDPTDWNYKYQTLHKNLSEWCKSGGTVGSYFYKNYYELSNLSRIRNNVVNREWYEKELDIIWTLQYEFHKDFFDRVDVGNLVKNVFKDYSIVLNDVIGKVGNKEQLKTLISDKIIFFQRPWQQAKSKGRCEFEKIKVKREFAIKGTGIKELKEEHIGRTVVPRSHPIFQDFKVWQQINNVKLIWNTADEKTNLFENAELFKKYTGKSIEEVKELLFNKLQSSKTLSWRTFVKDELGLDTYDEIEEKKKSKITRKQGLDEETGEVVDEFFSVNFRKRKRDGTYDDIKLKGNTTRTELQNIIKEKSPEWFVSLHDRNKKVTNLQLLWEIIYDITNSDVNKVASIIKKHFGFDDDICLILAKVQFDDAGMANLSAKAIRNLLPLMSDGKNHTPKTKAKVDELISINSSETDVDVDEKLSGIKDFVTDKKARIRLSKFSSENEFKYLNYWEAAAIVYGSHSSKNNSGIKEMERVKDHSMNNPVVEKIVNETISIVNLLKKEYGFDEVRIELSRELRASADERQQMWEGMNNGAAKNEWAKKMLREIKQAMLDDDRDISQLDTEISGSNIDKIKIIEDVVKYQNPTEFKTKEKEYKLTEPSNAEVTKYLLWLEQNFKCPYTNQTIPLTDVFARGKVVEIEHIIPKERYYSNAYANKVITWREVNQAKGNKTAYEFIVSKRNPSGTVKVGKKEIPLVAASEWENHVKEMFPKSGKRNNLLRKEIPEDPIERTLKETQYINKKLKEKLGELVGSDKVWITSGAVTDILREKWKLNDVWKELVEERFTKFNNGEAKERLNLKYTTKHFNTKTNQYEDVEKFAGMSKRIDHRHHALDAIIIACTKQNHIQYINNLNAINSAEIENDDSKKTKYKEIKNDVCVGNSSSKFKFPWDENKFIPEVKKALQNVLISHKNTNVLISPSKHRNNKNINSGKVASVRGELHLQTNYTKKKYFENEKIDIVKLIPLLFKKKMENQNQSMVRFKSFSEIVKETVLKEKYQNVLISLLEEYDAEKLNQQTVKDFSKKILKKIEDEKLFIHEKTGEKITWLSIFTEKNASVRPMGLSMDLNSEKEIKDISNPRLRKIAQYRLKYINDKIAEIKALKLPFKEEENTKIRELKEIPLYNNAIYEVRVKQKDGKYIWIEIKHLENSDIENIEYAKLETTLAIKNKLKEFSLDELKERYISNPIFLSDKPTLVKKARQKSFFQDLYELNDGRYVYSRDVFMTYIFVPETSNRKDAKREIEFLKFFDAVKIVTLEKPDKIDYQKLIKKEGYKLIFTLSKNDVVYIPDEILTDEQIAEINWGDKNEIIPKLFVVKEMTPSRNEIVFQHINKSDSIKVNGDEAKNILNTEKLEEEIKYGDTNMWKRCIKVNIDKLGKEILPYWKDYEL

SEQ ID NO: 22981 - protein, 1376 aa, unidentified
  REGION 1..1376: note = Cas Enzyme sequence
MNQTLGIDLGTNSAGLTLREGNIFSWYGVYTFKKGVGEGKSGEFSFSAERTKHRSSRRLYNARRYRKWETLRVLIDFGFCPLSLENLTNWKNYTKGVGRVFPVNDTAFSNWIKLDFNGDGKPDFSSPYQLRKLLITEKLDLSDEKNRYKVGRALYHIAQRRGFKSSRKSGVNEKTAVYKGSNETKTIGRNDYENLIIQEGSLGAAFAYLENKEIRVRNRYTLRSDYQAEVQKILEFQKIDNSELVESAQKAIFFQRPLRSQKGLIGKCTLEPNKPRCPISHPKFEEYRAWCFINNIKYRTIENNQFEPIPLDLKEKLYREKFFFKSKKELQFQDIRKFIAANGGKEWELNYSHKMDEISVSSCYVSARLKSVFGEDWESFEKKVIRKNKKEENKGITYGIEDVWHLLFSFEDEEYFIEFLDKVLELNEEQIKELLNLFKSFPVGYANLSLKAIKNILPFLREGFSYTEAVILAKIPECLGKETFKANKPSILKALEDEIEQNRHKKAIISITNNLIFKYYALDDDKKFGWKNPAYRLDESDLKEVETAGIEHFGDKTWDRFEKDNKQKILSEVVIEYQNFFSSSKREHIRPPHLVNQIEEFLYENFDIPENLLNTLYHPSQIDIYPKKEGQQYLLSPKTAAFKNPMAYKTLYKLRDVLNYLIEAGKIDSDTRIVIEIARELNDANKRWAIETYQRRRETENREYAAAISELLKDIDFKGDADPKSETDIDKFRIWTEQLDNLEDVKAEITSIEKDKKLSVSEKDIQKYRLWKEQNCLCMYTGRIIKITDLFDRNIVDFEHTIARSKSFDNSLANLTVCYSDYNRNIKKQKLPSELPNYDQPSNSYSAIKPRLEAWEKRVEELFKQIDFWKYKSKVAVDKPSKDEAICQRHLRQMEYDYWKSKIDRFTRTEIPRGFINSQLVDTQLITKYAFHYLKTVFNKVDVEKGSNTAQFRRIFGIQSKDELKERGKHSHHAIDAAVLTLIPSARKREELLKKAYEFEENNHGKQYTELPFPGFSYSIIQEIEKNILINNVADRDQTLTLGKKIVRRRGKTVWIDKDKRIPKTAQGHSIRGELHQQTYYGKIKIAAKDGNGSIQRDENGSIIYNQLDGKDEIWMVLRRPIESINFESDVIVDTHLMGFLKEQLANGTKQNELVDFQGNRLRHLRCRVKSGRGFMNPDNVTTVKEQIYKSDKEYKNYIYADSGENFLFGLYQNEFGREMVSVNKFETASFISKIDFISKADLFKLKEPVFIKKKEAQLVHIYEPGQKVIFYTKEKDELKDLTKEDISKRLYFIKRLHQASVGNILFQHHLEARSDEELSVAFPKNIFKSAGKDGFSKYQDDFIAPRVLFKPVKPNFIIEGKDFEMGLDGTIRFLF

SEQ ID NO: 22982 - protein, 1220 aa, unidentified
  REGION 1..1220: note = Cas Enzyme sequence
MKKILGLDLGSTSIGWAFLEENNEKLNIKKMGVRVVPYTGDENDKFIKGQAVTVNKDTPLKRTARKNQQRYKQRKQKLIRKLTELGMLPSHDLLVKMSPLELYALRAKAVKEKLTLQEIGRVIFHLNQKRGYRGNRFANNEEDSGKKMSDYLGEMQVRKSTIQAENKTIGQYFYAQLNSDRHFRTKQQVFPRECYIDEFNRICKTQSLFYPELLNNSTITYLRDEVVYYQRNLKSQKGLVSECAFEKHHKVAPKSSPLFQLEKIWESIHNITLVNKKNERYPINMDQKLAIFNWLDTKEKLTSRDLLKILDLKSTSGWTPNEQIKKSGLQGNTTKTLIIKVLQSLELDPTLFIRFDLKVDHVFNKETGEVKEYSIVDASFEKEPLYQLWHVIYSIDDPIQLNKVLMNKFGFSEEQASVLNKIDFKKQGFGNKSARAIRKLLPQLMSGMDYTRASSAAGFNHSNSITAAENDQRELNKKLELYKRNSLRQPVVEKVMNQLVNVVNAILVDDNLGRPDEIRIELARELRQSKEERERTQKMGDARNKEHLEIISRLNDEFPGMAVTGKVLEKYKLFVQQDGECMYSGKRMELSMVLKGEGVDIDHIIPQSRMFDDSFQNKVLVFRKLNQDKNNQTAFDYLKGVSNEEFDAYLERVERLYSNSKISRAKRQRLLMSEQEIPNDFISRQLNETRFISKEASKLLKQICRNVYSTSGSVTEFLRNQWGYNEVLKQLNYSKYEQAGLANDGKIDKDKWSKRDDHRHHAIDALVVAATKQGVIQKLNTLNSSLTRDELLAGIEGKVKEGWQAKRSLLEQYIQVNQPFDVETVKKAVSEIIISIKAGKKVATKSINKSNGQITLVPRGQLHKEFVYGKIKRYSNAKTALNGRFKLDFVEQIVNAYEKECIKNRLEQYGNDPKKAFKNLEKNPIWLNPKKNKQLTEVTLWEEHFVIKYDLNINFKEKDIESIVDHRIKELIKNRFAEKTGSKEHPLKDIQNNPIWLDKSKGISIQSVRCFTGLNDLVPLHASDNGYTFAERHKKNDSKMVDYVAPRNNHHIAIYKKPDGTYADIAVTLWEAVKRKQLGLPVIINDASKTWSHILDKGIDDQDLLVNIPIEGWEYIESFVQNDYFILGLSSTEIADSVSRGNLNQLSKFIYRVQKLSRAGGVINISFRQNLETRVDDNKMGGEMLSKKIGKLIVVQSLGALFKANPKKVFVDSLGYIKLV

SEQ ID NO: 22983 - protein, 1093 aa, unidentified
  REGION 1..1093: note = Cas Enzyme sequence
KKRGYRGNRFANNEEDSGKKMSDYLGEMQVRKSTIQAENKTIGQYFYAQLNSDRHFRTKQQVFPRECYIDEFNRICKTQSLFYPELLNNSTITYLRDEVVYYQRNLKSQKGLVSECAFEKHHKVAPKSSPLFQLEKIWESIHNITLVNKKNERYPINMDQKLAIFNWLDTKEKLTSRDLLKILDLKSTSGWTPNEQIKKSGLQGNTTKTLIIKVLQSLELDPTLFIRFDLKVDHVFNKETGEVKEYSIVDASFEKEPLYQLWHVIYSIDDPIQLNKVLMNKFGFSEEQASVLNKIDFKKQGFGNKSARAIRKLLPQLMSGMDYTRASSAAGFNHSNSITAAENDQRELNKKLELYKRNSLRQPVVEKVMNQLVNVVNAILVDDNLGRPDEIRIELARELRQSKEERERTQKMGDARNKEHLEIISRLNDEFPGMAVTGKVLEKYKLFVQQDGECMYSGKRMELSMVLKGEGVDIDHIIPQSRMFDDSFQNKVLVFRKLNQDKNNQTAFDYLKGVSNEEFDAYLERVERLYSNSKISRAKRQRLLMSEQEIPNDFISRQLNETRFISKEASKLLKQICRNVYSTSGSVTEFLRNQWGYNEVLKQLNYSKYEQAGLANDGKIDKDKWSKRDDHRHHAIDALVVAATKQGVIQKLNTLNSSLTRDELLAGIEGKVKEGWQAKRSLLEQYIQVNQPFDVETVKKAVSEIIISIKAGKKVATKSINKSNGQITLVPRGQLHKEFVYGKIKRYSNAKTALNGRFKLDFVEQIVNAYEKECIKNRLEQYGNDPKKAFKNLEKNPIWLNPKKNKQLTEVTLWEEHFVIKYDLNINFKEKDIESIVDHRIKELIKNRFAEKTGSKEHPLKDIQNNPIWLDKSKGISIQSVRCFTGLNDLVPLHASDNGYTFAERHKKNDSKMVDYVAPRNNHHIAIYKKPDGTYADIAVTLWEAVKRKQLGLPVIINDASKTWSHILDKGIDDQDLLVNIPIEGWEYIESFVQNDYFILGLSSTEIADSVSRGNLNQLSKFIYRVQKLSRAGGVINISFRQNLETRVDDNKMGGEMLSKKIGKLIVVQSLGALFKANPKKVFVDSLGYIKLV

SEQ ID NO: 22984 - protein, 1066 aa, unidentified
  REGION 1..1066: note = Cas Enzyme sequence
MKKILGLDIGISSVGWGVFDQDSGEIIDAGVRLFEEAGRNANEDRRSYRGSRRLKRRRTHRLERAKELFSKYNLPLSGVGKADPYQARYDAIYHTVSKEELAAALYHLVKMRGTILDSPEDEKDGNDNELSTKQQIAKNKKLLANQFVCEIQLERQKNGERIRNHKNRFRTKDYLDEAKAIINRQREIHKEIDHEEFITDYFSLIEQRREYYEGPGSRKSPTPYGPFFVNEKGEIEEVSMIDKMRGKCTYFPDELRIAKKSVTADLFNLLSGDLNKLQIEGEYLTYEDKRYLVENFIKKGKNITLKQILKYKGYPNDTDVSGYRVDLKNDKPLFTEFQGYKEIKKIVEGNNLPLEILENIDLMDNIAEILTAEKAYHRREERLSKLLSAFDEGTTRRIIDAFKESTCFTGYHALSKKAMNLVMNDLWHTNKNQMELFSALGLEEKRLAGNKNKKKITFDDTAILSTVAKRAHREAIKIVNAVREKYGELHSIVVETAREKNSEEKRKNYSDFQRQAGKFEKEMAKLLGVKSLAELRLTSKQHLVLKLLKQQNWQCIYSGNSKQIGPWDVVNNPTLIEIDHIIPVSISFDDSQANKVVCLRSENQKKGQRTPYEYFKSGEGPRTFEEFKVDVLNLFKSKGINNKKKDYLLEMRDVKYNEELQKEFINRNLVDTRYAVRSFSINLRSFFKSNDIDTTVLSIRGSFTSALRRRARLNKDRDESYAHHAIDALIVAAIGKMPLFKFFHKFDMDDTGAVVDRETGEILEDEKLFDERFITFLSKLRNYESEVKYSHKVDRKANRSLSNQTIYGTRQKNGEKYTIGKFKDIYSLNKNQVKPLLKRLEKKPDDFFIAKYNPEVMEIVQKIMKEYKTADNPFKAYYEEHGYIMKDCKVPVKTLKYYDKKLGVHMNITRNYSGARNDVVLKSIKGARVDIYQNAEGKYKYLGVPYHWFKQQGDRFMLDMDKYESEKQEKYKQIDDSYEFQFSLYKNDLFSFEKNGEQFFRVFRGDNNPRQNKIEVNYVDKPKKKEERKYCFLAPSTFSHVNKYNVDVLGNTYKIEKESFKDYLQL

SEQ ID NO: 22985 - protein, 1397 aa, unidentified
  REGION 1..1397: note = Cas Enzyme sequence
MEKTLGLDLGTNSIGWALRDINADDNQITDKGVITFDKGVGEEKGIEVPLVKARTAARSKRRNYQAEKYRKWALVKCLIEKGMCPLLESELYWWKRYQKDNNGVQQGRKYPESKKFRQWLQYDFNGDGKPDYQEYGYSIHENIYLFRVLAISENEEHKKIFKDNPEILGRVFYHLVQRRGFKGRVEDDKETQTILLGSKEANTPGVNELIPFIEKYKTLGAALYYINKNEGYRIRKRYNRRQDFEKELFEICRVQGIPETVQHELWKAIIWQRPLRSQKGLVGYCTFERPQKNEKGQYIKGGKTRCPISHPLYQEYRTWQLISNLKIVVPDDIDKVAFLTDKVYPLFIRDSEVEFVKIKKEIEKVGGIVRAKFDDETRFPTNDFLYRIKEIYGENWRIILKWEETLTNKPKSGKYHRVEDLWHEIYHFIHLKSTTPATFYDAIANKLHFDDKQIKSFKKLKLDQGYASLSISAITKILPYLQKGLLYSEAVFLANLNKIFATELTPETKTEILSAFRLLSISFNENKLRLGIVNSLISDQLNSSTRFGMNSDYALDDDDINDIKLKIEDTIGVQNWNKKEDIEKVKLLDFIAEKYLIFLQKPVNYDANKSFYKIKRFDQILKEYLVEKYDFSIEHLNKNLWHPSEIEKYDPAPSSKKVPNIKILGDPNPVGKGFKNPMAMKTLHRLRNLINYLLESGKIDSDTRIVVELARELNDANRRKAIQNWQKRREDENKELAKGIINTAKVKYPDLDENDPLIADRARLWYEQIENSDEIMRQAKALKDDLLKVKLWKEQNCRCIYTGRIISISDLFNGTEVDIEHTIPAKISWSSEQWNLTICDSKFNREIKRKKIPADLINYETTSEFDKDGANILKRIEPWAIKLKSLNASLQKNINQTKGSNYMDKNAKDEILIKRRMLQMDIEYWNKKIETFTKLEYLGGFRRQQLTDTQIASKYAFHYLKTVFNRVEIQKGITTSTFRKIFKIQNKKELKDRTKHSHHAIDAAVLTLIPPSSIRTKMLDEYNNALDMNQSYHKNPIGWDNFKASYLLNLEETILINYQKKDTTLLQTKKKMRIGGKIQFIHETTADGINILKRDLNGKPIPKMAVGTGIRGQLHKDSFYGSIKINDQLMLVERYPIESFDSLKDCTHIIDKKIKEIVKTELINRVESGMSFDKAKFLPIFFPGSQQIIKKVRCRVAAGRGYLTSEKAIEISIKNHISKYEHKQNKYVQNYKNSLCLFYINSENNLRGLMIVNLFELSFLKIKTIQSIKQENFYRSITLGKGKNKSEALLENIIHVGDKFIFYKESKDELLNLSHSEISKRLYTIYKFNEPAPSTVYIYLQHHLESRSNDELGNGEKLIDFGKYQPRLFLSASKLNCAMEGLDFHVTPDGHINWIIK

SEQ ID NO: 22986 - protein, 1388 aa, unidentified
  REGION 1..1388: note = Cas Enzyme sequence
MKRILGLDLGTNSIGWALVNEAENEKEISKIIKLGVRVNPLTIDEKTNFEKGRPLSTNADRTLKRGARRNLQRYKLRRENLIEILIDNHIITKETPLTEIGKGTTYQTLSLRAKAVRERIDLEDFAKVLLAINKKRGYKSSRKASNDEEGQAIDGMAIAKELYERGITPGQYVLELLENDRKYIPDFYRSDLKQEFNKIWNNQKTFYPEILTDELFKELDGKNKSQTWAICQKPFNIKGIKRITKGREKTIENYHWRVKGLSGKLNLEKLAIILQEINNDINQSSGYLGGISDKSKKLYLNKETVGEFLYKQIAKNPHTSLKNQVFYRHDYLDEFEQIWKTQSNFNANLTDELKQEIRDVIIFYQRKIKSQKSLISFCQFESWEQEYFDKETGKTKTRTVGRRVIPKSSPLFQEFKIWQNLNHLVFTNSETDEKIEIKEVEQEIRKELFEELNLRGDLNPNDLLKILRSQFKIGKLSNWKCNFEKIEGNRTNAALFNIYQKISDFEGYGIDWNKSNAKKIRKELKATFPEIGIDASILEFDAYKKQLTNQSSYELWHLLYSAEEDFKISEQDKLIYGNSSVSLKKKLHLKFGFNPEYAKMLANLSLMSDYGNLSAKAIKKILPYLEDGHLYSEACRLAGYNHSKSLTAEELEKFEPKAKLDLLKKNSLRNPVVEKILNQMVNVVNQVIDTYGKPDGVRIELARELKKSAKERAEMTKGIADGTRRNEEIKKIITQKFGIPNPTKSDLVRYRLWQELESRGYKDIFTDKYISPDKIFSSEIDIEHIIPKALLFDDSFSNKTLSFRNVNLKKANRTALDFITQDYQSNVEAYKERVETWNKDNHISKGKRNKLLMSLKDIPDGFIERDLRNSQYIARKAKRMLYEVFPNEVLATSGSITDKLRSDWDLINVMKELNLPKYKALGLTEYEERLDKGTEELFKHEVIKDWTKRNDHRHHAMDALAVAFTTHNHIQYINNLNARKDITQDNHPIIKNIENLITEVNSKGKRVFKAPMSSFRESAKEQIEAILVSFKNKNKVVTKNINQTKKEGGFNYQNAKTPRGQLHKETIYGKSKQPLEKPVKINNRFCKKQVGLIINFKEQEAVLHHLKKYDNNEKIAFSNKTLKSDPIQVNGSPLREVKIFEEIFTIRKDINPDNFKTQKHLDKIIDKGIKEVMKKRLEEYNGDFKTAFSDLDKNPIWLNQSKGITIKRATISGVTNAEPLHQAKDHLGNIILDDNGKEIPIDYVSTGNNHHVAIYQDESGNLQEEVVSFYEAVIRKNQDQPIIKKRHPKGWKFLFTMKQNEMFVFSSENFNPSEIDLLDEKNAAIISPNLFRVQKIATKNYMFRHHLETEVTNNLDFTYRHFQATEWLRNLCKVRIDHIGRIVQIGEY

SEQ ID NO: 22987 - protein, 1362 aa, unidentified
  REGION 1..1362: note = Cas Enzyme sequence
MRKILGLDLGTTSIGWALVNEAENESENSEIIKLGVRVNPLSIDEKTNFDKGKPISTNADRTLNRGARRNLQRYKQRRENLFEVLLKNKIIEKETVLTETGYNTTHETLRLRAKAPNQQIELKELARVLFSINKKRGYKSSRKAKSEDEGNAIDGMSIAKELYENKITPGQYVYQQLLNKKKYIPDFYRSDLQNEFNTIWDFQKQFYPNVLNDEMYKKLEGQGQQSSRKRFLAIHGIYTAENKGKRDAIKLQHYKWRSEATTNQLPIDQVAYVLVEINNDLNKSSGYLGAISDRSKELYFKKETVGQNLYRQIKENNHISLRNQVFYRQDYLDEFEQIWEEQAKYYSELTSELKNEIRDVVIFYQRKLKSQKHLISDCQFEKRHKAIPKSSPLFQEFKIWQNLNNLEFKNTKTKEKIVLDEDLRISLFEELNLRGNLTEKDILKFCDLDTTWKSNFTTGLEGNNTNKALYNIYQYIATEEGYGFDWEKKNAKEIQEELKSILPQINIDATILNFDANLEGQTFDKQTSYQLWHLLYSAEDDTKILEKDRLIYGNSNVALKKKLHTKYGFKPEYAAMIANISLQEDYGSLSSRAIRKIIPFLQEGNDYSESCALAGYNHSSSLTKEELEKRILKPKLEILHKNSLRNPVVEKILNQMVNVVNQIIDEYGKPDEIRIELARDLKKSAKEREETTKFINSATKVNDDIKLLIKKEFGFTPTKNDLVRYKLWLELKNNGHKSLFTNKYIPKENIFSKDIDIEHIIPKAILFDDSFSNKTLAYRAVNLKKADRTALDFIEQEYNNEEINNYKLRVENLYKNGDISKGKYKKLLMSIANLPTDFIARDLVNTQYISKKAKSMLFEVFQNVVPTSGRITDKLRGDWDLINVMKELNLPKYRSLGLTEIQERKGNKKIEVIKDWTKRNDHRHHAMDALTVAFTTHNHINYINNLNASRSKESVLYAIKNTITKIYEDPIGNKKRKFIPPMVNFRVEAKKHIESVLISYKNKNKVVTKNVNKSKLKGKDNFNIKSQLTPRGQLHKETVYGTSKREMEKPIKLNKSFNLDTLNQIINHNLKTLVAKHLHKYNNNPKIAFDSKTIKKDPILYNDLPLTEVFCFEKIYTIRKVVSPDNFKTEKDLNKIVDKKTREILKFRLAEYGANPKEAFADLDKNPIWLNKEKRITIKKVTITGVANAEPLHYKKDHFGNEMLDENGNKQAVDFVSTGNNHHVAIYKDNKGKLHEKVVSFYEAVARVNQGLPIIDKEYNTSLGWEFLFTMKQNEMFVFPSDDLNLDEIDLLNKKNYTLISPCLFRVQKLGSKDYNFRHHLETTVTNNLNFTFKRIRNCNSLEELIKVRTNHLGMIVQIGEY

SEQ ID NO: 22988 - protein, 1546 aa, unidentified
  REGION 1..1546: note = Cas Enzyme sequence
MKRILGLDLGTNSIGWALIEILEDGTKRIIKLGSRIIPMSKEVLGNFEKGVTKSQTAERTDDRGVRRLYARSRTRRERLLRILNILDYLPDNFSNQIDFDEKKGQFKKGSEPLIAYSYKVDENGNRIFNFMDSYEEMEKEFRMRYPNLPKLNKKGKPYRLPYDWTIYYLRKKGLTQKISNQELAWILLNFNQKRGYYQERDEKEVEIDENKKVELIVLKAEQFKITDQKVDDKPLYEIIFDNGWIYDNTTTKPEIWEGVDIEFIVTSTINKDGSIKRTFKKVDSEKDWEAIKRKTEQDLRKSQKGADKTFVGKYIYETLLENPKQKIRGELIRTIDRDFYFDELEVILRTQLKFREEQWGDKNLYKRTVQELYAHNIAHQENLLKQKDTFIHLFLKDILFYHRPLKSQTGLVSRCSFEKRVYVDSLTGDKHEVKIKGMPKSHPLFQEFRIWQLAHNLRIQKREAEENGKLKINLDVTNQFIRNKSDLAKFFNFLYNKKDINQKQLVAYFIRDKKEQSLYRWNFTDDNKIKLDCNQTRPALLSKLSKEDKRKFDEQFELKLWHIIYSVTDKSEYDTAIGRFGESNSLSEETTEKLKRAPMLKKEYATYSEKAVKKLLGLMRCGCHWSEVSIHPSSIQIIDKLLTGEFDERIENQVREKAIKLDKIEHFQGLPLWLASYIVYGKHSEVDATQWKSSKDLAEYINTFKQHSLRNPIVEQVLLESLRVTLDIWEYYAEKFGLQFEEYIDEKTGKKVKSYDRLFSKIHIEIGRELKNPKKVREKMTNSINKNKDTNQRIRKLLFELKNVKEVENVIPNSRTHFDKLKIFEQTVLSNYSEKELKAEKLDSKLTVEKFIKKNQPTFSEILKYKLWLEQKYISPYTGKIIPLTQLFTSKYEIEHVIPQSKFLDNSFNNKIICETEVNTLKDNRTAYTFIQEFQEAEVPLSGGGSVSILKKETYEKLVKENYDGRKKENLLRETMPQKMSERQMNDMRYISKAALKIYSNIVREEGERESTVKNVLPVAGKVTAKLRREWGLNQVWSGLVEERFKRLNRLICGEENENNGLFGTWVDDGGYFRTEVPLEIREDFDIKRIDHRHHALDALIIASLTSNHVNYINNEHTKSDLKRYDLGLTLRDTKQIEKTHPLTEKKTKHTVLGNYKKPWETFTQDAKSALQEIVISFKQNLRAINKAQNYNWRYKDNAGKVVYTKNGVPKKQWIEQVSSKTDKTSNNKTNWAIRKPLHEETVYGILENGEYKGDLVKREPLNISFDEKKIETVIDPVVRSILLRHIKQDKFKGQIDEKGNIFKPEEVAFSAKGIKDLNENILTLNNGVFHHPIKKARLRFPKGKKFSIKKWEDKEGNLLRETKFVKSATGTNLYFCIYEKEGKRKYYVPPFEEILEIQKLEQDLPLEQKKNVPEQHPDFHDFKLKFYLQPNDLVYIPVKNDEDMGFENLGRQQLENIYLFKDGSGTTANFIPMFSADVIYNISNKENREKFADAYNLDKGELIKNEYGLGSPQLKNQNSVDGIQVKSVCWKLQTDRLGNITKVLK

SEQ ID NO: 22989 - protein, 1379 aa, unidentified
  REGION 1..1379: note = Cas Enzyme sequence
MEKTLGLDLGTNSIGAALRVGNEFDWFGVKTFKKGVGTGKSGEFSLAAERTGHRSKRRLYNAKRYRKWETLKVLIEARYCPLSIEELHKWKRYEKGVGRVYPIENKEFDQWIKLDFDGDGTPDFSSPYQLRRLLIQEKFDLSDKRNKQMLGRAFYHIAQRRGFKSSRKGGDKETSAIHEGSSETDAVPRDLYKEMLTEYRTLGAALAKLEDDGIRIRNRYTLRKDYEEEIKKIAEVQELDEQIREKILKAIFFQRPLRSQKGLVGKCTLEPMKAKCSISHPQFELYRAWAFINNLEFYDFEGEEWIKLPIEWKRNLLNDCFLKVRTSFKFGDIRKNLNKQAGTKLTLNYDVSQGRIDKQKNLSSVDKVSVSGCPVAGRFKSVLGENWHNWSYETTRTNKLSGESKEETKIYSIDDLWHVLFSFEDEEYFEEYCFEVLDFNEDKRKQLLTLWKSFPVGYASLSLKAINNILPFLEEGLIYTEAVLLAKIPELIGKEKFQENKELLIQEIRGIIKQNRLKKRVLNIANNLISQYYLLEHGNGRFAHKDYGYKLADSDKRDVAKACVQHFGEKRWEKMEDAEKESTEVAVQDKYQEFFTNPKRMHFKLPRLIDHIQEFLADHFELDQKQLKKLYHPSQIDIYPESRPADDGKCYLGSPKTGAFKNPMAMRTMHELRSLINKLIEDGKIDEETRIVVETARSLNYANMRWAIEKHQRDREKENKEFAIAISELIKDSEFQGQANPNSKSDIDKFRLWVEQIEDFEKVLKVVSATKEDVEKYYHWKEQGCRCMYTGEFISITDLFDTNKVDFEHTIPRSISFDNSLANRTVAYASYNRNVKGNKLPTELPNYWEDTKEGKAIKPRLETWENRLKSYKEKIERAKAASKGAQDKDSKDQNVRRKHIAQLEYDYWKNKLDRFTREDVPTGWKNSQLIDTQIVSKYAFHYLKSVFNRVDVQKGSNTAEFRKIYQIQDEDKKDRGKHSHHAVDAAVLTLIPSPSKMKEILYKAYMYYEKNSKQYTEKPFEGFHQSQITEIEDKILINQKSKDQALASGSKKVRKRGKIEYLRDANGEFRLDEEGKRIPKIATGDSIRGQLHLDTFYGKIKVVERNPDGTPRRNEDGELVFEKKNGEHVFWMVERVKVSDSKLNLKNVVDPLLRQHMEKQIKNGRKLNELEDFNGKIIRHVRCKSHVTEPITLKKHTYKSKHPHKQSYYVANGENYGYAFYEGLVNGKLHRDYEIIRLMDLAVTNRGGEATVLPAMSIGKDTKIPLRAILKPGQRVLFYQNTPDELGSLNPADLSKRFYKVVKFEKDGRIVFEHHSNAKDDNALKELAGEHGKSIYNGFSTINFEAPWPKLKLSRGNLDLLIECVDFDQDETGKLTWKG

SEQ ID NO: 22990 - protein, 1111 aa, unidentified
  REGION 1..1111: note = Cas Enzyme sequence
LEPMKAKCSISHPQFELYRAWAFINNLEFYDFEGEEWIKLPIEWKRNLLNDCFLKVRTSFKFGDIRKNLNKQAGTKLTLNYDVSQGRIDKQKNLSSVDKVSVSGCPVAGRFKSVLGENWHNWSYETTRTNKLSGESKEETKIYSIDDLWHVLFSFEDEEYFEEYCFEVLDFNEDKRKQLLTLWKSFPVGYASLSLKAINNILPFLEEGLIYTEAVLLAKIPELIGKEKFQENKELLIQEIRGIIKQNRLKKRVLNIANNLISQYYLLEHGNGRFAHKDYGYKLADSDKRDVAKACVQHFGEKRWEKMEDAEKESTEVAVQDKYQEFFTNPKRMHFKLPRLIDHIQEFLADHFELDQKQLKKLYHPSQIDIYPESRPADDGKCYLGSPKTGAFKNPMAMRTMHELRSLINKLIEDGKIDEETRIVVETARSLNYANMRWAIEKHQRDREKENKEFAIAISELIKDSEFQGQANPNSKSDIDKFRLWVEQIEDFEKVLKVVSATKEDVEKYYHWKEQGCRCMYTGEFISITDLFDTNKVDFEHTIPRSISFDNSLANRTVAYASYNRNVKGNKLPTELPNYWEDTKEGKAIKPRLETWENRLKSYKEKIERAKAASKGAQDKDSKDQNVRRKHIAQLEYDYWKNKLDRFTREDVPTGWKNSQLIDTQIVSKYAFHYLKSVFNRVDVQKGSNTAEFRKIYQIQDEDKKDRGKHSHHAVDAAVLTLIPSPSKMKEILYKAYMYYEKNSKQYTEKPFEGFHQSQITEIEDKILINQKSKDQALASGSKKVRKRGKIEYLRDANGEFRLDEEGKRIPKIATGDSIRGQLHLDTFYGKIKVVERNPDGTPRRNEDGELVFEKKNGEHVFWMVERVKVSDSKLNLKNVVDPLLRQHMEKQIKNGRKLNELEDFNGKIIRHVRCKSHVTEPITLKKHTYKSKHPHKQSYYVANGENYGYAFYEGLVNGKLHRDYEIIRLMDLAVTNRGGEATVLPAMSIGKDTKIPLRAILKPGQRVLFYQNTPDELGSLNPADLSKRFYKVVKFEKDGRIVFEHHSNAKDDNALKELAGEHGKSIYNGFSTINFEAPWPKLKLSRGNLDLLIECVDFDQDETGKLTWKG

SEQ ID NO: 22991 - protein, 1310 aa, unidentified
  REGION 1..1310: note = Cas Enzyme sequence
LQETRHCSKFENMSTHKQLELPFEEFAATGSVPPTAGEHAEQQQEKVTAPAAAAEMNIHGSGTKKILGLDLGVSSIGWALIKEVNDKPSEIIVMGVRIIPLDTDESDEFTTGNSITKNQKRTARRTSRKGYYRYVLRRKALTAELKKHDMFDETLFHLPQLKLWELRAKAVTEKISLKELGRVLYHLNQKRGYKSSRSEDNADKKDTEYVAEVKNRYQKLKEEGKTIGQKFFEELSKNPRYRTKQQVFPREAYIEEFNAILKKQQEFYPDVLTEEFIRHLRDDIIYFQRKLKSQKGLVSICEFEGFHVKNKDGKEIFTGPQVAHRSNPLFQVEKIWESINNITINDRQNNIFPITLEHKHKIFEYLDNNEKLTQSELFNILGIKDKSGWFGNKMLKKGLQGNLTKMAIKNALKNENLEKIWLQFNLTVRSTGTKTYQYHPDSGEVINEAEGKIVSEDCINQPLYQLWHTIYSIPEIEECKNALIRKFGFDEATAERLAKIDFSRLGYGNKSVKAIRKILPYLMEGYKYSDAASLAGYNHSFSLTKEQTEARKLLDKIPLLKKNALRQPVVEKILNQMIHIVNDIIDENRGWVTKEERDKGLFEIRVELARELKQTKEERNKTFKNINKIERENKEIEKILQDMGVRANRKNIIKYRLFNEINGDDKKVNAMCIYTGKPFSLSDALNGNEVDVEHIIPKSLLFDDSQSNKTLTFRWVNQEKGDRTAYDYMASKGEAELNAYIERVNKLYKDGIINKAKRDKLLMPADKIPQDFIERQLRESQYIARKSREILSQIAKNVWSTSGSVTEYLRRLWGWDDVLMNLHMQRIREIIPDPLAEGITEIVEWETHDGQKHKKEVIKGWTKRDDHRHHAIDALVVACTKQGFIQRLNTLSAKATRDELYKEVSARKEEFRESLSLLDKYFISQRPFTTRQVENKVAEIIVSFKPGKKVATWGKRFIKKNGKRIKVQDRILVPRGPLSEESVYGKIKTIEKNKPVKYLFENPHLIFKPYIKELVEQRLAEHGGDVKKALASLKKNPIYLDDKKTIPLEYGTCYKEEYVIKYPLQSLKLKDVPYIVDKKARDLIAARLKQFNDNPKEAFKEPVFLDEAKTIPIRSVRLFTGLAAVEPIMYDDKGNPIGYVKPGNNHHIAIYMDDQGNKIPHLCTFWHAVERKKYGLPVIIENPAMVWETILRKPEKYPQLFVEKLPQANWNFLISLSENELFLLNLDEEYYQDLLRQRNYRELSKYIYRLQKLSLFDIYFRHHLETSVDDSDNKDVIVKTRKRIRIQSIKALFDAKVRKIKVNRLGEIIE

SEQ ID NO: 22992 - protein, 1440 aa, unidentified
  REGION 1..1440: note = Cas Enzyme sequence
MEKILGIDLGTNSIGWAIRDLNVSDNQIIDKGVLTFDKGVAEDKSGEHPMVQKRTNARGIRRNYQAEKYRKWELLKTLIENNMCPLTMDELNDWRHYTKGVGRKYPQSKKFIQWLRFDFDGDGKTDFERLGFSKHESYYLFRCLIIDETKKEIFKKEPHIIGRILYLLVQRRGYNDGSEIDEKEQDELSKTIKKGGGEAGASGSDEIEPYIEKYKTLGAALYHIQKEQKVRIRKRYNLRSKYEAELKEICRVQNIEHLYKLFWKAIIWQRPLRGQKGLVGICTFEQNKRRCPISHPLYEEYRTWVFINNLKIKCIDEENTDNIKLNEVLTTIVYPEFYKAATDFKLSVIKKKLDKIGYAITAKFPDDTKVNSVQFLYRISEIYGEDWKDQLGWQNLINNKPKDPNCKYNIEDLWHLHFTKTTNSKTGESGFDFLNRFAIEKLSLDEENAKTFSKIKLQQGYATLSANAIKKIVPYLQKGFIYSESIYLANLPQVLGATEISENDVLHFSEEVRRILRADKIQKKYIQTINDLISDQLNAEANTRFGMDPSYQLDTSDLADIENKLISVFGNATWTKLSSEEKQVATNFVSDKYLSFLRKRIYAKDVFEKTERIHDKIFHWISETYSVPEENKKHLWHPSEQETYKKAGLYHEVVLHNKTIFIPINEVNKFIEKNPSCIKGNFITELLGSPEPISKGFKNPMALKTLHKLKKLINYLIETKKIDENTRVVIEIARELNDANKRKAIERWQRDRETENVEFAKAIIGTAKLKYPNLDEKNPEVIHKFRLWFEQTENSAETWKQITGLKDDVKKLRLWQEQKGVCLYTGKSINISELFNGSKYDFEHTIPASMSFDNELKNLTIADKTYNQQIKNKKLPSECPNFDKDILSFSAILPRIEFMRKKVEELETRYERAIYFSKKSITKEDKDKNIQEKNYIKINLDYWRYKLKSFTTTEYKAGWRNSQLRDTQTVTKYALPYLKTVFKKVEVQKGNITSDFRKIFKIQPRLEKKERTKHSHHAIDAAVLTLIPPAAIRDKILEKYNEANECNTGYHETPRQWANFKTAHVLNIENEILINYLPEHRTLTPTVKNVRKRGKIQFVKEKSSDGKWQYKLDDDGKKISLVAKGDSIRGQLHKDSFFGAILKPIYDENDKAINTNGKFSHEEKPSYVKRVHLEINTLQGFKLYKDDKDNAKFLSQFEDIIDPYVKKLVKNSIIDRINIGTLPKDVLLDPIMMLDKNGNNVHAIRRVRVFQGTMNPPEIKKIEEPFLSKHPHKQYIYAENTDYVSMACYIGYNETKSIIYHFKPFTTLGLSKTKKIPLAEYQNGVHFNLLWELKPGLKIIVKKSLNEDVKELENNKIIKRIYKVNTVYPAYQGKYEYFYADIDFNLNTFSAEIKVPKRGKELDFENPKESPQVRLNLSKSTFLIEKRDFIIELDGKIKWL

SEQ ID NO: 22993 - protein, 1178 aa, unidentified
  REGION 1..1178: note = Cas Enzyme sequence
RRYYLNELSAILEAQFRLQPELNNDEVIRQIARHFYPKNDFKRKEIEQNDLRHLFINDIIYYQRPLKTKKSTISDCRFAKKVIKTDHGPIQLPYKAAPISSPIFQEFRIWQTLNSIRVIQRKLRDPRGRLVVEQDVSPDFLTVQVIEKLYELFDSTGAVTQKQILKLLGLSDSNYLINLFRMKEDKELPGNETKSLIRKQFRKAGLIEKCEDLLADWNKYSLLWHIFYSLDEPSYIESALKKHFKIPDEAARNIAQIPAFKSQYGSLSHQAMSRLLPLMRSGKYWDWNSIDQSTRQRLTKLINGEEDVEITDQVRRLFKENNINSEQQCQGFSVVLAAYAVFGIHNERHTQTFSSPGEMIPREPLNLRNPIVEQVVNETLRLVQDIWKRYGRPFEIHIELARDLKKNRQEREEISKKIQDGENENKRISAILRELKIGNPNSVGDIERMKLWEQQADAEAKDQFKQLKFKRPSEPTPAEIEKYRLWAQQRFLSPYSGRPIPLSKLFTREYDVDHIIPSSRYFDDSIENKVVVETALNTDKGNRTAYQYITSGSARGLPVLPVSDYEHHITQYYFGKKRKLLLSEDVPAGFASRQLVDSRYITRKLGELLGPVCENTTNPILFTTGRITSELKSKWGITETLKNLIKWRFERLQEKTQNELVSYEQILDEGGRPTGKEILRLEGFHKRLDHRHHALDAVVVACTTRAHIKYLNDLNKIQYKKEPSDPELEYYLPRLLKVDRNQQLVSRKFREPWPNFNRDVSSAMENIVVSFRKTVRVFGRKANKTLRYVEQPDGSFVKQYRPVLDENGKKKLFPYVRQSLHKPTIWGKITLREYRGVSIAQAIKSPELIANKTQKIYIKQLLQQVGGNTQKALKLYKANPLRDTGGAAILSLQIIEFNDYSVNRVDIVSGFDRKRLEKIPDPPLRRQLVSHIEFIEGLNAERPRDEQIDPFGSEGIDLLNKNRKIPVRKVRTKEDMGSKFEVRRGAYSEADKGTNLFFVIYQNLSDPLNRKYESIPLRAVVEAQSNGSGFVEEIEGFFWFTLSPNELVYLPDDGENIFNTDWNERSLLSRKIYKFVSSTKTEAYFVPHTVSKCIQDKVEFDNLNKTQRSIDGRMIKQHCIKLEISRLGEIRPASHELRRRELKSESLLRGVSPSFIEDVKQQLEPLSKTENKPATASE

SEQ ID NO: 22994 - protein, 1196 aa, unidentified
  REGION 1..1196: note = Cas Enzyme sequence
RKNYSICLEELYRNNQDHRIAFGQKDFAHLFMNDIIFYQRPLKSKKSEISECRYESRRYLDKEGIMQSESLKCIAKSHPLFQEFRLWQFLQNLNIYQHEKYIEGRLYTDINVTAEFLKSEDDWVALFDFLNDRKEIDQKSFLKYPRFNLKKNAEKYRWNYVEDKTYPANETRSQILAKLKASNIPAEFLTKDIEERLWHILSSVEDKIEIEKAITTFAEKHSLPKEFVENFRKFIPFKKEYGAYSPKAIKKLLPLMRRGKYWSEESITNETKSRISAIVERLDTIGYDKIRINNIADDDIPKQILKSFIDCRNPLTSLNTYQACYAIYGRHSEEGEVIKWELPSDIEYFLKNTFKQHSLRNPIVEQITTETLRVVADIWKKYGNGHKDYFDEIHIELGREMKNTADQRKRITSGVIENENTNLRIKALLSELKNDNSVQNVRPYSPSQQEILKLYEEGALNSVTDIPEEILKISKNAQPSSSELTRYRLWLDQQYRSPYTGEVIPLGKLFTTSYQIEHIIPQSRYFDDSLSNKVICESEVNKDKDNKTAFAYIKECQGKIIELDFGKKVKLFTLDAYEDFVKNRFAKNRTKIKKLLMEDIPDDFINRQMNDSRYISVLIKNLLSNIVREEGEVETTSKNIAACNGSITSILKQDWGLNDVWNELITPRFERMNDLTKSNNFGQWTNKDGKRIFQTDMPLELQKGFTKKRIDHRHHAMDALVIACATRNHINYLNNEHARQKDDKIRFDLRNKLRRIEEVEIDKIEYGQKVRKKIKVAKEFYKPWDTFTQDAKHKLSTIIVSFKQNLRVINKTSNWYQKWKQQDDGNLKKVFFKQDSGDHWAIRKPMHKETVTGLVQLRFKKTVQLSAALDQWEMIVDKSLKNQIKTLVKQGFDKPKLRKFFKELEDKWDGKIISKVEIYYFEKEMVASRSAVNEAYNTNFIKSITDTASQKIMLNHLEKYNEVKDRKIIEHPELAFSPDGLDEMNRNIVQLNDGKFHQPIYKVRSFEPKGNKFNVGTKGNKNKKFVEAAKGTNLFFAIYQNSEEKRSYESIPLNIVIERQKQGLKPVPEINEKGEALVFYLSPNDLIYVPGEDEKNNLQSLNLRNFTQHQTSGIYKMLSSSGTQCFFIRNDIASPIWNKVEFSALNKTERSIDGIMIKDVCWKLKVNRLGQIIEVNGKPVNIEPVKIEESSEGVNL

SEQ ID NO: 22995 - protein, 1479 aa, unidentified
  REGION 1..1479: note = Cas Enzyme sequence
MRHILGLDLGTNSIGWALIDQEENKIIHAGSRIIPMDAGMIKDYGAGNLQSPASNRTNFRGTRRLYERAVLRRERLLRVLNVLHFLPNHFAKAINFTDHPGQFIDHQEPLLPYRKDNNGHNEFIFKDSFYEMLEDFGEKHPDMIANGKKIPYDWTLYYLRKKALSHAIRREELAWIILNFNTKRGYYQLRGEEEKTATSKNEEYKVLKVTEVTQMDEDKKHKGNFWYEIRYENGATQRKLSARPPHQIGDKIELIVTTNFDKNGNIATDKEGNAKIKLRDPKEDDWTLMKKRTEHELDESNKTVGAFIYDSLLADPTLKVRGKLVRTIERAYYKKELIAILNKQKEFIPELQDHAIYMDCVRELYRSNEAHVKSVEDKDICDFIINDIIFYQRPLKSKKGEIANCPHEYYHYIDKDTGEIVEKPIKVIAKSNPLYQEFRLWQFLQNLKIIQREKMIDGRLRTDVDVTAEYLNSAEKRENLFQIINQRKDINQTVILKALHLSSDQYRWNYVEDKSLPGNETHMLINPDNLLNAQQEYELWHILYSVDDLLVLRKALTTFAQKNNLDEQAFVENHIHTKPFDSDYGAFSEKAIRKLLALMRTGKYYDAAAIDSNTQCRIQNIIEGKADANIYKQAHKAGIDLKDKNAYQFMPLWLAEYVVYDRKKDYPIWKKPEDIDRYLKLNFKQGTLRNPIVEMVLGETLRVVRDIWAKYGKIDEVHVEMGRDLKQPSDKRKNDQKRMAENERTNHRIRTLLQEFAADDCKINNVRPNSPSQLEILKIFEDGILHDETIEIDDDIQHIINDLGDTSTHVSHKDVIKYRLWLEQQYRSPYTGDVIRLTDLFTPAYEIEHIIPQSRYFDDSLSNKVVCESAINKLKSNQLGYEFILKEHGHIEDGHKVFDKVQYEEFVKKHYANNKGKMRKLLMEDIPDAFVQRQLNDSRYIARKTIEMLSPLVRITTEDGKIADNDKGPVSINVIATNGAITDRLKKDWGINQIWNDIIAPRFERLNQMTQSENYGQWVNKDGKNYFQINIPLSLRGFSKKRIDHRHHAMDAIVIACATRDHVNYLSNAAACSNQADLRYDLQHKLCSKEKTDDKGNYVWRFIKPWETFTQDTRQTLMNIVVSFKQNLRVINKMTNFYDHFENGKRVKVKQQNGDGWAIRKSLHKATVSGAVRIQRKKKVKLADALGHLNLIVDKEVKKDIKGVIAQYHKFDPKTILKYYKDRKYLIGKKDIKQVEIWDTPEKADYSAERVNLDSSFTKEKITKITDTGIQKILLAHLANYNDKANEAFSAEGIAAMNKNIKALNGGKDHKPILKVRKMDSLGQKYPIGETGNKSKQYAVADKGTNLFYAVYENENGERTFKSIPLIIAIERMKQNEPVAPYQDENGNKLLFVLSPGDLVYVADEGEHVHDIKDCSKIYKMVSSTTNRSFYVPHSFATPIVDKLELGSKNKIEKIQDGPAIKNICYKLKVDRLGNVELI

SEQ ID NO: 22996 - protein, 1454 aa, unidentified
  REGION 1..1454: note = Cas Enzyme sequence
MGFLPKHFDSKVNQNGKFIDDDEIKIPWYKDTDGNMQFVFKDSFHEMLADFSHHQPQILLGGKKVPYDWTIYYLRKKALTQRITKEELSWILLQFNQKRGYYQLRGELEEEKDNENIEIISAKVESVERKEKDKKYDKYWYEMHLDNGMVYRASFYNDVSAWKGETKDFVLKTTILKDNSLKHELSFLPTTDEIERMDAQRKAKMYAKIKMRTEKDIESSQKTVGCYIYDSLLQKPNQKIIGKLVRTVERKFYKEELIRILKVQQRLMPELRDVHLYNKCIEELYPNNEAHRNNLSKPDFVHLLVDDILFYQRPLKSKKSQIDNCPYEYHLDKEGNLYPNKCIAKSNPHFQEFRLWHFVQNLRVYQRERKASNGQFQTDVDVTTEFFNSEEDYVRLFKWLNDRNSIKQDTLLNSYFKIKKEKGKDKYPYRWNYVEDKEYPCNETRAAMLSGLAKCNIDKDVLTRENELALWHILYSVEDKTEIGKALRGFAKHRQLGEGFAEVFCKMKPFKKDYGSYSEKAIKKLLPLMRMGSCWNEESIDAGTRNRIEKVITGEYDESIKNRVREKSIHLTDISHFKALPLWLACYIVYGRHSEAKEIEKWEEPEDIDRYLMNFKQHSLRNPIVEQVVTETLRTVRDIWKQEGHIDEIHLELGRDMKNPADKRRKMTERIQQNENTNMRIKAMLMEFMNPELGIENVRPFSPSQQDIMRIYEEGALGNLSKDDESYDFVMKVSKNAQPSKADIIRYKCWLEQKYRSPYTGRMIPLSKLFTSAYEIEHIIPQSRYFDDSFSNKVICEAEVNKLKDRQLGYEFIKNHEGEKVQLSQGEPVSILSLDNYEALVKDHYANNPTKMKKLLMDDIPDAFIERQMNDSRYISKLVKGLLSNIVREKLYNGEYEQEAVSKNLISCNGTITDRLKKDWGMNDVWNSIILPRFQRLNQLTGRDCFTTRNREGHEIPDMPFELQKGFSKKRIDHRHHAMDAIVIACATRSHVNLLNNEASHSKHNANRYQLQRKLRRYETITINGEKREIAREFLKPWDTFTVDARQTLENIVVSFKQNQRVINKTSNHYQHFGADGKKSYFKQDKGDSWAIRKSMHKDTVFGEVNLRKKKTVTLKEAVQKPNSIVNSEFKKIVKELVGKGHDDKYIKKYLNNNKDIWSDINPNKIEVYYFTKDEKKRNGEPKERYFATRKPLDTSFDQKRIKENVTDTGIQKILLAHLESKGNDPNQAFSPEGIEEMNRHIISLNNGKHHQPILKVRVYEKADKFAIGQTGNKMKKFVEAADGTNLFFAVYESDNKRIFATIPLVIAMNCQKASGKNWVKLLDERLRDKSSDIDLQQYQKFEIPEDAKLLFILSPNDLVYVPTQEESVNGITQINKDRIYKAVSFNKKQCFCIKSSVASPIVNKVEFTSSNKMERTITDEGEMIKEACVPIKVDRLGKVIEINGKRVSSPEKP

SEQ ID NO: 22997 - protein, 1365 aa, unidentified
  REGION 1..1365: note = Cas Enzyme sequence
MKRIIGLDLGVSSCGWAYVKEAENEDEKSEILRIGVRVNPLTVDEQSNFEKGKSITTNAERQMKHSARINLQRYKLRREHLIDYLTKAGFINEGTLLCENGNRTTFETFRLRAKAANEEISLSELARVLLMINKKRGYKSNRKANGSEEGALIDGMAVAKYLYENDITPGQYAYELKKKGKKHLPDFYQSDIMDELDKIWNFQQPFYPNILTDEFRQVLAGKSKTNSTKLFLARYSIYTAQNKEKDKVLQALKWRSDALARKLDIEQLAYVICELNGLINNASDYLGKISDRSKELFFQNLTVGQYQMKMLDENPNVSLKNMVFYRQDYLDEFERIWETQAKFHPELTRERKKEIGNMIIFYQRPLKSKKSLISICELEGKQIEVEVEGKKKTITVGSKVCPKSSPLFQEFRIWQRLNDIELTDLSTRQKYGLNQEQKELLAKELEYKPKMTKQQMLKCLSLKPKDYDMNFKEVDGNTTQAMLFEAYRKIIEMSGHGEHDFSKMSASDISTLVESVFAALGFNTSVLHFDAQAADISQDSMYQLWHLLYSYESDNSAMGNKALICRIQELFHFDSDEYAKILAGISFKPDYGSLSAKAIKKILPFMKEGNDYSTACVYAGYNHSKRSLTKEELDNKPLKDHLDILSKNSLRNPVVEKILNQMINVVNSLIDTYGKPDEIRIELARELKKSAKEREAMTDAINAVNRENEEYKKILETEFHIPHVSRNDILRYKLYLELKDNGFHTLYSDTYIPREKLFSRDFDIEHIIPQASLFDDSFSNKTLESRSINIEKSNSTAYDYVKGKYGEEGAKNYKTRVEDLFKNGTISKTKMTKLLMTADDIPTDFINRDLRDSQYIAKKAREILEEIVRVVVPTTGSITDRLREDWQLVDVMKELNWDKYDQLGLTETFEDKDGNTIRRIKDWTKRNDHRHHAMDALTIAFTKPSFIQYLNNLNARSDRSQSIYGIERKELYRDKHNKLRFNPPIPLDEFRTEAKRHLQNILVSIKAKNKVVTRNVNKTKCKEGFNTKVQLTPRGQLHKEMFYGSQQRYAIHEEKVGASFTAEKIATVANKKQREALLARLQAYNNDAKKAFTGKNALDKNPVWLNEAHTTSVPLKVKCLTMETIYTIRKPINKDLRLDKVVDSRIKQILQQRLDKFKGDANKAFSNLDENPIWLNQEKGIAIKRVAINAGLNKPEAIHAKKDKQGNNIPVDYVQTSNNHHVAIFADEQGHLQEHIVSFYEANSRAIQGLPIIEKDYQAELGWKFLFTMKQNEYFVFPDIENGFNPKEIDLTNVENYSIISPHLFRVQKLTSKDYFFRHHLETTVENNNALKEITWKRIKAIDKLANIVKVRVNHIGQIVSVGEY

SEQ ID NO: 22998 - protein, 1485 aa, unidentified; identical to SEQ ID NO: 22195
  REGION 1..1485: note = Cas Enzyme sequence

SEQ ID NO: 22999 - protein, 1242 aa, unidentified
  REGION 1..1242: note = Cas Enzyme sequence
MKKILGLDLGTNSIGWAVVNVDENGKPVSIERMGSRIIPLSSDDTNEFTKGNTITKNQSRTEKRTSRKRYDRYQLRREYLTAALRKLKMLPDESLIKLPILELWELRGKAACKGQQLSLPELGRVLYHINQKRGYKHAKSDESSDTKQKAYVAEVNARYAMIKERNQTIGQYFAEKLKESEIETPKGKFYTYRTKEQVFPRKAYEDEFDQIMACQKVFYPDILTEKEINKLRNEIIFYQRRLKSCKHLVSICDFEKQEYKNKEGKIVFGGPKVAPKSSPLFQICKIWEEVNNLTLKNRKNDELFISLEQRQAMVDFLETHEKLTLSDMYAILGISKKDGWWGGKAIGRGLQGNITKIALKKALGDFENAERLLQFNLYKTDSNLVDDTTGEIIQIIDSKLEKEPLYDLWHTIYSISDKEEFGKALKRKYNITDEDIINRLYSIDFVKPGFGNKSTKAMRRILPYLQEGLKYSDACEYAGFKHSESLTKSENEARPLLDMLPSINKNELRQPIVEKILNQMINVVNALMNEYGKFDSIRVELARELKQSKDERNTTFLQNEAMQRLNESIAKRLESENIKPTKRIIEKYKFIFPTKGCFDKRTGKFITKNFEDLSTINYCIYCGQPFSLSAALNGDGYEVEHILPRDLICDNSQNNKVLSCRRCNSIKSNKTAFDFMRSQEKNAFEAYLERVEIWYQDGIISPGKRERLLLSHEDYLERKKLGKETDEDKKYWEEFVSRQASETQYISRESIRILKQCCRNVNATSGAVTAILRHLWGYDEILHQLNFERYKNAGLTETVIWESNHGKNKHSREQIVDWSKRVDHRHHAIDALIVACTQQGFIQRINTLNADETKYLMRKQIETSCQKYEEKKVLLDKYLTALTPFKTQTVADAANNILVSFKPGKRTATTGKRIEYKKGKRHIVQEGIIIPRGPLHEEGVYGSIKINGEKQIVKKYKLGKGAQGFVFTGKETYEEKVNKKTGEIKIEDKIKNVLDSIVDGNIRTKVQQRLNQGFEKGKDYRNDVKKALDNLNNLDNNPIYADDNKRIPIRTVRCITGLSAIVPIKYNDQGKPIGFVKPGNNHHIAIYQDEEGNLKEHSVTFWHAVERKKYGIPVIVENPTKLWDEIKDKQLPESFLEKLPEINWNFKVSLQQNEMFILGMEDNIYDVAMGNKDFTLISKFLYRVQSISESDYWFRLHIESQNDKTPQAKQAKKFHRIKSLKGFYQLHPHKVHISVIGKIKEL

SEQ ID NO: 23000 - protein, 909 aa, unidentified
  REGION 1..909: note = Cas Enzyme sequence
RYGIYTADNKGADRRLQQYRWRSEALCRELTQEELAYVIADVNGAINNSSGYLGAISDRSKELYFNQQTIGQYILQHIEADSHYSLKNQTFYRQDYLDEFERIWQVQSQYHPELTPELKKNIRDIIIFYQRPLKSKKAMLDICTFENRQVEVTEDGKTRTKTVGLKVCPKSSPLFQEFKVWQVLNNLQVEYEAPGEDLFAETEQRRLLTLEEMERLAHELLYKDKLSKREALTILFGKAAKKYDLNYKEIEGNRTVAALYRAFFNIIALSGHVEYDVNKLSAHEIEEITSNVLSLLGFNEDILHFDASLGGHAFDQQPFYQLWHLLYSYEGDNSKTGNDSLIAKLQSLCQCEREYAQVLAGVTFQEDYGNLSAKAIRKILPHLKEGLTYDKACEAAGYKHSERSRTKEELANRMYLDRLELLPRNALRNPVVEKILNQMINVVNAVCDEYGKPDEIRIELARDLKQNAKEREKATADINAANLLNEKYRKILETEFGIPHVSRNDIIRYKLYMELKDNGFKTLYSDTYLPKDKLFTKDFDIEHIIPQARLFDDSFSNKTLEAREINIEKSNTTAFDYVLGKWGEEGAVAYKAKIDDLYRKGVLSKAKHDKLLMREADIPDGFIDRDLRNSQYIAKKAREILEDLVSTIVPTIGSITDRLREDWQLVDVMQELNWDKYNRLGLTESYQDKDGRVIQRIKDWTKRNDHRHHAMDALTIAFTKPAYIQYLNNLNARSDKAGSIYGIEQRYLYRDGRGKLRFRAPIPLDQFRIEAKQQLEDILVSIKAKNKVMTRNVNKTKSKDGNRRKVQLTPRGQLHNETIYGHTLHRISEEVKVDGKMTLERAQLIAKKVYREAVIARLEQFGNDAKKAFTGKNSPEKNPIWLNAEHAEQVPPRVKLVYYEDYYPIRKPV

SEQ ID NO: 23001 - protein, 987 aa, unidentified
  REGION 1..987: note = Cas Enzyme sequence
MEVAKKLHDEQLTPGQYVYALLQEGKKYIPDFYRSDLQSEFDAIWKYQKVFHSDILTDDFYEQLQNKSKTKTSSIFLGRYGIYTADNKGADRRLQQYRWRSEALCRELTQEELAYVIADVNGAINNSSGYLGAISDRSKELYFNQQTIGQYILQHIEADSHYSLKNQTFYRQDYLDEFERIWQVQSQYHPELTPELKKNIRDIIIFYQRPLKSKKAMLDICTFENRQVEVTEDGKTRTKTVGLKVCPKSSPLFQEFKVWQVLNNLQVEYEAPGEDLFAETEQRRLLTLEEMERLAHELLYKDKLSKREALTILFGKAAKKYDLNYKEIEGNRTVAALYRAFFNIIALSGHVEYDVNKLSAHEIEEITSNVLSLLGFNEDILHFDASLGGHAFDQQPFYQLWHLLYSYEGDNSKTGNDSLIAKLQSLCQCEREYAQVLAGVTFQEDYGNLSAKAIRKILPHLKEGLTYDKACEAAGYKHSERSRTKEELANRMYLDRLELLPRNALRNPVVEKILNQMINVVNAVCDEYGKPDEIRIELARDLKQNAKEREKATADINAANLLNEKYRKILETEFGIPHVSRNDIIRYKLYMELKDNGFKTLYSDTYLPKDKLFTKDFDIEHIIPQARLFDDSFSNKTLEAREINIEKSNTTAFDYVLGKWGEEGAVAYKAKIDDLYRKGVLSKAKHDKLLMREADIPDGFIDRDLRNSQYIAKKAREILEDLVSTIVPTIGSITDRLREDWQLVDVMQELNWDKYNRLGLTESYQDKDGRVIQRIKDWTKRNDHRHHAMDALTIAFTKPAYIQYLNNLNARSDKAGSIYGIEQRYLYRDGRGKLRFRAPIPLDQFRIEAKQQLEDILVSIKAKNKVMTRNVNKTKSKDGNRRKVQLTPRGQLHNETIYGHTLHRISEEVKVDGKMTLERAQLIAKKVYREAVIARLEQFGNDAKKAFTGKNSPEKNPIWLNAEHAEQVPPRVKLVYYEDYYPIRKPV

SEQ ID NO: 23002 - protein, 1388 aa, unidentified
  REGION 1..1388: note = Cas Enzyme sequence
MKKILGLDLGTSSIGWALVNEAENDDESSEIVKLGVRVNPLTVDEKTNFEKGRPLTTNADRTLKRGARRNLQRYKQRRKNLIEILKREGFIDNDSSLTEVGKKTTHETLKLRANAARKKIELEDLAKVLLAINKKRGYKSSRKVNNDGDGQAIDGMAVAKALYDQNLTPGAYALKLLREDRKYLPDFYRSDLKDELKAVWEAQKNFYPEILTDALYVELQEKNKSQTWAICQKPFDIVGIKQKGNAIEKRLERYKWRVDALTNKLDLEHLAIVLQDINNEINKSSGYLGAISDRSKELYFNKETVGENLYRQILKNPHTSLKNQVFYRQDYLDEFEQIWETQSKYYSELTDELKEEVRDVVIFYQRKLKSQKGLISFCQFESWEQIYVEQNTGKQKSRLVGRRVVPKSSPLFQEFKIWQNLNHLEFTNKVKQLNIVFKDLDDEVKQEVFEELNLRGDLKFKDLLKVLSKHLDVGKVSEWQCNFDKIEGNRTNEKLFNIYQVIAENEGYGFDWSKKTAREIVEELHAVFQQLEIDASILNFDTDKHEFDKQASYQLWQLLYSAEEDDKVLEADKLVYGNSSVAIKKRLHLKYGFKPQYAKMLASITLQPDYGNLSSKAIRKVLPYLREGHTFSEACGMAGYNHSNSLTAEELANRELQPKLELLKKNSLRNPVVEKILNQMVNVVNQIIAVYGKPDEVRIELARELKKSAKERADMTKGIADATRLNNDIKKTITKDFGVPNPTRNDVIRYRLWLELESRGYKDLFTDTQIKPQDLFSSKIDIEHIIPKALLFDDSFSNKTLAFKKDNLKKANRTAYDFIYQDYASNIEAFVERVESLYSDGKISRGKRNKLLMPQSKLPDGFIERDLRNSQYIAKKAKQMLFEVFRTVTATSGSITDKLRSDWDLINVMKELSMPKYKALGLTETITRWDSGQEKEKEIEVIEDWSKRNDHRHHAMDALTVAFTTYSHIQYLNHLNARRDESHKKHSNIMAIENTITERNSNGKRKFSPPMPRFRTQAKDHIESILVSFKNKNKVVTNNINKTKRKGNVKFNTKIQLTPRGQLHKETVYGKIKQPQTKPTKLNKRFTIEQAELIIDKSQRDLVLSHLAQFNNNGEQAFDSKVLKKQPLFFNDEPLKDVLCFEEIYTIRKEVSPDLKIDKVIDERIKAVLYERLRAFNNKPKEAFSDLEKNPIWLNKSKGIQIKRVTIKGVSNAEPLHVAKNHLGENILDNKDKVVPVDYVSTGNNHHVAIYEDKQGKLQEHVVSFYEAVARVNEGLTIVDKDFNSELDWTFKFTMKQNEMFVFPDEESGFNPSELDLLDQNNFKTISRNLFRVQKIGNKDYWFRHHLETTVTNDIEFTYKRLRNPNALSNATKVRLNHIGQIVQVGEY

SEQ ID NO: 23003 - protein, 1374 aa, unidentified
  REGION 1..1374: note = Cas Enzyme sequence
MKKIIGLDLGTTSIGWAFVKEGENNDSEIVKIGVRVNPLTTDEQTDFEKSKSVSSNADRTLKRGARRNLDRYKQRRDNLISLLIEKKLLSEKTILAETEKSSTHSTYYIRSKAATEKLSIDEFVRVLLMINKKRGYKSSRKAKNEDEGQVIDGMAVAKILYEENQTPGEYCYQILKSGKKYLPEFYRSDLKREFEKVWKTQNIFYPDILTEEIRKELNEKGQKATIAIFLSKTNIYTAENKTGTRDERKLKLYEWRKKAISDKLKIEEVVSVIAEINNNINNSSGYLGAISDRSKELFFNKVTIGQYLYHQLKNNPHTRTKGQVFYRQDYLDEFETIWETQAKFHKELTPELKIEVRDIIIFYQRRLKSQKGLISFCEFENKQIEVVEDGKKKIKIVGYRVSPKSSPLFQEFKIWQNLNNLEAQNKKTKNIIKFEFEPELKQQLFAELNIKGNLTKEQALTVLGLKTTDWELNFNEVEGNRTNKDLYGIFEKILQFEGNEDIDFVNMPAKEIKCLVTDLFKSLKIDTSILEFDAELAGKLLEKQSSFQLWHLLYSYEGDNSNTGNNKLVEQLQNKYGFKKEYAQLLSNVNFSEDYGNLSAKAMRKIFTYIKENKYNTACGLAGYNHSSSKTKEENESRILKDNLEILPKNSLRNPIVEKILNQMINVVNAIIAEPELGKPDEIRIELARELKKNAKERAEMTSSINQAKLLHENIFKLLQNEFGIKNPTRNDIIRYKLYDELKSNGYKTLYSDTYIPREKLFSKEFDIEHIIPKARLFDDSFSNKTIAPRQENINKKDETAFDFVDNSLGKEALESYVARVEMMFKLKEGGINKAKYKKLLMKGTEIGKGFIERDLRDSQYIAKKAKELLEEICRTVSSTTGSITDRLREDWDLINVMQELNFDKYKNLGLIEIIEKKDGNTKGRIVDWTKRNDHRHHAMDALTVAFTKSSHVQYLNNLNARSDKASSIYGIEQKETFKDPEGKRKFKMPLNNFREEAKKHLENVLVSFKAKNKVVTKNKNKIKTKSGERVKYELTPRGQLHKETVYGKLKQYTTREVKVGANFNEETILKTAKYSEREALLLRLKENDNDPKKAFTGKNSLSKTPVYIDRQKSIPIGEKVKLVEFEDDYTIRKEISPDLKIEKIIDGGIKRILQKRLDEFNGSNKEAFSNLDKNPIWLNEERGIAIKRVTISGVKNVEALHTKKDHFGNDILDENGNKIPVDFVSTGNNHHVAIYQDSNEDFQEKIVSLYEAVERVNQRLPIIDKLFNQHIGWQFLFTMKQNEYFVFPTEEFDPKEIDLLNPENNKLISKYLYRVQKIATKNYFFRHHLETTVEEKKELKNISYKPQLGLNAIKGIVKVRINHIGQIVKIGEY

SEQ ID NO: 23004 - protein, 1154 aa, unidentified
  REGION 1..1154: note = Cas Enzyme sequence
MKKKILGLDLGVGSVGWALIETEDNQPKQILGMGSRIVPISKDDNDQFSKGQAITKNADRTQRRTARKGYNRYQMRRALLTQALRNHNMLPDRLDENVIDLWKMRSDAATEGHQLSLSQIGRVLYHINQKRGYKHSKADDNGDSKLTKYVEEVNQRYKKIQETKQTIGQYFYIELLRSKIERANGPYYTYRIKDKVFPRAAYLAEFDQIMQVQRAYYPEVLTDDFIDILRNRIIFYQRPLKSCKHLVSLCEFEARPYKTKEGKVVYGGPKCAPRTSPLAQLCAMWETTNNITLTNRNNEKYEFTLEQRRQIVDFLCRNKEMKVSHLQKILGIGRNDGWYGGKAIGKGIKGNATLNQLREALQGKYDQWLEMPIKHVDVVDTTTGEVFWAVSPEIEETPLFKLWHAVYSLQNADELAKTLREKFLITDESVIETLCRIDFVKPGYANKSHKFIRRLLPYLMEGMMYSEACERININHSNSMTREERELRPLSARIQLLQKNQLRQPVVEKVLNQMINIVNSLKDQYGEIDEVRVELARELKQSRDERESAYKAMGQNERRNKEIAIKISEFGIRPSRSRIQKYKMWEESLHQCFYCGKTIDLAEFLNGADVEIEHIIPRSILFDDSFSNKVCACRQCNHAKDNQTAMEYMETKTVGELEAYKRRVDEAFTSKRISKTKRDHLLWRKTDIPTDFIERQLRQSQYIAVKAVEVLQEGIRQVWTSGGSVTDFLRHQWGYDEILHTLNLPRYRQVEGLTEFVDYEHAGQKHTEERIKNWTKRIDHRHHAIDALTVALTQQGYIQRLNTLEASHDFMEKQVKEAGTHYNEKKSILEKWINEQPHFSVDDVTKAVDGILVSFRAGKRVTTPARRAIYKGGKRVIVQRGIEVPRGALTEETVYGKLGDKFTVKYPLDHPSMKPENIVDPTIRALVQKRVAERGKDAFKEPLFSAEGMEIRSVRCFTSLSENGVVPVKYNEAGKPIGYAKKGNNHHIAIYKDKEGQYQEMVVSFWDAVERKRYGVPVVITNPHEVWDRLLTKDISQEFLAKLPNDNWQFVLSMQENEMFVLGMEDDEFNDAIERQDYATLNKHLYRVQKLSSHDYTFRYHTETKVDDKYEGAANGRNASMALGALVPIRSFGGLFSQFPHKVKVDLLGHIHKL

SEQ ID NO: 23005 - protein, 1451 aa, unidentified
  REGION 1..1451: note = Cas Enzyme sequence
MSSKILGIDLGTNSIGIAIRDIDRGENLQDQLEYFSSDIFQAGKGGPNQQESYASERTSHRQSRRLKDTHRRKLWATLSLLIEYGMCPMKKESLKKWSTYNKSLGLKREYPVDDKEFNSWIALDFNRDGQPDYSSPFQIRREITKRQLDLDSREDREILGRALYHIAQHRGFRSSKGETLAEAEALTDRNEMEAEPDEKTADVMAGMQESETKKMKDLIAYMEAKGLDTVGQAYASMEDEGKRIRNKEGYQAVRRQFMDEIRYIFEHQPGLHDAKYKDFMTRILSEKKGEGTIFYKNPLRSQKGLVGKCTLEPSKTRCPISHPDFEEFRARQVINNIKYRPSDDAQWLTLPMNLKEEIYSNLFAGKSSRSLFHFKEVREYLEKKLQLRLHNDELGRTINYKDGQTIAGCPVTYRLKMILGNDWQTASIPGTKVRLSNKGKVSHQVCYHAVDIWNVCANSEIAEKGELEAKAKSIFGFTDQQAKQFRLMYADIRQGYAMLSHKAIANINRMLRKGYIYSDAVLMAKVPDLIDMSDAEINELMVLFESIVKPKTEHQKRVRSIANRLIAKYKSYSYTNNGRFADHDYTYLLDESDIRDVEKTTVEQIGIKEWSLMSDDEQGALLKEVQELYQQFFSSRERDYFKVPHLSDGLIDLLSEKYPSLEKKEWKEKLYHPSQIDIYQFARKEQTKDGRSLLGTPNVGSIRNPTVMRTLNILRRKLNYMIEEHIIEPDDTRIVVEMTRINNDTNLRWAINRYNEERRNQNMAISNLLSEFIPQFKHKAPEEADIDKARDYFDQIGCEFYAVSHEELNEKQLTKQHEYYDMIVTKDKVSKYGFQKDVERYKLWKDQGCISIYTGKPIRFSDLFDDNLYQVEHTIPRSKSFDDSDANKTICERHYNAAVKGNKMPTELPNYDKDVIIGGVEYTAIKPRLAYWEKKVKDYEHQVELWRYKAKQSQTKDRKDFCIQRMHLWRMELDYWRNKLDRFNMTEVKPGFRNSQLVDTGIITRYATLYLKSVFRNVDVQKGTATAKYRKILGLQSVEEKKDRSNHCHHAVDAAILTVIPVAAKRERMLQLFYEIEEAESAHHDCSQKKYELSAEVADCEIGSVAGLYNYISDRILVNHITHDRTFSVTRRKEYRNGRPVRKNGKELYSGGDGVRGALSTESFYAANKYGDEIWMVKRQSIDAFKKIEDLDTIVDQHLRDNIKNTIELRMKAGDSFSKAIAQPIWLTDKDGKEIKYDRNGRPLAPIRHIRCRAKAGVGFLSFEKALPLKDFIQHSSKKLVRLQNREHKQHVYTMNDSMYLCLMYEGIKKGKVDRRLRLVSLYDAAQMISIAHSRNVEQVLWNEPYYASLTDKGLTYHLSAIIKVGMRLLFWDKSPEEINQFMPQEELAKRLFVVRKFNAPSTIYVYAKHHADASENKPAHYTANQLNCLIEHRDFEITPLGTVILKEQHD

SEQ ID NO: 23006 - protein, 1413 aa, unidentified
  REGION 1..1413: note = Cas Enzyme sequence
MTKILAFDPGTNSLGMVCRDTMNDNLMEQITSGVDIIRDNTEQDRRGRHSSAASQRRSFRTARTRYRSVKRRKQATLKLLIKHNCCPLDMESLNKWRFDDDEKNYDRTFPVQNVAFMKWINFEFDIDGEVVRSVYRLREILATKSLDYSKPESRMMLGRAIYSIAVRRGFKSSRLAITDNEDDEQPELQKSEEELSAGLTQYMKDHNCPTVGAAFSRMEQVDKIRIRANNDYKPIRNQLKEEIRKIFEVQKLDTDGELYKCLMSEKKHEGTIFYKNPLKSQKGKVEYCTLEPRRKRCAKSHPANEFNVAWQLLNNIKIKRDNGWENISLDLSKTIYNKLFVRNQKHFDFAEIKELLQDELHIQLEYKVSINYSDKKTVPGCPITYYLQKILGPSWETERIYGTKKHLTHAQRRKNLSLETEGHLTEYTAEDIWHICYESDEKQFVKDFAKNVLGLPPAKVISMGALWENIQDGYANLSLCALKKINPFLARGYKYSDAVMLANLPSIMGEDFFQKNEQEIVELIDKERVAVSNENRIYDITNKLISDYKSLKMEDLAFAEHNYDYTLQEDDIADVKKACAENYGKEWAALTGDQQSAVISQVAELYQEFFFSSKRDYYKRVNLTEAIKKVLAEKYPSLTMNKLKKLYHHSDNAYYPTAHENKDGVLQLGSPARGNLKNPTVLKVLYKIKQNVNKLLANGDIDSDTIVVVENAREALNDFNMRWAIEEYNSKRERENKAIEDALTDLAKEYHLALPKDCVAIARLALYQNENFTPYNPNESRRLYDKLYEKYKLWLKQGFFDFYTGRPITVSELFSPNNLVEVDHILPVSKSFDDSIANKVLSSSRYNSTVKGTKLPCELPNYNIDTPEGTAIIHRIHEIEEEVKYLEEKVIYWKGRSSRAADPDSKNRAIKQRHLWQMEYDEWNQRLTNLTVKEITPNFRHNQLNDTRTISKYAYHYLKSVFGRVVVQRGQTTAVFRKIFGFQDAYEKKDRSRHTHHAIDALTLSLIPYGPKREKMMELWYQIQEAHRFKDYDLERQLKDKLEREKTLCGLGRYSPNEVVQYIEDTTLVRNDATNNALTKNIKRYRVRGKVVPLRDDNGNIVYEKTAKGIKRVKAKHVSQGNSIRGTIHDQSFYGKIEKWKDDGSHEKEELFVIRRKIEFKSGNVGSGFKSWDDLEKQMVDKKLFKKFKAQYPEGTPFREACDEGFHTYVVENGVRRKVKVRHVRCIAVTAQPLKKHVFQPQHSDKKQYYYVSPGEAYGIFEYVSKEGERLYESDNLFTLSEKMKNGSLKETPCPKTIKDKKGKKYFHTRTILKDATILIYPSGESAEAQYHLDTATISKRLFRVNTIERDRKRLSLTRHNIVKSYTGKNGIEDSDFKDLPDGMRMPIAKLNFLLLGTDFDIINGRIIPKGDN

SEQ ID NO: 23007 - protein, 1489 aa, unidentified
  REGION 1..1489: note = Cas Enzyme sequence
MAKVLGLDLGSNSIGWAVVDNERHCIESAGSRIIPMDAGRLGDFEKGNSVSFTKERTQYRGARRLRERYLLRRERLLRVLRIMGFLPEHFASQLSRYGKLPEDKEPKLAWREGKDGKPDFIFKSSFEEMVEDFRQAGSDNKIPYDWTIYYLRQKALTHPISKEELAWVLMQFNQKRGYYQLRGKADEGAADAGSKNEIRSYHELTVTSVAKTEEHDKKGLTWYDITLENGWIYRRAFSVKPDWEGKTRGFIATFKLDKDGNPKEDTPRLSSPSDDDWGLRKIKTENDIHESGLTIGAYIYQSLLHHPDRKIIGDFVQTIDRELYKKELRQILETQKQFIPELNDEQLYANCIEELYPSNDAYRTSIAKRDFTYLLVEDILFYQRPLKSKLSLIDDCPFEKRNNKPVKCVAKSHPIYQEYRLWQFLSNLHILLDDADITPNLLPDGDAYADLYDYLSTIKEIDQSAMLRYFKIGKKEMPRYRWKYVPDRKYPAGETRATLLGGLSKAGIDKGFLSPERELQLWHILYSVDDQQQYRKALRTFAHKQGWDDSQTDRFAKAFDRLTVYKEKNYGAYSAKAIGKLLPLMRRGRYWNPQDIDCQTQLRINHIITGEEDDTITSSVREKFEGLESIEQCQGLAPWQACYLVYNRHSEAIDAQRWTKPEDIDNYLGQFRHNSLNNPVVEQVVTESLRVVRDIWKQTGRIDEIHIELGRELKKTQSERQSLSQSILEGETTNQRIRLLLTELMNPEMEVENVRPQSPSQQEILRIYEEGAMQKADEIPDYIKDIQKRFSDAKKQPTPAEVKKYRIWLDQRYISPYTGRPIPLAKLFTPAYEIEHIIPQSRWFDDSMSNKVICEAEVNKLKGRELGHEFIVHHHGESVSLSLGGEVKILEVEAYEKLIKNNITNSKKRQKLMMDDIPDDFTSRQLNDSRYISRLMMHLLSNIVRSSDEDGNLEDTATSKNVIVCNGSITDRLKRDWGIGDVWNRIILPRFERMNQITETTDYTATTDSGHLIPQVPLHMRQSFNKKRIDHRHHAMDAIIIACATRNHVNLLNNENAKSQQRYDLQHTLRSKETYVDGQGNTRTRPGDFIKPWPTFTEDVYHVLESIIVSFKQNQRIINKTSNRYTIIRNGKHTGCSQTKGDSWAIRKPLHEATVYGEVNLQLKKRVKLKEAIDTPNQIVDRELKEKIKHFKSQRHKAKQIVDYFDTHKEIWPEAADGKVEVYYYTKDTKDRYFATRKSLINLFKDTTTHPAATKIIESITDSGIRSILYAHLANEGNNPAEAFSADGLERMNHNIRNLNGGHDHLPIKKVRIYEQANKYSVGTHGQKATKYVEAAKDTNLYFVIFTNAKGLRGYATVPLYISIELQKKYEKHWKDHLAKRLQQNDLALMPSDSTILYILSPGDIVYVPSEEERKNGITSLDLKRVYKCVSATGKDCFFIPYSVASLILTGKEFEAKNKLGRALTKEMIKEVCIPIQIDRLGNIIKIGQ

SEQ ID NO: 23008 - protein, 1364 aa, unidentified
  REGION 1..1364: note = Cas Enzyme sequence
MKKVLGLDLGVASIGWALVNQADNPEEKSSIIRIGVRVNPLSTDEKTAYTQGKSITTNADRRDKRSARRNLQRYQLRRSNLISLLKNQGWINDDTILAENGNKSTFETFRLRAEAVEKEISLCQLSRVLLMINKKRGYKSNRKAKGDESGNFLDGIELSKQLYEENLTPGEYSLRLMKNGIKHLPDFYPSDLKEEFNRIWEKQKNFYPEFLTDDFKKLIEGRGRLEVSKIIFARYEIYTADNKGKLQKLQSLEWRVQALKEKVEKEILAYVLADISGRINSSSGYLGNISDRSKELFMKKLTVGQYLYNNLKVNPHFSTKNLVFYRLDYLDEFEKIWETQSRFHKELTPELKNEIRDIIIFYQRRLKSQKWLINNCEFEKSRKVAPKSSIAFQEFKIWQTINNLLLTNTYTGEIRSLTLAEKQSIAYELKYKRSLSNKEVIEILIQKKQERREYELNFKEIQGNTTLCSIFEKFLEISDILNQTESDIKKLSASKIFEMVETTFKKNNFNTEALVLDTTLEKEASEKQPLFKLWHLLYSYENDSSATGDKSLIEKISSILQMPLDLARIVSTITFKEDYASLSHHAITKILPYLKQGHIYSEACQMAGYKHSEKSLTKEEIENKVLVPRLDNIAKNSLRNPVVEKILNQMINVINCISDFYGKPDEIHLEMARELKQNQKQRQKATERNNEQEKENAAIREILKKAPFNLTYISKTDILRYKLYEELRNNGYHTLYSDKYISKEELFSRNIDIEHIIPQALMFNDSYSNKTLEFRDINQEKDKMTAFDYVEQRFGKEGLSRFEEKVNMLFREKQISKTKRDFLLMKIADIPEDFLNRDLTNSQYIAKQAKEILEKYVRIVMPTTGSITARLREDWQLVDVMKEINLPKYEKAGLAETKIDKDGRQFASIKDWSKRDDHRHHAMDALTIAFTKPSYIQYLNNIKARSEKGSSIYGIMSKETSVIESGTKRKRIFNPPMPLNELRDVFKKELDSVLVSIKAKNKVATKNENKSKKKDGFNSRTQLTPRGQLHAEQVYGLRKRYVTALVPVKKITLDNLDTIASAAERNAIRQRLELCKGDSKKAFSGANSLDKNPIWIDSIHSKKVGDKVKCISFETVYSIRKDINHNLTVSKVLDTKCRQILEDRLKEYGNDPKKAFVNLDQNPIWLNKEKGIQLKRVTIAETFGMVSLHKKKDHKGNLVLDNNGNTIPADYVNLKNNHHIAIYRNAEGELEESVISFYEALQRVIAGKSAVNKDYNKDKGWTFLFSMKINEMFVFPNPETGFDPSKIDLKNSENYKLISPNLFRVQKLSSKYYCFRLHLTTNLDDTKALRDLTWKRLQSLEKLEGAIKVRIDHIGNIVAVGEYD

SEQ ID NO: 23009 - protein, 1814 aa, unidentified
  REGION 1..1814: note = Cas Enzyme sequence
MKKILGLDIGTTSIGWAIVEATDEKKENDVTGKQAETDINNDRIGIHKDAVGVRIISQDTERFNQGLTLNDSKGSTLTPTATRRKYRGVRRMNSRYKLRRDKLLFILDFIGLKPDGSFNLEIYGDNKRKWINTKKNGGFYTKEREYFINEEGQRQRKKRTEGDIGKQLYKLRNKALISPIDLTELGRIFLHLNQLRGYSSDRFLKEEKPKFDYYLTEVLDADFENKLTIAEDNNKEEVKYYKIAVRLRFDEPYNIGDNENKQFITEIEGFLFKKDINFKQGDFVTIKKPEFKQDKKGKKVLSEYYKITLTTPDPTDWNYKYQTLQKSLTEWCGAGGTVGSYFFHNFYEAQNISRIRNNVINRNWYEQEFDKIWETQFQYHKDFFYKLKIEDIVKHAFKDYQPILNEVLKKQGIKDQLSYLIKDKVIFYQRPWQQAKNKGQCLFERIKVKKEVKIKGQDKKEIIEEYIGRTVIPRSHPLFQEFKIWQQINNVRIFLNNADTRIDLFENQSMFKKYLDKEISEVKELLYDALQKNKTLSWRVFVKDTLGIKNVIDEFEENNNKIRKKKGLDIETGEVIDTYFSVNFRKRKKDGTYEDIKLKGNTTKNELQKILTDKEDAWFNEVYKTSTDKHYKINPKKENFNYQTCSYQVSNLQLLWEIIYDITITDKSKLSKTIKNKFSKNAFSTTQLTALTNIKFDDIGMASLSAKAIRQILPLMNNGINISEKVQNKISSLIELNSKERELKSEKLEGLKNFISDKKARIRLSEFNSKENFTYLNYWEAVAIVYGSHSTKNTITQPEINRVKSHSMNNPVVEKIVNETISIVNEIFKKYGFDEVRIELSRELKASMDERQQMWESMNNNAEKNEWAKQMLREAKQALFEDDRNVENLDTDPANKSNIEKMKIIEDVVRFNKSEEYKSKVKEYKLGEPTKAEVKKYLMWLDQNFRCPYTNQPIPLTDVFAKGKVVEIEHILPKERYYLNSYSNKVITWREVNQAKSEHGNRTAYEFIVSKRKQNTISVGGNDFPLVAPDYWEEHVKSMFPKGGKQTNLLRKEIPEDPINRTLKETQYITKKLKEKLAELVGEKKVWVTSGAVTDILRDRWHLNGIMKELMRNRFENFEIPTGKKSLKLKTIEEQEEMLFEIKKVLNSENAFEVFKIPIGKKNIEIKEKDELQNISLGLEAVIYENKNGLVKKIKTYDYSTSEDMFETKNLTHLTQQYNSKTERWEDVEVFEGYSKRLDHRHHALDAIIIACTKQNHIQYINTLNAINTADQEDEENKKSKYSFIKEDVCLANSSKKFKTPWFENKFMFVVKKILSEVIISHKNTRLLISPSKHRINKDISFNKLASIRGELHKETNYAKKNYFEGDKTDIVKLIPFLFRVKKDNQYQTMVHFKSFKEIIKDIVLKEKYQNILIELFDKYDTITLNDKLIKELSKEVLTKIEVDKLLYDLKTNHPLKWLSTYSEKDKSSRPLGLSMDLNKIKEVSSIVDPRIKRLAGYRLTYVNEQKSLIDELAKDTQEKNRLKRDIESLKLFSNAIYEVRIKKSDNMFEWLELKNFHPEYFDRICYSKHSMTKQIKEKLSSVNLNDLKQNYFTNPIFLSSTPIEVKKVRQIAFNNDLYEITKDRYVFSRDVFMTYVFVEKDEKKKDAKRSIEFLKLLDAARIVSLNKPDKIDYKTFKHKVDSKLIFTLAKNDLVYLPTRQLTHEQIEEIKWDEKQSISPYLYIVKDMNPSRNEVVFQQFYKANSIKISELDAKSLFNNPDLKEQIEEIKYGNVPMLQRCIKVFTNKLGNTIIPYWEFPNGCWDNNVAFSKGFI

SEQ ID NO: 23010 - protein, 1511 aa, unidentified
  REGION 1..1511: note = Cas Enzyme sequence
MKKILGLDLGTNSIGWAVVNADAITRNDGSRYLKPNSISAAGSRIIPMSADVLGNFESGITVSQTKDRTDKRMARRLHERALLRRERLLRILSLMDFLPKHFASKINRYGKFTDDSEPKLAWRKNTEGKYEFIFQDAFNEMLAEFKDKQPEIVKEGKKIPYDWTIYYLRKKALEKALSKEELSWLLLQFNQKRGYYQLRGEEEDIPQDKKIEYLAQKVVKVEATDQKKGDDIWYNVYLENGMIYRRTSKAPLDWEGKIKEFIVTTDLEKDGTPKKDKEGNIKRSFRAPQEDDWTLLKKKTEADIEKSTKTVGCYIYDSLLNNPKQKIIGKLVRTVERKFYKEELTQILKKQVELIPELRNDNLYKQCIEELYPINEAHRNTIAKTDFANLFINDILFYQRPLKSKKSQIDNCPYEEHIFIDSKTGEKKKVPVKCITKSNPLFQEFRLWQFIQNLRIYQREKEIDGKLSTDVDITSECLKSEEDYVRLFDWLNDRESIEQEELLKYLFNTKKSKNKENPYRWNYVEDKVYPCNETRATILKGLSKCGINASVLSSEMEMALWHILYSVEDKKEIETALTHFAQKQGWNGEFAIVFSKLKPFKKDYGSYSEKAIKKLLSLMRMGKYWNQDNIDKNTLDRIDKIINGEYDEKISNRVRDNAINLKDISDFRGLPVWLACYIVYDRHSEAKDCTKWNTPEEIDSYLKKFKQHSLRNPIVEQVVTETLRTVRDIWKQEGQIDEIHLELGRDLKNPADKRKKMSENILKNENTNLRIKAMLMEFMNPGMGIENVRPYSPSQQDILRIYEENALENLTKDDEEFDFISKISKQAQPTKSDIVRYKCWLEQKYRSPYTGKTISLSKLFTSAYEIEHIIPQSRYFDDSFSNKVICEAEVNKLKDRQLGHEFIEEHHGEKVQLSQGEVVEILSVDAYEKFVKENYANNRVKMKKLLMENIPDEFIERQLNDSRYISKVVKGLLSNIVREKIDDENYEPEAVSKNLISCNGAVTDRLKKDWGMNDVWNSIILPRFIRMNQITGKDCFTTTNAEGHLIPQMPLELQKGFNKKRIDHRHHAMDAIVIACTTRDHVNLLNNEAAHSKFNATRYQLQRKLRCFEKAMIDGKEREVAKEFLKPWDSFTMDSKNILENIIVSFKQNQRVINKTTNTFQHFDENGKKTFVKQGKGNSWAIRKPMHKDTVFGEINLRKVKSVSLSDAIKVPERILNKRIKEKITELKNNKVDAKNIKKYIEEYHIGGYGIDTSKIDVFYFTKETKERFFATRKSLDSSFNQAKIEDSIADSGIQKILLAHLKSKNGDAEQAFSPDGIDEMNKNIVELNNGKFHQPILKVRVYEKADKFAVGQKGNKKVKFVEAAKGTNLFFAVFEKDGKRSYLTIPLNVMIDCQKKYGNQWKQNIESYLKEKDLVEKDVQLLFILSPNDLVYLPTENELKKGITNPDKDQIYKFVSCTSNEAHFIPSFVANPIVQTTELGSNNKAQRAWNNKMIKEICIPIEVDRLGNIK

SEQ ID NO: 23011 - protein, 1521 aa, unidentified
  REGION 1..1521: note = Cas Enzyme sequence
MKKKILGLDLGTNSIGWAVVNDDKGLKSISHAGSRIIPMDAKLMGDFESGNSISQTATRTAARGARRLYERHALRRERLNRVLTILGFLPNHYTKELNRYGQLNKGAEPKLAWNIVDEKYSFLFKDSFLEMVKDFGNPHPELMVNGRNIAYDWTIYYLRKKALTQPISKQELAWILQQFNQKRGYNQARGEEEEQKENKLQEFITQKVISVRDTGEKSKGKSVYEVCLENGWIFTKESKYPLDWEGKTKNFIVSTTLNSDGTDAIDKDGKIRRTFRAPADDDWGLLKLKTQHDIDASHKTVGEFIYDALLQNPDQKIIGQLVRVVDRKYYKDELKRILDTQKQFIPELQNGDLYDECIHALYPQNEAYRNSIAGKDFTYLLLNDIIFYQRPLKSKKSLINECPYEYHVFKEKDGKWQKQYLKCISKSHPIYEEFRLWQFVENLHIYREAANGIGKEDCTAELIANKADLISWLLTQKEVSEKSLLTQLVGKNKIKGLSWNFVSENDKKYPAAPVSSTIIGTIKEAGGDINTLTDPFEIRKNKHHRKLSGKEQDEKAKKNNRIINNLEQIWHMLYSISDKSQLLAALKHYAETNHLSDVFVEKLGKMKPFSDYGAYSEKATRKLLSLMRCGEYWSEEAIDANTKSRIEHIRTGEVDDAISERVREKLDTMHEVKDFQGLPLWLAEYVVYDVRKNDTKWETPEDIDKYLQSFRLHSLNNPIVEQVVMESLRTVRDIWKQEGQIDEIHIELGRDLKQNAEQRKKTQQRQQENEKANLRAKLLLQEFMNPDMEIEGVHAYSPSQQELFRIYEDGVLSSNKPDDETQRIINDLSSLKQPSAQDIKKYRLWLDQKYISPYTGEIIPLAKLFTPAYQIEHVIPQSRFFDDSMSNKVICEAEVNARKDRMLGHEFIVKCGGEKIKLSAGGKVVTILSPEAYEDTIRKNFAGDPRKQEKLMLDDIPEKFVARQMNDSRYISRLMMQLLSNIVREKISNTEYEPEAVSKNLIVCNGATTTRLKKDWGINDVWNKIILPRFESLNKIQKTTVFTTKTANGHIIPNMPLELRQGFEKKRIDHRHHAMDAIIIAFTTRNHVALLSNESALDKDKNARDDLQTLLRKREVWRSADGTEHYKFTDFIAPYDGFQKDVQDTLENIIVSFKQNLRVINKSSNRSIRFVDGKKQMVPQKKGDNWSIRKSLHKATVFGEVNLRKKKFANLNYALQHVEDIVEKDLRTKLRELLQEGKDEKQIKKYFASEPDVWADVNLKRIEVFYYTKDTNDHYYAVRTALDDSFTEDYIRNKVTSEAIQKILLAHLARCNNDPKLAFSPDGIEQMNADIQALNNGVPHKPIFKVRTYEKAEKFAVGQIGAKSKKFVEADKGTNLFFAVYSTKTEDGSEKRSFVTIPFKAAVDCQKQGKKEWRQWLDKWVHGENLVAEDAKLIFILSPGDLVYVPKADSTSIMDKSRIYKFVSSSDTDAYFIPVAVASPIINKVEYTQLNKISRICAEEPLIKEICIPIKVDRLGNIVAQ

SEQ ID NO: 23012 - protein, 1573 aa, unidentified
  REGION 1..1573: note = Cas Enzyme sequence
MKKILGLDLGTNSIGWAVVNADVSTRKDDTTYLKPNSISCAGSRIIPMSADILGDFDKGNSISQTAERTRLRMMRRLLERNHLRRERLLRVLKVMNFLPEHYDTKVSRYGKFMDDSEPKLPWYMGEKGKMEFLFQDSFHEMLDDFMEHHPQMMADGKKVPYDWTIYYLRKKALTQRITKEELAWILLQFNQKRGYYQLRGEEEEENANESVEIISAKILSVEKKEKDKKYEKYWYEMHLDNDMTYRATFYNDVTSWEGETKDFVLKRTTLKDGSIKNDLSFLPSTEEIDRMDEQRKARMYAKIKLRTEKEIENSHKTVGCYIYDSLLENPDQKIIGKLVRTVERKFYKDELIRILEVQQELIPELKDDALYQRCIEELYPTNEAHRKSLAKPDYVNLFVNDILFYQRPLKSKKSLIDDCPYEFHVSKDGKQYPIKCVAKSNPFFQEFRLWQFVQNLRIYQRERTITDGQLDLFTNATTGKLQTDVDVTSEILQTEDDYVKLFNWLNDRSSIKQDTLLSSYFKVKKEKGKDKYPYRWNYVEDKEYPCNETRAAILSGLAKCNISADFLTHENEMQLWHILYSIEDKSELYKALNKFAQRHQLEESFAEVLSKTKPFKKEYGSYSEKAIKKLLPLMRMGCYWNEEQIDAHTRERIERVINGEYDENIKNRVREKTINLTDIQHFKGLPVWLACYIVYDRHSEAKEIEKWEKPEDIDHYLRNFKQHSLRNPIVEQVITETLRTVRDIWKQEGQINEIHVELGREMKNPADKRRQMTERIQQNENTNLRIKAMLMEFMNPEMGIENVRPHSPSQQDILRIYEENALDNLSKDDKDYDFVSKISKVAQPSKSDIIRYKCWLEQKYQSPYTGKMIPLSKLFTPAYEIEHVIPQSRYFDDSFSNKVICEAEVNKLKDRQLGFEFIKNHAGEIVQLSQGKTVTIMSVEAYEKFVKDYYSSNRTKMKKLLMEDIPDGFIERQMNDSRYISKVVKGLLSNIVREKGENGEYEQEAVSKNVISCTGSITDRLKKDWGMNDVWNHIILPRFKRLNEVTGKNCFTTYNREGHEIPNMPLELQKGFNKKRIDHRHHAMDAIVIACATRDHVNLLNNEAAHSKHNANRYQLQRKLRRFTTITINGKEREIAQEFLKPWETFTTDAWQVLSNIIVSFKQNLRIINKTSNHYQHYVDNGKKGFEKQQKGDSWAVRKPMHKDTVFGEVNLRLKKTVSLNEAIKKPENIVNKEFKRKVIELLSKGRDAKFIKKYIEDNKDIWSDINPAKIEVYYFSKDEKKRNGEPKERYFATRKSLDTSFDEKKIRESVTDTGIQKILLAHLAAKDNNPEQAFSPDGIEEMNRNITTLNNGKFHQPILKVRVYEKADKFSVGQAGNKAKKFVEAAKGTNLFFAFFGTEKENKQNGTKEVVRSYMTIPLNVMIDCQKKYGIQWHSSIEDYLREKDMINADAKLLFILSPNDLVYLPREEDRNGCIMPLDKQRIYKFIDPGMNTGNFIPFTIAKTIFSTKFTDQKKIGVSFPIQDEIGIGSQGSKSPRATTGEMIKDTCIPVEVDRLGNVIEINGKPLQSTSL

SEQ ID NO: 23013 - protein, 1533 aa, unidentified
  REGION 1..1533: note = Cas Enzyme sequence
MKRILGLDLGTNSIGWAVVERDDNKGHIIKSGSRIIPMDAATLGDFASGNTKSQTAERTSKRTARRMRERFLLRRERLHRLLHLLGFLPKHYDDRIGWDLDNDTIHYGTFLDGEEPKIAWRINDDKKYEFIFQSSFKEMLEDMKKYHPGIISDDKKIPYDWTLYYLRQKALSQPISKEELAWIILNFNQKRGYNQQRDEILETSDDKKEEYMCLTVSSITPDEDAKGKDIWYNIRFENSDIIYRRKSKYPLNWVGKKRNIIVSTKLDKEGNPKLKKDGSIDYSVKSPNDDDWALLKIKTEQELTASHHTVGQYIYAALLANPSEKIRGGLVRTIERDFYKDELKKILQKQSEFHAELKNRRLYEQCIKELYRNNETHRNNIAKNDFTYLILEDVLFYQRPLKSKKSLIDDCPYESHQGIDKGTGEICNYSLKCIAKSNPYFQEYRIWKFLSDLHIIANTKDINGHIHTDVDITNELLPDNNSWSHLFAWLNDKSHITQTDLLAYFGIKKKEQSKFRWNYVADKHYPMNATRHAILNRMKEGETLNRELEQAIWHLLYSTTSKAEIDKSLSPSNNSNGIYKKMIEAGISEESIEKIKNIKLPDEGYGAYSEKAIKKLLPLMRCGNFWDESKIHPTTLERINEFLKGNGMEEFSEKVKQLISTMSDIHSYQRLPEWLACYVVYGKHSEANEIVKWKTPEDINIYLNNFKQHSLRNPIVESVILETLRVVRDIWKRYGDIDEIHIEMGRDLKNPSDKRAQMTQRVLQNENTNIRIKTLLAEFMAEEYKIENVRPHSPSQQDLLRIYEEDVLAHNEPDEEIQDIINNLSNPTKQPSRSQVLRYKCWLDQKYCSPYTGQPIPLSRLFSSDYEIEHIIPQSRYFDDSFSNKVICESEVNKLKDNQLGYEFIKRHHGQTVQLTSGRMVRILEVEQYEQLVKDNFAQNKRRKLLMDDIPAEFIQRQLNDSRYISKVVKGLLSNIVRTTDEEGNLEREAISKNVITCNGSVTTRLKRDWGLGEVWNAIVLPRFQRLNEITGRDCFTALNSHGQEIPAMPLELQKGFSIKRIDHRHHALDAIVIACTTRDHVNLLNNESALPENQANKHALSHKLRQCEEIIINGKKRTIYKEFLMPWNAFKSDTFNSLQEIVVSFKQNLRVLTQATNLYTKYKDGEKKQQAQHSSDHFAIRKSLHKDTVFGHVNLQRITTVKLKDALKDINRIVDKRLKKKIKELISKHYNEKQLLAYFKDYAYEWKGYDFNKVKVFYNTDEKEMMVATRFCNDLVSVFSGKTKKQDIEKTIEQITDTGIQCILTNYLNANLEQIEYAFSADGLEKMNENIAAYNNGKRHKPIFKVRLFQPKGNKFQVGQTGNKSKKYVVADAGTNLFFAVYQTTDGTRKYKTIPLEEVVARMKMKLHPVNDTDEDGNKLLFCISPNDMVYLPTPDEVSDGHLNQENIDANRVYRFVDSSGTTANFVPSKIANVIYHLKKDQAELFCNGDTIQDELGKGSPQSKNQKAITGEMVKDLCIPLIVNRIGEIKFK

SEQ ID NO: 23014 - protein, 950 aa, unidentified
  REGION 1..950: note = Cas Enzyme sequence
ARNSLDWEDKATDALCKLWASIEQGYAPLSLKALKNINRMLEYGLKTSDAIFLAKVPDITGIEESSIPQLIELYEKEVKAPSDRNLRIGRIVNTLISKYKSLAPRDRFADHDFGYQLQQDDKDDIVQCIMDNDSLFTLMDATEQQQMINEVTRLYQSFFADIHRDYVKNPKFADTLAEKLKEKFTAVDESKWKLLYHPSMVSDFPRNKEDEGLLGSPRIGAIRNPTVLRALNVLRKTLNTMIVDGLIDPQETRLVVETTRVNNDINKRWAIEKYNNERRDANKAIWNILKEYYPNKDIKDEDVDAARYVLEQSGEDIYTDDKPDDLHYRNQIKKYKLWLEQGCCCLYTGRVISLSNMLSENCCDLEHTIPRSLSFDSSDKNLTICDAYYNRHIKQNRIPTQLPNYEHDVTIDGQVYTAIKPRLKNWEEKVERLSQNVLFWKNRARRARTEDSKNACIRQKLLWQMEFDYWRQKLDRFKMKPENLTDGFRNSQLVDTGIITRYAVLYLKTLFSSVDVQNGQSTSAFRKIFGIPQKDRSSNYHHAVDATILTMIPQSAKRDRMLKLFYQIDELKRDCHDVSGLQFQLNKELEDCDLGRGLAGIDDFIARQVMVDYYKQDRTLQKNVRPVIRKGKPLMNKTATGKLEPVTFCSDSIRGELHKQTFFGAIRRREDQKTLFVVREPLKYKTSNKDSGFKDWKELNDRLVDLNFKDKSSDLKPMVKMMMDQFPKGTSFKDACEQGIYMLDKDGRKVNRIRHIRCYGKNVTNPMRVKRHTYPSDKEYKQYVWAALADGSVYALCEYVNGSSKVYKRYTYMDISRNRKVGLEDIPVCLTDKNGKQFNLRRKICKGDMLLIYRDAPEELLHLDRAELSKRLYKVQSFERKNDIILRHHLLSTAETNSDDGKEKKRDRGESIKDFAKLPNIIRSSITSFKFLQKDVDYMFNKEGLRLMTI

SEQ ID NO: 23015 - protein, 1534 aa, unidentified
  REGION 1..1534: note = Cas Enzyme sequence
MKKILGLDLGTNSIGWALVQRDFKNKIDNTLGTGQILGMGSRIIPMSQDVLDKFGQGQSHSQTSERTDYRGVRRLRQRHLLRRERLHRILNILNALPEHYANKIDFENKKGQFIDNIEVKLNYREVEPKKFEFIFKDSFNEMVKEFKKNGQETKIAYDWTIYYLRKKALTKKISIQELAWILLNFNQKRGYYQLRGEETEEDKTKLIEFHALKVVNVTAEEPNYKNEIWYNVDLENGWIYKRKSKNPINNWVGKIKEFLVTTTLNEDGTVKTDNDGVEKRSFKAVNSEEDWIAIKKSTEEKIEKSKQFVGTYIFDTLLINPSQKINGKLVKTIERHFYKDELIAILEKQKEFHKELNNNTLLEQCANELYSNNYAQQNILKQKDFTHLFVNDIIFYQRPLKSKKSLIDGCKYENRSFKNNEGQIITKAIKVIPKSHPLYQEFRLWQFVENIRIYEKKKLIGNKLYTDYDVTSEYLPTIDAKVKLFEFFNDKAKINQKQFLANYKDKFGKKLTDDKFRWNYVEDKEYPLNETRALFISKFNKHKNFDWKTYLTQENEIKLWHLLYSISDKKEIERALDNENSKLNLSLEIRQEFKKIKPFVNEYGAYSEKAIKKLLPLMRMGKYWSYELIDENTKDRIQKIINGEFDEKIKNRVREKTINLQTENDFGALPLWLTSYIIYDRHSEAGEILQWKTPNQLEEYIKEFKQHSLRNPIVEQVVVETLRVVKDIWQYYGDGKEKFFDEIHVELGRDMKNPKNIREKMTKSITKNQNTNQRIRVLLREFKNQNIEGVIPESPNQQEKLRIFEDDILARFSEKELDKEEQDGIKIAKVVKSLEPTNREIEKYKLWLEQKYRSPYTGQIIPLSKLFTTNYEIEHILPQARYFDNSLGNKIICESEVNRFKDRQTAYEMISKNPGRVIELGQGNKVSLLKLDDYQDFISKNFETGSKKQKILLSEDIPENFISRQLNDTRYISKLVKGLLSNIVRENDEQEATSKNIISVTGSVTTVLKNDWGLNDKWNEIVEPRFKRMNEITNSNDFGYFDKEKGFFRTNVPMELKMNFNKKRIDHRHHAMDALVVALATRNHVGYLSNQHAKSDNKRYDLRNKLRRIEENTYNGKIFKNAKEFLMPWSKFSTEAKKSLENIVVSFKQNLRVINKANNKYQIWKTENGQLKRGFETQKGTNWAIRKPMHKETVYAKVNLRYEKYVAVNVAIDGFINRKFVFVDKLISKKIKELKQNDYDAKMIKKYFKENKFNDNKLKTVNVYYQDNNYSAVRKNVNENFKSKQWIKESVTDTGIQKILINHLEKYNEIDDNEKQKERPDLAFSEEGLAEMNKNILELNGGKKHHPIYKARVYETLGNKFAVGYTGNKKDKYVEAAKGTNLYFAIYKGENKQGKIVRQYDTIPFNIVVERQKQGESPVPEKFFDKNDMEYSLLFYLSPNDLVYIPNEEEQDDIKNIDFNNLSGKQKSRLYKMVSSSGKQCFFVSNNVATTIQNKKEFGPLNKEEKDIYENMIKEKCFKLKIDRLGQIVKVGEY

SEQ ID NO: 23016 - protein, 1534 aa, unidentified
  REGION 1..1534: note = Cas Enzyme sequence
MKKILGLDLGTNSIGWALVQRDFKNKIDNTLGTGQILGMGSRIIPMSQDVLDKFGQGQSHSQTSERTDYRGVRRLRQRHLLRRERLHRILNILNALPEHYANKIDFENKKGQFIDNIEVKLNYREVEPKKFEFIFKDSFNEMVKEFKKNGQETKIAYDWTIYYLRKKALTKKISIQELAWILLNFNQKRGYYQLRGEETEEDKTKLIEFHALKVVNVTAEEPNYKNEIWYNVDLENGWIYKRKSKNPINNWVGKIKEFLVTTTLNEDGTVKTDNDGVEKRSFKAVNSEEDWIAIKKSTEEKIEKSKQFVGTYIFDTLLINPSQKINGKLVRTIERHFYKDELIAILEKQKEFHKELNNSTLLEQCADELYSNNYAQQNILKQKDFTHLFVNDIIFYQRPLKSKKSLIDGCKYENRSFKNNEGQIITKAIKVIPKSHPLYQEFRLWQFVENIRIYEKKKLIGNKLYTDYDVTSEYLPTIDAKVKLFEFFNDKAKINQKQFLANYKDKFGKKLTDDKFRWNYVEDKEYPLNETRALFISKFNKHKNFDWKTYLTQENEIKLWHLLYSISDKKEIERALDNENSKLNLSLEIRQEFKKIKPFVNEYGAYSEKAIKKLLPLMRMGKYWSYELIDENTKDRIQKIINGEFDEKIKNRVREKTINLQTENDFGALPLWLTSYIIYDRHSEAGEILQWKTPNQLEEYIKEFKQHSLRNPIVEQVVVETLRVVKDIWQYYGDGKEKFFDEIHVELGRDMKNPKNIREKMTKSITKNQNTNQRIRVLLREFKNQNIEGVIPESPNQQEKLRIFEDDILARFSEKELDKEEQDGIKIAKVVKSLEPTNREIEKYKLWLEQKYRSPYTGQIIPLSKLFTTNYEIEHILPQARYFDNSLGNKIICESEVNRFKDRQTAYEMISKNPGRVIELGQGNKVSLLKLDDYQDFISKNFETGSKKQKILLSEDIPENFISRQLNDTRYISKLVKGLLSNIVRENDEQEATSKNIISVTGSVTTVLKNDWGLNDKWNEIVEPRFKRMNEITNSNDFGYFDKEKGFFRTNVPMELKMNFNKKRIDHRHHAMDALVVALATRNHVGYLSNQHAKSDNKRYDLRNKLRRIEENTYNGKIFKNAKEFLMPWSKFSTEAKKSLENIVVSFKQNLRVINKANNKYQIWKTENGQLKRGFETQKGTNWAIRKPMHKETVYAKVNLRYEKYVAVNVAIDGFINRKFVFVDKLISKKIKELKQNDYDAKMIKKYFKENKFNDNKLKTVNVYYQDNNYSAVRKNVNENFKSKQWIKESVTDTGIQKILINHLEKYNEIDDNEKQKERPDLAFSEEGLAEMNKNILELNGGKKHHPIYKARVYETLGNKFAVGYTGNKKDKYVEAAKGTNLYFAIYKGENKQGKIVRQYDTIPFNIVVERQKQGESPVPEKFFDKNDMEYSLLFYLSPNDLVYIPNEEEQDDIKNIDFNNLSGKQKSRLYKMVSSSGKQCFFVSNNVATTIQNKKEFGPLNKEEKDIYENMIKEKCFKLKIDRLGQIVKVGEY

SEQ ID NO: 23017 - protein, 1243 aa, unidentified
  REGION 1..1243: note = Cas Enzyme sequence
MKKILGLDLGSASIGWALIGEHDDKTTIIGMGSRIIPYEGTEGKDFAKGTGESRNSLRTKARTARKGYDRYQLRRKYLVDALLKANIFPDETLKNLPKIELWALRDKAVSSQITLNELGRLLLWLNQKRGYKSSRSDANLGKKDTEYVAAVKSRHEKIKELNQTIGQFFYQELSNDPFYRVKENIFPREAYIEEFDAICNTQKQYYPETLTESFISKVRNEIIYYQRPLKSQKGLVSVCEFEGFWRKGKDGKEYFVGPKVAPKSSPIFQLSKMWENINNIKVGSRSGGDIEISLEQKQAIFQHLDNNEKLTVTDLLKILRLDKNNCYINKQIEKGLTGNITKHAIRQCFGNSTQYNRLLKLDFDIVEDDKKDYLVDKKTGEILNEKSIQQVDPKIEFEPLYQLWHTIYSIQDKTECSNALQAKFGIEPEIADKLADIDFSKHAFGNKSAKAIRKILPYLMEGDKYSEAMSYAGYEHSDSLTKDENLKRKLLDKLKPIEKNSLRQPIVEKILNQMVNVVNAIIDKYGKPDEIRVELARELKQSKDERNETDKAMSKRQRENENISKRLAEYGLKATRNNIIKWRLYEEIDNEEKKLNAVCIYCGQPISLTEAIKGNDVDIEHIIPKSKLFDDSQSNKTLAHRHCNKDKNDRTAYDFMKSKPTEVFEAYIERVNTLYANYVINKAKRDKLLMPEDKIPDNFIDRQLRESQYISRKAREILQTICHNVWATSGTVTAELRHLWGWDEITMNLQFDKYKQLGLTEIVEWESDHGRNKHQKEVISGWTKRDDHRHHAIDALTIACTKQGYIQRFNTLSAEKTREDMSAVVEERSVVFNEKRSLLEKYIISERPIPVAEVEKAVANILISFKSGKKVAVVGTRKTGKRGNKKVVQTGIIVPRGQLSEESVYGKIQTIDERKPLKYIFENSQLILKPYIKQLVEERIEVNKGDIKKAIASLKKDPIYLDKEKEILLEYASCYKTEYVIKYTVDINFNKVDKVIDGKIKEILQQRLDKFGGKAKEAFKDVQLDDKSIIKWYEDEGLERPIKSVRCFTGLSAVVPVKKDDAGKDIGFVKPGNNHHIAIYKDKEGKRVEHVCTFWHAVERKKYGIPVIIKDASEVWDKIQMQPDGTYPESFLEKLPDAQLNLELSMQQNEMFVLGMASEDIQMAIETMNYKAISERLYRVQKMSIKPSSGQIDLLFRHHLETQLIDDSNSKISKRFINIQSLGALFSLNPYKLKIDLLGNISL

SEQ ID NO: 23018 - protein, 1118 aa, unidentified
  REGION 1..1118: note = Cas Enzyme sequence
MQQEKLPYTLGLDIGIASVGWCVLGENRIIDLGVRAFDKAETAKEGDPLNLIRRTARLMRRRLRRRAWRLTKLTRLLKRHGLIEDAGFFQPQRPFQGSLWRLRVEGLDRRLDNEEWARVIYHLCKHRGFHWISRAEEKKAEEDKKGEGGKVKQGLAGTAKLMREKGYRSAAEMVLAEFPDAQRNKHGDYGKALSRILLGDELALLFKRQRELGNPHADPALETALLGNGDRKSGLFWAQKPALSGQDLLKMLGKCTFEKGEYRAPKASFTAERHVWLTRLNNLRIVVDGTTRPLNEQERRTVLPLPYKQASDFTYKQLRAALVKAGLLPESFRFAGLSYPTGAQQAEGKAKEPETEKLVKLPAWQELRKTLKDKGLETEWESMAGAAAGGQPELLDEIARVLSVYKDDEEVAAVLRRLTLPGGERMVEALLDIRFDKFHALSLKALRKIVPHMETGLRYDEACEKAGYHHSQLHEAGKGDQQYLPPLYSGRGKDGRLVFREDLDVPRNPVVLRAINQARKVLNAVVRRHGSPAAVHIEMARDLSRPFDERNKIKKDQDEFRARNERDKAEFAAQFGIVGAPRGGDFEKWRLYREQQGKCAYSVEPIDIDRLLEPGYVEVDHALPYSRSFDDSKNNKVLVLAKENRDKGNRTPYEYLDGAGNSPRWQQYVAFVESNKAYRLAKRTRLLRKDFGAKAAEEFRERNLNDTRYVCRFFKNYVERCLKLDADSAAKRCVVASGQLTAFLRARWGLIKIRAANDRHHALDAAVVAACSHGMVKRLADYARRRELEKVREGFVDAETGEIVNPAMFQQLKQHFPEPWPHFREELEARLKIDDPALLRNQMALLGTYPEEVLAALRPLFVSRAPQRRNGGAAHKDTIYGQPDRLKAQGGVTQKVPLTSLTLKDMDKLIDPQRNENLYAAIRARLDAHGGKGEKAFPADNPLRKPDREGNPTGPIVRSVTIVIDKLSGIPVRGGIAKNDSMLRVDVFRHRKDGKYHLVPVYVHHAVAKELPNRAVVAFKDEAEWTLIDGNFDFCFALYPNDLVRVTLKKESHTGYYASCNRSTGAINLWVHDRNQQVGKDGFIEGIGVKTAVAVEKFHVDVLGNIYPAPMETRRGLA

SEQ ID NO: 23019 - protein, 1243 aa, unidentified
  REGION 1..1243: note = Cas Enzyme sequence
MKKILGIDLGVASIGWAMISENKNTKKILGMGCRIIPLSTDDNKEFTRGNKISKNQKRTQKRSQRKCYDRYRLRRQALVNELAKREMLDKNLTNLNQIKLWELRSKAVTEKVSLKELGRILFHLNQKRGYKSNRSDSKLDMEDTEYLAEVKSRYEKLKEEGLTIGQKFYNELKDNHYYRVKQQVFPREAYMEEFDKIMNQQQKHYSDIITDEFKSKLKNEIIYYQRRLKSQKGLVSICEMEKITRQTENGKTFFVGPRVAHKSSPLFQVCKIWETINNITLINKKGEIYAIPIDKKREIFEYLDNNNKLTQTELFKILELKKEDGWLGNKMLTRGIQGNILKSEILKTVSGLEFDHELLKFDLIIEQFPETITFLKDRKTGEVLDEQIKKVISPVIEKQNLHKLWHVIYSIPDYEDCVNTLVNKFNIGKEAASKLAKIDFSRFTFGNKSVKAIRKILPYLMDGYGYSDACEFAGYNPTGSLTIEENAERKLSDKIENLPKNSLRQPVVEKILNQLINLVNAIIDEKNGFVTNEERNNGSFEINIELARELKQNRQERDETLKALIKTENENEKIRKRLEEEYKVRATRNNVIKWKLFHEIVEGTNKVNATCIYCGNFFGLSDALNGNEVDIEHIIPRSLLYDDSQSNKTLTHRNCNSRKGNRTAFDFMQSKGEKALNDYIERIEFLFKNKVIGINKRNKFLMSENKIPQDFIQRQLRETQYITKKSKKLLSEVSKTVTATTGSVTSRLRYLWGWDDVLLNIQLPKFKKNSLTEMIEWEAGDGSKGKVEKIIGWTKRIDYRHHAIDALTIACTKMGYVQRINTLSSKLTRDEMFRALKNNSIITNSKLSLLENYLLSQKPFETKYVQEEASKILVSFKPGKKVATLGVRKIKKDGKKIVVQSNIIVPRGPLSEESVYGKIKVIEKNKDLKFIFAKPHLIFKTYIRKMVEERISKYNGNSKKALASLKKNPIYLNENKNVVLEHATCYKEEYVIKYPLESIMPQDVKYIVDNKVKKIVEDRLSKFKNAKEAFKEPLYFNVEKKIPIKSVRMLTGLSSVEPVKRDDSNREIGFVKPGNNHHVAFYINENEKDKKIEHICTFWHAVERKKFGLPVIIKNPKEVWRKISDTKNEIEYDEKFLAKLPKDGWVFVESMQQNEMFIIGLKDDIIKQAIKDRNKKLLSEYLYRVQKISSFNYVFRNHIESDINDYTESSKLIKRFYSVRSIGAFDKLNPRKVKVNNLGEIEF

SEQ ID NO: 23020 - protein, 1095 aa, unidentified
  REGION 1..1095: note = Cas Enzyme sequence
LRTQKGNVGRCTFESSKLRCPLSHPLYEEYRMLCFINNIRLEFNDNSDNQKLPLNDEQKKTVIEKVFFGKKKNKDDFEFNEIIKVLDKKGDAIKFNYKSYTTVSGCPVTFSIKEIFNCELNEIKIEHKPNDKRKSKKDFYDYNDLWHALFTFDSKEKLETFAKEKLNLDNEKAKAFSNIRIPKGYANLSLNAINKILPYLNKGFIYSESVYLANLSKVFGRQLSDNEIYKISEGIRQQMKLHKKIREDLSITNSLIGDYLNKVPEEQTARYPGYTLLEKDKDTVEKKIIERLGIKSWQELDSQMKSDIKYTVEEKYQEFLQTTKNTDIKLLYYKLPRLDDLIKDYLKKEWKIEEANIKYLYHPSDTDLYPAAKETAGKKYLGDPVPISRGFKNPMALKTLHYLKRLINYLIENDKVDDETRVVVEIARELNDANKRKAIERWQREREKQNQEFAKAINEFAEHERITIETSDEVIDKYRLWIEQNRQCLYTGKIISLTDLFDGTKFDFEHTIPADISFDNELKNLTVADSIYNRQIKQNQIPTDLPNYEKDLEIDGTRYTAIRPRLGFMEEKVEHYKKQVEFWKKETKKASTKDRKDYCIQQKHYNQFELDYWFKKRNTFTIKEYKPQWRNSQLRDTQTITKYALHYLKTVFDKVEVQKGTVTAEFRKIFNLGFEKERSKHTHHAIDAAVLTLIPPATIRDRLLKEHFEAMENNIRFHSRPNDWKNFNPSTIKDIENDTLINYIAQDRTLTPTIKYVRKRGRIQYVREKLESGKWQYKLDDKGKRIPLIAQGDSIRGQLHKETFYGAIKENSDEVITYVVRKAVKDFNSQKDFEDIVDPVVRKVISETIADRIKDGKSFKEAIAEQIWMVDGNGNFKKTDKNGNQLLPIRHVRCKARAGRGYFTKALQLKEHIFKSEHEHKKWYYVQNEINYLFLLYENQNNDKISRAYKIINLLDIVNLDIHDPDELFRIPSYQVLEKGKGKKKTLFQLKHILKAGQRVLLWNEHPEELRDLERKELLKRLYKIYKFNEISVTAYVYLKHHNEARTDTVLPDGEKIFDLNKYQPIITLTPDKLKCLIEGIDFEITFDGEILMKR

SEQ ID NO: 23021 - protein, 1162 aa, unidentified
  REGION 1..1162: note = Cas Enzyme sequence
VNGFVFVPQTYIKMANKKILGLDLGTTSIGWSFVNLENDVPVSVKSGVRIIPLTTEERDAFNSGNAISTNAERRLKRGARKTLDRYQLRRERLKSFFKKWGWISDGTELQLLESWKIWEIRARAAAEKISLEELSLVLLHINTKRGFKSNRKSDGEEESSSEFKQAISDNDRMVLELDFTIGQWYLDELKQAQRLDSPLPQFKGKTFSRRLHKEEFDKIWSVQKQFHQDLSDDKYIILGDRTIFYQRKLKSAKHLVSKCAFYPTVRVIPASHPLFQLFRAWQEVNNLKAYHTKDGSQLDISHDIKLSIIQSLHHTVKLSSAALVKIIAKDFSLNTRQIKVSVDSILGLETPIAILKALQSVNIDRPELIDFDPFKNGNDFDKQPALQLWHQLYSIEETDDLRESLQKTFKISETVADELIKVRLRDGFGSLSARAIKKILPHLMDGLTYDKACSLAGFNHSFYLTKEENEKRVLADKINPIRRGDLRNPVVEKVMNQLVNIINSILDHPDLGRPDAIHIEMGRELTASAKQRKSMQSGLKNNATLNDKARKELEKLGLQKISRKDIIKWKLGEECNWISIYTGNPISPSEVFNSDKYDVEHIIPRSRLFDDSFSNKTLCESELNRRKGNMTGFDFMEFLGEDKLEGYLERVNYLFNNKMISKGKFEKFKMKLNEIPDDFISRQLNESQYIAREALTRLREVCFEVSPTVGMLTAHLRHEWGLDDTIKNLQLKKYKEAGLTEIRIDKGGNQIEDIKNWTKRDDHRHHALDALVVALTTRSMVQRANRLSQLMGEYSDDNQARLSRKDRIFEQPNYDIRAIASQAMGQILVSYKTGKKVATWSKNQIRTANGTLRKKQLVPRGPLHKETTLGLIKTYGQQPVELAKITDPSAIIDETARIQFEEYLNKYGNNPKITFSKKNLSKNHFVLNGQITPALNCWNRTFTKRVPITESIKIEDVVDVGIRRALEMRLQAYDGNPKKAFSNLQDDPIFLDSTKKIPIKKVTVFDKGKDLLPLRSKENGEPKDYVYTRNNHHLALYKTKEGKYHIEMVSLLEAATRKQQGLAVIRLNHPDGHEFINHFELNHYYYFGEEDVEISNLDLDLIFRVQKVSDGPNIEFRNTNETSIQRRDSFALKRIQSVQNLPKWKISYDLLGQINSIKSIEY

SEQ ID NO: 23022 - protein, 1535 aa, unidentified
  REGION 1..1535: note = Cas Enzyme sequence
MAKIFSLDLGTASIGVSVRDTDNGNTIEEQLSNFGSVIFSTTVNKDGKGNYKSLATNRREKRSPRRLYQSRKYRIWETLKILIDPANKNKKDAEIDLDKPGIYCPLTMRELNRWRRYDKANGLKRQYPVDVERFEQWVRLDFDGDGKPDYSSPYQLRAELAISQLDFSMEINRYKLGRALYHIAQRRGFKSSKGETLKDQEDAIKENADTTIDLENISLKKSEEKKSKDLKAYMDENNLPTAGCAFAQLEKEGIRIRANIYQAVRSQYKEEIKHIFDFQNGLNTDSDFFKVIYSDRKDGSIFYKRPLRSQKGLVGKCTLEPAKSRCPISHPEFEKFRAFALINNIQYRKTINDEWQNLTSELKLKLYKEKFLLTKSNFKFEEIRKWIEKEIEKPLSKKQKVADSTINYADKANVSGCPISGRLKNLLGGDWESFVYETSEKRKDRKGKEHNITFNMEDIWHICFSYDDEEAVAEFAKTKLNFDDKQVKSLVNLWIAIPQGYSMLSLKAIRNINQFLVPNIENELYKGFIYTEAALLGKIPEVLGRELWQENEKELLESISSWIDENREEKWILNIANSLIANYKLEYADQQRPTYDSDYGGYKNDYQNTKYLLDEIDLSKVEQYTKEAFGEKTWERVTQENKGKVLKGVTDKYQQFFSTSKRDYFRLPKLGDTLKLYLSNNFLALHCENQLIDPATGLPCQCPACKKLNKLYHPSMVEFYKPAKEQTFEYNGTCLSKKLLESPVIGAFKNPMAMRTLHELRKLVNYFLKEGIVEEDTRVVVETARDLNDANMRWAIDAYQREREKDNKEIAKAIKELRGEERNDDDIDKARLLIEQERDYIFDSARYITEKEQEDNSKKKKKIVGKAKDFQYKKDVTKYRLWLEQGMQCMYTGKIINIKNLFDENATDFEHTIPRSLSFDNSLANLTVCDAYYNRQIKKNRIPTQLENYEKEATINGHLYSAIKPRLEKWEQKVEQLRNNVTFWEQKSKQAQTKDTKDYAIRQGHLWRMELDCWQNKLERFTMTEVTSGFKHSQLNDTRLITKYAYHYLKSVFSKVEVQKGGVTADFRKMLGVQSVDEKKDREKHSHHAIDAVILSLIPVAAKRDKMLELFYKIDEEKKLNNDTTELEQALQKEIRSCQIGNVSNLAQYIEENILINHVSKDRTLTPAKRNVRKRGKIVYDYYIAKESTNLYQKIDKKGNIISEALVPEKNISFAKNFKNVKRYKHLENGSKIYYAISKIIQGDCIRGQLHSDSFYGAITQAKIGENGKILREKSGKIITNDEIFYVIRRELKYKKTQQDKGFKDLEDLQNQIVDKNLGKLIAQQCEGKSFKDACEEGFYMIDKKGNRVNRIRHIRCFTSIKNPLAIKKQTYKSDKEYKQNYYADVGDLYAMCKYINDSQKSVYKIYSLFDISENRKYNLEDIPTTNEKGNKLEFVIKCGDTLLLYENNQQELYDMTSKEQSKRLYTVLGFENPSTIKLKRHLNSMKDSDLGKGESIKDFNNLPEKIRCSVNTLNFLFEGKDFEMNLDGTITFKY

SEQ ID NO: 23023 - protein, 1391 aa, unidentified
  REGION 1..1391: note = Cas Enzyme sequence
MKKILGLDLGTSSIGWALVNEAEDDIQKSSIIKLGVRVNPLTVDELSNFERGKSITTTADRTLKRSMRRNLQRYKLRRTSLIKILKDNNLISEEAILSESGNFSTFETYRLRAKGVEEEITLEQFARVLLMINKKRGYKSSRKARSQEEGQLIDGMSIAKQLYDENLTPGQLCLQILQSGKKYLPDFYRSDLQNEFNRIWDSQKYYYPEILTDELREKLVNRNDKATWAICEKPMKLIGIKRESKGRDIRLENFKWRVEALSSKVDLEHVAIALQKINGQISSSSGYLGSISDRSKELYFRNQTVGQYLMDQLKSNPNISLKNQVFYRQDYLDEFNILWEKQAQFHKELTEGLKSKIRDVVIFYQRRLKSQKGLISFCEFESSRVEIETEGKKRVITIGSRVIPRSSPLFQEFKIWQGLNNLEVFSKGQSSRKSASSRTVSAHREGDVRRSLDQEEKLLLFRELSVRDKLNKATILKMLFDNHNELDLNCSELDGNKTSAAFFRAFNEITEVSGHVKIDFDKLNADEIVSSIDLVLDTLGCNPGILHFDSDVEPDKQMFYRLWHLLYSYEGDDSNTGIDGLIDKISTLSGLKREYARILTGITFTDDYGNLSAKAIRKILPYLKTGNRYDLACEYAGYRHSKSSLTSEEIASKVLKDKLMILPKNSLRNPVVEKILNQMINVINAIIEEYGKPDEIRIELARELKKNASEREKMTKMINETTLAHEKIKKIIQDEFKLSHVSRNDIIRYKLYQELETNGFKTLYSDTYIPREKIFSKEFDIEHIIPQARLFDDSFSNKTLERRDINLEKGDKTASDFIRDKWGESGLQAFQDKIERIQNQNGQGISKAKYSKLKMSEGDIPDGFIERDLRNTQYISRKALGLLGEIVRTVVPTTGSITDQLREDWQLVDVMKELNWEKYKALGLAEYLVDKDGRQIRRIKDWTKRNDHRHHAMDALTIAFTKPVYIQYFNNVNARYDKGSEAYRIEQKYFSERKVIPPIPVDEFRAEAKKHLDEVLVSIKAKNKVVTKNTNVIKIKKRECPQSQLTPRGQLHLETVFGSNRVPVVREIRVGGTLNEEIIRLVTKPKFRDALLRRLAEYNHDPKKAFTGRNSLEKQPLYIDELHTKRVPEKVKIITFEPVYTIRKQIAPDLNIDKVIDSKIRSLLQERVSVYGDAKKAFSNLDEDPIWLNKQKGISIKRVSITGINNAQALHEKKDKEGRLITDSEGRTMPVDFVNTGNNHHVAIYRDANGDLQENVVSFFEAVTRANLGQPVIDREYRSSEGWKFLFTMKQNEYFVFPNFKTGFNPNDIDLLDTRNYSRVSPNLFRVQKLSTKNYVFNHHLETTAVTGDTLKFNKQMSGITYRFIQSLPPLEGVVKVRINHIGQIVTVGEY

SEQ ID NO: 23024 - protein, 1039 aa, unidentified
  REGION 1..1039: note = Cas Enzyme sequence
MVKQESKRKVLGLDLGSNSIGWALLEEENGTPNKIIDLGVRVFPKAVEEKTPTPKNQKRRNKRLARRVIQRRARRKMRLLRYLISLELLPKELLDHDQPEIILNGLGDPYSLRAKALDKPLSKFELGRVLLHLVQRRGFLSNKKITLGDMIDDPDVQEVLEEFEKEEDTSSDRAKEETAFKKDISLLKEKITSNKCRTLGEYLATIDSSHCRRNRFHDGGHLRTDRQMYRDELDLIWEQQTEHHNVLSEKVKGEIESIIFYQRPLKLRADRIGRCSLEPSRKRSKIARLEYQRFRYHQDINNLNYIDPYSDTIKQLTDEDRERLIEFFEVTPSITFPKIKKLLGLDRGIEFNLEEGGNKKLKGNITACTVREVLPDWDALNYDKQIELVEDLTTIQKKSVLKKRLIEHWCFTPTIAVNLCMLEFEPGHGNLSLKAINLLLPYLIKGYLYSDARQAAGYGYDQEEIAIAERLQRPPETTNPIVNKGLHELRRVVNALIAEYGRPDAIRIEMARDLEMNTKRYKARMKQQRENTKANDRAIDTYQGIAQKNSQLGLSRYPSRNDKIRFRLWEDQDHLCAYSCKSINLTTLFSAEIEVDHILPLSESLDDSYMNKVVCFASENRQKEQRTPIDAFGNNTKKWEQISQALSRWNKKLNSKKNRFYMKKADVQKRDFINSQLNDTRYISRVALEYLSSICSDISTSKGVTTSWLRHQWGLNSLIGESDKKERTDHRHHAIDAVVVATVDRRLYKTLVGSAKEIEGSQTGITMNDLYLDPPWSSIRSDLEQQLEGVIVSHCPLTKISGALHKETGVGFIKGKGCVYRIPLNTEFKNTHASKIIDNSVREIVINHMNQYNGDSKAAFADGVSVFHKDEKTPIKRVRILQSATSLSKLKQSKFGVRNQQGEVFKWHAYGNTHHVEIIKNNKNGRVKGQFVTMMEAAQRARGIGTEKQPIIQTKHGDDIEFLMALHINDLVSIEEDDECKYFRVQKLEGDGNQISLRLNTASTISNDTEKRRLTIHKPLITEKKLHKIRLNVIGKIIN

SEQ ID NO: 23025 - protein, 1237 aa, unidentified
  REGION 1..1237: note = Cas Enzyme sequence
MKILGLDLGVTSIGWALIEKNNENGEIDLIKSGVRIIPIETKDANQFISGNTASPNIERRKKRMQRRMYFRKKKRNQSLIKTLIDKGLWDESLINIEKNKLWELRNNAINEQISLSELGRILYHLAQRRGYKQMRIEQDESDANSKSDYKKNIYTRYQIIKNENITVGQYFYRQLKNNEHYRVKEQIFPRKAYEEEFEKIISKQKEYYTDILSEDFVNKIQHIIFYQRPLKSQKHLLGVCTLEGKTIKIKNDGGNIIEKFVGPPVIAKTNPLFQIHRIWQTINNITIKNKKTHKNYELSIDEKNKIFNELQNKDSLSIKQLYKILNLSDDEWYFDKLSKNGIKGNELLALIRKALKNEFFSPDIFKLDIKIINYQKQVIDKNTGEIKETTLEMIDPNVVNEPLYKLWHILYSVVDKEECMKALKKNFNFSTSAADKLSDINMTSLKYGSLSLKAIRKTLPYLMKGMIYSDACQILGYNFSNAISKDENYLRPLKNKIPLLPKNSLRQPIVEKILNQMIHVVNEIIDDNNGLVSREEREKGNFAIHIELARELKTSKDEKQKISSSIRRNKIENEKITSELTNKYGLTPTRKLIEKYKLYNELIPDGSNVVQPQCIYCGEFISITEALTGDAIDVDHIIPQSKLFDDSRNNKVLVHANCNRTKGNMTAYDFMQSKGQEQFKTYLALVEKLKEKKSISYKKYKYLLMSEKDIPQDFIDRDLRLSQYITRKAREICMDISKDVLVTSGTITARLRELWGYKDIISEINTELINNIELSDENKSQLDEIFKNKRSDHRHHAIDAVTIASTTRSIIQRINTLSSVESKEKINEYLKQLNQETLDTVYNPNEKNLRLLHKYLANQPHPSREQVKQSIKDILISFKPGKKVATYSKRIVYIGNKPKILQTRILTPRGALHEESYYGRIALSEFKDLKYAIDNVNLIVNNHIRSQIMDLLEKYNNDTKKLWNDIKKEKVLIYSDINNTNPIKDVKCYKYEYVIKKSVTGEKVEQKAIDKKIKEILSNSKNKKDEIYFNEVKKIPIHSVRVITGLDNNSMRAVRCNHDGEPITFVKLGNNHHIAIYKDKNEKYQEHLCNFWHAVERKKYNIPVIIENPDKIWDEILENPDSYPQDFLNKLPDPSWHLVLSFQANEMFVLGLSNEEFDQYFVDKNYAILSNHLYRVQKLSTNQYFFRKQNDTSSDLSSLYRKIEYLKQLSIQSLLKENPIKVRINYLGEIVDYKKTF

SEQ ID NO: 23026 - protein, 910 aa, unidentified
  REGION 1..910: note = Cas Enzyme sequence
MRKGRYWNEANIDQETKVRLSQISERLESIGHDPGKIQDISDDYLSKNILKSLIDCTEPFQGLNTYQACYAVYGKHSEANEIIKWSNPADIDQYLRDVFKQHSLRNPVVEKVIAETLRVISDIWKKYGESRENFFNEIHIELGREMKNPADVRKRITESVTENENTNLRIKALLAELSYDKEIENVRPYSPGQMEILKIYEEGALNSSQDLPDDIIKISKNAQPTNAELTRYKLWMEQKYRSPYTGEVIPLGKLFTPAYEIEHVIPQARFFDDSFNNKVICESEVNKEKSDWTAYEFIRENSGKIIELSFGKTAKIFTIEEYEDFIKENYARSKGKMKRLLMDEIPDSFIDRQMNDTRYISTIVKTLLSNIVREENEQEATSKNILSTNGAITTRLKQDWGMHDVWNEIITPRFERLNSLSGSNNFGEMTQKDGKQIFQTRVPIELQKGFTKKRIDHRHHAMDALVIACATRNHINYLNNQSAKQSGKDTRYDLRCLLCYKDHRGLNGNSQWSFTQPWDSFTMEAKDKLLSTIVSFKQNTRIINKTVNYYQVLRRDEKDQLKKVLIKQEKGDNWAIRKPLHKDTVAGAVCLRCKKTVSLSSALDEWKMIADKSLRHLVMKLTSENFDKKKILKYFKEQGNELEGKDISRVEISYFDSENVATRVKIDDSFSSKTIESITDTGIRKIMLSHLAKYNELKDGKTIEHPELAFSEDGIDEMNKNIMILNHGKFHKPIYKVRTFELRGNKFQVGTAGNKSSKFVEAAKGTNLFFAIYQDSSGKRSYESIPLNEVIERQKQGLQSVPETNAKGHLLLFFLSPNDLVYIPNTEEIANSHMIKPDKLSKDGCTRIYKMVSSSGAQCFFIGVNISSPIWNKVEYSALNKMEKSIEGIMIKDVCRKLHTDRLGNILNFQ

SEQ ID NO: 23027 - protein, 1397 aa, unidentified
  REGION 1..1397: note = Cas Enzyme sequence
MKKILGVDLGTTSIGWAFVKEAENCNEQSSIEKIGVRVNPLSTDEQTDFEKGKSISINADRTLKRSARRNLQRYKQRRENLIEVLKEIGFIDNTTSLAEEDKNTTHSTFKLRSKAASEKIEKAAFARVLLMINKKRGYKSSRKAKNEDEGQAIDGMAIAKTLYEDNLTPGQYSYQLLQEGKKYLPDYYRSDLQNEFDKIWQLQSKFYPEYLSDEFKKEITGKGQKATVAIFGKHYEFYPAENKGTREEKKIQAYQWRVKAINHQLDIKEVAFVLAEINNNINNSSGYLGAISDRSKELYFNHQTIGQFLYNQLQYNPHTRMKNQVFYRQDYLDEFEKIWETQALFYPELSIKAKADIRDIIIFYQRRLKSQKTLINFCELENEEIKIEIGGNKKTKFRGPRVIPKSCPLFQEFKIWQNLNHLEIKNVKTKEIFSLTIETKEQLFEELNIRGNLSKKEALALITDKPNEFDLNFTTLEGNRTNQALYEAFLKMMLQENEEIESSKFTTTVLKENVLTFFEKENINKNILDFNTEIEGKEFEKQPSYLFWHLLYSYEGDNSNTGNDKLLEKLQTTYGFKRQFAQVLSNIAFPPDYGSLSAKAIRKILPFMKAGHPFSGDFEKNGLASAKVMAGYKDSPSLTKEENDKRDLKENLKILTKGSLRNPVVEKILNQMVNVINTIIADPTLGKPDEIRIELARELKKSNDERKEMTTNINAAKLDHDKFRKILSAEFGIKNPTRNDIIRYKLYEELKNNGYKELYTNTYVPKEKLFSKEYDIEHIIPKARLFDDTFSNKTLAPRQINLNKKDRTAYDFILNDYGEEKLNEFLSRIEMLSKLKDGEKFCVSKAKYKKLLMKVTEIGEGFIDRDLRDSQYIAKKAKQMLEEVCRTVTTTTGSITDRLREDWDLINVMQELNFDKYKKLGLTEMIEKKDGGFKERIKDWTKRNDHRHHAMDALTVAFTKYSHVQYLNNLNARRDENNKKHTSIFGIEQKETYKDADNKRKFKVPLLHFREEAKKHLENTLVSFKAKNKVVTKNKNITKVNGKTIAKIELTPRGQLHKETVYGKLHQYNTKEEKINAKFDESAILRVAKPTFRAALLKRLKEFNQDPKLAFTGKNSLDKNPIYVDVDKTIVVPEKVKVVWLEADYTIRKDVTPDLKLDKVIDIGIRTILQKRLDDYKGNAKEAFSNLDKNPIWQNKEKGICIKRVAISGIKNAEALHNKKDHNGKEILNENGQPILVDFISSGNNHHVAIYRNAEGDLQDNVVSFYETVERINQGLPIIDKTYNSEIGWEFLFTMKQNEYFVFPSAEFDPSEIDLQNQANNKLISQHLFRVQKFSKVTYGNSSVRDYVFRHHLETSVEDRKELKDISYKSIKSLSYFENIIKVRLNHTGQIVKIGEY

SEQ ID NO: 23028 - protein, 1207 aa, unidentified
  REGION 1..1207: note = Cas Enzyme sequence
MNPDIKVIGKLVRTVERKFYRSELKQILKKQIEFHPELLNDELYRMCIENLYENNEAYRHSIESKDFVYLLADDIIFYQRPLKNKKHLIGNCPYETRYYVDGQTGTVKESPVKCIAKSNPLFQEFRLWQFISNLRLYRNDGYNTDVTTQYLETPEDWAGLFQWLDERKEIDQTTLLTKYFGLKKVGDRFPVRWNYVEDKKYPCNKTRSAIASKLEKDELKFLNPENLSIIWHVLYSVNSKEEIEAVFGDDKKGRGGVYDRLLEFLSEGTISKLKSVRFEEDDYGAYSEKAIKKLLPLMRHGRYWSADAITAGIKNRIEKLLSGEYDDNIDDRTRDKVASLRDITDFQGLPLWLACYVVYGRHSEKGDSQKWSSPADIDRYLAEFRQHSLKNPIVEQVVTETLRTVRDIWTRAGRIDEIHVELGRELKSTSEQRARITRRNAENENTNQRIKALLQEFMDPDYKVEGVRPYSPVQQEVLRIYEEGAMLHGAGGNDEINDIVARLSRMESGKRPSKSDVIKYKTWLEQNYLSPYTGQPIPLAKLFTHEYEIEHIIPQSRYFDDSLQNKVICEAEVNRLKNRQLGYEFIKSHHGEVVTLTGGRTVTIQSVEAYETFVKKTYADNRAKLRYLLLEDIPDEFINRQLNDTRYISKYIMSLLSNIVREEIKPGEYEPEAVSRNLMVCNGSITTKLKNDWGLNDVWNSIILSRFVRMNAICNTTLFTASNTEGHLIPSVPDEFSRGFNKKRIDHRHHALDAIVIACATRSHVHLLNNEAARSDNKAIRHQLSRKLRRYEKVVIDGREREVAKEFLKPWPAFTKDVKMVLESMIVSFKQNLRVINKATNVYTSYRDERGELRLDKSGKPMKGQIAQKSDADWWAVRKPLHKDTVFGKVALKKIKEVRLGVALKDPDMIVEKDLRNEIKRLLVLGYDEKRIKRHFSEGENKDIWAELNPGKIRVYYYTDDTYAVRKPLDESFNAKRITTSVTDTGIQKILLEHLRENANDPKIAFSPDGIEKMNANIRRLNGGVYHKPIYKVRVYEHANKFAVGESGNKKDKYVEAAKGTNLYFAVYADADGTRSFDTIALNVVVERLKKGLPPVPETNEKGDNLLFCLSPNDLVYVPTEEEIERGEIVENRERIYKMVSSTGGACFFVSERVASTIVNKVEFSPLNKMEKSITGEMIKSICVPIKVDRLGNITYIGKEFLPKGEE

SEQ ID NO: 23029 - protein, 1521 aa, unidentified
  REGION 1..1521: note = Cas Enzyme sequence
MRKILGLDLGTNSIGWALVKEADSSEDKALLGIESAGSRIIPMSADQMGEFERGNSVSQTRERTSYRGVRRLRERFLLRRERLHRVLNLIGFLPAHYAESIDAYGKFHKGVEPKLEWKKNKDGKYEFVFQESFEMMLELFRAQYPDVLSNKKIPADWTLYYLRKKALTQKIRKEELAWILLNFNQKRGYYQLRGEEDDVDLTKREEYMKLEVIDVEDSGDRKGKSVWYNVKLSNGLVYNRASDQYLDWVGKEREFIVTTQLENDGSVKLDKCGEPKISIRSPKDDDWNLLKKRTENDIEKSGKSVGEFIFDSILMNPDIKVIGKLVRTVERKFYRSELKQILKKQIEFHPELLNDELYRMCIENLYENNEAYRHSIESKDFVYLLADDIIFYQRPLKNKKHLIGNCPYETRYYVDGQTGTVKESPVKCIAKSNPLFQEFRLWQFISNLRLYRNDGYNTDVTTQYLETPEDWAGLFQWLDERKEIDQTTLLTKYFGLKKVGDRFPVRWNYVEDKKYPCNKTRSAIASKLEKDELKFLNPENLSIIWHVLYSVNSKEEIEAVFGDDKKGRGGVYDRLLEFLSEGTISKLKSVRFEEDDYGAYSEKAIKKLLPLMRHGRYWSADAITAGIKNRIEKLLSGEYDDNIDDRTRDKVASLRDITDFQGLPLWLACYVVYGRHSEKGDSQKWSSPADIDRYLAEFRQHSLKNPIVEQVVTETLRTVRDIWTRAGRIDEIHVELGRELKSTSEQRARITRRNAENENTNQRIKALLQEFMDPDYKVEGVRPYSPVQQEVLRIYEEGAMLHGAGGNDEINDIVARLSRMESGKRPSKSDVIKYKTWLEQNYLSPYTGQPIPLAKLFTHEYEIEHIIPQSRYFDDSLQNKVICEAEVNRLKNRQLGYEFIKSHHGEVVTLTGGRTVTIQSVEAYETFVKKTYADNRAKLRYLLLEDIPDEFINRQLNDTRYISKYIMSLLSNIVREEIKPGEYEPEAVSRNLMVCNGSITTKLKNDWGLNDVWNSIILSRFVRMNAICNTTLFTASNTEGHLIPSVPDEFSRGFNKKRIDHRHHALDAIVIACATRSHVHLLNNEAARSDNKAIRHQLSRKLRRYEKVVIDGREREVAKEFLKPWPAFTKDVKMVLESMIVSFKQNLRVINKATNVYTSYRDERGELRLDKSGKPMKGQIAQKSDADWWAVRKPLHKDTVFGKVALKKIKEVRLGVALKDPDMIVEKDLRNEIKRLLVLGYDEKRIKRHFSEGENKDIWAELNPGKIRVYYYTDDTYAVRKPLDESFNAKRITTSVTDTGIQKILLEHLRENANDPKIAFSPDGIEKMNANIRRLNGGVYHKPIYKVRVYEHANKFAVGESGNKKDKYVEAAKGTNLYFAVYADADGTRSFDTIALNVVVERLKKGLPPVPETNEKGDNLLFCLSPNDLVYVPTEEEIERGEIVENRERIYKMVSSTGGACFFVSERVASTIVNKVEFSPLNKMEKSITGEMIKSICVPIKVDRLGNITYIGKEFLPKGEE

SEQ ID NO: 23030 - protein, 1435 aa, unidentified
  REGION 1..1435: note = Cas Enzyme sequence
MKVLGLDIGTHSLATVIRDATLGDKLKDQIVYYSVDSFNSGIGNGKNGEYSYAAERSTSKRKRLLNERRRYRNWETLRLLIQYKMCPLTLMELDQWTTYDKKRGLYRRYPIDAIHFERWIRLDFDNDGIPDYSSPYQLRRELMSRQFDFSQEIERYKLGRALYHISQRRGFKSSKGESLKELEKLVEKNDDFEVTSDSALNELKGAEEKLSSCLKEYMEKYGLDTIGCAFAKLEDEGIRVRNGIYQPVRSQYKDEIIKIFKFQEGLKNEVDLLKRLVSEKKGEGTIFYKCPLKSQKGLVGKCTLERNKSRCPISHPKYEEFRAWCFINNIKYRKNVSDNWSELSIEDKETIYSEIFTSKLRADFSFKEIREWIEKRYQTKLQCRENKRTINYKDQLKVPGCPITARFINLLGSNWEEYQQQGLKERWSHSKNNPTKHITLYDAYDLWHLCYSSDEDTDVISFAADKLKWDEDKSKQLIRIWGDIREGYAMLSLKAIKNINYFLRKGLGYSDAVMLAKLPDIIGLEQWNDQEKEYLPKILDIFNDVKQQTKKQKTICDITNRLIANYKSLGDSMGVFAYKDYNYVLDESDKNDVLNAVVQYIGKYTWCRMNTEEQNAILNQVDTLYQSFFSDNNRDYIHTPKLGDKIRKALSEFLGNSYNFDRLYHHSELSKYSIQYVENTSKCLLGTPNIGAIKNPVALRTLQIIRKKVNALIENNIIDPEDTRVVIETTRNFNDANMRWAIREYQKNRENEHKEIVAALQEFFPNRDWSDKDLDKARFFFEQQDDYDKIYTNYMYGKDIKKYKLWKEQGCVCIYTGRVISLSELFGEDDRIEIEHTIPRSISYDNSLSNLTICDAYYNGKIKGNLFPTQLPNYEKDEVINGRIYTAIRPRLKRWEDLVERIEDNVSAWKARSRKAIDKARKDQCIRQMHLWQMELDYWDTKLQHFKQIEVTDGFRNRQLIDTGLITRHTAIYLKSLFHNVDVQKGEVTALFRKILGIQKVDEKKSRDLLSHHAIDALMLTLIPVPAKRERMLKLFYQKEEAQGCEKEYYTNELDREITDCHIDDIGKMVSLIESQVLVNYHSSDKTLVPAKKIIRKRGKVTLFKHKDGSVHPHISTGDSIRASLHKDHYFGAIKYPVTDENGMPKKENGCFVYDDSDPMIVMRIPIKDIKEGDADKIIIDPNVRMSICRIIERRKAEGKSYKEAITGEFWMLDKDGNEIKSNKHGRKLCPIRHVRCRVKSGGGSYLTFGTSLAIKKQIYESTKKTINLANKAYKKNVYVQNDDNYLLLLYGKTKNGKVLYKSRIVNFLEVAKLRQEKNADGTYRIKNVKDLVNEPYYNKLEYKSDVYNLLAVIQKGTRLLKWEKTPKELYEKTIEELSMCLYVVQRFNDRLHYKSHLTGGDDNKLQTCGFTSMKFLIEGRDFKVDDIGRIHFID

SEQ ID NO: 23031 - protein, 1198 aa, unidentified
  REGION 1..1198: note = Cas Enzyme sequence
EQYVFKRLNENKRHIPEFYKSDLQKEFDRIFFFQQSFYPTILTQELYTAIQGKSDKATYAILSSNNIPVAENKGKDKNRTAYGWRNDAVIKQQPIETVAYALLELNAAISNGSNYLGAIGDRSKELYFNRMTVGQMLMKRLAENPNASLKNIVYYRQDYLDEFECIWETQRKYHNELTQELKKEIRDIIIFYQRELKSKKSSISLCEFEKREVEVSIDGTTRKKITGCRVCPKSSPLFQEFKIWQMLNNIRVCDTETNETWPLDIEEKDVLFKELNIKQKLSKNEILKILYRNSKHLDLNYKEIEGNRTLFALVNACQSIIVATGHDEYTFSKMRASEIYEIIHRIFGAVGFNTNFLHFDSNCKNLEEEPMFKLWHLLYSYTDDKSKTGNESLINKIRELTNMDEECARILANISFMDDYGSLSSKAIRKILPHMQEGNEYSVACMYAGYNHSHSLTKEELLNKVYVDTLELLPRNSLRNPVVEKILNQMINVVNAIVKEYGKPDEIRIELSRELKSNAKERKRATEAISEANKKNETVRKILIEKFGIKNPSRNDIIRYRLYEELEKNGYHTLYSNTYIPQEELFTNRFNVEHIIPQACMFDDSFSNKTLEAMDINIEKGKETAYDYVLAKYGNEGMAQYKARIDYLYNAGAIRKSKRDKLLMQGKNIPNGFIERDLRDTQYIARKAHEILERLVPHVISTTGQITERLREDWHLIDVMQELNWHKYHELGLTETIVNRENKEIRRIKEWSKRNDHRHHAMDALTIAYTKRSIIQYLNNLNARDDKNGEIYGIERKELERDAHGKLRFKLPFKNFREEAKIALEGILISIKSKNKVVTKNTNKTKSKNGGTKKRTQLTPRGQLHLETIHGSIQRYATYEEKVGSSFNAEKIAKVANKREREALLARLNEFYGDAKKAFTGKNSLEKNPVYLDAARTAAVPIKVKLVELETVYTIRKSIDKDLNIEKVIDKRIRKILESRLKEYGNDSKAAFSNLDDNPIWLNKEKGICIKRVTISGIANAVSLREKKNHNGDYILDEHGKRQPVDFVNPGNNHHVAIYIDEDGNYQENIVSFFDATARAINEQPIIDYEYNSEMGWKFCFTLKQNEYFVFPNEKTGFNPEDIDLTNPKNYHLISPNLFRVQKLSSKDYWFRHHLETTVEDNKVLKGITWKRIRTLQELKGAIKVRINHIGQIVQIGE

SEQ ID NO: 23032 - protein, 1231 aa, unidentified
  REGION 1..1231: note = Cas Enzyme sequence
MKKILGLDLGVTSIGWAIIDEEAKSILGLGCRIIPLSTDDKDEFTKGNAISKNQNRTLKRTQRKGYDRYQLRRSNLLHILSKNNMLPGQELISLPKLSLWKLRSESVKTKVSLQELGRILLHLNQKRGYKSSRSEANLDKKDTEYVNCIKSRHNIIKEKGITIGQYFYDNLQLDQYYRLKEQVFPREAYIEEYEKILNYQKTFYPDILTDELIRIIRDEIIYYQRKLKSQKGLVSVCEFEGFYQRINHQGKEKELFVGPKVAHRSSPIFQVCKIWENVNSIALRYKNGEDVQIPLSKKIEIFNHLDNNESLSYAELLKILDIKKDMVYGNKQLTKGLQGNKTKTAIVNCFEDPEKFSHLFQLELNVQQSQDESYLINKDSGEIIGTKFKKTINPDIENQPLYKLWHLIYSVSDKLECKNSLINIFKIPEDIATKLASIDFSKLGYGNKSHRAIRKILPYLMEGDVYSVACSYAGYNHSGSLTKQENYERLLLDKLSPLPKNSLRQPIVEKILNQMINLVNALIDKFGKPDEIRIELARELKQNLEERNETFKNINKREKENIIIEKELSEFGLRATRKNIIKWRLYHEISNEEKKQNAICLYCGQPISFTAAILGEEVEVEHIIPKAKLFDDSQSNKTLTHRKCNANKKDMTAFDFMNSKSEVEFNEYIERVNNLYKIGLLSKTKRDKLLLTEKKISNDFISRQLRETQYISKKTRELLTKLCHNVWVTSGTITAELRHIWGWDDVLENLQISKYKNVGLTEPIEFSNKENSDIREKIIGWTKRDDNRHHAIDALTIACTKQGFIQRFNNLSSNKNRKEMRYEIEYYDDRKSLLENYIYSKKPFSTKQVQDVIQNILISIKPGKKVASYGVRKIKKEGKKIIVQRNILIPRGSLSEESIYGKINSIEKAKPIKYLFENPHLIFKTYIKNLVEERLLLHKGDIKSSLASLKKSPIYLDKENTVELKHATCFKPEFVIKYPIQSIKLKDIESIIDKRVQEIISTRLARFDNNEKEAFKNLENDPIWFNEDKKIPIKTVRCYTGLSAVEPIKTNESGIPIGFVKPGNNHHLAIYLDEQGNSQPSICSFWHAVERKKFGLPIIIKNPAEVIEKILLDEDQYPDSFLEKLPDGKWSFLESFQQNEMFVLGITKDEVQEAITNHSYAYLSDYLYRVQKIFYNGKQLEIFFRHHLETKLVDDNTARASRRFYAIRSLEALEQLNPQKLKINILGEIVD

SEQ ID NO: 23033 - protein, 1247 aa, unidentified
  REGION 1..1247: note = Cas Enzyme sequence
MAKKILGLDLGVSSIGWALIEESENEKKIISMGSRIIPLSTDDKDEFTSGNKISKNQKRTEKRTQRKGYDRYQLRRKALTESLISNNMFDPELFKLKPLELWGLRAKAVSEKITLKELGRILYHLNQKRGYKSARKVENADKKDTDYVQEVKNRYEEIKEKGITIGQKFYEELKNNQYYRIKEQVFPREAYMEEFDKIMNSQRQFYPDVITEEFIDTIRNKIIYYQRPLKSQKGLVSVCDFEGFWVKSENGKEIFVGPKVAPKSSPVFQITKIWETINNIELKNKRGEKLQISIEKKHEIFNYLDNNEKLSQSELFKILGIKKEDGWYGNKMISNGLQGNITKVKILKVLEGKSFDTNILSFNIQVENYNSDTFLIDQKTGEVLETKKKKVVLPTIEQEPLYQLWHIIYSITDEKECTSTLIKKFGFSYEIAEKLAQIDFKTSGFGNKSTKAMRKILPYLMEGYKYSDACSLAGYNHSFSLTKDEVLQKQLKDKIELLPKNSLRQPIVEKILNQLINLVNAIIDENRGWVTRQDRLNNNFEIRIELARELKQSKEERNAAFKNQREREKQNKLIAERLFNEYGLKPTRNNIIKWRLFHEINTENESRVNATCIYCGKQFGLSDALNGNSVDVEHIIPKALLFDDSQNNKTLSHRACNAAKGNRTAYDYMSSLGEEKLNEYIERVKHIYENKLISKAKRDKLLMPQNKIPHDFIERQLRESQYIARKAKEILNRICYNVWTTSGNITEHLRKIWGWEDAFMELQLPKYKKLGLTEWVEWESDGQIHKKEVIKDWSKRDDHRHHAIDALTIACTQQGFIQRINTLSSQHTRDEMFAEIQDLSSEFKEKLNLLDKYLISKRPFTTEQVKQKVAEILVSFKAGKKVATYSSRKIKFNGKKVIAQKDILTPRGALSEESVYGKIKIIEKDKNIKYLFENPDLIVNPKIQHLIKNRLNLFDNDPKKAYNSLKKDPIYLDEEKKIMLEKAHCFKEEYVIKYPLSGIKAKDVDYIIDKKIKELVRQRLEQYNNKEKEAFKDPLYFDEGKKIPIRTVRCFTGLTAVESVKRDSLGNPIGFVKPGNNHHIAIYSDSNGNKIEHVCTFWHAVERKKYGIPVIIKDATEVWDKILKQPEGTYPDNFLEKLPDANLKLELSMQQNEMFLLGMTNEDIKLAIEYKDYKTISEKLYRIQKMSIIPSSGQIYLVFRHHLETQIFDDVSSRTSKRFINVQSLGTLFNLNPYKLKIDLLGNISLK

SEQ ID NO: 23034 - protein, 1098 aa, unidentified
  REGION 1..1098: note = Cas Enzyme sequence
MATSLGLDIGTNSIGWCLMEDKRNILGMGVRIFPVGVNEESYSKSYKEESKNAVRRSARGIRRLNQRYKLRRKALKKILAELNMYSDDFINIPSKELFGLRSKALCAKVSLEELGRIFLHLNQRRGFKSNKKSDAGTSETAKERSDMKLKMNELAQKVTDGGFKTIGEYYYSLFNQPTDWRNPDEPVERIKGRFVWRKLYEEEFDFIWNVQKKFYPDLLNDINYKRIKDDTIYYQRKLKSQKHLVSKCRFEPNKRCAPKSHPLFQEFRMLSVINNLRVTDKERFREELSTEDKKLLASKLTYEDSLSLKKIKDLLGISTRGKFNDLGEKIRGNETYTKLTKALGKDYFDKLNEEKRIVLWNTLFFADDEEWLYNYAKDKLMFSEKQSKDFSELNVHETSANSSDYSNISVKAMRNLLPIMRGGVSYDNACMVYAKQTGNKRYLHYLENPDKEEVEVGDKVLRTKNDDLRNPLVQMAVSETIRLVNAVICEYGKPDRIKVEFAREMKKPRDVREKIHRKNRDKELLRESYRTFLKNRFNKEPYKNDILKFELWLEMEFSEKDLTKINHEIDVEEFRKFSKNIKAEDTKKYSLWLECGRISPYTGKVINLSNLFSPDIEIEHIIPYSLSMDDSFLNKTLCERDFNQEKGNRTAYQYFKDKPELLHDFKQRIMHFSDEKQERFMRESFEEGFLNSQLSNTAYIARQTKKKLKMVCKDVRITNGQATSILRRFWGLNRILNTEDENLKTRDDHRHHAIDAFVIANTEQSNIQQLSTESKFRYDGRFELKEHNSIKTPYDGFLDEVKDNVERIFISYRNKKRLISRKKNRIKTKTGEKVQMTYSLRGGLHEESLFGRVFSNEFKESYFVIKKPLKDFTSLKQIYEINKKGELKSGIVDKGVREIILKHIESNGGEKKIKEALLMPIYITSRDGSKKIPIKTVRVFDNAKAMIPIRTYENGRNVFVNSGNNYLIAIYENPENRKRKFETITFFDAVQKAIAKEPIVKKNIDDYNLFLELKQKDLVVFYKEHRDEIDWNDEYKLFVNLYRVLQIDINGKLTLGKHNLSKIDARKDTFPIVIRNNHNTIKAIKVEIDILGKIKKIV

SEQ ID NO: 23035 - protein, 1531 aa, unidentified
  REGION 1..1531: note = Cas Enzyme sequence
MKKILGLDLGTNSIGWAVISTDDNDKPAKIQELGSRIIPMDAAALSDFAKGNSKSQTAERTRLRGVRRLRGRHLLRRERLHRVLNMMGFLPEHYAKCIGWDKSEPKWYGKFINYSEPKIEWEKTENKYEFIFMNSFNEMLADFERKQPELLSGGKKIPYDWTIYFLRKKALTEKISKEELAWIILNFNQKRGYYQLRGEDEGKTDHKEYVERLKIVKIEKEESDKRNSSRYWYKLTLENGWVYKAPFNIEPKWQDVVKEFLVTEELNEKGLVKIDKEGIERRKVTILPSFEEIDLMSQAEKDKYYSKIKAKTELSINESGDTVGTYIYDTLLQKPYQKIRGKLVRTIERRFYKDELRKILLKQTEFHKELQDRQLYNECIYNLYENNEAYRKSIENHDFTYLFLDDIIFYQRPLKSKKFLISDCPFESAYSTDGKRYGIKCIAKSHPLFQEFRLWKFISNLKIFQREKEIDGRIYRDIDVSSEFFKSEEDYVSLFEWLNGRKEVDQNTLFGAYFKIKRAKGKDMEYPYRWKYVEDKSYPCNETRSMILTRLESSGIDPMVLTRSLEESLWHILYSVEDKCELKKALKTFADKNHLNDEFVENFEKFPPFKKEYGAFSSKAIKKLLPLMRMGKFWNADAIDENTRQRIDKLITGEFDEKIKTRVREKSINLSELNDFKGIPEWLTSYIVYGRFSEAKEVTKWENPEQMDNFIKKFRQHSLRNPIVEQVILETLRMVHDIWVKEEKIDEIHIELGRDMKNTSEKRRKIHEKITENENTNQRIRAMLIEFKDMNDIESVRPYSPTQQEILKIYEEYALGTLEKDDPEFQFIDKIAKSSKPSRNEIIRYKCWLEQKYRSPYTGEIIPLGKLFTSAYEIEHIIPQSLFFDDSFNNKVICESEVNKLKDNQLGFEFIKNHHGEKVEVCNGKIVEIYTVSQYESFVKENYKSSKDKLNRLLMDEVPEKFIERQINDTRYITREVMRLLSNVVREKLDSGAFEEESTSKHVIPCSGKITGMLKQDWGLNNVWNSIILPRFERLNELENTNRFTETNEQGHLIPSIPFELKANVTKKRIDHRHHALDALVIACATREHIQYLNGENSKSKNYSVQRGLARKLRRFEEVEIVKSVKNDKDIWIQGNEKIKKEVPREFFKPWDSFTEDARVALNNIIVSFKQNQRIINKTVNHYQKFDESGKKVITKQIKGDSWSIRKPLHKDTTFGVVNLRKARTVSLNEAIKNPLLIVEKDLKKKIMELLRQDYDIIKIKKYFSDNADVWSDINFSKIPVYYFSNDSKEKYFAVRKSLDTSFDKHKIENSVTDTAIQQILLRHLESNRNDPEVAFSPEGIEEMNHNIKILNNGKDHKPILKVRVYEKADKFAVGSTGNKTAKYVEAEKGTNLFFAVYKTDKGGRAYETVPLRVAIERQKQCLSVAPEVNENGDKLLFILSPNDLVYVPTKEDLDKGYFSGALEADRIYRMISSSGSQCFFILQNVANTIVDKKEFSALNKMERSIAGEMIKEICIPLKIDRLGKIGLKRF

SEQ ID NO: 23036 - protein, 1510 aa, unidentified
  REGION 1..1510: note = Cas Enzyme sequence
MKTVLGLDLGTNSIGWALVDLENNKIEGMGSRIIPTDTEMLSRFNSGLALSKANAGQSFTATGKRTDYRGIRRIRERHLLRRERLHRVLNVLGFLPEHYAKEIDFEKHFGQFVDESEPKLTYNNRDFIFISSFEEMLSDFKQSQPQLFYTKPNGKETKIPYDWTIYYLRKKALSQEITKEELAWIILNFNQKRGYYQLRGEDDADATRTAQTRIYFDTQIINSIVDTGSVYKGLKVIQITLSNGDSGKYFSKEVPNWLGLQKNIIATVDLDKDGNDRFEDDGSLKRRFSIPTEEDWEKKWKLIKIKTEKEIKDADTTVGAYIYENLLQNPSQKIRGKLVRTIERKFYKEELIAILKKQIELQPELFTDDLYNDCVRELYRNNEAQQLVLSKRDFVHLFVEDIIFYQRPLRSQKSSIGNCSLEYRIHKDKDGIRVKEYLKAIPKSHPLYQEFRVWQWLSNLRIYRKEDDVDVTTEFLKKTEDVVNLFEFLMEQKEVGHKDILKHMVNPILKEKFPNAKPAAFNKEVDKEIAKYRWNYVFDDSKEKEDDKSKKYPCNTTGNEIRRKLDKVTNTPANFLTSEIEQHLWHIIYSVTDKKEYEAALKSFANKYKLDENSFVEEFKKFPPFPSEYGAYSEKAIKKLLPLMRLGKYWNETDITDKINLKVKSIKERLQAIDYNEKDIDKVADDDIKKEVLKSFINVTDFTQGLKLYQALYLVYGETSIPNKWQSIADLEQYLEDFKQHSLRNPIVEQVITETLRVVRDIWKQYGQGAKDFFSEIHVELGREMKNTAEDRKRLTEQVTNNEATNLRIKALLAELKENSDGKLPVENVRPFSPIQQDALRIYEDGVLNSTIELPEDIVKISKSSQLSKSELQRYKLWLEQKYRSPYTGRVIPLGRLFTADYQIEHIIPKSRYFDDSFNNKVICESAVNQLKDKLLGLEFIKKYPGQTVECGMGKPVEIFTESAYQDFVKEHYAKNKTKRQNLLLEEIPDKMIARQMNDTRYISKFISSLLSNIVRADKEDNGINSKNLIPGNGKITTILKKDWGMDAVWNDLILPRFERMNQLTNTDAFTYWNEQYQKFLPIDSVNIDSKEVKIEKKRIDHRHHAMDALVIACMTRDHVNYLNNKNAHEKGTNDEKGFRYDLKNKLCFKTKPDDNGNYKWQFKKPWSTTEKEALIKADNDFTIDAKNKLETVVVSFKQNIRVINKATNNYEKWIKKEGHKVKAKVKQEGTNWAIRKSLHEETISGKVDLPWVNVSKGNFLTATRKNLDTSFTLEKIRKITDTGIQKILAKYLNRKDNNPEIAFSPEGIEEMNGNLLELNDGKKHKPIYKVRLYEMGSSRCALGTDNNNPSKYVQGSPNLCFGIYFDNNKKSFETIPLNIVIERLKQGLNPVPEINKDGFSLHEFLSPLDLIYIPTEEEFDMPHLIDLNKLDKHQRERLYNVNDFSGVTAYFSQNSFAKNIYPKEMDLSWNEKKQKLSGSFDTKTASFNKKPIKESCIKLKVDRLGNISI

SEQ ID NO: 23037 - protein, 1466 aa, unidentified
  REGION 1..1466: note = Cas Enzyme sequence
MKNILGLDLGTNSIGWALIDKENNKIIDMGSRIIPMSQDILGEFGKGNSISQTAERTNYRSIRRLRERYLLRRERLHRVLNILEFLPKHYSDQIDFETRLGKFKEDTEPKIAYKSTIDETNSKSRFDFIFKKSFAEMLEDFHQYQPELFANDNKIPYDWTIYFLRKKALTKKIEKEELAWILLNFNQKRGYYQLREELEEDTNKKEYVVSLKVIKIVKGEEDKKNKNRNWYSISLENGWVYNATFSTEPQWLMTEKEFLVTEELDENGQVKIVKDKKSDKEGKEKRRIIPLPSFDEINLMSKSEPDRIYKKIKAKTETAISNSGKTVGEYIYENLLQNPSQKIRGKLIRTIERKFYKEELKQILQKQKEFHPELQNDDLYNDCVRELYKNNEGHQFLLSKRDFIHLLLDDIIFYQRPLKSQKSLISNCTFEFKKYNVGNEEKIKYLKAIPKSHPLYQEFRFWQWIYNLRVYRKDDDQDVTNDYLNDPEKYADLFEFLSNRKEIDQKALLKYFKLKESTHRWNFVEDKKYPCFETRTLISTRLEKVKDLPPNFLTDQTELQLWHIIYSVTDKIEFEKALSTFAKRNKLDVTTFVENFKKFPPFKSEYGSYSGKALKKLLPLMRSGRYWKWDDIDEKTKTRIDKIITGEFDEDIKNKVREKSINLTTENHFQGLQVWLASYIVYDRHAEAATINKWDTIEHLENYIKEFKQHSLRNPIVEQVTLEALRVIKDIWKQFGNSAENFFDEIHIELGREMKNTADERKRLTSQINDNENTNVRIKALLAELKNDSNIENVRPFSPIQQELLKIYEDGVLNSEIEIPDDISKISKTAQPSSSELQRYKLWLEQKYRSPYTGQVIPLAKLFTTDYEIEHIIPQSRYFDDSFNNKVICEAAVNKLKDNQTGLEFIKNHHGEIVQTVFDNKVKIFEENDYRDFVKTHYIKNRSKRNKLLMEEIPDKMIERQINDTRYITKFISALLSNIVRAENNDEGLNSKNLIQVNGKITSLLRQDWGINDIWNDLILPRFLRMNQITNSDAFTRYNDKYQKYLPTVPLELSKNYQSKRIDHRHHALDALIIACATRDHVNLLNNKYAKSKERYDLNRKLRLFEKVVYTHPKTGEKIEREIPKNFIKPWDTFTVDTKNFLDTIVVSFKQNLRIINKATNQYQKWVKLNGRNVKKEVKQSGINWAIRKPLHKETVAGKVELKRIKVPKGKILTATRKNLDTSFDIKTIESITDTGIQKILKNYLSAKGNDPTIAFSPEGIEEMNKNITRYNNGKPHRPIYKARIFELGSKFILGLTGNKKAKYVEAAKGTNLFYAIYVDENNKRSFETIPLNIVIERQKQGLSSVPENDDKGNKLLFYLSPNDLVYVPDEDEIINESYLDVSNLSNEQKKRLYNVNDFSSTCYFTPNRIAKAIAPKEVDLNYDNNKKKLFGSYDTKTASVNGIQIKDICIKLKADRLGNISKANR

SEQ ID NO: 23038 - protein, 1434 aa, unidentified
  REGION 1..1434: note = Cas Enzyme sequence
MKKTKMVVGLDVGANSIGWAVVEKNKETESGSIIGIGSRIIPMDQAEISDFNQGNLQSAAENRTHHRGVRRLRSRQLQRRERLVTVLKTIGFIDEAWEPNFKYSLAFDEDENTGKSKFKFQQSYQEMVDLFKEKHPDIKTVSHDWCIYYLRQKALQEKIAKEELAWIILQFNVKRGYYQLRNDDTLTTESSKFFVNSIVDEIIDLEDDVRGKKNLIIKLRNGISGQYTAVEIPNWIGKSIEFIVTEKKVKDGIKVSLSNPDGEDWTLRKKKTEQHIEDSGKTVGQYMFELLLNNPDVKIRGKEVHTIDRKFYKNELTRILDKQAEYHTELNDSELLKQSVNQLYKRNEAHKKNLNSLGMRHLIINDIIYYQRPLKSKKHLISNCKYESYCFNNKDGSLTKKPIKCIPKSHPLYQEFRIWQYIHNIKIFKKEEINDQGIILKDVEQTDDILNYTTKTALFDEFNIKKELSHSQILKAVNCNNKDYRINYEEGTKLKGNTFNYHVHKCLSPVMDKQDLAEFMTDQHKMDKLWHVVYSLGDREETLKSGLSQDSLSLNEEQVTALLQMPTLKKEYGAVSKKATKKLLPLMRCGEYWSPADIHSTTQKRIEHLIHAEESIEINDRTRDNLEDLHDISDFQGLNLAQASYVVYGFHSEGKDKKIYTTYHDVKIDELVPNHSLRNPTAEKIIRETLLVVRDIWKKYGKMDAIHVEMARELKLPNDKRRDYTNRRNENHLKNLRAKAMLLELSQDNADINPYSKGHQETFKIFEEGAVRNEKNIDKQIQAIRRKEDPSKSELNRYKLWLEQKYVSPYTGKTIQLSKLFTSDYEIEHIIPKALFYDDSFNNKIICETKANRFKDNRTAYQMICEDGGKDVGDCIKLLTKEEYEDRVKQMFASINYKKYKKLLSYDPPKSFASRQLNTTRYINRKLIELLDPFVRDEKDQDAKSRHILSIQGGVTSDLRGDWGLHHVWKKLLAPRFQRMNDKTESQEFYNFTNNRIDLSGYENELKRLDHRHHAVDALVIATLNSNHINYKNALHSGKKNKALENKLLQKDSLGNLSFKHPWPGFVREAEEKLKHIVISFKNKHKIVSKTNNFYQKYVEQADGTWKKVYVRQDAHPDHIAIRKPLHQETIYGKVTLKEYSKLSFNKALEIPDRIANRQIRKKVLKAYEAVNRDTTALKKHFKKFPLTHEAKSIDKVDVIKYADFATSQVELSDKIKESQISKIVDPQLKSDILAHLDQYDNNIAEAFGVNGLLEFNAKRAQPVKKVTVKQDLGIAFPLGEDYPKNTKYAKGAKGTNLFFIIYRNLKTVEHLINSDSTISFNDAIQIKKNNLEFGEHKEGYDYFILSPGDLVYVFHEDEEKVLPNELDYARIYKCVSFSKQQCFFIPHYVSAPIVNKLEYTALNKMERSIEGVMIKNNCLKLKVNRLGEIIGSE

SEQ ID NO: 23039 - protein, 1054 aa, unidentified
  REGION 1..1054: note = Cas Enzyme sequence
MRLGLDIGSNSIGWWLYQTNQKDELIGHVAGGSRIFSDGRDPKSKASLAVARREARSARRRRDRYLRRRAVLMKKLAASGLMPNSPDERKALEGLDPFALRARGLTERLELTELGRALFHINQRRGFKSNRKTDGKDNEGGKIKDGAARLDQAILAAGAKTYGEFLHKRRATAQDERAIPPVRTRLGMVQSGDKQVSGYDFYPTRALFEEEFTKLWHAQAAYSPDVLTDDLRDEIWQIIFYQRPLKEPKIGLCFFEDEPRMAKAHPLFQERRLYETVNALRVIEDGLEARPLTLEQRNILILAARDKKKVTFATLRKALKLRSGQRFSLERGNRKDIEGDEVRASMKKAYGANWTALSVDDQWAIIQAVRKAEDTDKLLDKLQDEFGLTEDQARAVAKVNLPDGYGRLSKTATRKILEKLKADVVLYSEAASEIYRNHSDDRTGEVLDALPYYGKILQRHVIPGSHDEKQHDPVKDAAEYWGRITNPTVHIGLNQLRRLVNDIIRIHGMPGQIVVELARDLKNSEKEKKKINAEIRKLTDAAIMRGGKIEELGHKNTGEARVRMRLWEESHVDATKRCCPYCTKPIGVASLFDGSTDIDHILPYSRTLDDSISNKVLCHQSCNRDKRNRSPYEAWGHIPDKWDAISINLKNLPHNKAWRFAPDAMERFEGERGFLDRQLTDTQYLSRIAREYLSRLYPDPKTAPVWVVPGRLTEMLRRNWALNELLADSEHHHTAKKKNRQDHRHHAIDAAVIAATDRGLLQRMARASARDAETGRKEKPNVELPWEGFRAELKTVLDAITASHKPDHGTVGKGSIGASSGQLHNDTAYGLTGGKSDSGADIVVSRKPLDSLGPKDIAKIRDQDLRDKLWDATRDLSGKEFTAALLAFSQNDVTYRGIRRVRLIDAVKVIPIKDKTGKTYKGYKGDSNHCVEVWRMPDGKWKAEVLSTFDANQQGLGASRPHPAAKLVMRLYKKDAVALDHPKHGYVNAIIAKFRASDMNLFAMNEANVDARNRDKLDPFKYLQIGMGSLQKYQFRKIGIDTLGRITDPGPHKT

SEQ ID NO: 23040 - protein, 1487 aa, unidentified
  REGION 1..1487: note = Cas Enzyme sequence
LTHLVKGRVILKLKTELIRGTRRLYQRNVLRRERLNRVLNVLGFLPEHYAAAIDFENRLGQFKNGIECKINYRKNDKGKYEFLFKNSFEEMVKEFAGRDKQLKIPYDWTIYYLRKKALAEKISKEELAWVILNFNQKRGYYQLRGEEENEDDFKIKEYCVLTVDELIDSGEEVKGNKLYDVIFTNGWKYDRQIIKTEDWLNKTKEFIVTTTLEKDGISIKKDKDGNDKRSFKAVDSEKDWIAIKKKTEQDIEKSEKTVGQFIYETILNIPSQKVRGKLVRTVERKFYKEELEKILKTQIKFHPELSDKEFLALCVEELYPRNEAHQNFLKEKDFVHLFVEDIIFYQRPLKSKKSGISNCQYEYRVFKNEKGERQKEYLKAIPKSHPLFQEFRLWQFLKNLKIYQKSCEIDGKTVIDVDVTIRFLPDEEAWVELFDFLSSRKEVEQKQLLDYFVKSKLISKGEKENFRWNYVEDKKYPCSDTKAQFISRFKKVDGVELEHFLTKEIEKGLWHIIYSISDKKEYEKALGTFARKHEIDEESFVESFKKFPPFKSEYGAYSEKAIKKLLPLMRRGIYWNKADVPEEVRLRIDDIIKRLKAINFDKKRIDDYVADDDIPKQLLKSFTAFQHKNPYQGLNTYQACYAVYNRHSEVSSIAKWKSPEDIENFLQAFKQHSLRNPIVEQVVTETLRVVHGIWKYYGKGAEDFFNEIHVELGRELKNPANKREEMSRRNIENENTNQRIRQLLVELKNDGQVEGDIRPYSPSHQEILKIYEEGIYQNPDAEFSNLSPEDVDKIRRNANPTKSEIIKYKLWLEQGYVSPYTGQPIQLSRLFTTDYQIEHIIPQSRYFDDSLSNKVICESAINPGPYKDNQTGYEFIKNNSGRIIPELSTGNKTVRLFTLEEYENHCNKYFSKNRTKLKKLLSEDIPEGFIQRQMNDSRYISKLVKGLLSNIVRQENEVEATSKFMLPVSGSITSKLKEDWGLNDRWNEIIAQRFMRLNELTTSSNFGYWDNRINAFRSTVPDEISRGFSKKRIDHRHHALDALVIACVSRKHTHYLNALNAENKNYALRDTLLVRNKHGDFTRHFKLPWDGFPLQAQRALETTVVSFKQNQRIINKANNKTWQWVEKHGSRKKELVKQTKGDNWAIRKPMHKDTVSGAVNVRLKKRVSFANGLKDWKNLVDKDLKNKIRQLLNEGKNTKAIARYFKENPYPSKDEKVTKVEVYCFTIGATAARTSFSEKFTRKQLKSVTDSGIRKILENHLRSFIDEKGKERFDLAFNPDGLDELNKNIVALNGGKFHHPIYKVMVYEEGKKFNVGDTGSKNRKFVEAAKGTNLFFAIYWNEDNQKREYETIPLNRVILHQKWRATLLKDEQKSTPMIPVNQEKGKFLFSLSPNDLVYVPTEDEMENPKAVDFDNVSKNQTSRIYKMVSSTGNQCFFVQCHVAQSIYNKVEFSTLNKMEKSLGDEMIKEKCWKLEVDRLGNITKVVW

SEQ ID NO: 23041 - protein, 1100 aa, unidentified
  REGION 1..1100: note = Cas Enzyme sequence
LESAANQLYKNNTSHRENLIKNDISHLIIEDIIYYQRPLKSKKHLIENCKYEKYRYFVNGELKEKPVKGIAKSHHLYQEYRIWSQIHNIKIFKKEHRNENGIIVFNLDITNQEVDYQSKEKLFELFNIKSEVSHSQILKCLGLNGSDYILNYEDGIKLKGNETNYEILKNIENKSDKKEILKLLQKEKNATAIWHALYSISDDKAHLQNALLNPATGLSTSQATQLLNTKPFPKSYGSLSKKAVEKILPLMRCGKFWKKENINIKSLTKIENIINAVEDHEIPDQVRKQIAQKQINEISDYQGLQEYMASYVVYGRHSEIGNTKIYTDYSEIDTNKLLPQHSLRNPVVEKILRETLLVVRDVWKTYGKPDNIHVELAREIKLPNDKRKKYIERRNTNKARNDRAKAMLMELKKDNPNINPYSIGQLELFKLYEEGAIALNDAQDEIKAIHRKGDPTISEITKYKLWLDQKYLSPYTGQPIPLSKLFTPEYEIEHIIPKSKYLDDSFFNKIICEREANQLKGNMTAYEFICKMGGQMLNNGTKIFVKDAYETHVTRMFGHLKTKLKNLLSYDIPDSFITAQLNNTRYISKKLLELLDPIVRDEKDVGFKSRNLIPLTGMITTQLKKSWGLNEVWKKILSPRFQRMNELDSNSIYYESINGKFHLYGNETDLKRLDHRHHALDALVVSCTTHQHIQYLSSYQNEKIRYDLKPKLFARDKNGIWKDQYLFPWKGFNQEAYENLKQVIVSHKQSHRIINRTNNYYQKYINTNGAFKKAYVPQEKSADFWSVRQSLHKDTVYGKREIRQYKDVSINNAIDKIDNIADKKIKKLIKEKLKSLGNDKKALKKDLRNNPIIIDSKTLKKITVIDDNPVFFSSSRSLLDSSFKKEKILKKVLDEGIKRDLLDHLFKYDDDPDKAFDPNGIIELNKNRKVPIKKVTTIETLGKKFKLGEKGVNQFKYVEADKGTNLFFVIYRNTETGEYKITKDSTLNFGDVVNLMKENLPLAPQVEGFDYFTLSPGDLVYVFEEDEERVLPDRMDPDRIYKCVSFSKQQCYFIPYAVALPIVNGKEFTALNKSERSIEGIMIKSNCKKININRLGNYTS

SEQ ID NO: 23042 - protein, 1187 aa, unidentified
  REGION 1..1187: note = Cas Enzyme sequence
MAKYILGLDIGVSSVGVAVIKEENGKSSVEKMSVRIVQEDPDFHGKFYSGNTASKNLDRTLKRGIRKNNQRFKARRDKLYQTLRENNMFPTDNLFNLSATELYGLRAKAVSEQISLEELGRVFILLNQRRGFLSNRKSVSEEENSTEYKERIATLEKELAGRTIGQKLYLELQDNENAFEVLLRERTYQRSSYIEEFDRIWDEQKKYHSVLTGGANEDNNKATLYDLIRNRIIYYQRPLKSQKGLISECSFEKYHKATAKSSPYFELFRIWQKVNDLSWKTPNGEMFKPTPEQKQNLKDALWNGENLNGKYKLSITEIKKLLGYGRNEKIYLNFTELDGSRTYSILKNALEEAGIENPDQYLFFNLDVSDEKGGLFELWHITYSLSTEKEVVNALKNRFGFSENQSKIIAKKVGYPSDYGSLSARAIRKLLPHLENGLGYSEACDKVGYDHSGYKTEIELKPKLKQLKKNELRNPVVEQILNQVVNVVNLVIEKYGKIDEIRVELARELRNSAKTRKNISQANSKNKRNNDVIRKKLIEEYGFKLVNGRDVKRYILWEETTHECLYCNNPINGTDMLTGNADIEHILPKSRSFSNAMNNYIIAHRKCNSNKGQKTAYDFMESKGEEALRQYIEKVNALYDDGKGSILKSKFDNLLCKGEDIPSDFVERMKKDSQYIAKEAVKMLKTVCPNVYTTTGQVTDFLREEWELKNLLQELTFDKYKAIGQVEEKIIKTNNGQTKTFETITNWSKRDDHRHHAVDALICALTDQKIVFKLNNLNKIYQYERDALSQKEIEEIEEFLEGKFSLKEFSAQQGNVIECSIPSIRKEAQKHLEEIFISFKKENSKVLTKNINAPKNVEPKTTWVPRARLHEDTIMGRVKRIAEKKMKLSDKVSMEEIEMIVNPEIKELLYQHLTKFDNNPKVAFATKTLKGEPISYKGKELKEVSVYQWINTKRVKVNENITEAQIEKIIDNESKRAIKERLNGGKIKEVFKNLSQNPIRLKNGMILKTVTVSDESKVEKVRTGYAILGKNHHALIYKDENGKYNDEVVSFWEAVEIGLLNIAEHNNPYPIINRNDNDELGIFQFSMQINDLFVFDLKHSDNPQEENEIDFFDVKNRKMISDKLFRVQKMSKKGNGAFDIHFRHHLETSINRNIKEMTWINIQSNSYLERLTKIRVNHLGEIVKIGE

SEQ ID NO: 23043 - protein, 1267 aa, unidentified
  REGION 1..1267: note = Cas Enzyme sequence
MKTILGLDLGSTSIGWALIEAEKDEKQTPVRIINMGSRIIPLSSDDRDQFQKGQAITKNQDRTRARTQRKGYDRKQLKKRWLNEVLKEHDIFPSDALMKLPMLDLWKLRSDAADPGKDISAEQLGRILYMLNQKRGYKSARSEANADKKDTDYVQAVKGRYAQLKDRNQTIGQYFYEQLSNARNNNTYFRIKEEVYPREAYMEEFDTIINAQKAKHDFLTEETISRLRDEIIYFQRKLKSQKGLVSICELEGLEKTVFDKEKNCEKTVFIGPRVAPKTSPIFQLCKIWEAVNNISLKVKNPEGSKYKWRDYIPTIEEKEAIASHLSQNLILTYSDLLKILKLRKDDVFANKQVQKGIQGNITYHEIHKILGDSELLQFEISVIESDEQALLADKKTGEILDERQRLIVDKSFESEPLYQLWHTIYSIKDLDECKKALIKRFELNEEVADKLSKIDFNKQAFGNKSAKAIRKILPYLMQGFDYSQACSLAGYNHSNSLTKDEQEQRETKDRLTLLAKNSLRQPIVEKIINQMINVINAIIDEYGKPDEIRLELARELKQSKDERDEADKMNSNNKKLNEMISKRLEAMGIPATRKYIQKYKFIFPAKDKKWSEANVVNQCIYCGEHFNLAEALTGDNFDVDHIVPKALLFDDSQTNKVLVHRHCNSNKLDKTAYDYISKQGDLKLEEYIQRIDDWFAKGILSYGKMQRLKVSFEEYLDRKKQKKETEADKKLWESFIDRQLRESQYIARKSRQILEQICKKVTVTEGSVTAKLRKVWGWDDVLMNLQLSKYREIGQTQIKEWTSDHGKRKHQKEEITNWTKRDDHRHHAVDALVIACTKQGYIQRINTLNASDVRNEMLKEIEDSKIKYNEKLSLLDKYLVAEKPFTTSQVASEADKILVSFKPGKKVATITRFKARGKNKEKGVIVPRGALHEQSVYGKIKVIEQDKPLKYLLEHTDKIIDPRVKALVTARIAEHGNNIRLALSSLKKSPIYLNEQKTEILEKASCYNDATVLKYKLQSLKASQVDDIVDERVKALVKARLDEYGGKEKEAFKDVLWFNEEKQIPIRTVRLFARPDANNLQPIAKDANGKDIGFVLTGNNHHISIYEDKDGKLIQHSCTFWHAVERKKYKLPVVISDTSAVWSQLLGKEYPDAFLNKLPADNLKLKFSMQQQEMFILGLSQEELADAFNNNDKPLLSRHLYLVWSISDNNYWFRHHLETKNTELKKTEGAKESKRLYNIRSLGSLLSLNPIKVRLNHLGDITDIGVN

SEQ ID NO: 23044 - protein, 1742 aa, unidentified
  REGION 1..1742: note = Cas Enzyme sequence
FNAGQKIESAAGNRTKLHRARITKERYLLRRDRLHLVLNLLEALPKHYKIEIDFERNGKKCGQFKDGKEPKIAYLPTKNSENKFEFYFEDAFNEMIEDLQKVNPEIRNEKKKRVPKDWTIYYLRNKALKEKISLEELAWVLLNYNQKRGTDLAEIENEDEQSDEKEQLDLKVIKVEQKEDVGGNFFEITLNDAENFKYKEYTTEQLTFVDDVKEVVKILKLDDAGNIINEKTTYQISDLYNLTLANIEHTDIDDKKAKHKYEFIYTNGWKTEKKKEKFDVTYQKLENQIKEKSKVITELFVVSNKYDFVGKPESIVPNIKLPDFNSEGSKDWTLLKKKTEKEIVKSESSLSGWLYNSIIKNDAKTGERTKIIGGVFQTVERKFYREELSQIIDTQRKFHTSTLNDKSVFEKCVKLLYPHNDEHSKALLENKNAITHLLVEDILLYQRPLKSKKCEISDCKYEVDYWKDDVNKTTGEVTEIPVYKKAVSASHPLFQEYRIWDKIHNIKLIQLEAKDAEGNSETNVDITSKYFKPEDYQALFNHFNNRSTVAIDDFLTFCKERFKLDIGKKGERKILWNYPVEEEFKGNETRKSFEIRFKRCGFENFNEFMTPQKEVELWHYLYSVGSSERKKVSETTNASNPKFGKMGIFNFFTKYFKDENVSPEVLDKLCRDFENYPKFPSKYTAYSIKALNKILSVMRVGENFLTSETAIEKWQEKYKERAKAILRKVNEIDWSNEKVDFSKVKEVNSEKGAIHYPDGLFTTFRKFRTIKDFQFLNLTQASYFIYGRHSELAQAKYWNSPDKIREEITKELKHHSLNNPTAEKVLKETLKVVADIWEVYGNSEEKFFSEIHLEVAKELQKSNKEKKEITDRQKNSRAENHRLRNILEEFLSNSSYNAKKGNQDHFERLKIVEDGAKVRSYTEKDFYSDNKDKFSKNEIETILKKQRISKSDFEKYKLWIEQGYKSPYTGELISLTDLFNGNKYNVDHVFSRAAITNDSLSNKVVCEAVINRFKSHRTGREFISQFGGKTHTVFDEKLNRNVTFKLISENDYVGLVKKQFKDSKRLILLAKEVPSGFTESQLNNSKYIARKAMELLSHIVRENGEVEFRSKNVLPVTGGITDKLKKEWKINQIWTELLAPRFERLNKIHNSKDFGSQSISNSGHPYFDINTKYILEKNEKFDLKRLDHRHHALDALIIALCTENHVQYFNNINSGITNKKKDKIEAIKKQRAGIKRQIMYSEKDKENPKDTIWRFMLPGSFRQKDSQDNGKDTVTDILWSNNFGSNESKDYKKTILECLQTCVVSFKNDFKIVSKSSNKYESYYDENGNLRLDKNGKPQKDFVFQKNENNKHWSIRKPLHKDNPSSRVEAGILSKNWYSSLDSVDDIIDENIRNKAIEIIQNIDEGEDATEFLKIKHREAKDLLKLIEKKEKQIKKEKSLSVKEDLIKSIERLKTDYQNEYLVYLIFDNKKLVEKVNFNEIKYRKYQPILDLAERKSQAKKIVTLDAMKKKLEKVSDEEIREALFKHLEQSDNDIDIAFSIEGVEGFNNKRKDAGKNILKKIPISESGAGKYTVGNKKSNNHKWVEAEQGTNLYFAVYETKEKVRSFEKISLRNAINRITINEDIVPKFNKKGDELSFVLSPNDIVYLPTMEEYKNPNLISFSNLNRDRLFAVNDFSKAIYFSPVNISSSIIPKEVDMNYDKKNDKIKGSFDTKTASFDGVQIKDYCIKLNIDRLGNISKKA

SEQ ID NO: 23045 - protein, 1579 aa, unidentified
  REGION 1..1579: note = Cas Enzyme sequence
MFSQRNNPYCDLLSFSTNIVLSLIAAIRETGNRNFKISYLYQNHQINSFMSKKMILGLDLGTNSIGWALVKHDIENNQGEILGMGSRIIPMGQDVLGEFGKGNSISQTAERTGYRSVRRLRERFLLRRERLHRVLNVLGFLPKHYASEIDFEKRFGKFKSETEPKLPWKKGDDGKFSFLFQNSFNEMLTDFKVNGQDLKIPYDWTIYYLRKKALTQKIEKEELAWILLNFNQKRGYYQLRGEEEEENLNKQVEFYSLKVMDVIADEPQKGKADIWYSLILENGWVYRRSSKMPLFDWKDKVRDFIVTTDLDDDGAIKTDKEGNEKRSFRAPAETDWTLVKKKTEQEIDQSHKTVGAYIYENLRQNPKQKIKGKLVRTIERKFYKEELKQILEKQKGFHLDLQSEDLYSDCVRELYRNNDAHQLTLSKKDFVHLLMEDILFYQRPLRSQKSSISNCTLEYWMYKDKDGLEHTEYLKAIPKSNPYYQEFRIWQWIYNLNIYKKDDDTNVTSEFLNATGDFEKLFEFLDNRKEVEQKALLKFLLEQKGFKGKILNAEVEKYRWNYVEDKKYPCNETKTMISSRLEKVENVPVSFLTRETAQKLWHIIYSVNDKIEFEKALKSFAGKNNLHENSFIEVFKKFPPFKSEYGSFSEKAIKKLLPLMRLGKYWSWDNVGEKSKDRISKIITGEYDENIKDKVREKAIHLTSESHFQGLQLWLAQYIVYGRHSEAAMAGKWNSVGDMGEFLKEFKQHSLRNPIVEKVVTETLRVVKDIWQQHGNGAKDFFSEIHIELGREMKNTTEERKNITNAITENENTNLRIKALLAEMMNDGKVENVRPFSPMQQEILKIYEDGVLNSDIEIEDDILKISKTAQPSSSDLKRYKLWLEQKYRSPYTGAVIPLNKLFTPEYEIEHIIPQSRYFDDSFNNKVICEAAVNKLKDNYIGLAFIKQFGGTIVECGMGKTVTVLKQEAYEDFVKQHYAKNRSKRTKLLLEEIPEKMIERQMNDTRYISKYISGVLSNIVRAEDGTDEGINSKNILPGNGKITATLKQDWGLNDVWNELILPRFERMNNLTKSKDFTAWNENHQKFLPTVPIELSKGFQKKRIDHRHHALDALVIACATRDHVNLLNNQSARSDMKRYDLQRKLRHAEKWTDKEGKIKDKFTEFKKPWEEFTLEARTALENIVVSFKQNLRIINKATNNYQIIDNGKKVKKKQEGINWVIRKPMHKETVSGKVNLPWIKVPKGRILTATRKSLDTSFDLKTIESITDTGIQKILKNYLVEKGSPELAFSPEGIEDMNRNIAKYNGEKPHQPINKVRVFELGSKFPLGQTGNKKDKYVEAAKGTNLFFAIYEDENGKRSYNSVPLNEVIERQKQGLSTVPFENEKGHRLLFHLSPNDLVYVPTEDELENNDQIDFNNLNKEQRKRIYKFVSCTGGEGYLIPQTNAFEIVKNENGTNSKSERLQDLKDGNCGYDKNGKPLMIKEVCIKLKVDRLGNISPEKKIYRSTMDKSLVSELEVIYETRKWGLKKFDSFDDMENEQLRYFASLSPTELFRNLKKLTLAAFGIADESKLKHPKRIVKYE

SEQ ID NO: 23046 - protein, 1268 aa, unidentified
  REGION 1..1268: note = Cas Enzyme sequence
MIKKIFGLDLGVSSIGWALISETTDGKNEIIDIGSRIIPLSVDDKDEFSSGNAISKNQKRTLKRTQRKGYARYKLRRTGLQETLRQHNMYPDDALMQLSSLSLFGLRHNAVTTKIELAELGRILYHLNQKRGYKSSRSDANLDKKDTDYVAEVKSRYDQIKEAGLTVGQFFFQELTKDNFHRIKQQVFPREAYIQEFDAILEEQQKHYPDILTDSLIHKLRNEIIYYQRPLKSQKGLVNTCEFEGFYVTDKKGKRIFAGPKVAPRSSPLFQIDKIWETINSIALKNKQGETFEISIEKKNEIFSYLDNNEILTEKNLFAILELKKRDGWYGNKQTAKGLQGNVTKSLIRKHLNGFNFSLEFDLTVKELESEAFLIDNETGEVLAGKTKKIISPALEKQPYYQLWHTIYAISDAEECCKALQVKFGFPEEVARNLVKIDFSKSGFGNKSVKAIRKILPYLMEGDVYSTACSYAGYNHSNSHTKDERMRQDLKTRIELLKKNSLRQPVVEKILNQMINLVNSLIEKHGSFSQEDEIRIELARELKQSKEERNDATIANTANEKINIEISARLTSLGVRDTKKNREKYKFIFPIRTVYNKNGSFNKKSFDDAQIVNQCIYCGETFSLTSALNGDDFDVDHIIPKKLLFDDSMTNRVLVHRKCNGGDKKDKTAFDFIRAKGQYELDIYLERLSDWQARGILSNSKLERLKISHEDYIERKREKKETEADKKIWENFIERQLRETQYIARKAKEILEEVSYNVWSTNGSITAYLRNIWGWDDVLMNLQMPIYHELGLTETKVWETNDGKIHQREEIINWTKRDDHRHHAIDALIVACTQQRFIQRINTLNASATRDAMLQEIEGAAGQYNKKKNLMENYFFHLKPFSTKQVEEITSTILISFKSGKRVATVTRHKATGKNLETGVIIPKGPLSEESVYGKIRGIEKKKPVKYLFENAALIYKPYIKALIDTRLGKHGNNIKLALASLKKEPIYLNDDKTILLEYGTCFKDEYVIKYPVESLKTKDIPYIVDHRVREIVQKRLNEFGNKEKEAFKDTLWFNEEKQIPIRTIRCYTGLSAVEPVKKDSLGNEIGFVKPGNNHHIAFYTDPSGKKIEHVCSFWHAVERKKYGIPVIIENPSEIWNKVLANQEIYSDSFLSKLPTDTYSFVQSLQQNEMFLLGLSKEEIEHISFEKDKGLLSKYLYRVQKLATTNYMFRHHLETQINDSSEAKISKRFVHIRSIGAFDDLNPIKVFINNIGEITKNKAERIHHHTAK

SEQ ID NO: 23047 - protein, 1449 aa, unidentified
  REGION 1..1449: note = Cas Enzyme sequence
MKKVLGLDLGTNSIGWALVEQDFNNKEGKILGMGSRIIPMSQDMLGEFGKGNSVSQTAERTGYRGTRRLRERHLLRRERLHRVLNVLNFLPYHYASQIDFEKRLGKFLKETEPKVAYENKEFIFKKSFEEMLLDFRKHQPQMLVKDKGEAKLIPYDWTIYYLRQKALEQKIEKEELAWIILHFNQKRGYYQLRGEEEEENPNKLVDFYSLKVINVISDEKSNNKGELWYSLILENGWVYRRSSKLSLIDWKDKVRDFIVTTDLNEDGSIKKDKDGNEKRSFRAPSEDDWTLIKKKTEQEIEQSHKTVGQYIYDNLLKNPKQKIKGELIRTIERKFYKEELKKILLKQKEFHDELSDDKIYSDTIRELYKNNDAHQITLSKKDLVHLFLDDIIFYQRPLRSQKSSISNCTLEFRKYKNSNGSEVKEYLKVIPKSNPYYQEFRVWQWLYNLKIYKRADDTDVSDQFINGIEDLENLYDFLMKQKEVDHKDILKYLLASDELKGKTLSAEIAKYRWNYVYDPEKDESKKYPCNETGYEIYRRLSKVEGVSANFLTREIEQNLWHIIYSVTDKITYEKALKSFAEKHNLSVESFVENFRKFPPFTSEYGSFSEKAIKKLLPLLRIGKYWSWDSIDEKSKDRIGKILTGEFDETIKNKVREKAINLTTEEHFQGLQLWLTQYIVYDRHSEAGITSKWNSVADLEDYLKDFKQHSLRNPIVEQVITETLRVVKDIWMKYGNGAKDFFDEIHIELGREMKNTADERKRLTNIISENENTNLRIKALLIEMLNDTDVENVRPFSPMQQEILKIYEDGVLNSIKDVPEEFDKISKKAEPTKSELQRYKLWLEQKYRSPYTGEVIPLNKLFTTDYEIEHIIPQSRFFDDSFSNKVICESAVNKLKDNQLALQFIKKHYGEKVSIGFGNEVQIFTEEKYIEFIKINYFKNRSKHNKLLLEDIPEKMIERQLNDTRYISKYICSVLSNIVRSEKNDDGINSKNVIPGNGKITTELKQDWGLNDVWNDLILPRFERMNEITKSNLFISYNEKYQKNIPSIPFEYSKGFQKKRIDHRHHALDALVIACATRDHVNLLNNESAKSELKRYDLQTKLRYKQSYFNKKENRQKDAFKEFIKPWESFTVDAKKILEKIVVSFKQNLRVINKATNNYEKWCEKDGQKVKEVVKQEGVNWAIRKPMHKDTVSGHIQLSRIKLPKGKILTATRKSIDGSFDLKAIESITDTGIQKILRNYLLSKGSVSELAFSPEGIEDLNKNIAHYNGGKFHQPIYKVRVFEIGSKFSLGQTGNKKNKYVEAAKGTNLFFAIYQDEKGKRNYETIPLNEVIERQKQGLSSVPEMDQNGAQLLFHLSPNDLVYVPEEDEKKEINGTYLKKITKENTNKIYKVVSFTSSQIFFIRQDVAISVVNKAEFSSLNKMERAINGVMIKEFCVKLQVDRLGVPTIY

SEQ ID NO: 23048 - protein, 1523 aa, unidentified
  REGION 1..1523: note = Cas Enzyme sequence
MKKILGLDLGTNSIGWAVINGKNSADGLELTAIEDAGSRIIPMSADQMGDFEKGNSVSQTRERTGYRGTRRLRERFLLRRERLNRVLSIMNFLPEHYASSIDCYGKFIKGTEPKLEWKKDEGGRYGFIFQKSFDRMLEVFRTTHPEIMTGRRIPADWTLYFLRKKALTEKISKEELAWLLLNFNQKRGYYQLRGEEEEVDITKREDYMKLEVIAVEDTGEKKGKATWYNIRLNNGLIYKRTSEQPLDWVGKSKEFIVTTQLEKDGSVKLDRDGEPKISIRLPKDDDWTLLKKRTETDIENSEKTVGEFIFDNILTNPDIKIIGKLVRTIERKYYRSELKRILENQAKFHPELTDPELYASCIQALYQNNEAYRNSIAGKDFIYLFSDDIIFYQRPLKSKKHLISDCPYENRTYVNSQTGESIKSPIKCIAKSNPLFQEFRLWQFVSNLKIYTNDGNNTDVTSQYLETTADWSDLYEWLNDKKEIDQVTLLTKYFGFKKIGDRLPFRWNYVEDKKYPCNKTRAAIIAKLDASERHELTPELTAKIWQLLYSVRTKEEIDAVFSDQKIGRSGIYDELLKHFSESSIIRLKSVKFEEEDYGSYSEKAIKKLLPLMRIGRYWNADSIDSDVKKRIDRILSGEYDKDIDNIVREKAALLNTVEDFQGLPLWLACYIVYGRHSEGRDTGKWTSPEDIDIYLHEFRQHSLHNPVVEQIITETLLTVRDIWRKTGALDEIHVELGRELKSTGEQRARMTSKIIENENTNQRIRTLLREFLNPEYGVEGVRPYSPVHQEIMKIYEDGALSNDAKRNEEIDDIRVRLSSVNVNRRPSSSDIIKYKTWLEQNYCSPYTGQPIPLAKLFTHEYEIEHIIPQSRYFDDSLQNKVICEAEVNRLKDRQLGYEFIRSHHGEVVTLTGGRTVTILSIEAYEAFVKKTYAGNRTKMQKLLLEDIPDEFINRQLNDTRYISKFIMSLLSNIVREEIRPGEFEKEGVSKNLIACNGSITTRLKKDWGINDVWNSVILPRFVRMNEICHTDKFTALNTEGHQIPHMPEDMLKGFNKKRIDHRHHAMDAIVIACTTRSHVQLLNNEAAKSGNKTLRHQLSRKLRRYEKMLINGKEQDIAKEFIKPWATFVPDVKKALDGIIVSFKQNLRVINKATNVYESYRDENGNLLLDKNGNAVKVKIAQKSNPDWWAVRKPLHKDTVFAKVALRKIKEARLGVALQNPDDIVGKELRDEIKRLLGLGYDEKRIKKHFAEGENKDIWAEFNPGKVKVYYFTDDTFAVRKSLDESFDEKKIKTSVTDTGIQKILLRHLSENGNDPKIAFCADGLERMNANLPHLNGGRSHKPIFKVRVYEHASKFAIGSAGNKKDKYVEAAKGTNLYFAIYVDQNGERSFETIPLNEVIERMKKGLSPVPEVNASGNRLLFYLSPNDLVYVPGQNIECEVGQSMMIDCDRIYKVVSSTGNELHCIPQRIALPVVQTKELGSNNKAQRAWGGEMIKEVCIPLKVDRLGNITYIGKEFLPKRKG

SEQ ID NO: 23049 - protein, 922 aa, unidentified; identical to SEQ ID NO: 22789
  REGION 1..922: note = Cas Enzyme sequence

SEQ ID NO: 23050 - protein, 1246 aa, unidentified
  REGION 1..1246: note = Cas Enzyme sequence
VKDECIFYQRDLRSQKHLVDKCNYEYTTYYAYKFDKINFSQQVDKISYSNNLTKNTSLSTEQKVTFTERLKKNKIITVAEIKKLLNLKDEKENTIIIHNLPKDKLLEIDYLRCCHKSTLEFQEFRIWEQINNLRYIDEEDIEYELTVGQKNILANKLHTVKELVIETHNKSNVEEKEEAAELKEILDLPVNCRFKEEKKLKGNITLYKLKEALGEDYWNTISPKKNYININPATEIPDTETGEIITYQAINYSAEQRQLYNSIGFATNFIKSIDWLKGKGKASQWKESITHLGLTPDQLESYSKISFEPDYCNYSLKAIKKLLALIKQGLNVVKAAEIIGYEMASDERKNDNHLHDHLPILKNNSLRNPIVQKGASETFRLINIILKEELKNEKPDKIHIEMARELKKPKEARAKQKIQNDEKEKERKEWANFLGVDGSSSILIKFELFLELDQSRENFEQLKKDIKIEDFVHFCKNVLGKEIKLNVEKFNQLKIKLTSKADTEEDEDSNKEKKKEEKAQLLLLKYRLWLECGRILPYTNEIINLTRLLEENSDIEIEHIIPYSRCMDNSFLNKTLSSKAFNIKKGNRTPMEYFANNEKEKKVFISRVSKINNEEKQKRFLIDSEEALTNFRNSQIVNTAYIATEVKKHLLTTFRRDDIEMTNGQITALLRRIFGFNTILNPPINVSADYSPGKYWAIIKKEKATKLIKKNKENNMPQKENDEDVIIEGTVANGRFYPKKQRTDHRHHAIDAITIALSSKKLIQIIEKNTEGYYQKNGKMINANEEGAIWVDKFDEYGLLTKEAHDSLKEEINKELNFPRLRDKTFYAVENLLVSFNNKNLITSSGKKKVYKNGKIFYSGGNVARGALHDQSLYGKTENLKENEFVKRVNVANLTWSQILNIADLKIKSILIKDVAKYAESKFLQDKENNPLVENFSLPFEKLVAFDMEKTFYEEEIKVIEEAGELTEEEKTIIKELTKKLNEIKDKLKADKDRNKDKKGKRYTDYLKKGFDEARKNGFFLENEGKRKRKLKEQNDIDIIREPIPIKKVRVKYISTSIKEYKAEIYNQKAFIKPGENFCMAIYGNEVVKNNERRLFYTVTLLKAASIEAENNKIRKENIKLKEQSIEPLKLNPLFQKEMNGAKLLTYFSKRDMVLVYEKHPDEINGLIGKIGLSGDEEKLLFDRLYRVAKADINGIIGLAKHNMSGVNTDYPKRYPKGTVIKCNWNTFKGIKVIVDHLGKIHKAVL

SEQ ID NO: 23051 - protein, 1372 aa, unidentified
  REGION 1..1372: note = Cas Enzyme sequence
MEKILGLDLGTNSIGWAIREVNNALENQIIDKGVLTFDKGVAEDKSGEHPMVQKRTESRGKRRNYQAEKYRKWDLLKCLIHENMCPLSIDELNEWRHYKKGIGRKYPHSEKFIQWLRYDFDGDGKPDFERLGYSKHESYYLFRTVIIDKSKVELFKKEPHIIGRVLYQLVQRRGYNDGQNIDENEKTELSKTIMKGGGDSGAIGVNDILPYLEKYKTLGAALYHLQKEQNVRIRKRYNLRSHFENEIKEICSVQGIEHLFKQFWGAIIWQRPLRSQKGLVGICTFEQNKRRCPISHPLYEEYRAWVFINNLKIKPTIENDIPVNKMLLEQALTTIVYPQFFKAAADFKLSTIKKELSKIGFEITARFPEDTKVISFSFLYKMKEIFGDNWAKHVDWNESLNSDYIKEKKKYNIEDLWHLHFIKTTNKKTGEEPYDFLKKLGLVKLNLSEAKADMFAKIRLQQGYATLSVNAIKKILPYLQKGFIYSEAVYLANLPKVLGLTKLNDGDIENYSAIIKEVIIKDKYDQRKTGIVNSLIVLYFENKKAFEEQKNETIEKCIIESYGQTTWNKFSVEKIVNIENDITQEISTFLSEPKQKPENHYRKTVRLHDRIFKTLMDDYGISPENIKHLWHPSEQETYLPAIEKNDKYFLGSPEPISKGFKNPMALKTLYKLKKLVNYLIESGKVSEDTRIVIEIARELNDTNKRKAIERWQKLREVENNTFKTKIEEINKECGTDYNINDKNLIDKIRLWNEQQRICIYTGKMIGLCDILDGSKYDYEHTIPASMSFDNELKNLTIADKTYNQQIKGKKLPTECPNYESDYEYNGAVYQPIIDTMQTVFGRIKEIEKKVKGKIVIKRTFEKIEHLENLLEEWRGKKSDDKGIKDNIIIKRHVIKIELDYWRYKLQTFTTTEYKAGWRNSQLRDTQTITKYALPYLKTVFKKVEVQKGEITSDFRKIFKIQPRFEKKDRTKHSHHAIDAAVLTLIPPAIIRDKILFRYNEDKENNIAYHERPRQWSNFEAKHILEIENDILINYQAQHRTLTPTYKTVRKRGKVQYVKEKFPNGKWKYKLDKDSNKIPLIAKGDSIRGQLHKESFFGAIQKNGELILVERYPISAFTSINDCRNIVDDAVRQIVKDTIEKRISEGMSFDKAKLDPISFPNGKAFIKKVRCRVAAGRGYLTPEKALEIQKHDFLSKHDYKHYTYAQNEENTLCLYYELQMENRIERAFKIVGLLELAKLQLYNFSKIKNDKAYNSVEVGKGKNKKDIPLKNILQVGAKVIFYKEDIEELKDLTKNDLLMRVFRIYKFNEMGTANLFLQNHIEARKNELLDDGDTNFDASKYQYRLKIKADKFICAVEGTHFSINPDGEIKWLS

SEQ ID NO: 23052 - protein, 1243 aa, unidentified
  REGION 1..1243: note = Cas Enzyme sequence
GLDLGSASIGWALINENVEDGITKNEVLGLGCRIIPYEGTEGKDFDKGTGESRNSLRTKARTARKGYDRYQLRRKFLVETLIKNNMFPDETLKSLPKMQLWELRNKAVNSPVTLFELGRLLLWLNQKRGYKSSRSDANLDKKDTEYVAKVKSRHDKIRELNLTIGQFFFKELVNDEFYRVKENIFPRIAYIEEFDAICNNQKQYHATELTNELIDKIRNEIIYYQRPLKSQKGLVSVCEFEGFWYKGKDGKEYFVGPRVAPKSSPLFQLSKMWENINNIKIGNRTGGNIEISTDQKWRILSHLDNNEKLTVPDLLKILDLKKDNCFVNKQLVKGILGNITKHTIRQCFDDSTKYEHLFTMNLNIIETTAEGYLYDKSTGEVLKTKIIKFIDPKIEKEPFYQLWHTIYSIQDQEECSRILQTKFQIEQPIADKLASIDFSKHAFGNKSAKVIRKILPYLMEGDGYSDAMSYAGYNHSNSLTKDQNLQRKLLDQLKPLAKNTLRQPIVEKILNQMVNVVNAIIVKYGKPDEIRVELARELKQSKEERNETDKSMSKRQRENEEISKRLAEYGLRATRNNIIKWRLYEEIDNQEIKLNAICIYCGQPISLIEALKGNDIDVEHIIPKAKLFDDSQSNKTLAHRHCNTNKNDRTSYDFMQSKSEQALNEYVDRVNTLYSNHVIGRAKRDKLLMTENNIPNNFIDRQIRETQYISIKAREILQTICHNVWATSGNITAELRHLWGWDDVTMNLQFEKYNGVGLTHTVDWESEHGKNKHQKEVITGWTKRDDHRHHAVDALTIACTKQGFIQRFNTLSASKTREDMKFEVDKRSIEFKEKRNLLEKYLVGEKPISVDEVEKAVANILISFKSGKKVAVIGKRKIGKRGNKKVVQTGIIVPRGQLSEESVYGKIKIKEKKPVKYLFENPHLIFSSKIKTLVENLIVKYEGDAKKAYASIKKEPVYLDENKTVALVNATCYKEEFVIKYTVNTDFNKTDKVIDNRIKEILQKRLDKFGGKPKEAFKDVQGENSTLVKWYVNEGLERPIKSVRCFTGLSAVVPVKKDEQGNDIGFVKPGNNHHIAIYTDNEGNRHEHVCTFWHAVERKKFGLPVIIKNANEVWDKIQMQPEGTYSESFLEKLPDVKWNLLMSMQQNEMFILGLTTEEIEMAFSIKEYRTISDKLYRIQKLSIIPSSGQLDLTFRHHLETQLIDDNESKACKRFIKAQSLGAFFILNPVKVKIDCIGNITKYE

SEQ ID NO: 23053 - protein, 1504 aa, unidentified
  REGION 1..1504: note = Cas Enzyme sequence
MSQTLGIDLGTNSIGLTKRNTDLGNNVVDQLEFFISIIFKKGVGSGKTGEFSYAAERTKHRSTRRLYQARKYRIWETLKFLIEFGFCPLANEDLDKWRKYDKTRELKRQYPVDAILFEQWVRLDFNGDGVADYSSPYQLRAELATNRFDFTNQTDKFKLGRALYHIAQRRGFKSSKGETLKEQEKEAEEKDLSLDIEIQIDLKKSEEKKSKDLIAYKEEHNLPTVACCFYEMEKEGIRIRASKYQAVRSQYEEEIKFIFGFQNELEIDSDFYKAIHKAIFYKRPLRSQKGLVGKCTLESSKARCPISHPDFEEFRAWTFINNIKYRKDSTDDWSELTLDQKQQLFNDKFLRTKNNFKFEEIRFWIEKKVGFYLSNKSKTINYKDKTNVSGCPISGRLRNLFGDDWRFYTKQTIKERSNLKTGEIHSVSYSIEDIWHVCFSFEDEERIVEFAKNSLQMDEKETKSLVNLWVAIPQGYAMLSLKAIRNINKFLKKGLIYTDAVLLAKLPAILGTELWQENEDVFLSEIDKLTNQNRNEKRVLNVVNNLIANYKSLELDEQFAYKNTDYQLDNSDFNDIERFSIESFGEKSWKKLALEEKNELLSQIAVKYQKFFPSSKREFYRLPKLGDTLKRYLSENFEILNCPNGFVDKTTKLPCNCPACRKLNLLYHPSQIEFYKPAKEQQIEWNGNILSLKLLESPKIGAFKNPMAMRTLHELRKSINHLLKEGIITEDTRIVVETARDLNDANMRWAIETYQREREKENKEFEAAIRALYNDTERTISNDEIDKVRILIDQFEIPEKGEIKVDEEQKSSKKNQLGKAEKYSKDVTKCRLWLEQGCRCIYTGQIINMSDLFSEGKVDFEHTIPRSISFDNSLANLTVCYAHYNRHVKKNKIPAQLPNYEDILLRIQPWKEKVEKLKDNIDFWKAKAKQAQVKDTKDTAIRQRHLWQMELDYWQNKVERFTMEEVTSGFKNSQLVDTRIITKYATHFLKSVFSYVEVQKGSVTADFRKMLGVQSIYEKKSRDKHSHHAIDAAILTLIPSAAKRDKMLKLYYEIEEKKRFENVDQLRYELEKERKNCHLGNVSGISQYIEENILINHIAKDQTLTPAKKYVRVRGKIAPLKNKGGEVLYQTNDDDSIKYRTNRNGAFIYKRNEKGEFISENGEKIPILMPVPKVKKGDSIRAQLHKESWFGAIKYPVKNDNDALLKNDKGQFIYPKDKEGNDVFLMVKRELITSFKSEKDLEKIIDPHVKHSIEIAVKKRIGEDKSFATAISEPIWMLDKNGVEKKNDKKGNHLSPIRHARCKVAAGRGYFTKDKALEIKKHTYISKKKTVNVDNRIYKQSYYAQNDGNYLCMLYEGINKGKLERKFKLLNFFDLTKRNISNLHQLWEEPFYREIEEKKKVFSLSAIIKVGYRVIMWEETPDELLDCDLSRRLFSVYKFNFKGQDCIYLQNHLEARKDADIQEDYTTFNSRIYQPRLTMVANSFNCLIEHRDFEIKPDGKIEFI

SEQ ID NO: 23054 - protein, 1749 aa, unidentified
  REGION 1..1749: note = Cas Enzyme sequence
MKKILGLDLGTNSIGWALVEIDHENRTVRIIGLGSRILSMDAGEIAKFESGSILESSASKKTTMKTTRKLNERFLLRRDRLHCVLNLLQSLPEHYKVTIDFETEKGYRSGKFKRGLEEKLAYIKDENGKSNFLFIDSYNEMLNEFKNANSNLFYKKKNGKETKIPYDWTLYYLRKKALTREITKEELAWITLSFNQKRGYEKTIGQDEKKQKEGELSETIIGIVKSVNETGEKDGLKLFEITLCDENGNDFFRYKEESKIKITEVEDLKELEIISKYDEEGNINDRNNVFIIKEIRHIKVENVIFTGRKVKENFIYEVFLETGWIKEQQNKYQPKWINTERDFIIKTSYDVNGNRIPKGSDKGRNINAPSIDDWTLQKLKTETTLSSYNSKNKTVGVASYIYNELLKNPSQKIKGDLITVIERKYYREELEKIFDCQIKSGKHPELEDTKLYIKAINLLYPNNENHRKNINNIGFASLITNDVILYQRDLKSKKSLITNCVYEKENFKKIDIKTGKEYQEPLKAIHKANPLYQEFRIWQFIKRLKIVQLESKNNDEVVMNLDVTKAILTNPVKEKLFEFLNNREHITQSVLLKHLKLSETEYKWNYEIEHKEPCNETRYNFILRINRVKKDLWKTLLTPENEYLIWHFFYSVKKQDEFKKGINSLFEKILIKSELSAEYKNDLVKNFITFGGYNNDYGTYSEKALKKLLPFLRIGKYWNPETVEKILANATFVAKEKVFVKEEINGEIADFQGLWISSACYLVYNRYSEVGDIQYWKTPYDIENYLRNEFKQHSFNNPVVERVLVETLQLVKDVWKYFGEQDGIDENGKTIYKELFDRIHIELGREMKKNAKERDKENKQNKENQKANERIIELLKELAKENNEVKTKSPFQQEKLRIIENDLLSSIEYDKDATSYNLINGLGSITKKEIKDITSKDITKISKQDIERYKLWLDQRYQSPYTGKIIKLSDLFNREKYEIEHIFPQERITLNALYNKVICETEVNKDKKALTGYQYILNSDGKKRVKCAAHDFNEITILPPDEYEKRVKINFTDKRKQEILLSKEIPDEFTNSQLNNARYISKMAMKLLSNIVREEGEDSFRSKNVLPITGVITTKLRKDWQLNDTWNNLIQPRFKRLNEITNSNLFGHFEKINGHDVFINQVPEELNKNFEKKRIDHRHHAMDALVIALATENQVNYLNNISSQDNKTDKLEARIKLKNIITGTKNNENGDKSRYLLPPAQYKQKGEIIEYSYCYKKTNSRIFKQIALEALANTVVSFKQKNRIIRQRTNKIQVPDIETGNLKFISQENLSNSCNYNVRQSLHKATFYGKVKLKQEIKKIKLSEAIDISNEIVDFDLRTYVLDLQQNKRIENSVIVQLLESKHPNVEVYDNFVATRYENNIESLASVESEKIISTIESITDVSIQKILLKHLYKYNSIKVNVINISKYVDNLVDNEQQRLIKEMLLNDTLSDRITIGDKTINEIDVFTADLEFDKKEKIYMNPQLAFTFEGIVDLNKNIKELNDGKKHKPIFKVRMYTPLGTKFPVSENGKKNSKYVITAADSNSFCGFYEKTNGVGERKFIVPTLKETIENLKRRDVPCKEIFFDEKSNDEYKLIFTLTPNDLVYLPTEDEIINSFKLDSEKLKDIDKNRIYKFTDGNSAGVMNFTPYYVSKPLIDLSKNEYKEIKTISLTFEENTESKKGIKSKVKELVNEIGLGSTQSKNQNSFDDIQIKQYCIKLKIDRLGNISI

SEQ ID NO: 23055 - protein, 1462 aa, unidentified
  REGION 1..1462: note = Cas Enzyme sequence
MFSQRNNPYCELLQNCRTKNNYKFLNAKCYEKILGLDLGTNSIGWALISTDENGKPNKIEGMGSRIIPMGSDKLDYERGVSITKNATRREKRTARRMNKRFKLRRNKLLFILNQTGMLPEQFQFKNGIPEPNKLQELELLPVKRGSLQLDSLSFIKLKVNALNNPVNNITDFGRILYHFNQLRGYAGGNNDEEKKNDNEQDDDSEKKAYEVITQKVEILNVVKSDRSYKVKGGKNKGEEQNYFDITISMNDLEIQGSTMLQNLKEKEGKVEELEIRIKRTKKGETVIIALPQKTNWRKQMELTEENLLTGNLTISQLLLKDLQQNKWTKIRNRVVLRNRYLEEFDKIWETQSKSFPILKDCPITTLEKIANYIFPGQSKSQEELRNEATANGLKHIIRNQVIYYQRPLKPQTELIGHCKFEKEEKVIANTHPLFQEFRCWDQINKLYITSKREVFNEKKKKFVFQFSDRFLSDEEKQELYVKLQKQKQVGFGEVAKIINLKNDNTEFLNGLNVKAKLKGCDTIISIKKYLGESWNAYLKVNPNLFEEIWQVVFDNSNFGSEYDPESKRVHSIIEVLSQFQDLETATKTALEIAQTIRFPRKYSSLSRKAILNILPLMQLNPTEIPQKAIDNYLKIYHLIVTGEIIDENLLEDYIINFVKDKPEAYQKGGLMYSLATSLIYGKHTKESIKPQINNYHNIVFTERNFRNPIVEQLVNETMQVIKSIWKKFSFNPSELEIRVELARELKNSTIEREKIYKGQINNQRLNEAIKNKLIELKQAPTQGNIEIYKLWSNQKIEDYPKQSKEPTHEEIQKLRIWEEQKCISPYTLKPIPLSKLFSRDRLYDIDHIIPKSRYFNDSISNKIVCESNINEEKGNRTAWEYISQQNSQFKICNIEEYIDYVNNNFYGQKKKNLLSEKIPTDTVERQIKDTQYISVAIKDELAKIVGSENVKTSTGEVTSFLRSRWGLRKLFMELTEQRFKNMELWDWNKETNQPNKKWVERYFDKEQGKNIYEIKNWSKRFDHRHHSIDALIVALTNQSHIQRLNNLNKYLQDELESRKEEFKIEINEGETILEAFINLEEKRRDEIQSKIESSRYFENPIPDLIKQVKEHLESMVVSHKPKDKLGIKLDDKTGRPQLKIRGALHQETYYGKLNGQDTKSINISQLSVKDISKIIDLVLQKEIDNHRKKIDSMKEAFTGEGLITFNESRFQRKKPNLLKPPVFKVKVRYNTKEDAKSNLQRLYDVNPKLAVVTGDNYLFIVMEKNRKRIFDIASLYDSVILSNSSLKQGDINLKQRIVEDFRTKHKERPEKVLFTLQQNELVYLPENEDDFVLKLNKQEFDEWISIKENKICFNKRIFKVVKFTGKDCFFIPNNYANSISSAKDLSEKEKEELKRKYADKKIPKQELNFEEFGSFGNATKSEVNEFFVKELTLKGDYKGKKPLKIQETCIKINVDWIGNITI

SEQ ID NO: 23056 - protein, 1065 aa, unidentified
  REGION 1..1065: note = Cas Enzyme sequence
IDETTSKERLVWLNEPIKSIPKSHPLYQEFRIWQFIGNLKIYQKEDDKGSLLDMDITNTLLTKEEDWVELFEFINTKKELEQKHIIKHFIGKELIVKEQESNYRWNYVEDKKYPANETRYQFASRLKKLGIKTPTTFLSKKSTLGKKATLEVSLEEQLWHIIYSVKDKTEYEKAIASFADKHEIDQLSFVDAFRKFPPYSSDYGAYSAKALKKILPLMRLGSHWSKGSIDSATFNRINKLIDGEFDEKISDRVREKVSQLQSIEEYRGLPTWLAGYVVYNRHAESGDIQQWKSPKDIDTYLVNFKQHSLRNPIVEQVVTETLRTVKDIWQYYGDGKEGFFDEVHVELGREMKNSAENRKKLSTRVNENQRNNDRIKEVLKELKNSGVKASKPYSPSQQEILKIYEEGVYNNSPAEYKNIKIDEVEKIRKNATPSKTEIARYKLWLEQGYISPYTGKTIPLSGLFSTDYQIEHVIPQSRYFDDSLSNKIICESEVNQLKGNSTAYAFMREHGSEMVSLGQGKSVRVLSLEQYEGHCNKYFKANKSKLIKLLSEDIPEGFIERQLNDSRYISKLVKGLLGNVVREDNEVEATSKHIVPVTGAITAKLKQDWGLNDKWNELIAPRFQRLNELESKEGEPLSTRFGFWDNTINAFRTQVPDDIAKGFSKKRIDHRHHALDALVIACCTKKHTNYLMSLNAEKQNYSLRDSLLMKNKEGKYTKNLRAPWLEFTTDAKDSLEKIVVSFKQNLRVINKTNNKTWQWREKDGQLKKVLVKQEKGENWAIRKPMHKETVSGKLDVSASKGKIVTASRVNLAEIKTDKHLEKITDGSIRKILDNHVKYYLNDKGKVQFDLAFSVDGVEDLNKNIKTLNNGKNHQPIYKVRLSEEGSKFIVGNSGNKNTKYVEAAKGTNLFFVIYWDDKAKKRVYDTVPFNVVVEHQKQVAHLPKKERTPVPIDHTKGDFLFSLSPNDLVYVPTDEERDNPALVDKTELSKDQVNRVYKMVSCTGKECHFLPVSVSSLIKKYDSKTKLGEFGSLNKQEVAISKERIKDVAWKMNVDRLGIIRSLIK

SEQ ID NO: 23057 - protein, 1259 aa, unidentified
  REGION 1..1259: note = Cas Enzyme sequence
KSVKEKINLDDFARVLLMINKKRGYKSNRKAKGDEDGSLIDGMQIAERLYEDKITPGQYCYDILKSGKKTLPDFYRSDLQNEFDKIWNFQKVFHSQLLDDELLSAISGQGLINTRNRIFAIKNTSTVDTKGTRKEKLLDSYRLRSEAINKKLSAEEVASVVSDINGKIKSSSGYLGAISDRSKELFFNKVTVGEFLYEKLKNDSHYSLKNKVFYRQDYLDEFESIWETQKQFHPQLTEDLKIEVRDIIIFYQRKLKSQKGLLSFCSFESKNIEVVIDGKKKLKTRGMKVIPKSSPLFQEFNIWSNINNIELRQRKGDKQEFELNDEQKQSLYEELNLKGNLKGDNIFKLFKLDKDDWDINYSEIQGNRTNKILFETFIKILDDEGYVIDMKKESANKIKTAVSNILTDLGIDSSILEFDPSLDGKALENQSSYKLWHLLYSYEGDNTETGHEGLTKKLMNDFRFKPEHVPYILNINFEDDYGSLSAKAIRKILPYLRENNKYSEACALAGYNHSSSITKEENKERELKDRLTLLEKNCLRNPVVEKILNQMVNVVNAIIDDSGMGKPDEIRIELARELKKSTEERKLMTEGINKAKNRHEQIKELLNANPFNIMNPSRNDIIRYKLWEELKENGYKTLYTNKYIPPFKVFSKDIDVEHIIPQALLFDDSFSNKTLEFRNINIDKGNKTAYDYLEQKFDETGFNEYKQRVDKYYKDGYITKAKYQKLLKKSSEIGDGFIERDLRESQYIAKKAKEMMLEICRTVVSTSGSITDRLRQDWGLINIMKELNLPKYRLAEMTTKEERRGGRIIEQIKNWTKRNDHRHHAMDALTVAFTKHSHIQYLNHLNARSDEKNQNHSVIHAIENKETEKSENGKRIFVSPMPEFREEAKKHLKRILVSHKAKNKVLTRNRNITKKNGGKFEQVSFTPRGQLHKETIYSRSNHYVTKLQKISSVFDENIINKVANKAYREALMKRFKEYGNDPKKAKNSLGKNPVICHNGKHIPKEVKIVSLEHQYTIRKEITPDIKIDKIVDVKIRNIVRNRVKEFNGKQKEALSNLEKNPLWLNEKNGIKIKRVTITGVKNAEPIHTKKDHHGIEILDKNDFKQPVDFVSTGNNHHVAIYRDKDGNMHEEVVSFYEAVTRKNAGVPIIQKNHPLGYEFLFTLKQNEMFVFPSDDFNPSEINLKDEQKRNLISNHLFRVQKLSGTSIDYWFRHHLETTLNNDIKLKNKTYIIIASLKNLGGVIKVRLNHLGKIVAVGEY

SEQ ID NO: 23058 - protein, 1432 aa, unidentified
  REGION 1..1432: note = Cas Enzyme sequence
MKKKVYELIRIETVSKKSEFLFKDSFSEMIEEFKQVQPNLFYKRKSSDETKIPYDWTIYYLRKKALKEKIRLEELAWILLNSNQKRGYYQLRGDEVDEQEGKTKTFEVLEVERIVDSGDKIKGTDDVLYDVYFSNGWKYDKQIVKTENWQAKTKEFIVTTSTNKDGSIKHSFKAVDSEKDWIAIKKKTEQDIWQAKKHVCEYIYDTLLSDPKQKINGKLVKTIERHFYKKELTAILGKQKEFHKELQDDKLLNECINELYPNNYAQQNILKQKDLANLFVDDIIFYQRPLKSKKSLIDGCKYEVRPMKDSNGDLSKDDNGIQITKPIKVIHKSHPLYQEFRLWQFIENIRILQREKNIDGKVNIDYDVTSEFLLDIESKVKLFELFNDREKIKQSVFLGQFKDNSGKKISESDYRWNYVEDKEYPLNETRALFIKEFKKHKDFDWRAYLTQANEAKLWHLFYSISDKKELERALDNENSKLGLPIEIRQELKKIKPYKNDYGALSEKAIKKLLPLMRLNKNTEEIKLEYKNRIDNIFYRLDEINQDKTKISEVGDDDITKGMLKSFCGFGKKYSGLKLHQASYIIYGKHAEANDTNVWKTPAHLEKFIKDFKQHSIRNPIVEQVVTETLRVVHDIWQYYGKGKENFFDEIHVELGREMKNPADKRKRMTDKINKNQNTNQRIRVLLQEFKNQNIEGVIPESPNQQEKLRIFEDDVLSQFSEKELEKQEGVNISKILKSKEPSTKEIEKYKLWLEQKYISPYTGQVIPLSKLFTTEYEIEHILPQARYFDNSLNNKIICESEVNRFKESQTAFEMITKNSGRIIDLSQNKSVKLFSIEEYQKHITQHFAKGSTKQKILLSEDIPENFISRQLNDTRYISKLVKALLSNIVREENEQEVTSKNVVAVTGNITSFLKKDWGLNDKWNEIVEPRFIRMNEITNSNDFGYFDDKKGFFRTDVPTELKKDFNKKRIDHRHHAMDALVVAVATKNHVNYLSNLHAKSDNSRFDLRDKLRRMEEKIYKGEKRKYAKEFLMPWNGFPVEAKKCLEDIVVSFKQNLRVINKASNKYQIKKKGKAEIKTQEGTNWAIRKPMHKETVYAKVDLRHKKSIAINAAIDGFMKNKFVFVDKELKQKIKNLVQLSYDNKMIIRYFKENKFKNKKLKKVEVYYQDNYFSAVRKTIDESFKSKKWIEESITDSGIQKILSNHLEKYNETDENDKIKERPDLAFSEEGLIEMNKNIVGLNGGKNHKPIYKARVYETFGNKFAVGQTGNKKDKYVEAAKGTNLFFAIYQGKNIKGAEVRQYETIPLNIVIERQKQGEDSVPEKFFDKDKCEYSLLFHLSPNDLVYVPTKEEQEDINNIYFGNLSLEQKMRIYKIVSFTGNRLYSISYNVAKSIFDKNEYTLLNKVEFTDERYSVKETCIKLKVDRMGNISKP

SEQ ID NO: 23059 - protein, 1415 aa, unidentified
  REGION 1..1415: note = Cas Enzyme sequence
MKKILGLDLGTTSIGYAQINEGEDFKESSIERIGVRVNPLTTDEQTNFEKGKPITINADRTLKRGARRTLDRYQDRRSNLINALSIANIITKDTILAEDGKNTTHSTFALRSKSVTDKIEKHEFARILLAINKKRGYKSSRKVNAEDDGQAIDGMAIAKKLYDENLTPGQLAYQLLNEGKKNIPDFYRSDLQAEFDKVWNFQKQFYPEILTDEFKKELAGKGQRATSAIFWKTYDFNTAEIKGTREEKKLKAYLWRSNAINQQLDKEEVAYVITEINSNLNNSSGYLGAISDRSKELYFNKQTVGQYLYKQIKNNAHTKLKNQVFYRQDYFDEFEVIWETQAKFHPELTEELKKEIRDIIIFYQRKLKSQKGLISFCEFERKEVETEKGGQKVKKTIGLKVAPKSSPLFQEFKIWQQLHNIEIRNKIEKSKRYLEQEEKELLYEELNTKGNLKSNKIIELLGYLSKDYEVNYTEIEGNRTTKALYIAYLKIIDSAGYDTKELLNVKSNKDEIEFDDINVPASKITDMIKSIFESLEIDTQILVFNAEIDGQAFEQQSSYQLWHLLYSYEGDDSTSGNEKLYELLKQKFGFKKEHAKIIAGITLSDDYGSLSAKAMRRIYPYIKEQHFDKAADNAGYKHSASSLTKEEIANRPLKEKLELIKKNSLRNPVVEKILNQVVNVVNSLIEANSEKDVNGNITKYFRFDEIRIELARDLKKSAGERAEITTSVNAAKIAHEKIFKLLQVEFGVKNPTRNDIIRYKLYEELKNNGYKDLYTNTYIPREILFTKQIDIDHIIPQSKVFDDSFSNKVVIFRKDNLKKGNKTAIDYIATEFSSKELADFEQRIEFLFEQGKKNKEEGINKAKYQKLLKKEADIGDGFIERDLSNTRYIAKKARNMLYEICRVVTPTTGSITNRLREDWDLINIMQELNFEKFKKLGLTEMVEKKDGSFKERIVDWTKRNDHRHHAMDALTVAFTKQNHIQYLNYLNARKNEDHKQHFNIIGIEAKETKIVIDDLGNKKRKFNSPLQNFREEATKHLENVLVSFKAKNKVVTKNKNKTTSATGEKTKVELTPRGQLHKETIYGKYQYYVNKEEKIGVKFNEMLIAKVANPIYKELLMQRLAENGNDPKKAFTGKNTLAKNPIYLDDAKKICIPETIKLTWLEDDFSIRKDITPDNFKDIKVIDKILDEGVKRIVKERLANYNNNPKEAFSDLEKNPIWLNEEKGIAIKRVKISGINNAESLHYKKDHLGNEILDNNQKPIPVDFVSTGNNHHVAIYRDEKGNLQENVVSFYEAVARVNQGLPIIDKSLKAYLGWTFLFTMKQNEYFIFPNEQTDFNPAEIDLLDPKYNKLISPNLFRVQKFSIKDYVFRHHLETSVEDSLKLKNTAWKREGLGGIGNIVKVRINHIGQIVKIGEY

SEQ ID NO: 23060 - protein, 1254 aa, unidentified
  REGION 1..1254: note = Cas Enzyme sequence
DLNEDGTIKKDKAGKEKRSFRAPAEDDWTLLKKKTEYDIEKSKKTVGSYIYANLLKHPDQKIKGGLIRVIERRFYKSELESILRTQQKFHPELNDNNLYKSCILDLYGNNEAHRKSIREKDFTNLFLNDIIFYQRPLKSKKSQISNCKFETRTFIKDGKKEITAIKCIAKSHPLFQEFRLWQWLQNLKIYEKDTDKNVTAEILQNEDDWVNLFDWLNNRKEIDHKALLNHLLKPLKLKVSNYRWNYVYDELKNESKPYPCNETRFQIQSRLDKLKNIPSGFLTKEIEESLWHILYSVEDKIDIEKAINTFATKNGLDNNFIEAFKKFPPFKKEYGSYSEKAIKKLLPLMRLGKYWNEDDFHFQTKERIDRLITGEYDENVRLRVREKSIHLNKISDFKGIPQWLASYIVYDRHSEDGDMIKWKTATDIEQLEQHSLRNPIVEQVINETLKVVRDIWIKYGNGEENFFDEIHIELGREMKNPSNKRREMTNKITENENTNLRIKALLIELFNNGDIENVRPYSPMQQEILKIYEEGVLSAEDGNIPDDILKISKQSQPTSSELLKYTLWLQQKYRSPYTGAIIPLTKLFTREYDIEHIIPQSRYFDDSISNKVICETAVNEDKGNLLGYEYIKAHYGKTIELSQGKKVRIFTIEEYEQFIKDNYSKSRTKMKKLLMDEIPEAFIQRQLNDSRYISKVVKNLLSNIVREDNEQEVISKNIVVCSGVITSKLKQDWGLNDVWNDLITPRFERMNEITNSSRFGEWTNKEGKRVFQTQVPLESQKGFSKKRIDHRHHALDAIVIACTSRNHVNYLNNESALGKITQEEKGRKRYDLKNKLCFKKPNSDGNQNYSWVFHKPWDTFTQDSKEVLSNIIISFKQNLRVINKTVNNFQTWVKDENGTPNKKTIKQTKGDNWAIRKPMHRDTVSGLIQLQFKKSVSLSIAIDTVEMIVDKVLKNKIKALLAQGLDTKAIITFFKENGNTWNNREVTKVDIFYVEKDYVASRVPVDNSFTSKKIESITDTGIQKIMLNHLKSYNLNVNGKIIEQPDLAFSTDGLDELNKNIVEINDGKNHQPIYKVRTYEPKGNKFNVGQTGNKKDKFVETAKGTNLFFAIYQDDNGKRNYETIPLNIIIERQKQGLSSVPDINNFGHRLLFHLSPNDLVYVRSNEEMQLKDKFNFKELDKNQFDRIYKMEKASGKECYFIQHNIANLILPYDAKNKFGEYGSQNKLQISIDGIKIVENCIKLKIDRLGNMYNN

SEQ ID NO: 23061 - protein, 1437 aa, unidentified
  REGION 1..1437: note = Cas Enzyme sequence
MRILGFDIGTHSLATFVRDIALGNILKEQIVYYSVDSFNSGIGNGKSGEYSYAAERSTSKRKRVLNERRRYRNWATLKVLIQHKMCPLTMEELEHWTTYDKKRGLFRQYPIGAVHFERWIRLDFDNDGLPDYSSPYQLRRELMSRQFDFSQEIERFKLGRALYHISQRRGFKSSKGESLKVLEKLMEKNNDFEVNGDSALIEIKKSEEKLSGILAEYMRKYNLPTIGCAFAQLEDEGIRVRNSIYQPVRSQYKDEIVKIFEYQDGLTSEAELLKRLISEKKGEGTIFYKCPLKSQKGSVGKCTLEPNKPRCPISHPKYEEFRAWCFINNIRYRRSASDSWSELSIEDKETIYANIFTSKVRSDFSFKEIRLWIEKHYQIKLHCGENDRTINYKDHLKVPSCPITARLIKLLGNNWEVYCQQGGKERWSHSKNNSTRHNTSYDAYDIWHVCYSSDEDADVISFAEEKLGWDSNMTKQLRLIWGDIREGYAMLSLKAIKNINYFLRKGLGYSNAVMLAKLPDILGRELWMSRVNEYLPQILHVFDNIKQENKKHKTICDITNRLIANYKSLGLSTGVFAYKDYNYTLDESDKKDVLNAITQHIGERTWAKKDTDEQNKILCQVEGLYQSFFNDTKRDYIHAPQLGDKLKEALNTIFGDEFDFGKLYHHSKLSRYSAQYAENTSQCLLGTPNIGAIKNPVALRTLQIIRKKVNALITNNIIDPDDTRVVIETTRSFNDANMRWAIREYQKTRENEHKEIIAALQEFFPNRDFSDKDIDKARFFFEQQEDYDKIYAKNSYTKDIKKYKLWKEQGCICMYTGNVISLSELFSEDVQIEHTIPRSISYDNSLSNLTVCDSYYNRVVKNNLYPTQLPNYEKDIVIDGRTYKAMLPQLKKWEELVERLKDNVAAWKARSRKAIDKSRKDECIRQMHLWQMELDYWGTKLQHFKQEEVSDGFRNRQLIDTGLITRHTAIYLKSLFHNVDVQKGEVTALFRKIFGIQEENEKKNRDFLSHHAIDAMILTLIPVAAKRERMLKLFFQKEEAQGHEKEYFANELYKEIADCHIGGNIEKVVSLIESQLLVNHHSSDKTLIPSKKIIRKRGKTVLFHHKDGSVHPHISTGDSIRASLHKDSFFGAIKYPVKDENGLPMTGNSRFVYDNSDPVMVIRIPVKDIKEKDIEKIVIDPYVRRSISATIAKRMATGQSYKEAINGEFWMLDKDGNEIKYSKNGRKLCPIRHVRCRVKTGLGYMTYKTSLQIKDQLYASNKALVNLTDRSHKKKLYAQNDDNYLFLLYEGVKKGQVVRRSRIVNYYEIALLRQEKTADGTYKINSIEDLLNEPYYNKIEEKSVVYNLSAVIRRKTRLLAWEQSPEELNELSIDELSKRLFVVVKFNNIGSDCLYLKSHIKETEDYDKSTGVVKDFKYMIEGRDFDVDDLGNILFKD

SEQ ID NO: 23062 - protein, 1161 aa, unidentified
  REGION 1..1161: note = Cas Enzyme sequence
NSASGYLGDISDRSKELYFNKMTVGQYQMAQLDKNPNYSLKNQVFYRQDYLKEFEVIWETQAKFHKKLTPELKRLIRDGGISPVSKIHRCGIFFQRPLKSQKGLISFCEFENKQIEVEVEGKKKIKTIGCRVCPKSSPLFQEFKIWQILNNVLVTDLKEKEMRPLFQEEKELLFEELNYKEKLSKAEVLKILFDKPKDFDLNYKSLDGNTTQADLFKLYQDIIIRSGHNIDDFSKDSSKEILKKVREIFNALGINTAILEFDSTLEGEELEKQPMYQLWHLLYSFEGDKSNLGNEKLIEKLQHSYGFDKEYAIMLAGVVFKQDYGSLSTKAIRKILPHLKDGNVYSVACEYAGYKHSKKSLTREELDAKKLKDKLELLPRNSLRNPVVEKILNQMVNVVNGIIDTYGKPDEIRIELARELKKSAKEREELTDVINKTTKLHEDYVKKLQEEFGLSHVSRNDIIRYKLYLELETNGFKTLYSDTYIPKEELFSKRFDIEHIIPQAKLFDDSFSNKTLEARSVNLKKGNMTAYDFVESEYGDVSLNDYKQRIEKMKSKISKTKYDKLLMPEDKIPSGFINRDLRDTQYIAKKAREMLEDIVKFVVPTTGSVTDRLREDWQLIDIMQELNWDKYDALGLTEIIEKEDYEGHKYKIRRINGWTKRNDHRHHAMDALTIAFTKRSFIQYLNNLNSRIQKSIEEKVYLDRVELSDLNKKERVSVMYAIEQKELYRNSKGKLRFNPPMPLDEFRAEAKLALENVLISQKTKNKVVTKNINKAKNKSVTAITIQDGEQKIIKGQMTKTPRGQLHLETVYGSLKRYITKEEKVNASFDVKKIQMVANKGYREALLVRLCEFGGDAKKAFTGKNSLEKNPIWMNEQHSDKVPEKVKIVGFETIYTIRKAVDPDLNVAKVVDVKIKKILEDRLKEFKNDPKKAFVNLDENPIWLNKEKGIAIKRVTIKGVNNAIPLHSKRDKNGNLILDENGNKQPVDFVNTGNNHHVAIFKKPQLDKNGSPIIDENGNPKYDLDEVVVTFYEATNRANKGLPIIDKEHNKSEGWEFLFTMKQNEYFVFPCYDATGNMIFNPLDYDEEWFKNPDNYALISPNLFRMQKFSSHDYWFRHHLETVVTNDIKDLTYKRLMSLPFVTTIVKVRVDHIGQIISIGEY

SEQ ID NO: 23063 - protein, 1440 aa, unidentified
  REGION 1..1440: note = Cas Enzyme sequence
MTILGLDLGTNSIGWALIQKQTNDNSGNILGMGSRIIPMSQDMKDDFGKGNSISQTADRTNFRSVRRLRERHLLRRERLHRILRILNFLPKHYADQIDFDKRFGQFKINTEPKLAYSDKVFIFKQSFEMMLADFRENQPEALKDGKLIPQDWTIYYLRKRALTEKIQKEELAWILLNFNQKRGYYQLRGDEEEDHPNKLVEFHSLKVVDVIADDTQKGKSEIWYSLILENGWIYRRSSKIPLFDWKDKVRDFIVTTDLNDDGSIKTDKEGNEKRSFRAPGEDDWTLLKKKTEKEIINSHQTVGTYIYDALLQNPKQKIKGDLIRTIERKFYKEELSAILRAQQRFHPELKDENLYNDCVRELYRNNESHQRTLSTKGFMHLIVEDLIFHQRPLRSQKSSIGNCSFEYRRYTDKDGIEKTQYLKAIPKSHPLYQEFRLWQWIYNLSVYDKNTDFNVTSEFLNSVEEVELLFEFLNTRKEIEQKPLLKYLLEKQGLKDKELSLAVEKYRWNYVEDKKYPCNETRTQIKTKFEKVVDFDPRFLTTEVERSLWHIIYSVTDKSEYEKSLKTFAQKHHLDVNSFVESFRKIPPFPSEYGSFSEKAITKLLSLMRVGKYWDWDAISEKTKNTIQNILTGEFDETLKERIRNKALHLTDEQHFQGLQLWLASYIIYGRHAEAASADKWNSVADLETYLMEFKQHSLRNPIVEQVVTETLRVVKDIWLRYGNGAKDFFTEIHVELGRDMKNTAEERNRISQQVTTNENTNLRIKALLGELLNDTSIENVRPYSPMQQEALKIFEDGVLNSSVEVPDDILKISKAALPTTTELQRYKLWLEQKYRSPYTGKIIPLNKLFTAEYEIEHIIPQSRFFDDSFSNKIICESSVNKLKDKQLGYEFIKNHSGAIIGLGFGKSTKLFSLDEYVYFINEHYGKNRGKRNKLLLEEIPDKMIERQLNDTRYISKFITSILSNIVRAEVNDDGVNSKNVLPGNGKITSRLRQDWGLGEVWNELILPRFERMNKLTDSTEFTAWSENHQKFLPVIPFQYSKGFQKKRIDHRHHAVDALVIACATRDHVNLLNNKHAKSKERFDLNRKLRVFEKTAYSDPKTDQRIEKEVPKDFLKPWATFTVDAKNHLEMIVVSFKQNLRVINKTTNHHEKWVDRDGVRIKERVSQSNGDSWAIRRPMHKDTVSGIVILDRIKPQKGKILTATRKFIDSSFNIKTIEYITDTGIQKILKNYLESKDNDPEMAFSAEGIEDMNKNISQYNDGKFHQPIYKARIFEMGSKFPLGQSGNKKDKYVEAAKGTNLFFAVYQDDQRKRSFDTVPLNIVIERQKQGLSSVPLDNTKGGELLFQLSPNDLVYVPTEEELSNPSPVGVKNLSKIQIGRIYKMVSSSGNQCFFLKHETATTIVYKGEYSALNKMERSLDGLMIKEVCVKLNVDRIGQIG

SEQ ID NO: 23064 - protein, 1511 aa, unidentified
  REGION 1..1511: note = Cas Enzyme sequence
MTKILGLDLGTNSIGWALVEQDTEDNSGKIINAGSRIIPMTQDVLGKFDSGVSRSQTAERTGFRGVRRIKERHLLRRERLHRVLQVLDFLPQHYANEIDFEKRFGKFKQDNEPKITYEINEKGIHEFIFKSSFNEMVNDFRNTQPQLFDNGSLIPYDWTIYYLRKKALKHKIEKQELAWLLLNFNQKRGYYQLRGEEEEEENKNKLVEFYSLLVTKIEIDDSSGKKDEKWYSFHLENGWIYRRSSKTPLDWVGKVKDFIVTTDLNDDGSIKLDKDGKEKRSFRAPSPDDWTLIKKKTEKEIDNSGKTVGSFIYDTLLLNPNQKIKGKLVRTIERKFYKAELELILKEQIKHHTELQNGELYKACCEELYKLNENHRNSISDKGFVHLFLNDIIFYQRPLKSQKSQISDCKFERRAYLKDGKLEFEPIKCAPKSHPLFQEFRLWQFIQNLKIFKKETDEVVTDKFLNSIEDWENLFDWLNNRKEIDQKAFLKYSGFNLKKNELELYRWNYVEDKTYPCNETRATIITKLEKAAIGVEFLTKEVEESLWHILYSVTDKIELEKALNSFVIKHQLNDNFVEVFKKFPPYKSEYGAYSAKALKKMLPLMRLGKYWSPNAIHTQTIERIEKIINGEYDEKIGTRVREKSYNFTDISQFYNLPVWFTSYIVYDRHSEDGELLKWETPNDIETYLKYVFKQHSLRNPIVEQVIAETLRVVTDIWKHHGNSQENFFDEIHIELGREMKNPADKRKQMTELVSQNENTNLRIKAMLMEFMNDTEIENVRPYSPSQQEILKIYEDGVLSAENEIPEDILKISKLAQPTNAELTKYKLWLNQKYRSPYTGEVIPLSKLFTSAYEIEHIIPQSRYFDDSFSNKVICEEAVNKLKGNMLGLEFIEDKGGTKLEISGSKFVNIFKKDEYEAFVKQNFAKQRSKMKKLLMDDIPEAFVQRQLNDSRYISKVVKNLLSNIVREEGEQETVSKNLLSTNGAITSVLKQDWGLNDIWNDIVSPRFERLNSLTNSTNFGSINSNTGKFLAQVPIELQKGFNKKRIDHRHHALDAIVIACATRDHINYLNNESALGKDKKEVKENKRFDLRHKLCKKKYNEGSDKNYKWVFNSPWNNFAKDAKDILESTVISFKQNLRVINKTVNYYEKLIKDENGKAKKVEVKQTKGENWAIRKPMHKDTVSGLITIQRKKPVSLNKALEDWQNIVDKPLRKKIKELVNLKYDAKLLQKFFKDRENKWDGKDISKVEIYYLDSTNVASRVKLDETFSKEKIEKSVADSAIQNILINHLQLDKYNSQKDEKGKTIAPETLAFSPDGIEELNKNIKVHNNGKDHKPIYKVRTYEPQGNKFAVGYSGNKTEKFVEAAKGTNLYFAIYQDENGKRSYDTIPLNIVIERLKQKLIPVPDINESGSKLLMYLSPNDLVYLPNEDEKLNINAIDFTNLSKEQSANIYKMVSFTGNRAYFISNTVATSIVDKVEFTLLNKLEKSFEGISFKDFCIKLKVDRLGNISIA

SEQ ID NO: 23065 - protein, 1372 aa, unidentified
  REGION 1..1372: note = Cas Enzyme sequence
MTKTILGLDLGTTSIGWALVKEGKDADIIKTGVRIIPLSSDEIQNFEKGKSITTNADRTLKRSARRGLQRYKLRREHLINILISNNLISKESILNEVGNYSTFQTYRLRNLAVSEQIKLDEFARILLMLNKKRGYKSSRKSKGEDEGMAIDGMEIAKLLYEENLTPGQLVAQRFAQGKSSIPDFYRSDLQAEFDRIWNQQKQFYPEFYTDILYEELKGKTKTISAGILRKKGLEGIEFKGKLSEKKRLRFSIRAKAVKQECGLDEISEILPEINQQINQSSGYLGAISDRSKELFFNNQTVGQFLYQQIEKNPHLPLKNQVFYRQDYLDEFNRIWEKQAEFYPETLTSKLKAEIRDTVIFYQRRLKSQKSLLSICEFEGKQIEIDIDGVKKKRIIGPKVCPKSSPIFQEFKIWSQLNNITYSNAGFKKSEDISLELEQMKLLFDELNWKEKLSSTEVIKLLGINGYELNFKEIEGNRTHAAFIKVLNDFFVNEGHDELDLLKMNAKELINTLKQLFPIYNINQELLNFNTNVDGQELEKQVFYELWHLLYSYEGDNSQSGINSLREKLADSKFGFPKESNAVITNISLSQDYSSLSARAIRKILPFLKEGNRYDLACLLAGYNHSHSETKDDLSKKVLLDKLDILPKNELRNPVVEKILNQMINVVNTIFETYGKPDEIRIEMARELKKSAKERENATKAIRQATDEHLKLKRELQAEFGLTNVSRNDLIRYKLYLELKENGFKTLYSNQPIDRSKLFSSEYDIEHIIPQSKLFDDSFSNKTLELRSVNLKKGNDTAYDFIVKEFGEEGLKQYEAKVKALFGNQQGKKSKYRKLLMSETEIPKDFIERELRDTQYIAKKAKDILATVVLHVSTTTGSITEKLRDDWQLVDILKELNWNKYHKLGMTETIENRHGQKVNRILDWTKRNDHRHHAMDAITVAFTKREYVKYFNNLNAKSEKDGEIYKILKTETYVDKDQKRRFNPPMPLTQFRIRAKEHLENTLISFKAKNKVSTVNKNAIKTAKGKKTIIQDTPRGQLHLETVYGSSQYYSSKVEKIGANFDLNKINKVANSKYRKLLQKRLEEHGNDPKKAFTGVNSLSKNPIYLNALETYTLPESVKVVEFETRYTIRKPITPDLKIDKVIDKGIQLILQERLNQHYGDAKKAFSNLEEDPIYLNKEKGQVLKRVTIQGINNAVALHSKKDHFGKELLDVNGNAIPVDFVNTGNNHHVAIYRDENDNLHEEVVSLFEAVTRQNQGLPIIKKHHELGWEFLFTMKQNEYFVFPNEETGFDPSEIDLLDPRNYAKISPNLFRVQKFGSLLSGFWFRHHLETKIDIKSELKGQTYKVIQTTKNLKSILKVRLNHVGSIIQIGEY

SEQ ID NO: 23066 - protein, 1380 aa, unidentified
  REGION 1..1380: note = Cas Enzyme sequence
MKRILGLDLGTSSIGWALINESESPEEESSVVKLGVRVNPLSTDEKGNFEKGRPIGTNADRTLKRSARRNLQRYKLRRESLKEILRENNIMTADTPLTEVGKNTTHQTLSLRARAARERITLDELARVLLAINKKRGYKSSRKARNDDEGIAIDGMSIAKELYEKGLTPGAFVFEQLSLGKKYIPDFYQSDLRREFKKIWTFQAEFHPEDLSEFLLNDILGKNRNQTWAICKEHWNIEGKVVTGTARDKKLERYRLRKIALETKIDLEDLTIVLQEINADMSKSSGYLGKISDRSKKLFFRKITVGEYLFEQLLSNPHNSLKNQVFYRQDYLDEFEQIWETQSRYHKILNDRLKEEIRDTVIFYQRRLKSQKSLISLCEFESWKVKILNKDTGKSRYKLVGRRVIPKSSPLFQEFKIWQNLNNVKFSNHEEKQEIVFTNLDSEIRIAVFNELNLRGNLKSKSVLKIIGAHLEIGKLSNWKCNFDQIEGNKTNEALFNVYQTIAENEGYGFDWEQLAAAEIREELSSVFKDIGVNPLILNFDPLDSHLDGQLHYQLWHLLYSAEDESIVNTEDSLEFGNTSVALKKVLHSKFGFPKPYLTLLSNVVLVNDYGNLSAKAIKNIYPFLKGGMEYSEACEKAGYTHSGSFTRVDLTQKEYKSRLEILPKNSLRNPVVEKILNQMINLINQIIDTYGKIDEIRVELARELKRSAKERQEMTKGIAEATRKNEDIRKLLVSQFGILNPSKNDIIRYRLWDELSSRGYKDLFTDQQIKHEDLFSNKIDIEHIIPKALLFDDSFSNKTLAFKSVNLKKADRTAMDFIDEDHFSEVYNYKERVESLFINGGISAAKRKKLLMHQANLPDGFIERDLRNSQYISKKAREILLEIVPQVLVTTGSITDKLREDWDLINIMKELSIQKYKALGLVTEKERRNGNFVVEIQNWSKRNDHRHHAMDALTVAFTTHKHVQYLNFLNARRDENHKKHNVILGIEQQITHKDERGKRRFIPPITSFRTQAKDSLESVLVSFKTKNKVVTKNINRIRTKNGRTNNYQLTPRGMLHKETVYGKCKLPKTKATRINKKLTLEQVGLIVNKGVKKSLMEHLEKFQNAPEIAFDTKTLKKQPILHNGEPLTEVWCFEEVFTIRKDVAPDLKIEKVIDPKVRKILQDRKRHFNGNAKAAFSDLENNPIWLNESKGICIKRVKIKGVNVAQPLHLAHDHLGRIRLDDQLKYPIPKDFVSTGNNHHVAIYRDRQGKLQEKVMSLFEAVERVNQGLPVLDKIYNEGLGWRFEFSMKQNEMFLLPSDDFNPNEMDLMDPTIYKDISNNLFRVQKIATRNYVFRHHLETTVTNDLDFTFKQFSSTIHLEGIVKVRVNHIGQIVQIGEY

SEQ ID NO: 23067 - protein, 1358 aa, unidentified
  REGION 1..1358: note = Cas Enzyme sequence
MKEPYGVGLDIGTNSVGWTVVDASGHVRKIKGQTGIGVRLFKEGAAAADRRGFRTTRRRLKRVKWRLRLLREFFDQPISKVDINFFARRKYSDISPRDPNYNGLEKTLFNDRSDQDFYHDYPTIYHLREALMTQHRKFDVREIYLAIHHIVKYRGNFLRNDAATAYRSGTLDLQQHFETLNHLFSQADLELNLNLTTDVALLDSIKQTLVRTDISRSDRQKLIMPLLAVLTGATTAEKKRQKAVVTEFAKALVGNKTKIDVLTLTDIDATEAKDWAFSLEENQDKLPGIEDRFSEVGQQIIDEVIRLYASVNLAQLIPEGKRFSQSMVEKYKRHGEDLKLLKAYIRSQSDAKRGRAIRATYDQYIDGVKSKQVTQEAFQKALGKFVDADVDLNSWAAQIKQAIDSEQFMPKLRTKQNGAIPYQVQQNELDQIINNQKEYYPWLGEENPVIKRRGKFPYKLDELVGFRVPYYVGPLITKEMQAATANAGFAWMVRKADGPITPWNFDDKVDRVASATAFIQRMQTTDTYLIGEEVLPARSLIYQRFMVLNELNNIRVDDGQLTPRQKQRLYNQVFKKHKRVTAKNIQDNLVAAGEFPTAPRITGLADPKVFNSSLSTYHDLKQVLPEAMSDVRKQADIEKIILWSTIFEDSTIFKQKLTEISWLTAAQLKQLGQLRYRGWGQLSRKLLTGLKDDNNRSIMDGLWETNANFMQLRSQPAIENQIKSANQANLTTADLQDTINELYTSPQNKKAIREVMVVLADIKDAMHGQTPNWIFVEAARGGGVAGRRTQSRSKQIVAAYQGTAQAIVSDQVQRELKEKIKNKANFNTRLVLYFLQNGRDLYTGDAINIDRLSEYDIDHILPQSLVKDDSLDNRVLTNARINREKNDTFASEKFGKKMGAKWKEMHRMGLMTKRKLDHLLMRPDEISKYATGFINRQLVETRQVIKLVEELINAEYPSTAIVSVKANLTHQFRQTFDFPKIREVNDYHHAFDAALTAFIGTYLLKRYPKLERFFVYGKFAKQPVNLTRFNVIRKLAKTDTPITDIDTGEVLWDKLTDIKYFETLYDYKRLLVTREVSENYGAMFDQTLLKASDNGKRLIRKKQSFDTAIYGGYTGKTLAYMAIVKVSTKKDVQYQVVGVPTTMVTQIEQLEQQGMTNKQAVTKVIEPLIAANNKKMLTYEVLLPKVRFEQVVRDRIKGQTHRFALGTDTYYHNIQELYLPLTLQRAFLGKQNESEVQLNQNLLTVFDATLAQVNRYFPLYEMNKFKKILNSARDQIELLEAKNQFVKNKLVLGKQGILTNMFIGLHANASYGDLKVLGVKTDFGKLQVPGGIKLTGDAEIIYQSPTGLFERKIALKDL

SEQ ID NO: 23068 - protein, 1349 aa, unidentified
  REGION 1..1349: note = Cas Enzyme sequence
MQKILGLDLGTNSIGWAIRDIDEVENQIIDKGVLTFEKGVATTKSGEEPMVKKRTESRSKRRNYQAEKYRKWEMLKCLIENKPKMCPLTIDELNGWRKYNKENGRVYPQRKEFINWLKLDFDGDGKIDFENPYHLRKTAAEKKIDDPSILGRAFYHLVQRRGFRGRDEEESKTIMTGSKETGTIGAEDIHKIMEEQSTTLGGALYYDLKNNGKRIRKRYNLRTDFEAELKAICHLQGIDEGSELFKKLYKAIIWQRPLRTQKGNIGRCTYEPSKQRCPISHPLYEEYRAWCFINNIKIKSASSAGSTFESLSAEHRENVYKKLFFRKSKAHFEFVDIEKLLDPKKNLYVFNYKDNTSISGCPVSAAIKEIFGELEDIRIPHAINEKRSKKKDYYDHEDIWHVLFSFDSKEKLKDFAKVQLKLDNENADKFCKIKPQQGYASLSISVIKKIVPYLRKGFIYSDAVYLANLKKVLGKELTDEETNKIIEGIRLQIKLQKEEKELIGATNNLIAKHLNLETHEGYARYPEYILRQKDYDDIDNELINNFGAKTWDEKNEETKNKYRIRVQELYQAYLQTPVNVEKGLLFNKVPRLDERIKTYLKNEWNAEDENLKHLYHPSETEMYPGAMEKNGKKYLGDPMPLSRGFKNPMAMKTLHHLKRLVNYLLDQDKIDENTRIVVEIARELNDANRRKAIERWQGYRQKQNKEYHEAIKEIIEKHGLNIDPSKDDIIDKYRLWIEQERQCLYTGKVINCTELFDGTKFDFEHTIPADISFDNELKNLTIADSKYNREIKQKRIPTDLPNYERDTTIGDETYTAIQPRLKFMEEKVEHFEKQVEFWKNESRKAGTKDRKDFSIQQKHFNQFELDYWKKKLDTFTITEYKVGWRNSQLRDTQIITKYALPYLKTVFNKVEVQKGIITAEFRKIFNVGFEKDRSKHTHHAVDAAILTLIPSAVMRDKLLKAHFEAVENNTRFHSLPPEWKNYNSQFIKNIEEETLINYINQDRTLVPTVKHVRKRGRIQYVKEKLPNGKWVYKLDDLGKKIPLIAQGDSIRGKLHKETFYGSIKKPSEGSITFVERILLKEIEEKNIDKIVDQKVKEVIRDTVKERINSGKSFKEAISEDIWMIGKNGKPKKVDKNGNRIFPIRHVRCEVKVGQGSLTEEKALEIKQHIFKSKHEYKQSYYALNETMSVCLYYEGTTNNKTQKAFRFIGLFELAQYKLRNLSDIISISEFQYCEVGRGMNKNLIPLCFLITSGTHVLIYSNNPDEIKELNKTGMLKRLYRIYKFNKAPSPYVYMQHHTEARPDPELGLGQTKIDINKYQPRLKLVANNFNCLIEGKDFEIKPDGEIILR

SEQ ID NO: 23069 - protein, 1519 aa, unidentified
  REGION 1..1519: note = Cas Enzyme sequence
MKKILGLDLGTNSIGWALVDLLFEEKIGAIQGMGSRIIPMSQDVLGKFDSGISISQTAERTGYRGVRRLLQRDLLRRERLHRVLNILGFLPTHYADSIDFEERCGQFKKETEPKLVYTIGENGKHQFLFMDSFLEMIEDFKTTNPNLLAEGKKLPLDWTIFYLRKKALTDKIKKEELAWLLLNFNQKRGYYQLRGEDDKADNSKLEEFHTLVVSDVIDTNEKNKLGLSLYKIVLENGWEFIKPSRNHVDWKGKVKEFITTTEMAEDGTTPKKDKEGKVKRTFRSVDSEIDWVAIKKKTEIDITQSRKTVGCFIYETLLHNPTQKINGKLVRTIERQFYKDELNAILKAQIEFHPELKNLELYTACIEELYPCNEAHKNNIKQRDFTYLFLDDIIFYQRPLKSKISQISDCPFETKQFIKDGKEQVLPLKCISKSHPLFQEFRLLQFLKNLKIFEREKSVNGKLLFDTDITGELLQTEKDWEALLHWLNDKYEITQKQLLAYPKFKLKEDKYRWNFVEDKTYPCNETRGVFLNKIAKIKEINPAFFDEKNTEDLWHILYSVTDKIEIVKAITAFATKHGLPDQFITIFSKLKPYDKEYGAFSAKAIKKLLPLMRLGKIWNKEAIDDNTKTRIDKILTAEYDEKIKNRVREKAIHLTSVNDFKGLPLWLASYIVYDRHSEASDIAKWKTPSDIDNFLKNEFKQHSLRNPIVEQVITETLRVVKDIWIQYGESKENFFDEIHIELGREMKNPADKRKRMTEQISQNENTNFRIKALLTELKIDGVSDVRPYSPNQQEILKIYEEGVYQFENRKDKLEEVDKIRKSAKPTKGEIIKYKLWLEQGYVSPYTGKTIPLNLLFSTKYEIEHIFPQSRFFDDSISNKVICECEVNKLKDNKTAFEFILHHKGSIVELNGGGSVKLFTKEEYETHIQRYFSKNKIKQKNLLSEEIPESFINRQLNDSRYISKVVKTLLSKIVRVEENGELEQEATSKNIVTVNGAITSRMKQDWGLNDVWNEIITPRFERLNVITNSNDFGNWENKSGKQVFQTTVPDEIAKGFSKKRIDHRHHALDALVIACLTKDHVNYLNSINSERKNYSLVSKLRQQVEEIRARADKNGNKYEEKITIAKNFIKPWETFTQDIKEKLCQTVVSFKQKTRVINKTNNKYQKWITDADGKMKKEIIGQTKGDNWAIRKPLHKETVYGKVMLKKEKESPVSLNNAIEKIDLIVDNKIKAVVREKAAFCKNNIAELKKYFKNNPIVIDDITVDKVKIYEQISGTASRVRLDISFDKKKIESITDSGIQKILFAHLAQDKYQNKLDENGKHISPQELAFSEDGLDEMNKALENHKPIYKVRIYEQGNRFTVGQTGNKKDKYVEAGKGTNLFFAIYQNKRGERNYKTIPLNEVIESQKIGLPNAPETDENGNQLLFTLSPNDLVYVPTEDEKAGTVDFKNITKDKAKRIYRMVSCSTYQAFFILTSVATSIVDKKEFSVLNKMEKSLDGIMIKAVCIKIKVDRLGNITKA

SEQ ID NO: 23070 - protein, 1510 aa, unidentified; identical to SEQ ID NO: 22267
  REGION 1..1510: note = Cas Enzyme sequence

SEQ ID NO: 23071 - protein, 1436 aa, unidentified
  REGION 1..1436: note = Cas Enzyme sequence
MKRILGLDLGTNSIGWALVNEAENKDERSSIVKLGVRVNPLTVDELTNFEKGKSITTNADRTLKRGMRRNLQRYKLRRETLTEVLKEHKLITEDTILSENGNRTTFETYRLRAKAVTEEISLEEFARVLLMINKKRGYKSSRKAKGVEEGTLIDGMDIARELYNNNLTPGELCLQLLDAGKKFLPDFYRSDLQNELDRIWEKQKEYYPEILTDVLKEELRGKKRDAVWAICAKYFVWKENYTEWNKEKGKTEQQEREHKLEGIYSKRKRDEAKRENLQWRVNGLKEKLSLEQLVIVFQEMNTQINNSSGYLGAISDRSKELYFNKQTVGQYQMEMLDKNPNASLRNMVFYRQDYLDEFNMLWEKQAVYHKELTEELKKEIRDIIIFYQRRLKSQKGLIGFCEFESRQIEVDIDGKKKIKTVGNRVISRSSPLFQEFKIWQILNNIEVTVVGKKRKRRKLKENYSALFEELNDAEQLELNGSRRLCQEEKELLAQELFIRDKMTKSEVLKLLFDNPQELDLNFKTIDGNKTGYALFQAYSKMIEMSGHEPVDFKKPVEKVVEYIKAVFDLLNWNTDILGFNSNEELDNQSYYKLWHLLYSFEGDNTPTGNGRLIQKMTELYGFEKEYATILANVSFQDDYGSLSAKAIHKILPHLKEGNRYDVACVYAGYRHSESSLTREEIANKVLKDRLMLLPKNSLHNPVVEKILNQMVNVINVIIDIYGKPDEIRVELARELKKNAKEREELTKSIAQTTKAHEEYKTLLQTEFGLTNVSRTDILRYKLYKELESCGYKTLYSNTYISREKLFSKEFDIEHIIPQARLFDDSFSNKTLEARSVNIEKGNKTAYDFVKEKFGESGADNSLEHYLNNIEDLFKSGKISKTKYNKLKMAEQDIPDGFIERDLRNTQYIAKKALSMLNEISHRVVATSGSVTDKLREDWQLIDVMKELNWEKYKALGLVEYFEDRDGRQIGRIKDWTKRNDHRHHAMDALTVAFTKDVFIQYFNNKNASLDPNANEHAIKNKYFQNGRAIAPMPLREFRAEAKKHLENTLISIKAKNKVITGNINKTRKKGGVNKNMQQTPRGQLHLETIYGSGKQYLTKEEKVNASFDMRKIGTVSKLAYRDALLKRLYENDNDPKKAFAGKNSLDKQPIWLDKEQMRKVPEKVKIVTLEAIYTIRKEISPDLKVDKVIDVGVRKILIDRLNEYGNDAKKAFSNLDENPIWLNKEKGISIKRVTISGISNAQSLHVKKDKDGKPILDENGRNIPVDFVNTGNNHHVAVYYRPVIDKRGQLVVDEAGNPKYELEEVVVSFFEAVTRANLGQPIIDKDYKTTEGWQFLFSMKQNEYFVFPNEKTGFNPKEIDLLDVENYGLISPNLFRVQKFSLKNYVFRHHLETTIKDTSSILRGITWIDFRSSKGLDTIVKVRVNHIGQIVSVGEY

SEQ ID NO: 23072 - protein, 1313 aa, unidentified
  REGION 1..1313: note = Cas Enzyme sequence
WRLKLLREIFDSYITPVDEAFFIRLKESNLSPKDSKKQYSGDILFNDRSDKDFYTKYPTIYHLRNALMTEHQRFDIREIYLAIHHIVKFRGHFLNATPANNFQVGKLDLDQKFEDLNDIYQRVFPDDSIEFRIDNLEQIKAVLLDSKRSRSDRQRSLVDDVYQTSEDKEVEKQNKAVATEVLKAILGNKAKLNIIANVEVDKEAAKEWTITFDSESIDDDLAKIDGQMTDDGRAIVEILRSLYSGITLSAIVPENHTLSQAMVAKYDLHKKHLTLLKKLINSMTDTKKAKNLRAAYDGYVDGVKGKVLTQDEFYKQIQSNLDESVEASEIQTYIDQDIFMPKQRTKANGSIPHQLQQQELDQIIENQKEYYPWLAELNPNPDKKRQQLAKYKLDELVTFRVPYYVGPMITAEAQKKQSGAEFAWMIRKESGNITPWNFDQKVDRMATANQFIKRMTTTDTYLLGEDVLPSQSLLYQRFEVLNELNKIRIDRKPISVELKQQIFNDLFKKFKNVTIKHLQDYLVAQGQYSKRPLIEGLADEKRFNSGLSTYNDFCGIFGAKLVDENDRQADLEKIIEWSTIFEDKKIYRAKLNDLAWLTDEQKDKLATKRYQGWGRLSSKLLIGLQNSEHRNIMDLLWIGNENFMQIQADSDFAKLIKDANQNALQNNDSQDVINDLYTSPQNKKAIRQILLVVHDIQNAMHGQAPTKIHVEFAKGEERNPRRSVQRQRQVEAAYEKASNELVGANVREELKDAITNKRDFKDRLFLYFMQGGVDMYSGEPINIDNLSRYDIDHILPQAFVKDDSLNNRVLTDAEKNRRKSDAVPNELFGAKMRVTWERMKEQGLISKGKYRNLTMNPENINKYTENGFINRQLVETRQVIKLAVNILADEYKENTQIISVKADLSHQMREDFELLKNRDVNDYHHAFDAYLAAFMGNYLLKRYPKLRSYFVYGDFKKFTQKEIKLRRFNFIYDLKHEDQVIDKETGEILWNKNEDIAYIRHLFAYKKILISHEVSERRGALYNQTVYKASDDKASGQGSKKLIPIKSDKPTEIYGGYTGRTLAYMTIVKVTKGKKISYKVVGVPTAVLAKMAGVRQGSQEEQDKLYDVLKPQFTHQKENKKTGEITETVDKFDIIVPKVKYQQLVNDNGQLFMIGSDTLPYNAEQLVLSKESVQTINNPGIKDEGSDEESENKKLDNVYDEIVLCMNKYFPLYDNRGFRNSITNGKNKFLKLPIKNIYKNGKLINVGKREVINRILQGLHANASVTDLSNLGIKSPFGFLQKGAGLSLSGEAQLIHQSATGLFEHRVQLNKIK

SEQ ID NO: 23073 - protein, 1377 aa, unidentified
  REGION 1..1377: note = Cas Enzyme sequence
MKKILGLDLGTTSIGWAYVKEAENEKEKSSIVNTGVRVVPISTDEENDFKKGNSITINADRTLKRGARRNKFRYQLRRKALIDELKTINFINDKTKLTETGKNSSHELLSLRNKAVSEKLKKDEFARVLLSINKKRGYKSSRKANNSEEGELIDSMDITKKLYDHNLTPGEFSFTLLEDGKKSLPDYYRSDLENEFNKVWNHQKKYYPEALTADLFKDVEGKNKNQTWKICEKPFSIKGIKIDGNKAEKKLETYKLRKLALSEKIGLEHLAIVLQEINNEINKSSGYLSEISDRSKNLHFNNMTVGAYQYKQIAKNPHNSLKNQVFYRQDYLNEFQKIWEKQAEFYPELTNELRDKIQNEIIFYQRRLKSQKGLISYCEFESWEQEVILDGEKKNKIVGHRVVPKSSPLFQEFKVWQNLNSVRITDIKTNEVYQIEEETNKELFQTLNWTDKLTDKQFLKELGLKPNDWKINFKTVEGNRTNYNLLRAYKEILRIEGYDNIDYSKIDGVDLIDILKKCFDEIGINKEILEFNSTLKGDAFSKQESYELWHLLYSYEDDFTRTGTESLEQKLKSTFGFKDEHLHYLINISFQDDYGSLSARAIRKILPYLEDGKLYSEACELSGYNHSNSITKKQNEERELKPKLEILKKNSLRNPVVEKILNQCINVVNAIVEDSEMGRPDEIRIELARELKNTKEQRSEMTKAIGRATKDHERYREEIKSKFGLPYVSRNDLIRYKLYKELETNGYRTLYTNEYIKPEDLFSKKYDIEHIIPKSRLFDDSFSNKTLETRESNLDKGGETALDFVGRKYGKEGLEKYRKRVEELFKAGKIKYSKQSKLLMSLNDIPEDFLNRDLGTSAYIAKKAAEILLDITRRVSLTSGKITSKLREDWGLIQVMQELNWDKYEKVGLTYYKENKEGKKLPRIKDWSKRNDHRHHAMDAITVAFTKPGIIQYLNNLNAKSNKEIYKLENAYTYKDERGKRKFIAPFPTIRKESKEQLSQILISFKTKNKVTTKNKNKINVEGDNKFKYQTVETPRGQLHKETIYGKSQYYETKLEKVGGKFDQEMIGLVASKTYRKALLKRLGEFENNSKIAFTGSNSLTKNPIYINGTQETVPDKVKMAWLEGRYTIRKEVTPDLKLDKVIDEGIKTILKKRLKEFNDKSKDAFANLDKNPIWLNKEKGIKIKRVKITGVSNAEPLHHAKNHINEELIDKHGDSVPTDYVSTGNNHHVAIYKDDKGNLQEEVVSFYEAVTRKNIGLPIINKQHEKGWEFLFTMKQNEMFVFPNDEKDFDPNEIELLYSTKQKLVSENLFRVQKISTKNYMFCNHLHSLAITGDDLKNKKMLSGNIYHFIQTPEKLNKIIKVRLNHLGQIVKIGEY

SEQ ID NO: 23074 - protein, 1214 aa, unidentified
  REGION 1..1214: note = Cas Enzyme sequence
MKKILGLDLGTNSIGWAVVCHSDTDGQTERKWIEMAGSRIIPMDAAILGDFDKGNSKSQTSERTGFRGIRRLRERVLLRRERLHKVLKLIGFLPQHYIDSLDFSNHSGKFQLGTEVKLPWRKNEIGKYEFLFQNSFNEMLADFAKKQPELVAMGRKVPYDWTIYYLRKKALSEKITKEELAWILLNFNQKRGYYQLRGEEEEEKKNRLEDFYALKVVEVEQTDDKKGKDIWYNVHLENGWIYRRSSNVPLDWKDKIKEFIVTTELNEDGTPKVDKDGCVKRSFRMPKEDDWKLLKKKTEADIERSHKTIGCYIYDTLLQSPQQKIKGKLVRTIERKFYKDELKLILDKQQAFHPELQDRELYKACLDVLYPMNVAHKNNVANRGFVYLFMEDILFYQRPLKSKKSLIDNCPYEENQYIDVTTGEIKKAPIKCIAKSHPLYQEFRLWQFIANIRIYQKEKKVDGKLLTDIDVTTEYLSSKDDYVALYEWLCVRKEIEQKTFLKYPAFGLKKEIENYRWNYVEGKSYPCNETRSLILHYLEKAGISSTFLSTKIEESLWHILYSVEDRIELETALRTFASKYQLSCNFVEVFKKFPPFKKEYGAYSAKAIKRLLPLMRMGKYWKVDAIDGNTAERIEKILSGECDEKILNKVREKTIHLSETSDFQGLPLWLACYVVYNRHSEGKEVAKWKSPEDIDIYLKSFKQHSLRNPIVEQVITETLRVVRDIWKRVEQIDEIHVELGREMKNPSEKRRQMTERMLENENANIRIKALLTEFMNPEYEMENVRPYSPSQQEILRIYEDTVLNGAGDIPEDIEIILKKFKENDIKKRPGKSDFLRYKLWLEQQYRSPYTGEIIPLGKLFTTAYEIEHVIPQSRYFDDSFSNKVICESEVNKLKDNMLGYEFIKKHAGEIVELGFGKSVKIFSVEAYERFVGENYYKAGSKKSKLLMDDIPEKFIERQLNDSRYISRVVKGLLSNVVREEDANGEYESEAISKNVIVCSGSVTDRLKKDWGVNDVWNNIVYSRFERLNRLTESQQFGHWENREGKRFFQTELPLEYQKGFSKKRIDHRHHAMDAIIIACATRNHVNYLSNESASKHARIARYDLQRMLCDKSKADGGGNYKWIIQKPWATFTQDVYRTLLDIIVSFKQNLRVINKMTNYYQAYDDAGKKVFKKQKKGDSWAIRKSMHKDTVFGQVNLRKIKEVRLLLLWKVQKK

SEQ ID NO: 23075 - protein, 1509 aa, unidentified; identical to SEQ ID NO: 22279
  REGION 1..1509: note = Cas Enzyme sequence

SEQ ID NO: 23076 - protein, 1390 aa, unidentified
  REGION 1..1390: note = Cas Enzyme sequence
MKKILGLDLGVASIGWAIVNEAENKNERSSIIKTGVRVNPLTTDEQTNFDKGKTISGAADRTKSRSTRRNLQRYKLRRDNLIELLKENSIISDNFIFSEDGNETTFKTYRNRAIAATKKIELDEFVRVLFIINKKRGYKSSRRAKSEDEGQLIDGMEVAKLLYENELTPGQFVYDLLKKDRKYIPDFYRSDLHNEFDKIWNFQKQFYSNFLIDALYEKLKGLKKLATKDVLLKTLKIEPLELKGKWNEKRLQRYELRNKATSTQLNIQEVVETLIEINGEINNSSGYLGAISDRSKELYFNKQTVGQYLYAQLETNPHTSLKKQIFYRQDYLDEFNTIWETQAQFHKALTKELKSEIRDVIIFYQRKLKSQKGLISFCEFEQKPIEVEIDGKKKIKIRGSRVIPRSSPLFQEFKIWQTLNNLEVTDKTTKQKFKLEIEDKLKLFDELNIKPKLSKSEILKLLYKKPTELDLNFKDVDGNRTNASLFDAYAKIIDLSGNGEHDFAKMNSVDIKEIVSKVFTMLNINTKILEFDSAIDGNDFDKQLHYKLWHLLYSFEDDNSKTGTEKLITALKDKFGFEKEYAIIIANIHLQNDYGSLSAKAIRKILPYLKEGNKFDIACTYAGYNHSKKSLTKEEKENKVYRPKLDILPKNSLRNPIVEKILNQMINVVNTAIEEYGKPDEIRIELARELKKSSEEREKQDESMRKSKDDHDKYRKTLHTEFGLAHVSRNDIIRYKLYLELKDNGFKTLYSNTYIAPNELFSKNFDIEHIIPKAKLFDDSFSNKTLELKSVNTLKADFTAIDFINEKYTNDLEDYKNRVEFLFKSFKISKTKYKKLLMVGSEIPSGFIDRDLRDTQYIAKKAKEMLEDVFKEVNTTTGIVTDRLREDWQLVDLMQEINWENYKVLGLTEEFTNRDGQVIKRIKDWTKRNDHRHHAMDAITIAFTKRSHIQYLNNLSARSDKSSSVYGIEKNELYRDSRNKLRFKPPIPLDDFRAEAKYHLENTLISIKSKTKVVTKNKNSIKIKNGKNTKIELTPRGQLHLETVYGNTKKQVAAIESVNGSFDIEKIEKISNKEYREALLKRLSEFENNPKIAFAGKNSLDKKPIYLNDLQTNRVPEKVKLVWTETIYTIRKDISPDLKIDKVIDKNIKNVLETRLKEYKDDAKAAFSNLAENPIWLNKEKGICIKRVTISGISNAVALHSKKDKDGNLMLDKNGNQIPIDFVSTSGNHHSAIYIDENEKLHDTVISFYETVQRVNQDLPIIDKLYKQSEGWKFLFSIKQNEYFVFPNEQTGFNPKEIDLLDEKNYALISPNLFRVQKFSKVEYGNSSVRDYVFRHHLETVVQRKNKDEKPIDEKPLREIIYKQFKSIPDFNKMVKIRINHLGKIVKIGE

SEQ ID NO: 23077 - protein, 1523 aa, unidentified
  REGION 1..1523: note = Cas Enzyme sequence
MKKILGLDLGTNSIGWAVVNGEESSDGLTLTGIKAAGSRIIPMSADQMGDFEKGNSVSQTRERTGYRGTRRLRERFLLRRERLNRVLGIMNFLPEHYASSIDCYGKFIKGTEPKLEWKKDEGGRYEFIFQKSFDRMLEVFRSTHPEIVTGRRIPADWTLYFLRKKALTEKISKEELAWLLLNFNQKRGYYQLRGEEEEVDLTKREDYMKLEVIAVEDTGERRGKAIWYNIRLNNGLIYKRTSEQPLDWVGKSKEFIVTTQLEKDGSVKLDRDGEPKISIRLPKDDDWTLLKKRTETDIENSEKTVGEFIFDNILINPDIKIIGKLVRTVERKYYKSELKRILEKQAEFHEELTDPELYASCVKALYQNNEAYRNSIAGKDFVYLFSDDIIFFQRPLKSKKHLISDCPYENRKYINAQTGEMMTSPIKCIAKSHPLFQEFRLWQFVCNLKIYTNDGNNTDVTSQYLSMPADWESLYDWLNDKKEIDQATLLTKYFGFKKKGDRLPFRWNYVEDKKYPCNKTRAAIIAKIDASELHELTPELTAKIWQLLYSVRTKEEIDAVFSDQKIGRNGIYDELLKRFSESSISRLKSVKFEEEDYGSYSEKAIKKLLPLMRIGKYWNADNIDSDVQKRIDRILSGEYDKNIDDNVRDKVALLNDIEDFQGLPLWLACYVVYGRHSEGRDTGKWKTPEDIDIYLSAFKQHSLHNPVVEQVVTETLRTVRDIWRNTGSIDEIHVELGRELKCTGEQRARMTSRIVDNENTNQRIRTLLREFMNPEYGVKDVRPYSPVHQEIMKIYEDGALSNDVKKDEEIDDIRVRLSSADTTRRPSRSDIIKYKTWLEQNYCSPYTGQPIPLAKLFTHEYEIEHIIPQSRYFDDSLQNKVICEAEVNRLKDRQLGYEFIKSHHGEVVTLTGGRTVTILSVEAYESFVKKTYAGNRAKMQKLLLEDIPDEFINRQLNDTRYISKFIMSLLSNIVREEIRTGEFEKEGVSKNLIVCNGSITTRLKKDWGINDVWNSVILPRFVRMNEICKTDGFTTLNTEGHQIPNMPEGLMKGFNKKRIDHRHHAMDAIVIACTTRSHVQLLNNEAAKSGNKTLRHQLSRKLRRYEKVLINGKEQDVAKEFIKPWPTFVPDVKKALDGIIVSFKQNLRVINKATNVYESYRDENGNLRLDKNGNIVKVKVAQKSNPDWWAVRKPLHKDTVFAKVALRKIKEVRLGVALQNPDDIVEKELRDEIKRLLGLGYDEKRMKKYFAEGENKDIWAEFNPCKVKVYYFTDDTFAVRKSLDETFDEKKIRTSVTDTGIQKILLGHLSENGNDPKVAFCADGLERMNANLQRLNGGRLHKPIYKVRVYEHASKFAIGSTGNKKDKYVEAAKGTNLYFAIYADQNGDRSFETIPLNEVIDRMKKGGSPVPEVNPVGNRLLFYLSPNDLVYVPMNEEFEKNEVCSEKSNERIYKMVSAQSGQCFFINSSVSSPIVNKIEFSSANKMERAMTGEMIKEVCIPLKVDRLGNITYIGKEFLPKRKG

SEQ ID NO: 23078 - protein, 1063 aa, unidentified
  REGION 1..1063: note = Cas Enzyme sequence
MLMKRLAENPNASLKNIVYYRQDYLDEFECIWETQRKYHNELTQELKKEIRDIIIFYQRELKSKKSSISLCEFEKREVEVSIDGTTRKKITGCRVCPKSSPLFQEFKIWQMLNNIRVCDTETNETWPLDIEEKDVLFKELNIKQKLSKNEILKILYRNSKHLDLNYKEIEGNRTLFALVNACQSIIVATGHDEYTFSKMRASEIYEIIHRIFGAVGFNTNFLHFDSNCKNLEEEPMFKLWHLLYSYTDDKSKTGNESLINKIRELTNMDEECARILANISFMDDYGSLSSKAIRKILPHMQEGNEYSVACMYAGYNHSHSLTKEELLNKVYVDTLELLPRNSLRNPVVEKILNQMINVVNAIVKEYGKPDEIRIELSRELKSNAKERKRATEAISEANKKNETVRKILIEKFGIKNPSRNDIIRYRLYEELEKNGYHTLYSNTYIPQEELFTNRFNVEHIIPQACMFDDSFSNKTLEAMDINIEKGKETAYDYVLAKYGNEGMAQYKARIDYLYNAGAIRKSKRDKLLMQGKNIPNGFIERDLRDTQYIARKAHEILERLVPHVISTTGQITERLREDWHLIDVMQELNWHKYHELGLTETIVNRENKEIRRIKEWSKRNDHRHHAMDALTIAYTKRSIIQYLNNLNARDDKNGEIYGIERKELERDAHGKLRFKLPFKNFREEAKIALEGILISIKSKNKVVTKNTNKTKSKNGGTKKRTQLTPRGQLHLETIHGSIQRYATYEEKVGSSFNAEKIAKVANKREREALLARLNEFYGDAKKAFTGKNSLEKNPVYLDAARTAAVPIKVKLVELETVYTIRKSIDKDLNIEKVIDKRIRKILESRLKEYGNDSKAAFSNLDDNPIWLNKEKGICIKRVTISGIANAVSLREKKNHNGDYILDEHGKRQPVDFVNPGNNHHVAIYIDEDGNYQENIVSFFDATARAINEQPIIDYEYNSEMGWKFCFTLKQNEYFVFPNEKTGFNPEDIDLTNPKNYHLISPNLFRVQKLSSKDYWFRHHLETTVEDNKVLKGITWKRIRTLQELKGAIKVRINHIGQIVQIGE

SEQ ID NO: 23079 - protein, 1402 aa, unidentified
  REGION 1..1402: note = Cas Enzyme sequence
MKRVLGLDIGTTSIGWAFVNEAENEKEKSSIKKLGVRVIQYDDNLKVVDRKTGKVSDSKNPSKDFEGGKGLSPNAGRTQKRSARRNLDRYQLRRAALIKVLKENNFISNNSILNESGKQTTFSTYKIRAKAAHTQVSKEDFVKILLMINKKRGYKSSRKTKNQNEGESIDGMDVARYLYENNLTPGEYVYKLLLEGKKYLPDFYRSDLQNELDRIWEFQKTFYNNVLTDELKDEIKGKNKGATWKICEKQFEIKGIKQKGSRNEQKLERYYWRSTALRTKLDLEQFTIVLQEINSQINNSSGYLGAISDRSKELYFNNKTVGEYLYKQLKLNPQAKLKNQVFYRQDYLDEFEKIWEKQKEFYPELTEKLKSEIRDIIIFYQRPLKSQKGLLSFCEFESWEEEYFDENLGKKKTRIVGHRVIPKSSPLFQEFKIWQILNNVEIVNKTTGEILRLDQESKHNIFKKLNTVEKLSESEFLKFVFSKSKNYEVKNYKFIEGNRTNAALYNAYQKILEFEGQDFDFVKMEIDTVNKIIKDKFNELGISTEILNFDSEIEGNDFDKQPSMQLWHLLYSFVEDKSKLGNEKLLEKLNNKFGFNKKYAKLIEKIPLQADYGSLSARAIRKILPHLKEGNTYDTACLLAGYNHSSSLTKDEIKSRKLKKYLELLPKNSLRNPIVEKILNQMVNVVNAIIDDAELGKPDEIRIELARELKKNADERKRMTEGINKATAEYEKIRKILHDDFGISKVTRNDIIKYRLWKELESYGYKTLYKKIYIPKEELFSNKFDIEHIIPQSKLFDDSFSNKTLSLRQVNIDKGNKTAYDYLKNELSDEEFEKYLFRIEKLMKEGKISKAKYNKLKMKGSNIPDGFIDRDLRNSQYIAKKAVQMLNEVFRKVNTTTGSVTKRLREDWQIINVLKELNLPKYEKLGLVKSIEGKNGQTEKNIIDWTKRNDNRHHAVDALIVAFTLPAHIQYLNNMNARGNKKHKKYHEVYGIEQKYLYKSDKNRLLFKPPIPLQQFRADAKNHLESILISFKAKNKVVTRNKNKIKVKGKNNYKTKIELTPRGQLHKETVYGKIERYKTKLEKVGTTFNTEKIKLVSNQKYRKALLFRLKNNNGDAKKAFGGKNSPSKTPIYLDKSETIKLPEKVKLVWKEEQFTIRKEITPDLKIDKVIDIGIKRILQNRLDDFNGDAKKAFVNLEENPIWINKERGIAVKRVTISGVINAIPLHYKKDHNGNFILDEEGNKLPVDFVSIGNNHHVAIYRDEEGNLQDEVVSFYEAVHRVKQGLPVINKNKNGYKFLFTMKQNEYFVFPSEDFDPNEIDLLNPDNAPIVSPHLFRVQKFSRVEYGNSVVRDFVFRHHLETQLIDRKETKNICYKQIKSLGKLKGIVKVRINHLGKIVRVGE

SEQ ID NO: 23080 - protein, 1504 aa, unidentified
  REGION 1..1504: note = Cas Enzyme sequence
MKNIVGLDLGTNSIGWAVVNGSVNDDGSEQLVKIQASGSRIIPMDAAMIGDFNKGNSISQTAERTRLRGVRRLSERYLLRRERLHRILDILGFLPFHFAQDLDRHGKIVKGKEPKLAWRKNEAGQFEFIFQDSFKEMLEDFKLNYPNLITDDKKVPYDWTIYYLRKKGLTSKISKEELAWILLNFNQKRGYYQLRGEEEEENKDKLVEFYALKVVAVEDSGEKKGKDIWYNVHLENGWVYRRTSNMSLDWVGKTKEFIVTTDLEKDGTPKKDKEGNVKRSFRAPKEDDWSLVKKKTEADIDQTHKTVGAYIYDTLLGNPSQKIRGRLVRTIERKYYKEELKLILEKQKEFHLELQDRALYAACIEELYPINEAHRNNVGNRDFTYLFLEDILFYQRPLKSKKSLIDNCPYEENQGLDKETGEIKSFPVKCIAKSHPLFQEFRLWQFIINLRIYRKDLAQDVDVTNELLKTEEDYVALFDWLNGKKEIDQKAFLKYPVFGLKKEIENYRWNYVQDKPYPCNETRSLMLARLEKCDISIEFLTKENEEALWHILYSVEDKNEIVKALQKFADKHDLNASFVDVFQKFPPFKKEYGSYSAKAIKKLLPLMRMGKYWSENSIDKGTRERIDKIITGEYDEKIENRVREKAIHLADVSDFKGLPLWLVCYIVYGRHSEAKEIIQWKSPADIDSYLRSFKQHSLRNPIVEQIIIETLRVVRDIWKQVGNIDEIHVELGREMKNPADKRKKMTQQMSENENTNLRIKYLLTEFLNPEYEVENVRPYSPSQQDILRIYEEGVLNSVSDLPEEISDILKKFTETDLKKRPSRSEVLRYKLWLEQKYRSPYTGEVIPLGKLFTPAYEIEHVIPQSCYFDDSFSNKVICEAEVNKLKSNLLGHEFIVKHHGEIVELPFGKKVRIFTVDEYEQFVKDNYSRTRSKMKKLLMDDIPEEFVTRQLNDSRYISKVVKSLLSNIVREKGEEEAISKNVIPCTGGVTDRLKKDWGINEVWNKIILPRFQRLNELTGTNKFTTKNVGIQEIPTMPLELQKGFNKKRIDHRHHAMDAIIIACANRNIINYLNNESATAKAELSRYDLQKMLCDKAKTDNNGNYKWVIRKPWASFTQDTYLALENIIVSFKQNLRVINKATNRFLHYNEEGKKIFVKQGKGDNWAIRKSMHKDTVFGEVNLRRIKTVALNEAMKNPQSIVVKDFKRKLLELWNLGFDAKRIKKYFEDNRETWSDINLSKIEVYYFSKDTKDRFFATRKPLDTSFDRKKIENNITDTGIQKILLRHLELKDNNPDIAFSPDGIDEMNRNIIQLNNGKYHQPIIKIRWYEQADKFAVGQTGNKSSKFVEAAKGTNLFFAVYESNILDKKTNTIIKKRNYATIPLNVAIERQKQGLPVAPEDENGNDPIFVLSPNDLVYLPTDDELANGIIAQPLDRGRIYKMVSSSGEQCFFIKHIVANVLVDKFEFSPLNKMERALTGEMIKMICIPIKVDRLGNVLESSSSYKK

SEQ ID NO: 23081 - protein, 1504 aa, unidentified; identical to SEQ ID NO: 22942
  REGION 1..1504: note = Cas Enzyme sequence

SEQ ID NO: 23082 - protein, 1510 aa, unidentified; identical to SEQ ID NO: 22277
  REGION 1..1510: note = Cas Enzyme sequence

SEQ ID NO: 23083 - protein, 1508 aa, unidentified
  REGION 1..1508: note = Cas Enzyme sequence
MRTILGLDLGTNSIGWAVINSVIKEQTERIWIEMAGSRIIPMDAAILGDFDKGNSVSQTAERTRFRGVRRLRERQLLRRERLHKVLKILGFLPEHYLKGIDFEKHTGKFLSGSEPKLPWVKDRWGKYSFLFQTAFNEMLADFAKHQPSLVFDGKKIPYDWTVYYLRKKALTEMISKEELAWILLNFNQKRGYYQLRGEEEEDNAGKSVEFYALKVLSVEATDEKKGRDIWYNVHLENGWVYRRSSNVPLDWEGRVKEFIVTTDLNPDGTPKLDKYGEVKRSFRAPKEDDWMLIKKRTEADITGTHKTIGSYIYDALLQEPQQKIIGKLVKTVERKFYKEELNFILQKQCAFHAELQDRDLYMRCIEALYPGNEVQRRNIANRDFIYLLIDDVLFYQRPLKTKKSLIANCPYEENEYVNRKTGEIKTAPLKCIAKSHPLFQEFRLWYFLSNIRVYQKEREVNGTLHLDVDVTTEFLKTEDDYVALFDWLNSRKEIDQKAFLRYPAFGLKKEINNYRWNYVEDKFYPCNETRHAILSRLEKAGIGIDFLSDEKETALWHILYSVSDKQEIEKALATFAVKNGLNESFVEVFKKFPPFKSEYGAYSAKAIKKLLPLMRCGKYWDMSLIDGTTKERIERIIAGECDESIGAKVREKAMNLSDISCFKRLPLWLACYVVYNRHSEDKEITKWESPADIDAYLAAFKQHSLRNPIVEQVITETLRVVRDIWKQVGKIDEIHIELGREMKNPADKRKRMTTQILENENANLRIKALLAEFVNPEYGVENVRPYSPSQQEILRIYEDAVLKGEEQIPEDIDVILKKFNTSKLPTKSEFLRYKLWLEQKYRSPYTGELIPLAKLFTAAYEIEHVIPQSRYFDDSFSNKVICESAVNKLKDNQLGYEFIKNHHGQKVEVGFGKTVEIFSVDSYERFVKEQYAKSGIKMKKLLMDDIPEQFIERQLNDSRYISKVVKGLLSNIVREKNDSGEYEPEAVSKNILVCTGSVTDRLKKDWGMNDVWNSIVSPRFERLNALTETQCFGHWENKDGKKVFQTAVPLEYQKGFSKKRIDHRHHAMDAIVIACATRNHVNYLNNESASRNAKISRYDLQRLLCDKSRGDGNGNYRWIIKKPWTTFTQDAREALSGIIVSLKQNLRIINKTTNIYQHFDANGTRVYEKQKIGDSWAIRKPMHKDTVFGAVNLRKVKVVRLSVALDTPSMIVDKRVKNKVLELLSYKYDKKKIEKYFKENAFLWKELDIAKVAVYYFTENTTEPLVAVRKSLDSTFNEKKIASVTDTGIQKILLNHLKSKEGKAELAFSAEGIEEMNRNLLQLNDGKGHQPIYKVRVYEPRGNKFKVGVLGNKGAKWVEAAKGTNLFFAIYITEDGNRTYETIPLNWVIEREKQGLVPVPDRNEKGDKLLFWLSPNDLVYLPTEEERDFGRINEPIDRGRIYKMVSSSGNQCFFIPQSISNAIISTKELGSNNKAEKSWDGEMIKNICIPVKVDKLGRIIEVKYRVNE

SEQ ID NO: 23084 - protein, 1533 aa, unidentified
  REGION 1..1533: note = Cas Enzyme sequence
LIIYFIFEKIVNTILVMKKIVGLDLGTNSIGWALINAYINKEHLYGIEACGSRIIPMDAAILGNFDKGNSISQTADRTSYRGIRRLRERHLLRRERLHRILDLLGFLPKHYSDSLNRYGKFLNDIECKLPWVKDETGSYKFIFQESFKEMLANFTEHHPILIANNKKVPYDWTIYYLRKKALTQKISKEELAWILLNFNQKRGYYQLRGEEEETPNKLVEYYSLKVEKVEDSGERKGKDTWYNVHLENGMIYRRTSNIPLDWEGKTKEFIVTTDLEADGSPKKDKEGNIKRSFRAPKDDDWTLIKKKTEADIDKIKMTVGAYIYDTLLQKPDQKIRGKLVRTIERKYYKNELYQILKTQSEFHEELRDKQLYIACLNELYPNNEPRRNSISTRDFCHLFIEDIIFYQRPLKSKKSLIDNCPYEENRYIDKESGEIKHASIKCIAKSHPLYQEFRLWQFIVNLRIYRKETDVDVTQELLPTEADYVTLFEWLNEKKEIDQKAFFKYPPFGFKKTTSNYRWNYVEDKPYPCNETHAQIIARLGKAHIPKAFLSKEKEETLWHILYSIEDKQEIEKALHSFANKNNLSEEFIEQFKNFPPFKKEYGSYSAKAIKKLLPLMRMGKYWSIENIDNGTRIRINKIIDGEYDENIRERVRQKAINLTDITHFRALPLWLACYLVYDRHSEVKDIVKWKTPKDIDLYLKSFKQHSLRNPIVEQVITETLRTVRDIWQQVGHIDEIHIELGREMKNPADKRARMSQQMIKNENTNLRIKALLTEFLNPEFGIENVRPYSPSQQDLLRIYEEGVLNSILELPEDIGIILGKFNQTDTLKRPTRSEILRYKLWLEQKYRSPYTGEMIPLSKLFTPAYEIEHIIPQSRYFDDSLSNKVICESEINKLKDRSLGYEFIKNHHGEKVELAFDKPVEVLSVEAYEKLVHESYSHNRSKMKKLLMEDIPDQFIERQLNDSRYISKVVKSLLSNIVREENEQEAISKNVIPCTGGITDRLKKDWGINDVWNKIVLPRFIRLNELTESTRFTSINTNNTMIPSMPLELQKGFNKKRIDHRHHAMDAIIIACANRNIVNYLNNVSASKNTKITRRDLQTLLCHKDKTDNNGNYKWVIDKPWETFTQDTLTALQKITVSFKQNLRVINKTTNHYQHYENGKKIVSNQSKGDSWAIRKSMHKETVHGEVNLRMIKTVSFNEALKKPQAIVEMDLKKKILAMLELGYDTKRIKNYFEENKDTWQDINPSKIKVYYFTKETKDRYFAVRKPIDTSFDKKKIKESITDTGIQQIMLRHLETKDNDPTLAFSPDGIDEMNRNILILNKGKKHQPIYKVRVYEKAEKFTVGQKGNKRTKFVEAAKGTNLFFAIYETEEIDKDTKKVIRKRSYSTIPLNVVIERQKQGLSSAPEDENGNLPKYILSPNDLVYVPTQEEINKGEVVMPIDRDRIYKMVDSSGITANFIPASTANLIFALPKATAEIYCNGENCIQNEYGIGSPQSKNQKAITGEMVKEICFPIKVDRLGNIIQVGSCILTN

SEQ ID NO: 23085 - protein, 1504 aa, unidentified
  REGION 1..1504: note = Cas Enzyme sequence
MKNIVGLDLGTNSIGWAVVNGSVNDDGSEQLVKIQASGSRIIPMDAAMIGDFNKGNSISQTAERTRLRGVRRLSERYLLRRERLHRILDILGFLPFHFAQDLDRHGKIVKGKEPKLAWRKNEAGQFEFIFQDSFKEMLEDFKLNHPNLITDDKKVPYDWTIYYLRKKGLTSKISKEELAWILLNFNQKRGYYQLRGEEEEENKNKLVEFYALKVVAVEDSGEKKGKDIWYNVHLENGWVYRRTSNMPLDWVGKTKEFIVTTDLEKDGTPKKDKEGNVKRSFRAPKEDDWSLVKKKTEADIDQTHKTVGAYIYDTLLGNPSQKIRGRLVRTIERKYYKEELKQILEKQKEFHLELQDRALYAACIEELYPINEAHRNNVGNRDFTYLFLEDILFYQRPLKSKKSLIDNCPYEENQGLDKETGEIKSFPVKCIAKSHPLFQEFRLWQFIINLRIYRKDLAQDVDVTNELLKTEEDYVALFDWLNGKKEIDQKAFLKYPLFGLKKEIENYRWNYVQDKPYPCNETRSLMLARLEKCDISIEFLTKENEEALWHILYSVEDKNEIVKALQKFADKHDLNASFVDVFQKFPPFKKEYGSYSAKAIKKLLPLMRMGKYWSENSIDKGTRERIDKIITGEYDEKIENRVREKAIHLADVSDFKGLPLWLVCYIVYGRHSEAKEITQWKSPADIDSYLRSFKQHSLRNPIVEQIIIETLRVVRDIWKQVGNIDEIHVELGREMKNPADKRKKMTQQMSENENTNLRIKYLLTEFLNPEYEVENVRPYSPSQQDILRIYEEGVLNSVSDLPEEISDILKKFTETDLKKRPSRSEILRYKLWLEQKYRSPYTGEVIPLGKLFTPAYEIEHVIPQSCYFDDSFSNKVICEAEVNKLKSNLLGHEFIVKHHGEIVELPFGKKVRIFTVDEYEQFVKDNYSRTRSKMKKLLMDDIPEEFVTRQLNDSRYISKVVKSLLSNIVREKGEEEAISKNVIPCTGGVTDRLKKDWGINEVWNKIILPRFQRLNELTGTNKFTTKNVGIQEIPTMPLELQKGFNKKRIDHRHHAMDAIIIACANRNIINYLNNESATAKAELSRYDLQKMLCDKAKTDNNGNYKWVIRKPWASFTQDTYLALENIIVSFKQNLRVINKATNRFLHYNEEGKKIFVKQGKGDNWAIRKSMHKDTVFGEVNLRRIKTVALNEAMKNPQSIVVKDFKRKLLELWNLGFDAKRIKKYFEDNRETWSDINLSKIEVYYFSKDTKDRFFATRKPLDTSFDRKKIENNITDTGIQKILLRHLELKDNNPDIAFSPDGIDEMNRNIIQLNNGKYHQPIIKIRWYEQADKFAVGQTGNKFSKFVEAAKGTNLFFAVYESNILDKKTNTIIKKRNYATIPLNVAIERQKQGLPVAPEDENGNDPIFVLSPNDLVYLPTDDELANGIIAQPLDRGRIYKMVSCTGNEGHFIPARIANPILQTIELGSNNKAQKAWTDEMIKEICMPIKVDRLGNVLESSSSYKK

SEQ ID NO: 23086 - protein, 1504 aa, unidentified; identical to SEQ ID NO: 22293
  REGION 1..1504: note = Cas Enzyme sequence

SEQ ID NO: 23087 - protein, 1432 aa, unidentified
  REGION 1..1432: note = Cas Enzyme sequence
MKRILGLDLGTSSIGWALVNESERAEEISSIVQLGVRVNPLTVDEMQNFEKGKSITTNADRTLKRSMRRNLQRYKLRRDVLIKLLKKVGFITDKTILSEQGNRTTFETYRLRAKAAEEEISLEELARVLLMINKKRGYKSSRKAKGEEDGSLIDGMEIAKKLYDEDLTPGQLCLQLLESGKKTFPDFYRSDLQDEFDRIWNFQKQFNPQSFCDTAKEEVKGKNKSQTWAILAKYFTWTKEVSVWNENEAKTENQEKEYRLVGLKRTVKGEELKKENYCWRVQALTERLDLEEIAVVLQEINGQISASSGYLGAISDRSKVLYFNHQTVGQYQMAELNKNPNMSLRNMVFYRQDYLDEFNAIWEKQAEFHKELTPELKKGIRDVIIFYQRRLKSQKGLIGFCEFENREIIVEKNGKTQTKIIGCKVIPRSHPLFQEFKIWQTLNNIEVFVGERKRKRKQTNVSSDLFDDTEDVLVTKGRRFLYQEEKEILAKELSIKENLKKAEVLKLLFENPQELDMNFKQIDGNRTGFALFSAYGRMIEKYGYEPLDFKKPADEIINQLKAVFSDLGWNTDLLSIGLDKEGKELEMQPYFRLWHLLYSFEGDNTPAGNGKLIEKIMQLCRVEKEYAIELANISFQDDYGSLSAKAIKKILPYLKEGNQYDVACEYAGYRHSKSSLTKEEIENKALKDKLDILPKNSLRNPVVEKILNQMVNVVNAVIDAYGRPDEIRVELARELKKSAKEREELTKAIAKNTREHDEIRKLLQSEFGMIHVSRNDIIRYKLYEELKENGYKTLYSNQYIPKEKLFSKEIDIEHIIPQARLFDDSLSNKTLEYKAINIEKGNKTAYDFVKDKYGEEGLQEYLNRCETVCNDKKAKLRKLKMQQNDIPDGFIDRDLRNTQYIAKKALSMLKDICRRVVATTGSITDKLREDWQLVDVMKELNLPKYEALGLVERFEDKDGRIIKRIKDWTKRNDHRHHAMDALTVAFTKDVFIQYFNNKNAAWESDCKEHANIIGIKTRYFESGRAVPPMPLGQFRVEAKSHLENLLVSIKAKNKVVTTNVNCIRKKGGISEKHQQTPRGQLHLETIYGSHKQYVTKMEKVNASFDVAKIATVSRQNYRNALLRRLEAFGNDPKKAFTGKNTLEKNPVYLDRAQTMRMPDRVQTVEFEAVYTIRKPIDSNLNVEKVVDAKVRAILEQRLEEYGGDAKKAFVNLDENPIWLNQEKGISIKRVSIRGINNAQSLHVKKDKNGNPILDENGKQIPVDFVNTGNNHHVAIYRKPVLDKKGQVMFDEDGNLMYELDEVVVSFFEAVTRANLGLPIINKDYRRSEGWQFLFSMKQNEYFVFPNEKTGFNPKEIDLLDPDNYAVISPNLFRVQKFSTKNYCFRHHLETDVQERKALLGITYKWQLGLKAIKDIVKVRINHIGQIVSVGEY

SEQ ID NO: 23088 - protein, 1427 aa, unidentified
  REGION 1..1427: note = Cas Enzyme sequence
MKKILGLDLGTSSIGWALVNEAETSEEKSSIIKLGVRVNPLTVDELQNFEKGKSITTNADRTAGRSMRRNLQRYKLRRENLIEVLKEYNFITDETILSENGNRTTFETYRLRAKAAVEEISLEQFARVLLMINKKRGYKSSRKAKGAENGTLIDGMEVAKKMYDEGITPGELCLQLLTAGKRYFPDFYRSDLQAEFDRIWNFQKQFYPDSLIDKVKDEVRGKNKSQTWAILAKYFVWKEVENSWNEEEAQTRRVEKEYRLVGIKRGVKREELKLENFQWRVKALSERMNPEELAIVLQEINEQISNSSGYLGAISDRSKELYFNRQTVGQYQMAVLDNNPNIGLRNMVFYRQDYLDEFNTIWEKQAEFHKELTEDLKKEIRDIVIFYQRRLKSQKGLINICEFERRQIEVEIDGKKKIKTIGSRVIPRSSPLFQEFKIWQTLNDIEVSVLGVKNKRKKQDDNSTTLLDSAENIDSLKLNVSRPLDADEKSLLAKELFIRDKLTKSDVLKLLFNNPQNLNLNFKNIDGNRTGSALYQAFSKILEISGHESINFKKSADEIVEQVKTIFSALGWNTEVLCFDSEKELDKQPYFKLWHLLYSFEGDSTPTGDGNLIQKIADLCGFEKDYASILANITFQEDYGSLSTKTIRKILPHLKDGNQYDVACEYAGYKHSKSSLKKEEIKNKVLKDKLELLPKNSLRNPVVEKILNQMVNVINAIITTYGKPDEIRIELARELKKNAKEREELTKSIVDTTKTHEGIRAILQNDFGMSHVSRNAIIRYKLYEELKDNGYKTLYSNTYIPKEKLFSKDFDIEHIIPQARLFDDSFSNKTLEVKSINIEKGSKTAYDFVEEKYGEQGLQEYLNRCEVLFRDKKTKLRKLKMQESEIPEGFIDRDLRNTQYIAKKALSMLNEICRRVVATTGAITDELREDWQLVDVMKELNWEKYKVLGLVEYFEDNDGRLIGRIKDWTKRNDHRHHAMDALTVAFTKDVFIQYFNNKNASLKPDTNEAAIRNKYFQNGKAIPPMSLDEFRAEAKKHLNDTLISIKTKNKVVTINLNRTKKKNGINKKQQQTPRGQLHLETVYGSHKQYVVKEEKVNASFDAAKIATVNKPAYRDALLRRLQENGNDSKKAFTGKNSLDKQPVWLDAKQNECVPEKVKTVMLETVYTVRKPIDEKLNVDKVVDARIRKLLQDRIKEYGNAKSAFANLDENPIWLNKEKGITIKRVSVFGISKAQSLHEKKDKDGNFILDKDSRRIPVDFVNTGNNHHVAIYRKPVLDKKGQAVFDENGELKFELEEVVVSFFDAVTRVNLSQPIIDKDYKRSEGWKFLFSMKQNEYFVFPNEKTGFDPKEIDLLNPENYALISPNLFRVQKIASKDYVFRHHLETVVADRKELQEITWKRISSLSILNRIIKVRVNHIGQIVMIGEY

SEQ ID NO: 23089 - protein, 1508 aa, unidentified
  REGION 1..1508: note = Cas Enzyme sequence
MRTILGLDLGTNSIGWAVINSVIKEQTEKIWIEMAGSRIIPMDAAILGDFDKGNSISQTAERTRFRGVRRLRERQLLRRERLHKVLKILGFLPEHYLKGIDFEKHTGKFLSGSEPKLPWVKDRWGKYSFLFQTAFNEMLADFAKHQPSLVFDGKKIPYDWTVYYLRKKALTEMISKEELAWILLNFNQKRGYYQLRGEEEEDNAGKSVEFYALKVLSVEATDEKKGRDIWYNVHLENGWVYRRSSNVPLDWEGWVKEFIVTTDLNPDGTPKLDKYGEVKRSFRAPKEDDWMLIKKRTEADIAGTHKTIGSYIYDALLQEPQQKIIGKLVKTVERKFYKEELNLILQKQCAFHAELQDRDLYMRCIEALYPGNEVQRRNIANRDFIYLLIDDVLFYQRPLKTKKSLIANCPYEENEYVNRKTGEIKTAPLKCIAKSHPLFQEFRLWHFLSNIRVYQKEREVNGTLYLDVDVTTEFLKTEDDYVALFDWLNSRKEIDQKAFLRYPAFGLKKEINNYRWNYVEDKFYPCNETRHAILSRLEKAGIGIDFLSDEKETALWHILYSVSDKQEIEKALATFAVKNGLNESFVEVFKKFPPFKSEYGAYSAKAIKKLLPLMRCGKYWDMSLIDGTTKERIERIIAGECDESIGAKVREKAMNLSDISCFKRLPLWLACYVVYNRHSEDKEITKWETPADIDAYLAAFKQHSLRNPIVEQVITETLRVVRDIWKQVGKIDEIHIELGREMKNPADKRKRMTTQILENENANLRIKALLAEFVNPEYGVENVRPYSPSQQEILRIYEDAVLKGEEQIPEDIDVILKKFNTSKLPTKSEFLRYKLWLEQKYRSPYTGELIPLAKLFTAAYEIEHVIPQSRYFDDSFSNKVICESAVNKLKDNQLGYEFIKNHHGQKVEVGFGKTVEIFSVDSYERFVKEQYAKSGIKMKKLLMDDIPEQFIERQLNDSRYISKVVKGLLSNIVREKNDSGEYEPEAVSKNILVCTGNVTDRLKKDWGMNDVWNSIVSPRFERLNALTETQCFGHWENKDGKKVFQTAVPLEYQKGFSKKRIDHRHHAMDAIVIACATRNHVNYLNNESASRNAKISRYDLQRLLCDKSRGDGNGNYRWIIKKPWTTFTQDAREALSGIIVSLKQNLRIINKTTNIYQHFDANGTRVYEKQKIGDSWAIRKPMHKDTVFGAVNLRKVKVVRLSVALDTPSMIVDKRVKNKVLELLSYKYDKKKIEKYFKENAFLWKELDIAKVAVYYFTENTTEPLVAVRKSLDSTFNEKKIASVTDTGIQKILLNHLKSKEGKAELAFSAEGIEEMNRNLLQLNDGKGHQPIYKVRVYEPRGNKFKVGVLGNKGAKWVEAAKGTNLFFAIYITEDGNRTYETIPLNWVIEREKQGLVPVPDRNEKGDKLLFWLSPNDLVYLPTEEERDFGRINEPIDRGRIYKMVSSSGNQCFFIPQSISNAIISTKELGSNNKAEKSWDGEMIKNICIPVKVDRLGRIIEVKYRVNE

SEQ ID NO: 23090 - protein, 1153 aa, unidentified; identical to SEQ ID NO: 22358
  REGION 1..1153: note = Cas Enzyme sequence

SEQ ID NO: 23091 - protein, 1427 aa, unidentified
  REGION 1..1427: note = Cas Enzyme sequence
MKKILGLDLGTSSIGWALVNEAETSEEKSSIIKLGVRVNPLTVDELQNFEKGKSITTNADRTAGRSMRRNLQRYKLRRENLIEVLKEYNFITDETILSENGNRTTFETYRLRAKAAVEEISLEQFARVLLMINKKRGYKSSRKAKGAENGTLIDGMEVAKKMYDEGITPGELCLQLLTAGKRYFPDFYRSDLQAEFDRIWNFQKQFYPDSLIDKVKDEVRGKNKSQTWAILAKYFVWKEVENSWNEEEAQTRRVEKEYRLVGIKRGVKREELKLENFQWRVKALSERMNPEELAIVLQEINEQISNSSGYLGAISDRSKELYFNRQTVGQYQMAVLDNNPNIGLRNMVFYRQDYLDEFNTIWEKQAEFHKELTEDLKKEIRDIVIFYQRRLKSQKGLINICEFERRQIEVEIDGKKKIKTIGSRVIPRSSPLFQEFKIWQTLNDIEVSVLGVKNKRKKQDDNSTTLLDSAENIDSLKLNVSRPLDADEKSLLAKELFIRDKLTKSDVLKLLFNNPQNLNLNFKNIDGNRTGSALYQAFSKILEISGHESINFKKSADEIVEQVKTIFSALGWNTEVLCFDSEKELDKQPYFKLWHLLYSFEGDSTPTGDGNLIQKIADLCGFEKDYASILANITFQEDYGSLSTKTIRKILPHLKDGNQYDVACEYAGYKHSKSPLKKEEIKNKVLKDKLELLPKNSLRNPVVEKILNQMVNVINAIITTYGKPDEIRIELARELKKNAKEREELTKSIVDTTKTHEGIRAILQNDFGMSHVSRNAIIRYKLYEELKDNGYKTLYSNTYIPKEKLFSKDFDIEHIIPQARLFDDSFSNKTLEVKSINIEKGSKTAYDFVEEKYGEQGLQEYLNRCEVLFRDKKTKLRKLKMQESEIPEGFIDRDLRNTQYIAKKALSMLNEICRRVVATTGAITDELREDWQLVDVMKELNWEKYKVLGLVEYFEDNDGRLIGRIKDWTKRNDHRHHAMDALTVAFTKDVFIQYFNNKNASLKPDTNEAAIRNKYFQNGKAIPPMSLDEFRAEAKKHLNDTLISIKTKNKVVTINLNRTKKKNGINKKQQQTPRGQLHLETVYGSHKQYVVKEEKVNASFDAAKIATVNKPAYRDALLRRLQENGNDSKKAFTGKNSLDKQPVWLDAKQNECVPEKVKTVMLETVYTVRKPIDEKLNVDKVVDARIRKLLQDRIKEYGNAKSAFANLDENPIWLNKEKGITIKRVSVFGISKAQSLHEKKDKDGNFILDKDSRRIPVDFVNTGNNHHVAIYRKPVLDKKGQAVFDENGELKFELEEVVVSFFDAVTRVNLSQPIIDKDYKRSEGWKFLFSMKQNEYFVFPNEKTGFDPKEIDLLNPENYALISPNLFRVQKIASKDYVFRHHLETVVADRKELQEITWKRISSLSILNRIIKVRVNHIGQIVMIGEY

SEQ ID NO: 23092 - protein, 1427 aa, unidentified
  REGION 1..1427: note = Cas Enzyme sequence
MKKILGLDLGTSSIGWALVNEAETSEEKSSIIKLGVRVNPLTVDELQNFEKGKSITTNADRTAGRSMRRNLQRYKLRRENLIEVLKEYNFITDEMILSENGNRTTFETYRLRAKAAVEEISLEQFARVLLMINKKRGYKSSRKAKGAENGTLIDGMEVAKKMYDEGITPGELCLQLLTAGKRYFPDFYRSDLQAEFDRIWNFQKQFYPDSLIDKVKDEVRGKNKSQTWAILAKYFVWKEVENSWNEEEAQTRRVEKEYRLVGIKRGVKREELKLENFQWRVKALSERMNPEELAIVLQEINEQISNSSGYLGAISDRSKELYFNRQTVGQYQMAVLDNNPNIGLRNMVFYRQDYLDEFNTIWEKQAEFHKELTEDLKKEIRDIVIFYQRRLKSQKGLINICEFERRQIEVEIDGKKKIKTIGSRVIPRSSPLFQEFKIWQTLNDIEVSVLGVKNKRKKQDDNSTTLLDSAENIDSLKLNVSRPLDADEKSLLAKELFIRDKLTKSDVLKLLFNNPQNLNLNFKNIDGNRTGSALYQAFSKILEISGHESINFKKSADEIVEQVKTIFSALGWNTEVLCFDSEKELDKQPYFKLWHLLYSFEGDSTPTGDGNLIQKIADLCGFEKDYASILANITFQEDYGSLSTKTIRKILPHLKDGNQYDVACEYAGYKHSKSSLKKEEIKNKVLKDKLELLPKNSLRNPVVEKILNQMVNVINAIITTYGKPDEIRIELARELKKNAKEREELTKSIVDTTKTHEGIRAILQNDFGMSHVSRNAIIRYKLYEELKDNGYKTLYSNTYIPKEKLFSKDFDIEHIIPQARLFDDSFSNKTLEVKSINIEKGSKTAYDFVEEKYGEQGLQEYLNRCEVLFRDKKTKLRKLKMQESEIPEGFIDRDLRNTQYIAKKALSMLNEICRRVVATTGAITDELREDWQLVDVMKELNWEKYKVLGLVEYFEDNDGRLIGRIKDWTKRNDHRHHAMDALTVAFTKDVFIQYFNNKNASLKPDTNEAAIRNKYFQNGKAIPPMSLDEFRAEAKKHLNDTLISIKTKNKVVTINLNRTKKKNGINKKQQQTPRGQLHLETVYGSHKQYVVKEEKVNASFDAAKIATVNKPAYRDALLRRLQENGNDSKKAFTGKNSLDKQPVWLDAKQNECVPEKVKTVMLETVYTVRKPIDEKLNVDKVVDARIRKLLQDRIKEYGNAKSAFANLDENPIWLNKEKGITIKRVSVFGISKAQSLHEKKDKDGNFILDKDSRRIPVDFVNTGNNHHVAIYRKPVLDKKGQAVFDENGELKFELEEVVVSFFDAVTRVNLSQPIIDKDYKRSEGWKFLFSMKQNEYFVFPNEKTGFDPKEIDLLNPENYALISPNLFRVQKIASKDYVFRHHLETVVADRKELQEITWKRISSLSILNRIIKVRVNHIGQIVMIGEY

SEQ ID NO: 23093 - protein, 1526 aa, unidentified
  REGION 1..1526: note = Cas Enzyme sequence
MKKILGLDLGTNSIGWAVLNAADDNSLKYIEAAGSRIIPMDAAILGDFDRGNSISQTAERTRIRGMRHLRERYLLRRARLHRILNLLGFLPFHYAQDIDRYGNFSADMEPKIAWRKNLEGELEFIFIESFNEMLEDFRKNQPELVADNKKVPYDWVIYYLRKKALEKKISKEELAWILLNFNQKRGYYQLRGEDDDESMKTAKTRQYFDKQIIKNIIDTNQTYKGQRILIVELQNGDKGKIFKKEIPDWIGQEKNIIVTVDIDKDGNDKYEESGSLSCRFKIPTDAEWESEWKLIKMKTQKDLDESNKTVGTYIYDSILQNPTQKVRGKLVRTIERKYYKAELKQILEKQTEFHSELQDKDLYIECLNELYSNNDTHRNAITDRDFVYLFMNDILFYQRPLKSKKSLIDNCPYERNIYIDKETGEIKYSPIKCIAKSHPLFQEFRLWKFISSIRIYQRESVVEVVDKQLDLFSSQSTSVQKLVTDVDVTDKFLTCENDYVALFEWLNKKKIIDQKEFLKYRPFGLKGDIDNYRWNYVEDKSYPCNETHAMILTYFAKAGISEDILTKEMEEALWHILYSVEDRQEITKALRTFASKYHLSDSFVKVFSNIPPFKKEYGSYSAKAIKKLLSLMRMGKYWSEDAIDVNTRERIDKIVTGEYDEKIRDRVREKTIRLNDIRHFRALPDWLACYVVYDRHSETREITEWKSPEEIDEYIRNFKQHSLRNPIVEQVITETLRTVRDIWKQVGCIDEIHVELGREMKNPADKRKRITSQIIENENANLRVKALLTEFVNPEFEIENVRPYSLSQQDILRIYEDGVLNSVAEVPGDIAGILKKFNENDAKKRPTTSEILRYKLWLEQKYRSPYTGEMIPLSKLFTSAYEIEHVIPQSRYFDDSFSNKVICEAEVNKLKDNALGYEFIKKHHGEKVELGFGKIVEIFSVSVYEQFVKDNYSRNRGKMKKLLMDEIPEQFIERQLNDSRYISKVVKTLLSNVVREKAEQEAVSKNVIVCTGGVTDRLKKDWGINDVWNKIVLPRFLRLNELTNSTNFTAKNAAGNEIPAMPLELQKGFNKKRIDHRHHAMDAIVIACANRNIVNYLNNESASRKAKISRHDLQAILCDKVRTDDKGNYQWRVKKPWDTFTQDVYVALENIIVSFKQNLRVINKTSNYYWHYENGKKVLVKQVKGDSWAIRKTMHKDTVFGEVNLRKVKSVSLNEALKNPQFIVEKDLKRQLLSLLQQNFDIKKIKKYFEEHKDIWSDISLSKMNIYYFTKETKDRYFATRKPLDASFDKKKIESCITDTGIQQILLRHLELKENDPERAFSPDGIDEMNRNIIQLNKGKGHHPIAKVRVYEKADKFEVGQRGNKSSKFVEAAKGTNLFFAVYETEYPDEKTNSIVRKRNYATIPLNIAIERQKRGLSTAPEDEKGNVPSFVLSPNDLVYLPTSEDIVNGHITQPIDKSRIYKMVSSSGSQCFFIKHNIANIIVDKYEFSPLNKMERAISNEMIKEICIPVKVDRLGNIVKLGKSE

SEQ ID NO: 23094 - protein, 1509 aa, unidentified
  REGION 1..1509: note = Cas Enzyme sequence
MKKTLGLDLGTNSIGWAVINSNIDSEGKEKLVGISSCGSRIIPMDAATLGDFGKGNTKSPVAERTRLRGIRRLLERSLLRRERLHRVLSVMGFLPEHYASQLDRYGKFLPETEPKLAWYKDDSGRYQFLFQKSFHEMLEDFRQHQPELVAGEKKIPYDWTIYYLRKKALSQEITKEELAWILLNFNQKRGYYQLRGEEEQEENNKSVEYHALKVVSVEDSGERKGKDIWYNVTLENGWVYRRASNIPLDWTGKVKEFVVTTELDDAGNPKKNKEGVIKSSLSMLKEDDWGLLKTRTQAQIDESGKTVGTYIYESLLCMPNQKIRGKLVRTIERKYYKDELRQILVKQSEFHAALQDHNLLLSCIEELYPNNEAHRRLLSASSFIYFLIEDILFYQRPLKSQKGLIDNCPYESHIYKDKKDGSLHHVPLKCVSKSHPLFQEFRLWQFLSNLRIYQRERMMDGSLKLDVDVTREFLPSEEDYVKLFDWLNERKEISQKLLLAYRPFGLKKNEQANYRWNYVEDKSYPCNETRAEIKSRLSKAGVPEEFLTAEKEEALWHILYSISDKKELTKALGTFAAKNCLNESFVEVFAKIPPFESNYAAYSLKAIRKLLALMRMGKYWNEQAIDRQTRDRIEKILTGEYDETIRSRVREKAMLLTDISSFRGLPLWLACYIVYDRHSESKELVKWETPADIDHFLSKFKQNSLRNPIVEQVITESLRTVRDIWKQEGKIDEIHVELGREMKNPAKERARITAQVQENENTNLRIKALLAEFMNPEFEIENVHPYSPGQQEILRIYEDGVLSGIAEKDLPDDITAILKKFRENDVKKRPTTSEVLRYKLWLEQRYRSPYTGRVIPLGKLFTPAYEIEHVIPQSRYFDDSISNKVICESAVNKLKDNCLGYEFIKKHSGEMVELGNGETVPVFSVEEYERFVKESYFGNSKKMKKLLLEDIPDSFIERQLNDSRYISRVVTSLLSNLVCEEGEQDGLSKNVIVCTGGITDRLKKDWGVQEVWNRIILPRFLRLNEITGRTDFTSTSVNGHLLPALPLYLQKGFNKKRIDHRHHAMDAIVIACANRNIVNYLNNSSARKNSEISRYDLQRLLCEKVKTDANGNYKWILRKPWETFTQDVYAALTNIVVSFKQNLRVINRTTNYYQHYNEAGEKRMIPQTKGDRWAIRKPMHKDTVYGEVNLRKEKTLPLRDVVKNPSIVVDKSLKNKLYELLKSQYDLKAIAKYFEIHQDVWADVNLKKIKVYYFTKETNERFFATRKSLDPSFDQKKIEEEVTDTGVQKILLHHLQQNNNDPDMAFSPDGIDRMNQNMTILNDGKWHQPIYKVRTYEKADKFAVGESGNKAKKFVEAAKGTNLFFAVYESVQEDEAIGKQVCKRTFATIPLNEVIKRKKQGLPAAPEDLNGNLPKFVLSPNDLVYLPTEEERNSSRIIQPLDRERIYKMVSSSGSQCFFIKVFVANSIWDKNEYSSLNKMERAITNEMIKEICVPIKIDRLGNVSLIQI

SEQ ID NO: 23095 - protein, 1361 aa, unidentified
  REGION 1..1361: note = Cas Enzyme sequence
MQKKNFYGDWLLGLDIGTNSVGWAVTDTGYNILKYKSNAMWGVHLFFPANQCEDRRSFRTSRRRLDRRQQRISLLQELMAKPIAEIDPDFFIRLKQSALYPEDRSTGTQNIYFNDINYTDKEYFSEYPTIHHLIDELMKNTSPHDVRLVYLACAYILAHRGHFLFSVDKDNISEVLNFDKVYQVFTNWFNSADKAQPWECSSEKFAEILKRNITKTAKERDFKLLLWDGKKPTLTEESAINPVTAIKLIVGGKAKLSDLFLNESYKELETNSITFNDDNFDDLFESLIPALDDGDSDLLASIKAIYDWSLLSGILKEKSCISEAKKEIYEQHKSDLAFLKYAVKKYIPEKYDYVFRIADSKLPNYLAYSYNTNDYKSKNKTIPSDLKKASPEDFCKYIKGIFKETKCDNADLSKFDDMLNRLDLSSFCPKQVNSDNRVIPYQLYWYELNLILNNASAYLDFLNDSDEYGSVKDKILSLMEFRIPYYVGPLVSSDKSNFAWMKRKAEGKIYPWNFKDMVDEDASEEEFIRRMTCKCTYLPGKNVLPKNSLLYCRFNVLNEINNIKINNKPITVECKKLIYNEVFLKHDRVTLKHIKDTLRSHGCYEDKDSITGIDITVKSSLKPLRDFKPLIESGMLTEEDAEKIIEKITFSNDKLRIKKWLKENYTLSDEVIKKIAKSNYKDFGRLSREFLTEVFDIDPKTGEVVNPNIITMLWETNKNLMELLSQSYGYSSNVKKQAKEYYNAYPKNVIDRLNEMYISNAVKRPILRTLDIVKELKYIMPTPPKRIFIEMARGEGEKKRTKSRRDLILEMYKNYGEDEVGELKKQLFPKADGELRSERLFLYFTQLGKCMYSGKSIDISNLASKAYDVDHIHPRSRKKDDSLDNKVLVLSEENAKKGDKYPISSEIRHNMKSMWEKLAKGNLISKEKLHRLERDTEFTDEELAGFINRQIVETQQSTKAIAHLLEEMFPDTQIVYVKARLVSEFRQTYDMLKCRSVNDLHHAKDAYLNIVMGNVQYVKYTNNPLNFIKSGQKYSLKLDSLLKHDIIRGNDTAWLKDGSSLTTVKNTMEKNNIRFVRYSSCQKGELFNIMPLKKGLGQISLKKDNISDISKYGGYNSATSTYFYLVKHIKKDKVTISFVPIDLIYAGQLTSKQEVLNHLCEKHGLIEPELLLGGRKIKYNTLLEIDGFRSHLTCKTNDRIKIKRGLQLILPYEWEKYIKRLEKYNDRNSEYQRLNKMTLEITVKDEITKEKNVELYNILMDKLKNTKYNVFKTPSEIVKKGKEVFETLNVEERSIVLFKMLGLFNCTLPSGIDLKLIGGSQSSAILSISMDLNKKSFSSIKIIDQSPTGLFEKKSPNLLDL

SEQ ID NO: 23096 - protein, 1142 aa, unidentified
  REGION 1..1142: note = Cas Enzyme sequence
MKRILGLDLGTTSIGWALVNEAENSDEHSSITRLGVRVVPLTVDEQTNFEKGKSITTNADRTLKRSMRRNLQRYKLRRAALLECLKHAGIIHDETILTESGPRTTFATLRARAKAAAEVVSLEEFARILLMINKKRGYKSSRKAQSTEEGTLIDGMEVAKKLHDEQLTPGQYVYALLQEGKKYIPDFYRSDLQSEFDAIWKYQKVFHSDILTDDFYEQLQNKSKTKTSSIFLGRYGIYTADNKGADRRLQQYRWRSEALCRELTQEELAYVIADVNGAINNSSGYLGAISDRSKELYFNQQTIGQYILQHIEADSHYSLKNQTFYRQDYLDEFERIWQVQSQYHPELTPELKKNIRDIIIFYQRPLKSKKAMLDICTFENRQVEVTEDGKTRTKTVGLKVCPKSSPLFQEFKVWQVLNNLQVEYEAPGEDLFAETEQRRLLTLEEMERLAHELLYKDKLSKREALTILFGKAAKKYDLNYKEIEGNRTVAALYRAFFNIIALSGHVEYDVNKLSAHEIEEITSNVLSLLGFNEDILHFDASLGGHAFDQQPFYQLWHLLYSYEGDNSKTGNDSLIAKLQSLCQCEREYAQVLAGVTFQEDYGNLSAKAIRKILPHLKEGLTYDKACEAAGYKHSERSRTKEELANRMYLDRLELLPRNALRNPVVEKILNQMINVVNAVCDEYGKPDEIRIELARDLKQNAKEREKATADINAANLLNEKYRKILETEFGIPHVSRNDIIRYKLYMELKDNGFKTLYSDTYLPKDKLFTKDFDIEHIIPQARLFDDSFSNKTLEAREINIEKSNTTAFDYVLGKWGEEGAVAYKAKIDDLYRKGVLSKAKHDKLLMREADIPDGFIDRDLRNSQYIAKKAREILEDLVSTIVPTIGSITDRLREDWQLVDVMQELNWDKYNRLGLTESYQDKDGRVIQRIKDWTKRNDHRHHAMDALTIAFTKPAYIQYLNNLNARSDKAGSIYGIEQRYLYRDGRGKLRFRAPIPLDQFRIEAKQQLEDILVSIKAKNKVMTRNVNKTKSKDGNRRKVQLTPRGQLHNETIYGHTLHRISEEVKVDGKMTLERAQLIAKKVYREAVIARLEQFGNDAKKAFTGKNSPEKNPIWLNAEHAEQVPPRVKLVYYEDYYPIRKPV

SEQ ID NO: 23097 - protein, 1132 aa, unidentified
  REGION 1..1132: note = Cas Enzyme sequence
EKKLQAYRWRVSALNKEVPQDVLAYVMSDLNGIINNSSGYLGAISDRSKELYFSKRTVGEYLMSKIEADSHFSTRNVVFYRQDYLDEFERIWETQAQYHPELTKDLKHEIRDIIIFYQRALKSQKGLVSICEFENKEIEIEADGKMKKKTIGYKVCPKSSPIFQNFKIWQILNNIELKGKINRPLYEEEKTMLYNELSYKGKISESEAVKLLFSNSKGLSLNFKSIEGNKTQATLFKAYEKIIEISGHGEYDFEKMSSGKVIQLVHEIFETLGFNTDILYYNVSLDDKEIEKQPMYQLWHLLYSYEGDKSNTGLDSLINIIHTKYGFDKEYAKIIAGVSFQDDYGSLSAKAIKKIMPHLIAGNEYSVACELAGYRHSKSSLTKEEIENKVLQDKLHELPKNSLRNPVVEKILNQMVNVVNAAIDAYGKPDEIRIELARELKKSAKEREKDTENISKATKEYEDYKKIIQQEYGFSHVSRNDIIRYRLYKELEPRGYRTLYSNTYIPKEQLFSKSFDIEHIIPQSRLFDDSFSNKTLEARDINIEKGNLTAYDYVLGKYGEEKICEYETTVNDLFKGKGGASESKRRKLLMKGADIGEGFIARDLRDTQYIAKKAREILGSIVRAVVPTTGSVTDRLREDWQLIDIMQELNWDKYDKLGLTETIQGRDGQRIKRIKDWTKRNDHRHHAMDALTIAFTKNSYIQYLNNLNARSDKNSVIYAIESKELERDKNNKLRFKAPVDNFREEAKRQLESVLVSIKAKNKVVTRNINKSKKDGGVNKKVQLTPRGQLHLETTYGKKLRYSTKIEKVGSAFTSEYIANVAKKDEREALLARLLEYGGDPKKAFTGKNSLEKNPVYLDEAKAIAVPDKVKVVTFEPVYTIRKDITPDLKIDKVIDKGIRTILEQRLSEFNGDAKKAFSNLDENPIYLNKEKGITIKRVAISGISNAIALHDKRDKEGNLILDAKGNRIPVDFVNTGNNHHVAVYRDADGNLQDVMVSFYEATCRACNGNPIIDTTFSSKEGWQFLFTMKQNEYFVFPNKSTGFDPHEIDLLNPDNYSLISPNLYRVQKLSKVAYGNSFVRDYVFRHHLETTVDDKKELRDITWVRIQSLSGLDSIVKVRINHIGQIVAVGEY

SEQ ID NO: 23098 - protein, 1312 aa, unidentified
  REGION 1..1312: note = Cas Enzyme sequence
VQNGFLGITVSSEQVGWAVTNPKYELERASRKDLWGVRLFDKAETAEDRRMFRTNRRLNQRKKNRIHYLRDIFHEEVNQKDPNFFQQLDESNFCEDDRTVEFNFDTNLYKNQFPTVYHLRKYLMETKDKPDIRLVYLAFSKFMKNRGHFLYKGNLGEVMDFENSMKGFCESLEKFNIDFPTLSDEQVKEVRDILCDHKIAKTVKKKNIITITKVKSKTAKAWIGLFCGCSVPVKVLFQDIDEEIVTDPEKISFEDASYDDYIANIEKGVGIYYEAIVSAKMLFDWSILNEILGDHQLLSDAMIAEYNKHHDDLKRLQKIIKGTGSRELYQDIFINDVSGNYVCYVGHAKTMSSADQKQFYTFLKNRLKNVNGISSEDAEWIDTEIKNGTLLPKQTKRDNSVIPHQLQLREFELILDNMQEMYPFLKENREKLLKIFNFVIPYYVGPLKGVVRKGESTNWMVPKKDDVIHPWNFDEMVDKEASAECFISRMTGNCSYLFNEKVLPKNSLLYETFEVLNELNPLKINGEPISVELKQRIYEQLFLTGKKVTKKSLTKYLIKNGYDKDIELSGIDNEFHSNLKSHIDFEDYDNLSDEEVEQIILRITVFEDKQLLKDYLNREFVKLSEDERKQICSLSYKGWGNLSEMLLNGITVTDSNGVEVSVMDMLWNTNLNLMQILSKKYGYKAEIEHYNKEHEKTIYNREDLMDYLNIPPAQRRKVNQLITIVKSLKKTYGVPNKIFFKISREHQDDPKRTSSRKEQLKYLYKSLKSEDEKHLMKELDELNDHELSNDKVYLYFLQKGRCIYSGKKLNLSRLRKSNYQNDIDYIYPLSAVNDRSMNNKVLTGIQENRADKYTYFPVDSEIQKKMKGFWMELVLQGFMTKEKYFRLSRENDFSKSELVSFIEREISDNQQSGRMIASVLQYYFPESKIVFVKEKLISSFKRDFHLISSYGHNHLQAAKDAYITIVVGNVYHTKFTMDPAIYFKNHKRKDYDLNRLFLENISRDGQIAWESGPYGSIQTVRKEYAQNHIAVTKRVVEVKGGLFKQMPLKKGHGEYPLKTNDPRFGNIAQYGGYTNVTGSYFVLVESMEKGKKRISLEYVPVYLHERLEDDPGHKLLKEYLVDHRKLNHPKILLAKVRKNSLLKIDGFYYRLNGRSGNALILTNAVELIMDDWQTKTANKISGYMKRRAIDKKARVYQNEFHIQELEQLYDFYLDKLKNGVYKNRKNNQAELIHNEKEQFMELKTEDQCVLLTEIKKLFVCSPMQADLTLIGGSKHTGMIAMSSNVTKADFAVIAEDPLGLRNKVIYSHKGEK

SEQ ID NO: 23099 - protein, 914 aa, unidentified
  REGION 1..914: note = Cas Enzyme sequence
KEYGAYSAKAIKKLLPLMRMGKYWDVSNIDDKTKERIDKIVTGEWDENIHNRVREKAIKLSDIADFKGLPLWLSCYVVYNRHSEARAIAKWESPGDIDSYLRLFRQHSLRNPIVEQVITETLRTVCDIWKRIGQIDEIHVELGREIKNPADKRAKMTAQMVENENTNLRIKALLAEFINSEYEIENVRPYSPGQQEIFRIYEDTVLNSVEEIPEDISAVLKKFRESDLKKRPTKSEFLRYKLWLEQKYRSPYTGDVIPLGKLFTSAYEIEHIIPQSRYFDDSFSNKVICEAEVNKLKSNELGYEFIKNHHGQKVELGFGKIVQIFSIEAYEKFVKANYSGMNGKMKKLLMDDIPEKFIERQLNDSRYISKVVKSLLSNIVREKDLNGEYEPEAISKNVIVCTGSVTDRLKKDWGVNDVWNSIIYPRFERLNTLTGSQQFGRWENKEGKRVFQTAVPLEMQKGFSKKRIDHRHHAMDAIVIACATRNHINYLSNESASKKAKISRTDLQHLLCTKCRTDDNGNYKWIVKKPWQAFTRDIREALENITISFKQNLRVINKTTNYYVHFDESGKKVLEKQINGDSWAIRKPMHKDTVFGKVNLQKVKEVRLSLALDTPKMIVDKKLKEKVLQLYSYKYDKKRIGKYFKENVSLWKDLNLSKVAVYYFTNDSAEPLVAVRKPLDTSFNAKKIKESVTDTGIQKILLNHLSNNQDNPNLAFSLDGIDEMNRNIIVLNGGKYHQPIYKVRVCEPQGNKFNVGTTGNKISKYVEAAKGTNLFFAVYQTEGGKRNYETIPLNVIIEREKLGWTPVPENNNNGDKLLFWLSPNDLVYVPTADELNNGIRLDDIDKSRIYKMISCSGPQCFFIPQNVSNAIIPTIELGANNKAEKSWNDEMIKAVCVPIRVDRLGCITEINSPK

SEQ ID NO: 23100 - protein, 1510 aa, unidentified; identical to SEQ ID NO: 22292
  REGION 1..1510: note = Cas Enzyme sequence

SEQ ID NO: 23101 - protein, 1312 aa, unidentified
  REGION 1..1312: note = Cas Enzyme sequence
VQNGFLGITVSSEQVGWAVTNPKYELERASRKDLWGVRLFDKAETAEDRRMFRTNRRLNQRKKNRIHYLRDIFHEEVNQKDPNFFQQLDESNFCEDDRTVEFNFDTNLYKNQFPTVYHLRKYLMETKDKPDIRLVYLAFSKFMKNRGHFLYKGNLGEVMDFENSMKGFCESLEKFNIDFPTLSDEQVKEVRDILCDHKIAKTVKKKNIITITKVKSKTAKAWIGLFCGCSVPVKVLFQDIDEEIVTDPEKISFEDASYDDYIANIEKGVGIYYEAIVSAKMLFDWSILNEILGDHQLLSDAMIAEYNKHHDDLKRLQKIIKGTGSRELYQDIFINDVSGNYVCYVGHAKTMSSADQKQFYTFLKNRLKNVNGISSEDAEWIDTEIKNGTLLPKQTKRDNSVIPHQLQLREFELILDNMQEMYPFLKENREKLLKIFNFVIPYYVGPLKGVVRKGESTNWMVPKKDGVIHPWNFDEMVDKEASAECFISRMTGNCSYLFNEKVLPKNSLLYETFEVLNELNPLKINGEPISVELKQRIYEQLFLTGKKVTKKSLTKYLIENGYDKDIELSGIDNEFHSNLKSHIDFEDYDNLSDEEVEQIILRITVFEDKQLLKDYLNREFVKLSEDERKQICSLSYKGWGNLSEMLLNGITVTDSNGVEVSVMDMLWNTNLNLMQILSKKYGYKAEIEHYNKEHEKTIYNREDLMDYLNIPPAQRRKVNQLITIVKSLKKTYGVPNKIFFKISREHQDDPKRTSSRKEQLKYLYKSLKSEDEKHLMKELDELNDHELSNDKVYLYFLQKGRCIYSGKKLNLSRLRKSNYQNDIDYIYPLSAVNDRSMNNKVLTGIQENRADKYTYFPVDSEIQKKMKGFWMELVLQGFMTKEKYFRLSRENDFSKSELVSFIEREISDNQQSGRMIASVLQYYFPESKIVFVKEKLISSFKRDFHLISSYGHNHLQAAKDAYITIVVGNVYHTKFTMDPAIYFKNHKRKDYDLNRLFLENISRDGQIAWESGPYGSIQTVRKEYAQNHIAVTKRVVEVKGGLFKQMPLKKGHGEYPLKTNDPRFGNIAQYGGYTNVTGSYFVLVESMEKGKKRISLEYVPVYLHERLEDDPGHKLLKEYLVDHRKLNHPKILLAKVRKNSLLKIDGFYYRLNGRSGNALILTNAVELIMDDWQTKTANKISGYMKRRAIDKKARVYQNEFHIQELEQLYDFYLDKLENGVYKNRKNNQAELIHNEKEQFMELKTEDQCVLLTEIKKLFVCSPMQADLTLIGGSKHTGMIAMSSNVTKADFAVIAEDPLGLRNKVIYSHKGEK

SEQ ID NO: 23102 - protein, 1442 aa, unidentified
  REGION 1..1442: note = Cas Enzyme sequence
MIKTILGLDLGTNSIGWALIKQDFENKRGGIVGMGSRIIPMGAELSKFEQGQAQTKNANRRIARGARKLNKRYKQRRNKLIYVLQQLGLLPEQIKLSDSFDNPLKLDKVSILPIVKNQKQYSALDLLELRVKALSEPISLKDLGRIIYLFNQLRGYAGGGNEPEKENDNDEENGNNDKKGNESYVTFGKVLALSEFEKITFKTKEFKKCKVSLETEDGILEGDTYLDILKTGESFELLVNVTVSKKHGETLIFKLPNKTSWRKKMENLEKELLDLSKKKGKEVYLSEYFLSILKENRWARIRNNVVLRSRYQAEFDKIWETQIENTESELCKVLQTLSQEKLSDILKFIFPGTKETQERYRKASLEKGLFHLIRNQIIYYQRELKDQSSLISDCRFEKGEKAIAKSHPVFQEFKIWEQINKLTINTKIEDGKNRKGEVRYKYMDRPIPVSLKEWIFDELQEKKEIGFGPVFNKLKKEYGLRDGIDFLNGMNPKAKLRGDETKHLLKKALGEQLWQELGLINQESQIELWDILYNAKGNEYDLESERTSKVLKFIKQHASTGKNAEQIAVQISKIKFSRNYASISLKAIEKILPLVRSGKYFDNNLSDNLKEKIIKLLNENVSDPFEKAAQEYLEANVEVLAEGGIMNAYATILVYDKHTAKEYGESERIDHYQKIKRLQQGELRNPLVEQLISEALMVVKDIWRQYGKPDEIRLELARELKNNADRRAKMYKSNNANQKANDEVKSLLIELKQEITLANIEKYKLWLSQENLADEYVKQYKDPSKSEIEKVKLWKEQGHVSPYTGQPIPLAELFNRERYDIDHIIPQSRYFDDSFANKVICEKAINKEKSNRTAMEYFEIGSVIPFVFSKENFIDHVNKRFEGQKRKNLLATKMPEDPVARQMKETQYISVRVKEELNKIVGNENVKTTTGGITDYLRNQWGLTDMFKEILKGRYERSQPLLAAMEYENYEKAFIKKKREYEDKKIPFTDIELSEEQFKQTFSNNFFQKKNNKLIIKGWSKRIDHRHHAIDALVIACTEPAHVKRLNDLNKELQRWLDEHRKDILPDFEGNPSDLLDEILNLDEKKREMIFKQIENFKAISMPWSGFPKEAEKETQKIIVSQKPKDKLLIQSDNNGKTQIKIRGQLHEGTLYGKSQGVETYRIPLSKFAGKKFATEKAIEKIANTYLKETIQEHLKDFDNKKEDAFSAEGILSLNKKLAEKKNKKNEAAPHTPISSVKVFYRDPTKIKKKKGEEEFGDALQKLDRNRAFNQSLYVKTGDNYLFAVMEKGGNRFFDLITFFDAANLLKEGLNNARDKKSFNKERFFENHFRELHKLGKVDKVFFLKQGDPVYMPSEEEEVITDSDSPLFENFWRNKAERSKNIHYVTKYSGNEIYFINNRVADSIVRGKEFGTQNAYQNIGGRSIKQYCIKLNIDRLGNVSKA

SEQ ID NO: 23103 - protein, 1843 aa, unidentified
  REGION 1..1843: note = Cas Enzyme sequence
MKKILGLDLGTNSVGWALIEIDSEKRILKMIGLGSRIIPMDGQEFSKFNAGQKITSAAANRTSLHRARITKERYLLRRDRLHLVLNLLEALPEHYKIEIDFERNDKRCGQFKEETEPKIAYLPTKNSENKYAFYFEAAFKEMITDLQKVNPDVKNEKGKRVPKDWTIYYLRQKALKEKISLEELAWVLLSYNQKRGTELDEIENENEKADELKEALDLKVLSSERKTDKDGIYYEIILNDAENFTYKEYATEQLTFKGDIKEVVKISKLDTVGNIEKEKTIYQINDLYNLTLSKIEHREIDDKKFKHIYNFIYTNGWKNEKKKEKWNKSYSDLGKKLEDESKKDNLKIGQDLFVISNKYNYKGQPEAVIPSIKVPDFNSEGSKDWTLLKKKTEKDAIKFNIDNGYINKETKNVKYYISPKIYDVLINDAKTGERTKIIGGLFQTIDRKFYREELNDIVNLQRRFHNTLDDTSVFEKCVKLLYPHNEDHSKTLLQNKNAITHLLVEDILLYQRPLKSKKSEASDCKYEIDYWKEEVDTSTGEILEIPVYKKAVSASHPLFQEFRIWDKIHNIKLIQLEAKDAEGNSDTNIDITSQYFKAEHYQALFEHFNSRSTVAINDFLDFCKKQFGLDIGKKGERKIFWNYPEEEEFKGNETRKSFEIRFKRCGVKDFDTFMSQKKEIELWHYLYSVNINDRKKVSEIKDGSNSKFGKTSIQNFFYKYFKDVNIEADVFEKLCKDFENYPKFPSKYASYSAKALRKLLSVMRVGDSFLTLKKFDEDWQEKYPERANAILNKIDKIDWTVKDIDYSKTIENKVNVRAGELPFPKGLFNTFRDFNSIEDLKFLNLTQASYFIYGRHSELAQAKYWDSPQKIRDGINKELKHHSLNNPVAEKVLKETMKVVADIWEFYGSSAKNFFTEIHLEVARELQKSNQEKKEIVERQKNSRAENERLRNILEDFLNHSPYNAKKGNQDHFERLKIVEEGAKTISYSDKEFYPKNKDKFSKADIETILKKQKISKTDFEKYKLWIEQGYRSPYSGELIKLSDLFNGNKFNIDHVLSRASVTNNSLNNKVVCEAVINRFKSDRTGRGFMAQYGGKTYTIFDETLNKNVTFKLISEGEYVDLVKKQFSSAKRFILLAKEVPAGFTDSQMNNAKHIARKAMELLSHVVREEGEVEFRSKSLLPVTGAITAILKKEWKFNHVWTELLTPRFERLNKIHRSEDFGKYETSKSGHLYFDINTKYILEQNKNFELKRLDHRHHALDALIVALCTANHVQYINNINSGITNKRKEKIGAIKAQRAGIKRQIMYNEPDKENPNEKIWIYMLPGSFRLSETEGVDKASVVDMDWGNSYSNKPIRDYKKIVLETLEHCIVSFKNDLKLVSRSSNKYESYYDESGTLRLNANGKPAKAFISQKNEKNKHWSIRKPLHTDNPSSEITLHYDRLKIIDNIGKADLIKDERIRDAVKEILGMHNSKVGEAKKYLSKNPIVIDDAAIEYTDFKVVNTKYRKRQPITSLSIRTGTGALASLDAVKDRINKVADLRLRNDLLLHLKNNDNDIDRAFSIDGIEEFNRNRKIPVKNLPIAESASFKFSVGKKKSNNHKWVETGGNFHFKITKSSGNIDYETITLRDAIKGEKEKILTAKNDTNDADNCIILSPNDLVYIPIKGEQNGISNLDFSSLSNNQIKRVYKFVSCTDKEAHFVPYSNSSEIIKNENGTNSKSERLQDFRDDNCMFDKDNKPIMIKGNCIKLSIDRLGNISSIKKKPSNEIKEQENILSEPEVAYKKTKWVLKKFNSFEAMENDQLEHFASLTPEELLKNLKELSMAAFGMKEEGEGDKPDRKIKFD

SEQ ID NO: 23104 - protein, 1266 aa, unidentified
  REGION 1..1266: note = Cas Enzyme sequence
MNKTILGLDLGTNSIGWALIEVDKKNTPIRIIAMGSRIIPLSTEDRDQFSKGQSITKNQDRTKARTQRKGYDRKQLKKSYLKKILKQLNILPTEELLNLPMLDLWKLRSDAANPESNISAEQLGRILYMLNQKRGYKSARSEANADKKDTDYIQEVKGRHAQLKDQNQTIGQYFHQELYNAKANNAYFRIKEEVYPREAYIEEFDTIINVQKEKHDFLTETVINQLRDKIIYFQRKLKSQKGLVSICEFEGFEKTVFDKEKNKEKMVFVGPKVAPKTSPLFQLCRIWEVVNNISLKIKNPEDSKYKWGDRIPTLEEKKEIAAYLFTNGNLSFAELLKILNLKKEDVYANKQILKGIKGNETYDLIYKIIGEHDLLRFNVSIVPSKHVSILVDKKTGEILEEKESEEVCKSVEREPLYQLWHTIYSIKELDECKNALVKRFDFDEETADKLSRLDFNKQAFGNKSNKAMRKILPYLMQGYDYSQACSFAGYNHSNSLTKDEKEEQVTADRLELLPKNSLRQPVVEKILNQMINVVNAILEKYGKPSEIRVELARELKQSKDERNDMDLLNTKNKKLNEDISKRLSELGLPTTKKYIQKYKFIFPSLSKNLKDAKVTNECIYCGETFNLTEALSGDAFDIDHIVPKALLFDDSQTNKVLVHRKCNSHKTNQTAYDYIASKGESELKKYQERVDDWFNRGIISYSKMQRLKVSYNEYSERKKLKKETESDKKLWENFIDRQLRDTQYIARKSKEILQKVCNNVTATEGGVTAKLRELWGWDDVLMNLQMPKYKELGQTVIKEWTSDHGKRKHQKEEIDNWSKRDDHRHHAIDALVIACTKQGFIQRINTLNSSDTRNEMNREVEEAKILFNEKNTLLEKYLITQRPFTTEEVMKEADKILVSFKAGKKVATVTKHKATGANKEKGVIVPRGALHEQSVYGKIKVIEKNKPLKYLFENSDTIVDPKIKVLVKDRLKGNNNDSKSAISSLKKNPIYLNEDKTSVLEKTDCYCDATVLKYKLQNLKANQVEDIVDNKVKGLVKERLKEYGNKEKEAFKDTLWFNEEKQIPIRTVRLFARPDADNLQPIKKDENGKDIGFVLTGNNHHIAIYEDKDSKLVQHSCTFWHAVERKKYKLPVVINNTSEIWSELLGKEYPETFLNKLPTDNLKIKFSMQQNEMFVLGLSKEEFEEALKNNDKPLLSKHLYLVWSISENNFWFRHHLETKNTDLKKTEGAKESKRLYNIRSLGALVALNPIKIRINHLGDIVSVGEY

SEQ ID NO: 23105 - protein, 1332 aa, unidentified
  REGION 1..1332: note = Cas Enzyme sequence
QLRGEEEEIKENKLVEYHALRVVDVVDSGDRKGKDDIWYNVMLENGWVYRRTSKVPLDWTGKIKEFVVTTDLNDDGTVKKDKDGKEKRSFRAPLPDDWTLIKKKTEFDIEKSQETVGSYIYDTLLQNPAQKIRGKLVRTIERKFYKEELKLILEKQMEFHPELKDQRLYSICIHELYKSNESHRNNLAGRDFTHLFMNDIIFYQRPLKSKKSLISNCRYETRSYKSKEGEITFEPVKCIAKSHPLFQEFRLWQFIQNLRIYRKDSEVEGKVLPELDVTRELLKSEEEWVALFDWLNGKKEIKQETFLKYPPFKIKKNIGDYRWNYVEEKIYPANETRYQIMSRLEKVPNIKDGFLTREIEEHLWHILYSVEDRLEIEKALRTFAKKHVLGEEFVEHFKKFPRFEKEYGSYSAKAIKKLLPLMRRGKYWKEEEIIPYVKQRIDSIIERLSSVNFDRTKIAEITDDDIPKQVLRSFIDSSNPLQGLNTYQACYAVYGRHSEEGEIIKWKDPSELDHFLTYVFKQHSLRNPIVEQVIAETLRVVRDIWKHYGSSQENFFEEIHIELSREMKNPADIRKRITDQISENENTNLRIKALLMEMAADPKIESIRPYSPMQQEILKIYEDGVINSGIELPEDILKISMNAQPSKAELIRYKLWLEQKYRSPYTGEVIPLSKLFTPAYEIEHIIPQSRYFDDSYSNKVICESEVNKDKDNSTGFEYIKENSGKIIELSMGRKVKLFTLEAYQDFVKDHYSKNRGKIKRLLMEDIPESFIARQLNDTRYISKVVKNLLSNIVREEGEQETTAKNVIVCNGTITTKLKQDWGLHDIWNELITPRFDRLNQITGSNHFGEWLNRDGKRVFQSRIPLELQKGFSKKRIDHRHHAMDALVIACATANHVNYLNNVYARSTIRYDLRSTLCHKNKTDGNGNYQWLFYKPWDSFTTDVRTRLETIIVSFKQNTRVINKTVNWYQKWEKDEEGILRKVLVKQDRGDHWAIRKPMHKDTVAGALTLTFKKQVKLSTAIDQWEKIVDKPLKKQVKMLLSQGNDKKAILKYFKTNDNKFNNLEISRVEVYYTDNENVASRVAVDESFTSSAIRSITDTGIQKILLNHLSKYDELKDGNPVEHPELAFSPDGIDELNKNITSLNRGKGHKPIFKVRCFEPKGNKFSVGNSGNKKSKFVEAAKGTNLFFAIYADDSGKRNFESVPLNVVIERQKQRLSIVPEVNDKGNNLLFYLTPNDLVYVPTAEEKENPGFDGQFSDLIAITKRVYKLVSSTGSQAMFIKSEVASVILNKAEFSPLNKMEKSIDGIMIKDCCWKLKTDRLGNIVGLIGRNS

SEQ ID NO: 23106 - protein, 1161 aa, unidentified
  REGION 1..1161: note = Cas Enzyme sequence
MKRVLGLDLGSSSIGWAVIEEHSEDVISDIASSPKDKIVAIGSRIIPLSVDESTQFSKGQALTKNADRTAKRTQRKGYDRYQLRRALLLEKLSSLGMYNGSTLKCSTLELWGLRAKAVTEKISLLELGRVLCHINQKRGYRTAKSDYGDKKQGEYVQKVVERYRELHEHSATVGQFLYNGLKADAAFRCKERVYPRDAYIEEYDAIMQNQQNHYPDLLTADVVAHIRDYIIFHQRPLKSCKHLVGKCELERCDVKRGERIVNCGPKVSPRSSPLFQVCKIWESINNLAVRNRENDSLYISVEQKKQLFTYLNTNDKLKATQLKTLLGVKSKEWLFQQAVGGGLQGNTTYCAIEKALGNYPQKDELLKFDLCVVDGDMVNTETGEVSKVIDTTFEQQPLYRLWHTLYSISDMEELSKVLKTQFAINDEMVLKALCQIDFVKAGYGNKSSRAMRKILPYMMEGMQYYDAKLAAGYDDTPLTKAQNEARELAEKLMPIQKGELRQPVVEKILNQLVNLVNALMAEHGRFDEIRVELARELKQSREEREKATKAISDNQKKNDAVAKRISEEYGLTPTRSRIQKYKMWEESEQICMYCGATVNVHEFLLGSGVEVEHIIPRSVLFDDSFSNKVCACRKCNQDKGNRTAYDFMESRGEGALKAYVERVNDLAERKKISHTKRNKLLMKGKDIPTDFIDRQLRESQYIAKKAKEMLQTVCRNVHATSGSITDFIRHLWGWDEVLHTLNFERYQAAGLTELVEREVDGRKVEVERIKDWSKRMDHRHHAVDALTIACTKQGYIQRINNLNSLKEVAFTSLANDTQGAETRQRLTRLERYIQQQPHFSTAEVAEAVSGIAVSFKSGKRAASVGKRYIHKGGKRICAQKGIIIPRGALSEESVYGRIRNSETGKEDYVIKYKVGSIALKDVDYVVDKRIREILRERLEQFGGKPEKAFAEPVLDHQGREIRSVRCYTGLNATVPVRYNEQGEAIAFVKPGNNHHVAIYEDEKGKWQEHIVTFWHAVERKKYGIPTIITNPGEVWEKITEQMPESFQEQLPKSATWQFKFSMQQNEMFILGMEEELYQDAMHREDYALLSRYLYRVQKLATKNYCFRHHLETTVDDKYNGVKNEMLSKQMKKVIIVQSLGAFELQNPHKVHVSVTGKITEL

SEQ ID NO: 23107 - protein, 1047 aa, unidentified
  REGION 1..1047: note = Cas Enzyme sequence
AKAVTEKISLLELGRVLCHINQKRGYRTAKSDYGDKKQGEYVQKVVERYRELHEHSATVGQFLYNGLKADAAFRCKERVYPRDAYIEEYDAIMQNQQNHYPDLLTADVVAHIRDYIIFHQRPLKSCKHLVGKCELERCDVKRGERIVNCGPKVSPRSSPLFQVCKIWESINNLAVRNRENDSLYISVEQKKQLFTYLNTNDKLKATQLKTLLGVKSKEWLFQQAVGGGLQGNTTYCAIEKALGNYPQKDELLKFDLCVVDGDMVNTETGEVSKVIDTTFEQQPLYRLWHTLYSISDMEELSKVLKTQFAINDEMVLKALCQIDFVKAGYGNKSSRAMRKILPYMMEGMQYYDAKLAAGYDDTPLTKAQNEARELAEKLMPIQKGELRQPVVEKILNQLVNLVNALMAEHGRFDEIRVELARELKQSREEREKATKAISDNQKKNDAVAKRISEEYGLTPTRSRIQKYKMWEESEQICMYCGATVNVHEFLLGSGVEVEHIIPRSVLFDDSFSNKVCACRKCNQDKGNRTAYDFMESRGEGALKAYVERVNDLAERKKISHTKRNKLLMKGKDIPTDFIDRQLRESQYIAKKAKEMLQTVCRNVHATSGSITDFIRHLWGWDEVLHTLNFERYQAAGLTELVEREVDGRKVEVERIKDWSKRMDHRHHAVDALTIACTKQGYIQRINNLNSLKEVAFTSLANDTQGAETRQRLTRLERYIQQQPHFSTAEVAEAVSGIAVSFKSGKRAASVGKRYIHKGGKRICAQKGIIIPRGALSEESVYGRIRNSETGKEDYVIKYKVGSIALKDVDYVVDKRIREILRERLEQFGGKPEKAFAEPVLDHQGREIRSVRCYTGLNATVPVRYNEQGEAIAFVKPGNNHHVAIYEDEKGKWQEHIVTFWHAVERKKYGIPTIITNPGEVWEKITEQMPESFQEQLPKSATWQFKFSMQQNEMFILGMEEELYQDAMHREDYALLSRYLYRVQKLATKNYCFRHHLETTVDDKYNGVKNEMLSKQMKKVIIVQSLGAFELQNPHKVHVSVTGKITEL

SEQ ID NO: 23108 - protein, 1080 aa, unidentified
  REGION 1..1080: note = Cas Enzyme sequence
IGDRSKELYFNRMTVGQMLMKRLAENPNASLKNIVYYRQDYLDEFECIWETQRKYHNELTQELKKEIRDIIIFYQRELKSKKSSISLCEFEKREVEVSIDGTTRKKITGCRVCPKSSPLFQEFKIWQMLNNIRVCDTETNETWPLDIEEKDVLFKELNIKQKLSKNEILKILYRNSKHLDLNYKEIEGNRTLFALVNACQSIIVATGHDEYTFSKMRASEIYEIIHRIFGAVGFNTNFLHFDSNCKNLEEEPMFKLWHLLYSYTDDKSKTGNESLINKIRELTNMDEECARILANISFMDDYGSLSSKAIRKILPHMQEGNEYSVACMYAGYNHSHSLTKEELLNKVYVDTLELLPRNSLRNPVVEKILNQMINVVNAIVKEYGKPDEIRIELSRELKSNAKERKRATEAISEANKKNETVRKILIEKFGIKNPSRNDIIRYRLYEELEKNGYHTLYSNTYIPQEELFTNRFNVEHIIPQACMFDDSFSNKTLEAMDINIEKGKETAYDYVLAKYGNEGMAQYKARIDYLYNAGAIRKSKRDKLLMQGKNIPNGFIERDLRDTQYIARKAHEILERLVPHVISTTGQITERLREDWHLIDVMQELNWHKYHELGLTETIVNRENKEIRRIKEWSKRNDHRHHAMDALTIAYTKRSIIQYLNNLNARDDKNGEIYGIERKELERDAHGKLRFKLPFKNFREEAKIALEGILISIKSKNKVVTKNTNKTKSKNGGTKKRTQLTPRGQLHLETIHGSIQRYATYEEKVGSSFNAEKIAKVANKREREALLARLNEFYGDAKKAFTGKNSLEKNPVYLDAARTAAVPIKVKLVELETVYTIRKSIDKDLNIEKVIDKRIRKILESRLKEYGNDSKAAFSNLDDNPIWLNKEKGICIKRVTISGIANAVSLREKKNHNGDYILDEHGKRQPVDFVNPGNNHHVAIYIDEDGNYQENIVSFFDATARAINEQPIIDYEYNSEMGWKFCFTLKQNEYFVFPNEKTGFNPEDIDLTNPKNYHLISPNLFRVQKLSSKDYWFRHHLETTVEDNKVLKGITWKRIRTLQELKGAIKVRINHIGQIVQIGE

SEQ ID NO: 23109 - protein, 1372 aa, unidentified
  REGION 1..1372: note = Cas Enzyme sequence
MKKILGLDLGVSSIGWALVNEAENEEEKSSIIKIGVRVNPLTINEHQEFEAGKSITTNANRTEKRGIRHNLQRYKLRREQLLRSLKENNFIKDSTLLCEEGPRTTFETYKLRAKAATEKVSLEELARILLMLNKKRGYKSNRKIKSADEGQLIDGMSIAQELYDKKLTPGEFVLSLLQQKKEYIPDFYRSDLQNEFDRIWESQHLFYPDILTPELKELLQGKSKKISQNIFLANHIDIAENKSKDKRRQAYQWRTDALQKQLDIDIIAFVLCDINGNIHSTSGYLGAISDRSKKLYFKKSTIGQWLMNELSQNPHFSLKNQVFYRQDYLDEFDRIWETQSSFHKELTSELKHELRDIIIFYQRPLKSQKGLVSFCEFENKQITINIEGKEKIKNIGCRVCPKSSPLFQEFKIWQILNNLFVIDKNNKYSRPLFQEEKEMLHAELCIKGKLSKTEALKCLYKNTKGLDLNHNEIEGNRTQAALFKAYQDIIAMSGHGEYDFKKMPAADIIIKVSEIFTTLGIRTDILQLHTDLWDEHFMRLPIFQFWHLLYSYEGDHTNTGNESLICKLKERYGFEKEYAQRLANVIFQPDFGNLSSKAMRKILIHLREGVEYSTACLYAGYRHSKRSLTKEELAKKEYKDRLTILPKNSLRNPVVEKILNQMIHIVNTIINTYGKPDEIRIELARELKKNAKERKEISEAIKKTTQEHEKIRKLLTEEFNITHPSRNDIIRYKLYKELECNGYHTLYSNTYIRREDLFGRDSNIDIEHIIPQAKLFDDSFSNKTLEIRSVNIEKGNQTAFDYISNKYGEKGRIEFESRIEYLYNEQAINKTKYNKLLMREADIPEDFLNRDLRDTQYIAKKAREILEELVPFVVSTTGNITDRLREDWQLVNVMQELNWEKYARLGLIEEFEDKNGHRIQRIQNWNKRNDHRHHAMDALTIAFTKRSFIQYLNNLHARSDRSSNIYAIESKELERNQHGKLQFRPPIPINLFRKEARQHLENTLISIKAKNKVTTPNINKIKTQRGFLQKTQLTPRGQLHNATIYGTQKHYTTKEEKVGSKFTKEYITKVANKQYRNALLQRLSEWNNDPKLAFTGKNSLEKNPIYLNETHTRQVPSKVKLVEWKEIFTIRKEISPDLKLEKVVDVGIRQILQKRLQIFGGNAKEAFSNLDENPIWLNQKQGIAIKRVTITGIDKGIALHDKKDHHGKLILNSKGETLPVDFISPSNNHHVAIYRDNEGNLHEKLVSFMEATTLALQNLPVVNKSYNKEQGWTFLFSMKQNEYFIFPDNDFLPNEIDLMNPNNYALISPHLFRVRKFASKDYVFSHHLETSINDINELRDITWKRLQSLKGIDQLVKVRLNILGQIVATGEE

SEQ ID NO: 23110 - protein, 1382 aa, unidentified
  REGION 1..1382: note = Cas Enzyme sequence
MKKILGLDLGTTSIGWAFVREAESENEKSSIERIGVRVNPLTTDEQTDFEKGKTISSNADRTLKRGARRNLDRYKQRRKNLINVLLKANIIIKETVLAENEKNTTHSTYLLRAKAATNEIAKEDFAKVLLMINKKRGYKSSRKAKNEDEGQIIDGMAVAKTLYDENITPGQYCYQILKQGKKYLPDFYRSDLKAEFEKVWTTQRKFYPEVLTDELKKELNDKGQKATIAIFISKAKIYAAENKNGTKDEKRLKLYEWRSKAITGQLKIEEVASVITEINNNLNSSSGYLGAISDRSKELYFNKQTIGEYLYNQLKYNPHTRAKGQVFYRQDYLDEFDTIWETQAKFHKELTPELKAEVRDIIIFYQRKLKSQKGLVSFCEFESKTIEAIENGKAKQKNIGYKVAPKSSPLFQEFKIWQNLHNVKAQNKITKEILLLNDKAKQDLFFELNIKGNLDKKYIVEFLGYKNNEWELNYSSIEGNRTNKALYDVFEKIIQAEGSEEIDFASISASQIKSIVQDFLKVSNIDTYILEFNAELQGKTFEQQSSYQLWHLLYSYQEDDSKTGNEKLIQLLQKKFNFKKEYAQMLSNISFQQDYGNLSAKAMRKIFPFIKEFEYSEACEKVGYNHSSSKTKKENDERILKDGLTILPKNSLRNPVVEKILNQMVNVVNAIIADSTLGKPDEIRIELARELKKNAKERAEMSTNINAAKTLHDGIIIKLQNEFGIKNPTRNDIIRYKLYDELKGNGHHTLYSNTYIPQEKLFSKEFDIEHIIPKSRLFDDSFSNKTLETRFHNDKKGDDTAVDFIERFFGVDGLDQYKKRIEMMFKLKENPISKTKYKKLLMKGSEIGKGFIERDLRDSQYIAKKAKSMLEEICRTVVTTTGSITDRLREDWGLINIMQELNFDKYKKLGLIETIEMKDGNTKERIADWTKRNDHRHHAMDALTVAFTKHNHIQYLNYLNARKDESSKMHGNVIAIESKETEMVTEDNGNKKRKFKLPVNNFREEAKKQLENVLVSIKAKNKVVTKNKNKIQTNNGEKVKTELTPRGQLHKETVYGKLQQYATKLEKLGAKFDEETILKVAKPKEREALLKRLKENNNDPKKAFTGKNSLDKNPIYLDIEKKIKLDEKIKLVVLEDDYTIRKDVTPGLKIDKVIDVGIRKKLEKRLEEFNGNSKEAFSNLEKNPIWLNEEKGIVIKRVTISGIKNAEALHTKKNHLGNEIFDKDGKHIPIDFVSTGNNHHVAIYQDNEGNLQEKVVSFYEAVARAKQQLTVIDKTYNEHLGWKFLFTMKQNEYFVFPSDGFNPKDIDILNPKNYSLISKNLFRVQKIATKNYMFRHHLETNVEEKKELVNLAFINIRSTNPLKNIIKVRINHIGQIVKVGEY

SEQ ID NO: 23111 - protein, 1412 aa, unidentified
  REGION 1..1412: note = Cas Enzyme sequence
MKRILGLDTGTNSVGWAMIEQDIEAHEGKILGMGSRIIPMDQKEIGDFNKGNLESATAARTHYRGVRRLKDRQLKRRERLVRVLKCAGLIDKEWMPNHISSYAYELVDGKYHFKFKSAYQEMLGLFQAKNPKQKSVPHDWTVYYLRVKALTEKISTQELVWVILHFNTKRGYFQLRGDDALETDGQQSFVSSIVDEIEDLNDDVRGKKALKITLRDDIVGLYSTKEVPDWIGKQIEFIVTEKNVKGEVKVILSNPDPNDWTLRKKKTEQQIEGGNVTVAEYIFEKLLQDPSSKIRGKEVHTIDRKFYKEELNKILDQQIEHHKEFSDKIILEDAVNELYKHNVGHRENLLKRDLQHLLVNDIMYYQRPLKTKKHLISNCKYEFYYIKAKDGSISKKPVKAAAKSHPLYQEYRIWSLIHNLRVIEKEQKDNSGILRQDVDITSEVLDSSKKLALFHAFNSSAELSEKQILKAIGLNSTHYRFNYEEGAKLKGNETRAAFLKAAKKKNVIKEMETLLDAPEMLNRLWHSVYSLGDYSEQFKSAIENEKLAIPIDLIPSILDVSTFKKEYGSYSVKALKKIVPLMRVDSMWAVKNVHKNILQRIDKIVDAEYDDNISDRVREQLAHIKSVDDCNSMPEYMAVYLAYGRHSETIDLARYTSPNDIDVSKLIPNHSLRNPTAEKIIRETLQVVKAVWEKFGRPDEIHVEMARELKSSGVERKRITDRRNQNYASNQRAKAMLRELQQDQSNINPHSKGHIEIFKIYEEGAVVNQKDIDKDIQAIRRKGDPTKTELTRYKLWLEQKYLSPYTGNPIPLSKLFTPAYEIEHVIPRSVYYDDSFNNKVICERVANSEKDNATAYKFICDRGGETLSDGSTILTKDQYEEQIRRMYAINRSKYKNLMSYDPPEGFTQRQLNNTRYINKKLLSLLNPIVKEEHEQEATSKHLISMAGGITNDLKNDWGLHDVWKRILAPRFIRMNEMTDTTDYYRKEGNKLHLSGYQNELKRLDHRHHALDALVVACTTRRHIQYKNSLRSNNRLYNLESKLLKVDPKGTRGKSYKLPWQNIAQDTFDTLSKVIASFRQNKRVATKTTNYYQKYVEQSDGTWKKKYVKQATHPQHWAVRKSLHKDTVFGQVTLREYKHVSINEAIKNIDAIADRMIKIEVREILSKLGGNVEELKKYLKKNPIQRESKNLSKIHIIHYNSDYSTSKMKIDENVTIKQLHKIVDEDLKRQLINHLELYDLDAEEAFSVNGLIQFNEGRNTPVYQVKVKEVLGLKKNLVKSNEKGVKFVEADKGTNLFFEIGIDDETKEHIINKNSTKPFIEVLQQRVNGIENEKIVFGKITLSPNDVVKTKDGNFYKVVSFSKHQCYFVPVNYAGSIIDKVEFSVLNKFERADNGHMIKSKFEFVDLDKLGYL

SEQ ID NO: 23112 - protein, 1165 aa, unidentified
  REGION 1..1165: note = Cas Enzyme sequence
LKKKTEKEIEKSGKTIGTFIYDTLLQNPKQKIRGGLIRTIERKYYKDELRQILNTQIKFHPELKNKDLYNDCVRGLYRNNDAHQLQLSRKDIVHLFINDIIFYQRPLRSQKSTISNCTLEYRTYKDKDGNEQRNYLKAISKSNPNYQEFRIWQWMYNLSIYNKENDQNVTTDFLNSIKDWENLFAFLDERKEIEQKALIKFFLEQTGLKGKVLNTECEKYYWNYVSDRAYPCNETKTQICTRLRKAGIDATNFLTKEKEHQLWHIIYSVTDKTEFVKALGSFAKKHQFNEGEFVDAFKNFPPFQNEYGSFSEKAIKKLLPLLRLGKYWSWEAIDNSSKNRIDKILTGEFDEEIKERVREKTIHLTRENDFQGLQLWLAQYIVYGRHAEAAVIGKWNSVNDLEEYIQNFRQHSLRNPIVEQVVTETLRVVKDIWQKYGNGTKDFFDEIHIELGREMKKTAKERELATSKNIVNENTNLRIKALLAELMNDTSVENVRPYSPSQQEILKIYEDGVLNSGILIEDDILKISKAPQPTISELKRYKLWLEQKYRSPYTGEIIPLNRLFTPDYEVEHIIPQSRYFDDSFTNKVICESEVNKLKDNQLGFEFIKNHHGTTLETGINKKIIHISEIEVYEDFVKTHYAKNRTKRNKLLLEDIPEKMIERQLNDTRYISKFISGVLSNIVRSDKSDDGINSKNIIPGNGIITGELRQDWGLNDVWNDLILPRFERMQKLRTEKDIANGISFLALNKNNKPIPELLPTALQRGFSKKRIDHRHHALDALVIACATKDHVNLLNNQYANSPKRYDLNRKLRIFKKVAYNHPQTGERIEREVPKEFIKPWNNFTITAKEALESIIVSFKQNLRVINKATNHYEKWVVKNNKKTKERQLQTGTNWAIRKSMHKDTVSGKVILERIKVPKGKILTATRKPIDTSFDEKAIESITDTGIQKILTNYLKVKNNNPELAFSPEGLEDLNKSIEKYNDGKQHQPVFKARIFEVGSKFPIGHTGNKKTKFVEAAKGTNLFFAVYGRENGQRNYETIPLNVVIERQKQGLPSAPLENEEGDKLLFCLSPNDLVYVPSDEEQLDGKEVDFTNLTKEQLTRIYKVVSFTGNRLFLVQQYVATTIVNKAEFSSLNKMERSIDGAMIKECCEKLLIDRLGNISIKKKT

SEQ ID NO: 23113 - protein, 902 aa, unidentified
  REGION 1..902: note = Cas Enzyme sequence
MYVVDLAVVTVFTVCTVCFGACNKVLKGVTDKYQQFFSTSKRDYFRLPKLGDTLKLYLSNNFPALHCENQLIDPATGLPCQCPACKKLNKLYHPSMVEFYKPAKEQTFEYNGTCLSKKLLESPVIGAFKNPMAMRTLYELRKLVNYFLKEGIVEEDTRVVVETARDLNDANMRWAIDAYQREREKENKEIAKAIKELRGEERNDNDIDKARLLIEQNRDYLFDSARYITEKEQEDNSKKKKKIAGKAKDFQYKKDVTKYRLWLEQDMQCMYTGKIINIKNLFDENATDFEHTIPRSLSFDNSLANLTVCDAYYNRQIKKNRIPTQLENYEKEATINGHLYSAIKPRLEKWEQKVEQLRNNVTFWEQKSKQAQTKDTKDYAIRQGHLWRMELDYWQNKLDRFTMTEVTSGFKHSQLNDTRLITKYAYHYLKSVFSKVEVQKGGVTADFRKMLGVQSVDEKKDREKYSHHAIDAVILSLIPVAAKRDKMLELFYKIDEEKKLNNDTTELEQALQKEIRSCQIGNVSNLAQYIEENILINHVSKDQTLTSAKRKARKRGKVIWLRDENGEIKKDKNGKRIPKYWIQGACIRGQLHKDTFYGKVRVVERDENGKPLRDENGNWIFRNGKDEFIFVKRIPIADLTSLEQVVSPELKKLIESQLNGRTLAKAIEEGLFMLDRHGNIVNRIRHIRVKASVTNPLAIKKQTYLSKKEYKQDYYSENAENTFYALYWGGKSKEKGFECRNLFDVAFMRKMDNSKTIEDFFEQNKFVGRGNNKTLIPLYAVLKPGTKVIFYEKEKEELKELANNELSKRIYKMNRIYSSGDGRIQFYHHLDARDEKQLLKDFPESEIWIDGKTVGKRAKNGFSKFTINFVAPRLLLVPTNFDFIIEGKDFEMNLDGTITFKY

SEQ ID NO: 23114 - protein, 1431 aa, unidentified; identical to SEQ ID NO: 22248
  REGION 1..1431: note = Cas Enzyme sequence

SEQ ID NO: 23115 - protein, 1417 aa, unidentified
  REGION 1..1417: note = Cas Enzyme sequence
MKRILGLDLGSNSIGWALVNEAENESEESSIIRLGVRVNPLTVDEKQNFEKGKSITTNADRTLKRSIRRNLQRYKLRRENLIEILKENGFIGDETILSENGNHTTFETYRLRQKAVTEKVSLEQFARVLLMINKKRGYKSSRKIKGTEEGALIDGIEIAKRLYNEKLTPGQLCLQLLKSSGKYLPYFYRSDLLSEFDKIWLKQREFYPLLLTDELKKKLLGKNETQTWTICQKPFEIVGIKRVPKGIELKKENFEWRVRALSEKMNLEELAIVFQKINGQIYNSSGCLGDISDRSKELFFNRQTVGQYQMMILDANPNASLRNMVFYRQDYLDEFNTIWDKQAEFHKELTPELKHEIRNVIIFYQRRLKTQKGLISFCEFENRKIEVEVEGKIKIKTVGSRVVPRSSPLFQEFKIWQSLNNLEVSEKGRKVKNNKNKVLPLFHEKENALQIYGKRELFQEEKELLAAELSIKEKLTKSEILKLLFDAPQELDLNFPSLQGNLTQAKLFEAYKSIIDRTGHELDLRKPTNQILDNIEEIFTSLGYNTDILRFNSNSNNLDKEPMYKFWHLLYSFEGDNSVSGNEKLINKISELYGFEKEYAGILANVTFQEDYGSLSTKAIRKILPYLKSGNKYDIACEYAGYRHSASSLTKEEIENKIYKERLEILPKNSLRNPVVEKILNQMVNVINSIIDVYGKPDEIRIELARELKKSAKEREELFKSINETTRLHEQYRDILLKPPFNFSYVSRNDIIRYKLYEELKDNGYKTLYSGTYISPKDVFSGTFDVEHIIPQSRIFDDSFSNKTLELRSINIEKGNRTAIDFVKDKYGEEEGDNCMGNYLNRIEKLYKTGSLSRAKYNKLIIKNENIPEGFIERDIRDTQYISRYAKTLLGDLVKSVVTTSGSITDRLRQDWQLVDIMKELNWIKYKELGFTEEFTNEEGHKIRKIKGWTKRNDHRHHAMDALTVAFTKLSYIQYLNNLNARSDKGSAIYGIEQNELYRNGKGKLLFKPPFALDEFRTEAKRHLENTLISIKAKNKVTTQNINSSKRSGGLNKKVQQTPRGQLHLETIYGSKKQYIVKEETINAKFDIEKITTVTKPSYREALLIRLKQFDNDPKKAFAGVNALSKKPIWLNENHIGRVSEKVKTVNIETVYTIRKEIVGSNPTSKQFIPDEKGLKNVIDAGIRSILEDRLLKYGGDPKKAFSNLDDNPIWLNKGKGISIKRVTISGISNAESLHDKRDKDGNWVLDEKGNSQPVDFVSTGNNHHVAVYRDADGNLQENVISFYEVVSRRNLGLSVIDKSYKAGEGWRFIFSMKQNEYFVFPNENTGFDPHEIDLLNPDNYSLISPNLFRVQKFSKLFYGNSAVREYVFRHHLETKVEDIKELKDITYKSIKSLPIFEKIVKVRINHIGQIVSVGEY

SEQ ID NO: 23116 - protein, 1390 aa, unidentified
  REGION 1..1390: note = Cas Enzyme sequence
MKKILGLDLGSTSIGWAFVNEKEDEIEKSSIVKTGVRVIPLTTDEQGNFEKGKAITTNQDRTSKRSARRNLQRYKLRRQELIKILTEIGFIDNNSNLIEDGKDTTYQTLELRAKAASNRIEKDELARVFLAINKKRGYKSSRKAKNEDEGQLIDGMGVALELNKRKITPGQFSLELLKNGKKLLPDFYRSDLQTEFDIIWNTQKQFYPEIFTDSFYDELKGKGQRATSAIFWKKYKFNTAENKGNRDEKKSQAYQWRVDALSNQLNKEEVAYVITEINNDLNKSSGYLGAISDRSKELYFNKQTVGQYLHEQIKENPHARLKGQVFYRKDYEDEFDAIWNEQTKHHKELNYELKQTIKNIIIFYQRKLKSQKGLISICELEGKEKEISVDGKNKTKLIGPRVCPKSSPLFQEFRIWQRLNDLEVSNKKEKTKYKLDEESKLLLFKELNIKESLTKAQILKLLYKDFKNLDLNFKDIVGNRTNTSLYKAYQTIVEASGHDEFDFTSLPAHETTEIINGIFETIGINKGILNYNADLEGKDFEQQPYYQLWHLLYSYEDDNSTSGIDSLLKKLKEKFGFEEEYAKVLANVTFEDDYGSLSSKAIAKILPHLKDGLQYDEAAALAGYNHSNSLNKEERANRPLKDKLELLAKNSLRNPVVEKIINQTINVVNALIEEYSEKDKDGKIIKYFKFDEVRLELARELKKSAKEREDATKSMTASQTEHEKFRKILQTEYGLPYVSRNDIIRYKLYKELEPRGYKTLYTNTYIAPENIFSKEFDIEHIIPQSRLFDDSFSNKTLELRSANIEKGDKTAYDYILEKYGENGLAEYEKRVDDLFKGVDGKKGKHKKLLMAGKDIPDGFIDRDLRNSQYIAKKTKELLEDVCRTVNTTTGSVTDRLREDWQLIHVMQELNWDKYDKQGLTYYETNKEGKQLPRIKDWTKRNDHRHHAMDALTVAFTKYNHVQYLNNLNARSDKASSIYGIEQKELYRDEKGKLKFKPPMPLDEFRAEAKKHLENTIISFKAKNKVVTPNKNKITGKNKPQNTLTPRGQLHLETVYGTIKRYKTTETKIGSNFYIETINKVAKKKYREALLQRLSKFDNDPKKAFTGKNSLAKTPLYLDDLHLFQVPEKVKLVEEEIVYTIRKTISPDLKIDKVVDGKIKSILEIRLKEFNDDPKKAFVNLDENPIWLNKAKGIAIKNVTITGVSNAIALHDKKDKNGLLMLDENGNTQPVDFVNTGNNHHVAIYRDEKGNLQEKVVSFYEAVTRVNQGLTIIDKDYNKDNGWQFLFTLKQNEYFVFPNEETGFNPTEIDLLDEENYVLINPNLFRVQKISTKNYLFAHHLETQAISGDTLKDKKELSEIIYHFIQTPSKLENIIKVRVNHLGKIVQVGEY

SEQ ID NO: 23117 - protein, 1035 aa, unidentified; identical to SEQ ID NO: 16498
  REGION 1..1035: note = Cas Enzyme sequence

SEQ ID NO: 23118 - protein, 1420 aa, unidentified
  REGION 1..1420: note = Cas Enzyme sequence
MCNLTLGIDLGTNSIGWAIRDTTENDNQIIKNGVLIFDKGVGEEKGIEFPKVKKRTESRGKRRNYQAEKYRKWELLEFLIQNEMCPLSIDELNEWRKYSKKDKRKYPQTEKFLNWLRFDFNGDGKPDFHLLGGDKHESYYLFRMKAVSEEEKDKKVLQENPQILGRVFYHLVQRRGFKGRDEEEAKTMLQGSKDGTTKGRNEISEYIDIYKSLGAALYHYQKEHSKNYEKVRIRQRYNLRKDYENELKEICRVQGLSDSDYKKLQKAIIWQRPLRTQKGLIGLCTYERNKRRAPISHPLYEEYRTWIFINNLKIEAPEGEALDAYLKEKIYPLFLKSGTDFKLKTILDRINKDGGKVHSKFADRPDTKVLSAKLLKKLEEVLGESWKEDFNWNAFFVREAQPSKKQDEVYTVEDIWHILFTFDNEEKLKEFASTKLGLSEEASTKFSKIKLQQGYASLSPSAIKKILPYLQKGFLYPKAVYMANLQKVLGTYEVSEDLINHFASEIDTIYENAATEKKLNNILNSLFRTELVLEGDYHLAEHEDLDDADLDLIKQKIIEILGEKTWSETDEITQKQHFDYVRKQYKQFLQKPLQAKKAGFIEQPRIHDQIFKYLQEHYPEQVPHENIKYLWHPSEQEKYPNASTYQEINLKSKTFFIKEAELDRFLHKNPDAEAEGISLELLGDPEPISKGFKNPMALKTLHKLKQLLNFLLHTQQIDKHTRIVVEIARELNNANYRKALEKWQSERERENESYKKRITEINKECNTSFDINNKSLIRKIRLWEEQDRKCLYTGEVINMCDVLNGEYYDIEHTIPASISFDSELKNLSLANKDFNNNIKGKKYPTQLDNYDDASTFNGKRIEPIIKNIESLFGKRTVYKKKVKKGGVEKEITVEKWAKIADLEKKLDGLKNLSYIDSKDAKDYKIQQRHLLKFKLDYLKQKLQTFTIEEYKASWRNSQLRDTQIMTKYAVPYLKTVFNRVEVQKGNVVNDFKEIYNVKLFGNKKDRTKHSHHAVDAAILTLIPKPTERDQILTKYNLAKDNGIARTYHEQPIDWKDFKTYYIKQIEEETLINNLKEQRTLTSTFKKVRKRGKIVKKENGKPIWAKGDTIRGQLHGESLYGAIKQAQRDEDNKIVFDDNKKMILEEEIKLVIRKPLTYAKDAASPGFKTLKEIEKVIVDRALFEMIQTQVDKAESFKNALEKGIYMLNKKGGKVNKIRHIRCFDRLKHSTAVRPHDHDFVSDKEYKQTTYAQNGENVFCLFYKGEVKGKEERAINVIGIFDLAKLDIKDEKDFYKIPLFNSINKKKTELPLYAVLKSGQKAIFYKENLEELKDLNEKELSNRMYKMYQFEQGKGGDKIKFKHHLISGANTEIVNGLPKGYKEASEYGCFDEQPLMRLTAGNWNFAIENQDFEMNLDGKVKF

SEQ ID NO: 23119 - protein, 1393 aa, unidentified
  REGION 1..1393: note = Cas Enzyme sequence
MSKTLGIDLGTNSIGLTLREDDIFSWYGVYTFKKGVGEGKTGEFSFAAERTKHRSSRRLYNSRRYRKWETLKVLCENDYCPLDIEKLNKWKNYIKGIGRVFPVEDKAFQQWIKLDFDGTGTPDFSSPYQLRRLLITKKLDLSVQENRYKVGRALYHISQRRGFKSSRKSGKSDETAVYKGSTDTSALPYNEYKDELKRNQTLGAYFAKLEDSNCRVRNRYTLRSDFRKEVKIILDFQEIKDNDFRNKLLLETSNGSIFYQRPLRSQKGLIGKCTLEPNKPRCSVSHPKFEEYRAWSFINNIKYRTDKDVPFEPIPLKLKEKLYKEKFFFKSRREFDFSEIRKFIKSNGGNNWELNYSKKMDKVSVSSCFVSARLKSVFGEDWKNFEKSVIRENRKGENSTKKYTIDDIWHLLFSFEDEEYFEEFLIDVLELEENQIKELITLFNNFPIGYANLSLKAISNILPFLRKGLIYSEAVILAKIPEIVGNEVFEAEKEIISKAIKDEIKENRHQKKIITIVNNLVFKYYALDYHDRFAVGDSSYKLDESDIKDIETAAKEHFGEKTWAKLNEDYRHQTLCEVTKKYQEFFTSLKREHFKPPHLVNQIKQFLDDNFDVSEKLLEKIYHPSQIDIYPKKEGQQFLLSPKTAAFKNPMAYKTLYKLRDVINHLIEIGKIDEETRLVVEIAREAKNNLDYTNKRWAINKYQRDREVENREFANAISELITDPDFSGVANPQSTTDKNKFRLWAEQLENYEDVVKLANTTKADIQKYRLWKEQNCICIYTGKIIKLTDLFNPNKVDFEHTIPRSKSFDNSLANLTVCYADYNRSIKKNKMPTELPNYEIESHGYSAIKPRLEDWEKKVDDFYNQINFWKAKSKKAMDKNEKDFAIRQRHLRQMDFDYWKNKLDRFTRTEVPQGFINSQLVDTQIITKYATHYLKTVFNKVDVIKGNQTAQFRKIFSVQPKEEVKDRGKHYHHAIDAAVLTLIPSARKREEILKNAYEFEEENRGKQYHEKPFAGFNYLMIEEIQKNILINNLVDRDQTLTPGIKKVRKRGHIVWLRDKNGELLLDKKGNKIQKIAQGDSIRGELHQQTYYGKIKIAVKDDMGSLQRDERGNVVYNQVDGKDEMWMVLRKPIDNVNFKNDIIVDEHLAEHLKKQLSEGIKQNELKDFQGNTLRHLRCRVKAARGYMNPDNATIVKEQVYKSSKDYKNYIYADSGENYMFGLYENENGRAIVPFNVFESSQYAKHLNELTPENLFKVKELSEPVHVGRGKKRKVASLRHAFLIGQKVLFFENHKEELRDLENNDLSNRLYFVKNLADAKQGLIRLQHHLEARDDNELTEDFPSKEFGKKGKNGFSKFSTDFVAPRLLLSPGNFNFIIEGKDFEMNLDGTINFKF

SEQ ID NO: 23120 - protein, 1405 aa, unidentified; identical to SEQ ID NO: 22370
  REGION 1..1405: note = Cas Enzyme sequence

SEQ ID NO: 23121 - protein, 1532 aa, unidentified; identical to SEQ ID NO: 22371
  REGION 1..1532: note = Cas Enzyme sequence

SEQ ID NO: 23122 - protein, 1422 aa, unidentified
  REGION 1..1422: note = Cas Enzyme sequence
MKRILGLDLGTTSIGWALVGEAKDEKEKSSIIRTGVRIIQYDTFNKVDKSGKVSESKNVQDDFSSGKGLSPNAKRTQQRGARRNLQRYKYRRELLFEILKNNQLISDDTVIAEEGENSTHALWELRAKAATEKINLKDFVCILFALNKKRGYKSNRKAKDEGDGQAIDGMEVAKILTDKNITPGQYVLDLLSNDKKHIPDFYRSDLQTEFDKIWEFQKQFYTSILTDELKENLTGKSKTVSWAVCKEPFNIVGEKRITKGAKLKEENYKWRVNGLTIELTLEQLAIVLQEINGQISNSSGYLGAISDRAKKLNFNKQTVGQYLYKQIKENPHTRLKNQVFYRQDYLDEYNQIWKTQAKFHSELTDELKKEIEEKADIFYQRRLKSQKGLISICELEGREIELKDKDGKPVLNGKGEPKRKIIGPRVIPKSSPLFQEFKIWSILNNLEFRNVNTKEKEKIKSFDEDLEIRKNLFTELNTNGKLSNGQILKLVFKNPKEWELNYKDGLEGNNTNQILFKAYQSILDLAGYEGIDAVDIEKTSEIFDSLGINKKILYFDAELAGKAFEQQASYQLWHLIYSYEGDDSVSGNEKLFYHLKEKFGIEKEFADTLVNTTFKDHYGSLSTKAIRKILPYLKQGNDYYEACGFAKYNHSHSVTKEEKKDALELLPKNSLRNPVVEKILNQMVNVINAIIEEYGKPDEIRIELARELKKTAKEREDATKGIAAATKKHDEIREKLKEFYPFNTGIRITKKDIIKYKLWEELASNGHKTIYTDTYVDLGKLFTKEFDVEHIIPKAVLFDDSFSNKTLSVREFNRWKSSKTGIDAIIEKYQEDSEGYNRYVSAIEKLHEEYQKTKNSSNPRGISKAKYNKLLMKGSEIPDGFIERDLRNTQYIAKKAKSMLLEVFRTVVPITGSVTAKLREDWQLINVMKDLNWDKYDKLGLTEYETNKDGDQIRVIKDWTKRNDHRHHAMDALTVAFTKHNHIQYYNFLNARKDEKHKEHAKIVKIENSIIETVEDKKGAKNKLMKAPMPLNKFRAEAKKHLENTFISFKTKNKVVTRNKNRIKGKEKPQDTLTPRGQLHKETVYGKSKRPLKKPLKLNKKFSTENAESIIDAKIRSAVLSHLKKFDDKSEIAFDTKTLKKHPLLINGTPLKEVKCFEEIYTIRKEISSDNFKDLKSLEKVIDGAARKALQKRLAKFDGDAKKAFSNLEENPIWLNEEKGIQLKRVTITGVSNAEPLHHKKDQFGKKILDNEGKPIAVDYVSTGNNHHVAIYRDEEGNLQEEVVSFYEAVIRKNQKLPVIFKSHPKNPNWEFLFTLKQNEMFVFPNKGTAFDPTEIDLLDENNYHLISPNLFRVQKIQSKEYVFRHHLETVVQRRTSKGEKVNETSLRDLIWKRYKSMGAFKSNFPVKVRINHLGQIVKIGE

SEQ ID NO: 23123 - protein, 1397 aa, unidentified
  REGION 1..1397: note = Cas Enzyme sequence
MKKILEVDLGTTSIGWAFVKEAENCNEQSSIEKIGVRVNPLSTDEQTDFEKGKSISINADRTLKRSARRNLQRYKQRRENLIEVLKEIGFIDNTTSLAEEDKNTTHSTFKLRSKAASEKIEKAAFARVLLMINKKRGYKSSRKAKNEDEGQAIDGMAIAKTLYEDNLTPGQYSYQLLQEGKKYLPDYYRSDLQNEFDKIWQLQSKFYPEYLSDEFKKEITGKGQKATVAIFGKHYEFYPAENKGTREEKKIQAYQWRVKAINHQLDIKEVAFVLAEINNNINNSSGYLGAISDRSKELYFNHQTIGQFLYNQLQYNPHTRMKNQVFYRQDYLDEFEKIWETQALFYPELSIKAKADIRDIIIFYQRRLKSQKTLINFCELENEEIKIEIGGNKKTKFRGPRVIPKSCPLFQEFKIWQNLNHLEIKNVKTKEIFSLTIETKEQLFEELNIRGNLSKKEALALITDKPNEFDLNFTTLEGNRTNQALYEAFLKMMLQENEEIESSKFTTTVLKENVLTFFEKENINKNILDFNTEIEGKEFEKQPSYLFWHLLYSYEGDNSNTGNDKLLEKLQTTYGFKRQFAQVLSNIAFPPDYGSLSAKAIRKILPFMKAGHPFSGDFEKNGLASAKVMAGYKDSPSLTKEENDKRDLKENLKILTKGSLRNPVVEKILNQMVNVINTIIADPTLGKPDEIRIELARELKKSNDERKEMTTNINAAKLDHDKFRKILSAEFGIKNPTRNDIIRYKLYEELKNNGYKELYTNTYVPKEKLFSKEYDIEHIIPKARLFDDTFSNKTLAPRQINLNKKDRTAYDFILNDYGEEKLNEFLSRIEMLSKLKDGEKFCVSKAKYKKLLMKVTEIGEGFIDRDLRDSQYIAKKAKQMLEEVCRTVTTTTGSITDRLREDWDLINVMQELNFDKYKKLGLTEMIEKKDGGFKERIKDWTKRNDHRHHAMDALTVAFTKYSHVQYLNNLNARRDENNKKHTSIFGIEQKETYKDADNKRKFKVPLLHFREEAKKHLENTLVSFKAKNKVVTKNKNITKVNGKTIAKIELTPRGQLHKETVYGKLHQYNTKEEKINAKFDESAILRVAKPTFRAALLKRLKEFNQDPKLAFTGKNSLDKNPIYVDVDKTIVVPEKVKVVWLEADYTIRKDVTPDLKLDKVIDIGIRTILQKRLDDYKGNAKEAFSNLDKNPIWQNKEKGICIKRVAISGIKNAEALHNKKDHNGKEILNENGQPILVDFISSGNNHHVAIYRNAEGDLQDNVVSFYETVERINQGLPIIDKTYNSEIGWEFLFTMKQNEYFVFPSAEFDPSEIDLQNQANNKLISQHLFRVQKFSKVTYGNSSVRDYVFRHHLETSVEDRKELKDISYKSIKSLSYFENIIKVRLNHTGQIVKIGEY

SEQ ID NO: 23124 - protein, 1190 aa, unidentified
  REGION 1..1190: note = Cas Enzyme sequence
MSLKTILGLDLGTTSIGFAKVIEDEDYNNSTVELIGVRVNPLTTDEQTNFEKGRPVSVNAARTLKRSMRRNLNRYQLRRDNLIKALKSHQIINDDTILAEDGKGTTHSTYAFRALAASEQISLEAFARVLLSINKKRGYKSSRRAKNEEEGQVIDSMAVARRLYEENLTPGQLAYLLLQEGKKYLPDFYRSDLNAELNKVWTFQRTFYPDMLTDEFKKHLEGKGQRATSAAFWGKYGFNTAEIKGSREEKKLKAYEWRSKAPHTQLTKEEVAFIITEINNDLNRSSGYLGAISDRSKELFFHKQTVGQYLYKQIQRNPHTRLKAQVFYRQDYLDEFEQIWETQARHHSHLTPALKEEIRDIIIFYQRKLKSQKGLISFCEFESKEVEIDVNGIKVKKRIGLRVAPRSSPLFQEFKIWQVLNNLELKNKENKTVFVPDLETSQRLFDELNMKGNMSASDAIKMLGYKSKEWEANYNTLEGNRTNSLLYNAYLKILEIEGYDEDILKLAGSDDIDVAKIEKPASEIKQMVQSIFGLLGINTAILDFDAELDGKAFEQQPSYQLWHLLYSAEDDTRKYNQEDVFIYGNDNIGLKKKLCEKFGFKPEHAKILANLAFGNDYGNLSSKAIRKIYPFAKELTYDKACLQAGYRHSASSLTKEEIANRTLKPRLDLLKKNELRSPVVEKILNQMVHVVNTLIEDENTKRKAGGIAEDFYFDEIRIELARELKKNAAERAEMSANITSTKALHEKIFKILQSEFGVLNPTRNDIIRYKLYEELKNNGYKDLYTNTYIPRETLFTKQIDIDHIIPQMTLFDDSFSNKTVVFRKDNQDKGNQTAYDYILNKYGEKAVEEYVSRITSLFELGKKNKEEGINKAKFQKLQKRQSEIGDGFIERDLRESQYIAKKAKNMLLEICRSVVATSGEITARLREDWSLVNVMQEINMPKFRALGLTEIIKKKDGGTKERITDWSKRNDHRHHAMDALTIAFTRRNHIQYLNYLNARKNEHHKQHGNILAIEAKETSLIVDDSGNRKRKFNAPMPNFREVVKEHLENVLVSHKAKNKVVTKNKNKTKSANGDKVKIELTPRGQLHKETVYGKYQYYESKEEKISTKFDNDTISKVANPLYKKLLHERLAANDNDPKKAFSGKNALSKSPIYLDEAKQEILPEKVKLKWLEEDILSEKTLHLKISKMKH

SEQ ID NO: 23125 - protein, 1026 aa, unidentified
  REGION 1..1026: note = Cas Enzyme sequence
WNFTDDNKIKLDCNQTRPALLSKLSKEDKRKFDEQFELKLWHIIYSVTDKSEYDTAIGRFGENNSLSEETTEKLKRAPMLKKEYATYSEKAVKKLLGLMRCGCHWSEVSIHPSSIQIIDKLLTGEFDERIENQVREKAIKLDKIEHFQGLPLWLASYIVYGKHSEVDATQWKSSKDLAEYINTFKQHSLRNPIVEQVLLESLRVTLDIWEYYAEKFGLQFEEYIDEKTGKKVKSYDRLFSKIHIEIGRELKNPKKVREKMTNSINKNKDTNQRIRKLLFELKNVKEVENVIPNSRTHFDKLKIFEQTVLSNYSEKELKAEKLDSKLTVEKFIKKNQPTFSEILKYKLWLEQKYISPYTGKIIPLTQLFTSKYEIEHVIPQSKFLDNSFNNKIICETEVNTLKDNRTAYTFIQEFQEAEVPLSGGGSVSILKKETYEKLVKENYDGRKKENLLRETMPQKMSERQMNDMRYISKAALKIYSNIVREEGERESTVKNVLPVAGKVTAKLRREWGLNQVWSGLVEERFKRLNRLICGEENENNGLFGTWVDDGGYFRTEVPLEIREDFDIKRIDHRHHALDALIIASLTSNHVNYINNEHTKSDLKRYDLGLTLRDTKQIEKTHPLTEKKTKHTVLGNYKKPWKTFTQDAKSALQEIVISFKQNLRAINKAQNYNWRYKDNAGKVVYTKNGVPKKQWIEQVSSKTDKTSNNKTNWAIRKPLHEETVYGILENGEYKGDLVKREPLNISFDEKKIETVIDPVVRSILLRHIKQDKFKGQIDEKGNIFKPEEVAFSAKGIKDLNENILTLNNGVFHHPIKKARLRFPKGKKFSIKKWEDKEGNLLRETKFVKSATGTNLYFCIYEKEGKRKYYVPPFEEILEIQKLEQDLPLEQKKNVPEQHPDFHDFKLKFYLQPNDLVYIPVKNDEDMGFENLGRQQLENIYLFKDGSGTTANFIPMFSADVIYNISNKENREKFADAYNLDKGELIKNEYGLGSPQLKNQNSVDGIQVKSVCWKLQTDRLGNITKVLK

SEQ ID NO: 23126 - protein, 1417 aa, unidentified; identical to SEQ ID NO: 22767
  REGION 1..1417: note = Cas Enzyme sequence

SEQ ID NO: 23127 - protein, 1444 aa, unidentified
  REGION 1..1444: note = Cas Enzyme sequence
MKKNLGLDLGTNSIGWALVQLGEFGKEGSIVGMGSRIIPMDGDAMQKFESGNPVSKNADRRMARTARRLKQRFKLRRSRLIEALKTLQWLPVDFPSDFKSYAENNKDKPFSISYYLPFDLSTIEETRNALGTSNIPEDWVVYYLRKKALSEKISLNELVRIIYMMNQRRGFKSSRKDQKREDDADEIKYPLFEKWIQLLFVEDIREISEERGLKLLEIKTAEITGQIKRRNIPNWKGTTIELEVTKKTLKSGEISYSFSAPDPNDWVNKKAALEESIKNSGYYVGEYLFHQLAKDKNYRIRQRIVDRSLYIEEFRAIWQKQSEFHPELNDVSKIPDVSRVLYRHNLEKQKELNTNDILYLLQNDIIYYQRPLKSQKHSIAHCKLEVKYDDQGTSYGIRVAPKSSPEFQEFRIWHTIHNLRVLKQESEVNGKTQIDVDCSSLVLSNEAKGRLYQLFDSRAKVSTSSILRELKLSEKEYRLNYPSEKEFLGNETKSIFRKVFKEHGIKEAGEILLADSKKRAKLWHIIYSLDDTKNIQSTLRNPKHGFNLPESVIAHLSKIPDLPKQYAAFSSKAINKMLPLMRCGQYFDPENIAEPIKDRINKIITGEFDVNINDETRKKLAALTDIQFFQGLPTWLASYVIYGRHSEKETEGKYTVSTEMDILKLIPNNSLRNPIVEQIIKECLSLVKDIWERYGHPDEIHIELSRDLKKTAEERKKTDNQNKINEAERRRIRTILRELPYGNPDSLADIDRLKLWEETGNEIARVGAVKFSKEPTKSEIEKYKLWGEQNHISPYTGKVIPLSKLFTPEYEIEHIIPRSRYFDNSFVNKTICETYVNDFKGHRTARNLIETDGGRTVTHKGHTFTLLTPEAYYDHCKQTFRGPKHRNLMREDIPTDFIQRQLNDTRYITRKLAELLYPIAKEKEGIVFTIGQITNELKDKWGLNRVWKEILRPRFERLQEIIGEQLIDLDEKTNNIHFKKDYKRVDHRHHSLDALVIACTTREHIRYLNSLNATEESCKYRYLVKTRYSDFVLPWETFTKDARRQLNEIIVSHKNRNRLVNKAINKYTKWVQKPDGRCVKELIRQEKGQLLSVRKSMFKEPLGKILLREYREVSIKQAIAAQWEFLTSKNRNTAPQIADKQLRHNISELIKNSGFDLNETEKFLKKHPIKDIEGNIVAKIKILEFKEYAAKRVGLDTTFTKDKINKIPNFEHSWLAKLLLEHLQEFNDEPGEAFRGEALDLLTRRAGRPINKVTIYEEIGKKRNFAGKLVEADKGTNIFFAIYEHLQTKERIINEDSSIPMLDAIERLSNKWPVADDKQGYKTIILSPNDLVYVPEEGENVNIIDWINEKGRLQRRIYKMVSCSKNTCYFIPHFISGLLLPYESKTKKGEFGSLNKSEKSFDEIMIKNVCIKIKVDRLGNIIEANGKKIVQPALAEQRSYESVI

SEQ ID NO: 23128 - protein, 1046 aa, unidentified
  REGION 1..1046: note = Cas Enzyme sequence
VAPKSSPEFQEFRIWHTIHNLRVLKQESEVNGKTQIDVDCSSLVLSNEAKGRLYQLFDSRAKVSTSSILRELKLSEKEYRLNYPSEKEFLGNETKSIFRKVFKEHGIKEAGEILLADSKKRAKLWHIIYSLDDTKNIQSTLRNPKHGFNLPESVIAHLSKIPDLPKQYAAFSSKAINKMLPLMRCGQYFDPENIAEPIKDRINKIITGEFDVNINDETRKKLAALTDIQFFQGLPTWLASYVIYGRHSEKETEGKYTVSTEMDILKLIPNNSLRNPIVEQIIKECLSLVKDIWERYGHPDEIHIELSRDLKKTAEERKKTDNQNKINEAERRRIRTILRELPYGNPDSLADIDRLKLWEETGNEIARVGAVKFSKEPTKSEIEKYKLWGEQNHISPYTGKVIPLSKLFTPEYEIEHIIPRSRYFDNSFVNKTICETYVNDFKGHRTARNLIETDGGRTVTHKGHTFTLLTPEAYYDHCKQTFRGPKHRNLMREDIPTDFIQRQLNDTRYITRKLAELLYPIAKEKEGIVFTIGQITNELKDKWGLNRVWKEILRPRFERLQEIIGEQLIDLDEKTNNIHFKKDYKRVDHRHHSLDALVIACTTREHIRYLNSLNATEESCKYRYLVKTRYSDFVLPWETFTKDARRQLNEIIVSHKNRNRLVNKAINKYTKWVQKPDGRCVKELIRQEKGQLLSVRKSMFKEPLGKILLREYREVSIKQAIAAQWEFLTSKNRNTAPQIADKQLRHNISELIKNSGFDLNETEKFLKKHPIKDIEGNIVAKIKILEFKEYAAKRVGLDTTFTKDKINKIPNFEHSWLAKLLLEHLQEFNDEPGEAFRGEALDLLTRRAGRPINKVTIYEEIGKKRNFAGKLVEADKGTNIFFAIYEHLQTKERIINEDSSIPMLDAIERLSNKWPVADDKQGYKTIILSPNDLVYVPEEGENVNIIDWINEKGRLQRRIYKMVSCSKNTCYFIPHFISGLLLPYESKTKKGEFGSLNKSEKSFDEIMIKNVCIKIKVDRLGNIIEANGKKIVQPALAEQRSYESVI

SEQ ID NO: 23129 - protein, 974 aa, unidentified
  REGION 1..974: note = Cas Enzyme sequence
HLFYSISDKKELERALDNENSKLGLPIEIRQELKKIKPYKNDYGALSEKAIKKLLPLMRLNKNTEEIKLEYKNRIDNIFYRLDEINQDKTKISEVGDDDITKGMLKSFCGFGKKYSGLKLHQASYIIYGKHAEANDTNVWKTPAHLEKFIKDFKQHSIRNPIVEQVVTETLRVVHDIWQYYGKGKENFFDEIHVELGREMKNPADKRKRMTDKINKNQNTNQRIRVLLQEFKNQNIEGVIPESPNQQEKLRIFEDDVLSQFSEKELEKQEGVNISKILKSKEPSTKEIEKYKLWLEQKYISPYTGQVIPLSKLFTTEYEIEHILPQARYFDNSLNNKIICESEVNRFKESQTAFEMITKNSGRIIDLSQNKSVKLFSIEEYQKHITQHFAKGSTKQKILLSEDIPENFISRQLNDTRYISKLVKALLSNIVREENEQEVTSKNVVAVTGNITSFLKKDWGLNDKWNEIVEPRFIRMNEITNSNDFGYFDDKKGFFRTDVPTELKKDFNKKRIDHRHHAMDALVVAVATKNHVNYLSNLHAKSDNSRFDLRDKLRRMEEKIYKGEKRKYAKEFLMPWNGFPVEAKKCLEDIVVSFKQNLRVINKASNKYQIKKKGKAEIKTQEGTNWAIRKPMHKETVYAKVDLRHKKSIAINAAIDGFMKNKFVFVDKELKQKIKNLVQLSYDNKMIIRYFKENKFKNKKLKKVEVYYQDNYFSAVRKTIDESFKSKKWIEESITDSGIQKILSNHLEKYNETDENDKIKERPDLAFSEEGLIEMNKNIVGLNGGKNHKPIYKARVYETFGNKFAVGQTGNKKDKYVEAAKGTNLFFAIYQGKNIKGAEVRQYETIPLNIVIERQKQGEDSVPEKFFDKDKCEYSLLFHLSPNDLVYVPTKEEQEDINNIYFGNLSLEQKMRIYKIVSFTGNRLYSISYNVAKSIFDKNEYTLLNKVEFTDERYSVKETCIKLKVDRMGNISKP

SEQ ID NO: 23130 - protein, 1506 aa, unidentified
  REGION 1..1506: note = Cas Enzyme sequence
MKKILGLDLGTNSIGWALINSDSENNNNKILGMGSRIIPMSQDILSDFTQGNSISQTAERTQYRSTRRLRERHLLRRERLHRVLHLMGFLPKHYDEMIDFENHPGKFLPETEPKIAWSKNDEGEYEFIFKKSFEEMMADFKANQPELLTDGKKVPYDWTIYYLRKKALTQKIEKEELAWILLNFNQKRGYYQLRGEEEDEENPNKSIEYHALKVTHVEADEAEKNKSDIWYTIYLENGWTYRRSSKIPLFDWIGVTKEFIVTTELNDDGTVKIDKEGKEKRSFRIPSEDDWTLLKKKTETDIDKSKKTVGTYIYDTLLEKPDQKIRGKLIRTIERKYYKKELKKILTKQKEFHPELKDRNLYRSCVVELYPNNKAQQNNIRNKDFTYLFIEDIIFYQRPLKSKKSLISNCKFEYRTYKDKEGNIRKAPLKCVPKSHPLYQEFRLWKFVQDLRIYEREKKINGKLYIDYDVTNEFIKTKEDLVNLFDWLNKRSGIKQNTLLSSYFKVKKTNKTDKQLPYRWNYVEDKEYPCNETRFSIINRLEKINDLPDNFLTNRKEFELWHLLYSVIDKNELEKALKKFAAKNNLPINEFVDAFVKFPPFERDYGSYSEKALKKLLPLMRMGKYWNYEAIDLNTRQRIEKLLTGEVDETIHDKVREKTSHLTDEKQFKGLPEWLAAYVVYGRHSEMSEYTKWNTYHDLNNYLQDFKQHSLRNPIVEQVIMETLRVVRDCWEKYGNIDEIHVELGREIKNPAEKRKKITKTITQNENTNLRIKALLIELANDGVENARPYSPTQEEILKIYEEGVLNSTIDIPNDIEKIVRKATPTKQELNRYKLWLEQKYRSPYTGEIIPLAKLFTPAYEIEHIIPQSLYFDDSLSNKVICESEVNKLKGNQLAYEFIKTHHGEKVELNFGKTVEIMSKEAYEKFVNENYRNNFFKRKKLLMDDIPDEFIERQINDTRYITKVVKSLLSNIVREEDEQEPTSKNVIVTTGQITNTLKRDWGLNDIWNEIIYPRFERLNRLTNSTLFGQWVNENGKRFFRTQVPLDLQKGFSKKRIDHRHHAMDALVIACTTRNHVNYLNNESAKSSNRETRYDLRNKLCKKVKTDDKGNYIWQFIKPWETFTQDAKIELENIVVSFKQNLRVINKTTNYYQRYVNGKKVIDKQTKGDHWAIRKSLHKDTVAGQVNLRFKKKVSLSVAIDQPENIVDKQLKREIKNLQKEKFDKKQILKYFGNLNYRWQGKEIKQPEIYYFSNDKVEMTASRVNLDTSFGTKKIESITDTGIQKILKNHLSKFDENVNGTIIEHPELAFSPEGIEEMNKNIRELNDGKPHKPIIKIRTYETKGNKFNVGTKGNKKLKFVEADKGTNLFFAVYIDDDGKRNFETIPLNIIIERLKQGYEAVPEKNEKGHRLLFHLSPNDLVYLPTEEDIINGNVSIPLDNNRIYKMVSCTGNVADFIPFYVANPIVKTTELGSNNKAQRAWTGEMIKEICIPLEVDRLGNIVKIKTT

SEQ ID NO: 23131 - protein, 1370 aa, unidentified
  REGION 1..1370: note = Cas Enzyme sequence
MKKILGLDLGTTSIGWAYVNESENESEKSEIKKLGVRIIPLSTDEETDFQKGKAVSINADRTLKRGARRNLDKYQQRRDALIEILIENKFISDATILSEEGKATFETYKIRAKAAKEKIIKEELAKVLLMINKKRGYKSSRKAKNDDEGIAINGMKVSKYLYDNDLTPGQYVYKLLKDKKKYIPDFYRSDLQNEFERIWEFQKSFHSEILTNEFKEQIANKGKLATSKTFLGKYQIYTAENKGKRDEVKLQAYKWRQEALANELSKEELAYVIVEINNNINSSSGYLGAISDRSKELYFNTQTVGEYLYSQLKQNPHARLKNQVFYRQDYLDEFERIWEKQSEFHSELTNELKTKIRDVIIFYQRRLKSQKHLISNCEFEKYHKTIPKSSPLFQEFKIWQIINNLEIRHIPTRTKYKNEDIEQETKDLLFNELNIVEKLSAQDVLKILVENPIEYELNYKDGLEGNRTNAALYKAYLEILKLENQEINIKKLSADDVNYQVSTKFSELNIEQEVLSLNTNLVENEYDKQPILQLWHLLYSFEGDNSRTGDESLIKAISEKFGFKLEYAKIISNIELQSDYGSLSTKAIRKIIPYLKEGNTYDIACDNAGYNHSSSLTKEEQEKRELKDILTLLPKNSLRNPIVEKILNQLVNVVNAIIKDENLGKPDEIRIELARELKKSAKERADATTYINKATIAHDKIRKELANLYPFNTGVRITKNDIVKYKLYLELAPLGYHTIYTNTYVPLEKLFSKEFDIEHIIPKAVLFDDSFSNKTLATRHFNSHEKSNKTGIDAIIEKYGDDSPNYYRYKENIEKLYNKGKGEFSKAKYNKLLMRGTELPDGFIERDLRNSQYIAKKAKQMLEEVVRTVNTTTGKITSRLREDWQLINIMQELNWEKYDKLGLTHYEKSKDGKDIPKITDWTKRNDHRHHAMDALTVAFTTYSHVQYLNNMSARKNEAHKEYHSVYGIEQKYLYRNEQNKLLFKSPMPLDKFRVEAKKHLEDILISFKAKNKVVTRNKNKTKLQGKDNYKTKVELTPRGQLHEDTVYGEIFWSRVSLTDKISKKEIEAIKDKKLKKYVSEYILEKGGIRKAFSKENLQNLKYKNKSLTEITVNISCYTKRIEISKFFTDSQKTRSAKEKAINNLLDLGIRKIFKARLDKFEGDYKNAFSNLDENPIWLNKEKGISIKRVTITGVSNVEALHSKKDHNGKYILDDNGKKQAVDFVSTGNNHHVAIYRDEKGKLQDEVVSFYEAVGRVNEGLPIIDKEKDGLEFLFTMKQNEYFVFPSVVFKPDEIDLLNPENASLISNHLFRVQKISSGDYNFRHHLETVVESKKELNNISYVRIRSANNLEGIVKVRINHLGQIVKVGEY

SEQ ID NO: 23132 - protein, 1236 aa, unidentified
  REGION 1..1236: note = Cas Enzyme sequence
MKILGLDLGVTSIGWALIEKNNENEEINLIKSGVRIIPIETKDAMQFSSGNTASPNIDRREKRMQRRMYFRKKKRNQSLIRTLVDNGLWDANLINIEKNELWKLRNNAVNEQIYLSELGRILYHLAQRRGYKQMRIEQDEADSKSDYKKNIYTRYQTIQNENITVGQYFYRELQNNEHYRVKEQIFPRKAYEEEFEKIINKQKEYYPQVLSDDFINKLKHIIFYQRPLKSQKHLLGVCALEGKTIKIKNDGGNIIEKFVGPPVIAKTNPLFQIHRIWQTINNITIKNKKTHKNYELSIDEKNKIFNELQDKDALSIEQLYKILNLSKDEWYFDKLSKNGIKGNELLALIRKALKNEFFSPDIFKLDIKIINYQKQIIDKNTGEIKEATLEIIDPNVVNEPLYKLWHILYSVVDKEECMKALKKNFNFSTTAADKLSDINMTSLKYGSLSLKAIRKTLPYLMKGMIYSDACQIVGYNFSNAISKDENYHRPLKNKIPLLPKNSLRQPIVEKILNQMIHVVNEIIDDNNGLVSKEERENGNFAIHIELARELKTSKEEKQGITKAIYKNTKENKEIENILKNQYNLTPTRKLIEKYKLYKELTPEGTNILQPQCIYCGEFISITEALTGDAIDVDHIIPQSKLFDDSRNNKVLVHANCNRTKGNMTAYDFMQNKSQDQFKNYLALVENLKEKKSISYKKYKYLLMSEKDIPQDFIDRDLRLSQYITRKAREICMDISKDVLVTSGTITARLRELWGYKDIISEINTELINDIELSDENKSQLVEIFGDKRSDHRHHAIDAITIASTTRSIIQRINTLSSAESKEKINEYLKQLNQDTLDTVYNPNEKNLRLLHKYLANQPHPNRDQVKQNIRDILISFKPGKKVATYSKRIVYIGNKPKILQTHILTPRGALHEESYYGRIALSEFKDLKYAIENVNLIVNNHIRSQIMNLLVEYNNDTKKLWNDIKKDKVLIYSDINNTNPIKDVKCYKYEYVIKKSVNGEKVDQKAIDKKIKDILSNSKTKKDVIYFNEVKKIPIHSVRVLTGLDNNSMRAIRCNHNGEPITFVKLGNNHHIALYKDKNEKYQEHLCNFWHAVERKKYNIPVIIEHPDKIWDQVLVNPDKYQQEFLNKLPDPSWHFVLSFQANEMFILGLSNEEFDQYINEKNYSILSNHLYRVQKVSSFYYMFRKHTDTSVDELDYLAKISMFKRISSINSLIKENPIKVRINYLGEIIDYKKTF

SEQ ID NO: 23133 - protein, 1237 aa, unidentified
  REGION 1..1237: note = Cas Enzyme sequence
MKILGLDLGVASIGWALVEKNNENGEINLIKSGVRIIPIETKDALQFSSGNTASPNIERREKRMQRRMYFRRKKRNQSLIKALKDKGLWDVNLINIEKNKLWELRNNAVNEQIPLTELGRILYHLAQRRGYKQMRIEQDESDANSKSDYKKNIYTRYQTIKNENVTVGQYFYKELSNNEHYRVKEQIFPRKAYEEEFEKIINKQKEYYPDILTDEYNNKIRHIIFHQRPLKSQKHLLGVCTLEGKTIKIKNNDGTVKEKYAGPPVVAKTNPLFQIHRIWQTINNITIKNKKTHKIYELSIEEKNKIFNELQNKDSLSIKQLYKILNLSDDEWYFDKLSKNGIKGNELLTLIRNALKGENYPQDMLKLEIKIINYKKKIVDKDTGEIKEQELEMIDPDVVNEPLYKLWHILYSVVDKEECMKALMKNFKLTESAADKLSDINMNSMKYGSLSLKAIRKTLPYLMKGMIYSVACDTAGYDFSNAITKEENTFRKVKNKLDLLPKNSLRQPIVEKILNQMIHVINYIIDENNGLVSREEREKGNFAIHIELARELKTSKDEKQKISSSIRRNKIENERIKSELINQYKLTPTRKLIEKYKLYNELIPEGSNIVQPQCLYCGGFISLTEALTGDAIDVDHIIPQSKLFDDSKNNKILVHASCNRTKGNLTAYDFMKTKNSDIFNNYLSLVENLKNRKSISYSKYKYLLMSEKDIPQDFLDRDLRVSQYITKKARELCMNISRDVLVTSGTITARLRELWGYNDILFEINNELMNNLDLTDDDIAQLEEIFRDKRTDHRHHAIDAVTIASTTRSIIQRINTLSSTESKEKINEYLKQMNQESLDTVYNPNEKNLRLLHKYLANQPHPKRDQVKQSMKYILISFKPGKKVATYSKRIVYLGNKPKILQTRILTPRGALHEESYYGRIPIYEFKDLKYAIENPNLVVNNHIRNQIKELLDKYNNDTKKLWNDINKEKVFIYSDINNSNAIKDVKCYHYEYVIKKSVQGDKVDQKAIDKKIKEILTNSKNVKEEVYFNYAKHIPIRSVRVFTGLNESSMRPIRLNDKNEPITFVKLGNNHHIAIYQDKNEKYQEHLCDFWHAVERKKYNIPVIIENPDKIWDEILENPDSYPQDFLNKLPDPSWHLVLSFQANEMFVLGLSNEEFDQYFVDKNYAILSNHLYRVQKLSTNQYFFRKQNDTSSDLSSLYRKIEYLKQLSIQSLLKENPIKVRINYLGEIVDYKKTF

SEQ ID NO: 23134 - protein, 1053 aa, unidentified
  REGION 1..1053: note = Cas Enzyme sequence
EKTQEGLKVIPKSHPLFQEFRLWQFLKNLKIFQKESLVRGNNQLDVECTDMLLKTEDDWVNLFDFLSNKEKIDQTQFLKYLSDLKLIPKQNKNNPNYRWNYVEDKSYPCNETRAAILNRLKRVENINAEEFLTFQFEFDLWHIIYSVTDKLEFEKALHTFAEKNNLDTNSFVKNFKKIPPFQSDYGSYSEKAIKKLLPLMRLGKYWKAEDISEETKNRITSIIERLTAIGFNKEKISDIQDDDIPTRLLKSFMPFQHVSPLRGLNTYQASYAIYNRHSEVAGITEWQTPEDIDIFLTEFKQHSLRNPVVEQVVTETLRVVRDIWKKHGDSNELLFDKIHVELGREMKNSAKQRKYISNKNSENENTNLRVKEILKEMMADPSTEGDIRSFSPSHQELLKIYEEGIYQNSTANFTKVSEKDIEKIRRSSDPSKAEILRYKLWLEQGYISPYTGAIIPLNKLFTTAYQVEHIIPQSRYFDNSMGNKVICESDVNQDKGNKTAYEYLREKEGSIIEGHKLFKLPDYESHCNNYFKKNRTKLRNLLSDEIPEGFINRQLNDSRYISKLIKGLLSNLVREANEQEATSKNLIPVTGAITSKLKQDWGLNEKWNELIAPRFKRMNEISKSNDFGFDDDFKLNGKATGKTFFRIQVPLEIEKGFNKKRIDHRHHALDALVIACISKRHIHYLNSLNTEKENYSLRDSLLIKNERGHFTKTFKMPWSNFVNDAKNELEKTIISLKQNNRVINKTNNKTWQWVDLDGNLKKRLVPQTKGDNWAVRKSLHKEMVYGLIDLDVPKGKVATAVRVALSDIKNQKHIDKIADKAIQTILTNHLKNFIDEKGKPDFESAFSTEGIEALNKNIKSLNNGKKHQPILKTRLFEIGVKFPVGQSGNNPNKYVEADKGTNLFFAIYWDETKQKRVFNTVPLNVVIEHQKQVAHLPKNERLPIPVDKTLGEYRFTLSPNDLVFVPTEEEVVSPNMVDFDNLTSEQVSRIYKMVSSSLSQCFFIQSHVAQSIQNKVEFSALNKMERDLNGNMIKEVCWKLNINRLGNVLSVEG

SEQ ID NO: 23135 - protein, 1380 aa, unidentified
  REGION 1..1380: note = Cas Enzyme sequence
LQKYKTNIMKKILGLDLGTTSIGWALVNEAENNEEKSSIIKLGVRVNPLTVDEQQNFEKGKSITTNADRTLKRSMRRNLQRYKLRRENLIEILKENGFITDETILSENGNDTTFETYRLRAKAAIEEISLEELARVLLMINKKRGYKSSRKVKSNEEGQLIDGMEVVKQMYENNLTPGQYSLSLLKKGGKNLPDFYRSDLEAEFDKVFDKQMKFYPDILSLDLKEELRGKKRDAVWAICAKHFKENGFELVGVKRQGKIAEQKEENYEWRTKALSEKMELEQFVIVIQQINIQLNNSSGYLGAISDRSKELYFNKQTVGQYQMAELDKNPNYSFKNQVFYRQDYLDEFEKIWETQSKFHKELSADLKKEIRDVVIFYQRPLKSQKGLISFCEFENKQVEVEVDGKKKIKTIGLRVCPKSSPLFQEFKIWQVLNNLSVNGEDLEQEEKEALFAELSIKEKLTKTEVLKLLFENHKDLDLNYKEVEGNRTQAALFKAYQQIIELSGHGEYDFSKMSYSEVMEIVEPVFKGLGYNTEILHFDSSLEGKEFEKQPAYQLWHLLYSFEGDNSKVGNEKLVNKISTLYGFEKEYAKLIASVTFQSDYGNLSTKAMRKILPYMKEGSEYSVACEYAGYRHSKKSLTKEELDNKVYKEKLELLPRNSLRNPVVEKILNQMINVVNCIVDTYGKPDEIRIELARELKKSAKEREEMTKAISQVKAEHDKYRAILQNEFGITNVSRNDIIRYKLYLELKDNGYKTLYSNIYIPQEKLFSKEFDIEHIIPQAKLFDDSFSNKTIESRSINIEKGNLTAFDYVKEKYGIQGLSDYQTRVEDLCKKGLISKTKRNKLLMQEADIPSGFIERDLRDSQYIAKKAREILEDLVKFVVPTTGAVTDRLREDWQLINVMQELNWDKYDKLGLTEYYQDKDGRQISRIKDWTKRNDHRHHAMDALTIAFTKRSIIQYLNNLNARSDKSGSIYGIEQKELYRDSHGKLKFNPPIPLDEFRAEVKHHLENTLISIKAKNKVTTQNINITKRKGGVNKTEQQTPRGQLHNETIYGSIKQYVTKFEKVGSDFNAEKIVTVSKPAYREALLRRLQEFNNDPKKAFTGKNSLEKNPIFLDKACSKQLPERVKTVSLETVYTIRKDVSPNLKLDKVIDANIRKILEARLKEYDGDAKKAFSNLDENPIWLNKEKGIAIKSVTITGVSNAIALHEKRDKDGKLILDTDGKVQPSDFVSTGNNHHVAVYRDAAGNLQENVVSFFEATTRLNIGLPVIDKNYKSDEGWKFLFTMKQNEYFIFPNKEVGFDPNEIDLLNPDNYALISPNLFRVQKIAIKDYSFRHHFETTVDGKNDLKGITWKRCSLSGIIGIVKVRINHIGQIVSVGE

SEQ ID NO: 23136 - protein, 1103 aa, unidentified
  REGION 1..1103: note = Cas Enzyme sequence
MRIEQDEADSKSDYKKNIYTRYQTIQNENITVGQYFYRELQNNEHYRVKEQIFPRKAYEEEFEKIINKQKEYYPQVLSDDFINKLKHIIFYQRPLKSQKHLLGVCTLEGKTIKIKNDGGNIIEKFVGPPVIAKTNPLFQIHRIWQTINNITIKNKKTHKNYELSIDEKNKIFNELQNKDSLSIEQLYKILNLSKDEWYFDKLSKNGIKGNELLALIRKALKNEFFSPDIFKLDIKIINYQKQIIDKNTGEIKEATLEIIDPNVVNEPLYKLWHILYSVVDKEECMKALKKNFNFSTSAADKLSDINMTSLKYGSLSLKAIRKTLPYLMKGMIYSDACQIVGYNFSNAISKDENYLRPLKNKIPLLPKNSLRQPIVEKILNQMIHVVNEIIDDNNGLVSKEERENGNFAIHIELARELKTSKEEKQGITKAIYKNTKENKEIENILKNQYNLTPTRKLIEKYKLFKELTPEGTNILQPQCIYCGEFISITEALTGDAIDVDHIIPQSKLFDDSRNNKVLVHANCNRTKGNMTAYDFMQNKSQDQFKNYLALVENLKEKKSISYKKYKYLLMSEKDIPQDFIDRDLRLSQYITRKAREICMDISKDVLVTSGTITARLRELWGYKDIISEINTELINDIELSDENKSQLVEIFGDKRSDHRHHAIDAITIASTTRSIIQRINTLSSAESKEKINEYLKQLNQDTLDTVYNPNEKNLRLLHKYLANQPHPNRDQVKQKIQDILISFKPGKKVATYSKRIVYIGNKPKILQTHILTPRGALHEESYYGRIALSEFKDLKYAIENVNLIVNNHIRSQIMNLIVEYNNDTKKLWNDIKKDKVLIYSDINNTNPIKDVKCYKYEYVIKKSVNGEKVDQKAIDKKIKDILSNSKTKKDVIYFNEVKKIPIHSVRVITGLDNNSMRAVRCNHNCEPITFVKLGNNHHIALYKDKNEKYQEHLCNFWHAVERKKYNIPVIIEQPDKIWDQILVNPDKYQQEFLNKLPDPSWHFVLSFQANEMFILGLSNEEFDQYINEKNYSILSNHLYRVQKVSSFYYMFRKHTDTSVDELDYLAKIKMFKRVRSINALIRENPIKVRINYLGEIIDFKKTF

SEQ ID NO: 23137 - protein, 914 aa, unidentified; identical to SEQ ID NO: 22807
  REGION 1..914: note = Cas Enzyme sequence

SEQ ID NO: 23138 - protein, 1382 aa, unidentified
  REGION 1..1382: note = Cas Enzyme sequence
MKKILGLDLGTTSIGWALVQEAEKENETSKIIKLGVRVNPLSTEEVKDFEKGKPTTINADRTQKRGIRRNLQRYKLRRKNLIDVLTQNNIIDENSVLTEEGKNSTFETLSLRNKAPKEKIGEEEFARILLSINKKRGYKCCRKAKSEEEGKMIDGMSVAKELYENNYTPGQYTYQLLLNHKKYIPDFYESDLKNEFLQIWDFQKQFYPALLTETLFNRLENKNQIWAICKGPFDLKGISHKGSAEEKTLDKYKWRSEALTTQIDLETLAIVLQEINQDINKSNGYLGAIGDRSKKLYFHKMTVGQYLYKQLTTNKHTSIKNQVFYRQDYLDEFEKIWETQAKYNPKLTATLKKEIRDIVIFYQRRLKSKKGLINICEYEKKTIEMVKKNKIKMKVVGPRVIPKSSPIFQEYKIWQNINNLVFTPKNEKKNHLDLDVSKGTLTAIQRTNLFEELNLRGTLKISSVLKILGMKSKDWKCNFKEVEGNKTNHALYKVLQQIAKDEGHGVDWDKKSATEIKEELLILLTKTGIDPNIINFNINSEHPEKQTSYQFWHLLYSAEDDLKTNKEDEAIYGKNSVGLKKKLHLKFGVPVAYTFLFANVILQPDYGNLSCKAIKKIIPHLQKGLEYSEAVKLAGYKHTSSLTKEENLKRILKDKLEQLPKNSLRNPVVEKILNQMVNVVNQIIEHYGKPDEIRIELARELKKSAKDRKEMISYILKATKRNQEIKRTLTKAPFNLKHPSKNDIVKYRLYKELKPLGYKTLYTDKYIEPHMLFTKAIEIEHIIPKAVLYDDSFSNKTLAYSEVNLKKSKMTSYDYIDKTDHKNLEGFIQRVHDFYGKGKNEVSKSKYLNLLTSLDQLSHDFIERELKNTQYIAKKAKEILFDICREVHTTNGKITDKLRNDWDLLNVMKELNLPKYRKIGMTVIEERKNGNTVEQIIGWSKRNDHRHHAMDALVIAFTSKSLTQHINTLNAKNDQQSVKSIMINKKQEVKLKTNGLYVLPMPNFRTEAKQHLEKILISFKSKNKVVTNNINIIKIKKGTLKKVQLTPRGKLHKETIYGHSKKEIVQKEKIGSSFTLDKIHTITQPKYRAAVLKRMAEYQNDPKLAFGGKNTLRKNPIVLDDGTKMPIMVTTKSFQDIYTIRKGIGPDLKIEKVIDPKIRKLLYKRIEEHNGDRKAALSNLETEPIWLNETKGIAIKKVTMSGVSQVEALHTKKDHRGKVILDANKNTQPVDFVSTGNNHHVAIYRDPEGKLQEQIVSMFEANARVNQNEPVVNKNFNKEIGWEFLFTLKQNEMFVFPNEEFDPNEYDLLDEKNHYKISPHLFRVQKLSTKNYFFRHHLETTVELKKELKNITYKPQLGLLGIKGIVKVRTNHLGNIVQVGEY

SEQ ID NO: 23139 - protein, 1200 aa, unidentified
  REGION 1..1200: note = Cas Enzyme sequence
ENGQVKIVKDKKSDKEGKEKRRIIPLPSFDEINLMSKSEPDRIYKKIKAKTETAISNSGKTVGEYIYENLLQNPSQKIRGKLIRTIERKFYKEELKQILQKQKEFHPELQNDDLYNDCVRELYKNNEGHQFLLSKRDFIHLLLDDIIFYQRPLKSQKSLISNCTFEFKKYNVGNEEKIKYLKAIPKSHPLYQEFRFWQWIYNLRVYRKDDDQDVTNDYLNDPEKYADLFEFLSNRKEIDQKALLKYFKLKESTHRWNFVEDKKYPCFETRTLISTRLEKVKDLPPNFLTDQTELQLWHIIYSVTDKIEFEKALSTFAKRNKLDVTTFVENFKKFPPFKSEYGSYSGKALKKLLPLMRSGRYWKWDDIDEKTKTRIDKIITGEFDEDIKNKVREKSINLTTENHFQGLQVWLASYIVYDRHAEAATINKWDTIEHLENYIKEFKQHSLRNPIVEQVTLEALRVIKDIWKQFGKSAENFFDEIHIELGREMKNTADERKRLTSQINDNENTNVRIKALLAELKNDSNIENVRPFSPIQQELLKIYEDGVLNSEIEIPDDISKISKTAQPSSSELQRYKLWLEQKYRSPYTGQVIPLAKLFTTDYEIEHIIPQSRYFDDSFNNKVICEAAVNKLKDNQTGLEFIKNHHGEIVQTVFDNKVKIFEENDYRDFVKTHYIKNRSKRNKLLMEEIPDKMIERQINDTRYITKFISALLSNIVRAENNDEGLNSKNLIQVNGKITSLLRQDWGINDIWNDLILPRFLRMNQITNSDAFTRYNDKYQKYLPTVPLELSKNYQSKRIDHRHHALDALIIACATRDHVNLLNNKYAKSKERYDLNRKLRLFEKVVYTHPKTGEKIEREIPKNFIKPWDTFTVDTKNFLDTIVVSFKQNLRIINKATNQYQKWVKLNGRNVKKEVKQSGINWAIRKPLHKETVAGKVELKRIKVPKGKILTATRKNLDTSFDIKTIESITDTGIQKILKNYLSAKGNDPTIAFSPEGIEEMNKNITRYNNGKPHRPIYKARIFELGSKFILGLTGNKKAKYVEAAKGTNLFYAIYVDENNKRSFETIPLNIVIERQKQGLSSVPENDDKGNKLLFYLSPNDLVYVPDEDEIINESYLDVSNLSNEQKKRLYNVNDFSSTCYFTPNRIAKAIAPKEVDLNYDNNKKKLFGSYDTKTASVNGIQIKDICIKLKADRLGNISKAN

SEQ ID NO: 23140 - protein, 988 aa, unidentified; identical to SEQ ID NO: 22777
  REGION 1..988: note = Cas Enzyme sequence

SEQ ID NO: 23141 - protein, 1462 aa, unidentified; identical to SEQ ID NO: 22810
  REGION 1..1462: note = Cas Enzyme sequence

SEQ ID NO: 23142 - protein, 1378 aa, unidentified
  REGION 1..1378: note = Cas Enzyme sequence
MKKVLGLDLGTNSIGWALVNEAQNKNETSEILKLGVRVNPLSVDEKTDFEKGRPLTINADRTLKRGARRNLQRFKLRRENLIEILLRENLINNNTLLTETGNAVTFETLAFRAKAANEKIDLEAFARVLLSINKKRGYKSSRKAKNEGEGNLIDGMAVAKELYDRQITPGQFVLGLLEQEKKYIPDFYRSDLKAEFDAIWTFQMQFYPQIFTNEFYKSLEGQGLQSTRKRFLAIHQIYTAENKGKRDIVKLQHYRWRVEALTKQLELPEVAYVLVEINNNLNNSSGYLGAISDRSKELFFKQETVGENLYNQIQKNPHTSLKNQVFYRQDYLDEFEKLWEMQSQFHSQLTTELKDEIRDVVIFYQRKLKSQKHLISTCEFEKYHKVLPKSSPLFQEFKIWQILNNIEFENSETKETKILSQEDKDLLFEELNLRGDLKPDVVLKLMELPKNFWVINYKESLDGNTTNKALYNVYHEIAENEGYGFDWSKKSAKEIKNELTNIFPLIGIKPEILKFDSDIEGNDFSKQLGYQLWHLLYASEDDVKTKKEDVLLYGNSNTSLKKNLFNTYGFKPEYGAMMSAISFSQDYGNISARAVKKILPYLKVGHEFSEACSLAGYRHSHHLTKEEAAARTLKDALSLLPKNSLRNPVVEKILNQMINVINQVVETYGKPDEIRVELARELKKSAKERAETTSYVNAGKRRHEDIRKILTKDFGIQNASRNDIIRYKLYEELSSNGYKTIYTNTYIPKELLFSSQIEIEHIIPKAKLFDDSFSNKTLAFSKPNKDKGDSTAFDFIESYFLSDLENYKARVSTFYGNKAISKAKYNKLLMKESELPDDFIERDLRNSQYIAKKAKQLLLEVFRTVNTTTGRVTDKLREDWDLINIMKELNLPKYRALGLTEMQERKNGKKIEQIIDWTKRNDHRHHAMDALTVAFTTYNHVNYLNHLNASRFEKNKELFAVRNKITKMYGPENGSKKRRFIPPMTNFREEAKKHIEAILISFKAKNKVVTKNKNKIKTKGGIKKVTQLTPRGQLHKETVYAGRKRVVVKIEKISAKFTLEKIEQVTKPIYKIALLKRLQENNGDPKKAFAGINSLSKKPVLLETGETIPNEVKTQYFETIYTIRKLVNADNFKDLKSLQKVQDLKIREILENRLEEFGGEAKEAFSDLDKNPLWLNKEKGIKIKRVAISGVSNVETLHHKRDHFGTTILGENGVEIPSDFVSTGNNHHVAIYSDKNGKLHDNIVSFYEAVSRVNAGLPIVDMTLNESLGWKFLYTMKQNEMFIFPNENFNPKEIDLLDVKNRLLISKNLFRVQKLSKVDYGNSAVRDYVFRHHLETKIEDNKALKNITYVVCKSLPLFKDIVKVRLNHLGDIVHRGEY

SEQ ID NO: 23143 - protein, 1099 aa, unidentified
  REGION 1..1099: note = Cas Enzyme sequence
VAPPLFGAIKLLVNNQTAISEGAKRAGTSSVVKTKRSHSVARGGFALATRLGLDIGTNSIGWCLYDGDRIRDIGVRIFSDGRDRKSGASLAVDRRNARAMRRRRDRYVRRRSALLAALVDTGLMPSDAQDAKALAGFDPYALRTAALDSALSPYELGRALFHLNQRRGFKSNRKTERKTGDDKEGGKIAGGAKALDVAMGDRTYGQFLNGRPVKRVRLRGEGEGYDFYPERRHLEAEFEAIWSAQARHHPALLTESLRDRLHRIIFFQRPLKSGKVGGCTFFNEEPRLAKAHPLFQERRLYEEVNQLEITKAGAPSRKLTLDQRDMIVLKLKSAKTASFSGLSRLLKLTDGESFNKASENRTGLAGDEIFASFGHRKCFGSRWVHFDAGTQWSIIEQVAEEEDPVRLHDWLVATHGVTSGQAEVIGRVRLPEGHGRLGETASRLILAELRKGVVTYNEAVEAALGKSHSDLRTGEVLDQLPYYGELLSREIPPGTLDPNDEEEVRWGKITNPTVHIGLNQLRRLLNAIIKVHGRPDHIIVELARELKLNEKERAEHNRRIGANTRAAAARSRKLRLTEQRDSGANRALLKLWEDLNPDNPLDRCCPFCGRHIGQHALFTDETEIEHIIPYSRSFDDSAANKVIAHRSCNRDKGNRTPWEAWGHTERWAPIAEQVARLHTSKQWRFAPDAMERFDRDGGFIARQLSDTQYLSRMARTYLASLYPDSAGVFVIPGRMTAMLRRLWGLNELLPDHNYVENPHSGAPKNRLDHRHHAIDAAVVGVTTRGLLNAISKAAARADDQNLDAMFDELPKPWDTFRDDLRRALDKIVVSHKADHGRKGVPPKDRDVTAGRLHNDTAYGLTGMASDSGLPIVVHRVPLLSLQPADITDPIRIPDAALQRALARTAEGLSGKDLQKALATFSRSDPVFRGIRHVRVRAALNVIPIRDAAGRAYKAYKGDANARFDVWRMPDGKWISSWKDRGGKSHSGVVSMFDAHQTDRPLHRPHPAAKRVLSLRQNDLVAVEPQDQPRKIMRVIKFSHRGEITLADHQEAGALKARDATSSDIDPFKYFNSSASGLQKAKARQIRIDELGRIFDPGPR

SEQ ID NO: 23144 - protein, 1434 aa, unidentified
  REGION 1..1434: note = Cas Enzyme sequence
MKKLGLDLGSSSIGLAVLADNKLINKAVVTFQSGMMKGQTGGYTSPTKDRRDARSKRRLIQARKYRKWELLKVLLDKRVPLSKDELELWSKYKKGQIQKFPENEDFLKWLACDFTYLVDGGKYQNPYEIRVKALDNKLSDHEFGRALYHVVQRRGYKNTGETDEETEKQIKRRSESGFEDALNNNRTIAEALTNSFLNKGERARNQYPYRDEYCNELEQLCKSQGFDISKNTKDEYNDAFVQQLWKAVIWQRPLRCQKGNIGKCTLEPTKTRCPISHPIFEIFRAWSFINTIKYIDDLGKKRDISQDFRNQLFEELFLKKEKNFKFEEIRKFLDRLFMKRKHYNYPYDEKKGVYDSNVAGMPVCSGFIKVLGERMKDAIPAIENYNIGNAPKIVQDYSIYDLWHLIFEFDEKHLEKFAVEKLHIENEKTKKGEEYNPFVKLKGGFVLGYADLSIKAMVKIIPFLKEGFLYNDAVILAKIPELVGGDWKEKQNIIKTALKSSNKLYRQRSEIVGITNNLIDKYKGLIYPDIFAYKDFQYALVESDLKSIEIACAGFFGEESWKSRTNKDEVLRQVRAEYQSFFQDTQRAYKATPTLTGIFEGQLKEIKIELAGTLYHHSNKQNIYGTKIKDKKTGVEILPVPRIDSIKNPMFNKSMSILRRLINELITSDIIDEETEVTIEVARELNDNNKRIAIERYQNERKAKRDKFREFLNEFKTKENNSINVEESISVFELWTEQTFEQAENEKGEETKNHNRNDILREKEALKRYELWIEQKGQCIYTGKMISITKLFSNEIDIEHTIPRSILPDNTMANQTVSYAKYNRDIKNNTLPYYLDNYDKDFGGHPAILPRLDNWMQIRDNYKDIYEKKLKPFVNEDEASKNKRIQEKHYFKMHYDYWHDKVERFLATEVKDSWARRQLVDTQMISKYAREFLKTYFKKVAVQKGSTTADFRKIYGFQEADEIKNRNKHTHHAIDAAVLTLIPTNSSQRDTLLKKMYKIYESENRQYTIPPFAGFNSQNLIHEIESTTLVFNYENDKISKQTYRNVRKRGKLQYLKNSNGEFTLDMNGNKIQLKAKGDSIRSTLFKQSFIGKIRDVERNKNGKPQRDTNGEWIYKTAIDEFLFVERKPIKDVLSKIEDIIDPVIRELVRNQKDQSEIRDYQGNIIRHVRVRTKAGKEVKKRVNYRSEHPYKNHFYAAAGSVPYAILFQKVKDGKVERELIPIESFEVAKNRKIFEDFDIDQFVMKCHPELAHFDDKLLLKVGQKVMVLKDDEEYEKRHDIDFQTKRMYVISQFSESIWLKYHLEAQAKSSIDDSVKDEKDKLLRQFEVDHGIPEVVENVAIEDNKLRKEDYEKKKYSFDNLSRYRFQRLIETIGSEKTKEIKKELDRFKTQSSFIEMEGKTPLLKMSKENWNFLYEGYDFEVSMLGQIRWVAIR

SEQ ID NO: 23145 - protein, 1391 aa, unidentified
  REGION 1..1391: note = Cas Enzyme sequence
MKRILGLDLGTTSIGWAFVNESEKDDENSSIIKTGVRVVPLTTDEEDDFKKGNSITINADRTLKRGARRNKFRYQIRRKNLINELKKINFINDKTQLAETGKNTTHELLSLRSMAVEKKLSKTEFARVLLSINKKRGYKSSRKANSSEEGELIDAMDITKILYKQNLTPGEYSYQLLKNGKKSLPDFYRSDLENEFDKVWNKQKVYHPEILTDSFYKKIKGKGKKNTSSLFWATYKFNTAEVKDIEDNIKNEKTIKLSKNEKKKLQAFKWRSDAISKKLDKDIVAFVVSEINNDIHKSSGYLSEISDRSKELHFNNFTVGQYLYNQISKNPNTSLKNQVFYRQDYLNEFNKIWDKQAEFYPELTKKLKYIIQNEIIFYQRRLKSQKGLISYCEFESWEQDVIIDGENKRKIVGHRVVPKSSPLFQEFKVWQNLNSIRITHIKTNEVYHVEEDSNTELFQKLNWTDKLTGKDILKELGLKPQDWKINFQRIEGNRTNNSLLDAYKEILKIEGYDNINLKKIDDYELIKILKQCFDEIGIDKQIFEFNATLSGKDFTKQKSYELWHLLYSYEDDFSRTGTESLEEKLKSNFGFKDEHLPYLINMPFQDDYGNLSARAIRKIMPYLQEGRIYPDACELAGYNHSNSLTTKQNEERTLKPKVEILKKNSLRNPVVEKILNQCINLVNAIIEDPQMGRPDEIRIELARELKNTQEQRDKMTKAIGKATKEHEKYREEIKAKFGLPHVSRNDLIKYKLYMELESNGYRTLYTNEYIKPEDLFSKKYDIEHIIPKSRLFDDSFSNKTLETRESNLDKGDETALDFVERKFGKEGLENYRNRVEELYKSGKIKGSKHVKLLMSLKDIPEDFLNRDLGTSAYIAKKASEILLDVTKSVSLTSGKITSKLREDWGLIQVLQELNWDKYEKVGLTYYKTNKDGKKLPRIKDWTKRNDHRHHAMDAITIAFTKPGMIQYLNNLNAKTNKEIFKLENKYTYKDERGKRKFIAPFANIREVSKEHLSQILISHKAKNKVTTKNKNKINVKGKNKFKYQTVETPRGQLHKETVYGKSKYYETKLEKVGGKFDKEHIYLVANQSYRNALLKRLEVFGNNPKKAFTGKNSLNKNPIYLNGTQETVPDKVKLVWLENRFTIRKEVTPDLKIDKVVDEGVKKALQKRLNDYNNKHKEAFTDLNKNPIWLNEEKGIKIKRVKITGVSSAEPLHHSKNHFGDENLNCDGNPIPTDYVSTGNNHHVAIYKDEKGNLQEEVVSFYEAVARKNAGFSIINKEHENGWKFLFTMKQNEMFVFPNEEKGFNPNKIDLSNPNNKALISENLFRVQKIATKNYMFCNHLHTMAITGDDLKNKKMLSGFIYHFIQTPDKLNNIVKVRLNHLGDIVQVGEN

SEQ ID NO: 23146 - protein, 1391 aa, unidentified
  REGION 1..1391: note = Cas Enzyme sequence
MKKILGLDLGTSSIGWALVNEAEDDIQKSSIIKLGVRVNPLTVDELSNFERGKSITTTADRTLKRSMRRNLQRYKLRRTSLIKILKDNNLISEEAILSESGNFSTFETYRLRAKGVEEEITLEQFARVLLMINKKRGYKSSRKARSQEEGQLIDGMSIAKQLYDENLTPGQLCLQILQSGKKYLPDFYRSDLQNEFNRIWDSQKYYYPEILTDELREKLVNRNDKATWAICEKPMKLIGIKRESKGRDIRLENFKWRVEALSSKVDLEHVAIALQKINGQISSSSGYLGSISDRSKELYFRNQTVGQYLMDQLKSNPNISLKNQVFYRQDYIDEFNILWEKQAQFHKELTEGLKSKIRDVVIFYQRRLKSQKGLISFCEFESSRVEIETEGKKRVITIGSRVIPRSSPLFQEFKIWQGLNNLEVFSKGQSSRKSASSRTVSAHREGDVRRSLDQEEKLLLFRELSVRDKLNKATILKMLFDNHNELDLNCSELDGNKTSAAFFRAFNEITEVSGHVKIDFDKLNADEIVSSIDLVLDTLGCNPGILHFDSDVEPDKQMFYRLWHLLYSYEGDDSNTGIDGLIDKISTLSGLKREYARILTGITFTDDYGNLSAKAIRKILPYLKTGNRYDLACEYAGYRHSKSSLTSEEIASKVLKDKLMILPKNSLRNPVVEKILNQMINVINAIIEEYGKPDEIRIELARELKKNASEREKMTKMINETTLAHEKIKKIIQDEFKLSHVSRNDIIRYKLYQELETNGFKTLYSDTYIPREKIFSKEFDIEHIIPQARLFDDSFSNKTLERRDINLEKGDKTASDFIRDKWGESGLQAFQDKIERIQNQNGQGISKAKYSKLKMSEGDIPDGFIERDLRNTQYISRKALGLLGEIVRTVVPTTGSITDQLREDWQLVDVMKELNWEKYKALGLAEYLVDKDGRQIRRIKDWTKRNDHRHHAMDALTIAFTKPVYIQYFNNVNARYDKGSEAYRIEQKYFSERKVIPPIPVDEFRAEAKKHLDEVLVSIKAKNKVVTKNTNVIKIKKRECPQSQLTPRGQLHLETVFGSNRVPVVREIRVGGTLNEEIIRLVTKPKFRDALLRRLAEYNHDPKKAFTGRNSLEKQPLYIDELHTKRVPEKVKIITFEPVYTIRKQIAPDLNIDKVIDSKIRSLLQERVSVYGDAKKAFSNLDEDPIWLNKQKGISIKRVSITGINNAQALHEKKDKEGRLITDSEGRTMPVDFVNTGNNHHVAIYRDANGDLQENVVSFFEAVTRANLGQPVIDREYRSSEGWKFLFTMKQNEYFVFPNFKTGFNPNDIDLLDTRNYSRVSPNLFRVQKLSTKNYVFNHHLETTAVTGDTLKFNKQMSGITYRFIQSLPPLEGVVKVRINHIGQIVTVGEY

SEQ ID NO: 23147 - protein, 1427 aa, unidentified; identical to SEQ ID NO: 22218
  REGION 1..1427: note = Cas Enzyme sequence

SEQ ID NO: 23148 - protein, 1395 aa, unidentified; identical to SEQ ID NO: 22770
  REGION 1..1395: note = Cas Enzyme sequence

SEQ ID NO: 23149 - protein, 1515 aa, unidentified
  REGION 1..1515: note = Cas Enzyme sequence
MRNILGLDLGTNSIGWAVVGSEASENGEERLTGIKGAGSRIIPMDASILGDFAKGNTVSQTADRRIKRTARRMNERFILRRERLHRVLNLMGFLPEHYAASIDRYGKFIDDKDHKIAWRTNSDGRQEFVYQKAFNEMYEEFKAHNPEFLKNGGKIPYDWTIYYLRKKALTSPVSKEELSWILLNANQKRGYNQLMGMDEQDEQEDKSTRVEYLSSVIVEVTDSGDKRGKATWWNCKLDNGMVYKRPSEVKPDWEGKTKEFIITTDLDKDGNPKLNKFGEIQRSFRMPGENDWTLIKTRTEDQVNKSGEYVGEYIFNALLKEPTQKIRGKLVRTIDRDFYRAELKAILIKQAGFIKELTDRDLYLQCIEELYPNNDSYRNSIASKDFTYLLADDIILYQRPLKTKKNLIDNCPYESHTYSDKETGEVKTAPVKCIAKSQPLYQEFRLWQFVQNLKIYDNLSGEDETSFFIPTEAKRVAVFKYLNDIASTDQESFLKEFFGIKRPKCKDSNLPYTWNYVQDKKYPCNETRGPILSRLKKSGIPSSFLTNEIENELWLILYSSESRKELEEALRKFAGRHGLDETFVDNFKKFPAFEKDYGAYSAKAIKKLLPLMRMGEYWSEAAIPDEVKANIEDIIKGKFADSIPQNVREQLSTYKEISSFKGLPLYLACYVVYGRHSEVSDSQLWTRPEDIDVYLNNFKQHSLHNPIVEQVVTETLRTVRDIWRSFGKIDEIHIEMGRDLKNPAEKRKKDLMRSIENENTNMRIRALLMEFTNPDFKIDSVRPYSPSQQDIFRIYEETALRGENNLPDYVLDVLQNFGRGKTEQPSHAEVLKYKLWLDQKYRSPYTGQPIPLGKLFTTAYEIEHVIPQARYFDDSFNNKVICESEVNKLKSNMLGHEFIEKHGGEIVPLNMGGSVRILTKTEYEDLVKRFYANDRMKAKRKNLMLDDIPEAFINRQLNDSRYISRLMLGLMSNIVRKEGESEATSRNVITTNGSITDRLKVDWGIKDTWNRLILPRFRRMNQITGTSDYTRMNRNGHEIPNVPEAVSKGFVIKRIDHRHHAMDAIVIACASRNIVNYLNNSSACKGAKISRYDLQHLLCNKLLQGDGSYSWVIKTPWPGFQNDVFNALNNIIVSFKQNLRVINKTTNYYQHYKDGKKVIVRQVNGDSWAVRKSMHKDTVFREVNLRMIRQENLKSVVEHPDDVVNRDLREKLKEFVLKGTSLSNIKDYFAQERDAWSDVDLKKIDVFYFSKDDKDPKTGLPKHRFFSTRKPIDTSFTEEKIKTQITDTAIQKIMLAHLAENGNDPKVAFNPDGIERMNDSIARLNGGHMHQPIFKVPYFEEGNKFSVGSEGAKAKKFVEADKGTNLFFAIYENEVEDKKTGEIKKVRYFSDIPLNVAIDREKQGLTPASEDENGKKPIMVLSPGDLVYVPTEEEIKAGKLEPSIDRGRIYKMVSAGQGKCYFVPQSVASVIKDKVEFESHNKSMKTIEGNTYIQKVCIPVKVDRLGHIISINDMI

SEQ ID NO: 23150 - protein, 1413 aa, unidentified
  REGION 1..1413: note = Cas Enzyme sequence
MKEKVVGIDLGTGSLGISVRNLSLGESLEKQLEWFSVTTFESGTSSDQTGEHTLAADRRSHVQSRRLKEHSRWKRWSTLSLLIDYNMCPMSRQSLERWCTYDKSRGLKREFPVDDDAFMRWLRMDFDGDGKSDLTAFQLRRKLVEEQFDFTKPINRYKLGRAIYHIAQHRGFKSSKGETLSGQEEDVKDVQVNADNLEETMKKSEERKSKDLSEYMAKHGFKTVGQAFASLEDAGIRVRNSRYQAVRSQNVAEIDEYFHFQEGLREYEDLHKRLVSTKKGEGTLFYKLPLRSQKGHIGKCTFEKNKRRCPISHPEYEKYRAWGFINNIKYRECANGCWQELPLELKKLLYQKVFTAYVRKDFPFEKIREFLEKQLGMTFKNVEGIKTINYKDKTLVAGCPVTARLQNIAAIFDTNIEKLYLQGTKTRLSHSIKNTEKHSVTYNAEDLWHFCFEADEIEDVKRFAHSSLGWEEKATDALCKLWASIEQGYAPLSVKALRNINRMLEYGLKTSDAIFLAKVPDITGIEEHSILQLIEQYEKEVKAPSDRNLRIGRIVNTLISKYKSLAPRDRFADHDFGYQLQQDDKDDIVQCIMDNDSLFTLMDATEQQQMINEVTRLYQSFFADIHRDYVKTPKLADTLAEKLKEKFTAVDESKWKLLYHPSMVSDFPRNKEDEGLLGSPRIGAIRNPTVLRALNVLRKTLNTMILDGLIDPQETRLVVETTRVNNDINKRWAIEKYNNERRDANKAIWNILKEYYPDKDIKDEDVDAARYVLEQSGEDIYTDDKPDDLHYRSQIKKYKLWLEQGCCCLYTGRVISLSNMLSENYCDLEHTIPRSLSFDSSDKNLTICDAYYNRHIKQNRIPTQLPNYEHDVTIDGQVYTAIKPRLKNWEEKVERLSQNVLFWKNRARRARTEDSKNACIRQKLLWHMEFDYWRQKLDRFKMKPENLTDGFRNSQLVDTGIITRYAVLYLKTLFSSVDVQNGQSTSAFRKIFGIPQKDRSSNYHHAVDATILTMIPQSAKRDRMLKLFYQIDELKRDCHDVSGLQFQLNKELEDCDLGRGLAGIDDFIARQVMVDYYKQDRTLQKNVRPVIRKGKPLMNKTATGKLEPVTFCSDSIRGELHKQTFFGAIRRREDQKTLFVVREPLKYKTSNKDSGFKDWKELNDRLVDLNFKDKGSDLKPMVKMMMNQFPKGTSFKEACEQGIYMLDKDGRKVNRIRHIRCYGKNVTNPMRVKRHTYPSDKEYKQYVWAALADGSVYALCEYVNGSSKVYKRYTYMDISENRKMGLEDIPVCLTDKNGKQFNLRRKICKGDMLLIYRDAPEELLHLDRAELSKRLYKVQSFERKNDIILRHHLLSTGETNSDDGKEKKRDRGESIKDFAKLPNIIRSSITSFKYLQKDVDYVFNKEGLRLMTI

SEQ ID NO: 23151 - protein, 1224 aa, unidentified
  REGION 1..1224: note = Cas Enzyme sequence
LVPCAIYLICGEYKYINGIRLLFVFRTYKNRSYQREKRKNHIYDHLMTNPQDKIRGKFVHTIERKYYKDELRAILDKQKEFIPELTDEDLLRRCSEELYHHNDGHRSIVERQGFTHLFVDDIIFYQRPLKSKKSLIADCPLEYYPYKKDGVWMHRPIKCTPRSNPIFQEFRLWKFIQDLRIYKREDEMDGRLVLDVDVTSRFFSSPEDYCQLFDWLKEKSEITQKQFLAYPAFHLGKDAKKYRWNNVDDDKRAYPLCPTHYDICKALKDVDGTPVLSTEQEQQLWHILYSVDDRFELEKALKHFAEKNLLDVDSFAQSFIKMKAFDKDYVRYSEKAYRRMLPLMRTGRYWNADNIDARTMSRIQHLVNGEADDSISNRVREICAKLDALEKYQFLPDWMVCYVVYNRHSEATDNQRWTTTEDIDQYLRKELRQGTLRNPVVESVLSESLRVVRDIWKVYGKPDEVHVEMGRDLKQNAAQRQKAMSTMLANQQTNLRIRCMLQEFADPDFHIDNVRPQSPSQQELLKIYEQGVLDNEDVPDDIQLIIDHIGDTKSNVSKSDMLRYKLWLEQRYQSPYTGQPISLARLFTTDYEIEHVIPQARYNDDSLNNKVICETEVNRTKGKMLAYEFIKTFGSMIIEGLGGRKFKILDTVQYEEFVKTHYAKNKKKMRNLLLDDIPTCNTSSQLNNTRYMARKALDIFSHLVRAEEKDEEATSKNVIACNGIITDRLKKDWGVNDVWNDIITPRFERMNAITQSTDYGQWVNKDGKRYFQINVPLALSKGFSKKRIDHRHHAMDAIVIACTTRGIVNYLNNASGADDKARYDLRHAVCFKNVDADGSGNYTWTVKKPWGTFTQDARRVLEHIVVSFKQNNRVITQTTNRYWHYCDGKKVMDKQTRGDHWAIRKSLHIATFSGALRLPEVKRVSLKVALQNIDAICDKKARRIIRHIINDGYHGHVDNATLLKYFKARKYLVEGVDFSKLDVRIIPDAPNYSASRVALDGKFTEKDIEKVTDTGIQAILKRHLEHYKTSKGSYDCAAAFSPEGLAEMNNHIAELNGGKPHQPIYKVRKKESFGMKFNVGKGTKSKQFVQQDDGGNLFFAIYVDEEGKRTFESIPLNIVVERMKNKMDVAPITNDKGDKLLFTLSPGDLVYLPQEGEHVVLPLDVRRIYKELSCNKHQCFFIPYSMASPINKDYEYKMEKSIDGEMIKESCVKLKVDRLGHVSV

SEQ ID NO: 23152 - protein, 1417 aa, unidentified
  REGION 1..1417: note = Cas Enzyme sequence
MKKILGLDLGTSSIGWAIVNEAEKSNENSQIVRLGVRVNPLTTDELSNFEKGKSITTNSERTLKRSIRRNLQRYKNRRAVLIDILVRNKFIDDNSILSESGNNSTFETYRLRAKSATEKVSLYDFARILLQINKKRGYKSNRKVKTSEEGQLIDTIDVAERLYNDNLTPGQLSLMLLEEGKKYLPEFYRSDLQDEFNKIWNFQKQFYPELLVEQLFLELKGKNRSQTGAICFKLFNIDGIKRQTKGFDLKLENYRWRSNALKEKVDLEVLTIIFQELNSQINNASGYLGDISDRSKVLYLNNQTVGQYQMSELERNPHYSLKNQVFYRQDYINEFNKIWETQSIYHKELTSELKKEIFDAIFFQRPLKSQKGLISFCELESRKVEVEREGIKKEIIIGSRVCPKSSPLFQEFKIWQILNNVQVFSGRSKRFLLQEEKEILFEELNYKEKLSKNDVLKLLFKNYKDYDLNYELLDGNKTQSELFKAYETIIELSGYSKYDFTKMESKKAKQIVFDIFTKLGINTEILNFDSSLKGHELEHQSMYSLWHLLYSFADDNSKLGNEKLVEKLSEKYGFHTEHAKILANIAFQSDYGSLSAKAIRKILPYMKDGNDYSVACEYAGYQHSKKSLTKEQLNNKVLKDKLELLPRNSLRNPVVEKILNQMINVVNDLIKEYGKPDEIRIELARELKKSAKEREEMTKAINETTKLHEEYIKILKASPYNLTNVSRNDIIRYKLYMELKGNGFKTLYSNTYIPQEKLFSKEFDIEHIIPQAKLFDDSFSNKTLEVRQVNIEKSNATAYDYIVNKYGNQEALDYRNRIEKLYKDKVIGKTKHDKLLMTEDEIPSGFINRDLRDSQYIAKKAREILEELVKYVVPTTGSVTDRLREDWQLVDVMKELNWEKYDRLGMTEIVEGRDGQQVRKIKDWTKRNDHRHHAMDALTIAFTKRSYIQYLNNLNARIQKGVDDYIDLDMVELSDLSKEERAQAVYGIEKKEMYRDKHGKLRFNPPMQLNKFRVEAKHNLENILVSIKAKNKVTTKNINITKKKGGTNNKIQLTPRGPLHKDTIYGCSKRCVTKLEKVNGSFDIDKIKTVAKTAYRDALLERLRMFDNEPKKAFTGKNTLEKNPLWLDNMHTQKVPEKVKTVGYETIYTIRKEISPDLKIDKVIDTRIRDILKERLAEHNGNSKVAFSNLDENPIWLNKGKGISIKRVKISGVNNAIALHDKHDKDGKLVLGVNGKKLPVDFVSTGNNHHVAIYRKPLFDKNGQQILNEKVEPQFELDERIVSFYEATSRAILGYPIVDRDYKKDEGWQFLFTMKQNEYFVFPCYDEEGNMVFNPKDYDEEWYLNPDNYAVISPNLFRVQKIATKDYVFRHHLETTVEDNNILRNITWKRITNLILLNNVIKVRINHIGNIVSVGEY

SEQ ID NO: 23153 - protein, 1389 aa, unidentified
  REGION 1..1389: note = Cas Enzyme sequence
MKKILGLDLGTNSIGWALVHEAENVKESSEIIKLGVRINPLSSDEVIDFERGRPLSVNKDRTLKRGARRNLQRFKLRRKNLIDILIKAKILRSDSVLTEIGKNSTYETLQLRSKSVKQQVKKEEFARVLLAINKKRGYKSSRKSNNKEEEGNLIDGMFIAKELYNNNLTPGKYVYQLLSENKNYIPDFYQSDLKNEFLAVWTFQKQFYPDILTEQLFINLQQKNKNQTWAICKEPFDIKGIVYKGTAKQKRLEKYKWRSKSLTSKIDLETLAIVLQEINNDLNKSSGYLGAIGDRSKELYFNNITVGQYLYQQIKKNNHTSLKNQVFYRQDYLDEFERIWEKQSKFYPELTNKLKEEIRDVVIFYQRKLKSQKGLISICELEQKTIEIEVKNKTKKKIIGPRVVPKSSPIFQEFKIWQILNNLTFTRKNETNLFEKQNYKVTLENKKNIFNELNIKGTLKISDVFKLLKLNTKDWKCNFDTLEGNVTQQAIYNVLQKISEDQDSSFDWSKKNAFEVKEELRATLPTIGIHPNILDFDVNDDNFEQQPSYQFWHLLYSAEDDTKITEEDEKNYGKNYVNLKKKLHLKFGIPIKYTSLFTNIVLEPNYGNLSAKAIRKIIPHLQEGYDYYDASRLAGYNHSNSITRDENLKRELKDKLELLPKNSLRNPVVEKILNQLVNVVNQIIETYGKPDEIRIELARELKKSRKQREEIYKNISIATKRNEEIKKTLQTPPFNLKSPTKNDVVKYRLYQELKPLGYRTLYTDKYISPQLLFSKEIEVEHIIPKAVLYDDSFSNKTLAFRQVNLKKSKMTSYDYIDKIEHKNLEKYIQRVSDFYNGGKNKISKSKYLNLLTPLDELSDDFIQRDLKNTQYIAKKAKNILLEICREVHPTNGKITDKLRRDWDLLNIMKELNLSKYRALGLTVFEERKHGNNVEKIIDWTKRNDHRHHAMDALVVAFTSKSHIQHINTLNAESAQNSIQSVIISQNQKTKLKNKGLYVLPMSNFRTEAKKHIESILISFKTKNKVVTKNMNFEQKTLTPRGQLHEATIYGKIKSEILKDETIGGTFIIEKINTITKPEYRNLLLKRLEENHNNPKKAFAGKNSLIKKPITLSNGKEMPLKIKTKKYETIYTIRKNINPDNFKNIKAIEKVIDEKHKNILKERLTKFNGNGKEAFSNLEENPIWTNKEKRIALKRVTIKGVSSVVSLHDKKDHLGNVILDSNGKTQSVDFVNTGNNHHIAIYKDENGKLYDKVVSLFDAVTSCNLNQPVIQKNYNKDLGWEFLFSLKQNEMFLIPTNEFNPKDYDLKNTKLYSLLSKHLFYIQSISLNKYGNNIIRDFVFRHHLDSLKTKTNALKNYTYFHVKSLDDIRLIGAVKVRINHIGQIVQVGEY

SEQ ID NO: 23154 - protein, 911 aa, unidentified
  REGION 1..911: note = Cas Enzyme sequence
DEILKILENDDFNRKNSAIINSLISEMLNDDNRYYIADNRNLDKTEEQIVLKSITDNYGLETWGNFDEEKKMEIIDFVSSKYLEFLKKTYTEKGNLFIQPERIHDKIFNFLKETYHVSEDKIKYLWHPSEQENYAKADEYFEYSIGSKKYYVKEESTQNFLSRNPNAEFDGRQLKLLGNPEPLSKGFKNPMALKSLHKLKNLVNYLLQTGKIDEGTRVVIEIARELNDKNKRKAIENWQKDREKENEAFRKEIEVYKEQFPNINLIDENTLIRKIRLWHEQNKICLYTGKTIPFSELIIGNKYDFEHTIPASISFDNELKNLTISDSSYNRLHKGKKFPTQLSNYDSEQTINGESCNSILRNIEFIFGERIVEYKEIKGKTEKIVKWKKIDELEKQFDEWKKKASYANTKEIKDNCIVKYHTIKMDLDYLKSKLATFTITEYKAGWRNSQIRDTQIITKYALPYFKTLFKRVSVEKGGVTDIFKKVYKVQSRNSKKDRSVHSHHAQDAAILTLIPNAFHRERIIKAYENEIDNRTGKTYHEQPLDWENFSEKYILELQDKVLINNLTDNRTITQTYKTVRKRGKVVYDIDENGNSLKRVSKGDTIRGQLHGETFYGAIKQPVRDEDNKILFDENKKMILKDEIYLAVRKPLVYKKDANSPGFKTLDEVEKVIVDKGLFKMIKKQVEESDFKTALIDGVYMLNESGEKVNKIRRIRCFENGLKYTTAIKVHEHSFVSHKEYKQSTLATNGENTYCLFYKNDKGKAMKILSIVDLAELKLKNIQNLYNEPEFSSFEVGKGKNKYKIPLYSVLKSGDKVLFYKENIYELKDLEQKELSDRMFKMYQFEKDGRIKFRHHLAAGIDTELKKENPENSSVNFEEKQVFLRLSQGQWNFAIDGKDFEISLDGKINWKF

SEQ ID NO: 23155 - protein, 1317 aa, unidentified
  REGION 1..1317: note = Cas Enzyme sequence
MDEFCNWKDYRKGKKREYPQSEEFLNWIRFDFNGDGLPDFHLFGKEKDDSYYVFRAFAADENHKNVFDNNPHILGRVLYQMVQRRGFKGRDEEEAKTMLVGSDKNGTKGRNDIEEYIEKYKTLGAALYYHQKDFGGRIRQRYNLRKDNENELKEICKIHQLSQEDYEKLWKAIIWQRPLRTQKGLVGNCIYEKNKKRVAVSHPLYEEYRTWVFINNLNIIPPFGEEKQNYISEKIYPLFYKSKPDFELSDIDKQLKKDGAKRTSKHNDKTKVLSVKLLKQFQDVFGEDWKQKLQWDINGDRNSQPEKKEKSLYTFEDLWHILLTFDGQENLKKFALEKLNLDDEKAIKFSKIKLQQGYATLSISAIKKILPYLQRGFLYSHAVYMANLYKMLGETTISETLTNHFSDEILKILENDDFNRKNSAIINSLISEMLNDDNRYYIADNRNLDKTEEQIVLKSITDNYGLETWGNFDEEKKMEIIDFVSSKYLEFLKKTYTEKGNLFIQPERIHDKIFNFLKETYHVSEDKIKYLWHPSEQENYAKADEYFEYSIGSKKYYVKEESTQNFLSRNPNAEFDGRQLKLLGNPEPLSKGFKNPMALKSLHKLKNLVNYLLQTGKIDEGTRVVIEIARELNDKNKRKAIENWQKDREKENEAFRKEIEVYKEQFPNINLIDENTLIRKIRLWHEQNKICLYTGKTIPFSELIIGNKYDFEHTIPASISFDNELKNLTISDSSYNRLHKGKKFPTQLSNYDSEQTINGESCNSILRNIEFIFGERIVEYKEIKGKTEKIVKWKKIDELEKQFDEWKKKASYANTKEIKDNCIVKYHTIKMDLDYLKSKLATFTITEYKAGWRNSQIRDTQIITKYALPYFKTLFKRVSVEKGGVTDIFKKVYKVQSRNSKKDRSVHSHHAQDAAILTLIPNAFHRERIIKAYENEIDNRTGKTYHEQPLDWENFSEKYILELQDKVLINNLTDNRTITQTYKTVRKRGKVVYDIDENGNSLKRVSKGDTIRGQLHGETFYGAIKQPVRDEDNKILFDENKKMILKDEIYLAVRKPLVYKKDANSPGFKTLDEVEKVIVDKGLFKMIKKQVEESDFKTALIDGVYMLNESGEKVNKIRRIRCFENGLKYTTAIKVHEHSFVSHKEYKQSTLATNGENTYCLFYKNDKGKAMKILSIVDLAELKLKNIQNLYNEPEFSSFEVGKGKNKYKIPLYSVLKSGDKVLFYKENIYELKDLEQKELSDRMFKMYQFEKDGRIKFRHHLAAGIDTELKKENPENSSVNFEEKQVFLRLSQGQWNFAIDGKDFEISLDGKINWKF

SEQ ID NO: 23156 - protein, 1439 aa, unidentified
  REGION 1..1439: note = Cas Enzyme sequence
MKILGLDLGTNSVGWALVDKQEGRIIGMGSRIIPMGKDKQDYEKGLGISKSGDRKTKRTIRKMNKRYKLRRNKLLFVLNELGMLPDQFQFKYGIPEPNKLQQLELLPIPNKREYDSNGRRLDRKYEGNKKIKCEPNSIINYELRVKALRHPVELKEFGKILYQFNQLRGYSGGSNNDDTRSVENEDNEDSEIRKYEVFTRKVEILKVEQTDKTFKSRRGTTQGQEFKKFDVTILLDGDELVCETELQHLKEKEGQEEELEIRIKRNKKGETTSVTIAAPQKTNWRKQMEATEEELTRSNLHVSELILKDLRENKWKKIRNRVFLRQRYQAEFDAVWETQSKAHPILNSCPPEVLEKIANYIFPGKRKSQEELRQAAINNGLKYIIKDQIIYYQRPLKPQTDLISNCQFEKDQKVLATSHPLFQEFRCWDQINRMYITSKRESFNEQKNKKIYQYTDRFLSTKEKLEIYDKLQIQKQLSFSEVAKIVKLANDNSEFLNGLHVKAKLKGCDTRISIQKCLGEHFQTLLSNAPHIVENIWQAVFENSNNGSEYDPNSPKVASIKSLLSSLQNDKLETELALKLAQKIRFPRKYSSLSEKAIRNILPLMQPNPTKIPENIIRNFQEIQHLVDTGEILNGKLWEDYVISFVKGNPNALTSGGLMYAFASSLVYGQHTAEKISPQYGHYNDIKFQKRNLRNPVVEQLVNESMQIVKALWKQYDLNPKELEIRIELSRELKNSAAERNKIYKAQIRNNRANEAIKKRLEDENIPTTDENILKYKLYEQQKYISPYSGKPMEVSMFSSYEIDHIIPKSRYFDDSISNKVLVEGYLNKEKANRTAWEYITQQISSYKILSIEDYIKHINDNFYGKKKKYLLLEKIPTNLIDRQMKDTQYISVAVKNELAKVVGSEKVKTTTGEVTSFLRSRWGLRKLFMELTESRFKLMELWDWDIENNKPKLPWVLRYFDNEKQKHVYEIKNWSKRYDHRHHAIDALVVALTEQSHIHRLNNLNKFLQDELAKRKEELNLEIENGESILEAFFRLEEKRRSEILEKMESSRYFDQPFEDLINQARTLLEAMVISIKTKDKLGITTDQFDENTPHKQLNKQLRIKGALHQETNYGKSKDPNTGLSRSTKTVELSKLSAKDIPNIIDKVLKEEILTHRKKYGTNKEAFTGEGLKAFNENRFQRKDPSKLKPPVYKAKVWYSNKDEENSSLQRLYENNEKLSVVPGDNYLFIIMEKAGKRVFDIASLYNSAQLAREALNDGGENFKRKICEDFRQMHKQKPDKILFTLQQNDLVYLPENNEDPVSKMNDQEFSEWISNIENKKKFSSRIYKVAKFTGGDCFFIPHNYATTISVPKDLSQEQRAALERRFADKKIPKSELNFVEFGSYRDCSPFESGEIFLRSLIDKKNSKKKQRAPLKIQDHCIKLRVDWIGNISLHRGI

SEQ ID NO: 23157 - protein, 1479 aa, unidentified; identical to SEQ ID NO: 22192
  REGION 1..1479: note = Cas Enzyme sequence

SEQ ID NO: 23158 - protein, 1338 aa, unidentified
  REGION 1..1338: note = Cas Enzyme sequence
MKKILGLDLGTTSIGWAFIHESESDSEQTEIIGAGVRLVPLSKDEIAEFSAGQQISTNANRTLARSARRGLQRYKLRRAALLNVFLQNGWIKPENHYAEVGTLSTHSTISLRAKAATEKVLISINKKRGYKSSRKDKFLAENGVAIDAMVIAKELMTKKQTPGQWVHKYFAEAGFAKVPDFYPSDLKNEMKLIIESQNSFHPDVINENLIEKLSDKTSKTAATFFTKELNIELSEHLGLRSDRIKNLYLLRSRALSEELPLGDIALILSEICGQISGSSGYLAAISDRSKQLVVKNQTVGQYMWELLSSNPHDRTKGLIFYRQDYYDEFETIWNCQSQFHPELTQPLKEEIRDVIIFYQRKLRSQKHLISNCELEENRKCIPKSSPLFQSFRIWQNINNLEITDSSTGEKAMLDEEAKNHLFSFLNQRDKLKGEEAKKVLGLSKHHELNFKEIQGNRTRAAIIDSFLKICDLEGHSLERDLKSAVAFEESLSQMLLHFNMPADLLSFNLTDTKVYNDLEKGWFHQLWHIIYSAEEDQFVKKWFQEKLSFSESWAKAFLATPLETDFASLSAKAIKKILPFMTDGTRYDEACVLGGYNHSKSLSKEENANRILVDRLTEIKKNSLRNPVVEKILNQMVNVVNAIADSEKYGKPDEIRIELARELKSNVAQRKTMSSSIADNTKKNEQIKNTIRKEFGDGYVTRNNVLRFKLWEECGKISIYTGKPIQGSELFDSVYDIDHIIPQSRLFDDSMSNKVLCERSLNIAKGNKTAYSFLLEKYGEESTEFQQFLSRVKDLKFRGLIKFSKSQKLMTTDEKIPNDFVDRQLRETQYIAKKAKDLLNTFARNVVSTSGEITDKLRKDWGIEELLKELNLERYSSRPDLISKSTNAQGRVITRIENWSKRDDHRHHAMDAITIALTKRAYIQYLNTLSAKTDKNSITYALENKYLVRDTDGKLKFISPIKDIRSAYKQTLQKILISHKVQAKVTTKNANRIKTKNGVISVTRNQGSVRGQLHLETVYSQFQRYETSFIKIGASTTLEQINSISNQRYRNAIKKRFDEFGKDSKLAFGGKNAIAKNPIYLDEREQFKIPEKLKITNIVEDYSIRKPIAPGLKLDKIIDEGIKKILQKRLAEFGGDDKKAFVNLDQNPIWMNKEAGIFIKSVKIKGISNAISLHEKRDHFGNTIINKGKAEPTSWVNTGNNHHVAIYKDENDKLSEDVVSLLEAVTRKNLGLPIILEEHPEKGNLVLSLKSNEMFLFPSETFDPFAIDINDPNNYSLIAEHLYRVQKFSSFYYVFRHQYETKISNDKDIKDITFKRINSMEPIRRIRKIRINHIGEIV

SEQ ID NO: 23159 - protein, 1392 aa, unidentified
  REGION 1..1392: note = Cas Enzyme sequence
MKRILGLDLGTSSIGWALVNESEDEREQSSIIKLGVRVNPLTVDEQRNFEAGKPITTNAERTLKRSMRRNLQRYKLRRDNLIEILTEHGFITPETILAEQGNKSTFETYRLRAKAVTEEISLEELARVLLMINKKRGYKSSRKLDTNEDGKIIDGMEVAKQLYDEGLTPGQYMLRLMDSGKRYTPDFYRSDLKDEFGRIWDFQKTFYPELLTDELRQELAGKNEKQTWAICAKTFSLVGLKRTAKGEELKRENYKWRVDSLSEKMDLESLTVVLQKINGQINGSSGYLGEMSDRSKELYFKKQTVGQYLMSRLDKNSHYSLKNKVFYRQDYLDEFEMIWENQARYHSELTDSLKHEIRDVVIFYQRSLKSQKGLISFCEFENRQMETVKYGKKRLKTVGLRVCPKSSPLFQEFKIWQILNNIQVSGKVVRKQSVDLFGETVEMANGKRFLYQEEKEKLFRELNIKAKMSKAEVLKLLFKNHKELDLNYKEIEGNRTQAALFAAYQTIIDMSGHGTHDFSKMCADDVMDIVSNVFGGLEFGTDILCFDSSLEGKAFERQPAYRLWHLLYSFAGDNSKTGNEKLISKISELYGFDREYAAIIAGISFQLDYGSLSAKAIRKILPYMKEGNEYSVACGYAGYRHSKNSLTKEELANKLLCNRLKPLPRNSLRNPVVEKILNQMINVVNSVANVYGKPDEIRIEMARELKNSAKEREEMTKAISKATADHEYYRQILKNEFGIENVSRNDIIRYKLYMELKDKGFKTLYSNTYIPREKLFSKEFDIEHIIPQARLFDDSFSNKTIEVRSVNIEKGNMTAYDYVCGKYDADKVSAYKVRVEELFKNGTISKTKRDKLLMSEADIPSGFIERDLRDSQYIARKAREILESLVRTVVPTTGSITSRLREDWQLVDVMKELNWDKYNRLGLTDFVVDKDGRRIRRIKDWTKRNDHRHHAMDALTIAFTKPSYIQYLNNMNARSDKGSSIYAIEKKELYRDNGKLKFQPPMPLDVFRAEAKRHLDGILVSIKAKNKVVTRNTNVSKIKGGTKKKVQLTPRGQLHNKTVYGRIKRYVVKEEKVNASFDMQKIDTVANMRYRMALSDRLQQYGGNAKKAFTGSNSLQKNPLYVDDMHIIAVPERVKTVGFEYVYTIRKEVTPDLKIDKVVDSKVRNILKARLEQFGNDAKKAFVNLDENPIWLNKEKGIAIKRVTITGVSNALALHDKRDNSGKPMLDVNGHKMPVDFVSPSNNHHVAIYMDADGKMQDDIVSFYEATMRANQGYPVIDRDKNRSEGWQFLFTMKQNEYFVFPNEETGFDPNEIDLLDPNNYPIISPNLFRVQKLSKTEGRIYMFRHHLETTVDDKKELQEVTWKRINSLDKLKNVVKVRVDHVGRIVSVGEY

SEQ ID NO: 23160 - protein, 1390 aa, unidentified; identical to SEQ ID NO: 22231
  REGION 1..1390: note = Cas Enzyme sequence

SEQ ID NO: 23161 - protein, 1171 aa, unidentified
  REGION 1..1171: note = Cas Enzyme sequence
VISLKLYCKYISLKRQNQIIMKKILGLDLGVASIGWAYLEENNEKSRIVRAGVRIVPVADQEDDFRAGRSVSINADRTRYRGMRRNNQRWKGRRDKIVTLLESMDMYDETLINLHKTDLYALRARAVDEKITLSELGRVILHLTQKRGYKSNRKTDASPDETTEYLDKIKENSETLETKGQTIGQYFHEKFKTDPHTKVRQQIFYRHNYQDEFEQIWTRQHKEYPDILTDELKHEIGTRTLFYQRPLKSQKGLVSRCRFEQNMRVAPKSSPYFQAFRIWQNINNLEITDDETRKFDLTLKDKQKLFAFLNKKDGSKKSGILKELGYSSKKFDLNFDEVQGNRTKSRLLKIFKDNDIQDTSILDFDALAKDPENQAAYRLWHLLYSIEEPEHLYKALVEKFGFTREQAIAVSKCKLEKDYGNLSAKAIKKILPHLMNGDTYDKACGHAKYEHSDSITTEENENRKLDEKLELIKRGDLRNPVVEKILNQLVHLVNEIIADEELGKPDEIRVELARELKMNAKKRQQVNKSYGERKKANDKIKALLQAPPFNFKNVSRNALDRYKLWEETGGISVYTGEPIKLAHLYDKSLYDIEHIIPKARLFDDSFLNKTICESSINKDKDASTAHDYMEKKGEKAYQSYVQRVKQIKSKPKRERLMMAEKDIPEGFIERQKKDSQYIARTAIKMLETVCRKVNSTTGSVTDVLRHQWGLTDMMKELNFEKYKKQERIIWRERPSGERYFVIEDWSKRDDHRHHAMDAIVVACTKQGYIQQLNNLNKTFVNDKTQRVLRTSSRKFALPWTNFRQDARKALSDALISFKSKQRVATKNKNKIKHRDKNREPQAVLTPRGFLHKETVYGKMKRYAENRVALNGRFSLETIENIAHPIEKQAVIQRLAAFDNDPKKAFKGLDKNPIIVEGKRKPLTQVVVWETIYTIKKTLNMLNKKQIEKDILDVRISRLVNERLAEHGGDLKKMVASLEEQPIWVNEAQKICVKSVKLKTDLKDLKPLHENEQGKPIDFVNLRNNHHFAVYEDEKGKFQFEKVSFWEAFERKKNGFSVIKTQHEKGWRFVVSLAINEMIVFPKGNEEIDENFILNPDNYAVVSEHLYRVQKLSSTAKGAPNLSFRHHLATTLKDDNQLIHVQSLGRLYNIYKVSINRLGMITDVQKIAPAKK

SEQ ID NO: 23162 - protein, 1327 aa, unidentified
  REGION 1..1327: note = Cas Enzyme sequence
MKKILGLDLGSSSVGWAFILEDEMESKILGAGVRLVSLSSDESNDFQKGKAISINKDRTLRRGARRSLQRFKQRRDAILRKFKSIGFITNEFNHAEDSSLFTHYSYAIRSKAATEAVTKEEFVKVLLMLNKKRGYKSSRKDAPLVEGSQENDVIFDGMDVARKLYQQNLTPGQYALSVIEKGGEVPAFYASDLTNELRRIVTFQLVGNENLPADLLDLVINKSRNATYYFFDKVLNIPIAENKGSKEDIKKQRFIWRAEAVSQKVDASVLAFIIGDLNDQISKSSNYLGKISDNSKELLINNLTVGQFQFQALVENPHASQRNVVFKRTDYLNEFEQIWEVQKKFHPELTEELKKEIRDVTIFYQRKLKSQKHLISFCEFEPRNRVAPKSSPVFQLFRMWQNVNNLVSKSKLVLDEDEREGIIEVLSYNGTLSEKELLKLLGLNPSIDKLNFEKINGDQTRTNFLKVLIQIWEKQGNSKKNLGTPLTRMDVALILKDVGLPGDLLDLNLDLDANAFDKQPYYQLWHLLYSLDDDALVKSALINKFGFSESLAQAMLYVKLESNYASLSVKAMRKILPHLMDGLKDEKARAYFYKAQSSTTETKDLKETLDLVKKNSLRNPVVEKVLNQTINVVNAIIASDLYGRPDEIRIELARELRASNEERSAMTKNLMDGTKKNENIRKQLQENFRIQRVTKNDIIRYKLWEETGGISIYTGNTIQASDIFGGKYDIDHIIPQSRLFDDSFSNKTLCERALNIEKGNQTAYSFLKQKYSPAEFEQYLSRVKDLEKSEKIKKTKAFKLNLTNEKIPDDFITRQLNETQYISRKAKEILTDICSKVYTTTGSVTDRLREDWGLVDMMKELNFEKYKALGLTYEDKGKNGERLLKIKDWSKRNDHRHHAMDAITIALTKQAYILYLNNLNANIGGVVQGNIENKYTERIGGKIVFKSPMVNIRDEFKRTLDAILISHKAKNKVVTKNKNKIKTKSGLVIQNTLTPRGQLHKETIYGAQNTYETKWVAINAKMDADLISKVANKQQREALTARLFAFDNDPKKAFSGKNSPSNNPIYLDEHKRYTLNDKVKLVDLVPQFTIRKNVGPDLDVKKIEKVVDVGIKNKLMERIQAFGGDPKKAFSNLDENPIFLDKAQKITIKTVKMQGVNNALALHSYVDDDGILKPKDWVSSGNNHHVAIYEDENGDYQDEVVSFFTAVTRATSVPPLPIIQKHHEKGWRFLFTMKANELFIFPSEEFNPSELDLTDPNNYSKISNHLFRVQKLTFKNYYFRHHLETNVEDTKELRDIAWKSIRSNNHLKGIVKIRVNHLGQIVKTGEN

SEQ ID NO: 23163 - protein, 1560 aa, unidentified
  REGION 1..1560: note = Cas Enzyme sequence
MKRNLGLDLGTNSIGWALIEHDFDNKLGKIIGLGSRIIPMDAATLSDFEKGNTISQTAARTKYRSNRRLRQRTILRRERLHRVLNIIGFLPEHYSRSIDFHNHPGQFKNGLEPKINYKPNEKNVNEFIFKESFNEMIQEFNVTGFNINIPHDWTIYYLRKKALKEKISKEELSWIILNFNQKRGYYQLRGEDLDNEIENKKTEEYYSLEVTKVEETDEKNAKGTWYNVFLENGWIYRRQSAQTLKNWVGNNKEFIVTTIIDKDGTPKLDKKGNIKRNFRAVDSEIDWLAIKKKTEKDIQNSNKTVGEYIYNFLLINPSQRIRGKLIRTIERKYYKEELKKILITQAKFHSQFLDRRLFKACVEQLYANNEAHKEKIKDKDFVYLFIDDIIFYQRPLKSKKSNIASCQYETRIFKKKIYIPDNEKIIEKEIIVNEPLKGIAKSNPLFQEFRLWQFLRNLRIYQRDAEIDGKTEFDVDVTDVFLPNEECWVELFDFLNSIKEIEQNQLLEFFVKKAIITKNKKSNYRWNYVEDKKYPCNFTKAQLITRLNKVEGIITNKFLSSEIENHLWHIIYSIKDKYEFEYALKTFAKKHDIKVDSFFEQFKNLPPFKNEYASYSSKAIKKLLPLMRQGKYWDINEIPEEIFIRGNMIIERLRSIDYNVERIDDKVADDDIPKSILKSFARKKEDNFFRGLNTYQACYLVYNRHSEVSDLIQWKNPKDITNYLTKFKQHSLRNPIVEKIVTEVLRVVKDIWEYYGNGEMNYFDEIHIELGRELKNPAHKRSEISNKIAENENTNQRIRELLQEFKNDSNIMGDVRPYSPSHQEILKIYEEGVYQNPNANYESLSLDDVEKIRKSSSPSKSEIIKYKLWLEQGYLSPYTGRIIPLSRLFTTDYEIEHIIPQSRYFDNSLSNKIICESEINAIKDRRTAYEFLKEENGRIIELARGKFVKLFTVEEYEVHCNDYFKKNRVKLKKLLSEDIPESFIERQLNDSRYISKFIKGLLSNIVREDKEQEITSKNLVTVTGAITAILKNDWGLNDKWNDIISPRFQRLNELTHSNDYGYWDESLNSFRIIVPTSISAGFSKKRIDHRHHALDALVIACTTKDHVNYITSLNTQRNNYSLVNKLRQVNKRQFTDRNTGELKITNVPGNYHLPWCSFPVDAHAFLIKTVTSFKQNVRIINKTNNKTWQWIARNGRLKKELIPQIKGDNWAIRQPLHKETVSGIVKVRVKKEVSFLNGIKNWNYLVNKDLKKIIHKLKVEGKSDKAISHYFKNNPFLIENKPATKVQVYSFTNNATASRIQLSEKFTRKQLENVTDTGIKKILEKHLGRYVDDKGNERFDLAFSTDGLVELNNDLIYLNNGKKHKPIYKVRIYEEGNKFKIGETGNKNKKFVEAAKGTNLFFAIYWNEEFQKREYETIALPDVIEHQKWRATLSKEEQEITPIIPLNHQKGRFLFFLSPNDIVYVPTEEELVNPLMVWFDNLTTEQSDRIYKMVSSTGNECHFVQNNVAALIKSYDAKSKVGEFGSLNKMEVDLNGARIKECCWKLECDRLGNVEKVHRH

SEQ ID NO: 23164 - protein, 1560 aa, unidentified
  REGION 1..1560: note = Cas Enzyme sequence
MTKTTLGLDLGTNSIGWALVKSNAEDKSDFGATNGKILGMGSRIIPMSQDILNNFSAGVSHSQTANRTAYRGIRRLRERHLLRRERLHRVLNILGFLPTNYVKKIDFDKRLGKFLPNTEPKLTLDEEGKFVFMKSFLEMINDFPEGTKVPLEWTIYYLRKKALTDKISKQELAWILLNFNQKRGYYQQRGDIEEEVKDKLVEFHTLKITDVIDTGENRKNETWYNCKLENGWVYKRASKVPLNDWIGKTRDFIVTTSLDADGNPKVDDEGEVKRTFRSPKEDDWTLVKKKTEKMLEDSNKTVGAFIYDTLLEKKKGENIKQKIRGKLITTIERDFYKDELLQILNKQKEHHAELRDEDLYKKCVNELYKSNEAHRNMIANKDLTYLFVEDILFYHRPLKSKKHLIGTCRFEKRSFINAEGKKEEKGIRGVPKSHPLFQEFRIWNWINNLRIIQKQKEIDGKLKVDEDVTQLHLKNSKDKTHLFDFLNTKKQINEKQLLGHFGLEQKTHKWNYVRDDKVVKYYPCNETRYDLLKYFDKAGIEIILEEEEDAKSDNKPSLTYKQFETPLWHLLYSVDDLKQLKKGLTKFANNNNLPDAFVNAFIKFPKLDKDYGAYSLKAIKKLLPLIRVGKYWSEEDVVHKFGVYYGNIKTVIKDKLKQQQKAKEENKHFNSDFLAKLQLLDDAPSAYQGLELHTACYATYGYFAEADNTTKCNNPKAISDFLKNEFKQHSLRNPIVEQVISETLRLVADVWQQYGNGEKDFFDAIHIELGRDMKNPKDVREQITASNLKNQNTNQRIRYLLAEFAKDPKIKGVVPYSPHQQEKLKIFEDNIVSNFEMPDDVKKIASAEQPTQKQIERYKLWLEQKYVSPYTREPIKLSDLFDRGKYEIEHIIPQATYFDNSFNNKVICEAEVNKLKDKELAYNFIENNEGTEVQVNGGMETVKILSIEKYEKLVEQNFSGNDKKKKNLLRTEIPTKMIERQLNDTRYISKKIMGLLSNIVREPGELDHKAKRILNVNGAVTARLRNDWGLNNIWNELVTPRFKRMNKITNSNNYGSINEKIKKFLPDVPIEEKKDFKKKRIDHRHHPLDAVLIAFTTLNHTNLLNNETHLRAGKTKKERKKIRYDLKDKLMHSKPFEKKDEETGEVEKNKFYTTFKKPWENFEQDVLTHLKKTVASFKQNTRVINKTTNYYKRFIKNENGQLKKKSVKQTKGDSWAIRKPLHKETVYGKVRVKVDNNKVVTLNKALEQPDLIVDKQIRKHVLESIKTLNITDVKLVKKHFKTNPIIIEGKKIERVKVWQWLEGTASRNLLDTSFNEKKISSITNSGIQKILLKHLNKPNYQNQTDEEGKDIAPEKLAFTPEGITDMNVNIAALNNGKFHQPIYKVRTWEEGSRFAVGYKNSKSTKYVEAAKGTNLFYAVYKKADKRNYTTIPLNEVIEHQKQMAEEKIKDALPIPIHSNNGQFLFYLTVNDLVYVPLENENINEIDFSNLNEHQINRIYKAVSFNKKQAFFIQANVAYPIKNKFEFSSLNKMERSINGDMIKAVCIKLNIDRLGNISLAK

SEQ ID NO: 23165 - protein, 1446 aa, unidentified
  REGION 1..1446: note = Cas Enzyme sequence
MKKILGLDLGTNSIGWGLVEQDLDNHKGGLLGAGSRIIPMSQDILGKFDAGVTESQTAKRTAYRGTRRLYERNKLRRERLHRVLNVIKFLPSHYAEAIDFERRLGQFKEGDEVKLNYKKIDAKDAKVRYEFLFLNSFDEMVTEFNNMGYNDNIPYDWTIYYLRKKALNQKVTKEELAWIILNFNQKRGYYQLRGEEEADKNKHFVQLAVKELIDTGEEVKGKKLYEVVFDNGWKYDKQIVKAEDWIGRTKEFIVTIKDLKSGEKKYSYKSVDSEVDWLAIKSKTERDIDKSGVTVGQYIFSQLLANPNQKIRGKLIKTIERKYYRNELKQILKAQEEYHTELRDEKLYGSCLMELYSRNEAHRNNIKSQSIAYLIEEDIIFYQRPLKSKKSSIGGCQFEYRTYHKKDQTNGEVSEQRIPLKAIPKSHPLYQEFRLWQFVQNIKIIDKDLELTVRKPEQANITKGLLTTQEDIVDLYDELNSRKEIEQKNVIDYFVKKGKIEKANKGKYKWNYVEDKKYPCNETRYEFLKRLKKVNGVKPHDFLTNEIELKLWHLIYSVTDKVEYEKSIENFAKRNGIDVASFVEAFENMPPYKSDYGTLSHKAINMILPLMRKGKYWKEDAITSKTSNRIQKLIDGEYDESIRDRVRQKAINLKNVSDFSGLPFWLSSYIVYDRHSEGADVSKWRTTEDIDHYLNDFKQHRLRNPIVEQVVTETLRVVRDIWDKYGEGKQDFFDEIHLELGREMKNSADKRKQITSRQSENENTNERIRFILEELQKDSRTNEDIRAYSPSHQELLKIYEDGVYQNPEANFSIVSEDEIYKIRRNSSPSHSDIQRYKLWLEQGYISPYTGAVISLSKLYTAAYQIEHIIPQSRYFDNSLNNKIICESDVNQDKGNMTAYEYLSRRGGEIVDGHELLSLENYETHCQRYFKKNRTKLANLLSEDIPEGFINRQMNDSRYISKFVKSLLSNIVREEGEQEPTAKKLLPVTGAITNKLKQDWGLHDKWNEIIAPRFMRLNELTKSNDYGYYDKKINTFRITVPPEIRKGFSKKRIDHRHHALDAIVIACTTREHINYLNALNAEKENFKLRSKLLIKNKEGHFTKHFKMPWDNYPIEVKQTLEQIIVSFKQNNRVINKTNNKTWQWVEEQGRLTKKLVKQKGTNWAIRKPLHKETIAGKINHISTPKGKIATASRVSLTEIKNRKHLNKITDISIQKILLSHLNSYMDKNGKPQYDIAFSTEGIEDMNKNIKELNGGVAHKPILKVRQYEIGTKFQVGTKGNNHKKYVEAAKGTNLFFAVYWDEKKQKRTYETVPLNEVVEHQKQTAHLPKTERLAIQPNPEKGTFLFTLSPNDLVYIPSDEDISQPDNVNFKILKIEDSNRIYKLVSTTGTQAFFIKSQVAKSIANRIEFSTLNKMEKDTNGGMIKARCWKIEVNRTGEIVKINKGVN

SEQ ID NO: 23166 - protein, 1452 aa, unidentified
  REGION 1..1452: note = Cas Enzyme sequence
RRLLERSLLRRERIHRLLNTMNFLPVHYEEKIDFVNRLGKFIGEEEPKYAYKKDELGKAQFIFMNSFTEMLKDFQMHQPELVQNNKKVPYDWTIYYLRKKALDKAITKEELGWIILQFNNKRGYYQLRGEEDETIKEGKKEEYFALKVIRVEADNSSSGKNGEIWYNVFLENGWIYRRTSKIPLDWVGKIKEFIVTTDIDENGNALKDKEGKEKRKFRAPAENDWTLLKKKTESDLGKSGKTVGSYIYDTLLSNPDQKIKGGLIRTIERKFYKCELIAILNKQKEFHPELNDKMLYSKCVEELYRSNESRRLSVANYDFTRFIAEDVIFYQRPLKSKKSLIENCSFERRCFVDPETKELAYSPIKCIAKSHPLFQEFRLWQFIKNLRIIEREKMVGDTMKFDQDVTPEFFPTQEEYVLLFDWLNEHKEIDQKGFLKYPVLGLKKNIDKYRWNYVEDKAYPCNETRSVLKTRLNKAGNIPAEFFDKETEESLWHILYSVEDKYDIEKALTSFAIKKELNEEQKVAFVEQFRSFPPFKKEYGSYSAKAIKKLLQLMRMGSRWSENEIADLTKERIQKMIDGECDETIKIRTREKALKLNEIKDFQGLPLWLASYIVYDRHSESGDVLKWETPEDIDYYLKHVFKQHGLRNPIVEVVVVETLKVVKDLWKTYGYFNEIHIELGREMKNPADKRLKMTIQNVENENTNLRIKALLAELANQKDIEGVRPYSPSQQEILRIYEEGVLNMLTKEDPDYDAISKISKMAQPSASDLIKYKCWLEQKYRSPYTGQMIPLARLFTSDYEIEHVIPQSRYFDDSFSNKVICESAVNKDKDNLLAYEYIKQNEGKIIEIGLGKKVKLLTADSYTEFIQSHYAGSVAKKKKLLMDTIPDSFIERQLNDSRYISREIKKLLSSVVREKDEEEAISKNVIVCTGSITDKLKRDWGLNDIWNTIIYPRFERLNRLTNSDKFGQWENKQGKRVFQIEMPLELQKGFNKKRIDHRHHAMDAIVIACATRSHVNYLNNESAHSKSKDKRYDLRRKLRRIEILEKQELKDGVTVTKKIEVAKEFYKPWPTFTQDAHEVLQSIIVSFKQNLRVVNKATNRYECFVNGKKEIVKQSKGESWAIRKPMHKDTVSAAVSLRKTKTVRLSQAIEDWRNIVDKSLRKELGSLYSKYGEKGSKYIVKFFKDRENKHNGVDVTKVDIYYFDNDCAASRVTLDDSFTSSRIESITDTGIQKILLKHLASYNEIKGDKIIEHPELAFSADGLDTLNVNMTTLNDGKFHKPIKKVRTYETIGNKFTVGQTGNKKTKYVEAAKGTNLFFAIYVSEEGSRSFLTVPLNEVAERQKQGLIPVPEKNPKDDKLLFWLSPGDLVYVPSLDEEGRVIEIDNIIQDRIYKFVSCTGNVCDCIPHFVASPILQTIELGSNNKAQRTWSGEMIKDICIKIKTNRLGQIVKL

SEQ ID NO: 23167 - protein, 1445 aa, unidentified
  REGION 1..1445: note = Cas Enzyme sequence
MKRILGLDLGTNSIGWAVVKHDIDLAQGEIIATGSRIIPMSQKVLSKFGSGVTESQTAERTRYRSMRRLYERYKLRRERLHRVLYVMDYLPLHYVEAIDFEKHLGQFRSGQEPKINYCPVTRDDGLVNYEFLFMDSFKEMVDDFKSSGHQAAIPYDWTLYYLRKKALTQRISPEELCWVLLSFNQKRGYYQLRGEEEPDDGKDKRYMALKVKQLIDTGKDVKGKKLYEVIFENGWKYNKEIVKTEDWVGRTKEFIVTISELKSGEKKYSYKEVDSEEDWVAIKAKTELDLDESGLTLGTYIYQALLHNPMQKIRGKLIKTVERKYYKNELSQILQEQQKHHEALRNSEVYRSCIEELYPRNQAHQNQLKDRSLSDLFIEDIIFYQRPLKSKKSSIGGCRFEKRRFKREDEESGKMVLVSEPIKAISKSHPLYQEFRLWQFVRNLKIIDKRLELTARRTSEASVMDELMQRETDWVDLYEVLNQRAEVEQKHIIAYFIKKNKIAKKDKEHYVWNYVADKKYPCNVTRSEMLKRLKKVEGLEPGAFLTQEIELSLWHLIYSISDRVEYISAIKRFAAKYSINQDSFVEAFKSMPPYDSSYASLSYKATRKLLQLMRMGKYWDRQTIDQKTLDRIEKIVNGEYDEKIRDRVQEKSFQLGSIEDFKGLPLWLASYVVYDRHSESADMAIWTSPDEITQYLQEFKQHRLRNPIVEQVVTETLRVVRDIWTYYGDGQKGFFDEIHLEMGRDLKNSAEQRKRISERQRTRENTNDRIRKLLEELSLDVDVQGDVRSYSPSHQELLKIYEEGIFMNPETKYERVSEDEILKIRRNAAPSKADIQRYKLWLNQGYTSPYTGQIIPLSKLFTSAYEVEHVIPRSRYFDDSLSNKVICESEVNSHKDNRTAFEYMQQHKGETVAGFQLLSDDQYVEHCQRYFKNNRNKLANLLSEDIPEGFISRQLNDSRYISKYIKGILSNIVREDGEQEPTAKRLLPVTGAITAKLKRDWGIHDQWNELVAHRFKRLNELTKTQDYGYWDDKIRAFRISVPSELRKGFSSKRIDHRHHAMDAIIIACTTRSHVQYFNTMNAQSELKNKLMTKNAQGDYTKYCKLPWRSFPVDVKQSLKQIIISFKQNLRVINKATNKTWQWVDQDGQLKKKLVVQKGTNWAIRKPLHKETISGHVKHVDVPKGKIATASRVPLASIKNQKHIDKITDVSIQKILRNHLTQYLDAQGKPLFTEAFSKSGIEDMNQNIQQLNGGVPHMPIYKVRQYEIGKKFAVGHAGAKAKKYVEAAKGTNLFFAIYWDEQKQKRVFESIPFYEVVEHQKQVAHLPSGERTAIQSKPELGISLFTLSPNDLVYVPSEEERIQPDIMSTNDGIILDRNRIYKMVSTTGRQAFFIKAAVAKSIANKQEYSALNKMEKSIDGDMIKEICWKLDIDRLGKVIKVHTLNL

SEQ ID NO: 23168 - protein, 1380 aa, unidentified
  REGION 1..1380: note = Cas Enzyme sequence
MKKVLGLDLGTTSIGWALVNEAENTNEQSNIIKLGVRVNPLSVDELTNFEKGKSITTNAERTLKRSMRRNLQRYKLRREQLIKVLKEHKIITDDTVLSEEGNRTTFETYRLRAKSANEEITLEELGRVLLMINKKRGYKSSRKVDTQEEGQLIDGMAVAKKLYNENLTPGEYLLILLQEGKKDSPDFYRSDLQQELDRIWEKQKTFYPEILTEEFKQQIEGKGKMNTGKIFLGKYGIYTADNKGADKKLQALQWRVKALQEQLPREEMAYVIADVNGSISGSSGYLGAISDRSKELYFNKQTVGQYLMEKLNTDPHYSLRNKVFYRQDYMDEFEQIWETQAKFHKQLTPALKEELRDIIIFYQRRLKSQKGLISFCEFESKEIEVTIEGKTKKKIIGQRVSPKSSPIFQEFKIWQTLNNIKVRNKEDDTERFLEKEEMDRLALELSIKKELKSSEVLKLLFKKPKNLELNFKTLEGNRTIAALYDAFQTIIMLSGHGEHDFSKMDATKTIQLVEEVFTALSFSVEILKFDALIEGKNIEKQPLFKLWHLLYSFEGDNSRTGNQTLIDKIMGLTNFPKEYATIIANISFQDDYGSLSTKAMRKILPHLKDGFAYGGRKERPEEPSACEYAGYRHSKHSLNKEEIENKVLKDRLEILKKNSLRNPVVEKILNQLVNVVNGIIDTYGKPDEIRIELARELKKSADEREKMTAAISKTTAEHEQIRKLLKNDFGLKHVSRNDLIRYKLYKELEPRGYKTLYSDTYIPREKLFSNEFDIEHIIPQSRLFDDSFSNKTLEKREVNIKKGNDTAYDYIFNEEGQAGIDNYLLKLDDLVKDAKISRTKYKKLKMKGSEIPDDFIERDLRDSQYIARQAKGMLEAIVKNVVTTTGSITDRLREDWQLVDVMQELNWDKYDKLGLTEIIEGRQGQRIRRIKGWTKRNDHRHHAMDALTIAFTKRSHIQYLNNLNARSNKESRIYEIETKELKRDENNRLRFKAPIEIKAFRAAAKEHLSNTLISIKAKNKVVTQNINITKKKNGTNKKQQLTPRGQLHNETIYGSSLRYVTKLEKVGAAFNEEQIAKVANKKYREALLQRLKEYNNDPKKAFTGKNSLQKSPLYLDKAQNLTVPEKVKTVTTETIYTIRKAVTPDLKIEKVLDSKVRAVLAARLKEYDNDPKKAFSNIEDQPIWINEEKGICIKRVTITGVANAQALHDKRDKYGQPILDAEGKNIPVDFVNTGSNHHVAIYRDNTGNLQENVISFFEATTRATLGIPIIDKDYRKEDGWEFLFSMKQNEYFVFPNEQTGFNPKEIDLMNPENYHLISPNLFRVQKMTSKDYFFRHHLETNVENNNDLKGITWLRYGLNGIVGIVKIRLNHIGQVVAVGE

SEQ ID NO: 23169 - protein, 1095 aa, unidentified
  REGION 1..1095: note = Cas Enzyme sequence
YRQDYLDEFNAIWEKQALFHPILTDALKDEIRDVIIFYQRRLKSQKGLISFCEFECRKIEVEIAGQKKTKMLGSRVIPRSSPLFQEFKIWQSLNNIEVFGKGKKSKKQKEQTLFDQTEDPLEFGGRRELYEEEKELLALELSIKKELKKADILKLLFDNPKELDLNFNAVQGNLTQATLFNAYKKIIELSGHEIDVEKVSASKILKSIEEIFKALNYNTEILHFDSEKSQDQQAMYMLWHLLYSFEGDNSNTGNENLINKISKLYGFEKEYAKILANVTFQDDYGSLSAKAISKILPYLKEGHKYDIACDLAGYKHSASSLTREELENKTYKDRLEILPKNTLRNPVVEKILNQMINVINSIIDSYGKPDEIRIELARELKKSAKEREELTKSISETTKLHQQYKDILSKAPFNLTNISRNDIIRYKLYEELKDNKYNTLYSNTYISPAALFSGDFDIEHIIPQSRLFDDSFSNKTLELRSINIEKGNKTAYDFIKGKYGETGKNESLDNYLNRIETLYKNGVLKKSKYNKLKMQDTDIPDGFIERDIRDTQYIAKYAKTLLGDLVKFVVSTSGSVTDRLREDWQLVDVMKELNWVKYQQLGLTEEFTNEEGHRIRKIKDWTKRNDHRHHAMDALTVAFTKRQFIQYLNNLNARRISDEQGISNAEKDERNNVSITTNDMKLNTRDVLGIEKKELYRDNRGKLRFKAPMPLQEFREEAKRHLENTLISIKAKNKVTTLNINTLKKAGGVYKKTQLTPRGQLHNETIYGSQKQYIVKEETINAKFDVEKIATVTNPVYREALLKRLEQNNNDPRKAFTGSNALTKKPMWLDEQQTEKVPEKVKTVSFETIYTIRKEISPDLKIEKVVDEKVRQILNNRLNEYNGNAKQAFSNLDENPIWLNKEKGITIKRVTITGINNAQALHEKLDKDGKPILDGEGKKQPVDFVNTGNNHHVAVYSDADGNLQENVISFYEAVTRRNLGLPIIDKDYKKDDGWQFLFSMKQNEYFVFPNESTGFNPNEVDLLNPDNYSLISPNLFRVQKFTIKDYFFRHHLETNVESNSTLKGITWLRCGLNNIDNIIKVRINHIGQIIHVGEY

SEQ ID NO: 23170 - protein, 1446 aa, unidentified; identical to SEQ ID NO: 22240
  REGION 1..1446: note = Cas Enzyme sequence

SEQ ID NO: 23171 - protein, 1134 aa, unidentified
  REGION 1..1134: note = Cas Enzyme sequence
FFNDCVRELYRSNEAHQLQLSKRDFVHLFLDDIIFYQRPLRSQKSSIGNCSLEYRTYKVNGEEKKEYLKVIPKSNPYYQEFRVWQWLYNLKIYANTDDIDVTETFLKSTEDLENLFEFLMSKKEVDHKDILKYFFKDLKGKVQTAEIAKYRWNYVYDSEKDESKTYPMNETGYEIRRILEKVENVPTNFLNGEIEQHLWHIIFSVTDKKEYEAALETFAKKHSLYFVPKSERDDKNPNKKCFVYNFKNMVWKENNYGSYSEKAIKKLLPLMRLGKYWKWENVDSKTQTRIDKILTGEFDEEMQIRVREKAITLREQNHFQGLQLWLASYVVYDRHSEAGNISKWNSSEDLKTFLNEFKQHSLRNPIVEQVITETLRVVKDIWIKYGNGAKDFFDEIHIELGREMKNTAEDRKRITNQISESENTNLRIKALIMELKENSDGKLPVDDVRPYSPMQQEALKIYEDGVLNSNIEVPDDIVKISKSAQPTKAELMRYKLWLEQKYRSPYTGKAIPLSKLFTTAYEIEHVIPQSLYFDDSFSNKVICEAEVNSLKNKQLALEFIKNHHGQKVSTSIGLVEIFSEEAYTSFVKEHYEKNRSKKTKLLLEEIPEKMIERQMNDTRYISKYISSVLSNIVREEKDDDGVNSKNILPGNGKITAQLKQDWGLNDVWNELILPRFERMNELTKTSAFTSKNTNNKIIPTVPLELSKGFQKKRIDHRHHAMDALIIACATRNHVNLLNNQSAKSDTKRYDLQYKLRNTEKWTDKNGKERDKFTEFKKPWETFTQDTRNELDKIVVSFKQNLRVINKATNTYERIENGKKTDKKQEGVNWAIRKPMHKDTVSGKVELKRIKVPKGKILTATRKSIDMSFDLKTIESITDTGIQKILKNYLGSKNNLPELAFSPEGIEDMNKNIAQYNDGKPHQPIYKARIFVETATQFQVGQKGNKKHKYVTAADGTNLFFIFYENKDTKARMFETVPLNEVIEHQKLQVSLNVEKSKRTDVPIKNVLEHNNKEIEVNYLFHLSPNDLVYVPSNDENLSMIDFTNLSKEQRNRIYKFTDGSGTIANFISVNIANVLFNMNKEKQKKAFGREMFAIQNEIGIGSQGSKNQNAITGEQIKSVCIKLKVDRLGKISKA

SEQ ID NO: 23172 - protein, 1212 aa, unidentified
  REGION 1..1212: note = Cas Enzyme sequence
CYILQAEFDKIWNTQKKFYPVILTVELYKALQGKNKGATWAICQEPFNIVGAKLEGKASEQKLQRYQLRSDGLVNQLDLEHLAITLQEINNSLNQSSGYLGDISDRSKELYFNKETVGENLYNQLLKNPHTSLKNQVFYRQDYLDEFEKIWETQSKFHSELTEDLKTEIRDVIIFYQRKLKSQKGLLSFCQFESWEQSYTEKETGKSKKRIVGNRVISKSSLLYQEFKIWQNLNNLEFKNKAKGELIEIVKLDDDVRKSIFNELNLRGDLKSTSVLKLLSKFLDIGKTSEWKCNFEKIEGNRTNESLYNIYQKIAEYEGYGFDWSKKTASEITDELKTIFTEIGIDNSILDFDVEKEGVDFDKQYSYQLWHLLYSAEDDVKISEDDKLIYGNSNVALKKKLHIKYGFKPEYAALLVNISLQNDYGNLSSKAIRKIFPYLESGSIYSKACDLAGYNHSNSLTKEELENRELKPKLELLKKNSLRNPVVEKILNQMVNVINQIIDTYGKPDEIRIELARELKKNAKERGEMTRGIAEATKRNLDIKKTITKTFGIPSPTKNDVIRYRLWLELETRGHKSLFTNAYIPQEKLFSKEIDIEHIIPKALLFDDSFSNKTLAYRNVNLKKANRTAYDFILSDYQSDLENYKERVESLYNNGKGVISKAKRNKLLLLSQSNLPDGFIDRDLRNSQYIAKKAKELLFEVFNGVISTSGSVTSKLREDWDLINVMKELNMPKYKALGLTETEVRKNNKKVEVIKDWSKRNDHRHHAMDALTVAFTTHNHIQYLNNLNARRDESLEIHKVISNIQNKITHRNEEGKRKFIKPIPNFRKQAKTHIEQILVSFKNKNKVVTNNINKSKLKGKDNYNTKLQLTPRGQLHKETVYGKSKQPLEKPTKLNKRFTKEQAKFIINVPQRNIVLNHLKKYDNNNVIAFDTKTLKKDPLLYNNESLKEVFCFEEIYTIRKDINPNNFKDIKTINKVVDLKIRQILIDRLAEHNGKPKEAFSDLYKNPIWLNKTKGISIKRVTITGVSNAEPLHYKKDHLGIEILNDNGNSEPVDFVSTGNNHHVAIYKDKDDKLQERVVSFYEAVIRVNQDLPVIDKTYNQDIGWQFLFTMKQNEMFVFPSEDFNPSEIDLMNENNFNFISPHLFRVQKISTKNYVFNHHLETQAVGGDTFKNKKELSEITYRFYQSEKYLEGAVKVRQDHLGSIVQIGEY

SEQ ID NO: 23173 - protein, 1018 aa, unidentified
  REGION 1..1018: note = Cas Enzyme sequence
WQVLHNVLIKKKESKKRMEKKENQSSLVESEKEIFAFSLEERQHLFEELNLKGNLPSKTVFELLGYKIQDWEINYSVLEGNRTNKALYEAYLKILDIEGYDVKELLEVKSNKDEVELDDIQIAASEIKNMIKQIFEILKIDTAILDFDPELDGKEFEKQASYQFWHLLYSYEGDESASGNEKLYELLKKKFGFKREHSQILADVTLSDDYGNLSSKAIRKIYPYIKENNYSTACELAEYSHSASSLTKEEIANRPLKDKLEILKKNSLRNPVVEKILNQLVNVVNALIEKNSKRDESGNIVEYFKFDEIRIELARDLKKNAKERAEMTSSINTAKTNHEKIFKLLQNEFGVKNPSRNDIIRYRLYEELKNNGYKDLYTNSYISREILFSKQIDIDHIIPQAKLFDDSFSNKTVVFRKDNLEKGSKTAYDYISAKHGATQLADFETRIASLFEIGKKNKEEGISKAKYQKLQKKESQIGDGFIQRDLRDTQYIAKKAKNMLFEIARSVISTTGSVTNRLREDWDLINVMQELNFDKFKKLGLTEMVEKKDGTLKERIKDWNKRNDHRHHAMDALTVAFTRHNHIQYLNNLNARKQEANKLHRNIIGIEAKETHVAIDDTGNKKRVFNLPIPNFREQAKAHLENVLVSHKAKNKVVTKNKNRTKSKTGEKIKVELTPRGQLHKETVYGKYRYYTSKVEKVGIKFDLPIIGRVANPRYKQALLNRLSESGNDPLKAFSGKNSPSKKPIYLNDEKTAILPEKVKLVWLEEDYSIRKDVTPENFKDEKSIEKVIDIGTKRILLGRLAEFGGDSKKAFSELDKKPIWLNKDKGISIKRVAISGVKNAEALHYKKDHLGNEILDKRGNQIPVDFVSTGNNHHVAIYINDKGEIQENVVALFEALERVNQGLPIIDKTYNQYLGWVFLFTMKQNEYFVFANTSTGFNPKEVDLLDSKNMLAISPNLFRVQKFTKKDYFFRHHFETTVEDNSNLKGTTWKREGLSGINGIVKVRLNHLGEIVKVGEY

SEQ ID NO: 23174 - protein, 1429 aa, unidentified
  REGION 1..1429: note = Cas Enzyme sequence
MKNILGLDLGTTSIGFAHVIESDDPLKSIIKQIGVRVNPLTTDEQTNFEKGKPITINADRTLKRGARRNLDRYQDRRANLIHALFKANIITKETKLAEDGKSTTHSTWRLRAQSVTEKIEKDDLARVLLAINKKRGYKSSRKAKNEDEGQAIDGMEMAKKLYEEKLTPGQFAYALLQAGKKNISDFYRSDLKEELDKVWAFQKNYYPEIFTDEFKKELEGKGQRATSAIFWVKYRFNTAENKGTREGKKVQAYKWRSEAISQQLEKEEVAYVITEINNNLNNSSGYLGAISDRSKELYFNKETVGQYLFKQLLKNPHTQLKNQVFYRQDYLDEFELIWSEQKKHDPELTDELKVEIRDIVIFYQRKLKSQKGLVSFCEFERKEIEIETGKKKIIGLKVAPKSSPLFQEFKIWQVLHNVLIKKKESKKRMEKKENQSSLVESEKEIFAFSLEERQHLFEELNLKGNLPSKTVFELLGYKIQDWEINYSVLEGNRTNKALYEAYLKILDIEGYDVKELLEVKSNKDEVELDDIQIAASEIKNMIKQIFEILKIDTAILDFDPELDGKEFEKQASYQFWHLLYSYEGDESASGNEKLYELLKKKFGFKREHSQILADVTLSDDYGNLSSKAIRKIYPYIKENNYSTACELAEYSHSASSLTKEEIANRPLKDKLEILKKNSLRNPVVEKILNQLVNVVNALIEKNSKRDESGNIVEYFKFDEIRIELARDLKKNAKERAEMTSSINTAKTNHEKIFKLLQNEFGVKNPSRNDIIRYRLYEELKNNGYKDLYTNSYISREILFSKQIDIDHIIPQAKLFDDSFSNKTVVFRKDNLEKGSKTAYDYISAKHGATQLADFETRIASLFEIGKKNKEEGISKAKYQKLQKKESQIGDGFIQRDLRDTQYIAKKAKNMLFEIARSVISTTGSVTNRLREDWDLINVMQELNFDKFKKLGLTEMVEKKDGTLKERIKDWNKRNDHRHHAMDALTVAFTRHNHIQYLNNLNARKQEANKLHRNIIGIEAKETHVAIDDTGNKKRVFNLPIPNFREQAKAHLENVLVSHKAKNKVVTKNKNRTKSKTGEKIKVELTPRGQLHKETVYGKYRYYTSKVEKVGIKFDLPIIGRVANPRYKQALLNRLSESGNDPLKAFSGKNSPSKKPIYLNDEKTAILPEKVKLVWLEEDYSIRKDVTPENFKDEKSIEKVIDIGTKRILLGRLAEFGGDSKKAFSELDKKPIWLNKDKGISIKRVAISGVKNAEALHYKKDHLGNEILDKRGNQIPVDFVSTGNNHHVAIYINDKGEIQENVVALFEALERVNQGLPIIDKTYNQYLGWVFLFTMKQNEYFVFANTSTGFNPKEVDLLDSKNMLAISPNLFRVQKFTKKDYFFRHHFETTVEDNSNLKGTTWKREGLSGINGIVKVRLNHLGEIVKVGEY

SEQ ID NO: 23175 - protein, 1429 aa, unidentified
  REGION 1..1429: note = Cas Enzyme sequence
MKKILGLDLGTTSIGYAYVIEDEQYQNSEIIQIGVRVNPLTTDEQTNFEKGKPISINADRTLKRGARRNLDRYQERRANLIHALFKGDIISKETKLAEFGKRTTHSTWKLRAQSAKERIEKEDLARVFLTINKKRGYKSSRKAKNEDEGHAIDGMEVAKKLYEENLTPGQLAYSFLMESKKQIPDFYRSDLQAELDKVWDFQKQFYPEIFTDEFKKELEGKGQRATSSSFWGKYKFNTAEIKGFRDEKKIQAYKWRSEAVSQKLEKEEVAYVITEINNNLNNSSGYLGAISDRSKELYFNKETVGQYLYKQLLKNSNIRMKNQVFYRQDYLDEFETIWNEQRKYHLELTEDLKQEIRDIVIFYQRKLKSQKGLVSFCEFESREIEIENGKKKTIGLKVAPKSSPLLQEFKIWQIVQNLLIKNKGSKKRIAKNEKEANLFEEEQEIFPFDLEEKMKLFEELNLKGNLSEKTLLEILGYRNQDWEINYTQLEGNRTNKALYEAYLKILDIEGYDVKDLLKIKSNKDEVELGDLNISAHDIKMMVKQIFETLKINTGILDFNPELEGKEFDLQPSYQLWHLLYSYEGDESASGNEKLYDLLEKKFGFKREHGQVLANLTLSDDYGNLSSKAIRKIYPYIKENNYSTACELAGYRHSASSLTKEEIANRPLKDKLEILKKNSLRNPVVEKILNQLVNVVNALIEKNSKRDENGNIVEYFKFDEIRIELARELKKNAKERAEMTTNINATKLAHEKIFKLLTSEFGVKNPSRNDIIRYRLYEELKNIGYKDLYTNTYIPREILFSKQIDIDHIIPQAKLFDDSFSNKTVVFRKDNLDKGNKTAIDYIESKYGEKNLVDYLNRVDSIFEVGKKNKEEGISKAKYLKLIKKESEIGDGFIQRDLRDTQYIAKKAKNMLYEITRSVVSTTGSVTDRLREDWDLINIMQELNFDKFKKLGLTELVEKKDGTFKERIIDWSKRNDHRHHAMDALTIAFTKHSHIQYLNNLNARKNEKNKLHGNVIGIETKETHIMIDDHGNKNRVFNLPIPNFRQVSKEHLENVLVSHKAKNKVVTKNKNRTKSKTGDRIKIELTPRGQLHKETVYGKYRYYESKLEKVGIKFDLDTIEKIADPHYKKLLLERLSDNANDPVKAFGGKNSLSKKPIFLNDGKTKTLPEKIKLVWLEEDFSVRKDLTPENFKDEKSIEKIIDVGVKKILLSRFRKFGSDPKKAFSDLDKNPIWLNETKGVSIKRVTISGVKNAEPLHNKKDHFGNEILDKEGKSIPVDFVSTGNNHHVSIYRDEKGDLQEKVVSFFEALERVNQGFPVVDKTYNQHLGWQFLFTMKQNEYFVFPNSSIDFNPREVDLLNPENAKIISTSLFRVQKFTIKDYFFRHHLETNVEDHSKLKGVTWKREGLIGINNIVKVRLNHLGEIVKVGEY

SEQ ID NO: 23176 - protein, 1722 aa, unidentified; identical to SEQ ID NO: 22233
  REGION 1..1722: note = Cas Enzyme sequence

SEQ ID NO: 23177 - protein, 1020 aa, unidentified
  REGION 1..1020: note = Cas Enzyme sequence
MLHKMRYRLALDLGATSLGWAMIRLDGSNQPCAVIKAGVRIFSNGREAAPPGQQGDSLAKTRREARAMRRRRDRLLKRKARMIRILIEYGFFSSEKSERESLLTLNPFKLRAEGLNRALTPAEFGRALFHINQRRGFKSNRRTDKKDNDNSALKHAISKVRTTIDAEGCRTVGEWLNKRDEAGKTVRARYRQNKIVKDDGKTRIDKSYDLYIDRSMIEQEFDALWDKQAELNPALFTEAARADLKDVLLHQRPLKPVKPGRCTFLPDEERAPLALPSTQRFRMYQEVNNLRILRDGLKEEPLTLKQRDDLIVALEANSECSFTQIKKLLGVGGAVQFNFEDPKRQEFKGNTTSAILGNAKHFGPMWLTFDEAKQDAIVWQLVKEENEAKLIRWLQDETGVDEKRAETIANAGLPEGYGSLCALALARVLPELKRDVTTYDKAVQAAGFDHHSHISPSATGEIWPELPYYGEPLQRHVGFGSNDPKDCDEKRYGRIANPTVHIGLNQVRVVVNALLKRYGHPSEVIVELARDLKQSKKQRDEENQRQAENQKRNRQFRSDIASVLGIGEERVKRADIEKMILWIELNQKNSADRQCPYSGVQISAHMLLSDEVEIEHILPFSQTLDDSLNNKTVALRQANRVKGNRSPWDAFGAQSTAGFDYAGILARAEQMPKAKRYRFGEDGYQRWLKDDAGFLPRALNDTRHMSKVAREYMSLICPNTRVIPGRMTAMLRAKFGLNDVLGLNGEKNRNDHRHHAVDACVIAVTDQGLLQRFAQASASAREQQLNRLVENMPLPWESYREHVKRAVGAIWVSHKPDHSHEGAMHNDTAYGLRGSGRVSFHKMVDGQRTHIEDNLKVIELTDAKAGNRHGFLPSGEPKPYKGYKGDSNYCIEIVSNEKGRWEGEVISTFDAYQLVREHGTARLRHPTLSISGKPLVMRFVMGDYVRLEVNGIPNTFRVASINSAGRLTLAAHQEANVDARNRDREGNWRYTYKQAGSLQSSKARRVSVSPIGELRDPGFK

SEQ ID NO: 23178 - protein, 1470 aa, unidentified
  REGION 1..1470: note = Cas Enzyme sequence
MKKILGLDLGTNSIGWALVKQDFENKQGEILGMGSRIIPMTQDVLDNFGAGKPSKTQTSERTGYRGTRRLRERHLLRRERLHRVLNIMNFLPEHYANQIDFEKRFGQFKSELEPKLVYNNREFIFKKSFEEMLDNFKKHQPQLLTGEKGKDKLVPYDWTIYYLRKKALTQKIDKQELAWILLNFNQKRGYYQLRGEEEEETPNKLVEFYSLKITDVIPDEKPNNKGETWYSLILENGWIYRRSSKTSLGDWKNKTRDFIVTTDLNDDGSIKTDKEGNEKRSFRAPSENDWGLVKKKTEQEIDQSHKTIGTYIYDSLLQNPKQKIKGKLVRTIERKFYKEELKTILQKQIELQPELFNEDLYNDCIRELYRNNQSHQLTLSKKDFLHLFLEDIIFYQRPLRSQKSSIGNCCLEYRKYKIDGIEKKEYLKAIPKSNPYYQEFRVWQWLYNLKIYKKEDDTDITSEFIKTQEDLENLFDFLMSQKEVDHKDILKYFFKNLKGKAQNEEISKYRWNYVYDSDKDESKKFPMNETGYEINRRLNKISNIPSNFLTREIEQQLWHLIYSVTDKKEYEKAIKSFAEKHHLDISSFVENFKKFPPFKSEYGTFSEKAIKKLLPLLRIGKYWNWNIIDEKTKSRIEKLLTGEFDEQIKIIVREKAEKNKLEKETDFQGLPLWLAQYVVYDRHSEADIAGKWNSVNDLEKYLNDFKQHSLRNPIVEQIVTETLRVVKDIWQQYGNGEKDFFDEIHIELAREMKNTADERKRLTNIVTENENTNLRIKALLIEMMNDSEVENVRPYSPIQQEILKIYEDGVLNSNVEVEEEILKISKKAEPTKSELQRYKLWLEQKYRSPYTGQTIPLNKLFTHEYEIEHIIPQSRFFDDSFSNKVICESAVNKLKDNQLGLEFIKNHYGQKVSVELGKEVQIFTEDQYRDFIKENYSKNRNKRNKLLLEEIPEKMIERQLNDTRYISKFISNVLSNIVRNEKDDDGVNSKNVIPLNGKITSELKQDWGLNDVWNNLILPRFERMNQITNSNLYTTYNEKHQKYLPTVPFEYSKGFQKKRIDHRHHALDALIIACATRDHVNLLNNQSAKSEIKRYDLQHKLRHTEKWKDKDGKERDKFTEFKKPWNTFTEDTRNSLETIVISFKQNFRVINKATNKYEKWVEKNEEKKKELVEQKGLNWAIRKPIHKETVSGKVDLPRIKVPKGKILTATRKSIDTSFNLKTIESITDTGIQKILQNYLLSKNGNSELAFSPEGIEDMNKNIEKYNDGKPHQPIYKVRIFEMGSKFPLGQTGNKKDKYVETAKGTNLFFAVYERKETKTRMYDTIPLNEVIEHQKLQVLQNVPNISRTEIPIKKTLEYKGKEVEVSFLFSLSPNDLVYIPNGDENTPSIDFKNLNKEQTERIYKMVSSTGSECHFTQSSISSLIKNYDAKSKIGEFGSLNKQETTLDNLIRIKERCIKLKVDRLGNISKT

SEQ ID NO: 23179 - protein, 1520 aa, unidentified
  REGION 1..1520: note = Cas Enzyme sequence
MKKILGLDLGTNSIGWALINHNFDSKDGNIIGLGSRIIPMSQDVLGKFDSGQSISQTADRTGYRGTRRLYQRDNLRRERLHRVLNILGFLPQHYAADIDFDKHLGQFKNDKEPKINYSKNETGRFDFLFTDSFLEMANDFKNSGYSDKIPYDWTIYYLRKKALSEKISKEELAWVILNFNQKRGYYQLRGEEEEVDENKSRTFETLIVERVEQTNEAIKTSGDKLYDIYFTNGWKYDRQTTKPGDWLNKTREFIVTTSTTKDGEIKRTYKAVDSEQDWIAIKAKTEQDIEKSSKTVGEFIYESLLQNPKQKIRGKLVRTIERRFYKNELKQILEKQVQFHNELKSTALYLNCINELYPHNEAHAANIKDKGFVYLFMDDIIFYQRPLKSKKSTISECTYETRTYKKVIKVDENGNTITKTIEVTQGINAISKSHPLFQEFRLWQFLSFLRIYKHTLQGELDITSELIETESDWVELFDFLNCRHSVEQKHIFEYFYKKGVIQKSDIESYRWNYVEKPYPCNETRSQFITKLKKVENLIPEVFLTKEIEQHLWHIIYSVKDKNEYEQALKKFAAKYSIDETSFFAAFKNFKPFNNDYGAYSYKALNKLLPLMRIGKYWNEENIGNSTLNRINKILTAEYDEKIANRVREKAINLTDISNFKGLPVWLACYVVYNRHSESGDNTKWNKPSDIDKYLNEFKQHSLRNPIVEQVVTETLRTVRDIWQHYGNSAEKYFNEIHIELGREMKNPADKRKQLSARNIENENTNQRIRELLTELMNDDLTEGDVRPYSPSHQEILKIYEEGVYQNPNADFSKVSNDDIDKIRKNSSPSVNDIKRYKLWLEQGYRSPYTGDMIPLSRLFTSDYQIEHIIPQARYFDDSMSNKIICESEVNQLKSSMTAYEFLKNPPLRSVTLNGGKIVNLLSLQEYETHCNQYFKRNRTKLTKLLSEDIPEGFIERQMNDSRYISKLVKSLLSNIVKEDDEQEATSKNIVPVTGAITSKLKQDWGLNDKWNEIVAPRFMRLNEITSSNNFGYFDKEINAFRCEVPDDLKRNFNKKRIDHRHHALDALVIACTTKDHVNYITSLNTSRTNYGLVSKFRKIEERQIKDKKTGESKLIKVPTHYLLPWISFSTQALTHLQTTVISIKQNTRVINKTNNKTWKWVEKNGHLKKELVKQTKGDNWAIRKPMHKETVSGAVSVRIKKEVSFINGIKDWENLVDKNLKSKIKQLYAAGNNEKAVAKYFKDNPYIIDNKDVKTVEIYTYTQNATAVRTMLTDKLTRKQFDRITDSGIKTILERHLKNYTLENGKEQFELAFNPDGIEELNKNIIALNNGKFHQPIYKVRIYEEGSKFNVGYTGNKHTKYVEAAQGTNLFFAIYWNVEKQKREFETIPLNIVIEHQKQVAALPKSERIPVPVNAEKGKLLFVLSPNDLVYVPTQSELENPTSVDFGNLNKEQVGRIMKVNDFSGVTCYFTPNTLSIAIAPKEIDSSFDNKTAKFENVSIKDVSWKLEVDRLGNITNIIR

SEQ ID NO: 23180 - protein, 1265 aa, unidentified; identical to SEQ ID NO: 22868
  REGION 1..1265: note = Cas Enzyme sequence

SEQ ID NO: 23181 - protein, 1395 aa, unidentified
  REGION 1..1395: note = Cas Enzyme sequence
MKKILGLDLGTTSIGWALVNEKENDDEKSSIIQLGVRVNPLTVDEKANFEKGKSITTNADRRMKRSMHRNLQRYKLRRKNLIECLKEHNIITGETPLFEQGNHSTFKTYRARAKAVEEEISLEDLSRVLLMINKKRGYKSNRKIKDTEEGELVDGMEIAKRLYDENLTPGQLLLDLLQQGKKYRPAFYRSDLQAEFNKIWEIQSAYYPEVLTDDFKKHVSGFNKTQTSGVFYAIHKISTAKNSGKEGYQQALLWRVAALTKKLDIEEVAYVLCDINGAINNSSKRLAMISDRSKELYFSHQTVGQYLMHSIEQNPNASLKNIIFYRQDYLDEFEAIWEKQAQFHPVLTPELKKEIRDIVIFYQRDLKSSKNLINYCEFEHTEREVVVDGKKKTIVTGCKVCPKSSPLFQDFKIWQILNNLQLSVVGHRRKRIKKDELQLSLFADKEGEPLQRFLDQEEKDILFKELSIRDKMSKKEVLKLLFDNPQKLDLNYKEVEGNKTNAALFKAYQNIISLTGNGEYDFTKMPADDVMSITSEIFTGLGYKTDYLTFNPLLEGKALERQPAYRLWHLLYSYTGDNSTTGVEALLKKIQEICGFEKEYATILAKVSLPLDYGSLSAKAIRKILPLMMKGYEYSKACELAGYRHSARSLTKEELDNKTYKSHLDELKRNSLRNPVVEKILNQMINVVNEIAATYGKPDEIRIELARDLKKSQEERELLDQAIRKNTAESEKLRKELEEEFGIQHVTKNDILRYKLYNELKMNGYKTLYSNTYIPREDLFSKRFDIEHIIPKARLFDDSFSNKTIEVRDVNIEKGDMTAYDYVAGKYDEKGLADYESRVEELFAQKIISRTKRNNLLMKEADIPSDFLQRDLRDSQYIARKAREILEEMVPFVVTTTGSVTSRLREDWQLVNLMQELNWEKYDTLGLTESYTDKNGNIVRRIKDWTKRNDHRHHAMDALTIAFTKRSIVQYLSNLNARSDKSGSIYGIEQNELNRNNKDHRLVFNAPMPLDEFRAEARKHLESILVSIKAKNKVVTKNINKAKKKDGHQQKVQLTPRGALHNETVYGKITNFEAEYKKVDGKFTEDVILRVSNQRYREALLKRLADFGGDSKKAFTGKNSLDKNPIWLNADHSYCVPLKVKLYKKIDVFTIKKAVDKDLKIEKVIDNKVRAILQQRLNEFGGDAAKAFSNLDDNPIWLNKEKGITIKRVKIRGIANGEPVRYKRNIKGELMKDENGNPIPNDYVNTANNHHVAVFRDAEGKMQEHVVSFYEATTRAIMGYPVVDREFKRSEGWQFLFSMKQNEYFVFPNEKTGFNPQEIDLLDADNYATISPNLYRVQKFSEGDYFFRHHLETNVESENALRDITWIRVRSIQYLEGIVKVRVNHIGKIVSVGEY

SEQ ID NO: 23182 - protein, 1437 aa, unidentified
  REGION 1..1437: note = Cas Enzyme sequence
IDDSEPMLAWRKNEDGKMEFLFQDSFNEMLADFAKNQPQLVENGKKIPYDWTIYYLRKKALTTEISKEELAWILLQFNQKRGYYQLRGEEEEEKENETTEIISARILSVERKEKDKKYDRFWYEMKLDNGLVYRAAFYNDVSTWEGETKDFILKRTTLKDGSVKNELSFLPTTDEIERMDSAKKARMYAKIKLRTEKDIENSNETIGSYIYDALLHKFDQKIIGKLVRTVDRKFYKDELLSILKAQKEFIPELKDDSLYKECIEELYSKDEAHKKLIGKPDFAKLFINDILFYQRPLKSKKSLIDNCPYEFYKEKDGKEYPVKCIAKSNPLFQEFRLWQFVQNLRICQRERDVDVTKELFLKSEEDYVNLFEWLNDRSSIKQDTLLRSYFKIKKEKGKDNYPYCWNYVEDKEYPCNETRAIMLSGLAKCGITSDFLTHDREIGLWHILYSVEDKTEIEKALRSFAKKNNTTDNFAEVFSKLKPFKKDYGAYSKKAIGKLLPLMRMGKYWKEENIDEGTRKRIDKIITGEYDESIKNRVREKAINLTEVEHFKGLPLWLACYIVYDRHSEAKEIEKWENPEDIDSYLRHFKQHSLRNPIVEQVITETLRTVRDIWKQEGNIDEIHVELGRDMKNPADKRKKMSERIQQNENTNLRIKAMLMEFKNPELGIENVRPYSPSQQDILRIYEENALDNLKKEDEDYEFISKISRTAQPSHNDIVRYKCWLEQKYRSPYTGKPIPLAKLFTTAYEIEHVIPQSRYFDDSFSNKVICEAEVNKLKDRQLGYEFIKNCAGQTVQLNQGGSVRILSVEEYENLVKDQYACNPLKMKKLLLDDIPNEFIERQLNDNRYISKVVKGLLSNIVREKTANGEYEQEAVSKNVISCNGSITDRLKKDWGINDVWNRIVLPRFQRLNKLTGNDFFTTRNKEGHEIPNMPLVLQKGFNKKRIDHRHHAMDAIVIACTTRDHVNLLNNESALTKHQDMKYALSRKLRKREEVVIDGQKRNVYKEFLTPWPSFTNDTLQTLQNIIVSFKQNQRIITKTTNNYQHYDNTGKKVFRKQIKGDSWAVRKSLHKDTVFGEVNLRKKKTVSLNQAIKNPNSIVNKDFKKKVIELLKEGHDVKYIKKYLGENKDVWSDVNVDKIEIYYFTKDEKKRNGEPKERYFATRKPLDTTFDEKKIESSVTDTGIQKILLAHLKSKDNSPEQAFSPDGIEEMNRNIVTLNNGKFHQPILKVRVYEKADKFAIGQTGNKTKKFVEAAKGTNLFWAILGGKKRNKETGKDEVVRSYLTIPLNIMIEYQKKYSAKCDDKLEQYLKERELIPSEYNILFILSPNDLVYLPNKGDSDININTIDKNRIYKFIDTNSDKGNFVPFTVAKTIFSTKFSDQKKLGINIPIQDEYGLGSQGSKSPRAITGEMIKETCVPIKVDRLGNIIELNGIKL

SEQ ID NO: 23183 - protein, 1545 aa, unidentified
  REGION 1..1545: note = Cas Enzyme sequence
VKRILGLDLGTNSIGWGLIELCVGTEIGKKFLGTGCVLDSGIRIIPMGQDVLGKFDSGTSISKTADRTKYRSARRLRERYHLRRERLHRVLNTLRFLPEHYASQIDFEKHFGQFMDNKEPKLAYDSNGHFIFEKSFEEMLNDFRSHQPLLLVNKDGKRALVPHDWTIYYLRKKALTHKIEKEELAWIILNFNQKRGYYQLRGEEEVSNKLVEFCSLKIVDVVADEKPNRKGDVWYSLRLENGWIYKRSSKVPLFDWKDKVRDFIVTTDLNDDGSVKIDKDGYEKHSFRAPNDDDWTLLKKKTETDIGNSQKTVGTYIYDALLRNPSQKIRGKLVRTIERRFYKDELIAILNKQVKLQPELFTEDLYNDCIRELYRSNNAHQHILSMRDFVHLFVNDIIFYQRPLRSQKSSIGDCSLEYRYYKKNKIDADGNPIKYEYEKDVDGKDAKVKKYLKAIPKSNPYYQEFRVWQWLRNLKIYKRDDDIDVTEQFIKNTNDWANLFDFLMDQKEVNHVAINKYLLEQYYFSNIEKEMKELYPKLNPEKLKEKIDSALEKKIKPELAKYRWNYVFDDSKEKEEDKSKKYPCNETRTQIKTRLAKVKNVPDNFFTFEIEHKLWHIIYSVTDKVEFEKALKTCAKKHGLDVSSFVESFKSFPPFKSEYGSFSERAIRNLLPLMRLGRYWQEKDIADSVKNKAESIKQRLQEINHDENELEKVSDDYISKQVLKSFLNVTDFTQGLKLHQASYLVYGRHSESGSVEKWNSVNDIERYLGEFKQHSLRNPIVEQIITETLRVVRDIWKQYGNGVQNFFDEIHIELGREMKNTTEERKRLTNIVTENEDTNLRIKALIVELKENSDGKLLVENVRPYSPIQQETLKIYEEFAVSNIEEDDPEKEFIQKVSKTAQPSGPELQRYKLWLEQKYRSPYTGQTIPLGKLFTTEYEIEHVIPQSRYFDDSLNNKVICEAAVNRLKDRQLGFEFIKNHHGEKVECGQGWVVEIFSEEGYKDFVKKHYMRNNTKRNNLLLEDIPDRMINRQLNDTRYISRYISQLLSNIVRADSDDDVNSKNLVVGNGKITSTLKQDWGLNDVWNELILPRFERMNELTETDNFTSKNQQGHTIPIIPFELSKGFQKKRIDHRHHAMDALIVACMTREHVQYLNNENAKSQKYHIQKALARKLRIFETVVIPERKKDETGVWRIKGGEQNSKKVEVQKEFLKPWDNFTTDIKTALKKIVASFKQNLRIINKTTNMYEKFKNGKKVKTKQNKGINWAIRKPLHKDFVFGKVDLQQVKIPKGKIAIAIRRSLDTTFDSKKIESITDAGIQKILRKYLAVKNNDPQLAFSPEGIEEMNNNICVYNDGKYHKPIYKVRTFEIGSRFSLGSDGNKKNKYVETADGTNLFFAVYVDKNGNRNYETIPLRVVINRLKQGLSAVPETNEAGHSLLFHLSPNDLVYVPLGNKSEFKEPEPDRIYKLTDSSDAKAKFVPANVANVIFNYNNNTQKKMNINYSIQNEFGIGSPESKSQNAITGEQIKKVCLKLKVDRLGKIELVK

SEQ ID NO: 23184 - protein, 1440 aa, unidentified
  REGION 1..1440: note = Cas Enzyme sequence
MKKILGLDLGTNSIGWALVDFDLTDKSGQINGLGSRIIPMSQDILGKFDSGQSHSQTAERTGYRGVRRLYQRDNLRRERLHRVLNILGFLPEHYRDEIDFVNRKGQFKKEVKLNYRQNSKGKHEFIFMDSFNEMVNEFQKAGKNIKIPFDWTLYYLRKKALTQKISSQELAWIILNFNQKRGYYQLRSDEAISDENKNEKFYALKVVDVKATDQKKGDEIWYQVILDKKDEDGTPWIYPRKSKEPLDAWIGKVREFIVTEKTAKDGSLKRSFRSPNENDWGLVKKKTEQEIEQSQKHIGEYIFDTLLHLPNQKVRGKLIKTIERKYYKKELKAILEKQLEFHPKLRDNALYQACVDELYPRNEAHQRNIKDRDFVYLFLEDIIFYQRPLKSKKSTIAGCPFESKKFFKTEINKETGQEENKWHEVPIKVISKSNPLFQEFRLWQWLKNLSIYENEKNINGKLNLNVNITDNLLKSEDDWVDLFDFLNARKEVEQKHILNYFVSKKLLDKKQLDNYRWNYPEDNKYPCNTTRSSFLSRLKKVQDIDPESFLSKDVEAQLWHIIYSVKDPVEYEKALATFAKAKSIHVDSFVESFKKYPTFKAEYGAFSEKAIKKLLPLMRTGKYWIPDNIHETTQKRIDKIITGEYDEKIRTRVREKAIHLNRPEDFKGLPIWLASYVVYDRHSEIGDIQHWKTPDDIDKYLQSFRQHSLNNPIVEQVVMETLRTVRDIWKQYGQGEEGFFDEIHVELGREMKNPQKVRQNMAKRNQENQNTNERIRALLQEFTENGANPHSPSHQEILKIYEEGVVGSKPMSDTIEKIRKNRTPSKSDIHKYKLWLEQEYISPYSGKPIPLSKLFTTAYEIEHIIPQSKYWDNSLGNKVICETELNKLKGNQTAYAFIKKYGGQIHDGIPILKLHEYEAHCQKYFKSNRSKLKNLLSEDIPEGFINRQMNDSRYISKLVMGLLSNIVREKDEQEATSKNLLPVVGRLTSKLRRDWGLEDKWNELVLPRFKRMNELTKSEDYTYKNSQGIEIPTVPDDLLNNFSKKRIDHRHHAMDALVIACCTRQHTQYLHSLNNEKLKFNLQPLLMVKNDNGHYTKYFQLPWKSFPVDAKHNLDKVVISFKQNLRVINKTNNKTWQWKKQKDGKYKKELVRQTKGDSWAIRKPMHKETVSGKIGFKAGKGKIATAVRTSLSEIKNFKHLEKITDSGIKKILKNHLKNYGDGKSKEAFDAAFSPEGIQDLNKNIKQLNDGKNHQPIYKVRQYEVGSKFPVSENPESPKNKKYVEAAKGTNLFFAIYWDDKKQKRTFETVPLNAVIAHQKLVANLPKSERTPIPVDAQKGKFLFALSPNDLVFVPTDEELENPSLVDFQKLSKEQISRIFKVVSSTGNRLYGIPNSIAKPIMNKFEFSSLNKLEFDLSKRSIKQYCWKLQINRLGKITNYM

SEQ ID NO: 23185 - protein, 910 aa, unidentified
  REGION 1..910: note = Cas Enzyme sequence
MKKILGLDLGTNSIGWAVVNEAETTDEKSSIVKLGVRVNPLTVDELTNFEKGKSITTNADRTSKRSARRNLQRYKLRRKHLVEILLENKFVTDETILSENGNKTTFETYRLRAKAATEEISLQEFARVLLMINKKRGYKSSRKAKSTDEGQLIDGMEIAKKLYEENLTPGQLSLDLLKRGKKHLPDFYRSDLQAEFDKIWSVQKQFYVFLTDDLKTALKGKNEKATWAICQKPFNIVGIKRKTKGLEEKIENYQWRVNALLGQIGVEELAVVLQKLNGQINSASGYLGDISDRSKELYFNKMTVGQYQMAQLDKNPNYSLKNQVFYRQDYLKEFEVIWETQAKFHKKLTPELKRLIRDGGISPVSKIHRCGIFFQRPLKSQKGLISFCEFENKQIEVEVEGKKKIKTIGCRVCPKSSPLFQEFKIWQILNNVLVTDLKEKEMRPLFQEEKELLFEELNYKEKLSKAEVLKILFDKPKDFDLNYKSLDGNTTQADLFKLYQDIIIRSGHNIDDFSKDSSKEILKKVREIFNALGINTAILEFDSTLEGEELEKQPMYQLWHLLYSFEGDKSNLGNEKLIEKLQHSYGFDKEYAIMLAGVVFKQDYGSLSTKAIRKILPHLKDGNVYSVACEYAGYKHSKKSLTREELDAKKLKDKLELLPRNSLRNPVVEKILNQMVNVVNGIIDTYGKPDEIRIELARELKKSAKEREELTDVINKTTKLHEDYVKKLQEEFGLSHVSRNDIIRYKLYLELETNGFKTLYSDTYIPKEELFSKRFDIEHIIPQAKLFDDSFSNKTLEARSVNLKKGNMTAYDFVESEYGDVSLNDYKQRIEKMKSKISKTKYDKLLMPEDKIPSGFINRDLRDTQYIAKKAREMLEDIVKFVVPTTGSVTDRLREDWQLIDIMQELNRNY

SEQ ID NO: 23186 - protein, 1442 aa, unidentified
  REGION 1..1442: note = Cas Enzyme sequence
MKKILGLDLGTNSIGWSLVDVTDQKILGMGSRIIPMGTDRQDYEKGVGITKNADRRTKRTIRKMNKRYKLRRNKLLYILHELGMLPEQFQFKNGIPEATKIQELELLPIKRGTLQLDSLQHYQLREKALGSSISSKEFGKILYSFNQLRGYAGGNNDDDTKKKKEEDSDDENESKKRYEVFTQKVIIQEVEQSDIKFKGRGKNKDLEFNKFNVTVLLDEEELDGETELQNLSEKINQEEELEIRIRRNKKGETTSVVFALPQKTNWRKQMEKTEEDLKQGNLNISQLILQDLQQNKWTKIRNRVFLRHRYQAEFDAVWETQSKTHSILNNCPKETTKKIANYLFPGKSETQEKLRQSAIKNGLKYIIKEQVIYYQRPLKPQTELISKCQFEKEEQVLANSHPLFQEFRCWKQINNLYITSKQEVYNEKKKKSVFQYTDRFLNNDEKQEIYNRLQIQKQLGFGEVAKIVKLKNNKTEYLNGLNVKAKLIGCDTQITIKKILGEHFDALYTSDNIIVEKIWKAIFDNANNGSEYDTNSLKVSSIKEVLKSLNNETLEMELALKFAQSVKFPRKYAGFSTKAISNILPLMQLNPINVTAKIKTNFSNIQHLIETGEILDENLLEDYVISFVKNNPDLLEKGGIMEAFAVSLIYGKHTAEKISAQFKDYHEIQRVDRNFRNPIVEQLANETMQVVKAIWKKYKFNPEELEIRVELARDLKNSAKERDKIYKGQIKSQKTNETIKKKLIELKQEPSQGNIELYKLWSNQNTEDYPSPKKGSEPTQEEIQKLRLWEEQKCISPYTLKPIPLSKLFSSERLYDIDHIIPKSRFFDDSLSNKVVCETNINEEKSNRTAWEYISQQNSILGICSEANFVKYINDIFYGQKKKNLLLEKIPTNPVERQIKDTQYISIAVKNELAKIVGSNKIKTSTGEVTSFLRSRWGLKKLFMELTESRFKQMELWDWNKETNESNSQWIRKYFDKEKEKHIYEIKNWSKRYDHRHHAIDALVVALTTQSHIQRLNNLNKYLQDELTNRKEEFKLEVKEGETILEAFFNLEKKRREEIQRQIESSRYFEKPFKDLVKQAKILLEEMIVSIKPKDKLEIKKDDNGNAQLKIKGALHQETNYGKTKDTKSGLLRDTKSIDISKITAKDIPQIIDEVLKTEIDNHRKKYDSVKEAFTGEGLKSFNENRFQTKKPTKLKPPVYKVKVWYSNKATDDSTLQRLYNDNHKLSVVTGDNYLFMVMKKADNRIFDIASLFDSADIAKKALREKDENYKQLICEDYRVKHKDKPQRVLFTLQQNDLVYLPENIDDPILNFNNNELNEWLNELKNKKNFSKRVYKVAKFTGKDCFFIPHNIANVISIPKDLTEEQKKYLKEQYKDKTIPKKELNFVEYGSYRDCSPYESGEILTKSLNEDTKGKNKKYKPLKIQDTCIKLKIDWLGNISKA

SEQ ID NO: 23187 - protein, 1412 aa, unidentified
  REGION 1..1412: note = Cas Enzyme sequence
MKKIIGLDLGTTSIGWAVVNEAENDSEKSSIERLGVRVNPLTVDERTNFEKGKPITTNADRTLKRSMRRNLQRYKLRRDNLIEVLKREGFITDETVLAEQGNHSTFETYRLRAKAVSEKVSLEELARILLMINKKRGYKSSRKAKNEEEGSLIDGMSIAKELYDNDMTPGQYSLSLLEAGKKSLPDYYRSDLQSEFEKIWVVQKAYYPEQLSDELKDLLIGKNSKQTWAIIADKTVWKEDVKQWNETLAKTEYLIREYKLKGIKREGKRDEQKLENYKWRVAGLRGRLHPEQLAIVFQEINSQIYSSSGYLGAISDRSKELFFNKQTVGQYLMKLLDEDPNTSLVNRVFYRQDYMDEFETIWEKQSEFHPELTHELKREIRDIIIFYQRRLKSQKGLISYCELESWEIDVVRNGKVEKKTIGQRVIPRSSPLFQEFKIWQMLNDVEVSVKDIRIKKRKEGNNLSLFEEQDPSEKLKIYGRRRLTEDEMALVASELSIRSEMKKEDVLKLLFDDWKSLDLNFKRLDGNKTGNALYEAYSNIIELSGHFPINWNHSADEITSYVKEVFDALGWNSNILSFDSSKDLQSQDYYMLWHLLYSYESDNSETGNKSLIDKLVSFCGFDREYAVVLSNVSFLEDYGNLSAKAIGRILPHLKDGNDYYLSCELAGYKHSKSSITKEENEARILKDSLDLLPKNSLRNPVVEKILNQMVNVVNALMQEYGRPDEFRVELARELKKNQREREEMTKSINESTRVNEGIREVLMKEFDLTHVTRNDIVRYKLYEELKDNGYHTLYSNTYIPKEKLFSKDFDIEHIIPRSRLFDDSFSNKTLEVRSINIDKGNQTAYDYVLSKYGETELEEYMNRCKALFPKDSAKLKKLLMTETDIPEGFVERDLRNTQYIAKKALSMLNDVCRRVVATTGSITDELRSDWQLVDVMKELNWEKYKEQGLVDYHSGQDGRIIGKIQDWTKRNDHRHHAMDALTVAFTNPALIQYYNNVNASFNQTSNAYLIKNKYFKDGRAISPIPLNEFRAEAKRHLENILVSIKAKNKVVTRNVNVTKNGKGGTNTKIQLTPRGQLHNETIYGSHQRVFYVEEKVGSSFDKEKISRVSNARYRQALMERLEASLWNPKKAFTGANALSKKPIWINEEKGVQLPENVKVKNEEVIYTIRKPIDESLNIGKVIDPKVRAILEERLKEYGTPKKAFSNLDENPIYLNKEKGITIKRVTISGINTARALREKDGKNGEKAPKDFVSTNNNHHVALFKRPIIDQKGVEGYEFCEVVVPFIEAVARVNLGDPVIDVDYGKDEGWEFMFTMKQNEYFVFPNEKTGFDPHEIDLLNPDNYALISPNLFRVQKFSTKYYVFRHHLETGVKDVEELRDVTWKRITCLDSRLLGIIKVRINHIGRIVSVGEY

SEQ ID NO: 23188 - protein, 1373 aa, unidentified; identical to SEQ ID NO: 22159
  REGION 1..1373: note = Cas Enzyme sequence

SEQ ID NO: 23189 - protein, 1425 aa, unidentified
  REGION 1..1425: note = Cas Enzyme sequence
MKKILGLDLGTNSIGWALVNESETENEQSSIVKLGVRVNPLTVDEISNFEKGKRITTNAERTLKRGARRNLQRYKLRRENLIEILRENKIIADKTILSEDGKDTTHQTLKLRAKAAKEKVSLEEFAKILLLINKKRGYKSNRKAQSSDEGQLIDGMAVAKELYEKDITPGEFSYNLLKNGKNNLPDFYRSDLQMEFDRIWKFQHKFYPEILTDDLKNNLKNKAKKDTWAICQKPFNIVGIKRNTKGAEQKLENYKWRKDALTKQLELEELAIVLQEINGQINSSSNYLGDISDRSKELYFNNQTVGEYQMAQLVANRHQSLKNQVFYRQDYLDEFEKIWETQAIHHKELTPELKKEIRDVVIFYQRPLKSQKGLLSFCEFESKEIEILINGVKKKKTTGLRVCPKSSPLFQEFRIWQVLNNIEVKGVTKKNKNNIEPTLFEDNFNEKKLIQKVQRPLEQEEKELLAERLMLCDKMTKNQMLTALGLNNYDMNFKEIKGNTTFAKLFQAYKEIAEIAGYDKDKIKNLEDINIIFKDLGIKTDFLSFNSELDRKELQQQSLYKLWHLIYSYESDNSATGNESLIRKISELCGMPEDYAKILANIVFESDYSSLSAKAIGKILPHLKDGLQYDVACEYAGYRHSKSSLTKEELENKKLKDRLEILPKNSLRNPVVEKILNQMVNVVNEVIDTYGKPDEIRIEIARELKKSAKEREEMTQQINKATNAHKAYKDILEKEFGLTNVSRNDIIRYKLYLELKDNDYKTLYSNTYIPREKLFSKEFDIEHIIPQAKLFDDSFSNKTIEKRSVNIEKSNMTALDYVASKDANSLSEYKLRVEKLHKSGQISKTKYNKLLMSEAEIPSGFINRDLRDTQYIAKKAREMLNELVKFVVPTTGTITARLREDWQLIDIMQELNWDKYDQQGLTMFYNDKDGRQIGRIIDWSKRNDHRHHAMDALTVAFTKHSFIQYLNNLNARVQKGIDEYFDLDMVELSDLPKEERSATIYAIEKKYLHRDKNGKLRFNPPIPLNEFRAEAKNHLENILISIKAKNKVVTQNTNITKKLSGKNKKTQLTPRGQLHLDTVYGSYQKPIIKEEQINGSFDESKIKTVTNNSFREALLKRLQEFDNDPKKAFTGKNSPSNNPIFVDKEKTLQIPNKVKTLTFETEYTIRKAIDPDLRIDKVVDTGIKEILEKRLAEFDNDPKKAFVNLDEKPIYLNKEKGITIKRVTIKGISNAIALRDKRDKDGNFILNENGEKQAIDFVNTGNNHHVAIYKKPKLNRKGEVQLDDKGEQVYELEEVVVSFFEAVTRANLGQPIIDKEYKQDEGWQFLFTMKQNEYFVFPNEKTGFNPNDIDLLNPENYDIISPNLFRVQKISTKNYMFRHHLETNVNETKELRDITWKNIHSTQNLVNIIKVRVNHIGQIVAVGEY

SEQ ID NO: 23190 - protein, 1404 aa, unidentified
  REGION 1..1404: note = Cas Enzyme sequence
LGTTSIGWAVVNEAENDSEKSSIERLGVRVNPLTVDERTNFEKGKPITTNADRTLKRSMRRNLQRYKLRRDNLIEVLKREGFITDETVLAEQGNHSTFETYRLRAKAVSEKVSLEELARILLMINKKRGYKSSRKAKNEEEGSLIDGMSIAKELYDNDMTPGQYSLSLLEAGKKSLPDYYRSDLQSEFEKIWVVQKAYYPEQLSDELKDLLIGKNSKQTWAIIADKTVWKEDVKQWNETLAKTEYLIREYKLKGIKREGKRDEQKLENYKWRVAGLRGRLHPEQLAIVFQEINSQIYSSSGYLGAISDRSKELFFNKQTVGQYLMKLLDEDPNTSLVNRVFYRQDYMDEFETIWEKQSEFHPELTHELKREIRDIIIFYQRRLKSQKGLISYCELESWEIDVVRNGKVEKKTIGQRVIPRSSPLFQEFKIWQMLNDVEVSVKDIRIKKRKEGNNLSLFEEQDPSEKLKIYGRRRLTEDEMALVASELSIRSEMKKEDVLKLLFDDWKSLDLNFKRLDGNKTGNALYEAYSNIIELSGHFPINWNHSADEITSYVKEVFDALGWNSNILSFDSSKDLQSQDYYMLWHLLYSYESDNSETGNKSLIDKLVSFCGFDREYAVVLSNVSFLEDYGNLSAKAIGRILPHLKDGNDYYLSCELAGYKHSKSSITKEENEARILKDSLDLLPKNSLRNPVVEKILNQMVNVVNALMQEYGRPDEFRVELARELKKNQREREEMTKSINESTRVNEGIREVLMKEFDLTHVTRNDIVRYKLYEELKDNGYHTLYSNTYIPKEKLFSKDFDIEHIIPRSRLFDDSFSNKTLEVRSINIDKGNQTAYDYVLSKYGETELEEYMNRCKALFPKDSAKLKKLLMTETDIPEGFVERDLRNTQYIAKKALSMLNDVCRRVVATTGSITDELRSDWQLVDVMKELNWEKYKEQGLVDYHSGQDGRIIGKIQDWTKRNDHRHHAMDALTVAFTNPALIQYYNNVNASFNQTSNAYLIKNKYFKDGRAISPIPLNEFRAEAKRHLENILVSIKAKNKVVTRNVNVTKNGKGGTNTKIQLTPRGQLHNETIYGSHQRVFYVEEKVGSSFDKEKISRVSNARYRQALMERLEASLWNPKKAFTGANALSKKPIWINEEKGVQLPENVKVKNEEVIYTIRKPIDESLNIGKVIDPKVRAILEERLKEYGTPKKAFSNLDENPIYLNKEKGITIKRVTISGINTARALREKDGKNGEKAPKDFVSTNNNHHVALFKRPIIDQKGVEGYEFCEVVVPFIEAVARVNLGDPVIDVDYGKDEGWEFMFTMKQNEYFVFPNEKTGFDPHEIDLLNPDNYALISPNLFRVQKFSTKYYVFRHHLETGVKDVEELRDVTWKRITCLDSRLLGIIKVRINHIGRIVSVGEY

SEQ ID NO: 23191 - protein, 1424 aa, unidentified
  REGION 1..1424: note = Cas Enzyme sequence
MGNILGIDLGTNSTGLSVRNADKGRDLKDQLDFYTSIIFKSGIGNGKKGEFSYAAERTKKRSPRRLYQARKYRIWETLKVLIEFGFCPLSKDELEKWSRYDKKKGLKRQYPIDNVKFEQWVRLDFDGNGIADYSSPYQLRAELMHRQFDFSTEIDRFKLGRALYHIAQRRGFKSSKGETIKEHEKKETDDNIESDIDVADEKKISEEKKAKILVEYMREYNHPTVGSAFAQLEKSGIRIRNSVYQAVRSQYKEEIQKIFEYQKELDSNSDFYKRIISERKGEGSIFYKRPLRSQKGLVGKCTLERDKARCPVSHPEYEKFRAWCFINNIQYRKSANEKLQELSLAQKNKLYNKVFLQTRTNFKFQKIREWLENDIKDSTHYYKLEYLPAKEERTINYKDNTNVSGCPISGRLRNILGDNWEDISIQSQKNRTNKITGEIHRIAYTANDIWHICFSFDDDEYVTEFAKKDLHFDEEKTKQLVRLWGAIPQGYSMLSLKAIHNINRFLQKGLIYSDSVLLAKLPEIFDNKWDENESSVIESINKIIKQNRNDKFIFGIVNELIANFKSLDSPKFAFKDTEYKLVDDDLNDIKKITIDNVGERSWEKKTTEERQEVLLTVEKLYQQFFASSERDYYKLPKLSEALSKYLQNHYSFLSEKDLKKIYHPSMIEFYAPAKEYKIDDDREIKLLGSPVIGALKNPMAMRVLYILRKQINQLLIDGIIEEDTRIVVEMARELNDANMRWAIEAYQREREKENKEFERAIKDYFPNRAISDEDIDKVRLLVDQRDIQENGELKDEILDANKKKHKSIEKVETYKKDITKYRLWLEQGCRCIYTGKIINITTLFDDNEVDFEHTIPRSISFDNSLSNLTVCDAHFNRTIKKNQIPSQLANYDDILLRIQPWINKVETLKDNIEFWKKQSQRAQDKARKDYCIQQRHLWEMDLDYWQKKVHAFTLTEVTSGFRSSQLNDTRIITKYAYHYLRSLFNRVDVQNGQYTSDFRKMLGVQNTDEKKNRDKHSHHAIDATMLTLIPVAAKRDKMLEIFYRIQEEKRLNHNISELQCELNKYISECNFGNVSQIGDFIEQNILVNHLSKDQTLTPAKKKMRKRGKEIFVRDINGKLKNKWVTGNCIRGQLHGETFYGAITQAQKNENGEIIRDENGKIQIGEQKLYVIRRDLKYKKNEKDSGFGTWEEIEKVIVDKSMLELIKKQFPNGTSFKDACEQGIYMLDKNKNKVNKIRHIRCKTTIKKPLKIKKQTYSSSKSYKQFYYAEMGDLYVMCKYENQSKTVKEFRIWSLFDICENRKYGLKDIPNEIFSKEGEKLISSQQLKTGDMILIYNENKTELKELDQTTLTERLYVICGFENDGNRIILRKSINAQQEKDLGKGESIKDFNIMPNKIRCGINTLKYIVQSIDFEIYLNHIKFLF

SEQ ID NO: 23192 - protein, 1254 aa, unidentified
  REGION 1..1254: note = Cas Enzyme sequence
GFKSSKGETIKEHEKKETDDNIESDIDVADEKKISEEKKAKILVEYMREYNHPTVGSAFAQLEKSGIRIRNSVYQAVRSQYKEEIQKIFEYQKELDSNSDFYKRIISERKGEGSIFYKRPLRSQKGLVGKCTLERDKARCPVSHPEYEKFRAWCFINNIQYRKSANEKLQELSLAQKNKLYNKVFLQTRTNFKFQKIREWLENDIKDSTHYYKLEYLPAKEERTINYKDNTNVSGCPISGRLRNILGDNWEDISIQSQKNRTNKITGEIHRIAYTANDIWHICFSFDDDEYVTEFAKKDLHFDEEKTKQLVRLWGAIPQGYSMLSLKAIHNINRFLQKGLIYSDSVLLAKLPEIFDNKWDENESSVIESINKIIKQNRNDKFIFGIVNELIANFKSLDSPKFAFKDTEYKLVDDDLNDIKKITIDNVGERSWEKKTTEERQEVLLTVEKLYQQFFASSERDYYKLPKLSEALSKYLQNHYSFLSEKDLKKIYHPSMIEFYAPAKEYKIDDDREIKLLGSPVIGALKNPMAMRVLYILRKQINQLLIDGIIEEDTRIVVEMARELNDANMRWAIEAYQREREKENKEFERAIKDYFPNRAISDEDIDKVRLLVDQRDIQENGELKDEILDANKKKHKSIEKVETYKKDITKYRLWLEQGCRCIYTGKIINITTLFDDNEVDFEHTIPRSISFDNSLSNLTVCDAHFNRTIKKNQIPSQLANYDDILLRIQPWINKVETLKDNIEFWKKQSQRAQDKARKDYCIQQRHLWEMDLDYWQKKVHAFTLTEVTSGFRSSQLNDTRIITKYAYHYLRSLFNRVDVQNGQYTSDFRKMLGVQNTDEKKNRDKHSHHAIDATMLTLIPVAAKRDKMLEIFYRIQEEKRLNHNISELQCELNKYISECNFGNVSQIGDFIEQNILVNHLSKDQTLTPAKKKMRKRGKEIFVRDINGKLKNKWVTGNCIRGQLHGETFYGAITQAQKNENGEIIRDENGKIQIGEQKLYVIRRDLKYKKNEKDSGFGTWEEIEKVIVDKSMLELIKKQFPNGTSFKDACEQGIYMLDKNKNKVNKIRHIRCKTTIKKPLKIKKQTYSSSKSYKQFYYAEMGDLYVMCKYENQSKTVKEFRIWSLFDICENRKYGLKDIPNEIFSKEGEKLISSQQLKTGDMILIYNENKTELKELDQTTLTERLYVICGFENDGNRIILRKSINAQQEKDLGKGESIKDFNIMPNKIRCGINTLKYIVQSIDFEIYLNHIKFLF

SEQ ID NO: 23193 - protein, 1662 aa, unidentified
  REGION 1..1662: note = Cas Enzyme sequence
MKKILGLDIGTTSIGYSIIQISDEKNKNSISEKLTVSDINNDRIGIFEDAIGVRIINQDTDRFDRGLKLNDPKGSTLTPTANRRKFRGVRRMRNRYKLRRNKLYKVLSLLGLTPDETYFTNRKGKRGKDNDIGKALYGLRERASREKITLSELARVLLHLNQLRGYSSDRFAKDEEIRFDYYLTEVIELDWENRISVFEKGSTEDVKYYQFKAKLRFVEPYVIVEDDEKTVLYEVEGYIFKKEIDFEIGDFITIKAPEFKQNKKGKIVVEEYYKLTPTKPDATDWKYKYQTLHKNLSDWCKAGGTVGSYFYKNFYELSNLSRIRNNVVNREWYEKEFDAIWALQYEFHKDFFEKINVSNLVKDVFKDYSTVLNDVINKLGNKEQLQTLIKDKIIFFQRPWQQAKSKGRCEFEKIKVKREFAIKGTGTKELREEHIGRTVVPRSHPIFQDFKVWQQINNVRLIWNTADEKIDLFENAELFEKLTGKTIELVKELLFKKLQGSKTLSWRTFVKEELSLDTYDEIEEKKKAKISKKQGLDLETGEVVDEFFSVNFRKRKRDGTYDDIKLKGNTTRAELQTILKEKSAEWFETLHEQNKNVTNLQLLWEIIYDITNSDVAKVSSIIKKHFDFDENICLMLSKVQFDDSGMANLSAKAIRNLLPLMSDGKNYTNKTKIKVDELISLNSSETEIDADEKLSGLKDFVTDRKARVRLSKFAGENEFKYLNYWEAAAIVYGSHSSKGKSETKIMERVKNHSMNNPVVEKIVNETISIVNLLKDKYGFDEVRIELSRELRASADERQQMWEGMSNGTAKNEWAKKMLREIKQAMLEDNRDVSHLDTEISGSNLDKIKIIEDVVKYQKPVEFKTKEKEYKLTEPSNAEVTKYLLWLEQNFKCPYTNQPIPLTDVFARGKVVEIEHIIPRQRYYSNAYANKVITWREVNQEKGNKTAYEFIVSKRNSAGTVQVGKKEISLVSASQWENHVKEMFPKSGKRNNLLRKEIPEDPIERTLKETQYINKKLKEKLGELVGSDKVWVTSGAITDMLREKWKLNDIWKELLEERFVKFNNGEAKERLNLKYTTKHFNTKTNKYEDVEKFAGMSKRIDHRHHALDAIIIACTKQNHIQYINNLNAINSADVENDDSKKAKYKGIKTDVCIGDSSSKFKFPWDEKKFIPEVKQALQNVLVSHKNSNVLISPSKHRNNKDINSGKVASVRGELHLQTNYTKKKYFENEKIDIVKLIPLLFKKKFENQNQTLVRFKSFEEIIKETILKEKYQNVLFSLFGEYDVEKLNSQTIKDFSKKVLKRIENEKLFIHEKSGEKITWLSTFIEKNASVRPMGLSMDLNSEKEIKDISNPRLRRIGQYRLNYINKKIAEIKALKLPFKEEENTRIREVREIPLYNNAIYEVRIKYKDGKFNWIEIKDLQISDLENIEYAKPETTVAIKNKLKEFSLDELKERYISNPIFLSEKPTLVKKARQKSFFQDLYELNDGRYVYSRDVFMTYVFVPEVSNRKDAKRELEFLKFFDAVKIVTLDKPDKIDYKKLIKKENYKLLFTLSKNDVVYIPDEVLTDEQIAEINWNEKREIIPKLFVVKEMTPSRNEIVFQHLYKSDSIRVNGDEAENILNTEKLEEQIKYGDTNMWKRCIKVNIDRLGREIKPYWENNKITL

SEQ ID NO: 23194 - protein, 1470 aa, unidentified
  REGION 1..1470: note = Cas Enzyme sequence
MKKILGLDLGTNSIGWAVVNEAENTEEKSSIVKLGVRVNPLTVDELINFEKGKSITTNADRTLKRSMRRNLQRYKLRRDNLIDVLKSNGFIDDETILSENGNRTTFETYRLRAKAATDVISLQEFARVLLQINKKRGYKSSRKAKNTEEGQLIDGMEIAKRLYDENLTPGQLSLQLLQAGKKHLPDFYRSDLQSEFDKVWNFQKQFYPFLTDELKEELKGKNEKATWAICAPKKDVSNEKHDCFVWRWHETVTQWDPELSTNQTVVVEKKLVGEKRQGNLTEQKIENYQWRVKALSEQLPPEQLIVVFQKINGQINNASGYLGNISDRSKALYFNRQTVGQYQMAQLEKNPNHSLKNQVFYRQDYLDEFETIWETQSKFHPELTADLKKEIRDMVIFYQRSLKSQKGLISFCEFESKQIEVEIDGKKRLKTVGCRVCPKSSPLYQEFKIWQILNNVQVIGEVVPDPHSGLFEGEESFKRGKRFLFQEEKEKLFAELNYKEKISKSDALKLLFGNQKMLDLNYKQLDGNHTQAELLKAYQNIIEATGNGDFDFAKMPSDKVLETVSQVFESLGFNTSILRFDSSLEGQALERQPMYQLWHLLYSFEGDNSNLGNEKLIEKLCGSYGFDRESASFLANVVFEQDYGSVSSKAIRKILPHLKDGLDYSVACEYAGYKHSKNSLTKEELANKVLKDRLELLPRNSLRNPVVEKILNQMVNVVNGIVDQYGKPDEIRIELARELKKSAKEREEMTKSINETTRLHEEYVKILQGEPFFLQHVSRTDIVRYKLYKELESTGYHTLYTNTYIPQENLFSKEFDIEHIIPQAKLFDDSFSNKTLEARQANLEKGNATAYDYVLEKYGDIGAEHYEDRVERLFADKIISKTKHDKLLMREADIPSGFINRDLRDSQYIAKKAREILEGIVRFVVPTTGSITDRLREDWQLVDVMQELNWGKYEKLGMTEVFEGREGQRIRRIKDWTKRNDHRHHAMDALTIAFTKRSYIQYLNNLNARVQKGVDEYFDLDMVELSDLDKKDRAAAVYGIEKKELYRDGRGKLRFKPPMPLDEFRAEAKRQLENTLVSIKAKNKVVTKNVNVTKSKTGKRKKVQLTPRGQLHLETVYGLAKQYATKVEKVNASFTEEKIKTVANKRFREALTERLNQFDGDAKKAFTGKNSLEKNPIWIDEYHKDKVPEKVKTVVFEPVYTIRKPISPDLKLDKVVDVGVRNILKERLEEFGGDAKKAFSNLDENPIWINKEKGISIKRVTITGISNAEPLHEKKDKNGNLILDGQGNAQPVDFVNTGNNHHVAIYRKPKLDKDGQSLMDENGEMLYELDENIVSFYEATSRAILGLPVIDKEYKKDEGWQFLFTMKQNEYFVFPRFDEDGNMVFNPLDYDEEWYKDPNHYAIVSPNLFRVQKFSYKNYVFRHHLESTIDLSDYKLRGVTWTDFRSSKGLDNILKVRVNHLGQIVSVGEY

SEQ ID NO: 23195 - protein, 1375 aa, unidentified
  REGION 1..1375: note = Cas Enzyme sequence
MKKILGLDLGVASIGWALVNQAENEGEKSSIIKTGVRVVPLSANEANNFEAGRPCETNAERRKYRTMRRNLQRYKLRRSNLKEILKEAAWIDEKTILAEQSNASTFETYRLRAQAATGPVSLEEFARILLMINKKRGYKSNRKANNPEDGTATDGMEVAKELYASGLTPGEYGLKILKSGKKYIPEFFRSDLQAELDKIWEVQKAYYPEILTDDFKNIIAGRGKNDISKIFLARYGIYTADNKGKSKNLQEYQWRVDALANRLEKDVLAYVIAGLSGAIRNSSGYLGEISDRSKELFFSKKTVGQYLYEHIKADPHFSTKNIVFYRADYIDEFEKLWEEQSKHHPELTPELKKKIKEEIIFYQRRLKSQKGLISFCEFESKQVKVIIDGKEKSVLRGPRVAPRSSLIFQEFKKWQILNNLELTDKETGEQWELSIEEKKLLSDELNTRDKMTAADAIKFLYNKQSGGKTLNYKTLEGNTTYAAFLRKFMEIVNILESTEYDINKMRSEDALLLIRNIFEKNKFNTDILNFDPLLSKEELEQQALFKLWHLLYSFEGDDSRTGDESLVKHIQEICNMPKQFARMISTISFTDDYGSLSNKAMRNILPYLIEGNKYSVACSLAGYNHSKHSMTKEQIENKELVNRLEILPKGSLRNPVVEKILNQMINVINALGDEYGKPDEIHIEFARQLKMDQKSRESYTESINQNEKNNARIRQILTEKFGIQNVRSSDILRYKLWEELKDNGYKALYSNKYIPAEKIFSNETDIDHIIPQAVYFDDSFKNKTLEYKDINLKKGKSTARDFVESEFGQEGLEEYIGRVNSLFENDVNSRTKRKYLLMRSSEIPDDFLNRDLSNSQYIAKKATEILESYVKTVMPTTGSITARLREDWQLVNVMKEINLPKYREVGLTYKEDRGESGEVEKIEDWSKRDDHRHHAMDAITIAFTKLSHIQYLNNLNARSDKSSSVYGIEKNETILNANGKRIFTPPMPLNELRAEFRNQLNSALVSVKAKNKVVTRNVNKTKKKNGYNTAIELTPRGQIHKEQVYGVRNVYETFYVPVGGKLDKDAIAQVASKREREALNKRLTEFEGDPKKAFTGKNAPDKNPIWLDEAHSASIGAKVKCVRMKRVFSIRKDIDKNLSIEKVMDTRIKKILKERLEEFEGDASKAFANLDENPIWLNKEKGICIKKVTIQENFDLDAIREKHDMLGNPILDESGNPIASDYVNLRNNHHVAIYQKPNGDYEEDVVSFFEALERVTNDDPVVDKAYNKADGWEFLFSMKINEMFVFPNPQTGFDPKEIDLMDEKNYSTISPNLYRVQNLSNKYYVFRLHTDTDTKYPNVLKNITWKRITNLPEMAKAVKVRVDHTGKIVAAGEYD

SEQ ID NO: 23196 - protein, 1380 aa, unidentified
  REGION 1..1380: note = Cas Enzyme sequence
MKKILGLDLGTNSIGWALVYEAETKEEMSSIIKLGVRVNPLTVDEKQNFEKGKSITTNAERTSKRSMRRNLQRYKLRRENLIDVLKSNNFISDETILSENGNRTTFETYRLRAKAANEEISLEELGRVLLMINKKRGYKSSRKAKNQEEGQLIDGMDIAKKLYYDKITPGQLILQLLKAGGKNIPDFYRSDLQAEFDKIWEFQKSFYPEILVDDFKQQIGGKGKMNTSKIFLARFGIYTADNKGKDKKLQAGQWRVDSLSIQLPKSELAFVISDVNGSISNSSGYLGSISDRSKELFFNKQTVGQNLMSQLDEDPNTKLKNQVFYRQDYLDEFNIIWEKQAEFHSELTTELKKEVRDIVIFYQRHLKSQKGLVSFCEFESRPIELEIEGKKKVKIVGSKVCPRSSPIFQEFKIWQILNNIEVTDKASRIKRLLEQDEKESLFAELNLRTKMAKTDVLKHLFKNYRDLDLNYKDVEGNKTQAALFEAYAKIISLSGHNGFDFSELTSAQILERVHLIFEGLSYSTDILYFNAELEGKDFENQPIYQLWHLIYSFEGDDSKTGDEKLRNKLTSLYGFENEYAALLANLNFQSDYSNLSTKAIRKILPYLKAGHEYSIACEYAGYKHSKSSLTKEEIENKILKDKLDILPKNSLRNPVVEKILNQMINVVNSVVDSYGKPDEIRIELARELKKSAKEREELTTYIGQSTIEHDKYRKILQTEFGLTNVSRNDLIRYKLYLELEPKGFKTLYSDTYIPPSKLFSKEFDIEHIIPQSRLFDDSFSNKTLESRDVNIEKGNNTAYDYLHSKLGEGGLNEYLIRVDELYKFGKISKSKYNKLRMKGTDIPDDFIARDLRDTQYIARKAKSILEDLARRVTSTSGSITNRLREDWQLIDVMQELNWEKYNLMGMTEIIENREGQKIRRIKEWTKRNDHRHHAMDALTIAFTKTSFIQYLNNLNARSDKAGSIYGIEQKELYRDDKGKLKFKPPIPLEKFRAEAKKHLENTLISIKAKNKVSTSNINVTDKKGGNNKKKQLTPRGQLHLESVYGSISQYVSREEKVGSAFNEEKIATVSKWKYRDALLNRLIEYGKDPKEAFTGINSLDKNPIYLDALQTLKVPEKVKVVWMETVYTIRKEITPVLKLDKVIDVGIRNILQARLNDFGGNNKQAFSNLDENPIWLNEGKGISIKRVTITGVSNAIALHDKKDKEGNLILTSDGKNQGADFVNTGNNHHVAIYKDAKDKLQDNVVSFFEATSRVNLGLPIIDRDYYNDEGWEFKFSLKQNEYFVFPNEKTGFNPKDIDLLDADNYYLISPNLYRVQKFSKVIYGNAAVRDYVFRHHLESSIQDNKNMKDITYKSIKSLPIFDSIVKVRINHLGLIISTGE

SEQ ID NO: 23197 - protein, 1024 aa, unidentified
  REGION 1..1024: note = Cas Enzyme sequence
YPEIITDELVEKLKNKIIYYQRKLKSQKGLISICEFEGFFKTNKKGKDVFVGPRVAPRSSPLFQVCKIWETINNLTLKNRSGEKYEFASDDKQKIFEYLDNNEKLTATELYKLLELNKNDGWYHNKQIERGIQGNMTKAEILKVLNINDENLIFNLNVNEEPLVDKDTGEILEKNTSKIIRPDIEDQPLYQLWHAIYSISDTDECENALIKKFGFDSETAKKLANIDFRKGGFGNKSSKAMRKILPYLIEGYMYSDACSLAGYNHSGSLTTDENLKRVLIDKLALLPKNSLRQPVVEKILNQMINLVNAIIEKYGKPDEIRIELARELKQSKEERNDTFKFMNKREKENEIIRKRLIEEYNVRATRNNVIKFRLFEEIENEDSKINAMCIYCGKHFGITDALSGDNVDVEHIIPKSLLFDDSQSNKTLSHRHCNEAKGNRTAYDYMASKGKEEFDEYLHRVEMLYKNRIIGKTKRDKLLMPQNKIPLDFIERQLRETQYISKKAREILMKVCRNVWSTSGSVTEYLRALWGWNDVLHNLQFPVYKEHGFTEIIDWESNGQLHTREVIKGWNKREDHRHHAIDALVIACTKQGFIQRINNLSSKGNREEMYELIRDMPFELRENLSLLEKYLIMQRPFTTAEVENKAAEILISFKPGKKVATTGKRIIKKNGRKKVVQTGIIVPRGSLSEESVYGRIKALSTDFKSGMLEKHPAKFLFNNPHLIFKPYIKNLVEARLAEYNDDVKKALASLKKKPIFLDKNNSVELTYATCFSDEYVLKYPIESIKPEDVKYIIDKQVQRLVKQRLDQYDGKPKEAFKEPVWFNEEKQIAIRSVRCFTGLSSTEPIKYDEAGNPIGFVLPGNNHHVAFYINSEGKIEEHICTFWHAVDRKRFGLPVIIKDPKVVWDKIITDNIELPASFIEKLPADGCVFMESMQQNEMFVLGLDENILSEALKVNDKKMLSKYLYCVRSISKSDYCFMQHMETKVEKLKEKRIIKKYYRIKSITAFMNLNPVKVKVDYLGDIKA

SEQ ID NO: 23198 - protein, 1462 aa, unidentified
  REGION 1..1462: note = Cas Enzyme sequence
MKKILGLDLGTNSIGWALVNEAENENEKSSIIMLGVRVNPLTVDEQKNFEKGKSITTNADRTMKRGMRRNLQRYKLRRENLIEILKEHGFITDETILSENGNYTTFETYRLRAKAVTEEITLEQFARVLLMINKKRGYKSNRKAKGAEEEGALIDGMEVAKLLYEKDLTPGQYCLQLMEQGKKQLPDFYRSDLQEEFNRIWAKQQEFYSEILTDKLKENLREKSEKATWTICKEPFNIVGIPRTTKGEELKKENFAWRTKALSEKLDLESLAVVLQKINGQINNSSGYLGAISDRSKELYFNKQTVGQYQMTVLAQNPNASLKNMVFYRQDYLDEFNIIWEKQAEFHKKELTEELKKEIRDVIIFYQRRLKSQKGLIGFCEFESRQIEVEIDGKKKIKTVGSRVIPRSSPLFQEFKIWQTLNNLEVSGKGRKSKKKKEHSLSLFTNQEDPLLIYGKRELYQEEKELLATELSIKEKLTKSDILKLLFDNPQELDLNFKEVQGNLTQAKLFAAYRDIIEQTGHILDLKKSASEILENVEQIFSGLGYNTDIIRFNSDTDNLDNDPMYKLWHLLYSFEGDNSKTGNENLINKITNLYGFEKEYAAILANITFQDDYGSLSAKAIRKIFPYLKEGNKYDISCEYAGYRHSASSLTKEELENKIYKDRLEILPKNSLRNPVVEKILNQMVHVVNAIIADPQLGKPDEIRIELARELKKNAKERQELTKSIEESTRMHEQYREILSKPPFNLSYISRNDIIRYKLYEELKDNGYHTLYSNTYISPTTLFSGDFDVEHIIPQSRLFDDSFSNKTLELRSINIEKGNATACDFVKEKYGETNNENSMENYLNRIEKLYKTGVLSRAKYNKLKMQEKDIPSGFIECDIRNTQYIAKYAKTMLNDLVKVVVSTTGAITDRLREDWQLIDVMKELNWEKYKNLGLTTEFTNEEGYRIRQINDWTKRNDHRHHAMDALTVAFTKRQFIQYLNNLNARRTDKNQSISNTEEEEYDNFAITTEDMLLNTRDVLGIEKNYLYRDHRNKLRFYPPIPLNDFRAEAKYHLENTLISIKAKNKVTTQNINFTKRKGGVNKKTQQTPRGQLHLETVYGSQKQYVVKEESVNAKFDAEKIATVSKPAYREALLRRLQEFDNDPKKAFTGKNSLTKNPIWLNKLQTAQVPEKVKTISFETAYTIRKEISPDLKLDKVIDLGIRRILENRLKEFRNDAKKAFSNLDENPIRPNKEKGIAIKRVTISGISNAEALHDKRDKEGNLILDKNGKPQPVDFVNTGNNHHVAVYRKPVLDKNWNHAEDENGNKKYELEENVVSFYEAVSRKNLGLPVIDKTYKASEGWQFLFSMKQNEYFVFPRTEKVEKIDEETGEITEEEIVVFDPNDIDLLNPDNYKLISPNLFRVQKFSFKNYVFRHHLETTIKDTSSVLKGITWTDFRSSKGLDKIVKVRVNHIGKIVSVGEY

SEQ ID NO: 23199 - protein, 1462 aa, unidentified
  REGION 1..1462: note = Cas Enzyme sequence
MKKILGLDLGTNSIGWALVNEAENENEKSSIIMLGVRVNPLTVDEQKNFEKGKSITTNADRTMKRGMRRNLQRYKLRRENLIEILKEHGFITDETILSENGNYTTFETYRLRAKAVTEEITLEQFARVLLMINKKRGYKSNRKAKGAEEEGVLIDGMEVAKLLYEKDLTPGQYCLQLMEQGKKQLPDFYRSDLQEEFNRIWAKQQEFYSEILTDKLKENLREKSEKATWTICKEPFNIVGIPRTTKGEELKKENFAWRTKALSEKLDLESLAVVLQKINGQINNSSGYLGAISDRSKELYFNKQTVGQYQMTVLAQNPNASLKNMVFYRQDYLDEFNIIWEKQAEFHKKELTEELKKEIRDVIIFYQRRLKSQKGLIGFCEFESRQIEVEIDGKKKIKTVGSRVIPRSSPLFQEFKIWQTLNNLEVSGKGRKSKKKKEHSLSLFTNQEDPLLIYGKRELYQEEKELLATELSIKEKLTKSDILKLLFDNPQELDLNFKEVQGNLTQAKLFAAYRDIIEQTGHILDLKKSASEILENVEQIFSGLGYNTDIIRFNSDTDNLDNDPMYKLWHLLYSFEGDNSKTGNENLINKITNLYGFEKEYAAILANITFQDDYGSLSAKAIRKIFPYLKEGNKYDISCEYAGYRHSASSLTKEELENKIYKDRLEILPKNSLRNPVVEKILNQMVHVVNAIIADPQLGKPDEIRIELARELKKNAKERQELTKSIEESTRMHEQYREILSKPPFNLSYISRNDIIRYKLYEELKDNGYHTLYSNTYISPTTLFSGDFDVEHIIPQSRLFDDSFSNKTLELRSINIEKGNATACDFVKEKYGETNNENSMENYLNRIEKLYKTGVLSRAKYNKLKMQEKDIPSGFIECDIRNTQYIAKYAKTMLNDLVKVVVSTTGAITDRLREDWQLIDVMKELNWEKYKNLGLTTEFTNEEGYRIRQINDWTKRNDHRHHAMDALTVAFTKRQFIQYLNNLNARRTDKNQSISNTEEEEDDNFAITTEDMLLNTRDVLGIEKNYLYRDHRNKLRFYPPIPLNDFRAEAKYHLENTLISIKAKNKVTTQNINFTKRKGGVNKKTQQTPRGQLHLETVYGSQKQYVVKEESVNAKFDAEKIATVSKPAYREALLRRLQEFDNDPKKAFTGKNSLTKNPIWLNKLQTAQVPEKVKTISFETAYTIRKEISPDLKLDKVIDLGIRRILENRLKEFRNDAKKAFSNLDENPIRPNKEKGIAIKRVTISGISNAEALHDKRDKEGNLILDKNGKPQPVDFVNTGNNHHVAVYRKPVLDKNWNHAEDENGNKKYELEENVVSFYEAVSRKNLGLPVIDKTYKASEGWQFLFSMKQNEYFVFPRTEKVEKIDEETGEITEEEIVVFDPNDIDLLNPDNYKLISPNLFRVQKFSFKNYVFRHHLETTIKDTSSVLKGITWTDFRSSKGLDKIVKVRVNHIGKIVSVGEY

SEQ ID NO: 23200 - protein, 1749 aa, unidentified
  REGION 1..1749: note = Cas Enzyme sequence
MRKILGLDLGTNSIGWALVEIDHENRTVRILGLGSRILSMDAGEIAKFESGSILESSASKKTTMKTTRKLNERFLLRRDRLHCVLNLLQSLPEHYKVTIDFENEKGYRSGKFKKGLEEKIAYIKDKNGKSFFLFMDSYKEMLNEFKDINPDLFYKKKNGKDTKIPYDWTLYYLRKKALTKEISKEELAWITLSFNQKRGYEKTVGQDEKKQKEGELSETIIGIVKSINETGEKDGLKLFEIILCDENGNDFFLYKEESKIKVTEVEDLKELEIISKYDEDGNINDKNNVYIIKEIRHLKVEDVIFTGKKIKENFIYEIVLETGWVKEQQNKYQPKWINTERDFIIKTSYDVNGNRIQKGSDKGRNINAPSIDDWTLQKLKTETTLSSFNSKNKTVGVASYIYNELLRNPSQKIKGDLITVIERKYYREELEKIFDCQIKSGKHPELEDTKLYTKAINLLYPNNENHRKNINNIGFASLITDDVILYQRDLKSKKSLISNCVYEKENFKKTDTKTGKEYQEPLKAIHKANPLYQEFRIWQFIKRLKIIQLESKNDDEIVMNQDVTKAILTNTAKEKLYEFLNNREHITQSVLLKHLKLSEKDYKWNYEIDHKEPCNETRYNFILRINRVKKDLWKTLLTPENEYLIWHFFYSVKKQDEFKKGINSLFEKLLNKSGLPVDYRDDLVKNFITFGGYNNDYGTYSEKALKKLLPFLRIGKYWNQEAVEKILAKATFVAKEKVFVKEEINGEITDFQGLWISSACYLVYNRYSEVGDIQYWKTPYDIENYLRNEFKQHSLNNPVVERVLIETLQLVKDIWKYFGEQDGIDENGKIIYKELFNRIHIELGREMKKNAKEREKENKQNKENQKSNERIIELLKELAKENNEVKTKSPFQQEKLRIIENDLLSSIEYDKDATSYNLINGLGSITKKEIKDITSKDITKISTQDIERYKLWLDQRYQSPYTGKIIKLSDLFNREKYEIEHIFPQERITLNALYNKVICETEVNKDKKALTGYQYILNSDGKKSVKCAAHDFNEITILPPDEYEKRVKINFTDKRKQEILLSKEIPDEFTNSQLNNARYISKMAMKLLSNIVREEGEDSFRSKNVLPITGVITTKLKKDWQLNDSWNELIQPRFKRLNEITNSNLFGHYEKINGHDVFINQVPEELNKNFEKKRIDHRHHAMDALVIALATENQVNYLNNISSQDNKTDKLEARIKLKNIITDTKKNEAGDKSRYLLPPAQYKQNGEVIVYSYCYKETNSRIFKQIALEALANTVVSFKQKNRFIRQRTNKIQVPDIETSKLKIISQKNLSNSYNYNVRQSLHKATFYGKVKLKQKIKKIKLSEAIDISTEIVDLDLRTYVLNLQQNKKIENVEILHLLESKYPNVEVYDRFVATRYENNLESLVSVDGEKIISTIESITDISIQRILLNHLNKYNSIKVNVTNISKYVDNIIDEELQKSIKGMLLNDTLGDKITFGDKNINEIDVFTADIEFDHKEKIYMNPQLAFTFEGIVDLNKNIKELNDGKNHKPIFKVRMFTPLGTKFPVSENGEKSRKYVITADDSNSFCGFYEKTNGAGERKFIVPTLKETIENLKRGEVPCKDVFFDEKSNEEYKLIFTLTPNDLVYLPTEDEMINSFKLDSEKLKNIDKDRIYKFTDGNSAGVMNFTPYYVSKPLVDLNKKEYKEINLKNLCFEENTESKKGIKTKVKELVNEIGLGSNQSKNQNSLEGIQIKQYCIKLKIDRLGNISI

SEQ ID NO: 23201 - protein, 1380 aa, unidentified
  REGION 1..1380: note = Cas Enzyme sequence
MKRILGLDLGTTSIGWAVVNEAENENEKSTIVKLGVRVNPLSVDELTNFEKGKSITTNADRTLKRSMRRNLQRFKLRKENLIEILKDHGFITNETVLSENGNFTTFETYKLRAKAATENVTLEQFARILLMINKKRGYKSSRKAKSQDEGQLIDGMEIAKTLYNENITPGQFVLNILNKGKKYIPDFYRSDLQSEFDKIFDKQLTFHPEYLSIELKEELRGKKRDAIWAICAKTFKEKGFELVGIKRQGNATEQKKENYIWRVNGLTEKLDLEQLVIVLQQINIQLNSSSGYLGSISDRSKELYFDKKTVGQYLMAQLAQDPNCSLKNQVFYRQDYLDEFNTIWETQTTFHKELTPKLKEEIRDVIIFYQRRLKSQKGLIGFCEFESRQIEVSIDGQKKIKTVGLKVCPKSSPLFQEFKIWQILNNIEITEKASHAKRTLEQEEKEILFTELSIKDRLSKDETLKILFPKSYKLYDLNYKDIEGNRTQASLFKAYQQIIGLSGHGEYEFSKMKRDDLFEIVEGVFKGFGYNTDILKFDSSIEGNAFEKQALFQLWHLLYSFEGDDSNTGNEKLISKISELYGFEKEYASIIANVTFQDDYGSLSSKAIRKIVPYLKEGNEFSLACGYAGYKHSKSSLTKEELENKVLKDKLTILPKNSLRNPVVEKILNQMINVVNSAIETYGKPDEIRIELARELKKSAKEREDLTKSINESTLEHEKYRSTLQNEFGISHVSRNDIIRYKLYLELEHNGYKTLYSNTYISKEKLFSKEFDIEHIIPQSRLFDDSFSNKTLESRSINIEKANDTAFDYILKKDGESGIEKYLKNIDDLYANGKIKRAKYNKLRMKGVDIPDGFIDRDIRDTQYIAKKAKTLLEKIVKEVISTSGQITDRLREDWQLIDVMQELNWDKYNKIPGQTEIIENRDGHKIKRIKDWTKRNDHRHHAMDALTIAFTKRSHIQYLNNLNARSDKAGSIYGIEAKELERDSKGKLKFKAPFQVNEFRAEAKKHLENTLISIKAKNKVATININTTKTKDGVNKKKQLTPRGQLHLETVFGSNQQYETKLEKVNASFTEDLIEKVAKKSNREALMKRLQEFGNDPKKAFTGKNSLDKNPIWLDETKQYSVPEKVETVSMVTIYTIRKEITPDLKIEKVVDVGIRKILETRLKEYNNDSKKAFSNLNENPIWLNKEKGISIKRVTITGISNAEALHEKKDKFGNLILDKNGNPQPVDFVNTGNNHHVAIYKDDKGNLQENVIPFFEATTRISMGYPIIDKEYRASEGWQFLFSMKQNEYFVFPNEKTGFNPYEIDLLNPDNYYLISPNLFRVQKFTVKDYFFRHHLETNVENNNALKDITWLRLGINGIQNICKVRINHIGQIVSVGE

SEQ ID NO: 23202 - protein, 1895 aa, unidentified
  REGION 1..1895: note = Cas Enzyme sequence
MKKILGLDLGTNSIGWALVEIDHENKTVRILGIGSRILPMDAGEINDFESAGKIKSTAAQRTDKRGPRRNKERFLLRRDRLHLVLNLLNALPEHYKLEIDFERNGEKCGQFKSDQEPKLAYLQNSGTKKSDFLFEDSFKEMLNELGIEYKKHKLIPRDWTLYYLRQKALEKEISLEELAWVLLSYNQKRGYEKIEVENKSIKENEIVEEIDLQVKSVTESRDKNDRKYFEIALNSLDNFTYREFSDIKMTYKGDIKEVKVTTKLNDKNEVISKEFTVVDIYPLQIRNVKYEKQEDKHSYTLTYENGWEEIKSPKKYTFKYNNVIDKPFDYIIETVYDEKGNIKPVLGKDRKLREPDFGDNSNDWTLLKKKTEKEALAFNIDNGYINQETGEPCKYISTKLYNVLKNDAESGDRTKIIGGMFQVVERDFYREELAKIISTQKQYHDTLDDRKIFEKCVKLLYPNNEAHAKNLLANKNAIQHLLVEDILLYQRPLKSKKSEIANCKYEIRQWKDVFDKKTGKPIKEIDIETGEVSIKKEPFYYKVVSASHPYFQEFRIWDKIHNLRLIQVEKEVDGKTKTNVDVTDEYFTNETYQALFELLNTKNSLKQIGLFDFLKLKFREKRENAKNFVWNFPEEEEIKGNETRMSFAVRFKRCGFVDYADFLTQEKEISLWHYLYSVSYKERIADDFKSTKSFLTKFLEGFDISDEVKGNLVKDFANYPRFASKYCAYSEKALKKLLPFIRMGMNQFKGAFDIGEFKLDLETINYNKSKILAHIGFNQEKKDSLSSEEKRGLEIEKQKLYDAIWKHSVNDRINEILTRLKTIDFSKDEIDFSKAISNDKSNGNIPFPKGLFNTFRTFEKPEDFTNLNLTQASYLVYGRHSELSQAKYWTSPDQIRKELHQEVKQHSLNNPVAEKVIMEMMQIVTDIWDYFGKGKERFFTEIHLEVGRELKKSAKEKQNITNNQKENKAQNKRLRQILEEYLTNSTYNAIPQNSDHFERLKIVEDGAAHTKNIDKNFFTDKSYNKKEIEEILKKPTINKDDFDKYKLWIEQGYKSPYTCKIIKLTDLFNGNKYNIDHVFPQASITNDSLSNKVVCETEINKLKSNQTGREFINNFQKREVYCNAYGIKVEIVDDDKYVSIVKSQFSGTKRFILLSKEIPKGYTNSQLNNTQHIARKAMELLSHIVREQGEVEFRSKNVLPVTGEITSKLKQAWRLDQVWKKLVSPRFIRMNELTKSNLFGQEQESKSGEKYFDCNIDETIKEKDESYDIKRIDHRHHALDALIVALCTEEHVNYINNINANVKSDDYGKQKQIEKYRETLKRKIMFSKPKKENPKEKDWFYMLPGQIRQTGAETSAIDTVLQKSYSYGNTTFNLDYKAMVLSALENTVVTFKQNLRVINKTVNRYNDSPNRKKFERQKDKESGNQYNWAIRRSLGKDTYYGRVNLKLSEKKKLHSMLDEIFEDAAIVVDKKLRKELREIKLKYDLKSFKKKIKELFPENPESYFYYFTDTTKDEKKIASREFLSVKAKFDKEKISKITDSGIQKILFNHLKQFDTIKLPFEDALQYYNALMEQQEMESIVNNSDSNFKTLDDFIAYLRLHKYKYEKVDYSILNVFVDQVSERYFRKEGEFNDRFDEHPEIAFSAEMIDIMNQPENLKKLNDGKNHAPIRKVRVSGGFGKQRAISENQQSVKSKQYVVNDADSNLYLGFYEGSYEDKKGNKITERKFQDIGLIELIENLKQDKSKRLNPLSEKMFDDKKNTEYNWLFTLSPLDLVFVPNGEEIEYPSLVDFNSLSKEQMTRVYKYVDGNKDIANFVPYSIAQPIWKFHDDAKKKEIYNQLTEKHPLKILVKDLIKDEFGFGSQQTKNQNMIDGVTQIKKICWKLKVDRLGNISRIR

SEQ ID NO: 23203 - protein, 1397 aa, unidentified
  REGION 1..1397: note = Cas Enzyme sequence
MKKILGLDLGTNSIGWALVNEAENENEKSSITKLGVRVNPLTVDELTNFEKGKSITTNADRTLKRSMRRNLQRYKLRKENLIEILKEYGFITDHTTLSENGNKTTFETYRYRAKAASEEVSLEHLARILLMINTKRGYKSSRKAKSSDEGQLIDGMGIAKKLYDEGITPSQLVYQLLKDGKKFIPDFYRSDLQTEYDKLWEFQKQFHQEILTEEFKKQISGKGKVNTTKIFLAKYGIYTADNKSGDKRLQAYKWRVDGLSKELSKEELAFVISDLTGTISNSSGYLGAISDRSKELFFNKQTVGQNLMQQLDLNPHTSLKNQVFYRQDYLDEFNTIWETQAKYHKELTSDLKGEIRDVIIFFQRRLKSQKGLISFCEFESRQIELVIEGTKKVKTAGSKVCPKSSPLFQEFKIWQILNNIQIKNKSGIERPLTEEEKNCLFIELSIKDKITKNEALKLINKSLKEYDLNFESIDGNRTQCTLFKVYQNIIELSGHNGSDFSKMYAKERIETIKTIFSGLGYSTDILQFNSDLDGTEFEKQPMYQLWHLLYSFEGDDSNSGNEKLINKLSELYGFEREYSKMLANVSFQPDYGSLSTKAIRKILPYLKDGFAYAGRAEYPDELSACEYAGYRHSKSSLTREELENKVLKDKLDILPKNSLRNPVVEKILNQMINVVNTIIDEYSEKDNNGNIIKLFKPDEIRIELARELKKSAKEREEATKSISDATAEHEKHRITLKTEFGLTNVSRNDIIRFKLYLELKDNGFHTLYSDTYISPTKLFSKEFDIEHIIPQSRLFDDSFSNKTIDKRDANIEKANETAYDYISKKSGDDGIAIYLKKIEDLFKTGKISKGKYNKLKMKGEDIPSDFINRDLRDTQYIAKKAKSILEELVKDVVSTTGSITNRLRQDWQLVDVMQELNWDKYDKLGLTEIIENREGHKIKRIKDWTKRNDHRHHAMDALTIAFTKRSHIQYLNNLNARSDKTDSDKPDSIYGIEIKELERNDKGKLRFKSPIPLTEFRAEAKKHLENTLISIKAKNKVTTININTTDKKNGVNIKKQLTPRGQLHLETVYGSIKQYVTKEEKVNASFTEEQILTVAKKSFRKALMNRLKEFDNDAKKAFTGKNTLDKNPIYLDVENTQKVPEKVKTVTTETVYTIRKDISPDLKLDKVIDAKIRSILEARLNEFNGDNKKAFSNLDEFPIWLNKEKGIAIKRVTITGISNAEALHVKKDKEGKIILDKNGNQQPVDFVNTGNNHHVAIYKDENGTLQENVVSFFEATTRVNQGLSVIDKDYNNQDGWEFLFSMKQNEYFVFPNEKTGFNPSEIDLLDSENYHLISPNLFRVQKFTIKDYFFRHHLETSVENNNSLKGVTWLRIGLNGVNDIVKVRVNHIGQIVSIGEC

SEQ ID NO: 23204 - protein, 1380 aa, unidentified
  REGION 1..1380: note = Cas Enzyme sequence
MKKILGLDLGTTSIGWAVVNEAENENEKSSIVKLGVRVNPLSVDELTNFEKGKSITTNADRTLKRSMRRNLQRFKLRKENLINILKDHGFITNETVLSENGNFTTFETYKLRAKAATENVTLEQFARILLMINKKRGYKSSRKAKSQDEGQLIDGMEIAKTLYNEKITPGQFVLNILNKGKKYIPDFYRSDLQTEFDKIFDKQLTFHPEYLSIELKEELRGKKRDAVWAICAKTFKEKGFELVGIKRQGNTTEQKKENYTWRVKGLTEKLDLEQLVIVLQQINIQLNSSSGYLGSISDRSKELYFDKKTVGQYLMAQLAQDPNCSLKNQVFYRQDYLDEFNTIWETQATFHKELTPKLKEEIRDIIIFYQRRLKSQKGLIGFCEFESRQIEVSIEGQKKIKTVGLKVCPKSSPQFQEFKIWQILNNIEITEKSNHAKRTLEHEEKEILFTELSIKDRLSKDDALKILFPKSNKLFELNYKDIEGNRTQASLFKAYQQIIGLSGHGEYDFSKMKRDDIFEIVKGVFKGFGYNTDILKFDSSIEGNAFEKQAVFQLWHLLYSFEGDDSNTGNEKLIAKISELYGFEKEYASIIANVTFQDDYGSLSSKAIRKILPYLKDGNEFSLACGYAGYKHSKSSLTKEEMDNKVLKDKLTILTKNSLRNPVVEKILNQMINVVNSAIETYGKPDEIRIELARELKKSAKEREDLTKSINESTLEHEKYRSTLQNEFGISHVSRNDIIRYKLYLELEHTGYKTLYSNTYISKEKLFSKEFDIEHIIPQSRLFDDSFSNKTLESRSINIEKGNDTAYDYILKKDGNIGIETYLKNIDDLYANGKIKRAKYNKLRMKGVDIPDGFIDRDIRDTQYIAKKAKTLLEEIVKEVISTSGQITDRLREDWQLIDVMQELNWDKYNKIPGQTEIIENRDGHKIKKIKDWTKRNDHRHHAIDALTIAFTKRSHIQYLNNLNARSDKAGSIYGIETKELERDSKGKLKFKAPFSINDFRAEAKKHLENTLISIKAKNKVATININTTKKKDGVNKKKQLTPRGQLHLETVFGSNQQYETKLEKVGSNFTEEQIGKIARKIYRDALLKRLHECDNDPKKAFTGKNSIDKNPIWLDETKQYSVPEKVETVSMVTIYTIRKEITPDLKIGKVVDIGIRKILETRLKEYNNDSKKAFSNLNENPIWLNKEKGISIKRVTITGISNAEALHEKKDKFGNLILDKNGNAQPVDFVNTGNNHHVAIYRDDKGNLQENVITFFEATTRINMGYPIIDKEYKASEGWQFLFSMKQNEYFVFPNEKTGFNPNEVDLLNPDNYYLISPNLFRVQKFTVKDYFFRHHLETNVENNNTLKDITWLRLGINGIQNICKVRINHIGQIVSVGE

SEQ ID NO: 23205 - protein, 1406 aa, unidentified
  REGION 1..1406: note = Cas Enzyme sequence
MRQILGLDLGTNSIGWALVNEAENESEKSSIIKLGVRVNPLTVDEQQNFEKGKSITTNADRTLKRSMRRNLQRYKLRRENLIEILKDNGFISDKTILSENENRTTFETYRLRSKAAEEEITLEQFARVLLMINKKRGYKSSRKVKGGEDGTLIDGMEVAKKLYNENLTPGQFCMQLLRAGKKQLPDFYRSDLQAEFDKVFDKQSLFYPVYLSVELKEELRGKKRDAVWAICVKAFKEKGFELVGARRQGNAAEQKAENYEWRAKALSEKMSLEQLVVVLQQISIQVNGSSDSLGSISDRSKELYFGKQTVGQYQMAVLNDNPNASLRNMVFYRQDYLDEFNIIWERQAKFHKELTEELKCEIRDVVIFYQRPLKSQKGLIGFCEFERRKIEVEIDGKKKTKTVGSRVIPRSSPFFQEFKIWQTLNNIEVFGKGKKSKKQKVDTSFDKTEDSLGYGGRRELYQEEKELLAAELSIKKELKKEDVLKLLFDNAKELDMNFTSIQGNLTQAILYKAYQRIVEKSGHDIDIEKNPASEILKTVEAIFRSLGYNTDILYFDSDKPLEEQVMYSLWHLLYSFEGDDSTTGYEKLINKITELYGFEKEYAVIIAGITLQDDYGSLSAKAIRKILPYLKAGNKYDVACEYAGYRHSASSLTKEELDSKIYKDRLEILPKNSLRNPVVEKILNQMVNVINSIIDNYGNPDEIRIELARELKKNAKEREELSKSIAETTRLHDHYRDVLSKAPFNLSYISRNDIIRYKLYEELKNNGYKTLYSNTYISPSAVFSGDFDVEHIIPQSRLFDDSFSNKTLELRSINIEKGNKTAYDFIRGKYGETSNENSLEQFLNRIEDLNKNGVLSRAKFNKLKMQEKDIPDGFIDRDIRDTQYIAKYAKTMLGEMVKFVVSTTGSITDRLRDDWQLVDVMKELNWDKYKLLGLTEEFTNEDGHRIRKIKDWTKRNDHRHHAMDALTVAFTKRSIIQYLNNLNARSDKSSSIYGIEQKELYRNGKGKLLFKPPFALDEFREEAKKQLENTLISIKAKNKVVTQNVNSTKIAIGVHKKVQQTPRGQLHNETIYGSQQKYVIKEEFVNAKFDTEKIATVTKPAYREALLRRLQESGNDPKKAYTGSNSLSKKPIWLDELHTDQLPEKVKTVSFETIYTIRKEVLPDLTLDKVIDKKVRERLEARLEEFNGNAKQAFSNLDENPIWLNKEKGIAVKRVTISGVNKAESLHDKRDKEGKPILDKNGMKMPMDFVNTANNHHVAVYHDREGKLQEKVVSFYEAVSRRNLGLPIIDKDCQASEGWQFLFSMKQNEYFVFPNEKTGFNPNEIDLLNSDNYSLISPNLFRVQKISTKNYLFCHHLETKAITGEDLKNKKQLSQITYYFIQSLPPIADIIKVRINHIGQIVSVGE

SEQ ID NO: 23206 - protein, 1307 aa, unidentified
  REGION 1..1307: note = Cas Enzyme sequence
MKKGELPRLKCFHNGIILIVISFKNCTAKILNKNKLSNVLFNKINLLTLSLLINHVKHNIMKKILGLDLGSASIGWALITEDKENGITNYEISGIGSRIIPYEGTEGKDFAKGTGESRNSSRTKARTARKGYDRYQLRRRFLVETLIKNKMFPDDSLKNLPKMQLWELRNKAVDSPISLIELGRLFLWLNQKRGYKSSRSDANLDKKDTEYVATVKSRHEKIKELNLTIGQYFYEGLAKDEFYRVKENIFPREAYIEEFDRICSNQQQYHSSTLTNKLIDKIKNEIIYYQRPLKSQKGLVSVCEFEGFWRKGKDGKEYFVGPKVAPKSSPLYQLSKMWENINNIKISSRTGGDIEITAEQKWALFEHLDNNEKLTQSDLLKLLNLKKENCYVNKQLAKGIIGNITKYAICNCFINLNSCQDLLKLDLKIVETDSEGYLYDKKTGEIFNTKPVKFIDPMVEREPFYQLWHTIYSIPDQEECSKVLQANFKIEQAIANKLAAIDFSKHAFGNKSVKVIRNILPYLMEGDGYSEAMSYAGYDHSNSLTKDQNLQRKLLAQLKPIDKNSLRQPIVEKILNQMVNVVNAVIDKYGKPDEIRVELARELKQSKEERNDADKNMNKRQRENEEITKRLAEYGMRATRNNIIKWRLYEEIDNQDKKLNAICIYCGQPISLTEAIKGNDVDIEHIIPKSKLFDDSQSNKTLAHRHCNKDKNDRTAYDFMKSKSVQALDEYVKRVNALYASQVIRKTKRDKLLMTEDKIPDNFIDRQLRETQYISKKAREILQTICYNVWATSGTVTAELRHLWGWDDVTMNLQFDKYKALGLTQTIEWESDHGKNSHEKEVITGWTKRDDHRHHAVDALTIACTKQGYIQRFNTLSSSKTREDMAFDIENSTIEFKEKRSLLEKYIISEQPIPVDKVEKAVADILISFKSGKKVAVVGKRKVGKLGNKKVIQEGIIIPRGQLHQEFVYGKIKSIEERKPIKYIFENPHLIYKPYIKALVEERILRHEGNTIKAISSLKKDPIYLNKDRSVLLEYATCLKDEYVIKYNVDINFNKADKVIDGKTKDILQARLNKFGGKSKEAFKDVQREDKTLIKWYEDEGLKHPIKSVRCYTGLSAVVPVKKDEQGKDIGFVKPGNNHHIAIYTDNEGNKYEYVCTFWHAVERKKYGIPVIIHNAAEVWDKIQMQPEGTYPESFLEKLPIVHWNLLVSMQQNEMFILGMAPEDIEIAISNNDCRTISDKLYRVQKMSIIPSSGQLDITFRHHLETQLNDETDSKLSKRFIKAQSIGSLFNLNPYKVKVDRLGNISI

SEQ ID NO: 23207 - protein, 1109 aa, unidentified
  REGION 1..1109: note = Cas Enzyme sequence
FVISDLTGTISNSSGYLGAISDRSKELFFNKQTVGQNLMMQLDQNPHTRLKNQVFYRQDYLDEFNTIWETQAKYHKELTPDLKGEIRDVIIFFQRRLKSQKGLVSYCEFESRQIEVDIDGTKKIKTVGSKVCPKSSPIFQEFKIWQVLNNIQIMDKSGSKSFLFQEEKEALFAELNLKDKITKSEALKLINKNTKDYDLNFKDIEGNRTLTALFKVYQTIIELSGHDGFDFNKMNAMDKIETITSIFNGLGYNTEILKFNSDLEGKEFEKQPMYQLWHLLYSFEGDDSNSGNEKLINKLTELYGFEKEYAKLLANISFQSDYGSLSTKAIRKILPYLKDGNEFSLACGYAGYRHSKNSLTKEEIENKILKNKLDILPKNSLRNPVVEKILNQMINVVNTIIDVYGKPDEIRIELARELKKSAKEREEATKSINETTAAHEKHRVVLQRDFGLTNVSRNDIIRYKLYLELENNGFHTLYSNTYVTPGKLFSKEFDIEHIIPQSRLFDDSFSNKTLETRSENIEKGNDTAQDFILRKYGDEGLEKYVERIEGLYKSSKLSKTKYNKLKMKGEDIPSDFINRDLRDTQYIAKKAKTILEELVKEVVSTSGSITDRLRQDWQLVDVMKELNWDKYNKLGLTEIIENRDGHRIKRIKDWTKRNDHRHHAMDALTIAFTKRSHIQYLNNLNARSDKAGSIYGIETNELSRDDNGKLKFNPPIPINEFRAEAKRHLENTLISIKAKNKVATININTTDKKNGVNKKKQLTPRGQLHLETVYGSIQQYATKEEKVNASFTEEQILKVAKKSYREALLNRLKEFGNDPKKAFTEKNSLDKNPLFLNEDQTQKVPEKVKTVSTEIVFTIRKDITPDLKLDKVIDVKIRTILETRLKEYGGDSKKAFSNLDEYPIWLNEEKGIKIKRVTITGISNAESLHEKKDKEGKLILDKNGNPQPVDFVNTGNNHHVAIYKDANGDLQENVISFFEATARVNQGLSIIDKDYKKQEGWNFLFSMKQNEYFVFPNEITGFNPSETDLLDPENYYLISPNLFRVQKISSKNYVFNHHLETMAVTGDTLKNKKQLLNITHRFIQSLSPIKEIVKVRINHIGQIVSIGEY

SEQ ID NO: 23208 - protein, 1484 aa, unidentified
  REGION 1..1484: note = Cas Enzyme sequence
MRRILGLDLGTNSIGWALVDIENNKIEGMGSRIIPMTQDVLDTFSGGKPLETQTAARTSYRGIRRIRERHLLRRERLHRVLNVLKFLPEHYAQEIDFEKHFGQFVYESEPKLTYNNRDFIFISSFEEMLRDFKQSQTQLFYTKPNGKETKISYDWTIYYLRKKALSQKIAKEELAWIILNFNQKRGYYQLRGEDDADATRTAQTRIYFDTQIINRIVDTGSVYKGLKIIQITLANGDSGKYFSKEVPNWSGLQKHIIATVDLDKDGNDRFEGDGSLKRRFSIPTEEDWEKKWKLIKIKTEKEIKDANTTVGAYIYENLLQNPSQKIRGKLVRTIERKFYKEELIAILKKQIELQPELFTDDLYNDCVREIYRNNEAQQLVLSKRDFVHLFVEDIIFYQRPLRSQKSSIGNCSLEYRIHKDKDGNQVKEYLKSIPKSHLLYQEFRVWQWLSNLKIYRKEDDADVTTEFLKNTEDIVNLFEFLMTQKEVGHKDILKKFITPILKEKFPSTKPAVINKEVDKEIAKYRWNYVFDDSKEKEEDKSKKYPCNTTGYEIRRRLEKVANVPTEFLTSEIEQHLWHIIYSVTDKKEYEAALKSFANKYKLDESSFVEEFKKFPPFPSEYGAYSEKAIKKLLPLMRLGKYWSWEAIDTKTQGRIEKTISGEYDESIKTRVREKAINLTDNNHFQGLPIWLASYVIYDRHSEADIAGKWNSVAELEQYLEDFKQHSLRNPIVEQVITETLRVVRDIWKQFGQSAKDFFNEIHVELGREMKNTADDRKRLTEQVTNNEATNLRIKALLAELKENSDGKLQIENVRPFSPMQQDALKIYEDGVLNSTIELPEDIVKISKSSQPSKSELQRYKLWLEQKYRSPYTGQMIPLGRLFTEDYQIEHIIPKKRYFDDSFNNKVICESAVNQLKDAQLGLEFIKNHHGTKVECGMGKVVEIFSEEAYQTFVKEHYAKSKTKRQNLLLEEIPEKMIARQMNDTRYISKFISSLLSNIVRADKEDDGINSKNLIPGNGKITTVLKKDWGMDAVWNDLILPRFERMNQLTNSDAFTYWNEQYQKFVPVEYSPADSKRIEKKRIDHRHHAMDALVIACMTRDHVNLLNNQSAKSETSRYDLQNKLRVRSKDTWIDKKTNKQVERDVFKEFKKPWNNFTVDARTALETVVVSFKQNLRVINKATNNYEKWIEKEGHKVKAKVKQEGTNWAIRKSLHEETISGKVDLPWVNVSKGNFLTATRKNLDTSFTLEKIWKITDTGIQKILEEHLKRSENNPDLAFSPEGIEDMNRNLLELNEGKKHKPIYKVRLYEMGSSRFALGITNNKPSKFVQGAPNLYFAIYSDSNNKKAYETIPLNIVIERLKQGLQAVPEKNAIGNSLQKVLSPLDLVYVPTEEEVDMPHLIEFSKLNKHQMERLFNVNDFSGVTAYFSQNSFAKNIFPKEVDLSWNEKKQKLSGSFDAKTAAFNKKSIKEVCIKLKIDRLGNISI

SEQ ID NO: 23209 - protein, 1516 aa, unidentified
  REGION 1..1516: note = Cas Enzyme sequence
MRRILGLDLGTNSIGWALVNEAENESKEILGIGSRIIPMSQDILGKFDSGVTESQTAVRTRFRGIRRLRERHLLRRERLHRVLHVMNFLPKHYEKYIDFENKLGKFISDTEPKLVWEQNEEGSYDFIFKTSFNEMVEEFKLSQPQLFDEDKLIPYDWTIYYLRKKALQHKIEKEELAWLLLNFNQKRGYYQLRGEDDLSDRKNEYVVSLKVTQIEKGELDRKNNNRTWFNITLENGWIYTATFTSEPKWLNEEKEFLVTEELDENGNIKISKDRKTDTEGKEKRRITPLPSFEEIELMSQSDKNKIYKKIKAKTEATITKSGKTVGCYIYDTLLQNPTQKINGKLVRTIERKFYKQELKAILEKQKEFHSELNDAELYHTCLNELYGNNEAHRNSNANRDFTYLFLNDIIFYQRPLKSKKSLISNCKYEVRTFINKETGEKQKEAIKCISKSHPLYQELRLWKFIQDLKIIEREKDINGKLNTDVDVTTEFLKTEDDYVELFDWLNKTKEIKQDTLLSSYFKIKKKKGEEKLSHRWNYVEDKEYPCNETRAQFLNRLSKVSNVPENFLNKDTEIQLWHLLYSVEDKLEIEKALKSFALKNNLGDDFVEVFKKFPPFKKEYGAYSEKAIKKFLPLMRMGKYWELDNIDKKTKLRIDKILSGECDETIQNRVREKAYKLNSIADYKGLPEWLVSYIVYDRHSESGDISKWKTPEDLESYLRTFKQHSLRNPIVEQVITETLRTVKDIWKHYGVFTEIHVELGREMKNPADKRKTMTAQITDNENSNLRIKYLLAELINHSDVENVRPYSPSQQEILKIYEEGALNNPDFEVPEDIAKIAKQSQPSKSELIRYKLWLEQKYRSPYTGEMIPLSKLFTSAYEIEHVIPQSRYFDDSFSNKVICEAAVNKEKDNALGYEFIKNNEGRIIELSYGKSVKIFTISQYEDFVKQYYGKSRGKMKKLLMEDIPEAFVERQLNDTRYISKVVKGLLSNIVREDDEQESTSKHVISCTGGVTNTLKQDWGLNDVWNRIITPRFERMNELTKSSNFGQWTNKDGKKVFQTEMPLELQKGFNKKRIDHRHHAMDALVIACATRSHINYLNNESAKPSSKVSRYDLKSKLCYKSKTDDKGNYKWQFHKPWNSFTEDAQVALENIVVSFKQNLRVINKTVNKYQVIENGKKVIKTQEKGDSWAIRKPLHKDTVAGIVNLRLKKSVTLSAAIDQWEMLVDIGLKTKIKQLINEGFDKKKILKFFAEQENKWLGSDITKVEIYYFSNDKEVLVASRVSLDTSFSAKKIESITDTGIQKILLNHLANYNEQPELAFSPEGIEEMNKNIVALNNAKFHQPILKVRTFEPKGNKFNVGVAGNKKDKYVEAAKGTNLFFAIYVNEEGKRSYETIPLNIAVERLKQGLSEVPETNEKGDRLLLHLSPDDLVYVPTTGEIESPHLVDFSRLTNDQFEHIYKMVSCSSYQCFFIRSQIATSIVNKLEFSALNKMEKGIDGVMIKDCCIKLKIDRLGNISL

SEQ ID NO: 23210 - protein, 1461 aa, unidentified
  REGION 1..1461: note = Cas Enzyme sequence
MGFLPEHFANQIDEHGKFIDYSEPKLAWRKDKNGKYDFVFKDSFDEMLEDFAQHQPQLVAEGKKVPYDWTIYYLRKKALTQRLKKEELAWILLQFNQKRGYYQLRGEDEDEQQDKMVEFIAQKVVRVEATDEKKGDDVWYNVYLENGMVYRRTSKMPLDWEGKIKEFIVTTDLEKDGMPKKDKEGNIKRSFRGPKEDDWTLMKKKTEYDIDNSHKTVGCYIYDNLLQKPDRKIIGKLVRTVERKYYKEELRQILATQIVLITELRDEAIYKRCIEELYPNNEAHRSNIAKPDFANLFVNDILFYQRPLKSKKSLISDCPYESHFDENGNEHPLKCIAKSNPLFQEFRLWQFVQNLRIYQRERIISDGQLDLFGNISAGRLQTDVDVTDEFLKTEDDYVKLFDWLNDRVSIKQDTLLNSYFKFKKEKGKDQYPYRWNYVEDKEYPCNESRATMLNGLAKCSIDAGFLSHEKEMSLWHILYSVEDKVEIDKALKKYAEKNNLPNSFAEVFAKVKPFKKDYGSYSEKAIKKLLPLMRMGKYWDANAIDDKTKERIDKMLTGEYDENIKNRVREKAINLTDIIHFRGLPVWLACYIVYNRHSEAKEIGKWQKPEDIDCYLKEFKQHSLRNPIVEQVVTETLRTVRDIWKQEERIDEIHLELGREMKNPADKRKRMTENILQNENTNLRIKAMLMEFANPEMGIENVRPYSPSQQDILRIYEENALDNLTKDDKDYDFISKISKLAQPSKADITRYKCWLEQKYRSPYTGEMIPLAKLFTSAYEIEHVIPQSRYFDDSFSNKVICEKEVNGLKDRQLGFEFIKNHHGEKVQLSQGKVVEIMSVEAYEKFVKEHYASNRTKMKKLLMDDIPDGFIERQLNDSRYISKLVKGLLSNIVRERLENGEYEQEAVSKNLISCNGSITDRLKKDWGMNDVWNSIVLPRFRRLNELTGRDCFTAISAEGHEIPAMPLELQKGFNKKRIDHRHHAMDAIVIACATRDHVNLLNNEAAHSKHNANRYQLQRKLRRFEKVVINGQEKEIAMEFLKPWDSFTTDAKQILENIIVSFKQNLRVINKTTNSYLHYDENGKKVMMKQEKGDSWAIRKSMHKDTVFGEVNLRMSDKTVLLGEALKNPKAIVNKEFKKKVVELLEAGRDAKYIKKYVEDNKDVWSDIDVKRIQVYYFTKETKDRYFATRKPLDTSFNRKKIEDSVTDTGIQKILLAHLDAKGGDPELAFSPDGIDEMNRNIVTLNKGKFHQPILKVRVYEKAEKFAVGQNGNKSAKFVEAAKGTNLFFAILGTEKTNKETGKTEIVRSYLTIPLNVMIDCQKRYGSQWRNNIEAYLQEQQLVTSDVRLLFILSPNDLVYLPTEEELKGGLEAVDRKRIYKFIDPNSNKGNFVPYSSANVIFSINFTDQKKRGMSYPIQDEFGIGSQASKNPRAITGEMIKETCVPIKVDRLGNIIELNGKKV

SEQ ID NO: 23211 - protein, 1470 aa, unidentified
  REGION 1..1470: note = Cas Enzyme sequence
MKKILGLDLGTNSIGWAVVNEAENTEEKSSIVKLGVRVNPLTVDELTNFEKGKSITTNADRTLKRSMRRNLQRYKLRRDNLIDVLKSNGFIDDETILSENGNRTTFETYRLRAKAATEMISLQEFARVLLQINKKRGYKSSRKTKNTEEGQLIDGMDIAKKLYEEDLTPGQLSLQLLLEGKKHLPDFYRSDLQSEFDKVWNFQKQFYTFLTDELKEELKGKNEKTTWAICAPKKDTSNEKNDRFVWRWHETVTQWDPELSTNQTVVVEKKLVGEKRQGNLSEQKIENYQWRVKALSEQLSPEQLIVVFQKINGQINNASGYLGNISDRSKALYFNRQTVGQYQMAQLERNPNHSLKNQVFYRQDYLDEFETIWETQSKFHPELTADLKKEIRDIVIFYQRPLKSQKGLISFCEFESKQIEVEIDGKKRLKTVGCRVCPKSSPLYQEFKIWQILNNVQVIGEVIPDPRSGLFNGEESFKRGKRFLFQEEKEKLFAELNYKEKISKSDALKLLFGNQKMLDLNYKQLDGNHTQAELLKAYQNIIEATGNGDFDFAKMPSDKVLETVSQVFESLGFDTAILRFDASLEGQALERQPMYQLWHLLYSFEGDNSNLGNEKLIDKLCESYGFDRESASVLANIVFEQDYGSVSAKAIRKILPHLKDGLDYSVACEYAGYKHSKNSLTKEELANKVLKDRLELLPRNSLRNPVVEKILNQMVNVVNGIVDQYGKPDEIRIELARELKKSAKEREEMTKSINETTRLHEEYVKILQSEPFFLQHVSRTDIVRYKLYKELETTGYHTLYTNTYIPQDKLFSKEFDIEHIIPQAKLFDDSFSNKTLEARQANLEKGNATAYDYVLENYGNIGAEHYVDRVERLFADKVISKTKRDKLLMREVEIPSGFINRDLRDSQYIAKKAREILEEIVRFVVPTTGSITDRLREDWQLVDAMQELNWDKYNRLGMTEVIEGREGQRIRRIKDWTKRNDHRHHAMDALTIAFTKRSYIQYLNNLNARVQKGVDEYFDLDMVELSDLDKKDRAAAVYGIEKKELYRDGRGKLRFKPPMPLDEFRAEAKRQLENTLVSIKAKNKVVTKNVNITKSKTGKNKKVQLTPRGQLHLETVYGLAKQYATKFEKVNASFTEEKIKTVANKRLREALTERLNQFDGDAKKAFTGKNSLEKNPIWIDEYHKDKVPEKVKTVVFEPVYTIRKPISPDLKLDKVVDVGVRNVLKERLEEFGGDAKKAFSNLDENPIWINKEKGISIKRVTITGISNAEPLHEKKDKNGNLILDGQGNAQPVDFVNTGNNHHVAIYRKPKLDKDGQPLVDENGEMLYELDENIVSFYEATSRAILGLPVIDKEYKKDEGWQFLFTMKQNEYFVFPQFDEDGNMVFNPLDYDKEWYKNPNHFAIISSNLFRVQKFSYKNYVFRHHLESTIDLSDYKLRGVTWTDFRSSKGLDNILKVRVNHLGQIVSVGEY

SEQ ID NO: 23212 - protein, 1078 aa, unidentified
  REGION 1..1078: note = Cas Enzyme sequence
MSRTLGLDIGTNSLGWCLVEDGKGIVAMGSRIFPVGVKEDSYAKSGTEESRNAARRTARGIRRGYARYKLRRTELEQLLTANGMMFDKTVSLPTKQLYGLRRDALDRKLELEELGRIFFLMNQRRGFKSNRKDQAKGDEEKNLTVTKQAMRDFEAKMQAAGCRTAGEYLATLFDDLPEHWHNENEPKERIRERQRVRRELYQQEFDLIWEKQQQYHPQVLTLELKHQLRDRVIFFQRKLKSAKHLVSKCRFEPAKHVMPRSHPLFQEFRILQALSNIRITDRDRVNDLLTMEERDALAVQLSQAEKVNVSLIKEWLDYPRSARINDLGDLRGHTTWSRIRKAVGDDWFEEQNEEARLKLWHTLYFAADEGWIEEYAQRSLGMNDEQAKRFAEVNLELDYGSISHKAAQKILPFMREGYDFAGACEQAGYHHSQNELDNPDRELKDKLTGADIDELRNPLVQMTVNETARLVSAMIKQHGRPDMVRVELLRDLKKPKAKRETMRRDMLAKEKQRDAYRDFLKEKGIISNPYPSDIKKFELWLELEYSESDVTRLSPDMDLKAFKKFAEAVKPADKEKYRLWLECERISPYTGKAIPLSALFTEAYHVEHILPYSRSLDDSFVNKTLCEDTVNTEKGNLTPLEYYEQKRTLDELKAFKQRVKNFSEGKLAKFLATEVKDDFLNSQFTNSAYIGTEVRKLLRKAFKDVRVTNGQLTGLLRNKVWNLNTLLNTADGQKNRDDHRHHALDALVIACTSQSLVNRISRESQFDFRGVQRVPDVGLPWNTFRMDAAEKLNAMLVSYKGGKRLLTTKTNKYRHSKAHEGKPEKHQRTIAVRGPLHEETFYGHITLQHKGSKEETYVVRKALTSLTKSEQLENIVDPVVRKTVQDHVAKHGSLKEALKMPVYMPVKKENEGKLVPIKKVRLRTNAEELVELRPGTYVEPGNNYCIAIYEDKRGKRDFRTINFLEASKRALHEQPIYPSELDGKQLLMTLQQKDLVILYDKHQDEIQWHDPNWLANHLYMIKSFDRIGAIRMVLHKRSNANPNFPKLYPAGTTYTKKVSSFRGVPVVVDALGQITKVQ

SEQ ID NO: 23213 - protein, 1470 aa, unidentified
  REGION 1..1470: note = Cas Enzyme sequence
MKKILGLDLGTNSIGWAVVNEAENTEEKSSIVKLGVRVNPLTVDELTNFEKGKSITTNADRTLKRSMRRNLQRYKLRRDNLIDVLKSNGFIDDETILSENGNRTTFETYQLRAKAATEMISLQEFARVLLQINKKRGYKSSRKAKNTEEGQLIDGMEIAKKLYDENLTPGQLSLQLLQNNKKHLPDFYRSDLQSEFDKVWNFQKQFYTFLTDELKEELKGKNEKTTWAICAPKKDTSNEKNDRFVWRWHETVTQWDPELSTNQTVVVEKKLVGEKRQGNLSEQKIENYQWRVKALSEQLSPEQLIVVFQKINGQINNASGYLGNISDRSKALYFNRQTVGQYQMAQLERNPNHSLKNQVFYRQDYLDEFETIWETQSKFHPELTADLKKEIRDIVIFYQRPLKSQKGLISFCEFESKQIEVEIDGKKRPKTVGCRVCPKSSPLYQEFKIWQILNNVQVIGEVVPDPRSGLFNGEESFKRGKRFLFQEEKEKLFAELNYKEKISKSDALKLLFGNQKMLDLNYKQLDGNHTQAELLKAYQNIIEATGNGDFDFAKMPSDKVLETVSQVFESLGFDTAILRFDASLEGQALERQPMYQLWHLLYSFEGDNSNLGNEKLIDKLCESYGFDRESASILANIVFEQDYGSVSAKAIRKILPHLKDGLDYSVACEYAGYKHSKNSLTKEELANKVLKDRLELLPRNSLRNPVVEKILNQMVNVVNGIVDQYGKPDEIRIELARELKKSAKEREEMTKSINETTRLHEEYVKILQSEPFFLQHVSKTDIIRYKLYKELETTGYHTLYTNTYIPQDKLFSKEFDIEHIIPQAKLFDDSFSNKTLEARQANLEKGNATAYDYVLEKYGNIGAEHYVDRVERLFADKVISKTKRDKLLMREVEIPSGFINRDLRDSQYIAKKAREILEEIVRFVVPTTGSITDRLREDWQLVDVMQELNWDKYNRLGMTEVIEGREGQRIRRIKDWTKRNDHRHHAMDALTIAFTKRSYIQYLNNLNARVQKGVDEYFDLDMVELSDLDKKDRAAAVYGIEKKELYRDGRGKLRFKPPMPLDEFRAEAKRQLENTLVSIKAKNKVVTKNVNITKSKTGKNKKVQLTPRGQLHLETVYGLAKQYATKFEKVNASFTEKKIKTVANKRLREALTERLNQFDGDAKKAFTGKNSLEKNPIWIDEYHKDKVPEKVKTVVFEPVYTIRKPVSPDLKLDKVVDVGVRNVLKERLEEFGGDAKKAFSNLDENPIWINKEKGISIKRVTITGISNAEPLHEKKDKNGNLILDGQGNAQPVDFVNTGNNHHVAIYRKPKLDKDGQPLVDENGEMLYELDENIVSFYEATSRAILGLPVIDKEYKKDEGWQFLFTMKQNEYFVFPQFDEDGNMVFNPLDYDKEWYKNPNHFAIISSNLFRVQKFSYKNYVFRHHLESTIDLSDYKLRGVTWTDFRSSKGLDNILKVRVNHLGQIVSVGEY

SEQ ID NO: 23214 - protein, 1274 aa, unidentified
  REGION 1..1274: note = Cas Enzyme sequence
YKLGRALYHIAQRRGFKSSKGETIKEQEKNESTLDANVDIDVADALKKSEEKKSGKLVEFMKKYNMSTIGCAFYELEKTGVRVRNSEYQAVRSQYKDEIRRIFEFQDGLSVDSDFYRHLVSEKKGEGTIFYKRPLRSQKGLVGKCTMEPDKPRCPISHPEFEKFRAWCLINNIRFGEGLIDSLTVDQKNRLYNDRFLLTRTNFKFEDIRKWIEKEIGKHLDFKNKTINYKDNTNVSGCPISGRLKNLLGDDWETWSYVSSETKINRKTGEVNHITYNANDLWHICFSFDEPDFVEEFAQKKLGFDKDQTKQLVRIFGAIQQGYGMLSLKAVRNINRFLEKGLIYTDAVLLAKLPDIFGEQWTLAEDNIISHLDDLINENRQQKLVYGITNSLIANYKSLEIEEQFANKNLDYELDEDDYNDIRRVTIASIGEKTWEKKAEEFKAAVLNKVAELYQLFFASSERDYYALPKVSESLVVFLKNIYPCIKEKDLRKIYHPSMIEFYAPSKPEIVEDGRSLRLLGSPVVGALKNPMAMRVLHTLRKQVNALLKAVDEDGNALVDEDTRVVVETARELNDANMRWAIEAYQREREKENKEYEKIIKEYYPNRDIKDEDIDEARLLCDQHDIPEFKAEPNDTKKKGEITISPYYKKDVTKYRLWLEQNCRSIYTGKLINIANLFDDNAYDIEHTIPRSISFDDSLANLTICEAHFNRTIKKNQMPTQLANFDEIRQRLQPWFDKVEQLKDNVDFWKTQSKKAQDKDRKDQCVRQKHLWQMELDYWQNKVDRFTATEVTSGFRNSQIVDTRIITKYAYHYLKTVFSKVEVQKGSVTAGFRKMLGIQSLDEKKSRDKHSHHAVDATVLTLIPTAAKRDKMLELFYKIQENKRLNEETIFLENELRKEIKGCGLGGNVSDIVPFIENSILVNHVSKDQTLVPSHRRKRIRGKVVWKTDGQGKVVYVDGRPQPKEWIAGTSIRGQLHGETFYGAITQAEKDEKGKMLRDGKGNIVSCDKVYYVVRRELKYKASSVDAGFKDWEELEKVIVDKDLFAIMKGQFSEGISFKEACSNGIFMYKKNKDGVVDYSEGCKVNRIRHIRCFTSVKNPLRIKGQAYVSNKPYKRYYYAEMGDLYVMCKYENTERTEKEYHIWSLFDISNNREAGIEDIPNTLLGKKNTMLQLTQQIKTGDMLLLYKETPQELMDLDRETLSRRLYVVRGFENPSLIKLVRHINAQPDKELGKGESVKDFSRLPEKIRCGINTLKYLVKETDFCLTPEGLVFK

SEQ ID NO: 23215 - protein, 1014 aa, unidentified
  REGION 1..1014: note = Cas Enzyme sequence
HAQRRKKLFNKEDKRSIEEYTEAEGHLTEYTYEDIWHICYESDEKQFVKDFAKNVLCLSPSKVISMGALWEAIQDGYAKLSLCALKKINPFLAKGYKYSDAVMLANLPTIMGDTFFQQNEQEIIGLMDKERAAILSKNRIYDITNKLISDYKSLKLEGFAFAERADHDYILQDDDIEDVKKACAENFGKEWDALTDNQQSAITTHVKELYQEFFFSKERDYCKRINLADAVKAALAEKYPFLTKKKLKKLYHHSDNSYYPAAHTNENGILQLGSPARGNLKNPTVLKVLYKIKENVNKLLISGDIDADTIIVIENAREGLNDFNMRWAIEEYGKKREKENKAIEDALTDLAKEFHLTLPKGCVSVARLALYQNRDFTPYNPNEPRRLYDKLCENYKLWLRQGFFDFYTGRPITLAQLFSPDNLVEVDHILPVSKSFDDSISNKVLSSTRYNRTIKGTKLPCELPNYNIDTAEGTAIIHRIQDIERKVKYLENKVTYWKGRSSRAANPESKNWAIKQCHLWQMEYDEWNQLLTNLTTREITPSFRHNQLNDTRIISKYAYHYLKSVFGRVVVQRGETTAVFRKIFGFQEIYEKKDRSRHTHHAIDALTLSLIPYGPRRERMMELWYQIQESHRFEDYDTERQLKDKLDREVSLCGLGNYSPTEIVKYIEKTTLVRNDATNNALTKNIKRFRVRGKVVPLRDKDGNVIYEKTSKGFKRVKAKYVSQGNSIRGAIHDQSFYGKIEKWKNGKNHEIEEVFVIRKKIEFKSGDKGKGFKSWDDLKAQMVDKKLFDKFEEKEKDFKKACDEGIHICVAENGERRMVRVRRVRCIAKKAQPLKKHIFQPGNDNKERFYYVSSHGEAYGIFEYRSDEGKILYESDSLFTLSTKMKNGEMKEIPCPQHIIRTGKRFVHTRTIRKGDSILIYPEEEKPEDQYKLNTAILSNRLYRVDSIELDKRINLVRHFRGSMPKGKAIKKDADYNNLPEAIRPTLSDKLHFLLLGTDFDILNGKIVPLKND

SEQ ID NO: 23216 - protein, 1379 aa, unidentified
  REGION 1..1379: note = Cas Enzyme sequence
IERRGGERGFQKALDENRTIAEALLKEFLDKGLRARNQYPYRDEYEHELFEILKAQGYNVSRNSKNECQNEFVQKVRTAIIWQRPLRTQKGNIGKCTLEPTKPRCPVSHPVFEIFRTWQFINTIKYYNENGVKETLGQRQRELLYEFFLLKAKNFKFEEIRNFLDKQLKSKKRYNYPIDKEGKYDTSVSGMPTCKGLIDVFGDTARNALGNLHQYNIGNAPKIINNYSIYDLWHILFAFDNRTAKDNKFLEKFSIEKLDIANERNKKGEEINPYAKLQANITTGYADLSLKAMSKIIPFLKDGYLYNEAVVLAKIPDLLGENWGQNKDTIEALVHESNEKYNWHKTIVSVTNNLIDQYKGLEPQETFAYKDFQYHLVESDLNDIEKACIGSFGEKTWNDKTENEKQQILDEVRAEYQEFFHDERRAYRRTILLTDILKEKLKEKNIEINGKLYHHSNIENKYLKRYTDTKTGTIKLPTHIDKDSGAITEILPQPIIDSIKNPMFNKAMSIVRKLINELIKTGKIDEDTEVVIEVARELNDNNNRAAIERYQREREGKREKYREFLNEFNQKENRSINVEESIPAFELWTEQIFEEIEENGKKLNKNTSILKEKEAIKRYELWTEQKGQCMYTGKMISVTQLFSNEIDIEHTIPRSLLPDNTMTNQTVAYAWYNRDKKKNQLPTQCANYEKDVEGWGTDIKDRLGKWEETRDHWKKLYEDRLKPKGNEDETIKNKRVQEKHYFKMHYDYWKEKVERFTAEEVKDSWARRQLVDTQMVSKYAREYLKAYFRKVAVQKGGVTAEFRKIYSFQNEGKTKDRNRHTHHAIDAAVLTLIPVNSSYRERILKEYFKAKEDLQPAQNRVPFKGFDAQTIIQNIETNTLIVNYEKEKILKQTFKNVRKRGKLQYLKNKQGKFKLDENNNKIPLKAKGDTVRSELYAQTYLGKIKDVERYEDGQPKRKGSSWEYKTGKDEFIFVKREPIDKVKVSDKLIEAIIDPAIKKLVKEQKGKAEIKDYQGKLIRHVRVRTNAGKEVKERVNYTSKYDYKNKFYSESGSLPYAVLLQNNNNERSMIPIASFELAKAYKKHGSFVIDEYLKKYDKENNTNYAEYPNKLLLKVGQKVIVLKEDAEYDKRKDIDFQTKRLYVITQFKYDGSKIMLLYHLEAQAKSDIDKQVKTIKDSILKMEEIKLKIPRIEEDSSITESKSRKVDFEKRLYDFTTRLKLIEQISDIATVQRLKTKIEEYKTESSAIIIEGETPILGLTKNNWNFLFEGEDFEVSLLGEMKWIKELDQNIPGKIPSVKKNSFNEIKEKEDILSEPEGIVSKSSLKKFGTFEDATESDAKMKASITPEQHLSNVTKRIIEIYANELKKPMNKNIHFRND

SEQ ID NO: 23217 - protein, 1397 aa, unidentified
  REGION 1..1397: note = Cas Enzyme sequence
MKKILGLDLGTNSIGWALVNEAENENEKSSITKLGVRVNPLTVDELTNFEKGKSITTNADRTLKRSMRRNLQRYKLRKENLIEILKEYGFITDHTTLSENGNKTTFETYRYRAKAASEEVSLEHLARILLMINTKRGYKSSRKAKSSDEGQLIDGMGIAKKLYDEGITPSQLVYQLLKDGKKFIPDFYRSDLQTEYDKLWEFQKQFHQEILTEEFKKQISGKGKVNTTKIFLAKYGIYTADNKSGDKRLQAYKWRVDGLSKELSKEELAFVISDLTGTISNSSGYLGAISDRSKELFFNKQTVGQNLMQQLDLNPHTSLKNQVFYRQDYLDEFNTIWETQAKYHKELTSDLKGEIRDVIIFFQRRLKSQKGLISFCEFESRQIELVIEGTKKVKTAGSKVCPKSSPLFQEFKIWQILNNIQIKNKSGIERPLTEEEKNCLFIELSIKDKITKNEALKLINKSLKEYDLNFESIDGNRTQCTLFKVYQNIIELSGHNGSDFSKMYAKERIETIKTIFSGLGYSTDILQFNSDLDGTEFEKQPMYQLWHLLYSFEGDDSNSGNEKLINKLSELYGFEREYSKMLANVSFQPDYGSLSTKAIRKILPYLKDGFAYAGRAEYPDELSACEYAGYRHSKSSLTREELENKVLKDKLDILPKNSLRNPVVEKILNQMINVVNTIIDEYSEKDNNGNIIKLFKPDEIRIELARELKKSAKEREEATKSISDATAEHEKHRITLKTEFGLTNVSRNDIIRFKLYLELKDNGFHTLYSDTYISPTKLFSKEFDIEHIIPQSRLFDDSFSNKTIEKRDANIEKANETAYDYISKKSGDDGIAIYLKKIEDLFKTGKISKGKYNKLKMKGEDIPSDFINRDLRDTQYIAKKAKSILEELVKDVVSTTGSITNRLRQDWQLVDVMQELNWDKYDKLGLTEIIENREGHKIKRIKDWTKRNDHRHHAMDALTIAFTKRSHIQYLNNLNARSDKTDSDKPDSIYGIEIKELERNDKGKLRFKSPIPLTEFRAEAKKHLENTLISIKAKNKVTTININTTDKKNGVNIKKQLTPRGQLHLETVYGSIKQYVTKEEKVNASFTEEQILTVAKKSFRKALMNRLKEFDNDAKKAFTGKNTLDKNPIYLDVENTQKVPEKVKTVTTETVYTIRKDISPDLKLDKVIDAKIRSILEARLNEFNGDNKKAFSNLDEFPIWLNKEKGIAIKRVTITGISNAEALHVKKDKEGKIILDKNGNQQPVDFVNTGNNHHVAIYKDENGTLQENVVSFFEATTRVNQGLSVIDKDYNNQDGWEFLFSMKQNEYFVFPNEKTGFNPSEIDLLDSENYHLISPNLFRVQKFTIKDYFFRHHLETSVENNNSLKGVTWLRIGLNGVNDIVKVRVNHIGQIVSIGEC

SEQ ID NO: 23218 - protein, 1387 aa, unidentified
  REGION 1..1387: note = Cas Enzyme sequence
MKKVLGLDLGTSSIGWAVVNQAEKEDEKSSIVKLGVRVNPLTVDEKGNFEKGKSITTTADRTLKRGMRRNLQRYKQRRDKLKSILIENNIISKDCTLTEDGANSTYQTLELRAKAAKEEVTLEELARVFLIINKKRGYKSNRKANNEEDGVLIDGMAVARELYNKGITPGEYVYELLKSQKRYKPSFYRSDLQAELQTVWNKQADYYPTLLDNETRRKIEGKGKTETRKFFYAAHKISAAEEKDRKLRQVTYYQWRARAATSRIEPEQLVTVLSEINGDIAASSGYLGAIGDHSKELEIKKMTVGEYLLDLIKRNRHHSLKNIVFYRNDYIHEFNTIWNTQAKYHKELTPELKEKIEAETIFFQRRLKSQKGLISICELEGREISLACGKKVMTGPRVCPKSSPLYQEFKIWQDLNNLILENKTVKKSRKKSDALPSLFASTEPEKFSPLSQEQKQRLYRELYCTRELSAKEVLKVLELSDKDYALNYKKLQGNITQVTLLNAYKNIIEMTGHDVDKFDKMDAASKLHLVKAVFETLGAKGDFLTFEPGNSACEMQQYAMFKLWHLLYSYEDDNTPTGNGKLIDHIAELTGLPHEYAAALAQVTFVQDFGSLSTKAIRKILPHMKNEGMHYSDACQAAGYNHSKQSITKEEKGNRVLATHLELLPKNSLRNPVVEKILNQMIHVVNGCIDEYGAFDEIHIEMARWLKQSQKQREEASKHLNAKTREAESIKKLLAQPPFNIAKPSRNDVLRYQLYEELAPNGYKTLYSGTYISKEKLFTRDFDIEHIIPQAKVFDDSYSNKTLESRAVNIEKGSMTAIDYVRLKCGEEGVEDYKKRIAFLNKEGSRKKHKNLITEEDKIENSFLNRDLSDTQYIARKAKELLLQVTRDVIATTGSITARLREDWQLVDVMKELNWDKYSKLGLTTVERNRDGHEVRRITDWTKRNDHRHHAMDALTIAFTRHSQIQYLNNLSAKDEGENKDSSIYAIEKKELTKNGRFVPPMPLDEFRAQALKHLGNILVSIKAKNKVTTRNVNKPKGASISQVTLTPRDKIHDETIYGRIARYKKTLVEIDGSFDEHKISCVCNPTYRNTLLQILKQNGNDAVVAFTGENSPSKKPIYVDRNKGILMPDKIEISTLVYFFTKRVPVNAKLNVNDVVDEKIKRVLNQRIKDFGSKEKAFSDLEKNPIWLNKEHGISIKRVTVLTTIKGAVPIRNKKDKYGNTVFVDNKPIPSDFVEQKNNHHIAIFKDVDGKLHERTVSFSDALKNKMKNNMVVDKNYNKEKGWEFCFTLKKNEYFVFPNEKESFIPSEIDLIDPSNYCLISPYLYKVRSISSNDYIFTHHLETTINNDEKLKNITWRRIRNANGLKGVVKVSINHIGQIVKVGEYQ

SEQ ID NO: 23219 - protein, 1493 aa, unidentified
  REGION 1..1493: note = Cas Enzyme sequence
MSKILGLDLGTNSIGWCLVDDTDKKIIKAGSRIIPMDAAAMSDYERGNLQSQASVRTGFRGTRRLYQRAELRRERLLRVLHVLGWLPKHFDERIDWVEHPGQFKDKGEPLLPYRKGSDGKNDFIFNDSFQEMLDDFNEHHPELLTNGRRVPYDWTIYYLRDKALRQPIRRDELAWILLNFNTKRGYYQLRGKDEFVTEDEPKDKREEYARLRVKEVNFLEPDQKKKGYNWYNIVYEGDITQRAHSINEPHSVGDEVELIITTKLDKNGGVKLSKEGLPMITVRSPKEDDWQLMKKRSENAITKSGFTVGSYIYKAILADPAIKVRGKLVRVIERDFYRKELIAILSKQMEFIPELASKDAMAKCVAELYHNNEAHVASLADKTLASLFVDDIIFYQRPLKSKKSEIANCPLEHYHYINRDTGEIVEKPIKCIPKSHPLFQEFRLWQFVRNVSILQREKYINGKLRTDVDVTGDFITSPEDMAWLFGELNELGSIRQKSFLGLFGLKPDQYRWNYPEDKELPCNETHHDIVAALHKTAGEPTLTYEQELKLWHILYSVDDIIELRKALARFAGAAGIDTVSFVDSFLHFKSYESDFGAYSERAISRLLPLMRVGKYWSADRIDAKTRQRIDKLITGIDDETIAKQVRENAIALTSVEDFQGLPLWLASYVVYNRHSEAIDTTVWKSPKDIDYYLKFNFRNHALRNPIVEKILGEMLRVVRDIWDAFGKIDEVHVEMGRDLKSPAKKRAAESLRMADNERTNMRIRVLLQEFVNPEYNISNVRPMSPSQHEILKIYEDYALTNGEEVPDDIETIKDAIGNTSKPVAKSDIMRYRLWLEQRYRSPYTGDIIPLSKLFTPAYEIEHVIPQARYFDNSLSNKVICESEVNKLKDCMLGYEFILNKGGSVIKGSFGKEIHIFTKTEYEEFVRENYRKNPIKMRKLLSEDIPKSFIQRQMNDTRYIARKTIELLSHLVREEGEKEATSKNVIVTSGSITDRLKKEWGLNDVWNDIVAPRFERLNTITGSSDFGEWVNMDGKRFFRTNVPLAISLGFSKKRIDHRHHAMDAMVIACTTRNHVNYLNNSSAAEKNEDHRFDLRNKLCYKDKALGSDNYTWRFVKPWDNFTADAKRELQSIIVSFKQNLRVVTRTTNSYWHYENGRKVLAKQKDGDGWAVRKSLHQATVFGAVRLQEKKKVRLADALLVPNLICDEEVRKVVSRAIGMYKCFDQKTILKYIKDNFANKVNGQDIRKVEIWHIPEQPTMSATRVSLDDSFDKKKIESVSDSGIRKILLAHLGNYNGDSKAAFSPEGIAAMNRDIKVLNGGRDHKPILKVRKTETLGEKFPVGYVGSKGTKFVVADKGTNLFFAIYINEEGKRSFESIPFRVAVERRKAGLPVAPERNGKNEKLLFVLSPNDLVYVPEEGEHVDSHLNLKRIYKMVSCSGNRCCFVPERVAFPILDGKEFGSHNKVEIALSGENIKVVCKKIIVNRLGLIKKIEQ

SEQ ID NO: 23220 - protein, 1559 aa, unidentified
  REGION 1..1559: note = Cas Enzyme sequence
MKKILGLDLGTNSIGWAVVNANETARENDTTYLKPVGISSAGSRIIPMSADILGDFDKGNSISQTAERTKQRMIRRLRERNLLRRERLLRVLSLMDFLPEHYANKINRYGKFMDDSEPKLPWRMGPGGKTEFLFQESFQEMLAEFSQCQPELIAGGRKVPYDWTVYYLRKKALTQRITKEELAWILLQFNQKRGYYQLRGEEEEEDTSKKVEFLSQKVIRVEDTGERKGDDLWYNVYLENGMIYQRPSRFPLDWEGKTKEFIVTTDLEKDGSPKRNKYGEIKRSFRAPKEDDWTLLKKKTEYDIEQSNKTVGCYIYDALLQNPSQKIIGKLVRTVERKFYKEELRKILEVQQELIPELRDSNLYQRCIEELYPSNEAHRSIISKPDFVRLLVDDILFYQRPLKSKKSLIDNCPYESRFDKEGNMHPVKCIAKSNPLFQEFRLWQFVQNLRIYQREKTVSDGQLDLFSNVPTGKLQTDVDVTAEILKSEEDYVKLFNWLNDRGTIKQDTLLNSYFKIKKEKGKDRYPYRWNYVEDKEYPCNETRATILSGLAKCNVSTDFLTRENEMALWHILYSIEDKTEINKALSSFAGKHNLAANFTEVFSKTKPFKKDYGSYSEKAIKKLLPLMRMGSYWNETAFDANTHDRIEKIITGEYDERIKNRVREKAISLTDISHFRGLPVWLACYIVYNRHSEAKEIEKWKKPEDIDQYLKTFKQHSLRNPIVEQVITETLRTVRDIWKQEGQIDEIHLELGREMKNPADKRRQMTERIQQNENTNLRIKAMLMEFMNPEMGIENVRPYSPSQQDILRIYEENALDNLSRDDKEYDFVSKVSKMAQPSKSDIIRYKCWLEQKYQSPYTGKMIPLSKLFTPAYEIEHVIPQSRYFDDSFSNKVICESEVNKLKDRQLGYEFIKNHAGEIVQLSQGGTVQIQSVEAYEKFVKDYYANNRTKMKKLLMDDIPDGFIERQMNDSRYISKVVKGLLSNIVREKQANGEYEEEAVSKNLISCNGSITDRLKKDWGMNDVWNSIVLPRFQRLNQLTGKDCFTTLNREGHEIPNMPLELLKGFNKKRIDHRHHAMDAIVIACATREHVNLLNNEAAHSKHNANRYQLQRRLRRFETVTINGKEREIAQEFLKPWDTFATDAWQTLSNIIVSFKQNLRVINKTINHYQHYDAKGRKGFDKQHHGDSWAVRKSMHKDTVFGEVNLRMKKTVSLNEAVKKPENIVNKEFKKKVRELLTNGYDAKFIKKYIEDNKDIWSDINLSKIEVYYFTKDEKKRNGEPKERYFATRKPLDTSFDQKKIKESVTDTGIQQILLAHLASKENNPEQAFSPDGIDEMNRNIVALNNGKFHQPILKVRVYEKAEKFAVGQTGNKGKKFVEAAKGTNLFFAFFETERENKVSNRKEAVRSYMTIPLNVMIDCQKKYGARWRNNIEAFLKDKDIVETEAKLLFILSPNDLVYLPTKDELQNGILSIDKQRIYKFIDPAQNKGNFIPYPVASVIFSTKFSDQRKQGTSYPIQDEFGLGSQGSKSPRATTGEMIKETCIPIKVDRLGNILKIGYE

SEQ ID NO: 23221 - protein, 1338 aa, unidentified
  REGION 1..1338: note = Cas Enzyme sequence
KSEILRLGVRVNPLTVDEQSNFEKGKSITTNAERQMKHSARINLQRYKLRREHLIDYLTKAGFINEETLLCEHGNRTTFETYRLRAKAANEEIGLTEFARVLLMINKKRGYKSNRKANGSEEGALIDGMEVAKYLYENDITPGQYAYDLLKKGKKYLPDFYQSDIKDELDKIWNFQKTFYPDILTDDFKQVLTGKSKTNSSKIFLARYSIYTAQNKEKDKRMQAMKWRSDALIRKLDIEQLAYVICDLNGFINNASDYLGKISDRSKELYFQNLTVGQYQMKMLEENPNVSLKNMVFYRQDYLDEFERIWETQAKFHPELTRERKKEIGNMIIFYQRPLKSKKSLISICELEGKTIEIEVEGKKKTITVGSKVCPKSSPLFQEFRIWQRLNDIKLTHLPTRQEYFLSQGQKELLAKELEYKTKMTKQQMLKYLSLKPKEYDMNFKEVDGNTTQAVLFDAYRKIIEISGHGEHDFSKMPANDITTLVENVFDALGFNTNPLHFDAQAADISQDSMYLLWHLLYSYESDNSAMGNETLIHKIQKLFHFDSDEYAKILAGISFKPEYGSLSAKAIKKILPFMKEGNDYSTACVYAGYNHSKRSLTKEELDNKQLKDHLDILSKNSLRNPVVEKILNQMVNVVNSLIDTYGKPDEIRIELARELKKSAKEREAMTDAINTANRENEEYKKILETEFGITHVSRNDILRYKLYLELKDNGFHTLYSDTYIPREKLFSRDFDIEHIIPQANLFDDSFSNKTLESRSINIEKSNSTAYDYVKGKYGEEGAKTYEKRVEDLFKSGKISKTKMTKLLMTADDIPTDFINRDLRDSQYIARKAREILEDIVRVVVPTTGSITDRLREDWQLVDVMKELNWDKYDQLDLTETFEDKEGNTIRRIKDWTKRNDHRHHAMDALTIAFTKPSFIQYLNNLNARGDRSQSIYGIEHKELYRDKHNKLRFNPPIPLDEFRSEAKRHLQNILVSIKAKNKVVTRNINKSKSKQGFNTKVQLTPRGQLHNETIYGSQQRYATHEEKVGASFTADKIATVANKKQREALLARLQAYNNDAKKAFTGKNALDKNPVWLNEAYTASVPLKVMCLTMETIYTIRKPINKDLKLDKVVDARIRQILQQRLDEYNGDANKAFSNLDETPIWLNQEKGIAIKRVAINAGLSNPEPIHEKKDKQGNNIPVDFVQTSNNHHVAIFVDEQGHLQEHIVSFYEANSRAIQKLPVIEKDYNAELGWKFLFTLKQNEYFVFPDIENGFNPKEIDLTNVENYTIISPHLYRVQKISSKDYFFRHHLETTVENNNALKEITWKRIKALDKLANIVKVRVNHIGQIVAVGEY

SEQ ID NO: 23222 - protein, 1039 aa, unidentified
  REGION 1..1039: note = Cas Enzyme sequence
IVIAKKDGEHSHRINLFRNRDTLKGNETLARYNSLFRKAGYDGTSILNDNDKLLRLWHIDYSITSSDEKLAEKWISSALSKLLPDIDNKNLAIEMFCKLPELKKEYGSFSACAIKKLLPVMRSGKYWNEDGLNSATKDRIEKIVHGEFDENIDNDTRKKIRKWELENRSLEKIEDFHGLPTWFAGYVVYGIHSEREISKINSVEDFSRFIQKAIPNNSLRNPIVEQVVREAMLLVRDVWKRYGDIDEIHIELGRNLKNNSDERKKIADAQKENFDEKQRIKNLLYELMNDGFDQYNIDEKIEHVNFEVNPNPESPADIDKFRIWRSLTNKTDIDWAKKVKEEKIPTEKEIKKYALWLSQNCRSPYTGKLIPLSKLFDINQYEIEHVIPRARMKNDSFNNLVISEWGVNKAKGKQLAANFIGSSNGKCKYGDQEYSLFSYQEYESYCKETFKFQRGKLKNLLATEVPDDFVERQLNDTRYIGRKLTELLAPVAKGENGIIFTGGSITAELRNNWGLNRIWKEIILPRFERLEEITGKKGEYIIHDHDEFGNPVIHFNVKENQKLNTKRIDHRHHALDALIIAATTREHIRYLNTLNAADTTEELSAIKRSLVKGKIRDFKLPWEHFTLHAKNKLEEIIVSFKTNNKIISQPKNKTAYFKKTEGKIKKEYKWQHSNPKWMAVRKSMFKEPQGIIHLKEVYEEKNILKAIEIQIDRMLVQNKPEMRITPYVYDQEARRIIKDLIERIGIPIQEKQTLMKEVKKHLSKNPLKDISGKDFESIKVAIFEEYAAKRVSLDKSFDHKKIDKIPYSKTGKSVLGRLLHEHLDSAEYKNDKGNADPSLAFSTEGLEVLAKKAGRPITKVTIYEKKDESSKFGKQYVEVDAGSNALFVMYENKITKERTDFRSIATHKAIEKIVKGDEIAEDKEGFEKTILSPGDLVYVPTKEEYETLKEGTKIENAIPWGNKKNALNRIYKVVSFSGKDLLCIKAEISDYIIPYNRKEKNKGEIGWDNKSATTMEGDVTIKDVCIKIKVNRIGILSIS

SEQ ID NO: 23223 - protein, 1436 aa, unidentified
  REGION 1..1436: note = Cas Enzyme sequence
MKKILGLDLGTSSIGWALVNEAENEGEKSEIIKLGVRVNPLTVDELLNFEKGKSITTNADRTLKRSMRRNLQRYKLRRENLISILKDNNLITHESILTENGNRTTFETYRLRAKAATEEITLEQFARVLLMINKKRGYKSSRKAKGSEEGTLIDGMEVAKILYNEHLTPGQYCLQQIKNGKKYLPDFYRSDLQQEFDKIFEKQMTFYPELLTKDLQRELRGKKRDAVWAICSKSFKEKGFELVGIKRQGNSAEQKLENFVWRDKGLSEKLDLEQLVVVLQQINIQVNSSSGYLGSISDRSKELFFNQIAKSDGSTRAQTVGEYQMAILKNNPNASLRNMVFYRQDYLDEFNTIWEKQAEYHKELTEELKREIRDVVIFYQRPLKSQKSLISFCEFESRKVEITVDGKKKIRTIGSRVIPRSSPLFQEFKIWQILNNIEVYGKGRKNRKQQEPSLLNISEDPLKNSGKRKLYQEEKELLAAELTIIKELKKADVLKLLFDNHKELDMNFNSIQGNSTQAALFDAYKQIIELSGHEVDYEKKSANEIIKAVEEIFSGLGFNTDILYFNSDKPLDEQPMYKLWHLLYSFEGDSSKTGNENLINKIKELYGFDRESAKILANVTFQDDYGSLSARAIYKILPRMKQGEDYATACAYIYNKHSKNSLTKEELEKKVYKDKLEILPKNSLRNPVVEKILNQMINVINSIIDNYGKPDEIRIELARELKKSAKEREELTKSIAETTKLHEQYKSILSKPPFNLQYISHNDIVRYKLYEELKENGYKTLYSNTYISPTTVFSGDFDVEHIIPQSRLFDDSFSNKTLELKSINIEKGNKTAYDFIKEKYGETGSENCLDVYLIRIEDLRKKGVISKTKYNKLKMQEKDIPDGFINRDLANSQYIAKYAKTMLGELVKFVVSTTGSITDRLREDWQLVDVMKELNWEKYKSLGLTEEITNGEGQRIRKIKDWTKRNDHRHHAMDALTVAFTKRQYIQYLNNLNARRVSDYQGISNAEKEEHDNFSIAAEDVILNTRDVLGIEKKYLYRDDKNKLRFKPPIPLDEFRAEAKHQLENTLISIKAKNKVTTRNINITKKKGGVNKKEQLTPRGQLHNETVYGSHKEYVVKEETVSAKFNSEKIALVANPEYRKALAERLQQFGNDPKKAFTGSNALSKKPIWLNELHTKQVPEKVKTVSFETIYTIRKEVSPDLKVDKVVDKKIRQKLETRLKGFEGDAKKAFSSLEENPIWLNEEKGISIKRVTITGVNNVESLHEKRDKYGNYVLDKNGNRQPVDFVSTSNNHHVAIYRDAEGNLQENVVSFFEAVNRRNLGLPVIDKNYKSGDGWKFLFSMKQNEYFVFPNEKTGFNPNEIDLLNPDNYSLISPNLFRVQKMATKDYTLRHHLETNVETNNQLKGITWIRTGLNGLLNIVKVRINHLGQIVSVGEY

SEQ ID NO: 23224 - protein, 1255 aa, unidentified
  REGION 1..1255: note = Cas Enzyme sequence
MPDWKSQKKDIIAIIDLDKNGNDKYDENGELSRRFKIPTEQEWEEQWELIKTKTQKDLDTSHKTVGAYIYDTLLQTPSQKIRGKLIRTIERKYYKDELNQILKKQEEFHPELRDSNLLEACIEELYPNNEAHRNAIAKYSIAQLLIEDILFYQRPLKSKKSLISNCPYEEYTYINKETGEICTSPLKCIAKSHPLFQEFRLWQFISNLRIYQKEGTINGKFTTDIDVTSQFLKTEDAYANLFDWLNQKKEIRQDTFLKNPAFGLKKNTANYRWNYVEDKTYPCNETHYKILSYWEKAGIEQSALTSEIEEKLWHILYSISDKNELRKALQHFADKNYLSDKFADTFQQIPPFEKDYGSYSAKAIKKLLPLMRIGRYWKAENFDSTTLDRIEKILTGEFEENIKNRTREKTIHLDNLYSFQGLPTWLACYIVYNRHSEIKDVTKWQQPSDIDAFLNAFKQHSLHNPIVEQIIMETLRTVRDIWKQTGHIDEIHVELGREMKNPAEKRRKLTQQIQENENTNLRIKALLAEFANPELGIENVRPHSPSQQDLLRIYEEEALNETKDIPEDIAVILKKFNEVDTKKRPSTSDVLRYKCWLEQKYRSPYTGAMIPLGKLFTPAYEIEHVIPQSRYFDDSFTNKVICEAEVNKLKGNMLGYEFIKNNQERIVELGFGQNVKIQTVEAYELFVKEHYSYNRTKMQKLLMEDIPDQFIERQLNDSRYISKLIKSLLSNIVRDEGEEEATSKNVIVCTGSITDRLKKDWGINDVWNKLILPRFIRLNEITESNRFTTTNACNKTIPAMPLDLQKGFNKKRIDHRHHAMDAIVIACANRNIVNYLNNESASKNAKISRQDLRQILCKKTKTDNLGNYQWLIDKPWDTFTQDVYSILGNIIVSFKQNLRIINKTTNHYIHYENGKKVSCSQKQGDSWAIRKPMHKETVYGEINLRRTTTATLKAVLENPQRIIEKDLKKKIKELLTQGLNEKQIKKYFEDNKDIWQEINLKKIPVYYFTKETANRFFACRESINTTFNKKKIEEKVADTGIQQILLRHLEQNGNNPEQAFSPEGIEQMNKNIMSLNNNGKFHQPIYKVRTYEQADKFAVGQTGNKSTKFVEAAKGTNLFFAIYETAHKRSFASIPLNVVIERLKKGLSPAPENEKGNLPKFILSPNDLVYVPTKEEIENGHINQPIQKDRIYKMVSCTEGECHFIPYFVAKPIIQTIELGSNNKAQKTWQDEMIKEICIPIKTDRLGNIITSISL

SEQ ID NO: 23225 - protein, 1333 aa, unidentified
  REGION 1..1333: note = Cas Enzyme sequence
DEKKGDDIWYNVYLENGMIYRRTSRIPLDWEGKTKEFIVTTDLEKDGTPKKDKEGNIKRSFRAPKEDDWTLVKKKTEYDIENSNKTVGYYIYDNLLQNPNQKIIGKLVRTIERKFYKEELRLILEKQKEFIPELRDENLYLECINELYHTNEAHRNNIAKPDFTNLFINDILFYQRPLKSKKSLISDCPYESRFDKDGIEHHVKCIAKSNPLFQEFRLWQFVQNLKIYQREKIVSDGQLDLFGNQNTGKLQTDVDVTAEFLTTEDDYVKLFEWLNDRASIKQDTLLNSYFKIKKAKGQEKYPYRWNYVEDKEYPCNETRNDLLSALDKCGMKKEFLSREMEMKLWHILYSVEDKIEIGKALETFAQKNKLESNFVETFKKIKPFKKEYGSYSEKAIKKLLPLMRMGKYWNSDDIDDNTKKRIEKIMSGEYDETIRNRAREKSINLEEIYHFRGLPTWLACYIVYDRHSEAKEIEKWEKPEDIDNYLKHFKQHSLRNPIVEQVVTETLRTVRDIWKQEGQIDEIHIELGRDMKNPADKRKKMTERIQQNENTNMRIKAMLMEFASPEMEIDNVRPHSPSQQDILRIYEENALDNLSKDDKEYDFISKISKTAQPTKSDIIRYKCWLEQKYHSPYTGEPISLGKLFTSAYEIEHAIPQSRYFDDSFSNKVICEAEVNKLKNRQLGYEFIKNHHGEKVQLSMGKTVEILSVDAYERFVKDNYSSNPPKMKKLLMDDIPDGFIERQLNDSRYISKVVKGLLSNIVREKLANGEYEQEAVSKNLISCNGTITDYLKKDWGINDVWNRIILPRFERMNKITGKDCFTTTTTEGHLIPNMPFELSKGFNKKRIDHRHHAMDAIVIACTTRDHVNLLNNEAAHSKNNANRYQLSRKLRRYEKITINGKEDREVPKEFIKPWDSFTTDVQKSLENIIVSFKQNLRVINKTTNHSEHFEDGKKVLVKQEKGDSWAIRKPMHKDTVFGEVNLRKIKTVSLNEALKMPTNIVNKDFKQKIRELLAEGNDAKFIKKYLEENKDVWSDINLAKVEVYYFSQEEKKKNGEAKERYFATRKNLDTSFDKKTIVESIADTGIQKILLAHLEAKGGDPELAFSPDGIDEMNRNIVSLNNGKFHQPIIKVRKYEKAEKFAVGQKGNKSKKFVEAAKGTNLFFAIFVSEKENKETGEIEKIRSYLTIPFNTMIDCQKKFGTKWNDNIEIYLKEKELVAPNAKLLFILSPNDLVYLPIENDTDIIDKKRIYKFVDSSGTIANFIPARSANIIFSIPTKKQKELGLNYNIQDEYGVGSPQSKNQKSITGEMIKETCVPLKVDRLGNIIEINGKKL

SEQ ID NO: 23226 - protein, 1457 aa, unidentified
  REGION 1..1457: note = Cas Enzyme sequence
MSTIVGFDLGTNSLGVSIRNTSLGDDIKDQLEYYSVDIFDSGVGNGKSGEYSYAAERSKGIRQRRLYDVRRRRRWETLKYLIVYGYCPLSMEDLNAWRTYKKSEGLFREYPINNKAFMNWIRLDFDGDEKMDCTPYELRYDLVNRQFDFTDQTERYRLGRAIFHICQHRGFRSSKGETLSEQASNTDLDLVKEMKLSEQKKSGKLSAFMEENNCKTAGEALHLLERTGMRIRNSEYQVVRSQLKDEITEIFKFQDGLDIQSDFYRHLVSEEKHVGCIFYKNPLRSQKGLIGHCTMEPSKPRCPISHPDFEKYRAFSFIANIKVRRSTSEEWSTLDVDLKKYVYENCFLSYVSADFDFKRIRETLERKLGYPLTYEPNKKGTINYSDNHNVAGCPVSARLKKLLGEDWEIKIIQGKKERNSQSKDAPKRHLVTYTAEDIWHFCFTADEMEGVEHFGKNALVFDDEKTKQLIALWSSIKQGYCMLSRKAIHNITRMLQYGFDNKDAILLAKIPEIIGLDKWERNDNNVRDIITEYNARLKEDYNHERILCNITNTLIANYKALREDHIFAYKDVQYQLQDSDFDDANNAIIDYYGEETWSQMSADEQEPIIAEVRKRYQAFFATSKREFCKNKPLSDFFADFLATRLPNFNNELLKKLYHPSMAEFPIETKGKKDPQDYKLGSPKLGGIKNPVALRTLHVLRKKVNAMLDANMIDPETTRIVIETTREINDANMRWAIEQYQNKRKEENKAIEELLREFFPSGSISNENYDKANSFMTQGRAEDTDEIDSDYLYGDSMMFPFTGKKEKVDADKRRLILKYTLWKQQGGLCLYTGKTISFSSLFDDNKYDIEHTLPRSKSFDDSQANLTVCDYYYNRAIKGNLLPTQLPNYEEDAVINGVTYKAIKPHLTAWERKVENLKERVEYWKAQSRKAQDKGRKDDCIRQRHLWQMELDFWKDKLMRFKMKEIPQGFRHRQIADTGTISRYAVLYLKTIFNNVEVQKGEVTATFRKILGIQSIEEKKDRSLHSHHAIDATVLTMIPVAAQREKMLKLFYEREEAIKGSSDYERLSNELSKEVCNCHFGKTPEVIADLINKNILINIIKKEKVLVPSAKVWRTRGKEVFFKQKDGSARGRKKQGDSIRASLHQDTIYGAIMYPKKDKDTQKPLVQDGHFVYEVNSAPKMVARIDVKKLTSIDLLDNIVDYSLRENIKKQIAMRMEGGKSFNAARDEGLWLLDSNGVEIKKDKYGRAINPIRHIRCFVKAGRGLLTYDKALQLKAHTHVSQKKLVNIPDREYRNIIYVVNENNCVMFLYSAMIRGKLKRTARILNALEVAELKRNNPHLKHLSDIAKEPYYLRITKNNDEYQYYASLTPGIRVLKWEKNYEELFDMTIEDLSRRLFVVKNFDNKGTTEQPKFRIHLQSHLDAEEKLKDYSPRDFDFLIEEVDFKINALGEITFIERL

SEQ ID NO: 23227 - protein, 906 aa, unidentified
  REGION 1..906: note = Cas Enzyme sequence
GKTAGLDMNFKDIDGNETQAKLFEAYLKIIEMTGHEEYDSAKLNASQILDVVEKVFTGLGFNTAPLYFDASIKGKQFDKQPMYQLWHLLYSYEGDNSKTGDNSLIKKIRDIFNFDNDDYAKAIAAVSFKPDYGSLCAKAIRNLLPIMKKGIDYSEACKSEYGTHSKRSLTKEELDQKELKDYLDMLPKNSLRNPVVEKILNQMINVVNEVVTTYGPIDEIRIEMARKLKKSAKERERETNKINTTTAYHEEIKKILQAAPFNIEHVSHNDIIRYKLYEELKENGYKTLYSNKYIPKEKLFSREIDIEHIIPQARLFDDSFSNKTLEWRSINQEKSNATAFDYVRGKYGEAGAKEYKQRVDELRKQEVISKVKHAYLLMSVEDIPSNILNRELNDTQYIARKAREILEQIVKIVVPTTGKITKRLREDWQLVNVMQELNYPKYEKLGLSETFEKEWTKRNDHRHHAMDALTIAFTKQSIIQYLNNLNARSDKSSSIYGIEQNELYRDKHGSLRFLPPIPLDEFRSEAKLHLEQILVSIKSKTKVVTRNANKSKSKKAGKGYNKRVQLTPRGQLHNETIYGSSQRYVTKEEKVGSSFDVEKISTVTNKTYREALQHRLEAYNGDVKKAFTGKNSLEKTPIWLDDLHTRAVPIKVKCATMDTIYTIRKPISKDLRIDKVIDKHIQDILRARLEEYGGDANKAFSNLDENPIWLNEEKGIRIKSVAINAGLSKPEAIHEKRDHCGQLIFNEKGNKQAADFVQTANNHHVAIFRDAEGKLQEHIVSFYEATMRANQGWPIVDKEYNQAEGWEFLFTMKQNEYFVFPDKDFCPSEYDLMNPANYAFISPHLFRVQKLATKDYFFRHHLETTVEDKNELRNMTWKRIRNCDGLKGIVKVRVNHIGQIVAVGEY

SEQ ID NO: 23228 - protein, 1120 aa, unidentified
  REGION 1..1120: note = Cas Enzyme sequence
INTSPFSVSYSSVLGLPFIMRQQDQGNAMSRTLGLDLGTNSIGWAIIEDGKQIVKSGVRIFPVGVKEEDFLKNGSEVSKNIGRRITRGSRRRKFRYKLRRKRLEAILKEYGMLPTGEDFFSTRELYELRVVGLDSQLTLPEFGRILLMLNKRRGFKSNRKTLSTEEAKKEEGKVKADISKLQNMMDEKQCRTVGEYFALLFRQTDSIPDWHSKDTPIEHIRRRFVGREMYIKEFEELWNKQATFYSSILTPALRTKIRDEIIYYQRNLKSQKGLVGRCRFEPNKRCTQRSSLLFQEFRIWQQLSSLRFASGQHAGKELTNEQKRAVFNFLMKQAFGQSTLVQERLQKKLKKELGLAKEDTFNDVPLIGNTTQARFIEAFGEEMFDSLTQEQRFEFWHILTYTDNSEKLKTIVRKKIEQGILPAFSEELLCNYSEINLEQGYCSFSSKALKKILPFLREGMIPYDAFIKAGYNPTRKAGKQGTEEITKIPPLAPNELRNPIVQQMLSETFRVVNAIVKEYGKPDMIRVEMARELKKPKTKREEARNKSIQKRKQREEHAVFLSAYLGHTIEPNDPEVRKYELWLEMGCEDTSMDDLDSFLRHGRVSDIKKYRLWLECNRISVYSGQPISLTRLFNSDVEIEHILPYSKTMNNEFTNLCLCEREINLEKGKRLPCDYFASKGEKELQKFKDRVSRLNNEAKQRRFLAKEIPDDFLNSQIVNTSYAARELHARLEILLPPVPDGEQQHLRVQVVNGQATATLRRLWGLNSILSKGDIDTKNRGDHRHHAIDAIVIACTTPSLLHTLATYSKFSELNKLTNDHIEQPWNGFLTNSGNSINSIIVSYRNQKRLVGKKPNKIKVKNLEKYPNGYFKQSAVTIRGSLHEETYYGLVNRDDEQVYVTRWSLQKFTKEDQLDKVLDDKVREVLKERVKRFGGDLKKAFSENPDDPVYMYSLNGSKIPIKKVRIVNPSENLVEVRPNVFVESGNNYCIAIYGDMETGKFDFETVPFWYAVQKTLIKETLVPPFKNGKPFLFTLTQRDIVVRYKNHPDEIEWNNIEYLRDNIFRVRKFDVVGQIFLDYLYASKIDKTNDRNKLFYQVSPNSLNCVKVEIDIIGNITKKEGI

SEQ ID NO: 23229 - protein, 1082 aa, unidentified
  REGION 1..1082: note = Cas Enzyme sequence
RNELLKNDLHYLLKNDIIYYQRDLKSQKHLIADCRYEKKMDNNGNIYGVKVAHKSSPVFQEFRIWQDIQSLKIFRLEQIESNGKIKFDVDETKIYLTQDKVERLFTLFDKKNNLTQKEIFKELSDEKHKLSETTHRLNYPKEKIFKGNETKSFFRKVFKKHNYEIQGEQILNDKSKFELLWHIFYSLPDEKSIVSALTRNFSFPNDLARHIAKLPEFKSEFASYSSKAIKKLLSLMRTGSYWKMEDISQQIKERIEKIITGEYDENISIAVRNKIVDWQIHNKKLNSIECFNGLPLWLAAYVVYGRHSERENSDKFESFDEIKLINQNTLRNPIVEQITNETLQVVKEIWKNYGRPEEIHIELARDLKRNAEERKKINDQIFKNQTDRKRVVAILKELKNANSDSPSDIERLRLWEETGNREAKDSFPKFSKEPTKQEIEKYLLWGEQNHISPYTGNIIPLSKLFTPEYEIEHIIPKSRFFDDSFGNKTISEASVNSFKDNNTAMQMINEHGGREIEHRGKRFKLLSVDEYKQHIKSTFYGKWKKVNYFLREDIPEDFITRQINDTRYISRKLGELLYPVADDEVVFTIGSITSELKDKWGLNRVWKEILRPRFERLEKITGEKLINLDKEHNDIHFKKDYKRVDHRHHALDALIIAATSREHIRYLNSLNAASEKDKLNRKYKLVKSKIREFNLPWDTFTKDVKDTLKQIIVSHKNRTRVVTKGFNLYTKWVLDNGTWIKKMVRQDNNSLFSVRKSLFKEPLGKINLAEYKDVNVKKAVEVQFNYLTKYTSKLQPRISNKYLRNYINKLIKNCEFDLSATLKYIKDNPIKDNDGKVLPKIQILEFSEYAAKRVTLDKTFDIKKIEKIPYSSHNNNRLVKILREHLNENGNNPAEAFSGEGLDVLAKKYGKPITKVTTFEEIGSKFSLGGKLVEADKGSNVFFVIYENTNDRNDRIITSESSLPLLNVIECISNNLPIVQDKPGYKTIILSPNDLVYVPEADENINSIDWTVKQNISDRIYKVVSFSGARIYFIPHFVSSPLIETTELGHNNKAEKTWDGIMIKNVCIKINIDRLGNIKLAI

SEQ ID NO: 23230 - protein, 1536 aa, unidentified
  REGION 1..1536: note = Cas Enzyme sequence
LIIYFIFEKIVNTILVMKKIVGLDLGTNSIGWALINAYIDEYNKEHLYGIEACGSRIIPMDAAILGNFDKGNSISQTADRTSYRGIRRLRERHLLRRERLHRILDLLGFLPKHYSDSLNRYGKFLNDIECKLPWVKDETGSYKFIFQESFKEMLANFTEHHPILIANNKKVPYDWTIYYLRKKALTQKISKEELAWILLNFNQKRGYYQLRGEEEETPNKLVEYYSLKVEKVEDSGERKGKDTWYNVHLENGMIYRRTSNIPLDWEGKTKEFIVTTDLEADGSPKKDKEGNIKRSFRAPKDDDWTLIKKKTEADIDKIKMTVGAYIYDTLLQKPDQKIRGKLVRTIERKYYKNELYQILKTQSEFHEELRDKQLYIACLNELYPNNEPRRNSISTRDFCHLFIEDIIFYQRPLKSKKSLIDNCPYEENRYIDKESGEIKHASIKCIAKSHPLYQEFRLWQFIVNLRIYRKETDVDVTQELLPTEADYVTLFEWLNEKKEIDQKAFFKSPPFGFKKTTSNYRWNYVEDKPYPCNETHAQIIARLGKAHIPKAFLSKEKEETLWHILYSIEDKQEIEKALHSFANKNNLSEEFIEQFKNFPPFKKEYGSYSAKAIKKLLPLMRMGKYWSIENIDNGTRIRINKIIDGEYDENIRERVRQKAINLTDITHFRALPLWLACYLVYDRHSEVKDIVKWKTPKDIDLYLKSFKQHSLRNPIVEQVITETLRTVRDIWQQVGHIDEIHIELGREMKNPADKRARMSQQMIKNENTNLRIKALLTEFLNPEFGIENVRPYSPSQQDLLRIYEEGVLNSILELPEDIGIILGKFNQTDTLKRPTRSEILRYKLWLEQKYRSPYTGEMIPLSKLFTPAYEIEHIIPQSRYFDDSLSNKVICESEINKLKDRSLGYEFIKNHHGEKVELAFDKPVEVLSVEAYEKLVHESYSHNRSKMKKLLMEDIPDQFIERQLNDSRYISKVVKSLLSNIVREENEQEAISKNVIPCTGGITDRLKKDWGINDVWNKIVLPRFIRLNELTESTRFTSINTNNTMIPSMPLELQKGFNKKRIDHRHHAMDAIIIACANRNIVNYLNNVSASKNTKITRRDLQTLLCHKDKTDNNGNYKWVIDKPWETFTQDTLTALQKITVSFKQNLRVINKTTNHYQHYENGKKIVSNQSKGDSWAIRKSMHKETVHGEVNLRMIKTVSFNEALKKPQAIVEMDLKKKILAMLELGYDTKRIKNYFEENKDTWQDINPPKIKVYYFTKETKDRYFAVRKPIDTSFDKKKIKESITDTGIQQIMLRHLETKDNDPTLAFSPDGIDEMNRNILILNKGKKHQPIYKVRVYEKAEKFTVGQKGNKRTKFVEAAKGTNLFFAIYETEEIDKDTKKVIRKRSYSTIPLNVVIERQKQGLSSAPEDENGNLPKYILSPNDLVYVPTQEEINKGEVVMPIDRDRIYKMVDSSGITANFIPASTANLIFALPKATAEIYCNGENCIQNEYGIGSPQSKNQKAITGEMVKEICFPIKVDRLGNIIQVGLCILTN

SEQ ID NO: 23231 - protein, 944 aa, unidentified
  REGION 1..944: note = Cas Enzyme sequence
  REGION 423..426: note = misc_feature - Xaa can be any naturally occurring amino acid
VNGISSEDAEWIDTEIKNGTLLPKQTKRDNSVIPHQLQLREFELILDNMQEMYPFLKENREKLLKIFNFVIPYYVGPLKGVVRKGESTNWMVPKKDGVIHPWNFDEMVDKEASAECFISRMTGNCSYLFNEKVLPKNSLLYETFEVLNELNPLKINGEPISVELKQRIYEQLFLTGKKVTKKSLTKYLIKNGYDKDIELSGIDNEFHSNLKSHIDFEDYDNLSDEEVEQIILRITVFEDKQLLKDYLNREFVKLSEDERKQICSLSYKGWGNLSEMLLNGITVTDSNGVEVSVMDMLWNTNLNLMQILSKKYGYKAEIEHYNKEHEKTIYNREDLMDYLNIPPAQRRKVNQLITIVKSLKKTYGVPNKIFFKISREHQDDPKRTSSRKEQLKYLYKSLKSEDEKHLMKELDELNDHELSNDKXXXXYFLQKGRCIYSGKKLNLSRLRKSNYQNDIDYIYPLSAINDRSMNNKVLTGIQENRADKYTYFPVDSEIQKKMKGFWMELVLQGFMTKEKYFRLSRENDFSKSELVSFIEREISDNQQSGRMIASVLQYYFPESKIVFVKEKLISSFKRDFHLISSYGHNHLQAAKDAYITIVVGNVYHTKFTMDPAIYFKNHKRKDYDLNRLFLENISRDGQIAWESGPYGSIQTVRKEYAQNHIAVTKRVVEVKGGLFKQMPLKKGHGEYPLKTNDPRFGNIAQYGGYTNVTGSYFVLVESMEKGKKRISLEYVPVYLHERLEDDPGHKLLKEYLVDHRKLNHPKILLAKVRKNSLLKIDGFYYRLNGRSGNALILTNAVELIMDDWQTKTANKISGYMKRRAIDKKARVYQNEFHIQELEQLYDFYLDKLENGVYKNRKNNQAELIHNEKEQFMELKTEDQCVLLTEIKKLFVCSPMQADLTLIGGSKHTGMIAMSSNVTKADFAVIAEDPLGLRNKVIYSHKGEK

SEQ ID NO: 23232 - protein, 1504 aa, unidentified; identical to SEQ ID NO: 22884
  REGION 1..1504: note = Cas Enzyme sequence

SEQ ID NO: 23233 - protein, 1527 aa, unidentified
  REGION 1..1527: note = Cas Enzyme sequence
MLVLIKKITLNSVLKNNIMKTILGLDLGSNSIGWAVINSVIEKQSERIWIKMAGSRIIPMDSAVLGDFDKGSSISQTAERTHFRGVRRLRERQLLRRERLHRVLKILGFLPEHYLKEIDFEKHPGQFLTNCEPKLPWLMDERGKYTFLFQAAFNEMLADFAKHQPSLVSDGKKVPYDWTIYYLRKKALTEMISKEELAWILLNFNQKRGYYQLRGEEEEDAAGKSVEFYALKVLSVEATDEKKGRDIWYNVHLENGWIYRRSSNVPLDWENQVKEFIVTTDLNPDGTPKLDKYGEVKRSFRVPKEDDWMLIKKRTEADIANTRKTVGSYIYDTLLQKPQQKIIGKLVKTVERKLYKEELNLILQKQCAFHAELRDRDLYMRCIEALYPGNEMRRKNIVNRDFIYLLIDDILFYQRPLKTKKTLISNCPYEENEYVNRETGEIKKAPLKCIAKSHPLFQEFRLWHFLSNIRVYQKEKKVNGTLHLDVDVTAEFLRTEDDYVALFDWLNSRKEIDQKAFLKYPKFGLKKEIDNYRWNYVEDKLYPCNETRYAILSRLEKVGVSIDFLSDEKETVLWHILYSVSDKQEIEKALRTFAVKNGLNESFVEVFKKFPPFKSEYGAYSAKAIKKLLPLMRCGKYWDTSLIDDATRDRIERIITGEYDRNIAAKVREKAINLSDIYCFKRLPLWLACYVVYNRHSENKEIAKWETPADIDAYLASFKQHSLRNPIVEQVITETLRVVRDIWKQVGKIDEIHIELGREMKSPADKRKRMTAQIQENEKANLRIKTLLVEFMNPEYEVENIRPYSPSQQEILRIYEDTVLKREEPIPEDIDAILKKFNNSKLPTKSEFLRYKLWLEQKYRSPYTGELIPLGKLFTTAYEIEHIIPQSRYFDDSFSNKVICESAVNKLKDNQLGYEFIKNHHGQKVEVGFGKKVEILSVDSYERFVKEQYAKSSVKMKKLLMDDIPEQFIERQLNDSRYISKVVKGLLSNIVREKNDNDGYEPEAVSRNVLVCTGNVTDRLKKDWGMNDVWNCIVYPRFERLNALTGTQCFGHWENKDGKKVFQTELPLEYQKGFSKKRIDHRHHAMDAIVIACATRNHVNYLSNESASRNTNISRYDLQRLLCDKNRVDGGGNYRWVIKKPWNTFTQDTREALDKIVISLKQNLRIINKTTNIYQHFDITGNRIYKKQEIGDNWAVRKPMHKDTVFGAVNLRKVKRVRLSVALDTPTMIVDKRVKGKVLELLSYKYDKKKIEKYFKENVFFWKDLDIAEVAVYYFTENTSEPLVAVRKSLDSTFNEKKIKESVTDTGIQKILLNHLSVKGGKADWAFSAEGIEEMNRNILQLNDGKKHQPIYKVRVYESRGNKFSVGVSGNKGTKWVGAAKGTNLFFAIYVTENGKRTYVTVPLDVAIEREKQGLIPVPDRNDKGDKLLFWLSPNDLVYLPTEEERELGRINEPIDRGRIYKIVSFTGNRLYGVPCNVANVIVDKLEYSSLNKVELTDAKESIKEICIPIRVDRLGHIIEVKYRINE

SEQ ID NO: 23234 - protein, 1526 aa, unidentified
  REGION 1..1526: note = Cas Enzyme sequence
MKKILGLDLGTNSIGWAVLNAADDNSLKYIEAAGSRIIPMDAAILGDFDRGNSISQTAERTRIRGMRHLRERYLLRRARLHRILNLLGFLPFHYAQDIDRYGNFSADMEPKIAWCKNLEGELEFIFIESFNEMLEDFRKNQPELVADNKKVPYDWVIYYLRKKALEKKISKEELAWILLNFNQKRGYYQLRGEDDDESMKTAKTRQYFDKQIIKNIIDTNQTYKGQRILIVELQNGDKGKIFKKEIPDWIGQEKNIIVTVDIDKDGNDKYEESGSLSCRFKIPTDAEWESEWKLIKMKTQKDLDESNKTVGTYIYDSILQNPTQKVRGKLVRTIERKYYKAELKQILEKQTEFHSELQDKDLYIECLNELYSNNDTHRNAITDRDFVYLFMNDILFYQRPLKSKKSLIDNCPYERNIYIDKETGEIKYSPIKCIAKSHPLFQEFRLWKFISSIRIYQRESVVEVVDKQLDLFSSQSTSVQKLVTDVDVTDKFLTCENDYVALFEWLNKKKIIDQKEFLKYRPFGLKGDIDNYRWNYVEDKSYPCNETHAMILTYFAKAGISEDILTKEMEEALWHILYSVEDRQEITKALRTFASKYHLSDSFVKVFSNIPPFKKEYGSYSAKAIKKLLSLMRMGKYWSEDAIDVNTRERIDKIVTGEYDEKIRDRVREKTIRLNDIRHFRALPDWLACYVVYDRHSETREITEWKSPEEIDEYIRNFKQHSLRNPIVEQVITETLRTVRDIWKQVGCIDEIHVELGREMKNPADKRKRITSQIIENENANLRVKALLTEFVNSEFEIENVRPYSLSQQDILRIYEDGVLNSVAEVPGDIAGILKKFNENDAKKRPTTSEILRYKLWLEQKYRSPYTGEMIPLSKLFTSAYEIEHVIPQSRYFDDSFSNKVICEAEVNKLKDNALGYEFIKKHHGEKVELGFGKIVEIFSVSVYEQFVKDNYSRNRGKMKKLLMDEIPEQFIERQLNDSRYISKVVKTLLSNVVREKAEQEAVSKNVIVCTGGVTDRLKKDWGINDVWNKIVLPRFLRLNELTNSTNFTAKNAAGNEIPAMPLELQKGFNKKRIDHRHHAMDAIVIACANRNIVNYLNNESASRKAKISRHDLQAILCDKVRTDDKGNYQWRVKKPWDTFTQDVYVALENIIVSFKQNLRVINKTSNYYWHYENGKKVLVKQVKGDSWAIRKPMHKDTVFGEVNLRKVKSVSLNEALKNPQFIVEKDLKRQLLSLLQQNFDIKKIKKYFEEHKDIWSDISLSKMNIYYFTKETKDRYFATRKPLDASFDKKKIESCITDTGIQQILLRHLELKENDPERAFSPDGIDEMNRNIIQLNKGKGHHPIAKVRVYEKADKFEVGQRGNKSSKFVEAAKGTNLFFAVYETEYPDEKTNSIVRKRNYATIPLNIAIERQKRGLSTAPEDEKGNVPSFVLSPNDLVYLPTSEDIVNGHITQPIDKSRIYKMVSSSGSQCFFIKHNIANIIVDKYEFSPLNKMERAISNEMIKEICIPVKVDRLGNIVKLGKSE

SEQ ID NO: 23235 - protein, 1526 aa, unidentified; identical to SEQ ID NO: 22523
  REGION 1..1526: note = Cas Enzyme sequence

SEQ ID NO: 23236 - protein, 1536 aa, unidentified
  REGION 1..1536: note = Cas Enzyme sequence
  REGION 62..65: note = misc_feature - Xaa can be any naturally occurring amino acid
LIIYFIFEKIVNTILVMKKIVGLDLGTNSIGWALINAYIDEYNKEHLYGIEACGSRIIPMDXXXXGNFDKGNSISQTADRTSYRGIRRLRERHLLRRERLHRILDLLGFLPKHYSDSLNRYGKFLNDIECKLPWVKDETGSYKFIFQESFKEMLANFTEHHPILIANNKKVPYDWTIYYLRKKALTQKISKEELAWILLNFNQKRGYYQLRGEEEETPNKLVEYYSLKVEKVEDSGEKKGKDTWYNVHLENGMIYRRTSNIPLDWEGKTKEFIVTTDLEADGSPKKDKEGNIKRSFRAPKDDDWTLIKKKTEADIDKIKMTVGAYIYDTLLQKPDQKIRGKLVRTIERKYYKNELYQILKTQSEFHEELRDKQLYIACLNELYPNNEPRRNSISTRDFCHLFIEDIIFYQRPLKSKKSLIDNCPYEENRYIDKESGEIKHASIKCIAKSHPLYQEFRLWQFIVNLRIYRKETDVDVTQELLPTEADYVTLFEWLNEKKEIDQKAFFKYPPFGFKKTTSNYRWNYVEDKPYPCNETHAQIITRLGKAHIPKAFLSKEKEETLWHILYSIEDKQEIEKALHSFANKNNLSEEFIEQFKNFPPFKKEYGSYSAKAIKKLLPLMRMGKYWSIENIDNGTRIRINKIIDGEYDENIRERVRQKAINLTDITHFRALPLWLACYLVYDRHSEVKDIVKWKTPKDIDLYLKSFKQHSLRNPIVEQVITETLRTVRDIWQQVGHIDEIHIELGREMKNPADKRARMSQQMIKNENTNLRIKALLTEFLNPEFGIENVRPYSPSQQDLLRIYEEGVLNSILELPEDIGIILGKFNQTDTLKRPTRSEILRYKLWLEQKYRSPYTGEMIPLSKLFTPAYEIEHIIPQSRYFDDSLSNKVICESEINKLKDRSLGYEFIKNHHGEKVELAFDKPVEVLSVEAYEKLVHESYSHNRSKMKKLLMEDIPDQFIERQLNDSRYISKVVKSLLSNIVREENEQEAISKNVIPCTGGITDRLKKDWGINDVWNKIVLPRFIRLNELTESTRFTSINTNNTMIPSMPLELQKGFNKKRIDHRHHAMDAIIIACANRNIVNYLNNVSASKNTKITRRDLQTLLCHKDKTDNNGNYKWVIDKPWETFTQDTLTALQKITVSFKQNLRVINKTTNHYQHYENGKKIVSNQSKGDSWAIRKSMHKETVHGEVNLRMIKTVSFNEALKKPQAIVEMDLKKKILAMLELGYDTKRIKNYFEENKDTWQDINPSKIKVYYFTKETKDRYFAVRKPIDTSFDKKKIKESITDTGIQQIMLRHLETKDNDPTLAFSPDGIDEMNRNILILNKGKKHQPIYKVRVYEKAEKFTVGQKGNKRTKFVEAAKGTNLFFAIYETEEIDKDTKKVIRKRSYSTIPLNVVIERQKQGLSSAPEDENGNLPKYILSPNDLVYVPTQEEINKGEVVMPIDRDRIYKMVDSSGITANFIPASTANLIFALPKATAEIYCNGENCIQNEYGIGSPQSKNQKAITGEMVKEICFPIKVDRLGNIIQVGSCILTN

SEQ ID NO: 23237 - protein, 1432 aa, unidentified
  REGION 1..1432: note = Cas Enzyme sequence
MKKILGLDLGSNSIGWALVNEAENRDEASSIIKLGVRVNPLTVDEMQNFEKGKSITTNADRTLKRSMRRNLQRYKLRRDALIKLLKKVGFITDGTILSEQGNRTTFETYRLRAKAPDEEISLQELARVLLMINKKRGYKSSRKIKEKEAGTLIDGMEVAKKLYDEDLTPGQLCLQLLESGKKSLPDFYSSDLQEEFDRIWNFQKQFNPKAFCDTAKEEIKGKNKSQTWAILAKYFIWTDEMVVWNEKESKTECVEKECKLVGLKRTVKKEEQRKENYCWRVQALTEQLDLEKVAVVLQEINGQISTSSGYLGAISDRSKVLYFNRQTVGQYQMAELEKNPNTSLRNMVFYRQDYLDEFDKIWEKQAEFHKELTVELKKEIRDIIIFYQRRLKSQKGLIGFCEFENREIMVEKNGKMQAKVVGCKVIPRSHPLFQEFKIWQTLNNVEVFAGEKKCKRKRTDAFPGLFDGTEDTLMVEGWRYLYQEEKEILAKELSVKKSLKKEYILKLLFDNPQDLDMNFEQIEGNDTGNVLFSAYSKMIEKYGYEPLDFGKPTDKIIEQLQVIFADLGWNTDLLFVDLNKEGKDLEKQPYFKLWHLLYSFEGDNTPTGNGKLVEKLMELCHVGKECALELVNISFQNDYGSLSAKAIKKILPYLKEGNRYDVACGYAGYRHSKSSLTKEEIENKVLKDKLDILPKNSLRNPVVEKILNQMVNVINAIIDTYGKPDEIRVELARELKKSAKEREELTKAIAKSTREHEEIRKVLQEEFGMINVSRNDIIRYKLYEELKDNGYKTLYSNQYIPKEKVFSKEIDIEHIIPQARLFDDSLSNKTLEYKAINIEKGNKTAYDFVKEKYGEKGLQQYLNRCESLFKGQRTKLRKLKMGQENIPEGFIDRDLRNTQYIAKKALAMLNEICRRVVATTGSITDRLREDWQLVDVLKELNLPKYETLGLVEVYEDKDGRKIKRIKDWTKRNDHRHHAMDALTVAFTKDVFIQYFNNKNAAWQADCKEHSDIIGIKTHYFENGRALPPMPLVRFRAEAKSHLETLLVSIKAKNKVVTNNVNCTKRKGGENKKLQQSPRGQLHLETIYGSHRQYVTKEEKVNASFDSSKIATVCKQAYRNALLERLAAFGNDPKKAFTGKNSLEKNPVYLDREQTARVPERVRTVELETVYTIRKPVDPNLSVDKVVDAKVRSILEQRLREYDGEAKRAFVNLDENPIWLNEEKGIAIKRVTIRGINKVQSLHGKKDKNGNLILDETGKKIPVDFVNTGNNHHVAIYRKPVLDKTGQEMLDNEGNPVYELDEVVVSFFEAVTRVNLGLPVIDKNYNKSEGWQFMFTMKQNEYFVFPNEKTGFDPKEVDLLNPENYAVISPNLFRVQKITEKDYMFRHHLETKVVDDKFLKEITWKRIRRPNELDGIVKVRVNHIGQIVSVGEY

SEQ ID NO: 23238 - protein, 1509 aa, unidentified
  REGION 1..1509: note = Cas Enzyme sequence
MKKILGLDLGTNSVGWAVINSVVNDEGKEQLVNISSCGSRIIPMDAATLGDFDKGNSKSPVAERTRLRGVRRLLERSLLRRERLHRVLSVMEFLPEHYASQLDRYGKFLPEREPKLAWYQDETGKYRFLFQDSFNEMLEDFRQHHPELVAEGKKIPYDWTIYYLRKKALSQKITKEELAWILLNFNQKRGYYQLRGEEEKEDNKKSVEYYALKVVAVEDSGDRKGKDIWYNVKLENGWVYRRASSIPLDWVGKVKEFIVTTDLDEKGNPKKDKDGNVKRSFRAPKEDDWGLLKTRTQAQIDESGQTVGTYIYESLLRMPDQKIRGKLVRTIERKYYKDELRKILVKQSEFHAALQDHNLLLACIEELYPNNEAHRRLLSTSDFIYFLVEDILFYQRPLKSQKGLIDDCPYESHVYRDKKNGSLQHVPLKCVSKSHPLFQEFRLWQFLASLRIYQRERQVDGSLKLDVDITNEFLQSEDDYVKLFDWLNDRKDIDQKTFLAYKPFGLKKNELPKYRWNYVEDKSYPCNETRADIIFRLNKAGVPEEFLTREKEEALWHILYSISDKRELTKALGTFAEKNGLNETFVEIFSKMPPFESDYAAYSLKAIRKLLALMRMGKYWDEQAIDEQTRSRIEKMLTGEYDETIRTRVREKAMHLTDISSFRGLPLWLACYVVYDRHSEAKELVKWETPDDIDHFLRKFKQHSLRNPIVEQVIMETLRTVRDIWKQEGKIDEIHVELGREMKNPSKERARITAQVLENENTNLRIKALLTEFMNPEFEIENVRPYSPAQQEILRIYEEGVLSGVAEKDLPDDIASILKKFRENDVKKRPTTSEVLRYKLWLEQRYRSPYTGRIIPLGKLFTPAYEIEHVIPQSRYFDDSLTNKVICESAVNKLKDNCLGYEFIKKHSGEKVELGNGETATIFSVEEYERFVKDSYLGNSKKMKKLLLEDIPDNFIERQLNDSRYISKVVKSLLSNIVCEEGEQEGMSKNVIVCTGGVTDRLKKDWGVQDVWNRIILPRFLRLNKITDSTDFTSVSTNGHLLPAVPLHLQKGFNKKRIDHRHHAMDAIVIACAGRNIVNYLNNASARKGSEISRYDLQHLLCDKVKTDANGNYKWILRKPWETFTQDVYVALTDIVVSFKQNLRVINRTTNHYQHYNEDGEKKMIPQTKGDRWAIRKPMHKDTVYGEVNLRKEKTLPLKDVLNNPSIVVDKSLKNKLYELLKSQYDLKAITKYFETYQDVWADVNLKKIKVYYFTKETNERFFATRKSLDSSFNQKKIEEEVTDTGIQKILLRHLQQNGNNPDIAFSPDGVERMNQNMTILNNGKWHQPIYKVRTYEKADKFAVGESGNKVKKFVEAAKGTNLFFAVYESIQEDEATGKQVRKRTFATIPLNEVIKRKKQGLPVAPEDSKGNLPIFVLSPNDLVYLPTEEECNTGKIIQPLARERIYKMVSCTEGECHCIPEYVASPILQTIELGSNNKAQRAWSGEMIKEICVPVKVDRLGNVSLVKI

SEQ ID NO: 23239 - protein, 1536 aa, unidentified
  REGION 1..1536: note = Cas Enzyme sequence
LIIYFIFEKIVNTILVMKKIVGLDLGTNSIGWALINAYIDEYNKEHLYGIEACGSRIIPMDAAILGNFDKGNSISQTADRTSYRGIRRLRERHLLRRERLHRILDLLGFLPKHYSDSLNRYGKFLNDIECKLPWVKDETGSYKFIFQESFKEMLADFTEHHPKLIANNKKVPYDWTIYYLRKKALTQKISKEELAWILLNFNQKRGYYQLRGEEEETPNKLVEYYSLKVEKVEDSGEKKGKDTWYNVHLENGMIYRRTSNIPLDWEGKTKEFIVTTDLEADGSPKKDKEGNIKRSFRAPKDDDWTLIKKKTEADIDKIKMTVGAYIYDTLLQKPDQKIRGKLVRTIERKYYKNELYQILKTQSEFHEELRDKQLYIACLNELYPNNEPRRNSISTRDFCHLFIEDIIFYQRPLKSKKSLIDNCPYEENRYIDKESGEIKHASIKCIAKSHPLYQEFRLWLFIVNLRIYRKETDVDVTQELLPTEADYVTLFEWLNEKKEIDQKAFFKYPPFGFKKTTSNYRWNYVEDKPYPCNETHAQIITRLGKAHIPKAFLSKEKEETLWHILYSIEDKQEIEKALHSFANKNNLSEEFIEQFKNFPPFKKEYGSYSAKAIKKLLPLMRMGKYWSIENIDNGTRIRINKIIDGEYDENIRERVRQKAINLTDITHFRALPLWLACYLVYDRHSEVKDIVKWKTPKDIDLYLKSFKQHSLRNPIVEQVITETLRTVRDIWQQVGHIDEIHIELGREMKNPADKRARMSQQMIKNENTNLRIKALLTEFLNPEFGIENVRPYSPSQQDLLRIYEEGVLNSILELPEDIGIILGKFNQTDTLKRPTRSEILRYKLWLEQKYRSPYTGEMIPLSKLFTPAYEIEHIIPQSRYFDDSLSNKVICESEINKLKDRSLGYEFIKNHHGEKVELAFDKPVEVLSVEAYEKLVHESYSHNRSKMKKLLMEDIPDQFIERQLNDSRYISKVVKSLLSNIVREENEQEAISKNVIPCTGGITDRLKKDWGINDVWNKIVLPRFIRLNELTESTRFTSINTNNTMIPSMPLELQKGFNKKRIDHRHHAMDAIIIACANRNIVNYLNNVSASKNTKITRRDLQTLLCHKDKTDNNGNYKWVIDKPWETFTQDTLTALQKITVSFKQNLRVINKTTNHYQHYENGKKIVSNQSKGDSWAIRKSMHKETVHGEVNLRMIKTVSLNEALKKPQAIVEMDLKKKILAMLELGYDTKRIKNYFEENKDTWQDINPSKIKVYYFTKETKDRYFAVRKPIDTSFDKKKIKESITDTGIQQIMLRHLETKDNDPTLAFSPDGIDEMNRNILILNKGKKHQPIYKVRVYEKAEKFTVGQKGNKRTKFVEAAKGTNLFFAIYETEEIDKDTKKVIRKRSYSTIPLNVVIERQKQGLSSAPEDENGNLPKYILSPNDLVYVPTQEEINKGEVVMPIDRDRIYKMVDSSGITANFIPASTANLIFALPKATAEIYCNGENCIQNEYGIGSPQSKNQKAITGEMVKEICFPIKVDRLGNIIQVGSCILTN

SEQ ID NO: 23240 - protein, 1436 aa, unidentified
  REGION 1..1436: note = Cas Enzyme sequence
MKRILGLDLGTNSIGWALVNEAENKDERSSIVKLGVRVNPLTVDELTNFEKGKSITTNADRTLKRGMRRNLQRYKLRRETLTEVLKEHKLITEDTILSENGNRTTFETYRLRAKAVTEEISLEEFARVLLMINKKRGYKSSRKAKGVEEGTLIDGMDIARELYNNNLTPGELCLQLLDAGKKFLPDFYRSDLQNELDRIWEKQKEYYPEILTDVLKEELRGKKRDAVWAICAKYFVWKETYTEWNKEKGKTEQQEKEHKLEGIYSKRKRDEAKRENLQWRVNGLKEKLSLEQLVIVFQEMNTQINNSSGYLGAISDRSKELYFNKQTVGQYQMEMLDKNPNASLRNMVFYRQDYLDEFNMLWEKQAVYHKELTEELKKEIRDIIIFYQRRLKSQKGLIGFCEFESRQIEVDIDGKKKIKTVGNRVISRSSPLFQEFKIWQILNNIEVTVVGKKRKRRKLKENYSALFEELNDAEQLELNGSRRLCQEEKELLAQELFIRDKMTKSEVLKLLFDNPQELDLNFKTIDGNKTGYALFQAYSKMIEMSGHEPVDFKKPVEKVVEYIKAVFDLLNWNTDILGFNSNEELDNQSYYKLWHLLYSFEGDNTPTGNGRLIQKMTELYGFEKEYATILANVSFQDDYGSLSAKAIHKILPHLKEGNRYDVACVYAGYRHSESSLTREEIANKVLKDRLMLLPKNSLHNPVVEKILNQMVNVINVIIDIYGKPDEIRVELARELKKNAKEREELTKSIAQTTKAHEEYKTLLQTEFGLTNVSRTDILRYKLYKELESCGYKTLYSNTYISREKLFSKEFDIEHIIPQARLFDDSFSNKTLEARSVNIEKGNKTAYDFVKEKFGESGADNSLEHYLNNIEDLFKSGKISKTKYNKLKMAEQDIPDGFIERDLRNTQYIAKKALSMLNEISHRVVATSGSVTDKLREDWQLIDVMKELNWEKYKALGLVEYFEDRDGRQIGRIKDWTKRNDHRHHAMDALTVAFTKDVFIQYFNNKNASLDPNANEHAIKNKYFQNGRAIAPMPLREFRAEAKKHLENTLISIKAKNKVITGNINKTRKKGGVNKNMQQTPRGQLHLETIYGSGKQYLTKEEKVNASFDMRKIGTVSKLAYRDALLKRLYENDNDPKKAFAGKNSLDKQPIWLDKEQMRKVPEKVKIVTLEAIYTIRKEISPDLKVDKVIDVGVRKILIDRLNEYGNDAKKAFSNLDENPIWLNKEKGISIKRVTISGISNAQSLHVKKDKDGKPILDENGRNIPVDFVNTGNNHHVAVYYRPVIDKRGQLVVDEAGNPKYELEEVVVSFFEAVTRANLGQPIIDKDYKTTEGWQFLFSMKQNEYFVFPNEKTGFNPKEIDLLDVENYGLISPNLFRVQKFSLKNYVFRHHLETTIKDTSSILRGITWIDFRSSKGLDTIVKVRVNHIGQIVSVGEY

SEQ ID NO: 23241 - protein, 1509 aa, unidentified
  REGION 1..1509: note = Cas Enzyme sequence
MKTILGLDLGTNSVGWAVINSVIKEQAERIWIEMAGSRIIPMDAAVLGDFDKGNSISQTSERTRLRGARRLRERQLLRRERLHKVLNILGFLPNHYLEYIDFEKHPGKFLADAEPKLAWVKDEQGKYTFLFQAAFDEMLADFAIHQPSLVSGDKKIPYDWTIYYLRKKALTEMISKEELAWILLNFNQKRGYYQLRGEEEEDNAGKSVEFYALKVLTVEATDEKKGRDVWYNVHLENGWIYRRSSSVPLDWEGQVKEFIVTTDLNPDGTPKLDKYGEVKRSFRAPKEDDWMLIKKRTEADIANTHKTVGAYIYDTLLQKPQQKIIGKLVKTVERKLYRDELSLILQKQCAFHAELQDRALYARCVEALYPSNEVRRKNIANRDFVYLLMDDILFYQRPLKTKKSLIANCPYEENEYVDRETGEIKKTPLKCIAKSHPLFQEFRLWNFLSNIRIYQKEKEINGTLHLDVDVTAEFLKTEDDYVALFDWLNSRKEIEQKTFLKYPKFGLKKEISNYRWNYVEDKQYPCNETRHAILSSLEKANVCIDFLSNEKEVALWHILYSVSDKQEIEKALRTFAAKNGLDESFVEAFKKFPPFKSEYGAYSAKAIKKMLPLMRCGKYWDVSSIDDTTKERIKKIVTGEYDERISVKVRDKVMNLSDISCFRRLPLWLACYIVYNRHSEDKEAVKWESPADIDAYLASFKQHSLRNPIVEQVITETLRVVRDIWKQVGRIDEIHIELGREMKNPADKRKRMTAQILENENANLRIKALLAEFMNPEYEIENVHPYSPSQQEILRIYEDTVLHAEDQLPEEIDAILKKFNSSKVPTKSEFLRYKLWLEQKYRSPYTGELIPLGKLFTAAYEIEHVIPQSRYFDDSFSNKVICESAVNKLKDNQLGYEFIKNHHGQKVEVGFGKSVEIFSVDSYERFVKEQYAKSVVKMKKLLMDDIPEQFIERQLNDSRYISKVIKGLLSNIVREKNDSGEYEPEAVSKNIVVCTGSVTDRLKRDWGMNDVWNSIVYPRFERLNSLTDTQSFGHWENKSGKKVFQTELPLEYQKGFSKKRIDHRHHAMDAIVIACATRNHVNYLSNESASRNAKISRYDLQRLLCDKNRADDNGNYKWVIKKPWDTFTQDAREVLSKIVVSLKQNLRIINKTTNVYRHFDATVNRVYQKQKTGDSWAIRKPMHKDTVFGAVNLRKVKVVRLSVALDTPAMIVDKRVKNKVFELLSYKYDKKRIEKYFKENAFLWKELDLAKVAVYYFTEATTEPLVAVRKPLDSTFNEKKIKESVTDTGIQKILLNHLCTKEGKPDLAFSAEGIEEMNRNLLQLNNGKSHQPIYKVRVYEPRGNKFSVGVLGNKGTKWVEAAKGTNLFFAIYITEDGKRTYETIPLNVVIEREKQGLVPVPDRNKKGDKLLFWLSPNDLVYLPTEEEREFGRINEPIDRGRIYKMVSCTGNEGHFIPANVANPIVPVIELGSNNKAQRAWTNEMIKDICIPIKVDRLGHIIEVKYRIDE

SEQ ID NO: 23242 - protein, 1318 aa, unidentified
  REGION 1..1318: note = Cas Enzyme sequence
YKEDTYVQNGFLGITVSSEQVGWAVTNPKYELERASRKDLWGVRLFDKAETAEDRRMFRTNRRLNQRKKNRIHYLRDIFHEEVNQKDPNFFQQLDESNFCEDDRTVEFNFDTNLYKNQFPTVYHLRKYLMETKDKPDIRLVYLAFSKFMKNRGHFLYKGNLGEVMDFENSMKGFCESLEKFNIDFPTLSDEQVKEVRDILCDHKIAKTVKKKNIITITKVKSKTAKAWIGLFCGCSVPVKVLFQDIDEEIVTDPEKISFEDASYDDYIANIEKGVGIYYEAIVSAKMLFDWSIMNEILGDHQLLSDAMIAEYNKHHDDLKRLQKIIKGTGSRELYQDIFINDVSGNYVCYVGHAKTMSSADQKQFYTFLKNRLKNVNGISSEDAEWIDTEIKNGTLLPKQTKRDNSVIPHQLQLREFELILDNMQEMYPFLKENREKLLKIFNFVIPYYVGPLKGVVRKGESTNWMVPKKDGVIHPWNFDEMVDKEASAECFISRMTGNCSYLFNEKVLPKNSLLYETFEVLNELNPLKINGEPISVELKQRIYEQLFLTGKKVTKKSLTKYLIKNGYDEDIELSGIDNEFHSNLKSHIDFEDYDNLSDEEVERIILRITVFEDKQLLKDYLNREFVKLSEDERKQICSLSYKGWGNLSEMLLNGITVTDSNGVEVSVMDMLWNTNLNLMQILSKKYGYKAEIERYNKEHEKNIYNREDLMDYLNIPPAQRRKVNQLITIVKSLKKRCGVPNKIFFKVSREHQDDPKRTSSRKEQLKYLYKSLKSEDEKHLMKELDELNGHELSNDKVYLYFLQKGRCIYSGKKLNLSRLRKSNYQNDIDYIYPLSAVNDRSMNNKVLTGIQENRADKYTYFPVDPEIQKKMKGFWMELVLQGFMSKEKYFRLSRENDFSENELVSFIEREISDNQQSGRMIASVLQYYFPESKIVFVKEKLISSFKRDFHLISSYGHNHLQAAKDAYITIVVGNVYHTKFTMDPAIYFKNHKRKDYDLNRLFLENISRDGQIAWESGPYGSIQTVRKEYAQNHIAVTKRVVEVKGGLFKQMPLKKGHGEYPLKTNDPRFGNIAQYGGYTNVTGSYFVLVESMEKGKKRISLEYVPVYLHERLEDDPGHKLLKEYLVDHRKLNHPKILLAKVRKNSLLKIDGFYYRLNGRSGNALILTNAVELIMDDWQTKTANKISGYMKRRAIDKKARVYQNEFHIQELEQLYDFYLDKLKNGVYKNRKNNQAELIHNEKEQFMELKTEDQCVLLTEIKKLFVCSPMQADLTLIGGSKHTGMIAMSSNVTKADFAVIAEDPLGLRNKVIYSHKGEK

SEQ ID NO: 23243 - protein, 1508 aa, unidentified
  REGION 1..1508: note = Cas Enzyme sequence
MRTILGLDLGTNSIGWAVINSVIKEQTERIWIEMAGSRIIPMDAAILGDFDKGNSISQTAERTRFRGVRRLRERQLLRRERLHKVLKILGFLPEHYLKGIDFEKHTGKFLSGSEPKLPWVKDRWGKYSFLFQTAFNEMLADFAKHQPSLVFDGKKIPYDWTVYYLRKKALTEMISKEELAWILLNFNQKRGYYQLRGEEEEDNAGKSVEFYALKVLSVEATDEKKGRDIWYNVHLENGWVYRRSSNVPLDWEGRVKEFIVTTDLNPDGTPKLDKYGEVKRSFRAPKEDDWMLIKKRTEADITGTHKTIGSYIYDALLQEPQQKIIGKLVKTVERKFYKEELNFILQKQCAFHAELQDRDLYMRCIEALYPGNEVQRRNIANRDFIYLLIDDVLFYQRPLKTKKSLIANCPYEENEYVNRKTGEIKTAPLKCIAKSHPLFQEFRLWYFLSNIRVYQKEREVNGTLHLDVDVTTEFLKTEDDYVALFDWLNSRKEIDQKAFLRYPAFGLKKEINNYRWNYVEDKFYPCNETRHAILSRLEKAGIGIDFLSDEKETALWHILYSVSDKQEIEKALATFAVKNGLNESFVEVFKKFPPFKSEYGAYSAKAIKKLLPLMRCGKYWDMSLIDGTTKERIERIIAGECDESIGAKVREKAMNLSDISCFKRLPLWLACYVVYNRHSEDKEITKWETPADIDAYLAAFKQHSLRNPIVEQVITETLRVVRDIWKQVGKIDEIRIELGREMKNPADKRKRMTTQILENENANLRIKALLAEFVNPEYGVENVRPYSPSQQEILRIYEDAVLKGEEQIPEDIDVILKKFNTSKLPTKSEFLRYKLWLEQKYRSPYTGELIPLAKLFTAAYEIEHVIPQSRYFDDSFSNKVICESAVNKLKDNQLGYEFIKNHHGQKVEVGFGKTVEIFSVDSYERFVKEQYAKSGIKMKKLLMDDIPEQFIERQLNDSRYISKVVKGLLSNIVREKNDSGEYEPEAVSKNILVCTGSVTDRLKKDWGMNDVWNSIVSPRFERLNALTETQCFGHWENKDGKKVFQTAVPLEYQKGFSKKRIDHRHHAMDAIVIACATRNHVNYLNNESASRNAKISRYDLQRLLCDKSRGDGNGNYRWIIKKPWTTFTQDAREALSGIIVSLKQNLRIINKTTNIYQHFDANGTRVYEKQKIGDSWAIRKPMHKDTVFGAVNLRKVKVVRLSVALDTPSMIVNKRVKNKVLELLSYKYDKKKIEKYFKENAFLWKELDIAKVAVYYFTENTTEPLVAVRKSLDSTFNEKKIASVTDTGIQKILLNHLKSKEGKAELAFSAEGIEEMNRNLLQLNDGKGHQPIYKVRVYEPRGNKFKVGVLGNKGAKWVEAAKGTNLFFAIYITEDGNRTYETIPLNWVIEREKQGLVPVPDRNEKGDKLLFWLSPNDLVYLPTEEERDFGRINEPIDRGRIYKMVSSSGNQCFFIPQSISNAIISTKELGSNNKAEKSWDGEMIKNICIPVKVDRLGRIIEVKYRVNE

SEQ ID NO: 23244 - protein, 1427 aa, unidentified; identical to SEQ ID NO: 15334
  REGION 1..1427: note = Cas Enzyme sequence

SEQ ID NO: 23245 - protein, 1498 aa, unidentified; identical to SEQ ID NO: 22276
  REGION 1..1498: note = Cas Enzyme sequence

SEQ ID NO: 23246 - protein, 1106 aa, unidentified
  REGION 1..1106: note = Cas Enzyme sequence
MQYIVALDIGVASVGYAVIDKMSETVIEAGSNIFPEASAANNQVRRGMRQARRLKRRERTRLDDFKKLWEYHGLAIPQAKENDIVGLKVKALYESISLDEVYLILYSYLKHRGISYLEDAEDSSVSGSTAYANGLKLNAKELEKNFPCEIQKHRLENIGKYRGQIQIEDDQGEKLDLSNVFTIGAYAKEIQQILDTQKKYHAEIADEFCEKYLKIFTRKRKYYEGPGNEKSRTDYGKYTTRLAENGEYITEKNIFEKLIGKCSVYKDELRAASASYTAQEFNLLNDLNNLTVNGRKLEENEKHLIVDKVKASNTINMRKIIADAMGEKIEEFYGARIDKSEKEIFHKFEVYNKMRKALAAIHVNIEEFSRDDLDEIGYILTINTDKEAMMEAFDNSRLELPGEIKNCLISLRKTDGALFSKWHSFSLKIMNELIPEMYRQPKEQMTLLTEMGVMKGQTDEFEKNKYIPVDVASEDIFNPVVRRSVRISFKILNELMKKYGTLDEVVIEMPRDRNSDEQRKWEKETQKKNEKEQEYIENKLATVYDIKLSSADFSSQKQLNLKLKLWNEQDGKCLYSGKIIEPEDLIKHSELFEIDHIIPRSISFDDSRSNKVLVYRTENQNKGNQTPYYYLTHTNSKWSFEQYKALVMDLSKKKEYGLSKKKVRNLLYSEDITKADVLRGFINRNINDTSYAARVVLNTVQGYFRAKEMGTKVKVIRGSYTHQMRVNMKLDKDREKSYAHHAVDAMLIAFSQLGYEAYRKLQGEFIDFETGEILNSEKWKDQMSDEVYKQYLYRKKWSNIRNEITRAEKNVKYWYYVDHKSNRGLCNQKIRGTRVYDGKIYKINKLDIRKKEGAALFKKLAFSEKESDREKLLVYKNDKKTYEDLVRIMQDYSDSKNPFVQYEKETGDYVRKYAKKHNGPRIDKLKYIDGEVGSCIDISHKYGYEKGSRKVVLESLVPYRMDVYYKKEEQTYYLVGIKQSDVKCQKGEYVIDEDAYAINLVKEKMIQQGQKRSDLESLGFEFQLSFYKNDIIEYEKDGKIVRERFLSRTMPKVKNYIETKPIDREKYEGHDRKLVGLGKTKRIRKYRMDILGNYYLCNKEEFSKYC

SEQ ID NO: 23247 - protein, 1504 aa, unidentified
  REGION 1..1504: note = Cas Enzyme sequence
MKNIVGLDLGTNSIGWAVVNGSVNDDGSEQLVKIQASGSRIIPMDAAMIGDFNKGNSISQTAERTRLRGVRRLSERYLLRRERLHRILDILGFLPFHFAQDIDRHGKIVKGKEPKLAWRKNEAGQFEFIFQDSFKEMLEDFKLNYPNLITDDKKVPYDWTIYYLRKKGLTSKISKEELAWILLNFNQKRGYYQLRGEEEEENKDKLVEFYALKVVAVEDSGEKKGKDIWYNVHLENGWVYRRTSNMSLDWVGKTKEFIVTTDLEKDGTPKKDKEGNVKRSFRAPKEDDWSLVKKKTEADIDQTHKTVGAYIYDTLLGNPSQKIRGRLVRTIERKYYKEELKLILEKQKEFHLELQDRALYAACIEELYPINEAHRNNVGNRDFTYLFLEDILFYQRPLKSKKSLIDNCPYEENQGLDKETGEIKSFPVKCIAKSHPLFQEFRLWQFIINLRIYRKDLAQDVDVTNELLKTEEDYVALFDWLNGKKEIDQKAFLKYPVFGLKKEIENYRWNYVQDKPYPCNETRSLMLARLEKCDISIEFLTKENEEALWHILYSVEDKNEIVKALQKFADKHDLNASFVDVFQKFPPFKKEYGSYSAKAIKKLLPLMRMGKYWSENSIDKGTRERIDKIITGEYDEKIENRVREKAIHLADVSDFKGLPLWLVCYIVYGRHSEAKEIIQWKSPADIDSYLRSFKQHSLRNPIVEQIIIETLRVVRDIWKQVGNIDEIHVELGREMKNPADKRKKMTQQMSENENTNLRIKYLLTEFLNPEYEVENVRPYSPSQQDILRIYEEGVLNSVSDLPEEISDILKKFTETDLKKRPSRSEVLRYKLWLEQKYRSPYTGEVIPLGKLFTPAYEIEHVIPQSCYFDDSFSNKVICEAEVNKLKSNLLGHEFIVKHHGEIVELPFGKKVRIFTVDEYEQFVKDNYSRTRSKMKKLLMDDIPEEFVTRQLNDSRYISKVVKSLLSNIVREKGEEEAISKNVIPCTGGVTDRLKKDWGINEVWNKIILPRFQRLNELTGTNKFTTKNVGIQEIPTMPLELQKGFNKKRIDHRHHAMDAIIIACANRNIINYLNNESATAKAELSRYDLQKMLCDKAKTDNNGNYKWVIRKPWASFTQDTYLALENIIVSFKQNLRVINKATNRFLHYNEEGKKIFVKQGKGDNWAIRKSMHKDTVFGEVNLRRIKTVALNEAMKNPQSIVVKDFKRKLLELWNLGFDAKRIKKYFEDNRETWSDINLSKIEVYYFSKDTKDRFFATRKPLDTSFDRKKIENNITDTGIQKILLRHLELKDNNPDIAFSPDGIDEMNRNIIQLNNGKYHQPIIKIRWYEQADKFAVGQTGNKSSKFVEAAKGTNLFFAVYESNILDKKTNTIIKKRNYATIPLNVAIERQKQGLPVAPEDENGNDPIFVLSPNDLVYLPTDDELANGIIAQPLDRGRIYKMVSSSGEQCFFIKHIVANVLVDKFEFSPLNKMERALTGEMIKMICIPIKVDRLGNVLESSSSYKK

SEQ ID NO: 23248 - protein, 1200 aa, unidentified
  REGION 1..1200: note = Cas Enzyme sequence
LENQKKFHLELQDRELYHQCIELLYCKNEAHKRVIGSWDFTSLFIKDILFYQRPLKSKKALIDNCPYEESFYIENGEKKSKPRKCIAKSHPLFQEFRIWQFIYNLRIYQKVKEVDGKLQFNVDVTSDFLRDESAYVELFKWLNERAEVSQEDLLKHLGLKKTKTEDTVSLYRWNYVEDKKYPGNKTRSSILKKLLNDEKEALSEDIELKIWHLLYSVLAQSEIDKALSSKNVSTKGIYSELSVYFSDETIQKIKNVKLESGYGSYSAKAIGKLLPLMRRGKYWNLESIDNHTKERIEKILNGECDETIRARTREKSISLTDISQFKGLPLWLACYIVYDRHSELKTIKKWNSPEDINKFLKEFKQHSLRNPIVEQVTMETLRVVRDIWRRVGSIDEIHIEMGRDMKQTAQERARCSAIISRNENNNLRIKALLHEFMNPELGIENVRPYSPAQQEILRIYEDGVLSSVSEIEDEIKNILKKFNESEEGKRPTKNEIIRYKCWLEQKYRSPYTGEIIPLGKLFTPAYQIEHIIPQARFFDDSFTNKVICEAEVNAKKGDLLGYEFVKEKGGEIVELSGGRNVRIFSVEEYESFVKEHYKSNKQKMQRLLAEDIPTEFSHRQLNDSRYISKYIRNLLSNIVREDDEQESVSKNVISCNGAITDRLKKDWGVNDVWNHIILPRFVRLEEIRADNGEKFTTFNQEGHRIPSMPLMYQKGFNKKRIDHRHHAMDAIVIACTTRDHVNLLNNECSNPQNNANKHQLSRKLRRYENVSYKQDGKLKEREVPKEFLKPWEEFTRDVEFALKNVIVSFRQNLRVLNKTVNYFQHWKDNSSEKEWKEQKSADHWSIRKPLHKETVSGEVFLWRTRFVSLREALTNPKRIVEKDLRSKILELQRKGYDTKRIKKYFEDNKDVWQDVNLSKIEVRYYSREIVDPQTELPKNRYFATRFGNDLISLFSGVSNFEKAKKIIESITDTGIQQILFRHLENKGNDPVLAFSPEGIDEMNRTIKTLNNGKDHKPIYKVRIYECSTMKFPLGSIGNKSKKFVEAAKGTNLYFAVYEKEVENDRGECHKERTFKTIPLNDVIRNLKQGLSIAPNDENGNLPAFILSPNDLVYLPTKEESETGSISQPLNRNRIYKMVSCTGNEAHFIPAFIATPILQTIELGSNNKAQKAWTGEMIKESCIPIKVDRLGMLISINGKAV

SEQ ID NO: 23249 - protein, 1510 aa, unidentified
  REGION 1..1510: note = Cas Enzyme sequence
MKRILGLDLGTNSIGWALVDSEEQRILGMGSRIIPMDQGVLDTFSGGNPVETQTAARTAYRGTRRLRERALLRRERLIRVLNMMKFLPEHYASQIDFEKRLGQFFDEKEPKLAWKQNDEGRFEFIFQQSFNEMIEEFKNKGVVREDKKIPYDWTIYYLRKKALSQEIEKEELAWILLNFNQKRGYYQLRGEEEEENPNKLVEYYSLKIVDVIADEKPNSKGDIWYSLHLENGWIYRRSSKIPLFGWKDKTRDFIVTTDLNDDGTVKKDKEGIEKRSFRAPSENDWVLLKKKTESDIEKSHKTVGTYVYETLLQNPMQKVCGKLVRTIERKFYKDELKQILEKQREFHPELRDEDLYNDCVRELYRSNETYQFILSKRDFVHLFLDDILFYQRPLRSQKSAIGDCILEFKTYKDKDGNNIKEYLKVISKSNPLYQEFRIWQWLYNLKIYRKEDDEDVTLQFIANIEDKEQLFDFLSNRKSIEQKPLLEYLIKAKGLKKQVKTEAYRWNYVEDKIYPCSETKTMISTRLAKVKNVPEDFLTKEIEQKLWHIIYSVTDKNEFEKALGTFARKYDLDIASFVGNFKKIPPFKNEYGSFSEKAIKKLLPLMRLGKYWKWSDIDNNIQNRISKIIIGEYDEEIKDIVREKSIALTNENDFQGLQLWLAQYLVYGRHSEADIAGKWHSVADLEKYLNEFKQHSLRNPIVEQIITETLRVVRDIWQKYGQGAENFFSEIHVELGRDMKNTADERKKIANVVTENENTNLRIKALLMELKNNSDGKLEVENVRPYSPMQQDILKIYEEYAISTGLDNEKDEKVKEDIKKISRVAQPTTTELQRYKLWLEQKYCSPYTGKVIPLGKLFTEEYQIEHIIPKSRYYDDSFSNKVICEAAVNKLKDKCLGLEFIKNYHGQIVETGFGQKVTIFDEEAYQNFVKQHYAYNRSKRTKLLLEEIPEKMIERQMNDTRYISKFVLPLLSNLVRAEENDNGVNSKNVLPVNGKITTMLKQDWGLNDVWNDLILPRFVRMNELAKTIAFTSWNEQYQKYLPTVPLELSKGFQKKRIDHRHHAMDALVIACATRDHVNLLNNKHANTDTIRYDLQRKLRLFERVTYIDPQTKNNVTKDIPKEFKKPWDNFTVDARNELEKIIVSFKQNLRIINKATNIYTKYENGKKIKVSQKGLNWAIRKPLHKETVFAKVSLRKRKTVRLSEALKDWKRIVDKKLKQEIKRLTCQYGKFDVDTILRYFKDRKYQFGEVDVSKVEIYYFDEENAAVRKNVDTSFTEKFIQGSVTDTGIQKILLNHLEAKGNKVEIAFSPEGIEEMNKNIIQLNEGKLHLPIFKVRVYETIGNKFSVGVKGNKKDKYVEAAKGTNLFFAIYVDENGIRSYETIPLNIVIERLKQGLSVVPEKNRKEHSLLFYLSPNDLVYVPIEDERENIHAVNLDQLNNEQRKRIYKMVSCTGSECHFVPYYVASPIVNKVEYSSLNKIGRSLTGEMIKDVCIKLKVDRLGNIKGISGL

SEQ ID NO: 23250 - protein, 1272 aa, unidentified
  REGION 1..1272: note = Cas Enzyme sequence
MKKKAEKIYLGLNVGTNSIGYAVTDEQYNLLKFNGNDAWGSIVFDAASSNEDRRNHRLARRNLDRRQQRIVWLQEIFAKEISKVDDRFFIRLSESFRWREDVQDRYVFFNDKEYTDVQYMKEYPTIHHLICELMDNKAPHDVRLVYLACAWLITHRGHFLNNLNVEKLDEIMDISSVYQNFINYFTENGYRRPWGEIDVSALSEILKQKTGVTVKNKELQNILLEGKKPEKSGTEEFPFSQDSIIRLLAGGQCKLKDVFCKEEYLDLGSVSLGMDEEKFGEISGNIGEDYDLLIALRGLYDWSVLADILNGHSETISMAKVQIYEQHGKDLQILKYFVRKYVPDKYNEVFRKAKADNYVAYTGHMDKDTASQIKKKAKAEEFSKYVLKLMSPIKPEKIDLQSYEDMCERLKLNIFLPKQKNTDNRVIPHQLYEYELIQILKNASVYLPFLNDTNNGISEADKVLSVFRYKIPYYVGPLNEKSSFAWISRKAGKITPWNYKDMVDEDASENAFIRRMTNKCTYLPTEDVLPKDSLCYQKFMVLNEINNLQIDGLKIPVKAKQGIYHELFEKNKKVKRKDIEEYLIRNNYLDKDSTKLISGIDEQIHSGLSSYCAFFNLLNKKILSEDDVERIIERASYAEDKSRVIKWLRKEYPGLSEDDIRYIARIKIRDFGRLSKTFLTGLKGCDVSKGFDGQDVEMISILQTMWETNDNLMEILSDKYTFLEAVEAFTQEYYTGKKKSLKERLDEMSVSNSVRRPVYRTLAVVKDIEKAFGKPDKIFLEMTRGGQADQKGKRIKSRKQQILDLYDKCKDDVHDLIRQLEAMGEYADSRLQSDRLYLYFMQFGKCAYSGAHIGFEQLMAGSVEYDIDHIYPQSYVKDDSLNNKVLVLSDLNGTKDNIYPVSPEIRGKMQGLWSWWNHVGAISDEKYKRLIRSAPFTDEEKMGFINRQLTETSQSTKFIADLLKERFPDAEVVYVKAGLVSDFRHEFDLPKSRSYNDLHNAADAFLSVVAGNVYDMRFSKKWFRVDEKYSVKVKTIFTHEVKCRGDIIWDGMPMLEKVEDTARKNTAHFVKYAAFKTGGLFDQNPVKKGTGLIPLKAGLPTEKYGGYNKAGIMFLIPVRYNIGKKSEILILPVELMHGKHFLEDKVFARNYTFTRLENILGKKVGEVSFPMGMRPWKINTMLSFDGFRVCLTGTSGRGKCLVAQPVMQFSADEHWRFYVKRLERFVEKIGINLDLLYDKDHDKVSKDENLKLYELYVDKLQNTIYKLSQECL

SEQ ID NO: 23251 - protein, 1153 aa, unidentified
  REGION 1..1153: note = Cas Enzyme sequence
MKNILGLDLGLSSIGWSVIRENSEEQELVAMGSRVVSLTAAELSSFTQGNGVSINSQRTQKRTQRKGYDRYQLRRTLLRNKLDTLGMLPDDSLSYLPKLQLWGLRAKAVTQRIELNELGRVLLHLNQKRGYKSIKSDFSGDKKITDYVKTVKTRYDELKEMRLTIGELFFRRLTENAFFRCKEQVYPRQAYVEEFDCIMNCQRKFYPDILTDETIRCIRDEIIYYQRPLKSCKYLVSRCEFEKRFYLNAAGKKTEAGPKVAPRTSPLFQVCRLWESINNIVVKDRRNEIVFISAEQRAALFDFLNTHEKLKGSDLLKLLGLSKTYGYRLGEQFKTGIQGNKTRVEIERALGNYPDKKRLLQFNLQEESSSMVNTETGEIIPMISLSFEQEPLYRLWHVLYSIDDREQLQSVLRQKFGIDDDEVLERLSAIDLVKAGFGNKSSKAIRRILPFLQLGMNYAEACEAAGYTHSNNYTKAENEAHALLDRLPAIKKNELRQPVVEKILNQMVNVVNALMEKYGRFDEIRVELARELKQSKEERSNTYKSINKNQRENEQIAKRIVEYGVPTRSRIQKYKMWEESKHCCIYCGQPVDVGDFLRGFDVEVEHIIPKSLYFDDSFANKVCSCRSCNKEKNNRTAYDYMKSKGEKALSDYVERVNTMYTNNQISKTKWQNLLTPVDKISIDFIDRQLRESQYIARKAKEILTSICYNVTATSGSVTSFLRHVWGWDTVLHDLNFDRYKKVGLTEVIEVNHRGSVIRREQIKDWSKRFDHRHHAIDALTIACTKQAYIQRLNNLRAEEGPDFNKMSLERYIQSQPHFSVAQVREAVDRILVSFRAGKRAVTPGKRYIRKNRKRISVQSVLIPRGALSEESVYGVIHVWEKDEQGHVIQKQRAVMKYPITSINREMLDKEKVVDKRIHRILSGRLAQYNDNPKEAFAKPVYIDKECRIPIRTVRCFAKPAINTLVPLKKDDKGNPVAWVNPGNNHHVAIYRDEDGKYKERTVTFWEAVDRCRVGIPAIVTQPDTIWDNILQRNDISENVLESLPDVKWQFVLSLQQNEMFILGMNEEDYRYAMDQQDYALLNKYLYRVQKLSKSDYSFRYHTETSVEDKYDGKPNLKLSMQMGKLKRVSIKSLLGLNPHKVHISVLGEIKEIS

SEQ ID NO: 23252 - protein, 1154 aa, unidentified
  REGION 1..1154: note = Cas Enzyme sequence
MKNILGLDLGSSSIGWAVIRENSEEQELVAMGSRVVSLTAAELSSFTQGNGVSINSQRTQKRTQRKGYDRYQLRRTLLRNKLDTLGMLPDDSLSYLPKLQLWGLRAKAVTQRIELNELGRVLLHLNQKRGYKSIKSDFSGDKKITDYVKTVKTRYDKLKEMRLTIGELFFRRLTENAFFRCKEQVYPRQAYVEEFDCIMNCQRKFYPDILTDETIRCIRDEIIYYQRPLKSCKYLVSRCEFEKRFYLNAAGKKTEAGPKVSPRTSPLFQVCRLWESINNIVVKDRRNEIVFISAEQRAALFDFLNTHEKLKGSDLLKLLGLSKTYGYRLGEQFKTGIQGNKTRVEIERALGNYPDKARLLQFNLQKESSSMVNTETGEIIPMISLSFEQEPLYRLWHVLYSIDDREQLQSVLRQKFGIDDDEVLERLSAIDLVKAGFGNKSSKAIRRILPFLQLGMNYAEACEAAGYNHSNNYTKAENEARALLDRLPAIKKNELRQPVVEKILNQMVNVVNALMEKYGRFDEIRVELARELKQSKEERSNTYKSINKNQRENEQIAKRIVEYGVPTRSRIQKYKMWEESKHCCIYCGQPVDVGDFLRGFDVEVEHIIPKSLYFDDSFANKVCSCRSCNKEKNNRTAYDYMKSKGEKALSDYVERVNTMYTNNQISKTKWQNLLTPVDKISTDFIDRQLRESQYIARKAKEILTSVCYNVTATSGSVTSFLRHVWGWDTVLHDLNFDRYKKVGLTEVIEVNHRGSVIRREQIKDWSKRFDHRHHAIDALTIACTKQAYIQRLNNLRAEEGPDFNKMSLERYIQSQPHFSVAQVREAVDRILVSFRAGKRAVTPGKRYIRKNRKRISVQSVLIPRGALSEDSVYGVIHVWEKDEQGHVIQKQRAVMKYPITSINREMLDKGKVVDKRIHRILSDRLAQYNDNPKEAFAKPVYIDKECRIPIRTVRCFAKPAINTLVPLKKDDKGNPVAWGNPGNNHHVAIYRDEDGKYKERTVTFWEAVDRCRVGIPAIVTQPDTIWDNILQRNDISENVLESLPNVKWQFVLSLQQNEMFILGMNEEDYRYAMDQQDYALLNKYLYRVQKLSKGDYSFRYHTETSVEDKYDGKPNLKLSTQIGKLKRVRSLEALFNLHPHKVHISVLGEIKEIS

SEQ ID NO: 23253 - protein, 1167 aa, unidentified
  REGION 1..1167: note = Cas Enzyme sequence
  REGION 1142..1152: note = misc_feature - Xaa can be any naturally occurring amino acid
MKRILGLDLGTNSIGWALVDSEEHRILGMGSRIIPMDQSVLDTFSGGNPVETQTAARTAYRGTRRLRERALLRRERLIRVLNMMKFLPEHYASQIDFEKRLGQFFDEKEPKLAWKQNDEGRFEFIFQQSFNEMIEEFKNKGVVREDKKIPYDWTIYYLRKKALSQEIEKEELAWILLNFNQKRGYYQLRGEEEEENPNKLVEYYSLKIVDVIADEKPNSKGDIWYSLHLENGWIYRRSSKIPLFGWKDKTRDFIVTTDLNDDGTVKKDKEGIEKRSFRAPSENDWVLLKKKTESDIEKSHKTVGTYVYETLLQNPMQKVCGKLVRTIERKFYKDELKQILEKQREFHPELRDEDLYNDCVRELYRSNETYQFILSKRDFVHLFLDDILFYQRPLRSQRSAIGDCILEFKTYKDKDGNNIKEYLKVISKSNPLYQEFRIWQWLYNLKIYRKEDDEDVTLQFIANIEDKEQLFDFLSNRKSIEQKPLLEYLIKAKGLKKQVKTEAYRWNYVEDKIYPCSETKTMISTRLAKVENVPEDFLTKEIEQKLWHIIYSVTDKNEFEKALRTFAGKYDLDITSFVDNFKKIPPFKNEYGSFSEKAIKKLLSLMRLGKYWKWSDIDNNIQNRISKIIVGEYDEEIKDIVREKSIALTNENDFQGLQLWLAQYLVYGRHSEADIAGKWHSVADLEKYLNEFKQHSLRNPIVEQIITETLRVVRDIWQKYGQGAENFFSEIHVELGRDMKNTADERKKIANVVTENENTNLRIKALLMELKNNSDGKLEVENVRPYSPMQQDILKIYEEYAISTRLDNEKDEKVKEDIEKISRVAQPTTTELQRYKLWLEQKYCSPYTGKVIPLGKLFTEEYQIEHIIPKSRYYDDSFSNKVICEAAVNKLKDKYLGLEFIKNYHGQIVETGFGQKVTIFDEEAYQNFVKQHYAYNRSKRTKLLLEEIPEKMIERQMNDTRYISKFVLPLLSNLVRAEENDNGVNSKNVLPVNGKITTMLKQDWGLNDVWNDLILPRFVRMNELAKTIAFTSWNEQHQKYLPTVPLELSKGFQKKRIDHRHHAMDALVIACATRDHVNLLNNKHANTDTIRYDLQRKLRLFERVIYIDPQTKNNVTKDIPKEFKKPWDNFTVDARNELEKIXXXXXXXXXXXIRQPIYIRNMKTVKR

SEQ ID NO: 23254 - protein, 1508 aa, unidentified
  REGION 1..1508: note = Cas Enzyme sequence
MKKILGLDLGTNSIGWAVINSLVDDEGKEKLTSISSCGSRIIPMDAATLGDFDKGNAKSSVAERTRLRGIRRLLERSLLRRERLHRVLSVMGFLPEHYASQLDRYGKFLPETEPKLAWYKDNTGSYRFLFQDSFNEMLEDFCLYHPELVAEGKKIPYDWTIYYLRKKALSQKIAKEELAWILLNFNQKRGYYQLRGEEEQEDNKKSVEYYALKVVAVEDSGERKGKDIWYNVKLENGWIYRRASSVPLDWAGKVKEFVVTTDLDDAGNPKKDKDGNVKRSFRAPKEDDWGLLKTKTQTQIDESGQTVGAYIYDSLLRMPDQKIRGKLVRTIERKYYKDELRKILLKQTEFHAALQDHNLLLSCIEELYPNNEAHRRLLSTSNFTCFLLEDILFYQRPLKSQKGLIDDCPYESHVYRDKKDGSLHRTPLKCISKSHPLFQEFRLWHFLSFLRIYQRERMIDGSLKLDVDVTNEFLQNEDDYVKLFDWLNGRKEIDQKTILTYKPFGLKKNEQPKYRWNYVEDKSYPCNETRADMISRLGKAGVSEGFLTEEREEALWHILYSISDEKELTKALGTFAEKNGLNEAFVEQFSKMPPFESNYAAYSLKAIRKLLALMRMGKYWNEQDIDKQTRSRIEKILTGEYDETIRTRVREKAIHLTDISSFRGLPLWLACYVVYNRHSEAKELVKWETPADIDHFLSKFRQHSLRNPIVEQVIMETLRTVRDIWKQEGQIDEIHVELGREMKNPAKERARITAQVLENENTNLRIKALLTEFMNPEFEIENVRPYSPGQQEILRIYEEGVLSGVAEKDLPEDIISILKKFRENDVKKRPTTSEVLRYKLWLEQRYRSPYTGRIIPLGKLFTPAYEIEHVIPQSRYFDDSISNKVICESAVNKLKDNCLGYEFIKKHSGEIVELGNGEKATVFTSEEYEHFVKESYLGNGKKMKKLLLEDIPDNFIERQLNDSRYISKVVKSLLSNIVYEEGEQEGMSKNVIVCTGGVTDRLKKDWGVQDVWNRIILPRFLRLNKMTDSTDFTSVSTNGHLLPALPLHLQKGFNKKRIDHRHHAMDAIVIACADRNIVNYLNNASARKGSEISRYDLQRLLCDKVKTDANGNYKWMLRKPWDTFTQDVYTALTNIVVSFKQNLRVINRTTNHYQHYNESGEKKMIPQVKGDRWAIRKPMHKDTVYGEVNLRREKTLPLKDVLNNPSIVVDKSLKSKLHELLKAQYDLKAITKYFEAHQDVWADINLKKIKVYYFTKETNERFFATRKSLDSSFNQKKIQEEVTDTGIQRILLRHLQLNDNNPDIAFSPDGIERMNQNMTILNDGKGHQSIYKVRTYEKAEKFAVGEHGNKVKKFVEAAKGTNLFFAVYESIQEDEATGKQVRKRTFATIPLNEVIKRKKQGLSVAPEDSNGNLPIFVLSPNDLVYLPTEEERNSGKVTQPLDRERIYKMVSCTEGECHFIPSCVASPILQTIELGSNNKAQRAWSGEMIKDICVPIRIDRLGNVSINY

SEQ ID NO: 23255 - protein, 1495 aa, unidentified
  REGION 1..1495: note = Cas Enzyme sequence
MSKILGLDLGTNSIGWALIDSKEQKIIKAGSRIIPMDAATMGDYEKGNLKSAASERTDFRGARRLYERAILRRERLLRVLHTIGFLPKSFEKQIDFTEHPGKFLNHGEPLLPYYKDEQGKNTFLFKDSFNEMLSDFKKHHPDLVSDGKLIPYDWTIYYLRKKALSQPITKEELAWIILNFNTKRGYYQLRGMEDTEETDKTKIEVYKVLEVASVENIGPNKKKEGYNWYLITYDNHATQRASSPTPPQKVGNLVEVVVTTTLDKDGNIKKDKDGFPMIKLRTPKEDDWTLMKKRTEKNLANSHQTVGSFIYEHILSTPNIKVRGKLIHTIERKFYKEELFQILEKQKEFIPELKNIELYKKCVHELYKNNEAHVESLMNEDFTNLFVNDIIFYQRPLKSKKSLIANCPFEFYHYKDKNGNIQSHPIKCIPKSHPLYEEFRLWQFLSNLRIYKKNVEINGKIVTDYDVTSQFLQTPNDYCDLFEWLQNKKEIKQDQLLKYKSFGINKEVSNYRWNYVEDKTYPCCSTRFEINKRLQSLNLQDLDNNDYTHLWHILYSVDDPIMCQKALHKFAIKHGFQEEEFVNKFKQYSPDSKDYGAYSEKAIKRLLALMRTGRHWDEKNIDTKTLSRINNLIDGVVDDEISDRVREKLANKQHISDFQGLPLWAASYVIYNRHSEASETIKWQKPEDIDTYLQNNLKQHSLRNPVVEKIICETLRVVRDIWKNFGDIDEIHVEMGRELKQDAKSRNKDSQRIIENERTNLRIRALLQEFANPNYMIENVRPYSPSQIETLKIYENCVLSDSSIERPDDIQKIMNDLGNAKTIHIKQSDVLRYKMWLEQNYKSPYTGQIIPLSKLFTPAYEIEHIIPQSRYFDDSLSNKVICESEVNKAKDCMLAYEFISQKGGSIIKGNFGQDFKILDKKQYEDFVQHHYANNRTKMKKLLLDDIPEGFIQRQLNDSRYMSKKMLSILSCLVREEGEQETTSKHVIPTNGAITDRLKKEWGINDIWNQLVTPRFERLNDKTGTQAYGQWINKDGKRFFQTNIPLDLSVGFSKKRIDHRHHAMDAIIIACTNRDIVNYLNNIAALSNKENERYDLKHKLCIKAKTDSNGNYIWVFKKPWETFTQDVSGVLEGIIVSFKQNLRIITKMSNYYTHYVDGKKVIDKQTKGDSWAIRKSMHKATVSGLISLQKCKQVKLSVALEQWQNIADKDLRKEIANLIKLYHKFDKKLFIKYFKDRDYKLNGRDISNVRIYYYTGTSGKESITATRVAIDESFDTKKIESISDSGIQKIMLAHLKKYNDEKGNSHPEVAFSPEGIVAMNQNIKELNGGKEHKPIYKVRKTETLGMKFSIGEVGNKNHKYVEADKGTNLFFAIYVNEEGERYFESIPLNIAIERLKNHLKVAEEIKEDGRKLLFTLSPNDLVYLPDVEEGKNIYKMVSCTGNRVFFIPETWATPINNGYELGSLNKVEMSLEGINIKQECEKIEVDRLGRIVKTYK

SEQ ID NO: 23256 - protein, 1550 aa, unidentified; identical to SEQ ID NO: 22334
  REGION 1..1550: note = Cas Enzyme sequence

SEQ ID NO: 23257 - protein, 1433 aa, unidentified
  REGION 1..1433: note = Cas Enzyme sequence
MKKILGLDLGCNSIGWALVNEAENTEEISSIIKLGVRVNPLTVDEMQNFEKGKSITTNADRTLKRSMRRNLQRYKLRRDTLIEVLKEHGFITDSTLLSEHGNKTTFETYRLRAKAAVEEISLEKFARVLLMINKKRGYKSSRKAKGSEDGVLIDGMDVARKLYEEGLTPGELCLQILEAGKKNLPDFYRSDLQNEFDRIWNFQKQFNPELFCDAVKEEVRGKNRSQTWAILAKFFVWSEKESVWNEKEARTEERVKEYKLVGLKRDTKGNELKLENYRWRVQALSEQLNPEIVAIVLQEINGQISASSGYLGAISDRSKQLYFNRQTVGQYLMSELEKDPNVSLRNRVFYRQDYLDEFDRIWEKQAEFHEELTVELKKEIRNIIIFYQRRLKSQKGLISFCEFEKREVVVEEDGRKKNKTVGCRVIPRSHPLFQEFKIWQTLNDIEVFAWDKQSKCKKADKSSILFDNSEDALLVEGKRFLYQEEKELLAKELFVKESMKKAEVLKLLFENYQELDLNFKQIDGNHTGFALFSAYSKMIEKYGYEPVDFKKSADEIIEKLETIFTNLGWNTELLSIDLSKEDKELERQSYFRLWHLLYSFEGDNTPTGNGKLLEKIMQLCDVEKEYAVELANVSFQEDYGSLSAKAIKKILPYLKEGNQYDVACDYAGYRHSRSSLTKDEIENKILKDKLEILPKNSLRNPVVEKILNQIVNLINTLIDTYGKPDEIRVELARELKKNAKEREELTKSIARNTREHDEIRQLLRTEFGMMNVSRNDIIRYKLYEELKDNGYKTLYSNEYIPREKIFSKEIDIEHVIPQARLFDDSLSNKTLEYRAINIEKGNKTAYDFVKEKYGNDGLEKFLNRCETLFKDKRTKLRKLKMEEKDIPEGFIDRDLRNTQYISKKAFAMLNEISRRVVATTGSITDKLREDWQLVDLMKELNLPKYEKLGMVEMFEDKDGRKIKKITDWTKRNDHRHHAVDALTVAFTKDVFIQFYNNKNAAWMPASKEHANITGIKARYFENGKALAPMPLAQFRAEAKRHLENLLVSIKAKNKVITSNVNRTKNKNGENRKLQQTPRGQLHLETVYGSHRQYATKIEKVNAAFDAAKIATVSKLAYRNALLKRLEAFGNDPKKAFTGKNTLEKNPLYLDENQTEMVPEKVQTVEFETVYTIRKPIDPNLSIDKVVDVKIRSVLEKRLKEYGGDAKKAFVNLDENPIWLNEAKGISIKRVSIRGISNAQSLHEKKDKDGNLILGKEGRKIPVDFVNTGNNHHVAIYKKPVLDKVGQVVLDEEGNPKYELDEVVVSFFDAVTRANLGQPIIDKDYRRSEGWQFLFSMKQNEYFVFPNEKTGFNPKEVDLLNPENYALISPNLFRVQKFAYKNYVFRHHLETTIKDTSSTLKGITWTDFRSSKGLDKIVKVRVDHIGQIVSIGEY

SEQ ID NO: 23258 - protein, 1151 aa, unidentified
  REGION 1..1151: note = Cas Enzyme sequence
  REGION 882..893: note = misc_feature - Xaa can be any naturally occurring amino acid
MKNILGLDLGSSSIGWAVIRENSEEQELVAMGSRVVSLTAAELSSFTQGNGVSINSQRTQKRTQRKGYDRYQLRRTLLRNKLDTLGMLPDDSLSYLPKLQLWGLRAKAVTQRIELNELGRVLLHLNQKRGYKSIKSDFSGDKKITDYVKTVKTRYDKLKEMRLTIGELFFRRLTENAFFRCKEQVYPRQAYVEEFDCIMNCQRKFYPDILTDETIRCIRDEIIYYQRPLKSCKYLVSRCEFEKRFYLNAAGKKTEAGPKVSPRTSPLFQVCRLWESINNIVVKDRRNEIVFISAEQRAALFDFLNTHEKLKGSDLLKLLGLSKTYGYRLGEQFKTGIQGNKTRVEIERALGNYPDKARLLQFNLQKESSSMVNTETGEIIPMISLSFEQEPLYRLWHVLYSIDDREQLQSVLRQKFGIDDDEVLERLSAIDLVKAGFGNKSSKAIRRILPFLQLGMNYAEACEAAGYNHSNNYTKAENEARALLDRLPAIKKNELRQPVVEKILNQMVNVVNALMEKYGRFDEIRVELARELKQSKEERSNTYKSINKNQRENEQIAKRIVEYGVPTRSRIQKYKMWEESKHCCIYCGQPVDVGDFLRGFDVEVEHIIPKSLYFDDSFANKVCSCRSCNKEKNNRTAYDYMKSKGEKALSDYVERVNTMYTNNQISKTKWQNLLTPVDKISTDFIDRQLRESQYIARKAKEILTSVCYNVTATSGSVTSFLRHVWGWDTVLHDLNFDRYKKVSLTEVIEVNHRGSVIRREQIKDWSKRFDHRHHAIDALTIACTKQAYIQRLNNLRAEEGPDFNKMSLERYIQSQPHFSVAQVREAVDRILVSFRAGKRAVTPGKRYIRKNRKRISVQSVLIPRGALSEDSVYGVIHVWEKXXXXXXXXXXXXYPITSINREMLDKGKVVDKRIHRILSDRLAQYNDNPKEAFAKPVYIDKECRIPIRTVRCFAKPAINTLVPLKKDDKGNPVAWGNPGNNHHVAIYRDEDGKYKERTVTFWEAVDRCRVGIPAIVTQPDTIWDNILQRNDISENVLESLPNVKWQFVLSLQQNEMFILGMNEEDYRYAMDQQDYALLNKYLYRVQKLSKGDYSFRYHTETSVEDKYDGKPNLKLSTQIGKLKRVRSLEALFNLHPHKVHISVLGEIKEIS

SEQ ID NO: 23259 - protein, 1075 aa, unidentified; identical to SEQ ID NO: 22950
  REGION 1..1075: note = Cas Enzyme sequence

SEQ ID NO: 23260 - protein, 1115 aa, unidentified
  REGION 1..1115: note = Cas Enzyme sequence
AAELSSFTQGNGVSINSQRTQKRTQRKGYDRYQLRRTLLRNKLDTLGMLPDDSLSHLPKLQLWGLRAKAVTQRIELNELGRVLLHLNQKRGYKSIKSDFSGDKKITDYVKIVKTRYDELKEKRLTIGELFFRRLTENAFFRCKEQVYPRQAYVEEFDCIMNCQRKFYPDILTDETIRCIRDEIIYYQRPLKSCKYLVSRCEFEKRFYLNAAGKKTEAGPKVAPRTSPLFQVCRLWESINNIVVKDRRNEIVFISAEQRAALFDFLNTHEKLKGSDLLKLLGLSKTYGYRLGEQFKTGIQGNKTRVEIERALGNYPDKKRLLQFNLQEESSSMVNTETGEIIPMISLSFEQEPLYRLWHVLYSIDDREQLQSVLRQKFGIDDDEVLERLSAIDLVKAGFGNKSSKAIRRILPFLQLGMNYAEACEAAGYTHSNNYTKAENEAHALLDRLPAIKKNELRQPVVEKILNQMVNVVNALMEKYGRFDEIRVELARELKQSKEERSNTYKSINKNQRENEQIAKRIVEYGVPTRSRIQKYKMWEESKHCCIYCGQPVDVGDFLRGFDVEVEHIIPKSLYFDDSFANKVCSCRSCNKEKNNRTAYDYMKSKGEKALSDYVERVNTMYTNNQISKTKLQNLLTPVDKISTDFIDRQLRESQYIARKAKEILTSVCYNVTATSGSVTSFLRHVWGWDTVLHDLNFDRYKKVGLTEVIEVNHRGSVIRREQIKDWSKRFDHRHHAIDALTIACTKQAYVQRLNNLRAEEGPDFNKMSLERYIQSQPHFSVAQVREAVDRILVSFRAGKRAVTPGKRYIIRKNRKRISVQSVLIPRGALSEESVYGVIYVWEKDELGHVIQKQRAVMKYPITSINREMLDKEKVVDKRIHRILSGRLAQYNDNPKEAFAKPVYIDKECRIPIRTVRCFAKPAINTLVPLKKDDKGNPVAWVNPGNNHHVAIYRDEDGKYKERTVTFWEAVDRCRVGIPAIVTQPDTIWDNILQRNDISENVLESLPDVKWQFVLSLQQNEMFILGMNEEDYRYAMDQQDYALLNKYLYRVQKLSKGDYNFRYHTETSVEDKYDGKLNLELSRQMGKLKRVSIKSLLGLNPHKVHISVLGEIKEIS

SEQ ID NO: 23261 - protein, 1509 aa, unidentified
  REGION 1..1509: note = Cas Enzyme sequence
MKTILGLDLGTNSVGWAVINSVIKEQAERIWIEMAGSRIIPMDAAVLGDFDKGNSISQTSERTRLRGARRLRERQLLRRERLHKVLNILGFLPNHYLEYIDFEKHPGKFLADAEPKLAWVKDEQGKYTFLFQAAFDEMLADFAIHQPSLVSGDKKIPYDWTIYYLRKKALTEMISKEELAWILLNFNQKRGYYQLRGEEEEDNAGKSVEFYALKVLTVEATDEKKGRDVWYNVHLENGWIYRRSSSVPLDWEGQVKEFIVTTDLNPDGTPKLDKYGEVKRSFRAPKEDDWMLIKKRTEADIANTHKTVGAYIYDTLLQKPQQKIIGKLVKTVERKLYRDELSLILQKQCAFHAELQDRALYARCVEALYPSNEVRRKNIANRDFVYLLMDDILFYQRPLKTKKSLIANCPYEENEYVDRETGEIKKTPLKCIAKSHPLFQEFRLWNFLSNIRIYQKEKEINGTLHLDVDVTAEFLKTEDDYVALFDWLNSRKEIEQKTFLKYPKFGLKKEISNYRWNYVEDKQYPCNETRHAILSSLEKANVCIDFLSNEKEVALWHILYSVSDKQEIEKALRTFAAKNGLDESFVEAFKKFPPFKSEYGAYSAKAIKKMLPLMRCGKYWDVSSIDDTTKERIKKIVTGEYDERISVKVRDKVMNLSDISCFRRLPLWLACYIVYNRHSEDKEAVKWESPADIDAYLASFKQHSLRNPIVEQVITETLRVVRDIWKQVGRIDEIHIELGREMKNPADKRKRMTAQILENENANLRIKALLAEFMNPEYEIENVRPYSPSQQEILRIYEDTVLHAEDQLPEEIDAILKKFNSSKVPTKSEFLRYKLWLEQKYRSPYTGELIPLGKLFTAAYEIEHVIPQSRYFDDSFSNKVICESAVNKLKDNQLGYEFIKNHHGQKVEVGFGKSVEIFSVDSYERFVKEQYAKSAVKMKKLLMDDIPEQFIERQLNDSRYISKVIKGLLSNIVREKNDSGEYEPEAVSKNIVVCTGSVTDRLKRDWGMNDVWNSIVYPRFERLNSLTDTQSFGHWENKSGKKVFQTELPLEYQKGFSKKRIDHRHHAMDAIVIACATRNHVNYLSNESASRNAKISRYDLQRLLCDKNRTDDNGNYKWVIKKPWDTFTQDAREVLSKIVVSLKQNLRIINKTTNVYRHLDATGNRVYEKQKTGDSWAIRKPMHKDTVFGAVNLRKVKVVRLSVALDTPAMIVDKRVKNKVFELLSYKYDKKRIEKYFKENAFLWKELDLAKVAVYYFTEATTEPLVAVRKPLDSTFNEKKIKESVTDTGIQKILLNHLCTKEGKPDLAFSAEGIEEMNRNLLQLNNGKSHQPIYKVRVYEPRGNKFSVGVLGNKGTKWVEAAKGTNLFFAIYITEDGKRTYETIPLNVVIEREKQGLVPVPDRNKKGDKLLFWLSPNDLVYLPTEEEREFGRINEPIDRGRIYKMVSCTGNEGHFIPANVANPIVPVIELGSNNKAQRAWTNEMIKDICIPIKVDRLGHIIEVKYRIDE

SEQ ID NO: 23262 - protein, 1512 aa, unidentified
  REGION 1..1512: note = Cas Enzyme sequence
MKKILGLDLGTNSIGWAVVCHSDTDGQTERKWIEMAGSRIIPMDAAILGDFDKGNSKSQTSERTGFRGIRRLRERVLLRRERLHKVLKLIGFLPQHYIDSLDFSNHSGKFQLGTEVKLPWRKNEIGKYEFLFQNSFNEMLADFAKKQPELVAMGRKVPYDWTIYYLRKKALSEKITKEELAWILLNFNQKRGYYQLRGEEEEEKKNRLEDFYALKVVEVEQTDDKKGKDIWYNVHLENGWIYRRSSNVPLDWKDKIKEFIVTTELNEDGTPKVDKDGCVKRSFRMPKEDDWKLLKKKTEADIERSHKTIGCYIYDTLLQSPQQKIKGKLVRTIERKFYKDELRLILDKQQAFHPELQDRELYKACLDVLYPMNVAHKNNVANRGFVYLFMEDILFYQRPLKSKKSLIDNCPYEENQYIDVTTGEIKKAPIKCIAKSHPLYQEFRLWQFIDNIRIYQKEKKVDGKLLTDIDVTTEYLSSKDDYVALYEWLCVRKEIEQKTFLKYPAFGLKKEIENYRWNYIEGKSYPCNETRSLILHYLEKAGISSTFLSTKIEESLWHILYSVEDRIELETALRTFASKYQLSCNFVEVFKKFPPFKKEYGAYSAKAIKRLLPLMRMGKYWKVDAIDGNTAERIEKILSGECDEKILNKVWEKTIHLSETSDFQGLPLWLACYVVYNRHSEVKEVAKWKSPEDIDIYLKSFKQHSLRNPIVEQVITETLRVVRDIWKRVEQIDEIHVELGREMKNPSEKRRQMTERMLENENANIRIKALLTEFMNPEYEMENVRPYSPSQQEILRIYEDTVLNGAGDIPEDIEIILKKFKENDIKKRPGKSDFLRYKLWLEQQYRSPYTGEIIPLGKLFTTAYEIEHVIPQSRYFDDSFSNKVICESEVNKLKDNMLGYEFIKKHAGEIVELGLGKSVKIFSVEAYERFVGENYYKAGSKKSKLLMDDIPEKFIERQLNDSRYISRVVKGLLSNVVREEDANGEYESEAISKNVIVCSGSVTDRLKKDWGVNDVWNNIVYSRFERLNRLTESQQFGHWENREGKRFFQTELPLEYQKGFSKKRIDHRHHAMDAIIIACATRNHVNYLSNESASKHARIARYDLQRMLCDKSKADRGGNYKWIIQKPWATFTQDVYRTLLDIIVSFKQNLRVINKMTNYYQAYDDAGKKVFKKQKKGDSWAIRKSMHKDTVFGQVNLRKIKEVRLSVALESPEKIVDKKIKEKVLQLFAYQYDKKKIEKYFKENASLWKEVNLAKIPVYYFTDESSELLVAVRKNLDTGFTEKKIRESVTDTGIQKILLNHLSNKGDKPELAFSPDGIDEMNRNLVILNGGKPHQPIYKVRVCEPLGNKFKVGTNGNKSAKYVEAAKGTNLFFAIYVTDDGKRTYETIPLNVVIEREKLGWLPVPEKNDKGGNLLFWLSPNDLVYLPTEEELMNGIISDSIDRNRIYKMVSCTGNEGHFIPENISNPIIPTLELGSNNKAQRAWTDEMIKETFIPIKVDRLGQITEIINKIR

SEQ ID NO: 23263 - protein, 1154 aa, unidentified; identical to SEQ ID NO: 22526
  REGION 1..1154: note = Cas Enzyme sequence

SEQ ID NO: 23264 - protein, 1433 aa, unidentified
  REGION 1..1433: note = Cas Enzyme sequence
MKKILGLDLGCNSIGWALVNEAENTEEISSIIKLGVRVNPLTVDEMQNFEKGKSITTNADRTLKRSMRRNLQRYKLRRDTLIEVLKEHGFITDSTLLSEHGNKTTFETYRLRAKAAVEEISLEKFARVLLMINKKRGYKSSRKAKGSEDGVLIDGMDVARKLYEEGLTPGELCLQILEAGKKNLPDFYRSDLQNEFDRIWNFQKQFNPELFCDAVKEEVRGKNRSQTWAILAKFFVWSEKESVWNEKEARTEERVKEYKLVGLKRDTKGNELKLENYRWRVQALSEQLNPEIVAIVLQEINGQISASSGYLGAISDRSKQLYFNRQTVGQYLMSELEKDPNVSLRNRVFYRQDYLDEFDRIWEKQAEFHEELTVELKKEIRDIIIFYQRRLKSQKGLISFCEFEKREVVVEEDGRKKNKTVGCRVIPRSHPLFQEFKIWQTLNDIEVFAWDKQSKCKKADKSSILFDNSEDALLVEGKRFLYQEEKELLAKELFVKESMKKAEVLKLLFENYQELDLNFKQIDGNHTGFALFSAYSKMIEKYGYEPVDFKKSADEIIEKLETIFTNLGWNTELLSIDLSKEDKELERQSYFRLWHLLYSFEGDNTPTGNGKLLEKIMQLCDVEKEYAVELANVSFQEDYGSLSAKAIKKILPYLKEGNQYDVACDYAGYRHSRSSLTKDEIENKILKDKLEILPKNSLRNPVVEKILNQMVNLINTLIDTYGKPDEIRVELARELKKNAKEREELTKSIARNTREHDEIRQLLRTEFGMMNVSRNDIIRYKLYEELKDNGYKTLYSNEYIPREKIFSKEIDIEHVIPQARLFDDSLSNKTLEYRAINIEKGNKTAYDFVKEKYGNDGLEKFLNRCETLFKDKRTKLRKLKMEDKDIPEGFIDRDLRNTQYISKKAFAMLNEISRRVVATTGSITDKLREDWQLVDLMKELNLPKYEKLGMVEMFEDKDGRKIKKITDWTKRNDHRHHAVDALTVAFTKDVFIQFYNNKNAAWMPASKEHANITGIKARYFENGKALAPMPLAQFRAEAKRHLENLLVSIKAKNKVITSNVNRTKNKNGENRKLQQTPRGQLHLETVYGSHRQYATKIERVNAAFDVTKIATVSKLAYRNALLKRLEAFGNDPKKAFTGKNTLEKNPLYLDENQTEMVPEKVQTVEFETVYTIRKPIDPNLSIDKVVDVKIRSVLEKRLKEYGGDAKKAFVNLDENPIWLNEAKGISIKRVSIRGISNAQSLHEKKDKDGNLILGKEGRKIPVDFVNTGNNHHVAIYKKPVLDKVGQIVLDEEGNPKYELDEVVVSFFDAVTRANLGQPIIDKDYRRSEGWQFLFSMKQNEYFVFPNEKTGFNPKEVDLLNPENYALISPNLFRVQKFAYKNYVFRHHLETTIKDTSSTLKGITWTDFRSSKGLDKIVKVRVDHIGQIVSIGEY

SEQ ID NO: 23265 - protein, 1550 aa, unidentified; identical to SEQ ID NO: 22433
  REGION 1..1550: note = Cas Enzyme sequence

SEQ ID NO: 23266 - protein, 1153 aa, unidentified
  REGION 1..1153: note = Cas Enzyme sequence
MKNILGLDLGLSSIGWSVIRENSEEQELVAMGSRVVSLTAAELSSFTQGNGVSINSQRTQKRTQRKGYDRYQLRRTLLRNKLDTLGMLPDDSLSYLPKLQLWGLRAKAVTQRIELNELGRVLLHLNQKRGYKSIKSDFSGDKKITDYVKTVKTRYDELKEMRLTIGELFFRRLTENAFFRCKEQVYPRQAYVEEFDCIMNCQRKFYPDILTDETIRCIRDEIIYYQRPLKSCKYLVSRCEFEKRFYLNAAGKKTEAGPKVSPRTSPLFQVCRLWESINNIVVKDRRNEIVFISAEQRAALFDFLNTHEKLKGSDLLKLLGLSKTYGYRLGEQFKTGIQGNKTRVEIERALGNYPDKKRLLQFNLQEESSSMVNTETGEIIPMISLSFEQEPLYRLWHVLYSIDDREQLQSVLRQKFGIDDDEVLERLSAIDLVKAGFGNKSSKAIRRILPFLQLGMNYAEACEAAGYNHSNNYTKAENEARALLDRLPAIKKNELRQPVVEKILNQMVNVVNALMEKYGRFDEIRVELARELKQSKEERSNTYKSINKNQRENEQIAKRIVEYGVPTRSRIQKYKMWEESKHCCIYCGQPVDVGDFLRGFDVEVEHIIPKSLYFDDSFANKVCSCRSCNKEKNNRTAYDYMKSKGEKALSDYVERVNTMYTNNQISKTKWQNLLTPVDKISIDFIDRQLRESQYIARKAKEILTSICYNVTATSGSVTSFLRHVWGWDTVLHDLNFDRYKKVGLTEVIEVNHRGSVIRREQIKDWSKRFDHRHHAIDALTIACTKQAYIQRLNNLRAEEGPDFNKMSLERYIQSQPHFSVAQVREAVDRILVSFRAGKRAVTPGKRYIRKNRKRISVQSVLIPRGALSEESVYGVIHVWEKDEQGHVIQKQRAVMKYPITSINREMLDKEKVVDKRIHRILSGRLAQYNDNPKEAFAKPVYIDKECRIPIRTVRCFAKPAINTLVPLKKDDKGNPVAWVNPGNNHHVAIYRDEDGKYKERTVTFWEAVDRCRVGIPAIVTQPDTIWDNILQRNDISENVLESLPDVKWQFVLSLQQNEMFILGMNEEDYRYAMDQQDYALLNKYLYRVQKLSKSDYSFRYHTETSVEDKYDGKPNLKLSMQMGKLKRVSIKSLLGLNPHKVHISVLGEIKEIS

SEQ ID NO: 23267 - protein, 1504 aa, unidentified; identical to SEQ ID NO: 22497
  REGION 1..1504: note = Cas Enzyme sequence

SEQ ID NO: 23268 - protein, 1153 aa, unidentified
  REGION 1..1153: note = Cas Enzyme sequence
MKNILGLDLGSSSIGWAVIRENSEGQELVAMGSRVVSLTAAELSSFTQGNGVSINSQRTQKRTQRKGYDRYQLRRTLLRNKLDTLGMLPDDSLSHLPKLQLWGLRAKAVTQRIELNELGRVLLHLNQKRGYKSIKSDFSGDKKITDYVKTVKTRYDELKEMRLTIGELFFRRLTENAFFRCKEQVYPRQAYVEEFDCIMNCQRKFYPDVLTDETIRCIRDEIIYYQRPLKSCKYLVSRCEFEKRFYLNAAGKKTEAGPKVAPRTSPLFQVCRLWESINNIVVKDRRNEIVFISAEQRAALFDFLNTHEKLKGSDLLKLLGLSKTYGYRLGEQFKTGIQGNKTRVEIERALGNYPDKKRLLQFNLQEESSSMVNTETGEIIPMISLSFEQEPLYRLWHVLYSIDDREQLQSVLRQKFGIDDDEVLERLSAIDLVKAGFGNKSSKAIRRILPFLQLGMNYAEACEAAGYTHSNNYTKAENEAHALLDRLPAIKKNELRQPVVEKILNQMVNVVNALMEKYGRFDEIRVELARELKQSKEERSNTYKSINKNQRENEQIAKRIVEYGVPTRSRIQKYKMWEESKHCCIYCGQPVDVGDFLRGFDVEVEHIIPKSLYFDDSFANKVCSCRSCNKEKNNRTAYDYMKSKGEKALSDYVERVNTMYTNNQISKTKLQNLLTPVDKISTDFIDRQLRESQYIARKAKEILTSVCYNVTATSGSVTSFLRHVWGWDTVLHDLNFDRYKKVGLTEVIEVNHRGSVIRREQIKDWSKRFDHRHHAIDALTIACTKQAYIQRLNNLRAEEGPDFNKMSLERYIQSQPHFSVAQVREAVDRILVSFRAGKRAVTPGKRYIRKNRKRISVQSVLIPRGALSEESVYGVIYVWEKDEQGHVIQKQRAVMKYPITSITREMLDKEKVVDKRIHRILSGRLAQYNDNPKEAFAKPVYIDKECRIPIRTVRCFAKPAINTLVPLKKDDKGNPVAWVNPGNNHHVAIYRDEDGKYKERTVTFWEAVDRCRVGIPAIVTQPDTIWDNILQRNDISENVLESLPDVKWQFVLSLQQNEMFILGMNEEDYRYAMDQQDYALLNKYLYRVQKLSKGDYSFRYHTETSVEDKYNGKPNLKLSMQMGKLKRVSIKSLLGLNPHKVHISVLGEIKKIS

SEQ ID NO: 23269 - protein, 1394 aa, unidentified
  REGION 1..1394: note = Cas Enzyme sequence
MKHILGLDLGTNSIGWALVKERENENEQSSITRLGVREIYLTADEQSNFEKGKSITTNADRTLKRSMRRNLQRYKLRRNSLISLLKDYGFITAETLLNENGNRTTFETYRLRAKAVTEEISLEELARVLLMINKKRGYKSSRKAKSNDESGQLIDGMEVAKKLYDDNLTPGQYVVSLLRKGKNNIPDFYRSDLVAEFDKIWNFQRQFYPDVLTDSLKEELKGKGDKETWAICSKPFAIEGIKRNIKGWEQKKEDYAWRAESLQHKIDLERLAIVLQKVNGQIKNSSGYLGAISDRSKELFFNKLTVGQYQMAELDKNPNFSLKNQVFYRQDYLDEFERIWETQSKFHKELTPELKHFIRDIIIFYQRPLKSQKGLISLCELESREIEIERDGKKTKKTIGPRVCPKSSPMYQEFRIWQAINNLQVSGMVVADNQVDLFGKTIGKKFGKRFLEQEEKEILFKELNFKSKLTKKEILKLLFENYKELDLNYNEVKGNTTMAALLEACSKIIEMSGHGEYDFSKMSADEITGIVFPVFSGLGFSTDIFSFDSSVEGKAFDKQPSYMLWHLLYSYEGDKSKTGNESLISKISECYGFDKEYAAVIAGISFEPDYGSLSVRAMHKILPYMKDGLGYSDACLYAGYRHSKRSLTKEEIEARPLKDKIDLLPRNSLRNPVVEKILNQMINVVNAVVDTYGRPDEIRVEMARELKKTKTQREETVKAIRKTTAENEKYKKELEEEFGLKNVSRNDIVRYRLYLELKDNGFKTLYSNTYIPREKLFSKEFDIEHIIPQAKLFDDSFSNKTLEARSVNLDKADSTAYDYVKVKYGEDGLEKYKEKINQLCEKKIISKTKLKRLLTTEKDIPDGFINRDLSNTQYIARKACEILEEITRRVVPTTGSVTSRLREDWQLVDMMKELNWDKYDKLGLTEIIEDKDGRRIRHIKDWTKRNDQRHHAMDALTIAFTKPAFIQYLNNLNARSDKGGSIYAIERKELYRDNKGKLRFYPPMPLDEFRTEAKRHLENILVSIKAKNKVVTRNVNITKAKKAEKGKRKRIQLTPRGQLHNETIYGRIRQYATKEEKVNASFTEDKIMTVACKRYREALLVRLRQHDGDAKKAFTGKNSLAKTPLYTDSLHTETVPEKVKTVMLAPLYTKREAVSPDLKIEKVIDIGIKRLLQKRLEQYGGDMQKAFSNLDENPIWLDEEKGISIKRVTISSVSNAEALHDKRDNRGQLILDKDGKKQPTDFVQTSGNHHVAIFRDADGNLQEHMVSFYEATARAIQHLPIIDKEYNKDLGWQFLFTMKQNEYFVFPNEETGFNPKEIDLLNPKNYALISPNLFRVQKLSSKDYVFRHHLETKVEYNKELFGVIWKRIKSLGKIKDIVKVRINQIGKIEDLGEY

SEQ ID NO: 23270 - protein, 1259 aa, unidentified
  REGION 1..1259: note = Cas Enzyme sequence
MPLDWVGKTKEFIVTTDLEKDGTPKKDKEGNVKRSFRAPKEDDWSLLKKKTEADIDQTHKTVGVYIYDTLLGNPSQKICGRLVRTIERKYYKEELKQILEKQKEFHLELQDRALYAACIEELYPINEAHRNNVGNRDFTYLFLEDILFYQRPLKSKKSLIDNCPYEENHCLDKETGEIKSFPVKCIAKSHPLFQEFRLWQFIVNLRIYRKGLAQDVDVTNELLKTEEDYVALFDWLNGKKEIDQKAFLKYPLFGLKKEVENYRWNYVQDKPYPCNETRSSMLARLEKCDISIEFLTKENEEALWHILYSVEDKNEIVKALQKFADKHDLNASFVDVFRKFPPFKKEYGSYSAKAIKKLLPLMRMGKYWSENSIDKGTRERIDKIITGEYDEKIENRVREKAIHLVDVSDFRGLPLWLVCYIVYGRHSESKEITQWKSPADIDSYLKSFKQHSLRNPIVEQIIIETLRVVRDIWKQVGNIDEIHVELGREMKNPADKRKKMTQQISENENTNLRIKYLLTEFLNPEYEVENVRPYSPSQQDILRIYEEGVLNSVSDLPEEISDILKKFTETDLKKRPSRSEVLRYKLWLEQKYRSPYTGEVIPLGKLFTSAYEIEHVIPQSCYFDDSFSNKVICEAEVNKLKSNLLGHEFIVKHHGEIVELPFGKKVRIFTVDEYEQFVKDNYSRTRGKMKKLLMDDIPEEFVTRQLNDSRYISKVVKSLLSNIVREKGEEEAISKNVIPCTGGVTDRLKKDWGINEVWNKIILPRFQRLNELTGTNKFTTKNVGIQEIPTMPLELQKGFNKKRIDHRHHAMDAIIIACANRNIINYLNNESATAKAELSRYDLQKLLCDKAKTDNNGNYKWVIRKPWASFTQDTYLALENIIVSFKQNLRVINKATNHFLHYNEEGKKIFVKQGKGDNWAIRKSMHKDTVFGEVNLRRIKTVALNEAMKNPQSIVVKDFKRKLLELWNLGFDAKRIKKYFEDNRETWSDINLSKIEVYYFSKDTKDRFFATRKPLDTSFDRKKIENNITDTGIQKILLRHLELKDNNPDIAFSPDGIDEMNRNIIQLNNGKYHQPIIKVRWYEQADKFAVGQTGNKSSKFVEAAKGTNLFFAVYESNILDKKTNTIIKKRNYATIPLNVAIERQKQGLPVAPEDENGNDPIFVLSPNDLVYLPTDDELANGIIAQPLDRGRIYKMVSSSGEQCFFIKHIVANVLVDKFEFSPLNKMERALTGEMIKMICMPIKVDRLGNVLESSSSHKK

SEQ ID NO: 23271 - protein, 1510 aa, unidentified
  REGION 1..1510: note = Cas Enzyme sequence
MKRILGLDLGTNSIGWALVDSEEQRILGMGSRIIPMDQGVLDTFSGGNPVETQTAARTAYRGTRRLRERALLRRERLIRVLNMMKFLPEHYASQIDFEKRLGQFFDEKEPKLAWKQNDEGRFEFIFQQSFNEMIEEFKNKGVVREDKKIPYDWTIYYLRKKALSQEIEKEELAWILLNFNQKRGYYQLRGEEEEENPNKLVEYYSLKIVDVIADEKPNSKGDIWYSLHLENGWIYRRSSKIPLFGWKDKTRDFIVTTDLNDDGTVKKDKEGIEKRSFRAPSENDWVLLKKKTESDIEKSHKTVGAYVYETLLQNPMQKVRGKLVRTIERKFYKDELKQILEKQREFHPELRDEDLYNDCVRELYRSNETYQFILSKRDFVYLFLDDILFYQRPLRSQKSAIGDCILEFKTYKDKDGNNIKEYLKVISKSNPLYQEFRIWQWLYNLKIYRKEDDEDVTLQFIANIEDKEQLFDFLSNRKSIEQKPLLEYLIKAKGLKKQVKTEAYRWNYVEDKIYPCSETKTMISTRLAKVENIPDNFFTKEIEQKLWHIIYSVTDKNEFEKALRTFAKKYDLDIASFVDNFKKIPPFKNEYGSFSEKAIKKLLPLMRLGKYWKWNDIDNNTQNRISKIITGEYDEEIKDIVREKSIALTNENDFQGLQLWLAQYLVYGRHSEADIAGKWHSVADLEKYLNEFKQHSLRNPIVEQIITETLRVVRDIWRKYGQGAENFFSEIHVELGRDMKNTADERKKIVNVVTENENTNLRIKALLMELKNNSDGKLEVENVRPYSPTQQDILKIYEEYAISTGLDNEKDEKVKEDIKKISRVAQPTTTELQRYKLWLEQKYCSPYTGKVIPLGKLFTEEYQIEHIIPKSRYYDDSFSNKVICEAAVNKLKDKCLGLEFIKNYHGQIVETGFGQKVTIFDEEAYQNFVKQHYAYNHSKRTKLLLEEIPEKMIERQMNDTRYISKFVLPLLSNLVRAKENDNGVNSKNVLPVNGKITTMLKQDWGLNDVWNDLILPRFVRMNELAKTIAFTSWNEQHQKYLPTVPLELSKGFQKKRIDHRHHAMDALVIACATRDHVNLLNNKHANTDTIRYDLQRKLRLFERVTYIDPQTKNNVTKDIPKEFKKPWDNFTVDARNKLEKIIVSFKQNLRIINKATNIYTKYENGKKIKVGQKGLNWAIRKPLHKETVFAKVSLRKRKTVRLSEALKDWKKIVDKKLKQEIKRLTCQYGKFDVDTILRYFKDRKYQFGEVDVSKVKMYYFDEENAAVRKNVDTSFTEKFIQGSVTDTGIQKILLNHLEAKGNKVEIAFSPEGIEEMNKNIIQLNEGKLHLPIFKVRVYETIGNKFSVGVKGNKKDKYVEAAKGTNLFFAIYVDENGIRSYETIPLNIVIERLKQGLSVVPEKNRKEHSLLFYLSPNDLVYVPIEDERENIHAVNLDQLNNEQRKRIYKMVSCTGSECHFVPYYVASPIVNKVEYSSLNKIGRSLTGEMIKDVCIKLKVDRLGNIKGISGL

SEQ ID NO: 23272 - protein, 1509 aa, unidentified
  REGION 1..1509: note = Cas Enzyme sequence
MKTILGLDLGTNSVGWAVINSVIKEQAERIWIEMAGSRIIPMDAAVLGDFDKGNSISQTSERTRLRGARRLRERQLLRRERLHKVLNILGFLPNHYLEYIDFEKHPGKFLADAEPKLAWVKDEQGKYTFLFQAAFDEMLADFAIHQPSLVSGDKKIPYDWTIYYLRKKALTEMISKEELAWILLNFNQKRGYYQLRGEEEEDNAGKSVEFYALKVLTVEATDEKKGRDVWYNVHLENGWIYRRSSSVPLDWEGQVKEFIVTTDLNPDGTPKLDKYGEVKRSFRAPKEDDWMLIKKRTEADIANTHKTVGAYIYDTLLQKPQQKIIGKLVKTVERKLYRDELSLILQKQCAFHAELQDRALYARCVEALYPSNEVRRKNIANRDFVYLLMDDILFYQRPLKTKKSLIANCPYEENEYVDRETGEIKKAPLKCIAKSHPLFQEFRLWNFLSNIRIYQKEKEINGTLHLDVDVTAEFLKTEDDYVALFDWLNSRKEIEQKTFLKYPKFGLKKEISNYRWNYVEDKQYPCNETRHAILSRLEKANVCIDFLSNEKEVALWHILYSVSDKQEIEKALRTFAAKNGLDESFVEAFKKFPPFKSEYGAYSAKAIKKMLPLMRCGKYWDVSSIDDTTKERIKKIVTGEYDERISVKVRDKVMNLSDISCFRRLPLWLACYIVYNRHSEDKEAVKWESPADIDAYLASFKQHSLRNPIVEQVITETLRVVRDIWKQVGRIDEIHIELGREMKNPADKRKRMTAQILENENANLRIKALLAEFMNPEYEIENVRPYSPSQQEILRIYEDTVLHAEDQLPEEIDAILKKFNSSKVPTKSEFLRYKLWLEQKYRSPYTGELIPLGKLFTAAYEIEHVIPQSRYFDDSFSNKVICESAVNKLKDNQLGYEFIKNHHGQKVEVGFGKSVEIFSVDSYERFVKEQYAKSAVKMKKLLMDDIPEQFIERQLNDSRYISKVIKGLLSNIVREKNDSGEYEPEAVSKNIVVCTGSVTDRLKRDWGMNDVWNSIVYPRFERLNFLTDTQSFGHWENKSGKKVFQTELPLEYQKGFSKKRIDHRHHAMDAIVIACATRNHVNYLSNESASRNAKISRYDLQRLLCDKNRTDDNGNYKWVIKKPWDTFTQDAREVLSKIVVSLKQNLRIINKTTNVYRQFDATVNRVYQKQKTGDSWAIRKPMHKDTVFGAVNLRKVKVVRLSVALDTPAMIVDKRVKNKVFELLSYKYDKKRIEKYFKENAFLWKELDLAKVAVYYFTEATTEPLVAVRKPLDSTFNEKKIKESVTDTGIQKILLNHLCTKEGKPDLAFSAEGIEEMNRNLLQLNNGKSHQPIYKVRVYEPRGNKFSVGVLGNKGTKWVEAAKGTNLFFAIYITEDGKRTYETIPLNVVIEREKQGLVPVPDRNKKGDKLLFWLSPNDLVYLPTEEEREFGRINEPIDRGRIYKMVSCTGNEGHFIPANVANPIVPVIELGSNNKAQRAWTNEMIKDICIPIKVDRLGHIIEVKYRIDE

SEQ ID NO: 23273 - protein, 1546 aa, unidentified
  REGION 1..1546: note = Cas Enzyme sequence
MKNILGLDLGSNSIGWAIVKALKNEDGKEILQSIDLAGSRIIPMDQATLGNFENGNSVSQTRERTGYRSARRLRERYLLRRERLLRVLNCMGFLPEHYSQNIDKYGKFFLDNEVKLSWKKDKMGKNEFIFLDSFNEMLEDFRHSQPQLLLDGRKVPYDWTIYYLRKKALTEKISKEELAWILLNFNQKRGYFQLRGEDEEVQGKKIEFYALKVVRVEDTGEKKGKDTWYNVYLESGLGDTDDYWVYRRASSVPIDEWEGQVKEFIVTTTLDNNGSPEGKVKRSFSIPKPEDWMLVKKKTEVDIKSSGKTVGTYIYDTLLQKPDQKIKGKLIRTIERENYTNELSLILENQKKFHLELQDRELYHQCIELLYYKNEAHKRVIGTWDFTSLFIKDILFYQRPLKSKKALIDNCPYEESFYIENGEKKSKPRKCIAKSHPLFQEFRIWQFISNLRIYQKVKEVDGKLQFNVDVTSDFLRDESAYVELFKWLNERAEVSQEDLLKHLGLKKTKTEDTVSLYRWNYVEDKKYPGNKTRSSILKKLLNDEKEALSEDIELKIWHLLYSVSAQSEIDKALSSKNVSTKGIYSGLSVYFSDETIQKIKNVKLESGYGSYSAKAIGKLLPLMRRGKYWNLESIDNHTKERIEKILNGECDETIRARTREKSISLTDISQFKGLPLWLACYIVYDRHSELKTIKKWNGPEDIDKFLKEFKQHTLRNPIVEQVIMETLHVVRDIWRRVGSIDEIHIEMGRDMKQTAQERARRSAIISRNENDNLRIKALLHEFMNPELGIENVRPYSPAQQEILRIYEDGVLSSVSEIEDEIKNILKKFNESEEGKRPTKNEIIRYKCWLEQKYRSPYTGEIIPLGKLFTPAYQIEHIIPQARFFDDSFTNKVICEAEVNAKKGDLLGYEFVKEKGGEIVELSGGRNVRIFSVEEYEDFVKEHYKSNKQKMQRLLAEDIPTEFSHRQLNDSRYISKYIRNLLSNIVREDDEQESVSKNVISCNGAITDRLKKDWGVNDVWNHIILPRFVRLEEIRADNGEKFTAFNQEGHRIPSMPLIHQKGFNKKRIDHRHHAMDAIVIACTTRDHVNLLNNECSNPQNNVNKHQLSRKLRRYENVSYKQDGKLKEREVPKEFLKPWEGFTRDVEFALKNVIVSFRQNLRVLNKTVNYFQHWKDNSSEKEWKEQKSADHWSIRKPLHKETVSGEVFLWRTRFVSLREALTKPKRIVEKDLRSKILELQRKGYDIERIKKYFEDNKDVWQDVNLSKIEVRYYSREIVDPQTGLPKNRYFATRFGNDLISLFSGVSNFENAKKIIESITDTGIQKILFRHLENKGNDPVLAFSPEGIDEMNRTIKTLNNGKDHKPIYKVRIYECSTMKFPLGSIGNKSKKFVEAAKGTNLYFAVYEKEVENDRGECHKERIFKTIPLNDVIRNLKQGLSIAPNDENGNPPAFILSPNDLVYLPTKEELETGSISQPLDRNRIYKMVSCTGNVAHFIPAFIAIPILQTIELGSKNKAQKAWTGEMIKESCIPIKVDRLGMLISINGKVV

SEQ ID NO: 23274 - protein, 1508 aa, unidentified; identical to SEQ ID NO: 22278
  REGION 1..1508: note = Cas Enzyme sequence

SEQ ID NO: 23275 - protein, 1504 aa, unidentified
  REGION 1..1504: note = Cas Enzyme sequence
MKNIVGLDLGTNSIGWAVVNGSVNDDGSEQLVKIQASGSRIIPMDAAMIGDFNKGNSISQTAERTRLRGVRRLSERYLLRRERLHRILDILGFLPFHFAQDLDRHGKIVKGKEPKLAWRKNEAGQFEFIFQDSFKEMLEDFKLNYPNLITDDKKVPYDWTIYYLRKKGLTSKISKEELAWILLNFNQKRGYYQLRGEEEEENKDKLVEFYALKVVAVEDSGEKKGKDIWYNVHLENGWVYRRTSNMSLDWVGKTKEFIVTTDLEKDGTPKKDKEGNVKRSFRAPKEDDWSLVKKKTEADIDQTHKTVGAYIYDTLLGNPSQKIRGRLVRTIERKYYKEELKLILEKQKEFHLELQDRALYAACIEELYPINEAHRNNVGNRDFTYLFLEDILFYQRPLKSKKSLIDNCPYEENQGLDKETGEIKSFPVKCIAKSHPLFQEFRLWQFIINLRIYRKDLAQDVDVTNELLKTEEDYVALFDWLNGKKEIDQKAFLKYPVFGLKKEIENYRWNYVQDKPYPCNETRSSMLARLEKCDISIEFLTKENEEALWHILYSVEDKNEIVKALQKFADKHDLNASFVDVFQKFPPFKKEYGSYSAKAIKKLLPLMRMGKYWSENSIDKGTRERIDKIITGEYDEKIENRVREKAIHLADVSDFKGLPLWLVCYIVYGRHSEAKEIIQWKSPADIDSYLRSFKQHSLRNPIVEQIIIETLRVVRDIWKQVGNIDEIHVELGREMKNPADKRKKMTQQMSENENTNLRIKYLLTEFLNPEYEVENVRPYSPSQQDILRIYEEGVLNSVSDLPEEISDILKKFTETDLKKRPSRSEVLRYKLWLEQKYRSPYTGEVIPLGKLFTPAYEIEHVIPQSCYFDDSFSNKVICEAEVNKLKSNLLGHEFIVKHHGEIVELPFGKKVRIFTVDEYEQFVKDNYSRTRSKMKKLLMDDIPEEFVTRQLNDSRYISKVVKSLLSNIVREKGEEEAISKNVIPCTGGVTDRLKKDWGINEVWNKIILPRFQRLNELTGTNKFTTKNVGIQEIPTMPLELQKGFNKKRIDHRHHAMDAIIIACANRNIINYLNNESATAKAELSRYDLQKMLCDKAKTDNNGNYKWVIRKPWASFTQDTYLALENIIVSFKQNLRVINKATNRFLHYNEEGKKIFVKQGKGDNWAIRKSMHKDTVFGEVNLRRIKTVALNEAMKNPQSIVVKDFKRKLLELWNLGFDAKRIKKYFEDNRETWSDINLSKIEVYYFSKDTKDRFFATRKPLDTSFDRKKIENNITDTGIQKILLRHLELKDNNPDIAFSPDGIDEMNRNIIQLNNGKYHQPIIKIRWYEQADKFAVGQTGNKSSKFVEAAKGTNLFFAVYESNILDKKTNTIIKKRNYATIPLNVAIERQKQGLPVAPEDENGNDPIFVLSPNDLVYLPTDDELANGIIAQPLDRGRIYKMVSSSGEQCFFIKHIVANVLVDKFEFSPLNKMERALTGEMIKMICIPIKVDRLGNVLESSSSYKK

SEQ ID NO: 23276 - protein, 1536 aa, unidentified
  REGION 1..1536: note = Cas Enzyme sequence
LIIYFIFEKIVNTILVMKKIVGLDLGTNSIGWALINAYIDEYNKEHLYGIEACGSRIIPMDAAILGNFDKGNSISQTADRTSYRGIRRLRERHLLRRERLHRILDLLGFLPKHYSDSLNRYGKFLNDIECKLPWVKDETGSYKFIFQESFKEMLANFTEHHPILIANNKKVPYDWTIYYLRKKALTQKISKEELAWILLNFNQKRGYYQLRGEEEETPNKLVEYYSLKVEKVEDSGEKKGKDTWYNVHLENGMIYRRTSNIPLDWEGKTKEFIVTTDLEADGSPKKDKEGNIKRSFRAPKDDDWTLIKKKTEADIDKIKMTVGAYIYDTLLQKPDQKIRGKLVRTIERKYYKNELYQILKTQSEFHEELRDKQLYIACLNELYPNNEPRRNSISTRDFCHLFIEDIIFYQRPLKSKKSLIDNCPYEENRYIDKESGEIKHASIKCIAKSHPLYQEFRLWQFIVNLRIYRKETDVDVTQELLPTEADYVTLFEWLNEKKEIDQKAFFKYPPFGFKKTTSNYRWNYVEDKPYPCNETHAQIIARLGKAHIPKAFLSKEKEETLWHILYSIEDKQEIEKALHSFANKNNLSEEFIEQFKNFPPFKKEYGSYSAKAIKKLLPLMRMGKYWSIENIDNGTRIRINKIIDGEYDENIRERVRQKAINLTDITHFRALPLWLACYLVYDRHSEVKDIVKWKTPKDIDLYLKSFKQHSLRNPIVEQVITETLRTVRDIWQQVGHIDEIHIELGREMKNPADKRARMSQQMIKNENTNLRIKALLTEFLNPEFGIENVRPYSPSQQDLLRIYEEGVLNSILELPEDIGIILGKFNQTDTLKRPTRSEILRYKLWLEQKYRSPYTGEMIPLSKLFTPAYEIEHIIPQSRYFDDSLSNKVICESEINKLKDRSLGYEFIKNHHGEKVELAFDKPVEVLSVEAYEKLVHESYSHNRSKMKKLLMEDIPDQFIERQLNDSRYISKVVKSLLSNIVREENEQEAISKNVIPCTGGITDRLKKDWGINDVWNKIVLPRFIRLNELTESTRFTSINTNNTMIPSMPLELQKGFNKKRIDHRHHAMDAIIIACANRNIVNYLNNVSASKNTKITRRDLQTLLCHKDKTDNNGNYKWVIDKPWETFTQDTLTALQKITVSFKQNLRVINKTTNHYQHYENGKKIVSNQSKGDSWAIRKSMHKETVHGEVNLRMIKTVSFNEALKKPQAIVEMDLKKKILAMLELGYDTKRIKNYFEENKDTWQDINPSKIKVYYFTKETKDRYFAVRKPIDTSFDKKKIKESITDTGIQQIMLRHLETKDNDPTLAFSPDGIDEMNRNILILNKGKKHQPIYKVRVYEKAEKFTVGQKGNKRTKFVEAAKGTNLFFAIYETEEIDKDTKKVIRKRSYSTIPLNVVIERQKQGLSSAPEDENGNLPKYILSPNDLVYVPTQEEINKGEVVMPIDRDRIYKMVDSSGITANFIPASTANLIFALPKATAEIYCNGENCIQNEYGIGSPQSKNQKAITGEMVKEICFPIKVDRLGNIIQVGLCILTN

SEQ ID NO: 23277 - protein, 1312 aa, unidentified
  REGION 1..1312: note = Cas Enzyme sequence
VQNGFLGITVSSEQVGWAVTNPKYELERASRKDLWGVRLFDKAETAEDRRMFRTNRRLNQRKKNRIHYLRDIFHEEVNQKDPNFFQQLDESNFCEDDRTVEFNFDTNLYKNQFPTVYHLRKYLMETKDKPDIRLVYLAFSKFMKNRGHFLYKGNLGEVMDFENSMKGFCESLEKFNIDFPTLSDEQVKEVRDILCDHKIAKTVKKKNIITITKVKSKTAKAWIGLFCGCSVPVKVLFQDIDEEIVTDPEKISFEDASYDDYIANIEKGVGIYYEAIVSAKMLFDWSILNEILGDHQLLSDAMIAEYNKHHDDLKRLQKIIKGTGSRELYQDIFINDVSGNYVCYVGHAKTMSSADQKQFYTFLKNRLKNVNGISSEDAEWIDTEIKNGTLLPKQTKRDNSVIPHQLQLREFELILDNMQEMYPFLKENREKLLKIFNFVIPYYVGPLKGVVRKGESTNWMVPKKDGVIHPWNFDEMVDKEASAECFISRMTGNCSYLFNEKVLPKNSLLYETFEVLNELNPLKINGEPISVELKQRIYEQLFLTGKKVTKKSLTKYLIKNGYDKDIELSGIDNEFHSNLKSHIDFEDYDNLSDEEVEQIILRITVFEDKQLLKDYLNREFVKLSEDERKQICSLSYKGWGNLSEMLLNGITVTDSNGVEVSVMDMLWNTNLNLMQILSKKYGYKAEIEHYNKEHEKTIYNREDLMDYLNIPPAQRRKVNQLITIVKSLKKTYGVPNKIFFKISREHQDDPKRTSSRKEQLKYLYKSLKSEDEKHLMKELDELNDHELSNDKVYLYFLQKGRCIYSGKKLNLSRLRKSNYQNDIDYIYPLSAVNDRSMNNKVLTGIQENRADKYTYFPVDSEIQKKMKGFWMELVLQGFMTKEKYFRLSRENDFSKSELVSFIEREISDNQQSGRMIASVLQYYFPESKIVFVKEKLISSFKRDFHLISSYGHNHLQAAKDAYITIVVGNVYHTKFTMDPAIYFKNHKRKDYDLNRLFLENISRDGQIAWESGPYGSIQTVRKEYAQNHIAVTKRVVEVKGGLFKQMPLKKGHGEYPLKTNDPRFGNIAQYGGYTNVTGSYFVLVESMEKGKKRISLEYVPVYLHERLEDDPGHKLLKEYLVDHRKLNHPKILLAKVRKNSLLKIDGFYYRLNGRSGNALILTNAVELIMDDWQTKTANKISGYMKRRAIDKKARVYQNEFHIQELEQLYDFYLDKLKNGVYKNRKNNQAELIHNEKEQFMELKTEDQCVLLTEIKKLFVCSPMQADLTLIGGSKHTGMIAMSSNVTKADFAVIAEDPLGLRNKVIYSHKGEK

SEQ ID NO: 23278 - protein, 1511 aa, unidentified
  REGION 1..1511: note = Cas Enzyme sequence
MKRILGLDLGTNSIGWALVDSEERKTLGMGSRIIPMDQGVLDTFSGGNPIETQTAARTAYRSTRRLRERVLLRRARLLRVLNVMNFLPEHYVSQIDFEKRLGQFLDGTEPKLAWRQKDEGKSEFIFQQSFNEMIEEFKNNGTIGENQKIPYDWTIYYLRKKALSRKIDKEELAWILLNFNQKRGYYQLRGEEEEENSNKLVEYYSLKIVDVIADEKPNGKGDTWYSLHLENGWVYRRPSKIPLLGWKGKIRDFIVTTDLNDDGTVKKDKEGIEKRSFRAPSENDWTLLKKKTENDIEKSHKTVGTYVYEALLQNPMQKVRGKLVRTIERKFYKDELKQILEKQKEFHPELRDEDLYNDCVRELYCSNETHKFILSKRDFVHLLLDDILFYQRPLRSQKSAISDCTLEFQAYKDKNGNKVKGHLKATSKSNPLYQEFRIWQWLYNLKIYRKEDDKDVTLEFITGIEDKELLFEFLNNRKNIEQKPLLEYLIKAKGLKKQVKAEAYRWNYVEDKTYPCSETRTMISTRLAKVENLPDDFLTKEVEQRLWHIIYSVTDKNEFEKALKTFAGKYNLDVTSFVDNFKKFPPFKNEYGSFSEKAIKKLLPLMRLGKYWKWSDIDSYTQNRISKIITGEYDEEIKDKVREKAIHLTNENDFQGLQLWLAQYIVYGRHSEADIAGKWHSIADLEKYLNEFKQHSLRNPIVEQIVTETLRVVKDIWQEYGQGVENFFNEIHIELGRDMKNTAEERKRLANTITENENTNLRIKALLMELKNNSDGKLEVENVRPYSPMQQDILKIYEEYAIGAELDNERDEKVKEDIKKISKAAQPTTVELQRYKLWLEQKYCSPYTGKVIPLSKLFTEEYQIEHIIPKSRYYDDSFSNKVICEAAVNKLKDKYLGFEFIKNYHGQIVETGFGQKVTVFDEESYQNFVKQHYVHSRSKRMKLLLEEIPEKMIERQMNDTRYISKFVFPLLSNLVRAEKDDDGINSKNVLPGNGKITTILKQDWGLNDVWNDLILPRFVRMNELKKTTAFTSWNGQYQKYLPAVPLELSKGFQKKRIDHRHHAMDALVIACATRDHINLLNNKYANTDKVRYDLQRKLRLFEQVTYIDPETKKEVTKNVPKEFKKPWDNFTIDARNELESIIVSFKQNLRIINKATNVYTKYENGKKIKVNQKGSNWAIRKPLHKETVFAKVSLRKRKTVRLSEALKDSEKIVDKGLKQEIRRLTCQYGKFDAGTILRYFKDRKYEFEGADVSKVEVYYFDEENAAVRKNVDTSFTKKIIQESVTDTGIQKILINHLAAKGDKAEMAFSPEGIEEMNKNIVQLNGGKCHLPIFKVRVYETIGNKFPVGVKGNKKDKYVEAAKGTNLFFAIYVDENGVRSYETIPLNIVIERLKQGLNAVPERDKKEHNLLFYLSPNDLVYVPTDDERENVCAINFGQFSNEQKKRVYKMVSCTGSECHFLPHYVANSIVNKVEYSPLNKIGRSLTGEMIKNVCIKLKVDRLGNIKGRTYER

SEQ ID NO: 23279 - protein, 1260 aa, unidentified
  REGION 1..1260: note = Cas Enzyme sequence
MFRTNRRLNQRKKNRIHYLRDIFHEEVNQKDPNFFQQLDESNFCEDDRTVEFNFDTNLYKNQFPTVYHLRKYLMETKDKPDIRLVYLAFSKFMKNRGHFLYKGNLGEVMDFENSMKGFCESLEKFNIDFPTLSDEQVKEVRDILCDHKIAKTVKKKNIITITKVKSKTTKAWIGLFCGCSVPVKVLFQDIDEEIVTDPEKISFEDASYDDYIANIEKGVGIYYEAIVSAKMLFDWSILNEILGDHQLLSDAMIAEYNKHHDDLKRLQKIIKGTGSRELYQDIFINDVSGNYVCYVGHAKTMSSADQKQFYTFLKNRLKNVNGISSEDAEWIDTEIKNGTLLPKQTKRDNSVIPHQLQLREFELILDNMQEMYPFLKENREKLLKIFNFVIPYYVGPLKGVVRKGESTNWMVPKKDGVIHPWNFDEMVDKEASAECFISRMTGNCSYLFNEKVLPKNSLLYETFEVLNELNPLKINGEPISVELKQRIYEQLFLTGKKVTKKSLTKYLIKNGYDKDIELSGIDNEFHSNLKSHIDFEDYDNLSDEEVEQIILRITVFEDKQLLKDYLNREFVKLSEDERKQICSLSYKGWGNLSEMLLNGITVTDSNGVEVSVMDMLWNTNLNLMQILSKKYGYKAEIERYNKEHEKNIYNREDLMDYLNIPPAQRRKVNQLITIVKSLKKRCGVPNKIFFKVSREHQDDPKRTSSRKEQLKYLYKSLKSEDEKHLMKELDELNGHELSNDKVYLYFLQKGRCIYSGKKLNLSRLRKSNYQNDIDYIYPLSAVNDRSMNNKVLTGIQENRVDKYTYFPVDPEIQKKMKGFWMELVLQGFMSKEKYFRLSRENDFSENELVSFIEREISDNQQSGRMIASVLQYYFPESKIVFVKEKLIPSFKRDFHLISSYGHNHLQAAKDAYITIVVGNVYHTKFTMDPAIYFKNHKRKDYDLNRLFLENISRDGQIAWESGPYGSIQTVRKEYAQNHIAVTKRVVEVKGGLFKQMPLKKGHGEYPLKTNDPRFGNIAQYGGYTNVTGSYFVLVESMEKGKKRISLEYVPVYLHERLEDDPGHKLLKEYLVDHRKLNHPKILLAKVRKNSLLKIDGFYYRLNGRSGNALILTNAVELIMDDWQTKTANKISGYMKRRAIDKKARVYQNEFHIQELEQLYDFYLDKLENGVYKNRKNNQAELIHNEKEQFMELKTEDQCVLLTEIKKLFVCSPMQADLTLIGGSKHTGMIAMSSNVTDFAVIAEDPLGLRNKVIYSHKGEK

SEQ ID NO: 23280 - protein, 1312 aa, unidentified
  REGION 1..1312: note = Cas Enzyme sequence
VQNGFLGITVSSEQVGWAVTNPKYELERASRKDLWGVRLFDKAETAEDRRMFRTNRRLNQRKKNRIHYLRDIFHEEVNQKDPNFFQQLDESNFCEDDRTVEFNFDTNLYKNQFPTVYHLRKYLMETKDKPDIRLVYLAFSKFMKNRGHFLYKGNLGEVMDFENSMKGFCESLEKFNIDFPTLSDEQVKEVRDILCDHKIAKTVKKKNIITITKVKSKTAKAWIGLFCGCSVPVKVLFQDIDEEIVTDPEKISFEDASYDDCIANIEKGVGIYYEAIVSAKMLFDWSILNEILGDHQLLSDAMIAEYNKHHDDLKRLQKIIKGTGSRELYQDIFINDVSGNYVCYVGHAKTMSSADQKQFYTFLKNRLKNVNGISSEDAEWIDTEIKNGTLLPKQTKRDNSVIPHQLQLREFELILDNMQEMYPFLKENREKLLKIFNFVIPYYVGPLKGVVRKGESTNWMVPKKDGVIHPWNFDEMVDKEASAECFISRMTGNCSYLFNEKVLPKNSLLYETFEVLNELNPLKINGEPISVELKQRIYEQLFLTGKKVTKKSLTKYLIKNGYDKDIELSGIDNEFHSNLKSHIDFEDYDNLSDEEVEQIILRITVFEDKQLLKDYLNREFVKLSEDERKQICSLSYKGWGNLSEMLLNGITVTDSNGVEVSVMDMLWNTNLNLMQILSKKYGYKAEIEHYNKEHEKTIYNREDLMDYLNIPPAQRRKVNQLITIVKSLKKTYGVPNKIFFKISREHQDDPKRTSSRKEQLKYLYKSLKSEDEKHLMKELDELNDHELSNDKVYLYFLQKGRCIYSGKKLNLSRLRKSNYQNDIDYIYPLSAVNDRSMNNKVLTGIQENRADKYTYFPVDSEIQKKMKGFWMELVLQGFMTKEKYFRLSRENDFSKSELVSFIEREISDNQQSGRMIASVLQYYFPESKIVFVKEKLISSFKRDFHLISSYGHNHLQAAKDAYITIVVGNVYHTKFTMDPAIYFKNHKRKDYDLNRLFLENISRDGQIAWESGPYGSIQTVRKEYAQNHIAVTKRVVEVKGGLFKQMPLKKGHGEYPLKTNDPRFGNIAQYGGYTNVTGSYFVLVESMEKGKKRISLEYVPVYLHERLEDDPGHKLLKEYLVDHRKLNHPKILLAKVRKNSLLKIDGFYYRLNGRSGNALILTNAVELIMDDWQTKTANKISGYMKRRAIDKKARVYQNEFHIQELEQLYDFYLDKLENGVYKNRKNNQAELIHNEKEQFMELKTEDQCVLLTEIKKLFVCSPMQADLTLIGGSKHTGMIAMSSNVTKADFAVIAEDPLGLRNKVIYSHKGEK

SEQ ID NO: 23281 - protein, 1509 aa, unidentified
  REGION 1..1509: note = Cas Enzyme sequence
MKTILGLDLGTNSVGWAVINSVIKEQAERIWIEMAGSRIIPMDAAVLGDFDKGNSISQTSERTRLRGARRLRERQLLRRERLHKVLNILGFLPNHYLEYIDFEKHPGKFLADAEPKLAWVKDEQGKYTFLFQAAFDEMLADFAIHQPSLVSGDKKIPYDWTIYYLRKKALTEMISKEELAWILLNFNQKRGYYQLRGEEEEDNAGKSVEFYALKVLTVEATDEKKGRDVWYNVHLENGWIYRRSSSVPLDWEGQVKEFIVTTDLNPDGTPKLDKYGEVKRSFRAPKEDDWMLIKKRTEADIANTHKTVGAYIYDTLLQKPQQKIIGKLVKTVERKLYRDELSLILQKQCAFHAELQDRALYARCVEALYPSNEVRRKNIANRDFVYLLMDDILFYQRPLKTKKSLIANCPYEENEYVDRETGEIKKAPLKCIAKSHPLFQEFRLWNFLSNIRIYQKEKEINGTLHLDVDVTAEFLKTEDDYVALFDWLNSRKEIEQKTFLKYPKFGLKKEISNYRWNYVEDKQYPCNETRHAILSRLEKANVCIDFLSNEKEVALWHILYSVSDKQEIEKALRTFAAKNGLDESFVEAFKKFPPFKSEYGAYSAKAIKKMLPLMRCGKYWDVSSIDDTTKERIKKIVTGEYDERISVKVRDKVMNLSDISCFRRLPLWLACYIVYNRHSEDKEAVKWESPADIDAYLASFKQHSLRNPIVEQVITETLRVVRDIWKQVGRIDEIHIELGREMKNPADKRKRMTAQILENENANLRIKALLAEFMNPEYEIENVRPYSPSQQEILRIYEDTVLHAEDQLPEEIDAILKKFNSSKVPTKSEFLRYKLWLEQKYRSPYTGELIPLGKLFTAAYEIEHVIPQSRYFDDSFSNKVICESAVNKLKDNQLGYEFIKNHHGQKVEVGFGKSVEIFSVDSYERFVKEQYAKSAVKMKKLLMDDIPEQFIERQLNDSRYISKVIKGLLSNIVREKNDSGEYEPEAVSKNIVVCTGSVTDRLKRDWGMNDVWNSIVYPRFERLNFLTDTQSFGHWENKSGKKVFQTELPLEYQKGFSKKRIDHRHHAMDAIVIACATRNHVNYLSNESASRNAKISRYDLQRLLCDKNRTDDNGNYKWVIKKPWDTFTQDAREVLSKIVVSLKQNLRIINKTTNVYRQFDATVNRVYQKQKTGDSWVIRKPMHKDTVFGAVNLRKVKVVRLSVALDTPAMIVDKRVKNKVFELLSYKYDKKRIEKYFKENAFLWKELDLAKVAVYYFTEATTEPLVAVRKPLDSTFNEKKIKESVTDTGIQKILLNHLCTKEGKPDLAFSAEGIEEMNRNLLQLNNGKSHQPIYKVRVYEPRGNKFSVGVLGNKGTKWVEAAKGTNLFFAIYITEDGKRTYETIPLNVVIEREKQGLVPVPDRNKKGDKLLFWLSPNDLVYLPTEEEREFGRINEPIDRGRIYKMVSCTGNEGHFIPANVANPIVPVIELGSNNKAQRAWTNEMIKDICIPIKVDRLGHIIEVKYRIDE

SEQ ID NO: 23282 - protein, 1223 aa, unidentified
  REGION 1..1223: note = Cas Enzyme sequence
  REGION 1202..1205: note = misc_feature - Xaa can be any naturally occurring amino acid
NADRTLKRSMRRNLQRYKLRRDVLIKLLKKVGFITDKTILSEQGNRTTFETYRLRAKAAEEEISLEELARVLLMINKKRGYKSSRKAKGEEDGSLIDGMEIAKKLYDEDLTPGQLCLQLLESGKKTFPDFYRSDLQDEFDRIWNFQKQFNPQSYCDTAKEEIKGKNKSQTWAILAKYFTWTKEVSVWNENEAKTENQEKEYRLVGLKRTVKGEELKKENYRWRVQALTERLDLEEIAVVLQEINGQISASSGYLGAISDRSKVLYFNHQTVGQYQMAELNKNSNISLRNMVFYRQDYLDEFNAIWEKQAEFHKELTPELKKEIRDIIIFYQRRLKSQKGLVSFCEFENREVFVEKDGKKQTKVIGCRVIPRSHPLFQEFKIWQTLNNIEVFVGEKRKKRKQTNVSSGLFDNTVDTLVTEGRRFLYQEEKEILAKELSCKKDLTKTEVLKLLFENPQELDMNFKQIDGNFTGFALFSAYSKMIEKYGYEPLDFKKPADEIIAQLKAVFMDLEWNTDLLSIDLDKEGKNLEMQPYFRLWHLLYSFEGDNTPTGNGKLIEKIMQLCRVEKEYAIELANISFQDDYGSLSAKAIKKILPYLKEGNQYDVACEYAGYRHSKSSLTKEEIENKALKDKLDILPKNSLRNPVVEKILNQMVNVINAVIDAYGRPDEIRVELARELKKSAKEREELTKAIAKKTREHDEIRKLLQSEFGMIHVSRNDIIRYKLYEELKENGYKTLYSNQYIPKEKLFSKEIDIEHIIPQARLFDDSLSNKTLEYRAINIEKGNKTAYDFVKDKYGEEGLQGYLNRCENICKDRKAKLRKLKMEQSDIPDGFIDRDLRNTQYIAKKALAMLNDICRRVVATTGSITDKLREDWQLVDVMKELNLTKYEALGLVEIFEDKDGRIIKRIKDWTKRNDHRHHAMDALTVAFTKDVFIQYFNNKNAAWESDCKEHMNIVGIKKRYFESGKAVPPMPLGQFRAEAKWHLENLLVSIKAKNKVVTTNVNCIRKKGGISKKHQQTPRGQLHLETIYGSHRQYVTKMEKVNASFDAAKIATVSRQNYRNALLKRLEAFGNDPKKAFTGKNSLEKNPIYLDRAQTMQMPDRVQIVELEMVYTIRKPIDPSLNVDKVVDTKVRAILEQRLKEYGGDAKKAFVNLDENPIWLNREKGISIKRVSIRGINNAQSLHMKKDKNGNPILDENGKXXXXDPCGFCKYRQQPSCGYLS

SEQ ID NO: 23283 - protein, 1432 aa, unidentified; identical to SEQ ID NO: 17556
  REGION 1..1432: note = Cas Enzyme sequence

SEQ ID NO: 23284 - protein, 1431 aa, unidentified; identical to SEQ ID NO: 21946
  REGION 1..1431: note = Cas Enzyme sequence

SEQ ID NO: 23285 - protein, 1433 aa, unidentified
  REGION 1..1433: note = Cas Enzyme sequence
MKKILGLDLGCNSIGWALVNEAENTEEISSIIKLGVRVNPLTVDEMQNFEKGKSITTNADRTLKRSMRRNLQRYKLRRDTLIEVLKEHGFITDSTLLSEHGNKTTFETYRLRAKAAVEEISLEKFARVLLMINKKRGYKSSRKAKGSEDGVLIDGMDVARKLYEEGLTPGELCLQILEAGKKNLPDFYRSDLQNEFDRIWNFQKQFNPELFCDAVKEEVRGKNRSQTWAILAKFFVWSEKESVWNEKEARTEERVKEYKLVGLKRDTKGNELKLENYRWRVQALSEQLNPEIVAIVLQEINGQISASSGYLGAISDRSKQLYFNRQTVGQYLMFELEKDPNVSLRNRVFYRQDYLDEFDRIWEKQAEFHEELTVELKKEIRDIIIFYQRRLKSQKGLISFCEFEKREVVVEEDGRKKNKTVGCRVIPRSHPLFQEFKIWQTLNDIEVFAWDKQSKRKKADKSSILFDNSEDALLVEGKRFLYQEEKELLAKELFVKESMKKAEVLKLLFENYQELDLNFKQIDGNHTGFALFSAYSKMIEKYGYEPVDFKKSADEIIEKLETIFTNLGWNTELLSIDLSKEDKELERQSYFRLWHLLYSFEGDNTPTGNGKLLEKIMQLCDVEKEYAVELANVSFQEDYGSLSAKAIKKILPYLKEGNQYDVACDYAGYRHSKSSLTKDEIENKILKDKLEILPKNSLRNPVVEKILNQMVNLINTLIDTYGKPDEIRVELARELKKNAKEREELTKSIARNTREHDEIRQLLRTEFGMMNVSRNDIIRYKLYEELKDNGYKTLYSNEYIPREKIFSKEIDIEHVIPQARLFDDSLSNKTLEYRAINIEKGNKTAYDFVKEKYGDDGLQKFINRCEALFKDKKTKLRKLKMEEKDIPEGFIDRDLRNTQYISKKAFAMLNEISRRVVATTGSITDKLREDWQLVDLMKELNLPKYEKLGMVEMFEDKDGRKIKKITDWTKRNDHRHHAVDALTVAFTKDVFIQFYNNKNAAWMPASKEHANITGIKARYFENGKALAPMPLAQFRAEAKRHLENLLVSIKAKNKVITSNVNHTKKKNGENRKLQQTPRGQLHLETVYGSHRQYATKIEKVNAAFDAAKIATVSKLAYRNALLKRLEAFGNDPKKAFTGKNTLEKNPLYLDENQTEMVPEKVQTVEFETVYTIRKPIDPNLSIDKVVDVKIRSVLEKRLKEYGGDAKKAFVNLDENPIWLNEAKGISIKRVSIRGISNAQSLHEKKDKDGNLILDKEGRKIPVDFVNTGNNHHVAVYKKPVLDKVGQMVLDEEGNPKYELDEVVVSFFDAVTRVNLDQPIIDKDYRRSEGWQFLFSMKQNEYFVFPNEKTGFNPKEVDLLNPENYAMISPNLFRVQKFTYKNYVFRHHLETTIKDTSSTLKGITWTDFRSSKGLDKIVKVRVDHIGQIVSIGEY

SEQ ID NO: 23286 - protein, 1498 aa, unidentified
  REGION 1..1498: note = Cas Enzyme sequence
MKHILGLDLGTNSIGWAVINAIKEENTQKEQLIGINTAGSRIIPMDAAQLGDFNKGNTVSQTANRTQFRGVRRLYERKKLRRERLHRILQLLGFLPKHYASQLDRYGKFIANSEPKLAWTTNTHEPSYFIFQSSFQEMLNDFLQNNNQVKKVPYDWTLFYLRKKALTQKIEKEELAWILLNFNQKRGYYQLREEETEKASSKTRQYFDSQIVTDITDTGQIYKGLKIFTITLENGEKGKFFSKNMPDWKGQKKDIIAIIDLDKNGNDKYDENGELSRRFKIPTEQEWEEQWELIKTKTQKDLDTSHKTVGAYIYDTLLQTPSQKIRGKLIRTIERKYYKDELNQILKKQEEFHPELRDSNLLEACIEELYPNNEAHRNAIAKYSISQLLIEDILFYQRPLKSKKSLISNCPYEEYTYTNKETGEICTSSLKCIAKSHPLFQEFRLWQFISNLRIYQKEGTINGKFTTDIDVTNQFLKTEDDYANLFDWLNQKKEIRQDTFLKKPAFGLKKNIANYRWNYVEDKTYPCNETHYKILSYWEKAGIEQSALTSEIEEKLWHILYSISDKNELRKALQHFADKNYLSDKFADTFQQIPPFEKDYGSYSAKAIKKLLPLMRIGRYWKAENFDSTTLDRIEKILTGEFEENIKNRTREKTIHLDNLYSFQGLPTWLACYIVYNRHSEIKDVTKWQQPSDIDAFLNAFKQHSLHNPIVEQIIMETLRTVRDIWKQTGHIDEIHVELGREMKNPAEKRRKLTQQIQENENTNLRIKALLTEFANPEFGIENVRPHSPSQQDLLRIYEEEVLNETKDIPEDIAVILKKFNEIDTKKRPSTSDVLRYKCWLEQKYRSPYTGAMIPLGKLFTPAYEIEHVIPQSRYFDDSFTNKVICEAEVNKLKGNMLGYEFIKNNQERIVELGFGQNVKIQTVEAYELFVKEHYSYNRTKMQKLLMEDIPDQFIERQLNDSRYISKLIKSLLSNIVRDEGEEEATSKNVIVCTGSITDRLKKDWGINDVWNKLILPRFIRLNEITESNRFTTTNACNKTIPAMPLDLQKGFNKKRIDHRHHAMDAIVIACANRNIVNYLNNESASKNAKISRQDLRQILCKKTKTDNLGNYQWLIDKPWDTFTQDMYSILSNIIVSFKQNLRIINKTTNHYIHYENGKKVNCSQKQSDSWAIRKPMHKETVYGEINLRRTTTATLKAALENPQRIIEKDLKKKIKELLTQGLNEKQIKKYFEDNKDIWQEINLKKIPVYYFTKETANRFFACRESINTTFNKKKIEEKVADTGIQQILLRHLEQNGNNPEQAFSPEGIEQMNKNIMSLNNGKFHQPIYKVRTYEQADKFAVGQTGNKSTKFVEAAKGTNLFFAIYETAHKRSFASIPLNVVIERLKKGLSPAPENEKGNLPKFILSPNDLVYVPTKEEIENGHINQPIQKDRIYKMVSCTGNQCFFIKSNVANTIIDKYEFSPLNKMERAITGEMIKETCIPIQTDRLGNIITPISL

SEQ ID NO: 23287 - protein, 1498 aa, unidentified
  REGION 1..1498: note = Cas Enzyme sequence
MKHILGLDLGTNSIGWAVINAIKEENTQKEQLIGINTAGSRIIPMDAAQLGDFNKGNTVSQTANRTQFRGVRRLYERKKLRRERLHRILQLLGFLPKHYASQLDRYGKFIANSEPKLAWTTNTHEPSYFIFQSSFQEMLNDFLQNNNQVKKVPYDWTLFYLRKKALTQKIEKEELAWILLNFNQKRGYYQLREEETEKASSKTRQYFDSQIVTDITDTGQIYKGLKIFTITLENGEKGKFFSKNMPDWKGQKKDIIAIIDLDKNGNDKYDENGELSRRFKIPTEQEWEEQWELIKTKTQKDLDTSHKTVGAYIYDTLLQTPSQKIRGKLIRTIERKYYKDELNQILKKQEEFHPELRDSNLLEACIEELYPNNEAHRNAIAKYSISQLLIEDILFYQRPLKSKKSLISNCPYEEYTYTNKETGEICTSSLKCIAKSHPLFQEFRLWQFISNLRIYQKEGTINGKFTTDIDVTNQFLKTEDDYANLFDWLNQKKEIRQDTFLKKPAFGLKKNIANYRWNYVEDKTYPCNETHYKILSYWEKAGIEQSALTSEIEEKLWHILYSISDKNELRKALQHFADKNYLSDKFADTFQQIPPFEKDYGSYSAKAIKKLLPLMRIGRYWKAENFDSTTLDRIEKILTGEFEENIKNRTREKTIHLDNLYSFQGLPTWLACYIVYNRHSEIKDVTKWQQPSDIDAFLNAFKQHSLHNPIVEQIIMETLRTVRDIWKQTGHIDEIHVELGREMKNPAEKRRKLTQQIQENENTNLRIKALLTEFANPEFGIENVRPHSPSQQDLLRIYEEEVLNETKDIPEDIAVILKKFNEIDTKKRPSTSDVLRYKCWLEQKYRSPYTGAMIPLGKLFTPAYEIEHVIPQSRYFDDSFTNKVICEAEVNKLKGNMLGYEFIKNNQERIVELGFGQNVKIQTVEAYELFVKEHYSYNRTKMQKLLMEDIPNQFIERQLNDSRYISKFIKSLLSNIVREEGEEEATSKNVIVCTGSITYRLKKDWGLNDVWNKIILPRFMRLNEITESNRFTTTNACNKTIPAMPLDLQKGFNKKRIDHRHHAMDAIVIACANRNIVNYLNNESASKNAKISRQDLRQILCKKTKTDNLGNYQWLIDKPWDTFTQDVYSILGNIIVSFKQNLRIINKTTNHYIHYENGKKVSCSQKQGDSWAIRKPMHKETVYEEINLRRTTTATLKAVLENPQRIIEKDLKKKIKELLTQGLNEKQIKKYFEDNKDIWQEINLKKIPVYYFTKETANRFFACRESINTTFNKKKIEEKVADTGIQQILLRHLEQNGNNPEQAFSPEGIEQMNKNITSLNNGKFHQPIYKVRTYEQADKFAVGQTGNKSTKFVEAAKGTNLFFAIYETAHKRNFASIPLNVVIERLKKGLPPAPENEKGNLPKFILSPNDLVYVPIKEEIENGHINQPIQKDRIYKMVSCTGNQCFFIKSNVANTIIDKYEFSPLNKMERAITGEMIKETCIPIKTDRLGNIITSISL

SEQ ID NO: 23288 - protein, 1393 aa, unidentified; identical to SEQ ID NO: 22189
  REGION 1..1393: note = Cas Enzyme sequence

SEQ ID NO: 23289 - protein, 1130 aa, unidentified
  REGION 1..1130: note = Cas Enzyme sequence
MKHILGLDLGTNSIGWAVINAIKEENTQKEQLIGINTAGSRIIPMDAAQLGDFNKGNTVSQTANRTQFRGVRRLYERKKLRRERLHRILQLLGFLPKHYASQLDRYGKFIANSEPKLAWTTNTHEPSYFIFQSSFQEMLNDFLQNNNQVKKVPYDWTLFYLRKKALTQKIEKEELAWILLNFNQKRGYYQLREEETEKASSKTRQYFDSQIVTDITDTGQIYKGLKIFTITLENGEKGKFFSKNMPDWKGQKKDIIAIIDLDKNGNDKYDENGELSRRFKIPTEQEWEEQWELIKTKTQKDLDTSHKTVGAYIYDTLLQTPSQKIRGKLIRTIERKYYKDELNQILKKQEEFHPELRDSNLLEACIEELYPNNEAHRNAIAKYSISQLLIEDILFYQRPLKSKKSLISNCPYEEYTYTNKETGEICTSSLKCIAKSHPLFQEFRLWQFISNLRIYQKEGTINGKFTTDIDVTSQFLKTEDDYANLFDWLNQKKEIKQDTFLKNPAFGLKKNTANYRWNYVEDKTYPCNETHYKILSYWEKAGIEQSALTSEIEEKLWHILYSISDKNELKKALQHFADKNYLSDKFADTFQQIPPFEKDYGSYSAKAIKKLLPLMRIGKFWKIENIDSTTLNRIEKILTGEFEENIKNQTREKTIHLDNLYSFQGLPTWLACYIVYNRHSEIKDVTKWQQPSDIDAFLNAFKQHSLHNPIVEQIIMETLRTVRDIWKQTGHIDEIHVELGREMKNPAEKRRKLTQQIQENENTNLRIKALLAEFANPELGIENVHPHSPSQQDLLRIYEEEVLNETKDIPEDIAVILKKFNEVDTKKRPSTSDVLRYKCWLEQKYRSPYTGAMIPLGKLFTPAYEIEHVIPQSRYFDDSFTNKVICEAEVNKLKGNMLGYEFIKNNQERIVELGFGQNVKIQTVEAYELFVKEHYSYNRTKMQKLLMEDIPDQFIERQLNDSRYISKLIKSLLSNIVRDEGEEEATSKNVIVCTGSITDRLKKDWGINDVWNKLILPRFIRLNEITESNRFTTTNACNKTIPAMPLDLQKGFNKKRIDHRHHAMDAIVIACANRNIVNYLNNESASKNAKISRQDLRQILCKKTKPTIWETINGSLTNLGTHLPKICTPF

SEQ ID NO: 23290 - protein, 1142 aa, unidentified
  REGION 1..1142: note = Cas Enzyme sequence
SSIGWAVIRENSEGQELVAMGSRVVSLTAAELSSFTQGNGVSINSQRTQKRTQRKGYDRYQLRRTLLRNKLDTLGMLPDDSLSHLPKLQLWGLRAKAVTQRIELNELGRVLLHLNQKRGYKSIKSDFSGDKKITDYVKTVKTRYDELKEMRLTIGELFFRRLTENAFFRCKEQVYPRQAYVEEFDCIMNCQRKFYPDVLTDETIRCIRDEIIYYQRPLKSCKYLVSRCEFEKRFYLNAAGKKTEAGPKVAPRTSPLFQVCRLWESINNIVVKDRRNEIVFISAEQRAALFDFLNTHEKLKGSDLLKLLGLSKTYGYRLGEQFKTGIQGNKTRVEIERALGNYPDKKRLLQFNLQEESSSMVNTETGEIIPMISLSFEQEPLYRLWHVLYSIDDREQLQSVLRQKFGIDDDEVLERLSAIDLVKAGFGNKSSKAIRRILPFLQLGMNYAEACEAAGYTHSNNYTKAENEAHALLDRLPAIKKNELRQPVVEKILNQMVNVVNALMEKYGRFDEIRVELARELKQSKEERSNTYKSINKNQRENEQIAKRIVEYGVPTRSRIQKYKMWEESKHCCIYCGQPVDVGDFLRGFDVEVEHIIPKSLYFDDSFANKVCSCRSCNKEKNNRTAYDYMKSKGEKALSDYVERVNTMYTNNQISKTKLQNLLTPVDKISTDFIDRQLRESQYIARKAKEILTSVCYNVTATSGSVTSFLRHVWGWDTVLHDLNFDRYKKVGLTEVIEVNHRGSVIRREQIKDWSKRFDHRHHAIDALTIACTKQAYIQRLNNLRAEEGPDFNKMSLERYIQSQPHFSVAQVREAVDRILVSFRAGKRAVTPGKRYIRKNRKRISVQSVLIPRGALSEESVYGVIYVWEKDEQGHVIQKQRAVMKYPITSITREMLDKEKVVDKRIHRILSGRLAQYNDNPKEAFAKPVYIDKECRIPIRTVRCFAKPAINTLVPLKKDDKGNPVAWVNPGNNHHVAIYRDEDGKYKERTVTFWEAVDRCRVGIPAIVTQPDTIWDNILQRNDISENVLESLPDVKWQFVLSLQQNEMFILGMNEEDYRYAMDQQDYALLNKYLYRVQKLSKGDYSFRYHTETSVEDKYNGKPNLKLSMQMGKLKRVSIKSLLGLNPHKVHISVLGEIKKIS

SEQ ID NO: 23291 - protein, 1509 aa, unidentified; identical to SEQ ID NO: 22332
  REGION 1..1509: note = Cas Enzyme sequence

SEQ ID NO: 23292 - protein, 1432 aa, unidentified
  REGION 1..1432: note = Cas Enzyme sequence
MKKILGLDLGSNSIGWALVNEAENSDEVSSIIKLGVRVNPLTVDEMQNFEKGKSITTNADRTLKRSMRRNLQRYKLRRDALIKLLKKVGFITDDTILSEQGNRTTFETYRLRAKAPDEEISLQELARVLLMINKKRGYKSSRKIKEKEAGTLIDGMEVAKKLYDEDLTPGQLCLQLLESGKKSLPDFYSSDLQEEFDRIWNFQKQFNPKAFCDTAKEEIKGKNKSQTWAILAKYFIWTEEMDVWNEKESKTERVEKECKLVGLKRTVKKEEQRKENYRWRVQALTEQLDLEKVAVVLQEINGQISTSSGYLGAISDRSKVLYFNRQTVGQYQMAELEKNPNTSLRNMVFYRQDYLDEFDKIWEKQAEFHKELTVELKKEIRDIIIFYQRRLKSQKGLIGFCEFENREIMVEKNGKMQAKVVGCKVIPRSHPLFQEFKIWQTLNNVEVFAGEKKCKRKRTDAFPGLFDGTEDTLMVEGWRYLYQEEKEILAKELSVKKSLKKEYILKLLFDNPQDLDMNFEQIEGNDTGNVLFSAYSKMIEKYGYEPLDFGKPTDEIIERLQVIFTDLGWNTDLLFVDLNKEGKDLEKQPYFKLWHLLYSFEGDNTPTGNGKLVEKLMELCHVGKECALELVNISFQNDYGSLSAKAIKKILPYLKEGNRYDVACGYAGYRHSKSSLTKEEIENKVLKDKLDILPKNSLRNPVIEKILNQMVNVINAIIDTYGKPDEIRVELARELKKSAKERDELTKAIAKSTREHEEIRKVLQEEFGMINVSRNDIIRYKLYEELKDNGYKTLYSNQYIPKEKVFSKEIDIEHIIPQARLFDDSLSNKTLEYKAINIEKGNKTAYDFVKEKYGEKGLQQYLNRCESLFKGHRTKLRKLKMGQENIPEGFIDRDLRNTQYIAKKALAMLNEICRRVVATTGSITDRLREDWQLVDVLKELNLPKYETLGLVEVYEDKDGRKIKRIKDWTKRNDHRHHAMDALTVAFTKDVFIQYFNNKNAAWQADCKEHSDIIGIKTRYFENGRALPPMPLVRFRAEAKSHLETLLVSIKAKNKVVTNNVNCTKRKGGENKKLQQTPRGQLHLETIYGSHRQYVMKEEKVNASFDSSKIATVCKQAYRNALLERLAAFGNDPKKAFTGKNSLEKNPVYLDREQTARVPERVRTVELETVYTIRKPVDPNLSVDKVVDAKVRSILEQRLREYDGEAKRAFVNLDENPIWLNEEKGIAIKRVTIRGINKVQSLHGKKDKNGNLILDETGKKIPVDFVNTGNNHHVAIYRKPVLDKTGQEMLDNEGNPVYELDEVVVSFFEAVTRVNLGLPVIDKNYNKSEGWQFMFTMKQNEYFVFPNEKTGFDPKEVDLLNPENYAVISPNLFRVQKITEKDYMFRHHLETKVVDDKFLKEITWKRILTPNKLEGIVKVRVNHIGQIVSVGEY

SEQ ID NO: 23293 - protein, 1425 aa, unidentified
  REGION 1..1425: note = Cas Enzyme sequence
MYNIGLDIGTGSVGWCLTDNNGHLLKINRKGDNGKTYRNSAWGVRLFASADTAAACRIKRSARRRYNRRRARIIELRKIMSDMIMPVDPNFYARLDEAFLWNEDKSDKAKAPFLLFNDKKLYDIKYYTDYPTIYHLRKYLLETKEKADPRFIYLALHHMMKYRGHFLFEGQSFEAIDNIKDTFIELEQLINVYVKGKEEIEDNNKNNDKYEAMKICLADNKVKNKDKKENITDIFIKAGYDNKYSKELAAAVLGYEFNVGIIVNDNSLTDEDGKALKAKFADAKYEEQEEKLSDTLGERYYIVEALKKIYSWKVLHSILGDSIFLSCAMVDKYEKHGEQLTALKNLFHKYVSQDEYSEFFHQEKNKEGKYIVNYANYIKGIKRLNNESNKNSNANQQLYQSIKKILGKRAADDEVYKNILTEMEQETFLEKINNVDNSAIPYQLNLIEMDKILTQQGVYYKELKDNKEILLKMLTSKIPYYVGPLNNNNKGNRNFAWMTKKAGKENEKVYPWNVKDVVDIDVTAEDFITRMTNYCTYLPNEKVLPKESLLYQRYMLLEELSQIRIDGKKLSKEDRKAIIEDLFIGKGRVKVSDKDFKEYLEKVNYVKVNGKGYDVTGYQSDDGFACALSSYNKFRRILGYVDERNEKMIEDIIYWLTVFEDKDIVKRKINKQYADSLSAEQLKKILKLKSKGWGRYSAKLLNGIKGDMGTTIIEMLEDADERFAYCDYCPNFMRIINKDAKIKQIIDDNRPIYDGTKDLLEVIQDMHTSPANRRGIWQTMKVIEEIIEYMGEKPRHIYIEFAREDDFKAKNKRTDSRKKTVDKALKKLKKEVVDEYNENVYKELKQYENRLDEEKVYLYFMQNGKSLYTEEELNLNEPENLEIDHIIPYSLSDDDSLDNKALVLKDENQKKGNKIVKETFPQSFSDIKMINYWKNLKKVGLISEKKYNNLQKNNVDDILTKGFINRQLVETRQIVKSVANLILDYYNEQIDVIEVKASLSTSVRKMLTHEKKDNNGFWEENKDNCMFYKNRNMNDYHHAHDAYLANIIGMYIQKNYPHLQKELNYSQYRRVWRKYYENTKNNNGVNWFATLGKFSSNNEEAAWYGEDIIDYMRKIFCYRDVIISKKLEENTGAFYSETKYPREDKADSKLVPLKQGNNMRGANNLKELDTRKYGGYKGGEKAYFVLVKYCIEKALKKKVKKEYHMEFVEIPVYIARDIKNKDINLYDYVCDILSEAYKNSVVDVEILRNKVPKYQMIIGENGEEYYLVGATEVINSKQFVLGGANQQYNRLLNYIMYGENDKWQYIQTELLDEQLTGLYDLLLSKIKDEYKGFSKEAIRIQEDNSFYKLDVKNKKEFIAEMIKLVQPDSNYPYLGKYSTGLSDRMGRKSKEKVGKKITLVDKSVTGLYERRTTFELEDDSSTKSR

SEQ ID NO: 23294 - protein, 1154 aa, unidentified
  REGION 1..1154: note = Cas Enzyme sequence
MKNILGLDLGSSSIGWAVIRENSEGQELVAMGSRVVSLTAAELSSFTQGNGVSINSQRTQKRTQRKGYDRYQLRRTLLRNKLDTLGMLPDDSLSHLPKLQLWGLRAKAVTQRIELNELGRVLLHLNQKRGYKSIKSDFSGDKKITDYVKTVKTRYDELKEMRLTIGELFFRRLTENAFFRCKEQVYPRQAYVEEFDCIMNCQRKFYPDILTDETIRCIRDEIIYYQRPLKSCKYLVSRCEFEKRFYLNAAGKKTEAGPKVSPRTSPLFQVCRLWESINNIVVKDRRNEIVFISAEQKVALFDFLNTHEKLKGSDLLKLLGLSKTYGYRLGEQFKTGIQGNKTRVEIERALGNYPDKEKLLRFNLQEVSSSVVDVETGEIIPTISPSFEQEPLYRLWHVLYSIDDREQLQSVLRQKFGIDDDEVLERLSAIDLVKAGFGNKSSKAIRRILPFLQLGMNYAEACEAAGYNHSNNYTKAENEARALLDRLPAIKKNELRQPVVEKILNQMVNVVNALMEKYGRFDEIRVELARELKQSKEERSNTYKSINKNQRENEQIAKRIVEYGVPTRSRIQKYKMWEESKHCCIYCGQPVDVGDFLRGFDVEVEHIIPKSLYFDDSFANKVCSCRSCNKEKNNRTAYDYMKSKGEKALSDYVERVNTMYTNNQISKTKLQNLLTPVDKISTNFIDRQLRESQYIARKAKEILTSICYNVTATSGSVTSFLRHVWGWDTVLHDLNFDRYKKVDLTEVIEVNHRGSVIRREQIKDWSKRLDHRHHAIDALTIACTKQAYIQRLNNLRAEEGPDFNKMSLERYIQSQPHFSVAQVREAVDRILVSFRAGKRAVTPGKRYIRKNRKRISVQSVLIPRGALSEESVYGVIHVWEKDEQGHVIQKQRAVMKYPITSINREMLDKGKVVDKRIHRILSDRLAQYNDNPKEAFAKPVYIDKECRIPIRTVRCFAKPAIKTLVPLKKDDKGNTVAWVNPGNNHHVAIYRDEDGKYKEQTVTFWEAVDRCRVGIPAIVTQPDTIWDNILQRNDISENVLESLPDVKWQFVLSLQQNEMFILEMKEEDYRYAMDQQDYALLNKYLYRVQKLSKGDYSFRYHTETSVEDKYDGKLNLELSRKMGKLKRVRSLEALFNLHPHKVHISVLGEIKEIS

SEQ ID NO: 23295 - protein, 1462 aa, unidentified
  REGION 1..1462: note = Cas Enzyme sequence
MIGDFNKGNSISQTAERTRLRGVRRLSERYLLRRERLHRILDILGFLPFHFAQDLDRHGKIVKGKEPKLAWRKNEAGQFEFIFQDSFKEMLEDFKLNHPNLITDDKKVPYDWTIYYLRKKGLTSKISKEELAWILLNFNQKRGYYQLRGEEEKKNDNVMIINSKVIDVVKAEKDKKYEKYWYNVLLENGLLYRAAFYNDISFWKGHTKEFVLKTIKLKSGGTKQELSFLPSFDEIEKMEKKQKDKMYFKIKLKTEADIDQAHKTVGTYIYDTLLGNPSQKIRGRLVRTIERKYYKEELKLILDKQKEFHPELQDRALYAACIEELYPINEAHRNNVGNRDFTYLFLEDILFYQRPLKSKKSLIDNCPYEENQGLDKETGEIKSFPVKCIAKSHPLFQEFRLWQFIVNLRIYRKDLAQDVDVTNELLKTEEDYVALFDWLNGKKEIDQKAFLKYPVFGLKKEIENYRWNYVQDKPYPCNETRLLMLARLEKCDISIEFLTKENEEALWHILYSVEDKNEIVKALQKFADKHDLNASFVDVFRKFPPFKKEYGSYSAKAIKKLLPLMRMGKYWSEDSIDKGTRKRMDKIITGEYDEKIENRVREKVIHLADVSDFRGLPLWLVCYIVYGRHSEAKEITQWKSPADIDSYLKSFKQHSLRNPIVEQIIIETLRVVRDIWKQVGNIDEIHVELGREMKNPADKRKKMTQQMSENENTNLRIKYLLTEFLNPEYEVENVRPYSPSQQDILRIYEEGVLNSVSDLPEEISDILKKFTETDLKKRPSRSEILRYKLWLEQKYRSPYTGEVIPLGKLFTPAYEIEHVIPQSCYFDDSFSNKVICEAEVNKLKSNLLGHEFIVKHHGEIVELPFGKKVRIFTVDEYEQFVKDNYSRTRGKMKKLLMDDIPEEFVARQLNDSRYISKVVKSLLSNIVREKGEEEAISKNVIPCTGGVTDRLKKDWGINEVWNKIILPRFQRLNELTGTNKFTTKNVGIQEIPTMPLELQKGFNKKRIDHRHHAMDAIIIACANRNIINYLNNESATAKAELSRYDLQKLLCDKAKTDNNGNYKWVIRKPWASFTQDTYLALENIIVSFKQNLRVINKATNRFLHYNEEGKKIFVKQGKGDNWAIRKSMHKDTVFGEVNLRRIKTVALNEAMKNPQSIVVKDFKRKLLELWNLGFDAKRIKKYFEDNRETWSDINLSKIEVYYFSKDTKDRFFATRKPLDTSFDRKKIENNITDTGIQKILLRHLELKDNNPDIAFSPDGIDEMNRNIIQLNNGKYHQPIIKIRWYEQADKFAVGQTGNKFSKFVEAAKGTNLFFAVYESNILDKKTNTIIKKRNYATIPLNVAIERQKQGLPVAPEDENGNDPIFVLSPNDLVYLPTDDELANGIIAQPLDRGRIYKMVSCTGNEGHFIPARIANPILQTIELGSNNKAQKAWTDEMIKEICMPIKVDRLGNVLESSSSYKK

SEQ ID NO: 23296 - protein, 1499 aa, unidentified
  REGION 1..1499: note = Cas Enzyme sequence
MKHILGLDLGTNSIGWAVINAIKEENTQKEQLIGINTAGSRIIPMDAAQLGDFNKGNTVSQTANRTQFRGVRRLYERKKLRRERLHRILQLLGFLPKHYASQLDRYGKFIANSEPKLAWTTNTHEPSYFIFQSSFQEMLNDFLQNNNQVKKVPYDWTLFYLRKKALTQKIEKEELAWILLNFNQKRGYYQLREEETEKASSKTRQYFDSQIVTDITDTGQIYKGLKIFTITLENGEKGKFFSKNMPDWKGQKKDIIAIIDLDKNGNDKYDENGELSRRFKIPTEQEWEEQWELIKTKTQKDLDTSHKTVGAYIYDTLLQTPSQKIRGKLIRTIERKYYKDELNQILKKQEEFHPELRDSNLLEACIEELYPNNEAHRNAIAKYSISQLLIEDILFYQRPLKSKKSLISNCPYEEYTYTNKETGEICTSSLKCIAKSHPLFQEFRLWQFISNLRIYQKEGTINGKFTTDIDVTNQFLKTEDDYANLFDWLNQKKEIRQDTFLKKPAFGLKKNIANYRWNYVEDKTYPCNETHYKILSYWEKAGIEQSALTSEIEEKLWHILYSISDKNELRKALQHFADKNYLSDKFADTFQQIPPFEKDYGSYSAKAIKKLLPLMRMGKYWHLESIDNATLTRIHQILNGEMDESTASRIKEKYIHLDNFSSFQGLPTWLACYIVYNRHSEIKDNTKWKQPSDIDAYIQSFKQHSLHNPIVEQIIMETLRTVRDIWKQIGHIDEIHVELGREMKNPADKRKKLTLQIQENENTNLRIKALLTEFANPEFEIENVRPHSPSQQDLLHIYEEEVLNESAKNMPEDIATILKKFNETDAKKRPSTSDVLRYKCWLEQKYRSPYTGAMIPLGKLFTPAYEIEHVIPKSRYFDDSFTNKVICETAVNKLKDNMLGYEFIKNHSGQIIELGFGQKIQIQTVEAYEQFVKEHYSYNPVKMKKLLMEDIPEQFIQRQLNDSRYISKFIKSLLSNIVREEGESEATSKNIIVCNGSITDRLKKDWGVNDVWNKIILPRFLRLNEITNSDHFTTTNTNNKIIPTMPLDLQKGFNKKRIDHRHHAMDAIVIACANRNIVNYLNNESASKNAKISRQDLRQILCKKTKTDNLGNYQWLIDKPWDTFTQDMYSILSNIIVSFKQNLRIINKTTNHYIHYENGKKVNCSQKQSDSWAIRKPMHKETVYGEINLRRTTTATLKAALENPQRIIEKDLKKKIKELLTQGLNEKQIKKYFEDNKDIWQEINLKKIPVYYFTKETANRFFACRESINTTFNKKKIEEKVADTGIQQILLRHLEQNGNNPEQAFSPEGIEQMNKNIMSLNNGKFHQPIYKVRTYEQADKFAVGQTGNKSTKFVEAAKGTNLFFAIYETAHKRSFASIPLNVVIERLKKGLSPAPENEKGNLPKFILSPNDLVYVPTKEEIENGHINQPIQKDRIYKMVSCTGNQCFFIKSNVANTIIDKYEFSPLNKMERAITGEMIKETCIPIQTDRLGNIITPISL

SEQ ID NO: 23297 - protein, 1345 aa, unidentified
  REGION 1..1345: note = Cas Enzyme sequence
LLLRYLKKIFYNSVAELRGNRTTFETYRLRAKAAVEEISLEQFARVLLMINKKRGYKSSRKAKGAENGTLIDGMEVAKKMYDEGITPGELCLQLLTAGKRYFPDFYRSDLQAEFDRIWNFQKQFYPDSLIDKVKDEVRGKNKSQTWAILAKYFVWKEVENSWNEEEAQTRRVEKEYRLVGIKRGVKREELKLENFQWRVKALSERMNPEELAIVLQEINEQISNSSGYLGAISDRSKELYFNRQTVGQYQMAVLDNNPNIGLRNMVFYRQDYLDEFNTIWEKQAEFHKELTEDLKKEIRDIVIFYQRRLKSQKGLINICEFERRQIEVEIDGKKKIKTIGSRVIPRSSPLFQEFKIWQTLNDIEVSVLGVKNKRKKQDDNSTTLLDSAENIDSLKLNVSRPLDADEKSLLAKELFIRDKLTKSDVLKLLFNNPQNLNLNFKNIDGNRTGSALYQAFSKILEISGHESINFKKSADEIVEQVKTIFSALGWNTEVLCFDSEKELDKQPYFKLWHLLYSFEGDSTPTGDGNLIQKIADLCGFEKDYASILANITFQEDYGSLSTKTIRKILPHLKDGNQYDVACEYAGYKHSKSSLKKEEIKNKVLKDKLELLPKNSLRNPVVEKILNQMVNVINAIITTYGKPDEIRIELARELKKNAKEREELTKSIVDTTKTHEGIRAILQNDFGMSHVSRNAIIRYKLYEELKDNGYKTLYSNTYIPKEKLFSKDFDIEHIIPQARLFDDSFSNKTLEVKSINIEKGSKTAYDFVEEKYGEQGLQEYLNRCEVLFRDKKTKLRKLKMQESEIPEGFIDRDLRNTQYIAKKALSMLNEICRRVVATTGAITDELREDWQLVDVMKELNWEKYKVLGLVEYFEDNDGRLIGRIKDWTKRNDHRHHAMDALTVAFTKDVFIQYFNNKNASLKPDTNEAAIRNKYFQNGKAIPPMSLDEFRAEAKKHLNDTLISIKTKNKVVTINLNRTKKKNGINKKQQQTPRGQLHLETVYGSHKQYVVKEEKVNASFDAAKIATVNKPAYRDALLRRLQENGNDSKKAFTGKNSLDKQPVWLDAKQNECVPEKVKTVMLETVYTVRKPIDEKLNVDKVVDARIRKLLQDRIKEYGNAKSAFANLDENPIWLNKEKGITIKRVSVFGISKAQSLHEKKDKDGNFILDKDSRRIPVDFVNTGNNHHVAIYRKPVLDKKGQAVFDENGELKFELEEVVVSFFDAVTRVNLSQPIIDKDYKRSEGWKFLFSMKQNEYFVFPNEKTGFDPKEIDLLNPENYALISPNLFRVQKIASKDYVFRHHLETVVADRKELQEITWKRISSLSILNRIIKVRVNHIGQIVMIGEY

SEQ ID NO: 23298 - protein, 1335 aa, unidentified
  REGION 1..1335: note = Cas Enzyme sequence
TSKISKEELAWILLNFNQKRGYYQLRGEEEEENKNKLVEFYALKVVAVEDSGEKKGKDIWYNVHLENGWVYRRTSNMPLDWVGKTKEFIVTTDLEKDGTPKKDKEGNVKRSFRAPKEDDWSLLKKKTEADIDQTHKTVGVYIYDTLLGNPSQKICGRLVRTIERKYYKEELKQILEKQKEFHLELQDRALYAACIEELYPINEAHRNNVGNRDFTYLFLEDILFYQRPLKSKKSLIDNCPYEENQGLDKETGEIKSFPVKCIAKSHPLFQEFRLWQFIVNLRIYRKDLAQDVDVTNELLKTEEDYVALFDWLNGKKEIDQKAFLKYPIFGLKKEIENYRWNYVQDKPYPCNETRSLMLARLEKCDISIEFLTKENEEALWHILYSVEDKNEIVKALQKFADKHDLNASFVDVFQKFPPFKKEYGSYSAKAIKKLLPLMRMGKYWSENSIDKGTRERIDKIITGEYDEKIENRVREKAIHLADVSDFKGLPLWLVCYIVYGRHSEAKEITQWKSPADIDSYLRSFKQHSLRNPIVEQIIIETLRVVRDIWKQVGNIDEIHVELGREMKNPADKRKKMTQQMSENENTNLRIKYLLTEFLNPEYEVENVRPYSPSQQDILRIYEEGVLNSVSDLPEEISDILKKFTETDLKKRPSRSEILRYKLWLEQKYRSPYTGEVIPLGKLFTPAYEIEHVIPQSCYFDDSFSNKVICEAEVNKLKSNLLGHEFIVKHHGEIVELPFGKKVRIFTVDEYEQFVKDNYSRTRSKMKKLLMDDIPEEFVTRQLNDSRYISKVVKSLLSNIVREKGEEEAISKNVIPCTGGVTDRLKKDWGINEVWNKIILPRFQRLNELTGTNKFTTKNVGIQEIPTMPLELQKGFNKKRIDHRHHAMDAIIIACANRNIINYLNNESATAKAELSRYDLQKMLCDKAKTDNNGNYKWVIRKPWASFTQDTYLALENIIVSFKQNLRVINKATNRFLHYNEEGKKIFVKQGKGDNWAIRKSMHKDTVFGEVNLRRIKTVALNEAMKNPQSIVVKDFKRKLLELWNLGFDAKRIKKYFEDNRETWSDINLSKIEVYYFSKDTKDRFFATRKPLDTSFDRKKIENNITDTGIQKILLRHLELKDNNPDIAFSPDGIDEMNRNIIQLNNGKYHQPIIKIRWYEQADKFAVGQTGNKFSKFVEAAKGTNLFFAVYESNILDKKTNTIIKKRNYATIPLNVAIERQKQGLPVAPEDENGNDPIFVLSPNDLVYLPTDDELANGIIAQPLDRGRIYKMVSCTGNEGHFIPARIANPILQTIELGSNNKAQKAWTDEMIKEICMPIKVDRLGNVLESSSSYKK

SEQ ID NO: 23299 - protein, 1154 aa, unidentified
  REGION 1..1154: note = Cas Enzyme sequence
MKNILGLDLGSSSIGWSVIRENSEEQELVAMGSRVVSLTAAELSSFTQGNGVSINSQRTQKRTQRKGYDRYQLRRTLLRNKLDTLGMLPDDSLSYLPKLQLWGLRAKAVTQRIELNELGRVLLHLNQKRGYKSIKSDFSGDKKITDYVKSVKTRYDELKEMRLTIGELFFRRLTENAFFRCKEQVYPRQAYVEEFDCIMNCQRKFYPDILTDETIRCIRDEIIYYQRPLKSCKYLVSRCEFEKRFYLNAAGKKTEAGPKVSPRTSPLFQVCRLWESINNIVVKDRRNEIVFISAEQKVALFDFLNTHEKLKGSDLLKLLGLSKTYGYRLGEQFKTGIQGNKTRVEIERALGNYPDKKRLLQFNLQEESSSMVNTETGEIIPMISLSFEQEPLYRLWHVLYSIDDREQLQSVLRQKFGIDDDEVLERLSAIDLVKAGFGNKSSKAIRRILPFLQLGMNYAEACEAAGYNHSNNYTKAENEARALLDRLPAIKKNELRQPVVEKILNQMVNVVNALMEKYGRFDEIRVELARELKQSKEERSNTYKSINKNQRENEKIAKRIVEYGVPTRSRIQKYKMWEESKHCCIYCGQPVDVGDFLRGFDVEVEHIIPKSLYFDDSFANKVCSCRSCNKEKNNRTAYDYMKSKGEKALSDYVERVNTMYTNNQISKTKWQNLLTPVDKISTDFIDRQLRESQYIARKAKEILTSICYNVTATSGSVTSFLRHVWGWDTVLHDLNFDRYKKVDLTEVIEVNHRGSVIRREQIKDWSKRLDHRHHAIDALTIACTKQAYIQRLNNLRAEEGPDFNKMSLERYIQLQPHFSVAQVREAVDRILVSFRAGKRAVTPGKRYIRKNRKRISVQSVLIPRGALSEESVYGVIYVWEKDEQGHVIQKQRAVMKYPITSITREMLDKEKVVDKRIHRILSDRLAQYNDNPKEAFAKPVYIDKECRIPIRTVRCFAKPAIKTLVPLKKDDKGNTVAWVNPGNNHHVAIYRDEDGKYKEQTVTFWEAVDRCRVGIPAIVTQPDTIWDNILQRNDISENVLESLPDVKWQFVLSLQQNEMFILEMKEEDYRYAMDQQDYALLNKYLYRVQKLSKGDYSFRYHTETSVEDKYDGKLNLELSRKMGKLKRVRSLEALFNLHPHKVHISVLGEIKEIS

SEQ ID NO: 23300 - protein, 1510 aa, unidentified
  REGION 1..1510: note = Cas Enzyme sequence
MKKILGLDLGTNSIGWAVVCHSDTDGQTERKWIEMAGSRIIPMDAAILGDFDKGNSKSQTSERTGFRGIRRLRERVLLRRERLHKVLKLIGFLPQHYIDSLDFSNHSGKFQLGTEVKLPWRKNEIGKYEFLFQNSFNEMLADFAKKQPELVAMGRKVPYDWTIYYLRKKALSEKITKEELAWILLNFNQKRGYYQLRGEEEEEKKNRLEDFYALKVVEVEQTDDKKGKDIWYNVHLENGWIYRRSSNVPLDWKDKIKEFIVTTELNEDGTPKVDKDGCVKRSFRMPKEDDWKLLKKKTEADIERSHKTIGCYIYDTLLQSPQQKIKGKLVRTIERKFYKDELKLILDKQQAFHPELQDRELYKACLDVLYPMNVAHKNNVANRGFVYLFMEDILFYQRPLKSKKSLIDNCPYEENQYIDVTTGEIKKAPIKCIAKSHPLYQEFRLWQFIANIRIYQKEKKVDGKLLMDIDVTTEYLSSKDDYVALYEWLCVRKEIEQKTFLKYPAFGLKKEIENYRWNYVEGKSYPCNETRSLILHYLEKAGISSTFLSTKIEESLWHILYSVEDRIELETALRTFASKYQLSCNFVEVFKKFPPFKKEYGAYSAKAIKRLLPLMRMGKYWKVDAIDGNTAERIEKILSGECDEKILNKVREKTIHLSETSDFQGLPLWLACYVVYNRHSEGKEVAKWKSPEDIDIYLKSFKQHSLRNPIVEQVITETLRVVRDIWKRVEQIDEIHVELGREMKNPSEKRRQMTERMLENENANIRIKALLTEFMNPEYEMENVRPYSPSQQEILRIYEDTVLNGAGDIPEDIEIILKKFKENDIKKRPGKSDFLRYKLWLEQQYRSPYTGEIIPLGKLFTTAYEIEHVIPQSRYFDDSFSNKVICESEVNKLKDNMLGYEFIKKHAGEIVELGFGKSVKIFSVEAYERFVGENYYKAGSKKSKLLMDDIPEKFIERQLNDSRYISRVVKGLLSNVVREEDANGEYESEAISKNVIVCSGSVTDRLKKDWGVNDVWNNIVYSRFERLNRLTESQQFGHWENREGKRFFQTELPLEYQKGFSKKRIDHRHHAMDAIIIACATRNHVNYLSNESASKHARIARYDLQRMLCDKSKADGGGNYKWIIQKPWATFTQDVYRTLLDIIVSFKQNLRVINKMTNYYQAYDDAGKKVFKKQKKGDSWAIRKSMHKDTVFGQVNLRKIKEVRLSVALESPEKIVDKKIKEKVLQLFAYQYDKKKIEKYFKENASLWKEVNLAKIPVYYFTDESSELLVAVRKNLDTGFTEKKIRESVTDTGIQKILLNHLSNKGDKPELAFSPDGIDEMNRNLVILNGGKPHQPIYKVRVCEPLGNKFKVGTNGNKSAKYVEAAKGTNLFFAIYETDAGKRTYETIPLNVVIEREKMGWLPVPEKNNKGEKLLFWLSPNDLVYLPTEEELMSRILSDKLDRGRIYKIVSFTGNRLYAIPYNVSNMIWDKNEYTQLNKVESTDMKESIKEICMPINVDRLGHITEIIIK

SEQ ID NO: 23301 - protein, 1357 aa, unidentified
  REGION 1..1357: note = Cas Enzyme sequence
NLHRYKLRREALIEVLKECKFITEDTILSENGNRTTFETYRLRVKALTEEISLEEFARVLIMINKKRGYKSSRKAGGAEEDTLIDGMDIARKLYDANLTPGELCLQLLSAGKKVLPDFYRSDLQNELDRIWEKQKEYYPGILTAALKEELRGKKRDAVWAICANAFVWKETYTEWNNEESKNEQIEKEHKLEGIYSKRKRDEAKKENLQWRVSGLKEKLSLEQLVIILQEINTQINNSSGYLGTISDRSKELYFNKQTVGQYLMDILDNNPNASLRNIVFYRQDYLDEFNVLWEKQAEFHKELTGELKKEIRDIIIFYQRRLKSQKGLISFCEFESRQIEVKIDGKRKIRTVGNRVIPRSSPLFQEFKIWQILNNIEVTAVGNKNKQRMQNGSNEPDDTEQLELNGRRYLYQEEKELLAKELFVRDKMTKLDVLRLLFDNPEELDLNFKTIDGNKTGYLFFQAYSKMIEMSGHEPVDFKKPIEKIVEQVKSVFVLLNWNTDILSFDSNKELDKQSYYKLWHLLYSFEGDNTPTGNGCLVQKIMDSYGLGKEFAKILANITFQEDYGSLSAKAIHKILPHLKEGNQYDVACEYAGYRHSKSSLTKEEIANKVLKDKLEVLPRNSLRNPVVEKILNQMVNVINAIIEAYGRPDEIRVELARELKKNAKEREKLTKSIAETTKTHEAHKKLLQEEFGLKNVGRSDILRYKLYKELESRGYKTLYSNTYIPREKLFSKEFDIEHIIPQARLFDDSFSNKTLEARNVNIEKGNRTAYDFVKEKFGESGTDNSLDCYLNNIEVLFVSGKISKTKYTKLKMTEQDIPGGFIERDLRNTQYIAKKALSMLNEISRCVVATSGSITDKLREDWQLVDVMKELNWEKYKALGLVEYFEDKDGKQIGRIKDWSKRNDHRHHAMDALTVAFTKEVFIQYFNNKNASLNPNTNEYAIKNKYFQNGRAIAPIPLNEFRAEAKKHLENTLISIKAKNKVITNNINKTKKRGGVNTKKQQTPRGQLHLETIYGCCRQYLTKEEKVNASFDVSKIATVSSSVYRDALLKRLQEHHNDPKKAFAGRNSLDKKPVWLDKEQIRKVPEKVKTIYTIRKEISPDLRVDKIIDSGVRKMLTGRLKEYGNDAKKAFSNLDEKPIWLNKEKGIPIKRVTISGISNAQSLHVKKDKDGKPVLDGNGRNIPVDFVNTGNNHHVAVYRRPVIDKNGQMVIDENGNLKYELEEVVVTFFDAVTRVNLGQPIIDKDYKASEGWQFLFSMKQNEYFVFPNKKTGFNPKEIDLLDADNYGLISPNLFRVQKFTHKNYVFRHHLETTIKDTSSILRGITWIDFRSSKGLDSIVKVRVNHIGQIVSVGEY

SEQ ID NO: 23302 - protein, 1509 aa, unidentified
  REGION 1..1509: note = Cas Enzyme sequence
MKTILGLDLGTNSVGWAVINSVIKEQAERIWIEMAGSRIIPMDAAVLGDFDKGNSISQTSERTRLRGARRLRERQLLRRERLHKVLNILGFLPNHYLEYIDFEKHPGKFLADAEPKLAWVKDEQGKYTFLFQAAFDEMLADFAIHQPSLVSGDKKIPYDWTIYYLRKKALTEMISKEELAWILLNFNQKRGYYQLRGEEEEDNAGKSVEFYALKVLTVEATDEKKGRDVWYNVHLENGWIYRRSSSVPLDWEGQVKEFIVTTDLNPDGTPKLDKYGEVKRSFRAPNEDDWMLIKKRTEADIANTHKTVGAYIYDTLLQKPQQKIIGKLVKTVERKLYRDELSLILQKQCAFHAELQDRALYARCVEALYPSNEVRRKNIANRDFVYLLMDDILFYQRPLKTKKSLIANCPYEENEYVDRETGEIKKAPLKCIAKSHPLFQEFRLWNFLSNIRIYQKEKEINGTLHLDVDVTAEFLKTEDDYVALFDWLNSRKEIEQKTFLKYPKFGLKKEISNYRWNYVEDKQYPCNETRHAILSSLEKANVCIDFLSNEKEVALWHILYSVSDKQEIEKALRTFAAKNGLDESFVEAFKKFPPFKSEYGAYSAKAIKKMLPLMRCGKYWDVSSIDDTTKERIKKIVTGEYDERISVKVRDKVMNLSDISCFRRLPLWLACYIVYNRHSEDKEAVKWESPADIDAYLASFKQHSLRNPIVEQVITETLRVVRDIWKQVGRIDEIHIELGREMKNPADKRKRMTAQILENENANLRIKALLAEFMNPEYEIENVRPYSPSQQEILRIYEDTVLHAEDQLPEEIDAILKKFNSSKVPTKSEFLRYKLWLEQKYRSPYTGELIPLGKLFTAAYEIEHVIPQSRYFDDSFSNKVICESAVNKLKDNQLGYEFIKNHHGQKVEVGFGKSVEIFSVDSYERFVKEQYAKSAVKMKKLLMDDIPEQFIERQLNDSRYISKVIKGLLSNIVREKNDSGEYEPEAVSKNIVVCTGSVTDRLKRDWGMNDVWNSIVYPRFERLNSLTDTQSFGHWENKSGKKVFQTELPLEYQKGFSKKRIDHRHHAMDAIVIACATRNHVNYLSNESASRNAKISRYDLQRLLCDKNRTDDNGNYKWVIKKPWDTFTQDAREVLSKIVVSLKQNLRIINKTTNVYRHFDATVNRVYQKQKTGDSWAIRKPMHKDTVFGAVNLRKVKVVRLSVALDTPAMIVDKRVKNKVFELLSYKYDKKRIEKYFKENAFLWKELDLAKVAVYYFTEATTEPLVAVRKPLDSTFNEKKIKESVTDTGIQKILLNHLCTKEGKPDLAFSAEGIEEMNRNLLQLNNGKSHQPIYKVRVYEPRGNKFSVGVLGNKGTKWVEAAKGTNLFFAIYITEDGKRTYETIPLNMVIEREKQGLVPVPDRNEKGDKLLFWLSPNDLVYLPTEEEREFGRINEPIDRGRIYKMVSCTGNEGHFIPANVANPIVPVIELGSNNKAQRAWTNEMIKDICIPIKVDRLGHIIEVKYRIDE

SEQ ID NO: 23303 - protein, 1330 aa, unidentified
  REGION 1..1330: note = Cas Enzyme sequence
KEELAWILLNFNQKRGYYQLRGEEEEENKNKLVEFYALKVVAVEDSGEKKGKDIWYNVHLENGWVYRRTSNMPLDWVGKTKEFIVTTDLEKDGTPKKDKEGNVKRSFRAPKEDDWSLVKKKTEADIDQTHKTVGAYIYDTLLGNPSQKIRGRLVRTIERKYYKEELKQILEKQKEFHLELQDRALYAACIEELYPINEAHRNNVGNRDFTYLFLEDILFYQRPLKSKKSLIDNCPYEENQGLDKETGEIKSFPVKCIAKSHPLFQEFRLWQFIINLRIYRKDLAQDVDVTNELLKTEEDYVALFDWLNGKKEIDQKAFLKYPLFGLKKEIENYRWNYVQDKPYPCNETRSLMLARLEKCDISIEFLTKENEEALWHILYSVEDKNEIVKALQKFADKHDLNASFVDVFQKFPPFKNEYGSYSAKAIKKLLPLMRMGKYWSENSIDKGTRERIDKIITGEYDEKIENRVREKAIHLADVSDFKGLPLWLVCYIVYGRHSEAKEITQWKSPADIDSYLRSFKQHSLRNPIVEQIIIETLRVVRDIWKQVGNIDEIHVELGREMKNPADKRKKMTQQMSENENTNLRIKYLLTEFLNPEYEVENVRPYSPSQQDILRIYEEGVLNSVSDLPEEISDILKKFTETDLKKRPSRSEILRYKLWLEQKYRSPYTGEVIPLGKLFTPAYEIEHVIPQSCYFDDSFSNKVICEAEVNKLKSNLLGHEFIVKHHGEIVELPFGKKVRIFTVDEYEQFVKDNYSRTRSKMKKLLMDDIPEEFVTRQLNDSRYISKVVKSLLSNIVREKGEEEAISKNVIPCTGGVTDRLKKDWGINEVWNKIILPRFQRLNELTGTNKFTTKNVGIQEIPTMPLELQKGFNKKRIDHRHHAMDAIIIACANRNIINYLNNESATAKAELSRYDLQKMLCDKAKTDNNGNYKWVIRKPWASFTQDTYLALENIIVSFKQNLRVINKATNRFLHYNEEGKKIFVKQGKGDNWAIRKSMHKDTVFGEVNLRRIKTVALNEAMKNPQSIVVKDFKRKLLELWNLGFDAKRIKKYFEDNRETWSDINLSKIEVYYFSKDTKDRFFATRKPLDTSFDRKKIENNITDTGIQKILLRHLELKDNNPDIAFSPDGIDEMNRNIIQLNNGKYHQPIIKIRWYEQADKFAVGQTGNKFSKFVEAAKGTNLFFAVYESNILDKKTNTIIKKRNYATIPLNVAIERQKQGLPVAPEDENGNDPIFVLSPNDLVYLPTDDELANGIIAQPLDRGRIYKMVSCTGNEGHFIPARIANPILQTIELGSNNKAQKAWTDEMIKEICMPIKVDRLGNVLESSSSYKK

SEQ ID NO: 23304 - protein, 1312 aa, unidentified
  REGION 1..1312: note = Cas Enzyme sequence
VQNGFLGITVSSEQVGWAVTNPKYELERASRKDLWGVRLFDKAETAEDRRMFRTNRRLNQRKKNRIHYLRDIFHEEVNQKDPNFFQQLDESNFCEDDRTVEFNFDTNLYKNQFPTVYHLRKYLMETKDKPDIRLVYLAFSKFMKNRGHFLYKGNLGEVMDFENSMKGFCESLEKFNIDFPTLSDEQVKEVRDILCDHKIAKTVKKKNIITITKVKSKTAKAWIGLFCGCSVPVKVLFQDIDEEIVTDPEKISFEDASYDDYIANIEKGVGIYYEAIVSAKMLFDWSILNEILGDHQLLSDAMIAEYNKHHDDLKRLQKIIKGTGSRELYQDIFINDVSGNYVCYVGHAKTMSSADQKQFYTFLKNRLKNVNGISSEDAEWIDTEIKNGTLLPKQTKRDNSVIPHQLQLREFELILDNMQEMYPFLKENREKLLKIFNFVIPYYVGPLKGVVRKGESTNWMVPKKDGVIHPWNFDEMVDKEASAECFISRMTGNCSYLFNEKVLPKNSLLYETFEVLNELNPLKINGEPISVELKQRIYEQLFLTGKKVTKKSLTKYLIKNGYDKDIELSGIDNEFHSNLKSHIDFEDYDNLSDEEVEQIILRITVFEDKQLLKDYLNREFVKLSEDERKQICSLSYKGWGNLSEMLLNGITVTDSNGVEVSVMDMLWNTNLNLMQILSKKYGYKAEIEHYNKEHEKTIYNREDLMDYLNIPPAQRRKVNQLITIVKSLKKTYGVPNKIFFKISREHQDDPKRTSSRKEQLKYLYKSLKSEDEKHLMKELDELNDHELSNDKVYLYFLQKGRCIYSGKKLNLSRLRKSNYQNDIDYIYPLSAVNDRSMNNKVLTGIQENRADKYTYFPVDSEIQKKMKGFWMELVLQGFMTKEKYFRLSRENDFSKSELVSFIEREISDNQQSGRMIASVLQYYFPESKIVFVKEKLISSFKRDFHLISSYGHNHLQAAKDAYITIVVGNVYHTKFTMDPAIYFKNHKRKDYDLNRLFLENISRDGQIAWESGPYGSIQTVRKEYAQNHIAVTKRVVEVKGGLFKQMPLKKGHGEYPLKTNDPRFGNIAQYGGYTNVTGSYFVLVESMEKGKKRISLEYVPVYLHERLEDDPGHKLLKEYLVDHRKLNHPKILLAKVRKNSLLKIDGFYYRLNGRSGNALILTNAVELIMDDWQTKTANKISGYMKRRAIDKKTRVYQNEFHIQELEQLYDFYLDKLKNGVYKNRKNNQAELIHNEKEQFMELKTEDQCVLLTEIKKLFVCSPMQADLTLIGGSKHTGMIAMSSNVTKADFAVIAEDPLGLRNKVIYSHKGEK

SEQ ID NO: 23305 - protein, 1044 aa, unidentified
  REGION 1..1044: note = Cas Enzyme sequence
LDVTTEYLSSKDDYVALYEWLCVRKEIEQKTFLKYPAFGLKKEIENYRWNYIEGKSYPCNETRSLILHYLEKAGISSTFLSTKIEESLWHILYSVEDRIELETALRTFASKYQLSCNFVEVFKKFPPFKKEYGAYSAKAIKRLLPLMRMGKYWKVDAIDGNTAERIEKILSGECDEKILNKVREKTIHLSETSDFQGLPLWLACYVVYNRHSEVKEVAKWKSPEDIDIYLKSFKQHSLRNPIVEQVITETLRVVRDIWKRVEQIDEIHVELGREMKNPSEKRRQMTERMLENENANIRIKALLTEFMNPEYEMENVRPYSPSQQEILRIYEDTVLNGAGDIPEDIEIILKKFKENDIKKRPGKSDFLRYKLWLEQQYRSPYTGEIIPLGKLFTTAYEIEHVIPQSRYFDDSFSNKVICESEVNKLKDNMLGYEFIKKHAGEIVELGFGKSVKIFSVEAYERFVGENYYKAGSKKSKLLMDDIPEKFIERQLNDSRYISRVVKGLLSNVVREEDANGEYESEAISKNVIVCSGSVTDRLKKDWGVNDVWNNIVYSRFERLNRLTESQQFGHWENREGKRFFQTELPLEYQKGFSKKRIDHRHHAMDAIIIACATRNHVNYLSNESASKHARIARYDLQRMLCDKSKADGGGNYKWIIQKPWATFTQDVYRTLLDIIVSFKQNLRVINKMTNYYQAYDDAGKKVFKKQKKGDSWAIRKSMHKDTVFGQVNLRKIKEVRLSVALESPEKIVDKKIKEKVLQLFAYQYDKKKIEKYFKENASLWKEVNLAKIPVYYFTDESSELLVAVRKNLDTGFTEKKIRESVTDTGIQKILLNHLSNKGDKPELAFSPDGIDEMNRNLVILNGGKPHQPIYKVRVCEPLGNKFKVGTNGNKSAKYVEAAKGTNLFFAIYVTDDGKRTYETIPLNVVIEREKLGWLPVPEKNDKGGNLLFWLSPNDLVYLPTEEELMNGIISDSIDRNRIYKMVSCTGNEGHFIPENISNPIIPTLELGSNNKAQRAWTDEMIKETCIPIKVDRLGQITEIINKIR

SEQ ID NO: 23306 - protein, 1536 aa, unidentified
  REGION 1..1536: note = Cas Enzyme sequence
LIIYFIFEKIVNTILVMKKIVGLDLGTNSIGWALINAYIDEYNKEHLYGIEACGSRIIPMDAAILGNFDKGNSISQTADRTSYRGIRRLRERHLLRRERLHRILDLLGFLPKHYSDSLNRYGKFLNDIECKLPWVKDETGSYKFIFQESFKEMLADFTEHHPKLIANNKKVPYDWTIYYLRKKALTQKISKEELAWILLNFNQKRGYYQLRGEEEETPNKLVEYYSLKVEKVEDSGEKKGKDTWYNVHLENGMIYRRTSNIPLDWEGKTKEFIVTTDLEADGSPKKDKEGNIKRSFRAPKDDDWTLIKKKTEADIDKIKMTVGAYIYDTLLQKPDQKIRGKLVRTIERKYYKNELYQILKTQSEFHEELRDKQLYIACLNELYPNNEPRRNSISTRDFCHLFIEDIIFYQRPLKSKKSLIDNCPYEENRYIDKESGEIKHASIKCIAKSHPLYQEFRLWQFIVNLRIYRKETDVDVTQELLPTEADYVTLFEWLNEKKEIDQKAFFKYPPFGFKKTTSNYRWNYVEDKPYPCNETHAQIITRLGKAHIPKAFLSKEKEETLWHILYSIEDKQEIEKALHSFANKNNLSEEFIEQFKNFPPFKKEYGSYSAKAIKKLLPLMRMGKYWSIENIDNGTRIRINKIIDGEYDENIRERVRQKAINLTDITHFRALPLWLACYLVYDRHSEVKDIVKWKTPKDIDLYLKSFKQHSLRNPIVEQVITETLRTVRDIWQQVGHIDEIHIELGREMKNPADKRARISQQMIKNENTNLRIKALLTEFLNPEFGIENVRPYSPSQQDLLRIYEEGVLNSILELPEDIGIILGKFNQTDTLKRPTRSEILRYKLWLEQKYRSPYTGEMIPLSKLFTPAYEIEHIIPQSRYFDDSLSNKVICESEINKLKDRSLGYEFIKNHHGEKVELAFDKPVEVLSVEAYEKLVHESYSHNRSKMKKLLMEDIPDQFIERQLNDSRYISKVVKSLLSNIVREENEQEAISKNVIPCTGGITDRLKKDWGINDVWNKIVLPRFIRLNELTESTRFTSINTNNTMIPSMPLELQKGFNKKRIDHRHHAMDAIIIACANRNIVNYLNNVSASKNTKITRRDLQTLLCNKDKTDNNGNYKWVIDKPWETFTQDTLTALQKITVSFKQNLRVINKTTNHYQHYENGKKIVSNQSKGDSWAIRKSMHKETVHGEVNLRMIKTVSLNEALKKPQAIVEMDLKKKILAMLELGYDTKRIKNYFEENKDTWQDINPSKIKVYYFTKETKDRYFAVRKPIDTSFDKKKIKESITDTGIQQIMLRHLETKDNDPTLAFSPDGIDEMNRNILILNKGKKHQPIYKVRVYEKAEKFTVGQKGNKRTKFVEAAKGTNLFFAIYETEEIDKDTKKVIRKRSYSTIPLNVVIERQKQGLSSAPEDENGNLPKYILSPNDLVYVPTQEEINKGEVVMPIDRDRIYKMVDSSGITANFIPASTANLIFALPKATAEIYCNGENCIQNEYGIGSPQSKNQKAITGEMVKEICFPIKVDRLGNIIQVGSCILTN

SEQ ID NO: 23307 - protein, 1509 aa, unidentified
  REGION 1..1509: note = Cas Enzyme sequence
MKKILGLDLGTNSIGWAVVCHSDTDGQTERKWIEMAGSRIIPMDAAILGDFDKGNSKSQTSERTGFRGIRRLRERVLLRRERLHKVLKLIGFLPQHYIDSLDFSNHSGKFQLGTEVKLPWRKNEIGKYEFLFQNSFNEMLADFAKKQPELVAMGRKVPYDWTIYYLRKKALSEKITKEELAWILLNFNQKRGYYQLRGEEEEEKKNRLEDFYALKVVEVEQTDDKKGKDIWYNVHLENGWIYRRSSNVPLDWKDKIKEFIVTTELNEDGTPKVDKDGCVKRSFRMPKEDDWKLLKKKTEADIERSHKTIGCYIYDTLLQSPQQKIKGKLVRTIERKFYKDELKLILDKQQAFHPELQDRELYKACLDVLYPMNVAHKNNVANRGFVYLFMEDILFYQRPLKSKKSLIDNCPYEENQYIDVTTGEIKKAPIKCIAKSHPLYQEFRLWQFIANIRIYQKEKKVDGKLLTDIDVTTEYLSSKDDYVALYEWLCVRKEIEQKTFLKYPAFGLKKEIENYRWNYVEGKSYPCNETRSLILHYLEKAGISSTFLSTKIEESLWHILYSVEDRIELETALRTFASKYQLSCNFVEVFKKFPPFKKEYGAYSAKAIKRLLPLMRMGKYWKVDAIDGNTAERIEKILSGECDEKILNKVREKTIHLSETSDFQGLPLWLACYVVYNRHSEGKEVAKWKSPEDIDIYLKSFKQHSLRNPIVEQVITETLRVVRDIWKRVEQIDEIHVELGREMKNPSEKRRQMTERMLENENANIRIKALLTEFMNPEYEMENVRPYSPSQQEILRIYEDTVLNGAGDIPEDIEIILKKFKENDIKKRPGKSDFLRYKLWLEQQYRSPYTGEIIPLGKLFTTAYEIEHVIPQSRYFDDSFSNKVICESEVNKLKDNMLGYEFIKKHAGEIVELGFGKSVKIFSVEAYERFVGENYYKAGSKKSKLLMDDIPEKFIERQLNDSRYISRVVKGLLSNVVREEDANGEYESEAISKNVIVCSGSVTDRLKKDWGVNDVWNNIVYSRFERLNRLTESQQFGHWENREGKRFFQTELPLEYQKGFSKKRIDHRHHAMDAIIIACATRNHVNYLSNESASKHARIARYDLQRMLCDKSKTDGGGNYKWIIQKPWTTFTQDVYRTLLDIIVSFKQNLRVINKMTNYYQSYDDGKKVFKKQKKGDSWAIRKSMHKDTVFGQVNLRKIKEVRLSVALESPEKIVDKKIKEKVLQLFAYQYDKKKIEKYFKENASLWKEVNLAKIPVYYFTDESSELLVAVRKNLDTGFTEKKIRESVTDTGIQKILLNHLSNKGDKPELAFSPDGIDEMNRSLVILNGGKPHQPIYKVRVCEPLGNKFKVGTNGNKAAKYVEAAKGTNLFFAIYETDAGKRTYETIPLNVVIEREKMGWLPVPEKNNKGEKLLFWLSPNDLVYLPTEEELMSRILSDKLDRSRIYKIVSFTGNRLYAIPYNVSNMIWDKNEYTQLNKVESTDMKESIKEICMPINVDRLGHITEIIIK

SEQ ID NO: 23308 - protein, 1509 aa, unidentified
  REGION 1..1509: note = Cas Enzyme sequence
MKTILGLDLGSNSIGWAVINSVIKEQLERIWIEMAGSRIIPMDAAILGDFDKGNSISQTAERTRFRGVRRLRERQLLRRERLHKVLKILGFLPEHYLKEIDFEKHPGKFLADSEPKLPWLMDERGKYTFLFQTAFNEMLADFAKHQPSLVSDGKKVPYDWTIYYLRKKALTEMISKEELAWILLNFNQKRGYYQLRGEEEEDNAGKSVEFYALKVLSVEATDEKKGRDLWYNVHLENGWIYRRSSNVPLDWENQIKEFIVTTDLNPDGTPKLDKYGEVKRSFRAPKEDDWMLIKKRTEADIANTHKTIGSYIYDTLLQNPQQKIIGKLVKTVERKLYKEELNLILQKQCAFHAELQDRDLYMRCIEALYPGNEVRRKNIINRDFIYLLMDDVLFYQRPLKTKKSLISNCPYEENEYINRETGEIKKAPLKCIAKSHPLFQEFRLWHFLSNIRVYQKEKEVNGTLHLDVDVTAEFLKTEDDYVALFDWLNSRKEVDQKAFLRYPKFGLKKEINNYRWNYVEDKLYPCNETRYAILSRLEKLGVSLDFLSDEKETALWHILYSVSDKLEIEKALRTFAVKNGLNESFVEVFKKFPPFKPEYGSYSAKAIKKLLPLMRCGRYWDASLIDDATKDRIERIMTGEYDGNIAAKVREKAINLSDISCFKKLPLWLACYVVYNRHSENKEIAKWETPADIDAYLASFKQHSLRNPIVEQVIIETLRVVRDIWKQVGKIDEIHIELGREMKNPADKRKRMTAQIQENENANLRIKALLAEFMNPEYGVENVRPYSPSQQEILRIYEDTVLKGEEQIPEDIDVILKKFNNSKLPTKSEFLRYKLWLEQKYRSPYTGELIPLGKLFTAAYEIEHIIPQSRYFDDSFSNKVICESAVNKLKDNQLGYEFIKNHHGQKVEVGFGKTVEILSVDSYECFVKEQYAKSGVKMKKLLMDDIPEQFIERQLNDSRYISKVVKGLLSNIVREKNDSGEYEPEAVSKNILVCTGSVTDRLKKDWGMNDVWNSIVYPRFERLNALTGTQCFGHWENKDGKKVFQTELPLEYQKGFSKKRIDHRHHAMDAIVIACATRNHVNYLSNESASRNAKISRYDLQRLLCDKSRVDGTGNYRWIIKKPWNTFTQDAREALDKIVISSKQNLRIINKTTNIYQHFDTEGNRVYKKQETGDSWAIRKPMHKDTVFGTVNLRKVKSVRLSVALDTPTMIVDKRVKGKVLELLSYKYDKKKIEKYFKENVFFWKDLDIAKVAVYYFTENTSEPLVAVRKPLDSTFNEKKIKESVTDTGIQKILLNHLSAKEGKADLAFSAEGIEEMNRNILQLNDGKEHQPIYKVRVYEPRGNKFRVGAFGNKGTKWVEAAKGTNLFFAIYATEDGKRTYETVPLNLVIEREKQGLIPVPDRNEKGDKLLFWLSPNDLVYLPTEEEREFGRINEPIDRGRVYKMVSCTGNEGHFIPVNVANPILPTIELGSNNKAQRAWNNEMVKDICIPVKVDRLGRIIEVKYKANE

SEQ ID NO: 23309 - protein, 1498 aa, unidentified
  REGION 1..1498: note = Cas Enzyme sequence
MKHILGLDLGTNSIGWAVINAIKEENTQKEQLIGINTAGSRIIPMDAAQLGDFNKGNTVSQTANRTQFRGVRRLYERKKLRRERLHRILQLLGFLPKHYASQLDRYGKFIANSEPKLAWTTNTHEPSYFIFQSSFQEMLNDFLQNNNQVKKVPYDWTLFYLRKKALTQKIEKEELAWILLNFNQKRGYYQLREEETEKVSSKTRQYFDSQIVTDITDTGQIYKGLKIFTITLENGEKGKFFSKNMPDWKGQKKDIIAIIDLDKNGNDKYDENGELSRRFKIPTEQEWEEQWELIKTKTQKDLDTSHKTVGAYIYDTLLQTPSQKIRGKLIRTIERKYYKDELNQILKKQEEFHPELRDSNLLEACIEELYPNNEAHRNAIAKYSISQLLIEDILFYQRPLKSKKSLISNCPYEEYTYTNKETGEICTSSLKCIAKSHPLFQEFRLWQFISNLRIYQKEGTINGKFTTDIDVTNQFLKTEDDYANLFDWLNQKKEIRQDTFLKNPAFGLKKNIANYRWNYVEDKTYPCNETHYKILSYWEKAGIEQSALTSEIEEKLWHILYSISDKNELKKALQHFADKNYLSDKFADTFQQIPPFEKDYGSYSAKAIKKLLPLMRIGKFWKIENIDSTTLNRIEKILTGEFEENIKNQTREKTIHLDNLYSFQGLPTWLACYIVYNRHSEIKDVTKWQQPSDIDAFLNAFKQHSLHNPIVEQIIMETLRTVRDIWKQTGHIDEIHVELGREMKNPAEKRRKLTQQIQENENTNLRIKALLAEFANPELGIENVRPHSPSQQDLLRIYEEEVLNETKDIPEDIAVILKKFNEVDTQKRPSTSDVLRYKCWLEQKYRSPYTGAMIPLGKLFTPAYEIEHVIPQSRYFDDSFTNKVICEAEVNKLKGNMLGYEFIKNNQERIVELGFGQNVKIQTVEAYELFVKEHYSYNRTKMQKLLMEDIPDQFIERQLNDSRYISKLIKSLLSNIVRDEGEEEATSKNVIVCTGSITDRLKKDWGINDVWNKLILPRFIRLNEITESNRFTTTNACNKTIPAMPLDLQKGFNKKRIDHRHHAMDAIVIACANRNIVNYLNNESASKNAKISRQDLRQILCKKTKTDNLGNYQWLIDKPWDTFTQDMYSILSNIIVSFKQNLRIINKTTNHYIHYENGKKVNCSQKQSDSWAIRKPMHKETVYGEINLRRTTTATLKAALENPQRIIEKDLKKKIKELLTQGLNEKQIKKYFEDNKDIWQEINLKKIPVYYFTKETANRFFACRESINTTFNKKKIEEKVADTGIQQILLRHLEQNGNNPEQAFSPEGIEQMNKNIMSLNNGKFHQPIYKVRTYEQADKFAVGQTGNKSTKFVEAAKGTNLFFAIYETAHKRSFASIPLNVVIERLKKGLSPAPENEKGNLPKFILSPNDLVYVPTKEEIENGHINQPIQKDRIYKMVSCTEGECHFIPYFVAKPIIQTIELGSNNKAQKTWQDEMIKEICIPIKTDRLGNIITSISL

SEQ ID NO: 23310 - protein, 1371 aa, unidentified
  REGION 1..1371: note = Cas Enzyme sequence
MKKILGLDLGTSSIGWALVNEAETSEEKSSIIKLGVRVNPLTVDELQNFEKGKSITTNADRTAGRSMRRNLQRYKLRRENLIEVLKEYNFITDETILSENGNRTTFETYRLRAKAAVEEISLEQFARVLLMINKKRGYKSSRKAKGAENGTLIDGMEVAKKMYDEGITPGELCLQLLTAGKRYFPDFYRSDLQAEFDRIWNFQKQFYPDSLIDKVKDEVRGKNKSQTWAILAKYFVWKEVENSWNEEEAQTRRVEKEYRLVGIKRGVKREELKLENFQWRVKALSERMNPEELAIVLQEINEQISNSSGYLGAISDRSKELYFNRQTVGQYQMAVLDNNPNIGLRNMVFYRQDYLDEFNTIWEKQAEFHKELTEDLKKEIRDIVIFYQRRLKSQKGLINICEFERRQIEVEIDGKKKIKTIGSRVIPRSSPLFQEFKIWQTLNDIEVSVLGVKNKRKKQDDNSTTLLDSAENIDSLKLNVSRPLDADEKSLLAKELFIRDKLTKSDVLKLLFNNPQNLNLNFKNIDGNRTGSALYQAFSKILEISGHESINFKKSADEIVEQVKTIFSALGWNTEVLCFDSEKELDKQPYFKLWHLLYSFEGDSTPTGDGNLIQKIADLCGFEKDYASILANITFQEDYGSLSTKTIRKILPHLKDGNQYDVACEYAGYKHSKSSLKKEEIKNKVLKDKLELLPKNSLRNPVVEKILNQMVNVINAIITTYGKPDEIRIELARELKKNAKEREELTKSIVDTTKTHEGIRAILQNDFGMSHVSRNAIIRYKLYEELKDNGYKTLYSNTYIPKEKLFSKDFDIEHIIPQARLFDDSFSNKTLEVKSINIEKGSKTAYDFVEEKYGEQGLQEYLNRCEVLFRDKKTKLRKLKMQESEIPEGFIDRDLRNTQYIAKKALSMLNEICRRVVATTGAITDELREDWQLVDVMKELNWEKYKVLGLVEYFEDNDGRLIGRIKDWTKRNDHRHHAMDALTVAFTKDVFIQYFNNKNASLKPDTNEAAIRNKYFQNGKAIPPMSLDEFRAEAKKHLNDTLISIKTKNKVVTINLNRTKKKNGINKKQQQTPRGQLHLETVYGSHKQYVVKEEKVNASFDAAKIATVNKPAYRDALLRRLQENGNDSKKAFTGKNSLDKQPVWLDAKQNECVPEKVKTVMLETVYTVRKPIDEKLNVDKVVDARIRKLLQDRIKEYGNAKSAFANLDENPIWLNKEKGITIKRVSVFGISKAQSLHEKKDKDGNFILDKDSRRIPVDFVNTGNNHHVAIYRKPVLDKKGQAVFDENGELKFELEEVVVSFFDAVTRVNLSQPIIDKDYKRSEGWKFLFSMKQNEYFVFPNEKTGFDPKEIDLLNPENYALISPNLFRVQK

SEQ ID NO: 23311 - protein, 1416 aa, unidentified
  REGION 1..1416: note = Cas Enzyme sequence
MGFLPEHYASQLDRYGKFLPETEPKLAWYKDNTGSYRFLFQDSFNEMLEDFRLYHPELVAEGKKIPYDWTIYYLRKKALSQKIAKEELAWILLNFNQKRGYYQLRGEEEQEDNKKSVEYYALKVVAVEDSGERKGKDIWYNVKLENGWIYRRASSIPLDWTGKVKEFVVTTDLDDAGNPKKDKDGNVKRSFRAPKEDDWGLLKTKTQTQIDESGQTVGAYIYDSLLRMPDQKIRGKLVRTIERKYYKDELRKILLKQTEFHAALKDHNLLLSCIEELYPNNEAHRRLLSTSNFTCFLLEDILFYQRPLKSQKGLIDDCPYESHVYKKDGSLHRTPLKCISKSHPLFQEFRLWHFLSFLRIYQRERMIDGSLKLDVDVTNEFLQNEDDYVKLFDWLNGRKEIDQKTILAYKPFGLKKNEQPKYRWNYVEDKSYPCNETRADMISRLSKAGVSEGFLTEEREEALWHILYSISDKKELTKALGTFAEKNGLNEAFVELFSKMPPFESNYAAYSLKAIRKLLALMRMGKYWNEQDIDKQTRSRIEKILTGEYDETIRTRVREKAIHLTDISSFRGLPLWLACYVVYNRHSEAKELVKWETPADIDHFLSKFRQHSLRNPIVEQVIMETLRTVRDIWKQEGQIDEIHVELGREMKNPAKERARITAQVLENENTNLRIKALLTEFMNPEFEIENVRPYSPGQQEILRIYEEGVLSGVAEKDLPEDIISILKKFRENDVKKRPTTSEVLRYKLWLEQRYRSPYTGRIIPLGKLFTPAYEIEHVIPQSRYFDDSISNKVICESAVNKLKDNCLGYEFIKKHSGEIVELGNGEKATVFTSEEYEHFVKESYLGNGKKMKKLLLEDIPDNFIERQLNDSRYISKVVKSLLSNIVCEEGEQEGMSKNVIVCTGGVTDRLKKDWGVQDVWNRIILPRFLRLNKMTDSTGFTSVSTNGHLLPALPLHLQKGFNKKRIDHRHHAMDAIVIACADRNIVNYLNNASARKGSEISRYDLQHLLCDKVKTDSNGNYKWMLRKPWDTFTQDVYTALTNIVVSFKQNLRVINRTTNYHQHYNESGEKKMIPQVKGDRWAIRKPMHKDTVYGEVNLRREKTLPLKDVLNNPSIVVDKSLKSKLHELLKAQYDLKAITKYFEAHQDVWADINLKKIKVYYFTKETNERFFATRKSLDSSFNQKKIQEEVTDTGIQRILLRHLQLNDNNPDIAFSPDGIERMNQNMNILNDGKGHQPIYKVRTYEKAEKFAVGEHGNKVKKFVEAAKGTNLFFAVYESIQEDEATGKQVRKRTFATIPLNEVIKRKKQGLSVAPEDSNGNLPIFVLSPNDLVYLPTEEERNRGKVTQPLDRERIYKMVSCTGNRLFLVPYMVASPIYDKKEYTSLNKIELTDDKISIKEWCIPILIDRLGNISINY

SEQ ID NO: 23312 - protein, 1373 aa, unidentified
  REGION 1..1373: note = Cas Enzyme sequence
MKKVLGLDLGTTSIGWAMVNQAENNEEKSSIIRAGVRVNPLTTDEKDAFEKGKAVTTNTDRRLKRSMRRNLQRYKLRRNELVSILKELGWIDDSTILAEHGNRSTFETYELRSKACTESVSLTELARVLLMINKKRGYKSNRKANAEEDGQPVDGMSVAKLLYEKGKTPGQYCYSLVKKGNKVLPEFYASDLKSEFRRVWETQRLYYPEYLTEEFWNQIDGKTRSSLTKLFFAKYKITTADNKGKDKRVKAYEWRAAAVESRLPIDQVAYVLCDIAGNLGSSSGYLGKISDRSKELYFNKQTVGQYLYSNIQKDPHFSTKNKVFYRQDYLDEFEAIWESQASFHPELTDELKKEIRDVVIFYQRRLKSQKGLISYCEFESRKVDVEINGRIVQKIRGCKVAPVSSPLFQEFRMWQKINNIIVTNKETGEQGTLEQDDKVRLAECLRVKDKLSDKEILKLLFKKPKDLEMNFKSIEGNETLGKLYSKFLEVVSLAGNSDYEYSKLRQEELMNILRTEFARNGFNTAVLEYDPSLPKEEYERQPLFRLWHLLYSYEGDKSQTGNASLINKIAEICGMPENLAKIIASVSFKQDYASLSHKAMRKILPYMMDGNEYSLACEYAGYRHSKQSLTKEEIENKVLKDRLDQIPKNSLRNPVVEKILNQMVNVINTVGDRYGKPDEIHIELARELKSSQEERARATESIASNNKENDRIRMILENEFHLAYVSRNDIVKYKLYEELKNNGYKTLYSNQYIPADKLFSREIDIEHIIPQAVLFNDSLSNKTLEFRDINLEKGKDTAFDYVKNKYGESGLEDYKLRVNHLFESGGISRTKRDNLLRDSKNIPEGFVERDLKDTQYIAKKAREILLEYVRVVVSTSGSITDKLREDWGLVNLMKELNMPKFEAAGFVETITTSDGKDIRKIKDWTKRNDHRHHAMDAITIAFTKLAHIQYLNNLNAKGDKSSSIYAILQKETYLSGSKRLIIPPLPLDQMRREVRRQLESILVSIKAKNKVMTENINRIRIKDGVKNVKCLTPRGLLHKEQVYGQRKRYETYDVAVNGKMTEDVIATVASSETKAALALRLAQFKGDPKKAFTGANSLDKNPVWLDANHSRKVPAKVKCVRFVNVYSIRKNIDPSLSVEKVMDGRVRRILKDRLAEFGNDPKKAFVNLDENPIWFNKEKGIILKSVTIAENFDLGPIRIKRDNLGRVICDAEGNHIPSDYVNFRNNHHAAIFEDADGNIQEHIVSFYEAVRRRSAGLPVVDKEYNADKGWKFLFTMKSNEMFVFPNERTGFDPRAVDLMDPENYSAIGPNLFRVQKMASKDYWFRHHLETTLGDDLKLKDITWKRITALNNLKGIVKVRINHIGEIVSVGEYD

SEQ ID NO: 23313 - protein, 1430 aa, unidentified
  REGION 1..1430: note = Cas Enzyme sequence
MKKILGLDLGSNSIGWALVNEAENRDEASSIIKLGVRVNPLTVDEMQNFEKGKSITTNADRTLKRSMRRNLQRYKLRRDALIKLLKKVGFIADGTILSEQGNRTTFETYRLRAKAPDEEISLQELARVLLMINKKRGYKSSRKIKEKEAGTLIDGMEVAKKLYDEDLTPGQLCLQLLESGKKSLPDFYSSDLQEEFDRIWNFQKQFNPKAFCDTAKEEIKGKNKSQTWAILAKYFIWTDEMVVWNEKESKTERVEKECKLVGLKRTVKKEEQRKENYRWRVQALTEQLDLEKVAVVLQEINGQISTSSGYLGAISDRSKVLYFNRQTVGQYQMAELEKNPNTSLRNMVFYRQDYLDEFDKIWEKQVEFHKELTVELKKEIRDIIIFYQRRLKSQKGLIGFCEFENREIMVEKNGKMQAKVVGCKVIPRSHPLFQEFKIWQTLNNVEVFAGEKKCKRKRTDAFPGLFDGTEDTLMVEGWRYLYQEEKEILAKELSVKKSLKKECILKLLSDNPQDLNFEQIEGNDTRNVLFSAYSKMIEKYGYEPLDFGKPTDEIIERLQDIFTDLGWNTDLLFVDLNKEGKDLEKQPYFKLWHLLYSFEGDNTPTGNGKLVEKLMELCHVGKECALELVNISFQNDYGSLSAKAIKKILPYLKEGNRYDVACGYAGYRHSKSSLTKEEIENKVLKDKLDILPKNSLRNPVVEKILNQMVNVINAIIDTYGKPDEIRVELARELKKSAKEREELTKAIAKSTREHEEIRKVLQEEFGMINVSRNDIIRYKLYEELKDNGYKTLYSNQYIPKEKVFSKEIDIEHIIPQARLFDDSLSNKTLEYKAINIEKGNKTAYDFVKEKYGEKGLQQYLNRCESLFKGQRTKLRKLKMEQENIPEGFIDRDLRNTQYIAKKALAMLNEICRRVVATTGSITDRLREDWQLVDVLKELNLPKYETLGLVEVYEDKDGRKIKRIKDWTKRNDHRHHAMDALTVAFTKDVFIQYFNNKNAAWQADCKEHSDIIGIKTRYFENGRALPPMPLVRFRAEAKSHLETLLVSIKAKNKVVTNNVNCTKRKGGENKKLQQTPRGQLHLETIYGSHRQYVTKEEKVNASFDSSKIATVCKPAYRNALLERLAAFGNDPKKAFTGKNSLEKNPVYLNREQTARVPERVRTVELETVYTIRKPVDPNLSVDKVVDAKVRSILEQRLREYDGEAKRAFVNLDENPIWLNEEKGIAIKRVTIRGINKVQSLHGKKDKNGNLILDETGKKIPVDFVNTGNNHHVAIYRKPVLDKTGQEMLDNEGNPVYELDEVVVSFFEAVTRVNLGLPVIDKNYNKSEGWQFMFTMKQNEYFVFPNEKTGFDPKEVDLLNPENYAVISPNLFRVQKISTKNYMFRHHLETTVIDNKPLRKITWELIQTPNKLDGIVKVRVNHIGQIVSVGEY

SEQ ID NO: 23314 - protein, 1498 aa, unidentified
  REGION 1..1498: note = Cas Enzyme sequence
MKHILGLDLGTNSIGWAVINAIKEENTQKEQLIGINTAGSRIIPMDAAQLGDFNKGNTVSQTANRTQFRGVRRLYERKKLRRERLHRILQLLGFLPKHYASQLDRYGKFIANSEPKLAWTTNTHEPSYFIFQSSFQEMLNDFLQNNNQVKKVPYDWTLFYLRKKALTQKIEKEELAWILLNFNQKRGYYQLREEETEKASSKTRQYFDSQIVTDITDTGQVYKGLKIFTITLENGEKGKFFSKNMPDWKGQKKDIIAIIDLDKNGNDKYDENGELSRRFKIPTEQEWEEQWELIKTKTQKDLDTSHKTVGAYIYDTLLQTPSQKIRGKLIRTIERKYYKDELNQILKKQEEFHPELRDSNLLEACIEELYPNNEAHRNAIAKYSISQLLIEDILFYQRPLKSKKSLISNCPYEEYTYINKETGEICTSSLKCIAKSHPLFQEFRLWQFISNLRIYQKEGTINGKFTTDIDVTNQFLKTEDDYANLFDWLNQKKEIRQDTFLKNPAFGLKKNIANYRWNYVEDKTYPCNETHYKILSYWEKAGIEQSALTSEIEEKLWHILYSISDKNELRKALQHFADKNYLSDKFADTFQQIPPFEKDYGSYSAKAIKKLLPLMRIGRYWKAENFDSTTLDRIEKILTGEFEENIKNRTREKTIHLDNLYSFQGLPTWLACYIVYNRHSEIKDVTKWQQPSDIDAFLNAFKQHSLHNPIVEQIIMETLRTVRDIWKQTGHIDEIHVELGREMKNPAEKRRKLTQQIQENENTNLRIKALLAEFANPEFGIENVRPHSPSQQDLLRIYEEEVLNETKDIPEDIAVILKKFNEVDTKKRPSTSDVLRYKCWLEQKYRSPYTGAMIPLGKLFTPAYEIEHVIPQSRYFDDSFTNKVICEAEVNKLKGNMLGYEFIKNNQERIVELGFGQNVKIQTVEAYELFVKEHYSYNRTKMQKLLMEDIPDQFIERQLNDSRYISKLIKSLLSNIVRDEGEEEATSKNVIVCTGSITDRLKKDWGINDVWNKLILPRFIRLNEITESNRFTTTNACNKTIPAMPLDLQKGFNKKRIDHRHHAMDAIVIACANRNIVNYLNNESASKNAKISRQDLRQILCKKTKTDNLGNYQWLIDKPWDTFTQDMYSILSNIIVSFKQNLRIINKTTNHYIHYENGKKVSCSQKQSDSWAIRKPMHKETVYGEINLRRTTTATLKAALENPQRIIEKDLKKKIKELLTQGLNEKQIKKYFEDNKDIWQEINLKKIPVYYFTKETANRFFACRESINTTFNKKKIEEKVADTGIQQILLRHLEQNGNNPEQAFSPEGIEQMNKNIMSLNNGKFHQPIYKVRTYEQADKFAVGQTGNKSTKFVEAAKGTNLFFAIYETAHKRSFASIPLNVVIERLKKGLSPAPENEKGNLPKFILSPNDLVYVPTKEEIENGHINQPIQKDRIYKMVSCTGNRLYAIPYYIANILIDKEEYGALNKTEFSDEKLSIKEICIPIKTDRLGNIITSISL

SEQ ID NO: 23315 - protein, 1536 aa, unidentified
  REGION 1..1536: note = Cas Enzyme sequence
LIIYFIFEKIVNTILVMKKIVGLDLGTNSIGWALINAYIDEYNKEHLYGIEACGSRIIPMDAAILGNFDKGNSISQTADRTSYRGIRRLRERHLLRRERLHRILDLLGFLPKHYSDSLNRYGKFLNDIECKLPWVKDETGSYKFIFQESFKEMLANFTEHHPILIANNKKVPYDWTIYYLRKKALTQKISKEELAWILLNFNQKRGYYQLRGEEEETPNKLVEYYSLKVEKVEDSGERKGKDTWYNVHLENGMIYRRTSNIPLDWEGKTKEFIVTTDLEADGSPKKDKEGNIKRSFRAPKDDDWTLIKKKTEADIDKIKMTVGAYIYDTLLQKPDQKIRGKLVRTIERKYYKNELYQILKTQSEFHEELRDKQLYIACLNELYPNNEPRRNSISTRDFCHLFIEDIIFYQRPLKSKKSLIDNCPYEENRYIDKESGEIKHASIKCIAKSHPLYQEFRLWQFIVNLRIYRKETDVDVTQELLPTEADYVTLFEWLNEKKEIDQKAFFKYPPFGFKKTTSNYRWNYVEDKPYPCNETHAQIIARLGKAHIPKAFLSKEKEETLWHILYSIEDKQEIEKALHSFANKNNLSEEFIEQFKNFPPFKKEYGSYSAKAIKKLLPLMRMGKYWSIENIDNGTRIRINKIIDGEYDENIRERVRQKAINLTDITHFRALPLWLACYLVYDRHSEVKDIVKWKTPKDIDLYLKSFKQHSLRNPIVEQVITETLRTVRDIWQQVGHIDEIHIELGREMKNPADKRARISQQMIKNENTNLRIKALLTEFLNPEFGIENVRPYSPSQQDLLRIYEEGVLNSILELPEDIGIILGKFNQTDTLKRPTRSEILRYKLWLEQKYRSPYTGEMIPLSKLFTPAYEIEHIIPQSRYFDDSLSNKVICESEINKLKDRSLGYEFIKNHHGEKVELAFDKPVEVLSVEAYEKLVHESYSHNRSKMKKLLMEDIPDQFIERQLNDSRYISKVVKSLLSNIVREENEQEAISKNVIPCTGGITDRLKKDWGINDVWNKIVLPRFIRLNELTESTRFTSINTNNTMIPSMPLELQKGFNKKRIDHRHHAMDAIIIACANRNIVNYLNNVSASKNTKITRRDLQTLLCNKDKTDNNGNYKWVIDKPWETFTQDTLTALQKITVSFKQNLRVINKTTNHYQHYENGKKIVSNQSKGDSWAIRKSMHKETVHGEVNLRMIKTVSLNEALKKPQAIVEMDLKKKILAMLELGYDTKRIKNYFEENKDTWQDINPSKIKVYYFTKETKDRYFAVRKPIDTSFDKKKIKESITDTGIQQIMLRHLETKDNDPTLAFSPDGIDEMNRNILILNKGKKHQPIYKVRVYEKAEKFTVGQKGNKRTKFVEAAKGTNLFFAIYETEEIDKDTKKVIRKRSYSTIPLNVVIERQKQGLSSAPEDENGNLPKYILSPNDLVYVPTQEEINKGEVVMPIDRDRIYKMVDSSGITANFIPASTANLIFALPKATAEIYCNGENCIQNEYGIGSPQSKNQKAITGEMVKEICFPIKVDRLGNIIQVGSCILTN

SEQ ID NO: 23316 - protein, 1509 aa, unidentified
  REGION 1..1509: note = Cas Enzyme sequence
MKTILGLDLGTNSVGWAVINSVIKEQAERIWIEMAGSRIIPMDAAVLGDFDKGNSISQTSERTRLRGARRLRERQLLRRERLHKVLNILGFLPNHYLEYIDFEKHPGKFLADAEPKLAWVKDEQGKYTFLFQAAFDEMLADFAIHQPSLVSGDKKIPYDWTIYYLRKKALTEMISKEELAWILLNFNQKRGYYQLRGEEEEDNAGKSVEFYALKVLTVEATDEKKGRDVWYNVHLENGWIYRRSSSVPLDWEGQVKEFIVTTDLNPDGTPKLDKYGEVKRSFRAPKEDDWMLIKKRTEADIANTHKTVGAYIYDTLLQKPQQKIIGKLVKTVERKLYRDELSLILQKQCAFHAELQDRALYARCVEALYPSNEVRRKNIANRDFVYLLMDDILFYQRPLKTKKSLIANCPYEENEYVDRETGEIKKAPLKCIAKSHPLFQEFRLWNFLSNIRIYQKEKEINGTLHLDVDVTAEFLKTEDDYVALFDWLNSRKEIEQKTFLKYPKFGLKKEISNYRWNYVEDKQYPCNETRHAILSSLEKANVCIDFLSNEKEVALWHILYSVSDKQEIEKALRTFAAKNGLDESFVEAFKKFPPFKSEYGAYSAKAIKKMLPLMRCGKYWDVSSIDDTTKERIKKIVTGEYDERISVKVRDKVMNLSDISCFRRLPLWLACYIVYNRHSEDKEAVKWESPADIDAYLASFKQHSLRNPIVEQVITETLRVVRDIWKQVGRIDEIHIELGREMKNPADKRKRMTAQILENENANLRIKALLAEFMNPEYEIENVRPYSPSQQEILRIYEDTVLHAEDQLPEEIDAILKKFNSSKVPTKSEFLRYKLWLEQKYRSPYTGELIPLGKLFTAAYEIEHVIPQSRYFDDSFSNKVICESAVNKLKDNQLGYEFIKNHHGQKVEVGFGKSVEIFSVDSYERFVKEQYAKSAVKMKKLLMDDIPEQFIERQLNDSRYISKVIKGLLSNIVREKNDSGEYEPEAVSKNIVVCTGSVTDRLKRDWGMNDVWNSIVYPRFERLNSLTDTQSFGHWENKSGKKVFQTELPLEYQKGFSKKRIDHRHHAMDAIVIACATRNHVNYLSNESASRNAKISRYDLQRLLCDKNRTDDNGNYKWVIKKPWDTFTQDAREVLSKIVVSLKQNLRIINKTTNVYRHFDATVNRVYEKQKTGDSWAIRKPMHKDTVFGAVNLRKVKVVRLSVALDTPAMIVDKRVKNKVFELLSYKYDKKRIEKYFKENAFLWKELDLAKVAVYYFTEATTEPLVAVRKPLDSTFNEKKIKESVTDTGIQKILLNHLCTKEGKPDLAFSAEGIEEMNRNLLQLNNGKSHQPIYKVRVYEPRGNKFSVGVLGNKGTKWVEAAKGTNLFFAIYITEDGKRTYETIPLNVVIEREKQGLVPVPDRNEKGDKLLFWLSPNDLVYLPTEEEREFGRINEPIDRGRIYKMVSCTGNEGHFIPANVANPIVPVIELGSNNKAQRAWTNEMIKDICIPIKVDRLGHIIEVKYRIDE

SEQ ID NO: 23317 - protein, 926 aa, unidentified
  REGION 1..926: note = Cas Enzyme sequence
VEVFKKFPPFKKEYGAYSAKAIKRLLPLMRMGKYWKVDAIDGNTAERIEKILSGECDEKILNKVREKTIHLSETSDFQGLPLWLACYVVYNRHSEVKEVAKWKSPEDIDIYLKSFKQHSLRNPIVEQVITETLRVVRDIWKRVEQIDEIHVELGREMKNPSEKRRQMTERMLENENANIRIKALLTEFMNPEYEMENVRPYSPSQQEILRIYEDTVLNGAGDIPEDIEIILKKFKENDIKKRPGKSDFLRYKLWLEQQYRSPYTGEIIPLGKLFTTAYEIEHVIPQSRYFDDSFSNKVICESEVNKLKDNMLGYEFIKKHAGEIVELGFGKSVKIFSVEAYERFVGENYYKAGSKKSKLLMDDIPEKFIERQLNDSRYISRVVKGLLSNVVREEDANGEYESEAISKNVIVCSGSVTDRLKKDWGVNDVWNNIVYSRFERLNRLTESQQFGHWENREGKRFFQTELPLEYQKGFSKKRIDHRHHAMDAIIIACATRNHVNYLSNESASKHARIARYDLQRMLCDKSKADGGGNYKWIIQKPWATFTQDVYRTLLDIIVSFKQNLRVINKMTNYYQAYDDAGKKVFKKQKKGDSWAIRKSMHKDTVFGQVNLRKIKEVRLSVALESPEKIVDKKIKEKVLQLFAYQYDKKKIEKYFKENASLWKEVNLAKIPVYYFTDESSELLVAVRKNLDTGFTEKKIRESVTDTGIQKILLNHLSNKGDKPELAFSPDGIDEMNRNLVILNGGKPHQPIYKVRVCEPLGNKFKVGTNGNKSAKYVEAAKGTNLFFAIYVTDDGKRTYETIPLNVVIEREKLGWLPVPEKNDKGGNLLFWLSPNDLVYLPTEEELMNGIISDSIDRNRIYKMVSCTGNEGHFIPENISNPIIPTLELGSNNKAQRAWTDEMIKETCIPIKVDRLGQITEIINKIR

SEQ ID NO: 23318 - protein, 1012 aa, unidentified
  REGION 1..1012: note = Cas Enzyme sequence
VEDKPYPCNETHAQIIARLGKAHIPKAFLSKEKEETLWHILYSIEDKQEIEKALHSFANKNNLSEEFIEQFKNFPPFKKEYGSYSAKAIKKLLPLMRMGKYWSIENIDNGTRIRINKIIDGEYDENIRERVRQKAINLTDITHFRALPLWLACYLVYDRHSEVKDIVKWKTPKDIDLYLKSFKQHSLRNPIVEQVITETLRTVRDIWQQVGHIDEIHIELGREMKNPADKRARMSQQMIKNENTNLRIKALLTEFLNPEFGIENVRPYSPSQQDLLRIYEEGVLNSILELPEDIGIILGKFNQTDTLKRPTRSEILRYKLWLEQKYRSPYTGEMIPLSKLFTPAYEIEHIIPQSRYFDDSLSNKVICESEINKLKDRSLGYEFIKNHHGEKVELAFDKPVEVLSVEAYEKLVHESYSHNRSKMKKLLMEDIPDQFIERQLNDSRYISKVVKSLLSNIVREENEQEAISKNVIPCTGGITDRLKKDWGINDVWNKIVLPRFIRLNELTESTRFTSINTNNTMIPSMPLELQKGFNKKRIDHRHHAMDAIIIACANRNIVNYLNNVSASKNTKITRRDLQTLLCHKDKTDNNGNYKWVIDKPWETFTQDTLTALQKITVSFKQNLRVINKTTNHYQHYENGKKIVSNQSKGDSWAIRKSMHKETVHGEVNLRMIKTVSFNEALKKPQAIVEMDLKKKILAMLELGYDTKRIKNYFEENKDTWQDINPPKIKVYYFTKETKDRYFAVRKPIDTSFDKKKIKESITDTGIQQIMLRHLETKDNDPTLAFSPDGIDEMNRNILILNKGKKHQPIYKVRVYEKAEKFTVGQKGNKRTKFVEAAKGTNLFFAIYETEEIDKDTKKVIRKRSYSTIPLNVVIERQKQGLSSAPEDENGNLPKYILSPNDLVYVPTQEEINKGEVVMPIDRDRIYKMVDSSGITANFIPASTANLIFALPKATAEIYCNGENCIQNEYGIGSPQSKNQKAITGEMVKEICFPIKVDRLGNIIQVGSCILTN

SEQ ID NO: 23319 - protein, 1508 aa, unidentified
  REGION 1..1508: note = Cas Enzyme sequence
MKKILGLDLGTNSIGWAVINSSVDDEGKEKLTSISSCGSRIIPMDAATLGDFDKGNAKSSVAERTRLRGIRRLLERSLLRRERLHRVLSVMGFLPEHYASQLDRYGKFLPETEPKLAWYKDNTGSYRFLFQDSFNEMLEDFRLYHPELVAEGKKIPYDWTIYYLRKKALSQKIAKEELAWILLNFNQKRGYYQLRGEEEQEDNKKSVEYYALKVVAVEDSGERKGKDIWYNVKLENGWIYRRASSIPLDWTGKVKEFVVTTDLDDAGNPKKDKDGNVKRSFRAPKEDDWGLLKTKTQTQIDESGQTVGAYIYDSLLRMPDQKIRGKLVRTIERKYYKDELRKILFKQTEFHAALQDHNLLLSCIEELYPNNEAHRRLLSSSSFTYFLLEDILFYQRPLKSQKGLIDDCPYESHVYRDKKDGSLHRTPLKCISKSHPLFQEFRLWHFLSFLRIYQRERMIDGSLKLDVDVTNEFLQNEDDYVKLFDWLNGRKEIDQKTILAYKPFGLKKNEQPKYRWNYVEDKSYPCNETRADMISRLSKAGVSEGVLTEEREEVLWHILYSISDKKELTKALGTFAEKNGLNEAFVEQFSKMPPFESNYAAYSLKAIRKLLALMRMGKYWNEQDIDKQTRSRIEKILTGEYDETIRTRVREKAIHLTDISSFRGLPLWLACYVVYNRHSEAKELVKWETPADIDHFLSKFRQHSLRNPIVEQVIMETLRTVRDIWKQEGQIDEIHVELGREMKNPAKERARITAQALENENTNLRIKALLTEFMNPEFEIENVRPYSPGQQEILRIYEEGVLSGVAEKDLPEDIISILKKFRENDVKKRPTTSEVLRYKLWLEQRYRSPYTGRIIPLGKLFTPAYEIEHVIPQSRYFDDSISNKVICESAVNKLKDNCLGYEFIKKHSGEIVELGNGEKATVFTSEEYEHFVKESYLGNGKKMKKLLLEDIPDNFIERQLNDSRYISKVVKSLLSNIVCEEGEQEGMSKNVIVCTGGVTDRLKKDWGVQDVWNRIILPRFLRLNKMTDSTGFTSVSTNGHLLPALPLHLQKGFNKKRIDHRHHAMDAIVIACADRNIVNYLNNASARKGSEISRYDLQHLLCDKVKTDSNGNYKWMLRKPWDTFTQDVYTALTNIVVSFKQNLRVINRTTNYHQHYNESGEKKMIPQVKGDRWAIRKSMHKDTVYGEVNLRREKTLPLKDVLNNPSIVVDKSLKSKLHELLKAQYDLKAITKYFEAHQDVWADINLKKIKVYYFTKETNERFFATRKSLDSSFNQKKIQEEVTDTGIQRILLRHLQLNDNNPDIAFSPDGIERMNQNMNILNDGKGHQPIYKVRTYEKAEKFAVGEHGNKVKKFVEAAKGTNLFFAVYESIQEDEATGKQVRKRTFATIPLNEVIKRKKQGLSAAPEDSNGNLPIFVLSPNDLVYLPTEEERNSGKVTQPLDRERIYKMVSCTGNRLFLVPYMVASPIYDKKEYTSLNKIELTDDKISIKEWCIPILIDRLGNISINY

SEQ ID NO: 23320 - protein, 1504 aa, unidentified
  REGION 1..1504: note = Cas Enzyme sequence
MKNIVGLDLGTNSIGWAVVNGSVNDDGSEQLVKIQASGSRIIPMDAAMIGDFNKGNSISQTAERTRLRGVRRLSERYLLRRERLHRILDILGFLPFHFAQDLDRHGKIVKGKEPKLAWRKNEAGQFEFIFQDSFKEMLEDFKLNHPNLITDDKKVPYDWTIYYLRKKGLTSKISKEELAWILLNFNQKRGYYQLRGEEEEENKNKLVEFYALKVVAVEDSGEKKGKDIWYNVHLENGWVYRRTSNMPLDWVGKTKEFIVTTDLEKDGTPKKDKEGNVKRSFRAPKEDDWSLLKKKTEADIDQTHKTVGVYIYDTLLGNPSQKIRGRLVRTIERKYYKEELKQILEKQKEFHLELQDRALYAACIEELYPINEAHRNNVGNRDFTYLFLEDILFYQRPLKSKKSLIDNCPYEENQGLDKETGEIKSFPVKCIAKSHPLFQEFRLWQFIVNLRIYRKDLAQDVDVTNELLKTEEDYVALFDWLNGKKEIDQKAFLKYPVFGLKKEIENYRWNYVQDKPYPCNETRLLMLARLEKCDISIEFLTKENEETLWHILYSVEDKNEIVKALQKFADKHDLNASFVDVFRKFPPFKKEYGSYSAKAIKKLLPLMRMGKYWSEDSIDKGTRKRMDKIITGEYDEKIENRVREKVIHLADVSDFRGLPLWLVCYIVYGRHSEAKEITQWKSPADIDSYLKSFKQHSLRNPIVEQIIIETLRVVRDIWKQVGNIDEIHVELGREMKNPADKRKKMTQQMSENENTNLRIKYLLTEFLNPEYEVENVRPYSPSQQDILRIYEEGVLNSVSDLPEEISDILKKFTETDLKKRPSRSEILRYKLWLEQKYRSPYTGEVIPLGKLFTPAYEIEHVIPQSCYFDDSFSNKVICEAEVNKLKSNLLGHEFIVKHHGEIVELPFGKKVRIFTVDEYEQFVKDNYSRTRGKMKKLLMDDIPEEFVARQLNDSRYISKVVKSLLSNIVREKGEEEAISKNVIPCTGGVTDRLKKDWGINEVWNKIILPRFQRLNELTGTNKFTTKNVGIQEIPTMPLELQKGFNKKRIDHRHHAMDAIIIACANRNIINYLNNESATAKAELSRYDLQKLLCDKAKTDNNGNYKWVIRKPWASFTQDTYLALENIIVSFKQNLRVINKATNRFLHYNEEGKKIFVKQGKGDNWAIRKSMHKDTVFGEVNLRRIKTVALNEAMKNPQSIVVKDFKRKLLELWNLGFDAKRIKKYFEDNRETWSDINLSKIEVYYFSKDTKDRFFATRKPLDTSFDRKKIENNITDTGIQKILLRHLELKDNNPDIAFSPDGIDEMNRNIIQLNNGKYHQPIIKIRWYEQADKFAVGQTGNKFSKFVEAAKGTNLFFAVYESNILDKKTNTIIKKRNYATIPLNVAIERQKQGLPVAPEDENGNDPIFVLSPNDLVYLPTDDELANGIIAQPLDRGRIYKMVSCTGNEGHFIPARIANPILQTIELGSNNKAQKAWTDEMIKEICMPIKVDRLGNVLESSSSYKK

SEQ ID NO: 23321 - protein, 1149 aa, unidentified
  REGION 1..1149: note = Cas Enzyme sequence
MILGLDLGTTSIGWAVVSEDDQTFRLDSLGSRIIPLTTDDANEFLSGNAISKNAKRTQRRTQRKGYSRYQQRRALLQQFLQQHAMLPDESLKGLNKLSLWGLRTRAVSEQLSLPELGRVLYHLNQKRGYKATKADYDADGDKKQGEYVKAVMGRHRMITERGITIGQLFFEKLSEDPSYRIKEQVFPRRAYEEEFDRIVACQRQFYPTLFTEENIDTLRNRIIYYQRGLKSCKHLVSLCDFEKRAYLNAAGKTVFNGPKVAPKSSPLAQICKIWESVNNLTLKNRRGETLEIAPEERRALFEHLNTHDKLTLTDLYRILGIRKTDGWWAGKAIGKGLQGNTTRNALRKALAGQYDELLRFNLTTVETNHVDAETGEIIQMVSEAYLDEPLYRLWHAVYSIPDQEDLSKTLQKQFGITDPEVVENLFAIDFVKAGYASKSAKAMRRILPYLELGLKYAESCEAAGFRHSESLTVQELESKSLLPKLKPIEKNELRQPVVEKILNQMVNVVNALMDKYGHFDEVRVELARELKQSRDERNETTKRIDKNEQKNRAVAKRIATDYQLTPTRNRIRKYKLWEESGHVCIYCKSVINASEFLQGIDSEKEHIIPRSLFFDDSFSNLACSCRQCNAAKGNRTAYDFMQQKSEAEFADYLDRVEKLYKKKKISKTKYERLLMPESKIPTDFIDRQLRESQYIARKAREILSGVCRQVTATSGSVTDFLRRTWGWDRVLHDLNFDRYRAAGLTEIKDREHNGRHWQEEEICNWNKRLDHRHHAIDALVIACTKQGYIQRLNTLSQWKDVSFAPTEAQGEVYQTKRSKLEKYIVAQPHFSVQEVQQAVRSVLVSFKAGKKVASTGKRYSYRQGKRVLMQHVLIPRGALHKDSVYGVVNRYAKNRRGETVIEQKSVLRYPLASIERNQINSIVDSGMRKLVQQRFDRHPGSGKDVLKDLQNDPLLFNGVPVKSVRRMPRLDASSLIHLHRGGYVVPGNNHHVAIYRDRAGKLYEHCVTFWQAFDRKRYGLPVVIIHPEEVWNSLPEGVPDTVMEQLPLPEYSFVVSLQQNEMFVIGMAPELFEEAMRNQDYALLGQYLYRVQYISSNDYCFRLHVETGTERGESDGLAKKFYRFKSLKAFFAANPTKVRISLLGEISKV

SEQ ID NO: 23322 - protein, 1135 aa, unidentified
  REGION 1..1135: note = Cas Enzyme sequence
MEEKFQYRIGLDIGITSVGWAVLQNNSQDEPVRITDLGVRIFDVAENPKNGDALAAPRRDARTTRRRLRRRRHRLERIKFLLQENGLIEMDYFMERYYKGNLPDVYQLRYEGLDRKLKDEELAQVLIHIAKHRGFRSTRKAETKEKEGGAVLKATTENQKIMQEKGYRTVGEMLYLDEAFHTECLWNEKGYVLTPRNRPDDYKHTILRSMLVEEVHAIFAAQRAHGNQKATEGLEEAYVEIMTSQRSFDMGPGLQPDGKPSPYAMEGFGDRVGKCTFEKDEYRAPKATYTAELFVALQKINHTKLIDEFGTGRFFSEEERKTIIGLLLSSKELKYGTIRKKLNIDPSLKFNSLNYSAKKEGETEEERVLDTEKAKFASMFWTYEYSKCLKDRTEEMPVGEKADLFDRIGEILTAYKNDDSRSSRLEDLGLSGEEIDGLLELSPAKYQRVSLKAMRKMQPYLEDGLIYDKACEAAGYDFRALNDGNKKHLLKGEEINAIVNDITNPVVKRSVSQTIKVINAIIQKYGSPQAVNIELAREMSKNFQDRTNLEKEMKKRQQENERAKQQIIELGKQNPTGQDILKYRLWNDQGGYCLYSGKKIPLEELFGGGYDIDHILPYSITFDDSYRNKVLVTAQENRQKGNRTPYEYFGADEKHWEDYEARVRLLVRDYKKQQKLLKKNFTEEERKEFKERNLNDTKYITRVVYNMIRQNLELEPFNHPEKKKQVWAVNGAVTSYLRKRWGLMQKDRSTDRHHAMDAVVIACCTDGMIHKISMFVKGRELRFNRNLTIVDEKTGEIFTREQWDEKFGVKVPLPWNSFRDELVIRLEKDDPKNYLMVHTDMQREIDYPGWMFGEEESPIEEGRYINYVRPLFVSRMPNHKVTGSAHDATIRSARDYETRGVVITKVPLTDLKLNKDNEIDGYYDKDSDRLLYQALVRQLLLHGNDGKKAFAEDFHKPKADGTEGPVVRKVKIEKKQTSGVMVRSGTGIAANGEMVRIDVFRENGKYYFVPVYTADVVRKVLPNRAATHTKPYSEWRVMDDANFVFSLYSRDLIHVKSKKDIKTNLVNGGLLLQKEIFAYYTGADIATASIAGFANDSNFKFRGLGIQSLEIFEKCQVDILGNISVVRHENRQEFH

SEQ ID NO: 23323 - protein, 1499 aa, unidentified; identical to SEQ ID NO: 22676
  REGION 1..1499: note = Cas Enzyme sequence

SEQ ID NO: 23324 - protein, 1248 aa, unidentified
  REGION 1..1248: note = Cas Enzyme sequence
MKRILGLDMGSASIGWAIIEEDGNVIKIIALGSRIIPYNGTEGQDFVKGAGETRDALRTKNRTARKGYDRYQLRRKYLVDVLVKNDMMPDESLKCLSKMQLWELRNKAVTEYVSKQELGRILLWLNQKRGYKSSRSEANLDKKDTEYVAAVKCRYEMIKEKNLTIGQCLYNELCSNEYFRIKENVFPREAYIEEFDKICEKQKKHLGLTDELIARIRNEIIYYQRPLKSQKGLVAVCDFEGFYEKTDGKERFVGPKVAPKSSPLFQLAKIWESVNNIKLSTISGENVELTLEEKKKIIHHLDNNGKLTSIELFKILHKNKKDFIVPRQLEKGIQGNIVKVAIIKILGEKYSELLKFDLTVIEEIGRCGYLYDKKTGEVLNEKTLKCVDSKVEKEPYYQLWHTIYSINDVQECSNALQKGIIIAGKAKDGDEVRVKIDKETADKLAAIDFNKLGFGNKSAKAIRKILPYLMEGDKYSEAMSYAGYDHSVSWTRDENLRRGLLDKLKPIAKNSLRQPIVEKILNQMVNLVNAIIEKYGKPDEIRIELARELKQSKDERNAADLKMSKRQRENEIIASRLEEYGLRATKNNITKYRLYEEIENQGGKLNAICVYCGQPISRTEAILGREVDVEHIIPKSKLFDDSQSNKTLAHRRCNSFKNDMTAYDFMKTKPKQEFDAYVERVGRLYSKNMISRAKRDKLLMSEDEIPDNFIDRQLRESQYIAKKTREILQTVCCNVWATSGTVTAELRHLWGWDDITMNLQMHKYKELGLTETVVWESEHGKRKHSKEVIKGWTKRDDHRHHAIDALIIACTKQGFIQHFNTLNASKTREDMQSEIEKSSVEYKEKLTLLEKYIISQCPLSVEDVKNAVSQILVSFKSGKKVAVWGKRRVYKNGKREVVQDKIIVPRGALSEQFVYGRIRAVGKEKKMLKYLFNNSHLISNSHIKTLVEQRLNQYGNDIEKALASVKDNPIYLDADKTNMLEYGTCFEEKFVMKYNVDVNFTKTEKVVDEKIRNILQTRLQKFGGKSKEAFKDVQYEEKSLKWYEDEKLERPIHSVRCFTGLSAVVPIKKDEYGNEIGFVKPGNNHHIAIYVDKDGNKIEHVCTFWHAVERKKYGIPVIIKDTNDVWDKIWQQPDCTYPQSFLEQLPTVNLEMELSMQQNEMFVLEMAQEDVKVAIENNDYKTISEHLYRVNSLSSSDYYFYHHLETKKDIKNTDAKESKRYFRFKSVKALFLHNPVKVKIDCLGNIIQ

SEQ ID NO: 23325 - protein, 1186 aa, unidentified
  REGION 1..1186: note = Cas Enzyme sequence
VSLVAGVITKTRTSRKDENFMENGFTYRLGLDIGIASVGAAVVQTNSFDNPCHLTEPDVRTFPAAECRENGKYYGKSAAVPRRECRTTRRRIKRKQLRMNCIKQTLQKAGLIDVDEFMKRYSDGTLPNVYQLRYEGLDRLLIDDEFAQILIHIAKHRGFLSTRRADKKDKESGAILAATSANQKLMMEKGYRTVGEMMYLDESFHTPCSSNEQGFIVTPRNKAKDYKHTIYRSMLVDEVHALFDAQRKFGNTKATETLESEYLEIMTRQRSYDLGPGLQADGTKSPFAMDGYKSNAGECTFYKEETRAAKGTYTAELSITLQKINNLKLVDRYGDGRFLTDEEKQKILEYISKHKTMKYKTVKTLLGIDPMIRFNLLNYGKKKKTKKESDDKTKDDSTKKKSTKKSKTKAETSEKAGKDANKEETELERINRIEDTVFVSMEFTLSYTDCLKARIKTLSETEKRDLFDEVGELLTSYKTDAARIEKLSNLGLTPEEVDRLLDLNPKGYAKLSHKAMKEIEPYLKQGLTYDKACAAAGLDFQVTYTGEKMKYLKGPEINRIINNIQSPVVRRSVAQTVRVINAIIRKYGSPQAVNVELSREMSKSFLERKKAETAMELRHKENVKFCEEIKKLGINSPNGEDITRYRLWRDQNGICLYSGEKIPARAMFSKEYEIDHIIPYSISLDDRYQNKVLVKAGENWKKGNHLPYEYFGHDKTRWAAYENRVESLIKSDGKKAHLLKKNYTKEDQREFTERNLNDTRYATTVVYNMIMQYLYLEPYNCDGKTKQVYAVNGAVTAYLRKRWGLNKKDRTNDRHHAMDAVVIACCTDEMIAKVTKYMQDRETAYSKNFRITDEETGEILTRSNFTREQYDEAYGVRFPVPWETFREEIDLRIFNDDPFGYLMKDRNLQIKIDYPDWMYGEEESPVAKGKYINYIRPMFVSVACSHKATGRAHEETIRSAKYHDSDSLVISKKALKDLKLNKDNEIKDYYNKECDPLLYEALRNRLLEYGGDGKKAFAEEFHKPKADGTDGPVVKSVKVIEKKTTGVQINHGLAGNGNMVRVDLYQKEGKYYAVPIYISDMVKKEIPRKAATGGKQYKDWRVMDPDDFLFSVYPRDLLHLKKGKPFKDGLSNDIYMYFAGLDPASASFAVTAHDSSISLRGIGIQNLELIEKCQVDMLGDIHVCKR

SEQ ID NO: 23326 - protein, 1509 aa, unidentified
  REGION 1..1509: note = Cas Enzyme sequence
MKTILGLDLGTNSVGWAVINSVIKEQAERIWIEMAGSRIIPMDAAVLGDFDKGNSISQTSERTRLRGARRLRERQLLRRERLHKVLNILGFLPNHYLEYIDFEKHPGKFLADAEPKLAWVKDEQGKYTFLFQAAFDEMLADFAIHQPSLVSGDKKIPYDWTIYYLRKKALTEMISKEELAWILLNFNQKRGYYQLRGEEEEDNAGKSVEFYALKVLTVEATDEKKGRDVWYNVHLENGWIYRRSSSVPLDWEGQVKEFIVTTDLNPDGTPKLDKYGEVKRSFRAPNEDDWMLIKKRTEADIANTHKTVGAYIYDTLLQKPQQKIIGKLVKTVERKLYRDELSLILQKQCAFHAELQDRALYARCVEALYPSNEVRRKNIANRDFVYLLMDDILFYQRPLKTKKSLIANCPYEENEYVDRETGEIKKTPLKCIAKSHPLFQEFRLWNFLSNIRIYQKEKEINGTLHLDVDVTAEFLKTEDDYVALFDWLNSRKEIEQKTFLKYPKFGLKKEISNYRWNYVEDKQYPCNETRHAILSRLEKANVCIDFLSNEKEVALWHILYSVSDKQEIEKALRTFAAKNGLDESFVEAFKKFPPFKSEYGAYSAKAIKKMLPLMRCGKYWDVSSIDDTTKERIKKIVTGEYDERISVKVRDKVMNLSDISCFRRLPLWLACYIVYNRHSEDKEAVKWESPADIDAYLASFKQHSLRNPIVEQVITETLRVVRDIWKQVGRIDEIHIELGREMKNPADKRKRMTAQILENENANLRIKALLAEFMNPEYEIENVRPYSPSQQEILRIYEDTVLHAEDQLPEEIDAILKKFNSSKVPTKSEFLRYKLWLEQKYRSPYTGELIPLGKLFTAAYEIEHVIPQSRYFDDSFSNKVICESAVNKLKDNQLGYEFIKNHHGQKVEVGFGKSVEIFSVDSYERFVKEQYAKSAVKMKKLLMDDIPEQFIERQLNDSRYISKVIKGLLSNIVREKNDSGEYEPEAVSKNIVVCTGSVTDRLKRDWGMNDVWNSIVYPRFERLNSLTDTQSFGHWENKSGKKVFQTELPLEYQKGFSKKRIDHRHHAMDAIVIACATRNHVNYLSNESASRNAKISRYDLQRLLCDKNRTDDNGNYKWVIKKPWDTFTQDAREVLSKIVVSLKQNLRIINKTTNVYRHFDATVNRVYEKQKTGDSWAIRKPMHKDTVFGAVNLRKVKVVRLSVALDTPAMIVDKRVKNKVFELLSYKYDKKRIEKYFKENAFLWKELDLAKVAVYYFTEATTEPLVAVRKPLDSTFNEKKIKESVTDTGIQKILLNHLCTKEGKPDLAFSAEGIEEMNRNLLQLNNGKSHQPIYKVRVYEPRGNKFSVGVLGNKGTKWVEAAKGTNLFFAIYITEDGKRTYETIPLNVVIEREKQGLVPVPDRNEKGDKLLFWLSPNDLVYLPTEEEREFGRINEPIDRGRIYKMVSCTGNEGHFIPANVANPIVPVIELGSNNKAQRAWTNEMIKDICIPIKVDRLGHIIEVKYRIDE

SEQ ID NO: 23327 - protein, 1149 aa, unidentified
  REGION 1..1149: note = Cas Enzyme sequence
MILGLDLGTTSIGWAVVSEDDQTFRLDSLGSRIIPLTTDDANEFLSGNAISKNAKRTQRRTQRKGYSRYQQRRALLQQFLQQHAMLPDESLKGLNKLSLWGLRTRAVSEQLSLPELGRVLYHLNQKRGYKATKADYDADGDKKQGEYVKAVMGRHRMITERGITIGQLFFEKLSEDPSYRIKEQVFPRRAYEEEFDRIVACQRQFYPTLFTEENIDTLRNRIIYYQRGLKSCKHLVSLCDFEKRAYLNAAGKTVFNGPKVAPKSSPLAQVCKIWESVNNLTLKNRRGETLEIAPEERRALFEHLNTHDKLTLTDLYRILGIRKTDGWWAGKAIGKGLQGNTTRNALRKALAGQYDELLRFNLTTVETNHVDAETGEIIQMVSEAYLDEPLYRLWHAVYSIPDQEDLSKTLQKQFGITDPEVVENLFAIDFVKAGYASKSAKAMRRILPYLELGLKYAESCEAAGFRHSESLTVQELESKSLLPKLKPIEKNELRQPVVEKILNQMVNVVNALMDKYGHFDEVRVELARELKQSRDERNETTKRIDKNEQKNRAVAKRIATDYQLTPTRNRIRKYKLWEESGHVCIYCKSVINASEFLQGIDSEKEHIIPRSLFFDDSFSNLACSCRQCNAAKGNRTAYDFMQQKSEAEFADYLDRVEKLYKKKKISKTKYERLLTPESKIPTDFIDRQLRESQYIARKAREILSGVCRQVTATSGSVTDFLRRTWGWDRVLHDLNFDRYRAAGLTEIKDREHNGRHWQEEEICNWNKRLDHRHHAIDALVIACTKQGYIQRLNTLSQWKDVSFAPTEAQGEVYQTKRSKLEKYIVAQPHFSVQEVQQAVRSVLVSFKAGKKVASTGKRYSYRQGKRVLMQHVLIPRGALHKDSVYGVVNRYAKNRRGETVIEQKSVLRYPLASIERNQINSIVDSGMRKLVQQRFDRHPGSGKDVLKDLQNDPLLFNGVPVKSVRRMPRLDASSLIHLHRGGYVVPGNNHHVAIYRDRAGKLYEHCVTFWQAFDRKRYGLPVVIIHPEEVWNSLPEGVPDTVMEQLPLPEYSFVVSLQQNEMFVIGMAPELFEEAMRNQDYALLGQYLYRVQYISSNDYCFRLHVETGTERGESDGLAKKFYRFKSLKAFFAANPTKVRISLLGEISKV

SEQ ID NO: 23328 - protein, 1506 aa, unidentified
  REGION 1..1506: note = Cas Enzyme sequence
MKKILGLDLGTNSIGWAVINSSVDDEGKEKLTSISSCGSRIIPMDAATLGDFDKGNAKSSVAERTRLRGIRRLLERSLLRRERLHRVLSVMGFLPEHYASQLDRYGKFLPETEPKLAWYKDNTGSYRFLFQDSFNEMLEDFRLYHPELVAEGKKIPYDWTIYYLRKKALSQKIAKEELAWILLNFNQKRGYYQLRGEEEQEDNKKSVEYYALKVVAVEDSGERKGKDIWYNVKLENGWIYRRASSIPLDWTGKVKEFVVTTDLDDAGNPKKDKDGNVKRSFRAPKEDDWGLLKTKTQTQIDESGQTVGAYIYDSLLRMPDQKIRGKLVRTIERKYYKDELRKILLKQTEFHAALKDHNLLLSCIEELYPNNEAHRRLLSTSNFTCFLLEDILFYQRPLKSQKGLIDDCPYESHVYKKDGSLHRTPLKCISKSHPLFQEFRLWHFLSFLRIYQRERMIDGSLKLDVDVTNEFLQNEDDYVKLFDWLNGRKEIDQKTILAYKPFGLKKNEQPKYRWNYVEDKSYPCNETRADMISRLSKAGVSEGFLTEEREEALWHILYSISDKKELTKALGTFAEKNGLNEAFVELFSKMPPFESNYAAYSLKAIRKLLALMRMGKYWNEQDIDKQTRSRIEKILTGEYDETIRTRVREKAIHLTDISSFRGLPLWLACYVVYNRHSEAKELVKWETPADIDHFLSKFRQHSLRNPIVEQVIMETLRTVRDIWKQEGQIDEIHVELGREMKNPAKERARITAQVLENENTNLRIKALLTEFMNPEFEIENVRPYSPGQQEILRIYEEGVLSGVAEKDLPEDIISILKKFRENDVKKRPTTSEVLRYKLWLEQRYRSPYTGRIIPLGKLFTPAYEIEHVIPQSRYFDDSISNKVICESAVNKLKDNCLGYEFIKKHSGEIVELGNGEKATVFTSEEYEHFVKESYLGNGKKMKKLLLEDIPDNFIERQLNDSRYISKVVKSLLSNIVCEEGEQEGMSKNVIVCTGGVTDRLKKDWGVQDVWNRIILPRFLRLNKMTDSTGFTSVSTNGHLLPALPLHLQKGFNKKRIDHRHHAMDAIVIACADRNIVNYLNNASARKGSEISRYDLQHLLCDKVKTDSNGNYKWMLRKPWDTFTQDVYTALTNIVVSFKQNLRVINRTTNYHQHYNESGEKKMIPQVKGDRWAIRKPMHQDTVYGEVNLRREKTLPLKDVLNNPSIVVDKSLKSKLHELLKAQYDLKAITKYFEAHQDVWADINLKKIKVYYFTKETNERFFATRKSLDSSFNQKKIQEEVTDTGIQRILLRHLQLNDNNPDIAFSPDGIERMNQNMNILNDGKGHQPIYKVRTYEKAEKFAVGEHGNKVKKFVEAAKGTNLFFAVYESIQEDEATGKQVRKRTFATIPLNEVIKRKKQGLSVAPEDSNGNLPIFVLSPNDLVYLPTEEERNRGKVTQPLDRERIYKMVSCTGNRLFLVPYMVASPIYDKKEYTSLNKIELTDDKISIKEWCIPILIDRLGNISINY

SEQ ID NO: 23329 - protein, 1550 aa, unidentified
  REGION 1..1550: note = Cas Enzyme sequence
MKNILGLDLGSNSIGWAIVKALKNEDGKEILQSIDLAGSRIIPMDQATLGNFENGNSVSQTRERTGYRSARRLRERYLLRRERLLRVLNCMGFLPEHYSQNIDKYGKFFLDNEVKLSWKKDKMGKNEFIFLDSFNEMLEDFRHSQPQLLLDGRKVPYDWTIYYLRKKALTEKISKEELAWILLNFNQKRGYFQLRGEDEEVQGKKIEFYALKVVRVEDTGEKKGKDTWYNVYLESGLGDTDDYWVYRRASSVPIDEWEGQVKEFIVTTTLDNNGSPQIDKEGKVKRSFSIPKPEDWMLVKKKTEVDIKSSGKTVGTYIYDTLLQKPDQKIKGKLIRTIERENYTNELSLILENQKKFHLELQDRELYHQCIELLYYKNEAHKRVIGTWDFTSLFIKDILFYQRPLKSKKALIDNCPYEESFYIENGEKKSKPRKCIAKSHPLFQEFRIWQFISNLRIYQKVKEVDGKLQFNVDVTSDFLRDESAYVELFKWLNERAEVSQEDLLKHLGLKKTKTEDTVSLYRWNYVEDKKYPGNKTRSSILKKLLNDEKEALSEDIELKIWHLLYSVSAQSEIDKALSSKNVSTKGIYSELSVYFSDETIQKIKNVKLESGYGSYSAKAIGKLLPLMRRGKYWNLESIDNHTKERIEKILNGECDETIRARTREKSISLTDISQFKGLPLWLACYIVYDRHSELKTIKKWNSPEDIDKFLKEFKQHTLRNPIVEQVIMETLRVVRDIWRRVGSIDEIHIEMGRDMKQTAQERARRSAIISRNENDNLRIKALLHEFMNPELGIENVRPYSPAQQEILRIYEDGVLSSVSEIEDEIKNILKKFNESEEGKRPTKNEIIRYKCWLEQKYRSPYTGEIIPLGKLFTPAYQIEHIIPQARFFDDSFTNKVICEAEVNAKKGDLLGYEFVKEKGGEIVELSGGRNVRIFSVEEYEAFVKEHYKSNKQKMQRLLAEDIPTEFSHRQLNDSRYISKYIRNLLSNIVREDDEQESVSKNVISCNGAITDRLKKDWGVNDVWNHIILPRFVRLEEIRADNGEKFTTFNQEGHRIPSMPLMYQKGFNKKRIDHRHHVMDAIVIACTTRDHVNLLNNECSNPQNNVNKHQLSRKLRRYENVSYKQDGKLKEREVPKEFLKPWEGFTRDVEFALKNVIVSFRQNLRVLNKTVNYFQHWKDNSSEKEWKEQKSADHWSIRKPLHKETVSGEVFLWRTRFVSLREALTNPKRIVEKDLRSKILELQRKGYDIERIKKYFEDNKDVWQDVNLSKIEVRYYSREIVDPQTELPKNRYFATRFGNDLISLFSGVSNFENAKKIIKSITDTGIQQILFRHLENKGNDPVLAFSPEGIDEMNRTIKTLNNGKDHKPIYKVRIYECSTMKFPLGSVGNKSKKFVEAAKGTNLYFAVYEKEVENDRGECHKERAFKTIPLNDVIRNLKQGLSIAPNDENGNPPAFILSPNDLVYLPTKEESETGSISQPLDRNRIYKMISCTGNEAHFIPAFIATPVLKKIEFGINNKAQKAWTGEMIKESCIPIKVDRLGILISINGRAV

SEQ ID NO: 23330 - protein, 1297 aa, unidentified
  REGION 1..1297: note = Cas Enzyme sequence
MINKKRGYKSSRKAKGAENGTLIDGMEVAKKMYDEGITPGELCLQLLTAGKRYFPDFYRSDLQAEFDRIWNFQKQFYPDSLIDKVKDEVRGKNKSQTWAILAKYFVWKEVENSWNEEEAQTRRVEKEYRLVGIKRGVKREELKLENFQWRVKALSERMNPEELAIVLQEINEQISNSSGYLGAISDRSKELYFNRQTVGQYQMAVLDNNPNIGLRNMVFYRQDYLDEFNTIWEKQAEFHKELTEDLKKEIRDIVIFYQRRLKSQKGLINICEFERRQIEVEIDGKKKIKTIGSRVIPRSSPLFQEFKIWQTLNDIEVSVLGVKNKRKKQDDNSTTLLDSAENIDSLKLNVSRPLDADEKSLLAKELFIRDKLTKSDVLKLLFNNPQNLNLNFKNIDGNRTGSALYQAFSKILEISGHESINFKKSADEIVEQVKTIFSALGWNTEVLCFDSEKELDKQPYFKLWHLLYSFEGDSTPTGDGNLIQKIADLCGFEKDYASILANITFQEDYGSLSTKTIRKILPHLKDGNQYDVACEYAGYKHSKSSLKKEEIKNKVLKDKLELLPKNSLRNPVVEKILNQMVNVINAIITTYGKPDEIRIELARELKKNAKEREELTKSIVDTTKTHEGIRAILQNDFGMSHVSRNAIIRYKLYEELKDNGYKTLYSNTYIPKEKLFSKDFDIEHIIPQARLFDDSFSNKTLEVKSINIEKGSKTAYDFVEEKYGEQGLQEYLNRCEVLFRDKKTKLRKLKMQESEIPEGFIDRDLRNTQYIAKKALSMLNEICRRVVATTGAITDELREDWQLVDVMKELNWEKYKVLGLVEYFEDNDGRLIGRIKDWTKRNDHRHHAMDALTVAFTKDVFIQYFNNKNASLKPDTNEAAIRNKYFQNGKAIPPMSLDEFRAEAKKHLNDTLISIKTKNKVVTINLNRTKKKNGINKKQQQTPRGQLHLETVYGSHKQYVVKEEKVNASFDAAKIATVNKPAYRDALLRRLQENGNDSKKAFTGKNSLDKQPVWLDAKQNECVPEKVKTVMLETVYTVRKPIDEKLNVDKVVDARIRKLLQDRIKEYGNAKSAFANLDENPIWLNKEKGITIKRVSVSGISKAQSLHEKKDKDGNFILDKDSRRIPVDFVNTGNNHHVAIYRKPVLDKKGQAVFDENGELKFELEEVVVSFFDAVTRVNLSQPIIDKDYKRSEGWKFLFSMKQNEYFVFPNEKTGFDPKEIDLLNPENYALISPNLFRVQKIASKDYVFRHHLETVVADRKELQEITWKRISSLSILNRIIKVRVNHIGQIVMIGEY

SEQ ID NO: 23331 - protein, 1506 aa, unidentified
  REGION 1..1506: note = Cas Enzyme sequence
MKKILGLDLGTNSIGWAVINSSVDDEGKEKLTSISSCGSRIIPMDAATLGDFDKGNAKSSVAERTRLRGIRRLLERSLLRRERLHRVLSVMGFLPEHYASQLDRYGKFLPETEPKLAWYKDNTGSYRFLFQDSFNEMLEDFRLYHPELVAEGKKIPYDWTIYYLRKKALSQKIAKEELAWILLNFNQKRGYYQLRGEEEQEDNKKSVEYYALKVVAVEDSGERKGKDIWYNVKLENGWIYRRASSIPLDWTGKVKEFVVTTDLDDAGNPKKDKDGNVKRSFRAPKEDDWGLLKTKTQTQIDESGQTVGAYIYDSLLRMPDQKIRGKLVRTIERKYYKDELRKILLKQTEFHAALKDHNLLLSCIEELYPNNEAHRRLLSTSNFTCFLLEDILFYQRPLKSQKGLIDDCPYESHVYKKDGSLHRTPLKCISKSHPLFQEFRLWHFLSFLRIYQRERMIDGSLKLDVDVTNEFLQNEDDYVKLFDWLNGRKEIDQKTILTYKPFGLKKNEQPKYRWNYVEDKSYPCNETRADMISRLGKAGVSEGFLTEEREEALWHILYSISDEKELTKALGTFAEKNGLNEAFVEQFSKMPPFESNYAAYSLKAIRKLLALMRMGKYWNEQDIDKQTRSRIEKILTGEYDETIRTRVREKAIHLTDISSFRGLPLWLACYVVYNRHSEAKELVKWETPADIDHFLSKFRQHSLRNPIVEQVIMETLRTVRDIWKQEGQIDEIHVELGREMKNPAKERARITAQVLENENTNLRIKALLTEFMNPEFEIENVRPYSPGQQEILRIYEEGVLSGVAEKDLPEDIISILKKFRENDVKKRPTTSEVLRYKLWLEQRYRSPYTGRIIPLGKLFTPAYEIEHVIPQSRYFDDSISNKVICESAVNKLKDNCLGYEFIKKHSGEIVELGNGEKATVFTSEEYEHFVKESYLGNGKKMKKLLLEDIPDNFIERQLNDSRYISKVVKSLLSNIVCEEGEQEGMSKNVIVCTGGVTDRLKKDRGVQDVWNRIILPRFLRLNKMTDSTGFTSVSTNGHLLPALPLHLQKGFNKKRIDHRHHAMDAIVIACADRNIVNYLNNASARKGSEISRYDLQHLLCDKVKTDSNGNYKWMLRKPWDTFTQDVYTALTNIVVSFKQNLRVINRTTNYHQHYNESGEKKMIPQVKGDRWAIRKPMHKDTVYGEVNLRREKTLPLKDVLNNPSIVVDKSLKSKLHELLKAQYDLKAITKYFEAHQDVWADINLKKIKVYYFTKETNERFFATRKSLDSSFNQKKIQEEVTDTGIQRILLRHLQLNDNNPDIAFSPDGIERMNQNMTILNDGKGHQPIYKVRTYEKAEKFAVGEHGNKVKKFVEAAKGTNLFFAVYESIQEDEATGKQVRKRTFATIPLNEVIKRKKQGLSVAPEDSNGNLPIFVLSPNDLVYLPTEEERNSGKVTQPLDRERIYKMVSCTEGECHFIPSCVASPILQTIELGSNNKAQRAWSGEMIKDICVPIKIDRLGNVSINY

SEQ ID NO: 23332 - protein, 1295 aa, unidentified
  REGION 1..1295: note = Cas Enzyme sequence
  REGION 1290..1293: note = misc_feature - Xaa can be any naturally occurring amino acid
MKTILGLDLGTNSVGWAVINSVIKEQAERIWIEMAGSRIIPMDAAVLGDFDKGNSISQTSERTRLRGARRLRERQLLRRERLHKVLNILGFLPNHYLEYIDFEKHPGKFLADAEPKLAWVKDEQGKYTFLFQAAFDEMLADFAIHQPSLVSGDKKIPYDWTIYYLRKKALTEMISKEELAWILLNFNQKRGYYQLRGEEKEDNAGKSVEFYALKVLTVEATDEKKGRDVWYNVHLENGWIYRRSSSVPLDWEGQVKEFIVTTDLNPDGTPKLDKYGEVKRSFRAPKEDDWMLIKKRTEADIANTHKTVGAYIYDTLLQKPQQKIIGKLVKTVERKLYRDELSLILQKQCAFHAELQDRALYARCVEALYPSNEVRRKNIANRDFVYLLMDDILFYQRPLKTKKSLIANCPYEENEYVDRETGEIKKAPLKCIAKSHPLFQEFRLWNFLSNIRIYQKEKEINGTLHLDVDVTAEFLKTEDDYVALFDWLNSRKEIEQKTFLKYPKFGLKKEISNYRWNYVEDKQYPCNETRHAILSSLEKANVCIDFLSNEKEVALWHILYSVSDKQEIEKALRTFAAKNGLDESFVEAFKKFPPFKSEYGAYSAKAIKKMLPLMRCGKYWDVSSIDDTTKERIKKIVTGEYDERISVKVRDKVMNLSDISCFRRLPLWLACYIVYNRHSEDKEAVKWESPADIDAYLASFKQHSLRNPIVEQVITETLRVVRDIWKQVGRIDEIHIELGREMKNPADKRKRMTAQILENENANLRIKALLAEFMNPEYEIENVRPYSPSQQEILRIYEDTVLHAEDQLPEEIDAILKKFNSSKVPTKSEFLRYKLWLEQKYRSPYTGELIPLGKLFTAAYEIEHVIPQSRYFDDSFSNKVICESAVNKLKDNQLGYEFIKNHHGQKVEVGFGKSVEIFSVDSYERFVKEQYAKSAVKMKKLLMDDIPEQFIERQLNDSRYISKVIKGLLSNIVREKNDSGEYEPEAVSKNIVVCTGSVTDRLKRDWGMNDVWNSIVYPRFERLNSLTDTQSFGHWENKSGKKVFQTELPLEYQKGFSKKRIDHRHHAMDAIVIACATRNHVNYLSNESASRNAKISRYDLQRLLCDKNRTDDNGNYKWVIKKPWDTFTQDAREVLSKIVVSLKQNLRIINKTTNVYRHFDATVNRVYQKQKTGDSWAIRKPMHKDTVFGAVNLRKVKVVRLSVALDTPAMIVDKRVKNKVFELLSYKYDKKRIEKYFKENAFLWKELDLAKVAVYYFTEATTEPLVAVRKPLDSTFNEKKIKESVTDTGXXXXYF

SEQ ID NO: 23333 - protein, 1512 aa, unidentified
  REGION 1..1512: note = Cas Enzyme sequence
MKKILGLDLGTNSIGWAVVCHSDTDGQTERKWIEMAGSRIIPMDAAILGDFDKGNSKSQTSERTGFRGIRRLRERVLLRRERLHKVLKLIGFLPQHYIDSLDFSNHSGKFQLGTEVKLPWRKNEIGKYEFLFQNSFNEMLADFAKKQPELVAMGRKVPYDWTIYYLRKKALSEKITKEELAWILLNFNQKRGYYQLRGEEEEEKKNRLEDFYALKVVEVEQTDDKKGKDIWYNVHLENGWIYRRSSNVPLDWKDKIKEFIVTTELNEDGTPKVDKDGCVKRSFRMPKEDDWKLLKKKTEADIERSHKTIGCYIYDTLLQSPQQKIKGKLVRTIERKFYKDELRLILDKQQAFHPELQDRELYKACLDVLYPMNVAHKNNVANRGFVYLFMEDILFYQRPLKSKKSLIDNCPYEENQYIDVTTGEIKKAPIKCIAKSHPLYQEFRLWQFIANIRIYQKEKKVDGKLLTDIDVTTEYLSSKDDYVALYEWLCVRKEIEQKTFLKYPAFGLKKEIENYRWNYIEGKSYPCNETRSLILHYLEKAGISSTFLSTKIEESLWHILYSVEDRIELETALRTFASKYQLSCNFVEVFKKFPPFKKEYGAYSAKAIKRLLPLMRMGKYWKVDAIDGNTAERIEKILSGECDEKILNKVREKTIHLSETSDFQGLPLWLACYVVYNRHSEVKEVAKWKSPEDIDIYLKSFKQHSLRNPIVEQVITETLRVVRDIWKRVEQIDEIHVELGREMKNPSEKRRQMTERMLENENANIRIKALLTEFMNPEYEMENVRPYSPSQQEILRIYEDTVLNGAGDIPEDIEIILKKFKENDIKKRPGKSDFLRYKLWLEQQYRSPYTGEIIPLGKLFTTAYEIEHVIPQSRYFDDSFSNKVICESEVNKLKDNMLGYEFIKKHAGEIVELGFGKSVKIFSVEAYERFVGENYYKAGSKKSKLLMDDIPEKFIERQLNDSRYISRVVKGLLSNVVREEDANGEYESEAISKNVIVCSGSVTDRLKKDWGVNDVWNNIVYSRFERLNRLTESQQFGHWENREGKRFFQTELPLEYQKGFSKKRIDHRHHAMDAIIIACATRNHVNYLSNESASKHARIARYDLQRMLCDKSKADGGGNYKWIIRKPWATFTQDVYRTLLDIIVSFKQNLRVINKMTNYYQAYDDAGKKVFKKQKKGDSWAIRKSMHKDTVFGQVNLRKIKEVRLSVALESPEKIVDKKIKEKVLQLFAYQYDKKKIEKYFKENASLWKEVNLAKIPVYYFTDESSELLVAVRKNLDTGFTEKKIRESVTDTGIQKILLNHLSNKGDKPELAFSPDGIDEMNRNLVILNGGKPHQPIYKVRVCEPLGNKFKVGTNGNKSAKYVEAAKGTNLFFAIYVTDDGKRTYETIPLNVVIEREKLGWLPVPEKNDKGGNLLFWLSPNDLVYLPTEEELMNGIISDSIDRNRIYKMVSCTGNEGHFIPENISNPIIPTLELGSNNKAQRAWTDEMIKETCIPIKVDRLGQITEIINKIR

SEQ ID NO: 23334 - protein, 1506 aa, unidentified
  REGION 1..1506: note = Cas Enzyme sequence
MKKILGLDLGTNSIGWAVINSSVDDEGKEKLTSISSCGSRIIPMDAATLGDFDKGNAKSSVAERTRLRGIRRLLERSLLRRERLHRVLSVMGFLPEHYASQLDRYGKFLPETEPKLAWYKDNTGSYRFLFQDSFNEMLEDFRLYHPELVAEGKKIPYDWTIYYLRKKALSQKIAKEELAWILLNFNQKRGYYQLRGEEEQEDNKKSVEYYALKVVAVEDSGERKGKDIWYNVKLENGWIYRRASSIPLDWTGKVKEFVVTTDLDDAGNPKKDKDGNVKRSFRAPKEDDWGLLKTKTQTQIDESGQTVGAYIYDSLLRMPDQKIRGKLVRTIERKYYKDELRKILLKQTEFHAALKDHNLLLSCIEELYPNNEAHRRLLSTSNFTCFLLEDILFYQRPLKSQKGLIDDCPYESHVYKKDGSLHRTPLKCISKSHPLFQEFRLWHFLSFLRIYQRERMIDGSLKLDVDVTNEFLQNEDDYVKLFDWLNGRKEIDQKTILAYKPFGLKKNEQPKYRWNYVEDKSYPCNETRADMISRLSKAGVSEGFLTEEREEALWHILYSISDKKELTKALGTFAEKNGLNEAFVELFSKMPPFESNYAAYSLKAIRKLLALMRMGKYWNEQDIDKQTRSRIEKILTGEYDETIRTRVREKAIHLTDISSFRGLPLWLACYVVYNRHSEAKELVKWETPADIDHFLSKFRQHSLRNPIVEQVIMETLRTVRDIWKQEGQIDEIHVELGREMKNPAKERARITAQVLENENTNLRIKALLTEFMNPEFEIENVRPYSPGQQEILRIYEEGVLSGVAEKDLPEDIISILKKFRENDVKKRPTTSEVLRYKLWLEQRYRSPYTGRIIPLGKLFTPAYEIEHVIPQSRYFDDSISNKVICESAVNKLKDNCLGYEFIKKHSGEIVELGNGEKATVFTSEEYEHFVKESYLGNGKKMKKLLLEDIPDNFIERQLNDSRYISKVVKSLLSNIVCEEGEQEGMSKNVIVCTGGVTDRLKKDWGVQDVWNRIILPRFLRLNKMTDSTGFTSVSTNGHLLPALPLHLQKGFNKKRIDHRHHAMDAIVIACADRNIVNYLNNASARKGSEISRYDLQHLLCDKVKTDSNGNYKWMLRKPWDTFTQDVYTALTNIVVSFKQNLRVINRTTNYHQHYNESGEKKMIPQVKGDRWAIRKPMHKDTVYGEVNLRREKTLPLKDVLNNPSIVVDKSLKSKLHELLKAQYDLKAITKYFEAHQDVWADINLKKIKVYYFTKETNERFFATRKSLDSSFNQKKIQEEVTDTGIQRILLRHLQLNDNNPDIAFSPDGIERMNQNMNILNDGKGHQPIYKVRTYEKAEKFAVGEHGNKVKKFVEAAKGTNLFFAVYESIQEDEATGKQVRKRTFATIPLNEVIKRKKQGLSVAPEDSNGNLPIFVLSPNDLVYLPTEEERNRGKVTQPLDRERIYKMVSCTGNRLFLVPYMVASPIYDKKEYTSLNKIELTDDKISIKEWCIPILIDRLGNISINY

SEQ ID NO: 23335 - protein, 1504 aa, unidentified
  REGION 1..1504: note = Cas Enzyme sequence
MKNILGLDLGTNSIGWAVVNGSINDNGSEQLVKIQASGSRIIPMDAAMIGDFNKGNSISQTAERTRLRGIRRLSERYLLRRERLHRILDILGFLPSHFAQDLDRHGKIVKGKEPKLAWLKNEAGQFEFIFQDSFKEMLEDFKLNHPNLITDDKKVPYDWTIYYLRKKGLTSKISKEELAWILLNFNQKRGYYQLRGEEEEENNNKLVEFYALKVVAVEDSGEKKGKDIWYNVHLENGWVYRRTSNMPLDWVGKTKEFIVTTDLEKDGTPKKDKEGNVKRSFRAPKEDDWLLVKKKTEADIDQTHKTVGTYIYDTLLGNPSQKIRGRLVRTIERKYYKEELKQILDKQKEFHPELQDRALYAACVEELYTINEAHRNNIGNRDFTYLFLEDILFYQRPLKSKKSLIDNCPYEENHCLDKETGEIKSFPVKCIAKSHPLFQEFRLWQFIVNLRIYRKGLAQDVDVTNELLKTEEDYVALFDWLNGKKEIDQKAFLKYPLFGLKKEVENYRWNYVQDKPYPCNETRSSMLARLEKCDISIEFLTKENEEALWHILYSVEDKNEIVKALQKFADKHDLNASFVDVFRKFPPFKKEYGSYSAKAIKKLLPLMRMGKYWSENSIDKGTRERIDKIITGEYDEKIENRVREKAIHLADVSDFRGLPLWLVCYIVYGRHSEAKEITQWKSPADIDSYLKSFKQHSLRNPIVEQIIIETLRVVRDIWKQVGNIDEIHVELGCEMKNPADKRKKMTQQMSENENTNLRIKYLLTEFLNPEYEVENVRPYSPSQQDILRIYEEGVLNSVSDLPEEISDILKKFTETDLKKRPSRSEVLRYKLWLEQKYRSPYTGEVIPLGKLFTSAYEIEHVIPQSCYFDDSFSNKVICEAEVNKLKSNLLGHEFIVKHHGEIVELPFGKKVRIFTVDEYEQFVKDNYSRTRGKMKKLLMDDIPEEFVTRQLNDSRYISKVVKSLLSNIVREKGEEEAISKNIIPCTGGVTDRLKKDWGINEVWNKIILPRFQRLNELTGTNKFTTKNVGIQEIPTMPLELQKGFNKKRIDHRHHAMDAIIIACANRNIINYLNNESATAKAELSRYDLQKLLCDKAKTDNNGNYKWVIRKPWASFTQDTYLALENIIVSFKQNLRVINKATNHFLHYNEEGKKIFVKQGKGDNWAIRKSMHKDTVFGKVNLRRIKTVALNEAMKNPQSIVVKDFKRKLLELWNLGFDAKRIKKYFEDNRETWSDINLSKIEVYYFSKDTKDRFFATRKPLDTSFDRKKIENNITDTGIQKILLRHLELKDNNPDIAFSPDGIDEMNRNIIQLNNGKYHQPIIKVRWYEQADKFAVGQTGNKSSKFVEAAKGTNLFFAVYESNILDKKTNTIIKKRNYATIPLNVAIERQKQGLPVAPEDENGNDPIFVLSPNDLVYLPTAADLANGIIAQPLDRGRIYKMVSCTGNEGHFIPARIANPILQTIELGSNNKAQKAWTDEMIKEICMPIKVDRLGNVLESSSSHKK

SEQ ID NO: 23336 - protein, 1153 aa, unidentified
  REGION 1..1153: note = Cas Enzyme sequence
MKNILGLDLGSSSIGWAVIRENSEGQELVAMGSRVVSLTAAELSSFTQGNGVSINSQRTQKRTQRKGYDRYQLRRTLLRNKLDTLGMLPDDSLSHLPKLQLWGLRAKAVTQRIELNELGRVLLHLNQKRGYKSIKSDFSGDKKITDYVKTVKTRYDELKEMRLTIGELFFRRLTENAFFRCKEQVYPRQAYVEEFDCIMNCQRKFYPDILTDETIRCIRDEIIYYQRPLKSCKYLVSRCEFEKRFYLNAAGKKTEAGPKVSPRTSPLFQVCRLWESINNIVVKDRRNEIVFISAEQKVALFDFLNTHEKLKGSDLLKLLGLSKTYGYRLGEQFKTGIQGNKTRVEIERALGNYPDKEKLLRFNLQEVSSSVVDVETGEIIPTISPSFEQEPLYRLWHVLYSIDDREQLQSVLRQKFGIDDDEVLERLSAIDLVKAGFGNKSSKAIRRILPFLQLGMNYAEACEAAGYNHSNNYTKAENEARALLDRLPAIKKNELRQPVVEKIHNQMVNVVNALMEKYGRFDEIRVELARELKQSKEERSNTYKSINKNQRENEQIAKRIVEYGVPTRSRIQKYKMWEESKHCCIYCGQPVDVGDFLRGFDVEVEHIPKSLYFDDSFANKVCSCRSCNKEKNNRTAYDYMKSKGEKALSDYVERVNTMYTNNQISKTKLQNLLTPVDKISTNFIDRQLRESQYIARKAKEILTSICYNVTATSGSVTSFLRHVWGWDTVLHDLNFDRYKKVDLTEVIEVNHRGSVIRREQIKDWSKRLDHRHHAIDALTIACTKQAYIQRLNNLRAEEGPDFNKMSLERYIQSQPHFSVAQVREAVDRILVSFRAGKRAVTPGKRYIRKNRKRISVQSVLIPRGALSEESVYGVIHVWEKDEQGHVIQKQRAVMKYPITSINREMLDKGKVVDKRIHRILSDRLAQYNDNPKEAFAKPVYIDKECRIPIRTVRCFAKPAIKTLVPLKKDDKGNTVAWVNPGNNHHVAIYRDEDGKYKEQTVTFWEAVDRCRVGIPAIVTQPDTIWDNILQRNDISENVLESLPDVKWQFVLSLQQNEMFILEMKEEDYRYAMDQQDYALLNKHLYRVQKLSKGDYSFRYHTETSVEDKYDGKTNLKLSTQIGKLKRVQSLEALFNLHPHKVHISVLGEIKEIS

SEQ ID NO: 23337 - protein, 1512 aa, unidentified
  REGION 1..1512: note = Cas Enzyme sequence
MTKQILGLDIGTNSIGWAVVRGQGDDAQPLQEIVAAGSRVIPVDAGVLGDFERGVSSKSKAAERTAFRQVRRMIERSHLRRQRLLRVLQVMDYLPPHYARCLDRYGKFLPHTEPKIAWSETADGHYEFLFRDAFDEMMAAFRQRNPEWVARGGKVPYDWTLYYLRTKALSQPVSPYELAWILLSFNQKRGYRQARGEQQEDDSRKLEEYKSLKVLSVEDTGEKKGDQTWYRVLLEDGSEYKRLSRNPLPWEGQVRDFIVTTTLDAQGNPKTEKDGRVKRTYRSPKADDWTLLKKKTEAQIAQAHQTVGAYIFEALLHNPSQKIRGKLVHTIDRKLYYDELKAILQAQQPYHAALTDSAVLERCVRTLYQKNEAHARQALCHDLTAFLLDDVLFYQRPLKSQKALIANCSFESLTYYDRQTGEEKQAPVKCIPKSHPLYAEYRLWQFLDNLRIYQLEGEVDGKKCFDIDVTRQFLPDHEAYARLFDWLYHRENVSWKDLPKYPPFGLTRTTADLYRWNYAQDKSYPCHETWAHMLQCLKKAGLSPDFLTPEREEALWHILYSVSDMQELGRALHTFAHKNELTDDEAERFAKFFGKMEPFAHDYGACSAKALKKLLPLMRRGSYWSEEALAPGVRERIGQLLAGTDDAALPAKAREALKALHAVSDYQGLSLWLASYVVYNRHAEAKDIVRWETPADIDRFLLNFRPNELRNPIVELVVRETLRVVRDIWTRYGSFDEIHVELGREMKMPAQQRQKLSERMLENERTNLRIKMMLACFQHPEFGVDDVRPYSPYQQEILKIYEEYVLRDVKDIPDDIAAILRKFGESTAAKQPSAKEVLRYRLWLDQKYTSPYTGQIIPLGRLFTRDYEIEHIIPQKRYFDDSLSNKVICESAVNKLKSAQLAHEFISQHHGEVVELGNGRTARILELEDYERLVKDNYSHVRLSHKRRNLLLDEVPEAFIARQLNDTRYISKYVSMLLSNIVRGEDERSVNSTHLIATNGSITTRLKQDWGINDVWNAIVMPRFERLNGMVQTGDRMENVYVKLNTQGHLIPNVPLDRQRGFSMKRIDHRHHAMDAIVIACASRNMVNYLNNESARKGAKVTRMDLQHLLCTKTRADANGNYRWVMNKPWPTFTTDVRHALEDIVACFKQNRQVVAPAINYFDHYDPATGKKRRKKQTQGEMQAVRKPLHKATLYGEINLRSIKEVSLKQALEQPQRMVNKDLRHKLQALQAEGLNLKQMTAYFAEHHDEWADVNVKKILIYVYSKEEGKARYFASRAALDQSFTRKIIEHNVADTGIQKILLRHLAHYENAELAFSPEGIEEMNRHLTELNGGKPHQPIYKVRKYEQANKYAVGQRNCKAAQFVEAAKGTNLYFAIYEAESEPHKRSGITIPLREAVSRLKKGLPAAPETNADGEKLKFVLSPLDLVYVPTSEDLAQGKVQLPLDKKRIYKMVSCTGTECHFLPVNVASPIVRKFEFFSLDKMASALTGEVIKNVCLPLDVDRLGNVHLRQ

SEQ ID NO: 23338 - protein, 1402 aa, unidentified
  REGION 1..1402: note = Cas Enzyme sequence
MLQYKNILMKRILGLDLGTNSIGWALVKEKENDNEQSSIKRLGVREIYLTTDEQSNFEKGKSITTNADRTLKRSMRRNLQRYKLRRDSLISVLKDEGFITADTLLNENGNRTTFETYRLRARAAAEEISLEELSRVLLMINKKRGYKSSRKAKADDESGQLIDGMEVAKKLYDDNLTPGQYVASLLRNRKNNIPDFYRSDLVAEFDKIWSFQRQFYPDVLTDSLKEELKGKGDKETWAICSKPFAIVGIKRNTKGWEQKKEDYAWRAESLQHKIDLERLAIVLQKVNGQIRNSSGYLGAISDRSKELFFNKLTVGQYQMAELDKNPNFSLKNQVFYRQDYLDEFERIWETQSKFHKELTPELKHLIRDIIIFYQRPLKSQKGLISLCELESREIEIERDGKKTKKTIGPRVCPKSSPMYQEFRIWQTINNLQVSGMVVADGQVDLFGETVGKKFGKRFLEQEEKEILFKELNFKSKLTKKEILKLLFENYKELDLNYNEVKGNTTMAALLEACSKIIEMSGHGEYDFSKMSADEVESIVFPIFNGLGFNTDIFSFDSSVEGKAFDKQPSYMFWHLLYSYEGDKSKTGNESLISKISECYGFDKEYAAVIAGIRLEPDYGNLSVRAMHKILPYMKDGLGYSDACQYAGYRHSKRSLTKEEIEARPLKDKIDLLPRNSLRNPVVEKILNQMINVVNAVVDAYGRPDEIRVEMARELKKTKAQREETVKTIRKTTAENEKYKKELEEEFGLKNVSRNDIIKYRLYLELKDNGFKTFYSNTYIPREKLFSKEFDIEHIIPQAKLFDDSFSNKTIEARNVNIEKADSTAYDYVQDKYGDEGLKKFKEKINQLYGKNIISKTKLKRLLTTEKDIPDGFINRDLNNTQYIARKACEILEEITRRVVPTTGSVTSRLREDWQLVDMMKELNWDKYDKLGLTEIIEDKDGRRIRHIKDWTKRNDQRHHAMDALTIAFTKPAFIQYLNNLNARSDKGGSIYAIERKELYRDNKGKLRFYPPMPLDEFRAEAKRHLENILVSIKAKNKVVTRNVNITKAKKAEKGKRKKIQLTPRGQLHNETIYGRIKQYATKEEKVNASFTEDKTITVACKRYREALLVRLRQHDGDAKKAFTGKNSLAKTPLYTDSLHTETVPEKVKTVMLAPLYTKREAVSPDLKIEKVIDIGIKRLLQKRLEQYGGDMQKAFSNLDENPIWLNEEKGISIKRVTISSVSNAEALHDKRDNRGQLILDKDGNKQPTDFVQTSGNHHVAIFRDADGNLQEHMVSFYEATARAIQHLPIINKEYNKDLGWQFLFTMKQNEYFVFPNEETGFNPKEIDLLNPKNYALISPNLFRVQKLSSKDYFFRHHLETKIEDNKNLLNITWKRIKSLGKIKDIVKVRINHIGKIVEIGEY

SEQ ID NO: 23339 - protein, 1550 aa, unidentified
  REGION 1..1550: note = Cas Enzyme sequence
MKNILGLDLGSNSIGWAIVKALKNEDGKEILQSIDLAGSRIIPMDQATLGNFENGNSVSQTRERTGYRSARRLRERYLLRRERLLRVLNCMGFLPEHYSQNIDKYGKFFLDNEVKLSWKKDKMGKNEFIFLDSFNEMLEDFRHSQPQLLLDGRKVPYDWTIYYLRKKALTEKISKEELAWILLNFNQKRGYFQLRGEDEEVQGKKIEFYALKVVRVEDTGEKKGKDTWYNVYLESGLGDTDDYWVYRRASSVPIDEWEGQVKEFIVTTTLDNNGSPQIDKEGKVKRSFSIPKPEDWMLVKKKTEVDIKSSGKTVGTYIYDTLLQKPDQKIKGKLIRTIERENYTNELSLILENQKKFHLELQDRELYHQCIELLYYKNEAHKRVIGTWDFTSLFIKDILFYQRPLKSKKALIDNCPYEESFYIENGEKKSKPRKCIAKSHPLFQEFRIWQFISNLRIYQKVKEVDGKLQFNVDVTSDFLRDESAYVELFKWLNERAEVSQEDLLKHLGLKKTKTEDTVSLYRWNYVEDKKYPGNKTRSSILKKLLNDEKEALSEDIELKIWHLLYSVSAQSEIDKALSSKNVSTKGIYSGLSIYFSDETIQKIKNVKLESGYGSYSAKAIGKLLPLMRRGKYWNLESIDNHTKERIEKILNGECDETIRARTREKSISLTDISQFKGLPLWLACYIVYDRHSELKTIKKWNGPEDIDKFLKEFKQHTLRNPIVEQVIMETLRVVRDIWRRVGSIDEIHIEMGRDMKQTAQERARRSAIISRNENNNLRIKALLHEFMNPELGIENVRPYSPAQQEILRIYEDGVLSSVSEIEDEIKNILKKFNESEEGKRPTKNEIIRYKCWLEQKYRSPYTGEIIPLGKLFTPAYQIEHIIPQARFFDDSFTNKVICEAEVNAKKGDLLGYEFVKEKGGEIVELSGGRNVRIFSVEEYEAFVKEHYKSNKQKMQRLLAEDIPTEFSHRQLNDSRYISKYIRNLLSNIVREDDEQESVSKNVISCNGAITDRLKKDWGVNDVWNHIILPRFVRLEEIRADNGEKFTAFNQEGHRIPSMPLIHQKGFNKKRIDHRHHAMDAIVIACTTRDHVNLLNNECSNPQNNVNKHQLSRKLRRYENVSYKQDGKLKEREVPKEFLKPWEEFTRDVEFALKNVIVSFRQNLRVLNKTVNYFQHWKDNSSEKEWKEQKSADHWSIRKPLHKETVSGEVFLWRTRFVSLREALTNPKRIVEKDLRSKILELQRKGYDIERIKKYFEDNKDVWQDVNLSKIEVRYYSREIVDPQTELPKNRYFATRFGKDLISLFSGVSNFENAKKIIKSITDTGIQQILFRHLENKGNDPVLAFSPEGIDEMNRTIKTLNNGKDHKPIYKVRIYECSTMKFPLGSVGNKSKKFVEAAKGTNLYFAVYEKEVENDRGECHKERAFKTIPLNDVIRNLKQGLSIAPNDENGNPPAFILSPNDLVYLPTKEESETGSISQPLDRNRIYKMISCTGNEAHFIPAFIATPVLKKIEFGINNKAQKAWTGEMIKESCIPIKVDRLGILISINGRAV

SEQ ID NO: 23340 - protein, 1244 aa, unidentified
  REGION 1..1244: note = Cas Enzyme sequence
MKVLGLDLGTASIGWAVIDTNVENPNDIQLLGNGSRIIQYDNNEASDFSAGKGETPCTQRTFRRTARKCLDRYQQRRDKLRAFLVETGMIKPDEKFPPLNPLETWKLRSDAATPGTKLSTSEIARVLLHINQRRGYRHAKSDMSDSKQTEYVARVNNRFAEIKNLNQTVGQFFYTKLKASECTTVRGKKHYTYRIKEEVFPRNAYAEEFDSIISAQGEFYPQLLTTENVAELRNLIFYQRPLKSCKHLVSYCDFEKRVFKNSAGKEVDGGPKVTPKSSPLAQVCRIYEVINNIRLVNSRLKRRKAAVAPSLFDDIENLPLDYRKQQPEFILNEEEKQRIFNYLNTNERLTETKLLELIGLKRVDGFKSDMSLAKGIAGNKTYCSIAKALANLPNGENLLRFDLKITEKLDKTSGALEPVIDLAYLNEPLFLLWHTLYSISNKEELFNCLGAKFGINDPETLERLYALDFVKEGYANKSAKFIRRILPYLMQGYGYSDACAMCGVNHSNYITKEENSERELKPRLERLNKGELRQPLVEKILNQTINLSNAILDRFGEIDEVRVELARELKQNKEHRAETTIRINKQERENLMLANMISELNISPTRRRIQKMRMLRETDNKCIYCGAVVTPSQFIEGHGYEVEHIIPRSRLFDDSFTNKVCSCRECNAAKGNLTGYDFMKTQSEEKFNEYLDRIEQLCKDNKISKGKLKRLKMSASEIPSDFIERDLRQSQYIAKKAIEILSASFRNVYASSGAVTSFFRHVWGYDDILHDLNLPKYQKAELVEDVEYTTHGQTHTAQRIKDWTKRKDHRHHAIDALVIALTRQGYIQRLNNLNASANKEFGKMNLEKWAAQQPHLSVSEVKKAVDNISVSFKAGKKLSTPGKRYVRRNGVRKCVQTGILVPRAALTKDYVYGQIKVQDGKKDLKYIFKNPEAIADDDIRTAVLERLATNDGNVSATLKQLKKKPLEVNGRTIEQADCFRREFVINYSVDSFKTQKDIDSIIDPAIRQKFRERFEQVGAKDFVKSIAENPICSDAEGKCAIRNVRCFTGLKPDSLACVRKDASGKEIGFSQTQNNHHLAFYRLPDGKIIESVVSFWNGILRKRYGVPVFVHDPAAVWDRIAEMNENNDIRAIAESLPPRNSEFLMSLQRNEMLVLGMSDDEWNDAISAHDIAAINKHLYRVWKLGSKDYNFKFHTDTTAQIKEGDKEMKMFYRIRSIQALLALNPRKVSVSILGEIDLENLTKS

SEQ ID NO: 23341 - protein, 1510 aa, unidentified
  REGION 1..1510: note = Cas Enzyme sequence
  REGION 1420..1422: note = misc_feature - Xaa can be any naturally occurring amino acid
MKKILGLDLGTNSIGWAVVCHSDTDGQTERKWIEMAGSRIIPMDAAILGDFDKGNSKSQTSERTGFRGIRRLRERVLLRRERLHKVLKLIGFLPQHYIDSLDFSNHSGKFQLGTEVKLPWRKNEIGKYEFLFQNSFNEMLADFAKKQPELVAMGRKVPYDWTIYYLRKKALSEKITKEELAWILLNFNQKRGYYQLRGEEEEEKKNRLEDFYALKVVEVEQTDDKKGKDIWYNVHLENGWIYRRSSNVPLDWKDKIKEFIVTTELNEDGTPKVDKDGCVKRSFRMPKEDDWKLLKKKTEADIERSHKTIGCYIYDTLLQSPQQKIKGKLVRTIERKFYKDELKLILDKQQAFHPELQDRELYKACLDVLYPMNVAHKNNVANRGFVYLFMEDILFYQRPLKSKKSLIDNCPYEENQYIDVTTGEIKKAPIKCIAKSHSLYQEFRLWQFIANIRIYQKEKKVDGKLLTDIDVTTEYLSSKDDYVALYEWLCVRKEIEQKTFLKYPAFGLKKEIENYRWNYVEGKSYPCNETRSLILHYLEKAGISSTFLSTKIEESLWHILYSVEDRIELETALRTFASKYQLSCNFVEVFKKFPPFKKEYGAYSAKAIKRLLPLMRMGKYWKVDAIDGNTAERIEKILSGECDEKILNKVREKTIHLSETSDFQGLPLWLACYVVYNRHSEGKEVAKWKSPEDIDIYLKSFKQHSLRNPIVEQVITETLRVVRDIWKRVEQIDEIHVELGREMKNPSEKRRQMTERMLENENANIRIKALLTEFMNPEYEMENVRPYSPSQQEILRIYEDTVLNGAGDIPEDIEIILKKFKENDIKKRPGKSDFLRYKLWLEQQYRSPYTGEIIPLGKLFTTAYEIEHVIPQSRYFDDSFSNKVICESEVNKLKDNMLGYEFIKKHAGEIVELGFGKSVKIFSVEAYERFVGENYYKAGSKKSKLLMDDIPEKFIERQLNDSRYISRVVKGLLSNVVREEDANGEYESEAISKNVIVCSGSVTDRLKKDWGVNDVWNNIVYSRFERLNRLTESQQFGHWENREGKRFFQTELPLEYQKGFSKKRIDHRHHAMDAIIIACATRNHVNYLSNESASKHARIARYDLQRMLCDKSKTDGGGNYKWIIQKPWTTFTQDVYRTLLDIIVSFKQNLRVINKMTNYYQSYDDGKKVFKKQKKGDSWAIRKSMHKDTVFGQVNLRKIKEVRLSVALESPEKIVDKKIKEKVLQLFAYQYDKKKIEKYFKENASLWKEVNLAKIPVYYFTDESSELLVAVRKNLDTGFTEKKIRESVTDTGIQKILLNHLSNKGDKPELAFSPDGIDEMNRSLVILNGGKPHQPIYKVRVCEPLGNKFKVGTNGNKAAKYVEAAKGTNLFFAIYETDAGKRTYETIPLNVVIEREKMGWLPVPEKNNKGEKLLFWLSPXXXLVYLPTEEELMSRILSDKLDRSRIYKIVSFTGNRLYAIPYNVSNMIWDKNEYTQLNKVESTDMKESIKEICMPINVDRLGHITEIIIK

SEQ ID NO: 23342 - protein, 1026 aa, unidentified
  REGION 1..1026: note = Cas Enzyme sequence
  REGION 1010..1022: note = misc_feature - Xaa can be any naturally occurring amino acid
MKKTLGLDLGTNSIGWAVINSNIDSEGKEKLVGISSCGSRIIPMDAATLGDFGKGNTKSPVAERTRLRGIRRLLERSLLRRERLHRVLSVMGFLPEHYASQLDRYGKFLPETEPKLAWYKDDSGRYQFLFQKSFHEMLEDFRQHQPELVAGEKKIPYDWTIYYLRKKALSQEITKEELAWILLNFNQKRGYYQLRGEEEQEENNKSVEYHALKVVSVEDSGERKGKDIWYNVTLENGWVYRRASNIPLDWTGKVKEFVVTTELDDAGNPKKNKEGVIKSSLSMLKEDDWGLLKTRTQAQIDESGKTVGTYIYESLLCMPNQKIRGKLVRTIERKYYKDELRQILVKQSEFHAALQDHNLLLSCIEELYPNNEAHRRLLSASSFIYFLIEDILFYQRPLKSQKGLIDNCPYESHIYKDKKDGSLHHVPLKCVSKSHPLFQEFRLWQFLSNLRIYQRERMTDGSLKLDVDVTREFLPSEEDYVKLFDWLNERKEISQKLLLAYRPFGLKKNEQANYRWNYVEDKSYPCNETRAEIKSRLSKAGVPEEFLTEEKEEALWHILYSISDKKELTKALGTFAAKNGLNESFVEVFAKIPPFESNYAAYSLKAIRKLLALMRMGKYWNEQAIDRQIRDRIEKILTGEYDETIRSRVREKAMLLTDISSFRGLPLWLACYIVYDRHSESKELVKWETPAGIDHFLSKFKQNSLRNPIVEQVITESLRTVRDIWKQEGKIDEIHVELGREMKNPAKERARITAQVQENENTNLRIKALLAEFMNPEFEIENVHPYSPGQQEILRIYEDGVLSGIAEKDLPDDITAILKKFRENDVKKRPTTSEVLRYKLWLEQRYRSPYTGRVIPLGKLFTPAYEIEHVIPQSRYFDDSISNKVICESAVNKLKDNCLGYEFIKKHSGEMVELGNGETVPVFSVEEYERFVKESYFGNSKKMKKLLLEDIPDSFIERQLNDSRYISRVVTSLLSNLVCEEGEQDGLSKNVIVCTGGITDRLKKDWGVQXXXXXXXXXXXXXVFYG

SEQ ID NO: 23343 - protein, 1393 aa, unidentified
  REGION 1..1393: note = Cas Enzyme sequence
MKKILGLDLGTTSIGWALVKEAEIEEEKSSIIKLGVRVNPLTVDEQSNFEKGKAITTNADRTLKRTARRNLQRYKLRRENLLSVLKENGFIADDSVLCEQGNRTTFETRLLRSKAATEKISLDELARVLIMINKKRGYKSSRKVNSGEEGSLIDGMAVARKLYDEHLTPGQYVYQLLCRGKKYIPDFYPSDLNAEFEAVWNCQKQFYADIFTDELREALRSKNEKQTWAICAEPLGLKGIKRNGSTADQRVENYRWRTEAISKQMPLEQVAVVLQKINSQIAGTSGYLGAISDRSKELYFNHQTVGQFQMKQLSDNPNISLKNQVFYRQDYLDEFERIWETQAKYHSQLTAELKHELRDIVIFYQRPLKSQKGLISYCEFESRQKEMVVDGKKKTITIGLRVCPKSSPLFQCFKIWQTINNLQVTGEVVPKAQLDLFGDTTECEHGTRTLTEEEKCDLYRELSIKESLSETEILKLLFGSKKGLSLNFRKVEGNRTMALFVRACQTVLAINGYNDYDFSKMSYDKAMPIITQVFEALGFNTSFLTFDPTLDGKDFERQAAYQLWHLLYSYSGDNSATGNEKLIERLCAILNMDRDSAAVFASITFEPDYGSLSAKAMRRILPHMMDGLEYSVACEYAGYRHSRRSLTKEEIAAKPLVETIPLLPRNSLRNPVVEKILNQMINVVNAVSDRYGKPDEIRIEMARELKKNAKEREQMTRDIARTNAENEKYRKALQEEFGIQNVSRNDIIRYRLYLELEANGFKTLYTQTYIPREKLFSKEFDIEHIIPQARLFDDSFSNKTLEARSANIEKGSTTAYDYVLTKYGEQGDNGSVKYKERIDSLYKEGVISKTKHDKLLMTTAEIPNGFINRDLRDTQYIARKAREILESAVRVVVPTTGAVTDRLREDWLLVDVMKELNWDKYDQLGLTETYKDPDGRQIRRIKDWTKRNDHRHHAMDALTIAFTRHSFIQYLNNLNARSDKAGSIYAIEKKELYRDNNNKLRFVPPMPLGEFRAEARRHLEDVFVSIKAKNKVVTRNVNITRGADGKKHRTVQLTPRCQLHNETIYGSRRRYVVKQEKVSSAFNEEKISTIGNPQIREALLRRLSEFGGDAKKAFTGKNSLEKNPIYLDDSHTKQVPQKVKTVTLEEVFTIRKPIDKDLNVEKVVDLRVRKLLQERLAEYGGDAKKAFANLDENPIWLNRERGIAIKRVTIYGVSNATALHDKRDMHGKKMLNSNGISIPVDFVSTSNNHHVAIFRDKDGNLQEHVVSFFEATERAQQQLPIVDYEYNKHLGWQFLFTMKRNEYFVFPNEKTGFDPNEVDLLDPKNAAEISKNLFRVQKLTTKDYFFRHHLETNVDTPKELSGITYARLSLKGIVGIVKVRVNHLGEIVAVGEY

SEQ ID NO: 23344 - protein, 1498 aa, unidentified
  REGION 1..1498: note = Cas Enzyme sequence
MNPKRILGLDLGPNSIGWATILETDNSKTIESAGSRIIPMDAAKLGDFEKGNPQSQTNERTTFRGTRRLRERHLLRRERMLKVLHLLKWLPEHFEQGIDFSNNGAKFLQDKEPKIAWQPTTDGRYEFFFKEAFREMLADFARMQPALVEEGKKIPYDWTLYFLRKKALTEKIRPTELAWLLLNFNQKRGYYELRGETEEKTDKLEEFYSLKVVKVEKSDEKSKGNPWYNIHLENGWIYRRQSAQPLDWEGKVRDFIVTTDLNPDGTPKLDKEGNVKRSFRAPNEDDWNLKKKKTENEISISGKAVGEYIYDTLLQNPKQKINGSLVSTIERKFYKEELRRILETQSRFHSQLNDSFIYEECLKLLYPSNEAFRKNISGKNLIYLFIDNILFYQRPLKSKKSLIANCEFESYSFVKDGKTLTVPIKCIAKSNPLYQEFRLWQFLSNLRILQRTKEVDGKLSVDVDVTGEFLPDNEAWANLFDILNDRKEIDQKTLLTAVGINKKKQAEYRWNYVEDKKYPCNETRHLLLSRWNKAGLDKAMLTQKLTMELWHILYSVEAKDESKKALSTFAHKNGLPENEFVEAFLSAAAFKKDYGAYSRKAIKRLLPLLRRGKYWSAENIDTATKTRIENNIDGVADDSINERTREKLTAFSDITQFQGLPVWLASYVAFNRHSESDQQTKWDSPDDIDTFLRNFRQHSLRNPIVEQVVTETLRTVRDIWRKYGQIDEIHIEMGRDIKQTAEERKRRSAIIQKNENTNIRIKMLLSEFFNEGNDVENVRPMSPIQQDKLRIYEEGVLNSVDGIQDNIETILKKFNESDPKKQPTKAEIRTYRQWLEQNYVSPYTGQPIPLSKLFSSEYQIEHIIPRSLYFDDSFSNKIICESAVNGRKSSMLAYNFIKECGGEIVQLGNGKSVRILKVEEYEQLVKRVFASNRKKQQNLLATDIPDDFSQRQLTDTRYISRFLLALLSNIVREKDEKGQYESTSTSKNVIPCNGSITDRLKKDWGVGDVWNRIIAPRFERLNGIYGDKQFGDTVTVDGKQFFRTQIPLELQRSVNKKRIDHRHHAMDAIVIACTSRQMVNYLNNSNAHDQDKRIDLRNAVCDKIKIDANSSHYLVKKPWPTFTEDMAYTLSQMLVSIKQNLRIVNRCSNRYQRYENGKKVTVRQTKGEMLAIRKPLHKDSVFGQVNLRFVKTVSLNVALENPSRIVDKQLKTLVRQLAAQQMSVKQIADYVKKQTDFDVKKVDIYIFSNETNTPLVAIRKPVDTSLTKEKILKSVTDTGIQKILLRHLEANDNKPEFAFSPEGVEEMNKNIVQLNNGRFHQPIYKVRIYEPKGLKFNIGTTGTKATKFVEAAKGTNLFFAVYLDSDGKRNYESVPLNIVVERLKQGMSPVPETNENGDRLLFHLSPNDFVYVPTEEELESGRVNMPIDNSRIYKMVSASGSQCFFVPYFIASPIVPTTELGANNKSERSWDNIMIKSVCIPITIDRLGQLSNASTLIR

SEQ ID NO: 23345 - protein, 1433 aa, unidentified
  REGION 1..1433: note = Cas Enzyme sequence
MKKILGLDLGCNSIGWALVNEAENTEEISSIIKLGVRVNPLTVDEMQNFEKGKSITTNADRTLKRSMRRNLQRYKLRRDTLIEVLKEHGFITDSTLLSEHGNKTTFETYRLRAKAAVEEVSLEEFTRVLLMINKKRGYKSSRKTKGSEDGVLIDGMDVARKLYEEGLTPGELCLQMLDAGKKNLPDFYRSDLQNEFDRIWNFQKQFNPELFCDTVKEEVRGKNRSQTWAILAKFFVWSEKESVWNEKEARTEERVKEYKLVGLKRDTKGNELKLENYRWRVQSLSEQLNPEIVAIVLQELNGQISASSGYLGAISDRSKQLYFNRQTVGQYLMSELEKDPNVSLRNRVFYRQDYLDEFDRIWEKQAEFHEELTVELKKEIRDIIIFYQRRLKSQKGLISFCEFERREVAVEKDGRKQNKTVGCRVIPRSHPLFQEFKIWQTLNDIEVFARDKQSRHKKADKSSTLFDNTEDTLLVEGKRSLYQEEKELLAKELFVKESMKKAEVLKLLFENFQELDMNFKQIDGNHTGFALFSAYSKMIEKYGYEPVDFKKPADEIIEKLENIFTNLGWNAELLSIDLSKEDKELERQPYFRLWHLLYSFEGDNTPTGNSKLLEKIMQLCDVEKEYAVELANVSFQEDYGSLSAKAIKKILPYLKEGNQYDVACDYAGYRHSQSSLTKDEIENKILKDKLEILPKNSLRNPVVEKILNQMVNLINTIVDTYGKPDEIRVELARELKKNAKEREELTKSIARNTREHDEIRQLLRTEFGMMNVSRNDIIRYKLYEELKDNGYKTLYSNEYIPREKIFSKEIDIEHIIPQARLFDDSLSNKTLEYRAINIEKGNKTAYDFVKEKYGDDGLEKFLNRCETLFKDKRTKLRKLKMEEKDIPEGFIDRDLRNTQYISKKALAMLNEISRRVVATTGAITDKLREDWQLVDLMKELNLPKYEKLGMVEMFEDKDGRKIKKITDWTKRNDHRHHAMDALTVAFTKDVFIQFYNNKNAAWMPVSKEHANITGIKARYFENGKALAPMSLAQFRAEAKRHLENLLVSIKAKNKVITSNVNRTKKKNGENRKLQQTPRGQLHLETVYGSHRQYATKIEKVNAAFDAAKIATVSKLAYRNALLKRLEAFGNDPKKAFTGKNTLEKNPLYLDENQTEMVPEKVQTVEFETVYTIRKPIDPNLSIDKVIDVKIRSVLEKRLKEYGGDAKKAFVNLDENPIWLNEAKGISIKRVSIRGISNAQSLHEKKDKDGNLILDKEGRKIPVDFVNTGNNHHVAIYKKPVLDKVGQIVFDEEGNPKYELDEVVVSFFDAVTRANLGQPIIDKDYRRSEGWQFLFSMKQNEYFVFPNEKTGFNPKEVDLLNPENYVLISPNLFRVQKFTYKNYVFRHHLETTIKDTSSTLKGITWTDFRSSKGLDKIVKVRIDHIGQIVSLGEY

SEQ ID NO: 23346 - protein, 1509 aa, unidentified
  REGION 1..1509: note = Cas Enzyme sequence
MKNIVGLDLGTNSIGWAVVNGSVNDDGSEQLVKIQASGSRIIPMDAAMIGDFNKGNSISQTAERTRLRGVRRLSERYLLRRERLHRILDILGFLPFHFAQDLDRHGKIVKGKEPKLAWRKNEAGQFEFIFQDSFKEMLEDFKLNHPNLITDDKKVPYDWTIYYLRKKGLTSKISKEELAWILLNFNQKRGYYQLRGEEEKKNDNVMIINSKVIDVVKAEKDKKYEKYWYNVLLENGLLYRAAFYNDISFWKGHTKEFVLKTIKLKSGGTKQELSFLPSFDEIEKMEKKQKDKMYFKIKLKTEADIDQAHKTVGTYIYDTLLGNPSQKIRGRLVRTIERKYYKEELKLILDKQKEFHPELQDRALYAACVEELYTINEAHRNNIGNRDFTYLFLEDILFYQRPLKSKKSLIDNCPYEENQGLDKETGEIKSFPVKCIAKSHPLFQEFRLWQFIINLRIYRKDLAQDVDVTNELLKTEEDYVALFDWLNGKKEIDQKAFLKYPVFGLKKEIENYRWNYVQDKPYPCNETRLLMLARLEKCDISIEFLTKENEEALWHILYSVEDKNEIVKALQKFADKHDLNASFVDVFRKFPPFKKEYGSYSAKAIKKLLPLMRMGKYWSEDSIDKGTRKRMDKIITGEYDEKIENRVREKVIHLADVSDFRGLPLWLVCYIVYGRHSEAKEITQWKSPADIDSYLKSFKQHSLRNPIVEQIIIETLRVVRDIWKQVGNIDEIHVELGREMKNPADKRKKMTQQMSENENTNLRIKYLLTEFLNPEYEVENVRPYSPSQQDILRIYEEGVLNSVSDLPEEISDILKKFTETDLKKRPSRSEILRYKLWLEQKYRSPYTGEVIPLGKLFTPAYEIEHVIPQSCYFDDSFSNKVICEAEVNKLKSNLLGHEFIVKHHGEIVELPFGKKVRIFTVDEYEQFVKDNYSRTRGKMKKLLMDDIPEEFVARQLNDSRYISKVVKSLLSNIVREKGEEEAISKNVIPCTGGVTDRLKKDWGINEVWNKIILPRFQRLNELTGTNKFTTKNVGIQEIPTMPLELQKGFNKKRIDHRHHAMDAIIIACANRNIINYLNNESATAKAELSRYDLQKLLCDKAKTDNNGNYKWVIRKPWASFTQDTYLALENIIVSFKQNLRVINKATNRFLHYNEEGKKIFVKQGKGDNWAIRKSMHKDTVFGEVNLRRIKTVALNEAMKNPQSIVVKDFKRKLLELWNLGFDAKRIKKYFEDNRETWSDINLSKIEVYYFSKDTKDRFFATRKPLDTSFDRKKIENNITDTGIQKILLRHLELKDNNPDIAFSPDGIDEMNRNIIQLNNGKYHQPIIKVRWYEQADKFAVGQTGNKSSKFVEAAKGTNLFFAVYESNILDKKTNTIIKKRNYATIPLNVAIERQKQGLPVAPEDENGNDPIFVLSPNDLVYLPTDDELANGIIAQPLDRGRIYKMVSSSGEQCFFIKHIVANVLVDKFEFSPLNKMERALTGEMIKMICIPIKVDRLGNVLESSSSHKK

SEQ ID NO: 23347 - protein, 1498 aa, unidentified
  REGION 1..1498: note = Cas Enzyme sequence
MKHILGLDLGTNSIGWAVINAIKEENTQKEQLIGINTAGSRIIPMDAAQLGDFNKGNTVSQTANRTQFRGVRRLYERKKLRRERLHRILQLLGFLPKHYASQLDRYGKFIANSEPKLAWTTNTHEPSYFIFQSSFQEMLNDFLQNNNQVKKVPYDWTLFYLRKKALTQKIEKEELAWILLNFNQKRGYYQLREEETEKASSKTRQYFDSQIVTDITDTGQIYKGLKIFTITLENGEKGKFFSKNMPDWKGQKKDIIAIIDLDKNGNDKYDENGELSRRFKIPTEQEWEEQWELIKTKTQKDLDTSHKTVGAYIYDTLLQTPSQKIRGKLIRTIERKYYKDELNQILKKQEEFHPELRDSNLLEACIEELYPNNEAHRNAIAKYSISQLLIEDILFYQRPLKSKKSLISNCPYEEYTYTNKETGEICTSSLKCIAKSHPLFQEFRLWQFISNLRIYQKKGTINGKFTTDIDVTNQFLKTEDDYANLFDWLNQKKEIRQDTFLKKPAFGLKKNTANYRWNYVEDKTYPCNETHYKILSYWEKAGIEQSALTSEIEEKLWHILYSISDKNELRKALQHFADKNYLSDKFADTFQQIPPFEKDYGSYSAKAIKKLLPLMRIGRYWKAENFDSTTLDRIEKILTGEFEENIKNRTREKTIHLDNLYSFQGLPTWLACYIVYNRHSEIKDVTKWQQPSDIDAFLNAFKQHSLHNPIVEQIIMETLRTVRDIWKQTGHIDEIHVELGREMKNPAEKRRKLTQQIQENENTNLRIKALLTEFANPEFGIENVRPHSPSQQDLLRIYEEEVLNETKDIPEDIAVILKKFNEIDTKKRPSTSDVLRYKCWLEQKYRSPYTGAMIPLGKLFTPAYEIEHVIPQSRYFDDSFTNKVICEAEVNKLKGNMLGYEFIKNNQERIVELGFGQNVKIQTVEAYELFVKEHYSYNRTKMQKLLMEDIPDQFIERQLNDSRYISKLIKSLLSNIVRDEGEEEATSKNVIVCTGSITDRLKKDWGINDVWNKLILPRFIRLNEITESNRFTTTNACNKTIPAMPLDLQKGFNKKRIDHRHHAMDAIVIACANRNIVNYLNNESASKNAKISRQDLRQILCKKTKTDNLGNYQWLIDKPWDTFTQDMYSILSNIIVSFKQNLRIINKTTNHYIHYENGKKVNCSQKQSDSWAIRKPMHKETVYGEINLRRTTTATLKAALENPQRIIEKDLKKKIKELLTQGLNEKQIKKYFEDNKDIWQEINLKKIPVYYFTKETANRFFACRESINTTFNKKKIEEKVADTGIQQILLRHLEQNGNNPEQAFSPEGIEQMNKNIMSLNNGKFHQPIYKVRTYEQADKFAVGQTGNKSTKFVEAAKGTNLFFAIYETAHKRSFASIPLNVVIERLKKGLSPAPENEKGNLPKFILSPNDLVYVPTKEEIENGHINQPIQKDRIYKMVSCTGNQCFFIKSNVANTIIDKYEFSPLNKMERAITGEMIKETCIPIQTDRLGNIITPISL

SEQ ID NO: 23348 - protein, 1105 aa, unidentified
  REGION 1..1105: note = Cas Enzyme sequence
MNKEKVILGLDIGVGSIGWSLVKIREEEYSDEKPEGTIEKKHRIIGGEIIGTGVRTFQIPQDRQKKSLALIRGSARRSRWTTRRKAHRLKRLIQLVKEFKLIEDFDRDAIFKPKQGDNESNWDIWTIRKEALERKLTDVELFRVLYHIAKHRGFYFHTKAEEIQEEDKKSEAGRKKAKVKEGLWRIRSKLEKGHWKTVGQMFCEEYKQTGKENKRKRNAENKYGKSIHRSLLKEEIEKIFKEQQKMGNSKAKKELKNRYIDEILMKEEGIDDEKLQKMMKGCEFVPGAKCAPKESYTAERFTLFSRLNTLAMVDTKNKDKRLALDDEQRGKIQRLSYEKAKVTFAQIRSELGLQDDLGLRFNLCSYKEKDPEYNKKLICEIRKGRLRFGERHRVRIVDINTGEVKVLDEEIQSIFKSKELWPNSKNMRIYYSDIRKQLNLSGDFRFADLKGYTKSEAELGSKAKYIKQFEDDTFVEVKGYHKIKNAIERHCGDNRWAKLAEDENKLDIIAEALVYHKSDETRTKYLKENGVVDEDVINAILKINMKELANHSKEALSNVLKYMGSKDRMLFNDAKKKCGYGRADYDKQAILQPYSGFFENNPAVARVISQTRKLINAILRKYKDNHPIDQIHIELATELANSEKRKSQISEGQRRYKEAKEAATERCREFDLDPEEGQNLLMFRLAEEQRQLCPYSGKHITFKPSGASNEVYIQDCEIDHIIPMSRSFNDSLNNKVLCTQKANQDKRDRIPFEWFEDIYGKESEQWRDFENTVKKMYGMPYPKRKNLLKKSWTEKDKERFLSRNLNDTRYAARHIADYLRKYFDFSLSEREDIKEVSRVKVRSGNITAFLRYIWGLHKDREENDLHHALDALVVACSTDGHVYLVSNLSKEIERKGKNWFKHFNFLRDRFKPWSSIRDDIQEAVNNIFVSRMPRHTVTGAGHEETIISGEGRDKNRTIEVRGGYAKMGDMVRADVFVDEAGKNYVVPIYSVDIFSKKPLPDKYIEKADAPYDEWPSVKDDKLEFRFSLFKDDLISIDGQMYYIDHIRGTRPLIRVKNIDGSVFESNNKERELGYRNVRLKKYSVDILGRYKEVKQEKRLGGRFNR

SEQ ID NO: 23349 - protein, 1560 aa, unidentified
  REGION 1..1560: note = Cas Enzyme sequence
MKKILGLDLGTNSIGWALIENNFENKTGKIINAGSRIIPMPQDKLGDFEKGNSVSQTADRTKYRGVRRLNERNLLRRERLHRVLNILGFLPEHYAKCIDFNKKLGQFYENTEPKLVYFKNEKTNKNNFLFKNSFEEMLQDFKEHQAELVKDNKKIPYDWTIYYLRKKSLTKKIEKEELAWLLLNFNQKRGYYQLRGEDDDENKNKLVEFYSLLVTDVIDSGDKKGQHEIWYNVHLENGWIYRRPSKTFLDWKGKTKEFIVTTDIDEKGNVKKDKDGKEKRSFRAPQEDDWTLLKKKTEFDIEQSNKTVGCYIYDTLLINPNQKIKGKLVRTIERKFYKEELKLILEKQKEFHAELKNIDLYNECVEELYENNESHQKSIENKDFVHLFLNDIIFYQRSLKSKKSLISNCRYESRTFIKDGKKEIEPIKCIAKSHPLFQEFRLWQFIQNLKIYQREKLIDGKLQTDVNITNELLQTDEDYTELFEFLNDRKDIDQKALLRYFKLKFETHRWNYVDDAEKKYPCNKTRNVILNKLDKNTKAILTQENEIKIWHLLYSINTKEEIDIALKENEKREHKITKENEVRKFKKTSMLNFLKENKFSLNEIEEIKKVRITEKDYGSYSAKAIKKLLPLMRMGKFWNEDAIGVEVKNRINSITQRLNSIDFDYKKIDNISDDDIPKQVLKSFIDCKNPLKGLNTYQACYAVYGRHSEDSKSDKWKTPSDIERFLKEDFKQHSLHNPIVEQVITETLRVVKDIWNYYGNGEENFFDEIHIELGREMKNPADVRKQMTNKVTENENTNSRIKALLAEMLNCNDVENVRPYSPSQQEILKIYEECVLNVEDNFSEEDEDILKISKNAQPTKSELKRYKLWLEQKYRSPYTGEIIPLNKLFTPAYEIEHIIPQSLYFDDSFSNKVICESEVNKDKTNSTAYAYIKNNSGKKIELSYGKEATIFKLEAFEDFVKNNYSKNRGKMKKLLMEDIPDKMIERQLNDTRYISKYVKNLLSNVVREENEQETTSKNVLSSNGTITTILKQDWGLNDVWNEIITPRFERLNELTKSNSFGEWTNKEGKQVFQTQVPIELQKGFTKKRIDHRHHAMDALVIASASRNHINYLNNEFAKADKKDIRHDLRTILCFKKYNSENKDNYKWIFKKPWETYTQEAKEILFSTLISFKQNHRVINKTINLYQKWEKDDKGNLKKVIKKQEKGENWAIRKSLHTPMPYGKKLYDFDILKIYENVSKREFIIDEGIKAKVNEIFEQNGNKITTAQKYIKENPLKDEEGNIILVTAFRIETEKFRKRQPISKLSNRGQGGIKTTADAIKFINKVADFNLQQDLLKHLKENNNNIDNAFSPDGIDKFNSKRKIPVYKLPIAESGDKRFSLGNKIGSKHKWVEAAEGTNLFFAIYKDEKGNHNYESIPLNIVIERLKQKLSPVPESKFDEETKKEYTLLFYLSPNDFVYVPTIEERENPKLIDFSNLTKEQINRVYKMVSSSGNQCFFIKNEVAISIYNKFEYSALNKMEKSVEGIMIKDCCIPLKLDRLGNIIEAEGKKINTKEHTMILS

SEQ ID NO: 23350 - protein, 1438 aa, unidentified
  REGION 1..1438: note = Cas Enzyme sequence
MKRVLGLDLGTNSIGWAIVNEAENQQEKSAIIRLGVRVNPLTIDEQQNFEKGKSITTNADRTLKRSMRRNLQRYKLRRDNLIEILKKSNIISDDTILSENGPRSTFETYQLRAKAATEEITLEQFSRVLLMINKKRGYKSSRKSNSSEDGTLIDGMEVAKQLYNENLTPGELCLKLINEGKKNLPDFYNSDLQAEFNKIWQKQTTFYPGMLTTDLKDKLFGKNEKVTWTICKDQFKWEETERIWNNTESKNEDISVQKTLVGLKRNGNKQEQKIENFVWRSKALYEKLHPEEIAIVLSKINAQIYGSSGYLGLISDRSKELCFNKKYVIGYENLPPHKQTRPQTVGEYKMAVLANNPHASLRNMVFFRQDYLDEYNVLWETQAKFHKELNDDLKREIRDVIIFYQRRLKSQKGLISFCEFESKKEEIEIDGKKKIKTIGSRVIPRSSPLFQEFRIWQVLNNVEVSTKDRINKKRKDKASSLFEEQEDKLKIYGKRELYQEEKELLALELSLKEKLTKGEVLKLLFDKPQELDLNFAFIPGNTTQARLFEAYKNIVEQTGHNLNLKNQAFQIIQDVEKIFTGLGYNTQILHFDSSKPLDEQPMYKLWHLLYSYEGDDSTTGQEKLISQITHKYGFEKEFANEIAKIVFQDDYGSLSAKAIRKILPYLKEGNKYDVACLYAGYRHSASSLTKEEIEKKLFKDKLDVLPKNSLRNPVVEKILNQMVNVVNAIIDTYGKPDEIRIELARELKKSAKEREDLSKFIAETTKVHEEYRRILTKPLSEGGQFGLVYVNRNDIIRYKLYEELKDNGYKTLYSNTYISPGSLFSGDFDIEHIIPQSRLFDDSFSNKTLELRAINLEKGNKTAYDFIKEKYGEQGEDNSLENYLKRISVLYNKGVLSHVKYNKLIMQEAKIPEGFINRDLGDTRYITKYAKTMLGDLVKRVVTTTGSITDVLRNDWQLVDVMKELNWDKYDRLGLTYYETNNEGKQLKRIKNWTKRNDHRHHAMDALTVAFTKDAYVQYFNNKNASFNTSSNEYALKTKYFENNRAIPPIPLDEFRAQAKRHLKNTLVSIKAKNKVITQNVNTTQKYGGVNKKIQQTPRGQLHLETIFGSIRQYVTKDEKVGPSFDEDKIKTVSKQIYRTALWKRLQEYDNNPQNAFGGKNSPIKNPIYIDKEQTVTLPEKVKTVTYKTIYTIRKEISPDLSIEKVVDLKIRKILEDRLKEYENDPRKAFLNIEKKPIWLNKDKDISIKRVTISGITNAENLHEKRDKNGIFLLDNEGNKQPVDYVNTGNNHHVAVYRDSEGNIQENVVSFFEAVARRNLGLPIIDKAYKEKDGWQFLFSMKQNEYFVFPNELTGFFPNEVDLLNPDNYSLISPYLFRVQKISFKNYVFRHHLETSIKDTTSNTRNITWTDFRSSKGLDKIVKVRINHIGQIVSIGEY

SEQ ID NO: 23351 - protein, 1161 aa, unidentified
  REGION 1..1161: note = Cas Enzyme sequence
MKRILGLDLGSASIGWAIIEENSIEVYDETTINSSKDKIIALGSRIIPLSNDESSQFSKGQAITKNADRTAKRTQRKGYDRYQLRRKLLLEELSKLGMYNGTTLKLSKLDLWGTRAKAIHEKITLLELGRVLCHINQRRGYKTSKSDFGDKKTGEYVSQVVERYRELHEQGLFIGEYMYNKLMSDKAFRCKDRIYPRIAYIEEYDAIMSCQKLFYKDVLTDEIIAHIRDYIIFYQRPLKSCKHLVAKCELEIQNLRSKNVDIKYAPRVAPRTSPLFQVCKIWESINNLSVKNKSNDTLHLTIEQKLKIFDFMNTHEKLKASDLRNLTGEKSREWLFANAVGNGLQGNTTYCAINKALAGCPQRDDLMMFNLTIKEGNIDSETGEIRKLVDASFVEENFYQLWHALYSISNIDELRDVLIKKFSINDEKVLDALCQLDFVKAGYGNKSSRAIRRILPYLQEGMNYHDAKLAAGYNDVTLTKEENEKRQLVEKLQPIVKGALRQPVVEKILNQLVNLVNSLMAEYGHFDEIRVELARELKQSREERELTTHTISANQKENEAIAKRIKEEYGLTPTKSRIQKYKLWQETDHTCIYCGKIVDVKEFLYGFGVEVEHIIPRSVLFDDSFSNKVCACRACNKDKGNATAFDYMRNKSEGVFNAYLDRVNDLAQRKKNFKSKRNKLLTPASELPTDFINRQLRESQYIAKKAKEMLSTICHNVYATSGSITDFIRHMWGWDEVLHNLNFNRYREAGLTEYVERIIDGKPIKIERIIGWSKRVDHRHHAIDALTIACTKQSYIQRINNLNSLKEISFQSYADDKQDKITKQRLTKLQQYIKMQPHFTTADVELAVKGIAVSFKSGKRVASIGKRYVYSGGKRRCVQEGIVIPRGSLSEDSVYGRICDSESGQQEIVIKYKLGVIKLKDVDFIVDKYIREIVRERLKKFGDKPEKAFAEPLLDHQGNEIRSVRCRTGLSSTVPLRYNQQGKPIAFVKPANNHHVAIYEDENGKLHEHIVTFWHAVERKKYGMPIIITDVEVAWDSVTDNMPESFLKQLPLSTKWKFKFSMQQNEMFVVGMNEDLYQDAMEHQDYAMLSKYLYRVQKLSHNEYCFRHHIETTVDDKYNGVKNQMLSKTLKKLIIIQSMGALQHNNLHKVQISVTGKIKEV

SEQ ID NO: 23352 - protein, 1491 aa, unidentified
  REGION 1..1491: note = Cas Enzyme sequence
MKRILGLDLGTNSIGWSVLLAEIDENGNVQLQCIEAAGSRIIPMDAAMLGDFERGNSISQTAEKTRLRGIRRLLERCLLRRERLHRVLDILGFLPFHYSKALNRYGQIKEGEEPKLAWRKNEIGKNEFLFIDSFNEMLEDFRVIHPELVGKKVPYDWTIYYLRKKALIQKISKEELAWVLLNFNQKRGYYQLRGEEEDATSNKKVEYVALKVVTVEDSGEKKGKDIWYNVHLENGWIYRRTSSVPLDWVGKIKEFIVTTDMNDDGSPKKDKEGNVKRSFRSPKEDDWTLIKERTQADIEHTGKTVGAYIYDSILQNPSQKVRGRLVRTIERKFYKDELIKILNKQIEFHAELRDADLYKACIEELYQSNEAYRQNIANRNFTYLFVDDILFYQRPLKTKKSLIADCPYEEHVVVDKVTGEKKHYGIKCIAKSHPLYQEFRLWQFLSNLRIYKKELANDVDVTRDFLKTEENYVALFDWLNAKKEINQKDFFKYPAFGLKKNAENYRWNYVEDEKKRYPCNDTRAKILSYLTKAGIQSDFMTTEIEEKLWHILYSVDDKEELEKALRKFAVKYSLDESFVDVFKKFPPFEKEYGAYSAKAIKKLLPLMRMGRYWSESNIDSNTCERIDKIITGEYDERIKNRVREKAMNLTDISSFRGLPLWLACYVVYDRHSEAKGITKWETLDDLQKYLDSFKQHSLRNPVVEQVITETLRTVCDIWKQYGNIDEIHVELGREMKNPADKRKQMAQQISDNENVNLRIKALLMEFANPEFEIENVRPYSPSQQDILRIYEDGVLNSVDNIPEDIENVLKKFKESDTKKRPTRNEVFRYKLWLEQKYRSPYTGHPIPLAKLFTPAYEIEHIIPQSRYFDDSFSNKVICESEVNKLKDNLLGFEFIKKHRGEKVELPFGKVVTIFTEGEYEQFVKDHYSRNRAKMRKLMMDAIPEDFIARQLNDSRYIGKVVKGLLSNIVREEGEEEAMSKNVIVCTGGVTDRLKKDWGINDIWNRIILPRFQRLNEMTGTTQFTTRTTNGHEVPSMPLELQKGFNKKRIDHRHHAMDAIVIACANRNIVNYLNNESASNKSKISRYDLQVLLCDKVKTDDKGNYKWMIKKPWNTFTQDVYQVLSDIVVSFKQNLRVINKATNMYVRFEHGKKKLVKQEGTNWAIRKSMHKDTVHGEVNLRRIKRVKLNEAIKNPSRIVEKEFKGKLLSLLKQGYDEKKIRTYFEDNKDVWQDIDLSKISVYYFTKETKERFFATRMTLDASFDKKKIESITDTGIQAILLRHLEEKGNDSNFAFSPDGIDEMNRNIVRLNNGKYHQPIYKVRKYEKADKFAIGKKGNKSSKFVEAAKGTNLYFAVYETDTLNEDTGRVVKKRSYATIPLNVVMERLKQGLSPAPADEDGNEPKFVLSPNDLVYVSKVEDCVQMETTYIYKIVSFTGNRLYGIPYSVASSIVDKIEYSQLNKVEFTDDKTSIKEVCLPVKVDRLGNITKIGY

SEQ ID NO: 23353 - protein, 1432 aa, unidentified
  REGION 1..1432: note = Cas Enzyme sequence
MKRILGLDLGTNSIGWAVVNEAENNEEKSSIVRLGVRVNPLTVDELQNFEKGKSIETNTVRTQKRSMRRNLQRYKLRRDELIQILRNAEFISDDIILSENGNKTTFETYRLRARAVTSEISLSEFSRVLLMINKKRGYKSSRKAKGEEDGTLIDGMEIAKKLYEENLTPGELCLQLLVNGKKHLPDFYRSDLQNELDRIWNFQKHFYPLALRDEVKDEIRGKNKSQTWAILQKYFVWTDDIVHWDAERAQRGSSEKEFKLIGIKRSTKGFEQKIEDYQWRVMALSEQLGLEELAIVLQNINGEINSSSGYLGAISDRSKSLYFNRKTVGQYLMDSLDKNPNVSLKNIVFYRQDYLDEFEIIWEKQAEYHKEMTSELKKEIRDVIIFYQRRLKSQKGLISYCEFERKEKTIVNNGKERNITIGLRVIPRSSPLFQEFKIWQILNNVEVSIADNKLKRKNKQEKTLSLFEQQDEFELTGKRLLTQEEKDILAKELFVREKMTKAEVLKLLFENPHELDLNYKQIDGNRTGSQLYQAYSKILEMSGHEPIDFKKPIDEILEQTNAVFSSLGWNTNVLAYDSDKMPDEQDYYKLWHLLYSFEGDNTLTGDGNLKRKIASLCGLDLEYAPILSTVTFVDDYGNLSAKAIRKILPYLKEGVQYDVACTYAGYKHSASSLTKKEIANKQLKEKLDLLPKNSLRNPVVEKILNQMVNVINEIIETYGKPDEIRVELARELKKNQKEREELTKSIVASTKETEEIRKLLQTEFGMIHVSRNDIIRYRLYEELKENGYKTLYSDTYIPRDEIFSKKFDIEHIIPKARLFDDSFSNKTLEVRSINIEKGNKTAYDFVSEKYGEEGLQAYLNRCEVLFKNKKTKLRKLKMSENDIPSDFIDRDLRNTQYIAKKALAMLGEICRRVVATTGSITDKLREDWQLVDVMKELNWNKYSALGMVEYFEDKDGRRIGRIKEWTKRNDHRHHAMDALTVAFTKDVFIQYFNNKNASEKQNSNEFAIKNKYFSEGRAIAPIPLSVFRSEVKKQMDNILVSIKAKNKVVTNNINRSKKKGGVNQRIQQTPRGQLHLETVYGSHKEYVTKEEKVNAAFDEAKIMTVCKQSYRDALMKRLQEFGNDSKKAFTGKNSLEKNPIWLDKEHMKVVPIKVKTVNQVVVYTVRKPIDANLNVEKVVDRKIRRLLQERIVKYGNAKQAFSNLDEDPIWLNEAKGIQLKRVTIYGISNAQAIHEKKDKDGNFILDGKGNRIPVDFVNTGNNHHVAIYRKPILDKQGLPICDEQGNTLYELDEKVVSFYEAVARANEGLPIIDKGYRSSEGWQFLYTMKQNEYFVFPNEKTGFNPKEIDLMDPSNNALISPNLFRVQTMSKVQYGNSVVRDYKFRHHLETTVQDVKELKDITYRQYKSLGFVDGVVKVRVNHIGQIVSVGEY

SEQ ID NO: 23354 - protein, 1337 aa, unidentified
  REGION 1..1337: note = Cas Enzyme sequence
VAPEKKSRGECDVKKNGNNLNVDKYYIGLDVGTSSVGWAVTDENYNVLKFKGNAMWGVRLFDEAQDASARRSSRTARRRLARRNQRLLLLRLLFAEEINKLDSNFLVRMQESALHEDEKTVSKYTLFADKNFSDKDYHKKYPTIYHLRAELAESKEAHDPRLVYLALHHIIKHRGHFLYETSETGESFVTLASAFSDLCNYIEKEYDTILSVDDAEAFLATMERSDLGVTAKKKALREAMGVHGVQYEGLSVQAVCDMLAGATVSFSELFCDETLKGAEVKSFSLKNSIDDSFDILTEVLGERIELLLQMKNVYDAAKLSQILSGEGSISRAKILLYEKNRRDLRLLKAYVRKVSPEKYKLIFSQRKDKLANYAAYSRYCNASGDYACKQEDFCKFLRKELPAPSESDAEMLRIFREIQDGTFLSRLKDSDNGVIPYQLHKQELVKILDNASTYLSFLNDKDPDGLTVKEKIVKTFEFRVPYYVGPVNKAATHHWSVRFAGRENEKVYPWNFEQVVDTEASAAAFIETLIGICTYTGEKVLPKDSLLYSEYAMLNEMNLLRVNGKPVPKNVKDDILKHFFYDARRKVTKKQIRKYLLSENLITETDEISGIDDNIKSSLRSYHDFKAILDKTGDYDMVEAIIRSILVFGQDKMMLRRWLRKNTYGLDENDYRHICRLKYSDWGRLSETFLTGIYHSFEDGSSKNIMDMLRENSCNLMQLMSSEYQFVVKAEAHRNEKTGSNQSLSDKLDALYIAPAVRRSIRQTLRIVDEIVDIRKAAPAKIFIEMARGSREELKNKRTESRKAKLLALYKACGEESNILFSKLENEDDNSLRRDKLYLYYMQLGKCMYSGEPIDFESLVHGEKYDIDHIFPQSRIKDNSIDNRVLVKNTLNREKTNIYPISEDIRAKMLPTWAYMKKAGLISQKKYDRLVRSYPLTEKELSAFVARQLTETQQSTKALAELLKNEYANSRIVYSKAGNVSDFRHDYDMLKCRDVNDLHHAKDAYLNIVVGNVYCTKFTDRFFANIDREKYSLNKVFEYDTKGAWDKSESIKTVKKFMGKNNILVTRMPREVKGQLFDLQIVPAGKGQLPKKNDLPVDKYGGYNKLTGAYFCVVEYTDKKKRIRSLQPVYVYKKELYEKYPLRYCSEVLGLAEPVIITKKILMDAMLELDGKRLLVSGRTGNQLICKHTYQLFTDYSREKYIRNIVKYVERCSAKKVELPLTEHDGLSFETNADLYNFFIEKCEQRVYASLLKNMKEDMLTHRNVFEDMTMLEQCKLLLEILKAFKCNAQSPDFSLLCGKGTVAQIKLSMNISRTKSAHLINQSVTGLYETCIDLLH

SEQ ID NO: 23355 - protein, 1266 aa, unidentified
  REGION 1..1266: note = Cas Enzyme sequence
MKHILGLDLGTNSIGWAVISSSFDETTQKEQLKGIEAAGSRIIPMDAAQLGDFNKGNTVSQTANRTQFRGVRRLYERKKLRRERLHRILQLLGFLPKHYANQLDRYGKFIANSEPKLAWTTNTHGLPYFIFQSSFQEMLNDFLQNNSQIKKVPYDWTLFYLRKKALIQKIEKEELAWVLLNFNQKRGYYQLREEETEKASSKTRQYFDSQIVTDITDTGQVYKGLKIFTITLENGEKGKFFSKNMPDWKSQKKDIIAIIDLDKNGNDKYDENGELSRRFKIPTEQEWEEQWELIKTKTQKDLDTSHKTVGAYIYDTLLQTPSQKIRGKLIRTIERKYYKDELNQILKKQEEFHPELRDSNLLEACIEELYPNNEAHRNAIAKYSIAQLLIEDILFYQRPLKSKKSLISNCPYEEYTYINKETGEICTSPLKCIAKSHPLFQEFRLWQFISNLRIYQKEGTINGKFTTDIDVTSQFLKTEDAYANLFDWLNQKKEIRQDTFLKNPAFGLKKNTANYRWNYVEDKTYPCNETHYKILSYWEKAGIEQSALTSEIEEKLWHILYSISDKNELRKALQHFADKNYLSDKFADTFQQIPPFEKDYGSYSAKAIKKLLPLMRIGRYWKAENFDSTTLDRIEKILTGEFEENIKNRTREKTIHLDNLYSFQGLPTWLACYIVYNRHSEIKDVTKWQQPSDIDAFLNAFKQHSLHNPIVEQIIMETLRTVRDIWKQTGHIDEIHVELGREMKNPAEKRRKLTQQIQENENTNLRIKALLAEFANPELGIENVRPHSPSQQDLLRIYEEEALNETKDIPEDIAVILKKFNEVDTKKRPSTSDVLRYKCWLEQKYRSPYTGAMIPLGKLFTPAYEIEHVIPQSRYFDDSFTNKVICEAEVNKLKGNMLGYEFIKNNQERIVELGFGQNVKIQTVEAYELFVKEHYSYNRTKMQKLLMEDIPDQFIERQLNDSRYISKLIKSLLSNIVRDEGEEEATSKNVIVCTGSITDRLKKDWGINDVWNKLILPRFIRLNEITESNRFTTTNACNKTIPAMPLDLQKGFNKKRIDHRHHAMDAIVIACANRNIVNYLNNESASKNAKISRQDLRQILCKKTKTDNLGNYQWLIDKPWDTFTQDVYSILGNIIVSFKQNLRIINKTTNHYIHYENGKKVSCSQKQGDSWAIRKPMHKETVYGEINLRRTTTATLKAVLENPQRIIEKDLKKKIKELLTQGLNEKQIKKYFEDNKDIWQEINLKKIPVYYLPKKLPTDSLLAVNQ

SEQ ID NO: 23356 - protein, 1506 aa, unidentified
  REGION 1..1506: note = Cas Enzyme sequence
MKKILGLDLGTNSIGWAVINSSVDDEGKEKLTSISSCGSRIIPMDAATLGDFDKGNAKSSVAERTRLRGIRRLLERSLLRRERLHRVLSVMGFLPEHYASQLDRYGKFLPETEPKLAWYKDNTGSYRFLFQDSFNEMLEDFRLYHPELVAEGKKIPYDWTIYYLRKKALSQKIAKEELAWILLNFNQKRGYYQLRGEEEQEDNKKSVEYYALKVVAVEDSGERKGKDIWYNVKLENGWIYRRASSIPLDWTGKVKEFVVTTDLDDAGNPKKDKDGNVKRSFRAPKEDDWGLLKTKTQTQIDESGQTVGAYIFDSLLRMPDQKIRGKLVRTIERKYYKDELRKILLKQTEFHAALQDHNLLLSCIEELYPNNEAHRRLLSSSSFTCFLLEDILFYQRPLKSQKGLIDDCPYESHVYKKDGSLHRTPLKCISKSHPLFQEFRLWHFLSFLRIYQRERMIDGSLKLDVDVTNEFLQNEDDYVKLFDWLNGRKEIDQKTILAYKPFGLKKNEQPKYRWNYVEDKSYPCNETRADMISRLSKAGVSEGFLTEEREEALWHILYSISDKKELTKALGTFAEKNGLNEAFVELFSKMPPFESNYAAYSLKAIRKLLALMRMGKYWNEQDIDKQTRSRIEKILTGEYDETIRTRVREKAIHLTDISSFRGLPLWLACYVVYNRHSEAKELVKWETPADIDHFLSKFRQHSLRNPIVEQVIMETLRTVRDIWKQEGQIDEIHVELGREMKNPAKERARITAQVLENENTNLRIKALLTEFMNPEFEIENVRPYSPGQQEILRIYEEGVLSGVAEKDLPEDIISILKKFRENDVKKRPTTSEVLRYKLWLEQRYRSPYTGRIIPLGKLFTPAYEIEHVIPQSRYFDDSISNKVICESAVNKLKDNCLGYEFIKKHSGEIVELGNGEKATVFTSEEYEHFVKESYLGNGKKMKKLLLEDIPDNFIERQLNDSRYISKVVKSLLSNIVCEEGEQEGMSKNVIVCTGGVTDRLKKDWGVQDVWNRIILPRFLRLNKMTDSTGFTSVSTNGHLLPALPLHLQKGFNKKRIDHRHHAMDAIVIACADRNIVNYLNNASARKGSEISRYDLQHLLCDKVKTDSNGNYKWMLRKPWDTFTQDVYTALTNIVVSFKQNLRVINRTTNYHQHYNESGEKKMIPQVKGDRWAIRKPMHKDTVYGEVNLRREKTLPLKDVLNNPSIVVDKSLKSKLHELLKAQYDLKAITKYFEAHQDVWADINLKKIKVYYFTKETNERFFATRKSLDSSFNQKKIQEEVTDTGIQRILLRHLQLNDNNSDIAFSPDGIERMNQNMTILNDGKGHQPIYKVRTYEKAEKFAVGEHGNKVKKFVEAAKGTNLFFAVYESIQEDEATGKQVRKRTFATIPLNEVIKRKKQGLSVAPEDSNGNLPIFVLSPNDLVYLPTEEERNSGKVTQPLDRERIYKMVSCTGNRLFLVPYMVASPIYDKKEYTSLNKIELTDDKISIKERCIPILIDRLGNISINY

SEQ ID NO: 23357 - protein, 1390 aa, unidentified
  REGION 1..1390: note = Cas Enzyme sequence
MKKILGLDLGTTSIGWALVNEKENDNEQSSIIKLGVRVNPLSVDEQSNFEKGKAITTNADRTLKRSARRNLQRFKLRRENLLTLLKEHGFITDETVLCEQGNRTTFETRQLRARAVSEEITLEQLARVLLMINKKRGYKSSRKADSGEDGKLIDGMSVARQLYEQHLTPGQYVLNLLRNGKKYLPDFYPSDLTAELKAVWHAQQAYYPELLTQELFDALKNKNEKQTWAICAQPFGINGMKRNGTAAEQKAENYRWRSEALDKKIGLEELAIVLQKINGQIHGTSGYLGAISDRSKELYFNHQTVGQYQMQLLEKDPNTSLKNQVFYRQDYLDEFERIWETQATYHPELTAELKHEIRDIVIFYQRQLKSQKSLVGYCELESKPKEVVVDGKKKTITTGLRVCPKSSPLFQSFKIWQTLNNVQVSGNIIPEKQLDLFGTAATYKYGSRCLTEEEKQTLYKELSLKERMSAAEILKLLFKSGKGLSLNFREVDGNHTMAAFVKACQTIIVMSGHNEYDFAKLSYETVVSTINQIFNALGIKSGFLNFDPCLEGKAFEHQPAYQLWHLLYSYAGDNSATGNEKLITRIAETFGMEHNYAAVFAAITFMPDYGNLSAKAMRRILPYMMDGNEYSVACEYAGYRHSRRSLTKEELDKKPLVDTLPLLPRNSLRNPVVEKILNQMINVVNEVSAQYGKPDEIRIEMARELKKSAKEREQMTADITRATAQQEEYRRILQDEFGMPHVSRNDITRYRLWLELKDNGYKTLYSQTYIPREKLFSKEFDVEHIIPQARLFDDSFSNKTLEARQANLEKSNATAFDYVQSKYGEEGAKEYKERIDYLYADGVISKTKHDKLLMKEADIPEGFINRDLRDSQYIARKAREILESMVRVVVPTTGAVTDRLRDDWQLVDIMKELNWDKYNKLGLTETFKDHDGRQIKRIKDWTKRNDHRHHAMDALTIAFTQHSFIQYLNNLNARSNKSGSIYAIEQTYLYRDAHGKLRFMPPMPLDVFRAEARRQLQGILVSTKAKNKVVTRNINSIKRRGEKKQTVQLTPRCQLHNETVYGSMRCCVVKEEKISSSFTEEKIATVASPRYREALFKRLGEYGGNAKKAFTGRNSLEKNPLYLNDDHTLSVPAKVKTVTYETIFTQRKPIDKDLKVDKVIDEHVKEILEARLKEFGGDAKKAFSNLDENPIWLNRERGIQIKRVTIRGVSNTVALHDKHDVQGKTMCDSEGRRMPSDYVSTSSNHHVAIFRDANGNLQEHVVSYFEATARAIQHLPIVDRDYNKDEGWQFLFTMKRNEYFVFPNEKTGFDPKEIDLLDPKNYAVISANLFRVQKLATKNYFFRHHLETNVETPKELSGITYKSQLGLKGIAGIVKVRVNNIGQIVAVGEY

SEQ ID NO: 23358 - protein, 1470 aa, unidentified
  REGION 1..1470: note = Cas Enzyme sequence
MKKILGLDLGTNSIGWALVNEAENENEKSSIIMLGVRVNPLTVDEQKNFEKGKSITTNADRTMKRGKRRNLQRYKLRRENLIEILKENGFITDEPILSENGNYTTFETYRLRAKAVTEEITLEQFARVLLMINKKRGYKSNRKAKGAEEEGVLIDGMEVAKLLYEKDLTPGQYCLQLMEQGKKQLPEFYRSDLQEEFNRIWAKQQEFYPEILTDKLKENLREKSEKATWTICKEPFNIVGIPRTTKGEELKKENFAWRTKALSEKLDLESLAVVLQKINGQINNSSGYLGAISDRSKELYFNKQTVGQYQMAVLAQNPNASLKNMVFYRQDYLDEFNIIWEKQAEFHKKELTEELKKEIRDVIIFYQRRLKSQKGLIGFCEFESRQIEVEIDGKKKIKTVGSRVIPRSSPLFQEFKIWQTLNNLEVSGKGRKSKKKKEHSLSLFTNQEDPLLIYGKRELYQEEKELLATELSIKEKLTKSDILKLLFDNPQELDLNFKEVQGNLTQAKLFAAYRDIIEQTGHILDLKKSASEILENVEQIFSGLGYNTDIIRFNSDTDNLDNDPMYKLWHLLYSFEGDNSKTGNENLINKITNLYGFEKEYAAILANITFQDDYGSLSAKAIRKIFPYLKEGNKYDISCEYAGYRHSASSLTKEELENKIYKDRLEILPKNSLRNPVVEKILNQMVHVVNAIIADPQLGKPDEIRIELARELKKNAKERQELTKSIEESTRMHKQYREILSKPPFNLTYISRNDIIRYKLYEELKDNGYHTLYSNTYISPTTLFSGDFDVEHIIPQSRLFDDSFSNKTLELRSINIEKGNATACDFVKEKYGETNNENSMENYLNRIEKLYKTGVLSRAKYNKLKMQEKDIPSGFIERDIRNTQYIAKYAKTMLSDLVKVVVSTTGAITDRLREDWQLIDVMKELNWKKYKNLGLTTEFTNEEGYRIRQINDWTKRNDHRHHAMDALTVAFTKRQFIQYLNNLNARRTDKNQSISNTEEEEYDNFAITTEDMLLNTRDVLGIEKNYLYRDHRNKLRFYPPIPLNDFRAEAKYHLENTLISIKAKNKVTTQNINFTKRKRGVNKKTQQTPRGQLHLETVYGSQKQYVVKEESVNAKFDAEKIATVSKPAYREALLRRLQEFDNDPKKAFTGKNSLTKNPIWLNKLQTAQVPEKVKTISFETAYTIRKEISPDLKLDKVIDLGIRRILENRLKEFRNDAKKAFSNLDENPIRPNKEKGIAIKRVTISGISNAEALHDKRDKEGNLILDKNGKPQPVDFVNTGNNHHVAVYRKPVFDKDGNHAEDENGNKKYELEENVVSFYEAVSRRNLGLPVIDKAYKASEGWQFLFSMKQNEYFVFPRTEKVEKIDEETGEITEEEIVVFDPNDIDLLNPDNYKLISPNLFRVQKFSKLIYGNSVVREYVFRHHLETSIKNTSSVLKGITWIDFRSSKGLDKIVKVRVNHIGKIVSVGEY

SEQ ID NO: 23359 - protein, 1416 aa, unidentified
  REGION 1..1416: note = Cas Enzyme sequence
MKRILGLDLGTNSIGWALVNEAETDEEVSSIIRLGVRVNPLTVDETQNFEKGKSITTNAERTLKRSMRRNLQRYKLRRDALVEFLKELGFITDETILSEQGNRTTFETCRLRAKAAEEEISLEELSRVLLMINKKRGYKSSRKAKKEEDGVLIDGMEIAKKLYEEDLTPGQLCSQLLESGKKVLPDFYRSDLQEELDRIWNVQKQFHPDVFCDAAKEEIKGKNRSQTWAILANYFVWKEEVISWNDREAKNETIEKECKLVGLKRTTKGYELKKENYRWRVQALTEQLGLEEIAVVLQEINGQINASSGYLGAISDRSKVLYFNHQTVGQYQMAELDKNPHASLRNMVFYRQDYLDEFDRIWEKQTEFHKELTAELKKEIRDMIIFYQRRLKSQKGLISFCEFERLEIVVEKDGKKQTKVIGCKVIPRSHPLFQEFKIWQTLNDIKVLGREKKRNALSASESRALYPEEKEILARELAIKENMRKADVLKLLFENPQELDLNFKQIDGNRTGFSLFSAYSKMIEKYGYEPLDFKKPADEIMGQLRTIFTDLGWNTNLFTIDLTKEGKELEMQPYFRLWHLLYSFEGDNTPTGNGKLIEKIMQLCGVEKEYAVELASLSFQDDYGSLSAKAIKRILPYLKEGNQYDVACEYAGYRHSKSSLTKEEIENKVLKDKLDVLPKNSLRNPVVEKILNQMVNVINTIIDTYGKPDEIRVELARELKKSAKEREELTKAIAKSTREHEEIRKLLQVEFGMMNVSRNDIIRYKLYEELKDNGYKTLYSNQYIPKEKIFSKEIDIEHIIPQSRLFDDSLSNKTLEYKAINIEKGNKTAYDFVKEKYGEEGLQQYINRCESLFNDKKAKLRKLKMGQKDIPDGFIDRDLRNTQYIAKKALAMLNEICRRVVATTGSITDQLREDWQLVDVMKELNLPKYEALGFVETYEDKDGRKIKRIKDWTKRNDHRHHAMDALTVAFTKDAFIQYFNNKNAAQDSDNRNHTNIIGIKTRYFDKGRALPPIPLEQFRVEAKRHLENLLVSIKAKNKVVTVNVNRTKKKKGENTKIQQTPRGQLHLETVYGSLKQYVTKIEKMNASFDVAKIATVSKQAYRNALLKRLETFSNDPKKAFTGKNTLEKNPLYVDKYQTIRVPEKVQTVEFETIYTIRKPVDPALNVDKVVDVKVRAILEQRLKEYDGDPKKAFVNLDENPIWLNKEKGISIKRVSIRGINNAQSIHVKKDKNGNPIWDENGKQIPVDFVNTGNNHHVAIYRKPVLDKKGQVTFDEDGNLMYELDEVVVSFFEAVTRANLGLPIIDKDYRKSEGWQFLFSMKQNEYFVFPNEKTGFNPKEVNLLDPDNYVVISPNLFRVQKIGSNDYTFRHHLETTIQNSNNELKFITWIRCGKSGISDIVKVRINHIGQIVSVGEY

SEQ ID NO: 23360 - protein, 1312 aa, unidentified
  REGION 1..1312: note = Cas Enzyme sequence
VQNGFLGITVSSEQVGWAVTNPKYELERASRKDLWGVRLFDKAETAEDRRMFRTNRRLNQRKKNRIHYLRDIFHEEVNQKDPNFFQQLDESNFCEDDRTVEFNFDTNLYKNQFPTVYHLRKYLMETKDKPDIRLVYLAFSKFMKNRGHFLYKGNLGEVMDFENSMKGFCESLEKFNIDFPALSDEQVKEVRDILCDHKIAKTVKKKNIITITKVKSKTAKAWIGLFCGCSVPVKVLFQDIDEEIVTDPEKISFEDASYDDYIANIEKGVGIYYEAIVSAKMLFDWSILNEILGDHQLLSDAMIAEYNKHHDDLKRLQKIIKETGSRELYQDIFINDVSGNYVCYVGHAKTMSSADQKQFYTFLKNRLKNVNGISSEDAEWIDTEIKNGTLLPKQTKRDNSVIPHQLQLREFELILDNMQEMYPFLKENREKLLKIFNFVIPYYVGPLKGVVRKGESTNWMVPKKDGVIHPWNFDEMVDKEASAECFISRMTGNCSYLFNEKVLPKNSLLYETFEVLNELNPLKINGEPISVELKQRIYEQLFLTGKKVTKKSLTKYLIKNGYDKDIELSGIDNEFHSNLKSHIDFEDYDNLSDEEVEQIILRITVFEDKQLLKDYLNREFVKLSEDERKQICSLSYKGWGNLSEMLLNGITVTDSNGVEVSVMDMLWNTNLNLMQILSKKYGYKAEIEHYNKEHEKTIYNREDLMDYLNIPPAQRRKVNQLITIVKSLKKRCGVPNKIFFKVSREHQDDPKRTSSRKEQLKYLYKSLKSEDEKHLMKELDELNGHELSNDKVYLYFLQKGRCIYSGKKLNLSRLRKSNYQNDIDYIYPLSAVNDRSMNNKVLTGIQENRADKYTYFPVDPEIQKKMKGFWMELVLQGFMSKEKYFRLSRENDFSENELVSFIEREISDNQQSGRMIASVLQYYFPESKIVFVKEKLISSFKRDFHLISSYGHNHLQAAKDAYITIVVGNVYHTKFTMDPAIYFKNHKRKDYDLNRLFLENISRDGQIAWESGPYGSIQTVRKEYAQNHIAVTKRVVEVKGGLFKQMPLKKGHGEYPLKTNDPRFGNIAQYGGYTNVTGSYFVLVESMEKGKKRISLEYVPVYLHERLEDDPGHKLLKEYLVDHRKLNHPKILLAKVRKNSLLKIDGFYYRLNGRSGNALILTNAVELIMDDWQTKTANKISGYMKRRAIDKKARVYQNEFHIQELEQLYDFYLDKLKNGVYKNRKNNQAELIHNEKEQFMELKTEDQCVLLTEIKKLFVCSPMQADLTLIGGSKHTGMIAMSSNVTKADFAVIAEDPLGLRNKVIYSHKGEK

SEQ ID NO: 23361 - protein, 1509 aa, unidentified
  REGION 1..1509: note = Cas Enzyme sequence
MKKTLGLDLGTNSIGWAVINSNIDSEGKEKLVGISSCGSRIIPMDAATLGDFGKGNTKSPVAERTRLRGIRRLLERSLLRRERLHRVLSVMVFLPEHYASQLDRYGKFLPETEPKLAWYKDDSGRYQFLFQKSFHEMLEDFRQHQPELVAGEKKIPYDWTIYYLRKKALSQEITKEELAWILLNFNQKRGYYQLRGEEEQEENNKSVEYHALKVVSVEDSGERKGKDIWYNVTLENGWVYRRASNIPLDWTGKVKEFVVTTELDDAGNPKKDKEGNVKRSFRAPKEDDWGLLKTRTQAQIDESGKTVGTYIYESLLCMPNQKIRGKLVRTIERKYYKDELRQILVKQSEFHAALQDHNLLLSCIEELYPNNEAHRRLLSASSFIYFLIEDILFYQRPLKSQKGLIDNCPYESHIYKDKKDGSLHHVPLKCVSKSHPLFQEFRLWQFLSNLRIYQRERMTDGSLKLDVDVTREFLPSEEDYVKLFDWLNERKEISQKFLLAYKPFGLKKNEQANYRWNYVEDKSYPCNETRAEINSRLSKAGVPEEFLTEEKEEALWHILYSISDKKELTKALGTFAAKNGLNESFVEVFAKIPPFESNYAAYSLKAIRKLLALMRMGKYWNEQTIDRQTRDRIEKILTGEYDETIRSRVREKAMLLTDISSFRGLPLWLACYIVYDRHSESKELVKWETPADIDHFLSKFKQNSLRNPIVEQVITESLRTVRDIWKQEGKIDEIHVELGREMKNPAKERARITAQVQENENTNLRIKALLAEFMNPEFEIENVHPYSPGQQEILRIYEDGVLSGIAEKDLPDDITAILKKFRENDVKKRPTTSEVLRYKLWLEQRYRSPYTGRVIPLGKLFTPAYEIEHVIPQSRYFDDSISNKVICESAVNKLKDNCLGYEFIKKHSGEMVELGNGETVPVFSVEEYERFVKESYFGNSKKMKKLLLEDIPDSFIERQLNDSRYISRVVTSLLSNLVCEEGEQDGLSKNVIVCTGGITDRLKKDWGVQEVWNRIILPRFLRLNEITGRTDFTSTSVNGHLLPALPLYLQKGFNKKRIDHRHHAMDAIVIACANRNIVNYLNNSSARKNSEISRYDLQRLLCEKVKTDANGNYKWILRKPWETFTQDVYAALTNIVVSFKQNLRVINRTTNYYQHYNEAGEKRMIPQTKGDRWAIRKPMHKDTVYGEVNLRKEKTLPLRDVVKNPSIVVDKSLKNKLYELLKSQYDLKAIAKYFETHQDVWADVNLKKIKVYYFTKETNERFFATRKSLDPSFDQKKIEEEVTDTGVQKILLHHLQQNNNDPDMAFSPDGIDRMNQNMTILNDGKWHQPIYKVRTYEKADKFAVGESGNKAKKFVEAAKGTNLFFAVYESVQEDEATGKQVCKRTFATIPLNEVIKRKKQGLPAAPEDLNGNLPKFVLSPNDLVYLPTEEERNSSRIIQPLDRERIYKMVSSSGSQCFFIKVFVANSIWDKNEYSSLNKMERAITNEMIKEICVPIKIDRLGNVSLIQI

SEQ ID NO: 23362 - protein, 1135 aa, unidentified
  REGION 1..1135: note = Cas Enzyme sequence
LEEIAVVLQEINGQINASSGYLGAISDRSKVLYFNHQTVGQYQMAELDKNPHASLRNMVFYRQDYLDEFDRIWEKQAEFHKELTAELKKEIRDMIIFYQRRLKSQKGLISFCEFERLEIVVEKDGKKQTKVIGCKVIPRSHPLFQEFKVWQTLNDIKVLGREKKRNALSASESRALYPEEKEILARELAIKENMKKADVLKLLFENPQELDLNFKQIDGNRTGFSLFSAYSKMIEKYGYEPLDFKKPADEIIGQLRTIFTDLGWNTNLFTIDLTKEGKELEMQPYFRLWHLLYSFEGDNTSTGNGKLIEKIMQLCGVEKEYAVELASLSFQDDYGSLSAKAIKRILPYLKEGNLYDVACEYAGYRHSKSSLTKEEIENKVLKGKLEVLPKNSLRNPVVEKILSQMVNVINTIIDTYGKPDEIRVELARELKKSAKEREELTKAIAKSTREHEEIRKLLQDEFGMMNVSRNDIIRYKLYEELKDNGYKTLYSNQYIPKEKIFSKEIDIEHIIPQSRLFDDSLSNKTLEYKAINIEKGNKTAYDFVKEKYGEEGLQQYINRCESLFNDKKAKLRKLKMEQKDIPDGFIDRDLRNTQYIAKKALAMLNEICRRVVATTGSITDQLREDWQLVDVMKELNLPKYEALGFVETYEDKDGRKIKRIKDWTKRNDHRHHAMDALTVAFTKDAFIQYFNNKNAAQDSGNRNHTNIIGIKTRYFDKGRALPPIPLEQFRIEAKQHLEKLLVSIKAKNKVVTVNVNRTKKRKGENTKIQQTPRGQLHLETVYGSHKQYVTKIEKVNASFDAAKIATVSKRAYRNALLKRLETFGNDPKKAFTGKNALEKNPLYADKYQTIRVPEKVQTVEFETIYTIRKPVDPALNVDKVVDVKVRAILERRLKEYGGDPKKAFVNFWENPIWLNKEKGISIKRVSIRGINNAQSIHVKKDKNGNPIWDENGKQIPVDFVNTGNNHHVAIYRKPVLDKKGQVTFDEDGNLMYELDEVVVPFFEAVTRANLGLPIIDKDYRKSEGWQFLFSMKQNEYFVFPNEKTGFNPKEVDLLNPDNYAMISPNLFRVQTMSKVMYGNNVVRDYKFRHHLETTVKDMKELKDIAYKQYKTLSFGNSVVKIRINHIGQIVSVGEY

SEQ ID NO: 23363 - protein, 1423 aa, unidentified
  REGION 1..1423: note = Cas Enzyme sequence
MALQKKSQHTAYEQERKYAMKKLKQMSGPYSIGFELSSTAHGFVATDPNGNVLYHGKQPVMGTRVFKEGQHAAEARMPRTSRRGIQRRRGREHEMERVFAPVISSIDPDFFIRRRMSYKLGKIRFESDPIGFSYSRLFHSFPTLAHLDVALMEADGAMDPRLIFEAVANHVVRRGHFLLENQNVSSTNSDIDTQVANYAEVLVSYFEDTLDERIELSLEALDINGNVTARELQKRFASAMCVSGDDIQKKTEKAQIKAIADLVAGYKADLTVLVPDAEKLPKVSISDGDALEEFLADSCPDSLVPVLMAAQALYTSWKLQGMLSYAPGKSLSHNQVAQHDVYGKQLRMLKDLALKYVAKQDANGNVDEDGFKDYVRFFGGPKREDGYRYDKVQVKKQDSPKNNMGYTAYNLNVLGYEEFAKRVELLFKDTDAVDDSQYKTMMEAFANHAFLRRIHTVDNAAIPYQLHAEVVNRIIDNQGRFYPWLIDAREHILKVLTSRIPYYVGPLDSTDHGKAGENGTRFAWVNRLAGHEDAFVSPWNYEDHIDIDTTAELFIRRMTGECSYLDGEDVLAKNSLLYEKYCFFNELASLSFTEDGDSWMPFDAGMRKAIYDAASDGKTMTVKRIESVLQRDFFIAHPHVRGTSNPKAMSSKRSNYAYFCRLFDVKALSASDMSMAEDLVLWNTVFEDRDILRRKILKTYGDLLTEKAVDDFCHKRLSGWGKLSERLLTGIWADTASGDMCVMDVLEQGRPYGRYRGSSMNLMQILNDDVLGFKMEIKRLNDSHMQMAEGFDLNALPGSPALRRGVSQAIKVLDDIVSVAGKAPDRIYLKVTRTASNSRKGKRTAKRSDKIKQALKALDADAAADLGAAKLLRELGMFDEKEINERIYLYFHQAGKCLYTGKPIDITRIASNDYYVDHVVPLAYRKDESLDNKVLVYAEASRYKSETLLVSPAVQRKMLPFWRMLRNAGLMSERKLNALIRTEISEGMLKSIIGRQFTENSWEAKLFTAAIAAKYPGTVVIPVKAGVIGAVRSRIGIPKSLKANQFYHAHDALFAAEVGRYMELAKPAFVHNRVKYEQYMRKIKLVNEENKKTPKSQLDFFAGGFFFDRVDKDTGEVYWNKDEEVERIYRACGWKNLRVTYAAFEDGGAFWKQTIYSPREKSKLIATKSDRPAEIYGGYSSQTFANFFVYEVMKKKVKQLRFGAVPAAIASKSDPDTYNAMLEMYARGLAKTAKEKFVRIVRARVLKNTMIELYGERFRIAGEKQVYPVRQMPLAIDEMYLLKGVETIVAAGNAGASARIDFEKAAESLVGFWDLLLEKLPVNYPKLTVQLKLGSLKHPKDILAATSESEFPAIVYKIAEAEIQVMEQASGLRNMSDTKILGGNTFGGSLVFTFNKVLNDPKSKACFIDTTPAGLHEVKTKIW

SEQ ID NO: 23364 - protein, 1509 aa, unidentified
  REGION 1..1509: note = Cas Enzyme sequence
MKNILGLDLGTNSIGWAVVNGSVNDNGSEQLVKIQASGSRIIPMDAAMIGDFNKGNSISQTAERTRLRGIRRLSERYLLRRERLHRILDILGFLPSHFAQDLDRHGKIVKGKEPKLAWRKNEAGQFEFIFQDSFKEMLEDFKLNHPNLITDDKKVPYDWTIYYLRKKGLTSKISKEELAWILLNFNQKRGYYQLRGEEEKKNDNVMIINSKVIDVVKAEKDKKYEKYWYNALLENGLLYRAAFYNDISFWKGHTKEFVLKTIKLKSGGTKQELSFLPSFDEIEKMEKKQKDKMYFKIKLKTEADIDQTHKTVGTYIYDTLLGNPSQKIRGRLVRTIERKYYKEELKLILDKQKEFHPELQDRALYAACVEELYTINEAHRNNIGNRDFTYLFLEDILFYQRPLKSKKSLIDNCPYEENHCLDKETGEIKSFPVKCIAKSHPLFQEFRLWQFIVNLRIYRKGLAQDVDVTNELLKTEEDYVALFDWLNGKKEIDQKAFLKYPLFGLKKEVENYRWNYVQDKPYPCNETRSSMLARLEKCDISIEFLTKENEEALWHILYSVEDKNEIVKALQKFADKHDLNASFVDVFRKFPPFKKEYGSYSAKAIKKLLPLMRMGKYWSENSIDKGTRERIDKIITGEYDEKIENRVREKAIHLADVSDFRGLPLWLVCYIVYGRHSEAKEITQWKSPADIDSYLKSFKQHSLRNPIVEQIIIETLRVVRDIWKQVGNIDEIHVELGREMKNPADKRKKMTQQISENENTNLRIKYLLTEFLNPEYEVENVRPYSPSQQDILRIYEEGVLNSVSDLPEEISDILKKFTETDLKKRPSRSEVLRYKLWLEQKYRSPYTGEVIPLGKLFTSAYEIEHVIPQSCYFDDSFSNKVICEAEVNKLKSNLLGHEFIVKHHGEIVELPFGKKVRIFTVDEYEQFVKDNYSRTRGKMKKLLMDDIPEEFVTRQLNDSRYISKVVKSLLSNIVREKGEEEAISKNVIPCTGGVTDRLKKDWGINEVWNKIILPRFQRLNELTGTNKFTTKNVGIQEIPTMPLELQKGFNKKRIDHRHHAMDAIIIACANRNIINYLNNESATAKAELSRYDLQKLLCDKAKTDNNGNYKWVIRKPWASFTQDTYLALENIIVSFKQNLRVINKATNHFLHYNEEGKKIFVKQGKGDNWAIRKSMHKDTVFGEVNLRRIKTVALNEAMKNPQSIVVKDFKRKLLELWNLGFDAKRIKKYFEDNRETWSDINLSKIEVYYFSKDTKDRFFATRKPLDTSFDRKKIENNITDTGIQKILLRHLELKDNNPDIAFSPDGIDEMNRNIIQLNNGKYHQPIIKVRWYEQADKFAVGQTGNKSSKFVEAAKGTNLFFAVYESNILDKKTNTIIKKRNYATIPLNVAIERQKQGLPVAPEDENGNDPIFVLSPNDLVYLPTDDELANGIIAQPLDRGRIYKMVSCTGNEGHFIPARIANPILQTIELGSNNKAQKAWTDEMIKEICMPIKVDRLGNVLESSSSYKK

SEQ ID NO: 23365 - protein, 1498 aa, unidentified
  REGION 1..1498: note = Cas Enzyme sequence
MKHILGLDLGTNSIGWAVINAIKEENTQKEQLIGINTAGSRIIPMDAAQLGDFNKGNTVSQTANRTQFRGVRRLYERKKLRRERLHRILQLLGFLPKHYASQLDRYGKFIANSEPKLAWTTNTHEPSYFIFQSSFQEMLNDFLQNNNQVKKVPYDWTLFYLRKKALTQKIEKEELAWILLNFNQKRGYYQLREEETEKASSKTRQYFDSQIVTDITDTGQIYKGLKIFTITLENGEKGKFFSKNMPDWKGQKKDIIAIIDLDKNGNDKYDENGELSRRFKIPTEQEWEEQWELIKTKTQKDLDTSHKTVGAYIYDTLLQTPSQKIRGKLIRTIERKYYKDELNQILKKQEEFHPELRDSNLLEACIEELYPNNEAHRNAIAKYSISQLLIEDILFYQRPLKSKKSLISNCPYEEYTYTNKETGEICTSSLKCIAKSHPLFQEFRLWQFISNLRIYQKEGTINGKFTTDIDVTNQFLKTEDDYANLFDWLNQKKEIRQDTFLKKPAFGLKKNIANYRWNYVEDKTYPCNETHYKILSYWEKAGIEQSALTSEIEEKLWHILYSISDKNELRKALQHFADKNYLSDKFADTFQQIPPFEKDYGSYSAKAIKKLLPLMCIGRYWKAENFDSTTLDRIEKILTGEFEENIKNRTREKTIHLDNLYSFQGLPTWLACYIVYNRHSEIKDVTKWQQPSDIDAFLNAFKQHSLHNPIVEQIIMETLRTVRDIWKQTGHIDEIHVELGREMKNPAEKRRKLTQQIQENENTNLRIKALLTEFANPEFGIENVRPHSPSQQDLLRIYEEEVLNETKDIPEDIAVILKKFNEIDTKKRPSTSDVLRYKCWLEQKYRSPYTGAMIPLGKLFTPAYEIEHVIPQSRYFDDSFTNKVICEAEVNKLKGNMLGYEFIKNNQERIVELGFGQNVKIQTVEAYELFVKEHYSYNRTKMQKLLMEDIPDQFIERQLNDSRYISKLIKSLLSNIVRDEGEEEATSKNVIVCTGSITDRLKKDWGINDVWNKLILPRFIRLNEITESNRFTTTNACNKTIPAMPLDLQKGFNKKRIDHRHHAMDAIVIACANRNIVNYLNNESASKNAKISRQDLRQILCKKTKTDNLGNYQWLIDKPWDTFTQDMYSILSNIIVSFKQNLRIINKTTNHYIHYENGKKVNCSQKQSDSWAIRKPMHKETVYGEINLRRTTTATLKAALENPQRIIEKDLKKKIKELLTQGLNEKQIKKYFEDNKDIWQEINLKKIPVYYFTKETANRFFACRESINTTFNKKKIEEKVADTGIQQILLRHLEQNGNNPEQAFSPEGIEQMNKNIMSLNNGKFHQPIYKVRTYEQADKFAVGQTGNKSTKFVEAAKGTNLFFAIYETAHKRSFASIPLNVVIERLKKGLSPAPENEKGNLPKFILSPNDLVYVPTKEEIENGHINQPIQKDRIYKMVSCTGNQCFFIKSNVANTIIDKYEFSPLNKMERAITGEMIKETCIPIQTDRLGNIITPISL

SEQ ID NO: 23366 - protein, 1130 aa, unidentified
  REGION 1..1130: note = Cas Enzyme sequence
RNNIGNRDFTYLFLEDILFYQRPLKSKKSLIDNCPYEENQGLDKETGEIKSFPVKCIAKSHPLFQEFRLWQFIINLRIYRKDLAQDVDVTNELLKTEEDYVALFDWLNGKKEIDQKAFLKYPVFGLKKEIENYRWNYVQDKPYPCNETRSLMLARLEKCDISIEFLTKENEEALWHILYSVEDKNEIVKALQKFADKHDLNASFVDVFQKFPPFKNEYGSYSAKAIKKLLPLMRMGKYWSENSIDKGTRERIDKIITGEYDEKIENRVREKAIHLADVSDFKGLPLWLVCYIVYGRHSEAKEITQWKSPADIDSYLKSFKQHSLRNPIVEQIIIETLRVVRDIWKQVGNIDEIHVELGREMKNPADKRKKMTQQMSENENTNLRIKYLLTEFLNPEYEVENVRPYSPSQQDILRIYEEGVLNSVSDLPEEISDILKKFTETDLKKGPSRSEILRYKLWLEQKYRSPYTGEVIPLGKLFTPAYEIEHVIPQSCYFDDSFSNKVICEAEVNKLKSNLLGHEFIVKHHGEIVELPFGKKVRIFTVDEYEQFVKDNYSRTRSKMKKLLMDDIPEEFVTRQLNDSRYISKVVKSLLSNIVREKGEEEAISKNVIPCTGGVTDRLKKDWGINEVWNKIILPRFQRLNELTGTNKFTTKNVGIQEIPTMPLELQKGFNKKRIDHRHHAMDAIIIACANRNIINYLNNESATAKAELSRYDLQKMLCDKAKTDNNGNYKWVIRKPWASFTQDTYLALENIIVSFKQNLRVINKATNRFLHYNEEGKKIFVKQGKGDNWAIRKSMHKDTVFGEVNLRRIKTVALNEAMKNPQSIVVKDFKRKLLELWNLGFDAKRIKKYFEDNRETWSDINLSKIEVYYFSKDTKDRFFATRKPLDTSFDRKKIENNITDTGIQKILLRHLELKDNNPDIAFSPDGIDEMNRNIIQLNNGKYHQPIIKIRWYEQADKFAVGQTGNKFSKFVEAAKGTNLFFAVYESNILDKKTNTIIKKRNYATIPLNVAIERQKQGLPVAPEDENGNDPIFVLSPNDLVYLPTDDELANGIIAQPLDRGRIYKMVSCTGNEGHFIPARIANPILQTIELGSNNKAQKAWTDEMIKEICMPIKVDRLGNVLESSSSYKK

SEQ ID NO: 23367 - protein, 1536 aa, unidentified
  REGION 1..1536: note = Cas Enzyme sequence
LIIYFIFEKIVNTILVMKKIVGLDLGTNSIGWALINAYIDEYNKEHLYGIEACGSRIIPMDAAILGNFDKGNSISQTADRTSYRGIRRLRERHLLRRERLHRILDLLGFLPKHYSDSLNRYGKFLNDIECKLPWVKDETGSYKFIFQESFKEMLADFTEHHPKLIANNKKVPYDWTIYYLRKKALTQKISKEELAWILLNFNQKRGYYQLRGEEEETPNKLVEYYSLKVEKVEDSGEKKGKDTWYNVHLENGMIYRRTSNIPLDWEGKTKEFIVTTDLEADGSPKKDKEGNIKRSFRAPKDDDWTLIKKKTEADIDKIKMTVGAYIYDTLLQKPDQKIRGKLVRTIERKYYKNELYQILKTQSEFHEELRDKQLYIACLNELYPNNEPRRNSISTRDFCHLFIEDIIFYQRPLKSKKSLIDNCPYEENRYIDKESGEIKHASIKCIAKSHPLYQEFRLWQFIVNLRIYRKETDVDVTQELLPTEADYVTLFEWLNEKKEIDQKAFFKYPPFGFKKTTSNYRWNYVEDKPYPCNETHAQIIARLGKAHIPKAFLSKEKEETLWHILYSIEDKQEIEKALHSFANKNNLSEEFIEQFKNFPPFKKEYGSYSAKAIKKLLPLMRMGKYWSIENIDNGTRIRINKIIDGEYDENIRERVRQKAINLTDITHFRALPLWLACYLVYDRHSEVKDIVKWKTPKDIDLYLKSFKQHSLRNPIVEQVITETLRTVRDIWQQVGHIDEIHIELGREMKNPADKRARMSQQMIKNENTNLRIKALLTEFLNPEFGIENVRPYSPSQQDLLRIYEEGVLNSILELPEDIGIILGKFNQTDTLKRPTRSEILRYKLWLEQKYRSPYTGEMIPLSKLFTPAYEIEHIIPQSRYFDDSLSNKVICESEINKLKDRSLGYEFIKNHHGEKVELAFDKPVEVLSVEAYEKLVHESYSHNRSKMKKLLMEDIPDQFIERQLNDSRYISKVVKSLLSNIVREENEQEAISKNVIPCTGGITDRLKKDWGINDVWNKIVLPRFIRLNELTESTRFTSINTNNTMIPSMPLELQKGFNKKRIDHRHHAMDAIIIACANRNIVNYLNNVSASKNTKITRRDLQTLLCHKDKTDNNGNYKWVIDKPWETFTQDTLTALQKITVSFKQNLRVINKTTNHYQHYENGKKIVSNQSKGDSWAIRKSMHKETVHGEVNLRMIKTVSFNEALKKPQAIVEMDLKKKILAMLELGYDTKRIKNYFEENKDTWQDINPPKIKVYYFTKETKDRYFAVRKPIDTSFDKKKIKESITDTGIQQIMLRHLETKDNDPTLAFSPDGIDEMNRNILILNKGKKHQPIYKVRVYEKAEKFTVGQKGNKRTKFVEAAKGTNLFFAIYETEEIDKDTKKVIRKRSYSTIPLNVVIERQKQGLSSAPEDENGNLPKYILSPNDLVYVPTQEEINKGEVVMPIDRDRIYKMVDSSGITANFIPASTANLIFALPKATAEIYCNGENCIQNEYGIGSPQSKNQKAITGEMVKEICFPIKVDRLGNIIQVGSCILTN

SEQ ID NO: 23368 - protein, 1499 aa, unidentified
  REGION 1..1499: note = Cas Enzyme sequence
MKHILGLDLGTNSIGWAVINAIKEENTQKEQLIGINTAGSRIIPMDAAQLGDFNKGNTVSQTANRTQFRGVRRLYERKKLRRERLHRILQLLGFLPKHYASQLDRYGKFIANSEPKLAWTTNTHEPSYFIFQSSFQEMLNDFLQNNNQVKKVPYDWTLFYLRKKALTQKIEKEELAWILLNFNQKRGYYQLREEETEKASSKTRQYFDSQIVTDITDTGQIYKGLKIFTITLENGEKGKFFSKNMPDWKGQKKDIIAIIDLDKNGNDKYDENGELSRRFKIPTEQEWEEQWELIKTKTQKDLDTSHKTVGAYIYDTLLQTPSQKIRGKLIRTIERKYYKDELNQILKKQEEFHPELRDSNLLEACIEELYPNNEAHRNAIAKYSISQLLIEDILFYQRPLKSKKSLISNCPYEEYTYTNKETGEICTSSLKCIAKSHPLFQEFRLWQFISNLRIYQKEGTINGKFTTDIDVTNQFLKTEDDYANLFDWLNQKKEIRQDTFLKKPAFGLKKNIANYRWNYVEDKTYPCNETHYKILSYWEKAGIEQSALTSEIEEKLWHILYSISDKNELRKALQHFADKNYLSDKFADTFQQIPPFEKDYGSYSAKAIKKLLPLMRIGRYWKAENFDSTTLDRIEKILTGEFEENIKNRTREKTIHLDNLYSFQGLPTWLACYIVYNRHSEIKDVTKWQQPSDIDAFLNAFKQHSLHNPIVEQIIMETLRTVRDIWKQTGHIDEIHVELGREMKNPAEKRRKLTQQIQENENTNLRIKALLTEFANPEFGIENVRPHSPSQQDLLRIYEEEALNETKDIPEDIAVILKKFNEVDTKKRPSTSDVLRYKCWLEQKYRSPYTGAMIPLGKLFTPAYEIEHVIPQSRYFDDSFTNKVICEAEVNKLKGNMLGYEFIKNNQERIVELGFGQNVKIQTVEAYELFVKEHYSYNRTKMQKLLMEDIPDQFIERQLNDSRYISKLIKSLLSNIVRDEGEEEATSKNVIVCTGSITDRLKKDWGINDVWNKLILPRFIRLNEITESNRFTTTNACNKTIPAMPLDLQKGFNKKRIDHRHHAMDAIVIACANRNIVNYLNNESASKNAKISRQDLRQILCKKTKTDNLGNYQWLIDKPWDTFTQDVYSILGNIIVSFKQNLRIINKTTNHYIHYENGKKVSCSQKQGDSWAIRKPMHKETVYGEINLRKTTTATLKAVLENPQRIIEKDLKKKIKELLTQGLNEKQIKKYFEDNKDIWQEINLKKIPVYYFTKETANRFFACRESINTTFNKKKIEEKVADTGIQQILLRHLEQNGNNPEQAFSPEGIEQMNKNIMSLNNNGKFHQPIYKVRTYEQADKFAVGQTGNKSTKFVEAAKGTNLFFAIYETAHKRSFASIPLNVVIERLKKGLSPAPENEKGNLPKFILSPNDLVYVPTKEEIENGHINQPIQKDRIYKMVSCTEGECHFIPYFVAKPIIQTIELGSNNKAQKTWQDEMIKEICIPIKTDRLGNIITSISL

SEQ ID NO: 23369 - protein, 1386 aa, unidentified
  REGION 1..1386: note = Cas Enzyme sequence
VANEKIYLGLNIEPENISWAVANNDYQLCKYEKRLMWGVYCFDEAQLSERRRITRSARRRNKRQAGRVSLCQELFAKALYEKDKNFLLRISEGALTADDAKHRKHYVLFEDANYTDKDYYTQYPTVHHLICELIKNKVPHDVRLVYLACSYLLAYRGHFYYSISEDNVGEITDFSPLYNNFYSSLTNLCGEVPFEKNKSEFEKIIRSKNSLTFKKKAFNELMFAGKAKNYDNDIISYSILCNFISGGKIKISKLFVNEDYEDLETNEVSISIPDLSEMLEGKIDELQLAVINSVKAIYDWAMLVDILNGSSLISEAMVNKYNEHCNDLKKLKHIFIKYLPHEDYRTVFAEIGEKSNYESYVYNAPKDEERPKNYKKCTQEEFCKFTAKYLNQIKKVDEADQAILDELITKCVGSKLCPKLNTTDNRVVPYQLYYHELKLILENAKDYLPFLNDKDEYGTVADKILAIMKFKIPYYVGPLVSSEKSPNAWLERKAEGNIRPWNFKDLVDEDACEKKFIERMTGQCKYVVGQKVLAKRSILNCKYNVLNELNHIVLSNGKLSVEAKQAIYTELCLTSCNRVTKKKILSFLVKNGYAKLGTDIAGIDDIMRSSMQSYLDFEKNHYISDGVLSIEQADEIISRITISTDIRRLRKWISTEYPHLSATDVKYLSGLKYQDYGDVSKSFLEDLYPVNTETGEIESDKNIITMLWETNETIEQLLGTKYRYTESIEYANKELYGLSNGQATLQKRLADAYVPVAMQKATSKAIDIVKDLKRLQGKAPDKIFIRTAKDFADKPKGKNRKSKKEQILAAWGSLKDRDIAALDPGEMASLKKQLNDIDEGKLNLDKYYLYFMQLGRCMYSGAHIPFDELENSFTWNIDHIWPQAKVKDNSLDNKVLVDLTINTDKGKTYPIAKDIREAMADFWGQLYHEGLISDKKYQRLIRQSGFSKEELADFILAQITETRQSTKAIVNLFREYFPDSTVIYLKNDFATDFRREMELPKHEIINNFDLAKDSYLNLVLGNVYTTRFTSNPLNFVENNRNYSLKMYQRRSDGSEVGMMMGKISEGNSVVWDPETSFDVVKRNYAINSVKCVRDAFRRKSGNNGGLFDNNPLRKGNGQIPKRKDLPVSKYGGYNCATISFYSLAVVKDVGPVLFAVELLFAKEFLKSVDFAKKYAAKKISAQIKSKIGADDVRFPFGQTPNIIKANALLELDGYRITLGGKTLDNIIVYSAESLFVASEALSYADKIGKVVNRRRFNKDYKISENIGLSAGGNSELYDYMAQKCTSKPFSVLYNKAGHFFEKSKEIFEQLSIEEQVTVLAEMIKLLTYGRKGTIDLKLLGGSANACIKSIPMNLYKMNGYSSLRLINQSPTGLIEYRSCNLLKLTY

SEQ ID NO: 23370 - protein, 1504 aa, unidentified; identical to SEQ ID NO: 22456
  REGION 1..1504: note = Cas Enzyme sequence

SEQ ID NO: 23371 - protein, 1123 aa, unidentified; identical to SEQ ID NO: 22387
  REGION 1..1123: note = Cas Enzyme sequence

SEQ ID NO: 23372 - protein, 1398 aa, unidentified
  REGION 1..1398: note = Cas Enzyme sequence
MKTILGLDLGTTSIGWALVKEAEPFSDEKSEIVRLGVRVIPLTVDERTSFENGKSITTNALRTQKRGMRRNLQRYKLRRQALIEELKSTGWIGNDFIFSETGPGSTFRTLRLRAKSASEEVTLGDLARILLQINKKRGYKSSRKMVSSDDGQAIDGMAVAKEMYDKGLTPGEYVYQRMLEGKYAIPEFYKSDLQEEFDRIWALQKSFHIELTDELYRKLSDRNKSQTWAICRDELGIQGLKSSFIGKERLKEAYRYRHLAATQEVNMEVLTCALQEINGQKASLSGLLSKISDRSKELYLNNLTVGQMLLKRIEDNPNNSLKNIVFYRQDYLDEFERIWTVQSKYHTELTHELKKRLRDIIIFYQRPLKSQKGLISLCELETKDIEVAIDGVKKMKNIGPRVCPRSSPLFQEFKIWQTINNIFVNGAALDDEDKSVIAKELMFKDKLKDSDLLKLLFKTTKGQSVNFKEVDGNRTMATLMKACFKIAENLGYDDIGLSKLSSEDQMVRIEGIFKEQGFKTGFLHFDSSLASPEFENQDSYRLWHLLYSYEGDKSASGNESLVKCIMDLCSMDEGSAKILASCTFLPDYGSLSAKAMRKILPYMKDGLEYTAACAMAGYRHSKRSLTKEELDTKEYSDRLSLLPKNSLRNPVVEKILNQMINVVNSVIDVYGKPDEIRIEMARELKKSAKEREEAQRDIASSTAESQKVIEILKGEPFFIQFPTRNDIIRYRLYQELAQNGFKTLYSNTYIPKDKLFSKEFDIEHIIPQALIFNDSFANKTLESRQCNLEKGKETAMDYVKSKYDETGVQAYCDRVNGLIGKGISKTKAKWLLMEGKDIPEDFINRELRDSQYIAKKAREILESLVKFVVPTTGSVTARLREDWQLVNVMQELNWEKYARLGLTGVREDKDGRRIPFIQDWTKRNDHRHHAMDALTIAFTRRQFIQYLNHLNSKIDVVSWDKKDLDLRDYDLEDIKFGNLSAGDRYGIVKALQDKFLYKDGNDKYRFVPPIPLDEFRRQAKEQLSDILISFKAKNKVCTRNVNVTKNKGGANKKTQLTPRGPLHNETIYGSSLEYVTKENEKIGSSFDTERITTVCKKKFRDALARRLEEFGGDPKKAFTGKNSPEKNPIWVDEHHSEQVPAKVRTVTMGQRFTGRKPIDATLKIEKVIDKRIREILQARLDEFDGKAAKAFSNLDENPIWLNKEKGIAIKRVTVSGPANPVPVRFKRDKDGKPIIDDAGKTIGADFVTPGNNHHIAIFRDSSGKLQEHPVSFLEATIAKSHGLDVIDRNYNKDEGWEFLFTLKQNEYFVFPNSETGFNPLDYDLTDPMNYAEISPNLYRVQKITTGDYYFRLHLETTVEDNKALKGITWKRVGPSGLEGAVKVRIDNLGRIVAVGEYD

SEQ ID NO: 23373 - protein, 1506 aa, unidentified; identical to SEQ ID NO: 22703
  REGION 1..1506: note = Cas Enzyme sequence

SEQ ID NO: 23374 - protein, 1009 aa, unidentified
  REGION 1..1009: note = Cas Enzyme sequence
GYEEFAKRVELLFKDTDAVDDSQYKTMMEAFANHAFLRRIHTVDNAAIPYQLHAEVVNRIIDNQGRFYPWLIDAREHILKVLTSRIPYYVGPLDSTDHGKAGENGTRFAWVKRLAGHEDAFVSPWNYEDHIDIDTTAELFIRRMTGECSYLDGEDVLAKNSLLYEKYCFFNELASLSFTEDGDSWMPFDAGMRKAIYDAASDGKTMTVKRIESVLQRDFFIAHPHVRGTSNPKAMSSKRSNYAYFCRLFDVKALSASDMSMAEDLVLWNTVFEDRDILRRKILKTYGDLLTEKAVDDFCHKRLSGWGKLSERLLTGIWADTASGDLCVMDVLEQGRPYGRYRGSSMNLMQILNDDVLGFKMEIKRLNDSHMQMAEGFDLNALPGSPALRRGVSQAIKVLDDIVSVAGKAPDRIYLKVTRTASNSRKGKRTAKRSDKIKQALKALDADAAADLGAAKLLRELGMFDEKEINERIYLYFHQAGKCLYTGKPIDITRIASNDYYVDHVVPLAYRKDESLDNKVLVYAEASRYKSETLLVSPAVQRKMLPFWRMLRNTGLMSDRKLNALIRTEISEGMLKSIIGRQFTENSWEAKLFTAAIAAKYPGTVVIPVKAGVIGAVRSRIGIPKSLKANQFYHAHDALLVAEVGRYMELAKPAFVHNRVKYEQYMRKIKLVDEENKKAPKSQLDFFAGGFFFDRVDKDTGEVYWDKDEEVERIYRACGWKNLRVTYAAFEDGGAFWKQTIYSPREKSKLIATKSDRPAEIYGGYSSQTFANFFVYEVMKKKVKQLRFGAVPAAIASKSDPDTYNAMLEMYARGLAKTAKEKFVRIVRARVLKNTMIELYGERFRIAGEKQVYPVRQMPLAIDEVYLLKGVETIVAAGNAGASARIDFEKAAESLVGFWDLLLEKLPVNYPKLTVQLKLGSLKHPKDILAATSESEFPAIVYKIAEAEIQVMEQASGLRNMSDTKILGGNTFGGSLVFTFNKVLNDPKSKACFIDTTPAGLHEVKTKVW

SEQ ID NO: 23375 - protein, 1404 aa, unidentified
  REGION 1..1404: note = Cas Enzyme sequence
MKKLKQMSGPYSIGFELSSTAHGFVATDPNGNVLYHGKQPVMGTRVFKEGQHAAEARMPRTSRRGIQRRRGREHEMERVFAPVISSIDPDFFIRRRMSYKLGKIRFESDPIGFSYSRLFHSFPTLAHLDVALMEADSAMDPRLIFEAVANHVVRRGHFLLENQNVSSTNSDIDTQVANYAEVLVSYFEDTLDERIELSLEALDINGNVTARELQKQFASAMCVSGDDIQKKTEKAQIKAIADLVAGYKADLTVLVPDAEKLPKVSISDGDALEEFLADSCPDSLVPVLMAAQALYTSWKLQGMLSYAPGKSLSHNQVAQHDVYGKQLRMLKDLALKYVAKQDANGNVDEDGFKDYVRFFGGPKREDGYRYDKVQVKKQDSPKNNMGYTAYNLNVLGYEEFAKRVELLFKDTDAVDDSQYKTMMEAFANHAFLRRIHTVDNAAIPYQLHAEVVNRIIDNQGRFYPWLIDAREHILKVLTSRIPYYVGPLDSTDHGKAGENGTRFAWVKRLAGHEDAFVSPWNYEDHIDIDTTAELFIRRMTGECSYLDGEDVLAKNSLLYEKYCFFNELASLSFTEDGDSWMPFDAGMRKAIYDAASDGKTMTVKRIESVLQRDFFIAHPHVRGTSNPKAMSSKRSNYAYFCRLFDVKALSASDMSMAEDLVLWNTVFEDRDILRRKILKTYGDLLTEKAVDDFCHKRLSGWGKLSERLLTGIWADTASGDLCVMDVLEQGRPYGRYRGSSMNLMQILNDDVLGFKMEIKRLNDSHMQMAEGFDLNALPGSPALRRGVSQAIKVLDDIVSVAGKAPDRIYLKVTRTASNSRKGKRTAKRSDKIKQALKALDADAAADLGAAKLLRELGMFDEKEINERIYLYFHQAGKCLYTGKPIDITRIASNDYYVDHVVPLAYRKDESLDNKVLVYAEASRYKSETLLVSPAVQRKMLPFWRMLRNTGLMSDRKLNALIRTEISEGMLKSIIGRQFTENSWEAKLFTAAIAAKYPGTVVIPVKAGVIGAVRSRIGIPKSLKANQFYHAHDALLVAEVGRYMELAKPAFVHNRVKYEQYMRKIKLVDEENKKAPKSQLDFFAGGFFFDRVDKDTGEVYWDKDEEVERIYRACGWKNLRVTYAAFEDGGAFWKQTIYSPREKSKLIATKSDRPAEIYGGYSSQTFANFFVYEVMKKKVKQLRFGAVPAAIASKSDPDTYNAMLEMYARGLAKTAKEKFVRIVRARVLKNTMIELYGERFRIAGEKQVYPVRQMPLAIDEVYLLKGVETIVAAGNAGASARIDFEKAAESLVGFWDLLLEKLPVNYPKLTVQLKLGSLKHPKDILAATSESEFPAIVYKIAEAEIQVMEQASGLRNMSDTKILGGNTFGGSLVFTFNKVLNDPKSKACFIDTTPAGLHEVKTKVW

SEQ ID NO: 23376 - protein, 1521 aa, unidentified
  REGION 1..1521: note = Cas Enzyme sequence
MTKNTRNIIGLDLGTNSIGWSWIQQLISPTSTQPSEYLFDGTPIIRMSGSRIIPMPGDVTGSFERGETISKTKDRTAKRMARRMNERFQLRRERLNRVLNIMGFLPEHYARALDRYGKLNEESNTTIAWRSKEDGKNEFIFYPSFLEMASIFKERHPDIQRIPLDWTLYYLRSKALHQAITKEELSWVLHSFNQKRGYYQSREDITEEDKTKKVEYIKGVVNSVEDTGEKAKGKIIYKVTFADGTEFTSTKSEAPLWIGRTREIIVTTSLDTSGKPKLDKEGKIIQSAKTPDEKDWTLIKIRTEATIDDSKLTVGEYIFHALLKNPETKIKGAHVSTIDRRFYINEINAILKEQEKYHEELRDKSLYEQCTQALYAQNEVRRNIIAPWSMSDLLIKDILFYHRPLKSKKSQISECPLEFHTYTDKNGVTHRQGIKCIPTSHPLFLEYRIWQFIANLRIYERERLDNGKHLINEDKTSDFLTTKKKEELFEWLAEKDSVSQKTLLGHLGLKVERYHWNFPEEKTYPCGETRHLIQSRLKKANLQKAFHSLISDEQKECFERGLWHILYSISDYNELCKALKTFARKTGFTLEEQLLFVEAFSSCPPFKKDYEAYSKRAITKLLPLMRIGKFWHEESIDSTTKNRIEHLISGEECSGIDVRVREKVAKAGLCESIEQYQGLPQWLANYVVYNRHSEASEITKWESPDELDNYIRSFKQYSLRNPIVEQVSLETLRVVRDLWAELQKEGQTIDEIHLEMGRDLKNTAEERSRIFRRNSENEDTNFRIKLLLEEFYANEKDIKDVRPYSPSQQELLRIYEEGVWQQEKDIPQDIKDIRKRISNDKDIKDITPNDIQRYRFWMDQKYCSPYTGKTIPLSRLFTTDYEIEHVIPRSRYFDDSYNNKVICEAAVNKDKNNRLGMEYIMAAGGKTIELGNGKNVQILKEEEYVELVDKIFGNNTRKRNIMLADEITEEFSHRQLNDTRYIARFMKGILSNIVREKNADGTLEPEETSKNLIVCSGRITDRVKQDWGLNDIWNHIITPRFERLNTKTSSNDFGEYVCKEGKRYFQTRVPLNLQKGFNKKRIDHRHHAMDAIAIACVNRSIVNYLNNAAANQTEREDLRRAVCIPERNGQTKRQLRSPWHCFARDTENALRQIVVSFKQNLRITTKATNSYECFDTASGKKIRKHQSNREHYAIRKPLHKDSVYGEVILTSIASVNLKKALLKAERILDKRLKEKIFELRKLYNYSNKQIEEHLTKVCINCPEWKNYDFKKIAVRILSNDADATHIVAIRKPLDESFDEVKINTITDTGIQKILLNHLSRYADDPKKAFSPEGIEYMNANIASLNGGKQHLPIYKVRVSEKDNGGYFPIGQKGNRPKKYVTTAKDTNLFFAVYVDSKGKRSYKTIDLRTAIECKKQGLSVAPSVNEKGDKLLFTLSPNDLVYMPSEEEEANGFSIKGNLIKEHIYKMVSANDNRCFFIPHTVADFISNGEEYNRHNKIELTEDRRSIKEHCVPLKVNRLGK

SEQ ID NO: 23377 - protein, 1424 aa, unidentified
  REGION 1..1424: note = Cas Enzyme sequence
MKRILGLDLGTNSIGWALVNEAETDEEVSSIIRLGVRVNPLTVDETQNFEKGKSITTNAERTLKRSMRRNLQRYKLRRDALVEFLKELGFITDETILSEQGNRTTFETCRLRAKAAEEEISLEELSRVLLMINKKRGYKSSRKVKKEEDGVLIDGMEIAKKLYEEDLTPGQLCSQLLESGKKVLPDFYRSDLQEELDRIWSVQKQFHPDVFCDAAKEEIKGKNRSQTWAILANYFVWKEEVVGWNDREAKNETIEKECKLVGLKRTTKGYELKKENYRWRAQALTEQLGLEEIAVVLQEINGQINASSGYLGAISDRSKVLYFNHQTVGQYQMAELDKNPHASLRNMVFYRQDYLDEFDRIWEKQAEFHKELTAELKKEIRDMIIFYQRRLKSQKGLISFCEFERLEIVVEKDGKKQTKVIGCKVIPRSHPLFQEFKVWQTLNDIKVLGREKKRNALSASESRALYPEEKEILARELAIKENMKKADVLKLLFENPQELDLNFKQIDGNRTGFSLFSAYSKMIEKYGYEPLDFKKPADEIIGQLRTIFTDLGWNTNLFTIDLTKEGKELEMQPYFRLWHLLYSFEGDNTSTGNGKLIEKIMQLCGVEKEYAVELASLSFQDDYGSLSAKAIKRILPYLKEGNLYDVACEYAGYRHSKSSLTKEEIENKVLKGKLEVLPKNSLRNPVVEKILSQMVNVINTIIDTYGKPDEIRVELARELKKSAKEREDLTKAIAKSTREHEEIRKLLQDEFGMMNVSRNDIIRYKLYEELKDNGYKTLYSNQYIPKEKIFSKEIDIEHIIPQSRLFDDSLSNKTLEYKAINIEKGNKTAYDFVKEKYGEEGLQQYINRCESLFNDKKAKLRKLKMEQKDIPDGFIDRDLRNTQYIAKKALAMLNEICRRVVATTGSITDQLREDWQLVDVMKELNLPKYEALGFVETYEDKDGRKIKRIKDWTKRNDHRHHAMDALTVAFTKDAFIQYFNNKNAAQDSGNRNHTNIIGIKTRYFDKGRALPPIPLEQFRIEAKQHLEKLLVSIKAKNKVVTVNVNRTKKRKGENTKIQQTPRGQLHLETVYGSHKQYVTKIEKVNASFDAAKIATVSKRAYRNALLKRLETFGNDPKKAFTGKNALEKNPLYADKYQTIRVPEKVQTVEFETIYTIRKPVDPALNVDKVVDVKVRAILERRLKEYGGDPKKAFVNFWENPIWLNKEKGISIKRVSIRGINNAQSIHVKKDKNGNPIWDENGKQIPVDFVNTGNNHHVAIYRKPVLDKKGQVTFDEDGNLMYELDEVVVPFFEAVTRANLGLPIIDKDYRKSEGWQFLFSMKQNEYFVFPNEKTGFNPKEVDLLNPDNYAMISPNLFRVQTMSKVMYGNNVVRDYKFRHHLETTVKDMKELKDIAYKQYKTLSFGNSVVKIRINHIGQIVSVGEY

SEQ ID NO: 23378 - protein, 1153 aa, unidentified
  REGION 1..1153: note = Cas Enzyme sequence
  REGION 793..795: note = misc_feature - Xaa can be any naturally occurring amino acid
PELQDRALYAACIEELYPINEAHRNNVGNRDFTYLFLEDILFYQRPLKSKKSLIDNCPYEENQGLDKETGEIKSFPVKCIAKSHPLFQEFRLWQFIVNLRIYRKDLAQDVDVTNELLKTEEDYVALFDWLNGKKEIDQKAFLKYPVFGLKKEIENYRWNYVQDKPYPCNETRLLMLARLEKCDISIEFLTKENEEALWHILYSVEDKNEIVKALQKFADKHDLNASFVDVFRKFPPFKKEYGSYSAKAIKKLLPLMRMGKYWSEDSIDKGTRKRMDKIITGEYDEKIENRVREKVIHLADVSDFRGLPLWLVCYIVYGRHSEAKEITQWKSPADIDSYLKSFKQHSLRNPIVEQIIIETLRVVRDIWKQVGNIDEIHVELGREMKNPADKRKKMTQQMSENENTNLRIKYLLTEFLNPEYEVENVRPYSPSQQDILRIYEEGVLNSVSDLPEEISDILKKFTETDLKKRPSRSEILRYKLWLEQKYRSPYTGEVIPLGKLFTPAYEIEHVIPQSCYFDDSFSNKVICEAEVNKLKSNLLGHEFIVKHHGEIVELPFGKKVRIFTVDEYEQFVKDNYSRTRGKMKKLLMDDIPEEFVARQLNDSRYISKVVKSLLSNIVREKGEEEAISKNVIPCTGGVTDRLKKDWGINEVWNKIILPRFQRLNELTGTNKFTTKNVGIQEIPTMPLELQKGFNKKRIDHRHHAMDAIIIACANRNIINYLNNESATAKAELSRYDLQKLLCDKAKTDNNGNYKWVIRKPWASFTQDTYLALENIIVSFKQNLRVINKATNRXXXYNEEGKKIFVKQGKGDNWAIRKSMHKDTVFGEVNLRRIKTVALNEAMKNPQSIVVKDFKRKLLELWNLGFDAKRIKKYFEDNRETWSDINLSKIEVYYFSKDTKDRFFATRKPLDTSFDRKKIENNITDTGIQKILLRHLELKDNNPDIAFSPDGIDEMNRNIIQLNNGKYHQPIIKIRWYEQADKFAVGQTGNKFSKFVEAAKGTNLFFAVYESNILDKKTNTIIKKRNYATIPLNVAIERQKQGLPVAPEDENGNDPIFVLSPNDLVYLPTDDELANGIIAQPLDRGRIYKMVSCTGNEGHFIPARIANPILQTIELGSNNKAQKAWTDEMIKEICMPIKVDRLGNVLESSSSYKK

SEQ ID NO: 23379 - protein, 1312 aa, unidentified
  REGION 1..1312: note = Cas Enzyme sequence
VQNGFLGITVSSEQVGWAVTNPKYELERASRKDLWGVRLFDKAETAEDRRMFRTNRRLNQRKKNRIHYLRDIFHEEVNQKDPNFFQQLDESNFCEDDRTVEFNFDTNLYKNQFPTVYHLRKYLMETKDKPDIRLVYLAFSKFMKNRGHFLYKGNLGEVMDFENSMKGFCESLEKFNIDFPALSDEQVKEVRDILCDHKIAKTVKKKNIITITKVKSKTAKAWIGLFCGCSVPVKVLFQDIDEEIVTDPEKISFEDASYDDYIANIEKGVGIYYEAIVSAKMLFDWSILNEILGDHQLLSDAMIAEYNKHHDDLKRLQKIIKETGSRELYQDIFINDVSGNYVCYVGHAKTMSSADQKQFYTFLKNRLKNVNGISSEDAEWIDTEIKNGTLLPKQTKRDNSVIPHQLQLREFELILDNMQEMYPFLKENREKLLKIFNFVIPYYVGPLKGVVRKGESTNWMVPKKDGVIHPWNFDEMVDKEASAECFISRMTGNCSYLFNEKVLPKNSLLYETFEVLNELNPLKINGEPISVELKQRIYEQLFLTGKKVTKKSLTKYLIKNGYDKDIELSGIDNEFHSNLKSHIDFEDYDNLSDEEVEQIILRITVFEDKQLLKDYLNREFVKLSEDERKQICSLSYKGWGNLSEMLLNGITVTDSNGVEVSVMDMLWNTNLNLMQILSKKYGYKAEIEHYNKEHEKTIYNREDLMDYLNIPPAQRRKVNQLITIVKSLKKTYGVPNKIFFKISREHQDDPKRTSSRKEQLKYLYKSLKSEDEKHLMKELDELNDHELSNDKVYLYFLQKGRCIYSGKKLNLSRLRKSNYQNDIDYIYPLSAINDRSMNNKVLTGIQENRADKYTYFPVDSEIQKKMKGFWMELVLQGFMTKEKYFRLSRENDFSKSELVSFIEREISDNQQSGRMIASVLQYYFPESKIVFVKEKLISSFKRDFHLISSYGHNHLQAAKDAYITIVVGNVYHTKFTMDPAIYFKNHKRKDYDLNRLFLENISRDGQIAWESGPYGSIQTVRKEYAQNHIAVTKRVVEVKGGLFKQMPLKKGHGEYPLKTNDPRFGNIAQYGGYTNVTGSYFVLVESMEKGKKRISLEYVPVYLHERLEDDPGHKLLKEYLVDHRKLNHPKILLAKVRKNSLLKIDGFYYRLNGRSGNALILTNAVELIMDDWQTKTANKISGYMKRRAIDKKARVYQNEFHIQELEQLYDFYLDKLENGVYKNRKNNQAELIHNEKEQFMELKTEDQCVLLTEIKKLFVCSPMQADLTLIGGSKHTGMIAMSSNVTKADFAVIAEDPLGLRNKVIYSHKGEK

SEQ ID NO: 23380 - protein, 1504 aa, unidentified
  REGION 1..1504: note = Cas Enzyme sequence
MKNIVGLDLGTNSIGWAVVNGSVNDDGSEQLVKIQASGSRIIPMDAAMIGDFNKGNSISQTAERTRLRGVRRLSERYLLRRERLHRILDILGFLPFHFAQDLDRHGKIVKGKEPKLAWRKNEAGQFEFIFQDSFKEMLEDFKLNYPNLITDDKKVPYDWTIYYLRKKGLTSKISKEELAWILLNFNQKRGYYQLRGEEEEENKDKLVEFYALKVVAVEDSGEKKGKDIWYNVHLENGWVYRRTSNMSLDWVGKTKEFIVTTDLEKDGTPKKDKEGNVKRSFRAPKEDDWSLVKKKTEADIDQTHKTVGAYIYDTLLGNPSQKIRGRLVRTIERKYYKEELKLILEKQKEFHLELQDRALYAACIEELYPINEAHRNNVGNRDFTYLFLEDILFYQRPLKSKKSLIDNCPYEENQGLDKETGEIKSFPVKCIAKSHPLFQEFRLWQFIINLRIYRKDLAQDVDVTNELLKTEEDYVALFDWLNGKKEIDQKAFLKYPVFGLKKEIENYRWNYVQDKPYPCNETRSLMLARLEKCDISIEFLTKENEEALWHILYSVEDKNEIVKALQKFADKHDLNASFVDVFQKFPPFKKEYGSYSAKAIKKLLPLMRMGKYWSENSIDKGTRERIDKIITGEYDEKIENRVREKAIHLADVSDFKGLPLWLVCYIVYGRHSEAKEIIQWKSPADIDSYLRSFKQHSLRNPIVEQIIIETLRVVRDIWKQVGNIDEIHVELGREMKNPADKRKKMTQQMSENENTNLRIKYLLTEFLNPEYEVENVRPYSPSQQDILRIYEEGVLNSVSDLPEEISDILKKFTETDLKKRPSRSEVLRYKLWLEQKYRSPYTGEVIPLGKLFTPAYEIEHVIPQSCYFDDSFSNKVICEAEVNKLKSNLLGHEFIVKHHGEIVELPFGKKVRIFTVDEYEQFVKDNYSRTRSKMKKLLMDDIPEEFVTRQLNDSRYISKVVKSLLSNIVREKGEEEAISKNVIPCTGGVTDRLKKDWGINEVWNKIILPRFQRLNELTGTNKFTTKNVGIQEIPTMPLELQKGFNKKRIDHRHHAMDAIIIACANRNIINYLNNESATAKAELSRYDLQKMLCDKAKTDNNGNYKWVIRKPWASFTQDTYLALENIIVSFKQNLRVINKATNRFLHYNEEGKKIFVKQGKGDNWAIRKSMHKDTVFGEVNLRRIKTVALNEAMKNPQSIVVKDFKRKLLELWNLGFDAKRIKKYFEDNRETWSDINLSKIEVYYFSKDTKDRFFATRKPLDTSFDRKKIENNITDTGIQKILLRHLELKDNNPDIAFSPDGIDEMNRNIIQLNNGKYHQPIIKIRWYEQADKFAVGQTGNKSSKFVEAAKGTNLFFAVYESNILDKKTNTIIKKRNYATIPLNVAIERQKQGLPVAPEDENGNDPIFVLSPNDLVYLPTDDELANGIIAQPLDRGRIYKMVSSSGEQCFFIKHIVANVLVDKFEFSPLNKMERALTGEMIKMICIPIKVDRLGNVLESSSSHKK

SEQ ID NO: 23381 - protein, 1509 aa, unidentified
  REGION 1..1509: note = Cas Enzyme sequence
MKTILGLDLGTNSVGWAVINSVIKEQAERIWIEMAGSRIIPMDAAVLGDFDKGNSISQTSERTRLRGARRLRERQLLRRERLHKVLNILGFLPNHYLEYIDFEKHPGKFLADAEPKLAWVKDEQGKYTFLFQAAFDEMLADFAIHQPSLVSGDKKIPYDWTIYYLRKKALTEMISKEELAWILLNFNQKRGYYQLRGEEEEDNAGKSVEFYALKVLTVEATDEKKGRDVWYNVHLENGWIYRRSSSVPLDWEGQVKEFIVTTDLNPDGTPKLDKYGEVKRSFRAPKEDDWMLIKKRTEADIANTHKTVGAYIYDTLLQKPQQKIIGKLVKTVERKLYRDELSLILQKQCAFHAELQDRALYARCVEALYPSNEVRRKNIANRDFVYLLMDDILFYQRPLKTKKSLIANCPYEENEYVDRETGEIKKAPLKCIAKSHPLFQEFRLWNFLSNIRIYQKEKEINGTLHLDVDVTAEFLKTEDDYVALFDWLNSRKEIEQKTFLKYPKFGLKKEISNYRWNYVEDKQYPCNETRHAILSSLEKANVCIDFLSNEKEVALWHILYSVSDKQEIEKALRTFAAKNGLDESFVEAFKKFPPFKSEYGAYSAKAIKKMLPLMRCGKYWDVSSIDDTTKERIKKIVTGEYDERISVKVRDKVMNLSDISCFRRLPLWLACYIVYNRHSEDKEAVKWESPADIDAYLASFKQYSLRNPIVEQVITETLRVVRDIWKQVGRIDEIHIELGREMKNPADKRKRMTAQILENENANLRIKALLAEFMNPEYEIENVRPYSPSQQEILRIYEDTVLHAEDQLPEEIDAILKKFNSSKVPTKSEFLRYKLWLEQKYRSPYTGELIPLGKLFTAAYEIEHVIPQSRYFDDSFSNKVICESAVNKLKDNQLGYEFIKNHHGQKVEVGFGKSVEIFSVDSYERFVKEQYAKSAVKMKKLLMDDIPEQFIERQLNDSRYISKVIKGLLSNIVREKNDSGEYEPEAVSKNIVVCTGSVTDRLKRDWGMNDVWNSIVYPRFERLNSLTDTQSFGHWENKSGKKVFQTELPLEYQKGFSKKRIDHRHHAMDAIVIACATRNHVNYLSNESASRNAKISRYDLQRLLCDKSRTDDNGNYKWVIKKPWDTFTQDAREVLSKIVVSLKQNLRIINKTTNVYRHFDATVNRVYQKQKTGDSWAIRKPMHKDTVFGAVNLRKVKVVRLSVALDTPAMIVDKRVKNKVFELLSYKYDKKRIEKYFKENAFLWKELDLAKVAVYYFTEATTEPLVAVRKPLDSTFNEKKIKESVTDTGIQKILLNHLCTKEGKPDLAFSAEGIEEMNRNLLQLNNGKSHQPIYKVRVYEPRGNKFSVGVLGNKGTKWVEAAKGTNLFFAIYITEDGKRTYETIPLNVVIEREKQGLVPVPDRNEKGDKLLFWLSPNDLVYLPTEEEREFGRINEPIDRGRIYKMVSCTGNEGHFIPANVANPIVPVIELGSNNKAQRAWTNEMIKDICIPIKVDRLGHIIEVKYRIDE

SEQ ID NO: 23382 - protein, 1513 aa, unidentified
  REGION 1..1513: note = Cas Enzyme sequence
  REGION 2..5: note = misc_feature - Xaa can be any naturally occurring amino acid
MXXXXRILGLDLGTNSIGWALVDSEEQRILGMGSRIIPMDQGVLDTFSGGNPVETQTAARTVYRGTRRLRERALLRRERLIRVLNMMKFLPEHYASQIDFEKRLGQFFDEKEPKLAWKQNDEGRFEFIFQQSFNEMIEEFKNKGVVREDKKIPYDWTIYYLRKKALSQEIEKEELAWILLNFNQKRGYYQLRGEEEEENPNKLVEYYSLKIVDVIADEKPNSKSDIWYSLHLENGWIYRRSSKIPLFGWKDKTRDFIVTTDLNDDGTVKKDKEGIEKRSFRAPSENDWVLLKKKTESDIEKSHKTVGAYVYETLLQNPMQKVRGKLVRTIERKFYKDELKQILEKQREFHPELRDEDLYNDCVRELYRSNETYQFILSKRDFVHLFLDDILFYQRPLRSQKSAIGDCILEFKTYKDKDGNNIKEYLKVISKSNPLYQEFRIWQWLYNLKIYRKEDDEDVTLQFIANIEDKEQLFDFLSNRKSIEQKPLLEYLIKAKGLKKQVKTEAYRWNYVEDKIYPCSETKTMISTRLAKVENIPDNFFTKEIEQKLWHIIYSVTDKNEFEKALRTFAKKYDLDIASFVDNFKKIPPFKNEYGSFSEKAIKKLLPLMRLGKYWKWNDIDNNTQNRISKIITGEYDEEIKDIVREKSIALTNENDFQGLQLWLAQYLVYGRHSEADIAGKWHSVADLEKYLNEFKQHSLRNPIVEQIITETLRVVRDIWRKYGQGAENFFSEIHVELGRDMKNTADERKKIVNVVTENENTNLRIKALLMELKNNSDGKLEVENVRPYSPTQQDILKIYEEYAISTGLDNEKDEKVKEDIKKISRVAQPTTTELQRYKLWLEQKYCSPYTGKVIPLGKLFTEEYQIEHIIPKSRYYDDSFSNKVICEAAVNKLKDKCLGLEFIKNYHGQIVETGFGQKVTIFDEEAYQNFVKQHYAYNHSKRTKLLLEEIPEKMIERQMNDTRYISKFVLPLLSNLVRAKENDNGVNSKNVLPVNGKITTMLKQDWGLNDVWNDLILPRFVRMNELAKTIAFTSWNEQHQKYLPTVPLELSKGFQKKRIDHRHHAMDALVIACATRDHVNLLNNKHANTDTIRYDLQRKLRLFERVTYIDPQTKNNVTKDIPKEFKKPWDNFTVDARNELEKIIVSFKQNLRIINKATNIYTKYENGKKIKVGQKGLNWAIRKPLHKETVFAKVSLRKRKTVRLSEALKDWKKIVDKKLKQEIKRLTCQYGKFDVDTILRYFKDRKYQFGEVDVSKVKMYYFDEENAAVRKNVDTSFTEKFIQGSVTDTGIQKILLNHLEAKGNKVEIAFSPEGIEEMNKNIIQLNEGKLHLPIFKVRVYETIGNKFSVGVKGNKKDKYVEAAKGTNLFFAIYVDENGIRSYETIPLNIVIERLKQGLSVVPEKNRKEHSLLFYLSPNDLVYVPIEDERENIHAVNLDQLNNEQRKRIYKMVSCTGSECHFVPYYVASPIVNKVEYSSLNKIGRSLTGEMIKDVCIKLKVDRLGNIKGISGL

SEQ ID NO: 23383 - protein, 1521 aa, unidentified
  REGION 1..1521: note = Cas Enzyme sequence
MTKNTRNIIGLDLGTNSIGWSWIQQLISPTPTQPSEYLFDGTPIIRMSGSRIIPMPGDVTGSFERGETISKTKDRTAKRMARRMNERFQLRRERLNRVLNIMGFLPEHYARALDRYGKLNEESNTTIAWRSKEDGKNEFIFYPSFLEMASIFKERHPDIQRIPLDWTLYYLRSKALHQAITKEELSWVLHSFNQKRGYYQSREDITEEDKTKKVEYIKGVVNSVEDTGEKAKGKIIYKVTFADGTEFTSTKSEAPLWIGRTREIIVTTSLDTSGKPKLDKEGKIIQSAKTPDEKDWTLIKIRTEATIDDSKLTVGEYIFHALLKNPETKIKGAHVSTIDRRFYINEINAILKEQEKYHEELRDKSLYEQCTQALYAQNEVRRNIIAPWSMSDLLIKDILFYHRPLKSKKSQISECPLEFHTYTDKNGVTHRQGIKCIPTSHPLFLEYRIWQFIANLRIYERERFDNGKHLINEDKTSDFLTTKKKEELFEWLAEKDSVSQKTLLGHLGLKVERYHWNFPEEKTYPCGETRHLIQSRLKKANLQKAFLSLISDEQKDCFERGLWHILYSVSDYNELCKALKTFARKTGFTLEEQLLFVEAFSSCPPFKKDYGAYSKRAITKLLPLMRIGKFWHEESIDSTTKTRIEHPISGEECSGIDVRVREKVAKAGLCESIEQYQGLPQWLANYVVYNRHSEASEITKWESPDELDNYIRSFKQYSLRNPIVEQVSLETLRVVRDLWAELQKEGQTIDEIHLEMGRDLKNTAEERSRIFRRNSENEDTNFRIKLLLEEFYANEKDIKDVRPYSPSQQELLRIYEEGVWQQEKDIPQDIKDIKKRISNDKDIKDITPNDIQRYRIWMDQKYCSPYTGKTIPLSRLFTTDYEIEHVIPRSRYFDDSYNNKVICEAAVNKDKNNRLGMEYIMAAGGKTIELGNGKNVQILKEEEYVELVDKIFGNNTRKRNIMLADEITEEFSHRQLNDTRYIARFMKGILSNIVREKNADGTLEPEETSKNLIVCSGRITDRVKQDWGLNDIWNHIVTPRFERLNTKTSSNDFGEYVCKEGKRYFQTRVPLNLQKGFNKKRIDHRHHAMDAIAIACVNRSIVNYLNNAAANQIEREDLRRAVCIPERNGQTKRQLRSPWHCFARDAENALRQIVVSFKQNLRIATKATNSYECFDTASGKKIRKHQSNREHYAIRKPLHKDSVYGEVILTSIASVNLKKALLKADRILDKRLKEKIFELRKLYNYSNKQIEEHLTKVCINCPEWKNYDFKKIAVRILSNDADATHIVAIRKPLDESFDKIKINTITDTGIQKILLNHLSRYADDPKKAFSPEGIEDMNANIASLNGGKQHLPVYKVRVSEKDNGGYFPIGQKGNRSKKYVTTAKDTNLFFAVYANSNGKRSYKTIDLRTAIECKKQGLSVAPSVNEKGDKLLFTLSPNDLVYMPSEEEGANGFSIKGNLIKEHIYKMVSANDNRCFFIPHTVADFISNGEEYNRHNKIELTEDRRSIKEHCVPLKVNRLGK

SEQ ID NO: 23384 - protein, 1312 aa, unidentified
  REGION 1..1312: note = Cas Enzyme sequence
VQNGFLGITVSSEQVGWAVTNPKYELERASRKDLWGVRLFDKAETAEDRRMFRTNRRLNQRKKNRIHYLRDIFHEEVNQKDPNFFQQLDESNFCEDDRTVEFNFDTNLYKNQFPTVYHLRKYLMETKDKPDIRLVYLAFSKFMKNRGHFLYKGNLGEVMDFENSMKGFCESLEKFNIDFPTLSDEQVKEVRDILCDHKIAKTVKKKNIITITKVKSKTAKAWIGLFCGCSVPVKVLFQDIDEEIVTDPEKISFEDASYDDYIANIEKGVGIYYEAIVSAKMLFDWSILNEILGDHQLLSDAMIAEYNKHHDDLKRLQKIIKGTGSRELYQDIFINDVSGNYVCYVGHAKTMSSADQKQFYTFLKNRLKNVNGISSEDAEWIDTEIKNGTLLPKQTKRDNSVIPHQLQLREFELILDNMQEMYPFLKENREKLLKIFNFVIPYYVGPLKGVVRKGESTNWMVPKKDGVIHPWNFDEMVDKEASAECFISRMTGNCSYLFNEKVLPKNSLLYETFEVLNELNPLKINGEPISVELKQRIYEQLFLTGKKVTKKSLTKYLIKNGYDKDIELSGIDNEFHSNLKSHIDFEDYDNLSDEEVEQIILRITVFEDKQLLKDYLNREFVKLSEDERKQICSLSYKGWGNLSEMLLNGITVTDSTGVEVSVMDMLWNTNLNLMQILSKKYGYKAEIEHYNKEHEKTIYNREDLMDYLNIPPAQRRKVNQLITIVKSLKKTYGVPNKIFFKMSREHQDDPKRTSSRKEQLKYLYKSLKSEDEKHLMKELDELNDHELSNDKVYLYFLQKGRCIYSGKKLNLSRLRKSNYQNDIDYIYPLSAVNDRSMNNKVLTGIQENRADKYTYFPVDSEIQKKMKGFWMELVLQGFMTKEKYFRLSRENDFSRSELVSFIEREISDNQQSGRMIASVLQYYFPESKIVFVKEKLISSFKRDFHLISSYGHNHLQAAKDAYIMIVVGNVYHTKFTMDPAIYFKNHKRKDYDLNRLFLENISRDGQIAWESGPYGSIQTVRKEYAQNHIAVTKRVVEVKGGLFKQMPLKKGHGEYPLKTNDPRFGNIAQYGGYTNVTGSYFVLVESMEKGKKRISLEYVPVYLHERLEDDPGHKLLKEYLVDHRKLNHPKILLAKVRKNSLLKIDGFYYRLNGRSGNALILTNAVELIMDDWQTKTANKISGYMKRRAIDKKARVYQNEFHIQELEQLYDFYLDKLKNGVYKNRKNNQAELIHNEKEQFMELKTEDQCVLLTEIKKLFVCSPMQADLTLIGGSKHTGMIAMSSNVTKADFAVIAEDPLGLRNKVIYSHKGEK

SEQ ID NO: 23385 - protein, 1370 aa, unidentified
  REGION 1..1370: note = Cas Enzyme sequence
MKLIFGFDLGSTSIGWAVVQEKENDTEASRILKLGVRVNPLTTDEKTNFEKGKPITTNANRRLAHGMRLNLSRYKQRRKELIKSLIRFKFISPDTVLCENGSNTTFETLRLRAKAATEEITLEELSRVLLMINKKRGYKSNRKAQPNDNGAIDNIDIAKKLYQSHLTPGEYVFNNLKQGIQYIPPFYRSDLINEFNKIVDCQTQFYPHLKNIDTGSLLKAKNCDIILDGQDVQRIKQKGSPSEKKRELYCLRAQAATQQIRLEELALVLEKISSEIRNSSGYLGDISDRSKELFINNQTIGQYLMSQLDRNPNNKLKGQVFYRQDYEDEFNRIWETQARFHKELTPERLHIIRDIIIFFQRDLKSQKSNIAICEFEKQKKEITVDGKKKIIEFGPKVCPKSSPIFQEFKIWQTINNLKISNIYGEELSLSSDERQILFEELSIRKKLTCAEILKLLHKDSKCSLNYKEIQGNATISAIFDAFKEIILQSGHDNNNFNKASFKDTMLIIEPIFKMLGINTDILSLDCPTDSHSLKTCPIYQLWHLLYSYAGDNSKTGDSSLIKKLQRRYGFSKEYASIMSKISFDNDYGNLSAKAIMRILPHLRNGLQYSDACNAAGYNHSKRSLTKQDILNKVLVSQIDLLPRNSLRQPVVEKILNQLINITNALISTYGNPDEIRIELARELKKSADERAKLNSANNANEKENNSIRKLLQERFGIQNPSRNDIVRYKLYKELEHTGFKTLYSQSLITDDILFSKEIEIEHIIPQARLFDDSLSNKTLEFHNINQNKSNQTAYDYILSEFGEDYAVQYKKRIDDLLKNGKISRTKHKYLLMSETEIPTDFINRDIRETQYISRKAMEILEPATRKVVASSGAITARLREDWQLVDVMKELNWEKYKALNLTETIQDKDGRRIYKIKDWTKRNDHRHHAMDALTVAFTKPSFIQFLNNLNARSDKGNAIYAIQQKELHRNKDGKLCFNPPLPLDEFRAEAKRQLNDIFVSHKAKNKVATRNSYMTKNGKGTKIVELTPRGQLFNETTYGCVKQYETKLESVNSSFDTDKIMTVADKSYRQALMKRIEEFDGNASLAFSQKNSITKNPIYVDDSHSDTVPVKVKTVVPKPVFTQRIAVDIKLDKTKIAQILDAKIRRILTDRFYEFGEDPQKAFSNIDENPIWLNKEKGIAIKKVTIKTGISGVPIRHKRNNMGRPILNSDGNKIPSDFVVPGNNHHIAIYKDADGNIKEQAVPFYIATNRVIHKQPAVDRNFNADKGWKFLFSIKKNEYFVFPNEKTGFNPAEIDLLNPDNNKIISPNLFRVQKISSSNYYFRHHLETTVDTNNALNGTTWKHVQSLKALENIIKVRVNNIGQIVAVGEY

SEQ ID NO: 23386 - protein, 1186 aa, unidentified
  REGION 1..1186: note = Cas Enzyme sequence
VSLVAGVITKTRTSRKDENFMENGFTYRLGLDIGIASVGAAVVQTNSFDKPCHLTEPNVRTFPAAECRENGKYYGKSAAVPRRECRSTRRRIKRKQLRMNCIKQTLQKAGLIDIDEFMKRYSDGTLPNVYQLRYEGLDRLLTDDEFAQILIHIAKHRGFLSTRRADKKDKESGAILAATSANQKLMMEKGYRTVGEMMYLDESFHTPCSSNEQGFIVTPRNKAKDYKHTIYRSMLVDEVHVLFDAQRKLGNTKATETLESEYLEIMTRQRSYDLGPGLQADGTKSPFAMDGYKSNAGECTFYKEETRAAKGTYTAELSITLQKINNLKLVDRYGDGRFLTDEEKQKILEYISKHKTMKYKTVKTLLGIDPMIRFNLLNYGKKKKTKKESDDKTKDDSTKKKSTKKSKTKAETSEKTDKDSNKEETELERINRIEDTVFVSMEFTLSYTDCLKTRIKTLSETEKRDLFDKVGELLTSYKTDEARIEKLSNLGLTSEEIDHLLDLNPKGYARLSHKAMKEIEPYLVQGLTYDKACTAAGLDFQVTYTGEKMKYLKGPEINNIINNIQSPVVRRSVAQTVRIINAIIRKYGSPQAVNVELSREMSKSFLERKKAETAMELRHKENVKFCEEIKKLGINSPNGEDITRYRLWKDQNGICLYSGEKIPTRAMFTREYEIDHIIPYSISLDDRYQNKVLVKAKENQTKGNRLPYEYFGHDKTRWAAYENRVESLIKSDGKKAHLLKKNYTKEDQREFTERNLNDTRYATTVVYNMILQYLYLEPYNCDGKTKQVYAVNGAVTAYLRKRWGLNKKDRTNDRHHAMDAVVIACCTDEMIAKVTKYMQDRETAYSKNFRIADEETGEILTRSNFTREQYDEAYGVRFPVPWETFREEIDLRIFNDDPFGYLMKDRNLQIKIDYPDWMYGEEESPVAKGKYINYIRPMFVSVACSHKATGRAHEETIRSAKYHDSDSLVISKKALKDLKLNKDNEIKDYYNKECDPLLYEALRNRLLEYNGDGKKAFAEEFHKPKADGTDGPVVKSVKVIEKKTTGVQINHGLAGNGNMVRVDLYQKEGKYYAVPIYISDMVKKEIPRKAATGGKQYKDWRVMNPDDFLFSVYPRDLLHLKKWKPFNDGLSNDIYMYFAGLDPASASFAVTAHDSSISLRGIGIQNLELIEKCQVDMLGEIHVCRQ

SEQ ID NO: 23387 - protein, 1092 aa, unidentified
  REGION 1..1092: note = Cas Enzyme sequence
MLLKRIEDNPNNSLKNIVFYRQDYLDEFERIWTVQSKYHTELTHELKKRLRDIIIFYQRPLKSQKGLISLCELETKDIEVAIDGVKKMKNIGPRVCPRSSPLFQEFKIWQTINNIFVNGAALDDEDKSVIAKELMFKDKLKDSDLLKLLFKTTKGQSVNFKEVDGNRTMATLMKACFKIAENLGYDDIGLSKLSSEDQMVRIEGIFKEQGFKTGFLHFDSSLASPEFENQDSYRLWHLLYSYEGDKSASGNESLVKCIMDLCSMDEGSAKILATCTFLPDYGSLSAKAMRKILPYMKDGLEYTAACAMAGYRHSKRSLTKEELDTKEYSDRLSLLPKNSLRNPVVEKILNQMINVVNSVIDVYGKPDEIRIEMARELKKSAKEREEAQRDIASSTAESQKVIEILKGEPFFIQFPTRNDIIRYRLYQELAQNGFKTLYSNTYIPKDKLFSKEFDIEHIIPQALIFNDSFANKTLESRQCNLEKGKETAMDYVKSKYDETGVQAYCDRVNGLIGKGISKTKAKWLLMEGKDIPEDFINRELRDSQYIAKKAREILESLVKFVVPTTGSVTARLREDWQLVNVMQELNWEKYARLGLTGVREDKDGRRIPFIQDWTKRNDHRHHAMDALTIAFTRRQFIQYLNHLNSKIDVVSWDKKDLDLRDYDLEDIKFGNLSAGDRYGIVKALQDKFLYKDGNDKYRFVPPIPLDEFRRQAKEQLSDILISFKAKNKVCTRNVNVTKNKGGANRKTQLTPRGPLHNETIYGSSLEYVTKENEKIGSSFDTERITTVCKKKFRDALARRLEEFGGDPKKAFTGKNSPEKNPIWVDEHHSEQVPAKVRTVTMGQRFTGRKPIDATLKIEKVIDKRIREILQARLDEFDGKAAKAFSNLDENPIWLNKEKGIAIKRVTVSGPANPVPVRFKRDKDGKPIIDDAGKTIGADFVTPGNNHHIAIFRDSSGKLQEHPVSFLEATIAKSHGIDVIDRNYNKDEGWEFLFTLKQNEYFVFPNSETGFNPLDYDLTDHRNYAEISPNLYRVQSISTNDYFFRHHLETTSEKNNSLYGITWKRIRNASALEGLVKVRIDNLGRIVAVGEYD

SEQ ID NO: 23388 - protein, 1504 aa, unidentified
  REGION 1..1504: note = Cas Enzyme sequence
MKNILGLDLGTNSIGWAVVNGSVNDNGSEQLVKIQASGSRIIPMDAAMIGDFNKGNSISQTAERTRLRGIRRLSERYLLRRERLHRILDILGFLPSHFAQDLDRHGKIVKGKEPKLAWRKNEAGQFEFIFQDSFKEMLEDFKLNHPNLITDDKKVPYDWTIYYLRKKGLTSKISKEELAWILLNFNQKRGYYQLRGEEEEENNNKLVEFYALKVVAVEDSGEKKGKDIWYNVHLENGWVYRRTSNMPLDWVGKTKEFIVTTDLEKDGTPKKDKEGNVKRSFRAPKEDDWSLVKKKTEADIDQTHKTVGTYIYDTLLGNPSQKIRGRLVRTIERKYYKEELKLILDKQKEFHPELQDRALYAACVEELYTINEAHRNNIGNRDFTYLFLEDILFYQRPLKSKKSLIDNCPYEENHCLDKETGEIKSFPVKCIAKSHPLFQEFRLWQFIVNLRIYRKGLAQDVDVTNELLKTEEDYVALFDWLNGKKEIDQKAFLKYPLFGLKKEVENYRWNYVQDKPYPCNETRSSMLARLEKCDISIEFLTKENEEALWHILYSVEDKNEIVKALQKFADKHDLNASFVDVFRKFPPFKKEYGSYSAKAIKKLLPLMRMGKYWSENSIDKGTRERIDKIITGEYDEKIENRVREKAIHLADVSDFRGLPLWLVCYIVYGRHSEAKEITQWKSPADIDSYLKSFKQHSLRNPIVEQIIIETLRVVRDIWKQVGNIDEIHVELGREMKNPADKRKKMTQQMSENENTNLRIKYLLTEFLNPEYEVENVRPYSPSQQDILRIYEEGVLNSVSDLPEEISDILKKFTETDLKKRPSRSEILRYKLWLEQKYRSPYTGEVIPLGKLFTPAYEIEHVIPQSCYFDDSFSNKVICEAEVNKLKSNLLGHEFIVKHHGEIVELPFGKKVRIFTVDEYEQFVKDNYSRTRGKMKKLLMDDIPEEFVTRQLNDSRYISKVVKSLLSNIVREKGEEEAISKNVIPCTGGVTDRLKKDWGINEVWNKIILPRFQRLNELTGTNKFTTKNVGIQEIPTMPLELQKGFNKKRIDHRHHAMDAIIIACANRNIINYLNNESATAKAELSRYDLQKMLCDKAKTDNNGNYKWVIRKPWASFTQDTYLALENIIVSFKQNLRVINKATNHFLHYNEEGKKIFVKQGKGDNWAIRKSMHKDTVFGEVNLRRIKTVALNEAMKNPQSIVVKDFKRKLLELWNLGFDAKRIKKYFEDNRETWSDINLSKIEVYYFSKDTKDRFFATRKPLDTSFDRKKIENNITDTGIQKILLRHLELKDNNPDIAFSPDGIDEMNRNIIQLNNGKYHQPIIKVRWYEQADKFAVGQTGNKSSKFVEAAKGTNLFFAVYESNILDKKTNTIIKKRNYATIPLNVAIERQKQGLSVAPEDENGNDPIFVLSPNDLVYLPTDDELANGIIAQPLDRGRIYKMVSCTGNEGHFIPARIANPILQTIELGSNNKAQKAWTDEMIKEICMPIKVDRLGNVLESSSSYKK

SEQ ID NO: 23389 - protein, 1535 aa, unidentified
  REGION 1..1535: note = Cas Enzyme sequence
MKNVLGFDLGTNSIGWAVVQEKYNESNILIKQILGAGSRIIPMDAAQLGDFAKGNTISQTKDRTQFRGVRRLRERCLLRRERLLRILDIMGFLPQHFSNALTRYGKFKDADEEPKIAWRKDNEGKMHFLFADSFNEMIEEFRSVQPELLKRGMKVPYDWTLYYLRKKALRETVTPFELAWIILNFNQKRGYYQLRGEEEGEADNSKCEEYLAQKVVDVIDTGEKKGKSTWFDIVLENGMVYHCSAEIKPDWIGKTKEFIVTTQFNKDGNPKKDKKGNIKMSLRMPNENDWNLQKKKAEKDIDESSMTVGEYIYNALLHNPKQKIKGKLVRVVERKYYKNELQKILESQKRFIPQLSDSALYEKCIKELYQSNEAYRNSISTRNDFTYLFVDNIIFYQRPLKSKKSLIDNCPYESLTYTKDGEEHKAPVKCIAKSHPLYQEFRLWQFISNLRIYQRQKQVGDKVKLDVDVTDEFLPTDDRREALFDYLNDKTEIKQDVLLKEFFNMKKPKGKDSVYPYRWNYVEDKSYPCNVTRGKILAKLNKAGVSADFLSSNGNEESLWHILYSVEDKGELRKALARFAAKNGLDNAFTEALADIEPYKKEYGAYSAKALKKLLPLMRLGKYWNYDNIAPATKARISKIIDGEYDDNIRNRVREKAMSLTSASQFQGLPLWLACYIVYDHHSERADSGRWSSPEDIDKYLSDFKQHSLRNPIVEQVVTETLRTVRDIWKKYGEISEIHVELGREMKNPADKRSKMNRRMLENENANMRAKLLLTEFMNPEFGIENVRSYSPSQQELLRIYEDGAISNAGSEIDDEISDIMNRLSQVDVKKQPTASEVKRYILWLEQNYRSPYTGQMIPLAKLFTPAYEIEHVIPQSRYFDDSFSNKVICEAEVNKLKDRMLGYEFIKQHKGEKVSLCMGGTVEILSPEEYVRHVESQYKNNKAKMRKLLMDDIPDEFINRQLNDSRYISKLIISLLSNIVREEGEEEATSKNVISCNGSITDRLKKDWGINDVWNHIILPRFRRLNELTGTDKFTTSNKEGHEVPDMPLELQKGFNKKRIDHRHHAMDAIVIACTTRAHVNLLNNEAAMSKNNANRIQLSKKLRRYESVEIEKDGIRKQISVAKEFKKPWEGFTADVERTLRDIVVSFKQNLRVINKTTNYYQHFKDGKKVYSPQSKGDSWAIRKSMHKETVFGEINLRRIKEVSLKEAMKRTKDIADKELRSKIVELMALQYNEKKIKQYFSDNKDEWSDVNPKKIKIHYFTKETNERFFATRKPLDTSFDKKKIKTQVADTAIQKILLNHLSAHGDKAETAFSPDGIDEMNRNIIELNNGKFHQPILKVRIYVKADKFAVGLQGNKKKKFVEAAKGTNLFFAIYTEEQIDEKTGEVFFKRTYNTIPLKVVIDREKRGLSPAPEDENGASPKYVLSPNDLVYIPTEEERKTNRINLPLDKERIYRFTDGCDNTANFAPANAASLIFSLRKDEAESFCKGDIIIQNEFGLGSPQSKNQRALTGEMIKEICIPISINRIGEITLR

SEQ ID NO: 23390 - protein, 1340 aa, unidentified
  REGION 1..1340: note = Cas Enzyme sequence
RKKGLTSKISKEELAWILLNFNQKRGYYQLRGEEEEENNNKLVEFYALKVVAVEDSGEKKGKDIWYNVHLENGWVYRRTSNMPLDWVGKTKEFIVTTDLEKDGTPKKDKEGNVKRSFRAPKEDDWSLVKKKTEADIDQTHKTVGTYIYDTLLGNPSQKIRGRLVRTIERKYYKEELKLILDKQKEFHPELQDRALYAACIEELYPINEAHRNNVGNRDFTYLFLEDILFYQRPLKSKKSLIDNCPYEENQGLDKETGEIKSFPVKCIAKSHPLFQEFRLWQFIVNLRIYRKDLAQDVDVTNELLKTEEDYVALFDWLNGKKEIDQKAFLKYPVFGLKKEIENYRWNYVQDKPYPCNETRLLMLARLEKCDISIEFLTKENEEALWHILYSVEDKNEIVKALQKFADKHDLNASFVDVFRKFPPFKKEYGSYSAKAIKKLLPLMRMGKYWSEDSIDKGTRKRMDKIITGEYDEKIENRVREKVIHLADVSDFRGLPLWLVCYIVYGRHSEAKEITQWKSPADIDSYLKSFKQHSLRNPIVEQIIIETLRVVRDIWKQVGNIDEIHVELGREMKNPADKRKKMTQQMSENENTNLRIKYLLTEFLNPEYEVENVRPYSPSQQDILRIYEEGVLNSVSDLPEEISDILKKFTETDLKKRPSRSEILRYKLWLEQKYRSPYTGEVIPLGKLFTPAYEIEHVIPQSCYFDDSFSNKVICEAEVNKLKSNLLGHEFIVKHHGEIVELPFGKKVRIFTVDEYEQFVKDNYSRTRGKMKKLLMDDIPEEFVARQLNDSRYISKVVKSLLSNIVREKGEEEAISKNVIPCTGGVTDRLKKDWGINEVWNKIILPRFQRLNELTGTNKFTTKNVGIQEIPTMPLELQKGFNKKRIDHRHHAMDAIIIACANRNIINYLNNESATAKAELSRYDLQKLLCDKAKTDNNGNYKWVIRKPWASFTQDTYLALENIIVSFKQNLRVINKATNRFLHYNEEGKKIFVKQGKGDNWAIRKSMHKDTVFGEVNLRRIKTVALNEAMKNPQSIVVKDFKRKLLELWNLGFDAKRIKKYFEDNRETWSDINLSKIEVYYFSKDTKDRFFATRKPLDTSFDRKKIENNITDTGIQKILLRHLELKDNNPDIAFSPDGIDEMNRNIIQLNNGKYHQPIIKIRWYEQADKFAVGQTGNKFSKFVEAAKGTNLFFAVYESNILDKKTNTIIKKRNYATIPLNVAIERQKQGLPVAPEDENGNDPIFVLSPNDLVYLPTDDELANGIIAQPLDRGRIYKMVSCTGNEGHFIPARIANPILQTIELGSNNKAQKAWTDEMIKEICMPIKVDRLGNVLESSSSYKK

SEQ ID NO: 23391 - protein, 1504 aa, unidentified
  REGION 1..1504: note = Cas Enzyme sequence
MKNIVGLDLGTNSIGWAVVNGSVNDDGSEQLVKIQASGSRIIPMDAAMIGDFNKGNSISQTAERTRLRGVRRLSERYLLRRERLHRILDILGFLPFHFAQDLDRHGKIVKGKEPKLAWRKNEAGQFEFIFQDSFKEMLEDFKLNHPNLITDDKKVPYDWTIYYLRKKGLTSKISKEELAWILLNFNQKRGYYQLRGEEEEENNNKLVEFYALKVVAVEDSGEKKGKDIWYNVHLENGWVYRRTSNMPLDWVGKTKEFIVTTDLEKDGTPKKDKEGNVKRSFRAPKEDDWSLVKKKTEADIDQTHKTVGTYIYDTLLGNPSQKIRGRLVRTIERKYYKEELKLILDKQKEFHPELQDRALYAACIEELYPINEAHRNNVGNRDFTYLFLEDILFYQRPLKSKKSLIDNCPYEENQGLDKETGEIKSFPVKCIAKSHPLFQEFRLWQFIVNLRIYRKDLAQDVDVTNELLKTEEDYVALFDWLNGKKEIDQKAFLKYPVFGLKKEIENYRWNYVQDKPYPCNETRLLMLARLEKCDISIEFLTKENEEALWHILYSVEDKNEIVKALQKFADKHDLNASFVDVFRKFPPFKKEYGSYSAKAIKKLLPLMRMGKYWSEDSIDKGTRKRMDKIITGEYDEKIENRVREKVIHLADVSDFRGLPLWLVCYIVYGRHSEAKEITQWKSPADIDSYLKSFKQHSLRNPIVEQIIIETLRVVRDIWKQVGNIDEIHVELGREMKNPADKRKKMTQQMSENENTNLRIKYLLTEFLNPEYEVENVRPYSPSQQDILRIYEEGVLNSVSDLPEEISDILKKFTETDLKKRPSRSEVLRYKLWLEQKYRSPYTGEVIPLGKLFTPAYEIEHVIPQSCYFDDSFSNKVICEAEVNKLKSNLLGHEFIVKHHGEIVELPFGKKVRIFTVDEYEQFVKDNYSRTRGKMKKLLMDDIPEEFVTRQLNDSRYISKVVKSLLSNIVREKGEEEAISKNVIPCTGGVTDRLKKDWGINEVWNKIILPRFQRLNELTGTNKFTTKNVGIQEIPTMPLELQKGFNKKRIDHRHHAMDAIIIACANRNIINYLNNESATAKAELSRYDLQKMLCDKAKTDNNGNYKWVIRKPWASFTQDTYLALENIIVSFKQNLRVINKATNHFLHYNEEGKKIFVKQGKGDNWAIRKSMHKDTVFGEVNLRRIKTVALNEAMKNPQSIVVKDFKRKLLELWNLGFDAKRIKKYFEDNRETWSDINLSKIEVYYFSKDTKDRFFATRKPLDTSFDRKKIENNITDTGIQKILLRHLELKDNNPDIAFSPDGIDEMNRNIIQLNNGKYHQPIIKVRWYEQADKFAVGQTGNKSSKFVEAAKGTNLFFAVYESNILDKKTNTIIKKRNYATIPLNVAIERQKQGLSVAPEDENGNDPIFVLSPNDLVYLPTDDELANGIIAQPLDRGRIYKMVSCTGNEGHFIPARIANPILQTIELGSNNKAQKAWTDEMIKEICMPIKVDRLGNVLESSSSYKK

SEQ ID NO: 23392 - protein, 1139 aa, unidentified
  REGION 1..1139: note = Cas Enzyme sequence
GWAVIRENSEGQELVAMGSRVVSLTAAELSSFTQGNGVSINSQRTQKRTQRKGYDRYQLRRTLLRNKLDTLGMLPDDSLSHLPKLQLWGLRAKAVTQRIELNELGRVLLHLNQKRGYKSIKSDFSGDKKITDYVKTVKTRYDELKEMRLTIGELFFRRLTENAFFRCKEQVYPRQAYVEEFDCIMNCQRKFYPDVLTDETIRCIRDEIIYYQRPLKSCKYLVSRCEFEKRFYLNAAGKKTEAGPKVAPRTSPLFQVCRLWESINNIVVKDRRNEIVFISAEQRAALFDFLNTHEKLKGSDLLKLLGLSKTYGYRLGEQFKTGIQGNKTRVEIERALGNYPDKKRLLQFNLQEESSSMVNTETGEIIPMISLSFEQEPLYRLWHVLYSIDDREQLQSVLRQKFGIDDDEVLERLSAIDLVKAGFGNKSSKAIRRILPFLQLGMNYAEACEAAGYTHSNNYTKAENEAHALLDRLPAIKKNELRQPVVEKILNQMVNVVNALMEKYGRFDEIRVELARELKQSKEERSNTYKSINKNQRENEQIAKRIVEYGVPTRSRIQKYKMWEESKHCCIYCGQPVDVGDFLRGFDVEVEHIIPKSLYFDDSFANKVCSCRSCNKEKNNRTAYDYMKSKGEKALSDYVERVNTMYTNNQISKTKLQNLLTPVDKISTDFIDRQLRESQYIARKAKEILTSVCYNVTATSGSVTSFLRHVWGWDTVLHDLNFDRYKKVGLTEVIEVNHRGSVIRREQIKDWSKRFDHRHHAIDALTIACTKQAYIQRLNNLRAEEGPDFNKMSLERYIQSQPHFSVAQVREAVDRILVSFRAGKRAVTPGKRYIRKNRKRISVQSVLIPRGALSEESVYGVIYVWEKDEQGHVIQKQRAVMKYPITSITREMLDKEKVVDKRIHRILSGRLAQYNDNPKEAFAKPVYIDKECRIPIRTVRCFAKPAINTLVPLKKDDKGNPVAWVNPGNNHHVAIYRDEDGKYKERTVTFWEAVDRCRVGIPAIVTQPDTIWDNILQRNDISENVLESLPDVKWQFVLSLQQNEMFILGMNEEDYRYAMDQQDYALLNKYLYRVQKLSKGDYSFRYHTETSVEDKYNGKPNLKLSMQMGKLKRVSIKSLLGLNPHKVHISVLGEIKKIS

SEQ ID NO: 23393 - protein, 1336 aa, unidentified
  REGION 1..1336: note = Cas Enzyme sequence
MPYSGDYLIGLDMGTSSVGWAVTDMEYHILKQKGKALWGIRLFDAAQTAAGRRVFRTNRRRNERKKQRIQWLQQLFDAEIAKADPAFFQRLKESKFTEEEKQGVEGKYTLFSEETLTDQTYYETYPTIYHLRKALLEETGPFDVRLVYLALHHIIKNRGHFLLETNVSEERESFSQAFHTLQEYLQEQYELDFSLPNAEAFAQHLKERKRSITAKKKILKEDAGLTKADGMQNAIVDLLAGAKVKLAVLFQDDTLKNAEPGSLSLDMEWDEEALAAVLGEKMELLLAIKAVYDWAILDDILNGQEYLSQAKVQSYEKHKQDLALLKQTVKTELPEQYAEVFHAEREKLDNYAAYSGTGSYHCTYEAFRKYLNNLFKRSRGSQAVETILTELEQGTFLPKQRSKPNGVIPNQVHRKELVDILARAAAYLPLLTEKDQDGISVSQKILAIFDFRIPYYVGPLNPTSPHAWVKRSDAPILPWTFEQVVNLEESAEGFITRMTAKCTYLKEDVLPKDSLLYSEFMVLNELNNLRINGKRVSPELKQQIYRDLFLQKKTVKRKQLEDYLKREGILQRGDEVSGIDGDFKASLRSYQDFAAILQKTGNTEMVEDLIRRIVLFGEDRKLLKSYVQRTYGEVLSPEDIQYVCQKRYTGWGRLSQEFLTKLYHVDDKTGEAISILEMMRRTNCNLMELLSSRYQYLDQIQAYNQEHYGATTQSVKEMVEASYAPPSIKRAILQTVAIVEELVKIMGHPPKRIFVEMARGEEEKKRTVSRKATLEELYKSCKKEAPELLGQLEGCSDQMLRRDKLYLYYTQMGKCMYSGEPIDLERLDTDYDIDHIYPQSKVKDDSLDNRVLVKRELNAAKADEYPIVAEIRDKMRPFWTYLKGKGLISSRKYDRLTRATTFLDEELAGFISRQLVETRQSSKIVAEILGKQYGKPTEIVYVKAGTVADFRQKADRNEKGEQVSYDFVKCREVNDYHHAKDAYLNIVVGNVYHLKFTKDPLHFIKSEAGETYSLKRVFDYRVVRDGETAWLPGEEGSISTVRKTIRKNNILFTQLTYKATGGFYDQTIQKKGGGQAPIKSRDPRMRIERFGGYNKLTGAYFCLVEHGTEKKRIRSLEAVYLMYERMYQAKPEEYCKSILGLTEPKVLLKCIKIGSLLSYDGFLMHICGRSGIQIIYHNANELIVSPEMQGYIKAVGKFLKRMRESAEKPKVTSYDKVNEQDNLKLYDVYCEKLQAHYGKMHTTPKQVIQENRDQFEGLDLYQQLETLGQILNLFTCNALPANLSAIGGSKKTGILLTTKNLPVGKAHTMKLIHQSVTGVFEQEIDLLGEDLTPHRR

SEQ ID NO: 23394 - protein, 1407 aa, unidentified
  REGION 1..1407: note = Cas Enzyme sequence
MKKILGLDLGTNSIGWAVVCHSDTDGQTERKWIEMAGSRIIPMDAAILGDFDKGNSKSQTSERTGFRGIRRLRERVLLRRERLHKVLKLIGFLPQHYIDSLDFSNHSGKFQLGTEVKLPWRKNEIGKYEFLFQNSFNEMLADFAKKQPELVAMGRKVPYDWTIYYLRKKALSEKITKEELAWILLNFNQKRGYYQLRGEEEEEKKNRLEDFYALKVVEVEQTDDKKGKDIWYNVHLENGWIYRRSSNVPLDWKDKIKEFIVTTELNEDGTPKVDKDGCVKRSFRMPKEDDWKLLKKKTEADIERSHKTIGCYIYDTLLQSPQQKIKGKLVRTIERKFYKDELKLILDKQQAFHPELQDRELYKACLDVLYPMNVAHKNNVANRGFVYLFMEDILFYQRPLKSKKSLIDNCPYEENQYIDVTTGEIKKAPIKCIAKSHPLYQEFRLWQFIANIRIYQKEKKVDGKLLTDIDVTTEYLSSKDDYVALYEWLCVRKEIEQKTFLKYPAFGLKKEIENYRWNYVEGKSYPCNETRSLILHYLEKAGISSTFLSTKIEESLWHILYSVEDRIELETALRTFASKYQLSCNFVEVFKKFPPFKKEYGAYSAKAIKRLLPLMRMGKYWKVDAIDGNTAERIEKILSGECDEKILNKVREKTIHLSETSDFQGLPLWLACYVVYNRHSEGKEVAKWKSPEDIDIYLKSFKQHSLRNPIVEQVITETLRVVRDIWKRVEQIDEIHVELGREMKNPSEKRRQMTERMLENENANIRIKALLTEFMNPEYEMENVRPYSPSQQEILRIYEDTVLNGAGDIPEDIEIILKKFKENDIKKRPGKSDFLRYKLWLEQQYRSPYTGEIIPLGKLFTTAYEIEHVIPQSRYFDDSFSNKVICESEVNKLKDNMLGYEFIKKHAGEIVELGFGKSVKIFSVEAYERFVGENYYKAGSKKSKLLMDDIPEKFIERQLNDSRYISRVVKGLLSNVVREEDANGEYESEAISKNVIVCSGSVTDRLKKDWGVNDVWNNIVYSRFERLNRLTESQQFGHWENREGKRFFQTELPLEYQKGFSKKRIDHRHHAMDAIIIACATRNHVNYLSNESASKHARIARYDLQRMLCDKSKADGGGNYKWIIQKPWATFTQDVYRTLLDIIVSFKQNLRVINKMTNYYQAYDDAGKKVFKKQKKGDSWAIRKSMHKDTVFGQVNLRKIKEVRLSVALESPEKIVDKKIKEKVLQLFAYQYDKKKIEKYFKENASLWKEVNLAKIPVYYFTDESSELLVAVRKNLDTGFTEKKIRESVTDTGIQKILLNHLSNKGDKPELAFSPDGIDEMNRNLVILNGGKPHQPIYKVRVCEPLGNKFKVGTNGNKSAKYVEAAKGTNLFFAIYETDAGKRTYETIPLNVVIERKNGLASSSGEE

SEQ ID NO: 23395 - protein, 1380 aa, unidentified
  REGION 1..1380: note = Cas Enzyme sequence
  REGION 1375..1378: note = misc_feature - Xaa can be any naturally occurring amino acid
LIIYFIFEKIVNTILVMKKIVGLDLGTNSIGWALINAYINKEHLYGIEACGSRIIPMDAAILGNFDKGNSISQTADRTSYRGIRRLRERHLLRRERLHRILDLLGFLPKHYSDSLNRYGKFLNDIECKLPWVKDETGSYKFIFQESFKEMLANFTEHHPILIANNKKVPYDWTIYYLRKKALTQKISKEELAWILLNFNQKRGYYQLRGEEEETPNKLVEYYSLKVEKVEDSGERKGKDTWYNVHLENGMIYRRTSNIPLDWEGKTKEFIVTTDLEADGSPKKDKEGNIKRSFRAPKDDDWTLIKKKTEADIDKIKMTVGAYIYDTLLQKPDQKIRGKLVRTIERKYYKNELYQILKTQSEFHEELRDKQLYIACLNELYPNNEPRRNSISTRDFCHLFIEDIIFYQRPLKSKKSLIDNCPYEENRYIDKESGEIKHASIKCIAKSHPLYQEFRLWQFIVNLRIYRKETDVDVTQELLPTEADYVTLFEWLNEKKEIDQKAFFKYPPFGFKKTTSNYRWNYVEDKPYPCNETHAQIIARLGKAHIPKAFLSKEKEETLWHILYSIEDKQEIEKALHSFANKNNLSEEFIEQFKNFPPFKKEYGSYSAKAIKKLLPLMRMGKYWSIENIDNGTRIRINKIIDGEYDENIRERVRQKAINLTDITHFRALPLWLACYLVYDRHSEVKDIVKWKTPKDIDLYLKSFKQHSLRNPIVEQVITETLRTVRDIWQQVGHIDEIHIELGREMKNPADKRARMSQQMIKNENTNLRIKALLTEFLNPEFGIENVRPYSPSQQDLLRIYEEGVLNSILELPEDIGIILGKFNQTDTLKRPTRSEILRYKLWLEQKYRSPYTGEMIPLSKLFTPAYEIEHIIPQSRYFDDSLSNKVICESEINKLKDRSLGYEFIKNHHGEKVELAFDKPVEVLSVEAYEKLVHESYSHNRSKMKKLLMEDIPDQFIERQLNDSRYISKVVKSLLSNIVREENEQEAISKNVIPCTGGITDRLKKDWGINDVWNKIVLPRFIRLNELTESTRFTSINTNNTMIPSMPLELQKGFNKKRIDHRHHAMDAIIIACANRNIVNYLNNVSASKNTKITRRDLQTLLCHKDKTDNNGNYKWVIDKPWETFTQDTLTALQKITVSFKQNLRVINKTTNHYQHYENGKKIVSNQSKGDSWAIRKSMHKETVHGEVNLRMIKTVSFNEALKKPQAIVEMDLKKKILAMLELGYDTKRIKNYFEENKDTWQDINPSKIKVYYFTKETKDRYFAVRKPIDTSFDKKKIKESITDTGIQQIMLRHLETKDNDPTLAFSPDGIDEMNRNILILNKGKKHQPIYKVRVYEKAEKFTVGQKGNKRTKFVEAAKGTNLFFAIYETEEIDXXXXKK

SEQ ID NO: 23396 - protein, 1474 aa, unidentified
  REGION 1..1474: note = Cas Enzyme sequence
MDAAVLGDFAKGNTISQTKDRTQYRGVRRLRERCLLRRERLFRVLDIMGFLPQHFSNALTRYGKFKDADEEPKIAWRKDDEGKMHFLFADSFNEMIEEFRSVQPELLKRGMKVPYDWTLYYLRKKAMREAVTPFELAWLILSFNQKRGYYQLRGEEEGEADNSKCEEYLAQKVVDVIDTGEKKGKSTWFDIVLENGMVYHRSAEIKPDWIGKTKEFIVTTQFDKDGNPKKDKEGNVKMSFRMPNENDWNLQKKKAEKDIDESGMTVGEYIYNALLHNPKQKIKGKLVRVVERKYYKNELQKILESQKRFIPQLSDSALYEKCIKELYQSNEAYRNSISTRNDFTYLFVDNIIFYQRPLKSKKSLIDNCPYESLTYTKDGEEHKAPVKCIAKSHPLYQEFRLWQFISNLRIYQRQKQVGDKVKLDVDVTDEFLPTDDRREALFDYLNDKTEIKQDVLLKEFFNMKKPKGKDSVYPYRWNYVEDKSYPCNVTRGKILAKLNKAGISADFLSSNGNEESLWHILYSVEDKGELRKALARFAAKNGLDDAFTEALADIEPYKKEYGAYSAKALKKLLPLMRLGKYWNYDNIAPATKARISKIIDGEYDENIRNRVREKAMSLTSASQFQGLPLWLACYIVYDRHSERADSGRWPSPEDIDKYLSDFKQHSLRNPIVEQVVTETLRTVRDIWKRYGEISEIHVELGREMKNPADKRSKMNRRMLENENANMRAKLLLTEFMNPEFGIENVRSYSPSQQELLRIYEDGAISNAGSEIDNEISDIMSRLSQVDVKKQPTASEVKRYILWLEQNYRSPYTGQMIPLAKLFTPAYEIEHVIPQSRYFDDSFSNKVICEAEVNKLKDRMLGYEFIKQHKGEKVSLSMGGTVEILSPEEYVRHVESQYKNNKAKMRKLLMDDIPDEFINRQLNDSRYISKLIISLLSNIVREEGEEEATSKNVISCNGSITDRLKKDWGINDVWNHIILPRFRRLNELTGTDKFTTSNKEGHEVPDMPLELQKGFNKKRIDHRHHAMDAIVIACTTRDHVNLLNNEAAMSKNNANRIQLSKKLRRYESVEIEKDGIRKQISVAKEFKKPWEGFTADVERTLRDIVVSFKQNLRVINKTTNYYQHFKDGKKIYSPQSKGDSWAIRKSMHKETVFGEINIRRIKEVSLKEAMKRTKDIADKELRSKIVELMALQYNEKKIKQYFSDNKDEWSDVNPKKIKIHYFTKETNERFFATRKPLDTSFDKKKIKTQVADTAIQKILLNHLSAHGDKAETAFSPDGIDEMNRNIIVLNDGKFHQPILKVRIYEKADKYAVGQQGNKKKKYVETAKGTNLFFAIYAEEKINEKTGDIVITRTYDSIPLNVVIDREKRGLSPAPENENGASPKYVLSPNDLVYVPNEEERETGRICEPLDKERIYKMVSCTGKECHFVPYSSAKPIYDKVEYFSLNKMGRALSGEMIKEICIPISINRIGEITLR

SEQ ID NO: 23397 - protein, 1432 aa, unidentified
  REGION 1..1432: note = Cas Enzyme sequence
MKRILGLDLGTSSIGWALVNESERAEEISSIVQLGVRVNPLTVDEMQNFEKGKSITTNADRTLKRSMRRNLQRYKLRRDVLIKLLKKVGFITDKTILSEQGNRTTFETYRLRAKAAEEEISLEELARVLLMINKKRGYKSSRKAKGEEDGSLIDGMEIAKKLYDEDLTPGQLCLQLLESGKKTFPDFYRSDLQDEFDRIWNFQKQFNPQSYCDTAKEEIKGKNKSQTWAILAKYFTWTKEVSVWNENEAKTENQEKEYRLVGLKRTVKGEELKKENYRWRVQALTERLDLEEIAVVLQEINGQISASSGYLGAISDRSKVLYFNHQTVGQYQMAELNKNSNISLRNMVFYRQDYLDEFNAIWEKQAEFHKELTPELKKEIRDIIIFYQRRLKSQKGLVSFCEFENREVFVEKDGKKQTKVIGCRVIPRSHPLFQEFKIWQTLNNIEVFVGEKRKKRKQTNVSSGLFDNTVDTLVTEGRRFLYQEEKEILAKELSCKKDLTKTEVLKLLFENPQELDMNFKQIDGNFTGFALFSAYSKMIEKYGYEPLDFKKPADEIIAQLKAVFMDLEWNTDLLSIDLDKEGKNLEMQPYFRLWHLLYSFEGDNTPTGNGKLIEKIMQLCRVEKEYAIELANISFQDDYGSLSAKAIKKILPYLKEGNQYDVACEYAGYRHSKSSLTKEEIENKALKDKLDILPKNSLRNPVVEKILNQMVNVINAVIDAYGRPDEIRVELARELKKSAKEREELTKAIAKKTREHDEIRKLLQSEFGMIHVSRNDIIRYKLYEELKENGYKTLYSNQYIPKEKLFSKEIDIEHIIPQARLFDDSLSNKTLEYRAINIEKGNKTAYDFVKDKYGEEGLQGYLNRCENICKDRKAKLRKLKMEQSDIPDGFIDRDLRNTQYIAKKALAMLNDICRRVVATTGSITDKLREDWQLVDVMKELNLTKYEALGLVEIFEDKDGRIIKRIKDWTKRNDHRHHAMDALTVAFTKDVFIQYFNNKNAAWESDCKEHMNIVGIKKRYFESGKAVPPMPLGQFRAEAKWHLENLLVSIKAKNKVVTTNVNCIRKKGGISKKHQQTPRGQLHLETIYGSHRQYVTKMEKVNASFDAAKIATVSRQNYRNALLKRLEAFGNDPKKAFTGKNSLEKNPIYLDRAQTMQMPDRVQIVELEMVYTIRKPIDPSLNVDKVVDTKVRAILEQRLKEYGGDAKKAFVNLDENPIWLNREKGISIKRVSIRGINNAQSLHMKKDKNGNPILDENGKQIPVDFVNTGNNHHVAIYRKPVLDKKGQVMFDEDGNLMYELDEVVVSFFEAVTRANLGLPIINKDYRRSEGWQFLFSMKQNEYFVFPNEKTGFNPMEIDLLDPNNYAVISPNLFRVQKIGSNDYTFRHHLETTILNSINELKFITWIRCGKSGIKDIIKVRINHIGQIVFVGEY

SEQ ID NO: 23398 - protein, 1154 aa, unidentified
  REGION 1..1154: note = Cas Enzyme sequence
MKNILGLDLGSSSIGWAVIRENSEEQELVAMGSRVVSLTAAELSSFTQGNGVSINSQRTQKRTQRKGYDRYQLRRTLLRNKLDTLGMLPDDSLSYLPKLQLWGLRAKAVTQRIELNELGRVLLHLNQKRGYKSIKSDFSGDKKITDYVKTVKTRYDKLKEMRLTIGELFFRRLTENAFFRCKEQVYPRQAYVEEFDCIMNCQRKFYPDILTDETIRCIRDEIIYYQRPLKSCKYLVSRCEFEKRFYLNAAGKKTEAGPKVSPRTSPLFQVCRLWESINNIVVKDRRNEIVFISAEQRAALFDFLNTHEKLKGSDLLKLLGLSKTYGYRLGEQFKTGIQGNKTRVEIERALGNYPDKARLLQFNLQKESSSMVNTETGEIIPMISLSFEQEPLYRLWHVLYSIDDREQLQSVLRQKFGIDDDEVLERLSAIDLVKAGFGNKSSKAIRRILPFLQLGMNYAEACEAAGYNHSNNYTKAENEARALLDRLPAIKKNELRQPVVEKILNQMVNVVNALMEKYGRFDEIRVELARELKQSKEERSNTYKSINKNQRENEQIAKRIVEYGVPTRSRIQKYKMWEESKHCCIYCGQPVDVGDFLRGFDVEVEHIIPKSLYFDDSFANKVCSCRSCNKEKNNRTAYDYMKSKGEKALSDYVERVNTMYTNNQISKTKWQNLLTPVDKISTDFIDRQLRESQYIARKAKEILTSVCYNVTATSGSVTSFLRHVWGWDTVLHDLNFDRYKKVSLTEVIEVNHRGSVIRREQIKDWSKRFDHRHHAIDALTIACTKQAYIQRLNNLRAEEGPDFNKMSLERYIQSQPHFSVAQVREAVDRILVSFRAGKRAVTPGKRYIRKNRKRISVQSVLIPRGALSEDSVYGVIHVWEKDEQGHVIQKQRAVMKYPITSINREMLDKGKVVDKRIHRILSDRLAQYNDNPKEAFAKPVYIDKECRIPIRTVRCFAKPAINTLVPLKKDDKGNPVAWGNPGNNHHVAIYRDEDGKYKERTVTFWEAVDRCRVGIPAIVTQPDTIWDNILQRNDISENVLESLPNVKWQFVLSLQQNEMFILGMNEEDYRYAMDQQDYALLNKYLYRVQKLSKGDYSFRYHTETSVEDKYDGKPNLKLSTQIGKLKRVRSLEALFNLHPHKVHISVLGEIKEIS

SEQ ID NO: 23399 - protein, 1349 aa, unidentified
  REGION 1..1349: note = Cas Enzyme sequence
MYYLRKKGLTSKISKEELAWILLNFNQKRGYYQLRGEEEKKNDNVMIINSKVIDVVKAEKDKKYEKYWYNVLLENGLLYRAAFYNDISFWKGHTKEFVLKTIKLKSGGTKQELSFLPSFDEIEKMEKKQKDKMYFKIKLKTEADIDQAHKTVGTYIYDTLLGNPSQKIRGRLVRTIERKYYKEELKLILDKQKEFHPELQDRALYAACIEELYPINEAHRNNVGNRDFTYLFLEDILFYQRPLKSKKSLIDNCPYEENQGLDKETGEIKSFPVKCIAKSHPLFQEFRLWQFIVNLRIYRKDLAQDVDVTNELLKTEEDYVALFDWLNGKKEIDQKAFLKYPVFGLKKEIENYRWNYVQDKPYPCNETRLLMLARLEKCDISIEFLTKENEEALWHILYSVEDKNEIVKALQKFADKHDLNASFVDVFRKFPPFKKEYGSYSAKAIKKLLPLMRMGKYWSEDSIDKGTRKRMDKIITGEYDEKIENRVREKVIHLADVSDFRGLPLWLVCYIVYGRHSEAKEITQWKSPADIDSYLKSFKQHSLRNPIVEQIIIETLRVVRDIWKQVGNIDEIHVELGREMKNPADKRKKMTQQMSENENTNLRIKYLLTEFLNPEYEVENVRPYSPSQQDILRIYEEGVLNSVSDLPEEISDILKKFTETDLKKRPSRSEILRYKLWLEQKYRSPYTGEVIPLGKLFTPAYEIEHVIPQSCYFDDSFSNKVICEAEVNKLKSNLLGHEFIVKHHGEIVELPFGKKVRIFTVDEYEQFVKDNYSRTRGKMKKLLMDDIPEEFVARQLNDSRYISKVVKSLLSNIVREKGEEEAISKNVIPCTGGVTDRLKKDWGINEVWNKIILPRFQRLNELTGTNKFTTKNVGIQEIPTMPLELQKGFNKKRIDHRHHAMDAIIIACANRNIINYLNNESATAKAELSRYDLQKLLCDKAKTDNNGNYKWVIRKPWASFTQDTYLALENIIVSFKQNLRVINKATNRFLHYNEEGKKIFVKQGKGDNWAIRKSMHKDTVFGEVNLRRIKTVALNEAMKNPQSIVVKDFKRKLLELWNLGFDAKRIKKYFEDNRETWSDINLSKIEVYYFSKDTKDRFFATRKPLDTSFDRKKIENNITDTGIQKILLRHLELKDNNPDIAFSPDGIDEMNRNIIQLNNGKYHQPIIKIRWYEQADKFAVGQTGNKFSKFVEAAKGTNLFFAVYESNILDKKTNTIIKKRNYATIPLNVAIERQKQGLPVAPEDENGNDPIFVLSPNDLVYLPTDDELANGIIAQPLDRGRIYKMVSCTGNEGHFIPARIANPILQTIELGSNNKAQKAWTDEMIKEICMPIKVDRLGNVLESSSSYKK

SEQ ID NO: 23400 - protein, 1404 aa, unidentified
  REGION 1..1404: note = Cas Enzyme sequence
MKKLKQMSGPYSIGFELSSTAHGFVATDPNGNVLYHGKQPVMGTRVFKEGQHAAEARMPRTSRRGIQRRRGREHEMERVFAPVISSIDPDFFIRRRMSYKLGKIRFESDPIGFSYSRLFHSFPTLAHLDVALMEADSAMDPRLIFEAVANHVVRRGHFLLENQNVSSTNSDIATQVANYAEVLVSYFEDTLDERIELSLEALDINGNVTARELQKQFASAMCVSGEDIQKKTEKAQIKAIADLVAGYKADLTVLVPDAEKLPKVSISDGDALEEFLADSCPDSLVPVLMAAQALYTSWKLQGMLSYAPGKSLSHNQVAQHDVYGKQLRMLKDLALKYVAKQDANGNVDEDGFKDYVRFFGGPKREDGYRYDKVQVKKQDSPKNNMGYTAYNLNVLGYEEFAKRVELLFKDTDAVNDPQYKTMMEAFANHAFLRRIHTVDNAAIPYQLHVEVVNRIIDNQGRFYPWLIDAREHILKVLTSRIPYYVGPLDSTDHGKAGENGTRFAWVKRLTGHEDAFVSPWNYEDHIDIDTTAELFIRRMTGECSYLDGEDVLAKNSLLYEKYCFFNELASLSFTEDGDSWMPFDAGMRKAIYDAASDGKTMTVKRIESVLQRDFFIAHPHVRGTSNPKAMSSKRSNYAYFCRLFDVKALSASDMSMAEDLVLWNTVFEDRDILRRKILKTYGDLITEKAVDDFCHKRLSGWGKLSERLLTGIWADTASGDLCVMDVLEQGRPYGRYRGSSMNLMQILNDDVLGFKMEIKRLNDSHMQMAEGFDLNALPGSPALRRGVSQAMKVLDDIVSVAGKAPDRIYLKVTRTASNSRKGKRTAKRSDKIKQALKALDADAAVDLGAAKLLRELGMFDEKEINERIYLYFHQAGKCLYTGKAIDITRIASNDYYVDHVVPLAYRKDESLDNKVLVYAEASRYKSETLLVSPAVQRKMLPFWRMLRNAGLMSERKLNALIRTEISEGMLKSIIGRQFTENSWEAKLFTAAVAAKYPGTVVIPVKAGVIGAVRSRIGIPKSLKANQFYHAHDALLAAEVGRYMELAKPAFVHNRVKYEQYMRKIKLVDEENKKAPKSQLDFFAGGFFFDRVDKDTGEVYWDKDEEVERIYRACGWKNLRVTYAAFEDGGAFWKQTIYSPREKSKLIATKSDRPAEIYGGYSSQTFANFFVYEVMKKKVKQLRFGAVPAAIASKSDPDTYNAMLEMYARGLAKTAKEKFVRIVRARVLKNTMIELYGERFRIAGEKQVYPVRQMPLAIDEVYLLKGVETIAAAGNAGASAKIDFEKAAESLVGFWDLLLEKLPVNYPKLTVQLKLGSLKHPKDILAATSESEFPAIVYKIAEAEIQVMEQASGLRNMSDTKILGGNTFGGSLVFTFNKVLNDPKSKACFIDTTPAGHHEVKTKIW

SEQ ID NO: 23401 - protein, 1231 aa, unidentified
  REGION 1..1231: note = Cas Enzyme sequence
MKKILGLDLGTNSIGWAVVCHSDTDGQTERKWIEMAGSRIIPMDAAILGDFDKGNSKSQTSERTGFRGIRRLRERVLLRRERLHKVLKLIGFLPQHYIDSLDFSNHSGKFQLGTEVKLPWRKNEIGKYEFLFQNSFNEMLADFAKKQPELVAMGRKVPYDWTIYYLRKKALSEKITKEELAWILLNFNQKRGYYQLRGEEEEEKKNRLEDFYALKVVEVEQTDDKKGKDIWYNVHLENGWIYRRSSNVPLDWKDKIKEFIVTTELNEDGTPKVDKDGCVKRSFRMPKEDDWKLLKKKTEADIERSHKTIGCYIYDTLLQSPQQKIKGKLVRTIERKFYKDELKLILDKQQAFHPELQDRELYKACLDVLYPMNVAHKNNVANRGFVYLFMEDILFYQRPLKSKKSLIDNCPYEENQYIDVTTGEIKKAPIKCIAKSHPLYQEFRLWQFIANIRIYQKEKKVDGKLLTDIDVTTEYLSSKDDYVALYEWLCVRKEIEQKTFLKYPAFGLKKEIENYRWNYVEGKSYPCNETRSLILHYLEKAGISSTFLSTKIEESLWHILYSVEDRIELETALRTFASKYQLSCNFVEVFKKFPPFKKEYGAYSAKAIKRLLPLMRMGKYWKVDAIDGNTAERIEKILSGECDEKILNKVREKTIHLSETSDFQGLPLWLACYVVYNRHSEGKEVAKWKSPEDIDIYLKSFKQHSLRNPIVEQVITETLRVVRDIWKRVEQIDEIHVELGREMKNPSEKRRQMTERMLENENANIRIKALLTEFMNPEYEMENVRPYSPSQQEILRIYEDTVLNGAGDIPEDIEIILKKFKENDIKKRPGKSDFLRYKLWLEQQYRSPYTGEIIPLGKLFTTAYEIEHVIPQSRYFDDSFSNKVICESEVNKLKDNMLGYEFIKKHAGEIVELGFGKSVKIFSVEAYERFVGENYYKAGSKKSKLLMDDIPEKFIERQLNDSRYISRVVKGLLSNVVREEDANGEYESEAISKNVIVCSGSVTDRLKKDWGVNDVWNNIVYSRFERLNRLTESQQFGHWENREGKRFFQTELPLEYQKGFSKKRIDHRHHAMDAIIIACATRNHVNYLSNESASKHARIARYDLQRMLCDKSKTDGGGNYKWIIQKPWTTFTQDVYRTLLDIIVSFKQNLRVINKMTNYYQSYDDGKKVFKKQKKGDSWAIRKSMHKDTVFGQVNLRKIKEVRLSVALESPEKIVDKKIKEKVLQLFAISI

SEQ ID NO: 23402 - protein, 1119 aa, unidentified
  REGION 1..1119: note = Cas Enzyme sequence
LFLEDILFYQRPLKSKKSLIDNCPYEENQGLDKETGEIKSFPVKCIAKSHPLFQEFRLWQFIINLRIYRKDLAQDVDVTNELLKTEEDYVALFDWLNGKKEIDQKAFLKYPVFGLKKEIENYRWNYVQDKPYPCNETRSLMLARLEKCDISIEFLTKENEEALWHILYSVEDKNEIVKALQKFADKHDLNASFVDVFQKFPPFKNEYGSYSAKAIKKLLPLMRMGKYWSENSIDKGTRERIDKIITGEYDEKIENRVREKAIHLADVSDFKGLPLWLVCYIVYGRHSEAKEITQWKSPADIDSYLKSFKQHSLRNPIVEQIIIETLRVVRDIWKQVGNIDEIHVELGREMKNPADKRKKMTQQMSENENTNLRIKYLLTEFLNPEYEVENVRPYSPSQQDILRIYEEGVLNSVSDLPEEISDILKKFTETDLKKGPSRSEILRYKLWLEQKYRSPYTGEVIPLGKLFTPAYEIEHVIPQSCYFDDSFSNKVICEAEVNKLKSNLLGHEFIVKHHGEIVELPFGKKVRIFTVDEYEQFVKDNYSRTRSKMKKLLMDDIPEEFVTRQLNDSRYISKVVKSLLSNIVREKGEEEAISKNVIPCTGGVTDRLKKDWGINEVWNKIILPRFQRLNELTGTNKFTTKNVGIQEIPTMPLELQKGFNKKRIDHRHHAMDAIIIACANRNIINYLNNESATAKAELSRYDLQKMLCDKAKTDNNGNYKWVIRKPWASFTQDTYLALENIIVSFKQNLRVINKATNRFLHYNEEGKKIFVKQGKGDNWAIRKSMHKDTVFGEVNLRRIKTVALNEAMKNPQSIVVKDFKRKLLELWNLGFDAKRIKKYFEDNRETWSDINLSKIEVYYFSKDTKDRFFATRKPLDTSFDRKKIENNITDTGIQKILLRHLELKDNNPDIAFSPDGIDEMNRNIIQLNNGKYHQPIIKIRWYEQADKFAVGQTGNKFSKFVEAAKGTNLFFAVYESNILDKKTNTIIKKRNYATIPLNVAIERQKQGLPVAPEDENGNDPIFVLSPNDLVYLPTDDELANGIIAQPLDRGRIYKMVSCTGNEGHFIPARIANPILQTIELGSNNKAQKAWTDEMIKEICMPIKVDRLGNVLESSSSYKK

SEQ ID NO: 23403 - protein, 1153 aa, unidentified
  REGION 1..1153: note = Cas Enzyme sequence
MKNILGLDLGSSSIGWAVIRENSEEQELVAMGSRVVSLTAAELSSFTQGNGVSINSQRTQKRTQRKGYDRYQLRRTLLRNKLDTLGMLPDDSLSHLPKLQLWGLRAKAVTQRIELNELGRVLLHLNQKRGYKSIKSDFSGDKKITDYVKTVKTRYDELKEKRLTIGELFFRRLTENAFFRCKEQVYPRQAYVEEFDCIMNCQRKFYPDVLTDETIRCIRDEIIYYQRPLKSCKYLVSRCEFEKRFYLNAAGKKTEAGPKVAPRTSPLFQVCRLWESINNIVVKDRRNEIVSISAEQRAALFDFLNTHEKLKGSDLLKLLGLSKTYGYRLGEQFKTGIQGNKTRVEIERALGNYPDKARLLQFNLQKESSSMVNTETGEIIPMISLSFEQEPLYRLWHVLYSIDDREQLQLVLRQKFGIDDDEVLERLSAIDLVKAGFGNKSSKAIRRILPFLQLGMNYAEACEAAGYTHSNNYTKAENEAHALLDRLPAIKKNELRQPVVEKILNQMVNVVNALMEKYGRFDEIRVELARELKQSKEERSNTYKSINKNQRENEQIAKRIVEYGVPTRSRIQKYKMWEESKHCCIYCGQPVDVGDFLRGFDVEVEHIIPKSLYFDDSFANKVCSCRSCNKEKNNRTAYDYMKSKGEKALSDYVERVNTMYTNNQISKTKLQNLLTPVDKISTDFIDRQLRESQYIARKAKEILTSVCYNVTATSGSVTSFLRHVWGWDTVLHDLNFDRYKKVGLTEVIEVNHRGSVIRREQIKDWSKRFDHRHHAIDALTIACTKQAYIQRLNNLRAEEGPDFNKMSLERYIQSQPHFSVAQVREAVDRILVSFRAGKRAVTPGKRYIRKNRKRISVQSVLIPRGALSEESVYGVIYVWEKDEQGHVIQKQRAVMKYPITSITREMLDKEKVVDKRIHRILSGRLAQYNDNPKEAFAKPVYIDKECRIPIRTVRCFAKPAINTLVPLKKDDKGNPVAWVNPGNNHHVAIYRDEDGKYKERTVTFWEAVDRCRVGIPAIVTQPDTIWDNILQRNDISENVLESLPDVKWQFVLSLQQNEMFILGMNEEDYRYAMDQQDYALLNKYLYRVQKLSKGDYSFRYHTETSVEDKYNGKPNLKLSMQMGKLKRVSIKSLLGLNPHKVHISVLGEIKKIS

SEQ ID NO: 23404 - protein, 955 aa, unidentified
  REGION 1..955: note = Cas Enzyme sequence
HILYSVEDKNEIVKALQKFADKHDLNASFVDVFRKFPPFKKEYGSYSAKAIKKLLPLMRMGKYWSEDSIDKGTRKRMDKIITGEYDEKIENRVREKVIHLADVSDFRGLPLWLVCYIVYGRHSEAKEITQWKSPADIDSYLKSFKQHSLRNPIVEQIIIETLRVVRDIWKQVGNIDEIHVELGREMKNPADKRKKMTQQMSENENTNLRIKYLLTEFLNPEYEVENVRPYSPSQQDILRIYEEGVLNSVSDLPEEISDILKKFTETDLKKRPSRSEVLRYKLWLEQKYRSPYTGEVIPLGKLFTSAYEIEHVIPQSCYFDDSFSNKVICEAEVNKLKSNLLGHEFIVKHHGEIVELPFGKKVRIFTVDEYEQFVKDNYSRTRGKMKKLLMDDIPEEFVTRQLNDSRYISKVVKSLLSNIVREKGEEEAISKNVIPCTGGVTDRLKKDWGINEVWNKIILPRFQRLNELTGTNKFTTKNVGIQEIPTMPLELQKGFNKKRIDHRHHAMDAIIIACANRNIINYLNNESATAKAELSRYDLQKLLCDKAKTDNNGNYKWVIRKPWASFTQDTYLALENIIVSFKQNLRVINKATNHFLHYNEEGKKIFVKQGKGDNWAIRKSMHKDTVFGEVNLRRIKTVALNEAMKNPQSIVVKDFKRKLLELWNLGFDAKRIKKYFEDNRETWSDINLSKIEVYYFSKDTKDRFFATRKPLDTSFDRKKIENNITDTGIQKILLRHLELKDNNPDIAFSPDGIDEMNRNIIQLNNGKYHQPIIKVRWYEQADKFAVGQTGNKSSKFVEAAKGTNLFFAVYESNILDKKTNTIIKKRNYATIPLNVAIKRQKQGLPVAPEDENGNDPIFVLSPNDLVYLPTAADLANGIIAQPLDRGRIYKMVSCTGNEGHFIPARIANPILQTIELGSNNKAQKAWTDEMIKEICMPIKVDRLGNVLESSSSHKK

SEQ ID NO: 23405 - protein, 1327 aa, unidentified
  REGION 1..1327: note = Cas Enzyme sequence
LAWILLNFNQKRGYYQLRGEEEEENNNKLVEFYALKVVAVEDSGEKKGKDIWYNVHLENGWVYRRTSNMPLDWVGKTKEFIVTTDLEKDGTPKKDKEGNVKRSFRAPKEDDWSLVKKKTEADIDQTHKTVGTYIYDTLLGNPSQKIRGRLVRTIERKYYKEELKLILDKQKEFHPELQDRALYAACVEELYTINEAHRNNIGNRDFTYLFLEDILFYQRPLKSKKSLIDNCPYEENHCLDKETGEIKSFPVKCIAKSHPLFQEFRLWQFIVNLRIYRKGLAQDVDVTNELLKTEEDYVALFDWLNGKKEIDQKAFLKYPLFGLKKEVENYRWNYVQDKPYPCNETRSSMLARLEKCDISIEFLTKENEEALWHILYSVEDKNEIVKALQKFADKHDLNASFVDVFRKFPPFKKEYGSYSAKAIKKLLPLMRMGKYWSENSIDKGTRERIDKIITGEYDEKIENRVREKAIHLADVSDFRGLPLWLVCYIVYGRHSEAKEITQWKSPADIDSYLKSFKQHSLRNPIVEQIIIETLRVVRDIWKQVGNIDEIHVELGREMKNPADKRKKMTQQMSENENTNLRIKYLLTEFLNPEYEVENVRPYSPSQQDILRIYEEGVLNSVSDLPEEISDILKKFTETDLKKRPSRSEVLRYKLWLEQKYRSPYTGEVIPLGKLFTPAYEIEHVIPQSCYFDDSFSNKVICEAEVNKLKSNLLGHEFIVKHHGEIVELPFGKKVRIFTVDEYEQFVKDNYSRTRGKMKKLLMDDIPEEFVTRQLNDSRYISKVVKSLLSNIVREKGEEEAISKNVIPCTGGVTDRLKKDWGINEVWNKIILPRFQRLNELTGTNKFTTKNVGIQEIPTMPLELQKGFNKKRIDHRHHAMDAIIIACANRNIINYLNNESATAKAELSRYDLQKMLCDKAKTDNNGNYKWVIRKPWASFTQDTYLALENIIVSFKQNLRVINKATNHFLHYNEEGKKIFVKQGKGDNWAIRKSMHKDTVFGEVNLRRIKTVALNEAMKNPQSIVVKDFKRKLLELWNLGFDAKRIKKYFEDNRETWSDINLSKIEVYYFSKDTKDRFFATRKPLDTSFDRKKIENNITDTGIQKILLRHLELKDNNPDIAFSPDGIDEMNRNIIQLNNGKYHQPIIKVRWYEQADKFAVGQTGNKSSKFVEAAKGTNLFFAVYESNILDKKTNTIIKKRNYATIPLNVAIERQKQGLSVAPEDENGNDPIFVLSPNDLVYLPTDDELANGIIAQPLDRGRIYKMVSCTGNEGHFIPARIANPILQTIELGSNNKAQKAWTDEMIKEICMPIKVDRLGNVLESSSSYKK

SEQ ID NO: 23406 - protein, 1507 aa, unidentified
  REGION 1..1507: note = Cas Enzyme sequence
MKKILGLDLGTNSIGWAVINSLVDDEGKEKLTSISSCGSRIIPMDAATLGDFDKGNAKSSVAERTRLRGIRRLLERSLLRRERLHRVLSVMGFLPEHYASQLDRYGKFLPETEPKLAWYKDNTGSYRFLFQDSFNEMLEDFCLYHPELVAEGKKIPYDWTIYYLRKKALSQKIAKEELAWILLNFNQKRGYYQLRGEEEQEDNKKSVEYYALKVVAVEDSGERKGKDIWYNVKLENGWIYRRASSVPLDWAGKVKEFVVTTDLDDAGNPKKDKDGNVKRSFRAPKEDDWGLLKTKTQTQIDESGQTVGAYIYDSLLRMPDQKIRGKLVRTIERKYYKDELRKILLKQTEFHAALQDHNLLLSCIEELYPNNEAHRRLLSSSSFTYFLLEDILFYQRPLKSQKGLVDDCPYESHVYRDKKDGSLHRTPLKCISKSHPLFQEFRLWHFLSFLRIYQRERMIDGSLKLDVDVTNEFLQNEDDYVKLFDWLNGRKEIDQKTILAYKPFGLKKNEQPKYRWNYVEDKSYPCNETRADMISRLSKAGVSEGFLTEEREEALWHILYSISDKKELTKALGTFAEKNGLNEAFVEQFSKMPPFESNYAAYSLKAIRKLLALMRMGKYWNEQDIDKQTRSRIEKILTGEYDETIRTRVREKAIHLTDISSFRGLPLWLACYVVYNRHSEAKELVKWETPADIDHFLSKFRQHSLRNPIVEQVLMETLRTVRDIWKQEGQIDEIHVELGREMKNPAKERARITAQALENENTNLRIKALLTEFMNPEFEIENVRPYSPGQQEILRIYEEGVLSGVAEKDLPEDIISILKKFRENDVKKRPTTSEVLRYKLWLEQRYRSPYTGRIIPLGKLFTPAYEIEHVIPQSRYFDDSISNKVICESAVNKLKDNCLGYEFIKKHSGEIVELGNGEKATVFTSEEYEHFVKESYLGNGKKMKKLLLEDIPDNFIERQLNDSRYISKVVKSLLSNIVCEEGEQEGMSKNVIVCTGGVTDRLKKDWGVQDVWNRIILPRFLRLNKMTDSTDFTSVSTNGHLLPALPLHLQKGFNKKRIDHRHHAMDAIVIACADRNIVNYLNNASARKGSEISRYDLQHLLCDKVKTDANGNYKWMLRKPWDTFTQDVYTALTNIVVSFKQNLRVMNRTTNYYQHYNESGEKKMIPQVKGDRWAIRKPMHKDTVYGEVNLRREKTLPLKDVLNNPSIVVDKSLKSKLHELLKAQYDLKAITKYFEAHQDVWADINLKKIKVYYFTKETNERFFATRKSLDSSFNQKKIQEEVTDTGIQRILLRHLQLNDNNPDIAFSPDGIERMNQNMNILNDGKGHQPIYKVRTYEKAEKFAVGEHGNKVKKFVEAAKGTNLFFAVYESIQEDEATGKQVRKRTFATIPLNEVIKRKKQGLSVAPEDSNGNLPIFVLSPNDLVYLPTEEERNSGKVTQPLDRERIYKMVSSSGNQCFFIKSSVATSIWDKREYSSLNKMERAITEEMIKEICVPIKIDRLGNVSLI

SEQ ID NO: 23407 - protein, 1508 aa, unidentified
  REGION 1..1508: note = Cas Enzyme sequence
MKKILGLDLGTNSIGWAVINSSVDDEGKEKLTSISSCGSRIIPMDAATLGDFDKGNAKSSVAERTRLRGIRRLLERSLLRRERLHRVLSVMGFLPEHYASQLDRYGKFLPETEPKLAWYKDNTGSYRFLFQDSFNEMLEDFRLYHPELVAEGKKIPYDWTIYYLRKKALSQKIAKEELAWILLNFNQKRGYYQLRGEEEQEDNKKSVEYYALKVVAVEDSGERKGKDIWYNVKLENGWIYRRASSIPLDWTGKVKEFVVTTDLDDAGNPKKDKDGNVKRSFRAPKEDDWGLLKTKTQTQIDESGQTVGAYIYDSLLRMPDQKIRGKLVRTIERKYYKDELRKILFKQTEFHAALQDHNLLLSCIEELYPNNEAHRRLLSSSSFTYFLLEDILFYQRPLKSQKGLIDDCPYESHVYRDKKDGSLHRTPLKCISKSHPLFQEFRLWHFLSFLRIYQRERMIDGSLKLDVDVTNEFLQNEDDYVKLFDWLNGRKEIDQKTILAYKPFGLKKNEQPKYRWNYVEDKSYPCNETRADMISRLSKAGVSEGVLTEEREEVLWHILYSISDKKELTKALGTFAEKNGLNEAFVEQFSKMPPFESNYAAYSLKAIRKLLALMRMGKYWNEQDIDKQTRSRIEKILTGEYDETIRTRVREKAIHLTDISSFRGLPLWLACYVVYNRHSEAKELVKWETPADIDHFLSKFRQHSLRNPIVEQVIMETLRTVRDIWKQEGQIDEIHVELGREMKNPAKERARITAQALENENTNLRIKALLTEFMNPEFEIENVRPYSPGQQEILRIYEEGVLSGVAEKDLPEDIISILKKFRENDVKKRPTTSEVLRYKLWLEQRYRSPYTGRIIPLGKLFTPAYEIEHVIPQSRYFDDSISNKVICESAVNKLKDNCLGYEFIKKHSGEIVELGNGEKATVFTSEEYEHFVKESYLGNGKKMKKLLLEDIPDNFIERQLNDSRYISKVVKSLLSNIVCEEGEQEGMSKNVIVCTGGVTDRLKKDWGVQDVWNRIILPRFLRLNKMTDSTGFTSVSTNGHLLPALPLHLQKGFNKKRIDHRHHAMDAIVIACADRNIVNYLNNASARKGSEISRYDLQHLLCDKVKTDSNGNYKWMLRKPWDTFTQDVYTALTNIVVSFKQNLRVINRTTNYHQHYNESGEKKMIPQVKGDRWAIRKSMHKDTVYGEVNLRREKTLPLKDVLNNPSIVVDKSLKSKLHELLKAQYDLKAITKYFEAHQDVWADINLKKIKVYYFTKETNERFFATRKSLDSSFNQKKIQEEVTDTGIQRILLRHLQLNDNNPDIAFSPDGIERMNQNMNILNDGKGHQPIYKVRTYEKAEKFAVGEHGNKVKKFVEAAKGTNLFFAVYESIQEDEATGKQVRKRTFATIPLNEVIKRKKQGLSVAPEDSNGNLPIFVLSPNDLVYLPTEEERNSGKVTQPLDRERIYKMVSCTGNRLFLVPYMVASPIYDKKEYTSLNKIELTDDKISIKEWCIPILIDRLGNISINY

SEQ ID NO: 23408 - protein, 1509 aa, unidentified
  REGION 1..1509: note = Cas Enzyme sequence
MKNIVGLDLGTNSIGWAVVNGSVNDDGSEQLVKIQASGSRIIPMDAAMIGDFNKGNSISQTAERTRLRGVRRLSERYLLRRERLHRILDILGFLPFHFAQDLDRHGKIVKGKEPKLAWRKNEAGQFEFIFQDSFKEMLEDFKLNHPNLITDDKKVPYDWTIYYLRKKGLTSKISKEELAWILLNFNQKRGYYQLRGEEEKKNDNVMIINSKVIDVVKAEKDKKYEKYWYNVLLENGLLYRAAFYNDISFWKGHTKEFVLKTIKLKSGGTKQELSFLPSFDEIEKMEKKQKDKMYFKIKLKTEADIDQAHKTVGTYIYDTLLGNPSQKIRGRLVRTIERKYYKEELKLILDKQKEFHPELQDRALYAACVEELYTINEAHRNNIGNRDFTYLFLEDILFYQRPLKSKKSLIDNCPYEENQGLDKETGEIKSFPVKCIAKSHPLFQEFRLWQFIINLRIYRKDLAQDVDVTNELLKTEEDYVALFDWLNGKKEIDQKAFLKYPVFGLKKEIENYRWNYVQDKPYPCNETRLLMLARLEKCDISIEFLTKENEEALWHILYSVEDKNEIVKALQKFADKHDLNASFVDVFRKFPPFKKEYGSYSAKAIKKLLPLMRMGKYWSEDSIDKGTRKRMDKIITGEYDEKIENRVREKVIHLADVSDFRGLPLWLVCYIVYGRHSEAKEITQWKSPADIDSYLKSFKQHSLRNPIVEQIIIETLRVVRDIWKQVGNIDEIHVELGREMKNPADKRKKMTQQMSENENTNLRIKYLLTEFLNPEYEVENVRPYSPSQQDILRIYEEGVLNSVSDLPEEISDILKKFTETDLKKRPSRSEILRYKLWLEQKYRSPYTGEVIPLGKLFTPAYEIEHVIPQSCYFDDSFSNKVICEAEVNKLKSNLLGHEFIVKHHGEIVELPFGKKVRIFTVDEYEQFVKDNYSRTRGKMKKLLMDDIPEEFVARQLNDSRYISKVVKSLLSNIVREKGEEEAISKNVIPCTGGVTDRLKKDWGINEVWNKIILPRFQRLNELTGTNKFTTKNVGIQEIPTMPLELQKGFNKKRIDHRHHAMDAIIIACANRNIINYLNNESATAKAELSRYDLQKLLCDKAKTDNNGNYKWVIRKPWASFTQDTYLALENIIVSFKQNLRVINKATNRFLHYNEEGKKIFVKQGKGDNWAIRKSMHKDTVFGEVNLRRIKTVALNEAMKNPQSIVVKDFKRKLLELWNLGFDAKRIKKYFEDNRETWSDINLSKIEVYYFSKDTKDRFFATRKPLNTSFDRKKIENNITDTGIQKILLRHLELKDNNPDIAFSPDGIDEMNRNIIQLNNGKYHQPIIKVRWYEQADKFAVGQTGNKSSKFVEAAKGTNLFFAVYESNILDKKTNTIIKKRNYATIPLNVAIERQKQGLPVAPEDENGNDPIFVLSPNDLVYLPTDDELANGIIAQPLDRGRIYKMVSSSGEQCFFIKHIVANVLVDKFEFSPLNKMERALTGEMIKMICISIKVDRLGNVLESSSSHKK

SEQ ID NO: 23409 - protein, 1506 aa, unidentified
  REGION 1..1506: note = Cas Enzyme sequence
MKKILGLDLGTNSIGWAVINSSVDDEGKEKLTSISSCGSRIIPMDAATLGDFDKGNAKSSVAERTRLRGIRRLLERSLLRRERLHRVLSVMEFLPEHYASQLDRYGKFLPETEPKLAWYKDNTGSYRFLFQDSFNEMLEDFRLYHPELVAEGKKIPYDWTIYYLRKKALSQKIAKEELAWILLNFNQKRGYYQLRGEEEQEDNKKSVEYYALKVVAVEDSGERKGKDIWYNVKLENGWIYRRASSIPLDWTGKVKEFVVTTDLDDAGNPKKDKDGNVKRSFRAPKEDDWGLLKTKTQTQIDESGQTVGAYIYDSLLRMPDQKIRGKLVRTIERKYYKDELRKILLKQTEFHAALKDHNLLLSCIEELYPNNEAHRRLLSTSNFTCFLLEDILFYQRPLKSQKGLIDDCPYESHVYKKDGSLHRTPLKCISKSHPLFQEFRLWHFLSFLRIYQRERMIDGSLKLDVDVTNEFLQNEDDYVKLFDWLNGRKEIDQKTILAYKPFGLKKNEQPKYRWNYVEDKSYPCNETRADMISRLSKAGVSEGFLTEEREEALWHILYSISDKKELTKALGTFAEKNGLNEAFVELFSKMPPFESNYAAYSLKAIRKLLALMRMGKYWNEQDIDKQTRSRIEKILTGEYDETIRTRVREKAIHLTDISSFRGLPLWLACYVVYNRHSEAKELVKWETPADIDHFLSKFRQHSLRNPIVEQVIMETLRTVRDIWKQEGQIDEIHVELGREMKNPAKERARITAQVLENENTNLRIKALLTEFMNPEFEIENVRPYSPGQQEILRIYEEGVLSGVAEKDLPEDIISILKKFRENDVKKRPTTSEVLRYKLWLEQRYRSPYTGRIIPLGKLFTPAYEIEHVIPQSRYFDDSISNKVICESAVNKLKDNCLGYEFIKKHSGEIVELGNGEKATVFTSEEYEHFVKESYLGNGKKMKKLLLEDIPDNFIERQLNDSRYISKVVKSLLSNIVCEEGEQEGMSKNVIVCTGGVTDRLKKDWGVQDVWNRIILPRFLRLNKMTDSTGFTSVSTNGHLLPALPLHLQKGFNKKRIDHRHHAMDAIVIACADRNIVNYLNNASARKGSEISRYDLQHLLCDKVKTDSNGNYKWMLRKPWDTFTQDVYTALTNIVVSFKQNLRVINRTTNYHQHYNESGEKKMIPQVKGDRWAIRKPMHKDTVYGEVNLRREKTLPLKDVLNNPSIVVDKSLKSKLHELLKAQYDLKAITKYFEAHQDVWADINLKKIKVYYFTKETNERFFATRKSLDSSFNQKKIQEEVTDTGIQRILLRHLQLNDNNPDIAFSPDGIERMNQNMNILNDGKGHQPIYKVRTYEKAEKFAVGEHGNKVKKFVEAAKGTNLFFAVYESIQEDEATGKQVRKRTFATIPLNEVIKRKKQGLSVAPEDSNGNLPIFVLSPNDLVYLPTEEERNRGKVTQPLDRERIYKMVSCTGNRLFLVPYMVASPIYDKKEYTSLNKIELTDDKISIKEWCIPILIDRLGNISINY

SEQ ID NO: 23410 - protein, 1012 aa, unidentified
  REGION 1..1012: note = Cas Enzyme sequence
VILTYKPFGLKKNEQPKYRWNYVEDKSYPCNETRADMISRLSKAGVSEGFLTEEREEALWHILYSISDEKELTKALGTFAEKNGLNEAFVELFSKMPPFESNYAAYSLKAIRKLLALMRMGKYWNEQDIDKQTRSRIEKILTGEYDETIRTRVREKAIHLTDISSFRGLPLWLACYVVYNRHSEAKELVKWETPADIDHFLSKFRQHSLRNPIVEQVIMETLRTVRDIWKQEGQIDEIHVELGREMKNPAKERARITAQVLENENTNLRIKALLTEFMNPEFEIENVRPYSPGQQEILRIYEEGVLSGVAEKDLPEDIISILKKFRENDVKKRPTTSEVLRYKLWLEQRYRSPYTGRIIPLGKLFTPAYEIEHVIPQSRYFDDSISNKVICESAVNKLKDNCLGYEFIKKHSGEIVELGNGEKATVFTSEEYEHFVKESYLGNGKKMKKLLLEDIPDNFIERQLNDSRYISKVVKSLLSNIVCEEGEQEGMSKNVIVCTGGVTDRLKKDWGVQDVWNRIILPRFLRLNKMTDSTGFTSVSTNGHLLPALPLHLQKGFNKKRIDHRHHAMDAIVIACADRNIVNYLNNASARKGSEISRYDLQHLLCDKVKTDSNGNYKWMLRKPWDTFTQDVYTALTNIVVSFKQNLRVINRTTNYHQHYNESGEKKMIPQVKGDRWAIRKPMHKDTVYGEVNLRREKTLPLKDVLNNPSIVVDKSLKSKLHELLKAQYDLKAITKYFEAHQDVWADINLKKIKVYYFTKETNERFFATRKSLDSSFNQKKIQEEVTDTGIQRILLRHLQLNDNNPDIAFSPDGIERMNQNMNILNDGKGHQPIYKVRTYEKAEKFAVGEHGNKVKKFVEAAKGTNLFFAVYESIQEDEATGKQVRKRTFATIPLNEVIKRKKQGLSVAPEDSNRNLPIFVLSPNDLVYLPTEEERNSGKVTQPLDRERIYKMVSCTEGECHFIPSCVASPILQTIELGSNNKAQRAWSGEMIKDICVPIKIDRLGNVSINY

SEQ ID NO: 23411 - protein, 1508 aa, unidentified
  REGION 1..1508: note = Cas Enzyme sequence
MRTILGLDLGTNSIGWAVINSVIKEQTERIWIEMAGSRIIPMDAAILGDFDKGNSVSQTAERTRFRGVRRLRERQLLRRERLHKVLKILGFLPEHYLKGIDFEKHTGKFLSGSEPKLPWVKDRWGKYSFLFQTAFNEMLADFAKHQPSLVFDGKKIPYDWTVYYLRKKALTEMISKEELAWILLNFNQKRGYYQLRGEEEEDNAGKSVEFYALKVLSVEATDEKKGRDIWYNVHLENGWVYRRSSNVPLDWEGRVKEFIVTTDLNPDGTPKLDKYGEVKRSFRAPKEDDWMLIKKRTEADITGTHKTIGSYIYDALLQEPQQKIIGKLVKTVERKFYKEELNFILQKQCAFHAELQDRDLYMRCIEALYPGNEVQRRNIANRDFIYLLIDDVLFYQRPLKTKKSLIANCPYEENEYVNRKTGEIKTAPLKCIAKSHPLFQEFRLWYFLSNIRVYQKEREVNGTLHLDVDVTTEFLKTEDDYVALFDWLNSRKEIDQKAFLRYPAFGLKKEINNYRWNYVEDKFYPCNETRHAILSRLEKAGIGIDFLSDEKETALWHILYSVSDKQEIEKALATFAVKNGLNESFVEVFKKFPPFKSEYGAYSAKAIKKLLPLMRCGKYWDMSLIDGTTKERIERIIAGECDESIGVKVREKAMNLSDISCFKRLPLWLACYVVYNRHSEDKEITKWESPADIDAYLAAFKQHSLRNPIVEQVITETLRVVRDIWKQVGKIDEIHIELGREMKNPADKRKRMTTQILENENANLRIKALLAEFVNPEYGVENVRPYSPSQQEILRIYEDAVLKGEEQIPEDIDVILKKFNTSKLPTKSEFLRYKLWLEQKYRSPYTGELIPLAKLFTAAYEIEHVIPQSRYFDDSFSNKVICESAVNKLKDNQLGYEFIKNHHGQKVEVGFGKTVEIFSVDSYERFVKEQYAKSGIKMKKLLMDDIPEQFIERQLNDSRYISKVVKGLLSNIVREKNDSGEYEPEAVSKNILVCTGSVTDRLKKDWGMNDVWNSIVSPRFERLNALTETQCFGHWENKDGKKVFQTAVPLEYQKGFSKKRIDHRHHAMDAIVIACATRNHVNYLNNESASRNAKISRYDLQRLLCDKSRGDGNGNYRWIIKKPWTTFTQDAREALSGIIVSLKQNLRIINKTTNIYQHFDANGTRVYEKQKIGDSWAIRKPMHKDTVFGAVNLRKVKVVRLSVALDTPSMIVDKRVKNKVLELLSYKYDKKKIEKYFKENAFLWKELDIAKVAVYYFTENTTEPLVAVRKSLDSTFNEKKIASVTDTGIQKILLNHLKSKEGKAELAFSAEGIEEMNRNLLQLNDGKGHQPIYKVRVYEPRGNKFKVGVLGNKGAKWVEAAKGTNLFFAIYITEDGNRTYETIPLNWVIEREKQGLVPVPDRNEKGDKLLFWLSPNDLVYLPTEEERDFGRINEPIDRGRIYKMVSSSGNQCFFIPQSISNAIISTKELGSNNKAEKSWDGEMIKNICIPVKVDRLGRIIEVKYRVNE

SEQ ID NO: 23412 - protein, 1507 aa, unidentified
  REGION 1..1507: note = Cas Enzyme sequence
MKRILGLDLGPNSVGWALVNSIVKEQTERIWIEMAGSRIIPMDAAVLGDFEKGNSISQTAERTRIRGMRRLRERQLLRRERLHKVLNILGFLPKHYRDEIDFNKHPGKFLANTEPKLPWVKNEQGKYTFLFLNSFEEMLQDFKEHQPSIVSDKKKVPYDWTIYYLRKKALTQKISKEELAWILLNFNQKRGYYQLRGEDEEENTGKQVGYYALKVVSVEATDEKKGKDIWYNVHLENGWVYRRSSNVPLDWEGQVKEFIVTTSINPDGTPQLDKSGEIKRSFRAPKEEDWMLIKKRTEMDIENSQKTVGCYIYDTLLQNPQQKIIGKLVKTIERKYYKEELRQILQKQCILHCELQDKNLYKQCVEALYPSNEAYRTNIVNRDFVYLLMEDILFYQRPLKSKKSLIDNCPYEEYEYVVDKHTGEVKKAHLKCIAKSHPLYQEFRLWQFLYNLRIYQKEKEINGTIHTDVDVTSEFLKIEDDYVTLFDWLNRREKIEQKTLLKYPAFNIKKDVDNFRWNYVEDKTYPCNETRSLILSCLNKANLSEDFLSYQKEEALWHILYSVNDKQEIVKALQTFARKNGLDGTFVDAFKKIRPFNKEYGAYSAKAIKKLLPLMRTGKHWNVESIDGKTKERIDKIITGEYDEKISNRVREKAIYLSDISCFKGLPLWLACYVVYGRHSEQKEITKWETPDDIDAYLSTFKQHSLRNPIVEQIIMETLRVVRDIWKKAGSIDEIHIELGREMKNPADKRKRMTAQILENENANLRIKALLTEFMNPEYEIEDVRPYSPNQQEKLRIYEDGALNAAEQVPEDIETILKKFKENKQPTRSEFLRYKLWLEQKYRSPYTGELIPLGKLFTEAYQIEHIIPQKRYFDDSFSNKVICESAVNSLKGAQLGYEFIKEHHGEKVETGFGKVVTIFSVTAYEQFIKEHYAKSKAKMKKLLMDDIPEQFIERQLNDSRYISKVIKGLLSNIVREKDESGEYEQEAISKNVLVCNGSVTDRLKKDWGMNDVWNNIVYPRFERLNTLIGKECFGHWENKNGKRIFQTEVPLEYQKGFSKKRIDHRHHAMDAIVIACATRNHINYLNNASASKNAQISRYDLQHLLCDKTKTDDKGNYKWVIKKPWDTFTQDTKGILDNIIVSIKQNLRVINKTTNIYQHFDTDGKRTFYKQTKGDSWAIRKPMHKDTVFGIVNLRKTKEVRLSIALDIPYLIVDKKVKKKVFQLLKYKYEKKRIEKYFKENACLWKELNVAKVPVYYFTESSSERMVAVRKTIDTSFNAKKIQESVTDTGIQKILLKHLEQKDDKADLAFSAEGIEEMNRNIIALNDGKKHQLIYKVRVYEPLGNKFNVGTTGNKGKKFVEAAKGTNLFFAIYRTEDGKRIYDTIPLNIVIEREKQGLLPVPDKDEKGNTLLFWLSPNDLVYLPTEEEREFDRINEPIDKKRIYKMVSSSGNQCFFIPVNIANAIVPILELGANNKAEKSWEGNMIKSICIPIKVDRLGNIIKIKKV

SEQ ID NO: 23413 - protein, 1508 aa, unidentified
  REGION 1..1508: note = Cas Enzyme sequence
MRTILGLDLGTNSIGWAVINSVIKEQTERIWIEMAGSRIIPMDAAILGDFDKGNSISQTAERTRFRGVRRLRERQLLRRERLHKVLKILGFLPEHYLKGIDFEKHTGKFLSGSEPKLPWVKDGRGKHSFLFQTAFNEMLADFAKHQPSLVFDGKKIPYDWTVYYLRKKALTEMISKEELAWILLNFNQKRGYYQLRGEEEEDNAGKSVEFYALKVLSVEATDEKKGRDIWYNVHLENGWVYRRSSNVPLDWEGRVKEFIVTTDLNPDGTPKLDKYGEVKRSFRAPKEDDWMLIKKRTEADIAGTHKTIGSYIYDALLQEPQQKIIGKLVKTVERKFYKEELNLILQKQCAFHAELQDRDLYMRCIEALYPGNEVQRRNIANRDFIYLLMDDVLFYQRPLKTKKSLIANCPYEENEYVNRKTGEIKTAPLKCIAKSHPLFQEFRLWHFLSNIRVYQKEREVNGTLHLDVDVTTEFLKTEDDYVALFDWLNSRKEIDQKAFLKYPAFGLKKEINNYRWNYVEDKFYPCNETRHAILSRLEKAGIGIDFLSDEKETALWHILYSVSDKQEIEKALATFAVKNGLNESFVEVFKKFPPFKSEYGAYSAKAIKKLLPLMRCGKYWDMSLIDGTTKERIERIIAGECDENIGAKVREKAMNLSDISCFKRLPLWLACYVVYNRHSEDKEITKWETPADIDAYLAAFKQHSLRNPIVEQVITETLRVVRDIWKQVGKIDEIHIELGREMKNPADKRKRMTTQILENENANLRIKALLAEFVNPEYGVENVRPYSPSQQEILRIYEDAVLKGEEQIPEDIDVILKKFNTSKLPTKSEFLRYKLWLEQKYRSPYTGELIPLAKLFTAAYEIEHVIPQSRYFDDSFSNKVICESAVNKLKDNQLGYEFIKNHHGQKVEVGFGKTVEIFSVDSYERFVKEQYAKSGIKMKKLLMDDIPEQFIERQLNDSRYISKVVKGLLSNIVREKNDSGEYEPEAVSKNILVCTGSVTDRLKKDWGMNDVWNSIVSPRFERLNALTETQCFGHWENKDGKKVFQTAVPLEYQKGFSKKRIDHRHHAMDAIVIACATRNHVNYLNNESASRNAKISRYDLQRLLCDKSRGDGNGNYRWIIKKPWTTFTQDARETLSGIIVSLKQNLRIINKTTNIYQHFDANGTRVYEKQKIGDSWAIRKPMHKDTVFGAVNLRKVKVVRLSVALDTPFMIVDKRVKSKVLELLSYKYDKKKIEKYFKENAFLWKELDIAKVAVYYFTENTTEPLVAVRKSLDSTFNEKKIASVTDTGIQKILLNHLKSKEGKAELAFSAEGIEEMNRNLLQLNDGKGHQPIYKVRVYEPRGNKFKVGVLGNKGAKWVEAAKGTNLFFAIYITEDGNRTYETIPLNWVIEREKQGLVPVPDRNEKGDKLLFWLSPNDLVYLPTEEERDFGRINEPIDRGRIYKMVSCTGNEGHFIPANIANPILPTVELGSNNKAQRAWSNEMVKDICIPIKVDRLGRIIEVKYRANE

SEQ ID NO: 23414 - protein, 1498 aa, unidentified
  REGION 1..1498: note = Cas Enzyme sequence
MKHILGLDLGTNSIGWAVISSSFDETTQKEQLKGIEAAGSRIIPMDAAQLGDFNKGNTVSQTANRTQFRGVRRLYERKKLRRERLHRILQLLGFLPKHYANQLDRYGKFIANSEPKLAWTTNTHGLPYFIFQSSFQEMLNDFLQNNSQIKKVPYDWTLFYLRKKALIQKIEKEELAWVLLNFNQKRGYYQLREEETEKASSKTRQYFDSQIVTDITDTGQVYKGLKIFTITLENGEKGKFFSKNMPDWKSQKKDIIAIIDLDKNGNDKYDENGELSRRFKIPTEQEWEEQWELIKTKTQKDLDTSHKTVGAYIYDTLLQTPSQKIRGKLIRTIERKYYKDELNQILKKQEEFHPELRDSNLLEACIEELYPNNEAHRNAIAKYSIAQLLIEDILFYQRPLKSKKSLISNCPYEEYTYINKETGEICTSPLKCIAKSHPLFQEFRLWQFISNLRIYQKEGTINGKFTTDIDVTSQFLKTEDAYANLFDWLNQKKEIRQDTFLKNPAFGLKKNTANYRWNYVEDKTYPCNETHYKILSYWEKAGIEQSALTSEIEEKLWHILYSISDKNELRKALQHFADKNYLSDKFADTFQQIPPFEKDYGSYSAKAIKKLLPLMRIGRYWKAENFDSTTLDRIEKILTGEFEENIKNRTREKTIHLDNLYSFQGLPTWLACYIVYNRHSEIKDVTKWQQPSDIDAFLNAFKQHSLHNPIVEQIIMETLRTVRDIWKQTGHIDEIHVELGREMKNPAEKRRKLTQQIQENENTNLRIKALLAEFANPELGIENVRPHSPSQQDLLRIYEEEALNETKDIPEDIAVILKKFNEVDTKKRPSTSDVLRYKCWLEQKYRSPYTGAMIPLGKLFTPAYEIEHVIPQSRYFDDSFTNKVICEAEVNKLKGNMLGYEFIKNNQERIVELGFGQNVKIQTVEAYELFVKEHYSYNRTKMQKLLMEDIPDQFIERQLNDSRYISKLIKSLLSNIVRDEGEEEATSKNVIVCTGSITDRLKKDWGINDVWNKLILPRFIRLNEITESNRFTTTNACNKTIPAMPLDLQKGFNKKRIDHRHHAMDAIVIACANRNIVNYLNNESASKNAKISRQDLRQILCKKTKTDNLGNYQWLIDKPWDTFTQDVYSILGNIIVSFKQNLRIINKTTNHYIHYENGKKVSCSQKQGDSWAIRKPMHKETVYGEINLRRTTTATLKAVLENPQRIIEKDLKKKIKELLTQGLNEKQIKKYFEDNKDIWQEINLKKIPVYYFTKETANRFFACRESINTTFNKKKIEEKVADTGIQQILLRHLEQNGNNPEQAFSPEGIEQMNKNITSLNNGKFHQPIYKVRTYEQADKFAVGQTGNKSTKFVEAAKGTNLFFAIYETAHKRNFASIPLNVVIERLKKGLPPAPENEKGNLPKFILSPNDLVYVPIKEEIENGHINQPIQKDRIYKMVSCTGNQCFFIKSNVANTIIDKYEFSPLNKMERAITGEMIKETCIPIKTDRLGNIITSISL

SEQ ID NO: 23415 - protein, 1508 aa, unidentified
  REGION 1..1508: note = Cas Enzyme sequence
MRTILGLDLGTNSIGWAVINSVIKEQTEKIWIEMAGSRIIPMDAAILGDFDKGNSISQTAERTRFRGVRRLRERQLLRRERLHKVLKILGFLPEHYLKGIDFEKHTGKFLSGSEPKLPWVKDRWGKYSFLFQTAFNEMLADFAKHQPSLVFDGKKIPYDWTVYYLRKKALTEMISKEELAWILLNFNQKRGYYQLRGEEEEDNAGKSVEFYALKVLSVEATDEKKGRDIWYNVHLENGWVYRRSSNVPLDWEGRVKEFIVTTDLNPDGTPKLDKYGEVKRSFRAPKEDDWMLIKKRTEADIAGTHKTIGSYIYDALLQEPQQKIIGKLVKTVERKFYKEELNLILQKQCAFHAELQDRDLYMRCIEALYPGNEVQRRNIANRDFIYLLIDDVLFYQRPLKTQKSLIANCPYEENEYVNRKTGEIKTAPLKCIAKSHPLFQEFRLWHFLSNIRVYQKEREVNGTLYLDVDVTTEFLKTEDDYVALFDWLNSRKEIDQKAFLRYPAFGLKKEINNYRWNYVEDKFYPCNETRHAILSRLEKAGIGIDFLSDEKETALWHILYSVSDKQEIEKALATFAVKNGLNESFVEVFKKFPPFKSEYGAYSAKAIKKLLPLMRCGKYWDMSLIDGTTKERIERIIAGECDESIGAKVREKAMNLSDISCFKRLPLWLACYVVYNRHSEDKEITKWETPADIDAYLAAFKQHSLRNPIVEQVITETLRVVRDIWKQVGKIDEIHIELGREMKNPADKRKRMTTQILENENANLRIKALLAEFVNPEYGVENVRPYSPSQQEILRIYEDAVLKGEEQIPEDIDVILKKFNTSKLPTKSEFLRYKLWLEQKYRSPYTGELIPLAKLFTAAYEIEHVIPQSRYFDDSFSNKVICESAVNKLKDNQLGYEFIKNHHGQKVEVGFGKTVEIFSVDSYERFVKEQYAKSGIKMKKLLMDDIPEQFIERQLNDSRYISKVVKGLLSNIVREKNDSGEYEPEAVSKNILVCTGNVTDRLKKDWGMNDVWNSIVSPRFERLNALTETQCFGHWENKDGKKVFQTAVPLEYQKGFSKKRIDHRHHAMDAIVIACATRNHVNYLNNESASRNAKISRYDLQRLLCDKSRGDGNGNYRWIIKKPWTTFTQDAREALSGIIVSLKQNLRIINKTTNIYQHFDANGTRVYEKQKIGDSWAIRKPMHKDTVFGAVNLRKVKVVRLSVALDTPSMIVDKRVKNKVLELLSYKYDKKKIEKYFKENAFLWKELDIAKVAVYYFTENTTEPLVAVRKSLDSTFNEKKIASVTDTGIQKILLNHLKSKEGKAELAFSAEGIEEMNRNLLQLNDGKGHQPIYKVRVYEPRGNKFKVGVLGNKGAKWVEAAKGTNLFFAIYITEDGNRTYETIPLNWVIEREKQGLVPVPDRNEKGDKLLFWLSPNDLVYLPTEEERDFGRINEPIDRGRIYKMVSSSGNQCFFIPQSISNAIISTKELGSNNKAEKSWDGEMIKNICIPVKVDRLGRIIEVKYRVNE

SEQ ID NO: 23416 - protein, 1536 aa, unidentified
  REGION 1..1536: note = Cas Enzyme sequence
LIIYFIFEKIVNTILVMKKIVGLDLGTNSIGWALINAYIDEYNKEHLYGIEACGSRIIPMDAAILGNFDKGNSISQTADRTSYRGIRRLRERHLLRRERLHRILDLLGFLPKHYSDSLNRYGKFLNDIECKLPWVKDETGSYKFIFQESFKEMLADFTEHHPKLIANNKKVPYDWTIYYLRKKALTQKISKEELAWILLNFNQKRGYYQLRGEEEETPNKLVEYYSLKVEKVEDSGEKKGKDTWYNVHLENGMIYRRTSNIPLDWEGKTKEFIVTTDLEADGSPKKDKEGNIKRSFRAPKDDDWTLIKKKTEADIDKIKMTVGAYIYDTLLQKPDQKIRGKLVRTIERKYYKNELYQILKTQSEFHEELRDKQLYIACLNELYPNNEPRRNSISTRDFCHLFIEDIIFYQRPLKSKKSLIDNCPYEENRYIDKESGEIKHASIKCIAKSHPLYQEFRLWQFIVNLRIYRKETDVDITQELLPTEADYVTLFEWLNEKKEIDQKAFFKYPPFGFKKTTSNYRWNYVEDKPYPCNETHAQIITRLGKAHIPKAFLSKEKEETLWHILYSIEDKQEIEKALHSFANKNNLSEEFIEQFKNFPPFKKEYGSYSAKAIKKLLPLMRMGKYWSIENIDNGTRIRINKIIDGEYDENIRERVRQKAINLTDITHFRALPLWLACYLVYDRHSEVKDIVKWKTPKDIDLYLKSFKQHSLRNPIVEQVITETLRTVRDIWQQVGHIDEIHIELGREMKNPADKRARMSQQMIKNENTNLRIKALLTEFLNPEFGIENVRPYSPSQQDLLRIYEEGVLNSILELPEDIGIILGKFNQTDTLKRPTRSEILRYKLWLEQKYRSPYTGEMIPLSKLFTPAYEIEHIIPQSRYFDDSLSNKVICESEINKLKDRSLGYEFIKNHHGEKVELAFDKPVEVLSVEAYEKLVHESYSHNRSKMKKLLMEDIPDQFIERQLNDSRYISKVVKSLLSNIVREENEQEAISKNVIPCTGGITDRLKKDWGINDVWNKIVLPRFIRLNELTESTRFTSINTNNTMIPSMPLELQKGFNKKRIDHRHHAMDAIIIACANRNIVNYLNNVSASKNTKITRRDLQTLLCHKDKTDNNGNYKWVIDKPWETFTQDTLTALQKITVSFKQNLRVINKTTNHYQHYENGKKIVSNQSKGDSWAIRKSMHKETVHGEVNLRMIKTVSLNEALKKPQAIVEMDLKKKILAMLELGYDTKRIKNYFEENKDTWQDINPSKIKVYYFTKETKDRYFAVRKPIDTSFDKKKIKESITDTGIQQIMLRHLETKDNDPTLAFSPDGIDEMNRNILILNKGKKHQPIYKVRVYEKAEKFTVGQKGNKRTKFVEAAKGTNLFFAIYETEEIDKDTKKVIRKRSYSTIPLNVVIERQKQGLSSAPEDENGNLPKYILSPNDLVYVPTQEEINKGEVVMPIDRDRIYKMVDSSGITANFIPASTANLIFALPKATAEIYCNGENCIQNEYGIGSPQSKNQKAITGEMVKEICFPIKVDRLGNIIQVGLCILTN

SEQ ID NO: 23417 - protein, 1393 aa, unidentified
  REGION 1..1393: note = Cas Enzyme sequence
VENVKHTSMKKILGLDLGTNSTGWALVNEAENTAEKSSITKLGVRIIKYDNFVNTETGSESKEPEKDFCGGKGISPNAGRTKGRSARRNLQRYKLRRANLIEYLKKCGLITDSAVLCENGNRTTFQTYRLRAMAVTEEISLEELSRVFLMINKKRGYKSSRKAKLPDEGQLIDGMAVAEQLYENDLTPGQFVFSILQQGKKSIPEFYRSDLQNELNRIWDHQKQFYPEILTDEFRKQIEGEGRPNTAKMFLGKYKIYTADIKGKDKRLQAYQWRSNALTSQLSIDEVAFVVSELNGAINNASSYLGAIGDRSKELRFNKLTVGQYLMKQLDKDPNYSLKNQVFYRQDYLDEFEAIWEKQTQYHPELTPELKKDIRDIIIFYQRPLKSQKGLVSFCEFESRQIEVNVDGKQKLRTIGCKVCPKSSPLFQEFKIWHTLHSLIVKEKKTNAERFLYQEEKETLFAELNIKETLSKLDALKLLYKNYKDLDLNYDKIEGNRTQAALFKAYQTIISMTGHGEYDFSKMMSDEVMEIVEGVFSGLGYNTNILHFDAENELFDKQPMYMLWHLLYSYEGDKSSTGNKSLIDKIFKLCGFEKEYASIIANIIFQPDYGSLSTKAIRKILPRMKEGNEYSLACEYAGYRHSQRSLTKDELDNKVYKDHLDLLPRNSLRNPVVEKILNQMINVVNFVVDAYGKPDEIRIELARELKKSSKERKEMTMAINKTTADHEKYRQILQKEFGLTNVTRNDIIRYKLYLELKSNGYKTLYSNTYIPQEKLFSKEFDIEHIIPKAKLFDDSFSNKTLESRRVNIEKSNLTAYDYVLGVYDEKGINDYEIRIENLYKSGIISKAKRDKLMMKEVDIPSGFIERDLRDSQYIAKKAREILEELVKFVVPTTGTITDRLREDWQLIDVMQELNWEKYDKLGLTEIVKDKDGREIRRIKDWTKRNDHRHHAMDALTVAFTKRSYIQYLNNLNARSDKSGSIYAIEQKELYRDKHGKLRFNPPMPLDVFRAEAKRQLENTLISIKARNKVLTQNVNITKTKKTESGYRKKVQLTPRGQLHNETFYGAIKWYVPKLESVGSGFNVEQIALVANKRYREALLTRLAACGNDPKKAFTGKNSLEKNPLYLDELHTQQVPTKVKTVTLETVYTTRKDISSDLKIEKVIDRKVRSILKERLKEFGGDPKKAFSNLDANPIWLNKEKGISIKRVTITAVSKAEPLHAKRDHFGKYILDANGAKQPVDYVNTGNNHHVAIYRDEKGVLQERVVSFYEATASASVGLPVVDKEYRKSEGWTFLFSMKQNEYFVFPNEKNGFNPNEIDLMDPDNYALISPNLFRVQKITSKDYVFRHHLETTVEDRKELQNITWKRFQSLTNLDKLVKVRVNHIGQIVSVGEY

SEQ ID NO: 23418 - protein, 1424 aa, unidentified; identical to SEQ ID NO: 22949
  REGION 1..1424: note = Cas Enzyme sequence

SEQ ID NO: 23419 - protein, 1436 aa, unidentified
  REGION 1..1436: note = Cas Enzyme sequence
MKRILGLDLGTNSIGWALVNEAENKDERSSIVKLGVRVNPLTVDELTNFEKGKSITTNADRTLKRGMRRNLQRYKLRRETLTEVLKEHKLITEDTILSENGNRTTFETYRLRAKAVTEEISLEEFARVLLMINKKRGYKSSRKAKGVEEGTLIDGMDIARELYNNNLTPGELCLQLLDAGKKFLPDFYRSDLQNELDRIWEKQKEYYPEILTDVLKEELRGKKRDAVWAICAKYFVWKENYTEWNKEKGKTEQQEREHKLEGIYSKRKRDEAKRENLQWRVNGLKEKLSLEQLVIVFQEMNTQINNSSGYLGAISDRSKELYFNKQTVGQCQMEMLDKNPNASLRNMVFYRQDYLDEFNMLWEKQAVYHKELTEELKKEIRDIIIFYQRRLKSQKGLIGFCEFESRQIEVDIDGKKKIKTVGNRVISRSSPLFQEFKIWQILNNIEVTVVGKKRKRRKLKENYSALFEELNDAEQLELNGSRRLCQEEKELLAQELFIRDKMTKSEVLKLLFDNPQELDLNFKTIDGNKTGYALFQAYSKMIEMSGHEPVDFKKPVEKVVEYIKAVFDLLNWNTDILGFNSNEELDNQPYYKLWHLLYSFEGDNTPTGNGRLIQKMTELYGFEKEYATILANVSFQDDYGSLSAKAIHKILPHLKEGNRYDVACVYAGYRHSESSLTREEIANKVLKDRLMLLPKNSLHNPVVEKILNQMVNVINVIIDIYGKPDEIRVELARELKKNAKEREELTKSIAQTTKAHEEYKTLLQTEFGLTNVSRTDILRYKLYKELESCGYKTLYSNTYISREKLFSKEFDIEHIIPQARLFDDSFSNKTLEARSVNIEKGNKTAYDFVKEKFGESGADNSLEHYLNNIEDLFKSGKISKTKYNKLKMAEQDIPDGFIERDLRNTQYIAKKALSMLNEISHRVVATSGSVTDKLREDWQLIDVMKELNWEKYKALGLVEYFEDRDGRQIGRIKDWTKRNDHRHHAMDALTVAFTKDVFIQYFNNKNASLDPNANEHAIKNKYFQNGRAIAPMPLREFRAEAKKHLENTLISIKAKNKVITGNINKTRKKGGVNKNMQQTPRGQLHLETIYGSGKQYLTKEEKVNASFDMRKIGTVSKSAYRDALLKRLYENDNDPKKAFAGKNSLDKQPIWLDKEQMRKVPEKVKIVTLEAIYTIRKEISPDLKVDKVIDVGVRKILIDRLNEYGNDAKKAFSNLDKNPIWLNKEKGISIKRVTISGISNAQSLHVKKDKDGKPILDENGRNIPVDFVNTGNNHHVAVYYRPVIDKRGQLVVDEAGNPKYELEEVVVSFFEAVTRANLGLPIIDKDYKTTEGWQFLFSMKQNEYFVFPNEKTGFNPKEIDLLDVENYGLISPNLFRVQKFSLKNYVFRHHLETTIKDTSSILRGITWIDFRSSKGLDTIVKVRVNHIGQIVSVGEY

SEQ ID NO: 23420 - protein, 1310 aa, unidentified
  REGION 1..1310: note = Cas Enzyme sequence
LKVEKVEDSGERKGKDTWYNVHLENGMIYRRTSNIPLDWEGKTKEFIVTTDLEADGSPKKDKEGNIKRSFRAPKDDDWTLIKKKTEADIDKIKMTVGAYIYDTLLQKPDQKIRGKLVRTIERKYYKNELYQILKTQSEFHEELRDKQLYIACLNELYPNNEPRRNSISTRDFCHLFIEDIIFYQRPLKSKKSLIDNCPYEENRYIDKESGEIKHASIKCIAKSHPLYQEFRLWQFIVNLRIYRKETDVDVTQELLPTEADYVTLFEWLNEKKEIDQKAFFKYPPFGFKKTTSNYRWNYVEDKPYPCNETHAQIITRLGKAHIPKAFLSKEKEETLWHILYSIEDKKEIEKALHSFANKNNLSEEFIEQFKNFPPFKKEYGSYSAKAIKKLLPLMRMGKYWSIENIDNGTRIRINKIIDGEYDENIRERVRQKAINLTDITHFRALPLWLACYLVYDRHSEVKDIVKWKTPKDIDLYLKSFKQHSLRNPIVEQVITETLRTVRDIWQQVGHIDEIHIELGREMKNPADKRARMSQQMIKNENTNLRIKALLTEFLNPEFGIENVRPYSPSQQDLLRIYEEGVLNSILELPEDIGIILGKFNQTDTLKRPTRSEILRYKLWLEQKYRSPYTGEMIPLSKLFTPAYEIEHIIPQSRYFDDSLSNKVICESEINKLKDRSLGYEFIKNHHGEKVELAFDKPVEVLSVEAYEKLVHESYSHNRSKMKKLLMEDIPDQFIERQLNDSRYISKVVKSLLSNIVREENEQEAISKNVIPCTGGITDRLKKDWGINDVWNKIVLPRFIRLNELTESTRFTSINTNNTMIPSMPLELQKGFNKKRIDHRHHAMDAIIIACANRNIVNYLNNVSASKNTKITRRDLQTLLCHKDKTDNNGNYKWVIDKPWETFTQDTLTALQKITVSFKQNLRVINKTTNHYQHYENGKKIVSNQSKGDSWAIRKSMHKETVHGEVNLRMIKTVSLNEALKKPQAIVEMDLKKKILAMLELGYDTKRIKNYFEENKDTWQDINPSKIKVYYFTKETKDRYFAVRKPIDTSFDKKKIKESITDTGIQQIMLRHLETKDNDPTLAFSPDGIDEMNRNILILNKGKKHQPIYKVRVYEKAEKFTVGQKGNKRTKFVEAAKGTNLFFAIYETEEIDKDTKKVIRKRSYSTIPLNVVIERQKQGLSSAPEDENGNLPKYILSPNDLVYVPTQEEINKGEVVMPIDRDRIYKMVDSSGITANFIPASTANLIFALPKATAEIYCNGENCIQNEYGIGSPQSKNQKAITGEMVKEICFPIKVDRLGNIIQVGSCILTN

SEQ ID NO: 23421 - protein, 1442 aa, unidentified
  REGION 1..1442: note = Cas Enzyme sequence
VLLRRARLLRVLNVMNFLPEHYVSQIDFEKRLGQFLDGTEPKLAWRQKDEGKSEFIFQQSFNEMIEEFKNNGTIGENQKIPYDWTIYYLRKKALSRKIDKEELAWILLNFNQKRGYYQLRGEEEEENSNKLVEYYSLKIVDVIADEKPNGKGDTWYSLHLENGWVYRRPSKIPLLGWKGKIRDFIVTTDLNDDGTVKKDKEGIEKRSFRAPSENDWTLLKKKTENDIEKSHKTVGTYVYEALLQNPMQKVRGKLVRTIERKFYKDELKQILEKQKEFHPELRDEDLYNDCVRELYCSNETHKFILSKRDFVHLFLDDILFYQRPLRSQKSAISDCTLEFQAYKDKNGNKVKGHLKATSKSNPLYQEFRIWQWLYNLKIYRKEDDKDVTLEFITGIEDKELLFEFLNNRKNIEQKPLLEYLIKAKGLKKQVKAEAYRWNYVEDKTYPCSETRTMISTRLAKVENLPDDFLTKEVEQRLWHIIYSVTDKNEFEKALKTFAGKYNLDVTSFVDNFKKFPPFKNEYGSFSEKAIKKLLPLMRLGKYWKWSDIDSYTQNRISKIITGEYDEEIKDKVREKAIHLTNENDFQGLQLWLAQYIVYGRHSEADIAGKWHSIADLEKYLNEFKQHSLRNPIVEQIVTETLRVVKDIWQEYGQGVENFFNEIHIELGRDMKNTAEERKRLANTITENENTNLRIKALLMELKNNSDGKLEVENVRPYSPMQQDILKIYEEYAIGAELDNERDEKVKEDIKQISKAAQPTTVELQRYKLWLEQKYCSPYTGKVIPLSKLFTEEYQIEHIIPKSRYYDDSFSNKVICEAAVNKLKDKYLGFEFIKNYHGQIVETGFGQKVTVFDEESYQNFVKQHYVHSRSKRMKLLLEEIPEKMIERQMNDTRYISKFVFPLLSNLVRAEKDDDGINSKNVLPGNGKITTILKQDWGLNDVWNDLILPRFVRMNELKKTTAFTSWNGQYQKYLPAVPLELSKGFQKKRIDHRHHAMDALVIACATRDHINLLNNKYANTDKVRYDLQRKLRLFEQVTYIDPETKKGVTKNVPKEFKKPWDNFTIDARNELESIIVSFKQNLRIINKATNVYTKYENGKKIKVNQKGSNWAIRKPLHKETVFAKVSLRKRKTVRLSEALKDSEKIVDKGLKQEIRRLTCQYGKFDAGTILRYFKDRKYEFEGADVSKVEVYYFDEENAAVRKNVDTSFTKKIIQESVTDTGIQKILINHLAAKGDKAEMAFSPEGIEEMNKNIVQLNGGKCHLPIFKVRVYETIGNKFPVGVKGNKKDKYVEAAKGTNLFFAIYVDENGVRSYETIPLNIVIERLKQGLNAVPERDKKEHNLLFYLSPNDLVYVPTDDERENVCAINFGQFSNEQKKRVYKMVSCTGSECHFLPHYVANSIVNKVEYSPLNKIGRSLTGEMIKNVCIKLKVDRLGNIKGRTYER

SEQ ID NO: 23422 - protein, 1424 aa, unidentified; identical to SEQ ID NO: 22923
  REGION 1..1424: note = Cas Enzyme sequence

SEQ ID NO: 23423 - protein, 1404 aa, unidentified
  REGION 1..1404: note = Cas Enzyme sequence
MKKLKQMSGPYSIGFELSSTAHGFVATDPNGNVLYHGKQPVMGTRVFKEGQHAAEARMPRTSRRGIQRRRGREHEMERVFAPVISSIDPDFFIRRRMSYKLGKIRFESDPIGFSYSRLFHSFPTLAHLDVALMESDSAMDPRLIFESVANHVVRRGHFLLENQNVSSTNSDIDTQVANYAEVLVSYFEDTLDERIEPSLEALDINGNVTARELQKRFASAMCVSGDDIQKKTEKAQIKAIADLVAGYKADLTALVPDAEKLPKVSISDGDALEEFLSDSCPDSLVSVLMAAQALYTSWKLQGMLSYAPGKSLSHNQVAQYDVYGKQLRMLKNLALKYVAKQDADGNIDEDGFKDYVRFFGGPKCEDRYRYDKVQVKKQDSPKKNMGYTAYNLNVLGYEEFAKRVELLFKDTDAVNDPQYKTMMEAFANHAFLRRIHTVDNAAIPYQLHAEVVNRIIDNQGRFYPWLIDAREHILKVLTSRIPYYVGPLDSTDHGKAGENGTRFAWVKRLAGHEDAFVSPWNYEDHIDIDTTAELFIRRMTGECSYLDGEDVLAKNSLLYEKYCFFNELASLSFTEDGDSWMPFDAGMRKAIYDAASDGKTMTVKRIESVLQRDFFIAHPHVRGTSNPKAMSSKRSNYAYFCRLFDVKALSASDMSMAEDLVLWNTVFEDRDILRRKILKTYGDLLTEKAVDDFCHKRLSGWGKLSERLLTGIWADTASGDMCVMDVLEQGRPYGRYRGSSMNLMQILNDDVLGFKMEIKRLNDSHMQMAEGFDLNALPGSPALRRGVSQAMKVLDDIVSVAGKAPDRIYLKVTRTASNSRKGKRTAKRSDKIKQALKALDADAAADLGAAKLLRELGMFDEKEINERIYLYFHQAGKCLYTGKPIDITRIASNDYYVDHVVPLAYRKDESLDNKVLVYAEASRYKSETLLVSPAVQRKMLPFWRMLRNAGLMSERKLNALIRTEISEGMLKSIIGRQFTENSWEAKLFTAAVAAKYPGTVVISVKAGVIGAVRSRIGIPKSLKANQFYHAHDALLAAEVGRYMELAKPAFVHNRVKYEQYMRKIKLVDEENKKAPKSQLDFFAGGFFFDRVDKDTGEVYWNKDEEVERIYRACGWKNLRVTYAAFEDGGAFWKQTIYSPREKSKLIATKSDRPAEIYGGYSSQTFANFFVYEVMKKKVKQLRFGAVPAAIASKSDPDTYNAMLEMYARGFAKTAKEKFVRIVRARVLKNTMIELYGERFRIAGEKQVYPVRQMPLAIDEVYLLKGVETIAVAGNAGASAKIDFEKAAESLVGFWDLLLEKLPVNYPKLTVQLKLGSLKHPKDILAATSESEFPAIVYKIAEAEIQVMEQASGLRNMSDTKILGGNTFGGSLVFTFNKVLNDPKSKACFIDTTPAGLHEVKTKIW

SEQ ID NO: 23424 - protein, 1068 aa, unidentified
  REGION 1..1068: note = Cas Enzyme sequence
LFQEFRLWQFIINLRIYRKDLAQDVDVTNELLKTEEDYVALFDWLNGKKEIDQKAFLKYPVFGLKKEIENYRWNYVQDKPYPCNETRLLMLARLEKCDISIEFLTKENEEALWHILYSVEDKNEIVKALQKFADKHDLNASFVDVFRKFPPFKKEYGSYSAKAIKKLLPLMRMGKYWSEDSIDKGTRKRMDKIITGEYDEKIENRVREKVIHLADVSDFRGLPLWLVCYIVYGRHSEAKEITQWKSPADIDSYLKSFKQHSLRNPIVEQIIIETLRVVRDIWKQVGNIDEIHVELGREMKNPADKRKKMTQQMSENENTNLRIKYLLTEFLNPEYEVENVRPYSPSQQDILRIYEEGVLNSVSDLPEEISDILKKFTETDLKKRPSRSEILRYKLWLEQKYRSPYTGEVIPLGKLFTPAYEIEHVIPQSCYFDDSFSNKVICEAEVNKLKSNLLGHEFIVKHHGEIVELPFGKKVRIFTVDEYEQFVKDNYSRTRGKMKKLLMDDIPEEFVARQLNDSRYISKVVKSLLSNIVREKGEEEAISKNVIPCTGGVTDRLKKDWGINEVWNKIILPRFQRLNELTGTNKFTTKNVGIQEIPTMPLELQKGFNKKRIDHRHHAMDAIIIACANRNIINYLNNESATAKAELSRYDLQKLLCDKAKTDNNGNYKWVIRKPWASFTQDTYLALENIIVSFKQNLRVINKATNRFLHYNEEGKKIFVKQGKGDNWAIRKSMHKDTVFGEVNLRRIKTVALNEAMKNPQSIVVKDFKRKLLELWNLGFDAKRIKKYFEDNRETWSDINLSKIEVYYFSKDTKDRFFATRKPLDTSFDRKKIENNITDTGIQKILLRHLELKDNNPDIAFSPDGIDEMNRNIIQLNNGKYHQPIIKVRWYEQADKFAVGQTGNKSSKFVEAAKGTNLFFAVYESNILDKKTNTIIKKRNYATIPLNVAIERQKQGLPVAPEDENGNDPIFVLSPNDLVYLPTDDELANGIIAQPLDRGRIYKMVSSSGEQCFFIKHIVANVLVDKFEFSPLNKMERALTGEMIKMICIPIKVDRLGNVLESSSSHKK

SEQ ID NO: 23425 - protein, 1427 aa, unidentified
  REGION 1..1427: note = Cas Enzyme sequence
MKKILGLDLGTSSIGWALVNEAETSEEKSSIIKLGVRVNPLTVDELQNFEKGKSITTNADRTAGRSMRRNLQRYKLRRENLIEVLKEYNFITDETILSENGNRTTFETYRLRAKAAVEEISLEQFARVLLMINKKRGYKSSRKAKGAENGTLIDGMEVAQKMYDEGITPGELCLQLLTAGKRYFPDFYRSDLQAEFDRIWNFQKQFYPDSLIDKVKDEVRGKNKSQTWAILAKYFVWKEVENSWNEEEAQTRRVEKEYRLVGIKRGVKREELKLENFQWRVKALSERMNPEELAIVLQEINEQISNSSGYLGAISDRSKELYFNRQTVGQYQMAVLDNNPNIGLRNMVFYRQDYLDEFNTIWEKQAEFHKELTEDLKKEIRDIVIFYQRRLKSQKGLINICEFERRQIEVEIDGKKKIKTIGSRVIPRSSPLFQEFKIWQTLNDIEVSVLGVKNKRKKQDDNSTTLLDSAENIDSLKLNVSRPLDADEKSLLAKELFIRDKLTKSDVLKLLFNNPQNLNLNFKNIDGNRTGSALYQAFSKILEISGHESINFKKSADEIVEQVKTIFSALGWNTEVLCFDSEKELDKQPYFKLWHLLYSFEGDSTPTGDGNLIQKIADLCGFEKDYASILANITFQEDYGSLSTKTIRKILPHLKDGNQYDVACEYAGYKHSKSSLKKEEIKNKVLKDKLELLPKNSLRNPVVEKILNQMVNVINAIITTYGKPDEIRIELARELKKNAKEREELTKSIVDTTKTHEGIRAILQNDFGMSHVSRNAIIRYKLYEELKDNGYKTLYSNTYIPKEKLFSKDFDIEHIIPQARLFDDSFSNKTLEVKSINIEKGSKTAYDFVEEKYGEQGLQEYLNRCEVLFRDKKTKLRKLKMQESEIPEGFIDRDLRNTQYIAKKALSMLNEICRRVVATTGAITDELREDWQLVDVMKELNWEKYKVLGLVEYFEDNDGRLIGRIKDWTKRNDHRHHAMDALTVAFTKDVFIQYFNNKNASLKPDTNEAAIRNKYFQNGKAIPPMSLDEFRAEAKKHLNDTLISIKTKNKVVTINLNRTKKKNGINKKQQQTPRGQLHLETVYGSHKQYVVKEEKVNASFDAAKIATVNKPAYRDALLRRLQENGNDSKKAFTGKNSLDKQPVWLDAKQNECVPEKVKTVMLETVYTVRKPIDEKLNVDKVVDARIRKLLQDRIKEYGNAKSAFANLDENPIWLNKEKGITIKRVSVFGISKAQSLHEKKDKDGNFILDKDSRRIPVDFVNTGNNHHVAIYRKPVLDKKGQAVFDENGELKFELEEVVVSFFDAVTRVNLSQPIIDKDYKRSEGWKFLFSMKQNEYFVFPNEKTGFDPKEIDLLNPENYALISPNLFRVQKIASKDYVFRHHLETVVADRKELQEITWKRISSLSILNRIIKVRVNHIGQIVMIGEY

SEQ ID NO: 23426 - protein, 1207 aa, unidentified
  REGION 1..1207: note = Cas Enzyme sequence
  REGION 394..406: note = misc_feature - Xaa can be any naturally occurring amino acid
SFRAPKDDDWTLIKKKTEADIDKIKMTVGAYIYDTLLQKPDQKIRGKLVRTIERKYYKNELYQILKTQSEFHEELRDKQLYIACLNELYPNNEPRRNSISTRDFCHLFIEDIIFYQRPLKSKKSLIDNCPYEENRYIDKESGEIKHASIKCIAKSHPLYQEFRLWQFIVNLRIYRKETDVDVTQELLPTEADYVTLFEWLNEKKEIDQKAFFKYPPFGFKKTTSNYRWNYVEDKPYPCNETHAQIITRLGKAHIPKAFLSKEKEETLWHILYSIEDKQEIEKALHSFANKNNLSEEFIEQFKNFPPFKKEYGSYSAKAIKKLLPLMRMGKYWSIKNIDNGTRIRINKIIDGEYDENIRERVRQKAINLTDITHFRALPLWLACYLVYDRHSEVXXXXXXXXXXXXXIDLYLKSFKQHSLRNPIVEQVITETLRTVRDIWQQVGHIDEIHIELGREMKSPADKRARMSQQMIKNENTNLRIKALLTEFLNPEFGIENVRPYSPSQQDLLRIYEEGVLNSILELPEDIGIILGKFNQTDTLKRPTRSEILRYKLWLEQKYRSPYTGEMIPLSKLFTPAYEIEHIIPQSRYFDDSLSNKVICESEINKLKDRSLGYEFIKNHHGEKVELAFDKPVEVLSVEAYEKLVHESYSHNRSKMKKLLMEDIPDQFIERQLNDSRYISKVVKSLLSNIVREENEQEAISKNVIPCTGGITDRLKKDWGINDVWNKIVLPRFIRLNELTESTRFTSINTNNTMIPSMPLELQKGFNKKRIDHRHHAMDAIIIACANRNIVNYLNNVSASKNTNLQTLLCHKDKTDNNGNYKWVIDKPWETFTQDTLTALQKITVSFKQNLRVINKTTNHYQHYENGKKIVSNQSKGDSWAIRKSMHKETVHGEVNLRMIKTVSLNEALKKPQAIVEMDLKKKILAMLELGYDTKRIKNYFEENKDTWQDINPSKIKVYYFTKETKDRYFAVRKPIDTSFDKKKIKESITDTGIQQIMLRHLETKDNDPTLAFSPDGIDEMNRNILILNKGKKHQPIYKVRVYEKAEKFTVGQKGNKRTKFVEAAKGTNLFFAIYETEEIDKDTKKVIRKRSYSTIPLNVVIERQKQGLSSAPEDENGNLPKYILSPNDLVYVPTQEEINKGEVVMPIDRDRIYKMVDSSGITANFIPASTANLIFALPKATAEIYCNGENCIQNEYGIGSPLKIKKL

SEQ ID NO: 23427 - protein, 1433 aa, unidentified
  REGION 1..1433: note = Cas Enzyme sequence
MKTILGLDLGCNSIGWALVNEAENTEEVSSIIKLGVRVNPLTVDEMQNFEKGKSITTNADRTLKRSMRRNLQRYKLRRDTLIEVLKEHGFITDSTLLSEHGNKTTFETYRLRAKAAVEEVSLEEFARVLLMINKKRGYKSSRKAKGSEDGVLIDGMDVARKLYEEDLTPGELCLQMLETGKRTLPDFYRSDLQDEFDRIWNFQKQFNPELFCDIAKEEIRSKNRSQTWAVLAKYFVWSEKETVWNEEEARTEEIMKEYKLVGLKRDTKGNDLKLENYSWRVQALSKQLNPEIIAIVLQEINGQISASSGYLGAISDRSKQLYFNRQTVGQYLMSELEKDPNVSLRNRVFYRQDYLDEFDKIWEKQAEFHEELTAKLKKEIRDIIIFYQRRLKSQKGLISFCEFEKREVIVEKDGRKLNKTVGCRVIPRSHPLFQEFRIWQTLNDIEVFAWDKQSKRKKADKSSTLFDNTEDALLVEGKRSLYQEEKELLAKELFVKESMKKAEVLKLLFENFQELDMNFKQIDGNHTGFTLFSAYSKMIEKYGYEPVDFKKPADEIIEKLETIFTNLGWNTELLSIDLSKEDKELDRQPYFRLWHLLYSFEGDNTPTGNGKLLEKIMQLCDVEKEYAVELANVSFQEDYGSLSAKAIKKILPYLKEGNQYDVACDYAGYRHSKSSLTKDEIENKILKDKLEILPKNSLRNPVVEKILNQMVNLINTIIDTYGKPDEIHVELARELKKNAKEREELTKSIARNTREHDEIRQLLRTEFGMMNVSRNDIIRYKLYEELKDNGYKTLYSNEYIPREKIFSKEIDIEHIIPQARIFDDSLSNKTLEYRAINIEKGNKTAYDFVKEKYGDDGLEKFLNRCEALFKNKKTKLRKLKMEEKDIPEGFIDRDLRNTQYISKKALAMLNEISHRVVATTGAITDKLREDWQLVDLMKELNLPKYEKLGMVEMLEDKDGRKIKKITDWTKRNDHRHHAMDALTVAFTKDVFIQYYNNKNAAWMPASKEHANIIGIKARYFENGKALAPMPLAQFRAEAKLHLENLLVSIKAKNKVITSNVNRTNKKNGENRKLQQTPRGQLHLETVYGSHRQYAMKIEKVNATFDVAKIATVSKLAYRNALLKRLEAFGNDPKKAFTGKNTLEKNPLYLDEKQTEMVPEKVQTVEFETVYTIRKPIDPNLSIDKVIDVKIRSVLEKRLKEYGGDAKKAFVNLDENPIWLNEAKGISIKRVSIRGISNAQSLHEKKDKDGNLILDKEGRKIPVDFVNTGNNHHVAVYKKPVLDKVGQIVLDEEGNPKYELDEVVVSFFDAVTRVNLGQPIIDKDYRRSEGWQFLFSMKQNEYFVFPNEKTGFNPKEVDLLNPENYALISPNLFRVQKFAYKNYVFRHHLETTIKDTSSTLKGITWTDFRSSKGLDKIVKVRVDHIGQIVSLGEY

SEQ ID NO: 23428 - protein, 1378 aa, unidentified
  REGION 1..1378: note = Cas Enzyme sequence
MIEEFKNKGVVREDKKIPYDWTIYYLRKKALSQEIEKEELAWILLNFNQKRGYYQLRGEEEEENPNKLVEYYSLKIVDVIADEKPNSKGDIWYSLHLENGWIYRRSSKIPLFGWKDKTRDFIVTTDLNDDGTVKKDKEGIEKRSFRAPSENDWVLLKKKTESDIEKSHKTVGAYVYETLLQNPMQKVRGKLVRTIERKFYKDELKQILEKQREFHPELRDEDLYNDCVRELYRSNETYQFILSKRDFVHLFLDDILFYQRPLRSQKSAIGDCILEFKTYKDKDGNNIKEYLKVISKSNPLYQEFRIWQWLYNLKIYRKEDDEDVTLQFIANIEDKEQLFDFLSNRKSIEQKPLLEYLIKAKGLKKQVKTEAYRWNYVEDKIYPCSETKTMISTRLAKVENIPDNFFTKEIEQKLWHIIYSVTDKNEFEKALRTFAKKYDLDIASFVDNFKKIPPFKNEYGSFSEKAIKKLLPLMRLGKYWKWNDIDNNTQNRISKIITGEYDEEIKDIVREKSIALTNENDFQGLQLWLAQYLVYGRHSEADIAGKWHSVADLEKYLNEFKQHSLRNPIVEQIITETLRVVRDIWRKYGQGAENFFSEIHVELGRDMKNTADERKKIVNVVTENENTNLRIKALLMELKNNSDGKLEVENVRPYSPTQQDILKIYEEYAISTGLDNEKDEKVKEDIKKISRVAQPTTTELQRYKLWLEQKYCSPYTGKVIPLGKLFTEEYQIEHIIPKSRYYDDSFSNKVICEAAVNKLKDKCLGLEFIKNYHGQIVETGFGQKVTIFDEEAYQNFVKQHYAYNHSKRTKLLLEEIPEKMIERQMNDTRYISKFVLPLLSNLVRAKENDNGVNSKNVLPVNGKITTMLKQDWGLNDVWNDLILPRFVRMNELAKTIAFTSWNEQHQKYLPTVPLELSKGFQKKRIDHRHHAMDALVIACATRDHVNLLNNKHANTDTIRYDLQRKLRLFERVTYIDPQTKNNVTKDIPKEFKKPWDNFTVDARNELEKIIVSFKQNLRIINKATNIYTKYENGKKIKVGQKGLNWAIRKPLHKETVFAKVSLRKRKTVRLSEALKDWKKIVDKKLKQEIKRLTCQYGKFDVDTILRYFKDRKYQFGEVDVSKVKMYYFDEENAAVRKNVDTSFTEKFIQGSVTDTGIQKILLNHLEAKGNKVEIAFSPEGIEEMNKNIIQLNEGKLHLPIFKVRVYETIGNKFSVGVKGNKKDKYVEAAKGTNLFFAIYVDENGIRSYETIPLNIVIERLKQGLSVVPEKNRKEHSLLFYLSPNDLVYVPIEDERENIHAVNLDQLNNEQRKRIYKMVSCTGSECHFVPYYVASPIVNKVEYSSLNKIGRSLTGEMIKDVCIKLKVDRLGNIKGISGL

SEQ ID NO: 23429 - protein, 1433 aa, unidentified
  REGION 1..1433: note = Cas Enzyme sequence
MKKILGLDLGCNSIGWALVNEAENTEEISSIIKLGVRVNPLTVDEMQNFEKGKSITTNADRTLKRSMRRNLQRYKLRRETLIEVLKEHGFITDSTLLSEHGNKTTFETYRLRAKAAVEEVSLEEFARVLLMINKKRGYKSSRKTKGSEDGVLIDGMDVARKLYEEGLTPGELCLQMLEAGKKNLPDFYRSDLQNEFDRIWNFQKRFNPELFCDTVKEEVRGKNRSQTWAILAKFFVWSEKESVWNEKEARTEERVKEYKLVGLKRDTKGNELKLENYRWRVQALSEQLNPEIVAIVLQEINGQISASSGYLGAISDRSKQLYFNRQTVGQYLMSELEKDPNVSLRNRVFYRQDYLDEFDRIWERQAEFHEELTVELKKEIRDIIIFYQRRLKSQKGLISFCEFEKREVIVEKDGRKQNKTVGCRVIPRSHPLFQEFKIWQTLNDIEVFAWDKQSKRKKADKSSTLFDNSEKPLLVEGKRSLYQEEKELLAKELFVKESMKKAEVLKLLFENFQELDLNFKQIDGNHTGFALFSAYSKMIEKYGYEPVDFKKSADEIIEKLETIFTNLGWNTELLSIDLSKEDKELERQSYFRLWHLLYSFEGDNTPTGNGKLLEKIMQLCGVEKEYAVELANVSFQEDYGSLSAKAIKKILPYLKEGNQYDVACDYAGYRHSKSSLTKDEIENKILKDKLDILPKNSLRNPVVEKILNQMVNLINTIIDTYGKPDEIHVELARELKKNAKEREELTKSIARNTREHDEIRQLLRTEFGMMNVSRNDIIRYKLYEELKDNGYKTLYSDEYIPREKIFSKEIDIEHIIPQARLFDDSLSNKTLEYRAINIEKGNKTAYDFVKEKYGDVGLQEYLNRCEALFKDKKTKLRKLKMEEKDIPEGFIDRDLRNTQYISKKALAMLNEISRRVVATTGSITDKLREDWQLVDVMKELNLPKYEILGLVETFKDKNGRRIKKITDWTKRNDHRHHAMDALTVAFTKDVFIQYYNNKNAVWMPTSKEHANIAGIKARYFEDGKALAPIPLAQFRAEAKRHLENLLVSIKAKNKVVTSNVNRTKKNNGENKKMQQTPRGQLHLETVYGSHRQYVTKMEKVNAAFDVTKIATVSKLAYRNALLKRLEAFGNDPKKAFTGKNTLEKSPLYLDENQTEMVPEKVQTVEFETVYTIRKPIDPNLSIDKVIDVKIRSVLEKRLKEYGGDAKKAFVNLDENPIWLNEARGISIKRVSIRGISNAQSLHEKKDKDGNLILGKEGRKIPVDFVNTGNNHHVAIYKKPVLDKVGQIVLDEEGNPKYELDEVVVSFFDAVTRANLGQPIIDKDYRRSEGWQFLFSMKQNEYFVFPNEKTGFNPKEVDLLNPENYAMISPNLFRVQKFTYKNYVFRHHLETTIKDTSSTLKGIIWTDFRSSKGLDKIVKVRVDHIGQIVSLGEY

SEQ ID NO: 23430 - protein, 1455 aa, unidentified
  REGION 1..1455: note = Cas Enzyme sequence
MARVLGLDLGTASIGYSLRDTDKGTNITEQLVRFGSIIFQKGVGNSKTGEFSYAAERTKHRASRRLYQARRYRIWETLATLIEFGFCPLSIEDLDRWRVYDKARNLKRRYPVDAANFEQWVRLDFDGDGKSDYSSPYQLREELAIVQLDFSQEINRFKLGRALYHIAQRRGFKSSKGETLKEQEDAVKDDIANEMSLESVSLKKSEERKSKDLASYMEENALHTVGCAFAQLEREGVRVRASKYQAVRSQYKEEIKYIFEFQNGLDIDGDFFKRIYSDRKDGCIFYKRPLRSQKGLVGKCTLEPAKSRCPISHPEFEKFRAFAFINNIQYRRTTEDEWLNLTAEQKLKLYNDKFLQAKPSFKFEAIRKWIEKEIGLLQDYHLSKEKRTINYSDRTNVTGCPISGRMKALLGEKWEEYKQQSDKIRKNKNGKEHVVSYMMEDIWHVCFSYDDEEAVSEFAKSLKFDDKQVKQFLNLWIAIPQGYAMLSLKAIRNINRFLVPKRDNPLYKGHIYTEAALLGKMPEILGEKQWADNEKSILGAINGWINQNREEKRILNIVNNLISAYKSLEYAEQFAYKNIEYQLDDSDKEDIEKYTIEAFGQKSWEKETQEMKDKVLKDVERMYQQFFFTSKRDYFRLPKLGDTIKLYLSNNFPEFYCANSFVESQTGLQCRCAACKKLNKLYHPSMVEFYKPANEQEFEYDGVMLSKKLLANPVIGAFKNPMAMRTLHQLRNLINYFIKEGLVEEDTRIVVETARDLNDANMRWAIEEYQREREKENKAILEAIKELKGEEKNNDDIDKARLLIEQNPEYLFNKDRYEVESGDDTNNKKKKAVGKATDFLYKKDVAKYRLWLEQGMQCIYTGKTISISELFDENKTDFEHTIPRSKSFDSSLANLTVCDAYYNRHIKKNCIPTELPNYEEIEHRLQPWKKKVEQLKNNVEFWRQKSKQAQTKDAKDKAIRQKHLWQMELDYWQDKLSRFTMTEVTSGFKHSQLNDTRLITKYAYHYLKSVFSKVEVQKGLVTADFRKMLGVQSADEKKDRNKHSHHAIDATILSLIPVAAKRDKILELFYKIQEEKKLNFNTEYWEKELQKEIRSCQIGNISSLPDYIEENILINHISKDQTLVPAKRKMRTRGKVIWQRDEDGQICMDKDGYKMPKHWIKGDCIRGKLHGDSFYGAIKQSKKKGEKDYLTSYEDISYVIRRELKYKKTPTDKGFKDLDDLHLSIVDEGLFNIIKQQCDGKSFKEACDDGFYMLNRDGYKVNKIRHIRCYTSVKKPLSIKRQSYLSDKEYKQSYYAEVGDLYAMCKYCNADKTKVRYEVINLFDITENRRYGYNIAEVLEDDKKKEKYYLVAVLQAGKQVILYKNDDELESIIEMSNDKLSDRLYVISGFESPYRIILKKHICAKSDSELGRGESIKSFNELPDKIRQSVNATNYLLEDIDFYISPDGLITFKND

SEQ ID NO: 23431 - protein, 1521 aa, unidentified
  REGION 1..1521: note = Cas Enzyme sequence
MTKNTRNIIGLDLGTNSIGWSWIQQLISPTPTQPSEYLFNRTPIIRMSGSRIIPMPGDVTGSFERGETISKTKDRTAKRMARRMNERFQLRRERLNRVLNIMGFLPEHYARALDRYGKLNEESNTTIAWQSKEDGKNEFIFYPSFLEMAAIFKERHPDIQRIPLDWTLYYLRSKALHQAITKEELSWVLHSFNQKRGYYQSREDITEEDKTKKVEYIKGVVNSVEDTGEKAKGKKIYKVTFADGTEFTSTKSEAPLWIGRTREIIVTTSLDTSGKPKLDKEGKIIQSAKTPDEKDWTLIKIRTEATIDDSKLTVGEYIFHALLKNPETKIKGAHVSTIDRRFYINEINAILKEQEKYHEELRDKSLYEQCIKALYAQNEVRRNIIAPWSMKDLLTKDILFYHRPLKSKKSQISECPLEFHCYTDKDGETHRQGIKCIPVSHPLFQEYRIWQFISNLRIYEREHFDNGKHFTNVDKTSEFLTNEKKEELYEWLAERDSVSQKTLLGKIGLKVERYHWNFPEEKTYPCGETRHLIQSRLKKANLQKAFHSLISDEQKDCFERGLWHILYSVSDYNELCKALKTFARKTGFTLEEQLLFVEEFSSCPPFKKDYGAYSKRAITKLLPLMRIGKFWHEESIDSTTKNRIEHLISGEECSGIDVRVREKVAKTGLCESIEQYQGLPQWLANYVVYNRHSEASEITKWESPDELDNYIRSFKQYSLRNPIVEQVSLETLRVVRDLWAELQKDGQTIDEIHLEMGRDLKNTAEERSRIFRRNSENEDTNFRIKLLLEEFYANEKDIKDVRPYSPSQQELLRIYEEGVWQREKEIPQDIKDIKKRISNDKDIKDITPNDIQRYRIWMDQKYCSPYTGKTIPLSRLFTTDYEIEHVIPRSRYFDDSYNNKVICEAAVNKDKNNRLGMEYIMAAGGKTIELGNGKNVQILKEEEYVELVDKIFGNNTRKRNIMLADEITEEFSHRQLNDTRYIARFMKGILSNIVREKNADGTLEPEETSKNLIVCSGRITDRVKQDWGLNDIWNHIITPRFERLNTKTSSNDFGEYVCKDGKRYFQTRVPLNLQKGFNKKRIDHRHHAMDAIAIACVNRNIVNYLNNAAANQTEREDLRRAVCIPERNGQTKRQLRSPWHCFARDAENALRQIVVSFKQNLRVATKATNSYECFDTASGKKIRKHQSNREHYAIRKPLHKDSVYGEVILPSIASVNLKKALLKADRILDKRLKDKIFELRKLYNYSNKQIEEHLTKVCINCLEWKNYDFKKIAVRILSNDADATHIVAIRKPLDETFDKEKIKTITDTGIQKILLNHLSRYADDPKKAFSPEGIEDMNANIASLNGGKQHLPIYKVRVSEKDNGGYFPIGQKGNRSKKYVTTAKETNLFFAVYADSNGKRSFKTIDLRTAIECKKQGLSVAPSVNEKGDKLLFTLSPNDLVYMPSEEEEANGFSIDNNLNKEQIYKMVSATYKQCFFIPHTVADFIYKNKEFNVLNKIELTEDRRSIKEHCVPLKVNRLGK

SEQ ID NO: 23432 - protein, 1062 aa, unidentified
  REGION 1..1062: note = Cas Enzyme sequence
LWQFIVNLRIYRKGLAQDVDVTNELLKTEEDYVALFDWLNGKKEIDQKAFLKYPLFGLKKEVENYRWNYVQDKPYPCNETRSSMLARLEKCDISIEFLTKENEEALWHILYSVEDKNEIVKALQKFADKHDLNASFVDVFRKFPPFKKEYGSYSAKAIKKLLPLMRMGKYWSENSIDKGTRERIDKIITGEYDEKIENRVREKAIHLVDVSDFRGLPLWLVCYIVYGRHSESKEITQWKSPADIDSYLKSFKQHSLRNPIVEQIIIETLRVVRDIWKQVGNIDEIHVELGREMKNPADKRKKMTQQISENENTNLRIKYLLTEFLNPEYEVENVRPYSPSQQDILRIYEEGVLNSVSDLPEEISDILKKFTETDLKKRPSRSEVLRYKLWLEQKYRSPYTGEVIPLGKLFTSAYEIEHVIPQSCYFDDSFSNKVICEAEVNKLKSNLLGHEFIVKHHGEIVELPFGKKVRIFTVDEYEQFVKDNYSRTRGKMKKLLMDDIPEEFVTRQLNDSRYISKVVKSLLSNIVREKGEEEAISKNVIPCTGGVTDRLKKDWGINEVWNKIILPRFQRLNELTGTNKFTTKNVGIQEIPTMPLELQKGFNKKRIDHRHHAMDAIIIACANRNIINYLNNESATAKAELSRYDLQKLLCDKAKTDNNGNYKWVIRKPWASFTQDTYLALENIIVSFKQNLRVINKATNHFLHYNEEGKKIFVKQGKGDNWAIRKSMHKDTVFGEVNLRRIKTVALNEAMKNPQSIVVKDFKRKLLELWNLGFDAKRIKKYFEDNRETWSDINLSKIEVYYFSKDTKDRFFATRKPLDTSFDRKKIENNITDTGIQKILLRHLELKDNNPDIAFSPDGIDEMNRNIIQLNNGKYHQPIIKVRWYEQADKFAVGQTGNKSSKFVEAAKGTNLFFAVYESNILDKKTNTIIKKRNYATIPLNVAIERQKQGLPVAPEDENGNDPIFVLSPNDLVYLPTDDELANGIIAQPLDRGRIYKMVSSSGEQCFFIKHIVANVLVDKFEFSPLNKMERALTGEMIKMICMPIKVDRLGNVLESSSSHKK

SEQ ID NO: 23433 - protein, 986 aa, unidentified
  REGION 1..986: note = Cas Enzyme sequence
  REGION 973..976: note = misc_feature - Xaa can be any naturally occurring amino acid
MKRILGLDLGTNSIGWALVDSEEQRILGMGSRIIPMDQGVLDTFSGGNPVETQTAARTVYRGTRRLRERALLRRERLIRVLNMMKFLPEHYASQIDFEKRLGQFFDEKEPKLAWKQNDEGRFEFIFQQSFNEMIEEFKNKGVVREDKKIPYDWTIYYLRKKALSQEIEKEELAWILLNFNQKRGYYQLRGEEEEENPNKLVEYYSLKIVDVIADEKPNSKGDIWYSLHLENGWIYRRSSKIPLFGWKDKTRDFIVTTDLNDDGTVKKDKEGIEKRSFRAPSENDWVLLKKKTESDIEKSHKTVGAYVYETLLQNPMQKVRGKLVRTIERKFYKDELKQILEKQREFHPELRDEDLYNDCVRELYRSNETYQFILSKRDFVHLFLDDILFYQRPLRSQKSAIGDCILEFKTYKDKDGNNIKEYLKVISKSNPLYQEFRIWQWLYNLKIYRKEDDEDVTLQFIANIEDKEQLFDFLSNRKSIEQKPLLEYLIKAKGLKKQVKTEAYRWNYVEDKIYPCSETKTMISTRLAKVENIPDNFFTKEIEQKLWHIIYSVTDKNEFEKALRTFAKKYDLDIASFVDNFKKIPPFKNEYGSFSEKAIKKLLPLMRLGKYWKWNDIDNNTQNRISKIITGEYDEEIKDIVREKSIALTNENDFQGLQLWLAQYLVYGRHSEADIAGKWHSVADLEKYLNEFKQHSLRNPIVEQIITETLRVVRDIWRKYGQGAENFFSEIHVELGRDMKNTADERKKIVNVVTENENTNLRIKALLMELKNNSDGKLEVENVRPYSPTQQDILKIYEEYAISTGLDNEKDEKVKEDIKKISRVAQPTTTELQRYKLWLEQKYCSPYTGKVIPLGKLFTEEYQIEHIIPKSRYYDDSFSNKVICEAAVNKLKDKCLGLEFIKNYHGQIVETGFGQKVTIFDEEAYQNFVKQHYAYNHSKRTKLLLEEIPEKMIERQMNDTRYISKFVLPLLSXXXXLYVQKKMTME

SEQ ID NO: 23434 - protein, 1110 aa, unidentified
  REGION 1..1110: note = Cas Enzyme sequence
LSIDEVAFVVSELNGAINNASSYLGAIGDRSKELRFNKLTVGQYLMKQLDKDPNYSLKNQVFYRQDYLDEFEAIWEKQAQYHPELTPELKKDIRDIIIFYQRPLKSQKGLVSFCEFESRQIEVNVDGKQKLRTIGCKVCPKSSPLFQEFKIWHTLHSLIVKKTNAERFLYQEEKETLFAELNIKETLSKLDALKLLYKNYKDLDLNYDKIEGNRTQAALFKAYQTIISMTGHGEYDFSKMMSDEVMEIVEGVFSGLGYNTNILHFDAENELFDKQPMYMLWHLLYSYEGDKSSTGNKSLIDKIFKLCGFEKEYASIIANIIFQPDYGSLSTKAIRKILPRMKEGNEYSLACEYAGYRHSQRSLTKDELDNKVYKDHLDLLPRNSLRNPVVEKILNQMINVVNFVVDAYGKPDEIRIELARELKKSSKERKEMTMAINKTTADHEKYRQILQKEFGLTNVTRNDIIRYKLYLELKSNGYKTLYSNTYIPQEKLFSKEFDIEHIIPKAKLFDDSFSNKTLESRRVNIEKSNLTAYDYVLGVYDEKGINDYEIRIENLYKSGIISKAKRDKLMMKEVDIPSGFIERDLRDSQYIAKKAREILEELVKFVVPTTGTITDRLREDWQLIDVMQELNWEKYDKLGLTEIVKDKDGREIRRIKDWTKRNDHRHHAMDALTVAFTKRSYIQYLNNLNARSDKSGSIYAIEQKELYRDKHGKLRFNPPMPLDVFRAEAKRQLENTLISIKARNKVLTQNVNITKTKKTESGYRKKVQLTPRGQLHNETFYGAIKWYVPKLESVGSGFNVEQIALVANKRYREALLTRLAACGNDPKKAFTGKNSLEKNPLYLDELHTQQVPTKVKTVTLETVYTTRKDISSDLKIEKVIDRKVRSILKERLKEFGGDPKKAFSNLDANPIWLNKEKGISIKRVTITAVSKAEPLHAKRDHFGKYILDANGAKQPVDYVNTGNNHHVAIYRDEKGVLQERVVSFYEATASASVGLPVVDKEYRKSEGWTFLFSMKQNEYFVFPNEKNGFNPNEIDLMDPDNYALISPNLFRVQKITSKDYVFRHHLETTVEDRKELQNITWKRFQSLTNLDKLVKVRVNHIGQIVSVGEY

SEQ ID NO: 23435 - protein, 1506 aa, unidentified
  REGION 1..1506: note = Cas Enzyme sequence
MKKILGLDLGTNSIGWAVINSSVDDEGKEKLTSISSCGSRIIPMDAATLGDFDKGNAKSSVAERTRLRGIRRLLERSLLRRERLHRVLSVMGFLPEHYASQLDRYGKFLPETEPKLAWYKDNTGSYRFLFQDSFNEMLEDFRLYHPELVAEGKKIPYDWTIYYLRKKALSQKIAKEELAWILLNFNQKRGYYQLRGEEEQEDNKKSVEYYALKVVAVEDSGERKGKDIWYNVKLENGWIYRRASSIPLDWTGKVKEFVVTTDLDDAGNPKKDKDGNVKRSFRAPKEDDWGLLKTKTQTQIDESGQTVGAYIYDSLLRMPDQKIRGKLVRTIERKYYKDELRKILLKQTEFHAALQDHNLLLSCIEELYPNNEAHRRLLSSSSFTCFLLEDILFYQRPLKSQKGLIDDCPYESHVYKKDGSLHRTPLKCISKSHPLFQEFRLWHFLSFLRIYQRERMIDGSLKLDVDVTNEFLQNEDDYVKLFDWLNGRKEIDQKTILAYKPFGLKKNEQPKYRWNYVEDKSYPCNETRADMISRLSKAGVSEGFLTEEREEALWHILYSISDKKELTKALGTFAEKNGLNEAFVELFSKMPPFESNYAAYSLKAIRKLLALMRMGKYWNEQDIDKQTRSRIEKILTGEYDETIRTRVREKAIHLTDISSFRGLPLWLACYVVYNRHSEAKELVKWETPADIDHFLSKFRQHSLRNPIVEQVIMETLRTVRDIWKQEGQIDEIHVELGREMKNPAKERARITAQVLENENTNLRIKALLTEFMNPEFEIENVRPYSPGQQEILRIYEEGVLSGVAEKDLPEDIISILKKFRENDVKKRPTTSEVLRYKLWLEQRYRSPYTGRIIPLGKLFTPAYEIEHVIPQSRYFDDSISNKVICESAVNKLKDNCLGYEFIKKHSGEIVELGNGEKATVFTSEEYEHFVKESYLGNGKKMKKLLLEDIPDNFIERQLNDSRYISKVVKSLLSNIVCEEGEQEGMSKNVIVCTGGVTDRLKKDWGVQDVWNRIILPRFLRLNKMTDSTGFTSVSTNGHLLPALPLHLQKGFNKKRIDHRHHAMDAIVIACADRNIVNYLNNASARKGSEISRYDLQHLLCDKVKTDSNGNYKWMLRKPWDTFTQDVYTALTNIVVSFKQNLRVINRTTNYHQHYNESGEKKMIPQVKGDRWAIRKPMHKDTVYGEVNLRREKTLPLKDVLNNPSIVVDKSLKSKLHELLKAQYDLKAITKYFEAHQDVWADINLKKIKVYYFTKETNERFFATRKSLDSSFNQKKIQEEVTDTGIQRILLRHLQLNDNNPDIAFSPDGIERMNQNMNILNDGKGHQPIYKVRTYEKAEKFAVGEHGNKVKKFVEAAKGTNLFFAVYESIQEDEATGKQVRKRTFATIPLNEVIKRKKQGLSVAPEDSNGNLPIFVLSPNDLVYLPTEEERNRGKVTQPLDRERIYKMVSCTGNRLFLVPYMVASPIYDKKEYTSLNKIELTDDKISIKEWCIPILIDRLGNISINY

SEQ ID NO: 23436 - protein, 1508 aa, unidentified
  REGION 1..1508: note = Cas Enzyme sequence
MRTILGLDLGTNSIGWAVINSVIKEQTERIWIEMAGSRIIPMDAAILGDFDKGNSVSQTAERTRFRGVRRLRERQLLRRERLHKVLKILGFLPEHYLKGIDFEKHTGKFLSGSEPKLPWVKDRWGKYSFLFQTAFNEMLADFAKHQPSLVFDGKKIPYDWTVYYLRKKALTEMISKEELAWILLNFNQKRGYYQLRGEEEEDNAGKSVEFYALKVLSVEATDEKKGRDIWYNVHLENGWVYRRSSNVPLDWEGRVKEFIVTTDLNPDGTPKLDKYGEVKRSFRAPKEDDWMLIKKRTEADIAGTHKTIGSYIYDALLQEPQQKIIGKLVKTVERKFYKEELNFILQKQCAFHAELQDRDLYMRCIEALYPGNEVQRRNIANRDFIYLLIDDVLFYQRPLKTKKSLIANCPYEENEYVNRKTGEIKTAPLKCIAKSHPLFQEFRLWYFLSNIRVYQKEREVNGTLHLDVDVTTEFLKTEDDYVALFDWLNSRKEIDQKAFLRYPAFGLKKEINNYRWNYVEDKFYPCNETRHAILSRLEKAGIGIDFLSDEKETALWHILYSVSDKQEIEKALATFAVKNGLNESFVEVFKKFPPFKSEYGAYSAKAIKKLLPLMRCGKYWDMSLIDGTTKERIERIIAGECDESIGAKVREKAMNLSDISCFKRLPLWLACYVVYNRHSEDKEITKWESPADIDAYLAAFKQHSLRNPIVEQVITETLRVVRDIWKQVGKIDEIHIELGREMKNPADKRKRMTTQILENENANLRIKALLAEFVNPEYGVENVRPYSPSQQEILRIYEDAVLKGEEQIPEDIDVILKKFNTSKLPTKSEFLRYKLWLEQKYRSPYTGELIPLAKLFTAAYEIEHVIPQSRYFDDSFSNKVICESAVNKLKDNQLGYEFIKNHHGQKVEVGFGKTVEIFSVDSYERFVKEQYAKSGIKMKKLLMDDIPEQFIERQLNDSRYISKVVKGLLSNIVREKNDSGEYEPEAVSKNILVCTGSVTDRLKKDWGMNDVWNSIVSPRFERLNALTETQCFGHWENKDGKKVFQTAVPLEYQKGFSKKRIDHRHHAMDAIVIACATRNHVNYLNNESASRNAKISRYDLQRLLCDKSRGDGNGNYRWIIKKPWTTFTQDAREALSGIIVSLKQNLRIINKTTNIYQHFDANGTRVYEKQKIGDSWAIRKPMHKDTVFGAVNLRKVKVVRLSVALDTPSMIVDKRVKNKVLELLSYKYDKKKIEKYFKENAFLWKELDIAKVAVYYFTENTTEPLVAVRKSLDSTFNEKKIASVTDTGIQKILLNHLKSKEGKAELAFSAEGIEEMNRNLLQLNDGKGHQPIYKVRVYEPRGNKFKVGVLGNKGAKWVEAAKGTNLFFAIYITEDGNRTYETIPLNWVIEREKQGLVPVPDRNEKGDKLLFWLSPNDLVYLPTEEERDFGRINEPIDRGRIYKMVSSSGNQCFFIPQSISNAIISTKELGSNNKAEKSWDGEMIKNICIPVKVDRLGRIIEVKYRVNE

SEQ ID NO: 23437 - protein, 966 aa, unidentified
  REGION 1..966: note = Cas Enzyme sequence
VCRLYEVINNIRLVNVRNKDAAPIPDGIVSSEARKSQYQFVFTAEERERIYEFLNTHEKMTVTDLLKLIGLKRGDGFRPDQSLGKGIPGNKTYTALFNALEGVDRRDELLRFNLRFIDWNADPATGDMRRVVSPDFINEPLYRLWHTAYSIADRDELAAALANNFGITDPAVVDRIFAIDFTGAGFSNRSARFMRRIIPYLTEGMVYSDAAAAAGVNHSASVTAEENAARVLVDHLDIIKKGSLRQPVIEKILNQMIHVVNSLIAQFGPIDEVRVELARSLKQSAKERSDASTAINAREKENKALGEKIAEYGLTPSRRTIQKLRLWEETEHVCMYCGQPVSATEFLTGDAEVEHIIPRSIFFDDSLSNKTCACRRCNKAKNNRTAYDFMKEDHTDEEFRAYIARVEAMAEAKKISRTKRDRLLCPKEEIPSDFLERDLRQSQYIARKAMEILHTVVRNVWATSGSVTDFFRHQWGYDRILHDLSLDKYALAGLVEEVEYEHKGQTHRRQQIKNWSKRFDHRHHAVDALVIALTRQGYVQRLNNLNAEHGNIHAELVKENADFTRNKSQLELWASTRPRFDIETVRKAVEGIAVSFKSGKKLTTPGKRAIMRGGKKTVVQDKLVIPRGALHQETVYGLIRLPDGRKTLKYAFDTPTLVSDPAARKAIQAILEHFGGNVKKALKSLPGEGLEVMRKGKRENVTEVSCHRFEYVVRKNVAALKYKDILKIVDGAVRRSVEGRFAECGNKDSEYQKSLAERPLILPGAFTPIRTVRIATGLKPKSMAAVCRDSSGNPIGYAKTASNHHIAIYEDSVGRKLCSVTSMWDGVLRRLNGIPVIVKHPDDAWNLLMDIADEDVRERLAASLPRPDWKFLMSLQMNQMFVLGLSEDEFNDAVRNNDRATLASHLYRVQKLADNDFSLRRHTNTTADDTTEFRKMLDVYRLSTQAFLNLKPHKVKITPTGDFAYD

SEQ ID NO: 23438 - protein, 1335 aa, unidentified
  REGION 1..1335: note = Cas Enzyme sequence
TSKISKEELAWILLNFNQKRGYYQLRGEEEEENKNKLVEFYALKVVAVEDSGEKKGKDIWYNVHLENGWVYRRTSNMPLDWVGKTKEFIVTTDLEKDGTPKKDKEGNVKRSFRAPKEDDWSLVKKKTEADIDQTHKTVGAYIYDTLLGNPSQKIRGRLVRTIERKYYKEELKQILEKQKEFHLELQDRALYAACVEELYTINEAHRNNIGNRDFTYLFLEDILFYQRPLKSKKSLIDNCPYEENHCLDKETGEIKSFPVKCIAKSHPLFQEFRLWQFIVNLRIYRKDLAQDVDVTNELLKTEEDYVALFDWLNGKKEIDQKAFLKYPLFGLKKEVENYRWNYVQDKPYPCNETRSSMLARLEKCDISIEFLTKENEEALWHILYSVEDKNEIVKALQKFADKHDLNASFVDVFQKFPPFKKEYGSYSAKAIKKLLPLMRMGKYWSENSIDKGTRERMDKIITGEYDEKIENRVREKAIHLADVSDFKGLPLWLVCYIVYGRHSEAKEITQWKSPADIDLYLRSFKQNSLRNPIVEQIIIETLRVVRDIWKQVGNIDEIHVELGREMKNPADKRKKMTQQMSENENTNLRIKYLLTEFLNPEYEVENVRPYSPSQQDILRIYEEGVLNSVSDLPEEISDILKKFTETDLKKRPSRSEVLRYKLWLEQKYRSPYTGEVIPLGKLFTPAYEIEHVIPQSCYFDDSFSNKVICEAEVNKLKSNLLGHEFIVKHHGEIVELPFGKKVRIFTVDEYEQFVKDNYSRTRSKMKKLLMDDIPEEFVARQLNDSRYISKVVKSLLSNIVREKGEEEAISKNVIPCTGGVTDRLKKDWGINEVWNKIILPRFQRLNELTGTNKFTTKNVGIQEIPTMPLELQKGFNKKRIDHRHHAMDAIIIACANRNIINYLNNESATAKAELSRYDLQKMLCDKAKTDNNGNYKWVIRKPWASFTQDTYLALENIIVSFKQNLRVINKATNHFLHYNEEGKKIFVKQGKGDNWAIRKSMHKDTVFGEVNLRRIKTVALNEAMKNPQSIVVKDFKRKLLELWNLGFDAKRIKKYFEDNRETWSDINLSKIEVYYFSKDTKDRFFATRKPLDTSFDRKKIENNITDTGIQKILLRHLELKDNNPDIAFSPDGIDEMNRNIIQLNNGKYHQPIIKVRWYEQADKFAVGQTGNKSSKFVEAAKGTNLFFAVYESNILDKKTNTIIKKRNYATIPLNVAIERQKQGLPVAPEDENGNDPIFVLSPNDLVYLPTAADLANGIIAQPLDRGRIYKMVSCTGNEGYFIPARIANPILQTIELGSNNKAQKAWTDEMIKEICMPIKVDRLGNVLESSSSYKK

SEQ ID NO: 23439 - protein, 1114 aa, unidentified
  REGION 1..1114: note = Cas Enzyme sequence
MGYIFGLDIGVASVGVAVINNQTLEIEEVVSDLFESADASKNVERRSARQSRRLQRRRKNRVSDFNRLWIKSGYDIPEDNDENILLLRNEGIKKVLSEKELYYVLRYMLQHRGISYLEDALGEEEAKGSYQKGIALNQKESQNLLPCEIQQERMRSYGQYRGQYEITEEDGSKVTLSNIFTTSSYIKELNKLFEVQQEHGLVNEEFINQYMEIFRRKRKYYEGPGNESSRTDYGKYTTKKNDDGKYITEKNIFEKLIGKCSVYKNEFRAAGASYTAQEFNILNDLNNITVDGNKLSKEQKVSIIESIKSANRVSVEKIIGDCIGSKKPFIEGARIDKNGKHIYHSFEQYNKMRKAFELINFDIAELSVDELDEIGRILTINTEKEGIEEAFKESKVSLTEEQINALIDLRRKNSLAFNKWQSLSVRAMRELIPDLYERSVNQMVLLTEKGIFKEKENEFAKSVYIPKEIIISEIYNPVVKRSVSVALDALNALIKKYGYPDDVVVEMPRDKNEDEQKDRIKRFQKNRENELKEIKNKLKQEYNIELTDEYFRKHKGLELQLKLWVEQEEKCPYSGKYININDLLYHHDMFEVDHIIPLSISYDDGRNNKVLVYREENQSKRNNTPMVYLANVNRDYDVHEFMDYVLKNKKFTPKKKSNLLYSEDITKIDVVKGFINRNLNDTRYASRSILNAIQLYFSSRDCNTTVRVINGTVTHQLRNRLKLEKDRDKSYSHHAIDAAIICYTQLGLLKFKEIQSRFIDFDNEVYKEADIQSCYDEKYYDEALFSQVLKIRNNLKNAEGDPQTTVVSRGIYAESEKNNGIVKYHHRVDKKANRGLSNATIYGTRNINNKIYKIVSYDIRDNKDVDSIRKIIAGGKQEYFLMYKNDPKTFETLMSIYEQFNDEKNPFVAFEQETGEKIRKYSKKHNGPVIKKIKYADSEVGSCIDISANYGYNKDDKKVIMDTLKPYRADLYYNRRNNNYRIIGVKYADFKFVKGRYILDEASYEDILVKEEILKSGMKITDLESEGYEFRLSFYKNDIIQYEKDGDVYKERFLSRTMPKQKNYIETKPIVAAKYLKPQNLIGLTKADNIGKIYTDILGNERIVYKERFKLSID

SEQ ID NO: 23440 - protein, 1368 aa, unidentified
  REGION 1..1368: note = Cas Enzyme sequence
MLEDFKLNHPNLITDDKKVPYDWTIYYLRKKGLTSKISKEELAWILLNFNQKRGYYQLRGEEEEENNNKLVEFYALKVVAVEDSGEKKGKDIWYNVHLENGWVYRRTSNIPLDWVGKTKEFIVTTDLEKDGTPKKDREGNVKRSFRAPKEDDWSLVKKKTEADIDQTHKTVGTYIYDTLLGNPSQKIRGRLVRTIERKYYKEELKLILDKQKEFHPELQDRALYAACVEELYTINEAHRNNIGNRDFTYLFLEDILFYQRPLKSKKSLIDNCPYEENHCLDKETGEIKSFPVKCIAKSHPLFQEFRLWQFIVNLRIYRKGLAQDVDVTNELLKTEEDYVALFDWLNGKKEIDQKAFLKYPLFGLKKEVENYRWNYVQDKPYPCNETRSSMLARLEKCDISIEFLTKENEEALWHILYSVEDKNEIVKALQKFADKHDLNASFVDVFRKFPPFKKEYGSYSAKAIKKLLPLMRMGKYWSENSIDKGTRERIDKIITGEYDEKIENRVREKAIHLVDVSDFRGLPLWLVCYIVYGRHSESKEITQWKSPADIDSYLKSFKQHSLRNPIVEQIIIETLRVVRDIWKQVGNIDEIHVELGREMKNPADKRKKMTQQISENENTNLRIKYLLTEFLNPEYEVENVRPYSPSQQDILRIYEEGVLNSVSDLPEEISDILKKFTETDLKKRPSRSEVLRYKLWLEQKYRSPYTGEVIPLGKLFTSAYEIEHVIPQSCYFDDSFSNKVICEAEVNKLKSNLLGHEFIVKHHGEIVELPFGKKVRIFTVDEYEQFVKDNYSRTRGKMKKLLMDDIPEEFVTRQLNDSRYISKVVKSLLSNIVREKGEEEAISKNVIPCTGGVTDRLKKDWGINEVWNKIILPRFQRLNELTGTNKFTTKNVGIQEIPTMPLELQKGFNKKRIDHRHHAMDAIIIACANRNIINYLNNESATAKAELSRYDLQKLLCDKAKTDNNGNYKWVIRKPWASFTQDTYLALENIIVSFKQNLRVINKATNHFLHYNEEGKKIFVKQGKGDNWAIRKSMHKDTVFGEVNLRRIKTVALNEAMKNPQSIVVKDFKRKLLELWNLGFDAKRIKKYFEDNRETWSDINLSKIEVYYFSKDTKDRFFATRKPLDTSFDRKKIENNITDTGIQKILLRHLELKDNNPDIAFSPDGIDEMNRNIIQLNNGKYHQPIIKVRWYEQADKFAVGQTGNKSSKFVEAAKGTNLFFAVYESNILDKKTNTIIKKRNYATIPLNVAIERQKQGLPVAPEDENGNDPIFVLSPNDLVYLPTDDELANGIIAQPLDRGRIYKMVSSSGEQCFFIKHIVANVLVDKFEFSPLNKMERALTGEMIKMICMPIKVDRLGNVLESSSSHKK

SEQ ID NO: 23441 - protein, 1427 aa, unidentified; identical to SEQ ID NO: 22462
  REGION 1..1427: note = Cas Enzyme sequence

SEQ ID NO: 23442 - protein, 1425 aa, unidentified
  REGION 1..1425: note = Cas Enzyme sequence
MTKILAFDLGSSSIGYSLRDTDKNGENIIDQLVLYGSIIFSPGMADNGVSNAAERTKHRSSRHLYRVRRYRIWETLATLIEFDCCPLSKEDLDKWKTYDKKKSLTRQYPVDAVEFEKWIRMNPYELREELATQQLDFTKEENRFKLGRALYHIAQRRGFRSSKGETLKEQEKDINENPAEEIRIDSDLLKKSEEKKSKKLVAYMEEHSLPTVGKAFANLINDKIRVRASEYQAVRSQYRDEIEYIFNFQKGLDANGEFFRRIYSTGNDGTIFYQNPIRSQKGQVGKCTLEPAKPRCPISHPEYEKYRAFSFINNIKYRKSIDEDWQTLTASQKIKLYKEKFLLVNDFEFAVIRKWIEKEIGLPKDISLSKENGTINYDDRTNVSACPVSGRLKSVFGDNWEDYVYQTAKTRKDKEGKEHTVTYTIEDIWHVCFSYDDEDAVSGFAKSIGLDAAQEKKFLNLWMNIPQGYAMLSLKAIRNINRFLVPKENNPSYKGYIYTEATLFAKIPDILGEKQWQESESDILRSLNGLMNDVRDENCILKIVNNLISDYKALDYRDLDYREHFAVNDRSYKLDDSDRKDVEMHTVSFFGKSVWEKKPEDEREEILGKVEELYQNFFSSSKRDYYNLPKLGDRIKLYLSNKFPELRCCNEDADSRSQCNCHACKKLNQLYHPSMVEFYRPVVCNGKKLLGSPVTGSFRNPMAMKVLHQLRRLANGLIQKGLIDEDTRIVVETARELNDANMRWAIEEYDNIREKENKAIIKAIKEIRKDDSEVGDSILEKARLLIEQSPDYLFDYMDDENMIDKRGTVKKKNSGLIYEKGVTRYRLWLEQGMQCLYTGKIINLSDLFDENMTDIEHTIPQSRSFDNSMANKTVCFAYYNREIKKNRMPTELEDYEEIKKRLLPWEKRVEQLKNRVEFWKKKARQALTKENKDKAIRQKHLWQMELDYWKDKLSRFTMTEVSEGFKHRQLNDTRLITKYAYHYLKSVFDKVDVQKGIITSEFRKIFGFPVKTRDNHSHHTIDATILTLIPVASRRDEMLRLFYEIQENKKLNIDTKEKEKQLEGLIKSCRIGKTVGITKHIENNILVKYVSKDRALTPAIRNKRVGGKVVWERNEKGEILIDINGKKIPKYKLTGDCIRGELHKASFYGAIRQSKRETEKKKEQEEDASYETSYNDISYVIRRKLSDFKDLNELHKVIVDEHLFNIIKKQCEGKDFKDVCNEGFYMPNCNNQIRHIRCYTYDVKNPLHIRKQTYLSKKGYKQTFHVKVGDLYAMCRYHNVNKKMRYGIVKLFDISKSRKKGYEIPEILDDEYYLDAILRPGMQVILYKDQSDYDNLLRKPLNIKLLSERLYIIERFEGDNIINLKKHLCSSSFKETGRGKAINLKSFDNGLPEKIRQSIRQLNYLLESVDFKINLEGKIVFRNKN

SEQ ID NO: 23443 - protein, 1508 aa, unidentified
  REGION 1..1508: note = Cas Enzyme sequence
MRTILGLDLGTNSIGWAVINSVIKEQTERIWIEMAGSRIIPMDAAILGDFDKGNSVSQTAERTRFRGVRRLRERQLLRRERLHKVLKILGFLPEHYLKGIDFEKHTGKFLSGSEPKLPWVKDRWGKYSFLFQTAFNEMLADFAKHQPSLVFDGKKIPYDWTVYYLRKKALTEMISKEELAWILLNFNQKRGYYQLRGEEEEDNAGKSVEFYALKVLSVEATDEKKGRDIWYNVHLENGWVYRRSSNVPLDWEGRVKEFIVTTDLNPDGTPKLDKYGEVKRSFRAPKEDDWMLIKKRTEADITGTHKTIGSYIYDALLQEPQQKIIGKLVKTVERKFYKEELNFILQKQCAFHAELQDRDLYMRCIEALYPGNEVQRRNIANRDFIYLLIDDVLFYQRPLKTKKSLIANCPYEENEYVNRKTGEIKTAPLKCIAKSHPLFQEFRLWYFLSNIRVYQKEREVNGTLHLDVDVTTEFLKTEDDYVALFDWLNSRKEIDQKAFLRYPAFGLKKEINNYRWNYVEDKFYPCNETRHAILSRLEKAGIGIDFLSDEKETALWHILYSVSDKQEIEKALATFAVKNGLNESFVEVFKKFPPFKSEYGAYSAKAIKKLLPLMRCGKYWDMSLIDGTTKERIERIIAGECDESIGAKVREKAMNLSDISCFKRLPLWLACYVVYNRHSEDKEITKWESPADIDAYLAAFKQHLLRNPIVEQVITETLRVVRDIWKQVGKIDEIHIELGREMKNPADKRKRMTTQILENENANLRIKALLAEFVNPEYGVENVRPYSPSQQEILRIYEDAVLKGEEQIPEDIDVILKKFNTSKLPTKSEFLRYKLWLEQKYRSPYTGELIPLAKLFTAAYEIEHVIPQSRYFDDSFSNKVICESAVNKLKDNQLGYEFIKNHHGQKVEVGFGKTVEIFSVDSYERFVKEQYAKSGIKMKKLLMDDIPEQFIERQLNDSRYISKVVKGLLSNIVREKNDSGEYEPEAVSKNILVCTGSVTDRLKKDWGMNDVWNSIVSPRFERLNALTETQCFGHWENKDGKKVFQTAVPLEYQKGFSKKRIDHRHHAMDAIVIACATRNHVNYLNNESASRNAKISRYDLQRLLCDKSRGDGNGNYRWIIKKPWTTFTQDAREALSGIIVSLKQNLRIINKTTNIYQHFDANGTRVYEKQKIGDSWAIRKPMHKDTVFGAVNLRKVKVVRLSVALDTPSMIVDKRVKNKVLELLSYKYDKKKIEKYFKENAFLWKELDIAKVAVYYFTENTTEPLVAVRKSLDSTFNEKKIASVTDTGIQKILLNHLKSKEGKAELAFSAEGIEEMNRNLLQLNDGKGHQPIYKVRVYEPRGNKFKVGVLGNKGAKWVEAAKGTNLFFAIYITEDGNRTYETIPLNWVIEREKQGLVPVPDRNEKGDKLLFWLSPNDLVYLPTEEERDFGRINEPIDRGRIYKMVSSSGNQCFFIPQSISNAIISTKELGSNNKAEKSWDGEMIKNICIPVKVDKLGRIIEVKYRVNE

SEQ ID NO: 23444 - protein, 1508 aa, unidentified
  REGION 1..1508: note = Cas Enzyme sequence
MKKILGLDLGTNSIGWAVINSLVDDEGKEKLTSISSCGSRIIPMDAATLGDFDKGNAKSSVAERTRLRGIRRLLERSLLRRERLHRVLSVMGFLPEHYASQLDRYGKFLPETEPKLAWYKDNTGSYRFLFQDSFNEMLEDFRLYHPELVAEGKKIPYDWTIYYLRKKALSQKIAKEELAWILLNFNQKRGYYQLRGEEEQEDNKKSVEYYALKVVAVEDSGERKGKDIWYNVKLENGWIYRRASSVPLDWAGKVKEFVVTTDLDDAGNPKKDKDGNVKCSFRAPKENDWGLLKTKTQTQIDESGQTVGAYIYDSLLRMPDQKIRGKLVRTIERKYYKDELRKILLKQTEFHAALQDHNLLLSCIEELYPNNEAHRRLLSSSSFTYFLLEDILFYQRPLKSQKGLVDDCPYESHVYRDKKDGSLHRTPLKCISKSHPLFQEFRLWHFLSFLRIYQRERMIDGSLKLDVDVTNEFLQNEDDYVKLFDWLNGRKEIDQKTILAYKPFGLKKNEQPKYRWNYVEDKSYPCNETRADMISRLSKAGVSEGFLTEEREEALWHILYSISDKKELTKALGTFAEKNGLNEAFVEQFSKMPPFESNYAAYSLKAIRKLLALMRMGKYWNEQDIDKQTRSRIEKILTGEYDETIRTRVREKAIHLTDISSFRGLPLWLACYVVYNRHSEAKELVKWETPADIDHFLSKFRQHSLRNPIVEQVLMETLRTVRDIWKQEGQIDEIHVELGREMKNPAKERARITAQALENENTNLRIKALLTEFMNPEFEIENVRPYSPGQQEILRIYEEGVLSGVAEKDLPEDIISILKKFRENDVKKRPTTSEVLRYKLWLEQRYRSPYTGRIIPLGKLFTPAYEIEHVIPQSRYFDDSISNKVICESAVNKLKDNCLGYEFIKKHSGEIVELGNGEKATVFTSEEYEHFVKESYLGNGKKMKKLLLEDIPDNFIERQLNDSRYISKVVKSLLSNIVCEEGEQEGMSKNVIVCTGGVTDRLKKDWGVQDVWNRIILPRFLRLNKMTDSTDFTSVSTNGHLLPALPLHLQKGFNKKRIDHRHHAMDAIVIACADRNIVNYLNNASARKGSEISRYDLQHLLCDKVKTDANGNYKWMLRKPWDTFTQDVYTALTNIVVSFKQNLRVINRTTNYYQHYNESGEKKMIPQVKGDRWAIRKPMHKDTVYGEVNLRREKTLPLKDVLNNPSIVVDKSLKSKLHELLKAQYDLKAITKYFEAHQDVWADINLKKIKVYYFTKETNERFFATRKSLDSSFNQKKIQEEVTDTGIQRILLRHLQLNDNNPDIAFSPDGIERMNQNMNILNDGKGHQPIYKVRTYEKAEKFAVGEHGNKVKKFVEAAKGTNLFFAVYESIQEDEATGKQVRKRTFATIPLNEVIKRKKQGLSVAPEDSNGNLPIFVLSPNDLVYLPTEEERNSGKVTQPLDRERIYKMVSCTGNRLFLVPYMVASPIYDKKEFTSLNKIELTDDKISIKEWCIPILIDRLGNISINY

SEQ ID NO: 23445 - protein, 1507 aa, unidentified
  REGION 1..1507: note = Cas Enzyme sequence
MKKILGLDLGTNSIGWAVINSLVDDEGKEKLTSISSCGSRIIPMDAATLGDFDKGNAKSSVAERTRLRGIRRLLERSLLRRERLHRVLSVMGFLPEHYASQLDRYGKFLPETEPKLAWYKDNTGSYRFLFQDSFNEMLEDFRLYHPELVAEGKKIPYDWTIYYLRKKALSQKIAKEELAWILLNFNQKRGYYQLRGEDEQEDNKKSVEYYALKVVAVEDSGERKGKDIWYNVKLENGWIYRRASSVPLDWAGKVKEFVVTTDLDDAGNPKKDKDGNVKCSFRAPKEDDWGLLKTKTQTQIDESGQTVGAYIYDSLLRMPDQKIRGKLVRTIERKYYKDELRKILLKQTEFHAALQDHNLLLSCIEELYPNNEAHRRLLSSSSFTYFLLEDILFYQRPLKSQKGLVDDCPYESHVYRDKKDGSLHRTPLKCISKSHPLFQEFRLWHFLSFLRIYQRERMIDGSLKLDVDVTNEFLQNEDDYVKLFDWLNGRKEIDQKTILAYKPFGLKKNEQPKYRWNYVEDKSYPCNETRADMISRLGKAGVSEGFLTEEREEALWHILYSISDKKELTKALGTFAEKNGLNEAFVEQFSKMPPFESNYAAYSLKAIRKLLALMRMGKYWNEQDIDKQTRSRIEKILTGEYDETIRTRVREKAIHLTDISSFRGLPLWLACYVVYNRHSEAKELVKWETPADIDHFLSKFRQHSLRNPIVEQVLMETLRTVRDIWKQEGQIDEIHVELGREMKNPAKERARITAQALENENTNLRIKALLTEFMNPEFEIENVRPYSPGQQEILRIYEEGVLSGVAEKDLPEDIISILKKFRENDVKKRPTTSEVLRYKLWLEQRYRSPYTGRIIPLGKLFTPAYEIEHVIPQSRYFDDSISNKVICESAVNKLKDNCLGYEFIKKHSGEIVELGNGEKATVFTSEEYEHFVKESYLGNGKKMKKLLLEDIPDNFIERQLNDSRYISKVVKSLLSNIVCEEGEQEGMSKNVIVCTGRVTDRLKKDWGVQDVWNRIILPRFLRLNKMTDSTDFTSVSTNGHLLPALPLHLQKGFNKKRIDHRHHAMDAIVIACADRNIVNYLNNASARKGSEISRYDLQHLLCDKVKTDSNGNYKWMLRKPWDTFTQDVYTALTNIVVSFKQNLRVINRTTNYYQHYNESGEKKMIPQVKGDRWAIRKPMHKDTVYGEVNLRREKTLPLKDVLNNPSIVVDKSLKSKLHELLKAQYDLKAITKYFEAHQDVWADINLKKIKVYYFTKETNERFFATRKSLDSSFNQKKIQEEVTDTGIQRILLRHLQLNDNNPDIAFSPDGIERMNQNMNILNDDKGHQPIYKVRTYEKAEKFAVGEHGNKVKKFVEAAKGTNLFFAVYESIQEDEATGKQVRKRTFATIPLNEVIKRKKQGLSVAPEDSNGNLPIFVLSPNDLVYLPTEEERNSGKVTQPLDRERIYKMVSSSGNQCFFIKSSVATSIWDKREYSSLNKMERAITEEMIKEICVPIKIDRLGNVSLI

SEQ ID NO: 23446 - protein, 1407 aa, unidentified
  REGION 1..1407: note = Cas Enzyme sequence
MKKILGLDLGTSSIGWALVNEAETSEEKSSIIKLGVRVNPLTVDELQNFEKGKSITTNADRTAGRSMRRNLQRYKLRRENLIEVLKEYNFITDEMILSENGNRTTFETYRLRAKAAVEEISLEQFARVLLMINKKRGYKSSRKAKGAENGTLIDGMEVAKKMYDEGITPGELCLQLLTAGKRYFPDFYRSDLQAEFDRIWNFQKQFYPDSLIDKVKDEVRGKNKSQTWAILAKYFVWKEVENSWNEEEAQTRRVEKEYRLVGIKRGVKREELKLENFQWRVKALSERMNPEELAIVLQEINEQISNSSGYLGAISDRSKELYFNRQTVGQYQMAVLDNNPNIGLRNMVFYRQDYLDEFNTIWEKQAEFHKELTEDLKKEIRDIVIFYQRRLKSQKGLINICEFERRQIEVEIDGKKKIKTIGSRVIPRSSPLFQEFKIWQTLNDIEVSVLGVKNKRKKQDDNSTTLLDSAENIDSLKLNVSRPLDADEKSLLAKELFIRDKLTKSDVLKLLFNNPQNLNLNFKNIDGNRTGSALYQAFSKILEISGHESINFKKSADEIVEQVKTIFSALGWNTEVLCFDSEKELDKQPYFKLWHLLYSFEGDSTPTGDGNLIQKIADLCGFEKDYASILANITFQEDYGSLSTKTIRKILPHLKDGNQYDVACEYAGYKHSKSSLKKEEIKNKVLKDKLELLPKNSLRNPVVEKILNQMVNVINAIITTYGKPDEIRIELARELKKNAKEREELTKSIVDTTKTHEGIRAILQNDFGMSHVSRNAIIRYKLYEELKDNGYKTLYSNTYIPKEKLFSKDFDIEHIIPQARLFDDSFSNKTLEVKSINIEKGSKTAYDFVEEKYGEQGLQEYLNRCEVLFRDKKTKLRKLKMQESEIPEGFIDRDLRNTQYIAKKALSMLNEICRRVVATTGAITDELREDWQLVDVMKELNWEKYKVLGLVEYFEDNDGRLIGRIKDWTKRNDHRHHAMDALTVAFTKDVFIQYFNNKNASLKPDTNEAAIRNKYFQNGKAIPPMSLDEFRAEAKKHLNDTLISIKTKNKVVTINLNRTKKKNGINKKQQQTPRGQLHLETVYGSHKQYVVKEEKVNASFDAAKIATVNKPAYRDALLRRLQENGNDSKKAFTGKNSLDKQPVWLDAKQNECVPEKVKTVMLETVYTVRKPIDEKLNVDKVVDARIRKLLQDRIKEYGNAKSAFANLDENPIWLNKEKGITIKRVSVFGISKAQSLHEKKDKDGNFILDKDSRRIPVDFVNTGNNHHVAIYRKPVLDKKGQAVFDENGELKFELEEVVVSFFDAVTRVNLSQPIIDKDYKRSEGWKFLFSMKQNEYFVFPNEKTGFDPKEIDLLNPENYALISPNLFRVQKIASKDYVFRHHLETVVADRKDYLETNFFSKYIEQNY

SEQ ID NO: 23447 - protein, 1510 aa, unidentified
  REGION 1..1510: note = Cas Enzyme sequence
MKKILGLDLGTNSIGWAVVCHSDTDGQTERKWIEMAGSRIIPMDAAILGDFDKGNSKSQTSERTGFRGIRRLRERVLLRRERLHKVLKLIGFLPQHYIDSLDFSNHSGKFQLGTEVKLPWRKNEIGKYEFLFQNSFNEMLADFAKKQPELVAMGRKVPYDWTIYYLRKKALSEKITKEELAWILLNFNQKRGYYQLRGEEEEEKKNRLEDFYALKVVEVEQTDDKKGKDIWYNVHLENGWIYRRSSNVPLDWKDKIKEFIVTTELNEDGTPKVDKDGCVKRSFRMPKEDDWKLLKKKTEADIERSHKTIGCYIYDTLLQSPQQKIKGKLVRTIERKFYKDELRLILDKQQAFHPELQDRELYKACLDVLYPMNVAHKNNVANRGFVYLFMEDILFYQRPLKSKKSLIDNCPYEENQYIDVTTGEIKKAPIKCIAKSHPLYQEFRLWQFIANIRIYQKEKKVDGKLLTDIDVTTEYLSSKDDYVALYEWLCVRKEIEQKTFLKYPAFGLKKEIENYRWNYIEGKSYPCNETRSLILHYLEKAGISSTFLSTKIEESLWHILYSVEDRIELETALRTFASKYQLSCNFVEVFKKFPPFKKEYGAYSAKAIKRLLPLMRMGKYWKVDAIDGNTAERIEKILSGECDEKILNKVREKTIHLSETSDFQGLPLWLACYVVYNRHSEVKEVAKWKSPEDIDIYLKSFKQHSLRNPIVEQVITETLRVVRDIWKRVEQIDEIHVELGREMKNPSEKRRQMTERMLENENANIRIKALLTEFMNPEYEMENVRPYSPSQQEILRIYEDTVLNGAGDIPEDIEIILKKFKENDIKKRPGKSDFLRYKLWLEQQYRSPYTGEIIPLGKLFTTAYEIEHVIPQSRYFDDSFSNKVICESEVNKLKDNMLGYEFIKKHAGEIVELGFGKSVKIFSVEAYERFVGENYYKAGSKKSKLLMDDIPEKFIERQLNDSRYISRVVKGLLSNVVREEDANGEYESEAISKNVIVCSGSVTDRLKKDWGVNDVWNNIVYSRFERLNRLTESQQFGHWENREGKRFFQTELPLEYQKGFSKKRIDHRHHAMDAIIIACATRNHVNYLSNESASKHARIARYDLQRMLCDKSKADGGGNYKWIIQKPWATFTQDVYRTLLDIIVSFKQNLRVINKMTNYYQAYDDAGKKVFKKQKKGDSWAIRKSMHKDTVFGQVNLRKIKEVRLSVALESPEKIVDKKIKEKVLQLFAYQYDKKKIEKYFKENASLWKEVNLAKIPVYYFTDESSELLVAVRKNLDTGFTEKKIRESVTDTGIQKILLNHLSNKGDKPELAFSPDGIDEMNRSLVILNGGKPHQPIYKVRVCEPLGNKFKVGTNGNKAAKYVEAAKGTNLFFAIYETDAGKRTYETIPLNVVIEREKMGWLPVPEKNNKGEKLLFWLSPNDLVYLPTEEELMSRILSDKLDRSRIYKIVSFTGNRLYAIPYNVSNMIWDKNEYTQLNKVESTDMKESIKEICMPINVDRLGHITEIIIK

SEQ ID NO: 23448 - protein, 1153 aa, unidentified
  REGION 1..1153: note = Cas Enzyme sequence
MKNILGLDLGSSSIGWAVIRENSEEQELVAMGSRVVSLTAAELSSFTQGNGVSINSQRTQKRTQRKGYDRYQLRRTLLRNKLDTLGMLPDDSLSHLPKLQLWGLRAKAVTQRIELNELGRVLLHLNQKRGYKSIKSDFSGDKKITDYVKTVKTRYDELKEKRLTIGELFFRRLTENAFFRCKEQVYPRQAYVEEFDCIMNCQRKFYPDVLTDETIRCIRDEIIYYQRPLKSCKYLVSRCEFEKRFYLNAAGKKTEAGPKVAPRTSPLFQVCRLWESINNIVVKDRRNEIVSISAEQRAALFDFLNTHEKLKGSDLLKLLGLSKTYGYRLGEQFKTGIQGNKTRVEIERALGNYPDKARLLQFNLQKESSSMVNTETGEIIPMISLSFEQEPLYRLWHVLYSIDDREQLQLVLRQKFGIDDDEVLERLSAIDLVKAGFGNKSSKAIRRILPFLQLGMNYAEACEAAGYTHSNNYTKAENEAHALLDRLPAIKKNELRQPVVEKILNQMVNVVNALMEKYGRFDEIRVELARELKQSKEERSNTYKSINKNQRENEQIAKRIVEYGVPTRSRIQKYKMWEESKHCCIYCGQPVDVGDFLRGFDVEVEHIIPKSLYFDDSFANKVCSCRSCNKEKNNRTAYDYMKSKGEKALSDYVERVNTMYTNNQISKTKLQNLLTPVDKISTDFIDRQLRESQYIARKAKEILTSVCYNVTATSGSVTSFLRHVWGWDTVLHDLNFDRYKKVGLTEVIEVNHRGSVIRREQIKDWSKRFDHRHHAIDALTIACTKQAYIQRLNNLRAEEGPDFNKMSLERYIQSQPHFSVAQVREAVDRILVSFRAGKRAVTPGKRYIRKNRKRISVQSVLIPRGALSEESVYGVIHVWEKDEQGHVIQKQRAVMKYPITSINREMLDKEKVVDKRIHRILSGRLAQYNDNPKEAFAKPVYIDKECRIPIRTVRCFAKPAINTLVPLKKDDKGNPVAWVNPGNNHHVAIYRDEDGKYKERTVTFWEAVDRCRVGIPAIVTQPDTIWDNILQRNDISENVLESLPDVKWQFVLSLQQNEMFILGMNEEDYRYAMDQQDYALLNKYLYRVQKLSKSDYSFRYHTETSVEDKYDGKPNLKLSMQMGKLKRVSIKSLLGLNPHKVHISVLGEIKEIS

SEQ ID NO: 23449 - protein, 1498 aa, unidentified
  REGION 1..1498: note = Cas Enzyme sequence
MKHILGLDLGTNSIGWAVINAIKEENTQKEQLIGINTAGSRIIPMDAAQLGDFNKGNTVSQTANRTQFRGVRRLYERKKLRRERLHRILQLLGFLPKHYASQLDRYGKFIANSEPKLAWTTNTHEPSYFIFQSSFQEMLNDFLQNNNQVKKVPYDWTLFYLRKKALTQKIEKEELAWILLNFNQKRGYYQLREEETEKASSKTRQYFDSQIVTDITDTGQIYKGLKIFTITLENGEKGKFFSKNMPDWKGQKKDIIAIIDLDKNGNDKYDENGELSRRFKIPTEQEWEEQWELIKTKTQKDLDTSHKTVGAYIYDTLLQTPSQKIRGELIRTIERKYYKDELNQILKKQEEFHPELRDSNLLEACIEELYPNNEAHRNAIAKYSISQLLIEDILFYQRPLKSKKSLISNCPYEEYTYTNKETGEICTSSLKCIAKSHPLFQEFRLWQFISNLRIYQKEGTINGKFTTDIDVTNQFLKTEDDYANLFDWLNQKKEIKQDTFLKNPAFGLKKNTANYRWNYVEDKTYPCNETHYKILSYWEKAGIEQSALTSEIEEKLWHILYSISDKNELKKALQHFADKNYLSDKFADTFQQIPPFEKDYGSYSAKAIKKLLPLMRIGRYWKAENFDSTTLDRIEKILTGEFEENIKNRTREKTIHLDNLYSFQGLPTWLACYIVYNRHSEIKDVTKWQQPSDIDAFLNAFKQHSLHNPIVEQIIMETLRTVRDIWKQTGHIDEIHVELGREMKNPAEKRRKLTQQIQENENTNLRIKALLAEFANPELGIENVRPHSPSQQDLLRIYEEEVLNETKDIPEDIAVILKKFNEVDTKKRPSTSDVLRYKCWLEQKYRSPYTGAMIPLGKLFTPAYEIEHVIPQSRYFDDSFTNKVICEAEVNKLKGNMLGYEFIKNNQERIVELGFGQNVKIQTVEAYELFVKEHYSYNRTKMQKLLMEDIPDQFIERQLNDSRYISKLIKSLLSNIVRDEGEEEATSKNVIVCTGSITDRLKKDWGINDVWNKLILPRFIRLNEITESNRFTTTNACNKTIPAMPLDLQKGFNKKRIDHRHHAMDAIVIACANRNIVNYLNNESASKNAKISRQDLRQILCKKTKTDNLGNYQWLIDKPWDTFTQDMYSILSNIIVSFKQNLRIINKTTNHYIHYENGKKVNCSQKQSDSWAIRKPMHKETVYGEINLRRTTTATLKAALENPQRIIEKDLKKKIKELLTQGLNEKQIKKYFEDNKDIWQEINLKKIPVYYFTKETANRFFACRESINTTFNKKKIEEKVADTGIQQILLRHLEQNGNNPEQAFSPEGIEQMNKNIMSLNNGKFHQPTYKVRTYEQADKFAVGQTGNKSTKFVEAAKGTNLFFAIYETAHKRSFASIPLNVVIERLKKGLSPAPENEKGNLPKFILSPNDLVYVPTKEEIENGHINQPIQKDRIYKMVSCTGNQCFFIKSNVANTIIDKYEFSPLNKMERAITGEMIKETCIPIQTDRLGNIITPISL

SEQ ID NO: 23450 - protein, 1005 aa, unidentified
  REGION 1..1005: note = Cas Enzyme sequence
PRSSPLFQEFKIWQILNNIEVTAVGNKNKQRMQNGSNEPDDTEQLELNGRRYLYQEEKELLAKELFVRDKMTKLDVLRLLFDNPEELDLNFKTIDGNKTGYLFFQAYSKMIEMSGHEPVDFKKPIEKIVEQVKSVFVLLNWNTDILSFDSNKELDKQSYYKLWHLLYSFEGDNTPTGNGCLVQKIMDSYGLGKEFAKILANITFQEDYGSLSAKAIHKILPHLKEGNQYDVACEYAGYRHSKSSLTKEEIANKVLKDKLEVLPRNSLRNPVVEKILNQMVNVINAIIEAYGRPDEIRVELARELKKNAKEREKLTKSIAETTKTHEAHKKLLQEEFGLKNVGRSDILRYKLYKELESRGYKTLYSNTYIPREKLFSKEFDIEHIIPQARLFDDSFSNKTLEARNVNIEKGNRTAYDFVKEKFGESGTDNSLDCYLNNIEVLFVSGKISKTKYTKLKMTEQDIPGGFIERDLRNTQYIAKKALSMLNEISRCVVATSGSITDKLREDWQLVDVMKELNWEKYKALGLVEYFEDKDGKQIGRIKDWSKRNDHRHHAMDALTVAFTKEVFIQYFNNKNASLNPNTNEYAIKNKYFQNGRAIAPIPLNEFRAEAKKHLENTLISIKAKNKVITNNINKTKKRGGVNTKKQQTPRGQLHLETIYGCCRQYLTKEEKVNASFDVSKIATVSSSVYRDALLKRLQEHHNDPKKAFAGRNSLDKKPVWLDKEQIRKVPEKVKTVTFETIYTIRKEISPDLRVDKIIDSGVRKMLTGRLKEYGNDAKKAFSNLDEKPIWLNKEKGIPIKRVTISGISNAQSLHVKKDKDGKPVLDGNGRNIPVDFVNTGNNHHVAVYRRPVIDKNGQMVIDENGNLKYELEEVVVTFFDAVTRVNLGQPIIDKDYKASEGWQFLFSMKQNEYFVFPNKKTGFNPKEIDLLDADNYGLISPNLFRVQKFTHKNYVFRHHLETTIKDTSSILRGITWIDFRSSKGLDSIVKVRVNHIGQIVSVGEY

SEQ ID NO: 23451 - protein, 1504 aa, unidentified
  REGION 1..1504: note = Cas Enzyme sequence
MKNILGLDLGTNSIGWAVVNGSVNDDGSEQLVKIQASGSRIIPMDAAMIGDFNKGNSISQTAERTRLRGIRRLSERYLLRRERLHRILDILGFLPSHFAQDLDRHGKIVKGKEPKLAWRKNEAGQFEFIFQDSFKEMLEDFKLNHPNLITDDKKVPYDWTIYYLRKKGLTSKISKEELAWILLNFNQKRGYYQLRGEEEEENNNKLVEFYALKVVAVEDSGEKKGKDIWYNVHLENGWVYRRTSNMPLDWVGKTKEFIVTTDLEKDGTPKKDKEGNVKRSFRAPKEDDWSLVKKKTEADIDQTHKTVGTYIYDTLLGNPSQKIRGRLVRTIERKYYKEELKLILDKQKEFHPELQDRALYAACVEELYTINEAHRNNIGNRDFTYLFLEDILFYQRPLKSKKSLIDNCPYEENHCLDKETGEIKSFPVKCIAKSHPLFQEFRLWQFIVNLRIYRKGLAQDVDVTNELLKTEEDYVALFDWLNGKKEIDQKAFLKYPLFGLKKEVENYRWNYVQDKPYPCNETRSSMLARLEKCDISIEFLTKENEEALWHILYSVEDKNEIVKALQKFADKHDLNASFVDVFRKFPPFKKEYGSYSAKAIKKLLPLMRMGKYWSENSIDKGTRERIDKIITGEYDEKIENRVREKAIHLADVSDFRGLPLWLVCYIVYGRHSEAKEITQWKSPADIDSYLKSFKQHSLRNPIVEQIIIETLRVVRDIWKQVGNIDEIHVELGREMKNPADKRKKMTQQISENENTNLRIKYLLTEFLNPEYEVENVRPYSPSQQDILRIYEEGVLNSVSDLPEEISDILKKFTETDLKKRPSRSEVLRYKLWLEQKYRSPYTGEVIPLGKLFTSAYEIEHVIPQSCYFDDSFSNKVICEAEVNKLKSNLLGHEFIVKHHGEIVELPFGKKVRIFTVDEYEQFVKDNYSRTRGKMKKLLMDDIPEEFVTRQLNDSRYISKVVKSLLSNIVREKGEEEAISKNVIPCTGGVTDRLKKDWGINEVWNKIILPRFQRLNELTGTNKFTTKNVGIQEIPTMPLELQKGFNKKRIDHRHHAMDAIIIACANRNIINYLNNESATAKAELSRYDLQKLLCDKAKTDNNGNYKWVIRKPWASFTQDTYLALENIIVSFKQNLRVINKATNHFLHYNEEGKKIFVKQGKGDNWAIRKSMHKDTVFGEVNLRRIKTVALNEAMKNPQSIVVKDFKRKLLELWNLGFDAKRIKKYFEDNRETWSDINLSKIEVYYFSKDTKDRFFATRKPLDTSFDRKKIENNITDTGIQKILLRHLELKDNNPDIAFSPDGIDEMNRNIIQLNNGKYHQPIIKVRWYEQADKFAVGQTGNKSSKFVEAAKGTNLFFAVYESNILDKKTNTIIKKRNYATIPLNVAIERQKQGLPVAPEDENGNDPIFVLSPNDLVYLPTDDELANGIIAQPLDRGRIYKMVSSSGEQCFFIKHIVANVLVDKFEFSPLNKMERALTGEMIKMICMPIKVDRLGNVLESSSSHKK

SEQ ID NO: 23452 - protein, 1498 aa, unidentified
  REGION 1..1498: note = Cas Enzyme sequence
MKHILGLDLGTNSIGWAVINAIKEENTQKEQLIGINTAGSRIIPMDAAQLGDFNKGNTVSQTANRTQFRGVRRLYERKKLRRERLHRILQLLGFLPKHYASQLDRYGKFIANSEPKLAWTTNTHEPSYFIFQSSFQEMLNDFLQNNNQVKKVPYDWTLFYLRKKALTQKIEKEELAWILLNFNQKRGYYQLREEETEKASSKTRQYFDSQIVTDITDTGQIYKGLKIFTITLENGEKGKFFSKNMPDWKGQKKDIIAIIDLDKNGNDKYDENGELSRRFKIPTEQEWEEQWELIKTKTQKDLDTSHKTVGAYIYDTLLQTPSQKIRGKLIRTIERKYYKDELNQILKKQEEFHPELRDSNLLEACIEELYPNNEAHRNAIAKYSISQLLIEDILFYQRPLKSKKSLISNCPYEEYTYTNKETGEICTSSLKCIAKSHPLFQEFRLWQFISNLRIYQKEGTINGKFTTDIDVTNQFLKTEDDYANLFDWLNQKKEIRQDTFLKKPAFGLKKNIANYRWNYVEDKTYPCNETHYKILSYWEKAGIEQSALTSEIEEKLWHILYSISDKNELRKALQHFADKNYLSDKFADTFQQIPPFEKDYGSYSAKAIKKLLPLMRIGRYWKAENFDSTTLDRIEKILTGEFEENIKNRTREKTIHLDNLYSFQGLPTWLACYIVYNRHSEIKDVTKWQQPSDIDAFLNAFKQHSLHNPIVEQIIMETLRTVRDIWKQTGHIDEIHVELGREMKNPAEKRRKLTQQIQENENTNLRIKALLTEFANPEFGIENVRPHSPSQQDLLRIYEEEVLNETKDIPEDIAVILKKFNEIDTKKRPSTSDVLRYKCWLEQKYRSPYTGAMIPLGKLFTPAYEIEHVIPQSRYFDDSFTNKVICEAEVNKLKGNMLGYEFIKNNQERIVELGFGQNVKIQTVEAYELFVKEHYSYNRTKMQKLLMEDIPDQFIERQLNDSRYISKLIKSLLSNIVRDEGEEEATSKNVIVCTGSITDRLKKDWGINDVWNKLILPRFIRLNEITESNRFTTTNACNKTIPAMPLDLQKGFNKKRIDHRHHAMDTIVIACANRNIVNYLNNESASKNAKISRQDLRQILCKKTKTDNLGNYQWLIDKPWDTFTQDMYSILSNIIVSFKQNLRIINKTTNHYIHYENGKKVNCSQKQSDSWAIRKPMHKETVYGEINLRRTTTATLKAALENPQRIIEKDLKKKIKELLTQGLNEKQIKKYFEDNKDIWQEINLKKIPVYYFTKETANRFFACRESINTTFNKKKIEEKVADTGIQQILLRHLEQNGNNPEQAFSPEGIEQMNKNIMSLNNGKFHQPIYKVRTYEQADKFAVGQTGNKSTKFVEAAKGTNLFFAIYETAHKRSFASIPLNVVIERLKKGLSPAPENEKGNLPKFILSPNDLVYVPTKEEIENGHINQPIQKDRIYKMVSCTGNQCFFIKSNVANTIIDKYEFSPLNKMERAITGEMIKETCIPIQTDRLGNIITPISL

SEQ ID NO: 23453 - protein, 1509 aa, unidentified
  REGION 1..1509: note = Cas Enzyme sequence
MKTILGLDLGSNSIGWAVINSVIKEQLERIWIEMAGSRIIPMDAAILGDFDKGNSISQTAERTRFRGVRRLRERQLLRRERLHKVLKILGFLPEHYLKEIDFEKHPGKFLADSEPKLPWLMDERGKYTFLFQTAFNEMLADFAKHQPSLVSDGKKVPYDWTIYYLRKKALTEMISKEELAWILLNFNQKRGYYQLRGEEEEDNAGKSVEFYALKVLSVEATDEKKGRDLWYNVHLENGWIYRRSSNVPLDWENQIKEFIVTTDLNPDGTPKLDKYGEVKRSFRAPKEDDWMLIKKRTEADIANTHKTIGSYIYDTLLQNPQQKIIGKLVKTVERKLYKEELNLILQKQCAFHVELQDRDLYMRCIEALYPGNEVRRKNIINRDFIYLLMDDVLFYQRPLKTKKSLISNCPYEENEYINRETGEIKKAPLKCIAKSHPLFQEFRLWHFFSNIRVYQKEKEVNGTLHLDVDVTAEFLKTEDDYVALFDWLNSRKEVDQKAFLRYPKFGLKKEINNYRWNYVEDKLYPCNETRYAILSRLEKLGVSLDFLSDEKETALWHILYSVSDKLEIEKALRTFAVKNGLNESFVEVFKKFPPFKPEYGSYSAKAIKKLLPLMRCGRYWDASLIDDATKDRIERIMTGEYDGNIAAKVREKAINLSDISCFKKLPLWLACYVVYNRHSENKEIAKWETPADIDAYLASFKQHSLRNPIVEQVIIETLRVVRDIWKQVGKIDEIHIELGREMKNPADKRKRMTAQIQENENANLRIKALLAEFMNPEYGVENVRPYSPSQQEILRIYEDTVLKGEEQIPEDIDVILKKFNNSKLPTKSEFLRYKLWLEQKYRSPYTGELIPLGKLFTAAYEIEHIIPQSRYFDDSFSNKVICESAVNKLKDNQLGYEFIKNHHGQKVEVGFGKTVEILSVDSYECFVKEQYAKSGVKMKKLLMDDIPEQFIERQLNDSRYISKVVKGLLSNIVREKNDSGEYEPEAVSKNILVCTGSVTDRLKKDWGMNDVWNSIVYPRFERLNALTGTQCFGHWENKDGKKVFQTELPLEYQKGFSKKRIDHRHHAMDAIVIACATRNHVNYLSNESASRNAKISRYDLQRLLCDKSRVDGTGNYRWIIKKPWNTFTQDAREALDKIVISSKQNLRIINKTTNIYQHFDTEGNRVYKKQETGDSWAIRKPMHKDTVFGTVNLRKVKSVRLSVALDTPTMIVDKRVKGKVLELLSYKYDKKKIEKYFKENVFFWKDLDIAKVAVYYFTENTSEPLVAVRKPLDSTFNEKKIKESVTDTGIQKILLNHLSAKEGKADLAFSAEGIEEMNRNILQLNDGKEHQPIYKVRVYEPRGNKFRVGAFGNKGTKWVEAAKGTNLFFAIYATEDGKRTYETVPLNLVIEREKQGLIPVPDRNEKGDKLLFWLSPNDLVYLPTEEEREFGRINEPIDRGRVYKMVSCTGNEGHFIPVNVANPILPTIELGSNNKAQRAWNNEMVKDICIPVKVDRLGRIIEVKYKANE

SEQ ID NO: 23454 - protein, 1052 aa, unidentified
  REGION 1..1052: note = Cas Enzyme sequence
LKKEIRDIVIFYQRRLKSQKGLINICEFERRQIEVEIDGKKKIKTIGSRVIPRSSPLFQEFKIWQTLNDIEVSVLGVKNKRKKQDDNSTTLLDSAENIDSLKLNVSRPLDADEKSLLAKELFIRDKLTKSDVLKLLFNNPQNLNLNFKNIDGNRTGSALYQAFSKILEISGHESINFKKSADEIVEQVKTIFSALGWNTEVLCFDSEKELDKQPYFKLWHLLYSFEGDSTPTGDGNLIQKIADLCGFEKDYASILANITFQEDYGSLSTKAIRKILPHLKDGNQYDVACEYAGYKHSKSSLKKEEIKNKVLKDKLELLPKNSLRNPVVEKILNQMVNVINAIITTYGKPDEIRIELARELKKNAKEREELTKSIVDTTKTHEGIRAILQNDFGMSHVSRNAIIRYKLYEELKDNGYKTLYSNTYIPKEKLFSKDFDIEHIIPQARLFDDSFSNKTLEVKSINIEKGSKTAYDFVEEKYGEQGLQEYLNRCEVLFRDKKTKLRKLKMQESEIPEGFIDRDLRNTQYIAKKALSMLNEICRRVVATTGAITDELREDWQLVDVMKELNWEKYKVLGLVEYFEDNDGRLIGRIKDWTKRNDHRHHAMDALTVAFTKDVFIQYFNNKNASLKPDTNEAAIRNKYFQNGKAIPPMSLDEFRAEAKKHLNDTLISIKTKNKVVTINLNRTKKKNGINKKQQQTPRGQLHLETVYGSHKQYVVKEEKVNASFDAAKIATVNKPAYRDALLRRLQENGNDSKKAFTGKNSLDKQPVWLDAKQNECVPEKVKTVMLETVYTVRKPIDEKLNVDKVVDARIRKLLQDRIKEYGNAKSAFANLDENPIWLNKEKGITIKRVSVSGISKAQSLHEKKDKDGNFILDKDSRRIPVDFVNTGNNHHVAIYRKPVLDKKGQAVFDENGELKFELEEVVVSFFDAVTRVNLSQPIIDKDYKRSEGWKFLFSMKQNEYFVFPNEKTGFDPKEIDLLNPENYALISPNLFRVQKIASKDYVFRHHLETVVADRKELQEITWKRISSLSILNRIIKVRVNHIGQIVMIGEY

SEQ ID NO: 23455 - protein, 1509 aa, unidentified
  REGION 1..1509: note = Cas Enzyme sequence
MKTILGLDLGTNSVGWAVINSVIKEQAERIWIEMAGSRIIPMDAAVLGDFDKGNSISQTSERTRLRGARRLRERQLLRRERLHKVLNILGFLPNHYLEYIDFEKHPGKFLADAEPKLAWVKDEQGKYTFLFQAAFDEMLADFAIHQPSLVSGDKKIPYDWTIYYLRKKALTEMISKEELAWILLNFNQKRGYYQLRGEEEEDNAGKSVEFYALKVLTVEATDEKKGRDVWYNVHLENGWIYRRSSSVPLDWEGQVKEFIVTTDLNPDGTPKLDKYGEVKRSFRVPKEDDWMLIKKRTEADIANTHKTVGAYIYDTLLQKPQQKIIGKLVKTVERKLYRDELSLILQKQCAFHAELQDRALYARCVEALYPSNEVRRKNIANRDFVYLLMDDILFYQRPLKNKKSLIANCPYEENEYVDRETGEIKKAPLKCIAKSHPLFQEFRLWNFLSNIRIYQKEKEINGTLHLDVDVTAEFLKTEDDYVALFDWLNSRKEIEQKTFLKYPKFGLKKEISNYRWNYVEDKQYPCNETRHAILSSLEKANVCIDFLSNEKEVALWHILYSVSDKQEIEKALRTFAAKNGLDESFVEAFKKFPPFKSEYGAYSAKAIKKMLPLMRCGKYWDVSSIDDTTKERIKKIVTGEYDERISVKVRDKVMNLSDISCFRRLPLWLACYIVYNRHSEDKEAVKWESPADIDAYLASFKQHSLRNPIVEQVITETLRVVRDIWKQVGRIDEIHIELGREMKNPADKRKRMTAQILENENANLRIKALLAEFMNPEYEIENVRPYSPSQQEILRIYEDTVLHAEDQLPEEIDAILKKFNSSKVPTKSEFLRYKLWLEQKYRSPYTGELIPLGKLFTAAYEIEHVIPQSRYFDDSFSNKVICESAVNKLKDNQLGYEFIKNHHGQKVEVGFGKSVEIFSVDSYERFVKEQYAKSAVKMKKLLMDDIPEQFIERQLNDSRYISKVIKGLLSNIVREKNDSGEYELEAVSKNIVVCTGSVTDRLKRDWGMNDVWNSIVYPRFERLNSLTDTQSFGHWENKSGKKVFQTELPLEYQKGFSKKRIDHRHHAMDAIVIACATRNHVNYLSNESASRNAKISRYDLQRLLCDKNRTDDNGNYKWVIKKPWDTFTQDAREVLSKIVVSLKQNLRIINKTTNVYRHFDATVNRVYQKQKTGDSWAIRKPMHKDTVFGAVNLRKVKVVRLSVALDTPAMIVDKRVKNKVFELLSYKYDKKRIEKYFKENAFLWKELDLAKVAVYYFTEATTEPLVAVRKPLDSTFNEKKIKESVTDTGIQKILLNHLCTKEGKPDLAFSAEGIEEMNRNLLQLNNGKSHQPIYKVRVYEPRGNKFSVGVLGNKGTKWVEAAKGTNLFFAIYITEDGKRTYETIPLNMVIEREKQGLVPVPDRNEKGDKLLFWLSPNDLVYLPTEEEREFGRINEPIDRGRIYKMVSCTGNEGHFIPANVANPIVPVIELGSNNKAQRAWTNEMIKDICIPIKVDRLGHIIEVKYRIDE

SEQ ID NO: 23456 - protein, 1327 aa, unidentified
  REGION 1..1327: note = Cas Enzyme sequence
MKNFNDDYYAGFDIGTDSVGYAVADTDYNLCKFKGNAMWGVDLFEESNSAAERRTLRSARRRGLRKRNRIEWLQMLFDEEISKVDNAFFQRLKESCLYLDDKSSNVPYAVFADGNYTDKEFHTDYPTIYHLRKELIKSSQPHDVRLVYLALHHIIKHRGHFLFDNMGSDFESESSFETLFDDLKLYLKEEYEIEFECNDSLRFSEILKDKTLKKTAKSSESYKLFGYSKRNNPYETALIDLMCGRKVKFSDMFGDKSFDSEEVNGITFESGYDDNENTYRDLLQEKFELIEKAKAVYDWAILADILNGEKYISFAKVKTYEEHSSDLKMLKDFVKERCKSLYVEIFRITKDKLDNYTAYCGKYKENGRNGVIQYRTNQADFCKYLKKKFEKLDKTGYEEMFDKIENGTFMPKIVVKDNGVIPMQVNRSELKAILKNASTYLEFLNKKDENGISVSDKIVKIFEFRIPYYVGPLNNHSLKSWLVRSDEKIYPWNFDSVVDIEQSAENFINNLTSKCTYLPTKDVIPKNSILYSAFTVLNELNNLRLDGKKPDVSLKQAIFNDLFMTHKKVRRKDLLNYLKSEKGITPDITGIDGDFKSSMRSAIEMSQFNLTDSEKEDAIKAITVFGDDKKLLRKRLKRQLGSKLSDEDIMRISKLKYKDWGRLSKEFLTEVYNVDKNTGELQFNIIHALWQTNDNLMELLGSKYGFEQSRQNYLDGIQTGQSLEKMVENLYISPAVKRPVYQSLKIMHEINKIQGHAPKKIFVEMTRKDGVKGDKGRKESRKTKLVDLYKKCGDDSGELWESLEKTPDDEFKRDRLYFYYTQFGKCMYTGEPINLSELYNQNIYDVDHIFPRSKVKDDSLDNRVLVKKQVNAHKDNTYPLDSSIHEKMKGFWHLLMDKGLISKKKYERLTRATELTDSELSDFIARQIVETSQSTKAVASLFKELYPDTEIVYVKASTVSEFRHEYDFLKCREVNDFHHAKDAYLNIVVGNVYNERCTHNKSIFIEGLKTKAYSLNKMFSFNTPNAWSIDDNKSIKIVRKTMNKNNIRFTRYALTRNGGLFKMNPLKKGSGQVSLKQNSPLSDISKYGGYDKPTSSYFSFVKYEGKKGKEMRQLVAIDSYIKARYEANPEKYLSENLGLKNPVVLIPVVKYNACIEIDGFRMHISGKSNGGKTVVCKPAMQLTVSYDTEKYIRNVVKLNSMPENYNITERDKVSTDENIELFDILISKMTDTILNVKFGSMGTKISAHRDAFEKLDVRKQCFVLAEILKIIHSNVVTGDLSFIGESKKSGVVSTNSVLSEIKGVKSIYLVHQSVTGLFEKKIDLLNM

SEQ ID NO: 23457 - protein, 1485 aa, unidentified
  REGION 1..1485: note = Cas Enzyme sequence
NGSVNDDGSEQLVKIQASGSRIIPMDAAMIGDFNKGNSISQTAERTRLRGVRRLSERYLLRRERLHRILDILGFLPFHFAQDLDRHGKIVKGKEPKLAWRKNEAGQFEFIFQDSFKEMLEDFKLNHPNLITDDKKVPYDWTIYYLRKKGLTSKISKEELAWILLNFNQKRGYYQLRGEEEEENKNKLVEFYALKVVAVEDSGEKKGKDIWYNVHLENGWVYRRTSNMPLDWVGKTKEFIVTTDLEKDGTPKKDKEGNVKRSFRAPKEDDWSLVKKKTEADIDQTHKTVGAYIYDTLLGNPSQKIRGRLVRTIERKYYKEELKQILEKQKEFHLELQDRVLYAACIEELYPINEAHRNNVGNRDFTYLFLEDILFYQRPLKSKKSLIDNCPYEENQGLDKETGEIKSFPVKCIAKSHPLFQEFRLWQFIVNLRIYRKDLAQDVDVTNELLKTEEDYVALFDWLNGKKEIDQKAFLKYPLFGLKKEVENYRWNYVQDKPYPCNETRSSMLARLEKCDISIEFLTKENEEALWHILYSVEDKNEIVKALQKFADKHDLNASFVDVFQKFPPFKKEYGSYSAKAIKKLLPLMRMGKYWSENSIDKGTRERMDKIITGEYDEKIENRVREKAIHLADVSDFKGLPLWLVCYIVYGRHSEAKEITQWKSPADIDLYLRSFKQHSLRNPIVEQIIIETLRVVRDIWKQVGNIDEIHVELGREMKNPADKRKKMTQQMSENENTNLRIKYLLTEFLNPEYEVENVRPYSPSQQDILRIYEEGVLNSVSDLPEEISDILKKFTETDLKKRPSRSEVLRYKLWLEQKYRSPYTGEVIPLGKLFTPAYEIEHVIPQSCYFDDSFSNKVICEAEVNKLKSNLLGHEFIVKHHGEIVELPFGKKVRIFTVDEYEQFVKDNYSRTRSKMKKLLMDDIPEEFVARQLNDSRYISKVVKSLLSNIVREKGEEEAISKNVIPCTGGVTDRLKKDWGINEVWNKIILPRFQRLNELTGTNKFTTKNVGIQEIPTMPLELQKGFNKKRIDHRHHAMDAIIIACANRNIINYLNNESATAKAELSRYDLQKMLCDKAKTDNNGNYKWVIRKPWASFTQDTYLALENIIVSFKQNLRVINKATNHFLHYNEEGKKIFVKQGKGDNWAIRKSMHKDTVFGEVNLRRIKTVALNEAMKNPQSIVVKDFKRKLLELWNLGFDAKRIKKYFEDNRETWSDINLSKIEVYYFSKDTKDRFFATRKPLDTSFDRKKIENNITDTGIQKILLRHLELKDNNPDIAFSPDGIDEMNRNIIQLNNGKYHQPIIKVRWYEQADKFAVGQTGNKSSKFVEAAKGTNLFFAVYESNILDKKTNTIIKKRNYATIPLNVAIERQKQGLPVAPEDENGNDPIFVLSPNDLVYLPTAADLANGIIAQPLDRGRIYKMVSCTGNEGYFIPARIANPILQTIELGSNNKAQKAWTDEMIKEICMPIKVDRLGNVLESSSSYKK

SEQ ID NO: 23458 - protein, 1505 aa, unidentified
  REGION 1..1505: note = Cas Enzyme sequence
MKKILGLDLGTNSIGWAVINSSVDDEGKEKLTSISSCGSRIIPMDAATLGDFDKGNAKSSVAERTRLRGIRRLLERSLLRRERLHRVLSVMGFLPEHYASQLDRYGKFLPETEPKLAWYKDNTGSYRFLFQDSFNEMLEDFRLYHPELVAEGKKIPYDWTIYYLRKKALSQKIAKEELAWILLNFNQKRGYYQLRGEEEQEDNKKSVEYYALKVVAVEDSGERKGKDIWYNVKLENGWIYRRASSIPLDWTGKVKEFVVTTDLDDAGNPKKDKDGNVKRSFRAPKEDDWGLLKTKTQTQIDESGQTVGAYIFDSLLRMPDQKIRGKLVRTIERKYYKDELRKILLKQTEFHAALQDHNLLLSCIEELYPNNEAHRRLLSSSSFTCFLLEDILFYQRPLKSQKGLIDDCPYESHVYKKDGSLHRTPLKCISKSHPLFQEFRLWHFLSFLRIYQRERMIDGSLKLDVDVTNEFLQNEDDYVKLFDWLNGRKEIDQKTILAYKPFGLKKNEQPKYRWNYVEDKSYPCNETRADMISRLSKAGVSEGFLTEEREEALWHILYSISDKKELTKALGTFAEKNGLNEAFVELFSKMPPFESNYAAYSLKAIRKLLALMRMGKYWNEQDIDKQTRSRIEKILTGEYDETIRTRVREKAIHLTDISSFRGLPLWLACYVVYNRHSEAKELVKWETPADIDHFLSKFRQHSLRNPIVEQVIMETLRTVRDIWKQEGQIDEIHVELGREMKNPAKERARITAQVLENENTNLRIKALLTEFMNPEFEIENVRPYSPGQQEILRIYEEGVLSGVAEKDLPEDIISILKKFRENDVKKRPTTSEVLRYKLWLEQRYRSPYTGRIIPLGKLFTPAYEIEHVIPQSRYFDDSISNKVICESAVNKLKDNCLGYEFIKKHSGEIVELGNGEKATVFTSEEYEHFVKESYLGNGKKMKKLLLEDIPDNFIERQLNDSRYISKVVKSLLSNIVCEEGEQEGMSKNVIVCTGGVTDRLKKDWGVQDVWNRIILPRFLRLNKMTDSTGFTSVSTNGHLLPALPLHLQKGFNKKRIDHRHHAMDAIVIACADRNIVNYLNNASARKGSEISRYDLQHLLCDKVKTDSNGNYKWMLRKPWDTFTQDVYTALTNIVVSFKQNLRVINRTTNYHQHYNESGEKKMIPQVKGDRWAIRKPMHKDTVYGEVNLRREKTLPLKDVLNNPSIVVDKSLKSKLHELLKAQYDLKAITKYFEAHQDVWADINLKKIKVYYFTKETNERFFATRKSLDSSFNQKKIQEEVTDTGIQRILLRHLQLNDNNPDIAFSPDGIERMNQNMNILNDGKGHQPIYKVRTYEKAEKFAVGEHGNKVKKFVEAAKGTNLFFAVYESIQEDEATGKQVRKRTFATIPLNEVIKRKKQGLSVAPEDSNGNLPIFVLSPNDLVYLPTEEERNSGKVTQPLDRERIYKMVSSSGNQCFFIKSSVATSIWDKREYSSLNKMERAITEEMIKEICVPIKIDRLGNVSLI

SEQ ID NO: 23459 - protein, 938 aa, unidentified
  REGION 1..938: note = Cas Enzyme sequence
  REGION 925..935: note = misc_feature - Xaa can be any naturally occurring amino acid
MKNIVGLDLGTNSIGWAVVNGSVNDDGSEQLVKIQASGSRIIPMDAAMIGDFNKGNSISQTAERTRLRGVRRLSERYLLRRERLHRILDILGFLPFHFAQDLDRHGKIVKGKEPKLAWRKNEAGQFEFIFQDSFKEMLEDFKLNHPNLITDDKKVPYDWTIYYLRKKGLTSKISKEELAWILLNFNQKRGYYQLRGEEEKKNDNVMIINSKVIDVVKAEKDKKYEKYWYNVLLENGLLYRAAFYNDISFWKGHTKEFVLKTIKLKSGGTKQELSFLPSFDEIEKMEKKQKDKMYFKIKLKTEADIDQAHKTVGTYIYDTLLGNPSQKIRGRLVRTIERKYYKEELKLILDKQKEFHPELQDRALYAACVEELYTINEAHRNNIGNRDFTYLFLEDILFYQRPLKSKKSLIDNCPYEENQGLDKETGEIKSFPVKCIAKSHPLFQEFRLWQFIINLRIYRKDLAQDVDVTNELLKTEEDYVALFDWLNGKKEIDQKAFLKYPVFGLKKEIENYRWNYVQDKPYPCNETRLLMLARLEKCDISIEFLTKENEEALWHILYSVEDKNEIVKALQKFADKHDLNASFVDVFRKFPPFKKEYGSYSAKAIKKLLPLMRMGKYWSEDSIDKGTRKRMDKIITGEYDEKIENRVREKVIHLADVSDFRGLPLWLVCYIVYGRHSEAKEITQWKSPADIDSYLKSFKQHSLRNPIVEQIIIETLRVVRDIWKQVGNIDEIHVELGREMKNPADKRKKMTQQMSENENTNLRIKYLLTEFLNPEYEVENVRPYSPSQQDILRIYEEGVLNSVSDLPEEISDILKKFTETDLKKRPSRSEILRYKLWLEQKYRSPYTGEVIPLGKLFTPAYEIEHVIPQSCYFDDSFSNKVICEAEVNKLKSNLLGHEFIVKHHGEIVELPFGKKVRIFTVDEYXXXXXXXXXXXVVK

SEQ ID NO: 23460 - protein, 1159 aa, unidentified
  REGION 1..1159: note = Cas Enzyme sequence
ELNQILKKQEEFHPELRDSNLLEACIEELYPNNEAHRNAIAKYSIAQLLIEDILFYQRPLKSKKSLISNCPYEEYTYINKETGEICTSPLKCIAKSHPLFQEFRLWQFISNLRIYQKEGTINGKFTTDIDVTSQFLKTEDAYANLFDWLNQKKEIRQDTFLKNPAFGLKKNTANYRWNYVEDKTYPCNETHYKILSYWEKAGIEQSALTSEIEEKLWHILYSISDKNELRKALQHFADKNYLSDKFADTFQQIPPFEKDYGSYSAKAIKKLLPLMRIGRYWKAENFDSTTLDRIEKILTGEFEENIKNRTREKTIHLDNLYSFQGLPTWLACYIVYNRHSEIKDVTKWQQPSDIDAFLNAFKQHSLHNPIVEQIIMETLRTVRDIWKQTGHIDEIHVELGREMKNPAEKRRKLTQQIQENENTNLRIKALLAEFANPELGIENVRPHSPSQQDLLRIYEEEALNETKDIPEDIAVILKKFNEVDTKKRPSTSDVLRYKCWLEQKYRSPYTGAMIPLGKLFTPAYEIEHVIPQSRYFDDSFTNKVICEAEVNKLKGNMLGYEFIKNNQERIVELGFGQNVKIQTVEAYELFVKEHYSYNRTKMQKLLMEDIPDQFIERQLNDSRYISKLIKSLLSNIVRDEGEEEATSKNVIVCTGSITDRLKKDWGINDVWNKLILPRFIRLNEITESNRFTTTNACNKTIPAMPLDLQKGFNKKRIDHRHHAMDAIVIACANRNIVNYLNNESASKNAKISRQDLRQILCKKTKTDNLGNYQWLIDKPWDTFTQDVYSILGNIIVSFKQNLRIINKTTNHYIHYENGKKVSCSQKQGDSWAIRKPMHKETVYGEINLRRTTTATLKAVLENPQRIIEKDLKKKIKELLTQGLNEKQIKKYFEDNKDIWQEINLKKIPVYYFTKETANRFFACRESINTTFNKKKIEEKVADTGIQQILLRHLEQNGNNPEQAFSPEGIEQMNKNIMSLNNNGKFHQPIYKVRTYEQADKFAVGQTGNKSTKFVEAAKGTNLFFAIYETAHKRSFASIPLNVVIERLKKGLSPAPENEKGNLPKFILSPNDLVYVPTKEEIENGHINQPIQKDRIYKMVSCTEGECHFIPYFVAKPIIQTIELGSNNKAQKTWQDEMIKEICIPIKTDRLGNIITSISL

SEQ ID NO: 23461 - protein, 1499 aa, unidentified
  REGION 1..1499: note = Cas Enzyme sequence
MKHILGLDLGTNSIGWAVINAIKEENTQKEQLIGINTAGSRIIPMDAAQLGDFNKGNTVSQTANRTQFRGVRRLYERKKLRRERLHRILQLLGFLPKHYASQLDRYGKFIANSEPKLAWTTNTHEPSYFIFQSSFQEMLNDFLQNNNQVKKVPYDWTLFYLRKKALTQKIEKEELAWILLNFNQKRGYYQLREEETEKASSKTRQYFDSQIVTDITDTGQIYKGLKIFTITLENGEKGKFFSKNMPDWKGQKKDIIAIIDLDKNGNDKYDENGELSRRFKIPTEQEWEEQWELIKTKTQKDLDTSHKTVGAYIYDTLLQTPSQKIRGKLIRTIERKYYKDELNQILKKQEEFHPELRDSNLLEACIEELYPNNEAHRNAIAKYSISQLLIEDILFYQRPLKSKKSLISNCPYEEYTYTNKETGEICTSSLKCIAKSHPLFQEFRLWQFISNLRIYQKEGTINGKFTTDIDVTNQFLKTEDDYANLFDWLNQKKEIRQDTFLKKPAFGLKKNIANYRWNYVEDKTYPCNETHYKILSYWEKAGIEQSALTSEIEEKLWHILYSISDKNELRKALQHFADKNYLSDKFADTFQQIPPFEKDYGSYSAKAIKKLLPLMRIGRYWKAENFDSTTLDRIEKILTGEFEENIKNRTREKTIHLDNLYSFQGLPTWLACYIVYNRHSEIKDVTKWQQPSDIDAFLNAFKQHSLHNPIVEQIIMETLRTVRDIWKQTGHIDEIHVELGREMKNPAEKRRKLTQQIQENENTNLRIKALLTEFANPEFGIENVRPHSPSQQDLLRIYEEEALNETKDIPEDIAVILKKFNEVDTKKRPSTSDVLRYKCWLEQKYRSPYTGAMIPLGKLFTPAYEIEHVIPQSRCFDDSFTNKVICEAEVNKLKGNMLGYEFIKNNQERIVELGFGQNVKIQTVEAYELFVKEHYSYNRTKMQKLLMEDIPDQFIERQLNDSRYISKLIKSLLSNIVRDEGEEEATSKNVIVCTGSITDRLKKDWGINDVWNKLILPRFIRLNEITESNRFTTTNACNKTIPAMPLDLQKGFNKKRIDHRHHAMDAIVIACANRNIVNYLNNESASKNAKISRQDLRQILCKKTKTDNLGNYQWLIDKPWDTFTQDVYSILGNIIVSFKQNLRIINKTTNHYIHYENGKKVSCSQKQGDSWAIRKPMHKETVYGEINLRKTTTATLKAVLENPQRIIEKDLKKKIKELLTQGLNEKQIKKYFEDNKDIWQEINLKKIPVYYFTKETANRFFACRESINTTFNKKKIEEKVADTGIQQILLRHLEQNGNNPEQAFSPEGIEQMNKNIMSLNNNGKFHQPIYKVRTYEQADKFAVGQTGNKSTKFVEAAKGTNLFFAIYETAHKRSFASIPLNVVIERLKKGLSPAPENEKGNLPKFILSPNDLVYVPTKEEIENGHINQPIQKDRIYKMVSCTEGECHFIPYFVAKPIIQTIELGSNNKAQKTWQDEMIKEICIPIKTDRLGNIITSISL

SEQ ID NO: 23462 - protein, 1234 aa, unidentified
  REGION 1..1234: note = Cas Enzyme sequence
LPSFDEIEKMEKKQKDKMYFKIKLKTEADIDQAHKTVGTYIYDTLLGNPSQKIRGRLVRTIERKYYKEELKLILDKQKEFHPELQDRALYAACIEELYPINEAHRNNVGNRDFTYLFLEDILFYQRPLKSKKSLIDNCPYEENHCLDKETGEIKSFPVKCIAKSHPLFQEFRLWQFIVNLRIYRKGLAQDVDVTNELLKTEEDYVALFDWLNGKKEIDQKAFLKYPLFGLKKEVENYRWNYVQDKPYPCNETRSSMLARLEKCDISIEFLTKENEEALWHILYSVEDKNEIVKALQKFADKHDLNASFVDVFRKFPPFKKEYGSYSAKAIKKLLPLMRMGKYWSENSIDKGTRERIDKIITGEYDEKIENRVREKAIHLADVSDFRGLPLWLVCYIVYGRHSEAKEITQWKSPADIDSYLKSFKQHSLRNPIVEQIIIETLRVVRDIWKQVGNIDEIHVELGREMKNPADKRKKMTQQISENENTNLRIKYLLTEFLNPEYEVENVRPYSPSQQDILRIYEEGVLNSVSDLPEEISDILKKFTETDLKKRPSRSEVLRYKLWLEQKYRSPYTGEVIPLGKLFTSAYEIEHVIPQSCYFDDSFSNKVICEAEVNKLKSNLLGHEFIVKHHGEIVELPFGKKVRIFTVDEYEQFVKDNYSRTRGKMKKLLMDDIPEEFVTRQLNDSRYISKVVKSLLSNIVREKGEEEAISKNVIPCTGGVTDRLKKDWGINEVWNKIILPRFQRLNELTGTNKFTTKNVGIQEIPTMPLELQKGFNKKRIDHRHHAMDAIIIACANRNIINYLNNESATAKAELSRYDLQKLLCDKAKTDNNGNYKWVIRKPWASFTQDTYLALENIIVSFKQNLRVINKATNHFLHYNEEGKKIFVKQGKGDNWAIRKSMHKDTVFGEVNLRRIKTVALNEAMKNPQSIVVKDFKRKLLELWNLGFDAKRIKKYFEDNRETWSDINLSKIEVYYFSKDTKDRFFATRKPLDTSFDRKKIENNITDTGIQKILLRHLELKDNNPDIAFSPDGIDEMNRNIIQLNNGKYHQPIIKVRWYEQADKFAVGQTGNKSSKFVEAAKGTNLFFAVYESNILDKKTNTIIKKRNYATIPLNVAIERQKQGLPVAPEDENGNDPIFVLSPNDLVYLPTDDELANGIIAQPLDRGRIYKMVSSSGEQCFFIKHIVANVLVDKFEFSPLNKMERALTGEMIKMICMPIKVDRLGNVLESSSSHKK

SEQ ID NO: 23463 - protein, 1509 aa, unidentified
  REGION 1..1509: note = Cas Enzyme sequence
MKKILGLDLGTNSIGWAVVCHSDTDGQTERKWIEMAGSRIIPMDAAILGDFDKGNSKSQTSERTGFRGIRRLRERVLLRRERLHKVLKLIGFLPQHYIDSLDFSNHSGKFQLGTEVKLPWRKNEIGKYEFLFQNSFNEMLADFAKKQPELVAMGRKVPYDWTIYYLRKKALSEKITKEELAWILLNFNQKRGYYQLRGEEEEEKKNRLEDFYALKVVEVEQTDDKKGKDIWYNVHLENGWIYRRSSNVPLDWKDKIKEFIVTTELNEDGTPKVDKDGCVKRSFRMPKEDDWKLLKKKTEADIERSHKTIGCYIYDTLLQSPQQKIKGKLVRTIERKFYKDELKLILDKQQAFHPELQDRELYKACLDVLYPMNVAHKNNVANRGFVYLFMEDILFYQRPLKSKKSLIDNCPYEENQYIDVTTGEIKKAPIKCIAKSHPLYQEFRLWQFIANIRIYQKEKKVDGKLLMDIDVTTEYLSSKDDYVALYEWLCVRKEIEQKTFLKYPAFGLKKEIENYRWNYVEGKSYPCNETRSLILHYLEKAGISSTFLSTKIEESLWHILYSVEDRIELETALRTFASKYQLSCNFVEVFKKFPPFKKEYGAYSAKAIKRLLPLMRMGKYWKVDAIDGNTAERIEKILSGECDEKILNKVREKTIHLSETSDFQGLPLWLACYVVYNRHSEGKEVAKWKSPEDIDIYLKSFKQHSLRNPIVEQVITETLRVVRDIWKRVEQIDEIHVELGREMKNPSEKRRQMTERMLENENANIRIKALLTEFMNPEYEMENVRPYSPSQQEILRIYEDTVLNGAGDIPEDIEIILKKFKENDIKKRPGKSDFLRYKLWLEQQYRSPYTGEIIPLGKLFTTAYEIEHVIPQSRYFDDSFSNKVICESEVNKLKDNMLGYEFIKKHAGEIVELGFGKSVKIFSVEAYERFVGENYYKAGSKKSKLLMDDIPEKFIERQLNDSRYISRVVKGLLSNVVREEDANGEYESEAISKNVIVCSGSVTDRLKKDWGVNDVWNNIVYSRFERLNRLTESQQFGHWENREGKRFFQTELPLEYQKGFSKKRIDHRHHAMDAIIIACATRNHVNYLSNESASKHARIARYDLQRMLCDKSKTDGGGNYKWIIQKPWTTFTQDVYRTLLDIIVSFKQNLRVINKMTNYYQSYDDGKKVFKKQKKGDSWAIRKSMHKDTVFGQVNLRKIKEVRLSVALESPEKIVDKKIKEKVLQLFAYQYDKKKIEKYFKENASLWKEVNLAKIPVYYFTDESSELLVAVRKNLDTGFTEKKIRESVTDTGIQKILLNHLSNKGDKPELAFSPDGIDEMNRSLVILNGGKPHQPIYKVRVCEPLGNKFKVGTNGNKAAKYVEAAKGTNLFFAIYETDAGKRTYETIPLNVVIEREKMGWLPVPEKNNKGEKLLFWLSPNDLVYLPTEEELMSRILSDKLDRSRIYKIVSFTGNRLYAIPYNVSNMIWDKNEYTQLNKVESTDMKESIKEICMPINVDRLGHITEIIIK

SEQ ID NO: 23464 - protein, 1154 aa, unidentified; identical to SEQ ID NO: 22937
  REGION 1..1154: note = Cas Enzyme sequence

SEQ ID NO: 23465 - protein, 1024 aa, unidentified
  REGION 1..1024: note = Cas Enzyme sequence
LLIEDILFYQRPLKSKKSLISNCPYEEYTYINKETGEICTSPLKCIAKSHPLFQEFRLWQFISNLRIYQKEGTINGKFTTDIDVTSQFLKTEDAYANLFDWLNQKKEIRQDTFLKNPAFGLKKNTANYRWNYVEDKTYPCNETHYKILSYWEKAGIEQSALTSEIEEKLWHILYSISDKNELRKALQHFADKNYLSDKFADTFQQIPPFEKDYGSYSAKAIKKLLPLMRIGRYWKAENFDSTTLDRIEKILTGEFEENIKNRTREKTIHLDNLYSFQGLPTWLACYIVYNRHSEIKDVTKWQQPSDIDAFLNAFKQHSLHNPIVEQIIMETLRTVRDIWKQTGHIDEIHVELGREMKNPAEKRRKLTQQIQENENTNLRIKALLAEFANPELGIENVRPHSPSQQDLLRIYEEEALNETKDIPEDIAVILKKFNEVDTKKRPSTSDVLRYKCWLEQKYRSPYTGAMIPLGKLFTPAYEIEHVIPQSRYFDDSFTNKVICEAEVNKLKGNMLGYEFIKNNQERIVELGFGQNVKIQTVEAYELFVKEHYSYNRTKMQKLLMEDIPDQFIERQLNDSRYISKLIKSLLSNIVRDEGEEEATSKNVIVCTGSITDRLKKDWGINDVWNKLILPRFIRLNEITESNRFTTTNACNKTIPAMPLDLQKGFNKKRIDHRHHAMDAIVIACANRNIVNYLNNESASKNAKISRQDLRQILCKKTKTDNLGNYQWLIDKPWDTFTQDVYSILGNIIVSFKQNLRIINKTTNHYIHYENGKKVSCSQKQGDSWAIRKPMHKETVYGEINLRRTTTATLKAVLENPQRIIEKDLKKKIKELLTQGLNEKQIKKYFEDNKDIWQEINLKKIPVYYFTKETANRFFACRESINTTFNKKKIEEKVADTGIQQILLRHLEQNGNNPEQAFSPEGIEQMNKNIMSLNNNGKFHQPIYKVRTYEQADKFAVGQTGNKSTKFVEAAKGTNLFFAIYETAHKRSFASIPLNVVIERLKKACHQHPKTKRVIYLNLYYHPMI

SEQ ID NO: 23466 - protein, 1312 aa, unidentified
  REGION 1..1312: note = Cas Enzyme sequence
VQNGFLGITVSSEQVGWAVTNPKYELERASRKDLWGVRLFDKAETAEDRRMFRTNRRLNQRKKNRIHYLRDIFHEEVNQKDPNFFQQLDESNFCEDDRTVEFNFDTNLYKNQFPTVYHLRKYLMETKDKPDIRLVYLAFSKFMKNRGHFLYKGNLGEVMDFENSMKGLCESLEKFNIDFPTLSDEQVKEVRDILCDHKIAKTVKKKNIITITKVKSKTAKAWIGLFCGCSVPVKVLFQDIDEEIVTDPEKISFEDASYDDYIANIEKGVGIYYEAIVSAKMLFDWSILNEILGDHQLLSDAMIAEYNKHHDDLKRLQKIIKGTGSRELYQDIFINDVSGNYVCYVGHAKTMSSADQKQFYTFLKNRLKNVNGISSEDAEWIDTEIKNGTLLPKQTKRDNSVIPHQLQLREFELILDNMQEMYPFLKENREKLLKIFNFVIPYYVGPLKGVVRKGESTNWMVPKKDGVIHPWNFDEMVDKEASAECFISRMTGNCSYLFNEKVLPKNSLLYETFEVLNELNPLKINGEPISVELKQRIYEQLFLTGKKVTKKSLTKYLIKNGYDKDIELSGIDNEFHSNLKSHIDFEDYDNLSDEEVEQIILRITVFEDKQLLKDYLNREFVKLSEDERKQICSLSYKGWGNLSEMLLNGITVTDSNGVEVSVMDMLWNTNLNLMQILSKKYGYKAEIEHYNKEHEKTIYNREDLMDYLNIPPAQRRKVNQLITIVKSLKKTYGVPNKIFFKISREHQDDPKRTSSRKEQLKYLYKSLKSEDEKHLMKELDELNDHELSNDKVYLYFLQKGRCIYSGKKLNLSRLRKSNYQNDIDYIYPLSAVNDRSMNNKVLTGIQENRADKYTYFPVDSEIQKKMKGFWMELVLQGFMTKEKYFRLSRENDFSKSELVSFIEREISDNQQSGRMIASVLQYYFPESKIVFVKEKLISSFKRDFHLISSYGHNHLQAAKDAYITIVVGNVYHTKFTMDPAIYFKNHKRKDYDLNRLFLENISRDGQIAWESGPYGSIQTVRKEYAQNHIAVTKRVVEVKGGLFKQMPLKKGHGEYPLKTNDPRFGNIAQYGGYTNVTGSYFVLVESMEKGKKRISLEYVPVYLHERLEDDPGHKLLKEYLVDHRKLNHPKILLAKVRKNSLLKIDGFYYRLNGRSGNALILTNAVELIMDDWQTKTANKISGYMKRRAIDKKARVYQNEFHIQELEQLYDFYLDKLENGVYKNRKNNQAELIHNEKEQFMELKTEDQCVLLTEIKKLFVCSPMQADLTLIGGSKHTGMIAMSSNVTKADFAVIAEDPLGLRNKVIYSHKGEK

SEQ ID NO: 23467 - protein, 1498 aa, unidentified
  REGION 1..1498: note = Cas Enzyme sequence
MKHILGLDLGTNSIGWAVINAIKEENTQKEQLIGINTAGSRIIPMDAAQLGDFNKGNTVSQTANRTQFRGVRRLYERKKLRRERLHRILQLLGFLPKHYASQLDRYGKFIANSEPKLAWTTNTHEPSYFIFQSSFQEMLNDFLQNNNQVKKVPYDWTLFYLRKKALTQKIEKEELAWILLNFNQKRGYYQLREEETEKASSKTRQYFDSQIVTDITDTGQIYKGLKIFTITLENGEKGKFFSKNMPDWKGQKKDIIAIIDLDKNGNDKYDENGELSRRFKIPTEQEWEEQWELIKTKTQKDLDTSHKTVGAYIYDTLLQTPSQKIRGKLIRTIERKYYKDELNQILKKQEEFHPELRDSNLLEACIEELYPNNEAHRNAIAKYSISQLLIEDILFYQRPLKSKKSLISNCPYEEYTYTNKETGEICTSSLKCIAKSHPLFQEFRLWQFISNLRIYQKEGTINGKFTTDIDVTNQFLKTEDDYANLFDWLNQKKEIRQDTFLKKPAFGLKKNIANYRWNYVEDKTYPCNETHYKILSYWEKAGIEQSALTSEIEEKLWHILYSISDKNELRKALQHFADKNYLSDKFADTFQQIPPFEKDYGSYSAKAIKKLLPLMRIGRYWKAENFDSTTLDRIEKILTGEFEENIKNRTREKTIHLDNLYSFQGLPTWLACYIVYNRHSEIKDVTKWQQPSDIDAFLNAFKQHSLHNPIVEQIIMETLRTVRDIWKQTGHIDEIHVELGREMKNPAEKRRKLTQQIQENENTNLRIKALLTEFANPEFGIENVRPHSPSQQDLLRIYEEEVLNETKDIPEDIAVILKKFNEIDTKKRPSTSDVLRYKCWLEQKYRSPYTGAMIPLGKLFTPAYEIEHVIPQSRYFDDSFTNKVICEAEVNKLKGNMLGYEFIKNNQERIVELGFGQNVKIQTVEAYELFVKEHYSYNRTKMQKLLMEDIPNQFIERQLNDSRYISKFIKSLLSNIVREEGEEEATSKNVIVCTGSITYRLKKDWGLNDVWNKIILPRFMRLNEITESNRFTTTNACNKTIPAMPLDLQKGFNKKRIDHRHHAMDAIVIACANRNIVNYLNNESASKNAKISRQDLRQILCKKTKTDNLGNYQWLIDKPWDTFTQDVYSILGNIIVSFKQNLRIINKTTNHYIHYENGKKVSCSQKQGDSWAIRKPMHKETVYGEINLRRTTTATLKAVLENPQRIIEKDLKKKIKELLTQGLNEKQIKKYFEDNKDIWQEINLKKIPVYYFTKETANRFFACRESINTTFNKKKIEEKVADTGIQQILLRHLEQNGNNPEQAFSPEGIEQMNKNITSLNNGKFHQPIYKVRTYEQADKFAVGQTGNKSTKFVEAAKGTNLFFAIYETAHKRNFASIPLNVVIERLKKGLPPAPENEKGNLPKFILSPNDLVYVPIKEEIENGHINQPIQKDRIYKMVSCTGNQCFFIKSNVANTIIDKYEFSPLNKMERAITGEMIKETCIPIKTDRLGNIITSISL

SEQ ID NO: 23468 - protein, 1509 aa, unidentified
  REGION 1..1509: note = Cas Enzyme sequence
MKNILGLDLGTNSIGWAVVNGSINDNGSEQLVKIQASGSRIIPMDAAMIGDFNKGNSISQTAERTRLRGIRRLSERYLLRRERLHRILDILGFLPSHFAQDLDRHGKIVKGKEPKLAWRKNEAGQFEFIFQDSFKEMLEDFKLNHPNLITDDKKVPYDWTIYYLRKKGLTSKISKEELAWILLNFNQKRGYYQLRGEEEKKNDNVMIINSKVIDVVKAEKDKKYEKYWYNVLLENGLLYRAAFYNDISFWKGHTKEFVLKTIKLKSGGTKQELSFLPSFDEIEKMEKKQKDKMYFKIKLKTGADIDQTHKTVGTYIYDTLLGNPSQKIRGRLVRTIERKYYKEELKQILDKQKEFHPELQDRALYAACVEELYTINEAHRNNIGNRDFTYLFLEDILFYQRPLKSKKSLIDNCPYEENHCLDKETGEIKSFPVKCIAKSHPLFQEFRLWQFIVNLRIYRKGLAQDVDVTNELLKTEEDYVALFDWLNGKKEIDQKAFLKYPLFGLKKEVENYRWNYVQDKPYPCNETRSSMLARLEKCDISIEFLTKENEEALWHILYSVEDKNEIVKALQKFADKHDLNASFVDVFRKFPPFKKEYGSYSAKAIKKLLPLMRMGKYWSENSIDKGTRERIDKIITGEYDEKIENRVREKAIHLADVSDFRGLPLWLVCYIVYGRHSEAKEITQWKSPADIDSYLKSFKQHSLRNPIVEQIIIETLRVVRDIWKQVGNIDEIHVELGREMKNPADKRKKMTQQMSENENTNLRIKYLLTEFLNPEYEVENVRPYSPSQQDILRIYEEGVLNSVSDLPEEISDILKKFTETDLKKRPSRSEVLRYKLWLEQKYRSPYTGEVIPLGKLFTPAYEIEHVIPQSCYFDDSFSNKVICEAEVNKLKSNLLGHEFIVKHHGEIVELPFGKKVRIFTVDEYEQFVKDNYSRTRGKMKKLLMDDIPEEFVTRQLNDSRYISKVVKSLLSNIVREKGEEEAISKNVIPCTGGVTDRLKKDWGINEVWNKIILPRFQRLNELTGTNKFTTKNVGIQEIPTMPLELQKGFNKKRIDHRHHAMDAIIIACANRNIINYLNNESATAKAELSRYDLQKMLCDKAKTDNNGNYKWVIRKPWASFTQDTYLALENIIVSFKQNLRVINKATNHFLHYNEEGKKIFVKQGKGDNWAIRKSMHKDTVFGEVNLRRIKTVALNEAMKNPQSIVVKDFKRKLLELWNLGFDAKRIKKYFEDNRETWSDINLSKIEVYYFSKDTKDRFFATRKPLDTSFDRKKIENNITDTGIQKILLRHLELKDNNPDIAFSPDGIDEMNRNIIQLNNGKYHQPIIKVRWYEQADKFAVGQTGNKSSKFVEAAKGTNLFFAVYESNILDKKTNTIIKKRNYATIPLNVAIERQKQGLSVAPEDENGNDPIFVLSPNDLVYLPTDDELANGIIAQPLDRGRIYKMVSCTGNEGHFIPARIANPILQTIELGSNNKAQKAWTDEMIKEICMPIKVDRLGNVLESSSSYKK

SEQ ID NO: 23469 - protein, 1230 aa, unidentified
  REGION 1..1230: note = Cas Enzyme sequence
  REGION 1209..1214: note = misc_feature - Xaa can be any naturally occurring amino acid
MKRILGLDLGTNSIGWALVNEAETDEEVSSIIRLGVRVNPLTVDETQNFEKGKSITTNAERTLKRSMRRNLQRYKLRRDALVEFLKELGFITDETILSEQGNRTTFETCRLRAKAAEEEISLEELSRVLLMINKKRGYKSSRKVKKEEDGVLIDGMEIAKKLYEEDLTPGQLCSQLLESGKKVLPDFYRSDLQEELDRIWSVQKQFHPDVFCDAAKEEIKGKNRSQTWAILANYFVWKEEVVGWNDREAKNETIEKECKLVGLKRTTKGYELKKENYRWRAQALTEQLGLEEIAVVLQEINGQINASSGYLGAISDRSKVLYFNHQTVGQYQMAELDKNPHASLRNMVFYRQDYLDEFDRIWEKQAEFHKELTAELKKEIRDMIIFYQRRLKSQKGLISFCEFERLEIVVEKDGKKQTKVIGCKVIPRSHPLFQEFKVWQTLNDIKVLGREKKRNALSASESRALYPEEKEILARELAIKENMKKADVLKLLFENPQELDLNFKQIDGNRTGFSLFSAYSKMIEKYGYEPLDFKKPADEIIGQLRTIFTDLGWNTNLFTIDLTKEGKELEMQPYFRLWHLLYSFEGDNTSTGNGKLIEKIMQLCGVEKEYAVELASLSFQDDYGSLSAKAIKRILPYLKEGNLYDVACEYAGYRHSKSSLTKEEIENKVLKGKLEVLPKNSLRNPVVEKILSQMVNVINTIIDTYGKPDEIRVELARELKKSAKEREELTKAIAKSTREHEEIRKLLQDEFGMMNVSRNDIIRYKLYEELKDNGYKTLYSNQYIPKEKIFSKEIDIEHIIPQSRLFDDSLSNKTLEYKAINIEKGNKTAYDFVKEKYGEEGLQQYINRCESLFNDKKAKLRKLKMEQKDIPDGFIDRDLRNTQYIAKKALAMLNEICRRVVATTGSITDQLREDWQLVDVMKELNLPKYEALGFVETYEDKDGRKIKRIKDWTKRNDHRHHAMDALTVAFTKDAFIQYFNNKNAAQDSGNRNHTNIIGIKTRYFDKGRALPPIPLEQFRIEAKQHLEKLLVSIKAKNKVVTVNVNRTKKRKGENTKIQQTPRGQLHLETVYGSHKQYVTKIEKVNASFDAAKIATVSKRAYRNALLKRLETFGNDPKKAFTGKNALEKNPLYADKYQTIRVPEKVQTVEFETIYTIRKPVDPALNVDKVVDVKVRAILERRLKEYGGDPKKAFVNFWENPIWLNKEKGXXXXXXSSGLASEESIMPNRYT

SEQ ID NO: 23470 - protein, 1504 aa, unidentified
  REGION 1..1504: note = Cas Enzyme sequence
MKNIVGLDLGTNSIGWAVVNGSVNDDGSEQLVKIQASGSRIIPMDAAMIGDFNKGNSISQTAERTRLRGVRRLSERYLLRRERLHRILDILGFLPFHFAQDLDRHGKIVKGKEPKLAWRKNEAGQFEFIFQDSFKEMLEDFKLNYPNLITDDKKVPYDWTIYYLRKKGLTSKISKEELAWILLNFNQKRGYYQLRGEEEEENKDKLVEFYALKVVAVEDSGEKKGKDIWYNVHLENGWVYRRTSNMSLDWVGKTKEFIVTTDLEKDGTPKKDKEGNVKRSFRAPKEDDWSLVKKKTEADIDQTHKTVGAYIYDTLLGNPSQKIRGRLVRTIERKYYKEELKLILEKQKEFHLELQDRALYAACIEELYPINEAHRNNVGNRDFTYLFLEDILFYQRPLKSKKSLIDNCPYEENQGLDKETGEIKSFPVKCIAKSHPLFQEFRLWQFIINLRIYRKDLAQDVDVTNELLKTEEDYVALFDWLNGKKEIDQKAFLKYPVFGLKKEIENYRWNYVQDKPYPCNETRSLMLARLEKCDISIEFLTKENEEALWHILYSVEDKNEIVKALQKFADKHDLNASFVDVFQKFPPFKKEYGSYSAKAIKKLLPLMRMGKYWSENSIDKGTRERIDKIITGEYDEKIENRVREKAIHLADVSDFKGLPLWLVCYIVYGRHSEAKEIIQWKSPADIDSYLRSFKQHSLRNPIVEQIIIETLRVVRDIWKQVGNIDEIHVELGREMKNPADKRKKMTQQMSENENTNLRIKYLLTEFLNPEYEVENVRPYSPSQQDILRIYEEGVLNSVSDLPEEISDILKKFTETDLKKRPSRSEVLRYKLWLEQKYRSPYTGEVIPLGKLFTPAYEIEHVIPQSCYFDDSFSNKVICEAEVNKLKSNLLGHEFIVKHHGEIVELPFGKKVRIFTVDEYEQFVKDNYSRTRSKMKKLLMDDIPEEFVTRQLNDSRYISKVVKPLLSNIVREKGEEEAISKNVIPCTGGVTDRLKKDWGINEVWNKIILPRFQRLNELTGTNKFTTKNVGIQEIPTMPLELQKGFNKKRIDHRHHAMDAIIIACANRNIINYLNNESATAKAELSRYDLQKMLCDKAKTDNNGNYKWVIRKPWASFTQDTYLALENIIVSFKQNLRVINKATNRFLHYNEEGKKIFVKQGKGDNWAIRKSMHKDTVFGEVNLRRIKTVALNEAMKNPQSIVVKDFKRKLLELWNLGFDAKRIKKYFEDNRETWSDINLSKIEVYYFSKDTKDRFFATRKPLDTSFDRKKIENNITDTGIQKILLRHLELKDNNPDIAFSPDGIDEMNRNIIQLNNGKYHQPIIKIRWYEQADKFAVGQTGNKSSKFVEAAKGTNLFFAVYESNILDKKTNTIIKKRNYATIPLNVAIERQKQGLPVAPEDENGNDPIFVLSPNDLVYLPTDDELANGIIAQPLDRGRIYKMVSSSGEQCFFIKHIVANVLVDKFEFSPLNKMERALTGEMIKMICIPIKVDRLGNVLESSSSYKK

SEQ ID NO: 23471 - protein, 1370 aa, unidentified
  REGION 1..1370: note = Cas Enzyme sequence
MKLIFGFDLGSTSIGWAVVQEKENDTETSRILKLGVRVNPLTTDEKTDFEKGKPITTNANRRLAHGMRLNLSRYKQRRKELIKNLIRFKFISPDTVLCENGSNTTFETLRLRAKAATEEITLEELSRVLLMINKKRGYKSNRKAQPNDNGAIDNIDIAKKLYQSHLTPGEYVFNNLKQGIQYIPPFYRSDLINEFNKIVDCQTQFYPHLKNIDTGSLLKAKNCDIILDGQDVQRIKQKGSPSEKKRELYCLRTQAATQQIRLEELALVLEKISSEIRNSSGYLGDISDRSKELFINNQTIGQYLMSQLDRNPNNKLKGQVFYRQDYEDEFNRIWETQARFHKELTPERLHIIRDIIIFFQRDLKSQKSNIAICEFEKQKREITVDGKKKIIEFGPKVCPKSSPIFQEFKIWQTINNLKISNIYGEELSLSSDERQILFEELSIRKKLTCAEILKLLHKDSKCSLNYKEIQGNATISAIFDAFKEIILQSGHDNNNFNKASFKDTMLIIEPIFKMLGINTDILSLDCPTDSHSLKTCPIYQLWHLLYSYAGDNSKTGDSSLIKKLQRRYGFSKEYASIMSKISFDNDYGNLSAKAIMRILPHLRNGLQYSDACNAAGYNHSKRSLTKQDILNKVLVSQIDLLPRNSLRQPVVEKILNQLINITNALISTYGNPDEIRIELARELKKSADERAKLNSANNANEKENNSIRELLQERFGIQNPSRNDIVRYKLYKELEHTGFKTLYSQSLITDDILFSKEIEIEHIIPQARLFDDSLSNKTLEFHNINQNKSNQTAYDYILSEFGEDYAVQYKKRIDDLLKNGKISRTKHKYLLMSETEIPTDFINRDIRETQYISRKAMEILEPATRKVVASSGAITARLREDWQLVDVMKELNWEKYKALNLTETIQDKDGRRIYKIKDWTKRNDHRHHAMDALTVAFTKPSFIQFLNNLNARSDKGNAIYAIQQKELHRNKDGKLCFNPPLPLDEFRAEAKRQLNDIFVSHKAKNKVATRNSYMTKNGKGTKIVELTPRGQLFNETTYGCVKQYETKLESVNSSFDTDKIMTVADKSYRQALMKRIEEFDGNASLAFSRKNSITKNPIYVDDSHSDTVPVKVKTVVPKPVFTQRIAVDIKLDKTKIAQILDAKIRRILTDRFYEFGEDPQKAFSNIDENPIWLNKEKGIAIKKVTIKTGISGVPIRHKRNNMGRPILNSDGNKIPSDFVVPGNNHHIAIYKDADGNIKEQAVPFYIATNRVIHKQPAVDRNFNVDKGWKFLFSIKKNEYFVFPNEKTGFNPAEIDLLNPDNNKIISPNLFRVQKISPGDYFFRHHLETTVDANNALKGTTWIRIRSLPALENIIKVRVNNIGQIVAVGEY

SEQ ID NO: 23472 - protein, 1433 aa, unidentified
  REGION 1..1433: note = Cas Enzyme sequence
MKTILGLDLGCNSIGWALVNEAENTEEVSSIIKLGVRVNPLTVDEMQNFEKGKSITTNADRTLKRSMRRNLQRYKLRRDTLIEVLKEHGFITDSTLLSEHGNKTTFETYRLRAKAAVEEVSLEEFARVLLMINKKRGYKSSRKAKGSEDGILIDGMDVARKLYEEGLTPGELCLQMLEAGKKNLPDFYRSDLQNEFDRIWNFQKRFNPELFCDAVKEEVRGKNRSQTWAILAKFFVWSEKESVWNEEEARTEEIMKEYKLVGLKRDTKGNELKLENYRWRVQALSEQLNPEIVAIVLQEISGQISASSGYLGAISDRSKQLYFNRQTVGQYLMSELEKDPNVSLRNRVFYRQDYLDEFDRIWERQAEFHEELTVELKKEIRDIIIFYQRRLKSQKGLISFCEFEKREVIVEKDGRKQNKTVGCRVIPRSHPLFQEFKIWQTLNGIEVFAWDKQSKRKKADKSSTLFDNSEEPLLVEGKRSLYQEEKELLAKELFVKESMKKAEVLKLLFENFQELDMNFKQIDGNHTGFALFSAYSKMIEKYGYEPVDFKKPADEIIEKLETIFTNLGWNTELLSIDLSKEDKELERQSYFRLWHLLYSFEGDNTPTGNGKLLEKIMQLCDVEKEYAVELANVSFQEDYGSLSAKAIKKILPYLKEGNQYDVACDYAGYRHSKSSLTKDEIENKILKDKLEILPKNSLRNPVVEKILNQMVNLINTIIDTYGKPDEIRVELARELKKNAKEREELTKSIARNTREHDEIRQLLRTEFGMMNVSRNDIIRYKLYEELKDNGYKTLYSNEYIPREKIFSKEIDIEHIIPQARLFDDSLSNKTLEYRAINIEKGNKTAYDFVKEKYGDDGLEKFLNRCEALFKDKKTKLRKLKMEEKDIPEGFIDRDLRNTQYISKKALAMLNEISHRVVATTGVITDKLREDWQLVDLMKELNLPKYEKLGMVEMLEDKDGRKIKKITDWTKRNDHRHHAMDALTVAFTKDVFIQYYNNKNAAWMPASKEHANIIGIKARYFENGKALAPMPLAQFRAEAKRHLENLLVSIKAKNKVITSNVNRTKKKNGENRKLQQTPRGQLHLETVYGSHRQYATKMEKVNATFDVAKIATVSKLAYRNALLKRLEAFGNDPKKAFTGKNTLEKNPLYLDEKQTEMVPEKVQTVEFETVYTIRKPIDPNLSIDKVIDVKIRSVLEKRLKEYGGDAKKAFVNLDENPIWLNAAKGISIKRVSIRGISNAQSLHEKKDKDGNLILDKEGRKKPVDFVNTGNNHHVAIYKKPVLDKMGQIVLDEEGNPKYELDEVVVSFFDAVTRANLGQPIIDKDYRRSEGWQFLFSMKQNEYFVFPNEKTGFNPKEVDLLNPENYAMISPNLFRVQKFAYKNYVFRHHLETTIKDTSSTLKGITWTDFRSSKGLDKIVKVRVDHIGQIVSLGEY

SEQ ID NO: 23473 - protein, 1520 aa, unidentified; identical to SEQ ID NO: 22423
  REGION 1..1520: note = Cas Enzyme sequence

SEQ ID NO: 23474 - protein, 1506 aa, unidentified
  REGION 1..1506: note = Cas Enzyme sequence
MKKILGLDLGTNSIGWAVINSSVDDEGKEKLTSISSCGSRIIPMDAATLGDFDKGNAKSSVAERTRLRGIRRLLERSLLRRERLHRVLSVMGFLPEHYASQLDRYGKFLPETEPKLAWYKDNTGSYRFLFQDSFNEMLEDFRLYHPELVAEGKKIPYDWTIYYLRKKALSQKIAKEELAWILLNFNQKRGYYQLRGEEEQEDNKKSVEYYALKVVAVEDSGERKGKDIWYNVKLENGWIYRRVSSIPLDWTGKVKEFVVTTDLDDAGNPKKDKDGNVKRSFRAPKEDDWGLLKTKTQTQIDESGQTVGAYIYDSLLRMPDQKIRGKLVRTIERKYYKDELRKILLKQTEFHAALKDHNLLLSCIEELYPNNEAHRRLLSTSNFTCFLLEDILFYQRPLKSQKGLIDDCPYESHVYKKDGSLHRTPLKCISKSHPLFQEFRLWHFLSFLRIYQRERMIDGSLKLDVDVTNEFLQNEDDYVKLFDWLNGRKEIDQKTILTYKPFGLKKNEQPKYRWNYVEDKSYPCNETRADMISRLGKAGVSEGFLTEEREEALWHILYSISDEKELTKALGTFAEKNGLNEAFVEQFSKMPPFESNYAAYSLKAIRKLLALMRMGKYWNEQDIDKQTRSRIEKILTGEYDETIRTRVREKAIHLTDISSFRGLPLWLACYVVYNRHSEAKELVKWETPADIDHFLSKFRQHSLRNPIVEQVIMETLRTVRDIWKQEGQIDEIHVELGREMKNPAKERARITAQVLENENTNLRIKALLTEFMNPEFEIENVRPYSPGQQEILRIYEEGVLSGVAEKDLPEDIISILKKFRENDVKKRPTTSEVLRYKLWLEQRYRSPYTGRIIPLGKLFTPAYEIEHVIPQSRYFDDSISNKVICESAVNKLKDNCLGYEFIKKHSGEIVELGNGEKATVFTSEEYEHFVKESYLGNGKKMKKLLLEDIPDNFIERQLNDSRYISKVVKSLLSNIVCEEGEQEGMSKNVIVCTGGVTDRLKKDWGVQDVWNRIILPRFLRLNKMTDSTGFTSVSTNGHLLPALPLHLQKGFNKKRIDHRHHAMDAIVIACADRNIVNYLNNASARKGSEISRYDLQHLLCDKVKTDSNGNYKWMLRKPWDTFTQDVYTALTNIVVSFKQNLRVINRTTNYHQHYNESGEKKMIPQVKGDRWAIRKPMHKDTVYGEVNLRREKTLPLKDVLNNPSIVVDKSLKSKLHELLKAQYDLKAITKYFEAHQDVWADINLKKIKVYYFTKETNERFFATRKSLDSSFNQKKIQEEVTDTGIQRILLRHLQLNDNNPDIAFSPDGIERMNQNMNILNDGKGHQPIYKVRTYEKAEKFAVGEHGNKVKKFVEAAKGTNLFFAVYESIQEDEATGKQVRKRTFATIPLNEVIKRKKQGLSVAPEDSNGNLPIFVLSPNDLVYLPTEEERNRGKVTQPLDRERIYKMVSCTGNRLFLVPYMVASPIYDKKEYTSLNKIELTDDKISIKEWCIPILIDRLGNISINY

SEQ ID NO: 23475 - protein, 1427 aa, unidentified
  REGION 1..1427: note = Cas Enzyme sequence
MKKILGLDLGTSSIGWALVNEAETSEEKSSIIKLGVRVNPLTVDELQNFEKGKSITTNADRTAGRSMRRNLQRYKLRRENLIEVLKEYNFITDEMILSENGNRTTFETYRLRAKAAVEEISLEQFARVLLMINKKRGYKSSRKAKGAENGTLIDGMEVAKKMYDEGITPGELCLQLLTAGKRYFPDFYRSDLQAEFDRIWNFQKQFYPDSLIDKVKDEVRGKNKSQTWAILAKYFVWKEVENSWNEEEAQTRRVEKEYRLVGIKRGVKREELKLENFQWRVKALSERMNPEELAIVLQEINEQISNSSGYLGAISDRSKELYFNRQTVGQYQMAVLDNNPNIGLRNMVFYRQDYLDEFNTIWEKQAEFHKELTEDLKKEIRDIVIFYQRRLKSQKGLINICEFERRQIEVEIDGKKKIKTIGSRVIPRSSPLFQEFKIWQTLNDIEVSVLGVKNKRKKQDDNSTTLLDSAENIDSLKLNVSRPLDADEKSLLAKELFIRDKLTKSDVLKLLFNNPQNLNLNFKNIDGNRTGSALYQAFSKILEISGHESINFKKSADEIVEQVKTIFSALGWNTEVLCFDSEKELDKQPYFKLWHLLYSFEGDSTPTGDGNLIQKIADLCGFEKDYASILANITFQEDYGSLSTKAIRKILPHLKDGNQYDVACEYAGYKHSKSSLKKEEIKNKVLKDKLELLPKNSLRNPVVEKILNQMVNVINAIITTYGKPDEIRIELARELKKNAKEREELTKSIVDTTKTHEGIRAILQNDFGMSHVSRNAIIRYKLYEELKDNGYKTLYSNTYIPKEKLFSKDFDIEHIIPQARLFDDSFSNKTLEVKSINIEKGSKTAYDFVEEKYGEQGLQEYLNRCEVLFRDKKTKLRKLKMQESEIPEGFIDRDLRNTQYIAKKALSMLNEICRRVVATTGAITDELREDWQLVDVMKELNWEKYKVLGLVEYFEDNDGRLIGRIKDWTKRNDHRHHAMDALTVAFTKDVFIQYFNNKNASLKPDTNEAAIRNKYFQNGKAIPPMSLDEFRAEAKKHLNDTLISIKTKNKVVTINLNRTKKKNGINKKQQQTPRGQLHLETVYGSHKQYVVKEEKVNASFDAAKIATVNKPAYRDALLRRLQENGNDSKKAFTGKNSLDKQPVWLDAKQNECVPEKVKTVMLETVYTVRKPIDEKLNVDKVVDARIRKLLQDRIKEYGNAKSAFANLDENPIWLNKEKGITIKRVSVFGISKAQSLHEKKDKDGNFILDKDSRRIPVDFVNTGNNHHVAIYRKPVLDKKGQAVFDENGELKFELEEVVVSFFDAVTRVNLSQPIIDKDYKRSEGWKFLFSMKQNEYFVFPNEKTGFDPKEIDLLNPENYALISPNLFRVQKIASKDYVFRHHLETVVADRKELQEITWKRISSLSILNRIIKVRVNHIGQIVMIGEY

SEQ ID NO: 23476 - protein, 1098 aa, unidentified
  REGION 1..1098: note = Cas Enzyme sequence
MRKKIRYVLGLDIGIASVGWAVLLLDGEDNVCGIVRAGVHTFDEVTVGKEKITATANRRGYRSGRRLVRRKAHRIQRVKSLLQEMNIVSKKDMDEYYSGAVEDVYFLRWAAIQDEPVYILDNRELAQLLIYFAKHRGYKSTAVHEQEDEDDKKVLSAISENKKYMHEHGYRTAGEMIYKDAKFRQKRCGSSEENELLVARNSEGNYSNSISRDLLVEEVRIIFEKQRELGNTLATKELEERFLSIMQSQRNYDGGPGEGSPYGGNLIEKMVGECTFEKGEKRACKASYISERFVLLEKINHLRICTADGNERPLNEDEKSAVIKLAYKTKVVKYNAIRKELKLDLEERFGGLTYSKVNNGDFKQRILDTEKKSDFISLKYWHEVKDILNLSYKDLTEEQKQLMDSVGKVLTYYKSEEKRREELSDLSLNQAQIEKLLKLNYAKFHNLSFKVMKKLMPELEAGYSYMESCLRVGYDSLSTDGVKTKYISKELLNEAVDKIMNPTVKRAVRRTVRILNEIVKLYGSPVEIHIEMARDLPHSGEVKKKIATAQKNNNKEKKEAIKFISENFGKIESDIRRKDILRYRLWKNQSQMDLYSEKLIPVEDILDYEKYEVDHIIPYSRSFNDSFNNKMLVKKKDNQDKKNHTPHEYIGHDDEAWNKFVKMVNNYVLSPGKRKNALTKSSDSDEWRSRNLNDTRYTTKVVADLIRRHLVVEPYFNGARNKHVYPLNGGVTARLRHEWGLEKDREKSDKHHAQDAIVIACCTEKMIWKMSNIYKQEELGGVVRKGNKLVDRRTGEILETTALPWKWFREEVEMVMADHPEDYIEMAKDRGYMGDIPKPIFVSRLPVKKKTGVISENTIRAVDEASSRTVEKTSLDKLKLIEVNGKKQIKDYYRPEDDVLLYNKLLDRLIRYGNAKDAFAEPFYKPKKDGSDGPIVKKVKLYVGVADDQVKVRGRGEDIDREGVKDRGGMYRCDIFRKDGKYYMVPVYYKDLYLHRMPTKAVVAHKETADWEKMDDKDFLFSLYPDDLIKVQKKNKEIENGYYKTSDRYSAGISYVQHDLGAKSYVRLCIQNLAIFEKLNVDILGNIYSCSKEEREWL

SEQ ID NO: 23477 - protein, 1509 aa, unidentified
  REGION 1..1509: note = Cas Enzyme sequence
MKKTLGLDLGTNSIGWAVINSNIDSEGKEKLVGISSCGSRIIPMDAATLGDFGKGNTKSPVAERTRLRGIRRLLERSLLRRERLHRVLSVMGFLPEHYASQLDRYGKFLPETEPKLAWYKDDSGRYQFLFQKSFHEMLEDFRQHQPELVTGEKKIPYDWTIYYLRKKALSQEITKEELAWILLNFNQKRGYYQLRGEEEQEENNKSVEYHALKVVSVEDSGERKGKDIWYNVTLENGWVYRRASNIPLDWTGKVKEFVVTTELDDAGNPKKNKEGVIKSSLSMLKEDDWGLLKTRTQAQIDESGKTVGTYIYESLLCMPNQKIRGKLVRTIERKYYKDELRQILVKQSEFHAALQDHNLLLSCIEELYPNNEAHRRLLSASSFIYFLIEDILFYQRPLKSQKGLIDNCPYESHIYKDKKDGSLHHVPLKCVSKSHPLFQEFRLWQFLSNLRIYQRERMMDGSLKLDVDVTREFLPSEEDYVKLFDWLNERKEISQKLLLAYRPFGLKKNEQANYRWNYVEDKSYPCNETRAEIKSRLSKAGVPEEFLTAEKEEALWHILYSISDKKELTKALGTFAAKNCLNESFVEVFAKIPPFESNYAAYSLKAIRKLLALMRMGKYWNEQAIDRQTRDRIEKILTGEYDETIRSRVREKAMLLTDISSFRGLPLWLACYIVYDRHSESKELVKWETPADIDHFLSKFKQNSLRNPIVEQVITESLRTVRDIWKQEGKIDEIHVELGREMKNPAKERARITAQVQENENTNLRIKALLAEFMNPEFEIENVHPYSPGQQEILRIYEDGVLSGIAEKDLPDDITAILKKFRENDVKKRPTTSEVLRYKLWLEQRYRSPYTGRVIPLGKLFTPAYEIEHVIPQSRYFDDSISNKVICESAVNKLKDNCLGYEFIKKHSGEMVELGNGETVPVFSVEEYERFVKESYFGNSKKMKKLLLEDIPDSFIERQLNDSRYISRVVTSLLSNLVCEEGEQDGLSKNVIVCTGGITDRLKKDWGVQEVWNRIILPRFLRLNEITGRTDFTSTSVNGHLLPALPLYLQKGFNKKRIDHRHHAMDAIVIACANRNIVNYLNNSSARKNSEISRYDLQRLLCEKVKTDANGNYKWILRKPWETFTQDVYAALTNIVVSFKQNIRVINRTTNYYQHYNEAGEKRMIPQTKGDRWAIRKPMHKDTVYGEVNLRKEKTLPLRDVVKNPSIVVDKSLKNKLYELLKSQYDLKAIAKYFETHQDVWADVNLKKIKVYYFTKETNERFFATRKSLDPSFDQKKIEEEVTDTGVQKILLHHLQQNNNDPDMAFSPDGIDRMNQNMTILNDGKWHQPIYKVRTYEKADKFAVGESGNKAKKFVEAAKGTNLFFAVYESVQEDEAIGKQVCKRTFATIPLNEVIKRKKQGLPAAPEDLNGNLPKFVLSPNDLVYLPTEEERNSSRIIQPLDRERIYKMVSSSGSQCFFIKVFVANSIWDKNEYSSLNKMERAITNEMIKEICVPIKIDRLGNVSLIQI

SEQ ID NO: 23478 - protein, 1399 aa, unidentified
  REGION 1..1399: note = Cas Enzyme sequence
MKTILGLDLGTTSIGWALVKEAEPFSDEKSEIVRLGVRVIPLTVDERTSFENGKSITTNALRTQKRGMRRNLQRYKLRRQALIEELKSTGWIGNDFIFSETGPGSTFRTLRLRAKSASEEVTLGDLARILLQINKKRGYKSSRKMVSSDDGQAIDGMAVAKEMYDKGLTPGEYVYQRMLEGKYAIPEFYKSDLQEEFDRIWALQKSFHTELTDELYRKLSDRNKSQTWAICRDELGIQGLKSSFTGKERLKEAYRYRHLAATQEVNMEVLTCALQEINGQKASLSGLLSKISDRSKELYLNNLTVGQMLLKRIEDNPNNSLKNIVFYRQDYLDEFERIWTVQSKYHTELTHELKKRLRDIIIFYQRPLKSQKGLISLCELETKDIEVAIDGVKKMKNIGPRVCPRSSPLFQEFKIWQTINNIFVNGAALDDEDKSVIAKELMFKDKLKDSDLLKLLFKTTKGQSVNFKEVDGNRTMATLMKACFKIAENLGYDDIDLSKLSSEDQMVRIEGIFKEQGFKTGFLHFDSSLASPEFENQDSYRLWHLLYSYEGDKSASGNESLVKCIMDLCSMDEGSAKILASCTFLPDYGSLSAKAMRKILPYMKDGLEYTAACAMAGYRHSKRSLTKEELDTKEYSDRLSLLPKNTLRNPVVEKILNQMINVVNSVIDVYGKPDEIRIEMARELKKSAKEREEAQRDIASSTAESQKVIEILKGEPFFIQFPTRNDIIRYRLYQELAQNGFKTLYSNTYIPKDKLFSKEFDIEHIIPQALIFNDSFANKTLESRQCNLEKGKETAMDYVKSKYDETGVQAYCDRVNGLIGKGISKTKAKWLLMEGKDIPEDFINRELRDSQYIAKKAREILESLVKFVVPTTGSVTARLREDWQLVNVMQELNWEKYARLGLTGVREDKDGRRIPFIQDWTKRNDHRHHAMDALTIAFTRRQFIQYLNHLNSKIDVVSWDKKDLDLRDYDLEDIKFGNLSAGDRYGIVKALQDKFLYKDGNDKYRFVPPIPLDEFRRQAKEQLSDILISFKAKNKVCTRNVNVTKNKGGANRKTQLTPRGPLHNETIYGSSLEYVTKENEKIGSSFDAERITTVCKKKFRDALARRLEEFGGDPKKAFTGKNSPEKNPIWVDEHHSEQVPAKVRTVTMGQRFTGRKPIDATLKIEKVIDKRIREILQARLDEFDGKAAKAFSNLDENPIWLNKEKGIAIKRVTVSGPANPVPVRFKRDKDGKPIIDDAGKTIGADFVTPGNNHHIAIFRDSSGKLQEHPVSFLEATIAKSHGLDVIDRNYNKDEGWEFLFTLKQNEYFVFPNSETGFNPLDYDLTDPRNYAEISPNLYRVQKITTGDYYFRLHLETTVEENKALKGITWKRIRNASALEGLVKVRIDNLGRIVAVGEYD

SEQ ID NO: 23479 - protein, 1142 aa, unidentified
  REGION 1..1142: note = Cas Enzyme sequence
EELYPNNEAHRRLLSSSSFTCFLLEDILFYQRPLKSQKGLIDDCPYESHVYKKDGSLHRTPLKCISKSHPLFQEFRLWHFLSFLRIYQRERMIDGSLKLDVDVTNEFLQNEDDYVKLFDWLNGRKEIDQKTILAYKPFGLKKNEQPKYRWNYVEDKSYPCNETRADMISRLSKAGVSEGFLTEEREEALWHILYSISDKKELTKALGTFAEKNGLNEAFVELFSKMPPFESNYAAYSLKAIRKLLALMRMGKYWNEQDIDKQTRSRIEKILTGEYDETIRTRVREKAIHLTDISSFRGLPLWLACYVVYNRHSEAKELVKWETPADIDHFLSKFRQHSLRNPIVEQVIMETLRTVRDIWKQEGQIDEIHVELGREMKNPAKERARITAQVLENENTNLRIKALLTEFMNPEFEIENVRPYSPGQQEILRIYEEGVLSGVAEKDLPEDIISILKKFRENDVKKRPTTSEVLRYKLWLEQRYRSPYTGRIIPLGKLFTPAYEIEHVIPQSRYFDDSISNKVICESAVNKLKDNCLGYEFIKKHSGEIVELGNGEKATVFTSEEYEHFVKESYLGNGKKMKKLLLEDIPDNFIERQLNDSRYISKVVKSLLSNIVCEEGEQEGMSKNVIVCTGGVTDRLKKDWGVQDVWNRIILPRFLRLNKMTDSTGFTSVSTNGHLLPALPLHLQKGFNKKRIDHRHHAMDAIVIACADRNIVNYLNNASARKGSEISRYDLQHLLCDKVKTDSNGNYKWMLRKPWDTFTQDVYTALTNIVVSFKQNLRVINRTTNYHQHYNESGEKKMIPQVKGDRWAIRKPMHKDTVYGEVNLRREKTLPLKDVLNNPSIVVDKSLKSKLHELLKAQYDLKAITKYFEAHQDVWADINLKKIKVYYFTKETNERFFATRKSLDSSFNQKKIQEEVTDTGIQRILLRHLQLNDNNSDIAFSPDGIERMNQNMTILNDGKGHQPIYKVRTYEKAEKFAVGEHGNKVKKFVEAAKGTNLFFAVYESIQEDEATGKQVRKRTFATIPLNEVIKRKKQGLSVAPEDSNGNLPIFVLSPNDLVYLPTEEERNSGKVTQPLDRERIYKMVSCTGNRLFLVPYMVASPIYDKKEYTSLNKIELTDDKISIKEWCIPILIDRLGNISINY

SEQ ID NO: 23480 - protein, 1318 aa, unidentified
  REGION 1..1318: note = Cas Enzyme sequence
LIEELKSTGWIGNDFIFSETGPGSTFRTLRLRAKSASEEVTLGDLARILLQINKKRGYKSSRKMVSSDDGQAIDGMAVAKEMYDKGLTPGEYVYQRMLEGKYAIPEFYKSDLQEEFDRIWALQKSFHTELTDELYRKLSDRNKSQTWAICRDELGIQGLKSSFTGKERLKEAYRYRHLAATQEVNMEVLTCALQEINGQKASLSGLLSKISDRSKELYLNNLTVSQMLLKRIEDNPNNSLKNIVFYRQDYLDEFERIWTVQSKYHTELTHELKKRLRDIIIFYQRPLKSQKGLISLCELETKDIEVAIDGVKKMKNIGPRVCPRSSPLFQEFKIWQTINNIFVNGAALDDEDKSVIAKELMFKDKLKDSDLLKLLFKTTKGQSVNFKEVDGNRTMATLMKACFKIAENLGYDDIDLSKLSSEDQMVRIEGIFKEQGFKTGFLHFDSSLASPEFENQDSYRLWHLLYSYEGDKSASGNESLVKCIMDLCSMDEGSAKILASCTFLPDYGSLSAKAMRKILPYMKDGLEYTAACAMAGYRHSKRSLTKEELDTKEYSDRLSLLPKNSLRNPVVEKILNQMVNVVNSVIDVYGKPDEIRIEMARELKKSAKEREEAQRDIASSTAESQKVIEILKGEPFFIQFPTRNDIIRYRLYQELAQNGFKTLYSNTYIPKDKLFSKEFDIEHIIPQALIFNDSFANKTLESRQCNLEKGKETAMDYVKSKYDETGVQAYCDRVNGLIGKGISKTKAKWLLMEGKDIPEDFINRELRDSQYIAKKAREILESLVKFVVPTTGSVTARLREDWQLVNVMQELNWEKYARLGLTGVREDKDGRRIPFIQDWTKRNDHRHHAMDALTIAFTRRQFIQYLNHLNSKIDVVSWDKKDLDLRDYDLEDIKFGNLSAGDRYGIVKALQDKFLYKDGNDKYRFVPPIPLDEFRRQAKEQLSDILISFKAKNKVCTRNVNVTKNKGGANRKTQLTPRGPLHNETIYGSSLEYVTKENEKIGSSFDTERITTVCKKKFRDALARRLEEFGGDPKKAFTGKNSPEKNPIWVDEHHSEQVPAKVRTVTMGQRFTGRKPIDATLKIEKVIDKRIREILQARLDEFDGKAAKAFSNLDENPIWLNKEKGIAIKRVTVSGPANPVPVRFKRDKDGKPIIDDAGKTIGADFVTPGNNHHIAIFRDSSGKLQEHPVSFLEATIAKSHGLDVIDRNYNKDEGWEFLFTLKQNEYFVFPNSETGFNPLDYDLTDPRNYAEISPNLYRVQSISTNDYFFRHHLETTSEKNNSLYGITWKRIRNASALEGLVKVRIDNLGRIVAVGEYD

SEQ ID NO: 23481 - protein, 1550 aa, unidentified
  REGION 1..1550: note = Cas Enzyme sequence
MKNILGLDLGSNSIGWAIVKALKNEDGKEILQSIDLAGSRIIPMDQATLGNFENGNSVSQTRERTGYRSARRLRERYLLRRERLLRVLNCMGFLPEHYSQNIDKYGKFFLDNEVKLSWKKDKMGKNEFIFLDSFNEMLEDFRHSQPQLLLDGRKVPYDWTIYYLRKKALTEKISKEELAWILLNFNQKRGYFQLRGEDEEVQGKKIEFYALKVVRVEDTGEKKGKDTWYNVYLESGLGDTDDYWVYRRASSVPIDEWEGQVKEFIVTTTLDNNGSPQIDKEGKVKRSFSIPKPEDWMLVKKKTEVDIKSSGKTVGTYIYDTLLQKPDQKIKGKLIRTIERENYTNELSLILENQKKFHLELQDRELYHQCIELLYCKNEAHKRVIGSWDFTSLFIKDILFYQRPLKSKKALIDNCPYEESFYIENGEKKSKPRKCIAKSHPLFQEFRIWQFIYNLRIYQKVKEVDGKLQFNVDVTSDFLRDESAYVELFKWLNERAEVSQEDLLKHLGLKKTKTEDTVSLYRWNYVEDKKYPGNKTRSSILKKLLNDEKEALSEDIELKIWHLLYSVLAQSEIDKALSSKNVSTKGIYSELSVYFSDETIQKIKNVKLESGYGSYSAKAIGKLLPLMRRGKYWNLESIDNHTKERIEKILNGECDETIRARTREKSISLTDISQFKGLPLWLACYIVYDRHSELKTIKKWNSPEDINKFLKEFKQHSLRNPIVEQVTMETLRVVRDIWRRVGSIDEIHIEMGRDMKQTAQERARCSAIISRNENNNLRIKALLHEFMNPELGIENVRPYSPAQQEILRIYEDGVLSSVSEIEDEIKNILKKFNESEEGKRPTKNEIIRYKCWLEQKYRSPYTGEIIPLGKLFTPAYQIEHIIPQARFFDDSFTNKVICEAEVNAKKGDLLGYEFVKEKGGEIVELSGGRNVRIFSVEEYESFVKEHYKSNKQKMQRLLAEDIPTEFSHRQLNDSRYISKYIRNLLSNIVREDDEQESVSKNVISCNGAITDRLKKDWGVNDVWNHIILPRFVRLEEIRADNGEKFTTFNQEGHRIPSMPLIHQKGFNKKRIDHRHHAMDAIVIACTTRDHVNLLNNECSNPQNNVNRHQLSRKLRRYENVSYKQDGKLKEREVPKEFLKPWEGFTRDVEFALKNVIVSFRQNLRVLNKTVNYFQHWKDNSSEKEWKEQKSADHWSIRKPLHQETVLGEVFLWRTRFVSLREALTKPKRIVEKDLRSKILELQRKGYDIERIKKYFEDNKDVWQDVNLSKIEVRYYSREIVDPRTGLPKNRYFATRFGNDLISLFSGVSNFENAKKIIKSITDTGIQKILFRHLENKGNDPVLAFSPEGIDEMNRTIKTLNNGKDHKPIYKVRIYECSTMKFPLGSVGNKSKKFVEAAKGTNLYFAVYEKEVENDRGECHKERAFKTIPLNDVIRNLKQGLSIAPNDENGNPPAFILSPNDLVYLPTKEELETGSISQPLDRNRIYKMVSCTGNVAHFIPAFIAIPILQTIELGSKNKAQKAWTGEMIKESCIPIKVDRLGILISINGRAV

SEQ ID NO: 23482 - protein, 1386 aa, unidentified
  REGION 1..1386: note = Cas Enzyme sequence
  REGION 1372..1382: note = misc_feature - Xaa can be any naturally occurring amino acid
MKNILGLDLGTNSIGWAVVNGSVNDNGSEQLVKIQASGSRIIPMDAAMIGDFNKGNSISQTAERTRLRGIRRLSERYLLRRERLHRILDILGFLPSHFAQDLDRHGKIVKGKEPKLAWRKNEAGQFEFIFQDSFKEMLEDFKLNHPNLITDDKKVPYDWTIYYLRKKGLTSKISKEELAWILLNFNQKRGYYQLRGEEEEENNNKLVEFYALKVVAVEDSGEKKGKDIWYNVHLENGWVYRRTSNMPLDWVGKTKEFIVTTDLEKDGTPKKDKEGNVKRSFRAPKEDDWSLVKKKTEADIDQTHKTVGTYIYDTLLGNPSQKIRGRLVRTIERKYYKEELKLILDKQKEFHPELQDRALYAACVEELYTINEAHRNNIGNRDFTYLFLEDILFYQRPLKSKKSLIDNCPYEENHCLDKETGEIKSFPVKCIAKSHPLFQEFRLWQFIVNLRIYRKGLAQDVDVTNELLKTEEDYVALFDWLNGKKEIDQKAFLKYPLFGLKKEVENYRWNYVQDKPYPCNETRSSMLARLEKCDISIEFLTKENEEALWHILYSVEDKNEIVKALQKFADKHDLNASFVDVFRKFPPFKKEYGSYSAKAIKKLLPLMRMGKYWSENSIDKGTRERIDKIITGEYDEKIENRVREKAIHLADVSDFRGLPLWLVCYIVYGRHSEAKEITQWKSPADIDSYLKSFKQHSLRNPIVEQIIIETLRVVRDIWKQVGNIDEIHVELGREMKNPADKRKKMTQQMSENENTNLRIKYLLTEFLNPEYEVENVRPYSPSQQDILRIYEEGVLNSVSDLPEEISDILKKFTETDLKKRPSRSEVLRYKLWLEQKYRSPYTGEVIPLGKLFTPAYEIEHVIPQSCYFDDSFSNKVICEAEVNKLKSNLLGHEFIVKHHGEIVELPFGKKVRIFTVDEYEQFVKDNYSRTRGKMKKLLMDDIPEEFVTRQLNDSRYISKVVKSLLSNIVREKGEEEAISKNVIPCTGGVTDRLKKDWGINEVWNKIILPRFQRLNELTGTNKFTTKNVGIQEIPTMPLELQKGFNKKRIDHRHHAMDAIIIACANRNIINYLNNESATAKAELSRYDLQKMLCDKAKTDNNGNYKWVIRKPWASFTQDTYLALENIIVSFKQNLRVINKATNHFLHYNEEGKKIFVKQGKGDNWAIRKSMHKDTVFGEVNLRRIKTVALNEAMKNPQSIVVKDFKRKLLELWNLGFDAKRIKKYFEDNRETWSDINLSKIEVYYFSKDTKDRFFATRKPLDTSFDRKKIENNITDTGIQKILLRHLELKDNNPDIAFSPDGIDEMNRNIIQLNNGKYHQPIIKVRWYEQADKFAVGQTGNKSSKFVEAAKGTNLFFAVYESNILDKKTNTIXXXXXXXXXXXLPFH

SEQ ID NO: 23483 - protein, 1498 aa, unidentified
  REGION 1..1498: note = Cas Enzyme sequence
MKHILGLDLGTNSIGWAVISSSFDETTQKEQLKGIEAAGSRIIPMDAAQLGDFNKGNTVSQTANRTQFRGVRRLYERKKLRRERLHRILQLLGFLPKHYANQLDRYGKFIANSEPKLAWTTNTHGLPYFIFQNSFQEMLNDFLQNNNQVKKVPYDWTLFYLRKKALTQKIEKEELAWILLNFNQKRGYYQLREEETEKASSKTRQYFDSQIVTDITDTGQVYKGLKIFTITLENGEKGKFFSKNMPDWKGQKKDIIAIIDLDKNGNDKYDENGELSRRFKIPTEQEWEEQWELIKTKTQKDLDISHKTVGAYIYDTLLQTPNQKIRGKLIRTIERKYYKDELNQILKKQEEFHPELRDSNLLEACIEELYPNNEAHRNAIAKYSISQLLIEDILFYQRPLKSKKSLISNCPYEEYTYINKETGEICTSSLKCIAKSHPLFQEFRLWQFISNLRIYQKEGTINGKFTTDIDVTNQFLKTEDDYANLFDWLNQKKEIRQDTFLKNPAFGLKKNTANYRWNYVEDKTYPCNETHYKILSYWEKAGIEQSALTSEIEEKLWHILYSISDKNELRKALQHFADKNYLSDKFADIFQQIPPFEKDYGSYSAKAIKKLLPLMRIGRYWKAENFDSTTLDRIEKILTGEFEENIKNRTREKTIHLDNLYSFQGLPTWLACYIVYNRHSEIKDVTKWQQPSDIDAFLNAFKQHSLHNPIVEQIIMETLRTVRDIWKQTGHIDEIHVELGREMKNPAEKRRKLTQQIQENENTNLRIKALLAEFANPEFGIENVRPHSPSQQDLLRIYEEEVLNETKDIPEDIAVILKKFNEVDTQKRPSTSDVLRYKCWLEQKYRSPYTGAMIPLGKLFTPAYEIEHVIPQSRYFDDSFTNKVICEAEVNKLKGNMLGYEFIKNNQERIVELGFGQNVKIQTVEAYELFVKEHYSYNRTKMQKLLMEDIPDQFIERQLNDSRYISKLIKSLLSNIVRDEGEEEATSKNVIVCTGSITDRLKKDWGINDVWNKLILPRFIRLNKITESNRFTTTNACNKTIPAMPLDLQKGFNKKRIDHRHHAMDAIVIACANRNIVNYLNNESASKNAKISRQDLRQILCKKTKTDNFGNYQWLIDKPWDTFTQDVYSILGNIIVSFKQNLRIINKTTNHYIHYENGKKVSCSQKQGDSWAIRKPMHKETVYGEINLRRSTTATLKTVLENPQRIIEKDLKKKIKELLTQGLNEKQIKKYFEDNKDIWQEINLKKIPVYYFTKETANRFFACRESINTTFNKKKIEEKVADTGIQQILLRHLEQNGNNPEQAFSPEGIEQMNKNIMSLNNGNFHQPIYKVRIYEQADKFAVGQTGNKSTKFVEAAKGTNLFFAIYETAHKRSFASIPLNVVIERLKKGLSPAPENEKGNLPKFILSPNDLIYVPTKEEIENGHINQPIQKDRIYKMVSCTGNRLYAIPYYIANILIDKEEYGALNKTEFSDEKLSIKETCIPIKTDRLGNIIMSISL

SEQ ID NO: 23484 - protein, 1398 aa, unidentified
  REGION 1..1398: note = Cas Enzyme sequence
MKTILGLDLGTTSIGWALVKEAEPFSDEKSEIVRLGVRVIPITVDERTSFENGKSITTNALRTQKRGMRRNLQRYKLRRQALIEELKSTGWIGNDFIFSENGPRSTFRTLRLRAKSASEEVTLGDLARILLQINKKRGYKSSRKMVSSDDGQAIDGMAVAKEMYDKGLTPGEYVYQRMLEGKYAIPEFYKSDLQEEFDRIWALQKSFHTELTDELYRKLSDRNKSQTWAICRDELGIQGLKSSFTGKERLKEAYRYRHLAATQEVNMEVLTCALQEINGQKASLSGLLSKISDRSKELYLNNLTVGQMLLKRIEDNPNNSLKNIVFYRQDYLDEFERIWTVQSKYHTELTHELKKRLRDIIIFYQRPLKSQKGLISLCELETKDIEVAIDGVKKMKNIGPRVCPRSSPLFQEFKIWQTINNIFVNGAALDDEDKSVIAKELMFKDKLKDSDLLKLLFKTTKGQSVNFKEVDGNRTMATLMKACFKIAENLGYDDIGLSKLSSEDQMVRIEGIFKEQGFKTGFLHFDSSLASPEFENQDSYRLWHLLYSYEGDKSASGNESLVKCIMDLCSMDEGSAKILASCTFLPDYGSLSAKAMRKILPYMKDGLEYTAACAMAGYRHSKRSLTKEELDTKEYSDRLSLLPKNSLRNPVVEKILNQMINAVNSVIDVYGKPDEIRIEMARELKKSAKEREEAQRDIASSTAESQKVIEILKGEPFFLQFPTRNDIIRYRLYQELAQNGFKTLYSNTYIPKDKLFSKEFDIEHIIPQALIFNDSFANKTLESRQCNLEKGKETAMDYVKSKYDETGVQAYCDRVNGLIGKGISKTKAKWLLMEGKDIPEDFINRELRDSQYIAKKAREILESLVKFVVPTTGSVTARLREDWQLVNVMQELNWEKYARLGLTGVREDKDGRRIPFIQDWTKRNDHRHHAMDALTIAFTRRQFIQYLNHLNSKIDVVSWDKKDLDLRDYDLEDIKFGNLSAGDRYGIVKALQDKFLYKDGNDKYRFVPPIPLDEFRRQAKEQLSDILISFKAKNKVCTRNVNVTKNKGGANRKTQLTPRGPLHNETIYGSSLEYVTKENEKIGSSFDTERITTVCKKKFRDALARRLEEFGGDPKKAFTGKNSPEKNPIWVDEHHSEQVPAKVRTVTMGQRFTGRKPIDATLKIEKVIDKRIREILQARLDEFDGKAAKAFSNLDENPIWLNKEKGIAIKRVTVSGPANPVPVRFKRDKDGKPIIDDAGKTIGADFVTPGNNHHIAIFRDSSGKLQEHPVSFLEATIAKSHGLDVIDRNYNKDEGWEFLFTLKQNEYFVFPNSETGFNPLDYDLTDPMNYAEISPNLYRVQKITTGDYYFRLHLETTVEDNKALKGITWKRVGPSGLEGAVKVRIDNLGRIVAVGEYD

SEQ ID NO: 23485 - protein, 917 aa, unidentified
  REGION 1..917: note = Cas Enzyme sequence
MRMGKYWSIENIDNGTRIRINKIIDGEYDENIRERVRQKAINLTDITHFRALPLWLACYLVYDRHSEVKDIVKWKTPKDIDLYLKSFKQHSLRNPIVEQVITETLRTVRDIWQQVGHIDEIHIELGREMKNPADKRARMSQQMIKNENTNLRIKALLTEFLNPEFGIENVRPYSPSQQDLLRIYEEGVLNSILELPEDIGIILGKFNQTDTLKRPTRSEILRYKLWLEQKYRSPYTGEMIPLSKLFTPAYEIEHIIPQSRYFDDSLSNKVICESEINKLKDRSLGYEFIKNHHGEKVELAFDKPVEVLSVEAYEKLVHESYSHNRSKMKKLLMEDIPDQFIERQLNDSRYISKVVKSLLSNIVREENEQEAISKNVIPCTGGITDRLKKDWGINDVWNKIVLPRFIRLNELTESTRFTSINTNNTMIPSMPLELQKGFNKKRIDHRHHAMDAIIIACANRNIVNYLNNVSASKNTKITRRDLQTLLCHKDKTDNNGNYKWVIDKPWETFTQDTLTALQKITVSFKQNLRVINKTTNHYQHYENGKKIVSNQSKGDSWAIRKSMHKETVHGEVNLRMIKTVSFNEALKKPQAIVEMDLKKKILAMLELGYDTKRIKNYFEENKDTWQDINPSKIKVYYFTKETKDRYFAVRKPIDTSFDKKKIKESITDTGIQQIMLRHLETKDNDPTLAFSPDGIDEMNRNILILNKGKKHQPIYKVRVYEKAEKFTVGQKGNKRTKFVEAAKGTNLFFAIYETEEIDKDTKKVIRKRSYSTIPLNVVIERQKQGLSSAPEDENGNLPKYILSPNDLVYVPTQEEINKGEVVMPIDRDRIYKMVDSSGITANFIPASTANLIFALPKATAEIYCNGENCIQNEYGIGSPQSKNQKAITGEMVKEICFPIKVDRLGNIIQVGSCILTN

SEQ ID NO: 23486 - protein, 913 aa, unidentified
  REGION 1..913: note = Cas Enzyme sequence
IRNCGPRVAPRSSPLFQVCKLWEMINNLRIENKEGDPLVLTLEQKQALFAFMNTHAKFTAAKLTSVLGLKSREWKIANAIGTGLQGNTTYCALSAALEKCPDRGKLLAFELHAVDGDKVHADTGEIVQVIDTSFEKQPLYRLWHALYSISDIDTLREVLGQNFGIADPETLDRLCRIDFVKSGYGNKSSRALRKILPYLQQGMQYYQAKCMAGYDDAPWNKEQNQVRELAERLLPVPKGELRQPVVEKVLNQLVNLVNALMAEYGPFDEIRVELAQELQQSREERESASRSMAENNKRNEQVAQKIQQEYGLTPTRSRIQKYRLWTESDHQCMYCGQLVNVAEFLRGVDVEVEHIIPRSMLFDDSYSNKVCACRKCNKDKDNRTAFDFMKTKPEGEFAAYLERVNSLAEAYKPNRGLDVGISETKKRKLLMRKQDIPTDFIARQMRETQYISKKAKEMLQTVCRNVYSTSGSITDYIRHVWGWDDVLHEINFEGYRAAGLVQTCEREVDGRKLQVERIVNWSKRLDHRHHALDALVIACTKQGYIQRINNLASLGEITFRSDAGKAPSGASRERHTRLERYIRMQPHFSRAEVIRAVKGIAVSFKADKRTVTPGKRYVYRKGKRICVQRGILVPRGPLSEESVYGRIHDEGKEKYVLRYEVDTIDLKKLGSVVDQGIREILRQRLEQFGGNPKKAYATPVYDHQGRAIRSVRCFTNLKVAVPLRYDQQGQPIAFVKTGNNHHVAIYEDEKGRWHEHMVTFWHAVDRKRYGLPILITDPGDVWDRVTDRMPEDFQRQLPPSATWRFVFSMQRNEMFVLGMEEEEYRKALSVQDTATLCQYLYRVQNITAGAYVFRKHTETQSDDRYPDEHGKKIFSLLKSNARGAVHWVQSFGALQALNPHKVHVSITGKISEV

SEQ ID NO: 23487 - protein, 1550 aa, unidentified
  REGION 1..1550: note = Cas Enzyme sequence
MKNILGLDLGSNSIGWAIVKALKNEDGKEILQSIDLAGSRIIPMDQATLGNFENGNSVSQTRERTGYRSARRLRERYLLRRERLLRVLNCMGFLPEHYSQNIDKYGKFFLDNEVKLSWKKDKMGKNEFIFLDSFNEMLEDFRHSQPQLLLDGRKVPYDWTIYYLRKKALTEKISKEELAWILLNFNQKRGYFQLRGEDEEVQGKKIEFYALKVVRVEDTGEKKGKDTWYNVYLESGLGDTDDYWVYRRASSVPIDEWEGQVKEFIVTTTLDNNGSPQIDKEGKVKRSFSIPKPEDWMLVKKKTEVDIKSSGKTVGTYIYDTLLQKPDQKIKGKLIRTIERENYTNELSLILENQKKFHLELQDRELYHQCIELLYYKNEAHKRVIGTWDFTSLFIKDILFYQRPLKSKKALIDNCPYEESFYIENGEKKSKPRKCIAKSHPLFQEFRIWQFISNLRIYQKVKEVDGKLQFNVDVTSDFLRDESAYVELFKWLNERAEVSQEDLLKHLGLKKTKTEDTVSLYRWNYVEDKKYPGNKTRSSILKKLLNDEKEALSEDIELKIWHLLYSVSAQSEIDKALSSKNVSTKGIYSELSVYFSDETIQKIKNVKLESGYGSYSAKAIGKLLPLMRRGKYWNLESIDNHTKERIEKILNGECDETIRARTREKSISLTDISQFKGLPLWLACYIVYDRHSELKTIKKWNSPEDINKFLKEFKQHSLRNPIVEQVTMETLRVVRDIWRRVGSIDEIHIEMGRDMKQTAQERARCSAIISRNENNNLRIKALLHEFMNPELGIENVRPYSPAQQEILRIYEDGVLSSVSEIEDEIKNILKKFNESEEGKRPTKNEIIRYKCWLEQKYRSPYTGEIIPLGKLFTPAYQIEHIIPQARFFDDSFTNKVICEAEVNAKKGDLLGYEFVKEKGGEIVELSGGRNVRIFSVEEYEAFVKEHYKSNKQKMQRLLAEDIPTEFSHRQLNDSRYISKYIRNLLSNIVREDDEQESVSKNVISCNGAITDRLKKDWGVNDVWNHIILPRFVRLEEIRADNGEKFTTFNQEGHRIPSMPLMYQKGFNKKRIDHRHHVMDAIVIACTTRDHVNLLNNECSNPQNNANKHQLSRKLRRYENVSYKQDGKLKEREVPKEFLKPWEEFTRDVEFALKNVIVSFRQNLRVLNKTVNYFQHWKDNSSEKEWKEQKSADHWSIRKPLHKETVSGEVFLWRTRFVSLREALTNPKRIVEKDLRSKILELQRKGYDIERIKKYFEDNKDVWQDVNLSKIEVRYYSREIVDPQTELPKNRYFATRFGNDLISLFSGVSNFEKAKKIIESITDTGIQKILFRHLENKGNDPVLAFSPEGIDEMNRTIKTLNNGKDHKPIYKVRIYECSTMKFPLGSVGNKSKKFVEAAKGTNLYFAVYEKEVENDRGECHKERTFKTIPLNDVIRNLKQGLSIAPNDENGNPPAFILSPNDLVYLPTKEESETDSISQPLDRNRIYKMVSCTGYQVFFVPAFIAAPVLQKIELGSNNKSERARTDEMIKESCIPIKVDRLGMLISINGKAV

SEQ ID NO: 23488 - protein, 1050 aa, unidentified; identical to SEQ ID NO: 17480
  REGION 1..1050: note = Cas Enzyme sequence

SEQ ID NO: 23489 - protein, 1536 aa, unidentified
  REGION 1..1536: note = Cas Enzyme sequence
LIIYFIFEKIVNTILVMKKIVGLDLGTNSIGWALINAYIDEYNKEHLYGIEACGSRIIPMDAAILGNFDKGNSISQTADRTSYRGIRRLRERHLLRRERLHRILDLLGFLPKHYSDSLNRYGKFLNDIECKLPWVKDETGSYKFIFQESFKEMLANFTEHHPILIANNKKVPYDWTIYYLRKKALTQKISKEELAWILLNFNQKRGYYQLRGEEEETPNKLVEYYSLKVEKVEDSGERKGKDTWYNVHLENGMIYRRTSNIPLDWEGKTKEFIVTTDLEADGSPKKDKEGNIKRSFRAPKDDDWTLIKKKTEADIDKIKMTVGAYIYDTLLQKPDQKIRGKLVRTIERKYYKNELYQILKTQSEFHEELRDKQLYIACLNELYPNNEPRRNSISTRDFCHLFIEDIIFYQRPLKSKKSLIDNCPYEENRYIDKESGEIKHASIKCIAKSHPLYQEFRLWQFIVNLRIYRKETDVDVTQELLPTEADYVTLFEWLNEKKEIDQKAFFKYPPFGFKKTTSNYRWNYVEDKPYPCNETHAQIITRLGKAHIPKAFLSKEKEETLWHILYSIEDKQEIEKALHSFANKNNLSEEFIEQFKNFPPFKKEYGSYSAKAIKKLLPLMRMGKYWSIENIDNGTRIRINKIIDGEYDENIRERVRQKAINLTDITHFRALPLWLACYLVYDRHSEVKDIVKWKTPKDIDLYLKSFKQHSLRNPIVEQVITETLRTVRDIWQQVGHIDEIHIELGREMKNPADKRARMSQQMIKNENTNLRIKALLTEFLNPEFGIENVRPYSPSQQDLLRIYEEGVLNSILELPEDIGIILGKFNQTDTLKRPTRSEILRYKLWLEQKYRSPYTGEMIPLSKLFTPAYEIEHIIPQSRYLDDSLSNKVICESEINKLKDRSLGYEFIKNHHGEKVELAFDKPVEVLSVEAYEKLVHESYSHNRSKMKKLLMEDIPDQFIERQLNDSRYISKVVKSLLSNIVREENEQEAISKNVIPCTGGITDRLKKDWGINDVWNKIVLPRFIRLNELTESTRFTSINTNNTMIPSMPLELQKGFNKKRIDHRHHAMDAIIIACANRNIVNYLNNVSASKNTKITRRDLQTLLCNKDKTDNNGNYKWVIDKPWETFTQDTLTALQKITVSFKQNLRVINKTTNHYQHYENGKKIVSNQSKGDSWAIRKSMHKETVHGEVNLRMIKTVSLNEALKKPQAIVEMDLKKKILAMLELGYDTKRIKNYFEENKDTWQDINPSKIKVYYFTKETKDRYFAVRKPIDTSFDKKKIKESITDTGIQQIMLRHLETKDNDPTLAFSPDGIDEMNRNILILNKGKKHQPIYKVRVYEKAEKFTVGQKGNKRTKFVEAAKGTNLFFAIYETEEIDKDTKKVIRKRSYSTIPLNVVIERQKQGLSSAPEDENGNLPKYILSPNDLVYVPTQEEINKGEVVMPIDRDRIYKMVDSSGITANFIPASTANLIFALPKATAEIYCNGENCIQNEYGIGSPQSKNQKAITGEMVKEICFPIKVDRLGNIIQVGLCILTN

SEQ ID NO: 23490 - protein, 1504 aa, unidentified
  REGION 1..1504: note = Cas Enzyme sequence
MKNIVGLDLGTNSIGWAVVNGSVNDDGSEQLVKIQASGSRIIPMDAAMIGDFNKGNSISQTAERTRLRGVRRLSERYLLRRERLHRILDILGFLPFHFAQDLDRHGKIVKGKEPKLAWRKNEAGQFEFIFQDSFKEMLEDFKLNHPNLITDDKKVPYDWTIYYLRKKGLTSKISKEELAWILLNFNQKRGYYQLRGEEEEENKNKLVEFYALKVVAVEDSGEKKGKDIWYNVHLENGWVYRRTSNMPLDWVGKTKEFIVTTDLEKDGTPKKDKEGNVKRSFRAPKEDDWSLLKKKTEADIDQTHKTVGVYIYDTLLGNPSQKIRGRLVRTIERKYYKEELKQILEKQKEFHLELQDRALYAACIEELYPINEAHRNNVGNRDFTYLFLEDILFYQRPLKSKKSLIDNCPYEENQGLDKETGEIKSFPVKCIAKSHPLFQEFRLWQFIVNLRIYRKDLAQDVDVTNELLKTEEDYVALFDWLNGKKEIDQKAFLKYPVFGLKKEIENYRWNYVQDKPYPCNETRSLMLARLEKCDISIEFLTKENEEALWHILYSVEDKNEIVKALQKFADKHDLNASFVDVFQKFPPFKKEYGSYSAKAIKKLLPLMRMGKYWSENSIDKGTRERIDKIITGEYDEKIENRVREKAIHLADVSDFKGLPLWLVCYIVYGRHSEAKEITQWKSPADIDSYLRSFKQHSLRNPIVEQIIIETLRVVRDIWKQVGNIDEIHVELGREMKNPADKRKKMTQQMSENENTNLRIKYLLTEFLNPEYEVENVRPYSPSQQDILRIYEEGVLNSVSDLPEEISDILKKFTETDLKKRPSRSEILRYKLWLEQKYRSPYTGEVIPLGKLFTPAYEIEHVIPQSCYFDDSFSNKVICEAEVNKLKSNLLGHEFIVKHHGEIVELPFGKKVRIFTVDEYEQFVKDNYSRTRSKMKKLLMDDIPEEFVTRQLNDSRYISKVVKSLLSNIVREKGEEEAISKNVIPCTGGVTDRLKKDWGINEVWNKIILPRFQRLNELTGTNKFTTKNVGIQEIPTMPLELQKGFNKKRIDHRHHAMDAIIIACANRNIINYLNNESATAKAELSRYDLQKMLCDKAKTDNNGNYKWVIRKPWASFTQDTYLALENIIVSFKQNLRVINKATNRFLHYNEEGKKIFVKQGKGDNWAIRKSMHKDTVFGEVNLRRIKTVALNEAMKNPQSIVVKDFKRKLLELWNLGFDAKRIKKYFEDNRETWSDINLSKIEVYYFSKDTKDRFFATRKPLDTSFDRKKIENNITDTGIQKILLRHLELKDNNPDIAFSPDGIDEMNRNIIQLNNGKYHQPIIKIRWYEQADKFAVGQTGNKFSKFVEAAKGTNLFFAVYESNILDKKTNTIIKKRNYATIPLNVAIERQKQGLPVAPEDENGNDPIFVLSPNDLVYLPTDDELANGIIAQPLDRGRIYKMVSCTGNEGHFIPARIANPILQTIELGSNNKAQKAWTDEMIKEICMPIKVDRLGNVLESSSSYKK

SEQ ID NO: 23491 - protein, 1154 aa, unidentified
  REGION 1..1154: note = Cas Enzyme sequence
MKNILGLDLGLSSIGWSVIRENSEEQELVAMGSRVVSLTAAELSSFTQGNGVSINSQRTQKRTQRKGYDRYQLRRTLLRNKLDTLGMLPDDSLSYLPKLQLWGLRAKAVTQRIELNELGRVLLHLNQKRGYKSIKSDFSGDKKITDYVKTVKTRYDELKEMRLTIGELFFRRLTENAFFRCKEQVYPRQAYVEEFDCIMNCQRKFYPDILTDETIRCIRDEIIYYQRPLKSCKYLVSRCEFEKRFYLNAAGKKTEAGPKVSPRTSPLFQVCRLWESINNIVVKDRRNEIVFISAEQRAALFDFLNTHEKLKGSDLLKLLGLSKTYGYRLGEQFKTGIQGNKTRVEIERALGNYPDKKRLLQFNLQEESSSMVNTETGEIIPMISLSFEQEPLYRLWHVLYSIDDREQLQSVLRQKFGIDDDEVLERLSAIDLVKAGFGNKSSKAIRRILPFLQLGMNYAEACEAAGYNHSNNYTKAENEARALLDRLPAIKKNELRQPVVEKILNQMVNVVNALMEKYGRFDEIRVELARELKQSKEERSNTYKSINKNQRENEQIAKRIVEYGVPTRSRIQKYKMWEESKHCCIYCGQPVDVGDFLRGFDVEVEHIIPKSLYFDDSFANKVCSCRSCNKEKNNRTAYDYMKSKGEKALSDYVERVNTMYTNNQISKTKWQNLLTPVDKISIDFIDRQLRESQYIARKAKEILTSICYNVTATSGSVTSFLRHVWGWDTVLHDLNFDRYKKVDLTEVIEVNHRGSVIRREQIKDWSKRLDHRHHAIDALTIACTKQAYIQRLNNLRAEEGPDFNKMSLERYIQSQPHFSVAQVREAVDRILVSFRAGKRAVTPGKRYIRKNRKRISVQSVLIPRGALSEESVYGVIHVWEKDEQGHVIQKQRAVMKYPITSINREMLDKGKVVDKRIHRILSDRLAQYNDNPKEAFAKPVYIDKECRIPIRTVRCFAKPAIKTLVPLKKDDKGNTVAWVNPGNNHHVAIYRDEDGKYKEQTVTFWEAVDRCRVGIPAIVTQPDTIWDNILQRNDISENVLESLPDVKWQFVLSLQQNEMFILEMKEEDYRYAMDQQDYALLNKYLYRVQKLSKGDYSFRYHTETSVEDKYDGKLNLELSRKMGKLKRVRSLEALFNLHPHKVHISVLGEIKEIS

SEQ ID NO: 23492 - protein, 1507 aa, unidentified
  REGION 1..1507: note = Cas Enzyme sequence
MKKILGLDLGTNSIGWAVINSLVDDEGKEKLTSISSCGSRIIPMDAATLGDFDKGNAKSLVAERTRLRGIRRLLERSLLRRERLHRVLSVMGFLPEHYASQLDRYGKFLPETEPKLAWYKDNTGSYRFLFQDSFNEMLEDFRLYHPELVAEGKKIPYDWTIYYLRKKALSQKIAKEELAWILLNFNQKRGYYQLRGEEEQEDNKKSVEYYALKVVAVEDSGERKGKDIWYNVKLENGWIDRRASSVPLDWTGKVKEFVVTTDLDDAGNPKKDKDGNVKRFFRAPKENDWGLLKTKTQTQIDESGQTVGAYIYDSLLRMPDQKIRGKLVRTIERKYYKDELRKILLKQTEFHAALQDHNLLLSCIEELYPNNEAHRRLLSSSSFTYFLLEDILFYQRPLKSQKGLIDDCPYESHVYRDKKDGSLHRTPLKCISKSHPLFQEFRLWHFLSFLRIYQRERMIDGSLKLDVDVTNEFLQNEDDYVKLFDWLNGRKEIDQKTILAYKPFGLKKNEQPKYRWNYVEDKSYPCNETRADMISRLSKAGVSEGVLTEEREEALWHILYSISDKKELTKALGTFAEKNGLNEAFVEQFSKMPPFESNYAAYSLKAIRKLLALMRMGKYWNEQDIDKQTRSRIEKILTGEYDETIRTRVREKAIHLTDISSFRGLPLWLACYVVYNRHSEAKELVKWETPADIDHFLSKFRQHSLRNPIVEQVLMETLRTVRDIWKQEGQIDEIHVELGREMKNPAKERARITAQALENENTNLRIKALLTEFMNPEFEIENVRPYSPGQQEILRIYEEGVLSGVAEKDLPEDIISILKKFKENDVKKRPTTSEVLRYKLWLEQRYRSPYTGRIIPLGKLFTPAYEIEHVIPQSRYFDDSISNKVICESAVNKLKDNCLGYEFIKKHSGEIVELGNGEKATVFTSEEYEHFVKESYLGNGKKMKKLLLEDIPDNFIERQLNDSRYISKVVKSLLSNIVCEEGEQEGMSKNVIVCTGGVTDRLKKDWGVQDVWNRIILPRFLRLNKMTDSTDFTSVSTNGHLLPALPLHLQKGFNKKRIDHRHHAMDAIVIACADRNIVNYLNNASARKGSEISRYDLQHLLCDKVKTDSNGNYKWMLRKPWDTFTQDVYTALTNIVVSFKQNLRVINRTTNYYQHYNESGEKKMIPQVKGDRWAIRKPMHKDTVYGEVNLRREKTLPLKDVLNNPSIVVDKSLKSKLHELLKAQYDLKAITKYFEAHQDVWADINLKKIKVYYFTKETNERFFATRKSLDSSFNQKKIQEEVTDTGIQRILLRHLQLNDNNPDIAFSPDGIERMNQNMNILNDGKGHQPIYKVRTYEKAEKFAVGEHGNKVKKFVEAAKGTNLFFAVYESIQEDEATGKQVRKRTFATIPLNEVIKRKKQGLSVAPEDSNGNLPIFVLSPNDLVYLPTEEERNSGKVTQPLDRERIYKMVSSSGNQCFFIKSSVATSIWDKREYSSLNKMERAITEEMIKEICVPIKIDRLGNVSLI

SEQ ID NO: 23493 - protein, 1510 aa, unidentified; identical to SEQ ID NO: 22357
  REGION 1..1510: note = Cas Enzyme sequence

SEQ ID NO: 23494 - protein, 1536 aa, unidentified
  REGION 1..1536: note = Cas Enzyme sequence
LIIYFIFEKIVNTILVMKKIVGLDLGTNSIGWALINAYIDEYNKEHLYGIEACGSRIIPMDAAILGNFDKGNSISQTADRTSYRGIRRLRERHLLRRERLHRILDLLGFLPKHYSDSLNRYGKFLNDIECKLPWVKDETGSYKFIFQESFKEMLANFTEHHPILIANNKKVPYDWTIYYLRKKALTQKISKEELAWILLNFNQKRGYYQLRGEEEETPNKLVEYYSLKVEKVEDSGERKGKDTWYNVHLENGMIYRRTSNIPLDWEGKTKEFIVTTDLEADGSPKKDKEGNIKRSFRAPKDDDWTLIKKKTEADIDKIKMTVGAYIYDTLLQKPDQKIRGKLVRTIERKYYKNELYQILKTQSEFHEELRDKQLYIACLNELYPNNEPRRNSISTRDFCHLFIEDIIFYQRPLKSKKSLIDNCPYEENRYIDKESGEIKHASIKCIAKSHPLYQEFRLWQFIVNLRIYRKETDVDVTQELLPTEADYVTLFEWLNEKKEIDQKAFFKYPPFGFKKTTSNYRWNYVEDKPYPCNETHAQIIARLGKAHIPKAFLSKEKEETLWHILYSIEDKQEIEKALHSFANKNNLSEEFIEQFKNFPPFKKEYGSYSAKAIKKLLPLMRMGKYWSIENIDNGTRIRINKIIDGEYDENIRERVRQKAINLTDITHFRALPLWLACYLVYDRHSEVKDIVKWKTPKDIDLYLKSFKQHSLRNPIVEQVITETLRTVRDIWQQVGHIDEIHIELGREMKNPADKRARMSQQMIKNENTNLRIKALLTEFLNPEFGIENVRPYSPSQQDLLRIYEEGVLNSILELPEDIGIILGKFNQTDTLKRPTRSEILRYKLWLEQKYRSPYTGEMIPLSKLFTPAYEIEHIIPQSRYFDDSLSNKVICESEINKLKDRSLGYEFIKNHHGEKVELAFDKPVEVLSVEAYEKLVHESYSHNRSKMKKLLMEDIPDQFIERQLNDSRYISKVVKSLLSNIVREENEQEAISKNVIPCTGGITDRLKKDWGINDVWNKIVLPRFIRLNELTESTRFTSINTNNTMIPSMPLELQKGFNKKRIDHRHHAMDAIIIACANRNIVNYLNNVSASKNTKITRRDLQTLLCHKDKTDNNGNYKWVIDKPWETFTQDTLTALQKITVSFKQNLRVINKTTNHYQHYENGKKIVSNQSKGDSWAIRKSMHKETVHGEVNLRMIKTVSFNEALKKPQAIVEMDLKKKILAMLELGYDTKRIKNYFEENKDTWQDINPPKIKVYYFTKETKDRYFAVRKPIDTSFDKKKIKESITDTGIQQIMLRHLETKDNDPTLAFSPDGIDEMNRNILILNKGKKHQPIYKVRVYEKAEKFTVGQKGNKRTKFVEATKGTNLFFAIYETEEIDKDTKKVIRKRSYSTIPLNVVIERQKQGLSSAPEDENGNLPKYILSPNDLVYVPTQEEINKGEVVMPIDRDRIYKMVDSSGITANFIPASTANLIFALPKATAEIYCNGENCIQNEYGIGSPQSKNQKAITGEMVKEICFPIKVDRLGNIIQVGSCILTN

SEQ ID NO: 23495 - protein, 1508 aa, unidentified
  REGION 1..1508: note = Cas Enzyme sequence
MKKILGLDLGTNSIGWAVINASQKEDNTDSLQNISSCGSRIIPMDAAILGDFDKGNSKSQTAERTRLRGVRRLLERSLLRRERLHRVLSLMRFLPEHYAQQIDRYGKFIPDSEPKLPWIKTKNGKYQFIFQDSFLEMLTDFQLRHPELVANGKKVPYDWTIYYLRKKALTQKISKEELAWIILNFNQKRGYYQLRGEEEEEDSKKRVEYYALRVVSVENTGEKKGKDTWYNVHLENGWIYRRSSNLPLDWNGKIKEFVVTTELDEAGNPKVDKDGNVKRSFRAPKEDDWNLLKKKSESIIDQSKLTVGTYIYESLLNVPNQKIRGKLIRTIERKYYKDELKAILDAQKNFHPELNDRDLYYACVNELYPSNESHREMLSTHDFTYLLIEDMLFYQRPLKSKVSLIADCPYEARIYKDKEGNKCSEALKCIAKSHPLFQEFRLWQFISNLRIYQREKKIGTSLKTDVDVTSEFLRNEDDYVALFDWLYEQKDISQKKLLGYKPFQLKKNEQINYRWNYVEDKLYPCNETRWAITSRLEKIGILSSFLTKEMEESLWHILYSITDKQEIEKALQTFADKHQLDTAFVSAFAKMPPFEKEYGAYSQKAIKKLLSLMRMGKYWSEKNIDPKTKERIEKILSGVCDETIRMRVRDLAFHLQEITSFKGLPLWLACYVVYDRHSESKDIDKWEKPSDIDEYLKAFKQHSLRNPIVEQVITETLRTVRDIWKQEGKFDEIHIELGREMKNPADKRAKMTAQALENENTNLRIKALLTEFMNPEFEIENVRPYSLSQQEILRIYEDFALSNEPNIPDDVALILKKFRESDVHKRPTRSEVLRYKLWLEQKYRSPYTGEIIPLGKLFTPAFEIEHIIPQSRYFDDSLTNKVICESAVNKLKDNSLGYEFIQKHHGEKVALGNGKQTTIFSVEDYEAFVKQHYAANRAKMEKLLLEDIPEKFIERQLNDSRYISKVVKSLLSNIVREENEQEAISKNIIVCTGGITDRLKRDWGIMDIWNKIILPRFQRLNKLQGTNDFTTISAQGHEIPAMPLYLQKGFNKKRIDHRHHAMDAIIIACANRNIVNYLNNASALKGSTITRYDLQHILCEKTKSDANGNYQWVLRKPWETFPQDVYQALKEIVVSFKQNQRVINRTTNHYQHYDATGKKVFVKQTKGDSWAIRQPIHKDTVFGEVNLRMKKTVSLNEALKRITSIVDKDLKHKLQELVKSQYNVKQIKKYFEDQADVWQDINLKKIEIYYYTQETKDRYFATRKPLDTSFDRKKIEESVTDTGIQKILLNHLERNQGKAEIAFSPDGIDQMNQDIISLNEGKKHQPIYKVRYYEKADKFAIGKAGNKSRKFVEAAKGTNLFFAVYETTEEDKQMGNLTKKRSYASIPLNVVISRQKRGLPSAPENENGDLPVFVLSPNDLVYVPKQEELNTGDIQFPIDRNRIYKMVSCTGNEAHFIPVYIANPIIQTVELGSNNKAQKSWTEEMIKEVCIPLRVDRLGNISLLNQSE

SEQ ID NO: 23496 - protein, 1509 aa, unidentified
  REGION 1..1509: note = Cas Enzyme sequence
MKTILGLDLGTNSVGWAVINSVIKEQAERIWIETAGSRIIPMDAAVLGDFDKGNSISQTSERTRLRGARRLRERQLLRRERLHKVLNILGFLPNHYLEYIDFEKHPGKFLADAEPKLAWVKDEQGKYTFLFQAAFDEMLADFAIHQPSLVSGDKKIPYDWTIYYLRKKALTEMISKEELAWILLNFNQKRGYYQLRGEEEEDNAGKSVEFYALKVLTVEATDEKKGRDVWYNVHLENGWIYRRSSSVPLDWEGQVKEFIVTTDLNPDGTPKLDKYGEVKRSFRAPKEDDWMLIKKRTEADIANTHKTVGAYIYDTLLQKPQQKIIGKLVKTVERKLYRDELSLILQKQCAFHAELQDRALYARCVEALYPSNEVRRKNIANRDFVYLLMDDILFYQRPLKTKKSLIANCPYEENEYVDRETGEIKKAPLKCIAKSHPLFQEFRLWNFLSNIRIYQKEKEINGTLHLDVDVTAEFLKTEDDYVALFDWLNSRKEIEQKTFLKYPKFGLKKEISNYRWNYVEDKQYPCNETRHAILSSLEKANVCIDFLSNEKEVALWHILYSVSDKQEIEKALRTFAAKNGLDESFVEAFKKFPPFKSEYGAYSAKAIKKMLPLMRCGKYWDVSSIDDTTKERIKKIVTGEYDERIAVKVRDKVMNLSDISCFRRLPLWLACYIVYNRHSEDKEAVKWESPADIDAYLASFKQHSLRNPIVEQVITETLRVVRDIWKQVGRIDEIHIELGREMKNPADKRKRMTAQILENENANLRIKALLAEFMNPEYEIENVRPYSPSQQEILRIYEDTVLHAEDQLPEEIDAILKKFNSSKVPTKSEFLRYKLWLEQKYRSPYTGELIPLGKLFTAAYEIEHVIPQSRYFDDSFSNKVICESAVNKLKDNQLGYEFIKNHHGQKVEVGFGKSVEIFSVDSYERFVKEQYAKSAVKMKKLLMDDIPEQFIERQLNDSRYISKVIKGLLSNIVREKNDSGGYEPEAVSKNIVVCTGSVTDRLKRDWGMNDVWNSIVYPRFERLNSLTDTQSFGHWENKSGKKVFQTELPLEYQKGFSKKRIDHRHHAMDAIVIACATRNHVNYLSNESASRNAKISRYDLQRLLCDKNRADDNGNYKWVIKKPWDTFTQDAREVLSKIVVSLKQNLRIINKTTNVYRHFDATVNRVYQKQKTGDSWAIRKPMHKDTVFGAVNLRKVKVVRLSVALDTPAMIVDKRVKNKVFELLSYKYDKKRIEKYFKENAFLWKELDLAKVAVYYFTEATTEPLVAVRKPLDSTFNEKKIKESVTDTGIQKILLNHLCTKEGKPDLAFSAEGIEEMNRNLLQLNNGKSHQPIYKVRVYEPRGNKFSVGVLGNKGTKWVEAAKGTNLFFAIYITEDGKRTYETIPLNVVIEREKQGLVPVPDRNEKGDKLLFWLSPNDLVYLPTEEEREFGRINEPIDRGRIYKMVSCTGNEGHFIPANVANPIVPVIELGSNNKAQRAWTNEMIKDICIPIKVDRLGHIIEVKYRIDE

SEQ ID NO: 23497 - protein, 1504 aa, unidentified
  REGION 1..1504: note = Cas Enzyme sequence
MKNIVGLDLGTNSIGWAVVNGSVNDDGSEQLVKIQASGSRIIPMDAAMIGDFNKGNSISQTAERTRLRGVRRLSERYLLRRERLHRILDILGFLPFHFAQDLDRHGKIVKGKEPKLAWRKNEAGQFEFIFQDSFKEMLEDFKLNHPNLITDDKKVPYDWTIYYLRKKGLTSKISKEELAWILLNFNQKRGYYQLRGEEEEENKNKLVEFYALKVVAVEDSGEKKGKDIWYNVHLENGWVYRRTSNMPLDWVGKTKEFIVTTDLEKDGTPKKDKEGNVKRSFRAPKEDDWSLVKKKTEADIDQTHKTVGAYIYDTLLGNPSQKIRGRLVRTIERKYYKEELKQILEKQKEFHLELQDRALYAACVEELYTINEAHRNNIGNRDFTYLFLEDILFYQRPLKSKKSLIDNCPYEENHCLDKETGEIKSFPVKCIAKSHPLFQEFRLWQFIVNLRIYRKDLAQDVDVTNELLKTEEDYVALFDWLNGKKEIDQKAFLKYPLFGLKKEVENYRWNYVQDKPYPCNETRSSMLARLEKCDISIEFLTKENEEALWHILYSVEDKNEIVKALQKFADKHDLNASFVDVFQKFPPFKKEYGSYSAKAIKKLLPLMRMGKYWSENSIDKGTRERMDKIITGEYDEKIENRVREKAIHLADVSDFKGLPLWLVCYIVYGRHSEAKEITQWKSPADIDSYLRSFKQHSLRNPIVEQIIIETLRVVRDIWKQVGNIDEIHVELGREMKNPADKRKKMTQQMSENENTNLRIKYLLTEFLNPEYEVENVRPYSPSQQDILRIYEEGVLNSVSDLPEEISDILKKFTETDLKKRPSRSEVLRYKLWLEQKYRSPYTGEVIPLGKLFTPAYEIEHVIPQSCYFDDSFSNKVICEAEVNKLKSNLLGHEFIVKHHGEIVELPFGKKVRIFTVDEYEQFVKDNYSRTRSKMKKLLMDDIPEEFVTRQLNDSRYISKVVKSLLSNIVREKGEEEAISKNVIPCTGGVTDRLKKDWGINEVWNKIILPRFQRLNELTGTNKFTTKNVGIQEIPTMPLELQKGFNKKRIDHRHHAMDAIIIACANRNIINYLNNESATAKAELSRYDLQKMLCDKAKTDNNGNYKWVIRKPWASFTQDTYLALENIIVSFKQNLRVINKATNRFLHYNEEGKKIFVKQGKGDNWAIRKSMHKDTVFGEVNLRRIKTVALNEAMKNPQSIVVKDFKRKLLELWNLGFDAKRIKKYFEDNRETWSDINLSKIEVYYFSKDTKDRFFATRKPLDTSFDRKKIENNITDTGIQKILLRHLELKDNNPDIAFSPDGIDEMNRNIIQLNNGKYHQPIIKIRWYEQADKFAVGQTGNKSSKFVEAAKGTNLFFAVYESNILDKKTNTIIKKRNYATIPLNVAIERQKQGLPVAPEDENGNDPIFVLSPNDLVYLPTDDELANGIIAQPLDRGRIYKMVSSSGEQCFFIKHIVANVLVDKFEFSPLNKMERALTGEMIKMICIPIKVDRLGNVLESSSSYKK

SEQ ID NO: 23498 - protein, 1500 aa, unidentified
  REGION 1..1500: note = Cas Enzyme sequence
MEMKHILGLDLGTNSIGWAVIRAHQDADGHTTLQDILAAGSRIIPMDAATLTDFDKGNARSGTAERTSFRSMRRRRERQLLRRERLHRVLMLLGFLPQHYANSLTRYGEFADNRECKLPWVKDESDGKYHFLFQDAFHEMCEDFRQSAPQWVADGKKVPYDWTLYYLRCKALSRKISKEELAWILLSFNQKRGYYQARDEEDEVTTNKLEEYYAGKVVRVDDTGERKGKNVYYDITLENGWVYRYAARIYPDWVGQVKEFIVTTTLNPDGTPKTDKAGEVKRSFRMPKDDDWTLIKKKTERDIDRSQETIGQYIYHALLKDPSQKIRGKLIGTVERKYYKDELRRILDRQIQFHPELRDRELYYACLQELYPSNVAFRNTLVNRDFTYLFLDDILFYQRPLKSKKSQISDCPYEEHFYTDKETGERISVPVKCIAVSHPLYQEYRLWQFIQNLRIYCREARINGNLMIDWEVTDELLQTEEDKTALFDWLNDKESVKQPELVAFLLGGKANKKQIKAYRWNYMDDDTKGYPCNETRASLLKYLREAQTDPSFLTREREEALWHILYSISDKGELKSALGKFAVKHGLDERFVTVFSKFPPFKKDYGSYSAKALKKLLPLMRMGHHWQEASFIPSTRQRMEKFINGEYDDSIDKRTYGKLESLTEVSQYRGLPGWLACYVVYDRHSEGRDIERWTSPSDIDSYLAQFKQHSLHNPIVERVVLETLRTVRDIWKQVDHIDEIHIELGRNMKLPADKRRQMTEQAWKNEQTNLRIKALLLEFARPGYDIENVRPYSPYQQDQLRIYEEAVLGANECPDDISAILKKFNGLNPPTSAEVLSYKCWLEQKYRSPYTGRTIPLSKLFTPAYEIEHIIPKQRYFDDSFSNKVICESEVNKKKGAMLGYEFIKSYHGASITLNRGGTASIFSVEAYENFVKEHYAHNRGKMKKLLMDDVPDSFISRQLNDSRYISKLMKSILSNLVREEGEKEAISKNLIVCTGGITDRLKKDWGIHDVWNDIIFPRFKRLDEMDSSHTYITLNTHRHPIPSMPLEFQRGFSKKRIDHRHHAMDAIVIACATRNIVNYLNNESARHDAKTSRMDLQRLLCTANRKLIDKPWKTFTQDTCKVLEDMIVSFQRTLRIINKTKNYYLRFEDGKKRRVLQTKGDNWAIRKPLHKETFYGEINLRRIETLSLNKALERIPDIVERDLRKKLSELLSLGYNAKRIKGYFEEHKEEWSDVNLSKIKAYYFTKQKNKRYFAARTELDTSFNKDKIENKIADTAIQKILLQHLEAYGNDAEQAFSPEGIDTMNRNIRQLNGGRSHQPIYKVRVYEEATKFAVGRRGNKSTKFVEAAKGTNLFFAIYEISQVDGNGNRQTSRTFSSIPLNVAVERLKQGLPPVPEDEEGNAPKYVLSPNDLVYLPTERELKRREIAMPIDKSRIYKMVSCTGKDCFFIPANTAVPIVDRYEYSSMNKIGRALTGEMIKEICLPLKIDRLGQIIEISTF

SEQ ID NO: 23499 - protein, 1508 aa, unidentified
  REGION 1..1508: note = Cas Enzyme sequence
MRTILGLDLGTNSIGWAVINSVIKEQTERIWIEMAGSRIIPMDAAILGDFDKGNSVSQTAERTRFRGVRRLRERQLLRRERLHKVLKILGFLPEHYLKGIDFEKHTGKFLSGSEPKLPWVKDRWGKYSFLFQTAFNEMLADFAKHQPSLVFDGKKIPYDWTVYYLRKKALTEMISKEELAWILLNFNQKRGYYQLRGEEEEDNAGKSVEFYALKVLSVEATDEKKGRDIWYNVHLENGWVYRRSSNVPLDWEGRVKEFIVTTDLNPDGTPKLDKYGEVKRSFRAPKEDDWMLIKKRTEADITGTHETIGSYIYDALLQEPQQKIIGKLVKTVERKFYKEELNFILQKQCAFHAELQDRDLYMRCIEALYPGNEVQRRNIANRDFIYLLIDDVLFYQRPLKTKKSLIANCPYEENEYVNRKTGEIKTAPLKCIAKSHPLFQEFRLWYFLSNIRVYQKEREVNGTLHLDVDVTTEFLKTEDDYVALFDWLNSRKEIDQKAFLRYPAFGLKKEINNYRWNYVEDKFYPCNETRHAILSRLEKAGIGIDFLSDEKETALWHILYSVSDKQEIEKALATFAVKNGLNESFVEVFKKFPPFKSEYGAYSAKAIKKLLPLMRCGKYWDMSLIDGTTKERIERIIAGECDESIGAKVREKAMNLSDISCFKRLPLWLACYVVYNRHSEDKEITKWESPADIDAYLAAFKQHSLRNPIVEQVITETLRVVRDIWKQVGKIDEIHIELGREMKNPADKRKRMTTQILENENANLRIKALLAEFVNPEYGVENVRPYSPSQQEILRIYEDAVLKGEEQIPEDIDVILKKFNTSKLPTKSEFLRYKLWLEQKYRSPYTGELIPLAKLFTAAYEIEHVIPQSRYFDDSFSNKVICESAVNKLKDNQLGYEFIKNHHGQKVEVGFGKTVEIFSVDSYERFVKEQYAKSGIKMKKLLMDDIPEQFIERQLNDSRYISKVVKGLLSNIVREKNDSGEYEPEAVSKNILVCTGSVTDRLKKDWGMNDVWNSIVSPRFERLNALTETQCFGHWENKDGKKVFQTAVPLEYQKGFSKKRIDHRHHAMDAIVIACATRNHVNYLNNESASRNAKISRYDLQRLLCDKSRGDGNGNYRWIIKKPWTTFTQDAREALSGIIVSLKQNLRIINKTTNIYQHFDANGTRVYEKQKIGDSWAIRKPMHKDTVFGAVNLRKVKVVRLSVALDTPSMIVDKRVKNKVLELLSYKYDKKKIEKYFKENAFLWKELDIAKVAVYYFTENTTEPLVAVRKSLDSTFNEKKIASVTDTGIQKILLNHLKSKEGKAELAFSAEGIEEMNRNLLQLNDGKGHQPIYKVRVYEPRGNKFKVGVLGNKGAKWVEAAKGTNLFFAIYITEDGNRTYETIPLNWVIEREKQGLVPVPDRNEKGDKLLFWLSPNDLVYLPTEEERDFGRINEPIDRGRIYKMVSSSGNQCFFIPQSISNAIISTKELGSNNKAEKSWDGEMIKNICIPVKVDRLGRIIEVKYRVNE

SEQ ID NO: 23500 - protein, 1398 aa, unidentified
  REGION 1..1398: note = Cas Enzyme sequence
MKTILGLDLGTTSIGWALVKEAEPFSDEKSEIVRLGVRVIPLTVDERTSFENGKSITTNALRTQKRGMRRNLQRYKLRRQALIEELKSTGWIGNDFIFSETGPGSTFRTLRLRAKSASEEVTLGDLARILLQINKKRGYKSSRKMVSSDDGQAIDGMAVAKEMYDKGLTPGEYVYQRMLEGKYAIPEFYKSDLQEEFDRIWALQKSFHTELTDELYRKLSDRNKSQTWAICRDELGIQGLKSSFTGKERLKEAYRYRHLAATQEVNMEVLTCALQEINGQKASLSGLLSKISDRSKELYLNNLTVGQMLLKRIEDNPNNSLKNIVFYRQDYLDEFERIWTVQSKYHTELTHELKKRLRDIIIFYQRPLKSQKGLISLCELETKDIEVAIDGVKKMKNIGPRVCPRSSPLFQEFKIWQTINNIFVNGAALDDEDKSVIAKELMFKDKLKDSDLLKLLFKTTKGQSVNFKEVDGNRTMATLMKACFKIAENLGYDDIDLSKLSSEDQMVRIEGIFKEQGFKTGFLHFDSSLASPEFENQDSYRLWHLLYSYEGDKSASGNESLVKCIMDLCSMDEGSAKILASCTFLPDYGSLSAKAMRKILPYMKDGLEYTAACAMAGYRHSKRSLTKEELDTKEYSDRLSLLPKNTLRNPVVEKILNQMINVVNSVIDVYGKPDEIRIEMARELKKSAKEREEAQRDIASSTAESQKVIEILKGEPFFIQFPTRNDIIRYRLYQELAQNGFKTLYSNTYIPKDKLFSKEFDIEHIIPQALIFNDSFANKTLESRQCNLEKGKETAMDYVKSKYDETGVQAYCDRVNGLIGKGISKTKAKWLLMEGKDIPEDFINRELRDSQYIAKKAREILESLVKFVVPTTGSVTARLREDWQLVNVMQELNWEKYARLGLTGVREDKDGRRIPFIQDWTKRNDHRHHAMDALTIAFTRRQFIQYLNHLNSKIDVVSWDKKDLDLRDYDLEDIKFGNLSAGDRYGIVKALQDKFLYKDGNDKYRFVPPIPLDEFRRQAKEQLSDILISFKAKNKVCTRNVNVTKNKGGANRKAQLTPRGPLHNETIYGSSLEYVTKENEKIGSSFDTERITTVCKKKFRDALARRLEEFGGDPKKAFTGKNSPEKNPIWVDEHHSEQVPAKVRTVTMGQRFTGRKPIDATLKIEKVIDKRIREILQARLDEFDGKAAKAFSNLDENPIWLNKEKGIAIKRVTVSGPANPVPVRFKRDKDGKPIIDDAGKTIGADFVTPGNNHHIAIFRDSSGKLQEHPVSFLEATIAKSHGLDVIDRNYNKDEGWEFLFTLKQNEYFVFPNSETGFNPLDYDLTDPMNYAEISPNLYRVQKIATGDYYFRLHLETTVEDNKALKGITWKRVGPSGLEGAVKVRIDNLGRIVAVGEYD

SEQ ID NO: 23501 - protein, 1535 aa, unidentified
  REGION 1..1535: note = Cas Enzyme sequence
  REGION 1045..1048: note = misc_feature - Xaa can be any naturally occurring amino acid
LIIYFIFEKIVNTILVMKKIVGLDLGTNSIGWALINAYIDEYNKEHLYGIEACGSRIIPMDAAILGNFDKGNSISQTADRTSYRGIRRLRERHLLRRERLHRILDLLGFLPKHYSDSLNRYGKFLNDIECKLPWVKDETGSYKFIFQESFKEMLADFTEHHPKLIANNKKVPYDWTIYYLRKKALTQKISKEELAWILLNFNQKRGYYQLRGEEEETPNKLVEYYSLKVEKVEDSGEKKGKDTWYNVHLENGMIYRRTSNIPLDWEGKTKEFIVTTDLEADGSPKKDKEGNIKRSFRAPKDDDWTLIKKKTEADIDKIKMTVGAYIYDTLLQKPDQKIRGKLVRTIERKYYKNELYQILKTQSEFHEELRDKQLYIACLNELYPNNEPRRNSISTRDFCHLFIEDIIFYQRPLKSKKSLIDNCPYEENRYIDKESGEIKHASIKCIAKSHPLYQEFRLWQFIVNLRIYRKETDVDVTQELLPTEADYVTLFEWLNEKKEIDQKAFFKYPPFGFKKTTSNYRWNYVEDKPYPCNETHAQIIARLGKAHIPKAFLSKEKEETLWHILYSIEDKQEIEKALHSFANKNNLSEEFIEQFKNFPPFKKEYGSYSAKAIKKLLPLMRMGKYWSIENIDNGTRIRINKIIDGEYDENIRERVRQKAINLTDITHFRALPLWLACYLVYDRHSEVKDIVKWKTPKDIDLYLKSFKQHSLRNPIVEQVITETLRTVRDIWQQVGHIDEIHIELGREMKNPADKRARMSQQMIKNENTNLRIKALLTEFLNPEFGIENVRPYSPSQQDLLRIYEEGVLNSILELPEDIGIILGKFNQTDTLKRPTRSEILRYKLWLEQKYRSPYTGEMIPLSKLFTPAYEIEHIIPQSRYFDDSLSNKVICESEINKLKDRSLGYEFIKNHHGEKVELAFDKPVEVLSVEAYEKLVHESYSHNRSKMKKLLMEDIPDQFIERQLNDSRYISKVVKSLLSNIVREENEQEAISKNVIPCTGGITDRLKKDWGINDVWNKIVLPRFIRLNELTESTRFTSINTNNTXXXXPLELQKGFNKKRIDHRHHAMDAIIIACANRNIVNYLNNVSASKNTKITRRDLQTLLCHKDKTDNNGNYKWVIDKPWETFTQDTLTALQKITVSFKQNLRVINKTTNHYQHYENGKKIVSNQSKGDSWAIRKSMHKETVHGEVNLRMIKTVSFNEALKKPQAIVEMDLKKKILAMLELGYDTKRIKNYFEENKDTWQDINPSKIKVYYFTKETKDRYFAVRKPIDTSFDKKKIKESITDTGIQQIMLRHLETKDNDPTLAFSPDGIDEMNRNILILNKGKKHQPIYKVRVYEKAEKFTVGQKGNKRTKFVEAAKGTNLFFAIYETEEIDKDTKKVIRKRSYSTIPLNVVIERQKQGLSSAPEDENGNLPKYILSPNDLVYVPTQEEINKGEVVMPIDRDRIYKMVDSSGITANFIPASTANLIFALPKATAEIYCNGENCIQNEYGIGSPQSKNQKAITGEMVKEICFPIKVDRLGNIIQVGLCILTN

SEQ ID NO: 23502 - protein, 1508 aa, unidentified; identical to SEQ ID NO: 22797
  REGION 1..1508: note = Cas Enzyme sequence

SEQ ID NO: 23503 - protein, 1153 aa, unidentified
  REGION 1..1153: note = Cas Enzyme sequence
MKNILGLDLGLSSIGWSVIRENSEEQELVAMGSRVVSLTAAELSSFTQGNGVSINSQRTQKRTQRKGYDRYQLRRTLLRNKLDTLGMLPDDSLSYLPKLQLWGLRAKAVTQRIELNELGRVLLHLNQKRGYKSIKSDFSGDKKITDYVKTVKTRYDELKEMRLTIGELFFRRLTENAFFRCKEQVYPRQAYVEEFDCIMNCQRKFYPDILTDETIRCIRDEIIYYQRPLKSCKYLVSRCEFEKRFYLNAAGKKTEAGPKVSPRTSPLFQVCRLWESINNIVVKDRRNEIVFISAEQRAALFDFLNTHEKLKGSDLLKLLGLSKTYGYRLGEQFKTGIQGNKTRVEIERALGNYPDKKRLLQFNLQEESSSMVNTETGEIIPMISLSFEQEPLYRLWHVLYSIDDREQLQSVLRQKFGIDDDEVLERLSAIDLVKAGFGNKSSKAIRRILPFLQLGMNYAEACEAAGYNHSNNYTKAENEARALLDRLPAIKKNELRQPVVEKILNQMVNVVNALMEKYGRFDEIRVELARELKQSKEERSNTYKSINKNQRENEQIAKRIVEYGVPTRSRIQKYKMWEESKHCCIYCGQPVDVGDFLRGFDVEVEHIIPKSLYFDDSFANKVCSCRSCNKEKNNRTAYDYMKSKGEKALSDYVERVNTMYTNNQISKTKWQNLLTPVDKISIDFIDRQLRESQYIARKAKEILTSICYNVTATSGSVTSFLRHVWGWDTVLHDLNFDRYKKVGLTEVIEVNHRGSVIRREQIKDWSKRFDHRHHAIDALTIACTKQAYIQRLNNLRAEEGPDFNKMSLERYIQSQPHFSVVQVREAVDRILVSFRAGKRAVTPGKRYIRKNRKRISVQSVLIPRGALSEESVYGVIHVWEKDEQGHVIQKQRAVMKYPITSINREMLDKEKVVDKRIHRILSGRLAQYNDNPKEAFAKPVYIDKECRIPIRTVRCFAKPAINTLVPLKKDDKGNPVAWVNPGNNHHVAIYRDEDGKYKERTVTFWEAVDRCRVGIPAIVTQPDTIWDNILQRNDISENVLESLPDVKWQFVLSLQQNEMFILGMNEEDYRYAMDQQDYALLNKYLYRVQKLSKSDYSFRYHTETSVEDKYDGKPNLKLSMQMGKLKRVSIKSLLGLNPHKVHISVLGEIKEIS

SEQ ID NO: 23504 - protein, 1405 aa, unidentified
  REGION 1..1405: note = Cas Enzyme sequence
LGTNSIGWAKVSVDDYGNYLHDIKLGSRIIPMSQDVLGNFDSGVTVSQTAQRTEFRSKRRLVQRNLQRRERLHRVLHVLDFLPAHYDAAIGWDRTEAVTYGKFLNHAESKLAWEELGNGKRRFLFMDSFHEMVADFARCQPALVADGKKIPLDWTIYYLRKKALTQAITKEELAWILLNFNQKRGYYQLRGEEEENPTKKEGNVKRSFRAPNENDWGLRKKRTETLLEMSGKTVGAFIYDHLLQEPADKIRGNFIRTIERHYYKAELEAILAEQCKYHIELRDKEMLEACARELYLNNLPHQRSLMKKDMTYLLLYDLIFYQRPLKSKKALIANCPYEYYEYVDKETGEIKRQNIKCIAKSNPYFQEFHLWQFVLNLRLFDRVEDKEVTANYLPTADDHARLFTYLNDRKEINQETLLKDYFKLKKVKIGNEKEYPIRWNYIEGKEKKYPCNETRYELLMALDRAGIEHKWLDDNNLEYRLWHLLYSVEVKSESETALRKLKNDDAFVNSFLKVKPFKKEYGAYSEKAIKRLLAVMRKGFLWNEQDICDETRKRIEIIIKGDVDEKVKERMGHAAYSFDRVSDFQGLPEWLACYVVYGRHSEAMDIQHWDSPEGLMAYINNFKQYSLRNPIVEQCILETLRTVHDIWKETGQIDEIHVELGREMKSTSEERARRTQNVLRNENTNLRIKSLLIELKNDTDICNVHPYSPMQQEILRIYEEGALQELNREDEDFEEISKISQMSQPSGKELNRYKLWLEQKYRSPYTGKAISLAKLFTPAYQIEHVIPQSRYFDDSFTNKVICEAEVNTLKSNLLGYEFIKKHGGEIIHCTTLGDVRIFSESEYKAFVTEHYANNKSKKDKLLMEDIPQEFLNRQMNDSGYISKVVKTLLSNIVRMEDESEATSKSVIVCTGGVTDRLKKDWGLNDVWNSIVYSRFERLNRLTGTEAFGHWENKDGKRVFQTSMPLELQRGFRKKRIDHRHHAMDALVIACASRNIVNYLNNESANNPKKREDLRRQLCDKNRVIRKPWETFTQDAYNALRNVVVSFRNYVRVINKATNRYEHYDENGKKRFVQQKGSELWAIRKPMHKETYYGHVNLRRKELVTLQKALDDIPSICDKKLRDYISALVEKHFNKRQMLAHFKSTDYYWQKQYVNKVYVWTFSDDIKPLVATRKLLDTSFDAKRIGTITDTGIQKILRNYLEAKGGNATLAFTPEGIAEMNQNISKYNDGKPHQPILKVRITEPMGAKYRVGQTGNKMAKYVKAQSGINLYFAIYEDSEGKRSYTTVPLDEVAERLKQRLSPVPEKDENDVPLKFYLSPNDLVYVPTEEELQLRECKLNKDRIYKMVSSTGNECHFIPYYVANVIYNKVEFEAKNKIGRALTGEMIKAVCWKLEIDRLGNILKVIK

SEQ ID NO: 23505 - protein, 1508 aa, unidentified
  REGION 1..1508: note = Cas Enzyme sequence
MRTILGLDLGTNSIGWAVINSVIKEQTERIWIEMAGSRIIPMDAAILGDFDKGNSISQTAERTRFRGVRRLRERQLLRRERLHKVLKILGFLPEHYLKGIDFEKHTGKFLSGSEPKLPWVKDRWGKYSFLFQTAFNEMLADFAKHQPSLVFDGKKIPYDWTVYYLRKKALTEMISKEELAWILLNFNQKRGYYQLRGEEEEDNAGKSVEFYALKVLSVEATDEKKGRDIWYNVHLENGWVYRRSSNVPLDWEGRVKEFIVTTDLNPDGTPKLDKYGEVKRSFRAPKEDDWMLIKKRTEADITGTHKTIGSYIYDALLQEPQQKIIGKLVKTVERKFYKEELNFILQKQCAFHAELQDRDLYMRCIEALYPGNEVQRRNIANRDFIYLLIDDVLFYQRPLKTKKSLIANCPYEENEYVNRKTGEIKTAPLKCIAKSHPLFQEFRLWYFLSNIRVYQKEREVNGTLHLDVDVTTEFLKTEDDYVALFDWLNSRKEIDQKAFLRYPAFGLKKEINNYRWNYVEDKFYPCNETRHAILSRLEKAGIGIDFLSDEKETALWHILYSVSDKQEIEKALATFAVKNGLNESFVEVFKKFSPFKSEYGAYSAKAIKKLLPLMRCGKYWDMSLIDGTTKERIERIIAGECDESIGAKVREKAMNLSDISCFKRLPLWLACYVVYNRHSEDKEITKWESPADIDAYLAAFKQHSLRNPIVEQVITETLRVVRDIWKQVGKIDEIHIELGREMKNPADKRKRMTTQILENENANLRIKALLAEFVNPEYGVENVRPYSPSQQEILRIYEDAVLKGEEQIPEDIDVILKKFNTSKLPTKSEFLRYKLWLEQKYRSPYTGELIPLAKLFTAAYEIEHVIPQSRYFDDSFSNKVICESAVNKLKDNQLGYEFIKNHHGQKVEVGFGKTVEIFSVDSYERFVKEQYAKSGIKMKKLLMDDIPEQFIERQLNDSRYISKVVKGLLSNIVREKNDSGEYEPEAVSKNILVCTGSVTDRLKKDWGMNDVWNSIVSPRFERLNALTETQCFGHWENKDGKKVFQTAVPLEYQKGFSKKRIDHRHHAMDAIVIACATRNHVNYLNNESASRNAKISRYDLQRLLCDKSRGDGNGNYRWIIKKPWTTFTQDAREALSGIIVSLKQNLRIINKTTNIYQHFDANGTRVYEKQKIGDSWAIRKPMHKDTVFGAVNLRKVKVVRLSVALDTPSMIVDKRVKNKVLELLSYKYDKKKIEKYFKENAFLWKELDIAKVAVYYFTENTTEPLVAVRKSLDSTFNEKKIASVTDTGIQKILLNHLKSKEGKAELAFSAEGIEEMNRNLLQLNDGKGHQPIYKVRVYEPRGNKFKVGVLGNKGAKWVEAAKGTNLFFAIYITEDGNRTYETIPLNWVIEREKQGLVPVPDRNEKGDKLLFWLSPNDLVYLPTEEERDFGRINEPIDRGRIYKMVSSSGNQCFFIPQSISNAIISTKELGSNNKAEKSWDGEMIKNICIPVKVDRLGRIIEVKYRVNE

SEQ ID NO: 23506 - protein, 1427 aa, unidentified
  REGION 1..1427: note = Cas Enzyme sequence
MKKILGLDLGTSSIGWALVNEAETSEEKSSIIKLGVRVNPLTVDELQNFEKGKSITTNADRTAGRSMRRNLQRYKLRRENLIEVLKEYNFITDETILSENGNRTTFETYRLRAKAAVEEISLEQFARVLLMINKKRGYKSSRKAKGAEDGTLIDGMEVAKKMYDEGITPGELCLQLLTAGKRYFPDFYRSDLQAEFDRIWNFQKQFYPDSLIDKVKDEVRGKNKSQTWAILAKYFVWKEVENSWNEEEAQTRRVEKEYRLVGIKRGVKREELKLENFQWRVKALSERMNPEELAIVLQEINGQISNSSGYLGAISDRSKELYFNRQTVGQYQMAVLDNNPNIGLRNMVFYRQDYLDEFNTIWEKQAEFHKELTEDLKKEIRDIVIFYQRRLKSQKGLINICEFERRQIEVEIDGKKKIKTIGSRVIPRSSPLFQEFKIWQTLNDIEVSVLGVKNKRKKQDDNSTTLLDSAENIDSLKLNVSRPLDADEKSLLAKELFIRDKLTKSDVLKLLFNNPQNLNLNFKNIDGNRTGSALYQAFSKILEISGHESINFKKSADEIVEQVKTIFSALGWNTEVLCFDSEKELDKQPYFKLWHLLYSFEGDSTPTGDGNLIQKIADLCGFEKDYASILANITFQEDYGSLSTKAIRKILPHLKDGNQYDVACEYAGYKHSKSSLTKEEIKSKVLKDKLELLPKNSLRNPVVEKILNQMVNVINAIITTYGKPDEIRIELARELKKNAKEREELTKSIVDTTKTHEGIRAILQNDFGMSHVSRNAIIRYKLYEELKDNGYKTLYSNTYIPKEKLFSKDFDIEHIIPQARLFDDSFSNKTLEVKSINIEKGSKTAYDFVEEKYGEQGLQEYLNRCEVLFRDKKTKLRKLKMQESEIPEGFIDRDLRNTQYIAKKALSMLNEICRRVVATTGAITDELREDWQLVDVMKELNWEKYKVLGLVEYFEDNDGRLIGRIKDWTKRNDHRHHAMDALTVAFTKDVFIQYFNNKNASLKPDTNEAAIRNKYFQNGKAIPPMSLDEFRAEAKKHLNDTLISIKTKNKVVTINLNRTKKKNGINKKQQQTPRGQLHLETVYGSHKQYVVKEEKVNASFDAAKIATVNKPAYRDALLRRLQENGNDSKKAFTGKNSLDKQPVWLDAKQNECVPEKVKTVMLETVYTVRKPIDEKLNVDKVVDARIRKLLQDRIKEYGNAKSAFANLDENPIWLNKEKGITIKRVSVFGISKAQSLHEKKDKDGNFILDKDSRRIPVDFVNTGNNHHVAIYRKPVLDKKGQAVFDENGELKFELEEVVVSFFDAVTRVNLSQPIIDKDYKRSEGWKFLFSMKQNEYFVFPNEKTGFDPKEIDLLNPENYALISPNLFRVQKIASKDYVFRHHLETVVADRKELQEITWKRISSLSILNRIIKVRVNHIGQIVMIGEY

SEQ ID NO: 23507 - protein, 1398 aa, unidentified
  REGION 1..1398: note = Cas Enzyme sequence
MKTILGLDLGTTSIGWALVKEAEPFSDEKSEIVRLGVRVIPLTVDERTSFENGKSITTNALRTQKRGMRRNLQRYKLRRQALIEELKSTGWIGNDFIFSETGPGSTFRTFRLRAKSASEEVTLGDLARILLQINKKRGYKSSRKMVSSDDGQAIDGMAVAKEMYDKGLTPGEYVYQRMLEGKYAIPEFYKSDLQEEFDRIWALQKSFHTELTDELYRKLSDRNKSQTWAICRDELGIQGLKSSFTGKERLKEAYRYRHLAATQEVNMEVLTCALQEINGQKASLSGLLSKISDRSKELYLNNLTVGQMLLKRIEDNPNNSLKNIVFYRQDYLDEFERIWTVQSKYHTELTHELKKRLRDIIIFYQRPLKSQKGLISLCELETKDIEVAIDGVKKMKNIGPRVCPRSSPLFQEFKVWQTINNIFVNGAALDDEDKSVVAKELMFKDKLKDSDLLKLLFKTTKGQSVNFKEVDGNRTMATLMKACFKIAENLGYDDIGLSKLSSEDQKVRIEGIFKEQGFKTGFLHFDSSLASPEFENQDSYRLWHLLYSYEGDKSASGNESLVKCIMDLCSMDEGSAKILASCTFLPDYGSLSAKAMRKILPYMKDGLEYTAACAMAGYRHSKRSLTKEELDTKEYSDRLSLLPKNTLRNPVVEKILNQMINVVNSVIDVYGKPDEIRIEMARELKKSAKEREEAQRDIASSTAESQKVIEILKGEPFFLQFPTRNDIIRYRLYQELAQNGFKTLYSNTYIPKDKLFSKEFDIEHIIPQALIFNDSFANKTLESRQCNLEKGKETAMDYVKSKYDETGVQAYCDRVNGLIGKGISKTKAKWLLMEGKDIPEDFINRELRDSQYIAKKAREILESLVKFVVPTTGSVTARLREDWQLVNVMQELNWEKYARLGLTGVREDKDGRRIPFIQDWTKRNDHRHHAMDALTIAFTRRQFIQYLNHLNSKIDVVSWDKKDLDLRDYDLEDIKFGNLSAGDRYGIVKALQDKFLYKDGNDKYRFVPPIPLDEFRRQAKEQLSDILISFKAKNKVCTRNVNVTKNKGGANRKTQLTPRGPLHNETIYGSSLEYVTKENEKIGSSFDAERITTVCKKKFRDALARRLEEFGGDPKKAFTGKNSPEKNPIWVDEHHSEQVPAKVRTVTMGQRFTGRKPIDATLKIEKVIDKRIREILQDRLDEFDGKAAKAFSNLDENPIWLNKEKGIAIKRVTVSGPANPVPVRFKRDKDGKPIIDDAGKTIGADFVTPGNNHHIAIFRDSSGKLQEHPVSFLEAIIAKSHGLDVIDRNYNKDEGWEFLFTLKQNEYFVFPNSETGFNPLDYDLTDPRNYAEISPNLYRVQKIATGDYYFRLHLETTVEDNKALKGITWKRVGPSGLEGAVKVRIDNLGRIVAVGEYD

SEQ ID NO: 23508 - protein, 1153 aa, unidentified
  REGION 1..1153: note = Cas Enzyme sequence
MKNILGLDLGLSSIGWSVIRENSEEQELVAMGSRVVSLTAAELSSFTQGNGVSINSQRTQKRTQRKGYDRYQLRRTLLRNKLDTLGMLPDDSLSYLPKLQLWGLRAKAVTQRIELNELGRVLLHLNQKRGYKSIKSDFSGDKKITDYVKTVKTRYDELKEMRLTIGELFFRRLTENAFFRCKEQVYPRQAYVEEFDCIMNCQRKFYPDILTDETIRCIRDEIIYYQRPLKSCKYLVSRCEFEKRFYLNAAGKKTEAGPKVAPRTSPLFQVCRLWESINNIVVKDRRNEIVFISAEQRAALFDFLNTHEKLKGSDLLKLLGLSKTYGYRLGEQFKTGIQGNKTRVEIERALGNYPDKARLLQFNLQKESSSMVNTETGEIIPMISLSFEQEPLYRLWHVLYSIDDREQLQSVLRQKFGIDDDEVLERLSAIDLVKAGFGNKSSKAIRRILPFLQLGMNYAEACEAAGYNHSNNYTKAENEARALLDRLPAIKKNELRQPVVEKILNQMVNVVNALMEKYGRFDEIRVELARELKQSKEERSNTYKSINKNQRENEQIAKRIVEYGVPTRSRIQKYKMWEESKHCCIYCGQPVDVGDFLRGFDVEVEHIIPKSLYFDDSFANKVCSCRSCNKEKNNRTAYDYMKSKGEKALSDYVERVNTMYTNNQISKTKWQNLLTPVDKISTDFIDRQLRESQYIARKAKEILTSICYNVTATSGSVTSFLRHVWGWDTVLHDLNFDRYKKAGLTEVIEVNHRGSVIRREQIKDWSKRFDHRHHAIDALTIACTKQAYIQRLNNLRAEEGPDFNKMSLERYIQSQPHFSVAQVREAVDRILVSFRAGKRAVTPGKRYIRKNRKRISVQSVLIPRGALSEESVYGVIHVWEKDEQGHVIQKQRAVMKYPITSINREMLDKEKVVDKRIHRILSGRLAQYNDNPKEAFAKPVYIDKECRIPIRTVRCFAKPAINTLVPLKKDDKGNPVAWVNPGNNHHVAIYRDEDGKYKERTVTFWEAVDRCRVGIPAIVTQPDTIWDNILQRNDISENVLESLPDVKWQFVLSLQQNEMFILGMNEEDYRYAMDQQDYALLNKYLYRVQKLSKGDYNFRYHTETSVEDKYDGKLNLELSRQMGKLKRVSIKSLLELNPHKVHISVLGEIKEIS

SEQ ID NO: 23509 - protein, 1536 aa, unidentified
  REGION 1..1536: note = Cas Enzyme sequence
LIIYFIFEKIVNTILVMKKIVGLDLGTNSIGWALINAYIDEYNKEHLYGIEACGSRIIPMDAAILGNFDKGNSISQTADRTSYRGIRRLRERHLLRRERLHRILDLLGFLPKHYSDSLNRYGKFLNDIECKLPWVKDETGSYKFIFQESFKEMLADFTEHHPKLIANNKKVPYDWTIYYLRKKALTQKISKEELAWILLNFNQKRGYYQLRGEEEETPNKLVEYYSLKVEKVEDSGEKKGKDTWYNVHLENGMIYRRTSNIPLDWEGKTKEFIVTTDLEADGSPKKDKEGNIKRSFRAPKDDDWTLIKKKTEADIDKIKMTVGAYIYDTLLQKPDQKIRGKLVRTIERKYYKNELYQILKTQSEFHEELRDKQLYIACLNELYPNNEPRRNSISTRDFCHLFIEDIIFYQRPLKSKKSLIDNCPYEENRYIDKESGEIKHASIKCIAKSHPLYQEFRLWQFIVNLRIYRKETDVDVTQELLPTEADYVTLFEWLNEKKEIDQKAFFKYPPFGFKKTTSNYRWNYVEDKPYPCNETHAQIIARLGKAHIPKAFLSKEKEETLWHILYSIEDKQEIEKALHSFANKNNLSEEFIEQFKNFPPFKKEYGSYSAKAIKKLLPLMRMGKYWSIENIDNGTRIRINKIIDGEYDENIRERVRQKAINLTDITHFRALPLWLACYLVYDRHSEVKDIVKWKTPKDIDLYLKSFKQHSLRNPIVEQVITETLRTVRDIWQQVGHIDEIHIELGREMKNPADKRARMSQQMIKNENTNLRIKALLTEFLNPEFGIENVRPYSPSQQDLLRIYEEGVLNSILELPEDIGIILGKFNQTDTLKRPTRSEILRYKLWLEQKYRSPYTGEMIPLSKLFTPAYEIEHIIPQSRYFDDSLSNKVICESEINKLKDRSLGYEFIKNHHGEKVELAFDKPVEVLSVEAYEKLVHESYSHNRSKMKKLLMEDIPDQFIERQLNDSRYISKVVKSLLSNIVREENEQEAISKNVIPCTGGITDRLKKDWGINDVWNKIVLPRFIRLNELTESTRFTSINTNNTMIPSMPLELQKGFNKKRIDHRHHAMDAIIIACANRNIVNYLNNVSASKNTKITRRDLQTLLCHKDKTDNNGNYKWVIDKPWETFTQDTLTALQKITVSFKQNLRVINKTTNHYQHYENGKKIVSNQSKGDSWAIRKSMHKETVHGEVNLRMIKTVSFNEALKKPQAIVEMDLKKKILAMLELGYDTKRIKNYFEENKDTWQDINPSKIKVYYFTKETKDRYFAVRKPIDTSFDKKKIKESITDTGIQQIMLRHLETKDNDPTLAFSPDGIDEMNRNILILNKGKKHQPIYKVRVYEKAEKFTVGQKGNKRTKFVEAAKGTNLFFAIYETEEIDKDTKKVIRKRSYSTIPLNVVIERQKQGLSSAPEDENGNLPKYILSPNDLVYVPTQEEINKGEVVMPIDRDRIYKMVDSSGITANFIPASTANLIFALPKATAEIYCNGENCIQNEYGIGSPQSKNQKAITGEMVKEICFPIKVDRLGNIIQVGLCILTN

SEQ ID NO: 23510 - protein, 1432 aa, unidentified
  REGION 1..1432: note = Cas Enzyme sequence
MKRILGLDLGTSSIGWALVNESERAEEISSIVQLGVRVNPLTVDEMQNFEKGKSITTNADRTLKRSMRRNLQRYKLRRDVLIKLLKKVGFITDKTILSEQGNRTTFETYRLRAKAAEEEISLEELARVLLMINKKRGYKSSRKAKGEEDGSLIDGMEIAKKLYDEDLTPGQLCLQLLESGKKTFPDFYRSDLQDEFDRIWNFQKQFNPQSFCDTAKEEVKGKNKSQTWAILAKYFTWTKEVSVWNENEAKTENQEKEYRLVGLKRTVKGEELKKENYCWRVQALTERLDLEEIAVVLQEINGQISASSGYLGAISDRSKVLYFNHQTVGQYQMAELNKNPNMSLRNMVFYRQDYLDEFNAIWEKQAEFHKELTPELKKGIRDVIIFYQRRLKSQKGLIGFCEFENREIIVEKNGKTQTKIIGCKVIPRSHPLFQEFKIWQTLNNIEVFVGERKRKRKQTNVSSDLFDDTEDVLVTKGRRFLYQEEKEILAKELSIKENLKKAEVLKLLFENPQELDMNFKQIDGNRTGFALFSAYGRMIEKYGYEPLDFKKPADEIINQLKAVFSDLGWNTDLLSIGLDKEGKELEMQPYFRLWHLLYSFEGDNTPAGNGKLIEKIMQLCRVEKEYAIELANISFQDDYGSLSAKAIKKILPYLKEGNQYDVACEYAGYRHSKSSLTKEEIENKALKDKLDILPKNSLRNPVVEKILNQMVNVVNAVIDAYGRPDEIRVELARELKKSAKEREELTKAIAKNTREHDEIRKLLQSEFGMIHVSRNDIIRYKLYEELKENGYKTLYSNQYIPKEKLFSKEIDIEHIIPQARLFDDSLSNKTLEYKAINIEKGNKTAYDFVKDKYGEEGLQEYLNRCETVCNDKKAKLRKLKMQQNDIPDGFIDRDLRNTQYIAKKALSMLKDICRRVVATTGSITDKLREDWQLVDVMKELNLPKYEALGLVERFEDKDGRIIKRIKDWTKRNDHRHHAMDALTVAFTKDVFIQYFNNKNAAWESDCKEHANIIGIKTRYFESGRAVPPMPLGQFRVEAKSHLENLLVSIKAKNKVVTTNVNCIRKKGGISEKHQQTPRGQLHLETIYGSHKQYVTKMEKVNASFDAAKIATVSRQNYRNALLRRLEAFGNDPKKAFTGKNTLEKNPVYLDRAQTMRMPDRVQTVEFEAVYTIRKPIDSNLNVEKVVDAKVRAILEQRLEEYGGDAKKAFVNLDENPIWLNQEKGISIKRVSIRGINNAQSLHVKKDKNGNPILDENGKQIPVDFVNTGNNHHVAIYRKPVLDKKGQVMFDEDGNLMYELDEVVVSFFEAVTRANLGLPIINKDYRRSEGWQFLFSMKQNEYFVFPNEKTGFNPKEIDLLDPDNYAVISPNLFRVQKFSTKNYCFRHHLETDVQERKALLGITYKWQLGLKAIKDIVKVRINHIGQIVSVGEY

SEQ ID NO: 23511 - protein, 1507 aa, unidentified
  REGION 1..1507: note = Cas Enzyme sequence
MKKILGLDLGTNSIGWAVINSLVDDEGKEKLTSISSCGSRIIPMDAATLGDFDKGNAKSSVAERTRLRGIRRLLERSLLRRERLHRVLSVMGFLPEHYASQLDRYGKFLPETEPKLAWYKDNTGSYRFLFQDSFNEMLEDFRLYHPELVAEGKKIPYDWTIYYLRKKALSQKIAKEELAWILLNFNQKRGYYQLRGEEEQEDNKKSVEYYALKVVAVEDSGERKGKDIWYNVKLENGWIYRRASSVPLDWAGKVKEFVVTTDLDDAGNPKKDKDGNVKCSFRAPKEDDWGLLKTKTQTQIDESGQTVGAYIYDSLLRMPDQKIRGKLVRTIERKYYKDELRKILLKQTEFHAALQDHNLLLSCIEELYPNNEAHRRLLSSSSFTYFLLEDILFYQRPLKSQKGLVDDCPYESHVYRDKKDGSLHRTPLKCISKSHPLFQEFRLWHFLSFLRIYQRERMIDGSLKLDVDVTNEFLQNEDDYVKLFDWLNGRKEIDQKTILAYKPFGLKKNEQPKYRWNYVEDKSYPCNETRADMISRLSKAGVSEGFLTEEREEALWHILYSISDKKELTKALGTFAEKNGLNEAFVEQFSKMPPFESNYAAYSLKAIRKLLALMRMGKYWNEQDIDKQTRSRIEKILTGEYDETIRTRVREKAIHLTDISSFRGLPLWLACYVVYNRHSEAKELVKWETPADIDHFLSKFRQHSLRNPIVEQVLMETLRTVRDIWKQEGQIDEIHVELGREMKNPAKERARITAQALENENTNLRIKALLTEFMNPEFEIENVRPYSPGQQEILRIYEEGVLSGVAEKDLPEDIISILKKFRENDVKKRPTTSEVLRYKLWLEQRYRSPYTGRIIPLGKLFTPAYEIEHVIPQSRYFDDSISNKVICESAVNKLKDNCLGYEFIKKHSGEIVELGNGEKATVFTSEEYEHFVKESYLGNGKKMKKLLLEDIPDNFIERQLNDSRYISKVVKSLLSNIVCEEGEQEGMSKNVIVCTGGVTDRLKKDWGVQDVWNRIILPRFLRLNKMTDSTDFTSVSTNGHLLPALPLHLQKGFNKKRIDHRHHAMDAIVIACADRNIVNYLNNASARKGSEISRYDLQHLLCDKVKTDSNGNYKWMLRKPWDTFTQDVYTALTNIVVSFKQNLRVINRTTNYYQHYNESGEKKMIPQVKGDRWAIRKPMHKDTVYGEVNLRREKTLPLKDVLNNPSIVVDKSLKSKLHELLKAQYDLKAITKYFEAHQDVWADINLKKIKVYYFTKETNERFFATRKSLDSSFNQKKIQEEVTDTGIQRILLRHLQLNDNNPDIAFSPDGIERMNQNMNILNDGKGHQPIYKVRTYEKAEKFAVGEHGNKVKKFVEAAKGTNLFFAVYESIQEDEATGKQVRKRTFATIPLNEVIKRKKQGLSVAPEDSNGNLPIFVLSPNDLVYLPTEEERNSGKVTQPLDRERIYKMVSSSGNQCFFIKSSVATSIWDKREYSSLNKMERAITEEMIKEICVPIKIDRLGNVSLI

SEQ ID NO: 23512 - protein, 1509 aa, unidentified
  REGION 1..1509: note = Cas Enzyme sequence
MKTILGLDLGTNSVGWAVINSVIKEQAERIWIEMAGSRIIPMDAAVLGDFDKGNSISQTSERTRLRGARRLRERQLLRRERLHKVLNILGFLPNHYLEYIDFEKHPGKFLADAEPKLAWVKDEQGKYTFLFQAAFDEMLADFAIHQPSLVSGDKKIPYDWTIYYLRKKALTEMISKEELAWILLNFNQKRGYYQLRGEEEEDNAGKSVEFYALKVLTVEATDEKKGRDVWYNVHLENGWIYRRSSSVPLDWEGQVKEFIVTTDLNPDGTPKLDKYGEVKRSFRAPKEDDWMLIKKRTEADIANTHKTVGAYIYDTLLQKPQQKIIGKLVKTVERKLYRDELSLILQKQCAFHAELQDRALYARCVEALYPSNEVRRKNIANRDFVYLLMDDILFYQRPLKTKKSLIANCPYEENEYVDRETGEIKKAPLKCIAKSHPLFQEFRLWNFLSNIRIYQKEKEINGTLHLDVDVTAEFLKTEDDYVALFDWLNSRKEIEQKTFLKYPKFGLKKEISNYRWNYVEDKQYPCNETRHAILSSLEKANVCIDFLSNEKEVALWHILYSVSDKQEIEKALRTFAAKNGLDESFVEAFKKFPPFKSEYGAYSAKAIKKMLPLMRCGKYWDVSSIDDTTKERIKKIVTGEYDERISVKVRDKVMNLSDISCFRRLPLWLACYIVYNRHSEDKEAVKWESPADIDAYLASFKQHSLRNPIVEQVITETLRVVRDIWKQVGRIDEIHIELGREMKNPADKRKRMTAQILENENANLRIKALLAEFMNPEYEIENVRPYSPSQQEILRIYEDTVLHAEDQLPEEIDAILKKFNSSKVPTKSEFLRYKLWLEQKYRSPYTGELIPLGKLFTAAYEIEHVIPQSRYFDDSFSNKVICESAVNKLKDNQLGYEFIKNHHGQKVEVGFGKSVEIFSVDSYERFVKEQYAKSAVKMKKLLMDDIPEQFIERQLNDSRYISKVIKGLLSNIVREKNDSGEYEPEAVSKNIVVCTGSVTDRLKRDWGMNDVWNSIVYPRFERLNSLTDTQSFGHWENKSGKKVFQTELPLEYQKGFSKKRIDHRHHAMDAIVIACAMRNHVNYLSNESASRNAKISRYDLQRLLCDKNRTDDNGNYKWVIKKPWDTFTQDAREVLSKIVVSLKQNLRIINKTTNVYRHFDATVNRVYQKQKTGDSWAIRKPMHKDTVFGAVNLRKVKVVRLSVALDTPAMIVDKRVKNKVFELLSYKYDKKRIEKYFKENAFLWKELDLAKVAVYYFTEATTEPLVAVRKPLDSTFNEKKIKESVTDTGIQKILLNHLCTKEGKPDLAFSAEGIEEMNRNLLQLNNGKSHQPIYKVRVYEPRGNKFSVGVLGNKGTKWVEAAKGTNLFFAIYITEDGKRTYETIPLNVVIEREKQGLVPVPDRNEKGDKLLFWLSPNDLVYLPTEEEREFGRINEPIDRGRIYKMVSCTGNEGHFIPANVANPIVPVIELGSNNKAQRAWTNEMIKDICIPIKVDRLGHIIEVKYRIDE

SEQ ID NO: 23513 - protein, 1433 aa, unidentified
  REGION 1..1433: note = Cas Enzyme sequence
MKKILGLDLGCNSIGWALVNEAENTEEISSIIKLGVRVNPLTVDEMQNFEKGKSITTNADRTLKRSMRRNLQRYKLRRDTLIEVLKEHGFITDSTLLSEHGNKTTFETYRLRAKAAVEEISLEKFARVLLMINKKRGYKSSRKAKGSEDGVLIDGMDVARKLYEEGLTPGELCLQILEAGKKNLPDFYRSDLQNEFDRIWNFQKQFNPELFCDAVKEEVRGKNRSQTWAILAKFFVWSEKESVWNEKEARTEERVKEYKLVGLKRDTKGNELKLENYRWRVQALSEQLNPEIVAIVLQEINGQISASSGYLGAISDRSKQLYFNRQTVGQYLMSELEKDPNVSLRNRVFYRQDYLDEFDRIWEKQAEFHEELTVELKKEIRNIIIFYQRRLKSQKGLISFCEFEKREVVVEEDGRKKNKTVGCRVIPRSHPLFQEFKIWQTLNDIEVFAWDKQSKCKKADKSSILFDNSEDALLVEGKRFLYQEEKELLAKELFVKESMKKAEVLKLLFENYQELDLNFKQIDGNHTGFALFSAYSKMIEKYGYEPVDFKKSADEIIEKLETIFTNLGWNTELLSIDLSKEDKELERQSYFRLWHLLYSFEGDNTPTGNGKLLEKIMQLCDVEKEYAVELANVSFQEDYGSLSAKAIKKILPYLKEGNQYDVACDYAGYRHSRSSLTKDEIENKILKDKLEILPKNSLRNPVVEKILNQIVNLINTLIDTYGKPDEIRVELARELKKNAKEREELTKSIARNTREHDEIRQLLRTEFGMMNVSRNDIIRYKLYEELKDNGYKTLYSNEYIPREKIFSKEIDIEHVIPQARLFDDSLSNKTLEYRAINIEKGNKTAYDFVKEKYGNDGLEKFLNRCETLFKDKRTKLRKLRMEEKDIPEGFIDRDLRNTQYISKKAFAMLNEISRRVVATTGSITDKLREDWQLVDLMKELNLPKYEKLGMVEMFEDKDGRKIKKITDWTKRNDHRHHAVDALTVAFTKDVFIQFYNNKNAAWMPASKEHANITGIKARYFENGKALAPMPLAQFRAEAKRHLENLLVSIKAKNKVITSNVNRTKNKNGENRKLQQTPRGQLHLETVYGSHRQYATKIEKVNAAFDAAKIATVSKLAYRNALLKRLEAFGNDPKKAFTGKNTLEKNPLYLDENQTEMVPEKVQTVEFETVYTIRKPIDPNLSIDKVVDVKIRSVLEKRLKEYGGDAKKAFVNLDENPIWLNEAKGISIKRVSIRGISNAQSLHEKKDKDGNLILGKEGRKIPVDFVNTGNNHHVAIYKKPVLDKVGQVVLDEEGNPKYELDEVVVSFFDAVTRANLGQPIIDKDYRRSEGWQFLFSMKQNEYFVFPNEKTGFNPKEVDLLNPENYALISPNLFRVQKFAYKNYVFRHHLETTIKDTSSTLKGITWTDFRSSKGLDKIVKVRVDHIGQIVSIGEY

SEQ ID NO: 23514 - protein, 1398 aa, unidentified
  REGION 1..1398: note = Cas Enzyme sequence
MKTILGLDLGTTSIGWALVKEAEPFSDEKSEIVRLGVRVIPLTVDERTSFENGKSITTNALRTQKRGMRRNLQRYKLRRQALIEELKSTGWIGNDFIFSETGPGSTFRTLRLRAKSASEEVTLGDLARILLQINKKRGYKSSRKMVSSDDGQAIDGMAVAKEMYDKGLTPGEYVYQRMLEGKYAIPEFYKSDLQEEFDRIWALQKSFHTELTDELYRKLSDRNKSQTWAICRDELGIQGLKSSFTGKERLKEAYRYRHLAATQEVNMEVLTCALQEINGQKASLSGLLSKISDRSKELYLNNLTVGQMLLKRIEDNPNNSLKNIVFYRQDYLDEFERIWTVQSKYHTELTHELKKRLRDIIIFYQRPLKSQKGLISLCELETKDIEVAIDGVKKMKNIGPRVCPRSSPLFQEFKIWQTINNIFVNGAALDDEDKSVIAKELMFKDKLKDSDLLKLLFKTTKGQSVNFKEVDGNRTMATLMKACFKIAENLGYDDIGLSKLSSEDQMVRIEGIFKEQGFKTGFLHFDSSLASPEFENQDSYRLWHLLYSYEGDKSASGNESLVKCIMDLCSMDEGSAKILASCTFLPDYGSLSAKAMRKILPYMKDGLEYTAACAMAGYRHSKRSLTKEELDTKEYSDRLSLLPKNTLRNPVVEKILNQMINVVNSVIDVYGKPDEIRIEMARELKKSAKEREEAQRDIASSTAESQKVIEILKGEPFFIQFPTRNDIIRYRLYQELAQNGFKTLYSNTYIPKDKLFSKEFDIEHIIPQALIFNDSFANKTLESRQCNLEKGKETAMDYVKSKYDETGVQAYCDRVNGLIGKGISKTKAKWLLMEGKDIPEDFINRELRDSQYIAKKAREILESLVKFVVPTTGSVTARLREDWQLVNVMQELNWEKYARLGLTGVREDKDGRRIPFIQDWTKRNDHRHHAMDALTIAFTRRQFIQYLNHLNSKIDVVSWDKKDLDLRDYDLEDIKFGNLSAGDRYGIVKALQDKFLYKDGNDKYRFVPPIPLDEFRRQAKEQLSDILISFKAKNKVCTRNVNVTKNKGGANRKTQLTPRGPLHNETIYGSSLEYVTKENEKIGSSFDTERITTVCKKKFRDALARRLEEFGGDPKKAFTGKNSPEKNPIWVDEHHSEQVPAKVRTVTMGQRFTGRKPIDATLKIEKVIDKRIREILQARLDEFDGKAAKAFSNLDENPIWLNKEKGIAIKRVTVSGPANPVPVRFKRDKDGKPIIDDAGKTIGADFVTPGNNHHIAIFRDSSGKLQEHPVSFLEATIAKSHGLDVIDRNYNKDEGWEFLFTLKQNEYFVFPNSETGFNPLDYDLTDPRNYAEISPNLYRVQKIATGDYYFRLHLETTVEDNKALKGITWKRVGPSGLEGAVKVRIDNLGRIVAVGEYD

SEQ ID NO: 23515 - protein, 1508 aa, unidentified
  REGION 1..1508: note = Cas Enzyme sequence
MRTILGLDLGTNSIGWAVINSVIKEQTERIWIEMAGSRIIPMDAAILGDFDKGNSISQTAERTRFRGVRRLRERQLLRRERLHKVLKILGFLPEHYLKGIDFEKHTGKFLSGSEPKLPWVKDRWGKYSFLFQTAFNEMLADFAKHQPSLVFDGKKIPYDWTVYYLRKKALTEMISKEELAWILLNFNQKRGYYQLRGEEEEDNAGKSVEFYALKVLSVEATDEKKGRDIWYNVHLENGWVYRRSSNVPLDWEGRVKEFIVTTDLNPDGTPKLDKYGEVKRSFRAPKEDDWMLIKKRTEADITGTHKTIGSYIYDALLQEPQQKIIGKLVKTVERKFYKEELNFILQKQCAFHAELQDRDLYMRCIEALYPGNEVQRRNIANRDFIYLLIDDVLFYQRPLKTKKSLIANCPYEENEYVNRKTGEIKTAPLKCIAKSHPLFQEFRLWYFLSNIRVYQKEREVNGTLHLDVDVTTEFLKTEDDYVALFDWLNSRKEIDQKAFLRYPAFGLKKEINNYRWNYVEDKFYPCNETRHAILSRLEKAGIGIDFLSDEKETALWHILYSVSDKQEIEKALATFAVKNGLNESFVEVFKKFPPFKSEYGAYSAKAIKKLLPLMRCGKYWDMSLIDGTTKERIERIIAGECDESIGAKVREKAMNLSDISCFKRLPLWLACYVVYNRHSEDKEITKWESPADIDAYLAAFKQHSLRNPIVEQVITETLRVVRDIWKQVGKIDEIHIELGREMKNPADKRKRMTTQILENENANLRIKALLAEFVNPEYGVENVRPYSPSQQEILRIYEDAVLKGEEQIPEDIDVILKKFNTSKLPTKSEFLRYKLWLEQKYRSPYTGELIPLAKLFTAAYEIEHVIPQSRYFDDSFSNKVICESAVNKLKDNQLGYEFIKNHHGQKVEVGFGKTVEIFSVDSYERFVKEQYAKSGIKMKKLLMDDIPEQFIERQLNDSRYISKVVKGLLSNIVREKNDSGEYEPEAVSKNILVCTGSVTDRLKKDWGMNDVWNSIVSPRFERLNALTETQCFGHWENKDGKKVFQTAVPLEYQKGFSKKRIDHRHHAMDAIVIACATRNHVNYLNNESASRNAKISRYDLQRLLCDKSRGDGNGNYRWIIKKPWTTFTQDAREALSGIIVSLKQNLRIINKTTNIYQHFDANGTRVYEKQKIGDSWAIRKPMHKDTVFGAVKLRKVKVVRLSVALDTPSMIVDKRVKNKVLELLSYKYDKKKIEKYFKENAFLWKELDIAKVAVYYFTENTTEPLVAVRKSLDSTFNEKKIASVTDTGIQKILLNHLKSKEGKAELAFSAEGIEEMNRNLLQLNDGKGHQPIYKVRVYEPRGNKFKVGVLGNKGAKWVEAAKGTNLFFAIYITEDGNRTYETIPLNWVIEREKQGLVPVPDRNEKGDKLLFWLSPNDLVYLPTEEERDFGRINEPIDRGRIYKMVSSSGNQCFFIPQSISNAIISTKELGSNNKAEKSWDGEMIKNICIPVKVDRLGRIIEVKYRVNE

SEQ ID NO: 23516 - protein, 1433 aa, unidentified
  REGION 1..1433: note = Cas Enzyme sequence
MKKILGLDLGCNSIGWALVNEAENTEEISSIIKLGVRVNPLTVDEMQNFEKGKSITTNADRTLKRSMRRNLQRYKLRRDTLIEVLKEHGFITDSTLLSEHGNKTTFETYRLRAKAAVEEISLEKFARVLLMINKKRGYKSSRKAKGSEDGVLIDGMDVARKLYEEGLTPGELCLQILEAGKKNLPDFYRSDLQNEFDRIWNFQKQFNPELFCDAVKEEVRGKNRSQTWAILAKFFVWSEKESVWNEKEARTEERVKEYKLVGLKRDTKGNELKLENYRWRVQALSEQLNPEIVAIVLQEINGQISASSGYLGAISDRSKQLYFNRQTVGQYLMSELEKDPNVSLRNRVFYRQDYLDEFDRIWERQAEFHEELTVELKKEIRDIIIFYQRRLKSQKGLISFCEFEKREVVVEEDGRKKNKTVGCRVIPRSHPLFQEFKIWQTLNDIEVFAWDKQSKRKKADKSSILFDNSEDALLVEGKRFLYQEEKELLAKELFVKESMKKAEVLKLLFENYQELDLNFKQIDGNHTGFALFSAYSKMIEKYGYEPVDFKKSADEIIEKLETIFTNLGWNTELLSIDLSKEDKELERQSYFRLWHLLYSFEGDNTPTGNGKLLEKIMQLCDVEKEYAVELANVSFQEDYGSLSAKAIKKILPYLKEGNQYDIACDYAGYRHSKSSLTKDEIENKILKDKLEILPKNSLRNPVVEKILNQMVNLINTLIDTYGKPDEIRVELARELKKNAKEREELTKSIARNTREHDEIRQLLRTEFGMMNVSRNDIIRYKLYEELKDNGYKTLYSNEYIPREKIFSKEIDIEHVIPQARLFDDSLSNKTLEYRAINIEKGNKTAYDFVKEKYGDDGLEKFLNRCETLFKDKRTKLRKLKMEETDIPEGFIDRDLRNTQYISKKAFAMLNEISRSVVATTGSITDKLREDWQLVDLMKELNLPKYEKLGMVEMFEDKDGRKIKKITDWTKRNDHRHHAVDALTVAFTKDVFIQFYNNKNAAWMPASKEHANITGIKARYFENGKALAPMPLAQFRAEAKRHLENLLVSIKAKNKVITSNVNRTKNKNGENRKLQQTPRGQLHLETVYGSHRQYATKIEKVNAAFDVTKIATVSKLAYRNALLKRLEAFGNDPKKAFTGKNTLEKNPLYLDENQTEMVPEKVQTVEFETVYTIRKPIDPNLSIDKVVDVKIRSVLEKRLKEYGGDAKKAFVNLDENPIWLNEAKGISIKRVSIRGISNAQSLHEKKDKDGNLILGKEGRKIPVDFVNTGNNHHVAIYKKPVLDKVGQIVLDEEGNPKYELDEVVVSFFDAVTRANLGQPIIDKDYRRSEGWQFLFSMKQNEYFVFPNEKTGFNPKEVDLLNPENYALISPNLFRVQKFAYKNYVFRHHLETTIKDTSSTLKGITWTDFRSSKGLDKIVKVRVDHIGQIVSIGEY

SEQ ID NO: 23517 - protein, 1355 aa, unidentified
  REGION 1..1355: note = Cas Enzyme sequence
MKNKKYYLGLDIGSDSVGYAVTDEEYNLLKFHGEPAWGATLFDAPASKAERRGYRTARRRLERRKQRVQLVRELFAEEIAKVDGRFYIRQQESALFREDAGDAYSIFNDPDYTDREYYAEYPTIHHLIFELMKNPAPHDVRLVYLACAWLVAHRGHFLSNISKDNMDSFRDFNLVYKSFISFFTDNGYDVPWNECDEKELGNILKKKMRVTDKKKELTDLLYGGKKPSSEATEDFPFSRAAIIGLFAGSKVRPKDLFQNSDYENLEGITLDMDDEKFINLSTELGDDYELIADMRAVYDWIVLADILGNYSCISEAKAAVYEQHRKDLRFLKDVIAKYRPEKYSEVFRAADKDNYVAYAYHTDEVSGSNLKRKDKEAFSKYVLGIVKNISPDASDKQNFDDMITRLEDRTFMPKQKDGDNRVIPQQLYAYELDAILKNAAQYLLFLNETDEDGLSVADKISSVFSFRVPYFVGPLNSNSPRAWLARKSGKIYPWNFEKMVDLDASEQNFIEQLTNTCTYIPGEPVLPKDSLLYHKFSVLNEINNLCINEKRISVELKQEIYNNVFMCRRKVTRKQLIPYLVANGYVEKGKENTMTGVDININSNLAPQTSFKRLIESRVLSEQDVERIIERASYSEDKTRLAAWLKREYPNVNDADRKYICSLRIHDFGRLSRRFLSGVEGVRKETGEVMTVISALWETQYNLMEIVADADRFTFKDELKTIRDDYYSEHPQTLDSRLDDMYVSDAVRRPIYRTLDIIKDVVKAFGEPEKIFVETTRDASGKKKGERTTSRKEQILELYKKCGSEDVRLLQEQLEAMGEAANTKLQSEKLFLYYMQLGRCMYTNQPIKLEALGTKLYDIDHIYPQCFVKDDSIINNKVLVLSEANGAKGNVYPINSDIRKKMHGIWESYKAHGLISEEKFKRLTRTTPFTEEEKYNFINRQLTETSQSTKAVATLLNEFYPDTEIVYSKAGPVSDFRKEFEIYKSRLFNDLHHAVDAYLNIVVGNVYHMKFTRRWFNVNSNYSMKAKTIFTHPVICGGQTVWDGAHMLEKVKTTAAKNNAHITKFATFKNGGLFDQNPISAKEGLTPLKKGLPTEKYGGYNKAGSMFFIPVRYRVGKKTDIIIMPVELLYGKKFLEDAAFAKEYTFDRLGRLLKKTVDEFSFPLGMRPWKVNTMLSLDGFRVCITGGANGGKNIITQTLTQFAASKDWAFYLKKLEEFNKKNSKNPNHIYDEKYDKISAEKNLELYDLYIDKLENSIFSKRVNCPTEILKKGRDKFIALGIKEQAQALLNIHQVFGRISSGCDLSAVGGTSRSAATIGLSSMVSNWKKRYKDVRIIDSSASGLWEKRSCNLLDLL

SEQ ID NO: 23518 - protein, 1362 aa, unidentified
  REGION 1..1362: note = Cas Enzyme sequence
MLNDFTQADGSAKKIPYDWTLFYLRKKALTQKIKKEELAWILLNFNQKRGYHQLREEETEKPTSKTRLYFDSQTITDIVDTGETYKGLKIFTLTLANGEKGKWYGKNIPDWKGQKKDIIVSIDLDKNGNDKCDESGEPIRRFKIPTEQEWEEQWGLVKAKTEKDLNTSGKKVGTYIYDTLLQAPDQKIRGKLIRTIERKYYKEELYQILTTQEKFHPELQDKNLLQACIEELYPSNEAHRNTISKYSMSKLLVEDVIFYQRPLKSKKSLISDCPYEEHTYVDKETGEIHTVPVKCIAKSHPLFQEFRLWQFLSNLRIYQKEGTLNGKLTTDIDVTNEFLKNADDYVNLFDWLNQKKEIKQDAFFKYPAFGLKKNAANYRWNYVEDKTYPCNETHSRILFHWVKTDIDQSLLTIDLEEKLWHILYSISDKNELQKALQHFADKNKLGHKFVDTFQQIPPFKKDYGSYSAKAIKRLLPLMRMGKYWHPESIDNTTLTHIHQILNGEKDEVTASRIKGKAIHLDNLSSFQGLPTWLACYIVYNRHSEIKNITKWQQPSDIDAYLQSFKQHSLHNPIVEQIIMETLRTVRDIWKQIGHIDEIHVELGREMKNPADKRKKLTQQIQENENTNLRIKALLTEFVNPEFEIENVRPHSPSQQDLLRIYEEEVLNESAKNMPEDIATILKKFNETDAKKRPSTSDVLRYKCWLEQKYRSPYTGAMIPLGKLFTPAYEIEHIIPQSRYFDDSFTNKVICEAEVNKLKGNMLGYEFIKNNSGKIVELGFGQKVKIQTVEDYELFVKEHYSYNPVKMKKLLMEDIPEQFIQRQLNDSRYISKFIKSLLSNIVREEGESEATSKNIIVCTGGVTDRLKKDWGVNDVWNKIILPRFLRLNEITNSNLFTTTNTNNKIIPTMPLALQKGFNKKRIDHRHHAMDAIVIACANRNIVNYLSNESASKNAKISRLDLRQILCTRTKPDTFGNYQWIINKPWETFTQDVHTILENMIVSFKQNLRIINKTTNHYFRYQNGKKVQCVQETGDCWAIRKPMHKETVYGEINLRKITTVPLKSALENPQRIVEKDLKKKIKELLQQGLNEKQIKKYFEENKDTWQDVNLKKIQFYSFTKEGKERFFASRESLDTSFNNKKIEEKVADTGIQQILLHHLEQNNNDPNQAFSPEGIEWMNKNIISLNNGKWHQPIYKVRTYEQAEKFTVGQTGNKSEKFVEAAKGTNLFFAIYETEHKRSFASVSLNVVIERLKKGLSLAPENSKGNLPKYVLSPNDLVYVPTQEEIKCGHINQPIQKDRIYKMVSCTEGECHFIPYFVANPIIQTIELGSNNKAQKSWQNEMIKEICIPIKIDRLGNITSSISL

SEQ ID NO: 23519 - protein, 1550 aa, unidentified
  REGION 1..1550: note = Cas Enzyme sequence
MKNILGLDLGSNSIGWAIVKALKNEDGKEILQSIDLAGSRIIPMDQATLGNFENGNSVSQTRERTGYRSARRLRERYLLRRERLLRVLNCMGFLPEHYSQNIDKYGKFFLDNEVKLSWKKDKMGKNEFIFLDSFNEMLEDFRHSQPQLLLDGRKVPYDWTIYYLRKKALTEKISKEELAWILLNFNQKRGYFQLRGEDEEVQGKKIEFYALKVVRVEDTGEKKGKDTWYNVYLESGLGDTDDYWVYRRASSVPIDEWEGQVKEFIVTTTLDNNGSPQIDKEGKVKRSFSIPKPEDWMLVKKKTEVDIKSSGKTVGTYIYDTLLQKPDQKIKGKLIRTIERENYTNELSLILENQKKFHLELQDRELYHQCIELLYCKNEAHKRVIGTWDFTSLFIKDILFYQRPLKSKKALIDNCPYEESFYIENGEKKSKPRKCIAKSHPLFQEFRIWQFISNLRIYQKVKEVDGKLQFNVDVTSDFLRDESAYVELFKWLNERAEVSQEDLLKHLGLKKTKTEDTVSLYRWNYVEDKKYPGNKTRSSILKKLLNDEKEALSEDIELKIWHLLYSVSAQSEIDKALSSKNVSTKGIYSGLSVYFSDETIQKIKNVKLESGYGSYSAKAIGKLLPLMRRGKYWNLESIDNHTKERIEKILNGECDETIRARTREKSISLTDISQFKGLPLWLACYIVYDRHSELKTIKKWNGPEDIDKFLKEFKQHTLRNPIVEQVIMETLRVVRDIWRRVGSIDEIHIEMGRDMKQTAQERARRSAIISRNENDNLRIKALLHEFMNPELGIENVRPYSPAQQEILRIYEDGVLSSVSEIEDEIKNILKKFNESEEGKRPTKNEIIRYKCWLEQKYRSPYTGEIIPLGKLFTPAYQIEHIIPQARFFDDSFTNKVICEAEVNAKKGDLLGYEFVKEKGGEIVELSGGRNVRIFSVEEYEDFVKEHYKSNKQKMQRLLAEDIPTEFSHRQLNDSRYISKYIRNLLSNIVREDDEQESVSKNVISCNGAITDRLKKDWGVNDVWNHIILPRFVRLEEIRADNGEKFTAFNQEGHLIPSMPLMYQKGFNKKRIDHRHHAMDAIVIACTTRDHVNLLNNECSNTQNNANKHQLSRKLRRYENVSYKQDGKLKEREVPKEFLKPWEEFTRDVEFALKNVIVSFRQNLRVLNKTVNYFQHWKDNSSEKEWKEQKSADHWSIRKPLHKETVSGEVFLWRTRFVSLREALTNPKRIVEKDLRSKILELQRKGYDTKRIKKYFEDNKDVWQDVNLSKIEVRYYSREIVDPQTELPKNRYFATRFGNDLISLFSGVSNFEKAKKIIESITDTGIQKILFRHLENKGNDPVLAFSPEGIDEMNRTIKTLNNGKDHKPIYKVRIYECSTMKFPLGSVGNKSKKFVEAAKGTNLYFAVYEKEVENDRGECHKERTFKTIPLNDVIRNLKQGLSIAPNDENGNPPAFILSPNDLVYLPTKEESETDSISQPLDRNRIYKMVSCTGYQVFFVPAFVAAPVLQKIELGSNNKSERARTDEMIKESCIPIKVDRLGMLISINGKAV

SEQ ID NO: 23520 - protein, 1504 aa, unidentified
  REGION 1..1504: note = Cas Enzyme sequence
MKNIVGFDLGTNSIGWAVVNGSVNDDGSEQLVKIQASGSRIIPMDAAMIGDFNKGNSISQTAERTRLRGVRRLSERYLLRRERLHRILDILGFLPFHFAQDLDRHGKIVKGKEPKLAWRKNEAGQFEFIFQDSFKEMLEDFKLNHPNLITDDKKVPYDWTIYYLRKKGLTSKISKEELAWILLNFNQKRGYYQLRGEEEEENKNKLVEFYALKVVAVEDSGEKKGKDIWYNVHLENGWVYRRTSNMPLDWVGKTKEFIVTTDLEKDGTPKKDKEGNVKRSFRAPKEDDWSLLKKKTEADIDQTHKTVGTYIYDTLLGNPSQKIRGRLVRTIERKYYKEELKLILDKQKEFHPELQDRALYAACVEELYTINEAHRNNIGNRDFTYLFLEDILFYQRPLKSKKSLIDNCPYEENQGLDKETGEIKSFPVKCIAKSHPLFQEFRLWQFIINLRIYRKDLAQDVDVTNELLKTEEDYVALFDWLNGKKEIDQKAFLKYPVFGLKKEIENYRWNYVQDKPYPCNETRLLMLARLEKCDISIEFLTKENEEALWHILYSVEDKNEIVKALQKFADKHDLNASFVDVFRKFPPFKKEYGSYSAKAIKKLLPLMRMGKYWSEDSIDKGTRKRMDKIITGEYDEKIENRVREKVIHLADVSDFRGLPLWLVCYIVYGRHSEAKEITQWKSPADIDSYLKSFKQHSLRNPIVEQIIIETLRVVRDIWKQVGNIDEIHVELGREMKNPADKRKKMTQQMSENENTNLRIKYLLTEFLNPEYEVENVRPYSPSQQDILRIYEEGVLNSVSDLPEEISDILKKFTETDLKKRPSRSEILRYKLWLEQKYRSPYTGEVIPLGKLFTPAYEIEHVIPQSCYFDDSFSNKVICEAEVNKLKSNLLGHEFIVKHHGEIVELPFGKKVRIFTVDEYEQFVKDNYSRTRGKMKKLLMDDIPEEFVARQLNDSRYISKVVKSLLSNIVREKGEEEAISKNVIPCTGGVTDRLKKDWGINEVWNKIILPRFQRLNELTGTNKFTTKNVGIQEIPTMPLELQKGFNKKRIDHRHHAMDAIIIACANRNIINYLNNESATAKAELSRYDLQKLLCDKAKTDNNGNYKWVIRKPWASFTQDTYLALENIIVSFKQNLRVINKATNRFLHYNEEGKKIFVKQGKGDNWAIRKSMHKDTVFGEVNLRRIKTVALNEAMKNPQSIVVKDFKRKLLELWNLGFDAKRIKKYFEDNRETWSDINLSKIEVYYFSKDTKDRFFATRKPLDTSFDRKKIENNITDTGIQKILLRHLELKDNNPDIAFSPDGIDEMNRNIIQLNNGKYHQPIIKVRWYEQADKFAVGQTGNKSSKFVEAAKGTNLFFAVYESNILDKKTNTIIKKRNYATIPLNVAIERQKQGLPVAPEDENGNDPIFVLSPNDLVYLPTDDELANGIIAQPLDRGRIYKMVSSSGEQCFFIKHIVANVLVDKFEFSPLNKMERALTGEMIKMICIPIKVDRLGNVLESSSSHKK

SEQ ID NO: 23521 - protein, 1510 aa, unidentified
  REGION 1..1510: note = Cas Enzyme sequence
MKKILGLDLGTNSIGWAVVCHSDTDGQTERKWIEMAGSRIIPMDAAILGDFDKGNSKSQTSERTGFRGIRRLRERVLLRRERLHKVLKLIGFLPQHYIDSLDFSNHSGKFQLGTEVKLPWRKNEIGKYEFLFQNSFNEMLADFAKKQPELVAMGRKVPYDWTIYYLRKKALSEKITKEELAWILLNFNQKRGYYQLRGEEEEEKKNRLEDFYALKVVEVEQTDDKKGKDIWYNVHLENGWIYRRSSNVPLDWKDKIKEFIVTTELNEDGTPKVDKDGCVKRSFRMPKEDDWKLLKKKTEADIERSHKTIGCYIYDTLLQSPQQKIKGKLVRTIERKFYKDELKLILDKQQAFHPELQDRELYKACLDVLYPMNVAHKNNVANRGFVYLFMEDILFYQRPLKSKKSLIDNCPYEENQYIDVTTGEIKKAPIKCIAKSHPLYQEFRLWQFIANIRIYQKEKKVDGKLLTDIDVTTEYLSSKDDYVALYEWLCVRKEIEQKTFLKYPAFGLKKEIENYRWNYVEGKSYPCNETRSLILHYLEKAGISSTFLSTKIEESLWHILYSVEDRIELETALRTFASKYQLSCNFVEVFKKFPPFKKEYGAYSAKAIKRLLPLMRMGKYWKVDAIDGNTAERIEKILSGECDEKILNKVREKTIHLSETSDFQGLPLWLACYVVYNRHSEGKEVAKWKSPEDIDIYLKSFKQHSLRNPIVEQVITETLRVVRDIWKRVEQIDEIHVELGREMKNPSEKRRQMTERMLENENANIRIKALLTEFMNPEYEMENVRPYSPSQQEILRIYEDTVLNGAGDIPEDIEIILKKFKENDIKKRPGKSDFLRYKLWLEQQYRSPYTGEIIPLGKLFTTAYEIEHVIPQSRYFDDSFSNKVICESEVNKLKDNMLGYEFIKKHAGEIVELGFGKSVKIFSVEAYERFVGENYYKAGSKKSKLLMDDIPEKFIERQLNDSRYISRVVKGLLSNVVREEDANGEYESEAISKNVIVCSGSVTDRLKKDWGVNDVWNNIVYSRFERLNRLTESQQFGHWENREGKRFFQTELPLEYQKGFSKKRIDHRHHAMDAIIIACATRNHVNYLSNESASKHARIARYDLQRMLCDKSKADGGGNYKWIIQKPWATFTQDVYRTLLDIIVSFKQNLRVINKMTNYYQAYDDAGKKVFKKQKKGDSWAIRKSMHKDTVFGQVNLRKIKEVRLSVALESPEKIVDKKIKEKVLQLFAYQYDKKKIEKYFKENASLWKEVNLAKIPVYYFTDESSELLVAVRKNLDTGFTEKKIRESVTDTGIQKILLNHLSNKGDKPELAFSPDGIDEMNRSLVILNGGKPHQPIYKVRVCEPLGNKFKVGTNGNKAAKYVEAAKGTNLFFAIYETDAGKRTYETIPLNVVIEREKMGWLPVPEKNNKGEKLLFWLSPNDLVYLPTEEELMSRILSDKLDRSRIYKIVSFTGNRLYAIPYNVSNMIWDKNEYTQLNKVESTDMKESIKEICMPINVDRLGHITEIIIK

SEQ ID NO: 23522 - protein, 1495 aa, unidentified
  REGION 1..1495: note = Cas Enzyme sequence
MKRILGLDLGTNSIGWAVLLAEIDENGNVQLQCIEAAGSRIIPMDAAMLGDFDRGNSISQTAERTRLRGIRHLLERCLLRRERLHRVLDILGFLPSHYSQALNRYGQIKEGEEPKLAWRKNEIGKYEFLFIDSFNEMLEDFRVTHPELLGKKVPYDWTIYYLRKKALTQKISKEELAWVLLNFNQKRGYYQLRGEEEDVVNNKKVEYVALKVVAVEDSGEKKGKDSWYNVHLENGWVYRRTSSIPLDWVGKTKEFIVTTDINDDGSPKKDKEGNVKRSFRSPKEDDWTLIKERTQADIEHTGKTVGAYIYDSILQNPNQKVRGKLVRTIEREFYKKELKRILERQVEFHSELRDDDLYKACIEELYQSNEAYRQNIANRDFTYLFVDDILFYQRPLKTKKSLIADCPYEGHVVVDKVTGEEKHYGIKCIAKSHPLYQEFRLWQFLSNLRIYKKELANDVDVTRDFLKTEEDYVALFDWLNDKKNVNQKSLLKYPSFGLKKNADNYRWNYVEDKDYPCNETRAQILSYLAKAGIQSDFMTTEIEEKLWHILYSVDDKEELEKALRKLANKYNLDESFVDAFKKFPPFKKEYGAYSAKAIKKLLPLMRMGRYWTESNIDLKTCERIDKIITGEYDEKIKDRVREKAMNLTDISSFRGLPLWLACYVVYDRHSEAKDITKWETPDDLQKYLDSFKQHSLRNPIVEQVVTETLRTVRDIWKRYGHIDEIHVELGREMKNPADKRKQMTQQIADNENTNLRIKALLMEFTNPEFEIENVRPYSPSQQDILRIYEDGVLNSVDNIPEDIANVLKKFKENDAKKRPTRNEVLRYKLWLEQKYRSPYTGQPIPLAKLFTPAYEIEHVIPQSRYFDDSFSNKIICESEVNKLKDNLLGYEFIKKHRGEKVELPFGKVVTIFTEGEYEQFVKDHYGQNRAKMRKLMMDTIPEDFIARQSNDSRYISKVVKGLLSNIVREEGEEEAISKNVIVCTGGVTDRLKKDWGINDVWNRIILPRFQRLNEMTGTVQFTTKTTNGHEVPSMPLELQKGFNKKRIDHRHHAMDAIVIACASRNIVNYLNNESASRKSKISRYDLQILLCDKVKTDDKGNYKWMIKKPWHTFTQDVYRVLNDIVVSFKQNLRVVNKATNMYVHFENGKKKLVKQEGINWAIRKSMHKDTVHGEVNLRKIKPVKLNEAIKNPSRIVVKEFKEKLYLLLKQGYDAKKIKKYFEENKDVWQDINLSKIEVYYFTKETRDRFFATRKPLDTSFNKKKIEESVTDTGVQKILLRHLELKDNNPELAFSPDGIDEMNRNIISLNNGKYHQPIIKVRIYEKADKFAIGQKGNKSSKFVEAAKGTNLYFAVYETETLNEDTGKVIKKRSYATIPLNVVMERLKQGLLPAPADENGNEPKFFLSPNDLVYVPTIDEIDLNIKEVSDCTRIYKFVSCTGNEAHFVPMFVASPIIDTKELGSNNKAQRAWTDEMIKEICFPVKVGRLGNITKIGC

SEQ ID NO: 23523 - protein, 1433 aa, unidentified; identical to SEQ ID NO: 15336
  REGION 1..1433: note = Cas Enzyme sequence

SEQ ID NO: 23524 - protein, 1510 aa, unidentified
  REGION 1..1510: note = Cas Enzyme sequence
MKRILGLDLGINSIGWALVDSEEHRILGMGSRIIPMDQSVLDTFSGGNPVETQTAARTAYRGTRRLRERALLRRERLIRVLNMMKFLPEHYASQIDFEKRLGQFFDEKEPKLAWKQNDEGRFEFIFQQSFNEMIEEFKNKGVVREDKKIPYDWTIYYLRKKALSQEIEKEELAWILLNFNQKRGYYQLRGEEEEENPNKLVEYYSLKIVDVIADEKPNSKGDIWYSLHLENGWIYRRSSKIPLFGWKDKTRDFIVTTDLNDDGTVKKDKEGIEKRSFRAPSENDWVLLKKKTESDIEKSHKTVGTYVYETLLQNPMQKVCGKLVRTIERKFYKDELKQILEKQREFHPELRDEDLYNDCVRELYRSNETYQFILSKRDFVHLFLDDILFYQRPLRSQRSAIGDCILEFKTYKDKDGNNIKEYLKVISKSNPLYQEFRIWQWLYNLKIYRKEDDEDVTLQFIANIEDKEQLFDFLSNRKSIEQKPLLEYLIKAKGLKKQVKTEAYRWNYVEDKIYPCSETKTMISTRLAKVENVPEDFLTKEIEQKLWHIIYSVTDKNEFEKALRTFAGKYDLDITSFVDNFKKIPPFKNEYGSFSEKAIKKLLSLMRLGKYWKWSDIDNNIQNRISKIIVGEYDEEIKDIVREKSIALTNENDFQGLQLWLAQYLVYGRHSEADIAGKWHSVADLEKYLNEFKQHSLRNPIVEQIITETLRVVRDIWQKYGQGAENFFSEIHVELGRDMKNTADERKKIANVVTENENTNLRIKALLMELKNNSDGKLEVENVRPYSPMQQDILKIYEEYAISTRLDNEKDEKVKEDIEKISRVAQPTTTELQRYKLWLEQKYCSPYTGKVIPLGKLFTEEYQIEHIIPKSRYYDDSFSNKVICEAAVNKLKDKYLGLEFIKNYHGQIVETGFGQKVTIFDEEAYQNFVKQHYAYNRSKRTKLLLEEIPEKMIERQMNDTRYISKFVLPLLSNLVRAEENDNGVNSKNVLPVNGKITTMLKQDWGLNDVWNDLILPRFVRMNELAKTIAFTSWNEQHQKYLPTVPLELSKGFQKKRIDHRHHAMDALVIACATRDHVNLLNNKHANTDTIRYDLQRKLRLFERVIYIDPQTKNNVTKDIPKEFKKPWDNFTVDARNELEKIIVSFKQNLRIINKATNIYTKYENGKKIKVSQKGLNWAIRKPLHKETVFAKVSLRKRKTVRLSEALKDWKKIVDKKLKQEIKRLTCQYGKFDVDTILRYFKDRKYQFGEVDVSKVEIYYFDEENAAVRKNVDTSFTEKFIQGSVTDTGIQKILLNHLEAKGNKVEIAFSPEGIEEMNKNIIQLNEGKLHLPIFKVRVYETIGNKFSVGVKGNKKDKYVEAAKGTNLFFAIYVDENGIRSYETIPLNIVIERLKQGLSVVPEKNRKEHSLLFYLSPNDLVYVPIEDERENIHAVNLDQLNNEQRKRIYKMVSCTGSECHFVPYYVASPIVNKVEYSSLNKIGRSLTGEMIKDVCIKLKVDRLGNIKGISGL

SEQ ID NO: 23525 - protein, 986 aa, unidentified
  REGION 1..986: note = Cas Enzyme sequence
CNETRSLMLARLEKCDISIEFLTKENEEALWHILYSVEDKNEIVKALQKFADKHDLNASFVDVFQKFPPFKKEYGSYSAKAIKKLLPLMRMGKYWSENSIDKGTRERIDKIITGEYDEKIENRVREKAIHLADVSDFKGLPLWLVCYIVYGRHSEAKEIIQWKSPADIDSYLRSFKQHSLRNPIVEQIIIETLRVVRDIWKQVGNIDEIHVELGREMKNPADKRKKMTQQMSENENTNLRIKYLLTEFLNPEYEVENVRPYSPSQQDILRIYEEGVLNSVSDLPEEISDILKKFTETDLKKRPSRSEVLRYKLWLEQKYRSPYTGEVIPLGKLFTPAYEIEHVIPQSCYFDDSFSNKVICEAEVNKLKSNLLGHEFIVKHHGEIVELPFGKKVRIFTVDEYEQFVKDNYSRTRSKMKKLLMDDIPEEFVARQLNDSRYISKVVKSLLSNIVREKGEEEAISKNVIPCTGGVTDRLKKDWGINEVWNKIILPRFQRLNELTGTNKFTTKNVGIQEIPTMPLELQKGFNKKRIDHRHHAMDAIIIACANRNIINYLNNESATAKAELSRYDLQKLLCDKAKTDNNGNYKWVIRKPWASFTQDTYLALENIIVSFKQNLRVINKATNRFLHYNEEGKKIFVKQGKGDNWAIRKSMHKDTVFGEVNLRRIKTVALNEAMKNPQSIVVKDFKRKLLELWNLGFDAKRIKKYFEDNRETWSDINLSKIEVYYFSKDTKDRFFATRKPLDTSFDRKKIENNITDTGIQKILLRHLELKDNNPDIAFSPDGIDEMNRNIIQLNNGKYHQPIIKVRWYEQADKFAVGQTGNKSSKFVEAAKGTNLFFAVYESNILDKKTNTIIKKRNYATIPLNVAIERQKQGLPVAPEDENGNDPIFVLSPNDLVYLPTDDELANGIIAQPLDRGRIYKMVSSSGEQCFFIKHIVANVLVDKFEFSPLNKMERALTGEMIKMICIPIKVDRLGNVLESSSSHKK

SEQ ID NO: 23526 - protein, 1153 aa, unidentified
  REGION 1..1153: note = Cas Enzyme sequence
MKNILGLDLGSSSIGWSVIRENSEERELVAMGSRVVSLTAAELSSFTQGNGVSINSQMTQKRTQRKGYDRYQLRRTLLRNKLDTLGMLPDDSLSYLPKLQLWGLRAKAVTQRIELNELGRVLLHLNQKRGYKSIKSDFSGDKKITDYVKTVKTRYDELKEMRLTIGELFFRRLTENAFFRCKEQVYPRQAYVEEFDCIMNCQRKFYPDILTDETIRCIRDEIIYYQRPLKSCKYLVSRCEFEKRFYLNAAGKKTEAGPKVAPRTSPLFQVCRLWESINNIVVKDRRNEIVFISAEQRAALFDFLNTHEKLKGSDLLKLLGLSKTYGYRLGEQFKTGIQGNKTRVEIERALGNYPDKKRLLQFNLQEESSSMVNTETGEIIPMISLSFEQEPLYRLWHVLYSIDDREQLQSVLRQKFGIDDDEVLERLSAIDLVKAGFGNKSSKAIRRILPFLQLGMNYAEACEAAGYNHSNNYTKAENEARALLDRLPAIKKNELRQPVVEKILNQMVNVVNALMEKYGRFDEIRVELARELKQSKEERSNTYKSINKNQRENEQIAKRIVEYGVPTRSRIQKYKMWEESKHCCIYCGQPVDVGDFLRGFDVEVEHIIPKSLYFDDSFANKVCSCRSCNKEKNNRTAYDYMKSKGEKALSDYVERVNTMYTNNQISKTKLQNLLTPVDKISTDFIDRQLRESQYIARKAKEILTSICYNVTATSGSVTSFLRHVWGWDTVLHDLNFDRYKKAGLTEVIEVNHRGSVIRREQIKDWSKRFDHRHHAIDALTIACTKQAYIQRLNNLRAEEGPDFNKMSLERYIQSQPHFSVAQVREAVDRILVSFRAGKRAVTPGKRYIRKNRKRISVQSVLIPRGALSEESVYGVIHVWEKDEQGHVIQKQRAVMKYPITSINREMLDKEKVVDKRIHRILSGRLAQYNDNPKEAFAKPVYIDKECRIPIRTVRCFAKPAINTLVPLKKDDKGNPVAWVNPGNNHHVAIYRDEDGKYKERTVTFWEAVDRCRVGIPAIVTQPDTIWDNILQRNDISENVLESLPDVKWQFVLSLQQNEMFILGMNEEDYRYAMDQQDYALLNKYLYRVQKLSKGDYNFRYHTETSVEDKYDGKLNLELSRQMGKLKRVSIKSLLELNPHKVHISVLGEIKEIS

SEQ ID NO: 23527 - protein, 1550 aa, unidentified
  REGION 1..1550: note = Cas Enzyme sequence
MKNILGLDLGSNSIGWAIVKALKNEDGKEILQSIDLAGSRIIPMDQATLGNFENGNSVSQTRERTGYRSARRLRERYLLRRERLLRVLNCMGFLPEHYSQNIDKYGKFFLDNEVKLSWKKDKMGKNEFIFLDSFNEMLEDFRHSQPQLLLDGRKVPYDWTIYYLRKKALTEKISKEELAWILLNFNQKRGYFQLRGEDEEVQGKKIEFYALKVVRVEDTGEKKGKDTWYNVYLESGLGDTDDYWVYRRASSVPIDEWEGQVKEFIVTTTLDNNGSPQVDKEGKVKRSFSIPKPEDWMLVKKKTEVDIKSSGKTVGTYIYDTLLQKPDQKIKGKLIRTIERENYTNELSLILENQKKFHLELQDRELYHQCIELLYCKNEAHKRVIGTWDFTSLFIKDILFYQRPLKSKKALIDNCPYEESFYIENGEKKSKPRKCIAKSHPLFQEFRIWQFISNLRIYQKVKEVDGKLQFNVDVTSDFLRDESAYVELFKWLNERAEVSQEDLLKHLGLKKTKTEDTVSLYRWNYVEDKKYPGNKTRSSILKKLLNDEKEALSEDIELKIWHLLYSVSVQSEIDKALSSKNVSTKGIYSGLSVYFSDETIQKIKNVKLESGYGSYSAKAIGKLLPLMRRGKYWNLESIDNHTKERIEKILNGECDETIRARTREKSISLTDISQFKGLPLWLACYIVYDRHSELKTIKKWNGPEDIDKFLKEFKQHTLRNPIVEQVIMETLRVVRDIWRRVGSIDEIHIEMGRDMKQTAQERARRSAIISRNENDNLRIKALLHEFMNPELGIENVRPYSPAQQEILRIYEDGVLSSVSEIEDEIKNILKKFNESEEGKRPTKNEIIRYKCWLEQKYRSPYTGEIIPLGKLFTPAYQIEHIIPQARFFDDSFTNKVICEAEVNAKKGDLLGYEFVKEKGGEIVELSGGRNVRIFSVEEYEDFVKEHYKSNKQKMQRLLAEDIPTEFSHRQLNDSRYISKYIRNLLSNIVREDDEQESVSKNVISCNGAITDRLKKDWGVNDVWNHIILPRFVRLEEIRADNGEKFTAFNQEGHRIPSMPLIHQKGFNKKRIDHRHHAMDAIVIACTTRDHVNLLNNECSNPQNNVNRHQLSRKLRRYENVSYKQDGKLKEREVPKEFLKPWEGFTRDVEFALKNVIVSFRQNLRVLNKTVNYFQHWKDNSSEKEWKEQKSADHWSIRKPLHQETVLGEVFLWRTRFVSLREALTKPKRIVEKDLRSKILELQRKGYDIERIKKYFEDNKDVWQDVNLSKIEVRYYSREIVDPRTGLPKNRYFATRFGNDLISLFSGVSNFENAKKIIKSITDTGIQKILFRHLENKGNDPVLAFSPEGIDEMNRTIKTLNNGKDHKPIYKVRIYECSTMKFPLGSVGNKSKKFVEAAKGTNLYFAVYEKEVENDRGECHKERAFKTIPLNDVIRNLKQGLSIAPNDENGNPPAFILSPNDLVYLPTKEELETGSISQPLDRNRIYKMVSCTGNVAHFIPAFIAIPILQTIELGSKNKAQKAWTGEMIKESCIPIKVDRLGILISINGRAV

SEQ ID NO: 23528 - protein, 1509 aa, unidentified
  REGION 1..1509: note = Cas Enzyme sequence
MKTILGLDLGTNSVGWAVINSVIKEQAERIWIEMAGSRIIPMDAAVLGDFDKGNSISQTSERTRLRGARRLRERQLLRRERLHKVLNILGFLPNHYLEYIDFEKHPGKFLADAEPKLAWVKDEQGKYTFLFQAAFDEMLADFAIHQPSLVSGDKKIPYDWTIYYLRKKALTEMISKEELAWILLNFNQKRGYYQLRGEEEEDNAGKSVEFYALKVLTVEATDEKKGRDVWYNVHLENGWIYRRSSSVPLDWEGQVKEFIVTTDLNPDGTPKLDKYGEVKRSFRAPNEDDWMLIKKRTEADIANTHKTVGAYIYDTLLQKPQQKIIGKLVKTVERKLYRDELSLILQKQCAFHAELQDRALYARCVEALYPSNEVRRKNIANRDFVYLLMDDILFYQRPLKTKKSLIANCPYEENEYVDRETGEIKKTPLKCIAKSHPLFQEFRLWNFLSNIRIYQKEKEINGTLHLDVDVTAEFLKTEDDYVALFDWLNSRKEIEQKTFLKYPKFGLKKEISNYRWNYVEDKQYPCNETRHAILSSLEKANVCIDFLSNEKEVALWHILYSVSDKQEIEKALRTFAAKNGLDESFVEAFKKFPPFKSEYGAYSAKAIKKMLPLMRCGKYWDVSSIDDTTKERIKKIVTGEYDERISVKVRDKVMNLSDISCFRRLPLWLACYIVYNRHSEDKEAVKWESPADIDAYLASFKQHSLRNPIVEQVITETLRVVRDIWKQVGRIDEIHIELGREMKNPADKRKRMTAQILENENANLRIKALLAEFMNPEYEIENVRPYSPSQQEILRIYEDTVLHAEDQLPEEIDAILKKFNSSKVPTKSEFLRYKLWLEQKYRSPYTGELIPLGKLFTAAYEIEHVIPQSRYFDDSFSNKVICESAVNKLKDNQLGYEFIKNHHGQKVEVGFGKSVEIFSVDSYERFVKEQYAKSAVKMKKLLMDDIPEQFIERQLNDSRYISKVIKGLLSNIVREKNDSGEYEPEAVSKNIVVCTGSVTDRLKRDWGMNDVWNSIVYPRFERLNSLTDTQSFGHWENKSGKKVFQTELPLEYQKGFSKKRIDHRHHAMDAIVIACATRNHVNYLSNESASRNAKISRYDLQRLLCDKNRTDDNGNYKWVIKKPWDTFTQDAREVLSKIVVSLKQNLRIINKTTNVYRHFDATVNRVYQKQKTGDSWAIRKPMHKDTVFGAVNLRKVKVVRLSVALDTPAMIVDKRVKNKVFELLSYKYDKKRIEKYFKENAFLWKELDLAKVAVYYFTEATTEPLVAVRKPLDSTFNEKKIKESVTDTGIQKILLNHLCTKEGKPDLAFSAEGIEEMNRNLLQLNNGKSHQPIYKVRVYEPRGNKFSVGVLGNKGTKWVEAAKGTNLFFAIYITEDGKRTYETIPLNMVIEREKQGLVPVPDRNEKGDKLLFWLSPNDLVYLPTEEEREFGRINEPIDRGRIYKMVSCTGNEGHFIPANVANPIVPVIELGSNNKAQRAWTNEMIKDICIPIKVDRLGHIIEVKYRIDE

SEQ ID NO: 23529 - protein, 1240 aa, unidentified
  REGION 1..1240: note = Cas Enzyme sequence
MINKKRGYKSSRKAKSSDEGQLIDGMAIAMDMYHNGTTPGEYVYSLLSKGKKYIPVFYRSDLLDEFDRIWDYQCAYYPDILTSQFKELVRGKSSQMTSKLFKQQYNLFTADNKEKDKRLQAYRRRADALEKCLPVEEVAAALCDVNRDVNASSGYLGAISDRSKELFFNKQTVGQYLISELDKDSHFSVKNKVFYRQDYLNEFEAIWEKQAQYHPELTLDRKKILRDVIIFYQRPLKSQKGLVACCELEKRQIEVVKDGKARMVEIGPKVCPKSSPLFQEFKIWQVLNNLKVCDKATGDERFLELDEKEILFSELAIKSKLSKTEALKLLYQKPKGLDLNYDSIEGNTTQAALFEAYQTVIAMTGHGEYVFSKMSSSEVMGIVEGVFGGLGFNTSVLHFDSLLQGKNLEKQDSYRLWHLLYSYEGDNSVTGTDGLVAKVASLLRCDEEYAKVVAGVTFQPDYGSLSAKAIRRILPHMRAGNEYSLACEYAGYKHSRRSLTKEELEQKDYKDHLGLLPRNSLRNPVVEKILNQMINVVNAVVDEYGKPDEIRIEMARELKKSAREREEMTAAINKANSEHERIKEILRKEFGIQHVSRNDIVRYKLYCELKNNGYKTLYSDTYIPQEKLFSKEVDIEHILPQARLFDDSFSNKTLEYRSVNIEKSNQTAWDYVAAKWGEEGSLRYKKRVDDLLAAGVIGKSKHDKLLMKQEDIPTDFINRDLRDTQYIARKAREILEDLVPMVVSTTGAVTDRLREDWQLVDVMQELNWDKYAMKGLTEEWTDKDGRRIRRIKEWTKRNDHRHHAMDALTIAFTKHSFIQYLNNLNARGDKSGDIYAIEQKELYRDSHGKLCFVMPFEGFRSEAKRQLENILVSIKAKNKVVTRNVNKAKKGNGQQAKVQLTPRGQLHNETIYGSIRRYVTKLEKVGGNFDGEQIAKVANLRYREALQSRLDAFGGDAKKAFTGKNALDKNPLYLKDSRTEVPLKVKTVSTETLYTIRKAVAPDLNVDKVIDAKVRKVLEERLQEYGGDPKKAFVNLDENPIYLNKAKGITIKRVAITGVNNAIALHDKKDVGGHVMLDASGRKQPVDFVNTGNNHHVAIYRDAEGSLQEVVVSFYEAVARVSLGLPVIDREYRKEDGWQFLFTMKQNEYFVFPNPETGFNPQEVDLTDETNYALISPNLFRVQKFAIKDYFFRHHLETTVEDVASLRDITWKRIRATNYLNNIIKVRVNHIGRIVSVGEY

SEQ ID NO: 23530 - protein, 1535 aa, unidentified
  REGION 1..1535: note = Cas Enzyme sequence
LIIYFIFEKIVNTILVMKKIVGLDLGTNSIGWALINAYIDEYNKEHLYGIEACGSRIIPMDAAILGNFDKGNSISQTADRTSYRGIRRLRERHLLRRERLHRILDLLGFLPKHYSDSLNRYGKFLNDIECKLPWVKDETGSYKFIFQESFKEMLANFTEHHPILIANNKKVPYDWTIYYLRKKALTQKISKEELAWILLNFNQKRGYYQLRGEEEETPNKLVEYYSLKVEKVEDSGERKGKDTWYNVHLENGMIYRRTSNIPLDWEGKTKEFIVTTDLEADGSPKKDKEGNIKRSFRAPKDDDWTLIKKKTEADIDKIKMTVGAYIYDTLLQKPDQKIRGKLVRTIERKYYKNELYQILKTQSEFHEELRDKQLYIACLNELYPNNEPRRNSISTRDFCHLFIEDIIFYQRPLKSKKSLIDNCPYEENRYIDKESGEIKHASIKCIAKSHPLYQEFRLWQFIVNLRIYRKETDVDVTQELLPTEADYVTLFEWLNEKKEIDQKAFFKYPPFGFKKTTSNYRWNYVEDKPYPCNETHAQIIARLGKAHIPKAFLSKEKEETLWHILYSIEDKQEIEKALHSFANKNNLSEEFIEQFKNFPPFKKEYGSYSAKAIKKLLPLMRMGKYWSIENIDNGTRIRINKIIDGEYDENIRERVRQKAINLTDITHFRALPLWLACYLVYDRHSEVKDIVKWKTPKDIDLYLKSFKQHSLRNPIVEQVITETLRTVRDIWQQVGHIDEIHIELGREMKNPADKRARMSQQMIKNENTNLRIKALLTEFLNPEFGIENVRPYSPSQQDLLRIYEEGVLNSILELPEDIGIILGKFNQTDTLKRPTRSEILRYKLWLEQKYRSPYTGEMIPLSKLFTPAYEIEHIIPQSRYFDDSLSNKVICESEINKLKDRSLGYEFIKNHHGEKVELAFDKPVEVLSVEAYEKLVHESYSHNRSKMKKLLMEDIPDQFIERQLNDSRYISKVVKSLLSNIVREENEQEAISKNVIPCTGGITDRLKKDWGINDVWNKIVLPRFIRLNELTESTRFTSINTNNTMIPSMPLELQKGFNKKRIDHRHHAMDAIIIACANRNIVNYLNNVSASKNTKITRRDLQTLLCHKDKTDNNGNYKWVIDKPWETFTQDTLTALQKITVSFKQNLRVINKTTNHYQHYENGKKIVSNQSKGDSWAIRKSMHKETVHGEVNLRMIKTVSFNEALKKPQAIVEMDLKKILAMLELGYDTKRIKNYFEENKDTWQDINPPKIKVYYFTKETKDRYFAVRKPIDTSFDKKKIKESITDTGIQQIMLRHLETKDNDPTLAFSPDGIDEMNRNILILNKGKKHQPIYKVRVYEKAEKFTVGQKGNKRTKFVEAAKGTNLFFAIYETEEIDKDTKKVIRKRSYSTIPLNVVIERQKQGLSSAPEDENGNLPKYILSPNDLVYVPTQEEINKGEVVMPIDRDRIYKMVDSSGITANFIPASTANLIFALPKATAEIYCNGENCIQNEYGIGSPQSKNQKAITGEMVKEICFPIKVDRLGNIIQVGLCILTN

SEQ ID NO: 23531 - protein, 1304 aa, unidentified
  REGION 1..1304: note = Cas Enzyme sequence
MIINSKVIDVVKAEKDKKYEKYWYNVLLENGLLYRAAFYNDISFWKGHTKEFVLKTIKLKSGGTKQELSFLPSFDEIEKMEKKQKDKMYFKIKLKTEADIDQAHKTVGTYIYDTLLGNPSQKIRGRLVRTIERKYYKEELKLILDKQKEFHPELQDRALYAACVEELYTINEAHRNNIGNRDFTYLFLEDILFYQRPLKSKKSLIDNCPYEENQGLDKETGEIKSFPVKCIAKSHPLFQEFRLWQFIINLRIYRKDLAQDVDVTNELLKTEEDYVALFDWLNGKKEIDQKAFLKYPVFGLKKEIENYRWNYVQDKPYPCNETRSLMLARLEKCDISIEFLTKENEEALWHILYSVEDKNEIVKALQKFADKHDLNASFVDVFQKFPPFKNEYGSYSAKAIKKLLPLMRMGKYWSENSIDKGTRERIDKIITGEYDEKIENRVREKAIHLADVSDFKGLPLWLVCYIVYGRHSEAKEITQWKSPADIDSYLKSFKQHSLRNPIVEQIIIETLRVVRDIWKQVGNIDEIHVELGREMKNPADKRKKMTQQMSENENTNLRIKYLLTEFLNPEYEVENVRPYSPSQQDILRIYEEGVLNSVSDLPEEISDILKKFTETDLKKGPSRSEILRYKLWLEQKYRSPYTGEVIPLGKLFTPAYEIEHVIPQSCYFDDSFSNKVICEAEVNKLKSNLLGHEFIVKHHGEIVELPFGKKVRIFTVDEYEQFVKDNYSRTRSKMKKLLMDDIPEEFVTRQLNDSRYISKVVKSLLSNIVREKGEEEAISKNVIPCTGGVTDRLKKDWGINEVWNKIILPRFQRLNELTGTNKFTTKNVGIQEIPTMPLELQKGFNKKRIDHRHHAMDAIIIACANRNIINYLNNESATAKAELSRYDLQKMLCDKAKTDNNGNYKWVIRKPWASFTQDTYLALENIIVSFKQNLRVINKATNRFLHYNEEGKKIFVKQGKGDNWAIRKSMHKDTVFGEVNLRRIKTVALNEAMKNPQSIVVKDFKRKLLELWNLGFDAKRIKKYFEDNRETWSDINLSKIEVYYFSKDTKDRFFATRKPLDTSFDRKKIENNITDTGIQKILLRHLELKDNNPDIAFSPDGIDEMNRNIIQLNNGKYHQPIIKIRWYEQADKFAVGQTGNKFSKFVEAAKGTNLFFAVYESNILDKKTNTIIKKRNYATIPLNVAIERQKQGLPVAPEDENGNDPIFVLSPNDLVYLPTDDELANGIIAQPLDRGRIYKMVSCTGNEGHFIPARIANPILQTIELGSNNKAQKAWTDEMIKEICMPIKVDRLGNVLESSSSYKK

SEQ ID NO: 23532 - protein, 1433 aa, unidentified
  REGION 1..1433: note = Cas Enzyme sequence
MKKILGLDLGCNSIGWALVNEAENTEEISSIIKLGVRVNPLTVDEMQNFEKGKSITTNADRTLKRSMRRNLQRYKLRRDTLIEVLKEHGFITDSTLLSEHGNKTTFETYRLRAKAAVEEISLEKFARVLLMINKKRGYKSSRKAKGSEDGVLIDGMDVARKLYEEGLTPGELCLQILEAGKKNLPDFYRSDLQNEFDRIWNFQKQFNPELFCDAVKEEVRGKNRSQTWAILAKFFVWSEKESVWNEKEARTEERVKEYKLVGLKRDTKGNELKLENYRWRVQALSEQLNPEIVAIVLQEINGQISASSGYLGAISDRSKQLYFNRQTVGQYLMSELEKDPNVSLRNRVFYRQDYLDEFDRIWEKQTEFHEELTVELKKEIRDIIIFYQRRLKSQKGLISFCEFEKREVIVEKDGRKQNKTVGCRVIPRSHPLFQEFKIWQTLNDIEVFAWDKQSKRKKVDKSSTLFDNLEDALLVEGKRSLYQEEKELLAKELFVKESMKKAEILKLLFENFQELDLNFKQIDGNHTGFALFSAYSKMIEKYGYEPVDFKKPANEIIEKLETIFTNLGWNTELLSIDLSKEDKELERQSYFRLWHLLYSFEGDNTPTGNGKLLEKIMQLCDVEKEYAVELANVSFQEDYGSLSAKAIKKILPYLKEGNQYDVACDYAGYRHSKSSLTKDEIENKILKDKLEILPKNSLRNPVVEKILNQMVNLINTIIDTYGKPDEIHVELARELKKSAKEREELTKSIARNTREHDEIRQLLRTEFGMMNVSRNDIIRYKLYEELKDNGYKTLYSDEYIPREKIFSKEIDIEHIIPQARLFDDSLSNKTLEYRAINIEKGNKTASDFVKEKYGDDGLEKFLNRCEALFKDKKTKLRKLKMEEKDIPEGFIDRDLRNTQYISKKAFAMLNEISRRVVATTGSITDKLREDWQLVDLMKELNLPKYEKLGMVEMFEDKDGRKIKKITDWTKRNDHRHHAVDALTVAFTKDVFIQFYNNKNAAWMPASKEHANITGIKARYFENGKALAPMPLAQFRAEAKRHLENLLVSIKAKNKVITSNVNRTKNKNGENRKLQQTPRGQLHLETVYGSHRQYATKIEKVNAAFDAAKIATVSKLAYRNALLKRLEAFGNDPKKAFTGKNTLEKNPLYLDENQTEMVPEKVQTVEFETVYTIRKPIDPNLSIDKVIDVKIRSVLEKRLKEYGGDAKKAFVNLDENPIWLNEAKGISIKRVSIRGISNAQSLHEKKDKDGNLILGKEGRKIPVDFVNTGNNHHVAIYKKPVLDKVGQVVLDEEGNPKYELDEVVVSFFDAVTRANLGQPIIDKDYRRSEGWQFLFSMKQNEYFVFPNDKTGFNPKEVDLLNPENYALISPNLFRVQKFAYKNYVFRHHLETTIKDTSSTLKGITWTDFRSSKGLDKIVKVRVDHIGQIVSIGEY

SEQ ID NO: 23533 - protein, 1509 aa, unidentified; identical to SEQ ID NO: 22420
  REGION 1..1509: note = Cas Enzyme sequence

SEQ ID NO: 23534 - protein, 1433 aa, unidentified
  REGION 1..1433: note = Cas Enzyme sequence
MKTILGLDLGCNSIGWALVNEAENTEEVSSIIKLGVRVNPLTVDEMQNFEKGKSITTNADRTLKRSMRRNLQRYKLRRDTLIEVLKEHGFITDSTLLSEHGNKTTFETYRLRAKAAVEEVSLEEFARVLLMINKKRGYKSSRKTKGSEDGVLIDGMDVARKLYEEGLTPGELCLQMLEAGKKNLPDFYRSDLQNEFDRIWNFQKRFNPELFCDAVKEEVRGKNRSQTWAILAKFFVWSEKESVWNEKEARTEERVKEYKLVGLKRDTKGNELKLENYRWRVQALSEQLNPEIVAIVLQEINGQISASSGYLGAISDRSKQLYFNRQTVGQYLMSELEKDPNVSLRNRVFYRQDYLDEFDRIWERQAEFHEELTVELKKEIRDIIIFYQRRLKSQKGLISFCEFEKREVIVEKDGRKLNKTVGCRVIPRSHPLFQEFRIWQTLNDIEVFAWDKQSKRKKADKSSTLFDNTEDALLVEGKRSLYQEEKELLAKELFVKESMKKAEVLKLLFENFQELDMNFKQIDGNHTGFTLFSAYSKMIEKYGYEPVDFKKPADEIIEKLETIFTNLGWNTELLSIDLSKEDKELERQSYFRLWHLLYSFEGDNTPTGNGKLLEKIMQLCGVEKEYAVELANVSFQEDYGSLSAKAIKKILPYLKEGNQYDVACDYAGYRHSKSSLTKDEIENKILKDKLDILPKNSLRNPVVEKILNQMVNLINTIIDTYGKPDEIHVELARELKKNAKEREELTKSIARNTREHDEIRQLLRTEFGMMNVSRNDIIRYKLYEELKDNGYKTLYSNEYIPREKIFSKEIDIEHIIPQARIFDDSLSNKTLEYRAINIEKGNKTAYDFVKEKYGDDGLEKFLNRCEALFKNKKTKLRKLKMEEKDIPEGFIDRDLRNTQYISKKALAMLNEISHRVVATTGAITDKLREDWQLVDLMKELNLPKYEKLGMVEMLEDKDGRKIKKITDWTKRNDHRHHAMDALTVAFTKDVFIQYYNNKNAAWMPASKEHANIIGIKARYFENGKALAPMPLAQFRAEAKLHLENLLVSIKAKNKVITSNVNRTNKKNGENRKLQQTPRGQLHLETVYGSHRQYAMKIEKVNATFDVAKIATVSKLAYRNALLKRLEAFGNDPKKAFTGKNTLEKNPLYLDEKQTEMVPEKVQTVEFETVYTIRKPIDPNLSIDKVIDVKIRSVLEKRLKEYGGDAKKAFVNLDENPIWLNEAKGISIKRVSIRGISNAQSLHEKKDKDGNLILDKEGRKIPVDFVNTGNNHHVAVYKKPVLDKVGQIVLDEEGNPKYELDEVVVSFFDAVTRVNLGQPIIDKDYRRSEGWQFLFSMKQNEYFVFPNEKTGFNPKEVDLLNPENYALISPNLFRVQKFAYKNYVFRHHLETTIKDTSSTLKGITWTDFRSSKGLDKIVKVRVDHIGQIVSLGEY

SEQ ID NO: 23535 - protein, 1550 aa, unidentified
  REGION 1..1550: note = Cas Enzyme sequence
MKNILGLDLGSNSIGWAIVKALKNEDGKEILQSIDLAGSRIIPMDQATLGNFENGNSVSQTRERTGYRSARRLRERYLLRRERLLRVLNCMGFLPEHYSQNIDKYGKFFLDNEVKLSWKKDKMGKNEFIFLDSFNEMLEDFRHSQPQLLLDGRKVPYDWTIYYLRKKALTEKISKEELAWILLNFNQKRGYFQLRGEDEEVQGKKIEFYALKVVRVEDTGEKKGKDTWYNVYLESGLGDTDDYWVYRRASSVPIDEWEGQVKEFIVTTTLDNNGSPQIDKEGKVKRSFSIPKPEDWMLVKKKTEVDIKSSGKTVGTYIYDTLLQKPDQKIKGKLIRTIERENYTNELSLILENQKKFHLELQDRELYHQCIELLYYKNEAHKRVIGTWDFTSLFIKDILFYQRPLKSKKALIDNCPYEESFYIENGEKKSKPRKCIAKSHPLFQEFRIWQFISNLRIYQKVKEVDGKLQFNVDVTSDFLRDESAYVELFKWLNERAEVSQEDLLKHLGLKKTKTEDTVSLYRWNYVEDKKYPGNKTRSSILKKLLNDEKEALSEDIELKIWHLLYSVSAQSEIDKALSSKNVSTKGIYSGLSVYFSDETIQKIKNVKLESGYGSYSAKAIGKLLPLMRRGKYWNLESIDNHTKERIEKILNGECDETIRARTREKSISLTDISQFKGLPLWLACYIVYDRHSELKTIKKWNGPEDIDKFLKEFKQHTLRNPIVEQVIMETLRVVRDIWRRVGSIDEIHIEMGRDMKQTAQERARRSAIISRNENDNLRIKALLHEFMNPELGIENVRPYSPAQQEILRIYEDGVLSSVSEIEDEIKNILKKFNESEEGKRPTKNEIIRYKCWLEQKYRSPYTGEIIPLGKLFTPAYQIEHIIPQARFFDDSFTNKVICEAEVNAKKGDLLGYEFVKEKGGEIVELSGGRNVRIFSVEEYEAFVKEHYKSNKQKMQRLLAEDIPTEFSHRQLNDSRYISKYIRNLLSNIVREDDEQESVSKNVISCNGAITDRLKKDWGVNDVWNHIILPRFVRLEEIRADNGEKFTAFNQEGHRIPSMPLIHQKGFNKKRIDHRHHAMDAIVIACTTRDHVNLLNNECSNPQNNVNKHQLSRKLRRYENVSYKQDGKLKEREVPKEFLKPWEEFTRDVEFALKNVIVSFRQNLRVLNKTVNYFQHWKDNSSEKEWKEQKSADHWSIRKPLHKETVSGEVFLWRTRFVSLREALTNPKRIVEKDLRSKILELQRKGYDIERIKKYFEDNKDVWQDVNLSKIEVRYYSREIVDPQTELPKNRYFATRFGNDLISLFSGVSNFEKAKKIIESITDTGIQQILFRHLENKGNDPVLAFSPEGIDEMNRTIKTLNNGKDHKPIYKVRIYECSTMKFPLGSVGNKSKKFVEAAKGTNLYFAVYEKEVENDRGECHKERAFKTIPLNDVIRNLKQGLSIAPNDENGNPPAFILSPNDLVYLPTKEESETGSISQPLDRNRIYKMISCTGNEAHFIPAFIATPVLKKIEFGINNKAQKAWTGEMIKESCIPIKVDRLGILISINGRAV

SEQ ID NO: 23536 - protein, 1509 aa, unidentified
  REGION 1..1509: note = Cas Enzyme sequence
MKTILGLDLGTNSVGWAVINSVIKEQAERIWIETAGSRIIPMDAAVLGDFDKGNSISQTSERTRLRGARRLRERQLLRRERLHKVLNILGFLPNHYLEYIDFEKHPGKFLADAEPKLAWVKDEQGKYTFLFQAAFDEMLADFAIHQPSLVSGDKKIPYDWTIYYLRKKALTEMISKEELAWILLNFNQKRGYYQLRGEEEEDNAGKSVEFYALKVLTVEATDEKKGRDVWYNVHLENGWIYRRSSSVPLDWEGQVKEFIVTTDLNPDGTPKLDKYGEVKRSFRAPKEDDWMLIKKRTEADIANTHKTVGAYIYDTLLQKPQQKIIGKLVKTVERKLYRDELSLILQKQCAFHAELQDRALYARCVEALYPSNEVRRKNIANRDFVYLLMDDILFYQRPLKTKKSLIANCPYEENEYVDRETGEIKKAPLKCIAKSHPLFQEFRLWNFLSNIRIYQKEKEINGTLHLDVDVTAEFLKTEDDYVALFDWLNSRKEIEQKTFLKYPKFGLKKEISNYRWNYVEDKQYPCNETRHAILSSLEKANVCIDFLSNEKEVALWHILYSVSDKQEIEKALRTFAAKNGLDESFVEAFKKFPPFKSEYGAYSAKAIKKMLPLMRCGKYWDVSSIDDTTKERIKKIVTGEYDERIAVKVRDKVMNLSDISCFRRLPLWLACYIVYNRHSEDKEAVKWESPADIDAYLASFKQHSLRNPIVEQVITETLRVVRDIWKQVGRIDEIHIELGREMKNPADKRKRMTAQILENENANLRIKALLAEFMNPEYEIENVRPYSPSQQEILRIYEDTVLHAEDQLPEEIDAILKKFNSSKVPTKSEFLRYKLWLEQKYRSPYTGELIPLGKLFTAAYEIEHVIPQSRYFDDSFSNKVICESAVNKLKDNQLGYEFIKNHHGQKVEVGFGKSVEIFSVDSYERFVKEQYAKSAVKMKKLLMDDIPEQFIERQLNDSRYISKVIKGLLSNIVREKNDSGEYEPEAVSKNIVVCTGSVTDRLKRDWGMNDVWNSIVYPRFERLNSLTDTQSFGHWENKSGKKVFQTELPLEYQKGFSKKRIDHRHHAMDAIVIACATRNHVNYLSNESASRNAKISRYDLQRLLCDKNRTDDNGNYKWVIKKPWDTFTQDAREVLSKIVVSLKQNLRIINKTTNVYRHFDATVNRVYEKQKTGDSWAIRKPMHKDTVFGAVNLRKVKVVRLSVALDTPAMIVDKRVKNKVFELLSYKYDKKRIEKYFKENAFLWKELDLAKVAVYYFTEATTEPLVAVRKPLDSTFNEKKIKESVTDTGIQKILLNHLCTKEGKPDLAFSAEGIEEMNRNLLQLNNGKSHQPIYKVRVYEPRGNKFSVGVLGNKGTKWVEAAKGTNLFFAIYITEDGKRTYETIPLNVVIEREKQGLVPVPDRNEKGDKLLFWLSPNDLVYLPTEEEREFGRINEPIDRGRIYKMVSCTGNEGHFIPANVANPIVPVIELGSNNKAQRAWTNEMIKDICIPIKVDRLGHIIEVKYRIDE

SEQ ID NO: 23537 - protein, 1140 aa, unidentified
  REGION 1..1140: note = Cas Enzyme sequence
MKNILGLDLGSGSIGWSVIQEGENNRTILGIGSRIIPLSPDDTTQFTQGKSITKNADRTAFRTQRKGYDRYQLRRYYLTQYLHKLGMLPDERLIKLPQTELWEIRAKAVNEKIELPELGRVLYHLNQKRGYKSGKSDFQDKKSSKYLSEVSERYKKLQERDITIGQKFYAELKADPTYRCKDWVYPRIAYIEEFDRIMECQRTHHDILTDEHIAHLRNHIIYYQRPLKSCKHLVGECSLAQMTYRLPDGSIKSRPIKVAPKSSPLFQVCKIWESINHINLQRDRERFEITPAHRQALFTHMNSKEKLKINDLYKILGIKKHDGWWGGKAIGNGLQGNTTVIALQNALTGYSRADELLRFELKTCEIEIVDPETGEIATQLIIDPAFEQEPLYRLWHTLYSISDTDVLDRILERKFGIEDPEMREKLTQIDFTKSGYGNLSSIAMRRILPYLRQGYVYSEACFMAGYNHSNSITREENLARELAEHLRPITKGELRQPIVEKILNQMVNLVNALIDRYGRFDEIRVELARELQQSREERDKTYKKQLDNQKRNEEIRHHIEEMDLTPTRSRIQKYRMYEESHHLCIYCGQPVGLAAFLQGYDTEVEHIIPRSLYFDDSYNNKVCACRACNQAKNNRTAYDYMSSLPEETFHRYLDRIKNMHDNKEISDTKYKYLLTKGDEIPQDFLNRQMRESQYISRKAIAMLQEVCHHVYATSGSVTAYLRHVWGWDNVLHDLNRERYRAGGLTEMREIDNRTVECIKDWNKRLDHRHHAIDALAIACTRQGYIQRINTLSKQAEEGDLVSLERYIRQQPHFSYAEVCAAAEKILVSFKAGKRVATKGKRYIYRGGKRILAQEDITVPRGALSEQSVYGQIAQYRKDKKGKVSFSYESVLKYPIESIDTKTLPDVVDAGIRRILQQRLDEHGGNAKKAFATPVYTASGHLIRTVRCFTRLKAIVPVKYDASGKAVGFVKPGNNHHVAIYIDRDGKPQEHIVTFWHAVERKKYGLPVIIERPGEAWDAATDAMPDSFLEQLPDATWQFRLSMQQNEMFILGMPDELYADALENRDYALLGKFLYRVQKISTKYYCFRHHIETSVDDKYNGKKNEKLSTQMGKYKLISSISALYSQHPHKVKISLTGEICE

SEQ ID NO: 23538 - protein, 1427 aa, unidentified
  REGION 1..1427: note = Cas Enzyme sequence
MKKILGLDLGTSSIGWALVNEAETSEEKSSIIKLGVRVNPLTVDELQNFEKGKSITTNADRTAGRSMRRNLQRYKLRRENLIEVLKEYNFITDEMILSENGNRTTFETYRLRAKAAVEEISLEQFARVLLMINKKRGYKSSRKAKGAENGTLIDGMEVAKKMYDEGITPGELCLQLLTAGKRYFPDFYRSDLQAEFDRIWNFQKQFYPDSLIDKVKDEVRGKNKSQTWAILAKYFVWKEVENSWNEEEAQTRRVEKEYRLVGIKRGVKREELKLENFQWRVKALSERMNPEELAIVLQEINEQISNSSGYLGAISDRSKELYFNRQTVGQYQMAVLDNNPNIGLRNMVFYRQDYLDEFNTIWEKQAEFHKELTEDLKKEIRDIVIFYQRRLKSQKGLINICEFERRQIEVEIDGKKKIKTIGSRVIPRSSPLFQEFKIWQTLNDIEVSVLGVKNKRKKQDDNSTTLLDSAENIDSLKLNVSRPLDADEKSLLAKELFIRDKLTKSDVLKLLFNNPQNLNLNFKNIDGNRTGSALYQAFSKILEISGHESINFKKSADEIVEQVKTIFSALGWNTEVLCFDSEKELDKQPYFKLWHLLYSFEGDSTPTGDGNLIQKIADLCGFEKDYASILANITFQEDYGSLSTKAIRKILPHLKDGNQYDVACEYAGYKHSKSSLKKEEIKNKVLKDKLELLPKNSLRNPVVEKILNQMVNVINAIITTYGKPDEIRIELARELKKNAKEREELTKSIVDTTKTHEGIRAILQNDFGMSHVSRNAIIRYKLYEELKDNGYKTLYSNTYIPKEKLFSKDFDIEHIIPQARLFDDSFSNKTLEVKSINIEKGSKTAYDFVEEKYGEQGLQEYLNRCEVLFRDKKTKLRKLKMQESEIPEGFIDRDLRNTQYIAKKALSMLNEICRRVVAITGAITDELREDWQLVDVMKELNWEKYKVLGLVEYFEDNDGRLIGRIKDWTKRNDHRHHAMDALTVAFTKDVFIQYFNNKNASLKPDTNEAAIRNKYFQNGKAIPPMSLDEFRAEAKKHLNDTLISIKTKNKVVTINLNRTKKKNGINKKQQQTPRGQLHLETVYGSHKQYVVKEEKVNASFDAAKIATVNKPAYRDALLRRLQENGNDSKKAFTGKNSLDKQPVWLDAKQNECVPEKVKTVMLETVYTVRKPIDEKLNVDKVVDARIRKLLQDRIKEYGNAKSAFANLDENPIWLNKEKGITIKRVSVSGISKAQSLHEKKDKDGNFILDKDSRRIPVDFVNTGNNHHVAIYRKPVLDKKGQAVFDENGELKFELEEVVVSFFDAVTRVNLSQPIIDKDYKRSEGWKFLFSMKQNEYFVFPNEKTGFDPKEIDLLNPENYALISPNLFRVQKIASKDYVFRHHLETVVADRKELQEITWKRISSLSILNRIIKVRVNHIGQIVMIGEY

SEQ ID NO: 23539 - protein, 1428 aa, unidentified
  REGION 1..1428: note = Cas Enzyme sequence
MGKNEFIFLDSFNEMLEDFRHSQPQLLLDGRKVPYDWTIYYLRKKALTEKISKEELAWILLNFNQKRGYFQLRGEDEEVQGKKIEFYALKVVRVEDTGEKKGKDTWYNVYLESGLGDTDDYWVYRRASSVPIDEWEGQVKEFIVTTTLDNNGSPQIDKEGKVKRSFSIPKPEDWMLVKKKTEVDIKSSGKTVGTYIYDTLLQKPDQKIKGKLIRTIERENYTNELSLILENQKKFHLELQDRELYHQCIELLYCKNEAHKRVIGTWDFTSLFIKDILFYQRPLKSKKALIDNCPYEESFYIENGEKKSKPRKCIAKSHPLFQEFRIWQFISNLRIYQKVKEVDGKLQFNVDVTSDFLRDESAYVELFKWLNERAEVSQEDLLKHLGLKKTKTEDTVSLYRWNYVEDKKYPGNKTRSSILKKLLNDEKEALSEDIELKIWHLLYSVSAQSEIDKALSSKNVSTKGIYSGLSVYFSDETIQKIKNVKLESGYGSYSAKAIGKLLPLMRRGKYWNLESIDNHTKERIEKILNGECDETIRARTREKSISLTDISQFKGLPLWLACYIVYDRHSELKTIKKWNGPEDIDKFLKEFKQHTLRNPIVEQVIMETLRVVRDIWRRVGSIDEIHIEMGRDMKQTAQERARRSAIISRNENDNLRIKALLHEFMNPELGIENVRPYSPAQQEILRIYEDGVLSSVSEIEDEIKNILKKFNESEEGKRPTKNEIIRYKCWLEQKYRSPYTGEIIPLGKLFTPAYQIEHIIPQARFFDDSFTNKVICEAEVNAKKGDLLGYEFVKEKGGEIVELSGGRNVRIFSVEEYEDFVKEHYKSNKQKMQRLLAEDIPTEFSHRQLNDSRYISKYIRNLLSNIVREDDEQESVSKNVISCNGAITDRLKKDWGVNDVWNHIILPRFVRLEEIRADNGEKFTAFNQEGHLIPSMPLMYQKGFNKKRIDHRHHAMDAIVIACTTRDHVNLLNNECSNTQNNANKHQLSRKLRRYENVSYKQDGKLKEREVPKEFLKPWEEFTRDVEFALKNVIVSFRQNLRVLNKTVNYFQHWKDNSSEKEWKEQKSADHWSIRKPLHKETVSGEVFLWRTRFVSLREALTNPKRIVEKDLRSKILELQSKGYDTKRIKKYFEDNKDVWQDVNLSKIEVRYYSREIVDPQTELPKNRYFATRFGNDLISLFSGVSNFEKAKKIIESITDTGIQKILFRHLENKGNDPVLAFSPEGIDEMNRTIKTLNNGKDHKPIYKVRIYECSTMKFPLGSVGNKSKKFVEAAKGTNLYFAVYEKEVENDRGECHKERTFKTIPLNDVIRNLKQGLSIAPNDENGNPPAFILSPNDLVYLPTKEESETDSISQPLDRNRIYKMVSCTGYQVFFVPAFVAAPVLQKIELGSNNKSERARTDEMIKESCIPIKVDRLGMLISINGKAV

SEQ ID NO: 23540 - protein, 1509 aa, unidentified
  REGION 1..1509: note = Cas Enzyme sequence
MKTILGLDLGTNSVGWAVINSVIKEQAERIWIEMAGSRIIPMDAAVLGDFDKGNSISQTSERTRLRGARRLRERQLLRRERLHKVLNILGFLPNHYLEYIDFEKHPGKFLADAEPKLAWVKDEQGKYTFLFQAAFDEMLADFAIHQPSLVSGDKKIPYDWTIYYLRKKALTEMISKEELAWILLNFNQKRGYYQLRGEEEEDNAGKSVEFYALKVLTVEATDEKKGRDVWYNVHLENGWIYRRSSSVPLDWEGQVKEFIVTTDLNPDGTPKLDKYGEVKRSFRAPKEDDWMLIKKRTEADIANTHKTVGAYIYDTLLQKPQQKIIGKLVKTVERKLYRDELSLILQKQCAFHAELQDRALYARCVEALYPSNEVRRKNIANRDFVYLLMDDILFYQRPLKTKKSLIANCPYEENEYVDRETGEIKKTPLKCIAKSHPLFQEFRLWNFLSNIRIYQKEKEINGTLHLDVDVTAEFLKTEDDYVALFDWLNSRKEIEQKTFLKYPKFGLKKEISNYRWNYVEDKQYPCNETRHAILSSLEKANVCIDFLSNEKEVALWHILYSVSDKQEIEKALRTFAAKNGLDESFVEAFKKFPPFKSEYGAYSAKAIKKMLPLMRCGKYWDVSSIDDTTKERIKKIVTGEYDERISVKVRDKVMNLSDISCFRRLPLWLACYIVYNRHSEDKEAVKWESPADIDAYLASFKQHSLRNPIVEQVITETLRVVRDIWKQVGRIDEIHIELGREMKNPADKRKRMTAQILENENANLRIKALLAEFMNPEYEIENVRPYSPSQQEILRIYEDTVLHAEDQLPEEIDAILKKFNSSKVPTKSEFLRYKLWLEQKYRSPYTGELIPLVKLFTAAYEIEHVIPQSRYFDDSFSNKVICESAVNKLKDNQLGYEFIKNHHGQKVEVGFGKSVEIFSVDSYERFVKEQYAKSAVKMKKLLMDDIPEQFIERQLNDSRYISKVIKGLLSNIVREKNDSGEYEPEAVSKNIVVCTGSVTDRLKRDWGMNDVWNSIVYPRFERLNSLTDTQSFGHWENKSGKKVFQTELPLEYQKGFSKKRIDHRHHAMDAIVIACATRNHVNYLSNESASRNAKISRYDLQRLLCDKNRTDDNGNYKWVIKKPWDTFTQDAREVLSKIVVSLKQNLRIINKTTNVYRHLDATGNRVYEKQKTGDSWAIRKPMHKDTVFGAVNLRKVKVVRLSVALDTPAMIVDKRVKNKVFELLSYKYDKKRIEKYFKENAFLWKELDLAKVAVYYFTEATTEPLVAVRKPLDSTFNEKKIKESVTDTGIQKILLNHLCTKEGKPDLAFSAEGIEEMNRNLLQLNNGKSHQPIYKVRVYEPRGNKFSVGVLGNKGTKWVEAAKGTNLFFAIYITEDGKRTYETIPLNVVIEREKQGLVPVPDRNKKGDKLLFWLSPNDLVYLPTEEEREFGRINEPIDRGRIYKMVSCTGNEGHFIPANVANPIVPVIELGSNNKAQRAWTNEMIKDICIPIKVDRLGHIIEVKYRIDE

SEQ ID NO: 23541 - protein, 1140 aa, unidentified
  REGION 1..1140: note = Cas Enzyme sequence
MKNILGLDLGSGSIGWSVIQEGENNRTILGMGSRIIPLSPDDTTQFTQGKSITKNADRTAFRTQRKGYDRYQLRRHYLTQYLHKLGMLPDERLIKLPQTELWEIRAKAVNEKIELPELGRVLYHLNQKRGYKSGKSDFQDKKNSKYLSEVSERYKKLQEKDITIGQKFYAELKADPTYRCKDRVYPRIAYIEEFDRIMECQRKHHDILTDEHIAHLRNHIIYYQRPLKSCKHLVGECSLAQMTYRLPDGSIKSRPIKVAPKSSPLFQVCKIWESINHINLQRDRERFEITPAHRQALFTHMNSKEKLKINDLYKILGIKKHDGWWGGKAIGNGLQGNTTVIALQNALTGYSRADELLRFELKTCEIEIADPETGEIATQLIIDPAFEQEPLYRLWHTLYSISDTDVLDRILERKFGIEDPEMREKLTQIDFTKSGYGNLSSIAMRRILPYLRQGYVYSEACFMAGYNHSNSITREENLARELAEHLRPITKGELRQPIVEKILNQMVNLVNALIDRYGRFDEIRVELARELQQNREERDKTYKKQLDNQKRNEEIRHHIEEMYLTPTRSRIQKYRMYEESHHLCIYCGQPVGLAAFLQGYDTEVEHIIPRSLYFDDSYNNKVCACRACNQAKNNRTAYDYMSSLPEETFHRYLDRIKNMHDNKEISDTKYKYLLTKGDEIPQDFLNRQMRESQYISRKAIAMLQEVCHHVYATSGSVTAYLRHVWGWDNVLHDLNRERYRAGGLTEMREIDNRTVECIKDWNKRLDHRHHAIDALAIACTRQGYIQRINTLSKQAEEGDLVSLERYIRQQPHFSYAEVCAAAEKILVSFKAGKRVATKGKRYIYRGGKRILAQEDITVPRGAPSEQSVYGQIAQYRKDKKGKVSFSYESVLKYPIESIDTKTLPDVVDAGIRRILQQRLDEHGGNAKKAFATPVYTASGHLIRTVRCFTRLKAVVPVKYDASGKAVGFVKPGNNHHVAIYIDRDGKPQEHIVTFWHAVERKKYGLPVIIERPGEAWDAATDAMPDSFLEQLPDATWQFRLSMQQNEMFILGMPDELYADALENRDYALLGKYLYRVQKISTKYYCFRHHIETSVDDKYNGKKNEKLSTQMGKYKLISSISALYSQHPHKVKISLTGEICE

SEQ ID NO: 23542 - protein, 1425 aa, unidentified
  REGION 1..1425: note = Cas Enzyme sequence
MKKILGLDLGTSSIGWALVNEAETSEEKSSIIKLGVRVNPLTVDELQNFEKGKSITTNADRTAGRSMRRNLQRYKLRRENLIEVLKEYNFITDETILSENGNRTTFETYRLRAKAAVEEISLEQFARVLLMINKKRGYKSSRKAKGAEDGTLIDGMEVAKKMYDEGITPGELCLQLLTAGKRYFPDFYRSDLQAEFDRIWNFQKQFYPDSLIDKVKDEVRGKNKSQTWAILAKYFVWKEVENSWNEEEAQTRRVEKEYRLVGIKRGVKREELKLENFQWRVKALSERMNPEELAIVLQEINGQISNSSGYLGAISDRSKELYFNRQTVGQYQMAVLDNNPNIGLRNMVFYRQDYLDEFNTIWEKQAEFHKELTEDLKKEIRDIVIFYQRRLKSQKGLINICEFERRQIEVEIDGKKKIKTIGSRVIPRSSPLFQEFKIWQTLNDIEVSVLGVKNKRKKQDDNSTTLLDSAENIDSLKLNVSRPLDADEKSLLAKELFIRDKLTKSDVLKLLFNNPQNLNFKNIDGNRTGSALYQAFSKILEISGHESINFKKSADEIVEQVKTIFSALGWNTEVLCFDSEKELDKQPYFKLWHLLYSFEGDSTPTGDGNLIQKIADLCGFEKDYASILANITFQEDYGSLSTKAIRKILPHLKDGNQYDVACEYAGYKHSKSSLTKEEIKSKVLKDKLELLPKNSLRNPVVEKILNQMVNVINAIITTYGKPDEIRIELARELKKNAKEREELTKSIVDTTKTHEGIRAILQNDFGMSHVSRNAIIRYKLYEELKDNGYKTLYSNTYIPKEKLFSKDFDIEHIIPQARLFDDSFSNKTLEVKSINIEKGSKTAYDFVEEKYGEQGLQEYLNRCEVLFRDKKTKLRKLKMQESEIPEGFIDRDLRNTQYIAKKALSMLNEICRRVVATTGAITDELREDWQLVDVMKELNWEKYKVLGLVEYFEDNDGRLIGRIKDWTKRNDHRHHAMDALTVAFTKDVFIQYFNNKNASLKPDTNEAAIRNKYFQNGKAIPPMSLDEFRAEAKKHLNDTLISIKTKNKVVTINLNRTKKKNGINKKQQQTPRGQLHLETVYGSHKQYVVKEEKVNASFDAAKIATVNKPAYRDALLRRLQENGNDSKKAFTGKNSLDKQPVWLDAKQNECVPEKVKTVMLETVYTVRKPIDEKLNVDKVVDARIRKLLQDRIKEYGNAKSAFANLDENPIWLNKEKGITIKRVSVSGISKAQSLHEKKDKDGNFILDKDSRRIPVDFVNTGNNHHVAIYRKPVLDKKGQAVFDENGELKFELEEVVVSFFDAVTRVNLSQPIIDKDYKRSEGWKFLFSMKQNEYFVFPNEKTGFDPKEIDLLNPENYALISPNLFRVQKIASKDYVFRHHLETVVADRKELQEITWKRISSLSILNRIIKVRVNHIGQIVMIGEY

SEQ ID NO: 23543 - protein, 1526 aa, unidentified
  REGION 1..1526: note = Cas Enzyme sequence
MKKILGLDLGTNSIGWAVLNAADDNSLKYIEAAGSRIIPMDAAILGDFDRGNSISQTAERTRIRGMRHLRERYLLRRARLHRILNLLGFLPFHYAQDIDRYGNFSADMEPKIAWCKNLEGELEFIFIESFNEMLEDFRKNQPELVADNKKVPYDWVIYYLRKKALEKKISKEELAWTLLNFNQKRGYYQLRGEDDDESMKTAKTRQYFDKQIIKNIIDTNQTYKGQRILIVELQNGDKGKIFKKEIPDWIGQEKNIIVTVDIDKDGNDKYEESGSLSCRFKIPTDAEWESEWKLIKMKTQKDLDESNKTVGTYIYDSILQNPTQKVRGKLVRTIERKYYKAELKQILEKQTEFHSELQDKDLYIECLNELYSNNDTHRNAITDRDFVYLFMNDILFYQRPLKSKKSLIDNCPYERNIYIDKETGEIKYSPIKCIAKSHPLFQEFRLWKFISSIRIYQRESVVEVVDKQLDLFSSQSTSVQKLVTDVDVTDKFLTCENDYVALFEWLNKKKIIDQKEFLKYRPFGLKGDIDNYRWNYVEDKSYPCNETHAMILTYFAKAGISEDILTKEMEEALWHILYSVEDRQEITKALRTFASKYHLSDSFVKVFSNIPPFKKEYGSYSAKAIKKLLSLMRMGKYWSEDAIDVNTRERIDKIVTGEYDEKIRDRVREKTIRLNDIRHFRALPDWLACYVVYDRHSETREITEWKSPEEIDEYIRNFKQHSLRNPIVEQVITETLRTVRDIWKQVGCIDEIHVELGREMKNPADKRKRITSQIIENENANLRVKALLTEFVNPEFEIENVRPYSLSQQDILRIYEDGVLNSVAEVPGDIAGILKKFNENDAKKRPTTSEILRYKLWLEQKYRSPYTGEMIPLSKLFTSAYEIEHVIPQSRYFDDSFSNKVICEAEVNKLKDNALGYEFIKKHHGEKVELGFGKIVEIFSVSVYEQFVKDNYSRNRGKMKKLLMDEIPEQFIERQLNDSRYISKVVKTLLSNVVREKAEQEAVSKNVIVCTGGVTDRLKKDWGINDVWNKIVLPRFLRLNELTNSTNFTAKNAAGNEIPAMPLELQKGFNKKRIDHRHHAMDAIVIACANRNIVNYLNNESASRKAKISRHDLQAILCDKVRTDDKGNYQWRVKKPWDTFTQDVYVALENIIVSFKQNLRVINKTSNYYWHYENGKKVLVKQVKGDSWAIRKPMHKDTVFGEVNLRKVKSVSLNEALKNPQFIVEKDLKRQLLSLLQQNFDIKKIKKYFEEHKDIWSDISLSKMNIYYFTKETKDRYFATRKPLDASFDKKKIESCITDTGIQQILLRHLELKENDPERAFSPDGIDEMNRNIIQLNKGKGHHPIAKVRVYEKADKFEVGQRGNKSSKFVEAAKGTNLFFAVYETEYPDEKTNSIVRKRNYATIPLNIAIERQKRGLSTAPEDEKGNVPSFVLSPNDLVYLPTSEDIVNGHITQPIDKSRIYKMVSSSGSQCFFIKHNIANIIVDKYEFSPLNKMERAISNEMIKEICIPVKVDRLGNIVKLGKSE

SEQ ID NO: 23544 - protein, 938 aa, unidentified
  REGION 1..938: note = Cas Enzyme sequence
MKNILGLDLGLSSIGWSVIRENSEEQELVAMGSRVVSLTAAELSSFTQGNGVSINSQRTQKRTQRKGYDRYQLRRTLLRNKLDTLGMLPDDSLSYLPKLQLWGLRAKAVTQRIELNELGRVLLHLNQKRGYKSIKSDFSGDKKITDYVKTVKTRYDELKEMRLTIGELFFRRLTENAFFRCKEQVYPRQAYVEEFDCIMNCQRKFYPDILTDETIRCIRDEIIYYQRPLKSCKYLVSRCEFEKRFYLNAAGKKTEAGPKVAPRTSPLFQVCRLWESINNIVVKDRRNEIVFISAEQRAALFDFLNTHEKLKGSDLLKLLGLSKTYGYRLGEQFKTGIQGNKTRVEIERALGNYPDKKRLLQFNLQEESSSMVNTETGEIIPMISLSFEQEPLYRLWHVLYSIDDREQLQSVLRQKFGIDDDEVLERLSAIDLVKAGFGNKSSKAIRRILPFLQLGMNYAEACEAAGYTHSNNYTKAENEAHALLDRLPAIKKNELRQPVVEKILNQMVNVVNALMEKYGRFDEIRVELARELKQSKEERSNTYKSINKNQRENEQIAKRIVEYGVPTRSRIQKYKMWEESKHCCIYCGQPVDVGDFLRGFDVEVEHIIPKSLYFDDSFANKVCSCRSCNKEKNNRTAYDYMKSKGEKALSDYVERVNTMYTNNQISKTKWQNLLTPVDKISIDFIDRQLRESQYIARKAKEILTSICYNVTATSGSVTSFLRHVWGWDTVLHDLNFDRYKKVGLTEVIEVNHRGSVIRREQIKDWSKRFDHRHHAIDALTIACTKQAYIQRLNNLRAEEGPDFNKMSLERYIQSQPHFSVAQVREAVDRILVSFRAGKRAVTPGKRYIRKNRKRISVQSVLIPRGALSEESVYGVIHVWEKDEQGHVIQKQRAVMKYPITSINREMLDKETSVFIESFPVGLLNIMIIPKRRLLNLYI

SEQ ID NO: 23545 - protein, 1366 aa, unidentified; identical to SEQ ID NO: 22669
  REGION 1..1366: note = Cas Enzyme sequence

SEQ ID NO: 23546 - protein, 1504 aa, unidentified
  REGION 1..1504: note = Cas Enzyme sequence
MKNIVGLDLGTNSIGWAVVNGSVNDDGSEQLVKIQASGSRIIPMDAAMIGDFNKGNSISQTAERTRLRGVRRLSERYLLRRERLHRILDILGFLPFHFAQDLDRHGKIVKGKEPKLAWRKNEAGQFEFIFQDSFKEMLEDFKLNYPNLITDDKKVPYDWTIYYLRKKGLTSKISKEELAWILLNFNQKRGYYQLRGEEEEENKDKLVEFYALKVVAVEDSGEKKGKDIWCNVHLENGWVYRRTSNMSLDWVGKTKEFIVTTDLEKDGTPKKDKEGNVKRSFRAPKEDDWSLVKKKTEADIDQTHKTVGAYIYDTLLGNPSQKIRGRLVRTIERKYYKEELKLILEKQKEFHLELQDRALYAACIEELYPINEAHRNNVGNRDFTYLFLEDILFYQRPLKSKKSLIDNCPYEENQGLDKETGEIKSFPVKCIAKSHPLFQEFRLWQFIINLRIYRKDLAQDVDVTNELLKTEEDYVALFDWLNGKKEIDQKAFLKYPVFGLKKEIENYRWNYVQDKPYPCNETRSLMLARLEKCDISIEFLTKENEEALWHILYSVEDKNEIVKALQKFADKHDLNASFVDVFQKFPPFKKEYGSYSAKAIKKLLPLMRMGKYWSENSIDKGTRERIDKIITGEYDEKIENRVREKAIHLADVSDFKGLPLWLVCYIVYGRHSEAKEIIQWKSPADIDSYLRSFKQHSLRNPIVEQIIIETLRVVRDIWKQVGNIDEIHVELGREMKNPADKRKKMTQQMSENENTNLRIKYLLTEFLNPEYEVENVRPYSPSQQDILRIYEEGVLNSVSDLPEEISDILKKFTETDLKKRPSRSEVLRYKLWLEQKYRSPYTGEVIPLGKLFTPAYEIEHVIPQSCYFDDSFSNKVICEAEVNKLKSNLLGHEFIVKHHGEIVELPFGKKVRIFTVDEYEQFVKDNYSRTRSKMKKLLMDDIPEEFVTRQLNDSRYISKVVKSLLSNIVREKGEEEAISKNVIPCTGGVTDRLKKDWGINEVWNKIILPRFQRLNELTGTNKFTTKNVGIQEIPTMPLELQKGFNKKRIDHRHHAMDAIIIACANRNIINYLNNESATAKAELSRYDLQKMLCDKAKTDNNGNYKWVIRKPWASFTQDTYLALENIIVSFKQNLRVINKATNRFLHYNEEGKKIFVKQGKGDNWAIRKSMHKDTVFGEVNLRRIKTVALNEAMKNPQSIVVKDFKRKLLELWNLGFDAKRIKKYFEDNRETWSDINLSKIEVYYFSKDTKDRFFATRKPLDTSFDRKKIENNITDTGIQKILLRHLELKDNNPDIAFSPDGIDEMNRNIIQLNNGKYHQPIIKIRWYEQADKFAVGQTGNKSSKFVEAAKGTNLFFAVYESNILDKKTNTIIKKRNYATIPLNVAIERQKQGLPVAPEDENGNDPIFVLSPNDLVYLPTDDELANGIIAQPLDRGRIYKMVSSSGEQCFFIKHIVANVLVDKFEFSPLNKMERALTGEMIKMICIPIKVDRLGNVLESSSSYKK

SEQ ID NO: 23547 - protein, 1312 aa, unidentified
  REGION 1..1312: note = Cas Enzyme sequence
VQNGFLGITVSSEQVGWAVTNPKYELERASRKDLWGVRLFDKAETAEDRRMFRTNRRLNQRKKNRIHYLRDIFHEEVNQKDPNFFQQLDESNFCEDDRTVEFNFDTNLYKNQFPTVYHLRKYLMETKDKPDIRLVYLAFSKFMKNRGHFLYKGNLGEVMDFENSMKGFCESLEKFNIDFPTLSDEQVKEVRDILCDHKIAKTVKKKNIITITKVKSKTAKAWIGLFCGCSVPVKVLFQDIDEEIVTDPEKISFEDASYDDYIANIEKGVGIYYEAIVSAKMLFDWSILNEILGDHQLLSDAMIAEYNKHHDDLKRLQKIIKGTGSRELYQDIFINDVSGNYVCYVGHAKTMSSADQKQFYTFLKNRLKNVNGISSEDAEWIDTEIKNGTLLPKQTKRDNSVIPHQLQLREFELILDNMQEMYPFLKENREKLLKIFNFVIPYYVGPLKGVVRKGESTNWMVPKKDGVIHPWNFDEMVDKEASAECFISRMTGNCSYLFNEKVLPKNSLLYETFEVLNELNPLKINGEPISVELKQRIYEQLFLTGKKVTKKSLTKYLIENGYDKDIELSGIDNEFHSNLKSHIDFEDYDNLSDEEVERIILRITVFEDKQLLKDYLNREFVKLSEDERKQICSLSYKGWGNLSEMLLNGITVTDSNGVEVSVMDMLWNTNLNLMQILSKKYGYKAEIERYNKEHEKNIYNREDLMDYLNIPPAQRRKVNQLITIVKSLKKRCGVPNKIFFKVSREHQDDPKRTSSRKEQLKYLYKSLKSEDEKHLMKELDELNDHELSNDKVYLYFLQKGRCIYSGKKLNLSRLRKSNYQNDIDYIYPLSAVNDRSMNNKVLTGIQENRADKYTYFPVDSEIQKKMKGFWMELVLQGFMTKEKYFRLSRENDFSKSELVSFIEREISDNQQSGRMIASVLQYYFPESKIVFVKEKLISSFKRDFHLISSYGHNHLQAAKDAYITIVVGNVYHTKFTMDPAIYFKNHKRKDYDLNRLFLENISRDGQIAWESGPYGSIQTVRKEYAQNHIAVTKRVVEVKGGLFKQMPLKKGHGEYPLKTNDPRFGNIAQYGGYTNVTGSYFVLVESMEKGKKRISLEYVPVYLHERLEDDPGHKLLKEYLVDHRKLNHPKILLAKVRKNSLLKIDGFYYRLNGRSGNALILTNAVELIMDDWQTKTANKISGYMKRRAIDKKARVYQNEFHIQELEQLYDFYLDKLKNGVYKNRKNNQAELIHNEKEQFMELKTEDQCVLLTEIKKLFVCSPMQADLTLIGGSKHTGMIAMSSNVTKADFAVIAEDPLGLRNKVIYSHKGEK

SEQ ID NO: 23548 - protein, 1536 aa, unidentified
  REGION 1..1536: note = Cas Enzyme sequence
LIIYFIFEKIVNTILVMKKIVGLDLGTNSIGWALINAYIDEYNKEHLYGIEACGSRIIPMDAAILGNFDKGNSISQTADRTSYRGIRRLRERHLLRRERLHRILDLLGFLPKHYSDSLNRYGKFLNDIECKLPWVKDETGSYKFIFQESFKEMLANFTEHHPILIANNKKVPYDWTIYYLRKKALTQKISKEELAWILLNFNQKRGYYQLRGEEEETPNKLVEYYSLKVEKVEDSGERKGKDTWYNVHLENGMIYRRTSNIPLDWEGKTKEFIVTTDLEADGSPKKDKEGNIKRSFRAPKDDDWTLIKKKTEADIDKIKMTVSAYIYDTLLQKPDQKIRGKLVRTIERKYYKNELYQILKTQSEFHEELRDKQLYIACLNELYPNNEPRRNSISTRDFCHLFIEDIIFYQRPLKSKKSLIDNCPYEENRYIDKESGEIKHASIKCIAKSHPLYQEFRLWQFIVNLRIYRKETDVDVTQELLPTEADYVTLFEWLNEKKEIDQKAFFKYPPFGFKKTTSNYRWNYVEDKPYPCNETHAQIIARLGKAHIPKAFLSKEKEETLWHILYSIEDKQEIEKALHSFANKNNLSEEFIEQFKNFPPFKKEYGSYSAKAIKKLLPLMRMGKYWSIENIDNGTRIRINKIIDGEYDENIRERVRQKAINLTDITHFRALPLWLACYLVYDRHSEVKDIVKWKTPKDIDLYLKSFKQHSLRNPIVEQVITETLRTVRDIWQQVGHIDEIHIELGREMKNPADKRARMSQQMIKNENTNLRIKALLTEFLNPEFGIENVRPYSPSQQDLLRIYEEGVLNSILELPEDIGIILGKFNQTDTLKRPTRSEILRYKLWLEQKYRSPYTGEMIPLSKLFTPAYEIEHIIPQSRYFDDSLSNKVICESEINKLKDRSLGYEFIKNHHGEKVELAFDKPVEVLSVEAYEKLVHESYSHNRSKMKKLLMEDIPDQFIERQLNDSRYISKVVKSLLSNIVREENEQEAISKNVIPCTGGITDRLKKDWGINDVWNKIVLPRFIRLNELTESTRFTSINTNNTMIPSMPLELQKGFNKKRIDHRHHAMDAIIIACANRNIVNYLNNVSASKNTKITRRDLQTLLCHKDKTDNNGNYKWVIDKPWETFTQDTLTALQKITVSFKQNLRVINKTTNHYQHYENGKKIVSNQSKGDSWAIRKSMHKETVHGEVNLRMIKTVSFNEALKKPQAIVEMDLKKKILAMLELGYDTKRIKNYFEENKDTWQDINPSKIKVYYFTKETKDRYFAVRKPIDTSFDKKKIKESITDTGIQQIMLRHLETKDNDPTLAFSPDGIDEMNRNILILNKGKKHQPIYKVRVYEKAEKFTVGQKGNKRTKFVEAAKGTNLFFAIYETEEIDKDTKKVIRKRSYSTIPLNVVIERQKQGLSSAPEDENGNLPKYILSPNDLVYVPTQEEINKGEVVMPIDRDRIYKMVDSSGITANFIPASTANLIFALPKATAEIYCNGENCIQNEYGIGSPQSKNQKAITGEMVKEICFPIKVDRLGNIIQVGSCILTN

SEQ ID NO: 23549 - protein, 1398 aa, unidentified
  REGION 1..1398: note = Cas Enzyme sequence
MKTILGLDLGTTSIGWALVKEAEPFSDEKSEIVRLGVRVIPLTVDERTSFENGKSITTNALRTQKRGMRRNLQRYKLRRQALIEELKSTGWIGNDFIFSETGPGSTFRTFRLRAKSASEEVTLGDLARILLQINKKRGYKSSRKMVSSDDGQAIDGMAVAKEMYDKGLTPGEYVYQRMLEGKYAIPEFYKSDLQEEFDRIWALQKSFHTELTDELYRKLSDRNKSQTWAICRDELGIQGLKSSFTGKERLKEAYRYRHLAATQEVNMEVLTCALQEINGQKASLSGLLSKISDRSKELYLNNLTVGQMLLKRIEDNPNNSLKNIVFYRQDYLDEFERIWTVQSKYHTELTHELKKRLRDIIIFYQRPLKSQKGLISLCELETKDIEVAIDGVKKMKNIGPRVCPRSSPLFQEFKVWQTINNIFVNGAALDDEDKSVVAKELMFKDKLKDSDLLKLLFKTTKGQSVNFKEVDGNRTMATLMKACFKIAENLGYDDIGLSKLSSEDQKVRIEGIFKEQGFKTGFLHFDSSLASPEFENQDSYRLWHLLYSYEGDKSASGNESLVKCIMDLCSMDEGSAKILASCTFLPDYGSLSAKAMRKILPYMKDGLEYTAACAMAGYRHSKRSLTKEELDTKEYSDRLSLLPKNTLRNPVVEKILNQMINVVNSVIDVYGKPDEIRIEMARELKKSAKEREEAQRDIASSTAESQKVIEILKGEPFFIQFPTRNDIIRYRLYQELAQNGFKTLYSNTYIPKDKLFSKEFDIEHIIPQALIFNDSFANKTLESRQCNLEKGKETAMDYVKSKYDETGVQAYCDRVNGLIGKGISKTKAKWLLMEGKDIPEDFINRELRDSQYIAKKAREILESLVKFVVPTTGSVTARLREDWQLVNVMQELNWEKYARLGLTGVREDKDGRRIPFIQDWTKRNDHRHHAMDALTIAFTRRQFIQYLNHLNSKIDVVSWDKKDLDLRDYDLEDIKFGNLSAGDRYGIVKALQDKFLYKDGNDKYRFVPPIPLDEFRRQAKEQLSDILISFKAKNKVCTRNVNVTKNKGGANRKTQLTPRGPLHNETIYGSSLEYVTKENEKIGSSFDAERITTVCKKKFRDALARRLEEFGGDPKKAFTGKNSPEKNPIWVDEHHSEQVPAKVRTVTMGQRFTGRKPIDATLKIEKVIDKRIREILQDRLDEFDGKAAKAFSNLDENPIWLNKEKGIAIKRVTVSGPANPVPVRFKRDKDGKPIIDDAGKTIGADFVTPGNNHHIAIFRDSSGKLQEHPVSFLEAIIAKSHGLDVIDRNYNKDEGWEFLFTLKQNEYFVFPNSETGFNPLDYDLTDPRNYAEISPNLYRVQKIATGDYYFRLHLETTVEDNKALKGITWKRVGPSGLEGAVKVRIDNLGRIVAVGEYD

SEQ ID NO: 23550 - protein, 1327 aa, unidentified
  REGION 1..1327: note = Cas Enzyme sequence
LAWILLNFNQKRGYYQLRGEEEEENNNKLVEFYALKVVAVEDSGEKKGKDIWYNVHLENGWVYRRTSNMPLDWVGKTKEFIVTTDLEKDGTPKKDKEGNVKRSFRAPKEDDWSLVKKKTEADIDQTHKTVGTYIYDTLLGNPSQKIRGRLVRTIERKYYKEELKLILDKQKEFHPELQDRALYAACIEELYPINEAHRNNVGNRDFTYLFLEDILFYQRPLKSKKSLIDNCPYEENQGLDKETGEIKSFPVKCIAKSHPLFQEFRLWQFIVNLRIYRKDLAQDVDVTNELLKTEEDYVALFDWLNGKKEIDQKAFLKYPVFGLKKEIENYRWNYVQDKPYPCNETRLLMLARLEKCDISIEFLTKENEEALWHILYSVEDKNEIVKALQKFADKHDLNASFVDVFRKFPPFKKEYGSYSAKAIKKLLPLMRMGKYWSEDSIDKGTRKRMDKIITGEYDEKIENRVREKVIHLADVSDFRGLPLWLVCYIVYGRHSEAKEITQWKSPADIDSYLKSFKQHSLRNPIVEQIIIETLRVVRDIWKQVGNIDEIHVELGREMKNPADKRKKMTQQMSENENTNLRIKYLLTEFLNPEYEVENVRPYSPSQQDILRIYEEGVLNSVSDLPEEISDILKKFTETDLKKRPSRSEILRYKLWLEQKYRSPYTGEVIPLGKLFTPAYEIEHVIPQSCYFDDSFSNKVICEAEVNKLKSNLLGHEFIVKHHGEIVELPFGKKVRIFTVDEYEQFVKDNYSRTRGKMKKLLMDDIPEEFVARQLNDSRYISKVVKSLLSNIVREKGEEEAISKNVIPCTGGVTDRLKKDWGINEVWNKIILPRFQRLNELTGTNKFTTKNVGIQEIPTMPLELQKGFNKKRIDHRHHAMDAIIIACANRNIINYLNNESATAKAELSRYDLQKLLCDKAKTDNNGNYKWVIRKPWASFTQDTYLALENIIVSFKQNLRVINKATNRFLHYNEEGKKIFVKQGKGDNWAIRKSMHKDTVFGEVNLRRIKTVALNEAMKNPQSIVVKDFKRKLLELWNLGFDAKRIKKYFEDNRETWSDINLSKIEVYYFSKDTKDRFFATRKPLDTSFDRKKIENNITDTGIQKILLRHLELKDNNPDIAFSPDGIDEMNRNIIQLNNGKYHQPIIKIRWYEQADKFAVGQTGNKFSKFVEAAKGTNLFFAVYESNILDKKTNTIIKKRNYATIPLNVAIERQKQGLPVAPEDENGNDPIFVLSPNDLVYLPTDDELANGIIAQPLDRGRIYKMVSCTGNEGHFIPARIANPILQTIELGSNNKAQKAWTDEMIKEICMPIKVDRLGNVLESSSSYKK

SEQ ID NO: 23551 - protein, 1282 aa, unidentified
  REGION 1..1282: note = Cas Enzyme sequence
LKVITVVLADGIKGKIFKAEKPDWVGQKKDIFAVVDLDKDGKDKLDENGEPSVRFKIPTEQEWEEQWKLIKVKTENDLDDSGKTVGAYIYDTLLQMPRQKIRGKLVRTVERKYYKDELARILETQSRFHPEFQDRSLYEACINELYPQNDAHRNLISSRDLSYLLSEDILFYQRPLKSKKSLIADCPYEGYTCVDKHTGEVKSYHLKCIAKSHPLFQEFRLWQFLSNLRIYQKEKVVDGKSCFDVDVTVEFLRNEDDYVCLFDWLNNRKDIKQDAFFKYPAFGLKKDAKNYRWNYVEDKVYPCNETRAVMLARLDQAKVSEDFLTKEKEEALWHILYSIADKGELRKALSTFAAKQGLDPEFVEKFQTTPPFEKDYGSYSAKAIKKLLPLMRRGKYWSADAIDAQTRERMAKILSNECDDRIRSRVREKAIHLTDMSSFRGLPLWLACYVVYNRHSEAKDIRKWETPSDIDAYLAGFKQHSLHNPIVEQVILETLRTVRDIWKQVGHIDEIHLELGREMKNPKDKRAKMTRQMQENETTNLRIKSMLLEFMNPEFEMENVRPYSPGQQDLLRIYEESVLNSVENVPDDIREIISKLGESDLKKRPTTSEVLRYKLWLEQKYRSPYTGEVISLSKLFTPAYEIEHIIPQARYFDDSLSNKVICEAEVNKLKSNMLGHEFISKHYGEKVLLAGGKCVKIFSVSDYETFVKDNYARNPVKLKKLLMDDIPEQFIARQLNDSRYISKLVKSLLSNIVRKENEQEDVSKNLIVCTGGVTDRLKKDWGVNDVWNKLILPRFLRLNELTGTTDFTALNANGKMVPTVPLGLQKGFNRKRIDHRHHAMDAIVIACASRNIVNYLNNESASKNAKVTRLDLQRLLCDKQRIDDKGNYRWFIKKPWFTFTQDVSVALQNVIISFKQNLRVINKTTNYYQRYVDGKKKFVPQEKGDNWAIRKSMHTETFYGEVNLRDIKTVSLKEALKNPKAVVERDLKKKLQELLSQNLNEKQIIAYFEANKDIWHDIDLKKIQVYYFTKETTKRYFASRQSLDTSFDEKKIREKVTDTGIRKILLRHLEANGNDANLAFSPEGIERLNENMQTLNDGKYHQPIYKVRVYEKADRFAVGQTGNKKSKFVEAAKGTNLFFAIYEMEKVDKETGEKTIKRIYETIPLNVVIERQKRGLSSVPEDKDGNPLKFVLSPNDLVYVPTREEIESGYIIYPLDRMRIYKMVSCTGNRLYLIPHMIASMIVDKVEYTKLNKVEFSDDKRSIKEICIPIKVDRLGNLMQLL

SEQ ID NO: 23552 - protein, 1140 aa, unidentified
  REGION 1..1140: note = Cas Enzyme sequence
MEENFQYRIGLDIGITSVGWAVLQNNSQDEPVRITDLGVRIFDVAENPKNGDALAAPRRDARTTRRRLRRRRHRLERIKFLLQENGLIEMDSFMERYYKGNLPDVYQLRYEGLDRKLKDEELAQVLIHIAKHRGFRSTRKAETKGKEGGAVLKATTENQKIMQEKGYRTVGEMLYLDEAFHTECLWNEKGYVLTPRNRPDDYKHTILRSMLVEEVHAIFAAQRALGNEKATEELENAYVEIMTSQRSFDMGPGLQPDGKPSPYAMEGFGDRVGKCTFEKDEYRAPKATYTAELFVALQKINHTKLIDEFGTGRFFTEEERKTIIDLLLSGKELKYGTIRKKLNIDPSLKFNSLNYSAKKEGETEEERVRDTEKAKFAGMPWTYEYSKCLKDRTEEMPVGEKADLFDRIGEILTAYKNDDSRSSRLEELGLSGEEIDGLLDLSPAKYQRVSLKAMRKMQPYLEDGLIYDKACEAAGYDFRALNDGSKKYLLKGEEINAIVNDITNPVVKRSVSQTIKVINAIIQKYGSPQAVNIELAREMSKNFQDRTNLEKEMKKRQQENERAKQQIIELGKQNPTGQDILKYRLWNDQGGYCLYSGKKIPLEELFDGGYDIDHILPYSITFDDSYRNKVLVTAQENRQKGNRTPYEYFGADEKRWEDYETSVRLLVRDYKKQQKLLKKNFTEEERKEFKERNLNDTKYITRVVYNMIRQNLELEPFNHPEKKKQVWAVNGAVTSYLRKRWGLMQKDRSTDRHHAMDAVVIACCTDGMIHKISRYMQGRELAYSRNFKFPDEETGEILNRDNFTREQWDEKFGVKVPLPWNSFRDELDIRLLNEDPKNFLLTHADVQRELDYPGWMYGEEESPIEEGRYINYIRPLFVSRMPNHKVTGSAHDATIRSARDYETRGVVITKVPLTDLKLNKDNEIEGYYDKDSDRLLYQALVRQLLLHGNDGKKAFAEDFHKPKADGTEGPVVRKVKIEKKQTSGVMVRGGTGIAANGEMVRIDVFRENGKYYFVPVYTADVVRKVLPNRAATHTKPYSEWRVMDDANFVFSLYSRDLIHVKSKKDIKTNLVNGGLLLQKEIFAYYTGADIATASIAGFANDSNFKFRGLGIQSLEIFEKCQVDILGNISVVRHENRQEFH

SEQ ID NO: 23553 - protein, 1498 aa, unidentified
  REGION 1..1498: note = Cas Enzyme sequence
IDEYNKEHLYGIEACGSRIIPMDAAILGNFDKGNSISQTADRTSYRGIRRLRERHLLRRERLHRILDLLGFLPKHYSDSLNRYGKFLNDIECKLPWVKDETGSYKFIFQESFKEMLADFTEHHPKLIANNKKVPYDWTIYYLRKKALTQKISKEELAWILLNFNQKRGYYQLRGEEEETPNKLVEYYSLKVEKVEDSGEKKGKDTWYNVHLENGMIYRRTSNIPLDWEGKTKEFIVTTDLEADGSPKKDKEGNIKRSFRAPKDDDWTLIKKKTEADIDKIKMTVGAYIYDTLLQKPDQKIRGKLVRTIERKYYKNELYQILKTQSEFHEELRDKQLYIACLNELYPNNEPRRNSISTRDFCHLFIEDIIFYQRPLKSKKSLIDNCPYEENRYIDKESGEIKHASIKCIAKSHPLYQEFRLWQFIVNLRIYRKETDVDVTQELLPTEADYVTLFEWLNEKKEIDQKAFFKYPPFGFKKTTSNYRWNYVEDKPYPCNETHAQIITRLGKAHIPKAFLSKEKEETLWHILYSIEDKQEIEKALHSFANKNNLSEEFIEQFKNFPPFKKEYGSYSAKAIKKLLPLMRMGKYWSIENIDNGTRIRINKIIDGEYDENIRERVRQKAINLTDITHFRALPLWLACYLVYDRHSEVKDIVKWKTPKDIDLYLKSFKQHSLRNPIVEQVITETLRTVRDIWQQVGHIDEIHIELGREMKNPADKRARMSQQMIKNENTNLRIKALLTEFLNPEFGIENVRPYSPSQQDLLRIYEEGVLNSILELPEDIGIILGKFNQTDTLKRPTRSEILRYKLWLEQKYRSPYTGEMIPLSKLFTPAYEIEHIIPQSRYFDDSLSNKVICESEINKLKDRSLGYEFIKNHHGEKVELAFDKPVEVLSVEAYEKLVHESYSHNRSKMKKLLMEDIPDQFIERQLNDSRYISKVVKSLLSNIVREENEQEAISKNVIPCTGGITDRLKKDWGINDVWNKIVLPRFIRLNELTESTRFTSINTNNTMIPSMPLELQKGFNKKRIDHRHHAMDAIIIACANRNIVNYLNNVSASKNTKITRRDLQTLLCNKDKTDNNGNYKWVIDKPWETFTQDTLTALQKITVSFKQNLRVINKTTNHYQHYENGKKIVSNQSKGDSWAIRKSMHKETVHGEVNLRMIKTVSLNEALKKPQAIVEMDLKKKILAMLELGYDTKRIKNYFEENKDTWQDINPSKIKVYYFTKETKDRYFAVRKPIDTSFDKKKIKESITDTGIQQIMLRHLETKDNDPTLAFSPDGIDEMNRNILILNKGKKHQPIYKVRVYEKAEKFTVGQKGNKRTKFVEAAKGTNLFFAIYETEEIDKDTKKVIRKRSYSTIPLNVVIERQKQGLSSAPEDENGNLPKYILSPNDLVYVPTQEEINKREVVMPIDRDRIYKMVDSSGITANFIPASTANLIFALPKATAEIYCNGENCIQNEYGIGSPQSKNQKAITGEMVKEICFPIKVDRLGNIIQVGLCILTN

SEQ ID NO: 23554 - protein, 1476 aa, unidentified
  REGION 1..1476: note = Cas Enzyme sequence
  REGION 1444..1447: note = misc_feature - Xaa can be any naturally occurring amino acid
MDQGVLDTFSGGNPVETQTAARTVYRGTRRLRERALLRRERLIRVLNMMKFLPEHYASQIDFEKRLGQFFDEKEPKLAWKQNDEGRFEFIFQQSFNEMIEEFKNKGVVREDKKIPYDWTIYYLRKKALSQEIEKEELAWILLNFNQKRGYYQLRGEEEEENPNKLVEYYSLKIVDVIADEKPNSKSDIWYSLHLENGWIYRRSSKIPLFGWKDKTRDFIVTTDLNDDGTVKKDKEGIEKRSFRAPSENDWVLLKKKTESDIEKSHKTVGAYVYETLLQNPMQKVRGKLVRTIERKFYKDELKQILEKQREFHPELRDEDLYNDCVRELYRSNETYQFILSKRDFVHLFLDDILFYQRPLRSQKSAIGDCILEFKTYKDKDGNNIKEYLKVISKSNPLYQEFRIWQWLYNLKIYRKEDDEDVTLQFIANIEDKEQLFDFLSNRKSIEQKPLLEYLIKAKGLKKQVKTEAYRWNYVEDKIYPCSETKTMISTRLAKVENIPDNFFTKEIEQKLWHIIYSVTDKNEFEKALRTFAKKYDLDIASFVDNFKKIPPFKNEYGSFSEKAIKKLLPLMRLGKYWKWNDIDNNTQNRISKIITGEYDEEIKDIVREKSIALTNENDFQGLQLWLAQYLVYGRHSEADIAGKWHSVADLEKYLNEFKQHSLRNPIVEQIITETLRVVRDIWRKYGQGAENFFSEIHVELGRDMKNTADERKKIVNVVTENENTNLRIKALLMELKNNSDGKLEVENVRPYSPTQQDILKIYEEYAISTGLDNEKDEKVKEDIKKISRVAQPTTTELQRYKLWLEQKYCSPYTGKVIPLGKLFTEEYQIEHIIPKSRYYDDSFSNKVICEAAVNKLKDKCLGLEFIKNYHGQIVETGFGQKVTIFDEEAYQNFVKQHYAYNHSKRTKLLLEEIPEKMIERQMNDTRYISKFVLPLLSNLVRAKENDNGVNSKNVLPVNGKITTMLKQDWGLNDVWNDLILPRFVRMNELAKTIAFTSWNEQHQKYLPTVPLELSKGFQKKRIDHRHHAMDALVIACATRDHVNLLNNKHANTDTIRYDLQRKLRLFERVTYIDPQTKNNVTKDIPKEFKKPWDNFTVDARNELEKIIVSFKQNLRIINKATNIYTKYENGKKIKVGQKGLNWAIRKPLHKETVFAKVSLRKRKTVRLSEALKDWKKIVDKKLKQEIKRLTCQYGKFDVDTILRYFKDRKYQFGEVDVSKVKMYYFDEENAAVRKNVDTSFTEKFIQGSVTDTGIQKILLNHLEAKGNKVEIAFSPEGIEEMNKNIIQLNEGKLHLPIFKVRVYETIGNKFSVGVKGNKKDKYVEAAKGTNLFFAIYVDENGIRSYETIPLNIVIERLKQGLSVVPEKNRKEHSLLFYLSPNDLVYVPIEDERENIHAVNLDQLNNEQRKRIYKMVSCTGSECHFVPYYVASPIVNKVEYSSLNXXXXRSLTGEMIKDVCIKLKVDRLGNIKGISGL

SEQ ID NO: 23555 - protein, 1178 aa, unidentified
  REGION 1..1178: note = Cas Enzyme sequence
LVRTIERKYYKEELKQILDKQKEFHPELQDRALYAACVEELYTINEAHRNNIGNRDFTYLFLEDILFYQRPLKSKKSLIDNCPYEENHCLDKETGEIKSFPVKCIAKSHPLFQEFRLWQFIVNLRIYRKGLAQDVDVTNELLKTEEDYVALFDWLNGKKEIDQKAFLKYPLFGLKKEVENYRWNYVQDKPYPCNETRSSMLARLEKCDISIEFLTKENEEALWHILYSVEDKNEIVKALQKFADKHDLNASFVDVFRKFPPFKKEYGSYSAKAIKKLLPLMRMGKYWSENSIDKGTRERIDKIITGEYDEKIENRVREKAIHLADVSDFRGLPLWLVCYIVYGRHSEAKEITQWKSPADIDSYLKSFKQHSLRNPIVEQIIIETLRVVRDIWKQVGNIDEIHVELGREMKNPADKRKKMTQQMSENENTNLRIKYLLTEFLNPEYEVENVRPYSPSQQDILRIYEEGVLNSVSDLPEEISDILKKFTETDLKKRPSRSEILRYKLWLEQKYRSPYTGEVIPLGKLFTPAYEIEHVIPQSCYFDDSFSNKVICEAEVNKLKSNLLGHEFIVKHHGEIVELPFGKKVRIFTVDEYEQFVKDNYSRTRGKMKKLLMDDIPEEFVTRQLNDSRYISKVVKSLLSNIVREKGEEEAISKNIIPCTGGVTDRLKKDWGINEVWNKIILPRFQRLNELTGTNKFTTKNVGIQEIPTMPLELQKGFNKKRIDHRHHAMDAIIIACANRNIINYLNNESATAKAELSRYDLQKLLCDKAKTDNNGNYKWVIRKPWASFTQDTYLALENIIVSFKQNLRVINKATNHFLHYNEEGKKIFVKQGKGDNWAIRKSMHKDTVFGEVNLRRIKTVALNEAMKNPQSIVVKDFKRKLLELWNLGFDAKRIKKYFEDNRETWSDINLSKIEVYYFSKDTKDRFFATRKPLDTSFDRKKIENNITDTGIQKILLRHLELKDNNPDIAFSPDGIDEMNRNIIQLNNGKYHQPIIKVRWYEQADKFAVGQTGNKSSKFVEAAKGTNLFFAVYESNILDKKTNTIIKKRNYATIPLNVAIERQKQGLSVAPEDENGNDPIFVLSPNDLVYLPTDDELANGIIAQPLDRGRIYKMVSCTGNEGHFIPARIANPILQTIELGSNNKAQKAWTDEMIKEICMPIKVDRLGNVLESSSSYKK

SEQ ID NO: 23556 - protein, 1007 aa, unidentified
  REGION 1..1007: note = Cas Enzyme sequence
TKVIGCKVIPRSHPLFQEFKVWQTLNDIKVLGREKKRNALSASESRALYPEEKEILARELAIKENMKKADVLKLLFENPQELDLNFKQIDGNRTGFSLFSAYSKMIEKYGYEPLDFKKPADEIIGQLRTIFTDLGWNTNLFTIDLTKEGKELEMQPYFRLWHLLYSFEGDNTSTGNGKLIEKIMQLCGVEKEYAVELASLSFQDDYGSLSAKAIKRILPYLKEGNLYDVACEYAGYRHSKSSLTKEEIENKVLKGKLEVLPKNSLRNPVVEKILSQMVNVINTIIDTYGKPDEIRVELARELKKSAKEREELTKAIAKSTREHEEIRKLLQDEFGMMNVSRNDIIRYKLYEELKDNGYKTLYSNQYIPKEKIFSKEIDIEHIIPQSRLFDDSLSNKTLEYKAINIEKGNKTAYDFVKEKYGEEGLQQYINRCESLFNDKKAKLRKLKMEQKDIPDGFIDRDLRNTQYIAKKALAMLNEICRRVVATTGSITDQLREDWQLVDLMKELNLPKYEKLGMVEMFEDKDGRKIKKITDWTKRNDHRHHAMDALTVAFTKDAFIQYFNNKNAAQDSGNRNHTNIIGIKTRYFDKGRALPPIPLEQFRIEAKQHLEKLLVSIKAKNKVVTVNVNRTKKRKGENTKIQQTPRGQLHLETVYGSHKQYVTKIEKVNASFDAAKIATVSKRAYRNALLKRLETFGNDPKKAFTGKNALEKNPLYADKYQTIRVPEKVQTVEFETIYTIRKPVDPALNVDKVVDVKVRAILERRLKEYGGDPKKAFVNFWENPIWLNKEKGISIKRVSIRGINNAQSIHVKKDKNGNPIWDENGKQIPVDFVNTGNNHHVAIYRKPVLDKKGQVTFDEDGNLMYELDEVVVPFFEAVTRANLGLPIIDKDYRKSEGWQFLFSMKQNEYFVFPNEKTGFNPKEVDLLNPDNYAMISPNLFRVQTMSKVMYGNNVVRDYKFRHHLETTVKDMKELKDIAYKQYKTLSFGNSVVKIRINHIGQIVSVGEY

SEQ ID NO: 23557 - protein, 1524 aa, unidentified
  REGION 1..1524: note = Cas Enzyme sequence
MKTILGLDVGTNSIGWALIEHGPENRKGRIIGMGSRIISMGAELSNFERGQAQTKNANRRIARGARKLNKRYKQRRNKLIYALKELGMLPNQIQLVKDFFDPNKIDKISIKPIKKRQPQLTAFDLLELRVKALSEKIELKDLGRIIYKYNQLRGYAGGNAEPDKEDNNDDAEYQEKKNENYIAFARVLQLGIPEEVTIKNRKFNKRKISIETDDGILDGETYLDSLKENDSLELQVNIRRSKSGESITVKLPDKTNWRKKMENLEKELKEKSKELGREVYISEHLFDIVKENPRAKIRNNVILRSRYESEFDAIWDSQYKVNEDFKRLVDNKKLLTKILCFIFPGTSKTQEQFRAEGLEKGLKYVLKNQIIFFQRELKDQSHLISDCRFEPKEKVAPKSHPIFQEYKIWEQINKLLINTKTEVGVNRKGEQKYTYIDRPIPASLKVKLFDDLQNKKEISYGVIYNELKKKYELREKVDFLNGLNVKAKLKGNETRIMLQKSLGNYLWEALNLDAIERQTELWNILYHGKGNEYDIHSERTSRVLRFLKEYGPGIDNVEDTAIRISKIKFSRSYSNLSLKAIEKLLPLVRAGKYFDNAFSNEIHSRIVKLLNENVEDPFEKAAQEFLEKNSMVLEEGGIVNAMAVILVYGKHTAKEFTEDELVKTPTGISFIKNGSLRNPLAEQIINETLAMVKDIWRKYGGKPDEIRVELARELKSSAEERAKIYSVNQKNQKANEAVREKLIELKEELSIANIEKYKLWLSQENLQEEYIKHYSDPSKSEVEKLKLWEEQGHVSPYTGQPIPLSHLFNKARYDIDHIIPKSRYFDDSFTNKVICEKAVNTDKGNRTAMEYFETGSMTQKIFSKDDFIDHANKLFTGRKRKNLLATKVPEDPIQRQIKDTQYIAVKVREELNKIVGNENVEATSGGVTDYLRNHWGLTDKFKSMLKERYENIQPKLSEIAYNEYVKNIQTKQKEYAEKNIPFNDIVLNNELFVEKFNKEFFKKKNNKLVINGWSKRIDHRHHALDALIIACTQPPHIKRLNDLNKVLEDWLKKNKETFLPDFNGSKAELLDEVLNLDENKRKSIFKELDKFTDIQIPWQGFVEEAEEGLKQIIVSHKPKDKLLLQYDEKGNRQIKLRGQLHEGTLYGKTNGRESYRIPLLKLAGKNFATEKIIEKIVDPFLKKQIREHLNQYKGKKDEAFSAEGILDLNNKLAERRGKNDNPAPHTPVSTIKIYYKDPDKNKNANDEEIITLQKLDRSKAFNNSLYVKTGDNYLFAVMEKDYFNKKTRQTEKKRVFDLITFFDAANLLKGEFNKSSDKNTFDKDLLFKKYFEEKNQAKLLFTLKQDDFVYLPEENEDVVFDKESPLFDDFWNDSGVRSKNVYVVQKFSGKQIYFIKHTVADMIKKKVEFGSQDCYEIANGKSIKEHCFKLHVNRLGEITDIINHDEVAESFKQTQSSVVHEPEVVYQTKNVQFFDSLSEMDNEDARFMAMSSPEQHLKNATELNKNIFQEKLSHPMDKKLRFRE

SEQ ID NO: 23558 - protein, 1455 aa, unidentified
  REGION 1..1455: note = Cas Enzyme sequence
MARVLGLDLGTASIGYSLRDTDKGTNITEQLVRFGSIIFQKGVGNSKTGEFSYAAERTKHRASRRLYQARRYRIWETLATLIEFGFCPLSIEDLDRWRVYDKARNLKRRYPVDAVNFEQWVRLDFDGDGKSDYSSPYQLREELAIVQLDFSQEINRFKLGRALYHIAQRRGFKSSKGETLKEQEDAVKDGIANEMSLESVSLKKSEERKSKDLASYMEENALHTVGCAFAQLEREGVRVRASKYQAVRSQYKEEIKYIFEFQNGLDIDGDFFKRIYSDRKDGCIFYKRPLRSQKGLVGKCTLEPAKSRCPISHPEFEKFRAFAFINNIQYRRTTEDEWLNLTAEQKLKLYNDKFLQAKPSFKFEAIRKWIEKEIGLLQDYHLSKEKRTINYSDRTNVTGCPISGRMKALLGEKWEEYKQQSDKIRKNKNGKEHVVSYMMEDIWHVCFSYDDEEAVSEFAKSLKFDDKQVKQFLNLWIAIPQGYAMLSLKAIRNINRFLVPKRDNPLYKGHIYTEAALLGKMPEILGEKQWADNEKSILGAINGWINQNREEKRILNIVNNLISAYKSLEYAEQFAYKNIEYQLDDSDKEDIEKYTIEAFGQKSWEKETQEMKDKVLKDVERMYQQFFFTSKRDYFRLPKLGDTIKLYLSSNFPEFYCANSFVESQTGLQCRCAACKKLNKLYHPSMVEFYKPANEQEFEYDGVMLSKKLLANPVIGAFKNPMAMRTLHQLRNLINYFIKEGLVEEDTRIVVETARDLNDANMRWAIEEYQREREKENKAILEAIKELKGEEKNNDDIDKARLLIEQNPEYLFNKDRYEVESGDDTNNKKKKAVGKATDFLYKKDVAKYRLWLEQGMQCIYTGKTISISELFDENKTDFEHTIPRSKSFDSSLANLTVCDAYYNRHIKKNCIPTELPNYEEIEHRLQPWKKKVEQLKNNVEFWRQKSKQAQTKDVKDKAIRQKHLWQMELDYWQDKLSRFTMTEVTSGFKHSQLNDTRLITKYAYHYLKSVFSKVEVQKGLVTADFRKMLGVQSADEKKDRNKHSHHAIDATILSLIPVAAKRDKILELFYKIQEEKKLNFNTEYWEKELQKEIRSCQIGNISSLPDYIEENILINHISKDQTLVPAKRKMRTRGKVIWQRDEDGQICMDKDGYKMPKHWIKGDCIRGKLHGDSFYGAIKQSKKKGEKDYLTSYEDISYVIRRELKYKKTPTDKGFKDLDDLHLSIVDEGLFNIIKQQCDGKSFKEACDDGFYMLNRDGYKVNKIRHIRCYTSVKKPLSIKRQSYLSDKEYKQSYYAEVGDLYAMCKYCNADKTKVRYEVINLFDITENRRYGYNIAEVLEDDKKKEKYYLVAVLQAGKQVILYKNDDELESIIEMSNDKLSDRLYVISGFESPYRIILKKHICAKSDSELGRGESIKSFNELPDKIRQSVNATNYLLEDIDFYISPDGLITFKND

SEQ ID NO: 23559 - protein, 1154 aa, unidentified
  REGION 1..1154: note = Cas Enzyme sequence
MKNILGLDLGSSSIGWAVIRENSEGQELVAMGSRVVSLTAAELSSFTQGNGVSINSQRTQKRTQRKGYDRYQLRRTLLRNKLDTLGMLPDDSLSHLPKLQLWGLRAKAVTQRIELNELGRVLLHLNQKRGYKSIKSDFSGDKKITDYVKTVKTRYDELKEMRLTIGELFFRRLTENAFFRCKEQVYPRQAYVEEFDCIMNCQRKFYPDILTDETIRCIRDEIIYYQRPLKSCKYLVSRCEFEKRFYLNAAGKKTEAGPKVSPRTSPLFQVCRLWESINNIVVKDRRNEIVFISAEQKVALFDFLNTHEKLKGSDLLKLLGLSKTYGYRLGEQFKTGIQGNKTRVEIERALGNYPDKEKLLRFNLQEVSSSVVDVETGEIIPTISPSFEQEPLYRLWHVLYSIDDREQLQSVLRQKFGIDDDEVLERLSAIDLVKAGFGNKSSKAIRRILPFLQLGMNYAEACEAAGYNHSNNYTKAENEARALLDRLPAIKKNELRQPVVEKILNQMVNVVNALMEKYGRFDEIRVELARELKQSKEERSNTYKSINKNQRENEQIAKRIVEYGVPTRSRIQKYKMWEESKHCCIYCGQPVDVGDFLRGFDVEVEHIIPKSLYFDDSFANKVCSCRSCNKEKNNRTAYDYMKSKGEKALSDYVERVNTMYTNNQISKTKLQNLLTPVDKISTNFIDRQLRESQYIARKAKEILTSICYNVTATSGSVTSFLRHVWGWDTVLHDLNFDRYKKVDLTEVIEVNHRGSVIRREQIKDWSKRLDHRHHAIDALTIACTKQAYIQRLNNLRAEEGPDFNKMSLERYIQSQPHFSVAQVREAVDRILVSFRAGKRAVTPGKRYIRKNRKRISVQSVLIPRGALSEESVYGVIHVWEKDEQGHVIQKQRAVMKYPITSINREMLDKGKVVDKRIHRILSDRLAQYNDNPKEAFAKPVYIDKECRIPIRTVRCFAKPAIKTLVPLKKDDKGNTVAWVNPGNNHHVAIYRDEDGKYKEQTVTFWEAVDRCRVGIPAIVTQPDTIWDNILQRNDISENVLESLPDVKWQFVLSLQQNEMFILEMKEEDYRYAMDQQDYALLNKHLYRVQKLSKGDYSFRYHTETSVEDKYDGKTNLKLSTQIGKLKRVQSLEALFNLHPHKVHISVLGKIKEIS

SEQ ID NO: 23560 - protein, 1178 aa, unidentified
  REGION 1..1178: note = Cas Enzyme sequence
MKKVLGLDIGVNSVGYALIGSDTEDNSLKILKTGVRIVNEDPDFHGNFYQGNSASKNEARRTKRMIRRGNQRFKARRDALYRTLRKNSMFPSDKLLNRVSEGTLYRLRAMAVSERLTLEEIGRVFIHLNQRRGYKSNRKSEKKTEEGSYLANIAELGELTKDLTIGQFWDAYISFKSNNIDRIPIVLLDWFRFRTETEPDFRIRETIFPRDSYISEFDKIWECQASFYPTVLTGMPGKTFRENKGTLYQRIRNEIIFYQRKLKSQKHLVSDCSFEKGHKVVPKSSPFYQEFRIWQQINNLEVTDLSNNKMPIESEGRKRVFDALHDTDQLNKRNTLPYTAILKILGYSGRSYHLNFNMLEGNKTYITIFNALKKAGIEQPDRYLSFDNTQKIVSTGLYDLWHITYSLDDESDVIKTLVKRYGFTYNQAEIIAGEVGYTSDYGSLSTRAIRKLLPYLEEGKNYYEACVTVGYQNPEHVQREELKIHMDNIFPNSLRNPVVEQVLNQVVNVVNGIIDTYGHIDEVRVELARDLKNNAKQRKELTKKNRNLRKLNDTISLRLKQEHGFSRVSGSDLLRYRLWDETEKRCLYCGQNITVSQLYNGEAEIEHIIPWSRSFNDAMTNKIIAHSKCNRDKDQMTAYDFMASKGEAELGRYVADVNRLFTEGSGRLDSDKKVRITRAKKDNLLCKGSEIKGDFLARQLKDTQYIVLETVSRLKDVFPKVTTTTGSVTDYLKETWQLKSLIDEMNIDKYRSVGETEWREEKDRENGLRKVERIKNWSKRDDHRHHALDALVVALTTQGIIQRINNANKMFETTREMKEKTFGFLPPAPDLRRKAMESLGEILVSFKKPGSKVLSRKVNVINTSKGKKEQVTWAPRGSLHEDTIFGICRWYEKIKVNKKLNEKTASQIVGEEVRMAVLERLATFNGDSSKAFEKPLFLGEKEIKEVTILSTRFTKRVTLSEKITPAQVEKIIDPTIQKLVRERIESKGGIKQAFRDYLNDPIWQNTEKGIMLKHVTVFDDGNLESVRNGYVYTKGNHHALIYSDANGRYFDHIVSFWEAVSNCLVNLDTNGSIYPVIDRRDKGNHKFVFSMQINDLFVFDVNPEEVNFFDPVNKPLLAKNLYRVQAMSKGDYLFRHQYEATVQKKYDFTYKRITSMDKLKGAVKIRINHLGDIIKIGE

SEQ ID NO: 23561 - protein, 1451 aa, unidentified
  REGION 1..1451: note = Cas Enzyme sequence
  REGION 1174..1177: note = misc_feature - Xaa can be any naturally occurring amino acid
ISQTAERTRLRGIRRLSERYLLRRERLHRILDILGFLPSHFAQDLDRHGKIVKGKEPKLAWRKNEAGQFEFIFQDSFKEMLEDFKLNHPNLITDDKKVPYDWTIYYLRKKGLTSKISKEELAWILLNFNQKRGYYQLRGEEEEENNNKLVEFYALKVVAVEDSGEKKGKDIWYNVHLENGWVYRRTSNIPLDWVGKTKEFIVTTDLEKDGTPKKDKEGNVKRSFRAPKEDDWSLVKKKTEADIDQTHKTVGTYIYDTLLGNPSQKIRGRLVRTIERKYYKEELKLILDKQKEFHPELQDRALYAACVEELYTINEAHRNNIGNRDFTYLFLEDILFYQRPLKSKKSLIDNCPYEENHCLDKETGEIKSFPVKCIAKSHPLFQEFRLWQFIVNLRIYRKGLAQDVDVTNELLKTEEDYVALFDWLNGKKEIDQKAFLKYPLFGLKKEVENYRWNYVQDKPYPCNETRSSMLARLEKCDISIEFLTKENEEALWHILYSVEDKNEIVKALQKFADKHDLNASFVDVFRKFPPFKKEYGSYSAKAIKKLLPLMRMGKYWSENSIDKGTRERIDKIITGEYDEKIENRVREKAIHLVDVSDFRGLPLWLVCYIVYGRHSESKEITQWKSPADIDSYLKSFKQHSLRNPIVEQIIIETLRVVRDIWKQVGNIDEIHVELGREMKNPADKRKKMTQQMSENENTNLRIKYLLTEFLNPEYEVENVRPYSPSQQDILRIYEEGVLNSVSDLPEEISDILKKFTETDLKKRPSRSEVLRYKLWLEQKYRSPYTGEVIPLGKLFTSAYEIEHVIPQSCYFDDSFSNKVICEAEVNKLKSNLLGHEFIVKHHGEIVELPFGKKVRIFTVDEYEQFVKDNYSRTRGKMKKLLMDDIPEEFVTRQLNDSRYISKVVKSLLSNIVREKGEEEAISKNVIPCTGGVTDRLKKDWGINEVWNKIILPRFQRLNELTGTNKFTTKNVGIQEIPTMPLELQKGFNKKRIDHRHHAMDAIIIACANRNIINYLNNESATAKAELSRYDLQKLLCDKAKTDNNGNYKWVIRKPWASFTQDTYLALENIIVSFKQNLRVINKATNHFLHYNEEGKKIFVKQGKGDNWAIRKSMHKDTVFGEVNLRRIKTVALNEAMKNPQSIVVKDFKRKLLELWNLGFDAKRIKKYFEDNREXXXXTWSDINLSKIEVYYFSKDTKDRFFATRKPLDTSFDRKKIENNITDTGIQKILLRHLELKDNNPDIAFSPDGIDEMNRNIIQLNNGKYHQPIIKVRWYEQADKFAVGQTGNKSSKFVEAAKGTNLFFAVYESNILDKKTNTIIKKRNYATIPLNVAIKRQKQGLPVAPEDENGNDPIFVLSPNDLVYLPTAADLANGIIAQPLDRGRIYKMVSCTGNEGHFIPARIANPILQTIELGSNNKAQKAWTDEMIKEICMPIKVDRLGNVLESSSSHKK

SEQ ID NO: 23562 - protein, 1426 aa, unidentified
  REGION 1..1426: note = Cas Enzyme sequence
HTMKRILGLDLGTNSIGWALVNEAETDEEVSSIIRLGVRVNPLTVDETQNFEKGKSITTNAERTLKRSMRRNLQRYKLRRDALVEFLKELGFITDETILSEQGNRTTFETCRLRAKAAEEEISLEELSRVLLMINKKRGYKSSRKVKKEEDGVLIDGMEIAKKLYEEDLTPGQLCSQLLESGKKVLPDFYRSDLQEELDRIWSVQKQFHPDVFCDAAKEEIKGKNRSQTWAILANYFVWKEEVVGWNDREAKNETIEKECKLVGLKRTTKGYELKKENYRWRAQALTEQLGLEEIAVVLQEINGQINASSGYLGAISDRSKVLYFNHQTVGQYQMAELDKNPHASLRNMVFYRQDYLDEFDRIWEKQAEFHKELTAELKKEIRDMIIFYQRRLKSQKGLISFCEFERLEIVVEKDGKKQTKVIGCKVIPRSHPLFQEFKVWQTLNDIKVLGREKKRNALSASESRALYPEEKEILARELAIKENMKKADVLKLLFENPQELDLNFKQIDGNRTGFSLFSAYSKMIEKYGYEPLDFKKPADEIIGQLRTIFTDLGWNTNLFTIDLTKEGKELEMQPYFRLWHLLYSFEGDNTSTGNGKLIEKIMQLCGVEKEYAVELASLSFQDDYGSLSAKAIKRILPYLKEGNLYDVACEYAGYRHSKSSLTKEEIENKVLKGKLEVLPKNSLRNPVVEKILSQMVNVINTIIDTYGKPDEIRVELARELKKSAKEREELTKAIAKSTREHEEIRKLLQDEFGMMNVSRNDIIRYKLYEELKDNGYKTLYSNQYIPKEKIFSKEIDIEHIIPQSRLFDDSLSNKTLEYKAINIEKGNKTAYDFVKEKYGEEGLQQYINRCESLFNDKKAKLRKLKMEQKDIPDGFIDRDLRNTQYIAKKALAMLNEICRRVVATTGSITDQLREDWQLVDVMKELNLPKYEALGFVETYEDKDGRKIKRIKDWTKRNDHRHHAMDALTVAFTKDAFIQYFNNKNAAQDSGNRNHTNIIGIKTRYFDKGRALPPIPLEQFRIEAKQHLEKLLVSIKAKNKVVTVNVNRTKKRKGENTKIQQTPRGQLHLETVYGSHKQYVTKIEKVNASFDAAKIATVSKRAYRNALLKRLETFGNDPKKAFTGKNALEKNPLYADKYQTIRVPEKVQTVEFETIYTIRKPVDPALNVDKVVDVKVRAILERRLKEYGGDPKKAFVNFWENPIWLNKEKGISIKRVSIRGINNAQSIHVKKDKNGNPIWDENGKQIPVDFVNTGNNHHVAIYRKPVLDKKGQVTFDEDGNLMYELDEVVVPFFEAVTRANLGLPIIDKDYRKSEGWQFLFSMKQNEYFVFPNEKTGFNPKEVDLLNPDNYAMISPNLFRVQTMSKVMYGNNVVRDYKFRHHLETTVKDMKELKDIAYKQYKTLSFGNSVVKIRINHIGQIVSVGEY

SEQ ID NO: 23563 - protein, 1535 aa, unidentified
  REGION 1..1535: note = Cas Enzyme sequence
MKNVLGFDLGTNSIGWAVVQEKYNESNILIKQILGAGSRIIPMDAAQLGDFAKGNTISQTKDRTQFRGVRRLRERCLLRRERLLRILDIMGFLPQHFSNALTRYGKFKDADEEPKIAWRKDNEGKMHFLFADSFNEMIEEFRSVQPELLKRGMKVPYDWTLYYLRKKALRETVTPFELAWIILNFNQKRGYYQLRGEEEGEADNNKCEEYLAQKVVDVIDTGEKKGKSTWFDIVLENGMVYHCSAEIKPDWIGKTKEFIVTTQFDKDGNPKKDKKGNIKMSLRMPNENDWNLQKKKAEKDIDESGMTVGEYIYNALLHNPKQKIKGKLVRVVERKYYKNELQKILESQKRFIPQLSDSALYEKCIKELYQSNEAYRNSISTRNDFTYLFVDNIIFYQRPLKSKKSLIDNCPYESLTYTKDGEEHKAPVKCIAKSHPLYQEFRLWQFISNLRIYQRQKQVGDKVKLDVDVTDEFLPTDDRREALFDYLNDKTEIKQDVLLKEFFNMKKPKGKDSVYPYRWNYVEDKSYPCNVTRGKILAKLNKAGVSADFLSSNGNEESLWHILYSVEDKGELRKALARFAAKNGLDNAFTEALADIEPYKKEYGAYSAKALKKLLPLMRLGKYWNYDNIAPATKARISKIIDGEYDDNIRNRVREKAMSLTSASQFQGLPLWLACYIVYDHHSERADSGRWSSPEDIDKYLSDFKQHSLRNPIVEQVVTETLRTVRDIWKKYGEISEIHVELGREMKNPADKRSKMNRRMLENENANMRAKLLLTEFMNPEFGIENVRSYSPSQQELLRIYEDGAISNAGSEIDDEISDIMNRLSQVDVKKQPTASEVKRYILWLEQNYRSPYTGQMIPLAKLFTPAYEIEHVIPQSRYFDDSFSNKVICEAEVNKLKDRMLGYEFIKQHKGEKVSLSMGGTVEILSPEEYVRHVESQYKNNKAKMRKLLMDDIPDEFINRQLNDSRYISKLIISLLSNIVREEGEEEATSKNVISCNGSITDRLKKDWGINDVWNHIILPRFRRLNELTGTDKFTTSNKEGHEVPDMPLELQKGFNKKRIDHRHHAMDAIVIACTTRDHVNLLNNEAAMSKNNANRIQLSKKLRRYESVEIEKDGIRKQISVAKEFKKPWEGFTADVERTLRDIVVSFKQNLRVINKTTNYYQHFKDGKKVYSPQSKGDSWAIRKSMHKETVFGEINLRRIKEVSLKEAMKRTKDIADKELRSKIVELMALQYNEKKIKQYFSDNKDEWSDVNPKKIKIHYFSKETNERFFATRKPLDTSFDKKKIKTQVADTAIQKILLNHLSAHGDKAETAFSPDGIDEMNRNIIELNNGKFHQPILKVRIYVKADKFAVGLQGNKKKKFVEAAKGTNLFFAIYTEEQIDEKTGEVFFKRTYNTIPLKVVIDREKRGLSPAPEDENGASPKYVLSPNDLVYIPTEEERKTNRINLPLDKERIYRFTDGCDNTANFAPANAASLIFSLRKDEAESFCKGDIIIQNEFGLGSPQSKNQRALTGEMIKEICIPISINRIGEITLR

SEQ ID NO: 23564 - protein, 1504 aa, unidentified
  REGION 1..1504: note = Cas Enzyme sequence
MKNILGLDLGTNSIGWAVVNGSVNDNGSEQLVKIQASGSRIIPMDAAMIGDFNKGNSISQTAERTRLRGIRRLSERYLLRRERLHRILDILGFLPSHFAQDLDRHGKIVKGKEPKLAWRKNEAGQFEFIFQDSFKEMLEDFKLNHPNLITDDKKVPYDWTIYYLRKKGLTSKISKEELAWILLNFNQKRGYYQLRGEEEEENKNKLVEFYALKVVAVEDSGEKKGKDIWYNVHLENGWVYRRTSNMPLDWVGKTKEFIVTTDLEKDGTPKKDKEGNVKRSFRAPKEDDWSLLKKKTEADIDQTHKTVGVYIYDTLLGNPSQKICGRLVRTIERKYYKEELKQILEKQKEFHLELQDRALYAACIEELYPINEAHRNNVGNRDFTYLFLEDILFYQRPLKSKKSLIDNCPYEENQGLDKETGEIKSFPVKCIAKSHPLFQEFRLWQFIVNLRIYRKDLAQDVDVTNELLKTEEDYVALFDWLNGKKEIDQKAFLKYPIFGLKKEIENYRWNYVQDKPYPCNETRSLMLARLEKCDISIEFLTKENEEALWHILYSVEDKNEIVKALQKFADKHDLNASFVDVFQKFPPFKKEYGSYSAKAIKKLLPLMRMGKYWSENSIDKGTRERIDKIITGEYDEKIENRVREKAIHLADVSDFKGLPLWLVCYIVYGRHSEAKEITQWKSPADIDSYLRSFKQHSLRNPIVEQIIIETLRVVRDIWKQVGNIDEIHVELGREMKNPADKRKKMTQQMSENENTNLRIKYLLTEFLNPEYEVENVRPYSPSQQDILRIYEEGVLNSVSDLPEEISDILKKFTETDLKKRPSRSEILRYKLWLEQKYRSPYTGEVIPLGKLFTPAYEIEHVIPQSCYFDDSFSNKVICEAEVNKLKSNLLGHEFIVKHHGEIVELPFGKKVRIFTVDEYEQFVKDNYSRTRSKMKKLLMDDIPEEFVTRQLNDSRYISKVVKSLLSNIVREKGEEEAISKNVIPCTGGVTDRLKKDWGINEVWNKIILPRFQRLNELTGTNKFTTKNVGIQEIPTMPLELQKGFNKKRIDHRHHAMDAIIIACANRNIINYLNNESATAKAELSRYDLQKMLCDKAKTDNNGNYKWVIRKPWASFTQDTYLALENIIVSFKQNLRVINKATNRFLHYNEEGKKIFVKQGKGDNWAIRKSMHKDTVFGEVNLRRIKTVALNEAMKNPQSIVVKDFKRKLLELWNLGFDAKRIKKYFEDNRETWSDINLSKIEVYYFSKDTKDRFFATRKPLDTSFDRKKIENNITDTGIQKILLRHLELKDNNPDIAFSPDGIDEMNRNIIQLNNGKYHQPIIKIRWYEQADKFAVGQTGNKFSKFVEAAKGTNLFFAVYESNILDKKTNTIIKKRNYATIPLNVAIERQKQGLPVAPEDENGNDPIFVLSPNDLVYLPTDDELANGIIAQPLDRGRIYKMVSCTGNEGHFIPARIANPILQTIELGSNNKAQKAWTDEMIKEICMPIKVDRLGNVLESSSSYKK

SEQ ID NO: 23565 - protein, 1506 aa, unidentified
  REGION 1..1506: note = Cas Enzyme sequence
MKKILGLDLGTNSIGWAMINSSVDDEGKEKLTSISSCGSRIIPMDAATLGDFDKGNAKSSVAERTRLRGIRRLLERSLLRRERLHRVLSVMGFLPEHYASQLDRYGKFLPETEPKLAWYKDNTGSYRFLFQDSFNEMLEDFRLYHPELVAEGKKIPYDWTIYYLRKKALSQKIAKEELAWILLNFNQKRGYYQLRGEEEQEDNKKSVEYYALKVVAVEDSGERKGKDIWYNVKLENGWIYRRASSIPLDWTGKVKEFVVTTDLDDAGNPKKDKDGNVKRSFRAPKEDDWGLLKTKTQTQIDESGQTVGAYIFDSLLRMPDQKIRGKLVRTIERKYYKDELRKILLKQTEFHAALQDHNLLLSCIEELYPNNEAHRRLLSSSSFTCFLLEDILFYQRPLKSQKGLIDDCPYESHVYKKDGSLHRTPLKCISKSHPLFQEFRLWHFLSFLRIYQRERMIDGSLKLDVDVTNEFLQNEDDYVKLFDWLNGRKEIDQKTILAYKPFGLKKNEQPKYRWNYVEDKSYPCNETRADMISRLSKAGVSEGFLTEEREEALWHILYSISDKKELTKALGTFAEKNGLNEAFVELFSKMPPFESNYAAYSLKAIRKLLALMRMGKYWNEQDIDKQTRSRIEKILTGEYDETIRTRVREKAIHLTDISSFRGLPLWLACYVVYNRHSEAKKLVKWETPADIDHFLSKFRQHSLRNPIVEQVIMETLRTVRDIWKQEGQIDEIHVELGREMKNPAKERARITAQVLENENTNLRIKALLTEFMNPEFEIENVRPYSPGQQEILRIYEEGVLSGVAEKDLPEDIISILKKFRENDVKKRPTTSEVLRYKLWLEQRYRSPYTGRIIPLGKLFTPAYEIEHVIPQSRYFDDSISNKVICESAVNKLKDNCLGYEFIKKHSGEIVELGNGEKATVFTSEEYEHFVKESYLGNGKKMKKLLLEDIPDNFIERQLNDSRYISKVVKSLLSNIVCEEGEQEGMSKNVIVCTGGVTDRLKKDWGVQDVWNRIILPRFLRLNKMTDSTDFTSVSTNGHLLPALPLHLQKGFNKKRIDHRHHAMDAIVIACADRNIVNYLNNASARKGSEISRYDLQHLLCDKVKTDANGNYKWMLRKPWDTFTQDVYTALTNIVVSFKQNLRVINRTTNYYQHYNESGEKKMIPQVKGDRWAIRKPMHKDTVYGEVNLRREKTLPLKDVLNNPSIVVDKSLKSKLHELLKAQYDLKAITKYFEAHQDVWADINLKKIKVYYFTKETNERFFATRKSLDSSFNQKKIQEEVTDTGIQRILLRHLQLNDNNPDIAFSPDGIERMNQNMNILNDGKGHQPIYKVRTYEKAEKFAVGEHGNKVKKFVEAAKGTNLFFAVYESIQEDEATGKQVRKRTFATIPLNEVIKRKKQGLSVAPEDSNGNLPIFVLSPNDLVYLPTEEERNSGKVTQPLDRERIYKMVSCTGNRLFLVPYMVASPIYDKKEYTSLNKIELTDDKISIKEWCIPILIDRLGNISINY

SEQ ID NO: 23566 - protein, 1520 aa, unidentified
  REGION 1..1520: note = Cas Enzyme sequence
MKKIVGLDLGTNSIGWALINAYIDEYNKEHLYGIEACGSRIIPMDAAILGNFDKGNSISQTADRTSYRGIRRLRERHLLRRERLHRILDLLGFLPKHYSDSLNRYGKFLNDIECKLPWVKDETGSYKFIFQESFKEMLADFTEHHPKLIANNKKVPYDWTIYYLRKKALTQKISKEELAWILLNFNQKRGYYQLRGEEEETPNKLVEYYSLKVEKVEDSGEKKGKDTWYNVHLENGMIYRRTSNIPLDWEGKTKEFIVTTDLEADGSPKKDKEGNIKRSFRAPKDDDWTLIKKKTEADIDKIKMTVGAYIYDTLLQKPDQKIRGKLVRTIERKYYKNELYQILKTQSEFHEELRDKQLYIACLNELYPNNEPRRNSISTRDFCHLFIEDIIFYQRPLKSKKSLIDNCPYEENRYIDKESGEIKHASIKCIAKSHPLYQEFRLWQFIVNLRIYRKETDVDVTQELLPTEADYVTLFEWLNEKKEIDQKAFFKYPPFGFKKTTSNYRWNYVEDKPYPCNETHAQIITRLGKAHIPKAFLSKEKEETLWHILYSIEDKQEIEKALHSFANKNNLSEEFIEQFKNFPPFKKEYGSYSAKAIKKLLPLMRMGKYWSIENIDNGTRIRINKIIDGEYDENIRERVRQKAINLTDITHFRALPLWLACYLVYDRHSEVKDIVKWKTPMDIDLYLKSFKQHSLRNPIVEQVITETLRTVRDIWQQVGHIDEIHIELGREMKNPADKRARMSQQMIKNENTNLRIKALLTEFLNPEFGIENVRPYSPSQQDLLRIYEEGVLNSILELPEDIGIILGKFNQTDTLKRPTRSEILRYKLWLEQKYRSPYTGEMIPLSKLFTPAYEIEHIIPQSRYFDDSLSNKVICESEINKLKDRSLGYEFIKNHHGEKVELAFNKPVEVLSVEAYEKLVHESYSHNRSKMKKLLMEDIPDQFIERQLNDSRYISKVVKSLLSNIVREENEQEAISKNVIPCTGGITDRLKKDWGINDVWNKIVLPRFIRLNELTESTRFTSINTNNTMIPSMPLELQKGFNKKRIDHRHHAMDAIIIACANRNIVNYLNNVSASKNTKITRRDLQTLLCHKDKTDNNGNYKWVIDKPWETFTQDTLTALQKITVSFKQNLRVINKTTNHYQHYENGKKIVSNQSKGDSWAIRKSMHKETVHGEVNLRMIKTVSFNEALKKPQAIVEMDLKKKILAMLELGYDTKRIKNYFEENKDTWQDINPSKIKVYYFTKETKDRYFAVRKPIDTSFDKKKIKESITDTGIQQIMLRHLETKDNDPTLAFSPDGIDEMNRNILILNKGKKHQPIYKVRVYEKAEKFTVGQKGNKRTKFVEAAKGTNLFFAIYETEEIDKDTKKVIRKRSYSTIPLNVVIERQKQGLSSAPEDENGNLPKYILSPNDLVYVPTQEEINKGEVVMPIDRDRIYKMVDSSGITANFIPASTANLIFALPKATAEIYCNGENCIQNEYGIGSPQSKNQKAITGEMVKEICFPIKVDRLGNIIQVGLCILTN

SEQ ID NO: 23567 - protein, 1509 aa, unidentified
  REGION 1..1509: note = Cas Enzyme sequence
MKNILGLDLGTNSIGWAVVNGSVNDNGSEQLVKIQASGSRIIPMDAAMIGDFNKGNSISQTAERTRLRGIRRLSERYLLRRERLHRILDILGFLPSHFAQDLDRHGKIVKGKEPKLAWRKNEAGQFEFIFQDSFKEMLEDFKLNHPNLITDDKKVPYDWTIYYLRKKGLTSKISKEELAWILLNFNQKRGYYQLRGEEEKKNDNVMIINSKVIDVVKAEKDKKYEKYWYNVLLENGLLYRAAFYNDISFWKGHTKEFVLKTIKLKSGGTKQELSFLPSFDEIEKMEKKQKDKMYFKIKLKTEADIDQAHKTVGTYIYDTLLGNPSQKIRGRLVRTIERKYYKEELKLILDKQKEFHPELQDRALYAACVEELYTINEAHRNNIGNRDFTYLFLEDILFYQRPLKSKKSLIDNCPYEENQGLDKETGEIKSFPVKCIAKSHPLFQEFRLWQFIINLRIYRKDLAQDVDVTNELLKTEEDYVALFDWLNGKKEIDQKAFLKYPVFGLKKEIENYRWNYVQDKPYPCNETRSLMLARLEKCDISIEFLTKENEEALWHILYSVEDKNEIVKALQKFADKHDLNASFVDVFQKFPPFKNEYGSYSAKAIKKLLPLMRMGKYWSENSIDKGTRERIDKIITGEYDEKIENRVREKAIHLADVSDFKGLPLWLVCYIVYGRHSEAKEITQWKSPADIDSYLKSFKQHSLRNPIVEQIIIETLRVVRDIWKQVGNIDEIHVELGREMKNPADKRKKMTQQMSENENTNLRIKYLLTEFLNPEYEVENVRPYSPSQQDILRIYEEGVLNSVSDLPEEISDILKKFTETDLKKGPSRSEILRYKLWLEQKYRSPYTGEVIPLGKLFTPAYEIEHVIPQSCYFDDSFSNKVICEAEVNKLKSNLLGHEFIVKHHGEIVELPFGKKVRIFTVDEYEQFVKDNYSRTRSKMKKLLMDDIPEEFVTRQLNDSRYISKVVKSLLSNIVREKGEEEAISKNVIPCTGGVTDRLKKDWGINEVWNKIILPRFQRLNELTGTNKFTTKNVGIQEIPTMPLELQKGFNKKRIDHRHHAMDAIIIACANRNIINYLNNESATAKAELSRYDLQKMLCDKAKTDNNGNYKWVIRKPWASFTQDTYLALENIIVSFKQNLRVINKATNRFLHYNEEGKKIFVKQGKGDNWAIRKSMHKDTVFGEVNLRRIKTVALNEAMKNPQSIVVKDFKRKLLELWNLGFDAKRIKKYFEDNRETWSDINLSKIEVYYFSKDTKDRFFATRKPLDTSFDRKKIENNITDTGIQKILLRHLELKDNNPDIAFSPDGIDEMNRNIIQLNNGKYHQPIIKIRWYEQADKFAVGQTGNKFSKFVEAAKGTNLFFAVYESNILDKKTNTIIKKRNYATIPLNVAIERQKQGLPVAPEDENGNDPIFVLSPNDLVYLPTDDELANGIIAQPLDRGRIYKMVSCTGNEGHFIPARIANPILQTIELGSNNKAQKAWTDEMIKEICMPIKVDRLGNVLESSSSYKK

SEQ ID NO: 23568 - protein, 1391 aa, unidentified
  REGION 1..1391: note = Cas Enzyme sequence
MTKVNKDYIVGLDIGTDSCGWVATDKKNNILKLQGKTAIGSRLFEEGHSAADRRTFRGTRRRLNRRKWRLKFLEEIFDPYMTKVDPYFFARLRESGLSPKDSTKNTQAIIFPTPKDDSDFYYKYHTIYHLRQALMSEDKKFDLREIYLAIHHIVKYRGNFLQNTPVKSFNASKINVKKTIKALNQLYAGSSNENQIELNIENTSKIEDIIRSKTTFKMDKAKQISKLLAMSSENKDINKQNRNIAKQITNAILGYKTQFETILSKKIDKNDKATWEFKLSDADVDDKLAILLPDLNQSEQGIIDEIKQLFSAVTLSDIVDEGKTLSESMIRKYNDHKKDLKLLKDVVRSQKDKDKAKRLSLAYDLYVNNQHGKLLEAKKAFKVMDKDKFYKIVKNNVDDSESAKTILKEIELDSFMPKQRTNQNGVIPYQLHQIELDKIIKNQSKYYPFLAEKNPVIDHQKQAPYKLDELVRFRVPYYVGPMITATDQEKTSGKNFAWMIRKEQGQITPWNFEQKVDRMASANKFIKRMTTKDTYLLGEDVLPANSLLYQKFTVLNELNNIRINNHRISVDVKQDVYKNLFKKYKTISSNKLSNYLKNNYNLKFVKITGLSDKSNNSKFNSSLATYYQLKHLNILGDKIDDPNYQKDLEHIIEWSTVFEDKSIYAAKLKTIDWLNVEQIKALSNLRYQGWGRLSHKLLTGLHDKNGQNITEKLWDSQKNFMQIVKEPDFKAAIEKENQSVVKATDTEDILADAYTSPANKKAIRQVIRVADDIVKAASGKAPSQFAIEFARESEKNPKLSQIRGSKLRKSYEKVFENSANKLVDVSLKEELDNSIKSRKLVRDKYFLYFMQGGRDAYTGERINIDEVDTKYQIDHILPQSFIKDDSFNNRVLTLAKINNEKSDRLPFNYSNRPADKGRLGMTMHQMWHEWLESGLISKYKYRNLILDPNQVSKYQKSGFINRQLVETSQIIKLVATILQAKYPDSEIIVVKAGYNHALRDRLNLYKNREVNDYHHAIDAYLTTICGNFLYQVYPDLRPFFVYGQFKKFSSNPDLEKQALKKHKKFDFIWPLLKKKDAPEEIHQFKMGPVVFHKHEDIFNKLRRAYTFKYMLVSREVTTRDQEMFKMTLYPRADHDIKKSRKLIPKSKNMPTNIYGGYTSNSDAYMALVKIKKERSFIYKIIGVPMRALSKLKLAKKQGKYDQVLKDVLTPVIMLNKNGKTQRGIEGFRILKGKIPYKQVVLDGEKKFMLGSSTYVYNAKQLTLSNETMRIVTNNFTIKDDRSKLLNQAYDEILEKVDKYLPLYDINKFREKLHIGRYKFVNLSIKEKQEMITQILNGLHDNPVVGNLKNIGFATPFGKMQESTGVVLSSEAKLIYQSPTGLFKKRVKISDL

SEQ ID NO: 23569 - protein, 1509 aa, unidentified
  REGION 1..1509: note = Cas Enzyme sequence
MKTILGLDLGTNSVGWAVINSVIKEQAERIWIEMAGSRIIPMDAAVLGDFDKGNSISQTSERTRLRGARRLRERQLLRRERLHKVLNILGFLPNHYLEFIDFEKHPGKFLADAEPKLAWVKDEQGKYTFLFQAAFDEMLADFAIHQPSLVSGDKKIPYDWTIYYLRKKALTEMISKEELAWILLNFNQKRGYYQLRGEEEEDNAGKSVEFYALKVLTVEATDEKKGRDVWYNVHLENGWIYRRSSSVPLDWEGQVKEFIVTTDLNPDGTPKLDKYGEVKRSFRAPKEDDWMLIKKRTEADIANTHKTVGAYIYDTLLQKPQQKIIGKLVKTVERKLYRDELSLILQKQCAFHAELQDRALYARCVEALYPSNEVRRKNIANRDFVYLLMDDILFYQRPLKNKKSLIANCPYEENEYVDRETGEIKKAPLKCIAKSHPLFQEFRLWNFLSNIRIYQKEKEINGTLHLDVDVTAEFLKTEDDYVALFDWLNSRKEIEQKTFLKYPKFGLKKEISNYRWNYVEDKQYPCNETRHAILSSLEKANVCIDFLSNEKEVALWHILYSVSDKQEIEKALRTFAAKNGLDESFVEAFKKFPPFKSEYGAYSAKAIKKMLPLMRCGKYWDVSSIDDTTKERIKKIVTGEYDERISVKVRDKVMNLSDISCFRRLPLWLACYIVYNRHSEDKEAVKWESPADIDAYLASFKQHSLRNPIVEQVITETLRVVRDIWKQVGRIDEIHIELGREMKNPADKRKRMTAQILENENANLRIKALLAEFMNPEYEIENVRPYSPSQQEILRIYEDTVLHAEDQLPEEIDAILKKFNSSKVPTKSEFLRYKLWLEQKYRSPYTGELIPLGKLFTAAYEIEHVIPQSRYFDDSFSNKVICESAVNKLKDNQLGYEFIKNHHGQKVEVGFGKSVEIFSVDSYERFVKEQYAKSAVKMKKLLMDDIPEQFIERQLNDSRYISKVIKGLLSNIVREKNDSGEYEPEAVSKNIVVCTGSVTDRLKRDWGMNDVWNSIVYPRFERLNSLTDTQSFGHWENKSGKKVFQTELPLEYQKGFSKKRIDHRHHAMDAIVIACATRNHVSYLSNESASRNAKISRYDLQRLLCDKSRTDDNGNYKWVIKKPWDTFTQDAREVLSKIVVSLKQNLRIINKTTNVYRHFDATVNRVYQKQKTGDSWAIRKPMHKDTVFGAVNLRKVKVVRLSVALDTPAMIVDKRVKNKVFELLSYKYDKKRIEKYFKENAFLWKELDLAKVAVYYFTEATTEPLVAVRKPLDSTFNEKKIKESVTDTGIQKILLNHLCTKEGKPDLAFSAEGIEEMNRNLLQLNNGKSHQPIYKVRVYEPRGNKFSVGVLGNKGTKWVEAAKGTNLFFAIYITEDGKRTYETIPLNVVIEREKQGLVPVPDRNKKGDKLLFWLSPNDLVYLPTEEEREFGRINEPIDRGRIYKMVSCTGNEGHFIPANVANPIVPVIELGSNNKAQRAWTNEMIKDICIPIKVDRLGHIIEVKYRIDE

SEQ ID NO: 23570 - protein, 1512 aa, unidentified
  REGION 1..1512: note = Cas Enzyme sequence
MKKILGLDLGTNSIGWAVVCHSDTDGQTERKWIEMAGSRIIPMDAAILGDFDKGNSKSQTSERTGFRGIRRLRERVLLRRERLHKVLKLIGFLPQHYIDSLDFSNHSGKFQLGTEVKLPWRKNEIGKYEFLFQNSFNEMLADFAKKQPELVAMGRKVPYDWTIYYLRKKALSEKITKEELAWILLNFNQKRGYYQLRGEEEEEKKNRLEDFYALKVVEVEQTDDKKGKDIWYNVHLENGWIYRRSSNVPLDWKDKIKEFIVTTELNEDGTPKVDKDGCVKRSFRMPKEDDWKLLKKKTEADIERSHKTIGCYIYDTLLQSPQQKIKGKLVRTIERKFYKDELRLILDKQQAFHPELQDRELYKACLDVLYPMNVAHKNNVANRGFVYLFMEDILFYQRPLKSKKSLIDNCPYEENQYIDVTTGEIKKAPIKCIAKSHPLYQEFRLWQFIANIRIYQKEKKVDGKLLTDIDVTTEYLSSKDDYVALYEWLCVRKEIEQKTFLKYPAFGLKKEIENYRWNYIEGKSYPCNETRSLILHYLEKAGISSTFLSTKIEESLWHILYSVEDRIELETALRTFASKYQLSCNFVEVFKKFPPFKKEYGAYSAKAIKRLLPLMRMGKYWKVDAIDGNTAERIEKILSGECDEKILNKVREKTIHLSETSDFQGLPLWLACYVVYNRHSEVKEVAKWKSPEDIDIYLKSFKQHSLRNPIVEQVITETLRVVRDIWKRVEQIDEIHVELGREMKNPSEKRRQMTERMLENENANIRIKALLTEFMNPEYEMENVRPYSPSQQEILRIYEDTVLNGAGDIPEDIEIILKKFKENDIKKRPGKSDFLRYKLWLEQQYRSPYTGEIIPLGKLFTTAYEIEHVIPQSRYFDDSFSNKVICESEVNKLKDNMLGYEFIKKHAGEIVELGFGKSVKIFSVEAYERFVGENYYKAGSKKSKLLMDDIPEKFIERQLNDSRYISRVVKGLLSNVVREEDANGEYESEAISKNVIVCSGSVTDRLKKDWGVNDVWNNIVYSRFERLNRLTESQQFGHWENREGKRFFQTELPLEYQKGFSKKRIDHRHHAMDAIIIACATRNHVNYLSNESASKHARIARYDLQRMLCDKSKADGGGNYKWIIQKPWATFTQDVYRTLLDIIVSFKQNLRVINKMTNYYQAYDDAGKKVFKKQKKGDSWAIRKSMHKDTVFGQVNLRKIKEVRLSVALESPEKIVDKKIKEKVLQLFAYQYDKKKIEKYFKENASLWKEVNLAKIPVYYFTDESSELLVAVRKNLDTGFTEKKIRESVTDTGIQKILLNHLSNKGDKPELAFSPDGIDEMNRNLVILNGGKPHQPIYKVRVCEPLGNKFKVETNGNKSAKYVEAAKGTNLFFAIYVTDDGKRTYETIPLNVVIEREKLGWLPVPEKNDKGGNLLFWLSPNDLVYLPTEEELMNGIISDSIDRNRIYKMVSCTGNEGHFIPENISNPIIPTLELGSNNKAQRAWTDEMIKETCIPIKVDRLGQITEIINKIR

SEQ ID NO: 23571 - protein, 1499 aa, unidentified
  REGION 1..1499: note = Cas Enzyme sequence
MKHILGLDLGTNSIGWAVISSSFDETTQKEQLKGIEAAGSRIIPMDAAQLGDFNKGNTVSQTANRTQFRGVRRLYERKKLRRERLHRILQLLGFLPKHYANQLDRYGKFIANSEPKLAWTTNTHGLPYFIFQSSFQEMLNDFLQNNSQIKKVPYDWTLFYLRKKALIQKIEKEELAWVLLNFNQKRGYYQLREEETEKASSKTRQYFDSQIVTDITDTGQVYKGLKIFTITLENGEKGKFFSKNMPDWKSQKKDIIAIIDLDKNGNDKYDENGELSRRFKIPTEQEWEEQWELIKTKTQKDLDTSHKTVGAYIYDTLLQTPSQKIRGKLIRTIERKYYKDELNQILKKQEEFHPELRDSNLLEACIEELYPNNEAHRNAIAKYSIAQLLIEDILFYQRPLKSKKSLISNCPYEEYTYINKETGEICTSPLKCIAKSHPLFQEFRLWQFISNLRIYQKEGTINGKFTTDIDVTSQFLKTEDDYANLFDWLNQKKEIKQDTFLKNPAFGLKKNTANYRWNYVEDKTYPCNETHYKILSYWEKAGIEQSALTSEIEEKLWHILYSIFDKNELKKALQHFADKNYLSDKFADTFQQIPPFEKDYGSYSAKAIKKLLPLMRIGRYWKAENFDSTTLDRIEKILTGEFEENIKNRTREKTIHLDNLYSFQGLPTWLACYIVYNRHSEIKNVTKWQQPSDIDAFLNAFKQHSLHNPIVEQIIMETLRTVRDIWKQTGHIDEIHVELGREMKNPAEKRRKLTQQIQENENTNLRIKALLAEFANPEFGIENVRPHSPSQQDLLRIYEEEVLNETKDIPEDIAVILKKFNEIDTKKRPSTSDVLRYKCWLEQKYRSPYTGAMIPLGKLFTPAYEIEHVIPQSRYFDDSFTNKVICEAEVNKLKGNMLGYEFIKNNQERIVELGFGQNVKIQTVEAYELFVKEHYSYNRTKMQKLLMEDIPNQFIERQLNDSRYISKFIKSLLSNIVREEGEEEATSKNVIVCTGSITDRLKKDWGLNDVWNKIILPRFMRLNEITESNRFTTTNACNKTIPAMPLDLQKGFNKKRIDHRHHAMDAIVIACANRNIVNYLNNESASKNAKISRQDLRQILCKKTKTDNLGNYQWLIDKPWDTFTQDVYSILGNIIVSFKQNLRIINKTTNHYIHYENGKKVSCSQKQGDSWAIRKPMHKETVYGEINLRRTTTATLKAVLENPQRIIEKDLKKKIKELLTQGLNEKQIKKYFEDNKDIWLEINLKKIPVYYFTKETANRFFACRESINTTFNKKKIEEKVADTGIQQILLRHLEQNGNNPEQAFSPEGIEQMNKNIMSLNNNGKFHQPIYKVRTYEQADKFAVGQTGNKSTKFVEAAKGTNLFFAIYETAHKRSFASIPLNVVIERLKKGLSPAPENEKGNLPKFILSPNDLVYVPTKEEIENGHINQPIQKDRIYKMVSCTEGECHFIPYFVAKPIIQTIELGSNNKAQKTWQDEMIKEICIPIKTDRLGNIITSISL

SEQ ID NO: 23572 - protein, 1153 aa, unidentified
  REGION 1..1153: note = Cas Enzyme sequence
MKNILGLDLGSSSIGWSVIRENSEEQELVAMGSRVVSLTAAELSSFTQGNGVSINSQRTQKRTQRKGYDRYQLRRTLLRNKLDTLGMLPDDSLSYLPKLQLWGLRAKAVTQRIELNELGRVLLHLNQKRGYKSIKSDFSGDKKITDYVKSVKTRYDELKEMRLTIGELFFRRLTENAFFRCKEQVYPRQAYVEEFDCIMNCQRKFYPDILTDETIRCIRDEIIYYQRPLKSCKYLVSRCEFEKRFYLNAAGKKTEAGPKVSPRTSPLFQVCRLWESINNIVVKDRRNEIVFISAEQKVALFDFLNTHEKLKGSDLLKLLGLSKTYGYRLGEQFKTGIQGNKTRVEIERALGNYPDKKRLLQFNLQEESSSMVNTETGEIIPMISLSFEQEPLYRLWHVLYSIDDREQLQSVLRQKFGIDDDEVLERLSAIDLVKAGFGNKSSKAIRRILPFLQLGMNYAEACEAAGYNHSNNYTKAENEARALLDRLPAIKKNELRQPVVEKILNQMVNVVNALMEKYGRFDEIRVELARELKQSKEERSNTYKSINKNQRENEQIAKRIVEYGVPTRSRIQKYKMWEESKHCCIYCGQPVDVGDFLRGFDVEVEHIIPKSLYFDDSFANKVCSCRSCNKEKNNRTAYDYMKSKGEKALSDYVERVNTMYTNNQISKTKWQNLLTPVDKISTDFIDRQLRESQYIARKAKEILTSVCYNVTATSGSVTSFLRHVWGWDTVLHDLNFDRYKKVGLTEVIEVNHRGSVIRREQIKDWSKRFDHRHHAIDALTIACTKQAYIQRLNNLRAEEGPDFNKMSLERYIQSQPHFSVAQVREAVDRILVSFRAGKRAVTPGKRYIRKNRKRISVQSVLIPRGALSEDSVYGVIHVWEKDEQGHVIQKQRAVMKYPITSINREMLDKGKVVDKRIHRILSDRLAQYNDNPKEAFAKPVYIDKECRIPIRTVRCFAKPAINTLVPLKKDDKGNTVAWVNPGNNHHVAIYRDEDGKYKEQTVTFWEAVDRCRVGIPAIVTQPDTIWDNILQRNDISENVLESLPDVKWQFVLSLQQNEMFILGMNEDNYRYAMDQQDYALLNKHLYRVQKLSKGDYSFRYHTETSVEDKYDGKLNLELSRQMGKLKRVSIKSLLELNPHKVHISVLGEIKEIS

SEQ ID NO: 23573 - protein, 1469 aa, unidentified
  REGION 1..1469: note = Cas Enzyme sequence
  REGION 1461..1463: note = misc_feature - Xaa can be any naturally occurring amino acid
MKNILGLDLGTNSIGWAVVNGSVNDNGSEQLVKIQASGSRIIPMDAAMIGDFNKGNSISQTAERTRLRGIRRLSERYLLRRERLHRILDILGFLPSHFAQDLDRHGKIVKGKEPKLAWRKNEAGQFEFIFQDSFKEMLEDFKLNHPNLITDDKKVPYDWTIYYLRKKGLTSKISKEELAWILLNFNQKRGYYQLRGEEEEENNNKLVEFYALKVVAVEDSGEKKGKDIWYNVHLENGWVYRRTSNIPLDWVGKTKEFIVTTDLEKDGTPKKDREGNVKRSFRAPKEDDWSLVKKKTEADIDQTHKTVGTYIYDTLLGNPSQKIRGRLVRTIERKYYKEELKLILDKQKEFHPELQDRALYAACVEELYTINEAHRNNIGNRDFTYLFLEDILFYQRPLKSKKSLIDNCPYEENHCLDKETGEIKSFPVKCIAKSHPLFQEFRLWQFIVNLRIYRKGLAQDVDVTNELLKTEEDYVALFDWLNGKKEIDQKAFLKYPLFGLKKEVENYRWNYVQDKPYPCNETRSSMLARLEKCDISIEFLTKENEEALWHILYSVEDKNEIVKALQKFADKHDLNASFVDVFRKFPPFKKEYGSYSAKAIKKLLPLMRMGKYWSENSIDKGTRERIDKIITGEYDEKIENRVREKAIHLVDVSDFRGLPLWLVCYIVYGRHSESKEITQWKSPADIDSYLKSFKQHSLRNPIVEQIIIETLRVVRDIWKQVGNIDEIHVELGREMKNPADKRKKMTQQISENENTNLRIKYLLTEFLNPEYEVENVRPYSPSQQDILRIYEEGVLNSVSDLPEEISDILKKFTETDLKKRPSRSEVLRYKLWLEQKYRSPYTGEVIPLGKLFTSAYEIEHVIPQSCYFDDSFSNKVICEAEVNKLKSNLLGHEFIVKHHGEIVELPFGKKVRIFTVDEYEQFVKDNYSRTRGKMKKLLMDDIPEEFVTRQLNDSRYISKVVKSLLSNIVREKGEEEAISKNVIPCTGGVTDRLKKDWGINEVWNKIILPRFQRLNELTGTNKFTTKNVGIQEIPTMPLELQKGFNKKRIDHRHHAMDAIIIACANRNIINYLNNESATAKAELSRYDLQKLLCDKAKTDNNGNYKWVIRKPWASFTQDTYLALENIIVSFKQNLRVINKATNHFLHYNEEGKKIFVKQGKGDNWAIRKSMHKDTVFGEVNLRRIKTVALNEAMKNPQSIVVKDFKRKLLELWNLGFDAKRIKKYFEDNRETWSDINLSKIEVYYFSKDTKDRFFATRKPLDTSFDRKKIENNITDTGIQKILLRHLELKDNNPDIAFSPDGIDEMNRNIIQLNNGKYHQPIIKVRWYEQADKFAVGQTGNKSSKFVEAAKGTNLFFAVYESNILDKKTNTIIKKRNYATIPLNVAIERQKQGLPVAPEDENGNDPIFVLSPNDLVYLPTDDELANGIIAQPLDRGRIYKMVSSSGEQCFFIKHIVANVLVXXXNLNFLL

SEQ ID NO: 23574 - protein, 1510 aa, unidentified
  REGION 1..1510: note = Cas Enzyme sequence
MKRILGLDLGTNSIGWALVDSEEQRILGMGSRIIPMDQGVLDTFSGGNPVETQTAARTAYRGTRRLRERALLRRERLIRVLNMMKFLPEHYASQIDFEKRLGQFFDEKEPKLAWKQNDEGRFEFIFQQSFNEMIEEFKNKGVVREDKKIPYDWTIYYLRKKALSQEIEKEELAWILLNFNQKRGYYQLRGEEEEENPNKLVEYYSLKIVDVIADEKPNSKGDIWYSLHLENGWIYRRSSKIPLFGWKDKTRDFIVTTDLNDDGTVKKDKEGIEKRSFRAPSENDWVLLKKKTESDIEKSHKTVGAYVYETLLQNPMQKVRGKLVRTIERKFYKDELKQILEKQREFHPELRDEDLYNDCVRELYRSNETYQFILSKRDFVHLFLDDILFYQRPLRSQKSAIGDCILEFKTYKDKDGNNIKEYLKVISKSNPLYQEFRIWQWLYNLKIYRKEDDEDVTLQFIANIEDKEQLFDFLSNRKSIEQKPLLEYLIKAKGLKKQVKTEAYRWNYVEDKIYPCSETKTMISTRLAKVENIPDNFFTKEIEQKLWHIIYSVTDKNEFEKALRTFAKKYDLDIASFVDNFKKIPPFKNEYGSFSEKAIKKLLPLMRLGKYWKWNDIDNNTQNRISKIITGEYDEEIKDIVREKSIALTNENDFQGLQLWLAQYLVYGRHSEADIAGKWHSVADLEKYLNEFKQHSLRNPIVEQIITETLRVVRDIWRKYGQGAENFFSEIHVELGRDMKNTADERKKIVNVVTENENTNLRIKALLMELKNNSDGKLEVENVRPYSPTQQDILKIYEEYAISTGLDNEKDEKVKEDIKKISRVAQPTTTELQRYKLWLEQKYCSPYTGKVIPLGKLFTEEYQIEHIIPKSRYYDDSFSNKVICEAAVNKLKDKCLGLEFIKNYHGQIVETGFGQKVTIFDEEAYQNFVKQHYAYNHSKRTKLLLEEIPEKMIERQMNDTRYISKFVLPLLSNLVRAKENDNGVNSKNVLPVNGKITTMLKQDWGLNDVWNDLILPRFVRMNELAKTIAFTSWNEQHQKYLPTVPLELSKGFQKKRIDHRHHAMDALVIACATRDHVNLLNNKHANTDTIRYDLQRKLRLFERVTYIDPQTKNNVTKDIPKEFKKPWDNFTVDACNELEKIIVSFKQNLRIINKATNIYTKYENGKKIKVGQKGLNWAIRKPLHKETVFAKVSLRKRKTVRLSEALKDWKKIVDKKLKQEIKRLTCQYGKFDVDTILRYFKDRKYQFGEVNVSKVKMYYFDEENAAVRKNVDTSFTEKFIQGSVTDTGIQKILLNHLEAKGNKVEIAFSPEGIEEMNKNIIQLNEGKLHLPIFKVRVYETIGNKFSVGVKGNKKDKYVEAAKGTNLFFAIYVDENGIRSYETIPLNIVIERLKQGLSVVPEKNRKEHSLLFYLSPNDLVYVPIEDERENIHAVNLDQLNNEQRKRIYKMVSCTGSECHFVPYYVASPIVNKVEYSSLNKIGRSLTGEMIKDVCIKLKVDRLGNIKGISGL

SEQ ID NO: 23575 - protein, 1373 aa, unidentified
  REGION 1..1373: note = Cas Enzyme sequence
MKKVLGLDLGTTSIGWAMVNQAENNEEKSSIIRAGVRVNPLTTDEKDAFEKGKAVTTNTDRRLKRSMRRNLQRYKLRRNELVSILKELGWIDDSTILAEHGNRSTFETYELRSKACTESVSLTELARVLLMINKKRGYKSNRKANAEEDGQPVDGMSVAKLLYEKGKTPGQYCYSLVKKGNKVLPEFYASDLKSEFRRVWETQRLYYPEYLTEEFWNQIDGKTRSSLTKLFFAKYKITTADNKGKDKRVKAYEWRAAAVENRLPIDQVAYVLCDIAGNLGSSSGYLGKISDRSKELYFNKQTVGQYLYSNIQKDPHFSTKNKVFYRQDYLDEFEAIWESQASFHPELTDELKKEIRDVVIFYQRRLKSQKGLISYCEFESRKVDVEINGRIVQKIRGCKVAPVSSPLFQEFRMWQKINNIIVTNKETGEQGTLEQDDKVRLAECLRVKDKLSEKEILKLLFKKPKDLEMNFKSIEGNETLGKLYSKFLEVVSLAGNSDYEYSKLRQEELMNILRTEFARNGFNTAVLEYDPSLPKEEYERQPLFRLWHLLYSYEGDKSQTGNASLINKIAEICGMPENLAKIIASVSFKQDYASLSHKAMRKILPYMMDGNEYSLACEYAGYRHSKQSLTKEEIENKVLKDRLDQIPKNSLRNPVVEKILNQMVNVINTVGDRYGKPDEIHIELARELKSSQEERARATESIASNNKENDRIRMILENEFHLAYVSRNDIVKYKLYEELKNNGYKTLYSNQYIPADKLFSREIDIEHIIPQAVLFNDSLSNKTLEFRDINLEKGKDTAFDYVKNKYGESGLEDYKLRVNHLFESGGISRTKRDNLLRDSKNIPEGFVERDLKDTQYIAKKAREILLEYVRVVVSTSGSITDKLREDWGLVNVMKELNMPKFEAAGFVETITTSDGKDIRKIKDWTKRNDHRHHAMDAITIAFTKLAHIQYLNNLNAKGDNSSSIYAILQKETYLSGSKRLIIPPLPLDQMRREVRRQLESILVSIKAKNKVMTENINRIRIKDGVKNVKCLTPRGLLHKEQVYGQRKRYETYDVAVNGMMTEDVIATVASSETKAALALRLAQFKGDPKKAFTGANSLDKNPVWLDANHSRKVPAKVKCVRFVNVYSIRKNIDPSLSVEKVMDGRVRRILKDRLAEFGNDPKKAFVNLDENPIWFNKEKGIILKSVTIAENFDLGPIRIKRDNLGRVICDAEGNHIPSDYVNFRNNHHAAIFEDADGNIQEHIVSFYEAVRRRSAGLPVVDKEYNADKGWKFLFTMKSNEMFVFPNERTGFDPRAVDLMDSENYSAIGPNLFRVQAVSTRDYWFRHHLETSLGADKKLKDITWKRITNIAIFKQLVKVRINHIGEIVSVGEYD

SEQ ID NO: 23576 - protein, 1339 aa, unidentified
  REGION 1..1339: note = Cas Enzyme sequence
SKISKEELAWILLNFNQKRGYYQLRGEEEKKNDNVMIINSKVIDVVKAEKDKKYEKYWYNVLLENGLLYRAAFYNDISFWKGHTKEFVLKTIKLKSGGTKQELSFLPSFDEIEKMEKKQKDKMYFKIKLKTEADIDQAHKTVGTYIYDTLLGNPSQKIRGRLVRTIERKYYKEELKLILDKQKEFHSELQDRALYAACIEELYPINEAHRNNVGNRDFTYLFLEDILFYQRPLKSKKSLIDNCPYEENQGLDKETGEIKSFPVKCIAKSHPLFQEFRLWQFIVNLRIYRKDLAQDVDVTNELLKTEEDYVALFDWLNGKKEIDQKAFLKYPVFGLKKEIENYRWNYVQDKPYPCNETRLLMLARLEKCDISIEFLTKENEEALWHILYSVEDKNEIVKALQKFADKHDLNASFVDVFRKFPPFKKEYGSYSAKAIKKLLPLMRMGKYWSEDSIDKGTRKRMDKIITGEYDEKIENRVREKVIHLADVSDFRGLPLWLVCYIVYGRHSEAKEITQWKSPADIDSYLKSFKQHSLRNPIVEQIIIETLRVVRDIWKQVGNIDEIHVELGREMKNPADKRKKMTQQMSENENTNLRIKYLLTEFLNPEYEVENVRPYSPSQQDILRIYEEGVLNSVSDLPEEISDILKKFTETDLKKRPSRSEILRYKLWLEQKYRSPYTGEVIPLGKLFTPAYEIEHVIPQSCYFDDSFSNKVICEAEVNKLKSNLLGHEFIVKHHGEIVELPFGKKVRIFTVDEYEQFVKDNYSRTRGKMKKLLMDDIPEEFVARQLNDSRYISKVVKSLLSNIVREKGEEEAISKNVIPCTGGVTDRLKKDWGINEVWNKIILPRFQRLNELTGTNKFTTKNVGIQEIPTMPLELQKGFNKKRIDHRHHAMDAIIIACANRNIINYLNNESATAKAELSRYDLQKLLCDKAKTDNNGNYKWVIRKPWASFTQDTYLALENIIVSFKQNLRVINKATNRFLHYNEEGKKIFVKQGKGDNWAIRKSMHKDTVFGEVNLRRIKTVALNEAMKNPQSIVVKDFKRKLLELWNLGFDAKRIKKYFEDNRETWSDINLSKIEVYYFSKDTKDRFFATRKPLDTSFDRKKIENNITDTGIQKILLRHLELKDNNPDIAFSPDGIDEMNRNIIQLNNGKYHQPIIKIRWYEQADKFAVGQTGNKFSKFVEAAKGTNLFFAVYESNILDKKTNTIIKKRNYATIPLNVAIERQKQGLPVAPEDENGNDPIFVLSPNDLVYLPTDDELANGIIAQPLDRGRIYKMVSCTGNEGHFIPARIANPILQTIELGSNNKAQKAWTDEMIKEICMPIKVDRLGNVLESSSSYKK

SEQ ID NO: 23577 - protein, 1520 aa, unidentified
  REGION 1..1520: note = Cas Enzyme sequence
MKKIVGLDLGTNSIGWALINAYIDEYNKEHLYGIEACGSRIIPMDAAILGNFDKGNSISQTADRTSYRGIRRLRERHLLRRERLHRILDLLGFLPKHYSDSLNRYGKFLNDIECKLPWVKDETGSYKFIFQESFKEMLANFTEHHPILIANNKKVPYDWTIYYLRKKALTQKISKEELAWILLNFNQKRGYYQLRGEEEETPNKLVEYYSLKVEKVEDSGERKGKDTWYNVHLENGMIYRRTSNIPLDWEGKTKEFIVTTDLEADGSPKKDKEGNIKRSFRAPKNDDWTLIKKKTEADIDKIKMTVGAYIYDTLLQKPDQKIRGKLVRTIERKYYKNELYQILKTQSEFHEELRDKQLYIACLNELYPNNEPRRNSISTRDFCHLFIEDIIFYQRPLKSKKSLIDNCPYEENRYIDKESGEIKHASIKCIAKSHPLYQEFRLWQFIVNLRIYRKETDVDVTQELLPTEADYVTLFEWLNEKKEIDQKAFFKYPPFGFKKTTSNYRWNYVEDKPYPCNETHAQIIARLGKAHIPKAFLSKEKEETLWHILYSIEDKQEIEKALHSFANKNNLSEEFIEQFKNFPPFKKEYGSYSAKAIKKLLPLMRMGKYWSIENIDNGTRIRINKIIDGEYDENIRERVRQKAINLTDITHFRALPLWLACYLVYDRHSEVKDIVKWKTPKDIDLYLKSFKQHSLRNPIVEQVITETLRTVRDIWQQVGHIDEIHIELGREMKNPADKRARMSQQMIKNENTNLRIKALLTEFLNPEFGIENVRPYSPSQQDLLRIYEEGVLNSILELPEDIGIILGKFNQTDTLKRPTRSEILRYKLWLEQKYRSPYTGEMIPLSKLFTPAYEIEHIIPQSRYFDDSLSNKVICESEINKLKDRSLGYEFIKNHHGEKVELAFDKPVEVLSVEAYEKLVHESYSHNRSKMKKLLMEDIPDQFIERQLNDSRYISKVVKSLLSNIVREENEQEAISKNVIPCTGGITDRLKKDWGINDVWNKIVLPRFIRLNELTESTRFTSINTNNTMIPSMPLELQKGFNKKRIDHRHHAMDAIIIACANRNIVNYLNNVSASKNTKITRRDLQTLLCHKDKTDNNGNYKWVIDKPWETFTQDTLTALQKITVSFKQNLRVINKTTNHYQHYENGKKIVSNQSKGDSWAIRKSMHKETVHGEVNLRMIKTVSFNEALKKPQAIVEMDLKKKILAMLELGYDTKRIKNYFEENKDTWQDINPSKIKVYYFTKETKDRYFAVRKPIDTSFDKKKIKESITDTGIQQIMLRHLETKDNDPTLAFSPDGIDEMNRNILILNKGKKHQPIYKVRVYEKAEKFTVGQKGNKRTKFVEAAKGTNLFFAIYETEEIDKDTKKVIRKRSYSTIPLNVVIERQKQGLSSAPEDENGNLPKYILSPNDLVYVPTQEEINKGEVVMPIDRDRIYKMVDSSGITANFIPASTANLIFALPKATAEIYCNGENCIQNEYGIGSPQSKNQKAITGEMVKEICFPIKVDRLGNIIQVGLCILTN

SEQ ID NO: 23578 - protein, 1396 aa, unidentified
  REGION 1..1396: note = Cas Enzyme sequence
MKKILGLDLGTNSIGWAVVNEKEDDREKSSITKVGTRKVSLTSEEQNNFNKGKSAGTNAKRTLKHGARINLQRYKLRRDALIRVLKENNFITDDTLLSENGNNTTFETYRFRAQAADSEVTLEQLARVLLMINKKRGYKSNRKAKSKDESGQLIDGMDIARQLYDENLTPGQYTLSLIKQGKKKVPDFYTSDLNNEFERIWSFQKQFYPDLLTDDLKTELNGKDEKGVGTICSDKFGIVGIKRNTKGWEQKKEDYVWRAESLEKKMDLERLTIVFQKICGQIKNAGGYLGSISDRSKELYFSGQTVGQYKMSELINNPNRSIKNQVFYRQDYLDEFERIWETQATFHKELTPELKHEIRDIIIFYQRPLKSQKKLVAYCELESKQVEVEVNGKKKKVTIGQRVCPKSSPLFQEFRIWQQINNIQVSGYIIPESQTDLFGNTPANKKGRRFLLQDEKEILFKELNLKEKMSKTEILKLLFDNYKELDLNYKEVKGNTTLAKLFQAYKTIIEQSGHELNNLSNKSAGDIIDIIHKIFDGLGFNTDILAFDSSIQGKAFEKQPLYRLWHLLYSFEGDKSKTGNEKLIKKISDLYGFDKEYASILAGIVFEPEYGNLSAKAIRKILPFMKDGLEYSDACLYAGYRHSKRSLTKEEINSKQLADHIELLPRNSLRNPVVEKILNQMINVVNAVIVEYGRPDEIRVEMARELKLNNVRREECIRTINKSTSENESYRKKLQTELEGMEYVSRKDIIKYRLYLELESNGFHTLYSNTFIPLEKLFTREFDVEHILPQAKLFDNSFANKTIEKRSVNQEKGDRTAYDYVYSKYHEKGLEDYKKRVEDLYKKGKISKTKRNRLLTQEQDIPKDFLNRDLSNTQYIARKACEILESVVKTVTTTTGSITSKLREDWQLVDVLKELNWDKYDKLGLTEIIKGRDGQRIRHIKDWTKRNDHRNHAMDALTIAFTKPSFIQYLNNRSARSDKNSIISKIEQKELYRTADGKTKFLPPMPIDEFRAEAKRHLENILVSTKAKNKVVTRNVNVTKTKRTETNKREQVQLTPRGELHNDTIYGRRKFYDTDNEKVNASFDVSKIMTVADKRYREALLKRLEQFDGDAEKAFTGKNSLEQNPLYVDELHTKKVPDMVKTVKFKTIYTQRKGISDELKIDKVLDKRIRTILEERLAEFNGDAKKAFSNLDENPIWLNKEKGISIKRVTINSGLKDLIALHDKHDNNGRLILDKAGRKQPSDFIYTDGNHHVAIFCDSEGNIQEHLVSFYEAVARAVQHLPVIDKNYNKDKGWQFMFTMKQNEYFVFPNKETGFDPKEIDLFNPDNYEVISRNLYRVQKLSSKDYVFRHHLETTVNYKKELRGITWKRIRSLEHIRNIVKVRINHLGQIVDVGEY

SEQ ID NO: 23579 - protein, 1538 aa, unidentified
  REGION 1..1538: note = Cas Enzyme sequence
MKHILGLDLGTNSIGWALVKSEQDCDDVERINGIEAAGSRIIPMDAAVLGDFAKGNTKSQTADRTAARGIRRMGERHKLRRERLNRVLDVMGFLPEHYSAALTRYGKFKDGEECKIAWRKDESGQWTFVFEDSFREMLADFVAHQPEWLAGGRKVPYDWTIYYLRKKALSKPLTKQELAWLLLNFNQKRGYYQLRGEDEHTDDKGKLVEYYALKVVGVEDTGDKKGKDTWFNIMLENGMVYRRPAAEAPDWIGKTKEFIVTTDLEKDGTPKKDKEGNIKRSFRMPKEDDWTLIKKKTENDIDRSGKTVGEYIYDALLADPTQKIRGKLVRTVERKYYKEELKKIINSQKRFIPELNDNELYGRCISELYQSNDAYRQSISSCDFTYLFVDNIIFYQRPLKSKKSLIDNCPYEEHSYTDSKTGEVKTAPVKCVAKSNPLFQEFRLWQFVQNIRIFERQKKIGDSVKTDVDVTGEFIKSADDVVSLFDFLNDRKDITQSVLLGTYFKIKKPKGKDSDYPYRWNYVEDKTYPCNETRALILKGLKDAGIDEGFLDKDKEYSLWHILYSVEDKQEITKAMEKFAAKNSLGGKFAEVFSSLPPFNKNYGSYSEKAIKKLLALMRTGKYWSADAIDKHTLERIDKIINGEYDESIRTRVREKAINLTDVSHFRGLPLWLACYIVYDRHSESKDITRWNCPADIDQYLDHFKQHSLRNPIVEQVVTETLRTVRDIWRQYGKIDEIHIEMGRDMKNPADVRAKMSKRMIDNENANLRIKAMLAEFADPDFGIAGVRPYSPSQQEMLRIYEEGALESVDEVPDEINEIISKFNQTDIKKRPTHGEIIKYKLWLEQKYQSPYTGRTISLSRLFTDDYQIEHVIPQSRYFDDSMSNKVICEAEVNQLKDRMLGYEFIKAHHGEKVLLSSGETVTILTAEEYERLVQLNFRKNPVKMKKLLMDDIPDKFIERQLNDSRYISKKIKSLLSNMVREEGEQEDISKNVIACNGAITDRLKRDWGVNDVWNHIILPRFERLNAVTGSDRFTTTSTNGHTIPDMPLNLQKGFNKKRIDHRHHAMDAIVIACTTRSHVNLLNNEAAMSKNNAVRYQLSRKLRRYEDTMVTRNGETRTISVAREFLKPWPTFNADVEKALRGIVVSFKQNLRVINKTVNKYQKFVYNEEKHIKEKKAVRQEERNGRHLLAIRKPMHKDTVYGEVNLRRIKEVSLKDAVANSKAVVDKDLKKKLMAMIELGYDLKQITKYFEDNKDAWQDVNLKKIKVYYFTKDTGDRYFATRFGNDLVTLFSKITKADDAKKQIERITDTGIQKILKRHLEANGGDCQKAFSADGIDEMNRNITQLNGGRPHKPVYKVRIYEKADKFAIGTKGNKAAKFVEAAKGTNLFFAVYLKEYEDSTTGETIKKRVFDTIPLKTVIDRLKNGQTSAPEEKDGAKLLFVLSPNDLVYLPTEDEVKNGTINRPLDKRRIYKMVSCTGTRLYGIPYNIASSIIDKYEFTTLNKVEFTDTKESIKEICIPIKVDRLGNITEVNNEKI

SEQ ID NO: 23580 - protein, 1495 aa, unidentified
  REGION 1..1495: note = Cas Enzyme sequence
MSKILGLDLGTNSIGWALIDSKEQKIIKAGSRIIPMDAATMGDYEKGNLKSAASERTDFRGARRLYERAILRRERLLRVLHTIGFLPKSFEKQIDFTEHPGKFLNHGEPLLPYYKDEQGKNTFLFKESFNEMLDDFKKHHPDLVSDGKLIPYDWTIYYLRKKALSQPITKEELAWIILNFNTKRGYYQLRGMEDAEETDKTKIEEYKVLEVASVENLGPNKKKEGYNLYLITYDNHAPQRASSPTPPQKVGNLVEVVVTTTLDKDGNIKKDKDGSPMIKLRTPKEDDWTLMKKRTEKNLADSHQTVGTFIYEHILSTPDIKVRGKLIHTIERKFYKEELCQILEKQKEFIPELKDIELYKKCVHELYKNNEAHVESLMNEDFTNLFVNDIIFYQRPLKSKKSLIANCPFESYHYKDKNGNIQSHPIKCIPKSHPLYEEFRLWQFLSNLRIYKKNVEINGKIVTDYDVTSQFLQTPNDYCDLFEWLQNKKEIKQDQLLKYKSFGINKEISNYRWNYVEDKTYPCCSTRYEINKRLQSLNLQDLDNNDYTHLWHILYSVDDPIMCQKALHKFAIKHGFQEEEFVNKFKQYSPDSKDYGAYSEKAIKRLLALMRTGRHWDEKNIDTKTLSRINNLIDGVVDDEISDRVREKLANKQHISDFQGLPLWAASYVIYNRHSEASETIKWQKPEDIDTYLQNDLKQHSLRNPIVEKIICETLRVIKDIWKNYGDIDEVHVEMGRELKKDAKSRKEDSQRMAENERTNLRIRALLQEFANPDYKIENVRPYSPSQIETLKIYENCVLSDSSIERPDDIQKIMNDLGNAKTIHIKQSDVLRYKMWLEQNYKSPYTGQIIPLSKLFTPAYEIEHVIPQSRYFDDSLSNKVICESEVNKAKDRMLAYEFISQKGGSIIKGNFGQDFKILDKKQYEDFVQHHYANNRTKMKKLLLDDIPEGFIQRQLNDSRYMSKKMLSILSCLVREEGEQEATSKYVIPTNGAITDRLKKEWGINDIWNQLVAPRFERLNEKTGTQAYGQWVNKDGKRFFQTNIPLDLSVGFSKKRIDHRHHAMDAIIIACTNRDTVNYLNNIAALSNKEKERYDLKHKLCTKVKTDNNGNYIWQFKKPWETFTQDVSGVLDGIIVSFKQNLRIITKMSNYYTHYVDGKKVVDKQIKGDSWAIRKSMHEATVSGLISLQKCKQVKLSVALEQWQNIADKELRKEIANLIKLYHKFDKKLFIKYFKDRDNKLNGRDISNVRIYYYTGTCGKESVTATRVAIDESFDTKKIESISDSGIQKIMLAHLKKYNDEKGNSHPEVAFSPKGIVDMNQNIKELNGGKEHKPIYKVRKTKTLGMKFAIGEVGNKNQKFVETDKGTNLFFAIYVNEEGERSFESIPLNIAIERLKNHLKVAEEIKEDGRKLLFTLSPNDLVYLPDAKDGKNIYKMVSCYGNRVFFIPETWATPINNGYELGSLNKVEMSLEGINIKQECEKIEVDRLGRIIKTYK

SEQ ID NO: 23581 - protein, 1394 aa, unidentified
  REGION 1..1394: note = Cas Enzyme sequence
MKHILGLDLGTNSIGWALVKERENENEQSSITRLGVREIYLTADEQSNFEKGKSITTNADRTLKRSMRRNLQRYKLRRNSLISLLKDYGFITAETLLNENGNRTTFETYRLRAKAVTEEISLEELARVLLMINKKRGYKSSRKAKSNDESGQLIDGMEVAKKLYDDNLTPGQYVVSLLRKGKNNIPDFYRSDLVAEFDKIWNFQRQFYPDVLTDSLKEELKGKGDKETWAICSKPFAIEGIKRNIKGWEQKKEDYAWRAESLQHKIDLERLAIVLQKVNGQIKNSSGYLGAISDRSKELFFNKLTVGQYQMAELDKNPNFSLKNQVFYRQDYLDEFERIWETQAKFHKELTPELKHFIRDIIIFYQRPLKSQKGLISLCELESREIEIERDGKKTKKTIGPRVCPKSSPMYQEFRIWQAINNLQVSGMVVADNQVDLFGKTIGKKFGKRFLEQEEKEILFKELNFKSKLTKKEILKLLFENYKELDLNYNEVKGNTTMAALLEACSKIIEMSGHGEYDFSKMSADEITGIVFPVFSGLGFSTDIFSFDSSVEGKAFDKQPSYMLWHLLYSYEGDKSKTGNESLISKISECYGFDKEYAAVIAGISFEPDYGSLSVRAMHKILPYMKDGLGYSDACLYAGYRHSKRSLTKEEIEARPLKDKIDLLPRNSLRNPVVEKILNQMINVVNAVVDTYGRPDEIRVEMARELKKTKTQREETVKAIRKTTAENEKYKKELEEEFGLKNVSRNDIVRYRLYLELKDNGFKTLYSNTYIPREKLFSKEFDIEHIIPQAKLFDDSFSNKTLEARSVNLDKADSTAYDYVKVKYGEDGLEKYKEKINQLCEKKIISKTKLKRLLTTEKDIPDGFINRDLSNTQYIARKACEILEEITRRVVPTTGSVTSRLREDWQLVDMMKELNWDKYDKLGLTEIIEDKDGRRIRHIKDWTKRNDQRHHAMDALTIAFTKPAFIQYLNNLYARSDKGGSIYAIERKELYRDNKGKLRFYPPMPLDEFRTEAKRHLENILVSIKAKNKVVTRNVNITKAKKAEKGKRKRIQLTPRGQLHNETIYGRIRQYATKEEKVNASFTEDKIMTVACKRYREALLVRLRQHDGDAKKAFTGKNSLAKTPLYTDSLHTETVPEKVKTVMLAPLYTKREAVSPDLKIEKVIDIGIKRLLQKRLEQYGGDMQKAFSNLDENPIWLDEEKGISIKRVTISSVSNAEALHDKRDNRGQLILDKDGKKQPTDFVQTSGNHHVAIFRDADGNLQEHMVSFYEATARAIQHLPIIDKEYNKDLGWQFLFTMKQNEYFVFPNEETGFNPKEIDLLNPKNYALISPNLFRVQKLSSKDYVFRHHLETKVEYNKELFGVIWKRIKSLGKIKDIVKVRINQIGKIEDLGEY

SEQ ID NO: 23582 - protein, 1313 aa, unidentified
  REGION 1..1313: note = Cas Enzyme sequence
  REGION 390..401: note = misc_feature - Xaa can be any naturally occurring amino acid
VQNGFLGITVSSEQVGWAVTNPKYELERASRKDLWGVRLFDKAETAEDRRMFRTNRRLNQRKKNRIHYLRDIFHEEVNQKDPNFFQQLDESNFCEDDRTVEFNFDTNLYKNQFPTVYHLRKYLMETKDKPDIRLVYLAFSKFMKNRGHFLYKGNLGEVMDFENSMKGFCESLEKFNIDFPTLSDEQVKEVRDILCDHKIAKTVKKKNIITITKVKSKTAKAWIGLFCGCSVPVKVLFQDIDEEIVTDPEKISFEDASYDDYIANIEKGVGIYYEAIVSAKMLFDWSILNEILGDHQLLSDAMIAEYNKHHDDLKRLQKIIKGTGSRELYQDIFINDVSGNYVCYVGHAKTMSSADQKQFYTFLKNRLKNVNGISSEDAEWIDTEIKNGTXXXXXXXXXXXXNSVIPHQLQLREFELILDNMQEMYPFLKENREKLLKIFNFVIPYYVGPLKGVVRKGESTNWMVPKKDGVIHPWNFDEMVDKEASAECFISRMTGNCSYLFNEKVLPKNSLLYETFEVLNELNPLKINGEPISVELKQRIYEQLFLTGKKVTKKSLTKYLIENGYDKDIELSGIDNEFHSNLKSHIDFKDYDNLSDEEVEQIILRITVDKQLLKDYLNREFVKLSEDERKQICSLSYKGWGNLSEMLLNGITVTDSNGVEVSVMDMLWNTNLNLMQILSKKYGYKAEIEHYNKEHEKTIYNREDLMDYLNIPPAQRRKVNQLITIVKSLKKTYGVPNKIFFKISREHQDDPKRTSSRKEQLKYLYKSLKSEDEKHLMKELDELNDHELSNDKVYLYFLQKGRCIYSGKKLNLSRLRKSNYQNDIDYIYPLSAVNDRSMNNKVLTGIQENRADKYTYFPVDSEIQKKMKGFWMELVLQGFMTKEKYFRLSRENDFSKSELVSFIEREISDNQQSGRMIASVLQYYFPESKIVFVKEKLISSFKRDFHLISSYGHNHLQAAKDAYITIVVGNVYHTKFTMDPAIYFKNHKRKDYDLNRLFLENISRDGQIAWESGPYGSIQTVRKEYAQNHIAVTKRVVEVKGGLFKQMPLKKGHGEYPLKTNDPRFGNIAQYGGYTNVTGSYFVLVESMEKGKKRISLEYVPVYLHERLEDDPGHKLLKEYLVDHRKLNHPKILLAKVRKNSLLKIDGFYYRLNGRSGNALILTNAVELIMDDWQTKTANKISGYMKRRAIDKKARVYQNEFHIQELEQLYDFYLDKLENGVYKNRKNNQAELIHNEKEQFMELKTEDQCVLLTEIKKLFVCSPMQADLTLIGGSKHTGMIAMSSNVTKADFAVIAEDPLGLRNKVIYSHKGEK

SEQ ID NO: 23583 - protein, 1552 aa, unidentified
  REGION 1..1552: note = Cas Enzyme sequence
MKNILGLDLGSNSIGWAIVKALKNEDGKEILQSIDLAGSRIIPMDQATLGNFENGNSVSQTRERTGYRSARRLRERYLLRRERLLRVLNCMGFLPEHYSQNIDKYGKFFLDNEVKLSWKKDKMGKNEFIFLDSFNEMLEDFRHSQPQLLLDGRKVPYDWTIYYLRKKALTEKISKEELAWILLNFNQKRGYFQLRGEDEEVQGKKIEFYALKVVRVEDTGEKKGKDTWYNVYLESGLGDTDDYWVYRRASSVPIDEWEGQVKEFIVTTTLDNNGSPQIDKEGKVKRSFSIPKPEDWMLVKKKTEVDIKSSGKTVGTYIYDTLLQKPDQKIKGKLIRTIERENYTNELSLILENQKKFHLELQDRELYHQCIELLYYKNEAHKRVIGTWDFTSLFIKDILFYQRPLKSKKALIDNCPYEESFYIENGEKKSKPRKCIAKSHPLFQEFRIWQFISNLRIYQKVKEVDGKLQFNVDVTSDFLRDESAYVELFKWLNERAEVSQEDLLKHLGLKKTKTEDTVSLYRWNYVEDKKYPGNKTRSSILKKLLNDEKEALSEDIELKIWHLLYSVSAQSEIDKALSSKNVSTKGIYSGLSVYFSDETIQKIKNVKLESGYGSYSAKAIGKLLPLMRRGKYWNLESIDNHTKERIEKILNGECDETIRARTREKSISLTDISQFKGLPLWLACYIVYDRHSELKTIKKWNGPEDIDKFLKEFKQHTLRNPIVEQVIMETLRVVRDIWRRVGSIDEIHIEMGRDMKQTAQERARRSAIISRNENDNLRIKALLHEFMNPELGIENVRPYSPAQQEILRIYEDGVLSSVSEIEDEIKNILKKFNESEEGKRPTKNEIIRYKCWLEQKYCSPYTGEIIPLGKLFTPAYQIEHIIPQARFFDDSFTNKVICEAEVNAKKGDLLGYEFVKEKGGEIVELSGGRNVRIFSVEEYEDFVKEHYKSNKQKMQRLLAEDIPTEFSHRQLNDSRYISKYIRNLLSNIVREDDEQESVSKNVISCNGAITDRLKKDWGVNDVWNHIILPRFVRLEEIRADNGEKFTAFNQEGHRIPSMPLIHQKGFNKKRIDHRHHAMDAIVIACTTRDHVNLLNNECSNPQNNVNKHQLSRKLRRYENVSYKQDGKLKEREVPKEFLKPWEGFTRDVEFALKNVIVSFRQNLRVLNKTVNYFQHWKDNSSEKEWKEQKSADHWSIRKPLHKETVSGEVFLWRTRFVSLSEVLTNLDPKRIVEKDLRSKILELQRKGYDIERIKKYFEDNKDVWQDVNLSKIEVRYYSREIVDPQTELPKNRYFATRFGKDLISLFSGVSNFERAKKIIESITDTGIQKILFRHLENKGNDPVLAFSPEGIDEMNRTIKTLNNGKDHKPIYKVRIYECSTMKFPLGSVGNKSKKFVEAAKGTNLYFAVYEKEVENDRGECHKERTFKTIPLNDVIRNLKQGLSIAPNDENGNPPAFILSPNDLVYLPTKEESETDSISQPLDRNRIYKMVSCTGYQVFFVPAFIAAPVLQKIELGSNNKSERARTDEMIKESCIPIKVDRLGMLISINGKAV

SEQ ID NO: 23584 - protein, 1432 aa, unidentified
  REGION 1..1432: note = Cas Enzyme sequence
MKRILGLDLGTSSIGWALVNESERAEEISSIVQLGVRVNPLTVGEMQNFEKGKSITTNADRTLKRSMRRNLQRYKLRRDVLIKLLKKVGFITDKTILSEQGNRTTFETYRLRAKAAEEEISLEELARVLLMINKKRGYKSSRKAKGEEDGSLIDGMEIAKKLYDEDLTPGQLCLQLLESGKKTFPDFYRSDLQDEFDRIWNFQKQFNPQSFCDTAKEEVKGKNKSQTWAILAKYFTWTKEVSVWNENEAKTENQEKEYRLVGLKRTVKGEELKKENYCWRVQALTERLDLEEIAVVLQEINGQISASSGYLGAISDRSKVLYFNHQTVGQYQMAELNKNPNMSLRNMVFYRQDYLDEFNAIWEKQAEFHKELTPELKKGIRDVIIFYQRRLKSQKGLIGFCEFENREIIVEKNGKTQTKIIGCKVIPRSHPLFQEFKIWQTLNNIEVFVGERKRKRKQTNVSSDLFDDTEDVLVTKGRRFLYQEEKEILAKELSIKENLKKAEVLKLLFENPQELDMNFKQIDGNRTGFALFSAYGRMIEKYGYEPLDFKKPADEIINQLKAVFSDLGWNTDLLSIGLDKEGKELEMQPYFRLWHLLYSFEGDNTPAGNGKLIEKIMQLCRVEKEYAIELANISFQDDYGSLSAKAIKKILPYLKEGNQYDVACEYAGYRHSKSSLTKEEIENKALKDKLDILPKNSLRNPVVEKILNQMVNVVNAVIDAYGRPDEIRVELARELKKSAKEREELTKAIAKNTREHDEIRKLLQSEFGMIHVSRNDIIRYKLYEELKENGYKTLYSNQYIPKEKLFSKEIDIEHIIPQARLFDDSLSNKTLEYKAINIEKGNKTAYDFVKDKYGEEGLQEYLNRCETVCNDKKAKLRKLKMQQNDIPDGFIDRDLRNTQYIAKKALSMLKDICRRVVATTGSITDKLREDWQLVDVMKELNLPKYEALGLVERFEDKDGRIIKRIKDWTKRNDHRHHAMDALTVAFTKDVFIQYFNNKNAAWESDCKEHANIIGIKTRYFESGRAVPPMPLGQFRVEAKSHLENLLVSIKAKNKVVTTNVNCIRKKGGISEKHQQTPRGQLHLETIYGSHKQYVTKMEKVNASFDAAKIATVSRQNYRNALLRRLEAFGNDPKKAFTGKNTLEKNPVYLDRAQTMRMPDRVQTVEFEAVYTIRKPIDSNLNVEKVVDAKVRAILEQRLEEYGGDAKKAFVNLDENPIWLNQEKGISIKRVSIRGINNAQSLHVKKDKNGNPILDENGKQIPVDFVNTGNNHHVAIYRKPVLDKKGQVMFDEDGNLMYELDEVVVSFFEAVTRANLGLPIINKDYRRSEGWQFLFSMKQNEYFVFPNEKTGFNPKEIDLLDPDNYAVISPNLFRVQKFSTKNYCFRHHLETDVQERKALLGITYKWQLGLKAIKDIVKVRINHIGQIVSVGEY

SEQ ID NO: 23585 - protein, 1312 aa, unidentified
  REGION 1..1312: note = Cas Enzyme sequence
VQNGFLGITVSSEQVGWAVTNPKYELERASRKDLWGVRLFDKAETAEDRRMFRTNRRLNQRKKNRIHYLRDIFHEEVNQKDPNFFQQLDESNFCEDDRTVEFNFDTNLYKNQFPTVYHLRKYLMETKDKPDIRLVYLAFSKFMKNRGHFLYKGNLGEVMDFENSMKGFCESLEKFNIDFPTLSDEQVKEVRDILCDHKIAKTVKKKNIITITKVKSKTAKAWIGLFCGCSVPVKVLFQDIDEEIVTDPEKISFEDASYDDYIANIEKGVGIYYEAIVSAKMLFDWSILNEILGDHQLLSDAMIAEYNKHHDDLKRLQKIIKGTGSRELYQDIFINDVSGNYVCYVGHAKTMSSADQKQFYTFLKNRLKNVNGISSEDAEWIDTEIKNGTLLPKQTKRDNSVIPHQLQLREFELILDNMQEMYPFLKENREKLLKIFNFVIPYYVGPLKGVVRKGESTNWMVPKKDGVIHPWNFDEMVDKEASAECFISRMTGNCSYLFNEKVLPKNSLLYETFEVLNELNPLKINGEPISVELKQRIYEQLFLTGKKVTKKSLTKYLIKNGYDKDIELSGIDNEFHSNLKSHIDFEDYDNLSDEEVEQIILRITVFEDKQLLKDYLNREFVKLSEDERKQICSLSYKGWGNLSEMLLNGITVTDSNGVEVSVMDMLWNTNLNLMQILSKKYGYKAEIEHYNKEHEKTIYNREDLMDYLNIPPAQRRKVNQLITIVKSLKKTYGVPNKIFFKISREHQDDPKRTSSRKEQLKYLYKSLKSEDEKHLMKELDELNDHELSNDKVYLYFLQKGRCIYSGKKLNLSRLRKSNYQNDIDYIYPLSAVNDRSMNNKVLTGIQENRADKYTYFPVDSEIQKKMKGFWMELVLQGFMTKEKYFRLSRENDFSKSELVSFIEREISDNQQSGRMIASVLQYYFPESKIVFVKEKLISSFKRDFHLISSYGHNHLQAAKDAYITIVVGNVYHTKFTMDPAIYFKNHKRKDYDLNRLFLENISRDGQIAWESGPYGSIQTVRKEYAQNHIAVTKRVVEVKGGLFKQMPLKKGHGEYPLKTNDPRFGNIAQYGGYTNVTGSYFVLVESMEKGKKRISLEYVPVYLHERLEDDPGHKLLKEYLVDHRKLNHPKILLAKVRKNSLLKIDGFYYRLNGRSGNALILTNAVELIMDDWQTKTANKISGYMKRRAIDKKARVYQNEFHIQELEQLYDFYLDKLKNGVYKNRKNNQAELIHNEKEQFMELKTEDQCVLLTEIKKLFVCSPMQADLTLIGSSKHTGMIAMSSNVTKADFAVIAEDPLGLRNKVIYSHKGEK

SEQ ID NO: 23586 - protein, 1373 aa, unidentified
  REGION 1..1373: note = Cas Enzyme sequence
MKKVLGLDLGTTSIGWAMVNQAENNEEKSSIIRAGVRVNPLTTEEKDAFEKGKAVTTNTDRRLKRSMRRNLQRYKLRRNELVSILKELGWIDDSTILAEHGNRSTFETYELRSKACTESVSLTELARVLLMINKKRGYKSNRKANAEEDGQPVDGMSVAKLLYEKGKTPGQYCYSLVKKGNKVLPEFYASDLKSEFRRVWETQRLYYPEYLTEEFWNQIDGKTRSSLTKLFFAKYKITTADNKGKDKRVKAYEWRAAAVENRLPIDQVAYVLCDIAGNLGSSSGYLGKISDRSKELYFNKQTVGQYLYSNIQKDPHFSTKNKVFYRQDYLDEFEAIWESQASFHPELTDELKKEIRDVVIFYQRRLKSQKGLISYCEFESRKVDVEINGRIVQKIRGCKVAPVSSPLFQEFRIWQKINNIIVTNKETGEQGTLEQDDKVRLAECLRVKDKLSDKEILKLLFKKPKDLEMNFKSIEGNETLGKLYSKFLEVVSLAGNSDYEYSKLRQEELMNILRTEFARNGFNTAVLEYDPSLPKEEYERQPLFRLWHLLYSYEGDKSQTGNASLINKIAEICGMPENLAKIIASVSFKQDYASLSHKAMRKILPYMMDGNEYSLACEYAGYRHSKQSLTKEEIENKVLKDRLDQIPKNSLRNPVVEKILNQMVNVINTVGDRYGKPDEIHIELARELKSSQEERARATESIASNNKENDRIRMILENEFHLAYVSRNDIVKYKLYEELKNNGYKTLYSNQYIPADKLFSREIDIEHIIPQAVLFNDSLSNKTLEFRDINLEKGKDTAFDYVKNKYGESGLEDYKLRVNHLFESGGISRTKRDNLLRDSKNIPEGFVERDLKDTQYIAKKAREILLEYVRVVVSTSGSITDKLREDWGLVNVMKELNMPKFEAAGFVETITTSDGKDIRKIKDWTKRNDHRHHAMDAITIAFTKLAHIQYLNNLNAKGDKSSSIYAILQKETYLSGSKRLIIPPLPLDQMRREVRRQLESILVSIKAKNKVMTENINRIRIKDGVKNVKCLTPRGLLHKEQVYGQRKRYETYDVAVNGKMTEDVIATVASSETKAALALRLAQFKGDPKKAFTGANSLDKNPVWLDANHSRKVPAKVKCVRFVNVYSIRKNIDPSLSVEKVMDGRVRRILKDRLAEFGNDPKKAFVNLDENPIWFNKEKGIILKSVTIAENFDLDPIRIKRDNLGRVICDAEGNHIPSDYVNFRNNHHAAIFEDADGNIQEHIVSFYEAVRRKSAGLPVVDKEYNADKGWKFLFTMKSNEMFVFPNERTGFDPRAVDLMDPENYSAIGPNLFRVQAVSTRDYWFRHHLETSLGADKKLKDITWKRITNIEIFKQLVKVRIKHIGEIVSVGEYD

SEQ ID NO: 23587 - protein, 1516 aa, unidentified
  REGION 1..1516: note = Cas Enzyme sequence
MKNVLGFDLGTNSIGWAVVQEKYNESNILIKQILGAGSRIIPMDAAQLGDFAKGNTISQTKDRTQFRGVRRLRERCLLRRERLLRILDIMGFLPKHFSNALTRYGKFKDADEEPKIAWRKDNEGKMHFLFADSFNEMIEEFRSVQPELLKRGMKVPYDWTLYYLRKKALRETVTPFELAWIILNFNQKRGYYQLRGEEEGEADNSKCEEYLAQKVVDVIDTGEKKGKSTWFDIVLENGMVYHCSAEIKPDWIGKTKEFIVTTQFDKDGNPKKDKKGNIKMSFRMPNENDWNLQKKKAEKDIDESGMTVGEYIYNALLHNPKQKIKGKLVRVVERKYYKNELQKILESQKRFIPQLSDSALYGKCIKELYQSNEAYRNSISTRNDFTYLFVDNIIFYQRPLKSKKSLIDNCPYESLTYTKDGEEHKAPVKCIAKSHPLYQEFRLWQFISNLRIYQRQKQVGDKVKLDVDVTDEFLPTDDRREALFDYLNDKTEIKQDVLLKEFFNMKKPKGKDSVYPYRWNYVEDKSYPCNVTRGKILAKLNKAGVSADFLSSKGNEESLWHILYSVEDKGELRKALARFAAKNGLDNAFTEALADIEPYKKEYGAYSAKALKKLLPLMRLGKYWNYDNIAPATKARISKIIDGEYDDNIRNRVREKAMSLTSASQFQGLPLWLACYIVYDHHSERADSGRWSSPEDIDKYLSDFKQHSLRNPIVEQVVTETLRTVRDIWKKYGEISEIHVELGREMKNPADKRSKMNRRMLENENANMRAKLLLTEFMNPEFGIENVRSYSPSQQELLRIYEDGAISNAGSEIDDEISDIMNRLSQVDVKKQPTASEVKRYILWLEQNYRSPYTGQMIPLAKLFTPAYEIEHVIPQSRYFDDSFSNKVICEAEVNKLKDRMLGYEFIKQHKGEKVSLSMGGTVEILSPEEYVRHVESQYKNNKAKMRKLLMDDIPDEFINRQLNDSRYISKLIISLLSNIVREEGEEEATSKNVISCNGSITDRLKKDWGINDVWNHIILPRFRRLNELTETDKFTTSNKEGHEVPDMPLELQKGFNKKRIDHRHHAMDAIVIACTTRDHVNLLNNEAAMSKNNANRIQLSKKLRRYESVEIEKDGIRKQIPVAKEFKKPWEGFTADVERTLRDIVVSFKQNLRVINKTTNYYQHFKAGKKIYSPQSKGDSWAIRKSMHKETVFGEINIRRIKEVSLKEAMKRTKDIADKELRSKIVELMALQYNEKKIKQYFSDNKDEWSDVNPKKIKIHYFTKETNERFFATRKPLDTSFDKKKIKTQVADTAIQKILLNHLSAHGDKAETAFSPDGIDEMNRNIIELNDGTFHQPILKVRVYEKADKYAVGQQGNKKKKYVEAAKGTNLFFAIYAEENIDEKTGDIGIMRTYDSIPLNVVIDREKRGLSPAPENENGTKPKYVLSPNDLVYVPNKEERETGRICEPLDKERIYKMVSCTGKECHFVPYSSAKPIYDKVEYFSLNKMGRALTGEMIKEICIPISINRIGEITLR

SEQ ID NO: 23588 - protein, 998 aa, unidentified
  REGION 1..998: note = Cas Enzyme sequence
  REGION 974..981: note = misc_feature - Xaa can be any naturally occurring amino acid
MKKILGLDLGTTSIGWALVKEAEIEEEKSSIIKLGVRVNPLTVDEQSNFEKGKAITTNADRTLKRTARRNLQRYKLRRENLLSVLKENGFITDDSVLCEQGNRTTFETRLLRSKAATEKISLDELARVLIMINKKRGYKSSRKVNSGEEGSLIDGMAVARKLYDEHLTPGQYVYQLLCRGKKYIPDFYPSDLNAEFEAVWNCQKQFYAGIFTDELREALRSKNEKQTWAICAEPLVLKGIKRNGSTADQRVENYRWRTEAISKQLPLEQVAVVLQKINGQIAGTSGYLGAISDRSKELYFNHQTVGQFQMKQLSDNPNTSLKNQVFYRQDYLDEFERIWETQAKYHSQLTAELKHELRDIVIFYQRPLKSQKGLISYCEFESRQKEMVVDGKKKTITIGLRVCPKSSPLFQCFKIWQTINNLQVTGEVVPKTQTDLFGDSTECEHGTRTLTEEEKCDLYRELSIKESLSETEILKLLFGSKKGLSLNFRKVEGNRTMALFVRACQTVLAINGYNDYDFSKMSYDKAMPIITQVFEALGFNTSFLTFDPTLDGKDFERQAAYQLWHLLYSYSGDNSATGNEKLIERLCAILNMDRDSAAVFASITFEPDYGSLSAKAMRRILPHMMDGLEYSVACEYAGYRHSRRSLTKEEIAAKPLVETIPLLPRNSLRNPVVEKILNQMINVVNAVSDRYGKPDEIRIEMARELKKNAKEREQMTRDIARTNAENEKYRKALQEEFGIQNVSRNDIIRYRLYLELEANGFKTLYTQTYIPREKLFSKEFDIEHIIPQARLFDDSFSNKTLEARSANIEKGSTTAYDYVLTKYGEQGDNGSVKYKERIDSLYKEGVISKTKHDKLLMTTAEIPNGFINRDLRDTQYIARKAREILESAVRVVVPTTGAVTDRLREDWQLVDVMKELNWDKYDQLGLTEIYKDPDGRQIRRIKDWTKRNDHRHHAMDALTIAFTRHSFIQYLNNXXXXXXXXRQYICYREKRTIPRQQQ

SEQ ID NO: 23589 - protein, 1126 aa, unidentified
  REGION 1..1126: note = Cas Enzyme sequence
  REGION 49..52: note = misc_feature - Xaa can be any naturally occurring amino acid
MGSRVVSLTAAELSSFTQGNGVSINSQRTQKRTQRKGYDRYQLRRTLLXXXXNKLDTLGMLPDDSLSYLPKLQLWGLRAKAVTQRIELNELGRVLLHLNQKRGYKSIKSDFSGDKKITDYVKTVKTRYDELKEKRLTIGELFFRRLTENAFFRCKEQVYPRQAYVEEFDCIMNCQRKFYPDVLTDETIRCIRDEIIYYQRPLKSCKYLVSRCEFEKRFYLNAAGKKTEAGPKVAPRTSPLFQVCRLWESINNIVVKDRRNEIVSISAEQRAALFDFLNTHEKLKGSDLLKLLGLSKTYGYRLGEQFKTGIQGNKTRVEIERALGNYPDKARLLQFNLQKESSSMVNTETGEIIPMISLSFEQEPLYRLWHVLYSIDDREQLQLVLRQKFGIDDDEVLERLSAIDLVKAGFGNKSSKAIRRILPFLQLGMNYAEACEAAGYTHSNNYTKAENEAHALLDRLPAIKKNELRQPVVEKILNQMVNVVNALMEKYGRFDEIRVELARELKQSKEERSNTYKSINKNQRENEQIAKRIVEYGVPTRSRIQKYKMWEESKHCCIYCGQPVDVGDFLRGFDVEVEHIIPKSLYFDDSFANKVCSCRSCNKEKNNRTAYDYMKSKGEKALSDYVERVNTMYTNNQISKTKLQNLLTPVDKISTDFIDRQLRESQYIARKAKEILTSVCYNVTATSGSVTSFLRHVWGWDTVLHDLNFDRYKKVGLTEVIEVNHRGSVIRREQIKDWSKRFDHRHHAIDALTIACTKQAYIQRLNNLRAEEGPDFNKMSLERYIQSQPHFSVAQVREAVDRILVSFRAGKRAVTPGKRYIRKNRKRISVQSVLIPRGALSEESVYGVIYVWEKDEQGHVIQKQRAVMKYPITSITREMLDKEKVVDKRIHRILSGRLAQYNDNPKEAFAKPVYIDKECRIPIRTVRCFAKPAINTLVPLKKDDKGNPVAWVNPGNNHHVAIYRDEDGKYKERTVTFWEAVDRCRVGIPAIVTQPDTIWDNILQRNDISENVLESLPDVKWQFVLSLQQNEMFILGMNEEDYRYAMDQQDYALLNKYLYRVQKLSKGDYSFRYHTETSVEDKYDGKPNLKLSMQMGKLKRVSIKSLLGLNPHKVHISVLGEIKKIS

SEQ ID NO: 23590 - protein, 1504 aa, unidentified
  REGION 1..1504: note = Cas Enzyme sequence
MKNILGLDLGTNSIGWAVVNGSVNDNGSEQLVKIQASGSRIIPMDAAMIGDFNKGNSISQTAERTRLRGIRRLSERYLLRRERLHRILDILGFLPSHFAQDLDRHGKIVKGKEPKLAWRKNEAGQFEFIFQDSFKEMLEDFKLNHPNLITDDKKVPYDWTIYYLRKKGLTSKISKEELAWILLNFNQKRGYYQLRGEEEEENNNKLVEFYALKVVAVEDSGEKKGKDIWYNVHLENGWVYRRTSNIPLDWVGKTKEFIVTTDLEKDGTPKKDREGNVKRSFRAPKEDDWSLVKKKTEADIDQTHKTVGIYIYDTLLGNPSQKIRGRLVRTIERKYYKEELKLILDKQKEFHPELQDRALYAACVEELYTINEAHRNNIGNRDFTYLFLEDILFYQRPLKSKKSLIDNCPYEENHCLDKETGEIKSFPVKCIAKSHPLFQEFRLWQFIVNLRIYRKGLAQDVDVTNELLKTEEDYVALFDWLNGKKEIDQKAFLKYPLFGLKKEVENYRWNYVQDKPYPCNETRSSMLARLEKCDISIEFLTKENEEALWHILYSVEDKNEIVKALQKFADKHDLNASFVDVFRKFPPFKKEYGSYSAKAIKKLLPLMRMGKYWSENSIDKGTRERIDKIITGEYDEKIENRVREKAIHLVDVSDFRGLPLWLVCYIVYGRHSESKEITQWKSPADIDSYLKSFKQHSLRNPIVEQIIIETLRVVRDIWRQVGNIDEIHVELGREMKNPADKRKKMTQQISENENTNLRIKYLLTEFLNPEYEVENVRPYSPSQQDILRIYEEGVLNSVSDLPEEISDILKKFTETDLKKRPSRSEVLRYKLWLEQKYRSPYTGEVIPLGKLFTSAYEIEHVIPQSCYFDDSFSNKVICEAEVNKLKSNLLGHEFIVKHHGEIVELPFGKKVRIFTVDEYEQFVKDNYSRTRGKMKKLLMDDIPEEFVTRQLNDSRYISKVVKSLLSNIVREKGEEEAISKNVIPCTGGVTDRLKKDWGINEVWNKIILPRFQRLNELTGTNKFTTKNVGIQEIPTMPLELQKGFNKKRIDHRHHAMDAIIIACANRNIINYLNNESATAKAELSRYDLQKLLCDKAKTDNNGNYKWVIRKPWASFTQDTYLALENIIVSFKQNLRVINKATNHFLHYNEEGKKIFVKQGKGDNWAIRKSMHKDTVFGEVNLRRIKTVALNEAMKNPQSIVVKDFKRKLLELWNLGFDAKRIKKYFEDNRETWSDINLSKIEVYYFSKDTKDRFFATRKPLDTSFDRKKIENNITDTGIQKILLRHLELKDNNPDIAFSPDGIDEMNRNIIQLNNGKYHQPIIKVRWYEQADKFAVGQTGNKSSKFVEAAKGTNLFFAVYESNILDKKTNTIIKKRNYATIPLNVAIERQKQGLPVAPEDENGNDPIFVLSPNDLVYLPTDDELANGIIAQPLDRGRIYKMVSSSGEQCFFIKHIVANVLVDKFEFSPLNKMERALTGEMIKMICMPIKVDRLGNVLESSSSHKK

SEQ ID NO: 23591 - protein, 1504 aa, unidentified
  REGION 1..1504: note = Cas Enzyme sequence
MKNIVGLDLGTNSIGWAVVNGSVNDDGSEQLVKIQASGSRIIPMDAAMIGDFNKGNSISQTAERTRLRGVRRLSERYLLRRERLHRILDILGFLPFHFAQDLDRHGKIVKGKEPKLAWRKNEAGQFEFIFQDSFKEMLEDFKLNYPNLITDDKKVPYDWTIYYLRKKGLTSKISKEELAWILLNFNQKRGYYQLRGEEEEENKDKLVEFYALKVVAVEDSGEKKGKDIWYNVHLENGWVYRRTSNMSLDWVGKTKEFIVTTDLEKDGTPKKDKEGNVKRSFRAPKEDDWSLVKKKTEADIDQTHKTVGAYIYDTLLGNPSQKIRGRLVRTIERKYYKEELKLILEKQKEFHLELQDRALYAACIEELYPINEAHRNNVGNRDFTYLFLEDILFYQRPLKSKKSLIDNCPYEENQGLDKETGEIKSFPVKCIAKSHPLFQEFRLWQFIINLRIYRKDLAQDVDVTNELLKTEEDYVALFDWLNGKKEIDQKAFLKYPVFGLKKEIENYRWNYVQDKPYPCNETRSLMLARLEKCDISIEFLTKENEEALWHILYSVEDKNEIVKALQKFADKHDLNASFVDVFQKFPPFKKEYGSYSAKAIKKLLPLMRMGKYWSENSIDKGTRERIDKIITGEYDEKIENRVREKAIHLADVSDFKGLPLWLVCYIVYGRHSEAKEIIQWKSPADIDSYLRSFKQHSLRNPIVEQIIIETLRVVRDIWKQVGNIDEIHVELGREMKNPADKRKKMTQQMSENENTNLRIKYLLTEFLNPEYEVENVRPYSPSQQDILRIYEEGVLNSVSDLPEEISDILKKFTETDLKKRPSRSEVLRYKLWLEQKYRSPYTGEVIPLGKLFTPAYEIEHVIPQSYYFDDSFSNKVICEAEVNKLKSNLLGHEFIVKHHGEIVELPFGKKVRIFTVDEYEQFVKDNYSRTRSKMKKLLMDDIPEEFVTRQLNDSRYISKVVKSLLSNIVREKGEEEAISKNVIPCTGGVTDRLKKDWGINEVWNKIILPRFQRLNELTGTNKFTTKNVGIQEIPTMPLELQKGFNKKRIDHRHHAMDAIIIACANRNIINYLNNKSATAKAELSRYDLQKMLCDKAKTDNNGNYKWVIRKPWASFTQDTYLALENIIVSFKQNLRVINKATNRFLHYNEEGKKIFVKQGKGDNWAIRKSMHKDTVFGEVNLRRIKTVALNEAMKNPQSIVVKDFKRKLLELWNLGFDAKRIKKYFEDNRETWSDINLSKIEVYYFSKDTKDRFFATRKPLDTSFDRKKIENNITDTGIQKILLRHLELKDNNPDIAFSPDGIDEMNRNIIQLNNGKYHQPIIKIRWYEQADKFAVGQTGNKSSKFVEAAKGTNLFFAVYESNILDKKTNTIIKKRNYATIPLNVAIERQKQGLPVAPEDENGNDPIFVLSPNDLVYLPTDDELANGIIAQPLDRGRIYKMVSSSGEQCFFIKHIVANVLVDKFEFSPLNKMERALTGEMIKMICIPIKVDRLGNVLESSSSYKK

SEQ ID NO: 23592 - protein, 1370 aa, unidentified
  REGION 1..1370: note = Cas Enzyme sequence
MKLIFGFDLGSTSIGWAVVQEKENDTEASRILKLGVRVNPLTTDEKTNFEKGKPITTNANRRLAHGMRLNLSRYKQRRKELIKSLIRFKFISPDTVLCENGSNTTFETLRLRAKAATEEITLEELSRVLLMINKKRGYKSNRKAQPNDNGAIDNIDIAKKLYQSHLTPGEYVFNNLKQGIQYIPPFYRSDLINEFNKIVDCQTQFYPHLKNIDTGSLLKAKNCDIILDGQDVQRIKQKGSPSEKKRELYCLRAQAATQQIRLEELALVLEKISSEIRNSSGYLGDISDRSKELFINNQTIGQYLMSQLDRNPNNKLKGQVFYRQDYEDEFNRIWETQARFHKELTPERLHIIRDIIIFFQRDLKSQKSNIAICEFENQKREITVDGKKKIIEYGPKVCPKSSPIFQEFKIWQTINNLKISNIYGEELSLSSDERQILFGELSIRKKLTCAEILKLLHKDSKCSLNYKEIQGNTTISAIFDAFKEIILQSGHDNNNFNKASFKDTMLIIEPIFKMLRINTDILSLDCPTDSPSLKTCPIYQLWHLLYSYAGDNSKTGDSSLIKKLQRRYGFSKEYASIMSKISFDNDYGNLSAKAIMRILPHLRNGLQYSDACNAAGYNHSKRSLTKQDILNKVLVSQIDLLPRNSLRQPVVEKILNQLINITNALISTYGNPDEIRIELARELKKSADERAKLNSANNANEKENNSIRKLLQERFGIQNPSRNDIVRYKLYKELEHTGFKTLYSQSLITDDILFSKEIEIEHIIPQARLFDDSLSNKTLEFHNINQNKSNQTAYDYILSEFGEDYAVQYKKRIDDLLKNGKISRTKHKYLLMSETEIPTDFINRDIRETQYISRKAIEILEPATRKVVASSGAITARLREDWQLVDVMKELNWEKYKALNLTETIQDKDGRRIYKIKDWTKRNDHRHHAMDALTVAFTKPSFIQFLNNLNARSDKGNAIYAIQQKELHRNKDGKLCFNPPLPLDEFRAEAKRQLNDIFVSHKAKNKVATRNSYMTKNGKGTKIVELTPRGQLFNETTYGCVKQYETKLESVNSSFDTDKIMTVADKSYRQALMKRIEEFDGNASLAFSRKNSITKNPIYVDDSHSDTVPVKVKTVVPKPVFTQRIAVDIKLDKTKIAQILDAKIRRILTDRFYEFGEDPQKAFSNIDENPIWLNKEKGIAIKKVTIKTGISGVPIRHKRNNMGRPILNSDGNKIPSDFVVPGNNHHIAIYKDADGNIKEQAVPFYIATNRVIHKQPAVDRNFNADKGWKFLFSIKKNEYFVFPNEKTGFNPAEIDLLNPDNNKIISPNLFRVQKISPGDYFFRHHLETTVDANNALKGTTWIRIRSLPALENIIKVRVNNIGQIVAVGEY

SEQ ID NO: 23593 - protein, 1495 aa, unidentified
  REGION 1..1495: note = Cas Enzyme sequence
MSKILGLDLGTNSIGWALIDSKEQKIIKAGSRIIPMDAATMGDYEKGNLKSAASERTDFRGARRLYERAILRRERLLRVLHTIGFLPKSFEKQIDFTEHPGKFLNHGEPLLPYYKDEQGKNTFLFKDSFNEMLSDFKKHHPDLVSDGKLIPYDWTIYYLRKKALSQPITKEELAWIILNFNTKRGYYQLRGMEDTKETDKTKIEEYKVLEVASVENLGPNKKKDGYNWYLITYDNHATQRASSPTPPQKVGNLVEVVVTTTLDKDGNIKKDKDGFPMIKLRTPKEDDWTLMKKRTEKNLANSHQTVGSFIYEHILSTPNIKVRGKLIHTIERKYYKEELCQILEKQKEFIPELKDIELYKKCVHELYKNNEAHVESLMNEDFTNLFVNDIIFYQRPLKSKKSLIANCPFESYHYKDKNGNIQSHPIKCIPKSHPLYEEFRLWQFLSNLRIYKKNVEINGKIVTDYDVTSQFLQTPNDYCDLFEWLQNKKEIKQDQLLKYKSFGINKEVSNYRWNYVEDKTYPCCSTRFEINKRLQSLNLQDLDNNDYTHLWHILYSVDDPIMCQKALHKFAIKHGFQEEEFVNKFKQYSPDSKDYGAYSEKAIKRLLALMRTGRHWDEKNIDTKTLSRINNLIDGVVDDEITDRVREKLANKQHISDFQGLPLWAASYVIYNRHSEASETIKWQKPEDIDTYLQNNLKQHSLRNPVVEKIICETLRVVRDIWKNFGDIDEIHVEMGRELKQDAKSRNKDSQRIIENERTNLRIRALLQEFANPNYMIENVRPYSPSQIETLKIYENCVLSDSSIERPDDIQKIMNDLGNAKTIHIKQSDVLRYKMWLEQNYKSPYTGQIIPLSKLFTPAYEIEHIIPQSRYFDDSLSNKVICESEVNKAKDRMLAYEFISQKGGSIIKGNFGQDFKILDKKQYEDFVQHHYANNRTKMKKLLLDDIPEGFIQRQLNDSRYMSKKMLSILSCLVREEGEQETTSKHVIPTNGAITDRLKKEWGINDIWNQLVTPRFERLNDKTGTQAYGQWINKDGKRFFQTNIPLDLSVGFSKKRIDHRHHAMDAIIIACTNRDIVNYLNNIAALSNKEKERYDLKHKLCIKAKTDSNGNYIWVFKKPWETFTQDVSGVLEGIIISFKQNLRIITKMSNYYTHYVDGKKVIDKQTKGDSWAIRKSMHKATVSGLISLQKCKQVKLSVALEQWQNIADKDLRKEIANLIKLYHKFDKKLFIKYFKDRDYKLNGRDISNVRIYYYTGTSGKESITATRVAIDESFDTKKIESISDSGIQKIMLAHLKKYNDEKGNSHPEVAFSPEGIVAMNQNIKELNGGKEHKPIYKVRKTETLGMKFSIGEVGNKNHKYVEADKGTNLFFAIYVNEEGERSFESIPLNIAIERLKNHLKVAEEIKEDGRKLLFTLSPNDLVYLPDVEEGKNIYKMVSCTGNRVFFIPETWATPINNGYELGPLNKVEMSLEGINIKQECEKIEVDRLGRIVKTYK

SEQ ID NO: 23594 - protein, 1153 aa, unidentified
  REGION 1..1153: note = Cas Enzyme sequence
MKNILGLDLGLSSIGWSVIRENSEEQELVAMGSRVVSLTAAELSSFTQGNGVSINSQRTQKRTQRKGYDRYQLRRTLLRNKLDTLGMLPDDSLSYLPKLQLWGLRAKAVTQRIELNELGRVLLHLNQKRGYKSIKSDFSGDKKITDYVKTVKTRCDELKEMRLTIGELFFRRLTENAFFRCKEQVYPRQAYVEEFDCIMNCQRKFYPDILTDETIRCIRDEIIYYQRPLKSCKYLVSRCEFEKRFYLNAAGKKTEAGPKVSPRTSPLFQVCRLWESINNIVVKDRRNEIVFISAEQRAALFDFLNTHEKLKGSDLLKLLGLSKTYGYRLGEQFKTGIQGNKTRVEIERALGNYPDKKRLLQFNLQEESSSMVNTETGEIIPMISLSFEQEPLYRLWHVLYSIDDREQLQSVLRQKFGIDDDEVLERLSAIDLVKAGFGNKSSKAIRRILPFLQLGMNYAEACEAAGYNHSNNYTKAENEARALLDRLPAIKKNELRQPVVEKILNQMVNVVNALMEKYGRFDEIRVELARELKQSKEERSNTYKSINKNQRENEQIAKRIVEYGVPTRSRIQKYKMWEESKHCCIYCGQPVDVGDFLRGFDVEVEHIIPKSLYFDDSFANKVCSCRSCNKEKNNRTAYDYMKSKGEKALSDYVERVNTMYTNNQISKTKWQNLLTPVDKISIDFIDRQLRESQYIARKAKEILTSICYNVTATSGSVTSFLRHVWGWDTVLHDLNFDRYKKVGLTEVIEVNHRGSVIRREQIKDWSKRFDHRHHAIDALTIACTKQAYIQRLNNLRAEEGPDFNKMSLERYIQSQPHFSVAQVREAVDRILVSFRAGKRAVTPGKRYIRKNRKRISVQSVLIPRGALSEESVYGVIHVWEKDEQGHVIQKQRAVMKYPITSINREMLDKEKVVDKRIHRILSGRLAQYNDNPKEAFAKPVYIDKECRIPIRTVRCFAKPAINTLVPLKKDDKGNPVAWVNPGNNHHVAIYRDEDGKYKERTVTFWEAVDRCRVGIPAIVTQPDTIWDNILQRNDISENVLESLPDVKWQFVLSLQQNEMFILGMNEEDYRYAMDQQDYALLNKYLYRVQKLSKSDYSFRYHTETSVEDKYDGKPNLKLSMQMGKLKRVSIKSLLGLNPHKVHISVLGEIKEIS

SEQ ID NO: 23595 - protein, 1416 aa, unidentified
  REGION 1..1416: note = Cas Enzyme sequence
MKRILGLDLGTNSIGWALVNEAETDEEVSSIIRLGVRVNPLTVDETQNFEKGKSITTNAERTLKRSMRRNLQRYKLRRDALVEFLKELGFITDETILSEQGNRTTFETCRLRAKAAEEEISLEELSRVLLMINKKRGYKSSRKAKREEDGVLIDGMEIAKKLYEEDLTPGQLCSQLLESGKKVLPDFYRSDLQEELDRIWNVQKQFHPDVFCDAAKEEIKGKNRSQTWAILANYFVWKEEVISWNDREAKNETIEKECKLVGLKRTTKGYELKKENYRWRVQALTEQLGLEEIAVVLQEINGQINASSGYLGAISDRSKVLYFNHQTVGQYQMAELDKNPHASLRNMVFYRQDYLDEFDRIWEKQTEFHKELTAELKKEIRDMIIFYQRRLKSQKGLISFCEFERLEIVVEKDGKKQTKVIGCKVIPRSHPLFQEFKIWQTLNDIKVLGREKKRNALSASESRALYPEEKEILARELAIKENMRKADVLKLLFENPQELDLNFKQIDGNRTGFSLFSAYSKMIEKYGYEPLDFKKPADEIMGQLRTIFTDLGWNTNLFTIDLTKEGKELEMQPYFRLWHLLYSFEGDNTPTGNGKLIEKIMQLCGVEKEYAVELASLSFQDDYGSLSAKAIKRILPYLKEGNQYDVACEYAGYRHSKSSLAKEEIENKVLKDKLDVLPKNSLRNPVVEKILNQMVNVINTIIDTYGKPDEIRVELARELKKSAKEREELTKAIAKSTREHEEIRKLLQVEFGMMNVSRNDIIRYKLYEELKDNGYKTLYSNQYIPKEKIFSKEIDIEHIIPQSRLFDDSLSNKTLEYKAINIEKGNKTAYDFVKEKYGEEGLQQYINRCESLFNDKKAKLRKLKMGQKDIPDGFIDRDLRNTQYIAKKALAMLNEICRRVVATTGSITDQLREDWQLVDVMKELNLPKYEALGFVETYEDKDGRKIKRIKDWTKRNDHRHHAMDALTVAFTKDAFIQYFNNKNAAQDSDNRNHTNIIGIKTRYFDKGRALPPIPLEQFRVEAKRHLENLLVSIKAKNKVVTVNVNRTKKKKGENTKIQQTPRGQLHLETVYGSLKQYVTKIEKMNASFDVAKIATVSKQAYRNALLKRLETFSNDPKKAFTGKNTLEKNPLYVDKYQTIRVPEKVQTVEFETIYTIRKPVDPALNVDKVVDVKVRAILEQRLKEYDGDPKKAFVNLDENPIWLNKEKGISIKRVSIRGINNAQSIHVKKDKNGNPIWDENGKQIPVDFVNTGNNHHVAIYRKPVLDKKGQVTFDEDGNLMYELDEVVVSFFEAVTRANLGLPIIDKDYRKSEGWQFLFSMKQNEYFVFPNEKTGFNPKEVNLLDPDNYVVISPNLFRVQKIGSNDYTFRHHLETTIQNSNNELKFITWIRCGKSGISDIVKVRINHIGQIVSVGEY

SEQ ID NO: 23596 - protein, 1221 aa, unidentified
  REGION 1..1221: note = Cas Enzyme sequence
MKKVLGLDLGVGSVGWSLVNVDDNYKPTEILGIGSRIISLSPDESSEFTSGNAASKNQKRTQKRTARKGYDRYQMRRQALTEKLRELKMLPDERLIKLPVLELWTLRAKAATPGEKLTLPEIGRVLYHINQKRGYRHAKSDDSADKEQRDYVQTVNKRYQEIKDEGTTIGQHFAIKLKESEIVTDKGPFYNYRIKEQVFPRDAYIEEFDRIMDCQKTFYPEELSEDNIDEIRNKIIFYQRDLKSCKHLVSQCEFMTRSLLDAEHKPILNSSGELVMSGPKVAPKSSPIFQACKIWEEINNLSIRNKENDELHISPEQKKDIFEYLDNNEKINATTLYKILGIGKGDGWSVDKALSKGFTGNTTKVAIAKVLGKEHNTKKSDLLRFDLRLKENGVNKDTGEIIYEIDPTCENEPLYRLWHVIYSINDKDALRHALTNQFGINDEESLRELTKIDFVKQGYGSRSAKFMRKLLPALMDGARYSEACDMIGINHSGSLTKSENEARELLHKIPQLQKNELRQPVVEKILNQMINVVNAVIEQFGSIDEIRVEMARELKLSKEGRAATAKNIRDREKMNNEMAEKIKELGITPSKNKILKYRLWQESGQKCFYCGQPVGAAEFLSGLDVEIEHIVPKALLFDDSFSNKVCACRKCNAEKSNTTAYDYMKSKGENEFNDYLRRVDAAFNEHKISFTKRSRLLSPADKLPKDFISRQLVQTQYISRKAMEILKQVCHNVYGSSGEVTSYLRRIWGYDEILHSLDLPRYREGGMTAEVSYDHRGQTHTEERIKDWSKRLDHRHHAIDALTIACTRQSIIQRLNNLSAMTAVAGESMSLDKWTLAQPHFSVQEVSDNVSRILVSFKAGKKVTTPGKRYVYRGGKRVLAQEGLLIPRGALCEESVYGRIHSLEKEVPVKKLFERVDDIVKPGIRTAVEERLRACDNDVKVACASLKKEPLYLDVEKTIPLEYGTCYKAKYVMRSVLSALKPKDVEFIVDEHIRKVVSERLSEYGNDPKKAFAEPLYSDKSKTIPIRAVRCYTGLAQVVPVKKDSKGNAIGFVKPGNNHHIAIYRDADGAYHENVVTFWDTVERKKYGLPVIIRKPGEIWDILIDKNIPEELAAGLPAPDWQFVMSMQQNEMFVLGMEDDEFRDAMEVKDYKTLGAHLYRVQSLSRSDYYYRCQYETQLDNSNGAMLMKKYYRVRSFNALFTLHPRKVSVSLLGEMALKDD

SEQ ID NO: 23597 - protein, 1498 aa, unidentified
  REGION 1..1498: note = Cas Enzyme sequence
MKHILGLDLGTNSIGWAVISSSFDETTQKEQLKGIEAAGSRIIPMDAAQLGDFNKGNTVSQTANRTQFRGVRRLYERKKLRRERLHRILQLLGFLPKHYANQLDRYGKFIANSEPKLAWTTNTHGLPYFIFQSSFQEMLNDFLQNNSQVKKVPYDWTLFYLRKKALTQKIEKEELAWILLNFNQKRGYYQLREEEAEKTSSKTRQYFDSQIVTDITDTGQVYKGFKIFTITLTNGEKGKFFSKNMPDWKGQKKDIIAIIDLDKNGNDKYDENGELSRRFKIPTEQEWEEQWELIKTKTQKDLDTSHKTVGAYIYDTLLQTPSQKIRGKLIRTIERKYYKDELNQILKKQEEFHPELRDSNLLEACIEELYPNNEAHRNAIAKYSIAQLLIEDILFYQRPLKSKKSLISNCPYEEYTYINKETGEICTSPLKCIAKSHPLFQEFRLWQFISNLRIYQKEGTINGKFTTDIDVTSQFLKTEDDYANLFDWLNQKKEIKQDTFLKSPAFGLKKNTANYRWNYVEDKTYPCNETHYKILSYWEKAGIEQSALTSEIEEKLWHILYSISDKNELKKALQHFADKNYLSDKFADTFQQIPPFEKDYGSYSAKAIKKLLPLMRIGRYWKAENFDSTTLDRIEKILTGEFEENIKNRTREKTIHLDNLYSFQGLPTWLACYIVYNRHSEIKDVTKWQQPSDIDAFLNAFKQHSLHNPIVEQIIMETLRTVRDIWKQTGHIDEIHVELGREMKNPAEKRRKLTQQIQENENTNLRIKALLAEFANPELGIENVRPHSPSQQDLLRIYEEEVLNETKDIPEDIAVILKKFNETDTKKRPSTSDVLRYKCWLEQKYRSPYTGAMIPLGKLFTPAYEIEHVIPQSRYFDDSFTNKVICEAEVNKLKGNMLGYEFIKNNQERIVELGFGQNVKIQTVEAYELFVKEHYSYNRTKMQKLLMEDIPNQFIERQLNDSRYISKFIKSLLSNIVREEGEEEATSKNVIVCTGSITDRLKKDWGLNDVWNKIILPRFMRLNEITESNRFTTTNACNKTIPAMPLDLQKGFNKKRIDHRHHAMDAIVIACANRNIVNYLNNESASKNAKISRQDLRQILCKKTKTDNLGNYQWLIDKPWDTFTQDVYSILGNIIVSFKQNLRIINKTTNHYIHYENGKKVSCSQKQGDSWAIRKPMHKETVYGEINLRRTTTATLKAALENPQRIIEKDLKKKIKELLTQGLNEKQIKKYFEDNKDIWQEINLKKIPVYYFTKETANRFFACRESINTTFNKKKIEEKVADTGIQQILLRHLEQNGNNPEQAFSPEGIEQMNKNIMSLNNGKFHQPIYKVRTYEQADKFAVGQTGNKSTKFVEAAKGTNLFFAIYETAHKRSFASIPLNVVIERLKKGLSPAPENEKGNLPKFILSPNDLVYVPTKEEIENGHINQPIQKDRIYKMVSCTGNRLYAIPYYIAYILIDKEEYGALNKTEFSDEKLSIKEICIPIKTDRLGNIITSISL

SEQ ID NO: 23598 - protein, 904 aa, unidentified
  REGION 1..904: note = Cas Enzyme sequence
IKKILGDDFNKIINQDKEIVLKIFNSIFDLNNSGSEYDVNSKKVSSLINILKASIAETNAITLALKLAQNITYPRKYASLSAKAINNILPLMQLNTVGITNLIKENFENIKHAIETGELKDGVKPYMVDYIDSNPNIIETGGMMDSFASSLVYGKHTTAEINATIKNYHDIKYNPNRNLRNPIVEQITNEALQVIKAIWKQYKFNPEKLEIRIELARDLKNSAAEREKIYKGQLNNQKQNNRIKERLAEEKIPITDENILKYKLYEHQKYLSPYSGDTLEISLFDEYQIDHIIPKSRLFDDSISNKVLVEGFLNAEKGNRTSWEYISQQNTKYKICSIQAFIDIVNENYFGRKKKNLLLEKIPTDFIERQIKETQYIALAVKSELAQIVGSNNVKSSTGMITDFLRSRWGLKQLFMELTKSRFEQMELWDSSNKWVTRDFDERKNKDILKIKNWSKRYDHRHHSIDALVVALTEQKDIHRLNNLNKELQDWLMAHKDEIQLEVKEDETVLEAFFNLDEKRREEIQKTIQPFRKFEPPFDDLARQAKIHLEAMVVSHKPKDNLTIQFNEKTKKKEIKIRSALHEATLYGKHNGQDTKTMSISNLTVKDIEKIIDPVLKAEINQHRKKSEYGSMKEAFSGEGLKAFNESRFQRKKPELLKPPVFKTKVYYNTKEVKESSLQRLYTDNDKLSVKTGSNYLFLVMEKKAKKDGEKERVFDIVSLYDAADFAKTEWKDQNEDFKKKIYEYYITKNNADKVLFSLQQNELVYLPENVDDPILNFTADDFTKWISQNENKAKFNKRVYKVVKFTGKDCFFIPHNYANTISIAKDLTEEQKIELKKKYEEKDIPKKEMNFVEYGSYRDSAPVAVDEHFVKGLIDKAYKTKPMKIQDYCIKIKTDWLGNISLV

SEQ ID NO: 23599 - protein, 1047 aa, unidentified
  REGION 1..1047: note = Cas Enzyme sequence
MKKVLGLDIGTNSIGWALVYEPDQPGESYNIAGMGVRIIPLSSDENDEFTRGNAMSKNAKRTAMRGARRTMQRYKLRRQQLGLILNALGMMPESWLFELNAVDLYSLRAKGVSEQLSLQEIGRIFFHLNQKRGYKSNRKANNEEEQTEIKAIEEKDSEDTRLKKKGYLDLINDREQVLKDENITIGQHFYKELLKNDKTRIKENIYLRSTYIDEFNRIWNNQQIYYPDILTDGNKQKICNETIYYQRPLRSQKGLVSNCLFEKYHKATPKSSPLFQINKIWQELNNIELTSFKAMRGREGGFDKQGKRWLTLEEKQKLFNKLNIEGKLSVKKCLDELGYITDQKEYKINIRNEKELEGNRTYAAIKKVFHQFKIDESLLQFNLTIDQKEIPDKQTGEIVTRPQISPEFEREPLFQLWHLLYSIEETETLLAKLQSRYGLDEIVAKALAKIDFVKQGYGSLSAKALRNILPHLMQGNGYSEACKMAGYNHSNSITFEQNNEREIKDRIKLYDKNSLRQPVVEKIINQVINLVNEIIDEKNGYVTNKERHSGSFEIRVELARELRQNAEERNKTYSRNAKQDRRHKEIEIIIKQHLPYKRVTHNDIVRYKLWEEFGQVSPYEPGKPVSLTQLFSGDYDIEHIIPKSRLFDDSFNNKTICRRKLNSGSLGKNQMTAYDYMQSQEEQVFRNYLEFIKLHLYKKDGISKAKFNKLMMPIDKIPDDFINRQLQETRFITKEVKTCLMLICRNVYATSGSVTAEIRHLWGWDDVIMDLQIDRYRTVNQTEIIEYITNGQKHTKERIIGWSKREDHRHHAIDALTIACTKHAFINRINKINAQENRDEMFDKVKNSRFNDKLTLLQKYLILQKPFETALVSSAIDNILISFKAGKKVTSNSSNKIKKADGIIQKETEVIPRGFLHKDTVYGRIKQFEEVPLSARFDRFGDIVRPDIKAQIVDYIGKFDNNVKEAFNGKNLLLFKEQFRYDKIMVFRHEHVVRYKLDTNFKAADAEFIVDEGIKAVVKAHLAEHGNNPKSAFNSDKVIWLNKEKGI

SEQ ID NO: 23600 - protein, 1113 aa, unidentified
  REGION 1..1113: note = Cas Enzyme sequence
IDGYKRIDVDVTSDFINPTVKEQLFEKFDTSKEVSQENVFTILNKNSEIKISDKTHRINMFFKADKKLQGNETKYYFRKVFNKCNYEGDGELLLNDSEKFHKLWHILFSISSADAEKSAKGIKSAIENKKNAFELPPNVIEKLSTSPEIEKQKKYASYSTKAIRKLLPLMRTGKYWNEDLITTEAKEKAKKITERLEEINYNERKINDIADDDVQKQLLKSFIKAETLTQSLNTYQACYIIYDRHSEKVNDKTYNSIEEFDVLKLIPNNSLRNPVVEQVVRETLLLVKDVWKKYGQPDEIHIELGRELKKNAEEKEKITKNQNKNYDEKQRIKKLLHELINETFEEYESDLKENYSPSNQGVLPYDEKKVVSQFSVKPNPESPRDIDKFRIWKSSSNVKDDEFEKLFKNGNKERIPTKSEIKQYILWLSQGCRSPYTGKIIPISKLFSTDYEIEHIIPQSKFANDSMNNLVIAEAAINPPPYKGNLLARNFITQFGGKQGKEHIISGKKYFILGEQDYEDRCTEIFKYQKGKLKNLLATEVPEDFVSRQLNDTRYITRKVTELLNPIAKDKTGIIFTGGSITAELKKKWGLNKEWKKLLLPRFKRLEEINKTEYVLKNKFDKNDIDINVPENPELELKRLDHRHHALDALIIAATTREHIRYLNSLNAVDSDKELQKVKQTLVKGKIREFKTPWEKFTEDARNKLEETTVSFKTNNKIVSKPYNKTAFWKQDADGTWSKELKQQKVNPKWMAVRKSMFKEPQGIVYIKEIETKPFRTPKEMMDIVKLQITRMKAQNTPNQKNTSYIYDQETREIVKNIIEVSGGNIEAIGKYLKKFSPVNSNGEKIYTVRIAVFNEYAAKRVTLNNTFDHKKIDKIPYAENGKSPIGKLLHEHLKNNGDDPLIAFSGEGLEALTKKNGGKSITKVTIKESSSSKFKNQYVEIDAGSNAYFVIYENEETKEREDYKSLATHKAIERLVKGEPLAEERSGYKTIILSPNDLVYLPTKEELEKIKTNSENPINWDDKKKIFERTYKMVSCTGAKCEFIPHNISNSNPIIQEIELGSSNKNQRAWDGKVELVKSDKKDKPTREDSGTMIKEFCIKLKVDRLGNISKA

SEQ ID NO: 23601 - protein, 1489 aa, unidentified
  REGION 1..1489: note = Cas Enzyme sequence
MATRKILGLDLGTNSIGWAVVSQNMDSRSIAAAGSRIIPMDAALMGDFESGNSVSQTANRTAARGTRRLYERRALRRERLCRVLSILGFLPPHYTQELNRYGKLNKGAEPKLAWTVEGIKPTFLFQPSFEEMMRDFAVAQPQLAANGKKIPYDWTIYYLRKKALTQPVTKQELAWILLQFNQKRGYNQARGEEEETKTNEKKELITAKVVEVRDKGEVSKGRTWYEVVLETGDIYKRQSAYPLDWVGKTKDFIVTTKLNEDGSEAIDKEGRPKRSFSAPQEDDWGLRKIKTEHDIAQSGKTVGEFIYDALLHNPDQKIVGQLVRVVDRKLYKEELRRILDTQKQFIPELQDPDLYRQCIEAIYPQNEAYRNSIANKDFTYLLLQDVLFYQRPLKSKKSLINECPYEYHVYQTKNGDWKRQYLKCISKSHPLYEEFRLWQFAENLHIYKIDANGIGKSDCTADYIQDKAALVKWLLTQKEITEKSILSKFAGKKAKDLSWNYVSDKKYPSAPVTATLTAIIAEVGGTINNEELHHIWHILYSVSDKEQLTQALAHYAEKHNLSSVFVEKLSKQKPFAADYGAYSEKAVRRLLSLMRCGEYWNEENIDPQTKQRIEHILTGEVNDAISDRVREKLKDLNNISDFQGLPLWLAEYVVYDVRKNDTKWETPEDIDKYLQSFRLHSLNNPIVEQVVMETLRTVRDIWKQEGHIDEIHIEMGRELKQNAEQRKNTLTRQQDNEKANLRAKLLLQEFMNPDAGMDGVRAYSPSQLELFRIYEDGVLNNSNATRDDDIQRIIKDLSELKQPSAADVRKYRLWLDQKYISPYTGQPIPLAKLFTSAYQIEHVIPQSRFFDDSMSNKVICEAEVNARKDRMLAHEFITKCGGEKITLSGGRVVTVLTTQAYEDLVRDTYKTNPRKQEKLMLDDIPEKFIARQMNDSRYISRLMLGLLSNIVREKNAKGEYEPESTSKNVIACNGSTTTRLKKDWGINDVWNRIILPRFERLNQLQNTTIFTTKTANGHTIPNMPLELSKNFEKKRIDHRHHAMDAIVIAFTTRNHVNLLSNEAALEKDENARYDLQMQLRKRETWTSPNGKSHTKFTDFIAPYEGFQQDVQTTLENIIVSFKQNLRIINKSNNHTVHFEDGKKKSVKQTKGDNWAIRKSLHKATVFGKVNLRFRKTTPLKYALTHLNDIVDKDLRLKLRELVAQGYDEKRLKKYFAENKDVWSDINLQKIEIYYYTNDTPDNYYATRTALGDWLDEKSIREKVTDTGIQKILLAHLSQCNGDPKEAFSADGIEKMNQNIAQLNGGVPHKPIYKVRKYEKADKFAVGEIGSKSKKFVEADKGTNLFFAIYATTNTDGKEVRSYATIPLKAVIDCQKRGKKEWKPLLDQWVHNNNLVPANATLKYILSPGDLVYLPQDGTATIDKTRIYKMVSSTGNQCFCVPCSMASPIINKVEFSPLNKMERAITGEMIKETCVPIRVDRLGNIISIKP

SEQ ID NO: 23602 - protein, 914 aa, unidentified
  REGION 1..914: note = Cas Enzyme sequence
MGKYWKAENIDPKTRERIEKIINGEYDETIRNRVREKTINLEELDGFRGLPLWLACYVVYDRHSEAKDTTRWNAPADIDQWLGDFKQHSLRNPIVEQVVTETLRTVRDIWKRYGKIDEIHIELGREMKNPADKRARMTARINENENTNLRIKAMLAEFVNPEYNIDNVRPYSQGQQDLLHIYEDYAIGNIAENDEDFDFVMRMAKTAQPSKADIMRYKLWLEQKYHSPYTGEMIPLGKLFTPAYEIEHVIPQSRYFDDSFTNKVICESEVNKLKDRQLGFEFIKAHHGEKVSLSGGGEVTILSVQEYQLLVQKNYHDNRTKMKKLLMDDIPDQFIERQMNDSRYISKMIKSLLSNLVREENEQEAISKNVITCNGSITDRLKHDWGVNGVWNHIVIPRFKRLNELTCTSKFTTTSASGHEIPDMPLELQKGFSKKRIDHRHHAMDAIVIACTTRNHVNLLNNEAAMSKNNANRYQLQRKLRRFESVSVSRDGVVKQMEVAREFLKPWPTFTTDVEKALQNIIVSFKQNLRIINKTTNIYQRIEDGKKRTARQDKGDSWAIRKPMHKETVFGEVNLRMIKEVSFNEAMKSPKAIVDKDLKEKIKEKQRLGYNLKMLKQYFDNNKDAWADINLKKIKVYYFTKDTKDRFFATRKALDTNFDEKKIRSSVTDTGIQKILLRHLDECGGDSVEAFSPDGIDRMNHNLRRLNDGKAHKPILKVRVYEKAEKFAIGQNGNKPSKFVEAAKGTNLFFAVYEKEEIGKNGVVERKRSYATIPLNVVIDRQKQGLPSAPENENGQQPLFVLSPNDLVYLPTKEETNSGIINEPLDVSRIYKMVDASGIAVNFIPHSVANIIYSLPKELAQKFCADKIVQNEFGVGSPKSKNERAITGEMIKETCIPLKVDRLGNIVKLNNHEP

SEQ ID NO: 23603 - protein, 1378 aa, unidentified
  REGION 1..1378: note = Cas Enzyme sequence
MKRILGLDLGTNSIGWALVDEAENKNEKSSITKVGVRVNPLTVDELSNFEKGKSITTNADRTLKRSMRRNLQRYKLRKENLVEILKENGFINVDTLLSENGNKTTFETYRFRAKAALEEVSLEELSRILLMINAKRGYKSSRKAKSLDEGQLIDGMGIAKKLYDENITPGQLVLELLKDGKKFIPDFYRSDLKAEYDKIWDFQKQYYPDILTEEFKKQIAGKGKVNTTKIFLAKYGIYTADNKNADKRLQTYKWRVEGLSKKLSREELAFVISDLTGTISNSSGYLGAISDRSKELFFNKQTVGQNLMMQLDQNPHTRLKNQVFYRQDYLDEFNTIWETQAKYHKELTPDLKGEIRDVIIFFQRRLKSQKGLVSYCEFESRQIEVDIDGTKKIKTVGSKVCPKSSPIFQEFKIWQVLNNIQIMDKSGSKSFLFQEEKEALFAELNLKDKITKSEALKLINKNTKDYDLNFKDIEGNRTLTALFKVYQTIIELSGHDGFDFNKMNAMDKIETITSIFNGLGYNTEILKFNSDLEGKEFEKQPMYQLWHLLYSFEGDDSNSGNEKLINKLTELYGFEKEYAKLLANISFQSDYGSLSTKAIRKILPYLKDGNEFSLACGYAGYRHSKNSLTKEEIENKILKNKLDILPKNSLRNPVVEKILNQMINVVNTIIDVYGKPDEIRIELARELKKSAKEREEATKSINETTAAHEKHRVVLQRDFGLTNVSRNDIIRYKLYLELENNGFHTLYSNTYVTPGKLFSKEFDIEHIIPQSRLFDDSFSNKTLETRSENIEKGNDTAQDFILRKYGDEGLEKYVERIEGLYKSSKLSKTKYNKLKMKGEDIPSDFINRDLRDTQYIAKKAKTILEELVKEVVSTSGSITDRLRQDWQLVDVMQELNWDKYNKLGLTEIIENRDGHRIKRIKDWTKRNDHRHHAMDALTIAFTKRSHIQYLNNLNARSDKAGSIYGIETNELSRDDNGKLKFNPPIPINEFRAEAKRHLENTLISIKAKNKVATININTTDKKNGVNKKKQLTPRGQLHLETVYGSIQQYATKEEKVNASFTEEQILKVAKKSYREALLNRLKEFGNDPKKAFTEKNSLDKNPLFLNEDQTQKVPEKVKTVSTEIVFTIRKDITPDLKLDKVIDVKIRTILETRLKEYGGDSKKAFSNLDEYPIWLNEEKGIKIKRVTITGISNAESLHEKKDKEGKLILDKNGNPQPVDFVNTGNNHHVAIYKDENGNLKENVISFFEATARVNQGLSIIDKDYKKQEGWNFLFSMKQNEYFVFPNEITGFNPSETDLLDPENYYLISPNLFRVQKISSKNYVFNHHLETMAVTGDTLKNKKQLLNITHRFIQSLSPIKEIVKVRINHIGQIVSIGEY

SEQ ID NO: 23604 - protein, 1512 aa, unidentified
  REGION 1..1512: note = Cas Enzyme sequence
MKRILGLDLGTNSIGWALVDEDDDSRKEILGIGSRIIPMSQDILGKFDSGNSISQTADRTGFRGVRRLRERHLLRRERLHRVLHILGFLPVHYEKYIDFENHVGKFLSDLEPKLVWKEVENGNFDFIFKFSFSEMVEEFRIIQPQLFENGKLIPYDWTIYYLRKKALSKKIEKEELAWLILNFNQKRGYYQLRGEEEEENPNKSVEYHSLKVVEVTADELQKGKTDIWYNVILENGWIYRRSNKTPLFDWKDKIKDFIVTTDLNNDGTVKVDKDGKEKRSFRSPSEDDWTLLKKKTESDIEKSHKTVGCYIFDVLLQNPTQKINGKLVRTIERKYYKQELKAILEKQKEFHEELNNTELYKACLEELYGNNEAHRNSNANRDFTYLFLNDIIFYQRPLKSKKSLISNCPYEARTFIDKESGEKITDSIKCISKSHPLFQEFRLWQFIQNLKIYEREKLVEEKLQTDIDVTSEFLKLEEDYVSLFDWLNDKKEIKQDTLLTSYFKIKKKKGEEKLSHRWNYVEDKDYPCNETRAQFINRLSKVKHVPENFLSKETEFALWHLLYSVEDKLEIEKALKTFAIKNELGDDFVDVFKKFPPFKKEYGAYSEKAIKKLLPLMRMGKYWNESSITSDTKNRIESIKERLQSINYYASLIDTISDDSIPKQVLKSFINCSNPYSGINTYQACYAVYGRHSESGDIKKWKTSEDLERFIKEFKQHSLRNPIVEQVITETLRVVKDIWKKYGDFTEIHIELGREMKNPADKRAKMTAQISENENSNLRIKYLLAELINHNDVENVRPYSPSQQEILRIYEEGVLNSGIDIPDDIAKIVKTNQPTKSDLIRYKLWLEQKYRSPYTGEMIPLGKLFTSAYEIEHVIPQSRYFDDSLSNKVICEAEVNKEKDNALGYEFIKNKGGSIIELGYGKKVTIFTISQYEDFVKLYYNKSRGKMKKLLMEDIPEDFVQRQLNDTRYISKVVKGLLSNIVREEGEQDVTSKNVISCTGGITTILKQDWGLNDVWNSIVSPRFERMNELTKSTDFGQWTNKEGKRVFQTEMPLELQKGFNKKRIDHRHHAMDALVIACATRSHINYLNNESAKASAKVSRHDLKYKLCYKSKTDDKGNYKWQFYKPWDTFTQDAKIAFENIVVSFKQNLRIINKTVNKYQGYEDGKKIVKKQEKGDSWAIRKSLHKDTVAGVVNLKLKKTVNLSIAIDQWEMLVDKNLKTKIKQFINEGLDKKKIQKFFAEQEYKWMDKEISKVELYYFTNDKDVQVASRVNLDQSFNCKKIDSVTDTGIQQILFNHLTHFDENKDGKNIEHPELAFSPEGIDTMNKCIASLNNGKQHQPILKVRTYEPMGNKFNVGITGNKINKYVEAAKGTNLFFAIYADDEGKRSYETIQLNIVIERLKQGLTEVPEINEKGDKLVFHLSPNDLVYVLSEEEILCGFKSYSIKDTNRIYKMISCSSYQCFFTPNRIASPIMQTIELGANNKSEKTWEGQMIKQVCIKLKIDRLGKISI

SEQ ID NO: 23605 - protein, 987 aa, unidentified
  REGION 1..987: note = Cas Enzyme sequence
RSCKHLVSLCEFEMRAYKNKEGKTVYDGPKVAPRSSPLFQVCKIWESINNLVLKNRKGIPFEFTLEHKQALFSHLDNNEKLTINDLYKILGISKAEGWWGGKAIGKGLQGNITKMQISKTLNGIVDYQKYLQFNLKSIDTNLVDDETGEIVQQISPDFEKEPLYRLWHTIYSIHDKEELAKVLCKNFSIDEPEVVDALFKIDLVKAGFGNKSAKAIRRILPYLQNGFMYSEACLAAGFRHSESLTVAENMARELLARLPQIKKNELKQPIVEKILNQMINLVNAVIDQYGTIDEIRVELARELKQSKDERNATDKNMRLREKENDTYAKRILLDYGLTASRTRIQKFRMWEESRQKCFYCGQTVNVNEFLKGFDVEVEHIIPKSLFFDDGFSNKVCACRKCNSEKGNQTAFDYMKSKAENEFESYLTRIEEYYKNGDISKTKKERLLTPKEKIPTDFIDRQLRETQYIARKAKTILAQVARNVWATSGSVTDFIRHTWGWDQILHDLQIDKYRLCGQTEMVEFVHKNQKHSEERITGWSKRLDHRHHAIDALVVACTRQGFIQRLNNLNTERDAMWQELKNQSEEHKGKFSSLERWLEEQPHFSKENVQNKVAEILVSFKPGKKAASTGKRIKYSNGKKIVLQEGIIVPRGALHEEGLYGEIKRYYKDVKTKEVLLNAQIVKKYNIGVGSQGFLFTGKETVEIKSKTDERTGITTTSVEDKIQKALDCIVDKRVQDVVLERLNQGFENGKTYKDDAKKALSNFKDLNNVPIYLDKNKSIPIKSVRCFTGLSAVEAIRYNEKNETTGFVKPGNNHHIAFYVDKEGNKQVHVVTFWHAVERKKYGIPVFITNPPLVWDTVQEKEFPDSFLRNLPNVNWTFVNSLQQNEMFILGMLYEDLENDLKKKEYDRLTKYMYCIQNISVGSKGKVVQPVIRISHHIETQFEINKSNKPDKRFFNIQSIDAWEKLNPVKVVVNYLGQITRINNNPI

SEQ ID NO: 23606 - protein, 1509 aa, unidentified
  REGION 1..1509: note = Cas Enzyme sequence
MKTILGLDLGTNSVGWAVINSVIKEQAERIWIEMAGSRIIPMDAAVLGDFDKGNSISQTSERTRLRGARRLRERQLLRRERLHKVLNILGFLPNHYLEYIDFEKHPGKFLADAEPKLAWVKDEQGKYTFLFQAAFDEMLADFAIHQPSLVSGDKKIPYDWTIYYLRKKALTEMISKEELAWILLNFNQKRGYYQLRGEEEEDNAGKSVEFYALKVLTVEATDEKKGRDVWYNVHLENGWIYRRSSSVPLDWEGQVKEFIVTTDLNPDGTPKLDKYGEVKRSFRVPKEDDWMLIKKRTEADIANTHKTVGAYIYDTLLQKPQQKIIGKLVKTVERKLYRDELSLILQKQCAFHAELQDRALYARCVEALYPSNEVRRKNIANRDFVYLLMDDILFYQRPLKNKKSLIANCPYEENEYVDRETGEIKKAPLKCIAKSHPLFQEFRLWNFLSNIRIYQKEKEINGTLHLDVDVTAEFLKTEDDYVALFDWLNSRKEIEQKTFLKYPKFGLKKEISNYRWNYVEDKQYSCNETRHAILSSLEKANVCIDFLSNEKEVALWHILYSVSDKQEIEKALRTFAAKNGLDESFVEAFKKFPPFKSEYGAYSAKAIKKMLPLMRCGKYWDVSSIDDTTKERIKKIVTGEYDERISVKVRDKVMNLSDISCFRRLPLWLACYIVYNRHSEDKEAVKWESPADIDAYLASFKQHSLRNPIVEQVITETLRVVRDIWKQVGRIDEIHIELGREMKNPADKRKRMTAQILENENANLRIKALLAEFMNPKYEIENVRPYSPSQQEILRIYEDTVLHAEDQLPEEIDAILKKFNSSKVPTKSEFLRYKLWLEQKYRSPYTGELIPLGKLFTAAYEIEHVIPQSRYFDDSFSNKVICESAVNKLKDNQLGYEFIKNHHGQKVEVGFGKSVEIFSVDSYERFVKEQYAKSAVKMKKLLMDDIPEQFIERQLNDSRYISKVIKGLLSNIVREKNDSGEYELEAVSKNIVVCTGSVTDRLKRDWGMNDVWNSIVYPRFERLNSLTDTQSFGHWENKSGKKVFQTELPLEYQKGFSKKRIDHRHHAMDAIVIACATRNHVNYLSNESASRNAKISRYDLQRLLCDKNRTDDNGNYKWVIKKPWDTFTQDAREVLSKIVVSLKQNLRIINKTTNVYRHFDATVNRVYQKQKTGDSWAIRKPMHKDTVFGAVNLRKVKVVRLSVALDTPAMIVDKRVKNKVFELLSYKYDKKRIEKYFKENAFLWKELDLAKVAVYYFTEATTEPLVAVRKPLDSTFNEKKIKESVTDTGIQKILLNHLCTKEGKPDLAFSAEGIEEMNRNLLQLNNGKSHQPIYKVRVYEPRGNKFSVGVLGNKGTKWVEAAKGTNLFFAIYITEDGKRTYETIPLNMVIEREKQGLVPVPDRNEKGDKLLFWLSPNDLVYLPTEEEREFGRINEPIDRGRIYKMVSCTGNEGHFIPANVANPIVPVIELGSNNKAQRAWTNEMIKDICIPIKVDRLGHIIEVKYRIDE

SEQ ID NO: 23607 - protein, 1373 aa, unidentified
  REGION 1..1373: note = Cas Enzyme sequence
MKKVLGLDLGTTSIGWAMVNQAENNEEKSSIIRAGVRVNPLTTDEKDAFEKGKAVTTNTDRRLKRSMRRNLQRYKLRRNELVSILKELGWIDDSTILAEHGNRSTFETYELRSKACTESVSLTELARVLLMINKKRGYKSNRKANAEEDGQPVDGMSVAKLLYEKGKTPGQYCYSLVKKGNKVLPEFYASDLKSEFRRVWETQRLYYPEYLTEEFWNQIDGKTRSSLTKLFFAKYKITTADNKGKDKRVKAYEWRAAAVENRLPIDQVAYVLCDIAGNLGSSSGYLGKISDRSKELYFNKQTVGQYLYSNIQKDPHFSTKNKVFYRQDYLDEFEAIWESQASFHPELTDELKKEIRDVVIFYQRRLKSQKGLISYCEFESRKVDVEINGRIVQKIRGCKVAPVSSPLFQEFRMWQKINNIIVTNKETGEQGTLEQDDKVRLAECLRVKDKLSDKEILKLLFKKPKNLEMNFKSIEGNETLGKLYSKFLEVVSLAGNSDYEYSKLRQEELMNILRTEFARNGFNTAVLEYDPSLPKEEYERQPLFRLWHLLYSYEGDKSQTGNASLINKIAEICGMPENLAKIIASVSFKQDYASLSHKAMRKILPYMMDGNEYSLACEYAGYRHSKQSLTKEEIENKVLKDRLDQIPKNSLRNPVVEKIFNQMVNVINTVGDRYGKPDEIHIELARELKSSQEERARATESIASNNKENDRIRMILENEFHLAYVSRNDIVKYKLYEELKNNGYKTLYSNQYIPADKLFSREIDIEHIIPQAVLFNDSLSNKTLEFRDINLEKGKDTAFDYVKNKYGESGLEDYKLRVNHLFESGGISRTKRDNLLRDSKNIPEGFVERDLKDTQYIAKKAREILLEYVRVVVSTSGSITDKLREDWGLVNVMKELNMPKFEAAGFVETITTSDGKDIRKIKDWTKRNDHRHHAMDAITIAFTKLAHIQYLNNLNAKGDKSSSIYAILQKETYLSGSKRLIIPPLPLDQMRREVRRQLESILVSIKAKNKVMTENINRIRIKDGVKNVKCLTPRGLLHKEQVYGQRKRYETYDVAVNGKMTEDVIATVASSETKAALALRLAQFKGDPKKAFTGANSLDKNPVWLDANHSRKVPAKVKCVRFVNVYSIRKNIDPSLSVEKVMDGRVRRILKDRLAEFGNDPKKAFVNLDENPIWFNKEKGIILKSVTIAENFDLDPIRIKRDNLGRVICDAEGNHIPSDYVNFRNNHHAAIFEDADGNIQEHIVSFYEAVRRRSAGLPVVDKEYNADKGWKFLFTMKSNEMFVFPNERTGFDPRAVDLMDPENYSVIGPNLFRVQAVSTRDYWFRHHLETSLGADKKLKDITWKRITNIAIFKQLVKVRINHIGEIVSVGEYD

SEQ ID NO: 23608 - protein, 1307 aa, unidentified
  REGION 1..1307: note = Cas Enzyme sequence
MKKGELPRLKCFHNGIILIVISFKNCTAKILNKNKLSNVLFNKINLLTLSLLINHVKHNIMKKILGLDLGSASIGWALITEDKENGITNYEISGIGSRIIPYEGTEGKDFAKGTGESRNSSRTKARRARKGYDRYQLRRRFLVETLIKNKMFPDDSLKNLPKMQLWELRNKAVDSPISLIELGRLFLWLNQKRGYKSSRSDANLDKKDTEYVATVKSRHEKIKELNLTIGQYFYKGLAKDEFYRVKENIFPREAYIEEFDRICSNQQQYHSSTLTNKLIDKIKNEIIYYQRPLKSQKGLVSVCEFEGFWRKGKDGKEYFVGPKVAPKSSPLYQLSKMWENINNIKISSRTGGDIEITAEQKWALFEHLDNNEKLTQSDLLKLLNLKKENCYVNKQLAKGIIGNITKYAICNCFINLNSCQDLLKLDLKIVETDSEGYLYDKKTGEIFNTKPVKFIDPMVEREPFYQLWHTIYSIPDQEECSKVLQANFKIELAIANKLAAIDFSKHAFGNKSVKVIRNILPYLMEGDGYSEAMSYAGYDHSNSLTKDQNLQRKLLAQLKPIDKNSLRQPIVEKILNQMVNVVNAVIDKYGKPDEIRVELARELKQSKEERNDADKNMNKRQRENEEITKRLAEYGMRATRNNIIKWRLYEEIDNQDKKLNAICIYCGQPISLTEAIKGNDVDIEHIIPKSKLFDDSQSNKTLAHRHCNKDKNDRTAYDFMKSKSVQALDEYVKRVNALYASQVIRKTKRDKLLMTEDKIPDNFIDRQLRETQYISKKAREILQTICYNVWATSGTVTAELRHLWGWDDVTMNLQFDKYKALGLTQTIEWESDHGKNSHEKEVITGWTKRDDHRHHAVDALTIACTKQGYIQRFNTLSSSKTREDMAFDIENSTIEFKEKRSLLEKYIISEQPIPVDKVEKAVADILISFKSGKKVAVVGKRKVGKLGNKKVIQEGIIIPRGQLHQEFVYGKIKSIEERKPIKYIFENPHLIYKPYIKALVEDRILRHEGNTIKAISSLKKDPIYLNKDRSVLLEYATCLKDEYVIKYNVDINFNKADKVIDGKTKDILQARLNKFGGKSKEAFKDVQREDKTLIKWYEDEGLKHPIKSVRCYTGLSAVVPVKKDEQGKDIGFVKPGNNHHIAIYTDNEGNKYEYVCTFWHAVERKKYGIPVIIHNAAEVWDKIQMQPEGTYPESFLEKLPIVHWNLLVSMQQNEMFILGMAPEDIEIAISNNDCRTISDKLYRVQKMSIIPSSGQLDITFRHHLETQLNDETDSKLSKRFIKAQSIGSLFNLNPYKVKVDRLGNISI

SEQ ID NO: 23609 - protein, 1432 aa, unidentified
  REGION 1..1432: note = Cas Enzyme sequence
YGVITFETGVGKNDKGQYVVSHAAERTKKRSVRRLYQVRKYRLWETLGILREDYCPITEEELNQWRRYDKEKGYYRKYPVNAIAFEQWIKLDFNNDGKPDSYSSPYQIRLELATIKLDLTQKENRYKLGRALYHIAQHRGFKSSKKTNNNNEINEGQLVGAEKKRSSKITDLFAKHDVKTVGAAFAKEELEGIRIRENLHQWVLRKQLEEEVKIIFETQGISIEDEFYRQVKKAIFYQRPLRSQKGLVGICTLEQTSYEDKEGKTIVSGKPRCPLSHPDFEEFRALSFINNIQFKINENNEWVKLSSKNLKELRESIFQNLFFRKSKEYFKFSEIREYVENYYRKQGSNLELNYKNKTINYADTTSVSACPVSARLKATFGDNWKTITIEKEKRKGSKSGKDNYTIEDLWHILFTFDDEDYFEEFGEIRLKLTPSQLKEFRSAWDNLPVGYAALSLNAIKKILPFLQEGLIYTEAVLLANMPTVLGEKLWNENKQFLIDTIEDIISRNREEKRIINIVNNLIAKWYALDYQNKFGFKDTSYKLVASDNKDILNTCIESIGEKTWAAKNEEDKEDTIKKVEDKYQLFFQSDKKEFYKAPHLLDTVKEFLIEEFTGIIEQKKLNQLYHPSQIDIYPKAKPDKEGKILLGSPKTGAFKNPMAMRALFELKKLVNYLLAKGNIEQDTRIVVEVARELNDANKRWAIKTYQDQREKENKEFAEAIAELIIDPHFKGKANPNNESDIDKFRIWYEQINKVKIEKEEFELNYELRKEPKKLDTDSPIKRDWLNTSTNLYKLISAKDKAIDKYRLWKEQGCRCIYTGNIIKLTDLFADNIVDFEHTIPRSISFDNSLANLTVCFADYNRNIKKNKIPTQLNNYETDSDGYSSIKPRLGDWEKKVEIITENISFWKKKSAKAQDKDFKDKAVRQKHLWQFELDYWQNKLNRFTITEVTSTFKNSQLVDTQIISKYAQHYLKTVFNKVDVQKGIITAQFRKIYSIQPKEAKKDRSRHSHHAIDAAVLTLIPSPAKREDILKRVYELEEQYSKEKLNIKPYPAFKYNQIEQIEENILINNIAKDQALTPSKKIIRKRGKIVFIPGTQIPKVATGDSIRGQLHKESFYGAIKKVIRDENNILKKDEEGKYLFEKENSYVIREPLLYKKDATSPGFKNLKEIKDCIVDPYLFEIIKKQVGNKTLKDAIEDGIYMLNRKGEQVYKHKIRHIRIFASVSNPLEIKKQSHSSSKKLVHFEDREHKKWYYASTGEGANIICALYETKKSNKIHRSFDIINLKDASELIKLKHIDEKGKLEIFRLREDGTKEFPTSILKPNTRVIFYKSNIDEIKDLNNNDDRQKLISRVYKIIKFTGVQMTFESHIEARAASELKKIATNTKDASYHDGYSTIDFDNLKPRYRLTAGKFNFAIEERDFEILPDGEIIFK

SEQ ID NO: 23610 - protein, 1563 aa, unidentified
  REGION 1..1563: note = Cas Enzyme sequence
MKTKKILGLDIGTNSIGAALINLPESFNDYGSEGSIEWLGSRIIPMDGDYLQKFESGTQAETKAAFRRVKRGSRRLKQRYKLRRTRLTKVFKALGWLKEEFPENFKKEIQDNENFKFSIGGYLPFSEQTIIEFEKEFGISGKKSKKGHTIIPEDWIIYFLRKKALSEKITLPELTRIIYMLNQRRGFKSSRKDLKDGDIQEIKWVDILKIKSVTLESEEKNKKGNYKYIVTPYNNKVKPWTEEKRKKPEWEEKEFTFLITEKTDEKGKTTQLKPQIPKADDWALCTTAQDNKMGNRHPGEYFFDSLKENKNEFKIRQYAVYRSKYKKELEAIWNKQLELNDELRKLNSDKILLQKLVEILYPTQAKAKMAKLNEFLSNDLLHIISNDIIYFQRELKSQKNSISECQYEKRKGIDGELYGLKCAPKSSPDFQEFRIWQDIHNIRIFEREKTIDGYKRIDVDVTSDFINPTVKEQLFEKFDTSKEVSQENVFTILNKNSEIKISDKTHRINMFFKADKKLQGNETKYYFRKVFNKCNYEGDGELLLNDSEKFHKLWHILFSISSADAEKSAKGIKSAIENKKNAFELPPNVIEKLSTSPEIEKQKKYASYSTKAIRKLLPLMRTGKYWNEDLITTEAKEKAKKITERLEEINYNERKINDIADDDVQKQLLKSFIKAETLTQSLNTYQACYIIYDRHSEKVNDKTYNSIEEFDVLKLIPNNSLRNPVVEQVVRETLLLVKDVWKKYGQPDEIHIELGRELKKNAEEKEKITKNQNKNYDEKQRIKKLLHELINETFEEYESDLKENYSPSNQGVLPYDEKKVVSQFSVKPNPESPRDIDKFRIWKSSSNVKDDEFEKLFKNGNKERIPTKSEIKQYILWLSQGCRSPYTGKIIPISKLFSTDYEIEHIIPQSKFANDSMNNLVIAEAAINPPPYKGNLLARNFITQFGGKQGKEHIISGKKYFILGEQDYEDRCTEIFKYQKGKLKNLLATEVPEDFVSRQLNDTRYITRKVTELLNPIAKDKTGIIFTGGSITAELKKKWGLNKEWKKLLLPRFKRLEEINKTEYVLKNKFDKNDIDINVPENPELELKRLDHRHHALDALIIAATTREHIRYLNSLNAVDSDKELQKVKQTLVKGKIREFKTPWEKFTEDARNKLEETTVSFKTNNKIVSKPYNKTAFWKQDADGTWSKELKQQKVNPKWMAVRKSMFKEPQGIVYIKEIETKPFRTPKEMMDIVKLQITRMKAQNTPNQKNTSYIYDQETREIVKNIIEVSGGNIEAIGKYLKKFSPVNSNGEKIYTVRIAVFNEYAAKRVTLNNTFDHKKIDKIPYAENGKSPIGKLLHEHLKNNGDDPLIAFSGEGLEALTKKNGGKSITKVTIKESSSSKFKNQYVEIDAGSNAYFVIYENEETKEREDYKSLATHKAIERLVKGEPLAEERSGYKTIILSPNDLVYLPTKEELEKIKTNSENPINWDDKKKIFERTYKMVSCTGAKCEFIPHNISNSNPIIQEIELGSSNKNQRAWDGKVELVKSDKKDKPTREDSGTMIKEFCIKLKVDRLGNISKA

SEQ ID NO: 23611 - protein, 1550 aa, unidentified
  REGION 1..1550: note = Cas Enzyme sequence
MKNILGLDLGSNSIGWAIVKALKNEDGKEILQSIDLAGSRIIPMDQATLGNFENGNSVSQTRERTGYRSARRLRERYLLRRERLLRVLNCMGFLPEHYSQNIDKYGKFFLDNEVKLSWKKDKMGKNEFIFLDSFNEMLEDFRHSQPQLLLDGRKVPYDWTIYYLRKKALTEKISKEELAWILLNFNQKRGYFQLRGEDEEVQGKKIEFYALKVVRVEDTGEKKGKDTWYNVYLESGLGDTDDYWVYRRASSVPIDEWEGQVKEFIVTTTLDNNGSPQIDKEGKVKRSFSIPKPEDWMLVKKKTEVDIKSSGKTVGTYIYDTLLQKPDQKIKGKLIRTIERENYTNELSLILENQKKFHLELQDRELYHQCIELLYCKNEAHKRVIGSWDFTSLFIKDILFYQRPLKSKKALIDNCPYEESFYIENGEKKSKPRKCIAKSHPLFQEFRIWQFIYNLRIYQKVKEVDGKLQFNVDVTSDFLRDESAYVELFKWLNERAEVSQEDLLKHLGLKKTKTEDTVSLYRWNYVEDKKYPGNKTRSSILKKLLNDEKEALSEDIELKIWHLLYSVLAQSEIDKALSSKNVSTKGIYSELSVYFSDETIQKIKNVKLESGYGSYSAKAIGKLLPLMRRGKYWNLESIDNHTKERIEKILNGECDETIRARTREKSISLTDISQFKGLPLWLACYIVYDRHSELKTIKKWNSPEDINKFLKEFKQHSLRNPIVEQVTMETLRVVRDIWRRVGSIDEIHIEMGRDMKQTAQERARCSAIISRNENNNLRIKALLHEFMNPELGIENVRPYSPAQQEILRIYEDGVLSSVSEIEDEIKNILKKFNESEEGKRPTKNEIIRYKCWLEQKYRSPYTGEIIPLGKLFTPAYQIEHIIPQARFFDDSFTNKVICEAEVNAKKGDLLGYEFVKEKGGEIVELSGGRNVRIFSVEEYESFVKEHYKSNKQKMQRLLAEDIPTEFSHRQLNDSRYISKYIRNLLSNIVREDDEQESVSKNVISCNGAITDRLKKDWGVNDVWNHIILPRFVRLEEIRADNGEKFTTFNQEGHRIPSMPLMYQKGFNKKRIDHRHHAMDAIVIACTTRDHVNLLNNECSNPQNNANKHQLSRKLRRYENVSYKQDGKLKEREVPKEFLKPWEEFTRDVEFALKNVIVSFRQNLRVLNKTVNYFQHWKDNSSEKEWKEQKSADHWSIRKPLHKETVSGEVFLWRTRFVSLREALTNPKRIVEKDLRSKILELQRKGYDTKRIKKYFEDNKDVWQDVNLSKIEVRYYSREIVDPQTELPKNRYFATRFGNDLISLFSGVSNFEKAKKIIESITDTGIQQILFRHLENKGNDPVLAFSPEGIDEMNRTTKTLNNGKDHKPIYKVRIYECSTMKFPLGSIGNKSKKFVEAAKGTNLYFAVYEKEVENDRGECHKERTFKTIPLNDVIRNLKQGLSIAPNDENGNLPAFILSPNDLVYLPTKEESETGSISQPLNRNRIYKMVSCTGNEAHFIPAFIATPILQTIELGSNNKAQKAWTGEMIKESCIPIKVDRLGMLISINGKAV

SEQ ID NO: 23612 - protein, 1154 aa, unidentified
  REGION 1..1154: note = Cas Enzyme sequence
MKNILGLDLGSSSIGWSVIRENSEEQELVAMGSRVVSLTAAELSSFTQGNGVSINSQRTQKRTQRKGYDRYQLRRTLLRNKLDTLGMLPDDSLSYLPKLQLWGLRAKAVTQRIELNELGRVLLHLNQKRGYKSIKSDFSGDKKITDYVKSVKTRYDELKEMRLTIGELFFRRLTENAFFRCKEQVYPRQAYVEEFDCIMNCQRKFYPDILTDETIRCIRDEIIYYQRPLKSCKYLVSRCEFEKRFYLNAAGKKTEAGPKVSPRTSPLFQVCRLWESINNIVVKDRRNEIVFISAEQKVALFDFLNTHEKLKGSDLLKLLGLSKTYGYRLGEQFKTGIQGNKTRVEIERALGNYPDKKRLLQFNLQEESSSMVNTETGEIIPMISLSFEQEPLYRLWHVLYSIDDREQLQSVLRQKFGIDDDEVLERLSAIDLVKAGFGNKSSKAIRRILPFLQLGMNYAEACEAAGYNHSNNYTKAENEARALLDRLPAIKKNELRQPVVEKILNQMVNVVNALMEKYGRFDEIRVELARELKQSKEERSNTYKSINKNQRENEQIAKRIVEYGVPTRSRIQKYKMWEESKHCCIYCGQPVDVGDFLRGFDVEVEHIIPKSLYFDDSFANKVCSCRSCNKEKNNRTAYDYMKSKGEKALSDYVERVNTMYTNNQISKTKLQNLLTPVDKISTNFIDRQLRESQYIARKAKEILTSICYNVTATSGSVTSFLRHVWGWDTVLHDLNFDRYKKVDLTEVIEVNHRGSVIRREQIKDWSKRLDHRHHAIDALTIACTKQAYIQRLNNLRAEEGPDFNKMSLERYIQSQPHFSVAQVREAVDRILVSFRAGKRAVTPGKRYIRKNRKRISVQSVLIPRGALSEESVYGVIHVWEKDEQGHVIQKQRAVMKYPITSINREMLDKGKVVDKRIHRILSDRLAQYNDNPKEAFAKPVYIDKECRIPIRTVRCFAKPAIKTLVPLKKDDKGNTVAWVNPGNNHHVAIYRDEDGKYKEQTVTFWEAVDRCRVGIPAIVTQPDTIWDNILQRNDISENVLESLPDVKWQFVLSLQQNEMFILEMKEEDYRYAMDQQDYALLNKHLYRVQKLSKGDYSFRYHTETSVEDKYDGKTNLKLSTQIGKLKRVQSLEALFNLHPHKVHISVLGEIKEIS

SEQ ID NO: 23613 - protein, 1399 aa, unidentified
  REGION 1..1399: note = Cas Enzyme sequence
MKTILGLDLGTTSIGWALVKEAEPFSDEKSEIVRLGVRVIPLTVDERTSFENGKSITTNALRTQKRGMRRNLQRYKLRRQALIEELKSTGWIGNDFIFSETGPGSTFRTLRLRAKSASEEVTLGDLARILLQINKKRGYKSSRKMVSSDDGQAIDGMAVAKEMYDKGLTPGEYVYQRMLEGKYAIPEFYKSDLQEEFDRIWALQKSFHTELTDELYRKLSDRNKSQTWAICRDELGIQGLKSSFTGKERLKEAYRYRHLAATQEVNMEVLTCALQEINGQKASLSGLLSKISDRSKELYLNNLTVSQMLLKRIEDNPNNSLKNIVFYRQDYLDEFERIWTVQSKYHTELTHELKKRLRDIIIFYQRPLKSQKGLISLCELETKDIEVAIDGVKKMKNIGPRVCPRSSPLFQEFKIWQTINNIFVNGAALDDEDKSVIAKELMFKDKLKDSDLLKLLFKTTKGQSVNFKEVDGNRTMATLMKACFKIAENLGYDDIDLSKLSSEDQMVRIEGIFKEQGFKTGFLHFDSSLASPEFENQDSYRLWHLLYSYEGDKSASGNESLVKCIMDLCSMDEGSAKILASCTFLPDYGSLSAKAMRKILPYMKDGLEYTAACAMAGYRHSKRSLTKEELDTKEYSDRLSLLPKNSLRNPVVEKILNQMVNVVNSVIDVYGKPDEIRIEMARELKKSAKEREEAQRDIASSTAESQKVIEILKGEPFFIQFPTRNDIIRYRLYQELAQNGFKTLYSNTYIPKDKLFSKEFDIEHIIPQALIFNDSFANKTLESRQCNLEKGKETAMDYVKSKYDETGVQAYCDRVNGLIGKGISKTKAKWLLMEGKDIPEDFINRELRDSQYIAKKAREILESLVKFVVPTTGSVTARLREDWQLVNVMQELNWEKYARLGLTGVREDKDGRRIPFIQDWTKRNDHRHHAMDALTIAFTRRQFIQYLNHLNSKIDVVSWDKKDLDLRDYDLEDIKFGNLSAGDRYGIVKALQDKFLYKDGNDKYRFVPPIPLDEFRRQAKEQLSDILISFKAKNKVCTRNVNVTKNKGGANRKTQLTPRGPLHNETIYGSSLEYVTKENEKIGSSFDTERITTVCKKKFRDALARRLEEFGGDPKKAFTGKNSPEKNPIWVDEHHSEQVPAKVRTVTMGQRFTGRKPIDATLKIEKVIDKRIREILQARLDEFDGKAAKAFSNLDENPIWLNKEKGIAIKRVTVSGPANPVPVRFKRDKDGKPIIDDAGKTIGADFVTPGNNHHIAIFRDSSGKLQEHPVSFLEATIAKSHGLDVIDRNYNKDEGWEFLFTLKQNEYFVFPNSETGFNPLDYDLTDPRNYAEISPNLYRVQSISTNDYFFRHHLETTSEKNNSLYGITWKRIRNASALEGLVKVRIDNLGRIVAVGEYD

SEQ ID NO: 23614 - protein, 1509 aa, unidentified
  REGION 1..1509: note = Cas Enzyme sequence
MKKILGLDLGTNSVGWAVINSVVNDEGKEQLVNISSCGSRIIPMDAATLGDFDKGNSKSPVAERTRLRGVRRLLERSLLRRERLHRVLSVMEFLPEHYASQLDRYGKFLPEREPKLAWYQDETGKYRFLFQDSFNEMLEDFRQHHPELVAEGKKIPYDWTIYYLRKKALSQKITKEELAWILLNFNQKRGYYQLRGEEEKEDNKKSVEYYALKVVAVEDSGDRKGKDIWYNVKLENGWVYRRASSIPLDWVGKVKEFIVTTDLDEKGNPKKDKDGNVKRSFRAPKEDDWGLLKTRTQAQIDESGQTVGTYIYESLLRMPDQKIRGKLVRTIERKYYKDELRKILIKQSEFHAALLDHNLLLACIEELYPNNEAHRRLLSTSDFTNFLVEDILFYQRPLKSQKGLIDNCPYESHVYRDKKNGSLQHVPLKCVSKSHPLFQEFRLWQFLASLRIYQRERQVDGSLKLDVDITNEFLQSEDDYVKLFDWLNDRKDIDQKTFLAYKPFGLKKNELPKYRWNYVEDKSYPCNETRADIIFRLNKAGVPEEFLTREKEEALWHILYSISDKRELTKALGTFAEKNGLNETFVEIFSKMPPFESDYAAYSLKAIRKLLALMRMGKYWDEQAIDEQTRSRIEKMLTGEYDETIRTRVREKAMHLTDISSFRGLPLWLACYVVYDRHSEAKELVKWETPDDIDHFLRKFKQHSLRNPIVEQVIMETLRTVRDIWKQEGKIDEIHVELGREMKNPSKERARITAQVLENENTNLRIKALLTEFMNPEFEIENVRPYSPAQQEILRIYEEGVLSGVAEKDLPDDIASILKKFRENDVKKRPTTSEVLRYKLWLEQRYRSPYTGRIIPLGKLFTPAYEIEHVIPQSRYFDDSLTNKVICESAVNKLKDNCLGYEFIKKHSGEKVELGNGETATIFSVEEYERFVKDSYLGNSKKMKKLLLEDIPDNFIERQLNDSRYISKVVKSLLSNIVCEEGEQEGMSKNVIVCTGGVTDRLKKDWGVQDVWNRIILPRFLRLNKITDSTDFTSVSTNGHLLPAVPLHLQKGFNKKRIDHRHHAMDAIVIACAGRNIVNYLNNASARKGSEISRYDLQHLLCDKVKTDANGNYKWILRKPWETFTQDVYVALTDIVVSFKQNLRVINRTTNHYQHYNEDGEKKMIPQTKGDRWAIRKPMHKDTVYGEVNLRKEKTLPLKDVLNNPSIVVDKSLKNKLYELLKSQYDLKAITKYFETYQDVWADVNLKKIKVYYFTKETNERFFATRKSLDSSFNQKKIEEEVTDTGIQKILLRHLQQNGNNPDIAFSPDGVERMNQNMTILNNGKWHQPIYKVRTYEKADKFAVGESGNKVKKFVEAAKGTNLFFAVYESIQEDEATGKQVRKRTFATIPLNEVIKRKKQGLPVAPEDSKGNLPIFVLSPNDLVYLPTEEECNTGKIIQPLARERIYKMVSCTEGECHCIPEYVASPILQTIELGSNNKAQRAWSGEMIKEICVPVKVDRLGNVSLVKI

SEQ ID NO: 23615 - protein, 1382 aa, unidentified
  REGION 1..1382: note = Cas Enzyme sequence
MEKILGLDLGTNSIGWAIREVNNELENQIIDKGVLTFDKGVAEDKSGEHPMVQKRTESRGKRRNYQAEKYRKWQLLECLIENKLCPLTMDELNKWRHYKKGVGRKYPQSEKFINWLRFDFDGDGKPDFERLGFSKHESYYLFRALIVNEAQKEIFKKEPLIIGRVLYQLVQRRGYNDGQNIDENEKDELSKTIMKGGGEAGATGVNDILPYIDKHKTLGAALYHLQKEQNVRIRKRYNLRSHFEKEIKEICRVQDLEHLFKNFWGSIVWQRPLRSQKGLVGVCTFEQNKRRCPISHPLYEEYRTWVFINNLKIKPIAEDDAKSQEEQQIELLSLLKGTVYPQFFKAAADFKLSSIAKELKKKGYEITARFSDDTKVISISFLYKMKEVLGDGWEEKTGWKDLLNGKNKNSKYNIEDFWHLHFAKKDNKETGETAFDFLKGFGTEKLNLDDAKAETFAKIRLQQGYATLSLSAIKKILPYLQQGFIYSEAIYLANLHKVMGVAHITADIVKHFSEEVKKIIKQNSFEKKLIQTTNELINDQLNGESRFGMDANYQLDEDDWKDIEQKLIESFGKYSWEKLDDEEKNVATTIVSNKYLAFLQKRIHAKNVFEKKERLHNKIFNWIKETYNVPESNIQYLWHPSEQETYRPATEKDGKHYLGTPEPISKGFKNPMALKTLHKLKRLINYLISVGKIDEDTRVVIEIARELNDANKRKAIERWQRDKEKENDTIKKTIDEINKECNTNFNREDKNIIDKIRLWEEQKKTCIYTGKTIGLCDVLNGIKYDYEHSIPASMSFDNELKNLTIAGSYYNREIKKKKIPYDCPNYDKDYVHNGIAYPSIVSTLQTMFGRIVETEKKVKGEIIKKKSFEKIVHLEELFAEWKAKTSEDKQIKDNIIIRRHLIKMELDYWRYKLHTFTTTEYKAGWRNSQLRDTQTITKYALPFLKTVFNKVDVQKGNITADFRKIYKIQDRLEKKERTKHSHHAIDAAVLTLIPPAAIRDKMLLRYNEANENKQGYHEKPRQWANFHHQHIIGIENDVLINYQAQHRTITPTYKTVRKRGKVQFVKEKAVDGKWQYKLDKNGNKIPLIAQGDSIRGQLHKESYFGAIKNKGELNLVERYPIAAFGSINDCKNIVDDSVRAIVKETLEKRMSEGLSFDKAKLDPVPFPNGKTLIKKVRCKVAAGRGYLTPEKALEIQKHNFHSKHHYKQHIYAQNDQNTYCLLYEKNIDNKIERGFRIIGLFELSKLSIRNERELFAENYYNKIEMGKGKNKKEIPLIQILKVGTKVIFYKEHFEELKELPNKELLKRIFRIYKFNEPAPSTVYLYCQNHIEARNNEELGNGEKDLSLENYQSRVFLSASKFKAAIENKHFEITLDGEINWKI

SEQ ID NO: 23616 - protein, 1532 aa, unidentified
  REGION 1..1532: note = Cas Enzyme sequence
FIFEKIVNTILVMKKIVGLDLGTNSIGWALINAYIDEYNKEHLYGIEACGSRIIPMDAAILGNFDKGNSISQTADRTSYRGIRRLRERHLLRRERLHRILDLLGFLPKHYSDSLNRYGKFLNDIECKLPWVKDETGSYKFIFQESFKEMLADFTEHHPKLIANNKKVPYDWTIYYLRKKALTQKISKEELAWILLNFNQKRGYYQLRGEEEETPNKLVEYYSLKVEKVEDSGEKKGKDTWYNVHLENGMIYRRTSNIPLDWEGKTKEFIVTTDLEADGSPKKDKEGNIKRSFRAPKDDDWTLIKKKTEADIDKIKMTVGAYIYDTLLQKPDQKIRGKLVRTIERKYYKNELYQILKTQSEFHEELRDKQLYIACLNELYPNNEPRRNSISTRDFCHLFIEDIIFYQRPLKSKKSLIDNCPYEENRYIDKESGEIKHASIKCIAKSHPLYQEFRLWQFIVNLRIYRKETDVDVTQELLPTEADYVTLFEWLNEKKEIDQKAFFKYPPFGFKKTTSNYRWNYVEDKPYPCNETHAQIITRLGKAHIPKAFLSKEKEETLWHILYSIEDKQEIEKALHSFANKNNLSEEFIEQFKNFPPFKKEYGSYSAKAIKKLLPLMRMGKYWSIENIDNGTRIRINKIIDGEYDENIRERVRQKAINLTDITHFRALPLWLACYLVYDRHSEVKDIVKWKTPKDIDLYLKSFKQHSLRNPIVEQVITETLRTVRDIWQQVGHIDEIHIELGREMKNPADKRARMSQQMIKNENTNLRIKALLTEFLNPEFGIENVRPYSPSQQDLLRIYEEGVLNSILELPEDIGIILGKFNQTDTLKRPTRSEILRYKLWLEQKYRSPYTGEMIPLSKLFTPAYEIEHIIPQSRYFDDSLSNKVICESEINKLKDRSLGYEFIKNHHGEKVELAFDKPVEVLSVEAYEKLVHESYSHNRSKMKKLLMEDIPDQFIERQLNDSRYISKVVKSLLSNIVREENEQEAISKNVIPCTGGITDRLKKDWGINDVWNKIVLPRFIRLNELTESTRFTSINTNNTMIPSMPLELQKGFNKKRIDHRHHAMDAIIIACANRNIVNYLNNVSASKNTKITRRDLQTLLCNKDKTDNNGNYKWVIDKPWETFTQDTLTALQKITVSFKQNLRVINKTTNHYQHYENGKKIVSNQSKGDSWAIRKSMHKETVHGEVNLRMIKTVSLNEALKKPQAIVEMDLKKKILAMLELGYDTKRIKNYFEENKDTWQDINPSKIKVYYFTKETKDRYFAVRKPIDTSFDKKKIKESITDTGIQQIMLRHLETKDNDPTLAFSPDGIDEMNRNILILNKGKKHQPIYKVRVYEKAEKFTVGQKGNKRTKFVEAAKGTNLFFAIYETEEIDKDTKKVIRKRSYSTIPLNVVIERQKQGLSSAPEDENGNLPKYILSPNDLVYVPTQEEINKREVVMPIDRDRIYKMVDSSGITANFIPASTANLIFALPKATAEIYCNGENCIQNEYGIGSPQSKNQKAITGEMVKEICFPIKVDRLGNIIQVGLCILTN

SEQ ID NO: 23617 - protein, 1394 aa, unidentified
  REGION 1..1394: note = Cas Enzyme sequence
MSKILGIDLGTNSIGLAIRDTDKGETFVEQVDFFSSIIFKSGVGSGQAGEFSYAAERTKKRSIRRLYQSRKYRIWTTLALLIENGYCPLSIEDLDKWRRYDKEKGLKRQYPIEAIQFEQWIRLDFDGDGKPDYINPYELRAEIMQKQFDFNEEINRYKLGRILYHITQRRGFKSSKGETLKELSENEINEDLDLSVALQKSEEKKSQKLKDFMKEHNIPTVGWAFYELTKRGIRIKESEYQAVRIQYKEEIQKIFEFQEGLDTTSDFYKHLMSEKKGEGTIFYKRPLRSQKSKVGTCTLETGKSRCPISHPEFEEYRAWSFINNIKYRTSTTAEWKTLPLNLKQELFKDKFLRTKSYFKFEEIKNWLSSKLCLQLEYTNKKETSTINYKDKTNVVGCPISARLKNILGEDYKQWKFNSDKERTNRKTGEVHRITYDYLDIWHICFSFDEAEFVEEFAKCTLKLDDKQAKKLCTLHNNIQQEYASLSLKAIRNINPFLQKGLIYTDAVLLAKLPEIFKDKWNEVENDIVAAIDDIIKENRYEKGILDIVNDLIANYKSLDYGERFAEHNTEYILQSQDYTDIESKLKGHFGERTWNAKPCEEQEQIRKDVRELYQIFFGSSSRGYFKQPKVSESLAEYLKKQYTYLNDDDLKKIYHPSMIEFYPKVKPTLLDDNKYVKLLGSPVIGALKNPMAMRILHTLRTQINQLIKEGKIDKYTKIVVETAREVNNTNKRWAIEEYQRKQEEENKEVEKIIRQYYQKDNISDDEIKKAKILLDQFDVEKDNKQEKKKDTQSDKLSDTWSKVKSNNIKRYKLWLEQNCCCMYTGKVIRISELFDNDKFDIEHTIPRSISFDDSLSNLTICDSHFNRSIKKNKIPTQLDNYNEIKSRLELWKQKVKSLKERVEYWKEQSKISQTKDRKDQCIKQRLLWQMELDYWEKKLASFTIKEFIDGFRNNQLNDTRIITKYAFHYLKTVFEHVSVQRGEITSNFRKIVGIQKEDEKKDRSNHSHHAIDAAILTLIPSAKQRNRILETFYQMKESKETNNKDKLEKTTKELEKAKRAALIPDAVAAIKDHIEQNIFVNHISKDQTLTPAKRRKRIRGKIDKNKQWIITGDCIRGSLHKDSFYGCILIDGKKYFVIRRALKYKANDKDKGFKTWNELENAIVDKALYRRLVKPFCQEGAEEPSIDFKTVMLEKVGLYDNGIKVRHIRCYTSVKNPLQIKKQTYKSKQGYKNYYYAEVGDLYTMCKYENKKTGEIVYQPYNLFEVAANHKITHEFIPSKYDDKVLTQQLVKGDMLLIYKDNPNELFEMDNVQLSKRLYVIDGFERKSCLTKLIRSSNAQQDKELGKGESIKDFNNLPQKIRQSINKLHYLLRGIDFKIINGRIEFLNKTKYYD

SEQ ID NO: 23618 - protein, 1390 aa, unidentified
  REGION 1..1390: note = Cas Enzyme sequence
MKKILGLDLGTTSIGWALVNEKENDNEQSSIIKLGVRVNPLSVDEQSNFEKGKAITTNADRTLKRSARRNLQRFKLRRENLLTLLKEHGFITDETVLCEQGNRTTFETRQLRARAVSEEITLEQLARVLLMINKKRGYKSSRKADSGEDGKLIDGMSVARQLYEQHLTPGQYVLNLLRNGKKYLPDFYPSDLTAELKAVWHAQQAYYPELLTQELFDALKNKNEKQTWAICAQPFGIKGMKRNGTTAEQKAENYRWRSEALDKKIGLEELAIVLQKINGQIHGTSGYLGAISDRSKELYFNHQTVGQYQMQLLEKDPNTSLKNQVFYRQDYLDEFERIWETQAIYHPELTAELKHEIRDIVIFYQRQLKSQKSLVGYCELESKPKEVVVDGKKKTITTGLRVCPKSSPLFQSFKIWQTLNNVQVSGNIIPEKQLDLFGTAATYKYGSRCLTEEEKQTLYKELSLKERMSAAEILKLLFKSGKGLSLNFREVDGNRTMAAFVKACQTIIVMSGHNEYDFAKLSYETVESTINQIFNALGIKSGFLNFDPCLEGKAFEHQPAYQLWHLLYSYAGDNSATGNEKLITRIAETFGMEHNFAAVFAAITFIPDYGNLSAKAMRRILPYMMDGNEYSVACEYAGYRHSRRSLTKEELDKKPLVDTLPLLPRNSLRNPVVEKILNQMINVVNEVSAQYGKPDEIRIEMARELKKSAKEREQMTADITRATAQQEEYRRILQDEFGMPHVSRNDITRYRLWLELKDNGYKTLYSQTYIPREKLFSKEFDVEHIIPQARLFDDSFSNKTLEARQANLEKSNATAFDYVQIKYGEKGAKEYKERIDYLYADGVISKTKHDKLLMKEADIPEGFINRDLRDSQYIARKAREILESMVRVVVPTTGAVTDRLRDDWQLVDIMKELNWDKYNKLGLTETFKDHDGRQIKRIKDWTKRNDHRHHAMDALTIAFTKHSFIQYLNNLNARSNKSGSIYAIEQTCLYRDAHGKLRFMPPMPLDVFRAEARRQLQDILVSTKAKNKVVTRNINSIKRRGEKKQTVQLTPRCQLHNETVYGSVRCCVVKEEKISSSFTEEKIATVASPRYREALLKRLGEYGGNAKKAFTGRNSLEKNPLYLNDDHTLSVPAKVKTVTYETIFTQRKPIDKDLKVDKVIDEHVKEILEARLKEFGGDAKKAFSNLDENPIWLNRERGIQIKRVTIRGVSNAVALHDKHDVQGKPICDSEGRRMPSDYVSTSSNHHVAIFRDANGNLQEHIVSYFEATARAIQHLPIVDRDYNKDEGWQFLFTMKRNEYFVFPNEKTGFNPKEIDLLDPKNYAVISANLFRVQKLATKNYFFRHHLETNVETPKELSGITYKSQLGLKGIAGIVKVRVNNIGQIVAVGEY

SEQ ID NO: 23619 - protein, 1240 aa, unidentified
  REGION 1..1240: note = Cas Enzyme sequence
MKRILGLDLGSASIGWALINEKEENNKTTSSIIALGSRIIPYEGTEGKDFAKGTGESRNSLRTQARTTRKGYDRYQLRRKYLVDILIKNNMIPTDELKNLPKMELWQLRAKAVKEEISLQELGRLLLWLNQKRGYKSSRSDSNLDKKDTEYVAIVKSRHETIKQQNLTIGQYFYNELTKDNFYKVKENIFPREAYIEEFDAICKRQTCVSTEIIQKIRNEVIYYQRPLKSQKGLVSVCEFEGFYANKDGKEYFVGPKVAPKSSPLFQLSKIWENINNIKINNRKGEEIIITPEQKTAIFEHLDNNEKLTQNDLLKILELRKENCYVNKQLAKGLNGNITKNEIKKCFGNSKIYENLLKLELSIVTGKGDGYLYDRKTGEVLDSKPKVFIDPKIEKEPLYQLWHTIYSIANQEECSTVLQNNFKIEKPIADKLASIDFTKHAFGNKSVKVIRKILPYLMAGDGYSEAMSYAGYEHSNSLTKDQNLDRKLLDALKPIAKNSLRQPIVEKILNQMVNIVNAIILKHGKPDEIRIELARELKQSKEERNDADKNMSKRQRENETITKRLEEYGLRATRNNIIKWRLFEEIDNEDKKLNAICIYCGQPISLTEAIKGNDVDIEHIIPKSKLFDDSQSNKTLAHRHCNRNKNDLTAFDFMKSKSEQALAEYVDRVNSLYANHIIGKAKRDKLLMTESKIPDNFIDRQLRESQYIAKKAKGILQTICHNVWSTSGNVTAELRHLWGWDEITMNLQFPKFKAIPEMIEIKEWESDHGKNKHSKEVIKDWSKRDDHRHHAVDALTIACTKQGFIQRFNTLSSSKTRNDMYKIVDESSFEFTEKRSLLEKYILSQQPISVPEVENAVGNILISFKSGKKVAVLGKRKIGKRGNKKVVQTGIIIPRGQLSEESVYGKIKALDEKKPLKYIFENPHLIIKPSIKQLVDERLAQYENDIKKALTSLKKEPIFLDKDKTIILEYATCFKDEYVIKYTVDINFNKVDKVIDSKIKEILKTRLAKFGDKAKEAFKDVQGENKQQIKWFDDEGLTRPIKTVRCFTGLSTVVPVKKDEQGNDIGFVKPGNNHHIAIYTDNEGKKQEHVCTFWHAVERKKYGIPVIINNTNEVWDKILLQAEGTYPESFLEKLPHANWTIELSMQQNEMFVLGMTKDDIESAILNNDYIHISDKLYLVWSLSEGDYWFKHHLETKGSDLKSATGAKDCKRYYRVQSGNALYNLQPYKLKIDCLGNIKKQ

SEQ ID NO: 23620 - protein, 1519 aa, unidentified
  REGION 1..1519: note = Cas Enzyme sequence
MHCKTFFIMKNILGLDLGTNSIGWSMVQQNDDNKPTNILGLGSRIIPMSQDIIGAFESGNSKSQTADRTSFRGTRRLRERFLLRRERLHRVLHIIDFLPEHYDNAIDFEIKFGKFLNESEPKIAWLKNGSGTNEFIFKESFNEMMADFMVHQPQMTQESKRIPYDWTLFYLRKKALTQKIKKEELAWILLNFNQKRGYYQLRGEEEENDIQNKTVEYHALQVVEVSVDEESQKGKSELWYNVLLENGWIYRRSSKTSLNDWIGKTKEFIVTTDLNQDGSVKKMTFRSPADEDWTLLKKKTENDIERSHKTVGCYIYDTLLQNPNQKIKGKLIRTIERKYYREELELILDKQRGFHEELRDKELLNCCIQELYSNNEAHANTLINGDFKQLFVKDIILYQRPLKSKKSLISDCSFEKRVFMKDGVRIEEPLKCIPKSHPLFQEFRLWQFLKNLKIYAREKYVGDRLQTDVDVTIEFLKNENDYIELFDWLNERKEIKQDILLTSYFKIKKVKGQDELPYRWNYVQDKEYPCNLTHFLIQSILAKIDAIPTNFLTTNKEIELWHILYSVQDKFEIEKALGRFAEKNQLGESFVDVFKKIPPFDKDYGSYSEKAIKKLLTLMRMGKYWDQFQIDKQTYSRIGKIIDGECDENILSRIRERTFDYRDESSFKGLPLWFASYIVYNRHSENGDAERWEKPEDIDVFLKSFKQHSLRNPIVEQVLSETLRVVRDIWKQYGSISEIHIELGREMKSTADQRKYITETNIRNEDSNARIRAMLNEMLNSRSISDVRPYSPSQQEILKIYEEGVLNSNIDIPDDVLKIAKQRTPSQNELTRYRLWLDQKYRSPYTGKMIPLSQLFTTSYEIEHIIPQARYFDDSLSNKVICEAEVNRDKEDNTAYEYIKNNQGKIIELNFGNNAEVLRLDAYENHVKQFFSKNKGKLNRLLMEDIPDDFINRQLNDTRYISKVVKSLLSNIVREKEELEATSKNVIVCNGSITSRLKQDWGLNDVWNTLMTPRYERLNALTNSDQFGSWVNKFGKRFFQSTVPPELQKGFKKKRIDHRHHAMDALVIACATRNHINYLNNEHAHKNEKSIRYELRNLLRRQEEVEIERIENGVKIRKKIKVAKEFIKPWGNFTQDSHTALENIVVSFKQNTRVINSTVNRYQHFINGTKILDKQTKGDSWAIRKSLHKATVAGQVNLKLKKTVALSVAIESMDMVTDKELKSKIKQLRDEGLDKKKILKYFNEADGMFNSKDVSRVAIYYFTNDVEPVVASRVPLDASFDYKRIQSITDTGIQLILKNHLDRCDGNPEVAFSPEGIVDMNTKMFELNNGKAHQPILKVRTFEPMGNKFSVGINGSKKSKFVEADKGTNLFFAVYQDETGNRNYESVPLNYVVESLKQGLPPVALKKIDQRSGEESHMLFYLSPNDLVYVPTTEELNSQGSINLTTLNSDQRKQIYKFVSCTENVGYFVPHTYSSPIQKNEMGTNNKSQNTIDGNIQIKSCCWKIKVDKIGNVSLEKGL

SEQ ID NO: 23621 - protein, 1508 aa, unidentified
  REGION 1..1508: note = Cas Enzyme sequence
MRTILGLDLGTNSIGWAVINSVIKEQTEKIWIEMAGSRIIPMDAAILGDFDKGNSISQTAERTRFRGVRRLRERQLLRRERLHKVLKILGFLPEHYLKGIDFEKHTGKFLSGSEPKLPWVKDRWGKYSFLFQTAFNEMLADFAKHQPSLVFDGKKIPYDWTVYYLRKKALTEMISKEELAWILLNFNQKRGYYQLRGEEEEDNAGKSVEFYALKVLSVEAADEKKGRDIWYNVHLENGWVYRRSSNVPLDWEGRVKEFIVTTDLNPDGTPKLDKYGEVKRSFRAPKEDDWMLIKKRTEADIAGTHKTIGSYIYDALLQEPQQKIIGKLVKTVERKFYKEELNLILQKQCAFHAELQDRDLYMRCIEALYPGNEVQRRNIANRDFIYLLIDDVLFYQRPLKTKKSLIANCPYEENEYVNRKTGEIKTAPLKCIAKSHPLFQEFRLWHFLSNIRVYQKEREVNGTLYLDVDVTTEFLKTEDDYVALFDWLNSRKEIDQKAFLRYPAFGLKKEINNYRWNYVEDKFYPCNETRHAILSRLEKAGIGIDFLSDEKETALWHILYSVSDKQEIEKALATFAVKNGLNESFVEVFKKFPPFKSEYGAYSAKAIKKLLPLMRCGKYWDMSLIDGTTKERIERIIAGECDESIGAKVREKAMNLSDISCFKRLPLWLACYVVYNRHSEDKEITKWETPADIDAYLAAFKQHSLRNPIVEQVITETLRVVRDIWKQVGKIDEIHIELGREMKNPADKRKRMTTQILENENANLRIKALLAEFVNPEYGVENVRPYSPSQQEILRIYEDAVLKGEEQIPEDIDVILKKFNTSKLPTKSEFLRYKLWLEQKYRSPYTGELIPLAKLFTAAYEIEHVIPQSRYFDDSFSNKVICESAVNKLKDNQLGYEFIKNHHGQKVEVGFGKTVEIFSVDSYERFVKEQYAKSGIKMKKLLMDDIPEQFIERQLNDSRYISKVVKGLLSNIVREKNDSGEYEPEAVSKNILVCTGNVTDRLKKDWGMNDVWNSIVSPRFERLNALTETQCFGHWENKDGKKVFQTAVPLEYQKGFSKKRIDHRHHAMDAIVIACATRNHVNYLNNESASRNAKISRYDLQRLLCDKSRGDGNGNYRWIIKKPWTTFTQDAREALSGIIVSLKQNLRIINKTTNIYQHFDANGTRVYEKQKIGDSWAIRKPMHKDTVFGAVNLRKVKVVRLSVALDTPSMIVDKRVKNKVLELLSYKYDKKKIEKYFKENAFLWKELDIAKVAVYYFTENTTEPLVAVRKSLDSTFNEKKIASVTDTGIQKILLNHLKSKEGKAELAFSAEGIEEMNRNLLQLNDGKGHQPIYKVRVYEPRGNKFKVGVLGNKGAKWVEAAKGTNLFFAIYITEDGNRTYETIPLNWVIEREKQGLVPVPDRNEKGDKLLFWLSPNDLVYLPTEEERDLGRINEPIDRGRIYKMVSSSGNQCFFIPQSISNAIISTKELGSNNKAEKSWDGEMIKNICIPVKVDRLGRIIEVKYRVNE

SEQ ID NO: 23622 - protein, 1020 aa, unidentified
  REGION 1..1020: note = Cas Enzyme sequence
  REGION 554..557: note = misc_feature - Xaa can be any naturally occurring amino acid
MKLIDPNKNQYKFNFKDYVSVSGMPVTAALKELFGCNVYEISINKASSANGEKGYYDYEDLWHVLYTFTDSESLIKFAKSKLQLSDEDSVKFSKIKIPQGFAALSINAIKKILKYLHQGYIYSDAVFLANLSKVLDQSLTSEEEEKLIANVHRLMINQRSNKNKSAIINNLISNYINNEEMNGKKESSYISDDNLNKLVENEIINVLGNNRWIELGEQNQNHLINEIRDNFKNLLITRGNFSRGVLYDKVPRFDDQIKTLLKKEYPEWDEERFKYLYHPAESEFYPAAKEIDGKKILGSPEPISKGLKNPMALKTLYVLKKLINHLILTEKIDSETRVVVEIARELNDANRRAAYERWKNERQKENESLVDKITQSASEAGYPDISVDDNILTKYKLWLEQGMQCLYTGKVIAFSELLNGTSVDIEHTIPASISFDNELSNLTLANSRYNRDIKKKLIPTQLPNYNTTIEINGESYKAILPNIKFIENKVKHYSKLVEDAKKKSKSAQSKDQKDTQIQNRHYYKMHYDYWNKKLRTFTDTEIRSSWKNSQLVDXXXXQIISKYAFHYLKTVFNIVDVQKGSVTAAFREIFNLGFKKDRNSSIHHAIDAATLTLIPYPKKRDYLLLKYFEATERKLAFHSKPEYWNNFSSEIIKELEEKTFVNYYKKDTTLVQTYKNVRKRGRIQYIRKQLANGKFEYILDDKGNKIPMVSQGDAIRGQLHKETFMGAIKLPLNNTGIRGNYKTSDKPLIFVERVPLKSLKKMEDLKKIIDDKVKGDIQKTLERKISQGKSFVQAINEDFWLLDKNGNEIKQDKNEKVLFPMRHVRCISSAGGGILTPEKALQIKQQTFLSEHEYKQYYYAQNKEMALCIFYEKNVKNKLLREFRFAGLFELAQLKIKNVNELATIPEYNLLEKRHIPSKYFIKTGYRVIVYENSPDEIRELNPDELIKRIYRVYKFNDSGANYIFLQYNSESRKDKELGEGSTKFDLSIYQPRLKLTANNFNCLVEHYDFNISIDGEIIF

SEQ ID NO: 23623 - protein, 1512 aa, unidentified
  REGION 1..1512: note = Cas Enzyme sequence
MKQILGLDLGTNSIGWALIKQNFEEKKGQILGVGSRIIPMSQDILGKFESGQSHSQTAERTGYRSVRRLYQRDNLRRERLHRVLNILGFLPKHYVDAIDFEKKLGQFKPGKEVKLNYAINDKGKHEFIFQASFNEMLSEFKVAQPKLFYKKENGEETKIPYDWTLYYLRKKALSKPLTKEELAWVILNFNQKRGYYQLRGEEIVTDDTKKEEYHNLIVVDVQETEDKNARGTWYNVILENDWVYRRQSKEPLNSWIGKNKEFIVTTQLEKDGSLKLDKEGIVKRSFRAVDSEKDWIAIKAKTEQDIEQSNKTIGEYIYENLLDNPNQKIRGKLVKTIERKFYKDEFNKIISKQIQLQPELFTDELYQKCIEELYPNNEAHRTTIKDRGFKYLFTDDIIFYQRPLKSQKSNIAECPLEFRVHKQTNEETGEIEDVKKGIKAISKSHPLFQEFRIWQWLQNLKIYNKEQIENGTLKDVTGQLLPDEEAWVALFDFLNAKKELEQKQFIDYFVKKKLIDKKEKDYYRWNYVEDKKYPFAETRAQFISRLSKVEGLHDVEAFLDEKTKMGKKEKSPYMSRMEQLWHIIYSVTDVNEYKSALKKFALKHDLDTESFVKNFEKFPPFKSDYGSYSQKAINKLLPLMRRGKYWNEALIPDDVKARAEAIMERVYALPLKSNYSDKDIKQALETVSDDDIPKQLIKSFVPFKDKNPIQGLNTYQATYLVYGRHSEVGEIQQWRIPNDIDDYLKKFKQHSLRNPIVEQVVTETLRVVRDVWKQYGEGQPDFFDEIHVELGREMKNPADKRKKISERNNENENTNHRIKELLKELMKDSSMEGDIRAYSPSHQEILKIYEEGVYQNPKADYSKVSEDEISKIRKNNNPTLKEIQRYRLWLEQGYISPYTGKPIPLSKLFTHEYQIEHIIPQSRYFDNSMNNKIICESEVNENKGNKTAYEYLSHKGGNVVNGHKLLTLEEYESHVNQYFKNNKTKLKNLLSENVPEGFINRQLNDSRYISKLVKGLLSNIVRQDGEQEATSKNLIPVTGAVTSKLKNDWGLNDKWNEIILPRFERLNKLTQSKDFTTLNTNGKIIPTVPDELSKGFNKKRIDHRHHALDAIVVACTTRDHTHYLSALNAENKNYGLRDKLLIKSTQGDYTKTFLMPWEGFAIEAKDQLAKTVVSYKQNIRIINKTSNKFWSYKDEHGNLNLDKNGKPVKKLRQQTKGDSWAIRKSLHKETVSGLYNIKTPKGKIATSVRTALSEIKNEKHLAKITDEHIRDVILPNHLNNYLDEKGNHKYDLAFSDEGIEDLNKNIEALNNGKKHQPIYKVKMYEVGSKFSISENDKSAKSKKYVEAAKGTNLFFAVYWDDKKQKRNFETIPLHEVIAHQKQVAHLPKKERLPIQPDPKKGVFLFTLSPNDLVYVPTEEEIENGVHVDFDNLTKESINRIFNVNDFSGGTCYFTPNYLAKSICNKEVDMQYDKKKSKITGSFDIKTASFNGVSIKEVCIKLKVNRLGNISKV

SEQ ID NO: 23624 - protein, 1250 aa, unidentified
  REGION 1..1250: note = Cas Enzyme sequence
MKTIWGLDLGSASIGWAIVKEDNNITKIVALGSRVIPYDGTEGQDFVKGTGESRNTLRTKARTVRKGYDRYQLRRKYLVDVLVKNRMMPDENLKCLPKKQLWELRSKAVTEYISKQELGRILLWLNQKRGYKSSRSEANFGKKDTEYVVAVKCRYEIIKERNLTIGQHFYNELCNDEYFRIKENVFPREAYIEEFDKICEKQKVHLGLSNELIAKIRNEIIYYQRPLKSQKGLVAVCEFEGTWKTKDGKEYFVGPKVAPKSSPLFQLSKIWENVNNIKLSTKYGEDVELTLDEKLKVFDYLDNNERLTSTDLFRILHKNKKEFTVTKQLEKGIQGNIVKTSILKILGKNYKELLKLDLAIIETEQFGYLYDKKTGEILGEKSLKCIDSKVEKEPFYQLWHTIYSINNVQECSNALQKGIIVVRKEGKNDEVRVKIDKETADKLAAIDFCKFAFGNKSAKTIRKILPYLMEGDKYSEAMSYAGYDHSNSWTKDDNLRRDLLDKLKPIEKNSLRQPIVEKILNQMVNVVNAIIEKYGKPDEIRIELARELKQSRDERNSADLKMSKRQRENEIIANRLEEYGLRATRNNIVKWRLYQEIDNQDSKLNAICVYCGQPISLTEAMLGREVDVEHIIPKSKLFDDSQSNKTLAHRHCNSTKGDMTAYDFMKTKSKQEFDNYVERVGLLYSKKIISKTKRDKLLMSEDKIPDNFIDRQLRESQYIARKAREVLQTVCHNVWATSGTVTAELRHFWGWDDVTMNLQMYKYKDFPNLIETIEWESEHGKRKHSKEVIKDWTKRDDHRHHAIDALTIACTKQGFIQRFNTLNTSRTRNDMWNAIEKCSVEYKDKLTLLEKYIILQRPLSVKEVEDAVSQILVSFKAGKRVAVWGKRKVGKGGNKRVVQDRIIVPRGALSEQFVYGRIRSIEKNKTLKYLFNNPHLIFKPYIKILVEQRLNKYENDTKKALASLKEDPIYLDVDKTKLLEYGTCFKEEFVIKYDVDVNFARTEKIIDEKIKYILQTRLQRFGGSSKEAFKDVQLGEKTLKWYEDEKLEHPIHSVRCFTGLSAVVPIKKDEYGNEIGFVKPGNNHHIAIYVDRDGNENEHVCTFWHAVERKKYGIPVIIKNTNDVWDKIWQQPDNAYPQSFLKQLPSVNLEMKLSMQQNEMFVLEMTKGDVKVAIENSNYKKISEHLYRINSISTSDYCFYHHLETKKDIKNADSKASKRFFRIKSMKALFSLNPVKVKIDCLGNIIDMNK

SEQ ID NO: 23625 - protein, 1509 aa, unidentified
  REGION 1..1509: note = Cas Enzyme sequence
MKTILGLDLGTNSVGWAVINSVIKEQAERIWIEMAGSRIIPMDAAVLGDFDKGNSISQTSERTRLRGARRLRERQLLRRERLHKVLNILGFLPNHYLEYIDFEKHPGKFLADAEPKLAWVKDEQGKYTFLFQAAFDEMLADFAIHQPSLVSGDKKIPYDWTIYYLRKKALTEMISKEELAWILLNFNQKRGYYQLRGEEEEDNAGKSVEFYALKVLTVEATDEKKGRDVWYNVHLENGWIYRRSSSVPLDWEGQVKEFIVTTDLNPDGTPKLDKYGEVKRSFRAPKEDDWMLIKKRTEADIANTHKTVGAYIYDTLLQKPQQKIIGKLVKTVERKLYRDELSLILQKQCAFHAELQDRALYARCVEALYPSNEVRRKNIANRDFVYLLMDDILFYQRPLKTKKSLIANCPYEENEYVDRETGEIKKTPLKCIAKSHPLFQEFRLWNFLSNIRIYQKEKEINGTLHLDVDVTAEFLKTEDDYVALFDWLNSRKEIEQKTFLKYPKFGLKKEISNYRWNYVEDKQYPCNETRHAILSSLEKANVCIDFLSNEKEVALWHILYSVSDKQEIEKALRTFAAKNGLDESFVEAFKKFPPFKSEYGAYSAKAIKKMLPLMRCGKYWDVSSIDDTTKERIKKIVTGEYDERISVKVRDKVMNLSDISCFRRLPLWLACYIVYNRHSEDKEAVKWESPADIDAYLASFKQHSLRNPIVEQVITETLRVVRDIWKQVGRIDEIHIELGREMKNPADKRKRMTAQILENENANLRIKALLAEFMNPEYEIENVRPYSPSQQEILRIYEDTVLHAEDQLPEEIDAILKKFNSSKVPTKSEFLRYKLWLEQKYRSPYTGELIPLGKLFTAAYEIEHVIPQSRYFDDSFSNKVICESAVNKLKDNQLGYEFIKNHHGQKVEVGFGKSVEIFSVDSYERFVKEQYAKSAVKMKKLLMDDIPEQFIERQLNDSRYISKVIKGLLSNIVREKNDSGEYEPEAVSKNIVVCTGSVTDRLKRDWGMNDVWNSIVYPRFERLNSLTDTQSFGHWENKSGKKVFQTELPLEYQKGFSKKRIDHRHHAMDAIVIACATRNHVNYLSNESASRNAKISRYDLQRLLCDKNRTDDNGNYKWVIKKPWDTFTQDAREVLSKIVVSLKQNLRIINKTTNVYRHFDATVNRVYQKQKTGDSWAIRKPMHKDTVFGAVNLRKVKVVRLSVALDTPAMIVDKRVKNKVFELLSYKYDKKRIEKYFKENAFLWKELDLAKVAVYYFTEATTEPLVAVRKPLDSTFNEKKIKESVTDTGIQKILLNHLCTKEGKPDLAFSAEGIEEMNRNLLQLNNGKSHQPIYKVRVYEPRGNKFSVGVLGNKGTKWVEAAKGTNLFFAIYITEDGKRTYETIPLNVVIEREKQGLVPVPDRNEKGDKLLFWLSPNDLVYLPTEEEREFGRINEPMDRGRIYKMVSCTGNEGHFIPANVANPIVPVIELGSNNKAQRAWTNEMIKDICIPIKVDRLGHIIEVKYRIDE

SEQ ID NO: 23626 - protein, 1509 aa, unidentified
  REGION 1..1509: note = Cas Enzyme sequence
MKTILGLDLGTNSVGWAVINSVIKEQAERIWIETAGSRIIPMDAAVLGDFDKGNSISQTSERTRLRGARRLRERQLLRRERLHKVLNILGFLPNHYLEYIDFEKHPGKFLADAEPKLAWVKDEQGKYTFLFQAAFDEMLADFAIHQPSLVSGDKKIPYDWTIYYLRKKALTEMISKEELAWILLNFNQKRGYYQLRGEEEEDNAGKSVEFYALKVLTVEATDEKKGRDVWYNVHLENGWIYRRSSSVPLDWEGQVKEFIVTTDLNPDGTPKLDKYGEVKRSFRAPKEDDWMLIKKRTEADIANTHKTVGAYIYDTLLQKPQQKIIGKLVKTVERKLYRDELSLILQKQCAFHAELQDRALYARCVEALYPSNEVRRKNIANRDFVYLLMDDILFYQRPLKTKKSLIANCPYEENEYVDRETGEIKKAPLKCIAKSHPLFQEFRLWNFLSNIRIYQKEKEINGTLHLDVDVTAEFLKTEDDYVALFDWLNSRKEIEQKTFLKYPKFGLKKEISNYRWNYVEDKQYPCNETWHAILSSLEKANVCIDFLSNEKEVALWHILYSVSDKQEIEKALRTFAAKNGLDESFVEAFKKFPPFKSEYGAYSAKAIKKMLPLMRCGKYWDVSSIDDTTKERIKKIVTGEYDERIAVKVRDKVMNLSDISCFRRLPLWLACYIVYNRHSEDKEAVKWESPADIDAYLASFKQHSLRNPIVEQVITETLRVVRDIWKQVGRIDEIHIELGREMKNPADKRKRMTAQILENENANLRIKALLAEFMNPEYEIENVRPYSPSQQEILRIYEDTVLHAEDQLPEEIDAILKKFNSSKVPTKSEFLRYKLWLEQKYRSPYTGELIPLGKLFTAAYEIEHVIPQSRYFDDSFSNKVICESAVNKLKDNQLGYEFIKNHHGQKVEVGFGKSVEIFSVDSYERFVKEQYAKSAVKMKKLLMDDIPEQFIERQLNDSRYISKVIKGLLSNIVREKNDSGEYEPEAVSKNIVVCTGSVTDRLKRDWGMNDVWNSIVYPRFERLNSLTDTQSFGHWENKSGKKVFQTELPLEYQKGFSKKRIDHRHHAMDAIVIACATRNHVNYLSNESASRNAKISRYDLQRLLCDKNRTDDNGNYKWVIKKPWDTFTQDAREVLSKIVVSLKQNLRIINKTTNVYRHFDATVNRVYEKQKTGDSWAIRKPMHKDTVFGAVNLRKVKVVRLSVALDTPAMIVDKRVKNKVFELLSYKYDKKRIEKYFKENAFLWKELDLAKVAVYYFTEATTEPLVAVRKPLDSTFNEKKIKESVTDTGIQKILLNHLCTKEGKPDLAFSAEGIEEMNRNLLQLNNGKSHQPIYKVRVYEPRGNKFSVGVLGNKGTKWVEAAKGTNLFFAIYITEDGKRTYETIPLNVVIEREKQGLVPVPDRNEKGDKLLFWLSPNDLVYLPTEEEREFGRINEPIDRGRIYKMVSCTGNEGHFIPANVANPIVPVIELGSNNKAQRAWTNEMIKDICIPIKVDRLGHIIEVKYRIDE

SEQ ID NO: 23627 - protein, 1558 aa, unidentified
  REGION 1..1558: note = Cas Enzyme sequence
MKHILGLDLGTNSIGWALVKSEQDCDDVERINGIEAAGSRIIPMDAAVLGDFAKGNTKSQTADRTAARGIRRMGERHKLRRERLNRVLDVMGFLPEHYSAALTRYSKFKDGEECKIAWRKDESGQWTFVFEDSFREMLADFVAHQPEWLAGGRKVPYDWTIYYLRKKALSQPLTKQELAWLLLNFNQKRGYYQLRGEDEQTDDKGKLVEYYALKVVGVEDTGEKKGKDTWFNIMLENGMVYRRPAAEAPDWIGKTKEFIVSTDLEKDGTPKKDKEGNIKRSFRMPKEDDRTLIKKKTENDIDRSGKTVGEYIYDALLADPTQKIRGKLVRTVERKYYKEELKKIIDSQKRFIPELNDNELYGRCISELYQSNDAYRQSISSCDFTYLFVDNIIFYQRPLKSKKSLIDNCPYEEHSYTDSKTGEVKTAPVKCVAKSNPLFQEFRLWQFVQNIRIFERQKKIGDSVKTDVDVTGEFIKSADDVVSLFDFLNDRKDITQSVLLGTYFKIKKPKGKDSDYPYRWNYVEDKTYPCNETRALILKGLKDAGIDEGFLDKDKEYSLWHILYSVEDKQEITKAMEKFAAKNSLGGKFAEVFSSLPPFNKNYGSYSEKAIKKLLALMRTGKYWSADAIDKHTLERIDKIINGEYDESIRARVREKAINLTDVSHFRGLPLWLACYIVYDRHSESKDITRWNCPADIDQYLDHFKQHSLRNPIVEQVVTETLRTVRDIWRQYGKIDEIHIEMGRDMKNPADVRAKMSKRMIDNENANLRIKAMLAEFADPDFGIAGVRPYSPSQQEMLRIYEEGALESVDEVPDEINEIISKFNQTDIKKRPTHGEIIKYKLWLEQKYQSPYTGRTISLSRLFTDDYQIEHVIPQSRYFDDSMSNKVICEAEVNQLKDRMLGYEFIKAHHGEKVLLSSGETVTILTAEEYERLVQLNFRKNPVKMKKLLMDDIPDKFIERQLNDSRYISKKIKSLLSNMVRDEGEQEDISKNVIACNGAITDRLKRDWGVNDVWNHIILPRFERLNAVTGSDRFTTTSTNGHTIPDMPLNLQKGFNKKRIDHRHHAMDAIVIACTTRSHVNLLNNEAAMSKNNAVRYQLSRKLRRYEDTMVTRNGETRTISVAREFLKPWPTFNADVEKALRGIVVSFKQNLRVINKTVNKYQKFVYNEEKHIKEKKAVRQEERNGRYLLAIRKPMHKDTVYGEVNLRRIKEVSLKDAVANPKAVVDKDLKKKLMAMIELGYDLKQITKYFEDNKDAWQDVNLKKIKVYYFTKDTGDRYFATRFGNDLVTLFSKITKADDAKKQIERITDTGIQKILKRHLEANGGDCQKAFSADGIDEMNRNITQLNGGRPHKPVYKVRIYEKADKFAIGTKGNKAAKFVEAAKGTNLFFAVYLKEYEDSTTGETIKKRVFDTIPLKTVIDRLKNGQTPAPEEKDGAKLLFVLSPNDLVYLPTEDEVKNGTINRPLDKRRIYKMVDSSKSLINFVPQSVAKVIYSVSKEMAKQYSSNENNIVVDEFGLGSPKSKNERAITGEMIKEKCVPIKVDRLGNITEVNNEKI

SEQ ID NO: 23628 - protein, 1398 aa, unidentified
  REGION 1..1398: note = Cas Enzyme sequence
MKTILGLDLGTTSIGWALVKEAEPFSDEKSEIVRLGVRVIPLTVDERTSFENGKSITTNALRTQKRGMRRNLQRYKLRRQALIEELKSTGWIGNDFIFSETGPGSTFRTLRLRAKSASEEVTLGDLARILLQINKKRGYKSSRKMVSSDDGQAIDGMAVAKEMYDKGLTPGEYVYQRMLEGKYAIPEFYKSDLQEEFDRIWALQKSFHTELTDELYRKLSDRNKSQTWAICRDELGIQGLKSSFTGKERLKEAYRYRHLAATQEVNMEVLTCALQEINGQKASLSGLLSKISDRSKELYLNNLTVGQMLLKRIEDNPNNSLKNIVFYRQDYLDEFERIWTVQSKYHTELTHELKKRLRDIIIFYQRPLKSQKGLISLCELETKDIEVAIDGVKKMKNIGPRVCPRSSPLFQEFKIWQTINNIFVNGAALDDEDKSVIAKELMFKDKLKDSDLLKLLFKTTKGQSVNFKEVDGNRTMATLMKACFKIAENLGYDDIDLSKLSSEDQMVRIEGIFKEQGFKTGFLHFDSSLASPEFENQDSYRLWHLLYSYEGDKSASGNESLVKCIMDLCSMDEGSAKILASCTFLPDYGSLSAKAMRKILPYMKDGLEYTAACAMAGYRHSKRSLTKEELDTKEYSDRLSLLPKNSLRNPVVEKILNQMVNVVNSVIDVYGKPDEIRIEMARELKKSAKEREEAQRDIASSTAESQKVIEILKGEPFFIQFPTRNDIIRYRLYQELAQNGFKTLYSNTYIPKDKLFSKEFDIEHIIPQALIFNDSFANKTLESRQCNLEKGKETAMDYVKSKYDETGVQAYCDRVNGLIGKGISKTKAKWLLMEGKDIPEDFINRELRDSQYIAKKAREILESLVKFVVPTTGSVTARLREDWQLVNVMQELNWEKYARLGLTGVREDKDGRRIPFIQDWTKRNDHRHHAMDALTIAFTRRQFIQYLNHLNSKIDVVSWDKKDLDLRDYDLEDIKFGNLSAGDRYGIVKALQDKFLYKDGNDKYRFVPPIPLDEFRRQAKEQLSDILISFKAKNKVCTRNVNVTKNKGGANRKTQLTPRGPLHNETIYGSSLEYVTKENEKIGSSFDTERITTVCKKKFRDALARRLEEFGGDPKKAFTGKNSPEKNPIWVDEHHSEQVPAKVRTVTMGQRFTGRKPIDATLKIEKVIDKRIREILQARLDEFDGKAAKAFSNLDENPIWLNKEKGIAIKRVTVSGPANPVPVRFKRDKDGKPIIDDAGKTIGADFVTPGNNHHIAIFRDSSGKLQEHPVSFLEATIAKSHGLDVIDRNYNKDEGWEFLFTLKQNEYFVFPNSETGFNPLDYDLTDPMNYAEISPNLYRVQKITTGDYYFRLHLETTVEDNKALKGITWKRVGPSGLEGAVKVRIDNLGRIVAVGEYD

SEQ ID NO: 23629 - protein, 1080 aa, unidentified
  REGION 1..1080: note = Cas Enzyme sequence
MDKLTDRYELGRAFYHIIQRRGFLSNRKEQDSDDSGKVKEGISDLTKEMEKAGCEYLGDYFYTLYNNKEKIRNHYTARIEHYHAEFKAICEKQRLPEDLAQQIEKAIFNQRPLKSQKKQVGKCVFEKNKAKCPVSHPKYEEFRMLAFINNIKIKTPEDATLRPLNAEERENIMPLFYRKSKANFDFEDIAKKLAPKKMYGCIKKSKDAEMPYLFNYDMDTSVSGCPVTASLKDIFGDDWEKGISEVYTLGEGKSGSQIINDVWHALFFYSDTDKLKEFAQKRLQLDEEDAKKFSTIKIPSAYASLSLKAILKILPFLRRGLLYSHAVFLANMGKVVPQYIWELPETREGAIENVINEINRYDAHTDSRTLEVCIKDYLKQQYNATDDALKELYHPSMTETYARVMPNELGEYRLGSPRLDSVRNPMAMRSMFRLRKLINRLLAEGKIDADTTIHIEFARELNDANKRAALHDYQRENQNEKDKARKAIIDLYKEETGLEIVPNDKDILKYMLWEEQKHICLYTGDNISVASFIGANPKYDIEHTIPRSVGGDSTRMNLTLCDCRFNRETKKTKLPSELPNHEEILSRISGWKREYEELETKIRKNKRTTKGCSTKEQRDRMIRKRRLQEMQRDYWKGKYMRFTMKEVPEGFSRRQGADISIISKYARLYLQSLFHHVYTVKGIATSDFRKIWGIQEIYDKKERVNHVHHCIDAIVIACIGRDEYNKLGAYYHDEENSEWFGASKAHFDMPWPTFVTDMKTIQDELLVYHYTPDNMHKQGRRRILINGKKVMSKGDAARGSLHNDTYYGAIEHDGEIKYVKRVELASLNVAQLNVDSFIKSIVDETVREIIRKAIAEKGIKEAIAGPIWMNEEKRIPIKKVRCYMPSVTSPLHIRQHRDQSVKEYKRTFHVANDRNYMMAIYKGKDQKGKEKSEFELVNMLEAARYFKTSNDKEAADYNIVPVKSTNGYPLAYTLKIGTMVLLYENNPSEIWEGTKAEISRRLYKVTGLSSLTIGNYRYGTITLTFHEEARASKDIKAKNGVYKQGEELRPSIRMYHTQIQALVQGCDFEINEAGEIKRLR

SEQ ID NO: 23630 - protein, 1077 aa, unidentified
  REGION 1..1077: note = Cas Enzyme sequence
MKHLYGIGLDIGVASVGWAVVALNENAEPYGLIRCGSRIFDRAEQPKTGESLAAPRREARSTRRRLRRRNLRKADLYELMGKNGLPGKEEIEQAVQEGRLPDIYALRVQALDGAVTALDFARILLHLMQRRGFRSNRKADDAQKDGKLLQAIDANTCRMEENHYRTVGEMMCRDPVFAIHKRNKTENYLSTVKRDQIVDEARKLFAAQRQYGAVWASPEMEAEYLTILTRQRSFDEGPGGNSPYGGNMIEKMVGTCTLEGKAEPRAAKATWSFEYFALLQKINHIRIVEDGTSRALTAAERQELLSVCYQTDKLDFARIRKVLALPEQMRFNTVRYRTDKTAEDCEKKEKITALPCYHKMRKALNTLKKDYIRSVSRERLDAAATALTYFKNEEKLRTALEQAQFEPLEIEALMTLPSFTGFGHISVKACRKLIPYLEQGMNYNDACQAAGYDFQGNQNGEKSQRLPASTEEMEDITSPVVRRAVAQTIKVVNAIIREQGESPVNIHLELAREMSKNFQQRNDLDKAMKDNNAENERLMKKLHELFPGKNITGQDLVKYRLWREQDGRCAYSLQPLELKKVITVSGYAEVDHIIPYSISFDDRRTNKVLVLALENRQKGNRLPLQYLQGKRREDFIVYTKASVKNYRKRQNLLKEKLSEEDSKGFRQRNLQDTQYIASFMLNYIREHLAFADCPAADKQRVVAVNGAVTAFLRKRWGLSKVRADGDLHHAVDASVIACTTQGVIKRVSEFYKRVEAYETHNEHFPEPWPHFRDEITQHLSACPQENLMKINPAYYQDVDIASIKPVFVSRMPRHKVTGAAHKETIKGRLDDTHTVQRRPITDLKLDKDGEIAGYFNPSSDTLLYNALKAQLKAFGGDGKKAFAEPFFKPRADGTPGAQVRKVKIYDKATSTVAVHEGKGVADNDTMVRIDVYYVPDDGYYWVPIYVADTVKPKLPNKAVVAYKNYAEWKEMQEKDFLFSLCQNDLVCIEGKRVIKFKVQNADSTLEKEMLADRTFAYFESGNISTGAITVTTHDNAYIVGSLGFKTLKEVRKYQVDVLGNYTLVKKEKRQNFPAQRR

SEQ ID NO: 23631 - protein, 1140 aa, unidentified
  REGION 1..1140: note = Cas Enzyme sequence
MKNILGLDLGSGSIGWSVIQEGENNRTILGMGSRIIPLSPDDTTQFTQGKSITKNADRTAFRTQRKGYDRYQLRRHYLTQYLHKLGMLPDERLIKLPQTELWEIRAKAVNEKIELPELGRVLYHLNQKRGYKSGKSDFQDKKNSKYLSEVSERYKKLQEKDITIGQKFYAELKADPTYRCKDRVYPRIAYIEEFDRIMECQRKHHDILTDEHIAHLRNHIIYYQRPLKSCKHLVGECSLAQMTYRLPDGSIKSRPIKVAPKSSPLFQVCKIWESINHINLQRDRERFEITPAHRQALFTHMNSKEKLKINDLYKILGIKKHDGWWGGKAIGNGLQGNTTVIALQNALTGYSRADELLRFELKTCEIEIADPETGEIATQLIIDPAFEQEPLYRLWHTLYSISDTDVLDRILERKFGIEDPEMREKLTQIDFTKSGYGNLSSIAMRRILPYLRQGYVYSEACFMAGYNHSNSITREENLARELAEHLRPITKGELRQPIVEKILNQMVNLVNALIDRYGRFDEIRVELARELQQNREERDKTYKKQLDNQKRNEEIRHHIEEMYLTPTRSRIQKYRMYEESHHLCIYCGQPVGLAAFLQGYDTEVEHIIPRSLYFDDSYNNKVCACRACNQAKNNRTAYDYMSSLPEETFHRYLDRIKNMHDNKEISDTKYKYLLTKGDEIPQDFLNRQMRESQYISRKAIAMLQEVCHHVYATSGSVTAYLRHVWGWDNVLHDLNRERYRAGGLTEMREIDNRTVECIKDWNKRLDHRHHAIDALAIACTRQGYIQRINTLSKQAEEGDLVSLERYIRQQPHFSYAEVCAAAEKILVSFKAGKRVATKGKRYIYRGGKRILAQEDITVPRGALSEQSVYGQIAQYRKDKKGKVSFSYESVLKYPIESIDTKTLPDVVDAGIRRILQQRLDEHGGNAKKAFATPVYTASGHLIRTVRCFTRLKAVVPVKYDASGKAVGFVKPGNNHHVAIYIDRDGKPQEHIVTFWHAVERKKYGLPVIIERPGEAWDAVTDTMPDSFLEQLPDATWQFRLSMQQNEMFILGMPDELYADALENRDYALLGKYLYRVQKISTKYYCFRHHIETSVDDKYNGKKNEKLSTQMGKYKLISSISALYSQHPHKVKISLTGEICE

SEQ ID NO: 23632 - protein, 1390 aa, unidentified
  REGION 1..1390: note = Cas Enzyme sequence
MKKILGLDLGTTSIGWALVNEKENDNEQSSIIKLGVRVNPLSVDEQSNFEKGKAITTNADRTLKRSARRNLQRFKLRRENLLTLLKEHGFITDETVLCEQGNRTTFETRQLRARAVSEEITLEQLARVLLMINKKRGYKSSRKADSGEDGKLIDGMSVARQLYEQHLTPGQYVLNLLRNGKKYLPDFYPSDLTAELKAVWHAQQAYYPELLTQDLFDALKNKNEKQTWAICAQPFGIKGMKRNGTAAEQKAENYRWRSEALDKKIGLEELAIVLQKINGQIHGTSGYLGAISDRSKELYFNHQTVGQYQMQLLEKDPNTSLKNQVFYRQDYLDEFERIWETQATYHPELTAELKHEIRDIVIFYQRQLKSQKSLVGYCELESKPKEVVVDGKKKTITTGLRVCPKSSPLFQSFKIWQTLNNVQVSGNIIPEKQLDLFGTAATYKYGSRCLTEEEKQTLYKELSLKERMSAAEILKLLFKSGKGLSLNFREVDGNHTMAAFVKACQTIIVMSGHNEYDFAKLSYETVVSTINQIFNALGIKSGFLNFDPCLEGKAFEHQPAYQLWHLLYSYAGDNSATGNEKLITRIAETFGMEHNYAAVFAAITFMPDYGNLSAKAMRRILPYMMDGNEYSVACEYAGYRHSRRSLTKEELDKKPLVDTLPLLPRNSLRNPVVEKILNQMINVVNEVSAQYGKPDEIRIEMARELKKSAKEREQMTADITRATAQQEEYRRILLDEFGMPHVSRNDITRYRLWLELKDNGYKTLYSQTYIPREKLFSKEFDVEHIIPQARLFDDSFSNKTLEARKANLEKSDATAFDYVQSKYGEKGAKEYKERIDYLYADGVISKTKHDKLLMKEADIPEGFINRDLRDSQYIARKAREILESMVRVVVPTTGAVTDRLRDDWQLVDIMKELNWDKYDKLGLTETFKDHDGRQIKRIKDWTKRNDHRHHAMDSLTIAFTKHSFIQYLNNLNARSNKAGSIYAIEQTCLYRDAHGKLRFMPPMPLDVFRAEARRLLQDILVSTKAKNKVVTRNINSIKRRGEKKQTVQLTPRCQLHNETVYGSVRCCVVKEEKISSSFTEEKIATVASPRYREALLKRLGENGGNAKKAFTGRNSLEKNPLYLNDDHTLSVPAKVKTVTYETIFTQRKPIDKDLKVDKVIDEHVKEILEARLKEFGGDAKKAFSNLDDNPIWLNRERGIQIKRVTIRGVSNAVALHDKHDVQGKPMCDSEGRRMPSDYVSTSSNHHVAIFRDANGNLQEHVVSYFEATARAIQHLPIVDRDYNKDEGWQFLFTMKRNEYFVFPNEKTGFDPKEFDLLDPKNYAVISDNLFRVQKITTKDYFFRHHLETSVENNKSLCDITWKRITSLNKLQGIVKVRVNNIGQIVAVGEY

SEQ ID NO: 23633 - protein, 1237 aa, unidentified
  REGION 1..1237: note = Cas Enzyme sequence
MSFRMPNENDWNLQKKKAEKDIDESGMTVGEYIYNALLHNPKQKIKGKLVRVVERKYYKNELQKILESQKRFIPQLSDSALYEKCIKELYQSNEAYRNSISTRNDFTYLFVDNIIFYQRPLKSKKSLIDNCPYESLTYTKDGEEHKAPVKCIAKSHPLYQEFRLWQFISNLRIYQRQKQVGDKVKLDVDVTDEFLPTDDRREALFDYLNDKTEIKQDVLLKEFFNMKKPKGKDSVYPYRWNYVEDKSYPCNVTRGKILAKLNKAGISADFLSSNGNEESLWHILYSVEDKGELRKALARFAAKNGLDDAFTEALADIEPYKKEYGAYSAKALKKLLPLMRLGKYWNYDNIAPATKARISKIIDGEYDENIRNRVREKAMSLTSASQFQGLPLWLACYIVYDRHSERADSGRWPSPEDIDKYLSDFKQHSLRNPIVEQVVTETLRTVRDIWKRYGEISEIHVELGREMKNPADKRSKMNRRMLENENANMRAKLLLTEFMNPEFGIENVRSYSPSQQELLRIYEDGAISNAGSEIDNEISDIMSRLSQVDVKKQPTASEVKRYILWLEQNYRSPYTGQMIPLAKLFTPAYEIEHVIPQSRYFDDSFSNKVICEAEVNKLKDRMLGYEFIKQHKGEKVSLSMGGTVEILSPEEYVRHVESQYKNNKAKMRKLLMDDIPDEFINRQLNDSRYISKLIISLLSNIVREEGEEEATSKNVISCNGSITDRLKKDWGINDVWNHIILPRFRRLNELTGTDKFTTSNKEGHEVPDMPLELQKGFNKKRIDHRHHAMDAIVIACTTRDHVNLLNNEAAMSKNNANRIQLSKKLRRYESVEIEKDGIRKQISVAKEFKKPWEGFTADVERTLRDIVVSFKQNLRVINKTTNYYQHFKDGKKIYSPQSKGDSWAIRKSMHKETVFGEINIRRIKEVSLKEAMKRTKDIADKELRSKIVELMALQYNEKKIKQYFSDNKDEWSDVNPKKIKIHYFTKETNERFFATRKPLDTSFDKKKIKTQVADTAIQKILLNHLSAHGDKAETAFSPDGIDEMNRNIIVLNDGKFHQPILKVRIYEKADKYAVGQQGNKKKKYVEAAKGTNLFFAIYAEEKINEKTGDIVITRTYDSIPLNVVIDREKRGLSPAPENENGASPKYVLSPNDLVYVPNEEERETGRICEPLDKERIYKMVSCTGKECHFVPYSSAKPIYDKVEYFSLNKMGRALSGEMIKEICIPISINRIGEITLR

SEQ ID NO: 23634 - protein, 1521 aa, unidentified
  REGION 1..1521: note = Cas Enzyme sequence
MTKNTRNIIGLDLGTNSIGWSWIQQLISPTPTQPSEYLFDGTPIIRMSGSRIIPMPGDVTGSFERGETISKTKDRTAKRMARRMNERFQLRRERLNRVLNIMGFLPEHYARALDRYGKLNEESNTTIAWRSKEDGKNEFIFYPSFLEMASIFKEHHPDIQRIPLDWTLYYLRSKALHQAITKEELSWVLHSFNQKRGYYQSREDITEEDKTKKVEYIKGVVNSVEDTGEKAKGKKIYKVTFADGTEFTSTKSEAPLWIGRTREIIVTTSLDTSGKPKLDKEGKIIQSAKTPDEKDWTLIKIRTEATIDDSKLTVGEYIFHALLKNPETKIKGAHVSTIDRRFYINEINAILKEQEKYHKELRDKSLYEQCIKALYAQNEVRRNIIAPWSMSDLLIKDILFYHRPLKSKKSQISECPLEFHTYTDKNGATHRQGIKCIPTSHPLFQEYRIWQFIANLRIYERERFDNGKHFINEDKTSDFLTTKKKEELYEWLAEKDSVSQKTLLGRLGLKVERYHWNFPEEKTYPCGETRHLIQSRMKKANLQKAFHSLISDEQKDCFERGLWHILYSVSDYNELCKALKTFARKTGFTLEEQLLFVEAFSSCPPFKKDYGAYSKRAITKLLPLMRIGKFWHEESIDSTTKNRIEHLISGEECSGIDVRVREKVAKAGLCESIEQYQGLPQWLANYVVYNRHSEASEITKWESPDELDNYIRSFKQYSLRNPIVEQVSLETLRVVRDLWTELQKEGQTIDEIHLEMGRDLKNTAEERSRIFRRNSENEDTNFRIKLLLEEFYANEKDIKDVRPYSPSQQELLRIYEEGVWQQEKDIPQDIKDIKKRISNDKDIKDITPNDIQRYRIWMDQKYCSPYTGKTIPLSRLFTTDYEIEHVIPRSRYFDDTYNNKVICESAVNKDKNNRLGMEYIMAAGGKTIELGNGKNVQILKEEEYVELVDKIFGNNTRKRNIMLADEITEEFSHRQLNDTRYIARFMKGILSNIVREKNADGTLEPEETSKNLIVCSGRITDRVKQDWGLNDIWNHIITPRFERLNTKTSSDKFGEYVCKEGKRYFQTRVPLNLQKGFNKKRIDHRHHAMDAIAIACVNRSIVNYLNNAAANQTEREDLRRAVCIPERNGQTKRQLRSPWPCFARDAENALRQIVVSFKQNLRIATKATNSYECFDTASGKKIRKHQSNREHYAIRKPLHKDSVYGEVILTSIASVNLKKALLKAERILDKRLKEKIFELRKLYNYSNKQIEEHLTKVCINRPEWKNYDFKKIAVRILSNDTDATHIVAIRKPLDESFDEVKINTITDTGIQKILLNHLSRYADDPKKAFSPEGIEDMNANIASLNGGKQHLPVYKVRVSEKDNGGYFPIGQKGNRSKKYVTTAKDTNLFFAVYANSNGKRSYKTIDLRTAIECKKQGLSVAPSVNEKGDKLLFTLSPNDLVYMPSEEEGANGFSIKGNLIKEHIYKMVSANDNRCFFIPHTVADFISNGEEYNRHNKIELTEDRRSIKEHCVPLKVNRLGK

SEQ ID NO: 23635 - protein, 1307 aa, unidentified
  REGION 1..1307: note = Cas Enzyme sequence
ETSADRTVFRSSRKNIKKEKKRIGLLKAYFYDEIMKVDENFFIRQDNSTFYPEDKEKVLNGSRNILFDDENYKDADYYNQFPTIYHLRSFLANSKEKADIRLVYLAVSNIMKHRGNFYTKNLEDTSNSVKDIYLNICQLASQSDIHLDEKADIDKLMEILLNPAINNKTKAILAAQTVKALTKQETALIKLMCGLKIKLVDMLPELADSLEESDKKASISFSDNNYLDNVDSIEKLAGEDNFALVSAVKELYDAVIIQNIIQGHKFISDAKMASYEKHMNDLKLLKSVLRNNVTSKEFNKFFRSEEPGTYAAYVKSNNSDGKRTRRGSDKGRTQDDLYSSIKKLLSKADENDSDAEYILDEISKGTFLPKQRITDNKLIPNQLYATELKAILDNAAQYYDFFNEKDESGLTVSERILSIFTFTMPYFVGPTSEYNTRGWVVRKEAGAVMPWNLEEKVDIKESAKNFIENMVGKCTYLSGERVLPKASLLYEKYAVLNEVNNIRVDGEKLPVEVKQEIVNGKLMAGKKLTKKQIHSFLVKKGLADMDSLITGIDEKLNNTMLSHKFFTEVFGTLNKDTEVIAEDIIFWSTIYGTSKIYIKEQIENKYPGKLNAEQMKKVLNFKPNDWGRLSAQFLNMKGTNKETEERISVIDLMWNENINLMELINDERYDFMAVIKEKSKKEVKSIFTFEYDDLNELYATAAQKKSIWAAVKIVREIIKIKGYAPESIFLDTKKMRPKDKKDNRKSRLIDLYRSLKDVSKEWKETMINRIDECDKDGSLKSKKIYLYFLQMGKDIYTWEDINFNVVKTTGDNIYNIDHIYPKHFVKDESLDNIVLTNLEFNREEKKDIYPVPDRIYKAMHENWLILRKNGFMSAEKLARLSDRHPMSDEKRASFIGKSYIQATSSTKMLAEVFNSIFNKDTKIIYAKTQEVADFRKQYGFAKVTIYNDHYLAKDAYLNIVVGNVWYTKFTLSPIWFIEKEYRTGKSEYNLNRMYDFDVVRNDRVAWIAERNKKDIPGTIAVVNKVMARNTPLTVTKTTEGHGGLTNATISKASKAKPGIYLPLKSDERYKDVTKYGGKTSIKTAYAFLVEHTDKKKGRIRTIYTIPLYLALNIKNRVDIEKYCVEELKLIEPNVRMNKIMINSELEIDGYSYLLGGKSVSQFHVANNVPMIFNQEWQTYISKIEKYINAKVVDRAVTVEKNLELYNEILSKHKTDIFLKKKLPVYNMLLTDREKFEKLVLEEQMQILCQILMLTRMGTNLANLSLLGEGSSIGTMNISCNISNYKSAVLVERSITGLYKKRIDLLEV

SEQ ID NO: 23636 - protein, 1154 aa, unidentified
  REGION 1..1154: note = Cas Enzyme sequence
MKNILGLDLGSSSIGWAVIRENSEGQELVAMGSRVVSLTAAELSSFTQGNGVSINSQRTQKRTQRKGYDRYQLRRTLLRNKLDTLGMLPDDSLSHLPKLQLWGLRAKAVTQRIELNELGRVLLHLNQKRGYKSIKSDFSGDKKITDYVKTVKTRYDELKEMRLTIGELFFRRLTENAFFRCKEQVYPRQAYVEEFDCIMNCQRKFYPDVLTDETIRCIRDEIIYYQRPLKSCKYLVSRCEFEKRFYLNAAGKKTEAGPKVAPRTSPLFQVCRLWESINNIVVKDRRNEIVFISAEQRAALFDFLNTHEKLKGSDLLKLLGLSKTYGYRLGEQFKTGIQGNKTRVEIERALGNYPDKKRLLQFNLQEESSSMVNTETGEIIPMISLSFEQEPLYRLWHVLYSIDDREQLQSVLRQKFGIDDDEVLERLSAIDLVKAGFGNKSSKAIRRILPFLQLGMNYAEACEAAGYTHSNNYTKAENEAHALLDRLPAIKKNELRQPVVEKILNQMVNVVNALMEKYGRFDEIRVELARELKQSKEERSNTYKSINKNQRENEQIAKRIVEYGVPTRSRIQKYKMWEESKHCCIYCGQPVDVGDFLRGFDVEVEHIIPKSLYFDDSFANKVCSCRSCNKEKNNRTAYDYMKSKGEKALSDYVERVNTMYTNNQISKTKLQNLLTPVDKISTDFIDRQLRESQYIARKAKEILTSVCYNVTATSGSVTSFLRHVWGWDTVLHDLNFDRYKKVGLTEVIEVNHRGSVIRREQIKDWSKRFDHRHHAIDALTIACTKQAYVQRLNNLRAEEGPDFNKMSLERYIQSQPHFSVAQVREAVDRILVSFRAGKRAVTPGKRYIIRKNRKRISVQSVLIPRGALSEESVYGVIYVWEKDELGHVIQKQRAVMKYPITSINREMLDKEKVVDKRIHRILSGRLAQYNDNPKEAFAKPVYIDKECRIPIRTVRCFAKPAINTLVPLKKDDKGNPVAWVNPGNNHHVAIYRDEDGKYKERTVTFWEAVDRCQVGIPAIVTQPDTIWDNILQRNDISENVLESLPDVKWQFVLSLQQNEMFILGMNEEDYRYAMDQQDYALLNKYLYRVQKLSKGDYNFRYHTETSVEDKYDGKLNLELSRQMGKLKRVSIKSLLGLNPHKVHISVLGEIKEIS

SEQ ID NO: 23637 - protein, 1297 aa, unidentified
  REGION 1..1297: note = Cas Enzyme sequence
MLAENGNRTTFETYRLRAKAAVEEISLEELARVLLMINKKRGYKSSRKVNADDEGKIIDGMDVARKLYDENITPGQYVLDTMRRGKRYIPDFYRSDLIAEFDRIWNFQKQFYPEILTDELREELKNKNKKQTWAICAKSFSLVGIKREPKGNELKKENYQWRVESISKQTDLERLTIILQEINGQISSSSGYLGEISDRSKELYFKRQTIGQYLMERLDTNPNYSLKNKVFYRQDYLDEFEKIWETQAKFHAELTDKLKREIRDVVIFYQRPLKSQKGLISFCEFENRQIEVTVDGKKKLKTIGMRVCPKSSPLFQEFKIWQILNNIQVSGKVVPVQDTDLFGTTSRMEQGKRFLYQDEKETLFYELNIKEKMSKNEVLKLLFKNHKELDLNYKDIEGNRTMAALIKACQTIIDMSGHGEYDFSKMQAKDVMHIIETVFRGLGFNTDILHFDASVEGKAFDKQPAYMLWHLLYSFAGDNSKSGNEKLINKISELYGFDKDYASIIAGINLQQDYGSLSSKAMRKILPHMKEGLEYSVACGYAGYRHSSESLTREELDNKVLKDRLGLLPRNSLRNPVVEKILNQMINVVNSVVEEYGKPDEIRIELARELKKSASEREELTKAINKTTKEHDEYKKILQTEFGIANVSRNDIIRYKLYMELKDNGFKTLYSNTYIPQEKLFSKEFDIEHIIPQAKLFDDSFSNKTIEARAINIEKSNATAYDFVCSKYDSEEIKRYEVRIEELFRKGIISKTKRDKLMMREADIPDGFIERDLRDSQYIAKKAREILCDIAREVVATTGSVTSRLREDWQLVDVMKELNWDKYDRLGLTEIIEDKDGRKIRRITDWTKRNDHRHHAMDALTIAFTKRSYIQYLNNMNARSDKSSSIYAIEKNELYRDNGKLKFCPPIPLDVFRAEAKHHLDNILVSIKAKNKVVTRNLNVTKTRNGKNKKMQLTPRGQLHNETIYGKIKQYATKEERVNASFTEDKIATVAYQKYRMALFERLKRYNGNPKKAFTGSNTLQKNPIFLDDMHTMTVPEKVTTVTFEDVYTIRKEISPDLKIDKVIDVHVREILKVRLAEYGNDPKKAFVNLKDNPIWLNKEKGIDIKRVTIRGVSNAVALHDKHDNKGHFVLDNDGGKQPTDFVSTGNNHHVAIYRDAEGNLQDTIVSFYEATMRANMGIPVVDKDYKKSEGWQFLFTMKQNEYFVFPNQETGFNPNDIDLFNPNNYAEISRNLFRVQKLKKSNGREYMFRHHLETSVDDNNKLQEIAWKRINSLNKLKDIVKVRINHIGQIVAVGEY

SEQ ID NO: 23638 - protein, 1153 aa, unidentified
  REGION 1..1153: note = Cas Enzyme sequence
MKNILGLDLGSSSIGWAVIRENSEEQELVAMGSRVVSLTAAELSSFTQGNGVSINSQRTQKRTQRKGYDRYQLRRTLLRNKLDTLGMLPDDSLSHLPKLQLWGLRAKAVTQRIELNELGRVLLHLNQKRGYKSIKSDFSGDKKITDYVKTVKTRYDELKEMRLTIGELFFRRLTENAFFRCKEQVYPRQAYVEEFDCIMNCQRKFYPDILTDETIRCIRDEIIYYQRPLKSCKYLVSRCEFEKRFYLNAAGKKTEAGPKVAPRTSPLFQVCRLWESINNIVVKDRRNEIVFISAEQRAALFDFLNTHEKLKGSDLLKLLGLSKTYGYRLGEQFKTGIQGNKTRVEIERALGNYPDKKRLLQFNLQEESSSMVNTETGEIIPMISLSFEQEPLYRLWHVLYSIDDREQLQSVLRQKFGIDDDEVLERLSAIDLVKAGFGNKSSKAIRRILPFLQLGMNYAEACEAAGYTHSNNYTKAENEAHALLDRLPAIKKNELRQPVVEKILNQMVNVVNALMEKYGRFDEIRVELARELKQSKEERSNTYKSINKNQRENEQIAKRIVEYGVPTRSRIQKYKMWEESKHCCIYCGQPVDVGDFLRGFDVEVEHIIPKSLYFDDSFANKVCSCRSCNKEKNNRTAYDYMKSKGEKALSDYVERVNTMYTNNQISKTKLQNLLTPVDKISTDFIDRQLRESQYIARKAKEILTSVCYNVTATSGSVTSFLRHVWGWDTVLHDLNFDRYKKVGLTEVIEVNHRGSVIRREQIKDWSKRFDHRHHAIDALTIACTKQAYIQRLNNLRAEEGPDFNKMSLERYIQSQPHFSVAQVREAVDRILVSFRAGKRAVTPGKRYIRKNRKRISVQSVLIPRGALSEESVYGVIYVWEKDELGHVIQKQRAVMKYPITSINREMLDKEKVVDKRIHRILSGRLAQYNDNPKEAFAKPVYIDKECRIPIRTVRCFAKPAINTLVPLKKDDKGNPVAWVNPGNNHHVAIYRDEDGKYKERTVTFWEAVDRCRVGIPAIVTQPDTIWDNILQRNDISENVLESLPDVKWQFVLSLQQNEMFILGMNEEDYRYAMDQQDYALLNKYLYRVQKLSKGDYNFRYHTETSVEDKYDGKLNLELSRQMGKLKRVSIKSLLGLNPHKVHISVLGEIKEIS

SEQ ID NO: 23639 - protein, 1145 aa, unidentified
  REGION 1..1145: note = Cas Enzyme sequence
MKNILGLDLGSGSIGWSVIQEGENNRTILGMGSRIIPLSPDDTTQFTQGKSITKNADRTAFRTQRKGYDRYQLRRHYLTQYLHKLGMLPDERLIKLPQTELWEIRAKAVNEKIELPELGRVLYHLNQKRGYKSGKSDFQDKKSSKYLSEVSERYKKLQEKDITIGQKFYAELKADPTYRCKDRVYPRIAYIEEFDRIMECQRKHHDILTDEHIAHLRNHIIYYQRPLKSCKHLVGECSLAQMTYRLPDGSIKSRPIKVAPKSSPLFQVCKIWESINHINLQRDRERFEITPAHRQALFTHMNSKEKLKINDLYKILGIKKHDGWWGGKAIGNGLQGNTTVIALQNALTGYSRADELLLFELKTCEIEIADPETGEIATQLIIDPAFEQEPLYRLWHTLYSISDTDVLDRILERKFGIKDPEMREKLTQIDFTKSGYGNLSSIAMRRILPYLRQGYVYSEACFMAGYNHSNSITREENLARELAEHLRPITKGELRQPIVEKILNQMVNLVNALIDRYGRFDEIRVELARELQQSREERDKTYKKQLDNQKRNEEIRHHIEEMDLTPTRSRIQKYRMYEESHHLCIYCGQPVGLAAFLQGYDTEVEHIIPRSLYFDDSYNNKVCACRACNQAKNNRTAYDYMSSLPEETFHRYLDRIKNMHDNKEISDTKYKYLLTKGDEIPQDFLNRQMRESQYISRKAIAMLQEVCHHVYATSGSVTAYLRHVWGWDNVLHDLNRERYRAGGLTEMREIDNRTVECIKDWNKRLDHRHHAIDALAIACTRQGYIQRINTLSKQAEEGDLVSLERYIRQQPHFSYAEVCAAAEKILVSFKAGKRVATKGKRYIYRGGKRILAQEDITVPRGALSEQSVYGQIAQYRKDKKGKVSFSYESVLKYPIESIDTKTLPDVVDAGIRRILQQRLDEHGGNAKEAFATPVYTASGHLIRTVRCFTRLKAVVPVKYDASGKAVGFVKPGNNHHVAIYIDRDGKPQEHIVTFWHAVERKKYGLPVIIERPGEAWDAVTDTMPDSFLEQLPDATWQFRLSMQQNEMFILGMPDELYADALENRDYALLGKYLYRVQKIGNNAYVFRYHTETATDDRYDDNGKKIFNLKLSQSLKRVHWISSLKALENIRPHKVKISLTGEISEI

SEQ ID NO: 23640 - protein, 1498 aa, unidentified
  REGION 1..1498: note = Cas Enzyme sequence
MKHILGLDLGTNSIGWAVINAIKEENTQKEQLIGINTAGSRIIPMDAAQLGDFNKGNTVSQTANRTQFRGVRRLYERKKLRRERLHRILQLLGFLPKHYASQLDRYGKFIANSEPKLAWTTNTHEPSYFIFQSSFQEMLNDFLQNNNQVKKVPYDWTLFYLRKKALTQKIEKEELAWILLNFNQKRGYYQLREEETEKASSKTRQYFDSQIVTDITDTGQIYKGLKIFTITLENGEKGKFFSKNMPDWKGQKKDIIAIIDLDKNGNDKYDENGELSRRFKIPTEQEWEEQWELIKTKTQKDLDTSHKTVGAYIYDTLLQTPSQKIRGKLIRTIERKYYKDELNQILKKQEEFHPELRDSNLLEACIEELYPNNEAHRNAIAKYSISQLLIEDILFYQRPLKSKKSLISNCPYEEYTYTNKETGEICTSSLKCIAKSHPLFQEFRLWQFISNLRIYQKEGTINGKFTTDIDVTNQFLKTEDDYANLFDWLNQKKEIRQDTFLKKPAFGLKKNIANYRWNYVEDKTYPCNETHYKILSYWEKAGIEQSALTSEIEEKLWHILYSISDKNELRKALQHFADKNYLSDKFADTFQQIPPFEKDYGSYSAKAIKKLLPLMRIGRYWKAENFDSTTLDRIEKILTGEFEENIKNRTREKTIHLDNLYSFQGLPTWLACYIVYNRHSEIKDVTKWQQPSDIDAFLNAFKQHSLHNPIVEQIIMETLRTVRDIWKQTGHIDEIHVELGREMKNPAEKRRKLTQQIQENENTNLRIKALLTEFANPEFGIENVRPHSPSQQDLLRIYEEEVLNETKDIPEDIAVILKKFNEIDTKKRPSTSDVLRYKCWLEQKYRSPYTGAMIPLGKLFTPAYEIEHVIPQSRYFDDSFTNKVICEAEVNKLKGNMLGYEFIKNNQERIVELGFGQNVKIQTVEAYELFVKEHYSYNRTKMQKLLMEDIPDQFIERQLNDSRYISKLIKSLLSNIVRDEGEEEATSKNVIVCTGSITDRLKKDWGINDVWNKLILPRFIRLNEITESNRFTTTNACNKTIPAMPLDLQKGFNKKRIDHRHHAMDAIVIACANRNIVNYLNNESASKNAKISRQDLRQILCKKTKTDNLGNYQWLIDKPWDTFTQDMYSILSNIIVSFKQNLRIINKTTNHYIHYENGKKVNCSQKQSDSWAIRKPMHKETVYGEINLRRTTTATLKAALENPQRIIEKDLKKKIKELLTQGLNEKQIKKYFEDNKDIWQEINLKKIPVYYFTKETANRFFACRESINTTFNKKKIEEKVADTGIQQILLRHLEQNGNNPEQAFSPEDIEQMNKNIMSLNNGKFHQPIYKVRTYEQADKFAVGQTGNKSTKFVEAAKGTNLFFAIYETAHKRSFASIPLNVVIERLKKGLSPAPENEKGNLPKFILSPNDLVYVPTKEEIENGHINQPIQKDRIYKMVSCTGNQCFFIKSNVANTIIDKYEFSPLNKMERAITGEMIKETCIPIQTDRLGNIITPISL

SEQ ID NO: 23641 - protein, 1454 aa, unidentified
  REGION 1..1454: note = Cas Enzyme sequence
MTKQILGLDIGTNSIGWAVVRGQGDDAQPLQEIVAAGSRVIPVDGGALDKFERGASSKSKAAERTAFRQVRRMIERSHLRRQRLLRVLQVMDYLPPHYARCLDRYGKFLPHTEPKIAWSETADGHYEFLFRDAFDEMIAAFRQRNPEWMARGGKVPYDWTLYYLRTKALSQPVSPYELAWILLSFNQKRGYRPARDFIVNTSLDAQSNTKADKDGRVKRLLRSPKADDWTLLKEKTEDQIARAHQTVGAYIFEALLRNPRQKIRGKLVHTIDRYFYYDELKAILQAQQSYHAALTDPAVLECCVRTLYQKNEGHARQALCHDLTAFLLDDVLFYQRPLKSQKALIANCSFESLTYYDRQTGEEKQAPVKCIPKSHPLYAEFRLWQFLDNLRIYQLEGEVNGKTCFDIDVTRQFLPDREAYARLFKWLYRRKNVSQKNLLKYPPFGLKLTADLYRWNYGQDKSYPCHETWANMQQCLKKAKLSSDFLTPEREEALWHILYSVSDMQELGRALHTFAHKNGLTDDEAERFAAAFQKMEPFAHDYGACSAKALKKLLPLMRRGSYWSEEALAPGVRERIGQLQAGTAGVDLPAKAREALKALHAVSDYQGLPLWLASYVVYNRHAEAKDIVRWQTPADIDHFLLNFRPNELRNPIVELVVRETLRVVRDIWTRYGGFDEIHVELGREMKMPAKQRQKLSKRMLENERTNLRIKMMLACFQNPEFKVDNVRPYSPYQQDILKIYEEYVLHHVKEIPDDIAAILRKFGESTAAKQPSAKEVLRYRLWLDQKYTSPYTGQIIPLGRLFTRDYEIEHIIPQKRYFDDSLNNKVICESAVNKLKSAQLAHEFISQHHGEVVELGNGRTARILELEDYEKRVKEYYAALPRKRRNLLLDEVPEAFIARQLNDTRYISKYVSMLLSNIVRGEDERSVNSTHLIATNGSITTRLKQDWGINDVWNAIVLPRFERLNSTVPPKDGQPAQVYVTRNTQGHPIPNVPLDRQRGFSMKRIDHRHHAMDAIVIACASRNMVNYLNNESARKDAKVSRTDLQHLLCTKTRVDANGQYRWVVNKPWPTFTTDVRHVLENIVASFKQNRRIMSPTVNYFDHYDPATGKKRRQKQTRGEMLAVRMSMHDATFYGEINLSRCVESVSLEQALEQPQRLVDRDLEHKLLALQAKGLNLKQIEALIKEHSKEWSDVDVEKISVYVNSPKKARYFASRTALDKSFTRDFIEQKVADTGIQQILLRHLGHYENAGQAFSPEGIEEMNRHLTELNNGRPHQPIYKVRTYTQGVKSAVGQRNCKAAQFVNGAKGTNLYFAVYEGPEGKSSGCKRSFATFSLRDVLPSLKEGKPVIPEVDKTGKRLKFVLSPLDLVYVPTPEELKRGQVQLPLDKKRIYKMVSCNNARCFWVPVNVASAIVDKLEFSTHNNTARAVTKEREMIKEICLPLDVDRLGNVHLRQ

SEQ ID NO: 23642 - protein, 1516 aa, unidentified
  REGION 1..1516: note = Cas Enzyme sequence
MKNILGLDLGTNSIGWSVIQEKHNDNNECQKLILGAGSRIIPMDAAVLGDFAKGNTISQTKDRTQYRGVRRLRERCLLRRERLFRVLDIMGFLPQHFSNALTRYGKFKDADEEPKIAWRKDDEGKMHFLFADSFNEMIEEFRSVQPELLKRGMKVPYDWTLYYLRKKAMREAVTPFELAWLILSFNQKRGYYQLRGEEEGEADNSKCEEYLAQKVVDVIDTGEKKGKSTWFDIVLENGMVYHRSAEIKPDWIGKTKEFIVTTQFDKDGNPKKDKEGNVKMSFRMPNENDWNLQKKKAEKDIDESGMTVGEYIYNALLHNPKQKIKGKLVRVVERKYYKNELQKILESQKRFIPQLSDSALYEKCIKELYQSNEAYRNSISTRNDFTYLFVDNIIFYQRPLKSKKSLIDNCPYESLTYTKDGEEHKAPVKCIAKSHPLYQEFRLWQFISNLRIYQRQKQVGDKVKLDVDVTDEFLPTDDRREALFDYLNDKTEIKQDVLLKEFFNMKKPKGKDSVYPYRWNYVEDKSYPCNVTRGKILAKLNKAGISADFLSSNGNEESLWHILYSVEDKGELRKALARFAAKNGLDDAFTEALADIEPYKKEYGAYSAKALKKLLPLMRLGKYWNYDNIAPATKARISKIIDGEYDENIRNRVREKAMSLTSASQFQGLPLWLACYIVYDRHSERADSGRWPSPEDIDKYLSDFKQHSLRNPIVEQVVTETLRTVRDIWKRYGEISEIHVELGREMKNPADKRSKMNRRMLENENANMRAKLLLTEFMNPEFGIENVRSYSPSQQELLRIYEDGAISNAGSEIDNEISDIMSRLSQVDVKKQPTASEVKRYILWLEQNYRSPYTGQMIPLAKLFTPAYEIEHVIPQSRYFDDSFSNKVICEAEVNKLKDRMLGYEFIKQHKGEKVSLSMGGTVEILSPEEYVRHVESQYKNNKAKMRKLLMDDIPDEFINRQLNDSRYISKLIISLLSNIVREEGEEEATSKNVISCNGSITDRLKKDWGINDVWNHIILPRFRRLNELTGTDKFTTSNKEGHEVPDMPLELQKGFNKKRIDHRHHAMDAIVIACTTRDHVNLLNNEAAMSKNNANRIQLSKKLRRYESVEIEKDGIRKQISVAKEFKKPWEGFTADVERTLRDIVVSFKQNLRVINKTTNYYQHFKDGKKIYSPQSKGDSWAIRKSMHKETVFGEINIRRIKEVSLKEAMKRTKDIADKELRSKIVELMALQYNEKKIKQYFSDNKDEWSDVNPKKIKIHYFTKETNERFFATRKPLDTSFDKKKIKTQVADTAIQKILLNHLSAHGDKAETAFSPDGIDEMNRNIIVLNDGKFHQPILKVRIYEKADKYAVGQQGNKKKKYVEAAKGTNLFFAIYAEEKINEKTGDIVITRTYDSIPLNVVIDREKRGLSPAPENENGASPKYVLSPNDLVYVPNEEERETGRICEPLDKERIYKMVSCTGKECHFVPYSSAKPIYDKVEYFSLNKMGRALSGEMIKEICIPISINRIGEITLR

SEQ ID NO: 23643 - protein, 1037 aa, unidentified
  REGION 1..1037: note = Cas Enzyme sequence
MEYSDPRDFGFRPETVMTALMPYEQFFSKTRRLILGIDMGIASVGVCLIDIRNHEIILMASHIFKAPVEGKQKDISARQSGASIRRGYRSVRRTTKRRKNRKKAVREIEKKYSLIPDDADGQWFAIRKGEPDVLHLRGKALIYKLNGRELARILYAFADRRGYIDHGKGTTDDDSGKVKKALSENRKILDENGYETIAQYLLKQPTSRNREGDYRYMVDIEMVTDEVHTIFRHQRDLGSDIATEELEGEYLSALRWLTDTSARDKKIYSRVGYCTYLGAPEKRAASSLISFEMVRAYEKLSNIKIEHQGREATYISPEKRNEIVESLFAVSKNPKPLKWSQLREKLGMQSSDSFDSRLPTDEKGDCIKIPAWNALCRGLFTSNRALLDWLHDDTDIADAVCSALTYASSGESLRNALENLSLDLSEQDIDSLLDLPYASKLFSGYCNTGVRALQMLRDAFKDPQIEKLYDAEMATGLYEARQALAAERNESKDGLLCPYLEFDPTCTNPVVLRATAQVRRMINSIIRHYGMPDIIRVEVAKDLKRSKHEKAIIAATNKANKDSNEQVKKDLVAFYGLPNDAHVSSTDFEKMWLYREQFGQDPYTGKGINLERMLNDRDYVEIDHILPFSRSCDDSKSNKVLCLTKSNRDKANRTPYEWMTSGEPSAPDFGDFCGRMDAWAGKGKSAHYTKSKLSKLKNSTFGKEEQKFIDRNLNDTRYMSRQLAMWVRECLPFPDDKRQHVFCVAGAATSLMRRIWGIGVVDEKGKKDRSDDRHHAVDGAVIACCSPEIVKGIARVNSGRSNIKERERLRYESMPYPEFKDQVEAWIPCIVPTRTVSRTATGSLLKDTVYPYVGVDDRGKDLYRRNGKIEPASTLWKDGSGGCKLYDGAYGLMAVFDESMKKSGSWRFDPIYYIDVPNVRQDFIREFTKGLSIDYWPKVQLKGDERRIFLKQGDVLLQDGCAMRYYMYNVSNGVVNSYSKIGEKSVPLQKTGPLSDESFPKQAKWDSSLTVMQEDCLGLCWLKFLSDRVGQFENSPV

SEQ ID NO: 23644 - protein, 1404 aa, unidentified
  REGION 1..1404: note = Cas Enzyme sequence
MKKLKQMSGPYCIGFELSSTAHGFVATDPNGNVLYHEKQPVMGTRVFKEGQHAAEARMPRTSRRGIQRRRGREHEMERVFAPVISPIDPDFFIRRRMSYKLGKIRFESDPIGFSYSRLFHSFPTLAHLDVALMEADSAMDPRLIFEAVANHVVRRGHFLLENQNVSSTNSDIDTQVANYAEVLVSYFEDTLDERIEPSLEALDINGNVTARELQKRFASAMCVSGDDIQKKTEKAQIKAIADLVAGYKADLTALVPDAEKLPKVSISDGDALEEFLSDSCPDSLVSVLMAAQALYTSWKLQGMLSYAPGKSLSHNQVAQYDVYGKQLRMLKNLALKYVAKQDADGNIDEDGFKDYVRFFGGPKCEDRYRYDKVQVKKQDSPKKNMGYTAYNLNVLGYEEFAKRVELLFKDTDAVNDPQYKTMMEAFANHAFLRRIHTVDNAAIPYQLHAEVVNRIIDNQGRFYPWLIDAREHILKVLTSRIPYYVGPLDSTDHGKAGENGTRFAWVKRLAGHEDAFVSPWNYEDHIDIDTTAELFIRRMTGECSYLDGEDVLAKNSLLYEKYCFFNELASLSFTEDGDSWMPFDAGMRKAIYDAASDGKTMTVKRIESVLQRDFFIAHPHVRGTSNPKAMSSKRSNYAYFCRLFDVKALSASDMSMAEDLVLWNTVFEDRDILRRKILKTYGDLLTEKAVDDFCHKRLSGWGKLSERLLTGIWADTASGDLCVMDVLEQGRPYGRYRGSSMNLMQILNDDVLGFKMEIKRLNDSHMQMAEGFDLNALPGSPALRRGVSQAIKVLDDIVSVAGKAPDRIYLKVTRTASNSRKGKRTAKRSDKIKQALKALDADAAADLGAAKLLRELGMFDEKEINERIYLYFHQAGKCLYTGKPIDITRIASNDYYVDHVVPLAYRKDESLDNKVLVYAEASRYKSETLLVSPAVQRKMLPFWRMLRNAGLMSERKLNALIRTEISEGMLKSIIGRQFTENSWEAKLFTAAIAAKYPGTVVIPVKAGVIGAVRSRIGIPKSLKANQFYHAHDALLAAEVGRYMELAKPAFVHNRVKYEQYMRKIKLVNEENKKTPKSQLDFFAGGFFFDRVDKDTGEVYWNKDEEVERIYRACGWKNLRVTYAAFEDGGAFWKQTIYSPREKSKLIATKSDRPAEIYGGYSSQTFANFFVYEVMKKKVKQLRFGAVPAAIASKSDPDTYNAMLEMYARGLAKTAKEKFVRIVRARVLKNTMIELYGERFRIAGEKQVYPVRQMPLAIDEMYLLKGVETIVAAGNAGASARIDFEKAAESLVGFWDLLLEKLPVNYPKLTVQLKLGSLKHPKDILAATSESEFPAIVYKIAEAEIQVMEQASGLRNMSDTKILGGNTFGGSLVFTFNKVLNDPKSKACFIDTTPAGLHEVKTKIW

SEQ ID NO: 23645 - protein, 1499 aa, unidentified
  REGION 1..1499: note = Cas Enzyme sequence
MKHILGLDLGTNSIGWAVINATTDENTHKEQLIGINAAGSRIIPMDAAQLGDFNKGNTVSQTANRTQYRSTRRLHERKKLRRERLHRVLQLLGFLPPHYAAQLDRYGKFIANSEPQLAWVKNTNHLYHFIFQESFQEMLNDFTQADGSAKKIPYDWTLFYLRKKALTQKIKKEELAWILLNFNQKRGYHQLREEETEKPTSKTRLYFDSQTITDIVDTGETYKGLKIFTLTLANGEKGKWYGKNIPDWKGQKKDIIVSIDLDKNGNDKCDESGEPIRRFKIPTEQEWEEQWGLVKAKTEKDLNTSGKKVGTYIYDTLLQAPDQKIRGKLIRTIERKYYKEELYQILTTQEKFHPELQDKNLLQACIEELYPSNEAHRNTISKYSMSKLLVEDVIFYQRPLKSKKSLISDCPYEEHTYVDKETGEIHTVPVKCIAKSHPLFQEFRLWQFLSNLRIYQKEGTLNGKLTTDIDVTNEFLKNADDYVNLFDWLNQKKEIKQDAFFKYPAFGLKKNAANYRWNYVEDKTYPCNETHSRILFHWVKTDIDQSLLTIDLEEKLWHILYSISDKNELQKALQHFADKNKLGHKFVDTFQQIPPFKKDYGSYSAKAIKRLLPLMRMGKYWHPESIDNTTLTHIHQILNGEMDEVTASRIKGKAIHLDNLSSFQGLPTWLACYIVYNRHSEIKNITKWQQPSDIDAYLQSFKQHSLHNPIVEQIIMETLRTVRDIWKQIGHIDEIHVELGREMKNPADKRKKLTQQIQENENTNLRIKALLTEFVNPEFEIENVRPHSPSQQDLLRIYEEEVLNESAKNMPEDIATILKKFNETDAKKRPSTSDVLRYKCWLEQKYRSPYTGAMIPLGKLFTPAYEIEHIIPQSRYFDDSFTNKVICEAEVNKLKGNMLGYEFIKNNSGKIVELGFGQKVKIQTVEDYELFVKEHYSYNPVKMKKLLMEDIPEQFIQRQLNDSRYISKFIKSLLSNIVREEGESEATSKNIIVCTGGVTDRLKKDWGVNDVWNKIILPRFLRLNEITNSNLFTTTNTNNKIIPTMPLALQKGFNKKRIDHRHHAMDAIVIACANRNIVNYLSNESASKNAKISRLDLRQILCTRTKPDTFGNYQWIINKPWETFTQDVHTILENMIVSFKQNLRIINKTTNHYFRYQNGKKVQCVQETGDCWAIRKPMHKETVYGEINLRKITTVPLKSALENPQRIVEKDLKKKIKELLQQGLNEKQIKKYFEENKDTWQDVNLKKIQFYSFTKEGKERFFASRESLDTSFNNKKIEEKVADTGIQQILLHHLEQNNNDPNQAFSPEGIEWMNKNIISLNNGKWHQPIYKVRTYEQAEKFTVGQTGNKSEKFVEAAKGTNLFFAIYETEHKRSFASVSLNVVIERLKKGLSLAPENSKGNLPKHVLSPNDLVYVPTQEEIKCGHINQPIQKDRIYKMVSCTEGECHFIPYFVANPIIQTIELGSNNKAQKSWQNEMIKEICIPIKIDRLGNITSSISL

SEQ ID NO: 23646 - protein, 1394 aa, unidentified
  REGION 1..1394: note = Cas Enzyme sequence
MKKILGLDLGTTSIGWALVKEAEIEEEKSSIIKLGVRVNPLTVDEQSNFEKGKAITTNADRTLKRTARRNLQRYKLRRENLLSVLKENGFITDDSVLCEQGNRTTFETRLLRSKAATEKISLDELARVLIMINKKRGYKSSRKVNSGEEGSLIDGMAVARKLYDEHLTPGQYVYQLLCRGKKYIPDFYPSDLNAEFEAVWNCQKQFYADIFTDELREALRSKNEKQTWAICAEPLGLKGIKRNGSTADQRVENYRWRTEAISKQMPLEQVAVVLQKINGQIAGTSGYLGAISDRSKELYFNHQTVGQFQMKQLSDNPNISLKNQVFYRQDYLDEFERIWETQAKYHSQLTAELKHELRDIVIFYQRPLKSQKGLISYCEFESRQKEMVVDGKKKTITIGLRVCPKSSPLFQCFKIWQTINNLQVTGEVVPKTQTDLFGDSTECEHGTRTLTEEEKCDLYRELSIKESLSETEILKLLFGSKKGLSLNFRKVEGNRTMALFVRACQTVLAINGYNDYDFSKMSYDKAMPIITQVFEALGFNTSFLTFDPTLDGKDFERQTAYQLWHLLYSYSGDNSATGNEKLIERLCAILNMDRDSAAVFASITFEPDYGSLSAKAMRRILPHMMDGLEYSVACEYAGYRHSRRSLTKEEIAAKPLVETIPLLPRNSLRNPVVEKILNQMINVVNAVNDRYGKPDEIRIEMARELKKNAKEREQMTRDIARTNAENEKYRKALQEEFGIQNVSRNDIIRYRLYLELEANGFKTLYTQTYIPREKLFSKEFDIEHIIPQARLFDDSFSNKTLEARSANIEKGSTTAYDFVLTKYGEQGNNGSVKYKERIDSLYKEGVISKTKHDKLLMTTAEIPNGFINRDLRDTQYIARKAREILESAVRVVVPTTGAVTDRLREDWQLVDVMKELNWDKYDQLGLTEIYKDPDGRQIRRIKDWTKRNDHRHHAMDALTIAFTRHSFIQYLNNLNARSDKAGSIYAIEKKELYRDNNNKLRFVPPMPLGEFRAEARRHLEDVFVSIKAKNKVVTRNVNITRGADGKKHRTVQLTPRCQLHNETIYGSRRRYVVKQEKVSSAFNEEKISTIGNPQIREALLRRLSEFGGDAKKAFTGKNSLEKNPIYLDDSHTKQVPQKVKTVTLEEVFTIRKPIDKDLNVEKVVDLRVRKLLQERLAEYGGDAKKAFANLDENPIWLNRELGIAIKRVTIYGVSNATALHDKRDMHGKKMLDSNGISIPVDYVSTSNNHHVAIFRDKDGNLQEHVVSFFEATERAQQQLPIVDYEYNKHLGWQFLFTMKRNEYFVFPNEKTGFDPNEVDLLDPKNAAEISKNLFRVQKLATKNYCFRHHLETSSETPKELSGITYKWQLGLKGIVGIVKVRVNHLGEIVAVGEY

SEQ ID NO: 23647 - protein, 1144 aa, unidentified
  REGION 1..1144: note = Cas Enzyme sequence
SSSIGWSVIRENSEEQELVAMGSRVVSLTAAELSSFTQGNGVSINSQRTQKRTQRKGYDRYQLRRTLLRNKLDTLGMLPDDSLSHLPKLQLWGLRAKAVTQRIELNELGRVLLHLNQKRGYKSIKSDFSGDKKITDYVKIVKTRYDELKEKRLTIGELFFRRLTENAFFRCKEQVYPRQAYVEEFDCIMNCQRKFYPDILTDETIRCIRDEIIYYQRPLKSCKYLVSRCEFEKRFYLNAAGKKTEAGPKVAPRTSPLFQVCRLWESINNIVVKDRRNEIVFISAEQRAALFDFLNTHEKLKGSDLLKLLGLSKTYGYRLGEQFKTGIQGNKTRVEIERALGNYPDKKRLLQFNLQEESSSMVNTETGEIIPMISLSFEQEPLYRLWHVLYSIDDREQLQSVLRQKFGIDDDEVLERLSAIDLVKAGFGNKSSKAIRRILPFLQLGMNYAEACEAAGYTHSNNYTKAENEAHALLDRLPAIKKNELRQPVVEKILNQMVNVVNALMEKYGRFDEIRVELARELKQSKEERSNTYKSINKNQRENEQIAKRIVEYGVPTRSRIQKYKMWEESKHCCIYCGQPVDVGDFLRGFDVEVEHIIPKSLYFDDSFANKVCSCRSCNKEKNNRTAYDYMKSKGEKALSDYVERVNTMYTNNQISKTKLQNLLTPVDKISTDFIDRQLRESQYIARKAKEILTSVCYNVTATSGSVTSFLRHVWGWDTVLHDLNFDRYKKVGLTEVIEVNHRGSVIRREQIKDWSKRFDHRHHAIDALTIACTKQAYVQRLNNLRAEEGPDFNKMSLERYIQSQPHFSVAQVREAVDRILVSFRAGKRAVTPGKRYIIRKNRKRISVQSVLIPRGALSEESVYGVIYVWEKDELGHVIQKQRAVMKYPITSINREMLDKEKVVDKRIHRILSGRLAQYNDNPKEAFAKPVYIDKECRIPIRTVRCFAKPAINTLVPLKKDDKGNPVAWVNPGNNHHVAIYRDEDGKYKERTVTFWEAVDRCQVGIPAIVTQPDTIWDNILQRNDISENVLESLPDVKWQFVLSLQQNEMFILGMNEEDYRYAMDQQDYALLNKYLYRVQKLSKGDYNFRYHTETSVEDKYDGKLNLELSRQMGKLKRVSIKSLLGLNPHKVHISVLGEIKEIS

SEQ ID NO: 23648 - protein, 1140 aa, unidentified
  REGION 1..1140: note = Cas Enzyme sequence
MKNILGLDLGSGSIGWSVIQEGENNRTILGMGSRIIPLSPDDTTQFTQGKSITKNADRTAFRTQRKGYDRYQLRRHYLTQYLHKLGMLPDERLIKLPQTELWEIRAKAVNEKIELPELGRVLYHLNQKRGYKSGKSDFQDKKSSKYLSKVSERYKELQEKDITIGQKFYAELKADPTYRCKDRVYPRIAYIEEFDRIMECQRTHHDILTDEHIAHLRNHIIYYQRPLKSCKHLVGECSLAQMTYRLPDGSIKSRPIKVAPKSSPLFQVCKIWESINHINLQRDRERFEITPAHRQALFTHMNSKEKLKINDLYKILGIKKHDGWWGGKAIGNGLQGNTTVIALQNALTGYSRADELLRFELKTCEIEIADPETGEIATQLIIDPAFEQEPLYRLWHTLYSISDTDVLDRILERKFGIEDPEMREKLTQIDFTKSGYGNLSSIAMRRILPYLRQGRVYSEACSIAGYNHSNSITREENLARELAEHLRPITKGELRQPIVEKILNQMVNLVNALIDRYGRFDEIRVELARELQQSREERDKTYKKQLDNQKRNEEIRHHIEEMDLTPTRSRIQKYRMYEESHHLCIYCGQPVGLAAFLQGYDTEVEHIIPRSLYFDDSYNNKVCACRACNQAKNNRTAYDYMSSLPEETFHRYLDRITNMHDNKEISDTKYKYLLTKGDEIPQDFLNRQMRESQYISRKAIAMLQEVCHHVYATSGSVTAYLRHVWGWDNVLHDLNRERYRAGGLTEMREIDNRTVECIKDWNKRLDHRHHAIDALAIACTRQGYIQRINTLSKQAEEGDLVSLERYIRQQPHFSYAEVCAAAEKILVSFKAGKRVATKGKRYIYRGGKRILAQEDITVPRGALSEQSVYGQIAQYRKDKKGKVSFSYESVLKYPIESIDTKTLPDVVDAGIRRILQQRLDEHGGNAKEAFATPVYTASGHLIRTVRCFTRLKAVVPVKYDASGKAVGFVKPGNNHHVAIYIDRDGKPQEHIVTFWHAVERKKYGLPVIIERPGEAWDAVTDTMPDSFLEQLPDATWQFRLSMQQNEMFILGMPDELYADALENRDYALLGKYLYRVQKISTKYYCFRHHIETSVDDKYNGKKNEKLSTQMGKYKLISSISALYSQHPHKVKISLTGEICE

SEQ ID NO: 23649 - protein, 1153 aa, unidentified
  REGION 1..1153: note = Cas Enzyme sequence
MKKILGLDLGSSSIGWAVIRENSEEQELVAMGSRVVSLTAAELSSFTQGNGVSINSQRTQKRTQRKGYDRYQLRRTLLRNKLDTLGMLPDDSLSHLPKLQLWGLRAKAVTQRIELNELGRVLLHLNQKRGYKSIKSDFSGDKKITDYVKTVKTRYDELKEKRLTIGELFFRRLTENAFFRCKEQVYPRQAYVEEFDCIMNCQRKFYPDVLTDETIRCIRDEIIYYQRPLKSCKYLVSRCEFEKRFYLNAAGKKTEAGPKVAPRTSPLFQVCRLWESINNIVVKDRRNEIVSISAEQRAALFDFLNTHEKLKGSDLLKLLGLSKTYGYRLGEQFKTGIQGNKTRVEIERALGNYPDKARLLQFNLQKESSSMVNTETGEIIPMISLSFEQEPLYRLWHVLYSIDDREQLQLVLRQKFGIDDDEVLERLSAIDLVKAGFGNKSSKAIRRILPFLQLGMNYAEACEAAGYTHSNNYTKAENEAHALLDRLPAIKKNELRQPVVEKILNQMVNVVNALMEKYGRFDEIRVELARELKQSKEERSNTYKSINKNQRENDQIAKRIVEYGVPTRSRIQKYKMWEESKHCCIYCGQPVDVGDFLRGFDVEVEHIIPKSLYFDDSFANKVCSCRSCNKEKNNRTAYDYMKSKGEKALSDYVERVNTMYTNNQISKTKLQNLLTPVDKISTDFIDRQLRESQYIARKAKEILTSVCYNVTATSGSVTSFLRHVWGWDTVLHDLNFDRYKKVGLTEVIEVNHRGSVIRREQIKDWSKRFDHRHHAIDALTIACTKQAYIQRLNNLRAEEGPDFNKMSLERYIQSQPHFSVAQVREAVDRILVSFRAGKRAVTPGKRYIRKNRKRISVQSVLIPRGALSEESVYGVIYVWEKDEQGHVIQKQRAVMKYPITSITREMLDKEKVVDKRIHRILSGRLAQYNDNPKEAFAKPVYIDKECRIPIRTVRCFAKPAINTLVPLKKDDKGNPVAWVNPGNNHHVAIYRDEDGKYKERTVTFWEAVDRCRVGIPAIVTQPDTIWDNILQRNDISENVLESLPDVKWQFVLSLQQNEMFILGMNEEDYRYAMDQQDYALLNKYLYRVQKLSKGDYSFRYHTETSVEDKYNGKPNLKLSMQMGKLKRVSIKSLLGLNPHKVHISVLGEIKKIS

SEQ ID NO: 23650 - protein, 1508 aa, unidentified
  REGION 1..1508: note = Cas Enzyme sequence
MKKILGLDLGTNSIGWAVINASQKEDNTDSLQNISSCGSRIIPMDAAILGDFDKGNSKSQTAERTRLRGVRRLLERSLLRRERLHRVLSLMGFLPKHYARQIDRYGKFIPDSEPKLPWIKTENGKYQFIFQDSFLEMLTDFQLRHPELIANGKKVPYDWTIYYLRKKALTQKISKEELAWLILNFNQKRGYYQLRGEEEEEDSKKRVEYYALRVVSVENTGEKKGKDTWYNVHLENGWIYRRSSNVPLDWSGKIKEFVVSTELDETGNPKVDKDGNVKRSFRAPKEDDWNLLKKKSESILDQSKLTVGTYIYESLLNVPNQKIRGKLIRTIERKYYKEELKTILEVQKNFHPELNDRELYYACVNELYPSNESHREILSTHDFTYLLIEDMLFYQRPLKSKVSLIADCPYEARIYKDKEGNKCSVTLKCIAKSHPLFQEFRLWQFISNLRIYQREKKIGTSLKTDVDVTSEFLRNEDDYVALFDWLYEQKNITQKELLKYKPFQLKKNEQINYRWNYVEDKPYPCNETRWAITNRLEKIGISSSFLTKEMEESLWHILYSITDKQEIEKALQTFADKHQLDTAFVSAFAKMPPFEKEYGAYSQKAIKKLLSLMRMGKYWSEKNIDPKTQERIEKILSGVCDETIRMRVRDLAFHLQEITSFKGLPLWLACYVVYDRHSESKNNNKWEKPSDIDDYLNAFKQHSLRNPIVEQVITETLRTVRDIWKQEGKLDEIHIELGREMKNPADKRAKMTAQALENENINLRIKALLTEFMNPEFEIENVRPYSPSQQEILRIYEDFALSNEPNIPEDVALILKKFRESDVNKRPTRSEVLRYKLWLEQKYRSPYTGRIIPLGKLFTPAFEIEHIIPQSRYFDDSLTNKVICESAVNKLKDNSLGYEFIQKHHGEKVSLGNGEEATIFSVEDYEAFVKQHYAANRAKMEKLLLEDIPEKFIERQLNDSRYISKVVKSLLSNIVREENEQEAISKNVIVCTGGITDRLKRDWGIMDIWNKIILPRFQRLNKLQGTNDFTTISAQGHEIPAIPLYLQKGFNKKRIDHRHHAMDAIIIACANRNIVNYLNNASALKGSTITRYDLQHILCEKTKSDATGNYQWVLRKPWETFPQDVYQALKGIVVSFKQNLRIINRTTNHYLHYDATGKKVLVKQTKGDSWAIRQPMHKDTVFGEVNLRMKKTVSLNEALKQITSIVDKDLKHKLQELIKNQYDVKQINKYFEEQADVWQDINLKKIEVYYYTQETKDRYFATRKPLDTSFDRKKIKESVTDTGIQKILLNHLERNQGKAEIAFSPDGIDQMNQDIISLNDGKSHQPIYKVRYYEKADKFAIGKAGNKSRKFVEAAKGTNLFFAVYETTEEDKKTGNLIKKRSYASIPLNVVISRQKRGLPSAPENKNGDSPVFVLSPNNLVYVPKQEELNAGDIQFPIDRNRIYKMVSSTGSQCFFIKQNIANMIWDKNEFSSLNKMEKAITGEMIKEVCIPLRVDRLGNISLLNQTE

SEQ ID NO: 23651 - protein, 1153 aa, unidentified
  REGION 1..1153: note = Cas Enzyme sequence
MKNILGLDLGSNSIGWAVIRENSEERELVAMGSRVVSLTAAELSSFTQGNGVSINSQMTQKRTQRKGYDRYQLRRTLLRNKLDTLGMLPDDSLSYLPKLQLWGLRAKAVTQRIELNELGRVLLHLNQKRGYKSIKSDFSGDKKISDYVKSVKTRYDELKEMRLTIGELFFRRLTENAFFRCKEQVYPRQAYVEEFDCIMNCQRKFYPDILTDETIRCIRDEIIYYQRPLKSCKYLVSRCEFEKRFYLNAAGKKTEAGPKVSPRTSPLFQVCRLWESINNIVVKDRRNEIVFISAEQKVALFDFLNTHEKLKGSDLLKLLGLSKTYGYRLGEQFKTGIQGNKTRVEIERALGNYPDKARLLQFNLQKESSSMVNTETGEIIPMISLSFEQEPLYRLWHVLYSIDDRVQLQSVLRRKFGIDDDEVLERLSAIDLVKAGFGNKSSKAIRHILPFLQLGMNYAEACEAAGYNHSNNYTKAENEARALLDRLPVIKKNELRQPVVEKILNQMVNVVNALMEKYGRFDEIRVELARELKQSKEERSNTYKSINKNQRENEQIAKRIVEYGVPTRSRIQKYKMWEESKHCCIYCGQPVDVGDFLRGFDVEVEHIIPKSLYFDDSFANKVCSCRSCNKEKNNRTAYDYMKSKGEKALSDYVERVNTMYTNNQISKTKWQNLLTPVDKISTDFIDRQLRESQYIARKAKEVLTSICYNVTATSGSVTSFLRHVWGWDTVLHDLNFDRYKKVGLTEVIEVNHRGSVIRREQIKDWSKRFDHRHHAIDALTIACTKQAYIQRLNNLRVEEGPDFNKMSLERYIQSQPHFSVAQVREAVDRILVSFRAGKRAVTPGKRYIRKNRKRISVQSVLIPRGALSEESVYGVIHVWEKDEQGHVIQKQRAVMKYPITSINREMLDKEKVVDKRIHRILSGRLAQYNDNPKEAFAKPVYIDKECRIPIRTVRCFAKPAINTLVPLKKDDKGNPVAWVNPGNNHHVAIYRDEDGKYKERTVTFWEAVDRCRVGIPAIVTQPDTIWDNILQRNDISENVLESLPDVKWQFVLSLQQNEMFILGMNEEDYRYAVDQQDYALLNKYLYRVQKLSKGDYSFRYHTETSVEDKYNGKPNLKLSMQMGKLKRVSIKSLLGLNPHKVHISVLGEIKEIS

SEQ ID NO: 23652 - protein, 1433 aa, unidentified
  REGION 1..1433: note = Cas Enzyme sequence
MKTILGLDLGCNSIGWALVNEAENTEEVSSIIKLGVRVNPLTVDEMQNFEKGKSITTNADRTLKRSMRRNLQRYKLRRDTLIEVLKEHGFITDSTLLSEHGNKTTFETYRLRAKAAVEEVSLEEFARVLLMINKKRGYKSSRKAKGSEDGILIDGMDVARKLYEEDLTPGELCLQMLETGKRTLPDFYRSDLQDEFDRIWNFQKQFNPELFCDIAKEEIRSKNRSQTWAVLAKYFVWSEKETVWNEEEARTEEIMKEYKLVGLKRDTKGNDLKLENYSWRVQALSKQLNPEIIAIVLQEINGQISASSGYLGAISDRSKQLYFNRQTVGQYLMSELEKDPNVSLRNRVFYRQDYLDEFDRIWERQAEFHEELTVELKKEIRDIIIFYQRRLKSQKGLISFCEFEKREVIVEKDGRKQNKTVGCRVIPRSHPLFQEFKIWQTLNDIEVFAWDKQSKRKKADKSSTLFDNSEEPLLVEGKRSLYQEEKELLAKELFVKESMKKAEVLKLLFENFQELDMNFKQIDGNHTGFALFSAYSKMIEKYGYEPVDFKKPADEIIEKLETIFTNLGWNTELLSIDLSKEDKELERQSYFRLWHLLYSFEGDNTPTGNGKLLEKIMQLCDVEKEYAVELANVSFQEDYGSLSAKAIKKILPYLKEGNQYDVACDYAGYRHSKSSLTKDEIENKILKDKLEILPKNSLRNPVVEKILNQMVNLINTIIDTYGKPDEIRVELARELKKNAKEREELTKSIARNTREHDEIRQLLRTEFGMMNVSRNDIIRYKLYEELKDNGYKTLYSNEYIPREKIFSKEIDIEHIIPQARLFDDSLSNKTLEYRAINIEKGNKTAYDFVKEKYGDDGLEKFLNRCEALFKDKKTKLRKLKMEEKDIPEGFIDRDLRNTQYISKKALAMLNEISHRVVATTGVITDKLREDWQLVDLMKELNLPKYEKLGMVEMLEDKDGRKIKKITDWTKRNDHRHHAMDALTVAFTKDVFIQYYNNKNAAWMPASKEHANIIGIKARYFENGKALAPMPLAQFRAEAKRHLENLLVSIKAKNKVITSNVNRTKKKNGENRKLQQTPRGQLHLETVYGSHRQYATKMEKVNATFDVAKIATVSKLAYRNALLKRLEAFGNDPKKAFTGKNTLEKNPLYLDEKQTEMVPEKVQTVEFETVYTIRKPIDPNLSIDKVIDVKIRSVLEKRLKEYGGDAKKAFVNLDENPIWLNAAKGISIKRVSIRGISNAQSLHEKKDKDGNLILDKEGRKKPVDFVNTGNNHHVAIYKKPVLDKMGQIVLDEEGNPKYELDEVVVSFFDAVTRANLGQPIIDKDYRRSEGWQFLFSMKQNEYFVFPNEKTGFNPKEVDLLNPENYAMISPNLFRVQKFAYKNYVFRHHLETTIKDTSSTLKGITWTDFRSSKGLDKIVKVRVDHIGQIVSLGEY

SEQ ID NO: 23653 - protein, 1126 aa, unidentified
  REGION 1..1126: note = Cas Enzyme sequence
GNRDFTYLFLEDILFYQRPLKSKKSLIDNCPYEENQGLDKETGEIKSFPVKCIAKSHPLFQEFRLWQFIINLRIYRKDLAQDVDVTNELLKTEEDYVTLFDWLNGKKEIDQKAFLKYPVFGLKKEIENYRWNYVQDKPYPCNETRLLMLARLEKCDISIEFLTKENEEALWHILYSVEDKNEIVKALQKFADKHDLNASFVDVFQKFPPFKKEYGSYSAKAIKKLLPLMRMGKYWSENSIDKGTRERIDKIITGEYDEKIENRVREKAIHLADVSDFKGLPLWLVCYIVYGRHSEAKEIIQWKSPADIDSYLRSFKQHSLRNPIVEQIIIETLRVVRDIWKQVGNIDEIHVELGREMKNPADKRKKMTQQMSENENTNLRIKYLLTEFLNPEYEVENVRPYSPSQQDILRIYEEGVLNSVSDLPEEISDILKKFTETDLKKRPSRSEVLRYKLWLEQKYRSPYTGEVIPLGKLFTPAYEIEHVIPQSCYFDDSFSNKVICEAEVNKLKSNLLGHEFIVKHHGEIVELPFGKKVRIFTVDEYEQFVKDNYSRTRGKMKKLLMDDIPEEFVARQLNDSRYISKVVKSLLSNIVREKGEEEAISKNVIPCTGGVTDRLKKDWGINEVWNKIILPRFQRLNELTGTNKFTTKNVGIQEIPTMPLELQKGFNKKRIDHRHHAMDAIIIACANRNIINYLNNESATAKAELSRYDLQKMLCDKAKTDNNGNYKWVIRKPWASFTQDTYLALENIIVSFKQNLRVINKATNRFLHYNEEGKKIFVKQGKGDNWAIRKSMHKDTVFGEVNLRRIKTVALNEAMKNPQSIVVKDFKRKLLELWNLGFDAKRIKKYFEDNRETWSDINLSKIEVYYFSKDTKDRFFATRKPLDTSFDRKKIENNITDTGIQKILLRHLELKDNNPDIAFSPDGIDEMNRNIIQLNNGKYHQPIIKIRWYEQADKFAVGQTGNKSSKFVEAAKGTNLFFAVYESNILDKKTNTIIKKRNYATIPLNVAIERQKQGLPVAPEDENGNDPIFVLSPNDLVYLPTDDELANGIIAQPLDRGRIYKMVSSSGEQCFFIKHIVANVLVDKFEFSPLNKMERALTGEMIKMICISIKVDRLGNVLESSSSHKK

SEQ ID NO: 23654 - protein, 986 aa, unidentified
  REGION 1..986: note = Cas Enzyme sequence
LKEYVKAYVPEKYSHIFNENSDKVSNYLSYSGYSSKNPVMKKCDQETFCDFLRKQLPKELLDEKYAQMYKEIETSSFMPKAVTKDNSVIPMQLNRAELEAILSNAKNYLPFLADRDSSGKTVSEKIIDIFKYRIPYYVGPLNKHSEKSWLVRTGEKIYPWNFENVVDADNSAEKFINNLTSKCTYLPKEDVIPKNSLLYSAFTVLNEINNIKIDGEEISVELKQGIYKDLFEKSNKVKVFDLKKYLASNGYMNIEITGIDTTIKGSLKPFIDLQNIDLSYSDKEEIIKSVTIFGDDKKLLKNRLKRLYGDRLTADDIKKISKLKYTGWSRLSEKLLTGIEAVLPSTGEYTNIIHALWETNDNLMQLLSSNYDFRKKIDEENGDSTFTSLREEIDNLYVSPKIKRPIYQAMQIVEEIVKIQGHDPKKIFIEVARDEGEKKRTVSRKQKLIELYKYCKKDEQKLYEQLCNTDENDFRRDALYLYYTQLGKCMYTGKPIELSEIYNNNIYDIDHIFPRSKIKDDSLNNRVLVLKAENAKKGNIYPINSSIRNNMLPFWKTLFDKGLISKEKFERLVRNQPLTDEELSSFVSRQLVETRQSTKAVAQLLKKRYHDTAVEYIKASLVSDFRQENDFVKSRDVNDFHHAKDAYLNIVVGNVYTVRSHLAHFIDNVQSGKWSVNKMFDYTTNGAWIVENNKSINIVKSNMAKNNIRFTRYAFKQTGGLFDQNPLKKGLGQVPRKKDMDIDKYGGYNKPSSAYFAFVEYKNSKGEIVRSFEPVDLYAEKEYIRNPQEFIKRKLGVDYVKIIIPCVKYNALISINGFRMHISSKSSGGANLICKPAVQLVVSQEQEKYIKKISSYLAKCAELRKEKEITSFDGITEKDNADLYEALKHKTNHTIYNVKFSKLANILIDKQCEFEGLSLYEQCYILMQIINILHANVMSGDLSAIGEAKKSGVTTISNKMQPSYKTVKLINQSISGLFEQEIDLLK

SEQ ID NO: 23655 - protein, 1153 aa, unidentified
  REGION 1..1153: note = Cas Enzyme sequence
MKNILGLDLGSSSIGWSVIRENSEEQELVAMGSRVVSLTAAELSSFTQGNGVSINSQRTQKRTQRKGYDRYQLRRTLLRNKLDTLGMLPDDSLSYLPKLQLWGLRAKAVTQRIELNELGRVLLHLNQKRGYKSIKSDFSGDKKITDYVKSVKTRYDELKEMRLTIGELFFRRLTENAFFRCKEQVYPRQAYVEEFDCIMNCQRKFYPDILTDETIRCIRDEIIYYQRPLKSCKYLVSRCEFEKRFYLNAAGKKTEAGPKVSPRTSPLFQVCRLWESINNIVVKDRRNEIVFISAEQKVALFDFLNTHEKLKGSDLLKLLGLSKTYGYRLGEQFKTGIQGNKTRVEIERALGNYPDKKRLLQFNLQEESSSMVNTETGEIIPMISLSFEQEPLYRLWHVLYSIDDREQLQSVLRQKFGIDDDEVLERLSAIDLVKAGFGNKSSKAIRRILPFLQLGMNYAEACEAAGYNHSNNYTKAENEARALLDRLPAIKKNELRQPVVEKILNQMVNVVNALMEKYGRFDEIRVELARELKQSKEERSNTYKSINKNQRENEQIAKRIVEYGVPTRSRIQKYKMWEESKHCCIYCGQPVDVGDFLRGFDVEVEHIIPKSLYFDDSFANKVCSCRSCNKEKNNRTAYDYMKSKGEKALSDYVERVNTMYTNNQISKTKWQNLLTPVDKISTDFIDRQLRESQYIARKAKEILTSVCYNVTATSGSVTSFLRHVWGWDTVLHDLNFDRYKKVGLTEVIEVNHRGSVIRREQIKDWSKRFDHRHHAIDALTIACTKQAYIQRLNNLRAEEGPDFNKMSLERYIQSQPHFSVAQVREAVDRILVSFRAGKRAVTPGKRYIRKNRKRISVQSVLIPRGALSEDSVYGVIHVWEKDEQGHVIQKQRAVMKYPITSINREMLDKEKVVDKRIHRILSGRLAQYNDNPKEAFAKPVYIDKECRIPIRTVRCFAKPAINTLVPLKKDDKGNPVAWVNPGNNHHVAIYRDEDGKYKERTVTFWEAVDRCRVGIPAIVTQPDTIWDNILQRNDISENVLESLPDVKWQFVLSLQQNEMFILGMNEEDYRYAMDQQDYALLNKYLYRVQKLSKSDYSFRYHTETSVEDKYDGKPNLKLSMQMGKLKRVSIKSLLGLNPHKVHISVLGEIKEIS

SEQ ID NO: 23656 - protein, 1404 aa, unidentified
  REGION 1..1404: note = Cas Enzyme sequence
MKKLKQMSGPYSIGFELSSTAHGFVATDPNGNVLYHGKQPVMGTRVFKEGQHAAEARMPRTSRRGIQRRRGREHEMERVFAPVISPIDPDFFIRRRMSYKLGKIRFESDPIGFSYSCLFHSFPTLAHLDVALMESDSAMDPRLIFEAVANHVVRRGHFLFENQNVSSTNSDIDTQVANYAEVLVSYFEDTLDERIELSLEALDINGNVTARELQKQFASAMCVSGDDIQKKTEKAQIKAIADLVAGYKADLTVLVPDAEKLPKVSISDGDALEEFLADSCPDSLVPVLMAAQALYTSWKLQGMLSYAPGKSLSHNQVAQHDVYGKQLRMLKNLALKYVAKQDADGNIDEDGFKDYVRFFGGPKCEDRYRYDKVQVKKQDSPKKNMGYTAYNLNVLGYEEFAKRVELLFKDTDAVNDPQYKTMMEAFANHAFLRRIHTVDNAAIPYQLHAEVVNRIIDNQGRFYPWLIDAREHILKVLTSRIPYYVGPLDSTDHGKAGENGTRFAWVKRLAGHEDAFVSPWNYEDHIDIDTTAELFIRRMTGECSYLDGEDVLAKNSLLYEKYCFFNELASLSFTEDGDSWMPFDAGMRKAIYDAASDGKTMTVKRIESVLQRDFFIAHPHVRGTSNPKAMSSKRSNYAYFCRLFDVKALSASDMSMAEDLVLWNTVFEDRDILRRKILKTYGDLLTEKAVDDFCHKRLSGWGKLSERLLTGIWADTASGDMCVMDVLEQGRPYGRYRGSSMNLMQILNDDVLGFKMEIKRLNDSHMQMAEGFDLNALPGSPALRRGVSQAIKVLDDIVSVAGKAPDRIYLKVTRTASNSRKGKRTAKRSDKIKQALKALDADAAADLGAAKLLRELGMFDEKEINERIYLYFHQAGKCLYTGKPIDITRIASNDYYVDHVVPLAYRKDESLDNKVLVYAEASRYKSEILLVSPAVQRKMLPFWRMLRNAGLMSDRKLNALIRTEISEGMLKSIIGRQFTENSWEAKLFTAAIAAKYPGTVVIPVKAGVIGAVRSRIGIPKSLKANQFYHAHDALLAAEVGRYMELAKPAFVHNRVKYEQYMRKIKLVDEENKKAPKSQLDFFAGGFFFDRVDKDTGEVYWDKDEEVERIYRACGWKNLRVTYAAFEDGGAFWKQTIYSPREKSKLIATKSDRPAEIYGGYSSQTFANFFVYEVMKKKVKQLRFGAVPAAIASKSDPDTYNAMLEMYARGLAKTAKEKFVRIVRARVLKNTMIELYGERFRIAGEKQVYPVRQMPLAIDEMYLLKGVETIVAAGNAGPSARIDFEKAAESLVGFWDLLLEKLPVNYPKLTVQLKLGSLKHPKDILAATSESEFPAIVYKIAEAEIQVMEQASGLRNMSDTKILGGNTFGGSLVFTFNKVLNDPKSKACFIDTTPAGLHEVKTKIW

SEQ ID NO: 23657 - protein, 1509 aa, unidentified
  REGION 1..1509: note = Cas Enzyme sequence
MKTILGLDLGTNSVGWAVINSVIKEQAERIWIEMAGSRIIPMDAAVLGDFDKGNSISQTSERTRLRGARRLRERQLLRRERLHKVLNILGFLPNHYLEYIDFEKHPGKFLADAEPKLAWVKDEQGKYTFLFQAAFDEMLADFAIHQPSLVSGDKKIPYDWTIYYLRKKALTEMISKEELAWILLNFNQKRGYYQLRGEEEEDNAGKSVEFYALKVLTVEATDEKKGRDVWYNVHLENGWIYRRSSSVPLDWEGQVKEFIVTTDLNPDGTPKLDKYGEVKRSFRAPKEDDWMLIKKRTEADIANTHKTVGAYIYDTLLQKPQQKIIGKLVKTVERKLYRDELSLILQKQCAFHAELQDRALYARCVEALYPSNEVRRKNIANRDFVYLLMDDILFYQRPLKTKKSLIANCPYEENEYVDRETGEIKKAPLKCIAKSHPLFQEFRLWNFLSNIRIYQKEKEINGTLHLDVDVTAEFLKTEDDYVALFDWLNSRKEIEQKTFLKYPKFGLKKEISNYRWNYVEDKQYPCNETRHAILSSLEKANVCIDFLSNEKEVALWHILYSVSDKQEIEKALRTFAAKNGLDESFVEAFKKFPPFKSEYGAYSAKAIKKMLPLMRCGKYWDVSSIDDTTKERIKKIVTGEYDERISVKVRDKVMNLSDISCFRRLPLWLACYIVYNRHSEDKEAVKWESPADIDAYLASFKQHSLRNPIVEQVITETLRVVRDIWKQVGRIDEIHIELGREMKNPADKRKRMTAQILENENANLRIKALLAEFMNPEYEIENVRPYSPSQQEILRIYEDTVLHAEDQLPEEIDAILKKFNSSKVPTKSEFLRYKLWLEQKYRSPYTGELIPLGKLFTAAYEIEHVIPQSRYFDDSFSNKVICESAVNKLKDNQLGYEFIKNHHGQKVEVGFGKSVEIFSVDSYERFVKEQYAKSAVKMKKLLMDDIPEQFIERQLNDSRYISKVIKGLLSNIVREKNDSGEYEPEAVSKNIVVCTGSVTDRLKRDWGMNDVWNSIVYPRFERLNSLTDTQSFGHWENKSGKKVFQTELPLEYQKGFSKKRIDHRHHAMDAIVIACATRNHVNYLSNESASRNAKISRYDLQRLLCDKSRTDDNGNYKWVIKKPWDTFTQDAREVLSKIVVSLKQNLRIINKTTNVYRHFDATVNRVYQKQKTGDSWAIRKPMHKDTVFGAVNLRKVKVVRLSVALDTPAMIVDKRVKNKVFELLSYKYDKKRIEKYFKENAFLWKELDLAKVAVYYFTEATTEPLVAVRKPLDSTFNEKKIKESVTDTGIQKILLNHLCTKEGKPDLAFSAEGIEEMNRNLLQLNNGKSHQPIYKVRVYEPRGNKFSVGVLGNKGTKWVEAAKGTNLFFAIYITEDGKRTYETIPLNVVIEREKQGLVPVPDRNEKGDKLLFWLSPNDLVYLPTEEEREFGRINEPIDRGRIYKMVSCTGNEGHFIPANVANPIVPVIELGSNNKAQRAWTNEMIKDICIPIKVDRLGHIIEVKYRIDE

SEQ ID NO: 23658 - protein, 1166 aa, unidentified
  REGION 1..1166: note = Cas Enzyme sequence
MENGFTYRLGLDIGIASVGAAVVQTNSFDKPCHLTEPNVRTFPAAECRENGKYYGKSAAVPRRECRSTRRRIKRKQLRMNCIKQTLQKAGLIDIDEFMKRYSDGTLPNVYQLRYEGLDRLLTDDEFAQILIHIAKHRGFLSTRRADKKDKESGAILAATSANQKLMMEKGYRTVGEMMYLDESFHTPCSSNEQEFIVTPRNKAKDYKHTIYRSMLVDEVHVLFDAQRKLGNTKATETLESEYLEIMTRQRSYDLGPGLQADGTKSPFAMDGYKSNAGECTFYKEETRAAKGTYTAELSITLQKINNLKLVDRYGDGRFLTDEEKQKILEYISKHKTMKYKTVKTLLGIDPMIRFNLLNYGKKKKTKKESDDKTKDDSTKKKSTKKSKTKAETSEKTDKDSNKEETELERINRIEDTVFVSMEFTLSYTDCLKTRIKTLSETEKRDLFDEVGELLTSYKTDEARIEKLSNLGLTSEEIDHLLDLNPKGYARLSHKAMKEIEPYLVQGLTYDKACTAAGLDFQVTYTGEKMKYLKGPEINNIINNIQSPVVRRSVAQTVRIINAIIRKYGSPQAVNVELSREMSKSFLERKKAETAMELRHKENVKFCEEIKKLGINSPNGEDITRYRLWKDQNGICLYSGEKIPTRAMFTREYEIDHIIPYSISLDDRYQNKVLVKAKENQTKGNRLPYEYFGHDKTRWAAYENRVESLIKSDGKKAHLLKKNYTKEDQREFTERNLNDTRYATTVVYNMILQYLYLEPYNCDGKTKQVYAVNGAVTAYLRKRWGLNKKDRTNDRHHAMDAVVIACCTDEMIAKVTKYMQDRETAYSKNFRIADEETGEILTRSNFTREQYDEAYGVRFPVPWETFREEIDLRIFNDDPFGYLMKDRNLQIKIDYPDWMYGEEESPVAKGKYINYIRPMFVSVACSHKATGRAHEETIRSAKYHDSDSLVISKKALKDLKLDKDNEIKDYYNKECDPLLYEALRNRLLEYNGDGKKAFAEEFHKPKADGSDGPVVKSVKVIEKKTTGVQINHGLAGNGNMVRVDLYQKEGKYYAVPIYISDMVKKEIPRKAATGGKQYKDWRVMNPDDFLFSVYPRDLLHLKKWKPFNDGLSNDIYMYFAGLDPASASFAVTAHDSSISLRGIGIQNLELIEKCQVDMLGEIHVCRQ

SEQ ID NO: 23659 - protein, 1433 aa, unidentified
  REGION 1..1433: note = Cas Enzyme sequence
MKTILGLDLGCNSIGWALVNEAENTEEVSSIIKLGVRVNPLTVDEMQNFEKGKSITTNADRTLKRSMRRNLQRYKLRRDTLIEVLKEHGFITDSTLLSEHGNKTTFETYRLRAKAAVEEVSLEEFARVLLMINKKRGYKSSRKAKGSEDGILIDGMDVARKLYEEGLTPGELCLQMLEAGKKNLPDFYRSDLQNEFDRIWNFQKRFNPELFCDAVKEEVRGKNRSQTWAILAKFFVWSEKESVWNEEEARTEEIMKEYKLVGLKRDTKGNELKLENYRWRVQALSEQLNPEIVAIVLQEISGQISASSGYLGAISDRSKQLYFNRQTVGQYLMSELEKDPNVSLRNRVFYRQDYLDEFDKIWEKQAEFHEELTAKLKKEIRDIIIFYQRRLKSQKGLISFCEFEKREVIVEKDGRKLNKTVGCRVIPRSHPLFQEFRIWQTLNDIEVFAWDKQSKRKKADKSSTLFDNTEDALLVEGKRSLYQEEKELLAKELFVKESMKKAEVLKLLFENFQELDMNFKQIDGNHTGFTLFSAYSKMIEKYGYEPVDFKKPADEIIEKLETIFTNLGWNTELLSIDLSKEDKELDRQPYFRLWHLLYSFEGDNTPTGNGKLLEKIMQLCDVEKEYAVELANVSFQEDYGSLSAKAIKKILPYLKEGNQYDVACDYAGYRHSKSSLTKDEIENKILKDKLEILPKNSLRNPVVEKILNQMVNLINTIIDTYGKPDEIHVELARELKKNAKEREELTKSIARNTREHDEIRQLLRTEFGMMNVSRNDIIRYKLYEELKDNGYKTLYSNEYIPREKIFSKEIDIEHIIPQARIFDDSLSNKTLEYRAINIEKGNKTAYDFVKEKYGDDGLEKFLNCCEALFKNKKTKLRKLKMEEKDIPEGFIDRDLRNTQYISKKALAMLNEISHRVVATTGAITDKLREDWQLVDLMKELNLPKYEKLGMVEMLEDKDGRKIKKITDWTKRNDHRHHAMDALTVAFTKDVFIQYYNNKNAAWMPASKEHANIIGIKARYFENGKALAPMPLAQFRAEAKLHLENLLVSIKAKNKVITSNVNRTNKKNGENRKLQQTPRGQLHLETVYGSHRQYATKIEKVNATFDVAKIATVSKLAYRNALLKRLEAFGNDPKKAFTGKNTLEKNPLYLDEKQTEMVPEKVQTVEFETVYTIRKPIDPNLSIDKVIDVKIRSVLEKRLKEYGGDAKKAFVNLDENPIWLNEAKGISIKRVSIRGISNAQSLHEKKDKDGNLILDKEGRKIPVDFVNTGNNHHVAVYKKPVLDKVGQIVLDEEGNPKYELDEVVVSFFDAVTRVNLGQPIIDKDYRRSEGWQFLFSMKQNEYFVFPNEKTGFNPKEVDLLNPENYALISPNLFRVQKFAYKNYVFRHHLETTIKDTSSTLKGITWTDFRSSKGLDKIVKVRVDHIGQIVSLGEY

SEQ ID NO: 23660 - protein, 1404 aa, unidentified
  REGION 1..1404: note = Cas Enzyme sequence
MKKLKQMSGPYSIGFELSSTAHGFVATDPNGNVLYHGKQPVMGTRVFKEGQHAAEARMPRTSRRGIQRRRGREHEMERVFAPVISSIDPDFFIRRRMSYKLGKIRFESDPIGFSYSRLFHSFPTLAHLDVALMESDSAMDPRLIFESVANHVVRRGHFLLENQNVSSTNSDIDTQVANYAEVLVSYFEDTLDERIEPSLEALDINGNVTARELQKRFASAMCVSGDDIQKKTEKAQIKAIADLVAGYKADLTALVPDAEKLPKVSISDGDALEEFLSDSCPDSLVSVLMAAQALYTSWKLQGMLSYAPGKSLSHNQVAQYDVYGKQLRMLKNLALKYVAKQDADGNIDEDGFKDYVRFFGGPKCEDRYRYDKVQVKKQDSPKKNMGYTAYNLNVLGYEEFAKRVELLFKDTDAVNDPQYKTMMEAFANHAFLRRIHTVDNAAIPYQLHAEVVNRIIDNQGRFYPWLIDAREHILKVLTSRIPYYVGPLDSTDHGKAGENGTRFAWVKRLAGHEDAFVSPWNYEDHIDIDTTAELFIRRMTGECSYLDGEDVLAKNSLLYEKYCFFNELASLSFTEDGDSWMPFDAGMRKAIYDAASDGKTMTVKRIESVLQRDFFIAHPHVRGTSNPKAMSSKRSNYAYFCRLFDVKALSASDMSMAEDLVLWNTVFEDRDILRRKILKTYGDLLTEKAVDDFCHKRLSGWGKLSERLLTGIWADTSSGDMCVMDVLEQGRPYGRYRGSSMNLMQILNDDVLGFKMEIKRLNDSHMQMAEGFDLNALPGSPALRRGVSQAIKVLDDIVSVAGKAPDRIYLKVTRTASNSRKGKRTAKRSDKIKQALKALDADAAADLGAAKLLRELGMFDEKEINERIYLYFHQAGKCLYTGKPIDITRIASNDYYVDHVVPLAYRKDESLDNKVLVYAEASRYKSETLLVSPAVQRKMLPFWRMLRNAGLMSERKLNALIRTEISEGMLKSIIGRQFTENSWEAKLFTAAIAAKYPGTVVIPVKAGVIGAVRSRIGIPKSLKANQFYHAHDALLAAEVGRYMELAKPAFVHNRVKYEQYMRKIKLVNEENKKTPKSQLDFFAGGFFFDRVDKDTGEVYWNKDEEVERIYRACGWKNLRVTYAAFEDGGAFWKQTIYSPREKSKLIATKSDRPAEIYGGYSSQTFANFFVYEVMKKKVKQLRFGAVPAAIASKSDPDTYNAMLEMYARGLAKTAKEKFVRIVRARVLKNTMIELYGERFRIAGEKQVYPVRQMPLAIDEMYLLKGVETIVAAGNAGASARIDFEKAAESLVGFWDLLLEKLPVNYPKLTVQLKLGSLKHPKDILAATSESEFPAIVYKIAEAEIQVMEQASGLRNMSDTKILGGNTFGGSLVFTFNKVLNDPKSKACFIDTTPAGLHEVKTRIW

SEQ ID NO: 23661 - protein, 1509 aa, unidentified
  REGION 1..1509: note = Cas Enzyme sequence
MKKILGLDLGTNSVGWAVINSVINDEGKEQLVNISSCGSRIIPMDAATLGDFDKGNSKSPVAERTRLRGVRRLLERSLLRRERLHRVLSVMEFLPEHYASQLDRYGKFLPEREPKLAWYQDETGKYRFLFQDSFNEMLEDFRQHHPELVAEGKKIPYDWTIYYLRKKALSQKITKEELAWILLNFNQKRGYYQLRGEEEKEDNKKSVEYYALKVVAVEDSGDRKGKDIWYNVKLENGWVYRRASSVPLDWVGKIKEFIVTTDLDEKGNPKKDKDGNVKRSFRAPKEDDWGLLKTRTQAQIDESGQTVGTYIYESLLRMPDQKIRGKLVRTIERKYYKDELRKILVKQSEFHAALQDHNLLLACIEELYPNNEAHRRLLSTSDFIYFLVEDILFYQRPLKSQKGLIDDCPYESHVYRDKKDGNLQHVPLKCVSKSHPLFQEFRLWQFLASLRIYQREKQVDGSLKLDVDVTNEFLQSEDDYVKLFDWLNDRKDIDQKTFLAYKPFGLKKNELSQYRWNYVEDKSYPCNETRADMVSRLNKAGVPEEFLTREKEEALWHILYSISDKKELTKALGTFAEKNGLNETFVEIFSKMPPFESDYASYSLKAIRKLLALMRMGKYWDEQAIDEQTRSRIEKILTGEYDETIRTRVREKAMHLTDMSSFRGLPLWLACYVVYDRHSEAKELVKWETPDDIDHFLRKFKQHSLRNPIVEQVIMETLRTVRDIWRQEGRIDEIHVELGREMKNPSKERARITAQVLENENTNLRIKALLTEFMNPEFEIENVRPYSPAQQEILRIYEEGVLSGVAEKDLPDDIASILKKFRENDVKKRPTTSEVLRYKLWLEQRYRSPYTGRIIPLGKLFTPAYEIEHVIPQSRYFDDSFTNKVICESAVNKLKDNCLGYEFIKKHSGEKVELGNGETATIFSVEEYERFVKDSYLGNSKKMKKLLLEDIPDNFIERQLNDSRYISKVVKSLLSNIVCEEGEQEGMSKNVIVCTGGVTDRLKKDWGVQDVWNRIILPRFLRLNKITDSTDFTSVSTNGHLLPAVPLHLQKGFNKKRIDHRHHAMDAIVIACAGRNIVNYLNNASARKGSEISRYDLQHLLCDKVKTDANGNYKWILRKPWETFTQDVYVALTDIVVSFKQNLRVINRTTNHYQHYNEDGEKKMIPQTKGDRWAIRKPMHKDTVYGEVNLRKEKTLPLKDVLNNPSIVVDKSLKNKLYELLKSQYDLKAITKYFETHQDVWADVNLKKIKVYYFTKETNERFFATRKSLDSSFNQKKIEEEVTDTGIQKILLRHLQQNGNNPDIAFSPDGVERMNQNMTILNNGKWHQPIYKVRTYEKADKFAVGESGNKVKKFVEAAKGTNLFFAVYESMQEDEATGKQVRKRTFATIPLNEVIKRKKQGLSVAPEDSKGNLPIFVLSPNDLVYLPTEEERNSGKIIQPLDRERIYKMVSCTGNRLFLVPYMVASSIYDKNEYTSLNKVELSDDKISIKEWCIPIEVDRLGNISIQNY

SEQ ID NO: 23662 - protein, 1510 aa, unidentified
  REGION 1..1510: note = Cas Enzyme sequence
MKRILGLDLGTNSIGWAIINKSFDNEGNELLCGIEAAGSRIIPMDATILGDFNKGNKVSQTKNRTQARSVRRMYERQHLRRERLHRVLSVLGFLPPHYSQQLDRYGKFLPDKEPKLAWYINDAGKSHFLFQDSFQEMLDVFRKYNPSVIIGSHKVPYDWTIYYLRKKALCKKIKKEELAWILLNFNQKRGYFQLRDEEEEQVSTKTRQYFDRQQVVDIIDTQEVYKGLKIIQVVLANGTQGKIFKKEIPDWIGQIKDIIVTVDIDKDGKDKYDEDGSLSCRFKVPSETEWETEWKLIKEKTQHDLEASGKSVGEYIFDTLLHNPTQKIRGKLVRTIERKYYKEELYRILSKQKEFHDELNDKQLYERCLEELYPNNPAHKNLMATHDLPYFLINDVLFYQRPLKSKKSLIDNCSFEGHEYIDRETNERKFSPIKCIAKSHPLFQEFRLWQFVSNLRIYQKEKEIDGRLMTDVDVTQEFLRDEEDYVALFDWLNGKKEIKQEQFLKYPTFGLKKKANQYRWNYVEDKPYCCNETRSLMLVRLEQAGIPLTFLTREREEALWHILYSVSNKQELKQALASFAGKNGLNKNFVEIFVNTPAFEKSYGSYSAKAIKKLLPLMRMGHYWKEENIDVHTLERINKILSGEYDENIKNRVREKAIHLEDLSSFRGLPLWLASYIVYDRHSEVKEACQWKSPQDIDEYLKAFKQYSLRNPIVEQVVLETLRTVRDIWKQIGTIDEIHVELGREMKNPAEKRKKMAQKMLENENTNLRIKALLVEFMNPELGIENVRPYSPSQQDLLRIYEEGAWNASNADDKMHDEMLSILKKFNESDSKKRPTSSDIKRYRLWLEQKYRSPYTGAVIPLSKLFTPAYQIEHVIPKALYFDDSFSNKVICESEVNKLKDKQLGYEFIKKHHGEKVQLSLGGVVEIFSVDAYEQFIKENYSQNSAKMKKLLMDEIPEQFTERQMNDSRYISKLVVSLLSNIVRNEEEQETQSKNVVVCTGGVTDRLKKDWGVNDVWNKIILPRFERMNQQTGTSDFTSVNSNGHTIPAMPLDLQKGFNKKRIDHRHHAMDAIVIACASRNIVNYLNNQSAGEHGKISRYDLQHLLCTKVQDGNGYQWVINKPWKTFTQDVYETLRNVIVSFKQNLRVINKTSNYYQRKENGRTILSKQDKGDNWAIRKSLHKETVFGEVNLRKTGSTSLKVVLTNPKVVVDKDLKNKLIELIQQGFNEKQIKNYFEEHKDSWQDVNLKKIPVYFFTKDTQEHYFASRKLLDDTFKQDSIKESITDTGIQTILLKHLKEEGNDPKVAFSPEGIERMNKNIVHLNNGHQHQPIYKVRKYEKGDKFAVGARGNKSSKFVEAAKGTNLFFAIYEQEQVEKSNGEIVKKRTFATIPLNVVISRQKQGKSSAPADENGNLPLFVLSPNDLVYVPTREELKNGQLPDNPHPDRIYKMVSSSGNQCFFIQYGVSSMLWDKNEFSALNKMERAITGEMIKEICIPLNINRLGHITYRL

SEQ ID NO: 23663 - protein, 1209 aa, unidentified
  REGION 1..1209: note = Cas Enzyme sequence
MKKILGLDLGTNSIGWAVVNSENDENGDEKIKCIEAAGSRIIPMDAATLGDFAKGNTKSQTKERTDARGIRRLHERHLLRRERLNRVLSVMGFLPEHYDNALTRYGKFKDDKECKIAWKRNDDGKWTFIFMDSFNEMLSDFAACQPDWLAGGKKVPYDWTIYYLRKKALSRALTKQELAWLLLNFNQKRGYYQLRGEDEQSDDKGKLVEYYAVKVVDVKDTGEKKGKDTWFDVILENGMVYHRPAAEAPDWIGKTKEFIVTTDVEKDGTPKKDKDGNIKRSFRMPKEDDWTLIKKKTESDIDSSGKTVGEYIYDSLLADPTQKIKGKLVRTVERKYYKSELKRILDSQKRFIPELNDRTLYTACIEELYESNDAYRQSIVSYDFTYLFVDNIIFYQRPLKSKKSLIDNCPYESRSYVDKETGEVKTAPVKCVAKSNPLFQEFRLWQFISNIRIYERQKIVDGHLKADVDVTGEFIKDEDDVVRLFDFLNDRKEIKQDTLLSTYFKVKKPKGKDSSYPYRWNYVEDKTYPCNETRALMLKGLKDAGVDEAFLDKTNEYRLWHILYSVDDKQEIKKAMATFVCKYNKDEENKRKDKNNKAITLDDRFVEAFSALPPFKKEYGSYSEKAIRRLLPLMRMGKYWNVEAIDASTRVRINNIIDGVYDETIMTRVREKAVNLTDVSHFRGLPLWLACYVVYNRHSEAKDVSRWNSPDDIDRYLSSFKQHSLRNPIVEQVITETLRTVRDIWRQYGRIDEIHVEMGRDLKNPADVRAKMSKRVAENENANLRIKALLTEFVNPDFEIDNVRPYSPSQQDMLRIYEEGVLESMDEVPDYISEIISKFSQTDEKKRPTHAEMIKYKLWLDQKYQSPYTGRTIPLARLFTDDYQIEHVIPKARYFDDSMSNKVICEAEVNQLKDRLLGYEFIKAHHGEKVSVSIGDPVTVLSVEEYEQLVQRNFRKNPMKMKKLLMDDIPDGFVERQLNDSRYISKVVKSLLSNMVREKDECEATSKNVITCNGAITDRLKREWGVSDAWNRIVLPRFERLNRITGTSQFTTPSANGHLIPDMPLNLQKGFNKKRIDHRHHAMDAIVIACTTRSHVNLLSNEAAMSKNKSTFYQLSHKLRRYESVIVTRNGETRTMSVAREFFKPWPTFTVDVEKALRNIIVSFKQNLRVINKTTNKYQCIENGKKRLKSQVKGDSWAILCIRTLFMAR

SEQ ID NO: 23664 - protein, 919 aa, unidentified
  REGION 1..919: note = Cas Enzyme sequence
LVSRCEFEKRFYLNAAGKKTEAGPKVAPRTSPLFQVCRLWESINNIVVKDRRNEIVFISAEQRAALFDFLNTHEKLKGSDLLKLLGLSKTYGYRLGEQFKTGIQGNKTRVEIERALGNYPDKKRLLQFNLQEESSSMVNTETGEIIPMISLSFEQEPLYRLWHVLYSIDDREQLQSVLRQKFGIDDDEVLERLSAIDLVKAGFGNKSSKAIRRILPFLQLGMNYAEACEAAGYTHSNNYTKAENEAHALLDRLPAIKKNELRQPVVEKILNQMVNVVNALMEKYGRFDEIRVELARELKQSKEERSNTYKSINKNQRENEQIAKRIVEYGVPTRSRIQKYKMWEESKHCCIYCGQPVDVGDFLRGFDVEVEHIIPKSLYFDDSFANKVCSCRSCNKEKNNRTAYDYMKSKGEKALSDYVERVNTMYTNNQISKTKLQNLLTPVDKISTDFIDRQLRESQYIARKAKEILTSVCYNVTATSGSVTSFLRHVWGWDTVLHDLNFDRYKKVGLTEVIEVNHRGSVIRREQIKDWSKRFDHRHHAIDALTIACTKQAYIQRLNNLRAEEGPDFNKMSLERYIQSQPHFSVAQVREAVDRILVSFRAGKRAVTPGKRYIRKNRKRISVQSVLIPRGALSEESVYGVIYVWEKDEQGHVIQKQRAVMKYPITSITREMLDKEKVVDKRIHRILSGRLAQYNDNPKEAFAKPVYIDKECRIPIRTVRCFAKPAINTLVPLKKDDKGNPVAWVNPGNNHHVAIYRDEDGKYKERTVTFWEAVDRCRVGIPAIVTQPDTIWDNILQRNDISENVLESLPDVKWQFVLSLQQNEMFILGMNEEDYRYAMDQQDYALLNKYLYRVQKLSKGDYSFRYHTETSVEDKYNGKPNLKLSMQMGKLKRVSIKSLLGLNPHKVHISVLGEIKKIS

SEQ ID NO: 23665 - protein, 1424 aa, unidentified
  REGION 1..1424: note = Cas Enzyme sequence
MKRILGLDLGTNSIGWALVNEAETDEEVSSIIRLGVRVNPLTVDETQNFEKGKSITTNAERTLKRSMRRNLQRYKLRRDALVEFLKELGFITDETILSEQGNRTTFETCRLRANAAEEEISLEELSRVLLMINKKRGYKSSRKVKKEEDGVLIDGMEIAKKLYEEDLTPGQLCSQLLESGKKVLPDFYRSDLQEELDRIWSVQKQFHPDVFCDAAKEEIKGKNRSQTWAILANYFVWKEEVVGWNDREAKNETIEKECKLVGLKRTTKGYELKKENYRWRAQALTEQLGLEEIAVVLQEINGQINASSGYLGAISDRSKVLYFNHQTVGQYQMAELDKNPHASLRNMVFYRQDYLDEFDRIWEKQAEFHKELTAELKKEIRDMIIFYQRRLKSQKGLISFCEFERLEIVVEKDGKKQTKVIGCKVIPRSHPLFQEFKVWQTLNDIKVLGREKKRNALSASESRALYPEEKEILARELAIKENMKKADVLKLLFENPQELDLNFKQIDGNRTGFSLFSAYSKMIEKYGYEPLDFKKPADEIIGQLRTIFTDLGWNTNLFTIDLTKEGKELEMQPYFRLWHLLYSFEGDNTSTGNGKLIEKIMQLCGVEKEYAVELASLSFQDDYGSLSAKAIKRILPYLKEGNLYDVACEYAGYRHSKSSLTKEEIENKVLKGKLEVLPKNSLRNPVVEKILSQMVNVINTIIDTYGKPDEIRVELARELKKSAKEREELTKAIAKSTREHEEIRKLLQDEFGMMNVSRNDIIRYKLYEELKDNGYKTLYSNQYIPKEKIFSKEIDIEHIIPQSRLFDDSLSNKTLEYKAINIEKGNKTAYDFVKEKYGEEGLQQYINRCESLFNDKKAKLRKLKMEQKDIPDGFIDRDLRNTQYIAKKALAMLNEICRRVVATTGSITDQLREDWQLVDVMKELNLPKYEALGFVETYEDKDGRKIKRIKDWTKRNDHRHHAMDALTVAFTKDAFIQYFNNKNAAQDSGNRNHTNIIGIKTRYFDKGRALPPIPLEQFRIEAKQHLEKLLVSIKAKNKVVTVNVNRTKKRKGENTKIQQTPRGQLHLETVYGSHKQYVTKIEKVNASFDAAKIATVSKRAYRNALLKRLETFGNDPKKAFTGKNALEKNPLYADKYQTIRVPEKVQTVEFETIYTIRKPVDPALNVDKVVDVKVRAILERRLKEYGGDPKKAFVNFWENPIWLNKEKGISIKRVSIRGINNAQSIHVKKDKNGNPIWDENGKQIPVDFVNTGNNHHVAIYRKPVLDKKGQVTFDEDGNLMYELDEVVVPFFEAVTRANLGLPIIDKDYRKSEGWQFLFSMKQNEYFVFPNEKTGFNPKEVDLLNPDNYAMISPNLFRVQTMSKVMYGNNVVRDYKFRHHLETTVKDMKELKDIAYKLYKTLSFGNSVVKIRINHIGQIVSVGEY

SEQ ID NO: 23666 - protein, 1144 aa, unidentified
  REGION 1..1144: note = Cas Enzyme sequence
MKNILGLDLGSGSIGWSVIQEGENNRTILGMGSRIIPLSPDDTTQFTQGKSITKNADRTAFRTQRKGYDRYQLRRHYLTQYLHKLGMLPDERLIKLPQTELWEIRAKAVNEKIELPELGRVLYHLNQKRGYKSGKSDFQDKKSSKYLSEVSNRYKELQEKDITIGQKFYAELKADPTYRCKDRVYPRIAYIEEFDRIMECQRKHHDILTDEHIAHLRNHIIYYQRPLKSCKHLVGECSLAQMTYRLPDGSIKSRPIKVAPKSSPLFQVCKIWESINHINLQRDRERFEITPAHRQALFTHMNSKEKLKINDLYNILGIKKHNGWWGGKAIGNGLQGNTTVIALQNALTGYSRADELLRFELKTCEIEIADPETGEIATQLIIDPAFEQEPLYRLWHTLYSISDTDVLDRILERKFGIEDPEMREKLTQIDFTKSGYGNLSSIAMRRILPYLRQGYVYSEACFMAGYNHSNSITREENLARELAEHLRPITKGELRQPIVEKILNQMVNLVNALIDRYGRFDEIRVELARELQQSREERDKTYKKQLDNQKRNEEIRHHIEEMDLTPTRSRIQKYRMYEESHHLCIYCGQPVGLTAFLQGYDTEVEHIIPRSLYFDDSYNNKVCACRACNQAKNNRTAYDYMSSLPEETFHRYLDRIKNMHDNKEISDTKYKYLLTKGDEIPQDFLNRQMRESQYISRKAIAMLQEVCHHVYATSGSVTAYLRHVWGWDNVLHDLNRERYRAGGLTEMREIDNRTVECIKDWNKRLDHRHHAIDALAIACTRQGYIQRINTLSTQAEEGDLVSLERYIRQQPHFSYAEVCAAAEKILVSFKAGKRLATKGKRYIYRGGKRILAQEDITVPRGALSEQSVYGQIAQYRKDKKGKISFSYESVLKYPIESIDTKLPDVVDAGIRRILQQRLDEHGGNAKKAFATPVYTASGHLIRTVRCFTRLKAVVPVKYDASGKAVGFVKPGNNHHVAIYIDRDGKPQEHIVTFWHAVERKKYGLPVIIERPGEAWDAVTDTMPDSFLEQLPDATWQFRLSMQQNEMFILGMPDELYADALENRDYALLGKYLYRVQKIGNNAYVFRYHTETATDDRYDDNGKKIFNLKLSQSLKRVHWISSLKALENIRPHKVKISLTGEISEI

SEQ ID NO: 23667 - protein, 1361 aa, unidentified
  REGION 1..1361: note = Cas Enzyme sequence
MKEVYNIGLDIGTSSVGYAMTDEKGRLLRFHKRPTYGSVLFEEAQTAKERRQKRSARRRLARRRKRIKLLQALVAPDVCAADPEFFLQMNESFLWAVDSKYEKFYAKLPKALFVDGTVSVETLPTIYHIRKELVKSTKQADIRYVYLAMHHIIKYRGHFLMEGQTLSDIGAEAPQKMHELLELLTDPESFVCGLAPAENAAKEVCHTMENHSLRGLARKEQIQKLLYAGKKKGSKETAQALASLLLGYKGSLKALIGYESQTDAPEKTSLGAIEGETEETYLAGMTEAQAEVFTRILELYRWQLFAEIRQNGQTISDMMVARYEKHGRDLEKLKAWVKAYQPDKFYALFRDDENAKGYAAYTDHLRKPKKFKKEKLQRCTQDEFYKVLKAMLTGNKDAEAAAAAQPMLEAIDEPNGFLPLQRINLNGQIPNQIQAEELAKILDAQGKYYPTLRENREKILSICTFRLPYYVGPLYQDKNSPFQKWIVRDKTQPAYPWNFFDVVNQTKTAEGFIVNLTNKCTYLPIEDVLPLHSLLYEEYLMLNELNRVRVKGNLIRDVQLKQRMLDELFAKNKSVSYKTFAKWLQLNSPYVDVTENDISGTQEPNKFTASLRTRYDLEKHGFTVNDQTTEQLETLVRWSTIFEDRSILKKLIQEKYPDVTDTQLSFLVQRRYTGWGRLSEKLLTGVLGEYENQPATIMEVLRATNENFMQVLNNPQYHFQEKIAKERLMELGEPKEKIEYDEIRKLQVSPALKRGIWTAVRIVKELIEHQGCHPHAIYLENTREETPDEKKQRTQSRLNQVEQMYKELAEDKKAEKVPSECWEVLKNCRDKKKLDDQQYLYLLQLGKSLYSGKPLDFDQLSATTQIDHILPQCYIVDNSIENRALVLSGENQRKADNLLLADSIRDSQRPWWNYLRQKGFMGEKKFKNLTRSVVSEEDKQKFIARQLVETGQMVQCVTELFKRYYPDVHVRGIKAGLSSELREQYGLYKIRELNDMHHAYDAFLAATMGNFVERFVPWLDSESSAAIRVRKAQGAKKDDDKVDLSSKHGMILARFSRDQVDADTREIIRNAQQEICYLKAVWGYHDGHVVFLKRQKSGKITEDSRYRAGNKSAKMPLKKGLPCQRYGGFDSINPAFMTAIQYTQGKKVYHRVVGIPIYANVPVEKADELIRAFAADKIPGVTVVRPRLLMNQMLEWDGGIFVLRGGQTIDILTSKKNAARVTITNGKQLFVSGKDMTTIALLFRGKKDDLNPEQLKETVLHLLEKFKTQYAVFYQKCKADDINRILKNLETPEQLTDADWTAMVSELLNAMGKQRKASKEWITCEDWRIRAIPTKDVELIDQSITGLREKRTKLWPDSEPS

SEQ ID NO: 23668 - protein, 1509 aa, unidentified
  REGION 1..1509: note = Cas Enzyme sequence
MKTILGLDLGSNSIGWAVINSVIKEQLERIWIEMAGSRIIPMDAAILGDFDKGNSISQTAERTRFRGVRRLRERQLLRRERLHKVLKILGFLPEHYLKEIDFEKHPGKFLADSEPKLPWLMDERGKYTFLFQTAFNEMLADFAKHQPSLVSDGKKVPYDWTIYYLRKKALTEMISKEELAWILLNFNQKRGYYQLRGEEEEDNAGKSVEFYALKVLSVEATDEKKGRDLWYNVHLENGWIYRRSSNVPLDWENQIKEFIVTTDLNPDGTPKLDKYGEVKRSFRAPKEDDWMLIKKRTEADIANTHKTIGSYIYDTLLQNPQQKIIGKLVKTVERKLYKEELNLILQKQCAFHAELQDRDLYMRCIEALYPGNEVRRKNIINRDFIYLLMDDVLFYQRPLKTKKSLISNCPYEENEYINRETGEIKKAPLKCIAKSHPLFQEFRLWHFLSNIRVYQKEKEVNGTLHLDVDVTAEFLKTEDDYVALFDWLNSRKEVDQKAFLRYPKFGLKKETNNYRWNYVEDKLYPCNETRYAILSRLEKLGVSLDFLSDEKETALWHILYSVSDKLEIEKALRTFAVKNGLNESFVEVFKKFPPFKPEYGSYSAKAIKKLLPLMRCGRYWDASLIDDATKDRIERIMTGEYDGNIAAKVREKAINLSDISCFKKLPLWLACYVVYNRHSENKEIAKWETPADIDAYLASFKQHSLRNPIVEQVIIETLRVVRDIWKQVGKIDEIHIELGREMKNPADKRKRMTAQIQENENANLRIKALLAEFMNPEYGVENVRSYSPSQQEILRIYEDTVLKGEEQIPEDIDVILKKFNNSKLPTKSEFLRYKLWLEQKYRSPYTGELIPLGKLFTAAYEIEHIIPQSRYFDDSFSNKVICESAVNKLKDNQLGYEFIKNHHGQKVEVGFGKTVEILSVDSYECFVKEQYAKSGVKMKKLLMDDIPEQFIERQLNDSRYISKVVKGLLSNIVREKNDSGEYEPEAVSKNILVCTGSVTDRLKKDWGMNDVWNSIVYPRFERLNALTGTQCFGHWENKDGKKVFQTELPLEYQKGFSKKRIDHRHHAMDAIVIACATRNHVNYLSNESASRNAKISRYDLQRLLCDKSRVDGTGNYRWIIKKPWNTFTQDAREALDKIVISSKQNLRIINKTTNIYQHFDTEGNRVYKKQETGDSWAIRKPMHKDTVFGTVNLRKVKSVRLSVALDTPTMIVDKRVKGKVLELLSYKYDKKKIEKYFKENVFFWKDLDIAKVAVYYFTENTSEPLVAVRKPLDSTFNEKKIKESVTDTGIQKILLNHLSAKEGKADLAFSAEGIEEMNRNILQLNDGKEHQPIYKVRVYEPRGNKFRVGAFGNKGTKWVEAAKGTNLFFAIYATEDGKRTYETVPLNLVIEREKQGLIPVPDRNEKGDKLLFWLSPNDLVYLPTEEEREFGRINEPIDRGRVYKMVSCTGNEGHFIPVNVANPILPTIELGSNNKAQRAWNNEMVKDICIPVKVDRLGRIIEVKYKANE

SEQ ID NO: 23669 - protein, 1550 aa, unidentified
  REGION 1..1550: note = Cas Enzyme sequence
MKNILGLDLGSNSIGWAIVKALKNEDGKEILQSIDLAGSRIIPMDQATLGNFENGNSVSQTRERTGYRSARRLRERYLLRRERLLRVLNCMGFLPEHYSQNIDKYGKFFLDNEVKLSWKKDKMGKNEFIFLDSFNEMLEDFRHSQPQLLLDGRKVPYDWTIYYLRKKALTEKISKEELAWILLNFNQKRGYFQLRGEDEEVQGKKIEFYALKVVRVEDTGEKKGKDTWYNVYLESGLGDTDDYWVYRRASSVPIDEWEGQVKEFIVTTTLDNNGSPQIDKEGKVKRSFSIPKPEDWMLVKKKTEVDIKSSGKTVGTYIYDTLLQKPDQKIKGKLIRTIERENYTNELSLILENQKKFHLELQDRELYHQCIELLYCKNEAHKRVIGSWDFTSLFIKDILFYQRPLKSKKALIDNCPYEESFYIENGEKKSKPRKCIAKSHPLFQEFRIWQFISNLRIYQKVKEVDGKLQFNVDVTSDFLRDESAYVELFKWLNERAEVSQEDLLKHLGLKKTKTEDTVSLYRWNYVEDKKYPGNKTRSSILKKLLNDEKEALSEDIELKIWHLLYSVSAQSEIDKALSSKNVSTKGIYSELSVYFSDETIQKIKNVKLESGYGSYSAKAIGKLLPLMRRGKYWNLESIDNHTKERIEKILNGECDETIRARTREKSISLTDISQFKGLPLWLACYIVYDRHSELKTIKKWNGPEDIDKFLKEFKQHSLRNPIVEQVIMETLRVVRDIWRRVGSIDEIHIEMGRDMKQTAQERAKRSAIISRNENDNLRIKALLHEFMNPELGIENVRPYSPAQQEILRIYEDGVLSSVSEIEDEIKNILKKFNESEEGKRPTKNEIIRYKCWLEQKYRSPYTGEIIPLGKLFTPAYQIEHIIPQARFFDDSFTNKVICEAEVNAKKGDLLGYEFVKEKGGEIVELSGGRNVRIFSVEEYEAFVKEHYKSNKQKMQRLLAEDIPTEFSHRQLNDSRYISKYIRNLLSNIVREDDEQESVSKNVISCNGAITDRLKKDWGVNDVWNHIVLPRFVRLEEIRADNGEKFTTFNQEGHRIPSMPLMYQKGFNKKRIDHRHHAMDAIVIACTTRDHVNLLNNECSNPQNNANKHQLSRKLRRYENVSYKQDGKLKEREVPKEFLKPWEEFTRDVEFALKNVIVSFRQNLRVLNKTVNYFQHWKDNSSEKEWKEQKSADHWSIRKPLHKETVSGEVFLWRTRFVSLREALTNPKRIVEKDLRSKILELQRKGYDTKRIKKYFEDNKDVWQDVNLSKIEVRYYSREIVDPQTELPKNRYFATRFGNDLISLFSGVSNFEKAKKIIESITDTGIQQILFRHLENKGNDPVLAFSPEGIDEMNRTIKTLNNGKDHKPIYKVRIYECSTMKFPLGSIGNKSKKFVEAAKGTNLYFAVYEKEVENDRGECHKERTFKTIPLNDVIRNLKQGLSIAPNDENGNPPAFILSPNDLVYLPTKEELETRSISQPLDRNRIYKMVSCTGNEAHFIPAFIATPILQTIELGSNNKAQKAWTGEMIKESCIPIKVDRLGMLISINGKAV

SEQ ID NO: 23670 - protein, 1550 aa, unidentified
  REGION 1..1550: note = Cas Enzyme sequence
MKNILGLDLGSNSIGWAIVKALKNEDGKEILQSIDLAGSRIIPMDQATLGNFENGNSVSQTRERTGYRSARRLRERYLLRRERLLRVLNCMGFLPEHYSQNIDKYGKFFLDNEVKLSWKKDKMGKNEFIFLDSFNEMLEDFRHSQPQLLLDGRKVPYDWTIYYLRKKALTEKISKEELAWILLNFNQKRGYFQLRGEDEEVQGKKIEFYALKVVRVEDTGEKKGKDTWYNVYLESGLGDTDDYWVYRRASSVPIDEWEGQVKEFIVTTTLDNNGSPQIDKEGKVKRSFSIPKPEDWMLVKKKTEVDIKSSGKTVGTYIYDTLLQKPDQKIKGKLIRTIERENYTNELSLILENQKKFHLELQDRELYHQCIELLYCKNEAHKRVIGSWDFTSLFIKDILFYQRPLKSKKALIDNCPYEESFYIENGEKKSKPRKCIAKSHPLFQEFRIWQFIYNLRIYQKVKEVDGKLQFNVDVTSDFLRDESAYVELFKWLNERAEVSQEDLLKHLGLKKTKTEDTVSLYRWNYVEDKKYPGNKTRSSILKKLLNDEKEALSEDIELKIWHLLYSVLAQSEIDKALSSKNVSTKGIYSELSVYFSDETIQKIKNVKLESGYGSYSAKAIGKLLPLMRRGKYWNLESIDNHTKERIEKILNGECDETIRARTREKSISLTDISQFKGLPLWLACYIVYDRHSELKTIKKWNSPEDINKFLKEFKQHSLRNPIVEQVTMETLRVVRDIWRRVGSIDEIHIEMGRDMKQTAQERARCSAIISRNENNNLRIKALLHEFMNPELGIENVRPYSPAQQEILRIYEDGVLSSVSEIEDEIKNILKKFNESEEGKRPTKNEIIRYKCWLEQKYRSPYTGEIIPLGKLFTPAYQIEHIIPQARFFDDSFTNKVICEAEVNAKKGDLLGYEFVKEKGGEIVELSGGRNVRIFSVEEYESFVKEHYKSNKQKMQRLLAEDIPTEFSHRQLNDSRYISKYIRNLLSNIVREDDEQESVSKNVISCNGAITDRLKKDWGVNDVWNHIILPRFVRLEEIRADNGEKFTTFNQEGHRIPSMPLMYQKGFNKKRIDHRHHAMDAIVIACTTRDHVNLLNNECSNPQNNANKHQLSRKLRRYENVSYKQDGKLKEREVPKEFLKPWEEFTRDVEFALKNVIVSFRQNLRVLNKTVNYFQHWKDNSSEKEWKEQKSADHWSIRKPLHKETVSGEVFLWRTRFVSLREALTNPKRIVEKDLRSKILELQRKGYDTKRIKKYFEDNKDVWQDVNLSKIEVRYYSREIVDPQTELPKNRYFATRFGNDLISLFSGVSNFEKAKKIIESITDTGIQQILFRHLENKGNDPVLAFSPEGIDEMNRTIKTLNNGKDHKPIYKVRIYECSTMKFPLGSIGNKSKKFVEAAKGTNLYFAVYEKEVENDRGECHKERTFKTIPLNDVIRNLKQGLSIAPNDENGNLPAFILSPNDLVYLPTKEESETGSISQPLNRNRIYKMVSCTGNEAHFIPAFIATPILQTIELGSNNKAQKAWTGEMIKESCIPIKVDRLGMLISINGKAV

SEQ ID NO: 23671 - protein, 1025 aa, unidentified
  REGION 1..1025: note = Cas Enzyme sequence
RLRRHRHRNERIRNLIVSSGLLSKEELSQLFDGQLSDIYAVRVKALDTSVSRSELARIMLHLSQRRGFRSNRKGESDQEAGKLLAAVNENKERMDKNGYRTAGEMFLKDPLFAEHKRNKGGNYIATVTRVMVEDEIRKIFSAQRNYGSEFASAELENAYLEILLSQRSFDEGPGGNSPYGGSQIERMVGLCTLEPDEPRAAKASYSFEYFSLLEKINHIRLIHGGESTPLTDGQRRTLIELAHKSDTLSYAKIRKELNIPANHTFNMIRYKTDVPPEEVEKKEKIVCMKAYHQMRRAVDRVAKGRFAMLSNEQRNEIARVLSLYKTGEKIERALTEAGIEPCDIAELETLSFSKFGHLSVKACDKLIPFLEKGMNYNDACTAAGYDFRAHSKDGRTLYLPPLGDDCYEVTSPVVRRAISQTIKIVNAIIRRYGHSPVYVNIELAREIAKDFAERSKLKKQMDDNQKQNERMMQQIREYKHGAPTGIDLVKFKLFSEQGGVCAYSQRQMSLERLFEDNYAEVDHIIPYSISFDDSYKNKVLVLTEENRNKGNRLPMQYLTGKRKDSFVVWVNACVRDYRKRRLLLKEAYTAEDEANFKERNLQDTKTMARFMYNYINDNLRFDPSFTGRKKRVTAVNGAVTAYMRKRWGISKVREDGDRHHAVDAVIIGCTTDGMIQRVSRYASWHEKHYMRTENGSILIDPNTGEIKQEFPYPWPWFRKELEARLSNDPSRAVADLKLPFYMDNDAPHVRPLFVSRMPTRKVTGAAHKDTVKSPKALDEGYTIVKRPLTSLKLDNSGEISGYYKPESDRLLYEALKRQLAEHGGSGAKAFTEPFRKPKSDETPGPIVNKVKLLETTTLTVPVHDGCGAADNDSMVRIDVFHIDGDGYYFVPVYVADTLRPELPSKAVVAAKSYEEWKDVKDEDFIFSLYPNDLVKVKHRRGMKLSKVFPESTLPPILECKESMFYYISSSIANGTVRFITNDNTYIIQSLGLKTLESIEKYTVDVLGEYHPVRKEKRQRFDITKG

SEQ ID NO: 23672 - protein, 946 aa, unidentified
  REGION 1..946: note = Cas Enzyme sequence
ILTDETIICIRDEIIYYQRPLKSCKYLVSRCEFEKRFYLNAAGKKTVAGPMVAPRTSPLFQVCRLWESINNIVVKDRRNEIVFISAEQRAALFDFLNTHEKLKGSDLLKLLGLSKTYGYRLGEQFKTGIQGNKTRVEIERALGNYPDKKRLLQFNLQEESSSMVNTETGEIIPMISLSFEQEPLYRLWHVLYSIDDREQLQSVLRQKFGIDDDEVLERLSAIDLVKAGFGNKSSKAIRRILPFLQLGMNYAEACEAAGYTHSNNYTKAENEAHALLDRLPAIKKNELRQPVVEKILNQMVNVVNALMEKYGRFDEIRVELARELKQSKEERSNTYKSINKNQRENEQIAKRIVEYGVPTRSRIQKYKMWEESKHCCIYCGQPVDVGDFLRGFDVEVEHIIPKSLYFDDSFANKVCSCRSCNKEKNNRTAYDYMKSKGEKALSDYVERVNTMYTNNKISKTKLQNLLTPVDKISTDFIDRQLRESQYIARKAKEILTSVCYNVTATSGSVTSFLRHVWGWDTVLHDLNFDRYKKVGLTEVIEVNHRGSVIRREQIKDWSKRFDHRHHAIDALTIACTKQAYVQRLNNLRAEEGPDFNKMSLERYIQSQPHFSVAQVREAVDRILVSFRAGKRAVTPGKRYIIRKNRKRISVQSVLIPRGALSEESVYGVIYVWEKDELGHVIQKQRAVMKYPITSINREMLDKEKVVDKRIHRILSGRLAQYNDNPKEAFAKPVYIDKECRIPIRTVRCFAKPAINTLVPLKKDDKGNPVAWVNPGNNHHVAIYRDEDGKYKERTVTFWEAVDRCQVGIPAIVTQPDTIWDNILQRNDISENVLESLPDVKWQFVLSLQQNEMFILGMNEEDYRYAMDQQDYALLNKYLYRVQKLSKGDYNFRYHTETSVEDKYDGKLNLELSRQMGKLKRVSIKSLLGLNPHKVHISVLGEIKEIS

SEQ ID NO: 23673 - protein, 1536 aa, unidentified
  REGION 1..1536: note = Cas Enzyme sequence
LIIYFIFEKIVNTILVMKKIVGLDLGTNSIGWALINAYIDEYNKEHLYGIEACGSRIIPMDAAILGNFDKGNSISQTADRTSYRGIRRLRERHLLRRERLHRILDLLGFLPKHYSDSLNRYGKFLNDIECKLPWVKDETGSYKFIFQESFKEMLANFTEHHPILIANNKKVPYDWTIYYLRKKALTQKISKEELAWILLNFNQKRGYYQLRGEEEETPNKLVEYYSLKVEKVEDSGERKGKDTWYNVHLENGMIYRRTSNIPLDWEGKTKEFIVTTDLEADGSPKKDKEGNIKRSFRAPKDDDWTLIKKKTEADIDKIKMTVGAYIYDTLLQKPDQKIRGKLIRTIERKYYKNELYQILKTQSEFHEELRDKQLYIACLNELYPNNEPRRNSISTRDFCHLFIEDIIFYQRPLKSKKSLIDNCPYEENRYIDKESGEIKHASIKCIAKSHPLYQEFRLWQFIVNLRIYRKETDVDVTQELLPTEADYVTLFEWLNEKKEIDQKAFFKYPPFGFKKTTSNYRWNYVEDKPYPCNETHAQIIARLGKAHIPKAFLSKEKEETLWHILYSIEDKQEIEKALHSFANKNNLSEEFIEQFKNFPPFKKEYGSYSAKAIKKLLPLMRMGKYWSIENIDNGTRIRINKIIDGEYDENIRERVRQKAINLTDITHFRALPLWLACYLVYDRHSEVKDIVKWKTPKDIDLYLKSFKQHSLRNPIVEQVITETLRTVRDIWQQVGHIDEIHIELGREMKNPADKRARMSQQMIKNENTNLRIKALLTEFLNPEFGIENVRPYSPSQQDLLRIYEEGVLNSILELPEDIGIILGKFNQTDTLKRPTRSEILRYKLWLEQKYRSPYTGEMIPLSKLFTPAYEIEHIIPQSRYFDDSLSNKVICESEINKLKDRSLGYEFIKNHHGEKVELAFDKPVEVLSVEAYEKLVHESYSHNRSKMKKLLMEDIPDQFIERQLNDSRYISKVVKSLLSNIVREENEQEAISKNVIPCTGGITDRLKKDWGINDVWNKIVLPRFIRLNELTESTRFTSINTNNTMIPSMPLELQKGFNKKRIDHRHHAMDAIIIACANRNIVNYLNNVSASKNTKITRRDLQTLLCHKDKTDNNGNYKWVIDKPWETFTQDTLTALQKITVSFKQNLRVINKTTNHYQHYENGKKIVSNQSKGDSWAIRKSMHKETVHGEVNLRMIKTVSLNEALKKPQAIVEMDLKKKILAMLELGYDTKRIKNYFEENKDTWQDINPSKIKVYYFTKETKDRYFAVRKPIDTSFDKKKIKECITDTGIQQIMLRHLETKDNDPTLAFSPDGIDEMNRNILILNKGKKHQPIYKVRVYEKAEKFTVGQKGNKRTKFVEAAKGTNLFFAIYETEEIDKDTKKVIRKRSYSTIPLNVVIERQKQGLSSAPEDENGNLPKYILSPNDLVYVPTQEEINKGEVVMPIDRDRIYKMVDSSGITANFIPASTANLIFALPKATAEIYCNGENCIQNEYGIGSPQSKNQKAITGEMVKEICFPIKVDRLGNIIQVGLCILTN

SEQ ID NO: 23674 - protein, 1394 aa, unidentified
  REGION 1..1394: note = Cas Enzyme sequence
MKHILGLDLGTNSIGWALVKERENENEQSSITRLGVREIYLTADEQSNFEKGKSITTNADRTLKRSMRRNLQRYKLRRNSLISLLKDYGFITAETLLNENGNRTTFETYRLRAKAVTEEISLEELVRVLLMINKKRGYKSSRKAKSNDESGQLIDGMEVAKKLYDDNLTPGQYVVSLLRKGKNNIPDFYRSDLVAEFDKIWNFQRQFYPDVLTDSLKEELKGKGDKETWAICSKPFAIEGIKRNIKGWEQKKEDYAWRAESLQHKIDLERLAIVLQKVNGQIKNSSGYLGAISDRSKELFFNKLTVGQYQMAELDKNPNFSLKNQVFYRQDYLDEFERIWETQAKFHKELTPELKHIIRDIVIFYQRPLKSQKGLISLCELESREIEIERNGKKVKKTIGPRVCPKSSPMYQEFRIWQAINNLQVSGMVVADNQVDLFGKTIGKKFGKRFLEQEEKEILFKELNFKSKLTKKEILKLLFENYKELDLNYNEVKGNTTMAALLEVCSKIIEMSGHGEYDFSKMSADEITGIVFPVFSGLGFSTDIFSFDSSVEGKAFDKQPSYMLWHLLYSYEGDKSKTGNESLISKISECYGFDKEYAAVIAGISFEPDYGSLSVRAMHKILPYMKDGLGYSDACQYAGYRHSKRSLTKEEIEARPLKDKIDLLPRNSLRNPVVEKILNQMINVVNAVVDTYGSPDEIRVEMARELKKTKTQREETVKAIRKTTAENEKYKKELEEEFGLKNVSRNDIVRYRLYLELKDNGFKTLYSNTYIPREKLFSKEFDIEHIIPQAKLFDDSFSNKTLEARSVNLDKADSTAYDYVKVKYGEDGLEKYKEKINQLCEKKIISKTKLKRLLTTEKDIPDGFINRDLSNTQYIARKACEILEEITRRVVPTTGSVTSRLREDWQLVDMMKELNWDKYDKLGLTEIIEDKDGRRIRHIKDWTKRNDQRHHAMDALTIAFTKPAFIQYLNNLNARSDKGGSIYAIERKELYRDNKGKLRFYPPMPLDEFRTEAKRHLENILVSIKAKNKVVTRNVNITKAKKAEKGKRKRIQLTPRGQLHNETIYGRIRQYATKEEKVNASFTEDKIMTVACKRYREALLVRLRQHDGDAKKAFTGKNSLAKTPLYTDSLHTETVPEKVKTVMLAPLYTKREAVSPDLKIEKVIDIGIKRLLQKRLEQYGGDMQKAFSNLDENPIWLDEEKGISIKRVTISSVSNAEALHDKRDNRGQLILDKDGKKQPTDFVQTSGNHHVAIFRDADGNLQEHMVSFYEATARAIQHLPIIDKEYNKDLGWQFLFTMKQNEYFVFPNEETEFNPKEIDLLNPKNYALISHNLFRVQKLSSKDYVFRHHLETKVEYNKELFGVTWKRINTLSKIKDIVKVRINQVGKIEDLGEY

SEQ ID NO: 23675 - protein, 1394 aa, unidentified
  REGION 1..1394: note = Cas Enzyme sequence
MKHILGLDLGTNSIGWALVKERENENEQSSITRLGVREIYLTADEQSNFEKGKSITTNADRTLKRSMRRNLQRYKLRRNSLISLLKDYGFITAETLLNENGNRTTFETYRLRAKAVTEEISLEELARVLLMINKKRGYKSSRKAKSNDESGQLIDGMEVAKKLYDDNLTPGQYVVSLLRKGKNNIPDFYRSDLVAEFDKIWNFQRQFYPDVLTDSLKEELKGKGDKETWAICSKPFAIEGIKRNIKGWEQKKEDYAWRAESLQHKIDLERLAIVLQKVNGQIKNSSGYLGAISDRSKELFFNKLTVGQYQMAELDKNPNFSLKNQVFYRQDYLDEFERIWETQSKFHKELTPELKHLIRDIIIFYQRPLKSQKGLISLCELENREIEIERDGKKTKKTIGPRVCPKSSPMYQEFRIWQAINNLQVSGMVVADNQVDLFGETVGKKFGKRFLEQEEKEILFKELNFKSKLTKKEILKLLFENYKELDLNYNEVKGNTTMAALLEACSKIIEMSGHGEYDFSKISADEVESIVFPIFNGLGFNTDIFSFDSSVEGKAFDKQPSYMFWHLLYSYEGDKSKTGNESLISKISECYGFDKEYAAVIAGIRLEPDYGNLSVRAMHKILPYMKDGLGYSDACQYAGYRHSKRSLTKEEIEARPLKDKIDLLPRNSLRNPVVEKILNQMINVVNAVVDAYGRPDEIRVEMARELKKTKAQREETVKTIRKTTAENEKYKKELEEEFGLKNVSRNDIVRYRLYLELKDNGFKTLYSNTYIPREKLFSKEFDIEHIIPQAKLFDDSFSNKTLEARSVNLDKADSTAYDYVKVKYGEDGLEKYKEKINQLCEKKIISKTKLKRLLTTEKDIPDGFINRDLSNTQYIARKACEILEEITRRVVPTTGSVTSRLREDWQLVDMMKELNWDKYDKLGLTEIIEDKDGRRIRHIKDWTKRNDQRHHAMDALTIAFTKPAFIQYLNNLNARSDKGGSIYAIERKELYRDNKGKLRFYPPMPLDEFRTEAKRHLENILVSIKAKNKVVTRNVNITKAKKAEKGKRKRIQLTPRGQLHNETIYGRIRQYATKEEKVNASFTEDKIMTVACKRYREALLVRLRQHDGDAKKAFTGKNSLAKTPLYTDSLHTETVPEKVKTVMLAPLYTKREAVSPDLKIEKVIDIGIKRLLQKRLEQYGGDMQKAFSNLDENPIWLDEEKGISIKRVTISSVSNAEALHDKRDNRGQLILDKDGKKQPTDFVQTSGNHHVAIFRDADGNLQEHMVSFYEATARAIQHLPIIDKEYNKDLGWQFLFTMKQNEYFVFPNEETGFNPKEIDLLNPKNYALISHNLFRVQKLSSKDYVFRHHLETKVEYNKELFGVTWKRINTLSKIKDIVKVRINQVGKIEDLGEY

SEQ ID NO: 23676 - protein, 1540 aa, unidentified
  REGION 1..1540: note = Cas Enzyme sequence
MEKRILGLDLGTNSIGWALVKGERHENDNETILTHVEAAGSRILPLDAAAQGDFEKGNPAKTQTSERTRMRGTRHLLERSLLRRERLHRVLDIMGFLPPHYSQSLTRYGKFKTDTECKLAWRKTETGHYEFLFQDSFQEMLHDFQNHGKLGENKKIPYDWTIYYLRKKALTQPVSKQELAWILLNFNQKRGYYQREEQAEDDSKGKRVEYQALKVLSVEDTGERKGKNTWYSVRLENSLIYRYAAPIAPDWEGKTKDFIITTSVDDKGQPTLDKDGKPKYSMRAPKEDDYKLLMEKTKKDICDSGKSVGEYIYDALQANPQQKIRGGLVRTIERYFYKKELEKILLSQERFIPELTDRELYRRCVEELYPSNDAYRHLIESRDMRYLLVEDILFYQRPLKSKKSLIDDCPYESRSYVDRETGEIKSSPVKCIAQSHPLFQESRLWQFIHNLRIYQNERSVEGKLQLDVDVTEEVLPTPESKAALFRFLNDRENVTQEILLKEVFKGRKLSVKDCPYRWNYAGEGKKYPCNETRHLMLKLLKKAGIDTAFLTPEKEQALWHIMYSVEDKDQYEKALSTFARKNDLPDGFKEQFKKAPTFKKDYGAYSLRAIKKLLPLMRVGEYWSADCIDSETKERISQIIRGEMDEKVSQRMTKSRDSFTDISQFQGLPVWQACYVVYGRHSETTEIQRWEKPEDIDVYLKAFKQHSLRNPIVEQVVLETLRVVRDIWKTYGKVDEIHIEMGRDMKNTAEERKRIFNRNQQNENDNLRIKALLTEFMNPDFEIEGVRPYSPSQQEALRIYEDGAWSGLDEEKEDKKELEAIREILGKFSQSDKAKRPTHSEVLRYKAWLEQRYSSPYTGEAIPLAKLFTPAYEIEHVIPQSRFFDDSFSNKVVCEAEVNKLKDRMLGYEFIKAHQGEVVSLSGTGRCARILSPEEYEQRVTDCYKHNTAKMKKLLMEEIPDDFIQRQMNDSRYISKLVKSLLSNMVREEGEREAISKHVITCNGTITDRLKKDWGVNDVWNHIILPRFQRMKDLTGRNDFVAVNSQGHEIPSVPPELQKGFKKKRIDHRHHAMDAIVIACTTRNHVNLLNNEAAMSENKANRIALSRKLRRYENCAIYKGGETKNISVAKEFLKPWATFPADVERALGDIVVSFKQNLRVINKATNHYEHYKDGKKVKLPQVKGDMWAVRKPMHKDTVFALVNLRQLKTVGLKDAILMPDRIANKDLKQKVKELLAQGDDLKKIKKYFETEKDTWRDVDIKKIEVYYFSEETSNHYYATRKPLDANVKIDTVTDTGIQKILRRHLEENEDKADVAFSPEGIVRMNENIFRLNGNKHHQPIYKVRVYEKANKFPVGQKGNKASKFVEAAKGTNLYFAVYEAKEMNNKTGEISVKRYYKTIQLKSAFERLKNGMQVAPEESAGKRLLFVLSPGDLVYVPTKEELEGGNLRLPLKLGRLYKMTDCSGATVNFVPASFANVIYSLAKEDAKAFCNGALVLNELGEGNSLSKNANALTGEMIKEICLPVKVDRLGRITEINGNKV

SEQ ID NO: 23677 - protein, 1498 aa, unidentified
  REGION 1..1498: note = Cas Enzyme sequence
MKHILGLDLGTNSIGWAVIRAHQDADGHTTLQDILAAGSRIIPMDAATLTDFDKGNARSGTAERTSFRSMRRRRERQLLRRERLHRVLMLLGFLPQHYANSLTRYGEFADNRECKLPWVKDESDGKYHFLFQDAFHEMCEDFRQSAPQWVADGKKVPYDWTLYYLRCKALSRKISKEELAWILLSFNQKRGYYQARDEEDEVTTNKLEEYYAGKVVRVDDTGERKGKNVYYDITLENGWVYRYAARIYPDWVGQVKEFIVTTTLNPDGTPKTDKAGEVKRSFRMPKDDDWTLIKKKTERDIDRSQETIGQYIYHALLKDPSQKIRGKLIGTVERKYYKDELRRILDRQIQFHPELRDRELYYACLQELYPSNVAFRNTLVNRDFTYLFLDDILFYQRPLKSKKSQISDCPYEEHFYTDKETGERISVPVKCIAVSHPLYQEYRLWQFIQNLRIYCREARINGNLMIDWEVTDELLQTEEDKTALFDWLNDKESVKQPELVAFLLGGKANKKQIKAYRWNYMDDDTKGYPCNETRASLLKYLREAQTDSSFLTREREEALWHILYSISDKGELKSALGKFAVKHGLDERFVTVFSKFPPFKKDYGSYSAKALKKLLPLMRMGHHWQEASFIPSTRQRMEKFINGEYDDSIDKRTYEKLESLTEVSQYRGLPGWLACYVVYDRYSEGRDIERWTSPSDIDSYLAQFKQHSLHNPIVERVVLETLRTVRDIWKQVDHIDEIHIELGRNMKLPADKRRQMTEQAWKNEQTNLRIKALLLEFARPGYDIENVRPYSPYQQDQLRIYEEAVLGANECPDDISAILKKFNGLNPPTSAEVLRYKCWLEQKYRSPYTGRTIPLSKLFTSAYEIEHIIPKQRYFDDSFSNKVICESEVNKKKGGMLGYEFIKSYHGASITLNRGGTASIFSVEAYENFVKEHYAHNRGKMKKLLMDDVPDSFISRQLNDSRYISKLMKSILSNLVREEGEKEAISKNLIVCTGGITDRLKKDWGIHDVWNDIIFPRFKRLDEMDSSHTYITLNTHRHPIPSMPLEFQRGFSKKRIDHRHHAMDAIVIACATRNIVNYLNNESARHDAKTSRMDLQRLLCTANRKLIDKPWKTFTQDTCKVLEDMIVSFQRTLRIINKTKNYYLRFEDGKKRRVLQTKGDNWAIRKPLHKETFYGEINLRRIETLSLNKALERIPDIVERDLRKKLSELLSLGYNAKRIKGYFEEHKEEWSDVNLSKIKAYYFTKQKNKRYFAARTELDTSFNKDKIENKIADTAIQKILLQHLEAYGNDAEQAFSPEGIDTMNRNIRQLNGGRSHQPIYKVRVYEEATKFAVGRRGNKSTKFVEAAKGTNLFFAIYEISQVDGNGNRQTSRTFSSIPLNVAVERLKQGLPPVPEDEEGNAPKYVLSPNDLVYLPTEKELKRREIAMPIDKSRIYKMVSCTGKDCFFIPANTAVPIVDRYEYSSMNKIGRALTGEMIKEICLPLKIDRLGQIIEISTF

SEQ ID NO: 23678 - protein, 1437 aa, unidentified
  REGION 1..1437: note = Cas Enzyme sequence
MKTILGLDLGPSSIGWALINTENEKPEKIIKAGSRIIPMDVKEMSDYESGKLQSAASLRTGFRGMRRLYERASLRRERLLRVLNILGFLPCHYKNQIDFETHPGKFKDNSEPLLPYKRNENGKSEFVFQSSFLEMLEDFKKDNPEALVDDKLIPYDWTIYYCRKKALYAEISRGELAWILLNANSKRGYYQLDEESDERVNEKKEYCRTKVINVEKQDEDRKQKGYYFYEITYENGLVQKRKCKMQPWRVGDEVDLIVTTPLDDRGKPKVDEDGNIVRRLSSPKEDDWGLVMKKTQAGIDASGGTVGEYIYGNLVKNPSEKVKGGFVKTIERHYYKDEVRKILESQKRFIPELNDAELYMKCVKELYRNNEAHVNELSHKNIVDFLINDVIYYQRPLKSKKSCIADCPYESYNYVDSETGEVKKRPLKVMPKSHPLFQEFRLWQFIHNLRITENERTVDNHVVLDYDVTMQELGTPEQVCDLYDKLSSISTIKESAVLKALCLNPKNYKWNFGSTEFPGLKTHHSFVTKIEKLENAKKLSSDEEEKLWHILYSVSDRDELEKALKHFAEKCGYDKDKFYELFKSVPQMRGDYASYSKKAVKRLLSLMRTGRYWSADEIDKVTRARIEKHIAENTVLEDSFGEYGKIEDFQYLRLSDACYVVYGRHSENADNSIWESPEDIDKYIAGEFRKNSMRNPVVEKVVGETLKVVRDIWKTYGKPAEIHVEMARSLKEPNDKREEMTKKIAENRKKNLELRQKLQELKENGKADNVNPNSSMHMLKYKLWEEQNKQSPYTRKSISIAKLFTSEYEIDHIIPQKRYFDDSFTNKVVCESAVNKDKGARLSYEYLLAEGGKEISLGNGEKVTLKTAEEFEAFVENNYSSQEKARKRKNLMRTDVPASFNASQLNNTRYIARKTAEILSHIVREEDDQGSRSKNIIMTNGSITDRLKKDWGLKQTWNDMMRPRFERLNDISQSNDYGEEIDDGKGKHYFQTRVPEANADKFDIKRIDHRHHAMDAIVIACTSLNHINYMNNESGGETKRYDLKKLLCEGKDRQFTKPWETFTQDSRKALDDIVVSFKQNLRIVSRASNYYYHYVDGKKVLTKQTKGDSLSIRKPLHKATYSGLVRLPITKNEKIENTIDNPEQIVDKTIRKELKKILAGYNGSADKKKIKKYFKDRDYKLNGKDVSKVKVRVMPENEEYSSHRTPVASITTQKQLESITDTGIKKILQNHLENYGGNFEEAFSPEGISSLNDNIKLLNGGRDHKPIKCVRIFERTNLKFPVGQVASKTKSYVEAEKGTNLFFAIYVDENGKRVFETIPLILAVERKKQHLPVVPECNASGNKLLFSLSPGDLVYVPEEDEHVTMPLNPKRIYKMVSSGSCQCFFVPQYVATPIENIKELGPNNKSERAWDGIQIKKVCLKLETDRLGNIVKVIGHD

SEQ ID NO: 23679 - protein, 1433 aa, unidentified
  REGION 1..1433: note = Cas Enzyme sequence
MKKILGLDLGCNSIGWALVNEAENTEEISSIIKLGVRVNPLTVDEMQNFEKGKSITTNADRTLKRSMRRNLQRYKLRRDTLIEVLKEHGFITDSTLLSEHGNKTTFETYRLRAKAAVEEISLEKFARVLLMINKKRGYKSSRKAKGSEDCVLIDGMDVARKLYEEGLTPGELCLQILEAGKKNLPDFYRSDLQNEFDRIWNFQKQFNPELFCDAVKEEVRGKNRSQTWAILAKFFVWSEKESVWNEKEARTEERVKEYKLVGLKRDTKGNELKLENYRWRVQALSEQLNPEIVAIVLQEINGQISASSGYLGAISDRSKQLYFNRQTVGQYLMSELEKDPNVSLRNRVFYRQDYLDEFDRIWEKQAEFHEELTVELKKEIRDIIIFYQRRLKSQKGLISFCEFEKREVVVEEDGRKKNKTVGCRVIPRSHPLFQEFKIWQTLNDIEVFAWDKQSKRKKADKSSILFDNSEDALLVEGKRFLYQEEKELLAKELFVKESMKKAEVLKLLFENYQELDLNFKQIDGNHTGFALFSAYSKMIEKYGYEPVDFKRSADEIIEKLETIFTNLGWNTELLSIDLSKEDKELERQSYFRLWHLLYSFEGDNTPTGNGKLLEKIMQLCDVEKEYAVELANVSFQEDYGSLSAKAIKKILPYLKEGNQYDVACDYAGYRHSRSSLTKDEIENKILKDKLEILPKNSLRNPVVEKILNQMVNLINTLIDTYGKPDEIRVELARELKKNAKEREELTKSIARNTREHDEIRQLLRTEFGMMNVSRNDIIRYKLYEELKDNGYKTLYSNEYIPREKIFSKEIDIEHVIPQARLFDDSLSNKTLEYRAINIEKGNKTAYDFVKEKYGNDGLEKFLNRCETLFKDKRTKLRKLKMEEKDIPEGFIDRDLRNTQYISKKAFAMLNEISRRVVATTGSITDKLREDWQLVDLMKELNLPKYEKLGMVEMFEDKDGRKIKKITDWTKRNDHRHHAVDALTVAFTKDVFIQFYNNKNAAWMPASKEHANITGIKARYFENGKALAPMPLAQFRAEAKRHLENLLVSIKAKNKVITSNVNRTKNKNGENRKLQQTPRGQLHLETVYGSHRQYATKIEKVNAAFDVTKIATVSKLAYRNALLKRLEAFGNDPKKAFTGKNTLEKNPLYLDENQTEMVPEKVQTVEFETVYTIRKPIDPNLSIDKVVDVKIRSVLEKRLKEYGGDAKKAFVNLDENPIWLNEAKGISIKRVSIRGISNAQSLHEKKDKDGNLILGKEGRKIPVDFVNTGNNHHVAIYKKPVLDKVGQVVLDEEGNPKYELDEVVVSFFDAVTRANLGQPIIDKDYRRSEGWQFLFSMKQNEYFVFPNDKTGFNPKEVDLLNPENYALISPNLFRVQKFAYKNYVFRHHLETTIKDTSSTLKGITWTDFRSSKGLDKIVKVRVDHIGQIVSIGEY

SEQ ID NO: 23680 - protein, 1158 aa, unidentified; identical to SEQ ID NO: 22566
  REGION 1..1158: note = Cas Enzyme sequence

SEQ ID NO: 23681 - protein, 1361 aa, unidentified
  REGION 1..1361: note = Cas Enzyme sequence
MRRNLQRYKLRRENLIEVLKEYNFITDETILSENGNRTTFETYRLRAKAAVEEISLEQFARVLLMINKKRGYKSSRKAKGAEDGTLIDGMEVAKKMYDEGITPGELCLQLLTAGKRYFPDFYRSDLQAEFDRIWNFQKQFYPDSLIDKVKDEVRGKNKSQTWAILAKYFVWKEVENSWNEEEAQTRRVEKEYRLVGIKRGVKREELKLENFQWRVKALSERMNPEELAIVLQEINGQISNSSGYLGAISDRSKELYFNRQTVGQYQMAVLDNNPNIGLRNMVFYRQDYLDEFNTIWEKQAEFHKELTEDLKKEIRDIVIFYQRRLKSQKGLINICEFERRQIEVEIDGKKKIKTIGSRVIPRSSPLFQEFKIWQTLNDIEVSVLGVKNKRKKQDDNSTTLLDSAENIDSLKLNVSRPLDADEKSLLAKELFIRDKLTKSDVLKLLFNNPQNLNLNFKNIDGNRTGSALYQAFSKILEISGHESINFKKSADEIVEQVKTIFSALGWNTEVLCFDSEKELDKQPYFKLWHLLYSFEGDSTPTGDGNLIQKIADLCGFEKDYASILANITFQEDYGSLSTKAIRKILPHLKDGNQYDVACEYAGYKHSKSSLTKEEIKSKVLKDKLELLPKNSLRNPVVEKILNQMVNVINAIITTYGKPDEIRIELARELKKNAKEREELTKSIVDTTKTHEGIRAILQNDFGMSHVSRNAIIRYKLYEELKDNGYKTLYSNTYIPKEKLFSKDFDIEHIIPQARLFDDSFSNKTLEVKSINIEKGSKTAYDFVEEKYGEQGLQEYLNRCEVLFRDKKTKLRKLKMQESEIPEGFIDRDLRNTQYIAKKALSMLNEICRRVVATTGAITDELREDWQLVDVMKELNWEKYKVLGLVEYFEDNDGRLIGRIKDWTKRNDHRHHAMDALTVAFTKDVFIQYFNNKNASLKPDTNEAAIRNKYFQNGKAIPPMSLDEFRAEAKKHLNDTLISIKTKNKVVTINLNRTKKKNGINKKQQQTPRGQLHLETVYGSHKQYVVKEEKVNASFDAAKIATVNKPAYRDALLRRLQENGNDSKKAFTGKNSLDKQPVWLDAKQNECVPEKVKTVMLETVYTVRKPIDEKLNVDKVVDARIRKLLQDRIKEYGNAKSAFANLDENPIWLNKEKGITIKRVSVFGISKAQSLHEKKDKDGNFILDKDSRRIPVDFVNTGNNHHVAIYRKPVLDKKGQAVFDENGELKFELEEVVVSFFDAVTRVNLSQPIIDKDYKRSEGWKFLFSMKQNEYFVFPNEKTGFDPKEIDLLNPENYALISPNLFRVQKIASKDYVFRHHLETVVADRKELQEITWKRISSLSILNRIIKVRVNHIGQIVMIGEY

SEQ ID NO: 23682 - protein, 1427 aa, unidentified
  REGION 1..1427: note = Cas Enzyme sequence
MKKILGLDLGTSSIGWALVNEAETSEEKSSIIKLGVRVNPLTVDELQNFEKGKSITTNADRTAGRSMRRNLQRYKLRRENLIEVLKEYNFITDETILSENGNRTTFETYRLRAKAAVEEISLEQFARVLLMINKKRGYKSSRKAKGAEDGTLIDGMEVAKKMYDEGITPGELCLQLLTAGKRYFPDFYRSDLQAEFDRIWNFQKQFYPDSLIDKVKDEVRGKNKSQTWAILAKYFVWKEVENSWNEEEAQTRRVEKEYRLVGIKRGVKREELKLENFQWRVKALSERMNPEELAIVLQEINGQISNSSGYLGAISDRSKELYFNRQTVGQYQMAVLDNNPNIGLRNMVFYRQDYLDEFNTIWEKQAEFHKELTEDLKKEIRDIVIFYQRRLKSQKGLINICEFERRQIEVEIDGKKKIKTIGSRVIPRSSPLFQEFKIWQTLNDIEVSVLGVKNKRKKQDDNSTTLLDSAENIDSLKLNVSRPLDADEKSLLAKELFIRDKLTKSDVLKLLFNNPQNLNLNFKNIDGNRTGSALYQAFSKILEISGHESINFKKSADEIVEQVKTIFSALGWNTEVLCFDSEKELDKQPYFKLWHLLYSFEGDSTPTGDGNLIQKIADLCGFEKDYASILANITFQEDYGSLSTKAIRKILPHLKDGNQYDVACEYAGYKHSKSSLKKEEIKNKVLKDKLELLPKNSLRNPVVEKILNQMVNVINAIITTYGKPDEIRIELARELKKNAKEREELTKSIADTTKTHEGIRAILQNDFGMSHVSRNAIIRYKLYEELKDNGYKTLYSNTYIPKEKLFSKDFDIEHIIPQARLFDDSFSNKTLEVKSINIEKGSKTAYDFVEEKYGEQGLQEYLNRCEVLFRDKKTKLRKLKMQESEIPEGFIDRDLRNTQYIAKKALSMLNEICRRVVATTGAITDELREDWQLVDVMKELNWEKYKVLGLVEYFEDNDGRLIGRIKDWTKRNDHRHHAMDALTVAFTKDVFIQYFNNKNASLKPDTNEAAIRNKYFQNGKAIPPMSLDEFRAEAKKHLNDTLISIKTKNKVVTINLNRTKKKNGINKKQQQTPRGQLHLETVYGSHKQYVVKEEKVNASFDAAKIATVNKPTYRDALLRRLQENGNDSKKAFTGKNSLDKQPVWLDAKQNECVPEKVKTVMLETVYTVRKPIDEKLNVDKVVDARIRKLLQDRIKEYGNAKSAFANLDENPIWLNKEKGITIKRVSVFGISKAQSLHEKKDKDGNFILDKDSRRIPVDFVNTGNNHHVAIYRKPVLDKKGQAVFDENGELKFELEEVVVSFFDAVTRVNLSQPIIDKDYKRSEGWKFLFSMKQNEYFVFPNEKTGFDPKEIDLLNPENYALISPNLFRVQKIASKDYVFRHHLETVVADRKELQEITWKRISSLSILNRIIKVRVNHIGQIVMIGEY

SEQ ID NO: 23683 - protein, 1225 aa, unidentified
  REGION 1..1225: note = Cas Enzyme sequence
MERILGIDLGTNSIGWALVKREDEGHVCLECKGVDIFQEGVARENGKEIPAVKQRTEARAQRRHNFRRRLRKIEVLKVLIKYKLCPELTGEQLEIWKKKKEYPITDAFISWQRTNDNEGKNPYYDRYSALNERLDLNNEKERYILGRALYHLSQLRGFLSNRKDMADSNDGVVKAGIAELTKEIKLENCNYLGELFFLKFKRGEKIRSKYISRKEHCESEFNAICEKQNLPQNLRNELKHAIFFQRKLKSQKGLVGKCTFERNKNCCPISHPRFEEFRMFSFINNIRIISPGTDVARPLSNDERKLIIPLFMRKSVSYFNFEEIAKKIAGKGNYICNDISNEKSVNNFYRFNYTRTLTVSACPVTASLKSIFGEDWINEIRSVYILAENKNEDQVINDVWHVLFSFDDDERLKTWAMEKLQLNEDEATKFIKIKIPQGYSSLSLKAINNILPFLRAGYRYDSAVFAANLKAVLPQYIVADKKNLEYATEDIISIIEDYKKNPLNAGKSKEECVVDELRDKFNISETKLKRLYHPSMIDIYPSVNTVKENRLGSPRTYSLRNPMAMRALFRLRVLINKLISEKKIDRYTKINIEFARELNNANMRIAIGKYQKERETERQKNIIEIKELYFKETGKEIVPTDEEILKYQLWKEQNHKCIYTSKEINITAFIGAGTAFDIEHTIPRSRGGDDSIMNKTLCESNYNRNIKIGKIPSELSDYEKILARIETLGWAEKIENLRKQIENAKRNSRNAVTKEKKDEELQKRNVAQLKLDYWKGKYERFMMKEIPDGFSNRQGVDIGIIGKYARAYLKTYFEHIYTVKGATTAEFRKMWGLQDEYAKKERANHIHHCIDAIVIACIGRKEYENWAHYKKCEEEYEVGKATKPYFEKPWPTFSEDVKSISNEVFVSHYTPDNMPKQTRKKMRVRGKVKLNKEGKPIYLQGDSARGILHRETFYGAIERNGKIKYVIRKRLGDLKPTEVEKIVDDIVRQRVKRAVDEFGFKNAIDTSNPDYTIWMNEEKNVPIKKVRIYAKLTEPIPLKKQRDLSDKEYKQRYLVANETNYCMAVYEGKNGKGKIFRSSQIVSNIDAAQYFKVSAAQKRSSELVPMVNDKGYKLKYILKKGTMVLFYKDSSEELLLCTKQELVKRLYKIKKLDKDGRVTFVYHQEARNQNALKEAGCEKPKSFVDVNDPYPLITLSMCNLNMCVEGYEFYLSVTGEVEFKIRKQC

SEQ ID NO: 23684 - protein, 1354 aa, unidentified
  REGION 1..1354: note = Cas Enzyme sequence
MVNQAESGDERSSIIMTGVRVNPLTTDEKDSFEKGKAITTNADRRLKRGMRRNLQRYKLRREHLLSVLRREGWISEDTVLSEQGAGSTYQTFRLRAEAPSREITMDELSRVLLMINRKRGYKSNRKADKGEEGHLIDGMSVARELYDDGLTPGEYSLRLLESGKSALPEYYRSDLVAEFERIWSVQSSWWPDILTEDFKKSIEADGRNGVSKKFLGRYSIYTADNKGKDKKKTALEWRVKALSEILDKETLAYVIADVKGAIQSSSGYLGEISDRSKELFFDDVTVGQYLWRHIEQDPNYSTRNKVFYRQDYLDEFERIWECQKRFHPEMTDALKTEIRDVVIFYQRRLKSQKNLISFCEFEHRDIVVEENGVRKVKTCGCRVAPRSSLLFQEFKIWSVLNNVTLTDRATGECLQLSAEDRKKLADFLAVNDKITVPEMLRLLGRASRGYDVNYKEIQGNLTMSALYRKFLEVVSASGHGEYDLRKLSYSGAYKLLCEVFSALGFGTDYLTFDASLPKEEYERQPMFKLWHLLYSYEGDNSKTGDESLIGKVSEICKMPLEYARIIASVKLLDDYASLSHKAMHKILPHLKDGCTYDEACARAGYNHSSSVTKEENEARELKDRLEILPKGALRNPVVEKILNQMVNVVNTVLDEYGRPDEIHIEMSRELKQNAKQREKATQSIADNTKRDEGIVKILQTEFHLPYVSKRDILRYRLYDELKSNGYRTLYSNQYIPKDLLFSPSIDIEHIIPQALLFDDSYSNKTLEFSDVNRDKGKETALDYVSRKYGPAELDAYRLRVIDLCSQGVISARKRDRLLMKQSEIPSDFVNRDLTNSQYIARKSMEMLGEIVRDVMPTTGSITALLREQWQLVDVMKELNLPKFRQAGKTFTVTKSDGQSLEKISDDWTKRNDHRHHAMDALTIAFTRRSHIKVLNTLNALPGSEDLALKEAVTMRLPNHKWIFAPPMPLGELRSAFKSALESTLVSIKAKNKVATRNVNKSKVKDRTIAVETLTPRGQLHKEQVYGRRMVYETFDVTVGGKMDAAMVASVASKAEREALARRLEAFGGDPKKAFTGKNSLDKNPLYVDALQSVTIPVKVKCVRMKDVYSIRKEIGPDLSVGKVVDGRVRKLLEARLVEYGGDPKKAFVNLEEKPIWVDEARGIRLRRVTIMLNGNLVAVRNKRDMNGCLVLDSCGNTIPNDYVDLQNNHHAAIFEDENGKYQEHIVSFFEALERKTAGLPVVDKDFHKDLGWKFVFSLKLNEMFVFPNPKTGFIPAEVDLMDPANYAQISPNLFRVQKLSCRDYCFRHHLETALDNVTELRDVTWKRVTNLANLRGVVKVRIDHIGRIVAVGEY

SEQ ID NO: 23685 - protein, 1373 aa, unidentified
  REGION 1..1373: note = Cas Enzyme sequence
MKKVLGLDLGTTSIGWAMVNQAENNEEKSSIIRAGVRVNPLTTEEKDAFEKGKAVTTNTDRRLKRSMRRNLQRYKLRRNELVSILKELGWIDDSTILAEHGNRSTFETYELRSKACTESVSLTELARVLLMINKKRGYKSNRKANAEEDGQPVDGMSVAKLLYEKGKTPGQYCYSLVKKGNKVLPEFYASDLKSEFRRVWETQRLYYPEYLTEEFWNQIDGKTRSSLTKLFFAKYKITTADNKGKDKRVKAYEWRAAAVENRLPIDQVAYVLCDIAGNLGSSSGYLGKISDRSKELYFNKQTVGQYLYSNIQKDPHFSTKNKVFYRQDYLDEFEAIWESQASFHPELTDELKKEIRDVVIFYQRRLKSQKGLISYCEFESRKVDVEINGRIVQKIRGCKVAPVSSPLFQEFRIWQKINNIIVTNKETGEQGTLEQDDKVRLAECLRVKDKLSDKEILKLLFKKPKDLEMNFKSIEGNETLGKLYSKFLEVVSLAGNSDYEYSKLRQEELMNILRTEFARNGFNTAVLEYDPSLPKEEYERQPLFRLWHLLYSYEGDKSQTGNASLINKIAEICGMPENLAKIIASVSFKQDYASLSHKAMRKILPYMMDGNEYSLACEYAGYRHSKQSLTKEEIENKVLKDRLDQIPKNSLRNPVVEKILNQMVNVINTVGDRYGKPDEIHIELARELKSSQEERARATESIASNNKENDRIRMILENEFHLAYVSRNDIVKYKLYEELKNNGYKTLYSNQYIPVDKLFSREIDIEHIIPQAVLFNDSLSNKTLEFRDINLEKGKDTAFDYVKNKYGESGLEDYKLRVNHLFESGGISRTKRDNLLRDSKNIPEGFVERDLKDTQYIAKKAREILLEYVRVVVSTSGSITDKLREDWGLVNVMKELNMPKFEAAGFVETITTSDGKDIRKIKDWTKRNDHRHHAMDAITIAFTKLAHIQYLNNLNAKGDKSSSIYAILQKETYLSGSKRLIIPPLPLDQMRREVRRQLESILVSIKAKNKVMTENINRIRIKDGVKNVKCLTPRGLLHKEQVYGQRKRYETYDVAVNGKMTEDVIATVASSETKAALALRLAQFKGDPKKAFTGANSLDKNPVWLDANHSRKVPAKVKCVRFVNVYSIRKNIDPSLSVEKVMDGRVRRILKDRLAEFGNDPKKAFVNLDENPIWFNKEKGIILKSVTIAENFDLDPIRIKRDNLGRVICDAEGNHIPSDYVNFRNNHHAAIFEDADGNIQEHIVSFYEAVRRKSAGLPVVDKEYNADKGWKFLFTMKSNEMFVFPNERTGFDPRAVDLMDPENYSAIGPNLFRVQAVSTRDYWFRHHLETSLGADKKLKDITWKRITNIEIFKQLVKVRINHIGEIVSVGEYD

SEQ ID NO: 23686 - protein, 1509 aa, unidentified
  REGION 1..1509: note = Cas Enzyme sequence
MKNIVGLDLGTNSIGWAVVNGSVNDDGSEQLVKIQASGSRIIPMDAAMIGDFNKGNSISQTAERTRLRGVRRLSERYLLRRERLHRILDILGFLPFHFAQDLDRHGKIVKGKEPKLAWRKNEAGQFEFIFQDSFKEMLEDFKLNHPNLITDDKKVPYDWTIYYLRKKGLTSKISKEELAWILLNFNQKRGYYQLRGEEEKKNDNVMIINSKVIDVVKAEKDKKYEKYWYNVLLENGLLYRAAFYNDISFWKGHTKEFVLKTIKLKILGTKQELSFLPSFDEIEKMEKKQKDKMYFKIKLKTEADIDQAHKTVGTYIYDTLLGNPSQKIRGRLVRTIERKYYKEELKLILDKQKEFHPELQDRALYAACIEELYPINEAHRNNVGNRDFTYLFLEDILFYQRPLKSKKSLIDNCPYEENQGLDKETGEIKSFPVKCIAKSHPLFQEFRLWQFIVNLRIYRKDLAQDVDVTNELLKTEEDYVALFDWLNGKKEIDQKAFLKYPVFGLKKEIENYRWNYVQDKPYPCNETRLLMLARLEKCDISIEFLTKENEEALWHILYSVEDKNEIVKALQKFADKHDLNASFVDVFRKFPPFKKEYGSYSAKAIKKLLPLMRMGKYWSEDSIDKGTRKRMDKIITGEYDEKIENRVREKVIHLADVSDFRGLPLWLVCYIVYGRHSEAKEITQWKSPADIDSYLKSFKQHSLRNPIVEQIIIETLRVVRDIWKQVGNIDEIHVELGREMKNPADKRKKMTQQMSENENTNLRIKYLLTEFLNPEYEVENVRPYSPSQQDILRIYEEGVLNSVSDLPEEISDILKKFTETDLKKRPSRSEILRYKLWLEQKYRSPYTGEVIPLGKLFTPAYEIEHVIPQSCYFDDSFSNKVICEAEVNKLKSNLLGHEFIVKHHGEIVELPFGKKVRIFTVDEYEQFVKDNYSRTRGKMKKLLMDDIPEEFVARQLNDSRYISKVVKSLLSNIVREKGEEEAISKNVIPCTGGVTDRLKKDWGINEVWNKIILPRFQRLNELTGTNKFTTKNVGIQEIPTMPLELQKGFNKKRIDHRHHAMDAIIIACANRNIINYLNNESATAKAELSRYDLQKLLCDKAKTDNNGNYKWVIRKPWASFTQDTYLALENIIVSFKQNLRVINKATNRFLHYNEEGKKIFVKQGKGDNWAIRKSMHKDTVFGEVNLRRIKTVALNEAMKNPQSIVVKDFKRKLLELWNLGFDAKRIKKYFEDNRETWSDINLSKIEVYYFSKDTKDRFFATRKPLDTSFDRKKIENNITDTGIQKILLRHLELKDNNPDIAFSPDGIDEMNRNIIQLNNGKYHQPIIKIRWYEQADKFAVGQTGNKFSKFVEAAKGTNLFFAVYESNILDKKTNTIIKKRNYATIPLNVAIERQKQGLPVAPEDENGNDPIFVLSPNDLVYLPTDDELANGIIAQPLDRGRIYKMVSCTGNEGHFIPARIANPILQTIELGSNNKAQKAWTDEMIKEICMPIKVDRLGNVLESSSSYKK

SEQ ID NO: 23687 - protein, 1508 aa, unidentified
  REGION 1..1508: note = Cas Enzyme sequence
MRTILGLDLGTNSIGWAVINSVIKEQTERIWIEMAGSRIIPMDAAILGDFDKGNSISQTAERTRFRGVRRLRERQLLRRERLHKVLKILGFLPEHYLKGIDFEKHTGKFLSGSEPKLPWVKDRWGKYSFLFQTAFNEMLADFAKHQPSLVFDGKKIPYDWTVYYLRKKALTEMISKEELAWILLNFNQKRGYYQLRGEEEEDNAGKSVEFYALKVLSVEATDEKKGRDIWYNVHLENGWVYRRSSNVPLDWEGRVKEFIVTTDLNPDGTPKLDKYGEVKRSFRAPKEDDWMLIKKRTEADIAGTHKTIGSYIYDALLQEPQQKIIGKLVKTVERKFYKEELNFILQKQCAFHAELQDRDLYMRCIEALYPGNEVQRRNIANRDFIYLLIDDVLFYQRPLKTKKSLIANCPYEENEYVNRKTGEIKTAPLKCIAKSHPLFQEFRLWHFLSNIRVYQKEREVNGTLYLDVDVTTEFLKTEDDYVALFDWLNSRKEIDQKAFLRYPAFGLKKEINNYRWNYVEDKFYPCNETRHAILSRLEKAGIGIDFLSDEKETALWHILYSVSDKQEIEKALATFAVKNGLNESFVEVFKKFPPFKSEYGAYSAKAIKKLLPLMRCGKYWDMSLIDGTTKERIERIIAGECDESIGAKVREKAMNLSDISCFKRLPLWLACYVVYNRHSEDKEITKWETPADIDAYLAAFKQHSLRNPIVEQVITETLRVVRDIWKQVGKIDEIHIELGREMKNPADKRKRMTTQILENENANLRIKALLAEFVNPEYGVENVRPYSPSQQEILRIYEDAVLKGEEQIPEDIDVILKKFNTSKLPTKSEFLRYKLWLEQKYRSPYTGELIPLAKLFTAAYEIEHVIPQSRYFDDSFSNKVICESAVNKLKDNQLGYEFIKNHHGQKVEVGFGKTVEIFSVDSYERFVKEQYAKSGIKMKKLLMDDIPEQFIERQLNDSRYISKVVKGLLSNIVREKNDSGEYEPEAVSKNILVCTGSVTDRLKKDWGMNDVWNSIVSPRFERLNALTETQCFGHWENKDGKKVFQTAVPLEYQKGFSKKRIDHRHHAMDAIVIACATRNHVNYLNNESASRNAKISRYDLQRLLCDKSRGDGNGNYRWIIKKPWTTFTQDAREALSGIIVSLKQNLRIINKTTNIYQHFDANGTRVYEKQKIGDSWAIRKPMHKDTVFGAVNLRKVKVVRLSVALDTPSMIVDKRVKNKVLELLSYKYDKKKIEKYFKENAFLWKELDIAKVAVYYFTENTTEPLVAVRKSLDSTFNEKKIASVTDTGIQKILLNHLKSKEGKAELAFSAEGIEEMNRNLLQLNDGKGHQPIYKVRVYEPRGNKFKVGVLGNKGAKWVEAAKGTNLFFAIYITEDGNRTYETIPLNWVIEREKQGLVPVPDRNEKGDKLLFWLSPNDLVYLPTEEERDFGRINEPIDRGRIYKMVSSSGNQCFFIPQSISNAIISTKELGSNNKAEKSWDGEMIKNICIPVKVDRLGRIIEVKYRVNE

SEQ ID NO: 23688 - protein, 1074 aa, unidentified
  REGION 1..1074: note = Cas Enzyme sequence
MKHPYGIGLDIGIASVGWAVVALNENAEPYGLIRCGSRIFDKAEQPKTGESLAAPRREARSTRRRLRRRSLRKADLYELMVQNGLPGRAKIEEAVQAGHLPDIYALRVQALDGPVTAMDFARILLHLMQRRGFRSNRKADDAQKDGKLLQAIDANTRRMEENHYRTVGEMMYRDPVFAEHKRNKSENYLSTVRRDQIVEEAVQLFAAQRQYGAAWASPEMEAEYLTILTRQRSFAEGPGGDSPYRGMQKVGPCALEGKSERRAPKATFAFEYFTLLQKINHIRIAENGVNRILTAEERQELLSACYRTDKLDFARIRKLLALPVEARFNMVRYRENQTAEECEKKEKITVLPCYHKMRKVLNTLRKDHIRSISREQLDAAATALTNPENEEKLRAALEEAQFEPLEVDALMTLPSFSGFGHISVKACRKLIPYLEQGLNYNDACKEAGYDFQGNYRGEKSQFLPASTEEMEDITSPVVRRAVAQTIKVVNAIIREQGESPVNIHLELAREMSKNFQQRNDLDKAMKDNNAENERLMKDLHELFPGRNITGQDLVKYRLWKEQDGRCAYSLQPLELEKAITVSGYAEVDHIVPYSISFDDRRANKVLVLASENRQKGNRLPLQYLQGKRRDDFIVYTKASVKNYRKRQNLLKEKLSEEDSKGFMQRNLQDTQYIASFMLNYIRSHLAFADFPAAGKKRVVAVNGAVTAFLRKRWGLGKVRADGDLHHAVDAAVIACTTDGMIQRVSRFYTHIETSDTRGERFPEPWPRFRDELMQRLSACPQENLMQINPVYYQNVDIASIQPVFVSRMPRHKMTGAAHKETIKGRLDDAHTVQRRSITDLKLDKEGEIAGYFNPSSDTLLYNALKEQLTAFGGDGKKAFAEPFFKPRADGTPGAQVRKVKVYDKATSMVAVHEGKGVADNDTMVRIDVYFVPGDGYYWVPIYVADTVKPELPNKAVVQGKSYAEWKEMDEENFLFSLCQNDLIRIESKRTMKFKVQNSDSTLEKEAQMNCSLAYFEGGNISTGVITVTTHDNAYIVGSLGFKTLQKVQKYQVDVLGNYTLVKKEKRQNFPAQRR

SEQ ID NO: 23689 - protein, 1525 aa, unidentified
  REGION 1..1525: note = Cas Enzyme sequence
MKKVLGLDLGPNSIGWSVVNKEEDENEGRERLTGIEAIGCRIIPMDAATLGDFGKGNSVSQTKETTRLRGIRRLGERFLLRRERLHRVLALLEFLPVHYANNLDRYGHFLKGTEPKLEWYKNEAGEWEFLFHESFDEMLADFKRFSSAFVENPKKIPYDWTIYYLRKKALTEKISKEELAWILLNFNQKRGYYQRDDEEDTDNETVERLKVVSVTKGEKEKKERYWYNVLLENGITYRAAFANDISCWEGSEKEFLVKRFEKKDKAPQLSVLPSFEDIDKMSDAQKNRMYAKIKLKTEKTIADSGKTVGSYIYDALLQNPCQKIRGKLVRTIDRKFYKEELLRILEKQCEFHAELQDPDLYKACIEELYPQNGAHRDSIVKRGFVYLFIEDILFYQRPLKSKKSLIADCPYESVCCEDKKTGEKKHYPIKCIAKSNPLFQEFRLWQFISNLRIYKKEESQDRDVTNELIKTEEDYVALFDWLNEKESIKQDDLLKFSHFGLKKKEIGSYRWNYVEDKNYPCNETRSKIVSRLKKCDGIPEDFPTQEDEMALWHILYSVSDKLELEKALNSFASKHGLNSTFVDNFKKFPPFKKEYGAYSAKAIRKLLSLMRFGKYWNETDIDPATRLRIDKIVSGEYDETIRARVREKAIHLSDISDFKGLPVWLACYVVYDRHSEVKDITKWNSPDDIDVYLKAFKQHSLRNPIVEQVVLETLRTVRDIWKKVGRIDEIHVELGREMKAPADKRAQMTAQIAENEAANMRIKYLLTEFLNPDLKIENVRPYSPSQQEILRIYEDGALNSEAEKPTEIEVILKKLNERDVQKRPTESEIRKYKLWLEQHYRSPYTGVLIPLAKLFTSAYQIEHVIPQSRYFDDSLSNKVICEAEVNSLKGNMLGHEFIEAHHGEKVSVTDGKTVTILSVEAYETQVKETYGRNRGKMKKLMMNDIPDDFIARQLNDSRYISKLVKSLLSNIVREEGEQEAISKNVIPCTGGITDRLKKDWGVNDIWNAIILPRFRRMNELTERTDFTTINQQGHEIPAMPLELQMGFNKKRIDHRHHAMDAIVIACADRNICNYLNNESARSGSAISRHDLQRLLCDKVKTDDNGKYKWLLKKPWDTFTQDTKSVLEQILVSFKQNSRIINKSGNRYWRYVDGKKRLVEQEKGERWAIRKSLHKDTVFGEVNLRRVKPVSLNAAIKNPQAIVDKELKMEILSLLAVGYDVKKIKKYFDEHCDVWQDVNLSKIEVYYFTQDANERFFATRKSLDAGFDKKKIENITDTGIQKILLRHLAEKGDDPKIAFSPEGIEEMNRNIVRLNNGKSHQPILKVRVSEKADKFEVGQSGNKRSKFVEADKGTNLFFAVYESKSVDERTGAVERNRSFVTIPLKEAIERIKAGLPIAKEDENGNFPIFVLSPNDLVYLPTKEELEKGEIGMPIDKSRIYKLVDSSDTTANFVPYIIANVIYSLKKDVAKDFCKGEDLIQNELGLGSPQSKNQRAWTSDCEMIKEICVPVKVDRLGQIVEIGKLSR

SEQ ID NO: 23690 - protein, 1538 aa, unidentified
  REGION 1..1538: note = Cas Enzyme sequence
MKHILGLDLGTNSIGWALVKSEQDCDDVERINGIEAAGSRIIPMDAAVLGDFAKGNTKSQTADRTAARGIRRMGERHKLRRERLNRVLDVMGFLPEHYSAALTRYGKFKDGEECKIAWRKDESGQWTFVFEDSFREMLADFVAHQPEWLAGGRKVPYDWTIYYLRKKALSKPLTKQELAWLLLNFNQKRGYYQLRGEDEHTDDKGKLVEYYALKVVGVEDTGDKKGKDTWFNIMLENGMVYRRPAAEAPDWIGKTKEFIVTTDLEKDGTPKKDKEGNIKRSFRMPKEDDWTLIKKKTENDIDRSGKTVGEYIYDALLADPTQKIRGKLVRTVERKYYKEELKKIINSQKRFIPELNDNELYGRCISELYQSNDAYRQSISSCDFTYLFVDNIIFYQRPLKSKKSLIDNCPYEEHSYTDSKTGEVKTAPVKCVAKSNPLFQEFRLWQFVQNIRIFERQKKIGDSVKTDVDVTGEFIKSADDVVSLFDFLNDRKDITQSVLLGTYFKIKKPKGKDSDYPYRWNYVEDKTYPCNETRALILKGLKDAGIDEGFLDKDKEYSLWHILYSVEDKQEITKAMEKFAAKNSLGGKFAEVFSSLPPFNKNYGSYSEKAIKKLLALMRTGKYWSADAIDKHTLERIDKIINGEYDESIRTRVREKAINLTDVSHFRGLSLWLACYIVYDRHSESKDITRWNCPADIDQYLDHFKQHSLRNPIVEQVVTETLRTVRDIWRQYGKIDEIHIEMGRDMKNPADVRAKMSKRMIDNENANLRIKAMLAEFADPDFGIAGVRPYSPSQQEMLRIYEEGALESVDEVPDEISEIISKFNQTDIKKRPTHGEIIKYKLWLEQKYQSPYTGRTISLSRLFTDDYQIEHVIPQSRYFDDSMSNKVICEAEVNQLKDRMLGYEFIKAHHGEKVLLSSGETVTILTAEEYERLVQLNFRKNPVKMKKLLMDDIPDKFIERQLNDSRYISKKIKSLLSNMVRDEGEQEDISKNVIACNGAITDRLKRDWGVNDVWNHIILPRFERLNAVTGSDRFTTTSTNGHTIPDMPLNLQKGFNKKRIDHRHHAMDAIVIACTTRSHVNLLNNEAAMSKNNAVRYQLSRKLRRYEDTMVTRNGETRTISVAREFLKPWPTFNADVEKALRGIVVSFKQNLRVINKTVNKYQKFVYNEEKHIKEKKAVRQEERNGRHLLAIRKPMHKDTVYGEVNLRRIKEVSLKDAVANSKAVVDKDLKKKLMAMIELGYDLKQITKYFEDNKDAWQDVNLKKIKVYYFTKDTGDRYFATRFGNDLVTLFSKITDRKNAEKQIERITDTGIQKILKRHLEANGGDCQKAFSADGIDEMNRNITQLNGGRPHKPVYKVRIYEKADKFAIGTKGNKAAKFVEAAKGTNLFFAVYLKEYEDSTTGETIKKRVFDTIPLKTVIDRLKNGQTPAPEEKDGAKLLFVLSPNDLVYLPTEDEVKNGTINRPLDKRRIYKMVSCTGTECYYIPFIVASPIVDKVEFFSLNKIGRAITGEMIKEICIPIKVDRLGNITEVNNENI

SEQ ID NO: 23691 - protein, 1424 aa, unidentified
  REGION 1..1424: note = Cas Enzyme sequence
MKRILGLDLGTNSIGWALVNEAETDEEVSSIIRLGVRVNPLTVDETQNFEKGKSITTNAERTLKRSMLRNLQRYKLRRDALVEFLKELGFITDETILSEQGNRTTFETCRLRAKAAEEEISLEELSRVLLMINKKRGYKSSRKVKKEEDGVLIDGMEIAKKLYEEDLTPGQLCSQLLESGKKVLPDFYRSDLQEELDRIWSVQKQFHPDVFCDAAKEEIKGKNRSQTWAILANYFVWKEEVVGWNDREAKNETIEKECKLVGLKRTTKGYELKKENYRWRAQALTEQLGLEEIAVVLQEINGQINASSGYLGAISDRSKVLYFNHQTVGQYQMAELDKNPHASLRNMVFYRQDYLDEFDRIWEKQAEFHKELTAELKKEIRDMIIFYQRRLKSQKGLISFCEFERLEIVVEKDGKKQTKVIGCKVIPRSHPLFQEFKVWQTLNDIKVLGREKKRNALSASESRALYPEEKEILARELAIKENMKKADVLKLLFENPQELDLNFKQIDGNRTGFSLFSAYSKMIEKYGYEPLDFKKPADEIIGQLRTIFTDLGWNTNLFTIDLTKEGKELEMQPYFRLWHLLYSFEGDNTSTGNGKLIEKIMQLCGVEKEYAVELASLSFQDDYGSLSAKAIKRILPYLKEGNLYDVACEYAGYRHSKSSLTKEEIENKVLKGKLEVLPKNSLRNPVVEKILSQMVNVINTIIDTYGKPDEIRVELARELKKSAKEREELTKAIAKSTREHEEIRKLLQDEFGMMNVSRNDIIRYKLYEELKDNGYKTLYSNQYIPKEKIFSKEIDIEHIIPQSRLFDDSLSNKTLEYKAINIEKGNKTAYDFVKEKYGEEGLQQYINRCESLFNDKKAKLRKLKMEQKDIPDGFIDRDLRNTQYIAKKALAMLNEICRRVVATTGSITDQLREDWQLVDVMKELNLPKYEALGFVETYEDKDGRKIKRIKDWTKRNDHRHHAMDALTVAFTKDAFIQYFNNKNAAQDSGNRNHTNIIGIKTRYFDKGRALPPIPLEQFRIEAKQHLEKLLVSIKAKNKVVTVNVNRTKKRKGENTKIQQTPRGQLHLETVYGSHKQYVTKIEKVNASFDAAKIATVSKRAYRNALLKRLETFGNDPKKAFTGKNALEKNPLYADKYQTIRVPEKVQTVEFETIYTIRKPVDPALNVDKVVDVKVRAILERRLKEYGGDPKKAFVNFWENPIWLNKEKGISIKRVSIRGINNAQSIHVKKDKNGNPIWDENGKQIPVDFVNTGNNHHVAIYRKPVLDKKGQVTFDEDGNLMYELDEVVVPFFEAVTRANLGLPIIDKDYRKSEGWQFLFSMKQNEYFVFPNEKTGFNPKEVDLLNPDNYAMISPNLFRVQTMSKVMYGNNVVRDYKFRHHLETTVKDMKELKDIAYKQYKTLSFGNSVVKIRINHIGQIVSVGEY

SEQ ID NO: 23692 - protein, 1373 aa, unidentified
  REGION 1..1373: note = Cas Enzyme sequence
MKKVLGLDLGTTSIGWAMVNQAENNEEKSSIIRAGVRVNPLTTDEKDAFEKGKAVTTNTDRRLKRSMRRNLQRYKLRRNELVSILKELGWIDDSTILAEHGNRSTFETYELRSKACTESVSLTELARVLLMINKKRGYKSNRKANAEEDGQPVDGMSVAKLLYEKGKTPGQYCYSLVKKGNKVLPEFYASDLKSEFRRVWETQRLYYPEYLTEEFWNQIDGKTRSSLTKLFFAKYKITTADNKGKDKRVKAYEWRAAAVENRLPIDQVAYVLCDIAGNLGSSSGYLGKISDRSKELYFNKQTVGQYLYSNIQKDPHFSTKNKVFYRQDYLDEFEAIWESQASFHPELTDELKKEIRDVVIFYQRRLKSQKGLISYCEFESRKVDVEINGRIVQKIRGCKVAPVSSPLFQEFRMWQKINNIIVTNKETGEQGTLEQDDKVRLAECLRVKDKLSDKEILKLLFKKPKDLEMNFKSIEGNETLGKLYSKFLEVVSLAGNSDYEYSKLRQEELMNILRTEFARNGFNTAVLEYDPSLPKEEYEMQPLFRLWHLLYSYEGDKSQTGNASLINKIAEICGMPENLAKIIASVSFKQDYASLSHKAMRKILPYMMDGNEYSLACEYAGYRHSKQSLTKEEIENKVLKDRLDQIPKNSLRNPVVEKILNQMVNVVNTVGDRYGKPDEIHIELARELKSSQEERARATESIASNNKENDRIRMILENEFHLAYVSRNDIVKYKLYEELKNNGYKTLYSNQYIPADKLFSREIDIEHIIPQAVLFNDSLSNKTLEFRDINLEKGKDTAFDYVKNKYGESGLEDYKLRVNHLFESGGISRTKRDNLLRDSKNIPEGFVERDLKDTQYIAKKAREILLEYVRVVVSTSGSITDKLREDWGLVNVMKEVNMPKFEAAGFVETITTSDGKDIRKIKDWTKRNDHRHHAMDAITIAFTKLAHIQYLNNLNAKGDKSSSIYAILQKETYLSGSKRLIIPPLPLDQMRREVRRQLESILVSIKAKNKVMTENINRIRIKDGVKNVKCLTPRGLLHKEQVYGQRKRYETYDVAVNGKMTEDVIATVASSETKAALALRLAQFKGDPKKAFTGANSLDKNPVWLDANHSRKLPAKVKCVRFVNVYSIRKNIDPSLSVEKVMDGRVRRILKDRLAEFGNDPKKAFVNLDENPIWFNKEKGIVLKSVTIAENFDLDPIRIKRDNLGRVICDAEGNHIPSDYVNFRNNHHAAIFEDADGNIQEHIVSFYEAVRRRSAGLPVVDKEYNADKGWKFLFTMKSNEMFVFPNERTGFDPRAVDLMDSENYSVIGPNLFRVQKMASKYYCFRHHLETTLGDDLKLKDITWKRITAINNLKGIVKVRINHIGEIVSVGEYD

SEQ ID NO: 23693 - protein, 1558 aa, unidentified
  REGION 1..1558: note = Cas Enzyme sequence
LYSSHHVAANSTYPFKTGYNRAPLNPFTTHKTQPYNIMTKNTMNIIGLDLGTNSIGWSWIQQLISPTPTQPSEYLFNGTPIIRMSGSRIIPMPGDVTGSFERGETISKTKDRTAKRMARRMNERFQLRRERLNRVLNIMGFLPEHYARALDRYGKLNEESNTTIAWRSKEDGKNEFIFYPSFLEMASIFKERHPDIQRIPLDWTLYYLRSKALHQAITKEELSWVLHSFNQKRGYYQSREDITEEDKTKKVEYIKGVVNSVEDTGEKAKGKKIYKVTFADGTEFTSTKSEAPLWIGRTREIIVTTSLDTSGKPKLDKEGKIIQSAKTPDEKDWTLIKIRTEATIDDSKLTVGEYIFHALLKNPETKIKGAYVSTIDRRFYINEINAILKEQEKYHEELRDKSLYEQCIKALYAQNEVRRNIIAPWSMKDLLTKDILFYHRPLKSKKSQISECPLEFHCYTDKDGETHRQGIKCIPVSHPLFQEYRIWQFISNLRIYEREHFDNGKHFTNVDKTSEFLTSEKKEELYEWLAEKDSVSQKTLLGRLGLKVERYHWNFPEEKTYPCGETRHLIQSRLKKANLQKAFHSLISDEQKDCFERGLWHILYSVSDYNELCKALKTFARKTGFTLEEQSLFVEAFSSCPPFKKDYGAYSKRAITKLLPLMRIGKFWHEESIDSTTKTRIEHLISGEECSGIDVRVREKVAKAGLCESIEQYQGLPQWLANYVVYNRHSEASEITKWESPDELDNYIRSFKQYSLRNPIVEQVSLETLRVVRDLWTELQKEGQTIDEIHLEMGRDLKNTAEERSRIFRRNSENEDTNFRIKLLLEEFYANEKDINDVRPYSPSQQELLRIYEEGVWQQEKDIPQDIKDIKKRISNDKDIKDITPNDIQRYRIWMDQKYCSPYTGKTIPLSRLFTTDYEIEHVIPRSRYFDDSYNNKVICEAAVNKDKNNRLGMEYIMAAGGKTIELGNGKNVQILKEEEYVELVDKIFGNNTRKRNIMLADEITEEFSHRQLNDTRYIARFMKGILSNIVREKNADGTLEPEETSKNLIVCSGRITDRVKQDWGLNDIWNHIITPRFERLNTKTSSNDFGEYVCKDGKRYFQTRVPLNLQKGFNKKRIDHRHHAMDAIAIACVNRSIVNYLNNAAANPTEREDLRRAVCIPERNGQTKRQLRSPWHCFARDAENALRQIVVSFKQNLRVATKATNSYECFDTASGKKIRKHQSNREHYAIRKPLHKDSVYGEVILTSIASVNLKKALLKAERILDKRLKEKIFELRKLYNYSNKQIEEHLTKVCINCPEWKNYDFKKIAVRILSNDADATHIVAIRKPLDESFDKIKINTITDTGIQKILKNHLSRYADDPKKAFTPEGIENMNANIASLNGGKQHLPIYKVRVSEKDNGGYFPIGQKGNRSKKYVTTAKETNLFFAVYADSNGKRSFKTIDLRTAIECKKQGLSVAPSVNEKGDKLLFTLSPNDLVYMPSEEEEANGFSIDNNLNKEQIYKMVSATYNRCFFIPHTVADFISRGQEYNSVNKIELTEDGRSIKEHCVPLKVNRLGK

SEQ ID NO: 23694 - protein, 1433 aa, unidentified
  REGION 1..1433: note = Cas Enzyme sequence
MKKILGLDLGCNSIGWALVNEAENTEEISSIIKLGVRVNPLTVDEMQNFEKGKSITTNADRTLKRSMRRNLQRYKLRRETLIEVLKEHGFITDSTLLSEHGNKTTFETYRLRAKAAVEEVSLEEFARVLLMINKKRGYKSSRKTKGSEDGVLIDGMDVARKLYEEGLTPGELCLQMLEAGKKNLPDFYRSDLQNEFDRIWNFQKRFNPELFCDAVKEEVRGKNRSQTWAILAKFFVWSEKESVWNEKEARTEERVKEYKLVGLKRDTKGNELKLENYRWRVQALSEQLNPEIVAIVLQEINGQISASSGYLGAISDRSKQLYFNRQTVGQYLMSELEKDPNVSLRNRVFYRQDYLDEFDRIWERQAEFHEELTVELKKEIRDIIIFYQRRLKSQKGLISFCEFEKREVIVEKDGRKQNKTVGCRVIPRSHPLFQEFKIWQTLNDIEVFAWDKQSKRKKADKSSTLFDNSEKPLLVEGKRSLYQEEKELLAKELFVKESMKKAEVLKLLFENFQELDLNFKQIDGNHTGFALFSAYSKMIEKYGYEPVDFKKSADEIIEKLETIFTNLGWNTELLSIDLSKEDKELERQSYFRLWHLLYSFEGDNTPTGNGKLLEKIMQLCGVEKEYAVELANVSFQEDYGSLSAKAIKKILPYLKEGNQYDVACDYAGYRHSKSSLTKDEIENKILKDKLDILPKNSLRNPVVEKILNQMVNLINTIIDTYGKPDEIHVELARELKKNAKEREELTKSIARNTREHDEIRQLLRTEFGMMNVSRNDIIRYKLYEELKDNGYKTLYSDEYIPREKIFSKEIDIEHIIPQARLFDDSLSNKTLEYRAINIEKGNKTAYDFVKEKYGDVGLQEYLNRCEALFKDKKTKLRKLKMEEKDIPEGFIDRDLRNTQYISKKALAMLNEISRRVVATTGSITDKLREDWQLVDVMKELNLPKYEILGLVETFKDKNGRRIKKITDWTKRNDHRHHAMDALTVAFTKDVFIQYYNNKNAVWMPTSKEHANIAGIKARYFEDGKALAPIPLAQFRAEAKRHLENLLVSIKAKNKVVTSNVNRTKKNNGENKKMQQTPRGQLHLETVYGSHRQYVTKMEKVNAAFDVTKIATVSKLAYRNALLKRLEAFGNDPKKAFTGKNTLEKSPLYLDENQTEMVPEKVQTVEFETVYTIRKPIDPNLSIDKVIDVKIRSVLEKRLKEYGGDAKKAFVNLDENPIWLNEARGISIKRVSIRGISNAQSLHEKKDKDGNLILGKEGRKIPVDFVNTGNNHHVAIYKKPVLDKVGQIVLDEEGNPKYELDEVVVSFFDAVTRANLGQPIIDKDYRRSEGWQFLFSMKQNEYFVFPNEKTGFNPKEVDLLNPENYAMISPNLFRVQKFTYKNYVFRHHLETTIKDTSSTLKGIIWTDFRSSKGLDKIVKVRVDHIGQIVSLGEY

SEQ ID NO: 23695 - protein, 1550 aa, unidentified
  REGION 1..1550: note = Cas Enzyme sequence
MKNILGLDLGSNSIGWAIVKALKNEDGKEILQSIDLAGSRIIPMDQATLGNFENGNSVSQTRERTGYRSARRLRERYLLRRERLLRVLNCMGFLPEHYSQNIDKYGKFFLDNEVKLSWKKDKMGKNEFIFLDSFNEMLEDFRHSQPQLLLDGRKVPYDWTIYYLRKKALTEKISKEELAWILLNFNQKRGYFQLRGEDEEVQGKKIEFYALKVVRVEDTGEKKGKDTWYNVYLESGLGDTDDYWVYRRASSVPIDEWEGQVKGFIVTTTLDNNGSPQIDKEGKVKRSFSIPKPEDWMLVKKKTEVDIKSSGKTVGTYIYDTLLQKPDQKIKGKLIRTIERENYTNELSLILENQKKFHLELQDRELYHQCIELLYCKNEAHKRVIGTWDFTSLFIKDILFYQRPLKSKKALIDNCPYEESFYIENGEKKSKPRKCIAKSHPLFQEFRIWQFISNLRIYQKVKEVDGKLQFNVDVTSDFLRDESAYVELFKWLNERAEVSQEDLLKHLGLKKTKTEDTVSLYRWNYVEDKKYPGNKTRSSILKKLLNDEKEALSEDIELKIWHLLYSVSAQSEIDKALSSKNVSTKGIYSGLSVYFSDETIQKIKNVKLESGYGSYSAKAIGKLLPLMRRGKYWNLESIDNHTKERIEKILNGECDETIRARTREKSISLTDISQFKGLPLWLACYIVYDRHSELKTIKKWNGPEDIDKFLKEFKQHTLRNPIVEQVIMETLRVVRDIWRRVGSIDEIHIEMGRDMKQTAQERARRSAIISRNENDNLRIKALLHEFMNPELGIENVRPYSPAQQEILRIYEDGVLSSVSEIEDEIKNILKKFNESEEGKRPTKNEIIRYKCWLEQKYRSPYTGEIIPLGKLFTPAYQIEHIIPQARFFDDSFTNKVICEAEVNAKKGDLLGYEFVKEKGGEIVELSGGRNVRIFSVEEYEDFVKEHYKSNKQKMQRLLAEDIPTEFSHRQLNDSRYISKYIRNLLSNIVREDDEQESVSKNVISCNGAITDRLKKDWGVNDVWNHIILPRFVRLEEIRADNGEKFTAFNQEGHLIPSMPLMYQKGFNKKRIDHRHHAMDAIVIACTTRDHVNLLNNECSNTQNNANKHQLSRKLRRYENVSYKQDGKLKEREVPKEFLKPWEEFTRDVEFALKNVIVSFRQNLRVLNKTVNYFQHWKDNSSEKEWKEQKSADHWSIRKPLHKETVSGEVFLWRTRFVSLREALTNPKRIVEKDLRSKILELQSKGYDTKRIKKYFEDNKDVWQDVNLSKIEVRYYSREIVDPQTELPKNRYFATRFGNDLISLFSGVSNFEKAKKIIESITDTGIQKILFRHLENKGNDPVLAFSPEGIDEMNRTIKTLNNGKDHKPIYKVRIYECSTMKFPLGSVGNKSKKFVEAAKGTNLYFAVYEKEVENDRGECHKERTFKTIPLNDVIRNLKQGLSIAPNDENGNPPAFILSPNDLVYLPTKEESETDSISQPLDRNRIYKMVSCTGYQVFFVPAFVAAPVLQKIELGSNNKSERARTDEMIKESCIPIKVDRLGMLISINGKAV

SEQ ID NO: 23696 - protein, 1550 aa, unidentified
  REGION 1..1550: note = Cas Enzyme sequence
MKNILGLDLGSNSIGWAIVKALKNEDGKEILQSIDLAGSRIIPMDQATLGNFENGNSVSQTRERTGYRSARRLRERYLLRRERLLRVLNCMGFLPEHYSQNIDKYGKFFLDNEVKLSWKKDKMGKNEFIFLDSFNEMLEDFRHSQPQLLLDGRKVPYDWTIYYLRKKALTEKISKEELAWILLNFNQKRGYFQLRGEDEEVQGKKIEFYALKVVRVEDTGEKKGKDTWYNVYLESGLGDTDDYWVYRRASSVPIDEWEGQVKEFIVTTTLDNNGSPQIDKEGKVKRSFSIPKPEDWMLVKKKTEVDIKSSGKTVGTYIYDTLLQKPDQKIKGKLIRTIERENYTNELSLILENQKKFHLELQDRELYHQCIELLYCKNEAHKRVIGSWDFTSLFIKDILFYQRPLKSKKALIDNCPYEESFYIENGEKKSKPRKCIAKSHPLFQEFRIWQFISNLRIYQKVKEVDGKLQFNVDVTSDFLRDESAYVELFKWLNERAEVSQEDLLKHLGLKKTKTEDTVSLYRWNYVEDKKYPGNKTRSSILKKLLNDEKEALSEDIELKIWHLLYSVSAQSEIDKALSSKNVSTKGIYSELSVYFSDETIQKIKNVKLESGYGSYSAKAIGKLLPLMRRGKYWNLESIDNHTKERIEKILNGECDETIRARTREKSISLTDISQFKGLPLWLACYIVYDRHSELKTIKKWNSPEDINKFLKEFKQHSLRNPIVEQVTMETLRVVRDIWRRVGSIDEIHIEMGRDMKQTAQERARCSAIISRNENNNLRIKALLHEFMNPELGIENVRPYSPAQQEILRIYEDGVLSSVSEIEDEIKNILKKFNESEEGKRPTKNEIIRYKCWLEQKYRSPYTGEIIPLGKLFTPAYQIEHIIPQARFFDDSFTNKVICEAEVNAKKGDLLGYEFVKEKGGEIVELSGGRNVRIFSVEEYEAFVKEHYKSNKQKMQRLLAEDIPTEFSHRQLNDSRYISKYIRNLLSNIVREDDEQESVSKNVISCNGAITDRLKKDWGVNDVWNHIILPRFVRLEEIRADNGEKFTTFNQEGHRIPSMPLMYQKGFNKKRIDHRHHVMDAIVIACTTRDHVNLLNNECSNPQNNANKHQLSRKLRRYENVSYKQDGKLKEREVPKEFLKPWEEFTRDVEFALKNVIVSFRQNLRVLNKTVNYFQHWKDNSSEKEWKEQKSADHWSIRKPLHKETVSGEVFLWRTRFVSLREALTNPKRIVEKDLRSKILELQRKGYDIERIKKYFEDNKDVWQDVNLSKIEVRYYSREIVDPQTELPKNRYFATRFGNDLISLFSGVSNFEKAKKIIESITDTGIQKILFRHLENKGNDPVLAFSPEGIDEMNRTIKTLNNGKDHKPIYKVRIYECSTMKFPLGSVGNKSKKFVEAAKGTNLYFAVYEKEVENDRGECHKERTFKTIPLNDVIRNLKQGLSIAPNDENGNPPAFILSPNDLVYLPTKEESETDSISQPLDRNRIYKMVSCTGYQVFFVPAFIAAPVLQKIELGSNNKSERARTDEMIKESCIPIKVDRLGMLISINGKAV

SEQ ID NO: 23697 - protein, 1504 aa, unidentified
  REGION 1..1504: note = Cas Enzyme sequence
MKNIVGLDLGTNSIGWAVVNGSVNDDGSEQLVKIQASGSRIIPMDAAMIGDFNKGNSISQTAERTRLRGVRRLSERYLLRRERLHRILDILGFLPFHFAQDLDRHGKIVKGKEPKLAWRKNEAGQFEFIFQDSFKEMLEDFKLNHPNLITDDKKVPYDWTIYYLRKKGLTSKISKEELAWILLNFNQKRGYYQLRGEEEEENKNKLVEFYALKVVAVEDSGEKKGKDIWYNVHLENGWVYRRTSNMPLDWVGKTKEFIVTTDLEKDGTPKKDKEGNVKRSFRAPKEDDWSLVKKKTEADIDQTHKTVGAYIYDTLLGNPSQKIRGRLVRTIERKYYKEELKQILEKQKEFHLELQDRVLYAACIEELYPINEAHRNNVGNRDFTYLFLEDILFYQRPLKSKKSLIDNCPYEENQGLDKETGEIKSFPVKCIAKSHPLFQEFRLWQFIVNLRIYRKDLAQDVDVTNELLKTEEDYVALFDWLNGKKEIDQKAFLKYPLFGLKKEVENYRWNYVQDKPYPCNETRSSMLARLEKCDISIEFLTKENEEALWHILYSVEDKNEIVKALQKFADKHDLNASFVDVFQKFPPFKKEYGSYSAKAIKKLLPLMRMGKYWSENSIDKGTRERMDKIITGEYDEKIENRVREKAIHLADVSDFKGLPLWLVCYIVYGRHSEAKEITQWKSPADIDLYLRSFKQHSLRNPIVEQIIIETLRVVRDIWKQVGNIDEIHVELGREMKNPADKRKKMTQQMSENENTNLRIKYLLTEFLNPEYEVENVRPYSPSQQDILRIYEEGVLNSVSDLPEEISDILKKFTETDLKKRPSRSEVLRYKLWLEQKYRSPYTGEVIPLGKLFTPAYEIEHVIPQSCYFDDSFSNKVICEAEVNKLKSNLLGHEFIVKHHGEIVELPFGKKVRIFTMDEYEQFVKDNYSRTRSKMKKLLMDDIPEEFVARQLNDSRYISKVVKSLLSNIVREKGEEEAISKNVIPCTGGVTDRLKKDWGINEVWNKIILPRFQRLNELTGTNKFTTKNVGIQEIPTMPLELQKGFNKKRIDHRHHAMDAIIIACANRNIINYLNNESATAKAELSRYDLQKMLCDKAKTDNNGNYKWVIRKPWASFTQDTYLALENIIVSFKQNLRVINKATNHFLHYNEEGKKIFVKQGKGDNWAIRKSMHKDTVFGEVNLRRIKTVALNEAMKNPQSIVVKDFKRKLLELWNLGFDAKRIKKYFEDNRETWSDINLSKIEVYYFSKDTKDRFFATRKPLDTSFDRKKIENNITDTGIQKILLRHLELKDNNPDIAFSPDGIDEMNRNIIQLNNGKYHQPIIKVRWYEQADKFAVGQTGNKSSKFVEAAKGTNLFFAVYESNILDKKTNTIIKKRNYATIPLNVAIERQKQGLPVAPEDENGNDPIFVLSPNDLVYLPTAADLANGIIAQPLDRGRIYKMVSCTGNEGYFIPARIANPILQTMELGSNNKAQKAWTDEMIKEICMPIKVDRLGNVLESSSSYKK

SEQ ID NO: 23698 - protein, 1236 aa, unidentified
  REGION 1..1236: note = Cas Enzyme sequence
EKQKEYYPEILTDVLKEELRGKKRDAVWAICAKYFVWKENYTEWNKEKGKTEQQEREHKLEGIYSKRKRDEAKRENLQWRVNGLKEKLSLEQLVIVFQEMNTQINNSSGYLGAISDRSKELYFNKQTVGQYQMEMLDKNPNASLRNMVFYRQDYLDEFNMLWEKQAVYHKELTEELKKEIRDIIIFYQRRLKSQKGLIGFCEFESRQIEVDIDGKKKIKTVGNRVISRSSPLFQEFKIWQILNNIEVTVVGKKRKRRKLKENYSAIFEELNDAEQLELNGSRRLCQEEKELLAQELFVRDKMTKSEVLKLLFDNPQELDLNFKTIDGNKTGYALFQAYSKMIEMSGHEPVDFKKPVEKVVEYIKAVFDLLNWNTDILGFNSNEELDNQSYYKLWHLLYSFEGDNTPTGNGRLIQKMTELYGFEKEYATILANVSFQDDYGSLSAKAIHKILPHLKEGNRYDVACVYAGYRHSESSLTREEIANKVLKDRLMLLPKNSLHNPVVEKILNQMVNVINVIIDIYGKPDEIRVELARELKKNAKEREELTKSIAQTTKAHEEYKTLLQTEFGLTNVSRTDILRYKLYKELESCGYKTLYSNTYISREKLFSKEFDIEHIIPQARLFDDSFSNKTLEARSVNIEKGNKTAYDFVKEKFGESGADNSLEHYLNNIEDLFKSGKISKTKYNKLKMAEQDIPDGFIERDLRNTQYIAKKALSMLNEISHRVVATSGSVTDKLREDWQLIDVMKELNWEKYKALGLVEYFEDRDGRQIGRIKDWTKRNDHRHHAMDALTVAFTKDVFIQYFNNKNASLDPNANEHAIKNKYFQNGRAIAPMPLREFRAEAKKHLENTLISIKAKNKVITGNINKTRKKGGVNKNMQQTPRGQLHLETIYGSGKQYLTKEEKVNASFDMRKIGTVSKSAYRDALLKRLYENDNDPKKAFAGKNSLDKQPIWLDKEQMRKVPEKVKIVTLEAIYTIRKEVSPDLKVDKVIDVGVRKILIDRLNEYGNDAKKAFSNLDKNPIWLNKEKGISIKRVTISGISNAQSLHVKKDKDGKPILDENGRNIPVDFVNTGNNHHVAVYYRPVIDKRGQLVVDEAGNPKYELEEVVVSFFEAVTRANLGLPIIDKDYKTTEGWQFLFSMKQNEYFVFPNEKIGFNPKEIDLLDVENYGLISPNLFRVQKFSLKNYVFRHHLETTIKDTSSILRGITWIDFRSSKGLDTIVKVRVNHIGQIVSVGEY

SEQ ID NO: 23699 - protein, 997 aa, unidentified
  REGION 1..997: note = Cas Enzyme sequence
LKEKRLTIGELFFRRLTENAFFRCKEQVYPRQAYVEEFDCIMNCQRKFYPDILTDETIRCIRDEIIYYQRPLKSCKYLVSRCEFEKRFYLNAAGKKTEAGPKVAPRTSPLFQVCRLWESINNIVVKDRRNEIVFISAEQRAALFDFLNTHEKLKGSDLLKLLGLSKTYGYRLGEQFKTGIQGNKTRVEIERALGNYPDKKRLLQFNLQEESSSMVNTETGEIIPMISLSFEQEPLYRLWHVLYSIDDREQLQSVLRQKFGIDDDEVLERLSAIDLVKAGFGNKSSKAIRRILPFLQLGMNYAEACEAAGYTHSNNYTKAENEAHALLDRLPAIKKNELRQPVVEKILNQMVNVVNALMEKYGRFDEIRVELARELKQSKEERSNTYKSINKNQRENEQIAKRIVEYGVPTRSRIQKYKMWEESKHCCIYCGQPVDVGDFLRGFDVEVEHIIPKSLYFDDSFANKVCSCRSCNKEKNNRTAYDYMKSKGEKALSDYVERVNTMYTNNQISKTKLQNLLTPVDKISTDFIDRQLRESQYIARKAKEILTSVCYNVTATSGSVTSFLRHVWGWDTVLHDLNFDRYKKVGLTEVIEVNHRGSVIRREQIKDWSKRFDHRHHAIDALTIACTKQAYVQRLNNLRAEEGPDFNKMSLERYIQSQPHFSVAQVREAVDRILVSFRAGKRAVTPGKRYIIRKNRKRISVQSVLIPRGALSEESVYGVIYVWEKDELGHVIQKQRAVMKYPITSINREMLDKEKVVDKRIHRILSGRLAQYNDNPKEAFAKPVYIDKECRIPIRTVRCFAKPAINTLVPLKKDDKGNPVAWVNPGNNHHVAIYRDEDGKYKERTVTFWEAVDRCRVGIPAIVTQPDTIWDNILQRNDISENVLESLPDVKWQFVLSLQQNEMFILGMNEEDYRYAMDQQDYALLNKYLYRVQKLSKGDYNFRYHTETSVEDKYDGKLNLELSRQMGKLKRVSIKSLLGLNPHKVHISVLGEIKEIS

SEQ ID NO: 23700 - protein, 973 aa, unidentified
  REGION 1..973: note = Cas Enzyme sequence
LEKANVCIDFLSNEKEVALWHILYSVSDKQEIEKALRTFAAKNGLDESFVEAFKKFPPFKSEYGAYSAKAIKKMLPLMRCGKYWDVSSIDDTTKERIKKIVTGEYDERIAVKVRDKVMNLSDISCFRRLPLWLACYIVYNRHSEDKEAVKWESPADIDAYLASFKQHSLRNPIVEQVITETLRVVRDIWKQVGRIDEIHIELGREMKNPADKRKRMTAQILENENANLRIKALLAEFMNPEYEIENVRPYSPSQQEILRIYEDTVLHAEDQLPEEIDAILKKFNSSKVPTKSEFLRYKLWLEQKYRSPYTGELIPLGKLFTAAYEIEHVIPQSRYFDDSFSNKVICESAVNKLKDNQLGYEFIKNHHGQKVEVGFGKSVEIFSVDSYERFVKEQYAKSAVKMKKLLMDDIPEQFIERQLNDSRYISKVIKGLLSNIVREKNDSGEYEPEAVSKNIVVCTGSVTDRLKRDWGMNDVWNSIVYPRFERLNSLTDTQSFGHWENKSGKKVFQTELPLEYQKGFSKKRIDHRHHAMDAIVIACATRNHVNYLSNESASRNAKISRYDLQRLLCDKNRTDDNGNYKWVIKKPWDTFTQDAREVLSKIVVSLKQNLRIINKTTNVYRHFDATVNRVYEKQKTGDSWAIRKPMHKDTVFGAVNLRKVKVVRLSVALDTPAMIVDKRVKNKVFELLSYKYDKKRIEKYFKENAFLWKELDLAKVAVYYFTEATTEPLVAVRKPLDSTFNEKKIKESVTDTGIQKILLNHLCTKEGKPDLAFSAEGIEEMNRNLLQLNNGKSHQPIYKVRVYEPRGNKFSVGVLGNKGTKWVEAAKGTNLFFAIYITEDGKRTYETIPLNVVIEREKQGLVPVPDRNEKGDKLLFWLSPNDLVYLPTEEEREFGRINEPIDRGRIYKMVSCTGNEGHFIPANVANPIVPVIELGSNNKAQRAWTNEMIKDICIPIKVDRLGHIIEVKYRIDE

SEQ ID NO: 23701 - protein, 1504 aa, unidentified
  REGION 1..1504: note = Cas Enzyme sequence
MKNILGLDLGTNSIGWAVVNGSVNDNGSEQLVKIQASGSRIIPMDAAMIGDFNKGNSISQTAERTRLRGIRRLSERYLLRRERLHRILDILGFLPSHFAQDLDRHGKIVKGKEPKLAWRKNEAGQFEFIFQDSFKEMLEDFKLNHPNLITDDKKVPYDWTIYYLRKKGLTSKISKEELAWILLNFNQKRGYYQLRGEEEEENNNKLVEFYALKVVAVEDSGEKKGKDIWYNVHLENGWVYRRTSNMPLDWVGKTKEFIVTTDLEKDGTPKKDKEGNVKRSFRAPKEDDWSLVKKKTEADIDQTHKTVGTYIYDTLLGNPSQKIRGRLVRTIERKYYKEELKLILDKQKEFHPELQDRALYAACVEELYTINEAHRNNIGNRDFTYLFLEDILFYQRPLKSKKSLIDNCPYEENHCLDKETGEIKSFPVKCIAKSHPLFQEFRLWQFIVNLRIYRKGLAQDVDVTNELLKTEEDYVALFDWLNGKKEIDQKAFLKYPLFGLKKEVENYRWNYIQDKPYPCNETRSSMLARLEKCDISIEFLTKENEEALWHILYSVEDKNEIVKALQKFADKHDLNASFVDVFRKFPPFKKEYGSYSAKAIKKLLPLMRMGKYWSENSIDKGTRERIDKIITGEYDEKIENRVREKAIHLVDVSDFRGLPLWLVCYIVYGRHSESKEITQWKSPADIDSYLKSFKQHSLRNPIVEQIIIETLRVVRDIWKQVGNIDEIHVELGREMKNPADKRKKMTQQISENENTNLRIKYLLTEFLNPEYEVENVRPYSPSQQDILRIYEEGVLNSVSDLPEEISDILKKFTETDLKKRPSRSEVLRYKLWLEQKYRSPYTGEVIPLGKLFTSAYEIEHVIPQSCYFDDSFSNKVICEAEVNKLKSNLLGHEFIVKHHGEIVELPFGKKVRIFTVDEYEQFVKDNYSRTRGKMKKLLMDDIPEEFVTRQLNDSRYISKVVKSLLSNIVREKGEEEAISKNVIPCTGGVTDRLKKDWGINEVWNKIILPRFQRLNELTGTNKFTTKNVGIQEIPTMPLELQKGFNKKRIDHRHHAMDAIIIACANRNIINYLNNESATAKAELSRYDLQKLLCDKAKTDNNGNYKWVIRKPWASFTQDTYLALENIIVSFKQNLRVINKATNHFLHYNEEGKKIFVKQGKGDNWAIRKSMHKDTVFGEVNLRRIKTVALNEAMKNPQSIVVKDFKRKLLELWNLGFDAKRIKKYFEDNRETWSDINLSKIEVYYFSKDTKDRFFATRKPLDTSFDRKKIENNITDTGIQKILLRHLELKDNNPDIAFSPDGIDEMNRNIIQLNNGKYHQPIIKVRWYEQADKFAVGQTGNKSSKFVEAAKGTNLFFAVYESNILDKKTNTIIKKRNYATIPLNVAIERQKQGLPVAPEDENGNDPIFVLSPNDLVYLPTAADLANGIIAQPLDRGRIYKMVSCTGNEGHFIPARIANPILQTIELGSNNKAQKAWTDEMIKEICMPIKVDRLGNVLESSSSHKK

SEQ ID NO: 23702 - protein, 1213 aa, unidentified
  REGION 1..1213: note = Cas Enzyme sequence
LRGKKRDAVWAICANAFVWKETYTEWNNEESKNEQIEKEHKLEGIYSKRKRDEAKKENLQWRVSGLKEKLSLEQLVIILQEINTQINNSSGYLGTISDRSKELYFNKQTVGQYLMDILDNNPNASLRNIVFYRQDYLDEFNVLWEKQAEFHKELTGELKKEIRDIIIFYQRRLKSQKGLISFCEFESRQIEVKIDGKRKIRTVGNRVIPRSSPLFQEFKIWQILNNIEVTAVGNKNKQRMQNGSNEPDDTEQLELNGRRYLYQEEKELLAKELFVRDKMTKLDVLRLLFDNPEELDLNFKTIDGNKTGYLFFQAYSKMIEMSGHEPVDFKKPIEKIVEQVKSVFVLLNWNTDILSFDSNKELDKQSYYKLWHLLYSFEGDNTPTGNGCLVQKIMDSYGLGKEFAKILANITFQEDYGSLSAKAIHKILPHLKEGNQYDVACEYAGYRHSKSSLTKEEIANKVLKDKLEVLPRNSLRNPVVEKILNQMVNVINAIIEAYGRPDEIRVELARELKKNAKEREKLTKSIAETTKTHEAHKKLLQEEFGLKNVGRSDILRYKLYKELESRGYKTLYSNTYIPREKLFSKEFDIEHIIPQARLFDDSFSNKTLEARNVNIEKGNRTAYDFVKEKFGESGTDNSLDCYLNNIEVLFVSGKISKTKYTKLKMTEQDIPGGFIERDLRNTQYIAKKALSMLNEISRCVVATSGSITDKLREDWQLVDVMKELNWEKYKALGLVEYFEDKDGKQIGRIKDWSKRNDHRHHAMDALTVAFTKEVFIQYFNNKNASLNPNTNEYAIKNKYFQNGRAIAPIPLNEFRAEAKKHLENTLISIKAKNKVITNNINKTKKRGGVNTKKQQTPRGQLHLETIYGCCRQYLTKEEKVNASFDVSKIATVSSSVYRDALLKRLQEHHNDPKKAFAGRNSLDKKPVWLDKEQIRKVPEKVKTVTFETIYTIRKEISPDLRVDKIIDSGVRKMLTGRLKEYGNDAKKAFSNLDEKPIWLNKEKGIPIKRVTISGISNAQSLHVKKDKDGKPVLDGNGRNIPVDFVNTGNNHHVAVYRRPVIDKNGQMVIDENGNLKYELEEVVVTFFDAVTRVNLGQPIIDKDYKASEGWQFLFSMKQNEYFVFPNKKTGFNPKEIDLLDADNYGLISPNLFRVQKFTHKNYVFRHHLETTIKDTSSILRGITWIDFRSSKGLDSIVKVRVNHIGQIVSVGEY

SEQ ID NO: 23703 - protein, 1228 aa, unidentified
  REGION 1..1228: note = Cas Enzyme sequence
MDANMTKILGLDLGTASIGWALVERNDTGYALLDQGVDIFQEGVAREKNSEKPAVQDRTAARALRRQYARRRLRKIDLLRVLVRHDLCPALTDEQLKDWKQKKIYPLTDEFIRWQRTDDRTDKNPYRDRYKALTETLDLDTQRDRYTLGRALYHLAQRRGFLSNRKDAGDESESGKVRQNIEDLTVDMEKAGCAYLGEYFYRLYARKEKIRTKYTSRNEHYLAEFRAICEKQRLADDLRKALHRAIFYQRPLKSQKGSVGRCTFEKDKSRCPASHPRFEEFRMLSFVNNIRITTPDDPEPRPLSRQETETILPLFTRKTKPHFDFEEIAKKLAGKGRYACQGDRGEAPYRFNFARTATVTGCPVTASLIALFGDDYLTKICDLYTLGAGKTREQILGDVWHALFSFDDEERLSAWAKQKLRLSDDEAGRFAAIRLPQDYAALSLHAINKILPYLREGYRYDEAVFVANLKAVLPSDIYSDESERSAIEADIAALITDFRRNPLNRGTTKEQCVRDYLRNCRGIDEKRLGRLYHPSMIEIYQTAQPDAQGILQLGSPRTPAVRNPMAMRALFRLRVLVNRLLRDGKIDRETKIHIEFARGLNDANRRKAIELYQRDREAERKAYADEIRRQYASESGREIEPTDDDILKYRLWKEQNHICPYTGKQIGLSDFMGDSARFDIEHTVPRARGGDNSQMNKTLCESRFNRELKRDKLPSELPNHADVMARIDEFGWPEKIAGLQKQIEMQRRKSKSATTKSEKDGAIQRRHVLQMQLDYWRGKYERFTMTEVPDGFSNRQGVDIGMIGKYARLYLKTVFERIYTVKGATTAEFRRMWGLQEEYARKERVNHTHHCLDAIVIACIGRNEYDRWAQYAGDEERYRRGEGAKPRFEKPWPTFTEDLEAVAGRLLVAHHTPDNMPKQSRKRLRIRGRIRTGRNGETLYAQGDTARGALHQQTFYGAIERQGEVRYVVRKPLGQLQPADVDKIVDDAVRQKVKEAIDAVGFKTAMDTESHPIWMNEQKRVPIRKVRIFAGKNISPKPLGEKKHRDLSVHPHKRPVYVSYGSNYCMAVYEGKDKRGKLKRTFEIVSTLEAAQYFKASADKAARPDLVPQSDEKGFPLKCILKTGTMVLFYEETPEELYECTQQELAKRLYKLTKFSSMTTGNNSYGLCTFRHHREARPAGELKSKNGTWKVGEAYRPIINLLHTQLNAYVEGFDFELSVTGTVRFKHE

SEQ ID NO: 23704 - protein, 1078 aa, unidentified
  REGION 1..1078: note = Cas Enzyme sequence
MHWPYGIGLDIGVASIGWATVALDEKAQPCGLIRLGSRVFKRAEQPKTGESLAAPRREARSMRRRLRRKALRKQDFYQLLEKNHLPGKEELSQLFEAGGLEDIYALRTRALDEAVTPQEFARILLHLMQRRGFKSNRRADKSKEDGALLQAVTQNRLRMQQNGYRTVGEMLYKDPLFVACKRNKGENYLSTVSREEVANEAQLLFAAQRDKGQTWATPELEAEYLSILLRQRSFDQGPGGNSPYRGGWVEKIGPCTLLPEEKRAFKNTYSFERFTLLQKINHIRVQESGQTRALSDEERQKVIDLAYRVETVPYARIRKELKWPQEIRFTDVRYDVDAAPETAEKKYKLPVMKGYHALRKALGTQQPELPLWDDIITILASHRDEDVRKKLLEEKGLTAEQIEAVLGLDFSGVGHISLKACQLLEPWLMQGLTYDQACTQAGLNFHGHGNTEKTSKLPASAPELEDITSPVVRRAVSQTIKLVNAIIREMRQPPVWIHIELARELSRTFEERRKDQKSMEDNAKQNERLMQEIRDTFHKLNPTGQDLIKYRLWKEQDGICAYSQQSIAAERLFEPGYAEVDHIVPYSISFDDSRSNKVLVMAAENRQKGNRLPLQYLQGERREKFIVWTKSQVRNYRKQKNLLRETLSDEDQKGFKQRNLQDTQYMARFLLNYIRDHLAFADHPAAGKQRVMALAGAVTSHLRKRWGLTKVRADGDLHHALDAAVIACATQGMVQQISGYYHRIEGEYQQSPNGTYSVHTRTGERFPAPWPHFRDELIQRLSQEPQQNLMQWNPVFYSNFDVESIRLVFVSRMPQHKVTGAAHKETIKSPKALQDGFLIVKHPLTDLKLNKKTGEIEGYYQPSSDKLLYEALRARLLEFDGDGKKAFTEPFYKPKADGTPGPLVRKVKLCEKASLCVPVHGGNGAADNDSMVRVDVFFVPGDGYYMVPIYVSDTKKKELPNRAVVAAKKYAEWKVMENKDFIFSLYPDDLIEVEHKKELVFSIANKESTLPPKWETSKILAYYVSFDISTGAIKISSNDNAYILRGLGIKTLLSLRKYEVDILGNLREVSKEQRQSFR

SEQ ID NO: 23705 - protein, 1399 aa, unidentified
  REGION 1..1399: note = Cas Enzyme sequence
MKTILGLDLGTTSIGWALVKEAEPFSDEKSEIVRLGVRVIPLTVDERTSFENGKSITTNALRTQKRGMRRNLQRYKLRRQALIEELKSTGWIGNDFIFSETGPGSTFRTLRLRAKSASEEVTLGDLARILLQINKKRGYKSSRKMVSSDDGQAIDGMAVAKEMYDKGLTPGEYVYQRMLEGKYAIPEFYKSDLQEEFDRIWALQKSFHTELTDELYRKLSDRNKSQTWAICRDELGIQGLKSSFTGKERLKEAYRYRHLAATQEVNMEVLTCALQEINGQKASLSGLLSKISDRSKELYLNNLTVGQMLLKRIEDNPNNSLKNIVFYRQDYLDEFERIWTVQSKYHTELTHELKKRLRDIIIFYQRPLKSQKGLISLCELETKDIEVAIDGVKKMKNIGPRVCPRSSPLFQEFKIWQTINNIFVNGAALDDEDKSVIAKELMFKDKLKDSDLLKLLFKTTKGQSVNFKEVDGNRTMATLMKACFKIAENLGYDDIDLSKLSSEDQMVRIEGIFKEQGFKTGFLHFDSSLASPEFENQDSYRLWHLLYSYEGDKSASGNESLVKCIMDLCSMDEGSAKILASCTFLPDYGSLSAKAMRKILPYMKDGLEYTAACAMAGYRHSKRSLTKEELDTKEYSDRLSLLPKNTLRNPVVEKILNQMINVVNSVIDVYGKPDEIRIEMARELKKSAKEREEAQRDIASSTAESQKVIEILKGEPFFLQFPTRNDIIRYRLYQELAQNGFKTLYSNTYIPKDKLFSKEFDIEHIIPQALIFNDSFANKTLESRQCNLEKGKETAMDYVKSKYDETGVQAYCDRVNGLIGKGISKTKAKWLLMEGKDIPEDFINRELRDSQYIAKKAREILESLVKFVVPTTGSVTARLREDWQLVNVMQELNWEKYARLGLTGVREDKDGRRIPFIQDWTKRNDHRHHAMDALTIAFTRRQFIQYLNHLNSKIDVVSWDKKDLDLRDYDLEDIKFGNLSAGDRYGIVKALQDKFLYKDGNDKYRFVPPIPLDEFRRQAKEQLSDILISFKAKNKVCTRNVNVTKNKGGANRKTQLTPRGPLHNETIYGSSLEYVTKENEKIGSSFDAERITTVCKKKFRDALARRLEEFGGDPKKAFTGKNSPEKNPIWVDEHHSEQVPAKVRTVTMGQRFTGRKPIDATLKIEKVIDKRIREILQARLDEFDGKAAKAFSNLDENPIWLNKEKGIAIKRVTVSGPANPVPVRFKRDKDGKPIIDDAGKTIGADFVTPGNNHHIAIFRDSSGKLQEHPVSFLEATIAKSHGLDVIDRNYNKDEGWEFLFTLKQNEYFVFPNSETGFNPLDYDLTDPRNYAEISPNLYRVQSISTNDYFFRHHLETTSEKNNSLYGITWKRIRNASALEGLVKVRIDNLGRIVAVGEYD

SEQ ID NO: 23706 - protein, 1247 aa, unidentified
  REGION 1..1247: note = Cas Enzyme sequence
MKVLGLDLGVGSVGWCLIEVDGKYNPIEILSMGSRILSLTPDESSNFDRGNGESVCAQRTFRRTARKMLCRYKMRRCLLRSQLAFLGMLDSADSLNSLSPLELWKLRSDAATSGVGLTLPEIGRVLLHLNQKRGYKHAKTDVADAKQTEFVQGVNRNYAEIHAEGKTYGQHFYERLLATAATTDKGAKVATFRIRENVFPRQAYEDEFDTIMRVQRKFYPEILTDEVIAGLRNAIFFQRPLKSCKHLVSVCEFEGKNYRTADGREVFGGPKVAPRTSPLAQVCRLYEVINNIRLVNVRNKDAAPIPDGIVSSEARKSQYQFVFTAEERERIYEFLNTHEKMTVTDLLKLIGLKRGDGFRPDQSLGKGIPGNKTYTALFNALEGVDRRDELLRFNLRFIDWNADSATGDVRRVVSPDFINEPLYRLWHTAYSIADRDELAAALAKNFGITDPAVVDRIFAIDFTGAGFSNRSARFMRRIIPYLTEGMVYSDAAAAAGVNHSASVTAEENAARVLVDHLDIIKKGSLRQPVIEKILNQMIHVVNSLIAQFGPIDEVRVELARSLKQSAKERSDASTAINAREKENKALGEKIAEYGLMPSRRTIQKLRLWEETEHVCMYCGQPVSATEFLTGDAEVEHIIPRSIFFDDSLSNKTCACRRCNKAKNNRTAYDFMKEDHTDEEFRAYIARVEAMAEAKKISRTKRDRLLCPKEEIPSDFLERDLRQSQYIARKAMEILHTVVRNVWATSGSVTDFFRHQWGYDRILHDLSLDKYALTGLVEEVEYEHKGQTHRRQQIKNWSKRFDHRHHAVDALVIALTRQGYVQRLNNLNAEHGNIHAELVKENADFTRNKSQLELWASTRPRFDIETVRKAVERIAVSFKSGKKLTTPGKRAIMRGGKKTVVQDKLVIPRGALHQETVYGLIRLPDGRKTLKYAFDTPTLVSDPAARKAIQAILEHFGGNVKKALKSLPGEGLEVMRKGKRENVTEVSCHRFEYVVRKSVAALKYKDILKIVDGAVRRSVEVRFAECGNKDSEYQKSLAERPLILPGAFTPIRTVRIATGLKPKSMAAVRRDSSGNPIGYAKTASNHHIAIYEDSVGRKLCSVTSMWDGVLRRLNGIPVIVKHPDDAWNLLMDIADEDVRERLAASLPRPDWKFLMSLQMNQMFVLGLSEDEFNDAVRNNDRATLASHLYRVQKLADNDFSLRRHTNTTADDTTEFRKMLDVYRLSTQAFLNLKPHKVKITPTGDFAYD

SEQ ID NO: 23707 - protein, 1508 aa, unidentified
  REGION 1..1508: note = Cas Enzyme sequence
MKKILGLDLGTNSIGWAVINSLVDDEGKEKLTSISSCGSRIIPMDAATLGDFDKGNAKSSVAERTRLRGIRRLLERSLLRRERLHRVLSVMGFLPEHYASQLDRYGKFLPETEPKLAWYKDNTGSYRFLFQDSFNEMLEDFRLYHPELVAEGKKIPYDWTIYYLRKKALSQKIAKEELAWILLNFNQKRGYYQLRGEEEQEDNKKSVEYYALKVVAVEDSGERKGKDIWYNVKLENGWIDRRASSVPLDWTGKVKEFVVTTDLDDAGNPKKDKDGNVKRFFRAPKENDWGLLKTKTQTQIDESGQTVGAYIYDSLLRMPDQKIRGKLVRTIERKYYKDELRKILLKQTEFHAALQDHNLLLSCIEELYPNNEAHRRLLSTSNFTCFLLEDILFYQRPLKSQKGLIDDCPYESHVYRDKKDGSLHRTPLKCISKSHPLFQEFRLWHFLSFLRIYQRERMIDGSLKLDVDVTNEFLQNEDDYVKLFDWLNGRKEIDQKTILAYKPFGLKKNEQPKYRWNYVEDKSYPCNETRADMISRLSKAGVSEGFLTEEREEALWHILYSISDKKELTKALGTFAEKNGLNEAFVEQFSKMPPFESNYAAYSLKAIRKLLALMRMGKYWNEQDIDKQTRSRIEKILTGEYDETIRTRVREKAIHLTDISSFRGLPLWLACYVVYNRHSEAKELVKWETPADIDHFLSKFRQHSLRNPIVEQVLMETLRTVRDIWKQEGQIDEIHVELGREMKNPAKERARITAQALENENTNLRIKALLTEFMNPEFEIENVRPYSPGQQEILRIYEEGVLSGVAEKDLPEDIISILKKFRENDVKKRPTTSEVLRYKLWLEQRYRSPYTGRIIPLGKLFTPAYEIEHVIPQSRYFDDSISNKVICESAVNKLKDNCLGYEFIKKHSGEIVELGNGEKATVFTSEEYEHFVKESYLGNGKKMKKLLLEDIPDNFIERQLNDSRYISKVVKSLLSNIVCEEGEQEGMSKNVIVCTGGVTDRLKKDWGVQDVWNRIILPRFLRLNKMTDSTDFTSVSTNGHLLPALPLHLQKGFNKKRIDHRHHAMDAIVIACADRNIVNYLNNASARKGSEISRYDLQHLLCDKVKTDANGNYKWMLRKPWDTFTQDVYTALTNIVVSFKQNLRVINRTTNYYQHYNESGEKKMIPQVKGDRWAIRKPMHKDTVYGEVNLRREKTLPLKDVLNNPSIVVDKSLKSKLHELLKAQYDLKAITKYFEAHQDVWADINLKKIKVYYFTKETNERFFATRKSLDSSFNQKKIQEEVTDTGIQRILLRHLQLNDNNPDIAFSPDGIERMNQNMNILNDGKGHQPIYKVRTYEKAEKFAVGEHGNKVKKFVEAAKGTNLFFAVYESIQEDEATGKQVRKRTFATIPLNEVIKRKKQGLSVAPEDSNGNLPIFVLSPNDLVYLPTEEERNSGKVTQPLDRERIYKMVSCTGNRLFLVPYMVASPIYDKKEFTSLNKIELTDDKISIKEWCIPILIDRLGNISINY

SEQ ID NO: 23708 - protein, 1312 aa, unidentified
  REGION 1..1312: note = Cas Enzyme sequence
VQNGFLGITVSSEQVGWAVTNPKYELERASRKDLWGVRLFDKAETAEDRRMFRTNRRLNQRKKNRIHYLRDIFHEEVNQKDPNFFQQLDESNFCEDDRTVEFNFDTNLYKNQFPTVYHLRKYLMETKDKPDIRLVYLAFSKFMKNRGHFLYKGNLGEVMDFENSMKGFCESLEKFNIDFPTLSDEQVKEVRDILCDHKIAKTVKKKNIITITKVKSKTAKAWIGLFCGCSVPVKVLFQDIDEEIVTDPEKISFEDASYDDYIANIEKGVGIYYEAIVSAKMLFDWSILNEILGDHQLLSDAMIAEYNKHHDDLKRLQKIIKGTGSRELYQDIFINDVSGNYVCYVGHAKTMSSADQKQFYTFLKNRLKNVNGISSEDAEWIDTEIKNGTLLPKQTKRDNSVIPHQLQLREFELILDNMQEMYPFLKENREKLLKIFNFVIPYYVGPLKGVVRKGESTNWMVPKKDGVIHPWNFDEMVDKEASAECFISRMTGNCSYLFNEKVLPKNSLLYETFEVLNELNPLKINGEPISVELKQRIYEQLFLTGKKVTKKSLTKYLIKNGYDKDIELSGIDNEFHSNLKSHIDFEDYDNLSDEEVEQIILRITVFEDKQLLKDYLNREFVKLSEDERKQICSLSYKGWGNLSEMLLNGITVTDSNGVEVSVMDMLWNTNLNLMQILSKKYGYKAEIEHYNKEHEKTIYNREDLMDYLNIPPAQRRKVNQLITIVKSLKKTYGVPNKIFFKISREHQDDPKRTSSRKEQLKYLYKSLKSEDEKHLMKELDELNDHELSNDKVYLYFLQKGRCIYSGKKLNLSRLRKSNYQNDIDYIYPLSAVNDRSMNNKVLTGIQENRADKYTYFPVDSEIQKKMKGFWMELVLQGFMTKEKYFRLSRENDFSKSELVSFIEREISDNQQSGRMIASVLQYYFPESKIVFVKEKLISSFKRDFHLISSYGHNHLQAAKDAYITIVVGNVYHTKFTMDPAIYFKNHKRKDYDLNRLFLENISRDGQIAWESGPYGSIQTVQKEYAQNHIAVTKRVVEVKGGLFKQMPLKKGHGEYPLKTNDPRFGNIAQYGGYTNVTGSYFVLVESMEKGKKRISLEYVPVYLHERLEDDPGHKLLKEYLVDHRKLNHPKILLAKVRKNSLLKIDGFYYRLNGRSGNALILTNAVELIMDDWQTKTANKISGYMKRRAIDKKARVYQNEFHIQELEQLYDFYLDKLENGVYKNRKNNQAELIHNEKEQFMELKTEDQCVLLTEIKKLFVCSPMQADLTLIGGSKHTGMIAMSSNVTKADFAVIAEDPLGLRNKVIYSHKGEK

SEQ ID NO: 23709 - protein, 1509 aa, unidentified
  REGION 1..1509: note = Cas Enzyme sequence
MKTILGLDLGTNSVGWAVINSVIKEQAERIWIETAGSRIIPMDAAVLGDFDKGNSISQTSERTRLRGARRLRERQLLRRERLHKVLNILGFLPNHYLEYIDFEKHPGKFLADAEPKLAWVKDEQGKYTFLFQAAFDEMLADFAIHQPSLVSGDKKIPYDWTIYYLRKKALTEMISKEELAWILLNFNQKRGYYQLRGEEEEDNAGKSVEFYALKVLTVEATDEKKGRDVWYNVHLENGWIYRRSSSVPLDWEGQVKEFIVTTDLNPDGTPKLDKYGEVKRSFRAPKEDDWMLIKKRTEADIANTHKTVGAYIYDTLLQKPQQKIIGKLVKTVERKLYRDELSLILQKQCAFHAELQDRALYARCVEALYPSNEVRRKNIANRDFVYLLMDDILFYQRPLKTKKSLIANCPYEENEYVDRETGEIKKAPLKCIAKSHPLFQEFRLWNFLSNIRIYQKEKEINGTLHLDVDVTAEFLKTEDDYVALFDWLNSRKEIEQKTFLKYPKFGLKKEISNYRWNYVEDKQYPCNETRHAILSSLEKANVCIDFLSNEKEVALWHILYSVSDKQEIEKALRTFAAKNGLDESFVEAFKKFPPFKSEYGAYSAKAIKKMLPLMRCGKYWDVSSIDDTTKERIKKIVTGEYDERIAVKVRDKVMNLSDISCFRRLPLWLACYIVYNRHSEDKEAVKWESPADIDAYLASFKQHSLRNPIVEQVITETLRVVRDIWKQVGRIDEIHIELGREMKNPADKRKRMTAQILENENANLRIKALLAEFMNPEYEIENVRPYSLSQQEILRIYEDTVLHAEDQLPEEIDAILKKFNSSKVPTKSEFLRYKLWLEQKYRSPYTGELIPLGKLFTAAYEIEHVIPQSRYFDDSFSNKVICESAVNKLKDNQLGYEFIKNHHGQKVEVGFGKSVEIFSVDSYERFVKEQYAKSAVKMKKLLMDDIPEQFIERQLNDSRYISKVIKGLLSNIVREKNDSGGYEPEAVSKNIVVCTGSVTDRLKRDWGMNDVWNSIVYPRFERLNSLTDTQSFGHWENKSGKKVFQTELPLEYQKGFSKKRIDHRHHAMDAIVIACATRNHVNYLSNESASRNAKISRYDLQRLLCDKNRADDNGNYKWVIKKPWDTFTQDAREVLSKIVVSLKQNLRIINKTTNVYRHFDATVNRVYQKQKTGDSWAIRKPMHKDTVFGAVNLRKVKVVRLSVALDTPAMIVDKRVKNKVFELLSYKYDKKRIEKYFKENAFLWKELDLAKVAVYYFTEATTEPLVAVRKPLDSTFNEKKIKESVTDTGIQKILLNHLCTKEGKPDLAFSAEGIEEMNRNLLQLNNGKSHQPIYKVRVYEPRGNKFSVGVLGNKGTKWVEAAKGTNLFFAIYITEDGKRTYETIPLNVVIEREKQGLVPVPDRNEKGDKLLFWLSPNDLVYLPTEEEREFGRINEPIDRGRIYKMVSCTGNEGHFIPANVANPIVPVIELGSNNKAQRAWTNEMIKDICIPIKVDRLGHIIEVKYRIDE

SEQ ID NO: 23710 - protein, 1148 aa, unidentified
  REGION 1..1148: note = Cas Enzyme sequence
RALYAACIEELYPINEAHRNNVGNRDFTYLFLEDILFYQRPLKSKKSLIDNCPYEENQGLDKETGEIKSFPVKCIAKSHPLFQEFRLWQFIINLRIYRKDLAQDVDVTNELLKTEEDYVALFDWLNGKKEIDQKAFLKYPVFGLKKEIENYRWNYVQDKPYPCNETRSSMLARLEKCDISIEFLTKENEEALWHILYSVEDKNEIVKALQKFADKHDLNASFVDVFQKFPPFKKEYGSYSAKAIKKLLPLMRMGKYWSENSIDKGTRERIDKIITGEYDEKIENRVREKAIHLADVSDFKGLPLWLVCYIVYGRHSEAKEIIQWKSPADIDSYLRSFKQHSLRNPIVEQIIIETLRVVRDIWKQVGNIDEIHVELGREMKNPADKRKKMTQQMSENENTNLRIKYLLTEFLNPEYEVENVRPYSPSQQDILRIYEEGVLNSVSDLPEEISDILKKFTETDLKKRPSRSEVLRYKLWLEQKYRSPYTGEVIPLGKLFTPAYEIEHVIPQSCYFDDSFSNKVICEAEVNKLKSNLLGHEFIVKHHGEIVELPFGKKVRIFTVDEYEQFVKDNYSRTRSKMKKLLMDDIPEEFVTRQLNDSRYISKVVKSLLSNIVREKGEEEAISKNVIPCTGGVTDRLKKDWGINEVWNKIILPRFQRLNELTGTNKFTTKNVGIQEIPTMPLELQKGFNKKRIDHRHHAMDAIIIACANRNIINYLNNESATAKAELSRYDLQKMLCDKAKTDNNGNYKWVIRKPWASFTQDTYLALENIIVSFKQNLRVINKATNRFLHYNEEGKKIFVKQGKGDNWAIRKSMHKDTVFGEVNLRRIKTVALNEAMKNPQSIVVKDFKRKLLELWNLGFDAKRIKKYFEDNRETWSDINLSKIEVYYFSKDTKDRFFATRKPLDTSFDRKKIENNITDTGIQKILLRHLELKDNNPDIAFSPDGIDEMNRNIIQLNNGKYHQPIIKIRWYEQADKFAVGQTGNKSSKFVEAAKGTNLFFAVYESNILDKKTNTIIKKRNYATIPLNVAIERQKQGLPVAPEDENGNDPIFVLSPNDLVYLPTDDELANGIIAQPLDRGRIYKMVSSSGEQCFFIKHIVANVLVDKFEFSPLNKMERALTGEMIKMICMPIKVDRLGNVLESSSSHKK

SEQ ID NO: 23711 - protein, 1509 aa, unidentified
  REGION 1..1509: note = Cas Enzyme sequence
MKKILGLDLGTNSVGWAVINSVVNDEGKEQLVNISSCGSRIIPMDAATLGDFDKGNSKSPVAERTRLRGVRRLLERSLLRRERLHRVLSVMGFLPEHYAAQLDRYGKFLPETEPKLAWYKDETGKYRFLFQDSFNEMLEDFHEHHPELVAEGKKIPYDWTIYYLRKKALSQKITKEELAWILLNFNQKRGYYQLRGEEEQEDNKKSVEYYALKVVAVEDSGDRKGKDIWYNVKLENGWVYRRASGVPLDWVGKVKEFIVTTDLDEKGNPKKDKDGNVKRSFRAPKEDDWGLLKTRTQAQIDESGQTVGTYIYESLLRMPDQKIRGKLVRTIERKYYKDELRKILIKQSEFHTALQDHNLLLACIEELYPNNEAHRRLLSTSDFTYFLVEDILFYQRPLKSQKGQIDDCPYESHVYRDKKDGSLQHVPLKCVSKSHPLFQEFRLWHFLSFLRIYQRERMIDGSLKLDVDVTNEFLQNEDDYVKLFDWLNERKEIDQKTILAYKPFGLKKNEQSKYRWNYVEDKSYPCNSTRADMIFRLSKAGVPEEFLTREKEEALWHILYSISDKKELTKALGTFAEKNGLNETFVEIFSKMPPFESDYAAYSLKAIRKLLALMRMGKYWDEQAIDEHTRSRIEKILTGEYDETIRTRVREKAMHLTDISSFRGLPLWLACYVVYDRHSEAKELVKWETPDDIDHFLRKFKQHSLRNPIVEQIIMETLRTVRDIWKQEGKIDEIHVELGREMKNPAKERARITAQVLENENTNLRIKALLAEFMNPEFEIENVRPYSPAQQEILRIYEEGVLSGVAEKDLPDDIASILKKFRENDVKKRPTTSEVLRYKLWLEQRYRSPYTGRIIPLGKLFTPAYEIEHVIPQSRYFDDSFTNKVICESAVNKLKDNCLGYEFVKKHSGEKVELGNGETATIFSVEEYERFVKDSYFNNSKKIKKLLLEDIPDNFIERQLNDSRYISKVVKSLLSNIVCEEGEQEGMSKNVIVCTGGVTDRLKKDWGVQDVWNRIILPRFLRLNKMTDRTDFTAVSTNGHLLPAVPLHLQKGFNKKRIDHRHHAMDAIVIACAGRNIVNYLNNASARKGSEISRYDLQHLLCDKVKTDANGNYKWILRKPWETFTQDLYAALTNIVVSFKQNLRVINRTTNHYQHYNEDGEKKMIPQTKGDRLAIRKPMHKDTVYGEVNLRKEKTLPLKDVLNNPSIVVDKSLKNKLYELIKAQYDLKAITKYFETHQDVWADVNLKKIKVYYFTKETNERFFATRKSLDSSFSQKKIEEEVTDTGIQKILLRHLQQNGNNPDIAFSPDGVERMNQNMTILNDGKWHQPIYKVRTYEKADKFAVGEKGNKVKKFVEAAKGTNLFFAVYESIQEDEATGKQVRKRTFATIPLNEVIKRKKQGLPAAPEDSKGNLPIFVLSPNDLVYLPTEEERNSGKIIQPLDRERIYKMVSCTEGECHCIPEYVANPILQTIELGSNNKAQRAWSGEMIKEICVPVKVDRLGNVSLIKI

SEQ ID NO: 23712 - protein, 1248 aa, unidentified
  REGION 1..1248: note = Cas Enzyme sequence
MKKILGLDLGSASIGWAMITEKEENGETKCEILGLGSRIIPYEGTEGKDFAKGTGESRNSLRTKARTARKGYDRYQLRRKYLVDSLLKNKMYPDETLKSLPKMQLWELRVKAVHSEISLPELGRLLLWLNQKRGYKSSRSDANMDKKDTEYVATVKSRHEKIKELNVTIGQYFYQELVKDEFFRIKENIFPREAYIEEFVAICKTQQQYHSAVLNDELIEKLRNEIIYFQRPLKSQKGLVSVCEFEGFYRIGKDGKEYFVGPKVAPKSSPLFQLSKIWENINNIKIGSRTGEDIEMTLEQKWAIFEHLDNSEKLTPSDLLKILNLKKDNCYINKQLAKGLNGNITKHAIRQCLGDSTIYESLLKLDLRVIETEKEGYIYDKKTGEIFESKPIKYIDPLIEREPFYQLWHTIYSIQDQEECSNALQNKFDIEPEIADKLAGIDFSKHAFGNKSVKVIRKILPYLMEGDGYSEAMSYAGYDHSNSLTKDENLKRKLLDQLKPIAKNSLRQPIVEKILNQMVNVVNAVIEKYGKPDEIRVELARELKQSKEERNETDKAMSKRQRENETITSRLEEFGLRATRNNIIKWRLYEEIDNDDKKLNAICVYCGQPISVIQAIKGNDVDIEHIIPKSKLFDDSQSNKTLAHRHCNKDKNDRTAYDFMKSKSEEALNEYVDRVNMLYANRIINKSKRDKLLMTESKIPDNFIDRQLRESQYIAKKAREILQSICHNVWTTSGTITAELRHLWGWDDVTMNLQLEKYKALGQTHIVEWESEHGKNKHEKEVITGWTKRDDHRHHAVDALTIACTKQGYIQRFNTLSASKTREDMKFEIEQRSINFKEKLSLLDKYIIGEQPLDVGEVERAVANILISFKSGKKVAVVGKRKIGRRGDKKVVQTGIIVPRGSLSEESVYGRIKTLEMKKPIKYLFENPQLIFKLNIKTLIKERLEKYNGDTKEAISSLKKEPFYLDKGKAILLEYATCFKDEYVIKYTVNTDFNKVDKVIDGKIKEILQARLMKFGGKAKEAFKDVQGEDKTLKKWYEDEGLERPIKSVRCSTGLSAIVPVKKDSEGKDIGFVKPGNNHHIAIYKDSEGNSFEHICSFWHAVERKKYGIPVIIQNTNQIWDKIGMQPEGTFPESFLAKLPSVQWNLSVSMQQNEMFILDIEKEEFGNLLYQNDNSLLSKNLYLVWSLSDCDYWFRHHLETKNSELKSIEGAKESKRYYRFKSLGAFLKMNPIKVRINHIGQIVSIGEY

SEQ ID NO: 23713 - protein, 1242 aa, unidentified
  REGION 1..1242: note = Cas Enzyme sequence
MKKILGLDLGSASIGWAMIIENDENGKTNSQILGLGSRIIPYEGTEGKDFAKGTGESRNSGRTKARTARKGYDRYQLRRKLLVEILIKNNMMPNEALKGLPKMQLWKLRDKAVRSEISLQEFGRILLWLNQKRGYKSSRSDANLDKKDTDYVATVKSRHEKIKELNLTVGQYFYSEFKNNEYYRVKENIFPRAAYIEEFETICDRQKSNLNLSTELIDKIKNKIIYYQRPLKSQKGLVSVCEFEGFLRKGKDDKEYFVGPKVAPKSSPIFQLAKIWENINNIKLNSRTGGEIEISTEQKWALFEHLDNNEKLTQTDLLKILELKKENCYVNKQLSKGIQGNITKQTIRQCFENSEAYKNLLKLDLKVVETSSEGYLYDKKTGEILGSKQIKFIDPIVEKEPFYQLWHTIYSINDQEECSNTLQTKFGFDEITANKLAGIDFSKYAFGNKSVKVIRKILPYLMEGDGYSEAMSYAGYDHSNSLTKEQNIERKLLDNLKQIDKNSLRQPIVEKILNQMVNVVNAIIDKYGKPDEIRVELARELKQSKEERNDADKANSKRQRENENITKRLAEYGLRATRNNIIKWRLYEEIDNDDKKLNAMCIYCGHPISLTEAIKGNDVDIEHIIPKSKLFDDSQSNKTLAHRHCNRNKNDLTAYDFMKGKSEQALTEYIERVNRLYANGVIRKAKRDKLLMTEDKIPDNFIDRQLRETQYISKKAREILQTICYNVWSTSGTVTAELRHLWGWDEVTMNLQMPKYKELGLTHTVEWESDHGKNKHLKDVITDWSKRDDHRHHAVDALTIACTKQSYIQRFNTLSASKTREDMQFDIDNTSVEFKEKRSLLEKYIISQQPIVVSEVEEAVSKILISFKAGKKVAVKGTRKIGNKGNKRVVQTNIIVPRGQLHQEFVYGKIKCIDEKKPIKYLFENPSLIFKPYIKELVEERLSELENDSKKALASLKKDPIYLDENKSVILDYGSCFKDEYVIKYSVDINFNKADKVIDSRTKEILQNRLNKFDGKAKEAFKDVQLADKTQIKWYEDEGLERPIKSVRCLTGLSAVVSVKKDEGGKDIGFVKPGNNHHIAIYEDKDGNKFEHVCTFWHAVERKKYGIPVIIQKPAEVWDKIQLQPENTYPESFLEKLPNVEWSLQLSMQQNEMFVLGMTQEDIELAFSTNNYKMISDKLFVVWSLSESDFWFRHHLETKGSDLKNIEGARESKRYFRFKSIGALTGLNPFKLKIDCLGNISL

SEQ ID NO: 23714 - protein, 1101 aa, unidentified
  REGION 1..1101: note = Cas Enzyme sequence
RPLKSKKSLISNCPYEEYTYTNKETGEICTSSLKCIAKSHPLFQEFRLWQFISNLRIYQKKGTINGKFTTDIDVTNQFLKTEDDYANLFDWLNQKKEIRQDTFLKKPAFGLKKNIANYRWNYVEDKTYPCNETHYKILSYWEKAGIEQSALTSEIEEKLWHILYSISDKNELRKALQHFADKNYLSDKFADTFQQIPPFEKDYGSYSAKAIKKLLPLMRIGRYWKAENFDSTTLDRIEKILTGEFEENIKNRTREKTIHLDNLYSFQGLPTWLACYIVYNRHSEIKDVTKWQQPSDIDAFLNAFKQHSLHNPIVEQIIMETLRTVRDIWKQTGHIDEIHVELGREMKNPAEKRRKLTQQIQENENTNLRIKALLTEFANPEFGIENVRPHSPSQQDLLRIYEEEVLNETKDIPEDIAVILKKFNEIDTKKRPSTSDVLRYKCWLEQKYRSPYTGAMIPLGKLFTPAYEIEHVIPQSRYFDDSFTNKVICEAEVNKLKGNMLGYEFIKNNQERIVELGFGQNVKIQTVEAYELFVKEHYSYNRTKMQKLLMEDIPDQFIERQLNDSRYISKLIKSLLSNIVRDEGEEEATSKNVIVCTGSITDRLKKDWGINDVWNKLILPRFIRLNEITESNRFTTTNACNKTIPAMPLDLQKGFNKKRIDHRHHAMDAIVIACANRNIVNYLNNESASKNAKISRQDLRQILCKKTKTDNLGNYQWLIDKPWDTFTQDMYSILSNIIVSFKQNLRIINKTTNHYIHYENGKKVNCSQKQSDSWAIRKPMHKETVYGEINLRRTTTATLKAALENPQRIIEKDLKKKIKELLTQGLNEKQIKKYFEDNKDIWQEINLKKIPVYYFTKETANRFFACRESINTTFNKKKIEEKVADTGIQQILLRHLEQNGNNPEQAFSPEGIEQMNKNIMSLNNGKFHQPIYKVRTYEQADKFAVGQTGNKSTKFVEAAKGTNLFFAIYETAHKRSFASIPLNVVIERLKKGLSPAPENEKGNLPKFILSPNDLVYVPTKEEIENGHINQPIQKDRIYKMVSCTGNQCFFIKSNVANTIIDKYEFSPLNKMERAITGEMIKETCIPIQTDRLGNIITPISL

SEQ ID NO: 23715 - protein, 1398 aa, unidentified
  REGION 1..1398: note = Cas Enzyme sequence
MKTILGLDLGTTSIGWALVKEAEPFSDEKSEIVRLGVRVIPLTVDERTSFENGKSITTNALRTQKRGMRRNLQRYKLRRQALIEELKSTGWIGNDFIFSETGPGSTFRTLRLRAKSASEEVTLGDLARILLQINKKRGYKSSRKMVSSDDGQAIDGMAVAKEMYDKGLTPGEYVYQRMLEGKYAIPEFYKSDLQEEFDRIWALQKSFHTELTDELYRKLSDRNKSQTWAICRDELGIQGLKSSFTGKERLKEAYRYRHLAATQEVNMEVLTCALQEINGQKASLSGLLSKISDRSKELYLNNLTVGQMLLKRIEDNPNDSLKNIVFYRQDYLDEFERIWTVQSKYHTELTHELKKRLRDIIIFYQRPLKSQKGLISLCELETKDIEVAIDGVKKMKNIGPRVCPRSSPLFQEFKIWQTINNIFVNGAALDDEDKSVIAKELMFKDKLKDSDLLKLLFKTTKGQSVNFKEVDGNRTMATLMKACFKIAENLGYDDIDLSKLSSEDQMVRIEGIFKEQGFKTGFLHFDSSLASPEFENQDSYRLWHLLYSYEGDKSASGNESLVKCIMDLCSMDEGSAKILASCTFLPDYGSLSAKAMRKILPYMKDGLEYTAACAMAGYRHSKRSLTKEELDTKEYSDRLSLLPKNTLRNPVVEKILNQMINVVNSVIDVYGKPDEIRIEMARELKKSAKEREEAQRDIASSTAESQKVIEILKGEPFFLQFPTRNDIIRYRLYQELAQNGFKTLYSNTYIPKDKLFSKEFDIEHIIPQALIFNDSFANKTLESRQCNLEKGKETAMDYVKSKYDETGVQAYCDRVNGLIGEGISKTKAKWLLMEGKDIPEDFINRELRDSQYIAKKAREILESLVKFVVPTTGSVTARLREDWQLVNVMQELNWEKYARLGLTGVREDKDGRRIPFIQDWTKRNDHRHHAMDALTIAFTRRQFIQYLNHLNSKIDVVSWDKKDLDLRDYDLEDIKFGNLSAGDRYGIVKALQDKFLYKDGNDKYRFVPPIPLDEFRRQAKEQLSDILISFKAKNKVCTRNVNVTKNKGGANRKTQLTPRGPLHNETIYGSSLEYVTKENEKIGSSFDAERITTICKKKFRDALARRLEEFGGDPKKAFTGKNSPEKNPIWVDEHHSEQVPAKVRTVTMGQRFTGRKPIDATLKIEKVIDKRIREILQARLDEFDGKAAKAFSNLDENPIWLNKEKGIEIKRVTVSGPANPVPVRFKRDKDGKPIIDDAGKTIGADFVTPGNNHHIAIFRDSSGKLQEHPVSFLEATIAKSHGLDVIDRNYNKDEGWEFLFTLKQNEYFVFPNSETGFNPLDYDLTDPRNYAEISPNLYRVQKIATGDYYFRLHLETTVEDNKALKGITWKRVGPSGLEGAVKVRIDNLGRIVAVGEYD

SEQ ID NO: 23716 - protein, 1524 aa, unidentified
  REGION 1..1524: note = Cas Enzyme sequence
GKEILQSIDLAGSRIIPMDQATLGNFENGNSVSQTRERTGYRSARRLRERYLLRRERLLRVLNCMGFLPEHYSQNIDKYGKFFLDNEVKLSWKKDKMGKNEFIFLDSFNEMLEDFRHSQPQLLLDGRKVPYDWTIYYLRKKALTEKISKEELAWILLNFNQKRGYFQLRGEDEEVQGKKIEFYALKVVRVEDTGEKKGKDTWYNVYLESGLGDTDDYWVYRRASSVPIDEWEGQVKEFIVTTTLDNNGSPQIDKEGKVKRSFSIPKPEDWMLVKKKTEVDIKSSGKTVGTYIYDTLLQKPDQKIKGKLIRTIERENYTNELSLILENQKKFHLELQDRELYHQCIELLYYKNEAHKRVIGTWDFTSLFIKDILFYQRPLKSKKALIDNCPYEESFYIENGEKKSKPRKCIAKSHPLFQEFRIWQFISNLRIYQKVKEVDGKLQFNVDVTSDFLRDESAYVELFKWLNERAEVSQEDLLKHLGLKKTKTEDTVSLYRWNYVEDKKYPGNKTRSSILKKLLNDEKEALSEDIELKIWHLLYSVSAQSEIDKALSSKNVSTKGIYSELSVYFSDETIQKIKNVKLESGYGSYSAKAIGKLLPLMRRGKYWNLESIDNHTKERIEKILNGECDETIRARTREKSISLTDISQFKGLPLWLACYIVYDRHSELKTIKKWNSPEDINKFLKEFKQHSLRNPIVEQVTMETLRVVRDIWRRVGSIDEIHIEMGRDMKQTAQERARCSAIISRNENNNLRIKALLHEFMNPELGIENVRPYSPAQQEILRIYEDGVLSSVSEIEDEIKNILKKFNESEEGKRPTKNEIIRYKCWLEQKYRSPYTGEIIPLGKLFTPAYQIEHIIPQARFFDDSFTNKVICEAEVNAKKGDLLGYEFVKEKGGEIVELSGGRNVRIFSVEEYEAFVKEHYKSNKQKMQRLLAEDIPTEFSHRQLNDSRYISKYIRNLLSNIVREDDEQESVSKNVISCNGAITDRLKKDWGVNDVWNHIILPRFVRLEEIRADNGEKFTTFNQEGHRIPSMPLMYQKGFNKKRIDHRHHVMDAIVIACTTRDHVNLLNNECSNPQNNANKHQLSRKLRRYENVSYKQDGKLKEREVPKEFLKPWEEFTRDVEFALKNVIVSFRQNLRVLNKTVNYFQHWKDNSSEKEWKEQKSADHWSIRKPLHKETVSGEVFLWRTRFVSLREALTNPKRIVEKDLRSKILELQRKGYDIERIKKYFEDNKDVWQDVNLSKIEVRYYSREIVDPQTELPKNRYFATRFGNDLISLFSGVSNFEKAKKIIESITDTGIQKILFRHLENKGNDPVLAFSPEGIDEMNRTIKTLNNGKDHKPIYKVRIYECSTMKFPLGSVGNKSKKFVEAAKGTNLYFAVYEKEVENDRGECHKERTFKTIPLNDVIRNLKQGLSIAPNDENGNPPAFILSPNDLVYLPTKEESETDSISQPLDRNRIYKMVSCTGYQVFFVPAFIAAPVLQKIELGSNNKSERARTDEMIKESCIPIKVDRLGMLISINGKAV

SEQ ID NO: 23717 - protein, 1390 aa, unidentified
  REGION 1..1390: note = Cas Enzyme sequence
MKNIFGLDLGTTSIGWAVVNEAENDNEQSALIALGERVNPLSTDERTNFEKGKSITTNSDRNLKHGARLNLFRYKMRRNNLISLLRDNGIIDDSSILAENGEHTTFETHKLRAKAATERIELTEFARVLLSINKKRGYKSSRKADSAEEGKAIDGMSIAKELYENDLTPGQYVYARLLQNKKYVPDFYRSDLNAEFNRIYARQSTYYPDVLTPELAEQLNGRNEKATWAIIAEAFNIKGAKRATKGFDKKVEDYKWRVDALVDKLDPEQIAGVLSKINRDISGSSGYLGAIGDRSKSLYFSGLTVGQYQYECLVKNPHHSLKNEVFYRQDYLDEFERIWTVQASHHDKLNDKLKSEVRDIVIFYQRRLKSQKGNVAICELVQYSVDVTVDGKTKRKIVGPKVCPKSSPVFQEAKILQILNNVKVTNRNDDTERQLSGDEKSALLRELNWCDKMSATEALKLISLNPRIYSINYKQLEGNTTNALLLKSFMSVVDVTGHDSEAIEDLPASKKAEIVEGIFKSQGFNTDIFHFDSSVEGQAIEHQPAYMLWHLIYSYEGDDSISGNEALIKKLCEKFNFDSESAAIIAGVVFKADYGNLSTRALRKILPYLKQGMVYSDACDKVDYRHSKRSLTREEIDNRDYKSRLDLLPRNSLRNPVVEKILNQMINVVNSLIETYGRPDEIRIELARELKKSAKERADLISSINKATADNEKIRQLLINEFGIQRPSRNDIIRYRLYDELSAVGYQTLYSDTYIPREELFSKRFDIEHIIPQSRLFDDSFANKTIEARDINIEKGNATALDFVEAKYGSEYVKEYRNRVDKLLKDGKIGRGKYNKLLTKENDIPEDFINRDLRNTQYISRKALEILSEVAPKVTATSGSITERLREDWQLIDVLQELNWDKYDRQGLTETFVNRDGNTVRRIKDWTKRNDHRHHAVDAVAIAFTRAEYVHYLNNLNAQSDKGKEFYAIRERYLERDKHNNLRFRSPIPVKEFRAVVKDQLEKSFVSHKSKNKVVTKNVNATKCSGGVNRKVQLTPRGQLHNETVYGRIMQPVVREEKIGVAFDYDKIATVASAVERKALTRRLDMFNGDPKKAFTGKNSPAKNPVYIDDERNVELGTKVKTVTMECVYTIRKEISEDLKLDKVIDKGVKRILQQRLDEYGGDPKKAFTNLDANPIYLNKEKGITIKRVTITGPTEVEPLHSKRDHLGNEMRDADGRTIPTDFINTGNNHHIAIYRDASGNLQERVMSFFEASARACALPPLPVIDKDYRKCDGWEFLFTMKRNEYFVFPRYESVVDSSTGQEKLIKTFDPKAVDLLDRDNYAKISPNLFRVQKLATKNYHFRHHLETNVDDVKELRDITWKRIQTIKLMDEAVKVRIDNLGRIVAVGES

SEQ ID NO: 23718 - protein, 1140 aa, unidentified
  REGION 1..1140: note = Cas Enzyme sequence
MKNILGLDLGSGSIGWSVIQEGENNRTILGIGSRIIPLSPDDTTQFTQGKSITKNADRTAFRTQRKGYDRYQLRRHYLTQYLHKLGMLPDERLIKLPQTELWEIRAKAVNEKIELPELGRVLYHLNQKRGYKSGKSDFQDKKSSKYLSEVSERYKELQERDITIGQKFYAELKADPTYRCKDRVYPRIAYIEEFDRIMECQRTHHDILTDEHITHLRNHIIYYQRPLKSCKHLVGECSLAQMTYRLPDGSIKSRPIKVAPKSSPLFQVCKIWESINHINLQRDRERFEITPAHRQALFTHMNSKEKLKINDLYKILGIKKHDGWWGGKAIGNGLQGNTTVIALQNALTGYSRADELLRFELKTCEIEIADPETGEIATQLIIDPAFEQEPLYRLWHTLYSISDTDVLDRILERKFGIEDPEMREKLTQIDFTKSGYGNLSSIAMRRILPYLRQGYVYSEACFMAGYNHSNSITREENLARELAEHLRPITKGELRQPIVEKILNQMVNLVNALIDRYGRFDEIQVELARELQQSREERDKTYKKQLDNQKRNEEIRHHIEEMDLTPTRSRIQKYRMYEESHHLCIYCGQPVGLAAFLQGYDTEVEHIIPRSLYFDDSYNNKVCACRACNQAKNNRTAYDYMSSLPEETFHRYLDRIKNMHDNKEISDTKYKYLLTKGDEIPQDFLNRQMRESQYISRKAIAMLQEVCHHVYATSGSVTAYLRHVWGWDNVLHDLNRERYRAGGLTEMREIDNRTVECIKDWNKRLDHRHHAIDALAIACTRQGYIQRINTLSKQAEEGDLVSLERYIRQQPHFSYAEVCAAAEKILVSFKAGKRVATKGKRYIYRGGKRILAQEDITVPRGALSEQSVYGQIAQYRKDKKGKVSFSYESVLKYPIESIDTKTLPDVVDAGIRRILQQRLDEHGGNAKKAFATPVYTASGHLIRTVRCFTRLKAIVPVKYDASGKAVGFVKPGNNHHVAIYIDRDGKPQEHIVTFWHAVERKKYGLPVIIERPGEAWDAATDAMPDSFLEQLPDATWQFRLSMQQNEMFILGMPDELYADALENRDYALLGKFLYRVQKISTKYYCFRHHIETSVDDKYNGKKNEKLSTQMGKYKLISSISALYSQHPHKVKISLTGEICE

SEQ ID NO: 23719 - protein, 1504 aa, unidentified
  REGION 1..1504: note = Cas Enzyme sequence
MKNIVGLDLGTNSIGWAVVNGSVNDDGSEQLVKIQASGSRIIPMDAAMIGDFNKGNSISQTAERTRLRGVRRLSERYLLRRERLHRILDILGFLPFHFAQDLDRHGKIVKGKEPKLAWRKNEAGQFEFIFQDSFKEMLEDFKLNHPNLITDDKKVPYDWTIYYLRKKGLTSKISKEELAWILLNFNQKRGYYQLRGEEEEENKNKLVEFYALKVVAVEDSGEKKGKDIWYNVHLENGWVYRRTSNMPLDWVGKTKEFIVTTDLEKDGTPKKDKEGNVKRSFRAPKEDDWSLVKKKTEADIDQTHKTVGAYIYDTLLGNPSQKIRGRLVRTIERKYYKEELKQILEKQKEFHLELQDRALYAACVEELYTINEAHRNNIGNRDFTYLFLEDILFYQRPLKSKKSLIDNCPYEENHCLDKETGEIKSFPVKCIAKSHPLFQEFRLWQFIVNLRIYRKDLAQDVDVTNELLKTEEDYVALFDWLNGKKEIDQKAFLKYPLFGLKKEVENYRWNYVQDKPYPCNETRSSMLARLEKCDISIEFLTKENEEALWHILYSVEDKNEIVKALQKFADKHDLNASFVDVFQKFPPFKKEYGSYSAKAIKKLLPLMRMGKYWSENSIDKGTRERMDKIITGEYDEKIENRVREKAIHLADVSDFKGLPLWLVCYIVYGRHSEAKEITQWKSPADIDLYLRSFKQNSLRNPIVEQIIIETLRVVRDIWKQVGNIDEIHVELGREMKNPADKRKKMTQQMSENENTNLRIKYLLTEFLNPEYEVENVRPYSPSQQDILRIYEEGVLNSVSDLPEEISDILKKFTETDLKKRPSRSEVLRYKLWLEQKYRSPYTGEVIPLGKLFTPAYEIEHVIPQSCYFDDSFSNKVICEAEVNKLKSNLLGHEFIVKRHGEIVELPFGKKVRIFTVDEYEQFVKDNYSRTRSKMKKLLMDDIPEEFVARQLNDSRYISKVVKSLLSNIVREKGEEEAISKNVIPCTGGVTDRLKKDWGINEVWNKIILPRFQRLNELTGTNKFTTKNVGIQEIPTMPLELQKGFNKKRIDHRHHAMDAIIIACANRNIINYLNNESATAKAELSRYDLQKMLCDKAKTDNNGNYKWVIRKPWASFTQDTYLALENIIVSFKQNLRVINKATNHFLHYNEEGKKIFVKQGKGDNWAIRKSMHKDTVFGEVNLRRIKTVALNEAMKNPQSIVVKDFKRKLLELWNLGFDAKRIKKYFEDNRETWSDINLSKIEVYYFSKDTKDRFFATRKPLDTSFDRKKIENNITDTGIQKILLRHLELKDNNPDIAFSPDGIDEMNRNIIQLNNGKYHQPIIKVRWYEQADKFAVGQTGNKSSKFVEAAKGTNLFFAVYESNILDKKTNTIIKKRNYATIPLNVAIERQKQGLPVAPEDENGNDPIFVLSPNDLVYLPTAADLANGIIAQPLDRGRIYKMVSCTGNEGYFIPARIANPILQTIELGSNNKAQKAWTDEMIKEICMPIKVDRLGNVLESSSSYKK

SEQ ID NO: 23720 - protein, 1455 aa, unidentified; identical to SEQ ID NO: 22429
  REGION 1..1455: note = Cas Enzyme sequence

SEQ ID NO: 23721 - protein, 968 aa, unidentified
  REGION 1..968: note = Cas Enzyme sequence
YFQEIKIWHTLHSLIVKEKKTNAERFLYQEEKETLFAELNIKETLSKLDALKLLYKNYKDLDLNYDKIEGNRTQAALFKAYQTIISMTGRGEYDFSKMMSDEVMEIVEGVFSGLGYNTNILHFDAENELFDKQPMYMLWHLLYSYEGDKSSTGNKSLIDKIFKLCGFEKEYASIIANIIFQPDYGSLSTKAIRKILPRMKEGNEYSLACEYAGYRHSQRSLTKDELDNKVYKDHLDLLPRNSLRNPVVEKILNQMINVVNFVVDAYGKPDEIRIELARELKKSSKERKEMTMAINKTTADHEKYRQILQKEFGLTNVTRNDIIRYKLYLELKSNGYKTLYSNTYIPQEKLFSKEFDIEHIIPKAKLFDDSFSNKTLESRRVNIEKSNLTAYDYVLGVYDEKGINDYEIRIENLYKSGIISKAKRDKLMMKEVDIPSGFIERDLRDSQYIAKKAREILEELVRFVVPTTGTITDRLREDWQLIDVMQELNWEKYDKLGLTEIVKDKDGREIRRIKDWTKRNDHRHHAMDALTVAFTKRSYIQYLNNLNARSDKSGSIYAIEQKELYRDKHGKLRFNPPMPLDVFRAEAKRQLENTLISIKARNKVLTQNVNITKTKKTESGYRKKVQLTPRGQLHNETFYGAIKWYVPKLESVGSGFNVEQIALVANKRYREALLTRLAACGNDPKKAFTGKNSLEKNPLYLDELHTQQVPTKVKTVTLETVYTTRKDISSDLKIEKVIDRKVRSILKERLKEFGGDPKKAFSNLDANPIWLNKEKGISIKRVTITAVSKAEPLHAKRDHFGKYILDANGAKQPVDYVNTGNNHHVAIYRDEKGVLQERVVSFYEATASASVGLPVVDKEYRKSEGWTFLFSMKQNEYFVFPNEKNGFNPNEIDLMDPDNYALISPNLFRVQKITSKDYVFRHHLETTVEDRKELQNITWKRFQSLTNLDKLVKVRVNHIGQIVSVGEY

SEQ ID NO: 23722 - protein, 1550 aa, unidentified
  REGION 1..1550: note = Cas Enzyme sequence
MKNILGLDLGSNSIGWAIVKALKNEDGKEILQSIDLAGSRIIPMDQATLGNFENGNSVSQTRERTGYRSARRLRKRYLLRRERLLRVLNCMGFLPEHYSQNIDKYGKFFLDNEVKLSWKKDKMGKNEFIFLDSFNEMLEDFRHSQPQLLLDGRKVPYDWTIYYLRKKALTEKISKEELAWILLNFNQKRGYFQLRGEDEEVQGKKIEFYALKVVRVEDTGEKKGKDTWYNVYLESGLGDTDDYWVYRRASSVPIDEWEGQVKEFIVTTTLDNNGSPQIDKEEKVKRSFSIPKPEDWMLVKKKTEVDIKSSGKTVGTYIYDTLLQKPDQKIKGKLIRTIERENYTNELSLILENQKKFHLELQDRELYHQCIELLYCKNEAHKRVIGSWDFTSLFIKDILFYQRPLKSKKALIDNCPYEESFYIENGEKKSKPRKCIAKSHPLFQEFRIWQFISNLRIYQKVKEVDGKLQFNVDVTSDFLRDESAYLELFKWLNERAEVSQEDLLKHLGLKKTKTEDTVSLYRWNYVEDKKYPGNKTRSSILKKLLNDEKEALSEDIELKIWHLLYSVSAQSEIDKALSSKNVSTKGIYSELSVYFSDETIQKIKNVKLESGYGSYSAKAIGKLLPLMRRGKYWNLESIDNHTKERIEKILNGECDETIRARTREKSISLTDISQFKGLPLWLACYIVYDRHSELKTIKKWNSPEDIDKFLKEFKQHSLRNPIVEQVTMETLRVVRDIWRRVGSIDEIHIEMGRDMKQTAQERARCSAIISRNENNNLRIKALLHEFMNPELGIENVRPYSPAQQEILRIYEDGVLSSVSEIEDEIKNILKKFNESEEGKRPTKNEIIRYKCWLEQKYRSPYTGEIIPLGKLFTPAYQIEHIIPQARFFDDSFTNKVICEAEVNAKKGDLLGYEFVKEKGGEIVELSGGRNVRIFSVEEYEAFVKEHYKSNKQKMQRLLAEDIPTEFSHRQLNDSRYISKYIRNLLSNIVREDDEQESVSKNVISCNGAITDRLKKDWGVNDVWNHIVLPRFVRLEEIRADNGEKFTTFNQEGHRIPSMPLMYQKGFNKKRIDHRHHAMDAIVIACTTRDHVNLLNNECSNPQNNANKHQLSRKLRRYENVSYKQDGKLKEREVPKEFLKPWEGFTRDVEFALKNVIVSFRQNLRVLNKTVNYFQHWKDNSSEKEWKEQKSADHWSIRKPLHKETVSGEVFLWRTRFVSLREALTNPKRIVEKDLRSKILELQRKGYDTKRIKKYFEDNKDVWQDVNLSKIEVRYYSREIVDPQTELPKNRYFATRFGNDLISLFSGVSNFEKAKKIIESITDTGIQKILFRHLENKGNDPVLAFSPEGIDEMNRTIKTLNNGKDHKPIYKVRIYECSTMKFPLGSIGNKSKKFVEAAKGTNLYFAVYEKEVENDRGECHKERTFKTIPLNDVIRNLKQGLSIAPNDENGNPPAFILSPNDLVYLPTKEELETRSISQPLDRNRIYKMVSCTGNEAHFIPAFIATPILQTIELGSNNKAQKAWTGEMIKESCIPIKVDRLGMLISINGKAV

SEQ ID NO: 23723 - protein, 1498 aa, unidentified
  REGION 1..1498: note = Cas Enzyme sequence
MKHILGLDLGTNSIGWAVINAIKEENTQKEQLIGINTAGSRIIPMDAAQLGDFNKGNTVSQTANRTQFRGVRRLYERKKLRRERLHRILQLLGFLPKHYASQLDRYGKFIANSEPKLAWTTNTHEPSYFIFQSSFQEMLNDFLQNNSQIKKVPYDWTLFYLRKKALIQKIEKEELAWVLLNFNQKRGYYQLREEETEKASSKTRQYFDSQIVTDITDTGQVYKGLKIFTITLENGEKGKFFSKNMPDWKSQKKDIIAIIDLDKNGNDKYDENGELSRRFKIPTEQEWEEQWELIKTKTQKDLDTSHKTVGAYIYDTLLQTPSQKIRGKLIRTIERKYYKDELNQILKKQEEFHPELRDSNLLEACIEELYPNNEAHRNAIAKYSIAQLLIEDILFYQRPLKSKKSLISNCPYEEYTYINKETGEICTSPLKCIAKSHPLFQEFRLWQFISNLRIYQKEGTINGKFTTDIDVTSQFLKTEDAYANLFDWLNQKKEIRQDTFLKNPAFGLKKNTANYRWNYVEDKTYPCNETHYKILSYWEKAGIEQSALTSEIEEKLWHILYSISDKNELRKALQHFADKNYLSDKFADTFQQIPPFEKDYGSYSAKAIKKLLPLMRIGRYWKAENFDSTTLDRIEKILTGEFEENIKNRTREKTIHLDNLYSFQGLPTWLACYIVYNRHSEIKDVTKWQQPSDIDAFLNAFKQHSLHNPIVEQIIMETLRTVRDIWKQTGHIDEIHVELGREMKNPAEKRRKLTQQIQENENTNLRIKALLAEFANPELGIENVRPHSPSQQDLLRIYEEEVLNETKDIPEDIAVILKKFNEVDTKKRPSTSDVLRYKCWLEQKYRSPYTGAMIPLGKLFTPAYEIEHVIPQSRYFDDSFTNKVICEAEVNKLKGNMLGYEFIKNNQERIVELGFGQNVKIQTVEAYEQFVKQHYSYNRTKMQKLLMEDIPDQFIERQLNDSRYISKLIKSLLSNIVRDEGEEEATSKNVIVCTGSITDRLKKDWGINDVWNKLILPRFIRLNEITESNRFTTTNACNKTIPAMPLDLQKGFNKKRIDHRHHAMDAIVIACANRNIVNYLNNESASKNAKISRQDLRQILCKKTKTDNLGNYQWLIDKPWDTFTQDMYSILSNIIVSFKQNLRIINKTTNHYIHYENGKKVNCSQKQSDSWAIRKPMHKETVYGEINLRRTTTATLKAALENPQRIIEKDLKKKIKELLTQGLNEKQIKKYFEDNKDIWQEINLKKIPVYYFTKETANRFFACRESINTTFNKKKIEEKVADTGIQQILLRHLEQNGNNPEQAFSPEGIEQMNKNIMSLNNGKFHQPIYKVRTYEQADKFAVGQTGNKSTKFVEAAKGTNLFFAIYETAHKRNFASIPLNVVIERLKKGLPPAPENEKGNLPKFILSPNDLVYVPIKEEIENGHINQPIQKDRIYKMVSCTGNQCFFIKSNVANTIIDKYEFSPLNKMERAITGEMIKETCIPIKTDRLGNIITSISL

SEQ ID NO: 23724 - protein, 1399 aa, unidentified
  REGION 1..1399: note = Cas Enzyme sequence
MKTILGLDLGTTSIGWALVKEAEPFSDEKSEIVRLGVRVIPLTVDERTSFENGKSITTNALRTQKRGMRRNLQRYKLRRQALIEELKSTGWIGNDFIFSETGPGSTFRTLRLRAKSASEEVTLGDLARILLQINKKRGYKSSRKMVSSDDGQAIDGMAVAKEMYDKGLTPGEYVYQRMLEGKYAIPEFYKSDLQEEFDRIWALQKSFHTELTDELYRKLSDRNKSQTWAICRDELGIQGLKSSFTGKERLKEAYRYRHLAATQEVNMEVLTCALQEINGQKASLSGLLSKISDRSKELYLNNLTVSQMLLKRIEDNPNNSLKNIVFYRQDYLDEFERIWTVQSKYHTELTHELKKRLRDIIIFYQRPLKSQKGLISLCELETKDIEVAIDGVKKMKNIGPRVCPRSSPLFQEFKIWQTINNIFVNGAALDDEDKSVIAKELMFKDKLKDSDLLKLLFKTTKGQSVNFKEVDGNRTMATLMKACFKIAENLGYDDIDLSKLSSEDQMVRIEGIFKEQGFKTGFLHFDSSLASPEFENQDSYRLWHLLYSYEGDKSASGNESLVKCIMDLCSMDEGSAKILASCTFLPDYGSLSAKAMRKILPYMKDGLEYTAACAMAGYRHSKRSLTKEELDTKEYSDRLSLLPKNSLRNPVVEKILNQMINVVNSVIDVYGKPDEIRIEMARELKKSAKEREEAQRDIASSTAESQKVIEILKGEPFFLQFPTRNDIIRYRLYQELAQNGFKTLYSNTYIPKDKLFSKEFDIEHIIPQALIFNDSFANKTLESRQCNLEKGKETAMDYVKSKYDETGVQAYCDRVNGLIGKGISKTKAKWLLMEGKDIPEDFINRELRDSQYIAKKAREILESLVKFVVPTTGSVTARLREDWQLVNVMQELNWEKYARLGLTGVREDKDGRRIPFIQDWTKRNDHRHHAMDALTIAFTRRQFIQYLNHLNSKIDVVSWDKKDLDLRDYDLEDIKFGNLSAGDRYGIVKALQDKFLYKDGNDKYRFVPPIPLDEFRRQAKEQLSDILISFKAKNKVCTRNVNVTKNKGGANRKTQLTPRGPLHNETIYGSSLEYVTKENEKIGSSFDTERITTVCKKKFRDALARRLEEFGGDPKKAFTGKNSPEKNPIGVDEHHSEQVPAKVRTVTMEQRFTGRKPIDATLKIEKVIDKRIREILQARLDEFDGKAAKAFSNLDENPIWLNKEKGIAIKRVTVSGPANPVPVRFKRDKDGKPIIDDAGKTIGADFVTPGNNHHIAIFRDSSGKLQEHPVSFLEATIAKSHGLDVIDRNYNKDEGWEFLFTLKQNEYFVFPNSETGFNPLDYDLTDPRNYAEISPNLYRVQKITTGDYYFRLHLETTVEENKALKGITWKRIRNASALEGLVKVRIDNLGRIVAVGEYD

SEQ ID NO: 23725 - protein, 1504 aa, unidentified; identical to SEQ ID NO: 22713
  REGION 1..1504: note = Cas Enzyme sequence

SEQ ID NO: 23726 - protein, 1154 aa, unidentified
  REGION 1..1154: note = Cas Enzyme sequence
MKNILGLDLGSSSIGWSVIRENSEEQELVAMGSRVVSLTAAELSSFTQGNGVSINSQRTQKRTQRKGYDRYQLRRTLLRNKLDTLGMLPDDSLSYLPKLQLWGLRAKAVTQRIELNELGRVLLHLNQKRGYKSIKSDFSGDKKITDYVKSVKTRYDELKEMRLTIGELFFRRLTENAFFRCKEQVYPRQAYVEEFDCIMNCQRKFYPDILTDETIRCIRDEIIYYQRPLKSCKYLVSRCEFEKRFYLNAAGKKTEAGPKVSPRTSPLFQVCRLWESINNIVVKDRRNEIVFISAEQKVALFDFLNTHEKLKGSDLLKLLGLSKTYGYRLGEQFKTGIQGNKTRVEIERALGNYPDKKRLLQFNLQEESSSMVNTETGEIIPMISLSFEQEPLYRLWHVLYSIDDREQLQSVLRQKFGIDDDEVLERLSAIDLVKAGFGNKSSKAIRRILPFLQLGMNYAEACEAAGYNHSNNYTKAENEARALLDRLPAIKKNELRQPVVEKILNQMVNVVNALMEKYGRFDEIRVELARELKQSKEERSNTYKSINKNQRENEQIAKRIVEYGVPTRSRIQKYKMWEESKHCCIYCGQPVDVGDFLRGFDVEVEHIIPKSLYFDDSFANKVCSCRSCNKEKNNRTAYDYMKSKGEKALSDYVERVNTMYTNNQISKTKWQNLLTPVDKISTDFIDRQLRESQYIARKAKEILTSVCYNVTATSGSVTSFLRHVWGWDTVLHDLNFDRYKKVGLTEVIEVNHRGSVIRREQIKDWSKRFDHRHHAIDALTIACTKQAYIQRLNNLRAEEGPDFNKMSLERYIQSQPHFSVAQVREAVDRILVSFRAGKRAVTPGKRYIRKNRKRISVQSVLIPRGALSEDSVYGVIHVWEKDEQGHVIQKQRAVMKYPITSINREMLDKGKVVDKRIHRILSDRLAQYNDNPKEAFAKPVYIDKECRIPIRTVRCFAKPAINTLVPLKKDDKGNPVAWVNPGNNHHVAIYRDEDGKYKERTVTFWEAVDRCRVGIPAIVTQPDTIWDNILQRNDISENVLESLPDVKWQFVLSLQQNEMFILGMNEEDYRYAMDQQGYALLNKYLYRVQKLSKGDYSFRYHTETSVEDKYDGKLNLELSRKMGKLKRVRSLEALFNLHPHKVHISVLGEIKEIS

SEQ ID NO: 23727 - protein, 1163 aa, unidentified
  REGION 1..1163: note = Cas Enzyme sequence
LLKQTEFHAALQDHNLLLSCIEELYPNNEAHRRLLSSSSFTCFLLEDILFYQRPLKSQKGLIDDCPYESHVYKKDGSLHRTPLKCISKSHPLFQEFRLWHFLSFLRIYQRERMIDGSLKLDVDVTNEFLQNEDDYVKLFDWLNGRKEIDQKTILAYKPFGLKKNEQPKYRWNYVEDKSYPCNETRADMISRLSKAGVSEGFLTEEREEALWHILYSISDKKELTKALGTFAEKNGLNEAFVELFSKMPPFESNYAAYSLKAIRKLLALMRMGKYWNEQDIDKQTRSRIEKILTGEYDETIRTRVREKAIHLTDISSFRGLPLWLACYVVYNRHSEAKELVKWETPADIDHFLSKFRQHSLRNPIVEQVIMETLRTVRDIWKQEGQIDEIHVELGREMKNPAKERARITAQVLENENTNLRIKALLTEFMNPEFEIENVRPYSPGQQEILRIYEEGVLSGVAEKDLPEDIISILKKFRENDVKKRPTTSEVLRYKLWLEQRYRSPYTGRIIPLGKLFTPAYEIEHVIPQSRYFDDSISNKVICESAVNKLKDNCLGYEFIKKHSGEIVELGNGEKATVFTSEEYEHFVKESYLGNGKKMKKLLLEDIPDNFIERQLNDSRYISKVVKSLLSNIVCEEGEQEGMSKNVIVCTGGVTDRLKKDWGVQDVWNRIILPRFLRLNKMTDSTGFTSVSTNGHLLPALPLHLQKGFNKKRIDHRHHAMDAIVIACADRNIVNYLNNASARKGSEISRYDLQHLLCDKVKTDSNGNYKWMLRKPWDTFTQDVYTALTNIVVSFKQNLRVINRTTNYHQHYNESGEKKMIPQVKGDRWAIRKPMHKDTVYGEVNLRREKTLPLKDVLNNPSIVVDKSLKSKLHELLKAQYDLKAITKYFEAHQDVWADINLKKIKVYYFTKETNERFFATRKSLDSSFNQKKIQEEVTDTGIQRILLRHLQLNDNNSDIAFSPDGIERMNQNMTILNDGKGHQPIYKVRTYEKAEKFAVGEHGNKVKKFVEAAKGTNLFFAVYESIQEDEATGKQVRKRTFATIPLNEVIKRKKQGLSVAPEDSNGNLPIFVLSPNDLVYLPTEEERNSGKVTQPLDRERIYKMVSCTGNRLFLVPYMVASPIYDKKEYTSLNKIELTDDKISIKEWCIPILIDRLGNISINY

SEQ ID NO: 23728 - protein, 1527 aa, unidentified
  REGION 1..1527: note = Cas Enzyme sequence
MKKILGLDLGTNSIGWALVNEAENENEKSSIIMLGVRVNPLTVDEQKNFEKGKSITTNADRTMKRGKRRNLQRYKLRRENLIEILKENGFITDEPILSENGNYTTFETYRLRAKAVTEEITLEQFARVLLMINKKRGYKSNRKAKGAEEEGVLIDGMEVAKLLYEKDLTPGQYCLQLMEQGKKQLPEFYRSDLQEEFNRIWAKQQEFYSEILTDKLKENLREKSEKATWTICKEPFNIVGIPRTTKGEELKKENFAWRTKALSEKLDLESLAVVLQKINGQINNSSGYLGAISDRSKELYFNKQTVGQYQMAVLAQNPNASLKNMVFYRQDYLDEFNIIWEKQAEFHKKELTEELKKEIRDVIIFYQRRLKSQKGLIGFCEFESRQIEVEIDGKKKIKTVGSRVIPRSSPLFQEFKIWQTLNDIEIFPSNEKNKKRKPNARRLEQDEKELLFKELSIKEKLSKNQTLNLLDLQEFDMNFKNIDGNKTQYELFKAYKKIIEMSDYEIDDDFSIETVDEFFKQLGINTDILYFDSQSPLDEQPMYRLYHLLYSFEGDNSNSGVEKLIAILKKNYGFEERFAKILIGVEFQEDYGNLSAKAIGKILPLMKMGQDYATACSNIYERHSASSLTKEELENKIYKDCLEILPKNSLRNPVVEKILNQMVHVVNAIIADPQLGKPDEIRIELARELKKSADERFLLTDSVSSNTESAEKIRKRLKEEFSIFKTHEPSRNDIIRYRLWEELAPNGYKPLYGSKENLQKGISSEILFTKEIEVEHILPKARLFDDSFSNKTLVYSSDNKEKKEQTAIDYVMKKEGDLNDYLDRIISVYGTKTTKKVITNKKTRNKTIKTETKTFDTLYKEHEKGLKKQKEKIEKWNKATEKERKKLVKPWGLMSDIEKKIEIINKYYSNKLKKLVITESELPEGFINRDLANTQYITKKARKMLSDLVKSVVTTTGSITDRLREDWQLVDVMKEINFPKYKQLGLVENVERIDYETGEVLYTNKKIKDWTKRNDHRHHAMDALTVAFTKRQFIQYLNNLNARRTDENQSISNTEEEEYDNFAITTEDVLLNTRDVLGIEKNYLYRDHRNKLRFYPPIPLNDFRAEAKYHLENTLISIKAKNKVTTQNINFTKRKGGVNKKTQQTPRGQLHLETVYGSQKQYVVKEESVNAKFDAEKIATVSKPAYREALLRRLQEFDNDPKKAFTGKNSLTKNPIWLNKLQTAQVPEKVKTISFETAYTIRKEISPDLKLDKVIDLGIRRILENRLKEFRNDAKKAFSNLDENPIRPNKEKGIAIKRVTISGISNAEALHDKRDKEGNLILDKNGKPQPVDFVNTGNNHHVAVYRKPVFDKDGNHAEDENGNKKYELEENVVSFYEAVSRRNLGLPVIDKAYKASEGWQFLFSMKQNEYFVFPRTEKVEKIDEETGEITEEEIVVFDPNDIDLLNPDNYKLISPNLFRVQKFSKLIYGNSVVREYVFRHHLETSIKNTSSVLKGITWIDFRSSKGLDKIVKVRVNHIGKIVSVGEY

SEQ ID NO: 23729 - protein, 1395 aa, unidentified
  REGION 1..1395: note = Cas Enzyme sequence
MKKILGLDLGTNSIGWALVKERENENEQSSIIRLGVREIYLTTDEQSNFEKGKSITTNADRTQKRSMRRNLQRYKIRRDSLINVLKDHGFITADTLLNENGNRTTFETYRLRARAVTEEISLEEFARVLLMINKKRGYKSSRKVKSNDESGQLIDGMEVAKKLYDDNLTPGQYVALLLHNGKNSIPDFYRSDLVDEFNKIWNFQRLFYPNVLTDNLKEELKGKGDKETWAICSKPFDIVGLKRKTKGWEQKKEDYVWRAESLHHKIDLERLAIVLQKVNGQIKNSSGYLGAISDRSKELFFNKLTVGQYQMSELDKNPNFSLKNQVFYRQDYLDEFECIWETQAKFHKELTPELKHIIRDIVIFYQRPLKSQKGLISLCELESREIEIEKNGKKVKKTMGPRVCPKSSPMYQEFRIWQTINNLQVSGMIVADNRFDLFGETVGMKFSKRFLEQEEKEILFKELNFKSKLAKKEILRLLFKNYKELDLNYNEVKGNTTMAALLEACSKIIEMSGHGEYDFSKMTADEIKDIVFPIFNGLGFNTDILSFDSSVEGKAFEKQPSYMFWHLLYSYEGDKSKTGNESLINKISECYGLDKEYAAVIAGIRLEPDYGNISVKAMRKILPYMKDGLGYSDACQYAGYRHSKRSLTKEEIDSRPLKNKMDLLPRNSLRNPIVEKILNQMINVVNAVVDVYGRPDEIRVEMARELKKTKAQREETVKTIRKITTENEKYKKELEEEFGLKNVSRNDIIRYRLYLELKDNGFKTLYSNTYIPREKLFSKEFDIEHIIPQAKLFDDSLSNKTLEARNVNIEKADSTAYDYVKAKYGDEGLKKYNEKVKQLYEKKIIGKTKFKRLLTTEKDIPDGFINRDLSNTQYIARKACEILEEVARRVVSTTGSVTSRLREDWQLVDIMKELNWDKYDRLGLTEIIEDRDGRRIKHIKDWTKRNDQRHHAMDALTIAFTKPAFIQYLNNLNARSDKGGSIYTIERKELYRDNKGKLRFYPPMPLDEFRAEAKCHLENILVSIKAKNKVVTRNVNITRAEKAEKGKHKRIQLTPRGKLHNETIYGSIKRYDGNKEKVNASFDVSKIMTVADKRYREALLRRLEQFEGDARKAFTGKNSLEKNPLFVDELHTKKVPDIVKTVKSGTIYTQRKEISDELKIDKVIDNKVRKILEERLAEFNGDAKKAFSNLDENPIWLNKEKGISIKRVTINSGLKDPTALHDKRDNNGRLILDKDGKKQPTDFVSTSNNHHVAIFCDIEGQIQEHLVSFYEATARAIQHLPVVDRNFNKDKDWQFMFTMKQNEYFVFPNKETGFDPKEIDLLNPKNYAAISPNLYRVQKLSSKYYVFRHHLETTVDDKKELLGITWKRIRSLDNLRDIVKVRINHLGQIVNVGEY

SEQ ID NO: 23730 - protein, 1373 aa, unidentified
  REGION 1..1373: note = Cas Enzyme sequence
MKKVLGLDLGTTSIGWAMVDQAENNEEKSSIIRAGVRVNPLTTDEKDAFEKGKAVTTNTDRRLKRSMRRNLQRYKLRRNELVSILKELGWIDDSTILAEHGNRSTFETYELRSKACTESVSLTELARVLLMINKKRGYKSNRKANAEEDGQPVDGMSVAKLLYEKGKTPGQYCYSLVKKGNKVLPEFYASDLKSEFRRVWETQRLYYPEYLTEEFWNQIDGKTRSSLTKLFFAKYKITTADNKGKDKRVKAYEWRAAAVENRLPIDQVAYVLCDIAGNLGSSSGYLGKISDRSKELYFNKQTVGQYLYSNIQKDPHFSTKNKVFYRQDYLDEFEAIWESQASFHPELTDELKKEIRDVVIFYQRRLKSQKGLISYCEFESRKVDVEINGRIVQKIRGCKVAPVSSPLFQEFRMWQKINNIIVTNKETGEQGTLEQDDKVRLAECLRVKDKLSDKEILKLLFKKPKDLEMNFKSIEGNETLGKLYSKFLEVVSLAGNSDYEYSKLRQEELMNILRTEFARNGFNTAVLEYDPSLPKEEYERQPLFRLWHLLYSYEGDKSQTGNASLINKIAEICGMPENLAKIIASVSFKQDYASLSHKAMRKILPYMMDGNEYSLACEYAGYRHSKQSLTKEEIENKVLKARLDQIPKNSLRNPVVEKILNQMVNVINTVGDRYGKPDEIHIELARELKSSQEERARATESIASNNKENDRIRMILENEFHLAYVSRNDIVKYKLYEELKNNGYKTLYSNQYIPADKLFSREIDIEHIIPQAVLFNDSLSNKTLEFRDINLEKGKDTAFDYVKNKYGESGLEDYKLRVNHLFESGGISRTKRDNLLRDSKNIPEGFVERDLKDTQYIAKKAREILLEYVRVVVSTSGSITDKLREDWGLVNVMKELNMPKFEAAGFVETITTSDGKDIRKIKDWTKRNDHRHHAMDAITIAFTKLAHIQYLNNLNAKGDKSSSIYAILQKETYLSGSKRLIIPPLPLDQMRREVRRQLESILVSIKAKNKVMTENINRIRIKDGVKNVKCLTPRGLLHKEQVYGQRKRYETYDVAVNGKMTEDVIATVASSETKAALALRLAQFKGDPKKAFTGANSLDKNPVWLDANHSRKVPAKVKCVRFVNVYSIRKNIDPSLSVEKVMDGRVRRILKDRLAEFGNDPKKAFVNLDENPIWFNKEKGIILKSVTIAENFDLDPIRIKRDNLGRVICDAEGNHIPSDYVNFRNNHHAAIFEDADGNIQEHIVSFYEAVRRRSAGLPVVDKEYNADKGWKFLFTMKSNEMFVFPNERTGFDPRAVDLMDPENYSAIGPNLFRVQKMASKDYCFRHHLETTLGDDLKLKDITWKRITAINNLKGIVKVRINHIGEIVSVGEYD

SEQ ID NO: 23731 - protein, 1398 aa, unidentified
  REGION 1..1398: note = Cas Enzyme sequence
MKTILGLDLGTTSIGWALVKEAEPFSDEKSEIVRLGVRVIPLTVDERTSFENGKSITTNALRTQKRGMRRNLQRYKLRRQALIEELKSTGWIGNDFIFSETGPGSTFRTLRLRAKSASEEVTLGDLARILLQINKKRGYKSSRKMVSSDDGQAIDGMAVAKEMYDKGLTPGEYVYQRMLEGKYAIPEFYKSDLQEEFDRIWALQKSFHTELTDELYRKLSDRNKSQTWAICRDELGIQGLKSSFTGKERLKEAYRYRHLAATQEVNMEVLTCALQEINGQKASLSGLLSKISDRSKELYLNNLTVGQMLLKRIEDNPNNSLKNIVFYRQDYLDEFERIWTVQSKYHTELTHELKKRLRDIIIFYQRPLKSQKGLISLCELETKDIEVAIDGVKKMKNIGPRVCPRSSPLFQEFKIWQTINNIFVNGAALDDEDKSVIAKELKFKDKLKDSDLLKLLFKTTKGQSVNFKEVDGNRTMATLMKACFKIAENLGYDDIGLSKLSSEDQMVRIEGIFKEQGFKTGFLHFDSSLASPEFENQDSYRLWHLLYSYEGDKSASGNESLVKCIMDLCSMDEGSAKILASCTFLPDYGSLSAKAMRKILPYMKDGLEYTAACAMAGYRHSKRSLTKEDLDTKEYSDRLSLLPKNSLRNPVVEKILNQMINVVNSVIDVYGKPDEIRIEMARELKKSAKEREEAQRDIASSTAESQKVIEILKGEPFFLQFPTRNDIIRYRLYQELAQNGFKTLYSNTYIPKDKLFSKEFDIEHIIPQALIFNDSFANKTLESRQCNLEKGKETAMDYVKSKYDETGVQAYCDRVNGLIGKGISKTKAKWLLMEGKDIPEDFINRELRDSQYIAKKAREILESLVKFVVPTTGSVTARLREDWQLVNVMQELNWEKYARLGLTGVREDKDGRRIPFIQDWTKRNDHRHHAMDALTIAFTRRQFIQYLNHLNSKIDVVSWDKKDLDLRDYDLEDIKFGNLSAGDRYGIVKALQDKFLYKDGNDKYRFVPPIPLDEFRRQAKEQLSDILISFKAKNKVCTRNVNVTKNKGGANRKTQLTPRGPLHNETIYGSSLEYVTKENEKIGSSFDAERITTVCKKKFRDALARRLEEFGGDPKKAFTGKNSPEKNPIWVDEHHSEQVPAKVRTVTMGQRFTGRKPIDATLKIEKVIDKRIREILQARLDEFDGKAAKAFSNLDENPIWLNKEKGIAIKRVTVSGPANPVPVRFKRDKDGKPIIDDAGKTIGADFVTPGNNHHIAIFRDSSGKLQEHPVSFLEATIAKSHGLDVIDRNYNKDEGWEFLFTLKQNEFFVFPNSETGFNPLDYDLTDHRNYTEISPNLYRVQKITTGDYYFRLHLETTVEENKALKGITWKRVGPSGLEGAVKVRIDNLGRIVAVGEYD

SEQ ID NO: 23732 - protein, 1506 aa, unidentified
  REGION 1..1506: note = Cas Enzyme sequence
MKKILGLDLGTNSIGWAVINSSVDDEGKEKLTSISSCGSRIIPMDAATLGDFDKGNAKSSVAERTRLRGIRRLLERSLLRRERLHRVLSVMGFLPEHYASQLDRYGKFLPETEPKLAWYKDNTGSYRFLFQDSFNEMLEDFRLYHPELVAEGKKIPYDWTIYYLRKKALSQKIAKEELAWILLNFNQKRGYYQLRGEEEQEDNKKSVEYYALKVVAVEDSGERKGKDIWYNVKLENGWIYRRASSIPLDWTGKVKEFVVTTDLDDAGNPKKDKDGNVKRSFRAPKEDDWGLLKTKTQTQIDESGQTVGAYIYDSLLRMPDQKIRGKLVRTIERKYYKDELRKILLKQTEFHAALKDHNLLLSCIEELYPNNEAHRRLLSTSNFTCFLLEDILFYQRPLKSQKGLIDDCPYESHVYKKDGSLHRTPLKCISKSHPLFQEFRLWHFLSFLRIYQRERMIDGSLKLDVDVTNEFLQNEDDYVKLFDWLNGRKEIDQKTILAYKPFGLKKNEQPKYRWNYVEDKSYPCNETRADMISRLSKAGVSEGVLTEEREEVLWHILYSISDKKELTKALGTFAEKNGLNEAFVEQFSKMPPFESNYAAYSLKAIRKLLALMRMGKYWNEQDIDKQTRSRIEKILTGEYDETIRTRVREKAIHLTDISSFRGLPLWLACYVVYNRHSEAKELVKWETPADIDHFLSKFRQHSLRNPIVEQVIMETLRTVRDIWKQEGQIDEIHVELGREMKNPAKERARITAQALENENTNLRIKALLTEFMNPEFEIENVRPYSPGQQEILRIYEEGVLSGVAEKDLPEDIISILKKFRENDVKKRPTTSEVLRYKLWLEQRYRSPYTGRIIPLGKLFTPAYEIEHVIPQSRYFDDSISNKVICESAVNKLKDNCLGYEFIKKHSGEIVELGNGEKATVFTSEEYEHFVKESYLGNGKKMKKLLLEDIPDNFIERQLNDSRYISKVVKSLLSNIVCEEGEQEGMSKNVIVCTGGVTDRLKKDWGVQDVWNRIILPRFLRLNKMTDSTGFTSVSTNGHLLPALPLHLQKGFNKKRIDHRHHAMDAIVIACADRNIVNYLNNASARKGSEISRYDLQHLLCDKVKTDSNGNYKWMLRKPWDTFTQDVYTALTNIVVSFKQNLRVINRTTNYHQHYNESGEKKMIPQVKGDRWAIRKSMHKDTVYGEVNLRREKTLPLKDVLNNPSIVVDKSLKSKLHELLKAQYDLKAITKYFEAHQDVWADINLKKIKVYYFTKETNERFFATRKSLDSSFNQKKIQEEVTDTGIQRILLRHLQLNDNNPDIAFSPDGIERMNQNMNILNDGKGHQPIYKVRTYEKAEKFAVGEHGNKVKKFVEAAKGTNLFFAVYESIQEDEATGKQVRKRTFATIPLNEVIKRKKQGLSAAPEDSNGNLPIFVLSPNDLVYLPTEEERNSGKVTQPLDRERIYKMVSCTGNRLFLVPYMVASPIYDKKEYTSLNKIELTDDKISIKEWCIPILIDRLGNISINY

SEQ ID NO: 23733 - protein, 1521 aa, unidentified
  REGION 1..1521: note = Cas Enzyme sequence
MTKNTRNIIGLDLGTNSIGWSWIQQLISPTPTQPSEYLFDGTPIIRMSGSRIIPMPGDVTGSFERGETISKTKDRTAKRMARRMNERFQLRRERLNRVLNIMGFLPEHYARALDRYGKLNEESNTTIAWRSKEDGKNEFIFYPSFLEMASIFKERHPDIQRIPLDWTLYYLRSKALHQAITKEELSWVLHSFNQKRGYYQSREDITEEDKTKKVEYIKGVVNSVEDTGEKAKGKKIYKVTFADGTEFTSTKSEAPLWIGRTREIIVTTSLDTSGKPKLDKEGKIIQSAKTPDEKDWTLIKIRTEATIDDSKLTVGEYIFHALLKNPETKIKGAHVSTIDRRFYINEITAILKEQEKYHEELRDKSLYEQCTQALYAQNEVRRNIIAPWSMKDLLTKDILFYHRPLKSKKSQISECPLEFHCYTDKDGETHRQGIKCIPVSHPLFQEYRIWQFISNLRIYEREHFDNGKHFTNVDKTSEFLTSEKKEELYEWLAEKDSVSQKTLLGHLGLKVERYHWNFPEEKTYPCGETRHLIQSRLKKANLQKAFHSLISDEQKECFERGLWHILYSISDYNELCKALKTFARKTGFTLEEQLLFVEAFSSCPPFKKDYGAYSKRAITKLLPLMRIGKFWHEESIDSTTKNRIEHLISGEECSGIDVRVREKVAKAGLCESIEQYQGLPQWLANYVVYNRHSEASEITKWESPDELDNYIRSFKQYSLRNPIVEQVSLETLRVVRDLWAELQKEGQTIDEIHLEMGRDLKNTAEERSRIFRRNNENEDTNFRIKLLLEEFNANEKDIIDVRPYSPSQQELLRIYEEGVWQQEKDIPQDIKDIKKRISNDKDIKDITPNDIQRYRIWMDQKYCSPYTGKTIPLSRLFTTDYEIEHVIPRSRYFDDSYNNKVICEAAVNKDKNNRLGMEYIMAAGGKTIELGNGKNVQILKEEEYVELVDKIFGNNTRKRNIMLADEITEDFSHRQLNDTRYIARFMKGILSNIVREKNADGTLEPEETSKNLIVCSGRITDRVKQDWGLNDIWNHIITPRFERLNTKTSSNDFGEYVCKDGKRYFQTRVPLNLQKGFNKKRIDHRHHAMDAIAIACVNRSIVNYLNNAAANQTEREDLRRAVCIPERNGQTKRQLRSPWHCFARDTENALRQIVVSFKQNLRIATKATNSYECFDTASGKKIRRHQSNREHYAIRKPLHKDSVYGEVILPSIASVNLKKALLKADRILDKRLKDKIFELRKLYNYSNKQIEEHLTKVCINCPEWKNYDFKKIAIRILSNDADATHIVAIRKPLDESFDKVKINTITDTGIQKILLNHLSRYADDPKKAFSPEGIEDMNANIASLNGGKQHLPIYKVRVSEKDNGGYFPIGQKGNRPKKYVTTAKDTNLFFAVYADSKGKRSFNMIDLRTAIECWKQGVSVAPSINEKGDKLLFTLSPNDLVYMPSEEEEANGFSIKGNLIKEHIYKMVSATNRQCFFIPHTVADFISRGQEYNVLNKIELAEDGRSIKEHCVPLKVNRLGK

SEQ ID NO: 23734 - protein, 1480 aa, unidentified
  REGION 1..1480: note = Cas Enzyme sequence
MKRILGLDLGTNSIGWALAEQDFGKKEGKIIGLGSRIIPMDAKQMSDFGSGQSISATADRTAARSVRRLYQRDNLRRERLHRVLNILGFLPKHYAKEIDFEKRLGQYKKGTEPKIAYRKGEEAEHHFIFQDSFNEMLEEFKANGQDIRIPYDWTLYYLRKKALKEKISQEELAWVLLNFNQKRGYYQSRDEDLEGDKNKLEEYHKLKVIDVQESDKAKDGIWYNVNLVNGWVYRRKSREPLFDWQGKEKEFIVTTSIGKNGELKKDKEGNIKRSFRAVDSEKDWIAIKKKTENEIRDSGETVGKYIYKSLLDSPTQKIRGKLIKTIERKFYRRELEEILKTQIHFHPELQDTALYKAAINELYRSNEAHRNNIADKDFGYLFIEDIIFYHRPLKSKKSTISNCPFERRFYFKDGEKKEQPLKCIPKSHPLYQEFRLWQFLHNLRIYKRETTINDKVELDVDVTSEYIKQEEDIVKMFDFLQRRKEINQKRLLKHFKLSEKGYRWNYVEEKNYPCNELRAEIENRLSKIDNIEPEDFLTEDFIFNLWHIVYSVKDREQYIKALQTFASKNGLPEEEFKDAFLKMKFDNNYGGFSVKALKKLLALMRRGRYWNEQEIDRASKVRIDEILERITAMGGDLEKLESISDDDLPKQVLKSFAKTKNPYKGLNTYQASYAVYGRHSEASEITRWSRPEDIGKYLEDFKQHSLRNPIVEQIITETLRVVRDIWEHYGEGKENYFSEIHVELGREMKNSADVRKKITETINRNTNTNERIRNILQELMLDSKIEGEVRPYSKGHQEILKLFEEGVDAHGKEEYRGIKKDEIENIQKKTRPTKSEVNKYKLWLEQGYISPYTGSIIPLSKLFTSEYEVEHIIPRSKFFDDSMSNKVISEAAVNPYPYKGNKTAYRFIMDRGGSIVPELSINGKQIKIFSKEDFEMHCKSHFKHNKKKLELLLSEDIPEDFTNRQENDSRYISKVVKGLLSNVVREEGEQEVTSKNLVPVVGRVTSILKSDWGLNEVWEDLLTPRFERMNELTNSVDFRHETIDGNGNTKMINTVPEELLNGFTKKRLDHRHHALDALVVACATREHTNLMNNKYANSKNQRFDLKEKLKRTEEKSIIDKKNGGTRTIHVSKEFYKPWATFTTDAKQALEATVVSFKQNKRVINRATNKYWKWKKIDGHLKKVQVDQKGSNWAIRKSLHKATYYGKINGIKTPKGKIATAGRISLESIDSLKKIDSVTDTGIQKILKNHIKNYIDEKGKYRFDLAFGTDGIEELNQNIQILNEGKPHQPIFKVRTFEVGSKFSLGDTGNNGTKYVEADKGTNLFFNIYWDEKKEKRNYETVPLNEVIAHQKAVAALPKNERTEAPINPALGKYLFTLSPNDLVYVPTDEELENPTLVNFEKLSKEQPSRIYKMEKSSGKECYFIQCNIASLIKNYDANSKYGELGSQNKLISTMEENGYKISDRCWKLAVNRLGSLKRIG

SEQ ID NO: 23735 - protein, 1393 aa, unidentified; identical to SEQ ID NO: 22382
  REGION 1..1393: note = Cas Enzyme sequence

SEQ ID NO: 23736 - protein, 1498 aa, unidentified
  REGION 1..1498: note = Cas Enzyme sequence
MKHILGLDLGTNSIGWAVIRAHQDADGHTTLQDILAAGSRIIPMDAATLTDFDKGNARSGTAERTSFRSMRRRRERQLLRRERLHRVLMLLGFLPQHYANSLTRYGEFADNRECKLPWVKDESDGKYHFLFQDAFHEMCEDFRQSAPQWVADGKKVPYDWTLYYLRCKALSRKISKEELAWILLSFNQKRGYYQARDEEDEVTTNKLEEYYAGKVVRVDDTGERKGKNVFYDITLENGWVYRYAARIYPDWVGQVKEFIVTTTLNPDGTPKTDKAGEVKRSFRMPKDDDWTLIKKKTERDIDRSQETIGQYIYHALLKDPSQKIRGKLIGTVERKYYKDELRRILDRQIQFHPELRDRELYYACLQELYPSNVAFRNTLVNRDFTYLFLDDILFYQRPLKSKKSQISDCPYEEHFYTDKETGERISVPVKCIAVSHPLYQEYRLWQFIQNLRIYCREARIDGNLMIDWEVTNELLQTEEDKTALFDWLNDKESVKQPELVAFLLGGKANKKQIKAYRWNYMDDDTKGYPCNETRASLLKYLREAQTDSSFLTREREEALWHILYSISDKGELKSALGKFAVKHGLNERFVTVFSKFPPFKKDYGSYSAKALKKLLPLMRMGHHWQEASFIPSTRQRMEKFINGEYDDSIDKRTYEKLESLTEVSQYRGLPGWLACYVVYDRYSEGRDIERWTSPSDIDSYLAQFKQHSLHNPIVERVVLETLRTVRDIWKQVDHIDEIHIELGRNMKLPADKRRQMTEQAWKNEQTNLRIKALLLEFARPGYDIENVRPYSPYQQDQLRIYEEAVLGANECPDDISAILKKFNGLNPPTSAEVLRYKCWLEQKYRSPYTGRTIPLSKLFTPAYEIEHIIPKQRYFDDSFSNKVICESEVNKKKGAMLGYEFIKSYHGASITLNRGGTASIFSVEAYENFVKEHYAHNRGKMKKLLMDDVPDSFISRQLNDSRYISKFMKSILSNLVREEGEKEAISKNLIVCTGGITDRLKKDWGIHDVWNDIIFPRFKRLDEMDSSHTYITLNTHRHPIPSMPLEFQRGFSKKRIDHRHHAMDAIVIACATRNIVNYLNNESARHDAKTSRMDLQRLLCTANRKLIDKPWKTFTQDTCKVLEDMIVSFQRTLRIINKTKNYYLRFEDGKKRRVLQTKGDNWAIRKPLHKETFYGEINLRRIETLSLNKALERIPDIVERDLRKKLSELLSLGYNAKRIKGYFEEHKEEWSDVNLSKIKAYYFTKQKNKRYFAARTELDTSFNKDKIENKIADTAIQKILLQHLEAYGNDAEQAFSPEGIDTMNRNIRQLNGGRSHQPIYKVRVYEEATKFAVGRRGNKSTKFVEAAKGTNLFFAIYEISQVDGNGNRQTSRTFSSIPLNVAVERLKQGLPPVPEDEEGNAPKYVLSPNDLVYLPTERELKRREIAMPIDKSRIYKMVSCTGKDCFFIPANTAVPIVDRYEYSSMNKIGRALTGEMIKEICLPLKIDRLGQIIEISTF

SEQ ID NO: 23737 - protein, 1149 aa, unidentified
  REGION 1..1149: note = Cas Enzyme sequence
MILGLDLGTTSIGWAVVSEDDQTFRLDSLGSRIIPLTTDDANEFLSGNAISKNAKRTQRRTQRKGYSRYQQRRALLQQFLQQHAMLPDESLKGLNKLSLWGLRTRAVSERLSLPELGRVLYHLNQKRGYKATKADYDADGDKKQGEYVKAVMGRHRMIAERGITIGQLFFEKLSEDPSYRTKEQVFPRRAYEEEFDRIVACQRQFYPTVFTEENIDTLRNRIIYYQRGLKSCKHLVSLCDFEKRAYLNAAGKTVFNGPKVAPKSSPLAQVCKIWESVNNLTLKNRRGETLEIAPEERRALFEHLNTHDKLTLTDLYRILGIRKTDGWWAGKAIGKGLQGNTTRNTLRKALAGQYDELLRFNLTTVETNQVDAETGEIIQMVSESYLDEPLYRLWHAVYSIPDQEDLSKTLQKQFGITDPEVVENLFAIDFVKAGYANKSAKAMRRILPYLELGLKYAEACDAAGFRHSESLTVQELESKQLLPKLKPIEKNELRQPVVEKILNQMVNVVNALMDKYGHFDEIRVELARELKQSRDERNETTKRITKNERENRAVAEQIATDYQLTPTRNRIRKYKLWEESGHVCIYCNSVINASEFLQGVDSEKEHIIPRSLFFDDSFSNLACSCRQCNAAKGNRTAYDFMQQKSEAEFADYLDRVEKLYKKKKISKTKYERLLTPESKIPTDFIDRQLRESQYIARKAREILSGVCRQVTATSGSVTDFLRRTWGWDRVLHDLNFDRYRAAGLTEIKDREHNGRHWQEEEICNWNKRLDHRHHAIDALVIACTKQGYIQRLNTLSQWKDVSFAPTEAQGEVYQTKRSKLEKYIVAQPHFSVQEVQQAVRSVLVSFKAGKKVASTGKRYSYRQGKRVLMQHVLIPRGALHKDSVYGVVNRYAKNRRGETVIEQKSVLRYPLASIERNQINSIVDSGMRKLVQQRFDRHPGSGKDVLKDLQNDPLLFNGVPVKSVRRMPRLDASSLIHLHRGGYVVPGNNHHVAIYRDRAGKLYEHCVTFWQAFDRKRYGLPVVIIHPEEVWNSLPEGVPDTVMEQLPLPEYSFVVSLQQNEMFVIGMAPELFEEAMRNQDYALLGQYLYRVQYISSNDYCFRLHVETGTERGESDGLAKKFYRFKSLKAFFAANPTKVRISLLGEISKV

SEQ ID NO: 23738 - protein, 1526 aa, unidentified
  REGION 1..1526: note = Cas Enzyme sequence
MFSQRNNPYCELLKSEAKVMIISRINNFFNKKVNMKKILGLDLGTNSIGWAVVNGDVDNEGRIQLNKIESAGSRIIPMDAGILGDFDKGNSVSQTKERTGYRGTRRLRERYLLRRERLHRVLDVMGFLPKHYAEQLTRYGKFLNGTEPKLAWFKDDNGKQQFLFSQSFNEMLKEFYAVHPELVEENKKIPYDWTIYYLRKKALNAPLKKEELAWLLLNFNQKRGYYQLRGEEDEQTHNKQEEYMVLKVIRVEATEDKRGKDIWYNVYLENGMVYRRSSKTSIDDWVGKTKEFIVTTLLDDKGQPKVDKEGQVRRSFRAPQEDDWGLLKKKTEADIERSGKTVGCYIYDSLLANPAQKIKGKLVRVVERKFYKQELKAILEAQKQFVPELRDKDLYIKCVEELYPSNDTYRNNISQRDFVYLLMDDILLYQRPLKSKKSLISDCQFEDRVYKDKETGEIKHIGIKCVSRSHPRFQEFRLWQFISNLRIYERSKIVDGKLKVDVDVTETLLKDEIDYERLFEFLSSVKAIKQDTLFSKFFKMKKQNGAFAYRWNYVEDKEYPCNETHEMIVSHLKKAGIDESFLTIEKEEILWHILYSVSFKQQLRTALGTFAEKNGLDKDAFTEQFIKTPPFKSEYAAYSLKAINKLLPLMRMGKYWSADNIDAKTKERINHIIDGECDDDIKNIVREKSINLLSVDHFKGLPLWLACYVVYNRHSETADTARWKRPEDIDNYLRHFRQHSLNNPIVEQVVMETLRTVRDIWKKEGHIDEIHIEMGRNMKLPKEKRAQMTQRIIENENTNIRIKYLLQEFANPDMGISGVRPYSPAQQELLHIYEESALDSVKDKEPDIVELINKLSKIENKPSHNDVLRYKLWLDQKYRSPYTGEAISLARLFTSEYEIEHVIPQSRYFDNSYANKVICESEVNKLKSNLLGYEFIMQHHGEKVELSSGRTVTIFEPQEYERFVKDNYSSNPHKLKILIMDDIPDGFINRQLNDSRYISKLVKGLLSKIVREEGEEEATSKNVIVCTGGVTDRLKKDWAVNDIWNRIILPRFERLNQMCGKELYTKLNTSGHLIPDIPLEMQRGFNKKRIDHRHHAMDAIVIACATRNIVNLLNNESAKHDSKTTRYDLQHTVCHKQSTDANGNYQWVVNMPWTTFPSDVMETLQQIIVSFKQNLRVINKTTNKIQKTVNGKHVLVLQTKGDNWAIRKPLHKETVFGEVNLRKIKEVGLKDAISSPNAIVDCDLKKKIKAMVELGYDLKKIKAYFDDNKDMWTDINPKKIPVYYFTKETNDRYFATRKPIDQSFDRKKIENSITDTGIQKIMLRHLENNDSNPEIAFSPEGIVEMNKNIRTLNDGKWHQPILKVRVYEQANKFAVGTSGNKYKKFVEAAKGTNLFFAVYEDENGKRSYTSIPLNVVINRMKAGRPIADEDGVIPTFVLSPGDLVYLPNEGKQVSIESIDKNRIYKMVSCSDYQCYFIGNTIASPIVNKYEFSPLNKAERAITGEMIKEKCIPIKIDRLGQIIKIGY

SEQ ID NO: 23739 - protein, 1265 aa, unidentified
  REGION 1..1265: note = Cas Enzyme sequence
AYAAYAVTNTSYNLSRFKGKDMWGVYKFDEAETAQERTQYRQGRTNKKKIKERIGLLRSYFADEVQKVDENFFVRLDNSFYYSEDKDIRLKGDRNVLFADEDYCDRQYMSEYPTIYHLRSELAHGSQKPDIRCLYLAVSHMMKNRGNFYTRNLENTDTSLGEVYQNICTKAAEHDIVLKMEVPAEKIMDIMTNTGISGKVKATLVTQLVDATSKPAVSIIKLMCGLKAKIADIFPEVAENLEEDEKKLSFSFKNEDYFDKADSIEKLIGENEYSLIESVKEMYDAAIIKNIIQDYRYVSDAKIASYNKHANDLKVLKAELKTILPEDEYRRFFSEEEPGTYGAYVHFSNYNIHNGIKRRKSDKGRTQEELYHTIKKYLADVDDEQAEYILDEIDKGTFLPKQRILDNALIPNQLYTVELKAILDNASKYYDFLNSRDESGLTVSERILSLFTFTIPYFVGPTSTYNSRGWVVRKEPGKVYPWNLNDKVDMGESAKQFIEKVIGKCNYLTGEKVLPNASLLYEKYRVLNEINNICVDGEKISVEMKQAIVNELLYSGKTISKKKILSFLVKNENATSDSIITGIDDKLNNSMASHRFFTDIFGCLNKDNEAVAEDIILWSTIYGSSKELITEQIINKYPDMFDEEQLRKILNLNCKDWGKLSREFLNMKGLDKDNDEYVSVIDAMWNNNLNLMELMYDTRFDFSSRVKDKTKNAAKNLFSFDYDDLYDLYATTAQRRTIWACVKIVREIVRLKGYAPESIFLETVKSRPNDIPKESRKGKLTAIYKGLKGVSADWKKKMLSLIEECDADGSLKAKNVYLYFLQMGKDMYTGKDISLEELKSPDKRKKHNIDHIYPKHFVKDDSIDNLVLTSTDLNRDLSDRYPVPQDIYENMHEFWQQLRRSGLISAEKLARLSDRNPLSDEKRASFIGKLYDQAGFSTRMMADIFKNILPKDTKVIYAKTSETNEFRHKFDFPRTTIINDDYLAKDAYLNIVVGNVWYTKFTASPMWYIKEEYRKKKSEYNLNRMYDFNVIRDDRIAWITDKTNPGAATINTVNKVMNRNTVITITRTTQGHGGLTNATITRADKAKEGVYLPLKTSDERMSVTKYGGKTSITSAYMFLVEHTNKKSRIRTIYSLPLHLVSQIKGKKDLEKYCTEVLHLINPVVKITKILLFSELIIDGYSYLLGGKAVNQYYLRNNVPMRLSAEWQKYVNKIEKYINFKSLDKDISAEKNIELYDELVDKHSNSIYAKRRNAAADMLKKAEMLS

SEQ ID NO: 23740 - protein, 1198 aa, unidentified
  REGION 1..1198: note = Cas Enzyme sequence
GENIVDTLLHTPTQKIRGQLVRTIERKYYKEELYRILSKQKEFHDELNDKQLYERCLEELYPNNPAHKNLMATHDLPYFLINDVLFYQRPLKSKKSLIDNCSFEGHEYIDRETNERKFSPIKCIAKSHPLFQEFRLWQFVSNLRIYQKEKEIDGRLMTDVDVTQEFLRDEEDYVALFDWLNGKKEIKQEQFLKYPTFGLKKKANQYRWNYVEDKPYCCNETRSLMLVRLEQAGIPLTFLTREREEALWHILYSVSNKQELKQALASFAGKNGLNKNFVEIFVNTPAFEKSYGSYSAKAIKKLLPLMRMGHYWKEENIDVHTLERINKILSGEYDENIKNRVREKAIHLEDLSSFRGLPLWLASYIVYDRHSEVKEACQWKSPQDIDEYLKAFKQYSLRNPIVEQVVLETLRTVRDIWKQIGTIDEIHVELGREMKNPAEKRKKMAQKMLENENTNLRIKALLVEFMNPELGIENVRPYSPSQQDLLRIYEEGAWNASNADDKMHDEMLSILKKFNESDSKKRPTSSDIKRYRLWLEQKYRSPYTGAVIPLSKLFTPAYQIEHVIPKALYFDDSFSNKVICESEVNKLKDKQLGYEFIKKHHGEKVQLSLGGVVEIFSVDAYEQFIKENYSQNSAKMKKLLMDEIPEQFTERQMNDSRYISKLVVSLLSNIVRNEEEQETQSKNVVVCTGGVTDRLKKDWGVNDVWNKIILPRFERMNQQTGTSDFTSVNSNGHTIPAMPLDLQKGFNKKRIDHRHHAMDAIVIACASRNIVNYLNNQSAGEHGKISRYDLQHLLCTKVQDGNGYQWVINKPWKTFTQDVYETLRNVIVSFKQNLRVINKTSNYYQRKENGRTILSKQDKGDNWAIRKSLHKETVFGEVNLRKTGSTSLKVVLTNPKVVVDKDLKNKLIELIQQGFNEKQIKNYFEEHKDSWQDVNLKKIPVYFFTKDTQEHYFASRKLLDDTFKQDSIKESITDTGIQTILLKHLKEEGNDPKVAFSPEGIERMNKNIVHLNNGHQHQPIYKVRKYEKGDKFAVGARGNKSSKFVEAAKGTNLFFAIYEQEQVEKSNGEIVKKRTFATIPLNVVISRQKQGKSSAPADENGNLPLFVLSPNDLVYVPTREELKNGQLPDNPHPDRIYKMVSSSGNQCFFIQYGVSSMLWDKNEFSALNKMERAITGEMIKEICIPLNINRLGHITYRL

SEQ ID NO: 23741 - protein, 1509 aa, unidentified
  REGION 1..1509: note = Cas Enzyme sequence
MKNIVGLDLGTNSIGWAVVNGSVNDDGSEQLVKIQASGSRIIPMDAAMIGDFNKGNSISQTAERTRLRGVRRLSERYLLRRERLHRILDILGFLPFHFAQDLDRHGKIVKGKEPKLAWRKNEAGQFEFIFQDSFKEMLEDFKLNHPNLITDDKKVPYDWTIYYLRKKGLTSKISKEELAWILLNFNQKRGYYQLRGEEEKKNDNVMIINSKVIDVVKAEKDKKYEKYWYNVLLENGLLYRAAFYNDISFWKGHTKEFVLKTIKLKSGGTKQELSFLPSFDEIEKMEKKQKDKMYFKIKLKTEADIDQAHKTVGTYIYDTLLGNPSQKIRGRLVRTIERKYYKEELKLILDKQKEFHPELQDRALYAACVEELYTINEAHRNNIGNRDFTYLFLEDILFYQRPLKSKKSLIDNCPYEENQGLDKETGEIKSFPVKCIAKSHPLFQEFRLWQFIINLRIYRKDLAQDVDVTNELLKTEEDYVALFDWLNGKKEIDQKAFLKYPVFGLKKEIENYRWNYVQDKPYPCNETRLLMLARLEKCDISIEFLTKENEEALWHILYSVEDKNEIVKALQKFADKHDLNASFVDVFQKFPPFKKEYGSYSAKAIKKLLPLMRMGKYWSENSIDKGTRARIDKIITGEYDEKIENRVREKAIHLADVSDFKGLPLWLVCYIVYGRHSEAKEIIQWKSPADIDSYLRSFKQHSLRNPIVEQIIIETLRVVRDIWKQVGNIDEIHVELGREMKNPADKRKKMTQQMSENENTNLRIKYLLTEFLNPEYEVENVRPYSPSQQDILRIYEEGVLNSVSDLPEEISDILKKFTETDLKKRPSRSEILRYKLWLEQKYRSPYTGEVIPLGKLFTPAYEIEHVIPQSCYFDDSFSNKVICEAEVNKLKSNLLGHEFIVKHHGEIVELPFGKKVRIFTVDEYEQFVKDNYSRTRSKMKKLLMDDIPEEFVTRQLNDSRYISKVVKSLLSNIVREKGEEEAISKNVIPCTGGVTDRLKKDWGINEVWNKIILPRFQRLNELTGTNKFTTKNVGIQEIPTMPLELQKGFNKKRIDHRHHAMDAIIIACANRNIINYLNNESATAKAELSRYDLQKMLCDKAKTDNNGNYKWVIRKPWASFTQDTYLALENIIVSFKQNLRVINKATNRFLHYNEEGKKIFVKQGKGDNWAIRKSMHKDTVFGEVNLRRIKTVALNEAMKNPQSIVVKDFKRKLLELWNLGFDAKRIKKYFEDNRETWSDINLSKIEVYYFSKDTKDRFFATRKPLDTSFDRKKIENNITDTGIQKILLRHLELKDNNPDIAFSPDGIDEMNRNIIQLNNGKYHQPIIKVRWYEQADKFAVGQTGNKFSKFVEAAKGTNLFFAVYESNILDKKTNTIIKKRNYATIPLNVAIERQKQGLPVAPEDENGNDPIFVLSPNDLVYLPTDDELANGIIAQPLDRGRIYKMVSSSGEQCFFIKHIVANVLVDKFEFSPLNKMERALTGEMIKMICIPIKVDRLGNVLESSSSHKK

SEQ ID NO: 23742 - protein, 996 aa, unidentified
  REGION 1..996: note = Cas Enzyme sequence
LMAKNGLPGKAEIEQAVQAGHLPDVYALRVQALDGPVTALDFARILLHLMQRRGFRSNRKADDAQKDGKLLQAIDANTRRMEANRYRTVGEMMYRDPVFAEHKRNKAENYLSTVKRDQIIDEARLVFAAQRQYGATWASPEMEAEYLCILTRQRSFAEGPGKGSPYSGSNRVGTCTLEGKSEQRAAKAAFSFEYFTLLQKINHIRIAENGTSRTLTPAERQVLLSVCSQTDKLDFARIRKALALPEEARFNMVRYRGEQTAEACEKKEKITALPCYHKMRKALNTLRKDHIRNISREQLDAAGAALTNPENEDKLREALKQAEFEPLEIEALLTLPSFAGYGHISVKACRKLIPYLEQGMNYNDACQAAGYDFQGRQNGEKAQFLPASTEEMEDITSPVVRRAVAQTIKVVNAIIREQGESPVSIHLELAREMNKNFQQRSELDKAMRDNSAENERLMKELNELFPGRTVTGQDLVKYRLWKEQDGRCAYSIQPLELDKVITVSGYAEVDHIVPYSISFDDRRTNKVLVLASENRQKGNRLPLQYLQGKRRDDFIVYTKANVKNFRKRQNLLKERLSEEDGKGYIQRNLQDTQYIAAFMLNYIRNHLAFADCSGAGKRRVVAVNGAVTAFLRKRWGLSKVRADGDLHHAVDAAVIACTTQGMIKRVSDFCKRAETTAVRNEHFPEPWPHFRDELRQRLSACPQEDLMKINPVYYATVDISSIQPVFVSRMPRHKVTGAAHEETIRSQVNEKYTAVRKSITELSLDKDGKIKDYFKPSSDTLLYEALKKRLTEFGGNAKKAFAEPFYKPRADGTSGAQVRKVKVVAKMNNTIPVRDGGGVAKGGDMIRIDVYYVPGDGYYWVPIYVADTVRPELPNKAVLRGKSMEDWKEMKEENFLFSLYANDLILVEREEPINFSLVNNDSTLPNKFSVKKVLVYYKSGNISNAAIKVETHDGAYVFEGMTFGTVRKIQKYQVDVLGNYTPVKKEKRQTFPAQRR

SEQ ID NO: 23743 - protein, 1498 aa, unidentified
  REGION 1..1498: note = Cas Enzyme sequence
MKHILGLDLGTNSIGWAVINAIKEENTQKEQLIGINTAGSRIIPMDAAQLGDFNKGNTVSQTANRTQFRGVRRLYERKKLRRERLHRILQLLGFLPKHYASQLDRYGKFIANSEPKLAWTTNTHEPSYFIFQSSFQEMLNDFLQNNNQVKKVPYDWTLFYLRKKALTQKIEKEELAWILLNFNQKRGYYQLREEETEKASSKTRQYFDSQIVTDITDTGQIYKGLKIFTITLENGEKGKFFSKNMPDWKGQKKDIIAIIDLDKNGNDKYDENGELSRRFKIPTEQEWEEQWELIKTKTQKDLDTSHKTVGAYIYDTLLQTPSQKIRGKLIRTIERKYYKDELNQILKKQEEFHPELRDSNLLEACIEELYPNNEAHRNAIAKYSISQLLIEDILFYQRPLKSKKSLISNCPYEEYTYTNKETGEICTSSLKCIAKSHPLFQEFRLWQFISNLRIYQKEGTINGKFTTDIDVTNQFLKTEDDYANLFDWLNQKKEIRQDTFLKKPAFGLKKNIANYRWNYVEDKTYPCNETHYKILSYWEKAGIEQSALTSEIEEKLWHILYSISDKNELRKALQHFADKNYLSDKFADTFQQIPPFEKDYGSYSAKAIKKLLPLMRIGRYWKAENFDSTTLDRIEKILTGEFEENIKNRTREKTIHLDNLYSFQGLPTWLACYIVYNRHSEIKDVTKWQQPSDIDAFLNAFKQHSLHNPIVEQIIMETLRTVRDIWKQTGHIDEIHVELGREMKNPAEKRRKLTQQIQENENTNLRIKALLTEFANPEFGIENVRPHSPSQQDLLRIYEEEALNETKDIPEDIAVILKKFNEVDTKKRPSTSDVLRYKCWLEQKYRSPYTGAMIPLGKLFTPAYEIEHVIPQSRYFDDSFTNKVICEAEVNKLKGNMLGYEFIKNNQERIVELGFGQNVKIQTVEAYELFVKEHYSYNRTKMQKLLMEDIPDQFIERQLNDSRYISKLIKSLLSNIVRDEGEEEATSKNVIVCTGSITDRLKKDWGINDVWNKLILPRFIRLNEITESNRFTTTNACNKTIPAMPLDLQKGFNKKRIDHRHHAMDAIVIACANRNIVNYLNNESASKNAKISRQDLRQILCKKTKTDNLGNYQWLIDKPWDTFTQDMYSILSNIIVSFKQNLRIINKTTNHYIHYENGKKVNCSQKQSDSWAIRKPMHKETVYGEINLRRTTTATLKAALENPQRIIEKDLKKKIKELLTQGLNEKQIKKYFEDNKDIWQEINLKKIPVYYFTKETANRFFACRESINTTFNKKKIEEKVADTGIQQILLRHLEQNGNNPEQAFSPEGIEQMNKNIMSLNNGKFHQPTYKVRTYEQADKFAVGQTGNKSTKFVEAAKGTNLFFAIYETAHKRSFASIPLNVVIERLKKGLSPAPENEKGNLPKFILSPNDLVYVPTKEEIENGHINQPIQKDRIYKMVSCTGNRLYAIPYYIANILIDKEEYGALNKTEFSDEKLSIKEICIPIKTDRLGNIITSISL

SEQ ID NO: 23744 - protein, 1509 aa, unidentified
  REGION 1..1509: note = Cas Enzyme sequence
MKTILGLDLGTNSVGWAVINSVIKEQAERIWIEMAGSRIIPMDAAVLGDFDKGNSISQTSERTRLRGARRLRERQLLRRERLHKVLNILGFLPNHYLEYIDFEKHPGKFLADAEPKLAWVKDEQGKYTFLFQAAFDEMLADFAIHQPSLVSGDKKIPYDWTIYYLRKKALTEMISKEELAWILLNFNQKRGYYQLRGEEKEDNAGKSVEFYALKVLTVEATDEKKGRDVWYNVHLENGWIYRRSSSVPLDWEGQVKEFIVTTDLNPDGTPKLDKYGEVKRSFRAPKEDDWMLIKKRTEADIANTHKTVGAYIYDTLLQKPQQKIIGKLVKTVERKLYRDELSLILQKQCAFHAELQDRALYARCVEALYPSNEVRRKNIANRDFVYLLMDDILFYQRPLKTKKSLIANCPYEENEYVDRETGEIKKAPLKCIAKSHPLFQEFRLWNFLSNIRIYQKEKEINGTLHLDVDVTAEFLKTEDDYVALFDWLNSRKEIEQKTFLKYPKFGLKKEISNYRWNYVEDKQYPCNETRHAILSSLEKANVCIDFLSNEKEVALWHILYSVSDKQEIEKALRTFAAKNGLDESFVEAFKKFPPFKSEYGAYSAKAIKKMLPLMRCGKYWDVSSIDDTTKERIKKIVTGEYDERISVKVRDKVMNLSDISCFRRLPLWLACYIVYNRHSEDKEAVKWESPADIDAYLASFKQHSLRNPIVEQVITETLRVVRDIWKQVGRIDEIHIELGREMKNPADKRKRMTAQILENENANLRIKALLAEFMNPEYEIENVRPYSPSQQEILRIYEDTVLHAEDQLPEEIDAILKKFNSSKVPTKSEFLRYKLWLEQKYRSPYTGELIPLGKLFTAAYEIEHVIPQSRYFDDSFSNKVICESAVNKLKDNQLGYEFIKNHHGQKVEVGFGKSVEIFSVDSYERFVKEQYAKSAVKMKKLLMDDIPEQFIERQLNDSRYISKVIKGLLSNIVREKNDSGEYEPEAVSKNIVVCTGSVTDRLKRDWGMNDVWNSIVYPRFERLNSLTDTQSFGHWENKSGKKVFQTELPLEYQKGFSKKRIDHRHHAMDAIVIACATRNHVNYLSNESASRNAKISRYDLQRLLCDKNRTDDNGNYKWVIKKPWDTFTQDAREVLSKIVVSLKQNLRIINKTTNVYRHFDATVNRVYQKQKTGDSWAIRKPMHKDTVFGAVNLRKVKVVRLSVALDTPAMIVDKRVKNKVFELLSYKYDKKRIEKYFKENAFLWKELDLAKVAVYYFTEATTEPLVAVRKPLDSTFNEKKIKESVTDTGIQKILLNHLCTKEGKPDLAFSAEGIEEMNRNLLQLNNGKSHQPIYKVRVYEPRGNKFSVGVLGNKGTKWVEAAKGTNLFFAIYITEDGKRTYETIPLNVVIEREKQGLVPVPDRNEKGDKLLFWLSPNDLVYLPTEEEREFGRINEPIDRGRIYKMVSCTGNEGHFIPANVANPIVPVIELGSNNKAQRAWTNEMIKDICIPIKVDRLGHIIEVKYRIDE

SEQ ID NO: 23745 - protein, 1148 aa, unidentified
  REGION 1..1148: note = Cas Enzyme sequence
  REGION 442..448: note = misc_feature - Xaa can be any naturally occurring amino acid
TERLDLEEIAVVLQEINGQISASSGYLGAISDRSKVLYFNHQTVGQYQMAELNKNPNMSLRNMVFYRQDYLDEFNAIWEKQAEFHKELTPELKKEIRDIIIFYQRRLKSQKGLVSFCEFENREVFVEKDGKKQTKVIGCRVIPRSHPLFQEFKIWQTLNNIEVFVGEKRKKRKQTNVSSGLFDNTVDTLVTEGRRFLYQEEKEILAKELSCKKDLTKTEVLKLLFENPQELDMNFKQIDGNFTGFALFSAYSKMIEKYGYEPLDFKKPADEIIAQLKAVFMDLEWNTDLLSIDLDKEGKNLEMQPYFRLWHLLYSFEGDNTPTGNGKLIEKIMQLCRVEKEYAIELANISFQDDYGSLSAKAIKKILPYLKEGNQYDVACEYAGYRHSKSSLTKEEIENKALKDKLDILPKNSLRNPVVEKILNQMVNVINAVIDAYGRPDXXXXXXXRELKKSAKEREELTKAIAKKTREHDEIRKLLQSEFGMIHVSRNDIIRYKLYEELKGNGYKTLYSNQYIPKEKLFSKEIDIEHIIPQARLFDDSLSNKTLEYRAINIEKGNKTAYDFVKDKYGEEGLQGYLNRCENICKDRKAKLRKLKMEQSDIPDGFIDRDLRNTQYIAKKALAMLNDICRRVVATTGSITDKLREDWQLVDVMKELNLTKYEALGLVEMFEDKDGRIIKRIKDWTKRNDHRHHAVDALTVAFTKDVFIQYFNNKNAAWESDCKEHMNIVGIKKHYFESGKAVPPMPLGQFRAEAKWHLENLLVSIKAKNKVVTTNVNCIRKKGGISKKHQQTPRGQLHLETIYGSHRQYVTKMEKVNASFDAAKIATVSRQNYRNALLKRLEAFGNDPKKAFTGKNSLEKNPIYLDRAQTMQMPDRVQIVELEMVYTIRKPIDPGLNVDKVVDTKVRAILEQRLKEYGGDAKKAFVNLDENPIWLNREKGISIKRVSIRGINNAQSLHMKKDKNGNPILDENGKQIPVDFVNTGNNHHVAIYRKPVLDKKGQVMFDEDGNLMYELDEVVVSFFEAVTRANLGLPIINKDYRRSEGWQFLFSMKQNEYFVFPNEKTGFNPMEIDLLDPNNYAVISPNLFRVQKIGSNDYTFRHHLETTILNSINELKFITWIRCGKSGIKDIIKVRINHIGQIVFVGEY

SEQ ID NO: 23746 - protein, 1398 aa, unidentified
  REGION 1..1398: note = Cas Enzyme sequence
MKTILGLDLGTTSIGWALVKEAEPFSDEKSEIVRLGVRVIPLTVDERTSFENGKSITTNALRTQKRGMRRNLQRYKLRRQALIEELKSTGWIGNDFIFSETGPGSTFRTLRLRAKSASEEVTLGDLARILLQINKKRGYKSSRKMVSSDDGQAIDGMAVAKEMYDKGLTPGEYVYQRMLEGKYAIPEFYKSDLQEEFDRIWALQKSFHTELTDELYRKLSDRNKSQTWAICRDELGIQGLKSSFTGKERLKEAYRYRHLAATQEVNMEVLTCALQEINGQKASLSGLLSKISDRSKELYLNNLTVGQMLLKRIEDNPNNSLKNIVFYRQDYLDEFERIWTVQSKYHTELTHELKKRLRDIIIFYQRPLKSQKGLISLCELETKDIEVAIDGVKKMKNIGPRVCPRSSPLFQEFKIWQTINNIFVNGAALDDEDKSVIAKELMFKDKLKDSDLLKLLFKTTKGQSVNFKEVDGNRTMATLMKACFKIAENLGYDDIGLSKLSSEDQMVRIEGIFKEQGFKTGFLHFDSSLASPEFENQDSYRLWHLLYSYEGDKSASGNESLVKCIMDLCSMDEGSAKILASCTFLPDYGSLSAKAMRKILPYMKDGLEYTAACAMAGYRHSKRSLTKEELDTKEYSDRLSLLPKNSLRNPVVEKILNQMINVVNSVIDVYGKPDEIRIEMARELKKSAKEREEAQRDIASSTAESQKVIEILKGEPFFLQFPTRNDIIRYRLYQELAQNGFKTLYSNTYIPKDKLFSKEFDIEHIIPQALIFNDSFANKTLESRQCNLEKGKVTAMDYVKSKYDETGVQAYCDRVNGLIGKGISKTKAKWLLMEGKDIPEDFINRELRDSQYIAKKAREILESLVKFVVPTTGSVTARLREDWQLVNVMQELNWEKYARLGLTGVREDKDGRRIPFIQDWTKRNDHRHHAMDALTIAFTRRQFIQYLNHLNSKIDVVSWDKKDLDLRDYDLEDIKFGNLSAGDRYGIVKALQDKFLYKDGNDKYRFVPPIPLDEFRRQAKEQLSDILISFKAKNKVCTRNVNVTKNKGGANRKTQLTPRGPLHNETIYGSSLEYVTKENEKIGSSFDTERITTVCKKKFRDALARRLEEFGGDPKKAFTGKNSPEKNPIWVDEHHSEQVPAKVRTVTMGQRFTGRKPIDATLKIEKVIDKRIREILQARLDEFDGKAAKAFSNLDENPIWLNKEKGIEIKRVTVSGPANPVPVRFKRDKDGKPIIDDAGKTIGADFVTPGNNHHIAIFRDSSGKLQEHPVSFLEATIAKSHGLDVIDRNYNKDEGWEFLFTLKQNEYFVFPNSETGFNPLDYDLTDPRNYAEISPNLYRVQKITTGDYYFRLHLETTVEDNKALKGITWKRVGPSGLEGAVKVRIDNLGRIVAVGEYD

SEQ ID NO: 23747 - protein, 1506 aa, unidentified
  REGION 1..1506: note = Cas Enzyme sequence
MKKILGLDLGTNSIGWAVINSSVDDEGKEKLTSISSCGSRIIPMDAATLGDFDKGNAKSSVAERTRLRGIRRLLERSLLRRERLHRVLSVMGFLPEHYASQLDRYGKFLPETEPKLAWYKDNTGSYRFLFQDSFNEMLEDFRLYHPELVAEGKKIPYDWTIYYLRKKALSQKIAKEELAWILLNFNQKRGYYQLRGEEEQEDNKKSVEYYALKVVAVEDSGERKGKDIWYNVKLENGWIYRRASSIPLDWTGKVKEFVVTTDLDDAGNPKKDKDGNVKRSFRAPKEDDWGLLKTKTQTQIDESGQTVGAYIYDSLLRMPDQKIRGKLVRTIERKYYKDELRKILLKQTEFHAALKDYNLLLSCIEELYPNNEAHRRLLSTSNFTCFLLEDILFYQRPLKSQKGLIDDCPYESHVYKKDGSLHRTPLKCISKSHPLFQEFRLWHFLSFLRIYQRERMIDGSLKLDVDVTNEFLQNEDDYVKLFDWLNGRKEIDQKTILTYKPFGLKKNEQPKYRWNYVEDKSYPCNETRADMISRLGKAGVSEGFLTEEREEALWHILYSISDEKELTKALGTFAEKNGLNEAFVEQFSKMPPFESNYAAYSLKAIRKLLALMRMGKYWNEQDIDKQTRSRIEKILTGEYDETIRTRVREKAIHLTDISSFRGLPLWLACYVVYNRHSEAKELVKWETPADIDHFLSKFRQHSLRNPIVEQVIMETLRTVRDIWKQEGQIDEIHVELGREMKNPAKERARITAQVLENENTNLRIKALLTEFMNPEFEIENVRPYSPGQQEILRIYEEGVLSGVAEKDLPEDIISILKKFRENDVKKRPTTSEVLRYKLWLEQRYRSPYTGRIIPLGKLFTPAYEIEHVIPQSRYFDDSISNKVICESAVNKLKDNCLGYEFIKKHSGEIVELGNGEKATVFTSEEYEHFVKESYLGNGKKMKKLLLEDIPDNFIERQLNDSRYISKVVKSLLSNIVCEEGEQEGMSKNVIVCTGGVTDRLKKDWGVQDVWNRIILPRFLRLNKMTDSTGFTSVSTNGHLLPALPLHLQKGFNKKRIDHRHHAMDAIVIACADRNIVNYLNNASARKGSEISRYDLQHLLCDKVKTDSNGNYKWMLRKPWDTFTQDVYTALTNIVVSFKQNLRVINRTTNYHQHYNESGEKKMIPQVKGDRWAIRKPMHKDTVYGEVNLRREKTLPLKDVLNNPSIVVDKSLKSKLHELLKAQYDLKAITKYFEAHQDVWADINLKKIKVYYFTKETNERFFATRKSLDSSFNQKKIQEEVTDTGIQRILLRHLQLNDNNPDIAFSPDGIERMNQNMTILNDGKGHQPIYKVRTYEKAEKFAVGEHGNKVKKFVEAAKGTNLFFAVYESIQEDEATGKQVRKRTFATIPLNEVIKRKKQGLSVAPEDSNGNLPIFVLSPNDLVYLPTEEERNSGKVTQPLDRERIYKMVSCTGNRLFLVPYMVASPIYDKKEYTSLNKIELTDDKISIKEWCIPILIDRLGNISINY

SEQ ID NO: 23748 - protein, 1318 aa, unidentified
  REGION 1..1318: note = Cas Enzyme sequence
LIEELKSTGWIGNDFIFSETGPGSTFRTLRLRAKSASEEVTLGDLARILLQINKKRGYKSSRKMVSSDDGQAIDGMAVAKEMYDKGLTPGEYVYQRMLEGKYAIPEFYKSDLQEEFDRIWALQKSFHTELTDELYRKLSDRNKSQTWAICRDELGIQGLKSSFTGKERLKEAYRYRHLAATQEVNMEVLTCALQEINGQKASLSGLLSKISDRSKELYLNNLTVGQMLLKRIEDNPNNSLKNIVFYRQDYLDEFERIWTVQSKYHTELTHELKKRLRDIIIFYQRPLKSQKGLISLCELETKDIEVAIDGVKKMKNIGPRVCPRSSPLFQEFKIWQTINNIFVNGAALDDEDKSVIAKELMFKDKLKDSDLLKLLFKTTKGQSVNFKEVDGNRTMATLMKACFKIAENLGYDDIGLSKLSSEDQMVRIEGIFKEQGFKTGFLHFDSSLASPEFENQDSYRLWHLLYSYEGDKSASGNESLVKCIMDLCSMDEGSAKILASCTFLPDYGSLSAKAMRKILPYMKDGLEYTAACAMAGYRHSKRSLTKEELDTKEYSDRLSLLPKNTLRNPVVEKILNQMINVVNSVIDVYGKPDEIRIEMARELKKSAKEREEAQRDIASSTAESQKVIEILKGEPFFLQFPTRNDIIRYRLYQELAQNGFKTLYSNTYIPKDKLFSKEFDIEHIIPQALIFNDSFANKTLESRQCNLEKGKETAMDYVKSKYDETGVQTYCDRVNGLIGKGISKTKAKWLLMEGKDIPEDFINRELRDSQYIAKKAREILESLVKFVVPTTGSVTARLREDWQLVNVMQELNWEKYARLGLTGVREDKDGRRIPFIQDWTKRNDHRHHAMDALTIAFTRRQFIQYLNHLNSKIDVVSWDKKDLDLRDYDLEDIKFGNLSAGDRYGIVKALQDKFLYKDGNDKYRFVPPIPLDEFRRQAKEQLSDILISFKAKNKVCTRNVNVTKNKGGANRKAQLTPRGPLHNETIYGSSLEYVTKENEKIGSSFDTERITTVCKKKFRDALARRLEEFGGDPKKAFTGKNSPEKNPIWVDEHHSEQVPAKVRTVTMGQRFTGRKPIDATLKIEKVIDKRIREILQARLDEFDGKAAKAFSNLDENPIWLNKEKGIAIKRVTVSGPANPVPVRFKRDKDGKPIIDDAGKTIGADFVTPGNNHHIAIFRDSSGKLQEHPVSFLEATIAKSHGLDVIDRNYNKDEGWEFLFTLKQNEYFVFPNSETGFNPLDYDLTDPRNYAEISPNLYRVQSISTNDYFFRHHLETTSEKNNSLYGITWKRIRNASALEGLVKVRIDNLGRIVAVGEYD

SEQ ID NO: 23749 - protein, 1157 aa, unidentified
  REGION 1..1157: note = Cas Enzyme sequence
IVGMKNILGLDLGSSSIGWSVIRENSEEQELVAMGSRVVSLTAAELSSFTQGNGVSINSQRTQKRTQRKGYDRYQLRRTLLRNKLDTLGMLPDDSLSHLPKLQLWGLRAKAVTQRIELNELGRVLLHLNQKRGYKSIKSDFSGDKKITDYVKIVKTRYDELKEKRLTIGELFFRRLTENAFFRCKEQVYPRQAYVEEFDCIMNCQRKFYPDILTDETIRCIRDEIIYYQRPLKSCKYLVSRCEFEKRFYLNAAGKKTEAGPKVAPRTSPLFQVCRLWESINNIVVKDRRNEIVFISAEQRAALFDFLNTHEKLKGSDLLKLLGLSKTYGYRLGEQFKTGIQGNKTRVEIERALGNYPDKKRLLQFNLQEESSSMVNTETGEIIPMISLSFEQEPLYRLWHVLYSIDDREQLQSVLRQKFGIDDDEVLERLSAIDLVKAGFGNKSSKAIRRILPFLQLGMNYAEACEAAGYTHSNNYTKAENEAHALLDRLPAIKKNELRQPVVEKILNQMVNVVNALMEKYGRFDEIRVELARELKQSKEERSNTYKSINKNQRENEQIAKRIVEYGVPTRSRIQKYKMWEESKHCCIYCGQPVDVGDFLRGFDVEVEHIIPKSLYFDDSFANKVCSCRSCNKEKNNRTAYDYMKSKGEKALSDYVERVNTMYTNNQISKTKLQNLLTPVDKISTDFIDRQLRESQYIARKAKEILTSVCYNVTATSGSVTSFLRHVWGWDTVLHDLNFDRYKKVGLTEVIEVNHRGSVIRREQIKDWSKRFDHRHHAIDALTIACTKQAYVQRLNNLRAEEGPDFNKMSLERYIQSQPHFSVAQVREAVDRILVSFRAGKRAVTPGKRYIIRKNRKRISVQSVLIPRGALSEESVYGVIYVWEKDELGHVIQKQRAVMKYPITSINREMLDKEKVVDKRIHRILSGRLAQYNDNPKEAFAKPVYIDKECRIPIRTVRCFAKPAINTLVPLKKDDKGNPVAWVNPGNNHHVAIYRDEDGKYKERTVTFWEAVDRCRVGIPAIVTQPDTIWDNILQRNDISENVLESLPDVKWQFVLSLQQNEMFILGMNEEDYRYAMDQQDYALLNKYLYRVQKLSKGDYNFRYHTETSVEDKYDGKLNLELSRQMGKLKRVSIKSLLGLNPHKVHISVLGEIKEIS

SEQ ID NO: 23750 - protein, 1492 aa, unidentified
  REGION 1..1492: note = Cas Enzyme sequence
MKNILGLDLGSNSIGWSVVSKDEKDQLKRIEGIGSRIIPMSQDILGNFAVGNSVSQTAERTAFRSVRRLRERHLLRRERLLRVLHLIGFLPAHYDASIGWDKTDYRTFAKFKNVAEPKIAWKSEEQGNRTFIFGNTFKEMLSDFMREHPDLVAGDKKVPYDWTIYYLRKKALEKPIAKEELAWIILNFNQKRGYYQLRGEDEEQETNKSVDYYELKVVDVQAEEPQKGKKDIWYNVILENGWIYRRSSKVSLSEWIGKTKEFIVTTELNADGTPKKDKEGNDKRSFRAPMEGDWMLLKKRTETNIEKSRKTVGCYIYDTLLQNPDQKIKGKLIRTIERKFYKRELLEILQKQSEFHPEFQDKDVYRACLEELYPQNENRRLNLANGNLVHLLLEDILFFQRPLKSKKSLISNCRFEYRIFVKDGQKQIVPLKCIAKSNPLFQEFRLWQFIQDLRIYQREKEVGGKLQADVDVTSEFLPTEDAFVELFEWLNTRKEINQKVLLKYLVKKKPELYRWNYVEDKNYPCNETRALILERLEKCSLSVDFLTKENEMSLWHILYSVNDLGELTQALKSYALKHGLNDEFVRIFRKFPPFKNEYGAYSEKAIKKLLPLMRMGKYWNKDKIDGQTLQRIEKLLTGEYDEKIRDRVREKAIHLTEISSFKGLPAWLASYIVYDRHAEIGGIRHWKTPQDIEHYLVTEFKQYSLRNPIVEQVITETLRTVKDIWQQYGDFAEIHVELGRDMKNTAERRAQLAKQSAKNEDTNLRLKALLMELQNDPEIENVRPYSPGQLEILKIYEEGVLVAENELPDDIEKISKMNQPTQSELIRYKLWLEQKYRSPYTGEIIPLSKLFTPAYEIEHVIPQSRYFDNSLSNKVICESEINKLKDNALGYEFIRDHEGEIVQSNFGKKLRVFTLGEYEQFVKKNYSRNGNKMKKLLMEDIPDSFIQRQLNDTRYISKEVRTLLSNIVREEDEQEISKNVISCSGGITDRLKKDWGLNDVWNKIITPRFVRLNRMTESSKFGEWKNGHFQIQMPLELQKGFNKKRIDHRHHAMDALVIACATRNHINYLNNESALKDAKISRYDLKHSLCQKSKPDANGNYSWSFRKPWETFTQDTGEALKSVVVSFKKNVRIINKTTNYYQAYEYGKKVMKKQVKGDSWAIRKSLHKASVFGKVSLRRQKEVRLGVALENWNMLVDKELKEKIKQLITQYGREDVKLFLKYFKDRENKFNGKDISKVSIYYWDTENAAIRKPLDSSFTEKEIKTITDTGIQQILLNHLQAKGGQSDIAFSPEGLDEMNKNLIQLNEGKGHKPIYKVRIFEPIGNKFQVGETGNKSKKFVEADKGTNLYFAVYRTEDGKRTYSTVPLNEVAERQKQRLSPVPETDVKNSASLLFWLSPNDLVYVPTIEERENLQGFDWKNLTEEQTGRIYKMVSCTGDQAFFIQMSVANPIINKYEFSSLNKMGKTIDGEMVKELCWKLKVDRLGHIIECIR

SEQ ID NO: 23751 - protein, 1230 aa, unidentified
  REGION 1..1230: note = Cas Enzyme sequence
MKRILGLDLGVASIGWALVDEAEVRDEQSSILHLGVRVNPLTQGQDGEKDNFEKGKSVSTNSGRTQKRSARRNLQRFKLRRQALTSCLKKNNFISDEAILHEHGKGTTLETYRLRAKAATEQISLEEFARVLLMLNKKRGYKSSRKGSGNSFENAENDSRGIAGRSKELQQAGLTIGQYLMAKLDEDPSYSFKNKIFYRSDYLHEFEVIWNTQMRFHSELSYALKREIRDKIIFYQRGLKSQKGRVNYCELEQWHIVDEQGKEKTIGAKACPKSSPLFQEFKIWQILNNVMVINTGTEEHRRLEPEEKDILWNELNVKRKLTKKEALRLLFNGSKSYTINFEELDGNKTQAMLIAKYQKIIESKSSKSYNFAKMRGGQVMDVIRVEFDKSGFDSRILSFDSSLQGKELECQPMYRLWHLLYSYEENLSRLGVEGLVRKVAGLCRMDVESAGILAEVAFEQGYGSLSVKAMRRILPYMRAGYNYSEACGMAGYKHSRRSLTKDETESKRLVEHLSLLPHNSLRNPVVEKILNQMVNVVNEIVDCYGRPDEIRLEMSRSLKSSAKQREKMANDIRKNERENKVIDDILKKEFGLKYVGRNDRIRYKLYKELEKNGYKSLYSGTYISKDELFSKKFDIEHIIPQASLFDDSLSNKTLEARSVNIEKSSRTAFDYVREKYGDIEAGKYKSKVLNLPLPDVKKKKLLMPASEIPADFLARDLNNTGYITRKAVEMLESLVRTVVTTTGSITARLREEWQLVNVIKELDWDKYDKLGMTELIQGRDGQRIRRITGWTKRDDHRHHAMDALVIAFTNRNIINYLNNVKSHRDENNPQYKDDKHFAIPMPMFRAEAKKHLDAIIVSVKSKNKVMTSNVNKIKVRGGVARKVQLTPRGPLHDETVYRRVKKYSTNVVSVGSSFNKERVMTVADKKYRESLLARLDEYGGDAKKAFTGKNSLEKNPIFIYENNAVRRVPAKVKVVTFEYEYTTRKTVGPDLNVDKVVDKAVREALELRLEACEGKDRKEKVKKAFVNLDEVPIYLKNGKVVKRVSVYGINSAVALHDKKDFNGELILDSEKKTLPVDFVSTGNNHHAAVYRDSNGKLQVNVVPFFDVTARVIQGLSAIDKEYKKDEGWEFLFTMKRNEYFVFPDEEDNFDPNEIDLTDEGNYHEISKHLYRVQKLAVNDFWFRHHLETSINDDVRLKGKTYKRIQSAKNLEHVVKVRVNHIGQIVSVGEY

SEQ ID NO: 23752 - protein, 1433 aa, unidentified
  REGION 1..1433: note = Cas Enzyme sequence
MKKILGLDLGCNSIGWALVNEAENTEEISSIIKLGVRVNPLTVDEMQNFEKGKSITTNADRTLKRSMRRNLQRYKLRRDTLIEVLKEHGFITDSTLLSEHGNKTTFETYRLRAKAAVEEISLEKFARVLLMINKKRGYKSSRKAKGSEDGVLIDGMDVARKLYEEGLTPGELCLQILEAGKKNLPDFYRSDLQNEFDRIWNFQKQFNPELFCDAVKEEVRGKNRSQTWAILAKFFVWSEKESVWNEKEARTEERVKEYKLVGLKRDTKGNELKLENYRWRVQALSEQLNPEIVAIVLQEINGQISASSGYLGAISDRSKQLYFNRQTVGQYLMSELEKDPNVSLRNRVFYRQDYLDEFDRIWEKQAEFHEELTVELKKEIRDIIIFYQRRLKSQKGLISFCEFEKREVVVEEDGRKKNKTVGCRVIPRSHPLFQEFKIWQTLNDIEVFAWDKQSKCKKADKSSILFDNSEDALLVEGKRFLYQEEKELLAKELFVKESMKKAEVLKLLFENYQELDLNFKQIDGNHTGFALFSAYSKMIEKYGYEPVDFKKSADEIIEKLETIFTNLGWNTELLSIDLSKEDKELERQSYFRLWHLLYSFEGDNTPTGNGKLLEKIMQLCDVEKEYAVELANVSFQEDYGSLSAKAIKKILPYLKEGNQYDVACDYAGYRHSRSSLTKDEIENKILKDKLEILPKNSLRNPVVEKILNQMVNLINTLIDTYGKPDEIRVELARELKKNAKEREELTKSIARNTREHDEIRQLLRTEFGMMNVSRNDIIRYKLYEELKDNGYKTLYSNEYIPREKIFSKEIDIEHVIPQARLFDDSLSNKTLEYRAINIEKGNKTAYDFVKEKYGNDGLEKFLNRCETLFKDKRTKLRKLKMEEKDIPEGFIDRDLRNTQYISKKAFAMLNEISRRVVATTGSITDKLREDWQLVDLMKELNLPKYEKLGMVEMFEDKDGRKIKKITDWTKRNDHRHHAVDALTVAFTKDVFIQFYNNKNAAWMPASKEHANITGIKARYFENGKALAPMPLAQFRAEAKRHLENLLVSIKAKNKVITSNVNRTKNKNGENRKLQQTPRGQLHLETVYGSHRQYATKIEKVNAAFDAAKIATVSKLAYRNALLKRLEAFGNDPKKAFTGKNTLEKNPLYLDENQTEMVPEKVQTVEFETVYTILKPIDPNLSIDKVVDVKIRSVLEKRLKEYGGDAKKAFVNLDENPIWLNEAKGISIKRVSIRGISNAQSLHEKKDKDGNLILDKEGRKIPVDFVNTGNNHHVAVYKKPVLDKVGQMVLDEEGNPKYELDEVVVSFFDAVTRVNLDQPIIDKDYRRSEGWQFLFSMKQNEYFVFPNEKTGFNPKEVDLLNPENYAMISPNLFRVQKFTYKNYVFRHHLETTIKDTSSTLKGITWTDFRSSKGLDKIVKVRVDHIGQIVSIGEY

SEQ ID NO: 23753 - protein, 1545 aa, unidentified
  REGION 1..1545: note = Cas Enzyme sequence
MKKILGLDLGTNSIGWAVVNSENDENGDEKIKCIEAAGSRIIPMDAATLGDFAKGNTKSQTKERTDARGIRRLHERHLLRRERLNRVLSVMGFLPEHYDNALTRYGKFKDNKECKIAWKRNDDGKWTFIFMDSFNEMLSDFAACQPDWLAGGKKVPYDWTIYYLRKKALSRALTKQELAWLLLNFNQKRGYYQLRGEDEQSEDKGKLVEYYAVKVVDVKDTGEKKGKDTWFDVILENGMVYHRPAAEAPDWIGKTKEFIVTTDVEKDGTPKKDKDGNIKRSFRMPKEDDWTLIKKKTESDIDSSGKTVGEYIYDSLLADPTQKIKGKLVRTVERKYYKSELKRILDSQKRFIPELNDRTLYTACIEELYESNDAYRQSIASYDFTYLFVDNIIFYQRPLKSKKSLIDNCPYESRSYVDKETGEVKTAPVKCVAKSNPLFQEFRLWQFISNIRIYERQKIVDGHLKADVDVTGEFIKDEDDVVRLFDFLNDRKEIKQDTLLSTYFKVKKPKGKDSSYPYRWNYVEDKTYPCNETRALMLKGLKDAGVDEAFLDKTNEYRLWHILYSVDDKQEIKKAMATFVCKYNKDEENKRKDKNNKAITLDDRFVEAFSALPPFKKEYGSYSEKAIRRLLPLMRMGKYWNVEAIDAATRVRINNIIDGVYDETIMTRVREKAVNLTDVSHFRGLPLWLACYVVYNRHSEAKDVSRWNSPDDIDRYLSSFKQHSLRNPIVEQVITETLRTVRDIWKQYGRIDEIHVEMGRDLKNPADVRAKMSKRVAENENANLRIKALLTEFVNPDFEIDNVRPYSPSQQDMLRIYEEGVLESMDEVPDYISEIISKFSQTDEKKRPTHAEMIKYKLWLDQKYQSPYTGRTIPLARLFTDDYQIEHVIPKARYFDDSMSNKVICEAEVNQLKDRLLGYEFIKAHHGEKVSVSIGDPVTVLSVEEYEQLVQRNFRKNPMKMKKLLMDDIPDGFVERQLNDSRYISKVVKSLLSNMVREKDECEATSKNVITCNGAITDRLKREWGVSDAWNRIVLPRFERLNRITGTSQFTTPSANGHLIPDMPLNLQKGFNKKRIDHRHHAMDAIVIACTTRSHVNLLSNEAAMSKNKSTFYQLSHKLRRYESVIVTRNGETRTMSVAREFFKPWPTFTVDVEKALRNIIVSFKQNLRVINKTTNKYQCIENGKKKLKSQVKGDSWAIRKPMHKDTVYGEVNLRRIKEVQLKYAVANPKAVVDKDLKKKLMAMIELGFDLKKIKQYFEDNKDAWQDIDLKKIKVYYFTKETNDRFFATRFGNDIVSLFAKVDKQSKAKDIISSITDTGIQKILLRHLEANDNDVQKAFSAEGVEQMNRNIVELNNGKPHKPIYKVRKYEQADKFAVGVKGNKGSKFVEAAKGTNLFFAVYQKETVDSTTGDIIKKRIFDTIPLKTVIDRQKNMQTVAPEEKDGAKLLFVLSPNDLVYLPTDEEIGSGIINQPLERDRIYKMVSSSGNQCFYIKYNVASSIVDKFEFSPLNKMERALTGEMIKEICVPIKVDRLGNVIEINNQAL

SEQ ID NO: 23754 - protein, 1431 aa, unidentified
  REGION 1..1431: note = Cas Enzyme sequence
MKRILGLDLGSSSIGWALVNEAESKNERSSIVKLGVRVNPLTVDESINFEKGKSITTNADRTLKRSMRRNLHRYKLRREALIEVLKECKFITEDTILSENGNRTTFETYRLRAKALTEEISLEEFARVLIMINKKRGYKSSRKAGGAEEDTLIDGMDIARKLYDDSLTPGELCLQLLSAGKKVLPDFYRSDLQNELDRIWEKQKEYYPRVLTDALKEELRGKKRDAVWAICANAFVWKETYTEWNNEESKNEQIEKEHKLEGIYSKRKRDEAKKENLQWRVSGLKEKLSLEQLVIILQEINTQINNSSGYLGTISDRSKELYFNKQTVGQYLMDILDNNPNASLRNIVFYRQDYLDEFNALWEKQAEFHKELTGELKKEIRDIIIFYQRRLKSQKGLISFCEFESRQIEVKIDGKRKIRTVGSRVIPRSSPLFQEFKIWQILNNIEVTAVGNKNKQRMQNGSNEPDDTEQLELNSRRYLYQEEKELLAKELFVRDKMTKLEVLKLLFDNPEELDLNFKTIDGNKTGYLFFQAYSKMIEMSGHEPVDFKKPIEKIVEQVKSVFVLLNWNTDILSFDSNKELDKQSYYKLWHLLYSFEGDNTPTGNGCLVQKIMDSYGFEKEFAKILANITFQEDYGSLSAKAIHKILPHLKEGNQYDVACEYAGYRHSKSSLTKEEIANKVLKDKLEVLPRNSLRNPVVEKILNQMVNVINAIIEAYGRPDEIRVELARELKKNAKEREKLTKSIAETTKTHEAHKKLLQEEFGLKNVGRSDILRYKLYKELESRGYKTLYSNTYIPREKLFSKEFDIEHIIPQARLFDDSFSNKTLEARNVNIEKGNRTAYDFVKEKFGESGTDNSLDCYLNNIEALFVSGKISKTKYTKLKMTEQDIPGGFIERDLRNTQYIAKKALSMLNEISRCVVATSGSITDKLREDWQLVDVMKELNWEKYKALGLVEYFEDKDGKQIGRIKDWSKRNDHRHHAMDALTVAFTKEVFIQYFNNKNASLNPNTNEYAIKNKYFQNGRAIAPMPLNEFRAEAKKHLENTLISIKAKNKVITNNINKTKKRGGVNTKKQQTPRGQLHLETIYGCCRQYLTKEEKVNASFDVSKIATVSRSVYRDALLKRLQEHHNDPKKAFAGRNSLDKKPVWLDKEQIRKVPEKVKTVTFETIYTIRKEISPDLRVDKIIDSGVRKMLTSRLKEYRNDAKKAFSNLDEKPIWLNKEKGISIKRVTISGISNAQSLHVKKDKDGKPVLDGNGRNIPVDFVNTGNNHHVAVYRRPVIDKNGQMVIDENGNLKYELEEVVVTFFDAVTRVNLGQPIIDKDYKASEGWQFLFSMKQNEYFVFPNEKTGFNPKEIDLLDADNYGLISQNLFRVQKFTHKNYVFRHHLETTIKDTSSILRGITWIDFRSSKGLDSIVKVRVNHIGQIVSVGEY

SEQ ID NO: 23755 - protein, 1521 aa, unidentified
  REGION 1..1521: note = Cas Enzyme sequence
MTKNTRNIIGLDLGTNSIGWSWIQQLISPTPTQPSEYLFDGTPIIRMSGSRIIPMPGDVTGSFERGETISKTKDRTAKRMARRMNERFQLRRERLNRVLNIMGFLPEHYARALDRYGKLNEESNTTIAWRSKEDGKNEFIFYPSFLEMASIFKERHTDIQRIPLDWTLYYLRSKALHQAITKEELSWVLHSFNQKRGYYQSREDITEEDKTKKVEYIKGVVNSVEDTGEKAKGKKIYKVTFADGTEFTSTKSEAPLWIGRTREIIVTTSLDTSGKPKLDKEGKIIQSAKTPDEKDWTLIKIRTEATIDDSKLTVGEYIFHALLKNPETKIKGAHVSTIDRRFYINEINAILKEQEKYHEELRDKSLYEQCIKALYAQNEVRRNIIAPWSMKDLLTKDILFYHRPLKSKKSQISECPLEFHCYTDKDGETHRQGIKCIPVSHPLFQEYRIWQFISNLRIYEREHFDNGKHFTNVDKTSEFLTNEKKEELYEWLAEKDSVSQKTLLGHLGLKVERYHWNFPEEKTYPCGETRHLIQSRLKKANLQKAFHSLISDEQKECFERGLWHILYSISDYNELCKALKTFARKTGFTLEEQLLFVEAFSSCPPFKKDYGAYCKRAITKLLPLMRIGKFWHEESIDSTTKNRIEHLISGEECSGIDVRVREKVAKAGLCESIEQYQGLQQWLANYVVYNRHSEASEIIKWESPDELDNYIRSFKQYSLRNPIVEQVSLETLRVVRDLWAELQKEGQTIDEIHLEMGRDLKNTAEERSRIFRRNSENEDTNFRIKLLLEEFYANEKDIKDVRPYSPSQQELLRIYEEGVWQQEKDIPQDIKDIKKRISNDKDIKDITPNDIQRYRIWMDQKYCSPYTGKTIPLSHLFTTDYEIEHVIPRSRYFDDSYNNKVICEAAVNKDKNNQLGMEYIMAAGGKTIELGNGKNVQILKKEEYVELVDKIFGNNTRKRNIMLADEITEEFSHRQLNDTRYIARFMKGILSNIVREKNADGTLEPEETSKNLIVCSGRITDRVKQDWGLNDIWNHIITPRFERLNTKTSSDKFGEYVCKEGKRYFQTRVPLNLQKGFNKKRIDHRHHAMDAIAIACVNRSIVNYLNNAAANQTEREDLRRAVCIPERNGQTKRQLRSPWHCFARDAENALRQIVVSFKQNLRIATKATNSYECFDTASGKKIRKHQSNREHYAIRKPLHKDSVYGEVILPSIASVNLKKALLKAERIIDKRLKDKIFELRKLYNYSNKQIEEHLTKVCINRPEWKNYDFKKIAVRILSNDADATHIVAIRKPLDETFDKEKIKAITDTGIQKILLNHLSRYADDPKKAFSPEGIEDMNANIASLNGGKQHLPIYKVRVSEKDNGGYFPIGQKGNRPKKYVTTAKDTNLFFAVYADSKGKRSYKTIDLRTAIECRKQGLSVAPSVNEKGDKLLFTLSPNDLVYMPSEGEEANGFAIDNNLNKEQIYKMVSATNNRCFFIPHTVADFISRGQEYNSVNKIELTEDGRSIKEHCVPLKVNRLGK
